United States Patent Application Publication US 2013/0267429 A1 - sequence listing, part 22

SEQ ID NO: 504539 - DNA, 52 bp, Artificial
  Synthetic oligonucleotide
aggggagcccgcccgtgactgaccggtcctcggaacccacgccgtcggtcac

SEQ ID NO: 504540 - DNA, 52 bp, Artificial
  Synthetic oligonucleotide
gtggagcgggtagcgacaggctggttcttcagaagctcaccgttcgcattgg

SEQ ID NO: 504541 - DNA, 51 bp, Artificial
  Synthetic oligonucleotide
aacatcagcgcttggctcggcccgtccatctgcggatcctgttatgaggtc

SEQ ID NO: 504542 - DNA, 51 bp, Artificial
  Synthetic oligonucleotide
ttccgggccgatttgtgcatcccgcaccccgaagtatgcggctgctaaggg

SEQ ID NO: 504543 - DNA, 51 bp, Artificial
  Synthetic oligonucleotide
aaaaccgcacggtcagagggcacaatcaccaggctcgggtcagcctcaatt

SEQ ID NO: 504544 - DNA, 51 bp, Artificial
  Synthetic oligonucleotide
tgcccaccgctatttgaaggcacgcgcatagaggggaggcgcaaaagtaca

SEQ ID NO: 504545 - DNA, 51 bp, Artificial
  Synthetic oligonucleotide
tgaccgcaaggcgagggctgggcagatatgcgtacagcgcatacagtgtgg

SEQ ID NO: 504546 - DNA, 51 bp, Artificial
  Synthetic oligonucleotide
atgtggcacctcaaccagctacccgccgaaggtaccatcatcacgtactgc

SEQ ID NO: 504547 - DNA, 51 bp, Artificial
  Synthetic oligonucleotide
ggtgggaacatcggtgaccaaagggacattgcccaggatcttccgtttggc

SEQ ID NO: 504548 - DNA, 51 bp, Artificial
  Synthetic oligonucleotide
gggaatttcccacaccttgcccaagggtagacaggcctccgtcggccacag

SEQ ID NO: 504549 - DNA, 51 bp, Artificial
  Synthetic oligonucleotide
ggatccggatgctctcgaagtggggcggggagttgaaacgggccgagtccg

SEQ ID NO: 504550 - DNA, 51 bp, Artificial
  Synthetic oligonucleotide
cgtgaagtcgcaggagcagacactgtcgcaaccctgggccgccaagtggga

SEQ ID NO: 504551 - DNA, 51 bp, Artificial
  Synthetic oligonucleotide
gaagaaggcctagctcgccgtgtcagagaaaacgcctccccgcgggaacaa

SEQ ID NO: 504552 - DNA, 50 bp, Artificial
  Synthetic oligonucleotide
accgcctgaactcacggtttgagaggtaggaaaatgctgctcgacataga

SEQ ID NO: 504553 - DNA, 50 bp, Artificial
  Synthetic oligonucleotide
tcgtgtacacatcggtagaccgccgcagctgggattttaaaggcgaactt

SEQ ID NO: 504554 - DNA, 55 bp, Artificial
  Synthetic oligonucleotide
cgtacaggtcgaagagtgctgaccgtgcctgcatgaccgcacattgtgacaggcc

SEQ ID NO: 504555 - DNA, 55 bp, Artificial
  Synthetic oligonucleotide
tgttcgttccgcacgtcttcagtcccatgacagcggatcgcacttgacgtcccgg

SEQ ID NO: 504556 - DNA, 55 bp, Artificial
  Synthetic oligonucleotide
tgcgtccgccccgaatcagggtcgtcagaccctcaagcccggaatgtgccttcta

SEQ ID NO: 504557 - DNA, 55 bp, Artificial
  Synthetic oligonucleotide
gaacggaaaggcactgcattgatccacgaatgatttctcgcatctgcggatccgg

SEQ ID NO: 504558 - DNA, 55 bp, Artificial
  Synthetic oligonucleotide
gacgaagatgatgtcaccgccggccgctactgtcaccggtccgtgactgttaccg

SEQ ID NO: 504559 - DNA, 55 bp, Artificial
  Synthetic oligonucleotide
gacgcgagatcgcttgtgggcctaaggtgagattcggtcaattcatacctgttcg

SEQ ID NO: 504560 - DNA, 55 bp, Artificial
  Synthetic oligonucleotide
gacggccgccatattaagcgtcatgttgacgataataccgtgcatagttatcgtc

SEQ ID NO: 504561 - DNA, 55 bp, Artificial
  Synthetic oligonucleotide
gactgccggccacgtttcaactacgggcgggatccgtacgagctcgaggtccatc

SEQ ID NO: 504562 - DNA, 55 bp, Artificial
  Synthetic oligonucleotide
gccacccgactggcagctcgctgattgttcttcgaccgggccattgactcctcgt

SEQ ID NO: 504563 - DNA, 55 bp, Artificial
  Synthetic oligonucleotide
gccagggttccggcaagtgacgatatggccgtttcagtcgagtccgagtagttgg

SEQ ID NO: 504564 - DNA, 55 bp, Artificial
  Synthetic oligonucleotide
gccgacgaactctaccgctatctgcggaagggtaagcgggttcagcgacgcagtt

SEQ ID NO: 504565 - DNA, 55 bp, Artificial
  Synthetic oligonucleotide
gcgcctttccagatcgcccgcatgttctcagaatcgcattactgggacgcctgcg

SEQ ID NO: 504566 - DNA, 55 bp, Artificial
  Synthetic oligonucleotide
gcgcggtgttacggatcgccggtgcacataagatcacgatgggtcgggcttgcct

SEQ ID NO: 504567 - DNA, 55 bp, Artificial
  Synthetic oligonucleotide
ggtgcactaagggatcgtcatagcggtcaagtggggtatcgaactccatccggta

SEQ ID NO: 504568 - DNA, 55 bp, Artificial
  Synthetic oligonucleotide
gtcgttcaggtgttggcgtgcacgttacccgaaagtgtgaagtattactagccga

SEQ ID NO: 504569 - DNA, 55 bp, Artificial
  Synthetic oligonucleotide
gttctggggcccgtcggcgaaccacaggtagcacgtaccgtcgcggaccataatt

SEQ ID NO: 504570 - DNA, 55 bp, Artificial
  Synthetic oligonucleotide
tccaggacaggaccgttgatggcgtgtgtccgctggctggtcttctgccggggca

SEQ ID NO: 504571 - DNA, 55 bp, Artificial
  Synthetic oligonucleotide
tcctcagcagaaggcgtccccatgcgaacgagatcccgtagcctcctcgtcggat

SEQ ID NO: 504572 - DNA, 55 bp, Artificial
  Synthetic oligonucleotide
acgttgccgtcggattcgccgcagtagctcgtcggattcaccgtcggtcgtgggg

SEQ ID NO: 504573 - DNA, 55 bp, Artificial
  Synthetic oligonucleotide
acgttgtcggcgaaatccatcattccggacactcccggcttcccgggctctcgac

SEQ ID NO: 504574 - DNA, 55 bp, Artificial
  Synthetic oligonucleotide
agtgctgctcggggttctcccgtcgatcgctacggagcgtgacggtacggggatt

SEQ ID NO: 504575 - DNA, 55 bp, Artificial
  Synthetic oligonucleotide
ataccaagtgcactacgcaacatgatcgtgttcatgagtgttgctccattcgggg

SEQ ID NO: 504576 - DNA, 55 bp, Artificial
  Synthetic oligonucleotide
ttgtccggttccgctgctctattccccaggtaggtggaacgatggctgtcgtggg

SEQ ID NO: 504577 - DNA, 55 bp, Artificial
  Synthetic oligonucleotide
atgcgccggggaccgggattgctggcgtggggactcgcccgaccgttcctggcat

SEQ ID NO: 504578 - DNA, 55 bp, Artificial
  Synthetic oligonucleotide
atggcgtgactgggccacgaacgctctgcaacgcctactcacgacgttgccgtag

SEQ ID NO: 504579 - DNA, 55 bp, Artificial
  Synthetic oligonucleotide
attaacacgcccgtagcaaccacctgtggcaaaccgcaccggctcgccgtcaggt

SEQ ID NO: 504580 - DNA, 55 bp, Artificial
  Synthetic oligonucleotide
caggacaatagtggatacaaacggacagaacatcacaccaatttagcgatgcggc

SEQ ID NO: 504581 - DNA, 55 bp, Artificial
  Synthetic oligonucleotide
ccggggctgatgtgatcgatcgagaaggcgtctcacggctattggctgatggatg

SEQ ID NO: 504582 - DNA, 55 bp, Artificial
  Synthetic oligonucleotide
ccgtcgtttcgtttcggcccctgccgggagcgtccgagtagcctgcacagcgggg

SEQ ID NO: 504583 - DNA, 55 bp, Artificial
  Synthetic oligonucleotide
cctcttcccgagccgtgtcagtgacctctgcgactgtcgagtgacagaatctgga

SEQ ID NO: 504584 - DNA, 55 bp, Artificial
  Synthetic oligonucleotide
cgaacgttagcgttcacatccgtgtccggcatgttacggccccaggccccatcaa

SEQ ID NO: 504585 - DNA, 55 bp, Artificial
  Synthetic oligonucleotide
cgcaaaagtgccggatcaccgattaatgccacacacgccggtgtgaccgagtcct

SEQ ID NO: 504586 - DNA, 55 bp, Artificial
  Synthetic oligonucleotide
cggaacgtagtagtcaccaggcggcacgaccgcatacagcagtccgatcacggtc

SEQ ID NO: 504587 - DNA, 55 bp, Artificial
  Synthetic oligonucleotide
cggatatcgacgctcatcacagttagttttcacgcctgccaaaacacgacttgtc

SEQ ID NO: 504588 - DNA, 55 bp, Artificial
  Synthetic oligonucleotide
cggtgggtaacgtgccctggagaggcgggaccaaagacccgtgctcagtagatct

SEQ ID NO: 504589 - DNA, 54 bp, Artificial
  Synthetic oligonucleotide
gcgccttagtcgatcggttcagggagaatgtgcgggtgatttacgccgtcatcc

SEQ ID NO: 504590 - DNA, 53 bp, Artificial
  Synthetic oligonucleotide
ttgggacgattcttcatgcctggcctccccgtggcctgtccgcgctatgcatt

SEQ ID NO: 504591 - DNA, 53 bp, Artificial
  Synthetic oligonucleotide
tttccgtcgagtcaggtagactcgctgacgtgacatgctcgtatcgatggttt

SEQ ID NO: 504592 - DNA, 52 bp, Artificial
  Synthetic oligonucleotide
cttagctgacggttaagacgcgcttacgggaaactgtcctgcccacgacatg

SEQ ID NO: 504593 - DNA, 52 bp, Artificial
  Synthetic oligonucleotide
tttacgttgctggtgtgagagctgcacgcattcatgagtacggcgatgcttc

SEQ ID NO: 504594 - DNA, 51 bp, Artificial
  Synthetic oligonucleotide
cagctggatcggtcgagcaggcaacggataccgattcgactacctgcattc

SEQ ID NO: 504595 - DNA, 51 bp, Artificial
  Synthetic oligonucleotide
atctcggtaggcgtcctgaacctcgtcggacccctccacgcctttccggtt

SEQ ID NO: 504596 - DNA, 50 bp, Artificial
  Synthetic oligonucleotide
ctggaaatcggttttcgaaaagtgcagtctctcgtggatcagccttttcg

SEQ ID NO: 504597 - DNA, 50 bp, Artificial
  Synthetic oligonucleotide
acacagcgtgggccgggacgaaaggagatggaaagtctcaaatcacgtgt

SEQ ID NO: 504598 - DNA, 60 bp, Artificial
  Synthetic oligonucleotide
caaatgggtgaagaagtcagtgagcaactcgagttcgtcccagcacaaatccgggtgctt

SEQ ID NO: 504599 - DNA, 60 bp, Artificial
  Synthetic oligonucleotide
actgtactgggatagcacaggcttttgcttgtggtacaagcggcttgaaaaagacaagtt

SEQ ID NO: 504600 - DNA, 56 bp, Artificial
  Synthetic oligonucleotide
ctagattcatttagtgtgatttgtttagggatttgcattattgactcctgaagccg

SEQ ID NO: 504601 - DNA, 56 bp, Artificial
  Synthetic oligonucleotide
catcaagaagagattctacagttttgggctgactacattatcgatattttacgtcg

SEQ ID NO: 504602 - DNA, 55 bp, Artificial
  Synthetic oligonucleotide
gcgatgtattacccatcgctaagcttccaccaactgaagaacctgctgaggtcat

SEQ ID NO: 504603 - DNA, 55 bp, Artificial
  Synthetic oligonucleotide
gcctcaggtcgtcctgtggcgttgctaacccagtatctacgcagccaagcctaac

SEQ ID NO: 504604 - DNA, 55 bp, Artificial
  Synthetic oligonucleotide
gccgtcagcaaaactatcatgcctgacaaaattgatgcagtggctatcgtgacgc

SEQ ID NO: 504605 - DNA, 55 bp, Artificial
  Synthetic oligonucleotide
gcattcgcttatcccaacgactatttgccaatcttgggcaagatgcccttgtggt

SEQ ID NO: 504606 - DNA, 55 bp, Artificial
  Synthetic oligonucleotide
gcacgaggattttatggtgatatagctgcaattggaaatcaaatagttgggcgct

SEQ ID NO: 504607 - DNA, 55 bp, Artificial
  Synthetic oligonucleotide
gcacaaacagtaggctttgcgccttggcagatcggtaatcgcgtgctacgaacag

SEQ ID NO: 504608 - DNA, 55 bp, Artificial
  Synthetic oligonucleotide
gatgaaccattactacgccaaccgaaaactctcagaatttgggtagctccgtggg

SEQ ID NO: 504609 - DNA, 55 bp, Artificial
  Synthetic oligonucleotide
gataacaggaacttcttgtgtaagttcaccttttaactcttttgcccacactcgc

SEQ ID NO: 504610 - DNA, 55 bp, Artificial
  Synthetic oligonucleotide
gagtcgcttgcattgagtaatgcttttcttacgttgtaccaattacgtctaggaa

SEQ ID NO: 504611 - DNA, 55 bp, Artificial
  Synthetic oligonucleotide
gaggtctcaaaacgctttaaggtgagccgttcaactgtttacagagcgatcaaag

SEQ ID NO: 504612 - DNA, 55 bp, Artificial
  Synthetic oligonucleotide
gaggccggcctagatttggacccagttctgacaaaacaagcaaagacgctaagat

SEQ ID NO: 504613 - DNA, 55 bp, Artificial
  Synthetic oligonucleotide
gagctcaggtcatgtaatcatggcttagtgcttattcgtaattccgctatagacg

SEQ ID NO: 504614 - DNA, 55 bp, Artificial
  Synthetic oligonucleotide
gtggcaggcggtcgtggtcaaaccgagattatcttatctttggtggatgaggcgt

SEQ ID NO: 504615 - DNA, 55 bp, Artificial
  Synthetic oligonucleotide
gacggcttaaagtaatgatcgcaaatgtctttgaatgcggaagttactcaggttt

SEQ ID NO: 504616 - DNA, 55 bp, Artificial
  Synthetic oligonucleotide
cttagcactacgatccgcatcagaataaacagcgacggtgctgacacccagacgc

SEQ ID NO: 504617 - DNA, 55 bp, Artificial
  Synthetic oligonucleotide
ctggtacagagctatccgacaactctaaaatggttttatcctcggcatgccaatt

SEQ ID NO: 504618 - DNA, 55 bp, Artificial
  Synthetic oligonucleotide
ctcatttgctacgtacttgatttagaccgtttggaaacctgcttatgactcgcgc

SEQ ID NO: 504619 - DNA, 55 bp, Artificial
  Synthetic oligonucleotide
gtgcgggcttatattaaccgggctggaaccaaagtcactttacacatatgactta

SEQ ID NO: 504620 - DNA, 55 bp, Artificial
  Synthetic oligonucleotide
ggttgacagctcccaagactgcggataatgtcctagacggtaaccgtgctcgtcc

SEQ ID NO: 504621 - DNA, 55 bp, Artificial
  Synthetic oligonucleotide
ggtcacaaaacctgataatacataagcaatccctatcgccaataagccaactgga

SEQ ID NO: 504622 - DNA, 55 bp, Artificial
  Synthetic oligonucleotide
gggtatgaacctgcctgcacacttcaactttatggcagtcggtttaccggttctg

SEQ ID NO: 504623 - DNA, 55 bp, Artificial
  Synthetic oligonucleotide
gtatcgtacagaagcgttctccgttggcttcaaggcataaaagtacaagctgcaa

SEQ ID NO: 504624 - DNA, 55 bp, Artificial
  Synthetic oligonucleotide
ggggttaataatgtatgaatctggaaacccttgtgcacggaaaagttcacgaggt

SEQ ID NO: 504625 - DNA, 55 bp, Artificial
  Synthetic oligonucleotide
ggggctgttcgggcaagctctgacatccactaagtcctaaggtcaacccgagtgt

SEQ ID NO: 504626 - DNA, 55 bp, Artificial; identical to SEQ ID NO: 207278
  Synthetic oligonucleotide

SEQ ID NO: 504627 - DNA, 55 bp, Artificial
  Synthetic oligonucleotide
ggctgagtaatagaaaggcaaacatggtcacaagaatgactcgtgtagctcggaa

SEQ ID NO: 504628 - DNA, 55 bp, Artificial
  Synthetic oligonucleotide
gtggatagctttctgtaccctgagaatacttacccatttctggtagttcggaaag

SEQ ID NO: 504629 - DNA, 55 bp, Artificial
  Synthetic oligonucleotide
ggcagggactgattaataataaaaccccatgcaccatctttggtatggcgacaga

SEQ ID NO: 504630 - DNA, 55 bp, Artificial
  Synthetic oligonucleotide
ggactcattaccgtggtaatccactgacctaataccgcagacaaaccgtggttga

SEQ ID NO: 504631 - DNA, 55 bp, Artificial
  Synthetic oligonucleotide
gtcaaggtgcattgaatgcgatcgaaaacgagatcagctttgtgccggactgggg

SEQ ID NO: 504632 - DNA, 55 bp, Artificial
  Synthetic oligonucleotide
gcttcaccgatacgttctcttgcttctaagatctttgattcctgtatcgtctcaa

SEQ ID NO: 504633 - DNA, 55 bp, Artificial
  Synthetic oligonucleotide
gctgcaatgatggccttagaccagtacaaagaactgatagcagcaaaatatgctc

SEQ ID NO: 504634 - DNA, 55 bp, Artificial
  Synthetic oligonucleotide
gcgttgaatgcattacaacaacatatcgactactgggaggctcattacaagacaa

SEQ ID NO: 504635 - DNA, 55 bp, Artificial
  Synthetic oligonucleotide
gcgtattacggatctagaattgttgagattaagtgccttacaaacgttgcctcag

SEQ ID NO: 504636 - DNA, 55 bp, Artificial
  Synthetic oligonucleotide
gtcagagcatgagtccactcatatctgcacctacaggcagtcgcttgtgcatgag

SEQ ID NO: 504637 - DNA, 55 bp, Artificial
  Synthetic oligonucleotide
gtggatggcttcaatgtaacgaagaagaacgggacttggccgtaaaacgtggcgg

SEQ ID NO: 504638 - DNA, 55 bp, Artificial
  Synthetic oligonucleotide
gcgcggtatgcgtgttctatttgtagacatggataaacaaggtaatagtggtttc

SEQ ID NO: 504639 - DNA, 55 bp, Artificial
  Synthetic oligonucleotide
ccaattgcgggcgaatatgtcctagaggtgtcaagtccgggttttgatcgtcctt

SEQ ID NO: 504640 - DNA, 55 bp, Artificial
  Synthetic oligonucleotide
catcccaccttgcgtatccaaacttctaatttggtgtgcaatgttgtcggagaag

SEQ ID NO: 504641 - DNA, 55 bp, Artificial
  Synthetic oligonucleotide
cagtctcatcccaatagccttttagtgaggcattaccacccaccgtggcataaaa

SEQ ID NO: 504642 - DNA, 55 bp, Artificial
  Synthetic oligonucleotide
cagccacgggcaacatgaccttacgcgctgtgttcccaaatcctgatggtaagct

SEQ ID NO: 504643 - DNA, 55 bp, Artificial
  Synthetic oligonucleotide
cacaagcgtgccgtaagcgtgccaaagtcatatctgcaccgatgatgtgcatgga

SEQ ID NO: 504644 - DNA, 55 bp, Artificial
  Synthetic oligonucleotide
tctatatacaacagtggccagtaattttgagctggttcatctacagctagatcgc

SEQ ID NO: 504645 - DNA, 55 bp, Artificial
  Synthetic oligonucleotide
caaacaaagtcgtttcaaggtctgaaatcgaaacaccaagtttatctgctaatcg

SEQ ID NO: 504646 - DNA, 55 bp, Artificial
  Synthetic oligonucleotide
atcggcgctcatacgcacaaattcaccatcgtgacgaacactaaccatctcttcg

SEQ ID NO: 504647 - DNA, 55 bp, Artificial
  Synthetic oligonucleotide
tgaggtaaatgccaaccaaatcaccattaagacaatggcaactggtgaacaacgc

SEQ ID NO: 504648 - DNA, 55 bp, Artificial
  Synthetic oligonucleotide
agcgaggttgctcaagggtagaatctcctgaaaactctcccaacaccccaacgac

SEQ ID NO: 504649 - DNA, 55 bp, Artificial
  Synthetic oligonucleotide
agcagcacctaagtgcgtcatgtccatgacaatgtaatcaccattgggaccacaa

SEQ ID NO: 504650 - DNA, 55 bp, Artificial
  Synthetic oligonucleotide
tgctcttgcttgctattttgacctggtattgaccgatattcgtgaggatgtagct

SEQ ID NO: 504651 - DNA, 55 bp, Artificial
  Synthetic oligonucleotide
ttattggtcattaagctgagacagtccggcacagaagtgtggcaatctaccgtga

SEQ ID NO: 504652 - DNA, 55 bp, Artificial
  Synthetic oligonucleotide
acacctgtgacacgttccaacgatacaccatgcgacactttcaatgacacaccag

SEQ ID NO: 504653 - DNA, 55 bp, Artificial
  Synthetic oligonucleotide
aaggacgacctaaacttggtccctgttgctgtagaacgaccaacgctgcgagtac

SEQ ID NO: 504654 - DNA, 55 bp, Artificial
  Synthetic oligonucleotide
aacgctggtagtatcaaagttactaatgacgctgttgtgcaagcgggagagctgg

SEQ ID NO: 504655 - DNA, 55 bp, Artificial
  Synthetic oligonucleotide
aaacccttgagccgcagtatagttgttgtatgtcgcctctgctgttagttgaaac

SEQ ID NO: 504656 - DNA, 55 bp, Artificial
  Synthetic oligonucleotide
ttttagtggggtgggtatgtcttcaggtgtagaactttctcattatgttccaacg

SEQ ID NO: 504657 - DNA, 55 bp, Artificial
  Synthetic oligonucleotide
ctactcaaatcaaagctaacagtagacttgccacgctcacggtaagttgctgtgc

SEQ ID NO: 504658 - DNA, 55 bp, Artificial; identical to SEQ ID NO: 207667
  Synthetic oligonucleotide

SEQ ID NO: 504659 - DNA, 55 bp, Artificial
  Synthetic oligonucleotide
gtgtgacttgataattgactgtcgctgtcacaaagggcgaccaaccagaatcggc

SEQ ID NO: 504660 - DNA, 55 bp, Artificial
  Synthetic oligonucleotide
cggctgcggtagcgctactcgtttatcaggtcatcaagcgaaaatctcgtccaat

SEQ ID NO: 504661 - DNA, 55 bp, Artificial
  Synthetic oligonucleotide
cggcacgcttttcatgctcgcctgcaccaatgaccaattgaattggacgagtcat

SEQ ID NO: 504662 - DNA, 55 bp, Artificial
  Synthetic oligonucleotide
taccttcacgattaatataggcgtaatggcttgcccctcgacttcccgaagaacc

SEQ ID NO: 504663 - DNA, 55 bp, Artificial
  Synthetic oligonucleotide
cgctcttaaagcgtttatcaaaacgtgctgacgtatcttgcctaaactctgtcaa

SEQ ID NO: 504664 - DNA, 55 bp, Artificial
  Synthetic oligonucleotide
cgctcgcccaaagtggtaatgcgtgcgccatgtacttgaatatttagctcgctaa

SEQ ID NO: 504665 - DNA, 55 bp, Artificial
  Synthetic oligonucleotide
cgaagacacacggggatatgtggaacaccaattattctattaaagctttacagag

SEQ ID NO: 504666 - DNA, 55 bp, Artificial
  Synthetic oligonucleotide
cgaacctactgcaccgacataacccttactctctttccaagcgatagccttaaga

SEQ ID NO: 504667 - DNA, 55 bp, Artificial
  Synthetic oligonucleotide
cctttctacgagctaatgccacatctgtttcagtgatcactgttcttttcgctgc

SEQ ID NO: 504668 - DNA, 55 bp, Artificial
  Synthetic oligonucleotide
cctgccgctacatattgccaccctaacctgtgtgcgtgctggcaaatccatgcca

SEQ ID NO: 504669 - DNA, 55 bp, Artificial
  Synthetic oligonucleotide
cctaagagtgttattactggaattgatgccgtttctccaaatagaagcgcaaagt

SEQ ID NO: 504670 - DNA, 55 bp, Artificial
  Synthetic oligonucleotide
ccgtcaggggatgactttcggcagtggcttacagtggaaaggcaaaatagaaagc

SEQ ID NO: 504671 - DNA, 55 bp, Artificial
  Synthetic oligonucleotide
tcccagcaacagtgataagtccgaatactataatagacgcaccgcccaataaggc

SEQ ID NO: 504672 - DNA, 55 bp, Artificial
  Synthetic oligonucleotide
cccctgtaacggtttagctcgaatcttttgattttcactatcgctacgttgcacc

SEQ ID NO: 504673 - DNA, 55 bp, Artificial
  Synthetic oligonucleotide
cccataacaccttgtgtaccagaactagatgcttcgaatccacttcccacaagag

SEQ ID NO: 504674 - DNA, 55 bp, Artificial
  Synthetic oligonucleotide
ccatgcgatttaatcactatctcaacttccagggtgaaactgaagccgcttttac

SEQ ID NO: 504675 - DNA, 54 bp, Artificial
  Synthetic oligonucleotide
tgagattaaagccaagtgtactgagcagtctgaggcagttattgctaacactgc

SEQ ID NO: 504676 - DNA, 54 bp, Artificial
  Synthetic oligonucleotide
ttccaaagatttaggggttaatggagctgtatataaaattcaagagccggatgc

SEQ ID NO: 504677 - DNA, 54 bp, Artificial
  Synthetic oligonucleotide
gcgtaggatattcagtagaggatcttttgaaagtaggcgcagcgaactctaaaa

SEQ ID NO: 504678 - DNA, 54 bp, Artificial
  Synthetic oligonucleotide
gagcaacattatacaggcaagcctattagccttgagtttgccgatattcctgta

SEQ ID NO: 504679 - DNA, 54 bp, Artificial
  Synthetic oligonucleotide
aaaagtgaccacaattgcaatgttcgtttcagcgctggcaataacaggctgtca

SEQ ID NO: 504680 - DNA, 54 bp, Artificial
  Synthetic oligonucleotide
agtcatgctcaatctcagagcgataggtcaaagcggcttttagggcaatttcgg

SEQ ID NO: 504681 - DNA, 53 bp, Artificial; identical to SEQ ID NO: 206395
  Synthetic oligonucleotide

SEQ ID NO: 504682 - DNA, 53 bp, Artificial
  Synthetic oligonucleotide
cggcttcacttggagaacatggaccaggaccaatgaccagatacttgggttgc

SEQ ID NO: 504683 - DNA, 53 bp, Artificial
  Synthetic oligonucleotide
cggatacggcagaccgtaccactgccctgtatcgtcatatctccaatgcaaaa

SEQ ID NO: 504684 - DNA, 53 bp, Artificial
  Synthetic oligonucleotide
attctctgaaaactcgaggtatcttacttgatgggacaacacaaaacagccac

SEQ ID NO: 504685 - DNA, 53 bp, Artificial
  Synthetic oligonucleotide
accgacatttgaagcggttaagatatgccccaaatcctgccccaaaccgtccg

SEQ ID NO: 504686 - DNA, 52 bp, Artificial
  Synthetic oligonucleotide
ttttgggatcaaccatgtagggtttagttggctgtacaaagaaatgttgctc

SEQ ID NO: 504687 - DNA, 52 bp, Artificial
  Synthetic oligonucleotide
aatgctaaatgtggcaggtccggtaatcttttgtctgagatgggcaatcacc

SEQ ID NO: 504688 - DNA, 51 bp, Artificial
  Synthetic oligonucleotide
caagctatgggtaataacccggaacaagcagctcagcaaacagaaggctca

SEQ ID NO: 504689 - DNA, 51 bp, Artificial
  Synthetic oligonucleotide
ccgtagtaaattttggcggttgctatattttggcgcacgccttgaccctca

SEQ ID NO: 504690 - DNA, 51 bp, Artificial
  Synthetic oligonucleotide
gtgcaacgtttaagggtattcctgatctagttgattctaaagttaagcagg

SEQ ID NO: 504691 - DNA, 50 bp, Artificial
  Synthetic oligonucleotide
agaggcaaccgcagatatcgtaaccgaatccccagatgtatcagtcattg

SEQ ID NO: 504692 - DNA, 50 bp, Artificial
  Synthetic oligonucleotide
ttgcggattggtaactcaaaacatgagctctatgatgagtacataaggga

SEQ ID NO: 504693 - DNA, 50 bp, Artificial
  Synthetic oligonucleotide
ttttatccactcaaaaccttgcaccataaaggcttgagctaaaagcaccg

SEQ ID NO: 504694 - DNA, 55 bp, Artificial
  Synthetic oligonucleotide
ttccccacagtgccatatcgccactgaagagaagttgtactgcgtcttgggtcgt

SEQ ID NO: 504695 - DNA, 55 bp, Artificial
  Synthetic oligonucleotide
taagttagcgatgaacggcgcttcaggttggttaagtacaaattgcactgtgtac

SEQ ID NO: 504696 - DNA, 55 bp, Artificial
  Synthetic oligonucleotide
gtgataaggtttaagctgaagttaatagggctggaacaaggctaactgacctgcg

SEQ ID NO: 504697 - DNA, 55 bp, Artificial
  Synthetic oligonucleotide
ggtattggccacctttaccgttaaataaagttagcgtatcaccagttgtcatgcg

SEQ ID NO: 504698 - DNA, 55 bp, Artificial
  Synthetic oligonucleotide
gcaggcggcgaatggctagcaactggtagctactctcctgaatctcaaatacgtg

SEQ ID NO: 504699 - DNA, 55 bp, Artificial
  Synthetic oligonucleotide
gcaccgatacctgaagatttgtcagtggtgcactacgtaatgaagggtcgatatc

SEQ ID NO: 504700 - DNA, 55 bp, Artificial
  Synthetic oligonucleotide
gaacaacaattttatcccattcaaggatcacgcgcgcatgttcatcttcacgacg

SEQ ID NO: 504701 - DNA, 55 bp, Artificial
  Synthetic oligonucleotide
ctttgtgttcgttatggaacgcacgtaatttgtctttacgacgtgttactagcgt

SEQ ID NO: 504702 - DNA, 55 bp, Artificial
  Synthetic oligonucleotide
cttacaacgcagataaaagctgtggtgcagattacctgatccaccctgcaatctc

SEQ ID NO: 504703 - DNA, 55 bp, Artificial
  Synthetic oligonucleotide
ctgtcgttgaaattgttcggtcgcgtcacgtaaattatccacgggtatcgtggtg

SEQ ID NO: 504704 - DNA, 55 bp, Artificial
  Synthetic oligonucleotide
ctgccagcgtaagaatttataggtggagtcaacttggtctgcgggtaaacgagca

SEQ ID NO: 504705 - DNA, 55 bp, Artificial
  Synthetic oligonucleotide
cgtattattccgctcgacagagcctgttatgtcaccttcgtgggatcctacaggt

SEQ ID NO: 504706 - DNA, 55 bp, Artificial
  Synthetic oligonucleotide
cgcgcctgaaaagtctttagctagctggggaaagatcagttggatcaaagtcggg

SEQ ID NO: 504707 - DNA, 55 bp, Artificial
  Synthetic oligonucleotide
cgaagttgtaatgatggcttcatctaacgactactctctcttccttaatgcggct

SEQ ID NO: 504708 - DNA, 55 bp, Artificial
  Synthetic oligonucleotide
ccatgctagttggggactgattggttggatcagtttagtgattatcggtgtgagc

SEQ ID NO: 504709 - DNA, 55 bp, Artificial
  Synthetic oligonucleotide
ccaagctcgtttcctaggccacaggttctagggttgggatacagccgacactgct

SEQ ID NO: 504710 - DNA, 55 bp, Artificial
  Synthetic oligonucleotide
catgccaaatgacattaagcgctcatagcgttgttctaataacgtttcagactca

SEQ ID NO: 504711 - DNA, 55 bp, Artificial
  Synthetic oligonucleotide
cagtgttggcaaccacattggtaacaacagtaccacacgccccgctaaccacagc

SEQ ID NO: 504712 - DNA, 55 bp, Artificial
  Synthetic oligonucleotide
caggacgcgacagaaaattctcacacggttcagttaaccctgtagtacaacgcgc

SEQ ID NO: 504713 - DNA, 55 bp, Artificial
  Synthetic oligonucleotide
cacaatgacaaaagcgcgaacaacatattcagtagcattcaagcatgatgctgca

SEQ ID NO: 504714 - DNA, 55 bp, Artificial
  Synthetic oligonucleotide
ataggttcaatttagactgaacccctgccactgaaagacgtggtttgccgtccca

SEQ ID NO: 504715 - DNA, 55 bp, Artificial
  Synthetic oligonucleotide
acgctcgcttcggtggcgtagcgtttgatgtttatgtgccaattgccgcgattac

SEQ ID NO: 504716 - DNA, 55 bp, Artificial
  Synthetic oligonucleotide
aactgtcatgctatctaagaccgacgcattaacagacgcaatatccgtgaacgca

SEQ ID NO: 504717 - DNA, 53 bp, Artificial
  Synthetic oligonucleotide
ggcgcacaagactgccgtgaaacaatggctggtgtcgcatttaaatctactca

SEQ ID NO: 504718 - DNA, 52 bp, Artificial
  Synthetic oligonucleotide
tggtagaaatagccaatcgcacgaccgtcttcacggaacatcgaacgtaaac

SEQ ID NO: 504719 - DNA, 55 bp, Artificial
  Synthetic oligonucleotide
gccgcagtcattccctcgtatgccagagatgacaaccacatggtactcgcggcac

SEQ ID NO: 504720 - DNA, 55 bp, Artificial
  Synthetic oligonucleotide
gccggctcagcaagtaggtgagtcccgagcaacggaaaccgtacccacagaagcg

SEQ ID NO: 504721 - DNA, 55 bp, Artificial
  Synthetic oligonucleotide
gcctcggcctccattgagccgagtgcagccatcgatgagaaaactctccgcggct

SEQ ID NO: 504722 - DNA, 55 bp, Artificial
  Synthetic oligonucleotide
gcctgccaactcctcgtcgttctgctgacttcgtgacgtccacagtggctaaggc

SEQ ID NO: 504723 - DNA, 55 bp, Artificial
  Synthetic oligonucleotide
gccttatgagtgttttctgagtgtccccatgagggctgcagcagacgataaatgg

SEQ ID NO: 504724 - DNA, 55 bp, Artificial
  Synthetic oligonucleotide
gccttcgcgaagccagcaaattgataggcatatgttagctcccactgcggaatcg

SEQ ID NO: 504725 - DNA, 55 bp, Artificial
  Synthetic oligonucleotide
gcgcatagccagcgactgacgattcctgcataagggccagagacctgaaacagtc

SEQ ID NO: 504726 - DNA, 55 bp, Artificial
  Synthetic oligonucleotide
gcgcggtaatgccgggactcaacgttggtcgactaaagggtttgcgcgtcgtcgc

SEQ ID NO: 504727 - DNA, 55 bp, Artificial
  Synthetic oligonucleotide
gcgcggtgggcgcaacaaaacgcacacaaatcgccgatggaggcaccggatgatc

SEQ ID NO: 504728 - DNA, 55 bp, Artificial
  Synthetic oligonucleotide
gcggcgtctttgttgcgtagtaggtattcgagtaggccgtattcgcgcggtgtca

SEQ ID NO: 504729 - DNA, 55 bp, Artificial
  Synthetic oligonucleotide
gcggtagcctgcaacagttttcggcttacggtggctaagtcccctggtgtggtgg

SEQ ID NO: 504730 - DNA, 55 bp, Artificial
  Synthetic oligonucleotide
gcggttcgacttcgtgtgtgggatcttcggtgatccaattggttgaacctgcagg

SEQ ID NO: 504731 - DNA, 55 bp, Artificial
  Synthetic oligonucleotide
gcgtcgtctcattccgccgctctcacttggtgcggtgcgattcgatttgtcgatt

SEQ ID NO: 504732 - DNA, 55 bp, Artificial
  Synthetic oligonucleotide
gcgttgcggtgttggcaggtccagtcggcactcgtcaccgattgacacttcgtcc

SEQ ID NO: 504733 - DNA, 55 bp, Artificial
  Synthetic oligonucleotide
gcgtttcggtaaaccaagtgcggcaagttctttcgcgatcgggtgatcgccgagc

SEQ ID NO: 504734 - DNA, 55 bp, Artificial
  Synthetic oligonucleotide
gctcaccgaagtacgtgctctgcgtgagaccttggacgagaccgtggccaggcac

SEQ ID NO: 504735 - DNA, 55 bp, Artificial
  Synthetic oligonucleotide
gctgaacttgcgcggcccattggggcagtttgcaattcgactatcacaccggccg

SEQ ID NO: 504736 - DNA, 55 bp, Artificial
  Synthetic oligonucleotide
gctgagcttgtgaaacgatcggaagcaacagtgcagaaacatttggtacgcacgc

SEQ ID NO: 504737 - DNA, 55 bp, Artificial
  Synthetic oligonucleotide
gctgagcttgtgaaacgatcggaagcaacagtgcgcacgatgcaaaaggagtgca

SEQ ID NO: 504738 - DNA, 55 bp, Artificial
  Synthetic oligonucleotide
gcttcggttcgggtggtgactcctcgtaccggacgaacttgaagtacgcgtacac

SEQ ID NO: 504739 - DNA, 55 bp, Artificial
  Synthetic oligonucleotide
ggagctctcaatatttctccgagtattccgatttgtgtctgctcaagcgaagagc

SEQ ID NO: 504740 - DNA, 55 bp, Artificial
  Synthetic oligonucleotide
ggatgaactgcgaacctttctcggcctcctcactgaacaggatgccccgtgcgtt

SEQ ID NO: 504741 - DNA, 55 bp, Artificial
  Synthetic oligonucleotide
ggcgatctcgctgaaaacgatacgcatcctgaacgtcgattgctcacctccgtgc

SEQ ID NO: 504742 - DNA, 55 bp, Artificial
  Synthetic oligonucleotide
ggcgcctcttgttgtagttgggaacaacgtgactcctgcgcaaaaggcggaccac

SEQ ID NO: 504743 - DNA, 55 bp, Artificial
  Synthetic oligonucleotide
ggcttcgcactttcgttgctctcgccacgtttcttgcgtcgcagcacctggcaat

SEQ ID NO: 504744 - DNA, 55 bp, Artificial
  Synthetic oligonucleotide
ggcttgtcagagttgcgttcatggctcctccgtcttctgctctgcgcatctcggc

SEQ ID NO: 504745 - DNA, 55 bp, Artificial
  Synthetic oligonucleotide
gggatggtccctgtccgcttcgggagacctggccgaagtctcgattaacttggac

SEQ ID NO: 504746 - DNA, 55 bp, Artificial
  Synthetic oligonucleotide
gggcacgccgcccagcattccgcgaagatagccggatgtcaactattggtacccc

SEQ ID NO: 504747 - DNA, 55 bp, Artificial
  Synthetic oligonucleotide
gggcctcaccagtggagatccgccaccggacggtcaacacctctttccacgatgt

SEQ ID NO: 504748 - DNA, 55 bp, Artificial
  Synthetic oligonucleotide
cggtaactggcatccgcgaattggtgaaaatccgggtatgagctgtgagctcacc

SEQ ID NO: 504749 - DNA, 55 bp, Artificial
  Synthetic oligonucleotide
cggtcctgagggcttcgcgctgtggatgcgggaatccaaaacagtcggtgtcacg

SEQ ID NO: 504750 - DNA, 55 bp, Artificial
  Synthetic oligonucleotide
cggtgcatttccgtagtgtcggttccggtcgaaggttgagcagcccgttccggag

SEQ ID NO: 504751 - DNA, 55 bp, Artificial
  Synthetic oligonucleotide
cgtcacgtaccatgtgacccaccgaacatatcggcacctgacttctaccagagcg

SEQ ID NO: 504752 - DNA, 55 bp, Artificial
  Synthetic oligonucleotide
cgtcctctcgcctcaggcgtcgtttcatgacagaatacatgacatagtgactgac

SEQ ID NO: 504753 - DNA, 55 bp, Artificial
  Synthetic oligonucleotide
cgtcgagatccaggtataccggggacagatccatgtattccaggctatgttccgg

SEQ ID NO: 504754 - DNA, 55 bp, Artificial
  Synthetic oligonucleotide
cgtctcactgggctgcgcctcggataggacaccgatattcatgacgtagctctcc

SEQ ID NO: 504755 - DNA, 55 bp, Artificial
  Synthetic oligonucleotide
ctcagccattacggggaatggatgggacagatagtcaaggggtacaacgaggttg

SEQ ID NO: 504756 - DNA, 55 bp, Artificial
  Synthetic oligonucleotide
ctcagctttcacggtagacctgatcagtccagttccacgggccatttcgaggaac

SEQ ID NO: 504757 - DNA, 55 bp, Artificial
  Synthetic oligonucleotide
ctccacggatttgacacccgtcacaatgcattgaatttacctggagccccggcaa

SEQ ID NO: 504758 - DNA, 55 bp, Artificial
  Synthetic oligonucleotide
ctccgacggtaaatatgtcgcggcgttatcgattgacccgggtaatacatcatcg

SEQ ID NO: 504759 - DNA, 55 bp, Artificial
  Synthetic oligonucleotide
ctggaacttttcaccgatatgcagcatcgcccgctgggacggggcatagtgcggg

SEQ ID NO: 504760 - DNA, 55 bp, Artificial
  Synthetic oligonucleotide
ctgtacatagtttcccgagaggtcgtattcgtcaactgccccttggtttccgacg

SEQ ID NO: 504761 - DNA, 55 bp, Artificial
  Synthetic oligonucleotide
cttttgcgctggaacaggtttcacatagggtgcgacctcacccaccaaattggcg

SEQ ID NO: 504762 - DNA, 55 bp, Artificial
  Synthetic oligonucleotide
gaattcgatcgcccgcaagatccaagtcacgttcttcaatcggacaccgacgctc

SEQ ID NO: 504763 - DNA, 55 bp, Artificial
  Synthetic oligonucleotide
gacctgcacatttgccttagggtcagcgcggttccgacatgggaagaacgagccg

SEQ ID NO: 504764 - DNA, 55 bp, Artificial
  Synthetic oligonucleotide
gacgtcgcgtcgatccttttccgaggcgagggcattcttcaccacgtcgtaggcc

SEQ ID NO: 504765 - DNA, 55 bp, Artificial
  Synthetic oligonucleotide
gagacgccatgatgctttggtatggatctgagatgagcggatggacatacgccgg

SEQ ID NO: 504766 - DNA, 55 bp, Artificial
  Synthetic oligonucleotide
gagaggggcttcgcgtcgactagcgtcacagcgagcaactcgaaaattagccata

SEQ ID NO: 504767 - DNA, 55 bp, Artificial
  Synthetic oligonucleotide
gatcaaggcccgcgggcactcccctccgagcaagctgcgctgaagtgcctgtact

SEQ ID NO: 504768 - DNA, 55 bp, Artificial
  Synthetic oligonucleotide
gatggacgaccacgggtgtcagcctaacgaggaatgaatgtgtcggagggtgcgc

SEQ ID NO: 504769 - DNA, 55 bp, Artificial
  Synthetic oligonucleotide
gcaacggggtgtgccacaaccgatttattctgcggcgatccgaacccgtgatcgg

SEQ ID NO: 504770 - DNA, 55 bp, Artificial
  Synthetic oligonucleotide
gcactgtgttggggtgttgcagcgctagccgccggaaattatgggcaacggcacg

SEQ ID NO: 504771 - DNA, 55 bp, Artificial
  Synthetic oligonucleotide
gcactttcacgtcccggaaccggagtagtgcccagcactacatactctgctactt

SEQ ID NO: 504772 - DNA, 55 bp, Artificial
  Synthetic oligonucleotide
gcagtccatccatctgtacgagcagcttctgcacctgttctcgattcgccctgcg

SEQ ID NO: 504773 - DNA, 55 bp, Artificial
  Synthetic oligonucleotide
gcagtgccgtaaagcagaccgatgagaacctgtgtcggaatgctggagggccgcg

SEQ ID NO: 504774 - DNA, 55 bp, Artificial
  Synthetic oligonucleotide
gcattctcggcaattacctgtgggtgaaccttgacacgttcgaaccgagtccggc

SEQ ID NO: 504775 - DNA, 55 bp, Artificial
  Synthetic oligonucleotide
gccacccgctgaatcaccttgaatccgttatcaggtgaaccgcagtcaacgacct

SEQ ID NO: 504776 - DNA, 55 bp, Artificial
  Synthetic oligonucleotide
gccattgcctatcggataccttccggacttcataccgtagagagtttgccggaac

SEQ ID NO: 504777 - DNA, 55 bp, Artificial
  Synthetic oligonucleotide
tcatcaaggcactcggatacatgcggatccaggcaacagacgttgcggcctggcg

SEQ ID NO: 504778 - DNA, 55 bp, Artificial
  Synthetic oligonucleotide
tcattggggctggcggagccaaatgcccttctcaagcacgacagcgcgacccgta

SEQ ID NO: 504779 - DNA, 55 bp, Artificial
  Synthetic oligonucleotide
tccatgcttgccagaaacagtttcgggacgttacctgtcctcggatgaacgtgag

SEQ ID NO: 504780 - DNA, 55 bp, Artificial
  Synthetic oligonucleotide
tccctgacatagggtgggaccgggcacttgcgttgcagtatgtagctaagcgaat

SEQ ID NO: 504781 - DNA, 55 bp, Artificial
  Synthetic oligonucleotide
tcgacggccagggtagcctctcagcccacgtcagccgcaccacagaattcacaac

SEQ ID NO: 504782 - DNA, 55 bp, Artificial
  Synthetic oligonucleotide
tcgagcttgggagaacggcgaatcgatgtcccaaccgaggccgcgcagactttgg

SEQ ID NO: 504783 - DNA, 55 bp, Artificial
  Synthetic oligonucleotide
tcggaaagccaataatgcggaatcccttccgacagatgggcgataaccgatagcg

SEQ ID NO: 504784 - DNA, 55 bp, Artificial
  Synthetic oligonucleotide
tcgttgatcgtcaggcgttcagggcatcccaggccttcttgaagggttccaacgg

SEQ ID NO: 504785 - DNA, 55 bp, Artificial
  Synthetic oligonucleotide
tctacagtcggaatggggcaacggctttcgtatcgatgccgtgtgggaacgcgtc

SEQ ID NO: 504786 - DNA, 55 bp, Artificial
  Synthetic oligonucleotide
tctcctccccgcttccggggtgggccattacgtgcctcatccgagtgtgccttat

SEQ ID NO: 504787 - DNA, 55 bp, Artificial
  Synthetic oligonucleotide
tgacgcccgctcccactaggccactaccgggttcgtatagccaccagttggtcgt

SEQ ID NO: 504788 - DNA, 55 bp, Artificial
  Synthetic oligonucleotide
tgccccggatctgttgcatccgagcggcactgatcgggtcacttgggtaccatcg

SEQ ID NO: 504789 - DNA, 55 bp, Artificial
  Synthetic oligonucleotide
tgctcgccagcggtgccggacatcagtcggtctcgcgagtgcccgtcctcaatta

SEQ ID NO: 504790 - DNA, 55 bp, Artificial
  Synthetic oligonucleotide
tggacccgttcggcagtaccggtgcgtgggatgtcgactacgacgccaatctgac

SEQ ID NO: 504791 - DNA, 55 bp, Artificial
  Synthetic oligonucleotide
tggatatcacccgggtcggaactaaacgcagaactcctagacgacaggagcacgg

SEQ ID NO: 504792 - DNA, 55 bp, Artificial
  Synthetic oligonucleotide
tgggatcgccgagggccgtcgcactcgatatgagctggcggacgaacgaatcgga

SEQ ID NO: 504793 - DNA, 55 bp, Artificial
  Synthetic oligonucleotide
tgggtgacctccatgtcagttctgaacagtcggttctgggctctgagaaatcgcc

SEQ ID NO: 504794 - DNA, 55 bp, Artificial
  Synthetic oligonucleotide
tgtacccgcacccaggctacgaggggacgaggcccggagagtggtggtcgcacaa

SEQ ID NO: 504795 - DNA, 55 bp, Artificial
  Synthetic oligonucleotide
ttagcgaaactggtatccgtaccggagccgattcgacagcccttaccggacgcca

SEQ ID NO: 504796 - DNA, 55 bp, Artificial
  Synthetic oligonucleotide
ttagcgcatagcgggtgcgtttcaacgctgctcctaccttggtgttattgcttga

SEQ ID NO: 504797 - DNA, 55 bp, Artificial
  Synthetic oligonucleotide
ttcccggtgtgcctcgccgtcagccagggccaacacacccggacaagccctgtaa

SEQ ID NO: 504798 - DNA, 55 bp, Artificial
  Synthetic oligonucleotide
ttcgcgtacttctgacacggcttgactaccttccgatcttgcggcgaatcaccat

SEQ ID NO: 504799 - DNA, 55 bp, Artificial
  Synthetic oligonucleotide
ttcgtaaagcatccgcagaccgctggctcccaccgggtgcccaaacgacttgagc

SEQ ID NO: 504800 - DNA, 55 bp, Artificial
  Synthetic oligonucleotide
ttgacttggctgcccgtgggagaatcgtcgtcgtgagtacccatcaggcgccgtg

SEQ ID NO: 504801 - DNA, 55 bp, Artificial
  Synthetic oligonucleotide
ttgatgatgctcatggtcgtaccgctctccttaaaacccggcctaaaacccggcc

SEQ ID NO: 504802 - DNA, 55 bp, Artificial
  Synthetic oligonucleotide
ttggagataccgcgactcgcctcctgactaaccccgacacaggtgtcatcgctcc

SEQ ID NO: 504803 - DNA, 55 bp, Artificial
  Synthetic oligonucleotide
ttggtggaacgcaccatgaatcgttggacggaggcacctggcaccggcagacgag

SEQ ID NO: 504804 - DNA, 55 bp, Artificial
  Synthetic oligonucleotide
tttccgaccaaggttcccgctcccgaccgaatcaccgcgattgcgtatgggtttc

SEQ ID NO: 504805 - DNA, 55 bp, Artificial
  Synthetic oligonucleotide
tttgtcccacgtcagcgagcccattcgccacactcccgtcggcccggtaggtttt

SEQ ID NO: 504806 - DNA, 55 bp, Artificial
  Synthetic oligonucleotide
ggggcatcctgttcagtgaggaggccgagaagggttcgcagttcatccaactggc

SEQ ID NO: 504807 - DNA, 55 bp, Artificial
  Synthetic oligonucleotide
ggggcgtacacaccaccgaagagggtcttcatcccacccgagcgcacaacgtcta

SEQ ID NO: 504808 - DNA, 55 bp, Artificial
  Synthetic oligonucleotide
gggtagaccgcgcctaagctgacgtgaccagcggatcagtcaaccattgcgctgc

SEQ ID NO: 504809 - DNA, 55 bp, Artificial
  Synthetic oligonucleotide
gggtagcgacggatttgatctagccgtgacagtgctaaacaggtagagtgctgga

SEQ ID NO: 504810 - DNA, 55 bp, Artificial
  Synthetic oligonucleotide
ggtacctcaccaagtctcaccggaagcctaagactatcgccggataccgcagcat

SEQ ID NO: 504811 - DNA, 55 bp, Artificial
  Synthetic oligonucleotide
ggtccagaaaatcggcgacttcactcggctgcaaggtatgccgcatcaacccggc

SEQ ID NO: 504812 - DNA, 55 bp, Artificial
  Synthetic oligonucleotide
ggtgaagttccggtccctcgacggacaagaccgggtgatggaggtacctcagttg

SEQ ID NO: 504813 - DNA, 55 bp, Artificial
  Synthetic oligonucleotide
ggtgctgggcgcttctacagcccgcaccctatggactccgctctgcctaaacgat

SEQ ID NO: 504814 - DNA, 55 bp, Artificial
  Synthetic oligonucleotide
ggttcccgtgacagtgatgtcggcgatgtagtgaatggtgttctgggcagcgctt

SEQ ID NO: 504815 - DNA, 55 bp, Artificial
  Synthetic oligonucleotide
ggttgacgagattgtccggtacacctcgccattgatatcgcaacagcgaacagca

SEQ ID NO: 504816 - DNA, 55 bp, Artificial
  Synthetic oligonucleotide
ggttgggaacggtcagcgtccccgttctcgaggtcccgtattccagatacgcgct

SEQ ID NO: 504817 - DNA, 55 bp, Artificial
  Synthetic oligonucleotide
gtcaagatcgacaatacgaactagccatccggccgccgcaaggactgcggcgacc

SEQ ID NO: 504818 - DNA, 55 bp, Artificial
  Synthetic oligonucleotide
gtcacatcatcggggaagtccagcgggagccgtcgagcgatctgttctggactcc

SEQ ID NO: 504819 - DNA, 55 bp, Artificial
  Synthetic oligonucleotide
gtcatcaagacaggtaaagcggtatatgacactccctgtgagtcgtcacacggac

SEQ ID NO: 504820 - DNA, 55 bp, Artificial
  Synthetic oligonucleotide
gtcggctcggtagagcctctaacggggtggtgatcaaactccggcggcagaattg

SEQ ID NO: 504821 - DNA, 55 bp, Artificial
  Synthetic oligonucleotide
gtgagacgactcgcgtcaatctggtcgagatatgcgtcttccccgcagaggacgt

SEQ ID NO: 504822 - DNA, 55 bp, Artificial
  Synthetic oligonucleotide
gtgggccgatccagatgtggtgcgggcgttccttgatcggggcatcgaggcaccc

SEQ ID NO: 504823 - DNA, 55 bp, Artificial
  Synthetic oligonucleotide
gtggttccgtagatctgggacgcatcccaccagtgcgactcctgtgtgacgtagc

SEQ ID NO: 504824 - DNA, 55 bp, Artificial
  Synthetic oligonucleotide
gttgtaccgctgggcatatcggtcaagccagtcctgtccgaccgagttcgcctcg

SEQ ID NO: 504825 - DNA, 55 bp, Artificial
  Synthetic oligonucleotide
gtttccaattcgccctcgccgggtccgtgatacccgtgccggtgcacaaactcct

SEQ ID NO: 504826 - DNA, 55 bp, Artificial
  Synthetic oligonucleotide
taagtccgtggtcggaatcctcgattcgctgggagtccagtgcggcgtgctcgtg

SEQ ID NO: 504827 - DNA, 55 bp, Artificial
  Synthetic oligonucleotide
taattcaccgacacgtagacacatccgcggcgagccagggaggcgccgtcgtaca

SEQ ID NO: 504828 - DNA, 55 bp, Artificial
  Synthetic oligonucleotide
tacccgaatgctcgacattcctggagtatccctcatggctaactcagcgatgacg

SEQ ID NO: 504829 - DNA, 55 bp, Artificial
  Synthetic oligonucleotide
taccggattccgaaatgcttcgactcacctcgataaccagcctgttgggcccaat

SEQ ID NO: 504830 - DNA, 55 bp, Artificial
  Synthetic oligonucleotide
tagcgatggtgtcaataggtcgacccgcagaacggggatggctaagggcgcgtga

SEQ ID NO: 504831 - DNA, 55 bp, Artificial
  Synthetic oligonucleotide
tatgtgtgctgccatagatttcgacttccagcacggtattcccagtggcgtcact

SEQ ID NO: 504832 - DNA, 55 bp, Artificial
  Synthetic oligonucleotide
tcaatgattgcagcattgccgcatctctgcaagatttctgctggcctcacccgct

SEQ ID NO: 504833 - DNA, 55 bp, Artificial
  Synthetic oligonucleotide
tcaattcggtagttgatccggtattgacttacagcggaaaccgacgatagtcatc

SEQ ID NO: 504834 - DNA, 55 bp, Artificial
  Synthetic oligonucleotide
tcacagtagtcctcccggcaacgccaccgggtcttgtgccaccgcagcatgattc

SEQ ID NO: 504835 - DNA, 55 bp, Artificial
  Synthetic oligonucleotide
tcaccactgagaccggttggtagcgaacaaacggttgaacccagttcggaaaggc

SEQ ID NO: 504836 - DNA, 55 bp, Artificial
  Synthetic oligonucleotide
attcgcaggcgggtgtcggacctgcccaacgtgcagatcctccgacgcagtgtga

SEQ ID NO: 504837 - DNA, 55 bp, Artificial
  Synthetic oligonucleotide
atttgaccgggcgagcgcatatcctcgcgccttatgaccgtcactagtccggccg

SEQ ID NO: 504838 - DNA, 55 bp, Artificial
  Synthetic oligonucleotide
caactgtgtgctcatcgaccgaattgagcagcatctccgcaggtcagtcagcctt

SEQ ID NO: 504839 - DNA, 55 bp, Artificial
  Synthetic oligonucleotide
caagcgaacgcgaactaagtcgaactcgtagatagaaagcaactcatgaccacgc

SEQ ID NO: 504840 - DNA, 55 bp, Artificial
  Synthetic oligonucleotide
caaggacgaattactgtaagcactttggcttcccgggtaggaatcagctcgcgct

SEQ ID NO: 504841 - DNA, 55 bp, Artificial
  Synthetic oligonucleotide
caagtcacttgacgcagggaatgccgttcgcggtgagctgactcagatcggtggg

SEQ ID NO: 504842 - DNA, 55 bp, Artificial; identical to SEQ ID NO: 208170
  Synthetic oligonucleotide

SEQ ID NO: 504843 - DNA, 55 bp, Artificial
  Synthetic oligonucleotide
cacatggatggagccgtgcgagtggctcggcgatagttcagacgagcgtcagctc

SEQ ID NO: 504844 - DNA, 55 bp, Artificial
  Synthetic oligonucleotide
cacctcgtcgtggggcgttggtcagctatccgtgccggtaccgctactcttgatc

SEQ ID NO: 504845 - DNA, 55 bp, Artificial
  Synthetic oligonucleotide
cacgacggggaagcactgagccccgaaggcattgaccatgcgcaggcatacttgc

SEQ ID NO: 504846 - DNA, 55 bp, Artificial
  Synthetic oligonucleotide
cacgtgcggctgttttgtggggcttggagcagaagtgggaggtcgaagaagtcga

SEQ ID NO: 504847 - DNA, 55 bp, Artificial
  Synthetic oligonucleotide
cactaatgccgcgaataagttcgttcagctccattgctgagaggaaactgagtcg

SEQ ID NO: 504848 - DNA, 55 bp, Artificial
  Synthetic oligonucleotide
cactcacaagacacctgcagtcaacagatggctgctcgcgcaccctcggttcgtc

SEQ ID NO: 504849 - DNA, 55 bp, Artificial
  Synthetic oligonucleotide
cactgaaacgcgggctcagtttgaccgccgtcggtgttttgacagcgctcttgac

SEQ ID NO: 504850 - DNA, 55 bp, Artificial
  Synthetic oligonucleotide
cactgcggatatgacccaagcacgccaaaactggcctatcacatcaggtctcgtg

SEQ ID NO: 504851 - DNA, 55 bp, Artificial
  Synthetic oligonucleotide
cactggaaggacgaccccgatgcacgccctacctgaaaaccccggtcgaaccatc

SEQ ID NO: 504852 - DNA, 55 bp, Artificial
  Synthetic oligonucleotide
cagaacaccccatcgttgcgcattccgagtatcgcccggtcacggatatcttgcg

SEQ ID NO: 504853 - DNA, 55 bp, Artificial
  Synthetic oligonucleotide
cagcagtgcttgcctaaattcgttgcgcgcatggccctgtcgagctaaattcgtg

SEQ ID NO: 504854 - DNA, 55 bp, Artificial
  Synthetic oligonucleotide
cagcctctcgatcgaacgcttccccgatgctgaacatctctactccgcaacgggt

SEQ ID NO: 504855 - DNA, 55 bp, Artificial
  Synthetic oligonucleotide
caggatgtgatagccggcgacgatgacacaaagcgtgatcgcgatggggcccagc

SEQ ID NO: 504856 - DNA, 55 bp, Artificial
  Synthetic oligonucleotide
caggctgccctaagtggaagtgaggttaccctatccttcccacctcggatacgcc

SEQ ID NO: 504857 - DNA, 55 bp, Artificial
  Synthetic oligonucleotide
cagtcacggaccggaagcaaggtcgacctggaatcgcttgtgcagcaagccgacc

SEQ ID NO: 504858 - DNA, 55 bp, Artificial
  Synthetic oligonucleotide
catccaagaccggatacctaccgaaaagtaggttttgggcctacccatccaagcg

SEQ ID NO: 504859 - DNA, 55 bp, Artificial
  Synthetic oligonucleotide
catcgatggcactcgaaatgcgcgtcatacctggagaaaagcgtgcgaacgactc

SEQ ID NO: 504860 - DNA, 55 bp, Artificial
  Synthetic oligonucleotide
ccacaaaggcacagttcagaaggttgagaatggtctcgggttaccgccggggacc

SEQ ID NO: 504861 - DNA, 55 bp, Artificial
  Synthetic oligonucleotide
ccacgtccagaggcggtcagctggacaaaccgtgtcacgcaagaactccgaacct

SEQ ID NO: 504862 - DNA, 55 bp, Artificial
  Synthetic oligonucleotide
ccactgtagtgtccgggtgagcgcatagtcaatcgtatgtgtagagagatttggc

SEQ ID NO: 504863 - DNA, 55 bp, Artificial
  Synthetic oligonucleotide
ccagcaagcgaactcaagagtgatcccgtccggatccaagaaatagaacgagcgc

SEQ ID NO: 504864 - DNA, 55 bp, Artificial
  Synthetic oligonucleotide
aacactccatttgccccgaggcgtcgggtcggacaccttggccagatccgcgttg

SEQ ID NO: 504865 - DNA, 55 bp, Artificial
  Synthetic oligonucleotide
aatgatctgtcactcgaatatctcccttgctggtgcgtggaccccttgtgacgag

SEQ ID NO: 504866 - DNA, 55 bp, Artificial
  Synthetic oligonucleotide
acaacccgccgcagatcaggacggacgcggtgatacccgagagcgcctgcactat

SEQ ID NO: 504867 - DNA, 55 bp, Artificial
  Synthetic oligonucleotide
acagcctactcccagacgaaactagttcgcaagggtaaggaaaattaggacaacg

SEQ ID NO: 504868 - DNA, 55 bp, Artificial
  Synthetic oligonucleotide
acagttcgctacatacccgtggaaaagacggtgtccttctggtccgggaccacgc

SEQ ID NO: 504869 - DNA, 55 bp, Artificial
  Synthetic oligonucleotide
acataccgggcggtccggagttcgctaaccgtctatcggctggcacagggctctt

SEQ ID NO: 504870 - DNA, 55 bp, Artificial
  Synthetic oligonucleotide
acccgcttccaggccaggtgtccgagcttcgggtagatctactcacgcgatcgca

SEQ ID NO: 504871 - DNA, 55 bp, Artificial
  Synthetic oligonucleotide
acctcccgatgccggactctaggcggcgtccggcgagttagtcaagtgtcacttg

SEQ ID NO: 504872 - DNA, 55 bp, Artificial
  Synthetic oligonucleotide
acgaaacccggcacagttgaaatccctcttcgcgcaatgtaatcgaggcgaagtg

SEQ ID NO: 504873 - DNA, 55 bp, Artificial
  Synthetic oligonucleotide
acgactcggcacaccgtccagtacacggggcccttctgattgcgcttcacgtgac

SEQ ID NO: 504874 - DNA, 55 bp, Artificial
  Synthetic oligonucleotide
acgcccgcctgtcccgcgagcgatcactccaggtggatgtgcacctcgcagttca

SEQ ID NO: 504875 - DNA, 55 bp, Artificial
  Synthetic oligonucleotide
acggtgtcactattgacaggcactgtcaaccatcgttagcgtccaggtatgcgta

SEQ ID NO: 504876 - DNA, 55 bp, Artificial
  Synthetic oligonucleotide
actaccaatgaatgacacctatagtccagacgatgaattcgcacgattactgcct

SEQ ID NO: 504877 - DNA, 55 bp, Artificial
  Synthetic oligonucleotide
actcaagcgcactcggactccccgacagcgagcgagtcactctggcgatactcga

SEQ ID NO: 504878 - DNA, 55 bp, Artificial
  Synthetic oligonucleotide
actgaaattcttactgtagcgtcacccggcatggcagagagtggctgcccggacg

SEQ ID NO: 504879 - DNA, 55 bp, Artificial
  Synthetic oligonucleotide
agaaaatgcgagaagcccgaaggactgttcccgccgctgagaccgcgcacaccga

SEQ ID NO: 504880 - DNA, 55 bp, Artificial
  Synthetic oligonucleotide
agagccctcggacgtctcgaaggtgtcagggttggcgactggagctccattgggg

SEQ ID NO: 504881 - DNA, 55 bp, Artificial
  Synthetic oligonucleotide
agcacaagacaagtccgacagtgtggccaacgtggttcaactggcaccctccagc

SEQ ID NO: 504882 - DNA, 55 bp, Artificial
  Synthetic oligonucleotide
agccaaagctcgctgcggacgccacattgatgactccgccatgcccattgctccg

SEQ ID NO: 504883 - DNA, 55 bp, Artificial
  Synthetic oligonucleotide
agcccgtcgccgtatggaacctgtgccgatctggcccggattgcagacatttgtc

SEQ ID NO: 504884 - DNA, 55 bp, Artificial
  Synthetic oligonucleotide
aggtcagcctggccgcctggaagtctggtacgcgacattgtcggacccggtaacc

SEQ ID NO: 504885 - DNA, 55 bp, Artificial
  Synthetic oligonucleotide
agtatcgagtacttccgaatcatcttggcgaaccacggtttctgggcggaatgtg

SEQ ID NO: 504886 - DNA, 55 bp, Artificial
  Synthetic oligonucleotide
agtccagcaatcgcgccgcatctagcacacggtcgcggatctcggttttcggcgt

SEQ ID NO: 504887 - DNA, 55 bp, Artificial
  Synthetic oligonucleotide
ataggtccgcaatatctgtaatacgataacgggcgtgaaacttcccgtggccacc

SEQ ID NO: 504888 - DNA, 55 bp, Artificial
  Synthetic oligonucleotide
atagtcgaattgcaaactgccccaatgggccacgcaagttcagctttgtccccgc

SEQ ID NO: 504889 - DNA, 55 bp, Artificial
  Synthetic oligonucleotide
atcccgtccggcaccgactgtacgagggttggcacactacggaaaacggcgccca

SEQ ID NO: 504890 - DNA, 55 bp, Artificial
  Synthetic oligonucleotide
atgctttcataacggtgcagcacgatggcgcatattcgaactgtatgaccggcct

SEQ ID NO: 504891 - DNA, 55 bp, Artificial
  Synthetic oligonucleotide
attactgaagcgatccgcatgccccgtacacgggtgcgctcggttcctcccacga

SEQ ID NO: 504892 - DNA, 55 bp, Artificial
  Synthetic oligonucleotide
ccgtaccggtggatctcggcattcaagaggaacacgtaatcgatctcgcgccagg

SEQ ID NO: 504893 - DNA, 55 bp, Artificial
  Synthetic oligonucleotide
ccgtcaaggtcgcccggacgtatcgcgcaaccgccgcgatctcaagattgctatg

SEQ ID NO: 504894 - DNA, 55 bp, Artificial
  Synthetic oligonucleotide
cctaccataggtgtggtacacgccacacgcaatgagcgcaagtgcttaccgacac

SEQ ID NO: 504895 - DNA, 55 bp, Artificial
  Synthetic oligonucleotide
cctcaccaatctctccctggatgaatgccgaattactcgagcttcgtgacctcgc

SEQ ID NO: 504896 - DNA, 55 bp, Artificial
  Synthetic oligonucleotide
cctctcgatccagtctgacgagtcgcggcacatggccaacggctatgggaccttg

SEQ ID NO: 504897 - DNA, 55 bp, Artificial
  Synthetic oligonucleotide
cctgcaccacgtccttgtgccgagacagcgcccagaacttgagttcttcgttgtg

SEQ ID NO: 504898 - DNA, 55 bp, Artificial
  Synthetic oligonucleotide
ccttggtactccccaccgggttgtgatcgttgaatccgaagggcgttgcgccgac

SEQ ID NO: 504899 - DNA, 55 bp, Artificial
  Synthetic oligonucleotide
ccttttgtcgtggaacgtaactcgactctactccagttcgtgccgacctccatcg

SEQ ID NO: 504900 - DNA, 55 bp, Artificial
  Synthetic oligonucleotide
cgacacctccagggtggatacctgacaacggcttagcgcgagggcacatgttggc

SEQ ID NO: 504901 - DNA, 55 bp, Artificial
  Synthetic oligonucleotide
cgacgaaatgctgagcttcgacatggttgaacttagcgaccgacttggcaagccg

SEQ ID NO: 504902 - DNA, 55 bp, Artificial
  Synthetic oligonucleotide
cgacggaacctacgtccgaactcttttacaccgccggaaggacacgacccaccgt

SEQ ID NO: 504903 - DNA, 55 bp, Artificial
  Synthetic oligonucleotide
cgagacaatgccaggttggcaacgcaacatcgtgcacacctttctaggacggtcc

SEQ ID NO: 504904 - DNA, 55 bp, Artificial
  Synthetic oligonucleotide
cgagcaataccttgcgactcaacatgattccgatccgatgtctgccgatcgctgg

SEQ ID NO: 504905 - DNA, 55 bp, Artificial
  Synthetic oligonucleotide
cgatcgggaaagcggacggaaaatccggcttgacgtgcgaagttccgagaaccgg

SEQ ID NO: 504906 - DNA, 55 bp, Artificial
  Synthetic oligonucleotide
cgatctgtcgagaagtcgcagaattgctcgctcccgcaagaacgactgacgcaat

SEQ ID NO: 504907 - DNA, 55 bp, Artificial
  Synthetic oligonucleotide
cgcacccttcaattcgaggacctctcagcaaatcgtccagcacccgaattaggcc

SEQ ID NO: 504908 - DNA, 55 bp, Artificial
  Synthetic oligonucleotide
cgccccgtcgctcaataggtggttcagatcacttcgaccaggttcggcggttcga

SEQ ID NO: 504909 - DNA, 55 bp, Artificial
  Synthetic oligonucleotide
cgccgtgccattttgcgggatttgccgtaattcaaatgaattgttttcacatagt

SEQ ID NO: 504910 - DNA, 55 bp, Artificial
  Synthetic oligonucleotide
cgcgaccaagtgttcaccgggatctcgtccagcgcactcaaccccggattcggaa

SEQ ID NO: 504911 - DNA, 55 bp, Artificial
  Synthetic oligonucleotide
cgcgctttgtcgcggtaaccgcagtatgacgccggctgacgtccattaggcgaag

SEQ ID NO: 504912 - DNA, 55 bp, Artificial
  Synthetic oligonucleotide
cgcgttgacggataatgcgattgagatgtgcatagatgatgttgaggcctggcgt

SEQ ID NO: 504913 - DNA, 55 bp, Artificial
  Synthetic oligonucleotide
cggacgagcagcgatctgcaaaacttgtcagcccgcggtgccatactagaacaca

SEQ ID NO: 504914 - DNA, 55 bp, Artificial
  Synthetic oligonucleotide
cggccatcgctggccagataccgggagtgcgaaaaggtgtgtgtttgcgtcgatc

SEQ ID NO: 504915 - DNA, 55 bp, Artificial
  Synthetic oligonucleotide
cggcgacgtctgatcgacggtctccgacaagacgttcagcgattccttgacggac

SEQ ID NO: 504916 - DNA, 55 bp, Artificial
  Synthetic oligonucleotide
cggctcagactatgtcgcggcacagactatgacgaagactgccccgactgcgagg

SEQ ID NO: 504917 - DNA, 55 bp, Artificial
  Synthetic oligonucleotide
cgggcatctggacagagatggccatagagttgactccctcgaacggtcagtcggc

SEQ ID NO: 504918 - DNA, 55 bp, Artificial
  Synthetic oligonucleotide
cgggtgctccggagtgcatcgaatcggttctttgtgcccgaagtgtgagatcgat

SEQ ID NO: 504919 - DNA, 55 bp, Artificial
  Synthetic oligonucleotide
ccagctctcgccataccagaggtctggtaaacagggctttccccgatagtgagca

SEQ ID NO: 504920 - DNA, 55 bp, Artificial
  Synthetic oligonucleotide
ccagggccagcgatagggttgtgcgatctttaaggtatcccaagaggttcaccag

SEQ ID NO: 504921 - DNA, 55 bp, Artificial
  Synthetic oligonucleotide
ccatatttggagtacgtccgtaacccagaaaacggctatgtgagcgtggcttctc

SEQ ID NO: 504922 - DNA, 55 bp, Artificial
  Synthetic oligonucleotide
cccaacgtgattctcggctcctgcgcactggctgtgggctccagcgcacacgtgg

SEQ ID NO: 504923 - DNA, 55 bp, Artificial
  Synthetic oligonucleotide
cccaggtggaacactgagttgtccagcaagttcatcatccgctcgtaaaaccggg

SEQ ID NO: 504924 - DNA, 55 bp, Artificial
  Synthetic oligonucleotide
ccccgcctcctcactcggtctcgtagatcctaagtggagccccactattgcgatg

SEQ ID NO: 504925 - DNA, 55 bp, Artificial
  Synthetic oligonucleotide
ccccggacctacccgacgtatcggaggcggcgagccatcagttacgaccacgaca

SEQ ID NO: 504926 - DNA, 55 bp, Artificial
  Synthetic oligonucleotide
cccgacgattcgagggagacgtgatgggctggggtgaacgcctgtttaagaaccg

SEQ ID NO: 504927 - DNA, 55 bp, Artificial
  Synthetic oligonucleotide
cccgcggaagaacaggtttcgtgcggaggtgaacagcgagcgacggaaataccac

SEQ ID NO: 504928 - DNA, 55 bp, Artificial
  Synthetic oligonucleotide
ccctgtcacacatctgggtgctgcctcgtcatacgagtatgaccactacatcacg

SEQ ID NO: 504929 - DNA, 55 bp, Artificial
  Synthetic oligonucleotide
ccgaaccctcgcggactacgtactgccacgacaacgctggatcaaaaggcagtag

SEQ ID NO: 504930 - DNA, 55 bp, Artificial
  Synthetic oligonucleotide
ccgaagtggagttcgtggtcataacgttccccgtatcgtaagtgcttgcgaagga

SEQ ID NO: 504931 - DNA, 55 bp, Artificial
  Synthetic oligonucleotide
ccgcctggggttttccggaatcctccgaagttctgagacaatgctgcctatgtcg

SEQ ID NO: 504932 - DNA, 55 bp, Artificial
  Synthetic oligonucleotide
ccgcgtactacggagacaatctgccgcgtttgcggggaatcgctgctacctacga

SEQ ID NO: 504933 - DNA, 55 bp, Artificial
  Synthetic oligonucleotide
ccggtgtgagggacacgggcacacccgtagagttcgaaccatgagcgccaattcc

SEQ ID NO: 504934 - DNA, 55 bp, Artificial
  Synthetic oligonucleotide
ccggcttctcgagtcaactcacgtgtgctacccagcattccgtcgagtaccaacg

SEQ ID NO: 504935 - DNA, 55 bp, Artificial
  Synthetic oligonucleotide
ccgctccctgatgcgatgctgctgatgtctcccgtcctggatctcaggtgcgaac

SEQ ID NO: 504936 - DNA, 55 bp, Artificial
  Synthetic oligonucleotide
ccgctaccgtcttatgggtgcaaccggtccgtactggcagtaagggaatgcctcg

SEQ ID NO: 504937 - DNA, 55 bp, Artificial
  Synthetic oligonucleotide
ccgcgtgatagtcgaaaaccgaaaggagtcgcaccgagggcgtcgcaagtaccga

SEQ ID NO: 504938 - DNA, 54 bp, Artificial
  Synthetic oligonucleotide
tttgctccacgaccgagatgggccgccctgacgaggcaacccgccgttgggaag

SEQ ID NO: 504939 - DNA, 54 bp, Artificial
  Synthetic oligonucleotide
aatgggcgccattcccacctacccttttctgcacgtctaccaggctcgactcaa

SEQ ID NO: 504940 - DNA, 54 bp, Artificial
  Synthetic oligonucleotide
ttgctgtacgcccggcaattaacccctccacgcgacaatagtaagtccgccacg

SEQ ID NO: 504941 - DNA, 54 bp, Artificial
  Synthetic oligonucleotide
ttcgttccgagcggtgcggtcaggggtgaacgtaatgaactaataggtgacctg

SEQ ID NO: 504942 - DNA, 54 bp, Artificial
  Synthetic oligonucleotide
tgtctgcctacgactggaactactcgcgacaagtcctggccaatgctgcccaga

SEQ ID NO: 504943 - DNA, 54 bp, Artificial
  Synthetic oligonucleotide
atagtgtcacatgcttagggacaattttcgtgagtctcgggaatgtcgagcagt

SEQ ID NO: 504944 - DNA, 54 bp, Artificial
  Synthetic oligonucleotide
tactagtcatgaccaccctgatgtgtgcccggagtcgtgcggtcggcgaccttc

SEQ ID NO: 504945 - DNA, 54 bp, Artificial
  Synthetic oligonucleotide
atcacgccggtgctgaggaactgtcgtgcgaacggtccatcgtcggtctgcggt

SEQ ID NO: 504946 - DNA, 54 bp, Artificial
  Synthetic oligonucleotide
ccgccatccgaggggccgagccaaagctcgctgccgacgccacattgatgactc

SEQ ID NO: 504947 - DNA, 53 bp, Artificial
  Synthetic oligonucleotide
ttgtacccgggtgcgcttacgggtttcggatgccacggcacaagactgtaaac

SEQ ID NO: 504948 - DNA, 53 bp, Artificial
  Synthetic oligonucleotide
aatgccgtgtggacgccgcatggaatgcaagttcggcgggaggtcgctactga

SEQ ID NO: 504949 - DNA, 53 bp, Artificial
  Synthetic oligonucleotide
gtcgagcaccaatgtggagacgctacgcagcatggcagcattttatcgtaagg

SEQ ID NO: 504950 - DNA, 53 bp, Artificial
  Synthetic oligonucleotide
caaactacgcgtaacctgcaattcaaaacggtcctgctgtgcagtcagccacc

SEQ ID NO: 504951 - DNA, 53 bp, Artificial
  Synthetic oligonucleotide
acgctcacaatcggcaactcaacgggctatctccggaacacagtggtggctgg

SEQ ID NO: 504952 - DNA, 53 bp, Artificial
  Synthetic oligonucleotide
tgcctctcctccggcggtcgtgccctactccgcgcagtccgttacatatggga

SEQ ID NO: 504953 - DNA, 53 bp, Artificial
  Synthetic oligonucleotide
tgatacccagttcacgacgggttccactgtgagtttgccctccccggtaccct

SEQ ID NO: 504954 - DNA, 53 bp, Artificial
  Synthetic oligonucleotide
tctcgtgggtacgacgcagcggatcgccatttccagccgagtcagctctccat

SEQ ID NO: 504955 - DNA, 53 bp, Artificial
  Synthetic oligonucleotide
gccttcgttccatcgaagatccccagtcgtccccacggtttgtaggcctcttc

SEQ ID NO: 504956 - DNA, 52 bp, Artificial
  Synthetic oligonucleotide
agccatgggtttcgtgtgtctttcagtgtcgaaggggtcttagatcagtttt

SEQ ID NO: 504957 - DNA, 52 bp, Artificial
  Synthetic oligonucleotide
gattctggtcgcgtttcatgtacagccggtaggtcaggtatttgatctgggg

SEQ ID NO: 504958 - DNA, 52 bp, Artificial
  Synthetic oligonucleotide
gtccgccgacacaccagtaagactgcccggatatcgacggacagaactgaaa

SEQ ID NO: 504959 - DNA, 52 bp, Artificial
  Synthetic oligonucleotide
ataccttcgtggagtgctcggaactcgacccgacctacaaccctcgcaggaa

SEQ ID NO: 504960 - DNA, 52 bp, Artificial
  Synthetic oligonucleotide
cgtccgagcgacactgtcgaaatcgactggggtccgggctatctgttgtagt

SEQ ID NO: 504961 - DNA, 52 bp, Artificial
  Synthetic oligonucleotide
agacctcgcagggaatcccagcgtcacagaagtgctggaccaggtaagagcg

SEQ ID NO: 504962 - DNA, 52 bp, Artificial
  Synthetic oligonucleotide
ataaccggttcggtcagtactcttttcgttcgggatggtctggaccgcgtag

SEQ ID NO: 504963 - DNA, 52 bp, Artificial
  Synthetic oligonucleotide
actctcttcggagggatcgaggcgacagccgacagatgtggatgggcccggt

SEQ ID NO: 504964 - DNA, 52 bp, Artificial
  Synthetic oligonucleotide
gcaaacctcctcacgatcacaccagtgatctgacagccccatcaccaagaaa

SEQ ID NO: 504965 - DNA, 52 bp, Artificial
  Synthetic oligonucleotide
ggggagaagccatccaaatcggagccgtcaccggtgttaaccccgcgcgatc

SEQ ID NO: 504966 - DNA, 51 bp, Artificial
  Synthetic oligonucleotide
gcgcacgcgccgagtgtgaagaacccaaaagtggtgaaccacatggcaaaa

SEQ ID NO: 504967 - DNA, 51 bp, Artificial
  Synthetic oligonucleotide
tagacatcgcgcaggtggcaaacgtattcggtcaccgaccatacctgtggg

SEQ ID NO: 504968 - DNA, 51 bp, Artificial
  Synthetic oligonucleotide
ggggtcatccttcggtacctttccggcgacacgggcgttactaccgattgt

SEQ ID NO: 504969 - DNA, 51 bp, Artificial
  Synthetic oligonucleotide
tcctccgtagggcgacgcatcgacaagacacgcgcccggcaatgggacacg

SEQ ID NO: 504970 - DNA, 51 bp, Artificial
  Synthetic oligonucleotide
atggtcaatgccttcggggctcagtgcttccccgtcgtggtagatcatgta

SEQ ID NO: 504971 - DNA, 51 bp, Artificial
  Synthetic oligonucleotide
ggaagtagctggtgtgttcggatatccaggtggcgggattacgtcgtgggg

SEQ ID NO: 504972 - DNA, 51 bp, Artificial
  Synthetic oligonucleotide
actagacccctgaaccccgttattactgaccgacggagcctgcgtgttata

SEQ ID NO: 504973 - DNA, 51 bp, Artificial
  Synthetic oligonucleotide
actgcgaagtgctcatcgttctcccctctggtcgccatacctgtacatttt

SEQ ID NO: 504974 - DNA, 51 bp, Artificial
  Synthetic oligonucleotide
gcgtacgctgcgtgaaacgtcacagtgacagtatggctacgtctaggcccc

SEQ ID NO: 504975 - DNA, 51 bp, Artificial
  Synthetic oligonucleotide
cgagcgaaaggcaacgatagtgacagcgcaggcagctccgtcgggtaccgc

SEQ ID NO: 504976 - DNA, 51 bp, Artificial
  Synthetic oligonucleotide
gtggaagcggaatcacgccttacgaccttactggcgcagccgtcggctagc

SEQ ID NO: 504977 - DNA, 51 bp, Artificial
  Synthetic oligonucleotide
tggtacgcgtatcgcgatccgaaccagacgatgaaccgtccgtacatcgct

SEQ ID NO: 504978 - DNA, 51 bp, Artificial
  Synthetic oligonucleotide
gcccaggagacctatgacaaccactttgtcgagagcgaggtgtgggcacac

SEQ ID NO: 504979 - DNA, 50 bp, Artificial
  Synthetic oligonucleotide
tgctcgcgaatgacatctcctaccaaatcagcccgaattacactgggcgc

SEQ ID NO: 504980 - DNA, 50 bp, Artificial
  Synthetic oligonucleotide
gaaaatcatctagccggtcactacccagtacttgagaaacgagagacata

SEQ ID NO: 504981 - DNA, 50 bp, Artificial
  Synthetic oligonucleotide
gtatttcgcgccaatctatccgcgttctactcctccggataccgcaatgg

SEQ ID NO: 504982 - DNA, 59 bp, Artificial
  Synthetic oligonucleotide
ccttctggagctacatttccatattcattaccatttcacaataacataagttgtcatgg

SEQ ID NO: 504983 - DNA, 58 bp, Artificial
  Synthetic oligonucleotide
gattgagccttaactcttaatggattaaagtttggttatgaaactgtgtatgcacctg

SEQ ID NO: 504984 - DNA, 58 bp, Artificial
  Synthetic oligonucleotide
gtaggacttaaaggcctgtaattaacataacttccagaagtatctatgtttgtggaag

SEQ ID NO: 504985 - DNA, 57 bp, Artificial
  Synthetic oligonucleotide
cagaagaaggtgaataataggaacacaaaagtcatcaccttctgaattctttgcatc

SEQ ID NO: 504986 - DNA, 55 bp, Artificial
  Synthetic oligonucleotide
gcaacaagatctccactagaaggggctgaagaaacagcttcctgagaaacttgca

SEQ ID NO: 504987 - DNA, 55 bp, Artificial
  Synthetic oligonucleotide
gcaattatgcctgatggacaaagtttgcaatgtgccactagccatgatttaggtg

SEQ ID NO: 504988 - DNA, 55 bp, Artificial
  Synthetic oligonucleotide
gcaattgtcgattctcgtgggtcggtaggttcttctattgttgcatatttgaccg

SEQ ID NO: 504989 - DNA, 55 bp, Artificial
  Synthetic oligonucleotide
gcacaagaacaactagcactcttgctgtcccgatttcgttaagtcagttcttaga

SEQ ID NO: 504990 - DNA, 55 bp, Artificial
  Synthetic oligonucleotide
gcacagaggaattgaatctgttgctcctgcgctcaacgacagagaacaatcagtc

SEQ ID NO: 504991 - DNA, 55 bp, Artificial
  Synthetic oligonucleotide
gcacccttacggtgcgctatattggctgcgtgtgaatgtcctgccatacgttctc

SEQ ID NO: 504992 - DNA, 55 bp, Artificial
  Synthetic oligonucleotide
gcagcgctgttccgtggttatcctgggttccgtgttaccttagagttaattctag

SEQ ID NO: 504993 - DNA, 55 bp, Artificial
  Synthetic oligonucleotide
tacgttttaacaaatcgccatgtcgaaggtagtccaaatgaattttccggtatgc

SEQ ID NO: 504994 - DNA, 55 bp, Artificial
  Synthetic oligonucleotide
gcattatgatttggcggctaagtttagacctttgttcttcgggtgcgttaacttc

SEQ ID NO: 504995 - DNA, 55 bp, Artificial
  Synthetic oligonucleotide
gcattttccggatccgaagcactccgcaataccaaatcagactttattaacttcg

SEQ ID NO: 504996 - DNA, 55 bp, Artificial
  Synthetic oligonucleotide
gccaattgtttggcaacgttcttaagaaggtaatagaggatcaacattttgcgga

SEQ ID NO: 504997 - DNA, 55 bp, Artificial
  Synthetic oligonucleotide
gcccgtcagagctctcgctaattaactcataaccttcattcttaagacgctgtct

SEQ ID NO: 504998 - DNA, 55 bp, Artificial
  Synthetic oligonucleotide
gccggattttcatatgcgatggaaaacacagacccttatactatgaggtttgcta

SEQ ID NO: 504999 - DNA, 55 bp, Artificial
  Synthetic oligonucleotide
gccttatgctaatcccgggcatataatgccttatgcttccaccgctaatccacat

SEQ ID NO: 505000 - DNA, 55 bp, Artificial
  Synthetic oligonucleotide
gcctttgggttttgtgataataaagttctaattgctgatgttccagcgtggttga

SEQ ID NO: 505001 - DNA, 55 bp, Artificial
  Synthetic oligonucleotide
gcgatccctcaggcactataatttcagtactactcttagagaaatttccgtccga

SEQ ID NO: 505002 - DNA, 55 bp, Artificial
  Synthetic oligonucleotide
gcgcattgttggtagcaaatgcgaatgttccatcgtttgattctgagttaaaccc

SEQ ID NO: 505003 - DNA, 55 bp, Artificial
  Synthetic oligonucleotide
ctgttggtctgaatgggttactggtatattaaagtgctcggttttatcgcgattt

SEQ ID NO: 505004 - DNA, 55 bp, Artificial
  Synthetic oligonucleotide
cttaacgatacgccacctattgccccagaacttggaggtgtaggatgtggtccta

SEQ ID NO: 505005 - DNA, 55 bp, Artificial
  Synthetic oligonucleotide
cttatacaatcctcctaaacctgcagcgctaagacccataaaggctgcagttggt

SEQ ID NO: 505006 - DNA, 55 bp, Artificial
  Synthetic oligonucleotide
cttccgcacttctccttaagcttggctccagatatctttctatcatcggacttcc

SEQ ID NO: 505007 - DNA, 55 bp, Artificial
  Synthetic oligonucleotide
gaaagttcatgatgatgcaaagctagccttagcacttcaaaagggtagagacatc

SEQ ID NO: 505008 - DNA, 55 bp, Artificial
  Synthetic oligonucleotide
gaagctaagaaatcccctccactattagaagaacatcaagctttcactttaggca

SEQ ID NO: 505009 - DNA, 55 bp, Artificial
  Synthetic oligonucleotide
gaaggagataggcagttcatcagaaaagacactcgcttcataatatccctcggag

SEQ ID NO: 505010 - DNA, 55 bp, Artificial
  Synthetic oligonucleotide
gaatgagtggttggttgaggtgagcattgggttactatactagtttcactttaag

SEQ ID NO: 505011 - DNA, 55 bp, Artificial
  Synthetic oligonucleotide
gaccaaatgctagagcacacataaatgcatggaatcctcagaataatcatggagc

SEQ ID NO: 505012 - DNA, 55 bp, Artificial
  Synthetic oligonucleotide
gactcctgattgtcttcactctcaagacttgtcattgacggtctcgtacttagcg

SEQ ID NO: 505013 - DNA, 55 bp, Artificial
  Synthetic oligonucleotide
gagataagactattgcagacaggttatctgatgagggaagggagttggttcccga

SEQ ID NO: 505014 - DNA, 55 bp, Artificial
  Synthetic oligonucleotide
tactgaataaggtgtcaaaatcagcctccacagtctccttcttagaaatctctcc

SEQ ID NO: 505015 - DNA, 55 bp, Artificial
  Synthetic oligonucleotide
gagcatcggtatcttgtttgatggaacaatggaacgaggaatgtggttagcctcc

SEQ ID NO: 505016 - DNA, 55 bp, Artificial
  Synthetic oligonucleotide
gagcgccatcatcgtataatgagttatatgttctatgatatcctggattatcacc

SEQ ID NO: 505017 - DNA, 55 bp, Artificial
  Synthetic oligonucleotide
gaggtacatcttggtagtgaaaagcaaatcagtgacgatcgatgcgtgaccaaca

SEQ ID NO: 505018 - DNA, 55 bp, Artificial
  Synthetic oligonucleotide
gaggtctcaactttcgctagcctcgaagagagtccttattttgctagtccattcc

SEQ ID NO: 505019 - DNA, 55 bp, Artificial
  Synthetic oligonucleotide
gatgatggttcgaggttggagggagctaaggtcaaaagagttatgaaagctgcag

SEQ ID NO: 505020 - DNA, 55 bp, Artificial
  Synthetic oligonucleotide
gatgtctgataagttggtgaatgttgaattcctatctgagcagcccaaggattga

SEQ ID NO: 505021 - DNA, 55 bp, Artificial
  Synthetic oligonucleotide
gatgtggactaagttagcttatcagcttcttccctaacgcatcatctcttcaaat

SEQ ID NO: 505022 - DNA, 55 bp, Artificial
  Synthetic oligonucleotide
ggtcttactttcttgggctatccaaaccccaatatagtttctgacgcagagattc

SEQ ID NO: 505023 - DNA, 55 bp, Artificial
  Synthetic oligonucleotide
gttggtggcaatgtcatcgatattagttggtggcatatttatgtcggcactaaca

SEQ ID NO: 505024 - DNA, 55 bp, Artificial
  Synthetic oligonucleotide
ggtgcactcgcttgacaacaaggagccttctcttcatctataaagaacgtaaagg

SEQ ID NO: 505025 - DNA, 55 bp, Artificial
  Synthetic oligonucleotide
ggtggtcaacctgctttcccaacagaacgaactgaacgtggtaattacttatctt

SEQ ID NO: 505026 - DNA, 55 bp, Artificial
  Synthetic oligonucleotide
ggttcagatgaggttggcacaggcgacacatttggtggaatagttgtagcatctg

SEQ ID NO: 505027 - DNA, 55 bp, Artificial
  Synthetic oligonucleotide
gtacatattttgaagtatcagagcccacttgaaagactgcacattccctcggagt

SEQ ID NO: 505028 - DNA, 55 bp, Artificial
  Synthetic oligonucleotide
gtacattgggtacaacattggctgtgcctttgatctcagttactttcttacgtgg

SEQ ID NO: 505029 - DNA, 55 bp, Artificial
  Synthetic oligonucleotide
gtagagccgattctcccaatcttgactttactgatacgggaacgatacatcatcg

SEQ ID NO: 505030 - DNA, 55 bp, Artificial
  Synthetic oligonucleotide
gtagtaattgatcaagggtttctggaaggccactatagtttgagttctggctctg

SEQ ID NO: 505031 - DNA, 55 bp, Artificial
  Synthetic oligonucleotide
gtccggcatcagttgttgattcaatactatatcccgcatttcttaattgatttgc

SEQ ID NO: 505032 - DNA, 55 bp, Artificial
  Synthetic oligonucleotide
gtcgagtcttttcatctagcaccgtcaattaagctacttaaagcgacttcgccgc

SEQ ID NO: 505033 - DNA, 55 bp, Artificial
  Synthetic oligonucleotide
gtctggtgtagcttctagaagagaggctgagtcctttatattgcaaggcagggtt

SEQ ID NO: 505034 - DNA, 55 bp, Artificial
  Synthetic oligonucleotide
gtgggagcattactttgcacaagttcatgagctatagacccagttagagcaacat

SEQ ID NO: 505035 - DNA, 55 bp, Artificial
  Synthetic oligonucleotide
gtggtactaggtgttggtacaatagttttaggtgctgtctgtactgttggggcag

SEQ ID NO: 505036 - DNA, 55 bp, Artificial
  Synthetic oligonucleotide
gtgtatatggcacaacccttttactcgaccacaatataagggcttttatgctgta

SEQ ID NO: 505037 - DNA, 55 bp, Artificial
  Synthetic oligonucleotide
gttagataaatcgagaatattggctcctgattggtaagctgccacaatagctacg

SEQ ID NO: 505038 - DNA, 55 bp, Artificial
  Synthetic oligonucleotide
gttcacagagcttttaagtgacaggcatagctaaagcgacgttgtgattctcggg

SEQ ID NO: 505039 - DNA, 55 bp, Artificial
  Synthetic oligonucleotide
gttgccatgctactgttgtgagcagattgtgctttgagagtgttggtttatcacc

SEQ ID NO: 505040 - DNA, 55 bp, Artificial
  Synthetic oligonucleotide
gttggcccctcaggttaatggtcttgaatcacaagctgcatattcattggatgaa

SEQ ID NO: 505041 - DNA, 55 bp, Artificial
  Synthetic oligonucleotide
gcgccttaaagcctattgcttgcgcattcataggtacgggatctttgataggagt

SEQ ID NO: 505042 - DNA, 55 bp, Artificial
  Synthetic oligonucleotide
gcgcttcgtctgctgattgtaagcttaatgctgaggtgagaagcacatgatcttt

SEQ ID NO: 505043 - DNA, 55 bp, Artificial
  Synthetic oligonucleotide
gcgtaaaacagatagagtattattgggagaaatcccttacatgacatctggtggt

SEQ ID NO: 505044 - DNA, 55 bp, Artificial
  Synthetic oligonucleotide
gctttagtactaaccaaaatggatagcaccaccagaggaggagttatctacaacc

SEQ ID NO: 505045 - DNA, 55 bp, Artificial
  Synthetic oligonucleotide
ggagctgattattatctctttgagccatacacggtattcaagaagtatggagttc

SEQ ID NO: 505046 - DNA, 55 bp, Artificial
  Synthetic oligonucleotide
ggatcttgaccctctttattaggtaattcaatgtcaacacctaagcgttgtgctc

SEQ ID NO: 505047 - DNA, 55 bp, Artificial
  Synthetic oligonucleotide
ggatgatgcggactttatggatgtgcagagttattgcactactccagtagaggca

SEQ ID NO: 505048 - DNA, 55 bp, Artificial
  Synthetic oligonucleotide
ggatggtcctgtctcatttgtgaaagtgtcttgacaaagcatcgtaatattgcga

SEQ ID NO: 505049 - DNA, 55 bp, Artificial
  Synthetic oligonucleotide
taaccaatcaggagacgcgggaaataaggcgattaagcaatgatgtacaactgtg

SEQ ID NO: 505050 - DNA, 55 bp, Artificial
  Synthetic oligonucleotide
ggattgaacatgggcaataagattgctggtaataaggtatcctctagcacctccg

SEQ ID NO: 505051 - DNA, 55 bp, Artificial
  Synthetic oligonucleotide
ggccttgccgactattaagacagtcgctctagctgtttcgggatttggtgtagct

SEQ ID NO: 505052 - DNA, 55 bp, Artificial
  Synthetic oligonucleotide
taaacaagctcaacttaccttcacatcacgaaggtaattcattctcccctacccc

SEQ ID NO: 505053 - DNA, 55 bp, Artificial
  Synthetic oligonucleotide
gggctaagttcattgtcccaggtacattcaattctgctgaaaacactttctattc

SEQ ID NO: 505054 - DNA, 55 bp, Artificial
  Synthetic oligonucleotide
ggggcaccacactcagtacagacagcacttagttttgtaacatgttcagcatgac

SEQ ID NO: 505055 - DNA, 55 bp, Artificial
  Synthetic oligonucleotide
gggtacaaagcagttttaacagggtcacaacttgttatttcagcagggtacagcc

SEQ ID NO: 505056 - DNA, 55 bp, Artificial
  Synthetic oligonucleotide
gggtagtgggcaagcaactaattgatccactcaacgcgccactccattggtctga

SEQ ID NO: 505057 - DNA, 55 bp, Artificial
  Synthetic oligonucleotide
gggtgagcccgggtggctggagatattcctgatgataatgctccacaggatttta

SEQ ID NO: 505058 - DNA, 55 bp, Artificial
  Synthetic oligonucleotide
ggtacaactgcattatttaaaggcgcagctttaagagttaaagatggcggaactt

SEQ ID NO: 505059 - DNA, 55 bp, Artificial
  Synthetic oligonucleotide
ggtctctttatagggagtcttgccatgagatacgccttctgtaactaggactctc

SEQ ID NO: 505060 - DNA, 55 bp, Artificial
  Synthetic oligonucleotide
agtctattagacgctgtacgactaacactgttaaaggaacgttcagattctgccc

SEQ ID NO: 505061 - DNA, 55 bp, Artificial
  Synthetic oligonucleotide
atgagcgaaattttcagccccattaaacccttcttgcataagtccgactgttgca

SEQ ID NO: 505062 - DNA, 55 bp, Artificial
  Synthetic oligonucleotide
tgttcaatcacgatgattttatgcgtaataattgccgcgaaaactaccgaggaat

SEQ ID NO: 505063 - DNA, 55 bp, Artificial
  Synthetic oligonucleotide
caaggggagaggattgatgccttaatgaaacatgcctttgatgttcatggtgaga

SEQ ID NO: 505064 - DNA, 55 bp, Artificial
  Synthetic oligonucleotide
caatttcttactagagtaaaacgagttggtgtttgcctcctacccattgtacgtt

SEQ ID NO: 505065 - DNA, 55 bp, Artificial
  Synthetic oligonucleotide
caccactacgggaaatattagtggcaatggaaccattcaaacggcttatccggtg

SEQ ID NO: 505066 - DNA, 55 bp, Artificial
  Synthetic oligonucleotide
caccgagtgattcaacatcttctgaggtttctaattcatcagtttcgacagtcgc

SEQ ID NO: 505067 - DNA, 55 bp, Artificial
  Synthetic oligonucleotide
cacgatcagatataataaaccctgctgcatgaactcctatttgccttggcaaacc

SEQ ID NO: 505068 - DNA, 55 bp, Artificial
  Synthetic oligonucleotide
cactaggagattgtgttgagaacaacttaaaaccgaggttaccactcctacctgg

SEQ ID NO: 505069 - DNA, 55 bp, Artificial
  Synthetic oligonucleotide
cagaagctgtaatgaaactttacccacacgaaatgtcaggtgggatgatacaacg

SEQ ID NO: 505070 - DNA, 55 bp, Artificial
  Synthetic oligonucleotide
cagcccaacttggataggaagctagtatttagaatctcagagttcgctaacgatc

SEQ ID NO: 505071 - DNA, 55 bp, Artificial
  Synthetic oligonucleotide
cagtcatcaaaggttgaactgctgatgaaccagctatgttgattgattctggagc

SEQ ID NO: 505072 - DNA, 55 bp, Artificial
  Synthetic oligonucleotide
cagtgcggataagtgtactgttggatgtataggatgctgctctacgggttcctgc

SEQ ID NO: 505073 - DNA, 55 bp, Artificial
  Synthetic oligonucleotide
catgtcaggactgaaagaatatagccccttcaccagaaaacaagcatagtcccat

SEQ ID NO: 505074 - DNA, 55 bp, Artificial
  Synthetic oligonucleotide
ccaaaggataccattcctaagaagggaaggattgttgctttgaatatgattcggg

SEQ ID NO: 505075 - DNA, 55 bp, Artificial
  Synthetic oligonucleotide
ccaacaagggactgaagactttagtactatgggaataccagtacttatgatttca

SEQ ID NO: 505076 - DNA, 55 bp, Artificial
  Synthetic oligonucleotide
ccaactatcatctccatccaaagttaatgtcatgctattccctcccttggccaca

SEQ ID NO: 505077 - DNA, 55 bp, Artificial
  Synthetic oligonucleotide
ccaatcacactattagcagcaccacacattcctaaatcggtttgaaaagcggtgc

SEQ ID NO: 505078 - DNA, 55 bp, Artificial
  Synthetic oligonucleotide
aaatcccatacagattcaaatgatgcacttaaatgaacacggggaacttgggagg

SEQ ID NO: 505079 - DNA, 55 bp, Artificial
  Synthetic oligonucleotide
aaccgttaaaggtacatagggtaaagaatgaagcggagagacagacaatacctag

SEQ ID NO: 505080 - DNA, 55 bp, Artificial
  Synthetic oligonucleotide
aacgaccagaatgtagctacttcaaacccaacagatcctagcacaattagaccag

SEQ ID NO: 505081 - DNA, 55 bp, Artificial
  Synthetic oligonucleotide
aactccagttcccgccaacacggaacctcccaacagcaatttggagaatcaatct

SEQ ID NO: 505082 - DNA, 55 bp, Artificial
  Synthetic oligonucleotide
aagtctagccccacttccgtttgagttaagttagcaaatggaaattacaagaggc

SEQ ID NO: 505083 - DNA, 55 bp, Artificial
  Synthetic oligonucleotide
tttgtggagcgcccgtataaaccattaatgtattagcgccataagatagtgcttc

SEQ ID NO: 505084 - DNA, 55 bp, Artificial
  Synthetic oligonucleotide
tttacgctgttgcaagctgttaaactaacaagccctgcacttaatgttgaaactg

SEQ ID NO: 505085 - DNA, 55 bp, Artificial
  Synthetic oligonucleotide
aattcctgttccaacgagtagagaatgacccaagagtgccttggagaatccaccc

SEQ ID NO: 505086 - DNA, 55 bp, Artificial
  Synthetic oligonucleotide
ttgtagtattatcttcacccggtgctgaaccaggtttatcagttggtggcactat

SEQ ID NO: 505087 - DNA, 55 bp, Artificial
  Synthetic oligonucleotide
acacctagtgcaattccaccaatagcaccaacacctgctaatacacttaatgatc

SEQ ID NO: 505088 - DNA, 55 bp, Artificial
  Synthetic oligonucleotide
accacagggacaacgaagatcattcccctcatttatagacccttccataccatga

SEQ ID NO: 505089 - DNA, 55 bp, Artificial
  Synthetic oligonucleotide
accggcaaaagcagataaatcgtaacaatcccttcccataacctccaagaaagtg

SEQ ID NO: 505090 - DNA, 55 bp, Artificial
  Synthetic oligonucleotide
ttgaaccatgaatacagcttgggagaatgacttactctcggagaacttcctgagt

SEQ ID NO: 505091 - DNA, 55 bp, Artificial
  Synthetic oligonucleotide
acgctgacccattctttaaacgatatgtaacccatactgggaagtgagctttacg

SEQ ID NO: 505092 - DNA, 55 bp, Artificial
  Synthetic oligonucleotide
actggatcataacgaccaggtgcttctcaacctagttctgaattaaaaccagctg

SEQ ID NO: 505093 - DNA, 55 bp, Artificial
  Synthetic oligonucleotide
acttcctacggtaattagtttgtcgagcgatgttgcattttgtcgtcaagcaact

SEQ ID NO: 505094 - DNA, 55 bp, Artificial
  Synthetic oligonucleotide
ttactgtgcatacaccctaggggacaaagtaactggaactaagataactagctcc

SEQ ID NO: 505095 - DNA, 55 bp, Artificial
  Synthetic oligonucleotide
agtatgccagatgttaacaaaggaagcagattagcaacgataagaggtagcgtac

SEQ ID NO: 505096 - DNA, 55 bp, Artificial
  Synthetic oligonucleotide
cgtaatgctaagggagttaaaactctaagggttactgatagaacaggccctgttg

SEQ ID NO: 505097 - DNA, 55 bp, Artificial
  Synthetic oligonucleotide
cggttttccaagggaggtggttccactaaatcttccattcccggtgtggaagtta

SEQ ID NO: 505098 - DNA, 55 bp, Artificial
  Synthetic oligonucleotide
cggcctgcttcgtgttgtggatgtatcaacggaaaggactgcccgaacttgtcat

SEQ ID NO: 505099 - DNA, 55 bp, Artificial
  Synthetic oligonucleotide
cgctgttctgttgaacttgacggttaatctctccttccaagcgtaccttaagttg

SEQ ID NO: 505100 - DNA, 55 bp, Artificial
  Synthetic oligonucleotide
cgctcttagcgctagagtcgcttagttgattttggccggcccaacctcctactct

SEQ ID NO: 505101 - DNA, 55 bp, Artificial
  Synthetic oligonucleotide
cgccaactccatgataaggagatgagggtgttgcgcttggttgatagaatgaaat

SEQ ID NO: 505102 - DNA, 55 bp, Artificial
  Synthetic oligonucleotide
cgcaagccttttgacattaaacgagcatgggctcccattaatgcttcgctcatat

SEQ ID NO: 505103 - DNA, 55 bp, Artificial
  Synthetic oligonucleotide
cgattaccaagtttaataacacgagtgtatccaccagcacgattagcatacttag

SEQ ID NO: 505104 - DNA, 55 bp, Artificial
  Synthetic oligonucleotide
cgatgcgtaactccaacagtctaaacaacaatccctctcccaatgcatcaaccgg

SEQ ID NO: 505105 - DNA, 55 bp, Artificial
  Synthetic oligonucleotide
ctatcaaagtggagcaaaatacgggaatcaaacccgtgtcttgaccttggcaagg

SEQ ID NO: 505106 - DNA, 55 bp, Artificial
  Synthetic oligonucleotide
ctatccttacaagtgaggctagtaagtttaaatctgaacttaaactggtagctcc

SEQ ID NO: 505107 - DNA, 55 bp, Artificial
  Synthetic oligonucleotide
ccttcgttagcatgcacaaaacaaaattcgctcacctttgtgccactaccaactg

SEQ ID NO: 505108 - DNA, 55 bp, Artificial
  Synthetic oligonucleotide
cctggttgaaatgtttcttctgagtacaataatacatctaactcatccccatctc

SEQ ID NO: 505109 - DNA, 55 bp, Artificial
  Synthetic oligonucleotide
cctattcaacactcacttgctctactagcgcaactaggaatagttccagatctac

SEQ ID NO: 505110 - DNA, 55 bp, Artificial
  Synthetic oligonucleotide
ctctaggtctagtcacgaaacaaaggaattgactaagcagcttcgattagacgga

SEQ ID NO: 505111 - DNA, 55 bp, Artificial
  Synthetic oligonucleotide
ctctataccttctaccactaaaacctgcgtgtggatcttgaaggaaactggccag

SEQ ID NO: 505112 - DNA, 55 bp, Artificial
  Synthetic oligonucleotide
ccacaaggcttagattttagtcgtgtccctcaaattcgctcattacggggcttaa

SEQ ID NO: 505113 - DNA, 55 bp, Artificial
  Synthetic oligonucleotide
ccaccaacatagatataagcatctcagaaccctttagccattgcttgtgatggag

SEQ ID NO: 505114 - DNA, 55 bp, Artificial
  Synthetic oligonucleotide
tagtcactaacttacattcagcatcttgtgcttgtctcactggttctggaagttc

SEQ ID NO: 505115 - DNA, 55 bp, Artificial
  Synthetic oligonucleotide
ccatgtggcgatcaaccaggaccaaaacattctgtgtaaattagtgtagcagttg

SEQ ID NO: 505116 - DNA, 55 bp, Artificial
  Synthetic oligonucleotide
ccatttggagtgcttattcttactccgaaagcatcaggtatggaatgttgagctg

SEQ ID NO: 505117 - DNA, 55 bp, Artificial
  Synthetic oligonucleotide
cccaaactgagtcacggtggtttgtggaggattacctatcactttcaacacccgt

SEQ ID NO: 505118 - DNA, 55 bp, Artificial
  Synthetic oligonucleotide
ctgttgcccctcagtcttcgtgaatcttaagaccacaagcacctgctacgatttg

SEQ ID NO: 505119 - DNA, 55 bp, Artificial
  Synthetic oligonucleotide
ctcttgtaaattccaaggacagcctgccagcatacttgggcagacttaaggattc

SEQ ID NO: 505120 - DNA, 55 bp, Artificial
  Synthetic oligonucleotide
cccacccaagggttgaagagtgatagtccagtgaaggattcagcaagggaaagtc

SEQ ID NO: 505121 - DNA, 55 bp, Artificial
  Synthetic oligonucleotide
taggcgccttaggaacttactattctggagtcttttcgtccaagaagaatgacat

SEQ ID NO: 505122 - DNA, 55 bp, Artificial
  Synthetic oligonucleotide
ctcttcttttcaatacaagttgactcagtcttcagcactaggcttcggagccaac

SEQ ID NO: 505123 - DNA, 55 bp, Artificial
  Synthetic oligonucleotide
ccctggttatcaaggtgggccattatttcatgctatcgcaggaaaagctgtagca

SEQ ID NO: 505124 - DNA, 55 bp, Artificial
  Synthetic oligonucleotide
ccgattcttgaagctacagtaactggcaccacacatcaccttcttgccttctcca

SEQ ID NO: 505125 - DNA, 55 bp, Artificial
  Synthetic oligonucleotide
ccggttcttagatcgggattggctatgtcagatgcactacaaacattctttgaag

SEQ ID NO: 505126 - DNA, 55 bp, Artificial
  Synthetic oligonucleotide
cctaaaggcgaagtagtggcaacattgccctattcaaaggtagtggagatagctc

SEQ ID NO: 505127 - DNA, 55 bp, Artificial
  Synthetic oligonucleotide
ctctgccatagagagaaacctattgttgtctcctcagaataccctctttaccacc

SEQ ID NO: 505128 - DNA, 55 bp, Artificial
  Synthetic oligonucleotide
cctatcattaattctatactaataggtgatccgctatgagtgatttggcttgagc

SEQ ID NO: 505129 - DNA, 54 bp, Artificial
  Synthetic oligonucleotide
tagagcttgatagcttaatttgagacttggagagcatgtacgctcccggagcac

SEQ ID NO: 505130 - DNA, 54 bp, Artificial
  Synthetic oligonucleotide
acagttcaaatgattacgaaatgcttagagatgctcattacggagttgcgatgc

SEQ ID NO: 505131 - DNA, 54 bp, Artificial
  Synthetic oligonucleotide
gacctatagacggcgaaacaacagatacgggttccgtaactaactttattacat

SEQ ID NO: 505132 - DNA, 54 bp, Artificial
  Synthetic oligonucleotide
agtggagatatctgtggcatattgcggttacaactcactaaaagaaatggacag

SEQ ID NO: 505133 - DNA, 54 bp, Artificial
  Synthetic oligonucleotide
atctgaattgtgaggacttgctaatcgtggagtgtatgatttaacgcaccatca

SEQ ID NO: 505134 - DNA, 54 bp, Artificial
  Synthetic oligonucleotide
ggggaacattagtcgcataacctgctgcaatacctgttgaaccgttaactaaaa

SEQ ID NO: 505135 - DNA, 54 bp, Artificial
  Synthetic oligonucleotide
cccctagcgaaattgcttgtaccatttatgagggtgagaaggaaccatatattc

SEQ ID NO: 505136 - DNA, 54 bp, Artificial
  Synthetic oligonucleotide
gctagtgcagctatatctagcggacttgttgcttttattagtacaaatgaagca

SEQ ID NO: 505137 - DNA, 54 bp, Artificial
  Synthetic oligonucleotide
gctaatccaccaggaaaacgtgatgtaccgttgtctgctttgtcaggcggggaa

SEQ ID NO: 505138 - DNA, 53 bp, Artificial
  Synthetic oligonucleotide
tagtttgactactgctgccactagtagaagctgttcttacttgagcaccatta

SEQ ID NO: 505139 - DNA, 53 bp, Artificial
  Synthetic oligonucleotide
tagcgcactaatggttttggtgggatatgtctaatctcacccgtttgcatatc

SEQ ID NO: 505140 - DNA, 53 bp, Artificial
  Synthetic oligonucleotide
ttttggggacatcctgcggtaaaggttcataaacgtcatcaagcatttctctc

SEQ ID NO: 505141 - DNA, 53 bp, Artificial
  Synthetic oligonucleotide
aatgatagttgctatcctctgaccggtgaaactaccagggccaattgtgacat

SEQ ID NO: 505142 - DNA, 53 bp, Artificial
  Synthetic oligonucleotide
aatggctcgagagaatacatcaatactgtttggtactcctcttgcgaatggtt

SEQ ID NO: 505143 - DNA, 53 bp, Artificial
  Synthetic oligonucleotide
ggatgtttgtgttttatccgactcagacaactcagaactatcttgctctgagt

SEQ ID NO: 505144 - DNA, 53 bp, Artificial
  Synthetic oligonucleotide
acacaaacaaccctttccaggtcccggactagcaataagagttataggggaag

SEQ ID NO: 505145 - DNA, 53 bp, Artificial
  Synthetic oligonucleotide
acctatagctgcgcggtgtcttgatccaaactccttaggtatgtttctgtcgg

SEQ ID NO: 505146 - DNA, 52 bp, Artificial
  Synthetic oligonucleotide
ctaaccattggtttgccagaacaaagccctgtgattaccccactaattagca

SEQ ID NO: 505147 - DNA, 52 bp, Artificial
  Synthetic oligonucleotide
agatctgacggcttgtggatagatcctggggatgcacaaaatgttttagcta

SEQ ID NO: 505148 - DNA, 52 bp, Artificial
  Synthetic oligonucleotide
caaccaatgctgtaggaaccaaagctacgcctaatgttccaataactgatgc

SEQ ID NO: 505149 - DNA, 52 bp, Artificial
  Synthetic oligonucleotide
ccatggggcagtttccagtttctgtgctagggagatggcagttggggttaaa

SEQ ID NO: 505150 - DNA, 52 bp, Artificial
  Synthetic oligonucleotide
tcccgtaactcattcttgataaagcagcaagttgttcaccctgagatcctgt

SEQ ID NO: 505151 - DNA, 51 bp, Artificial
  Synthetic oligonucleotide
caataagtccagtacctcttgtaaccgcccttattaacaccccgtcttcgt

SEQ ID NO: 505152 - DNA, 51 bp, Artificial
  Synthetic oligonucleotide
ccccacaccaggacgaaattcggtgttttcagtttgtgaatcgtcaatgtg

SEQ ID NO: 505153 - DNA, 51 bp, Artificial
  Synthetic oligonucleotide
cctagatttgctgtcggagtcagaaactcattcatatatggtctagctgtt

SEQ ID NO: 505154 - DNA, 51 bp, Artificial
  Synthetic oligonucleotide
gcagtaatctaaagctagttcatatctctcagaatccactcctccaacctt

SEQ ID NO: 505155 - DNA, 51 bp, Artificial
  Synthetic oligonucleotide
ggtgaatctgccctaggtgcacttaaggaatctctaactcaagagggagta

SEQ ID NO: 505156 - DNA, 50 bp, Artificial
  Synthetic oligonucleotide
tctcctttgaacagacatctttccatctggtagattgaccataagagact

SEQ ID NO: 505157 - DNA, 50 bp, Artificial
  Synthetic oligonucleotide
gagatagctcaatataagctagaggactcgaatactgacaatctcgacag

SEQ ID NO: 505158 - DNA, 50 bp, Artificial
  Synthetic oligonucleotide
ggcgcaggaggaagttggtccggccagactcagttaagcgactatagcgc

SEQ ID NO: 505159 - DNA, 50 bp, Artificial
  Synthetic oligonucleotide
aaaagccataggtacctgctatttgtccgctcgctattgctcctacaaca

SEQ ID NO: 505160 - DNA, 55 bp, Artificial
  Synthetic oligonucleotide
tgccgcggtgcagctttcagccagcccctagccttcgagggaggccctgaggaac

SEQ ID NO: 505161 - DNA, 55 bp, Artificial
  Synthetic oligonucleotide
tgcccatgccttcccgttggatgtgtctgtctttgatgaccctggggctgtccgg

SEQ ID NO: 505162 - DNA, 55 bp, Artificial
  Synthetic oligonucleotide
ggctggagagcccagatcttgagttttaggtcgtggagcgctttccaaatcagcg

SEQ ID NO: 505163 - DNA, 55 bp, Artificial
  Synthetic oligonucleotide
ggcccacctgcaccgcttttcctccggctgcattgtaattttacaacctcctgac

SEQ ID NO: 505164 - DNA, 55 bp, Artificial
  Synthetic oligonucleotide
gccgtgcaggctccttggagaacaacgccagactacttttcgagtagtacgattc

SEQ ID NO: 505165 - DNA, 55 bp, Artificial
  Synthetic oligonucleotide
cgttcgagcggccaggtttcttcgccgctattcttgtcgccatgacgggaccgca

SEQ ID NO: 505166 - DNA, 55 bp, Artificial
  Synthetic oligonucleotide
cggctctgggtccgatagcaaccggtgtgcatttccgagaatcacatcgaggggc

SEQ ID NO: 505167 - DNA, 55 bp, Artificial
  Synthetic oligonucleotide
cgcttgcggtgaaaatagtgaattccatgtcgggtgcagcattccatccgaaacg

SEQ ID NO: 505168 - DNA, 55 bp, Artificial
  Synthetic oligonucleotide
cgcgatgaggtcgagcgagttgaagtggaaggaagcgcccgtggaaccaggagtc

SEQ ID NO: 505169 - DNA, 55 bp, Artificial
  Synthetic oligonucleotide
ccgtcttgaacggaaagccccatcctcacgaggcgcgctccgaatgcgtcgacgc

SEQ ID NO: 505170 - DNA, 55 bp, Artificial
  Synthetic oligonucleotide
ccgggtgggtccattgactttgaaacattcgagcgccctatgcttcgggccgcgg

SEQ ID NO: 505171 - DNA, 55 bp, Artificial
  Synthetic oligonucleotide
cagtccattcgctgggatgtcgtgggcattcccggtggggcaagggctcagtaca

SEQ ID NO: 505172 - DNA, 55 bp, Artificial
  Synthetic oligonucleotide
actggatgcgtggagagacgggagctatacgcccaagtggggacagccggtgtca

SEQ ID NO: 505173 - DNA, 54 bp, Artificial
  Synthetic oligonucleotide
aagagggagttcttctggttgccggagatcatgaactggtctcgcgtgtagcca

SEQ ID NO: 505174 - DNA, 51 bp, Artificial
  Synthetic oligonucleotide
gccagcgaccgcgcaaagggagacaacagacttgaagctcgacatgacatt

SEQ ID NO: 505175 - DNA, 51 bp, Artificial
  Synthetic oligonucleotide
atacaggtcgtcccaagctccgccgcctgtgtagtccggcacgcggtccag

SEQ ID NO: 505176 - DNA, 51 bp, Artificial
  Synthetic oligonucleotide
tccgaaactgacgtcccctttcgccagaccccggttggggttgtggaccag

SEQ ID NO: 505177 - DNA, 55 bp, Artificial
  Synthetic oligonucleotide
tgtctaatacatttccgctgtcaatacggccactgagtattttggtggtattcag

SEQ ID NO: 505178 - DNA, 55 bp, Artificial
  Synthetic oligonucleotide
tggtcgcgccacgccagctttatgatgagacacattgggtgtggacataagcccc

SEQ ID NO: 505179 - DNA, 55 bp, Artificial
  Synthetic oligonucleotide
tagcagccgacacaagctgaaaggctatgtcgctacccctagcacaaaacaggaa

SEQ ID NO: 505180 - DNA, 55 bp, Artificial
  Synthetic oligonucleotide
gtggaaaattgttgtccagttgggttggcctgattgttacgccccgactttccta

SEQ ID NO: 505181 - DNA, 55 bp, Artificial
  Synthetic oligonucleotide
ggttgggacggtttgccactctgcggatgggtatcgtgcggatggctctcatggt

SEQ ID NO: 505182 - DNA, 55 bp, Artificial
  Synthetic oligonucleotide
ggtgttagctatcgcctatttgcttttccctgtccgatggtttgcttggatgtac

SEQ ID NO: 505183 - DNA, 55 bp, Artificial
  Synthetic oligonucleotide
ggggcgggtgcacaagttcgtatccgtaagaacggaagagagccaataatctttc

SEQ ID NO: 505184 - DNA, 55 bp, Artificial
  Synthetic oligonucleotide
gggctgaaagggcttccgacaatacttacaaacggtttaacgaatacggcagggg

SEQ ID NO: 505185 - DNA, 55 bp, Artificial
  Synthetic oligonucleotide
gggcgtaggcgacttggtcttcaatccggcctagtccgtggacggtttgcgcctt

SEQ ID NO: 505186 - DNA, 55 bp, Artificial
  Synthetic oligonucleotide
ggcggcaggggtcgatagcacttggcgacgatatagacatgcctgtctgaaaatg

SEQ ID NO: 505187 - DNA, 55 bp, Artificial
  Synthetic oligonucleotide
gctgtttgaactagaacaactgctagttctctaaatccaggggttcctatagtgt

SEQ ID NO: 505188 - DNA, 55 bp, Artificial
  Synthetic oligonucleotide
gctgagggtattccacatggttatgcaggaaaattttctggagcagggaatcttc

SEQ ID NO: 505189 - DNA, 55 bp, Artificial
  Synthetic oligonucleotide
gcgttcaggggatactagctgatagtccatagtgtgcgcctggtgcggaggttgg

SEQ ID NO: 505190 - DNA, 55 bp, Artificial
  Synthetic oligonucleotide
gcagaacggctctgcgcactcactcaagtgcatgggctgtgagtaagggatactc

SEQ ID NO: 505191 - DNA, 55 bp, Artificial
  Synthetic oligonucleotide
gcactatgccgtgtcggtgacctcattcggttttcctgtgcagagagcgttaaaa

SEQ ID NO: 505192 - DNA, 55 bp, Artificial
  Synthetic oligonucleotide
gatgcgatacagtacacgtccatccttcttgaacggctgaaccgaaagagggtgc

SEQ ID NO: 505193 - DNA, 55 bp, Artificial
  Synthetic oligonucleotide
aagtggcttgcggcataggttttacgaatactaaggtttgatgccgaactcttgg

SEQ ID NO: 505194 - DNA, 55 bp, Artificial
  Synthetic oligonucleotide
atcgtcgagcgttaaaattatccacaagcacggatttacacatgccccaaacagg

SEQ ID NO: 505195 - DNA, 55 bp, Artificial
  Synthetic oligonucleotide
cacattaaaacctttggcggaagacattgaccgcaaaggcctgtatcccgaagcg

SEQ ID NO: 505196 - DNA, 55 bp, Artificial
  Synthetic oligonucleotide
cacggtggaagccacccactggctacactaaacgaggcgagatccgacactttgg

SEQ ID NO: 505197 - DNA, 55 bp, Artificial
  Synthetic oligonucleotide
ccccgccaaattaccctgcctagtatctcatcagaatctatcgcatcaacatcag

SEQ ID NO: 505198 - DNA, 55 bp, Artificial
  Synthetic oligonucleotide
ccctacaatgccgctcatcattcacactcctaacccatcatggcacataaactcc

SEQ ID NO: 505199 - DNA, 55 bp, Artificial
  Synthetic oligonucleotide
cccttgcggccggagaaacggcgaatgagggaggtaacgaatacggccggtatgc

SEQ ID NO: 505200 - DNA, 55 bp, Artificial
  Synthetic oligonucleotide
cgccccgattaataacgcggcagatgttatacagcatgtgccccaccgtatacca

SEQ ID NO: 505201 - DNA, 55 bp, Artificial
  Synthetic oligonucleotide
cggatataggggactttgacctcttgccagtctccatgccgtcttgatccgaccc

SEQ ID NO: 505202 - DNA, 55 bp, Artificial
  Synthetic oligonucleotide
cggtgtgtctgtgtagccgtccaaaccttcgtagtcaaaacaataaacgccttct

SEQ ID NO: 505203 - DNA, 55 bp, Artificial
  Synthetic oligonucleotide
gaacgtcattgatgagtcccagcagcatggtggaggagctttggatcgcctgcac

SEQ ID NO: 505204 - DNA, 55 bp, Artificial
  Synthetic oligonucleotide
gagatggttttgccatagtgttgaacccgcctgccattatggaattgggtaccag

SEQ ID NO: 505205 - DNA, 55 bp, Artificial
  Synthetic oligonucleotide
gatgaagggattgggcaagtccatggatcagatttacgcaacactggggcgtatc

SEQ ID NO: 505206 - DNA, 54 bp, Artificial
  Synthetic oligonucleotide
cgtaattaggcgggagtgttgattgacttccatctagaagggaaaggctctccg

SEQ ID NO: 505207 - DNA, 54 bp, Artificial
  Synthetic oligonucleotide
tatgcaggcttggtagcaggcggcgagtatccgaaccccgtgccattcgctgac

SEQ ID NO: 505208 - DNA, 54 bp, Artificial
  Synthetic oligonucleotide
aatcgcattatctgccgcgcgtttcaacgtatctgccaccggcacggccagaat

SEQ ID NO: 505209 - DNA, 53 bp, Artificial
  Synthetic oligonucleotide
tatgctgagtccacaccggagtgttcggatcacgccccatttcgggtttggta

SEQ ID NO: 505210 - DNA, 51 bp, Artificial
  Synthetic oligonucleotide
ggaagtggcgggtatcgagagcctgataggatggatcaggagagagtgcgg

SEQ ID NO: 505211 - DNA, 51 bp, Artificial
  Synthetic oligonucleotide
acgatgtggcacctccggcatctttcaattcagcacggccgctaacctgat

SEQ ID NO: 505212 - DNA, 50 bp, Artificial
  Synthetic oligonucleotide
attatttggcgtataatccttggcgtattgaaccccagaattggggcaag

SEQ ID NO: 505213 - DNA, 55 bp, Artificial
  Synthetic oligonucleotide
tgcaatcgcgtcgcccgtgcactgagtgaagctggagtttcgaacttcaacaaag

SEQ ID NO: 505214 - DNA, 55 bp, Artificial
  Synthetic oligonucleotide
tcaacagatcatccccaatttcttccaccttcattgtaggcttgggagagtccgg

SEQ ID NO: 505215 - DNA, 55 bp, Artificial
  Synthetic oligonucleotide
gtgtactgttttgttatcctcctgtaccactgtgacgaagaggacgaccctgtcg

SEQ ID NO: 505216 - DNA, 55 bp, Artificial
  Synthetic oligonucleotide
gtgacgtccggttatacgctagttttgcacaggaagttctgatggttgtccacgg

SEQ ID NO: 505217 - DNA, 55 bp, Artificial
  Synthetic oligonucleotide
gggaagtgcgatacagcaatacccaggggaaagcggcgtttgtcgattccggccc

SEQ ID NO: 505218 - DNA, 55 bp, Artificial
  Synthetic oligonucleotide
ggcgcgcgttcatatgatacaggggaatcttgtcgtgattgaggtgcagaattcc

SEQ ID NO: 505219 - DNA, 55 bp, Artificial
  Synthetic oligonucleotide
ggcaggttactacggtgtgacatccaaagatatccgctccaggaaaagaacccgt

SEQ ID NO: 505220 - DNA, 55 bp, Artificial
  Synthetic oligonucleotide
ggacctttatctccctctcgtccgtgagggttaccagatcgtggttcctgtcccg

SEQ ID NO: 505221 - DNA, 55 bp, Artificial
  Synthetic oligonucleotide
gagaaacggggatcggatctggcatcgggaatgatgaagaagtcctcctggagga

SEQ ID NO: 505222 - DNA, 55 bp, Artificial
  Synthetic oligonucleotide
gaccggaaaacgccttttgttgctcctgtgcccttgcacggatgcggacaggtag

SEQ ID NO: 505223 - DNA, 55 bp, Artificial
  Synthetic oligonucleotide
cggagattttccggaccagaaagttatgcttcgtgcaggaacggctcattccgat

SEQ ID NO: 505224 - DNA, 55 bp, Artificial
  Synthetic oligonucleotide
ccgttattacaaggatctcctgacagcttttcgggaggtgacccagaatccggag

SEQ ID NO: 505225 - DNA, 55 bp, Artificial
  Synthetic oligonucleotide
ccggaagacaacccgtggtatctgaatctcctgatttcatggggtcccattatcg

SEQ ID NO: 505226 - DNA, 55 bp, Artificial
  Synthetic oligonucleotide
cccttgagtccgtgaaccgcatccatgaactcggggaaatcgcaacgaagcagtg

SEQ ID NO: 505227 - DNA, 55 bp, Artificial
  Synthetic oligonucleotide
ccccgcgcgtcgaagagtccctggagagacaagacagatagcgcgcattgatgtt

SEQ ID NO: 505228 - DNA, 55 bp, Artificial
  Synthetic oligonucleotide
ccccagcaacaagagaaagctgacccatcccagcttgagattccgtatgattctt

SEQ ID NO: 505229 - DNA, 55 bp, Artificial
  Synthetic oligonucleotide
cagggctttcgtgacgtcgtccaggtagaaattgcagtactgccctcccaggcga

SEQ ID NO: 505230 - DNA, 54 bp, Artificial
  Synthetic oligonucleotide
cgatagagttgatcttaaggatggttccgccccaaggaagagtgaaaggaaccg

SEQ ID NO: 505231 - DNA, 54 bp, Artificial
  Synthetic oligonucleotide
tagaggagaacggtggttcccatcgtcaggaacatcgctcgcgggacggatttt

SEQ ID NO: 505232 - DNA, 53 bp, Artificial
  Synthetic oligonucleotide
ggggcactattcggtttgcacaaggacttctgtccccgttccgtgtaacgtcg

SEQ ID NO: 505233 - DNA, 52 bp, Artificial
  Synthetic oligonucleotide
gaactgggaaatgatgtgacgatcggtccgtattgcgttctccggggacctt

SEQ ID NO: 505234 - DNA, 51 bp, Artificial
  Synthetic oligonucleotide
cgtcataatcaggagcggaccggatgattggttcagttctcaggccaatcc

SEQ ID NO: 505235 - DNA, 50 bp, Artificial
  Synthetic oligonucleotide
ggagcgggtaagaaagtcctttgagattgagtggtttctgacaagggaat

SEQ ID NO: 505236 - DNA, 50 bp, Artificial
  Synthetic oligonucleotide
tctgggatttcgactctacgccaccgttgggtaatggtcatctgcatttt

SEQ ID NO: 505237 - DNA, 50 bp, Artificial
  Synthetic oligonucleotide
tgccagggagtcatcgttccacccaaaattccgatcttgtccctgctggt

SEQ ID NO: 505238 - DNA, 55 bp, Artificial
  Synthetic oligonucleotide
ggaagcgggtcgggtcggactttaaccagtcacatggagggccaatcggccacgt

SEQ ID NO: 505239 - DNA, 55 bp, Artificial
  Synthetic oligonucleotide
ggaacgctgacgccatgttgcacattcttgagaccgcccgcgcgacttccgcgat

SEQ ID NO: 505240 - DNA, 55 bp, Artificial
  Synthetic oligonucleotide
gctgactcgggcctcctatcaccctatgcgttgaatacgagacgcaggagcgatc

SEQ ID NO: 505241 - DNA, 55 bp, Artificial
  Synthetic oligonucleotide
gctgaactcgtccgatccacccgaccgaacccggatcatcgaaggagtcggcatc

SEQ ID NO: 505242 - DNA, 55 bp, Artificial
  Synthetic oligonucleotide
gcgtaattaccgtgggtgcagtattcccatgagtcacgatatcgagtagaacagg

SEQ ID NO: 505243 - DNA, 55 bp, Artificial
  Synthetic oligonucleotide
gcggtgagcatcaaacgagcggccgatggtgttgtgcgggtattcgaattcgggg

SEQ ID NO: 505244 - DNA, 55 bp, Artificial
  Synthetic oligonucleotide
gcggtccatgatcaacaagcagccatataactctgctcgatacccaatgtgcgca

SEQ ID NO: 505245 - DNA, 55 bp, Artificial
  Synthetic oligonucleotide
gcggtacgtaaccggagacgggctgacactgtccataacggcgaccgcggaaggt

SEQ ID NO: 505246 - DNA, 55 bp, Artificial
  Synthetic oligonucleotide
gcgggctgtacaccgtgaagttggtcgaatccgatcgacagcccctcgtgtcctg

SEQ ID NO: 505247 - DNA, 55 bp, Artificial
  Synthetic oligonucleotide
gcgggagagcgtcgtaggggttgtggctcattggctcctcatctcggatcggttc

SEQ ID NO: 505248 - DNA, 55 bp, Artificial
  Synthetic oligonucleotide
gcggacacacaggagggctgtcctatgtcctgggaagatcagcacacccgatccg

SEQ ID NO: 505249 - DNA, 55 bp, Artificial
  Synthetic oligonucleotide
gcgctcctatcaggaagaggcgcacgcgattcaggcccgggatgtgcatttcgac

SEQ ID NO: 505250 - DNA, 55 bp, Artificial
  Synthetic oligonucleotide
gcgcgagttgtcgacctccatcccgaacaccgggtacggtcaacctagggacctt

SEQ ID NO: 505251 - DNA, 55 bp, Artificial
  Synthetic oligonucleotide
gcgccgttatcgagtcgcgtgttaaactgtgaacatcgaaaggggcacgggacac

SEQ ID NO: 505252 - DNA, 55 bp, Artificial
  Synthetic oligonucleotide
gcgccgggaatctgagagactgcaacgcaatcatcgacgtacaccaggtgcaagg

SEQ ID NO: 505253 - DNA, 55 bp, Artificial
  Synthetic oligonucleotide
gcgatgtccgaactctgctggagcggcaatttgcagggttgctatgcccaacggg

SEQ ID NO: 505254 - DNA, 55 bp, Artificial
  Synthetic oligonucleotide
gcgagagtggagtgacacctcgaacacagaacaggagaaacctgtgcgcttcggc

SEQ ID NO: 505255 - DNA, 55 bp, Artificial
  Synthetic oligonucleotide
gggattctcaggcagcaagtccgtctccccagaaaggattcgagccagatgacgg

SEQ ID NO: 505256 - DNA, 55 bp, Artificial
  Synthetic oligonucleotide
ggctgtccgacgagtcgagtcgcaattagtgagtcatgtgccttgatcaaatgac

SEQ ID NO: 505257 - DNA, 55 bp, Artificial
  Synthetic oligonucleotide
ggctccggtagcgtgatcaggcatctgtccgccgattcggtttggagctttcccg

SEQ ID NO: 505258 - DNA, 55 bp, Artificial
  Synthetic oligonucleotide
ggctcccgcgggcgaatgggacacctatcatacacatgacgcatttcgtgtatgg

SEQ ID NO: 505259 - DNA, 55 bp, Artificial
  Synthetic oligonucleotide
ggcggtaacccagtgtcgcgaaagtgccgtcttccgtgttcaaagccggtgacgc

SEQ ID NO: 505260 - DNA, 55 bp, Artificial
  Synthetic oligonucleotide
ggccgtctgtatcggtgacacgacttccctctcgaccaggagaccagcgatgacg

SEQ ID NO: 505261 - DNA, 55 bp, Artificial
  Synthetic oligonucleotide
ggccgattggccaactgacgggaggatcatgctaaagcggttgtccgactacctg

SEQ ID NO: 505262 - DNA, 55 bp, Artificial
  Synthetic oligonucleotide
ggcccgtcgtcggaccgactagctaccacggtaaacccacatagggcaagagtct

SEQ ID NO: 505263 - DNA, 55 bp, Artificial
  Synthetic oligonucleotide
ggcagtccgattgatatatacaccgagctgtttacgtaacctaaccgacgatcgg

SEQ ID NO: 505264 - DNA, 55 bp, Artificial; identical to SEQ ID NO: 212650
  Synthetic oligonucleotide

SEQ ID NO: 505265 - DNA, 55 bp, Artificial
  Synthetic oligonucleotide
ggcacaagggaggtgtattcaatgaatgtcatcgtttatacgaaacccgcatgtg

SEQ ID NO: 505266 - DNA, 55 bp, Artificial
  Synthetic oligonucleotide
ggatgtttccgtgttcaacgtgaaacattccgggtcacagtgggttccggcgggt

SEQ ID NO: 505267 - DNA, 55 bp, Artificial
  Synthetic oligonucleotide
ggatcgtcacatgccacgggctagcctcatattcacaggcgctccgatcgggtac

SEQ ID NO: 505268 - DNA, 55 bp, Artificial
  Synthetic oligonucleotide
ggatcccgtgtattctctttacttggaaacggcggagccggagagtgcttcgcac

SEQ ID NO: 505269 - DNA, 55 bp, Artificial
  Synthetic oligonucleotide
ggatatttacggacaatgacagaacggccactgtcggcggaaatcagatgcgcgc

SEQ ID NO: 505270 - DNA, 55 bp, Artificial
  Synthetic oligonucleotide
ggagggatttcacagacgccgacacgacgtgaacgttatccgataagtactctgg

SEQ ID NO: 505271 - DNA, 55 bp, Artificial
  Synthetic oligonucleotide
ggactccctccggcttgtccgaacagcgtggttctgcgaaggagttcacgctagc

SEQ ID NO: 505272 - DNA, 55 bp, Artificial
  Synthetic oligonucleotide
ggacctaccgttggctcaggaacgtttgccgcccgtagtccaccctcaccatagg

SEQ ID NO: 505273 - DNA, 55 bp, Artificial
  Synthetic oligonucleotide
gaaccaagtgcaaggagagtcgtgacatgactaccagccccgcggtttccggtgg

SEQ ID NO: 505274 - DNA, 55 bp, Artificial
  Synthetic oligonucleotide
cttgcatgtgaggtgcagcacagcctcggattgtggttgtcggctccgctccagg

SEQ ID NO: 505275 - DNA, 55 bp, Artificial
  Synthetic oligonucleotide
cttctgtcatgactaaccgtgattcggaacgtgattgttccaggggtcagggcgc

SEQ ID NO: 505276 - DNA, 55 bp, Artificial
  Synthetic oligonucleotide
cttctgcatcgcaccccgaagagtcggggatggtaaacgctggtgccagagaccg

SEQ ID NO: 505277 - DNA, 55 bp, Artificial
  Synthetic oligonucleotide
cttatcggataacgttcacgtcgtgtcggcgtctgtgaaatcacttctgagcacc

SEQ ID NO: 505278 - DNA, 55 bp, Artificial
  Synthetic oligonucleotide
ctgtcctacatccaccggcgtccctcccttgctcgttcgctcaccttactggacg

SEQ ID NO: 505279 - DNA, 55 bp, Artificial
  Synthetic oligonucleotide
ctgcttgttggtcagtctagccaggataggctagcgccggttccacgtgatgccg

SEQ ID NO: 505280 - DNA, 55 bp, Artificial
  Synthetic oligonucleotide
ctgctggagcggcaatttgcagggttgctatgcccatcgggtgtacttccacacg

SEQ ID NO: 505281 - DNA, 55 bp, Artificial
  Synthetic oligonucleotide
ctgcgtgtgcttcccgatcccacgtcctgagccgttcgcactaggctgagcgagt

SEQ ID NO: 505282 - DNA, 55 bp, Artificial
  Synthetic oligonucleotide
ctcggtggcgggtatccgttcgtagtgttcggtgatcgaatccaccgtgatcccg

SEQ ID NO: 505283 - DNA, 55 bp, Artificial
  Synthetic oligonucleotide
ctcgacaacacctcgtgttcgaaccgccccgggaaatcccgtgtcattgctcgta

SEQ ID NO: 505284 - DNA, 55 bp, Artificial
  Synthetic oligonucleotide
ctatgacaggtagccgttacgtgtaattaatccgctttcctgtacagattccgta

SEQ ID NO: 505285 - DNA, 55 bp, Artificial
  Synthetic oligonucleotide
ctactccccgtctgcctgtcagcatcccgaagtccgctagcatcgtaatagtgga

SEQ ID NO: 505286 - DNA, 55 bp, Artificial
  Synthetic oligonucleotide
ctaccaggaatcgagcgccgagcatctgatggtagttcgccgcgacggcacacag

SEQ ID NO: 505287 - DNA, 55 bp, Artificial
  Synthetic oligonucleotide
ctacaccctcacacgcgaaatccggcaatgctccagcgggccactgggttcacct

SEQ ID NO: 505288 - DNA, 55 bp, Artificial
  Synthetic oligonucleotide
cgttgacccggtgttcggactgcaaaggggcacaccaaatgcacatgactacccc

SEQ ID NO: 505289 - DNA, 55 bp, Artificial
  Synthetic oligonucleotide
cgtggtgtgatctagtttcatgcagcgtagccacaatgcgatccagctcacaggc

SEQ ID NO: 505290 - DNA, 55 bp, Artificial
  Synthetic oligonucleotide
cggtgaccttctttgccatacaatcgcccactttcttacgaatagtacgagtgca

SEQ ID NO: 505291 - DNA, 55 bp, Artificial
  Synthetic oligonucleotide
gcgaactaaggcatcacacacacagcaaccgccgcgacggtcccattcggaagtt

SEQ ID NO: 505292 - DNA, 55 bp, Artificial
  Synthetic oligonucleotide
gcctcgggcaatcggcctagtatgcgggtcgcacgatttcgagaggacgttcatc

SEQ ID NO: 505293 - DNA, 55 bp, Artificial
  Synthetic oligonucleotide
gccaggacggaggagtcatgccaggaaccctgacaagcaccccactgaccgcggt

SEQ ID NO: 505294 - DNA, 55 bp, Artificial
  Synthetic oligonucleotide
gcaggcatctatccgccgattcggtttggagctctccccgaaaatgactgaacag

SEQ ID NO: 505295 - DNA, 55 bp, Artificial
  Synthetic oligonucleotide
gcaccctcgcgtggtttcactgctgacgagagaaggaccagggacatggcgagct

SEQ ID NO: 505296 - DNA, 55 bp, Artificial
  Synthetic oligonucleotide
gatggtccgggacaacagttccggacgaccgttatcccctgaaagtggagggctc

SEQ ID NO: 505297 - DNA, 55 bp, Artificial
  Synthetic oligonucleotide
gatggctgcttggggagcaacatatgcgtccgttgcggcttccagtcctgcgtcg

SEQ ID NO: 505298 - DNA, 55 bp, Artificial
  Synthetic oligonucleotide
gatcgctcagctttaccggagcacccattcgctttgtgagcaactgctgtgctgc

SEQ ID NO: 505299 - DNA, 55 bp, Artificial
  Synthetic oligonucleotide
gagtggaaccctcatgacgattcctcgtccctctttggttgcttcgaggggaccg

SEQ ID NO: 505300 - DNA, 55 bp, Artificial
  Synthetic oligonucleotide
gactctgtttcgacgcttttcgtctcggagaccgctgtctatttggggtgtgctc

SEQ ID NO: 505301 - DNA, 55 bp, Artificial
  Synthetic oligonucleotide
gactccgtcttggaatttccggaattcgaggtattcttgcctcgggtaatcggcc

SEQ ID NO: 505302 - DNA, 55 bp, Artificial
  Synthetic oligonucleotide
gacgtatcctgaacattccccgcgcaacgccggagatgtcgagcatggacagggg

SEQ ID NO: 505303 - DNA, 55 bp, Artificial
  Synthetic oligonucleotide
gacgcttcgtaccacctagatcggggttcatcggtctcctttatctccggttagg

SEQ ID NO: 505304 - DNA, 55 bp, Artificial
  Synthetic oligonucleotide
gacgaggagcgccgacgaagaccgaccgaagatgcggagtttgactctgagccac

SEQ ID NO: 505305 - DNA, 55 bp, Artificial
  Synthetic oligonucleotide
gacatgaggatccacggtgcgatgcccgacagtggtgaccggaggtaaccgtcga

SEQ ID NO: 505306 - DNA, 55 bp, Artificial
  Synthetic oligonucleotide
gaatgccattccgaatatacagagtgccgttccaattagccacaggagcccgatg

SEQ ID NO: 505307 - DNA, 55 bp, Artificial
  Synthetic oligonucleotide
gaacgtgatcgacacctgtagctcagtctgcgagcaatatgaagctatcgaccgt

SEQ ID NO: 505308 - DNA, 55 bp, Artificial
  Synthetic oligonucleotide
gaacccgctggtggactcttggtcgactgcactgactaacccctctcgacgtcgg

SEQ ID NO: 505309 - DNA, 55 bp, Artificial
  Synthetic oligonucleotide
tgacctctgttcccggtgcgcccctgttgctgttggacggtgccagtctctggtt

SEQ ID NO: 505310 - DNA, 55 bp, Artificial
  Synthetic oligonucleotide
tgaatcctgcgcggcccggctatgactgcgccatcatgagctcactgtcttcccc

SEQ ID NO: 505311 - DNA, 55 bp, Artificial
  Synthetic oligonucleotide
tcggtgtcattcaatggttttccgcccttgaccgttcatgtctcgggcgctgagc

SEQ ID NO: 505312 - DNA, 55 bp, Artificial
  Synthetic oligonucleotide
tcggtggctgcgcgtgaatcgtctggcccagctgaatcatctgatcccagtccag

SEQ ID NO: 505313 - DNA, 55 bp, Artificial
  Synthetic oligonucleotide
tcgggattcgccgaatagtcgtgaggtgaactaacgttcaatcgtgcttggacat

SEQ ID NO: 505314 - DNA, 55 bp, Artificial
  Synthetic oligonucleotide
tcgctgcgggaccgatcgcggccagacacgcgtcaattggaatttcgcctgagct

SEQ ID NO: 505315 - DNA, 55 bp, Artificial
  Synthetic oligonucleotide
tcgcagcgcctgctcagacatgaggatccctccttctggaaatgaatcggaggcg

SEQ ID NO: 505316 - DNA, 55 bp, Artificial
  Synthetic oligonucleotide
tcgaggaacacgaggggtcgcttcgagaattgtctcgtgaatcggaaaacgagca

SEQ ID NO: 505317 - DNA, 55 bp, Artificial
  Synthetic oligonucleotide
tcgaacgctcatgtccgatcccgtcctttactggtgtgcgatgacgtgggatgtg

SEQ ID NO: 505318 - DNA, 55 bp, Artificial
  Synthetic oligonucleotide
tcctcgacgccggttggctgccccgacgactcgtttgcttgacgcaccttactac

SEQ ID NO: 505319 - DNA, 55 bp, Artificial
  Synthetic oligonucleotide
tcccgatcctgcggacgtctgttgcgaggcatctccagtcctgacctagtaccgg

SEQ ID NO: 505320 - DNA, 55 bp, Artificial
  Synthetic oligonucleotide
tcccctgccgcgtttattgacagttgtccactagattcttagagtccaagttgac

SEQ ID NO: 505321 - DNA, 55 bp, Artificial
  Synthetic oligonucleotide
tcccattatgcgagacggaggtatcgacctatgagacagcatagcgggatcggag

SEQ ID NO: 505322 - DNA, 55 bp, Artificial
  Synthetic oligonucleotide
tccaggcacgccgcatacaccagcggctctagatcatcccgccctggttacccga

SEQ ID NO: 505323 - DNA, 55 bp, Artificial
  Synthetic oligonucleotide
tcattgatattagcggctcagtaactgaaaacctacgcctgattcgggatttctc

SEQ ID NO: 505324 - DNA, 55 bp, Artificial
  Synthetic oligonucleotide
tattggtaatttcggactgtggttgggatcggtacgccgtccgatgtgttgccgc

SEQ ID NO: 505325 - DNA, 55 bp, Artificial
  Synthetic oligonucleotide
tattcttgccgattttgaccgatatgcagcaaaccttccatgcttccgcttttgc

SEQ ID NO: 505326 - DNA, 55 bp, Artificial
  Synthetic oligonucleotide
tttgatccttgtcgggtcgtgtattggcttcgaacccgcaaagatgggttcccct

SEQ ID NO: 505327 - DNA, 55 bp, Artificial
  Synthetic oligonucleotide
tttacctagattgagaacccagtgtgatagagctaacactcaaagtggaatgtgg

SEQ ID NO: 505328 - DNA, 55 bp, Artificial
  Synthetic oligonucleotide
ttgtgccggaagccaggacggaggagtcatgccaggaaccctgacaagcacccca

SEQ ID NO: 505329 - DNA, 55 bp, Artificial
  Synthetic oligonucleotide
ttctcaacggtcaccggacgaacggtcccgcacttccaccaacgcgtattcgccc

SEQ ID NO: 505330 - DNA, 55 bp, Artificial
  Synthetic oligonucleotide
ttccacccaacccggaacgcacatcctgacccatgtgccgtccctcgactcgaag

SEQ ID NO: 505331 - DNA, 55 bp, Artificial
  Synthetic oligonucleotide
ttaccgtgactttccagccgtgcgaaccccacgggcctattcacctcgcgtgggt

SEQ ID NO: 505332 - DNA, 55 bp, Artificial
  Synthetic oligonucleotide
tgttggtcactgctgtctctcccactgacgtcgtgctgtggacatcgcccgtgcg

SEQ ID NO: 505333 - DNA, 55 bp, Artificial
  Synthetic oligonucleotide
tgtcgacatcgcgccggggtatcgatgcgaggatgcgccgccagaactggacgag

SEQ ID NO: 505334 - DNA, 55 bp, Artificial
  Synthetic oligonucleotide
tgtcatccgcccatcgcgccccgagatgtcgccacgcagcatgattcgcccgtaa

SEQ ID NO: 505335 - DNA, 55 bp, Artificial
  Synthetic oligonucleotide
tgtacacctcggcgatacgccgtgcggtcggatccgcgtggtcgaacctagccga

SEQ ID NO: 505336 - DNA, 55 bp, Artificial
  Synthetic oligonucleotide
tgcgtggacattcgcactcctggttgtggtcagcactacgcgcccggatccgaga

SEQ ID NO: 505337 - DNA, 55 bp, Artificial
  Synthetic oligonucleotide
tgcgtatgcgcaggcagaccagggttacacgcaaatatcaaccggcgagcctgga

SEQ ID NO: 505338 - DNA, 55 bp, Artificial
  Synthetic oligonucleotide
tgcgcgggttcgtacccctcgtacaggtgttggcgccccatgagcagcagtacgg

SEQ ID NO: 505339 - DNA, 55 bp, Artificial
  Synthetic oligonucleotide
tgcgaaacgaacgtcccgccagaattcgcacagcagggccaacgacctgtgctgg

SEQ ID NO: 505340 - DNA, 55 bp, Artificial
  Synthetic oligonucleotide
tgccgaggggtctgtcggggacaccggggacaacggtggagaccgcacatgccgg

SEQ ID NO: 505341 - DNA, 55 bp, Artificial
  Synthetic oligonucleotide
tgattaccgccgtgtcgccggattctcctgcaacgcacggtgctgggtgctgtgt

SEQ ID NO: 505342 - DNA, 55 bp, Artificial
  Synthetic oligonucleotide
tgagtaactcgaatgtagcttcggctctcgacagaacgggtatgacatgccgaac

SEQ ID NO: 505343 - DNA, 55 bp, Artificial
  Synthetic oligonucleotide
tgagaactcagtgtgatagagctaacactcaaagtggaatgtggtgcagaccgca

SEQ ID NO: 505344 - DNA, 55 bp, Artificial
  Synthetic oligonucleotide
gtcgctacgccaacatgttatatcgatgggcgatgagatcgtctgtgccacagta

SEQ ID NO: 505345 - DNA, 55 bp, Artificial
  Synthetic oligonucleotide
gtcatcagtctgctgacgaacagacccgcgcgaatgccgaagcgtgattggggcg

SEQ ID NO: 505346 - DNA, 55 bp, Artificial
  Synthetic oligonucleotide
gtcagatcagtggcgagattccggtgactcgcgatggtgttcgcaccgaacgtcc

SEQ ID NO: 505347 - DNA, 55 bp, Artificial
  Synthetic oligonucleotide
gtacgcgagtggcgtgactgtggcaaagaagctcccgtgacgtcaggtgcaggac

SEQ ID NO: 505348 - DNA, 55 bp, Artificial
  Synthetic oligonucleotide
ggttccggtagcgtgagctggcatctatccgccgattcggtttggagctctcccc

SEQ ID NO: 505349 - DNA, 55 bp, Artificial
  Synthetic oligonucleotide
ggtgctcggtctgcaaggtctgttcgagctcggcgttcaccatcgaaagtcctcc

SEQ ID NO: 505350 - DNA, 55 bp, Artificial
  Synthetic oligonucleotide
ggtgcggaactcccaagatttcgtcttacgggacggttacgctcggccaccctag

SEQ ID NO: 505351 - DNA, 55 bp, Artificial
  Synthetic oligonucleotide
ggtcgacacgatcggtggccaatgaactcatcaatcactccgttctgccgctgta

SEQ ID NO: 505352 - DNA, 55 bp, Artificial
  Synthetic oligonucleotide
ggtatgacgcactgaccctggtgcgctcgtagctaccgacccgtgatagccccaa

SEQ ID NO: 505353 - DNA, 55 bp, Artificial
  Synthetic oligonucleotide
ggtagcgagccggaccctgctacggcagatggcgaaggagtatgcgtgaacatcg

SEQ ID NO: 505354 - DNA, 55 bp, Artificial
  Synthetic oligonucleotide
gggttgcccggcatacattcgtcccgtattcgcatcctgtgacattgggccagac

SEQ ID NO: 505355 - DNA, 55 bp, Artificial
  Synthetic oligonucleotide
gggtcgggtcggactctaaccagtcacatggagcgccaatcggccacgttcatcc

SEQ ID NO: 505356 - DNA, 55 bp, Artificial
  Synthetic oligonucleotide
ggggtcggctacagacctgatgacgtgcgacaagacgacatggccacgacgagtc

SEQ ID NO: 505357 - DNA, 55 bp, Artificial
  Synthetic oligonucleotide
ggggctccggatgaccacgctggggtctttcgcgcagctttgcgggtccatcggc

SEQ ID NO: 505358 - DNA, 55 bp, Artificial
  Synthetic oligonucleotide
ggggccgataacacgctcgctcatgaactcacctcggatgatcgagctacggcag

SEQ ID NO: 505359 - DNA, 55 bp, Artificial
  Synthetic oligonucleotide
gggcttccatagtagacacacacctgtcaggaatgtaaagatgactgaatttgcg

SEQ ID NO: 505360 - DNA, 55 bp, Artificial
  Synthetic oligonucleotide
gggctcacatcgcggttcttcgcgaggattacgctcagctgctgttcgcagaagt

SEQ ID NO: 505361 - DNA, 55 bp, Artificial
  Synthetic oligonucleotide
gggccggaactcgacttggtccgcaacacttcatcggacactcttcggctcgcca

SEQ ID NO: 505362 - DNA, 55 bp, Artificial
  Synthetic oligonucleotide
tagcggtccactatggccgaacttctccggaggctctcgcgatgcagcccagctt

SEQ ID NO: 505363 - DNA, 55 bp, Artificial
  Synthetic oligonucleotide
tagcatcggggccggtactaggtcaggactggagatgcctcgcaacagacgtccg

SEQ ID NO: 505364 - DNA, 55 bp, Artificial
  Synthetic oligonucleotide
tagagtggccagcatgacttacgacgtcgcgagggttcggggcctgataccgtcc

SEQ ID NO: 505365 - DNA, 55 bp, Artificial
  Synthetic oligonucleotide
tacgtatcattgatattagcggctcagtaactgaaaacctacgcctgattccgaa

SEQ ID NO: 505366 - DNA, 55 bp, Artificial
  Synthetic oligonucleotide
tacgtaatgctccagggctgagatatccagatttccggacactcgtagtgctctg

SEQ ID NO: 505367 - DNA, 55 bp, Artificial
  Synthetic oligonucleotide
tacctgccatggccccaggctagccgcaatcgccccatccggaccatccgcaaca

SEQ ID NO: 505368 - DNA, 55 bp, Artificial
  Synthetic oligonucleotide
taagagggagcgaggaattgggtggcggaggaagcggacccgtaaccgctgacac

SEQ ID NO: 505369 - DNA, 55 bp, Artificial
  Synthetic oligonucleotide
taacggccaactcgtcgattgatcgtatacgaaacagtggcgtaatccggtggac

SEQ ID NO: 505370 - DNA, 55 bp, Artificial
  Synthetic oligonucleotide
gtttccgccgaaatccagccggtccaaccgtaacctcgcttccggaacaccacgc

SEQ ID NO: 505371 - DNA, 55 bp, Artificial
  Synthetic oligonucleotide
gttgacaatcagattctgaccaggttcgacggctgctacgtagatggtgaccagc

SEQ ID NO: 505372 - DNA, 55 bp, Artificial
  Synthetic oligonucleotide
gttcgaactgaccaacatcgagacgtcaatcgtggagttgtgcagagaatcgccg

SEQ ID NO: 505373 - DNA, 55 bp, Artificial
  Synthetic oligonucleotide
gtgtgaacgtcgatctgctaccgcatatcgtcggtggtcccaacccggtgaccgg

SEQ ID NO: 505374 - DNA, 55 bp, Artificial
  Synthetic oligonucleotide
gtggtcggctacggtggacgccaaccgagatcttccgttccatccgaggtaggga

SEQ ID NO: 505375 - DNA, 55 bp, Artificial
  Synthetic oligonucleotide
gtgggacagtgcggttgcttgtgtccgttcaccaggatgcgaggatggtggtgtg

SEQ ID NO: 505376 - DNA, 55 bp, Artificial
  Synthetic oligonucleotide
gtgatgcggaacaccgtcccaggcaaacagggacctaggacctactcgtcgcgct

SEQ ID NO: 505377 - DNA, 55 bp, Artificial
  Synthetic oligonucleotide
gtgagccgcccaattcccttcgctgtactaacagtcgttatctcggatacgtatc

SEQ ID NO: 505378 - DNA, 55 bp, Artificial
  Synthetic oligonucleotide
gtgacagctgccgctgttgtgaatagcgtgacggttcgggcgaaactcgtcaagt

SEQ ID NO: 505379 - DNA, 55 bp, Artificial
  Synthetic oligonucleotide
gtcggtatcgccggtgggtctcaagacacatcccttcgttcggacaaccgttccg

SEQ ID NO: 505380 - DNA, 55 bp, Artificial
  Synthetic oligonucleotide
attccacgtcactgtgctgttcggtccggggctctgtgcgattctcgggcaccgt

SEQ ID NO: 505381 - DNA, 55 bp, Artificial
  Synthetic oligonucleotide
attttggcatatgtaaacccactttcccagcagcggtgcgctctcgacggctgga

SEQ ID NO: 505382 - DNA, 55 bp, Artificial
  Synthetic oligonucleotide
caacggaccgatttccccgcccgaaacgaccagcggttcctggcccattcggtga

SEQ ID NO: 505383 - DNA, 55 bp, Artificial
  Synthetic oligonucleotide
cacaggtaaccccgctcgtagctcgtgtcggtccttgggtgcggaccacatgttc

SEQ ID NO: 505384 - DNA, 55 bp, Artificial
  Synthetic oligonucleotide
caccagttgcggggatcacgataccgggactcggacggcagaaagctgtcgctga

SEQ ID NO: 505385 - DNA, 55 bp, Artificial
  Synthetic oligonucleotide
caccggtaggggtagcgggctcgatcctggatttcgaccggaggagattgttcga

SEQ ID NO: 505386 - DNA, 55 bp, Artificial
  Synthetic oligonucleotide
cacgaaaaccctgctctaccagcccactacgccatatccgcccgaaattcggccg

SEQ ID NO: 505387 - DNA, 55 bp, Artificial
  Synthetic oligonucleotide
cacggcctgcggagtcttgaggtcgagcgatacggcccgcttaccccgattcagc

SEQ ID NO: 505388 - DNA, 55 bp, Artificial
  Synthetic oligonucleotide
cacggtcggctcgcgttgcctcatctgttcgctgtaaccgttttaacagcacaga

SEQ ID NO: 505389 - DNA, 55 bp, Artificial
  Synthetic oligonucleotide
cactaaatgagaatccagtcccatattttgagatgcagaggtgaggtcgatggcc

SEQ ID NO: 505390 - DNA, 55 bp, Artificial
  Synthetic oligonucleotide
cactcaccggagaactcgctcatcagggataactgcctttcgtccatcggagaca

SEQ ID NO: 505391 - DNA, 55 bp, Artificial
  Synthetic oligonucleotide
cagcatggctgcctactctagacagcttgctatcctgcgtcagcggctgtcggcg

SEQ ID NO: 505392 - DNA, 55 bp, Artificial
  Synthetic oligonucleotide
caggatatggtgtgcgtcacgtgcgacgacttggcgacaggggccgatcgcgatt

SEQ ID NO: 505393 - DNA, 55 bp, Artificial
  Synthetic oligonucleotide
catccgcttccgaaccactggacccgaacccctatgccgatggttcgttctggga

SEQ ID NO: 505394 - DNA, 55 bp, Artificial
  Synthetic oligonucleotide
catgtcgttcggtgacctctacaggaagggccgcgaagcctcggacgttggtgga

SEQ ID NO: 505395 - DNA, 55 bp, Artificial
  Synthetic oligonucleotide
cattccgatagagccgtcgaggcccgatccagttaggggagttgtggagaccgaa

SEQ ID NO: 505396 - DNA, 55 bp, Artificial
  Synthetic oligonucleotide
ccaaatgcacatgactaccccgatcgctcgattggacgtggagcaggccgaagcg

SEQ ID NO: 505397 - DNA, 55 bp, Artificial
  Synthetic oligonucleotide
ccactgccgctgagttccataggatcgctcagctttaccggagcacccattcgct

SEQ ID NO: 505398 - DNA, 55 bp, Artificial
  Synthetic oligonucleotide
ccagcaactgtaactccggacgtgccgcgacatgccgttcgcatcgatccagcac

SEQ ID NO: 505399 - DNA, 55 bp, Artificial
  Synthetic oligonucleotide
ccaggttagttatgattaaccgagttgtccagaccacaccgagcggagattttca

SEQ ID NO: 505400 - DNA, 55 bp, Artificial
  Synthetic oligonucleotide
ccatcgggtcgtctacccggggaacgatatctgtggggaccaacctcgcccgaaa

SEQ ID NO: 505401 - DNA, 55 bp, Artificial
  Synthetic oligonucleotide
cccactgatgcgccttcagcaccttcgtgaacacaccggccatacctgaccctcc

SEQ ID NO: 505402 - DNA, 55 bp, Artificial
  Synthetic oligonucleotide
cccagtgtgatagagctaacactcaaagtggaatgtggtgcagttcgcagcgggg

SEQ ID NO: 505403 - DNA, 55 bp, Artificial
  Synthetic oligonucleotide
ccccaagcacgtttcgatcggtcacgtcgccgatcctattggcacgtcgcgagaa

SEQ ID NO: 505404 - DNA, 55 bp, Artificial
  Synthetic oligonucleotide
ccccgtacaccccgagattgtcggcatgaaccgtccggctctcggatagaacctg

SEQ ID NO: 505405 - DNA, 55 bp, Artificial
  Synthetic oligonucleotide
cccctgtaggggtgcgctcggatcagcgctgttagcaggttagcaagatgatagc

SEQ ID NO: 505406 - DNA, 55 bp, Artificial
  Synthetic oligonucleotide
cccgaccggaatgaggtaacccacgcgtgtgcggattgctcgggtttctgaccac

SEQ ID NO: 505407 - DNA, 55 bp, Artificial
  Synthetic oligonucleotide
cccgggcatcggaaaagcggccaacacttgcatagtactatggtgacgtagtact

SEQ ID NO: 505408 - DNA, 55 bp, Artificial
  Synthetic oligonucleotide
ccctcgccccaaatgcaacggcagtcctttgccgtcgaacagcatcaacaacggg

SEQ ID NO: 505409 - DNA, 55 bp, Artificial
  Synthetic oligonucleotide
ccgaaacctttgcacccctgcgtttcttgcatcgaccgatcgcgcatgcgaacac

SEQ ID NO: 505410 - DNA, 55 bp, Artificial
  Synthetic oligonucleotide
ccgatacaaccccggtgtgcaaccccgatctgtctcaatgtgagactcaggtcac

SEQ ID NO: 505411 - DNA, 55 bp, Artificial
  Synthetic oligonucleotide
ccgccagtacgccttgcgctgagaaggggtgcaatacacatgcatcatctccatg

SEQ ID NO: 505412 - DNA, 55 bp, Artificial
  Synthetic oligonucleotide
aaacacagtattcagcgctccgcgcaccgccctaacggccggtcaagagcgaagg

SEQ ID NO: 505413 - DNA, 55 bp, Artificial
  Synthetic oligonucleotide
aaacgtgaacttgtggcaggtcgtagaggaagccctccgcgagctacccgccccg

SEQ ID NO: 505414 - DNA, 55 bp, Artificial
  Synthetic oligonucleotide
aaatcgtcggccggagcgtttcatggatacgtgaccactcccctcgccacccagg

SEQ ID NO: 505415 - DNA, 55 bp, Artificial
  Synthetic oligonucleotide
aacacgtggaccgtgccctgatgcccgtatccgctaccgtcctggctattcgccg

SEQ ID NO: 505416 - DNA, 55 bp, Artificial
  Synthetic oligonucleotide
aagtgagtgacatccgatgatcgaaaagtaacgccctgagctccttttcggctcg

SEQ ID NO: 505417 - DNA, 55 bp, Artificial
  Synthetic oligonucleotide
aattgtggtgtgaactgcgaaaatgacacgtcccctgttctgtcgtgtcgatcgg

SEQ ID NO: 505418 - DNA, 55 bp, Artificial
  Synthetic oligonucleotide
acacatccgtactgcgatcggtacatccgcaggctacgacaccggactgtggcgg

SEQ ID NO: 505419 - DNA, 55 bp, Artificial
  Synthetic oligonucleotide
acacggctgcgttgatccgacggcatcgctcgcgggagttgttgggcgagatact

SEQ ID NO: 505420 - DNA, 55 bp, Artificial
  Synthetic oligonucleotide
acagcctgagaccagcagttttacaatcgtcgaatcagtgatagctttcgtgcat

SEQ ID NO: 505421 - DNA, 55 bp, Artificial
  Synthetic oligonucleotide
acatgaacgcgactcttcgaccatcggggctcgtcacgggattgaagaccttggc

SEQ ID NO: 505422 - DNA, 55 bp, Artificial
  Synthetic oligonucleotide
accacagctacgctgcccgacacggttcgccggcccgaaaggacatcatgcacaa

SEQ ID NO: 505423 - DNA, 55 bp, Artificial
  Synthetic oligonucleotide
accggagaactcgctcatctggaataactgcctttcgtccatcggagacaatgcc

SEQ ID NO: 505424 - DNA, 55 bp, Artificial
  Synthetic oligonucleotide
acctcgcagcgaccggcgtctttactacttccatacggtagttctttcgcgccga

SEQ ID NO: 505425 - DNA, 55 bp, Artificial
  Synthetic oligonucleotide
acgaagtcgtccgagtcgccacctccaaactctgggttcgggtgtcagatcgctc

SEQ ID NO: 505426 - DNA, 55 bp, Artificial
  Synthetic oligonucleotide
acgacggaaaacggacaagggcctccccgtaatatagttgcaagcactaactaac

SEQ ID NO: 505427 - DNA, 55 bp, Artificial
  Synthetic oligonucleotide
acgattgtgtgcaagcctgcttaaggtttctgcaccgtcgataccctgggacgga

SEQ ID NO: 505428 - DNA, 55 bp, Artificial
  Synthetic oligonucleotide
acggccgtaccgatccgaatgcgacaattgacgccgtacaccaacgcccaaggag

SEQ ID NO: 505429 - DNA, 55 bp, Artificial
  Synthetic oligonucleotide
acggtcgactcgggccccggacgcggcacgttggtggagatgtggaagtgggtac

SEQ ID NO: 505430 - DNA, 55 bp, Artificial
  Synthetic oligonucleotide
acttcttctgacgatcggtgtcattgccgcagttgtcttcgctgtcaccaaggtt

SEQ ID NO: 505431 - DNA, 55 bp, Artificial
  Synthetic oligonucleotide
agaacagacgttctttccaggcaagaaacgacgagactggttcttcagtcatacc

SEQ ID NO: 505432 - DNA, 55 bp, Artificial
  Synthetic oligonucleotide
agactatcggtaaccgggccgactactgtgcaccccatgacctcacggggaccac

SEQ ID NO: 505433 - DNA, 55 bp, Artificial
  Synthetic oligonucleotide
agcgctggacggaagtaacccaatcaaaccgagttacaccgatgactggacagac

SEQ ID NO: 505434 - DNA, 55 bp, Artificial
  Synthetic oligonucleotide
aggcactgcgactatatgacgcatgtcacaacttcgctgcgataggcgacgaacg

SEQ ID NO: 505435 - DNA, 55 bp, Artificial
  Synthetic oligonucleotide
agtcgatcgcgtaaacggtggtgcaacgaaccgaggccaaggtcgggtcccggat

SEQ ID NO: 505436 - DNA, 55 bp, Artificial
  Synthetic oligonucleotide
agttacccgcactggtggccgcttcggtacctcgtgcccgctggacacgaatgag

SEQ ID NO: 505437 - DNA, 55 bp, Artificial
  Synthetic oligonucleotide
atcccgacgagaagaacgctcatggtgtgaccaccgatcccttgctggttggctc

SEQ ID NO: 505438 - DNA, 55 bp, Artificial
  Synthetic oligonucleotide
atccggcacgccgccattatctgccgtcgtggctccctgccgttcgtgactcttt

SEQ ID NO: 505439 - DNA, 55 bp, Artificial
  Synthetic oligonucleotide
atcgcctgctatgtgcccgtaccgtgcccgtcgaatctcagcgggtgtctcacgt

SEQ ID NO: 505440 - DNA, 55 bp, Artificial
  Synthetic oligonucleotide
atctggtccgacgaatcaggcgccgatgccgtaagcgacctcgtgctccgttcgg

SEQ ID NO: 505441 - DNA, 55 bp, Artificial
  Synthetic oligonucleotide
atgatggcgcggccgtctttacagagttcgacaacccggtcccaggcaagctcac

SEQ ID NO: 505442 - DNA, 55 bp, Artificial
  Synthetic oligonucleotide
atgcaaccgatacggctcaggcaacacccgagcgtccgagagcgaggatcaggca

SEQ ID NO: 505443 - DNA, 55 bp, Artificial
  Synthetic oligonucleotide
atgcgagcgaagacccatcacccgtcgcgaggcggctcaactcacaccctgcgga

SEQ ID NO: 505444 - DNA, 55 bp, Artificial
  Synthetic oligonucleotide
cgatagccacaatcgcacagaattggaacaggttctacatgctttcccggtccgg

SEQ ID NO: 505445 - DNA, 55 bp, Artificial
  Synthetic oligonucleotide
cgatcgccctcacccacaaaggttctgacactcccgcccaagaaggcgtgtaccg

SEQ ID NO: 505446 - DNA, 55 bp, Artificial
  Synthetic oligonucleotide
cgatggcgaatggatcggtaagatcgggctcagagttcatgggattgcctctccc

SEQ ID NO: 505447 - DNA, 55 bp, Artificial
  Synthetic oligonucleotide
cgattcaggcagtacgcaacagggatacaccgacggcggcgcgatagcgatccag

SEQ ID NO: 505448 - DNA, 55 bp, Artificial
  Synthetic oligonucleotide
cgattgtcgatacgtgtacgtgggaggtgaccggtatgagtcggctgcattcggc

SEQ ID NO: 505449 - DNA, 55 bp, Artificial
  Synthetic oligonucleotide
cgcagcgcgaagaacgaaatgaggcgaacacctgctgtgagcagctcaaaatccc

SEQ ID NO: 505450 - DNA, 55 bp, Artificial
  Synthetic oligonucleotide
cgcattcgccgaccactcttgcgctcccagcacggaccacgaatagtagaacacg

SEQ ID NO: 505451 - DNA, 55 bp, Artificial
  Synthetic oligonucleotide
cgccacgcgaaatagttagctgagcggttgctgttgtggtcctcgtgggttaggt

SEQ ID NO: 505452 - DNA, 55 bp, Artificial
  Synthetic oligonucleotide
cgccagtaggtaatcaccgcgccgacacgatctctactcccggcatgcccactct

SEQ ID NO: 505453 - DNA, 55 bp, Artificial
  Synthetic oligonucleotide
cgcccgttgccatgacgcacaatcgctgtgggtgtccgtagctcgactatgtcca

SEQ ID NO: 505454 - DNA, 55 bp, Artificial
  Synthetic oligonucleotide
cgcgacatacttcccaggttcgacctgatcgtggggccagatccaactcttcggc

SEQ ID NO: 505455 - DNA, 55 bp, Artificial
  Synthetic oligonucleotide
cgcgcgaccgataacctcggcgtagcaaagaaacctcatcagtcacattcgacac

SEQ ID NO: 505456 - DNA, 55 bp, Artificial
  Synthetic oligonucleotide
cgcggacgacagagagaagctcgtgaagcagagatccggcccggagaacgcgtaa

SEQ ID NO: 505457 - DNA, 55 bp, Artificial
  Synthetic oligonucleotide
cgcggggtgaagcggtcataactcccagtgtgcacccgcggctattttctggcaa

SEQ ID NO: 505458 - DNA, 55 bp, Artificial
  Synthetic oligonucleotide
cgctgaaatgcgaaccagggagtgggctggaaatctacaggcacgagcagccgag

SEQ ID NO: 505459 - DNA, 55 bp, Artificial
  Synthetic oligonucleotide
cgcttttcgggaggcgtacctgcgttatttctgatggtgggccagatgcctcgga

SEQ ID NO: 505460 - DNA, 55 bp, Artificial
  Synthetic oligonucleotide
cggaacgcacatcctgacccatgtgccgtccctcgactcgaagccctgccatttg

SEQ ID NO: 505461 - DNA, 55 bp, Artificial
  Synthetic oligonucleotide
cggacagcccgaatccatctcaacgagtagaccatgtagtcgtacgttcgaacgg

SEQ ID NO: 505462 - DNA, 55 bp, Artificial
  Synthetic oligonucleotide
cggacagtccgcctgagtgtcctgttggtgaccgcgaatccctgtgcataaccac

SEQ ID NO: 505463 - DNA, 55 bp, Artificial
  Synthetic oligonucleotide
cggagttcagccatacagccaggcgccgcgtgaccagttagcccgaacgacgaaa

SEQ ID NO: 505464 - DNA, 55 bp, Artificial
  Synthetic oligonucleotide
cggagttcgcatcccgctgtactatgaacgggtggtcgtcagcatcggtgctacg

SEQ ID NO: 505465 - DNA, 55 bp, Artificial
  Synthetic oligonucleotide
cggccctggttgacatgatgccacaccgatgagaaggtttacacgaaagcttctc

SEQ ID NO: 505466 - DNA, 55 bp, Artificial
  Synthetic oligonucleotide
cggctaccctgcggcgtatgaccaccatccgcggtcgatacagttcgggcgaaca

SEQ ID NO: 505467 - DNA, 55 bp, Artificial
  Synthetic oligonucleotide
cggctatctagcccaagtgttgctgagcgtgttgccatacgatttcgcgccggtg

SEQ ID NO: 505468 - DNA, 55 bp, Artificial
  Synthetic oligonucleotide
cggctcagtaactgaaaacctacgcctgattcaggatttccttgaagcttctagg

SEQ ID NO: 505469 - DNA, 55 bp, Artificial
  Synthetic oligonucleotide
cggctgctttccctcgaatacccgtcgggtctgagagtttatggagcgcaatcga

SEQ ID NO: 505470 - DNA, 55 bp, Artificial
  Synthetic oligonucleotide
cggcttgcatcacctaatagaggttcgcctcacctaacttttggagtcgtgtcca

SEQ ID NO: 505471 - DNA, 55 bp, Artificial
  Synthetic oligonucleotide
cgggcacgtcacaaacgtcgcagcgcgaagaacgaaatgaggcgaacacctgctg

SEQ ID NO: 505472 - DNA, 55 bp, Artificial
  Synthetic oligonucleotide
cgggtgtccggatatcgacggaaataccgtgcactgcggtcaacgtgttgagccc

SEQ ID NO: 505473 - DNA, 55 bp, Artificial
  Synthetic oligonucleotide
cggtctcggtgataatggggcgcgctcgtatcgacagatcagatagtcgtattcg

SEQ ID NO: 505474 - DNA, 55 bp, Artificial
  Synthetic oligonucleotide
ccggtttcgtgggtgtcccacgggaggttccagtgctgtcttctgagatcgacga

SEQ ID NO: 505475 - DNA, 55 bp, Artificial
  Synthetic oligonucleotide
cctcgcgaggaatccagatgtcggttgccgcgtgatagatgtacagcgggacaac

SEQ ID NO: 505476 - DNA, 55 bp, Artificial
  Synthetic oligonucleotide
ccggtgggaccgttcgccccgaagacgatgagacgcatggatgttccttctgggt

SEQ ID NO: 505477 - DNA, 55 bp, Artificial
  Synthetic oligonucleotide
ccggcagcggaagataatccggtgatgcccggtcggtacgcccaatgagccgaaa

SEQ ID NO: 505478 - DNA, 55 bp, Artificial
  Synthetic oligonucleotide
cctcgctatcgagatgcctcgatgctatctgcgcctcccgacagaccgtgcgtga

SEQ ID NO: 505479 - DNA, 55 bp, Artificial
  Synthetic oligonucleotide
ccggatgtcgggtgtgctgagaggaccgtcgacccgatagaaagcgtctgtggtc

SEQ ID NO: 505480 - DNA, 55 bp, Artificial
  Synthetic oligonucleotide
ccggatgcagttcctctcgtaatggacggagaattctcgcgtggcacccaagtcg

SEQ ID NO: 505481 - DNA, 55 bp, Artificial
  Synthetic oligonucleotide
cctgagtcacgatatcgagtagaacaggttcttattctggtggcaagagtagccc

SEQ ID NO: 505482 - DNA, 55 bp, Artificial
  Synthetic oligonucleotide
ccggatcgaacggaggatgttcgcatggacgaccagtcccgcatgtacgagctcg

SEQ ID NO: 505483 - DNA, 55 bp, Artificial
  Synthetic oligonucleotide
ccttcaatggttttccgcccctgaccgttcacgtctcgggcgctgagcgagagtg

SEQ ID NO: 505484 - DNA, 55 bp, Artificial
  Synthetic oligonucleotide
ccggacagatttcgaagatgagcgaacataccgacgtcgcacgatcggggctgac

SEQ ID NO: 505485 - DNA, 55 bp, Artificial
  Synthetic oligonucleotide
ccttgccttatccgatgcagccttgaatcggtacgccatctgcactgagcatccg

SEQ ID NO: 505486 - DNA, 55 bp, Artificial
  Synthetic oligonucleotide
ccggaattcggggtattcttgcctcgggtaatcggcctagtatgcgggtcgcacg

SEQ ID NO: 505487 - DNA, 55 bp, Artificial
  Synthetic oligonucleotide
ccgcttttcccgcgatcagcgaattctggctacggctgttggagaccgataggtc

SEQ ID NO: 505488 - DNA, 55 bp, Artificial
  Synthetic oligonucleotide
ccgcgtagtgagttgcttcatgcaacgaaccataagttagtgagttctatcaagc

SEQ ID NO: 505489 - DNA, 55 bp, Artificial
  Synthetic oligonucleotide
cgaactcacagacttcatcctctctcaagagacgaagcctccggacatgccgggg

SEQ ID NO: 505490 - DNA, 55 bp, Artificial
  Synthetic oligonucleotide
cgacagaacacccgagaacgacgcacaaccgcgaaagacgacttcaggggatgac

SEQ ID NO: 505491 - DNA, 55 bp, Artificial
  Synthetic oligonucleotide
ccgccgctagtaggcatgattcgactattgatgtcggttggctcacagtcgtcac

SEQ ID NO: 505492 - DNA, 55 bp, Artificial
  Synthetic oligonucleotide
cgataccccagaccagccatgccctcatgtcacaaggacgatacgcgtcggtctg

SEQ ID NO: 505493 - DNA, 54 bp, Artificial
  Synthetic oligonucleotide
ctcgcgcagaggggaaaacgacagcagactcctcgatgccgtacgtgcgggcaa

SEQ ID NO: 505494 - DNA, 54 bp, Artificial
  Synthetic oligonucleotide
ccgcgttcctgtgaccggatcgacataggagccgaatactcaccctcccagcag

SEQ ID NO: 505495 - DNA, 54 bp, Artificial
  Synthetic oligonucleotide
cgggtgcccgaactgttttccgggtccggtggaagctgaagaagtgtgcggcac

SEQ ID NO: 505496 - DNA, 54 bp, Artificial
  Synthetic oligonucleotide
ttacatgtgcctcggccgtgtacagcgcagtggtcattctcgaactcccttcgt

SEQ ID NO: 505497 - DNA, 54 bp, Artificial
  Synthetic oligonucleotide
ttagcacgacagttgtagttcgttacctgtagattgtggcgtgctggaagatgt

SEQ ID NO: 505498 - DNA, 54 bp, Artificial
  Synthetic oligonucleotide
cgtgagcaggcatctatccgccgattcggtttggagctttccccgaaaatgact

SEQ ID NO: 505499 - DNA, 54 bp, Artificial
  Synthetic oligonucleotide
agcgccatacctttacctagattgagaacccagtgtgatagagctaacactcaa

SEQ ID NO: 505500 - DNA, 54 bp, Artificial
  Synthetic oligonucleotide
aaaatccaggtcagcaatcttaagcgtgtatgtaacacagatttaacgccggat

SEQ ID NO: 505501 - DNA, 54 bp, Artificial
  Synthetic oligonucleotide
ccgttgtgcgttgctcggcactgcagtagtcctcccgtgaacgatcgatgtggt

SEQ ID NO: 505502 - DNA, 54 bp, Artificial
  Synthetic oligonucleotide
cgaaaagtactgcgccggaccgaatcaccccgtctttccgcgcacaggagtgca

SEQ ID NO: 505503 - DNA, 54 bp, Artificial
  Synthetic oligonucleotide
atgcaagaccctgacagaggtaatctacgcacagcggatcatgcgagtaaccga

SEQ ID NO: 505504 - DNA, 54 bp, Artificial
  Synthetic oligonucleotide
cacctggcttgattgcgttttccggagcttccgcaacatgtgaatgtgcagtaa

SEQ ID NO: 505505 - DNA, 54 bp, Artificial
  Synthetic oligonucleotide
gttgcggagttctcgacagttaacaatgattcccctcagcagaccattccggtc

SEQ ID NO: 505506 - DNA, 54 bp, Artificial
  Synthetic oligonucleotide
atccgccagccaagcgatcatgtccggttgtcctccctcccatccggaggcgaa

SEQ ID NO: 505507 - DNA, 53 bp, Artificial
  Synthetic oligonucleotide
tgtcattaatttccgattgacgtaccgaaacgatcgatcctgttccggatagc

SEQ ID NO: 505508 - DNA, 53 bp, Artificial
  Synthetic oligonucleotide
ggactcttggtcgactgcactgactaacccctctcgacgtcggttacctaccc

SEQ ID NO: 505509 - DNA, 53 bp, Artificial
  Synthetic oligonucleotide
cgggcacagacatcacggcggtatcgcaccctcgaacggcccactcgacccgt

SEQ ID NO: 505510 - DNA, 53 bp, Artificial
  Synthetic oligonucleotide
gactcctcgaggattccaccggttgtccacgctgtggtgcacatgtgtgaaca

SEQ ID NO: 505511 - DNA, 53 bp, Artificial
  Synthetic oligonucleotide
cactttcggacgcgtgccggagcggagtctgtcgtgtccaagatttcgtcgtt

SEQ ID NO: 505512 - DNA, 53 bp, Artificial
  Synthetic oligonucleotide
cctcgctggcgtacggggttgtcctttcgcgggctgtcgagtctgaaggtggt

SEQ ID NO: 505513 - DNA, 53 bp, Artificial
  Synthetic oligonucleotide
agcgggaaaagggttggacacagtgtgttttcttcaggggaacattacgccgg

SEQ ID NO: 505514 - DNA, 53 bp, Artificial
  Synthetic oligonucleotide
ccataactgtcacgaccttcgctgcacgagttgattcccatatggagctgacc

SEQ ID NO: 505515 - DNA, 53 bp, Artificial
  Synthetic oligonucleotide
agacccggggccgtatgaaagagatggtgtcgcttgccattcgggtcgatcat

SEQ ID NO: 505516 - DNA, 53 bp, Artificial
  Synthetic oligonucleotide
tttcgcagaagtcggttccgtctactccaaagggacacagatgagttcatctc

SEQ ID NO: 505517 - DNA, 53 bp, Artificial
  Synthetic oligonucleotide
cgtggagacgggtctgccatccggccaggacccattcatcgaacaactcttgc

SEQ ID NO: 505518 - DNA, 53 bp, Artificial
  Synthetic oligonucleotide
ccggattcttctgtgcaggtgagctgttcgatcgtccacggtggatcggttcc

SEQ ID NO: 505519 - DNA, 52 bp, Artificial
  Synthetic oligonucleotide
cacccttgttccggtcactggtgcgtacgggcatcccctgcgaacggacacc

SEQ ID NO: 505520 - DNA, 52 bp, Artificial
  Synthetic oligonucleotide
acctgtgcaacgcacggatggccggattttctcccggatgcggtcccggtca

SEQ ID NO: 505521 - DNA, 52 bp, Artificial
  Synthetic oligonucleotide
catactctcgacttccgttcgtgtccaatgtgatcggcccgcattcagggtt

SEQ ID NO: 505522 - DNA, 52 bp, Artificial
  Synthetic oligonucleotide
actcaccgtctcgtctgcgttgctatgacaacgtctttgttggcggcccgac

SEQ ID NO: 505523 - DNA, 52 bp, Artificial
  Synthetic oligonucleotide
ttcgcggatcggaagacagagaggcgcgggccgatgacaacccgggtttcca

SEQ ID NO: 505524 - DNA, 52 bp, Artificial
  Synthetic oligonucleotide
atgctttgagcatatatgtccggtccactatctcgggaggatcattgcgtac

SEQ ID NO: 505525 - DNA, 52 bp, Artificial
  Synthetic oligonucleotide
tccggggagaaaccgtaatgtgttgcgaagcggacatattcgggtgtcggga

SEQ ID NO: 505526 - DNA, 52 bp, Artificial
  Synthetic oligonucleotide
gggagcaatgaacctaaccggagataaaggagaccgatgaaccccgatctag

SEQ ID NO: 505527 - DNA, 51 bp, Artificial
  Synthetic oligonucleotide
cgtgggagaaggtcttcagccagacaggaaccgagaagtgaacgcgatcaa

SEQ ID NO: 505528 - DNA, 51 bp, Artificial
  Synthetic oligonucleotide
gcaaccatgtgagcaacgcctgtgtgacttcggtgggccgttgttccatga

SEQ ID NO: 505529 - DNA, 51 bp, Artificial
  Synthetic oligonucleotide
cgcacacgagtgcgccgttgtgagtcaagcgtccgaatggtgtctttacga

SEQ ID NO: 505530 - DNA, 51 bp, Artificial
  Synthetic oligonucleotide
cacgtatcaggaggtgcatgtgtcacgcgcaatccatgtattccgcacccc

SEQ ID NO: 505531 - DNA, 51 bp, Artificial
  Synthetic oligonucleotide
acacgcgcggaaacggaacggcagcgcgtcaataggggttaacgcaaagag

SEQ ID NO: 505532 - DNA, 51 bp, Artificial
  Synthetic oligonucleotide
tgggcattcggaggcccactcggcacctgagttctctccgcgaagcgtgcg

SEQ ID NO: 505533 - DNA, 51 bp, Artificial
  Synthetic oligonucleotide
tggcgacggaccctgccaccggcacaggacaggaggacccctatggctcga

SEQ ID NO: 505534 - DNA, 51 bp, Artificial
  Synthetic oligonucleotide
tgcgcactggaactggaagcctgtgcgggcggggtatacggcccaccgaca

SEQ ID NO: 505535 - DNA, 51 bp, Artificial
  Synthetic oligonucleotide
acctgtgcccgaaggcaactgactcgtgcccgaaggccatacgctgcaccg

SEQ ID NO: 505536 - DNA, 51 bp, Artificial
  Synthetic oligonucleotide
tacagtcgcgacgctccgcacaacatgttcgtccgctcggatcagttgccg

SEQ ID NO: 505537 - DNA, 51 bp, Artificial
  Synthetic oligonucleotide
tcttcctgagcgtccatccggggcttgaccatccggagaacacgctggcag

SEQ ID NO: 505538 - DNA, 51 bp, Artificial
  Synthetic oligonucleotide
ctgtgtctccggcagctttcggacatgaattctggtgtagtccagcgattc

SEQ ID NO: 505539 - DNA, 51 bp, Artificial
  Synthetic oligonucleotide
atcaagcgtccgcatccaagctataatccttttgcgaatgaaattatcgta

SEQ ID NO: 505540 - DNA, 51 bp, Artificial
  Synthetic oligonucleotide
agacattgatccgcttctcgacccaccttcaccgatgttcccggccgacag

SEQ ID NO: 505541 - DNA, 50 bp, Artificial
  Synthetic oligonucleotide
atacttccactgcggtattcccctgggtcacgatatcgagtagaacaggt

SEQ ID NO: 505542 - DNA, 50 bp, Artificial
  Synthetic oligonucleotide
ataccgcggcagctccggatagttcggacaatacgggcaagtttcatctg

SEQ ID NO: 505543 - DNA, 55 bp, Artificial
  Synthetic oligonucleotide
tggctgggaagcatctcggcctgatcgctgttcactaccccgcaggaggacccat

SEQ ID NO: 505544 - DNA, 55 bp, Artificial
  Synthetic oligonucleotide
tctggacgatcgacgacgtgtggaggtcatgcatcatgcgcacctaccccgccca

SEQ ID NO: 505545 - DNA, 55 bp, Artificial
  Synthetic oligonucleotide
gttctgacggcgtcccaagcctaccagcgcggtgatccccggcggtaatcccatc

SEQ ID NO: 505546 - DNA, 55 bp, Artificial
  Synthetic oligonucleotide
gtcctcgacggttgtcagaccctggtgtgagcatgtgacgcagaccacgagggag

SEQ ID NO: 505547 - DNA, 55 bp, Artificial
  Synthetic oligonucleotide
ggtggcacggcaggtctgcatgagggtcctctcggcaggtttcttagggaaggct

SEQ ID NO: 505548 - DNA, 55 bp, Artificial
  Synthetic oligonucleotide
ggtcaagtaatgagacgagatgtccgacatgtggacgctcaccaggggtgcggtg

SEQ ID NO: 505549 - DNA, 55 bp, Artificial
  Synthetic oligonucleotide
gccgactcgcgacaaattggttcgtctgggcggttgacgtccgtgatggcggtca

SEQ ID NO: 505550 - DNA, 55 bp, Artificial
  Synthetic oligonucleotide
gccccacgacactccataactcaaccccggtccttgacaagttcctgaggaacgg

SEQ ID NO: 505551 - DNA, 55 bp, Artificial
  Synthetic oligonucleotide
gataatcgttgtccccggagttatccatggccaccaccgtatctcagtcatgaga

SEQ ID NO: 505552 - DNA, 55 bp, Artificial
  Synthetic oligonucleotide
cgcttccttctgcgtcccgttgtaaatctcgccactcagtactcgcttggctacg

SEQ ID NO: 505553 - DNA, 55 bp, Artificial
  Synthetic oligonucleotide
cctaggagccgggcccggagtccaggacgtgactgacgctgcgccctggacaatg

SEQ ID NO: 505554 - DNA, 55 bp, Artificial
  Synthetic oligonucleotide
ccccaaaaggggccaacatcgttttgattcctgacaaaaggtttgctgacaaaca

SEQ ID NO: 505555 - DNA, 55 bp, Artificial
  Synthetic oligonucleotide
agaacccgcctgacgcacccgcacggggctagcgtcctgccatgggacgtctcct

SEQ ID NO: 505556 - DNA, 55 bp, Artificial
  Synthetic oligonucleotide
acggtacagtgggattgaaacgttttaatgcaggaggtggtcccgtgcgagtcgc

SEQ ID NO: 505557 - DNA, 55 bp, Artificial
  Synthetic oligonucleotide
accatagcggcatcgtacggagcgtcccgcgcgtcggcatgtgaggtagtccact

SEQ ID NO: 505558 - DNA, 52 bp, Artificial
  Synthetic oligonucleotide
aaaacctcgacccagacatggaggcatgagatgccgaagttcaagccgcact

SEQ ID NO: 505559 - DNA, 51 bp, Artificial
  Synthetic oligonucleotide
aaaacggtttcggcagacaaggggcccggagtgcccagtccctccgtgcgt

SEQ ID NO: 505560 - DNA, 55 bp, Artificial
  Synthetic oligonucleotide
ttagaaaccgggaccggacatgccctctcacgaaccgtcgcgcccgggacacccg

SEQ ID NO: 505561 - DNA, 55 bp, Artificial
  Synthetic oligonucleotide
gtgatcagtcgaatcgacctccgaggttcccaggacgacccgcgcgactcccttc

SEQ ID NO: 505562 - DNA, 55 bp, Artificial
  Synthetic oligonucleotide
gtgacctgcgtgggtgcccgaacaccaccatcaatgtgcataggtctgagcccgc

SEQ ID NO: 505563 - DNA, 55 bp, Artificial
  Synthetic oligonucleotide
gggcctgtccggaaggtgtagatatgtccttgtttggcgggttccggacgcatgg

SEQ ID NO: 505564 - DNA, 55 bp, Artificial
  Synthetic oligonucleotide
gctgccacctcgaccagtagcagcgcacagaagtactcgtaccctccagcttacg

SEQ ID NO: 505565 - DNA, 55 bp, Artificial
  Synthetic oligonucleotide
gacttaacgcacgcttaatatcgcgctccgaggctctatgtttgaccctgacgcc

SEQ ID NO: 505566 - DNA, 55 bp, Artificial
  Synthetic oligonucleotide
gaaacctggaatgccgggtgtcacgggaaggcgggagcgccctctttgtagatgg

SEQ ID NO: 505567 - DNA, 55 bp, Artificial
  Synthetic oligonucleotide
cggtgtccgcacggggatggaaccgtacgggtgtttcgaagcgtccgagaggtat

SEQ ID NO: 505568 - DNA, 55 bp, Artificial
  Synthetic oligonucleotide
ccggttgggaacgtctgggtcgggttagatgttgtcagaggtgactaacgccgag

SEQ ID NO: 505569 - DNA, 55 bp, Artificial
  Synthetic oligonucleotide
ccccgaccggatgtggacgagatccaccgaaaggcgcgatggtcttctaccttcg

SEQ ID NO: 505570 - DNA, 55 bp, Artificial
  Synthetic oligonucleotide
cccatggtgagatcccctcctcggtattggactggactatcatgcatgcccttgc

SEQ ID NO: 505571 - DNA, 55 bp, Artificial
  Synthetic oligonucleotide
cagtgacatggagatcagcgccatgcacaggaaccatgcgggaccggacatgggg

SEQ ID NO: 505572 - DNA, 55 bp, Artificial
  Synthetic oligonucleotide
atacgtgacctgtacagcgaccccagtagggcctcgcccgcctgcgatcggttca

SEQ ID NO: 505573 - DNA, 55 bp, Artificial
  Synthetic oligonucleotide
acatagtgtcacgctcgccgaacgaggcacagccccaccgtctaacggtcgtgag

SEQ ID NO: 505574 - DNA, 54 bp, Artificial
  Synthetic oligonucleotide
gaccagggagactacctggccgctaccgccattctacggtgggtgacgatcccc

SEQ ID NO: 505575 - DNA, 53 bp, Artificial
  Synthetic oligonucleotide
gaaatgtcggaattttacccattgatgcacccgagttgcgtgcaatgaccgga

SEQ ID NO: 505576 - DNA, 53 bp, Artificial
  Synthetic oligonucleotide
gaacacgtgacgcggcacactctatggttccgccatgggtgtattgcggaaaa

SEQ ID NO: 505577 - DNA, 55 bp, Artificial
  Synthetic oligonucleotide
ttccgtccgttgaattcaggaaccggatacacaggaaaacgcacgtcgaaccagc

SEQ ID NO: 505578 - DNA, 55 bp, Artificial
  Synthetic oligonucleotide
ttagcgaccccgcgccctgtagctgcgaacggataccggaggcgccccacggatt

SEQ ID NO: 505579 - DNA, 55 bp, Artificial
  Synthetic oligonucleotide
tgccctggcggtggatttgcggtccaaggagggcgggcaaggcacgggagtcaaa

SEQ ID NO: 505580 - DNA, 55 bp, Artificial
  Synthetic oligonucleotide
tcaagtggcgcaaggagccgctcaaactcacgccctccccgcagctcatcaccct

SEQ ID NO: 505581 - DNA, 55 bp, Artificial
  Synthetic oligonucleotide
gtttgtcggcctgtcgttcttattgctgaccggcgtattgacctgggaagatatc

SEQ ID NO: 505582 - DNA, 55 bp, Artificial
  Synthetic oligonucleotide
ggtattcgctccgctcagagagatgacgcctctctcccaagtgatgccgtaacca

SEQ ID NO: 505583 - DNA, 55 bp, Artificial
  Synthetic oligonucleotide
gctttcttgcagtcgcgctctgccttctccgcgctacgcagccaatgctcatacg

SEQ ID NO: 505584 - DNA, 55 bp, Artificial
  Synthetic oligonucleotide
gcctggcttagtttctcatccagtagtgcatcatcggttgtttgtcggtcttccg

SEQ ID NO: 505585 - DNA, 55 bp, Artificial
  Synthetic oligonucleotide
gccgatacaccccggtaaaatcctccgcgtagccgtaatagtggtaattgaaggc

SEQ ID NO: 505586 - DNA, 55 bp, Artificial
  Synthetic oligonucleotide
gaccctgtcggagtagtcctggaccaggttttgtatctccacgcgtttggctccg

SEQ ID NO: 505587 - DNA, 55 bp, Artificial
  Synthetic oligonucleotide
cgttcccgaagtgttccgcccgacctggaaaaccaattcgcaaatcgactactcc

SEQ ID NO: 505588 - DNA, 55 bp, Artificial
  Synthetic oligonucleotide
cgtaatcaaaaccgtcatacgcgaggatcgcggcttgaagacctgtcgtcgggag

SEQ ID NO: 505589 - DNA, 55 bp, Artificial
  Synthetic oligonucleotide
cgatcacgaacaccggagcgggtgagtttgacgaaaacacgctcgaagtcggcgg

SEQ ID NO: 505590 - DNA, 55 bp, Artificial
  Synthetic oligonucleotide
cgatacccgttcgcgttggttccgggaaaggaactctggtaatcgttgaacgtcc

SEQ ID NO: 505591 - DNA, 55 bp, Artificial
  Synthetic oligonucleotide
ccggtggactccgatgaacggaagggattttccttcgcaaggggctgacatcggt

SEQ ID NO: 505592 - DNA, 55 bp, Artificial
  Synthetic oligonucleotide
ccctccgggcagcgagttttccaaagtctatccgcctcccgtctattccaacatg

SEQ ID NO: 505593 - DNA, 55 bp, Artificial
  Synthetic oligonucleotide
ccctacggctacaactcgcgaggcgcacttcacacggactccggcgagagcttct

SEQ ID NO: 505594 - DNA, 55 bp, Artificial
  Synthetic oligonucleotide
catgagaattggaacagaggcgttttcagaagcatggagaaaccgatctgatata

SEQ ID NO: 505595 - DNA, 55 bp, Artificial
  Synthetic oligonucleotide
acgagattctcgggtatgcgcagacttccatgccggatttcctgaatcgtggacg

SEQ ID NO: 505596 - DNA, 53 bp, Artificial
  Synthetic oligonucleotide
gccgcaaactccgctcgccgtcattctcgtcaaacccgacggacagcgcagcg

SEQ ID NO: 505597 - DNA, 53 bp, Artificial
  Synthetic oligonucleotide
acagatatgtggcagttttcataggtgttgacgagttggttgaaacaaaccgc

SEQ ID NO: 505598 - DNA, 52 bp, Artificial
  Synthetic oligonucleotide
gcagaggccgggtctattacaacaccgccgcttacaacctcaccaacgcccc

SEQ ID NO: 505599 - DNA, 51 bp, Artificial
  Synthetic oligonucleotide
gctccgtaatccatgtcggaaaggccggaccacatgacataatgacgttgt

SEQ ID NO: 505600 - DNA, 51 bp, Artificial
  Synthetic oligonucleotide
tcgaactcgcgccgatatcgatccacatctcgtgaatttccgggacctttt

SEQ ID NO: 505601 - DNA, 50 bp, Artificial
  Synthetic oligonucleotide
ggaaatcaggcgcttttattcgcgatcattcgcattgttacctgcgctca

SEQ ID NO: 505602 - DNA, 55 bp, Artificial
  Synthetic oligonucleotide
ggaatgggatcgattcgcaaggacgctggaactggaagagttatcgtcgaggacg

SEQ ID NO: 505603 - DNA, 55 bp, Artificial
  Synthetic oligonucleotide
ggaaagcaaacccatactgcgggtggcgtcaacgacgggaaatacgccgtcggcg

SEQ ID NO: 505604 - DNA, 55 bp, Artificial
  Synthetic oligonucleotide
gctgacagctattaattttacgctcaacggcatgcttcttggtgtaagcgagtgt

SEQ ID NO: 505605 - DNA, 55 bp, Artificial
  Synthetic oligonucleotide
tctggcatcgataggtgatttccttcatcagcgtagacatggtccggcttttggc

SEQ ID NO: 505606 - DNA, 55 bp, Artificial
  Synthetic oligonucleotide
gctccagtacaaaatccgaggggctctcatcctacaggaacttttccttggcaca

SEQ ID NO: 505607 - DNA, 55 bp, Artificial
  Synthetic oligonucleotide
gcggatatccctcattcacgccggatcacaagcctgttgcgtgctagggaaattc

SEQ ID NO: 505608 - DNA, 55 bp, Artificial
  Synthetic oligonucleotide
gcgacagtctggcgtgaacccacaaccatatgaacggcaataacgatgcgtgttg

SEQ ID NO: 505609 - DNA, 55 bp, Artificial
  Synthetic oligonucleotide
gcgaacgacgttctaaaattataacgcagctttcgctgtgcgagggaggagacga

SEQ ID NO: 505610 - DNA, 55 bp, Artificial
  Synthetic oligonucleotide
gccccaaattcgtaacgcagcaattcgcccaaacgggccgctccctccgggttct

SEQ ID NO: 505611 - DNA, 55 bp, Artificial
  Synthetic oligonucleotide
gccagagacgttatagagcttgagtttgcgtgtgccgtatccaaagcggtcatca

SEQ ID NO: 505612 - DNA, 55 bp, Artificial
  Synthetic oligonucleotide
gccagacaaggcaagctggacgccaaccagtcgcaacaatacagccagaacgcgg

SEQ ID NO: 505613 - DNA, 55 bp, Artificial
  Synthetic oligonucleotide
gccaccgggctacgtctatcaattcgttcccctgcgcgctgtcattcgcagaacg

SEQ ID NO: 505614 - DNA, 55 bp, Artificial
  Synthetic oligonucleotide
gccaatgtttatcctgacttcaacagcctgcgtagtatggcaatctgggctgcgc

SEQ ID NO: 505615 - DNA, 55 bp, Artificial
  Synthetic oligonucleotide
gcatctgtagcatcagcgataccagaagtgacggaagtacaagaagtatcagcgg

SEQ ID NO: 505616 - DNA, 55 bp, Artificial
  Synthetic oligonucleotide
gcaccgggcgagtgacctggtgactgctcacttccccgtttcgagtcccacctat

SEQ ID NO: 505617 - DNA, 55 bp, Artificial
  Synthetic oligonucleotide
gagccggatctggtgagcacctggacctatgacaattgcgccaagggagtaggca

SEQ ID NO: 505618 - DNA, 55 bp, Artificial
  Synthetic oligonucleotide
gaatacagtgtcgataacggcgcatggaccgacctcatcattcccatcaagggtg

SEQ ID NO: 505619 - DNA, 55 bp, Artificial
  Synthetic oligonucleotide
gaagttcagtagcaataacggggctatctattagcctcactcgcaacgcccttgt

SEQ ID NO: 505620 - DNA, 55 bp, Artificial
  Synthetic oligonucleotide
gaagataccgcttccgcaaggaccggagtcccgctctgcagcatgcaccgtcatc

SEQ ID NO: 505621 - DNA, 55 bp, Artificial
  Synthetic oligonucleotide
cttgtcgtatccccgcaattcctgggcatgttgcgtaaactgcttgaccccaggc

SEQ ID NO: 505622 - DNA, 55 bp, Artificial
  Synthetic oligonucleotide
ttcgtaacgcagcaattcgcccaaacgggccgctccctccgggttctgcccagaa

SEQ ID NO: 505623 - DNA, 55 bp, Artificial
  Synthetic oligonucleotide
cttccactgccaaccgtatagaggattggtgtcgattagctcgtcttgtgccgct

SEQ ID NO: 505624 - DNA, 55 bp, Artificial
  Synthetic oligonucleotide
ctctttacgagcagacggcagcttaaaagcccggcgattataaaggttcgttttc

SEQ ID NO: 505625 - DNA, 55 bp, Artificial
  Synthetic oligonucleotide
ctccacgtcattcgcacaaactacagcgggaacgcggaggcaattcgatccagcc

SEQ ID NO: 505626 - DNA, 55 bp, Artificial
  Synthetic oligonucleotide
cgtcaccttatagccaccatcgccttctggaaacagagtcacaaccgcggctgga

SEQ ID NO: 505627 - DNA, 55 bp, Artificial
  Synthetic oligonucleotide
cgtacaggtcgtgtgcaatgctctcggcatgcaggtctttccccttgatatgaac

SEQ ID NO: 505628 - DNA, 55 bp, Artificial
  Synthetic oligonucleotide
tcccgccaatacgccgggtgcgtccagtcatggcgcaacccgctgaacagtcact

SEQ ID NO: 505629 - DNA, 55 bp, Artificial
  Synthetic oligonucleotide
tctagtcttcccagcagcttgcaaaacctccgcgaatgcctgtgtgagcaatgtg

SEQ ID NO: 505630 - DNA, 55 bp, Artificial
  Synthetic oligonucleotide
tatcaaggaatgctgagaaagttgctctaggaattgagaaatcaggaatagccgc

SEQ ID NO: 505631 - DNA, 55 bp, Artificial
  Synthetic oligonucleotide
tagcaagtcgtggccagcagacaggccactacgccccacatcatgtgcgcgctga

SEQ ID NO: 505632 - DNA, 55 bp, Artificial
  Synthetic oligonucleotide
taagagacaccatgccatcccgagcaaccgatgccaaccgcgcaggctccaaggg

SEQ ID NO: 505633 - DNA, 55 bp, Artificial
  Synthetic oligonucleotide
gtggatgcggcttgtggtggcgtgttgccgggaactggtgtgatgaccagaaaat

SEQ ID NO: 505634 - DNA, 55 bp, Artificial
  Synthetic oligonucleotide
gtgctaccacaagcggcgccacgactaccgttctgggtaacacaaagccggggtg

SEQ ID NO: 505635 - DNA, 55 bp, Artificial
  Synthetic oligonucleotide
gtccgagaatggctatgccctgccggaagtcagggacggtgatctgagcgaggtc

SEQ ID NO: 505636 - DNA, 55 bp, Artificial
  Synthetic oligonucleotide
ggttcgctgcacaagccgattcacacttccgtggcgttcggttacaaggatgcgc

SEQ ID NO: 505637 - DNA, 55 bp, Artificial
  Synthetic oligonucleotide
gggttccgatgcagtcatgcagcaccgcggcctaccggaggcaccttgatgattt

SEQ ID NO: 505638 - DNA, 55 bp, Artificial
  Synthetic oligonucleotide
gggtatatcgatgggcactcgactaggagacttggtcgaacgcttcggtggtcaa

SEQ ID NO: 505639 - DNA, 55 bp, Artificial
  Synthetic oligonucleotide
ggggtagaacttggtgaagacatgaacaatctgaggaattcgtttgatggggagg

SEQ ID NO: 505640 - DNA, 55 bp, Artificial
  Synthetic oligonucleotide
ggggcaggggatcaccaagtttgcgcctgtcttgccaatgtctgaggccaaggct

SEQ ID NO: 505641 - DNA, 55 bp, Artificial
  Synthetic oligonucleotide
gggcgctgccccgctaatccgacctacgcccatattgtttattgcgctgcggcgt

SEQ ID NO: 505642 - DNA, 55 bp, Artificial
  Synthetic oligonucleotide
gggatatgccgtacggacgagctgcacttcatctcgacagcaccccggcccatga

SEQ ID NO: 505643 - DNA, 55 bp, Artificial
  Synthetic oligonucleotide
gggaatgacgccaaaatctgccggggatttagcggaaatttcttgtgtagagcgc

SEQ ID NO: 505644 - DNA, 55 bp, Artificial
  Synthetic oligonucleotide
ggcgttccgccacatccagggatacgaggcctggcaaagtcacggcgacacgatt

SEQ ID NO: 505645 - DNA, 55 bp, Artificial
  Synthetic oligonucleotide
ggcctttcggatctccatgatcttcgcaaagagttccttttcctctggcgtcgag

SEQ ID NO: 505646 - DNA, 55 bp, Artificial
  Synthetic oligonucleotide
ggccttgtattgctgcatctaggacagacctcatttcgtcaaatataaggcgccc

SEQ ID NO: 505647 - DNA, 55 bp, Artificial
  Synthetic oligonucleotide
ggccgccataggccgagccatcccagtgcggcaagagaaaagtccacaaggcctt

SEQ ID NO: 505648 - DNA, 55 bp, Artificial
  Synthetic oligonucleotide
ggccacgtattgccgtgaagtatcgtaaagaaacggatcccgggtcgcttgtcag

SEQ ID NO: 505649 - DNA, 55 bp, Artificial
  Synthetic oligonucleotide
ggcaatcttcaatcgtgatacgggccataaatactcctgattacttggttcttac

SEQ ID NO: 505650 - DNA, 55 bp, Artificial
  Synthetic oligonucleotide
ggcaagttcgagagtttgaaaccggtaaagccttgcatatgaaaacgcggccatc

SEQ ID NO: 505651 - DNA, 55 bp, Artificial
  Synthetic oligonucleotide
ggatcgcaacgcggtgaagcacagggacgagaggtgcttgagtttatcttgtggg

SEQ ID NO: 505652 - DNA, 55 bp, Artificial
  Synthetic oligonucleotide
ggagttcggtgaagtcctgttcgtacccacaatcatgtttgcgaccattgatggc

SEQ ID NO: 505653 - DNA, 55 bp, Artificial
  Synthetic oligonucleotide
ggagcgtagaacgtgggatcgaatgcactgtgccgtccgtatttgaagattaccg

SEQ ID NO: 505654 - DNA, 55 bp, Artificial
  Synthetic oligonucleotide
ggacatcaaacttgagactgccggtcacttccacatggcctgcaccaaaggcacg

SEQ ID NO: 505655 - DNA, 55 bp, Artificial
  Synthetic oligonucleotide
cccaagtgtggcagtgcaggtaaagcgtactttgattgcctggccatcgagtagg

SEQ ID NO: 505656 - DNA, 55 bp, Artificial
  Synthetic oligonucleotide
cccaaaccgctcggaaacgggccgccctgtcaaaatctccagcgcataatacagc

SEQ ID NO: 505657 - DNA, 55 bp, Artificial
  Synthetic oligonucleotide
ccatcatgccttgtacctggtcgcgcacatcgtaggtatgcacgttccattcatt

SEQ ID NO: 505658 - DNA, 55 bp, Artificial
  Synthetic oligonucleotide
ccagaagtattcatacatggcgtgatacaacagaagagttgttcgctccgcagcg

SEQ ID NO: 505659 - DNA, 55 bp, Artificial
  Synthetic oligonucleotide
ccacttagctaaacgaaatgcgctctctccttgctttaccctcctccactcgccc

SEQ ID NO: 505660 - DNA, 55 bp, Artificial
  Synthetic oligonucleotide
ccacatagggtgtcagttccaattgctggcgcaagatacgttcccgttcacgctg

SEQ ID NO: 505661 - DNA, 55 bp, Artificial
  Synthetic oligonucleotide
ccaatcggaacggttctctcaacaatgcaactagccataatgcaagcctcgccat

SEQ ID NO: 505662 - DNA, 55 bp, Artificial
  Synthetic oligonucleotide
caggtaggcaggacttccttatcagggacaccatgcgctcatgcgacattggtgg

SEQ ID NO: 505663 - DNA, 55 bp, Artificial
  Synthetic oligonucleotide
caggacggcccatttataatttgatcatgcggcgataggcgaccatgaccgagcg

SEQ ID NO: 505664 - DNA, 55 bp, Artificial
  Synthetic oligonucleotide
cagcgtctgtgtcaaggtgaaagacggaagagcccactccataactcctcctgag

SEQ ID NO: 505665 - DNA, 55 bp, Artificial
  Synthetic oligonucleotide
cagcagaggacacatgaaatcgatttgcgtatattgcggctcttctcccggtgca

SEQ ID NO: 505666 - DNA, 55 bp, Artificial
  Synthetic oligonucleotide
cagatcgagtattgaccgcgctggttgacgaccactctgtaggcgacatcgttgg

SEQ ID NO: 505667 - DNA, 55 bp, Artificial
  Synthetic oligonucleotide
cagagtcgcgagtcaaacgccgaccagagtcgttccatcgatgaggccagatctt

SEQ ID NO: 505668 - DNA, 55 bp, Artificial
  Synthetic oligonucleotide
caccttcgtatgattaacgcctccacgcttcattgctaatctgcgcagcatcagg

SEQ ID NO: 505669 - DNA, 55 bp, Artificial
  Synthetic oligonucleotide
caagtgcacctcgccgtctcgcttgataacaacttgggtcaggatcatatgcccc

SEQ ID NO: 505670 - DNA, 55 bp, Artificial
  Synthetic oligonucleotide
caagcgaaccgaccgccacagcctgtccggtccatcagaagagcattaagcctgc

SEQ ID NO: 505671 - DNA, 55 bp, Artificial
  Synthetic oligonucleotide
attttcaaggcaatcgacgggcgcagaacgcgctcaatccatcgacctaatcccc

SEQ ID NO: 505672 - DNA, 55 bp, Artificial
  Synthetic oligonucleotide
ttggcgggcagtaacgcggtctttgccctcatttacatgacgctcgatgtgaatg

SEQ ID NO: 505673 - DNA, 55 bp, Artificial
  Synthetic oligonucleotide
tttctaacaatctttcatccgtttccgaataggtcagttgcaaaccgttctcgct

SEQ ID NO: 505674 - DNA, 55 bp, Artificial
  Synthetic oligonucleotide
atcgtccatatgttctttcagccgttctacagttgcagattcagttgaatcgtgc

SEQ ID NO: 505675 - DNA, 55 bp, Artificial
  Synthetic oligonucleotide
agtcagccagaaatcgagatggcacagcgcttggcagtaggtcacgcccgagtgc

SEQ ID NO: 505676 - DNA, 55 bp, Artificial
  Synthetic oligonucleotide
agaaacgagttacctatgagtacatcatcgtcccacccatcgttctggcgccgcg

SEQ ID NO: 505677 - DNA, 55 bp, Artificial
  Synthetic oligonucleotide
acggacactgcagaggacacatgaaatcgatttgcgtatattgcggctcttcccc

SEQ ID NO: 505678 - DNA, 55 bp, Artificial
  Synthetic oligonucleotide
acacaagccgctcgaccgattgcaaggcctcgaacgagtacgcaccttccctgcg

SEQ ID NO: 505679 - DNA, 55 bp, Artificial
  Synthetic oligonucleotide
cggctcacctcttcggtttagagtgggcgcattgtagaagccactttatatcgag

SEQ ID NO: 505680 - DNA, 55 bp, Artificial
  Synthetic oligonucleotide
cggcggctcgttgttaagacaagtcttccctcctcatggttcgcgcccactttgc

SEQ ID NO: 505681 - DNA, 55 bp, Artificial
  Synthetic oligonucleotide
cggccagcgggaaagacagggtcatacgacgttcgagtttgctcagggtttcgac

SEQ ID NO: 505682 - DNA, 55 bp, Artificial
  Synthetic oligonucleotide
cgcgcgaggccgcatgaaatgagttcctgtaatatgcgacttcttatttctcgcg

SEQ ID NO: 505683 - DNA, 55 bp, Artificial
  Synthetic oligonucleotide
cgcgcctgtcccgttgcacgccttgcggtggtgcatacagagggcatcgataaag

SEQ ID NO: 505684 - DNA, 55 bp, Artificial
  Synthetic oligonucleotide
cgcgatgggaagggaatgtgtggtgtgtatcccaaagatatcgcatccacaaaag

SEQ ID NO: 505685 - DNA, 55 bp, Artificial
  Synthetic oligonucleotide
cgccacgattccctgtaaatgactctaccgctgttgccagcacaccccagggaag

SEQ ID NO: 505686 - DNA, 55 bp, Artificial
  Synthetic oligonucleotide
cgattgaggcccagtcattcatcgccatgaacaacgtgaattcgaacgaatttca

SEQ ID NO: 505687 - DNA, 55 bp, Artificial
  Synthetic oligonucleotide
cgatgcgctgactggatgacgtacagaagttcaggtagacaaggtccttccccac

SEQ ID NO: 505688 - DNA, 55 bp, Artificial
  Synthetic oligonucleotide
ttcttcgctgacccgcagacgccggaggccaaacagttcatcagtgcggggtcca

SEQ ID NO: 505689 - DNA, 55 bp, Artificial
  Synthetic oligonucleotide
cgatatttcccatgccaagggaagtgtattgcagcctggaaacgaaaccgcgccg

SEQ ID NO: 505690 - DNA, 55 bp, Artificial
  Synthetic oligonucleotide
cgaccttgaggatgcactgttccacggacttaatgtaattcctgagaaaccagcc

SEQ ID NO: 505691 - DNA, 55 bp, Artificial
  Synthetic oligonucleotide
ccctggttttgttttgcctaaagaacaccgttcgggctgagtaagcgcgtagcgc

SEQ ID NO: 505692 - DNA, 55 bp, Artificial
  Synthetic oligonucleotide
ccctttgttggtctttgcgtgctgacatcatgcgggcggaaggccgctttgcaag

SEQ ID NO: 505693 - DNA, 55 bp, Artificial
  Synthetic oligonucleotide
ccgcacacccgtatagaaataatgactgaagaggaaagtgcgaatgtccagggcg

SEQ ID NO: 505694 - DNA, 55 bp, Artificial
  Synthetic oligonucleotide
ccgcatacccttcataccaacaggactggatcgcccagcgataccaatcagggac

SEQ ID NO: 505695 - DNA, 55 bp, Artificial
  Synthetic oligonucleotide
ttgcaccgttgaagatgctgatttcctggctcgtggtctcgtggaggctctggaa

SEQ ID NO: 505696 - DNA, 55 bp, Artificial
  Synthetic oligonucleotide
ccgctggtcaatcccaagctgaccgccaaacaagaaagccagaatgcgaagttgg

SEQ ID NO: 505697 - DNA, 55 bp, Artificial
  Synthetic oligonucleotide
ccggagcagcgcaatattgctttgcgagaaggctggaacgccagtcatgacgcag

SEQ ID NO: 505698 - DNA, 55 bp, Artificial
  Synthetic oligonucleotide
ccgggtggagtgtcagcttaacgccagaggaccggatctccggatggtcggtaac

SEQ ID NO: 505699 - DNA, 55 bp, Artificial
  Synthetic oligonucleotide
ccgttacacctgtcgcccaaatcaaagcggcctagtgctagtattaccggcgcag

SEQ ID NO: 505700 - DNA, 55 bp, Artificial
  Synthetic oligonucleotide
cctgtctgcgcgacgtgaataaaccttcacgcagaatttattcgaacgatcgtac

SEQ ID NO: 505701 - DNA, 54 bp, Artificial
  Synthetic oligonucleotide
ccgctgacctaaacttactcgtctttaccagctgcgcactccatgttgcgacgc

SEQ ID NO: 505702 - DNA, 54 bp, Artificial
  Synthetic oligonucleotide
ctgaccgcgatagcataacgacaacatggctgcgtcaccgccgtacttccccta

SEQ ID NO: 505703 - DNA, 54 bp, Artificial
  Synthetic oligonucleotide
cattctggtgtcgttcgactatcgttgaatccccttgtgattcactgaatggca

SEQ ID NO: 505704 - DNA, 54 bp, Artificial
  Synthetic oligonucleotide
cagtacagggtgctccgacccattgtcttgcctcatctgcaaacaggcaacgac

SEQ ID NO: 505705 - DNA, 54 bp, Artificial
  Synthetic oligonucleotide
tcctcgttcaatatcgagcccgcgtgtcgagatagcgcttcgttctgcccttgt

SEQ ID NO: 505706 - DNA, 54 bp, Artificial
  Synthetic oligonucleotide
aaagcctgagcttgttccaatggataaactgaaggagcaatacggatttgagcc

SEQ ID NO: 505707 - DNA, 53 bp, Artificial
  Synthetic oligonucleotide
atgcgtgagcattatccaggcccgcgccaacttgtcgcaatcgacggtttccc

SEQ ID NO: 505708 - DNA, 53 bp, Artificial
  Synthetic oligonucleotide
atcaaggtgaccctgaagaacggtaccgtgcaacacaccgtcattggcaagca

SEQ ID NO: 505709 - DNA, 53 bp, Artificial
  Synthetic oligonucleotide
ttctcagtccgactacggtatcttccgggcagaagtatagatagaccttaccc

SEQ ID NO: 505710 - DNA, 53 bp, Artificial
  Synthetic oligonucleotide
aattcatcggagtggcgccggtagctgccacgttttgagggtcttgcgactgg

SEQ ID NO: 505711 - DNA, 53 bp, Artificial
  Synthetic oligonucleotide
aaatgcctacgaagatggggatgcattcttgattggttcgattcgaggcggag

SEQ ID NO: 505712 - DNA, 52 bp, Artificial
  Synthetic oligonucleotide
tctggcaaagattgaggagttgctggcatgaacgcaatcgtgaaacatagcg

SEQ ID NO: 505713 - DNA, 52 bp, Artificial
  Synthetic oligonucleotide
taaacaggcgctgtacgagatactatcggcattccacggcaattaatattgt

SEQ ID NO: 505714 - DNA, 52 bp, Artificial
  Synthetic oligonucleotide
cttgcgcaagtctcacgaaggaaatgaacatggcgctgacggttggaatccc

SEQ ID NO: 505715 - DNA, 51 bp, Artificial
  Synthetic oligonucleotide
tcatcaacgacatggtacggctcttagccgctctcacacgatgttggcagt

SEQ ID NO: 505716 - DNA, 51 bp, Artificial
  Synthetic oligonucleotide
tattcataccggtagccgcgtcaacatcgagtacctggattcggaagaaat

SEQ ID NO: 505717 - DNA, 51 bp, Artificial
  Synthetic oligonucleotide
tctggagacacgcatcggcaagtacaagtggccacgtcgtttcgtctactg

SEQ ID NO: 505718 - DNA, 51 bp, Artificial
  Synthetic oligonucleotide
cgttcagatggctttgcgagtgcaaccagttcgaaatattcaccttgccat

SEQ ID NO: 505719 - DNA, 51 bp, Artificial
  Synthetic oligonucleotide
cgatcgcatccttgatccgcgagaaggtgccgaatgccttgtgagcaatcg

SEQ ID NO: 505720 - DNA, 51 bp, Artificial
  Synthetic oligonucleotide
ccgcccagggaagtacgcttcacgatccggtcctggaggttttccgggaca

SEQ ID NO: 505721 - DNA, 51 bp, Artificial
  Synthetic oligonucleotide
atttacggatttcaccagcctggcactacaacacgccatgcgactgcccca

SEQ ID NO: 505722 - DNA, 51 bp, Artificial
  Synthetic oligonucleotide
atgtcacccagcgtcatgtggcgattggggccatcgaaggtatgcaagacc

SEQ ID NO: 505723 - DNA, 50 bp, Artificial
  Synthetic oligonucleotide
gctcttgcggtcttgcctgaatgttctgcgctttaagagggtcggcatct

SEQ ID NO: 505724 - DNA, 50 bp, Artificial
  Synthetic oligonucleotide
ttttccatagaaacttccgcgggtttattcctccccacactcagcgagct

SEQ ID NO: 505725 - DNA, 55 bp, Artificial
  Synthetic oligonucleotide
gcatctagcatcttaggctgacagactattaccatctgccccaggttgacgcatg

SEQ ID NO: 505726 - DNA, 55 bp, Artificial
  Synthetic oligonucleotide
gcagcttggacagtcttgcgctcacatcaagatcacgccagttcaagttcccggc

SEQ ID NO: 505727 - DNA, 55 bp, Artificial
  Synthetic oligonucleotide
gcacgcctccaaccaattcgtcgcaccattcagtcgtagttaaatccagaacacc

SEQ ID NO: 505728 - DNA, 55 bp, Artificial
  Synthetic oligonucleotide
gatgtgtccctgactaacctttcggattatgctggcaacctggctacacctaacc

SEQ ID NO: 505729 - DNA, 55 bp, Artificial
  Synthetic oligonucleotide
gagtgaggaacaaatcgccggtatgtaccaactcacgcaagctatggcggcaggc

SEQ ID NO: 505730 - DNA, 55 bp, Artificial
  Synthetic oligonucleotide
gagggtctgaaacggcttgcagccgagaacggcgcaacgctttacatggttctgc

SEQ ID NO: 505731 - DNA, 55 bp, Artificial
  Synthetic oligonucleotide
gaggagtgggccctatgacgcaacgcaagccggagtggctcaagatcaaccttgt

SEQ ID NO: 505732 - DNA, 55 bp, Artificial
  Synthetic oligonucleotide
gagcatacttctcatcgcgaaacgagataagtctgatggaggtgtagtccgtggc

SEQ ID NO: 505733 - DNA, 55 bp, Artificial
  Synthetic oligonucleotide
gagagccgcttctatacggcctatttaacggccataaacacaggaatgcggcgcg

SEQ ID NO: 505734 - DNA, 55 bp, Artificial
  Synthetic oligonucleotide
gactatgcccttagtaatgaacggagccaaagaactgctgagataggcctgtggc

SEQ ID NO: 505735 - DNA, 55 bp, Artificial
  Synthetic oligonucleotide
gacggacaatgtatcttttcttgacaagaagcatcgcatatttcgtccctcggcg

SEQ ID NO: 505736 - DNA, 55 bp, Artificial
  Synthetic oligonucleotide
tccgtacacggttgaccaaatggtattaaaggacggaacggcgtatattcaagcg

SEQ ID NO: 505737 - DNA, 55 bp, Artificial
  Synthetic oligonucleotide
gaccctcgcgtgcgcagatatcgccaggattcccgcaatggctatattggggcgc

SEQ ID NO: 505738 - DNA, 55 bp, Artificial
  Synthetic oligonucleotide
gaatgcggctttaccgatccatcttatttcaaccgggtattctacaagcaaatga

SEQ ID NO: 505739 - DNA, 55 bp, Artificial
  Synthetic oligonucleotide
gaagcgccttcggggtccgtgtgaaaatgattccattgaatcgaaaccagctccg

SEQ ID NO: 505740 - DNA, 55 bp, Artificial
  Synthetic oligonucleotide
gaagcaaacccttcatcgcgagacgaagtaatggttgatgcgacgaagtcagggg

SEQ ID NO: 505741 - DNA, 55 bp, Artificial
  Synthetic oligonucleotide
cgggctgttgaataaagttaaccgacgatctttaccgcattttccttgatcgcct

SEQ ID NO: 505742 - DNA, 55 bp, Artificial
  Synthetic oligonucleotide
cgggtgcggaacgggtgcaatatcgttcgtcaaataaagaaaatgcggctcggcg

SEQ ID NO: 505743 - DNA, 55 bp, Artificial
  Synthetic oligonucleotide
cgtacagcggcaacggggcggatctacacagggtatacaaagcaaggtgttgtca

SEQ ID NO: 505744 - DNA, 55 bp, Artificial
  Synthetic oligonucleotide
cgtagagcgctaacgaagagacagctgtgcgcaacgccgccattgggtgtacgcc

SEQ ID NO: 505745 - DNA, 55 bp, Artificial
  Synthetic oligonucleotide
cgtcgtgtatacctgtcactcgctggttgttcaggaatcgcttactccccgtcgc

SEQ ID NO: 505746 - DNA, 55 bp, Artificial
  Synthetic oligonucleotide
cgtgacatgtgggctaacaatgctcgtttgcaaggcttcgatatgtcgccttacc

SEQ ID NO: 505747 - DNA, 55 bp, Artificial
  Synthetic oligonucleotide
ctagcgcctgttgggaataatggttgtttaggcatactgcatgaatcgaccgacc

SEQ ID NO: 505748 - DNA, 55 bp, Artificial
  Synthetic oligonucleotide
ctccaatcgacttccatgcggtccaacccctgtgcgcgcttagttgtacagcgcc

SEQ ID NO: 505749 - DNA, 55 bp, Artificial
  Synthetic oligonucleotide
ctccctccctaagcagaccggaatcgccccgttagcggcgaaatcaagcggactg

SEQ ID NO: 505750 - DNA, 55 bp, Artificial
  Synthetic oligonucleotide
ctccggcggagcagcgttaaccggaccttgtgaaacgctaatcggacctttcttt

SEQ ID NO: 505751 - DNA, 55 bp, Artificial
  Synthetic oligonucleotide
cttatgcgtcaggccatgctgtgatgggcaacggtgttgcgataccagcttctgc

SEQ ID NO: 505752 - DNA, 55 bp, Artificial
  Synthetic oligonucleotide
cttccaaccacaatgctgcgttaaacatgtccatgatcagattgtcactactact

SEQ ID NO: 505753 - DNA, 55 bp, Artificial
  Synthetic oligonucleotide
cttctcgggagaactgaacaactgcttgcgatactgttcgggagtgcaaccgacc

SEQ ID NO: 505754 - DNA, 55 bp, Artificial
  Synthetic oligonucleotide
cttgcgcgtagttgttgattttcgcggcatacgaggcgcgtttggacaaggttgg

SEQ ID NO: 505755 - DNA, 55 bp, Artificial
  Synthetic oligonucleotide
gaaaaggcgacgatctatcattatcagctcatccgccggattccgataccgcggg

SEQ ID NO: 505756 - DNA, 55 bp, Artificial
  Synthetic oligonucleotide
gaacaaataacgtttcaattccccgattccccttcccacgggaagactaatgcgg

SEQ ID NO: 505757 - DNA, 55 bp, Artificial
  Synthetic oligonucleotide
gaagagtaccagctagtcatcggcaaaacagagacgctgccgaaagtgaacgccg

SEQ ID NO: 505758 - DNA, 55 bp, Artificial
  Synthetic oligonucleotide
ggacggtcctaaagtagcggaatatggtctgcctacaattccggtaacgaaccca

SEQ ID NO: 505759 - DNA, 55 bp, Artificial
  Synthetic oligonucleotide
ggatgctctggggtgggttcaaaccgattcaaggacgaaacctctcagccggtgg

SEQ ID NO: 505760 - DNA, 55 bp, Artificial
  Synthetic oligonucleotide
ggctaataatcttgttcagctccggtccttcaccgacgaataaaagcttggcagg

SEQ ID NO: 505761 - DNA, 55 bp, Artificial
  Synthetic oligonucleotide
ggctcgataatgcgatatcgcttggcaccatttctttgtagacgctccgtaagca

SEQ ID NO: 505762 - DNA, 55 bp, Artificial
  Synthetic oligonucleotide
ggggaatcacctggtcatcgattactctgaagtgcttgacttgtatgcgcttaat

SEQ ID NO: 505763 - DNA, 55 bp, Artificial
  Synthetic oligonucleotide
ggtgacaggtgagacggggccaacgggtctgactggggcggtaggtgcagccgga

SEQ ID NO: 505764 - DNA, 55 bp, Artificial
  Synthetic oligonucleotide
gtaattgtacgtttcgttgcggtacatgtacggaaagacggcttccgcgttcacg

SEQ ID NO: 505765 - DNA, 55 bp, Artificial
  Synthetic oligonucleotide
gtcatgcggattgaccgcacgctgttcccacttgtccatcagcttcggaatctcc

SEQ ID NO: 505766 - DNA, 55 bp, Artificial
  Synthetic oligonucleotide
gtccaagatgaagcatagtacggagagtgaggctcagatgctaggctaagcttca

SEQ ID NO: 505767 - DNA, 55 bp, Artificial
  Synthetic oligonucleotide
tcccggtccaggaccaagccaaataaccaatgtcgttcaatttacactgcttcat

SEQ ID NO: 505768 - DNA, 55 bp, Artificial
  Synthetic oligonucleotide
gtctccagaatggagacgggatttggggccaaaatgggaagaagtgcacaaaacg

SEQ ID NO: 505769 - DNA, 55 bp, Artificial
  Synthetic oligonucleotide
gtgccttatacagcatatgaagaaatgcaggaaagggccttaggcgggtcaacga

SEQ ID NO: 505770 - DNA, 55 bp, Artificial
  Synthetic oligonucleotide
tcaacgtttggctcctcgttcacaccgcaggcggacgacgtatttgaccaagggg

SEQ ID NO: 505771 - DNA, 55 bp, Artificial
  Synthetic oligonucleotide
gtggttgtgatgccttaaaagaccgggcgaacgagacaggagatcgacgaccatt

SEQ ID NO: 505772 - DNA, 55 bp, Artificial
  Synthetic oligonucleotide
taagtgggaaaagccgcatgctgagattgtagcggaactggaggcaagacggatc

SEQ ID NO: 505773 - DNA, 55 bp, Artificial
  Synthetic oligonucleotide
gttaagagacatgttacggtggttgttgagcgccgtgatgttgtgattgatccgc

SEQ ID NO: 505774 - DNA, 55 bp, Artificial
  Synthetic oligonucleotide
gtttgtaatattgctgaaccttcttctccatactgcttcacgctcctctcctgac

SEQ ID NO: 505775 - DNA, 55 bp, Artificial
  Synthetic oligonucleotide
gcattggtattcctcactttccactgttcgttctccggcgattgtgcatgctgca

SEQ ID NO: 505776 - DNA, 55 bp, Artificial
  Synthetic oligonucleotide
gccaaatggctgtctttaataatcatgtacgccgtagaatagacgcgctcataga

SEQ ID NO: 505777 - DNA, 55 bp, Artificial
  Synthetic oligonucleotide
gccatgcttcagcctcttttcagtgtaggatggctccaggcaattaccttgatag

SEQ ID NO: 505778 - DNA, 55 bp, Artificial
  Synthetic oligonucleotide
gcccatctttaactgctggagtctccgcagcctttcatattgaggggttacatcc

SEQ ID NO: 505779 - DNA, 55 bp, Artificial
  Synthetic oligonucleotide
gccgattgtcgaggaaatggttccctatctcgcggcaactgccgagttggctatc

SEQ ID NO: 505780 - DNA, 55 bp, Artificial
  Synthetic oligonucleotide
gccgcttttcatcggaagtacccgcaacaatgggacgaagtcaaacaaagctggg

SEQ ID NO: 505781 - DNA, 55 bp, Artificial
  Synthetic oligonucleotide
gcgaggcgttcgacagaaactccacgataaagtcacggtcgcttaccgcatcgag

SEQ ID NO: 505782 - DNA, 55 bp, Artificial
  Synthetic oligonucleotide
gcggatcccgcatcgccttaataatagcctgctctaactgctcgccagtctttac

SEQ ID NO: 505783 - DNA, 55 bp, Artificial
  Synthetic oligonucleotide
gcggcatgaatgcgatacaacttcatcggttgacgaagcgatacggggagcatac

SEQ ID NO: 505784 - DNA, 55 bp, Artificial
  Synthetic oligonucleotide
gcggcgcctaacaccgatgcccatcttttggaccgtgtaccgcaatcccaacaaa

SEQ ID NO: 505785 - DNA, 55 bp, Artificial
  Synthetic oligonucleotide
gcgggatcggacaaatcgccgccctcccgaatgagcgcaaattcattgtacggcg

SEQ ID NO: 505786 - DNA, 55 bp, Artificial
  Synthetic oligonucleotide
gctgaacgggctatccaaacagctatagaggctctgcagaatgtatcaagtgagg

SEQ ID NO: 505787 - DNA, 55 bp, Artificial
  Synthetic oligonucleotide
gctgacctcaggagtgcgaatctccgctgtgatgtcttgcccgttccagaagacc

SEQ ID NO: 505788 - DNA, 55 bp, Artificial
  Synthetic oligonucleotide
gctgccgctcagcccaggtgtcgtgataagagcgtgctctgcttgaaaggtcgcc

SEQ ID NO: 505789 - DNA, 55 bp, Artificial
  Synthetic oligonucleotide
gctgctcttctattggaagattcagtcgctgcagaattacggcgtaggggagacg

SEQ ID NO: 505790 - DNA, 55 bp, Artificial
  Synthetic oligonucleotide
tccgcagaggattccgcagagtttgcactctcaaagttaaccaacagacatgtgg

SEQ ID NO: 505791 - DNA, 55 bp, Artificial
  Synthetic oligonucleotide
ggaagaacgctcgtaatggagacaggccttctggccaagcaagctaatgcggcgg

SEQ ID NO: 505792 - DNA, 55 bp, Artificial
  Synthetic oligonucleotide
tgcgctttccatttatgaaagtgtgctgcgggatcattgggagatcatcatgctg

SEQ ID NO: 505793 - DNA, 55 bp, Artificial
  Synthetic oligonucleotide
caaggagcgagtgctaaaacgaaacgcacaaaacatgcactccataaatactcgc

SEQ ID NO: 505794 - DNA, 55 bp, Artificial
  Synthetic oligonucleotide
caccgtttgcagctaagcatacggctatagacccatatcacctgacactcggcgc

SEQ ID NO: 505795 - DNA, 55 bp, Artificial
  Synthetic oligonucleotide
cagcgcaggagggttcgcgagagcgcgtatggcatgtttacgatggcaacccaac

SEQ ID NO: 505796 - DNA, 55 bp, Artificial
  Synthetic oligonucleotide
cagcgccggagttctcagccgtggatctggaggggacagaaatccgtcttgccga

SEQ ID NO: 505797 - DNA, 55 bp, Artificial
  Synthetic oligonucleotide
cagtctgtcgccgaccttgatggataacccgtcatgcaccggcttgttcagtgaa

SEQ ID NO: 505798 - DNA, 55 bp, Artificial
  Synthetic oligonucleotide
catccggctaaacagcacgccatctagacgcgtatgtaccaactgatgttcctcc

SEQ ID NO: 505799 - DNA, 55 bp, Artificial
  Synthetic oligonucleotide
catcgttctacctccatgaattattttagatgcacggcatggatgacattagact

SEQ ID NO: 505800 - DNA, 55 bp, Artificial
  Synthetic oligonucleotide
catgtccgacactccttgttcctgctggattgcaaccgatatcatcttaacgttt

SEQ ID NO: 505801 - DNA, 55 bp, Artificial
  Synthetic oligonucleotide
cccaggtacacgacaaaatgactgcccagtctgaccgtcatgtgaccggccaccc

SEQ ID NO: 505802 - DNA, 55 bp, Artificial
  Synthetic oligonucleotide
ccccgctctgccgttgacctcatgtttctataacctgcgctcacacaggtgggtg

SEQ ID NO: 505803 - DNA, 55 bp, Artificial
  Synthetic oligonucleotide
cccgaattccttctgtgcctcataaatcgtaacatatacgttcaggcactccgtc

SEQ ID NO: 505804 - DNA, 55 bp, Artificial
  Synthetic oligonucleotide
cccgggaaccttagcaagcgataccttctcggcgtgctccctcgtgatcatccgc

SEQ ID NO: 505805 - DNA, 55 bp, Artificial
  Synthetic oligonucleotide
ccctatacactacctgatgattatacgtcgctccgcttaccgaaattcttgggtt

SEQ ID NO: 505806 - DNA, 55 bp, Artificial
  Synthetic oligonucleotide
ccctcctgatctacgcgatataaatgtatgtccatcctcgtcccaatatgcagac

SEQ ID NO: 505807 - DNA, 55 bp, Artificial
  Synthetic oligonucleotide
ccgactacggaggaacatcgcaagtataagtcgctactcatacaaagggcctcgc

SEQ ID NO: 505808 - DNA, 55 bp, Artificial
  Synthetic oligonucleotide
ccgattccgtgcagcgaatcaatgacgcttttcaacattatcatgctatccgtct

SEQ ID NO: 505809 - DNA, 55 bp, Artificial
  Synthetic oligonucleotide
tttcaatcgttagtccaagcggccggagcgaagctggatgcgctgggattaagca

SEQ ID NO: 505810 - DNA, 55 bp, Artificial
  Synthetic oligonucleotide
aaaccatttggcgcttgctccgctcgtcttcgtccgggtgcgacgtgaggtgtcg

SEQ ID NO: 505811 - DNA, 55 bp, Artificial
  Synthetic oligonucleotide
aaaccgtgatccggaaaggttgccccggaagcgagttgaaccactggctccttcc

SEQ ID NO: 505812 - DNA, 55 bp, Artificial
  Synthetic oligonucleotide
aacatattggcataggcccaggcttcaaggctaatgtccacaggcgaaggggaga

SEQ ID NO: 505813 - DNA, 55 bp, Artificial
  Synthetic oligonucleotide
ttgcaacgtcgcccgtcccgcccagaccgctatggcaaccggtcacgatggccga

SEQ ID NO: 505814 - DNA, 55 bp, Artificial
  Synthetic oligonucleotide
aattacttggggaggaacaggtgcgaccggttcttggggtgaaactgcatgagcg

SEQ ID NO: 505815 - DNA, 55 bp, Artificial
  Synthetic oligonucleotide
ttatattagtaaagatccggtgatgttcgcaatcaagtacgggaataccttgtac

SEQ ID NO: 505816 - DNA, 55 bp, Artificial
  Synthetic oligonucleotide
acaatccacagccttgtctgtattcttaagtagcgcgacaatggtgacgaaaggc

SEQ ID NO: 505817 - DNA, 55 bp, Artificial
  Synthetic oligonucleotide
acccgggcgtgtcgaaatttgacttttccttaagcgtgacggcggataagacagg

SEQ ID NO: 505818 - DNA, 55 bp, Artificial
  Synthetic oligonucleotide
ttaatttggcagcgctattgcttgatggtttcaggctctttgtactccacgccga

SEQ ID NO: 505819 - DNA, 55 bp, Artificial
  Synthetic oligonucleotide
acgggcagagatgaacagaatcgggcacagcgaagacttgcgcagctggcggcac

SEQ ID NO: 505820 - DNA, 55 bp, Artificial
  Synthetic oligonucleotide
agacgaaagaacaacagctgcttgttaccgagcaaaagctcgatgctaaggagct

SEQ ID NO: 505821 - DNA, 55 bp, Artificial
  Synthetic oligonucleotide
agccttgaaatggacggggatgttcaacggtctgtcaccgttctgctcggtacgc

SEQ ID NO: 505822 - DNA, 55 bp, Artificial
  Synthetic oligonucleotide
tgtcataggcgaatgtcgcctgctcggcttttgtccactccgctgtgtagtagtc

SEQ ID NO: 505823 - DNA, 55 bp, Artificial
  Synthetic oligonucleotide
agtaggcgtaagctttatggatgccggtacgtctggcgggatggaaggtgctcgc

SEQ ID NO: 505824 - DNA, 55 bp, Artificial
  Synthetic oligonucleotide
atacggcgctggtgaaaggatattccattcacgaagccctttctctcggattcgc

SEQ ID NO: 505825 - DNA, 55 bp, Artificial
  Synthetic oligonucleotide
tgctccatgtgattcaatactgaagcaagactgtaagaagccgctactgagatca

SEQ ID NO: 505826 - DNA, 55 bp, Artificial
  Synthetic oligonucleotide
cgccatccttacattattcctcttgcctatctatgaaggtgcttcacaaacgtcg

SEQ ID NO: 505827 - DNA, 55 bp, Artificial
  Synthetic oligonucleotide
cgccggagaggtcctggtccatccgtatctggaaaatcatgcattttcggagaaa

SEQ ID NO: 505828 - DNA, 55 bp, Artificial
  Synthetic oligonucleotide
cgccgtaccacgattcatcaacccgaaccagcctttagtagcattaagcagatcc

SEQ ID NO: 505829 - DNA, 55 bp, Artificial
  Synthetic oligonucleotide
cgctcatgttcaagcttggacaacgcgtcgtcattgttgccgactccttcgagca

SEQ ID NO: 505830 - DNA, 55 bp, Artificial
  Synthetic oligonucleotide
cgctccgctacctctgcttcgcggtcaagaatccgtaaatgcagggttcggttgg

SEQ ID NO: 505831 - DNA, 55 bp, Artificial
  Synthetic oligonucleotide
cgctggagaaccagtggagatatgcttcgttccggttctagcgcggcaggggagc

SEQ ID NO: 505832 - DNA, 55 bp, Artificial
  Synthetic oligonucleotide
cgcttggaacgaacccgtaaccacgtaaccgccgtcattggtcgttgccacacgc

SEQ ID NO: 505833 - DNA, 55 bp, Artificial
  Synthetic oligonucleotide
cgcttggctcaagaaggggccttaacagccgttcattacggcaagaaccgggaag

SEQ ID NO: 505834 - DNA, 55 bp, Artificial
  Synthetic oligonucleotide
cggaaaatcggcgtgatctatggcacggaaagcatctcgctcggcagggagagac

SEQ ID NO: 505835 - DNA, 55 bp, Artificial
  Synthetic oligonucleotide
tcttcgtaacattctgacttgatacgatactgttgtagccagtaaccgagccgtt

SEQ ID NO: 505836 - DNA, 55 bp, Artificial
  Synthetic oligonucleotide
cggcataccggctccctccctgttcataatggtatctatcacagcttatgcgccg

SEQ ID NO: 505837 - DNA, 55 bp, Artificial
  Synthetic oligonucleotide
cggcgcctacaacctttgctgtagaatggctggaaagtcgttataccaaattggt

SEQ ID NO: 505838 - DNA, 55 bp, Artificial
  Synthetic oligonucleotide
cggctccaacaatcagtccattgggcaattgtacagaagccgtgccgaatccgcc

SEQ ID NO: 505839 - DNA, 55 bp, Artificial
  Synthetic oligonucleotide
cggctgtccgggaaatcttgaagctgacccaaggcaatcaagtgctctcgctcgc

SEQ ID NO: 505840 - DNA, 55 bp, Artificial
  Synthetic oligonucleotide
cggcttgatcgtcgagttaagcttgacaattctggtagcctatccactatccaaa

SEQ ID NO: 505841 - DNA, 55 bp, Artificial
  Synthetic oligonucleotide
cggcttggtttggtcgctacccttcaatcgtgccacccctccttgtgggctctac

SEQ ID NO: 505842 - DNA, 55 bp, Artificial
  Synthetic oligonucleotide
cgggcgaaacaagacagagcggatccccgtcgcttgataaatggcatcctgtgtc

SEQ ID NO: 505843 - DNA, 55 bp, Artificial
  Synthetic oligonucleotide
ccgcaagctgccgggcctaggggccggaattgttccaaggcagtataagccggat

SEQ ID NO: 505844 - DNA, 55 bp, Artificial
  Synthetic oligonucleotide
ccggagactgagagcgtccttgcgacaaccggctgccgaaattccctccgtagca

SEQ ID NO: 505845 - DNA, 55 bp, Artificial
  Synthetic oligonucleotide
ccggaggatttggtttccgctagggtggaatatgattatggagccattgccggcg

SEQ ID NO: 505846 - DNA, 55 bp, Artificial
  Synthetic oligonucleotide
ccggcaaaggcacttcccttgtggcaatccgttgagcggcatttcgcatcacagt

SEQ ID NO: 505847 - DNA, 55 bp, Artificial
  Synthetic oligonucleotide
ccgtgttaaccgagcaaccgaatgcttccgatgtcaatgaagtcgtcaaggcggc

SEQ ID NO: 505848 - DNA, 55 bp, Artificial
  Synthetic oligonucleotide
ccgttgcctgcgtgcctaccggcataaacacaggagtgtcaatcgttccgtgcgg

SEQ ID NO: 505849 - DNA, 55 bp, Artificial
  Synthetic oligonucleotide
cctccggaacgattgaggtggacggagaactgctctggcacaagcgggtgaaggg

SEQ ID NO: 505850 - DNA, 55 bp, Artificial
  Synthetic oligonucleotide
cctgagacagcatgtgctccagacgtttacgcgccccggaaacgacattcgcctc

SEQ ID NO: 505851 - DNA, 55 bp, Artificial
  Synthetic oligonucleotide
cctgcccagcaattcaatataacatttgctgagaccataaaagctatccggacgg

SEQ ID NO: 505852 - DNA, 55 bp, Artificial
  Synthetic oligonucleotide
cctgtccgttcgcctctgttgcgcggtagtccatgctcaaactcctctcaatagg

SEQ ID NO: 505853 - DNA, 55 bp, Artificial
  Synthetic oligonucleotide
cgaaacagacacgtgacattttgggtaaggttgtctcagagaagcccggaaccgg

SEQ ID NO: 505854 - DNA, 55 bp, Artificial
  Synthetic oligonucleotide
cgaaccgcaattcagaccgaaggattgattcggcaatctaactcaaagtatgtga

SEQ ID NO: 505855 - DNA, 55 bp, Artificial
  Synthetic oligonucleotide
cgactacatcccattctttgtgcggcctgtacaaggcactgtaacagcacccgtc

SEQ ID NO: 505856 - DNA, 55 bp, Artificial
  Synthetic oligonucleotide
cgagcgcttaggcattattttgaaccgttcctgttcgcatcctctaggatgaagc

SEQ ID NO: 505857 - DNA, 55 bp, Artificial
  Synthetic oligonucleotide
cgagtgtgcctacagtgaagcatgtgtggagcaacggaaagatcaaacttccgcc

SEQ ID NO: 505858 - DNA, 55 bp, Artificial
  Synthetic oligonucleotide
cgccacgataactcttctggcggccatcgtctgtcgtttcttatgaaggaagggg

SEQ ID NO: 505859 - DNA, 54 bp, Artificial
  Synthetic oligonucleotide
tccatttgctgcggatcaccactttggtgtgcgggaaatcgcttggatggcggt

SEQ ID NO: 505860 - DNA, 54 bp, Artificial
  Synthetic oligonucleotide
tctaggcaaagggatcaccgcagcgtccctgggaagattgctgaagaatcgggg

SEQ ID NO: 505861 - DNA, 54 bp, Artificial
  Synthetic oligonucleotide
tgcattgagcttccggaccggccatcccataatgaaaggggatacaacatctca

SEQ ID NO: 505862 - DNA, 54 bp, Artificial
  Synthetic oligonucleotide
gtgttgaaagacgggtcgtagtctgccgccttgtagaattcgatgtgcttcaca

SEQ ID NO: 505863 - DNA, 54 bp, Artificial
  Synthetic oligonucleotide
gtccgaagtgacatttatccgcttggaggactgcttaagccatggtaactaccg

SEQ ID NO: 505864 - DNA, 54 bp, Artificial
  Synthetic oligonucleotide
gtccaaggggcttgctcccagaacggcttgttcagccgtccatccaattccaat

SEQ ID NO: 505865 - DNA, 54 bp, Artificial
  Synthetic oligonucleotide
cgaaggaggaacgttcgttggacatttggctggagtacgcgtgggcgctcttga

SEQ ID NO: 505866 - DNA, 54 bp, Artificial
  Synthetic oligonucleotide
atcgattccacatgatttgattctcctgttccggcgcatatttgattgagccta

SEQ ID NO: 505867 - DNA, 54 bp, Artificial
  Synthetic oligonucleotide
aaaaccttgcagatggagtgagcgaaagtgttcgtgctgaatcgagatatggca

SEQ ID NO: 505868 - DNA, 54 bp, Artificial
  Synthetic oligonucleotide
acgatcaccgatattaccgggcagccgaccgttcacggaaagtacacagcctac

SEQ ID NO: 505869 - DNA, 53 bp, Artificial
  Synthetic oligonucleotide
ttttcgctgtatccgatcctgtacacggcattcatcgggtttaccgacatgaa

SEQ ID NO: 505870 - DNA, 53 bp, Artificial
  Synthetic oligonucleotide
tttcacacggctgccctatcgcatccaaacaatagttcaacttatatagacaa

SEQ ID NO: 505871 - DNA, 52 bp, Artificial
  Synthetic oligonucleotide
ttttgacggacgtcaggtgaaagccctgcgcggcatcaatacgctcgtgaat

SEQ ID NO: 505872 - DNA, 52 bp, Artificial
  Synthetic oligonucleotide
ttttatcgtggcctacatatttgccaagcatgtccgccccatgtatgtggat

SEQ ID NO: 505873 - DNA, 52 bp, Artificial
  Synthetic oligonucleotide
ttttagcgccattgaagacatctgtggaaggcactttggccgcaataaaaga

SEQ ID NO: 505874 - DNA, 52 bp, Artificial
  Synthetic oligonucleotide
cggataactgcggatcgccagcgtgtttaagaacatcccgattaacggctgc

SEQ ID NO: 505875 - DNA, 52 bp, Artificial
  Synthetic oligonucleotide
gacgccgacaccgagcgattcaaaacgctcatgcaaaaggttctttcggtgt

SEQ ID NO: 505876 - DNA, 52 bp, Artificial
  Synthetic oligonucleotide
ggaacgagggcggttgttccatgtcttttgtcaactctccctatgactcaga

SEQ ID NO: 505877 - DNA, 52 bp, Artificial
  Synthetic oligonucleotide
gtggtccgtaaattggttcgatctgccgcaggatatgatcacggatatgccc

SEQ ID NO: 505878 - DNA, 51 bp, Artificial
  Synthetic oligonucleotide
aatttgtacatgccgaagcctcctcgtcagcagtatagggaagacggattt

SEQ ID NO: 505879 - DNA, 50 bp, Artificial
  Synthetic oligonucleotide
aggacaaaatgacagtcgccttttgcgtgggtacatggtagacaccagcc

SEQ ID NO: 505880 - DNA, 50 bp, Artificial
  Synthetic oligonucleotide
aaccatcccggcgccgctttgctgcagttcatcaatgtttaatccgtcag

SEQ ID NO: 505881 - DNA, 50 bp, Artificial
  Synthetic oligonucleotide
atattgatcgcatagttgctgagcgcattcccactgtcgaacttcaagga

SEQ ID NO: 505882 - DNA, 50 bp, Artificial
  Synthetic oligonucleotide
gacgagggatgaacgcaaaacagcacattgtggttattaccggcggctca

SEQ ID NO: 505883 - DNA, 55 bp, Artificial
  Synthetic oligonucleotide
gccggtacttggggaccgacagaagccgacaaactgatcgcgaaaacgggtcgtg

SEQ ID NO: 505884 - DNA, 55 bp, Artificial
  Synthetic oligonucleotide
gccgtcattcggaaaagctaaggttcgcgcatcaccagtgttcataatcattaca

SEQ ID NO: 505885 - DNA, 55 bp, Artificial
  Synthetic oligonucleotide
gccgtcgttaggggcagggcaacaaattctttctgaattagggcttacgcaaacc

SEQ ID NO: 505886 - DNA, 55 bp, Artificial
  Synthetic oligonucleotide
gcctaccttacagtgggcaattagccattttaggcgctattttagccggctctgt

SEQ ID NO: 505887 - DNA, 55 bp, Artificial
  Synthetic oligonucleotide
gcgacggtggttataacttttagggaaaactgaccgcactttctacggattgaga

SEQ ID NO: 505888 - DNA, 55 bp, Artificial
  Synthetic oligonucleotide
gcgatggtgtcgcaacggctgctgcttcattagtaggtggtccaccaaataccac

SEQ ID NO: 505889 - DNA, 55 bp, Artificial
  Synthetic oligonucleotide
gcgcgtttacaagcggatgtcagtgacgatatgagtttggcgcaattagtcggga

SEQ ID NO: 505890 - DNA, 55 bp, Artificial
  Synthetic oligonucleotide
gcggcagactatgtattagattccatagcggatctgccaaggttgatttctagac

SEQ ID NO: 505891 - DNA, 55 bp, Artificial
  Synthetic oligonucleotide
gcggtcatagcaaaattccaagcggaaggctaccaatgctatatgctcacgggcg

SEQ ID NO: 505892 - DNA, 55 bp, Artificial
  Synthetic oligonucleotide
gcggtttccaccatcgggaccaataaggtctgtgccccaatatcaagcagttgtt

SEQ ID NO: 505893 - DNA, 55 bp, Artificial
  Synthetic oligonucleotide
gcgtaaatccttacggtaaacagacatatggtttacagcatccatgtgcaccgtg

SEQ ID NO: 505894 - DNA, 55 bp, Artificial
  Synthetic oligonucleotide
gcgttacagattccgctaaaatcggctcaaaatggttcggtagaaattcgctatc

SEQ ID NO: 505895 - DNA, 55 bp, Artificial
  Synthetic oligonucleotide
gcgttactgaaacgttcaccatttgcagtgcgacgcccgttgaattcatctgcgt

SEQ ID NO: 505896 - DNA, 55 bp, Artificial
  Synthetic oligonucleotide
gcgttatttgtgcatgaagacgaaagcagcgtagcaaattaaagtgagctcggcg

SEQ ID NO: 505897 - DNA, 55 bp, Artificial
  Synthetic oligonucleotide
gcgttgcctaaagtccctgcttgggaacaaatgttaagtgcaggttgtgctactt

SEQ ID NO: 505898 - DNA, 55 bp, Artificial
  Synthetic oligonucleotide
gctaacacatcgtacactttacttaattgattcgtcagtaaagcgaaagcgcggt

SEQ ID NO: 505899 - DNA, 55 bp, Artificial
  Synthetic oligonucleotide
gctaatgattgctgaattaggaaattatgcgcttgctttaagtcttgccgtttca

SEQ ID NO: 505900 - DNA, 55 bp, Artificial
  Synthetic oligonucleotide
gctagcgtagaacgcactatgcgtgaagatctaagtgcttgtgctcaaggtgagg

SEQ ID NO: 505901 - DNA, 55 bp, Artificial
  Synthetic oligonucleotide
gctaggtaaacataacaccaatgtccataaaatggcttcgggagtgtgccattgg

SEQ ID NO: 505902 - DNA, 55 bp, Artificial
  Synthetic oligonucleotide
gctatactacgtaccgagttagttagacaatcgctggtttattgaagccctaaac

SEQ ID NO: 505903 - DNA, 55 bp, Artificial
  Synthetic oligonucleotide
gctatccgttagaaaccactttcgtaagccttgccccgctgattcaaactgcggg

SEQ ID NO: 505904 - DNA, 55 bp, Artificial
  Synthetic oligonucleotide
gctcagtcgtttctgctaaagtaaattgagtaaaagcaagcaaacagcttgtcgt

SEQ ID NO: 505905 - DNA, 55 bp, Artificial
  Synthetic oligonucleotide
ctacgaagtcaccctcaacgaattaaaacttgctgccctagatggtaccgctcgt

SEQ ID NO: 505906 - DNA, 55 bp, Artificial
  Synthetic oligonucleotide
ctagcactaacgctggatcggtatctgttgcgacataagcctgacctaaagacgc

SEQ ID NO: 505907 - DNA, 55 bp, Artificial
  Synthetic oligonucleotide
ctatcgcaatccacgaatttatttatccgttactccaaggccatgactctgtagc

SEQ ID NO: 505908 - DNA, 55 bp, Artificial
  Synthetic oligonucleotide
ctcggtgaggataagttatggcaggtcttagaaacggttggacttttggggcgtg

SEQ ID NO: 505909 - DNA, 55 bp, Artificial
  Synthetic oligonucleotide
ctcgtcttggttcgggtacaaccccaagcacaccaaataatgtcgccacttatgc

SEQ ID NO: 505910 - DNA, 55 bp, Artificial
  Synthetic oligonucleotide
ctgccgtgccgataccgtaggtgagataacccgcagggcatttatatggcgtgcg

SEQ ID NO: 505911 - DNA, 55 bp, Artificial
  Synthetic oligonucleotide
cttgcaccggtatgactaacacataacttagggttaaaccgccaccgaataagaa

SEQ ID NO: 505912 - DNA, 55 bp, Artificial
  Synthetic oligonucleotide
ctttcgttggatcaggattggctcggtttcggcaggttcgttttgccacaggcgc

SEQ ID NO: 505913 - DNA, 55 bp, Artificial
  Synthetic oligonucleotide
gacgcacaatcaagcccaacaccggggtttgtacacgtcccaccgacaatacacc

SEQ ID NO: 505914 - DNA, 55 bp, Artificial
  Synthetic oligonucleotide
gacgttgtgctttcacacgtttacggcgagaaaaccagttataggtattgctact

SEQ ID NO: 505915 - DNA, 55 bp, Artificial
  Synthetic oligonucleotide
gactatacccactaccaaccctgcgaaaaggtagagataactgaccgcacttgtg

SEQ ID NO: 505916 - DNA, 55 bp, Artificial
  Synthetic oligonucleotide
gagggtttccacggtgttgacttcgcccaattcgatacgttttaaacgcccgacc

SEQ ID NO: 505917 - DNA, 55 bp, Artificial
  Synthetic oligonucleotide
gaggtacaagtgtcatttctacatcactatacttgctcgcctggccatgacaaat

SEQ ID NO: 505918 - DNA, 55 bp, Artificial
  Synthetic oligonucleotide
gatcgtgaattagtagctcgtattagggctattttgcgtcggacagcgcaatcta

SEQ ID NO: 505919 - DNA, 55 bp, Artificial
  Synthetic oligonucleotide
gattacccaattggacagtacttcggttgcgacattggcttctcatcttattagg

SEQ ID NO: 505920 - DNA, 55 bp, Artificial
  Synthetic oligonucleotide
gcaacgcacgcccaaaggctccacgcaaggtagagcctgcatattcgggcagttg

SEQ ID NO: 505921 - DNA, 55 bp, Artificial
  Synthetic oligonucleotide
gcaccatcacctgccggcaaaggttgaagcgtcgttttagggttaagttttaccg

SEQ ID NO: 505922 - DNA, 55 bp, Artificial
  Synthetic oligonucleotide
gcactttgcctcttctcagccaaaatcacaccaataccttgcgccccagacaacg

SEQ ID NO: 505923 - DNA, 55 bp, Artificial
  Synthetic oligonucleotide
gccagttcattatccgttgtccaaataggcaaccccaactgttgtgccactttgc

SEQ ID NO: 505924 - DNA, 55 bp, Artificial
  Synthetic oligonucleotide
gcccatttggataacgcccgaggcgtgtgtgagttaatgaactttgacgcagcgg

SEQ ID NO: 505925 - DNA, 55 bp, Artificial
  Synthetic oligonucleotide
gccccaaatcatctttcagcaacaaggtgggcagaaacgaaggaacgttttatcc

SEQ ID NO: 505926 - DNA, 55 bp, Artificial
  Synthetic oligonucleotide
gccgagcaacatcacattcccgtctatcaaccgaaatccttacgcaaagcggaaa

SEQ ID NO: 505927 - DNA, 55 bp, Artificial
  Synthetic oligonucleotide
gtgaaatctacccgttgttcaacgagttgaccggttagtacatcaatagggtcgc

SEQ ID NO: 505928 - DNA, 55 bp, Artificial
  Synthetic oligonucleotide
gtgagtccccatggtgcatcaccattaccggtttgtgtggttgcgtagaaaacga

SEQ ID NO: 505929 - DNA, 55 bp, Artificial
  Synthetic oligonucleotide
gtgtcactgctttcggcacttttgtagatatcgatccgatctgtgaagaccgtgc

SEQ ID NO: 505930 - DNA, 55 bp, Artificial
  Synthetic oligonucleotide
gtgttctttatctctcaaccttctgctcacacagtcattgtgcggctaggttgtg

SEQ ID NO: 505931 - DNA, 55 bp, Artificial
  Synthetic oligonucleotide
gttccgctgttggatgtaataggttccaacgtactgcatcttgaccttcacgagc

SEQ ID NO: 505932 - DNA, 55 bp, Artificial
  Synthetic oligonucleotide
gttcgacataaggtatccttcgctaaatcaccaccgcatagtggcagtatagccc

SEQ ID NO: 505933 - DNA, 55 bp, Artificial
  Synthetic oligonucleotide
gttgatcaacgtgattatcgggatttactatgcggtcatcattggttgggccgcc

SEQ ID NO: 505934 - DNA, 55 bp, Artificial
  Synthetic oligonucleotide
tacaccttacttgaggcggctcgtagttattggaacggtttaagtgcagctaaaa

SEQ ID NO: 505935 - DNA, 55 bp, Artificial
  Synthetic oligonucleotide
tacggaactctatacttaccgcacttataaacgacgttttaacggcaagcttcgc

SEQ ID NO: 505936 - DNA, 55 bp, Artificial
  Synthetic oligonucleotide
tattagttcatgcgggaattagccctcaatgggatttagctaccacgctagcttg

SEQ ID NO: 505937 - DNA, 55 bp, Artificial
  Synthetic oligonucleotide
tcataattacgttgaaagattccggtgtgcccggatccatgtgttggttgccgct

SEQ ID NO: 505938 - DNA, 55 bp, Artificial
  Synthetic oligonucleotide
tcatcttttccgtgaatagcgatgtctaaaatggcggttactgcatagcgccctc

SEQ ID NO: 505939 - DNA, 55 bp, Artificial
  Synthetic oligonucleotide
tcccttcaaattccacatgacgaccaccctcttgcaccaattgacgcatcaggct

SEQ ID NO: 505940 - DNA, 55 bp, Artificial
  Synthetic oligonucleotide
tgcggcattctgcacttcgcattcattcgaagatagtcgcaagctcggtgaggcg

SEQ ID NO: 505941 - DNA, 55 bp, Artificial
  Synthetic oligonucleotide
tgctcgaccttccgtattcgcctcgcgacgtttacccgtataaactggatgtgac

SEQ ID NO: 505942 - DNA, 55 bp, Artificial
  Synthetic oligonucleotide
tggattaccgaatcaacatttaattcaaaccattgctagtgccttagcctatcgc

SEQ ID NO: 505943 - DNA, 55 bp, Artificial
  Synthetic oligonucleotide
tgtggtgtgtcgcgagatgctcaggtgatgctatccacacttgagttgtactgta

SEQ ID NO: 505944 - DNA, 55 bp, Artificial
  Synthetic oligonucleotide
ttcggtgaagttatcgcacaaataaaccaactcaatattgaacgcattgagggtg

SEQ ID NO: 505945 - DNA, 55 bp, Artificial
  Synthetic oligonucleotide
ttgcaacaacggatgaattaaggtttcaccgtagcctcctctgggatagtcgggg

SEQ ID NO: 505946 - DNA, 55 bp, Artificial
  Synthetic oligonucleotide
ttgttgtgatgactggatggcatgatactcaagtgatgccaagtgaggctttatt

SEQ ID NO: 505947 - DNA, 55 bp, Artificial
  Synthetic oligonucleotide
tttagtggtgatcacattatttattggttcattgcgtgcaattctcattccggtg

SEQ ID NO: 505948 - DNA, 55 bp, Artificial
  Synthetic oligonucleotide
tttctgctcggatcttcagcaaatcaaccgattgcgtgagtaaattcaaagtcgg

SEQ ID NO: 505949 - DNA, 55 bp, Artificial
  Synthetic oligonucleotide
gctgaagccttgaagccgcatactttatacgccactggtacaacgggcaatttac

SEQ ID NO: 505950 - DNA, 55 bp, Artificial
  Synthetic oligonucleotide
gctgcaccgataatgccgtatagatgagctaagaatacgcataagagagcgctaa

SEQ ID NO: 505951 - DNA, 55 bp, Artificial
  Synthetic oligonucleotide
gctgtggatggcacattaacggggcgaggttctctcattcatgagcccttagcga

SEQ ID NO: 505952 - DNA, 55 bp, Artificial
  Synthetic oligonucleotide
gcttgatcagccttctgtcgtggcggtacgtcaagatcgtattggctctttaaaa

SEQ ID NO: 505953 - DNA, 55 bp, Artificial
  Synthetic oligonucleotide
ggaaaaccagcgatatcttgtgtggcattgacctcaggaaaatctgatacacaag

SEQ ID NO: 505954 - DNA, 55 bp, Artificial
  Synthetic oligonucleotide
ggaaggatgcgcctttaggctgatcttaatcagtgatttcgcactgctcacgctc

SEQ ID NO: 505955 - DNA, 55 bp, Artificial
  Synthetic oligonucleotide
ggagaattaggctgcgtttcatattccgcttgtaactgtatgcaacgtgaagcca

SEQ ID NO: 505956 - DNA, 55 bp, Artificial
  Synthetic oligonucleotide
ggagagtattcgtggcttattgccgttatatgagacttgccatcaggttaagccg

SEQ ID NO: 505957 - DNA, 55 bp, Artificial
  Synthetic oligonucleotide
ggatcgccagcgaacccaaacgcggaatttgaacaaacgtaataaaagaggcaga

SEQ ID NO: 505958 - DNA, 55 bp, Artificial
  Synthetic oligonucleotide
ggatgggcaagatattctattcgacctgcgaggatcactcgtgcaagcagtggaa

SEQ ID NO: 505959 - DNA, 55 bp, Artificial
  Synthetic oligonucleotide
ggcagagccgcctccgtttatttcaccgcattaagtctttatcttcctccggcat

SEQ ID NO: 505960 - DNA, 55 bp, Artificial
  Synthetic oligonucleotide
ggcgttgataaaattcatctacttgctcaggatgcacacctagtcggtgcattcc

SEQ ID NO: 505961 - DNA, 55 bp, Artificial
  Synthetic oligonucleotide
ggctaatatctaccagtggtttaccttctcgctccatacgtgcattaatcatatc

SEQ ID NO: 505962 - DNA, 55 bp, Artificial
  Synthetic oligonucleotide
gggaaacccagttcgtattgctctgtgcccattgcatattctcgcaccatcagta

SEQ ID NO: 505963 - DNA, 55 bp, Artificial
  Synthetic oligonucleotide
ggggaatctcgccccgagagtactgcgacttgaatgccagattccattaacattc

SEQ ID NO: 505964 - DNA, 55 bp, Artificial
  Synthetic oligonucleotide
ggggaattgcaattagcggcaatggcgttatccgaattagacgtactgaccaatc

SEQ ID NO: 505965 - DNA, 55 bp, Artificial
  Synthetic oligonucleotide
ggggagatgtgaatctgttctcgtttagaagtacaccttctgcagtttgggctca

SEQ ID NO: 505966 - DNA, 55 bp, Artificial
  Synthetic oligonucleotide
ggggattattaccgcgagcattgtaaacaaaccgtgttggctgtcattgaccgtt

SEQ ID NO: 505967 - DNA, 55 bp, Artificial
  Synthetic oligonucleotide
ggggtaaaagatggaaactattgcaaaacatcgttacgctcgcacttcagcgcaa

SEQ ID NO: 505968 - DNA, 55 bp, Artificial
  Synthetic oligonucleotide
gtcgaagcaaccaataatgcttggcattggaatgcacaatatgttggctgggtgt

SEQ ID NO: 505969 - DNA, 55 bp, Artificial
  Synthetic oligonucleotide
gtcgcacttttccccattaagcgcgcataaaattcggacacatcctgtgttgtga

SEQ ID NO: 505970 - DNA, 55 bp, Artificial
  Synthetic oligonucleotide
gtcgctcacaattagcccatgaagggattgccgcaattcaatgtgacgcattcca

SEQ ID NO: 505971 - DNA, 55 bp, Artificial
  Synthetic oligonucleotide
gtcgttttaaagtttcagccgatcaacttgccatttagaaccgctctaactcggg

SEQ ID NO: 505972 - DNA, 55 bp, Artificial
  Synthetic oligonucleotide
caatctaaccgcaccttaattgaattattagcgaattggctgagttcccttggtt

SEQ ID NO: 505973 - DNA, 55 bp, Artificial
  Synthetic oligonucleotide
caatgccgccgctagcagaaatcgcttcagtaaggctcatgccattacgtccgat

SEQ ID NO: 505974 - DNA, 55 bp, Artificial
  Synthetic oligonucleotide
caccccagggtttaacccgaatatcgtgaaatattgccaagagctagacatcccc

SEQ ID NO: 505975 - DNA, 55 bp, Artificial
  Synthetic oligonucleotide
caccccgtaaagcagcggcaaatgcccacgcccattgacctgcggcaagttcacc

SEQ ID NO: 505976 - DNA, 55 bp, Artificial
  Synthetic oligonucleotide
cacccgtatttgccatagctggacgtaacgtcaaggttactttattaccactatg

SEQ ID NO: 505977 - DNA, 55 bp, Artificial
  Synthetic oligonucleotide
caccgctaatagacgagggattgaaaacgcaatcgcttcattatgaaaccaaccc

SEQ ID NO: 505978 - DNA, 55 bp, Artificial
  Synthetic oligonucleotide
cacgcccgctgaaacaataccttgatagcccgcatccaataatgaatttaacggc

SEQ ID NO: 505979 - DNA, 55 bp, Artificial
  Synthetic oligonucleotide
cactcgattgcggcatttatcattcctgtgattgcgttaagttttatcgtaactt

SEQ ID NO: 505980 - DNA, 55 bp, Artificial
  Synthetic oligonucleotide
cactttaagtcaattccggctattaaaacctaactaacgccgatccccaagtcag

SEQ ID NO: 505981 - DNA, 55 bp, Artificial
  Synthetic oligonucleotide
cagaacataatgccaaacggtttaaacacaagcgattaagaagcgcctattgggg

SEQ ID NO: 505982 - DNA, 55 bp, Artificial
  Synthetic oligonucleotide
cagacgaaccgtatttcacgcaaaagtattgagtttgcttgcctgcttatcgggg

SEQ ID NO: 505983 - DNA, 55 bp, Artificial
  Synthetic oligonucleotide
cagataagaagcaccaacgaatgccgcaccaccagtcacattacccaagaacacc

SEQ ID NO: 505984 - DNA, 55 bp, Artificial
  Synthetic oligonucleotide
cagcacggttacggcatcgcattgtaaaacgatgtgtttgatttcgtgatccgtg

SEQ ID NO: 505985 - DNA, 55 bp, Artificial
  Synthetic oligonucleotide
cagcagctgtagtggcatactggatgaacccagctacaccggaagcagaattagc

SEQ ID NO: 505986 - DNA, 55 bp, Artificial
  Synthetic oligonucleotide
cagtgaggatgatgtcacagggatcaccgaaattgcagaccctgttggcgtggtt

SEQ ID NO: 505987 - DNA, 55 bp, Artificial
  Synthetic oligonucleotide
catacgggacatgcacaattaggcgatattgaaattcgcggtatgggaagcagcc

SEQ ID NO: 505988 - DNA, 55 bp, Artificial
  Synthetic oligonucleotide
catctaggctgatccccgaaagcaagaaaccttatcttgttggtgcgctcctacc

SEQ ID NO: 505989 - DNA, 55 bp, Artificial
  Synthetic oligonucleotide
catgttcaaatgacaccgtagctaaatgtttgccgtggtaatacaattccatcgg

SEQ ID NO: 505990 - DNA, 55 bp, Artificial
  Synthetic oligonucleotide
cattgtcgcttaactgtaatgcagcaccaacccaccacttatccgcatcataacg

SEQ ID NO: 505991 - DNA, 55 bp, Artificial
  Synthetic oligonucleotide
ccaaagaagaacgtcatcttccttcccgttttattgctgaattacctacggaatg

SEQ ID NO: 505992 - DNA, 55 bp, Artificial
  Synthetic oligonucleotide
ccacaaatcaatggtagcgaaagcagaccaagtattagtagtagcgtgtttacca

SEQ ID NO: 505993 - DNA, 55 bp, Artificial
  Synthetic oligonucleotide
aaaactcacccgtgtcattttggcatgttgatgcaaaggtttcaggataaccaag

SEQ ID NO: 505994 - DNA, 55 bp, Artificial
  Synthetic oligonucleotide
aaaccgagtgattgcgtggcgtaactttactaagcgtcaaatcacaattgatgcg

SEQ ID NO: 505995 - DNA, 55 bp, Artificial
  Synthetic oligonucleotide
aaacggcatacaactttctttaaagggcatggatactgcacaaccccgaatcccg

SEQ ID NO: 505996 - DNA, 55 bp, Artificial
  Synthetic oligonucleotide
aaattgttaacggaaaccgatcgtaagcgcgcaagtcgtacgacaaccagtacta

SEQ ID NO: 505997 - DNA, 55 bp, Artificial
  Synthetic oligonucleotide
aacgaccatcaattggggacaaggcggttaaagcgttaagttccattgagatttc

SEQ ID NO: 505998 - DNA, 55 bp, Artificial
  Synthetic oligonucleotide
aactcgctttactctcgtactaacaacggtattgcgactattggctaccgtggcc

SEQ ID NO: 505999 - DNA, 55 bp, Artificial
  Synthetic oligonucleotide
aattgaccgtaaacggcacttgatgcttcgctgccagttgttggaggccttgcgc

SEQ ID NO: 506000 - DNA, 55 bp, Artificial
  Synthetic oligonucleotide
aatttgacttcttttagtagccttgccaccgtttgtttgcggaaggtggttgcgc

SEQ ID NO: 506001 - DNA, 55 bp, Artificial
  Synthetic oligonucleotide
acaattcaggaagcttgccggttaacgttgccataaattgctgataactcgcttg

SEQ ID NO: 506002 - DNA, 55 bp, Artificial
  Synthetic oligonucleotide
actaacacagacggaggtttgctttggttatccacaatggaacgtcccacaaaac

SEQ ID NO: 506003 - DNA, 55 bp, Artificial
  Synthetic oligonucleotide
actacaccgactggttagcctttgcgataaacgctttagcgcctaataaagccac

SEQ ID NO: 506004 - DNA, 55 bp, Artificial
  Synthetic oligonucleotide
agaatgcaagggattactggggaagagaattatcttacttttacaccacgttcgt

SEQ ID NO: 506005 - DNA, 55 bp, Artificial
  Synthetic oligonucleotide
agcagttcgtaaagctggcggtcaagatttcactaaatacagtccagatatccac

SEQ ID NO: 506006 - DNA, 55 bp, Artificial
  Synthetic oligonucleotide
agcgcatctgagcctaagtgaatttcaagcccatctgcataaccgtcattatccg

SEQ ID NO: 506007 - DNA, 55 bp, Artificial
  Synthetic oligonucleotide
agcgtgatgtagtgttgcaaagtaaaggtgtgattaacaccccagttctgcatca

SEQ ID NO: 506008 - DNA, 55 bp, Artificial
  Synthetic oligonucleotide
agtagtgttagacgctgccgtattatcggatgattacgtgttgcgtagctacggc

SEQ ID NO: 506009 - DNA, 55 bp, Artificial
  Synthetic oligonucleotide
agtcaaaaccattattcgtacgctctattctaacccagcatcacatggcgcaacg

SEQ ID NO: 506010 - DNA, 55 bp, Artificial
  Synthetic oligonucleotide
agttgcctgcgctccgacccgagccgcgtgattgtgggcaacagcgatatgcaac

SEQ ID NO: 506011 - DNA, 55 bp, Artificial
  Synthetic oligonucleotide
atacgtgatgtgcaacttgatgacgctcgatattaatttgtgccacgtctaacgc

SEQ ID NO: 506012 - DNA, 55 bp, Artificial
  Synthetic oligonucleotide
atcagactccgcattcactgccaagatatagatatatccatcacgcaaacggcgc

SEQ ID NO: 506013 - DNA, 55 bp, Artificial
  Synthetic oligonucleotide
attagagaacaccttacccaacccgaatatattacactttgcgagcaagcctatc

SEQ ID NO: 506014 - DNA, 55 bp, Artificial
  Synthetic oligonucleotide
caagccccgctaaaatgcggagtaaactcgttttaccgataccattatgcccttc

SEQ ID NO: 506015 - DNA, 55 bp, Artificial
  Synthetic oligonucleotide
cgtgcaatgggtgttgtcggcgccgtgttagacagcgatgaggtttataccggta

SEQ ID NO: 506016 - DNA, 55 bp, Artificial
  Synthetic oligonucleotide
cctggcaaaatcgtacatttacattcaccaggtggtttaggggtacgttgggatt

SEQ ID NO: 506017 - DNA, 55 bp, Artificial
  Synthetic oligonucleotide
cctttgccagcagggtaaagtcctaaagaatccacctggtttaccgcacctcgtg

SEQ ID NO: 506018 - DNA, 55 bp, Artificial
  Synthetic oligonucleotide
cgtccgcctgattcatatttgacactggactgaaacaaaatgtgcagtcgagcgt

SEQ ID NO: 506019 - DNA, 55 bp, Artificial
  Synthetic oligonucleotide
cgaacgaggcatgtgtctccgcaaactatcaggtagaggaaagcgcgcagcatga

SEQ ID NO: 506020 - DNA, 55 bp, Artificial
  Synthetic oligonucleotide
cgactggcaagcgccatttcacgtaaggttttacaacgatccgcaagcatggtga

SEQ ID NO: 506021 - DNA, 55 bp, Artificial
  Synthetic oligonucleotide
cgatggacgtatacgccaatcaagaagttaaaattggccgagattattcccatca

SEQ ID NO: 506022 - DNA, 55 bp, Artificial
  Synthetic oligonucleotide
cggttttcgatcgtatctttactgcccctcaagaaactcgcacagttagattacg

SEQ ID NO: 506023 - DNA, 55 bp, Artificial
  Synthetic oligonucleotide
cggtgcaagctttaattcacataccggtgtgcgtgtttatgggaatacacatggc

SEQ ID NO: 506024 - DNA, 55 bp, Artificial
  Synthetic oligonucleotide
cgattggcgtaagatagcccaatttgcccgctttatacataaaattacgcattac

SEQ ID NO: 506025 - DNA, 55 bp, Artificial
  Synthetic oligonucleotide
cggctcacaatgaagatacccatcgcgataatgttaaagttttgaccttccgatt

SEQ ID NO: 506026 - DNA, 55 bp, Artificial
  Synthetic oligonucleotide
cggcaccggacgtccttatcggcggaacaccttgtcaaagctattcttacgccgg

SEQ ID NO: 506027 - DNA, 55 bp, Artificial
  Synthetic oligonucleotide
cgcaaccaagctcattaccacgttttagtcagttaaactcagcggtaatcagtgc

SEQ ID NO: 506028 - DNA, 55 bp, Artificial
  Synthetic oligonucleotide
cgcacccttgtgggcggagtaaaccattcatcctaattagcctgcggctagggtt

SEQ ID NO: 506029 - DNA, 55 bp, Artificial
  Synthetic oligonucleotide
cgcctcatccaactccatatcaatcgctaatgcacggatttctttggtgattacg

SEQ ID NO: 506030 - DNA, 55 bp, Artificial
  Synthetic oligonucleotide
cgctcgcaccaaagcgtcctgtttccacaaccgtcacccctgtttcataacggac

SEQ ID NO: 506031 - DNA, 55 bp, Artificial
  Synthetic oligonucleotide
cgctgctctgcataaagctgggtggtcgctcagacaactctctcttcagcacggt

SEQ ID NO: 506032 - DNA, 55 bp, Artificial
  Synthetic oligonucleotide
cggaatacgtaatccacgcgcgagtaataactgataggcaagcatcgcaatacgg

SEQ ID NO: 506033 - DNA, 55 bp, Artificial
  Synthetic oligonucleotide
ctacaagctgtaatttaccctcgcgattgtagcgaacttgagcaataaagcggtc

SEQ ID NO: 506034 - DNA, 55 bp, Artificial
  Synthetic oligonucleotide
ccaccaacttaccgcgactttgaatcgcagtatagcggttctcttcagaacgcat

SEQ ID NO: 506035 - DNA, 55 bp, Artificial
  Synthetic oligonucleotide
ccaccaatcggcacgttccccacatagattttggttgattctctacgcttaatcg

SEQ ID NO: 506036 - DNA, 55 bp, Artificial
  Synthetic oligonucleotide
ccacgccacttacgcattaggcaaattagacggcaacgttttaaatgcagaacac

SEQ ID NO: 506037 - DNA, 55 bp, Artificial
  Synthetic oligonucleotide
ccacttaaagaatcttccattgcgcgacgggtcacttcattcggctgataatcca

SEQ ID NO: 506038 - DNA, 55 bp, Artificial
  Synthetic oligonucleotide
ccacttataattcggcttcgtggcagttagtgtaccgtaagggaacagaacgtcc

SEQ ID NO: 506039 - DNA, 55 bp, Artificial
  Synthetic oligonucleotide
ccagcccataacacaacataacgaggatctacttctaatgcactaccacggtcgg

SEQ ID NO: 506040 - DNA, 55 bp, Artificial
  Synthetic oligonucleotide
ccagtcaccaatcttgtggaagcaaggaactaattcggatgtgactgagggcgca

SEQ ID NO: 506041 - DNA, 55 bp, Artificial
  Synthetic oligonucleotide
ccctgcgttcacaggcgtgccaaccgcgcccacagctgcattaggcacaaacaac

SEQ ID NO: 506042 - DNA, 55 bp, Artificial
  Synthetic oligonucleotide
cccttgccggtctgattgtcacttcacgtttatcctctgctcaaccgactgccgg

SEQ ID NO: 506043 - DNA, 55 bp, Artificial
  Synthetic oligonucleotide
ccgacaggatgccaatcgcaccgtcgatatgccaagttaattcatatgggttgat

SEQ ID NO: 506044 - DNA, 55 bp, Artificial
  Synthetic oligonucleotide
ccgaccaacccacaataaaacgacaaggtgcatccattattaatgtcacctcagg

SEQ ID NO: 506045 - DNA, 55 bp, Artificial
  Synthetic oligonucleotide
ccgacgtgggcaataaatacaatgctcttgccggccaagtaaaccaaatgggcag

SEQ ID NO: 506046 - DNA, 55 bp, Artificial
  Synthetic oligonucleotide
ctaagcgagcataaacagcgaggcgattcggagcataaccatttagaggttgagc

SEQ ID NO: 506047 - DNA, 55 bp, Artificial
  Synthetic oligonucleotide
ccgtacgacaaacattattttctcaacctacgccagaacaacgttttgcagggcg

SEQ ID NO: 506048 - DNA, 55 bp, Artificial
  Synthetic oligonucleotide
cctattagaagcgatcttttatctcgggcatggtcgctccttcaaaagtgcggtc

SEQ ID NO: 506049 - DNA, 55 bp, Artificial
  Synthetic oligonucleotide
cgttgatttattaattcggcgtcaaaactgattgttacgcctttaccggagccgg

SEQ ID NO: 506050 - DNA, 55 bp, Artificial
  Synthetic oligonucleotide
cctcgagtggaaggcgaacaattacttaatccatcgattgccgtcagctttgtgg

SEQ ID NO: 506051 - DNA, 55 bp, Artificial
  Synthetic oligonucleotide
cgtgccggacgttggcgcatgtacaggcaactgacgatagttatcgccttttgtc

SEQ ID NO: 506052 - DNA, 54 bp, Artificial
  Synthetic oligonucleotide
acggcactaaggttgaacgatgcccgacgctgataatgatggtattcggcaatt

SEQ ID NO: 506053 - DNA, 54 bp, Artificial
  Synthetic oligonucleotide
ccacattaattgaccacagtgcataagaagtggcttgtacatcagctaaagcaa

SEQ ID NO: 506054 - DNA, 54 bp, Artificial
  Synthetic oligonucleotide
atagatgcttagcgacattttctacgttggctagatccgtagttttaatcgctt

SEQ ID NO: 506055 - DNA, 54 bp, Artificial
  Synthetic oligonucleotide
caatgtacattggtataacctaaacctgaaataacgccgccggagactaaggtt

SEQ ID NO: 506056 - DNA, 54 bp, Artificial
  Synthetic oligonucleotide
gtagagacacaatcggcgtgttgttgctatcaggggtataaagggaggattggg

SEQ ID NO: 506057 - DNA, 53 bp, Artificial
  Synthetic oligonucleotide
ccggtaagtgattcgcggatctggcgcacgttataagtatcaacacctgctag

SEQ ID NO: 506058 - DNA, 53 bp, Artificial
  Synthetic oligonucleotide
ttctccagttcctgttttaaagcctaatgaagccatgtttcgcttggctctag

SEQ ID NO: 506059 - DNA, 53 bp, Artificial
  Synthetic oligonucleotide
cctctatcgttttctcaccattagcgattaaatgtgcccaaggttgtcttaca

SEQ ID NO: 506060 - DNA, 53 bp, Artificial
  Synthetic oligonucleotide
cttatccgaacggtcacccgaaccaagtaagttacggcgagtatccgcttgtt

SEQ ID NO: 506061 - DNA, 53 bp, Artificial
  Synthetic oligonucleotide
gagagagaacaaaatgacagcgcaaagtggcgtattattagagcattgcaaag

SEQ ID NO: 506062 - DNA, 52 bp, Artificial
  Synthetic oligonucleotide
ttttccgttggcaaagccccactgccaatctgagcaaggcttggctcaactt

SEQ ID NO: 506063 - DNA, 52 bp, Artificial
  Synthetic oligonucleotide
taccgcagcacgtaactgatgatattgggtatttggaatagaacgcaatcct

SEQ ID NO: 506064 - DNA, 52 bp, Artificial
  Synthetic oligonucleotide
ggcgggcgcacaatacggtaatatgatgattccgcgaattggccatgaagtg

SEQ ID NO: 506065 - DNA, 52 bp, Artificial
  Synthetic oligonucleotide
gcaactatgcttgacctttaatcgctttacgacctaagaatggtgctttgtc

SEQ ID NO: 506066 - DNA, 52 bp, Artificial
  Synthetic oligonucleotide
ggctaagccatcggtatagtcgttcgcaagaatcgacgtgtaagcctctgtt

SEQ ID NO: 506067 - DNA, 52 bp, Artificial
  Synthetic oligonucleotide
aacgaggcttcattggcattttgactggcgataatcaatttccgcttggctt

SEQ ID NO: 506068 - DNA, 52 bp, Artificial
  Synthetic oligonucleotide
attgaggctgggattaatacagcggcagaaacgatcccttatgctactggtc

SEQ ID NO: 506069 - DNA, 51 bp, Artificial
  Synthetic oligonucleotide
tagaaggcatcgctaacgttctgagcagaagggtgccgtgagattgttgcc

SEQ ID NO: 506070 - DNA, 51 bp, Artificial
  Synthetic oligonucleotide
gggtaatctattggcaattcgagaagatgtagggcgacatgtggcactaga

SEQ ID NO: 506071 - DNA, 51 bp, Artificial
  Synthetic oligonucleotide
tccccgattcaacgcaattacttggaaacgcgccatgtacctttaaagcgg

SEQ ID NO: 506072 - DNA, 50 bp, Artificial
  Synthetic oligonucleotide
ttagcattccgtgatattgctttagaccgacctttgcgcattgccgtggg

SEQ ID NO: 506073 - DNA, 50 bp, Artificial
  Synthetic oligonucleotide
aacggattaagttgatgaatcggtttaaaatccccttgcggatcccacca

SEQ ID NO: 506074 - DNA, 50 bp, Artificial
  Synthetic oligonucleotide
ttgtaatcgtagcccaattgcatctcgttcgtcaggagtgagcagaagcg

SEQ ID NO: 506075 - DNA, 50 bp, Artificial
  Synthetic oligonucleotide
cgttgtgtggaaaacgtagcgggtaacggtgaagtacgtcagttcgcgta

SEQ ID NO: 506076 - DNA, 50 bp, Artificial
  Synthetic oligonucleotide
tgcaccaccttgttgaaccaaagcaagcggcatcacttgcgctttatttt

SEQ ID NO: 506077 - DNA, 50 bp, Artificial
  Synthetic oligonucleotide
ttttaccgggtgtggaaaacccaaccattctcccgctcgctaatgattcc

SEQ ID NO: 506078 - DNA, 60 bp, Artificial
  Synthetic oligonucleotide
gggattccaaacattcccctacaaccctttttagggttaccgttacctcatggaatttcc

SEQ ID NO: 506079 - DNA, 57 bp, Artificial
  Synthetic oligonucleotide
gtagttgagtggtctcctcttggctactcccagcgtacgaacggggtactggtttcg

SEQ ID NO: 506080 - DNA, 55 bp, Artificial
  Synthetic oligonucleotide
ttctccggtgcagcggtagggaatgggatagaacatcccctccacgaagggcccc

SEQ ID NO: 506081 - DNA, 55 bp, Artificial
  Synthetic oligonucleotide
ttccataattaggaacggatgcctctggcatgagcccagagaatttgtggcgggg

SEQ ID NO: 506082 - DNA, 55 bp, Artificial
  Synthetic oligonucleotide
gtgcgggcagtgggaagacacgtgtccttacctaccgagtaggtcacattgtggc

SEQ ID NO: 506083 - DNA, 55 bp, Artificial
  Synthetic oligonucleotide
gtcagcttaaaattccacggatctccctccaccatatgcacggactccccaaggg

SEQ ID NO: 506084 - DNA, 55 bp, Artificial
  Synthetic oligonucleotide
gcctgagataatacattggatcgaacactccgaccattcaccacccaaacgatcc

SEQ ID NO: 506085 - DNA, 55 bp, Artificial
  Synthetic oligonucleotide
gcaagagtatggggaatcaggtgggcattacagaggatccagttaacatgtatgg

SEQ ID NO: 506086 - DNA, 55 bp, Artificial
  Synthetic oligonucleotide
gagcggtaggtgaggttgattttatctgaaccgaccccaccctgtgattacttcc

SEQ ID NO: 506087 - DNA, 55 bp, Artificial
  Synthetic oligonucleotide
ctatctgcctcggttgtacgccccaatacagcccctattcaacccctaggtccgc

SEQ ID NO: 506088 - DNA, 55 bp, Artificial; identical to SEQ ID NO: 217952
  Synthetic oligonucleotide

SEQ ID NO: 506089 - DNA, 55 bp, Artificial
  Synthetic oligonucleotide
ccgaatggcagccggggaacctacctatgaagtccggccgagggagaatgctcct

SEQ ID NO: 506090 - DNA, 55 bp, Artificial
  Synthetic oligonucleotide
cataagcatgccggcgtagggaggcagacatcacgggcatttccaaaacgcaccc

SEQ ID NO: 506091 - DNA, 55 bp, Artificial
  Synthetic oligonucleotide
attcctgaaaaggattgggagagtccccgggaaggaacaggtccgaattttagcc

SEQ ID NO: 506092 - DNA, 55 bp, Artificial
  Synthetic oligonucleotide
atagtggcagcggcggcataagcacgtcgcaacaaccccgtggagaagagctggg

SEQ ID NO: 506093 - DNA, 55 bp, Artificial
  Synthetic oligonucleotide
aatagaagaccgtcgcaaaacacggggaaccacgtacccgggctgctgtggatcc

SEQ ID NO: 506094 - DNA, 54 bp, Artificial
  Synthetic oligonucleotide
tcgggaatccctactatcccaaatgattggaaccatggacacccctgagggaat

SEQ ID NO: 506095 - DNA, 55 bp, Artificial
  Synthetic oligonucleotide
tggtcgtctatgacggccgctttaccacgggcacgcttcgctatgagggccgcta

SEQ ID NO: 506096 - DNA, 55 bp, Artificial
  Synthetic oligonucleotide
tccccgattcacacgtgacggcgggacagatccgaccgaagtgcaactgcgtacg

SEQ ID NO: 506097 - DNA, 55 bp, Artificial
  Synthetic oligonucleotide
tatggaagagctcctcccgttggtccgacagctctggcggctacacgaaggaccg

SEQ ID NO: 506098 - DNA, 55 bp, Artificial
  Synthetic oligonucleotide
tagggtcgacgggcagcatccgttccgtctccccgaaggggtcctcgtgggtcca

SEQ ID NO: 506099 - DNA, 55 bp, Artificial
  Synthetic oligonucleotide
tagggtcctgtctgaggctccgaactagaagcgggagaggccgagctgcaactcg

SEQ ID NO: 506100 - DNA, 55 bp, Artificial
  Synthetic oligonucleotide
gtgcaccccgggcgacgcctgccgtcgttccgagaacccaaggagagagctgtgc

SEQ ID NO: 506101 - DNA, 55 bp, Artificial
  Synthetic oligonucleotide
ctgtaccccggagcgacgatcaggatcaatggtcgcgtcagcacggtcgagcgaa

SEQ ID NO: 506102 - DNA, 55 bp, Artificial
  Synthetic oligonucleotide
ctggtgtgcgtttcacactgcaacaggaggccgtctgatgcccgttcgaacccgc

SEQ ID NO: 506103 - DNA, 55 bp, Artificial
  Synthetic oligonucleotide
ccttgcgcatccgcggacgagattgaattgcccagcgggcaaaagagtggctaga

SEQ ID NO: 506104 - DNA, 55 bp, Artificial
  Synthetic oligonucleotide
cctcatgcgtctcctcctcagaacgacggtcgagagatataactgacggagagtt

SEQ ID NO: 506105 - DNA, 55 bp, Artificial
  Synthetic oligonucleotide
caggacgagtacggagatgagggctcgcattggggaggcgatccgctggaggcta

SEQ ID NO: 506106 - DNA, 55 bp, Artificial
  Synthetic oligonucleotide
atggtggcggatccgagtgccgtcgtgcggaagtcgaggtcggatcggggaaacc

SEQ ID NO: 506107 - DNA, 55 bp, Artificial
  Synthetic oligonucleotide
aatgcgccgctcggcccacgtcgtcagccgatcttccggatgtaatcggttccca

SEQ ID NO: 506108 - DNA, 55 bp, Artificial
  Synthetic oligonucleotide
aaggacgttgttccatccggggtgctccgttcgggaggctgggagttgcgagaca

SEQ ID NO: 506109 - DNA, 55 bp, Artificial
  Synthetic oligonucleotide
aacgtcgacgcacggttcccgcaacggggtcgctcctacggtcgcctccgcaacc

SEQ ID NO: 506110 - DNA, 52 bp, Artificial
  Synthetic oligonucleotide
gcttctatggctacgggctgacgatctacagcgattccacgaagacctttcc

SEQ ID NO: 506111 - DNA, 52 bp, Artificial
  Synthetic oligonucleotide
tgagtagtgcgactggccggacgatagccgtaatcttttctgggatctagta

SEQ ID NO: 506112 - DNA, 60 bp, Artificial
  Synthetic oligonucleotide
accagaacggtaagcggcacttgctaccgaacttttccctcctgaacgtcctattatttg

SEQ ID NO: 506113 - DNA, 60 bp, Artificial
  Synthetic oligonucleotide
ccgagcgttgatcgtaagtgccttttgtctccttatagcgtttttctaagtcaggcagct

SEQ ID NO: 506114 - DNA, 60 bp, Artificial
  Synthetic oligonucleotide
tgacacttctcaaaggctcgttaacttaccatgtccaatttacggaaattcggacttgaa

SEQ ID NO: 506115 - DNA, 60 bp, Artificial
  Synthetic oligonucleotide
ccgtaaatttccctcgcacttgctatgacctgctccatagtgatttcacctttagcaaac

SEQ ID NO: 506116 - DNA, 60 bp, Artificial
  Synthetic oligonucleotide
tcatctgtcatggctttaattctcctttttagaaagatgttttccccctcttactaaccg

SEQ ID NO: 506117 - DNA, 58 bp, Artificial
  Synthetic oligonucleotide
cattttattaaacaacctgccctatcagacctatggggataagaatcttttagttgac

SEQ ID NO: 506118 - DNA, 56 bp, Artificial
  Synthetic oligonucleotide
ccccttggcatatattacgaaatcacagtccacttttcctaatttctgtaaattgg

SEQ ID NO: 506119 - DNA, 55 bp, Artificial
  Synthetic oligonucleotide
gattgcaaggggactgctccgattccttcggttatcgaataaatgggttacggcg

SEQ ID NO: 506120 - DNA, 55 bp, Artificial
  Synthetic oligonucleotide
gcaagtcgtggcaactagtaaaatcacctcacaagaacagatcaacacacctgag

SEQ ID NO: 506121 - DNA, 55 bp, Artificial
  Synthetic oligonucleotide
gcacctatgtggatacagcacctgctactagtgctagttcaacctacagtgttcg

SEQ ID NO: 506122 - DNA, 55 bp, Artificial
  Synthetic oligonucleotide
tctgacaagttccggcggatttccaagttcgcatacagcgattgtctgtgccttg

SEQ ID NO: 506123 - DNA, 55 bp, Artificial
  Synthetic oligonucleotide
gcagtagctattagtacatatgagggaaagtctgtcgcggtggttatcacggtga

SEQ ID NO: 506124 - DNA, 55 bp, Artificial
  Synthetic oligonucleotide
gccggaaagcggaatatattcccgtcttggaacaacgctcttgtaggccggtctg

SEQ ID NO: 506125 - DNA, 55 bp, Artificial
  Synthetic oligonucleotide
gccgttcactgaccaatttaaaggattcccctaagcgttgttcaagagtggcgct

SEQ ID NO: 506126 - DNA, 55 bp, Artificial
  Synthetic oligonucleotide
gccttagaaacgacctccccgcccgataaagactttacggtacggatctttccgg

SEQ ID NO: 506127 - DNA, 55 bp, Artificial
  Synthetic oligonucleotide
tccttttcactgatgactcgttattattttcggcagtttgttagacagacccggc

SEQ ID NO: 506128 - DNA, 55 bp, Artificial
  Synthetic oligonucleotide
gcgtcatgctaacggagaattccaggccctttccataccccttttagccctgatg

SEQ ID NO: 506129 - DNA, 55 bp, Artificial
  Synthetic oligonucleotide
gctcataatggagatcccaaatcctcccctgcttgggagttaaaagaggaccata

SEQ ID NO: 506130 - DNA, 55 bp, Artificial
  Synthetic oligonucleotide
gcttacggcgaattatgaaaggctgtcaaaatctcagttaaaacgggtggatcgg

SEQ ID NO: 506131 - DNA, 55 bp, Artificial
  Synthetic oligonucleotide
ggaaatggccgattatttgatgcaggatatcgatgctattcatattggctcctgt

SEQ ID NO: 506132 - DNA, 55 bp, Artificial
  Synthetic oligonucleotide
ggaagattgagagcctacccagatacggatgttttgaaatccctggagggtaaga

SEQ ID NO: 506133 - DNA, 55 bp, Artificial
  Synthetic oligonucleotide
ctctgatctcctgggatatgccaagttccctggccatccggcaggaatcatggat

SEQ ID NO: 506134 - DNA, 55 bp, Artificial
  Synthetic oligonucleotide
ctgatcaggcatgtcttagaaaatattcaggttttgaccccaccccaaatcacca

SEQ ID NO: 506135 - DNA, 55 bp, Artificial
  Synthetic oligonucleotide
ctgccaaattctatcctggcctggtcgaagtctgctcttatctcctggtaggtct

SEQ ID NO: 506136 - DNA, 55 bp, Artificial
  Synthetic oligonucleotide
ctgttcaatccatccttgggcaatccatgaatttgcgttttgttgtcacctcaat

SEQ ID NO: 506137 - DNA, 55 bp, Artificial
  Synthetic oligonucleotide
tgcgctttattttgtctacctcagaggatatctacagtgatagtacgacggcggg

SEQ ID NO: 506138 - DNA, 55 bp, Artificial
  Synthetic oligonucleotide
gaacacgagaaggcttttatttcactttgtcctggtaaattgcaaacggatcagg

SEQ ID NO: 506139 - DNA, 55 bp, Artificial
  Synthetic oligonucleotide
gaagcttaagacttggagagctgttcataccattgatccgaccgatccgttaaca

SEQ ID NO: 506140 - DNA, 55 bp, Artificial
  Synthetic oligonucleotide
gaccaggtggaatctcgacgcgcaactcttgccaccgcttccccgagcgagtcta

SEQ ID NO: 506141 - DNA, 55 bp, Artificial
  Synthetic oligonucleotide
gagagaaccaggcggcttattcagatcggcgcgatcatagaaagtcatttgcctg

SEQ ID NO: 506142 - DNA, 55 bp, Artificial
  Synthetic oligonucleotide
gagctcctggagttaggggttgaaagggtcatcctcggtacagtggctgtgcgcc

SEQ ID NO: 506143 - DNA, 55 bp, Artificial
  Synthetic oligonucleotide
gaggacttttctaagggactaccaatagtgcataaagcccattcatccctagggg

SEQ ID NO: 506144 - DNA, 55 bp, Artificial
  Synthetic oligonucleotide
gaggggtgaaacgtaaatgttctatcctgttaaggttgggacacgggaacgctgg

SEQ ID NO: 506145 - DNA, 55 bp, Artificial
  Synthetic oligonucleotide
gaggtggcagaatgaatatagatcctgaaatggtcagaagggcgcagatgttgct

SEQ ID NO: 506146 - DNA, 55 bp, Artificial
  Synthetic oligonucleotide
gagtcttatgttttctcagagattccagtaaaacctctaaccgttccgccggcac

SEQ ID NO: 506147 - DNA, 55 bp, Artificial
  Synthetic oligonucleotide
gatcaagcgggtctacgattccatatttatgcacgtcacttttgagcacttcctg

SEQ ID NO: 506148 - DNA, 55 bp, Artificial
  Synthetic oligonucleotide
gatcttgccatccatgactttcctatgatttcgaaatggctggataccactaaga

SEQ ID NO: 506149 - DNA, 55 bp, Artificial
  Synthetic oligonucleotide
gatggaactgtgtggtcttacggcactgactcgtctggtaatggtggtttaggtg

SEQ ID NO: 506150 - DNA, 55 bp, Artificial
  Synthetic oligonucleotide
gattctctaggtcacgctcttgcgtatcctccacttgaccttcatctttaagctc

SEQ ID NO: 506151 - DNA, 55 bp, Artificial
  Synthetic oligonucleotide
ggggaactctgattgcaggctatgtgttctttgccgtagccgccacagggacggg

SEQ ID NO: 506152 - DNA, 55 bp, Artificial
  Synthetic oligonucleotide
ggtagagtgctgccttcccacactttcaggcggaaaagagtggtagttcgccaag

SEQ ID NO: 506153 - DNA, 55 bp, Artificial
  Synthetic oligonucleotide
ggtcaggggaaacgaagaccgaagacgctcggcgctagccaaggggaagtccctt

SEQ ID NO: 506154 - DNA, 55 bp, Artificial
  Synthetic oligonucleotide
ggtcatcccagaacgcgcagtcctctgccccaaaacccacgggtggtttatgccc

SEQ ID NO: 506155 - DNA, 55 bp, Artificial
  Synthetic oligonucleotide
ggtccaccggcaacacacagaataagaatccattgccagcctactaagggtgccg

SEQ ID NO: 506156 - DNA, 55 bp, Artificial
  Synthetic oligonucleotide
ggtgtcgcaatggctatttctgtacacaggtctcccgagagcagcattaccgccc

SEQ ID NO: 506157 - DNA, 55 bp, Artificial
  Synthetic oligonucleotide
gtagtcataggttttacagccggggcaggggtattaattgggttagggcaactca

SEQ ID NO: 506158 - DNA, 55 bp, Artificial
  Synthetic oligonucleotide
tattgaaatccaaaggattgaaatataaatcacgaagcttgcagggtgcagggat

SEQ ID NO: 506159 - DNA, 55 bp, Artificial
  Synthetic oligonucleotide
gtccattccaggtgaaatagctttactcctgcggcaagaactaattctctagtat

SEQ ID NO: 506160 - DNA, 55 bp, Artificial
  Synthetic oligonucleotide
gtcctcttccgtcagagacattccctccatggcaaagctcccatctacctgagct

SEQ ID NO: 506161 - DNA, 55 bp, Artificial
  Synthetic oligonucleotide
gtgagattcgagagcgctttgagcagggttcaaagacggttgttgatgatacgcc

SEQ ID NO: 506162 - DNA, 55 bp, Artificial
  Synthetic oligonucleotide
gtgatgcttatggtgccgtcgttgcttttatcggcttattgggaggatttataac

SEQ ID NO: 506163 - DNA, 55 bp, Artificial
  Synthetic oligonucleotide
tatctgccagtgaacagagaagacatggagtgccggggatgggaccaggtggact

SEQ ID NO: 506164 - DNA, 55 bp, Artificial
  Synthetic oligonucleotide
tatccggcaacagcagaaagcactgcccctactaggaacgaaacggcagtttgcc

SEQ ID NO: 506165 - DNA, 55 bp, Artificial
  Synthetic oligonucleotide
taagcctcagaggatgtaccaacgagcaaattgtcgagatgttaaactccctata

SEQ ID NO: 506166 - DNA, 55 bp, Artificial
  Synthetic oligonucleotide
tatcaagcgatcatgatcacaactatggatagccctcaaccgtcctcggcacccc

SEQ ID NO: 506167 - DNA, 55 bp, Artificial
  Synthetic oligonucleotide
tagtggtttgcccacaaaagtatacgcaggtttagggccgtttagccggtgccgg

SEQ ID NO: 506168 - DNA, 55 bp, Artificial
  Synthetic oligonucleotide
ggaagtcatcgagggaaatatatattggtgcgcgatttccacaaatcccagtgtc

SEQ ID NO: 506169 - DNA, 55 bp, Artificial
  Synthetic oligonucleotide
ggaatctcgacgcgcaactcttgccaccgcttccccgagcgagtctaaaacgccc

SEQ ID NO: 506170 - DNA, 55 bp, Artificial
  Synthetic oligonucleotide
ggaggagtttgcttcgtatggccattgacgttggcagtattgttgaaggggtcgt

SEQ ID NO: 506171 - DNA, 55 bp, Artificial
  Synthetic oligonucleotide
ggatggtttgggctccgatgctaacagcagatgccgcgaaaacccttccagttaa

SEQ ID NO: 506172 - DNA, 55 bp, Artificial
  Synthetic oligonucleotide
ggattcgttcagcagcttatgcgaattggccggcagtacccttagctgtcctcgg

SEQ ID NO: 506173 - DNA, 55 bp, Artificial
  Synthetic oligonucleotide
ggatttgaagcaatcgctacagtatacccttgttggatagcgctttcaacggcac

SEQ ID NO: 506174 - DNA, 55 bp, Artificial
  Synthetic oligonucleotide
ggcaacgatgctttggcatggggaattcagcaagccttgcgaccagaggggaaga

SEQ ID NO: 506175 - DNA, 55 bp, Artificial
  Synthetic oligonucleotide
ggcaagctctaattcggggagcttatccttcatagaaccgtgaataagaggtgcg

SEQ ID NO: 506176 - DNA, 55 bp, Artificial
  Synthetic oligonucleotide
ggcccggtctatagaaatggtgtcggtgcccactcccttaatgcccatccctgcc

SEQ ID NO: 506177 - DNA, 55 bp, Artificial
  Synthetic oligonucleotide
ggccgaccccatcgtaaaacccatttgataatcgatcaactgccctgctccttgt

SEQ ID NO: 506178 - DNA, 55 bp, Artificial
  Synthetic oligonucleotide
ggcctttatctctgccgagcgttgatcgtaagtgccttttgtctccttatagcgt

SEQ ID NO: 506179 - DNA, 55 bp, Artificial
  Synthetic oligonucleotide
ggcgtgtgccggtgcaagtcgagtggctgtgcttgaaggtattgcggactctacc

SEQ ID NO: 506180 - DNA, 55 bp, Artificial
  Synthetic oligonucleotide
ggctggattggcggaatttgactcgtgacaagtggccgattacagggcacgaacc

SEQ ID NO: 506181 - DNA, 55 bp, Artificial
  Synthetic oligonucleotide
ggctgtaaatcaacggttttacgcatcgaggccatttgtttataagtcaacggaa

SEQ ID NO: 506182 - DNA, 55 bp, Artificial
  Synthetic oligonucleotide
gggagaccactccaccgagttcagtggcagaggcttggtggtcaccggacatgga

SEQ ID NO: 506183 - DNA, 55 bp, Artificial
  Synthetic oligonucleotide
gggccagtatgtataccatacctgcttcgcaatgtcaaaccggcccatcctaacc

SEQ ID NO: 506184 - DNA, 55 bp, Artificial
  Synthetic oligonucleotide
gggcgatcaccattgaccactacgggcgcaaccttccgaagtcgacgcatggctc

SEQ ID NO: 506185 - DNA, 55 bp, Artificial
  Synthetic oligonucleotide
ggggaaatgatggccagctttgtactggaggatttaaccggaaccatagaagttt

SEQ ID NO: 506186 - DNA, 55 bp, Artificial
  Synthetic oligonucleotide
caacttctcgcaataatcttttagcacgattcctttggactgaatttccaacctt

SEQ ID NO: 506187 - DNA, 55 bp, Artificial
  Synthetic oligonucleotide
caaggattgtcggatagggcagagaacggctaaattcatcataagttacctgctc

SEQ ID NO: 506188 - DNA, 55 bp, Artificial
  Synthetic oligonucleotide
caatagcctatgacgcaaaccgctgactcttgtcgttaagacaaggaaaggatac

SEQ ID NO: 506189 - DNA, 55 bp, Artificial
  Synthetic oligonucleotide
caatggttaacgacgcattatggcggatcacgatactgttgcatattgccagccc

SEQ ID NO: 506190 - DNA, 55 bp, Artificial
  Synthetic oligonucleotide
cacccaggccggggaatggtcgggagcaagaatttctttgtaatccacgcccatt

SEQ ID NO: 506191 - DNA, 55 bp, Artificial
  Synthetic oligonucleotide
caccccaaagggtgctacagagccggtaactaaagttctgaagtccgcagtagcc

SEQ ID NO: 506192 - DNA, 55 bp, Artificial
  Synthetic oligonucleotide
cacctgtactcgacggttacacccagcaacatcaacattagcgtacagcttatcg

SEQ ID NO: 506193 - DNA, 55 bp, Artificial
  Synthetic oligonucleotide
cagcaacctgccgtgccaatacatcaagatgtctcaattcacgttctgttggctc

SEQ ID NO: 506194 - DNA, 55 bp, Artificial
  Synthetic oligonucleotide
cagcatgtgtttcaaatcgtcagtcagcaaataagccgtaaccggcgggccaatc

SEQ ID NO: 506195 - DNA, 55 bp, Artificial
  Synthetic oligonucleotide
caggtcgcagaaaagagatgctatccttcagattctgaatcggccaattcttggg

SEQ ID NO: 506196 - DNA, 55 bp, Artificial
  Synthetic oligonucleotide
caggtcttgccccgtaggtgattgtgaaagatagttagtagttctactagaatct

SEQ ID NO: 506197 - DNA, 55 bp, Artificial
  Synthetic oligonucleotide
catcctattaaccaagaatggccgggaaaccggggcttatcttcttggccgccac

SEQ ID NO: 506198 - DNA, 55 bp, Artificial
  Synthetic oligonucleotide
ccaccgttattcagcaattcctcttatcgatgagcaggggtgttatcagggaacg

SEQ ID NO: 506199 - DNA, 55 bp, Artificial
  Synthetic oligonucleotide
ccagccgaaagacggatctaggcgataagttttgactttaccaaccttcgggcct

SEQ ID NO: 506200 - DNA, 55 bp, Artificial
  Synthetic oligonucleotide
ccagggactgcttttggatgccccggctatgttcgtattgcctattgcgtagcct

SEQ ID NO: 506201 - DNA, 55 bp, Artificial
  Synthetic oligonucleotide
cccaaacacttttatccatgtaggcgagcggctttcctgtcaaaacctcaagaag

SEQ ID NO: 506202 - DNA, 55 bp, Artificial
  Synthetic oligonucleotide
ccccttatcgacacccttctcacagatcccgatatctcccaacggctctatctcg

SEQ ID NO: 506203 - DNA, 55 bp, Artificial
  Synthetic oligonucleotide
tttacccgaccggctttcgtcctttcaattaggataacatcactgtccgaaaact

SEQ ID NO: 506204 - DNA, 55 bp, Artificial
  Synthetic oligonucleotide
acccgacgtactatgggatttgttccgatttaaggaccattacggagcttgccca

SEQ ID NO: 506205 - DNA, 55 bp, Artificial
  Synthetic oligonucleotide
acccgtggaatagatcctttatcccgggtgccaatgagtaacagctcccaagggt

SEQ ID NO: 506206 - DNA, 55 bp, Artificial
  Synthetic oligonucleotide
acggtgatttcgtgtatattacctagacgaagaaacaccctggtattaaccaggg

SEQ ID NO: 506207 - DNA, 55 bp, Artificial
  Synthetic oligonucleotide
tttaacagtgcaaagctacatggaggtacttgtggagcgtaatctggagcctcga

SEQ ID NO: 506208 - DNA, 55 bp, Artificial
  Synthetic oligonucleotide
acttaccatttgcggcaattgccctcatagctgttagtatttatcccttgcttac

SEQ ID NO: 506209 - DNA, 55 bp, Artificial
  Synthetic oligonucleotide
agaacccagaatttgagcttctccgctttctaagcgcacatctcctaaacaagcc

SEQ ID NO: 506210 - DNA, 55 bp, Artificial
  Synthetic oligonucleotide
agacattgccaatctataattacagcccgtcggggaaattgtctttatatgcccc

SEQ ID NO: 506211 - DNA, 55 bp, Artificial
  Synthetic oligonucleotide
agacccctctttaatcttccttcgacagcaatataaacctgacacaaacgactac

SEQ ID NO: 506212 - DNA, 55 bp, Artificial
  Synthetic oligonucleotide
agcatctacacaagtcatagtgggtactagggaatatagcagaccagctaacgcg

SEQ ID NO: 506213 - DNA, 55 bp, Artificial
  Synthetic oligonucleotide
agcgggacaagttaagaatttgtccagacgttcttttcttaagtttgtcggagga

SEQ ID NO: 506214 - DNA, 55 bp, Artificial
  Synthetic oligonucleotide
aggcaagaccctgcgctagtttcggatgagcgcacccgcctaaaggccctgatgg

SEQ ID NO: 506215 - DNA, 55 bp, Artificial
  Synthetic oligonucleotide
tttaaaggtccctgaaattacgagagttgttgaacccactcacttgagcttacct

SEQ ID NO: 506216 - DNA, 55 bp, Artificial
  Synthetic oligonucleotide
agtcaaaccactctttccactcagcataaaaggccccatctggttcacgggtttt

SEQ ID NO: 506217 - DNA, 55 bp, Artificial
  Synthetic oligonucleotide
agtccgcaataccttccagcacagccactcgacttgcaccggcacacgcctcctc

SEQ ID NO: 506218 - DNA, 55 bp, Artificial
  Synthetic oligonucleotide
atcgaatgacccgtttcacgcagaatataactgggaaaattaaacgtcatagccg

SEQ ID NO: 506219 - DNA, 55 bp, Artificial
  Synthetic oligonucleotide
caacccgatatctttcgatccctagtcagcctacctctctatcgaattttagtgg

SEQ ID NO: 506220 - DNA, 55 bp, Artificial
  Synthetic oligonucleotide
cgaacgcccgttgtgccttgtccccgagtatacctcttgcatccaggaaccaccc

SEQ ID NO: 506221 - DNA, 55 bp, Artificial
  Synthetic oligonucleotide
cgaatttctctttggtaaaactccggattagctcaatctgctgttctttgctgag

SEQ ID NO: 506222 - DNA, 55 bp, Artificial
  Synthetic oligonucleotide
cgcctcgattaattcccggggaaaattattaaaacgtatcggtccattttcggag

SEQ ID NO: 506223 - DNA, 55 bp, Artificial
  Synthetic oligonucleotide
cgcttctcatagttgtcaaacttttgcagtttgaaagtctctgaacgtagctgac

SEQ ID NO: 506224 - DNA, 55 bp, Artificial
  Synthetic oligonucleotide
cggaagtagccttgacagaaggttaggtcctccggactcatagcaagccctgccc

SEQ ID NO: 506225 - DNA, 55 bp, Artificial
  Synthetic oligonucleotide
cggagaccgcaagttgaagcagataagaagttaccttgggaggtggattaacttg

SEQ ID NO: 506226 - DNA, 55 bp, Artificial
  Synthetic oligonucleotide
cgggaagatggagtcgaataacctctcgcatcaaacgcttagcccgattacggac

SEQ ID NO: 506227 - DNA, 55 bp, Artificial
  Synthetic oligonucleotide
cgggagagaacaaccggttaagggagtccagtatcaatgacctttaccgctcaat

SEQ ID NO: 506228 - DNA, 55 bp, Artificial
  Synthetic oligonucleotide
cggtggacgtctgactattagcagccgccccatttggcatgtccggaaaggttag

SEQ ID NO: 506229 - DNA, 55 bp, Artificial
  Synthetic oligonucleotide
cggttaggctacaactatcgaatgaatgatattagttgcgcacttggtattgcac

SEQ ID NO: 506230 - DNA, 55 bp, Artificial
  Synthetic oligonucleotide
cgtaaccgtacgttcgcggaaacctaaagaagaggtcagttcgtgggcacaaaca

SEQ ID NO: 506231 - DNA, 55 bp, Artificial
  Synthetic oligonucleotide
cgtgccaggcgcggcataagttaacgctgttaacccaagttcctgcaacctagcc

SEQ ID NO: 506232 - DNA, 55 bp, Artificial
  Synthetic oligonucleotide
cgttccgacccggcctttgacgctttgctaactgcctataccagggcgcacaacc

SEQ ID NO: 506233 - DNA, 55 bp, Artificial
  Synthetic oligonucleotide
cgtttggcgtactatccagaatcctgtccaattccgcagggatcataccctcctc

SEQ ID NO: 506234 - DNA, 55 bp, Artificial
  Synthetic oligonucleotide
tggccctcccgaatcaactcttcatttggaatctgtaccaacctcaactgatcga

SEQ ID NO: 506235 - DNA, 55 bp, Artificial
  Synthetic oligonucleotide
ctacacagcatctggaaatacaagaacgactaatgaatggcgaaattgacctctg

SEQ ID NO: 506236 - DNA, 55 bp, Artificial
  Synthetic oligonucleotide
ctaccttcagtgccggttatgaggatttagccatgggtatttccatagcggtcgc

SEQ ID NO: 506237 - DNA, 55 bp, Artificial
  Synthetic oligonucleotide
cccgcctcgttccatgactaatacgctgtcagcaacgttgagagctgatttagta

SEQ ID NO: 506238 - DNA, 55 bp, Artificial
  Synthetic oligonucleotide
ccctatgctggagctactacaggggcaccaacagggaccgtggatgcaattgtac

SEQ ID NO: 506239 - DNA, 55 bp, Artificial
  Synthetic oligonucleotide
ccctccctgaagcaattgttcaatgccaatcccggaaagctgctgacctgaacta

SEQ ID NO: 506240 - DNA, 55 bp, Artificial
  Synthetic oligonucleotide
ccgcattgctgctccttcgacggatgatctcaaatcgctttggggtgcgctatca

SEQ ID NO: 506241 - DNA, 55 bp, Artificial
  Synthetic oligonucleotide
ccggatgatttcctgagcactaccttcgaggttcgtacaaacggcataaaatccg

SEQ ID NO: 506242 - DNA, 55 bp, Artificial
  Synthetic oligonucleotide
ccggcgacaggtattataatcacattccccgctattggtatggtacactcacagc

SEQ ID NO: 506243 - DNA, 55 bp, Artificial
  Synthetic oligonucleotide
ccggtactgttggcagtaaccattaagagcgggtctagattcagctgttgagcgg

SEQ ID NO: 506244 - DNA, 55 bp, Artificial
  Synthetic oligonucleotide
ccggtatttaatggaactcttatgcagattgaaggttctaacctccgacttgtgg

SEQ ID NO: 506245 - DNA, 55 bp, Artificial
  Synthetic oligonucleotide
cctactatgtgctcattcgcaagaatgtctataagattcgcttgtggcggcagct

SEQ ID NO: 506246 - DNA, 55 bp, Artificial
  Synthetic oligonucleotide
cctctacagtccctctttcgcgggctaagtccataaccgttgtttgggctttgct

SEQ ID NO: 506247 - DNA, 55 bp, Artificial
  Synthetic oligonucleotide
cctgattcaatggcgggttttagtattcgccggagtaatttggccatgctggacc

SEQ ID NO: 506248 - DNA, 55 bp, Artificial
  Synthetic oligonucleotide
cctgcaaagaagtgtgtataatccgccgttcatgagggttcatcggttctaacac

SEQ ID NO: 506249 - DNA, 55 bp, Artificial
  Synthetic oligonucleotide
cctgggcgggacttatccgattaccgggacaatatcggtgaataaagcaggagta

SEQ ID NO: 506250 - DNA, 55 bp, Artificial
  Synthetic oligonucleotide
cctggtttacccgccgccatatctcgtgttaactgggccaaggttccttgaggaa

SEQ ID NO: 506251 - DNA, 55 bp, Artificial
  Synthetic oligonucleotide
ccttaactgttcctctgccggttttatatgccgagcgtataccatcccgtcccat

SEQ ID NO: 506252 - DNA, 55 bp, Artificial
  Synthetic oligonucleotide
ccttttccatcggctccaacgcttttgattgcgtgtttccgtccgtttccatgcc

SEQ ID NO: 506253 - DNA, 54 bp, Artificial
  Synthetic oligonucleotide
gaatcgcgattttgcaatgcttcgtcttgaacagttgccaatagcaatctttgg

SEQ ID NO: 506254 - DNA, 54 bp, Artificial
  Synthetic oligonucleotide
ggggagccccatatcctgaagcgtagtaacctccttgattttgtccataggcag

SEQ ID NO: 506255 - DNA, 54 bp, Artificial
  Synthetic oligonucleotide
ctggatttgcagcaagccgtggaattaggggaacttgttcccatcaggtgtatc

SEQ ID NO: 506256 - DNA, 53 bp, Artificial
  Synthetic oligonucleotide
tgtattccaaagtaccacagggctccggacagctacatcaatataaccgtagc

SEQ ID NO: 506257 - DNA, 53 bp, Artificial
  Synthetic oligonucleotide
ttttctccgctgagcacttttatctccgggatatcacaatagtccatttctat

SEQ ID NO: 506258 - DNA, 53 bp, Artificial
  Synthetic oligonucleotide
gttagttcagcctttacgtttctgcgttggttcagctttcacgcaatgcccac

SEQ ID NO: 506259 - DNA, 53 bp, Artificial
  Synthetic oligonucleotide
ggtggggccattatccctcagccacgcatcattatgctcaatcggaaggaatc

SEQ ID NO: 506260 - DNA, 53 bp, Artificial
  Synthetic oligonucleotide
ccaggcttctgcgttactgttatcggtacagcctgtggcccggacacgaatcg

SEQ ID NO: 506261 - DNA, 53 bp, Artificial
  Synthetic oligonucleotide
aagaggaacgaggatcaccagttcattttggcggaggatgagtgccgggtttt

SEQ ID NO: 506262 - DNA, 52 bp, Artificial
  Synthetic oligonucleotide
tagccatttcggcttacctccacatacacaagtaaaggtgattggcgagtgt

SEQ ID NO: 506263 - DNA, 52 bp, Artificial
  Synthetic oligonucleotide
gcggcttattcagatcggcgcgatcatagaaagtcatttgcctgttaaaagt

SEQ ID NO: 506264 - DNA, 52 bp, Artificial
  Synthetic oligonucleotide
gacctagttattgcacataaccgaaatcaatcatgatccagacttcagcgga

SEQ ID NO: 506265 - DNA, 52 bp, Artificial
  Synthetic oligonucleotide
ctacaacggcatactgtcttttaatctcacctgtttctaaatcgaactcagt

SEQ ID NO: 506266 - DNA, 52 bp, Artificial
  Synthetic oligonucleotide
actacgagggcatgagtagtgcaatcatagcagtccacgaaaacgagcacta

SEQ ID NO: 506267 - DNA, 51 bp, Artificial
  Synthetic oligonucleotide
gtttggtagcgtcataggcgtcccaaccggtagcccacacaatggcaccca

SEQ ID NO: 506268 - DNA, 51 bp, Artificial
  Synthetic oligonucleotide
gtatactgcattatcttgatcgtacgattttaaatctgcgttgatctccag

SEQ ID NO: 506269 - DNA, 51 bp, Artificial
  Synthetic oligonucleotide
gcacctggccttgctatgcgtacgcggatctttagtaccgaaccggcgaag

SEQ ID NO: 506270 - DNA, 50 bp, Artificial
  Synthetic oligonucleotide
tatctaccggaagaggacaggtgggctaatgttgacgctactttcggaac

SEQ ID NO: 506271 - DNA, 50 bp, Artificial
  Synthetic oligonucleotide
ctttaagcacgatttatccgagttatcgtttcaacgtgggtggtctgctg

SEQ ID NO: 506272 - DNA, 50 bp, Artificial
  Synthetic oligonucleotide
agggtgccggatttcacagacaactctcttaccgaaaatacacgtgcggg

SEQ ID NO: 506273 - DNA, 50 bp, Artificial
  Synthetic oligonucleotide
aagcaatctgataagaaccccttagctgcactccaacctctccgcatagc

SEQ ID NO: 506274 - DNA, 60 bp, Artificial
  Synthetic oligonucleotide
acggagcatctgttccttcgctcctgccgctcgcgtctgcgtggatcccgatgaatctcg

SEQ ID NO: 506275 - DNA, 60 bp, Artificial
  Synthetic oligonucleotide
ttccagaaaaggagcgttgacattcggctcagcgtgctagtctcaggctgtattggacct

SEQ ID NO: 506276 - DNA, 60 bp, Artificial
  Synthetic oligonucleotide
tccgtcttcccggcacccgtagcggtggaggatcacgcttgagctttttctgtcgaggcc

SEQ ID NO: 506277 - DNA, 60 bp, Artificial
  Synthetic oligonucleotide
ctgttcaaacgtccaggccgttacacgcagcacacaaacccttttgtggcaacactttac

SEQ ID NO: 506278 - DNA, 60 bp, Artificial
  Synthetic oligonucleotide
cttggcacgagcactcggcacacggagtgtgctttggccgctgcgcagcagagacatgcc

SEQ ID NO: 506279 - DNA, 59 bp, Artificial
  Synthetic oligonucleotide
cctctttcgatccggttccgggagcccctctcgatccacaacctccgcggcctgcggaa

SEQ ID NO: 506280 - DNA, 55 bp, Artificial
  Synthetic oligonucleotide
ttctcaagagcgacggcccacaagggtcgaagggcacgaactgcgcgtgacggca

SEQ ID NO: 506281 - DNA, 55 bp, Artificial
  Synthetic oligonucleotide
ttcggagagcgacgggaaccagcccctgaaggcgcggacggacccgggcagcttg

SEQ ID NO: 506282 - DNA, 55 bp, Artificial
  Synthetic oligonucleotide
ttccccacccgcgatgcgactggcccctcggggttaaagaaccggcgttcggtga

SEQ ID NO: 506283 - DNA, 55 bp, Artificial
  Synthetic oligonucleotide
tagatctccgtgaggaacgcgtaggcccggtcggccatcaccacgactttgtcgc

SEQ ID NO: 506284 - DNA, 55 bp, Artificial
  Synthetic oligonucleotide
gtggctgatgacagtggaagcgttcaccggacccgaaaggtcctgaggtgcgtga

SEQ ID NO: 506285 - DNA, 55 bp, Artificial
  Synthetic oligonucleotide
ggttgttgcaactacatttgtcgcaaccattccttgaccgacccgagacgctccc

SEQ ID NO: 506286 - DNA, 55 bp, Artificial
  Synthetic oligonucleotide
gctacgaaagtaacatcaatttgcaactcacccgtgttctggcatagccgcctcg

SEQ ID NO: 506287 - DNA, 55 bp, Artificial
  Synthetic oligonucleotide
gcgggaccgccggagcttcgatgtcagctgtcgatgtcaaatgtcgacaaccgaa

SEQ ID NO: 506288 - DNA, 55 bp, Artificial
  Synthetic oligonucleotide
gatttccttcgttggtatgacgcccgcgtctcgggatgagttggcgatcctccga

SEQ ID NO: 506289 - DNA, 55 bp, Artificial
  Synthetic oligonucleotide
cgggcatcacaaagacctcaagaggcgcggatgaaggtcaggggccgacactgtt

SEQ ID NO: 506290 - DNA, 55 bp, Artificial
  Synthetic oligonucleotide
cggacccttgagtggactgggtttacagtcaattcaagccacgaggcgggtatag

SEQ ID NO: 506291 - DNA, 55 bp, Artificial
  Synthetic oligonucleotide
cccttccgggttccaccactccacccgcaacctcaaggaacaaccatgtccaaga

SEQ ID NO: 506292 - DNA, 55 bp, Artificial
  Synthetic oligonucleotide
caacgactcccttggctgaccgagccgttactggactgttcaaacgtccaggccg

SEQ ID NO: 506293 - DNA, 55 bp, Artificial
  Synthetic oligonucleotide
agcccgaaggccgtcggctgatgaagttcgacccttcggagttgaacgagccggt

SEQ ID NO: 506294 - DNA, 55 bp, Artificial
  Synthetic oligonucleotide
accgaggactttcatcggatcagctggccgagcgtccaagacacggtcctcccca

SEQ ID NO: 506295 - DNA, 55 bp, Artificial
  Synthetic oligonucleotide
acccaagggttccgcggggacccagttgagcgaccgcgagccaacgatgaggcaa

SEQ ID NO: 506296 - DNA, 53 bp, Artificial
  Synthetic oligonucleotide
agtacgaggctgaagattcttacctcgcgagctttccgcttggctctcgctgc

SEQ ID NO: 506297 - DNA, 52 bp, Artificial
  Synthetic oligonucleotide
gatgctcaagggaccgccggtttacaacgcggggcgtcaatgtgcgtgcgct

SEQ ID NO: 506298 - DNA, 52 bp, Artificial
  Synthetic oligonucleotide
aagctcaggagcctcccgactcgacctcgataaggggacggtggaacgcgaa

SEQ ID NO: 506299 - DNA, 51 bp, Artificial
  Synthetic oligonucleotide
cttgagccctcggcctccgacgcatcttccgatcacgggcgatgcccgggg

SEQ ID NO: 506300 - DNA, 51 bp, Artificial
  Synthetic oligonucleotide
gcttggatgtctcagagacgtctctttgccaaggccatttgattccgaagt

SEQ ID NO: 506301 - DNA, 51 bp, Artificial
  Synthetic oligonucleotide
ggggatgcccgatcgagcttatcggacagaccgatcgccggcgcatgaaaa

SEQ ID NO: 506302 - DNA, 51 bp, Artificial
  Synthetic oligonucleotide
ggggcgcacgtgtggggtgcttcatgtgtcgccgttcgtctgacccctgat

SEQ ID NO: 506303 - DNA, 51 bp, Artificial
  Synthetic oligonucleotide
gggtgctgattatcggcaacccgtcgccccgccgagccgaaaagggccggt

SEQ ID NO: 506304 - DNA, 51 bp, Artificial
  Synthetic oligonucleotide
ggttctgatggacgtagttcaccttctcacgaagatcgtcgtctccccgga

SEQ ID NO: 506305 - DNA, 55 bp, Artificial
  Synthetic oligonucleotide
ggagcgggatcaatcaggcgatcgtgagcctaagccagggtatcgacggattggg

SEQ ID NO: 506306 - DNA, 55 bp, Artificial
  Synthetic oligonucleotide
ggaaagccgttgatttctgctggagaggcattcatcggcgttgaattgcgtggcg

SEQ ID NO: 506307 - DNA, 55 bp, Artificial
  Synthetic oligonucleotide
gcttcagctcgctgttttcggtagggcgcacactggccttgagcatgccgctcag

SEQ ID NO: 506308 - DNA, 55 bp, Artificial
  Synthetic oligonucleotide
gcgacaagttacgtttcatttcctgtccttccagagtgtcccggcgcccaccagg

SEQ ID NO: 506309 - DNA, 55 bp, Artificial
  Synthetic oligonucleotide
gcgaacaggcgcaccgaatgactcaccggccgggatatgtaggagacgacctcga

SEQ ID NO: 506310 - DNA, 55 bp, Artificial
  Synthetic oligonucleotide
gccggggttgaatggctaggttaggctgaatgtcgatcttgaaggagcatccatg

SEQ ID NO: 506311 - DNA, 55 bp, Artificial
  Synthetic oligonucleotide
gccgcaccaatatgccgattgacagacgtggttaatttcggggaagggtgctcca

SEQ ID NO: 506312 - DNA, 55 bp, Artificial
  Synthetic oligonucleotide
gcccagagatcaggcaggttcatcgctagggcacttccgcccgtgagaaatgtca

SEQ ID NO: 506313 - DNA, 55 bp, Artificial
  Synthetic oligonucleotide
gcatctcgtgcgtgtgaaccgataagcctcatccacggcatatcagccctgcacg

SEQ ID NO: 506314 - DNA, 55 bp, Artificial
  Synthetic oligonucleotide
gcaggggtatgggatgcaatgcaactgtgccgcttaactagttgattcaatgcgc

SEQ ID NO: 506315 - DNA, 55 bp, Artificial
  Synthetic oligonucleotide
gcaaccgccattcaaccagcattcgccttcctattgagatcaaagagtgggccga

SEQ ID NO: 506316 - DNA, 55 bp, Artificial
  Synthetic oligonucleotide
gataacctatcgacccgcggcaaacttcaacggaacagatacaatcgtttatacg

SEQ ID NO: 506317 - DNA, 55 bp, Artificial
  Synthetic oligonucleotide
gacgctcgctgccaaacgttaccgaatagcgggaaaccgatagattccactcgcc

SEQ ID NO: 506318 - DNA, 55 bp, Artificial
  Synthetic oligonucleotide
gacctctcgcgtgtcttcaatggtgaggatcctttcatccgaaggtacctcgtgc

SEQ ID NO: 506319 - DNA, 55 bp, Artificial
  Synthetic oligonucleotide
gacatgtccgatctcgcgcaccttgttccatgccgcatcgcccatggcggtcact

SEQ ID NO: 506320 - DNA, 55 bp, Artificial
  Synthetic oligonucleotide
gaaacgtgcgttcttcacaaggcagaccactaggcttacctaagccacagtgaga

SEQ ID NO: 506321 - DNA, 55 bp, Artificial
  Synthetic oligonucleotide
ctgggtcatagctgtagttttccttgggcattactggcctatcactctgacaggg

SEQ ID NO: 506322 - DNA, 55 bp, Artificial
  Synthetic oligonucleotide
ctctgatcgaacgctttcgtgtaaagttgagtgcgcgttgaagcttctactttgc

SEQ ID NO: 506323 - DNA, 55 bp, Artificial
  Synthetic oligonucleotide
ctcgccgcttatggataccgaggcggaaatcagttgctgaaagagtcgaccatca

SEQ ID NO: 506324 - DNA, 55 bp, Artificial
  Synthetic oligonucleotide
ctcacttgcgttgaacggtgacttctcatgacggcaacagagctgaaacctccga

SEQ ID NO: 506325 - DNA, 55 bp, Artificial
  Synthetic oligonucleotide
ctagccgatcgcagacggaggagaagagcaaatgtccgaggacgccggaccgaga

SEQ ID NO: 506326 - DNA, 55 bp, Artificial
  Synthetic oligonucleotide
cgtgcttaaccgtcgcgtggcactgctcatccaaagggctgtaacagccaaccaa

SEQ ID NO: 506327 - DNA, 55 bp, Artificial
  Synthetic oligonucleotide
cggtctctcactatgaggcgatgctcgcccattacggcgaaacgaccggcattcg

SEQ ID NO: 506328 - DNA, 55 bp, Artificial
  Synthetic oligonucleotide
ttttatccttgaggccggtatcacctttacgcagaccaacaccaacgcccggccc

SEQ ID NO: 506329 - DNA, 55 bp, Artificial
  Synthetic oligonucleotide
tttgttgccgcatcgggaatttggccgcttactcaaggaacctcttcatgaccca

SEQ ID NO: 506330 - DNA, 55 bp, Artificial
  Synthetic oligonucleotide
ttgtgcgcatggctggcgggcgttactcaggccctgtcacgggtaagccgaaaca

SEQ ID NO: 506331 - DNA, 55 bp, Artificial
  Synthetic oligonucleotide
ttgacgtgttcaaggttatcgctcgggcccttgccaaacccggacgcaatgacga

SEQ ID NO: 506332 - DNA, 55 bp, Artificial
  Synthetic oligonucleotide
tggatggccggtttctttgagagccttgcgaggttccttggcgccatgacaggac

SEQ ID NO: 506333 - DNA, 55 bp, Artificial
  Synthetic oligonucleotide
tggaacgatcaccggccccgaacaggacagcgcttcgagatggtcacgctcgaca

SEQ ID NO: 506334 - DNA, 55 bp, Artificial
  Synthetic oligonucleotide
tgcactgcaccaagagtgcctaatgacggctatgaagacctcggcgcatcagtag

SEQ ID NO: 506335 - DNA, 55 bp, Artificial
  Synthetic oligonucleotide
taactcgcgccctccgacaggcttcccgtgacttccacggtctccaagccgatct

SEQ ID NO: 506336 - DNA, 55 bp, Artificial
  Synthetic oligonucleotide
gttgtgttgtcatgaagtttccaaatcgaaggcagtgacgctccgaaacggtcag

SEQ ID NO: 506337 - DNA, 55 bp, Artificial
  Synthetic oligonucleotide
gtgacaggcgcgatttgtgcgtcaggtcgcccgttcgatgcggataacttgcggc

SEQ ID NO: 506338 - DNA, 55 bp, Artificial
  Synthetic oligonucleotide
gtcggccagagcaacatcgacggtacacccctgccatgcgtcgaacatccccggt

SEQ ID NO: 506339 - DNA, 55 bp, Artificial
  Synthetic oligonucleotide
gtcctgccggccatctgcaaccagttttgagttttcgcgttacgagcctctatga

SEQ ID NO: 506340 - DNA, 55 bp, Artificial
  Synthetic oligonucleotide
gtattggcgatgtgaacgacatcgttctgaccaaggacaaccaggcgcagtcgct

SEQ ID NO: 506341 - DNA, 55 bp, Artificial
  Synthetic oligonucleotide
gtaaggatcgccgggagtataaagcgtttggccgccttcggattcgcatcaagcg

SEQ ID NO: 506342 - DNA, 55 bp, Artificial
  Synthetic oligonucleotide
ggtgaaaggatcgcagtcccgtgagcgctaccgattcgaccgaacatacaaggcg

SEQ ID NO: 506343 - DNA, 55 bp, Artificial
  Synthetic oligonucleotide
ggggttgtcagattggctttgaacaggatgaattcgccacccttgttatattgca

SEQ ID NO: 506344 - DNA, 55 bp, Artificial
  Synthetic oligonucleotide
ggggagccgggtagcgacatcatgtgggcgtataaaacaccatacgacgaagctc

SEQ ID NO: 506345 - DNA, 55 bp, Artificial
  Synthetic oligonucleotide
gggcctcaacgaggacgacctctcatcaatgcgcgctgacttctccaatatccgc

SEQ ID NO: 506346 - DNA, 55 bp, Artificial
  Synthetic oligonucleotide
gggagttttgcccgcctgttcaaagatgggctgggttgtgccaatgcactttatt

SEQ ID NO: 506347 - DNA, 55 bp, Artificial
  Synthetic oligonucleotide
ggcgcggaatgagccaaagcgacagaagtgcgggcacacagcttaccgaaagccg

SEQ ID NO: 506348 - DNA, 55 bp, Artificial
  Synthetic oligonucleotide
ggcgagcgcggacagattgtctgaactgagagggacggttctggctcatcgtagc

SEQ ID NO: 506349 - DNA, 55 bp, Artificial
  Synthetic oligonucleotide
ggcagttatcctcgaaatcagcaaccctatgaggatttcttcagccggggccgca

SEQ ID NO: 506350 - DNA, 55 bp, Artificial
  Synthetic oligonucleotide
ggcaggcccgaataacggttgaccatatccgtcatttgcaaagcgacaagagggc

SEQ ID NO: 506351 - DNA, 55 bp, Artificial
  Synthetic oligonucleotide
cctgtgtcggagaaatgggttaagggttcagggattgcacgggagaggttgcgtg

SEQ ID NO: 506352 - DNA, 55 bp, Artificial
  Synthetic oligonucleotide
cctatgtgaaaggtgaccgcatggatgacgacaacgtaaggaccatccgtgggac

SEQ ID NO: 506353 - DNA, 55 bp, Artificial
  Synthetic oligonucleotide
ccgccgtcctgatctggttgcaggccagcgagtcgaacactgtagacccggctta

SEQ ID NO: 506354 - DNA, 55 bp, Artificial
  Synthetic oligonucleotide
ccgccgaacgcgatggggcttcaggtttcaagaacccaaactcacctactggcca

SEQ ID NO: 506355 - DNA, 55 bp, Artificial
  Synthetic oligonucleotide
ccgcagactgatgctctgacctcgcgggaatacgctggtgttagaataactgggc

SEQ ID NO: 506356 - DNA, 55 bp, Artificial
  Synthetic oligonucleotide
ccgaaattgcggcttctccgagtgaagagagccttctttcgctgcttgcgccgaa

SEQ ID NO: 506357 - DNA, 55 bp, Artificial
  Synthetic oligonucleotide
ccccgccacgataacggcagctacccgcaatttggtgtcgtcagtcttcgcaggc

SEQ ID NO: 506358 - DNA, 55 bp, Artificial
  Synthetic oligonucleotide
ccaaggtcaacggttacgaacgcagttcagcgactggaaaccagactgggagttg

SEQ ID NO: 506359 - DNA, 55 bp, Artificial
  Synthetic oligonucleotide
cattgcctttcggctgggaaccggtcgattcggggaagaactcactcatggcgcg

SEQ ID NO: 506360 - DNA, 55 bp, Artificial
  Synthetic oligonucleotide
cacggagaggggtttatcccgtcagtcctaccgactaaaggagctagataatgcc

SEQ ID NO: 506361 - DNA, 55 bp, Artificial
  Synthetic oligonucleotide
caatgaccgtgtctcacttgccctggcagctcatcagtcaggagttatcggaaac

SEQ ID NO: 506362 - DNA, 55 bp, Artificial
  Synthetic oligonucleotide
caatagcacaaaacgccggggcgtcccatttcggtcggaattgcccgcaaatgtc

SEQ ID NO: 506363 - DNA, 55 bp, Artificial
  Synthetic oligonucleotide
caagctggacctcgcagagtatttcgaggcggtaggaccctggctgatcgagcac

SEQ ID NO: 506364 - DNA, 55 bp, Artificial
  Synthetic oligonucleotide
caactgaaagccggattccactttccggtcggctgttcaaggaccggcggcatgg

SEQ ID NO: 506365 - DNA, 55 bp, Artificial
  Synthetic oligonucleotide
atagcgatagcgagcactcacgcaacagcctgcggcaaaccctcagcgtcctgcg

SEQ ID NO: 506366 - DNA, 55 bp, Artificial
  Synthetic oligonucleotide
agactcatcgttctctcctctggtaagacaaaacgcggatgaccgtgcctgaccg

SEQ ID NO: 506367 - DNA, 55 bp, Artificial
  Synthetic oligonucleotide
acgatcaccgttaaccggttgtaccacggcggggaaacccttcaaattccggcat

SEQ ID NO: 506368 - DNA, 55 bp, Artificial
  Synthetic oligonucleotide
acgacttctgccagaaacattatgttaggtccggcgattgcgaactgcgccgctc

SEQ ID NO: 506369 - DNA, 55 bp, Artificial
  Synthetic oligonucleotide
aagccgtcaatgtgcggtcgcaggcccgctctgcctttgatgcctaccgctcgac

SEQ ID NO: 506370 - DNA, 55 bp, Artificial
  Synthetic oligonucleotide
aaaaccgttggcttccgtcagaggcccctcaccaaatacgaccggcagccaagca

SEQ ID NO: 506371 - DNA, 55 bp, Artificial
  Synthetic oligonucleotide
cgcgaggtcagatcgatcaactcatccgccgagaaatacggtcccggattgggtt

SEQ ID NO: 506372 - DNA, 55 bp, Artificial
  Synthetic oligonucleotide
cgcgtgaaaactcaatgtcgtagaacttgccgggtcgcagatcttccccggttgc

SEQ ID NO: 506373 - DNA, 55 bp, Artificial
  Synthetic oligonucleotide
cgccatcctttatggtctgcgcccgctcaatcgcgtgcaacaggccctctcggat

SEQ ID NO: 506374 - DNA, 55 bp, Artificial
  Synthetic oligonucleotide
cgcatggtcatcctgatgtcggaaacctgtcccggtcttgaagtcgatttacggc

SEQ ID NO: 506375 - DNA, 55 bp, Artificial
  Synthetic oligonucleotide
cgatgctgtttgaaccgttgcggttgtcgcgccctgcgaatcttcggccgacccg

SEQ ID NO: 506376 - DNA, 55 bp, Artificial
  Synthetic oligonucleotide
cgagcttcggacatggggtagcctgtgtatcggttgccgggctttcgttgccatg

SEQ ID NO: 506377 - DNA, 55 bp, Artificial
  Synthetic oligonucleotide
cgctaaccaactgtaaggtcagcaaaatttaaccgactttctaagcctgacggta

SEQ ID NO: 506378 - DNA, 55 bp, Artificial
  Synthetic oligonucleotide
cgagatcagcatggtcttggtgaaatttgcttccgacgtgtcgacataacggcca

SEQ ID NO: 506379 - DNA, 55 bp, Artificial
  Synthetic oligonucleotide
cgctatatggcgcctcaaaggactaggaatggcacgcatctatcagacacgggcc

SEQ ID NO: 506380 - DNA, 55 bp, Artificial
  Synthetic oligonucleotide
cgagatattgaaagggtgccagcaacgaagcaggagcaagccgcgatgcttgtgt

SEQ ID NO: 506381 - DNA, 55 bp, Artificial
  Synthetic oligonucleotide
cgagaccgttccgccaagcatcttgagtgggttgatatcgggatcggtgcttacg

SEQ ID NO: 506382 - DNA, 55 bp, Artificial
  Synthetic oligonucleotide
cgggcttcggttcgggacggacagacgcgctcattgaatggtcctgtgttgggag

SEQ ID NO: 506383 - DNA, 55 bp, Artificial
  Synthetic oligonucleotide
cggtccaattacggcgcttctttgcagaagcctcttcgctgtcgcgcttttgcgg

SEQ ID NO: 506384 - DNA, 55 bp, Artificial
  Synthetic oligonucleotide
cgacgcttccgcactcgacggcgtgactgtgtcatcggacaatctgatgagcgac

SEQ ID NO: 506385 - DNA, 55 bp, Artificial
  Synthetic oligonucleotide
cctttggcgtactgggctctttcagacccgtggagcagcccatcagaacgaccgg

SEQ ID NO: 506386 - DNA, 55 bp, Artificial
  Synthetic oligonucleotide
ccttgtctgccgtagttggtatcaggccatacgccctttcggggaagcccgctcc

SEQ ID NO: 506387 - DNA, 55 bp, Artificial
  Synthetic oligonucleotide
ccttctgcttccgggctttgtcggtctgaatatccattgcggcctatttccgttc

SEQ ID NO: 506388 - DNA, 54 bp, Artificial
  Synthetic oligonucleotide
tggcaagcaagcagccggaggagtttcttaggcgtgtctgaacaaggccgaaaa

SEQ ID NO: 506389 - DNA, 54 bp, Artificial
  Synthetic oligonucleotide
ttttcggcatattccgaagacttcggccacagctgggacttccgggatcgcggt

SEQ ID NO: 506390 - DNA, 54 bp, Artificial
  Synthetic oligonucleotide
tcgtccggtcaaagacatctctcagtcattagaggacgtgctggtctaagaggc

SEQ ID NO: 506391 - DNA, 54 bp, Artificial
  Synthetic oligonucleotide
acgtgagtatatggcgcgcctgcaagggaatgctgtaccgacagattcattgct

SEQ ID NO: 506392 - DNA, 54 bp, Artificial
  Synthetic oligonucleotide
gctatgcccggcttgatgacatgctcagggtcggtatgcgggacggcgacattc

SEQ ID NO: 506393 - DNA, 54 bp, Artificial
  Synthetic oligonucleotide
gattgcagatcctgtgaacatggcgaagtccttgctcctgccggacgaaggtct

SEQ ID NO: 506394 - DNA, 54 bp, Artificial
  Synthetic oligonucleotide
gatgattggctcgttctgtgtggatttgcgagcgatcaactgaacaaccgtcag

SEQ ID NO: 506395 - DNA, 54 bp, Artificial
  Synthetic oligonucleotide
ccctattgaggctcgcgaactgaatctcttttctcttccaaaacactgtttgga

SEQ ID NO: 506396 - DNA, 54 bp, Artificial
  Synthetic oligonucleotide
gacgactggtcatcgggcgagaataggccgacaatcaccgcacggccagcttag

SEQ ID NO: 506397 - DNA, 54 bp, Artificial
  Synthetic oligonucleotide
cacctttccaccaatcacggcaaagggacgtgggcagaccccgcttcttaattt

SEQ ID NO: 506398 - DNA, 54 bp, Artificial
  Synthetic oligonucleotide
ggtcagcgatgacctgacgatcattatcactgacgacggtccggcaatagatct

SEQ ID NO: 506399 - DNA, 54 bp, Artificial
  Synthetic oligonucleotide
atcgaccgtatgaattggcaatcaccgaatatatctgctcgatcttcgaggatc

SEQ ID NO: 506400 - DNA, 54 bp, Artificial
  Synthetic oligonucleotide
atcaggtagttcttcaaaccgtcctcagcccacagttttattgcgcgttcacag

SEQ ID NO: 506401 - DNA, 52 bp, Artificial
  Synthetic oligonucleotide
tgctggaagtacgcaatcttacaacacggttcaatattcactccggcatgtt

SEQ ID NO: 506402 - DNA, 52 bp, Artificial
  Synthetic oligonucleotide
taggatcgtcgctgagcccctttcaagatcgatgtcacgccaacgaagggaa

SEQ ID NO: 506403 - DNA, 52 bp, Artificial
  Synthetic oligonucleotide
attcgtcccaaacctgacagggcccatgaccgtgttgaacgtcgcatccctg

SEQ ID NO: 506404 - DNA, 51 bp, Artificial
  Synthetic oligonucleotide
tgacattggggcgtgatcgcggataaaaggcggcagaaatgtggcggggaa

SEQ ID NO: 506405 - DNA, 51 bp, Artificial
  Synthetic oligonucleotide
acggcttggcgttactcgttcagcggtcagtcaggctttgcaaagacttga

SEQ ID NO: 506406 - DNA, 51 bp, Artificial
  Synthetic oligonucleotide
tggttggcacagccaaagcggtttacgacgcacgcattcttgaacctaatc

SEQ ID NO: 506407 - DNA, 51 bp, Artificial
  Synthetic oligonucleotide
aaccggcatctgaagcgagcgcctcgagccttttggcaaaggtctcccctt

SEQ ID NO: 506408 - DNA, 50 bp, Artificial
  Synthetic oligonucleotide
aacaggctgaactggagtgtgaaatcgctgacccgcgacatcagatagcc

SEQ ID NO: 506409 - DNA, 50 bp, Artificial
  Synthetic oligonucleotide
agcaacgttacgctatcgacaatccgtgcggttttgaaggctacggtgaa

SEQ ID NO: 506410 - DNA, 60 bp, Artificial
  Synthetic oligonucleotide
acctgaatggttatccaatgccttgatgtggatcctctggccattatttgcagtgctgat

SEQ ID NO: 506411 - DNA, 60 bp, Artificial
  Synthetic oligonucleotide
agtcgttttatagcaccctatcttcttgagcatcagttgatgctaatacaaatgatgcaa

SEQ ID NO: 506412 - DNA, 60 bp, Artificial
  Synthetic oligonucleotide
tgaaaggatcctcttctttgcgttacgggccttccactatcggcggtgtaatcaactacc

SEQ ID NO: 506413 - DNA, 60 bp, Artificial
  Synthetic oligonucleotide
gcctgcaatacaagtcgtgggttctgaagccggtaacatttcacgtcaaaccggcgcagt

SEQ ID NO: 506414 - DNA, 58 bp, Artificial
  Synthetic oligonucleotide
agtgcggaagaatgcggactatagcggcgttttgttaccaacttttttatgatctgac

SEQ ID NO: 506415 - DNA, 57 bp, Artificial
  Synthetic oligonucleotide
ccggccaaaatatcaacaaagcaactctatttagctagtattttttagccaagtcaa

SEQ ID NO: 506416 - DNA, 55 bp, Artificial
  Synthetic oligonucleotide
ggtccctgccagtctcactatgacggcattattacgcggtccggatggggatgaa

SEQ ID NO: 506417 - DNA, 55 bp, Artificial
  Synthetic oligonucleotide
ggtatgaggctataccggttagcgggccattacgattaacattagcgccaggcac

SEQ ID NO: 506418 - DNA, 55 bp, Artificial
  Synthetic oligonucleotide
ggtaccgccggcaatcacttgaccttgagtcataccacccatcagcataatgcgt

SEQ ID NO: 506419 - DNA, 55 bp, Artificial
  Synthetic oligonucleotide
ggggacgtttaagaacccgtgccggtctgcattacgtggtcattaatctggtggg

SEQ ID NO: 506420 - DNA, 55 bp, Artificial
  Synthetic oligonucleotide
gggagatggaaagccgggcgatgtaaaacaatgctgggcagagttaccgaacatt

SEQ ID NO: 506421 - DNA, 55 bp, Artificial
  Synthetic oligonucleotide
ggcaagtacttggacgcaatctctgtaccagaagtacaaccagcttcaacactcc

SEQ ID NO: 506422 - DNA, 55 bp, Artificial
  Synthetic oligonucleotide
ggatattccaagtgatgctgcaggtggtatctggggtggtgaaatgccgtcttac

SEQ ID NO: 506423 - DNA, 55 bp, Artificial
  Synthetic oligonucleotide
gctgcgtacgttaccaaccgtttcgaaattacagaacgctttgctgtgacgccgg

SEQ ID NO: 506424 - DNA, 55 bp, Artificial
  Synthetic oligonucleotide
gcgtctggagtcattctggagcgcatttctgccgcccgctacgacaaagcccgca

SEQ ID NO: 506425 - DNA, 55 bp, Artificial
  Synthetic oligonucleotide
gcgtaggaccatctttgagtaaatgtttctggcaaagtgatgctgttctcagctg

SEQ ID NO: 506426 - DNA, 55 bp, Artificial
  Synthetic oligonucleotide
gcgctgcacactggtcgcccattagcaatgaatcacactccgtataatttcgtgc

SEQ ID NO: 506427 - DNA, 55 bp, Artificial
  Synthetic oligonucleotide
gcgactggcactgacttcgcagggcaaggtcaggtatcagctaaagacgccctac

SEQ ID NO: 506428 - DNA, 55 bp, Artificial
  Synthetic oligonucleotide
gcgaacgttcagtaaactatgaattaggggtacgaggtggcaccggacctatgac

SEQ ID NO: 506429 - DNA, 55 bp, Artificial
  Synthetic oligonucleotide
gccctgcacttctggtaaccgtgttttagctatgtccatttgttcttgaatcagc

SEQ ID NO: 506430 - DNA, 55 bp, Artificial
  Synthetic oligonucleotide
gccataactttcaacataacgcagtaccctaagcccctttatcttgcctgaacta

SEQ ID NO: 506431 - DNA, 55 bp, Artificial
  Synthetic oligonucleotide
gcatcatcatgtgaatagtcagcttcatttggagtaaccatgctgcgctctgttc

SEQ ID NO: 506432 - DNA, 55 bp, Artificial
  Synthetic oligonucleotide
gcaggcgcgcataaagcagatattaaggttctggttaatgggaggttagcacagg

SEQ ID NO: 506433 - DNA, 55 bp, Artificial
  Synthetic oligonucleotide
gcacttagctgtcctaatcaggctgaagtgaagacacaacgctttagcgccattc

SEQ ID NO: 506434 - DNA, 55 bp, Artificial
  Synthetic oligonucleotide
gcaactggctggaatttcccagcatgactcaaaacccctgaaatgatctatacgg

SEQ ID NO: 506435 - DNA, 55 bp, Artificial
  Synthetic oligonucleotide
gacggctgggaacatcctgagcactggcaagaatatcgcatttgccatcctgtaa

SEQ ID NO: 506436 - DNA, 55 bp, Artificial
  Synthetic oligonucleotide
gacacagattaaagtggcggatatccttgatacttccgtctgtaagttggcgcgc

SEQ ID NO: 506437 - DNA, 55 bp, Artificial
  Synthetic oligonucleotide
gacacacgcattttgttgccccataacggccaccgatgttaacactgtgtgtcgc

SEQ ID NO: 506438 - DNA, 55 bp, Artificial
  Synthetic oligonucleotide
ttgtgtccgacaaggcggaaagcacgcagtgtagccatcctagataagtaattga

SEQ ID NO: 506439 - DNA, 55 bp, Artificial
  Synthetic oligonucleotide
ttgctctaggcgcttgcgggctgcctccaggctcttcccgtgttcttccaggtca

SEQ ID NO: 506440 - DNA, 55 bp, Artificial
  Synthetic oligonucleotide
ttcatgggaatgccctcgataaatggaggagcgactatgacaggccgtgctggct

SEQ ID NO: 506441 - DNA, 55 bp, Artificial
  Synthetic oligonucleotide
ttagctgcatcacttggtaaatccggctatgaaactaaacaagagcttgatcaag

SEQ ID NO: 506442 - DNA, 55 bp, Artificial
  Synthetic oligonucleotide
ttaatgaaacgcgtcttcgttgtacaagaaataccacgattaatgagaccgactg

SEQ ID NO: 506443 - DNA, 55 bp, Artificial
  Synthetic oligonucleotide
tggctggcctcttcaatggtaatagggccaggtgcatgaaagcgatgaccgaatg

SEQ ID NO: 506444 - DNA, 55 bp, Artificial
  Synthetic oligonucleotide
tgctatttggcattgtgattggcaccagttcatcggtgtttatcgcagcacctat

SEQ ID NO: 506445 - DNA, 55 bp, Artificial
  Synthetic oligonucleotide
tgcaagtaacatatccattttggcatgggtttgatcacccgatgtcatatctagt

SEQ ID NO: 506446 - DNA, 55 bp, Artificial
  Synthetic oligonucleotide
tcaagccgctgaaacattgggttatctgccagcctcgcagaggtctgatgtgctc

SEQ ID NO: 506447 - DNA, 55 bp, Artificial
  Synthetic oligonucleotide
tatcacctcgaatatgaagtgaccggcatgcctaaaagcaccaacccttcgtgcg

SEQ ID NO: 506448 - DNA, 55 bp, Artificial
  Synthetic oligonucleotide
tagcctgtcccatccgacctgcagcaccgactaacaccaagcgttttctcatagg

SEQ ID NO: 506449 - DNA, 55 bp, Artificial
  Synthetic oligonucleotide
gttaaccgtctccagtatttggttggtgctatcgcactcagctaccagacctatg

SEQ ID NO: 506450 - DNA, 55 bp, Artificial
  Synthetic oligonucleotide
gtggtgattgctgctggagggtattggcattataaccgtttgcacccttcgacag

SEQ ID NO: 506451 - DNA, 55 bp, Artificial
  Synthetic oligonucleotide
gtgaggactctacaaggggttcaataacatgaatagctgataatttggcgtggtt

SEQ ID NO: 506452 - DNA, 55 bp, Artificial
  Synthetic oligonucleotide
gtcgtgacttttggtcgatgaccatgtcagtgctaatataaagcgaatggcatgc

SEQ ID NO: 506453 - DNA, 55 bp, Artificial
  Synthetic oligonucleotide
gtcgaatactgtccacgctacttttgccatttacggttggaaagggttgtttaaa

SEQ ID NO: 506454 - DNA, 55 bp, Artificial
  Synthetic oligonucleotide
gtcccttcagtaacattactgacagaataaagctgaagcgtcgcactacttgtca

SEQ ID NO: 506455 - DNA, 55 bp, Artificial
  Synthetic oligonucleotide
gtcattaagtgccagtcgagcgattcatgatgcgagcggaatgaccgatgttggt

SEQ ID NO: 506456 - DNA, 55 bp, Artificial
  Synthetic oligonucleotide
ggttgctcatggggctgttgcggacaccctagccactgttgacctggtgcaagcg

SEQ ID NO: 506457 - DNA, 55 bp, Artificial
  Synthetic oligonucleotide
ggttatggagctgagtacatgcttcgaatctgggttatcagtttgtgctcgcgac

SEQ ID NO: 506458 - DNA, 55 bp, Artificial
  Synthetic oligonucleotide
ggtggcgtttataacaaagttggagacttttataacatccgccaagcagatgccc

SEQ ID NO: 506459 - DNA, 55 bp, Artificial
  Synthetic oligonucleotide
ggtggcaacgtctggccggtaaatggcagattctgtaaagggcgctaagtgctcg

SEQ ID NO: 506460 - DNA, 55 bp, Artificial
  Synthetic oligonucleotide
ggtgcggtgacttttgcatataatgttgagggcgtcagcggtatgaaactaagcg

SEQ ID NO: 506461 - DNA, 55 bp, Artificial
  Synthetic oligonucleotide
ggtcgggtcgttttggtcttgtactaaattagcaatcgtgccgttatcaacatcg

SEQ ID NO: 506462 - DNA, 55 bp, Artificial
  Synthetic oligonucleotide
ccctgcttcaaataatgctgggcgttggatttacactgataacctgacgggtaac

SEQ ID NO: 506463 - DNA, 55 bp, Artificial
  Synthetic oligonucleotide
cccgtgaggcaactttagaagccggtggtcgtacagaatctggcgatagttttgc

SEQ ID NO: 506464 - DNA, 55 bp, Artificial
  Synthetic oligonucleotide
cccattaaatgatttcccaacggatagtcatgataatcaagtgccagagtccaac

SEQ ID NO: 506465 - DNA, 55 bp, Artificial
  Synthetic oligonucleotide
ccaccggttgccattctgtgattaaggcgctgatgtcatcccagtttacttggcc

SEQ ID NO: 506466 - DNA, 55 bp, Artificial
  Synthetic oligonucleotide
ccacactggcagccttgtattacatttggcccgccgacaaattagtgacagcgta

SEQ ID NO: 506467 - DNA, 55 bp, Artificial
  Synthetic oligonucleotide
ccaacacacagcagcaacgactaaagtcaccaccgacacaacgctaaggttttca

SEQ ID NO: 506468 - DNA, 55 bp, Artificial
  Synthetic oligonucleotide
caggtactttgaatcaaccgcatagcggggagctagtcgcagagccaagcaccag

SEQ ID NO: 506469 - DNA, 55 bp, Artificial
  Synthetic oligonucleotide
cagcatacccaaatatttatcctaactagctccactgccaaccatccggttatag

SEQ ID NO: 506470 - DNA, 55 bp, Artificial
  Synthetic oligonucleotide
cactgaggtaatgcctcccgcttgggcatagagcgcgttatgcatagggtgagtc

SEQ ID NO: 506471 - DNA, 55 bp, Artificial
  Synthetic oligonucleotide
cacctcgttgcctactctcaaccccatagaactaagcgttggagcattcacattg

SEQ ID NO: 506472 - DNA, 55 bp, Artificial
  Synthetic oligonucleotide
caccggtttacgccaaggtatttatgttggcccagaacgttctttcgaagttgga

SEQ ID NO: 506473 - DNA, 55 bp, Artificial
  Synthetic oligonucleotide
cacaaagtgatagctggtctgaattaggggatatgactggcaccagtctcgacga

SEQ ID NO: 506474 - DNA, 55 bp, Artificial
  Synthetic oligonucleotide
caagcggttttgagatcccacccttattaaactcacataccttcattccagcgca

SEQ ID NO: 506475 - DNA, 55 bp, Artificial
  Synthetic oligonucleotide
caacaggcggttacgtttgacaccttttatgctgaacttaacggccacattaatg

SEQ ID NO: 506476 - DNA, 55 bp, Artificial
  Synthetic oligonucleotide
attactcttagcgagcttattgcgcttgaccctcgtcatattgtgatctctcctg

SEQ ID NO: 506477 - DNA, 55 bp, Artificial
  Synthetic oligonucleotide
atcgtgtgagatacttgcagcggggatagttgcttttgtttgttcaacgtcctgt

SEQ ID NO: 506478 - DNA, 55 bp, Artificial
  Synthetic oligonucleotide
actgaagaagagtcggctgtagttagtaatgttggaattcgcggtctctcagcaa

SEQ ID NO: 506479 - DNA, 55 bp, Artificial
  Synthetic oligonucleotide
acctggctcagtcgtacagggtacaaccgttcatgcaattggaagccccttgggg

SEQ ID NO: 506480 - DNA, 55 bp, Artificial
  Synthetic oligonucleotide
accaaccgtttcgaaattacagaacgctttgctgtgacgccgggccttcgcgttg

SEQ ID NO: 506481 - DNA, 55 bp, Artificial
  Synthetic oligonucleotide
ctgggcgttggatttacactgataacctgacgggtaacaaccgtagctttgaacg

SEQ ID NO: 506482 - DNA, 55 bp, Artificial
  Synthetic oligonucleotide
ctggataacgatggccgtctccgatgtaaacatgtcggcgatggtatcagcacct

SEQ ID NO: 506483 - DNA, 55 bp, Artificial
  Synthetic oligonucleotide
ctttgtcaaattcacctttcgcaaggcgctctagccactgtgtatcactctgtcc

SEQ ID NO: 506484 - DNA, 55 bp, Artificial
  Synthetic oligonucleotide
ctgcccctgaataatacgttccagtcgatccatgcgagcctgtaaagactcttcc

SEQ ID NO: 506485 - DNA, 55 bp, Artificial
  Synthetic oligonucleotide
ctcgacttttggcgatggcacaagaatccgggtctcaccttcgtacggttgatcg

SEQ ID NO: 506486 - DNA, 55 bp, Artificial
  Synthetic oligonucleotide
ctcaccaatgtggctgatcaacccgaaatgtgtgactttattctgccttcggtac

SEQ ID NO: 506487 - DNA, 55 bp, Artificial
  Synthetic oligonucleotide
ctatgaattaggggtacgaggtggcaccggacctatgacatatgaacttaccggt

SEQ ID NO: 506488 - DNA, 55 bp, Artificial
  Synthetic oligonucleotide
cgtcctccccgactacgcgatccatcctgagcagaggaatttgtggtggatgtag

SEQ ID NO: 506489 - DNA, 55 bp, Artificial
  Synthetic oligonucleotide
cgtcagcacctttggttggaatgttagccttcggtaatttaatgcgagaaagtgg

SEQ ID NO: 506490 - DNA, 55 bp, Artificial
  Synthetic oligonucleotide
cgtaatcgggatgccgccggtgttaccgcgccgccagaaggattattcctgacag

SEQ ID NO: 506491 - DNA, 55 bp, Artificial
  Synthetic oligonucleotide
cgctttcgatttcctatcaccacctttactccttggattcatgggtcgattaatt

SEQ ID NO: 506492 - DNA, 55 bp, Artificial
  Synthetic oligonucleotide
gaacctgagcacaaggtattcgttaatcagggtccggttatcaaagtaaatgcga

SEQ ID NO: 506493 - DNA, 55 bp, Artificial
  Synthetic oligonucleotide
cgcggttcctaggcctgctaacagcaccagtaatccactaataactaacatccac

SEQ ID NO: 506494 - DNA, 55 bp, Artificial
  Synthetic oligonucleotide
cgcccacaaggtaagcaatagacacccattgccagccttcacctgacagactacc

SEQ ID NO: 506495 - DNA, 55 bp, Artificial
  Synthetic oligonucleotide
ccgttacgccattaactagcgatgtggcaacgattgagaaccagctgaatgcctt

SEQ ID NO: 506496 - DNA, 55 bp, Artificial
  Synthetic oligonucleotide
cgagtaactcacccgctaaacgaagccccatagatttctcactacgcttacgtga

SEQ ID NO: 506497 - DNA, 55 bp, Artificial
  Synthetic oligonucleotide
cgaatggctaaacgaccacatctggcctgctgaaacagctttagccgatagtgat

SEQ ID NO: 506498 - DNA, 54 bp, Artificial
  Synthetic oligonucleotide
ttttgatccagacattgagcaatcggcacagttattgcaggagtttgtgtggcg

SEQ ID NO: 506499 - DNA, 54 bp, Artificial
  Synthetic oligonucleotide
gtgtcggttcgtaattttgtaggtcctcattgaggttcgttaaggcctgttgcg

SEQ ID NO: 506500 - DNA, 54 bp, Artificial
  Synthetic oligonucleotide
ttggactctggcacttgattatcatgactatccgatgggaaatcatttaatggg

SEQ ID NO: 506501 - DNA, 53 bp, Artificial
  Synthetic oligonucleotide
agatggttctgaattccaagaatttaaaccgctgtatggcccaacgctagtgt

SEQ ID NO: 506502 - DNA, 53 bp, Artificial
  Synthetic oligonucleotide
ttctgtcctacattttgcagctcacaccatcgtccctgagtctgttgaaaacc

SEQ ID NO: 506503 - DNA, 53 bp, Artificial
  Synthetic oligonucleotide
ccatattctgagcgccatctttatccactcatcagcagcgcttactctgaagg

SEQ ID NO: 506504 - DNA, 53 bp, Artificial
  Synthetic oligonucleotide
cgcgtactgtgagcatgtagggtagaaacggcaacgactacctagcaatgggc

SEQ ID NO: 506505 - DNA, 52 bp, Artificial
  Synthetic oligonucleotide
agggttgggttttccgggttaccacttacctgattcaagggcttctcagctt

SEQ ID NO: 506506 - DNA, 51 bp, Artificial
  Synthetic oligonucleotide
ttgaaccggcgtccccttctcgcctttgcgaacctgggcaccggctgcctt

SEQ ID NO: 506507 - DNA, 51 bp, Artificial
  Synthetic oligonucleotide
agtctccggtacttaattgcagcgaggcaaggttacctgtattaaatgtgc

SEQ ID NO: 506508 - DNA, 51 bp, Artificial
  Synthetic oligonucleotide
atgttatggcaaaggtaacaccgattagcatgcgtacaacagcggaacagt

SEQ ID NO: 506509 - DNA, 51 bp, Artificial
  Synthetic oligonucleotide
gttggtcaatcagcaagatcttacccgttgcgatgttctttgttcccctac

SEQ ID NO: 506510 - DNA, 51 bp, Artificial
  Synthetic oligonucleotide
catcgcgagtgttgcggagattgtgtgggcgctggccttaaaattcacgca

SEQ ID NO: 506511 - DNA, 51 bp, Artificial
  Synthetic oligonucleotide
cgcagtgtagccatcctagataagtaattgacaacacaggcggtcgcaaaa

SEQ ID NO: 506512 - DNA, 50 bp, Artificial
  Synthetic oligonucleotide
atgcggtcgttgaaaatgatctcaggcgtgttctagcgtacagtatgatt

SEQ ID NO: 506513 - DNA, 50 bp, Artificial
  Synthetic oligonucleotide
atggaaacatgtatggacgctgctttggataccattcctggcaacgtgcg

SEQ ID NO: 506514 - DNA, 50 bp, Artificial
  Synthetic oligonucleotide
ccagtggttgcggttctaccttagccgaatatgaccatgctctatcaaaa

SEQ ID NO: 506515 - DNA, 55 bp, Artificial
  Synthetic oligonucleotide
ggactggcctatatccggttgggagaaaagtgatgtccgaggaagcagaagagtt

SEQ ID NO: 506516 - DNA, 55 bp, Artificial
  Synthetic oligonucleotide
ggaagccgtggaagacatcggacccggtatacacgttgaccatgtgcggtggggc

SEQ ID NO: 506517 - DNA, 55 bp, Artificial
  Synthetic oligonucleotide
gcggttctcacttgcgtgacctaaccaccggattgtgaaagagcaaccgaacctc

SEQ ID NO: 506518 - DNA, 55 bp, Artificial
  Synthetic oligonucleotide
gcggtcgccgttctcttcgatgccttttcgcccgagtacacaggtccttcgcctt

SEQ ID NO: 506519 - DNA, 55 bp, Artificial
  Synthetic oligonucleotide
gcgggtgcgatgggaagtgcgacaaaacattcgtgaagactcatcgaagaaggtg

SEQ ID NO: 506520 - DNA, 55 bp, Artificial
  Synthetic oligonucleotide
gcgctgcgctgtcgtccattacggctattccatccgccacgacctttgtccattc

SEQ ID NO: 506521 - DNA, 55 bp, Artificial
  Synthetic oligonucleotide
gcgataaggctcacaaaacccaacagggtgcgatttcagccgtttacagcgagcg

SEQ ID NO: 506522 - DNA, 55 bp, Artificial
  Synthetic oligonucleotide
gccgggacgagtgaacgcataaaccttctggccccggaacttcgcggtttgggtc

SEQ ID NO: 506523 - DNA, 55 bp, Artificial
  Synthetic oligonucleotide
gccgactccaataggcgaagcctctcgcatccccttgacgatagcaggtgaccgg

SEQ ID NO: 506524 - DNA, 55 bp, Artificial
  Synthetic oligonucleotide
gccctgagcgattgtataaacaagttgacgggatcgagaagagagattatcgacc

SEQ ID NO: 506525 - DNA, 55 bp, Artificial
  Synthetic oligonucleotide
gccccgggcgtgacaaactggcggaagtagtcttgcgtctcgcgcaacaccgttt

SEQ ID NO: 506526 - DNA, 55 bp, Artificial
  Synthetic oligonucleotide
gccccgatccaatggcagcacggccaattgttcacgcaaatccagattgttgctc

SEQ ID NO: 506527 - DNA, 55 bp, Artificial
  Synthetic oligonucleotide
gccaggcggctgatccatgggtcttcatgttgagtgctccgtaagtgggtgtcgg

SEQ ID NO: 506528 - DNA, 55 bp, Artificial
  Synthetic oligonucleotide
gcatacaggttcagtgcggactagtgactcacgtcggccctcggatcaacgacgt

SEQ ID NO: 506529 - DNA, 55 bp, Artificial
  Synthetic oligonucleotide
gattggctcaattcgcgctgctaaattgatattttccccgagaaattctggattg

SEQ ID NO: 506530 - DNA, 55 bp, Artificial
  Synthetic oligonucleotide
gagtgtcatctgttttatcttacatgccgtgggcccgttacaatgagttatcgga

SEQ ID NO: 506531 - DNA, 55 bp, Artificial
  Synthetic oligonucleotide
gagcgtacaagttcccatgcgagctataatgtgcaaagcgtttggatgagaagca

SEQ ID NO: 506532 - DNA, 55 bp, Artificial
  Synthetic oligonucleotide
ttgtggaactgttcccgaccaccaagacggacgagcgaaactcgcgcccttgggg

SEQ ID NO: 506533 - DNA, 55 bp, Artificial
  Synthetic oligonucleotide
tgccgccactgtttatcaccggagttccagcgccaccagtgctgaacccgctcac

SEQ ID NO: 506534 - DNA, 55 bp, Artificial
  Synthetic oligonucleotide
tgcccaattgtgttgcaagctggctggccgaatcgcctcccagactcgaccgtgc

SEQ ID NO: 506535 - DNA, 55 bp, Artificial
  Synthetic oligonucleotide
tgaccttggtggatgtgaggctgaagccgccggatccgttgcccgtgaagaggtc

SEQ ID NO: 506536 - DNA, 55 bp, Artificial
  Synthetic oligonucleotide
tcgcgcggccctcttcataggaccttccggtccagtcctcacgtcgggtcaatag

SEQ ID NO: 506537 - DNA, 55 bp, Artificial
  Synthetic oligonucleotide
taacgtcgcaaaggatgctttcgaccatacggattgcctgttcgcaacgcagacg

SEQ ID NO: 506538 - DNA, 55 bp, Artificial
  Synthetic oligonucleotide
gttggtatcggattgaggttgcctggtggctctgacactccatcgtccttctggg

SEQ ID NO: 506539 - DNA, 55 bp, Artificial
  Synthetic oligonucleotide
gtcctcagttattggcaatcaagcattgagccacaatccgccgcggtcctttctc

SEQ ID NO: 506540 - DNA, 55 bp, Artificial
  Synthetic oligonucleotide
gtactacggtacgcgtcgacaagtgaggtgcgattgcgcattcacctggccacac

SEQ ID NO: 506541 - DNA, 55 bp, Artificial
  Synthetic oligonucleotide
ggttggcttcgaccagacaaccggcagacagtcttccaatccccgccgaacaggc

SEQ ID NO: 506542 - DNA, 55 bp, Artificial
  Synthetic oligonucleotide
ggtcggtcaacccgctgagggtcttcgtgttcgcaccagtttcgctgttccatac

SEQ ID NO: 506543 - DNA, 55 bp, Artificial
  Synthetic oligonucleotide
gggtcagtcagcggacgaacgtaagtggtgatgggtctcataacccattattcgc

SEQ ID NO: 506544 - DNA, 55 bp, Artificial
  Synthetic oligonucleotide
ggggtagttgatgccctcgtagttgttattgaacagagggtgctgtttcgagccc

SEQ ID NO: 506545 - DNA, 55 bp, Artificial
  Synthetic oligonucleotide
ggggcaatcctttgcctggtggcgattcattggcggcgaggtcgtgaattgaagg

SEQ ID NO: 506546 - DNA, 55 bp, Artificial
  Synthetic oligonucleotide
ggctcgcaattctcgctcagacgaacctcgaaacccttcgaaagcacgacaagcc

SEQ ID NO: 506547 - DNA, 55 bp, Artificial
  Synthetic oligonucleotide
ggcgttgcggcccatcggtcttgacatccttggtgtcgcacatctgttggatgcc

SEQ ID NO: 506548 - DNA, 55 bp, Artificial
  Synthetic oligonucleotide
ggaggcggcagaatctccagattccagagttacaccctttgcagatcgccaagcg

SEQ ID NO: 506549 - DNA, 55 bp, Artificial
  Synthetic oligonucleotide
aaatagatcgattggaggggatgggagagcttatcggtcaaagcaaacctatgaa

SEQ ID NO: 506550 - DNA, 55 bp, Artificial
  Synthetic oligonucleotide
acatcggggcgtctatcctgtcgaccgggctacctaccggatcctggtccggcat

SEQ ID NO: 506551 - DNA, 55 bp, Artificial
  Synthetic oligonucleotide
acgattgtgacggaaagcaatcgtcggccacgcatgcgaattgggacagcgggcc

SEQ ID NO: 506552 - DNA, 55 bp, Artificial
  Synthetic oligonucleotide
acgtggcgaagatctgctgtcgttcacgaacaccccacacatcactggcagttgg

SEQ ID NO: 506553 - DNA, 55 bp, Artificial
  Synthetic oligonucleotide
actcaccgtacaggccatttgaaccatttgagccgttcgaaccttcgtgcgttcg

SEQ ID NO: 506554 - DNA, 55 bp, Artificial
  Synthetic oligonucleotide
actcaggaagaccccaagctccgtgaccactatggccgcaccaagcacggccaga

SEQ ID NO: 506555 - DNA, 55 bp, Artificial
  Synthetic oligonucleotide
agacgctcaacgatcgaaggctcgagcaactccagaaggatccctccactcgcta

SEQ ID NO: 506556 - DNA, 55 bp, Artificial
  Synthetic oligonucleotide
atggagaaagccctgtttcgccttttgccaaacacagcctagtcaagaaagaagc

SEQ ID NO: 506557 - DNA, 55 bp, Artificial
  Synthetic oligonucleotide
cactgcctcaagcttgcagctaccatgagatgtacaacgacaaaatacagtcaca

SEQ ID NO: 506558 - DNA, 55 bp, Artificial
  Synthetic oligonucleotide
cactgttgatcagacgcgacttccagtcgatcctcgaacctacacgcccttgctg

SEQ ID NO: 506559 - DNA, 55 bp, Artificial
  Synthetic oligonucleotide
cagaaggcggttctatcatgcgggtaatacttccgtagtttatacaaaccttgct

SEQ ID NO: 506560 - DNA, 55 bp, Artificial
  Synthetic oligonucleotide
ccatgcgtttatcaatgacataggttaaggccgaatcaaatatgctcgagtgcat

SEQ ID NO: 506561 - DNA, 55 bp, Artificial
  Synthetic oligonucleotide
cccagcgaatgcaactccgttgaccagccagtggatctgacctcccgcggcaaag

SEQ ID NO: 506562 - DNA, 55 bp, Artificial
  Synthetic oligonucleotide
gagcacacagacggatattgatgcatggtggcaatcgggatacgtcaagtcgaga

SEQ ID NO: 506563 - DNA, 55 bp, Artificial
  Synthetic oligonucleotide
ctggcctgttagcgcccgtaacaaagttattaagaacggacactgcctgatcagc

SEQ ID NO: 506564 - DNA, 55 bp, Artificial
  Synthetic oligonucleotide
ctggatgtaataactctggtccggctggatccctcgttgcaagtccaaacgggag

SEQ ID NO: 506565 - DNA, 55 bp, Artificial
  Synthetic oligonucleotide
ctgaacttgcggcattccatgaagcttgcccgacgcctgtggcatcgttggcagc

SEQ ID NO: 506566 - DNA, 55 bp, Artificial
  Synthetic oligonucleotide
ctcacaatcgccagatttctcaatttgaggtgcataccttcctttcatagtcgtg

SEQ ID NO: 506567 - DNA, 55 bp, Artificial
  Synthetic oligonucleotide
cgggagaggcacattgcattttgtttctctcaaatctgccagtcttgcagcgtca

SEQ ID NO: 506568 - DNA, 55 bp, Artificial
  Synthetic oligonucleotide
cggcgttgatcggattttcgttttggcaccttagcgacaaccgattccttccatg

SEQ ID NO: 506569 - DNA, 55 bp, Artificial
  Synthetic oligonucleotide
cgctcgcacattcaccagcagatgagggcgctccacttatggctctccatcagtt

SEQ ID NO: 506570 - DNA, 55 bp, Artificial
  Synthetic oligonucleotide
cgccagtatcacgtgcatgtcatttctcccggaaagacaaccgccaacgcccgcc

SEQ ID NO: 506571 - DNA, 55 bp, Artificial
  Synthetic oligonucleotide
cgccagagacagttcgtgcattcgagtatcgtcctatgacatttcgctgatacgg

SEQ ID NO: 506572 - DNA, 55 bp, Artificial
  Synthetic oligonucleotide
cgaacgaggccttctggtaaccagtgtcccacgagtctcgcccctagcgtaggtc

SEQ ID NO: 506573 - DNA, 55 bp, Artificial
  Synthetic oligonucleotide
ccgagcagaatttcatactccgacctcgcctgttcgtatcgcacggccgccagcc

SEQ ID NO: 506574 - DNA, 54 bp, Artificial
  Synthetic oligonucleotide
gtcagtccgtgagcaagcgacgtagtcgaaggcaattccagagcaagtaggaac

SEQ ID NO: 506575 - DNA, 53 bp, Artificial
  Synthetic oligonucleotide
atcgagcaaccgataacaggccaagccccgcgttttgaaatcgatccctaaaa

SEQ ID NO: 506576 - DNA, 53 bp, Artificial
  Synthetic oligonucleotide
agacgaaagagtgcgtaataacagactgctgctcctcagggagattaacgagt

SEQ ID NO: 506577 - DNA, 53 bp, Artificial
  Synthetic oligonucleotide
acgtcaacggacgaccgccacgacacacgttcttctatccgcaggaccagtac

SEQ ID NO: 506578 - DNA, 53 bp, Artificial
  Synthetic oligonucleotide
gaaaccacgtggtgtcacgggccgagccatacccgttccaaacccatagtatg

SEQ ID NO: 506579 - DNA, 52 bp, Artificial
  Synthetic oligonucleotide
ctgaatacacgccggggtcgaatggaagggatggactcacttcctggcggga

SEQ ID NO: 506580 - DNA, 52 bp, Artificial
  Synthetic oligonucleotide
tcagcgacggggttccattgtcgtgcttgcctggatcggaccgcatacaaaa

SEQ ID NO: 506581 - DNA, 52 bp, Artificial
  Synthetic oligonucleotide
ccccatggcattgacatggacaatccggcactattttcgacggtacatgatt

SEQ ID NO: 506582 - DNA, 51 bp, Artificial
  Synthetic oligonucleotide
atccagtgcaacacaaagttcgtggtcggaactcggataatctgaccggca

SEQ ID NO: 506583 - DNA, 51 bp, Artificial
  Synthetic oligonucleotide
ccccaaccgatagtgagaatggcttcttgcatcggggttgctggggattca

SEQ ID NO: 506584 - DNA, 51 bp, Artificial
  Synthetic oligonucleotide
aatcgagtgcggtaggcccgaccgatgactcaaccggaacacatgtctcga

SEQ ID NO: 506585 - DNA, 58 bp, Artificial
  Synthetic oligonucleotide
ggtaatagtgctattctcagttgtgtacttatttcagattaatcgaatgacttacgcg

SEQ ID NO: 506586 - DNA, 55 bp, Artificial
  Synthetic oligonucleotide
gcgtgggaatactacgagccaattattcgttacgatcagtattggtgtctgtgaa

SEQ ID NO: 506587 - DNA, 55 bp, Artificial
  Synthetic oligonucleotide
gcggtaagttacctaaaatagcgtcacctgccgcagccataatactcgcaacgac

SEQ ID NO: 506588 - DNA, 55 bp, Artificial
  Synthetic oligonucleotide
gcgctagtggtaacgacaaccttaatacccgcttctatagctccatctattgctg

SEQ ID NO: 506589 - DNA, 55 bp, Artificial
  Synthetic oligonucleotide
gcgcacggggcgacttctacactggcgacgcatgtatttgcggatctggatgcag

SEQ ID NO: 506590 - DNA, 55 bp, Artificial
  Synthetic oligonucleotide
gcgatggaggatgtccgaaagagtttggggattgaagaagcgcctctggctgtcg

SEQ ID NO: 506591 - DNA, 55 bp, Artificial
  Synthetic oligonucleotide
gcgactgcatgaactatcaaaagcaacgtcgtaaagtggctagcttgcgtgagcg

SEQ ID NO: 506592 - DNA, 55 bp, Artificial
  Synthetic oligonucleotide
gccgcatagtttctccggttacggacaacgttatggtaagcgagttgccgaaagg

SEQ ID NO: 506593 - DNA, 55 bp, Artificial
  Synthetic oligonucleotide
gattggagcaacgtctccatacgttgtaaataagcataacggttcgatacacccg

SEQ ID NO: 506594 - DNA, 55 bp, Artificial
  Synthetic oligonucleotide
gattgctgacatcacaaagctaatagaccaaccaaaacgcaccactttgttagta

SEQ ID NO: 506595 - DNA, 55 bp, Artificial
  Synthetic oligonucleotide
gagctggtcgcgtccatcctacagtcgattgtacgcgctaattcaagcgtggcct

SEQ ID NO: 506596 - DNA, 55 bp, Artificial
  Synthetic oligonucleotide
gagcgaacatccgtttacgtgtcgctatcatagtcatggacaattacaggtcacg

SEQ ID NO: 506597 - DNA, 55 bp, Artificial
  Synthetic oligonucleotide
gaccgttaaattgcggtccatctgaatcataatatcttcacgtgagcggtccgtc

SEQ ID NO: 506598 - DNA, 55 bp, Artificial
  Synthetic oligonucleotide
gacccatttgttgactacgtgtcaaatcagtttgtacgtagccttgtaaagcccc

SEQ ID NO: 506599 - DNA, 55 bp, Artificial
  Synthetic oligonucleotide
gaattcgtagctgtggcttgaacgctagcaggtgtataggcagcggttgagccgt

SEQ ID NO: 506600 - DNA, 55 bp, Artificial
  Synthetic oligonucleotide
gaagcggcaagtcgttactattatggaaaaccgagtaaagagttaacccttgctg

SEQ ID NO: 506601 - DNA, 55 bp, Artificial
  Synthetic oligonucleotide
gaacgttagcctttcatcaaccagcgcaagagttgggctagaatacgcttcgcgc

SEQ ID NO: 506602 - DNA, 55 bp, Artificial
  Synthetic oligonucleotide
gaacgctgcaatttggcgtaaatcacgataagcgagcgccccgatacaaccgagc

SEQ ID NO: 506603 - DNA, 55 bp, Artificial
  Synthetic oligonucleotide
gaaccgacttttccaccaaccccaattttgtatggcaaagccatttgaggaagtg

SEQ ID NO: 506604 - DNA, 55 bp, Artificial
  Synthetic oligonucleotide
gaaaactgggagttgcgtcgtttacaacaactaatcggtaaacaagatcggatcg

SEQ ID NO: 506605 - DNA, 55 bp, Artificial
  Synthetic oligonucleotide
cttccgctttcgtaaacgtatctacccagttccattctaatgtgatcgatgatgg

SEQ ID NO: 506606 - DNA, 55 bp, Artificial
  Synthetic oligonucleotide
cttccgcgcaccaaaagaagtgattggcaagcgtgtacttgtacgtgtgacagac

SEQ ID NO: 506607 - DNA, 55 bp, Artificial
  Synthetic oligonucleotide
ctgtagtgcctgatacgctaccaggcgtatattgtccttggatatcccctagtgt

SEQ ID NO: 506608 - DNA, 55 bp, Artificial
  Synthetic oligonucleotide
tttggatatcacgtagccatttgagtgattttagaatggaaggatggtcctgtga

SEQ ID NO: 506609 - DNA, 55 bp, Artificial
  Synthetic oligonucleotide
tttagtagtatggaaacaacaggaagtgcattgactgcgcaacgattaagaatgg

SEQ ID NO: 506610 - DNA, 55 bp, Artificial
  Synthetic oligonucleotide
tgttcctgcgttaacgaatattgatgcgggtgaattagacccgttatctcaagcc

SEQ ID NO: 506611 - DNA, 55 bp, Artificial
  Synthetic oligonucleotide
tgtgtagcgcaagtttaattcatctttcgtgtaatcgccctctagtgaggcgtca

SEQ ID NO: 506612 - DNA, 55 bp, Artificial
  Synthetic oligonucleotide
tgcagggtctactctttccagtatccaccatagtatgtccagtctggtcgtattg

SEQ ID NO: 506613 - DNA, 55 bp, Artificial
  Synthetic oligonucleotide
tattcaagaagccggagtgagctatggaacaaaggtgcgacgagtggtaacacgc

SEQ ID NO: 506614 - DNA, 55 bp, Artificial
  Synthetic oligonucleotide
gtgttcgacataccgccctttgtacatgatgccgatatgatcacacatatgctgg

SEQ ID NO: 506615 - DNA, 55 bp, Artificial
  Synthetic oligonucleotide
gtggcgaggggatgctgctatagtttggacctcaggtacattatcagtgccagga

SEQ ID NO: 506616 - DNA, 55 bp, Artificial
  Synthetic oligonucleotide
gtgccccatataggacgctcagaacgtaagaactcaactggttcatatagcggtg

SEQ ID NO: 506617 - DNA, 55 bp, Artificial
  Synthetic oligonucleotide
gtcccatcacgttcctctgcgttcatccacgtattatgcataagtggtgacatcg

SEQ ID NO: 506618 - DNA, 55 bp, Artificial
  Synthetic oligonucleotide
gtccaatggggcaatgtagcgatgggtatccgtgataaatggaatgagcgcaaaa

SEQ ID NO: 506619 - DNA, 55 bp, Artificial
  Synthetic oligonucleotide
gtagcaactcgggagatcctgtttggtctttcctatttggagagtatggtattac

SEQ ID NO: 506620 - DNA, 55 bp, Artificial
  Synthetic oligonucleotide
gtacgtgcatcgctgcaaagtgtcgaagcggcttcaagtggattaaccgccgaat

SEQ ID NO: 506621 - DNA, 55 bp, Artificial
  Synthetic oligonucleotide
gtaaaaccgtcccaactggagtataggcatgcattacatcctcgttattttcgac

SEQ ID NO: 506622 - DNA, 55 bp, Artificial
  Synthetic oligonucleotide
ggtaacagcttttaaacgcttcccgcgaatctctacttcaacttcagttccaagc

SEQ ID NO: 506623 - DNA, 55 bp, Artificial
  Synthetic oligonucleotide
gggctttgaaccacaagatcatcacttttggaggagcttcggtagtccttgcggc

SEQ ID NO: 506624 - DNA, 55 bp, Artificial
  Synthetic oligonucleotide
ggctcatattgcttcggacgcacgtgtaaataattacgcaagttttcaatatgcc

SEQ ID NO: 506625 - DNA, 55 bp, Artificial
  Synthetic oligonucleotide
ggccaatggtaattcctacgatgattaatccgaagttgcgtaatgttgatggcca

SEQ ID NO: 506626 - DNA, 55 bp, Artificial
  Synthetic oligonucleotide
ggcacggtacatacgaatgagttgtttgtggcgtttcgtccgtttcatgcgtttt

SEQ ID NO: 506627 - DNA, 55 bp, Artificial
  Synthetic oligonucleotide
ggattgcgagaaaagtacttccataatcccatatggagttttgccttaaagctgc

SEQ ID NO: 506628 - DNA, 55 bp, Artificial
  Synthetic oligonucleotide
ggaagctgagcttaacatccggacgcttcgtatcgtaaaacgtctaaatgtcagg

SEQ ID NO: 506629 - DNA, 55 bp, Artificial
  Synthetic oligonucleotide
gctggaagaaacgactccaactctccgcactttcaacgtggtcaatatgaacacc

SEQ ID NO: 506630 - DNA, 55 bp, Artificial
  Synthetic oligonucleotide
gcgttcccgatgggtgtatacttagagaatggtcaaaacaagtgcgtgtttggag

SEQ ID NO: 506631 - DNA, 55 bp, Artificial
  Synthetic oligonucleotide
ccgaatgtgcgtgcttcttctggttgtcggacgattcgtagcatcgcttctgtca

SEQ ID NO: 506632 - DNA, 55 bp, Artificial
  Synthetic oligonucleotide
cccgttgtactaggtgaaggcatcccactattttcagaacgtgtgccgatgagtg

SEQ ID NO: 506633 - DNA, 55 bp, Artificial
  Synthetic oligonucleotide
cccggcaagcaatccgctgctaacaggtggagtccaaagttttccgtccaactct

SEQ ID NO: 506634 - DNA, 55 bp, Artificial
  Synthetic oligonucleotide
ccccgtgtcctccagttgtagttagagccgttatacttatttgcatacgtggtcc

SEQ ID NO: 506635 - DNA, 55 bp, Artificial
  Synthetic oligonucleotide
cccagcattcataacaccaacattaacacgtgaggcaccagctgagtggcgagga

SEQ ID NO: 506636 - DNA, 55 bp, Artificial
  Synthetic oligonucleotide
ccatcgtcccatagttgcctggcttcattaactaagccctgctcaatcatattac

SEQ ID NO: 506637 - DNA, 55 bp, Artificial
  Synthetic oligonucleotide
ccagcaacgtactgattcaaattgcgcgggctataccaagtgcagaacgtgtcgt

SEQ ID NO: 506638 - DNA, 55 bp, Artificial
  Synthetic oligonucleotide
ccaccagtccagataattgtcttaccagcgttttctgggcctcgatagattgttt

SEQ ID NO: 506639 - DNA, 55 bp, Artificial
  Synthetic oligonucleotide
catctccagtccgtttaaataatcgctgcggtgtgacagggagaccacgcggctt

SEQ ID NO: 506640 - DNA, 55 bp, Artificial
  Synthetic oligonucleotide
cagtaggaggctcaggtgtaattgcaactgaactcggaaagttacttgcagagcg

SEQ ID NO: 506641 - DNA, 55 bp, Artificial
  Synthetic oligonucleotide
cagctaccttcgtttaaaggctggtcactgcgagatgtgttgacctatcagtcac

SEQ ID NO: 506642 - DNA, 55 bp, Artificial
  Synthetic oligonucleotide
cagcagtttggaaactaatcaccaaaattccgaatacatcttcacgcgattcgac

SEQ ID NO: 506643 - DNA, 55 bp, Artificial
  Synthetic oligonucleotide
cactgaaggaatatgcgctagaccaagacggggatgtaagtgatccttacggtgg

SEQ ID NO: 506644 - DNA, 55 bp, Artificial
  Synthetic oligonucleotide
caatcggttgatgtttactaatctcacttgaggatgctgcaacttcggctcgcaa

SEQ ID NO: 506645 - DNA, 55 bp, Artificial
  Synthetic oligonucleotide
caagaatgcgtctaccactacaggattgaattgcgttcctcttcctctaacaatc

SEQ ID NO: 506646 - DNA, 55 bp, Artificial
  Synthetic oligonucleotide
caaccttccgataattgtcccaatgattatgagaagtgcgttaatcaatgtccct

SEQ ID NO: 506647 - DNA, 55 bp, Artificial
  Synthetic oligonucleotide
atgaccctgattaaggacgcaagacagaccatttccctatctatcgattcgcgac

SEQ ID NO: 506648 - DNA, 55 bp, Artificial
  Synthetic oligonucleotide
agacatgaccaaattgtgcaggtgagtatgcttgaagagtctcatagttgtgttc

SEQ ID NO: 506649 - DNA, 55 bp, Artificial
  Synthetic oligonucleotide
acgattcgtctcattatcaggtacctgttgaaccccaataaccgaagcaccagtc

SEQ ID NO: 506650 - DNA, 55 bp, Artificial
  Synthetic oligonucleotide
aagtatgctaattgctggaaagacggctagcaaactggggattcctgtagttctg

SEQ ID NO: 506651 - DNA, 55 bp, Artificial
  Synthetic oligonucleotide
aacactatgtgcattcctgcttgctcccctgatataagaacagttggttcatagg

SEQ ID NO: 506652 - DNA, 55 bp, Artificial
  Synthetic oligonucleotide
aaacagaagtgcatatacagtattgtctctcttttcggataatccaggggtgtag

SEQ ID NO: 506653 - DNA, 55 bp, Artificial
  Synthetic oligonucleotide
ctgtagtaaccttaacgtatttgaatcctgatggacgttgtaccgcaccgccggc

SEQ ID NO: 506654 - DNA, 55 bp, Artificial
  Synthetic oligonucleotide
ctggttccgcacagcgcgggatatttaaaagagatctttggacagattagacggg

SEQ ID NO: 506655 - DNA, 55 bp, Artificial
  Synthetic oligonucleotide
ctggagtagtgtcgacggtagtatgtatgttgttatggaacatcggcgtccaaaa

SEQ ID NO: 506656 - DNA, 55 bp, Artificial
  Synthetic oligonucleotide
ctattatgaaagatggccgttgtgttttaagtggacagccaattgaagtctttgg

SEQ ID NO: 506657 - DNA, 55 bp, Artificial
  Synthetic oligonucleotide
ctaaaccttttagcttcggcgcacccgccgctaaatcctgtagctgcatcggtgt

SEQ ID NO: 506658 - DNA, 55 bp, Artificial
  Synthetic oligonucleotide
cgttcaccttcatgccaattagacgtgccggctgaatcaatgtgccactgagcgc

SEQ ID NO: 506659 - DNA, 55 bp, Artificial
  Synthetic oligonucleotide
cgtgcttaaaagaaaatcgtccgcaatgccttctagatgctgtatatcatcgagg

SEQ ID NO: 506660 - DNA, 55 bp, Artificial
  Synthetic oligonucleotide
cggttgtagttctaagtttgctgctgcacgttgaatcgatgcttgtaccgagaaa

SEQ ID NO: 506661 - DNA, 55 bp, Artificial
  Synthetic oligonucleotide
cgggtctctacacacgattcccaaccaagaaggtcacgtacgtgtacacagcctt

SEQ ID NO: 506662 - DNA, 55 bp, Artificial
  Synthetic oligonucleotide
cggatacggtcgaatcagtccactcatatcggtataagcagtatgatttgtgaca

SEQ ID NO: 506663 - DNA, 55 bp, Artificial
  Synthetic oligonucleotide
cgcttctatatcggctacctgggatgctgaaattgaacgagcggtagacgaggca

SEQ ID NO: 506664 - DNA, 55 bp, Artificial
  Synthetic oligonucleotide
cgctgtttactgctgtcagcgcaatcagtgttacaggattgacggtgttcgatat

SEQ ID NO: 506665 - DNA, 55 bp, Artificial
  Synthetic oligonucleotide
ccgagtaacccagcaggtccaatggctagcaaagactgtaccgcttggaaaccgc

SEQ ID NO: 506666 - DNA, 55 bp, Artificial
  Synthetic oligonucleotide
ccgtgcagttggaaacgacttttgaaagatggattgcacgtcaggaccttgcttg

SEQ ID NO: 506667 - DNA, 55 bp, Artificial
  Synthetic oligonucleotide
cgccattgtctcagattcttgatgcatcatcgcatattggcgcatcgcatccgtc

SEQ ID NO: 506668 - DNA, 55 bp, Artificial
  Synthetic oligonucleotide
cgatctattaggcttcctgcccatgaattagaacaaatcgtcgcgatcggcccta

SEQ ID NO: 506669 - DNA, 55 bp, Artificial
  Synthetic oligonucleotide
cgaatgatccgacagtcaatacagccgactcaacagggcttacacgacgagatac

SEQ ID NO: 506670 - DNA, 55 bp, Artificial
  Synthetic oligonucleotide
cctgaaaggttgcgtgaaattgctcgacttcgggtagagtatcaagacgtgactc

SEQ ID NO: 506671 - DNA, 54 bp, Artificial
  Synthetic oligonucleotide
catcacaaaaccgatgaaactgatggcaagagcatcatctattgcaaggcgacg

SEQ ID NO: 506672 - DNA, 54 bp, Artificial
  Synthetic oligonucleotide
atccgggacaactacaaagttctgtgctgactgacacaatagatcaagcagata

SEQ ID NO: 506673 - DNA, 54 bp, Artificial
  Synthetic oligonucleotide
agctttgcgggtgtggtacgagcgcttcatacgttaatgtcgcacgttcatgcg

SEQ ID NO: 506674 - DNA, 53 bp, Artificial
  Synthetic oligonucleotide
cgcccattctcatggaacacgtaaaacattggatccgctgcatcatgagatac

SEQ ID NO: 506675 - DNA, 53 bp, Artificial
  Synthetic oligonucleotide
ctacaacaattcctgttatgcatccagtatgaatcagcggtaagggtcgaatc

SEQ ID NO: 506676 - DNA, 52 bp, Artificial
  Synthetic oligonucleotide
tgatctgtttggtcacttttcggcagatagatgcgatttgacgctccagtcc

SEQ ID NO: 506677 - DNA, 52 bp, Artificial
  Synthetic oligonucleotide
tagctggaatgtttgctcttgccgatatggttcgagaaacggctaaaggagc

SEQ ID NO: 506678 - DNA, 52 bp, Artificial
  Synthetic oligonucleotide
taagactggcagcgttcttaagctgtctggcttatcgcgggaacccgctcca

SEQ ID NO: 506679 - DNA, 52 bp, Artificial
  Synthetic oligonucleotide
gtgtccagcggctaggtcacttcctacaacacaataagttgcttgtccacct

SEQ ID NO: 506680 - DNA, 52 bp, Artificial
  Synthetic oligonucleotide
gcgtttaaatgcggtcgttggagaatatagcgaaaaggcgttaaaaccttat

SEQ ID NO: 506681 - DNA, 52 bp, Artificial
  Synthetic oligonucleotide
gagtttattggctgaagagatgaggcaacccaatcgctttctagtcacgcat

SEQ ID NO: 506682 - DNA, 51 bp, Artificial
  Synthetic oligonucleotide
taccgcgaacagagccgtttaaatgataagccataggttgtagaatccgca

SEQ ID NO: 506683 - DNA, 51 bp, Artificial
  Synthetic oligonucleotide
aagtgggagcagtagtagcaaatgttgatcctgctgttacaatgcggttaa

SEQ ID NO: 506684 - DNA, 51 bp, Artificial
  Synthetic oligonucleotide
gcggagcagatccaagctcgctcgatgccagtcggggacctagtggctgtt

SEQ ID NO: 506685 - DNA, 50 bp, Artificial
  Synthetic oligonucleotide
tacagatacagcggatgaagtcattgagccgagcggtgaatcaacagagg

SEQ ID NO: 506686 - DNA, 50 bp, Artificial
  Synthetic oligonucleotide
tcctttgatggcacgaaagaattaacagccctaaatgatgagcaggcagc

SEQ ID NO: 506687 - DNA, 50 bp, Artificial
  Synthetic oligonucleotide
gatcggttaaggcgtaatcggttaaggctttggcaacgcgggtcatgatc

SEQ ID NO: 506688 - DNA, 55 bp, Artificial
  Synthetic oligonucleotide
tgtgccctgggtgagtctgcacgagcagacgggattgacggtgcccgtgggcgac

SEQ ID NO: 506689 - DNA, 55 bp, Artificial
  Synthetic oligonucleotide
tcgcaaacggtggatggggctcgtgttcgtcacccagctcccacagcatctccct

SEQ ID NO: 506690 - DNA, 55 bp, Artificial
  Synthetic oligonucleotide
taccgaagctgacctggcggcgttcggcctcaaaccacccgtcttcacggttacc

SEQ ID NO: 506691 - DNA, 55 bp, Artificial
  Synthetic oligonucleotide
gtgcctccttcgtgaggaaacgcccagaacagacaacaaacaccgacccgaagtg

SEQ ID NO: 506692 - DNA, 55 bp, Artificial
  Synthetic oligonucleotide
gcagaactacgacaaccgattcgaactccgtgaaggcatccccttgtcgggcaag

SEQ ID NO: 506693 - DNA, 55 bp, Artificial
  Synthetic oligonucleotide
gagtcgaggcaatgcgcgctctccaacattgaccctaccaaagccggcaacccgc

SEQ ID NO: 506694 - DNA, 55 bp, Artificial
  Synthetic oligonucleotide
cggactgtcatggccgaacttcgcggacgcaggactcagtcgaggcgatgcatct

SEQ ID NO: 506695 - DNA, 55 bp, Artificial
  Synthetic oligonucleotide
ccgcgagaagtgacgcgacacgatacatgacctcccgccgtgtaacgtcagccgt

SEQ ID NO: 506696 - DNA, 55 bp, Artificial
  Synthetic oligonucleotide
ccccattggcgggcctctgcacaacacgcggacgtacgtgctggacacgaagctt

SEQ ID NO: 506697 - DNA, 55 bp, Artificial
  Synthetic oligonucleotide
ccagggccgagtggagtgtcggcttggtctccttccgggagggcgtcccatggca

SEQ ID NO: 506698 - DNA, 55 bp, Artificial
  Synthetic oligonucleotide
cagaagacctatctcctcactcggaaatccaaccttctgggtgaagcgaaaggcg

SEQ ID NO: 506699 - DNA, 55 bp, Artificial
  Synthetic oligonucleotide
acccggtccaatggtactcgacttttgccttctgagctccatccggagcagtagg

SEQ ID NO: 506700 - DNA, 54 bp, Artificial
  Synthetic oligonucleotide
ccccaggcgccacggacagccaggcttcactgggagctatccttgaaatcaacg

SEQ ID NO: 506701 - DNA, 54 bp, Artificial
  Synthetic oligonucleotide
agatgagacgtccattgacgtcccgttctccattgcaccgctgctcaactgagc

SEQ ID NO: 506702 - DNA, 51 bp, Artificial
  Synthetic oligonucleotide
cgtgccagccggttcttctccaacaggacgggcatggcgccaatggcatac

SEQ ID NO: 506703 - DNA, 51 bp, Artificial
  Synthetic oligonucleotide
gactccctgtgcactttgcgtagactgggagcatgtacacccctcggggca

SEQ ID NO: 506704 - DNA, 51 bp, Artificial
  Synthetic oligonucleotide
aacgggctgcacaaacacctttcggtggaacgcggaacccctctggagttg

SEQ ID NO: 506705 - DNA, 55 bp, Artificial
  Synthetic oligonucleotide
cggtttaccgggattacggctgggattcgcttttatgggaacagctctaagccgt

SEQ ID NO: 506706 - DNA, 55 bp, Artificial
  Synthetic oligonucleotide
cgttcccgatgataaatgtctttgcggatgcagatagcatgaatagcgagagaaa

SEQ ID NO: 506707 - DNA, 55 bp, Artificial
  Synthetic oligonucleotide
ctccagagcggtggctcgcagtcctctacgcgtaagagtaacttcgcagtcttcg

SEQ ID NO: 506708 - DNA, 55 bp, Artificial
  Synthetic oligonucleotide
ctgagtactatcgctatgggatagggtagggagcttctacgggctttatcgcagg

SEQ ID NO: 506709 - DNA, 55 bp, Artificial
  Synthetic oligonucleotide
ctgtcggttatctccgtatgagtcatagcttttcgattttcgggccaaagatagc

SEQ ID NO: 506710 - DNA, 55 bp, Artificial
  Synthetic oligonucleotide
gaaccggccttcccctttacgacaaacatattgtcccgctcaatcccgtaccggg

SEQ ID NO: 506711 - DNA, 55 bp, Artificial
  Synthetic oligonucleotide
gaggcgatacataggtgccccgtcctgactcagagagaagtgcagctgaaggccc

SEQ ID NO: 506712 - DNA, 55 bp, Artificial
  Synthetic oligonucleotide
gagggagaggtagaccggtagataagggaagcgctgctcgactccggccttagtc

SEQ ID NO: 506713 - DNA, 55 bp, Artificial
  Synthetic oligonucleotide
gatctgagctgccaatccaaaagcaaacgccattacctgactactgatactatcg

SEQ ID NO: 506714 - DNA, 55 bp, Artificial
  Synthetic oligonucleotide
gatgtatacggatgcaacctgttacgagagcgagatgcgctatcctacggatgcg

SEQ ID NO: 506715 - DNA, 55 bp, Artificial
  Synthetic oligonucleotide
gcacatcctgtatcgtgcggatgacgcctaccgaggggtaggagggtgcgatctg

SEQ ID NO: 506716 - DNA, 55 bp, Artificial
  Synthetic oligonucleotide
gcgaccttcgcattcgggtccaaccggataatctccgttcccaccaagttgctga

SEQ ID NO: 506717 - DNA, 55 bp, Artificial
  Synthetic oligonucleotide
gcgcagagtgcagccgatacgctcagctacacgacggcagctatatatcgccccg

SEQ ID NO: 506718 - DNA, 55 bp, Artificial
  Synthetic oligonucleotide
gcgtggagtgacagcccactggactattgaagattctgagccgataccctcttta

SEQ ID NO: 506719 - DNA, 55 bp, Artificial
  Synthetic oligonucleotide
ggaaagccaccagatactcaccctcgctctttaccaccgatggaaaagtacaata

SEQ ID NO: 506720 - DNA, 55 bp, Artificial
  Synthetic oligonucleotide
ggaataccggttaccgtacatactatgcggttctactaaaagtcagctcggaagg

SEQ ID NO: 506721 - DNA, 55 bp, Artificial
  Synthetic oligonucleotide
ggatcgctgggtatagaccggggagcgatgttgggtaaaagtgttggtggcatgt

SEQ ID NO: 506722 - DNA, 55 bp, Artificial
  Synthetic oligonucleotide
ggattccggttcctttgattggggttcgagtccccacgggatcacagagccaaaa

SEQ ID NO: 506723 - DNA, 55 bp, Artificial
  Synthetic oligonucleotide
ggctgcaggaatgaagtgtagcagttgtatcggtctgaagcgaaagtccgtatcg

SEQ ID NO: 506724 - DNA, 55 bp, Artificial
  Synthetic oligonucleotide
gggaaacgtaatgaacctaccctatgagaaaggaacgttcgatctgattactgct

SEQ ID NO: 506725 - DNA, 55 bp, Artificial
  Synthetic oligonucleotide
ggggattaaaacgattttgcggtgctgaaccaacattcagcgatgtaaatggtac

SEQ ID NO: 506726 - DNA, 55 bp, Artificial
  Synthetic oligonucleotide
gggtatacaagctgcttccattcagattatgccgcctacagctcctccgatgctg

SEQ ID NO: 506727 - DNA, 55 bp, Artificial
  Synthetic oligonucleotide
gggtcgttcccgtcataaccgaaacagtagaaatagggcattatgcaacaacgaa

SEQ ID NO: 506728 - DNA, 55 bp, Artificial
  Synthetic oligonucleotide
ggttcataacccaaaccgttacttgtcccagaatatatccggacaatgctcctac

SEQ ID NO: 506729 - DNA, 55 bp, Artificial
  Synthetic oligonucleotide
gtaagaatcggggcgtgttgtatcgatgcgagaaaagcttctaatgtttgtcccg

SEQ ID NO: 506730 - DNA, 55 bp, Artificial
  Synthetic oligonucleotide
gtaataagtttcccacaccctcttagtggattcattacctgtatctgtcggatcc

SEQ ID NO: 506731 - DNA, 55 bp, Artificial
  Synthetic oligonucleotide
gtactgtcccggagttaccctctggatgcacagtaacttccggattctccgaact

SEQ ID NO: 506732 - DNA, 55 bp, Artificial
  Synthetic oligonucleotide
gtccggttcaaataagatcgatactcagctatccatccgtgcaattgatcaggca

SEQ ID NO: 506733 - DNA, 55 bp, Artificial
  Synthetic oligonucleotide
gtgccctgcaataatagggagtggtggtaacctatattgctttgcgctccgacct

SEQ ID NO: 506734 - DNA, 55 bp, Artificial
  Synthetic oligonucleotide
tactgcggattgaaacctccgatccggaactttatagaaaactccacccgaacaa

SEQ ID NO: 506735 - DNA, 55 bp, Artificial
  Synthetic oligonucleotide
tagatatctcattagcgttttccggattacgggtaatctcaatcggttgcaacgg

SEQ ID NO: 506736 - DNA, 55 bp, Artificial
  Synthetic oligonucleotide
ttacggtggatatgatgctacccagacccgggaaggtaagcctgtagctacgttc

SEQ ID NO: 506737 - DNA, 55 bp, Artificial
  Synthetic oligonucleotide
aaagagtcgaaatacccatcgtaatagcactatgaggaactgcctcattggagtg

SEQ ID NO: 506738 - DNA, 55 bp, Artificial
  Synthetic oligonucleotide
acatcttcgtccgtaataccgtgaatcgctgtcgactccggtggaatgggcattt

SEQ ID NO: 506739 - DNA, 55 bp, Artificial
  Synthetic oligonucleotide
actatccctcctccgactggtcgacggctctctatgctcccgagggtacggcaca

SEQ ID NO: 506740 - DNA, 55 bp, Artificial
  Synthetic oligonucleotide
actgggccccggtaatccgcgaaggtatgcatgtagacccgctgactattatggc

SEQ ID NO: 506741 - DNA, 55 bp, Artificial
  Synthetic oligonucleotide
agagaaacggtttctggaggcccagaaagtattgtcctggaacaaagcgatcgca

SEQ ID NO: 506742 - DNA, 55 bp, Artificial
  Synthetic oligonucleotide
agccgaacaaccgttaaaggcatgtccgtctgccgaagtttccacagccggagca

SEQ ID NO: 506743 - DNA, 55 bp, Artificial
  Synthetic oligonucleotide
agtcaggcggacgagcagtgaatgacagggtttagatcgagggtggtaacgaaaa

SEQ ID NO: 506744 - DNA, 55 bp, Artificial
  Synthetic oligonucleotide
ataacgtgctaatattcgtgtcagagctgatgttactcccggtttgtcacctccg

SEQ ID NO: 506745 - DNA, 55 bp, Artificial
  Synthetic oligonucleotide
cacccctcaatcagacggaggaaatctgtcttttgccggtggaacttctcacgaa

SEQ ID NO: 506746 - DNA, 55 bp, Artificial
  Synthetic oligonucleotide
cagctttgtcgccaattcgttaagtgggccgagtagggcttgtatgattacggga

SEQ ID NO: 506747 - DNA, 55 bp, Artificial
  Synthetic oligonucleotide
ccccacggtattcagcatactgaggaaggtgtcgagtggtacgatccccgatggg

SEQ ID NO: 506748 - DNA, 55 bp, Artificial
  Synthetic oligonucleotide
ccccgtagtgaataggcacactatgaccgttaacccaatcgggtgtactctttac

SEQ ID NO: 506749 - DNA, 55 bp, Artificial
  Synthetic oligonucleotide
cccgactcctgttccgagtttagggctttatctggctcttacatgtttcggatta

SEQ ID NO: 506750 - DNA, 55 bp, Artificial
  Synthetic oligonucleotide
cggtgaattacagacccgtcagaccattgggaatttcagaagacattcccagcaa

SEQ ID NO: 506751 - DNA, 55 bp, Artificial
  Synthetic oligonucleotide
cggtataagaatagttatcacgcatataccggttatacctcctcaccctcacgac

SEQ ID NO: 506752 - DNA, 55 bp, Artificial
  Synthetic oligonucleotide
cggaatctatccccagccctcccaatttattcaacatatccttcaatgcgacctt

SEQ ID NO: 506753 - DNA, 55 bp, Artificial
  Synthetic oligonucleotide
cgctgcacaaaaggcctaagttattttgaaccattgccaagctcggctcataggc

SEQ ID NO: 506754 - DNA, 55 bp, Artificial
  Synthetic oligonucleotide
cgctgatgaatctcttcgcccgagagatactgctgactcctcagatcatcgatcg

SEQ ID NO: 506755 - DNA, 55 bp, Artificial
  Synthetic oligonucleotide
cgccgactactgtacccctcagaggtgtcatcgctgtccgttctccgtctcacct

SEQ ID NO: 506756 - DNA, 55 bp, Artificial
  Synthetic oligonucleotide
cgcaaaaggctaccgcaatccgtctttccgcgagatgtacctctacggccccgct

SEQ ID NO: 506757 - DNA, 55 bp, Artificial
  Synthetic oligonucleotide
cgagaaaggtagcgatgaagcatttacaggcacagtcaaatttaagaacggtaca

SEQ ID NO: 506758 - DNA, 55 bp, Artificial
  Synthetic oligonucleotide
ccggatttggagaaacccaatggcgtagctgctaaggctatgaaagccagagcgc

SEQ ID NO: 506759 - DNA, 55 bp, Artificial
  Synthetic oligonucleotide
ccgccagccaacaagcccattacaccagccactccgaaaattaaaccgactacga

SEQ ID NO: 506760 - DNA, 55 bp, Artificial
  Synthetic oligonucleotide
ccgatgccacttcacccgatagaggccgaagccgtgaggcctacctccgtgacct

SEQ ID NO: 506761 - DNA, 55 bp, Artificial
  Synthetic oligonucleotide
ccctatcttcaaggatagccaaagcatctattcctttctggctctgagacaaaag

SEQ ID NO: 506762 - DNA, 55 bp, Artificial
  Synthetic oligonucleotide
cccgccttttggacctaccgataatcagtatgatactacttcgctaactgtttca

SEQ ID NO: 506763 - DNA, 54 bp, Artificial
  Synthetic oligonucleotide
gcttacttacagcctaacccaagttgaattcttctcaggtgcagatgcagggta

SEQ ID NO: 506764 - DNA, 54 bp, Artificial
  Synthetic oligonucleotide
aaccggacggcccattgcaagttgtctctatcctggttagtggtaggcagataa

SEQ ID NO: 506765 - DNA, 54 bp, Artificial
  Synthetic oligonucleotide
tatgaatatcgagcctgcacaagtcgatataatcggcaggacgacttcttcggg

SEQ ID NO: 506766 - DNA, 53 bp, Artificial
  Synthetic oligonucleotide
agccgttttacgtaaacgacttgtctggcaaattctttggaaggaacagcagg

SEQ ID NO: 506767 - DNA, 53 bp, Artificial
  Synthetic oligonucleotide
actccctcacctgtcccacactacccggtgaagactccatcgcactggtagca

SEQ ID NO: 506768 - DNA, 53 bp, Artificial
  Synthetic oligonucleotide
aacaagtgctgagcagtctccaagataaccctcaagtgctactgtgtatatac

SEQ ID NO: 506769 - DNA, 52 bp, Artificial
  Synthetic oligonucleotide
cccgcacacagctactgctcttgagcaaagatacgcttttatcacccgcaga

SEQ ID NO: 506770 - DNA, 51 bp, Artificial
  Synthetic oligonucleotide
ttcaacggatcgcggtggtatcggccgcggattatctcacatatacgctgg

SEQ ID NO: 506771 - DNA, 50 bp, Artificial
  Synthetic oligonucleotide
gcacgggaaacgacagccacctcgtcggaaacttttacgttcaaccgtac

SEQ ID NO: 506772 - DNA, 50 bp, Artificial
  Synthetic oligonucleotide
aaccgaaagtgccgttgtccgagatcgtaaagaaacctgtggaagagtgg

SEQ ID NO: 506773 - DNA, 55 bp, Artificial
  Synthetic oligonucleotide
ggaaactacagtgcaacccaagccttcctaacgacattgcggcgcgaagataggt

SEQ ID NO: 506774 - DNA, 55 bp, Artificial
  Synthetic oligonucleotide
gctttcaggtcaagtccatagcccgttttgagtcggtttcaaaccaaggaaaggc

SEQ ID NO: 506775 - DNA, 55 bp, Artificial
  Synthetic oligonucleotide
gccacatctgctcttttgcgatgaagattatatccgattaggcagccgcatcaag

SEQ ID NO: 506776 - DNA, 55 bp, Artificial
  Synthetic oligonucleotide
gcacaattcctttcacagaaatgtgactccatgattcttacctctgccacaccgc

SEQ ID NO: 506777 - DNA, 55 bp, Artificial
  Synthetic oligonucleotide
gatagagtgtactctccttattcttctttcctcgaacacgacgtaggattgcctc

SEQ ID NO: 506778 - DNA, 55 bp, Artificial
  Synthetic oligonucleotide
gacagtaaccggcaagcgaactgataccgtaagggtgggagagtgtgcccgtttt

SEQ ID NO: 506779 - DNA, 55 bp, Artificial
  Synthetic oligonucleotide
cttgcgcaggcggttataacggttgtaaaccggcgaaacaaggagaaagccccaa

SEQ ID NO: 506780 - DNA, 55 bp, Artificial
  Synthetic oligonucleotide
cttgccccatcgcgacgcaaacgcagttgccacgttttggccgcagccttagagg

SEQ ID NO: 506781 - DNA, 55 bp, Artificial
  Synthetic oligonucleotide
ctacacctcgctcgacatctatcgctacgaggtctactacgagatgatgcgccgg

SEQ ID NO: 506782 - DNA, 55 bp, Artificial
  Synthetic oligonucleotide
cggattgcacgtctgcattatgtgtacagacccgatagaactaaccacggatagc

SEQ ID NO: 506783 - DNA, 55 bp, Artificial
  Synthetic oligonucleotide
cgctatttctttcctatgggagcatacacagcctaccttctggagtatgacccca

SEQ ID NO: 506784 - DNA, 55 bp, Artificial
  Synthetic oligonucleotide
cgctacctcagcattagaatctgttcgattcgtaaaagataaagggtgcctctct

SEQ ID NO: 506785 - DNA, 55 bp, Artificial
  Synthetic oligonucleotide
cgcgcccggttttgttggttgccgacgtaatgaaatgcggcggatattcctccca

SEQ ID NO: 506786 - DNA, 55 bp, Artificial
  Synthetic oligonucleotide
cgcgatgattttagagaggttttgcagagtatgacccgtgtttcatgtgcaacca

SEQ ID NO: 506787 - DNA, 55 bp, Artificial
  Synthetic oligonucleotide
cgcctactgagtttatggcgtcgacaacgactctgaatcggcggttgcgaatggc

SEQ ID NO: 506788 - DNA, 55 bp, Artificial
  Synthetic oligonucleotide
cgaccgatagaccttaccgttctccttatcgacaatcgttgcgccgagtgcgccc

SEQ ID NO: 506789 - DNA, 55 bp, Artificial
  Synthetic oligonucleotide
ccttggtttgaaaccgactcaaaacgggctatggacttgacctgaaagcgctgca

SEQ ID NO: 506790 - DNA, 55 bp, Artificial
  Synthetic oligonucleotide
cccctgtacaatgggaacacccaaatcaaccgagccctgacggggcgacagacct

SEQ ID NO: 506791 - DNA, 55 bp, Artificial
  Synthetic oligonucleotide
ccaacggggcgtgtcgtactgccgtatggtcttgacgttacctttgacaagaccg

SEQ ID NO: 506792 - DNA, 55 bp, Artificial
  Synthetic oligonucleotide
ccaacgccacagctatcaagtgcctaagtcgccttttaccaacctttgcatagac

SEQ ID NO: 506793 - DNA, 55 bp, Artificial
  Synthetic oligonucleotide
catgcctcaggttgttctccgggcacccttggtttatattgccagttatctgcag

SEQ ID NO: 506794 - DNA, 55 bp, Artificial
  Synthetic oligonucleotide
catcctattccgttctcaatagtagtcctgcgggaaaagtgcgtccttacaacga

SEQ ID NO: 506795 - DNA, 55 bp, Artificial
  Synthetic oligonucleotide
cagtttccccgtcatctgtggatacatgacatactggctccatgtgacacaccga

SEQ ID NO: 506796 - DNA, 55 bp, Artificial
  Synthetic oligonucleotide
cagtccgggtgcgaaatggatcaatacgaagcagcgtcgctattcgcccagtctc

SEQ ID NO: 506797 - DNA, 55 bp, Artificial
  Synthetic oligonucleotide
cagcggatagcgtcaataggaatcaaaccaggactgaacttattggttggagcag

SEQ ID NO: 506798 - DNA, 55 bp, Artificial
  Synthetic oligonucleotide
agtctattcaaacgggaagtttatctcggcaaatatgaagctaccgacacaggta

SEQ ID NO: 506799 - DNA, 55 bp, Artificial
  Synthetic oligonucleotide
gggcgaacgccatcactacttcctttgtcgatgacgatataattattggtcttct

SEQ ID NO: 506800 - DNA, 55 bp, Artificial
  Synthetic oligonucleotide
aatgactcatcagcccgacatggaaaagaaactccgtcttctcttcatttgccta

SEQ ID NO: 506801 - DNA, 55 bp, Artificial
  Synthetic oligonucleotide
aaatgacgaagcgccctgtctgacctcgtgggtgaagcatacttacggcaccgac

SEQ ID NO: 506802 - DNA, 55 bp, Artificial
  Synthetic oligonucleotide
aaactgaataacggctattcctacgtcatcttagccggagcgttgggttcgacgg

SEQ ID NO: 506803 - DNA, 55 bp, Artificial
  Synthetic oligonucleotide
gtctcgcccagtctgcataccactaaacacaaaggtgtctagctttaccaacttg

SEQ ID NO: 506804 - DNA, 53 bp, Artificial
  Synthetic oligonucleotide
aaaatccggatcaacttcacgatgcatggacttcggccatagagggaagccga

SEQ ID NO: 506805 - DNA, 52 bp, Artificial
  Synthetic oligonucleotide
gtatcataagacctcaagtgccaacatggcgttcgatgcttcctataacttc

SEQ ID NO: 506806 - DNA, 51 bp, Artificial
  Synthetic oligonucleotide
actcttcccgcctggaaggagtgtggagatgtcgccaaggttgataatttg

SEQ ID NO: 506807 - DNA, 51 bp, Artificial
  Synthetic oligonucleotide
ttctcgttcgttccagatggttaacgacaaaggcaaaacgctatgcgccat

SEQ ID NO: 506808 - DNA, 55 bp, Artificial
  Synthetic oligonucleotide
cgatgggacatcatccacgcaatgagggcccggtcacggtacacacgacggttga

SEQ ID NO: 506809 - DNA, 55 bp, Artificial
  Synthetic oligonucleotide
cgcggctatccacaacacgagggcaagaacgctcagggacaggtaggcgcgattc

SEQ ID NO: 506810 - DNA, 55 bp, Artificial
  Synthetic oligonucleotide
cggggttcccacggactccgaggtacgccacaatgggactatgagtacaccaggc

SEQ ID NO: 506811 - DNA, 55 bp, Artificial
  Synthetic oligonucleotide
cgtccatacctcgaccctacgccacctcgattcagttctgaccgggtcctgtccg

SEQ ID NO: 506812 - DNA, 55 bp, Artificial
  Synthetic oligonucleotide
cgtttggccgtaaagtcaccatcatgatcatcggaatcccacgggagtcactccc

SEQ ID NO: 506813 - DNA, 55 bp, Artificial
  Synthetic oligonucleotide
ctactcgagtgcagatgttacgcgatgcgtagacgcctactcgatagccgccgcc

SEQ ID NO: 506814 - DNA, 55 bp, Artificial
  Synthetic oligonucleotide
ctgctgactgctagacggtgaatcccgacggtgaatcccgaacgccttaattcgg

SEQ ID NO: 506815 - DNA, 55 bp, Artificial
  Synthetic oligonucleotide
cttgtacagtgtgtcatcgacgaaccggcaaggcaaatcgagatcggcagacccc

SEQ ID NO: 506816 - DNA, 55 bp, Artificial
  Synthetic oligonucleotide
tcgctcactccggtaggctttgtactttccgtacatatcggactggatctgaaat

SEQ ID NO: 506817 - DNA, 55 bp, Artificial
  Synthetic oligonucleotide
gagggtgaaggccgtcatcacctggtagaaggcgtagttcctaccgaccgcgagg

SEQ ID NO: 506818 - DNA, 55 bp, Artificial
  Synthetic oligonucleotide
tagaagccggttctcggcacgccagtctgatctcagtcagtcgtggggcggaacg

SEQ ID NO: 506819 - DNA, 55 bp, Artificial
  Synthetic oligonucleotide
gcatggggttgcgcctttctgtgaattgttcctgtatgcggtattggacagtcgt

SEQ ID NO: 506820 - DNA, 55 bp, Artificial
  Synthetic oligonucleotide
gccgttaacacatccgtcatgttttccctggtaatgtccggggaaattgatcccg

SEQ ID NO: 506821 - DNA, 55 bp, Artificial
  Synthetic oligonucleotide
gcgagacatccttctactgtatcagtggctcccctttcatctttccgtccgacgc

SEQ ID NO: 506822 - DNA, 55 bp, Artificial
  Synthetic oligonucleotide
tacctttcatgtcccgaattacaattttcgtagcacagatcggctcgccaagggg

SEQ ID NO: 506823 - DNA, 55 bp, Artificial
  Synthetic oligonucleotide
gctccccggattcaaagtgtgcagatcagggtggatgtagcgcctcccgatttaa

SEQ ID NO: 506824 - DNA, 55 bp, Artificial
  Synthetic oligonucleotide
gcttcagacaactcgctcgtgaccgggttgagcacggccgaaggggcagtttcag

SEQ ID NO: 506825 - DNA, 55 bp, Artificial
  Synthetic oligonucleotide
ggacaaccctgtggaataccgctccactttgtgtggaacgccttgtcaggaagga

SEQ ID NO: 506826 - DNA, 55 bp, Artificial
  Synthetic oligonucleotide
ggagcgatcactatggcgtcgtatcaggtgacgatgacaatgtggaacctgctgc

SEQ ID NO: 506827 - DNA, 55 bp, Artificial
  Synthetic oligonucleotide
ggccgaaaccgtaactaacggcccaccagccacgaaacggcatgtcgattgaccg

SEQ ID NO: 506828 - DNA, 55 bp, Artificial
  Synthetic oligonucleotide
ggcgtatggtccacgtcgagccgaagttttcgtcgtcactgccatgggcccaacg

SEQ ID NO: 506829 - DNA, 55 bp, Artificial
  Synthetic oligonucleotide
ggctgagcgcgaaagaaccccagttccgaagggcgaacagatgagtgaaccacgg

SEQ ID NO: 506830 - DNA, 55 bp, Artificial
  Synthetic oligonucleotide
gggacggtcggtattcatgccagtcctccgagtcggcgcagtttctggaagggtg

SEQ ID NO: 506831 - DNA, 55 bp, Artificial
  Synthetic oligonucleotide
gggagcagttcatggattccaggcttgtgactttcggcaatacctgatccaccgg

SEQ ID NO: 506832 - DNA, 55 bp, Artificial
  Synthetic oligonucleotide
gggccgagttcggggcacgcaactgtcctcctgtcgctgaacttgtttcggtgtc

SEQ ID NO: 506833 - DNA, 55 bp, Artificial
  Synthetic oligonucleotide
aacgcgttgcgagggacatagcagggtcctctcgagggattcggcggggtaggaa

SEQ ID NO: 506834 - DNA, 55 bp, Artificial
  Synthetic oligonucleotide
aataggattgacggaacaactcgacgccagggactgattcgatcagtgggacgac

SEQ ID NO: 506835 - DNA, 55 bp, Artificial
  Synthetic oligonucleotide
accgactgttcgtcccaacgatctggcaaccagttaccacagataacagcagcaa

SEQ ID NO: 506836 - DNA, 55 bp, Artificial
  Synthetic oligonucleotide
acggtcacgctttaccagcgcccacccaaataccgacgagcggtgtcgccaatcc

SEQ ID NO: 506837 - DNA, 55 bp, Artificial
  Synthetic oligonucleotide
atcgcggagagcaatccgtagaggccgtcccagatggacagcggcaccaagaggt

SEQ ID NO: 506838 - DNA, 55 bp, Artificial
  Synthetic oligonucleotide
caagatcagggtgggaataccggcgaaccacggagctccctgctgaatgtccagc

SEQ ID NO: 506839 - DNA, 55 bp, Artificial
  Synthetic oligonucleotide
caagttcaaaccggaccgccggttctgggttgtctatctctgtctcatgatggtg

SEQ ID NO: 506840 - DNA, 55 bp, Artificial
  Synthetic oligonucleotide
cacagcacgctctactgtctcttgacagcgcggcaacacccgtcctgcaagcacc

SEQ ID NO: 506841 - DNA, 55 bp, Artificial
  Synthetic oligonucleotide
caccaacaggctcgggtcgattcaaatgtccaagaacgacctccgcgccaggccg

SEQ ID NO: 506842 - DNA, 55 bp, Artificial
  Synthetic oligonucleotide
cacttcgtgacgactggtggtgccgaccaatggatcgtcaaccgttcgcgttcac

SEQ ID NO: 506843 - DNA, 55 bp, Artificial
  Synthetic oligonucleotide
cataagaacgcttactcgttgcttccaccacttgacaccagggaggggcccgcag

SEQ ID NO: 506844 - DNA, 55 bp, Artificial
  Synthetic oligonucleotide
ccattccacggatccattggatcagctattgaggtccaggactgcacaatcgtat

SEQ ID NO: 506845 - DNA, 55 bp, Artificial
  Synthetic oligonucleotide
cccaatcgttggtggcagaacgctccaccgccaccctgagagtgaacatttgtgc

SEQ ID NO: 506846 - DNA, 55 bp, Artificial
  Synthetic oligonucleotide
ccccatctcagctctgacgatcaaggcgtgactcgccacctctgatgcccatctg

SEQ ID NO: 506847 - DNA, 55 bp, Artificial
  Synthetic oligonucleotide
tgggtgggtggtagcccctcctcgtcaggagaggttccagtcggggtgtctgtgt

SEQ ID NO: 506848 - DNA, 55 bp, Artificial
  Synthetic oligonucleotide
cccgcacaaaatccggatacgaatcataggcgccccgccgcgcatagttcaccgc

SEQ ID NO: 506849 - DNA, 55 bp, Artificial
  Synthetic oligonucleotide
ccgtcagaggtggtctgtcggtgtggtctgggatactcaactaggggcagccacg

SEQ ID NO: 506850 - DNA, 55 bp, Artificial
  Synthetic oligonucleotide
ccgtgactctagacctgctgggccacgctcgtcaggtcgtcgttaccaaggacga

SEQ ID NO: 506851 - DNA, 55 bp, Artificial
  Synthetic oligonucleotide
cctgaccaaagccgtggaataggccaaatcgatcgccgccaacaactcctacacc

SEQ ID NO: 506852 - DNA, 55 bp, Artificial
  Synthetic oligonucleotide
cctggaggatcgaccacaacggatctcaccgtgatcagcagacgagacgagtggg

SEQ ID NO: 506853 - DNA, 55 bp, Artificial
  Synthetic oligonucleotide
tgcgggccataccctcggccctcgctaatttcaccccaccacgagcaatgtcctc

SEQ ID NO: 506854 - DNA, 55 bp, Artificial
  Synthetic oligonucleotide
tgccatgattgacagcacgtcgaaagtcattcttgttacgtcgtcagtaatgggg

SEQ ID NO: 506855 - DNA, 55 bp, Artificial
  Synthetic oligonucleotide
cgaccgacactgtggtgtcaacaaatgcagtctaaccatcagcgggacgcacacc

SEQ ID NO: 506856 - DNA, 55 bp, Artificial
  Synthetic oligonucleotide
tcgtgcccggcggtctggtgtcgaatctggacttcgtggaggggatcttcggcaa

SEQ ID NO: 506857 - DNA, 54 bp, Artificial
  Synthetic oligonucleotide
tgtccgcgttgctcaggaggaacagtcatgaggcgaacgggtctggtcattggg

SEQ ID NO: 506858 - DNA, 53 bp, Artificial
  Synthetic oligonucleotide
tgcggaaccgtatcacgtggatgtggaacgcctacccttacgagtcaagcgat

SEQ ID NO: 506859 - DNA, 53 bp, Artificial
  Synthetic oligonucleotide
aaccacgtggttctggggcccgtcgccgattatgagaatcagtgagtcagcct

SEQ ID NO: 506860 - DNA, 52 bp, Artificial
  Synthetic oligonucleotide
gagttgtgtcagcacgagtgctcctcggacagggacatgtgcaaccggcgtc

SEQ ID NO: 506861 - DNA, 52 bp, Artificial
  Synthetic oligonucleotide
cgatgctgagcacgcgagtcaggaaggggaggtgctgtcaggtgcacaagcc

SEQ ID NO: 506862 - DNA, 51 bp, Artificial
  Synthetic oligonucleotide
gtcgggatgggaaccgacaatcctcacccctagtcgcggggttacttttgc

SEQ ID NO: 506863 - DNA, 51 bp, Artificial
  Synthetic oligonucleotide
gcggcgggacttagggttagcggatgcaccttctggggtgcgtgctcgtct

SEQ ID NO: 506864 - DNA, 51 bp, Artificial
  Synthetic oligonucleotide
tcatccggacgtgggaagggaatccggtcaatgatgaccaaccgacacgtg

SEQ ID NO: 506865 - DNA, 51 bp, Artificial
  Synthetic oligonucleotide
tcccgtccggatgaggaggcacaccgtgtcgagactggctcttgtcgggcc

SEQ ID NO: 506866 - DNA, 51 bp, Artificial
  Synthetic oligonucleotide
gaagccaactcacctcgccactgttcggagcgggagtcgagacgctggtac

SEQ ID NO: 506867 - DNA, 51 bp, Artificial
  Synthetic oligonucleotide
cgacatccgggaaaactctcgttgtcgtttccaaagcgatcgggccccgat

SEQ ID NO: 506868 - DNA, 51 bp, Artificial
  Synthetic oligonucleotide
ccttagcagccactccgcgttcagcgccaatcgagccgtggacactacgat

SEQ ID NO: 506869 - DNA, 51 bp, Artificial
  Synthetic oligonucleotide
cccgaatactgtggacttgcgcttgcacgaatggaaatgcatatgaacgcg

SEQ ID NO: 506870 - DNA, 55 bp, Artificial
  Synthetic oligonucleotide
gctcaagcatggtcagaatacggtgttgttgccatcaaacacagatgccctgtgg

SEQ ID NO: 506871 - DNA, 55 bp, Artificial
  Synthetic oligonucleotide
gcgtttaccactgctaactcgctggttaaacaccaccagcatgctcatgataatt

SEQ ID NO: 506872 - DNA, 55 bp, Artificial
  Synthetic oligonucleotide
gcgtgttggtcgtgagcgcgttactcttctttcttgatgcttttactggtgcacc

SEQ ID NO: 506873 - DNA, 55 bp, Artificial
  Synthetic oligonucleotide
gcgtgtagtgacggtcaagtaaacgaatcacctatcgcagaggttttatcaccta

SEQ ID NO: 506874 - DNA, 55 bp, Artificial
  Synthetic oligonucleotide
gcgtcgcaaagaataatatggctatggccgcagcatttcttaaaaggggttcaga

SEQ ID NO: 506875 - DNA, 55 bp, Artificial
  Synthetic oligonucleotide
gcgggtgtagtactgcctaaagcggctattaaagcacagccttggatcagcgctt

SEQ ID NO: 506876 - DNA, 55 bp, Artificial
  Synthetic oligonucleotide
gcggaagttgcacatagctcaggtcgtaagatcggtgttgtgtctaatacttact

SEQ ID NO: 506877 - DNA, 55 bp, Artificial
  Synthetic oligonucleotide
gcgctaaattagcactcgattgacgactatttacgtcacccaaaccactgcgctg

SEQ ID NO: 506878 - DNA, 55 bp, Artificial
  Synthetic oligonucleotide
gcgcctcattggagagggtgaaaatgtccggcccagacaaatagtgtgggttgag

SEQ ID NO: 506879 - DNA, 55 bp, Artificial
  Synthetic oligonucleotide
tcaaaatacggtatctaatgcgggtaaaatacgagttggagacgagtctattcgc

SEQ ID NO: 506880 - DNA, 55 bp, Artificial
  Synthetic oligonucleotide
gccttacggtcatgccaccttgaccgcgaattttatgaactaacggctcagattc

SEQ ID NO: 506881 - DNA, 55 bp, Artificial
  Synthetic oligonucleotide
gcctcaatgacattgaatttgcctgcatccattaaacggtcaaactccggggtgt

SEQ ID NO: 506882 - DNA, 55 bp, Artificial
  Synthetic oligonucleotide
tcagccacagtgatgtggcagaggtgttgtgcgaatttgaaggggatgtgatagc

SEQ ID NO: 506883 - DNA, 55 bp, Artificial
  Synthetic oligonucleotide
tccgcaatcgggttattggagtatcgagcataaggactactcagcgccgcttgga

SEQ ID NO: 506884 - DNA, 55 bp, Artificial
  Synthetic oligonucleotide
gccataacatgtttcctagtgactgactatgacccagtggtacaccatttcgtct

SEQ ID NO: 506885 - DNA, 55 bp, Artificial
  Synthetic oligonucleotide
tcgatatgagtaagtatcagcatgctgcaagactatataggcaagctttcctcta

SEQ ID NO: 506886 - DNA, 55 bp, Artificial
  Synthetic oligonucleotide
tctgggtaaagggttgtgagtgtgctgatcacccggtccagttttaccggaactt

SEQ ID NO: 506887 - DNA, 55 bp, Artificial
  Synthetic oligonucleotide
gatgttcggtcataaaatacttcctcgtcaatctgaggccattatatagggctaa

SEQ ID NO: 506888 - DNA, 55 bp, Artificial
  Synthetic oligonucleotide
gatgggtttgatctcgctaacataagtgaagtgaaatatatcaggcgccgcttgg

SEQ ID NO: 506889 - DNA, 55 bp, Artificial
  Synthetic oligonucleotide
gagtggaaaccgtacatcccgcttgtttgtcggccaaaatatagcttgcggctgc

SEQ ID NO: 506890 - DNA, 55 bp, Artificial
  Synthetic oligonucleotide
gagtcgaaagatagagtgcgtagtgcgctcgaaaactctcaatttggcttccccg

SEQ ID NO: 506891 - DNA, 55 bp, Artificial
  Synthetic oligonucleotide
gaggctattagcgtatggcgtggcattatggtttgccctgcaaaacgagcgatac

SEQ ID NO: 506892 - DNA, 55 bp, Artificial
  Synthetic oligonucleotide
gagctattttcgttgaatgtgaaaggcgcgtttagcctaattaagcatgcgctac

SEQ ID NO: 506893 - DNA, 55 bp, Artificial
  Synthetic oligonucleotide
gactagtgtcatagtttacagactcaacacacgccgctagatttagccagcctga

SEQ ID NO: 506894 - DNA, 55 bp, Artificial
  Synthetic oligonucleotide
gacgtaatatgtggagcaacttagatgtcacatccgaaaagcagcctaatgactc

SEQ ID NO: 506895 - DNA, 55 bp, Artificial
  Synthetic oligonucleotide
gacctgcaacccagactcagcggttatgaagttgcctgatatcggtatttgcccg

SEQ ID NO: 506896 - DNA, 55 bp, Artificial
  Synthetic oligonucleotide
gacagtgatttggggcatcgttggcatgagtattggggttctgattgctgcccaa

SEQ ID NO: 506897 - DNA, 55 bp, Artificial
  Synthetic oligonucleotide
tgagctagacgcagctaaaacagagcaagatgaagtattagccgcgattaacgac

SEQ ID NO: 506898 - DNA, 55 bp, Artificial
  Synthetic oligonucleotide
tatttgccggtcagcttaattggctttcatcgcgactaaatgcatgttggggagc

SEQ ID NO: 506899 - DNA, 55 bp, Artificial
  Synthetic oligonucleotide
tattggtacttcggatgattgaactgctgcaatgtttgtcagtgcgtcatgctgc

SEQ ID NO: 506900 - DNA, 55 bp, Artificial
  Synthetic oligonucleotide
tatcgagttagtcgaaacaacggatacccggctgagagaggaagtagcggggacc

SEQ ID NO: 506901 - DNA, 55 bp, Artificial
  Synthetic oligonucleotide
tagttaggcaatcctatcaacgcaagtaaactaacgggaactcctagcttacttg

SEQ ID NO: 506902 - DNA, 55 bp, Artificial
  Synthetic oligonucleotide
tacgttcagactctcccgtgttcagatccgtacggaccagatcgaatttataccc

SEQ ID NO: 506903 - DNA, 55 bp, Artificial
  Synthetic oligonucleotide
tacgttacgcgcatactcttctacggtgtaattcattgaacacgcactacgcgag

SEQ ID NO: 506904 - DNA, 55 bp, Artificial
  Synthetic oligonucleotide
taactaaagaggttgtttacttacccgaaaccttaacgctatcagaggcgctaaa

SEQ ID NO: 506905 - DNA, 55 bp, Artificial
  Synthetic oligonucleotide
taacgagccgtggtcgaatagattactttcctcgttcgtttattgaggttaactc

SEQ ID NO: 506906 - DNA, 55 bp, Artificial
  Synthetic oligonucleotide
taacacaggcaattaatgacacgcctttagaaaacccgctcaaccatactcgagc

SEQ ID NO: 506907 - DNA, 55 bp, Artificial
  Synthetic oligonucleotide
gtggcgtgggatataacgcacaaacattgactgtccaagcggcgctgagtagtcc

SEQ ID NO: 506908 - DNA, 55 bp, Artificial
  Synthetic oligonucleotide
gtgatctcaattcgctcagcgatatcaccacttagcttgtaagcgatgtgcccac

SEQ ID NO: 506909 - DNA, 55 bp, Artificial
  Synthetic oligonucleotide
gtctgtcactatttagtcgattaggatacgcagctcctgccctctataaggtaga

SEQ ID NO: 506910 - DNA, 55 bp, Artificial
  Synthetic oligonucleotide
gtccctatcaaccggtaaagtcactcagctaactgaaaatgcccgaattagacgc

SEQ ID NO: 506911 - DNA, 55 bp, Artificial
  Synthetic oligonucleotide
gtagagctttctacgatattttgcggctaagctatcgccatcaggtaaagacgct

SEQ ID NO: 506912 - DNA, 55 bp, Artificial
  Synthetic oligonucleotide
ggtgtgggcaccatgcgcaccaatgcgttcacccagtaagatttgtccccggcgt

SEQ ID NO: 506913 - DNA, 55 bp, Artificial
  Synthetic oligonucleotide
ggtgctctacgaggcgtgttggtcgtgagcgcgttactcttctttcttgatgctt

SEQ ID NO: 506914 - DNA, 55 bp, Artificial
  Synthetic oligonucleotide
ggtcgctttacctggggtggagttacaaacgtatgaatcagagacagtgcaagcg

SEQ ID NO: 506915 - DNA, 55 bp, Artificial
  Synthetic oligonucleotide
ggtatttaggcaaggctgagcctatgtagtgtggttattccccataaataggcga

SEQ ID NO: 506916 - DNA, 55 bp, Artificial
  Synthetic oligonucleotide
ggtatgcgctgcaaaaggtgactcgttaaaagtgggtgatactttagaagtacac

SEQ ID NO: 506917 - DNA, 55 bp, Artificial
  Synthetic oligonucleotide
ggcttagcaggatctggttaccttacattgagcaacttagggactgactctaatg

SEQ ID NO: 506918 - DNA, 55 bp, Artificial
  Synthetic oligonucleotide
ggctacgaagcacaagttgattggcatttaaacgatgactggtgcttagaggtat

SEQ ID NO: 506919 - DNA, 55 bp, Artificial
  Synthetic oligonucleotide
ggctaaatatagtagttaagtgattagtgaaactgcttttggcgttaccaccgct

SEQ ID NO: 506920 - DNA, 55 bp, Artificial
  Synthetic oligonucleotide
ggcggcgactttacaacaattgttcgctcagacagtggttgagcatgttagtcac

SEQ ID NO: 506921 - DNA, 55 bp, Artificial
  Synthetic oligonucleotide
ggccaagctaattgggcagcaatcagaaccccaatactcatgccaacgatgcccc

SEQ ID NO: 506922 - DNA, 55 bp, Artificial
  Synthetic oligonucleotide
gcttagcatcaaactcaccagtagacatttcgcgcacaggattatcaacccgacc

SEQ ID NO: 506923 - DNA, 55 bp, Artificial
  Synthetic oligonucleotide
gctgtcgtaaaccaagcaccagaactataccatggcgtacatgctgcggtaccat

SEQ ID NO: 506924 - DNA, 55 bp, Artificial
  Synthetic oligonucleotide
gctggagcgctgcgtctcaatatcaaagagtcgaatgctgtccagttcatcatcg

SEQ ID NO: 506925 - DNA, 55 bp, Artificial
  Synthetic oligonucleotide
gctgccgtcgtaatgggaagtagtcgacgaaattgtgaagatatatgtgcgccgc

SEQ ID NO: 506926 - DNA, 55 bp, Artificial
  Synthetic oligonucleotide
gctcgtcaatttcacgttgcttgattgcagcaagtaccatacgaatagggttaag

SEQ ID NO: 506927 - DNA, 55 bp, Artificial
  Synthetic oligonucleotide
cccatcggcgggtgaaccacctcctacgatacatgtttatacagtggtaggagcg

SEQ ID NO: 506928 - DNA, 55 bp, Artificial
  Synthetic oligonucleotide
cccagtatttgcgctcgcaggtcggagagttattgtgaccttctcacctttatga

SEQ ID NO: 506929 - DNA, 55 bp, Artificial
  Synthetic oligonucleotide
ccacacttagcagatcaaattcgctggttagatgcacagcagctcaaagaagagg

SEQ ID NO: 506930 - DNA, 55 bp, Artificial
  Synthetic oligonucleotide
ccaacaacgctgttaaaatttggccgcaattccttatcttagatccacatgtgag

SEQ ID NO: 506931 - DNA, 55 bp, Artificial
  Synthetic oligonucleotide
cattaacccgttgaggttggactttattaacgataagtgtgaaggcctattcgca

SEQ ID NO: 506932 - DNA, 55 bp, Artificial
  Synthetic oligonucleotide
catgataagtgtgaggttacgaggttttgcagtgcgaaatcatgacattgctttt

SEQ ID NO: 506933 - DNA, 55 bp, Artificial
  Synthetic oligonucleotide
caggcacataacatgaaccaacagctatctgtatgcaaaagaaacggtcgcaaag

SEQ ID NO: 506934 - DNA, 55 bp, Artificial
  Synthetic oligonucleotide
tgccattgacacaattaccgatgtcacaataagcgtaattgagtgtgctaacgcg

SEQ ID NO: 506935 - DNA, 55 bp, Artificial
  Synthetic oligonucleotide
cagcgcccgtttagaattgatgacgttattgaagtggataaccgtttggggatcg

SEQ ID NO: 506936 - DNA, 55 bp, Artificial
  Synthetic oligonucleotide
cagccacctgttttagcactcatggtcgaattattatgggaacatacgcatagta

SEQ ID NO: 506937 - DNA, 55 bp, Artificial
  Synthetic oligonucleotide
cagaagattggcgttatgccacagatccgcatggaagcaaagtgatattaagtgg

SEQ ID NO: 506938 - DNA, 55 bp, Artificial
  Synthetic oligonucleotide
caccggcaggaacagtaattggtgcctttgctatgcgagacatagttcccctccg

SEQ ID NO: 506939 - DNA, 55 bp, Artificial
  Synthetic oligonucleotide
cacaataactctccgacctgcgagcgcaaatactgggattgtatttcgtcgtgtc

SEQ ID NO: 506940 - DNA, 55 bp, Artificial
  Synthetic oligonucleotide
caattacatccacattcaaccctttaactttcacagacttcatcaaggcatgcca

SEQ ID NO: 506941 - DNA, 55 bp, Artificial
  Synthetic oligonucleotide
caagaggggcgagatcaagttcagagttatcaagcaccgcttctacacatgcgag

SEQ ID NO: 506942 - DNA, 55 bp, Artificial
  Synthetic oligonucleotide
attcgaaagttgtccgttgtgcgcataagtgatctctctgccccataactcccgc

SEQ ID NO: 506943 - DNA, 55 bp, Artificial
  Synthetic oligonucleotide
attcagggctatgattggatgcgtcgcctataaatgcgcagtctgtgcggtttaa

SEQ ID NO: 506944 - DNA, 55 bp, Artificial
  Synthetic oligonucleotide
tgtaatgcccacgaactaaaagagcgcatggtattaggccgtgctttgcatagtc

SEQ ID NO: 506945 - DNA, 55 bp, Artificial
  Synthetic oligonucleotide
atgagagctaacaggtaggagtatcatgccgacaactaaccaaaataccgctttt

SEQ ID NO: 506946 - DNA, 55 bp, Artificial
  Synthetic oligonucleotide
atctctgtttacggcgaccgttcatttacgttcgacatgaaaacgccaccggctg

SEQ ID NO: 506947 - DNA, 55 bp, Artificial
  Synthetic oligonucleotide
atacttacctgctaagttctgggcctagggaaaggctcaagattgagccgtgcgc

SEQ ID NO: 506948 - DNA, 55 bp, Artificial
  Synthetic oligonucleotide
ttacgtgtaaatgtaacaggtctaatttggttaggtgttctttcgcttggacgca

SEQ ID NO: 506949 - DNA, 55 bp, Artificial
  Synthetic oligonucleotide
ttgaatgggtgtctgttttattcatctagcacatgatgagccagaaaaggaacag

SEQ ID NO: 506950 - DNA, 55 bp, Artificial
  Synthetic oligonucleotide
acgtatcaaagcccgagcatttatggctcgttttcaagtgaaggttttagcgcgc

SEQ ID NO: 506951 - DNA, 55 bp, Artificial
  Synthetic oligonucleotide
accctcgccaggctctgcgacttcgccaccgattaacacttcagccccttccttc

SEQ ID NO: 506952 - DNA, 55 bp, Artificial
  Synthetic oligonucleotide
acaagcagatcactccgacgcattaagctctatgctacgtagtaaagtagttgaa

SEQ ID NO: 506953 - DNA, 55 bp, Artificial
  Synthetic oligonucleotide
aatgacttgagccgaagccgagtaagactgttgaaaacgtaacaagttggccgcc

SEQ ID NO: 506954 - DNA, 55 bp, Artificial
  Synthetic oligonucleotide
ttgcgcctaaggtgagcgagagcaatacaatacttaccagtgggagtaattcgcc

SEQ ID NO: 506955 - DNA, 55 bp, Artificial
  Synthetic oligonucleotide
gaacagcttcagattgcttatttagagcacaaaggggcagcaaaactgatatttg

SEQ ID NO: 506956 - DNA, 55 bp, Artificial
  Synthetic oligonucleotide
cttggtcgtgatggacttaaagtaaatcgggcaatggaattggtggttgcggcgg

SEQ ID NO: 506957 - DNA, 55 bp, Artificial
  Synthetic oligonucleotide
cttgcgttgtcgtagctcactgggcggttgtctttactacggctagtacgcgttg

SEQ ID NO: 506958 - DNA, 55 bp, Artificial
  Synthetic oligonucleotide
ctggtagcgaagagtttgagtcgttaatcccacacttacctgaaatgggcttgca

SEQ ID NO: 506959 - DNA, 55 bp, Artificial
  Synthetic oligonucleotide
ctggacaatgcactgatagctaaggtcatcaacgaaacggaatatgctcagctga

SEQ ID NO: 506960 - DNA, 55 bp, Artificial
  Synthetic oligonucleotide
ctgcgtggcttattggttttaggctcctctttattcgctatgttgggcgtagcac

SEQ ID NO: 506961 - DNA, 55 bp, Artificial
  Synthetic oligonucleotide
ctgaacctaatatatgccccgcccgttgaaaccttgctttggctgtttgttcacc

SEQ ID NO: 506962 - DNA, 55 bp, Artificial
  Synthetic oligonucleotide
cgtttgcgacagagaaaagatgcgctattacttccctgatcccgttgtgcaacgc

SEQ ID NO: 506963 - DNA, 55 bp, Artificial
  Synthetic oligonucleotide
cgtggttgatagggcagcaaggtaaatggcaatccttagaagtggtcgactggcg

SEQ ID NO: 506964 - DNA, 55 bp, Artificial
  Synthetic oligonucleotide
cgtggaagttaggcgcaacgtggaaagttactgacgagtttatggttcgatctgt

SEQ ID NO: 506965 - DNA, 55 bp, Artificial
  Synthetic oligonucleotide
cgtcgggctcaattcgcgtcgccacgttagtgaggtgctatgctgatccagttga

SEQ ID NO: 506966 - DNA, 55 bp, Artificial
  Synthetic oligonucleotide
cgtaaaagtaggtaacgcgcacaattcgaactcagatatcatgttcttactgggc

SEQ ID NO: 506967 - DNA, 55 bp, Artificial
  Synthetic oligonucleotide
cggctaacctttaggcaattgtagaatgcgccaatacccatctaagacatcgacc

SEQ ID NO: 506968 - DNA, 55 bp, Artificial
  Synthetic oligonucleotide
cggagcaattagacgcaatgagcgacggtaactcgcaatctagccagggttcttc

SEQ ID NO: 506969 - DNA, 55 bp, Artificial
  Synthetic oligonucleotide
cgctggtatggggcaagcctcggtaagtatcagtgcgagttccgacagccaagac

SEQ ID NO: 506970 - DNA, 55 bp, Artificial
  Synthetic oligonucleotide
cgctgccacaggtttagtttggtaccctgatagacaagcggagattcttttggcg

SEQ ID NO: 506971 - DNA, 55 bp, Artificial
  Synthetic oligonucleotide
cgctagcgcattatgtgaagctagtgcaggagaagtatgggtgacgaaagaccga

SEQ ID NO: 506972 - DNA, 55 bp, Artificial
  Synthetic oligonucleotide
cgcctcccatgcatcatccatttgttctagggtggccgtgtcaagagacagccca

SEQ ID NO: 506973 - DNA, 55 bp, Artificial
  Synthetic oligonucleotide
cgcatttattgcagcggaagccagaaaatgagccaaacagtagcatcacaaactg

SEQ ID NO: 506974 - DNA, 55 bp, Artificial
  Synthetic oligonucleotide
cgcattcactgaataaccacctcggaactgataagaatttcaacggcattcaagc

SEQ ID NO: 506975 - DNA, 55 bp, Artificial
  Synthetic oligonucleotide
cgatagtgatacctgaaatacctgagtctgccgcagcttgcagtacgccatcatt

SEQ ID NO: 506976 - DNA, 55 bp, Artificial
  Synthetic oligonucleotide
cctgtgcgcttggtatctttccagcctcctaactttgccagttcctgatacgccc

SEQ ID NO: 506977 - DNA, 55 bp, Artificial
  Synthetic oligonucleotide
cctggattgctccgcttaaatcccactcttcacggtagcgatcgcaaggctgatg

SEQ ID NO: 506978 - DNA, 55 bp, Artificial
  Synthetic oligonucleotide
cctcggtaggggattcccttttggcacgttgacggttaatattctgggttcattg

SEQ ID NO: 506979 - DNA, 55 bp, Artificial
  Synthetic oligonucleotide
cctagaaagaacccaaagggcagcgcatgtttggtatttatgctgcgttatcgcc

SEQ ID NO: 506980 - DNA, 55 bp, Artificial
  Synthetic oligonucleotide
ccgtgagaagtctaagacacaagcacgcatcatcgctgctctagagttggctgag

SEQ ID NO: 506981 - DNA, 55 bp, Artificial
  Synthetic oligonucleotide
ccggtgtttattgagaggcgcgattatataccatcttgcgatgagtgagtatcgc

SEQ ID NO: 506982 - DNA, 55 bp, Artificial
  Synthetic oligonucleotide
cccgtcagtacggcgttgaccgacgccctggtcgaattaagtgatgacagcgacg

SEQ ID NO: 506983 - DNA, 55 bp, Artificial
  Synthetic oligonucleotide
cccatttgccttcttagggctacaccagctagatgcgaagcgctcagtcgtgcgc

SEQ ID NO: 506984 - DNA, 54 bp, Artificial
  Synthetic oligonucleotide
ttgcatgaattcttagctggtaagaaggcgcctaaactggaaggtgtaaagcaa

SEQ ID NO: 506985 - DNA, 54 bp, Artificial
  Synthetic oligonucleotide
agtaaaccaaccatgtttagccgtagaaattcgtaattctcggatccttctatc

SEQ ID NO: 506986 - DNA, 54 bp, Artificial
  Synthetic oligonucleotide
agaacacgacacgtttatacacatatcagcgcttaaacatatgagccgtaagcc

SEQ ID NO: 506987 - DNA, 54 bp, Artificial
  Synthetic oligonucleotide
aaaataactcggttcctatgtgctcggaataagcatgtgtaagttgcatgagtt

SEQ ID NO: 506988 - DNA, 53 bp, Artificial
  Synthetic oligonucleotide
gccgcgaacatggccgtacgtcagttcaattgtggaacctacaacagctaggt

SEQ ID NO: 506989 - DNA, 52 bp, Artificial
  Synthetic oligonucleotide
gcgacacggcttagaacaagccagcgaatacccttatttgtctcgggtgatg

SEQ ID NO: 506990 - DNA, 52 bp, Artificial
  Synthetic oligonucleotide
gcatcagatgggtcaatacagtatccacagttgacacccgcaaatgcattgc

SEQ ID NO: 506991 - DNA, 52 bp, Artificial
  Synthetic oligonucleotide
cagcggcaaagaataagatctgctcactggtttgcgcttgacgctcttccac

SEQ ID NO: 506992 - DNA, 52 bp, Artificial
  Synthetic oligonucleotide
atgtaagttatgtcgctcacccatgattgattcggcgcaggtgggttaaatt

SEQ ID NO: 506993 - DNA, 52 bp, Artificial
  Synthetic oligonucleotide
ttttggccatcatggtgttctctaccccgatcagccactgcttgccctcttt

SEQ ID NO: 506994 - DNA, 51 bp, Artificial
  Synthetic oligonucleotide
gccatagcctgagaggccaatagcagctatagcaaataaccatacgcgaag

SEQ ID NO: 506995 - DNA, 51 bp, Artificial
  Synthetic oligonucleotide
gaattccgcgtaaacacgcatactcttaacggtcaattcaaccctgccagt

SEQ ID NO: 506996 - DNA, 51 bp, Artificial
  Synthetic oligonucleotide
agccatccaccattttcagacatcgatacatatgaagcaacccctggataa

SEQ ID NO: 506997 - DNA, 50 bp, Artificial
  Synthetic oligonucleotide
gcagtcacaacgtatgcagcttggttatcgggacttaagagctttacgtc

SEQ ID NO: 506998 - DNA, 50 bp, Artificial
  Synthetic oligonucleotide
ttttgcgttgaccctggggatgttcacctgtgcgttagtgtttgcttctg

SEQ ID NO: 506999 - DNA, 55 bp, Artificial
  Synthetic oligonucleotide
gcgctcagagactttcttgatgcatacgattgagcgtgaacggttgcacggacac

SEQ ID NO: 507000 - DNA, 55 bp, Artificial
  Synthetic oligonucleotide
gcgtgcaggctgagcagctagaggttagccgcgtcctgcgcaacacttacggtct

SEQ ID NO: 507001 - DNA, 55 bp, Artificial
  Synthetic oligonucleotide
gcgttatcccatttcctgcttcgttccaggaccagtaccgaatcgcccgagatgg

SEQ ID NO: 507002 - DNA, 55 bp, Artificial
  Synthetic oligonucleotide
gcgttcgctgtggggatcgtgcatggataaacctcgtgtgaaccggcggcgattc

SEQ ID NO: 507003 - DNA, 55 bp, Artificial
  Synthetic oligonucleotide
gctccaaaatttcggagagccaccatgagtcgtgtgcgtctgctatcgctgatcc

SEQ ID NO: 507004 - DNA, 55 bp, Artificial
  Synthetic oligonucleotide
gctgcgcccgggtactgtgcgctgatacgctccagtgataacaaggccatgacgg

SEQ ID NO: 507005 - DNA, 55 bp, Artificial
  Synthetic oligonucleotide
gctgctactccaactgctattcgaattgccatggatcgagatcctggcgctaagc

SEQ ID NO: 507006 - DNA, 55 bp, Artificial
  Synthetic oligonucleotide
gctgtcagcaggactcgaacatgacgaggggttggcgctccgagagagtcatttc

SEQ ID NO: 507007 - DNA, 55 bp, Artificial
  Synthetic oligonucleotide
ggaagttgactacttgcggcgtgaagaatgggtgacgcaggcagacgatattctc

SEQ ID NO: 507008 - DNA, 55 bp, Artificial
  Synthetic oligonucleotide
ggagcgtcatcaaacagtcatcactctgtcgtgaaataaggattgggcgcggctc

SEQ ID NO: 507009 - DNA, 55 bp, Artificial
  Synthetic oligonucleotide
ggatagggttatatgtccggaaaagcgcaacagcagtcccgtctcaaagaattga

SEQ ID NO: 507010 - DNA, 55 bp, Artificial
  Synthetic oligonucleotide
ggatccgcccagttaatcacgacccttatcatcgaggtgcccaatggcgcgttcc

SEQ ID NO: 507011 - DNA, 55 bp, Artificial
  Synthetic oligonucleotide
ggcaatcacacaatgcgggtaaggttaacgcagggtgggaacgacagccagtgat

SEQ ID NO: 507012 - DNA, 55 bp, Artificial
  Synthetic oligonucleotide
ggccatcggggataaatcccctcgccacaaaggctcactcctacagtttgattgc

SEQ ID NO: 507013 - DNA, 55 bp, Artificial
  Synthetic oligonucleotide
ggccctccatgaagttattaacctaaggagtgattacacactttcgggtgtactg

SEQ ID NO: 507014 - DNA, 55 bp, Artificial
  Synthetic oligonucleotide
ggccgtggaaccaacttaacgccaagggtcatcccgcagaaattcattgcagcac

SEQ ID NO: 507015 - DNA, 55 bp, Artificial
  Synthetic oligonucleotide
gggccgcttgaagtagtggtagccgtagaggggttcatagatgttgtaggtgaag

SEQ ID NO: 507016 - DNA, 55 bp, Artificial
  Synthetic oligonucleotide
gggccgatgcgtaccgctgacatgaagattccctgcctggagcctgcttgttagg

SEQ ID NO: 507017 - DNA, 55 bp, Artificial
  Synthetic oligonucleotide
gggccgatgcgtaccgccgacataggagttccctgttgtggggccggatcattag

SEQ ID NO: 507018 - DNA, 55 bp, Artificial
  Synthetic oligonucleotide
gggcattttcgtccagcagggtaaatagtgccgacagaggcagcccataagcatg

SEQ ID NO: 507019 - DNA, 55 bp, Artificial
  Synthetic oligonucleotide
gggcaccactgatctcaatacccatacggagcagacaggcattcgatggacatcc

SEQ ID NO: 507020 - DNA, 55 bp, Artificial
  Synthetic oligonucleotide
gggataagcatgtctcgcgtcgctaagaaccccgttaagctgccagccggtgtcg

SEQ ID NO: 507021 - DNA, 55 bp, Artificial
  Synthetic oligonucleotide
ggctttaagcgagtctggtgaactgttaagtccatgcaaataaaggatagtttca

SEQ ID NO: 507022 - DNA, 55 bp, Artificial
  Synthetic oligonucleotide
ggcttcggcacgcttgtcaacgtgggctcagtcgagagcgagataccgctggctt

SEQ ID NO: 507023 - DNA, 55 bp, Artificial
  Synthetic oligonucleotide
ggctggcttagtcaagaagacctccgaaaatcaagccttggcgggcaaacgcagg

SEQ ID NO: 507024 - DNA, 55 bp, Artificial
  Synthetic oligonucleotide
ggctgcggggctcattgagctcgttgggcgaagtgctcaaagtcggtcatggtgc

SEQ ID NO: 507025 - DNA, 55 bp, Artificial
  Synthetic oligonucleotide
ggctaagggtaatttgcccctgtgccgtgttgtaaacgccacgaccgtcgtaatc

SEQ ID NO: 507026 - DNA, 55 bp, Artificial
  Synthetic oligonucleotide
ggctaaaactcatacagctcgctccaagcaccctgccaatcgggcggcgcggagt

SEQ ID NO: 507027 - DNA, 55 bp, Artificial
  Synthetic oligonucleotide
ggcgttcatcgccagcagagcagcaaaggcgttggcttcgtactcctgagcaaag

SEQ ID NO: 507028 - DNA, 55 bp, Artificial
  Synthetic oligonucleotide
ggcgccgtgttgcgtcaaccattcaacgaagcctgcgatgtactggcccagaggg

SEQ ID NO: 507029 - DNA, 55 bp, Artificial
  Synthetic oligonucleotide
ggcgactacagagtaccttaaggctttccgtcaggcggacatgcacaccggcacc

SEQ ID NO: 507030 - DNA, 55 bp, Artificial
  Synthetic oligonucleotide
ggcgaacattgtccggcactttatcgtttctaattcccaagccgtcaagtcttgc

SEQ ID NO: 507031 - DNA, 55 bp, Artificial
  Synthetic oligonucleotide
ggcctcggtatcgaaactgtgcgtgcgctgaatccatcctcgctagaaggattgt

SEQ ID NO: 507032 - DNA, 55 bp, Artificial
  Synthetic oligonucleotide
gcaactgctgaaggcgcattaggcttgctcacagtagcttccggtaacgcagtat

SEQ ID NO: 507033 - DNA, 55 bp, Artificial
  Synthetic oligonucleotide
gcaacactcaatggaagcggcgtcgaatactgctgcagagcaacggattcggagg

SEQ ID NO: 507034 - DNA, 55 bp, Artificial
  Synthetic oligonucleotide
gattgccacgttccccgagtcgcatcgattccccgtttaggcttcgtctttcccc

SEQ ID NO: 507035 - DNA, 55 bp, Artificial
  Synthetic oligonucleotide
gatctgtctgcgggtggaccagcaacgtcactggacgattggattcaagatttta

SEQ ID NO: 507036 - DNA, 55 bp, Artificial
  Synthetic oligonucleotide
gatagcgctcaagaggggtcatggcggagtctgggtagtgaaacggggccgacac

SEQ ID NO: 507037 - DNA, 55 bp, Artificial
  Synthetic oligonucleotide
gagttctgttaccaactcggcatgcacctaaagtttcgcaaccggcgtcgaatcc

SEQ ID NO: 507038 - DNA, 55 bp, Artificial
  Synthetic oligonucleotide
gagctgtacccatcaccgtacaagcgatcaaaagatgatcttgcatatacggtac

SEQ ID NO: 507039 - DNA, 55 bp, Artificial
  Synthetic oligonucleotide
gagctccgaggaaggcttcggtcaggtgaaagcgtgtctgaccagtccgctagcc

SEQ ID NO: 507040 - DNA, 55 bp, Artificial
  Synthetic oligonucleotide
gagagcttggcggttattattgcgaagtaggcgatgactctcaattagctactgc

SEQ ID NO: 507041 - DNA, 55 bp, Artificial
  Synthetic oligonucleotide
gactcatgcctggcactacacgctcacgacagaacgcctcgaagtagcgattcag

SEQ ID NO: 507042 - DNA, 55 bp, Artificial
  Synthetic oligonucleotide
gacggtatagagttctctgattcggagcccctgcggctcaaatatggcgagcggg

SEQ ID NO: 507043 - DNA, 55 bp, Artificial
  Synthetic oligonucleotide
gacgccacttgcgtacaccctatcccaaggaagccatatgtctctcattagtgaa

SEQ ID NO: 507044 - DNA, 55 bp, Artificial
  Synthetic oligonucleotide
gacatgtacttcatcagtaacctgccgtctgagctccagctagaagatgtagcgc

SEQ ID NO: 507045 - DNA, 55 bp, Artificial
  Synthetic oligonucleotide
gaatggccatatgcgtttgtgatgcacttatggaataaagtcaaaagccgctgct

SEQ ID NO: 507046 - DNA, 55 bp, Artificial
  Synthetic oligonucleotide
gaaggcacgctaagttcaacatggtccttatcgttgctcggcgtggttgtcgact

SEQ ID NO: 507047 - DNA, 55 bp, Artificial
  Synthetic oligonucleotide
gaaagcgtgaatggcgctatgcttgtgctttgtagcccgcacgccggagttcgcc

SEQ ID NO: 507048 - DNA, 55 bp, Artificial
  Synthetic oligonucleotide
ctttcgccattgcccacaaacctctgggtggcgtactggctctttcgacctatgc

SEQ ID NO: 507049 - DNA, 55 bp, Artificial
  Synthetic oligonucleotide
gcgaatcaacaggcacgaactatcgtccgaatgaaagccagagcggacggttgcg

SEQ ID NO: 507050 - DNA, 55 bp, Artificial
  Synthetic oligonucleotide
gcgaaactctaggtgcatgccgagttggtaacagaactcgtaaatccactgttgc

SEQ ID NO: 507051 - DNA, 55 bp, Artificial
  Synthetic oligonucleotide
gcctggttggccgtcttggtacgatcacgcaccagcgaatcacgcatccggtgca

SEQ ID NO: 507052 - DNA, 55 bp, Artificial
  Synthetic oligonucleotide
gcctgggcaatgacaaagagaccgtctccgctaacctgcgtgcaagtcgccctgg

SEQ ID NO: 507053 - DNA, 55 bp, Artificial
  Synthetic oligonucleotide
gccgccaagttcgctgtagacgtaacggctaaaactcatacagctcgctccaagc

SEQ ID NO: 507054 - DNA, 55 bp, Artificial
  Synthetic oligonucleotide
gccctccagcaaaattcccttgatgccagctctcaggctgcgatgagcactgccc

SEQ ID NO: 507055 - DNA, 55 bp, Artificial
  Synthetic oligonucleotide
gcccgtattattgaccttatccgtcattgactgaccagtgaagcgagcccgatga

SEQ ID NO: 507056 - DNA, 55 bp, Artificial
  Synthetic oligonucleotide
gcccgccagaaccttcagtggatagggttatatgtccggaaaagcgcaacagcag

SEQ ID NO: 507057 - DNA, 55 bp, Artificial
  Synthetic oligonucleotide
gccccacaacagggaagtcctatgtcggcggtacgcatcggcccatacacactgc

SEQ ID NO: 507058 - DNA, 55 bp, Artificial
  Synthetic oligonucleotide
gcccaacgggacgtggcgggaacgatttgtatgacgataaagcgaaccgcatagg

SEQ ID NO: 507059 - DNA, 55 bp, Artificial
  Synthetic oligonucleotide
gccagttgagtgccgggcaaagtctgatcagtcgcgacggttactgggtgggtcg

SEQ ID NO: 507060 - DNA, 55 bp, Artificial
  Synthetic oligonucleotide
gccagttcattagatcggcatgcgtcaggggccaaccctggggtgtgaagcccga

SEQ ID NO: 507061 - DNA, 55 bp, Artificial
  Synthetic oligonucleotide
gccacaggcaaacagccccgggcacttagctcggtcgataaacgcgcacattggc

SEQ ID NO: 507062 - DNA, 55 bp, Artificial
  Synthetic oligonucleotide
gccaacccaaccctggaattcagccgcgaccacaccaggtagacgcatatcggcg

SEQ ID NO: 507063 - DNA, 55 bp, Artificial
  Synthetic oligonucleotide
gcaggctccaggcagggaatcttcatgtcagcggtacgcatcggcccttacacct

SEQ ID NO: 507064 - DNA, 55 bp, Artificial
  Synthetic oligonucleotide
gcacgtaacagacggcgattggcacccgatgacgcaacgcaaagtcgatccagcg

SEQ ID NO: 507065 - DNA, 55 bp, Artificial
  Synthetic oligonucleotide
gcaagatttgttactgcgccgactaactggcgcgattacttgctgcgcgacttcc

SEQ ID NO: 507066 - DNA, 55 bp, Artificial
  Synthetic oligonucleotide
tctgagcgatatgactgcctatattcaccccaagatccttacccgcgagattcgg

SEQ ID NO: 507067 - DNA, 55 bp, Artificial
  Synthetic oligonucleotide
tctcagagcagccgactccgtctcggttatgcttgcgtcccctgaccaggactgc

SEQ ID NO: 507068 - DNA, 55 bp, Artificial
  Synthetic oligonucleotide
tcggtaattctcaatgtgtcttgcatatccgccacgggcgtaacagctaaacagg

SEQ ID NO: 507069 - DNA, 55 bp, Artificial
  Synthetic oligonucleotide
tcgcatggactacttccgtacctgcatcggctaagtcccgcctaaagcgctcccc

SEQ ID NO: 507070 - DNA, 55 bp, Artificial
  Synthetic oligonucleotide
tcgaacatgcgcgaaggctcgtggcggagtcagtcggcgatggtacgacagcttg

SEQ ID NO: 507071 - DNA, 55 bp, Artificial
  Synthetic oligonucleotide
tccgcttacagcccgaggctatcgcggcggtattccagacccagcgcgtgagcta

SEQ ID NO: 507072 - DNA, 55 bp, Artificial
  Synthetic oligonucleotide
tccgcggcagctacccaggggcgtgcggtgatgcaccgttgacatctctaggtct

SEQ ID NO: 507073 - DNA, 55 bp, Artificial
  Synthetic oligonucleotide
tccgcacttactgatgatcaccccggtaatctttatgggctggatccccatcgtg

SEQ ID NO: 507074 - DNA, 55 bp, Artificial
  Synthetic oligonucleotide
tccatccatccgctcacaggaaccaaagccccgctacaaggttctcttgccttat

SEQ ID NO: 507075 - DNA, 55 bp, Artificial
  Synthetic oligonucleotide
tccagtttaaagtcaatccgcttaaatacgttagcgcagatgcgcctagccagag

SEQ ID NO: 507076 - DNA, 55 bp, Artificial
  Synthetic oligonucleotide
tccactaccagttcaggcagggctagctctgtgataccgaccgccgtccaggaag

SEQ ID NO: 507077 - DNA, 55 bp, Artificial
  Synthetic oligonucleotide
tccactaatgtcctgggacacacccgtactcagacctttatcggccgaaacggcc

SEQ ID NO: 507078 - DNA, 55 bp, Artificial
  Synthetic oligonucleotide
tcatggccgatacaggcaggaagatgggccttgtgggcctgaccaccctggtagc

SEQ ID NO: 507079 - DNA, 55 bp, Artificial
  Synthetic oligonucleotide
tcaagcgtattgggaaccggcctcgaaaacgatggctctcagcgtgcttagctgc

SEQ ID NO: 507080 - DNA, 55 bp, Artificial
  Synthetic oligonucleotide
tcaacgaccatgccttcaacgaagccaaaatcctgatgggatacaataaggcccc

SEQ ID NO: 507081 - DNA, 55 bp, Artificial
  Synthetic oligonucleotide
tatccgaatggtgacctgccttaggtgcggagccaccctcgctatccgtagccgc

SEQ ID NO: 507082 - DNA, 55 bp, Artificial
  Synthetic oligonucleotide
taggagacgggcactcccgcgaatgcaaacctggtgcgaaagcagtgctcacccc

SEQ ID NO: 507083 - DNA, 55 bp, Artificial
  Synthetic oligonucleotide
ttttattccttggttgattcgcatggtgaaactcgaatacgaaacgccggtaagc

SEQ ID NO: 507084 - DNA, 55 bp, Artificial
  Synthetic oligonucleotide
tttacgcatgggtgctgttggcggctccaggttcgacggcggtcttggatgggct

SEQ ID NO: 507085 - DNA, 55 bp, Artificial
  Synthetic oligonucleotide
tttaacactaagcttccgaccctcaacgaactgccttcctcggcccaactgctgc

SEQ ID NO: 507086 - DNA, 55 bp, Artificial
  Synthetic oligonucleotide
ttccttttgccccggtccgcgaacccgcgtacagctgccacccctattcgtttcg

SEQ ID NO: 507087 - DNA, 55 bp, Artificial
  Synthetic oligonucleotide
ttatccgccataatcaatagccgctcagactgacgttaagtggagctccgttact

SEQ ID NO: 507088 - DNA, 55 bp, Artificial
  Synthetic oligonucleotide
ttacgcacgatgagattgatctggttcagctcgtcagcgcgctatggaagcaaaa

SEQ ID NO: 507089 - DNA, 55 bp, Artificial
  Synthetic oligonucleotide
tgtgcgacacgcctttgcccggaacctgtcagggagtggcggctcggagctttca

SEQ ID NO: 507090 - DNA, 55 bp, Artificial
  Synthetic oligonucleotide
tgtccacaggggaatttacgcccagctttgtcaggggcttatgagcagggctcag

SEQ ID NO: 507091 - DNA, 55 bp, Artificial
  Synthetic oligonucleotide
tgtaagcccagctttccagaaaatatggggacattctcctgagttgttatacgag

SEQ ID NO: 507092 - DNA, 55 bp, Artificial
  Synthetic oligonucleotide
tggtaggacacgtaaccgccgattaccttttctccgagctttactcccgaggcgg

SEQ ID NO: 507093 - DNA, 55 bp, Artificial
  Synthetic oligonucleotide
tggggttggattggctcacagcattacgcacacccctgcgatgcgttgtcgccta

SEQ ID NO: 507094 - DNA, 55 bp, Artificial
  Synthetic oligonucleotide
tgggatgtgggtgcgccgcaaaacagcgacgtcacagaggccgatcatcagttcg

SEQ ID NO: 507095 - DNA, 55 bp, Artificial
  Synthetic oligonucleotide
tggcagcgtgtactgcctcggcgattacgagattcgggcacggctgattcagacc

SEQ ID NO: 507096 - DNA, 55 bp, Artificial
  Synthetic oligonucleotide
tgcttagctgaggctagtcgtccagccattccttcggtacgtcgcgcctgagcgc

SEQ ID NO: 507097 - DNA, 55 bp, Artificial
  Synthetic oligonucleotide
tgcgtgatgaagtgttggctaagctggaggctgcacaatgagtgctcaagatttc

SEQ ID NO: 507098 - DNA, 55 bp, Artificial
  Synthetic oligonucleotide
tgacatctcgctggttgagcacatcgccgcgggttgcactcaggctgacgtcacg

SEQ ID NO: 507099 - DNA, 55 bp, Artificial
  Synthetic oligonucleotide
tgaaaggcccaggcgtcggccaatttcaacctggctcaggccatcaagttgcgcc

SEQ ID NO: 507100 - DNA, 55 bp, Artificial
  Synthetic oligonucleotide
ggttgggagttgtgcctgattgtggctaatactcaatctctgcgaagtaaccggc

SEQ ID NO: 507101 - DNA, 55 bp, Artificial
  Synthetic oligonucleotide
ggtggagaaacgatacccagtcccgcgcacggtttgtaccaggttttcgtacgca

SEQ ID NO: 507102 - DNA, 55 bp, Artificial
  Synthetic oligonucleotide
ggtccgaacatcactgtgtgcaaggagataggagtcgtatcgatatttggatcga

SEQ ID NO: 507103 - DNA, 55 bp, Artificial
  Synthetic oligonucleotide
ggtcaggacgtgctgtcccagcagcagtacattctgccttacataaaaggccgaa

SEQ ID NO: 507104 - DNA, 55 bp, Artificial
  Synthetic oligonucleotide
ggtcacgggccatcgtgagaaacgcatgcactgcaggaaaatggggatcgtcggc

SEQ ID NO: 507105 - DNA, 55 bp, Artificial
  Synthetic oligonucleotide
ggtcaacgacggtttgctaaagcgcggccagctattacacgaatgacccggaacc

SEQ ID NO: 507106 - DNA, 55 bp, Artificial
  Synthetic oligonucleotide
ggtagaatcgccgccggttcacatgaggttattccatgcacgatccccacagcga

SEQ ID NO: 507107 - DNA, 55 bp, Artificial
  Synthetic oligonucleotide
ggtaacgcgttgcgggtgatgcaggtcggcgcgggtagcacctcatgtctgtcta

SEQ ID NO: 507108 - DNA, 55 bp, Artificial
  Synthetic oligonucleotide
gggttgacggcggagttgagtggtgggatgaatcattacgatgatcaaacccgac

SEQ ID NO: 507109 - DNA, 55 bp, Artificial
  Synthetic oligonucleotide
gggttcgagcctgtttcgcaaaagaagaggggcggcaggtttgctcggtccggat

SEQ ID NO: 507110 - DNA, 55 bp, Artificial
  Synthetic oligonucleotide
gggttcacgcacttcctccagggtgttgccccagactttgtatcgggcctgccat

SEQ ID NO: 507111 - DNA, 55 bp, Artificial
  Synthetic oligonucleotide
gggtaagcagacgcttttcccgactgaagtcctgactcacctccagtgccggatt

SEQ ID NO: 507112 - DNA, 55 bp, Artificial
  Synthetic oligonucleotide
ggggcgattgtactgcatcaggtacccgatcattgagcccctgatcgactcgatg

SEQ ID NO: 507113 - DNA, 55 bp, Artificial
  Synthetic oligonucleotide
ggggccgttttggattcgacgccggttgcgaaactttaggtgcatgccgagttgg

SEQ ID NO: 507114 - DNA, 55 bp, Artificial
  Synthetic oligonucleotide
gggctggtagaatcgccgccggttcacacgaggtttatccatgcacgatccccac

SEQ ID NO: 507115 - DNA, 55 bp, Artificial
  Synthetic oligonucleotide
gggcgacgcatgctttacctcgtcggtcaaagtgggcgcagatgttactcaaccg

SEQ ID NO: 507116 - DNA, 55 bp, Artificial
  Synthetic oligonucleotide
gggccttatgacgtagaccagatgctcaaagatcaggccaggagggacgaggagc

SEQ ID NO: 507117 - DNA, 55 bp, Artificial
  Synthetic oligonucleotide
taacgataaactacgactcaccgaggcgatggtagggcgaaatggaacagcactc

SEQ ID NO: 507118 - DNA, 55 bp, Artificial
  Synthetic oligonucleotide
gttttagccgttacgtctacagcgaacttggcggcgatcctgttctgtctgacag

SEQ ID NO: 507119 - DNA, 55 bp, Artificial
  Synthetic oligonucleotide
gttgctcggccctccgctgtcttgatttagatgcagttcaattaagcataagagg

SEQ ID NO: 507120 - DNA, 55 bp, Artificial
  Synthetic oligonucleotide
gttgaggtgctgtttcaaattgacgttgtcgctcacgggcgttgttccactcact

SEQ ID NO: 507121 - DNA, 55 bp, Artificial
  Synthetic oligonucleotide
gtgtcaggcatgctggccacgtccctttgtccgagtgttggcttccccggcgtta

SEQ ID NO: 507122 - DNA, 55 bp, Artificial
  Synthetic oligonucleotide
gtgcagatataccacacgacctccagcatgcagcgcctgacgattctccggacgc

SEQ ID NO: 507123 - DNA, 55 bp, Artificial
  Synthetic oligonucleotide
gtgagtgctccacatatgggtgccccagtcttcattcaaacgctcaatagtgaca

SEQ ID NO: 507124 - DNA, 55 bp, Artificial
  Synthetic oligonucleotide
gtcgcgtgtgtagagcaagaaaatgcggccaagcaggagttcgatcggaaatggg

SEQ ID NO: 507125 - DNA, 55 bp, Artificial
  Synthetic oligonucleotide
gtccggcgtatcctccgttgttgggccaaaggcgctgactccaatgctcaccgtc

SEQ ID NO: 507126 - DNA, 55 bp, Artificial
  Synthetic oligonucleotide
gtccgctacccaggccttgtttaccgcctcaggctcgaattgacgattcagtaca

SEQ ID NO: 507127 - DNA, 55 bp, Artificial
  Synthetic oligonucleotide
gtcccagccaagatagtggaagtcgcccaccgatgcaaaacaccaagctcttgct

SEQ ID NO: 507128 - DNA, 55 bp, Artificial
  Synthetic oligonucleotide
gtcatatcagtcgattccgcccgtcagggtcgtctgctcagcatagtcgaggtgt

SEQ ID NO: 507129 - DNA, 55 bp, Artificial
  Synthetic oligonucleotide
gtcagcggatggacgcaagaaacgagtctgcactcatatcgatctgagctggaac

SEQ ID NO: 507130 - DNA, 55 bp, Artificial
  Synthetic oligonucleotide
gtcactgtcctgctgacggcattaaaggcctggctaatcccggtcgatacagcgg

SEQ ID NO: 507131 - DNA, 55 bp, Artificial
  Synthetic oligonucleotide
gtagtcgcagccgatggccaatacgtcaacccagttagcgtcgacgaattccgca

SEQ ID NO: 507132 - DNA, 55 bp, Artificial
  Synthetic oligonucleotide
gtacgcggggaactggatcgtttcggcaccgatatgcgagagtctgttctgccgg

SEQ ID NO: 507133 - DNA, 55 bp, Artificial
  Synthetic oligonucleotide
gtaccgatgcgctgatgttgcagcttaaccgggttagccgagtaagccaggaagg

SEQ ID NO: 507134 - DNA, 55 bp, Artificial
  Synthetic oligonucleotide
catctgggacgaatctccaaacgagaaggcagtcacagaatgccatcatattgac

SEQ ID NO: 507135 - DNA, 55 bp, Artificial
  Synthetic oligonucleotide
catgcctactaacttatgcttatgagcgccaattaaatcccctcgattggtttac

SEQ ID NO: 507136 - DNA, 55 bp, Artificial
  Synthetic oligonucleotide
catggcggcgtttctttgcggactgccaccatggttgattcttacgacgactccc

SEQ ID NO: 507137 - DNA, 55 bp, Artificial
  Synthetic oligonucleotide
agatacacgctttcacgaatgtaaattagtcggtgtggattggactaaagctgac

SEQ ID NO: 507138 - DNA, 55 bp, Artificial
  Synthetic oligonucleotide
ccaacgtcagcgtctgccttactgcacgcaaatcgtgtgggcctgctttgacggg

SEQ ID NO: 507139 - DNA, 55 bp, Artificial
  Synthetic oligonucleotide
ccaagatagtggaagtcgcccaccgatgcaaaacaccaagctcttgctaaccagc

SEQ ID NO: 507140 - DNA, 55 bp, Artificial
  Synthetic oligonucleotide
agaaagttgcaacagtggatttacgagttctgttaccaactcggcatgcacctag

SEQ ID NO: 507141 - DNA, 55 bp, Artificial
  Synthetic oligonucleotide
ccacgattagttctcacctaatacaggtgtgattaagtaaaatccgccgccctgg

SEQ ID NO: 507142 - DNA, 55 bp, Artificial
  Synthetic oligonucleotide
ccagggagcgttgtcgatcatggccacttggccggcacggaactcttgtgcggtt

SEQ ID NO: 507143 - DNA, 55 bp, Artificial
  Synthetic oligonucleotide
ccagggcaaccgtccttactcgcgaatcgcttccgttagcgagaagccacaggtc

SEQ ID NO: 507144 - DNA, 55 bp, Artificial
  Synthetic oligonucleotide
ccagggcaccaactgttcaaggtcggccaagaagcggtcgcgacgagtctgcttt

SEQ ID NO: 507145 - DNA, 55 bp, Artificial
  Synthetic oligonucleotide
cccaccacgagtccagatgaacgcccgcaatccaccgtccccatctaccgatggt

SEQ ID NO: 507146 - DNA, 55 bp, Artificial
  Synthetic oligonucleotide
cccaccgggaacgtctcgggtctctttcaggtccagcttcaggtcacccatcgca

SEQ ID NO: 507147 - DNA, 55 bp, Artificial
  Synthetic oligonucleotide
cccaggctttgcccgttgggcattgcatcggaaaacaggtaatacgacacacccg

SEQ ID NO: 507148 - DNA, 55 bp, Artificial
  Synthetic oligonucleotide
cccatatgcaacatatcgatgattcgacaaaggtaggatcttccacaggcccacc

SEQ ID NO: 507149 - DNA, 55 bp, Artificial
  Synthetic oligonucleotide
cccattaggatttcatacatgctgcgccaaagagcatcgctagagagaacaatgc

SEQ ID NO: 507150 - DNA, 55 bp, Artificial
  Synthetic oligonucleotide
ccccagcccctcgcctctgattcgcgcctttatgaagccctccagacgttttctg

SEQ ID NO: 507151 - DNA, 55 bp, Artificial
  Synthetic oligonucleotide
acggcacgccaaacagaaccactggcggtagcccgcccagccagaacagtgacca

SEQ ID NO: 507152 - DNA, 55 bp, Artificial
  Synthetic oligonucleotide
ccccggggtttacaaaatcgacatccaacagggcaatgtcgtcacgcaggacatg

SEQ ID NO: 507153 - DNA, 55 bp, Artificial
  Synthetic oligonucleotide
cccgtggctggttgcgttatcgtttaccccaacgcctggtccgtacccacagcca

SEQ ID NO: 507154 - DNA, 55 bp, Artificial
  Synthetic oligonucleotide
ccgatgctaatccatcgcccaatatcctcagcgagcttaagccaggagagatcgg

SEQ ID NO: 507155 - DNA, 55 bp, Artificial
  Synthetic oligonucleotide
ccgatggcaaccggcgtattgccttggccgaataccggaaagaagtaaccgaggg

SEQ ID NO: 507156 - DNA, 55 bp, Artificial
  Synthetic oligonucleotide
ccgcctgccaacgaacctagcctgtcttgtttggcgtcatgaactcgtctgccag

SEQ ID NO: 507157 - DNA, 55 bp, Artificial
  Synthetic oligonucleotide
acggaatgaagcatgtgcgcgctccagttatacacggggtcgcaggcggtgcacg

SEQ ID NO: 507158 - DNA, 55 bp, Artificial
  Synthetic oligonucleotide
cctaggagtgtactcagttgttcaaccagtacgcgcagatttacaaccagtacgc

SEQ ID NO: 507159 - DNA, 55 bp, Artificial
  Synthetic oligonucleotide
cctgatttacaccatgaggctacttatatgggaagtgcagaaattcgcggtcttg

SEQ ID NO: 507160 - DNA, 55 bp, Artificial
  Synthetic oligonucleotide
cctttaaagaggtggggcacaagttcacagcgcggagcgtggatggctatggcgt

SEQ ID NO: 507161 - DNA, 55 bp, Artificial
  Synthetic oligonucleotide
cgaattgtggcgcactcatgaataactcttcagcgtggtcggaaagcggcaggtt

SEQ ID NO: 507162 - DNA, 55 bp, Artificial
  Synthetic oligonucleotide
cgacaaacgcatcgcccgtgtttgcgaatacattaatcagaacctcaatcaggat

SEQ ID NO: 507163 - DNA, 55 bp, Artificial
  Synthetic oligonucleotide
atcgagcactttcagtaaacgtttgtgagttgctgcaagaatcgccggtgctttg

SEQ ID NO: 507164 - DNA, 55 bp, Artificial
  Synthetic oligonucleotide
atgaccggtcgtctcgtcagcctaggatcatcacccgggcttatcggccacgatg

SEQ ID NO: 507165 - DNA, 55 bp, Artificial
  Synthetic oligonucleotide
attgcgaaccgaacaacaagggcgctatcaccgtcagcgaatttccgtccgcccc

SEQ ID NO: 507166 - DNA, 55 bp, Artificial
  Synthetic oligonucleotide
caaaccgttctgcaatgtatatgggccgatgcgtaccgccgacataggacttccc

SEQ ID NO: 507167 - DNA, 55 bp, Artificial
  Synthetic oligonucleotide
caaagctccacgttgagtcccttgtttccggggcattccagccaattgcacgact

SEQ ID NO: 507168 - DNA, 55 bp, Artificial
  Synthetic oligonucleotide
caacgttctcggcccgcgcaggaatctccacaggcgggttaaggtcggtgcgaca

SEQ ID NO: 507169 - DNA, 55 bp, Artificial
  Synthetic oligonucleotide
caagatgacattcacacctgaggatctagccttgtgagaaaccttcttcgaggaa

SEQ ID NO: 507170 - DNA, 55 bp, Artificial
  Synthetic oligonucleotide
caatctggcaagctttctgctaagaccttcatgacccatgcactgatgcagtcac

SEQ ID NO: 507171 - DNA, 55 bp, Artificial
  Synthetic oligonucleotide
caatgacaaagagaccgtctccgctaacctgcgtgcaagccgccctggcatccgg

SEQ ID NO: 507172 - DNA, 55 bp, Artificial
  Synthetic oligonucleotide
caccaaggcatggagcctacgccctatgctgcacatttagctgagcctatcgccc

SEQ ID NO: 507173 - DNA, 55 bp, Artificial
  Synthetic oligonucleotide
cacccactacaccctcttgaacctgacctgcgctgaggctgaagtccccgcccaa

SEQ ID NO: 507174 - DNA, 55 bp, Artificial
  Synthetic oligonucleotide
caccgcattcttgaaggagtcctccatggaacagcccacccacagcctcccatcc

SEQ ID NO: 507175 - DNA, 55 bp, Artificial
  Synthetic oligonucleotide
cacctacactgaggtgccctgggagcggactgtgctggggttacagcaaggtagg

SEQ ID NO: 507176 - DNA, 55 bp, Artificial
  Synthetic oligonucleotide
cacgacgcagcgcacaagtgattccggtggttacacgatcaacaactcggaacag

SEQ ID NO: 507177 - DNA, 55 bp, Artificial
  Synthetic oligonucleotide
cacgcaaccaggctgcgcgtggtcccgaggaaaaccaatgagtcgtaactgtcac

SEQ ID NO: 507178 - DNA, 55 bp, Artificial
  Synthetic oligonucleotide
cacgtggaactacaccgcttctaccgggatcgtacgcgaccttatcgaagaccgg

SEQ ID NO: 507179 - DNA, 55 bp, Artificial
  Synthetic oligonucleotide
aggtgtggggcgggtttcatgaagtccactcaggtgatgtgggcggctcaacggg

SEQ ID NO: 507180 - DNA, 55 bp, Artificial
  Synthetic oligonucleotide
cagactgaggactgtgacgtacagactccagaacgtagtcattctttgttactcc

SEQ ID NO: 507181 - DNA, 55 bp, Artificial
  Synthetic oligonucleotide
agggatgaacaggtacggctaacacaagtgaacctcatataaacgtcgtcatagt

SEQ ID NO: 507182 - DNA, 55 bp, Artificial
  Synthetic oligonucleotide
cagcaacttcaagacactgccactgttcgtcgaagcgactcccgagggcctgagc

SEQ ID NO: 507183 - DNA, 55 bp, Artificial
  Synthetic oligonucleotide
cagcgcaccataaaattcgccgttgtgcacaacaaacattgccggcaggtgaaag

SEQ ID NO: 507184 - DNA, 55 bp, Artificial
  Synthetic oligonucleotide
cagctcgctccaagcaccctgccaatcgggcggcgcggagttaactcagtagatc

SEQ ID NO: 507185 - DNA, 55 bp, Artificial
  Synthetic oligonucleotide
cagtagaaactgtgttccatccctcaaacccttgattctattggcctacagcgaa

SEQ ID NO: 507186 - DNA, 55 bp, Artificial
  Synthetic oligonucleotide
agcctgtcttgtttggcgtcatgaactcgtctgccagtaccggagcctggagcca

SEQ ID NO: 507187 - DNA, 55 bp, Artificial
  Synthetic oligonucleotide
agccagggttgcaagctgagtagtgcggttaaacatgggtagtccagtccttgat

SEQ ID NO: 507188 - DNA, 55 bp, Artificial
  Synthetic oligonucleotide
catagacgtgcatcacaggatttgtatgcagcgagattgcgcgaagcgtcagagc

SEQ ID NO: 507189 - DNA, 55 bp, Artificial
  Synthetic oligonucleotide
catcaggctcagcgccccttgggacatgccatggtagccaccctggaacgacagt

SEQ ID NO: 507190 - DNA, 55 bp, Artificial
  Synthetic oligonucleotide
catcgggactcggaaagtagccttggaatttccgatcctagagcaaggcggggcc

SEQ ID NO: 507191 - DNA, 55 bp, Artificial
  Synthetic oligonucleotide
agcattaccgcgctaacagccagtatcatccccgctccacccgcctggattgctg

SEQ ID NO: 507192 - DNA, 55 bp, Artificial
  Synthetic oligonucleotide
cggctaattctgggtgtatcggcttatttgtacggttaatcgagccgttggcgag

SEQ ID NO: 507193 - DNA, 55 bp, Artificial
  Synthetic oligonucleotide
cggctatagcgccgaggacaagttttgcaagataatccgccttgcatttgacgtc

SEQ ID NO: 507194 - DNA, 55 bp, Artificial
  Synthetic oligonucleotide
cgtactcctcaaagacatccgatggtgtgtcgatcacgcgcccaatgagcccttc

SEQ ID NO: 507195 - DNA, 55 bp, Artificial
  Synthetic oligonucleotide
cgtcaagttaatgttcacagcgatatacctcgtgctatctcgttcaacgcgggag

SEQ ID NO: 507196 - DNA, 55 bp, Artificial
  Synthetic oligonucleotide
cgtcatgcatctgtttgtaggtttcgcccatctcaagccgtttcagtatctcggg

SEQ ID NO: 507197 - DNA, 55 bp, Artificial
  Synthetic oligonucleotide
cgtccgaattgcacggacgtaacgaggctaatgacctaacccgcatggctaacgc

SEQ ID NO: 507198 - DNA, 55 bp, Artificial
  Synthetic oligonucleotide
cgtccgtgcgccccactttacttgcgagagggcttgcagagcctggctcaaggta

SEQ ID NO: 507199 - DNA, 55 bp, Artificial
  Synthetic oligonucleotide
cgtgccgcacggtgagatggcatgccggttacttcgcagagattgagtattagcc

SEQ ID NO: 507200 - DNA, 55 bp, Artificial
  Synthetic oligonucleotide
cgttattaaccgtggcagccacatggctccactcgtagagcggaaacagtgccgg

SEQ ID NO: 507201 - DNA, 55 bp, Artificial
  Synthetic oligonucleotide
acaaagaatgactacgttctggagtctgtacgtcacagtcctcagtctgggtacc

SEQ ID NO: 507202 - DNA, 55 bp, Artificial
  Synthetic oligonucleotide
cgtttcattttagagtctactgccaggggtcggatcgtcaaggtgcatatagcgt

SEQ ID NO: 507203 - DNA, 55 bp, Artificial
  Synthetic oligonucleotide
cgttttgttgcggtgcacagctaaggagccccgatgtcccgctcgcaagagttct

SEQ ID NO: 507204 - DNA, 55 bp, Artificial
  Synthetic oligonucleotide
ctagcgatttgtttattgaccggctccgagtctataagctgctcaggcagccacg

SEQ ID NO: 507205 - DNA, 55 bp, Artificial
  Synthetic oligonucleotide
ctatcgccagatcgccccgcaattcatggcttttgacgcagtccgaagggatgcg

SEQ ID NO: 507206 - DNA, 55 bp, Artificial
  Synthetic oligonucleotide
ctcacaaggctagatcctcaggtgtgaatgtcatcttgaatgaacgatacggagc

SEQ ID NO: 507207 - DNA, 55 bp, Artificial
  Synthetic oligonucleotide
ctcatacagctcgctccaagcaccctgccaatcgggcggcgcggagttaactcag

SEQ ID NO: 507208 - DNA, 55 bp, Artificial
  Synthetic oligonucleotide
ctcatcgcctggccgaaactttctcgacgccactcaagtcctccgaagacaggtt

SEQ ID NO: 507209 - DNA, 55 bp, Artificial
  Synthetic oligonucleotide
ctcccgagaatcgcgggatgatcaacaaggcttactacatgctgcgcgtcgaggg

SEQ ID NO: 507210 - DNA, 55 bp, Artificial
  Synthetic oligonucleotide
ctcgctgatatccaagttgaaaccgcacacggcgacatccgtaaaaccctcctgg

SEQ ID NO: 507211 - DNA, 55 bp, Artificial
  Synthetic oligonucleotide
ctgaagaaccagcaggtaggcaacgactgccaaggctacgagcaggatcgagcgt

SEQ ID NO: 507212 - DNA, 55 bp, Artificial
  Synthetic oligonucleotide
aatgaatgaccatctgcccagaccatagtcgttcgacgccgcttatcgcacttca

SEQ ID NO: 507213 - DNA, 55 bp, Artificial
  Synthetic oligonucleotide
ctggaagtaagtgcgccactcttcgggcacagcgttgggatcgtgcaggtagagc

SEQ ID NO: 507214 - DNA, 55 bp, Artificial
  Synthetic oligonucleotide
cttacgtatcgatcaccccggattgtcactcaatccgaaaacagctcgaacatca

SEQ ID NO: 507215 - DNA, 55 bp, Artificial
  Synthetic oligonucleotide
cttcctgaactacaagcttactgacctttaaggagtccccatgagcgactatccc

SEQ ID NO: 507216 - DNA, 55 bp, Artificial
  Synthetic oligonucleotide
aatagttgttcgattcccaggtctggtaccaggaagtctcgatggcgtgcggctg

SEQ ID NO: 507217 - DNA, 55 bp, Artificial
  Synthetic oligonucleotide
cttctgcaaggacacaacggccacatgcgcaccagtcagttcctgctctcgaccc

SEQ ID NO: 507218 - DNA, 55 bp, Artificial
  Synthetic oligonucleotide
cttgcaggtcgaccgaggtcattacgtaccacctcagtggctcgatgtaggcaag

SEQ ID NO: 507219 - DNA, 55 bp, Artificial
  Synthetic oligonucleotide
aaatcatcgactcgcggtggccactgtcccctaccaggcagcgcagcacttggtg

SEQ ID NO: 507220 - DNA, 55 bp, Artificial
  Synthetic oligonucleotide
acgcggcgctgaacaattcccaccgtgtgctgcaggcacgtatcgagaggcgtat

SEQ ID NO: 507221 - DNA, 55 bp, Artificial
  Synthetic oligonucleotide
cgacctgtagggctgtccgtacacgacctgtagtccgtagcctggatgaaatcca

SEQ ID NO: 507222 - DNA, 55 bp, Artificial
  Synthetic oligonucleotide
cgacgattcacatgcgttagccatgcgggttaggtcattagcctcgtcacgtccg

SEQ ID NO: 507223 - DNA, 55 bp, Artificial
  Synthetic oligonucleotide
cgactcgatgtgtgtgggttgtcatttggcgccaggcatggctgagaccgagcta

SEQ ID NO: 507224 - DNA, 55 bp, Artificial
  Synthetic oligonucleotide
cgagtgagagcgggacatctgagcctcggacagtcggttgcatatgcagcaacca

SEQ ID NO: 507225 - DNA, 55 bp, Artificial
  Synthetic oligonucleotide
accggtaccgtagggcctgatgtaatagacgtacgaagcctgacctccacgggtc

SEQ ID NO: 507226 - DNA, 55 bp, Artificial
  Synthetic oligonucleotide
cgagttatacgagttgcgcgaccccattgtaggtgcggacgaacagctggtgggg

SEQ ID NO: 507227 - DNA, 55 bp, Artificial
  Synthetic oligonucleotide
cgatcccggtattggcttacgagacaacggccgccgagtcctgacctatggcgac

SEQ ID NO: 507228 - DNA, 55 bp, Artificial
  Synthetic oligonucleotide
cgcaagtgccctcaggtgctgatcaatgtgcgtttcggtggtggcgagagtccgc

SEQ ID NO: 507229 - DNA, 55 bp, Artificial
  Synthetic oligonucleotide
cgcactttgacagctacacccgattgctcgtacccgaaggggattacccgagcct

SEQ ID NO: 507230 - DNA, 55 bp, Artificial
  Synthetic oligonucleotide
cgcagggaggggctttatcaataggcaaacaccttgcggtgcttctctacaaagt

SEQ ID NO: 507231 - DNA, 55 bp, Artificial
  Synthetic oligonucleotide
cgcagtattccgcagcagtgccccagcggtttcgatatgccgttagccagagcca

SEQ ID NO: 507232 - DNA, 55 bp, Artificial
  Synthetic oligonucleotide
cgccagctgacgagcgaggcttttcatcgagtaactggaaagcgactgcccatgc

SEQ ID NO: 507233 - DNA, 55 bp, Artificial
  Synthetic oligonucleotide
cggcgtgcctatatccaggctctgaaacccgtgttcgaacgtacgctcgcgacgc

SEQ ID NO: 507234 - DNA, 55 bp, Artificial
  Synthetic oligonucleotide
cggcggcaagtatggagaaagcaggtagccattgcaacgcaacataccgacgcga

SEQ ID NO: 507235 - DNA, 55 bp, Artificial
  Synthetic oligonucleotide
acagccgcgccccaatccctgtgactgtacatccgtttgactggcagagcacccc

SEQ ID NO: 507236 - DNA, 55 bp, Artificial
  Synthetic oligonucleotide
cggcgaacattattcaggcgatccaggccgcacatgatcgcgaaatgattgtcgt

SEQ ID NO: 507237 - DNA, 55 bp, Artificial
  Synthetic oligonucleotide
cggattggcaatgtagtgcccgaatcccgcgtctgtcctggcttcccgtactttc

SEQ ID NO: 507238 - DNA, 55 bp, Artificial
  Synthetic oligonucleotide
acccatctgatggcgttggcttacccgaggaacgggcctgggatcggccccaaag

SEQ ID NO: 507239 - DNA, 55 bp, Artificial
  Synthetic oligonucleotide
cgctatcatagcgcgccaatcgcttcggcgcagactcacatgccctcgagtttcg

SEQ ID NO: 507240 - DNA, 55 bp, Artificial
  Synthetic oligonucleotide
cgctatttgatcaaacgcgacaatggttttggggttgggtgtcgttaatagctgg

SEQ ID NO: 507241 - DNA, 55 bp, Artificial
  Synthetic oligonucleotide
cggacgatgccgcagtgaaacacgaaacaccttgcaattggagccaactcaaaac

SEQ ID NO: 507242 - DNA, 54 bp, Artificial
  Synthetic oligonucleotide
cgggtcaaccagttcaatccccaagaattcactcgcctggcgttcgattgcacc

SEQ ID NO: 507243 - DNA, 54 bp, Artificial
  Synthetic oligonucleotide
atagcggcctatgagccgaccaatctccaactacctgcacccaatccaaatgtg

SEQ ID NO: 507244 - DNA, 54 bp, Artificial
  Synthetic oligonucleotide
ggaaaattcgggtgctacggcttccactacaccgattttgctagcgaaggtttt

SEQ ID NO: 507245 - DNA, 54 bp, Artificial
  Synthetic oligonucleotide
tctgccttgcgccagggcgtctgccgcacccgaacttcacagtattccacctgt

SEQ ID NO: 507246 - DNA, 54 bp, Artificial
  Synthetic oligonucleotide
aatgaccgaccggaagtgaaggccaggcctaggagcgaattggaagcagagccc

SEQ ID NO: 507247 - DNA, 54 bp, Artificial
  Synthetic oligonucleotide
ccagccattggcccacggtctatctgccaccgccaaactgaacgggcttgccga

SEQ ID NO: 507248 - DNA, 54 bp, Artificial
  Synthetic oligonucleotide
gatcactgtcataatccgcgccttttgaatacaccgcttcattcgacagctcct

SEQ ID NO: 507249 - DNA, 54 bp, Artificial
  Synthetic oligonucleotide
gcgttgaggaggctgtcctgccattgcccagcgatgtcgcctgcgctctgacgg

SEQ ID NO: 507250 - DNA, 54 bp, Artificial
  Synthetic oligonucleotide
ccccgactggttatcatggcggcgtttctttgcggactgccaccatggttgatt

SEQ ID NO: 507251 - DNA, 53 bp, Artificial
  Synthetic oligonucleotide
atagaggcgtggttcttgtgctgacgaagcgtcaccgccgctccgcccttgat

SEQ ID NO: 507252 - DNA, 53 bp, Artificial
  Synthetic oligonucleotide
agttcgactttaacgattacctgtccagcctttcctgaggccgcagtacaagg

SEQ ID NO: 507253 - DNA, 53 bp, Artificial
  Synthetic oligonucleotide
ttcggcaggtgacaaggcacgcaccagaaccggtaatgtgccacccatgaaaa

SEQ ID NO: 507254 - DNA, 53 bp, Artificial
  Synthetic oligonucleotide
ttccttagggtgtccaattgtactgataccgcgcagtggtagagttacgaggc

SEQ ID NO: 507255 - DNA, 53 bp, Artificial
  Synthetic oligonucleotide
agacaaggatcagtacgggattgattggagcctggtctacaaatcagtcagcg

SEQ ID NO: 507256 - DNA, 53 bp, Artificial
  Synthetic oligonucleotide
accgggcatagcgtatttcacaatgccagtcgccgccatcatttgcatcacgc

SEQ ID NO: 507257 - DNA, 53 bp, Artificial
  Synthetic oligonucleotide
gttcgccaggtgatgcagttgatcctgtggaagctcgaagccttgcgtcactg

SEQ ID NO: 507258 - DNA, 53 bp, Artificial
  Synthetic oligonucleotide
cttgccgcctcgatcaatctgcatctctcgtcagcggaaggcgaatcatacag

SEQ ID NO: 507259 - DNA, 53 bp, Artificial
  Synthetic oligonucleotide
ccggtacctgctttcgcaaaatacccatgcaagaccgtgatctgcatgtgggg

SEQ ID NO: 507260 - DNA, 53 bp, Artificial
  Synthetic oligonucleotide
ccccatacgcttaagataacctgatggaaaccacaggtgaaatcccatgcccc

SEQ ID NO: 507261 - DNA, 53 bp, Artificial
  Synthetic oligonucleotide
gccttatgggcaaaacctcccgactcacgagcatgatcatccagcaggccttg

SEQ ID NO: 507262 - DNA, 53 bp, Artificial
  Synthetic oligonucleotide
ggggacaggttgcactcgctcaggagcactttgagacgatcgccagatgtatt

SEQ ID NO: 507263 - DNA, 53 bp, Artificial
  Synthetic oligonucleotide
gacatccggcgagacattatgtcgcaagccagttttctatcagggcgaaagcc

SEQ ID NO: 507264 - DNA, 52 bp, Artificial
  Synthetic oligonucleotide
gcttgatcgactggtgggcgtggtagacggctacgagtatttcattgaggtt

SEQ ID NO: 507265 - DNA, 52 bp, Artificial
  Synthetic oligonucleotide
acccgaaagttcaaggtggagattgcaggaggcgttaaggctttccgtcaag

SEQ ID NO: 507266 - DNA, 52 bp, Artificial
  Synthetic oligonucleotide
actgcgggtgttctcatcgcgtgcaaaccgcttcagctgggcgccacacata

SEQ ID NO: 507267 - DNA, 52 bp, Artificial
  Synthetic oligonucleotide
gagcctagggactccctgtaatccgaatgctggagcacccagggcgtagaga

SEQ ID NO: 507268 - DNA, 52 bp, Artificial
  Synthetic oligonucleotide
ctgctcgacagaaactgaaaccccatcgccaccagtttggtcgacaggtgat

SEQ ID NO: 507269 - DNA, 52 bp, Artificial
  Synthetic oligonucleotide
ccaacccacagatgcctactttgaccggtttcactgtgaactccccatgaaa

SEQ ID NO: 507270 - DNA, 52 bp, Artificial
  Synthetic oligonucleotide
cataatgccgggatttcgtcagagaaggaacgcaatcgatgcaatacgacgg

SEQ ID NO: 507271 - DNA, 52 bp, Artificial
  Synthetic oligonucleotide
cagtatcagtcacaggtagcggcagtaccttcccatagaagtcctggagagc

SEQ ID NO: 507272 - DNA, 52 bp, Artificial
  Synthetic oligonucleotide
cagatcaaaggccgtaggcaaagcgagaatcgggtagctgcgcaacgattcc

SEQ ID NO: 507273 - DNA, 52 bp, Artificial
  Synthetic oligonucleotide
aacgggaatcggcgtacggctggtggttctcggggcttcagcggagccatgg

SEQ ID NO: 507274 - DNA, 52 bp, Artificial
  Synthetic oligonucleotide
agtattagccacaatcaggcacaactcccaacccatctgaaagcacctaagc

SEQ ID NO: 507275 - DNA, 52 bp, Artificial
  Synthetic oligonucleotide
tttgccatcaagcaagccgagggtatcggcgcccagcacaggagccagtgga

SEQ ID NO: 507276 - DNA, 51 bp, Artificial
  Synthetic oligonucleotide
gaatctgccatgcagcggctacgcaactgggatattggcgaagcacagctt

SEQ ID NO: 507277 - DNA, 51 bp, Artificial
  Synthetic oligonucleotide
ctcaaggctaaaagggtgaacgtcaccgcccacccaaagggtgctcagtaa

SEQ ID NO: 507278 - DNA, 51 bp, Artificial
  Synthetic oligonucleotide
gcaatatggcatgacgctgcccaatagccgttcaaatgaaaacgaagcgga

SEQ ID NO: 507279 - DNA, 51 bp, Artificial
  Synthetic oligonucleotide
ttttccagggccgggttaaccgggttcgaagtccgttccatagaaggtcgc

SEQ ID NO: 507280 - DNA, 51 bp, Artificial
  Synthetic oligonucleotide
actatcggggcttgggcataccgacctactacgccgaggcaatgcttgatc

SEQ ID NO: 507281 - DNA, 51 bp, Artificial
  Synthetic oligonucleotide
tgatctcggccagtaccacttgcagcgccccacgcagtgcacgcacttcgg

SEQ ID NO: 507282 - DNA, 51 bp, Artificial
  Synthetic oligonucleotide
ggggaataacgctagaccactacaagggcagtggatcagcgagcccagtag

SEQ ID NO: 507283 - DNA, 51 bp, Artificial
  Synthetic oligonucleotide
ggggaggatggcaagccgcgtccacccttaagcctttgagcttgcagcgta

SEQ ID NO: 507284 - DNA, 51 bp, Artificial
  Synthetic oligonucleotide
tctacagtcgaacggatatccattgcgttccggcctagtcgatccagtttt

SEQ ID NO: 507285 - DNA, 51 bp, Artificial
  Synthetic oligonucleotide
catcgttacccctgctcctatgcaaagcggctgggagcttatcgttgtgca

SEQ ID NO: 507286 - DNA, 51 bp, Artificial
  Synthetic oligonucleotide
gtcagagccagtttcgatcccgcttgcgatgtacaacaggaaagcaccgcc

SEQ ID NO: 507287 - DNA, 51 bp, Artificial
  Synthetic oligonucleotide
caatttcggtgacagcagactatagccacggatcagaccttcgatgttctt

SEQ ID NO: 507288 - DNA, 51 bp, Artificial
  Synthetic oligonucleotide
taatggcacaatgcccggtaataggcaaaacctagcgcctgccgcacctca

SEQ ID NO: 507289 - DNA, 50 bp, Artificial
  Synthetic oligonucleotide
ggcaaggcacttcttgggatgaattacggccacgatgatacacacgccaa

SEQ ID NO: 507290 - DNA, 50 bp, Artificial
  Synthetic oligonucleotide
gctcaccataaacgagagcttttgccgatcctgtgatgtttagccactgc

SEQ ID NO: 507291 - DNA, 50 bp, Artificial
  Synthetic oligonucleotide
tgcgtttcgatcattgcctactgtatggcgacgaattgccggcgacctat

SEQ ID NO: 507292 - DNA, 50 bp, Artificial
  Synthetic oligonucleotide
gccgtcactgcgttctgcggactgccttcgatcacgcgatcactgtagac

SEQ ID NO: 507293 - DNA, 50 bp, Artificial
  Synthetic oligonucleotide
actgatgtgcgcttggtcattggcaacttgaccgtgaccggtgatcttgt

SEQ ID NO: 507294 - DNA, 50 bp, Artificial
  Synthetic oligonucleotide
ttctatttggagcggtgagctgaacgatgggctttgagcaactagctgaa

SEQ ID NO: 507295 - DNA, 50 bp, Artificial
  Synthetic oligonucleotide
agttggcatacaggtcatgcaatagaaccgagcgccagtagaagccatcc

SEQ ID NO: 507296 - DNA, 60 bp, Artificial
  Synthetic oligonucleotide
tgagccagcccagaacggtgttggtaatagagcccagtcccggaggttcggttgctggcg

SEQ ID NO: 507297 - DNA, 60 bp, Artificial
  Synthetic oligonucleotide
gtaagtatgtgttcggatcccacgggctgttaggacatgctgctctattgtcgtctggac

SEQ ID NO: 507298 - DNA, 60 bp, Artificial
  Synthetic oligonucleotide
ctccaattgccgtgtcggactcgctattgcaggaatagttcactcgtttgccagcgactg

SEQ ID NO: 507299 - DNA, 60 bp, Artificial
  Synthetic oligonucleotide
tcacagcacggaccggtttggtgactgcctcaaccacaccgctaggggggcgaagaccag

SEQ ID NO: 507300 - DNA, 60 bp, Artificial
  Synthetic oligonucleotide
tcagaggattcgaatgcgggcggactagacccacaccttgacgatatctacgtactgcag

SEQ ID NO: 507301 - DNA, 60 bp, Artificial
  Synthetic oligonucleotide
catggacggttccgcggacaactactcggagcaagggttgtttgtcgcgtccagtcgttg

SEQ ID NO: 507302 - DNA, 60 bp, Artificial
  Synthetic oligonucleotide
tctcagaacacaaggcggccccgtcgttacggcggggccgctttggtgcgcattagctcc

SEQ ID NO: 507303 - DNA, 59 bp, Artificial
  Synthetic oligonucleotide
gaaggcagagttgcgacgtcgcacgcaggcagggtctccatcaccgaagcgctctcagg

SEQ ID NO: 507304 - DNA, 59 bp, Artificial
  Synthetic oligonucleotide
tgctcgatatagcgcgtcagatcgtgctttggatcgaggtccaacagcggtctcggcta

SEQ ID NO: 507305 - DNA, 58 bp, Artificial
  Synthetic oligonucleotide
tgaaggtgggcgggttagcctcccacttcgcctctacgaggtaggtaaagcctctaaa

SEQ ID NO: 507306 - DNA, 55 bp, Artificial
  Synthetic oligonucleotide
gcacccctgagcggggtcagcactgccaacggttcacccgtcaacaacacaacgt

SEQ ID NO: 507307 - DNA, 55 bp, Artificial
  Synthetic oligonucleotide
gcagagtcatcgtcagcgctccagtgttcgcccggatgtcgtcacatccagcatg

SEQ ID NO: 507308 - DNA, 55 bp, Artificial
  Synthetic oligonucleotide
gcagccctctgatcagcgcagttcggttaccccacctacctgctgtgcgttgtcg

SEQ ID NO: 507309 - DNA, 55 bp, Artificial
  Synthetic oligonucleotide
tatctccgcgcactgggtgaaccccggtttctgacctcacaggccctgcgggcac

SEQ ID NO: 507310 - DNA, 55 bp, Artificial
  Synthetic oligonucleotide
gccaccctttggggtcaactaccggaccatggctgttatcaccagcgttaccgcc

SEQ ID NO: 507311 - DNA, 55 bp, Artificial
  Synthetic oligonucleotide
gcccgtttgacccagaatgcgaagaacttcctcaaccgtccactgacgacactgg

SEQ ID NO: 507312 - DNA, 55 bp, Artificial
  Synthetic oligonucleotide
gcctcgaaggtggggcgtcatgacctgacgacgtaaaaggcgtgaactttaggac

SEQ ID NO: 507313 - DNA, 55 bp, Artificial
  Synthetic oligonucleotide
gcgatcggaacatgatctcctacgcatgggattccgacgacaccttgcgtaccag

SEQ ID NO: 507314 - DNA, 55 bp, Artificial
  Synthetic oligonucleotide
gcgccgagtcacaaccacacatcgccgtgacaccctaattcccctcacgaagggc

SEQ ID NO: 507315 - DNA, 55 bp, Artificial
  Synthetic oligonucleotide
gcggacgacccgacgcgaggttaaacattaaacatcttccacgcaagaagttcgc

SEQ ID NO: 507316 - DNA, 55 bp, Artificial
  Synthetic oligonucleotide
gcgtactgctattaggagacgaacgccttaagtggtgacgtacctcagtctcgca

SEQ ID NO: 507317 - DNA, 55 bp, Artificial
  Synthetic oligonucleotide
tagtccctttcctgatcggcttgtgcacactcccaccgacccaccacggcgagtc

SEQ ID NO: 507318 - DNA, 55 bp, Artificial
  Synthetic oligonucleotide
gcgttgccaaccctgattagtcgcgcctagtctcaagctcgtaggattcggcgac

SEQ ID NO: 507319 - DNA, 55 bp, Artificial
  Synthetic oligonucleotide
taggtagtggtgtccctgttgcgaattgggcacggcccggctctgatcacgcccc

SEQ ID NO: 507320 - DNA, 55 bp, Artificial
  Synthetic oligonucleotide
gctcaccagaagcccttcgtgaggggaattagggtgtcacggcgatgtgtggttg

SEQ ID NO: 507321 - DNA, 55 bp, Artificial
  Synthetic oligonucleotide
tagaccttgacagcccaactggattgctcttcccgatccgcgcagagcgtccttc

SEQ ID NO: 507322 - DNA, 55 bp, Artificial
  Synthetic oligonucleotide
gaacaccgataccgtcacccagagccagttcgtgtcactcaacggctccagtgct

SEQ ID NO: 507323 - DNA, 55 bp, Artificial
  Synthetic oligonucleotide
gaacattcgccggacgggcttctagcgttacggccgttgcaccaaatggagtagt

SEQ ID NO: 507324 - DNA, 55 bp, Artificial
  Synthetic oligonucleotide
gaaccctgtgttcgggctcaccacgcctatcgggaacgattcagaacatcatccc

SEQ ID NO: 507325 - DNA, 55 bp, Artificial
  Synthetic oligonucleotide
gaacgcagagcatggacgctgtgtcaagtgtgttgaccacgcaaaccgtcgtggc

SEQ ID NO: 507326 - DNA, 55 bp, Artificial
  Synthetic oligonucleotide
gaacgccacggccaagagcgacccacaacgctggccgtgattagtctcagactag

SEQ ID NO: 507327 - DNA, 55 bp, Artificial
  Synthetic oligonucleotide
gaatgcgggcggactagacccacaccttgacgatatctacgtactgcagttgggg

SEQ ID NO: 507328 - DNA, 55 bp, Artificial
  Synthetic oligonucleotide
gacaacagggcatgagcgggttggtttcgacctctcacaggcccgctcaggggtc

SEQ ID NO: 507329 - DNA, 55 bp, Artificial
  Synthetic oligonucleotide
tcaacgctctgtgtgggcacgcgtcaacggtacgtcgctccgggcttgtgagtca

SEQ ID NO: 507330 - DNA, 55 bp, Artificial
  Synthetic oligonucleotide
gaccgtggagccgtgagaggcactccggtttcgagcagtgtggacagaatccacg

SEQ ID NO: 507331 - DNA, 55 bp, Artificial
  Synthetic oligonucleotide
tatgggtctgtgagaagccccgccaagcccgggagccgacgagggactgaagtta

SEQ ID NO: 507332 - DNA, 55 bp, Artificial
  Synthetic oligonucleotide
gacggcgtcccgcagagttgacgccactcaccgactgtggcaacctacgacgcgt

SEQ ID NO: 507333 - DNA, 55 bp, Artificial
  Synthetic oligonucleotide
gacttgttgcgacttccgctcgccaccaagggagaccggtcgagaagtgctacga

SEQ ID NO: 507334 - DNA, 55 bp, Artificial
  Synthetic oligonucleotide
gagacggccccagtttgcgtagatcagcgtcgggcgtacatgagtgcatcacgcc

SEQ ID NO: 507335 - DNA, 55 bp, Artificial
  Synthetic oligonucleotide
gagcggtcgctgcctgggtaatgaactgctcgttggaggcctcgtggtccattcg

SEQ ID NO: 507336 - DNA, 55 bp, Artificial
  Synthetic oligonucleotide
gaggccatatcgacgccaactgggcagtcgcgcttgcaccccttacacgacaaac

SEQ ID NO: 507337 - DNA, 55 bp, Artificial
  Synthetic oligonucleotide
gagggaccgtacacagcctggggcgtcttgcacagacccttcggacaatctggtc

SEQ ID NO: 507338 - DNA, 55 bp, Artificial
  Synthetic oligonucleotide
gatgctctcgcccgccgaagcaaggcagaagttcaggacgggccttcgggtaccg

SEQ ID NO: 507339 - DNA, 55 bp, Artificial
  Synthetic oligonucleotide
gattcggtcatgccggaggatcggtaggccactagggatgccgagatccgtgatc

SEQ ID NO: 507340 - DNA, 55 bp, Artificial
  Synthetic oligonucleotide
tatgacccgcccgcggccctccaattgttgcccgattcgcaggaagccaagcgat

SEQ ID NO: 507341 - DNA, 55 bp, Artificial
  Synthetic oligonucleotide
gcaacggagtgcggtttcctgcgtcgagatttgccccggcgtagcgtcggttctg

SEQ ID NO: 507342 - DNA, 55 bp, Artificial
  Synthetic oligonucleotide
gcaaggctgatccagcaactatgaattgcggcatgcgctcgggatttgatgacaa

SEQ ID NO: 507343 - DNA, 55 bp, Artificial
  Synthetic oligonucleotide
ggtaaccgaggtaaacacttgacgcggcgcactgaggttctgttcatgcctcacg

SEQ ID NO: 507344 - DNA, 55 bp, Artificial
  Synthetic oligonucleotide
tacgccgcttacccatggatccctcccgtagtcgccttggtttcgcgtccccgag

SEQ ID NO: 507345 - DNA, 55 bp, Artificial
  Synthetic oligonucleotide
ggtacgactgtaccgatgactctatctgtgcgctatacagtcatgcatgaccatg

SEQ ID NO: 507346 - DNA, 55 bp, Artificial
  Synthetic oligonucleotide
ggtcaaccgcagtggcacgtagttggaattcagccactcgcttgccatagtcgtg

SEQ ID NO: 507347 - DNA, 55 bp, Artificial
  Synthetic oligonucleotide
ggtcgagtgtatgtcagacaacccaactctccactgtcctggctagacctcaacg

SEQ ID NO: 507348 - DNA, 55 bp, Artificial
  Synthetic oligonucleotide
ggtcgggcccgaagcgttactcgcttccgcttgcgacgcgttgacttttgtgtgt

SEQ ID NO: 507349 - DNA, 55 bp, Artificial
  Synthetic oligonucleotide
ggtctgtaggccgcattcaaacaggtaacaccgctgatgggtactccatgcctcg

SEQ ID NO: 507350 - DNA, 55 bp, Artificial
  Synthetic oligonucleotide
ggtggcctcgcctacacgaatttccggtgcagtgcgatgataccgatcaccgagg

SEQ ID NO: 507351 - DNA, 55 bp, Artificial
  Synthetic oligonucleotide
taccggttggtatacctgggaggggccatgagacctgacgtcctgctttcggcgg

SEQ ID NO: 507352 - DNA, 55 bp, Artificial
  Synthetic oligonucleotide
gtagcaagacccgaacagccgacgcgcttcaggcgaagcagacgagaagtgtgcg

SEQ ID NO: 507353 - DNA, 55 bp, Artificial
  Synthetic oligonucleotide
gttggatcgcgcttcaatattgtcgtgtccatcgagtactgataggcgaagtgac

SEQ ID NO: 507354 - DNA, 55 bp, Artificial
  Synthetic oligonucleotide
gtcacgtgatgtccggaacatccggttcatcggtctgcgccgtcacacagtcgtc

SEQ ID NO: 507355 - DNA, 55 bp, Artificial
  Synthetic oligonucleotide
gtccattcgatccctttcgagtgagggaccggggtcacactcctgacacgaggtg

SEQ ID NO: 507356 - DNA, 55 bp, Artificial
  Synthetic oligonucleotide
gtccgaaaccgctacggtagtcggctcacggggaggcgcgaagttgttagttccc

SEQ ID NO: 507357 - DNA, 55 bp, Artificial
  Synthetic oligonucleotide
gtcgcgactgtgagtgccttccaaaatgcgggaagcgcttgcctccgacgcgggg

SEQ ID NO: 507358 - DNA, 55 bp, Artificial
  Synthetic oligonucleotide
gttgcgagtatcgagcacagtatcgagattcaacggagtcgctggtacgggtggg

SEQ ID NO: 507359 - DNA, 55 bp, Artificial
  Synthetic oligonucleotide
gtgacctccacgggtcttccaaagcgttggcaggtacctagttgggtacggctcc

SEQ ID NO: 507360 - DNA, 55 bp, Artificial
  Synthetic oligonucleotide
gtgagaagtcacgcgaagtggtcgtggatcgaatgccccactacagccccgagtg

SEQ ID NO: 507361 - DNA, 55 bp, Artificial
  Synthetic oligonucleotide
gtgggctgggcttacggtctgccgtatgcgtgaaggatcaggtccgctgacgtgg

SEQ ID NO: 507362 - DNA, 55 bp, Artificial
  Synthetic oligonucleotide
gtgtcggctgacagatcgggtacacaaccgactgttcgttactcgtagcaccacc

SEQ ID NO: 507363 - DNA, 55 bp, Artificial
  Synthetic oligonucleotide
gttactgtcccgcagtccccattacggtcagatcacgaaccacgagcggtacccc

SEQ ID NO: 507364 - DNA, 55 bp, Artificial
  Synthetic oligonucleotide
gctgagcatgccgaccgtcaatggcattcgccatagatcgaccccggtcctctcg

SEQ ID NO: 507365 - DNA, 55 bp, Artificial
  Synthetic oligonucleotide
ggaatcgcggttcgtcagaaagcttcaagcgtggcctcgccaatgcattctggtc

SEQ ID NO: 507366 - DNA, 55 bp, Artificial
  Synthetic oligonucleotide
ggatgctggcacacgggcgcgggaagcggacactccttttcgcgtagaatgatct

SEQ ID NO: 507367 - DNA, 55 bp, Artificial
  Synthetic oligonucleotide
ggatgggaattgtgatcccggtgccgatccggactactgttggcgcttcgacacc

SEQ ID NO: 507368 - DNA, 55 bp, Artificial
  Synthetic oligonucleotide
ggcaacgccccaccactcatccgagtgaagttcgtcccctcaaacctggtgcaac

SEQ ID NO: 507369 - DNA, 55 bp, Artificial
  Synthetic oligonucleotide
ggcaagcgtgcaaatcgaggtcaccgcgaagtaggcggcaacacctctcctctcg

SEQ ID NO: 507370 - DNA, 55 bp, Artificial
  Synthetic oligonucleotide
ggcgataggttactcatcagtacaacgcatcttcccgacccaccgcgaagcttcg

SEQ ID NO: 507371 - DNA, 55 bp, Artificial
  Synthetic oligonucleotide
ggcgccgttcccgtgagttgttgacggactgtaggggttgttggttcccacgcca

SEQ ID NO: 507372 - DNA, 55 bp, Artificial
  Synthetic oligonucleotide
ggcggccccggagcgggagtccacgaacgtgcggaacgggtcacggccgaagaca

SEQ ID NO: 507373 - DNA, 55 bp, Artificial
  Synthetic oligonucleotide
ggcggctaccgtattagagccaatcgcaagaagaatcccgtatgagcactgcgca

SEQ ID NO: 507374 - DNA, 55 bp, Artificial
  Synthetic oligonucleotide
gggaaccgcggtacacgtctcgcctcgtctagctgttttcaccgtaggttcggga

SEQ ID NO: 507375 - DNA, 55 bp, Artificial
  Synthetic oligonucleotide
gggacgtgacccggttcccgagaagttcagcttccggtaccaaggccctggtatg

SEQ ID NO: 507376 - DNA, 55 bp, Artificial
  Synthetic oligonucleotide
gggactgcggagtcgagactcgccactaggggattttaggggtgcacataggggc

SEQ ID NO: 507377 - DNA, 55 bp, Artificial
  Synthetic oligonucleotide
tactcgaagcgctggtcaggcgtgcccttggtttactcggctggaccgaaagggg

SEQ ID NO: 507378 - DNA, 55 bp, Artificial
  Synthetic oligonucleotide
gggaggacgtctcgcccaactggggaacacccactctaccaccttcaacggtgag

SEQ ID NO: 507379 - DNA, 55 bp, Artificial
  Synthetic oligonucleotide
gggcagggaaggctaatcgtgaggtatgctaaggatgtgtcggaaactgctgacg

SEQ ID NO: 507380 - DNA, 55 bp, Artificial
  Synthetic oligonucleotide
gggcggcgacaggacgaggctgtcggcatgacccatcgcgtggtacgaacaccgt

SEQ ID NO: 507381 - DNA, 55 bp, Artificial
  Synthetic oligonucleotide
ggggaggacgtcttgtggcaatagggacagcttgttagcgtgccccttctcaact

SEQ ID NO: 507382 - DNA, 55 bp, Artificial
  Synthetic oligonucleotide
gggtcatcagatcgactgacgtgaactctttgcgcagcgtaggcggctcgtgtgg

SEQ ID NO: 507383 - DNA, 55 bp, Artificial
  Synthetic oligonucleotide
gggtctagccaggacagtggagagttgggttgcctgacatacactcgaccggaac

SEQ ID NO: 507384 - DNA, 55 bp, Artificial
  Synthetic oligonucleotide
gggtctgcccgattcgggagtaccgttcgtgtgaataccacctgctgaactagct

SEQ ID NO: 507385 - DNA, 55 bp, Artificial
  Synthetic oligonucleotide
agcttcaccgcgagtacgggttcgtccccggagtagtccactctcactcgtgagc

SEQ ID NO: 507386 - DNA, 55 bp, Artificial
  Synthetic oligonucleotide
aggacaattcgggtcgcccgaggacgttgaatacgcggtgcagagagcaactgag

SEQ ID NO: 507387 - DNA, 55 bp, Artificial
  Synthetic oligonucleotide
agggaacccggtgtcgtcactaggtccgtcaatcaggatcaccacgtcagaggac

SEQ ID NO: 507388 - DNA, 55 bp, Artificial
  Synthetic oligonucleotide
agggaccgcccaaagacgacccgaacgcacctctacggccaaaccaggccccaaa

SEQ ID NO: 507389 - DNA, 55 bp, Artificial
  Synthetic oligonucleotide
aggggccgtcagggcgggttagtctgatttccgtgagaatcttcggccgccgaac

SEQ ID NO: 507390 - DNA, 55 bp, Artificial
  Synthetic oligonucleotide
agtccctccggggccgaatcacatgccgcaacattgaccggggctcggcctgaca

SEQ ID NO: 507391 - DNA, 55 bp, Artificial
  Synthetic oligonucleotide
agtggagtaacggagaacccgtcagacggccaggggcaacgcggtgggatgcacg

SEQ ID NO: 507392 - DNA, 55 bp, Artificial
  Synthetic oligonucleotide
ataccacagtggacagacagcgagctgcctcctcgcggtcaggggcgattgggta

SEQ ID NO: 507393 - DNA, 55 bp, Artificial
  Synthetic oligonucleotide
atcatccgtacgcgcggtgagggtatcggggcgacctggggagaaagctgagaga

SEQ ID NO: 507394 - DNA, 55 bp, Artificial
  Synthetic oligonucleotide
atcctcgcactctgctcagggtgactgcgactaacatgtcgtcatgggaaccgcg

SEQ ID NO: 507395 - DNA, 55 bp, Artificial
  Synthetic oligonucleotide
tgccaccgagccgttcttcgctcacgtttcggacgagtccgcaggggaagacttc

SEQ ID NO: 507396 - DNA, 55 bp, Artificial
  Synthetic oligonucleotide
atcgtccggcttgtccgcgcactacctgaacccgtcgcgatacgctgcattgtcg

SEQ ID NO: 507397 - DNA, 55 bp, Artificial
  Synthetic oligonucleotide
tgagtcactagtggcctcacgggcacgaggattcaatcccggatggggccgtttt

SEQ ID NO: 507398 - DNA, 55 bp, Artificial
  Synthetic oligonucleotide
tgaccgggtccaccttgtaccacggatgggcgcagggcaacccactgtcacgaaa

SEQ ID NO: 507399 - DNA, 55 bp, Artificial
  Synthetic oligonucleotide
atgtccgcactgccctaccgactcgccgcagagatcctcccataccacgacttcc

SEQ ID NO: 507400 - DNA, 55 bp, Artificial
  Synthetic oligonucleotide
attacctcgaagtgccgcagcacggtgcgaagcccattcactacccgtacgccta

SEQ ID NO: 507401 - DNA, 55 bp, Artificial
  Synthetic oligonucleotide
tgacacactaaacgcgacgtcttcaggcaaggagtgagaatgtcgaagcgagccc

SEQ ID NO: 507402 - DNA, 55 bp, Artificial
  Synthetic oligonucleotide
caacgaggggtgaaacggcccgtctcaacttctatgggctaccaaagggtaagag

SEQ ID NO: 507403 - DNA, 55 bp, Artificial
  Synthetic oligonucleotide
caacgcgttgctcggggtacacgataactccatatggtatgcagtatgcggtagc

SEQ ID NO: 507404 - DNA, 55 bp, Artificial
  Synthetic oligonucleotide
cacaccgctcgtgtaacggccaaaggttgttcaccctatctggtttcgcgagggg

SEQ ID NO: 507405 - DNA, 55 bp, Artificial
  Synthetic oligonucleotide
aaaccacgaattcgagtcctcgctttccgcgccgcagtgtgtgcgacggtggctc

SEQ ID NO: 507406 - DNA, 55 bp, Artificial
  Synthetic oligonucleotide
aaatcacccgtgaaagccccgggttagtcggcaagctcagggcgagacgagctcg

SEQ ID NO: 507407 - DNA, 55 bp, Artificial
  Synthetic oligonucleotide
aacagcgcagcgccctacacgctcaagttcaccggtcgaaccccggattcctgtg

SEQ ID NO: 507408 - DNA, 55 bp, Artificial
  Synthetic oligonucleotide
aagcctaggagtgtacgaggctcgatctctcgttgatcttccgtagccaagtctc

SEQ ID NO: 507409 - DNA, 55 bp, Artificial
  Synthetic oligonucleotide
aagtgtggtcgcaggggtgggagactcgttccggggcgaaaccatgatcccgtgg

SEQ ID NO: 507410 - DNA, 55 bp, Artificial
  Synthetic oligonucleotide
ttgtaaaggtgaaagtcatggcggactaccgttgctacccgctttgagtgtgcag

SEQ ID NO: 507411 - DNA, 55 bp, Artificial
  Synthetic oligonucleotide
acacacgggagggtcagtggatcagcggagcatctccggtctcctggggcgagtg

SEQ ID NO: 507412 - DNA, 55 bp, Artificial
  Synthetic oligonucleotide
acagcaggccccgaggagatcggagctcgaggcgtgaccgagcggatgaacgtcg

SEQ ID NO: 507413 - DNA, 55 bp, Artificial
  Synthetic oligonucleotide
accagcgatgaccgcaaataactatggtcgcatcgtaaatatctccagcaccctc

SEQ ID NO: 507414 - DNA, 55 bp, Artificial
  Synthetic oligonucleotide
acgcccgcgccaggtttgagcctgcccctccaggggtactgaccaagaccattgc

SEQ ID NO: 507415 - DNA, 55 bp, Artificial
  Synthetic oligonucleotide
ttgacgtcgctccttggcagatgctgggacgcgatgaggagttgcctcgactgtg

SEQ ID NO: 507416 - DNA, 55 bp, Artificial
  Synthetic oligonucleotide
actacccggccgagtctactttcgcgggtactggcaggttgggctgcatgccgtt

SEQ ID NO: 507417 - DNA, 55 bp, Artificial
  Synthetic oligonucleotide
acttccaaagctctttccggcgttgcaccgttcgtcggttccctctgcgcgggtg

SEQ ID NO: 507418 - DNA, 55 bp, Artificial
  Synthetic oligonucleotide
agaacggttgccaacgaggcgacagggccgaccccggtggaggctggcgggtggt

SEQ ID NO: 507419 - DNA, 55 bp, Artificial
  Synthetic oligonucleotide
ttcgctcacgtcatccttcagctcttgcgccagtcgcccatccgtcaccggacca

SEQ ID NO: 507420 - DNA, 55 bp, Artificial
  Synthetic oligonucleotide
tgtttcacgttgaacattgcttagcagtaaggtgacggcccgtatccaactggat

SEQ ID NO: 507421 - DNA, 55 bp, Artificial
  Synthetic oligonucleotide
tgtgccggcttaccgagaccgaccgtgacagattaggccgctcactctgcgcaca

SEQ ID NO: 507422 - DNA, 55 bp, Artificial
  Synthetic oligonucleotide
tgtgagctgctggacctcctgggacaagacaccgatctgtccgtgcaactcccgg

SEQ ID NO: 507423 - DNA, 55 bp, Artificial
  Synthetic oligonucleotide
agagtgactccgttcacgagacgccaggtcgtgcgaccctaacccaatcgggtga

SEQ ID NO: 507424 - DNA, 55 bp, Artificial
  Synthetic oligonucleotide
agcacattctcacaagagagccccgcgttcccagtgccttgagtcactcgtgaac

SEQ ID NO: 507425 - DNA, 55 bp, Artificial
  Synthetic oligonucleotide
tggagtgcggtcacaggagtgggagactcgttccggggcgaaccatgatcccgtg

SEQ ID NO: 507426 - DNA, 55 bp, Artificial
  Synthetic oligonucleotide
cgactacggaaatcgagggttccgcacttacttcggatgccgtataaagttcgcc

SEQ ID NO: 507427 - DNA, 55 bp, Artificial
  Synthetic oligonucleotide
cgactccacgcggccccgagaccacaagagcgtgctaccgatcagcctcgtgacc

SEQ ID NO: 507428 - DNA, 55 bp, Artificial
  Synthetic oligonucleotide
cgactggtatgcgtttcgtgatccggccgggctttgggagcgcacgttcttccag

SEQ ID NO: 507429 - DNA, 55 bp, Artificial
  Synthetic oligonucleotide
cgagcgttactgacaactggccctagttgttctgccctcaactacaccggacaga

SEQ ID NO: 507430 - DNA, 55 bp, Artificial
  Synthetic oligonucleotide
cgcacggggtttcgtgaccgcctcgacccctttcgggaagggtttcgccggggtg

SEQ ID NO: 507431 - DNA, 55 bp, Artificial
  Synthetic oligonucleotide
cgcggacaactactcggagcaagggttgtttgtcgcgtccagtcgttgcaacggg

SEQ ID NO: 507432 - DNA, 55 bp, Artificial
  Synthetic oligonucleotide
cgcgggtcgtgggagaacagccgttcgttgcgagcgacctggcagatctcggagt

SEQ ID NO: 507433 - DNA, 55 bp, Artificial
  Synthetic oligonucleotide
cggcgacatagcccttcgtcctcacgctccgttcgcacggcacaatagacgtgga

SEQ ID NO: 507434 - DNA, 55 bp, Artificial
  Synthetic oligonucleotide
cgtagagagcggaagcaggttggagccaacactctgcgtaggtacagagcccggc

SEQ ID NO: 507435 - DNA, 55 bp, Artificial
  Synthetic oligonucleotide
cgtcggtccgatcgctgcccagcagccgaactacggcgccctgaagggtggatca

SEQ ID NO: 507436 - DNA, 55 bp, Artificial
  Synthetic oligonucleotide
ctagccaacgaactaggtgtgcacgaggccagagtttcccaactggtagcccgcg

SEQ ID NO: 507437 - DNA, 55 bp, Artificial
  Synthetic oligonucleotide
ctcagcgctcctcgcagctcaattgccgggaaaggggaagaacgactctacgcgc

SEQ ID NO: 507438 - DNA, 55 bp, Artificial
  Synthetic oligonucleotide
ctccccacgagcactgatctctcgcgagtccgcgggacctgggcgcagcagagta

SEQ ID NO: 507439 - DNA, 55 bp, Artificial
  Synthetic oligonucleotide
ctcgctgtcgtgatgagaactctagcggaccccgtccgggtggatcaaaccgggg

SEQ ID NO: 507440 - DNA, 55 bp, Artificial
  Synthetic oligonucleotide
ctgccctatattgaatgcaatttgaatgcgaggcaccatgcactctcggaaggtc

SEQ ID NO: 507441 - DNA, 55 bp, Artificial
  Synthetic oligonucleotide
ctgtgggtgttggggcgagggcgggtccgtctcacgttgactcccgagggcgacc

SEQ ID NO: 507442 - DNA, 55 bp, Artificial
  Synthetic oligonucleotide
cttcacaaaacatgggtgcagtgtaagacgcaactcacaccttgtcgctagcccc

SEQ ID NO: 507443 - DNA, 55 bp, Artificial
  Synthetic oligonucleotide
tcacatatgcctggtgttagtaagtttcccacgagtagtgacccggacgcgaagg

SEQ ID NO: 507444 - DNA, 55 bp, Artificial
  Synthetic oligonucleotide
cttcgaccgtctatcgagtattgagccctttctacgcttttctactcggagccgg

SEQ ID NO: 507445 - DNA, 55 bp, Artificial
  Synthetic oligonucleotide
ctttagtcaacttgacaacggtgtggcagactcgatgatagataagtcttccctc

SEQ ID NO: 507446 - DNA, 55 bp, Artificial
  Synthetic oligonucleotide
tctccgcaagcgctcacaacgcggtctcgtggaggtcttccagactctcacggga

SEQ ID NO: 507447 - DNA, 55 bp, Artificial
  Synthetic oligonucleotide
caggccagtgcggttctccgggatctctcggtaacgagtcgagtaagttctccgg

SEQ ID NO: 507448 - DNA, 55 bp, Artificial
  Synthetic oligonucleotide
ccacgggctgttaggacatgctgctctattgtcgtctggactgggccagcagggg

SEQ ID NO: 507449 - DNA, 55 bp, Artificial
  Synthetic oligonucleotide
ccagtatgaagatcaagaagaatcggcgctagatgcattccgaggcatgggtgga

SEQ ID NO: 507450 - DNA, 55 bp, Artificial
  Synthetic oligonucleotide
ccatataacgcgctagttcacccgaacggaccatagcactgtcctagcactgtgc

SEQ ID NO: 507451 - DNA, 55 bp, Artificial
  Synthetic oligonucleotide
ccatgaaaccggcttacgggagcccgctgcgaatcacccagctactcggcttcag

SEQ ID NO: 507452 - DNA, 55 bp, Artificial
  Synthetic oligonucleotide
tcgtcgacccgactgagtgtgctgatcgtcctacgcgcttcccgttgcgctccaa

SEQ ID NO: 507453 - DNA, 55 bp, Artificial
  Synthetic oligonucleotide
tcgacgctatcgggcgccaaccgaactgaggcactacggcaagtggcagaagtcg

SEQ ID NO: 507454 - DNA, 55 bp, Artificial
  Synthetic oligonucleotide
ccgaagtctcgtacgtcggggaccaagaaggtccggcgtaaggaaaagaagaacg

SEQ ID NO: 507455 - DNA, 55 bp, Artificial
  Synthetic oligonucleotide
ccgccgggtcacctcatcctgaaacgtgcttacctccgaagcggaaaagcaacgg

SEQ ID NO: 507456 - DNA, 55 bp, Artificial
  Synthetic oligonucleotide
ccgcctcagcgaagaccaccacggcagactttgatcccatcaagtacctcgcatc

SEQ ID NO: 507457 - DNA, 55 bp, Artificial
  Synthetic oligonucleotide
ccgcgtatctgtggggagagtggaactgtgccacaacatcgagcggggcggaagt

SEQ ID NO: 507458 - DNA, 55 bp, Artificial
  Synthetic oligonucleotide
tccgggtctccacgcacggcacagtcggaggggacaccacgatcttgaccctgaa

SEQ ID NO: 507459 - DNA, 55 bp, Artificial
  Synthetic oligonucleotide
ccggtctccgttccccgattcctctgggcatggttcactgtcttagcggtcactg

SEQ ID NO: 507460 - DNA, 55 bp, Artificial
  Synthetic oligonucleotide
ccgtcaggtccgattccgtgcgtgtcacagcggctgatcctacggtcgaaggtgt

SEQ ID NO: 507461 - DNA, 55 bp, Artificial
  Synthetic oligonucleotide
ccgttttctcaggcaagcggtttccaacactgtgacagcaggtacgtgtgacgtc

SEQ ID NO: 507462 - DNA, 55 bp, Artificial
  Synthetic oligonucleotide
cctcaccagaagcgaccccgggccgaacctgaaacgattatcgttagcgacatga

SEQ ID NO: 507463 - DNA, 55 bp, Artificial
  Synthetic oligonucleotide
cctccacattgcggaactacagatggttgtcctctcacggtcaagcgaggttcga

SEQ ID NO: 507464 - DNA, 55 bp, Artificial
  Synthetic oligonucleotide
cctgagagcgtttctgcgctcccaggggtccagtcctacgcgagggaggctgttc

SEQ ID NO: 507465 - DNA, 55 bp, Artificial
  Synthetic oligonucleotide
tccggaacctgacccgacggtcatcccacgacagcgaccaagatccacgaagcga

SEQ ID NO: 507466 - DNA, 55 bp, Artificial
  Synthetic oligonucleotide
cctgtacccgaaagggtgacacaacctagcgtccggaccatgatcattcgaccgg

SEQ ID NO: 507467 - DNA, 54 bp, Artificial
  Synthetic oligonucleotide
tacgcacccacgggagggcttcctccacagtcacagctcaccaccgaccgtgct

SEQ ID NO: 507468 - DNA, 54 bp, Artificial
  Synthetic oligonucleotide
tttctgcagcttatagcgctgcgcaggtgatcaggggcgggacgcggcttaacc

SEQ ID NO: 507469 - DNA, 54 bp, Artificial
  Synthetic oligonucleotide
atcggagaagtgtctgcatttctaaaacccaggcagatccccgcttcacgctct

SEQ ID NO: 507470 - DNA, 54 bp, Artificial
  Synthetic oligonucleotide
ctggtcgcacgtggaatcgtaccagacgtgcaagacgattcattcaacacttcc

SEQ ID NO: 507471 - DNA, 54 bp, Artificial
  Synthetic oligonucleotide
agcatatgggtctgtgagaagccccgccaagcccggaaacagaccagggactga

SEQ ID NO: 507472 - DNA, 54 bp, Artificial
  Synthetic oligonucleotide
agagctgagccttgtacgtccgacacctgcaagtcgcggacttcagatcgtggg

SEQ ID NO: 507473 - DNA, 54 bp, Artificial
  Synthetic oligonucleotide
gaagggcactttccctgcgcccagtgccgtgtggggcactttccctgcgtcata

SEQ ID NO: 507474 - DNA, 54 bp, Artificial
  Synthetic oligonucleotide
atgaaagcaggctagctgcgcgagattaacgacgtggcttgttcaatcgagttc

SEQ ID NO: 507475 - DNA, 54 bp, Artificial
  Synthetic oligonucleotide
gctagcagaagacctcgagaactgactcacgaggtttcacaacaccctctcagg

SEQ ID NO: 507476 - DNA, 54 bp, Artificial
  Synthetic oligonucleotide
acgtcgtagagcagctggaccagtcgcccgctggtcgtgaagggttccttggcc

SEQ ID NO: 507477 - DNA, 54 bp, Artificial
  Synthetic oligonucleotide
cacgttctacgtcctgcgcaagcactggtccgattgggaggagacccacgaggt

SEQ ID NO: 507478 - DNA, 54 bp, Artificial
  Synthetic oligonucleotide
ggtacgacacagtgctcacgatcggttctcaccttcggtttgacggacggagag

SEQ ID NO: 507479 - DNA, 54 bp, Artificial
  Synthetic oligonucleotide
ggtgactgggaaccttcggaccagctgcgacgtgcagagtgcggcggtcccccc

SEQ ID NO: 507480 - DNA, 54 bp, Artificial
  Synthetic oligonucleotide
gtataccgacggtggttgagtaggtacatgacgcagacgcacacgcaggactac

SEQ ID NO: 507481 - DNA, 54 bp, Artificial
  Synthetic oligonucleotide
aaaaccaatcggaggtgagtcatgacccgagggcacggcccgaccgtacggcgg

SEQ ID NO: 507482 - DNA, 53 bp, Artificial
  Synthetic oligonucleotide
tcgttgaagtaggcgtcgttgaccttccacgccaggccgcgcgagtcgtacca

SEQ ID NO: 507483 - DNA, 53 bp, Artificial
  Synthetic oligonucleotide
gcgttcagttgcacgcagcgacgcctgaagttggccgatgctatcccagggcc

SEQ ID NO: 507484 - DNA, 53 bp, Artificial
  Synthetic oligonucleotide
ttcctccccagtcggactaacgacagacgtgggagggactaacccgtggaagg

SEQ ID NO: 507485 - DNA, 53 bp, Artificial
  Synthetic oligonucleotide
agacccgggagaattcgcggaaattggcggattggcagccttcctgcggttgt

SEQ ID NO: 507486 - DNA, 53 bp, Artificial
  Synthetic oligonucleotide
taacctgcggaagggtagctgaatgtcgatttcgtcctccgggcgtgactttc

SEQ ID NO: 507487 - DNA, 52 bp, Artificial
  Synthetic oligonucleotide
cccacaggtccttgttcgggtcactggggaacttgttttgcaccgacaccct

SEQ ID NO: 507488 - DNA, 52 bp, Artificial
  Synthetic oligonucleotide
caccccacttggtctccaggtggatgccgtacgagttggccagccacgatcc

SEQ ID NO: 507489 - DNA, 52 bp, Artificial
  Synthetic oligonucleotide
agcctgggatcatgggccatcaccattgctttgtttgcggtctgcggttccg

SEQ ID NO: 507490 - DNA, 52 bp, Artificial
  Synthetic oligonucleotide
gacacggcctaccccattcgccggcgcccttcctcgtcacgcggaggaatac

SEQ ID NO: 507491 - DNA, 52 bp, Artificial
  Synthetic oligonucleotide
agactttccgctcgtgccagacatcggggcgcggtgttgctttccttcgggc

SEQ ID NO: 507492 - DNA, 52 bp, Artificial
  Synthetic oligonucleotide
agaccaaccacgtgaagccgcccacgaaggaaggtccgaaggaggactgcaa

SEQ ID NO: 507493 - DNA, 52 bp, Artificial
  Synthetic oligonucleotide
ggtgtgccaccccgcaacgacgcacggaggtcaccgtcatgccgtctgagga

SEQ ID NO: 507494 - DNA, 51 bp, Artificial
  Synthetic oligonucleotide
atcgtctcggtcacagacgatcttaatcgatcctgaacccggtgtgcctgc

SEQ ID NO: 507495 - DNA, 51 bp, Artificial
  Synthetic oligonucleotide
aataccgtgcaaccggccgatgtcccgcaacacctgaccgtcctccaacca

SEQ ID NO: 507496 - DNA, 51 bp, Artificial
  Synthetic oligonucleotide
atgctcagcgccccggacctctttgacttggacgccgacgatagtgtgatc

SEQ ID NO: 507497 - DNA, 51 bp, Artificial
  Synthetic oligonucleotide
attctggtttccatgccgtcgcaccctagaccactgagttccctgagggaa

SEQ ID NO: 507498 - DNA, 51 bp, Artificial
  Synthetic oligonucleotide
cacaacctactcgcttgtgaacacgatcaaccagtgatttactgcctccat

SEQ ID NO: 507499 - DNA, 51 bp, Artificial
  Synthetic oligonucleotide
cccacctgttacggtgggtgcccgatcactcacggcgacaaacgatgttgc

SEQ ID NO: 507500 - DNA, 51 bp, Artificial
  Synthetic oligonucleotide
tccgtctggacggagagttgtcggattatcgaggggagaccatgctgatca

SEQ ID NO: 507501 - DNA, 51 bp, Artificial
  Synthetic oligonucleotide
ccggctggaaacgtggtactcgcacgatcacccgtgtgccttcaccctttc

SEQ ID NO: 507502 - DNA, 51 bp, Artificial
  Synthetic oligonucleotide
cctgcaaggctcacccggtcggaacttgacacgcgggagcggtgccgaata

SEQ ID NO: 507503 - DNA, 51 bp, Artificial
  Synthetic oligonucleotide
tcaccctagttcacgcacggaacaccgcccgcagtgacggggccctcgtcc

SEQ ID NO: 507504 - DNA, 51 bp, Artificial
  Synthetic oligonucleotide
cttccgaacgtggcctgtgtcggaggatcctggttgacgccgaaggacgct

SEQ ID NO: 507505 - DNA, 51 bp, Artificial
  Synthetic oligonucleotide
gacggatgtgccagagcaggaccccatcgcagtcgtcgtaggtcggaggtt

SEQ ID NO: 507506 - DNA, 51 bp, Artificial
  Synthetic oligonucleotide
gcaacactttcgggcacgacttcggtgagttggaccggatcatgcgaaagt

SEQ ID NO: 507507 - DNA, 51 bp, Artificial
  Synthetic oligonucleotide
tagcggcgagaacgagtcgaccggttccggatatgttgcccacttggtcaa

SEQ ID NO: 507508 - DNA, 51 bp, Artificial
  Synthetic oligonucleotide
gctgactcgcgaacagcacatagcacgtaccggtgtgtccctgcgggtaga

SEQ ID NO: 507509 - DNA, 51 bp, Artificial
  Synthetic oligonucleotide
gggagcatagaggtatcgccccgcgaacgacccgaggtatcgagtgacaca

SEQ ID NO: 507510 - DNA, 51 bp, Artificial
  Synthetic oligonucleotide
gtgaagtctcgcgactggatcgacgtgatgaggaggttcccgatgccaggt

SEQ ID NO: 507511 - DNA, 50 bp, Artificial
  Synthetic oligonucleotide
gcaagtattgttggggttgtcacggagcccaacacagaaagggtacgaga

SEQ ID NO: 507512 - DNA, 60 bp, Artificial
  Synthetic oligonucleotide
attgctgcgaaaggacgcatccggcactcgatagatacgccggtgcaacattgccgaaaa

SEQ ID NO: 507513 - DNA, 60 bp, Artificial
  Synthetic oligonucleotide
attctgtttgtttgcttaggacgaacggagaccacaatgggctggactgatttcacccgt

SEQ ID NO: 507514 - DNA, 60 bp, Artificial
  Synthetic oligonucleotide
ggaatcatcgcttgtttgcgcaccttgccactggcggctaccgtgccgcgcagttcgtga

SEQ ID NO: 507515 - DNA, 60 bp, Artificial
  Synthetic oligonucleotide
gctttctcgggaattcgcgtgcattccacgcctccggattcgcctcgctctccccaccca

SEQ ID NO: 507516 - DNA, 60 bp, Artificial
  Synthetic oligonucleotide
tatacactaacctggactcccaccgcgatttccatcggtgttaatgggcactcctacttc

SEQ ID NO: 507517 - DNA, 60 bp, Artificial
  Synthetic oligonucleotide
gctttcgcccgatccacgatgttttcggctccgattgtccggaaggcgcgccagataagg

SEQ ID NO: 507518 - DNA, 60 bp, Artificial
  Synthetic oligonucleotide
cctggaacggatatgacgctctcttaccgacaatgggttgcgcgattggtctggctactt

SEQ ID NO: 507519 - DNA, 60 bp, Artificial
  Synthetic oligonucleotide
cctggtcgggtgcaagccatgtgtccggcctttacgaggcggcacatacagccgcaggcc

SEQ ID NO: 507520 - DNA, 60 bp, Artificial
  Synthetic oligonucleotide
gcgccgacaatgatctgcctcaccccgggatcgttgtgcttgactctcctctgctttctt

SEQ ID NO: 507521 - DNA, 60 bp, Artificial
  Synthetic oligonucleotide
atcttcgagcatcttcactattgaagtacgagtcttacgattaactgcaaaaccacacca

SEQ ID NO: 507522 - DNA, 60 bp, Artificial
  Synthetic oligonucleotide
gcgccgaatgagtgcagcgccgccgaagagatccggctcgacagacaattggtaaaagcg

SEQ ID NO: 507523 - DNA, 60 bp, Artificial
  Synthetic oligonucleotide
atcgattaccgacggcccaatcccaatgcggatttcagcctaaagtcatcccgctctagc

SEQ ID NO: 507524 - DNA, 60 bp, Artificial
  Synthetic oligonucleotide
gcgaaatgacaccgtaaggacaaactgctctgtcccaattgaaccattgtagattttgat

SEQ ID NO: 507525 - DNA, 60 bp, Artificial
  Synthetic oligonucleotide
atccccacaccttagtctaaaagagaggcgctaagcgtcgtacaaacgctcaccctagtg

SEQ ID NO: 507526 - DNA, 60 bp, Artificial
  Synthetic oligonucleotide
cgagttcgcgtgcgcaatcatccgcaaatgccttggtcaacaggcgcatgaacaaacgtc

SEQ ID NO: 507527 - DNA, 60 bp, Artificial
  Synthetic oligonucleotide
cgatagcggtggtcaccagtgttttccggtagggtcgggttgttcaagaccaacctgatg

SEQ ID NO: 507528 - DNA, 60 bp, Artificial
  Synthetic oligonucleotide
tcctgatgggatgttggggtgttgagaaccaacccctgaccaggagaccgatcgattacc

SEQ ID NO: 507529 - DNA, 60 bp, Artificial
  Synthetic oligonucleotide
agttgccttcggtggacgcggcccggagcggagagctcgcaggaacgctagctgcggttt

SEQ ID NO: 507530 - DNA, 60 bp, Artificial
  Synthetic oligonucleotide
agttctttattatctcgaggatgtagccgcgatacgcaccgccgttcacaacctggtgag

SEQ ID NO: 507531 - DNA, 60 bp, Artificial
  Synthetic oligonucleotide
gccggcacggtctatcaggtacgcaacggtgcttccgaatgagcaaggccaaccgcatca

SEQ ID NO: 507532 - DNA, 60 bp, Artificial
  Synthetic oligonucleotide
gccgcaggccctgatgaagtccgcagatcgggttccaatcaaattaacgcgctcgaagcg

SEQ ID NO: 507533 - DNA, 60 bp, Artificial
  Synthetic oligonucleotide
gccacgaaaggcctggtctcggtgttcatggacggcacatatgtccgagcagttccgggt

SEQ ID NO: 507534 - DNA, 60 bp, Artificial
  Synthetic oligonucleotide
cgccgatttccgcgcgcaatcactatcgatagggaccaagtatcgatagcgatggatttg

SEQ ID NO: 507535 - DNA, 60 bp, Artificial
  Synthetic oligonucleotide
cagatcgggtgggtgccttgacaatcttccaacgctcacgtcaatgggtggcgcccttcc

SEQ ID NO: 507536 - DNA, 60 bp, Artificial
  Synthetic oligonucleotide
caggattatcgtcgtctcccccagcttgattggcgaaatcccctcccgaccatcgggagt

SEQ ID NO: 507537 - DNA, 60 bp, Artificial
  Synthetic oligonucleotide
caggtggtcctctttagagcgactatacggttgacacggcccctgcgggcgaaccggggc

SEQ ID NO: 507538 - DNA, 60 bp, Artificial
  Synthetic oligonucleotide
ggtaaccaaaacgcccgcatgcgtcagtacgttgaccaggttttcggtcgagcgagcctt

SEQ ID NO: 507539 - DNA, 60 bp, Artificial
  Synthetic oligonucleotide
catgagagcgcacacggccgctgggagagcttgaaatggccgggtcaaaggaaccggcgt

SEQ ID NO: 507540 - DNA, 60 bp, Artificial
  Synthetic oligonucleotide
cacgccagatggcaagcccaccaatctggataggagatgttcgccgtgttggccgaacgg

SEQ ID NO: 507541 - DNA, 60 bp, Artificial
  Synthetic oligonucleotide
cattgcgatcactgatgagggctctcaggcgttggcgatcggtcggcgaaacggtgaagg

SEQ ID NO: 507542 - DNA, 60 bp, Artificial
  Synthetic oligonucleotide
gtcttgctaaaagatacgcgcgggccaacagggtctcgctacaccaagctctcgacttgc

SEQ ID NO: 507543 - DNA, 60 bp, Artificial
  Synthetic oligonucleotide
gtgagctaacctcgagcacgagtgaatatacgcatgatgctggatgcgtacgcccaatac

SEQ ID NO: 507544 - DNA, 60 bp, Artificial
  Synthetic oligonucleotide
ccaacacgcccgcccttggagtgaccggaactggcgaaacttccataacctggatgtttg

SEQ ID NO: 507545 - DNA, 60 bp, Artificial
  Synthetic oligonucleotide
gggcggcaaaccgctaaagaactccgcccggtccggctcgcagcctgcgctcggccgcat

SEQ ID NO: 507546 - DNA, 60 bp, Artificial
  Synthetic oligonucleotide
gtgcttggagcattctgatcactggttgtgaaggggagcgcaccgcaagcactgcgaagg

SEQ ID NO: 507547 - DNA, 60 bp, Artificial
  Synthetic oligonucleotide
gtggatcgataggcgctttaatcgggagccgatatctttccgcttcctcgcttcgcgtca

SEQ ID NO: 507548 - DNA, 60 bp, Artificial
  Synthetic oligonucleotide
gtgttagactgcattcaatagctgacggctgccgcacacactggcagcgaagacgtcgct

SEQ ID NO: 507549 - DNA, 60 bp, Artificial
  Synthetic oligonucleotide
ccccgcgttggccttccaacctgttcggttcgatcgataccaaactcgcaaccgagggcg

SEQ ID NO: 507550 - DNA, 60 bp, Artificial
  Synthetic oligonucleotide
gttaggcggtaataagctaatcgatgttatagcggttgatctctctgaacgttgacgcat

SEQ ID NO: 507551 - DNA, 60 bp, Artificial
  Synthetic oligonucleotide
cccgagcctgcaagcaggcgaagtaccagctgggtggcatgctagcccgtgcagcatctc

SEQ ID NO: 507552 - DNA, 60 bp, Artificial
  Synthetic oligonucleotide
cccgttgtgggggcgcgagtcggacgcgtggttctgcttacattgtagcggaaagattac

SEQ ID NO: 507553 - DNA, 60 bp, Artificial
  Synthetic oligonucleotide
ggccaaactgtcgaagtgctgtcgggagaagggttgaggacggccaggtgcactggggtc

SEQ ID NO: 507554 - DNA, 60 bp, Artificial
  Synthetic oligonucleotide
taaccaaacgctcgtatatcattgcgcagggcagttcctatgagcgcccttggtacgagc

SEQ ID NO: 507555 - DNA, 60 bp, Artificial
  Synthetic oligonucleotide
caacgcaaggtatgtcggtcgccttagcttggcgcagaagtcagggttcgtctgtcgggc

SEQ ID NO: 507556 - DNA, 60 bp, Artificial
  Synthetic oligonucleotide
ccgccttgcgcgtcgggcatattgccgacgggtgaaatcagtccagcccattgtggtctc

SEQ ID NO: 507557 - DNA, 60 bp, Artificial
  Synthetic oligonucleotide
tacagtggaggacccgtcgcgtgccgatcactggtatgtcatcctcgaccgaacgtgcac

SEQ ID NO: 507558 - DNA, 60 bp, Artificial
  Synthetic oligonucleotide
attgtgcgtcgcaagacctggaagaacggtaacgaagcttccggttcgcacaaactccaa

SEQ ID NO: 507559 - DNA, 60 bp, Artificial
  Synthetic oligonucleotide
acagttcgaccctccgccaagtccaatcgtgtagttccaggacttcgagaaattgatcgg

SEQ ID NO: 507560 - DNA, 60 bp, Artificial
  Synthetic oligonucleotide
ttaaatccgctacgtcacgggagttggtcgcaacagggttagccagctctattgctgcga

SEQ ID NO: 507561 - DNA, 60 bp, Artificial
  Synthetic oligonucleotide
cggcattgatccgcggcggccgaaataccctatatccgttgagcgtattcccgatcacag

SEQ ID NO: 507562 - DNA, 60 bp, Artificial
  Synthetic oligonucleotide
acaacaacgagaagcaatactatgcggtaaaaagacgcaagaacggccggggtaaggacg

SEQ ID NO: 507563 - DNA, 60 bp, Artificial
  Synthetic oligonucleotide
ttaccatgggcgtggcttcttcccaagtgcagccgcagcctgcgagtggggccgcgttga

SEQ ID NO: 507564 - DNA, 60 bp, Artificial
  Synthetic oligonucleotide
gaggagcagacagtcgggttgaggtccttccgtggtcaagttgtggaccagacagcagaa

SEQ ID NO: 507565 - DNA, 60 bp, Artificial
  Synthetic oligonucleotide
aatcgctctcgcgccatggatgagaagcgcccgcagatatctgtcacctcccttgctaat

SEQ ID NO: 507566 - DNA, 60 bp, Artificial
  Synthetic oligonucleotide
gagccatcgccgctatgagctatgatcatccgcaaatcagcctggccgctgtggcaagct

SEQ ID NO: 507567 - DNA, 60 bp, Artificial
  Synthetic oligonucleotide
cgggtgagacctcctttccttggtaagcactcgattggcaccgcctgccggatagcgcct

SEQ ID NO: 507568 - DNA, 60 bp, Artificial
  Synthetic oligonucleotide
cgtagatcggaaatagcaaagactcgtgcgctgcgaacttcagcagccaactgagacttt

SEQ ID NO: 507569 - DNA, 60 bp, Artificial
  Synthetic oligonucleotide
aagcttgacgcgcacaattccaaggggcattcggccctcactttgcgcgacgccatgtac

SEQ ID NO: 507570 - DNA, 60 bp, Artificial
  Synthetic oligonucleotide
aagcttcctcgaaccgcgtcggatggcggagaaggctctgacagcggtcatccaggaagc

SEQ ID NO: 507571 - DNA, 60 bp, Artificial
  Synthetic oligonucleotide
gaaggcgcaccattctcatccgcggctaagaccgagagggccaattgtcgctgaatgtaa

SEQ ID NO: 507572 - DNA, 60 bp, Artificial
  Synthetic oligonucleotide
ctttcaccgcgcgtgatagcgacggccacctcgcaatatgcaaaggcgaagtttccgatt

SEQ ID NO: 507573 - DNA, 60 bp, Artificial
  Synthetic oligonucleotide
ctcgatgactaccgtaccatgccgcaagttgattcccgattagagacttcgggtgtaccg

SEQ ID NO: 507574 - DNA, 60 bp, Artificial
  Synthetic oligonucleotide
tttcggaatagcaacgagaatgccggacattgcgtgaaacgcggtaagcggttagctgac

SEQ ID NO: 507575 - DNA, 60 bp, Artificial
  Synthetic oligonucleotide
tttgggtaacgcaagctgctcctggccaatattgcggtcttcgaattcgcgtgtggggcg

SEQ ID NO: 507576 - DNA, 60 bp, Artificial
  Synthetic oligonucleotide
aactcggaatcctcacttgcggccgtgcacgattttttcgctgcgagcgcgctccaattg

SEQ ID NO: 507577 - DNA, 60 bp, Artificial
  Synthetic oligonucleotide
ctgcgcggcgtaccaaggtgtgcatcgcgtcggacggcatagtctgaaaggacagcgatt

SEQ ID NO: 507578 - DNA, 60 bp, Artificial
  Synthetic oligonucleotide
ctcggccgccgtaactgccaatatttcttgatgcgccatctcaccatcgacaagaaccat

SEQ ID NO: 507579 - DNA, 60 bp, Artificial
  Synthetic oligonucleotide
aaaggagccgctcgtgaaatcgatgcttatctgtgtgttggcgaccgtcgtccttcccac

SEQ ID NO: 507580 - DNA, 60 bp, Artificial
  Synthetic oligonucleotide
aaagaggtcaactttacggccgtagacgacgcactccccatagaaattcggataggtcgg

SEQ ID NO: 507581 - DNA, 60 bp, Artificial
  Synthetic oligonucleotide
ctgcaacatgccagatcacggtgaagagaagaagctcaatccgtgaccaattgagcactt

SEQ ID NO: 507582 - DNA, 60 bp, Artificial
  Synthetic oligonucleotide
ctgaacagatcgaggttcgtgacaacaaggcgccataccgaatgagccgagccacgaaag

SEQ ID NO: 507583 - DNA, 60 bp, Artificial
  Synthetic oligonucleotide
gcacatatgtccgagcagttccgggttccagacgcgtcatttcgaggtcgtcatggggcg

SEQ ID NO: 507584 - DNA, 60 bp, Artificial
  Synthetic oligonucleotide
tcgctctctagtgcacggtcaaggtaaggtggaagcttgccttggaccgaactggtttgg

SEQ ID NO: 507585 - DNA, 60 bp, Artificial
  Synthetic oligonucleotide
gcaacgtagcggtggagttgcgcctggcacgacaattatggcagtgggctcacgccacca

SEQ ID NO: 507586 - DNA, 60 bp, Artificial
  Synthetic oligonucleotide
agcagacgaatcattgcgcaacaccaactgcgcatatcgcaacgacccagggttcaccaa

SEQ ID NO: 507587 - DNA, 60 bp, Artificial
  Synthetic oligonucleotide
cgcttggcacagatgatcatcgaattcgacaggtatctcgaaatcaaccaatcttccatg

SEQ ID NO: 507588 - DNA, 60 bp, Artificial
  Synthetic oligonucleotide
cgcttgtgctgttcatgccaaacgagcatcaatctgtcgcaggcactacccagaccaaaa

SEQ ID NO: 507589 - DNA, 60 bp, Artificial
  Synthetic oligonucleotide
gatcgctttacacctgtgatcgaagggcgacttaggcgaatcgtggtcatcgcgcggcga

SEQ ID NO: 507590 - DNA, 60 bp, Artificial
  Synthetic oligonucleotide
cggacgcaatggtcggacggtacgtgacgtctgggacgatgatgactgtcaggcttatct

SEQ ID NO: 507591 - DNA, 60 bp, Artificial
  Synthetic oligonucleotide
gatacgtgtatgtcaacgcataaggttgctgccccacggcgaaaggtcactcttccactg

SEQ ID NO: 507592 - DNA, 60 bp, Artificial
  Synthetic oligonucleotide
acgtggccggacgcgtggcatgtcccgtcgtcgcaagactatcccttttcgttcgtctct

SEQ ID NO: 507593 - DNA, 60 bp, Artificial
  Synthetic oligonucleotide
acgtctttccttccatcggatgcgatatgtggttatgtcttggccaagggcatgaggggt

SEQ ID NO: 507594 - DNA, 60 bp, Artificial
  Synthetic oligonucleotide
acggctgaactacggccgtttatagcaagagagaaaatctgtgatgccgtcctggtcggg

SEQ ID NO: 507595 - DNA, 60 bp, Artificial
  Synthetic oligonucleotide
acgcccgcatgcgtcagtacgttgaccaggttttcggtcgagcgagccttccagtcgctg

SEQ ID NO: 507596 - DNA, 60 bp, Artificial
  Synthetic oligonucleotide
acgatcgagagccaaatcgattatgtactaagtgttctgcgccagatgggcgagaagaga

SEQ ID NO: 507597 - DNA, 60 bp, Artificial
  Synthetic oligonucleotide
acgaatgacgacaaccgtcgtgccggaccgtcgtatttgtatcccagcccttggcgcatg

SEQ ID NO: 507598 - DNA, 60 bp, Artificial
  Synthetic oligonucleotide
acctggtgagcatgctggcgccaagtgggcacatggtttttggatccgcaatcgatgcta

SEQ ID NO: 507599 - DNA, 60 bp, Artificial
  Synthetic oligonucleotide
gaggcgcaatcaattcggaaatcgcttcccaatatgaggaattcactgagcgaactctcg

SEQ ID NO: 507600 - DNA, 60 bp, Artificial
  Synthetic oligonucleotide
accgtttcttcccgtaaagagtgtctggggcgacaacgattcagggggctcgcggccgaa

SEQ ID NO: 507601 - DNA, 60 bp, Artificial
  Synthetic oligonucleotide
tggtctgttcagaagtagctcagttgaatatccaacaaacgccagtggccttgctgtttc

SEQ ID NO: 507602 - DNA, 60 bp, Artificial
  Synthetic oligonucleotide
tggtgcgacctcccagtctagcagccaccctcccgtccagcaagaacagctgctccctca

SEQ ID NO: 507603 - DNA, 60 bp, Artificial
  Synthetic oligonucleotide
tgtcatcagcttgcgaacgatgggaagctgacatggcgccgctaatgcctacggcctcgg

SEQ ID NO: 507604 - DNA, 60 bp, Artificial
  Synthetic oligonucleotide
acattctggactggtttcacggatcgatgcgcgttcagcaccttcttgccgatcgctggt

SEQ ID NO: 507605 - DNA, 59 bp, Artificial
  Synthetic oligonucleotide
attcgcccaggtacggcggaatctgccagcacgcagtggcgcaatgttgccgaccagat

SEQ ID NO: 507606 - DNA, 58 bp, Artificial
  Synthetic oligonucleotide
ccgttcgacggcattcccgtgccgccgggagatgcgagggtgtattctggcgtaggac

SEQ ID NO: 507607 - DNA, 58 bp, Artificial
  Synthetic oligonucleotide
gcatttctgaaggccggcattgatgtaatactagacaagcccatgaccacaacagttt

SEQ ID NO: 507608 - DNA, 58 bp, Artificial
  Synthetic oligonucleotide
ttttgtgcgaggccacggtagtggaatagtacccgaagcagaacgcctgatacatcta

SEQ ID NO: 507609 - DNA, 58 bp, Artificial
  Synthetic oligonucleotide
aagatcgcgataggcgactgctccgtcgttcatgaccagcgtcggaaaatggcgcgca

SEQ ID NO: 507610 - DNA, 58 bp, Artificial
  Synthetic oligonucleotide
gttagcctatgttcatgacccgacactcgtccactgcggtattttgaatctgacgggc

SEQ ID NO: 507611 - DNA, 55 bp, Artificial
  Synthetic oligonucleotide
gccaacgccgattgacactcttgggaagtctcattgttctaggccacgctctgag

SEQ ID NO: 507612 - DNA, 55 bp, Artificial
  Synthetic oligonucleotide
gccaaacgtcaagactgcgcgacaccagacaatccgcgcctgcttgaggacgcaa

SEQ ID NO: 507613 - DNA, 55 bp, Artificial
  Synthetic oligonucleotide
tcgccgatgctttggggacttcgcctaactggctcttaggattgaccgtcggcac

SEQ ID NO: 507614 - DNA, 55 bp, Artificial
  Synthetic oligonucleotide
gcattgccgaagattaccattcccggcctttctgacatccctgtcattggcgggt

SEQ ID NO: 507615 - DNA, 55 bp, Artificial
  Synthetic oligonucleotide
gcattacaacaatcttcacccgcacagtgctttaggatatcaatcgccgcgcgag

SEQ ID NO: 507616 - DNA, 55 bp, Artificial
  Synthetic oligonucleotide
gcatgtccgtaaccccgcaagccaggtacactcgcacgccagtccctggtccgat

SEQ ID NO: 507617 - DNA, 55 bp, Artificial
  Synthetic oligonucleotide
gcatgggcgtactgtttgggacggaagtggcctatcgcgtccgcaccattgtctc

SEQ ID NO: 507618 - DNA, 55 bp, Artificial
  Synthetic oligonucleotide
gcaggacattacctcgagcagtgaagagaagttttcctcggacgggttcagtcgc

SEQ ID NO: 507619 - DNA, 55 bp, Artificial
  Synthetic oligonucleotide
gcacatcttggctctcggaggatcccatgcaggcattcagcagtgaacgctgcaa

SEQ ID NO: 507620 - DNA, 55 bp, Artificial
  Synthetic oligonucleotide
tcgctcaggaggccggtagacgatgctcaaggaagttgtgcaaatggctgcgctg

SEQ ID NO: 507621 - DNA, 55 bp, Artificial
  Synthetic oligonucleotide
gcacaagggaggagaacctgtgagaaaactgcgaaaaggcacgccccttctggcg

SEQ ID NO: 507622 - DNA, 55 bp, Artificial
  Synthetic oligonucleotide
gcaagacgcttgttccggatgacgaagccgcttggccgttcactggccgacagct

SEQ ID NO: 507623 - DNA, 55 bp, Artificial
  Synthetic oligonucleotide
tctgatttgaggcactgagcgtccctgctgcggacgtgggtcggatcattccgtt

SEQ ID NO: 507624 - DNA, 55 bp, Artificial
  Synthetic oligonucleotide
gcaacggtgacagcgctttgaaaaccgcttattcgcttcattgcagccaggtcct

SEQ ID NO: 507625 - DNA, 55 bp, Artificial
  Synthetic oligonucleotide
gatcggagcaccgaggaggttgctcgcgaaaaggccatgccgacgttcaaccagt

SEQ ID NO: 507626 - DNA, 55 bp, Artificial
  Synthetic oligonucleotide
tctgcgaggcgaaacctcacgttgcacgctcgtcgaccggtcaagagaattcctc

SEQ ID NO: 507627 - DNA, 55 bp, Artificial
  Synthetic oligonucleotide
tgaatcggacaaaaggaatcttaaagtggcggacatcaatccaccgtgttccccg

SEQ ID NO: 507628 - DNA, 55 bp, Artificial
  Synthetic oligonucleotide
tgaccccaaaatgacgccggaatacgatcgcaacgccagcaacccatctcttccg

SEQ ID NO: 507629 - DNA, 55 bp, Artificial
  Synthetic oligonucleotide
gcgacgatagtgattgaattggtcgcacggcgtttgtgtctgccgccggctgccg

SEQ ID NO: 507630 - DNA, 55 bp, Artificial
  Synthetic oligonucleotide
gcgaatggtgtcatgcggcagagattcaacgagcttcgtcagcgtcctgcggtcc

SEQ ID NO: 507631 - DNA, 55 bp, Artificial
  Synthetic oligonucleotide
tcccaatgcggatttcagcctaaagtcatcccgctctagccagattgcgccgcgc

SEQ ID NO: 507632 - DNA, 55 bp, Artificial
  Synthetic oligonucleotide
gcctggggctgggtgacccgtctcacaatatgcaggtatcgagggttgcgagagc

SEQ ID NO: 507633 - DNA, 55 bp, Artificial
  Synthetic oligonucleotide
gcctgacaaataccgtggtcgccccgttcgctgaacgtgttgagagcgtgctccg

SEQ ID NO: 507634 - DNA, 55 bp, Artificial
  Synthetic oligonucleotide
gccgggtcagggattcgaccggctggatattacaaatgcgcatcttatcgctctt

SEQ ID NO: 507635 - DNA, 55 bp, Artificial
  Synthetic oligonucleotide
tccgccactgatgcgggcgggtcggaaaagctgattcggcaaaagctaattgaga

SEQ ID NO: 507636 - DNA, 55 bp, Artificial
  Synthetic oligonucleotide
tccggcaccacgcgcagtcaggacaaattctctggcctcgccagcgcacacatga

SEQ ID NO: 507637 - DNA, 55 bp, Artificial
  Synthetic oligonucleotide
tcgacattccgcaggagatcctctcccatgtggcgcgaaacgtcacggcaagcgg

SEQ ID NO: 507638 - DNA, 55 bp, Artificial
  Synthetic oligonucleotide
gccgcgctgagctgcgatgtccttcgggtgaacctggtgctttagagcgtcgaag

SEQ ID NO: 507639 - DNA, 55 bp, Artificial
  Synthetic oligonucleotide
tcgatccgcgcccaacgcggaaggatctggaaaagcgaggccgcgttaaacgcag

SEQ ID NO: 507640 - DNA, 55 bp, Artificial
  Synthetic oligonucleotide
gccgcaccatgatcagattacccacacaatagagcgcgagtgacagtaccagcac

SEQ ID NO: 507641 - DNA, 55 bp, Artificial
  Synthetic oligonucleotide
gccgagtcctgccactcttcgcgacgccattaccggcgagaatggtatcctcaag

SEQ ID NO: 507642 - DNA, 55 bp, Artificial
  Synthetic oligonucleotide
gccctccgatgcggatctgaatgtcctttcccggcaactggcttacgacgtgggg

SEQ ID NO: 507643 - DNA, 55 bp, Artificial
  Synthetic oligonucleotide
gcccgacactgtcgtcgaacccgcattgcggaccaagttggttgttataacctgc

SEQ ID NO: 507644 - DNA, 55 bp, Artificial
  Synthetic oligonucleotide
gcccctgcaaatcagggcatcctgccatcaaaatctacaatggttcaattgggac

SEQ ID NO: 507645 - DNA, 55 bp, Artificial
  Synthetic oligonucleotide
gccatggtgaagccctcatattccgtagggcatcagaatcgtaccacgaaggcgt

SEQ ID NO: 507646 - DNA, 55 bp, Artificial
  Synthetic oligonucleotide
tcgcaccaaggcactcacctacatccggcaaagcccgttcacggaaatggacagc

SEQ ID NO: 507647 - DNA, 55 bp, Artificial
  Synthetic oligonucleotide
tcgccccgtcggtgcatgccacaatgcgacaaatggcccttaactgcggcaagcg

SEQ ID NO: 507648 - DNA, 55 bp, Artificial
  Synthetic oligonucleotide
gccaactctccacgcggttccgacctaggacaagtgccagcgcaaggtcgagttc

SEQ ID NO: 507649 - DNA, 55 bp, Artificial
  Synthetic oligonucleotide
gaatgccgtagccgcaaggtccggcttcgtagcaaaacttcagcgtccgccccga

SEQ ID NO: 507650 - DNA, 55 bp, Artificial
  Synthetic oligonucleotide
ttggcgtcggtcccgagcggctgcacgaccagattgcgttcgcgataggtggaga

SEQ ID NO: 507651 - DNA, 55 bp, Artificial
  Synthetic oligonucleotide
gaaagtgcgttgtcaatgactgcgtgtcctcaggtcttcaacctttacgtcgctg

SEQ ID NO: 507652 - DNA, 55 bp, Artificial
  Synthetic oligonucleotide
gaaagcctcatgtggaccgccagggatcgcactaccttcttggcataggcggggc

SEQ ID NO: 507653 - DNA, 55 bp, Artificial
  Synthetic oligonucleotide
ctttccgtgcttctgatggtatcaggcctcaagctgctttggtgatggagtgccc

SEQ ID NO: 507654 - DNA, 55 bp, Artificial
  Synthetic oligonucleotide
cttggacgaccgcggccttatcccggcgagacacacgtgcaagggactatgcatg

SEQ ID NO: 507655 - DNA, 55 bp, Artificial
  Synthetic oligonucleotide
ctgtggtctcatggtttatctccggaaatctgaatagctggacaccctatcgccg

SEQ ID NO: 507656 - DNA, 55 bp, Artificial
  Synthetic oligonucleotide
ctgtcgcaagacctgtctgatccaactccaggaatgcaaaatccggaactaccct

SEQ ID NO: 507657 - DNA, 55 bp, Artificial
  Synthetic oligonucleotide
ctggatgaaacctgacgccgccggttcgaagctagaggaggcgggctatacggac

SEQ ID NO: 507658 - DNA, 55 bp, Artificial
  Synthetic oligonucleotide
ctggagtatgggcctggaacagtgcgagccttccaacagaaaacgcttccgcttg

SEQ ID NO: 507659 - DNA, 55 bp, Artificial
  Synthetic oligonucleotide
ctggagggacccgtgcggatctcgcataccgtctcttggcggtctaacgccgtaa

SEQ ID NO: 507660 - DNA, 55 bp, Artificial
  Synthetic oligonucleotide
ctggactcccaccgcgatttccatcggtgttaatgggcactcctacttcacctac

SEQ ID NO: 507661 - DNA, 55 bp, Artificial
  Synthetic oligonucleotide
ttggcgttccacgtcccgacgtccgcaggcagacaggtccggatgggtcattgta

SEQ ID NO: 507662 - DNA, 55 bp, Artificial
  Synthetic oligonucleotide
tttgtccgttgtccactttccccatgccctcccagatggagaggacgaagggacg

SEQ ID NO: 507663 - DNA, 55 bp, Artificial
  Synthetic oligonucleotide
ctgccaggccttgctagactaaatgttcgcctggggctgggtgacccgtctcaca

SEQ ID NO: 507664 - DNA, 55 bp, Artificial
  Synthetic oligonucleotide
ttttatggtctcaaggtacaaaagccctaaagaatcgctctccggaaatgtcgca

SEQ ID NO: 507665 - DNA, 55 bp, Artificial
  Synthetic oligonucleotide
ttttgaccgtcaatatgcagatgaatttcgtcgtggcgggcattctttgcctggt

SEQ ID NO: 507666 - DNA, 55 bp, Artificial
  Synthetic oligonucleotide
ctgatcaacggaattgacaggatggtacagagtgaggcaacggcgctcacctcag

SEQ ID NO: 507667 - DNA, 55 bp, Artificial
  Synthetic oligonucleotide
ctgacgtccttcctcaagcaggtcgaagacgggcagaggttcgtcctgacgtccc

SEQ ID NO: 507668 - DNA, 55 bp, Artificial
  Synthetic oligonucleotide
tgagcagccactccgtgagcgtcgtagccgattacacggaactccggccttgctc

SEQ ID NO: 507669 - DNA, 55 bp, Artificial
  Synthetic oligonucleotide
gatagttgcagctgctgaaccgaatgcagcgatacgcaagtcgccggtcaccgtt

SEQ ID NO: 507670 - DNA, 55 bp, Artificial
  Synthetic oligonucleotide
tgatggcagcaaccgcggctgcggtgcttgcgtctcccgcggccgctgcggaggt

SEQ ID NO: 507671 - DNA, 55 bp, Artificial
  Synthetic oligonucleotide
tgattgtccctggaacctacgcgcccgagagtccagtgatggtcgaggggagtcg

SEQ ID NO: 507672 - DNA, 55 bp, Artificial
  Synthetic oligonucleotide
ttaagccttacgatcaatccgcggacgggctgaaacgggcgacaagagcgtgcgc

SEQ ID NO: 507673 - DNA, 55 bp, Artificial
  Synthetic oligonucleotide
gaggagccgcgtgacaggatttccccgctggtggaaacgagcacggccttggaat

SEQ ID NO: 507674 - DNA, 55 bp, Artificial
  Synthetic oligonucleotide
ttagtctttgcgttcgggaggtggcttgtgcccgctatgaccgccccggctctca

SEQ ID NO: 507675 - DNA, 55 bp, Artificial
  Synthetic oligonucleotide
gaggagagccgggcacgtcgtactgcagaaacagaaagcgctgtgacccgttggg

SEQ ID NO: 507676 - DNA, 55 bp, Artificial
  Synthetic oligonucleotide
ttcagtcagcttagcctgggcgaggagttgcacggccggaagggcggcacttggt

SEQ ID NO: 507677 - DNA, 55 bp, Artificial
  Synthetic oligonucleotide
gacttcatgcagggtttgcaatgcagcccggacacgactatgtggttgtcgcgcg

SEQ ID NO: 507678 - DNA, 55 bp, Artificial
  Synthetic oligonucleotide
gactgccgatctatgttcgcacggaccgggttatctttcggatggtttcctggaa

SEQ ID NO: 507679 - DNA, 55 bp, Artificial
  Synthetic oligonucleotide
ttccaaccgaggcaaccacataacgatcgcggctccgggcgaggcaatctggtca

SEQ ID NO: 507680 - DNA, 55 bp, Artificial
  Synthetic oligonucleotide
gacggtgtataccgcgccttgtagcaggtaaggcaaattcgattgaaggacagga

SEQ ID NO: 507681 - DNA, 55 bp, Artificial
  Synthetic oligonucleotide
gacgcatcaggtccggcggtactcaacccgcgtatcagagcatgatcaaccgtcg

SEQ ID NO: 507682 - DNA, 55 bp, Artificial
  Synthetic oligonucleotide
ttcgaagcccgagacatatggtacgttctcgccttatgggtggtcgtggccgcaa

SEQ ID NO: 507683 - DNA, 55 bp, Artificial
  Synthetic oligonucleotide
gacgaacggagaccacaatgggctggactgatttcacccgtcggcaatatgcccg

SEQ ID NO: 507684 - DNA, 55 bp, Artificial
  Synthetic oligonucleotide
gacctttaccaatacgtgatcgtcagggaccagatcccgaagcgagccgcacatg

SEQ ID NO: 507685 - DNA, 55 bp, Artificial
  Synthetic oligonucleotide
gaccttgcgctggcacttgtcctaggtcggaaccgcgtggagagttggccgtcta

SEQ ID NO: 507686 - DNA, 55 bp, Artificial
  Synthetic oligonucleotide
gaccgtgcctcctgctttccccaggacgcactcatgcgaaacacgacgtccgaga

SEQ ID NO: 507687 - DNA, 55 bp, Artificial
  Synthetic oligonucleotide
gaccgccgtaccaattgagaaataagcgagaatcgctacgagtgacctcactgga

SEQ ID NO: 507688 - DNA, 55 bp, Artificial
  Synthetic oligonucleotide
gggcgtttcaccaccagttcgcttcccattttcgtgcggcgatcgggcagacagg

SEQ ID NO: 507689 - DNA, 55 bp, Artificial
  Synthetic oligonucleotide
gggcgtgtcgtcacattgatcaaacggaaagggagttacgcgtttgaaaacgttc

SEQ ID NO: 507690 - DNA, 55 bp, Artificial
  Synthetic oligonucleotide
gtgctcgtcactggcacaaccaatatggtggatgctgaactcaagttagcccaaa

SEQ ID NO: 507691 - DNA, 55 bp, Artificial
  Synthetic oligonucleotide
gggccaaagattgaccctctcaagatcatccagatttatgaagccagcgaatggg

SEQ ID NO: 507692 - DNA, 55 bp, Artificial
  Synthetic oligonucleotide
gggattgtcgaatgttgtggcatggttctgtaacttccggtcagtgtgtcagcgg

SEQ ID NO: 507693 - DNA, 55 bp, Artificial
  Synthetic oligonucleotide
gggagggcacggcaggagccgtatcgaatcaggatcggagcaaaatatcccctgg

SEQ ID NO: 507694 - DNA, 55 bp, Artificial
  Synthetic oligonucleotide
gggacataagccctatggcatccgtcatgcctgcgaggaacgatattgcagcgac

SEQ ID NO: 507695 - DNA, 55 bp, Artificial
  Synthetic oligonucleotide
ggcttggacttccgtcagcaaccttatcgggtcaaccggctttaccatgacgcgg

SEQ ID NO: 507696 - DNA, 55 bp, Artificial
  Synthetic oligonucleotide
ggctaagattgccgcccgcgacaagagcctcgccgtcgtatcgcttctgccattt

SEQ ID NO: 507697 - DNA, 55 bp, Artificial
  Synthetic oligonucleotide
ggcgttgcgattgccagaaccgtcgtcaaccacgtagacccgcaactctccagcg

SEQ ID NO: 507698 - DNA, 55 bp, Artificial
  Synthetic oligonucleotide
ggcgtgcaggcacttctcccagaagggcattcgtaccaacgtaaccctctgcttc

SEQ ID NO: 507699 - DNA, 55 bp, Artificial
  Synthetic oligonucleotide
gttctcgacgactttcgagaactttagggtggctatgcgggtcgggtacgccagg

SEQ ID NO: 507700 - DNA, 55 bp, Artificial
  Synthetic oligonucleotide
ggcgtgaaagaactatcttttaccgtcctgctactcacgtctttccttccatcgg

SEQ ID NO: 507701 - DNA, 55 bp, Artificial
  Synthetic oligonucleotide
ggcgggaagaacgccctgatcgattcgtgcgtttcgacttggctgatgaacagga

SEQ ID NO: 507702 - DNA, 55 bp, Artificial
  Synthetic oligonucleotide
ggcctggcttcgtaccggcattcgtgggacttggcgcccctcattgggactccga

SEQ ID NO: 507703 - DNA, 55 bp, Artificial
  Synthetic oligonucleotide
ggccgtttatagcaagagagaaaatctgtgatgccgtcctggtcgggtgcaagcc

SEQ ID NO: 507704 - DNA, 55 bp, Artificial
  Synthetic oligonucleotide
ggccgcttatcttgtttggccaccaagcaatgaccccgtccatgaagacgcctac

SEQ ID NO: 507705 - DNA, 55 bp, Artificial
  Synthetic oligonucleotide
gttgaccaggttttcggtcgagcgagccttccagtcgctgtactctgcgcgggga

SEQ ID NO: 507706 - DNA, 55 bp, Artificial
  Synthetic oligonucleotide
ggccgctgggagagcttgaaatggccgggtcaaaggaaccggcgttcctcagaca

SEQ ID NO: 507707 - DNA, 55 bp, Artificial
  Synthetic oligonucleotide
ggtgtccgggaaagcgagaacgtcctacggaaaagggctcagggccattacgcag

SEQ ID NO: 507708 - DNA, 55 bp, Artificial
  Synthetic oligonucleotide
ggtgtcagcggaggcatatatcgcaccacgtaaacaacttcgcggaactcgcgtc

SEQ ID NO: 507709 - DNA, 55 bp, Artificial
  Synthetic oligonucleotide
ggtgcgatgatccggcggccacaagcgaatggcagatagaacttagcgcggcgca

SEQ ID NO: 507710 - DNA, 55 bp, Artificial
  Synthetic oligonucleotide
ggtgcacgacttcggccgtcctattggcatgcttcaagctgctgttgcgcatgta

SEQ ID NO: 507711 - DNA, 55 bp, Artificial
  Synthetic oligonucleotide
ggtgcacagggctgattcccaagttcgttttgcgtgcatgcgagcgaaggtcgcg

SEQ ID NO: 507712 - DNA, 55 bp, Artificial
  Synthetic oligonucleotide
gtcaacttagaaatgcgacaccatcttattccttagtactgcgtttgcaagttgc

SEQ ID NO: 507713 - DNA, 55 bp, Artificial
  Synthetic oligonucleotide
ggtcctacctcgagaaatccatcgaaggcaggtcttttcaagtggcgagagtgtc

SEQ ID NO: 507714 - DNA, 55 bp, Artificial
  Synthetic oligonucleotide
gtcaggaaagcctactatatgaagtttccggttgttgccagccgacaatcctggt

SEQ ID NO: 507715 - DNA, 55 bp, Artificial
  Synthetic oligonucleotide
ggtcagcaggcatgatgctgtacgccgctcccggtgagccggaatgtcccttttc

SEQ ID NO: 507716 - DNA, 55 bp, Artificial
  Synthetic oligonucleotide
ggtatctcgtgcttcgtctgaagttcgaacgcgaactccgccattccggcacatc

SEQ ID NO: 507717 - DNA, 55 bp, Artificial
  Synthetic oligonucleotide
ggtagaccacgatgtcgtcaatcgaggcagtcaccgttcccaaatggggaatgac

SEQ ID NO: 507718 - DNA, 55 bp, Artificial
  Synthetic oligonucleotide
gtcaggtgatacaacggtctcgatctcaatcgagagttcgctcagtgaattcctc

SEQ ID NO: 507719 - DNA, 55 bp, Artificial
  Synthetic oligonucleotide
gtccgtttcgttccaagttctgccttcgccactgtcaaagcctcatgaagtcgtg

SEQ ID NO: 507720 - DNA, 55 bp, Artificial
  Synthetic oligonucleotide
gggtcatccctacatagagtgtcaacgcccggtacttcaagacggagcatccgat

SEQ ID NO: 507721 - DNA, 55 bp, Artificial
  Synthetic oligonucleotide
ggggtgttgagaaccaacccctgaccaggagaccgatcgattaccgacggcccaa

SEQ ID NO: 507722 - DNA, 55 bp, Artificial
  Synthetic oligonucleotide
gtcgtgcttggcgtcataacgaaagcggcgcataggcacagggctacggattggc

SEQ ID NO: 507723 - DNA, 55 bp, Artificial
  Synthetic oligonucleotide
gtgccggtagcgatgattgtgacgtcgcgacctttcccaaagtgccgaatgacgt

SEQ ID NO: 507724 - DNA, 55 bp, Artificial
  Synthetic oligonucleotide
ggggcggtagcggtcaggcagctttcgagcggtgaactttaataggtggacgtta

SEQ ID NO: 507725 - DNA, 55 bp, Artificial
  Synthetic oligonucleotide
ggggacatttcccgaccttcccgtatcactcgcaaatctctaccagcgacacact

SEQ ID NO: 507726 - DNA, 55 bp, Artificial
  Synthetic oligonucleotide
gggctatagacgaacaccttatgcccaagcccgactgattgagcatgttacatgt

SEQ ID NO: 507727 - DNA, 55 bp, Artificial
  Synthetic oligonucleotide
gctcgatgccttctggggcaacaaggcgctcggggaaactcacgagttgctggca

SEQ ID NO: 507728 - DNA, 55 bp, Artificial
  Synthetic oligonucleotide
gctcagccacgaagtcgagctcctgaaacgactgatcaacgagtaggtgcgatcg

SEQ ID NO: 507729 - DNA, 55 bp, Artificial
  Synthetic oligonucleotide
tatcgaggctacccttccgtatcactttgatcgtggttccgacgactactccgag

SEQ ID NO: 507730 - DNA, 55 bp, Artificial
  Synthetic oligonucleotide
gctaacgttacgttataactgtcaaagccgattagagatgcgacgccgctggccc

SEQ ID NO: 507731 - DNA, 55 bp, Artificial
  Synthetic oligonucleotide
gcgtcaatacttatcatacatgttgagaaagctcggtcaacaagtcggggccggt

SEQ ID NO: 507732 - DNA, 55 bp, Artificial
  Synthetic oligonucleotide
tattcaaggcgccgctccggcagaaggggaaaacccgggtgatcacagtagctta

SEQ ID NO: 507733 - DNA, 55 bp, Artificial
  Synthetic oligonucleotide
gcgtagccatatgatgggcgagaacaaagctcgcttcggcagcgctatagacgag

SEQ ID NO: 507734 - DNA, 55 bp, Artificial
  Synthetic oligonucleotide
gcggtgtggaagcgtagtcgtcaagatcgagagttagatcctcgccgtttgcgac

SEQ ID NO: 507735 - DNA, 55 bp, Artificial
  Synthetic oligonucleotide
gcggctccgggcggatcaaggtaaggaagcggatatgagcgaaacgagccttgcc

SEQ ID NO: 507736 - DNA, 55 bp, Artificial
  Synthetic oligonucleotide
gcggatggtgatggttgcaaggcgtcccatgcgaagagccgttttgatgcggctg

SEQ ID NO: 507737 - DNA, 55 bp, Artificial
  Synthetic oligonucleotide
gcggacgttgcgagcagcaaaggttttgcgttcgtagaggtcttctggatccggc

SEQ ID NO: 507738 - DNA, 55 bp, Artificial
  Synthetic oligonucleotide
gcgctggaacgagcaggctgactatctcaagcgcacgcaactttatccgatccca

SEQ ID NO: 507739 - DNA, 55 bp, Artificial
  Synthetic oligonucleotide
gcgcgcaggggcagttgaccttcatacagctcctggtcactatattcagtgtaga

SEQ ID NO: 507740 - DNA, 55 bp, Artificial
  Synthetic oligonucleotide
gcgcgaagcttcacgcgcaactccgcgggccaaggttcacctccagggatcttaa

SEQ ID NO: 507741 - DNA, 55 bp, Artificial
  Synthetic oligonucleotide
tcaggatcgtcgaccaaggcactgtggccgtcagagcgagctgtgctagccccgt

SEQ ID NO: 507742 - DNA, 55 bp, Artificial
  Synthetic oligonucleotide
tcatcgcgcctgcaatgcggtcctgatgcttttcgagcagtctcgcgacgctcgc

SEQ ID NO: 507743 - DNA, 55 bp, Artificial
  Synthetic oligonucleotide
gcgcaggaaggaacactgtaggtcgaaaacttgggacggcgattttgccccgatc

SEQ ID NO: 507744 - DNA, 55 bp, Artificial
  Synthetic oligonucleotide
gcgcaatacactgatgtgcttgaacgcaatccgtcccacattccatggtgtggat

SEQ ID NO: 507745 - DNA, 55 bp, Artificial
  Synthetic oligonucleotide
gcgatggcgagtaagcgagttaggaagcaaccagagtgtatcataattggcttga

SEQ ID NO: 507746 - DNA, 55 bp, Artificial
  Synthetic oligonucleotide
gcgatctgaataccggtaatctttccgctacaatgtaagcagaaccacgcgtccg

SEQ ID NO: 507747 - DNA, 55 bp, Artificial
  Synthetic oligonucleotide
ggcccggaggtatggctgatgtttcctgtccttcaatcgaatttgccttacctgc

SEQ ID NO: 507748 - DNA, 55 bp, Artificial
  Synthetic oligonucleotide
ggccaactgctgctgccctcttgagggttcttgtaggtgaagtaggagtgcccat

SEQ ID NO: 507749 - DNA, 55 bp, Artificial
  Synthetic oligonucleotide
gtttgccctttgtgtccgtccccatacaggcgagatgtgtaccggggcgaacctg

SEQ ID NO: 507750 - DNA, 55 bp, Artificial
  Synthetic oligonucleotide
taacgcaagccgatgtcatcaatccgacaaatcgacggaaattatcgaatggtac

SEQ ID NO: 507751 - DNA, 55 bp, Artificial
  Synthetic oligonucleotide
ggcaggagctcagttccaatgcgctggagcttgccgtttccagagttcggaagcg

SEQ ID NO: 507752 - DNA, 55 bp, Artificial
  Synthetic oligonucleotide
ggcactgaactttgacccttattggagtgcgcccttgggtggacagtccgggatg

SEQ ID NO: 507753 - DNA, 55 bp, Artificial
  Synthetic oligonucleotide
ggattgaggcactttgccgcctgtccgcggaggattcgttctcaccgcacgacga

SEQ ID NO: 507754 - DNA, 55 bp, Artificial
  Synthetic oligonucleotide
ggagcaactcggagattccttcggtcatcaccgcattcaatcagaaatcgcctaa

SEQ ID NO: 507755 - DNA, 55 bp, Artificial
  Synthetic oligonucleotide
ggacggaactaccgcgattgtcataggcgggcaccgcttgacagattgattgaac

SEQ ID NO: 507756 - DNA, 55 bp, Artificial
  Synthetic oligonucleotide
ggacgccacttcgtgcagggagttcatcttgcgattgagcttcgtgatttcggtc

SEQ ID NO: 507757 - DNA, 55 bp, Artificial
  Synthetic oligonucleotide
ggaccttgctgtccggcgtagcgttttgacaggttcgagcatcgcaatgcaacgg

SEQ ID NO: 507758 - DNA, 55 bp, Artificial
  Synthetic oligonucleotide
ggaccattgagagtattccggcgatatcgggtgatttgtccagcggaccccagat

SEQ ID NO: 507759 - DNA, 55 bp, Artificial
  Synthetic oligonucleotide
ggacatcgcccaacagaatcgtctggcgaacgatacccacttgcgtttgactatg

SEQ ID NO: 507760 - DNA, 55 bp, Artificial
  Synthetic oligonucleotide
taccgtgcttaatcaggctctgagccgcgccggctatgatgtgcgaattacctcc

SEQ ID NO: 507761 - DNA, 55 bp, Artificial
  Synthetic oligonucleotide
ggacaaactgctctgtcccaattgaaccattgtagattttgatggcaggatgccc

SEQ ID NO: 507762 - DNA, 55 bp, Artificial
  Synthetic oligonucleotide
tagccaccctaaagttctcgaaagtcgtcgagaacgtagcattttgcgacagagg

SEQ ID NO: 507763 - DNA, 55 bp, Artificial
  Synthetic oligonucleotide
ggaaagacgtgagtagcaggacggtaaaagatagttctttcacgccatagccctg

SEQ ID NO: 507764 - DNA, 55 bp, Artificial
  Synthetic oligonucleotide
tagccctcataagagccatgacggcgcccttgctagccgcatacgctgtcgacgg

SEQ ID NO: 507765 - DNA, 55 bp, Artificial
  Synthetic oligonucleotide
tatatggcggaccgcaagactttcccaactgacgtcggcccgaatgagtgaggcg

SEQ ID NO: 507766 - DNA, 55 bp, Artificial
  Synthetic oligonucleotide
gcttcacccggcactgacaaccgacgttaacgagcaaaacggcgaagcactgggc

SEQ ID NO: 507767 - DNA, 55 bp, Artificial
  Synthetic oligonucleotide
cccttgcgaaccggaggggacaccgcccagtgtatgcagcgcgatcatctcgaaa

SEQ ID NO: 507768 - DNA, 55 bp, Artificial
  Synthetic oligonucleotide
cccgtgtccacctctcggatcaacaaagggatgatatcgacaggggacgtgtgcc

SEQ ID NO: 507769 - DNA, 55 bp, Artificial
  Synthetic oligonucleotide
cccggccttcgtcatgcccaatgatcccggtgtgtcccagattctgcgaattgcg

SEQ ID NO: 507770 - DNA, 55 bp, Artificial
  Synthetic oligonucleotide
cccgcgatttgcatggggctgatacaggcattgtttgaagatttcaagcgccctg

SEQ ID NO: 507771 - DNA, 55 bp, Artificial
  Synthetic oligonucleotide
cccgccattcgccccgaggaagattctcaggttctcgtcgaacaaatgccgcttg

SEQ ID NO: 507772 - DNA, 55 bp, Artificial
  Synthetic oligonucleotide
ccccgtaaacggtagagttcacggtggtttacgtcgttttctacagggcttagct

SEQ ID NO: 507773 - DNA, 55 bp, Artificial
  Synthetic oligonucleotide
ccccagcttgattggcgaaatcccctcccgaccatcgggagtagtatcagtgacg

SEQ ID NO: 507774 - DNA, 55 bp, Artificial
  Synthetic oligonucleotide
cccatacggactcttatgttaggcggataccactagccattcttgtcgaggcagg

SEQ ID NO: 507775 - DNA, 55 bp, Artificial
  Synthetic oligonucleotide
ccatgagtcattcgcttttcgattcggacgtgccgcatccggaacccagcaatct

SEQ ID NO: 507776 - DNA, 55 bp, Artificial
  Synthetic oligonucleotide
ccatatttcccccgttcctgctcccgaggacgcggcactgatggagtctaggcgg

SEQ ID NO: 507777 - DNA, 55 bp, Artificial
  Synthetic oligonucleotide
ccatatggtcattggtgatatagcttatcctcaagatgatcatcacgatgcgata

SEQ ID NO: 507778 - DNA, 55 bp, Artificial
  Synthetic oligonucleotide
ccagtgaaggtagctccttgggctgcaatttgatcgacgtgtgtaatgatataac

SEQ ID NO: 507779 - DNA, 55 bp, Artificial
  Synthetic oligonucleotide
ccagaggctcaatcaccatggacgagctgtagatctctttggtgccgccggaaag

SEQ ID NO: 507780 - DNA, 55 bp, Artificial
  Synthetic oligonucleotide
ccagaggcatttgagtatgagccggatgttattggtggagaccaattcatgcaag

SEQ ID NO: 507781 - DNA, 55 bp, Artificial
  Synthetic oligonucleotide
ccagacaccggcctgccagcggtagaaggtcaaacgggaaagaagcgtggacgca

SEQ ID NO: 507782 - DNA, 55 bp, Artificial
  Synthetic oligonucleotide
ccaccatgcctaatcagttgatttccgccgaaaattcattgtttgcagcgcaata

SEQ ID NO: 507783 - DNA, 55 bp, Artificial
  Synthetic oligonucleotide
ccaagctgctcgccaccgtacaggtttagagttggttcaagtattgggtccttgc

SEQ ID NO: 507784 - DNA, 55 bp, Artificial
  Synthetic oligonucleotide
catgggtaggcaagaagccaacgagcagtttctgatcacgtccttcctcgacgga

SEQ ID NO: 507785 - DNA, 55 bp, Artificial
  Synthetic oligonucleotide
catgcggtagcggccttttgcggcgatgagcccaaactcaccgaccaatccacga

SEQ ID NO: 507786 - DNA, 55 bp, Artificial
  Synthetic oligonucleotide
catcgaattcgacaggtatctcgaaatcaaccaatcttccatgccgaactacgcc

SEQ ID NO: 507787 - DNA, 55 bp, Artificial
  Synthetic oligonucleotide
cagtcgtcactacaatgccttgcacgctcacggttcccacgtgttcatgttcagg

SEQ ID NO: 507788 - DNA, 55 bp, Artificial
  Synthetic oligonucleotide
ccttggtaagcactcgattggcaccgcctgccggatagcgccttgatggcctaag

SEQ ID NO: 507789 - DNA, 55 bp, Artificial
  Synthetic oligonucleotide
ccttgacgtgatcgcgcccattgatgacggcctggggtgtatagacaccgctccg

SEQ ID NO: 507790 - DNA, 55 bp, Artificial
  Synthetic oligonucleotide
cctggccaatattgcggtcttcgaattcgcgtgtggggcgacagaggcgggcttg

SEQ ID NO: 507791 - DNA, 55 bp, Artificial
  Synthetic oligonucleotide
cctgcggctcccatccgcttatgttgggcatatgtaaacctttacatcgggcgtg

SEQ ID NO: 507792 - DNA, 55 bp, Artificial
  Synthetic oligonucleotide
cctgcgcttcagtcatcgactccgagctgttggccagctgcgaaagacgggtgtg

SEQ ID NO: 507793 - DNA, 55 bp, Artificial
  Synthetic oligonucleotide
cctgcaggtgatcgcgactgttaacttcaagggtggctcagcaaagacgaccacg

SEQ ID NO: 507794 - DNA, 55 bp, Artificial
  Synthetic oligonucleotide
cctgatttagcacattcacatgaatgtcagtctgaggtgcgccgaatgccgcacc

SEQ ID NO: 507795 - DNA, 55 bp, Artificial
  Synthetic oligonucleotide
cctgaacgaatgcgatataattgcgtattatcacacatagaacgttccgccagca

SEQ ID NO: 507796 - DNA, 55 bp, Artificial
  Synthetic oligonucleotide
cctatggcctgtttggaccagccggtttgccgcaggagatcattgcctggtggga

SEQ ID NO: 507797 - DNA, 55 bp, Artificial
  Synthetic oligonucleotide
cctatcaacttgggttacggtcaggctgtgctatgtgttacgagcacctagtaca

SEQ ID NO: 507798 - DNA, 55 bp, Artificial
  Synthetic oligonucleotide
ccgtttcgaactcttaccgcctatcctttctcgaatcctatcgacatggtggcac

SEQ ID NO: 507799 - DNA, 55 bp, Artificial
  Synthetic oligonucleotide
ccgtctcgggcaatccctctcgcatatctttcggcagtttagaaaccgggtagtg

SEQ ID NO: 507800 - DNA, 55 bp, Artificial
  Synthetic oligonucleotide
ccgtcgttatgcgccgctgggcagaatatgacggtgttgccggtacatggactgg

SEQ ID NO: 507801 - DNA, 55 bp, Artificial
  Synthetic oligonucleotide
ccgtccgctcaaagatagttcggaaacgttctgcaccccagcgctgacggatacg

SEQ ID NO: 507802 - DNA, 55 bp, Artificial
  Synthetic oligonucleotide
ccgtagccctgtgcctatgcgccgctttcgttatgacgccaagcacgacaccctt

SEQ ID NO: 507803 - DNA, 55 bp, Artificial
  Synthetic oligonucleotide
ccggcgggtatctcgaccgatatgtcgtccagcgcaaccgtgcttccgaaggtca

SEQ ID NO: 507804 - DNA, 55 bp, Artificial
  Synthetic oligonucleotide
ccggccgagctgttgtccaagacgtaatcggtcatcttgacggatacgccgttcg

SEQ ID NO: 507805 - DNA, 55 bp, Artificial
  Synthetic oligonucleotide
ccggattttgatcgatcgtgctgaccctggcgtacccgacccgcatagccaccct

SEQ ID NO: 507806 - DNA, 55 bp, Artificial
  Synthetic oligonucleotide
ccgcgctctggggtgaaaatctctcatacattctaatcgagggatattatgagtg

SEQ ID NO: 507807 - DNA, 55 bp, Artificial
  Synthetic oligonucleotide
ccgccaagagggaaagatggcgatagcaaatcgagtagaatcagttctcgggacc

SEQ ID NO: 507808 - DNA, 55 bp, Artificial
  Synthetic oligonucleotide
ccgagcgttcaggtgggtgaccaatgccgccgcatcgtagccatttcgggtcaac

SEQ ID NO: 507809 - DNA, 55 bp, Artificial
  Synthetic oligonucleotide
ccgacgatcgtgtcccggactggcagatccttgtagccgaatgtctcgggcttga

SEQ ID NO: 507810 - DNA, 55 bp, Artificial
  Synthetic oligonucleotide
ataccattctgggacgacggcacctactgggacagtttcgtccaggttcaaagtt

SEQ ID NO: 507811 - DNA, 55 bp, Artificial
  Synthetic oligonucleotide
agtcgctcatggttccattttaaggtcttgaccctcgtaggggtcagataggccg

SEQ ID NO: 507812 - DNA, 55 bp, Artificial
  Synthetic oligonucleotide
agggcctgagtatcggggctttgcctccggaggaacgaagggtctcttccgtctg

SEQ ID NO: 507813 - DNA, 55 bp, Artificial
  Synthetic oligonucleotide
aggcagccgcaaacatgccagcgacggacaggcccatgcccatatagacgctctg

SEQ ID NO: 507814 - DNA, 55 bp, Artificial
  Synthetic oligonucleotide
aggacatcggactggtcaaatgaacaagggagacaacccttccgtcgaaacgcgc

SEQ ID NO: 507815 - DNA, 55 bp, Artificial
  Synthetic oligonucleotide
agctcaggacttcacccttcgagctcagcccaagaccctccaaggacagacgcaa

SEQ ID NO: 507816 - DNA, 55 bp, Artificial
  Synthetic oligonucleotide
agcgctgccgaagcgagctttgttctcgcccatcatatggctacgcagcatgtga

SEQ ID NO: 507817 - DNA, 55 bp, Artificial
  Synthetic oligonucleotide
agcccgtcattggacacctcaagagcgaacacagaatggaccggaattatctcgc

SEQ ID NO: 507818 - DNA, 55 bp, Artificial
  Synthetic oligonucleotide
agcatcacgggcattggcaactcctccctattgactgccaattgatgatgaacgc

SEQ ID NO: 507819 - DNA, 55 bp, Artificial
  Synthetic oligonucleotide
agacggtgagcagatgaatgcggcgtcggcagcccacaagaggagacgcatccga

SEQ ID NO: 507820 - DNA, 55 bp, Artificial
  Synthetic oligonucleotide
acccgaggaaccccggttgtgagcctgacggtcgaatagttccgcctatgggcgg

SEQ ID NO: 507821 - DNA, 55 bp, Artificial
  Synthetic oligonucleotide
acagcgtctcaccgctcacttcgacacgctgagcatatggtccgacaactgaagt

SEQ ID NO: 507822 - DNA, 55 bp, Artificial
  Synthetic oligonucleotide
aattgcgccgtcatcttggctttcgggccgcacttcctgaagatcgagccatgac

SEQ ID NO: 507823 - DNA, 55 bp, Artificial
  Synthetic oligonucleotide
aatggcgacacccgcctttctgaatggattccgcctatggccgcgcaccctcggg

SEQ ID NO: 507824 - DNA, 55 bp, Artificial
  Synthetic oligonucleotide
aagtgctgtcgggagaagggttgaggacggccaggtgcactggggtcggtgacat

SEQ ID NO: 507825 - DNA, 55 bp, Artificial
  Synthetic oligonucleotide
aagctttcgtcaaattgcgttcacagtccttacctaaaaggaccgcagaggtagt

SEQ ID NO: 507826 - DNA, 55 bp, Artificial
  Synthetic oligonucleotide
aagatcgataaaacaagttccgctgacgctcgctcgtgctattgctttgtggcgg

SEQ ID NO: 507827 - DNA, 55 bp, Artificial
  Synthetic oligonucleotide
aagacgtcggcttttggggccgcagagctttcaagtcccaagataaccgagcgtt

SEQ ID NO: 507828 - DNA, 55 bp, Artificial
  Synthetic oligonucleotide
aactcttgccggatcgacagaatcaccgctacatgcggttaataggcgaataact

SEQ ID NO: 507829 - DNA, 55 bp, Artificial
  Synthetic oligonucleotide
aacgccggaacaaggaaccccggctgactatggttccaggctcgggctgcgtcct

SEQ ID NO: 507830 - DNA, 55 bp, Artificial
  Synthetic oligonucleotide
aaatgcccattaaacgctcttttcatggcgggttttcatccgccccggaaacggc

SEQ ID NO: 507831 - DNA, 55 bp, Artificial
  Synthetic oligonucleotide
aaaacgctctccagttgcagagccgctgtcaaagatcggtaacgctagcgattgt

SEQ ID NO: 507832 - DNA, 55 bp, Artificial
  Synthetic oligonucleotide
cagggtggtttcccatacgggaccttccgtgcgctcaaagcaaaagaacgcccga

SEQ ID NO: 507833 - DNA, 55 bp, Artificial
  Synthetic oligonucleotide
cagcgtcggaattaaaccggctgatagtggaaacgagggttctcctgccgtgacc

SEQ ID NO: 507834 - DNA, 55 bp, Artificial
  Synthetic oligonucleotide
cagcgtaagagtgagtaaccgatggcttctgtattcccgattgccgaactccgcc

SEQ ID NO: 507835 - DNA, 55 bp, Artificial
  Synthetic oligonucleotide
cagccgatcgagtgtgctgaacgccggcagatcgatcgacgccttacccagaacc

SEQ ID NO: 507836 - DNA, 55 bp, Artificial
  Synthetic oligonucleotide
cagccctttgtcagcatattgtgcgagagccatgatcgtctcctttgataagcca

SEQ ID NO: 507837 - DNA, 55 bp, Artificial
  Synthetic oligonucleotide
cactgtcgaatttcccggtgctggtgaacctatgatcgatgtgggattttgggac

SEQ ID NO: 507838 - DNA, 55 bp, Artificial
  Synthetic oligonucleotide
cactggttgtgaaggggagcgcaccgcaagcactgcgaaggttgaaatggtcccc

SEQ ID NO: 507839 - DNA, 55 bp, Artificial
  Synthetic oligonucleotide
cactgcgccttgggtactcaatgttggctgaaaccgatatacgggccagattgag

SEQ ID NO: 507840 - DNA, 55 bp, Artificial
  Synthetic oligonucleotide
cacggatcgatgcgcgttcagcaccttcttgccgatcgctggtgaaggcggacga

SEQ ID NO: 507841 - DNA, 55 bp, Artificial
  Synthetic oligonucleotide
caccgcatggctccagaaggaattgttggcgagcatcagcaggtaaagggtggcg

SEQ ID NO: 507842 - DNA, 55 bp, Artificial
  Synthetic oligonucleotide
caccatgggtaataccaacgagcggtgatcatgaccgatgcgcccattcgcggag

SEQ ID NO: 507843 - DNA, 55 bp, Artificial
  Synthetic oligonucleotide
caatgtaccgaccagccgcctcgcgagtgtattgtgtatcaactgccttcacgcg

SEQ ID NO: 507844 - DNA, 55 bp, Artificial
  Synthetic oligonucleotide
caagcacgattcgtgccgttcatcacatccattcgtttcacctgatactgcggat

SEQ ID NO: 507845 - DNA, 55 bp, Artificial
  Synthetic oligonucleotide
caagagaacgacaagggaattagcaccgccaacattcgttggctggcaaggattt

SEQ ID NO: 507846 - DNA, 55 bp, Artificial
  Synthetic oligonucleotide
caagaagattctgctgcgtgcgcctattgcaactggactgctttcttcatggatc

SEQ ID NO: 507847 - DNA, 55 bp, Artificial
  Synthetic oligonucleotide
caacccactccgttcaaatcgacatatccgaaatctgccttgagcagcttatggc

SEQ ID NO: 507848 - DNA, 55 bp, Artificial
  Synthetic oligonucleotide
atgtgtccggcctttacgaggcggcacatacagccgcaggccctgatgaagtccg

SEQ ID NO: 507849 - DNA, 55 bp, Artificial
  Synthetic oligonucleotide
atgtagcggcattttagagatgcgacatatgagccagttagagatgcgacagtcg

SEQ ID NO: 507850 - DNA, 55 bp, Artificial
  Synthetic oligonucleotide
atgcccacaagcagccatcttcagagaacatctcaatcgaacattctcgcaagaa

SEQ ID NO: 507851 - DNA, 55 bp, Artificial
  Synthetic oligonucleotide
atcgctgccgagtaacgtgcctcactggatcatccgcagcgtgcgtttctccgcc

SEQ ID NO: 507852 - DNA, 55 bp, Artificial
  Synthetic oligonucleotide
atcgactacgacgaggcaactcagaaccccgtgcgcatgagttcgctcgagcccg

SEQ ID NO: 507853 - DNA, 55 bp, Artificial
  Synthetic oligonucleotide
atagctgacggctgccgcacacactggcagcgaagacgtcgctttgacagacgtc

SEQ ID NO: 507854 - DNA, 55 bp, Artificial
  Synthetic oligonucleotide
cgccgattcactttccggaaacccaaaaccgagcccttttgctaaccatccaggc

SEQ ID NO: 507855 - DNA, 55 bp, Artificial
  Synthetic oligonucleotide
cgccgcgaaaacacacgctgcataagcaaaggggagagctcaaacgcgactcgct

SEQ ID NO: 507856 - DNA, 55 bp, Artificial
  Synthetic oligonucleotide
cgccgggaaatgaaggcgcttgatggatggttgaagacaggcgaatcgctgccac

SEQ ID NO: 507857 - DNA, 55 bp, Artificial
  Synthetic oligonucleotide
cgtgcttgaggcgatagaagggctggaccgatcatatcggtggtcaatcgaatgc

SEQ ID NO: 507858 - DNA, 55 bp, Artificial
  Synthetic oligonucleotide
cgtgcgtcaaagaggtctaaattcctctatagcagctgttacgaccacggccgac

SEQ ID NO: 507859 - DNA, 55 bp, Artificial
  Synthetic oligonucleotide
cgccgtcgaaagctcagtcttaaattggacgagttgctgttcaagtcctgcgacc

SEQ ID NO: 507860 - DNA, 55 bp, Artificial
  Synthetic oligonucleotide
cgtgccggaccgtcgtatttgtatcccagcccttggcgcatgccgacatagcgct

SEQ ID NO: 507861 - DNA, 55 bp, Artificial
  Synthetic oligonucleotide
cgcctggcacgacaattatggcagtgggctcacgccaccagccaagcaacttcgg

SEQ ID NO: 507862 - DNA, 55 bp, Artificial
  Synthetic oligonucleotide
cgtcgccactgtaccgccaagagacataggaatcactctcctttaacttaaggag

SEQ ID NO: 507863 - DNA, 55 bp, Artificial
  Synthetic oligonucleotide
cgccttagcttggcgcagaagtcagggttcgtctgtcgggcatgatcggacgtcc

SEQ ID NO: 507864 - DNA, 55 bp, Artificial
  Synthetic oligonucleotide
cgtcgccacggtgagacctactgggttctctatcgatcggtggtgcgacctgatg

SEQ ID NO: 507865 - DNA, 55 bp, Artificial
  Synthetic oligonucleotide
cgcgagactatctttgaatgtatctgcctcggaagcactaccgaacgcgcccctg

SEQ ID NO: 507866 - DNA, 55 bp, Artificial
  Synthetic oligonucleotide
cgcgagtccgccagacagactgaatccctatctagttctataatctatagacgag

SEQ ID NO: 507867 - DNA, 55 bp, Artificial
  Synthetic oligonucleotide
cgcgatcgctgtcagttcgaagtgagactgccacgcttcggaaatccgtgacgga

SEQ ID NO: 507868 - DNA, 55 bp, Artificial
  Synthetic oligonucleotide
cgtagttgctaagatcgatcttctcactcaacgcgattctcctgaagaacatctc

SEQ ID NO: 507869 - DNA, 55 bp, Artificial
  Synthetic oligonucleotide
cgcgtttcgacggcctcccctcaaaacacccgtgtgaggcggtgaaagaacggag

SEQ ID NO: 507870 - DNA, 55 bp, Artificial
  Synthetic oligonucleotide
cggcgtaattttagatgtggaggtcaccacaggcgagattaatgaggggcaagtc

SEQ ID NO: 507871 - DNA, 55 bp, Artificial
  Synthetic oligonucleotide
cggcggagattcgctcgacacgccaacgatcagttttccgcgagacagaagctca

SEQ ID NO: 507872 - DNA, 55 bp, Artificial
  Synthetic oligonucleotide
cggcatcccttttcggcgtacctcaatgctgcgaagcagcgtgggaccaatccgg

SEQ ID NO: 507873 - DNA, 55 bp, Artificial
  Synthetic oligonucleotide
cggcgtgcctgattgggcgggctggctgagcttcgttttcaccattttcgccgga

SEQ ID NO: 507874 - DNA, 55 bp, Artificial
  Synthetic oligonucleotide
cggctgaagcatcagtttcgtcataaggactggtaccagatcaaacacaggtttc

SEQ ID NO: 507875 - DNA, 55 bp, Artificial
  Synthetic oligonucleotide
cggataaactcgctccatgaagattgcgcggctcggctgaacaagcgcgttgcat

SEQ ID NO: 507876 - DNA, 55 bp, Artificial
  Synthetic oligonucleotide
cggagcttcggtgccagtaatggccagtcccgacttcaacacggaggcgacagca

SEQ ID NO: 507877 - DNA, 55 bp, Artificial
  Synthetic oligonucleotide
cggaaatctgaagaggcctcaccagtcattggtggcttcgggtacttaaacacgc

SEQ ID NO: 507878 - DNA, 55 bp, Artificial
  Synthetic oligonucleotide
cgctgtagacaagtcaacgtcgggctattcgtgaatttatttggcgaggtttacg

SEQ ID NO: 507879 - DNA, 55 bp, Artificial
  Synthetic oligonucleotide
cggggtggcagcaaacgggcgaatggcgagctattcccaggacatttcagagcga

SEQ ID NO: 507880 - DNA, 55 bp, Artificial
  Synthetic oligonucleotide
cggggtgttgtcttaaggacgggtcggaagcaagcctatctgtagccgcttgcca

SEQ ID NO: 507881 - DNA, 55 bp, Artificial
  Synthetic oligonucleotide
cgctgctttgagaagcaaacgctgaaagtgactgaggtgatggatgcccgaactg

SEQ ID NO: 507882 - DNA, 55 bp, Artificial
  Synthetic oligonucleotide
cgctgaccttgtgaatgagccgccaacggttccggttgcacaagctgcacccgtc

SEQ ID NO: 507883 - DNA, 55 bp, Artificial
  Synthetic oligonucleotide
cgctctgaagcaccaggttcacccgaaggacatcgcagctcagcgcggcatcaag

SEQ ID NO: 507884 - DNA, 55 bp, Artificial
  Synthetic oligonucleotide
cggtagcggctttcgcagcgattctcgcaccgacactcggcatccttctcggctt

SEQ ID NO: 507885 - DNA, 55 bp, Artificial
  Synthetic oligonucleotide
cggtgccacctgtgatcgcaactattctatcgagcgagaccgtgagcgaagctgt

SEQ ID NO: 507886 - DNA, 55 bp, Artificial
  Synthetic oligonucleotide
cgtagccagtttctcggctggcgcatcacctgtccgctttgtggtaacgtcattc

SEQ ID NO: 507887 - DNA, 55 bp, Artificial
  Synthetic oligonucleotide
ctcaagaatgcgaagatgatcgcgcttcgacactttgatcgtctcggcttcctcg

SEQ ID NO: 507888 - DNA, 55 bp, Artificial
  Synthetic oligonucleotide
ctcacggttgacgagaagtcacgtgccattgctgcacacgtcgctgcataccggg

SEQ ID NO: 507889 - DNA, 55 bp, Artificial
  Synthetic oligonucleotide
cgagccttgagttcagaagatatcgccggctgcatgagattgtaggtcccagcgg

SEQ ID NO: 507890 - DNA, 55 bp, Artificial
  Synthetic oligonucleotide
cgagaatgttcgattgagatgttctctgaagatggctgcttgtgggcatatgatg

SEQ ID NO: 507891 - DNA, 55 bp, Artificial
  Synthetic oligonucleotide
cgactctaattcagggcggacgctcttttgagagcagtcatagccgcttgcgcgg

SEQ ID NO: 507892 - DNA, 55 bp, Artificial
  Synthetic oligonucleotide
cgactccgtgaactcacgttcgcaaggaatcttccccacccgcatagcagatgca

SEQ ID NO: 507893 - DNA, 55 bp, Artificial
  Synthetic oligonucleotide
cgacctgaagatcgacctaatcttgatgcgcctcgctttgttcgaaaatatgcag

SEQ ID NO: 507894 - DNA, 55 bp, Artificial
  Synthetic oligonucleotide
cgaccgcggggcaatcgcaactcgatcatcccagatcggtccggttgatcgccat

SEQ ID NO: 507895 - DNA, 55 bp, Artificial
  Synthetic oligonucleotide
ctcggcataacgagcactccccgaatcttttgcaggtgctcacacggaatcacgc

SEQ ID NO: 507896 - DNA, 55 bp, Artificial
  Synthetic oligonucleotide
ctcggcggctgcagatacattgagaagcgcaccactctccgaccgaacaagcagc

SEQ ID NO: 507897 - DNA, 55 bp, Artificial
  Synthetic oligonucleotide
cgaagggcgacttaggcgaatcgtggtcatcgcgcggcgatagttgccacggaga

SEQ ID NO: 507898 - DNA, 55 bp, Artificial
  Synthetic oligonucleotide
cgaaccacagacgctgcgagccgaacgtcagagaggccgtgacaggagtagtacg

SEQ ID NO: 507899 - DNA, 55 bp, Artificial
  Synthetic oligonucleotide
cgaaattcggggtccgtctaacataggatgttcggactcgcaacacgcgtaacgt

SEQ ID NO: 507900 - DNA, 55 bp, Artificial
  Synthetic oligonucleotide
ctctccctgcatagccgcaatgcgactttaaactagggtgtcggaacgaaagcgc

SEQ ID NO: 507901 - DNA, 55 bp, Artificial
  Synthetic oligonucleotide
cgaaacggatcgtcctcagatgatgcaaaaccaagggaatgattgtcgcaccggt

SEQ ID NO: 507902 - DNA, 55 bp, Artificial
  Synthetic oligonucleotide
cctttccagtaggtgagctacgacagacttggaacccgcgatatctgcgagcggg

SEQ ID NO: 507903 - DNA, 55 bp, Artificial
  Synthetic oligonucleotide
ctctggcgcggtcgcatgtgtcaaccacccaaccactcgagtagccatgttccgg

SEQ ID NO: 507904 - DNA, 55 bp, Artificial
  Synthetic oligonucleotide
cgttgcgggcacctcagaaaacgcgagccacacccacagagccgatagcggaact

SEQ ID NO: 507905 - DNA, 55 bp, Artificial
  Synthetic oligonucleotide
cgcccgcgattacttagcgtctcctccgatcacgaatctgattagctggcgatgg

SEQ ID NO: 507906 - DNA, 55 bp, Artificial
  Synthetic oligonucleotide
ctaacccaagcgcaacaatgccgtgtgaagggtagggcattacccgcaatcgcgc

SEQ ID NO: 507907 - DNA, 55 bp, Artificial
  Synthetic oligonucleotide
cgccccaatgataccttcccaaagcaacgcgtaacacggagtgcccttcggtacg

SEQ ID NO: 507908 - DNA, 55 bp, Artificial
  Synthetic oligonucleotide
cgcatttgcggacgatgacaacgcgtcgtgcacgaaagagccgcagtcagcctgg

SEQ ID NO: 507909 - DNA, 55 bp, Artificial
  Synthetic oligonucleotide
cgcatgcatctgcgtgatacgggcaatgatacccggcctgtacccctcctggatc

SEQ ID NO: 507910 - DNA, 55 bp, Artificial
  Synthetic oligonucleotide
cgcaaacgtgccggtcggttctgacacggagaccgatgtctcggatacaacatcg

SEQ ID NO: 507911 - DNA, 55 bp, Artificial
  Synthetic oligonucleotide
cgcaaacctcgcgaatgatggtacgctgatgctcggtctcgaagttgccggcccc

SEQ ID NO: 507912 - DNA, 55 bp, Artificial
  Synthetic oligonucleotide
cgattaatgtcaggttgaggctcgtcctatgtacgacaatgttggacacgcgaga

SEQ ID NO: 507913 - DNA, 55 bp, Artificial
  Synthetic oligonucleotide
cgatgacactggttggatttacgaactgcgcataacaaatgaggcccaggcggag

SEQ ID NO: 507914 - DNA, 55 bp, Artificial
  Synthetic oligonucleotide
cgagtgagttaggaaacaatcagagtgtatcatagttggcttgaccgttgggatg

SEQ ID NO: 507915 - DNA, 55 bp, Artificial
  Synthetic oligonucleotide
ctaccagcgacacacttgatttcttcaaacgtgagcatcttctaatagtgattgg

SEQ ID NO: 507916 - DNA, 55 bp, Artificial
  Synthetic oligonucleotide
cgaggccatttggataagcggtctctattgcgggttccggaaaacggtgtccgcc

SEQ ID NO: 507917 - DNA, 55 bp, Artificial
  Synthetic oligonucleotide
ctagccgcaaatcgatgcagccgtctggtttgcaaacggagaatctatgtctgtc

SEQ ID NO: 507918 - DNA, 55 bp, Artificial
  Synthetic oligonucleotide
cgaggacatttcgccttacggttgtcggtgtggttcccatcgatactgtgtcggt

SEQ ID NO: 507919 - DNA, 54 bp, Artificial
  Synthetic oligonucleotide
ttggaagacctttcggattgcgggagagggattcatctgcggctccttcgagat

SEQ ID NO: 507920 - DNA, 54 bp, Artificial
  Synthetic oligonucleotide
tctggctcttgcgtttccaaaagccgccacgtattttccgtggaaatttcaacg

SEQ ID NO: 507921 - DNA, 54 bp, Artificial
  Synthetic oligonucleotide
gtttgccgggaaattccgggacaaccgatatatcgggcattatatcgcctatcc

SEQ ID NO: 507922 - DNA, 54 bp, Artificial
  Synthetic oligonucleotide
attgtgggggatcgccagacgggcgagactgagttggcgcggtattcgacaagg

SEQ ID NO: 507923 - DNA, 54 bp, Artificial
  Synthetic oligonucleotide
attcagcacatcatgacgccgacagccactctgtcgtgtacgatgcccgatatg

SEQ ID NO: 507924 - DNA, 54 bp, Artificial
  Synthetic oligonucleotide
caaggtttccctcgccgcttttgctgccattcgtggagatggataaaatgagct

SEQ ID NO: 507925 - DNA, 54 bp, Artificial
  Synthetic oligonucleotide
gtggtgaccactctattaccgacccagcgatacggggtgttcgtgataggcttt

SEQ ID NO: 507926 - DNA, 54 bp, Artificial
  Synthetic oligonucleotide
cgtcgaccggtcaagagaattcctcggggacatagcacagttgtcatccgcttt

SEQ ID NO: 507927 - DNA, 54 bp, Artificial
  Synthetic oligonucleotide
cgactagccgaagacactgtccagccagcggcctttgctttcagcaaggagaac

SEQ ID NO: 507928 - DNA, 54 bp, Artificial
  Synthetic oligonucleotide
gtgatctgcattgtcaacgctcctcttttgctgcgggtaactggccggcatcat

SEQ ID NO: 507929 - DNA, 54 bp, Artificial
  Synthetic oligonucleotide
ccaactggtacgcttcctatggtgccgaaccgctaaaggacaagccgctaactc

SEQ ID NO: 507930 - DNA, 54 bp, Artificial
  Synthetic oligonucleotide
gcagatcggtaacttcttcgatctctgcggtgtttcgatcccctgtggaacggg

SEQ ID NO: 507931 - DNA, 54 bp, Artificial
  Synthetic oligonucleotide
cccgagtctcgttgcacacaagcttcgggcactggaattactggccgggaaacc

SEQ ID NO: 507932 - DNA, 54 bp, Artificial
  Synthetic oligonucleotide
cgctcaaacggtttcgggcaaccggcccatccttcgcggatctcgtcccctatg

SEQ ID NO: 507933 - DNA, 53 bp, Artificial
  Synthetic oligonucleotide
tcgacattgtaatagaagacagccgtggaggaattgtaagggaacgagttcaa

SEQ ID NO: 507934 - DNA, 53 bp, Artificial
  Synthetic oligonucleotide
gggaccctgccaagtcataggagtgactaccaaagagatgactgggctcaaac

SEQ ID NO: 507935 - DNA, 53 bp, Artificial
  Synthetic oligonucleotide
gggaccactacgtttcggactatgagcgcctcttaggtatccgcgaggcgggt

SEQ ID NO: 507936 - DNA, 53 bp, Artificial
  Synthetic oligonucleotide
tcgtgcgtctcatgaccgaatctcccagcgcttatccaatcgccgtacggcat

SEQ ID NO: 507937 - DNA, 53 bp, Artificial
  Synthetic oligonucleotide
cgctactgcaatttcgagcgaaagaagaccgatgacacagagtgccgatttaa

SEQ ID NO: 507938 - DNA, 53 bp, Artificial
  Synthetic oligonucleotide
actcttcgccaccaactcctacagcgtcgactaccgccgcgttgcgttcatgg

SEQ ID NO: 507939 - DNA, 53 bp, Artificial
  Synthetic oligonucleotide
tgcgttactatggcggaacggtcgccgaacaaaagggcgaaacgcttccgctt

SEQ ID NO: 507940 - DNA, 53 bp, Artificial
  Synthetic oligonucleotide
tggaagggtatccggcgtgtgccgccgttcaactaaggcagcaagagttgtgc

SEQ ID NO: 507941 - DNA, 53 bp, Artificial
  Synthetic oligonucleotide
cacctcggggacggaccgaggcgtaccgtcacagtatctctaagcatcaatgc

SEQ ID NO: 507942 - DNA, 53 bp, Artificial
  Synthetic oligonucleotide
ctcaggcaaaagacgtccgctcacccgttccggtgccaaagactcttgactgc

SEQ ID NO: 507943 - DNA, 53 bp, Artificial
  Synthetic oligonucleotide
gcgaagcataatgcttgagtgaacacagattggtggctccactcgcacgcgtg

SEQ ID NO: 507944 - DNA, 53 bp, Artificial
  Synthetic oligonucleotide
aagcatgatgcttgccgatcttcattccccagcgttccggttgaaacgcattt

SEQ ID NO: 507945 - DNA, 53 bp, Artificial
  Synthetic oligonucleotide
cacgcacgcctattggtctgcggcagtttcccgcgccacaacaatcgtgtcca

SEQ ID NO: 507946 - DNA, 53 bp, Artificial
  Synthetic oligonucleotide
acaccctgtgatccaaacccgttcaattcggttccgctcgccgtctatactga

SEQ ID NO: 507947 - DNA, 53 bp, Artificial
  Synthetic oligonucleotide
ggattgaagtgatgaagttccacggactttcgatctatctacgctccgtctct

SEQ ID NO: 507948 - DNA, 53 bp, Artificial
  Synthetic oligonucleotide
cgaattaagggaaaattgacgcgcatcatccccagaagctgctcatgcgagag

SEQ ID NO: 507949 - DNA, 52 bp, Artificial
  Synthetic oligonucleotide
gccgcaaaatggcgggaaagttcatatcccctatacggcactgagtttcctc

SEQ ID NO: 507950 - DNA, 52 bp, Artificial
  Synthetic oligonucleotide
ctccccactgtcgcggcggcgagccctctctcagtcgagagatattgcccga

SEQ ID NO: 507951 - DNA, 52 bp, Artificial
  Synthetic oligonucleotide
tgactaccgagccgtgctttctcgtgtctgggatcggcgacggcattcgggg

SEQ ID NO: 507952 - DNA, 52 bp, Artificial
  Synthetic oligonucleotide
accatcctctcaacgatcgggcgactactccaactcttcactccagacgaat

SEQ ID NO: 507953 - DNA, 52 bp, Artificial
  Synthetic oligonucleotide
cgagcgggttttgtgccaatagatgtgctctcagacgacgccggctcagcca

SEQ ID NO: 507954 - DNA, 52 bp, Artificial
  Synthetic oligonucleotide
actatcctggctgtggagtggacacgccggggcatctctactcgtacactct

SEQ ID NO: 507955 - DNA, 52 bp, Artificial
  Synthetic oligonucleotide
ccgctacaatcaaggcctgaaccggctctttgtcgtgcggccacaaatcctc

SEQ ID NO: 507956 - DNA, 52 bp, Artificial
  Synthetic oligonucleotide
tcgcattccttcaagactcgatgcagctctatctgatcgcgaaatcctagac

SEQ ID NO: 507957 - DNA, 52 bp, Artificial
  Synthetic oligonucleotide
tggaccgcgatcgatcggcgttttcacaggaaaccagcgcgattttccagtt

SEQ ID NO: 507958 - DNA, 52 bp, Artificial
  Synthetic oligonucleotide
ccatagttttcatgaaagccccttccatttgaacgcgagattagcaactttg

SEQ ID NO: 507959 - DNA, 52 bp, Artificial
  Synthetic oligonucleotide
atgtgcggcggctggcgaactgcgccgcgtggatcgcaaacagcattcccga

SEQ ID NO: 507960 - DNA, 52 bp, Artificial
  Synthetic oligonucleotide
gacggcgggcaattttagcgacacggtcttgaatgatatcaacgcttaaatc

SEQ ID NO: 507961 - DNA, 52 bp, Artificial
  Synthetic oligonucleotide
tagtgcgaaccgctgcaggcttcgataccaaccaaacatgccgtgccgtcac

SEQ ID NO: 507962 - DNA, 52 bp, Artificial
  Synthetic oligonucleotide
cgacatatgtggaacgacccgcttggcaagggcatttttcagcgattcatcc

SEQ ID NO: 507963 - DNA, 52 bp, Artificial
  Synthetic oligonucleotide
caagcccgagcgccccaagctatccgtgccgatggagttgaggcgcaccgac

SEQ ID NO: 507964 - DNA, 52 bp, Artificial
  Synthetic oligonucleotide
cactcggccgcaggccttgatggtattcgcggatcggcggccagacaaatgg

SEQ ID NO: 507965 - DNA, 52 bp, Artificial
  Synthetic oligonucleotide
tcagttgttcgtcttctcagaagggttcctcgaaccttcaactctgttttgc

SEQ ID NO: 507966 - DNA, 52 bp, Artificial
  Synthetic oligonucleotide
caaagggaatcccatacggactcttatgttaggcggataccactaggaagtg

SEQ ID NO: 507967 - DNA, 52 bp, Artificial
  Synthetic oligonucleotide
tccccacgtaagggaatcccaatgccgattccgcctaaatcatcccgctcta

SEQ ID NO: 507968 - DNA, 52 bp, Artificial
  Synthetic oligonucleotide
tccgacattctcatctccctcggatcatgcccgaagaatcgcatggtaaccc

SEQ ID NO: 507969 - DNA, 52 bp, Artificial
  Synthetic oligonucleotide
atcagcaagaccctttcggacggcagcatgcatgactatgtaccgatcattc

SEQ ID NO: 507970 - DNA, 52 bp, Artificial
  Synthetic oligonucleotide
aaaagaacgcaacggatgaaactcaggcgctgagcttccgaaacattgcgcg

SEQ ID NO: 507971 - DNA, 52 bp, Artificial
  Synthetic oligonucleotide
cgtatagaacccaagaatacggccgggcactgcgtcgtcgatagcacagaag

SEQ ID NO: 507972 - DNA, 52 bp, Artificial
  Synthetic oligonucleotide
cgcgaatgccggcttatatcgatgatacgcgcaaagccgcgggactgttgcg

SEQ ID NO: 507973 - DNA, 52 bp, Artificial
  Synthetic oligonucleotide
gggccgttaaccgtctgttaaccctaaacttctggaccggtcagggagaatc

SEQ ID NO: 507974 - DNA, 51 bp, Artificial
  Synthetic oligonucleotide
accatccggacttctgcgcatttgacggccggtagcagcgcgaaagacttg

SEQ ID NO: 507975 - DNA, 51 bp, Artificial
  Synthetic oligonucleotide
tggtggcacttccgtcagaggatcgaaatgagtgaggtgctaggcaaagca

SEQ ID NO: 507976 - DNA, 51 bp, Artificial
  Synthetic oligonucleotide
cacgccaccagccaagcaacttcggccaggggtcgcgcgaccgacgtgcag

SEQ ID NO: 507977 - DNA, 51 bp, Artificial
  Synthetic oligonucleotide
ctagccgggaaggccgacggcctaggccggatggtcggccgtaaggcgtgc

SEQ ID NO: 507978 - DNA, 51 bp, Artificial
  Synthetic oligonucleotide
ttatcgataccggatcaatactccccaaatgtgccgtttgaatcttcccca

SEQ ID NO: 507979 - DNA, 51 bp, Artificial
  Synthetic oligonucleotide
caagccttcacgcgttcgcgaagataggtcgcgagccggtcgccaaacatt

SEQ ID NO: 507980 - DNA, 51 bp, Artificial
  Synthetic oligonucleotide
caaggaatggaggtaacgatgcaggcgtcttgacttcgaggtccccataca

SEQ ID NO: 507981 - DNA, 51 bp, Artificial
  Synthetic oligonucleotide
ttgaaaacggccacacggaatcgataggactaggcgcgaggggacattcgc

SEQ ID NO: 507982 - DNA, 51 bp, Artificial
  Synthetic oligonucleotide
gatgggctcggcccgcctttgtcgccatgaagatgcgcaagcttgaacttc

SEQ ID NO: 507983 - DNA, 51 bp, Artificial
  Synthetic oligonucleotide
catcaacctctttctgctgccaccgggcaagagcgtgcaccgctatgtcgg

SEQ ID NO: 507984 - DNA, 51 bp, Artificial
  Synthetic oligonucleotide
acctaacagaatctgccggaagtacggatcatgcttggcacatcacggggc

SEQ ID NO: 507985 - DNA, 51 bp, Artificial
  Synthetic oligonucleotide
ggtaagtgcgtcaactggggatccgacgagccgttaaagaatcgagaggcg

SEQ ID NO: 507986 - DNA, 51 bp, Artificial
  Synthetic oligonucleotide
actttacagtttcggagttggttatgcgggcctcgacggatggaatgagcg

SEQ ID NO: 507987 - DNA, 51 bp, Artificial
  Synthetic oligonucleotide
atgaggtccaagatatcgccgagcggagcttctccatcaatccgcattagc

SEQ ID NO: 507988 - DNA, 51 bp, Artificial
  Synthetic oligonucleotide
cgcccgctaacgggcgggcttccggctggaatcgtcgtcccgacgtatctg

SEQ ID NO: 507989 - DNA, 51 bp, Artificial
  Synthetic oligonucleotide
tcggattctcatagaggctaaaacagcaatggacacggaagcagtcgggct

SEQ ID NO: 507990 - DNA, 51 bp, Artificial
  Synthetic oligonucleotide
gaacggactttcttcggacctgcgtgacaggtgacatgatcggtgtcgggg

SEQ ID NO: 507991 - DNA, 51 bp, Artificial
  Synthetic oligonucleotide
ctcgcatcatgaacatttaagtggttagactgtaatcagccactccatgtc

SEQ ID NO: 507992 - DNA, 50 bp, Artificial
  Synthetic oligonucleotide
cctgggcgaaaagacgtatattgagcacaagaatgcgcggctgttgtcga

SEQ ID NO: 507993 - DNA, 50 bp, Artificial
  Synthetic oligonucleotide
gcgggtgttgtccgacaaacatcaagtgggacctagtttcgcttcaacaa

SEQ ID NO: 507994 - DNA, 50 bp, Artificial
  Synthetic oligonucleotide
ttgccgaaaatggctcctttgcatcggccattcttcgaacttcccctatt

SEQ ID NO: 507995 - DNA, 50 bp, Artificial
  Synthetic oligonucleotide
aataggtactgtcacattgattgagcggtggttcttgtaggtcggtgcac

SEQ ID NO: 507996 - DNA, 50 bp, Artificial
  Synthetic oligonucleotide
acttcggttacagggatttctccgtactatcggaccgcacgcacctgaca

SEQ ID NO: 507997 - DNA, 50 bp, Artificial
  Synthetic oligonucleotide
gaactttgactctgcgcgtcggccctttcgaaaccgattcggattttcga

SEQ ID NO: 507998 - DNA, 50 bp, Artificial
  Synthetic oligonucleotide
atgattaggatcgggtcggctcatccgagcaaccttggaagtgcagtgta

SEQ ID NO: 507999 - DNA, 50 bp, Artificial
  Synthetic oligonucleotide
catacggctcgattcaaggtggttcagcacattcaatacggcttttctta

SEQ ID NO: 508000 - DNA, 50 bp, Artificial
  Synthetic oligonucleotide
gattcctcccagatcgatagtgcttcttcgtagcgggaaacggttgaatc

SEQ ID NO: 508001 - DNA, 50 bp, Artificial
  Synthetic oligonucleotide
gttacaaagagcgacggatcgcctggtcatcatgacttacccgtatgcac

SEQ ID NO: 508002 - DNA, 50 bp, Artificial
  Synthetic oligonucleotide
cacagctaagaactgagggagacgccatcatgtccagctatctgagaata

SEQ ID NO: 508003 - DNA, 60 bp, Artificial
  Synthetic oligonucleotide
tcatgctggggggctgggcctctggtcgacgcagatcatcccgtgatcggtattctctgt

SEQ ID NO: 508004 - DNA, 60 bp, Artificial
  Synthetic oligonucleotide
tccttttcagaaagaaccggtgtaccgtcaaagccccagtcaataccgcagctgtcccag

SEQ ID NO: 508005 - DNA, 60 bp, Artificial
  Synthetic oligonucleotide
cctctgcgatgtgtttgatgcgatcccgaaaaacgatctcgcctcgatggaacacccgct

SEQ ID NO: 508006 - DNA, 60 bp, Artificial
  Synthetic oligonucleotide
catattccgtcgcatcggtgcgcacatggggcagcaccgaattggaggcgcgcccgtctt

SEQ ID NO: 508007 - DNA, 60 bp, Artificial
  Synthetic oligonucleotide
ggcgctaccaccttcatacatcgaaggtggtagtgtggagatagtgatatttcgccctgc

SEQ ID NO: 508008 - DNA, 55 bp, Artificial
  Synthetic oligonucleotide
ctcactgtgtcggtggttgcctcggcaaagcggtctgtggccgggatgctgtcat

SEQ ID NO: 508009 - DNA, 55 bp, Artificial
  Synthetic oligonucleotide
ctcgccattggcgcgctgaacaattgggtatgggtgaccgcattgcgtcataacg

SEQ ID NO: 508010 - DNA, 55 bp, Artificial
  Synthetic oligonucleotide
ctcgctgacggtcccgcatcttactgtggcagcaggcgagaccgtgttgttactc

SEQ ID NO: 508011 - DNA, 55 bp, Artificial
  Synthetic oligonucleotide
ctctgcttcacgcctcggatcgcaaactaatatcgcaggcgatgcatcggtgacg

SEQ ID NO: 508012 - DNA, 55 bp, Artificial
  Synthetic oligonucleotide
tacccatatgcgcaatagctttcagcccgacagccgaaaagtgctacgcaagttc

SEQ ID NO: 508013 - DNA, 55 bp, Artificial
  Synthetic oligonucleotide
ctgcggctttacaggtctgctgaagtccaggatcacgccatttatataggcccgc

SEQ ID NO: 508014 - DNA, 55 bp, Artificial
  Synthetic oligonucleotide
ctgggcctccgcaacggctcctgcctgacctctggtcagacatataaacctgacc

SEQ ID NO: 508015 - DNA, 55 bp, Artificial
  Synthetic oligonucleotide
cttagatggcatgtgctacggtggacgacagcaggggacggggatttggtaatag

SEQ ID NO: 508016 - DNA, 55 bp, Artificial
  Synthetic oligonucleotide
cttcccggaggattttccatgaccattcgttttccccagaccctgtcccgcgggg

SEQ ID NO: 508017 - DNA, 55 bp, Artificial
  Synthetic oligonucleotide
cttcttgcggcgatcggttttgcctgggtccggctggggttcgactaccagattg

SEQ ID NO: 508018 - DNA, 55 bp, Artificial
  Synthetic oligonucleotide
ctttagggtgggcgtaatcaaaaccacgaagacgcgagtcaccccgaaagaggcc

SEQ ID NO: 508019 - DNA, 55 bp, Artificial; identical to SEQ ID NO: 231015
  Synthetic oligonucleotide

SEQ ID NO: 508020 - DNA, 55 bp, Artificial
  Synthetic oligonucleotide
gaactttagcagatttcgaactgttactggagcagccctttcaacgagattaccc

SEQ ID NO: 508021 - DNA, 55 bp, Artificial
  Synthetic oligonucleotide
gaaggatgagggtattgccaaccttgaagttggcctgagcggtccgtgggctgac

SEQ ID NO: 508022 - DNA, 55 bp, Artificial
  Synthetic oligonucleotide
gttcatcgaccagacagggcggtcgacagccgcagaaatatctgacgcgtagggg

SEQ ID NO: 508023 - DNA, 55 bp, Artificial
  Synthetic oligonucleotide
gaataccgcgcgagtacaatcgatacacccgaaaagtcgttcgttgactgggctg

SEQ ID NO: 508024 - DNA, 55 bp, Artificial
  Synthetic oligonucleotide
gacacctgcacttccctcagttcccaactcgaacttccacgcagatttccggaag

SEQ ID NO: 508025 - DNA, 55 bp, Artificial
  Synthetic oligonucleotide
gaccggcaaagtgatcaaatgacccatcgcagaaagacagccctccaattcgatg

SEQ ID NO: 508026 - DNA, 55 bp, Artificial
  Synthetic oligonucleotide
cgcagctccctttgatggataaaagcgctgggacgacccctgaccaaaagtggta

SEQ ID NO: 508027 - DNA, 55 bp, Artificial
  Synthetic oligonucleotide
cgccgtcatatgatctccgcgtctctgtccgatagccaggcccagatgtcccctg

SEQ ID NO: 508028 - DNA, 55 bp, Artificial
  Synthetic oligonucleotide
cgccgtgatgcgtctggctcagaccccaaccgttcagcaccacgcgatccccgat

SEQ ID NO: 508029 - DNA, 55 bp, Artificial
  Synthetic oligonucleotide
cgcgacctggactgaaggccaagtttaccgtgtcgtcacgactctgacccgcgtc

SEQ ID NO: 508030 - DNA, 55 bp, Artificial
  Synthetic oligonucleotide
cgcgacgtgctgcgaccgttcaaccaatgtcctctggcgtaattgtcaccatcac

SEQ ID NO: 508031 - DNA, 55 bp, Artificial
  Synthetic oligonucleotide
cgcgagctggattacgaaggacttgtccgtgcccacaggttcggccgcacagcaa

SEQ ID NO: 508032 - DNA, 55 bp, Artificial
  Synthetic oligonucleotide
cgcgcgtggttcatcgggccgagtctcatcggcacagtgtcatcagaaggattcg

SEQ ID NO: 508033 - DNA, 55 bp, Artificial
  Synthetic oligonucleotide
cggccggtcggtagtcgtccggcagaaacacttcttgcttcatttcggctccttc

SEQ ID NO: 508034 - DNA, 55 bp, Artificial
  Synthetic oligonucleotide
cggcgtaaacgggtttcaggtaggaaaagcgtccgcttgatcaataagggcgcac

SEQ ID NO: 508035 - DNA, 55 bp, Artificial
  Synthetic oligonucleotide
cggcttctcgcctgcgccaacacgcaccgaaacctccagatcttcaccgttcagg

SEQ ID NO: 508036 - DNA, 55 bp, Artificial
  Synthetic oligonucleotide
cgggatcgtggtgacctcctctgagaaatcgcaacaccaaaaccgtgacatcgcg

SEQ ID NO: 508037 - DNA, 55 bp, Artificial
  Synthetic oligonucleotide
cggttgacacaagacatgcggttggaggacgggatgaattgggccgattgggcct

SEQ ID NO: 508038 - DNA, 55 bp, Artificial
  Synthetic oligonucleotide
cggttgcgctgtaagggtcggcagactggggtaaacctgcatagagtccgtgttg

SEQ ID NO: 508039 - DNA, 55 bp, Artificial
  Synthetic oligonucleotide
cgtccaactcgaaaatcgttgcctcgggtttcggccccatcacacgcgttggcag

SEQ ID NO: 508040 - DNA, 55 bp, Artificial
  Synthetic oligonucleotide
cgtgggtcatcttgtgatcaagcttatacatcgcgtcatagaacggcagagttgt

SEQ ID NO: 508041 - DNA, 55 bp, Artificial
  Synthetic oligonucleotide
cgttgaacaggagtactctctaaaagaactcgcgcccaactgaggcaggcggccg

SEQ ID NO: 508042 - DNA, 55 bp, Artificial
  Synthetic oligonucleotide
tcatgctcacctcagctatcgttctgatgaccgccggtactgcggcctatgcgca

SEQ ID NO: 508043 - DNA, 55 bp, Artificial
  Synthetic oligonucleotide
cgtttgttcaaaacgccagccctcgcgagccagacgtcgggtaagcacccgcatg

SEQ ID NO: 508044 - DNA, 55 bp, Artificial
  Synthetic oligonucleotide
ctaacacatctagctttacgcgaggtggagatggctatgcagcgtcctattcacg

SEQ ID NO: 508045 - DNA, 55 bp, Artificial
  Synthetic oligonucleotide
ctcaccaaggcacttggtcgcccttccagtcataaaaccgtcccgtttgagccgc

SEQ ID NO: 508046 - DNA, 55 bp, Artificial
  Synthetic oligonucleotide
gtcgccccgtcaaagacatcctcgccggggtggagttcaaatccgatatcctgcc

SEQ ID NO: 508047 - DNA, 55 bp, Artificial
  Synthetic oligonucleotide
gtccaagttgagggcatgcgccgcacagagttgttcagtgacgcattcggcgtgg

SEQ ID NO: 508048 - DNA, 55 bp, Artificial
  Synthetic oligonucleotide
ggcaacgacggggcgataccatgcggcgcacgatctttaccgagaatttcaacac

SEQ ID NO: 508049 - DNA, 55 bp, Artificial
  Synthetic oligonucleotide
ggcagacatgcaggcacaatcgctgaaaatgcagagttggatccgacagcagacc

SEQ ID NO: 508050 - DNA, 55 bp, Artificial
  Synthetic oligonucleotide
ggcagatgcacgttcatggatgccctttcggtccggtcctggacccaacataggc

SEQ ID NO: 508051 - DNA, 55 bp, Artificial
  Synthetic oligonucleotide
ggcagtttatcccagccgcgtccgtacgagttctcaagggagcattaccctctcg

SEQ ID NO: 508052 - DNA, 55 bp, Artificial
  Synthetic oligonucleotide
ggccagcttcaaaggtatctcagcagacacattatcgatgccacgaaaggccgtg

SEQ ID NO: 508053 - DNA, 55 bp, Artificial
  Synthetic oligonucleotide
ggccgatacctaacaactacctgaggtagacgcaaagggacgcggtcaggcacct

SEQ ID NO: 508054 - DNA, 55 bp, Artificial
  Synthetic oligonucleotide
ggcgacggatgcaagaagcgaacggatcatgaaagcacctgattgaagaggactg

SEQ ID NO: 508055 - DNA, 55 bp, Artificial
  Synthetic oligonucleotide
ggcgcaaccgagacctttccccacatgccatcacatcatcttccgccgtgagagc

SEQ ID NO: 508056 - DNA, 55 bp, Artificial
  Synthetic oligonucleotide
gtagagccgtgcgtcagaatcggtcatggacaaatgggtggcattggatcgtttc

SEQ ID NO: 508057 - DNA, 55 bp, Artificial
  Synthetic oligonucleotide
ggcgtattccatgccggatctctggccctgcccatgcagcgatacgactaccgga

SEQ ID NO: 508058 - DNA, 55 bp, Artificial
  Synthetic oligonucleotide
ggcgtgcaatctcctgagtttcccaatgtttaactccctcccaaacttaggtcaa

SEQ ID NO: 508059 - DNA, 55 bp, Artificial
  Synthetic oligonucleotide
ggctacgctggcctgtttctcgacggatacaccgaagctggttctgcggccaacg

SEQ ID NO: 508060 - DNA, 55 bp, Artificial
  Synthetic oligonucleotide
ggctcagcccttatctcacaaatccacgagatcgccgcacttatttcggatatag

SEQ ID NO: 508061 - DNA, 55 bp, Artificial
  Synthetic oligonucleotide
gtacctgatttgcgtccagagatgcgattctgtcaagagcgctgttgtttgcgtc

SEQ ID NO: 508062 - DNA, 55 bp, Artificial
  Synthetic oligonucleotide
gggccaaatcgtgccgccatcaattgtacttatcgtgctgggtgatcagctatcc

SEQ ID NO: 508063 - DNA, 55 bp, Artificial
  Synthetic oligonucleotide
ggttccgagcctttggacacggcagaactgggctaccgcgtaggtgaaaagcacc

SEQ ID NO: 508064 - DNA, 55 bp, Artificial
  Synthetic oligonucleotide
gggtgtcacctcatttcgagacatataggcgccattggcaatccgaacgccacgc

SEQ ID NO: 508065 - DNA, 55 bp, Artificial
  Synthetic oligonucleotide
ggtccggcgaacgtagcctattgaaacaccgcatcaggcgcgtcgagcgaatccg

SEQ ID NO: 508066 - DNA, 55 bp, Artificial
  Synthetic oligonucleotide
ggtgaagtccgaggtggcgtagactgtatcgatgccttctccaacggcttcgatt

SEQ ID NO: 508067 - DNA, 55 bp, Artificial
  Synthetic oligonucleotide
gacctgcgtctgttgtcactgtcataggtcagatccgttcatataaaacctcagg

SEQ ID NO: 508068 - DNA, 55 bp, Artificial
  Synthetic oligonucleotide
gttcacgcggtgtcgctaacggcgatcttcggtgaagtttgacccgaactcaacg

SEQ ID NO: 508069 - DNA, 55 bp, Artificial
  Synthetic oligonucleotide
gactgacgaagctcagcatatcgcgctcttagggaatgggttttactcgctaccg

SEQ ID NO: 508070 - DNA, 55 bp, Artificial
  Synthetic oligonucleotide
gagagctgacagtccggcgcaggttaggatcagaactactgtccaaagggagcgc

SEQ ID NO: 508071 - DNA, 55 bp, Artificial
  Synthetic oligonucleotide
gagattgggcgtcctatcggatcatgcacggctgcgacataaccggctcggcgag

SEQ ID NO: 508072 - DNA, 55 bp, Artificial
  Synthetic oligonucleotide
gcatatgctgcactctacttagcaacgcaacattcgcacgtttatctgagctccc

SEQ ID NO: 508073 - DNA, 55 bp, Artificial
  Synthetic oligonucleotide
gcatcggtgatgacgatctccgaggtattcttgatcacgttggtggaattggccc

SEQ ID NO: 508074 - DNA, 55 bp, Artificial
  Synthetic oligonucleotide
gccaaagcggaatcctcgaaagctgttacgcggtcagcaatagcctaaccctatc

SEQ ID NO: 508075 - DNA, 55 bp, Artificial
  Synthetic oligonucleotide
gccggacaacattcgtgttgcggtcaatctatcaccgctacaattccacaacggc

SEQ ID NO: 508076 - DNA, 55 bp, Artificial
  Synthetic oligonucleotide
gccgtcaaattgcgcagagggcgtaccccttcggacgaggcgattcggagctgtt

SEQ ID NO: 508077 - DNA, 55 bp, Artificial
  Synthetic oligonucleotide
gcctccgatagccgccgtcatttgtgtgtcgctccagttgcgaaacggtttcggg

SEQ ID NO: 508078 - DNA, 55 bp, Artificial
  Synthetic oligonucleotide
gtcgggtgaaaatgtaaccgcctagacctcctgtccggaatgtgtgctccgggca

SEQ ID NO: 508079 - DNA, 55 bp, Artificial
  Synthetic oligonucleotide
gcgcgtttgttgtcgaccaaaccaatgttgatgtgacattcaccgcagatagcac

SEQ ID NO: 508080 - DNA, 55 bp, Artificial
  Synthetic oligonucleotide
gcgctagcggggcacagtgagccagactggaggaaatatggtgtcttgggctacc

SEQ ID NO: 508081 - DNA, 55 bp, Artificial
  Synthetic oligonucleotide
gcggaaaagcgccggtcggactccaatatagcacgcgcacaatcccgacgtatcc

SEQ ID NO: 508082 - DNA, 55 bp, Artificial
  Synthetic oligonucleotide
gtcgctcatgtcttaccccgatcttcagcctcgcggtgccaacgttgatgtcgac

SEQ ID NO: 508083 - DNA, 55 bp, Artificial
  Synthetic oligonucleotide
gcgggcgcggttgccttgctcgttattataagcggtgccgtctacgaaatctcgc

SEQ ID NO: 508084 - DNA, 55 bp, Artificial
  Synthetic oligonucleotide
gcggtcgccaaatgtggtcttgaggatggttatcacatgatcggtggatcgatga

SEQ ID NO: 508085 - DNA, 55 bp, Artificial
  Synthetic oligonucleotide
gcgtaaactaggggtctctccggcataggtttcggagaattaggtcagagccagg

SEQ ID NO: 508086 - DNA, 55 bp, Artificial
  Synthetic oligonucleotide
gctcgcgtgcgtctgttccgtctgcagggtaagcgtcgttttggccccaccttct

SEQ ID NO: 508087 - DNA, 55 bp, Artificial
  Synthetic oligonucleotide
gctgggtctgggcgcgtgttttatattttcgcttatatgccagagaatagggaac

SEQ ID NO: 508088 - DNA, 55 bp, Artificial
  Synthetic oligonucleotide
ggagggagtgatatcctgacgggtggcgcgggtgctgatctgttcacttgggctg

SEQ ID NO: 508089 - DNA, 55 bp, Artificial
  Synthetic oligonucleotide
tgttgaatgtgaattggcgctgaatgagggccgctataccctcgatttcgacgct

SEQ ID NO: 508090 - DNA, 55 bp, Artificial
  Synthetic oligonucleotide
tgtgttaaaccgctcacaaagccaaaggccggaagggaaacccacgtgagagacc

SEQ ID NO: 508091 - DNA, 55 bp, Artificial
  Synthetic oligonucleotide
agatccgaccccggacctcgttccggaggcaccgcccatctccatcggcgctctt

SEQ ID NO: 508092 - DNA, 55 bp, Artificial
  Synthetic oligonucleotide
tgtcacggcctgtcactgcagcctgtgccgcaagcactcggggcatttcgatgcc

SEQ ID NO: 508093 - DNA, 55 bp, Artificial
  Synthetic oligonucleotide
agcaagtccgtttacatcgcgtttaagcctgtctggagagttgccttgatcaacg

SEQ ID NO: 508094 - DNA, 55 bp, Artificial
  Synthetic oligonucleotide
agcacactgccaagcaacgagtgggagaggtggtcgagtcggcagacgcgtgtcg

SEQ ID NO: 508095 - DNA, 55 bp, Artificial
  Synthetic oligonucleotide
agccttgcctgcgatctccaccgcactgagtggcacatgcaccagcaccgtgtca

SEQ ID NO: 508096 - DNA, 55 bp, Artificial
  Synthetic oligonucleotide
tgtaaagcgttgcgaacccctccagatatccctccgggtggccaggtggaacgcg

SEQ ID NO: 508097 - DNA, 55 bp, Artificial
  Synthetic oligonucleotide
agcggctcgaatgaaggggttcaacctatcggattgggcactggggcaccgctcc

SEQ ID NO: 508098 - DNA, 55 bp, Artificial
  Synthetic oligonucleotide
tggtgatgaacaagggagacagtctccggagaagcgaccgacgtccgatccaggg

SEQ ID NO: 508099 - DNA, 55 bp, Artificial
  Synthetic oligonucleotide
agggagcgtcgattacgagaatatgcggcatgatatgggtccggctgcggttggg

SEQ ID NO: 508100 - DNA, 55 bp, Artificial
  Synthetic oligonucleotide
aggtatggtggtagatgagcaggtattccagcagtagagaagccgcgaccagggg

SEQ ID NO: 508101 - DNA, 55 bp, Artificial
  Synthetic oligonucleotide
aggtgaaccagtctactttgcgcggtcgtctggcagcggatcccagcttgccgca

SEQ ID NO: 508102 - DNA, 55 bp, Artificial
  Synthetic oligonucleotide
aggtgccgcaaatccccggcctcgctcgcccgaaccatcttcatgaggagacgca

SEQ ID NO: 508103 - DNA, 55 bp, Artificial
  Synthetic oligonucleotide
agttacagtcccctgccacaccttgcggcctgtcgcccacttgcccgtccgagtg

SEQ ID NO: 508104 - DNA, 55 bp, Artificial
  Synthetic oligonucleotide
atccgccctccccgcagacattcaggcccggatcagaaccacccacgccttcgct

SEQ ID NO: 508105 - DNA, 55 bp, Artificial
  Synthetic oligonucleotide
atcgcgacgcctgtgcgggctgtgacaaggcggcccggatctatgcaatccatgg

SEQ ID NO: 508106 - DNA, 55 bp, Artificial
  Synthetic oligonucleotide
atgtcagcacatcttggaaaacgggacgacgggtgaacacggatgtgccccagtc

SEQ ID NO: 508107 - DNA, 55 bp, Artificial
  Synthetic oligonucleotide
tggtcatccgaggtctttgcagtctgcgccagaccggagcccgcgataagcagga

SEQ ID NO: 508108 - DNA, 55 bp, Artificial
  Synthetic oligonucleotide
caaaacgtaaattactgccaactccggaatacgacggatttgcataaacggcaaa

SEQ ID NO: 508109 - DNA, 55 bp, Artificial
  Synthetic oligonucleotide
aaaagcggctaaaggtgatctgtccgattttgagatttcggatggtggcatttgg

SEQ ID NO: 508110 - DNA, 55 bp, Artificial
  Synthetic oligonucleotide
aaaccacgaagacgcgagtcaccccgaaagaggccaaaaggcccggacagacggg

SEQ ID NO: 508111 - DNA, 55 bp, Artificial
  Synthetic oligonucleotide
aaacgcccggaaccgttttgatttcggggcgtttctttggcagacgaaacaagaa

SEQ ID NO: 508112 - DNA, 55 bp, Artificial
  Synthetic oligonucleotide
aaccggtcacaagagcgccgggcctgttcaacccctggtccagatcagaggcatc

SEQ ID NO: 508113 - DNA, 55 bp, Artificial
  Synthetic oligonucleotide
aacgccccggcataaggcgccatacagacgccgctgccatgatagccaagcgcgg

SEQ ID NO: 508114 - DNA, 55 bp, Artificial
  Synthetic oligonucleotide
aacgcctgcgctgcctcgcacaggacgcctttcagacggcagtttccgaccagaa

SEQ ID NO: 508115 - DNA, 55 bp, Artificial
  Synthetic oligonucleotide
aaggacgaatttcgagtcaggctctcaggacgaggtcggactctgtcgccgttgg

SEQ ID NO: 508116 - DNA, 55 bp, Artificial
  Synthetic oligonucleotide
aagtctcgtgccggacggcttggcatgggcccgcacatcgggtacgtccctccca

SEQ ID NO: 508117 - DNA, 55 bp, Artificial
  Synthetic oligonucleotide
aatgccggtcgtgcgtcactgcggttttcggtcgccagtcggcctcgattggaag

SEQ ID NO: 508118 - DNA, 55 bp, Artificial
  Synthetic oligonucleotide
aatggggcgcacgggtggtcaacctactgacgggctccgagatgcagtggttcga

SEQ ID NO: 508119 - DNA, 55 bp, Artificial
  Synthetic oligonucleotide
ttggatatctcgcggtagacgaacgttccggtaatcttttcgagtagttctgcgc

SEQ ID NO: 508120 - DNA, 55 bp, Artificial
  Synthetic oligonucleotide
acaataccggggctcgcgtctccgaagtcacgcagctgaaggttcgggacctgac

SEQ ID NO: 508121 - DNA, 55 bp, Artificial
  Synthetic oligonucleotide
acaggccatcaactactacagctaccagatccgccgggaagtcggcgccatggcc

SEQ ID NO: 508122 - DNA, 55 bp, Artificial
  Synthetic oligonucleotide
ttcttcattgcaccagacggtgatgccacactccggattggcactcagaatatcg

SEQ ID NO: 508123 - DNA, 55 bp, Artificial
  Synthetic oligonucleotide
accagatggccattcttgtcacctccggcccatgtcatcggacgggcgagatgcg

SEQ ID NO: 508124 - DNA, 55 bp, Artificial
  Synthetic oligonucleotide
acccgtcgtgaccaatccgtagcaaacccgtcacctttcgccagtctgtccggcg

SEQ ID NO: 508125 - DNA, 55 bp, Artificial
  Synthetic oligonucleotide
acgctttcccaacagactgcccgtgctcctgaattaccgggctttccgtgcccgt

SEQ ID NO: 508126 - DNA, 55 bp, Artificial
  Synthetic oligonucleotide
acgggcagaccgaagagccgagcaaaggcgcggcagaataaccaaaatcaatcta

SEQ ID NO: 508127 - DNA, 55 bp, Artificial
  Synthetic oligonucleotide
acgtgccagacatccattccaacgatcttctgttctgcgttcatggctcttatcc

SEQ ID NO: 508128 - DNA, 55 bp, Artificial
  Synthetic oligonucleotide
actgcgtgcgccccgccccatagggtgagtgtgatgaccgacttcagcagcaaga

SEQ ID NO: 508129 - DNA, 55 bp, Artificial
  Synthetic oligonucleotide
ttccgacctcatgaagggtggccgacaggcagacgtccttatcggtgcccaaggc

SEQ ID NO: 508130 - DNA, 55 bp, Artificial
  Synthetic oligonucleotide
cccgtcgctaagatcggctttaccaatcccgcgcggtaccacggcctgtatgaaa

SEQ ID NO: 508131 - DNA, 55 bp, Artificial
  Synthetic oligonucleotide
tgccaccccggcatcaatcgccagatcaggcaagagcgtgatccccaacccctcg

SEQ ID NO: 508132 - DNA, 55 bp, Artificial
  Synthetic oligonucleotide
ccgatcaatatgtgccgggcatcgggccgatactgggtcataccagctggaacac

SEQ ID NO: 508133 - DNA, 55 bp, Artificial
  Synthetic oligonucleotide
ccgatgaaggtcgtggttggtccaatcagtccatacagtgagtaagcgccaatcg

SEQ ID NO: 508134 - DNA, 55 bp, Artificial
  Synthetic oligonucleotide
ccgatgttgcctcatatcccgatcattccgggtgaaaccattctttcctgggcgg

SEQ ID NO: 508135 - DNA, 55 bp, Artificial
  Synthetic oligonucleotide
ccgcaaacaagggcgcgagtgttcggaaagagaccccttcttgcgacaacacctc

SEQ ID NO: 508136 - DNA, 55 bp, Artificial
  Synthetic oligonucleotide
ccgcggcatcgctctcatcctatgcatgaggcaaaggtctcagcgcgtgaggaat

SEQ ID NO: 508137 - DNA, 55 bp, Artificial
  Synthetic oligonucleotide
ccgcttacgccccttcttcgattccatggcgacaatctggatgcccgggttctgt

SEQ ID NO: 508138 - DNA, 55 bp, Artificial
  Synthetic oligonucleotide
ccggaccccgtcacctcgtcctccctatctgttcggcatcactgttgtggttgtg

SEQ ID NO: 508139 - DNA, 55 bp, Artificial
  Synthetic oligonucleotide
ccgggatgactgagtattggcgtcggagcggccttctggggtctattgtcaccag

SEQ ID NO: 508140 - DNA, 55 bp, Artificial
  Synthetic oligonucleotide
ccgtttgaggacgggtcctacccgctgcattttcagcttaactgaagcatgtggg

SEQ ID NO: 508141 - DNA, 55 bp, Artificial
  Synthetic oligonucleotide
tgagttcaaagccgcagctgttggtcggctttataagcctggtgccacacaaggc

SEQ ID NO: 508142 - DNA, 55 bp, Artificial
  Synthetic oligonucleotide
cctgggccaggcacctctaggacaggatcgtcagctgatccacatccgcgtcgat

SEQ ID NO: 508143 - DNA, 55 bp, Artificial
  Synthetic oligonucleotide
cgaaacgtaggctcgactccacggtctgtgaaagcgatataatttcacgcgggcc

SEQ ID NO: 508144 - DNA, 55 bp, Artificial
  Synthetic oligonucleotide
cgacatcgcaatggcacatacccctgcaatgctgcgccttcagctgcgttatgtc

SEQ ID NO: 508145 - DNA, 55 bp, Artificial
  Synthetic oligonucleotide
cgacccctcccgtcctcgcaggatcgaacctcgcataaaacctttgcatccgacc

SEQ ID NO: 508146 - DNA, 55 bp, Artificial
  Synthetic oligonucleotide
cgacggtcaatcgatctgccgacattgagcacgcttgtgatcgctgtcgatggtg

SEQ ID NO: 508147 - DNA, 55 bp, Artificial
  Synthetic oligonucleotide
tcgggaaggtccctgtccatccgatcgtccttctgccgaaaggccccagctttcc

SEQ ID NO: 508148 - DNA, 55 bp, Artificial
  Synthetic oligonucleotide
cgatctgctcacagcaacacggctaccatccctagagctgccttggtcggggcct

SEQ ID NO: 508149 - DNA, 55 bp, Artificial
  Synthetic oligonucleotide
cgcaaagttggaccgcagcgcttcagaacttgccgcaaaagcgtgttttcctggt

SEQ ID NO: 508150 - DNA, 55 bp, Artificial
  Synthetic oligonucleotide
cgcaagagttgcagaatagaggtttgtttccagcttctggcctacaccgtgtgtg

SEQ ID NO: 508151 - DNA, 55 bp, Artificial
  Synthetic oligonucleotide
caaggctgtagcccagatagccagttccagaacaaaggtccaatgcagcaggaaa

SEQ ID NO: 508152 - DNA, 55 bp, Artificial
  Synthetic oligonucleotide
caatatagtcgcgagaacgactacaacttcgaataccttctcaagccggacgatc

SEQ ID NO: 508153 - DNA, 55 bp, Artificial
  Synthetic oligonucleotide
cacaaacccgaacgggaggaatgaggaggggcgaagccttggatccgagcctcac

SEQ ID NO: 508154 - DNA, 55 bp, Artificial
  Synthetic oligonucleotide
caccagtcggcgctacaccgccctcgtcagcagctatggactgaaacaggagttc

SEQ ID NO: 508155 - DNA, 55 bp, Artificial
  Synthetic oligonucleotide
cagcatttggctcccgcgtcgtaggagatggcatgcacagcgataccacaatggg

SEQ ID NO: 508156 - DNA, 55 bp, Artificial
  Synthetic oligonucleotide
cagcgggttagcagtctaaccgttcaaggcacaaatgatgcgccagtggcacttg

SEQ ID NO: 508157 - DNA, 55 bp, Artificial
  Synthetic oligonucleotide
cagctcaatcaaacgcaagacagcatttccaccggtcagaccattaactcagcgc

SEQ ID NO: 508158 - DNA, 55 bp, Artificial
  Synthetic oligonucleotide
cagggaggataaatcgtgaaattaacatccatactgatgacgacagcactcagtg

SEQ ID NO: 508159 - DNA, 55 bp, Artificial
  Synthetic oligonucleotide
catatccaccgactgccctcgccctcatatcccaagcacgagaagccccgaccct

SEQ ID NO: 508160 - DNA, 55 bp, Artificial
  Synthetic oligonucleotide
catatggcacaattcggacccgaggcggtgctgaacgatgatctgcatatcgact

SEQ ID NO: 508161 - DNA, 55 bp, Artificial
  Synthetic oligonucleotide
ccacgcgcaaaagcacgcactaagaccagacaagcctcgcgcaattcgtttaaga

SEQ ID NO: 508162 - DNA, 55 bp, Artificial
  Synthetic oligonucleotide
ccatccagaggtgctgagctgcggctgtgtccagtggcacgtgcgggatctttga

SEQ ID NO: 508163 - DNA, 55 bp, Artificial
  Synthetic oligonucleotide
cccagtgaccggggtcgcgtcagtctaaaacatgttgcgccggagtggcagtcga

SEQ ID NO: 508164 - DNA, 55 bp, Artificial
  Synthetic oligonucleotide
tgcgcccggaccaactgccgtggcaccgataaagccttcgataactgcagtgccg

SEQ ID NO: 508165 - DNA, 55 bp, Artificial
  Synthetic oligonucleotide
cccgaggtcgcatggagaatgatctcgcgggcacctcttctgaccgctcatgcca

SEQ ID NO: 508166 - DNA, 55 bp, Artificial
  Synthetic oligonucleotide
cccgcaccaaagcccagtgacctccctgttccggagatcattcattgagaccatc

SEQ ID NO: 508167 - DNA, 55 bp, Artificial
  Synthetic oligonucleotide
cccgcactgaacgagtggaccaaacaaccctgcctacaaaacgcatccggcagcc

SEQ ID NO: 508168 - DNA, 55 bp, Artificial
  Synthetic oligonucleotide
cccgcagatgcatcatgtttggccccagtgttcccgtgcatggctccaactcgat

SEQ ID NO: 508169 - DNA, 55 bp, Artificial
  Synthetic oligonucleotide
cccgcggaaataccttcggcagagcgaaaggaggccgtaaggtggtaatcgtccg

SEQ ID NO: 508170 - DNA, 55 bp, Artificial
  Synthetic oligonucleotide
cccgctgttctcgcttggcacacggccggaccggcgcattctgaattatgagcac

SEQ ID NO: 508171 - DNA, 54 bp, Artificial
  Synthetic oligonucleotide
ttgggcgccggagggacatcgcgcagaaatacgaaacatgcgataccgatggct

SEQ ID NO: 508172 - DNA, 54 bp, Artificial
  Synthetic oligonucleotide
tttggtccgaaccggacctaattcccgtatgcccaaaattccggttcccgcccc

SEQ ID NO: 508173 - DNA, 54 bp, Artificial
  Synthetic oligonucleotide
tagacctatggcacagcccctgtcagagcagagcaaggcgattgtgaccgcaac

SEQ ID NO: 508174 - DNA, 54 bp, Artificial
  Synthetic oligonucleotide
ccctggtccattcaagaagccggagaccgaattggtccttactgtcctgtcccc

SEQ ID NO: 508175 - DNA, 54 bp, Artificial
  Synthetic oligonucleotide
ggcgctgaaagcttaatcattcatgcgaccgcaaagataacatgttaatcgggg

SEQ ID NO: 508176 - DNA, 54 bp, Artificial
  Synthetic oligonucleotide
agcgcggttgccgaccccctattttcaataggccataccatccgtttgcggagg

SEQ ID NO: 508177 - DNA, 54 bp, Artificial
  Synthetic oligonucleotide
agatggcactgtaaccaatgctctggacattccactggcacccctttcctggat

SEQ ID NO: 508178 - DNA, 54 bp, Artificial
  Synthetic oligonucleotide
cgttgagcccacaggattcacgaaactttctttcgtccgaaacccgaacgtgac

SEQ ID NO: 508179 - DNA, 54 bp, Artificial
  Synthetic oligonucleotide
acagtcggggcgggtgtctcagcgacctgcgacgttggggacgtctcgttcacg

SEQ ID NO: 508180 - DNA, 54 bp, Artificial
  Synthetic oligonucleotide
ctcagcgcaaatcagccaacgactcgcttgacatgataccgaacggtttcatat

SEQ ID NO: 508181 - DNA, 53 bp, Artificial
  Synthetic oligonucleotide
aggacattgccttctgggcgcgggataccgggtttcaggggattgagctttgg

SEQ ID NO: 508182 - DNA, 53 bp, Artificial
  Synthetic oligonucleotide
tcttgcgatcgacatttcctggcaccgcatcgaccaaacagaacgaaaggagt

SEQ ID NO: 508183 - DNA, 53 bp, Artificial
  Synthetic oligonucleotide
tccacactggcgttgtggaagctgaccggccatctgtcgcggatgcagtttgc

SEQ ID NO: 508184 - DNA, 53 bp, Artificial
  Synthetic oligonucleotide
ctctgtgcataatttatgctgggtctatgcgcgtgttttctgttttcgcttat

SEQ ID NO: 508185 - DNA, 53 bp, Artificial
  Synthetic oligonucleotide
gaagggtcggccgcagactagccgcttcgcggggcaatggaacagaaacgcgg

SEQ ID NO: 508186 - DNA, 53 bp, Artificial
  Synthetic oligonucleotide
ttcttcatcaaaggcttggaccagacgccggttgccagaactgcacgatcaca

SEQ ID NO: 508187 - DNA, 53 bp, Artificial
  Synthetic oligonucleotide
gtgcggccttttgcgtatgatagcagaaaacagcgcacatgaaagatatatgc

SEQ ID NO: 508188 - DNA, 53 bp, Artificial
  Synthetic oligonucleotide
gcggcgaatcggtcatctgcaaagggcgcgcggcgggtttcatatcagcttcg

SEQ ID NO: 508189 - DNA, 53 bp, Artificial
  Synthetic oligonucleotide
aaccccgttttccaaagtgacattcggtccggaattgtgataaccggtggtta

SEQ ID NO: 508190 - DNA, 53 bp, Artificial
  Synthetic oligonucleotide
gggactgtccaacagacgcgccaatgtcaccttgagtttcgcaagccggttat

SEQ ID NO: 508191 - DNA, 53 bp, Artificial
  Synthetic oligonucleotide
aacatgtacagcggcgctgtcaggacaagcaggttaacaaagatactcgctac

SEQ ID NO: 508192 - DNA, 52 bp, Artificial
  Synthetic oligonucleotide
acttgtaaaagcacccgtttcaggacagtgattagctacagcttcccctttt

SEQ ID NO: 508193 - DNA, 52 bp, Artificial
  Synthetic oligonucleotide
ttatctttcccagctacgcgaagcttcagcgcatcgctttgataaacgagca

SEQ ID NO: 508194 - DNA, 52 bp, Artificial
  Synthetic oligonucleotide
ggatagaggcaaggagctcttgttccatccgacggccagaaatactgcgggg

SEQ ID NO: 508195 - DNA, 52 bp, Artificial
  Synthetic oligonucleotide
ccccggcatatcaaaacgaatatgaaccagcctagcatatcgccggtgccgt

SEQ ID NO: 508196 - DNA, 51 bp, Artificial
  Synthetic oligonucleotide
aattggcagaatattgatctgggcgaaattggccaacacgggctgttgcga

SEQ ID NO: 508197 - DNA, 51 bp, Artificial
  Synthetic oligonucleotide
agacagggatccagcaaaacagcatgccccgctgtgcatcgaacagtgcca

SEQ ID NO: 508198 - DNA, 51 bp, Artificial
  Synthetic oligonucleotide
agagtagagcatgaaagtccaagtccctgaaggtgtcacgccttgctagcc

SEQ ID NO: 508199 - DNA, 51 bp, Artificial
  Synthetic oligonucleotide
attatggggccatgctcgacgacaatgttctggcccggatcgcagtggaaa

SEQ ID NO: 508200 - DNA, 51 bp, Artificial
  Synthetic oligonucleotide
cctcattgagcagagcaatcaccctgcctgaaggccgcacacggggaccgg

SEQ ID NO: 508201 - DNA, 51 bp, Artificial
  Synthetic oligonucleotide
tcgtctcaagccgctcgtggaagaagcccagccaatgctcgaccccttggt

SEQ ID NO: 508202 - DNA, 51 bp, Artificial
  Synthetic oligonucleotide
cgacttctcattcattgtgaacatgactcacctgtcctcgtggacggccaa

SEQ ID NO: 508203 - DNA, 51 bp, Artificial
  Synthetic oligonucleotide
cgtcggcttagccaacgtcacaggcatcctgccatctatcgcgcctcaaac

SEQ ID NO: 508204 - DNA, 51 bp, Artificial
  Synthetic oligonucleotide
cgttcgtcagcctgaacaacgcgcaaaaggcgtatctggccgatcgacgca

SEQ ID NO: 508205 - DNA, 51 bp, Artificial
  Synthetic oligonucleotide
gtttcgcgcaggctgacactgattgccggccgtccgccctccggtacgccg

SEQ ID NO: 508206 - DNA, 51 bp, Artificial
  Synthetic oligonucleotide
gtggcaatccttggccggggaccaaatcgctgtcctgaaccagggctagac

SEQ ID NO: 508207 - DNA, 51 bp, Artificial
  Synthetic oligonucleotide
gcgaatacgtgcgtctttgatcgagatcatcggaaatgccggggcgatctg

SEQ ID NO: 508208 - DNA, 51 bp, Artificial
  Synthetic oligonucleotide
ggatgggacgaagagggatcgggaccccgtgagaaccagactagccattcg

SEQ ID NO: 508209 - DNA, 51 bp, Artificial
  Synthetic oligonucleotide
ggggcaggggccgggatcacaagaaagatccacaggatcggtcgtgttttc

SEQ ID NO: 508210 - DNA, 50 bp, Artificial
  Synthetic oligonucleotide
gaccttattccagacagcataaagacaggggaatttcgggtgcagattga

SEQ ID NO: 508211 - DNA, 55 bp, Artificial
  Synthetic oligonucleotide
gacgcgtctctcctggaaggaaagcgtaagcgttctggccgacatcctgattaag

SEQ ID NO: 508212 - DNA, 55 bp, Artificial
  Synthetic oligonucleotide
gagctcacatccctttggttacattcggtccggtctggggttcggtgggcgcgtc

SEQ ID NO: 508213 - DNA, 55 bp, Artificial
  Synthetic oligonucleotide
tgaagccttcggccggatataccaaccgtcccgcgtcggacaatccccgcgacat

SEQ ID NO: 508214 - DNA, 55 bp, Artificial
  Synthetic oligonucleotide
gatcgttcgtgggcttgagcgagacaggccggatatgccgcatcaatgctggtcc

SEQ ID NO: 508215 - DNA, 55 bp, Artificial
  Synthetic oligonucleotide
gatgcatgcgcaattttgactcttcaaaatgggtcattctgacggacttgctctc

SEQ ID NO: 508216 - DNA, 55 bp, Artificial
  Synthetic oligonucleotide
gatgctcaattcatcggacaacccggttctgggacaggccgcaatcattgcgcgc

SEQ ID NO: 508217 - DNA, 55 bp, Artificial
  Synthetic oligonucleotide
gatgtgtgggaaatcgttactgacgatgtttgctataatcactcagcgatcttgg

SEQ ID NO: 508218 - DNA, 55 bp, Artificial
  Synthetic oligonucleotide
gcaaccattgcattaggcttgatccatcataatcgcctgaaagcggatggattgc

SEQ ID NO: 508219 - DNA, 55 bp, Artificial
  Synthetic oligonucleotide
gcaatcctgccctgccgggaagatgaatatctgcctcgggtcgagggaaatcggt

SEQ ID NO: 508220 - DNA, 55 bp, Artificial
  Synthetic oligonucleotide
gcacgacaagaggggctctcgcatttaatctgagacaccgcctcgcttcctccgt

SEQ ID NO: 508221 - DNA, 55 bp, Artificial
  Synthetic oligonucleotide
gcaggtttcctgccatccgaccctgcatacattgatgcgttgcggcccgccctaa

SEQ ID NO: 508222 - DNA, 55 bp, Artificial
  Synthetic oligonucleotide
gcatgacgacagggacaaccgtgacaaggcgggccacccaaatctaaaaggcccc

SEQ ID NO: 508223 - DNA, 55 bp, Artificial
  Synthetic oligonucleotide
gccatagacggggtcgaaatcatagttggggttcaggatgtcgatatgggcgttg

SEQ ID NO: 508224 - DNA, 55 bp, Artificial
  Synthetic oligonucleotide
gccctcccctccaaaccagcatgccttccacgcgggcacatctaccaaccgacaa

SEQ ID NO: 508225 - DNA, 55 bp, Artificial
  Synthetic oligonucleotide
gccggagccatgccgcttgtcgataacccggtttgcattcggccccgctcatatg

SEQ ID NO: 508226 - DNA, 55 bp, Artificial
  Synthetic oligonucleotide
gccggtgcctcctattcaacgctggacgcccttggaatccgggagcgggtgacga

SEQ ID NO: 508227 - DNA, 55 bp, Artificial
  Synthetic oligonucleotide
gccttggggagaccccgggtccaccattcgacaccttaggtccatatggcgtcgt

SEQ ID NO: 508228 - DNA, 55 bp, Artificial
  Synthetic oligonucleotide
gcgaccccgccaagtgatgggtgctttgaatggtgcattccgttatcttggacct

SEQ ID NO: 508229 - DNA, 55 bp, Artificial
  Synthetic oligonucleotide
gcgcgggataccaacccgctcggcggacttttccttggatttcgcaaatttaacg

SEQ ID NO: 508230 - DNA, 55 bp, Artificial
  Synthetic oligonucleotide
cgggcaggcttcaccgggtcggccataagccagaagatcattcaccacgcgtgac

SEQ ID NO: 508231 - DNA, 55 bp, Artificial
  Synthetic oligonucleotide
cgggcattttagggcaggctgatcgcaggaaagacggccctgacccgcaggagaa

SEQ ID NO: 508232 - DNA, 55 bp, Artificial
  Synthetic oligonucleotide
cgggtgccttttcctatatcgtacccttcgatgccgatttaagtaaacacacacg

SEQ ID NO: 508233 - DNA, 55 bp, Artificial
  Synthetic oligonucleotide
cggtcagaggatgcggggtttccgaaagtgcctcgggtatcgtcaggcgtcacga

SEQ ID NO: 508234 - DNA, 55 bp, Artificial
  Synthetic oligonucleotide
cggtccccgcagccttgcctgtgaaacgcggctaccctcataccctcgttcatag

SEQ ID NO: 508235 - DNA, 55 bp, Artificial
  Synthetic oligonucleotide
cgtcatcacggaagaccatatccatgacccagtggagactattctcgatggccca

SEQ ID NO: 508236 - DNA, 55 bp, Artificial
  Synthetic oligonucleotide
tgccactgaaggtatcacggccggtatcttcaccgattgcgatattgcttcccac

SEQ ID NO: 508237 - DNA, 55 bp, Artificial
  Synthetic oligonucleotide
cgtggatcgactttgctgtcccgcttgtcgtaagtgaaggtctggctgacaatcg

SEQ ID NO: 508238 - DNA, 55 bp, Artificial
  Synthetic oligonucleotide
tgcagccatgctgcctcctgcatctgtctgaagggatgtgactcgacagggcgat

SEQ ID NO: 508239 - DNA, 55 bp, Artificial
  Synthetic oligonucleotide
ctccgttattggctgccggttatatgacagctcgaaatctctttgtcttaagcag

SEQ ID NO: 508240 - DNA, 55 bp, Artificial
  Synthetic oligonucleotide
ctgacccggcacaaagagacgctcgaccataaaattctcgcgcaactgggtcgta

SEQ ID NO: 508241 - DNA, 55 bp, Artificial
  Synthetic oligonucleotide
ctgtctgcggtttgaagttgttaagagcctgcctgtcggttacaaacgggcacag

SEQ ID NO: 508242 - DNA, 55 bp, Artificial
  Synthetic oligonucleotide
ctttggcgacaccatgacatgaaacagaatggatgtagcgacacgggagcttctc

SEQ ID NO: 508243 - DNA, 55 bp, Artificial
  Synthetic oligonucleotide
gaacaaccggtcgacgatcatatagttgcggcgcacccgataattgactagttcc

SEQ ID NO: 508244 - DNA, 55 bp, Artificial
  Synthetic oligonucleotide
gaagggctttctcacccagatcgctaacccaaaggtcgcggtgttcttcggctcg

SEQ ID NO: 508245 - DNA, 55 bp, Artificial
  Synthetic oligonucleotide
gaagtctataatttcgaagacgcacttctgattgccagcctgctgaacgtattca

SEQ ID NO: 508246 - DNA, 55 bp, Artificial
  Synthetic oligonucleotide
gaagttggctggggcgttttgggtacgcacccggcattcgtcatcacggaagacc

SEQ ID NO: 508247 - DNA, 55 bp, Artificial
  Synthetic oligonucleotide
gacagcgcaggtcgccgaccatataaaatgatcgtcgtattcttgaaaccattgg

SEQ ID NO: 508248 - DNA, 55 bp, Artificial
  Synthetic oligonucleotide
gaccacgccggaaaccattcgctatatgcggctgttcctgtccgaagttccgcgg

SEQ ID NO: 508249 - DNA, 55 bp, Artificial
  Synthetic oligonucleotide
gggctgctgatcagggagagcctgacgcacactacaacatcggtatgttgcgcag

SEQ ID NO: 508250 - DNA, 55 bp, Artificial
  Synthetic oligonucleotide
tctgtcgatagttactatccccgacaccgtgaataagcatgggctcggtgatgat

SEQ ID NO: 508251 - DNA, 55 bp, Artificial
  Synthetic oligonucleotide
ggtcatgttgccgggttgggcggtataggcaacctggaccccttgttccacgcat

SEQ ID NO: 508252 - DNA, 55 bp, Artificial
  Synthetic oligonucleotide
ggtcgatacaccaccccacgcggaaatcgtcgcaaacaacgggtccagatggtcg

SEQ ID NO: 508253 - DNA, 55 bp, Artificial
  Synthetic oligonucleotide
ggtgacggccctgataacggttatgtccgtggaacgtcgtttatccatgtgccgc

SEQ ID NO: 508254 - DNA, 55 bp, Artificial
  Synthetic oligonucleotide
tctggcgctggttcgatcccgtcggcgtacttcaggccccgtcgatcgaggattt

SEQ ID NO: 508255 - DNA, 55 bp, Artificial
  Synthetic oligonucleotide
ggttggatgtcatcaccgccctttcatgctcgtccgaggcaaaggaccctcagga

SEQ ID NO: 508256 - DNA, 55 bp, Artificial
  Synthetic oligonucleotide
gtcagccgataagcctatgaaaatcgtggaaattcggattaggctgcaggaagtg

SEQ ID NO: 508257 - DNA, 55 bp, Artificial
  Synthetic oligonucleotide
gtcgcattcgcatatggagctttggcgatcgggtgtggtcaagcggtgacagccg

SEQ ID NO: 508258 - DNA, 55 bp, Artificial
  Synthetic oligonucleotide
gtggcttccccgtgccttgacactactgaggagttcagggttgaccggaatcagg

SEQ ID NO: 508259 - DNA, 55 bp, Artificial
  Synthetic oligonucleotide
gtggtgtgacgacaaggtgatagggcgtaccgcgaatgacatcggaaatgccgac

SEQ ID NO: 508260 - DNA, 55 bp, Artificial
  Synthetic oligonucleotide
tacgactatatcccgcaggaagacatcgagacgcaggccccacgcatcggccgac

SEQ ID NO: 508261 - DNA, 55 bp, Artificial
  Synthetic oligonucleotide
tctcggaaacaaggctctttcatacgaacgtttgtgtcaacaggcccgggcgaac

SEQ ID NO: 508262 - DNA, 55 bp, Artificial
  Synthetic oligonucleotide
tcaccaccctttccagcacggccttccactatggcggccggtattccaaccggtg

SEQ ID NO: 508263 - DNA, 55 bp, Artificial
  Synthetic oligonucleotide
tcagagctatgcacgctccttccccgtaacctttgaaagtgctgaaggcgcttgg

SEQ ID NO: 508264 - DNA, 55 bp, Artificial
  Synthetic oligonucleotide
tccttccaaccctgtccaagactgcgggcgccaagccggaaccgatcatcccttc

SEQ ID NO: 508265 - DNA, 55 bp, Artificial
  Synthetic oligonucleotide
tctcagttattcgacgcgcggcatcggcactttcgaagaattgttgtcggcctgt

SEQ ID NO: 508266 - DNA, 55 bp, Artificial
  Synthetic oligonucleotide
tcgggaccgacgcattgtcgaggggtacgccatccttcagccgcgtgttacgccc

SEQ ID NO: 508267 - DNA, 55 bp, Artificial
  Synthetic oligonucleotide
tcgtggtcataaagcactccccagtcattgttcaggacgccctgccggaattccg

SEQ ID NO: 508268 - DNA, 55 bp, Artificial
  Synthetic oligonucleotide
gcggattgacaggcctttctcgtctcgccataaacacctcttgaaaattagggat

SEQ ID NO: 508269 - DNA, 55 bp, Artificial
  Synthetic oligonucleotide
gcggtgctgtaactcttacgccaccagccaaaacttctgcaccgatgaacgacgc

SEQ ID NO: 508270 - DNA, 55 bp, Artificial
  Synthetic oligonucleotide
gctcggcggccagtatggtgatgcttgaaaccctgcttgaaggggtcgggcagca

SEQ ID NO: 508271 - DNA, 55 bp, Artificial
  Synthetic oligonucleotide
gctgacggtagccgggtaaacgcgacagatcgtcgcagattattcgacccaccag

SEQ ID NO: 508272 - DNA, 55 bp, Artificial
  Synthetic oligonucleotide
gctgcgatttgcgtctgcggccgttcaaggctataagttgtgccgttcgtcggtc

SEQ ID NO: 508273 - DNA, 55 bp, Artificial
  Synthetic oligonucleotide
gctggggctttatgtcgttcaccaggaaaatggtcggccggttgcccagaaggat

SEQ ID NO: 508274 - DNA, 55 bp, Artificial
  Synthetic oligonucleotide
gcttacggtattgtgtcgcttttgttaacgttatgtgacaacgtatccgagcagt

SEQ ID NO: 508275 - DNA, 55 bp, Artificial
  Synthetic oligonucleotide
ggaacccctgagcttcggatgcgccttttacggtcagggcattaccgggaagggc

SEQ ID NO: 508276 - DNA, 55 bp, Artificial
  Synthetic oligonucleotide
ggaccgacaaacacggcctttacgatgccaagtgccagtgtcttgttttccgcga

SEQ ID NO: 508277 - DNA, 55 bp, Artificial
  Synthetic oligonucleotide
ggacggctccggggtcaatgaacatccataaacccgccgggatgacttgcaggtg

SEQ ID NO: 508278 - DNA, 55 bp, Artificial
  Synthetic oligonucleotide
ggagatgtttgacggattacgcggacgaagtaccaccaatggcatgaatttcatg

SEQ ID NO: 508279 - DNA, 55 bp, Artificial
  Synthetic oligonucleotide
ggatctggccggttctatcgccatccatgtactggtcatcggcacgagacatccc

SEQ ID NO: 508280 - DNA, 55 bp, Artificial
  Synthetic oligonucleotide
ggcaagcatttcggacaaggatgccttccgtgaagccctgcgtgcggctgatttc

SEQ ID NO: 508281 - DNA, 55 bp, Artificial
  Synthetic oligonucleotide
ggcgccaaaatgaaataagacaacggcaattatagcgattgctcgcaatccctga

SEQ ID NO: 508282 - DNA, 55 bp, Artificial
  Synthetic oligonucleotide
ggcgcttaatcgctatatcaacgagcttgccgatcacgagatatcggtgttgcag

SEQ ID NO: 508283 - DNA, 55 bp, Artificial
  Synthetic oligonucleotide
ggcggcctcccgccacgtcctaactatcgcccacagcctatacggaaggacgata

SEQ ID NO: 508284 - DNA, 55 bp, Artificial
  Synthetic oligonucleotide
ggcgtgaactccagcgaggatattgcggaattcatcccgaatctgcagatcagct

SEQ ID NO: 508285 - DNA, 55 bp, Artificial
  Synthetic oligonucleotide
ggctcgagaaactctaaatctcggggcaggacgggctctggcctttcggtgaggc

SEQ ID NO: 508286 - DNA, 55 bp, Artificial
  Synthetic oligonucleotide
gggcagaaatccgcatttccgcgcttcctgataatgaggccgggtcgcaaagagt

SEQ ID NO: 508287 - DNA, 55 bp, Artificial
  Synthetic oligonucleotide
gggccgccttgagcccacaagacgagccggctacagtcacgtccccaacgaagga

SEQ ID NO: 508288 - DNA, 55 bp, Artificial
  Synthetic oligonucleotide
atcacttaaccgacaactgcagacatattggcagaccggtcgcgcgcccctacaa

SEQ ID NO: 508289 - DNA, 55 bp, Artificial
  Synthetic oligonucleotide
atcccggttaggggagcgggaatccacgggtcggctgtccccattgtcggtgtag

SEQ ID NO: 508290 - DNA, 55 bp, Artificial
  Synthetic oligonucleotide
atccggggttccgtgacggccgatgttagcccctggtcataccgccaaggatagg

SEQ ID NO: 508291 - DNA, 55 bp, Artificial
  Synthetic oligonucleotide
atcgcgtaaccctgtggcgagaaaatgactgtccgtgaattggctagccgtcggc

SEQ ID NO: 508292 - DNA, 55 bp, Artificial
  Synthetic oligonucleotide
atcggctgaccaatttcattgcgcccctcgataatttcactacgatgaaaatcag

SEQ ID NO: 508293 - DNA, 55 bp, Artificial
  Synthetic oligonucleotide
ttcagataggccgatatataaagactgtcgctaagcagaaacaggtaattgccga

SEQ ID NO: 508294 - DNA, 55 bp, Artificial
  Synthetic oligonucleotide
atctttgtggtggaggacagaaaatccgggccaaacgtgaagaccagaacgacgt

SEQ ID NO: 508295 - DNA, 55 bp, Artificial
  Synthetic oligonucleotide
tggtctaaatggggtttagttcgtcggatttccccggtttgcccatttggtcgac

SEQ ID NO: 508296 - DNA, 55 bp, Artificial
  Synthetic oligonucleotide
attcccgcacgaccccgtggcgtgccataccgatcgccctggatagaacgacctt

SEQ ID NO: 508297 - DNA, 55 bp, Artificial
  Synthetic oligonucleotide
attgtaaatttctcgcccaagatagttttcaatcggctgccactggagaagattg

SEQ ID NO: 508298 - DNA, 55 bp, Artificial
  Synthetic oligonucleotide
attttgtacatttagggcgctttataccgatggggctttgcaaaggggtgtcggc

SEQ ID NO: 508299 - DNA, 55 bp, Artificial
  Synthetic oligonucleotide
caaagtcaggagaccctgcaacaggcaaaggctatctatgtcgcggcgaagcagc

SEQ ID NO: 508300 - DNA, 55 bp, Artificial
  Synthetic oligonucleotide
caacgcacaagcgaggagatagacatgaataagctgaccaatttcgaccgagatc

SEQ ID NO: 508301 - DNA, 55 bp, Artificial
  Synthetic oligonucleotide
caagcttggaccggggcacacggtagtgacagtgctgtgcgatcatggtacccgt

SEQ ID NO: 508302 - DNA, 55 bp, Artificial
  Synthetic oligonucleotide
cacgatctgtccactgttcgtgcaatgacatcaaccggctcgccgcttgcaccgg

SEQ ID NO: 508303 - DNA, 55 bp, Artificial
  Synthetic oligonucleotide
tggcgaaccctttccgaactatccgatcgactatccggcccctgccgaccagtcg

SEQ ID NO: 508304 - DNA, 55 bp, Artificial
  Synthetic oligonucleotide
cagcccgcaaaaccggaaccgaggctggaaggcgagtaatgaagtctggtgtctg

SEQ ID NO: 508305 - DNA, 55 bp, Artificial
  Synthetic oligonucleotide
catcaatacattggcccaggttctgatgattacgtccggcgcgcttgtgcttgcc

SEQ ID NO: 508306 - DNA, 55 bp, Artificial
  Synthetic oligonucleotide
catcgctctccctttcccctcgttactcgatcgttggaagtcttcgggctccggc

SEQ ID NO: 508307 - DNA, 55 bp, Artificial
  Synthetic oligonucleotide
tttggggcatgcgttcgggatatgcccggccgccaataacggggtcggggtcaga

SEQ ID NO: 508308 - DNA, 55 bp, Artificial
  Synthetic oligonucleotide
aaccggttcgatgacagagcagcccgcacactccccgtccgagactgccatcgca

SEQ ID NO: 508309 - DNA, 55 bp, Artificial
  Synthetic oligonucleotide
aacggccggcaccccatgtcccaccagcccacgtctcacattgcgacctcccgtc

SEQ ID NO: 508310 - DNA, 55 bp, Artificial
  Synthetic oligonucleotide
aagcgcctgcctagcctaaaatacctctgattgtattttcgcagatactatcccc

SEQ ID NO: 508311 - DNA, 55 bp, Artificial
  Synthetic oligonucleotide
aaggtggtctcgccataagcttcgcggcctggtcccagttgataagaagcccgca

SEQ ID NO: 508312 - DNA, 55 bp, Artificial
  Synthetic oligonucleotide
aagtggctgcggtcacgaaggcggtcctcactcctggcggtcgtcactattgtcg

SEQ ID NO: 508313 - DNA, 55 bp, Artificial
  Synthetic oligonucleotide
aatccggggctgggctcgaggtcctttctgaaatccgctccgaggccaacgggga

SEQ ID NO: 508314 - DNA, 55 bp, Artificial
  Synthetic oligonucleotide
aatcgacataccagatggccgtgcccgaacggtcccaccattcgtgccccaccgt

SEQ ID NO: 508315 - DNA, 55 bp, Artificial
  Synthetic oligonucleotide
accggaagcattctttaccgaccatgactttgaaacatggcgagaacattcggcc

SEQ ID NO: 508316 - DNA, 55 bp, Artificial
  Synthetic oligonucleotide
acctatcgcattgaaaccaagggcaatgccaagcaacgcctgctgtcgttcctta

SEQ ID NO: 508317 - DNA, 55 bp, Artificial
  Synthetic oligonucleotide
acgccaagctggggaatgacccggttcggaagagtctgagtgggacacgggcgaa

SEQ ID NO: 508318 - DNA, 55 bp, Artificial
  Synthetic oligonucleotide
acggcgcaccatccttttctttgcgagggcgacacgggcatttcccgagccgtag

SEQ ID NO: 508319 - DNA, 55 bp, Artificial
  Synthetic oligonucleotide
agagatgccgggacgattttcggttgaagccttgttgtgtgagcgatcacgcagc

SEQ ID NO: 508320 - DNA, 55 bp, Artificial
  Synthetic oligonucleotide
agcatagctcaagcaccctcccgccccgcgacagagccagaacgccatagacacc

SEQ ID NO: 508321 - DNA, 55 bp, Artificial
  Synthetic oligonucleotide
ttcgacacggctggggcacagtcttccacagctgagacgcattcgcaaccgcggt

SEQ ID NO: 508322 - DNA, 55 bp, Artificial
  Synthetic oligonucleotide
ttccgggtccatttatggtccgatccataacacggcaggttgacagccgcaattt

SEQ ID NO: 508323 - DNA, 55 bp, Artificial
  Synthetic oligonucleotide
agtctccactgggtcatggatatggtcttccgtgatgacgaatgccgggtgcgta

SEQ ID NO: 508324 - DNA, 55 bp, Artificial
  Synthetic oligonucleotide
agtttcggcgccaattttgtcaccggtggtctaggctggctgcgggtttcggggc

SEQ ID NO: 508325 - DNA, 55 bp, Artificial
  Synthetic oligonucleotide
ataaagcgttacggccagcgcacagggaagggtagcttccgcaaggctcccgacg

SEQ ID NO: 508326 - DNA, 55 bp, Artificial
  Synthetic oligonucleotide
ccggccaaaacggggcaaaagttgtcgttgagtgtgctgatggcggctcggcgac

SEQ ID NO: 508327 - DNA, 55 bp, Artificial
  Synthetic oligonucleotide
ccggctgtggccattctgggaccaatgtcacacacccaatcgatagtggtatgcc

SEQ ID NO: 508328 - DNA, 55 bp, Artificial
  Synthetic oligonucleotide
ccgggtcaccgaccatgacgatagccgccacagcatccttcatcgtggggcaatc

SEQ ID NO: 508329 - DNA, 55 bp, Artificial
  Synthetic oligonucleotide
ccggtctcccctcgtacctgcccggccagaatatatgagcgagcgacataggtgc

SEQ ID NO: 508330 - DNA, 55 bp, Artificial
  Synthetic oligonucleotide
cctatatgggaccagagaccccaaatccggtctccgtgcgcgttcttcggggcga

SEQ ID NO: 508331 - DNA, 55 bp, Artificial
  Synthetic oligonucleotide
cctctcaggtctcctcggggatgggaatcaaccctaaagcggatacccggcacga

SEQ ID NO: 508332 - DNA, 55 bp, Artificial
  Synthetic oligonucleotide
cctctgacctaaacggccttacgttatgtacgattacctttggcagcgtcaaccg

SEQ ID NO: 508333 - DNA, 55 bp, Artificial
  Synthetic oligonucleotide
cctggaggagattactctataacttgcacaggagggcaaccaaatgaccgatcgg

SEQ ID NO: 508334 - DNA, 55 bp, Artificial
  Synthetic oligonucleotide
cgaacaactcggcctgcttcaaggttccgccgataaaccactcgggagacaggcc

SEQ ID NO: 508335 - DNA, 55 bp, Artificial
  Synthetic oligonucleotide
cgaatgccgggtgcgtacccaaaacgccccagccaacttcacaaccctgaagcac

SEQ ID NO: 508336 - DNA, 55 bp, Artificial
  Synthetic oligonucleotide
cgccatgcggcgtatgagcgtcaaggacacccaggagcgtgtcgttgattgtcgc

SEQ ID NO: 508337 - DNA, 55 bp, Artificial
  Synthetic oligonucleotide
cgccccgctcctgaaagtttcgcagacctggccgaaaagcttctgcccagtgtgg

SEQ ID NO: 508338 - DNA, 55 bp, Artificial
  Synthetic oligonucleotide
cgccttgcggctggacagaacccagtgcacgcgatttgcgcgactatcatgccca

SEQ ID NO: 508339 - DNA, 55 bp, Artificial
  Synthetic oligonucleotide
cgcgtttagcttgaccccagcgattggctcgcacaatatccccgcatcgtgatcg

SEQ ID NO: 508340 - DNA, 55 bp, Artificial
  Synthetic oligonucleotide
cgctagccggcagctttcggtgttgctatgagacaggatccagagtttcggcgag

SEQ ID NO: 508341 - DNA, 55 bp, Artificial
  Synthetic oligonucleotide
cgcttacgaccccagcactggcacggtaggagctggcaccacgacgaactacact

SEQ ID NO: 508342 - DNA, 55 bp, Artificial
  Synthetic oligonucleotide
cggaggcacatgccacattgaagggtggcgcacacatcggaaaagtgatactgga

SEQ ID NO: 508343 - DNA, 55 bp, Artificial
  Synthetic oligonucleotide
cggcaattcggacagcctgttgctgaatggggatgcgctgctctatttccggccg

SEQ ID NO: 508344 - DNA, 55 bp, Artificial
  Synthetic oligonucleotide
cggctcgcatagatcgccttgataaatggatcggtgatccgtatatgtggatcgc

SEQ ID NO: 508345 - DNA, 55 bp, Artificial
  Synthetic oligonucleotide
catgcgacggggaaccagggcacacggagacgaccaggagagctacttcgcttcc

SEQ ID NO: 508346 - DNA, 55 bp, Artificial
  Synthetic oligonucleotide
ccgctgatcgtatcgacggtagtgatgccgaaacatctccactacaggttgtcgg

SEQ ID NO: 508347 - DNA, 55 bp, Artificial
  Synthetic oligonucleotide
ccaagcctttcgaagagcggatgtggacggcgcgtcattcggtgcatggacatcg

SEQ ID NO: 508348 - DNA, 55 bp, Artificial
  Synthetic oligonucleotide
ccgcagaactatatcgagccggagttgcgtcagatcacttcaccggaattcgacg

SEQ ID NO: 508349 - DNA, 55 bp, Artificial
  Synthetic oligonucleotide
ccctataaggaacggcttggttgtctgaatggtgatattgctgcctggcgcgatg

SEQ ID NO: 508350 - DNA, 55 bp, Artificial
  Synthetic oligonucleotide
cccgtctggacaaccccgagcccgcttgctacccaattcactgggtcattccgcc

SEQ ID NO: 508351 - DNA, 55 bp, Artificial
  Synthetic oligonucleotide
cccgctgcggggtaatttggccccgaaattgtacggcattaatcaattttgtaca

SEQ ID NO: 508352 - DNA, 55 bp, Artificial
  Synthetic oligonucleotide
cccgcaaccaaggctcaccacaacaaagcgcgatctcatctcaatccacactgcc

SEQ ID NO: 508353 - DNA, 55 bp, Artificial
  Synthetic oligonucleotide
ccacgggcttgtcgggccacatgaaatcatcccgattgccgagaaaagcgggctt

SEQ ID NO: 508354 - DNA, 55 bp, Artificial
  Synthetic oligonucleotide
tgctgatttcttggcaccccatgcctgttcacgggtcgaagcgatgcagccaata

SEQ ID NO: 508355 - DNA, 55 bp, Artificial
  Synthetic oligonucleotide
ccagtcgggcgtttgccattccatccagccaaggttttgctgccgtgccagattt

SEQ ID NO: 508356 - DNA, 55 bp, Artificial
  Synthetic oligonucleotide
cccagtcatgcttgtttcgcatggcagactcgcacataatccagccacataagag

SEQ ID NO: 508357 - DNA, 55 bp, Artificial
  Synthetic oligonucleotide
cccctcatttggcgttaatcggataattaccggttacaggggttgcgcgagccga

SEQ ID NO: 508358 - DNA, 54 bp, Artificial
  Synthetic oligonucleotide
cattgcaggttctgcaccggtcccgaataggccgaggcctcctgaaggaattgc

SEQ ID NO: 508359 - DNA, 54 bp, Artificial
  Synthetic oligonucleotide
tccggccgggccttgaatcgatacaggttttcaccccgcgcttcaactgcgggg

SEQ ID NO: 508360 - DNA, 54 bp, Artificial
  Synthetic oligonucleotide
tggaggatcatatcctctggtcatactcggtgctcagcatctcccgcaaggtca

SEQ ID NO: 508361 - DNA, 54 bp, Artificial
  Synthetic oligonucleotide
ctaaaattcttatgatcccagagaagcgggtttgagaccatgaccaagggtatt

SEQ ID NO: 508362 - DNA, 54 bp, Artificial
  Synthetic oligonucleotide
cccgatgttcgacatgttgctctcgcccaaaccggactccggctccagctatac

SEQ ID NO: 508363 - DNA, 54 bp, Artificial
  Synthetic oligonucleotide
ggtgtgtcgggcgggagacgtgcctcgccgtcccatctgatgatcgtcaagggc

SEQ ID NO: 508364 - DNA, 54 bp, Artificial
  Synthetic oligonucleotide
attggtcgagaaggccgtatcctggcgagccttctgatggatggtgtctgcggt

SEQ ID NO: 508365 - DNA, 54 bp, Artificial
  Synthetic oligonucleotide
agatcctaggataatttcctcccataatccagttgcaccccttcggaatcgtgc

SEQ ID NO: 508366 - DNA, 54 bp, Artificial
  Synthetic oligonucleotide
gggatgccggaacaccccttcataatcgcgatgcagggacgattcaccgcacat

SEQ ID NO: 508367 - DNA, 54 bp, Artificial
  Synthetic oligonucleotide
gggacggcgggaccaccaacaacgacgggcggatgttcaggggtttgccctggt

SEQ ID NO: 508368 - DNA, 54 bp, Artificial
  Synthetic oligonucleotide
gacatgtttgaagtcgataccctgcacggtggcgatatggacatgactcggcat

SEQ ID NO: 508369 - DNA, 53 bp, Artificial
  Synthetic oligonucleotide
gcaacaactctgctgggtcgccctgtcatcgaggctccggacatgccagacat

SEQ ID NO: 508370 - DNA, 53 bp, Artificial
  Synthetic oligonucleotide
aggtatcgtaagggtcgacatagcccaccgtcagcatatcgagcttcggatgc

SEQ ID NO: 508371 - DNA, 53 bp, Artificial
  Synthetic oligonucleotide
tcgccgcgatctgtaccgactatccttcttcgtcatgaattcgtaatgtcact

SEQ ID NO: 508372 - DNA, 52 bp, Artificial
  Synthetic oligonucleotide
tgcctgtcgatcaatggcggtcaacatatgttctgatgtttgcctgttgagt

SEQ ID NO: 508373 - DNA, 52 bp, Artificial
  Synthetic oligonucleotide
tttcaccggattgctttaattcttagccgcagattgctgtccggcgagggag

SEQ ID NO: 508374 - DNA, 52 bp, Artificial
  Synthetic oligonucleotide
tccttcgaggttccgacgcgcggccactcagctcgcatacatcagacgatct

SEQ ID NO: 508375 - DNA, 52 bp, Artificial
  Synthetic oligonucleotide
aaaggttgaagccggacgcgcgtcgatacgtgccggacaaggtcggcccaat

SEQ ID NO: 508376 - DNA, 52 bp, Artificial
  Synthetic oligonucleotide
ctcatggatgagaccgaatcgacgaggacagttctccgggcaggcagatggc

SEQ ID NO: 508377 - DNA, 52 bp, Artificial
  Synthetic oligonucleotide
cgtgacatggttgaaaactccgagttcattgcgatatagcccggggatcggg

SEQ ID NO: 508378 - DNA, 52 bp, Artificial
  Synthetic oligonucleotide
ccgcgtttcatgtcgcgaattctgcgctgcaaatggcggtttacatgctccg

SEQ ID NO: 508379 - DNA, 52 bp, Artificial
  Synthetic oligonucleotide
cagatcgtccttgggaatctctttaaagggagctgggcgaaagcgggccgag

SEQ ID NO: 508380 - DNA, 52 bp, Artificial
  Synthetic oligonucleotide
atgtttgaaagcgaccaacacacagctcagctattacatgatactgcgccct

SEQ ID NO: 508381 - DNA, 51 bp, Artificial
  Synthetic oligonucleotide
ttttgcattgggcgacatgacatcaggtatcgattgtcgtctggttcatgg

SEQ ID NO: 508382 - DNA, 51 bp, Artificial
  Synthetic oligonucleotide
aacaggctgaaaaccgaatttgcctgttctggcatcaacagtgtgtaggca

SEQ ID NO: 508383 - DNA, 51 bp, Artificial
  Synthetic oligonucleotide
tttaaatccgcggaaatcttcgggcgaaatattgtcaggcggcccgatctg

SEQ ID NO: 508384 - DNA, 51 bp, Artificial
  Synthetic oligonucleotide
agctggctctcttccatgcgtcatatcgcgcttgaaggccgctgtttcgtg

SEQ ID NO: 508385 - DNA, 51 bp, Artificial
  Synthetic oligonucleotide
aggggcggtatgtggcctccaaacccctgcgattccgccgcttgggagatt

SEQ ID NO: 508386 - DNA, 51 bp, Artificial
  Synthetic oligonucleotide
atcttgaaggttccgattctcttgaccatggcatcaacagtgcctgtctgc

SEQ ID NO: 508387 - DNA, 51 bp, Artificial
  Synthetic oligonucleotide
ttagccgccaacccggcttatggcgcctttgttcgctccagtctggccaat

SEQ ID NO: 508388 - DNA, 51 bp, Artificial
  Synthetic oligonucleotide
cagaaccagttgcgcgataaggctgtcttcgtaattgacatagcgggcata

SEQ ID NO: 508389 - DNA, 51 bp, Artificial
  Synthetic oligonucleotide
ccagcgttggctgctgtcaaatcccagcgcagtaccgcttcctactacttc

SEQ ID NO: 508390 - DNA, 51 bp, Artificial
  Synthetic oligonucleotide
gatccgtaccccggccccgctgaccaaaatcgaacgcgaagagtcgggttc

SEQ ID NO: 508391 - DNA, 51 bp, Artificial
  Synthetic oligonucleotide
ggggtccggcctcagccgcaatttccatatgcgcggggtgaagctcagcct

SEQ ID NO: 508392 - DNA, 51 bp, Artificial
  Synthetic oligonucleotide
ggtgccacgccggttaacgtgctgcagtgccgaataagaggggcataaccg

SEQ ID NO: 508393 - DNA, 50 bp, Artificial
  Synthetic oligonucleotide
tgtccgacaatactagcagaggatcagaaggcgtcaaggcgtagtgacga

SEQ ID NO: 508394 - DNA, 50 bp, Artificial
  Synthetic oligonucleotide
tattcggaacaagatgactgcgaaacgactttacacgggtggcgtatccc

SEQ ID NO: 508395 - DNA, 57 bp, Artificial
  Synthetic oligonucleotide
gagcattactacctattagattatagtcttctataacaggacttgttgagttaggcg

SEQ ID NO: 508396 - DNA, 56 bp, Artificial
  Synthetic oligonucleotide
cctttcttactaatataacctacaaccctatcatgccatatggtgttatcttgacc

SEQ ID NO: 508397 - DNA, 55 bp, Artificial
  Synthetic oligonucleotide
cttctgttgaaatgaggagggctatggcaagagccgaagttggtaatgaagtcgc

SEQ ID NO: 508398 - DNA, 55 bp, Artificial
  Synthetic oligonucleotide
cttgggctttgtatcatcgttaatggattgttactgccatcaactcatatgatca

SEQ ID NO: 508399 - DNA, 55 bp, Artificial
  Synthetic oligonucleotide
gaacaaatagtctaggttcacgctttcgcacacaccctaaccaattccttgctcg

SEQ ID NO: 508400 - DNA, 55 bp, Artificial
  Synthetic oligonucleotide
gaccttagcagatacactgcttggaccagtacctactaccttaaagccagctgct

SEQ ID NO: 508401 - DNA, 55 bp, Artificial
  Synthetic oligonucleotide
gagagccattccttacctataaattctctatcagcggttaatgcttcaatgcggt

SEQ ID NO: 508402 - DNA, 55 bp, Artificial
  Synthetic oligonucleotide
gcatactgattatcctgagtgcttctctaaagacatcaaacttctagctatcggt

SEQ ID NO: 508403 - DNA, 55 bp, Artificial
  Synthetic oligonucleotide
gcatgccgagtttacttacctgctctatagatttacggcggctagagcttactcc

SEQ ID NO: 508404 - DNA, 55 bp, Artificial
  Synthetic oligonucleotide
gccaccactgttaattaatacttcagctccctttaacactccgctatgcttgagc

SEQ ID NO: 508405 - DNA, 55 bp, Artificial
  Synthetic oligonucleotide
gcccctatgggtgctgtactagttggtagtgagaaatttatagagcaagcttggt

SEQ ID NO: 508406 - DNA, 55 bp, Artificial
  Synthetic oligonucleotide
gccttctatcttatttctgtacgttgcaaccaaccttttgccatcaacttccttc

SEQ ID NO: 508407 - DNA, 55 bp, Artificial
  Synthetic oligonucleotide
gcgtgagaaactatcgatgaataggctatatccggaattaattagtatgcatgcc

SEQ ID NO: 508408 - DNA, 55 bp, Artificial
  Synthetic oligonucleotide
gcttaccccgggtctatcagattcattgtgtaagtaagatttcgccatttggccc

SEQ ID NO: 508409 - DNA, 55 bp, Artificial
  Synthetic oligonucleotide
gcttctacttgcctagaagatgcaaaagccatatacgaacaaaatggatactcgc

SEQ ID NO: 508410 - DNA, 55 bp, Artificial
  Synthetic oligonucleotide
gctttaatcccagacggcattctattgcataacaatgacatgtttactgtcctgc

SEQ ID NO: 508411 - DNA, 55 bp, Artificial
  Synthetic oligonucleotide
ggacactgatatcagagccattacatactgataagatcgcatctatttgctcagc

SEQ ID NO: 508412 - DNA, 55 bp, Artificial
  Synthetic oligonucleotide
ggactggttttgcaaatccgaacatcggcataccagtcaggtatagtcctattgg

SEQ ID NO: 508413 - DNA, 55 bp, Artificial
  Synthetic oligonucleotide
ggcgtgctgacccataagttttgcatccaaggagttcctgcaatagtggtgcagg

SEQ ID NO: 508414 - DNA, 55 bp, Artificial
  Synthetic oligonucleotide
gggattcaatatcactcttccactctcgcatcttgccgtggcactcaaatactcg

SEQ ID NO: 508415 - DNA, 55 bp, Artificial
  Synthetic oligonucleotide
gggcactaggatacctaggcgtggcatatcgcgagcaaggagaattagaagcggc

SEQ ID NO: 508416 - DNA, 55 bp, Artificial
  Synthetic oligonucleotide
ggtatcgataagaattctttaatcagggccaaagcaggcgtaacccacgcattac

SEQ ID NO: 508417 - DNA, 55 bp, Artificial
  Synthetic oligonucleotide
gtacggcaaaacggcaagtattagagccggcacctgttttggggataagagctac

SEQ ID NO: 508418 - DNA, 55 bp, Artificial
  Synthetic oligonucleotide
gtctcattgccggtcaagcacatgccactccattaccaataaaaggcaatagagg

SEQ ID NO: 508419 - DNA, 55 bp, Artificial
  Synthetic oligonucleotide
gtgagcacttgtataactgcccaattgtttggattccataacctcgaagtctact

SEQ ID NO: 508420 - DNA, 55 bp, Artificial
  Synthetic oligonucleotide
gtggaagagcagctgtagaagatgaagataggtggtaccatatagattcccatgc

SEQ ID NO: 508421 - DNA, 55 bp, Artificial
  Synthetic oligonucleotide
gtggcaagcagtcttacgctaacgacaatggtgtttctgctaaaaccttcaagtc

SEQ ID NO: 508422 - DNA, 55 bp, Artificial
  Synthetic oligonucleotide
gttccgcagtaagacttttactgactatagcttgtagagtagtataagctgggcg

SEQ ID NO: 508423 - DNA, 55 bp, Artificial
  Synthetic oligonucleotide
tgtaccctgataatactcatatcctctatggggtgcttcttgattgtaaagaaca

SEQ ID NO: 508424 - DNA, 55 bp, Artificial
  Synthetic oligonucleotide
ttagctgccggctttatacttcttacataatccctaagttgggttatacaggcgg

SEQ ID NO: 508425 - DNA, 55 bp, Artificial
  Synthetic oligonucleotide
tttcgtaactcatcaggagcacaacaagggctaaattttccttcaggattaaccc

SEQ ID NO: 508426 - DNA, 55 bp, Artificial
  Synthetic oligonucleotide
aacctaagccttgaggtgcagcattgttgtaaagagctgcaagtactttaggagc

SEQ ID NO: 508427 - DNA, 55 bp, Artificial
  Synthetic oligonucleotide
acagttacaggtaacgtaccatctgcactcgtaggggaatatataaaatgcagtg

SEQ ID NO: 508428 - DNA, 55 bp, Artificial
  Synthetic oligonucleotide
agccaaagcggggttaacgcatacattacttgaagcgacgtcagatggtcattgc

SEQ ID NO: 508429 - DNA, 55 bp, Artificial
  Synthetic oligonucleotide
agcgggcatgaatatttcttagctcctaccatcacatgctcatcatctaatagct

SEQ ID NO: 508430 - DNA, 55 bp, Artificial
  Synthetic oligonucleotide
agtaaacctgataataaggctcagactgtttacttgcgacatcctcccgacttac

SEQ ID NO: 508431 - DNA, 55 bp, Artificial
  Synthetic oligonucleotide
atagccgtagatgcgaacgcagcatgggatttaagtaagcagattggagatagca

SEQ ID NO: 508432 - DNA, 55 bp, Artificial
  Synthetic oligonucleotide
atatgcggcagttcgttaaaagatgcgtagtgctacctgctatgattggttacag

SEQ ID NO: 508433 - DNA, 55 bp, Artificial
  Synthetic oligonucleotide
caagcgatataggtgtagaacagacactagaatcctctaaagcaagggaatgcac

SEQ ID NO: 508434 - DNA, 55 bp, Artificial
  Synthetic oligonucleotide
caattatagaaagatggttctgttgcatctaaacatggatcgtgctaggaagagc

SEQ ID NO: 508435 - DNA, 55 bp, Artificial
  Synthetic oligonucleotide
cacacccaaagccaaatggtgtaccgaaattaaaagaggtgagcagtccaaagcc

SEQ ID NO: 508436 - DNA, 55 bp, Artificial
  Synthetic oligonucleotide
cacattaccgctagtagcactaaagtaaccccgtgcccacaaatgtctaccccag

SEQ ID NO: 508437 - DNA, 55 bp, Artificial
  Synthetic oligonucleotide
cactccgatatagtactatacacgtctcgtgctatctcttcatgatgactacccg

SEQ ID NO: 508438 - DNA, 55 bp, Artificial
  Synthetic oligonucleotide
caggagagccgttttatagtcatcctttggaggtagcgtatttagtatcagacta

SEQ ID NO: 508439 - DNA, 55 bp, Artificial
  Synthetic oligonucleotide
caggtaatgtctgtttcttgctatcctctttgctgacgcaacgcactacgtaccc

SEQ ID NO: 508440 - DNA, 55 bp, Artificial
  Synthetic oligonucleotide
ccaaggaggctttaagccaatggattggagtggggtagctagcattaacacaagg

SEQ ID NO: 508441 - DNA, 55 bp, Artificial
  Synthetic oligonucleotide
cccacttgctaggtcaagtgagaatataggtatacataaataccttgataccaca

SEQ ID NO: 508442 - DNA, 55 bp, Artificial
  Synthetic oligonucleotide
ccgataactgatatatgctggtcttgcatattacctatttccattggaagcatca

SEQ ID NO: 508443 - DNA, 55 bp, Artificial
  Synthetic oligonucleotide
ccgctgcttgcctgcatcttagaacttgcagtctcttattgaatcgagtcaggca

SEQ ID NO: 508444 - DNA, 55 bp, Artificial
  Synthetic oligonucleotide
ccgtcacagcgagaagtaactctaccgcttcttgcctgcatcttagagcttgcag

SEQ ID NO: 508445 - DNA, 55 bp, Artificial
  Synthetic oligonucleotide
cctatcccacgcatctaagatatcagtacctgattgctcgtaaatacgacctaag

SEQ ID NO: 508446 - DNA, 55 bp, Artificial
  Synthetic oligonucleotide
cgaagcagcaagatatgcaacagatgctaccgcattttgtcctttgcttctttgt

SEQ ID NO: 508447 - DNA, 55 bp, Artificial
  Synthetic oligonucleotide
cgattacatacttcgtgtaatgctgtgttataatctcatgtataagtgccggagt

SEQ ID NO: 508448 - DNA, 55 bp, Artificial
  Synthetic oligonucleotide
ctccctctaatagatgaagcatagtccttaaatattctctctatatcgctactgg

SEQ ID NO: 508449 - DNA, 55 bp, Artificial
  Synthetic oligonucleotide
cgtcacgaacgatgtttctgtataacgttactttctcatgtgattcgccatagtt

SEQ ID NO: 508450 - DNA, 55 bp, Artificial
  Synthetic oligonucleotide
ctatcaatagcatttacaacgtctgatcgagttatacctagatgaatcactgctc

SEQ ID NO: 508451 - DNA, 55 bp, Artificial
  Synthetic oligonucleotide
ctagatggaatggctgacttattaacagcgatacaggaaataaaggaggatcatg

SEQ ID NO: 508452 - DNA, 54 bp, Artificial
  Synthetic oligonucleotide
tcagaaataattactcgcatgtgatacgcagacttagcgaaggatgtggggtta

SEQ ID NO: 508453 - DNA, 54 bp, Artificial
  Synthetic oligonucleotide
caagaaagcaactagggatcagttttggtagtggcaaaaccccagattgccgcg

SEQ ID NO: 508454 - DNA, 52 bp, Artificial
  Synthetic oligonucleotide
ctatacctgttattcttgttgcaagttccgagcttggcactattaaccatac

SEQ ID NO: 508455 - DNA, 52 bp, Artificial
  Synthetic oligonucleotide
tgtaacaagtctgatgccctcgtgtaatgcttaacatctccgataacgtata

SEQ ID NO: 508456 - DNA, 52 bp, Artificial
  Synthetic oligonucleotide
ctattgtgtaaccatgcagcgtattcaaagcctttaggtacagatatcttgc

SEQ ID NO: 508457 - DNA, 51 bp, Artificial
  Synthetic oligonucleotide
gtaatccactcattacttgaagcgacgtcagatggtcattgtggcttacct

SEQ ID NO: 508458 - DNA, 51 bp, Artificial
  Synthetic oligonucleotide
ctctgatactagatagtacaggtcttagatttagtacggctagtaactggt

SEQ ID NO: 508459 - DNA, 50 bp, Artificial
  Synthetic oligonucleotide
cgtcctggtcgtaattgctgcgtgttaattgccttgaaggaggttgagag

SEQ ID NO: 508460 - DNA, 58 bp, Artificial
  Synthetic oligonucleotide
cggaaataatgcttatctttcgatgataattcgcctatgcaaaccatgaaaagaatcc

SEQ ID NO: 508461 - DNA, 55 bp, Artificial
  Synthetic oligonucleotide
gctctgccttcgcacctgccgcagtttgccgttctatacggctccgcagaccgtt

SEQ ID NO: 508462 - DNA, 55 bp, Artificial
  Synthetic oligonucleotide
gcgttcagacccacctcccacgaggtcgtgttcttcgggcggagattctggatcg

SEQ ID NO: 508463 - DNA, 55 bp, Artificial
  Synthetic oligonucleotide
gcgtatacgcggtcgaaggcgagtccctgcttgtaaagcgagtcgagtacgggcg

SEQ ID NO: 508464 - DNA, 55 bp, Artificial
  Synthetic oligonucleotide
gcggaatccgttgctcaggagtgttcgggcttcggcatatacccgatccatattg

SEQ ID NO: 508465 - DNA, 55 bp, Artificial
  Synthetic oligonucleotide
gcccgtgaggagggcgtgaaactgatcgtgacgaagattcgacagattgccggta

SEQ ID NO: 508466 - DNA, 55 bp, Artificial
  Synthetic oligonucleotide
gccatcaattccgatcacaaaatgcaaatcctgcgccgcgacggagtcatctacc

SEQ ID NO: 508467 - DNA, 55 bp, Artificial
  Synthetic oligonucleotide
gcagcatcgggcacctatatcgtctctggcagctacccggctctgaccggcgtta

SEQ ID NO: 508468 - DNA, 55 bp, Artificial
  Synthetic oligonucleotide
gatggagtgatgcggaaagggacaaataccatacgcatcgcatgagaacggacag

SEQ ID NO: 508469 - DNA, 55 bp, Artificial
  Synthetic oligonucleotide
gatctacgctcccgcggagcatcctcacggcacgatacacaagacccagcaggag

SEQ ID NO: 508470 - DNA, 55 bp, Artificial
  Synthetic oligonucleotide
gagtctgttcttcggtcggggatgccgtctcgggctcctctgcggagactatctc

SEQ ID NO: 508471 - DNA, 55 bp, Artificial
  Synthetic oligonucleotide
gagaacgtggacaagaacctcacgaacgaccgcgctacgcagaacatcgccgtga

SEQ ID NO: 508472 - DNA, 55 bp, Artificial
  Synthetic oligonucleotide
gacgctgtttgtcgtctttcgaatagttgtttatgcggcttttataggaaggcgt

SEQ ID NO: 508473 - DNA, 55 bp, Artificial
  Synthetic oligonucleotide
gaccaaagaatgtccggggttttgatgatatccacacccagttccaattcgaaac

SEQ ID NO: 508474 - DNA, 55 bp, Artificial
  Synthetic oligonucleotide
gacattgaagcgcgacaggcgtgcggcttccagtgcacgttccgagaggcattcc

SEQ ID NO: 508475 - DNA, 55 bp, Artificial
  Synthetic oligonucleotide
ctttcacccttgcgggaagaacgcacgccgagtttcaaagtggactacgtgcaaa

SEQ ID NO: 508476 - DNA, 55 bp, Artificial
  Synthetic oligonucleotide
ctgcatttacggtgtcgatcaaatgcacggtgcttcctacacccgcggtgcaacc

SEQ ID NO: 508477 - DNA, 55 bp, Artificial
  Synthetic oligonucleotide
ctgatcgtgattcgcagccaagcggaactggcggattttatatttcccaacgaca

SEQ ID NO: 508478 - DNA, 55 bp, Artificial
  Synthetic oligonucleotide
ttacggcgagctgaaccgctacgaggtcgtccgccggggacgcgaagtggccgtt

SEQ ID NO: 508479 - DNA, 55 bp, Artificial
  Synthetic oligonucleotide
tgggattttacgtgggaagcctgacctcgccctatgtgttttacggattcgtggc

SEQ ID NO: 508480 - DNA, 55 bp, Artificial
  Synthetic oligonucleotide
tcgggaagctcgggacggctcagcgagtcgagcattcgggaccgctccacggaat

SEQ ID NO: 508481 - DNA, 55 bp, Artificial
  Synthetic oligonucleotide
tattacaactacaagatacacccggacggaaaattcgagtgcaagatgaaaaccc

SEQ ID NO: 508482 - DNA, 55 bp, Artificial
  Synthetic oligonucleotide
gtcttccccgctttgttctgccgaaaaccgtgatagcaccacgcaggtctatcgg

SEQ ID NO: 508483 - DNA, 55 bp, Artificial
  Synthetic oligonucleotide
gtctccaaacgcttccacctcgcggctacgtggctcacagctatcggggcaaacc

SEQ ID NO: 508484 - DNA, 55 bp, Artificial
  Synthetic oligonucleotide
gtcggtcgtgaagtcgggctgcgccgaggcgtagagggctggtgtgggaccggga

SEQ ID NO: 508485 - DNA, 55 bp, Artificial
  Synthetic oligonucleotide
gtcgggcaatgtcatcgaacgtcgccatcgtatgtccggtacgggaacacgctcc

SEQ ID NO: 508486 - DNA, 55 bp, Artificial
  Synthetic oligonucleotide
ggtcggcaggatgatgtaggcgcactcgtccagcaacggcatattcgcctccgta

SEQ ID NO: 508487 - DNA, 55 bp, Artificial
  Synthetic oligonucleotide
ggctgacatggcttcgatccagggacggttcctctcgacgaaagtttcgctcgtg

SEQ ID NO: 508488 - DNA, 55 bp, Artificial
  Synthetic oligonucleotide
ggcgtatttctttccggcatccacgtactcggccttcagcgagaagccgctgcgt

SEQ ID NO: 508489 - DNA, 55 bp, Artificial
  Synthetic oligonucleotide
ggcagactgcccctaccggcggcaaccgtttacgactcctttggtctacacgctc

SEQ ID NO: 508490 - DNA, 55 bp, Artificial
  Synthetic oligonucleotide
ggagcagatgcgaaccttcatactgatccgtccccagctggatgccaacgaacgg

SEQ ID NO: 508491 - DNA, 55 bp, Artificial
  Synthetic oligonucleotide
ggagaaagtcgggatgaaagtcggaggttaactcgaagatagctttgtttctgtg

SEQ ID NO: 508492 - DNA, 55 bp, Artificial
  Synthetic oligonucleotide
ggacggaacaccttccacttttacggtgtagttcccggagtaaccgggttgtgac

SEQ ID NO: 508493 - DNA, 55 bp, Artificial
  Synthetic oligonucleotide
ggaacttcggaaccattacggggatgttccgttatttcagggccgtgtcgttcag

SEQ ID NO: 508494 - DNA, 55 bp, Artificial
  Synthetic oligonucleotide
gcttctgtggcgtctccgagtagtcgctaagaccggcttaccgggattcgcgcta

SEQ ID NO: 508495 - DNA, 55 bp, Artificial
  Synthetic oligonucleotide
gctgaggccactgccggaaagtattcgtcggtacggatcggcgaaaccggaatcc

SEQ ID NO: 508496 - DNA, 55 bp, Artificial
  Synthetic oligonucleotide
aagcctcctccgacgaacgtcctccgtggggttcgatgtgcaacggctgctccgt

SEQ ID NO: 508497 - DNA, 55 bp, Artificial
  Synthetic oligonucleotide
acggagattcctacaggggacgccttgcgagccgcgattcggcgatggagaccag

SEQ ID NO: 508498 - DNA, 55 bp, Artificial
  Synthetic oligonucleotide
atatccgcgaaagggatggatgattcgtatgccatgatattgaaataatgccgcc

SEQ ID NO: 508499 - DNA, 55 bp, Artificial
  Synthetic oligonucleotide
atcgtccctttcgcccagttctccagacggttatcgacatagaggccgtaaggcg

SEQ ID NO: 508500 - DNA, 55 bp, Artificial
  Synthetic oligonucleotide
atgtcgcccgcacgaacgcccttgccgtaggctcccgtcgccgaatagtagcccg

SEQ ID NO: 508501 - DNA, 55 bp, Artificial
  Synthetic oligonucleotide
attctcgaacagcacaccccgtgcggccacactgtcgaaaaccggcgtcgagacc

SEQ ID NO: 508502 - DNA, 55 bp, Artificial
  Synthetic oligonucleotide
cagatattgggattggggacactcgaagactcttcggacccgggtaatgcgagcg

SEQ ID NO: 508503 - DNA, 55 bp, Artificial
  Synthetic oligonucleotide
caggcggttggagcgaatctttcaggacgccgtaaaaggcggagacttcgtgccg

SEQ ID NO: 508504 - DNA, 55 bp, Artificial
  Synthetic oligonucleotide
caggtctacgtatttcagcccgtcaggtctacgtatttcagctcgccggggcggt

SEQ ID NO: 508505 - DNA, 55 bp, Artificial
  Synthetic oligonucleotide
ccgaaacagatcaagccgataaacaaaagaaccgcccctctcctgccggaagggg

SEQ ID NO: 508506 - DNA, 55 bp, Artificial
  Synthetic oligonucleotide
ccgatgtccgtggactgctccttgagcgttatatcataaccgacccgatcaggct

SEQ ID NO: 508507 - DNA, 55 bp, Artificial
  Synthetic oligonucleotide
ccgggattgtataagcgtcgaaaagcagaacgtaaaggattccgagagccatgaa

SEQ ID NO: 508508 - DNA, 55 bp, Artificial
  Synthetic oligonucleotide
ccgggctcggtacggtcaacaaagtcgttgtcagtatgtcatcgagcgatagcgg

SEQ ID NO: 508509 - DNA, 55 bp, Artificial
  Synthetic oligonucleotide
cgaccgatcccgcttatgcgccccatgcgacctactacaaggcctatatagatta

SEQ ID NO: 508510 - DNA, 55 bp, Artificial
  Synthetic oligonucleotide
cgacctcggccccgcagattcgcgcgtttccagcaactccgacaaactcgtactc

SEQ ID NO: 508511 - DNA, 55 bp, Artificial
  Synthetic oligonucleotide
cgcaggatcaactttcaccccgtcacagacaaacacgatgtcgcgccgttcatca

SEQ ID NO: 508512 - DNA, 55 bp, Artificial
  Synthetic oligonucleotide
cgcccgcgcaaacaaaacgcggacggaattcagtgatcgtacccgaggccctgga

SEQ ID NO: 508513 - DNA, 55 bp, Artificial
  Synthetic oligonucleotide
cgccgtggcgggcgtgtaggtaaatgcgctggtaacagcacggtcggagtaaacc

SEQ ID NO: 508514 - DNA, 55 bp, Artificial
  Synthetic oligonucleotide
cgctcttcctctaaagcgtcgaacagagctccgaaaacgggttggaggtattgca

SEQ ID NO: 508515 - DNA, 55 bp, Artificial
  Synthetic oligonucleotide
cggagccgcattcggcagagcgtcatttcacggaggaccccggcgaaacgcttcc

SEQ ID NO: 508516 - DNA, 55 bp, Artificial
  Synthetic oligonucleotide
cggcaaagataaatggaaattacctatcctgccggttgccccgggaaagataatc

SEQ ID NO: 508517 - DNA, 55 bp, Artificial
  Synthetic oligonucleotide
ctctgggctatttccccggatccggcgtccgtatcttatattccgacggatacgc

SEQ ID NO: 508518 - DNA, 55 bp, Artificial
  Synthetic oligonucleotide
cggttccgatgtccgctccagaccgctccagtccgtaccgagggtttgttttggc

SEQ ID NO: 508519 - DNA, 55 bp, Artificial
  Synthetic oligonucleotide
ctcgaatcggccttggcctgaaacgccttggccggatggtcgcccatctcgatca

SEQ ID NO: 508520 - DNA, 55 bp, Artificial
  Synthetic oligonucleotide
cgtgcggcatcccatcataatgctatccggccgcgccaaaacccctaaaatccgg

SEQ ID NO: 508521 - DNA, 55 bp, Artificial
  Synthetic oligonucleotide
ctaatgcgcgaatccgaaaagaaactgaaaccgcacatgttccgcgaaagccaaa

SEQ ID NO: 508522 - DNA, 54 bp, Artificial
  Synthetic oligonucleotide
aagttcttgcggtccttttcgacgaagtgcagggccagtatgccgttgcggcct

SEQ ID NO: 508523 - DNA, 54 bp, Artificial
  Synthetic oligonucleotide
cctcggaatacaccgagcggtaattgcctgccgtggcatttcgcattgcaccct

SEQ ID NO: 508524 - DNA, 54 bp, Artificial
  Synthetic oligonucleotide
cgggtaatgcgagcgtttataaatatgtccggggcatctcctcgaaccagggga

SEQ ID NO: 508525 - DNA, 54 bp, Artificial
  Synthetic oligonucleotide
tcctattaccgtcacgacatgaaggggccttcgctctcggcacaggtcggacaa

SEQ ID NO: 508526 - DNA, 53 bp, Artificial
  Synthetic oligonucleotide
tatgcgatgttgaaccgttcacataaatatcgatcgcttctgaatcgtacgat

SEQ ID NO: 508527 - DNA, 53 bp, Artificial
  Synthetic oligonucleotide
ggcggtggcaggcgaagtgggacgtgcggcaggactggaaacgcatcctggga

SEQ ID NO: 508528 - DNA, 53 bp, Artificial
  Synthetic oligonucleotide
cgaccagtggaaagacttcaacggagactcgctcacgatgccctggcacgtgg

SEQ ID NO: 508529 - DNA, 53 bp, Artificial
  Synthetic oligonucleotide
cgatctggaaaccgtaacctcgtctggaattaccttattatgcttggaatccc

SEQ ID NO: 508530 - DNA, 52 bp, Artificial
  Synthetic oligonucleotide
aaggcgcggagccgtgtactggtagcccagctcccagtcgtagagcttctcc

SEQ ID NO: 508531 - DNA, 52 bp, Artificial
  Synthetic oligonucleotide
ctgacccattcgacacattcgtcccaggggttgcggtcgacgtcgcgcagag

SEQ ID NO: 508532 - DNA, 52 bp, Artificial
  Synthetic oligonucleotide
attcatcggccatgtgtgcgtaaggattgtcagaattgatcagcaatctgcc

SEQ ID NO: 508533 - DNA, 51 bp, Artificial
  Synthetic oligonucleotide
aagtagctttcaaattccaaggcaacttcgacgattaccgtggtccgatcg

SEQ ID NO: 508534 - DNA, 51 bp, Artificial
  Synthetic oligonucleotide
tgttccggcactaaatcgaggttgttgatctgagccggcgaggtgtagtag

SEQ ID NO: 508535 - DNA, 51 bp, Artificial
  Synthetic oligonucleotide
gaccgggaaatcctcgctgtgcagttacctgtacggcttccgaaacgatta

SEQ ID NO: 508536 - DNA, 50 bp, Artificial
  Synthetic oligonucleotide
aatccagcatcccgaacgctctgcacacaaaacatttcggaggttttatt

SEQ ID NO: 508537 - DNA, 50 bp, Artificial
  Synthetic oligonucleotide
tgtaagtggcgttgagcgacggaagcaggttcgtatagtcgtaagtgcgc

SEQ ID NO: 508538 - DNA, 55 bp, Artificial
  Synthetic oligonucleotide
ggacgtaaactgggatctgacgcccaacaagctgtataccctgacggatgccacc

SEQ ID NO: 508539 - DNA, 55 bp, Artificial
  Synthetic oligonucleotide
ggaaggatcttatggtattcttacgggaatagaggcactggatgcgaggaacttt

SEQ ID NO: 508540 - DNA, 55 bp, Artificial
  Synthetic oligonucleotide
gctgaagataccgctgagaacggcgagaaatcgtctgagtcagcagctcatacaa

SEQ ID NO: 508541 - DNA, 55 bp, Artificial
  Synthetic oligonucleotide
gcggcatagataccatgtttcttagtgaacacgagcggtacgcgaagtgcgagct

SEQ ID NO: 508542 - DNA, 55 bp, Artificial
  Synthetic oligonucleotide
gccttacatgggaaactctaacaagtaatgctgcaggaataggacaaacggcaac

SEQ ID NO: 508543 - DNA, 55 bp, Artificial
  Synthetic oligonucleotide
gcccctgcaaaagataattgaccctacacaggtgattgttaccgcaaatgggcaa

SEQ ID NO: 508544 - DNA, 55 bp, Artificial
  Synthetic oligonucleotide
gccccgcatgaacttttcagaacgggcaacgtaggattcgctgacattgttccgc

SEQ ID NO: 508545 - DNA, 55 bp, Artificial
  Synthetic oligonucleotide
gcccacaaagacggcggatgtttctcttgcaagcgcctatgcggctgtcaacggt

SEQ ID NO: 508546 - DNA, 55 bp, Artificial
  Synthetic oligonucleotide
gccacaaacgggccgaaaattggtgttcaaccagtgaaaagtagccggaagccgc

SEQ ID NO: 508547 - DNA, 55 bp, Artificial
  Synthetic oligonucleotide
gcaatacaggtagctgagatacgaaacattgatgctgtggcgcaggcacgaggtc

SEQ ID NO: 508548 - DNA, 55 bp, Artificial
  Synthetic oligonucleotide
gagtgatacgcgccctggaattttataaacagaacggtaccaggatctccgaaca

SEQ ID NO: 508549 - DNA, 55 bp, Artificial
  Synthetic oligonucleotide
gacgtactgttgctatggcgggagttccttttggcactcagcttctgatcaacgg

SEQ ID NO: 508550 - DNA, 55 bp, Artificial
  Synthetic oligonucleotide
gaccgggcacaggcatgaaaacatagttcaactccagcgtattgtgcacatagta

SEQ ID NO: 508551 - DNA, 55 bp, Artificial
  Synthetic oligonucleotide
gaccctctggatacgttcatcggtaattttattcagagccgccacgatcgctgca

SEQ ID NO: 508552 - DNA, 55 bp, Artificial
  Synthetic oligonucleotide
gacacagcccttgctgtccgtcacaccctctgctatggaaggcaccttatccgcg

SEQ ID NO: 508553 - DNA, 55 bp, Artificial
  Synthetic oligonucleotide
gaagctataaaggtattggctctttcagcaagaagcgttgaggccttgagaacgc

SEQ ID NO: 508554 - DNA, 55 bp, Artificial
  Synthetic oligonucleotide
gaaaccgttaggattgcagtcgtgtaataacgcccggagtattggttttatttac

SEQ ID NO: 508555 - DNA, 55 bp, Artificial
  Synthetic oligonucleotide
ctgcagtccagattgatatctccgtctactgccaggctgtttgtgcccagtacag

SEQ ID NO: 508556 - DNA, 55 bp, Artificial
  Synthetic oligonucleotide
ctcatggcgttttcagaggggatgaccacacagccgtcaagctgtatggggcttg

SEQ ID NO: 508557 - DNA, 55 bp, Artificial
  Synthetic oligonucleotide
ctactgcttcaagggtcatctttactgcctcggaagtcagaggagtaccgtcaga

SEQ ID NO: 508558 - DNA, 55 bp, Artificial
  Synthetic oligonucleotide
cgttttgtgatcgtagatacacctccccttggaagtgtgtcagacggagcactga

SEQ ID NO: 508559 - DNA, 55 bp, Artificial
  Synthetic oligonucleotide
cgtgaacaatgccgactgctatgtcaggaaattcccgcaacatcaaatctgcggc

SEQ ID NO: 508560 - DNA, 55 bp, Artificial
  Synthetic oligonucleotide
cgtactccacaatccaaaccactgctcgtcggggaggccagttgagcgtagagac

SEQ ID NO: 508561 - DNA, 55 bp, Artificial
  Synthetic oligonucleotide
cggttaacataccgggaatgctatcagttgcggaaatgggagattggggccggac

SEQ ID NO: 508562 - DNA, 55 bp, Artificial
  Synthetic oligonucleotide
cgggaaatccgtagaacagctggtgcaggatggtatccggagcaaaattgcggcc

SEQ ID NO: 508563 - DNA, 55 bp, Artificial
  Synthetic oligonucleotide
cggcaaagtgggcggcacattcacggcacgggagatggtgaatcccgtaatgctg

SEQ ID NO: 508564 - DNA, 55 bp, Artificial
  Synthetic oligonucleotide
cgctgcgcacaagttcgataccacagaagtcccagctgacccggcgaagataacg

SEQ ID NO: 508565 - DNA, 55 bp, Artificial
  Synthetic oligonucleotide
ttttgaacgaacttcattggctcgaacccggttcaacactcctcgcaatgtgggg

SEQ ID NO: 508566 - DNA, 55 bp, Artificial
  Synthetic oligonucleotide
ttgcggtgggcgtcgtctatatgatacccacagtgcttatgttcctgtacggaga

SEQ ID NO: 508567 - DNA, 55 bp, Artificial
  Synthetic oligonucleotide
ttctggctgagaagcagtaaggaggttaaacgatggaagaacgtaatctgagaaa

SEQ ID NO: 508568 - DNA, 55 bp, Artificial
  Synthetic oligonucleotide
tgtccgcaaatcccacatagtcgttgaggtcaaagtcctttccaaccttgtgagc

SEQ ID NO: 508569 - DNA, 55 bp, Artificial
  Synthetic oligonucleotide
tgacggaggaagcagcaacaaaagtgctgtgggacagtatcagatcctgccttat

SEQ ID NO: 508570 - DNA, 55 bp, Artificial
  Synthetic oligonucleotide
tgaagttgttgatactcctctttcttgtgggcccagcatgggagctctatcgtcg

SEQ ID NO: 508571 - DNA, 55 bp, Artificial
  Synthetic oligonucleotide
tcgtcttctcgataatgcctatcacgaattcgggccccttgtgatctatctcata

SEQ ID NO: 508572 - DNA, 55 bp, Artificial
  Synthetic oligonucleotide
tcctgccctttgtatccaaatagtccattcgttactcctttagaagccctgctca

SEQ ID NO: 508573 - DNA, 55 bp, Artificial
  Synthetic oligonucleotide
tccgataggcacgcagcggatatccaccgaaatcataattgacgtatggctgaag

SEQ ID NO: 508574 - DNA, 55 bp, Artificial
  Synthetic oligonucleotide
tcaaccgtattgtttgatcacgaaaccgaggttcttcacgacagggttgaattgt

SEQ ID NO: 508575 - DNA, 55 bp, Artificial
  Synthetic oligonucleotide
tatagtatactgggagggatacagatatcaggcaaatccgcacaagcttcgtgcg

SEQ ID NO: 508576 - DNA, 55 bp, Artificial
  Synthetic oligonucleotide
tagaagcgatgaacgacacccagaatgcaccgtccctttcccaagcgcagcggct

SEQ ID NO: 508577 - DNA, 55 bp, Artificial
  Synthetic oligonucleotide
tacggagcatgcatccacagaatctacgggctttgattccgggctccgcccaggt

SEQ ID NO: 508578 - DNA, 55 bp, Artificial
  Synthetic oligonucleotide
taacggggctttgcggtgctaattgctatcacagctattcgccgttcatcaaggg

SEQ ID NO: 508579 - DNA, 55 bp, Artificial
  Synthetic oligonucleotide
gttttctgtcccctatgagaacagggagccgccccacaggagccagaggaacccc

SEQ ID NO: 508580 - DNA, 55 bp, Artificial
  Synthetic oligonucleotide
gtgatattgctgtaggggtcatattgccacatccctgaaagtaacccctataggc

SEQ ID NO: 508581 - DNA, 55 bp, Artificial
  Synthetic oligonucleotide
gtctgatttcctgaacaggagagctcctgcaacagttgaaaccacggttatagcc

SEQ ID NO: 508582 - DNA, 55 bp, Artificial
  Synthetic oligonucleotide
gtaacataaccgtcaaaccagttgctacacttacgctcgggcatagtatgctttt

SEQ ID NO: 508583 - DNA, 55 bp, Artificial
  Synthetic oligonucleotide
ggggagtccccataccatagggtagttgtcgcagtcagaggatatgtctatacgg

SEQ ID NO: 508584 - DNA, 55 bp, Artificial
  Synthetic oligonucleotide
gggagtcctgccgtcctatatctacaattccataggtcattcggtatactcagat

SEQ ID NO: 508585 - DNA, 55 bp, Artificial
  Synthetic oligonucleotide
ggctgccactaagtccagatgcccgattgttccggtagccctcatagattcctat

SEQ ID NO: 508586 - DNA, 55 bp, Artificial
  Synthetic oligonucleotide
ggcgtcctttccgaatgtgtttatatcggaaggcatgatatcaatgtcgtatccg

SEQ ID NO: 508587 - DNA, 55 bp, Artificial
  Synthetic oligonucleotide
ggcatctgtgagctcgcttatgagcttatcgcagtctacatcgtatacaaggcgg

SEQ ID NO: 508588 - DNA, 55 bp, Artificial
  Synthetic oligonucleotide
ggcaacagttctgttcagaatataacacggcggagaacgtactctccctcggagg

SEQ ID NO: 508589 - DNA, 55 bp, Artificial
  Synthetic oligonucleotide
ggattcagtcgcacaagctcgtcaattttcacccctgttttgtatgcaacatccc

SEQ ID NO: 508590 - DNA, 55 bp, Artificial
  Synthetic oligonucleotide
ggaggtcttggcggtctgggcagttcggacggtcattctgttctcaaggtcctgg

SEQ ID NO: 508591 - DNA, 55 bp, Artificial
  Synthetic oligonucleotide
ggagctataaacggtttgtggactgccggaaactttgatcttaatactgttatcc

SEQ ID NO: 508592 - DNA, 55 bp, Artificial
  Synthetic oligonucleotide
ccacagccattctgtaagcgttggtgactacggtcacatagtaagctgattttgc

SEQ ID NO: 508593 - DNA, 55 bp, Artificial
  Synthetic oligonucleotide
ccacagatacgcaggaataagaagccgctttgttcgtttccatatgtattttccg

SEQ ID NO: 508594 - DNA, 55 bp, Artificial
  Synthetic oligonucleotide
ccaaactctttgtaagggcgagtcccttttacggaaactggagagagcgcctcgg

SEQ ID NO: 508595 - DNA, 55 bp, Artificial
  Synthetic oligonucleotide
catgttctctttaacagcgcatccgaggcggctgtatgggaagttcatgtgcgag

SEQ ID NO: 508596 - DNA, 55 bp, Artificial
  Synthetic oligonucleotide
catcgggaggttgaccagtacgaggacgataatgtgggcacgcaggctttaagcg

SEQ ID NO: 508597 - DNA, 55 bp, Artificial
  Synthetic oligonucleotide
catcctgtccgcaaccggcatggattccggagctgtattcacagctaccgcactg

SEQ ID NO: 508598 - DNA, 55 bp, Artificial
  Synthetic oligonucleotide
cagttccggcacagagggctgactctggtcagcggttgtcactatgaggtatcct

SEQ ID NO: 508599 - DNA, 55 bp, Artificial
  Synthetic oligonucleotide
cagttccacatggaatgtcaaatacgttagtggcaaactgagcgaaacgttcagg

SEQ ID NO: 508600 - DNA, 55 bp, Artificial
  Synthetic oligonucleotide
cagcatccagtatctcggatataccaccgaaaaggctatagagttactggtacag

SEQ ID NO: 508601 - DNA, 55 bp, Artificial
  Synthetic oligonucleotide
cacgggtatccacagtaatagacacattgccgcatacttcccttacgcaggcgat

SEQ ID NO: 508602 - DNA, 55 bp, Artificial
  Synthetic oligonucleotide
aaccttaactattgtttcgtcggcagcctttacataggcaatcttaacacctgcg

SEQ ID NO: 508603 - DNA, 55 bp, Artificial
  Synthetic oligonucleotide
cacagaacaacacagtagttaaacttgcagaaactgcgttattagcagctttatg

SEQ ID NO: 508604 - DNA, 55 bp, Artificial
  Synthetic oligonucleotide
cacaaagagcacctttgcggtctgtccccagggtctgccaagatagcctgccgat

SEQ ID NO: 508605 - DNA, 55 bp, Artificial
  Synthetic oligonucleotide
atggatttgcagatataacgccccacagtgcctttatcccttttgtaagggccgg

SEQ ID NO: 508606 - DNA, 55 bp, Artificial
  Synthetic oligonucleotide
atatgggtacggatcatatccacgagggtcgttttacccgttgcgctatccccgc

SEQ ID NO: 508607 - DNA, 55 bp, Artificial
  Synthetic oligonucleotide
aggcgatcacgttactctcgaaagggtacgggatgcgtacatactgctcccggct

SEQ ID NO: 508608 - DNA, 55 bp, Artificial
  Synthetic oligonucleotide
agcctgcgtgcccacattatcgtcctcgtactggtcaacctcccgatgcaccgca

SEQ ID NO: 508609 - DNA, 55 bp, Artificial
  Synthetic oligonucleotide
acggcatttatagcttctgttcttggcggatctatcatccctatgagtcctacaa

SEQ ID NO: 508610 - DNA, 55 bp, Artificial
  Synthetic oligonucleotide
acagcgttgcaacaggcagagagaatactgctgttacaggcttctcaatgggcgg

SEQ ID NO: 508611 - DNA, 55 bp, Artificial
  Synthetic oligonucleotide
acaggcaagatgatggagcctgccggtgaccttacctatgagatggcctacgaag

SEQ ID NO: 508612 - DNA, 55 bp, Artificial
  Synthetic oligonucleotide
accgaatttgccttgacccgttcaagctgtttggtatagaaatcctgcaaatcgg

SEQ ID NO: 508613 - DNA, 55 bp, Artificial
  Synthetic oligonucleotide
accacttatcagattccggcaggtacttacccgggacaggatgaaccggtagaga

SEQ ID NO: 508614 - DNA, 55 bp, Artificial
  Synthetic oligonucleotide
cgaggagagacagactactttccgcgatatgatggagatcgcacttgaggctgcg

SEQ ID NO: 508615 - DNA, 55 bp, Artificial
  Synthetic oligonucleotide
cgagaataacctgcttgggaggatctgcgccctttatgacagttccctcgggagc

SEQ ID NO: 508616 - DNA, 55 bp, Artificial
  Synthetic oligonucleotide
cgcaagaatcgactttgcgatcgggtggttggaataactctctgcctgtgcagca

SEQ ID NO: 508617 - DNA, 55 bp, Artificial
  Synthetic oligonucleotide
cgaagcggcattgatggtctacttcagcgtggtgtacatcctgtggggtgtcacc

SEQ ID NO: 508618 - DNA, 55 bp, Artificial
  Synthetic oligonucleotide
cgaaacactgaccaattaacgtttcaagggttctatcactggagccctcacccgg

SEQ ID NO: 508619 - DNA, 55 bp, Artificial
  Synthetic oligonucleotide
cctcttgtgtagcattccatgtaaacgctctgaagcgaggccacattcctctaag

SEQ ID NO: 508620 - DNA, 55 bp, Artificial
  Synthetic oligonucleotide
cgccagtttggaaaggatcggcgccttgatcccgccccggtaacggatcacggta

SEQ ID NO: 508621 - DNA, 55 bp, Artificial
  Synthetic oligonucleotide
cctctggtaacattgctgggactttcccttggaagtcttctgggaggtactgcag

SEQ ID NO: 508622 - DNA, 55 bp, Artificial
  Synthetic oligonucleotide
ccgtcggggtggagagcatcctttccgatatctgctcaatgctatgtagatcgcc

SEQ ID NO: 508623 - DNA, 55 bp, Artificial
  Synthetic oligonucleotide
ccgtactcgtcggcaagaggcttcagctttgtgtaaaagtcatattccctgtcgg

SEQ ID NO: 508624 - DNA, 55 bp, Artificial
  Synthetic oligonucleotide
ccggttatcattaagtaccccttctggcggatggcatacgagaactcacaatcgg

SEQ ID NO: 508625 - DNA, 55 bp, Artificial
  Synthetic oligonucleotide
ccgctgggcactgactgcacccagcagcttcatctccgaagcatatacatactgc

SEQ ID NO: 508626 - DNA, 55 bp, Artificial
  Synthetic oligonucleotide
ccgctaacttccaaattgcatacactctcatcaagctgggttaatgtaccagtcg

SEQ ID NO: 508627 - DNA, 55 bp, Artificial
  Synthetic oligonucleotide
cccctgcacaacaggagcgccatatcctgggcaacattccacaagccttatgggg

SEQ ID NO: 508628 - DNA, 55 bp, Artificial
  Synthetic oligonucleotide
ccaggcggactgctttgggagctaccgcgatcacccttgcttctacgatcctgcc

SEQ ID NO: 508629 - DNA, 55 bp, Artificial
  Synthetic oligonucleotide
ccagatctgagcctcagctgactggagacctgcggggaacttgcttacggggatc

SEQ ID NO: 508630 - DNA, 55 bp, Artificial
  Synthetic oligonucleotide
ccacaggcgatatgagcagggattccaaaggggcgcagcacccttggcacacgac

SEQ ID NO: 508631 - DNA, 55 bp, Artificial
  Synthetic oligonucleotide
aaagacactccataatttctcatcctcggaacccaaacgccataaggaaaattgg

SEQ ID NO: 508632 - DNA, 54 bp, Artificial
  Synthetic oligonucleotide
aagcatggcgctcaccggacatgattttcatgagtacaatgccagcctgcgcag

SEQ ID NO: 508633 - DNA, 54 bp, Artificial
  Synthetic oligonucleotide
accgtctgcctttaccgatttggttcaggtcggcaaaagggttctcgttccgtt

SEQ ID NO: 508634 - DNA, 54 bp, Artificial
  Synthetic oligonucleotide
agctggtcaggcaattcaatctgaatcggaatattgcttattgttacggttgta

SEQ ID NO: 508635 - DNA, 54 bp, Artificial
  Synthetic oligonucleotide
aaggaagcgtttatgagcagtttatgcagcattcaggcgcagtcgcctttatcc

SEQ ID NO: 508636 - DNA, 54 bp, Artificial
  Synthetic oligonucleotide
taataccgaactttacatccttaccgcagaattcacattttgccatgcgtctgc

SEQ ID NO: 508637 - DNA, 53 bp, Artificial
  Synthetic oligonucleotide
ttgtgccggcgttgatttatcttcccaggtcgtcaccaaccaagtattttcaa

SEQ ID NO: 508638 - DNA, 53 bp, Artificial
  Synthetic oligonucleotide
aatgtatttgtctattgcgcggacatggacggacgccccgctttccagcaaaa

SEQ ID NO: 508639 - DNA, 53 bp, Artificial
  Synthetic oligonucleotide
cgaccgatatccaaaatgattctgtccctacactcaaagcgccttcgcatacg

SEQ ID NO: 508640 - DNA, 53 bp, Artificial
  Synthetic oligonucleotide
ggctgttggcaaggaatcggaaaagagtataacccttggttgaaaatacaaga

SEQ ID NO: 508641 - DNA, 53 bp, Artificial
  Synthetic oligonucleotide
gccagcttagtatcctacgcttggtagacttcgcgtaaaggtattctttagca

SEQ ID NO: 508642 - DNA, 52 bp, Artificial
  Synthetic oligonucleotide
tgcgcatctggtacgacggcgttttgacggacaccaacgcccgaaatgtaaa

SEQ ID NO: 508643 - DNA, 52 bp, Artificial
  Synthetic oligonucleotide
ttctacgcactggttcgaccatacagcatggtaaatcgtctcaccttgtgca

SEQ ID NO: 508644 - DNA, 52 bp, Artificial
  Synthetic oligonucleotide
ttggaatagcgtcttagcttgacgacctctacatcgatacacttggcgtcta

SEQ ID NO: 508645 - DNA, 52 bp, Artificial
  Synthetic oligonucleotide
tagtgccggatatgtgacggagatccgggctgatgatatagtactggaggga

SEQ ID NO: 508646 - DNA, 52 bp, Artificial
  Synthetic oligonucleotide
acggggatttcagatgatgaggagcttcccttttgaacttgccagtggataa

SEQ ID NO: 508647 - DNA, 52 bp, Artificial
  Synthetic oligonucleotide
acggtacaccgcttacgctcggccttgtaggcaacaagctcaaggagcatag

SEQ ID NO: 508648 - DNA, 52 bp, Artificial
  Synthetic oligonucleotide
caccgggaacgataccaatggttcgattgttatcccactcagggaatatcgt

SEQ ID NO: 508649 - DNA, 52 bp, Artificial
  Synthetic oligonucleotide
ctcggaagcgcaggcggacagataaagaccattatagggagagggtacaggc

SEQ ID NO: 508650 - DNA, 51 bp, Artificial
  Synthetic oligonucleotide
tcataggacggagagcttcttcaatgcggtacactttcacagtgctatttt

SEQ ID NO: 508651 - DNA, 51 bp, Artificial
  Synthetic oligonucleotide
tatacatacttcctcccattgatctgctcacccgccccgagatacgctcca

SEQ ID NO: 508652 - DNA, 51 bp, Artificial
  Synthetic oligonucleotide
agcatgtgaagcgtttagtcactgtaccgctttgcggcaggttgtgctgcc

SEQ ID NO: 508653 - DNA, 51 bp, Artificial
  Synthetic oligonucleotide
atttccacgtagagtcttaccggacgaagcgggtctcttctgcagtaatcc

SEQ ID NO: 508654 - DNA, 51 bp, Artificial
  Synthetic oligonucleotide
cgctcaggtttgctgcagagagttttaatgccgaggtaaactgggataaag

SEQ ID NO: 508655 - DNA, 50 bp, Artificial
  Synthetic oligonucleotide
accaaaattgcaaccgtagcagctaacgtaacccaatatacagatggcac

SEQ ID NO: 508656 - DNA, 50 bp, Artificial
  Synthetic oligonucleotide
cacgccttgttgcgggcgggcttgggatatacgacgataaagttttccct

SEQ ID NO: 508657 - DNA, 50 bp, Artificial
  Synthetic oligonucleotide
cgcagtttatttccttgagctgtacaacacagggctcgatgaggatacgg

SEQ ID NO: 508658 - DNA, 55 bp, Artificial
  Synthetic oligonucleotide
agaacgtatctaggatttcaccgctgcaactaggatctcggctagtggtaatgcg

SEQ ID NO: 508659 - DNA, 55 bp, Artificial
  Synthetic oligonucleotide
atcgccaccagaagtgcgctgagcccgaggaagccccaaccgagcggtggctgta

SEQ ID NO: 508660 - DNA, 55 bp, Artificial
  Synthetic oligonucleotide
atggaaccgccctatgcgccagagccacgcgataacgagcggaagttcgaccgga

SEQ ID NO: 508661 - DNA, 55 bp, Artificial
  Synthetic oligonucleotide
catcggttcccgaaccgtccttgaaatttccctcgcccggaagcgcaagtagccc

SEQ ID NO: 508662 - DNA, 55 bp, Artificial
  Synthetic oligonucleotide
ccggttggttccccgtaccgggcaaggtcaccagtgtgtgagttgggaaagaccg

SEQ ID NO: 508663 - DNA, 55 bp, Artificial
  Synthetic oligonucleotide
cctcgctactcactccggtcgagtcgacttgaaccaagcccgacaatccctcccg

SEQ ID NO: 508664 - DNA, 55 bp, Artificial
  Synthetic oligonucleotide
cgtcagagagatagcgccccttatctggggcaacaatatggttcggcccctcctc

SEQ ID NO: 508665 - DNA, 55 bp, Artificial
  Synthetic oligonucleotide
ctatagatggcgaggaggatcggcccgagcagtctcattaacttaactaggttga

SEQ ID NO: 508666 - DNA, 55 bp, Artificial
  Synthetic oligonucleotide
ctcccggtcgtaaccgcgcgaccttggttataggctgggcaaaacggtaggggca

SEQ ID NO: 508667 - DNA, 55 bp, Artificial
  Synthetic oligonucleotide
gcagccatgtcaggagtgtaatgcccaacagggtgggtgagatatagactcacct

SEQ ID NO: 508668 - DNA, 55 bp, Artificial
  Synthetic oligonucleotide
ggtctacttggagacaataagcacccttcaggaatattcagatgagcgtggcaac

SEQ ID NO: 508669 - DNA, 54 bp, Artificial
  Synthetic oligonucleotide
agattgcgcagagtcaatgtggccagcggagatacttgaggacggtggcattct

SEQ ID NO: 508670 - DNA, 54 bp, Artificial
  Synthetic oligonucleotide
cggacgtccgtgtcttgaacgcgattctcgggcgactcaatagagttcggtccg

SEQ ID NO: 508671 - DNA, 53 bp, Artificial
  Synthetic oligonucleotide
ttttctgcaccctcgcgcgcctcttgtggagtggtagcaacaacgccgcctag

SEQ ID NO: 508672 - DNA, 53 bp, Artificial
  Synthetic oligonucleotide
ttcggtggggcgcccaggattcaacgccacggaagtgcgggagtacacatgaa

SEQ ID NO: 508673 - DNA, 53 bp, Artificial
  Synthetic oligonucleotide
aaacgctacctcttgcacagctatccctctttctgtggaccgaaccgggttcg

SEQ ID NO: 508674 - DNA, 51 bp, Artificial
  Synthetic oligonucleotide
gccaagcggttgctcttccgcaagggacagtctgagacccacgttcatggc

SEQ ID NO: 508675 - DNA, 55 bp, Artificial
  Synthetic oligonucleotide
gagttgggaggctttagaatggggccttttacccttatggattatatcgggaatg

SEQ ID NO: 508676 - DNA, 55 bp, Artificial
  Synthetic oligonucleotide
gcagcaggtcgaaatagggcggtaatttgacgcccaaaggcttgttgttttgggc

SEQ ID NO: 508677 - DNA, 55 bp, Artificial
  Synthetic oligonucleotide
gcaggggcctttctagtaaatttccgttatgggaaaacgggcggccctttaagag

SEQ ID NO: 508678 - DNA, 55 bp, Artificial
  Synthetic oligonucleotide
gcccgccacatggatttctctcggcagcattattcttcttttagcctgttcggcc

SEQ ID NO: 508679 - DNA, 55 bp, Artificial
  Synthetic oligonucleotide
gcgcatccgcagtatttagggtcgccactagctcactagcgggttcactcactat

SEQ ID NO: 508680 - DNA, 55 bp, Artificial
  Synthetic oligonucleotide
gcgggacaatatgacttcatcctcaagattgtggtccgcgatatgcaagattatc

SEQ ID NO: 508681 - DNA, 55 bp, Artificial
  Synthetic oligonucleotide
ggcaggcggttactccctttggtcgtcgaactgcggcctaaaggccttgttgtcg

SEQ ID NO: 508682 - DNA, 55 bp, Artificial
  Synthetic oligonucleotide
ggccaataaaattgagggccaattgcctcaagaactgcccgaatcggtcgcccaa

SEQ ID NO: 508683 - DNA, 55 bp, Artificial
  Synthetic oligonucleotide
ggccaccaaaagcgtctacgagaatattcgggaggcggtctcttccctgcagcgc

SEQ ID NO: 508684 - DNA, 55 bp, Artificial
  Synthetic oligonucleotide
ggccaccccatattcttgtagcattaggaccaaaggaatattgagcgagcgctca

SEQ ID NO: 508685 - DNA, 55 bp, Artificial
  Synthetic oligonucleotide
ggcctctcttgcctgatgcctggcaactgggataaaggtagtttgctctctaccc

SEQ ID NO: 508686 - DNA, 55 bp, Artificial
  Synthetic oligonucleotide
ggcggacagaagccagcatttgcttggccccttcatcttgggtacctttaatccc

SEQ ID NO: 508687 - DNA, 55 bp, Artificial
  Synthetic oligonucleotide
ggctccaccatattttcgctttcggtcgcttgaaatatagcgcccctttagcttg

SEQ ID NO: 508688 - DNA, 55 bp, Artificial
  Synthetic oligonucleotide
gtcagcgagttacaaaggctaacaacgacggatttggggtgttcgaacgacggat

SEQ ID NO: 508689 - DNA, 55 bp, Artificial
  Synthetic oligonucleotide
gtccgcgatatgcaagattatcacgacttcacttttaatcgcttagcggccatgg

SEQ ID NO: 508690 - DNA, 55 bp, Artificial
  Synthetic oligonucleotide
gtggccctctagaaggacctcattaaagtggtggatatgagcttgggcgcctgcc

SEQ ID NO: 508691 - DNA, 55 bp, Artificial
  Synthetic oligonucleotide
tacttgtagattcccattaagcttcagcccaaagctacccagccgctaaaagccg

SEQ ID NO: 508692 - DNA, 55 bp, Artificial
  Synthetic oligonucleotide
tcggataagtctttgccgccaaatttgggtagtcctttgctcaaaatggatgctc

SEQ ID NO: 508693 - DNA, 55 bp, Artificial
  Synthetic oligonucleotide
tgagggctaaacccctcatgaactcgcctctagatgcaaaattggtccatggcgg

SEQ ID NO: 508694 - DNA, 55 bp, Artificial
  Synthetic oligonucleotide
ttctccgagaggccagcaaagctataatcgccgctaacagactccatatagaggt

SEQ ID NO: 508695 - DNA, 55 bp, Artificial
  Synthetic oligonucleotide
ttttcggagctagcccaagatggaggcagctatttgctactcaatgctagctttt

SEQ ID NO: 508696 - DNA, 55 bp, Artificial
  Synthetic oligonucleotide
aaaagccgttaatctcaatcaccgattttaatttattcgcccgattgcgcacccc

SEQ ID NO: 508697 - DNA, 55 bp, Artificial
  Synthetic oligonucleotide
aaaatcaaatgatcaactccgccaagagtttgtcgatgcaacggtccgccaagcc

SEQ ID NO: 508698 - DNA, 55 bp, Artificial
  Synthetic oligonucleotide
aagccctgttgtattcggggcaaaccgaaaacatggaattggcccttttactggc

SEQ ID NO: 508699 - DNA, 55 bp, Artificial
  Synthetic oligonucleotide
aggactatagtctaacacttaatagcttggccaacttagccaaaacagaagggcg

SEQ ID NO: 508700 - DNA, 55 bp, Artificial
  Synthetic oligonucleotide
caaacggccctcgcagagcctcaaagcctatacgccctttcataattatccgcat

SEQ ID NO: 508701 - DNA, 55 bp, Artificial
  Synthetic oligonucleotide
caccaaaggatagcccctacctcatcggcaatctctctaaagcgctcatactccc

SEQ ID NO: 508702 - DNA, 55 bp, Artificial
  Synthetic oligonucleotide
cacgacttcacttttaatcgcttagcggccatggataatattgggcatgtgcaga

SEQ ID NO: 508703 - DNA, 55 bp, Artificial
  Synthetic oligonucleotide
ccagaggcgctccgtttggtaattggcgggagtatggccaccaaccacctcttgc

SEQ ID NO: 508704 - DNA, 55 bp, Artificial
  Synthetic oligonucleotide
cctagggtagccccactctggatgtgacaggtgaaactcatcaattttacgcatc

SEQ ID NO: 508705 - DNA, 55 bp, Artificial
  Synthetic oligonucleotide
cctatgccattatagggactcattccagggtacttcgattgtaaaggatccacag

SEQ ID NO: 508706 - DNA, 55 bp, Artificial
  Synthetic oligonucleotide
cgacgccaagttaagcatcaaagaaatctcggccgatttgggcctgagcagcacg

SEQ ID NO: 508707 - DNA, 55 bp, Artificial
  Synthetic oligonucleotide
cgcccgcaagtcgattaaagaaattcgctaccaccttcgctttagcgccgaatgg

SEQ ID NO: 508708 - DNA, 55 bp, Artificial
  Synthetic oligonucleotide
cgcctccctttggtcgtcggcggttactccctttggtcgtcgaactgcggcctaa

SEQ ID NO: 508709 - DNA, 55 bp, Artificial
  Synthetic oligonucleotide
cggcaatttcgcctcccgtgatgctcactcccgtaaatgcacaggcctccgacaa

SEQ ID NO: 508710 - DNA, 55 bp, Artificial
  Synthetic oligonucleotide
ctcggtaagagggttcggggcggcgcatatacttccagtaattctctctggggtc

SEQ ID NO: 508711 - DNA, 55 bp, Artificial
  Synthetic oligonucleotide
ctctctaacggaaaatggcccgcaagcatgattctccgcgtgcctatcggcgctt

SEQ ID NO: 508712 - DNA, 55 bp, Artificial
  Synthetic oligonucleotide
cttatcaggagggcctaaaggattggcccaacagcctagagggaacgcctatatt

SEQ ID NO: 508713 - DNA, 55 bp, Artificial
  Synthetic oligonucleotide
gaaatgaactcctaagtcggaatgtccacgatccaaatacttttgtatggcccgc

SEQ ID NO: 508714 - DNA, 55 bp, Artificial
  Synthetic oligonucleotide
gagatcgctttattagcgtatatggacgcaagcctgttttagagctgctcgagca

SEQ ID NO: 508715 - DNA, 54 bp, Artificial
  Synthetic oligonucleotide
tatcgagcagaagagcaggccttttatttagcgacgagcatggaagtcgagggc

SEQ ID NO: 508716 - DNA, 52 bp, Artificial
  Synthetic oligonucleotide
cctcaatagccaagaacatcagcaggcagatagcagcattgccaatatctac

SEQ ID NO: 508717 - DNA, 52 bp, Artificial
  Synthetic oligonucleotide
tattccccaagcctgtcaaccaagccaaacgcagggcttctgccgagccttt

SEQ ID NO: 508718 - DNA, 51 bp, Artificial
  Synthetic oligonucleotide
cgggcacgattgtatttagtgcgggacgttcctcttggccagcttcataag

SEQ ID NO: 508719 - DNA, 55 bp, Artificial
  Synthetic oligonucleotide
ttagctgctgagcttttcattccagtagttaaatgggccaaaggtcgcatcttcc

SEQ ID NO: 508720 - DNA, 55 bp, Artificial
  Synthetic oligonucleotide
tacaggcgcaataatcttctcgtgttcgcctacaagtaagttctcacaaaggtta

SEQ ID NO: 508721 - DNA, 55 bp, Artificial
  Synthetic oligonucleotide
taatggatttgtaccgcgcaaattttgttaatgcactcatatcgaaagttggtgc

SEQ ID NO: 508722 - DNA, 55 bp, Artificial
  Synthetic oligonucleotide
taatcatggggttcaaccacccgctcgaaataatgttgattattcccttagcccc

SEQ ID NO: 508723 - DNA, 55 bp, Artificial
  Synthetic oligonucleotide
gttggcagtgaaattcaaggagcaatgcgaccttgcttagtgttatcaacgaagc

SEQ ID NO: 508724 - DNA, 55 bp, Artificial
  Synthetic oligonucleotide
gtgagctatggaagtaattacacaccggcgttagatagtgttgcggagcttgcct

SEQ ID NO: 508725 - DNA, 55 bp, Artificial
  Synthetic oligonucleotide
gtcgttattggtatcaactaatgtgattagacctacacggtttgattacgcttgg

SEQ ID NO: 508726 - DNA, 55 bp, Artificial
  Synthetic oligonucleotide
ggttatcgtcttgtagagcaagggcatagagttaaatttatgagtgcgagcctac

SEQ ID NO: 508727 - DNA, 55 bp, Artificial
  Synthetic oligonucleotide
ggtgaaactagagggcgtagagtaccgcaagcgtgctagtacaccaaagaaagtt

SEQ ID NO: 508728 - DNA, 55 bp, Artificial
  Synthetic oligonucleotide
ggatggaaagtcgtgtaggtgctggtaactcgaatgttgggacgggcggcagcac

SEQ ID NO: 508729 - DNA, 55 bp, Artificial
  Synthetic oligonucleotide
gcagtgatgcgtgcttctgtgaaaacggaagatcgggaggactggatattggagc

SEQ ID NO: 508730 - DNA, 55 bp, Artificial
  Synthetic oligonucleotide
gagagataatgtactctgctagcaactttgtttgtctattacaggcgcaataatc

SEQ ID NO: 508731 - DNA, 55 bp, Artificial
  Synthetic oligonucleotide
gaaccataacgttttagtgtttatgtgctgattgcatgcgttaatagctcaaggc

SEQ ID NO: 508732 - DNA, 55 bp, Artificial
  Synthetic oligonucleotide
cgcttgtgtctataccaaatgactctgtgccatatcccgtattaacagcgcgtgg

SEQ ID NO: 508733 - DNA, 55 bp, Artificial
  Synthetic oligonucleotide
cgcagcggattagcgctgccctatgaaatatggactgagtttgttatcgatactg

SEQ ID NO: 508734 - DNA, 55 bp, Artificial
  Synthetic oligonucleotide
cgatgcgtctattgcacttcatgccagtgattctgtgtcgttgtggcacggtcgc

SEQ ID NO: 508735 - DNA, 55 bp, Artificial
  Synthetic oligonucleotide
ccttaccaactgattcctgagaatcacctactaacacacctcgctgtgggagagg

SEQ ID NO: 508736 - DNA, 55 bp, Artificial
  Synthetic oligonucleotide
cctctggatgaagctcacgctatttatgaagatatggggctatcaagtgtgttcg

SEQ ID NO: 508737 - DNA, 55 bp, Artificial
  Synthetic oligonucleotide
ccctagaacttgtatgggaccccgtcgttttaccactcctacaactttctgacac

SEQ ID NO: 508738 - DNA, 55 bp, Artificial
  Synthetic oligonucleotide
attgacgcgctatacccatgagaagtgtcgcgttcagctttggctgattggggtg

SEQ ID NO: 508739 - DNA, 55 bp, Artificial
  Synthetic oligonucleotide
atatcgcgacgaaacacctgccgcaacagctctccctctgggtacgctttggtgg

SEQ ID NO: 508740 - DNA, 55 bp, Artificial
  Synthetic oligonucleotide
aaaacgcagaacttgtactgccggccaatgggatgtatggcaggtcatccgtaat

SEQ ID NO: 508741 - DNA, 54 bp, Artificial
  Synthetic oligonucleotide
gtcaaacccaacttctgacaggttaacgttcacacaaacatctgacgatgtgac

SEQ ID NO: 508742 - DNA, 51 bp, Artificial
  Synthetic oligonucleotide
atgtcgtgaccaacctggtacagtcacgcaattcgataccaagcggcaaaa

SEQ ID NO: 508743 - DNA, 50 bp, Artificial
  Synthetic oligonucleotide
atcgcgttatcactcacagccaagatagctggacagtcaatgccgatttg

SEQ ID NO: 508744 - DNA, 55 bp, Artificial
  Synthetic oligonucleotide
gggtgatcctcgtgtgtcgcacgtaccctatccgagtaggagacacggatacagg

SEQ ID NO: 508745 - DNA, 55 bp, Artificial
  Synthetic oligonucleotide
gcggagatttggacgatcttcgacatgcgtcaggctttcctggttgtttgggacg

SEQ ID NO: 508746 - DNA, 55 bp, Artificial
  Synthetic oligonucleotide
gcccttcgctaccctgtcgggtagttttccagcctcgctttcgaagctaattcgc

SEQ ID NO: 508747 - DNA, 55 bp, Artificial
  Synthetic oligonucleotide
gagcgcgggccagcgatgtgaataggtccaggttgctgttccaggtagcctggag

SEQ ID NO: 508748 - DNA, 55 bp, Artificial
  Synthetic oligonucleotide
gaacccaggaaccacaacgccccgcgaacatccagcgacgcgttcggcccaatga

SEQ ID NO: 508749 - DNA, 55 bp, Artificial
  Synthetic oligonucleotide
cgtgatcgacatcaggtctggatgaactctcagatcgtctggattggtcggaact

SEQ ID NO: 508750 - DNA, 55 bp, Artificial
  Synthetic oligonucleotide
cgcatgagatttcgaagcgcttttctgtgcccgtccctgtgcgggagcgatgttg

SEQ ID NO: 508751 - DNA, 55 bp, Artificial
  Synthetic oligonucleotide
cgaacaagaggcatcaggaatggggtctcgaaatttggcccgagtgtatcagggg

SEQ ID NO: 508752 - DNA, 55 bp, Artificial
  Synthetic oligonucleotide
cagtagcccgacgatcaagggacaaaacctcgggagggttgcatgtccgaatggc

SEQ ID NO: 508753 - DNA, 55 bp, Artificial
  Synthetic oligonucleotide
agccacaacatggcaactcctggctaatgctttgacggctggcggggaagtccta

SEQ ID NO: 508754 - DNA, 53 bp, Artificial
  Synthetic oligonucleotide
cgtcacagtctttgcaaccccttgaatgttatgaatccccatcgctcgatggg

SEQ ID NO: 508755 - DNA, 53 bp, Artificial
  Synthetic oligonucleotide
ggttcgccatgagcttgtagtcgtcgaaatgcttgttcagatgcgagaacgga

SEQ ID NO: 508756 - DNA, 53 bp, Artificial
  Synthetic oligonucleotide
gtgcttgagtttaaatcattggttgtagccctcgcgatgagcgctaatgcgcg

SEQ ID NO: 508757 - DNA, 53 bp, Artificial
  Synthetic oligonucleotide
tctccgagccaccggcaatgatcgatccccgtatccgaacacctcggtcgaag

SEQ ID NO: 508758 - DNA, 51 bp, Artificial
  Synthetic oligonucleotide
ctatggacagcgaaaggtgtcttcgttgggacgcgagattctggacaagtg

SEQ ID NO: 508759 - DNA, 51 bp, Artificial
  Synthetic oligonucleotide
tgttcgagaactgatgcttgagcccgacgccgtactgtccatgcgcgctcg

SEQ ID NO: 508760 - DNA, 50 bp, Artificial
  Synthetic oligonucleotide
gtttcgatcccaagagcttcaccggacctttcctgacgtttctgtcgttc

SEQ ID NO: 508761 - DNA, 55 bp, Artificial
  Synthetic oligonucleotide
agtacgcctcggtaatcgggaagcccgtcgcgtagaagaccgggtcaaacaggcg

SEQ ID NO: 508762 - DNA, 55 bp, Artificial
  Synthetic oligonucleotide
atgggacatcatcgtactctcacatcctccaagatgacggctagcgtgaggccgc

SEQ ID NO: 508763 - DNA, 55 bp, Artificial
  Synthetic oligonucleotide
caaccgttatcgctgataaacgacccattgctaccgcggccgacgtggctcggta

SEQ ID NO: 508764 - DNA, 55 bp, Artificial
  Synthetic oligonucleotide
ccaggctaatgaaccacgttacatgatccttcccttcgacggtatccgcctcaag

SEQ ID NO: 508765 - DNA, 55 bp, Artificial
  Synthetic oligonucleotide
cccaggaacgagaccggttccgatctccaattgctcgtgatgttgctccccgcgt

SEQ ID NO: 508766 - DNA, 55 bp, Artificial
  Synthetic oligonucleotide
ccctccattcttatgctaccgagaagcctgagggcgaacgctatcgtgattgagg

SEQ ID NO: 508767 - DNA, 55 bp, Artificial
  Synthetic oligonucleotide
cgtcaaggttccgatgggcgagctgggctgtagccacgccgtaggggaaatccaa

SEQ ID NO: 508768 - DNA, 55 bp, Artificial
  Synthetic oligonucleotide
ggcccgaatcgtcctacaaccttcacgaaaggccaggaggtaggcttgcccttga

SEQ ID NO: 508769 - DNA, 55 bp, Artificial
  Synthetic oligonucleotide
gaaatacgcaccatcgaataatcactccaatcctccgtgccagtatcgtatactc

SEQ ID NO: 508770 - DNA, 55 bp, Artificial
  Synthetic oligonucleotide
gagtgtgcggcgaggtttggaggtcggatagtgaaacggatcgtatccccggacg

SEQ ID NO: 508771 - DNA, 55 bp, Artificial
  Synthetic oligonucleotide
gcaagtagcgcatcggcagcctttagacggaacacataacgttgaaaagcacgga

SEQ ID NO: 508772 - DNA, 55 bp, Artificial
  Synthetic oligonucleotide
gcaggggagattggtctatgagccgtactataacggaacggtcgtccccggtgcc

SEQ ID NO: 508773 - DNA, 55 bp, Artificial
  Synthetic oligonucleotide
gcatgcgcggaaactcctgggatgagatgagttgaagtgacaggattcatcagga

SEQ ID NO: 508774 - DNA, 53 bp, Artificial
  Synthetic oligonucleotide
tagcaggcatgatcgtccggagccagggaacgggctcccagcgtaagtctact

SEQ ID NO: 508775 - DNA, 53 bp, Artificial
  Synthetic oligonucleotide
ctggtgcacgggttcaagcggattacccagggcggcggtcccttggtttgtgc

SEQ ID NO: 508776 - DNA, 52 bp, Artificial
  Synthetic oligonucleotide
gggataacgacgaacttgatcgttacctccgtctcggcagcgaatcgggagc

SEQ ID NO: 508777 - DNA, 51 bp, Artificial
  Synthetic oligonucleotide
agacaaaggtcggccagcatgttcgggtactgggagccttctccggggaat

SEQ ID NO: 508778 - DNA, 55 bp, Artificial
  Synthetic oligonucleotide
gaagcataacacgcaatgcagttaaagaaacgttataaccagctctagcctgtac

SEQ ID NO: 508779 - DNA, 55 bp, Artificial
  Synthetic oligonucleotide
gcaggtgttagggttttgaaaactgatgtcgcctgggtaggcgcaggctattctt

SEQ ID NO: 508780 - DNA, 55 bp, Artificial
  Synthetic oligonucleotide
gccaccaacaatgtaccgatcaaaatgagacaaggttaagtttacctggttcgcc

SEQ ID NO: 508781 - DNA, 55 bp, Artificial
  Synthetic oligonucleotide
gcccactgttaagttcgatggcgatgtattctaaattggccgatcatggtcccgg

SEQ ID NO: 508782 - DNA, 55 bp, Artificial
  Synthetic oligonucleotide
gcctgtttaggtgctgtggggtgattgtactctctgcgtacactctgctgaccgc

SEQ ID NO: 508783 - DNA, 55 bp, Artificial
  Synthetic oligonucleotide
gcgcttcggcccaaccgctctgcataccgactaaaaccgaaattttcatcgatgc

SEQ ID NO: 508784 - DNA, 55 bp, Artificial
  Synthetic oligonucleotide
gcgtacagccatatccgaaggtcggttagctcatcaacatttccaaagcagcggg

SEQ ID NO: 508785 - DNA, 55 bp, Artificial
  Synthetic oligonucleotide
gctgggctaaccagtcgtccccggcatgcaactgaatcaatggcgtttggcttgc

SEQ ID NO: 508786 - DNA, 55 bp, Artificial
  Synthetic oligonucleotide
ggcatcatactttctctttctggcgagcggagtactggagaaacgttttcggacc

SEQ ID NO: 508787 - DNA, 55 bp, Artificial
  Synthetic oligonucleotide
gggcatgaataacgcggctatcaccggaaaaggggccgtaatcatccatttctac

SEQ ID NO: 508788 - DNA, 55 bp, Artificial
  Synthetic oligonucleotide
ggtgcgcaagaacatgatttactctgcgtatccggcgatttaggtggtgcctatg

SEQ ID NO: 508789 - DNA, 55 bp, Artificial
  Synthetic oligonucleotide
ggttaacgcaacgggaatcattacgataaactatggctatgcacgttacggcact

SEQ ID NO: 508790 - DNA, 55 bp, Artificial
  Synthetic oligonucleotide
gtatgggctggcgaggcgaaagtaaaactactagctacaagtaaaactgataccg

SEQ ID NO: 508791 - DNA, 55 bp, Artificial
  Synthetic oligonucleotide
gtctgggatctgatgatcagggtgatggtaatcaatacctaagcctccgccaacg

SEQ ID NO: 508792 - DNA, 55 bp, Artificial
  Synthetic oligonucleotide
gttaagtctgttgctttcgtgatatcatctgctataagctaaaacgcaccgtatc

SEQ ID NO: 508793 - DNA, 55 bp, Artificial
  Synthetic oligonucleotide
ttcacaagccttggaggattaggagcatccggaatatcctgacctgatactattc

SEQ ID NO: 508794 - DNA, 55 bp, Artificial
  Synthetic oligonucleotide
tcggcgcctcggttatacttaaacagaccactccacgtgcctaccaaaatatcct

SEQ ID NO: 508795 - DNA, 55 bp, Artificial
  Synthetic oligonucleotide
tctagtctttgacacaatctcgagctcagtcatttcggtaggatgtgaatgatgg

SEQ ID NO: 508796 - DNA, 55 bp, Artificial
  Synthetic oligonucleotide
tgccggatcagatgttactgctaccgcgaagtttatcattgatagaagtgcatgg

SEQ ID NO: 508797 - DNA, 55 bp, Artificial
  Synthetic oligonucleotide
ttacggtctcattcggaccggtgatttggtctatggcaaaagagatataggaacc

SEQ ID NO: 508798 - DNA, 55 bp, Artificial
  Synthetic oligonucleotide
aacctggatgcgatgactgtgctctgccagatactttcaacaccagaagacaagc

SEQ ID NO: 508799 - DNA, 55 bp, Artificial
  Synthetic oligonucleotide
acaaaacaacatcgtacgcgttaccatgcaggcaatggcagctgtaatgggtgga

SEQ ID NO: 508800 - DNA, 55 bp, Artificial
  Synthetic oligonucleotide
acacatatacgttagatgagcaggtaataaactttacgcaggcgaatgaaccctc

SEQ ID NO: 508801 - DNA, 55 bp, Artificial
  Synthetic oligonucleotide
actttcttcccgctttccgctttacttcgtgcccgcttcaatcggggctagatgg

SEQ ID NO: 508802 - DNA, 55 bp, Artificial
  Synthetic oligonucleotide
atgcggacggcaagagatcttcaggaggttcatttcaaaccgttatcgggcaggg

SEQ ID NO: 508803 - DNA, 55 bp, Artificial
  Synthetic oligonucleotide
attgactccaccggaggtcgccgccctaatctttatgggttagctccggaagcgg

SEQ ID NO: 508804 - DNA, 55 bp, Artificial
  Synthetic oligonucleotide
attggtatgatttaggtccgaagccacctggtgtttctcagttaacacccatggg

SEQ ID NO: 508805 - DNA, 55 bp, Artificial
  Synthetic oligonucleotide
caccgctaactcaggcaaatcgaaacctgcataattaccagagctcatcatcaat

SEQ ID NO: 508806 - DNA, 55 bp, Artificial
  Synthetic oligonucleotide
cagcttaagcgcttgtggaaaccgtgagccgattaccgcttacaggggaaaggtg

SEQ ID NO: 508807 - DNA, 55 bp, Artificial
  Synthetic oligonucleotide
catccataatgcggacataaagcgacttcgatttgaatttgctgagtgctgcggt

SEQ ID NO: 508808 - DNA, 55 bp, Artificial
  Synthetic oligonucleotide
ccatggcgtaagctaatttggtgatacgttctaaatcgttttgtgcaccggttga

SEQ ID NO: 508809 - DNA, 55 bp, Artificial
  Synthetic oligonucleotide
ccggccggaagtgccatcacaaaataggctataaacacagcagagtctaccaacg

SEQ ID NO: 508810 - DNA, 55 bp, Artificial
  Synthetic oligonucleotide
ccgtaacgctgtcgccacttgtaaaacgatgcggtgctgataccaagttcccgac

SEQ ID NO: 508811 - DNA, 55 bp, Artificial
  Synthetic oligonucleotide
ccttgcgcaatgcttacattttgatttacaatgccctgagccagatcggtattgt

SEQ ID NO: 508812 - DNA, 55 bp, Artificial
  Synthetic oligonucleotide
cgcttaaaaccagtggacgaccgtgtaaacctgcagtgctaactacaaacttcga

SEQ ID NO: 508813 - DNA, 55 bp, Artificial
  Synthetic oligonucleotide
ctaccgaaataatgaattgtacatctggtcgagaggggaagatctgatgaccgac

SEQ ID NO: 508814 - DNA, 55 bp, Artificial
  Synthetic oligonucleotide
ctcccggaatgccacaaagaggagactggcccgacccagatgttcaggatgaaac

SEQ ID NO: 508815 - DNA, 55 bp, Artificial
  Synthetic oligonucleotide
ctttgggacataaattatttggtacagcttctagtaccggcttagaggttttggc

SEQ ID NO: 508816 - DNA, 53 bp, Artificial
  Synthetic oligonucleotide
atttgccctgtagtcaactggaaagaaaccgcaacttcaatgggaattaccgg

SEQ ID NO: 508817 - DNA, 53 bp, Artificial
  Synthetic oligonucleotide
tatcggcaaaagttaagggtggcgaggttgaaaagctggcgacgtggtttccg

SEQ ID NO: 508818 - DNA, 52 bp, Artificial
  Synthetic oligonucleotide
tttcgcttatctccgttaattgctccggccgccacaatagctgccgaaacgc

SEQ ID NO: 508819 - DNA, 51 bp, Artificial
  Synthetic oligonucleotide
aaaacgatacttcagaaagggtggttgtgcccgctattccagttattccta

SEQ ID NO: 508820 - DNA, 50 bp, Artificial
  Synthetic oligonucleotide
taacccgactcccaacggtttatacgttccacatttgactcgtcggtttt

SEQ ID NO: 508821 - DNA, 60 bp, Artificial
  Synthetic oligonucleotide
ggcgacaaaattgagaaagcagccaatcagatatgacgagaatcctttcatcgaaggtat

SEQ ID NO: 508822 - DNA, 60 bp, Artificial
  Synthetic oligonucleotide
cgctatttcaggccaagaggccggagataaaaagccgtaagcattgctggtttgcctccg

SEQ ID NO: 508823 - DNA, 60 bp, Artificial; identical to SEQ ID NO: 237791
  Synthetic oligonucleotide

SEQ ID NO: 508824 - DNA, 60 bp, Artificial
  Synthetic oligonucleotide
cactaccttaaatgtgggggtgaaaataggcgctccactgccttaatgtgggtcaggggt

SEQ ID NO: 508825 - DNA, 60 bp, Artificial
  Synthetic oligonucleotide
atctgtccgaaactttctatcgtaaagagctaaaaggaacggatcagtttggtcttttcg

SEQ ID NO: 508826 - DNA, 60 bp, Artificial
  Synthetic oligonucleotide
cggttgttcgttataacttcggaaaactaatttatccgttgttgcgctagtatcctcttg

SEQ ID NO: 508827 - DNA, 60 bp, Artificial
  Synthetic oligonucleotide
atatgacgcgaggccgcgaaacacaaaacgctgacccagatagaaaagaactaaacgaaa

SEQ ID NO: 508828 - DNA, 60 bp, Artificial
  Synthetic oligonucleotide
gtgagcgaagcgaacagctttctgtcttctaagcgtgtttgaaagcttttgggtataatt

SEQ ID NO: 508829 - DNA, 60 bp, Artificial
  Synthetic oligonucleotide
aggataggttcaaaatggtaagaaatcggcgcggcatggtaaaagtaagattttttgccc

SEQ ID NO: 508830 - DNA, 60 bp, Artificial
  Synthetic oligonucleotide
gttttcaatggcgaccgcgtagctttcacaacagttatagaacgcaaaaagacgctccaa

SEQ ID NO: 508831 - DNA, 60 bp, Artificial
  Synthetic oligonucleotide
taagaacgtctcttactaaaactctccgaaaaatcgttgaaaaggcatcttctgtccata

SEQ ID NO: 508832 - DNA, 60 bp, Artificial
  Synthetic oligonucleotide
acaggccaagactacaaaggcgcgctatcatggctggctgacaggtttggtgatgaaact

SEQ ID NO: 508833 - DNA, 60 bp, Artificial
  Synthetic oligonucleotide
tcgaaggtatggttgtgccagttaaaagtcagagggttcagttatctcgattaggacgag

SEQ ID NO: 508834 - DNA, 60 bp, Artificial
  Synthetic oligonucleotide
ttggtatgtcggttctagtaaccgttacatttcaaaatcaaaacgtctggttgtttcctg

SEQ ID NO: 508835 - DNA, 60 bp, Artificial; identical to SEQ ID NO: 237670
  Synthetic oligonucleotide

SEQ ID NO: 508836 - DNA, 58 bp, Artificial
  Synthetic oligonucleotide
acggctacagctttgctatagattttttcccaaaagggtggctattttccctttgccg

SEQ ID NO: 508837 - DNA, 58 bp, Artificial
  Synthetic oligonucleotide
gacgctccaaaagcaagacgaatcagaataaattcagtactcactacggaattgcttt

SEQ ID NO: 508838 - DNA, 56 bp, Artificial
  Synthetic oligonucleotide
cggctgttagctactcaatatgaatttattcggagtgaacaggacaaaattaaagc

SEQ ID NO: 508839 - DNA, 56 bp, Artificial
  Synthetic oligonucleotide
cgtcgctttctctgtaagattcttacgtgttgattctgaagtaaacttgtatcttc

SEQ ID NO: 508840 - DNA, 55 bp, Artificial
  Synthetic oligonucleotide
gcagtcatcacccgcgcgccatacaggcaaacgctccgttttcctaccttccgcg

SEQ ID NO: 508841 - DNA, 55 bp, Artificial
  Synthetic oligonucleotide
gcagcgatttgggctttagaaaggcaatccgcaagtagatgctgtaccgctcccc

SEQ ID NO: 508842 - DNA, 55 bp, Artificial
  Synthetic oligonucleotide
gcatacaccaggttgcgcgacgtcaggtcatgctccaaccgtactttgtacgtaa

SEQ ID NO: 508843 - DNA, 55 bp, Artificial
  Synthetic oligonucleotide
gcatcactcttggagcaaccgcatgactcgccccatcgaatcctaaaatacagat

SEQ ID NO: 508844 - DNA, 55 bp, Artificial
  Synthetic oligonucleotide
gcatcggtgtaagcataggatgcgctgatattgaaattttcgaacggaaccaatg

SEQ ID NO: 508845 - DNA, 55 bp, Artificial
  Synthetic oligonucleotide
ctgtctcgctcctgctaacgcaggctcgacaggcgttgttttagacacgaaacct

SEQ ID NO: 508846 - DNA, 55 bp, Artificial
  Synthetic oligonucleotide
gcatgttgcgcttgatgacctagccgaactaatcgcacctaagcaggtcatcatt

SEQ ID NO: 508847 - DNA, 55 bp, Artificial
  Synthetic oligonucleotide
gccacgacttgttgggcagctatctcattataggtatggctcgtaaggttacgca

SEQ ID NO: 508848 - DNA, 55 bp, Artificial
  Synthetic oligonucleotide
ctgtcccggcgaatgcatcaatgtaccacgtttcgaagggattggtcggcgacgg

SEQ ID NO: 508849 - DNA, 55 bp, Artificial
  Synthetic oligonucleotide
gccctcgtccgcagtggggagattgatttcggtcgtttgttcaccgagacgcagg

SEQ ID NO: 508850 - DNA, 55 bp, Artificial
  Synthetic oligonucleotide
gccgactgcaggctgtcctcattaggtacacgggaccattttctggaacgcatga

SEQ ID NO: 508851 - DNA, 55 bp, Artificial
  Synthetic oligonucleotide
gccgagactgtgcgaatgtcacgagggtatctagaggtttctgtgcagaaacgcc

SEQ ID NO: 508852 - DNA, 55 bp, Artificial
  Synthetic oligonucleotide
ctgtgctgtggacagactacgcgaatttcaaggatcggccgaatttcgaggtcct

SEQ ID NO: 508853 - DNA, 55 bp, Artificial
  Synthetic oligonucleotide
gccgccatgattgatcatgtgatgcagactgatacgccattctccgcctgaactg

SEQ ID NO: 508854 - DNA, 55 bp, Artificial
  Synthetic oligonucleotide
gccgcgtgtaaggctaaggaagtccaaatcggtaagatgttcgttactccagtct

SEQ ID NO: 508855 - DNA, 55 bp, Artificial
  Synthetic oligonucleotide
gccggacacgtcccacgtgcccttgatcacctgatagtccgaacggggcaacaga

SEQ ID NO: 508856 - DNA, 55 bp, Artificial
  Synthetic oligonucleotide
gccggattcggttgtcgtgctcgatattaagcgtgagaactacgaaatcacggcg

SEQ ID NO: 508857 - DNA, 55 bp, Artificial
  Synthetic oligonucleotide
gccggcagtacggcagctttcgaccacctttaagacatttagatgtgttgatgtg

SEQ ID NO: 508858 - DNA, 55 bp, Artificial; identical to SEQ ID NO: 238034
  Synthetic oligonucleotide

SEQ ID NO: 508859 - DNA, 55 bp, Artificial
  Synthetic oligonucleotide
gcctccgaacttgcgacagcagatcacgcgctgctttgaacgcctggcattgctg

SEQ ID NO: 508860 - DNA, 55 bp, Artificial
  Synthetic oligonucleotide
gcgaatgaccttccttgctgcggttccgaattggctacctgcgccgggaatcagg

SEQ ID NO: 508861 - DNA, 55 bp, Artificial
  Synthetic oligonucleotide
gcgacaagcccaatttcttgcgggctttcctgattaaccggccacgcaaaccacg

SEQ ID NO: 508862 - DNA, 55 bp, Artificial
  Synthetic oligonucleotide
gcgcagaacgttgactcccgcaatattggttttattccaaatattggcatacgag

SEQ ID NO: 508863 - DNA, 55 bp, Artificial
  Synthetic oligonucleotide
gcgcgatctttggccatgcgccttcacaagatgtgtcgtgtagttgctgaggtgg

SEQ ID NO: 508864 - DNA, 55 bp, Artificial
  Synthetic oligonucleotide
gcgcttcctccttccggtaccaccgacgaggcctttcttcgtgaagtcgacgagg

SEQ ID NO: 508865 - DNA, 55 bp, Artificial
  Synthetic oligonucleotide
gcgctttaacctacggtcagcgcttacggattacttgcactccggtgttgttaaa

SEQ ID NO: 508866 - DNA, 55 bp, Artificial
  Synthetic oligonucleotide
gcggaatgagcgacgcacttccgtccctggagcgttcggttcgcgcaaagaactg

SEQ ID NO: 508867 - DNA, 55 bp, Artificial
  Synthetic oligonucleotide
gcggatatccttcgaaagactaaagtccctttgtcctaacgcttatcaactggcc

SEQ ID NO: 508868 - DNA, 55 bp, Artificial
  Synthetic oligonucleotide
gcggttgagcgacctggaagtggctaccagcgaatttgtctcgcggatcgccgca

SEQ ID NO: 508869 - DNA, 55 bp, Artificial
  Synthetic oligonucleotide
gacgcaggctttcccgtctattatgttgaagacgacacaccagaaggtctcctga

SEQ ID NO: 508870 - DNA, 55 bp, Artificial
  Synthetic oligonucleotide
gacgtaattgatagtcagtcgcaaatccgatttctggttaagagtccatcctcct

SEQ ID NO: 508871 - DNA, 55 bp, Artificial
  Synthetic oligonucleotide
gacgtggaagatcacgtggacttggatgtggaagatcacgcggacttggatgtgg

SEQ ID NO: 508872 - DNA, 55 bp, Artificial
  Synthetic oligonucleotide
gagcagcacttcgtcgcaatcacagatcaacaggcccttcacgcatagtctccgg

SEQ ID NO: 508873 - DNA, 55 bp, Artificial
  Synthetic oligonucleotide
gagccaaccctcgacacaatatgcgatcgtgtcggctatgcccgtgcgacggtcg

SEQ ID NO: 508874 - DNA, 55 bp, Artificial
  Synthetic oligonucleotide
gagcggtatgcccatcagatcagcgggaccttttctagattatactcaaagcgtg

SEQ ID NO: 508875 - DNA, 55 bp, Artificial
  Synthetic oligonucleotide
gaggatttccgacctcatccaattgccctcgttcgttgtacccgaccgtatccac

SEQ ID NO: 508876 - DNA, 55 bp, Artificial
  Synthetic oligonucleotide
gagggctgggcacgttatttggctcactcagatgatgagcaactacgagacgggc

SEQ ID NO: 508877 - DNA, 55 bp, Artificial
  Synthetic oligonucleotide
gagtctccctttgggatggaactgctggctacagttgactggctgctaactcgcg

SEQ ID NO: 508878 - DNA, 55 bp, Artificial
  Synthetic oligonucleotide
gagtgcccagtcgtaccgtgcaaatcatatggtgccctatacggaagatcatcgt

SEQ ID NO: 508879 - DNA, 55 bp, Artificial
  Synthetic oligonucleotide
gatcgaatgggctcggcccagaaaatgcaggtttacgtagctcgcctggatgcgg

SEQ ID NO: 508880 - DNA, 55 bp, Artificial
  Synthetic oligonucleotide
gacctgttccagatcataacgtgccttaggggcattgaagtgcagccgggcggta

SEQ ID NO: 508881 - DNA, 55 bp, Artificial
  Synthetic oligonucleotide
gaccatgaccaaaatgcatggttcgcgtacgatattcagaacgcacaagcgctcc

SEQ ID NO: 508882 - DNA, 55 bp, Artificial
  Synthetic oligonucleotide
gatcgctgcggagccattgcgtttcgctcgcaacgaaaacatgcactgccatcca

SEQ ID NO: 508883 - DNA, 55 bp, Artificial
  Synthetic oligonucleotide
gatctactcgaattgctgaggtgttacgatggcagttggtattccaaaggacgag

SEQ ID NO: 508884 - DNA, 55 bp, Artificial
  Synthetic oligonucleotide
gatgcctctttccccaaacgaaatagccgatctgttgattaaaaccagacagatg

SEQ ID NO: 508885 - DNA, 55 bp, Artificial
  Synthetic oligonucleotide
gaagctatttatacccgctaacggttagtccgtcttctatgccggaaaacgcctg

SEQ ID NO: 508886 - DNA, 55 bp, Artificial
  Synthetic oligonucleotide
gattcccgaagaccctaattcctttctcgccaagcctgtgagcgaagcgagcagc

SEQ ID NO: 508887 - DNA, 55 bp, Artificial
  Synthetic oligonucleotide
gcaagcgtctatgataatcgtgaggggacctgctcatgaaaacgctgtgagcctg

SEQ ID NO: 508888 - DNA, 55 bp, Artificial
  Synthetic oligonucleotide
gcaaggcaacctactagaagctaaagtcgaggctcttgttaataccgttaacacc

SEQ ID NO: 508889 - DNA, 55 bp, Artificial
  Synthetic oligonucleotide
gcacccaccacactatcttcaataccgtaataaccatgcggtgtgagcgatccac

SEQ ID NO: 508890 - DNA, 55 bp, Artificial
  Synthetic oligonucleotide
gaaaccttgcccaaaacgaagggagacagattcagtctttagttgaagaggcact

SEQ ID NO: 508891 - DNA, 55 bp, Artificial
  Synthetic oligonucleotide
ctttcgcaatatgcgcgactcgttcccaaccttgccttcatttacacacgcggac

SEQ ID NO: 508892 - DNA, 55 bp, Artificial
  Synthetic oligonucleotide
gcaccgcagtgtacggtctgcaactcttcccctcaatccgatgccatgtgtctgg

SEQ ID NO: 508893 - DNA, 55 bp, Artificial
  Synthetic oligonucleotide
cttgcgataccatttgcgatattgtgccccggtctcgaacgcgcgccagtagata

SEQ ID NO: 508894 - DNA, 55 bp, Artificial
  Synthetic oligonucleotide
gcaccggggtctcctgttctccgaaccgctggaaatattgaaccaggtgatgacc

SEQ ID NO: 508895 - DNA, 55 bp, Artificial
  Synthetic oligonucleotide
gcacgctggtcgacataggctttggcaccgttcagcccggtctcctcgttgttcc

SEQ ID NO: 508896 - DNA, 55 bp, Artificial
  Synthetic oligonucleotide
gcacgttccagtgggtcaagaaatctggcttgggcggttttatgggcaatgtctg

SEQ ID NO: 508897 - DNA, 55 bp, Artificial
  Synthetic oligonucleotide
gcactcgtcttgccgataaacatcgggtctttcggccacatgctttccgcgtcga

SEQ ID NO: 508898 - DNA, 55 bp, Artificial
  Synthetic oligonucleotide
gcagaccagtaacgcctacggcttcttgtctcccaaggcttggccagagttggcc

SEQ ID NO: 508899 - DNA, 55 bp, Artificial
  Synthetic oligonucleotide
gcagccaatcagatatgacgagaatcctttcatcgaaggtatggttgtgccagtt

SEQ ID NO: 508900 - DNA, 55 bp, Artificial
  Synthetic oligonucleotide
ggtggttcccgtgacggggctgacgctaaacgccagctacacttatatcgactgg

SEQ ID NO: 508901 - DNA, 55 bp, Artificial
  Synthetic oligonucleotide
ggttgcggtgatatcgaaatatcataggcgaaagcaaggctgcagggacgacagc

SEQ ID NO: 508902 - DNA, 55 bp, Artificial
  Synthetic oligonucleotide
gtaagaatttctatgaactgggtctaaaggttttaatcggattccagcccgttcc

SEQ ID NO: 508903 - DNA, 55 bp, Artificial
  Synthetic oligonucleotide
gtacttcgagcgtgaaggagagaggtcccagaaccggcatatcgtatgtcctcgc

SEQ ID NO: 508904 - DNA, 55 bp, Artificial
  Synthetic oligonucleotide
gtccatgcctatgcgggtaatctgttccatgggcggctccctcgaatgagtcctc

SEQ ID NO: 508905 - DNA, 55 bp, Artificial
  Synthetic oligonucleotide
gtccctcccctctctcgacagaaacggattaccgatatggctttcgctatggagc

SEQ ID NO: 508906 - DNA, 55 bp, Artificial
  Synthetic oligonucleotide
gtcgattagagccaactctcgatactatttgcgaaagagtgggctatgcacgggc

SEQ ID NO: 508907 - DNA, 55 bp, Artificial
  Synthetic oligonucleotide
gtgacatctctatctggcgggagagtgacatttgtacgttgcgcttacacacccc

SEQ ID NO: 508908 - DNA, 55 bp, Artificial
  Synthetic oligonucleotide
gtgacggtctcctgagacttttcggtcacagcccaacctgaaaatttcgtcgggg

SEQ ID NO: 508909 - DNA, 55 bp, Artificial
  Synthetic oligonucleotide
gtgctaaggcgtcggaaagcatgagggcagggagtttcttttcggtgcttcgatg

SEQ ID NO: 508910 - DNA, 55 bp, Artificial
  Synthetic oligonucleotide
gttagccagctacaggcacgtggtttcgaggcggaactcattaccataccgttca

SEQ ID NO: 508911 - DNA, 55 bp, Artificial
  Synthetic oligonucleotide
gttccggttggtgcctctaatatggacgcggcagccttatctgatctgttagagg

SEQ ID NO: 508912 - DNA, 55 bp, Artificial
  Synthetic oligonucleotide
tacctacgaaaagaagaccggatggttcgagcagaccgccaccggcgctagcctg

SEQ ID NO: 508913 - DNA, 55 bp, Artificial
  Synthetic oligonucleotide
tactatcttccggtgcagtctgcatcaatcatagacgtaccgatgcgacaggaca

SEQ ID NO: 508914 - DNA, 55 bp, Artificial
  Synthetic oligonucleotide
tataccaaaaccttcctaaaggactggaagcgcttatcacgatcaggacgctacg

SEQ ID NO: 508915 - DNA, 55 bp, Artificial
  Synthetic oligonucleotide
tcaaagctgtcagctcaaacgcaccctaaatctctcgtatttagccctataaagc

SEQ ID NO: 508916 - DNA, 55 bp, Artificial
  Synthetic oligonucleotide
ttgagctaatttcgtgatctcacagcaatggaggccgaaacacaatagccatacc

SEQ ID NO: 508917 - DNA, 55 bp, Artificial
  Synthetic oligonucleotide
ttccccgtgatacctctgcatcgacaggggcagaccgaactcgcctgcactcgcg

SEQ ID NO: 508918 - DNA, 55 bp, Artificial
  Synthetic oligonucleotide
tggagctacggccattcgtaaaccatctgaccagctcactgaggttgaaaagatc

SEQ ID NO: 508919 - DNA, 55 bp, Artificial
  Synthetic oligonucleotide
tggacaagtgtcggttccctctcgccgcaggcccatggccactctacgcgaaagt

SEQ ID NO: 508920 - DNA, 55 bp, Artificial
  Synthetic oligonucleotide
tgccgaagcccatgccaaggtgagtttccgactggtcggcacacaggaccccgat

SEQ ID NO: 508921 - DNA, 55 bp, Artificial
  Synthetic oligonucleotide
tgacttaaggttacgcttcatgcaacgttcacgaaagcgcttgcgctgagggacc

SEQ ID NO: 508922 - DNA, 55 bp, Artificial
  Synthetic oligonucleotide
tcttccagcctgcccacgcggaaggtcatcaacgcgtttacccggcgtacgaaat

SEQ ID NO: 508923 - DNA, 55 bp, Artificial
  Synthetic oligonucleotide
tcgttttgcgtccggtgtgaatcaaggtgaactggactcggtctccatcaatccg

SEQ ID NO: 508924 - DNA, 55 bp, Artificial
  Synthetic oligonucleotide
tcgcgaaaactcggatgaaacggctattagatctcgttttctcggtaaatcggcc

SEQ ID NO: 508925 - DNA, 55 bp, Artificial
  Synthetic oligonucleotide
tcgattaacatgcttcgataagtgccacgcttgaaacgcccgagcctgtcgataa

SEQ ID NO: 508926 - DNA, 55 bp, Artificial
  Synthetic oligonucleotide
tcgaatctaatctattcgaagttttgctcgccggggaagcctttcgatccgtccc

SEQ ID NO: 508927 - DNA, 55 bp, Artificial
  Synthetic oligonucleotide
tccttctttcggaccgagcccggtatccgctcaccggagggagcgctgcaattcc

SEQ ID NO: 508928 - DNA, 55 bp, Artificial
  Synthetic oligonucleotide
tccgacttgagcctgatttgtagcccattgagctaaagactttggcgatatggaa

SEQ ID NO: 508929 - DNA, 55 bp, Artificial
  Synthetic oligonucleotide
tccccgcgtgagtcatcctctcaccgcgttggtataagggagacctgtgtgcggg

SEQ ID NO: 508930 - DNA, 55 bp, Artificial
  Synthetic oligonucleotide
tcatgctattgcttgataactgcttacccgagccggcagtacggcagctttcgac

SEQ ID NO: 508931 - DNA, 55 bp, Artificial
  Synthetic oligonucleotide
tcaggacgaccaggcccgactccggaaacatcactttggccaagcgcgcaatgcg

SEQ ID NO: 508932 - DNA, 55 bp, Artificial
  Synthetic oligonucleotide
tcactcgcttcagtcgcgtgcggtttgatgcctccgaacaggcctcattccagac

SEQ ID NO: 508933 - DNA, 55 bp, Artificial
  Synthetic oligonucleotide
gctccacttgtgatcggaaccgagccagacgacacattgggatcaactgccttgg

SEQ ID NO: 508934 - DNA, 55 bp, Artificial
  Synthetic oligonucleotide
gctcgtagaacccttggttcgctaactcaggaaaggcctcacgtactgtcttgcc

SEQ ID NO: 508935 - DNA, 55 bp, Artificial; identical to SEQ ID NO: 238063
  Synthetic oligonucleotide

SEQ ID NO: 508936 - DNA, 55 bp, Artificial
  Synthetic oligonucleotide
gcttaacgacaagcctttgaacattggacatgatcccgcgacaacgaactaacaa

SEQ ID NO: 508937 - DNA, 55 bp, Artificial
  Synthetic oligonucleotide
gcttacctgcaggaactcgaacaagcctgtaatcccgtaccagataagattcctc

SEQ ID NO: 508938 - DNA, 55 bp, Artificial
  Synthetic oligonucleotide
ggaacttggtgttgggcttgttcgggctatccgtaagcaagccggattgtaggag

SEQ ID NO: 508939 - DNA, 55 bp, Artificial
  Synthetic oligonucleotide
ggactgatcatgcttacgcgttactggactaacaaagtcggtctggcaggcgtgc

SEQ ID NO: 508940 - DNA, 55 bp, Artificial
  Synthetic oligonucleotide
ggagcgaaattacaatcccgtggtggttgcgaaccatcgcctctatgctcgtgcg

SEQ ID NO: 508941 - DNA, 55 bp, Artificial
  Synthetic oligonucleotide
ggagcgtctgttatcgcagaaggctgctatcaactggcgatttgaaccgcgccgg

SEQ ID NO: 508942 - DNA, 55 bp, Artificial
  Synthetic oligonucleotide
ggagcttcccgtcgaacgggctgaggctttggtacgtcatggaaagggcctttcg

SEQ ID NO: 508943 - DNA, 55 bp, Artificial
  Synthetic oligonucleotide
ggatcgccttgtgacaagggacgcacagaaccttcgtcctgcgtgccctggctat

SEQ ID NO: 508944 - DNA, 55 bp, Artificial
  Synthetic oligonucleotide
ggcaacttacgttgctcctaaaaccgatatttgtcatttcgacaaccaaataggc

SEQ ID NO: 508945 - DNA, 55 bp, Artificial
  Synthetic oligonucleotide
ggcatggtcacgatgtcacccacgatcgtgcccgcgttgctcaattcaagggcgt

SEQ ID NO: 508946 - DNA, 55 bp, Artificial
  Synthetic oligonucleotide
ggcatttagtccatccttggcagcccttggggcgcactactgcgagggtccatcc

SEQ ID NO: 508947 - DNA, 55 bp, Artificial
  Synthetic oligonucleotide
ggcccagcattgccgaaggttatcttctagtcgcacagaaggcggtatcagacgc

SEQ ID NO: 508948 - DNA, 55 bp, Artificial
  Synthetic oligonucleotide
ggcgcagcccagaccgttgcgaaccgtagcgacaagcatttcatgaaacgacgca

SEQ ID NO: 508949 - DNA, 55 bp, Artificial
  Synthetic oligonucleotide
ggtcttaccgccgtggaactgccagctatccggaaagccttggagacgcgcaacc

SEQ ID NO: 508950 - DNA, 55 bp, Artificial
  Synthetic oligonucleotide
ggtcgtgagcgaggcacaatccacgcgaaacaggacgatccgtggcatactaagc

SEQ ID NO: 508951 - DNA, 55 bp, Artificial
  Synthetic oligonucleotide
ggtcgatcggaccctccagtccaatatttcggctcaccgatgattgggtgtcgcg

SEQ ID NO: 508952 - DNA, 55 bp, Artificial
  Synthetic oligonucleotide
ggtagttaagctgctggcaaattattctatagagataaaaccggaagcctttcgt

SEQ ID NO: 508953 - DNA, 55 bp, Artificial
  Synthetic oligonucleotide
ggtactggacctgcgcgtagaagctctgcggcaaacaacttgctgcaaccttcgc

SEQ ID NO: 508954 - DNA, 55 bp, Artificial
  Synthetic oligonucleotide
gggttcgtatcttaaaatcggtgcacgctttacggttgtctgaagatggtagttg

SEQ ID NO: 508955 - DNA, 55 bp, Artificial
  Synthetic oligonucleotide
gggtgcaagctcttgtgccagaagggactcctgacagtaatcttgagcaggcact

SEQ ID NO: 508956 - DNA, 55 bp, Artificial
  Synthetic oligonucleotide
ggggtgttgtcgctggtggtatcgctcatgttcgccggactagacatatcgcgct

SEQ ID NO: 508957 - DNA, 55 bp, Artificial
  Synthetic oligonucleotide
ggggccgcaagtcatcggcctgcaatcgaagggctgcacccaaagcgacatggaa

SEQ ID NO: 508958 - DNA, 55 bp, Artificial
  Synthetic oligonucleotide
ggggagtttgccaattgctttgatccatcgatctgcggtcgacggattatccgcg

SEQ ID NO: 508959 - DNA, 55 bp, Artificial
  Synthetic oligonucleotide
gggcgtttcaagcgcggcacttatcgttcaatgctgatgcagacgggaatgtcct

SEQ ID NO: 508960 - DNA, 55 bp, Artificial
  Synthetic oligonucleotide
gggccgcttacttcgatagtgcggaaacctatgttcagccgctgccattcacggt

SEQ ID NO: 508961 - DNA, 55 bp, Artificial
  Synthetic oligonucleotide
gggaacgttcggatcggcgacagccctcaactatgccctgtcaggactcgtggat

SEQ ID NO: 508962 - DNA, 55 bp, Artificial
  Synthetic oligonucleotide
ggctcgtccgtcgcacagaggatcgtgtatttaacgtaggtaacgatataattcc

SEQ ID NO: 508963 - DNA, 55 bp, Artificial
  Synthetic oligonucleotide
ggctcggtgaagtttcaaatttcgacccggtccaaacccggacaacatgagcgac

SEQ ID NO: 508964 - DNA, 55 bp, Artificial
  Synthetic oligonucleotide
ggctccgcgaggggtaagggtacgttggtaagggtcgactatcactctgatctta

SEQ ID NO: 508965 - DNA, 55 bp, Artificial
  Synthetic oligonucleotide
ggcgcggctcgttgaaatcagggttttccggttgaggcggctttcatgccctgca

SEQ ID NO: 508966 - DNA, 55 bp, Artificial
  Synthetic oligonucleotide
cacgatatggctccacaactaatatgctggtttatcaagattggacacctagttc

SEQ ID NO: 508967 - DNA, 55 bp, Artificial
  Synthetic oligonucleotide
cacgcgggtacaatgacgacgcgtacaagcaaaaccgggcgttcgctgcgacaca

SEQ ID NO: 508968 - DNA, 55 bp, Artificial
  Synthetic oligonucleotide
cactagtggtgtattaaagcagcatgacagccctgaacagcgaagactcgcccgt

SEQ ID NO: 508969 - DNA, 55 bp, Artificial
  Synthetic oligonucleotide
caggaaaaaaaccagcatcagaatcatcaaaaattttgagagatccgaagagcac

SEQ ID NO: 508970 - DNA, 55 bp, Artificial
  Synthetic oligonucleotide
caggttaggccgtttcaagcgcggcacttatcgttcaatgctgatgcagacggga

SEQ ID NO: 508971 - DNA, 55 bp, Artificial
  Synthetic oligonucleotide
catcaatcagcagtatgacgagctctgggcgataccgcaggtctcgggaacgacg

SEQ ID NO: 508972 - DNA, 55 bp, Artificial
  Synthetic oligonucleotide
cattggcgactcgtcggatcacgatccacgatctgcagtatctatcttggcagaa

SEQ ID NO: 508973 - DNA, 55 bp, Artificial
  Synthetic oligonucleotide
ccaacaccctacctgttaatctgggtaaacgatttggagatgtctccttattgcc

SEQ ID NO: 508974 - DNA, 55 bp, Artificial
  Synthetic oligonucleotide
ccaaggtggcgaagcttgtttcggtgctcatctcaagtcctttcagagcgcgggc

SEQ ID NO: 508975 - DNA, 55 bp, Artificial
  Synthetic oligonucleotide
ccacctcgcaattgatgatcgaaacgatccgattagcgtgaattccagcgtcgtt

SEQ ID NO: 508976 - DNA, 55 bp, Artificial
  Synthetic oligonucleotide
ccagttgggatcatattcgtccttggggccgtgatagcgatgctcggtataatcc

SEQ ID NO: 508977 - DNA, 55 bp, Artificial
  Synthetic oligonucleotide
ccatgatgcaagtccctgcagacatctcatcaaagtaaaatcgcaaatcaaggtc

SEQ ID NO: 508978 - DNA, 55 bp, Artificial
  Synthetic oligonucleotide
ccatgggcaggaacgtattattttctcgcttattaacaagtttcataccgcaaca

SEQ ID NO: 508979 - DNA, 55 bp, Artificial
  Synthetic oligonucleotide
ccccgagctaccatgaatctacgtcgaagacctatggcgtcgcgaattacgacgg

SEQ ID NO: 508980 - DNA, 55 bp, Artificial
  Synthetic oligonucleotide
ccccgccaggagctgttgccgccagttagaaaaggcacattccgccgcaagatag

SEQ ID NO: 508981 - DNA, 55 bp, Artificial
  Synthetic oligonucleotide
ccccgccgcatgtcgggaatggtccgcgcataaacgaagtttggacgccctcttg

SEQ ID NO: 508982 - DNA, 55 bp, Artificial
  Synthetic oligonucleotide
ccccggagcatcgttgtgcaaccggcagtcgaaggagaggaatgatgaccatcga

SEQ ID NO: 508983 - DNA, 55 bp, Artificial
  Synthetic oligonucleotide
cccctagtggaaattccgcgttaatgcgtcattagcaaattggcacgcctcttgc

SEQ ID NO: 508984 - DNA, 55 bp, Artificial
  Synthetic oligonucleotide
cccctttgggatggagctgctggctacagttgactggctgctaactcgcgaaaat

SEQ ID NO: 508985 - DNA, 55 bp, Artificial
  Synthetic oligonucleotide
cccgcgcaaccgatacggtacttttcggccaggcccagtcatagcctggataggg

SEQ ID NO: 508986 - DNA, 55 bp, Artificial
  Synthetic oligonucleotide
ccctttatccctccccaatggagcaaggtcaggaactccttctaatcggactaat

SEQ ID NO: 508987 - DNA, 55 bp, Artificial
  Synthetic oligonucleotide
ccgaagaatcgttgccaacggaatgtcggtcatgtgctgttttccctgcctagaa

SEQ ID NO: 508988 - DNA, 55 bp, Artificial
  Synthetic oligonucleotide
ccgaagcggtacacatattgcgtcattctgatccccttccgatcgaaagcgccgc

SEQ ID NO: 508989 - DNA, 55 bp, Artificial
  Synthetic oligonucleotide
ccgacgaggcggtcagttcttcgtaaattaggcgtcatggcgtgaggctcaccgc

SEQ ID NO: 508990 - DNA, 55 bp, Artificial
  Synthetic oligonucleotide
ccgagacctgatcagaccgaaggtttaaggaatgaagttctgttgtgaagcggtc

SEQ ID NO: 508991 - DNA, 55 bp, Artificial
  Synthetic oligonucleotide
ccgagacgctcgaacaaactcgcggagcttatctaaatccgttaagttatccatc

SEQ ID NO: 508992 - DNA, 55 bp, Artificial
  Synthetic oligonucleotide
ccgcgggcaaattctgcgtcggcaccgtccaacgatcgctgagaatgcgttgacc

SEQ ID NO: 508993 - DNA, 55 bp, Artificial
  Synthetic oligonucleotide
ccgggaacccatgccttttcagtttcaggaagaatgaccatggacccgcagcccg

SEQ ID NO: 508994 - DNA, 55 bp, Artificial
  Synthetic oligonucleotide
ccgggaactccctaccctacacaaagccctctgggccatatttgacggcgtaaag

SEQ ID NO: 508995 - DNA, 55 bp, Artificial
  Synthetic oligonucleotide
ccgtcttgggcaagactcgttggtctcagatcccgcctttgggtagagctgccac

SEQ ID NO: 508996 - DNA, 55 bp, Artificial
  Synthetic oligonucleotide
ccgttctagggaacgcgatgactgatccgcgtgtaaccgtaccaagcgtatcccc

SEQ ID NO: 508997 - DNA, 55 bp, Artificial
  Synthetic oligonucleotide
aaacgcggtccggcgaatgcgtcgtcagaaaatgcgccaattccgcattgaccca

SEQ ID NO: 508998 - DNA, 55 bp, Artificial
  Synthetic oligonucleotide
aaaggctataaggcccgcaaccataaatttcccgaaatcctgtcttcagccttgt

SEQ ID NO: 508999 - DNA, 55 bp, Artificial
  Synthetic oligonucleotide
aaattaacgcctgcgcgagccttaatcgctgaattagtgcgtcgatactgggtaa

SEQ ID NO: 509000 - DNA, 55 bp, Artificial
  Synthetic oligonucleotide
aaccagttccgcactctggtcgaggcgctcgcgtgaacgacatgagcaatagccc

SEQ ID NO: 509001 - DNA, 55 bp, Artificial
  Synthetic oligonucleotide
aacgtcggatcattgtgccgccgcaccagagcttggccgacccctggtctgtcgc

SEQ ID NO: 509002 - DNA, 55 bp, Artificial
  Synthetic oligonucleotide
aaggatcggtacgtgacaagagaagcccagcagtttgcaagcgacaattatgcgg

SEQ ID NO: 509003 - DNA, 55 bp, Artificial
  Synthetic oligonucleotide
aaggctgctccctgaagatgttcggcacctcggttcgcagggcacgcgacatacg

SEQ ID NO: 509004 - DNA, 55 bp, Artificial
  Synthetic oligonucleotide
aaggctggccgggaggcaaggcccgaccggtctgtccagtccgtcaggtcacttg

SEQ ID NO: 509005 - DNA, 55 bp, Artificial
  Synthetic oligonucleotide
aagtcgcgatatatcgtggcaccggctgtcagcgttactataagcatggctgcta

SEQ ID NO: 509006 - DNA, 55 bp, Artificial
  Synthetic oligonucleotide
aatcaaaaggggtttaatcagataagcactagggcgcgttccgtaatggaccgcg

SEQ ID NO: 509007 - DNA, 55 bp, Artificial
  Synthetic oligonucleotide
aatgttggtgagcgtgagaattcggtctggaagcccgtcaatccgaatgagatcg

SEQ ID NO: 509008 - DNA, 55 bp, Artificial
  Synthetic oligonucleotide
acaaaggcgcgctatcatggctggctgacaggtttggtgatgaaactgcccgtca

SEQ ID NO: 509009 - DNA, 55 bp, Artificial
  Synthetic oligonucleotide
acaaagtactctggaatgcttgtgatacgttccgtggtactgttagtcctgatac

SEQ ID NO: 509010 - DNA, 55 bp, Artificial
  Synthetic oligonucleotide
acggtgcggcactcgaagcaggaatacgttcgtggcgatgtgcatgccaattcag

SEQ ID NO: 509011 - DNA, 55 bp, Artificial
  Synthetic oligonucleotide
actcggctgaattatacgacaaacctgaacttcctttgcaacacgccaggcgctg

SEQ ID NO: 509012 - DNA, 55 bp, Artificial
  Synthetic oligonucleotide
actggttgcagcggttacagttgcggaaagcgccgaagcggacctataggcgcgc

SEQ ID NO: 509013 - DNA, 55 bp, Artificial
  Synthetic oligonucleotide
agaatttcgctcatgtgcagaacgcagaaagatcatctgcaataagaaacgatgg

SEQ ID NO: 509014 - DNA, 55 bp, Artificial
  Synthetic oligonucleotide
agcatgggattttccttcgcagtaggtgcgtctgctcccaacctcgctatgtcat

SEQ ID NO: 509015 - DNA, 55 bp, Artificial
  Synthetic oligonucleotide
agcggttgggcctcatgtctcccattcatggagttgcgactagccggcagatgaa

SEQ ID NO: 509016 - DNA, 55 bp, Artificial
  Synthetic oligonucleotide
agctaaagtcgaggctcttgttaataccgttaacaccgtcggagtgatgggtaag

SEQ ID NO: 509017 - DNA, 55 bp, Artificial
  Synthetic oligonucleotide
agctctaccagtggagtcgggaacaccccgaagaaccatactgcgacttgtggaa

SEQ ID NO: 509018 - DNA, 55 bp, Artificial
  Synthetic oligonucleotide
aggcgcagcgaaacgtgccccatcagcctgcgatgctgtcggcatagccgctcta

SEQ ID NO: 509019 - DNA, 55 bp, Artificial
  Synthetic oligonucleotide
aggtgcggacgaaacttgcgacgctcatgcgggcactccaacccgggtcagcatg

SEQ ID NO: 509020 - DNA, 55 bp, Artificial
  Synthetic oligonucleotide
agtggtatcaggccggcttcccgggccctgacacgatgcccgaatattgggtgga

SEQ ID NO: 509021 - DNA, 55 bp, Artificial
  Synthetic oligonucleotide
ataagggctaaattgctcattctagcatcctaatttattagctcggctgaatgcc

SEQ ID NO: 509022 - DNA, 55 bp, Artificial
  Synthetic oligonucleotide
atagccgcccggaatgggccggggcagttcgacggggtagctttctccatatgcc

SEQ ID NO: 509023 - DNA, 55 bp, Artificial
  Synthetic oligonucleotide
atagtgcaataattcttgccctccattcctgcacccgctatcagaatcatcaacc

SEQ ID NO: 509024 - DNA, 55 bp, Artificial
  Synthetic oligonucleotide
atcaaacagcctttccgatgcgcaagaaaagaggatctggtgacaccgttgctct

SEQ ID NO: 509025 - DNA, 55 bp, Artificial
  Synthetic oligonucleotide
atccacgcgtcattgcaacgcccaagcactttgcggtccattccggccccgaggc

SEQ ID NO: 509026 - DNA, 55 bp, Artificial
  Synthetic oligonucleotide
atctttcgctttggacggtcggcggtgatggctggaagttcggcagggacggtcg

SEQ ID NO: 509027 - DNA, 55 bp, Artificial
  Synthetic oligonucleotide
atgctgtttaaggcgtttgaggagcaggtcatagaacgaaaacttgatgcgattc

SEQ ID NO: 509028 - DNA, 55 bp, Artificial
  Synthetic oligonucleotide
attctcgctgtggccctcaatccagcaagcgtctctctcttcggtccttggggcg

SEQ ID NO: 509029 - DNA, 55 bp, Artificial
  Synthetic oligonucleotide
cgggcgaggttcaaataaccaaataggcacaattagccttgacatcgcaacgctg

SEQ ID NO: 509030 - DNA, 55 bp, Artificial
  Synthetic oligonucleotide
cgggtcgcagatgacctgaaagaacaggtaagcactacccttgcctctatgggct

SEQ ID NO: 509031 - DNA, 55 bp, Artificial
  Synthetic oligonucleotide
cggtaaactcaccataatgatccagcatcgatcggtaatgatctgtaatcacacg

SEQ ID NO: 509032 - DNA, 55 bp, Artificial
  Synthetic oligonucleotide
cggtagccgggtggctcggaatacgacagcatcttgcagaccgtgtcgcgcgata

SEQ ID NO: 509033 - DNA, 55 bp, Artificial
  Synthetic oligonucleotide
cggtctcctcgtcgctattgatgaggacatcgtagcccagtgtcggtgtggcggt

SEQ ID NO: 509034 - DNA, 55 bp, Artificial
  Synthetic oligonucleotide
cgtaagagagctgtctcagttaaggtagcttcgaacatctagttcgctttgcgcc

SEQ ID NO: 509035 - DNA, 55 bp, Artificial
  Synthetic oligonucleotide
cgtcatgggtggcgtcttagagtgaatttgcgtccggcggtacacctgcgcgttc

SEQ ID NO: 509036 - DNA, 55 bp, Artificial
  Synthetic oligonucleotide
cgtcccagtgaaaggacgaaaatcgataccctcggatatacccgaattgttcccg

SEQ ID NO: 509037 - DNA, 55 bp, Artificial
  Synthetic oligonucleotide
cgtcctatttcacgtccaagcgtaaatgttagataagcccgagcttgcggtcgtc

SEQ ID NO: 509038 - DNA, 55 bp, Artificial
  Synthetic oligonucleotide
cgtgggcaatttcagcttgaactggacttcagccgacgagcgtttcagcgtgggc

SEQ ID NO: 509039 - DNA, 55 bp, Artificial
  Synthetic oligonucleotide
ctaacatagcgaccgttgatacagattagactaggagcgtggaagtctaaatgcg

SEQ ID NO: 509040 - DNA, 55 bp, Artificial
  Synthetic oligonucleotide
ctaggccgtcacttgggtctaaaacatggcgggtccatggattcttgtggcgtac

SEQ ID NO: 509041 - DNA, 55 bp, Artificial
  Synthetic oligonucleotide
ctagtcagaacgtgactgttccgggcggatatcttcatgccattggatctgagac

SEQ ID NO: 509042 - DNA, 55 bp, Artificial
  Synthetic oligonucleotide
ctagtcagattgcccgacgaagtgaccttgttctagtccctattagaccaagcgc

SEQ ID NO: 509043 - DNA, 55 bp, Artificial
  Synthetic oligonucleotide
ctatcggtgcgacatatgaccaccaaccctctcccttggccaatagtgccgcccc

SEQ ID NO: 509044 - DNA, 55 bp, Artificial
  Synthetic oligonucleotide
ctcaaggcgcgggttttaatcgaatattgatcgaccgcctcaagataggctccga

SEQ ID NO: 509045 - DNA, 55 bp, Artificial
  Synthetic oligonucleotide
ctcaatccgtcgggctataacccggccagaacggaaccagcgacgatgatccggg

SEQ ID NO: 509046 - DNA, 55 bp, Artificial
  Synthetic oligonucleotide
ctccagacgaattttcaccgtttatgatgcatgttacgccatcgaacaatatcgc

SEQ ID NO: 509047 - DNA, 55 bp, Artificial
  Synthetic oligonucleotide
ctccgattcgatatttccataagctacctagcgtagctccttttaaagccgcgcc

SEQ ID NO: 509048 - DNA, 55 bp, Artificial
  Synthetic oligonucleotide
ctccgtcaaagccgctagagaataggcatgcgaaccgccctagatgcaccactcc

SEQ ID NO: 509049 - DNA, 55 bp, Artificial
  Synthetic oligonucleotide
ctcgcgaaaatatagaacctaatgtgtcagctttacgtaagggattgcgttcttg

SEQ ID NO: 509050 - DNA, 55 bp, Artificial
  Synthetic oligonucleotide
ctcggtggttgggtgatgcagtgaggtcgtaacggtgccaacgtcgattcggccc

SEQ ID NO: 509051 - DNA, 55 bp, Artificial
  Synthetic oligonucleotide
ctctagccagccttgagcggaagtcggatggacgataacgaattccgggccatcg

SEQ ID NO: 509052 - DNA, 55 bp, Artificial
  Synthetic oligonucleotide
ctctatagcaacaggataacgcataaacttctcctacaatccggcttgcttacgg

SEQ ID NO: 509053 - DNA, 55 bp, Artificial
  Synthetic oligonucleotide
ctctcgctgtacgagcgattgtacgatccttgaacgaacacctcgatttcgtcag

SEQ ID NO: 509054 - DNA, 55 bp, Artificial
  Synthetic oligonucleotide
ctcttgcaaggatcattgggatcacgcttaaagcaaatcgctatagccgatagtc

SEQ ID NO: 509055 - DNA, 55 bp, Artificial
  Synthetic oligonucleotide
ctgacctgcaatgacgcgagccgacggttaggcgatgacccgccgaagtatctcg

SEQ ID NO: 509056 - DNA, 55 bp, Artificial
  Synthetic oligonucleotide
ctgatcggacatctgcctccgaaacagcctcacctggagcgtctactagacacat

SEQ ID NO: 509057 - DNA, 55 bp, Artificial
  Synthetic oligonucleotide
ctgcccgtgccttgccacgcagtttcgcgcatacgcaagggcatttgcgctagtg

SEQ ID NO: 509058 - DNA, 55 bp, Artificial
  Synthetic oligonucleotide
ctggcgacacatagagtgcctccacagcttcttgggatgatactgcctaacggct

SEQ ID NO: 509059 - DNA, 55 bp, Artificial
  Synthetic oligonucleotide
ctgggacgctaatcctgacataatcggaaacttgttgcgacggagcgaaccatcc

SEQ ID NO: 509060 - DNA, 55 bp, Artificial
  Synthetic oligonucleotide
cctgagcttccgacggtaagccgtttggaaaggagggctatttgccacgtatcga

SEQ ID NO: 509061 - DNA, 55 bp, Artificial
  Synthetic oligonucleotide
cctgcacctcgtcattatcaccaaccgcctgagcatttgcatgagcgagaatctg

SEQ ID NO: 509062 - DNA, 55 bp, Artificial
  Synthetic oligonucleotide
cctttctgttctggagtcgtcttagcagcttttggcgtcgccggggagaggggct

SEQ ID NO: 509063 - DNA, 55 bp, Artificial
  Synthetic oligonucleotide
cgacctgttctaaagtcagccatccgaaacagcatctttagcaaacgaaccgctt

SEQ ID NO: 509064 - DNA, 55 bp, Artificial
  Synthetic oligonucleotide
cgatagctccacgggccgggctgcccctcaagagacccaagaaacgtcggggacc

SEQ ID NO: 509065 - DNA, 55 bp, Artificial
  Synthetic oligonucleotide
cgatcgcaaactgatgcatcggatcgattttgccggattctgccacgtggacccc

SEQ ID NO: 509066 - DNA, 55 bp, Artificial
  Synthetic oligonucleotide
cgatgtgtcgcatagaataactaaggcagggcgctctctataaaatcatggacgc

SEQ ID NO: 509067 - DNA, 55 bp, Artificial
  Synthetic oligonucleotide
cgcagtgcagccggcctcccaacgtctgcccatacatttgcgcttgcattcatgg

SEQ ID NO: 509068 - DNA, 55 bp, Artificial
  Synthetic oligonucleotide
cgccagccgagaagcaaccgggtaaatccggtacgacaataccaaaagccgtaga

SEQ ID NO: 509069 - DNA, 55 bp, Artificial
  Synthetic oligonucleotide
cgccggcccgaactttgcgccccaacaggggaaggagatcggatgcctatcgttt

SEQ ID NO: 509070 - DNA, 55 bp, Artificial
  Synthetic oligonucleotide
cgcgatcaaccaaagcctgcggtaaattcaaccctctgttttgacgcgcgctcta

SEQ ID NO: 509071 - DNA, 55 bp, Artificial
  Synthetic oligonucleotide
cgcggcgacaatagatgaacgatctaggtctgttacctgaggagcgccatcaata

SEQ ID NO: 509072 - DNA, 55 bp, Artificial
  Synthetic oligonucleotide
cgcgtcgcgcaattggggcacaccaggatcattctgcttcataggcatggcaggg

SEQ ID NO: 509073 - DNA, 55 bp, Artificial
  Synthetic oligonucleotide
cgctatcgacgccttaagcgcaccttatcgacaccttatcgacggtagaacgggg

SEQ ID NO: 509074 - DNA, 55 bp, Artificial
  Synthetic oligonucleotide
cgctcagcacgagatagatggtgaaccgaatggcatcccctgcgaccggccgact

SEQ ID NO: 509075 - DNA, 55 bp, Artificial
  Synthetic oligonucleotide
cgggcaagtgagggaacccttaaaggcgcttgcgatgatgtaacgttcaggttac

SEQ ID NO: 509076 - DNA, 55 bp, Artificial
  Synthetic oligonucleotide
cgggacccggctaagggatcagcatggctttgctctgccttatcggtcgtcacag

SEQ ID NO: 509077 - DNA, 55 bp, Artificial
  Synthetic oligonucleotide
cggctcggacgtttcacctgatccctgattctcccatcatttcttccacctcgtc

SEQ ID NO: 509078 - DNA, 55 bp, Artificial
  Synthetic oligonucleotide
cggctaggcggattgtgacctagtgccaattctcgaagaagggttgatactggca

SEQ ID NO: 509079 - DNA, 55 bp, Artificial
  Synthetic oligonucleotide
cggcgcgattgggaggagggcattgtgaagtttccacacgcatatttgcaaaacc

SEQ ID NO: 509080 - DNA, 55 bp, Artificial
  Synthetic oligonucleotide
cggccttgcaaaatcggcatctacggtcgccaacatcctgcgtaattcgcctacg

SEQ ID NO: 509081 - DNA, 55 bp, Artificial
  Synthetic oligonucleotide
cggcctcagattcatccccggcaagcactccatcaaaatcaaatgcgattcttag

SEQ ID NO: 509082 - DNA, 55 bp, Artificial
  Synthetic oligonucleotide
cggccttatcgtttgacgacctgtcaaagccggatagccagacgcggggcaagcc

SEQ ID NO: 509083 - DNA, 54 bp, Artificial
  Synthetic oligonucleotide
gtgtccgagaacgaggattgtcatggtcgcgtctccaaaagtcatgatccgttg

SEQ ID NO: 509084 - DNA, 54 bp, Artificial
  Synthetic oligonucleotide
ataagtttacgcagtcgaacacgacgcgttatctgcagggagagacccatgcgt

SEQ ID NO: 509085 - DNA, 53 bp, Artificial
  Synthetic oligonucleotide
tcataagaatttctatgaacggggtctaatggcttcaatctgatttctgcacg

SEQ ID NO: 509086 - DNA, 53 bp, Artificial
  Synthetic oligonucleotide
acgcgctagcctcggacttcgaggtggcacatgagccgaatacgttacggtgt

SEQ ID NO: 509087 - DNA, 53 bp, Artificial
  Synthetic oligonucleotide
tcacaaagactggaacaagctgtcgcccgttaccatgccaatgcactcacatc

SEQ ID NO: 509088 - DNA, 53 bp, Artificial
  Synthetic oligonucleotide
gtcgatatgtaaatgaaacgaggtcatcggtcataaagaccctggctcccacc

SEQ ID NO: 509089 - DNA, 53 bp, Artificial
  Synthetic oligonucleotide
gctgctatcaaagtcgctcactggaaacctcccaataggacaggtcagctttc

SEQ ID NO: 509090 - DNA, 53 bp, Artificial
  Synthetic oligonucleotide
aagggtttcgggtccaccctcatcgagcggtcgcttcgatcatatttccgggg

SEQ ID NO: 509091 - DNA, 53 bp, Artificial
  Synthetic oligonucleotide
tactctcgcccgtccggaaaagcttgtatcgctccgacaccgcacgcatttct

SEQ ID NO: 509092 - DNA, 53 bp, Artificial
  Synthetic oligonucleotide
gaaacttcgcagcacccactcgcactccagtgttacggtcagcggcacgagag

SEQ ID NO: 509093 - DNA, 53 bp, Artificial
  Synthetic oligonucleotide
tgcgtttaatcgtccgtaaagcaacataggaagccctatactttcttcgccta

SEQ ID NO: 509094 - DNA, 53 bp, Artificial
  Synthetic oligonucleotide
atagccgttatagctgcgggcggtacggaagatcgtgtcgagggcaacgtcgt

SEQ ID NO: 509095 - DNA, 53 bp, Artificial
  Synthetic oligonucleotide
atgcggcgggtttaatcaacgatccgcaggaattggcattgggaaaattccgg

SEQ ID NO: 509096 - DNA, 53 bp, Artificial
  Synthetic oligonucleotide
cctggtccaatttaccctgcattccgcctgtgtagcacatctctgtacttacc

SEQ ID NO: 509097 - DNA, 52 bp, Artificial
  Synthetic oligonucleotide
gtatgcgtggctcgacactggcacccctgatagcctgctcgacgcagctgaa

SEQ ID NO: 509098 - DNA, 52 bp, Artificial
  Synthetic oligonucleotide
acgatccgccgcacgctaggggtttacccgatgagaagcagtttgtcgctgc

SEQ ID NO: 509099 - DNA, 52 bp, Artificial
  Synthetic oligonucleotide
catagaggtaatctttttaaaaccctcgttgaccttgacctgactgataact

SEQ ID NO: 509100 - DNA, 52 bp, Artificial
  Synthetic oligonucleotide
ttggccatggtccctgttttcctttgtgatggggctctgaatccgttttccc

SEQ ID NO: 509101 - DNA, 52 bp, Artificial
  Synthetic oligonucleotide
tccattacgtgctaccatcttaccagattcttctacagctccattaccttca

SEQ ID NO: 509102 - DNA, 52 bp, Artificial
  Synthetic oligonucleotide
cgcgtgtgtgggttgtcataatgtacctcggacattgggctgacatcaactg

SEQ ID NO: 509103 - DNA, 52 bp, Artificial
  Synthetic oligonucleotide
ggttttaatcaacagatcggctatttcgtttggggaaagaggcatcatgtgg

SEQ ID NO: 509104 - DNA, 52 bp, Artificial
  Synthetic oligonucleotide
gcacacgctaccgaaagcggcatcgccgttctaacgacttgtctgaatcacc

SEQ ID NO: 509105 - DNA, 52 bp, Artificial
  Synthetic oligonucleotide
taccctctccatggcgtgaagactttatgacgtaaaggttacattcgcccga

SEQ ID NO: 509106 - DNA, 52 bp, Artificial
  Synthetic oligonucleotide
tataagagcttgatcacctcgagacgggatacccagtctattctgaaacccc

SEQ ID NO: 509107 - DNA, 52 bp, Artificial
  Synthetic oligonucleotide
tcaagtggcgcagagatcggcgcaatcgcgacaagcgggactgaggcatgat

SEQ ID NO: 509108 - DNA, 52 bp, Artificial
  Synthetic oligonucleotide
tccaattccgccggctggtgcttgctctatctggatcgccttggtcccgacg

SEQ ID NO: 509109 - DNA, 52 bp, Artificial
  Synthetic oligonucleotide
cgcatggaaccagttccaaacctatcgcagccttatttcctccctgttccgt

SEQ ID NO: 509110 - DNA, 51 bp, Artificial
  Synthetic oligonucleotide
ctacgaacgccagccagtagatgttctgcgcatggtcaaacagacgagtgc

SEQ ID NO: 509111 - DNA, 51 bp, Artificial
  Synthetic oligonucleotide
gctactttcgacggtccgcttggacacagtcgccacttcttcgataattgg

SEQ ID NO: 509112 - DNA, 51 bp, Artificial
  Synthetic oligonucleotide
ccgaacccatttacatgtctctcccttgcggagaacccggccgccacacaa

SEQ ID NO: 509113 - DNA, 51 bp, Artificial
  Synthetic oligonucleotide
agcatttccaagcgcacgctcgaaagccagctgagcgaacagacgatgaga

SEQ ID NO: 509114 - DNA, 51 bp, Artificial
  Synthetic oligonucleotide
tgcgcattgcagcagagaattatgtaaacctccaactggatcaataatcgg

SEQ ID NO: 509115 - DNA, 51 bp, Artificial
  Synthetic oligonucleotide
ggggacgtccaacccgttccgatttctcgatcacagcggatacgtcgaata

SEQ ID NO: 509116 - DNA, 51 bp, Artificial
  Synthetic oligonucleotide
agcattggctgtacgatagcgatcagcccggcatctataacggcgcgggcc

SEQ ID NO: 509117 - DNA, 51 bp, Artificial
  Synthetic oligonucleotide
gaacactcgagcggcatcggagcatccacctccgacggcacttacgaacgg

SEQ ID NO: 509118 - DNA, 51 bp, Artificial
  Synthetic oligonucleotide
accttgcggcatcggtgggacaattgttcctggcctcagctcccggcgaaa

SEQ ID NO: 509119 - DNA, 51 bp, Artificial
  Synthetic oligonucleotide
ccagacgggttatgcggcttctatggagcctctagggctggccagaggcgt

SEQ ID NO: 509120 - DNA, 51 bp, Artificial
  Synthetic oligonucleotide
cggtctgctcatcgattatcgcggcattttagcagagctagacaccacact

SEQ ID NO: 509121 - DNA, 50 bp, Artificial
  Synthetic oligonucleotide
tcggcaaaatgagctgaggtcgtgaaggttttctggccatccaggatcca

SEQ ID NO: 509122 - DNA, 50 bp, Artificial
  Synthetic oligonucleotide
tattcgcgctagaacaatcagaaacctcaccccttgtcagttcgaaaact

SEQ ID NO: 509123 - DNA, 50 bp, Artificial
  Synthetic oligonucleotide
ggagaatgcggactatgcggcagttcagttctatccgagcgtgtcctatc

SEQ ID NO: 509124 - DNA, 50 bp, Artificial
  Synthetic oligonucleotide
ctcatctttagcataatcgaaagatagcggaatcgttttggtctcggcca

SEQ ID NO: 509125 - DNA, 60 bp, Artificial
  Synthetic oligonucleotide
gactcaaaaaagggatattaggttgaaattttatggagtattaatggctacaggtcgacg

SEQ ID NO: 509126 - DNA, 60 bp, Artificial
  Synthetic oligonucleotide
gacgtattttcattatcatatttatgtagctagcatagcatagctacataaatatgcgta

SEQ ID NO: 509127 - DNA, 60 bp, Artificial
  Synthetic oligonucleotide
gacctatataccttcatatgaaacagaaaagtacttaccaggagaagttgttcctattag

SEQ ID NO: 509128 - DNA, 60 bp, Artificial
  Synthetic oligonucleotide
gacatatagtacaaatttagtagttttttatataaaatagtcgtggtatatcacatattc

SEQ ID NO: 509129 - DNA, 60 bp, Artificial
  Synthetic oligonucleotide
gacagggcataagctcatcatttgtgtctatggttagtaactagtactcggggggggata

SEQ ID NO: 509130 - DNA, 60 bp, Artificial
  Synthetic oligonucleotide
gacagataatattgtttatagagtaggaaagaatgtatttgcgttaaattcaggtaaacg

SEQ ID NO: 509131 - DNA, 60 bp, Artificial
  Synthetic oligonucleotide
gacaattatttactatttacactagctgttacttcactggatttgtcttcttgtctcacc

SEQ ID NO: 509132 - DNA, 60 bp, Artificial
  Synthetic oligonucleotide
gaatctgtgccgctccaccagtctttaaaaccttgtacgatacttgatgttaatttggaa

SEQ ID NO: 509133 - DNA, 60 bp, Artificial
  Synthetic oligonucleotide
gaagtccctacccctgatcttatttggagaggattaataggggtgttggggactattggt

SEQ ID NO: 509134 - DNA, 60 bp, Artificial
  Synthetic oligonucleotide
gaaaagagaagggaatcctaatgctgttggagtagagagtgcagtaaagaaattggttag

SEQ ID NO: 509135 - DNA, 60 bp, Artificial
  Synthetic oligonucleotide
ctttgaggctaaatgaagttccaaatcaacactaaagtcgccactgggataatcagtgct

SEQ ID NO: 509136 - DNA, 60 bp, Artificial
  Synthetic oligonucleotide
ctttatccccttcgcaatccccttaacactgtccgcatcagctacagcaccctgattagc

SEQ ID NO: 509137 - DNA, 60 bp, Artificial
  Synthetic oligonucleotide
cttccaatgttagcaagacacaaaaaataaaacgaatacaactatgacgaatacaactat

SEQ ID NO: 509138 - DNA, 60 bp, Artificial
  Synthetic oligonucleotide
cttatctcccccttattgctaaacatttttacggtatacttactagagttgtagtagtat

SEQ ID NO: 509139 - DNA, 60 bp, Artificial
  Synthetic oligonucleotide
cttagaatttcctattacatcaccattagcaccactagctgcttccttagctcctgaagc

SEQ ID NO: 509140 - DNA, 60 bp, Artificial
  Synthetic oligonucleotide
cttaagaataggcatctttatggttaagataccaataattttatattaggcaactcacag

SEQ ID NO: 509141 - DNA, 60 bp, Artificial
  Synthetic oligonucleotide
ctcttttaatcctacatccactgtattccttattcctattgtcaatgtactcaatacctt

SEQ ID NO: 509142 - DNA, 60 bp, Artificial
  Synthetic oligonucleotide
gctcatagcgcgttaatctataaagctaatataaaaagttataatatgttaagtccatta

SEQ ID NO: 509143 - DNA, 60 bp, Artificial
  Synthetic oligonucleotide
gctcaatttacctttcactatcttcattgtattctcaatcttagtaaaatatgccccaat

SEQ ID NO: 509144 - DNA, 60 bp, Artificial
  Synthetic oligonucleotide
gctatcaggaatacagtagatttgggattaaaagagataaataaggtattgggagagatt

SEQ ID NO: 509145 - DNA, 60 bp, Artificial
  Synthetic oligonucleotide
gctacttaagaagtatttgtgatacttgctctatgtatgatcatttatcatccgcacaaa

SEQ ID NO: 509146 - DNA, 60 bp, Artificial
  Synthetic oligonucleotide
gctaccgctccattcactgcattaggatattttacatctccattcttagctgcaaatctc

SEQ ID NO: 509147 - DNA, 60 bp, Artificial
  Synthetic oligonucleotide
gcgtttttaaataatggtaataaagaattccaatcaacacgatcccccctacaacttttc

SEQ ID NO: 509148 - DNA, 60 bp, Artificial
  Synthetic oligonucleotide
gccttctgtgagttgcctaatataaaattattggtatcttgaccataaagatgcctattc

SEQ ID NO: 509149 - DNA, 60 bp, Artificial
  Synthetic oligonucleotide
gccttcaatatatcagcccctcttactgctcctattgtagcactcaccgctgccgctact

SEQ ID NO: 509150 - DNA, 60 bp, Artificial
  Synthetic oligonucleotide
gcctaatgaggtcatcataccttgaatgaatggccaaatacatgttaaaattattcctac

SEQ ID NO: 509151 - DNA, 60 bp, Artificial
  Synthetic oligonucleotide
gcccatgcatctgcctttgatacttcttcagcaagtttaggagcagccccctgatcagct

SEQ ID NO: 509152 - DNA, 60 bp, Artificial
  Synthetic oligonucleotide
gccatttatttttgctcgataattagcttcatattgggaatttccaaagaaagttccttt

SEQ ID NO: 509153 - DNA, 60 bp, Artificial
  Synthetic oligonucleotide
gccattattattaataaaccagccatcaattgttgagcccactaaagtttgtgaattacc

SEQ ID NO: 509154 - DNA, 60 bp, Artificial
  Synthetic oligonucleotide
gcaagaactggtggaaatgatactgctggtgaggcaggaaagttatttaatgctgttaac

SEQ ID NO: 509155 - DNA, 60 bp, Artificial
  Synthetic oligonucleotide
gattacggggacgttggggataaaggctgatacaaagaagagtgagataggtggatattt

SEQ ID NO: 509156 - DNA, 60 bp, Artificial
  Synthetic oligonucleotide
gatggcaaaaaacttaggccttgattaaaaattcttacaagaatgcttaatccaagccta

SEQ ID NO: 509157 - DNA, 60 bp, Artificial
  Synthetic oligonucleotide
gagatatagtagtagtacttttgttagatcatgattgatctaccttagtatgctcatctt

SEQ ID NO: 509158 - DNA, 60 bp, Artificial
  Synthetic oligonucleotide
gagaagcagttaagggaataaaatactctgagaatagtggagttgattctactaaatctg

SEQ ID NO: 509159 - DNA, 60 bp, Artificial
  Synthetic oligonucleotide
cctcctgttgctttcaatgtagtagatcctacttttaattcttttacacccaccccttta

SEQ ID NO: 509160 - DNA, 60 bp, Artificial
  Synthetic oligonucleotide
cctcctaatgcaaaccttaatgtacttgttgaagcatctgcgtcattcccacctaatgct

SEQ ID NO: 509161 - DNA, 60 bp, Artificial
  Synthetic oligonucleotide
cctccaatatcaataagttatagttttgttttgtttgaattgtaatctcatagtcatccg

SEQ ID NO: 509162 - DNA, 60 bp, Artificial
  Synthetic oligonucleotide
cctaatacctcactaatcccttttaagccttcatctactctattcctgattgctatcacc

SEQ ID NO: 509163 - DNA, 60 bp, Artificial
  Synthetic oligonucleotide
cctaataataacgctagtgctgaagcaaataaaacagtagcaggggcagcaacaagcgca

SEQ ID NO: 509164 - DNA, 60 bp, Artificial
  Synthetic oligonucleotide
cctaaagctattttttaatctatgctctttgtatggtaacgtttcttcgctaaatgaatg

SEQ ID NO: 509165 - DNA, 60 bp, Artificial
  Synthetic oligonucleotide
cccatcctttatcccttgtacagtctcctgaactttcttaaagtaattccctacatccga

SEQ ID NO: 509166 - DNA, 60 bp, Artificial
  Synthetic oligonucleotide
ccactcctataagattttatctaaatgaaaagacaacaaaacttgtaaaacgctgcatca

SEQ ID NO: 509167 - DNA, 60 bp, Artificial
  Synthetic oligonucleotide
ccaaggtaagcaagttgttgttcattgatctatgagacatgagtattataaggataaaca

SEQ ID NO: 509168 - DNA, 60 bp, Artificial
  Synthetic oligonucleotide
catcaattaaaggaggggttggcaaaagtacgaccagtcttatattttcaactttgttgg

SEQ ID NO: 509169 - DNA, 60 bp, Artificial
  Synthetic oligonucleotide
cagtgtcccagtcaataggggcactgatactatttgcaaacgctatattgctaagaaaga

SEQ ID NO: 509170 - DNA, 60 bp, Artificial
  Synthetic oligonucleotide
cagcaaactccaccgcactctgtatcttctccccaatcacctttaaatcaattacactcc

SEQ ID NO: 509171 - DNA, 60 bp, Artificial
  Synthetic oligonucleotide
cactcatatttttcattaagagaatataaactcatataactaggtattatatccaaatta

SEQ ID NO: 509172 - DNA, 60 bp, Artificial
  Synthetic oligonucleotide
cacctaccttttcactatcacctatttcctttaatgactctaaatactcctctaatttac

SEQ ID NO: 509173 - DNA, 60 bp, Artificial
  Synthetic oligonucleotide
cacccaacaagttattaaaggtttagaattttttgttccaacactaaattctgataataa

SEQ ID NO: 509174 - DNA, 60 bp, Artificial
  Synthetic oligonucleotide
caattggtgctggtgttactcttacaagctcattttgaccaaattcactagtaataagtc

SEQ ID NO: 509175 - DNA, 60 bp, Artificial
  Synthetic oligonucleotide
caattcaaacatttgttgcaaacaacagactcatataatgataaaatgaagggagctaac

SEQ ID NO: 509176 - DNA, 60 bp, Artificial
  Synthetic oligonucleotide
ctcagctatataagaagtcgatttttgattattatccggagagtagatctgtcttagaac

SEQ ID NO: 509177 - DNA, 60 bp, Artificial
  Synthetic oligonucleotide
ctcaatacaattgccaaaaaatattaaagtcaatttaccaaaaagtaacaaggatcttca

SEQ ID NO: 509178 - DNA, 60 bp, Artificial
  Synthetic oligonucleotide
ctcaactaatgaactcaaggctattcatccactcagcgcacctactaaaactgcatcttg

SEQ ID NO: 509179 - DNA, 60 bp, Artificial
  Synthetic oligonucleotide
ctatattgttaggtgtgcgttttattgagataagatagtatttggatttatcacgagggg

SEQ ID NO: 509180 - DNA, 60 bp, Artificial
  Synthetic oligonucleotide
ctacctatgatttctgtgaaatttaggtagatatgaatttgttagtaaatggatttattt

SEQ ID NO: 509181 - DNA, 60 bp, Artificial
  Synthetic oligonucleotide
ctaccataaacacctgggagtaaattgtggaactgaaatttactacaaacttaattaccc

SEQ ID NO: 509182 - DNA, 60 bp, Artificial
  Synthetic oligonucleotide
ctaatagcatcaagaaatatgtatgagttttaaatgataaaccatttagtagtttatcag

SEQ ID NO: 509183 - DNA, 60 bp, Artificial
  Synthetic oligonucleotide
ctaagatggttgagttttcaaatagcaatgttttggcaacaagtcttcatgcatttagag

SEQ ID NO: 509184 - DNA, 60 bp, Artificial
  Synthetic oligonucleotide
ctaagaaagaatacttactacttattggcaaaaaccccgtaaatctatctgatattgctc

SEQ ID NO: 509185 - DNA, 60 bp, Artificial
  Synthetic oligonucleotide
cgttgccacaatacctgacagtaacaacttgagtttactaatatcatttgcctccaatat

SEQ ID NO: 509186 - DNA, 60 bp, Artificial
  Synthetic oligonucleotide
cgtgcatcagagcatagtgcacaatcaagtagtattaaaagccggcttcatatgactaga

SEQ ID NO: 509187 - DNA, 60 bp, Artificial
  Synthetic oligonucleotide
cgatataatttacatctactcataaagttacacgattttccgacaactggaaaaatcgtt

SEQ ID NO: 509188 - DNA, 60 bp, Artificial
  Synthetic oligonucleotide
cgagaattctggcgtaaacattaaaaaagggaaagatggtactgaagttgctggtggaga

SEQ ID NO: 509189 - DNA, 60 bp, Artificial
  Synthetic oligonucleotide
ccttgatttagaaatagtagttagcttgttggatacatttggcttaattacaatcaatac

SEQ ID NO: 509190 - DNA, 60 bp, Artificial
  Synthetic oligonucleotide
ccttcaatcttacttatctccccaataaattcctctaccttacctttcaccttttcataa

SEQ ID NO: 509191 - DNA, 60 bp, Artificial
  Synthetic oligonucleotide
cctgcaatcatatcgccaaaactcacaaatacatctaaaaatcctctccctaaatttacc

SEQ ID NO: 509192 - DNA, 60 bp, Artificial
  Synthetic oligonucleotide
ttaaaaatagagcctccttcaccttttagtagtgttgacacttctgaaatagcatcatta

SEQ ID NO: 509193 - DNA, 60 bp, Artificial
  Synthetic oligonucleotide
tgtagcaaaaactcaagcgtataagtatttaagattagcaactgcactgcaagaggggct

SEQ ID NO: 509194 - DNA, 60 bp, Artificial
  Synthetic oligonucleotide
tggtaaagcactcccaaacccaacaaaaatctcctgaaacccttctccgatcgcaattaa

SEQ ID NO: 509195 - DNA, 60 bp, Artificial
  Synthetic oligonucleotide
tggactatctcatgcaagtaaaattcaagcgtatgagtgcataaaaaatagtattgcctt

SEQ ID NO: 509196 - DNA, 60 bp, Artificial
  Synthetic oligonucleotide
tgctttagtagtaagtgattgtgctataattccaatgatagcagaaaagtgggctgttga

SEQ ID NO: 509197 - DNA, 60 bp, Artificial
  Synthetic oligonucleotide
tgcctttactttttcaacttctgcctctgccttaatgcgttctccttctaaaacctcaag

SEQ ID NO: 509198 - DNA, 60 bp, Artificial
  Synthetic oligonucleotide
tgccatgattttgtgaaaaacctaaaatagaatcccactggtaaacaggaagtactttta

SEQ ID NO: 509199 - DNA, 60 bp, Artificial
  Synthetic oligonucleotide
tgatggcaatcaggaatacagtggatttaggattgaaagagataaataaggtattaggag

SEQ ID NO: 509200 - DNA, 60 bp, Artificial
  Synthetic oligonucleotide
tgatcttgcaaagtagaactacgatctcctaccaataatcgtaaaatatgcaatacatcc

SEQ ID NO: 509201 - DNA, 60 bp, Artificial
  Synthetic oligonucleotide
tgactttttaagagatatgaaaaccctaaggatgaacttgccggggattgataaaaatct

SEQ ID NO: 509202 - DNA, 60 bp, Artificial
  Synthetic oligonucleotide
tcttttatagtgtctcagtgttcttcaaaaaaattagcggaaatttctaaaaattttgtt

SEQ ID NO: 509203 - DNA, 60 bp, Artificial
  Synthetic oligonucleotide
tctgattattgattttaaacactagaaccaccactattctcagatgccacagaagtagca

SEQ ID NO: 509204 - DNA, 60 bp, Artificial
  Synthetic oligonucleotide
tctatactattaatatctgtagtatttttactacgtaagtataatcagttcttaaatcca

SEQ ID NO: 509205 - DNA, 60 bp, Artificial
  Synthetic oligonucleotide
tccgacattctaaaaccaattgcatgctccctctcttttaacattcgaacaagtttgtcg

SEQ ID NO: 509206 - DNA, 60 bp, Artificial
  Synthetic oligonucleotide
tccctatatcgcttttcttagtatccgcctttattcccaatgtccctgtaatcatatcgc

SEQ ID NO: 509207 - DNA, 60 bp, Artificial
  Synthetic oligonucleotide
tccagcatcagtaaatcatagtttcgcttcacttgaattgtaatttcatggtcatctggg

SEQ ID NO: 509208 - DNA, 60 bp, Artificial
  Synthetic oligonucleotide
tcacaaaattatgataactcagactataaaatttaatagctcctaaaatacgtttaaatt

SEQ ID NO: 509209 - DNA, 60 bp, Artificial
  Synthetic oligonucleotide
ttttggcgatatgattacagggacattggggataaaggcggatacgaagaaaagtgagat

SEQ ID NO: 509210 - DNA, 60 bp, Artificial
  Synthetic oligonucleotide
ttttggagaattatacgaaaccttgcttgaatatgatcttagaattgcagatactaattt

SEQ ID NO: 509211 - DNA, 60 bp, Artificial
  Synthetic oligonucleotide
tttgctgcctgaatagtaggttcaccagaagtctcaccagaaacagaaattgcttttaat

SEQ ID NO: 509212 - DNA, 60 bp, Artificial
  Synthetic oligonucleotide
tttgatgatttttcttcacacttgtcttagcaacaaatttatcatcctttaccatccctc

SEQ ID NO: 509213 - DNA, 60 bp, Artificial
  Synthetic oligonucleotide
tttgaattatatactcctcactaagaatcccctcatctatagccgaggccatccttatat

SEQ ID NO: 509214 - DNA, 60 bp, Artificial
  Synthetic oligonucleotide
tttctgtgtctgttttggtaataaatgtgtcgtaatcgtaattttcaccggtttgcatat

SEQ ID NO: 509215 - DNA, 60 bp, Artificial
  Synthetic oligonucleotide
tttattgtgactaaatattttaatgatgacgtacggtgtagttcttgcaatagattaatt

SEQ ID NO: 509216 - DNA, 60 bp, Artificial
  Synthetic oligonucleotide
tttatggcagtctccaaatttagcaaggcgtttacgtatgttgaatcgttgttgctcagc

SEQ ID NO: 509217 - DNA, 60 bp, Artificial
  Synthetic oligonucleotide
tttaaatttggaaagtaagaaatcggatgtagggaagtattttaagacagtgcaggagac

SEQ ID NO: 509218 - DNA, 60 bp, Artificial
  Synthetic oligonucleotide
ttggagagagaaaccggtattcatgttaagaaaatgtgctgtaagttgtttatgtagaac

SEQ ID NO: 509219 - DNA, 60 bp, Artificial
  Synthetic oligonucleotide
ttggaaatgttggttctactaatgttgcaggtactgttggggatgttgacaaattagtaa

SEQ ID NO: 509220 - DNA, 60 bp, Artificial
  Synthetic oligonucleotide
ttgagtgagatggtaaatttaggtagaggatttttagatgtatttgtgagttttggcgat

SEQ ID NO: 509221 - DNA, 60 bp, Artificial
  Synthetic oligonucleotide
ttcagattatacacctcaatttagcagtattgcaacttctattggcttgtgtagcattat

SEQ ID NO: 509222 - DNA, 60 bp, Artificial
  Synthetic oligonucleotide
ttattaggaataataacgaagcaggatagtaaatggtaagactaaagcgactgccagtgt

SEQ ID NO: 509223 - DNA, 60 bp, Artificial
  Synthetic oligonucleotide
ttatgataatttggtttcaattcaaccaatgcaggattggttgaaaattgattttagaga

SEQ ID NO: 509224 - DNA, 60 bp, Artificial
  Synthetic oligonucleotide
ttagtgtcagatgtattgggatttattgcaaaagtgactacaaagaagaatgaagtaggt

SEQ ID NO: 509225 - DNA, 60 bp, Artificial
  Synthetic oligonucleotide
ttaattatttccacaagtgctatctgcactgcttttaaattatctaagccatctccaaag

SEQ ID NO: 509226 - DNA, 60 bp, Artificial
  Synthetic oligonucleotide
gtgtcatgatcatattggtattaacaataggttgcaatttaaaatctccacgacaggatg

SEQ ID NO: 509227 - DNA, 60 bp, Artificial
  Synthetic oligonucleotide
gtgctttgttttagtagcccctacatttccttcatccttttttagcaccacctcaactat

SEQ ID NO: 509228 - DNA, 60 bp, Artificial
  Synthetic oligonucleotide
gtgaaaactttttataatctttagttaaacattggcctcctggtattaaaagatgggctt

SEQ ID NO: 509229 - DNA, 60 bp, Artificial
  Synthetic oligonucleotide
gtctaatagaaatagaatctaattagactaaaggtccaaagctcgtttattaaacgaaat

SEQ ID NO: 509230 - DNA, 60 bp, Artificial
  Synthetic oligonucleotide
gtattctgattattactagtagtgctatcattttagaactacctgtactatgatcatttc

SEQ ID NO: 509231 - DNA, 60 bp, Artificial
  Synthetic oligonucleotide
gtatattctttctagttttcattttaaagacccatctatttgcaatgagagatgtctctc

SEQ ID NO: 509232 - DNA, 60 bp, Artificial
  Synthetic oligonucleotide
gtagtgtaattcgcattaaatcccaaagcacctgacattaactcaacaaataagtaaaaa

SEQ ID NO: 509233 - DNA, 60 bp, Artificial
  Synthetic oligonucleotide
gtaatataccaaaggtgtttctccccttaatctaaagttgttttaaggtgtataatgggg

SEQ ID NO: 509234 - DNA, 60 bp, Artificial
  Synthetic oligonucleotide
gtaataagtcctgcaccaggaataaatgttggccttgttgtctgaaacatagccccactg

SEQ ID NO: 509235 - DNA, 60 bp, Artificial
  Synthetic oligonucleotide
gtaaagtgcaaaacttcaaataaagtattaattagggattagttatggaaagtatattag

SEQ ID NO: 509236 - DNA, 60 bp, Artificial
  Synthetic oligonucleotide
ggttgtaaaagttggaggtaaaatgaaacacaattctaaaatcagttcttatgaattata

SEQ ID NO: 509237 - DNA, 60 bp, Artificial
  Synthetic oligonucleotide
ggtatcaggtagcttaggattgtgtgtcactacagatatgactaggggaatcaagtagga

SEQ ID NO: 509238 - DNA, 60 bp, Artificial
  Synthetic oligonucleotide
gggagagattaaggaaggagagggttctgaagctaaagttaaggctaattaataggtgaa

SEQ ID NO: 509239 - DNA, 60 bp, Artificial
  Synthetic oligonucleotide
ggcttagttaaaaactcttaacagaatccttaactaagccataatatctttatagcacaa

SEQ ID NO: 509240 - DNA, 60 bp, Artificial
  Synthetic oligonucleotide
ggaagattttagaagaacatggaagttatgaaaaggtgaaaggtaaggtagaggaattta

SEQ ID NO: 509241 - DNA, 60 bp, Artificial
  Synthetic oligonucleotide
gcttctctataatcaacatctaaccgttctaaaacacttttatacgaagctatagaagtt

SEQ ID NO: 509242 - DNA, 60 bp, Artificial
  Synthetic oligonucleotide
gctggtcctagtgttgctactgttgaatattctcctgcagttaaaggagcagcaacaagt

SEQ ID NO: 509243 - DNA, 60 bp, Artificial
  Synthetic oligonucleotide
tattcctgattgctatcaccaacgtacttaacaccttatttactgcacttgctaccgctc

SEQ ID NO: 509244 - DNA, 60 bp, Artificial
  Synthetic oligonucleotide
tatagccctaaaagatgtactttctaattcggggggagttatatcacagtaaacagcata

SEQ ID NO: 509245 - DNA, 60 bp, Artificial
  Synthetic oligonucleotide
tataataagaagttgtataaaattattgtagcgtatagtatagtgcagggttcatctttt

SEQ ID NO: 509246 - DNA, 60 bp, Artificial
  Synthetic oligonucleotide
tagtatagccaaggtaagcaagttgttgttcattgatctatgagacatgagtattataag

SEQ ID NO: 509247 - DNA, 60 bp, Artificial
  Synthetic oligonucleotide
taggaatacatgtattgttagtaataggacttgtaacacagtctctaagttcatggatga

SEQ ID NO: 509248 - DNA, 60 bp, Artificial
  Synthetic oligonucleotide
tagatcttgcagaacccaagctcaaaaaaaccgttaaagtattccttattgtaataatcc

SEQ ID NO: 509249 - DNA, 60 bp, Artificial
  Synthetic oligonucleotide
tactcagcaatagcactactcatataattagagtcgctacttttaatctctaatagttct

SEQ ID NO: 509250 - DNA, 60 bp, Artificial
  Synthetic oligonucleotide
tacgatgaaaagcaattagaaacagagatacaaaaagcgtatgagagatataaagacaag

SEQ ID NO: 509251 - DNA, 60 bp, Artificial
  Synthetic oligonucleotide
tacctaattcattaagatcacccttaagaacagcagcagaacgtaaaaacaattccttat

SEQ ID NO: 509252 - DNA, 60 bp, Artificial
  Synthetic oligonucleotide
taactaagctctaagacctattcaaaatgaacactttataggtagttcttacatcagaac

SEQ ID NO: 509253 - DNA, 60 bp, Artificial
  Synthetic oligonucleotide
taaatgaatgtaaacttaaataacttggtaataaatcaagttgggtatcaacattgataa

SEQ ID NO: 509254 - DNA, 60 bp, Artificial
  Synthetic oligonucleotide
taaaatgcatcccctgcacttcttcctacttccattaatacttcacttaaactcttagct

SEQ ID NO: 509255 - DNA, 60 bp, Artificial
  Synthetic oligonucleotide
gttttttagagtcattggtaaagataggagaaggatttcaggagatttttggtgtttttg

SEQ ID NO: 509256 - DNA, 60 bp, Artificial
  Synthetic oligonucleotide
gttatttttactaatccgatttgatttaagacataatatggttgaaagtgtttcagaatt

SEQ ID NO: 509257 - DNA, 60 bp, Artificial
  Synthetic oligonucleotide
gttatgtattctgattattgattttgactactagaaccactcttaccagatgctatagca

SEQ ID NO: 509258 - DNA, 60 bp, Artificial
  Synthetic oligonucleotide
gttataataaacaacacgtttgctatcctctgaaaccaactctcctttagcctcaaatct

SEQ ID NO: 509259 - DNA, 60 bp, Artificial
  Synthetic oligonucleotide
gttagtttaggttatatgaagattaattgttatattttaaatccatgtagaatcttaagt

SEQ ID NO: 509260 - DNA, 60 bp, Artificial
  Synthetic oligonucleotide
atgcacttgtgctgacatctacattggctgccactcctgtaacagcatcactttcttttg

SEQ ID NO: 509261 - DNA, 60 bp, Artificial
  Synthetic oligonucleotide
atgcagataatggaatatttgtactatacaatattaagatgttattatgtagtgaaataa

SEQ ID NO: 509262 - DNA, 60 bp, Artificial
  Synthetic oligonucleotide
atgttcttttaatataggtttcttgccactcctagtatatttttgattaccttcacttaa

SEQ ID NO: 509263 - DNA, 60 bp, Artificial
  Synthetic oligonucleotide
agactaaagcgactgccagtgtattacaatgcatatagagctaaacccgaagctgagatt

SEQ ID NO: 509264 - DNA, 60 bp, Artificial
  Synthetic oligonucleotide
atgtttactcgaggaaaaccattaggttatacgtctgaaaggcttcgtatgttccatgat

SEQ ID NO: 509265 - DNA, 60 bp, Artificial
  Synthetic oligonucleotide
acttcctacagtttacttgttatcataatcacaaatacgcttttgattaagcttattttg

SEQ ID NO: 509266 - DNA, 60 bp, Artificial
  Synthetic oligonucleotide
actaatttattaatacttgctacttctgcaggactcgcatcttaacctttcttagaattt

SEQ ID NO: 509267 - DNA, 60 bp, Artificial
  Synthetic oligonucleotide
actaagcttggttggggaccgggcaaagaaaaggtgtctgacaatactgagagatctata

SEQ ID NO: 509268 - DNA, 60 bp, Artificial
  Synthetic oligonucleotide
actaaatttaccactcttagtcattgccttcagagctaatgctgctgccaaatctgcatt

SEQ ID NO: 509269 - DNA, 60 bp, Artificial
  Synthetic oligonucleotide
actaaaatacgcgcttatctcactcttctttgtgtccgcctttatccccaatgtccctgc

SEQ ID NO: 509270 - DNA, 60 bp, Artificial
  Synthetic oligonucleotide
atgtttctatatgtggtgttaaacttattctttcgtgtacttttagtttatctgtacaag

SEQ ID NO: 509271 - DNA, 60 bp, Artificial
  Synthetic oligonucleotide
acctttaaggtggcgtaatatcatagacgattctataggcaagctatattacatgggagc

SEQ ID NO: 509272 - DNA, 60 bp, Artificial
  Synthetic oligonucleotide
accatccacgacagtcttattaacagcactctcaacagtactcttcaaacccttctctgc

SEQ ID NO: 509273 - DNA, 60 bp, Artificial
  Synthetic oligonucleotide
attatcaacacttaggaattaatatgggtactgcaatttattacaaacttcagtattcaa

SEQ ID NO: 509274 - DNA, 60 bp, Artificial
  Synthetic oligonucleotide
attgtatgcaaaatttaatgtgtaagacatttattttaatcagaagggctaatatttaag

SEQ ID NO: 509275 - DNA, 60 bp, Artificial
  Synthetic oligonucleotide
atttgctatgaaaaagacctatataccttcatatgaaacagaaaagtacttaccaggaga

SEQ ID NO: 509276 - DNA, 60 bp, Artificial
  Synthetic oligonucleotide
accagctgttgatccatatattatgaatacaatagtaataatgggaaatttaaatgttaa

SEQ ID NO: 509277 - DNA, 60 bp, Artificial
  Synthetic oligonucleotide
aattttgtgcggatgataaatgatcatacatagagcaagtatcacaaatacttcttaagt

SEQ ID NO: 509278 - DNA, 60 bp, Artificial
  Synthetic oligonucleotide
aattaaagctttatccaaaaatcttttcccatccacaatatagaaataagagtttgaaga

SEQ ID NO: 509279 - DNA, 60 bp, Artificial
  Synthetic oligonucleotide
aatagctggcagccctctttaactaactacatgagcaaccttatttgcttcacaaaaccc

SEQ ID NO: 509280 - DNA, 60 bp, Artificial
  Synthetic oligonucleotide
aatacattctttactgtcttctttatcatatctcccaccgctactaacaatttatttact

SEQ ID NO: 509281 - DNA, 60 bp, Artificial
  Synthetic oligonucleotide
aatacactcccatttttctacactcccattattagtgcatgttttttgatgatatgagtt

SEQ ID NO: 509282 - DNA, 60 bp, Artificial
  Synthetic oligonucleotide
aagtgtgctttaaattctactgattatataatagttccaatgacatctgaaaaatggact

SEQ ID NO: 509283 - DNA, 60 bp, Artificial
  Synthetic oligonucleotide
agtagcaactatgtaatatctccaatgacagcagaaaaatgggcagttgaaggatttgaa

SEQ ID NO: 509284 - DNA, 60 bp, Artificial
  Synthetic oligonucleotide
agtactgctttaagtggtattgaagatacgttagataatctagaagtaaaacctaaagta

SEQ ID NO: 509285 - DNA, 60 bp, Artificial
  Synthetic oligonucleotide
agtacctttaataacagtctcaaccgctgtaatatcagcatatgcagtagaagatatatc

SEQ ID NO: 509286 - DNA, 60 bp, Artificial
  Synthetic oligonucleotide
agtagtgccaatactaatctcttgttgaggaataaattcaagtccaaagtattcaagggg

SEQ ID NO: 509287 - DNA, 60 bp, Artificial
  Synthetic oligonucleotide
aggtggagcaaaggaagcaagtgaggcaataggagatgttaatgacctaattggaaatgt

SEQ ID NO: 509288 - DNA, 60 bp, Artificial
  Synthetic oligonucleotide
agttcaataatcctccttaacagcaaactttccatccttagccacccccctcaaaacaat

SEQ ID NO: 509289 - DNA, 60 bp, Artificial
  Synthetic oligonucleotide
aggtaagttttgatttgtgctaaagagtttatcttgataagcttcataatatgtgaataa

SEQ ID NO: 509290 - DNA, 60 bp, Artificial
  Synthetic oligonucleotide
agtttttgtattctggaattataaccacggcttcttgtgtctgcgaattaaaagatttga

SEQ ID NO: 509291 - DNA, 60 bp, Artificial
  Synthetic oligonucleotide
ataacagaaggaaatgggcaagcagataaaactaatcctcttgatgctgataaaaaggat

SEQ ID NO: 509292 - DNA, 60 bp, Artificial
  Synthetic oligonucleotide
agctagagaagctagtaaaattatacaaaaagcttctacctctttagaagaagctgagaa

SEQ ID NO: 509293 - DNA, 60 bp, Artificial
  Synthetic oligonucleotide
atacactcccatttttctacactcccatttttctttagactcccattattagtgcatgtt

SEQ ID NO: 509294 - DNA, 60 bp, Artificial
  Synthetic oligonucleotide
atacttttataatcccattctcttcgtatttcacagcaacattttttattggcttcctat

SEQ ID NO: 509295 - DNA, 60 bp, Artificial
  Synthetic oligonucleotide
agcagttcttgcagtagaaccatcactagccttcttatcattcccagcatcaacatttcc

SEQ ID NO: 509296 - DNA, 60 bp, Artificial
  Synthetic oligonucleotide
atagaatgagacaaaagccgtgaatatagagatagtagtttgatagcttttaaggccaca

SEQ ID NO: 509297 - DNA, 60 bp, Artificial
  Synthetic oligonucleotide
ataggagcagtaagtggagctgatatattgaaagcaattgctggagctaatgctagtgct

SEQ ID NO: 509298 - DNA, 60 bp, Artificial
  Synthetic oligonucleotide
agcaacaagttcagtaattaaggcattagatacattaacagtggcaataagaagtactat

SEQ ID NO: 509299 - DNA, 60 bp, Artificial
  Synthetic oligonucleotide
atatgataatacgctggacttaaaaaatcccctaaagaaactaactttgaatccctcttg

SEQ ID NO: 509300 - DNA, 60 bp, Artificial
  Synthetic oligonucleotide
atccactttattcctgattgctatcaccaacgtacttaacaccttatttactgcacttgc

SEQ ID NO: 509301 - DNA, 60 bp, Artificial
  Synthetic oligonucleotide
agatgactcggatgatcatgaaattgcaattcacgcaaaacgaaattgtaacttactggt

SEQ ID NO: 509302 - DNA, 60 bp, Artificial
  Synthetic oligonucleotide
atctactttagcagtaaatcccaatacatctgacattaactctataaatgaataaaatgc

SEQ ID NO: 509303 - DNA, 60 bp, Artificial
  Synthetic oligonucleotide
atctcctgtgcactttgcaagctctgattgaatgtgatcaagagcatcttttattttaga

SEQ ID NO: 509304 - DNA, 60 bp, Artificial
  Synthetic oligonucleotide
agagtattaatgatttagaattgcatgaaattgcaagacaattattgtacagctatccag

SEQ ID NO: 509305 - DNA, 60 bp, Artificial
  Synthetic oligonucleotide
aacatccaaaagtaacaattagtgaagaaactctaaataatgtgttaattcgtgcatcag

SEQ ID NO: 509306 - DNA, 60 bp, Artificial
  Synthetic oligonucleotide
caagatgcatttattagattatagtagtagttctgtatttagtgacatttattcatataa

SEQ ID NO: 509307 - DNA, 60 bp, Artificial
  Synthetic oligonucleotide
caataggagatgttaatgacctaattggaaatgttggttctactaatgttgcaggtactg

SEQ ID NO: 509308 - DNA, 60 bp, Artificial
  Synthetic oligonucleotide
aacgaggttaaggtactattgaaaagtttgctgtataaagctaatggtattggggaccac

SEQ ID NO: 509309 - DNA, 60 bp, Artificial
  Synthetic oligonucleotide
aaaatggaataatgaaaatgggtctaaaaatgttgtaaatacagtgccacaactggtagg

SEQ ID NO: 509310 - DNA, 60 bp, Artificial; identical to SEQ ID NO: 238895
  Synthetic oligonucleotide

SEQ ID NO: 509311 - DNA, 60 bp, Artificial
  Synthetic oligonucleotide
aacactgggtataaagactcctttgatacgccaatacttacagaaaatttaaaatggaat

SEQ ID NO: 509312 - DNA, 60 bp, Artificial
  Synthetic oligonucleotide
aacgtttctacaatacctaacaaaaccggcttgaatttactaatatcattattagcatcc

SEQ ID NO: 509313 - DNA, 60 bp, Artificial
  Synthetic oligonucleotide
aaaatgcttatcttgcaattaatagctggcagccctctttaactaactacatgagcaacc

SEQ ID NO: 509314 - DNA, 60 bp, Artificial
  Synthetic oligonucleotide
aacaagcgcattaactaaagcactagatacattaactatatcagtaagaagtacaattga

SEQ ID NO: 509315 - DNA, 60 bp, Artificial
  Synthetic oligonucleotide
aagagcaagatccagataaagataaaattttgatgcacaatgcaaaaggagagatgatat

SEQ ID NO: 509316 - DNA, 60 bp, Artificial
  Synthetic oligonucleotide
aaattagtaaagggaattaaggagatagtggaagtagtacttaaaggcgtagggaaagct

SEQ ID NO: 509317 - DNA, 60 bp, Artificial
  Synthetic oligonucleotide
aaattttgagcatgacgcacatcattagctttgttccaatagaataaacttgcctttact

SEQ ID NO: 509318 - DNA, 60 bp, Artificial
  Synthetic oligonucleotide
aaatttacctccctttgccatccctcttaatgctattcctgctgcaataactgcgtcctt

SEQ ID NO: 509319 - DNA, 60 bp, Artificial
  Synthetic oligonucleotide
caaggctaaatcttttctaagggttctgagtgtaattattttgagttcgtctttagctag

SEQ ID NO: 509320 - DNA, 60 bp, Artificial
  Synthetic oligonucleotide
aagcatctgggggtgctagtggtagtgatgctataggtaatactgttaaggatcaagatg

SEQ ID NO: 509321 - DNA, 60 bp, Artificial
  Synthetic oligonucleotide
aaaaaatcttgttgaagggataaaagaaattgttgctttggttctgacagaaggagatgg

SEQ ID NO: 509322 - DNA, 59 bp, Artificial
  Synthetic oligonucleotide
gtctaaaggtaagttccaaagagttaatttggcttgttttgaggccacatatttatagc

SEQ ID NO: 509323 - DNA, 59 bp, Artificial
  Synthetic oligonucleotide
ggagtgccattataagtttcaatgatatattcagggatatcttctgcaagattttcacc

SEQ ID NO: 509324 - DNA, 59 bp, Artificial
  Synthetic oligonucleotide
tgaagtgctgataatttactattttgtctattattcaagttccatattctgataagttc

SEQ ID NO: 509325 - DNA, 59 bp, Artificial
  Synthetic oligonucleotide
catgacacaacagacttaaaatcatatgctcacttcaaagatctttggttagaagaagc

SEQ ID NO: 509326 - DNA, 59 bp, Artificial
  Synthetic oligonucleotide
gtgtataccttttcatattgcgaactatggctaaattaatagcatccatcatacaaccc

SEQ ID NO: 509327 - DNA, 59 bp, Artificial
  Synthetic oligonucleotide
aaggcagaaaagaatcctaatttggaggctactgagagtgcagttaaaacattggttga

SEQ ID NO: 509328 - DNA, 59 bp, Artificial
  Synthetic oligonucleotide
tcgccgttattaagaggtgagcccatctctagtgatggtctgtctagtagtggtcaaat

SEQ ID NO: 509329 - DNA, 59 bp, Artificial
  Synthetic oligonucleotide
gcttgatatcaatttaagctggtgataataatggagctagggagtattacttctgcaag

SEQ ID NO: 509330 - DNA, 59 bp, Artificial
  Synthetic oligonucleotide
cctgcatcaatagtatctcttattgctattgtaagtgtatctaatgccttagttactgc

SEQ ID NO: 509331 - DNA, 59 bp, Artificial
  Synthetic oligonucleotide
ctattggggataccaattttgctgatggtatatctgatgctggatagcacctgctgaag

SEQ ID NO: 509332 - DNA, 59 bp, Artificial
  Synthetic oligonucleotide
caagatctaatccagatgacccagatgaccataaaattacaattcaagtgaaacgaaac

SEQ ID NO: 509333 - DNA, 59 bp, Artificial
  Synthetic oligonucleotide
ggattaagagagattaataaagtattaggagagattaagtagggagaaggttctaaggc

SEQ ID NO: 509334 - DNA, 59 bp, Artificial
  Synthetic oligonucleotide
agtagctaaaactcaagcgtatgcgtacttgagactagctaatgcattacacgatggta

SEQ ID NO: 509335 - DNA, 59 bp, Artificial
  Synthetic oligonucleotide
cccatctttactagaaaagcttatatatcggcttacctaaattaactatttcacctccc

SEQ ID NO: 509336 - DNA, 58 bp, Artificial
  Synthetic oligonucleotide
catgtatcctgtcatgatagtaacttgtcactgatgcttgagtatccatatcaatcaa

SEQ ID NO: 509337 - DNA, 58 bp, Artificial
  Synthetic oligonucleotide
gacgctctaatacactatccataacaaatccttagtcaacaatcttttcatactcctc

SEQ ID NO: 509338 - DNA, 58 bp, Artificial
  Synthetic oligonucleotide
catgtattgttagtaataggacttgtaacacagtctctaagttcatggatgagctttg

SEQ ID NO: 509339 - DNA, 58 bp, Artificial
  Synthetic oligonucleotide
gcgattctatctgcgtttatatgtaaaatgaatgagtctaaaatgttgtagagggagc

SEQ ID NO: 509340 - DNA, 58 bp, Artificial
  Synthetic oligonucleotide
tccaagcctaaagacttacaagcacgatcacattaaaggtagtcctaaaatgatagta

SEQ ID NO: 509341 - DNA, 58 bp, Artificial
  Synthetic oligonucleotide
gtggttatttgtggtaactacctataatgaactgtttggttgagaaccttttagtagg

SEQ ID NO: 509342 - DNA, 58 bp, Artificial
  Synthetic oligonucleotide
ctaatgctagtagtaaagtattactttcaagcgaagattatcagcttgaatttgcgcg

SEQ ID NO: 509343 - DNA, 58 bp, Artificial
  Synthetic oligonucleotide
gcattttctgggcacaaagaacaacagatgcatcaataatattatgtaagatgttggc

SEQ ID NO: 509344 - DNA, 58 bp, Artificial
  Synthetic oligonucleotide
ctacgacctgttgattctggatgctaataatgatattagtaaattcaagcgggttatg

SEQ ID NO: 509345 - DNA, 58 bp, Artificial
  Synthetic oligonucleotide
gagattgggatgagtggtaattccgttgaggaaattacgtataaaatgcatgtatttg

SEQ ID NO: 509346 - DNA, 58 bp, Artificial
  Synthetic oligonucleotide
ctagtaccgatactaagaaacatttaatgtcaactctaacagaattcgacgaaactcc

SEQ ID NO: 509347 - DNA, 58 bp, Artificial
  Synthetic oligonucleotide
aacatactaatagacaacctcaacaagttaataataactctagggaaactagtgaagc

SEQ ID NO: 509348 - DNA, 58 bp, Artificial
  Synthetic oligonucleotide
cagcagtagtgttatctttgatgtcagaatgaatcattttaagaagatcaagcctagc

SEQ ID NO: 509349 - DNA, 58 bp, Artificial
  Synthetic oligonucleotide
gaggtatggattcactggcaaatttgtgtaagcttaagtaacttggaattaagtctag

SEQ ID NO: 509350 - DNA, 58 bp, Artificial
  Synthetic oligonucleotide
ccattttgttcacttccatatctttcctaacagtatcaatcttgttatcaagctctgc

SEQ ID NO: 509351 - DNA, 58 bp, Artificial
  Synthetic oligonucleotide
ccactgtattccttattcctattgtcaatgtactcaataccttacttactacacttgc

SEQ ID NO: 509352 - DNA, 58 bp, Artificial
  Synthetic oligonucleotide
caccgacattagcattagcatcattattttcggctaacttagctgatttaccattatc

SEQ ID NO: 509353 - DNA, 57 bp, Artificial
  Synthetic oligonucleotide
cccatctttcttcatttcagcaacaattttattaagtccatcctttatcccttgcac

SEQ ID NO: 509354 - DNA, 57 bp, Artificial
  Synthetic oligonucleotide
cagtggatttaggattgaaagagataaataaggtattaggagagattaagcaagggg

SEQ ID NO: 509355 - DNA, 57 bp, Artificial
  Synthetic oligonucleotide
gtgaatttcagtaccgcaattctctcctaaatgtctgtaatagttactagttacgtg

SEQ ID NO: 509356 - DNA, 57 bp, Artificial
  Synthetic oligonucleotide
ggccctatataagctattccgtttgcagcaaataaatagggattggaattaaattcc

SEQ ID NO: 509357 - DNA, 57 bp, Artificial
  Synthetic oligonucleotide
gaccacattagtataaactcaaatattggctactataataggggctttatacgccac

SEQ ID NO: 509358 - DNA, 57 bp, Artificial
  Synthetic oligonucleotide
catgcttggatgtttggaaccattattactttaactatagggattttattaacgctg

SEQ ID NO: 509359 - DNA, 57 bp, Artificial
  Synthetic oligonucleotide
gcctttagttactaagcggcctatttaattaatgctaaccaacatctcttgaaacac

SEQ ID NO: 509360 - DNA, 57 bp, Artificial
  Synthetic oligonucleotide
ggaatagtgttaaagaaagatgagggtgatgcaggagctactaaaacaggggatgat

SEQ ID NO: 509361 - DNA, 57 bp, Artificial
  Synthetic oligonucleotide
ctccaatttacctttaactacattaactgcttctccaacattacctaagtgttctcc

SEQ ID NO: 509362 - DNA, 57 bp, Artificial
  Synthetic oligonucleotide
ggtactattgaaaagtttgctgtataaagctaatggtattggggaccacctaaagca

SEQ ID NO: 509363 - DNA, 57 bp, Artificial
  Synthetic oligonucleotide
cctactatagttctatctttgggagctgtagtaacattaccggttgtttctttggct

SEQ ID NO: 509364 - DNA, 57 bp, Artificial
  Synthetic oligonucleotide
cctattccagctgaagatatcttgcttatagcagaagttaaaagtcctacttttagc

SEQ ID NO: 509365 - DNA, 57 bp, Artificial
  Synthetic oligonucleotide
gccaactcatatcatcaacaaacatgcactaataatggaagtctaaagaacaatggg

SEQ ID NO: 509366 - DNA, 57 bp, Artificial
  Synthetic oligonucleotide
cttattcgaatgaaccgaattcaggtagttttaatatgaaaaactactagtgataac

SEQ ID NO: 509367 - DNA, 57 bp, Artificial
  Synthetic oligonucleotide
tggttagtgagacacttgataagataatagatggagcaaagacagcaagtgaggcaa

SEQ ID NO: 509368 - DNA, 57 bp, Artificial
  Synthetic oligonucleotide
cttatctaaccccttctagtctttggaatgaatttagttctagagcgctaagaaatc

SEQ ID NO: 509369 - DNA, 57 bp, Artificial
  Synthetic oligonucleotide
cttcccctttaatttcataacatcctccaatttatccactttatccgtttaacggac

SEQ ID NO: 509370 - DNA, 57 bp, Artificial
  Synthetic oligonucleotide
gaaggttttactagatatgttaagaatattggcaaatggggtagaggggatattcag

SEQ ID NO: 509371 - DNA, 56 bp, Artificial
  Synthetic oligonucleotide
gctcgataattagcttcatattgggaatttccaaagaaagttccttttatgcctcc

SEQ ID NO: 509372 - DNA, 56 bp, Artificial
  Synthetic oligonucleotide
cgttccatataaagacctcgcactaaggaaagaattttaccttgctcttgaatatg

SEQ ID NO: 509373 - DNA, 56 bp, Artificial
  Synthetic oligonucleotide
ttggatagcccgctatgagactatttatagcctccccatcaagcaggacccctaaa

SEQ ID NO: 509374 - DNA, 56 bp, Artificial
  Synthetic oligonucleotide
ggggcttaagaatgttaaggattctatgaggattaattctaatgctactcctgttg

SEQ ID NO: 509375 - DNA, 56 bp, Artificial
  Synthetic oligonucleotide
ctaagctaacattttctaaagagttttgtatggtgattgatagatgtgaaaggtct

SEQ ID NO: 509376 - DNA, 56 bp, Artificial
  Synthetic oligonucleotide
gctttatggaagcagaaataaccattaaagacacacttgataacacaacaaccacg

SEQ ID NO: 509377 - DNA, 56 bp, Artificial
  Synthetic oligonucleotide
ctttaactaatatttgctctgtctgttctaaacattgacttactattactttagca

SEQ ID NO: 509378 - DNA, 56 bp, Artificial
  Synthetic oligonucleotide
acaatacaaatctgtacaattttatacaataaaccgaatatctttcattagaacat

SEQ ID NO: 509379 - DNA, 56 bp, Artificial
  Synthetic oligonucleotide
gagtcaacaaagtaacatatatacgccactatgcttacatgctatatattcacgcc

SEQ ID NO: 509380 - DNA, 56 bp, Artificial
  Synthetic oligonucleotide
tatagcacaatcataaaagtgattgcaaatgagcaatacttaataatggattatac

SEQ ID NO: 509381 - DNA, 56 bp, Artificial
  Synthetic oligonucleotide
gttgttgcgattgatcttcaattttattgatggcttgtaaaagccttatttggccg

SEQ ID NO: 509382 - DNA, 56 bp, Artificial
  Synthetic oligonucleotide
gatggcgccttttatcgatgcagttctcaagaaatttagacttaaatctaattggc

SEQ ID NO: 509383 - DNA, 56 bp, Artificial
  Synthetic oligonucleotide
gcagctgaaactacatgctcactaattccatctagctttaaatacttttctgactc

SEQ ID NO: 509384 - DNA, 56 bp, Artificial
  Synthetic oligonucleotide
cccagcttcggctatagcagaactagcaatagcttgcaatatatcagcaccgctta

SEQ ID NO: 509385 - DNA, 56 bp, Artificial
  Synthetic oligonucleotide
tcattatatccctccttgtttaatacttcctttgtctctgctaatgccttttctaa

SEQ ID NO: 509386 - DNA, 56 bp, Artificial
  Synthetic oligonucleotide
gatttgggattaaaagagataaataaggtattgggagagattaaggaaggagaggg

SEQ ID NO: 509387 - DNA, 56 bp, Artificial
  Synthetic oligonucleotide
aaagatgagaaaatcaaagcattaagagagatgaaaagggatgaaaatcgattacg

SEQ ID NO: 509388 - DNA, 56 bp, Artificial
  Synthetic oligonucleotide
gcaagaagaagtatcaaagaatgggcaatatgagaaagttaagaaggtagttgagg

SEQ ID NO: 509389 - DNA, 55 bp, Artificial
  Synthetic oligonucleotide
ttgatataccagcctcattatcaaatgatcctgaattcaccgcaggttttacggg

SEQ ID NO: 509390 - DNA, 55 bp, Artificial
  Synthetic oligonucleotide
gccactgcaaatacaactcccttggaatttgcattaggaggaacagcagagcgtg

SEQ ID NO: 509391 - DNA, 55 bp, Artificial
  Synthetic oligonucleotide
gccaagacgtttctgaacgcacttataggctggccgtattatcttgccgccggat

SEQ ID NO: 509392 - DNA, 55 bp, Artificial
  Synthetic oligonucleotide
gcattcaattatagtacctcattatcagtatcggccgaattgtcacgtaagcccc

SEQ ID NO: 509393 - DNA, 55 bp, Artificial
  Synthetic oligonucleotide
gctgccgggtgtgctatgctttgacgttatgagtgagggaagctgggattataaa

SEQ ID NO: 509394 - DNA, 55 bp, Artificial
  Synthetic oligonucleotide
ttgcattcctaggttttgcaatggataagattctgcatcctaaactcaggacaag

SEQ ID NO: 509395 - DNA, 55 bp, Artificial
  Synthetic oligonucleotide
gctgttggagtagagagtgcagtaaagaaattggttagtgagacgcttgacaaga

SEQ ID NO: 509396 - DNA, 55 bp, Artificial
  Synthetic oligonucleotide
gcttaagcatcagggcgatttgattatgtcttacggacacctgattgacggctct

SEQ ID NO: 509397 - DNA, 55 bp, Artificial
  Synthetic oligonucleotide
gcttctaattcgtcaaaatagtaacttgtagtagcggcttgatcatccgtatcga

SEQ ID NO: 509398 - DNA, 55 bp, Artificial
  Synthetic oligonucleotide
agcagcaccatggatgggaattctttccgaggtgacgaggcgcatacggcaaaac

SEQ ID NO: 509399 - DNA, 55 bp, Artificial
  Synthetic oligonucleotide
gcaatgtctctattaattccagctttgagcagttctgtcaataccatctgctgcg

SEQ ID NO: 509400 - DNA, 55 bp, Artificial
  Synthetic oligonucleotide
ttgctttcttagaactccctcctgcaattcttggagaatataaataccaagttgc

SEQ ID NO: 509401 - DNA, 55 bp, Artificial
  Synthetic oligonucleotide
gcacacttctctcttgtaatcgtgagggaggtgtcatgtttgttaatgatgtgtt

SEQ ID NO: 509402 - DNA, 55 bp, Artificial
  Synthetic oligonucleotide
gcagcagcaagtgcatcagtaggggcagtaagtggagctgatatgttaaaggcaa

SEQ ID NO: 509403 - DNA, 55 bp, Artificial
  Synthetic oligonucleotide
gcactctcaacagtactcttcaaacccttctctgcatcagcagcattattcttca

SEQ ID NO: 509404 - DNA, 55 bp, Artificial
  Synthetic oligonucleotide
gcagcaatagcataatcattatcagcaccaccactaggaccagcaaatttaccat

SEQ ID NO: 509405 - DNA, 55 bp, Artificial
  Synthetic oligonucleotide
aggagtttattagtggtactgtagataagatagctgcaggagcgaaggaagcagc

SEQ ID NO: 509406 - DNA, 55 bp, Artificial
  Synthetic oligonucleotide
aggcaaaggacatcggagttgtaaattcgttgtctgaagaactcttagtttctga

SEQ ID NO: 509407 - DNA, 55 bp, Artificial
  Synthetic oligonucleotide
gcgctaggacctacaagaatgtttccgtcggcagtcggggttacaagaacgccct

SEQ ID NO: 509408 - DNA, 55 bp, Artificial
  Synthetic oligonucleotide
tttataataacaccaagtaagcctggcacaatcttcctacgctcccaatcgacaa

SEQ ID NO: 509409 - DNA, 55 bp, Artificial
  Synthetic oligonucleotide
gcgcgttttaggggaacttttgttttaccacatactagacaagagctaagatatg

SEQ ID NO: 509410 - DNA, 55 bp, Artificial
  Synthetic oligonucleotide
gctatccctccactaactgcacttgctaacactacatcttgtgctaaatgagctc

SEQ ID NO: 509411 - DNA, 55 bp, Artificial
  Synthetic oligonucleotide
gcgcaactatatacttacgccatagataggaatgaccgcctgaattttcacgcaa

SEQ ID NO: 509412 - DNA, 55 bp, Artificial
  Synthetic oligonucleotide
gcctcacctactacagttccatcacctatcccttttaatgattctaaatgccctt

SEQ ID NO: 509413 - DNA, 55 bp, Artificial
  Synthetic oligonucleotide
gcctacaaaggcaggaatcggaaagacgaccgtgtcaatcggtctcgccttgggc

SEQ ID NO: 509414 - DNA, 55 bp, Artificial
  Synthetic oligonucleotide
gcccctcttactgctcctattgtagcactcaccgctgccgctactgcctaaccag

SEQ ID NO: 509415 - DNA, 55 bp, Artificial
  Synthetic oligonucleotide
gctcagctgatgctactccttgggcattagatgccgcctcacctacaacattgtc

SEQ ID NO: 509416 - DNA, 55 bp, Artificial
  Synthetic oligonucleotide
tttagtcacatcttttagtccatcaccctcgtttggctttagcactacatctact

SEQ ID NO: 509417 - DNA, 55 bp, Artificial
  Synthetic oligonucleotide
gcccctattaatactgcattcagtccttctgctggtacattagcatgagttgcca

SEQ ID NO: 509418 - DNA, 55 bp, Artificial
  Synthetic oligonucleotide
tttgctcctgcctctatcttacctatctccccaatacattcctctaccttctctt

SEQ ID NO: 509419 - DNA, 55 bp, Artificial
  Synthetic oligonucleotide
gccccatgtccagctgaaacagcatttcctataacatctccaccattagccccac

SEQ ID NO: 509420 - DNA, 55 bp, Artificial
  Synthetic oligonucleotide
gctcgggactgctactcatcatttgtcacaggccctgaatcagattcgcacggag

SEQ ID NO: 509421 - DNA, 55 bp, Artificial
  Synthetic oligonucleotide
ttttatacgcgtcggccgcagattgatagagtttcacacaaaatgcatttacttg

SEQ ID NO: 509422 - DNA, 55 bp, Artificial
  Synthetic oligonucleotide
gctctaattggtggtgtagtaaatttgacactaatcgtatcttgtggcattcacg

SEQ ID NO: 509423 - DNA, 55 bp, Artificial
  Synthetic oligonucleotide
gcccatcctctatcccttgcacagtaacctacactctcctcagatatttctccac

SEQ ID NO: 509424 - DNA, 55 bp, Artificial
  Synthetic oligonucleotide
gctgatgggagtacgattaagatagttgaagatgcaattcaaggagcaaatgaag

SEQ ID NO: 509425 - DNA, 55 bp, Artificial
  Synthetic oligonucleotide
agtacggctcggtgaatccaccaaatgtctgtcctattgccgctgttgtgggttc

SEQ ID NO: 509426 - DNA, 55 bp, Artificial
  Synthetic oligonucleotide
gctgattcagaggctatattgcctggggatttagtaatagctagtaagtcgtcta

SEQ ID NO: 509427 - DNA, 55 bp, Artificial
  Synthetic oligonucleotide
ttttatccgtatgttcaggtaactcttaactgtcctgtttcggagttcaggagtt

SEQ ID NO: 509428 - DNA, 55 bp, Artificial
  Synthetic oligonucleotide
gctgcagtattaccatcagccttaaccttaacaaccttcccaatcatctcacccg

SEQ ID NO: 509429 - DNA, 55 bp, Artificial
  Synthetic oligonucleotide
taaggtattaggagagattaagcaaggagagggttctgaatctaaagttaaggct

SEQ ID NO: 509430 - DNA, 55 bp, Artificial
  Synthetic oligonucleotide
acagtcagtattgaattcttccccgaatttgttaacaagaaaatgtggctcccca

SEQ ID NO: 509431 - DNA, 55 bp, Artificial
  Synthetic oligonucleotide
taaagctgagttcaataatcctccttaacagcaaactttccatccttagccaccc

SEQ ID NO: 509432 - DNA, 55 bp, Artificial
  Synthetic oligonucleotide
accaggagggcggtgttttctcttttcaggttcccgtcatagggccatgggtagg

SEQ ID NO: 509433 - DNA, 55 bp, Artificial
  Synthetic oligonucleotide
gtttgttcgtccgtagtttgaagtttctgaaggcgcaagttccttcttgcagtca

SEQ ID NO: 509434 - DNA, 55 bp, Artificial
  Synthetic oligonucleotide
gtttgtggcccataatctaatagatgcccaccattaggaactctgactatcatgg

SEQ ID NO: 509435 - DNA, 55 bp, Artificial
  Synthetic oligonucleotide
gttgcagaagttttgatggccgcagaatgtcatgccgtaggctggcaggaacccg

SEQ ID NO: 509436 - DNA, 55 bp, Artificial
  Synthetic oligonucleotide
gttgagttggagcggtgttactgttcagactaaaacaacggatgtgcccgtagct

SEQ ID NO: 509437 - DNA, 55 bp, Artificial
  Synthetic oligonucleotide
gttctttcacaaaccctccggccaaggctacatagtaatcccatccacggtccgg

SEQ ID NO: 509438 - DNA, 55 bp, Artificial
  Synthetic oligonucleotide
gttccaaatcaacactaaagtcgccactgggataatcagtgctcatcggaactcc

SEQ ID NO: 509439 - DNA, 55 bp, Artificial
  Synthetic oligonucleotide
gttcacaaggatcaggaaaagaagtacagggaataggagtaaccgcagcaaataa

SEQ ID NO: 509440 - DNA, 55 bp, Artificial
  Synthetic oligonucleotide
tgtcagtggtgaggaaatgttagcgtcgatagttgcctcaaatgaaagtgataca

SEQ ID NO: 509441 - DNA, 55 bp, Artificial
  Synthetic oligonucleotide
acccttcttcaaatgcatctcctatacgtagatactcatatacttgggttcttgc

SEQ ID NO: 509442 - DNA, 55 bp, Artificial
  Synthetic oligonucleotide
acctcttctattgctactaataacttatttgccgcagttgcacctactccctgta

SEQ ID NO: 509443 - DNA, 55 bp, Artificial
  Synthetic oligonucleotide
gtgttaagagataaaggaaatccagaagctagtaagactgaagaaggagagagga

SEQ ID NO: 509444 - DNA, 55 bp, Artificial
  Synthetic oligonucleotide
gtgtggaggcgtgatttgcgtagcatagaaacgctagcagaacgcttcccttgcg

SEQ ID NO: 509445 - DNA, 55 bp, Artificial
  Synthetic oligonucleotide
gtgtgcactatacaatcggctctgccttttaaacagtgtatttccgtttgcacaa

SEQ ID NO: 509446 - DNA, 55 bp, Artificial
  Synthetic oligonucleotide
gtgtatacagagtgtacagagcataaaccaactattggtcttgagattgcaactt

SEQ ID NO: 509447 - DNA, 55 bp, Artificial
  Synthetic oligonucleotide
aagggcgacggaaagcggtccatcgtctggcagccgttcgggaacctcttcagca

SEQ ID NO: 509448 - DNA, 55 bp, Artificial
  Synthetic oligonucleotide
tgaatcttatcaatcattgcccatggatctgcttttgatacctcacctgctagtt

SEQ ID NO: 509449 - DNA, 55 bp, Artificial
  Synthetic oligonucleotide
tctatatgggcccgactgaactcctggatgttgacggtgtatgcaaccgtaaggg

SEQ ID NO: 509450 - DNA, 55 bp, Artificial
  Synthetic oligonucleotide
aagctcaaagctaactcatcataacatctttaaaattcattatgcccttattaga

SEQ ID NO: 509451 - DNA, 55 bp, Artificial
  Synthetic oligonucleotide
tccttctactgctactaataacttatttgctgcactcactcctactccttgtacg

SEQ ID NO: 509452 - DNA, 55 bp, Artificial
  Synthetic oligonucleotide
tgccctaaaagggcatttcctacttttatgtgatgttcaataaagctcaatggtg

SEQ ID NO: 509453 - DNA, 55 bp, Artificial
  Synthetic oligonucleotide
tccattaatttccattgttccgcctagagatgtttgccagaaaggcatgtagaag

SEQ ID NO: 509454 - DNA, 55 bp, Artificial
  Synthetic oligonucleotide
tcagaggctatattacctggggatttagtaatagctagtaagtcgtctaatatgg

SEQ ID NO: 509455 - DNA, 55 bp, Artificial
  Synthetic oligonucleotide
tattgctaaaaaaagtttatagtttggccttttgtatgcatggattgacttaagc

SEQ ID NO: 509456 - DNA, 55 bp, Artificial
  Synthetic oligonucleotide
aatcttaccaaaatatgccccgatttcacttttcttcgtttccgcttttattccc

SEQ ID NO: 509457 - DNA, 55 bp, Artificial
  Synthetic oligonucleotide
tgctggcagtcatgcggttacagcggtgactgagtatctctatctcagtgcaccc

SEQ ID NO: 509458 - DNA, 55 bp, Artificial
  Synthetic oligonucleotide
tagtcgattattcctgtgtcattcaggcaggtttgaccttgcgtttcccgcaaaa

SEQ ID NO: 509459 - DNA, 55 bp, Artificial
  Synthetic oligonucleotide
aatttacctcctttaactaaggagcgtaatgctatccctccactcactgcacctg

SEQ ID NO: 509460 - DNA, 55 bp, Artificial
  Synthetic oligonucleotide
tagctacatcaaccgcttctttaatagacttgtttgatagcccatctttatcccc

SEQ ID NO: 509461 - DNA, 55 bp, Artificial
  Synthetic oligonucleotide
tagcaaggcgtttacgtatgttgaatcgttgttgctcagctctttcacctgttgc

SEQ ID NO: 509462 - DNA, 55 bp, Artificial
  Synthetic oligonucleotide
acaacttcctcgcatccgcgttatcctcatcaccagcagctgtaacatccttcag

SEQ ID NO: 509463 - DNA, 55 bp, Artificial
  Synthetic oligonucleotide
acagctaatgcaagtggagatacaactgcggtggcattttcaaaagggggtcagg

SEQ ID NO: 509464 - DNA, 55 bp, Artificial
  Synthetic oligonucleotide
taccaaacccattcgccgcagcatcattagcatccccaatcgcagctgcaatcgg

SEQ ID NO: 509465 - DNA, 55 bp, Artificial
  Synthetic oligonucleotide
ggttagccttaaatgtacaacttgaacagtatgctaggttattatgagcagcgtt

SEQ ID NO: 509466 - DNA, 55 bp, Artificial
  Synthetic oligonucleotide
ggtccatttgcattagctaccgcaacaccaggatttccaggtctaatttctatgc

SEQ ID NO: 509467 - DNA, 55 bp, Artificial
  Synthetic oligonucleotide
ggggcagtagaacaaggtcttgcagaatataatattggatggtcatctagaaaag

SEQ ID NO: 509468 - DNA, 55 bp, Artificial
  Synthetic oligonucleotide
gggattacgctgcgttatacttacgcactcttcttaaataattctcatacccttc

SEQ ID NO: 509469 - DNA, 55 bp, Artificial
  Synthetic oligonucleotide
gggaggggagatgcaggtgctgattttactaaaggtgaaagtaagaaagatgttg

SEQ ID NO: 509470 - DNA, 55 bp, Artificial
  Synthetic oligonucleotide
gggacgggaagcattacctatacggttacaccgggaaagaattcggttttggtgc

SEQ ID NO: 509471 - DNA, 55 bp, Artificial
  Synthetic oligonucleotide
ggcttaaaagggattagtgaggtattaggagagattaaacaaggagagggttctg

SEQ ID NO: 509472 - DNA, 55 bp, Artificial
  Synthetic oligonucleotide
ggcgtgaggacggagttctgcgagaaatgcccgcggattctgcttgacgggaagc

SEQ ID NO: 509473 - DNA, 55 bp, Artificial
  Synthetic oligonucleotide
ggcggtaaatagttttgctgcggacagcagtattttcagttaccgggtggggcag

SEQ ID NO: 509474 - DNA, 55 bp, Artificial
  Synthetic oligonucleotide
ggccttatgtcgggcgtcctttccaataccggtacagccgcggtacttatccccg

SEQ ID NO: 509475 - DNA, 55 bp, Artificial
  Synthetic oligonucleotide
ggatggggttcgctacgatatacatgatgatgccagtgtgtccggttcggtagag

SEQ ID NO: 509476 - DNA, 55 bp, Artificial
  Synthetic oligonucleotide
ggatgcttttaggatcgcgttttcccgaggtgagaatattcagccgccgatggca

SEQ ID NO: 509477 - DNA, 55 bp, Artificial
  Synthetic oligonucleotide
ggatgaaatggaaaacacattttaagcaactcaggaacaagaatccttatagccc

SEQ ID NO: 509478 - DNA, 55 bp, Artificial
  Synthetic oligonucleotide
ggatccttaagctttgaatcaattacacagcggtttcgtacatagcaggctgcgt

SEQ ID NO: 509479 - DNA, 55 bp, Artificial
  Synthetic oligonucleotide
ggataaacatgtagcagcagcaagtgcatcaataggggcagtaagtggagctgat

SEQ ID NO: 509480 - DNA, 55 bp, Artificial
  Synthetic oligonucleotide
ggaattaccgcagccctcgaccccagaatccataaatcccgtccgcacaagggtc

SEQ ID NO: 509481 - DNA, 55 bp, Artificial
  Synthetic oligonucleotide
ggaagttatgaaaaggtgaaaggtaaggtagaggaatttattgggaagataggga

SEQ ID NO: 509482 - DNA, 55 bp, Artificial
  Synthetic oligonucleotide
gtggatatagcttataaagaaggtgttgcaaagccagaagcaggagacatggcag

SEQ ID NO: 509483 - DNA, 55 bp, Artificial
  Synthetic oligonucleotide
gtgcatatactgagggtgagattggtcgtgttattaggaataataacgaagcagg

SEQ ID NO: 509484 - DNA, 55 bp, Artificial
  Synthetic oligonucleotide
gtctcatcttacatacattagctcgtgaaacacaaagctctttccctatttcagc

SEQ ID NO: 509485 - DNA, 55 bp, Artificial
  Synthetic oligonucleotide
ttagcagcatcaccattatctctaatcatagcctgcaaaatatcagctccagtta

SEQ ID NO: 509486 - DNA, 55 bp, Artificial
  Synthetic oligonucleotide
gtcgaaattcgcgacctcgactttcgggaacacgtcgtacgtcaccgtgtagacg

SEQ ID NO: 509487 - DNA, 55 bp, Artificial
  Synthetic oligonucleotide
gtcccgtgaacctgcgcccgtggacctttgcgcgtcctaagcgttattggttggc

SEQ ID NO: 509488 - DNA, 55 bp, Artificial
  Synthetic oligonucleotide
gtcatcattataggtatcaccatggttattgttgaattaggcggcgcacagcagg

SEQ ID NO: 509489 - DNA, 55 bp, Artificial
  Synthetic oligonucleotide
gtatgcagtatcagttgacagatctactcctaaatggaccttatatcccaccaac

SEQ ID NO: 509490 - DNA, 55 bp, Artificial
  Synthetic oligonucleotide
gtagcagccatgcttctgctaactctaattattcagatgcagtaggtgccttaaa

SEQ ID NO: 509491 - DNA, 55 bp, Artificial
  Synthetic oligonucleotide
gtacgtaggtgctgtactttcacataaggctaatgtttgctcattcaaggacaat

SEQ ID NO: 509492 - DNA, 55 bp, Artificial
  Synthetic oligonucleotide
ttcaacttctgcctctgccttaatgcgttctccttctaaaacctcaagtttacgc

SEQ ID NO: 509493 - DNA, 55 bp, Artificial
  Synthetic oligonucleotide
ttcaggctcagaggcaagcggaaaattaactgcggcgcttgaaacagcccgtatt

SEQ ID NO: 509494 - DNA, 55 bp, Artificial
  Synthetic oligonucleotide
agatgaccccgcgttcacgctccgcgctgctcaggttggccatgcgattataggc

SEQ ID NO: 509495 - DNA, 55 bp, Artificial
  Synthetic oligonucleotide
ttcctatagcagcatcagttgtagcacctttggccgcttcctttgctcctgtagc

SEQ ID NO: 509496 - DNA, 55 bp, Artificial
  Synthetic oligonucleotide
ggttttgagagaggggatgtttccccgtaattattcagattcattataaatctcc

SEQ ID NO: 509497 - DNA, 55 bp, Artificial
  Synthetic oligonucleotide
ttctcaggcaatatgatgcttcaaattcacgaagtttaggtgatacacaaggcta

SEQ ID NO: 509498 - DNA, 55 bp, Artificial
  Synthetic oligonucleotide
ggttcaccagaagtctcaccagaaacagaaattgcttttaatatatcagccccac

SEQ ID NO: 509499 - DNA, 55 bp, Artificial
  Synthetic oligonucleotide
cgcgccagtgaattagtatcgctcataaattttccttacgcaacgatgatgccgg

SEQ ID NO: 509500 - DNA, 55 bp, Artificial
  Synthetic oligonucleotide
cgcgcaactgttctagcattcggaacgcgcaacgtctcgggcacacatcgcaccc

SEQ ID NO: 509501 - DNA, 55 bp, Artificial
  Synthetic oligonucleotide
cgcatcaccaccttttgctgcagtattatcagcagccttaacaaccttcccaatc

SEQ ID NO: 509502 - DNA, 55 bp, Artificial
  Synthetic oligonucleotide
cgcactctgtatcttctccccaatcacctttaaatcaattacactcccatctccc

SEQ ID NO: 509503 - DNA, 55 bp, Artificial
  Synthetic oligonucleotide
cgcacccttctcacccaaagccttcccagcagccgcaacaatcccctttatcccc

SEQ ID NO: 509504 - DNA, 55 bp, Artificial
  Synthetic oligonucleotide
cgcaatgctatgcctcccgctaccgatgctgcttttggcgtacttgcacctgcta

SEQ ID NO: 509505 - DNA, 55 bp, Artificial
  Synthetic oligonucleotide
cgactgatgcatctaaagccgttggtgcagtaaccggggctgatattctacaagc

SEQ ID NO: 509506 - DNA, 55 bp, Artificial
  Synthetic oligonucleotide
cgaagcaggatagtaaatggtaagactaaagcgactgccagtgtattacaatgcg

SEQ ID NO: 509507 - DNA, 55 bp, Artificial
  Synthetic oligonucleotide
cctttgtataacaagaatagaatggataatattactatacgctcgccgcgaccac

SEQ ID NO: 509508 - DNA, 55 bp, Artificial
  Synthetic oligonucleotide
ccttcacggctaaaggcttcggctatggattcaccttcgatctgatttaacttac

SEQ ID NO: 509509 - DNA, 55 bp, Artificial
  Synthetic oligonucleotide
cctgccttaataagctcatttaataccatctgtcgagtaactacaggttgcatta

SEQ ID NO: 509510 - DNA, 55 bp, Artificial
  Synthetic oligonucleotide
atttagcacaagatgtagcattggcaggagcagtgagtggagggatagcgctacg

SEQ ID NO: 509511 - DNA, 55 bp, Artificial
  Synthetic oligonucleotide
cctctgaggagcaaagagttttattgattgatagcgatcctcaagccagtgttac

SEQ ID NO: 509512 - DNA, 55 bp, Artificial
  Synthetic oligonucleotide
caaacgccgctccctgaccagcatccccaatcgcagcctcaatcggattcgtagc

SEQ ID NO: 509513 - DNA, 55 bp, Artificial
  Synthetic oligonucleotide
cctccctttgccattcctctcaatgccattcctccggctattactgcatctttct

SEQ ID NO: 509514 - DNA, 55 bp, Artificial
  Synthetic oligonucleotide
cctcacctgcagtagcattaccaatgacaagttcatccacagtcccctttgctgc

SEQ ID NO: 509515 - DNA, 55 bp, Artificial
  Synthetic oligonucleotide
cctcaacaagactcttgacacttgctatatctgcctgcactgcatcctcagtacc

SEQ ID NO: 509516 - DNA, 55 bp, Artificial
  Synthetic oligonucleotide
cctagcaattatcctttgctcataacattcaatacacgctgttcttttgggctct

SEQ ID NO: 509517 - DNA, 55 bp, Artificial
  Synthetic oligonucleotide
cctaatttggaggctactgagagttcagtgaagacattggttgagaataaactag

SEQ ID NO: 509518 - DNA, 55 bp, Artificial
  Synthetic oligonucleotide
cctaatgctgttggagtagagagtgcagtaaagaaattggttagtgagacgcttg

SEQ ID NO: 509519 - DNA, 55 bp, Artificial
  Synthetic oligonucleotide
ctcgaatgtgcgcgttttaggggaacttttgttttaccacatactagacaagagc

SEQ ID NO: 509520 - DNA, 55 bp, Artificial
  Synthetic oligonucleotide
ctcatgcagggatgcctataggagcattggtaacagctacatgtttaacggctgg

SEQ ID NO: 509521 - DNA, 55 bp, Artificial; identical to SEQ ID NO: 240325
  Synthetic oligonucleotide

SEQ ID NO: 509522 - DNA, 55 bp, Artificial
  Synthetic oligonucleotide
ctcacttttctttgtgtccgcttttatccccaatgtccctgtaatcatatcgcca

SEQ ID NO: 509523 - DNA, 55 bp, Artificial
  Synthetic oligonucleotide
ctcaaggctattcatccactcagcgcacctactaaaactgcatcttgtgccagac

SEQ ID NO: 509524 - DNA, 55 bp, Artificial
  Synthetic oligonucleotide
ctatggtatttggcttccagaccataaagacgtccacaatacgttcattcgcccc

SEQ ID NO: 509525 - DNA, 55 bp, Artificial
  Synthetic oligonucleotide
ctagtacataacgtttgaaataagttactgcagaccccacaagctgcggccacgt

SEQ ID NO: 509526 - DNA, 55 bp, Artificial
  Synthetic oligonucleotide
ctactgcccctaacaacttattcactgctgttattcctaccccttgtactgcttt

SEQ ID NO: 509527 - DNA, 55 bp, Artificial
  Synthetic oligonucleotide
atggttatcgggatccggacacccaagacgaattttccccttcgtaggctcccac

SEQ ID NO: 509528 - DNA, 55 bp, Artificial
  Synthetic oligonucleotide
cgtggtgaagtagtagtaacgcttgatacatcatatacaactcctaaaattgggc

SEQ ID NO: 509529 - DNA, 55 bp, Artificial
  Synthetic oligonucleotide
cgtctgatgcctctccaagtttaacacctaacccattaaaatattctcctacagc

SEQ ID NO: 509530 - DNA, 55 bp, Artificial
  Synthetic oligonucleotide
cgtatccgcctttatccccaatgtccctgtaatcatatctccaaaactcacaaat

SEQ ID NO: 509531 - DNA, 55 bp, Artificial
  Synthetic oligonucleotide
cggttccgtagctgtaattcctgcctgatgtgttgtgacagtggtcttcgcgcca

SEQ ID NO: 509532 - DNA, 55 bp, Artificial
  Synthetic oligonucleotide
cggttaatggctgcatgttaccgattaacatatggttcgcaggcaccatgacatc

SEQ ID NO: 509533 - DNA, 55 bp, Artificial; identical to SEQ ID NO: 240155
  Synthetic oligonucleotide

SEQ ID NO: 509534 - DNA, 55 bp, Artificial
  Synthetic oligonucleotide
cggtcttaccatcactagccttattagaatcccctgcatcagccttccctacacc

SEQ ID NO: 509535 - DNA, 55 bp, Artificial
  Synthetic oligonucleotide
cggtaagtggagcagatatattgcaggcaatagctaagtctgttgagactgttgg

SEQ ID NO: 509536 - DNA, 55 bp, Artificial
  Synthetic oligonucleotide
cgggttggggcattgagcattgataaagacatgaatttgccaaagttatattaac

SEQ ID NO: 509537 - DNA, 55 bp, Artificial
  Synthetic oligonucleotide
cgggagcatattcctgcagattggccacgcgggatcgtaccgaatctataccctt

SEQ ID NO: 509538 - DNA, 55 bp, Artificial
  Synthetic oligonucleotide
cggcgacgaattctacggctggaaaggcggcacttacaaatggtacttaaaacag

SEQ ID NO: 509539 - DNA, 55 bp, Artificial
  Synthetic oligonucleotide
cggcatcaaattccgctttacgtttcctgaacatccgtagaggtagactgcctcg

SEQ ID NO: 509540 - DNA, 55 bp, Artificial
  Synthetic oligonucleotide
cggaaaggttctaaaaggtttgggtaactcaagccgaggtaagactgcaggagag

SEQ ID NO: 509541 - DNA, 55 bp, Artificial
  Synthetic oligonucleotide
ccaagtaacttacctattgtcttactttcatcttccctagtcttggtagcatcag

SEQ ID NO: 509542 - DNA, 55 bp, Artificial
  Synthetic oligonucleotide
ccaagatatttaaggggcttgaacatccaattctttacgaaccagatcccgcaat

SEQ ID NO: 509543 - DNA, 55 bp, Artificial
  Synthetic oligonucleotide
ccaaatgcagaggctactgagactgtggtgaaaacattagttgagagtaagctag

SEQ ID NO: 509544 - DNA, 55 bp, Artificial
  Synthetic oligonucleotide
cattgctaaaagtagctcttgttgtgggttcacttgagagttctagtttgccacc

SEQ ID NO: 509545 - DNA, 55 bp, Artificial
  Synthetic oligonucleotide
cattcaatcccaatacactccctaccatttccccaaatgatgtgaaaacattcaa

SEQ ID NO: 509546 - DNA, 55 bp, Artificial
  Synthetic oligonucleotide
catcgtgttttggatgtatgtaaaatatttgaggaacgtagccgaatcctctcag

SEQ ID NO: 509547 - DNA, 55 bp, Artificial
  Synthetic oligonucleotide
cagtatctccgggtacagcatcttcattctgtttagcatttcctatagcagcatc

SEQ ID NO: 509548 - DNA, 55 bp, Artificial
  Synthetic oligonucleotide
cagtagaaccatcactagccttcttatcattcccagcatcaacatttcctacacc

SEQ ID NO: 509549 - DNA, 55 bp, Artificial
  Synthetic oligonucleotide
caggaatgcgtgaagagattgtaaatgctataccagggaatttaaggtgtgcgat

SEQ ID NO: 509550 - DNA, 55 bp, Artificial
  Synthetic oligonucleotide
cagcatcagttgtagcacctttggccgcttcctttgctcctgtagcaattctgtc

SEQ ID NO: 509551 - DNA, 55 bp, Artificial
  Synthetic oligonucleotide
caagcttttcaaactgacctggaacattaatttctaatgctttctgtgagttgcc

SEQ ID NO: 509552 - DNA, 55 bp, Artificial
  Synthetic oligonucleotide
cacttaaccaccagcaatccctttcccaacatttactccagaattaatagcagtc

SEQ ID NO: 509553 - DNA, 55 bp, Artificial
  Synthetic oligonucleotide
cactctgttttcaaaatgcttaacaaaggcctaaaggcttattcgaatgaaccga

SEQ ID NO: 509554 - DNA, 55 bp, Artificial
  Synthetic oligonucleotide
cactcaatagccgaagtataagcattgtcacgttctccactaagttgcaactcag

SEQ ID NO: 509555 - DNA, 55 bp, Artificial
  Synthetic oligonucleotide
cacgtttgctatcctctgaaaccaactctcctttggcctcaaatctagtatctgt

SEQ ID NO: 509556 - DNA, 55 bp, Artificial
  Synthetic oligonucleotide
caccatccccagcagcaacagttcttgcagtattaccatcttcagctttcttatc

SEQ ID NO: 509557 - DNA, 55 bp, Artificial
  Synthetic oligonucleotide
caccactacttggaatattaggtgaaccattacttgacacactaggtggtagggc

SEQ ID NO: 509558 - DNA, 55 bp, Artificial
  Synthetic oligonucleotide
caccaacgtacttaacaccttatttactgcacttgctaccgctccattcactgca

SEQ ID NO: 509559 - DNA, 55 bp, Artificial
  Synthetic oligonucleotide
cacagctaattgcttcactaactaaacttgctggtgtaactaacgatggttctga

SEQ ID NO: 509560 - DNA, 55 bp, Artificial
  Synthetic oligonucleotide
caatcatttcccggctttctccggggtccattgatcctccggatcctattgttcc

SEQ ID NO: 509561 - DNA, 55 bp, Artificial
  Synthetic oligonucleotide
caatctcggagaagaattccgcggtcatatactcctacgtctctctcacggcaga

SEQ ID NO: 509562 - DNA, 55 bp, Artificial
  Synthetic oligonucleotide
caatgttaggaccggtggttaatgcgataacaatcgtggtatgcgccctagccgg

SEQ ID NO: 509563 - DNA, 55 bp, Artificial
  Synthetic oligonucleotide
caacaaggccaacgttaatgcctggtgcaggacttattactagtgaatttggtca

SEQ ID NO: 509564 - DNA, 55 bp, Artificial
  Synthetic oligonucleotide
ccgttagcaaggaggggcccgcagagagcttgaccattttccgatctttcgtata

SEQ ID NO: 509565 - DNA, 55 bp, Artificial
  Synthetic oligonucleotide
ccgacggcgctgaggaaagccatattaggatcatcaccgaagctacagcccaacg

SEQ ID NO: 509566 - DNA, 55 bp, Artificial
  Synthetic oligonucleotide
ccccgttttaactacactaaatcctaatgcatctccaacagcactcccaaaacca

SEQ ID NO: 509567 - DNA, 55 bp, Artificial
  Synthetic oligonucleotide
ccccgtcttcaacaatacgatgaacggtagtatctgcaattctcaggtcatattc

SEQ ID NO: 509568 - DNA, 55 bp, Artificial
  Synthetic oligonucleotide
ccccgatcttatttggagaggattaataggggtgttggggactattggtagatcg

SEQ ID NO: 509569 - DNA, 55 bp, Artificial
  Synthetic oligonucleotide
cccatggaggattcccaattacaacatcaaatcctctctgaatatctgggaattc

SEQ ID NO: 509570 - DNA, 55 bp, Artificial
  Synthetic oligonucleotide
cccagcattagcaaacccagtcgccccagcaccagcatccccaatcgcagcctca

SEQ ID NO: 509571 - DNA, 55 bp, Artificial
  Synthetic oligonucleotide
cccacctatcatcgatagtgagatctacagaaaatgatttagcactaaatgctgc

SEQ ID NO: 509572 - DNA, 55 bp, Artificial
  Synthetic oligonucleotide
cccaacttttagagtgtgagtgtacataatttgcgctctccagtatgttaggtag

SEQ ID NO: 509573 - DNA, 55 bp, Artificial
  Synthetic oligonucleotide
ccatttgcattgctcactgaatcacctaccggcttagaatcacctactgtcccca

SEQ ID NO: 509574 - DNA, 55 bp, Artificial
  Synthetic oligonucleotide
ccatcttttgccatccctctcaatgctatacctgctgctatcaccgcatcctcct

SEQ ID NO: 509575 - DNA, 55 bp, Artificial
  Synthetic oligonucleotide
ccatctcatcccaacttacatcttttcaatcagcaagtcgattcgtataaagtgc

SEQ ID NO: 509576 - DNA, 55 bp, Artificial
  Synthetic oligonucleotide
ccatagccccttttgctgcttcctttgctccttcttcgatcttgtctaaagtccc

SEQ ID NO: 509577 - DNA, 55 bp, Artificial
  Synthetic oligonucleotide
ccagtatttcttcaccacttacacttgctaatattaccgatgctttacctgcatc

SEQ ID NO: 509578 - DNA, 55 bp, Artificial
  Synthetic oligonucleotide
ccagcactgcttttgatattggcatgcctaactccacttagggataataatgcac

SEQ ID NO: 509579 - DNA, 55 bp, Artificial
  Synthetic oligonucleotide
ccactgtgggtgctacaattccgacaatcttttgcgatgaggatgacgttatagg

SEQ ID NO: 509580 - DNA, 55 bp, Artificial
  Synthetic oligonucleotide
ccactgtaactcctgtagcatcagttgctgcatcacctactggattagaatcacc

SEQ ID NO: 509581 - DNA, 55 bp, Artificial
  Synthetic oligonucleotide
ccaattgtgtgctttcggaaacccagtatgcgcatggcttcaccgggttattgac

SEQ ID NO: 509582 - DNA, 55 bp, Artificial
  Synthetic oligonucleotide
ccaattggttcactagcatcaccaattgcctcacttgcttcctttgctccagcta

SEQ ID NO: 509583 - DNA, 55 bp, Artificial
  Synthetic oligonucleotide
ccaatgatacaattgaattcttgctagaaggagtagccccatgtccagctgaaac

SEQ ID NO: 509584 - DNA, 55 bp, Artificial
  Synthetic oligonucleotide
ctgcagcagcatcaccagttactgccccacctactatagttccatcacctattcc

SEQ ID NO: 509585 - DNA, 55 bp, Artificial
  Synthetic oligonucleotide
ctgcagcatccggcgcatttcctgcttggtgtagggagcgtcactctcgacccag

SEQ ID NO: 509586 - DNA, 55 bp, Artificial
  Synthetic oligonucleotide
ctgccgctgttataccgatggtagctggaactccaaccataggattatcccaatc

SEQ ID NO: 509587 - DNA, 55 bp, Artificial
  Synthetic oligonucleotide
ctgccgtcattggagataccacacaatgactacttattaaagcaagtttcaatgt

SEQ ID NO: 509588 - DNA, 55 bp, Artificial
  Synthetic oligonucleotide
agttgtgttttgatccaaacggtgctcccaaagataggttaaggcatttgcgacc

SEQ ID NO: 509589 - DNA, 55 bp, Artificial
  Synthetic oligonucleotide
ctgctgagaagcgaaggagacttatctgtctactgcttttatgaggaattggccg

SEQ ID NO: 509590 - DNA, 55 bp, Artificial
  Synthetic oligonucleotide
ctggtaatgataagaaggctagtgatggttctacttcaagaaccgcaaatggtgg

SEQ ID NO: 509591 - DNA, 55 bp, Artificial
  Synthetic oligonucleotide
gaccgtcaatgaacgcctcaaacaggcccgaaaagccctcaatatgtcccaggcg

SEQ ID NO: 509592 - DNA, 55 bp, Artificial
  Synthetic oligonucleotide
agtttggattcttctatgtatgccaaacacagcgaaacagacttacgctcctccg

SEQ ID NO: 509593 - DNA, 55 bp, Artificial
  Synthetic oligonucleotide
ctgtacttctacctggttcgggagcatctgagaaagagtttcataaacctttgtg

SEQ ID NO: 509594 - DNA, 55 bp, Artificial
  Synthetic oligonucleotide
ataaccacggcttcttgtgtctgcgaattaaaagatttgataatgcccactttag

SEQ ID NO: 509595 - DNA, 55 bp, Artificial
  Synthetic oligonucleotide
ctgttaacagtattgctgctgcttttcctgaatcatctgctgatgatggcttgtc

SEQ ID NO: 509596 - DNA, 55 bp, Artificial
  Synthetic oligonucleotide
cttaatggttttattggatttattcgagacttttttattgaatctgcattattgt

SEQ ID NO: 509597 - DNA, 55 bp, Artificial
  Synthetic oligonucleotide
gaagttactactgcagttaaaggggtggctgttagtgcagttgctaaggcactag

SEQ ID NO: 509598 - DNA, 55 bp, Artificial
  Synthetic oligonucleotide
cttatcgatttccaagttatacgggttatgagggtagtagtgaaactagacctaa

SEQ ID NO: 509599 - DNA, 55 bp, Artificial
  Synthetic oligonucleotide
gaagtctatgggcatcaaaagtcaaaatacatggctgcagcttgtgggatctgca

SEQ ID NO: 509600 - DNA, 55 bp, Artificial
  Synthetic oligonucleotide
cttccctatagctttagccagctcatcaatagatttaaccaaagtctcaacttcc

SEQ ID NO: 509601 - DNA, 55 bp, Artificial
  Synthetic oligonucleotide
cttcgtttccgcttttattcccaacgtccctgtaatcatatccccaaaactcaca

SEQ ID NO: 509602 - DNA, 55 bp, Artificial
  Synthetic oligonucleotide
gaaccttccaaaggcagtcgtaacataccgcaaaccgttgtattaccgattctgc

SEQ ID NO: 509603 - DNA, 55 bp, Artificial
  Synthetic oligonucleotide
gaaccggcggtatgctctaggggtacggctatttcgtcagtatttataccagccc

SEQ ID NO: 509604 - DNA, 55 bp, Artificial
  Synthetic oligonucleotide
cttgaacggcatatcaacatggatcgtaaaacacttatcggagccaaggctgcgg

SEQ ID NO: 509605 - DNA, 55 bp, Artificial
  Synthetic oligonucleotide
gaaatattactgctgacttaccgcttttgactctcttgccttatctatttcttgc

SEQ ID NO: 509606 - DNA, 55 bp, Artificial
  Synthetic oligonucleotide
cttgagcctctttgtaatacaccgcactaacatcgggttcttttaactcattaat

SEQ ID NO: 509607 - DNA, 55 bp, Artificial
  Synthetic oligonucleotide
gaaagggctatgttgagatatagacaacttaaggaggagattagggctcgaacct

SEQ ID NO: 509608 - DNA, 55 bp, Artificial
  Synthetic oligonucleotide
atacggtacacgcctcattcattcgatagttggagataactcgaccatttcctgc

SEQ ID NO: 509609 - DNA, 55 bp, Artificial
  Synthetic oligonucleotide
ctttagcaccaagcaacttaccaattgacttttgttctgcgtctccagtcttagt

SEQ ID NO: 509610 - DNA, 55 bp, Artificial
  Synthetic oligonucleotide
ctttcaattaaagggaggtttaatgtctgggatgggatatttgggagttgagaca

SEQ ID NO: 509611 - DNA, 55 bp, Artificial
  Synthetic oligonucleotide
agtagaatggcgatagcggtggcaaaggaaggtgggataggtgttatacataaga

SEQ ID NO: 509612 - DNA, 55 bp, Artificial
  Synthetic oligonucleotide
gattttatagtgacatacttttttagaaaatctaagtttatagtgaatttcggtg

SEQ ID NO: 509613 - DNA, 55 bp, Artificial
  Synthetic oligonucleotide
gattacagggacattggggataaaggcggatacgaagaaaagtgagataggtgga

SEQ ID NO: 509614 - DNA, 55 bp, Artificial
  Synthetic oligonucleotide
gattaataaattatgaaatgtaaacacttctttctataatgctataatagagaga

SEQ ID NO: 509615 - DNA, 55 bp, Artificial
  Synthetic oligonucleotide
gatgaaggattaaaagggattagtgaggtgttaggagagattaagcaaggagaag

SEQ ID NO: 509616 - DNA, 55 bp, Artificial
  Synthetic oligonucleotide
gatccaaaggatgcggagaaggctatgaagatacgccgttctgctaagcagtacc

SEQ ID NO: 509617 - DNA, 55 bp, Artificial
  Synthetic oligonucleotide
ctcgttccgctgagttatttactgctttggaaggtctatgccgtaatcacgcccg

SEQ ID NO: 509618 - DNA, 55 bp, Artificial
  Synthetic oligonucleotide
gatagaaatagctacgcttcctatctcatcgcctatcagcgaagttattgtgccg

SEQ ID NO: 509619 - DNA, 55 bp, Artificial
  Synthetic oligonucleotide
ctcttacaagctcattttgaccaaattcactagtaataagtcctgcaccaggaat

SEQ ID NO: 509620 - DNA, 55 bp, Artificial
  Synthetic oligonucleotide
ctcttctaaaccacccactacagtcttattaacagcactctcaacagtactcttc

SEQ ID NO: 509621 - DNA, 55 bp, Artificial
  Synthetic oligonucleotide
gagcgtaacgctattcctccactcactgcacttgctaacgctacatcttgtgcta

SEQ ID NO: 509622 - DNA, 55 bp, Artificial
  Synthetic oligonucleotide
gagcagtagcaagtgcagtaaataaggtattgagtacattggtgatagcaatcag

SEQ ID NO: 509623 - DNA, 55 bp, Artificial
  Synthetic oligonucleotide
gagcagcagccgcaccctcctgattagccgcatcaccagccgcctcaacaatagc

SEQ ID NO: 509624 - DNA, 55 bp, Artificial
  Synthetic oligonucleotide
ctgcactaaccgcagcagccttaattgcaccagcttcattatcagcaggttgagt

SEQ ID NO: 509625 - DNA, 55 bp, Artificial
  Synthetic oligonucleotide
ctgcaatctgcccaagctacataatctaataagctcttgacaaacaccctaacaa

SEQ ID NO: 509626 - DNA, 55 bp, Artificial
  Synthetic oligonucleotide
gacggagtagcaaaagttacagagggaacaattactgatggctcaaactgggcaa

SEQ ID NO: 509627 - DNA, 55 bp, Artificial
  Synthetic oligonucleotide
agtcaagtattcttaataccttatttgctgcacttactcctgcggccttaactcc

SEQ ID NO: 509628 - DNA, 55 bp, Artificial
  Synthetic oligonucleotide
agtatctgctccccactaaccgcagtaacagcactagccgccttcgcaatgtcac

SEQ ID NO: 509629 - DNA, 55 bp, Artificial
  Synthetic oligonucleotide
atcagactctggtgctggaacaaaatcttctagacctttaataacttgttgggtg

SEQ ID NO: 509630 - DNA, 55 bp, Artificial
  Synthetic oligonucleotide
gagagaggtggtagaatctatatgtcgagcaatccagttccgcgttctcattggc

SEQ ID NO: 509631 - DNA, 55 bp, Artificial
  Synthetic oligonucleotide
ctcttgatcatatccaatcagaacttgcaaagtgcacaggagatgacgcagctgg

SEQ ID NO: 509632 - DNA, 55 bp, Artificial
  Synthetic oligonucleotide
gagagtagtggaactgaggttagtcaatctgatactactccaacttcaattacta

SEQ ID NO: 509633 - DNA, 54 bp, Artificial
  Synthetic oligonucleotide
gcaacactcatattaacctcttattaactctcgacattccaactaacacattct

SEQ ID NO: 509634 - DNA, 54 bp, Artificial
  Synthetic oligonucleotide
taatggtaggattgatgtcttgtaatctagattctaaattatcggtcataaagg

SEQ ID NO: 509635 - DNA, 54 bp, Artificial
  Synthetic oligonucleotide
ccaacatataaagccagtgtactacttggcgcatggattgcaaataatgatgcg

SEQ ID NO: 509636 - DNA, 54 bp, Artificial
  Synthetic oligonucleotide
tcgtagtatacagctattataagtaatttgatttgtcaaaggaaaagtaggagt

SEQ ID NO: 509637 - DNA, 54 bp, Artificial
  Synthetic oligonucleotide
caaagttaagaatggaggttagagaagaaatacgatcttatgtaggaagtattg

SEQ ID NO: 509638 - DNA, 54 bp, Artificial
  Synthetic oligonucleotide
cactactttttagtagtattcttcgtttatactaccttaattgctatcatttaa

SEQ ID NO: 509639 - DNA, 54 bp, Artificial
  Synthetic oligonucleotide
caagcactagatgcttgttctgtaaatttatctaatccagcttgcagagcacct

SEQ ID NO: 509640 - DNA, 54 bp, Artificial
  Synthetic oligonucleotide
tgactaagtctggtaagtttactaatgctgctaatgaaactggtgcagttagag

SEQ ID NO: 509641 - DNA, 54 bp, Artificial
  Synthetic oligonucleotide
aggggattctaatgtagttggttatgcacataatgctaaaggtcaaggaacagc

SEQ ID NO: 509642 - DNA, 54 bp, Artificial
  Synthetic oligonucleotide
gagagctgctttagattttcttgaagatactatgacaaaccctgttccgggtga

SEQ ID NO: 509643 - DNA, 54 bp, Artificial
  Synthetic oligonucleotide
ataatcttaccaagttccgcctccattaaccttctgtaacgttttaagtttgcc

SEQ ID NO: 509644 - DNA, 54 bp, Artificial
  Synthetic oligonucleotide
tcattcttgcgaccaatgtatcgttaattactccatccataatgaattagcccc

SEQ ID NO: 509645 - DNA, 54 bp, Artificial
  Synthetic oligonucleotide
aatggaacctgtaattactagacagatggtactaaatgagcttgtaaaagcggg

SEQ ID NO: 509646 - DNA, 54 bp, Artificial
  Synthetic oligonucleotide
tataggagcaataagtgggtctgatatattgagggcgatagagaaatcaaagga

SEQ ID NO: 509647 - DNA, 54 bp, Artificial
  Synthetic oligonucleotide
cagtaatagcagcaggaatagcattgagagcaatggcacaagatggtaaattta

SEQ ID NO: 509648 - DNA, 54 bp, Artificial
  Synthetic oligonucleotide
atagctaacacaggttctcctacacctggagcaacttgttgctgcattgcttta

SEQ ID NO: 509649 - DNA, 54 bp, Artificial
  Synthetic oligonucleotide
ggggagtgagttatgaaaacgaaacaaatcacacaatggcgcctggtatctttt

SEQ ID NO: 509650 - DNA, 54 bp, Artificial
  Synthetic oligonucleotide
attaacagcactctcaacagtactcttcaaacccttctctgccttatcatgatc

SEQ ID NO: 509651 - DNA, 54 bp, Artificial
  Synthetic oligonucleotide
ggtatgttcggaaaacgggtaattcttagtgcggtaacggatctaatcccggag

SEQ ID NO: 509652 - DNA, 54 bp, Artificial
  Synthetic oligonucleotide
gtggaaaccccgtactccccggcaatactcctgacgtagctgtatgcgatcccg

SEQ ID NO: 509653 - DNA, 54 bp, Artificial
  Synthetic oligonucleotide
ctgcggtgtcatttgcgaaaggaggatcaagtgagaacctatcaaatgctgata

SEQ ID NO: 509654 - DNA, 54 bp, Artificial
  Synthetic oligonucleotide
ctcccatctacgtctcattttacatacattagcacgacttacacccatctcttt

SEQ ID NO: 509655 - DNA, 54 bp, Artificial
  Synthetic oligonucleotide
gtcagattgcctttaactgggctcgaaagtttgtccttgaccgtaaggctaaaa

SEQ ID NO: 509656 - DNA, 54 bp, Artificial
  Synthetic oligonucleotide
agatgggtattatgtggttcgcaagaaatcgtcgcgttctaatgttactacagg

SEQ ID NO: 509657 - DNA, 54 bp, Artificial
  Synthetic oligonucleotide
atgttgcaagcgatagctaaatctagtgaaaatcctactgttaatgaggctgag

SEQ ID NO: 509658 - DNA, 54 bp, Artificial
  Synthetic oligonucleotide
ctacatccgatttcttactctcaacactcaaccccaatacactccctaccattt

SEQ ID NO: 509659 - DNA, 53 bp, Artificial
  Synthetic oligonucleotide
ccacttactgctcctattgatgcatttgccgctgctgtatgtttatcctctgc

SEQ ID NO: 509660 - DNA, 53 bp, Artificial
  Synthetic oligonucleotide
catcgatcatgggcaccaggtcaacattggcattcggctggagtcgacgacga

SEQ ID NO: 509661 - DNA, 53 bp, Artificial
  Synthetic oligonucleotide
ttctctttcatcccaaattgcgtgctatcttcaacccaatttcgatcattgtg

SEQ ID NO: 509662 - DNA, 53 bp, Artificial
  Synthetic oligonucleotide
gataggccgggtagaagcggggaatggggtagtgcgttttgagtaaggatact

SEQ ID NO: 509663 - DNA, 53 bp, Artificial
  Synthetic oligonucleotide
ggctcctgaaccagcaacattattcgcataccctactaccttatcatcaccta

SEQ ID NO: 509664 - DNA, 53 bp, Artificial
  Synthetic oligonucleotide
tcaataagcggaacaacccggtccagggacgccctaagcgtagcggggctaat

SEQ ID NO: 509665 - DNA, 53 bp, Artificial
  Synthetic oligonucleotide
agcttggcctaaaggccccacaataccataaccaaaggctccaaacgcatttt

SEQ ID NO: 509666 - DNA, 53 bp, Artificial
  Synthetic oligonucleotide
caaatttgccacccttagccatcgctcttagtgctattccccctgcaataacc

SEQ ID NO: 509667 - DNA, 53 bp, Artificial
  Synthetic oligonucleotide
gctgctggcaaaccagcagcaggagatataggaaaagcagcagcaatattaac

SEQ ID NO: 509668 - DNA, 53 bp, Artificial
  Synthetic oligonucleotide
cctcccttccgccggggaaatgtggtcctggtagatatgtctctgaaggaaaa

SEQ ID NO: 509669 - DNA, 53 bp, Artificial
  Synthetic oligonucleotide
gctcatccgtactcccaatagcagcctcaatcggattcttagcatccttcaca

SEQ ID NO: 509670 - DNA, 53 bp, Artificial
  Synthetic oligonucleotide
ccggtattcaaggagctataaatggaaaacttatctaatataaacaaaaccag

SEQ ID NO: 509671 - DNA, 53 bp, Artificial
  Synthetic oligonucleotide
caaagattaaagattagtcaagaacctctcctagagcaagtaccagttgaacc

SEQ ID NO: 509672 - DNA, 53 bp, Artificial
  Synthetic oligonucleotide
tttgtatagatatttttgtagtgttttaatagtagtttctttctgtccgttac

SEQ ID NO: 509673 - DNA, 53 bp, Artificial
  Synthetic oligonucleotide
ctttactctctcatactcctccactattatatcccatcatcactactatcctg

SEQ ID NO: 509674 - DNA, 53 bp, Artificial
  Synthetic oligonucleotide
aaaagctccttttatacctcctgctgctaattgaccaatagcagtacccgtag

SEQ ID NO: 509675 - DNA, 53 bp, Artificial
  Synthetic oligonucleotide
gcaaagctctccccataagtttagatgttttaacctgaaaaaaagtaaaagca

SEQ ID NO: 509676 - DNA, 53 bp, Artificial
  Synthetic oligonucleotide
aactactgctgcctttggagtatttgcacctgctaagtgatctgcctgacccc

SEQ ID NO: 509677 - DNA, 53 bp, Artificial
  Synthetic oligonucleotide
aaaagacggcttgttcccaccagttttcttcgctcacgattatgaacaaagaa

SEQ ID NO: 509678 - DNA, 53 bp, Artificial
  Synthetic oligonucleotide
gctgactacaaggcgaaatcgctgtccctgcctgatgccaaagcgcttcccga

SEQ ID NO: 509679 - DNA, 52 bp, Artificial
  Synthetic oligonucleotide
caactccttgaggttgtttaccatcctgtttaacttcaacatcatgtttaac

SEQ ID NO: 509680 - DNA, 52 bp, Artificial
  Synthetic oligonucleotide
agatgctaacatctcctctcctcttactgaggacactatcaatgctgccttt

SEQ ID NO: 509681 - DNA, 52 bp, Artificial
  Synthetic oligonucleotide
actctaattattcagatgcagtaggtgccttaaaaagttctaagcacgattt

SEQ ID NO: 509682 - DNA, 52 bp, Artificial
  Synthetic oligonucleotide
gagtcaagctttctatatctttatcaaataaagatgcttgaattctaatatt

SEQ ID NO: 509683 - DNA, 52 bp, Artificial
  Synthetic oligonucleotide
cgtgatacaagatcagatgcaagttcaagagcggtattcatagattgacccc

SEQ ID NO: 509684 - DNA, 52 bp, Artificial
  Synthetic oligonucleotide
aagtgagagtggtactaaggcttctctcgtttctaataaagaaagcgttcaa

SEQ ID NO: 509685 - DNA, 52 bp, Artificial
  Synthetic oligonucleotide
ctgctcctaataacttatttaccgcactcactcctgctgattgtactgtttt

SEQ ID NO: 509686 - DNA, 52 bp, Artificial
  Synthetic oligonucleotide
tgggagagattaagcaaggagaaggttctgagtctaaggctaattaataggt

SEQ ID NO: 509687 - DNA, 52 bp, Artificial
  Synthetic oligonucleotide
ggtgtttgaaccacttgcgttcggttatgttacatgggcaaaatccggcgac

SEQ ID NO: 509688 - DNA, 52 bp, Artificial
  Synthetic oligonucleotide
ggtcgattgcagctgttcctaaagaaccgccaaaaggagaagagataaaggc

SEQ ID NO: 509689 - DNA, 52 bp, Artificial
  Synthetic oligonucleotide
ttaaaggtgtagggaaggctgatgctggggatgataagaaagctagtgatgg

SEQ ID NO: 509690 - DNA, 52 bp, Artificial
  Synthetic oligonucleotide
caacaccctcacggttcgtgccaccgatctgaaggtcagttttgaaaccaaa

SEQ ID NO: 509691 - DNA, 52 bp, Artificial
  Synthetic oligonucleotide
cgacaatcgtactataaaatcagtgcgtacaattaatcaagacacaaattta

SEQ ID NO: 509692 - DNA, 52 bp, Artificial
  Synthetic oligonucleotide
tattgcatattattatctccatatatgtattcattgttaaaaggctatatgt

SEQ ID NO: 509693 - DNA, 52 bp, Artificial
  Synthetic oligonucleotide
aaagtaatatcttggtcctccgctattgctaattaatatgccctgattataa

SEQ ID NO: 509694 - DNA, 51 bp, Artificial
  Synthetic oligonucleotide
ttagcctcccaatcacctcactagaaccctgaataacagcttctactcctt

SEQ ID NO: 509695 - DNA, 51 bp, Artificial
  Synthetic oligonucleotide
gccagaagaaagtcaagaaactgtagatagcgaaagtgatggagaagtttt

SEQ ID NO: 509696 - DNA, 51 bp, Artificial
  Synthetic oligonucleotide
atcccaaatgcacaaaaatccatcataactttggtatgatacagtgtcctg

SEQ ID NO: 509697 - DNA, 51 bp, Artificial; identical to SEQ ID NO: 241085
  Synthetic oligonucleotide

SEQ ID NO: 509698 - DNA, 51 bp, Artificial
  Synthetic oligonucleotide
gattgttgactgaggattcgttatgaatagtgcattagaacgtcttagagc

SEQ ID NO: 509699 - DNA, 51 bp, Artificial
  Synthetic oligonucleotide
caattatagcagcagggatagcattgagaggaatggcaaaagaagggaagt

SEQ ID NO: 509700 - DNA, 51 bp, Artificial
  Synthetic oligonucleotide
cctcatcaattagttcacattctttgaatgcaagtgatgttgcaataatgt

SEQ ID NO: 509701 - DNA, 51 bp, Artificial
  Synthetic oligonucleotide
aatttacagaacaagcagatagtacttgtggacaaggcaatcaataagacc

SEQ ID NO: 509702 - DNA, 51 bp, Artificial
  Synthetic oligonucleotide
cttctgcttgtgcttttatttgttcggtttctaggctgggaagtttctttt

SEQ ID NO: 509703 - DNA, 51 bp, Artificial
  Synthetic oligonucleotide
agctgccgcggatgctaatttacctgtcttaactaatgaacgtagagctat

SEQ ID NO: 509704 - DNA, 51 bp, Artificial
  Synthetic oligonucleotide
cttccttttccaaacctattaacaggttgatcaaagatccatagtaccgtc

SEQ ID NO: 509705 - DNA, 51 bp, Artificial
  Synthetic oligonucleotide
aatcccgctctgtgtgccccgtgctctctgtgaggaatttacccctgcaga

SEQ ID NO: 509706 - DNA, 51 bp, Artificial
  Synthetic oligonucleotide
gtgttcgatgtgctgaaggtaaaggttgttgatgccaaggctaaaggtcaa

SEQ ID NO: 509707 - DNA, 51 bp, Artificial
  Synthetic oligonucleotide
aatatcttgcaaaataagaccttcacccaacatatctgtcatcaaagttaa

SEQ ID NO: 509708 - DNA, 51 bp, Artificial
  Synthetic oligonucleotide
gctttgttaaatgtaggcctcctccgaaattaatgtactcttcactaagag

SEQ ID NO: 509709 - DNA, 51 bp, Artificial
  Synthetic oligonucleotide
ctgtagtatctgaaaaatagtgtttctggtggtcaaaatcagtagtcagcg

SEQ ID NO: 509710 - DNA, 51 bp, Artificial
  Synthetic oligonucleotide
gacattcttttttgttatatttgagttcataataaacttcagtacccatat

SEQ ID NO: 509711 - DNA, 51 bp, Artificial; identical to SEQ ID NO: 241135
  Synthetic oligonucleotide

SEQ ID NO: 509712 - DNA, 51 bp, Artificial
  Synthetic oligonucleotide
gtctttcctagatacagatagtatttctggacttgaaagagctctatcagg

SEQ ID NO: 509713 - DNA, 51 bp, Artificial
  Synthetic oligonucleotide
tgtatcttgacatgtaggattatttctacaatcaattgcatcgtttatata

SEQ ID NO: 509714 - DNA, 51 bp, Artificial
  Synthetic oligonucleotide
tgccatattcatgcatacgtgctatattggctcgtgttgcaaaccaaccaa

SEQ ID NO: 509715 - DNA, 51 bp, Artificial
  Synthetic oligonucleotide
gtattaggagagattaagcaaggggaagcttctgaagctaaagttagtgag

SEQ ID NO: 509716 - DNA, 51 bp, Artificial
  Synthetic oligonucleotide
tgggccgtagaaagtctgcaattattagaacattttatcgtaaaggcagga

SEQ ID NO: 509717 - DNA, 51 bp, Artificial
  Synthetic oligonucleotide
aagcacaatttatgccttgattttaagcaatttccgacttttacagttgtg

SEQ ID NO: 509718 - DNA, 51 bp, Artificial
  Synthetic oligonucleotide
aagaaagcacacacaaaaaataagacgaatacagagatcaacaaattaatg

SEQ ID NO: 509719 - DNA, 50 bp, Artificial
  Synthetic oligonucleotide
acattctccgcacttctccctacttccagcaatacctcacttaaactttt

SEQ ID NO: 509720 - DNA, 50 bp, Artificial
  Synthetic oligonucleotide
taatcatagcctttaaagccacggccgctgctaagtcagcattagtcttt

SEQ ID NO: 509721 - DNA, 50 bp, Artificial
  Synthetic oligonucleotide
ttttaacagcatttcctatagcttcacccgtagccccttttgacgcttcc

SEQ ID NO: 509722 - DNA, 50 bp, Artificial
  Synthetic oligonucleotide
gctgtaccagcagtacttttgatatttgcgtgtgtaataccattaataga

SEQ ID NO: 509723 - DNA, 50 bp, Artificial
  Synthetic oligonucleotide
gtagcagaagacgttctgcacaatgcaatcaccttagggattgtttatag

SEQ ID NO: 509724 - DNA, 50 bp, Artificial
  Synthetic oligonucleotide
aaaagctggactaaaagcactaaaaggtactccggcttcgattctatttc

SEQ ID NO: 509725 - DNA, 50 bp, Artificial
  Synthetic oligonucleotide
gcaaaatatcagctccagttactgctcctactgccttcgttgcatctact

SEQ ID NO: 509726 - DNA, 50 bp, Artificial
  Synthetic oligonucleotide
ttaaatacctcatataccttgcttttacctctcggaatctttcttcaaga

SEQ ID NO: 509727 - DNA, 50 bp, Artificial
  Synthetic oligonucleotide
atctgcttgttttctactctattttaagcctaagactttgtgcaatgata

SEQ ID NO: 509728 - DNA, 50 bp, Artificial
  Synthetic oligonucleotide
agctggatggtttgtacacctactggtaataagtgggtgcaggggtgccg

SEQ ID NO: 509729 - DNA, 50 bp, Artificial
  Synthetic oligonucleotide
aaataaacaagctcaatgttgaaagtgcccgcgaaacaatccgcagcatc

SEQ ID NO: 509730 - DNA, 50 bp, Artificial
  Synthetic oligonucleotide
catcattcgttgactatagtacaatctaaggaggatcctgttgcagatag

SEQ ID NO: 509731 - DNA, 50 bp, Artificial
  Synthetic oligonucleotide
gagctaagagtttaagtgaagtattaatggaagtagggagaagcgcagag

SEQ ID NO: 509732 - DNA, 50 bp, Artificial
  Synthetic oligonucleotide
gatattttggtttttctacttgctttatataatgctatctatacgcctca

SEQ ID NO: 509733 - DNA, 50 bp, Artificial
  Synthetic oligonucleotide
gtggtgctgatgagtatgctcccgaagttaaaggggctgcaataagtgca

SEQ ID NO: 509734 - DNA, 50 bp, Artificial
  Synthetic oligonucleotide
cagcaaactttccactcttagccacccccctcaaaacaatagccgcagca

SEQ ID NO: 509735 - DNA, 50 bp, Artificial
  Synthetic oligonucleotide
ggagaatatttaatactcaattattagttcaataattgagtattaccatg

SEQ ID NO: 509736 - DNA, 50 bp, Artificial
  Synthetic oligonucleotide
cagggttctagtaaagtgattacaaagttagttgattctgtaactaagct

SEQ ID NO: 509737 - DNA, 55 bp, Artificial
  Synthetic oligonucleotide
ttgagctgcccgacgatttgcggcgttactattgttccgtgcttggcgcaaatgc

SEQ ID NO: 509738 - DNA, 55 bp, Artificial
  Synthetic oligonucleotide
tcgatcatgtactggcggaagtgctccctgaggggaaagccgacaaggtacgccg

SEQ ID NO: 509739 - DNA, 55 bp, Artificial
  Synthetic oligonucleotide
tataggactcgtcgacggaatcttagcaggattaacgactacaatgccaggtgga

SEQ ID NO: 509740 - DNA, 55 bp, Artificial
  Synthetic oligonucleotide
taaggttgcttatctgccccaggggaaaacgacaatgcacgcagaagtgacctac

SEQ ID NO: 509741 - DNA, 55 bp, Artificial
  Synthetic oligonucleotide
gtgaaggttaaagtgcttgctgtcgatccggaaaatgaacgaatttctctgtcga

SEQ ID NO: 509742 - DNA, 55 bp, Artificial
  Synthetic oligonucleotide
ggtccgatgattactgtttcgcgtacccatccagggttgttgaaacgtctcttcg

SEQ ID NO: 509743 - DNA, 55 bp, Artificial
  Synthetic oligonucleotide
gcttaaatgctgtgaggacgagaaggaacgtgcgaggctcacgcaggaacttcgc

SEQ ID NO: 509744 - DNA, 55 bp, Artificial
  Synthetic oligonucleotide
gctcacgcggcagatgttgtatcgaaaagctaccatgttcctattctctataagt

SEQ ID NO: 509745 - DNA, 55 bp, Artificial
  Synthetic oligonucleotide
gcgcaagcatgcggccgaggttcttccgtgcggcatggacattgatgccttgaat

SEQ ID NO: 509746 - DNA, 55 bp, Artificial
  Synthetic oligonucleotide
gccgatcgttaagccgtagcttgccaacgtctgggcaccgccgttaaccgcccaa

SEQ ID NO: 509747 - DNA, 55 bp, Artificial
  Synthetic oligonucleotide
gcatattgacttttattcaattgtgacgatcgttggcggtacggttggcggctac

SEQ ID NO: 509748 - DNA, 55 bp, Artificial
  Synthetic oligonucleotide
cgtgtaaacggcaagctcgtgactcagtccgttctgcaacagttcggtgcgcttc

SEQ ID NO: 509749 - DNA, 55 bp, Artificial
  Synthetic oligonucleotide
acgatgccgttattgtcggggctgggcagtgcgggctgggaatcgcttttggcct

SEQ ID NO: 509750 - DNA, 55 bp, Artificial
  Synthetic oligonucleotide
aatggataaacatcaggatggaacgtcttacgcatcccggtaacacctagggagg

SEQ ID NO: 509751 - DNA, 54 bp, Artificial
  Synthetic oligonucleotide
gcacgcggaaatggggatgacgtgattgtctaacctgctcaagaatattcgcct

SEQ ID NO: 509752 - DNA, 54 bp, Artificial
  Synthetic oligonucleotide
tcctcttgcggtagaaagggatcgttggtagacaagacaaacagacttttctta

SEQ ID NO: 509753 - DNA, 51 bp, Artificial
  Synthetic oligonucleotide
aaaagaacagtcccggcatgcataaaggcatacagtcaaccatagataagg

SEQ ID NO: 509754 - DNA, 60 bp, Artificial
  Synthetic oligonucleotide
cctagctggaatcgcagctacaatggtttcaaaggatgtacaatgtaaccttaaatacgg

SEQ ID NO: 509755 - DNA, 60 bp, Artificial
  Synthetic oligonucleotide
cgctatagggctatttatttggttgtatgagtggataagagcaagattccatgattaaac

SEQ ID NO: 509756 - DNA, 60 bp, Artificial
  Synthetic oligonucleotide
ctcatatggagaacttttaaccggaaacataatcacagcggtttttgaagatgttaaagc

SEQ ID NO: 509757 - DNA, 60 bp, Artificial
  Synthetic oligonucleotide
gagtaagaagaaaaagattaatttagcaatatcaattgctcaagtagtagtgcaggcgtt

SEQ ID NO: 509758 - DNA, 60 bp, Artificial
  Synthetic oligonucleotide
atgtagatgtattacagaatgccatagcaagcaaaataaaggcttctgagggctttattt

SEQ ID NO: 509759 - DNA, 60 bp, Artificial
  Synthetic oligonucleotide
ggctttatttcagttttatggtacattgcttatggtttaccttatatactcgctataggg

SEQ ID NO: 509760 - DNA, 60 bp, Artificial
  Synthetic oligonucleotide
agtgtcgccaaaattagacaaagaaacgcgacaatcgattgccaaagatttaagtcattt

SEQ ID NO: 509761 - DNA, 60 bp, Artificial
  Synthetic oligonucleotide
ggttccaggaaaaataacactattacctattgtcgctacatttacatgataaatagtttt

SEQ ID NO: 509762 - DNA, 60 bp, Artificial
  Synthetic oligonucleotide
gtatcagtcaaacaaagaacaacgtgattttataaaaaaggcgaatgatcagttatgtga

SEQ ID NO: 509763 - DNA, 60 bp, Artificial
  Synthetic oligonucleotide
acttctaatgccgcatctttcacatgattctcactactcaattgtaatatttcatcttct

SEQ ID NO: 509764 - DNA, 60 bp, Artificial
  Synthetic oligonucleotide
tacgatgaatatgcagacacgttcgaagttgactgggacgcagtcgcagaaaattcagaa

SEQ ID NO: 509765 - DNA, 60 bp, Artificial
  Synthetic oligonucleotide
tatcacaatcacattattattaattcagtaaatttagaaacaggcaacaagtatcagtca

SEQ ID NO: 509766 - DNA, 60 bp, Artificial
  Synthetic oligonucleotide
tgcagcaaaaaaattagccagaattggcataaaaggaaatttagctggaattgcagctac

SEQ ID NO: 509767 - DNA, 60 bp, Artificial
  Synthetic oligonucleotide
aaatagttttcatcatataaggcaccattgatataaaaccagctactatagaaaatatta

SEQ ID NO: 509768 - DNA, 59 bp, Artificial
  Synthetic oligonucleotide
gagtcacaccagacagacaaattgaagttatacatattactatgaaaggtttaagtgcc

SEQ ID NO: 509769 - DNA, 59 bp, Artificial
  Synthetic oligonucleotide
catcatataaggcaccattgatataaaaccagctactatagaaaatattagcccaccag

SEQ ID NO: 509770 - DNA, 59 bp, Artificial
  Synthetic oligonucleotide
cattagtaacatcatctttagtatggtcatcatcatcttgtgacagttggttatagtcg

SEQ ID NO: 509771 - DNA, 58 bp, Artificial
  Synthetic oligonucleotide
gtggtttaatcaaaataaagataaggctacacatttaccagaagagaaatatcatgat

SEQ ID NO: 509772 - DNA, 58 bp, Artificial
  Synthetic oligonucleotide
ttgcagctactatggtttcaaaggatgtacaatgtactctgaaatacggatggttcta

SEQ ID NO: 509773 - DNA, 58 bp, Artificial
  Synthetic oligonucleotide
cattccaagggttttaagtaattttaaagtgatatcataaaaagctgtagtgtcacac

SEQ ID NO: 509774 - DNA, 58 bp, Artificial
  Synthetic oligonucleotide
cactattgcagtagtgtggggattggtgcattaattgttaatcattttcgttatctag

SEQ ID NO: 509775 - DNA, 56 bp, Artificial
  Synthetic oligonucleotide
acgctaagaaatgtcctgtgttgcagtgaggattgagtttgtgtgactacggtaag

SEQ ID NO: 509776 - DNA, 55 bp, Artificial
  Synthetic oligonucleotide
gcgacaacctcaaatggcgaatgtaggccaacccaaacaatatatcagtcgagaa

SEQ ID NO: 509777 - DNA, 55 bp, Artificial
  Synthetic oligonucleotide
gcgctcattatggtattggcctaaatgtcaacattgacctttcagatgcacaatt

SEQ ID NO: 509778 - DNA, 55 bp, Artificial
  Synthetic oligonucleotide
ggaccggcattgcttattccattatatgtccaaaatggcttgggattatcagcta

SEQ ID NO: 509779 - DNA, 55 bp, Artificial
  Synthetic oligonucleotide
ggcacctcctttctgcacggaagtgctctccaattataacaaaatccctatgacc

SEQ ID NO: 509780 - DNA, 55 bp, Artificial
  Synthetic oligonucleotide
ggctagcagttggcggccttgctatcattctatttaatgtaatcgcagttaactt

SEQ ID NO: 509781 - DNA, 55 bp, Artificial
  Synthetic oligonucleotide
atctgctgctaagacgacatgagcgatttcatgtaggctgatacctgtccaagcg

SEQ ID NO: 509782 - DNA, 55 bp, Artificial
  Synthetic oligonucleotide
ggggtgagaaccaatgattgttggctatgcgagggtatcatcgcttgatcaaaat

SEQ ID NO: 509783 - DNA, 55 bp, Artificial
  Synthetic oligonucleotide
ggtgcaaagacacttgaacgtgcgcccacactgacacgtgctctaccatctcgaa

SEQ ID NO: 509784 - DNA, 55 bp, Artificial
  Synthetic oligonucleotide
aggctaacattggacctgtcgtatcaacaccgaacaatcctttcataaagccatc

SEQ ID NO: 509785 - DNA, 55 bp, Artificial
  Synthetic oligonucleotide
ggttgctaaggcaaccacctagatcaaacgaaaggtaagggaggagataacaaaa

SEQ ID NO: 509786 - DNA, 55 bp, Artificial
  Synthetic oligonucleotide
agagatggcgaaaagctattacaatatgcattgcagcgggaaagtattgaacaag

SEQ ID NO: 509787 - DNA, 55 bp, Artificial
  Synthetic oligonucleotide
gtgttaggaccgattgtagggcacattccaatggttgtcttagcagttgtacttg

SEQ ID NO: 509788 - DNA, 55 bp, Artificial
  Synthetic oligonucleotide
taagccgataatgctaatcgtcatcatttcttgagattggacgtgtgatggtgca

SEQ ID NO: 509789 - DNA, 55 bp, Artificial
  Synthetic oligonucleotide
tactttgctaatcattttcgttcacatcatagcaccagtcatcagtggctgtgct

SEQ ID NO: 509790 - DNA, 55 bp, Artificial
  Synthetic oligonucleotide
tagcatgagcaccatgtgcgtggaatcgcagcatcatataagcaatgtgcataac

SEQ ID NO: 509791 - DNA, 55 bp, Artificial
  Synthetic oligonucleotide
tagttttagcgttagacattaacatcgtctgcatcgttgataaaccagcaaccac

SEQ ID NO: 509792 - DNA, 55 bp, Artificial
  Synthetic oligonucleotide
acagatttacctgccagagcctctacaattttcgtgatgtttctagttgaaacgc

SEQ ID NO: 509793 - DNA, 55 bp, Artificial
  Synthetic oligonucleotide
acacttagcattctgttggacgggaattcctcatatcatcgcgtttataagcgca

SEQ ID NO: 509794 - DNA, 55 bp, Artificial
  Synthetic oligonucleotide
ttctcgtacccgggcttaaatccgcatcaccaaagcgcataccttggtcaatgtg

SEQ ID NO: 509795 - DNA, 55 bp, Artificial
  Synthetic oligonucleotide
ccagtcatcagtggctgtgctgttgcgtattatacttattggcttagtaaacgca

SEQ ID NO: 509796 - DNA, 55 bp, Artificial
  Synthetic oligonucleotide
ccgcactgcctcccattggtgtgataggtgaaacaagttgttcacgattaccaca

SEQ ID NO: 509797 - DNA, 55 bp, Artificial
  Synthetic oligonucleotide
cgcatccatagtaagcgacaacctcaaatggcgaatgtaggccaacccaaacaat

SEQ ID NO: 509798 - DNA, 55 bp, Artificial
  Synthetic oligonucleotide
cgctagtggcggcctattctcattcggtttaattgcggcgctttggtccgcatca

SEQ ID NO: 509799 - DNA, 55 bp, Artificial
  Synthetic oligonucleotide
catgggtatcgcactaggacaagttatcggttcagggattatgaccatgactggc

SEQ ID NO: 509800 - DNA, 55 bp, Artificial
  Synthetic oligonucleotide
cgttgagaaacgttctgtgttgcgatgagtgaaacgattaactctggatttaccc

SEQ ID NO: 509801 - DNA, 55 bp, Artificial
  Synthetic oligonucleotide
cgtttcgatgcaaacgtaatgcctggacgaatatgttcaggataacctatgactt

SEQ ID NO: 509802 - DNA, 55 bp, Artificial
  Synthetic oligonucleotide
cagacacgttcgaagttgactgggacgcagtcgcagaaaattcagaagaccttag

SEQ ID NO: 509803 - DNA, 55 bp, Artificial
  Synthetic oligonucleotide
ctgcaggacattcttatgctgaaagtcaagacgatggacagacatggacgttcaa

SEQ ID NO: 509804 - DNA, 55 bp, Artificial
  Synthetic oligonucleotide
gaaactaacggaatattaggtgtagcattagatgatccgcaaattgtcgaagaag

SEQ ID NO: 509805 - DNA, 55 bp, Artificial
  Synthetic oligonucleotide
gaacatatcaggcagataatgatgatcgccctagcacataagaaagaagtgaagg

SEQ ID NO: 509806 - DNA, 55 bp, Artificial
  Synthetic oligonucleotide
gaagcgtatgtcatcattccgcatgtacctagtgataaggcaaagaaggattgac

SEQ ID NO: 509807 - DNA, 55 bp, Artificial
  Synthetic oligonucleotide
gaccataatggataccttgtgcagctggagatatttcaattggtccataaggcac

SEQ ID NO: 509808 - DNA, 55 bp, Artificial
  Synthetic oligonucleotide
gagatgtgcgcattgtgcagttggctacactttacaattgagagaccctgacact

SEQ ID NO: 509809 - DNA, 55 bp, Artificial
  Synthetic oligonucleotide
gagcataaggaaatctagtaccacctttggtggtattcagcatagctgaaagatt

SEQ ID NO: 509810 - DNA, 55 bp, Artificial
  Synthetic oligonucleotide
cagaacgacaatcattagatgtggcacctcctttctgcacggaagtgctctccaa

SEQ ID NO: 509811 - DNA, 55 bp, Artificial
  Synthetic oligonucleotide
gatctaatgaatgatcttgagatgaattccaaggatgattaccctgtgcacatgt

SEQ ID NO: 509812 - DNA, 55 bp, Artificial
  Synthetic oligonucleotide
gatgcgagcggttgtctcaagtcaagaaagcgccatagcgccgatggtagcaaac

SEQ ID NO: 509813 - DNA, 55 bp, Artificial
  Synthetic oligonucleotide
gccaaggtccaaaatccgcttctttactagatacaaatgcagctgttctcaagcc

SEQ ID NO: 509814 - DNA, 54 bp, Artificial
  Synthetic oligonucleotide
aaatcctctcaacatattaacgccatgatctccatctccgattgctctatctaa

SEQ ID NO: 509815 - DNA, 53 bp, Artificial
  Synthetic oligonucleotide
gatagcaaatgcatctcatcatttacgtacgctttataagcaaggggtggtca

SEQ ID NO: 509816 - DNA, 52 bp, Artificial
  Synthetic oligonucleotide
tcattcaatcttttaagcctggcgaagtaacagctaaagagtgtaatgagat

SEQ ID NO: 509817 - DNA, 51 bp, Artificial
  Synthetic oligonucleotide
ggtactgcaaatgcaatcggtacacatgtaggcgtttctgatattcagtct

SEQ ID NO: 509818 - DNA, 50 bp, Artificial
  Synthetic oligonucleotide
tacttcttctggtagggctgcatgagacattgttgctgggtgagatagta

SEQ ID NO: 509819 - DNA, 60 bp, Artificial
  Synthetic oligonucleotide
ggtctcacagaaatcaggattaaatttagttgttgcttatatttttaacaatggatttaa

SEQ ID NO: 509820 - DNA, 60 bp, Artificial
  Synthetic oligonucleotide
tgaaagacttacatggaataaaagcagttcaagaccatctctcatatgttgctagtaagc

SEQ ID NO: 509821 - DNA, 60 bp, Artificial
  Synthetic oligonucleotide
atcataaagtaggatttatcagtttacttattttattcagtattcctttaattggttctc

SEQ ID NO: 509822 - DNA, 60 bp, Artificial
  Synthetic oligonucleotide
ttatggatacagcaaccatggcaggcttacaaaagaatgtctacccacgctatgacgagt

SEQ ID NO: 509823 - DNA, 60 bp, Artificial
  Synthetic oligonucleotide
gagatttaaaatttggattgttagctcattcaggagatgtttctgaggtaacaattaacg

SEQ ID NO: 509824 - DNA, 60 bp, Artificial
  Synthetic oligonucleotide
tatcagttgatttgtgagagtgaaaggagtcgagttgtcagcagcaggatctgtagcttc

SEQ ID NO: 509825 - DNA, 60 bp, Artificial
  Synthetic oligonucleotide
atgaagcacgtgggcttcttattgccttggaaacatacgtaaatgatattagacgaagtg

SEQ ID NO: 509826 - DNA, 60 bp, Artificial
  Synthetic oligonucleotide
ggggctttagacgatatatggcaatagttaaggttaccaagggtaaaaagtcaggtaggg

SEQ ID NO: 509827 - DNA, 60 bp, Artificial
  Synthetic oligonucleotide
gagcgaaaagttgaaggagcaatatctccaactcaaaagtttggaactgctgcattaggt

SEQ ID NO: 509828 - DNA, 60 bp, Artificial
  Synthetic oligonucleotide
attggttctctagttatgactacgaattatttgatcgctcatagacctggtcaaatagaa

SEQ ID NO: 509829 - DNA, 60 bp, Artificial
  Synthetic oligonucleotide
caaaaacaataggagaatactatgataattgcgggaaactagaaaacgactggtgggatg

SEQ ID NO: 509830 - DNA, 60 bp, Artificial
  Synthetic oligonucleotide
tgtgccaaaaacgctctatcccaactggctcaagggtttaaggggttttttaatcgccaa

SEQ ID NO: 509831 - DNA, 60 bp, Artificial
  Synthetic oligonucleotide
caatttaatcttatgttgggcatcagctagggctgtcccattgcctggaaaagcactttc

SEQ ID NO: 509832 - DNA, 60 bp, Artificial
  Synthetic oligonucleotide
cacattaaaaatagccgtgtagtctgtcctcattgtcattccatttatatctatgaagct

SEQ ID NO: 509833 - DNA, 60 bp, Artificial
  Synthetic oligonucleotide
gttatatatattgcacgaaatcctgtaacaatagaaagcgttaggaacaagattaagcga

SEQ ID NO: 509834 - DNA, 60 bp, Artificial
  Synthetic oligonucleotide
cgattgacatgtaaaacacgacagagcataactgtcgtgtgttcaaatctgagtctatag

SEQ ID NO: 509835 - DNA, 60 bp, Artificial
  Synthetic oligonucleotide
cccttctttagatggttcaactttaccaaggattagtccttttttttccatacttgttag

SEQ ID NO: 509836 - DNA, 60 bp, Artificial
  Synthetic oligonucleotide
ccggtgtttacaagggaggacagatttttatagatactaaaatcgatgtatatagatact

SEQ ID NO: 509837 - DNA, 60 bp, Artificial
  Synthetic oligonucleotide
gccgacagaaaacagacagaaaaatgatagtggaataactgtactaacgcttgaagaaca

SEQ ID NO: 509838 - DNA, 60 bp, Artificial
  Synthetic oligonucleotide
taagtataccaagttgttatctgaaaatttcttaatcggtatgaatgatattatggatac

SEQ ID NO: 509839 - DNA, 60 bp, Artificial
  Synthetic oligonucleotide
cccatggaaagacaaaatcagacaagcggtcgatgcaaccatgcgagaagcccatataag

SEQ ID NO: 509840 - DNA, 60 bp, Artificial
  Synthetic oligonucleotide
tgcaattatagcttttcaaactttctgtggatatatcggtaacaaatatttaggaatggt

SEQ ID NO: 509841 - DNA, 60 bp, Artificial
  Synthetic oligonucleotide
cctgactcaattcctaatgattggaaagaaaaattagagagtttgggcgtatctatggct

SEQ ID NO: 509842 - DNA, 60 bp, Artificial
  Synthetic oligonucleotide
tgctggcgaagggcgcctaaataaagatatctctcgtaaatttgatgacagaaaaggaac

SEQ ID NO: 509843 - DNA, 60 bp, Artificial
  Synthetic oligonucleotide
gatttgctaaaaccggtgagcgctggcgctcatacgaaacagccgatacgcaacctatgg

SEQ ID NO: 509844 - DNA, 60 bp, Artificial
  Synthetic oligonucleotide
gattataaattttcgtgctgtgaacgaagtgaactttttctttttggcaacctcgtagag

SEQ ID NO: 509845 - DNA, 60 bp, Artificial
  Synthetic oligonucleotide
ggaggctgttttttttcttactaaatatgactgtcagtgattttttatctgcactaccat

SEQ ID NO: 509846 - DNA, 60 bp, Artificial
  Synthetic oligonucleotide
gagtctatagatggctttcaatcttacttggagttttgcatgaatatggcactcgctttt

SEQ ID NO: 509847 - DNA, 60 bp, Artificial
  Synthetic oligonucleotide
gaggtttgatggttgacattttagggagtgtcatagacttgagaagtcttaagatacggc

SEQ ID NO: 509848 - DNA, 60 bp, Artificial
  Synthetic oligonucleotide
gagcgtattgaaagatacagagaaatggaagttgaattaagtacaacaatagatttattg

SEQ ID NO: 509849 - DNA, 60 bp, Artificial
  Synthetic oligonucleotide
cagcaacccgacagaaaacagacagaaaaatgatagtggaataactgtactaacgcttga

SEQ ID NO: 509850 - DNA, 60 bp, Artificial
  Synthetic oligonucleotide
gttatctgaaaatttcttaatcggtatgaatgatattatggatacagcaaccatggcagg

SEQ ID NO: 509851 - DNA, 60 bp, Artificial
  Synthetic oligonucleotide
cagaaacaagcctatttcaaaattaagtccaataaagcactaggtattgagtacgaaagt

SEQ ID NO: 509852 - DNA, 60 bp, Artificial
  Synthetic oligonucleotide
accgcaagctgcgatgactaacatggctacatccaccaataagaaggctcctttccgttg

SEQ ID NO: 509853 - DNA, 60 bp, Artificial
  Synthetic oligonucleotide
ctagcgcctttagattatggtttgagggcaattatcagtgtggatatagagcaagttatg

SEQ ID NO: 509854 - DNA, 60 bp, Artificial
  Synthetic oligonucleotide
tctaataactttctaaaggaagctgatttaaattggcttccttggtccgaatgaaagata

SEQ ID NO: 509855 - DNA, 60 bp, Artificial
  Synthetic oligonucleotide
aaggtggtatgtaccttgaatgaccttgaaaaacgtaaagtggtggagcataacgcttta

SEQ ID NO: 509856 - DNA, 60 bp, Artificial
  Synthetic oligonucleotide
actccaagcctggatatccctatgataatgccgtcactgaagtctttttcaagtatctta

SEQ ID NO: 509857 - DNA, 60 bp, Artificial
  Synthetic oligonucleotide
gtagtgatgttatacgaaatggaaagcactataaaaaaccacactatcacgttatatata

SEQ ID NO: 509858 - DNA, 60 bp, Artificial
  Synthetic oligonucleotide
agcaattatggcaggcttacagcaacatgtttatcctctctatgatgagttgaaagactt

SEQ ID NO: 509859 - DNA, 60 bp, Artificial
  Synthetic oligonucleotide
tttcctaacctattatcataataacagaaaaaactgagaggcaaacaagagaaaatagcg

SEQ ID NO: 509860 - DNA, 60 bp, Artificial
  Synthetic oligonucleotide
gtacgaaagtattgttcctatcccttacgtaaaatggaacgattataatgatgaagtaac

SEQ ID NO: 509861 - DNA, 60 bp, Artificial
  Synthetic oligonucleotide
aagctattactcgataatatgcttctaaattcttatgaaatgacagatacagcaattatg

SEQ ID NO: 509862 - DNA, 60 bp, Artificial
  Synthetic oligonucleotide
tctgcgattaatttctcgttgtttaagatacttgaaaaagacctcagtgacggcattatc

SEQ ID NO: 509863 - DNA, 60 bp, Artificial
  Synthetic oligonucleotide
cgggttcaatatacatgctaatattggcaagggtaggagtggctacgatactccagccga

SEQ ID NO: 509864 - DNA, 60 bp, Artificial
  Synthetic oligonucleotide
aaagtatggagagtatgtatttatacttgactcatgagtcaaaggacgcaatagcaaaga

SEQ ID NO: 509865 - DNA, 60 bp, Artificial
  Synthetic oligonucleotide
aaacctaaggaaccaattatttttcattcggatcatggaagccactttaaatcagcttcc

SEQ ID NO: 509866 - DNA, 60 bp, Artificial
  Synthetic oligonucleotide
aagctctatcatgttggacggtagaagtttacctacaaataacgttggagtttaccacgt

SEQ ID NO: 509867 - DNA, 59 bp, Artificial
  Synthetic oligonucleotide
tgtcgcaaaatcaggctaaatatgcgactataagctcaggtagtatcgttcgtaaaacc

SEQ ID NO: 509868 - DNA, 59 bp, Artificial
  Synthetic oligonucleotide
gttcaactctattgctttgaatacatcgaacaattttataacaattataatcctcattc

SEQ ID NO: 509869 - DNA, 58 bp, Artificial
  Synthetic oligonucleotide
tttgcaggataaaaagctactggaagaatacaaggcggaaaatgacagtctaaaagcc

SEQ ID NO: 509870 - DNA, 58 bp, Artificial
  Synthetic oligonucleotide
cctatcccttacgtaaaatggaacgattataatgatgaagtaacgattcagtttagcg

SEQ ID NO: 509871 - DNA, 58 bp, Artificial
  Synthetic oligonucleotide
ctcaaggagtgattttctcaaacgttgattttctacttcacgcttcgaaggattctta

SEQ ID NO: 509872 - DNA, 58 bp, Artificial
  Synthetic oligonucleotide
aaatctagttaaaggctatgaagaagttgcaaataacgtgcctgccaaagaatggaac

SEQ ID NO: 509873 - DNA, 57 bp, Artificial
  Synthetic oligonucleotide
caacctatggacgactacgcaggtgaggaaattgtcttcatggacgacttgcgtgcg

SEQ ID NO: 509874 - DNA, 56 bp, Artificial
  Synthetic oligonucleotide
tttaaaggtatagcattaggagatttttgggttttcaaatctaaaaattctgagcc

SEQ ID NO: 509875 - DNA, 55 bp, Artificial
  Synthetic oligonucleotide
gcatttccttggtttcaatcaagaactgcgaggtctgattaagagcggacttgat

SEQ ID NO: 509876 - DNA, 55 bp, Artificial
  Synthetic oligonucleotide
gccaaaattctattgctgatgcgaggtggtgcattcaaagggagaagtgccttta

SEQ ID NO: 509877 - DNA, 55 bp, Artificial
  Synthetic oligonucleotide
gcattgccggcacctatagcggtcaaaacggagctatcaactttacggtagctgc

SEQ ID NO: 509878 - DNA, 55 bp, Artificial
  Synthetic oligonucleotide
gcaatgattgcgacaatcggaacaggacttcttatctgggcatttgcatcaagcc

SEQ ID NO: 509879 - DNA, 55 bp, Artificial
  Synthetic oligonucleotide
gcaatacttctttaagtaatccggtgcatcagaaccccatcctttcttatcggtc

SEQ ID NO: 509880 - DNA, 55 bp, Artificial
  Synthetic oligonucleotide
gaaacggctagaacggaaccaatttgccgaacgacgccgaggacactttgggagg

SEQ ID NO: 509881 - DNA, 55 bp, Artificial
  Synthetic oligonucleotide
gccaaccgaaaacaagaatcgccccactgtagataattaggagaaggaggctggc

SEQ ID NO: 509882 - DNA, 55 bp, Artificial
  Synthetic oligonucleotide
cttttaggtggctggggaaggttgatatatctgtgttagagagaggtttacatgt

SEQ ID NO: 509883 - DNA, 55 bp, Artificial
  Synthetic oligonucleotide
gccacacccatagccagggtcattccgccaccgttggaaacaccagaaaggtaaa

SEQ ID NO: 509884 - DNA, 55 bp, Artificial
  Synthetic oligonucleotide
gccatatcctgtcctgaaccgggctgtctactcaattcggctgttgttgttcccc

SEQ ID NO: 509885 - DNA, 55 bp, Artificial
  Synthetic oligonucleotide
cttggcaaaacgcccttggccaggtcttgtgagcggtacttttgtagctgttggc

SEQ ID NO: 509886 - DNA, 55 bp, Artificial
  Synthetic oligonucleotide
gccatcacgcaggaagttctctcgctctacctcaaagtggacattgattgcctgc

SEQ ID NO: 509887 - DNA, 55 bp, Artificial
  Synthetic oligonucleotide
gcccatccgacgggcacgcgcgtactgaacaaaggttatatcgtagacttctttg

SEQ ID NO: 509888 - DNA, 55 bp, Artificial
  Synthetic oligonucleotide
gccgtgtagtctgtcctcattgtcattccatttatatctatgaagctaagcattc

SEQ ID NO: 509889 - DNA, 55 bp, Artificial
  Synthetic oligonucleotide
cttcagaaaccttttccgtgagtgcacctccaatgcctatcgcacaggctcctgc

SEQ ID NO: 509890 - DNA, 55 bp, Artificial
  Synthetic oligonucleotide
tatgcgggaattaagaagatttgtaaagcttcatggttctgaatatgggcttcca

SEQ ID NO: 509891 - DNA, 55 bp, Artificial
  Synthetic oligonucleotide
gacctccgtatagggcagtatcccgatggcagaactcacgaccacggaacaggat

SEQ ID NO: 509892 - DNA, 55 bp, Artificial
  Synthetic oligonucleotide
gaccatcctggctacttcgttatgccaaccatcttgactgacatcagcaaggaca

SEQ ID NO: 509893 - DNA, 55 bp, Artificial
  Synthetic oligonucleotide
tatgataattgcgggaaactagaaaacgactggtgggatgtccaaacggcggagc

SEQ ID NO: 509894 - DNA, 55 bp, Artificial
  Synthetic oligonucleotide
gagaccgatgagcacaagaaggccctctactttggtggcggaacagcttcaacgg

SEQ ID NO: 509895 - DNA, 55 bp, Artificial
  Synthetic oligonucleotide
gaccacggtggatttagcccagattcctagcatgccctattatacaggtatgatg

SEQ ID NO: 509896 - DNA, 55 bp, Artificial
  Synthetic oligonucleotide
tattgggcacaccatcattgcaggatagttgtgtaatccgtgggtgtattctcgc

SEQ ID NO: 509897 - DNA, 55 bp, Artificial
  Synthetic oligonucleotide
gacaatgctaacgagcaactgttaaaagcgacaaatggcgtattttcaagtctgt

SEQ ID NO: 509898 - DNA, 55 bp, Artificial
  Synthetic oligonucleotide
gagcgaagcagagagcgacaaggtagcacttggcttaaaggacgtggagaacgag

SEQ ID NO: 509899 - DNA, 55 bp, Artificial
  Synthetic oligonucleotide
gacaagtgttcaggacaacaaaatggtgccaagtgatcccaagtttgacgctcaa

SEQ ID NO: 509900 - DNA, 55 bp, Artificial
  Synthetic oligonucleotide
gaattaagttcactagagagcttcaaaggctcggctactgggacactgccgaaaa

SEQ ID NO: 509901 - DNA, 55 bp, Artificial
  Synthetic oligonucleotide
gaaggcagctaccccagctaaagatgcgtcaaatctccaacaaggactggctctg

SEQ ID NO: 509902 - DNA, 55 bp, Artificial
  Synthetic oligonucleotide
gaggagtggattaattggtcgatgaaacaatcggattggcccgttaaacgcccca

SEQ ID NO: 509903 - DNA, 55 bp, Artificial
  Synthetic oligonucleotide
gaggggttgggatcatcgatgtgatgagcctttacggagccagcgctgtcaaaga

SEQ ID NO: 509904 - DNA, 55 bp, Artificial
  Synthetic oligonucleotide
gaagctaagctggctcaatatcaaaaggacttggccgctgttcaacaggccaact

SEQ ID NO: 509905 - DNA, 55 bp, Artificial
  Synthetic oligonucleotide
gatcagagcaaaggtatgagtggtccttcgctataacctaggactgcgagggttg

SEQ ID NO: 509906 - DNA, 55 bp, Artificial
  Synthetic oligonucleotide
gatgatgccgcttcactccattgggtcaatatcttcgcgaaagataaccagttgc

SEQ ID NO: 509907 - DNA, 55 bp, Artificial
  Synthetic oligonucleotide
tcaaactctttgatgccccaactgtcaatgcggtcattaagagccaaaatctgtt

SEQ ID NO: 509908 - DNA, 55 bp, Artificial
  Synthetic oligonucleotide
gattccagacgaggaaattgccctagctattgttgattgcggtggaaccttgcgc

SEQ ID NO: 509909 - DNA, 55 bp, Artificial
  Synthetic oligonucleotide
gattgccaccaagcaatcggtggaaaaggctggacagatgcaggctatcgttgtc

SEQ ID NO: 509910 - DNA, 55 bp, Artificial
  Synthetic oligonucleotide
gggcccgctttctagcgcgacggctctgatagttggaacgaccaccatcatagag

SEQ ID NO: 509911 - DNA, 55 bp, Artificial
  Synthetic oligonucleotide
ggggcaggggcttctataatcattgtagtagtagtttcactaagaacgttccaac

SEQ ID NO: 509912 - DNA, 55 bp, Artificial
  Synthetic oligonucleotide
ggggctacttggttttgccagtccaattttcaaagctagattcaaggacgtagac

SEQ ID NO: 509913 - DNA, 55 bp, Artificial
  Synthetic oligonucleotide
gtgtttctctcggtcaaatcccttgcaaacagaggcctagcaacctataatagtt

SEQ ID NO: 509914 - DNA, 55 bp, Artificial
  Synthetic oligonucleotide
gggtgagcagctagagcctcttctcccttagccgtcagggcatagcctcgcagac

SEQ ID NO: 509915 - DNA, 55 bp, Artificial
  Synthetic oligonucleotide
ggtatagcagataaaggacggggattgaccacttgataatttggtcgaggccacc

SEQ ID NO: 509916 - DNA, 55 bp, Artificial
  Synthetic oligonucleotide
ggtcaaactcgcggtcaagtttcagatggttgggcaatttctatggctctcagtc

SEQ ID NO: 509917 - DNA, 55 bp, Artificial
  Synthetic oligonucleotide
ggtcaccaaggtaataatacccgcatagagaaccgaattgaagctcatccgcaga

SEQ ID NO: 509918 - DNA, 55 bp, Artificial
  Synthetic oligonucleotide
ggtcttagggttattcgtgcctttgctcgtgaatcttttcaagaggagcgttttg

SEQ ID NO: 509919 - DNA, 55 bp, Artificial
  Synthetic oligonucleotide
ggtgcgaacgagatcgtaataatcagtccctttaacagcccaattaccaacagtc

SEQ ID NO: 509920 - DNA, 55 bp, Artificial
  Synthetic oligonucleotide
ggtggagcactaggaaatgcattggctggattaggtaacggtctcaaacaatgga

SEQ ID NO: 509921 - DNA, 55 bp, Artificial
  Synthetic oligonucleotide
ggttctcattcctcagctaatcgaaaatgactttattccttgcaatcagccccgt

SEQ ID NO: 509922 - DNA, 55 bp, Artificial
  Synthetic oligonucleotide
gtaagagggagatgaaggtaatgccaacctgaatggtcgatagaaagttattggg

SEQ ID NO: 509923 - DNA, 55 bp, Artificial
  Synthetic oligonucleotide
gtagaaggttctacccttggcttgaaggacggcatcacgcaccagtggaaggagc

SEQ ID NO: 509924 - DNA, 55 bp, Artificial
  Synthetic oligonucleotide
gtagcaaaacattctttacggtacggttacctacaacccagaattcatagctgcc

SEQ ID NO: 509925 - DNA, 55 bp, Artificial
  Synthetic oligonucleotide
gtatcgtcagaaatagctgctaccatctcagcctgcgaattggcataggtaaagg

SEQ ID NO: 509926 - DNA, 55 bp, Artificial
  Synthetic oligonucleotide
gtcaccggtatgcaggtcaaagtaacgatagttgctaccgtcggtattgaccagt

SEQ ID NO: 509927 - DNA, 55 bp, Artificial
  Synthetic oligonucleotide
gtcagggctggccggctgccaaagatagtagtcgcgatagggattgtccttagat

SEQ ID NO: 509928 - DNA, 55 bp, Artificial
  Synthetic oligonucleotide
gtcatcgctcctttcaacagtctacctagacagcacctttatcccctctggtctc

SEQ ID NO: 509929 - DNA, 55 bp, Artificial
  Synthetic oligonucleotide
gtccacggactaaatgcgagagtgtacgagcggagcgacaagagcaaccagggag

SEQ ID NO: 509930 - DNA, 55 bp, Artificial
  Synthetic oligonucleotide
gtcccatctgactaaattgcagagctccttagtcgataaggtatgggcagagtgc

SEQ ID NO: 509931 - DNA, 55 bp, Artificial
  Synthetic oligonucleotide
gtgttgatactaagtttacgtgtgccaatagcattaaccagctcctcggttgctt

SEQ ID NO: 509932 - DNA, 55 bp, Artificial
  Synthetic oligonucleotide
gtctaaacgtgggaaagctgctaaaatagcgtcaagtgcgtctctttggtgctgg

SEQ ID NO: 509933 - DNA, 55 bp, Artificial
  Synthetic oligonucleotide
gtgaaacaaacgtggtacgagcaggaagcggattaagaagttggcgtgttatcag

SEQ ID NO: 509934 - DNA, 55 bp, Artificial
  Synthetic oligonucleotide
gtgagtgctgcaactgaatccactacaattaagtcaaaagctcctgttctaacaa

SEQ ID NO: 509935 - DNA, 55 bp, Artificial
  Synthetic oligonucleotide
gtgccccattcagtagccgtcgtcattgactccatgaagcgaaatgaggagaccg

SEQ ID NO: 509936 - DNA, 55 bp, Artificial
  Synthetic oligonucleotide
gtggggactatgggaacggattgggtcaacgatgttctctttggccaatacattc

SEQ ID NO: 509937 - DNA, 55 bp, Artificial
  Synthetic oligonucleotide
gtggtaatcccgtagcgggacagggtttccttgagcaaattgaaggtaccaccgt

SEQ ID NO: 509938 - DNA, 55 bp, Artificial
  Synthetic oligonucleotide
gcctacttcgatggcgattacccaacccctctctacgactatgaagaacgctacc

SEQ ID NO: 509939 - DNA, 55 bp, Artificial
  Synthetic oligonucleotide
gcctgatccatacctcgggaaatggcctcaatagaaagaccgccactaccagcat

SEQ ID NO: 509940 - DNA, 55 bp, Artificial
  Synthetic oligonucleotide
gcctggccaatcggcttcaacaaccaagctctcacgctggggagctgccacaacc

SEQ ID NO: 509941 - DNA, 55 bp, Artificial
  Synthetic oligonucleotide
gcgataaaatgaatacagtagcgagccagacttccgatgagaactcctactacca

SEQ ID NO: 509942 - DNA, 55 bp, Artificial
  Synthetic oligonucleotide
gcgatgacaaagagtcccagctggatattgaggtagagaaccatggcaacaacca

SEQ ID NO: 509943 - DNA, 55 bp, Artificial
  Synthetic oligonucleotide
gcgcacgcctcgtttctcctaaaattgatccagagcactctaaagaaatcgcacg

SEQ ID NO: 509944 - DNA, 55 bp, Artificial
  Synthetic oligonucleotide
gcggcttacgtatcaagtgaagataccccacgtgctttgacagttgaagcccgcg

SEQ ID NO: 509945 - DNA, 55 bp, Artificial
  Synthetic oligonucleotide
gctactggtcaacaagctaagggagcagtagttgtcaatggtcagcaactgtact

SEQ ID NO: 509946 - DNA, 55 bp, Artificial
  Synthetic oligonucleotide
gctatccgctaggattcctcagacagagcttacctttatgatataaagtctagta

SEQ ID NO: 509947 - DNA, 55 bp, Artificial
  Synthetic oligonucleotide
gctccgccagcaaaaggtaggtctaacttagcagcctccttacctcttgtggtca

SEQ ID NO: 509948 - DNA, 55 bp, Artificial
  Synthetic oligonucleotide
gctcctccaagaaaagttcagacaagttagagagcatatagctctacaagctcgt

SEQ ID NO: 509949 - DNA, 55 bp, Artificial
  Synthetic oligonucleotide
gctgactcgtcatctgttaaggttggtgaaacagccattgctatcggtagccctt

SEQ ID NO: 509950 - DNA, 55 bp, Artificial
  Synthetic oligonucleotide
gctgggaatgggccgacagaccccaggaataagacccaggccaggagtctgacca

SEQ ID NO: 509951 - DNA, 55 bp, Artificial
  Synthetic oligonucleotide
ggaaatcaaacgaaccagaaccaatgccaaatgcggtggctcaaacagaatatca

SEQ ID NO: 509952 - DNA, 55 bp, Artificial
  Synthetic oligonucleotide
ggaaatgattcagcgcacaatctaaatagccgtagtgctacacaggaaaacgcta

SEQ ID NO: 509953 - DNA, 55 bp, Artificial
  Synthetic oligonucleotide
ggacacaatcaaccaagtcagagctgtatggccgaagaaaccttgcaaaccggcc

SEQ ID NO: 509954 - DNA, 55 bp, Artificial
  Synthetic oligonucleotide
ggacagttaattttattggtctaaccgagttagtgagggagctagacctcgtctc

SEQ ID NO: 509955 - DNA, 55 bp, Artificial
  Synthetic oligonucleotide
ggacggtagaagtttacctacaaataacgttggagtttaccacgttaggggtgta

SEQ ID NO: 509956 - DNA, 55 bp, Artificial
  Synthetic oligonucleotide
ggagaatcacacggtctttatgaataagatgcgtcggggtcggctccatctgccc

SEQ ID NO: 509957 - DNA, 55 bp, Artificial
  Synthetic oligonucleotide
ggagcaaacgaagattaaaacgcaaaatttctcagtacttctagctgggtgcagg

SEQ ID NO: 509958 - DNA, 55 bp, Artificial
  Synthetic oligonucleotide
ggagctttcagagcaatcttatgagctttgggagaaagattgggatagaacggaa

SEQ ID NO: 509959 - DNA, 55 bp, Artificial
  Synthetic oligonucleotide
ggatgcctaagtcttctggcaggactaggacgaggttctctcccacttgctgaat

SEQ ID NO: 509960 - DNA, 55 bp, Artificial
  Synthetic oligonucleotide
ggcaggtatgggaaataatctcaatcaactgactaaaacagtacatacactggac

SEQ ID NO: 509961 - DNA, 55 bp, Artificial
  Synthetic oligonucleotide
ggccaaggaaaccgtggtagcgacctttggaattctctaccacaatccagatgcg

SEQ ID NO: 509962 - DNA, 55 bp, Artificial
  Synthetic oligonucleotide
ggcccagtatttctccaggcccaagcaggagctgatttacgaggatgcccagctg

SEQ ID NO: 509963 - DNA, 55 bp, Artificial
  Synthetic oligonucleotide
ggcctatttgagtctcatatggtgacgttgagaaatcgccttctacctcttgtag

SEQ ID NO: 509964 - DNA, 55 bp, Artificial
  Synthetic oligonucleotide
gggaaatctgggcaatatcttccctatcgtgctctacgctgttgccgccttggtt

SEQ ID NO: 509965 - DNA, 55 bp, Artificial
  Synthetic oligonucleotide
gggcaaaagaaatttcgggcaacccaaatctgggattggctctataagaagcggg

SEQ ID NO: 509966 - DNA, 55 bp, Artificial
  Synthetic oligonucleotide
attcgaacagtatgttgacgatgtttacacaaacgccacaacctgctcgtgccaa

SEQ ID NO: 509967 - DNA, 55 bp, Artificial
  Synthetic oligonucleotide
caacctcggtttcaatggccacttggccctgggtgaccttgcgaatactgttgag

SEQ ID NO: 509968 - DNA, 55 bp, Artificial
  Synthetic oligonucleotide
caccaatgcagctggctcaatatgcagcgatagttgctaacggtggcaatcggat

SEQ ID NO: 509969 - DNA, 55 bp, Artificial
  Synthetic oligonucleotide
caccagcctcaacggccctttggaaataaccgggtcgcttgaaggtcgtcacaat

SEQ ID NO: 509970 - DNA, 55 bp, Artificial
  Synthetic oligonucleotide
cagcaaaggctcccatggttttcttggtcgctgcatcaatctgctccaggacatc

SEQ ID NO: 509971 - DNA, 55 bp, Artificial
  Synthetic oligonucleotide
cagctaaccaagctatcaatacaggagtagcaacaccgaatgcctcagcaggtac

SEQ ID NO: 509972 - DNA, 55 bp, Artificial
  Synthetic oligonucleotide
cagctgataggtcagcagtatggggcgtttgctaaggggatcttggctgagttga

SEQ ID NO: 509973 - DNA, 55 bp, Artificial
  Synthetic oligonucleotide
cagcttaagcccgatagccaagcggccatccaagccttgcaagtcaagggaattg

SEQ ID NO: 509974 - DNA, 55 bp, Artificial
  Synthetic oligonucleotide
caggcttacagcaacatgtttatcctctctatgatgagttgaaagacttacatgg

SEQ ID NO: 509975 - DNA, 55 bp, Artificial
  Synthetic oligonucleotide
cagggcctctttgacagcctttaggtaactgcggttgataataagcttctcgcca

SEQ ID NO: 509976 - DNA, 55 bp, Artificial
  Synthetic oligonucleotide
cagggttgaggcgtaaacgaaggctgaggaagcccaaggcctgaccgttatcagc

SEQ ID NO: 509977 - DNA, 55 bp, Artificial
  Synthetic oligonucleotide
cagggttgataaccaggcgacaccagcagctaatcaacctgcggctaatgtggcc

SEQ ID NO: 509978 - DNA, 55 bp, Artificial
  Synthetic oligonucleotide
caggtagttggtaatctccagatttaacttggcattgcggtcggttaacttttga

SEQ ID NO: 509979 - DNA, 55 bp, Artificial
  Synthetic oligonucleotide
cagttgtgccccatactgcaatatgagcccgttctgacagattaacctctagacc

SEQ ID NO: 509980 - DNA, 55 bp, Artificial
  Synthetic oligonucleotide
tggtttagccgttgttatgaccaatggtgatgctggctggaagcatatgaccatg

SEQ ID NO: 509981 - DNA, 55 bp, Artificial
  Synthetic oligonucleotide
catgggccagtttagcccacttaaaagattcgtgataccagcataaactagggaa

SEQ ID NO: 509982 - DNA, 55 bp, Artificial
  Synthetic oligonucleotide
ccaaataagcgacagagttcagagaagcgtgtttcaatggttctacgcatagcta

SEQ ID NO: 509983 - DNA, 55 bp, Artificial
  Synthetic oligonucleotide
ccaaattgattttcaaaccttgcgctctttaactggttgggacagtacctctgct

SEQ ID NO: 509984 - DNA, 55 bp, Artificial
  Synthetic oligonucleotide
ccaaccgacctaagcctgaaagcaaaggggtgttgattcgcttggggctccagat

SEQ ID NO: 509985 - DNA, 55 bp, Artificial
  Synthetic oligonucleotide
ccaagcaggcagcacaatcagaattagcagtgatgttgcctgactatgtgagacg

SEQ ID NO: 509986 - DNA, 55 bp, Artificial
  Synthetic oligonucleotide
tggcatgaacctcaagctcttggctgacttctttaacagagtaaccctcttcaag

SEQ ID NO: 509987 - DNA, 55 bp, Artificial
  Synthetic oligonucleotide
ccaattgaggggtaaacctagagatttgctggctatgccctagcaatctttgcct

SEQ ID NO: 509988 - DNA, 55 bp, Artificial
  Synthetic oligonucleotide
ccagagtaatttctgtctgccctggtctatcatctatcacctcaacatgctcagg

SEQ ID NO: 509989 - DNA, 55 bp, Artificial
  Synthetic oligonucleotide
ccagatagaagcaaagatcgcaaagttttgcccctaatggacgaacgagctaaac

SEQ ID NO: 509990 - DNA, 55 bp, Artificial
  Synthetic oligonucleotide
ccagtcttcagcttatgctggttgatgctcgagtgcaaggggtgcaactcattga

SEQ ID NO: 509991 - DNA, 55 bp, Artificial
  Synthetic oligonucleotide
ccataccgccgtcgacattgagggctgttccggtgatatagtgtcccggtactga

SEQ ID NO: 509992 - DNA, 55 bp, Artificial
  Synthetic oligonucleotide
aactagtataatgcaacagagcattggcatagtgaaccgcaccattaaccgcata

SEQ ID NO: 509993 - DNA, 55 bp, Artificial
  Synthetic oligonucleotide
aagacagctttcctgcgttcagaaagtctgagtaattcttgtgcatagtaacggc

SEQ ID NO: 509994 - DNA, 55 bp, Artificial
  Synthetic oligonucleotide
aagatacggccttaagaaatattaacgccataatcacgcagaagaatgattttaa

SEQ ID NO: 509995 - DNA, 55 bp, Artificial
  Synthetic oligonucleotide
aagctggggttttaggtggagcggttgcaggagtttctagtggtaacccgatagg

SEQ ID NO: 509996 - DNA, 55 bp, Artificial
  Synthetic oligonucleotide
aagtcgaggaaaaggtagctctcgtttatcttctgtcttcgaggacatagctgaa

SEQ ID NO: 509997 - DNA, 55 bp, Artificial
  Synthetic oligonucleotide
aagttggcgtgttatcagtaaagaaacagtcgcacaagtgaacttcattcaaggg

SEQ ID NO: 509998 - DNA, 55 bp, Artificial
  Synthetic oligonucleotide
acaccagatgcaagaagatggctcagatagtcgcctttaaatcttaagcgtggtc

SEQ ID NO: 509999 - DNA, 55 bp, Artificial
  Synthetic oligonucleotide
acataccagccaatttctcgacttctacgctgatatatgacggtctgctatcgca

SEQ ID NO: 510000 - DNA, 55 bp, Artificial
  Synthetic oligonucleotide
tttcagcagagttcttgattgggaaactgctctctaacaacctgattaacctagg

SEQ ID NO: 510001 - DNA, 55 bp, Artificial
  Synthetic oligonucleotide
accaagatccagaaaccatgttcgctaaacgggtgcctgaacagtcaggaaaccg

SEQ ID NO: 510002 - DNA, 55 bp, Artificial
  Synthetic oligonucleotide
tttattaggtctggctcagcgggcaggaactctaatctctggtgaagacctagtc

SEQ ID NO: 510003 - DNA, 55 bp, Artificial
  Synthetic oligonucleotide
actaacgcaattaaaaccagggctgccagaatcaaggtgaggttaaactgccaac

SEQ ID NO: 510004 - DNA, 55 bp, Artificial
  Synthetic oligonucleotide
ttggactttgggcatttactggggaagtaagacaaccatcttagctagtgacgga

SEQ ID NO: 510005 - DNA, 55 bp, Artificial
  Synthetic oligonucleotide
ttgacgtttctgcacctcattagccattatctgctgacgttccttgatgatagct

SEQ ID NO: 510006 - DNA, 55 bp, Artificial
  Synthetic oligonucleotide
agcggatggcaagcactggcagcgtttgactgacgatgcccaacatcttaaagac

SEQ ID NO: 510007 - DNA, 55 bp, Artificial
  Synthetic oligonucleotide
aggaactctaccatctggccaagcactataaccctaaggcgcaaaagcaagcggg

SEQ ID NO: 510008 - DNA, 55 bp, Artificial
  Synthetic oligonucleotide
aggacagcggtccttgagcaagagggctgtttcaatagctagagcggcattagcc

SEQ ID NO: 510009 - DNA, 55 bp, Artificial
  Synthetic oligonucleotide
ttcgtgtcgtagattaaggagccgctctaagctctgaagaacttgtccggctggg

SEQ ID NO: 510010 - DNA, 55 bp, Artificial
  Synthetic oligonucleotide
aggccactggcaccatccacattgaatataaccaggcccttaaacaaagcctgcc

SEQ ID NO: 510011 - DNA, 55 bp, Artificial
  Synthetic oligonucleotide
ttccttaccctagagcttttgagcactccctattagctggcccgaattttgtttg

SEQ ID NO: 510012 - DNA, 55 bp, Artificial
  Synthetic oligonucleotide
ataagcaggattgtagcaaagaggaggagcgtctctgtgaaatcttagaagttcc

SEQ ID NO: 510013 - DNA, 55 bp, Artificial
  Synthetic oligonucleotide
atattcaactactgctatatgaccggctactgggtcagaacctgctactcctgcc

SEQ ID NO: 510014 - DNA, 55 bp, Artificial
  Synthetic oligonucleotide
atattggcaagggtaggagtggctacgatactccagccgagcaaggtctaaggga

SEQ ID NO: 510015 - DNA, 55 bp, Artificial
  Synthetic oligonucleotide
tgttaagaggccagtcgtttgactcaggcggggaaagttactggctgtaagaccg

SEQ ID NO: 510016 - DNA, 55 bp, Artificial
  Synthetic oligonucleotide
atcggttgaagggtcttgggtactagcaatcacagagacaccgaccgagcgcccc

SEQ ID NO: 510017 - DNA, 55 bp, Artificial
  Synthetic oligonucleotide
atctattccacaagccaaggggcgagtcgaaaggctcaatccttacaggaacacg

SEQ ID NO: 510018 - DNA, 55 bp, Artificial
  Synthetic oligonucleotide
attccatcactgagacgatggcttcagcagatgagaaatccggtaactgttcaaa

SEQ ID NO: 510019 - DNA, 55 bp, Artificial
  Synthetic oligonucleotide
cgacagagcataactgtcgtgtgttcaaatctgagtctatagatggctttcaatc

SEQ ID NO: 510020 - DNA, 55 bp, Artificial
  Synthetic oligonucleotide
cgacctaagagttccttctttgatgcccaactggtttctgaggaggcagtccccg

SEQ ID NO: 510021 - DNA, 55 bp, Artificial
  Synthetic oligonucleotide
cgacctgcatcagaggcacagaaatgcctactgcacaggattgaatgacacgtcc

SEQ ID NO: 510022 - DNA, 55 bp, Artificial
  Synthetic oligonucleotide
cgactaggacgtccttgatttagattggtaaccggttgctcactcgtcactacag

SEQ ID NO: 510023 - DNA, 55 bp, Artificial
  Synthetic oligonucleotide
cgagtgggttctcgtgcagtccgtaaggacgcagtcgtgatgcaagattggttaa

SEQ ID NO: 510024 - DNA, 55 bp, Artificial
  Synthetic oligonucleotide
tgacatcgaggtaagccttaccgattggtagagcagtattgagagcttcttcctg

SEQ ID NO: 510025 - DNA, 55 bp, Artificial
  Synthetic oligonucleotide
cgccacaacctgctcgtgccaacacatatctgcgccaaaagtatggctattcgag

SEQ ID NO: 510026 - DNA, 55 bp, Artificial
  Synthetic oligonucleotide
cgccggtctacatgactgacctagcggagctccaagcaagtgacgatgtatccca

SEQ ID NO: 510027 - DNA, 55 bp, Artificial
  Synthetic oligonucleotide
cgcggtcttttagtagaattggagaatactatcattgaaagcaaggtataaaggg

SEQ ID NO: 510028 - DNA, 55 bp, Artificial
  Synthetic oligonucleotide
cgctcggaccagcgactagaattaatcaaccagagcttgaccaagacagtcaagg

SEQ ID NO: 510029 - DNA, 55 bp, Artificial
  Synthetic oligonucleotide
cgctggcgctcatacgaaacagccgatacgcaacctatggacgactacgcaggtg

SEQ ID NO: 510030 - DNA, 55 bp, Artificial
  Synthetic oligonucleotide
cgctttaacatatcagggtcagcatgagcaagctcttttattgaatgtatcccca

SEQ ID NO: 510031 - DNA, 55 bp, Artificial
  Synthetic oligonucleotide
cggcaatgttcgtgaccaagactgggtacgggaccctcgccaaatcggagcctgg

SEQ ID NO: 510032 - DNA, 55 bp, Artificial
  Synthetic oligonucleotide
cgggactgattctccccgcctaagcgaatccattcgcatcagcctatcggacctc

SEQ ID NO: 510033 - DNA, 55 bp, Artificial
  Synthetic oligonucleotide
tcttgccggactggctaccgctgttttcttagtgcgggatggacatatgtccgga

SEQ ID NO: 510034 - DNA, 55 bp, Artificial
  Synthetic oligonucleotide
cgtaatggtgtgagggttaaggtcttccaatccaatgtttatgaagcggttgagg

SEQ ID NO: 510035 - DNA, 55 bp, Artificial
  Synthetic oligonucleotide
cgtagactgctgttagcttacctccgacggtatcgggaattttaagactctgagg

SEQ ID NO: 510036 - DNA, 55 bp, Artificial
  Synthetic oligonucleotide
ctaaagcctcgtcattctaaggtttaccgcacccacccgatgtacgtggtgcccc

SEQ ID NO: 510037 - DNA, 55 bp, Artificial
  Synthetic oligonucleotide
ctagggccatctgattagtttcttcactggcctgataaaattggccaaagcgacc

SEQ ID NO: 510038 - DNA, 55 bp, Artificial
  Synthetic oligonucleotide
ctagtcttgagcgttccactcagccttgatagcctggtaggctgtgactgggtcc

SEQ ID NO: 510039 - DNA, 55 bp, Artificial
  Synthetic oligonucleotide
ctatgaagctaagcattctgatattggagcccaactagagcttgatgctgagcgt

SEQ ID NO: 510040 - DNA, 55 bp, Artificial
  Synthetic oligonucleotide
tcgaccgcaattgcttacgtatgatccagaatgaattgcctcaggtctttcaaaa

SEQ ID NO: 510041 - DNA, 55 bp, Artificial
  Synthetic oligonucleotide
ctgattatgccagtccaaaaggctttgtcggatagtggataactctaccggctca

SEQ ID NO: 510042 - DNA, 55 bp, Artificial
  Synthetic oligonucleotide
ctgccaaagacttcgagtctctaccaaaatagaactctgcagattctccattact

SEQ ID NO: 510043 - DNA, 55 bp, Artificial
  Synthetic oligonucleotide
tcaccgcgtgacaaattactgacgatggtaatattgcgattggggacgaaatgca

SEQ ID NO: 510044 - DNA, 55 bp, Artificial
  Synthetic oligonucleotide
ctgcccacttggatgtccgcgatattttcggggaggaatacgcttttcgggccgg

SEQ ID NO: 510045 - DNA, 55 bp, Artificial
  Synthetic oligonucleotide
tcaagcctttatagcttgggcgttcacagtatttgggaatggaaggcagctaccc

SEQ ID NO: 510046 - DNA, 55 bp, Artificial
  Synthetic oligonucleotide
cccacgcaactggctcacccgattaaaatagaagcgggcagtcgtctctctggcc

SEQ ID NO: 510047 - DNA, 55 bp, Artificial
  Synthetic oligonucleotide
ccccatatgggaattccgtcacaacaatgcgttcacgaccagacttggttgtttc

SEQ ID NO: 510048 - DNA, 55 bp, Artificial
  Synthetic oligonucleotide
ccccatgcgggtgtcctgagatagcccagtattcgccagtcgtttctgtgggaat

SEQ ID NO: 510049 - DNA, 55 bp, Artificial
  Synthetic oligonucleotide
cccgcatagagctccacctgacctggcctcgcccctaactgctcgacaaagatgg

SEQ ID NO: 510050 - DNA, 55 bp, Artificial
  Synthetic oligonucleotide
cccgtacagtaattggagggcattggattggggatgtactaggagcaatcggtgg

SEQ ID NO: 510051 - DNA, 55 bp, Artificial
  Synthetic oligonucleotide
cccgttcacgacaaattttggtcttttcaggacagtggtgattaacctccctccc

SEQ ID NO: 510052 - DNA, 55 bp, Artificial
  Synthetic oligonucleotide
ccctactatctgggtaagcaagaggctatgagtcaccatcctctggtcaattttg

SEQ ID NO: 510053 - DNA, 55 bp, Artificial
  Synthetic oligonucleotide
ccctaggcaatttagccaagggatgggctctagcgacttgctcattaagttcctc

SEQ ID NO: 510054 - DNA, 55 bp, Artificial
  Synthetic oligonucleotide
ccctcaaacccatattctgtcttcttcaattttctagggctagccacaacatcac

SEQ ID NO: 510055 - DNA, 55 bp, Artificial
  Synthetic oligonucleotide
ccgctgacaataagctcgctgacgatattagcattaagcaagggaatatgagtat

SEQ ID NO: 510056 - DNA, 55 bp, Artificial
  Synthetic oligonucleotide
ccgtcaaccctcagaaagtagtagaccaattgaatggtaaacctgctataaaacc

SEQ ID NO: 510057 - DNA, 55 bp, Artificial
  Synthetic oligonucleotide
cctaactcagagattgctaccgtcagcttccgtgagctctgggagcaggccaaga

SEQ ID NO: 510058 - DNA, 55 bp, Artificial
  Synthetic oligonucleotide
cctaatggtgctcctagccaatctggaatatgacaccacctaatggatttccggc

SEQ ID NO: 510059 - DNA, 55 bp, Artificial
  Synthetic oligonucleotide
cctagaaagcccctatatgagattattgcgactgacctgctcgaaactggtctga

SEQ ID NO: 510060 - DNA, 55 bp, Artificial
  Synthetic oligonucleotide
tgattggattagtcgtcatgtttgcgcctctaggaatctatcatgcctttctcaa

SEQ ID NO: 510061 - DNA, 55 bp, Artificial
  Synthetic oligonucleotide
cctctggatcaaaagtccgaatagtcccttcaaagaagcccttcgctggcagaac

SEQ ID NO: 510062 - DNA, 55 bp, Artificial
  Synthetic oligonucleotide
cctgcgttatagtctttaaaataagtgtaagctccgcctgtgttatcgcctacgc

SEQ ID NO: 510063 - DNA, 55 bp, Artificial
  Synthetic oligonucleotide
tgagtttaggcacttattgtctgttccagaaagttactcaaatgcggaaatggat

SEQ ID NO: 510064 - DNA, 55 bp, Artificial
  Synthetic oligonucleotide
ccttagacatccagtcaaggatacggtcttccttcagggttacttggttttcagc

SEQ ID NO: 510065 - DNA, 55 bp, Artificial
  Synthetic oligonucleotide
ccttagttgcggaaacattagcaactggactggtcgtggccttttgcggagttgc

SEQ ID NO: 510066 - DNA, 55 bp, Artificial
  Synthetic oligonucleotide
ccttatgctggcagtcagattgctaatgctaaagctgcagggctcaaagtttctg

SEQ ID NO: 510067 - DNA, 55 bp, Artificial
  Synthetic oligonucleotide
cgaaacgattgagaataaccgtgataaaggccgtgaagttggtcatttcaacttc

SEQ ID NO: 510068 - DNA, 55 bp, Artificial
  Synthetic oligonucleotide
cgaaatcctgtaacaatagaaagcgttaggaacaagattaagcgaaaattgggga

SEQ ID NO: 510069 - DNA, 55 bp, Artificial
  Synthetic oligonucleotide
cgaacctatattagcgacatcgagtgtttccaacgaaatgtttcacttgaaagcg

SEQ ID NO: 510070 - DNA, 55 bp, Artificial
  Synthetic oligonucleotide
cgaagacggtgattggcaggtgacgtttgtgttggcccttgacccaccaactttc

SEQ ID NO: 510071 - DNA, 54 bp, Artificial
  Synthetic oligonucleotide
tggttggccaggaatttcttagcgatggcctcataggttccaccagttgccgaa

SEQ ID NO: 510072 - DNA, 54 bp, Artificial
  Synthetic oligonucleotide
tgataaggttcgtctatcagattattggcactaaccccaatccgtctaactgcg

SEQ ID NO: 510073 - DNA, 54 bp, Artificial
  Synthetic oligonucleotide
tacattaatcataaaacgccctcctctctaacgagatttggtttagcaccgttg

SEQ ID NO: 510074 - DNA, 54 bp, Artificial
  Synthetic oligonucleotide
ttcagtctggctatagttagtgaaaagggctaggacattattgaaggttccttg

SEQ ID NO: 510075 - DNA, 54 bp, Artificial
  Synthetic oligonucleotide
ttttaaggaggagcttgcgggtccgctcagggtctttgttccagatgttgcccc

SEQ ID NO: 510076 - DNA, 54 bp, Artificial
  Synthetic oligonucleotide
atcgctagcttgatcactttgagctgtagaatcgctagcttgaccatcagttcc

SEQ ID NO: 510077 - DNA, 54 bp, Artificial
  Synthetic oligonucleotide
gtcggggttgccaacataagccagacgtcgctggtattgtccgtggtaccggtc

SEQ ID NO: 510078 - DNA, 54 bp, Artificial
  Synthetic oligonucleotide
atccgttactatgataggttttaccgtcttaacattgtgtgtcttaggaacagg

SEQ ID NO: 510079 - DNA, 54 bp, Artificial
  Synthetic oligonucleotide
ggggagaggagatatcgctgaagtgattgtactctttccccatctccctattca

SEQ ID NO: 510080 - DNA, 54 bp, Artificial
  Synthetic oligonucleotide
agcgattgaacaatacctcccaacagttagaggaagtgagatagaaaatatggc

SEQ ID NO: 510081 - DNA, 54 bp, Artificial
  Synthetic oligonucleotide
gcgcatagccatcatttgtgacaagccgcacggttcaaaagcacttggcattaa

SEQ ID NO: 510082 - DNA, 54 bp, Artificial
  Synthetic oligonucleotide
gcatactgccttgctttcctaaaatcaagtcgcttttagacgccctccgttact

SEQ ID NO: 510083 - DNA, 54 bp, Artificial
  Synthetic oligonucleotide
gagcaaagtcaggtctaccactacgaaggtgggattgtcagctatgttgactac

SEQ ID NO: 510084 - DNA, 53 bp, Artificial
  Synthetic oligonucleotide
ccttaaaacaatcaggggaaacggttcgtcagttatccagatagtatcaggtt

SEQ ID NO: 510085 - DNA, 53 bp, Artificial
  Synthetic oligonucleotide
ttggaaatgaaactgtctaaatgctcatagagaacgctggtaatgcggacacc

SEQ ID NO: 510086 - DNA, 53 bp, Artificial
  Synthetic oligonucleotide
tcaatccgccagctcgcagtcggatgatgaaaagtcgagcgatgggtgagggg

SEQ ID NO: 510087 - DNA, 53 bp, Artificial
  Synthetic oligonucleotide
ctgtcaacacgactcaattcaagccctccaatccacctgcagagtgtcctcct

SEQ ID NO: 510088 - DNA, 53 bp, Artificial
  Synthetic oligonucleotide
gtgtaccaatggcaattagtccaatacatgacaaggatattagcggagttgaa

SEQ ID NO: 510089 - DNA, 53 bp, Artificial
  Synthetic oligonucleotide
gggcaggcctatcctgacctcgaccagccctatgtggcttttctgccaactta

SEQ ID NO: 510090 - DNA, 53 bp, Artificial
  Synthetic oligonucleotide
ggcaaaagcaacattcggggcaaaatttggttccctaggaccagttggtctac

SEQ ID NO: 510091 - DNA, 53 bp, Artificial
  Synthetic oligonucleotide
gttctcagcaaataacagatgttacaggactggctactggttttcgggatctt

SEQ ID NO: 510092 - DNA, 53 bp, Artificial
  Synthetic oligonucleotide
gagaatagggaccataaaaggacttcacgcaaccgtcgcaattctgcatcctt

SEQ ID NO: 510093 - DNA, 53 bp, Artificial
  Synthetic oligonucleotide
acatggaccatctcaaattgtaggtagtagggattggccttgggtccagcccc

SEQ ID NO: 510094 - DNA, 52 bp, Artificial
  Synthetic oligonucleotide
caacatcgggctaatcaggtcttcgcccaagacaatatgacggcggtcaagg

SEQ ID NO: 510095 - DNA, 52 bp, Artificial
  Synthetic oligonucleotide
catataggacaggacggaagctaggcgattgcgctcttgtgaaagattttca

SEQ ID NO: 510096 - DNA, 52 bp, Artificial
  Synthetic oligonucleotide
catggctccgcaggtatcaagcggcatagctggattgttttcagaatttgcc

SEQ ID NO: 510097 - DNA, 52 bp, Artificial
  Synthetic oligonucleotide
acacatgcacatgggcattgtgccactcaaagatgggaaattaaccgcaaaa

SEQ ID NO: 510098 - DNA, 52 bp, Artificial
  Synthetic oligonucleotide
ccagaatagctgctaggagtcggggtaaacgcaagtcaatgataatatcctg

SEQ ID NO: 510099 - DNA, 52 bp, Artificial
  Synthetic oligonucleotide
ccagatcctcgctagggactggggctatcagattgagtcagtccgacctgtt

SEQ ID NO: 510100 - DNA, 52 bp, Artificial
  Synthetic oligonucleotide
agtggctttctctccccaagaatttaaccctcaaagtcaacttgaccaaatt

SEQ ID NO: 510101 - DNA, 52 bp, Artificial
  Synthetic oligonucleotide
aggacatgttgtcattatcggcggaggcaatgtcggtgttaatgccgcacag

SEQ ID NO: 510102 - DNA, 52 bp, Artificial
  Synthetic oligonucleotide
ttgaagaacaagctgaccaagcctaccaacactatctgcaaaagccatcaga

SEQ ID NO: 510103 - DNA, 52 bp, Artificial
  Synthetic oligonucleotide
tgactacctccgaagggctccctaagctatccaaataggccttaagctctta

SEQ ID NO: 510104 - DNA, 52 bp, Artificial
  Synthetic oligonucleotide
gaccaatcctaaacgggctctcttggctgacttgcataagctttattctcgg

SEQ ID NO: 510105 - DNA, 52 bp, Artificial
  Synthetic oligonucleotide
cggagcaaggacataagtcatatctccccaacccttgtcggctacattggtg

SEQ ID NO: 510106 - DNA, 52 bp, Artificial
  Synthetic oligonucleotide
cgggtattttgttgcaatggttttcttgcaacaatcgtgaagcgtggtataa

SEQ ID NO: 510107 - DNA, 52 bp, Artificial
  Synthetic oligonucleotide
gaaacgttcaggaataaagcgtcccgaattcctagatggatccgaatggttt

SEQ ID NO: 510108 - DNA, 52 bp, Artificial
  Synthetic oligonucleotide
ctccgcaggtacgaaacgaatgaaccaaccgcaagacgggtgtgcatcgctg

SEQ ID NO: 510109 - DNA, 52 bp, Artificial
  Synthetic oligonucleotide
ctgccagacatcaggggctaagtcaactgggtagtcctgcggattgaggacc

SEQ ID NO: 510110 - DNA, 51 bp, Artificial
  Synthetic oligonucleotide
accgcttcaatctgattgagcagctgacctagagtagggcctggcttgaga

SEQ ID NO: 510111 - DNA, 51 bp, Artificial
  Synthetic oligonucleotide
accgttgagattgaatcatttaagccaatccgctcaatcagccccttggcc

SEQ ID NO: 510112 - DNA, 51 bp, Artificial
  Synthetic oligonucleotide
ttatacggccctccacatgccagatgatactcagaagattgtccttgagat

SEQ ID NO: 510113 - DNA, 51 bp, Artificial
  Synthetic oligonucleotide
tttccgaacggtgtgcccgatactgctagaataatgaagcgtgttgccgaa

SEQ ID NO: 510114 - DNA, 51 bp, Artificial
  Synthetic oligonucleotide
cacgaatcaattttccatcggctgtcacgaaagtcataccagctctaagct

SEQ ID NO: 510115 - DNA, 51 bp, Artificial
  Synthetic oligonucleotide
ccaatggaatcgtgtattaacctcggttcgttacggtaagggtgccaattc

SEQ ID NO: 510116 - DNA, 51 bp, Artificial
  Synthetic oligonucleotide
cctagaatttgcccgcaacctctatcctgagtataagcggcacggtctggg

SEQ ID NO: 510117 - DNA, 51 bp, Artificial
  Synthetic oligonucleotide
tgatgaagcaggctgaaacggtgcacttgctgacggacccgactggctagc

SEQ ID NO: 510118 - DNA, 51 bp, Artificial
  Synthetic oligonucleotide
cctgtggttacaacttccgcatctcagctccagagcgtctcgctttgaccg

SEQ ID NO: 510119 - DNA, 51 bp, Artificial
  Synthetic oligonucleotide
cgatgaaggagacaccatatagggaatagtaaagaacataaccaatcacga

SEQ ID NO: 510120 - DNA, 51 bp, Artificial
  Synthetic oligonucleotide
gggtatcttgtagccgattaaccgacatagtagccaataagcttttagtga

SEQ ID NO: 510121 - DNA, 51 bp, Artificial
  Synthetic oligonucleotide
ctatacccagcataccagaagtaacgagacctatcgtcaggaaccccagga

SEQ ID NO: 510122 - DNA, 51 bp, Artificial
  Synthetic oligonucleotide
gacctgaacatcaatccagcgttctgtaaagacacggtgcacgcgctctgc

SEQ ID NO: 510123 - DNA, 51 bp, Artificial
  Synthetic oligonucleotide
tataccttagtgcacaatggtaaggaagggctcgtttattctaattgtcac

SEQ ID NO: 510124 - DNA, 51 bp, Artificial
  Synthetic oligonucleotide
taacttgggctgatgtcaacttggtcatcagggcttgatagtgctggagat

SEQ ID NO: 510125 - DNA, 50 bp, Artificial
  Synthetic oligonucleotide
aaaacatgaacgaagtgaatcgaaaggtgggagtttatgagcgaacttac

SEQ ID NO: 510126 - DNA, 50 bp, Artificial
  Synthetic oligonucleotide
aatggttttgctttgatttttgggatatttcattgtttataattacttct

SEQ ID NO: 510127 - DNA, 50 bp, Artificial
  Synthetic oligonucleotide
tttgagccagaactccaatgatgtccttgctgcttgcctgacccttggcc

SEQ ID NO: 510128 - DNA, 50 bp, Artificial
  Synthetic oligonucleotide
agaaatatcagcccacttaatcttagcccagcgaaagagaataacagaac

SEQ ID NO: 510129 - DNA, 50 bp, Artificial
  Synthetic oligonucleotide
cggtaacatcgaactcttaactcgtaccccaatggctattcgagctggtt

SEQ ID NO: 510130 - DNA, 50 bp, Artificial
  Synthetic oligonucleotide
atcagtatgaacattacagcgctaaagggggacggagagccgaccaagta

SEQ ID NO: 510131 - DNA, 50 bp, Artificial
  Synthetic oligonucleotide
ttactgcagtaaaagttcgcgacggagcgcagcggatattaataaaggca

SEQ ID NO: 510132 - DNA, 60 bp, Artificial
  Synthetic oligonucleotide
gcaggtccccttgcacactcgtgagcggtgtatgtacacgagggggccctgatcagcgat

SEQ ID NO: 510133 - DNA, 60 bp, Artificial
  Synthetic oligonucleotide
gcagccggagttctgggacgatcagcagatcggctagcccgcccgggaagccgcctgtgc

SEQ ID NO: 510134 - DNA, 60 bp, Artificial
  Synthetic oligonucleotide
ccccggcagcaaccatgcggagggggagtcacccaaatttgggtgactccccctccgcat

SEQ ID NO: 510135 - DNA, 60 bp, Artificial
  Synthetic oligonucleotide
tggcctagccgctagcccatgtcaagaccatgggctagcctgctgtcgtcagcacaggcc

SEQ ID NO: 510136 - DNA, 60 bp, Artificial
  Synthetic oligonucleotide
agggggaggtagacagtgtctacggagtcctctcaccgtggaacgcgggggcgggtaccg

SEQ ID NO: 510137 - DNA, 60 bp, Artificial
  Synthetic oligonucleotide
tctgagcacaccgcaccacgaaccggacgaaggagaacgctccccgatgagcacgcagcg

SEQ ID NO: 510138 - DNA, 60 bp, Artificial
  Synthetic oligonucleotide
cgggttggtgggcttgtctagatagccgtgtttcgtcagcgtggggccgagcgggagata

SEQ ID NO: 510139 - DNA, 60 bp, Artificial
  Synthetic oligonucleotide
ccgccgggtgcgaaccagcctgctacccgcaattgtccggccggagcgagtagaccttcg

SEQ ID NO: 510140 - DNA, 60 bp, Artificial
  Synthetic oligonucleotide
gttcaaactggggggataggtcgtcatactggacgaaccgaggagggcacggcttcacga

SEQ ID NO: 510141 - DNA, 55 bp, Artificial
  Synthetic oligonucleotide
gcgccgggagaggcactagccgctaagtgtggactttatccgcgcctacttttga

SEQ ID NO: 510142 - DNA, 55 bp, Artificial
  Synthetic oligonucleotide
gcgacaactcgccccagatggcacaatcggcgcatggaacgcgacagtcaactcg

SEQ ID NO: 510143 - DNA, 55 bp, Artificial
  Synthetic oligonucleotide
gcgaaccctatcaattctcccttatcgatgttgtggccggaaggacggatggaca

SEQ ID NO: 510144 - DNA, 55 bp, Artificial
  Synthetic oligonucleotide
gcctttgggtacttctacctggatctagcccagtgccctccggcgaagttcaagg

SEQ ID NO: 510145 - DNA, 55 bp, Artificial
  Synthetic oligonucleotide
gccgtgatttcagggcgagttcatcgaattccgggaatcctactatgggaagcct

SEQ ID NO: 510146 - DNA, 55 bp, Artificial
  Synthetic oligonucleotide
gccgtacacagaccccgtgaagttatccacaggggtggagggcgacctgtgcaca

SEQ ID NO: 510147 - DNA, 55 bp, Artificial
  Synthetic oligonucleotide
gccctaacttacgtgaggcttacctattcctgcccaccgaatcccgtgatcccgc

SEQ ID NO: 510148 - DNA, 55 bp, Artificial
  Synthetic oligonucleotide
gcccgagtgtcgtcgagtgatggaggttatcgcggtggctggttatggggcgctt

SEQ ID NO: 510149 - DNA, 55 bp, Artificial
  Synthetic oligonucleotide
gcccatcggtaacgcgggagtgagggtggttcaacgaccggtgacgtgaaggtga

SEQ ID NO: 510150 - DNA, 55 bp, Artificial
  Synthetic oligonucleotide
gcggatccatgctcaagccatccccagcatagtgctcctgtgttggtctggtcac

SEQ ID NO: 510151 - DNA, 55 bp, Artificial
  Synthetic oligonucleotide
gctactgaacttgaatcggtgatgtcggggaacgggtggttgtgccccgagctgc

SEQ ID NO: 510152 - DNA, 55 bp, Artificial
  Synthetic oligonucleotide
gctgtcggaattctgtgagtcccttgaggcgttcagggtacttccttaccctcgc

SEQ ID NO: 510153 - DNA, 55 bp, Artificial
  Synthetic oligonucleotide
ggacagtgacgcagccttggtgtgatcatgtgcgttgtcgatcatgccaaggccg

SEQ ID NO: 510154 - DNA, 55 bp, Artificial
  Synthetic oligonucleotide
ggacgggagaacgaccgtgaaattacggttccttggtaagaactccaacgtcggg

SEQ ID NO: 510155 - DNA, 55 bp, Artificial
  Synthetic oligonucleotide
ggcaagtgctcgctcattctgcccacggtatgccgcgccatgttccgatgtgacc

SEQ ID NO: 510156 - DNA, 55 bp, Artificial
  Synthetic oligonucleotide
ggccctcggaatcgttacaggttcggggacaccagttttcgcacgtcagttggcg

SEQ ID NO: 510157 - DNA, 55 bp, Artificial
  Synthetic oligonucleotide
ggccgaatcggcgggaaactcccgtgctccgcaggggatgtctaacccactcttt

SEQ ID NO: 510158 - DNA, 55 bp, Artificial
  Synthetic oligonucleotide
ggctacttcggcggtccccacgtccgctacgtcttggacgagaaccccttgagtt

SEQ ID NO: 510159 - DNA, 55 bp, Artificial
  Synthetic oligonucleotide
ggcttgcgtcactcgctgaagttttcgggtgggccttcgccggatggggtacaac

SEQ ID NO: 510160 - DNA, 55 bp, Artificial
  Synthetic oligonucleotide
gggacctccccttgcgggtcggggtggaagtacaggtcggacatgcgtgagccct

SEQ ID NO: 510161 - DNA, 55 bp, Artificial
  Synthetic oligonucleotide
gggacggacgggtgactggctatgtatctcagagggcgtttattcaggtaaaggg

SEQ ID NO: 510162 - DNA, 55 bp, Artificial
  Synthetic oligonucleotide
gggactgtcactcaccgtgcaatgttcctaacgtgaggtcacggggcgtcgggtc

SEQ ID NO: 510163 - DNA, 55 bp, Artificial
  Synthetic oligonucleotide
gggccggattttccttccggaatccttgcgagaactgttgacgcccttacgcccc

SEQ ID NO: 510164 - DNA, 55 bp, Artificial
  Synthetic oligonucleotide
ctccgatgggtgcgaccacacattcacccattcttggcacacttcgcttgccgct

SEQ ID NO: 510165 - DNA, 55 bp, Artificial
  Synthetic oligonucleotide
ctccgcttgtgtcgcgtcctttgagtacctgccctttgagcgatggggtggacgg

SEQ ID NO: 510166 - DNA, 55 bp, Artificial
  Synthetic oligonucleotide
ctcctccgcacactttgctcattcgggcgacaacaagcaaaacgcgtgaagtcgg

SEQ ID NO: 510167 - DNA, 55 bp, Artificial
  Synthetic oligonucleotide
ctctggcgatcctttggtcggcacccggcggccggtcgatggaggccgcgcttca

SEQ ID NO: 510168 - DNA, 55 bp, Artificial
  Synthetic oligonucleotide
ctctgggaaccggaagtttagacgcctgccgggctttggcttacggacaacggtg

SEQ ID NO: 510169 - DNA, 55 bp, Artificial
  Synthetic oligonucleotide
ctgcacgtgtctggtgtgaggtcaggccttctggtggcgcttgggcatcagacag

SEQ ID NO: 510170 - DNA, 55 bp, Artificial
  Synthetic oligonucleotide
ctgccagatctgaaagttggcgaccaactcactcactaccttcccagttgtccac

SEQ ID NO: 510171 - DNA, 55 bp, Artificial
  Synthetic oligonucleotide
ctgcgggtatggcgcttggaagtctgtgtttctatgactttcaattattccggcg

SEQ ID NO: 510172 - DNA, 55 bp, Artificial
  Synthetic oligonucleotide
ctggttcacggagatccctccaagtcaggggtgtcccaatccggaaggcggtcct

SEQ ID NO: 510173 - DNA, 55 bp, Artificial
  Synthetic oligonucleotide
cttgaacggggccgttgacactccggggtcgcttcaccacttgaggtggggatgc

SEQ ID NO: 510174 - DNA, 55 bp, Artificial
  Synthetic oligonucleotide
cttgctggcagacacagtgtgcatgagatgccgagcatgctgttcgatggcggcc

SEQ ID NO: 510175 - DNA, 55 bp, Artificial
  Synthetic oligonucleotide
gaccctggcgaaccctggcgaatagtcgctccgcaactgacagctgggtactgtc

SEQ ID NO: 510176 - DNA, 55 bp, Artificial
  Synthetic oligonucleotide
gaccggacctttacgatgaacccttccctccgagcgcgcacagggatcaagcacg

SEQ ID NO: 510177 - DNA, 55 bp, Artificial
  Synthetic oligonucleotide
gacggctattaccagaggcctcggatcttgaggcgaaagcccttcgctcggcagg

SEQ ID NO: 510178 - DNA, 55 bp, Artificial
  Synthetic oligonucleotide
gactcatgtaagtgagagtcaaaatgactcaccatcccttagtgatcccgaaggg

SEQ ID NO: 510179 - DNA, 55 bp, Artificial
  Synthetic oligonucleotide
gagattgacgttttggagattactgatcctgagccggaattgatggagggattgg

SEQ ID NO: 510180 - DNA, 55 bp, Artificial
  Synthetic oligonucleotide
gagcatgactgcgcattcaaattctccactggaacgctccctcgaataaccatgg

SEQ ID NO: 510181 - DNA, 55 bp, Artificial
  Synthetic oligonucleotide
gagtacggcagttggcacctgtgctgaagtatgcgctcagacccaaggcccgtag

SEQ ID NO: 510182 - DNA, 55 bp, Artificial
  Synthetic oligonucleotide
gagtcgccagcactgcagtcggagaagacggcgcactgctttccatgcaatgcgc

SEQ ID NO: 510183 - DNA, 55 bp, Artificial
  Synthetic oligonucleotide
gataggtcactcttgagtgtccgttatgttcccgtgatctggcatcggccgtcgc

SEQ ID NO: 510184 - DNA, 55 bp, Artificial
  Synthetic oligonucleotide
gatggaccgggactcgtctgtgttcgggcctgtggcgtacgagctcaagctcagt

SEQ ID NO: 510185 - DNA, 55 bp, Artificial
  Synthetic oligonucleotide
gatgggcttcgtactacgatggctctcgtaccaatgtcggatcccgacccgctgt

SEQ ID NO: 510186 - DNA, 55 bp, Artificial
  Synthetic oligonucleotide
gattctccggtcctcaccgtccggaaggggccagggcatcacaaccccttgcgct

SEQ ID NO: 510187 - DNA, 55 bp, Artificial
  Synthetic oligonucleotide
gcacattccccacgccacaagaggagccgacttcaggcccgagctccagcagaaa

SEQ ID NO: 510188 - DNA, 55 bp, Artificial
  Synthetic oligonucleotide
gcagagacctcgcccaatgctcaaggagcctgattagtggacacgattggaaatc

SEQ ID NO: 510189 - DNA, 55 bp, Artificial
  Synthetic oligonucleotide
gcagttgtggttccctgagacttcaagcgctcctccggatcaccggaatgagcct

SEQ ID NO: 510190 - DNA, 55 bp, Artificial
  Synthetic oligonucleotide
tcctgcgggacacggtgagcacgtggatgccgggcgtgccctacccggcggagaa

SEQ ID NO: 510191 - DNA, 55 bp, Artificial
  Synthetic oligonucleotide
tcgactgctcatgcgaaaggttccgggccgccgaagctgattggcacgtcggcat

SEQ ID NO: 510192 - DNA, 55 bp, Artificial
  Synthetic oligonucleotide
tcgatgctccgcagtcaggccgcaccgcagccgggcaggaacttgactttgcgtc

SEQ ID NO: 510193 - DNA, 55 bp, Artificial
  Synthetic oligonucleotide
tctagtccagggtgacctgtgcgaggggtgtccaggtgatgtgccgccggtcatg

SEQ ID NO: 510194 - DNA, 55 bp, Artificial
  Synthetic oligonucleotide
tctgcacggagtggaggggtgttggacgtgaggggttccgaggcgttctcgcaag

SEQ ID NO: 510195 - DNA, 55 bp, Artificial
  Synthetic oligonucleotide
tcttgaggatgcctgcacgctggtggctgctcgtggtcggttgatggaggcgctt

SEQ ID NO: 510196 - DNA, 55 bp, Artificial
  Synthetic oligonucleotide
tgaaacgtacttccggcccattgtgacgggtgagaacgcccgggaccggttaccc

SEQ ID NO: 510197 - DNA, 55 bp, Artificial
  Synthetic oligonucleotide
tgagagtgcctctttcgattcatcgggctgaagtgccgttgcgcacgatgcgttc

SEQ ID NO: 510198 - DNA, 55 bp, Artificial
  Synthetic oligonucleotide
tgagttgacgacgggtcgctcagggaggggaggtaccagaccagatgtttgtgcg

SEQ ID NO: 510199 - DNA, 55 bp, Artificial
  Synthetic oligonucleotide
tgcagtagcggtgcagtgtggaacggctcaccccgatgcggcgggccagtgattc

SEQ ID NO: 510200 - DNA, 55 bp, Artificial
  Synthetic oligonucleotide
tgccaatggtacatgctgcatcaactgatgcgcgcgctacactagaacccgcccc

SEQ ID NO: 510201 - DNA, 55 bp, Artificial
  Synthetic oligonucleotide
tgcctgcggcaatcaaggaggcacgcaccattctccgggacgcaaacagtgtcgc

SEQ ID NO: 510202 - DNA, 55 bp, Artificial
  Synthetic oligonucleotide
tggactcacagaaactacgcacaagcaagagaggggcggtcgttcgggccgaatc

SEQ ID NO: 510203 - DNA, 55 bp, Artificial
  Synthetic oligonucleotide
tggtcgagagtcgatttacgactacgacgtgagctgaacgctcacggactcgcat

SEQ ID NO: 510204 - DNA, 55 bp, Artificial
  Synthetic oligonucleotide
tgtagggccgtatcccgaacaatccgtgagccccggactgtgactgagcgcgtca

SEQ ID NO: 510205 - DNA, 55 bp, Artificial
  Synthetic oligonucleotide
tgtccctccgcgtacacacctgtggggtcagtcggaaccttcctcagatgagggc

SEQ ID NO: 510206 - DNA, 55 bp, Artificial
  Synthetic oligonucleotide
tgttgtcagtggcggctacatgtcctccggtgccaaccgagttacggacaaccag

SEQ ID NO: 510207 - DNA, 55 bp, Artificial
  Synthetic oligonucleotide
ttccgttccgtcgtgcgtgcgcggaccaccctcgcagggatacccgacatccact

SEQ ID NO: 510208 - DNA, 55 bp, Artificial
  Synthetic oligonucleotide
ttcgtacccggtgtggtgtcgtgccttgaggctactcgcacggtccgacagggca

SEQ ID NO: 510209 - DNA, 55 bp, Artificial
  Synthetic oligonucleotide
ttctgccttccgtgggccggaggcagcgccgtcttctaccagcgggcctggcaga

SEQ ID NO: 510210 - DNA, 55 bp, Artificial
  Synthetic oligonucleotide
ttgaggcgcaatacaacacgcgttctttcataagtgatcccttggggctcgcaac

SEQ ID NO: 510211 - DNA, 55 bp, Artificial
  Synthetic oligonucleotide
ttgaggggtcatcatggggttgccgaagggcttcggttgggtccagagagtcccg

SEQ ID NO: 510212 - DNA, 55 bp, Artificial
  Synthetic oligonucleotide
ttgcgtacgcggacctgaagggagcccggtccttccgcacctgagcggttgttca

SEQ ID NO: 510213 - DNA, 55 bp, Artificial
  Synthetic oligonucleotide
ttgtctcctattccgtagacggacaaatctgctgagtcggcgtagttggttcccc

SEQ ID NO: 510214 - DNA, 55 bp, Artificial
  Synthetic oligonucleotide
ttgtgcggcattgttgagcccttgatcgaaggcgacgttggctccgtcctgtgcc

SEQ ID NO: 510215 - DNA, 55 bp, Artificial
  Synthetic oligonucleotide
tttcccctgaagccgggttcgcagtctcactgagggccgtcccgtgaatgatccg

SEQ ID NO: 510216 - DNA, 55 bp, Artificial
  Synthetic oligonucleotide
tttgccttgcggtcgtgcatggatttcgtcagccttcctcggggagagggcccag

SEQ ID NO: 510217 - DNA, 55 bp, Artificial
  Synthetic oligonucleotide
ggggagttaacgggtcagtcgcccctgcgtaccgtctgctgggcggggatggaga

SEQ ID NO: 510218 - DNA, 55 bp, Artificial
  Synthetic oligonucleotide
ggggccgaagcgggaaggaacgattctcccaccccgagttactgggtggtaacgt

SEQ ID NO: 510219 - DNA, 55 bp, Artificial
  Synthetic oligonucleotide
ggtgtgccgagactgcaagacctggtgtcccatcactgggctgaagaccccgaag

SEQ ID NO: 510220 - DNA, 55 bp, Artificial
  Synthetic oligonucleotide
ggttccgatcgagaatctcaacacctcagcagattctttgaggcgagctgcgggg

SEQ ID NO: 510221 - DNA, 55 bp, Artificial
  Synthetic oligonucleotide
gtagcagcggaactgtgcttactgtgcaagaccgagtcagaattggtttagacct

SEQ ID NO: 510222 - DNA, 55 bp, Artificial
  Synthetic oligonucleotide
gtagggcgggcggggcaacacccgcgtatcggcgaactgaggagatccgtgatga

SEQ ID NO: 510223 - DNA, 55 bp, Artificial
  Synthetic oligonucleotide
gtcaagaccatgggctagcctgctgtcgtcagcacaggccacaccgggaggtaga

SEQ ID NO: 510224 - DNA, 55 bp, Artificial
  Synthetic oligonucleotide
gtctcggcgagccgcaagtgggccgaagtccagccttgtggggagtgggtgcgtt

SEQ ID NO: 510225 - DNA, 55 bp, Artificial
  Synthetic oligonucleotide
gtgaggtggtgttgatgagcgcgccgtatgacaagcccgacagggagaagtggcc

SEQ ID NO: 510226 - DNA, 55 bp, Artificial
  Synthetic oligonucleotide
gtgggcatttggcgctcagaagttaagcgagggtgctacattggcggtcgttcgg

SEQ ID NO: 510227 - DNA, 55 bp, Artificial
  Synthetic oligonucleotide
gtgttcatgggaggtgccgagcttcaatcgggcactcgtctggtttctcgcgggc

SEQ ID NO: 510228 - DNA, 55 bp, Artificial
  Synthetic oligonucleotide
taacgacgttgtgcgcgattgaggtcgggcgtccgtagcggaggatggccctatg

SEQ ID NO: 510229 - DNA, 55 bp, Artificial
  Synthetic oligonucleotide
taccacgccaggagccgcactgtgctcaggaggaggtcggagaggtcatgtccgt

SEQ ID NO: 510230 - DNA, 55 bp, Artificial
  Synthetic oligonucleotide
taccagcccaggggagcggagccgcttatagttctgcgtgccccgacgatccata

SEQ ID NO: 510231 - DNA, 55 bp, Artificial
  Synthetic oligonucleotide
taccgaggacccctcgcaccggtccgtccgcaacgacccctcctacatcaggtcc

SEQ ID NO: 510232 - DNA, 55 bp, Artificial
  Synthetic oligonucleotide
tacgacgagacgtgaccgcccgctcactccccgctcacgctaagggcgccggggc

SEQ ID NO: 510233 - DNA, 55 bp, Artificial
  Synthetic oligonucleotide
tacgcccactccgcatcacgcagccgcgcagcgacgtaccgcaccagatgatcgc

SEQ ID NO: 510234 - DNA, 55 bp, Artificial
  Synthetic oligonucleotide
tacggacggaggaaagttgaccgtcgtacgggtgaagggccggtgtgccgcaggg

SEQ ID NO: 510235 - DNA, 55 bp, Artificial
  Synthetic oligonucleotide
tacggacgggtcctgcggtagagcgggcggacttcgccggattcgggccattgcc

SEQ ID NO: 510236 - DNA, 55 bp, Artificial
  Synthetic oligonucleotide
tagctacgtgatcgctacgtggatggactgcatggcaccggccgacgtctgcctg

SEQ ID NO: 510237 - DNA, 55 bp, Artificial
  Synthetic oligonucleotide
tatgagcggtggtgagagctactggggctggggtcgggcggtcgtttctatcctg

SEQ ID NO: 510238 - DNA, 55 bp, Artificial
  Synthetic oligonucleotide
tcacggcacctgctccgcccctgctgtcgaggcgaaagtgaagttggtgaacgac

SEQ ID NO: 510239 - DNA, 55 bp, Artificial
  Synthetic oligonucleotide
tcagtacgcccggtactgctgctgtctctggtacgggtcctcgtacggcccggga

SEQ ID NO: 510240 - DNA, 55 bp, Artificial
  Synthetic oligonucleotide
tccgcagcctctcgggatccgaaatgtacgaaggacggaacgcctggctcgcgta

SEQ ID NO: 510241 - DNA, 55 bp, Artificial
  Synthetic oligonucleotide
tccgggaagggacaccgcacctgtcgatcatgcaggcgctttgcacggtttcctg

SEQ ID NO: 510242 - DNA, 55 bp, Artificial
  Synthetic oligonucleotide
tccggtcagaagccgtcaccagtggcaaaattcccgaccgcgcttgcacctggac

SEQ ID NO: 510243 - DNA, 55 bp, Artificial
  Synthetic oligonucleotide
tcctgatgggatgtgagaacccctttatccctgcgtgagaagggtcagcgcgggc

SEQ ID NO: 510244 - DNA, 55 bp, Artificial
  Synthetic oligonucleotide
atgtggatggtgccgtttgcgtcttcggcagtgactgcgttggcgtcccggtgga

SEQ ID NO: 510245 - DNA, 55 bp, Artificial
  Synthetic oligonucleotide
atgttcccgatggtcccgatacgggagctaccgctgcccaccacccgtacacagc

SEQ ID NO: 510246 - DNA, 55 bp, Artificial
  Synthetic oligonucleotide
attcaccgcgcactgctcgcatgggatattcggccatggttctcgggtccacccc

SEQ ID NO: 510247 - DNA, 55 bp, Artificial
  Synthetic oligonucleotide
atttgggccggatagcctcgctcccaacccgacgcgataaagcggacatgacgcc

SEQ ID NO: 510248 - DNA, 55 bp, Artificial
  Synthetic oligonucleotide
caactcggcgaccaagtacccgtccatccccacctaccacgaactcgatccgagg

SEQ ID NO: 510249 - DNA, 55 bp, Artificial
  Synthetic oligonucleotide
caatgcttccttcgtgaaagacactaaaagttcggctacccgtgagcgatgccag

SEQ ID NO: 510250 - DNA, 55 bp, Artificial
  Synthetic oligonucleotide
caattctagttgtcgggaacctaggttgtcaggaaaaccgaagttgtcgtgggag

SEQ ID NO: 510251 - DNA, 55 bp, Artificial
  Synthetic oligonucleotide
cacagggcccgtatgtgtaccggtggaatccccgtggcagactgagcgttgtcac

SEQ ID NO: 510252 - DNA, 55 bp, Artificial
  Synthetic oligonucleotide
caccccacgtcgtgcatcgctcatggcacacgaccctaaccgccgccactgacaa

SEQ ID NO: 510253 - DNA, 55 bp, Artificial
  Synthetic oligonucleotide
caccgctcctgccccgtgtggagcgccgtcaaaacgaccacgactttgcttctga

SEQ ID NO: 510254 - DNA, 55 bp, Artificial
  Synthetic oligonucleotide
caccttgcggtacacgagggttagccccgcaactctcgcgaagattcacgccctg

SEQ ID NO: 510255 - DNA, 55 bp, Artificial
  Synthetic oligonucleotide
caccttttcttcaggcgccttatgtgcaactgtcaagtgggcatgaccggccacg

SEQ ID NO: 510256 - DNA, 55 bp, Artificial
  Synthetic oligonucleotide
cacgtgcgcgcgtggacctgcgcaagtagcgcaagaaccaggagatatgcccggg

SEQ ID NO: 510257 - DNA, 55 bp, Artificial
  Synthetic oligonucleotide
cactaggggaaccgtcttgtttcagagggctagaacacgccgcccttccgtgggg

SEQ ID NO: 510258 - DNA, 55 bp, Artificial
  Synthetic oligonucleotide
cactgctattcagtccgtcataggtctcacgcggcctccaattacccctgagccc

SEQ ID NO: 510259 - DNA, 55 bp, Artificial
  Synthetic oligonucleotide
cagctcccatcgggcatcggagaggtcacttggatagcgacggcgctcagtcatg

SEQ ID NO: 510260 - DNA, 55 bp, Artificial
  Synthetic oligonucleotide
cagtgtgacgcacccttggcaccccgtgcggaccaacaggcttaggctcgtgtca

SEQ ID NO: 510261 - DNA, 55 bp, Artificial
  Synthetic oligonucleotide
catgaaggtaaaatggtggcggtaggttgtcaaagcggatgactgtgcggaccgt

SEQ ID NO: 510262 - DNA, 55 bp, Artificial
  Synthetic oligonucleotide
catgcccgaaagccgtattcaaaagatgatcactcttccgagggaacccctgcag

SEQ ID NO: 510263 - DNA, 55 bp, Artificial
  Synthetic oligonucleotide
catgtccgcaattcccgtcgcccaccgcctaattgcttcgcaagaaccgcagacc

SEQ ID NO: 510264 - DNA, 55 bp, Artificial
  Synthetic oligonucleotide
ccaccaagtgcttgcccgcacgattcagacgctgccatcacagttcaaacgctct

SEQ ID NO: 510265 - DNA, 55 bp, Artificial; identical to SEQ ID NO: 249090
  Synthetic oligonucleotide

SEQ ID NO: 510266 - DNA, 55 bp, Artificial
  Synthetic oligonucleotide
cccacagcgggtctgttctgtgccacagcagtactcccgcgtcacactaacggcc

SEQ ID NO: 510267 - DNA, 55 bp, Artificial
  Synthetic oligonucleotide
cccatgatccaattcggtggagactgggtacatgtccgcactacacaggccgcca

SEQ ID NO: 510268 - DNA, 55 bp, Artificial
  Synthetic oligonucleotide
cccctggatcggaagcccatcggggttgtagagcaggaaacgggcgttttctccc

SEQ ID NO: 510269 - DNA, 55 bp, Artificial
  Synthetic oligonucleotide
aaacggccgctctccgtgcggaactcgcaggtggtgtgctccgtgccggttcgat

SEQ ID NO: 510270 - DNA, 55 bp, Artificial
  Synthetic oligonucleotide
aaacgtccatgggaggggaccgtagggattcggcacagggacccgacaggtgctt

SEQ ID NO: 510271 - DNA, 55 bp, Artificial
  Synthetic oligonucleotide
aaccggagctgccccgtcacggccggtaaactgaccgtgggaacaaagtggccta

SEQ ID NO: 510272 - DNA, 55 bp, Artificial
  Synthetic oligonucleotide
aacgggacatgagtgatctcctccatgagtgaggggtcggcacacgagggcgggt

SEQ ID NO: 510273 - DNA, 55 bp, Artificial
  Synthetic oligonucleotide
aacttccaacggagcgagggccgctggggaagccgcttacgtccgccttgcagtg

SEQ ID NO: 510274 - DNA, 55 bp, Artificial
  Synthetic oligonucleotide
aaggaagcctcctgggacggtacggcgcgtggggcgagcgggccgagtgtgcgtc

SEQ ID NO: 510275 - DNA, 55 bp, Artificial
  Synthetic oligonucleotide
aaggagtgccggagcggcgatcctggtgtcccgcacagccaaccacgcgcggtaa

SEQ ID NO: 510276 - DNA, 55 bp, Artificial
  Synthetic oligonucleotide
aaggcccaggggttcgtgagcacgagcgagacagagccgaggcgggattgagagg

SEQ ID NO: 510277 - DNA, 55 bp, Artificial
  Synthetic oligonucleotide
aagggaggccgcttccgacccgagcctgtgccccagatgcgttcaactactcgat

SEQ ID NO: 510278 - DNA, 55 bp, Artificial
  Synthetic oligonucleotide
aatcgacacgtcggatctcctcgctagacacgtcgggtccgacagcggtcgaggt

SEQ ID NO: 510279 - DNA, 55 bp, Artificial
  Synthetic oligonucleotide
accccgagacaccgatctacgacagtctcgtcgctgagcggggcacgccgcagat

SEQ ID NO: 510280 - DNA, 55 bp, Artificial
  Synthetic oligonucleotide
acctacgcggatccaaagaacacccgcatctgccgcgacactccccttgaaggcg

SEQ ID NO: 510281 - DNA, 55 bp, Artificial
  Synthetic oligonucleotide
acgaagcatcacccggcatatcaccctcccgtgcaccccggaccggaagtctctt

SEQ ID NO: 510282 - DNA, 55 bp, Artificial
  Synthetic oligonucleotide
acgaggcagacaagccaaatccccaactcaacatatgcatcagtcacccgcgttg

SEQ ID NO: 510283 - DNA, 55 bp, Artificial
  Synthetic oligonucleotide
acggatcatgcgggatgctgtggaacccaatccgtgcacttgagagctcatcgcc

SEQ ID NO: 510284 - DNA, 55 bp, Artificial
  Synthetic oligonucleotide
actggacggcccgcccctgagcgccccgcggcgtcgacagcatgtggcaacagaa

SEQ ID NO: 510285 - DNA, 55 bp, Artificial
  Synthetic oligonucleotide
agatgaagacagtcggtacaccggagctaagggagaccgggccggcaggttctga

SEQ ID NO: 510286 - DNA, 55 bp, Artificial
  Synthetic oligonucleotide
agcgccctttcttcgtacggatcagccgggaggggcggtccggctggcttgggtg

SEQ ID NO: 510287 - DNA, 55 bp, Artificial
  Synthetic oligonucleotide
aggaacggtgacgcacgatcagtcctttccctggcggccacagctgtcgtatggc

SEQ ID NO: 510288 - DNA, 55 bp, Artificial
  Synthetic oligonucleotide
aggcccgcgggagaacacggcgggacgggacagaaacgaggtcggatgatgcgta

SEQ ID NO: 510289 - DNA, 55 bp, Artificial
  Synthetic oligonucleotide
agggtcgccgtactacaacgcggtccgttccactgccgggcaccctgcctccact

SEQ ID NO: 510290 - DNA, 55 bp, Artificial
  Synthetic oligonucleotide
agtaatcacccaaagtagccaccggcggggatggacaggcagccatcacctcacc

SEQ ID NO: 510291 - DNA, 55 bp, Artificial
  Synthetic oligonucleotide
atccactcgctcaggtcgcgggtaccctcctacccgtcgatccaccggtcgtgaa

SEQ ID NO: 510292 - DNA, 55 bp, Artificial
  Synthetic oligonucleotide
atcccggccccgcttcccaaatcggtgtgcgggaccctgaactgcggttactcgt

SEQ ID NO: 510293 - DNA, 55 bp, Artificial
  Synthetic oligonucleotide
atcggggtgcactggctccgtgggcagttgcatactcaccgcatggcctcttcct

SEQ ID NO: 510294 - DNA, 55 bp, Artificial
  Synthetic oligonucleotide
ccgtcccaaggtccgaggtcgaaggctgctatctgtgaacgactcatcctgggga

SEQ ID NO: 510295 - DNA, 55 bp, Artificial
  Synthetic oligonucleotide
ccgtgacgcccatcgatcacctctcgctctcaggaggacgtttccgtccggtact

SEQ ID NO: 510296 - DNA, 55 bp, Artificial
  Synthetic oligonucleotide
ccgttgaagctacgaacacatcggcgcgttcactcgtttcagcgaactcggcgcg

SEQ ID NO: 510297 - DNA, 55 bp, Artificial
  Synthetic oligonucleotide
cctcaggtgtcaagcggtatagtgaggcacccagaggaaaaggaggcgaggcgac

SEQ ID NO: 510298 - DNA, 55 bp, Artificial
  Synthetic oligonucleotide
cgaaaaggtggcattcgggcgatcggcgtggcagtatggaagtggagccaaggac

SEQ ID NO: 510299 - DNA, 55 bp, Artificial
  Synthetic oligonucleotide
cgaggagttctcggacggtctgtccaggtactacgtcaagcctcgcgccaggaac

SEQ ID NO: 510300 - DNA, 55 bp, Artificial
  Synthetic oligonucleotide
cgcacaagagctgatcgctgctcgcctcacccgccagcacatcttggaagaggag

SEQ ID NO: 510301 - DNA, 55 bp, Artificial
  Synthetic oligonucleotide
cgccaaagcggatacatgcggatagaagtaaatgtatcgcaagaatcggacgctg

SEQ ID NO: 510302 - DNA, 55 bp, Artificial
  Synthetic oligonucleotide
cgccggtccccacgtccgctacgtcttggacgagaaccccttgagtttctgatca

SEQ ID NO: 510303 - DNA, 55 bp, Artificial
  Synthetic oligonucleotide
cgccgtactgttcaacggggaagttgaatcggtgagtgcttttgccaccgctccg

SEQ ID NO: 510304 - DNA, 55 bp, Artificial
  Synthetic oligonucleotide
cgcctggcatggatttcgggagcggacggctggtacggatttcacacacaccaga

SEQ ID NO: 510305 - DNA, 55 bp, Artificial
  Synthetic oligonucleotide
cgcctgtcatctttgacgtgccagatacgccgtgcaaaacgcggatcgccgggag

SEQ ID NO: 510306 - DNA, 55 bp, Artificial
  Synthetic oligonucleotide
cgcgcaagatcaggggccgaatgacatcgcgcatcgagtaactctggaggttggg

SEQ ID NO: 510307 - DNA, 55 bp, Artificial
  Synthetic oligonucleotide
cgctgagcatgcttcgctgaacctgcctcgttaggcggttaaatgactcgggcag

SEQ ID NO: 510308 - DNA, 55 bp, Artificial
  Synthetic oligonucleotide
cggactgaggactcggcagcccttcaggttgttccatgcccggagccgagatctt

SEQ ID NO: 510309 - DNA, 55 bp, Artificial
  Synthetic oligonucleotide
cggctgcacaacccctctgcgcattgttttagcgtggcgttcatttccttgacgc

SEQ ID NO: 510310 - DNA, 55 bp, Artificial
  Synthetic oligonucleotide
cgggacgggagtgagggaatcccatgacaggggacatctcggatttctcttgccg

SEQ ID NO: 510311 - DNA, 55 bp, Artificial
  Synthetic oligonucleotide
cggggtcatcgcttttgccgtttggggtgttgtggtcgaccgtttgtgttcgccg

SEQ ID NO: 510312 - DNA, 55 bp, Artificial
  Synthetic oligonucleotide
cgggttcacggacagaggcgatcaacatgaggctaggctaacctaaccgatttta

SEQ ID NO: 510313 - DNA, 55 bp, Artificial
  Synthetic oligonucleotide
cgtgcatcgctcaccaccagaggctagaacacctccccaccgacgttccaggaag

SEQ ID NO: 510314 - DNA, 55 bp, Artificial
  Synthetic oligonucleotide
cgtgcgccggaagaacagcaagggcgagccgatctccaacctgtcacgggtcaac

SEQ ID NO: 510315 - DNA, 55 bp, Artificial
  Synthetic oligonucleotide
cgtggctggttgtcccgcagcattcgcacggtttcgtcagccgtcctagtactcc

SEQ ID NO: 510316 - DNA, 55 bp, Artificial
  Synthetic oligonucleotide
ctcaccggcctgtccagccgtttcaaggaagaaaccccagttcaaacgccccatg

SEQ ID NO: 510317 - DNA, 55 bp, Artificial
  Synthetic oligonucleotide
ctcccactcctcaggggtcggcgtgcgggatgcagtcatggcaggaatcgtaccg

SEQ ID NO: 510318 - DNA, 55 bp, Artificial
  Synthetic oligonucleotide
ctcccctcagttactccgaggcaaaactcgtctggctccggaaacaacaaaagcg

SEQ ID NO: 510319 - DNA, 55 bp, Artificial
  Synthetic oligonucleotide
ccgacggttctggtaggaagtggattgaacgggcgggccggtgggctgacaagga

SEQ ID NO: 510320 - DNA, 55 bp, Artificial
  Synthetic oligonucleotide
ccgacgtacaggttgtggtcgctgacgggtgagcggaagcgtgatttgacacggc

SEQ ID NO: 510321 - DNA, 55 bp, Artificial
  Synthetic oligonucleotide
cccgtgacgtgcagctcaccacgaaccactactgtcaaacacggactccacggcc

SEQ ID NO: 510322 - DNA, 55 bp, Artificial
  Synthetic oligonucleotide
cccggataggtgatcaaccgagcggaggttcgggccagacattagccacgcgtag

SEQ ID NO: 510323 - DNA, 55 bp, Artificial
  Synthetic oligonucleotide
ccgcactccttccctaacaagtgtttggtagattaacgtaccgtcaggaacagcg

SEQ ID NO: 510324 - DNA, 55 bp, Artificial
  Synthetic oligonucleotide
cccgcaccccaaaatccgcttatggttcgggcatgttcgactcccggcacatccg

SEQ ID NO: 510325 - DNA, 55 bp, Artificial
  Synthetic oligonucleotide
ccgccttgcgacggccagcatacccgtacgctgagcgtgaagaactcagataccg

SEQ ID NO: 510326 - DNA, 55 bp, Artificial
  Synthetic oligonucleotide
ccctgggctgagatcgttcggtgtctgtgcaagaggtaaccgtccggtcaccctc

SEQ ID NO: 510327 - DNA, 55 bp, Artificial
  Synthetic oligonucleotide
cccgctgaagcgtcaggctaaacatcgcgtcacccgccaatacatcgaaccggcc

SEQ ID NO: 510328 - DNA, 55 bp, Artificial
  Synthetic oligonucleotide
ccggttgtttgcttgagtcgatcgcttcacgtctcacgacgctagcggctgccac

SEQ ID NO: 510329 - DNA, 55 bp, Artificial
  Synthetic oligonucleotide
cccgatcctgccagccaaagtatccgacggtcctacggaataaagccgacgaggc

SEQ ID NO: 510330 - DNA, 54 bp, Artificial
  Synthetic oligonucleotide
cggagaaaacgaggggacaaccactcgtacgccaaccttcaacggctcacctcc

SEQ ID NO: 510331 - DNA, 54 bp, Artificial
  Synthetic oligonucleotide
agaggagcgcatccgcgaaacgtaatagcctctgtccaaggtcagctcttacgg

SEQ ID NO: 510332 - DNA, 54 bp, Artificial
  Synthetic oligonucleotide
ccccaagctcctcaaaacagagcgaatcaaggagggtagttgggcatatctcga

SEQ ID NO: 510333 - DNA, 54 bp, Artificial
  Synthetic oligonucleotide
tgagggcatgcggggatcggcgctctaccggaaaccgaagaacccacgacatcg

SEQ ID NO: 510334 - DNA, 54 bp, Artificial
  Synthetic oligonucleotide
cgtaacagttgttacggaggtggcggcatatgtccgggtggacgatcgaagcgc

SEQ ID NO: 510335 - DNA, 54 bp, Artificial
  Synthetic oligonucleotide
acggtcgtgtgatggcacagagccacgaagggttgacgaatgccgaactcaagc

SEQ ID NO: 510336 - DNA, 54 bp, Artificial
  Synthetic oligonucleotide
tggccgtctgaggaccggctcgtggacgactgtgggacctcccgcagtacggtc

SEQ ID NO: 510337 - DNA, 54 bp, Artificial
  Synthetic oligonucleotide
aacgtggatgagcctggtgcagcacatggagtccagcccgtctcaggcgcctgt

SEQ ID NO: 510338 - DNA, 54 bp, Artificial
  Synthetic oligonucleotide
atccctggcagctgatcgcggaatctgccttccagcccggattcaaggagcggg

SEQ ID NO: 510339 - DNA, 54 bp, Artificial
  Synthetic oligonucleotide
gtaatgcgtgaacaactcacacgattgctcaggattacggaggaaccggatatc

SEQ ID NO: 510340 - DNA, 54 bp, Artificial
  Synthetic oligonucleotide
gcatccgcgcaattcgtggcaaagggcggtagaccatgctgcatgactcacaag

SEQ ID NO: 510341 - DNA, 53 bp, Artificial
  Synthetic oligonucleotide
tccccggacaccgacatacgtgaacgtccgtatctcgcagtggagggcgtccg

SEQ ID NO: 510342 - DNA, 53 bp, Artificial
  Synthetic oligonucleotide
gctttccacgtcggtatctgtaatccgttatccaggacgaatgggagtagcag

SEQ ID NO: 510343 - DNA, 53 bp, Artificial
  Synthetic oligonucleotide
tccgtgaagctcacccacgcgccggaatcgaccgtaacgcaagaacggtccgg

SEQ ID NO: 510344 - DNA, 53 bp, Artificial
  Synthetic oligonucleotide
gggagcggtacgtcggagtacttggcttatcgcctccgtaggacatgggcact

SEQ ID NO: 510345 - DNA, 53 bp, Artificial
  Synthetic oligonucleotide
atattttgcagaaacacgcatcgattcgagtggggaacctagatgagtcacgt

SEQ ID NO: 510346 - DNA, 53 bp, Artificial
  Synthetic oligonucleotide
agtaggcgttcttcattcctcaatcccgcaggcagagcggtattaccagtgaa

SEQ ID NO: 510347 - DNA, 53 bp, Artificial
  Synthetic oligonucleotide
gtacccgcccaggcagggttcccctcagtaccggaggactcatcgacagcccc

SEQ ID NO: 510348 - DNA, 53 bp, Artificial
  Synthetic oligonucleotide
ccgcacgggtgtcactgctcggttccctggtaccagcttccggctgggctccg

SEQ ID NO: 510349 - DNA, 53 bp, Artificial
  Synthetic oligonucleotide
cggtacgaaatatgtcaaccggtcacctcggacaacgatcgtgacccaccggc

SEQ ID NO: 510350 - DNA, 53 bp, Artificial
  Synthetic oligonucleotide
ctccatgctcaaaggtccctccaaaaggtggccaagtcgagcgggtttcactg

SEQ ID NO: 510351 - DNA, 53 bp, Artificial
  Synthetic oligonucleotide
gtctctttcatcctctgtagtcgcaggtcagtagggtgtggacggcctgagcg

SEQ ID NO: 510352 - DNA, 53 bp, Artificial
  Synthetic oligonucleotide
ggccctctctcccaggtcttttcccacttccttcgggatctcgtgcactgaac

SEQ ID NO: 510353 - DNA, 52 bp, Artificial
  Synthetic oligonucleotide
ttccaccctctggaagtacggctgtgaggtaagcgacaccaaggaatcaaaa

SEQ ID NO: 510354 - DNA, 52 bp, Artificial
  Synthetic oligonucleotide
acttgccacctacgtgcctggtagagagatcgacaagacgactcaactccgt

SEQ ID NO: 510355 - DNA, 52 bp, Artificial
  Synthetic oligonucleotide
gagtgaacgggtcatctcggctcctgttgcggagagttggaggtgcgggctt

SEQ ID NO: 510356 - DNA, 52 bp, Artificial
  Synthetic oligonucleotide
tcgtatgccggacaggtgtttcgctctgtggtcggggtggctactgtgacgc

SEQ ID NO: 510357 - DNA, 52 bp, Artificial
  Synthetic oligonucleotide
cccctgacgcctcgtacgcccgtaatgccatggtaggccgctttcgcccggt

SEQ ID NO: 510358 - DNA, 52 bp, Artificial
  Synthetic oligonucleotide
atcaacgtgcggcggcacatcgattgcccacaagtaccctgtcgtatcgatc

SEQ ID NO: 510359 - DNA, 52 bp, Artificial
  Synthetic oligonucleotide
ggtcttcgtacggccgaaagcgtcgtaggtgtaggagacatcaggggtgctg

SEQ ID NO: 510360 - DNA, 52 bp, Artificial
  Synthetic oligonucleotide
tacggcccgtgaagaggtgttaacaatgtcatctagcatgcagatccggaca

SEQ ID NO: 510361 - DNA, 52 bp, Artificial
  Synthetic oligonucleotide
gccacttccccttcagagcgggcggggaccaagcggtacgtgcggcatcccc

SEQ ID NO: 510362 - DNA, 52 bp, Artificial
  Synthetic oligonucleotide
gcccttcggtaatgcgatccatactccactccggcttctaatgtcttcactt

SEQ ID NO: 510363 - DNA, 51 bp, Artificial
  Synthetic oligonucleotide
cgtcggtccggttctgcaagtagctgagcgacgtaccagtcaacgccgaga

SEQ ID NO: 510364 - DNA, 51 bp, Artificial
  Synthetic oligonucleotide
acgcaccgcccctcggtgcgttgccgagccgtccatcgttcggtgtcatgg

SEQ ID NO: 510365 - DNA, 51 bp, Artificial
  Synthetic oligonucleotide
cggaggaggcatctccaggggctgggctgatctccgttacgggagagtccc

SEQ ID NO: 510366 - DNA, 51 bp, Artificial
  Synthetic oligonucleotide
ggggaacgatctgtgccagggcagcgcactcttttgcgcggacccacgggg

SEQ ID NO: 510367 - DNA, 51 bp, Artificial
  Synthetic oligonucleotide
ccgaagtaccggaagacgagggcacgttggaccgagccgcggtctgactgc

SEQ ID NO: 510368 - DNA, 51 bp, Artificial
  Synthetic oligonucleotide
gatacggggcgatgaccgagaagataccgagcggaacgtggctgatggact

SEQ ID NO: 510369 - DNA, 51 bp, Artificial
  Synthetic oligonucleotide
cactgagtacggtctggcgtaaataggttgacgacatctcagatatgcgtc

SEQ ID NO: 510370 - DNA, 51 bp, Artificial
  Synthetic oligonucleotide
caccagaaaatccctgatctcacgctgcctgtccacaccacaaccctaggc

SEQ ID NO: 510371 - DNA, 51 bp, Artificial
  Synthetic oligonucleotide
gtgcccgcactgcggagccgtgcgaacacaccgccccggacgcgtgacctc

SEQ ID NO: 510372 - DNA, 50 bp, Artificial
  Synthetic oligonucleotide
cttaaaccatcttctaccgtctacgtggttaagtcatgcgctgccgtggc

SEQ ID NO: 510373 - DNA, 50 bp, Artificial
  Synthetic oligonucleotide
atcccgccgacaggccgggccaactgacatggtcagccgctagattgggg

SEQ ID NO: 510374 - DNA, 50 bp, Artificial
  Synthetic oligonucleotide
gtgacgtgcggtcatgtgcttcagatctcatcggttatgcagatgaaggc

SEQ ID NO: 510375 - DNA, 55 bp, Artificial
  Synthetic oligonucleotide
taccaataataccgaagcaaccacaggcgtaagtgatgaaatgtctgctaacgag

SEQ ID NO: 510376 - DNA, 55 bp, Artificial
  Synthetic oligonucleotide
ggcgtcatagttaccgtatagtggagcagcaagttcaacgttaatatgcaatgga

SEQ ID NO: 510377 - DNA, 55 bp, Artificial
  Synthetic oligonucleotide
ggagaagcagcattaatagtcataccttgaacaccaacgaatggatgagcgtgtt

SEQ ID NO: 510378 - DNA, 55 bp, Artificial
  Synthetic oligonucleotide
gctactgctgtagtagtttctatagctgtttgcatagctacagctcctgctgtac

SEQ ID NO: 510379 - DNA, 55 bp, Artificial
  Synthetic oligonucleotide
gctaatttagtaggtgtaaacgcagcaagacagttcccgtacatttgggatcatg

SEQ ID NO: 510380 - DNA, 55 bp, Artificial
  Synthetic oligonucleotide
gcagcccaaaagcatgaggtcgaattaccaagtgattggcagaatagagtgcaag

SEQ ID NO: 510381 - DNA, 55 bp, Artificial
  Synthetic oligonucleotide
gagcttcgatcccgattcttacttggtttccggtaacacctagtacaattacctt

SEQ ID NO: 510382 - DNA, 55 bp, Artificial
  Synthetic oligonucleotide
gaatttaacccaagacgtcttaataaagttcctgttactgcagctgtttgtccac

SEQ ID NO: 510383 - DNA, 55 bp, Artificial
  Synthetic oligonucleotide
ctcgaaatttctcacaaaacgcacccctacactacgcgctttagcaataatgtca

SEQ ID NO: 510384 - DNA, 55 bp, Artificial
  Synthetic oligonucleotide
cgccacgtaaacgaattgaacgacatagtgatctaccatcggcaccaacaatcgg

SEQ ID NO: 510385 - DNA, 55 bp, Artificial
  Synthetic oligonucleotide
ccgctaaaggactatgagcagatacttcaacacaacatgttccacttgtaagaat

SEQ ID NO: 510386 - DNA, 55 bp, Artificial
  Synthetic oligonucleotide
caaacagttgtaaatgttattgaacaaatgcgtccgtctcttgcaaatgatggcg

SEQ ID NO: 510387 - DNA, 55 bp, Artificial
  Synthetic oligonucleotide
agtggggcagaaccttttagttcagattgtgaggaagctgcaagatggttaacca

SEQ ID NO: 510388 - DNA, 55 bp, Artificial
  Synthetic oligonucleotide
agaaccttctaaagaaagtagtaactctgcggttttatccatctcttggcgagtc

SEQ ID NO: 510389 - DNA, 55 bp, Artificial
  Synthetic oligonucleotide
acacatgtctatgctgacgattacgacgcttctgttgcgctaaaggattacgatg

SEQ ID NO: 510390 - DNA, 52 bp, Artificial
  Synthetic oligonucleotide
gtcctaaaggcacatttgaatacacaggttgtcccacaatcagatcttggac

SEQ ID NO: 510391 - DNA, 52 bp, Artificial
  Synthetic oligonucleotide
ttttgctgtccaaacaatactaagtatggccccaggagtcacacataacaaa

SEQ ID NO: 510392 - DNA, 55 bp, Artificial
  Synthetic oligonucleotide
ttctgttcggtcataggaaatttcatcctttggggccatcatgcaggggtgccgc

SEQ ID NO: 510393 - DNA, 55 bp, Artificial
  Synthetic oligonucleotide
ttcccgcaacctcgagggactcattcgtgtgggcgcctttgactcgctcaatcct

SEQ ID NO: 510394 - DNA, 55 bp, Artificial
  Synthetic oligonucleotide
ttcccacggcttccagcaccgaatcccgatgcaccgcgagaatccactgcgaagc

SEQ ID NO: 510395 - DNA, 55 bp, Artificial
  Synthetic oligonucleotide
tcttgctcccgggacgtacgcgcgtaagagccttcggaagcaccggaagatcgag

SEQ ID NO: 510396 - DNA, 55 bp, Artificial
  Synthetic oligonucleotide
gtgctcgaaacgattcaggcggaactcatggactatcgtggcctcggctgctcgg

SEQ ID NO: 510397 - DNA, 55 bp, Artificial
  Synthetic oligonucleotide
gtccaccaccgagcaatgaattgcgggttctaaagaatccaataactagggcaac

SEQ ID NO: 510398 - DNA, 55 bp, Artificial
  Synthetic oligonucleotide
gcgtccgaatttctcaaacaggtattcgcgcacttcgaagccgaatagcgtccct

SEQ ID NO: 510399 - DNA, 55 bp, Artificial
  Synthetic oligonucleotide
gccccggaacgcatcccgtaacgtatttgtccgctagccaaaacaaacatccggc

SEQ ID NO: 510400 - DNA, 55 bp, Artificial
  Synthetic oligonucleotide
gagagtccatattctcgacaaggaactcccgcgcgctcgcgtagctcacgcatcg

SEQ ID NO: 510401 - DNA, 55 bp, Artificial
  Synthetic oligonucleotide
gaccctgtgattttgcgctcgttttactgcttaatccctgtgcaagaagggactt

SEQ ID NO: 510402 - DNA, 55 bp, Artificial
  Synthetic oligonucleotide
gaatcatggtcggatcttgaagtcgatcgccctagtctataggcgcccggaccct

SEQ ID NO: 510403 - DNA, 55 bp, Artificial
  Synthetic oligonucleotide
cttccacgctcgtactttcacggttcagcacgaagccttcttaccactggctcga

SEQ ID NO: 510404 - DNA, 55 bp, Artificial
  Synthetic oligonucleotide
ccgcttgtctcgctcaggcttcctgactatcgaggagaaagcaccgtcgaggtga

SEQ ID NO: 510405 - DNA, 55 bp, Artificial
  Synthetic oligonucleotide
ccctcggttcaggatacaggcccgaggatgttccgccctcaggcgtttgtcgtag

SEQ ID NO: 510406 - DNA, 55 bp, Artificial
  Synthetic oligonucleotide
cccgagtgtcttcgggatgatggatggaaatcttgaatgcaacaaccgtgggcgc

SEQ ID NO: 510407 - DNA, 55 bp, Artificial
  Synthetic oligonucleotide
ccaaaacgtcggacaccggaatcggcctttcttgagggatctccgggaacgtgcg

SEQ ID NO: 510408 - DNA, 55 bp, Artificial
  Synthetic oligonucleotide
acggcaagccctgctacgggagctacggcggtcccgcacacaaggcgttctattc

SEQ ID NO: 510409 - DNA, 55 bp, Artificial
  Synthetic oligonucleotide
accgcaggaccgacatcccatgaaggatcccttcaacctcgaaccccgcaacggc

SEQ ID NO: 510410 - DNA, 54 bp, Artificial
  Synthetic oligonucleotide
ggaacttttcttcgttcgagtagaccgccgcgcccgtgaaggtcgagtacatgc

SEQ ID NO: 510411 - DNA, 54 bp, Artificial
  Synthetic oligonucleotide
agttgtgtttgccggacccgttcgcatccgccgacttggtccgatagttggtcc

SEQ ID NO: 510412 - DNA, 53 bp, Artificial
  Synthetic oligonucleotide
caacttcacaagcgacaacccttgcgagaggatgacgtttctcggaatgcagc

SEQ ID NO: 510413 - DNA, 52 bp, Artificial
  Synthetic oligonucleotide
gcttccgggaagctgttagccaagagggacaaggcctgcagagatacatgat

SEQ ID NO: 510414 - DNA, 51 bp, Artificial
  Synthetic oligonucleotide
ccccaagtaagcacgatacgtttcaagcgcataccaatcctttcatatgtg

SEQ ID NO: 510415 - DNA, 51 bp, Artificial
  Synthetic oligonucleotide
aggatctccggcgcatctgttggaggcgctttgattgctggtcggaattca

SEQ ID NO: 510416 - DNA, 50 bp, Artificial
  Synthetic oligonucleotide
tgacagctaattgtgcgcgagtcgatgtaggctctcgagcgtctctctaa

SEQ ID NO: 510417 - DNA, 55 bp, Artificial
  Synthetic oligonucleotide
ggagccgacggttacgcgctcaaggaggccgaacccgatgaacttataaacgccg

SEQ ID NO: 510418 - DNA, 55 bp, Artificial
  Synthetic oligonucleotide
gctctggcgatgccgcttgctatgaggtggcgtgccatttggattttcctgtagc

SEQ ID NO: 510419 - DNA, 55 bp, Artificial
  Synthetic oligonucleotide
gcggagatccggggcgggaagataaggacctatcaggggagctacgagtcctacc

SEQ ID NO: 510420 - DNA, 55 bp, Artificial
  Synthetic oligonucleotide
gcggacctctatgtggtcccctattaatatggactccccgggcttcctggacagg

SEQ ID NO: 510421 - DNA, 55 bp, Artificial
  Synthetic oligonucleotide
gcgccatgatctgcctatgatacactaacgacggtgcgatcccgacataaaggag

SEQ ID NO: 510422 - DNA, 55 bp, Artificial
  Synthetic oligonucleotide
gcgaccatgaggaaatctccaggctgtgttacgattgcagaaaagaagggatgcg

SEQ ID NO: 510423 - DNA, 55 bp, Artificial
  Synthetic oligonucleotide
gccgctcagcctttctgcgacgggaagcacaggtgcgctctccttatataagggg

SEQ ID NO: 510424 - DNA, 55 bp, Artificial
  Synthetic oligonucleotide
gcagacgaagcgttcggcttgcggaaaaccctcaagacaagggagtgacctggtt

SEQ ID NO: 510425 - DNA, 55 bp, Artificial
  Synthetic oligonucleotide
gataaacgcccctacgggtaacaccctgtctgcagcggatcacactatggccctc

SEQ ID NO: 510426 - DNA, 55 bp, Artificial
  Synthetic oligonucleotide
gaggcaaaccgccttgtgacttggggtaaacaccgcggaaagcacgtaaaccccg

SEQ ID NO: 510427 - DNA, 55 bp, Artificial
  Synthetic oligonucleotide
gaggaggaacccaaggggtccggcggcacgtcctttgaggtctacggttgatgtg

SEQ ID NO: 510428 - DNA, 55 bp, Artificial
  Synthetic oligonucleotide
gagcttgagataggctatgccctcatacccctagtggacccctctcagggcgggg

SEQ ID NO: 510429 - DNA, 55 bp, Artificial
  Synthetic oligonucleotide
gacgctccgagaaacgcttctcgcacttttaaagaacaaatatcggccggaatag

SEQ ID NO: 510430 - DNA, 55 bp, Artificial
  Synthetic oligonucleotide
cttgacggtctgctgctaggggccgcggtatgcgtaaacgtgctggagggccttt

SEQ ID NO: 510431 - DNA, 55 bp, Artificial
  Synthetic oligonucleotide
ctggtcatgctattcctagattcctgcttagacacaagatccacctcctgcagat

SEQ ID NO: 510432 - DNA, 55 bp, Artificial
  Synthetic oligonucleotide
ctgattctatttcccttttcaggttttcataagttcgctctttgccctccagccc

SEQ ID NO: 510433 - DNA, 55 bp, Artificial
  Synthetic oligonucleotide
ctcgtttacaggggtatccaggccttgaaggtgagctatgtccctcccgttgacc

SEQ ID NO: 510434 - DNA, 55 bp, Artificial
  Synthetic oligonucleotide
ctatccttgcccctaaagtcctaagaggggatacaacccgccccatgggcctttt

SEQ ID NO: 510435 - DNA, 55 bp, Artificial
  Synthetic oligonucleotide
ctactgcatgatctgtccgatataacggtctcactcagtattggttgcgtcggaa

SEQ ID NO: 510436 - DNA, 55 bp, Artificial
  Synthetic oligonucleotide
ttccgggatggcctatcctatctgtatgtggaacactgtcgcgtggagcaggagg

SEQ ID NO: 510437 - DNA, 55 bp, Artificial
  Synthetic oligonucleotide
tgcagggcttggaggatagcgcccgggatctcaccagtctggcggaacggcttaa

SEQ ID NO: 510438 - DNA, 55 bp, Artificial
  Synthetic oligonucleotide
tctttgtaaaccagagaagggtatgggatacgaatataagggcggcgatacaggg

SEQ ID NO: 510439 - DNA, 55 bp, Artificial
  Synthetic oligonucleotide
tctgggttcggagttcgagtccctgcctcgctgcgcggagaagaccctcatcgat

SEQ ID NO: 510440 - DNA, 55 bp, Artificial
  Synthetic oligonucleotide
tcataacctcgttgaggtgagcggtacccaccttgcgcatcttgcactgcacatc

SEQ ID NO: 510441 - DNA, 55 bp, Artificial
  Synthetic oligonucleotide
taccggctgaagacgatcttattagattgagaagtgtggagaactttacagggag

SEQ ID NO: 510442 - DNA, 55 bp, Artificial
  Synthetic oligonucleotide
tacaggggcagaaattgagtctgttaatactataaagcccactcttgaggaagct

SEQ ID NO: 510443 - DNA, 55 bp, Artificial
  Synthetic oligonucleotide
taaagctctttctggtaaggcattgacaggaacccctcttccctcttgaatgggg

SEQ ID NO: 510444 - DNA, 55 bp, Artificial
  Synthetic oligonucleotide
gtgggctacgaaaaccggacctacctcgggaccatcccgctgcaaaactcggtgg

SEQ ID NO: 510445 - DNA, 55 bp, Artificial
  Synthetic oligonucleotide
gtgctctagtgccacctttgtgggcagtgttgtgaccaacatagcgcctgatcac

SEQ ID NO: 510446 - DNA, 55 bp, Artificial
  Synthetic oligonucleotide
gtaaagtcccgggtaggagaagaatactctgtccagtttgggcgcgatctcctcg

SEQ ID NO: 510447 - DNA, 55 bp, Artificial
  Synthetic oligonucleotide
ggttggttcggtgacgctctgcctctatatgatttatgacgtcggcggttggacg

SEQ ID NO: 510448 - DNA, 55 bp, Artificial
  Synthetic oligonucleotide
ggtggtcttccgtcgtttctgtcgagatgtccaccaaagttttccaccattgtgg

SEQ ID NO: 510449 - DNA, 55 bp, Artificial
  Synthetic oligonucleotide
ggtccataaggaccttgtgtcttgccttgcgatggtcggacctcgttgaaatcac

SEQ ID NO: 510450 - DNA, 55 bp, Artificial
  Synthetic oligonucleotide
ggtcatcctcctttgaggtaccctcgtcttgtcccgtatgtggttcttccgcggt

SEQ ID NO: 510451 - DNA, 55 bp, Artificial
  Synthetic oligonucleotide
gggttgatcaacacagcttcgaccaattccttagaggcgcccgcaagctcgctta

SEQ ID NO: 510452 - DNA, 55 bp, Artificial
  Synthetic oligonucleotide
ggccatgatgagcgttgaggtgcctactccttcgtgcaccttatagcccattacg

SEQ ID NO: 510453 - DNA, 55 bp, Artificial
  Synthetic oligonucleotide
ggatatctcctccttcgcccaccgtccctgatggcttcggcttcatctagtttcg

SEQ ID NO: 510454 - DNA, 55 bp, Artificial
  Synthetic oligonucleotide
ggaggagccggtgatatcccacgtggcccttaagtttccccggtggccctttgac

SEQ ID NO: 510455 - DNA, 55 bp, Artificial
  Synthetic oligonucleotide
cctcggacggatttccacgtggtgactggccactggcgtagtaaaagcgccactg

SEQ ID NO: 510456 - DNA, 55 bp, Artificial
  Synthetic oligonucleotide
ccgcttggttcccggcatttgggattcaataaactgaagggcctcgaggaggatg

SEQ ID NO: 510457 - DNA, 55 bp, Artificial
  Synthetic oligonucleotide
ccctgcgctccttgagcaggctaccctggaactcacccatggcaaggccgtccac

SEQ ID NO: 510458 - DNA, 55 bp, Artificial
  Synthetic oligonucleotide
ccctcccgtgcagatgacaaacgtcatcccgaccgccaatatcagctgatgcgcc

SEQ ID NO: 510459 - DNA, 55 bp, Artificial
  Synthetic oligonucleotide
cccctgaccctacagtagatgcgtatctcctccgattcgaggcggaagaggggtt

SEQ ID NO: 510460 - DNA, 55 bp, Artificial
  Synthetic oligonucleotide
cccctatgacttcggctatgaaatccgcggggacgaatattttcgggtccgccac

SEQ ID NO: 510461 - DNA, 55 bp, Artificial
  Synthetic oligonucleotide
ccccgcataccaacttgccttttcccttttctgtatcacacctcccaatcgtcat

SEQ ID NO: 510462 - DNA, 55 bp, Artificial
  Synthetic oligonucleotide
ccattcatgtaccaccaatactccggggcgcttgtcttccgtcttatcatcgtag

SEQ ID NO: 510463 - DNA, 55 bp, Artificial
  Synthetic oligonucleotide
caggactcatttcgggtttggggacatgttctagcctctcatttagggcttgggg

SEQ ID NO: 510464 - DNA, 55 bp, Artificial
  Synthetic oligonucleotide
cacgaggatggttggtgcggcaacgggtgtctacttcggacatccggatggttgg

SEQ ID NO: 510465 - DNA, 55 bp, Artificial
  Synthetic oligonucleotide
caagcacagaggacatctctacagcaccccttactctttgaaccaatgaaccgcc

SEQ ID NO: 510466 - DNA, 55 bp, Artificial
  Synthetic oligonucleotide
caaacgagggcggtctatatctgctctctctactcaggggaggtcgcaaagaacg

SEQ ID NO: 510467 - DNA, 55 bp, Artificial
  Synthetic oligonucleotide
atcccgtcccgtcggcgaagctgccgtcccgttccaggcccatgtagacgcagat

SEQ ID NO: 510468 - DNA, 55 bp, Artificial
  Synthetic oligonucleotide
actccagccccatgtagaggtccgtcaccccgtagggtttggcgctctccagcat

SEQ ID NO: 510469 - DNA, 55 bp, Artificial
  Synthetic oligonucleotide
aatccggcgtaggtagtgtggccaatgcagtactaaccaacttcaaagaatcccg

SEQ ID NO: 510470 - DNA, 55 bp, Artificial
  Synthetic oligonucleotide
aagctccacctccatccccgggaccatccccatctcaagaaggcgcttcctgagg

SEQ ID NO: 510471 - DNA, 55 bp, Artificial
  Synthetic oligonucleotide
aagcgggtgagagacggaatccttcgcaagggaaccgacccgggccaaaaggcac

SEQ ID NO: 510472 - DNA, 55 bp, Artificial
  Synthetic oligonucleotide
ctaagcaagctcataataggaagctacataggcctcatggtggaccgaaagactg

SEQ ID NO: 510473 - DNA, 55 bp, Artificial
  Synthetic oligonucleotide
ctaaagattcatcacctctaattcacctgaggcttacagtacccatatccttagg

SEQ ID NO: 510474 - DNA, 55 bp, Artificial
  Synthetic oligonucleotide
cggttcccgtacttctccatggtgctcttatggtggtcgaagaacaggggtcgcc

SEQ ID NO: 510475 - DNA, 55 bp, Artificial
  Synthetic oligonucleotide
cggtctattgtcgatatggcgtcttccgctgattcacagagcgcccggaggaaga

SEQ ID NO: 510476 - DNA, 55 bp, Artificial
  Synthetic oligonucleotide
cggatgcgcctttgcccttatggccgctttctataacgtcggggtaaagggtacc

SEQ ID NO: 510477 - DNA, 55 bp, Artificial
  Synthetic oligonucleotide
cggaggcatcgggtagcaggcgtgagcaacatcacctagcagcccttggaacgct

SEQ ID NO: 510478 - DNA, 55 bp, Artificial
  Synthetic oligonucleotide
cggagatgcttgaggaccttgtggtatccgcggtcaacgatgccctgaggaagag

SEQ ID NO: 510479 - DNA, 55 bp, Artificial
  Synthetic oligonucleotide
cggacttggttaggggtataagcgagatggcccgattttcttacgtgcggcagtc

SEQ ID NO: 510480 - DNA, 55 bp, Artificial
  Synthetic oligonucleotide
cgctgccttgtgatcgaacttgtccccgtgggaataggtcgccaagtcctcccgg

SEQ ID NO: 510481 - DNA, 55 bp, Artificial
  Synthetic oligonucleotide
cgcgcttcctaggcggcctaagagaactggtcacgggcagaggattggccagaga

SEQ ID NO: 510482 - DNA, 55 bp, Artificial
  Synthetic oligonucleotide
cctgcccctccagctctatgccgtgaagctccttaaccctgaagaggtcgatcac

SEQ ID NO: 510483 - DNA, 55 bp, Artificial
  Synthetic oligonucleotide
cgagggtatcgcaacgggacatacccgcacaggcttacgacgagagtagggagcc

SEQ ID NO: 510484 - DNA, 55 bp, Artificial
  Synthetic oligonucleotide
cgagcgtgaagctcgtgactgatctgtacgcaagttacaaacctcggtacgatat

SEQ ID NO: 510485 - DNA, 55 bp, Artificial
  Synthetic oligonucleotide
cctgccgagacgaagaccatggatctttcgggcttcatcgttactccaggcctga

SEQ ID NO: 510486 - DNA, 55 bp, Artificial
  Synthetic oligonucleotide
ccttcgcgatacaggagctgacagaggctatgtcgtcgggatggacgtctttcag

SEQ ID NO: 510487 - DNA, 54 bp, Artificial
  Synthetic oligonucleotide
cccatgcaatggcaacctgcggcaaagctcagagaacagttcctttcctacttc

SEQ ID NO: 510488 - DNA, 54 bp, Artificial
  Synthetic oligonucleotide
cgccctataggcggcaaaacggtcctcctgggacatgaaaggttctatgacccc

SEQ ID NO: 510489 - DNA, 54 bp, Artificial
  Synthetic oligonucleotide
ccccgtctaagggtttctctccgtcgtcaggatggatcggaccgcacaaggcct

SEQ ID NO: 510490 - DNA, 54 bp, Artificial
  Synthetic oligonucleotide
caagaggcgttggcagctccgtggagataacctccaaggtctatggtaagtacg

SEQ ID NO: 510491 - DNA, 54 bp, Artificial
  Synthetic oligonucleotide
tgcagcgtgcattttacgagcgaatagtcgttcacgctccagagtctttcgtaa

SEQ ID NO: 510492 - DNA, 54 bp, Artificial
  Synthetic oligonucleotide
ataggcgacccctaaggcctcgtgattccagggaaggtgcggattgtcctcccc

SEQ ID NO: 510493 - DNA, 54 bp, Artificial
  Synthetic oligonucleotide
tctggcccgttccatggctcgaataggcgtgggcctttcaatagctcagcaggt

SEQ ID NO: 510494 - DNA, 54 bp, Artificial
  Synthetic oligonucleotide
ccgagtaaaacctttcctcgtagtccaccaacaaggggaagaaatctagtccct

SEQ ID NO: 510495 - DNA, 53 bp, Artificial
  Synthetic oligonucleotide
ggtcttttgagctttcaacgcaacctcctccaagaggtgtaggaccagttata

SEQ ID NO: 510496 - DNA, 52 bp, Artificial
  Synthetic oligonucleotide
tcttgaaaggccgcgaactgggcgtttcgatgttatccacagatggcaacat

SEQ ID NO: 510497 - DNA, 52 bp, Artificial
  Synthetic oligonucleotide
atattggtgacgtatattttccctaacctctggcgtaacattggggccgacg

SEQ ID NO: 510498 - DNA, 51 bp, Artificial
  Synthetic oligonucleotide
gccataaggagggccaggagcggtcttaaggatccccggcgtccggtgggg

SEQ ID NO: 510499 - DNA, 55 bp, Artificial
  Synthetic oligonucleotide
gttccagcaaaggagcaaaccccttttgcacaatccaaccgatatggcagtccgg

SEQ ID NO: 510500 - DNA, 55 bp, Artificial
  Synthetic oligonucleotide
gggagccccttcgaggagtggcacggcaggaaatttgacgatgactatgcgtttc

SEQ ID NO: 510501 - DNA, 55 bp, Artificial
  Synthetic oligonucleotide
gggagaatatcaagaagctccccggtcagcaaaggcttgtgcggagtctcatcgg

SEQ ID NO: 510502 - DNA, 55 bp, Artificial
  Synthetic oligonucleotide
ggctgtcgtcaggatttcacggtgactcccgtcaccatatatcgccgggtgaccg

SEQ ID NO: 510503 - DNA, 55 bp, Artificial
  Synthetic oligonucleotide
ggcgtacccgtcccgtcacacgaaaggagaagacctatgctcagattcatgtccc

SEQ ID NO: 510504 - DNA, 55 bp, Artificial
  Synthetic oligonucleotide
ggcagagccacctgatatgcgatccttaatcaccggtgcggaatagaccctgttg

SEQ ID NO: 510505 - DNA, 55 bp, Artificial
  Synthetic oligonucleotide
ggcacgatgtaaagaactgcttcggaccagggtaaacgatcacaccgtgaatacc

SEQ ID NO: 510506 - DNA, 55 bp, Artificial
  Synthetic oligonucleotide
gatacgctcgtcaagaactctatcgaaaatactccggatggcggcacagtgaccg

SEQ ID NO: 510507 - DNA, 55 bp, Artificial
  Synthetic oligonucleotide
tcataatcatgagtccggttgaacaggagcccttcggtctcaaaccggtgggcac

SEQ ID NO: 510508 - DNA, 55 bp, Artificial
  Synthetic oligonucleotide
ctgcgaagaattcctgtcgctgtctcacgagtgtctttgggaagcgtactcctcg

SEQ ID NO: 510509 - DNA, 55 bp, Artificial
  Synthetic oligonucleotide
cgtgcagcacagatacgggccgccaccgtttcttcgatcttagtctcaaggcgtg

SEQ ID NO: 510510 - DNA, 55 bp, Artificial
  Synthetic oligonucleotide
cggcgtggttcttgatgctgtgtatcattgtccccatgaaaaggacgaactctgc

SEQ ID NO: 510511 - DNA, 55 bp, Artificial
  Synthetic oligonucleotide
cggcgaggctttgataaacgaatcggccatgacgggcgaatcccggccggtattt

SEQ ID NO: 510512 - DNA, 55 bp, Artificial
  Synthetic oligonucleotide
cggatatctccatagaggttacgagaaggcctgcgaaaacaaacagtaccatcag

SEQ ID NO: 510513 - DNA, 55 bp, Artificial
  Synthetic oligonucleotide
ccgtgggcaactgaaggaacacgatcgagccggaggctcaagcaccctagccgat

SEQ ID NO: 510514 - DNA, 55 bp, Artificial
  Synthetic oligonucleotide
ccgccacaggagatcataggcctgaagatgtttgattcgttggccccagcgggcg

SEQ ID NO: 510515 - DNA, 55 bp, Artificial
  Synthetic oligonucleotide
ccgcatcggaggttgtgaggcgtcctccttgattccaggtttatcctcaattccg

SEQ ID NO: 510516 - DNA, 55 bp, Artificial
  Synthetic oligonucleotide
ccgattcggggtttgcacagacgtaatcctattctacgtcaaatcgaacaaagca

SEQ ID NO: 510517 - DNA, 55 bp, Artificial
  Synthetic oligonucleotide
ccccgtctcactggtagaatccgatccagctccaagacgagaggagaggcgacga

SEQ ID NO: 510518 - DNA, 55 bp, Artificial
  Synthetic oligonucleotide
cagcgtggctggtggattggaaagcggcatgacagtttagtccttgtcggtagga

SEQ ID NO: 510519 - DNA, 55 bp, Artificial
  Synthetic oligonucleotide
tcgtcaagatatctttacaactgtgtcagacagagccgcgcagttagcaccatat

SEQ ID NO: 510520 - DNA, 55 bp, Artificial
  Synthetic oligonucleotide
tgcagggctagtagtagctcgagacccgtacacaggggcggaaacctgcggttac

SEQ ID NO: 510521 - DNA, 55 bp, Artificial
  Synthetic oligonucleotide
atgcgttccggttctgactaattgtcttagtcgccacatccccagagatagcact

SEQ ID NO: 510522 - DNA, 55 bp, Artificial
  Synthetic oligonucleotide
accggagctaaggaagccgtcaatgagatcacaaacgagcagtatcacacagtgt

SEQ ID NO: 510523 - DNA, 54 bp, Artificial
  Synthetic oligonucleotide
gaggctatcggctgttctgaagatttctgttgaaatagatgttggtccgtgata

SEQ ID NO: 510524 - DNA, 54 bp, Artificial
  Synthetic oligonucleotide
atttcctgttacaacgggcttcttggcaatgcggaaaatgctatcagaccgatt

SEQ ID NO: 510525 - DNA, 53 bp, Artificial
  Synthetic oligonucleotide
tctggtctgcacgtcctttctatctgtaatgttccgaaggatgccgcacagcc

SEQ ID NO: 510526 - DNA, 53 bp, Artificial
  Synthetic oligonucleotide
atgtcaggccaggctgctacatcgcctcctctgcctgagcctgaacaacccga

SEQ ID NO: 510527 - DNA, 53 bp, Artificial
  Synthetic oligonucleotide
tgtccaaattctggtggcgttacctatcaccgtttgttctggctgtcaactct

SEQ ID NO: 510528 - DNA, 53 bp, Artificial
  Synthetic oligonucleotide
tgtcgtgaactccttgtcaagagggaaaagtggtccgaagagtttgcgccttt

SEQ ID NO: 510529 - DNA, 60 bp, Artificial
  Synthetic oligonucleotide
ctgaggtcggcctccacatccttggagaggtccactccctctacggggatgcgggcgtcc

SEQ ID NO: 510530 - DNA, 60 bp, Artificial
  Synthetic oligonucleotide
tcccatcccccaccgggcagagggtagcggtagcggaaggcccaaagggggaaagaaacc

SEQ ID NO: 510531 - DNA, 60 bp, Artificial
  Synthetic oligonucleotide
cccctcccttttcgcgtgggggacagaactcccccgcgcacctgccaggtgcctcttgcc

SEQ ID NO: 510532 - DNA, 60 bp, Artificial
  Synthetic oligonucleotide
taagtttggaactctgtaagtctgtaagtcacaaggcccccttgcgcggcatgcgcaatt

SEQ ID NO: 510533 - DNA, 60 bp, Artificial
  Synthetic oligonucleotide
ccacccaaacgtcgcgccattaacaccaccccatgcaaataacgctaacacattccgtag

SEQ ID NO: 510534 - DNA, 58 bp, Artificial
  Synthetic oligonucleotide
agagcgaggctcggactaagagcaagggttacggagaacactctcatacgaatcgcag

SEQ ID NO: 510535 - DNA, 55 bp, Artificial
  Synthetic oligonucleotide
cgttcaacccggctttggagggcggttcaaacccctttgaaagcggtccctggcg

SEQ ID NO: 510536 - DNA, 55 bp, Artificial
  Synthetic oligonucleotide
ctctggcccgcgaagatcctcgtcaaagcgtgggacagggcctgggagatcctcg

SEQ ID NO: 510537 - DNA, 55 bp, Artificial
  Synthetic oligonucleotide
ctgggctaggctctacccaagagccgaaggagggtcttatgcgggaggaagggga

SEQ ID NO: 510538 - DNA, 55 bp, Artificial
  Synthetic oligonucleotide
gaatctgagcctgaaaccagcgggcgaaaggactcaattaggcctcctgcctgga

SEQ ID NO: 510539 - DNA, 55 bp, Artificial
  Synthetic oligonucleotide
gatcaatcccctgagatacttaatgagctcaggttcaagctatatcgttgcatcg

SEQ ID NO: 510540 - DNA, 55 bp, Artificial
  Synthetic oligonucleotide
gatccccatctacatcatgtacatctacgtgcagaactgggtccgctccgctttg

SEQ ID NO: 510541 - DNA, 55 bp, Artificial
  Synthetic oligonucleotide
gcgtggttccggcgtgttgcgaggagttatcgttcccaatatccataaaatccga

SEQ ID NO: 510542 - DNA, 55 bp, Artificial
  Synthetic oligonucleotide
ggacaaccaacaaggatgtgttccgcacggaaaagccttgcgccctcaaggccac

SEQ ID NO: 510543 - DNA, 55 bp, Artificial
  Synthetic oligonucleotide
ggagccacgcacttttcggacagtacatatggatgcgggccaccttattgagacc

SEQ ID NO: 510544 - DNA, 55 bp, Artificial
  Synthetic oligonucleotide
ggccccggaacttctctgggtcgtagagaggacgccttggcatgaccccagtcta

SEQ ID NO: 510545 - DNA, 55 bp, Artificial
  Synthetic oligonucleotide
gggcgcttgcccagaccaagtgattatgcgggagccgctgtgttcttagcgtctg

SEQ ID NO: 510546 - DNA, 55 bp, Artificial
  Synthetic oligonucleotide
tacccgagcaggagcgttcttggacggggtacgggtgaggcccgcgtagtaagtc

SEQ ID NO: 510547 - DNA, 55 bp, Artificial
  Synthetic oligonucleotide
tcacctcaccgtcgtagaccgccaggagaggtgtgccctctggcatggggaagtc

SEQ ID NO: 510548 - DNA, 55 bp, Artificial
  Synthetic oligonucleotide
tccaggggtgccctgaggtccaggtctccacccgaagcctctccttccgggacaa

SEQ ID NO: 510549 - DNA, 55 bp, Artificial
  Synthetic oligonucleotide
tcccgaaggccgaaccccagaagacccagtccaggtcgcttcccacgccctctat

SEQ ID NO: 510550 - DNA, 55 bp, Artificial
  Synthetic oligonucleotide
tcccgcatacgtttgcaagacgagggccgggcttgcgagaactttcctccagccc

SEQ ID NO: 510551 - DNA, 55 bp, Artificial
  Synthetic oligonucleotide
tcctgccgcctccaggacttggtcggtcagagcgcttagggtctcgtgggagtag

SEQ ID NO: 510552 - DNA, 55 bp, Artificial
  Synthetic oligonucleotide
tcgccctagccacccttttgttggcgggttcggtgaaggcccagatggcggacgt

SEQ ID NO: 510553 - DNA, 55 bp, Artificial
  Synthetic oligonucleotide
tcttaggccaccgctactcccacgagaccctgagcgctctgaccgaccaagtcct

SEQ ID NO: 510554 - DNA, 55 bp, Artificial
  Synthetic oligonucleotide
tgtcccctcgtttgacccgtgtggccgggatcctctccaagggtgaggtggacag

SEQ ID NO: 510555 - DNA, 55 bp, Artificial
  Synthetic oligonucleotide
ttaagctcccctgggaccaggcccgcttcttctccctccacggaaggcctttggg

SEQ ID NO: 510556 - DNA, 55 bp, Artificial
  Synthetic oligonucleotide
ttcggagagttcggggattacgggcaggccttcctctcacgggcagacgcgggtt

SEQ ID NO: 510557 - DNA, 55 bp, Artificial
  Synthetic oligonucleotide
catgtagacgatgttgaagctgtacatcgttcccaggagcccgtagagcaggagg

SEQ ID NO: 510558 - DNA, 55 bp, Artificial
  Synthetic oligonucleotide
caagtgaaggccagccgctcgctaatccacctaccgcacaggggtccacgcatgt

SEQ ID NO: 510559 - DNA, 55 bp, Artificial
  Synthetic oligonucleotide
ccacggggtgggagctggcgtaaacgaccccgccttgtgttagccttgactaacc

SEQ ID NO: 510560 - DNA, 55 bp, Artificial
  Synthetic oligonucleotide
atcgcaaataccttcatgtcgttagacgaggagagggatgggctgtggagcgcga

SEQ ID NO: 510561 - DNA, 55 bp, Artificial
  Synthetic oligonucleotide
aggtttgaaggtcataatgcccgcataaactccccactggaccttataagttacc

SEQ ID NO: 510562 - DNA, 55 bp, Artificial
  Synthetic oligonucleotide
acctgcaagaaggccgtccggtccagctccagaaccgtctgcagaacctcggcta

SEQ ID NO: 510563 - DNA, 55 bp, Artificial
  Synthetic oligonucleotide
cccgtacccaaaaggaccggttctccatcttccaccgggaaaggagaagctcccc

SEQ ID NO: 510564 - DNA, 55 bp, Artificial
  Synthetic oligonucleotide
ccctcacctcaaggcacttcagggctccccaggcttccgggctgacctcgaggag

SEQ ID NO: 510565 - DNA, 55 bp, Artificial
  Synthetic oligonucleotide
aatatgcctttgggtgccaaaatggctaggtccggttccgttgttgtttcgtcac

SEQ ID NO: 510566 - DNA, 55 bp, Artificial
  Synthetic oligonucleotide
cctctccccaagtcttccgataccccgaggaaccgttccgtgacccatagtcgtc

SEQ ID NO: 510567 - DNA, 55 bp, Artificial
  Synthetic oligonucleotide
aaaagcccctcatgcccttcgccgcccttctcggggagtgggcccgggtgaacga

SEQ ID NO: 510568 - DNA, 55 bp, Artificial
  Synthetic oligonucleotide
cgcaacctaaagcgttggccaggactggggctaaaggtggtggctttcttggacg

SEQ ID NO: 510569 - DNA, 55 bp, Artificial
  Synthetic oligonucleotide
cgcgtaactgagccgcacccctagccccaaaagccgctccacatacgccctggag

SEQ ID NO: 510570 - DNA, 55 bp, Artificial
  Synthetic oligonucleotide
cgctgaccttgaccatcttgtacctccaacctcatgctacctatctctgccgcgt

SEQ ID NO: 510571 - DNA, 55 bp, Artificial
  Synthetic oligonucleotide
cggcatgaaacttattgacaagcaaacctcccctcactatactcggggcgtaacg

SEQ ID NO: 510572 - DNA, 54 bp, Artificial
  Synthetic oligonucleotide
acgggaaacccgcagcccttttcaagtgccccggttgcatagggttgagaggga

SEQ ID NO: 510573 - DNA, 54 bp, Artificial
  Synthetic oligonucleotide
aaaagatcgcccatttgcgcataccgcctcccttggtgtacgccggccagtcta

SEQ ID NO: 510574 - DNA, 54 bp, Artificial
  Synthetic oligonucleotide
gggacctcgttctctgggcggtgggcgtgaggggcaaccccttgccggggcttc

SEQ ID NO: 510575 - DNA, 54 bp, Artificial
  Synthetic oligonucleotide
cgcgacctcatgagctactgcagccccttgtggatctccgactacacctacgag

SEQ ID NO: 510576 - DNA, 53 bp, Artificial
  Synthetic oligonucleotide
taagaataagaaggggtatatgctgatgccttcgttctgggccaccagtggaa

SEQ ID NO: 510577 - DNA, 53 bp, Artificial
  Synthetic oligonucleotide
ggggtcaggatgctcgctaaggcttgaaccagggtgaggaccgaagtttgtag

SEQ ID NO: 510578 - DNA, 53 bp, Artificial
  Synthetic oligonucleotide
ggggaggttacgtccaggttacgtggaagctcttcccaacgatggcccctgcg

SEQ ID NO: 510579 - DNA, 53 bp, Artificial
  Synthetic oligonucleotide
acggtggaactcagagggctgggacccgtgcgcctcatcggaatcgacgcccc

SEQ ID NO: 510580 - DNA, 53 bp, Artificial
  Synthetic oligonucleotide
cccggatggagtccgcaagctcctttaggctctcctcggaaaagcgccgccta

SEQ ID NO: 510581 - DNA, 53 bp, Artificial
  Synthetic oligonucleotide
aacgagggagaaatcaggccgcagacttgggatgagttttatcgcatgtctac

SEQ ID NO: 510582 - DNA, 53 bp, Artificial
  Synthetic oligonucleotide
cgagcggggcttggaactcctaaggcaggccacccgcagagctagggaaggag

SEQ ID NO: 510583 - DNA, 52 bp, Artificial
  Synthetic oligonucleotide
tacacgctcaaacaaatgcggcttactcatgtctggcgcttacaaccccagg

SEQ ID NO: 510584 - DNA, 52 bp, Artificial
  Synthetic oligonucleotide
ggatatacccgcctcaaggaaaagggtacttctacgcacttgagagtctcaa

SEQ ID NO: 510585 - DNA, 52 bp, Artificial
  Synthetic oligonucleotide
gcattctaacggtggagtggagaccctcgagcggaccaagcgggtccctatt

SEQ ID NO: 510586 - DNA, 51 bp, Artificial
  Synthetic oligonucleotide
agtttcgggcttgagcctggtggaactccttcgcctctccctcaagggagc

SEQ ID NO: 510587 - DNA, 51 bp, Artificial
  Synthetic oligonucleotide
agagagttcgctcttacctttattgcccctcttagccgaccaaacctaacc

SEQ ID NO: 510588 - DNA, 51 bp, Artificial
  Synthetic oligonucleotide
ttccagaggaaccccgcttaccgggccgcctttgaccagcttctccagacc

SEQ ID NO: 510589 - DNA, 50 bp, Artificial
  Synthetic oligonucleotide
ccccacttgccattccccaccaagaagttgtagtatccggtgcgtcagcc

SEQ ID NO: 510590 - DNA, 55 bp, Artificial
  Synthetic oligonucleotide
tctcggataggtttgtaaccgtcattcccatttacggtggtggggagcgcctggg

SEQ ID NO: 510591 - DNA, 55 bp, Artificial
  Synthetic oligonucleotide
gtagatgtaactctaccttctggcggtcagtgcactttgggcttagtttctctgg

SEQ ID NO: 510592 - DNA, 55 bp, Artificial
  Synthetic oligonucleotide
ggctccagaggcaccggtaaagcccctgccgcgccctcatataacctctggtctt

SEQ ID NO: 510593 - DNA, 55 bp, Artificial
  Synthetic oligonucleotide
ggccaaacggcagtccacaaagaactccgccttttccaaatcgccgccggaaggt

SEQ ID NO: 510594 - DNA, 55 bp, Artificial
  Synthetic oligonucleotide
gctcacctgagacttttgagcggggccaacacccatcacagcattgaggcccttt

SEQ ID NO: 510595 - DNA, 55 bp, Artificial
  Synthetic oligonucleotide
gcgcctcgaatacaagtacaaccgcagcttttccctgcgttttgtaacgccggac

SEQ ID NO: 510596 - DNA, 55 bp, Artificial
  Synthetic oligonucleotide
gcgcatgcgggcatcggctgctgtgtacaaaacgcagatgttggtacagacaccc

SEQ ID NO: 510597 - DNA, 55 bp, Artificial
  Synthetic oligonucleotide
gcctcacctccgaccttgattacccgatccgggagaccgataatgcgtgccgggt

SEQ ID NO: 510598 - DNA, 55 bp, Artificial
  Synthetic oligonucleotide
gcactgccgagcggaagtgaggtttccgaatatatgcgttgcgccggattaaagg

SEQ ID NO: 510599 - DNA, 55 bp, Artificial
  Synthetic oligonucleotide
cggaggtgttgaacatgtaaggatgctgaaagaccatgcacatctggcgcctcag

SEQ ID NO: 510600 - DNA, 55 bp, Artificial
  Synthetic oligonucleotide
ccggaaagctgtatagctctgtactgaaactggatacatacgccgcaccggtagc

SEQ ID NO: 510601 - DNA, 55 bp, Artificial
  Synthetic oligonucleotide
ccagacagttggtgaggccttcgcagtggaacaacaagcccttacggcgctcccc

SEQ ID NO: 510602 - DNA, 55 bp, Artificial
  Synthetic oligonucleotide
acatcaccttacaggagctggatggggtcaaatttctgctgcggacccctagcgg

SEQ ID NO: 510603 - DNA, 54 bp, Artificial
  Synthetic oligonucleotide
actcccattttggcgcagatctccagaagggagtgggcgacattgtttccgtct

SEQ ID NO: 510604 - DNA, 51 bp, Artificial
  Synthetic oligonucleotide
gatcttacgggatatggatacgggacggtgaaaggaatggcgagcgatcgg

SEQ ID NO: 510605 - DNA, 51 bp, Artificial
  Synthetic oligonucleotide
gttctggctacggtcagccagttgtttaccatggcgccggggcttaaaggt

SEQ ID NO: 510606 - DNA, 51 bp, Artificial
  Synthetic oligonucleotide
tttagtaacgtgcgattcatcaggccgttacctcgatccccgcaaatgttc

SEQ ID NO: 510607 - DNA, 58 bp, Artificial
  Synthetic oligonucleotide
cctcattatgaagtcctaatgacttaatcggatacgaaaccacataagttttactgac

SEQ ID NO: 510608 - DNA, 57 bp, Artificial
  Synthetic oligonucleotide
cgtacctttaaactgtgtaatcttccacaataaagtccctgtatttctgtcaaatgc

SEQ ID NO: 510609 - DNA, 55 bp, Artificial
  Synthetic oligonucleotide
tcgaaggttcggtgggtggagtaataggttcattgataggatgccttttgtttac

SEQ ID NO: 510610 - DNA, 55 bp, Artificial
  Synthetic oligonucleotide
tcctttaacgcaggtctacgtatttggcctacatatcgaccaatatgctaatagg

SEQ ID NO: 510611 - DNA, 55 bp, Artificial
  Synthetic oligonucleotide
gttaatactgcactcggtgcttttggtaatgttagttctgccttcggtaagctgg

SEQ ID NO: 510612 - DNA, 55 bp, Artificial
  Synthetic oligonucleotide
gtcccatcaactgttttatcgttacatcctgatgttacagttgtaatagacagtg

SEQ ID NO: 510613 - DNA, 55 bp, Artificial
  Synthetic oligonucleotide
ggcaatcaaaggttgggtaggcgacttgttcagcaactaatgtggagaattgaaa

SEQ ID NO: 510614 - DNA, 55 bp, Artificial
  Synthetic oligonucleotide
ggaaaggtagtagctgtattaaaagaacccagaccatacaaagtggcaggtgagc

SEQ ID NO: 510615 - DNA, 55 bp, Artificial
  Synthetic oligonucleotide
gctgtcaacattagaaggagcagcgtacatcgaaagagtatcagtgtacgacgta

SEQ ID NO: 510616 - DNA, 55 bp, Artificial
  Synthetic oligonucleotide
gctaagtgccttaggtttgtcttctgatgaagcatttgctatcatatacgataac

SEQ ID NO: 510617 - DNA, 55 bp, Artificial
  Synthetic oligonucleotide
gctaaaacaggcagtgcatctgtaggcaaaagcaggtttctccttctctgaaccg

SEQ ID NO: 510618 - DNA, 55 bp, Artificial
  Synthetic oligonucleotide
gccctcttgtaaaggcttcaagaacctcatttacttcaggacctctagcttcacc

SEQ ID NO: 510619 - DNA, 55 bp, Artificial
  Synthetic oligonucleotide
gagtctatcgacagtcgtagttgcaacatggattctggtatctgatgaagcatag

SEQ ID NO: 510620 - DNA, 55 bp, Artificial
  Synthetic oligonucleotide
gagctataagcattgtctcaggagcttctttgtctgaccctatgttgtcgctgct

SEQ ID NO: 510621 - DNA, 55 bp, Artificial
  Synthetic oligonucleotide
gacgattgccattgtcatcatcccatgaacgagtttgtattcttcctatgatagc

SEQ ID NO: 510622 - DNA, 55 bp, Artificial
  Synthetic oligonucleotide
ctctctccgcaattaggacatacaagagttcctttaatcttgctgtagctaatag

SEQ ID NO: 510623 - DNA, 55 bp, Artificial
  Synthetic oligonucleotide
cctggatatccgtaaaagggttgaatccatacgcttcaggcaaccgccttttgca

SEQ ID NO: 510624 - DNA, 55 bp, Artificial
  Synthetic oligonucleotide
ccagttacaacttctatgtacccgtggtctttaggcccatacatcataatccacc

SEQ ID NO: 510625 - DNA, 55 bp, Artificial
  Synthetic oligonucleotide
cattccatttggctctcagatcgtggcagtatgcgattcctttgatgcgatgaca

SEQ ID NO: 510626 - DNA, 55 bp, Artificial
  Synthetic oligonucleotide
caatcggtatattagtaaacttacgcactcttaaataaggacgtctcccaatcgg

SEQ ID NO: 510627 - DNA, 55 bp, Artificial
  Synthetic oligonucleotide
attgggtgaagatgccgaagtgcctgaaggtggctatcacggcgacgacataatt

SEQ ID NO: 510628 - DNA, 55 bp, Artificial
  Synthetic oligonucleotide
aggttgtaaaggcgttcctgatttgattgttgagataacatctccttcaacagca

SEQ ID NO: 510629 - DNA, 55 bp, Artificial
  Synthetic oligonucleotide
aagttctaataccgaaaggacttccgccggttttaatacaagtaccgtcaccgga

SEQ ID NO: 510630 - DNA, 54 bp, Artificial
  Synthetic oligonucleotide
ctccatccgacgtagtcaatgtagccctatatacaagcatattcccctgcggta

SEQ ID NO: 510631 - DNA, 54 bp, Artificial
  Synthetic oligonucleotide
tattggacagatttgttgacagctccattgtataccaaggatacgcgagaggac

SEQ ID NO: 510632 - DNA, 52 bp, Artificial
  Synthetic oligonucleotide
tgccaggcgtgttctctatgccattgctttagcttctgtaagggttaaaaga

SEQ ID NO: 510633 - DNA, 51 bp, Artificial
  Synthetic oligonucleotide
gcctttagatcaattccggcagaatcttttgtcccacgtataggtctgcat

SEQ ID NO: 510634 - DNA, 51 bp, Artificial
  Synthetic oligonucleotide
ctatcttaaattctgatagtaggttgcgtatagtaatgctagtgccgtcag

SEQ ID NO: 510635 - DNA, 50 bp, Artificial
  Synthetic oligonucleotide
gtagggatacccctactctattacttacaaggactgtatccacaaacagg

SEQ ID NO: 510636 - DNA, 60 bp, Artificial
  Synthetic oligonucleotide
ttttaagcatagtatgctgaagtgccgaacacattgtcaactatgacatagcgaaatgat

SEQ ID NO: 510637 - DNA, 60 bp, Artificial
  Synthetic oligonucleotide
tttagaccataaatcattatgctagatgcatttaagaagaaaggataactcaaatagaat

SEQ ID NO: 510638 - DNA, 60 bp, Artificial
  Synthetic oligonucleotide
ttgctatatagccaaaattctactaattcaacgatagcaaatgctttaattaaactttcc

SEQ ID NO: 510639 - DNA, 60 bp, Artificial
  Synthetic oligonucleotide
taaatagaggcggagctattaatcaattacaggctatacttggccattccaatatagcaa

SEQ ID NO: 510640 - DNA, 60 bp, Artificial
  Synthetic oligonucleotide
gttaattttcatatatagttactaacaaacacggaaattttaggctgacattccaataag

SEQ ID NO: 510641 - DNA, 60 bp, Artificial
  Synthetic oligonucleotide
gtgcgatatatggagtaaaagtggttggagtggagaagaggttacacgtgtggagttcga

SEQ ID NO: 510642 - DNA, 60 bp, Artificial
  Synthetic oligonucleotide
ggaaaatgatttattcagaatcacaaatgagctggaaaacaatttaattcagcttgaagt

SEQ ID NO: 510643 - DNA, 60 bp, Artificial
  Synthetic oligonucleotide
gagaaaatgcggggtctgaaaatacgttaaatactaaattagagaaaacggcgtgcgcat

SEQ ID NO: 510644 - DNA, 60 bp, Artificial
  Synthetic oligonucleotide
gaatgcagatagacgcctcctggctgcggtagcggattcgtcaggatacaggcaggagac

SEQ ID NO: 510645 - DNA, 60 bp, Artificial
  Synthetic oligonucleotide
gaaagtttcagttaaggagtctggagggtatcgcctagggttagacgatggatatatacg

SEQ ID NO: 510646 - DNA, 60 bp, Artificial
  Synthetic oligonucleotide
cttacggatgtgtgggtaacgtgtagtaagtggttgagttttcggatagatggagatatc

SEQ ID NO: 510647 - DNA, 60 bp, Artificial
  Synthetic oligonucleotide
cggactctttagaggacgcctcaaatgctgctttattgcggtatgaggcagatgaatact

SEQ ID NO: 510648 - DNA, 60 bp, Artificial
  Synthetic oligonucleotide
aaaggttggtagtgtgaaagggtaaatagaatagtgagagttatggagtctatgcctact

SEQ ID NO: 510649 - DNA, 60 bp, Artificial
  Synthetic oligonucleotide
aaatcacggggcatagtttcggtacgcgtggcaatgatatttattgcaggatttacgata

SEQ ID NO: 510650 - DNA, 60 bp, Artificial
  Synthetic oligonucleotide
atgccttccatccgacgtgcgttttattctcgtcaatggaagagatggagtgagagagag

SEQ ID NO: 510651 - DNA, 60 bp, Artificial
  Synthetic oligonucleotide
attaccgaggagtaagtgagaagacacttaaaagatatgaatcaacaattcgagatctgt

SEQ ID NO: 510652 - DNA, 60 bp, Artificial
  Synthetic oligonucleotide
agaaaatcaaaagggtaatatcgttcagtccgaaaacatggggcagattagatggactga

SEQ ID NO: 510653 - DNA, 59 bp, Artificial
  Synthetic oligonucleotide
gatatgtatggacacaggataaaacattaataggcggtcagatgtatgttgaatcaaac

SEQ ID NO: 510654 - DNA, 59 bp, Artificial
  Synthetic oligonucleotide
gccaaggtttaaaagaggagatataatatatgttgatcttggtcaaacgattggttctg

SEQ ID NO: 510655 - DNA, 59 bp, Artificial
  Synthetic oligonucleotide
ttgatgatagtgaccttcttatatttaatcgaatgctggcaactttatcaaatttagct

SEQ ID NO: 510656 - DNA, 59 bp, Artificial
  Synthetic oligonucleotide
ccagtatttaccacaactgaacttagaaagcccgaaaactctaatagaaaagatgtaac

SEQ ID NO: 510657 - DNA, 58 bp, Artificial
  Synthetic oligonucleotide
catcagtttcatgtgttaatttattagtaggaggtgggaatatgacaggctaaagaag

SEQ ID NO: 510658 - DNA, 55 bp, Artificial
  Synthetic oligonucleotide
gcagatatagaccttgcaggagttgattggacaccgattggaacatatagctcgg

SEQ ID NO: 510659 - DNA, 55 bp, Artificial
  Synthetic oligonucleotide
aaccaacttagctaagcctttatacattgggtaaacagcaatagcagctgctctc

SEQ ID NO: 510660 - DNA, 55 bp, Artificial
  Synthetic oligonucleotide
gcccttagcggtcttaaactgaatgaaattgcccttagcggcccaaggcgtttgg

SEQ ID NO: 510661 - DNA, 55 bp, Artificial
  Synthetic oligonucleotide
gcctacttctacttgcggtgatgaaatgcgtgagtgattgagtaggtaagggata

SEQ ID NO: 510662 - DNA, 55 bp, Artificial
  Synthetic oligonucleotide
gctcgggcatcacattggtcggtgttacgataatatatttgctctcactaacgcg

SEQ ID NO: 510663 - DNA, 55 bp, Artificial
  Synthetic oligonucleotide
ttgcataggtttaatttgagtgagtgctgggatatggtgaaacgaatgtttcagg

SEQ ID NO: 510664 - DNA, 55 bp, Artificial
  Synthetic oligonucleotide
gctgtctcgttaaagagggctgcaataccagtcgatgaacctgctccttcaagcg

SEQ ID NO: 510665 - DNA, 55 bp, Artificial
  Synthetic oligonucleotide
aggcaacaaactcttcttattcatcaacgcatcccttgcgcccttattgataaac

SEQ ID NO: 510666 - DNA, 55 bp, Artificial
  Synthetic oligonucleotide
ggaatgttaggacggtaaacgatcctgatggacataagagggttagtttgagggg

SEQ ID NO: 510667 - DNA, 55 bp, Artificial
  Synthetic oligonucleotide
ggaggggagaagcatgggcgaaagcgaatatttgaacattacgcctcaagaagac

SEQ ID NO: 510668 - DNA, 55 bp, Artificial
  Synthetic oligonucleotide
ggccaaaggtttataggagagagtgctgttgtatttgtttggagtgcaatccctt

SEQ ID NO: 510669 - DNA, 55 bp, Artificial
  Synthetic oligonucleotide
ggcctatgtgcaccttcggtttaaagagaaccgagtaccaaagtccaccttctgg

SEQ ID NO: 510670 - DNA, 55 bp, Artificial
  Synthetic oligonucleotide
ggggaaatactctgttgtttcttctgggatagactcgctatatttgacaattcag

SEQ ID NO: 510671 - DNA, 55 bp, Artificial
  Synthetic oligonucleotide
ggtaattgcctatctcggtgtcgaaaacctatcataacgacgaaatatggcgctc

SEQ ID NO: 510672 - DNA, 55 bp, Artificial
  Synthetic oligonucleotide
gtataggtgatgcacccgatcatagtaatacgggtgcgcaaagccggaagagggg

SEQ ID NO: 510673 - DNA, 55 bp, Artificial
  Synthetic oligonucleotide
gtcattccaactagttacaccagcgagtccttcgtaatcaaacgatacaaagact

SEQ ID NO: 510674 - DNA, 55 bp, Artificial
  Synthetic oligonucleotide
acttataggagacgctcaagtggaaggccaggactataacgatagcaattacgag

SEQ ID NO: 510675 - DNA, 55 bp, Artificial
  Synthetic oligonucleotide
taagaatccataatgatcctccacctataactgatccaccctgtactgattcatc

SEQ ID NO: 510676 - DNA, 55 bp, Artificial
  Synthetic oligonucleotide
tagaggtattgttgacggtcatatccttctttcaagacgattggctgaatcttcg

SEQ ID NO: 510677 - DNA, 55 bp, Artificial
  Synthetic oligonucleotide
tagcccttgctgctcaggcgttaggtggaacttctgcatatggtgtagcgttagg

SEQ ID NO: 510678 - DNA, 55 bp, Artificial
  Synthetic oligonucleotide
tcatcccatgttggctgagtatcatttatccagtctgaaaatcctggaggcgtaa

SEQ ID NO: 510679 - DNA, 55 bp, Artificial
  Synthetic oligonucleotide
tccccaggcttggtgttgccggagcagcatgggcatcgaatattggcaggctcgt

SEQ ID NO: 510680 - DNA, 55 bp, Artificial
  Synthetic oligonucleotide
tggttactggtaatcctatctgggcaagggaagggaaggtagagctagtttaccc

SEQ ID NO: 510681 - DNA, 55 bp, Artificial
  Synthetic oligonucleotide
tgttaaacctggcgagaggattcctttagatggtattgtcgttaagggaagttca

SEQ ID NO: 510682 - DNA, 55 bp, Artificial
  Synthetic oligonucleotide
cagaaacagatgttccagaagttgatacaccctttactccaacaggcatttgatg

SEQ ID NO: 510683 - DNA, 55 bp, Artificial
  Synthetic oligonucleotide
cagtccgaaaacatggggcagattagatggactgagcaatcgtatggatactcct

SEQ ID NO: 510684 - DNA, 55 bp, Artificial
  Synthetic oligonucleotide
cattcataccccttgtgggttcatttgccgtctcggttctcacgttgttcaagac

SEQ ID NO: 510685 - DNA, 55 bp, Artificial
  Synthetic oligonucleotide
ccacactcatttgtccatacagcattgtcgcacccgtcatctgttctattacaac

SEQ ID NO: 510686 - DNA, 55 bp, Artificial
  Synthetic oligonucleotide
ccgtcgtttcaacgggagagctttattaaaatttgggccactccaggaaggagtc

SEQ ID NO: 510687 - DNA, 55 bp, Artificial
  Synthetic oligonucleotide
cctattaactgtttgggatagggtggaaagaatggaagcaatgaatcttgagtcg

SEQ ID NO: 510688 - DNA, 55 bp, Artificial
  Synthetic oligonucleotide
cctgtcgctatagctatgtttgccggcagaactcagtacgaacaaccctggggtc

SEQ ID NO: 510689 - DNA, 55 bp, Artificial
  Synthetic oligonucleotide
ccttacgtccaagtttatgatagtagacttgcggaagcttacctcgcggctgagt

SEQ ID NO: 510690 - DNA, 55 bp, Artificial
  Synthetic oligonucleotide
cactcagagattttgtggaatacgtccatagcaagcttaaggaaacgaacatctt

SEQ ID NO: 510691 - DNA, 55 bp, Artificial
  Synthetic oligonucleotide
cggacttactaactggggatatttcaactggtaccacttgggtggagtcggcact

SEQ ID NO: 510692 - DNA, 55 bp, Artificial
  Synthetic oligonucleotide
cgtatgtaacgcttgtaggattttcctttggctctccagggaacgaccttgacgg

SEQ ID NO: 510693 - DNA, 55 bp, Artificial
  Synthetic oligonucleotide
ctacaggttaaaggccgcaaaagaattagcatttggacgttggatggaagagggc

SEQ ID NO: 510694 - DNA, 55 bp, Artificial
  Synthetic oligonucleotide
ctagctgttaggtacaattccctacacctaattgcaaggacacttaccgacaata

SEQ ID NO: 510695 - DNA, 55 bp, Artificial
  Synthetic oligonucleotide
gatagagaagttgctgagtattggaagtttgtagccgatagttggggcgaagggg

SEQ ID NO: 510696 - DNA, 55 bp, Artificial
  Synthetic oligonucleotide
gagttccctgtctaccttggcgcagcgagtgcgttcagaatgacctttacaaagt

SEQ ID NO: 510697 - DNA, 55 bp, Artificial
  Synthetic oligonucleotide
gagataactcaacaaagctgtcacgatcgctaccgtagtcgcatatgatgggtca

SEQ ID NO: 510698 - DNA, 55 bp, Artificial
  Synthetic oligonucleotide
agtggatatgggtgaagacgagtttacagttggaagaccacatcctatgattgac

SEQ ID NO: 510699 - DNA, 55 bp, Artificial
  Synthetic oligonucleotide
gacgaaatgattccttggcttgctgaaagcggaaaatggacatcaagtaatacct

SEQ ID NO: 510700 - DNA, 55 bp, Artificial
  Synthetic oligonucleotide
gaaggtatgtttgatgctttaagtctttggcgtatagatttacccgcaattagca

SEQ ID NO: 510701 - DNA, 55 bp, Artificial
  Synthetic oligonucleotide
ctttagcacagatgcaactccttgtttagcagcaactaatcttacagcgaacaca

SEQ ID NO: 510702 - DNA, 55 bp, Artificial
  Synthetic oligonucleotide
caatcgtatggatactcctatctctactttagtaaacatgggtattgcctggtgg

SEQ ID NO: 510703 - DNA, 55 bp, Artificial
  Synthetic oligonucleotide
cttaaagatagagaagttgctgagtattggaagtttgtagccgatagttggggcg

SEQ ID NO: 510704 - DNA, 55 bp, Artificial
  Synthetic oligonucleotide
ctggagggtatcgcctagggttagacgatggatatatacgggtgctcttagccga

SEQ ID NO: 510705 - DNA, 55 bp, Artificial
  Synthetic oligonucleotide
ctgcgtttgtcgacccacatatccatgggattaaaggtatagacacaatgacggc

SEQ ID NO: 510706 - DNA, 55 bp, Artificial
  Synthetic oligonucleotide
ctcgggtactgtggcgaatccaatactccttatgtaagccttctcccaatatcct

SEQ ID NO: 510707 - DNA, 54 bp, Artificial
  Synthetic oligonucleotide
cgtagtttcaggtgtaatgaccgttctcaatatggtagttgttccgttctactg

SEQ ID NO: 510708 - DNA, 53 bp, Artificial
  Synthetic oligonucleotide
tggagttcgagcttagacgtggatttttccgtgatattgaatgtagtacgatt

SEQ ID NO: 510709 - DNA, 53 bp, Artificial
  Synthetic oligonucleotide
acgcagtaggtgatgaggaagggcaatgggcaacacctactaatgttgcaact

SEQ ID NO: 510710 - DNA, 53 bp, Artificial
  Synthetic oligonucleotide
ctgcaggtgctgatgtatatagatgtggaataatgccaactccggcacttgct

SEQ ID NO: 510711 - DNA, 52 bp, Artificial
  Synthetic oligonucleotide
gctgttggcgagactaatttaacgctatgggatatattgaacctagaggttg

SEQ ID NO: 510712 - DNA, 52 bp, Artificial
  Synthetic oligonucleotide
tcgtattatctctgaaacatttcgtccttcctctttgcttaaatcatctagc

SEQ ID NO: 510713 - DNA, 51 bp, Artificial
  Synthetic oligonucleotide
cctgacacagctaacaacatattttccggagaccatgctcctatttctaac

SEQ ID NO: 510714 - DNA, 51 bp, Artificial
  Synthetic oligonucleotide
tgttttcgtatcctccaacagtataacttctgagcattcttgccataccgg

SEQ ID NO: 510715 - DNA, 51 bp, Artificial
  Synthetic oligonucleotide
gtgtattaggcgtcatgtggttaattggtacattagcttcaccacaatgat

SEQ ID NO: 510716 - DNA, 55 bp, Artificial
  Synthetic oligonucleotide
tcggtatccacatggaaagcgttgtacgccagataactttccagttgcggtgggg

SEQ ID NO: 510717 - DNA, 55 bp, Artificial
  Synthetic oligonucleotide
gtgcactaccgtgtgcaaaactgttttacgctcgaaataaactgaaaacccgcca

SEQ ID NO: 510718 - DNA, 55 bp, Artificial
  Synthetic oligonucleotide
ggcaattaccaaacacgcacaggactggttacgcaagggcagggttcgcaaggcc

SEQ ID NO: 510719 - DNA, 55 bp, Artificial
  Synthetic oligonucleotide
gcttgattatccactggtaagaacagcgaccctgaacacatggactcccacggtc

SEQ ID NO: 510720 - DNA, 55 bp, Artificial
  Synthetic oligonucleotide
gcgcaatttcatgggcgtttactcatgcctgaacagttccccttagttttagggt

SEQ ID NO: 510721 - DNA, 55 bp, Artificial
  Synthetic oligonucleotide
gcgactcagaccattcgactccccgccgcgcccgtcacacgagacgttagaagtt

SEQ ID NO: 510722 - DNA, 55 bp, Artificial
  Synthetic oligonucleotide
gcccaaagttcacagtgcgctaccgcgtgacagattacgccagattgaacgaccg

SEQ ID NO: 510723 - DNA, 55 bp, Artificial
  Synthetic oligonucleotide
gcaagtcactggaacttacgtcgctatccagttgaataatccggttttgtacttc

SEQ ID NO: 510724 - DNA, 55 bp, Artificial
  Synthetic oligonucleotide
gaagaagtaattgtctacaatgagcacccgctctagtgcatgagagattgcctca

SEQ ID NO: 510725 - DNA, 55 bp, Artificial
  Synthetic oligonucleotide
ctgccgccgcttgtaactcatgcaatgttgcgggacgctctgcccatcctaaacg

SEQ ID NO: 510726 - DNA, 55 bp, Artificial
  Synthetic oligonucleotide
ctacgatactcaataaccttgcgacattagtagcagatgactcaagccgtcgtgc

SEQ ID NO: 510727 - DNA, 55 bp, Artificial
  Synthetic oligonucleotide
ccgtttaagtatgaaagggattcaataacgcttaacgcttgcattgccattcaca

SEQ ID NO: 510728 - DNA, 55 bp, Artificial
  Synthetic oligonucleotide
ccgctccaggtttgcctccagcgtgtcgataatgtactgccggtcagcatcactg

SEQ ID NO: 510729 - DNA, 55 bp, Artificial
  Synthetic oligonucleotide
ccgcgactctgaacaacttactccccgccgcgcccgtcacacgagacgttagcat

SEQ ID NO: 510730 - DNA, 55 bp, Artificial
  Synthetic oligonucleotide
cccggagatatcagcagtaaaccagccacacgggctttcggtactcgtgacatgt

SEQ ID NO: 510731 - DNA, 55 bp, Artificial
  Synthetic oligonucleotide
cccactaacggtctaacctgcgcctcattctttggcatgtcaccaactgaggaca

SEQ ID NO: 510732 - DNA, 55 bp, Artificial
  Synthetic oligonucleotide
cccaacacccacacgaaacccttttcgttacggagaacacgcgcatggaactgac

SEQ ID NO: 510733 - DNA, 55 bp, Artificial
  Synthetic oligonucleotide
cattaaccacattacgtcgtgctcgtactgattaccgtaacgccatacgggcgcg

SEQ ID NO: 510734 - DNA, 55 bp, Artificial
  Synthetic oligonucleotide
cacgtatcaacatcgcctacagccactttgtccccttagaattcctaaagctcct

SEQ ID NO: 510735 - DNA, 55 bp, Artificial
  Synthetic oligonucleotide
atcgtcacaatcacgctttgtcctgtttgtagggaagtgacttgaacacggctat

SEQ ID NO: 510736 - DNA, 55 bp, Artificial
  Synthetic oligonucleotide
atcctgccactctagcctaacccatcaaggtgtgaacgcagtagaatatgcggct

SEQ ID NO: 510737 - DNA, 55 bp, Artificial
  Synthetic oligonucleotide
agcagcgatgtattgatcagtaagtgcacccagatactgaccacgtaccccaatg

SEQ ID NO: 510738 - DNA, 53 bp, Artificial
  Synthetic oligonucleotide
tttggagcgatacagacggcaatggtttactaaatggcggtgaaacaggcatt

SEQ ID NO: 510739 - DNA, 52 bp, Artificial
  Synthetic oligonucleotide
tagaagttgatagcccttacaacacctaccgctatacaggattgccaccgac

SEQ ID NO: 510740 - DNA, 51 bp, Artificial
  Synthetic oligonucleotide
cggccaaacgtggcagtagcaacggcagacagcgcggacggtttagcccca

SEQ ID NO: 510741 - DNA, 55 bp, Artificial
  Synthetic oligonucleotide
tctaaaccggtagtagacggaaaggatcgagatggtagacgcacgaccaggtgag

SEQ ID NO: 510742 - DNA, 55 bp, Artificial
  Synthetic oligonucleotide
tcgacaagtgagcagattccgccgtaagaagaccgtccccttccgctccgcggga

SEQ ID NO: 510743 - DNA, 55 bp, Artificial
  Synthetic oligonucleotide
tactcgtacggcctgcagaacatccggtccctcgcgggagacccgtgcggtatgg

SEQ ID NO: 510744 - DNA, 55 bp, Artificial
  Synthetic oligonucleotide
gtttccgcgtcctcgagcgtcggtccccgtcgcgttacggacaatcccggcactc

SEQ ID NO: 510745 - DNA, 55 bp, Artificial
  Synthetic oligonucleotide
ggaggtctcagacacgagattattctgacatgccgcgccacctactctgtatcgg

SEQ ID NO: 510746 - DNA, 55 bp, Artificial
  Synthetic oligonucleotide
gcgcgtttgcggcgtacgatcacctgcttggtcctagggtttgctcgttcggtcc

SEQ ID NO: 510747 - DNA, 55 bp, Artificial
  Synthetic oligonucleotide
gcccgacgctgtacgcgcgtttgccacacgcacaacattggctacagacgtaccg

SEQ ID NO: 510748 - DNA, 55 bp, Artificial
  Synthetic oligonucleotide
gacagtagaattaggtagtgatgcgaatcacttcggcggcttattcacgcaccgt

SEQ ID NO: 510749 - DNA, 55 bp, Artificial
  Synthetic oligonucleotide
ctcggaaccggtacatcgttcaaccttgcgcgatgtgtcgcccatcactatatac

SEQ ID NO: 510750 - DNA, 55 bp, Artificial
  Synthetic oligonucleotide
cgtcttcagacatacggttccgcctcttcctcacgtacctccgtgggtcggtccc

SEQ ID NO: 510751 - DNA, 55 bp, Artificial
  Synthetic oligonucleotide
ccgtgttcgatgacgaacccgatgtggtgagtgtgttccgaatcgtccttgtaca

SEQ ID NO: 510752 - DNA, 55 bp, Artificial
  Synthetic oligonucleotide
cattatcggcgatgatgagtctcatgaccagactcgaaggcggctatccgcgggt

SEQ ID NO: 510753 - DNA, 55 bp, Artificial
  Synthetic oligonucleotide
caggcactgtatgcgagaacccagttcctgacaaactcttagtcggcggttggga

SEQ ID NO: 510754 - DNA, 55 bp, Artificial
  Synthetic oligonucleotide
cagcctcatgagaacaggattcgcagaccgacaaacgatgaccgtagccgctgga

SEQ ID NO: 510755 - DNA, 55 bp, Artificial
  Synthetic oligonucleotide
actgcggaaacacctgcattccgagaccgaacccggccttctgatgccgcggtag

SEQ ID NO: 510756 - DNA, 54 bp, Artificial
  Synthetic oligonucleotide
gcttgtggcgccagagccgactcaacgtccgccaaggtctgtacgaggtgatac

SEQ ID NO: 510757 - DNA, 53 bp, Artificial
  Synthetic oligonucleotide
gaactcgtagcggggctacagctcgtagaagggtgcggggtaacggaattcgc

SEQ ID NO: 510758 - DNA, 60 bp, Artificial
  Synthetic oligonucleotide
gtgaacgacatagagatactcgaaaagagtgttatacaagcgaatccgcttataagggct

SEQ ID NO: 510759 - DNA, 60 bp, Artificial
  Synthetic oligonucleotide
atgcgtatgattattttacaagagaatgagcaagattgcaagctggaaatcattgagggt

SEQ ID NO: 510760 - DNA, 60 bp, Artificial
  Synthetic oligonucleotide
ctatactgacaagcaagctagacaggagttagcagagcgactgtttcatggacgtatatc

SEQ ID NO: 510761 - DNA, 60 bp, Artificial
  Synthetic oligonucleotide
gtagtcacatgagtgactacgtccccttattcccctatcgctttccatgtggtaggggaa

SEQ ID NO: 510762 - DNA, 60 bp, Artificial
  Synthetic oligonucleotide
gggaagtagctatgataagttgttttgcgagagagaacgcaacgaaacaactgtgctcca

SEQ ID NO: 510763 - DNA, 60 bp, Artificial
  Synthetic oligonucleotide
gcgtttctaggagcgaatacatacactttcccctcttaggggctggaggggcgtagaaac

SEQ ID NO: 510764 - DNA, 60 bp, Artificial
  Synthetic oligonucleotide
tgctcgttctattgatgacaaacaatcaagggcgtacactgatgcagcagctgttgtggc

SEQ ID NO: 510765 - DNA, 60 bp, Artificial
  Synthetic oligonucleotide
gttagctgtgggcttttttattgcctcatgatataataaaattgtcatagtgtggggctt

SEQ ID NO: 510766 - DNA, 60 bp, Artificial
  Synthetic oligonucleotide
caaagttgttcagcactacgaagaagctagagaaataaacccgaaggaaaaggtttcagt

SEQ ID NO: 510767 - DNA, 60 bp, Artificial
  Synthetic oligonucleotide
tggtagccgtttttaacggtccccatgaaaaagacgcagcagtttatgacgaacatggcc

SEQ ID NO: 510768 - DNA, 60 bp, Artificial
  Synthetic oligonucleotide
gggtagtaaaaaagaccactttgtgctatgattttcttgcgaggaaaaaccaataacaac

SEQ ID NO: 510769 - DNA, 60 bp, Artificial
  Synthetic oligonucleotide
ctgcctctgctacattcagggcaaacctgatggggtatatgaaagccattgaagtgacat

SEQ ID NO: 510770 - DNA, 60 bp, Artificial
  Synthetic oligonucleotide
tgaaacggacaaacaagaactaaacgccgtagctatgatactgttcaagtatcgtgctga

SEQ ID NO: 510771 - DNA, 60 bp, Artificial
  Synthetic oligonucleotide
aaagttgctcgaagaatacagtcggcttctcgatagtatcgcttggtacaatcgaggcga

SEQ ID NO: 510772 - DNA, 58 bp, Artificial
  Synthetic oligonucleotide
catagcggctgtctgtaagcggtgccagaacccattcccgatatgacagtttgctagg

SEQ ID NO: 510773 - DNA, 56 bp, Artificial
  Synthetic oligonucleotide
ggtaatactttatctcccaaatggaatccacttagaaattccctcttattagcacc

SEQ ID NO: 510774 - DNA, 55 bp, Artificial
  Synthetic oligonucleotide
gccgtagtcggttcaccgataaaattggtcatatgcgtgagaattgccgttccaa

SEQ ID NO: 510775 - DNA, 55 bp, Artificial
  Synthetic oligonucleotide
gccgggattgacataccgaaagtccatcggagcaacattatccactgacaatgtc

SEQ ID NO: 510776 - DNA, 55 bp, Artificial
  Synthetic oligonucleotide
tccgtaacttcgatatctccattgtagactgccagcctcaggtcgcggccggaac

SEQ ID NO: 510777 - DNA, 55 bp, Artificial
  Synthetic oligonucleotide
gccgcgacgtgccaaacatcctcgcagtgtatgcctcgtaagcgcagcatgtgcg

SEQ ID NO: 510778 - DNA, 55 bp, Artificial
  Synthetic oligonucleotide
gccgcatgaattgcatctgcatagtattcatgcccatgctcctctatattgtata

SEQ ID NO: 510779 - DNA, 55 bp, Artificial
  Synthetic oligonucleotide
gccctgtaagcatagaggataccgtactggaaggccttgctcatctggccgcagg

SEQ ID NO: 510780 - DNA, 55 bp, Artificial
  Synthetic oligonucleotide
gcccgctcgtgaaactgaactaaggcaccaggagccctagaaagcccgtagagcg

SEQ ID NO: 510781 - DNA, 55 bp, Artificial
  Synthetic oligonucleotide
gcccctaaaggggaaacgactcactacattttgtgcgtcgctgacgctcctacaa

SEQ ID NO: 510782 - DNA, 55 bp, Artificial
  Synthetic oligonucleotide
gccatcaatggccgctatttcctggatgttatccgcaagatgcctggggatagtg

SEQ ID NO: 510783 - DNA, 55 bp, Artificial
  Synthetic oligonucleotide
gccaatggtttggggcactgaataccttaccgcctgtgcaagcatgaggaggtgc

SEQ ID NO: 510784 - DNA, 55 bp, Artificial
  Synthetic oligonucleotide
gccaaagtccggctacacacgatacagcaagcaacggtcctgcttgggcaccagc

SEQ ID NO: 510785 - DNA, 55 bp, Artificial
  Synthetic oligonucleotide
ggagaacgtgaagggcgaagagttgcgggctaccatcaagcgcatgaacgagggt

SEQ ID NO: 510786 - DNA, 55 bp, Artificial
  Synthetic oligonucleotide
ggactgccagatcatctgccaatacctgtgcctccccttttgtcaggctggcacc

SEQ ID NO: 510787 - DNA, 55 bp, Artificial
  Synthetic oligonucleotide
tataaactgccgtttcgtcagtgcaaagaaatcctgacatcgcgggttgaactgg

SEQ ID NO: 510788 - DNA, 55 bp, Artificial
  Synthetic oligonucleotide
gctttgcaggcttcaggagaatgaagtcaacacagcccgcgcccagttcatgcgt

SEQ ID NO: 510789 - DNA, 55 bp, Artificial
  Synthetic oligonucleotide
gctggagataagcggctatctaatgcagaggccgatttccctagaattggttcgg

SEQ ID NO: 510790 - DNA, 55 bp, Artificial
  Synthetic oligonucleotide
tcatctacatggctagttggttgacaccctacagtcataaattcatagccgtagg

SEQ ID NO: 510791 - DNA, 55 bp, Artificial
  Synthetic oligonucleotide
gctgccatgcattgatcaccaggcatataatgactgcattgatccacgctacact

SEQ ID NO: 510792 - DNA, 55 bp, Artificial
  Synthetic oligonucleotide
gctgagatgagcattctgacgcgttttcagtctcttgcgtgggcaatctatcacg

SEQ ID NO: 510793 - DNA, 55 bp, Artificial
  Synthetic oligonucleotide
gcgtttgtccgatgaggtcttttatcgggatgagacatattatgaccgtggctgc

SEQ ID NO: 510794 - DNA, 55 bp, Artificial
  Synthetic oligonucleotide
gcgtcttgccacctcctgacctgtcggcacgtctttgtgtcccgtaattttctgc

SEQ ID NO: 510795 - DNA, 55 bp, Artificial
  Synthetic oligonucleotide
gcgggtcggttgctagttcatcagctatacgcttagcagtcgggatagtatagcg

SEQ ID NO: 510796 - DNA, 55 bp, Artificial
  Synthetic oligonucleotide
gcggctgactaaaatcgggtaatgattactttcggataaccctttgcatacttgc

SEQ ID NO: 510797 - DNA, 55 bp, Artificial
  Synthetic oligonucleotide
tccgcattcgacgcaagtcttggagcttggaaaccagcggtcagcaataaccacg

SEQ ID NO: 510798 - DNA, 55 bp, Artificial
  Synthetic oligonucleotide
gcgcatgaacgagggtttcaagtgcttggtacaagacaagaaaggaatggctgcc

SEQ ID NO: 510799 - DNA, 55 bp, Artificial
  Synthetic oligonucleotide
gcgcagtatacgccggtagtgaatcatctctcgataaataccagtcggtgggaag

SEQ ID NO: 510800 - DNA, 55 bp, Artificial
  Synthetic oligonucleotide
gcctgtttctacccaaccgagaacttgacgtacatcagaagcatatactgccttc

SEQ ID NO: 510801 - DNA, 55 bp, Artificial
  Synthetic oligonucleotide
gcctgattattgacaaagttcaccagactgcttgcattcgtactgcccggagcag

SEQ ID NO: 510802 - DNA, 55 bp, Artificial
  Synthetic oligonucleotide
gcctcaggccataatagcatttctggaaagcacggactttgaggacgctatacgc

SEQ ID NO: 510803 - DNA, 55 bp, Artificial
  Synthetic oligonucleotide
gacagacagatgacccggctactggtacagagcaccggacaaaactttacccagc

SEQ ID NO: 510804 - DNA, 55 bp, Artificial
  Synthetic oligonucleotide
tgacaacgactacactgatacggtcattacgacggacacattgaagcctggcgac

SEQ ID NO: 510805 - DNA, 55 bp, Artificial
  Synthetic oligonucleotide
gacaaaccaggcataaatgccggtgatgatcataatgcaggtcaaggcctccgta

SEQ ID NO: 510806 - DNA, 55 bp, Artificial
  Synthetic oligonucleotide
gaatccgttgtcgtaaggcccctggtggaaccgaagatactccatgtcctgtacg

SEQ ID NO: 510807 - DNA, 55 bp, Artificial
  Synthetic oligonucleotide
gaatcacctccaacctttccggcaacggttttgcctcaggagcggccggagacgg

SEQ ID NO: 510808 - DNA, 55 bp, Artificial
  Synthetic oligonucleotide
gaataaatccataaacggcaaaatcggcatagggatggcatcgaatgtagggttc

SEQ ID NO: 510809 - DNA, 55 bp, Artificial
  Synthetic oligonucleotide
gaaggtcatttcgacttatgtgccggcgatcagttgctgaagaactttgagcgcc

SEQ ID NO: 510810 - DNA, 55 bp, Artificial
  Synthetic oligonucleotide
gaagggcctagttcctctttcagctcattacttagttggataagaaacggcgaac

SEQ ID NO: 510811 - DNA, 55 bp, Artificial
  Synthetic oligonucleotide
gaacatccacatacacgtcttccccgttctttccgaacatttccttagcgccgcc

SEQ ID NO: 510812 - DNA, 55 bp, Artificial
  Synthetic oligonucleotide
gaaactgtcattagctccaacagtgcgaccagggcagctccattgatgtgattgg

SEQ ID NO: 510813 - DNA, 55 bp, Artificial
  Synthetic oligonucleotide
gaaacgtggtatctccctggggcagaaggcggataggccaccggcggtccaatca

SEQ ID NO: 510814 - DNA, 55 bp, Artificial
  Synthetic oligonucleotide
gaaaacccggaactccgcagaacagaggcatcctcctccgactgacagatgactg

SEQ ID NO: 510815 - DNA, 55 bp, Artificial
  Synthetic oligonucleotide
ctttctgccacgctggcgtcttctcttcaaaacgagacggccgcccttcgtcttc

SEQ ID NO: 510816 - DNA, 55 bp, Artificial
  Synthetic oligonucleotide
cttcatcatgggcgttcagcagccttgtaacaaaccacataaaggcattctccgt

SEQ ID NO: 510817 - DNA, 55 bp, Artificial
  Synthetic oligonucleotide
cttcactcctccgatatattctgatgggattttctctaataacgcatccatgaaa

SEQ ID NO: 510818 - DNA, 55 bp, Artificial
  Synthetic oligonucleotide
ctgtggctagatactgccacaccaaacacgatttctaaaggtctgagctacggcg

SEQ ID NO: 510819 - DNA, 55 bp, Artificial
  Synthetic oligonucleotide
ctgtgctccaacggctggagggtaaaatgccgagacgctttgagagagcgttctg

SEQ ID NO: 510820 - DNA, 55 bp, Artificial
  Synthetic oligonucleotide
gcagcttcaggtactccggttgccagtgatcctggaatagatggaacaggcaccg

SEQ ID NO: 510821 - DNA, 55 bp, Artificial
  Synthetic oligonucleotide
gcagctgtagtaggaatgcggttgtgtgcatctatagctaattgagttaaggcgc

SEQ ID NO: 510822 - DNA, 55 bp, Artificial
  Synthetic oligonucleotide
gcaaatagttggaacgaagtatgtcccggacacgagccattattgaagctggctg

SEQ ID NO: 510823 - DNA, 55 bp, Artificial
  Synthetic oligonucleotide
gattagcacacttaatcaggcatgtcaatatcccacacctccgggtgtgcagccg

SEQ ID NO: 510824 - DNA, 55 bp, Artificial
  Synthetic oligonucleotide
gatggcgttttcaagttctccatcacataccgccttgacggttccatgatgttac

SEQ ID NO: 510825 - DNA, 55 bp, Artificial
  Synthetic oligonucleotide
gatctcgacgggcaaatgatcatcagtaaaggacgcgcctatcactgtttccgtc

SEQ ID NO: 510826 - DNA, 55 bp, Artificial
  Synthetic oligonucleotide
gaggttcccctgtgcaaacttgacttatggtgtgttgtaattaattttgaaccac

SEQ ID NO: 510827 - DNA, 55 bp, Artificial
  Synthetic oligonucleotide
gaggatggtaaacagactcgtatacggacatgtaggtcctaggaggaatcccgtc

SEQ ID NO: 510828 - DNA, 55 bp, Artificial
  Synthetic oligonucleotide
gagctagaatcgaaaccatcgacacaactgaaacggatacaggagatgcgccgat

SEQ ID NO: 510829 - DNA, 55 bp, Artificial
  Synthetic oligonucleotide
gagccacggtaagaacaatacgagaagtgtcctggcgcgggtagcacctgtcctc

SEQ ID NO: 510830 - DNA, 55 bp, Artificial
  Synthetic oligonucleotide
gagcaagaccttgaccaagtataatggtatcctgaagcagtacatacaatttgag

SEQ ID NO: 510831 - DNA, 55 bp, Artificial
  Synthetic oligonucleotide
tctggatgccgtaccatatagcgcaggatacgacgccagcaaagacggatagcaa

SEQ ID NO: 510832 - DNA, 55 bp, Artificial
  Synthetic oligonucleotide
gactgcaaaagccccgataccatctgctgccaattcctgatcacccgctattccc

SEQ ID NO: 510833 - DNA, 55 bp, Artificial
  Synthetic oligonucleotide
gacgtttgtgcgtttaaacgccgatggtacactcgatgtgaacagcaaagccgga

SEQ ID NO: 510834 - DNA, 55 bp, Artificial
  Synthetic oligonucleotide
gacgtgcattaggatcagcaaattcgaagatcgccgtatcataggctccggagac

SEQ ID NO: 510835 - DNA, 55 bp, Artificial
  Synthetic oligonucleotide
gacgggctatctgttgaaggtgtaggcgcactcggaagcgttatcttcgtaccgc

SEQ ID NO: 510836 - DNA, 55 bp, Artificial
  Synthetic oligonucleotide
tgaaagaagactgttattcacgggagcaacgggaaaagttcgtcatgaacgcaaa

SEQ ID NO: 510837 - DNA, 55 bp, Artificial
  Synthetic oligonucleotide
ggtggctcgatgggcgaaacgtttaggtgctgatgctgccgaagagttgtgccag

SEQ ID NO: 510838 - DNA, 55 bp, Artificial
  Synthetic oligonucleotide
ggtgtcagcagtgttttggcgaaagcccaaagttgtaccaaaagcctctttggct

SEQ ID NO: 510839 - DNA, 55 bp, Artificial
  Synthetic oligonucleotide
ggttaggtcatggatgcaaactacatgctataccagctaagggccgatatgtgga

SEQ ID NO: 510840 - DNA, 55 bp, Artificial
  Synthetic oligonucleotide
ggtttggctactgtctcaccaaaaggctttactacggcaactgtgcttctgcctt

SEQ ID NO: 510841 - DNA, 55 bp, Artificial
  Synthetic oligonucleotide
gtacggactcagagcagattcgagatatctctatacgagctggagcggaagttcc

SEQ ID NO: 510842 - DNA, 55 bp, Artificial
  Synthetic oligonucleotide
gtacgttgtcgcactttacttttagcgtagatttctacccaggacacaagtaagt

SEQ ID NO: 510843 - DNA, 55 bp, Artificial
  Synthetic oligonucleotide
gtagggaaatgtgaccagttcgtagggaaatgtgacctaattagaaggagtatcg

SEQ ID NO: 510844 - DNA, 55 bp, Artificial
  Synthetic oligonucleotide
gtagggcccgtagagcttataaagtcggatagcaaattggtccatacacagaaaa

SEQ ID NO: 510845 - DNA, 55 bp, Artificial
  Synthetic oligonucleotide
gtataacctaaaacgcgtgctcaatatattaggaactgacagattgattgcggca

SEQ ID NO: 510846 - DNA, 55 bp, Artificial
  Synthetic oligonucleotide
gtatatgcggaacacgtatgtcctttggtaacccatccttctgtagcgggacgca

SEQ ID NO: 510847 - DNA, 55 bp, Artificial
  Synthetic oligonucleotide
gtatttctgcggcggtcagtttcatcataggtgggtaaatgctcaggctaagcag

SEQ ID NO: 510848 - DNA, 55 bp, Artificial
  Synthetic oligonucleotide
gtccgtggctctggaagtaggcgttgaggccgcattactcttggaagatatttac

SEQ ID NO: 510849 - DNA, 55 bp, Artificial
  Synthetic oligonucleotide
gtcggaacgtggaatacactttcagaggtaatgtcagagtactctatcggacgtg

SEQ ID NO: 510850 - DNA, 55 bp, Artificial
  Synthetic oligonucleotide
gtcggctaaagccacttatgcggactggagaagaaccaacactaggggcagacct

SEQ ID NO: 510851 - DNA, 55 bp, Artificial
  Synthetic oligonucleotide
gtctccaacaaggcaactaccaaagaacgccgaattagactgggacagcaggaga

SEQ ID NO: 510852 - DNA, 55 bp, Artificial
  Synthetic oligonucleotide
gtcttgaaatgcggtgagccatgagctggaaactgagagcggtgagcacggtgca

SEQ ID NO: 510853 - DNA, 55 bp, Artificial
  Synthetic oligonucleotide
taggaataggcctgataagccgggtgagtggtctcacgcataccgccgcctaaaa

SEQ ID NO: 510854 - DNA, 55 bp, Artificial
  Synthetic oligonucleotide
tagacgggacactagacgtaggcataatatgtattccacctagtgatcaggagct

SEQ ID NO: 510855 - DNA, 55 bp, Artificial
  Synthetic oligonucleotide
tagaaacgctctgtgtagtattgcaagaactagaagtagagagtgcggtgatagc

SEQ ID NO: 510856 - DNA, 55 bp, Artificial
  Synthetic oligonucleotide
tacctaacttatttacggctatctccaaccggcagacctctttggatgagttgag

SEQ ID NO: 510857 - DNA, 55 bp, Artificial
  Synthetic oligonucleotide
taaggaaatcgcatccattgtggacggccctatttccgccgaagtactggctgac

SEQ ID NO: 510858 - DNA, 55 bp, Artificial
  Synthetic oligonucleotide
gtttagactttgcaggatgcaagccgtcggctcactaccagctgccgttgaccac

SEQ ID NO: 510859 - DNA, 55 bp, Artificial
  Synthetic oligonucleotide
gttgttttgcgagagagaacgcaacgaaacaactgtgctccaacggctggagggt

SEQ ID NO: 510860 - DNA, 55 bp, Artificial
  Synthetic oligonucleotide
gttccttcagtgctgagacaccgcagatatggaatgtatagccatcgcgccccgt

SEQ ID NO: 510861 - DNA, 55 bp, Artificial
  Synthetic oligonucleotide
gttcagctcctttaccaacgtgttcttatattttggagtggccgcagcactcgct

SEQ ID NO: 510862 - DNA, 55 bp, Artificial
  Synthetic oligonucleotide
gttacttttacagccgaaaccgcctctactacgaacgagatattgctcattgatt

SEQ ID NO: 510863 - DNA, 55 bp, Artificial
  Synthetic oligonucleotide
gtgtgccatcccaaatttctcatggagatttgctgcttacgatctctactggtgg

SEQ ID NO: 510864 - DNA, 55 bp, Artificial
  Synthetic oligonucleotide
gtggtgcgtaatgacaaatacaacgagggcaagaagatgtccgaagtgtgggaga

SEQ ID NO: 510865 - DNA, 55 bp, Artificial
  Synthetic oligonucleotide
gtgataaacaggcttccttggcgggaaagagaccggaatatatccttattagcgg

SEQ ID NO: 510866 - DNA, 55 bp, Artificial
  Synthetic oligonucleotide
gtgaggcggcactttagactacgtttaccctcttaacgtttggattaaagcataa

SEQ ID NO: 510867 - DNA, 55 bp, Artificial
  Synthetic oligonucleotide
gtgagaccgaagaaaccaagcagtaaactcgcgatattcgcgaccaatccacctg

SEQ ID NO: 510868 - DNA, 55 bp, Artificial
  Synthetic oligonucleotide
gtgactacagattttgtggtttgtgactacatagactacattgacacaagtagtc

SEQ ID NO: 510869 - DNA, 55 bp, Artificial
  Synthetic oligonucleotide
gtgacatgcttcgggctaaaacagtagccggatgctccttcaaggttaacgaagc

SEQ ID NO: 510870 - DNA, 55 bp, Artificial
  Synthetic oligonucleotide
ggctgagattaccgaagcagcaggcgtggttagcgagctctgcggtttcaaggcc

SEQ ID NO: 510871 - DNA, 55 bp, Artificial
  Synthetic oligonucleotide
ggctcgacggaaggattcaatcgctatgtgaggaagtgttgctgtaatgcttgtc

SEQ ID NO: 510872 - DNA, 55 bp, Artificial
  Synthetic oligonucleotide
ggcgcagggagttgttatcgaagttcttgattaacttggggttcacagcactaac

SEQ ID NO: 510873 - DNA, 55 bp, Artificial
  Synthetic oligonucleotide
ggcgatgctgccggatcttatcagaaagtggcgcgaggggtatgatgtcgttcag

SEQ ID NO: 510874 - DNA, 55 bp, Artificial
  Synthetic oligonucleotide
ggcgaactctatgttttcatcacaggcagccaaccgggtaatcccggtccgcagg

SEQ ID NO: 510875 - DNA, 55 bp, Artificial
  Synthetic oligonucleotide
ggccgccggataatcccttaccgtctcatgatacacatccttcatcccggtcctg

SEQ ID NO: 510876 - DNA, 55 bp, Artificial
  Synthetic oligonucleotide
ggccgacgacaagcatgaagcgaacctcgtaacataccttgcggaagatcccgac

SEQ ID NO: 510877 - DNA, 55 bp, Artificial
  Synthetic oligonucleotide
ggccacggattatgtggtaatccccgcagaggccaacgaactttccacagacggt

SEQ ID NO: 510878 - DNA, 55 bp, Artificial
  Synthetic oligonucleotide
ggcagtacaggcacctaccagcttttgtccctggatgcgctcgtgcctacgccag

SEQ ID NO: 510879 - DNA, 55 bp, Artificial
  Synthetic oligonucleotide
ggcaggataactgggccaatttgagcacctacttcaaattccctacggagctgag

SEQ ID NO: 510880 - DNA, 55 bp, Artificial
  Synthetic oligonucleotide
ggcaggaataagtcaagctacgagcaaaagctcgcgtttacgttttggcgaaaga

SEQ ID NO: 510881 - DNA, 55 bp, Artificial
  Synthetic oligonucleotide
ggcagaaagagcggcgttgttaacagcacacccgtagcaccttccgcgattgctt

SEQ ID NO: 510882 - DNA, 55 bp, Artificial
  Synthetic oligonucleotide
ggatggggtggcaagggaacacgattcgtaagggagcaaagcgacctgagaatcg

SEQ ID NO: 510883 - DNA, 55 bp, Artificial
  Synthetic oligonucleotide
ggagtatgaagactatagcaggacactttcctgtttgccaagttcggacatctac

SEQ ID NO: 510884 - DNA, 55 bp, Artificial
  Synthetic oligonucleotide
ggagtatctctatgcgggaaaagaggatgccgtatatatcgagggattagttgcg

SEQ ID NO: 510885 - DNA, 55 bp, Artificial
  Synthetic oligonucleotide
ggagacatacatacaggcggcacgcctctcagggtgcagcgatgtgcgaatcctc

SEQ ID NO: 510886 - DNA, 55 bp, Artificial
  Synthetic oligonucleotide
ggagaatggccgggagagcaggttaaaataaccggtgagcactgttgaggacttc

SEQ ID NO: 510887 - DNA, 55 bp, Artificial
  Synthetic oligonucleotide
ggtggcacttgtagcggtgttagcatcaatggtgtatattggccacttgaccaag

SEQ ID NO: 510888 - DNA, 55 bp, Artificial
  Synthetic oligonucleotide
ggtgcatatagtttcccgttggtgacaaaactagccatgacaagcgctaacagcg

SEQ ID NO: 510889 - DNA, 55 bp, Artificial
  Synthetic oligonucleotide
ggtcgcggaatactaccagagcgaaggttacaacgccttgggcggtcacgtgcag

SEQ ID NO: 510890 - DNA, 55 bp, Artificial
  Synthetic oligonucleotide
ggtatcagctcctccattctgttaatggtgcgtcatgcgaagtgtaagaacctcg

SEQ ID NO: 510891 - DNA, 55 bp, Artificial
  Synthetic oligonucleotide
ggtatatataagggctatacccggtccttcgggtttgtggtcacccctgacggag

SEQ ID NO: 510892 - DNA, 55 bp, Artificial
  Synthetic oligonucleotide
gggtgaaagccgtcatcttgttttgcaccgcagcgttcctataaccgtgatgcaa

SEQ ID NO: 510893 - DNA, 55 bp, Artificial
  Synthetic oligonucleotide
gggtccttagtgattttcgtggtgccggaaacaatgccttggggatcacctgcac

SEQ ID NO: 510894 - DNA, 55 bp, Artificial
  Synthetic oligonucleotide
ggggttgcgtatcttgaggatggcaccatgattgtcgtggaaaacggcaaccgct

SEQ ID NO: 510895 - DNA, 55 bp, Artificial
  Synthetic oligonucleotide
ggggttcttgaggtgctcatgtcggcagaatctcaaaactatccggcgcgtctcc

SEQ ID NO: 510896 - DNA, 55 bp, Artificial
  Synthetic oligonucleotide
ggggcttaccattaagccaccgaccgatactcatggggagtattctcgcgggatg

SEQ ID NO: 510897 - DNA, 55 bp, Artificial
  Synthetic oligonucleotide
ggggcgtagaaacgaaactgagaagcctagaacttaactttatggggaacccgcc

SEQ ID NO: 510898 - DNA, 55 bp, Artificial
  Synthetic oligonucleotide
ggggatcaggatgccattggtttagctcgctctgccctgggaacttgcgctcagg

SEQ ID NO: 510899 - DNA, 55 bp, Artificial
  Synthetic oligonucleotide
ggggacatcatcaacgaatatgagcggcgagtcgcatactggaaacgcgcatacg

SEQ ID NO: 510900 - DNA, 55 bp, Artificial
  Synthetic oligonucleotide
gggcgattgcgtaaagggcatgagggaaaccatcaaagatgcgtctattgacctt

SEQ ID NO: 510901 - DNA, 55 bp, Artificial
  Synthetic oligonucleotide
gggcatctttaactcgtaacaaaatctccctgctcacgggaagtcagcaggagtg

SEQ ID NO: 510902 - DNA, 55 bp, Artificial
  Synthetic oligonucleotide
gggagggaacaccgattgcttgtgatgtctatagggaaaccagacggctgattgc

SEQ ID NO: 510903 - DNA, 55 bp, Artificial
  Synthetic oligonucleotide
gggaggcctatgtccgatgacataaatcgggccattgccgtaatcaatcccctgc

SEQ ID NO: 510904 - DNA, 55 bp, Artificial
  Synthetic oligonucleotide
ccatagcgtgtaccatttccaccaggaactcatgggttggtaccggaatgccgca

SEQ ID NO: 510905 - DNA, 55 bp, Artificial
  Synthetic oligonucleotide
ccataagctgctgccgttgttctgcaagactgttcccctttacctggccccgagt

SEQ ID NO: 510906 - DNA, 55 bp, Artificial
  Synthetic oligonucleotide
ccagcatctgctgaacagctctttgcggaattaataaggctcctgggcgcacttc

SEQ ID NO: 510907 - DNA, 55 bp, Artificial
  Synthetic oligonucleotide
ccacgagaacagaggcttctaccttcactttctgatggctctcggaattctcgtc

SEQ ID NO: 510908 - DNA, 55 bp, Artificial
  Synthetic oligonucleotide
ccaccaactgccatagttgcaatctggggtaatggaccacgcagttcccgaaaat

SEQ ID NO: 510909 - DNA, 55 bp, Artificial
  Synthetic oligonucleotide
ccacagagttgcgaggattcgctgacaaatttggtataagcccaactacgggagg

SEQ ID NO: 510910 - DNA, 55 bp, Artificial
  Synthetic oligonucleotide
ccaaaacgatcattgctaccaaagggagagcaagttatctcggagagagaagtcg

SEQ ID NO: 510911 - DNA, 55 bp, Artificial
  Synthetic oligonucleotide
catgagtttggagaaactcataagtgcgcattctgaaaagcacgaggggtgtctg

SEQ ID NO: 510912 - DNA, 55 bp, Artificial
  Synthetic oligonucleotide
catcgcaccagcctctatgtaccttgcctccattgacagcgtattaacagacccc

SEQ ID NO: 510913 - DNA, 55 bp, Artificial
  Synthetic oligonucleotide
catcacagacaaaatactgcccattgccagagagtggcagcagcgtccactggaa

SEQ ID NO: 510914 - DNA, 55 bp, Artificial
  Synthetic oligonucleotide
catacgacagagagcttgactggctcgatatgcttcacattatggatgattttgg

SEQ ID NO: 510915 - DNA, 55 bp, Artificial
  Synthetic oligonucleotide
caggttcaggattatgtatatcaaggagaatttactcgcagcagcgtacttcgcg

SEQ ID NO: 510916 - DNA, 55 bp, Artificial
  Synthetic oligonucleotide
caggtgttaggcgaaaatggtccgattgtgatcgatggcaacaaaatgtcggttg

SEQ ID NO: 510917 - DNA, 55 bp, Artificial
  Synthetic oligonucleotide
cagggtggcaaggggctaaccccaactatggagcatttacctgtggaggctttcg

SEQ ID NO: 510918 - DNA, 55 bp, Artificial
  Synthetic oligonucleotide
caggaaggtgtcttgtgaagggcaccacagcgtaaatatgtgtaactctgtgcag

SEQ ID NO: 510919 - DNA, 55 bp, Artificial
  Synthetic oligonucleotide
cagaggctgccgacgtatacagtgtgatctactccgatgcgagttactataacgg

SEQ ID NO: 510920 - DNA, 55 bp, Artificial
  Synthetic oligonucleotide
cagactgtaggtcttcctatggaaggtcttgcactcgttgctggtattgaccgtg

SEQ ID NO: 510921 - DNA, 55 bp, Artificial
  Synthetic oligonucleotide
ccgtatgtttgacaagcccttacacaaggaatatatcttctgctcctatctcgcc

SEQ ID NO: 510922 - DNA, 55 bp, Artificial
  Synthetic oligonucleotide
ccgtaagaatgaggtgagaccgcgccataaggtttgcgaacggctcgtagtccaa

SEQ ID NO: 510923 - DNA, 55 bp, Artificial
  Synthetic oligonucleotide
ccgccacatcttgatcggcattaattttgctaggagttagcgcccctgtgtcgct

SEQ ID NO: 510924 - DNA, 55 bp, Artificial
  Synthetic oligonucleotide
ccgatatgggcaaaggtctgtcggattatacttgggactatttatcccgagcgat

SEQ ID NO: 510925 - DNA, 55 bp, Artificial
  Synthetic oligonucleotide
ccgagtattacgaaatgtatcgtcaagaaaatatccccatcagaccacgaaagta

SEQ ID NO: 510926 - DNA, 55 bp, Artificial
  Synthetic oligonucleotide
ccgactgtgcaccgaagtaaagcgtcgccgcacgtccgagatgatatgccagctc

SEQ ID NO: 510927 - DNA, 55 bp, Artificial
  Synthetic oligonucleotide
ccgaagtattttaggggcaaggaaggtggctatctcactcatgaagactggcggg

SEQ ID NO: 510928 - DNA, 55 bp, Artificial
  Synthetic oligonucleotide
ccctgctcaggattatcagttcaacaatcctggcgcctccacagatccttattca

SEQ ID NO: 510929 - DNA, 55 bp, Artificial
  Synthetic oligonucleotide
ccctctagcattgatgcggcaatcgctcaggtgtcatctgcacaagcaacttggg

SEQ ID NO: 510930 - DNA, 55 bp, Artificial
  Synthetic oligonucleotide
ccctaagcgaactgcccataagtctaattcctgacgataagcacctcctggccgc

SEQ ID NO: 510931 - DNA, 55 bp, Artificial
  Synthetic oligonucleotide
cccggcctgttccgctatcgttgcactcaaaggcaaatataccaccggctggcgg

SEQ ID NO: 510932 - DNA, 55 bp, Artificial
  Synthetic oligonucleotide
ccccgacttgtgcacataggacttcatatggcgtttcttcttcgcatcctgcacg

SEQ ID NO: 510933 - DNA, 55 bp, Artificial
  Synthetic oligonucleotide
cccagacatcgtagaaggagtaggtgatgtcggggaaaagcacgggcctttgccc

SEQ ID NO: 510934 - DNA, 55 bp, Artificial
  Synthetic oligonucleotide
tgcgccttccggaaaagcaacgcagttcagagagaggagcgaacggcaaagcccc

SEQ ID NO: 510935 - DNA, 55 bp, Artificial
  Synthetic oligonucleotide
cccaatctacagcctgaccaactactaagcctgggcaatctgtgtgtaaatacac

SEQ ID NO: 510936 - DNA, 55 bp, Artificial
  Synthetic oligonucleotide
ccatggaccctgtcgatacggcattttgtctgcaggctctgaacgctaaggaggc

SEQ ID NO: 510937 - DNA, 55 bp, Artificial
  Synthetic oligonucleotide
ccatgcccatccgaaactggggcaaagtaaggggcgaactgaccattatgtaccc

SEQ ID NO: 510938 - DNA, 55 bp, Artificial
  Synthetic oligonucleotide
tgtaaacaagtttgctgacattcatgaaccggaagacatgatcctttcctatctc

SEQ ID NO: 510939 - DNA, 55 bp, Artificial
  Synthetic oligonucleotide
tgtacaaatctgcacagagttacacatatttacgctgtggtgcccttcacaagac

SEQ ID NO: 510940 - DNA, 55 bp, Artificial
  Synthetic oligonucleotide
actaaggcgtatgcaccaaagcggagattttattccgcaccatgttaccaagggg

SEQ ID NO: 510941 - DNA, 55 bp, Artificial
  Synthetic oligonucleotide
acgcatggcgtatattagaatcgcttcttgagaagcaagggtattttaagaaagg

SEQ ID NO: 510942 - DNA, 55 bp, Artificial
  Synthetic oligonucleotide
tgtctttagccttgtcggctggcataatcgttaacccttcaatgtcccctgctgt

SEQ ID NO: 510943 - DNA, 55 bp, Artificial
  Synthetic oligonucleotide
tgtgcgataatcgtagagcgagtaggaaagtcgtcaaaggttctcagtgtaacca

SEQ ID NO: 510944 - DNA, 55 bp, Artificial
  Synthetic oligonucleotide
aattggctaccagtcccataatgcccaggggcgccagatggatgacccagcctac

SEQ ID NO: 510945 - DNA, 55 bp, Artificial
  Synthetic oligonucleotide
ttatatagccataacacttgttgtcagtgcatccatgctaattctgtttggggtg

SEQ ID NO: 510946 - DNA, 55 bp, Artificial
  Synthetic oligonucleotide
aatgctatttcgtcatatagttctccccgcccgaaatatccagctgcactattag

SEQ ID NO: 510947 - DNA, 55 bp, Artificial
  Synthetic oligonucleotide
ttatggggtaagcactatcggccttttccaccgttatacggaaacgagtatcgga

SEQ ID NO: 510948 - DNA, 55 bp, Artificial
  Synthetic oligonucleotide
aagtatggcaaaagcttgttcagagacacgaaacattgcgaacttcctttgaggt

SEQ ID NO: 510949 - DNA, 55 bp, Artificial
  Synthetic oligonucleotide
ttccgtggagagattggcattggtcacagtaaccctgtcggtaaaggaagtatct

SEQ ID NO: 510950 - DNA, 55 bp, Artificial
  Synthetic oligonucleotide
aaggaaccgtagatacagacatagaaatggctccttcgccggaaaaggcaagagc

SEQ ID NO: 510951 - DNA, 55 bp, Artificial
  Synthetic oligonucleotide
ttctgatagaaattacattcaaaaccatcggcgcggagcagaagtccgtctgccc

SEQ ID NO: 510952 - DNA, 55 bp, Artificial
  Synthetic oligonucleotide
aagagaagctggttggcaagtagatacaagaaatattcgctatagcaaaggctca

SEQ ID NO: 510953 - DNA, 55 bp, Artificial
  Synthetic oligonucleotide
aacaagcgggtagatgcgaacacgtttagtgggagtatcgtacccattgcttgct

SEQ ID NO: 510954 - DNA, 55 bp, Artificial
  Synthetic oligonucleotide
tttatatgtataatggactcataaaccaaatgtcaatccgcctgtttgtgcggtg

SEQ ID NO: 510955 - DNA, 55 bp, Artificial
  Synthetic oligonucleotide
cactaacaaaaccccaccaataatgagtgctgttcctatccaaaagccgattccc

SEQ ID NO: 510956 - DNA, 55 bp, Artificial
  Synthetic oligonucleotide
caccgcatatcggtgatatgagcgatgtacgtactgttgcggcactgcgtcagac

SEQ ID NO: 510957 - DNA, 55 bp, Artificial
  Synthetic oligonucleotide
cacatatcggtccatatcccacatgccagctggtttctcttcgtaagtcaggccc

SEQ ID NO: 510958 - DNA, 55 bp, Artificial
  Synthetic oligonucleotide
cacaatctgcgcttaggtggtacagggactacagttagagctatcgttagctgta

SEQ ID NO: 510959 - DNA, 55 bp, Artificial
  Synthetic oligonucleotide
caacagctcttaaggctcgttctttattgtagtcgccattcaattcatccgctat

SEQ ID NO: 510960 - DNA, 55 bp, Artificial
  Synthetic oligonucleotide
tgctttcagacgctgcatgagcatatcgaagtcatagtcggaaatatccgatgca

SEQ ID NO: 510961 - DNA, 55 bp, Artificial
  Synthetic oligonucleotide
atttagaggccgaaagtacttgcatggagacgtgctgggaggataggaagttgcc

SEQ ID NO: 510962 - DNA, 55 bp, Artificial
  Synthetic oligonucleotide
atgtgcggccacattcatataatggttacaagactccgttcgaagccaggacagg

SEQ ID NO: 510963 - DNA, 55 bp, Artificial
  Synthetic oligonucleotide
atctcgggttgaatctctaagtatcggctgatgctctcgaggaacgccttatctc

SEQ ID NO: 510964 - DNA, 55 bp, Artificial
  Synthetic oligonucleotide
ataccacagcccttctgtcggaagtattccgctctgccattctgagcgtgtcggc

SEQ ID NO: 510965 - DNA, 55 bp, Artificial
  Synthetic oligonucleotide
aggtattgaccaggacccgagggcaaatcgtaaagcaacggagtcatttcctcaa

SEQ ID NO: 510966 - DNA, 55 bp, Artificial
  Synthetic oligonucleotide
agggagcatgtatacttagtttcactccatactttgcagcttgctgcccaatttt

SEQ ID NO: 510967 - DNA, 55 bp, Artificial
  Synthetic oligonucleotide
agcggagcaggaggaggtcaggtcgcccgctggagagtgcgggcggtgtaactaa

SEQ ID NO: 510968 - DNA, 55 bp, Artificial
  Synthetic oligonucleotide
agcgacttcggagcgccgagcatctgcgagccggagaatacgacttccgagatgc

SEQ ID NO: 510969 - DNA, 55 bp, Artificial
  Synthetic oligonucleotide
agcccgccagggctgccgaaggtcgtcctcgtctcctattgcgaggtgcttctga

SEQ ID NO: 510970 - DNA, 55 bp, Artificial
  Synthetic oligonucleotide
agaagggagctgctgtagctcatattcatgcaagggacggggagggagtcccaac

SEQ ID NO: 510971 - DNA, 55 bp, Artificial
  Synthetic oligonucleotide
acttaggagtttctctttcgagaaacgtcaaaagcgcacttttgcaaagcggggc

SEQ ID NO: 510972 - DNA, 55 bp, Artificial
  Synthetic oligonucleotide
cggagccgaaggaaggcacgaagacggagtggaaggctctgaacgagcagggtaa

SEQ ID NO: 510973 - DNA, 55 bp, Artificial
  Synthetic oligonucleotide
cggattggcatatttcttgccttttggtatcttaggcaggggagccgccgtcttc

SEQ ID NO: 510974 - DNA, 55 bp, Artificial
  Synthetic oligonucleotide
cggcatacatcctgtcaacacactgctgtatgcgctttaccgtatctgcaggcgg

SEQ ID NO: 510975 - DNA, 55 bp, Artificial
  Synthetic oligonucleotide
cggcattgatagcagggatatttggagtaccaggagtattggtattagcgattta

SEQ ID NO: 510976 - DNA, 55 bp, Artificial
  Synthetic oligonucleotide
cggcccgtgtcgaaaagttggcagctattatactcagcttcatccaatgttgtca

SEQ ID NO: 510977 - DNA, 55 bp, Artificial
  Synthetic oligonucleotide
cggctcgcataggattaccacgtgctggctaataggtgagactggtactgctgag

SEQ ID NO: 510978 - DNA, 55 bp, Artificial
  Synthetic oligonucleotide
cgggagcactgacttgcgcttattatcccgtggcatccaactcatgtacatctgg

SEQ ID NO: 510979 - DNA, 55 bp, Artificial
  Synthetic oligonucleotide
ctggcagcgtagcgtggaacaacgtcacgggtaaaccgggctggaccacagactc

SEQ ID NO: 510980 - DNA, 55 bp, Artificial
  Synthetic oligonucleotide
cggggaccccttacgccatcatggagatgcatccttcttcctgtgcagggagctg

SEQ ID NO: 510981 - DNA, 55 bp, Artificial
  Synthetic oligonucleotide
cgggtaagcgggtttaccaagctgtaactcggcaggtgaaatgatgtaattgccg

SEQ ID NO: 510982 - DNA, 55 bp, Artificial
  Synthetic oligonucleotide
cggtggctagagccttgtgcgcttatgggcagaaagcatggatagccgagtttgg

SEQ ID NO: 510983 - DNA, 55 bp, Artificial
  Synthetic oligonucleotide
ctgctttatcgcccctagtgtttggtgcgattcttcaatttactggttcgtgggt

SEQ ID NO: 510984 - DNA, 55 bp, Artificial
  Synthetic oligonucleotide
cggttgaggaaatggcggcagtaagcactatgacttttccagcggcacaagccgt

SEQ ID NO: 510985 - DNA, 55 bp, Artificial
  Synthetic oligonucleotide
cgtaaacatccgggtcgatgattggcgcgtgactgtgctccacatagtaactcgg

SEQ ID NO: 510986 - DNA, 55 bp, Artificial
  Synthetic oligonucleotide
tgccctgcttcgtatagaaatctgccaaacgtccggcacgaacatagcccatgtt

SEQ ID NO: 510987 - DNA, 55 bp, Artificial
  Synthetic oligonucleotide
ctgcgggtcttggctcacatttgcgcaacaagcagacggaactcggaggcttgca

SEQ ID NO: 510988 - DNA, 55 bp, Artificial
  Synthetic oligonucleotide
cgtagcaaaacctttgatatgcccggctggtatccggcaacggatgagtgcgatg

SEQ ID NO: 510989 - DNA, 55 bp, Artificial
  Synthetic oligonucleotide
cgtattgttcacgatttggattgcaagccgcttaatattggaatttccagccagg

SEQ ID NO: 510990 - DNA, 55 bp, Artificial
  Synthetic oligonucleotide
cgtcagcaaaatgtccgatcctgacgccattgggacggagcgtgtagttcttcgt

SEQ ID NO: 510991 - DNA, 55 bp, Artificial
  Synthetic oligonucleotide
cgtcccggctgtttgcgactgaagtttagtcctcgcattggctttagcgtataag

SEQ ID NO: 510992 - DNA, 55 bp, Artificial
  Synthetic oligonucleotide
cgtccctatcctgcggtaagatgaacagaagtatgttttcggtacttctttaagg

SEQ ID NO: 510993 - DNA, 55 bp, Artificial
  Synthetic oligonucleotide
cgtgattacaatgtgaactatttgatccattgctgcaacgtggccggcgttgatg

SEQ ID NO: 510994 - DNA, 55 bp, Artificial
  Synthetic oligonucleotide
cgtgccaactaagccaccagctatcgttgtcaatataacaggaccgcctgaggca

SEQ ID NO: 510995 - DNA, 55 bp, Artificial
  Synthetic oligonucleotide
ctaggctggttttatccaccctataataaacccactgggcttgcttctcactggt

SEQ ID NO: 510996 - DNA, 55 bp, Artificial
  Synthetic oligonucleotide
ctgataggccctatctgtatccaacgctgtgcccctaatgctgcatgaccgaaaa

SEQ ID NO: 510997 - DNA, 55 bp, Artificial
  Synthetic oligonucleotide
ctatgggaatagccgccatagtatccggcagctttagaacaaactcgcctgccga

SEQ ID NO: 510998 - DNA, 55 bp, Artificial
  Synthetic oligonucleotide
ctgacattctctccaccgcaacagacgcagttgcaaaactctgattacgagcagg

SEQ ID NO: 510999 - DNA, 55 bp, Artificial
  Synthetic oligonucleotide
tgagataatcacagcgcttcccttgccaagtatcgcgatctaccaatgtcttctc

SEQ ID NO: 511000 - DNA, 55 bp, Artificial
  Synthetic oligonucleotide
ctcatgcagcaagaggggccaatcggcgtgtatgagaacggcagtcagagcggcg

SEQ ID NO: 511001 - DNA, 55 bp, Artificial
  Synthetic oligonucleotide
ctcccgtgacccgaatatccctagctatgacaacatggacgatttgaagagggca

SEQ ID NO: 511002 - DNA, 55 bp, Artificial
  Synthetic oligonucleotide
ctcgaccatctggacagcaataatcttctgccaatgacacagaggcagatagccg

SEQ ID NO: 511003 - DNA, 55 bp, Artificial
  Synthetic oligonucleotide
ctctggcttgtataaaacctgaatggcgtggcgaacttcctcatccgtaactttt

SEQ ID NO: 511004 - DNA, 55 bp, Artificial
  Synthetic oligonucleotide
cgagttatgaaaggaggacgtcaatgcacgaaaatccatacgacacaatacttgg

SEQ ID NO: 511005 - DNA, 55 bp, Artificial
  Synthetic oligonucleotide
cgagatcacgctgacagaagcggtcgtgaacctcgacctcggaaaacgcgagaca

SEQ ID NO: 511006 - DNA, 55 bp, Artificial
  Synthetic oligonucleotide
cgacgggagacgatacgcacagcctgcagtatgctgacctcaatgcggcggaagg

SEQ ID NO: 511007 - DNA, 55 bp, Artificial
  Synthetic oligonucleotide
cgacaaggtactggaagtcatgaccagccgggaattatcccttgatgtattggcc

SEQ ID NO: 511008 - DNA, 55 bp, Artificial
  Synthetic oligonucleotide
cgaagaagactatgaatctgtggccatgattggcttagtaaaggcagctgatact

SEQ ID NO: 511009 - DNA, 55 bp, Artificial
  Synthetic oligonucleotide
ctggccccatacatctcagtccattctacgtaagatgtactattaccatcgaggc

SEQ ID NO: 511010 - DNA, 55 bp, Artificial
  Synthetic oligonucleotide
cgaaaagccgcgtaccttgtatgcattgcaggctttaagaatccgtcctacatgg

SEQ ID NO: 511011 - DNA, 55 bp, Artificial
  Synthetic oligonucleotide
ccttcataacgatgccctcatggagcaaaactgtaccatcagctaacatgagcgg

SEQ ID NO: 511012 - DNA, 55 bp, Artificial
  Synthetic oligonucleotide
cctgtcggcagggaaattcgtgtcataccggtattgctcctctcgtcgtgcagag

SEQ ID NO: 511013 - DNA, 55 bp, Artificial
  Synthetic oligonucleotide
cctgggacgggcagataacattcgacggtacatactcattcgatacaacgcaaaa

SEQ ID NO: 511014 - DNA, 55 bp, Artificial
  Synthetic oligonucleotide
cctggcgaagttccttgctgccaccatagttcccggccagggcatcgtttctcgc

SEQ ID NO: 511015 - DNA, 55 bp, Artificial
  Synthetic oligonucleotide
cctgccgttgcaatattattcgcatccaataccctgacagtttggaggacgaaac

SEQ ID NO: 511016 - DNA, 55 bp, Artificial
  Synthetic oligonucleotide
cctcgtaagcgcagcatgtgcgacattgtccaagtgcgtcagataaagacgggcg

SEQ ID NO: 511017 - DNA, 55 bp, Artificial
  Synthetic oligonucleotide
tgcctgtttcttacatggaaatcaatctgaatgcacttcgccacaatctgagagt

SEQ ID NO: 511018 - DNA, 55 bp, Artificial
  Synthetic oligonucleotide
cctaacagtaaacgcagttgggatgattactaaccaaggaacaattggggcagtg

SEQ ID NO: 511019 - DNA, 55 bp, Artificial
  Synthetic oligonucleotide
ccgtggcagacaataactagagggtacttcttggctccatcaggagtctgaagta

SEQ ID NO: 511020 - DNA, 55 bp, Artificial
  Synthetic oligonucleotide
ctgggagcggatgtgaattagttgccagagtacacgcagttttacgccgaaccgg

SEQ ID NO: 511021 - DNA, 55 bp, Artificial
  Synthetic oligonucleotide
cggacagaaaagagtatccatcgttgaaaacatcccaggcgttacccgagatcgg

SEQ ID NO: 511022 - DNA, 55 bp, Artificial
  Synthetic oligonucleotide
cgcttcggaaacaagcaggtattcattgggcaggatgctgcatacaggatattcg

SEQ ID NO: 511023 - DNA, 55 bp, Artificial
  Synthetic oligonucleotide
cgcggtcatctgtgctctgtgcgagagctttcgactgacaggcgaggaagagttc

SEQ ID NO: 511024 - DNA, 55 bp, Artificial
  Synthetic oligonucleotide
cgcggtatcaattcgttcgtaacgaccgtgcagggaaaaggcgaggattatcgca

SEQ ID NO: 511025 - DNA, 55 bp, Artificial
  Synthetic oligonucleotide
cgcgaactacttattgtttaaggagtcactcgatccattcctgacaacgctcgca

SEQ ID NO: 511026 - DNA, 55 bp, Artificial
  Synthetic oligonucleotide
cgcctccccgcatggctctttacatggattacagttcacgggtgtacggcgtcta

SEQ ID NO: 511027 - DNA, 55 bp, Artificial
  Synthetic oligonucleotide
cgcctcatttcggtaattatagcggtaagtgccgcgataaaagggactgcgcagg

SEQ ID NO: 511028 - DNA, 55 bp, Artificial
  Synthetic oligonucleotide
cgccgatgaccttcacgcatcagatggtgcggctcttgctctacgagcagattta

SEQ ID NO: 511029 - DNA, 55 bp, Artificial
  Synthetic oligonucleotide
cgccagcagggatcatcggtcaggcaccttatgccccagggcaggaatatcagta

SEQ ID NO: 511030 - DNA, 55 bp, Artificial
  Synthetic oligonucleotide
cgcatacgtcatttgcgacgtaccaccgcaaagggcctattttctgactccggac

SEQ ID NO: 511031 - DNA, 55 bp, Artificial
  Synthetic oligonucleotide
cgcagagcgtcggcagggaagtagctatgataagttgttttgcgagagagaacgc

SEQ ID NO: 511032 - DNA, 55 bp, Artificial
  Synthetic oligonucleotide
cgcacttggcactgtagaccgcggcataaaagttcgtcgcgatctcatggttcta

SEQ ID NO: 511033 - DNA, 55 bp, Artificial
  Synthetic oligonucleotide
cgcaatattctaatcgctcatcaattcgtaacaggtgcttacacttgcgactccg

SEQ ID NO: 511034 - DNA, 55 bp, Artificial
  Synthetic oligonucleotide
cgatggagacatcaggagattatcagcggtttatgatgaaggatggtatacgata

SEQ ID NO: 511035 - DNA, 54 bp, Artificial
  Synthetic oligonucleotide
tacaaccaatatgattcgtgttcatgttgtaggaagcatcttattgcgaggagt

SEQ ID NO: 511036 - DNA, 54 bp, Artificial
  Synthetic oligonucleotide
tttaatccctaaagccttacacccaaacagtagctcgaaagggcaagctgagtg

SEQ ID NO: 511037 - DNA, 54 bp, Artificial
  Synthetic oligonucleotide
taaacgaagtgggcttggcgcttatagaagccaatggacgattatcggtttaca

SEQ ID NO: 511038 - DNA, 54 bp, Artificial
  Synthetic oligonucleotide
ctattcttgcggaaaagaaagcacggtttatattcgttacgctgacagtggaga

SEQ ID NO: 511039 - DNA, 54 bp, Artificial
  Synthetic oligonucleotide
accggtaccggtcgtccggtgcggtggataccgcttgtccggacacacgatacc

SEQ ID NO: 511040 - DNA, 54 bp, Artificial
  Synthetic oligonucleotide
agggttacaataaaccccaacccaactatttgaataatttccacaccctgcacc

SEQ ID NO: 511041 - DNA, 54 bp, Artificial
  Synthetic oligonucleotide
tcggtgtggttcttgcaggtctgataatgtctatgggaattgtgtcggccaatc

SEQ ID NO: 511042 - DNA, 54 bp, Artificial
  Synthetic oligonucleotide
gtaattttgaagatgacaatggtttcgacgaatcatggctctccctactgatgg

SEQ ID NO: 511043 - DNA, 54 bp, Artificial
  Synthetic oligonucleotide
ggtgtacacccgatgcatagtccccgtactttcgtaaacctgtccccgcatagt

SEQ ID NO: 511044 - DNA, 54 bp, Artificial
  Synthetic oligonucleotide
tgcgcctcccaacttttccataagattcagagagaaggcgctactatcaacatt

SEQ ID NO: 511045 - DNA, 54 bp, Artificial
  Synthetic oligonucleotide
ccgtcaaagcctgagctctgggctacagacacaccaatggctgcgccaatctcg

SEQ ID NO: 511046 - DNA, 53 bp, Artificial
  Synthetic oligonucleotide
tgcataagacacctccagtcctgtgttctgataggatgctgcgttcgtctggt

SEQ ID NO: 511047 - DNA, 53 bp, Artificial
  Synthetic oligonucleotide
tggcagaccgagcagtatgtctcccgccttgacacgtgcgctcgtaatgagct

SEQ ID NO: 511048 - DNA, 53 bp, Artificial
  Synthetic oligonucleotide
tcctggttcaaaaggtaaagccaatcgaactgacactcaatccttacgatgcg

SEQ ID NO: 511049 - DNA, 53 bp, Artificial
  Synthetic oligonucleotide
tatccttgacagaatgggttgcatcccctgtggatttaatgaccgtattggcc

SEQ ID NO: 511050 - DNA, 53 bp, Artificial
  Synthetic oligonucleotide
aaaagaatccacagcaactaccatacctgccgtacacaacatgcccatggctg

SEQ ID NO: 511051 - DNA, 53 bp, Artificial
  Synthetic oligonucleotide
aatctgaatttcatcattggcctgtttggggcaccggagtccattgcctatac

SEQ ID NO: 511052 - DNA, 53 bp, Artificial
  Synthetic oligonucleotide
aattggtcgaggctgataatgacactgatattcacggcccctttcatactacg

SEQ ID NO: 511053 - DNA, 53 bp, Artificial
  Synthetic oligonucleotide
actctttccattaggggcgcagcatccctatttaccccaagtcctgcttccga

SEQ ID NO: 511054 - DNA, 53 bp, Artificial
  Synthetic oligonucleotide
agccgtacccgcagactctcgccgtgccatgcgagcggaacaagtttcgcagc

SEQ ID NO: 511055 - DNA, 53 bp, Artificial
  Synthetic oligonucleotide
cccctatgtggttggcggcggtcactgaaactattttcgcaggtgtcgaaaat

SEQ ID NO: 511056 - DNA, 53 bp, Artificial
  Synthetic oligonucleotide
cctccagccgcttaacggcggccttctcatcaggggcggtatagatggtgcgg

SEQ ID NO: 511057 - DNA, 53 bp, Artificial
  Synthetic oligonucleotide
cgtaagtgaagccaatggtttggggcactgaataccttaccgcctgtgcaagc

SEQ ID NO: 511058 - DNA, 53 bp, Artificial
  Synthetic oligonucleotide
gacaaactcctcttcgactacaagatcaaagagggacgctgcacgacacgcaa

SEQ ID NO: 511059 - DNA, 53 bp, Artificial
  Synthetic oligonucleotide
gagatttccttggcatcttcgttgaggaccttgatatccagaccaatggactg

SEQ ID NO: 511060 - DNA, 53 bp, Artificial
  Synthetic oligonucleotide
gagcaggtttacctagtgatattgccactcatagcttagacaatgcagacata

SEQ ID NO: 511061 - DNA, 53 bp, Artificial
  Synthetic oligonucleotide
taccgggcaaattttggcggtcttaggggatatatctccactggctctgcact

SEQ ID NO: 511062 - DNA, 53 bp, Artificial
  Synthetic oligonucleotide
gcgcgttacaaacaagaaggaataatcattcagttaccgaagtgaacggccaa

SEQ ID NO: 511063 - DNA, 52 bp, Artificial
  Synthetic oligonucleotide
gacgacatccctgtgcatccgtgcgctcgaagacctcgttcggccgggcatg

SEQ ID NO: 511064 - DNA, 52 bp, Artificial
  Synthetic oligonucleotide
aaatcctccgatagcctgaaggatgcccgcacggccaagagctacacgggct

SEQ ID NO: 511065 - DNA, 52 bp, Artificial
  Synthetic oligonucleotide
ttggcaagcggcgatcagggaagctagatcagcaacgcgaacacttaatgca

SEQ ID NO: 511066 - DNA, 52 bp, Artificial
  Synthetic oligonucleotide
actatattgagcaccgtgttcgccatataactgacattgctcgtttgattga

SEQ ID NO: 511067 - DNA, 52 bp, Artificial
  Synthetic oligonucleotide
caaacccgtcagcccggctctggtaatttctatgtacttgccgataccagca

SEQ ID NO: 511068 - DNA, 52 bp, Artificial
  Synthetic oligonucleotide
caaagcaccggacaaattgaagcatatttgatctatcgttcatgcactgaag

SEQ ID NO: 511069 - DNA, 51 bp, Artificial
  Synthetic oligonucleotide
tagcaaaatgcacactgtttaacgtcctttcttgagaaccagccaagccat

SEQ ID NO: 511070 - DNA, 51 bp, Artificial
  Synthetic oligonucleotide
aagagccggctgtccagcctttactcgatatccgaccttattctcaccgat

SEQ ID NO: 511071 - DNA, 51 bp, Artificial
  Synthetic oligonucleotide
agtttgcctccttcagccacaagggtgactaggccctcaggggctttcgca

SEQ ID NO: 511072 - DNA, 51 bp, Artificial
  Synthetic oligonucleotide
cccacggggaaagcgccaaagacaccgcgattattctgtcccgtttcggtc

SEQ ID NO: 511073 - DNA, 51 bp, Artificial
  Synthetic oligonucleotide
gctgctgcttgagaggcagccaatacagccttggcccgatcccgcttgaca

SEQ ID NO: 511074 - DNA, 51 bp, Artificial
  Synthetic oligonucleotide
ctataacaaatcaatgctcaccagtccaaaacagttcctgccgcgtcggac

SEQ ID NO: 511075 - DNA, 51 bp, Artificial
  Synthetic oligonucleotide
gagctacgcgttgaccattttccaatactttgccggtaccgacctcgataa

SEQ ID NO: 511076 - DNA, 51 bp, Artificial
  Synthetic oligonucleotide
gacattacgtccgatttcatagttatccattgtaacgcagccgtacttatc

SEQ ID NO: 511077 - DNA, 50 bp, Artificial
  Synthetic oligonucleotide
tatggtgtcaacctgaagctgaagcgtcccatgtacgcctgtatgcttgg

SEQ ID NO: 511078 - DNA, 50 bp, Artificial
  Synthetic oligonucleotide
gcttgcttaatctaagtccatcctccattcctatagaccaaaccgccgca

SEQ ID NO: 511079 - DNA, 50 bp, Artificial
  Synthetic oligonucleotide
gcctaatcaaccaaacacaatagcgcaagaaaggcactagagcgtcggta

SEQ ID NO: 511080 - DNA, 50 bp, Artificial
  Synthetic oligonucleotide
acaagccggcccgttcattgaatagttttcggcccgctaaatagacaaga

SEQ ID NO: 511081 - DNA, 50 bp, Artificial
  Synthetic oligonucleotide
ggacgagtacccgctcattcgtacaaccctcctcacgagcgtacttgaaa

SEQ ID NO: 511082 - DNA, 50 bp, Artificial
  Synthetic oligonucleotide
aatggaatagggctcttgcccggtagcacaggcagcactccaaatacgaa

SEQ ID NO: 511083 - DNA, 50 bp, Artificial
  Synthetic oligonucleotide
aaggcagtctctaatggatacgtgacttggtcctggatttcctgaggtcc

SEQ ID NO: 511084 - DNA, 50 bp, Artificial
  Synthetic oligonucleotide
ctgaaggcttctaaaggcttctgagggcttctgagagctattcggagggc

SEQ ID NO: 511085 - DNA, 50 bp, Artificial
  Synthetic oligonucleotide
ttgacacgcttggttttgtatccgttgcgggcattctcactatcggagcg

SEQ ID NO: 511086 - DNA, 50 bp, Artificial
  Synthetic oligonucleotide
tgacttgattgtaaaactctacggtctgtatgctgatggcacgttcacgg

SEQ ID NO: 511087 - DNA, 55 bp, Artificial
  Synthetic oligonucleotide
gcgcatggttggtgattgaaaatgaacttaccgctggtgccatgattgcgagctc

SEQ ID NO: 511088 - DNA, 55 bp, Artificial
  Synthetic oligonucleotide
gcgcttgcttcatagtaaacatggcgagcttgagttggaaaccagtcaggaaata

SEQ ID NO: 511089 - DNA, 55 bp, Artificial
  Synthetic oligonucleotide
gcggtgatacgcccgacttctatatcgattccagtttctatagcggcgcaatgcg

SEQ ID NO: 511090 - DNA, 55 bp, Artificial
  Synthetic oligonucleotide
gcgttcaagtaggcatcaactactcacacacggtcgattggacaaaatcttcgct

SEQ ID NO: 511091 - DNA, 55 bp, Artificial
  Synthetic oligonucleotide
gctaaagccctctattgtatggccttacacttacaatccctttgcggataaggtg

SEQ ID NO: 511092 - DNA, 55 bp, Artificial
  Synthetic oligonucleotide
gctaggccaactagacgcttacaccaaccccttcgcgattgcgaacgctgaagcc

SEQ ID NO: 511093 - DNA, 55 bp, Artificial
  Synthetic oligonucleotide
gctcgataaatcttattaacactaactaactagcttgcctcatcaggtcgcgcgc

SEQ ID NO: 511094 - DNA, 55 bp, Artificial
  Synthetic oligonucleotide
gctctgtgctgcaacatgcgtgggctgaaattgagcatgacataggatacaaatc

SEQ ID NO: 511095 - DNA, 55 bp, Artificial
  Synthetic oligonucleotide
gctgatgcagctttcaacggctggaagtttgtctgcgtctaggatgaccgcaaac

SEQ ID NO: 511096 - DNA, 55 bp, Artificial
  Synthetic oligonucleotide
gcttaccgcatgctcgcaagaggtcatgctttgccaaatccactgcgcacttggg

SEQ ID NO: 511097 - DNA, 55 bp, Artificial
  Synthetic oligonucleotide
gcttacctttcatggccacttttggtgacactgtaacccaggtgtttggtgtcac

SEQ ID NO: 511098 - DNA, 55 bp, Artificial
  Synthetic oligonucleotide
ggaacatgggttggcgaccgaatgaccctgatccacgcttcaagtcatgatgcac

SEQ ID NO: 511099 - DNA, 55 bp, Artificial
  Synthetic oligonucleotide
ggaacggtcagaacctgactcataacccgcatggaaagtaacaacgcccacgttg

SEQ ID NO: 511100 - DNA, 55 bp, Artificial
  Synthetic oligonucleotide
ggaagatgattcacatccaccaagctattcggatacaaaatgatcatccgctcaa

SEQ ID NO: 511101 - DNA, 55 bp, Artificial
  Synthetic oligonucleotide
ggaatagatgcagcgcagctatccacacaagccggacacgcttaatctctcccgc

SEQ ID NO: 511102 - DNA, 55 bp, Artificial
  Synthetic oligonucleotide
ggatcaactatgtgccgcttcgaatgatgccttaatagaccgtaactcagctccc

SEQ ID NO: 511103 - DNA, 55 bp, Artificial
  Synthetic oligonucleotide
ggatcagcaaaggctctcattatgcgcattcgcagctcgttcactcaaaccatcg

SEQ ID NO: 511104 - DNA, 55 bp, Artificial
  Synthetic oligonucleotide
ggatcatgaagtggcgtacaaagatgttgagcatcaagcgattgcttacaccacg

SEQ ID NO: 511105 - DNA, 55 bp, Artificial
  Synthetic oligonucleotide
ggattgcgcttgatgggtttaaccattcaaatgagagtatgagcatctctatagc

SEQ ID NO: 511106 - DNA, 55 bp, Artificial
  Synthetic oligonucleotide
ggcagacagaacccagccgcgatttaacctcacacttaaacgatctgcttggtca

SEQ ID NO: 511107 - DNA, 55 bp, Artificial
  Synthetic oligonucleotide
ggccctgaaatcggcaagtagtacaccatgtccaactcgtagctatcgcccgctg

SEQ ID NO: 511108 - DNA, 55 bp, Artificial
  Synthetic oligonucleotide
ggcgtctagaacgagacctgcgtagttggttgatcaatgcttttcctggcctaga

SEQ ID NO: 511109 - DNA, 55 bp, Artificial
  Synthetic oligonucleotide
ctttgcctctcctaaagacggtattaaagggctaggccaaagcttgattactaac

SEQ ID NO: 511110 - DNA, 55 bp, Artificial
  Synthetic oligonucleotide
gacccttcttaagccgagggtcacctagccaactgacgttgttagtgaacctttt

SEQ ID NO: 511111 - DNA, 55 bp, Artificial
  Synthetic oligonucleotide
gaccgtggccgcttacgttgctagcttaattgagcctgactgtcgtgcctatatg

SEQ ID NO: 511112 - DNA, 55 bp, Artificial
  Synthetic oligonucleotide
gacctgtagggcaagtttctctgaatgcattcaagccttcgtcaaaccaacgcgc

SEQ ID NO: 511113 - DNA, 55 bp, Artificial
  Synthetic oligonucleotide
gacgcgtgacgccaaagctcacctggcaagccattgcggaagtgaacggcaaagt

SEQ ID NO: 511114 - DNA, 55 bp, Artificial
  Synthetic oligonucleotide
gactgctcacctaaaaccgttggattaagtgaaataggatcactgtcgccaaagg

SEQ ID NO: 511115 - DNA, 55 bp, Artificial
  Synthetic oligonucleotide
gagaaacatacgattggatctggcgaaagtgcggctattttatttcaaaggctcg

SEQ ID NO: 511116 - DNA, 55 bp, Artificial
  Synthetic oligonucleotide
gagtgcattttgtcactgagtacattttgtcactgagtacagtggaatcccgaac

SEQ ID NO: 511117 - DNA, 55 bp, Artificial
  Synthetic oligonucleotide
gagtgggatttaaacatcctcctaaagcactggtctgcaattaaggaagcatcgg

SEQ ID NO: 511118 - DNA, 55 bp, Artificial
  Synthetic oligonucleotide
gatactaagcctgatgcgtttgccgtgacatacacattggggtcagtcagcgctg

SEQ ID NO: 511119 - DNA, 55 bp, Artificial
  Synthetic oligonucleotide
gatagaggctgtggttagcgtgttgcatggtaactccttgcaatcagccattggt

SEQ ID NO: 511120 - DNA, 55 bp, Artificial
  Synthetic oligonucleotide
gatcaccgcccgaatccgttaaacgacgcagagctacgccatcttctaccgcgcc

SEQ ID NO: 511121 - DNA, 55 bp, Artificial
  Synthetic oligonucleotide
gcaacaacgatgactgtctattcaggaccttatggtgagcatggtttggaacaat

SEQ ID NO: 511122 - DNA, 55 bp, Artificial
  Synthetic oligonucleotide
gcaagcgaagcggcaaaccttgtagggtacagcagtcaatctcagttcttcaggg

SEQ ID NO: 511123 - DNA, 55 bp, Artificial
  Synthetic oligonucleotide
gcactcagtaaaacatgagtgggacgagcgcggcaggaggatactagtgcgttgg

SEQ ID NO: 511124 - DNA, 55 bp, Artificial
  Synthetic oligonucleotide
gcagcgtggcttccctgaatcagcgcaatcaatgttaagaacttaatcactggcc

SEQ ID NO: 511125 - DNA, 55 bp, Artificial
  Synthetic oligonucleotide
gccacattgcgagcccagtgcggtgcaacgtttgatgccgcggatatcggtgatc

SEQ ID NO: 511126 - DNA, 55 bp, Artificial
  Synthetic oligonucleotide
gccaccactgtgatgtcgggttttaactcattcaaagctcgtcttacatcatcgg

SEQ ID NO: 511127 - DNA, 55 bp, Artificial
  Synthetic oligonucleotide
gcccaccgcaggtgcactgtctggccgtattacgcatgcattggaagatggcatg

SEQ ID NO: 511128 - DNA, 55 bp, Artificial
  Synthetic oligonucleotide
gccggcagcgcgatagcatggtcttgttgacctttgcttcggacagcgagcatgg

SEQ ID NO: 511129 - DNA, 55 bp, Artificial
  Synthetic oligonucleotide
gcctcaagatccgtccagttagcatcgccttcaatactcagtggcccatctggag

SEQ ID NO: 511130 - DNA, 55 bp, Artificial
  Synthetic oligonucleotide
gcgagcaaatgatagagcttgtgctgaaatcaacagatgaacgtgttgctagcga

SEQ ID NO: 511131 - DNA, 55 bp, Artificial
  Synthetic oligonucleotide
gttgagctctttcataaaccaactgaggctcgataggcgagagcgccaagcgtct

SEQ ID NO: 511132 - DNA, 55 bp, Artificial
  Synthetic oligonucleotide
gttgcgagtgctattactgtccgcttgaacaaaagcttcaaacacgtcacccagt

SEQ ID NO: 511133 - DNA, 55 bp, Artificial
  Synthetic oligonucleotide
tagcgcattcggttggttaactgatgtgtctttggctcttagccctggtcaaccg

SEQ ID NO: 511134 - DNA, 55 bp, Artificial
  Synthetic oligonucleotide
tcaaccctttggtataagcgcttaatgtttcgtcaaatccctgtaaacgcagggc

SEQ ID NO: 511135 - DNA, 55 bp, Artificial
  Synthetic oligonucleotide
tcaggttaagtgaatggagcttggttgctctcttatacgcgtctctgaatggcaa

SEQ ID NO: 511136 - DNA, 55 bp, Artificial
  Synthetic oligonucleotide
tcattacagggcgcgcagcacaccgcacgctgactgacatggccgataccgtgtc

SEQ ID NO: 511137 - DNA, 55 bp, Artificial
  Synthetic oligonucleotide
tctgtttgttcatcagcggcttgttcggaatcgctctcgacttcaagaacaggcc

SEQ ID NO: 511138 - DNA, 55 bp, Artificial
  Synthetic oligonucleotide
tcttaaatggcatcacctaagatctcaacaccaacacgtagatttcccggaaact

SEQ ID NO: 511139 - DNA, 55 bp, Artificial
  Synthetic oligonucleotide
tgacttgttagaagatcaggctcaaagcaatccgctcagaacctggatcgttagt

SEQ ID NO: 511140 - DNA, 55 bp, Artificial
  Synthetic oligonucleotide
tgatcagcaccgtgtctttgtcggtagcactatgattagccagcatgagacgcgc

SEQ ID NO: 511141 - DNA, 55 bp, Artificial
  Synthetic oligonucleotide
tgcaattcggaaaactggtaacgctgatggggcaacgaccctagaaggtgaaccc

SEQ ID NO: 511142 - DNA, 55 bp, Artificial
  Synthetic oligonucleotide
tgcagattgatggtgagaacgttcacatgatcgcacacgacgagtacccaatgcc

SEQ ID NO: 511143 - DNA, 55 bp, Artificial
  Synthetic oligonucleotide
tgcgacggtttcaggcttcatttgtttgagctgtttagcaaaaccctctggtggc

SEQ ID NO: 511144 - DNA, 55 bp, Artificial
  Synthetic oligonucleotide
tgcgcattctcactgatgtatcgacgccactgacgtccaccaggcattccttgaa

SEQ ID NO: 511145 - DNA, 55 bp, Artificial
  Synthetic oligonucleotide
tgctacgtatcatcgttgaaaacggctacaacctagacctaacggatctgatcgg

SEQ ID NO: 511146 - DNA, 55 bp, Artificial
  Synthetic oligonucleotide
tggcaacctgtatgtggatgcttattctaaagcctacttcccaatgagaacgctc

SEQ ID NO: 511147 - DNA, 55 bp, Artificial
  Synthetic oligonucleotide
tgtgatctgtataatgcaccgcactggttaagccagttgtgaaccaatgagcatc

SEQ ID NO: 511148 - DNA, 55 bp, Artificial
  Synthetic oligonucleotide
ttatgtcgtcgatcaaaagagccgttataccgcgaaacattcgatgcgggtcgct

SEQ ID NO: 511149 - DNA, 55 bp, Artificial
  Synthetic oligonucleotide
ttattaaccaatacggtgaagtggcgcgtagcttcgatctcctcgttgatgattc

SEQ ID NO: 511150 - DNA, 55 bp, Artificial
  Synthetic oligonucleotide
ttcaacctcaacatattactgctaaaatcaattcatagtcagggcgtcacgcgtg

SEQ ID NO: 511151 - DNA, 55 bp, Artificial
  Synthetic oligonucleotide
ttgtgagtggtgataagcttgaaggtcgtcttcgttatcaatcaagcaccgcttc

SEQ ID NO: 511152 - DNA, 55 bp, Artificial
  Synthetic oligonucleotide
tttgaagatatcgtcgctcgccctgaatgattatcgatcgctgttaatgacagag

SEQ ID NO: 511153 - DNA, 55 bp, Artificial
  Synthetic oligonucleotide
ggcgttcccactaacccacacgataccgtcgggactcatagcctgctaataggtt

SEQ ID NO: 511154 - DNA, 55 bp, Artificial
  Synthetic oligonucleotide
ggctaactccatgatttggttagcagttaagccagcgttgacacctgcattccag

SEQ ID NO: 511155 - DNA, 55 bp, Artificial
  Synthetic oligonucleotide
ggctaagaatgcaggtcgaaaccagatcgtttcgcagagctagtcgctagtaata

SEQ ID NO: 511156 - DNA, 55 bp, Artificial
  Synthetic oligonucleotide
ggctcaccctgcggctatatcgaacgaatgagttggtccaaccgagaccgcatcg

SEQ ID NO: 511157 - DNA, 55 bp, Artificial
  Synthetic oligonucleotide
gggagtgccgtaatcaagcaatgtgctcactaagatcctagatatttacttcgta

SEQ ID NO: 511158 - DNA, 55 bp, Artificial
  Synthetic oligonucleotide
gggctactcccgactatggcttctgacttaaatgtctcactgccatccgcagggc

SEQ ID NO: 511159 - DNA, 55 bp, Artificial
  Synthetic oligonucleotide
ggggcgtatttctctattggcacacaaaagatgaatgagcacgacagtgctgatc

SEQ ID NO: 511160 - DNA, 55 bp, Artificial
  Synthetic oligonucleotide
ggggttagaatttcgacaatggtatgggtagattgccatccatcaccgctaagcg

SEQ ID NO: 511161 - DNA, 55 bp, Artificial
  Synthetic oligonucleotide
ggtgacttcttgccgcttcaatcgtcataattcgctgactgacgctgtaaaaccg

SEQ ID NO: 511162 - DNA, 55 bp, Artificial
  Synthetic oligonucleotide
ggtgatcgaatcactacgaagcgggatagcgagatacacaatttggtttgccagc

SEQ ID NO: 511163 - DNA, 55 bp, Artificial
  Synthetic oligonucleotide
ggtggtacgtgacattactcagttgaaacagctcgaaggcatgcgcagaaacttt

SEQ ID NO: 511164 - DNA, 55 bp, Artificial
  Synthetic oligonucleotide
gtagccattacaaaggtcttggttccgtttgcacctttcgtaatgatcataggga

SEQ ID NO: 511165 - DNA, 55 bp, Artificial
  Synthetic oligonucleotide
gtatcaatgcctacctcttcagtgtgaccttgtgtcggcgaattaaagtaacagg

SEQ ID NO: 511166 - DNA, 55 bp, Artificial
  Synthetic oligonucleotide
gtcacgtattgtccctcctgtacttgatacggcacgctagtgacttctgaaggcc

SEQ ID NO: 511167 - DNA, 55 bp, Artificial
  Synthetic oligonucleotide
gtcgctgaactgaccaaagagttcagctactcaagcgtcatgcaagtccctagga

SEQ ID NO: 511168 - DNA, 55 bp, Artificial
  Synthetic oligonucleotide
gtcgctgttgctgacatatttatagactgagcttttccatacggcatgatccagt

SEQ ID NO: 511169 - DNA, 55 bp, Artificial
  Synthetic oligonucleotide
gtcgctttagggccaacacctacagcagtagacagttcgtactctcgttgagtcg

SEQ ID NO: 511170 - DNA, 55 bp, Artificial
  Synthetic oligonucleotide
gtcggataggtcaggcgagtgaccacataaaccgtttacttcgatgtttgcggcg

SEQ ID NO: 511171 - DNA, 55 bp, Artificial
  Synthetic oligonucleotide
gtctgaataaccacagcgttctggagtaagctcagctgcactatcaacgcccgag

SEQ ID NO: 511172 - DNA, 55 bp, Artificial
  Synthetic oligonucleotide
gtgacgcatcaatcacttccattttagcgggaagcgttaactccttttcactgcg

SEQ ID NO: 511173 - DNA, 55 bp, Artificial
  Synthetic oligonucleotide
gtgccggatggcgcaacgatttcagtaggttctgacgtgctgtagcgaaggtgat

SEQ ID NO: 511174 - DNA, 55 bp, Artificial
  Synthetic oligonucleotide
gtgctgaaatcactctacgtactgagtgtgcagttgaagctatccgcgttatgcg

SEQ ID NO: 511175 - DNA, 55 bp, Artificial
  Synthetic oligonucleotide
gttactaaaggcgctctcagccgatgatggttctgtcgagaccaaaatcagggtc

SEQ ID NO: 511176 - DNA, 55 bp, Artificial
  Synthetic oligonucleotide
caccgcactttagtgcgtcaataagggattggtgttcgtcatgctggcaagatgg

SEQ ID NO: 511177 - DNA, 55 bp, Artificial
  Synthetic oligonucleotide
caccgttttgtgaacccaagccagttgatctcagtgctaggctcagcaggcctgc

SEQ ID NO: 511178 - DNA, 55 bp, Artificial
  Synthetic oligonucleotide
cacgcaccgtgatcggaatttggcggtcaaaggtagcacgcttggcatccgacac

SEQ ID NO: 511179 - DNA, 55 bp, Artificial
  Synthetic oligonucleotide
cactaccagaaaaccagcaaggctttgtcgcattgaagcgcccattaccaccagg

SEQ ID NO: 511180 - DNA, 55 bp, Artificial
  Synthetic oligonucleotide
cagcaagcactcgatgttgttagagttgtgggtaacaacgcagtacatccaggcg

SEQ ID NO: 511181 - DNA, 55 bp, Artificial
  Synthetic oligonucleotide
caggagcaagtggcggcgtgggctctgtgtcagtcactttactaagtcagcttgg

SEQ ID NO: 511182 - DNA, 55 bp, Artificial
  Synthetic oligonucleotide
caggtcgtcaaacgattcatcaaaccacgctttgtcataccctttgccttcgtca

SEQ ID NO: 511183 - DNA, 55 bp, Artificial
  Synthetic oligonucleotide
catgagcttatgttggttgtgttcgatgagtcgctgtaagtagtgactgcgatgt

SEQ ID NO: 511184 - DNA, 55 bp, Artificial
  Synthetic oligonucleotide
catggacaccgctaggatggcgacgaaaggaatacgctgaaggattacagcacac

SEQ ID NO: 511185 - DNA, 55 bp, Artificial
  Synthetic oligonucleotide
ccaatcgccccgaacgttgagcccacattcaggataaccccgtcttgtgccatcc

SEQ ID NO: 511186 - DNA, 55 bp, Artificial
  Synthetic oligonucleotide
ccacatcaggttgcacttccactaagccgccagaaacatacagcacttgctcttt

SEQ ID NO: 511187 - DNA, 55 bp, Artificial
  Synthetic oligonucleotide
ccaccaagcacgattttggaacagagcacggcgagtagcatgtgtacctagatcg

SEQ ID NO: 511188 - DNA, 55 bp, Artificial
  Synthetic oligonucleotide
ccacgaatagacggcataaaataaacccgccataagacccaacaagatgccaatc

SEQ ID NO: 511189 - DNA, 55 bp, Artificial
  Synthetic oligonucleotide
ccagccaaaaggcgcaattacatctactcaccgacaatcagtttccgctaaagac

SEQ ID NO: 511190 - DNA, 55 bp, Artificial
  Synthetic oligonucleotide
ccccaaatgcacattgcgcaaatagggacgcaaaattctatgcagcagtgggatg

SEQ ID NO: 511191 - DNA, 55 bp, Artificial
  Synthetic oligonucleotide
ccccgactgttcgtccctatgttgaattacgtggtattgcttcctatcggtacca

SEQ ID NO: 511192 - DNA, 55 bp, Artificial
  Synthetic oligonucleotide
ccccgcagagaagttcttaacaactctgccttgagtcggccataaccacttcgcg

SEQ ID NO: 511193 - DNA, 55 bp, Artificial
  Synthetic oligonucleotide
cccggcaatcgtaagtgtggcggtttgttgcgtacttccaccatggccatcttct

SEQ ID NO: 511194 - DNA, 55 bp, Artificial
  Synthetic oligonucleotide
ccctcgttggtgatcagacttcgatcgcccatcaactttcacttctaggttacga

SEQ ID NO: 511195 - DNA, 55 bp, Artificial
  Synthetic oligonucleotide
ccgagatagaagacgtcgttagccctgatcgtaatgactaccaacattggttggg

SEQ ID NO: 511196 - DNA, 55 bp, Artificial
  Synthetic oligonucleotide
ccgcaggattgaggtctgtattgtgagatacactatgcaggtgattgcaactgta

SEQ ID NO: 511197 - DNA, 55 bp, Artificial
  Synthetic oligonucleotide
aaacacgatcggctccgacatggttccatcaaggttcctcagctttaatgatgat

SEQ ID NO: 511198 - DNA, 55 bp, Artificial
  Synthetic oligonucleotide
aaaccaaacgacgaagagctttctcaattcgtggggcgtgaactgcataccccac

SEQ ID NO: 511199 - DNA, 55 bp, Artificial
  Synthetic oligonucleotide
aaactgtcccagcaaggtttctggccaaggagattgtgtaatgtagcgggtacca

SEQ ID NO: 511200 - DNA, 55 bp, Artificial
  Synthetic oligonucleotide
aatcccacacgctcttagttaacactaagatacagaatctatggaggccctggtc

SEQ ID NO: 511201 - DNA, 55 bp, Artificial
  Synthetic oligonucleotide
aatgggtaacagatctcaccatctgctttactgactggtttcactcgcattcctt

SEQ ID NO: 511202 - DNA, 55 bp, Artificial
  Synthetic oligonucleotide
acgccatgcactgaagcctctatctgtgttgtcgatcaaacgcctgcgagtcgtg

SEQ ID NO: 511203 - DNA, 55 bp, Artificial
  Synthetic oligonucleotide
acgctcgattccaaggggtttacttttcactttaaccccgctgctgcgcgttaag

SEQ ID NO: 511204 - DNA, 55 bp, Artificial
  Synthetic oligonucleotide
agctagcccctccccttacgaatatagccaccggaaactgcaacaacatgccctg

SEQ ID NO: 511205 - DNA, 55 bp, Artificial
  Synthetic oligonucleotide
atcacttgagcgattttatctgctctactatcgcttttaggccattgccacgcga

SEQ ID NO: 511206 - DNA, 55 bp, Artificial
  Synthetic oligonucleotide
atcatccatacgagacacggtcagatgatagccatacaagttaagcgcaaacaca

SEQ ID NO: 511207 - DNA, 55 bp, Artificial
  Synthetic oligonucleotide
atcatcgcagtccctatattgcctctgcggcgatgcagtttgatgaaagacttac

SEQ ID NO: 511208 - DNA, 55 bp, Artificial
  Synthetic oligonucleotide
atgccatttgtgatatcggaacccttgcggagctgaccacggaagtgtgcgaggc

SEQ ID NO: 511209 - DNA, 55 bp, Artificial
  Synthetic oligonucleotide
atgtctcgggcggaaaacagacacgatctatgccgtcatgcggtgcaattcgcgg

SEQ ID NO: 511210 - DNA, 55 bp, Artificial
  Synthetic oligonucleotide
caacacataaattcgcaccagctcaccatagcgatcggtatcgagtgtcacgcga

SEQ ID NO: 511211 - DNA, 55 bp, Artificial
  Synthetic oligonucleotide
caaggatgatgactggcgaatttatcaaccccatgcggtaggatacccatggacg

SEQ ID NO: 511212 - DNA, 55 bp, Artificial
  Synthetic oligonucleotide
caaggttgtgcctgacgtgatcaaagtacgactcaatgtctgtgacaccgaggag

SEQ ID NO: 511213 - DNA, 55 bp, Artificial
  Synthetic oligonucleotide
caatcattgagtaatgtcggtgtggtgagtgttagagacgccagtttctcgttat

SEQ ID NO: 511214 - DNA, 55 bp, Artificial
  Synthetic oligonucleotide
caatcgatagacgttgtccgccctgaataaccatcgcccgccattgagaagctct

SEQ ID NO: 511215 - DNA, 55 bp, Artificial
  Synthetic oligonucleotide
cacaatcgcgtcactaagtttcgtccaaacgcatcatttgatcgtccaggacact

SEQ ID NO: 511216 - DNA, 55 bp, Artificial
  Synthetic oligonucleotide
cacaccagtgacttgtagcgcagtattgccaacagattcgtaattcaattcgatc

SEQ ID NO: 511217 - DNA, 55 bp, Artificial
  Synthetic oligonucleotide
cacagtaccgccgccgtagaatgcgatatcaatgatagtttgacgatcaagagcc

SEQ ID NO: 511218 - DNA, 55 bp, Artificial
  Synthetic oligonucleotide
cgcgtggggattagggcgaaatacaaagatcctttaccgcggtatgcaagtgggc

SEQ ID NO: 511219 - DNA, 55 bp, Artificial
  Synthetic oligonucleotide
cgcgtgtcgttcaagcaaggtcgggtcagttacggcctctaaaggttcttgctca

SEQ ID NO: 511220 - DNA, 55 bp, Artificial
  Synthetic oligonucleotide
cgctctacactgttatgatgacagccctgtacgtgacattgtcaaagttatcggg

SEQ ID NO: 511221 - DNA, 55 bp, Artificial
  Synthetic oligonucleotide
cgcttggaacataacgataggggttgggacaaatttatcgataaagctgactgga

SEQ ID NO: 511222 - DNA, 55 bp, Artificial
  Synthetic oligonucleotide
cggaccatatcagtaacgacccgatacgttacccgaacgatggagtaggtaaagg

SEQ ID NO: 511223 - DNA, 55 bp, Artificial
  Synthetic oligonucleotide
cggccacgcaagcagaacaagccatttggaaccaaaacatcatcttggtgctcag

SEQ ID NO: 511224 - DNA, 55 bp, Artificial
  Synthetic oligonucleotide
cggttaggggattcagtcaaagtcacggtgaaagccgttaacctagacagccgcc

SEQ ID NO: 511225 - DNA, 55 bp, Artificial
  Synthetic oligonucleotide
cggttgaccgttccacactacgggatgaaagtgcgggagttcgtgctttaccctc

SEQ ID NO: 511226 - DNA, 55 bp, Artificial
  Synthetic oligonucleotide
cgtgaactgcaagagtgtcagaactttctttggcagatccgattcgcactgcaca

SEQ ID NO: 511227 - DNA, 55 bp, Artificial
  Synthetic oligonucleotide
cgtgtactcaaccgactctctaacgcgtcaatacgtcgactgacatgagaggttg

SEQ ID NO: 511228 - DNA, 55 bp, Artificial
  Synthetic oligonucleotide
cgttgaaacatcaagtggacaacgaatggcaaggcataagctggactcagttcgg

SEQ ID NO: 511229 - DNA, 55 bp, Artificial
  Synthetic oligonucleotide
ctagaagaagattcgcgcggtaaaacatccatgacaagagtaaccctaagaccgc

SEQ ID NO: 511230 - DNA, 55 bp, Artificial
  Synthetic oligonucleotide
ctatctctcattggtgtggcaatggttatgcaagcgatgggattctcgtggaacc

SEQ ID NO: 511231 - DNA, 55 bp, Artificial
  Synthetic oligonucleotide
ctcagggtagttttcgaaatcagtttcgcctgtctcttcacgccatttgaatagg

SEQ ID NO: 511232 - DNA, 55 bp, Artificial
  Synthetic oligonucleotide
ctgacgcttgttcttagtagtacgcttagtcagaatgtgacgtttaccagcgtgc

SEQ ID NO: 511233 - DNA, 55 bp, Artificial
  Synthetic oligonucleotide
ctgcacgtagaactcggcataacaatctttgaagagtcggccagatttgcccgtg

SEQ ID NO: 511234 - DNA, 55 bp, Artificial
  Synthetic oligonucleotide
ctggaatacacgcgcatctgcgtagctattgggtttacgcttgctccagtcagaa

SEQ ID NO: 511235 - DNA, 55 bp, Artificial
  Synthetic oligonucleotide
cttaaagattcctttcttttcctcgactataaagcggaattccacttgttcgccg

SEQ ID NO: 511236 - DNA, 55 bp, Artificial
  Synthetic oligonucleotide
cttaacggacaccgcaatattggaagtgggtcactgggtgtgccgcgccactggc

SEQ ID NO: 511237 - DNA, 55 bp, Artificial
  Synthetic oligonucleotide
cttagcgccgcttctgcgtcagtaatgtggctatcgagtgtgacaagtgcttgat

SEQ ID NO: 511238 - DNA, 55 bp, Artificial
  Synthetic oligonucleotide
ctttaatggccgcaccgtgacaatggaaaacctcaaagacatacgcgccgcacgc

SEQ ID NO: 511239 - DNA, 55 bp, Artificial
  Synthetic oligonucleotide
ccgctaacgcgggttacaaagtgttgtctgtggttaagttcctacaagacccact

SEQ ID NO: 511240 - DNA, 55 bp, Artificial
  Synthetic oligonucleotide
ccggtaagattaaacggcgttcgtcaggcaggcccacagggcgcagaccaaacat

SEQ ID NO: 511241 - DNA, 55 bp, Artificial
  Synthetic oligonucleotide
ccgtgcagagcatgaattggggtgatgcaggcgttgatttgtcgataactcagtt

SEQ ID NO: 511242 - DNA, 55 bp, Artificial
  Synthetic oligonucleotide
ccgttaaggaccagttgataagcttgtctgtgataaatactttgttggggacgac

SEQ ID NO: 511243 - DNA, 55 bp, Artificial
  Synthetic oligonucleotide
cctgttgattgaaccgacaggcctcggtcaccctaaagaagtgctcgaagtgctt

SEQ ID NO: 511244 - DNA, 55 bp, Artificial
  Synthetic oligonucleotide
cgaacttcagcgtgaatactggtgtttgttgacctaacggaccttcagtaaaacc

SEQ ID NO: 511245 - DNA, 55 bp, Artificial
  Synthetic oligonucleotide
cgaatgttgacaaaacatctgcgtgagttagagaaggatgggattgtgcaccgta

SEQ ID NO: 511246 - DNA, 55 bp, Artificial
  Synthetic oligonucleotide
cgaccattgaacaacagacacagctcctagagcaacgagtcaatgaacgcaccat

SEQ ID NO: 511247 - DNA, 55 bp, Artificial
  Synthetic oligonucleotide
cgacctgtctgactgtgcaatggcgataagataaagggattactcaaaagcggtt

SEQ ID NO: 511248 - DNA, 55 bp, Artificial
  Synthetic oligonucleotide
cgatcgggtttccatcattgccttagacattggagggaagtagttgtcacttcgc

SEQ ID NO: 511249 - DNA, 55 bp, Artificial
  Synthetic oligonucleotide
cgatgcccgttttgctcttgtttaccgttagcgtgccgaactgggtggttattgg

SEQ ID NO: 511250 - DNA, 55 bp, Artificial
  Synthetic oligonucleotide
cgcgtcttcacgatacgactccctaatgcaggagctttgccattagatattccgt

SEQ ID NO: 511251 - DNA, 55 bp, Artificial
  Synthetic oligonucleotide
cgcccaacctcattggcctatgtcaattatgtcccttcgccgattcgaaagggca

SEQ ID NO: 511252 - DNA, 55 bp, Artificial
  Synthetic oligonucleotide
cgccagaaagacccagcttaaacgcaagctcacggccttggtaagactgaggacc

SEQ ID NO: 511253 - DNA, 55 bp, Artificial
  Synthetic oligonucleotide
cgcaagtgcttgtcgcactaaccccacggcgttgcaaatctctaaaatcgcatcc

SEQ ID NO: 511254 - DNA, 55 bp, Artificial
  Synthetic oligonucleotide
cgccaatcattaaactttcaatggaagcacacacctgtactagagcagcttcgcc

SEQ ID NO: 511255 - DNA, 55 bp, Artificial
  Synthetic oligonucleotide
cgcactctcatcaacatacacatgagaaataccaaagccgccaatgatcactggg

SEQ ID NO: 511256 - DNA, 55 bp, Artificial
  Synthetic oligonucleotide
cgcacgctgtatatctgctcgcatcattgacgttgtggtcatcaaactttgtagg

SEQ ID NO: 511257 - DNA, 54 bp, Artificial
  Synthetic oligonucleotide
tttatcaaagggtggcaacgctcagcgaaaacccgaccttcctctgcgcagctt

SEQ ID NO: 511258 - DNA, 54 bp, Artificial
  Synthetic oligonucleotide
acatgaatacgaatcaaagtcccctcgaagttagggtttgcaacggttcgcaaa

SEQ ID NO: 511259 - DNA, 54 bp, Artificial
  Synthetic oligonucleotide
ctcagcgagccaatgtggctgataacatctctcttgagcaaggacatggtcgta

SEQ ID NO: 511260 - DNA, 54 bp, Artificial
  Synthetic oligonucleotide
gtaaacatttagccattgcgcgttgtcaatcatcgtcgaagcgcctgttactaa

SEQ ID NO: 511261 - DNA, 54 bp, Artificial
  Synthetic oligonucleotide
taagaggctaaattaaggcgacgcatccatttatatcgactgctactgttcgac

SEQ ID NO: 511262 - DNA, 53 bp, Artificial
  Synthetic oligonucleotide
attgcaggcctacgagacggttatgaaacaagggcgcatcacgccgcaaggca

SEQ ID NO: 511263 - DNA, 53 bp, Artificial
  Synthetic oligonucleotide
caaaggatcacgcccctcaacggccacttagcgcctcacaagaaatccaacgc

SEQ ID NO: 511264 - DNA, 53 bp, Artificial
  Synthetic oligonucleotide
tattgccacggttttccggctcaatcgtccccatgtgcagcgacactttcggg

SEQ ID NO: 511265 - DNA, 52 bp, Artificial
  Synthetic oligonucleotide
ccatgactcgcaagacaaagggattggataatctagcgggcccaagagcgat

SEQ ID NO: 511266 - DNA, 52 bp, Artificial
  Synthetic oligonucleotide
tcttgagatctacgccagcatctttgaggcggttgaattcccgtttgccttc

SEQ ID NO: 511267 - DNA, 52 bp, Artificial
  Synthetic oligonucleotide
cttgtttagtgattaaggccgtaatgcggtcacgtttgtagtgcgtgcctac

SEQ ID NO: 511268 - DNA, 51 bp, Artificial
  Synthetic oligonucleotide
cattgtgcactttgtatccgcggtgacaatcttgcagatagctttggtcac

SEQ ID NO: 511269 - DNA, 51 bp, Artificial
  Synthetic oligonucleotide
ggacaagattttcgtagtgctcagagcggcttaagtgaactgaagtcgcgc

SEQ ID NO: 511270 - DNA, 51 bp, Artificial
  Synthetic oligonucleotide
gtctgcgcttggcgtgatggcaacagcgagtatagcgggcggggtaaccct

SEQ ID NO: 511271 - DNA, 50 bp, Artificial
  Synthetic oligonucleotide
tgacatgaggctgatttccaaccttagcggctaatggcgcgatacgtttt

SEQ ID NO: 511272 - DNA, 50 bp, Artificial
  Synthetic oligonucleotide
acggggacaagattcattcacggatacctacttgatcatgcttccaaagc

SEQ ID NO: 511273 - DNA, 50 bp, Artificial
  Synthetic oligonucleotide
tcagttggctccgttatccaccatgagaaaatgaggaccagtacgaaaga

SEQ ID NO: 511274 - DNA, 50 bp, Artificial
  Synthetic oligonucleotide
gcaatcggtcgagactgtgtaggctcattatcattggtgcctgaacctga

SEQ ID NO: 511275 - DNA, 50 bp, Artificial
  Synthetic oligonucleotide
gttttgattgtggtaagcgctataaccaagccaagtcgccgttagcgcca

SEQ ID NO: 511276 - DNA, 60 bp, Artificial
  Synthetic oligonucleotide
cggtaactctaacagcgggttgaattttccccgcgttgttggctccggaaaatcctttaa

SEQ ID NO: 511277 - DNA, 57 bp, Artificial
  Synthetic oligonucleotide
gtgccttcagctcatcacggccttggatggtttcacctgactcgttcgttagctcga

SEQ ID NO: 511278 - DNA, 55 bp, Artificial
  Synthetic oligonucleotide
gcagtccaccccgtgagtagtcacatccacccgattgtctgtgatgagagagagg

SEQ ID NO: 511279 - DNA, 55 bp, Artificial
  Synthetic oligonucleotide
gcagtgcatcgcacccaggatcagctggtgggcatgacctgtctgtttgccgtgg

SEQ ID NO: 511280 - DNA, 55 bp, Artificial
  Synthetic oligonucleotide
gcataagcagcttgacggtatcaacatgcccatttctcgctgcgaggataagcgc

SEQ ID NO: 511281 - DNA, 55 bp, Artificial
  Synthetic oligonucleotide
gccaagagcctggttacccattcaatccacgagccgggcgaatattcatccgggg

SEQ ID NO: 511282 - DNA, 55 bp, Artificial
  Synthetic oligonucleotide
gcccacaagtgcgggacgaaccggcgtgtaagcgacaagcagccaggattcgatc

SEQ ID NO: 511283 - DNA, 55 bp, Artificial
  Synthetic oligonucleotide
gcccgtagttcagtagttgcgagtcttcgggtgtcagtggaatcactgtaacgga

SEQ ID NO: 511284 - DNA, 55 bp, Artificial
  Synthetic oligonucleotide
gccctgtctcagatcgtgccttgtgcgaacgctcgttgatgacatgcgggcaggc

SEQ ID NO: 511285 - DNA, 55 bp, Artificial
  Synthetic oligonucleotide
gccggtccgatactctgccaatgtatgtcgagtccaatgtatcgggtgccgtcgc

SEQ ID NO: 511286 - DNA, 55 bp, Artificial
  Synthetic oligonucleotide
gccggtctctgggcaagtggtcagcactttgctggtcatcccggtatcgacgcag

SEQ ID NO: 511287 - DNA, 55 bp, Artificial
  Synthetic oligonucleotide
gcctgtagggattgccagtacccgatagatagctctcatcgtagatagctcccgg

SEQ ID NO: 511288 - DNA, 55 bp, Artificial
  Synthetic oligonucleotide
gccttcgcagtacccggactcaccatgttgagcagatgccatacgcccaatgcgg

SEQ ID NO: 511289 - DNA, 55 bp, Artificial
  Synthetic oligonucleotide
gcgacccggtgaaacctgccatcgattgaagcggccaatccgatgtcaacttgct

SEQ ID NO: 511290 - DNA, 55 bp, Artificial
  Synthetic oligonucleotide
gcgagttctgcggcgcacgaccataaaggaagatgtcgtggtatccagtcgccag

SEQ ID NO: 511291 - DNA, 55 bp, Artificial
  Synthetic oligonucleotide
gcgatgccgcgccttggcggacttcaaagagttaagcaccttcacggccagctcc

SEQ ID NO: 511292 - DNA, 55 bp, Artificial
  Synthetic oligonucleotide
gcgattgctgttcgccaaagaccgttgcgccgcgctcaatcaacaacactttgcc

SEQ ID NO: 511293 - DNA, 55 bp, Artificial
  Synthetic oligonucleotide
gcggggcaattttcgaggtaagtcgatgtccttcgtgcccgagcgcaaaccttcc

SEQ ID NO: 511294 - DNA, 55 bp, Artificial
  Synthetic oligonucleotide
gcgtgccatgtgcccagtgatgatcgcacacaggcttccgacgactggtaaccag

SEQ ID NO: 511295 - DNA, 55 bp, Artificial
  Synthetic oligonucleotide
gctcggttgagcgacagacaggatacgaagatgagtatcggattggttggccgca

SEQ ID NO: 511296 - DNA, 55 bp, Artificial
  Synthetic oligonucleotide
gctggcccgttagcattatcagacagggattacacgttggttcgacaggtttctc

SEQ ID NO: 511297 - DNA, 55 bp, Artificial
  Synthetic oligonucleotide
ggaaacgcatgagcatcgccgaacatcagaaacgcgctgaaaccctgttgaaggc

SEQ ID NO: 511298 - DNA, 55 bp, Artificial
  Synthetic oligonucleotide
ggaattcttcgatcgtgactggattcgccattctcgcaactcgtcccacgatgcg

SEQ ID NO: 511299 - DNA, 55 bp, Artificial
  Synthetic oligonucleotide
ggacgacaaccgatagccatggagctgtcttgactcccctccacagtcgtagcag

SEQ ID NO: 511300 - DNA, 55 bp, Artificial
  Synthetic oligonucleotide
ctcgggaaacgacttgatccggagccaattcgagacgagatactctgtgcgttgg

SEQ ID NO: 511301 - DNA, 55 bp, Artificial
  Synthetic oligonucleotide
ctcgtatgcaaccgaagactcgcaagcgtgtttggttgatcggggttccgctggt

SEQ ID NO: 511302 - DNA, 55 bp, Artificial
  Synthetic oligonucleotide
ctcttcaaggaatgcgttcctttgttgcgacgcatgatgacaagcgatatcgggg

SEQ ID NO: 511303 - DNA, 55 bp, Artificial
  Synthetic oligonucleotide
ctgagggcttcggtgcttgcgtgagctaacgacatgggaatggggagtcggaaat

SEQ ID NO: 511304 - DNA, 55 bp, Artificial
  Synthetic oligonucleotide
ctgcctaaacttcgcgcatcgagcattcatcttattcccaatcggattctcgatt

SEQ ID NO: 511305 - DNA, 55 bp, Artificial
  Synthetic oligonucleotide
ctgcgattccatgcgcacttcatctccgcctgtgccccttgactcaatcgggtcg

SEQ ID NO: 511306 - DNA, 55 bp, Artificial
  Synthetic oligonucleotide
ctgcggctgcgttctctacaagtagcggccaactagtcgatcaaggagtaggccc

SEQ ID NO: 511307 - DNA, 55 bp, Artificial
  Synthetic oligonucleotide
cttagggagcaaaatgaggatcatggattgaaaggcctagtcattgatgaaccgt

SEQ ID NO: 511308 - DNA, 55 bp, Artificial
  Synthetic oligonucleotide
cttggtaggactgagcggccatgtactgttggcgttgggcgcatcttccgcaaaa

SEQ ID NO: 511309 - DNA, 55 bp, Artificial
  Synthetic oligonucleotide
cttgtatgggagttgtatcgctctgctgggaagcttttgcctgcgggccgccacc

SEQ ID NO: 511310 - DNA, 55 bp, Artificial
  Synthetic oligonucleotide
cttgtgatcggcgaaatctaggttctgcactcaaatggttggtcgttttccaccc

SEQ ID NO: 511311 - DNA, 55 bp, Artificial
  Synthetic oligonucleotide
gaagcgggttaaactgcgcggctcgccaataggccgtcggttcccaatgctgcag

SEQ ID NO: 511312 - DNA, 55 bp, Artificial
  Synthetic oligonucleotide
gacgcggccctaccacgaacgtatcaggagatagtcctttggctgaaattatcgt

SEQ ID NO: 511313 - DNA, 55 bp, Artificial
  Synthetic oligonucleotide
gagactggtccttagataatgtctgcacgccggcttggcaagtcattggcccacc

SEQ ID NO: 511314 - DNA, 55 bp, Artificial
  Synthetic oligonucleotide
gagcaacccggagtgttcataccgtgttgcagactaaggggaaggggcgacggtg

SEQ ID NO: 511315 - DNA, 55 bp, Artificial
  Synthetic oligonucleotide
gagcatggagggtccacgcttcgggtctggctgttgcattgcaccatcgtaaccg

SEQ ID NO: 511316 - DNA, 55 bp, Artificial
  Synthetic oligonucleotide
gcaatccaataatttctttacgtagcaagctgtttacggagtaaattagcgcccc

SEQ ID NO: 511317 - DNA, 55 bp, Artificial
  Synthetic oligonucleotide
gcacattgccgggacgggtgagggaaatatcggggatgcacgccaagtgggacca

SEQ ID NO: 511318 - DNA, 55 bp, Artificial
  Synthetic oligonucleotide
gcagcaattagttggcgcttattcacttagaatcctattgcgtctaactgctcgt

SEQ ID NO: 511319 - DNA, 55 bp, Artificial
  Synthetic oligonucleotide
gcagcgatggatttcaacgcgaccttgattggcgaaatgatttcgttcgccatcc

SEQ ID NO: 511320 - DNA, 55 bp, Artificial
  Synthetic oligonucleotide
gcaggcagtcttacggcgttcacgggcatttcccctcacgttctaacgcagcagc

SEQ ID NO: 511321 - DNA, 55 bp, Artificial
  Synthetic oligonucleotide
gcagtacaagctcctttcacaggtcaagtcccgttatgaaccgaacgctgcccgc

SEQ ID NO: 511322 - DNA, 55 bp, Artificial
  Synthetic oligonucleotide
gtcgggagcggaacccaattcagtgattgccggtactgatttgcaggcggtcgac

SEQ ID NO: 511323 - DNA, 55 bp, Artificial
  Synthetic oligonucleotide
gtcgtctttacgtccaagcttatagatggccgattccctgactatgaggccgtca

SEQ ID NO: 511324 - DNA, 55 bp, Artificial
  Synthetic oligonucleotide
gtctgcttacggtcaccgcatggacaaggtgacgctacagaccaaattgggtacc

SEQ ID NO: 511325 - DNA, 55 bp, Artificial
  Synthetic oligonucleotide
gtggatctggctaggctgctcggatggatgctcaatgcgctccccatcctcgggg

SEQ ID NO: 511326 - DNA, 55 bp, Artificial
  Synthetic oligonucleotide
gtggattcgttctctgcagatagcgggccatatgggaattcaccttcccatgccg

SEQ ID NO: 511327 - DNA, 55 bp, Artificial
  Synthetic oligonucleotide
gtggtcagacccaacgtgagtcctcccgccagaacggatttcagaatcgatgcgg

SEQ ID NO: 511328 - DNA, 55 bp, Artificial
  Synthetic oligonucleotide
gttttatggacgattcgccacctatcgtatcgccttgacgcgcaaagtcactcgt

SEQ ID NO: 511329 - DNA, 55 bp, Artificial
  Synthetic oligonucleotide
gttttgcttcggcagccgctttcgaggcttctgtatctggataccggaatcgcag

SEQ ID NO: 511330 - DNA, 55 bp, Artificial
  Synthetic oligonucleotide
taacccctgaacagggatagttgtccgcagtcatctgcattacccactggcccca

SEQ ID NO: 511331 - DNA, 55 bp, Artificial
  Synthetic oligonucleotide
tagcggggcgcgcattcacctcggaatgttcccgacggacggccgcatttgtctc

SEQ ID NO: 511332 - DNA, 55 bp, Artificial
  Synthetic oligonucleotide
tagttacgcggaaaagatcggtatcgcctcatcctacaactcagtcccggtcaat

SEQ ID NO: 511333 - DNA, 55 bp, Artificial
  Synthetic oligonucleotide
tcgggtgaaacgaaacggtcggcgctcattacgtactcggcaacggatcacgggg

SEQ ID NO: 511334 - DNA, 55 bp, Artificial
  Synthetic oligonucleotide
tcgtgcatggtgtctccgtttgtccgcgatgacccagcctaccccgatgcagtgg

SEQ ID NO: 511335 - DNA, 55 bp, Artificial
  Synthetic oligonucleotide
tgactttgccgcgagcttcctggtcgttccgaccatgcgaatggggtccgttccc

SEQ ID NO: 511336 - DNA, 55 bp, Artificial
  Synthetic oligonucleotide
tgcttgaacatgcccgcagtataaggcgcggccatccccgcacgcggctcagaac

SEQ ID NO: 511337 - DNA, 55 bp, Artificial
  Synthetic oligonucleotide
tggaagtagacaggctcaaggcgaggatcctacgtgccgcaacccagatactcgc

SEQ ID NO: 511338 - DNA, 55 bp, Artificial
  Synthetic oligonucleotide
tggcttggctgacgcgctggatgagaacaagcatggcagggcttccgtggcaggg

SEQ ID NO: 511339 - DNA, 55 bp, Artificial
  Synthetic oligonucleotide
tgggacgcgcactgtccggccccagaatggcggtactgaaggtatctgcttcacc

SEQ ID NO: 511340 - DNA, 55 bp, Artificial
  Synthetic oligonucleotide
tggggattcgcaacagcccgatggtgcgctgtcgtcgtagataccgtcttacccc

SEQ ID NO: 511341 - DNA, 55 bp, Artificial
  Synthetic oligonucleotide
tgtcagatcggacatgttggcctcatccgcgttgaccgatgccgtacccagcgct

SEQ ID NO: 511342 - DNA, 55 bp, Artificial
  Synthetic oligonucleotide
ttcgtcgtggggctgggtcaatgcggacatgaagctccgttccttgcgaaggcgg

SEQ ID NO: 511343 - DNA, 55 bp, Artificial
  Synthetic oligonucleotide
tttggagcgggttcggtacagttcggcagggctactgcgctacgagtctggcagg

SEQ ID NO: 511344 - DNA, 55 bp, Artificial
  Synthetic oligonucleotide
ggaggtatcgccatgtccgcgtttcaccgtcccttgcatcgccatgccgttgtgc

SEQ ID NO: 511345 - DNA, 55 bp, Artificial
  Synthetic oligonucleotide
ggcaagcatgtcggccctatccaggtagcgctcgaagactttgaccagtgcgtcc

SEQ ID NO: 511346 - DNA, 55 bp, Artificial
  Synthetic oligonucleotide
ggcagcccctgccgctattgcgagtccgtcatgaatctgtccacgatcgaacagg

SEQ ID NO: 511347 - DNA, 55 bp, Artificial
  Synthetic oligonucleotide
ggcagggacccctgtgccaccttcgcctaggatcaggaagagcatgaagctccga

SEQ ID NO: 511348 - DNA, 55 bp, Artificial
  Synthetic oligonucleotide
ggcatgatgatgtcgtgcagcctaggaaagctgtctttcggtgccctttcccctt

SEQ ID NO: 511349 - DNA, 55 bp, Artificial
  Synthetic oligonucleotide
ggcccatgacaggcatgtgaaaggccgcacaggttgtaatcgacgtgctatgtgt

SEQ ID NO: 511350 - DNA, 55 bp, Artificial
  Synthetic oligonucleotide
ggccgtgaaggtgcttaactctttgaagtccgccaaggcgcggcatcgcgactgc

SEQ ID NO: 511351 - DNA, 55 bp, Artificial
  Synthetic oligonucleotide
ggcctctttattggtggtagacgtggccaatttctcacccttgtcttcaaacatc

SEQ ID NO: 511352 - DNA, 55 bp, Artificial
  Synthetic oligonucleotide
ggcgagcgtgtcctagaaccagcgctcaagatgtactatgcggccttggactccg

SEQ ID NO: 511353 - DNA, 55 bp, Artificial
  Synthetic oligonucleotide
ggcgcgcttcgcccttggcaggagtcaactgtcatgcaaccacgacgaacggagt

SEQ ID NO: 511354 - DNA, 55 bp, Artificial
  Synthetic oligonucleotide
ggcgggatgctccagtgaccgctcggccaggacgcattcgtgcgtttcgttgaat

SEQ ID NO: 511355 - DNA, 55 bp, Artificial
  Synthetic oligonucleotide
ggcgtgctgtacgaccacaagttcttcagtgagcgcaaggaagaggcctcgcagg

SEQ ID NO: 511356 - DNA, 55 bp, Artificial
  Synthetic oligonucleotide
ggcttcagagtgatgggctttcgtcctccttcggagggcaagttctgttctcgcg

SEQ ID NO: 511357 - DNA, 55 bp, Artificial
  Synthetic oligonucleotide
ggcttccgtcgcgtttcctttgtgggacttcatcgtctatgagcaggcttaattc

SEQ ID NO: 511358 - DNA, 55 bp, Artificial
  Synthetic oligonucleotide
ggcttgcctgtctcacaaccaaaacgccttcgatcaatgcaactttgtgcctcgc

SEQ ID NO: 511359 - DNA, 55 bp, Artificial
  Synthetic oligonucleotide
gggcatgctccacgccgtgaagacggactcacaagcctctgccacgagttggaca

SEQ ID NO: 511360 - DNA, 55 bp, Artificial
  Synthetic oligonucleotide
gggcgttcctcaccccgcgagtatttcatgacacgtccttcctccttcgactacg

SEQ ID NO: 511361 - DNA, 55 bp, Artificial
  Synthetic oligonucleotide
ggggtttgctcgaatagtgtcacgctcaggatctgcagaatttcgtagagggaag

SEQ ID NO: 511362 - DNA, 55 bp, Artificial
  Synthetic oligonucleotide
gggtacgcgtaaacttcatggtggatctcctttgccgtggaatgccgtttggccg

SEQ ID NO: 511363 - DNA, 55 bp, Artificial
  Synthetic oligonucleotide
gggtctgcgcgacagactattccacggcaaagaggtctcaacgaagaagctcccc

SEQ ID NO: 511364 - DNA, 55 bp, Artificial
  Synthetic oligonucleotide
gtactctggcagcttgatcgacgaagcctatcatgatgaggaaacaggccgcgcc

SEQ ID NO: 511365 - DNA, 55 bp, Artificial
  Synthetic oligonucleotide
gtcaattgcatcggtcctggtaagaggtaagctcaagtcatggtccgcatccgcc

SEQ ID NO: 511366 - DNA, 55 bp, Artificial
  Synthetic oligonucleotide
gtcggcttcagctactcgggcatggggcagaacaacgggcaggccttcatacgct

SEQ ID NO: 511367 - DNA, 55 bp, Artificial
  Synthetic oligonucleotide
ccacttcgactcgatgaggtcgaaacattgctggcctcctctgccttcgtcgtgg

SEQ ID NO: 511368 - DNA, 55 bp, Artificial
  Synthetic oligonucleotide
ccaggctggattgcgaaccctgctttatcatgaacatgcggctttgtagcccaag

SEQ ID NO: 511369 - DNA, 55 bp, Artificial
  Synthetic oligonucleotide
ccaggtaattggcgctgattcatccatggcttacctcttataccctttacggtcc

SEQ ID NO: 511370 - DNA, 55 bp, Artificial
  Synthetic oligonucleotide
ccagtacgtactatcccttcagtcatccgcgacagctctatctcccgttcagtcg

SEQ ID NO: 511371 - DNA, 55 bp, Artificial
  Synthetic oligonucleotide
ccatacctggatgctgcatcttgcatccaatgccctgcttgtcctgtcggtggcg

SEQ ID NO: 511372 - DNA, 55 bp, Artificial
  Synthetic oligonucleotide
aattcgcctcaaaccccgcccacgcagtggtcgcatcctggcgccctcccaaacc

SEQ ID NO: 511373 - DNA, 55 bp, Artificial
  Synthetic oligonucleotide
aatggcgactggcatggccgctcggttcgcctggatacgacctggagcatgtcgt

SEQ ID NO: 511374 - DNA, 55 bp, Artificial
  Synthetic oligonucleotide
aatggcgacccgttgcccctccagaaggcgtgactctcggttgccacttgatgcg

SEQ ID NO: 511375 - DNA, 55 bp, Artificial
  Synthetic oligonucleotide
cccgcattcactgtgccaatccacgcgccgtcctgattgttctgcacgcgccact

SEQ ID NO: 511376 - DNA, 55 bp, Artificial
  Synthetic oligonucleotide
ccctttccacggatggatagacggccaaaatgacagccgttgcatcacgtcactc

SEQ ID NO: 511377 - DNA, 55 bp, Artificial
  Synthetic oligonucleotide
ccgcaggacatctgaagcgcacgcagaaggcttgacgcgatcgtaactggcggca

SEQ ID NO: 511378 - DNA, 55 bp, Artificial
  Synthetic oligonucleotide
aatgcgtggcgccgcttctcggctgttgagttccgagtgcaatgtccgccatacc

SEQ ID NO: 511379 - DNA, 55 bp, Artificial
  Synthetic oligonucleotide
ccgctccatagcgcgaatctacgtgaaccgaagccgccagaccatccgaagcccc

SEQ ID NO: 511380 - DNA, 55 bp, Artificial
  Synthetic oligonucleotide
ccgggcaagcaggtgagtccgctgagttagcattcaatcgggtggcacgcgtcct

SEQ ID NO: 511381 - DNA, 55 bp, Artificial
  Synthetic oligonucleotide
ccgggtttattgcactggattatcctgcagtcgattgcccagggatgggcctccc

SEQ ID NO: 511382 - DNA, 55 bp, Artificial
  Synthetic oligonucleotide
ccggtaggcagcgtcacatcccgctaaacgtcgaagccatggaagtcctgcagcg

SEQ ID NO: 511383 - DNA, 55 bp, Artificial
  Synthetic oligonucleotide
ccggtcggatcagatattgagactggtcgtgcagcaggtatgccgcgtcgcagga

SEQ ID NO: 511384 - DNA, 55 bp, Artificial
  Synthetic oligonucleotide
ccgtagccatgccgtttgggcgacctgccttctgaacataaggcgatgtaaatac

SEQ ID NO: 511385 - DNA, 55 bp, Artificial
  Synthetic oligonucleotide
cgaacggcatgtgacgggcagctatctgcggaccatcatgaagttttccatcgcg

SEQ ID NO: 511386 - DNA, 55 bp, Artificial
  Synthetic oligonucleotide
aggacttctgcttcggatgatgcgcgatggggcgaggccgcgaactgatgtcacc

SEQ ID NO: 511387 - DNA, 55 bp, Artificial
  Synthetic oligonucleotide
aggtggcgcgagcctagcatgcgacccggcaaggccgaatgttgcactcccgtta

SEQ ID NO: 511388 - DNA, 55 bp, Artificial
  Synthetic oligonucleotide
atagggagcaacactgttcgagttgttcgcatacgtctggacacgacgacgctcg

SEQ ID NO: 511389 - DNA, 55 bp, Artificial
  Synthetic oligonucleotide
agcgggtgttcgaggagtgggttggatggaaaggggcgggttctcgcctcggtct

SEQ ID NO: 511390 - DNA, 55 bp, Artificial
  Synthetic oligonucleotide
agcaacacgttaccgacctggtgttgaagctgggcgacgggcgagacttggagcc

SEQ ID NO: 511391 - DNA, 55 bp, Artificial
  Synthetic oligonucleotide
atgctcggaagaccattcttgccttgaaccgggagctgcaatatggatgttcgtc

SEQ ID NO: 511392 - DNA, 55 bp, Artificial
  Synthetic oligonucleotide
atggggatggtcctgctcgtgatggttcgtgccggcggtctagaacgggtagctg

SEQ ID NO: 511393 - DNA, 55 bp, Artificial
  Synthetic oligonucleotide
actggcgtcgacctgttgccttggtccgctggtcttggtcgcccttgggttcagt

SEQ ID NO: 511394 - DNA, 55 bp, Artificial
  Synthetic oligonucleotide
caaacctaaatccaatggctaaccgcccgtttattcgtcaaagccaggcgctccg

SEQ ID NO: 511395 - DNA, 55 bp, Artificial
  Synthetic oligonucleotide
caaggcatggagtgcggtcgaggccgtagcacgccagcgcaacgcatcatttgct

SEQ ID NO: 511396 - DNA, 55 bp, Artificial
  Synthetic oligonucleotide
cagcggcacgtagttccataagctgtacgtcgctgagggaatgcaggtctgcagg

SEQ ID NO: 511397 - DNA, 55 bp, Artificial
  Synthetic oligonucleotide
catcctttacactgccgggctttccccacgcgaatccccgatcacgtgagcaaga

SEQ ID NO: 511398 - DNA, 55 bp, Artificial
  Synthetic oligonucleotide
catgatgccgtgcgagaagcgccggaagtgtctcacctgcactgagctcacctgc

SEQ ID NO: 511399 - DNA, 55 bp, Artificial
  Synthetic oligonucleotide
accagcacggactgcgcacggccacgatgttctggcccggttcggaagcggacat

SEQ ID NO: 511400 - DNA, 55 bp, Artificial
  Synthetic oligonucleotide
cattcgcatggcggcgcacgcaagatgggccgtttggaagcatcgagatcacagg

SEQ ID NO: 511401 - DNA, 55 bp, Artificial
  Synthetic oligonucleotide
cattgcgacgcgtcaaaagctgtcacgactacaactcgccccggaggtgcaggtt

SEQ ID NO: 511402 - DNA, 55 bp, Artificial
  Synthetic oligonucleotide
acagctctacggcaagttggccgcgtaagccgaagaacgcccgtgaaacccgtgc

SEQ ID NO: 511403 - DNA, 55 bp, Artificial
  Synthetic oligonucleotide
ccaattagtagactgctaagatgagccctatgagccagactctcacttccaacgc

SEQ ID NO: 511404 - DNA, 55 bp, Artificial
  Synthetic oligonucleotide
acacgacaacctttcccgttacggagtgaacacgatggaacttggcatggtgggt

SEQ ID NO: 511405 - DNA, 55 bp, Artificial
  Synthetic oligonucleotide
ccacttccggccaggagttcacggtggcaactgctcaccagttcgcaacaatgcc

SEQ ID NO: 511406 - DNA, 55 bp, Artificial
  Synthetic oligonucleotide
cggcccaagtgggcgtcaacatttagagttggccttacccggtgatggtaggagc

SEQ ID NO: 511407 - DNA, 55 bp, Artificial
  Synthetic oligonucleotide
cggcctcttttcggatccccgatgcgggttccatcttctttcatgcactgccctg

SEQ ID NO: 511408 - DNA, 55 bp, Artificial
  Synthetic oligonucleotide
aagtgcgacggagactttacgcgcggatgtgtagacacactggtatatgagtaac

SEQ ID NO: 511409 - DNA, 55 bp, Artificial
  Synthetic oligonucleotide
cggctgcgggtatccaatggccgggtacacgacgcaaggagttctcagtgatggc

SEQ ID NO: 511410 - DNA, 55 bp, Artificial
  Synthetic oligonucleotide
aagcgtcgcccaccaacctcgcaaagcctcaaccggcctgggtctgagcagggct

SEQ ID NO: 511411 - DNA, 55 bp, Artificial
  Synthetic oligonucleotide
cgggaaggagagtatcgatgcgatttcgagctgccgtcgcattcacgctgcacgg

SEQ ID NO: 511412 - DNA, 55 bp, Artificial
  Synthetic oligonucleotide
cgggagcgggtagcccatgttggagtaccacatgatttctctccggttcatggcg

SEQ ID NO: 511413 - DNA, 55 bp, Artificial
  Synthetic oligonucleotide
aagcagtgaccgaatcccgtcacagtgtcacagagtcgggctaggctgggcggac

SEQ ID NO: 511414 - DNA, 55 bp, Artificial
  Synthetic oligonucleotide
aacgccagaggtccctgtggtgtacgcaccagccgaccagcttcggtggataaaa

SEQ ID NO: 511415 - DNA, 55 bp, Artificial
  Synthetic oligonucleotide
cgggtaacgcatccgctcatcagcgttcgacttcgcggcttggcataccggggag

SEQ ID NO: 511416 - DNA, 55 bp, Artificial
  Synthetic oligonucleotide
cggtcattgtcagcctccgctcgttactgatgtcccgccgcgatgtgacgtgcag

SEQ ID NO: 511417 - DNA, 55 bp, Artificial
  Synthetic oligonucleotide
cggtgccaagggtaccgactgggtctatgcctacctcgattcgttctacctagat

SEQ ID NO: 511418 - DNA, 55 bp, Artificial
  Synthetic oligonucleotide
cgtagcgatgcaggcgtgtggtctctcgtctggtcgttcgattcgctcggagcgt

SEQ ID NO: 511419 - DNA, 55 bp, Artificial
  Synthetic oligonucleotide
cgtggatgcagtcgaatgtcgcggcaatgccatcggtcatggggaccgacgagga

SEQ ID NO: 511420 - DNA, 55 bp, Artificial
  Synthetic oligonucleotide
cgttgcgctaaggtgtaaggcaagaaccatcagggactgtggattacccatgcag

SEQ ID NO: 511421 - DNA, 55 bp, Artificial
  Synthetic oligonucleotide
ctaacggggtcaggttcacttctgacggtttcgtggctcgggtgtgcgaagcgca

SEQ ID NO: 511422 - DNA, 55 bp, Artificial
  Synthetic oligonucleotide
aaagatcgtgctcactggtggttctgcgtgcaggtgatggcattcatggttgact

SEQ ID NO: 511423 - DNA, 55 bp, Artificial
  Synthetic oligonucleotide
ctcgatcgacaagggactgttcgatgctcagcatgtctgcctcctcgggttcccc

SEQ ID NO: 511424 - DNA, 55 bp, Artificial
  Synthetic oligonucleotide
cgacaaaggcgggactcagaccgtagccgtgcgcaaagcgattggggatcgcgta

SEQ ID NO: 511425 - DNA, 55 bp, Artificial
  Synthetic oligonucleotide
cgaccttggtgaagcccgtacaacgcactgttacagggatggtgcgatgcgacac

SEQ ID NO: 511426 - DNA, 55 bp, Artificial
  Synthetic oligonucleotide
cgacgccactggtgcgctttggacagcacggcgatccgatggctgatcgtactca

SEQ ID NO: 511427 - DNA, 55 bp, Artificial
  Synthetic oligonucleotide
cgatggaccgatgactcgctcgatagaggatacttggttcgaagtataccccgct

SEQ ID NO: 511428 - DNA, 55 bp, Artificial
  Synthetic oligonucleotide
cgatggcaagatttggcctcaccccatcggtgcgcgtggtcaaatagagcccgga

SEQ ID NO: 511429 - DNA, 55 bp, Artificial
  Synthetic oligonucleotide
cgcaccccaggaccagcctgctttagttaagtcgtgactgacaggcagccatcac

SEQ ID NO: 511430 - DNA, 55 bp, Artificial
  Synthetic oligonucleotide
aatcgcttgcgcgggtcggaactgctcacagtcaggattgcgtctgccgcgggaa

SEQ ID NO: 511431 - DNA, 55 bp, Artificial
  Synthetic oligonucleotide
cgccacgcactgtctcagtccgtgcgataccaggcccttacattgacctcactcc

SEQ ID NO: 511432 - DNA, 55 bp, Artificial
  Synthetic oligonucleotide
cgccagatggcttggagaagcaaggcgttcgtaacgaggtcgaaattgcaaccgc

SEQ ID NO: 511433 - DNA, 55 bp, Artificial
  Synthetic oligonucleotide
cgcgcgaccacgccaagacttgcattgcatgagccaagacgatctcaccaaacac

SEQ ID NO: 511434 - DNA, 55 bp, Artificial
  Synthetic oligonucleotide
cgcggcaccagcgtccatcggtgcagcgctcccaaacccagcattccagcgaaca

SEQ ID NO: 511435 - DNA, 55 bp, Artificial
  Synthetic oligonucleotide
cgcggttttccctttgcaaccccacgaaagcgagcacttacatgtccatcctgcg

SEQ ID NO: 511436 - DNA, 55 bp, Artificial
  Synthetic oligonucleotide
cgcgtatggtattcagccgccaagcgccttcgatcacagaacggtgtcggttcca

SEQ ID NO: 511437 - DNA, 55 bp, Artificial
  Synthetic oligonucleotide
cgctagtctgtgcgaagctgcgtaagtgggtaatacagtcctcagaaagcggttc

SEQ ID NO: 511438 - DNA, 55 bp, Artificial
  Synthetic oligonucleotide
cggaaacttcaccagccttccactggggtggtcggtagacacatacggcccgcca

SEQ ID NO: 511439 - DNA, 55 bp, Artificial
  Synthetic oligonucleotide
cggaatgtctcgcaattggacagaaagtgcaacgttgtcaataaatgcccgcgag

SEQ ID NO: 511440 - DNA, 55 bp, Artificial
  Synthetic oligonucleotide
cggacatgcgaattcggtgccagaaggtgttgacagtcccgggtccgatccacac

SEQ ID NO: 511441 - DNA, 54 bp, Artificial
  Synthetic oligonucleotide
tcctttctgacgttccacggcctacccactcattgaattgagtcggacagcccc

SEQ ID NO: 511442 - DNA, 54 bp, Artificial
  Synthetic oligonucleotide
aataccgcccctccgttgcgaccaccggcggtctgactctccctcgtttctgat

SEQ ID NO: 511443 - DNA, 54 bp, Artificial
  Synthetic oligonucleotide
aaccttcgcaagccctgtcccaccgcggagagcctgatgccccgacccacgtcc

SEQ ID NO: 511444 - DNA, 53 bp, Artificial
  Synthetic oligonucleotide
tttctacctcgtttcgcggtcacgcaatgcacgaatctggcaggaccgccggg

SEQ ID NO: 511445 - DNA, 53 bp, Artificial
  Synthetic oligonucleotide
agggtggcgtagatattcacataaccgccgcaatgcagggcgtagctgaacat

SEQ ID NO: 511446 - DNA, 52 bp, Artificial
  Synthetic oligonucleotide
aaagccgaacgcgtctctactcgtgcgctcattgatagcgggtcacctgcta

SEQ ID NO: 511447 - DNA, 52 bp, Artificial
  Synthetic oligonucleotide
tgtgggctcgaataggtaggccgggtaccagtccactccgtcgaggcgaaca

SEQ ID NO: 511448 - DNA, 52 bp, Artificial
  Synthetic oligonucleotide
atattgctcagcgtactggcggctggaaccgtacatggaaaactcctcgggt

SEQ ID NO: 511449 - DNA, 52 bp, Artificial
  Synthetic oligonucleotide
atccctgaaccattgcttctaaccgggaacgacaaggcctctatggtacact

SEQ ID NO: 511450 - DNA, 52 bp, Artificial
  Synthetic oligonucleotide
ggcggaagctttgaatttcatctggggactctcggcaccaggccgtcagggg

SEQ ID NO: 511451 - DNA, 52 bp, Artificial
  Synthetic oligonucleotide
ccatactcagtcgtatggtaagtcctgtcgaaaaccccgatcgcctgtcatc

SEQ ID NO: 511452 - DNA, 52 bp, Artificial
  Synthetic oligonucleotide
cccctatcggatcgaggtcgaagtgtcgccccgattcctcgacgaccaatcg

SEQ ID NO: 511453 - DNA, 52 bp, Artificial
  Synthetic oligonucleotide
ccgcatagcgctgcagttgttctcgacgaatgaacgagtagccttccgcatc

SEQ ID NO: 511454 - DNA, 52 bp, Artificial
  Synthetic oligonucleotide
cgtcatgcacattgaccaggccccactcgttgaacttgctgcgggtccaggt

SEQ ID NO: 511455 - DNA, 52 bp, Artificial
  Synthetic oligonucleotide
gccaaccgaaagccgtgcaagatacaaaaccagacagtacacttactacccc

SEQ ID NO: 511456 - DNA, 52 bp, Artificial
  Synthetic oligonucleotide
cggcttcgtccatgcgattgtcatcgacaactctgaggacgccggacgttca

SEQ ID NO: 511457 - DNA, 51 bp, Artificial
  Synthetic oligonucleotide
ctctacggaggacgggaaatgtttgaactgatcgataaactcgcacccaat

SEQ ID NO: 511458 - DNA, 51 bp, Artificial
  Synthetic oligonucleotide
ttcgggtgaaccttaggcgaagcgctgcaccccaaactatgaatcaacttg

SEQ ID NO: 511459 - DNA, 51 bp, Artificial
  Synthetic oligonucleotide
cgtttccccgtaccccaccaggagtcatcgcatgaagctctattactcccc

SEQ ID NO: 511460 - DNA, 51 bp, Artificial
  Synthetic oligonucleotide
aaaggattcgtgacgtgggcggatgaattgccaaggcgggagcatgcgaca

SEQ ID NO: 511461 - DNA, 51 bp, Artificial
  Synthetic oligonucleotide
gaaggcctcatggatggcaacgcccagatgctcgggactgatcgggttggt

SEQ ID NO: 511462 - DNA, 51 bp, Artificial
  Synthetic oligonucleotide
tgattatccgacggttgacgacgaatgtcaggttggcgggcacgataggcg

SEQ ID NO: 511463 - DNA, 51 bp, Artificial
  Synthetic oligonucleotide
gatcaaggtgatggcgttctgcaacgcgcagcaggtggaactgtggctcaa

SEQ ID NO: 511464 - DNA, 51 bp, Artificial
  Synthetic oligonucleotide
gcccgttaggaattacaatgcagcagcagatgcccttggggcagtatttgg

SEQ ID NO: 511465 - DNA, 51 bp, Artificial
  Synthetic oligonucleotide
gctgtcccgtaacctcagtcgtcatcgtttgtcggaactcaacccgtaagg

SEQ ID NO: 511466 - DNA, 51 bp, Artificial
  Synthetic oligonucleotide
ggatccatggtcacaggctggatcgcgtatcacgagggcacgaataccggc

SEQ ID NO: 511467 - DNA, 51 bp, Artificial
  Synthetic oligonucleotide
ggcgcaacctgacgcttgcccaactcgatgtcggacaaggtttggcggtca

SEQ ID NO: 511468 - DNA, 51 bp, Artificial
  Synthetic oligonucleotide
ggctgaggccgccagcccgtggtttgtcattggtgatcagtgatccgaaac

SEQ ID NO: 511469 - DNA, 50 bp, Artificial
  Synthetic oligonucleotide
gaattgggccgaaattcctgaaactctgtggtcgggtgatttaccgccaa

SEQ ID NO: 511470 - DNA, 50 bp, Artificial
  Synthetic oligonucleotide
ctccgtctagaaagccttggcctaccatagctccgttcaacattcgaccc

SEQ ID NO: 511471 - DNA, 50 bp, Artificial
  Synthetic oligonucleotide
ggggagctacgggtgtttgtccgttattccgctcttcaatcattcgcttg

SEQ ID NO: 511472 - DNA, 50 bp, Artificial
  Synthetic oligonucleotide
ctcgaaagtggctccgtcaatgactatgcgcctttggtctttggcagcga

SEQ ID NO: 511473 - DNA, 50 bp, Artificial
  Synthetic oligonucleotide
aaaaggccgtccagacgggaccacgtgggatagtaaatgcgctcaaggaa

SEQ ID NO: 511474 - DNA, 55 bp, Artificial
  Synthetic oligonucleotide
ttctccaatcggggttgcagccagaaccggttttcttcttccgttccggtctcga

SEQ ID NO: 511475 - DNA, 55 bp, Artificial
  Synthetic oligonucleotide
tgacgatggcggaggcgggttgtccgatatattttccgttcattcccagatattt

SEQ ID NO: 511476 - DNA, 55 bp, Artificial
  Synthetic oligonucleotide
tattcgcccaatcccgcgactggcctccggctgaaagccacaccgtcgcacacaa

SEQ ID NO: 511477 - DNA, 55 bp, Artificial
  Synthetic oligonucleotide
ggttcggtcgtcgaacatgacggggcgataaacagacctgtaacggccgatagcg

SEQ ID NO: 511478 - DNA, 55 bp, Artificial
  Synthetic oligonucleotide
gggagccgtctcgaacttgccggtagccagattgggctcataataaggcgcggcg

SEQ ID NO: 511479 - DNA, 55 bp, Artificial
  Synthetic oligonucleotide
ggacggagaaatcgcagacggatcgtcccacacgtaacatcggcactcatgaagg

SEQ ID NO: 511480 - DNA, 55 bp, Artificial
  Synthetic oligonucleotide
gcggcgacaatccgaccagttcgtccgtcaacgcgggatcgatttcggaaacgcc

SEQ ID NO: 511481 - DNA, 55 bp, Artificial
  Synthetic oligonucleotide
gcgcatctatcctcagaatcccgccgaacgggagatacggcgtgtcgtcgaagcc

SEQ ID NO: 511482 - DNA, 55 bp, Artificial
  Synthetic oligonucleotide
cgttaaggaatccttacctttgcgttaattctgcgcgcattacgcgagagaaccg

SEQ ID NO: 511483 - DNA, 55 bp, Artificial
  Synthetic oligonucleotide
cgggagccgacggtcgtcaatcgctgcatgactgcattcagagcttcgtcacggc

SEQ ID NO: 511484 - DNA, 55 bp, Artificial
  Synthetic oligonucleotide
cgatgtttcaaactacccgcatactttattcctttccgacaaaagtaagcctcca

SEQ ID NO: 511485 - DNA, 55 bp, Artificial
  Synthetic oligonucleotide
catcgggcagacgtcctgttctatcgtaaatcgtttgaaacgaaacatatcctca

SEQ ID NO: 511486 - DNA, 55 bp, Artificial
  Synthetic oligonucleotide
aaaagcggagggatcaatacacctgcgtaatagtgccggagtactgtacgggatt

SEQ ID NO: 511487 - DNA, 54 bp, Artificial
  Synthetic oligonucleotide
ttggtggacgccctccgtaaggtaggtcgtaccgcccgcctgccaatgccattc

SEQ ID NO: 511488 - DNA, 53 bp, Artificial
  Synthetic oligonucleotide
gacctctctcctttcggccgcatacagttttcttgcagcacggtatttcacct

SEQ ID NO: 511489 - DNA, 53 bp, Artificial
  Synthetic oligonucleotide
ccgatcgtgtcccatccggtgcatgaatttcgattacgcagaattcaagaacc

SEQ ID NO: 511490 - DNA, 51 bp, Artificial
  Synthetic oligonucleotide
acgcatcattttcagcgcgcgtttgtcgctcgacgtgaacagatagagcga

SEQ ID NO: 511491 - DNA, 55 bp, Artificial
  Synthetic oligonucleotide
ttactacggcggcctgcaatccatcaccgagacaggtgcgtgggagccctggttg

SEQ ID NO: 511492 - DNA, 55 bp, Artificial
  Synthetic oligonucleotide
tgatcgccacaacgcctattgccgctacgccttgtcgctcgtcatcgcgggcaca

SEQ ID NO: 511493 - DNA, 55 bp, Artificial
  Synthetic oligonucleotide
tctcctgtgcggcctaacgttcgaggtaaggcgggccctacagcggagcgcgtaa

SEQ ID NO: 511494 - DNA, 55 bp, Artificial
  Synthetic oligonucleotide
ggacgtgagcgtgttcaagtcgatcgaaagcttcgtggccaacccggtgtattgc

SEQ ID NO: 511495 - DNA, 55 bp, Artificial
  Synthetic oligonucleotide
ctgttcgaaggttcttcatgtttcgctccttggcggtttgcacaatgcatccaag

SEQ ID NO: 511496 - DNA, 55 bp, Artificial
  Synthetic oligonucleotide
cgccgcgtgtaacccatcaacccggactatctgtcacccatcatcccgactgctc

SEQ ID NO: 511497 - DNA, 55 bp, Artificial
  Synthetic oligonucleotide
cgagccctctcaaacagcatcagaagttgcccaggaaccactccttggccttccc

SEQ ID NO: 511498 - DNA, 55 bp, Artificial
  Synthetic oligonucleotide
cctggggcatgattcattctatagacagctagcaattggcgtgctcccctgcgga

SEQ ID NO: 511499 - DNA, 55 bp, Artificial
  Synthetic oligonucleotide
ccgcctttccccttttggtgccgctgcgggtttccttatcgacggagatcccgag

SEQ ID NO: 511500 - DNA, 55 bp, Artificial
  Synthetic oligonucleotide
cagaccgacaggcccaggtccgtgcgttggcgaacttcgatgtccaattcaacgc

SEQ ID NO: 511501 - DNA, 55 bp, Artificial
  Synthetic oligonucleotide
atgccgcccgtttgttaggtcgtgtcgagacgcaacaactggtagagcacgtcac

SEQ ID NO: 511502 - DNA, 55 bp, Artificial
  Synthetic oligonucleotide
agtcacgtcagggatgcccgccgtagcttcaagtgcgcgcgtttccacagggcct

SEQ ID NO: 511503 - DNA, 55 bp, Artificial
  Synthetic oligonucleotide
acgacaccagtgcccacgttgcccgtcggctgttgtgcgccattggtggacacac

SEQ ID NO: 511504 - DNA, 53 bp, Artificial
  Synthetic oligonucleotide
cattgtcccactgcaagccaagcgattccgggaaaccgcgcattagagcaaaa

SEQ ID NO: 511505 - DNA, 53 bp, Artificial
  Synthetic oligonucleotide
gccgctgacctgtcgcaaggctgaacgcaggccccatggccttgggctaccct

SEQ ID NO: 511506 - DNA, 51 bp, Artificial
  Synthetic oligonucleotide
tcggtgcttcggggaattcaagccttctcacaatccggttcatggagtcac

SEQ ID NO: 511507 - DNA, 50 bp, Artificial
  Synthetic oligonucleotide
acgaaaccttgaggaagccactgaatcgctcgtggtcgcattcaattgac

SEQ ID NO: 511508 - DNA, 55 bp, Artificial
  Synthetic oligonucleotide
taatgtggaagttgaacaggacgactccgagcgcatatttaccattgacaacgga

SEQ ID NO: 511509 - DNA, 55 bp, Artificial
  Synthetic oligonucleotide
gttgatcattaccgtactggcaaccctgcttagcgtaccctttggacttttggcg

SEQ ID NO: 511510 - DNA, 55 bp, Artificial
  Synthetic oligonucleotide
gttccgtatgatctctggaaggaatggtctcgatgacacgtgtggcgccttcggc

SEQ ID NO: 511511 - DNA, 55 bp, Artificial
  Synthetic oligonucleotide
ggggctaaactggattcaggtttccggcgaacagacacaagcaattaaagaactt

SEQ ID NO: 511512 - DNA, 55 bp, Artificial
  Synthetic oligonucleotide
gctgaacgagaaaccgttcctgaccaatagagctggcgcttaacttggcaattag

SEQ ID NO: 511513 - DNA, 55 bp, Artificial
  Synthetic oligonucleotide
ctgtggaaacaatttcgatgggcacaaccggattggttaacagggccatctgcgt

SEQ ID NO: 511514 - DNA, 55 bp, Artificial
  Synthetic oligonucleotide
cgtgttccgcaaagacttacgcctcagtcataagattcacatgcgctattttgcc

SEQ ID NO: 511515 - DNA, 55 bp, Artificial
  Synthetic oligonucleotide
cgtaaaataaagctgcttggattaaacattaggcgcatggccgcctaccccttag

SEQ ID NO: 511516 - DNA, 55 bp, Artificial
  Synthetic oligonucleotide
ccattgaaagccgaaagataggcgtccagcacaccttctgcggccagacgaggta

SEQ ID NO: 511517 - DNA, 55 bp, Artificial
  Synthetic oligonucleotide
ccaaatcattcagcaagcagtaccaggtcgcaaagagattcccgcacaacgggga

SEQ ID NO: 511518 - DNA, 55 bp, Artificial
  Synthetic oligonucleotide
cattgtgtgcaccgccaatccggagggaagcagcgggatcgaagacccgaacggt

SEQ ID NO: 511519 - DNA, 55 bp, Artificial
  Synthetic oligonucleotide
aaccgcatctgggatgggtatttcgcctataacgccgttcccactctgtatgccg

SEQ ID NO: 511520 - DNA, 55 bp, Artificial
  Synthetic oligonucleotide
aaacgatacggcatctgtatatcggacgtcgattaaacgttcagcattccgtcgc

SEQ ID NO: 511521 - DNA, 53 bp, Artificial
  Synthetic oligonucleotide
tacatttccctgctcgtcgattaaataggtgatccgtttggcaaacagaaaac

SEQ ID NO: 511522 - DNA, 53 bp, Artificial
  Synthetic oligonucleotide
ttgaaagagaagtgctacaagggccagactgcacgtgttgttagagtaaatgt

SEQ ID NO: 511523 - DNA, 52 bp, Artificial
  Synthetic oligonucleotide
ccccggtgttcatcaatatggcacgaaagacaccgttgctccagacctaaaa

SEQ ID NO: 511524 - DNA, 52 bp, Artificial
  Synthetic oligonucleotide
ggattcaggttaaaggcagggacagagtgcggctttcggtcatcgccggaga

SEQ ID NO: 511525 - DNA, 58 bp, Artificial
  Synthetic oligonucleotide
cggttaaagcttcattatatgaagggatataatctctagctgttttacgaccactatc

SEQ ID NO: 511526 - DNA, 55 bp, Artificial
  Synthetic oligonucleotide
ttttatacaatccagggaacgaaagtataaggtaggattcatggcgtaagatagg

SEQ ID NO: 511527 - DNA, 55 bp, Artificial
  Synthetic oligonucleotide
ttaataacgtaacatctactacctgatcttctcgagagaccgtagcattgatcaa

SEQ ID NO: 511528 - DNA, 55 bp, Artificial
  Synthetic oligonucleotide
tgattctacaggttcacaagtagcatacagcgcacacgaaccatcaagtacaacg

SEQ ID NO: 511529 - DNA, 55 bp, Artificial
  Synthetic oligonucleotide
tcgataggtctacacctgagtctataaggacttctatcgccttgcttattccgtc

SEQ ID NO: 511530 - DNA, 55 bp, Artificial
  Synthetic oligonucleotide
gtccattttaactactattgcagcagattcgacttacggttgtttggccagacgg

SEQ ID NO: 511531 - DNA, 55 bp, Artificial
  Synthetic oligonucleotide
gtagatgtgttatgcacagaccagtatgggaagcaaataatagtagagatgcagg

SEQ ID NO: 511532 - DNA, 55 bp, Artificial
  Synthetic oligonucleotide
ggtgtagcagatgccagtagcaaatttatacagtcactgcgtcgtccatggagtt

SEQ ID NO: 511533 - DNA, 55 bp, Artificial
  Synthetic oligonucleotide
ggtgaacgatacagagttggtgatctgttttaggatatacagcaccgattgcctc

SEQ ID NO: 511534 - DNA, 55 bp, Artificial
  Synthetic oligonucleotide
ggcgtaatattcgaaaatctggatacagaattggtcccttctaacgcccaactgc

SEQ ID NO: 511535 - DNA, 55 bp, Artificial
  Synthetic oligonucleotide
ggcaatgccttagaggcttttattggtgccgtttatttagatcatggctatgagc

SEQ ID NO: 511536 - DNA, 55 bp, Artificial
  Synthetic oligonucleotide
gcctcactccaattatgcataggcatggtccactttctggttatgtagttaatag

SEQ ID NO: 511537 - DNA, 55 bp, Artificial
  Synthetic oligonucleotide
gagtccgtatcgctctaatcatccatttcttaagatgggtataccagtagttaat

SEQ ID NO: 511538 - DNA, 55 bp, Artificial
  Synthetic oligonucleotide
cgagttaaagcaggaaggtatacttgtttctcctggaggcgtaagatctatctgg

SEQ ID NO: 511539 - DNA, 55 bp, Artificial
  Synthetic oligonucleotide
ccgctccaaacctgatttgatttaggtacataaagacgcctggtctgaccagagg

SEQ ID NO: 511540 - DNA, 55 bp, Artificial
  Synthetic oligonucleotide
ccatgactggtatattgacttccatgatcgctattaaagtactctggagcaggat

SEQ ID NO: 511541 - DNA, 55 bp, Artificial
  Synthetic oligonucleotide
ccatcatgcaccatacatgttacggtcggaaaatggttgcgtaggtaatctaccg

SEQ ID NO: 511542 - DNA, 55 bp, Artificial
  Synthetic oligonucleotide
caaacagagtcgataggtctacacctgagtctataaggacttctatcgccttgct

SEQ ID NO: 511543 - DNA, 55 bp, Artificial
  Synthetic oligonucleotide
caaaatcgtggttttacctatcagagtatttgtggtttgtctagccgtcacttag

SEQ ID NO: 511544 - DNA, 55 bp, Artificial
  Synthetic oligonucleotide
agttgcatcagcttaatgctagtccagagtttattaaagggtggttgtcgcaacg

SEQ ID NO: 511545 - DNA, 55 bp, Artificial
  Synthetic oligonucleotide
acgggagtaaaactaccgcgccatctctcgaccctacacggactattttgcctag

SEQ ID NO: 511546 - DNA, 55 bp, Artificial
  Synthetic oligonucleotide
aacaccattatcagttataactcgcttactagacaggccattacgggaattttct

SEQ ID NO: 511547 - DNA, 54 bp, Artificial
  Synthetic oligonucleotide
taaggtagtgaaccatataacgaaaactgacgaggtagatgcggaacttatttc

SEQ ID NO: 511548 - DNA, 52 bp, Artificial
  Synthetic oligonucleotide
ttttcgcccagtacggctttgcatgcaatataatttgatccaatagtcgcat

SEQ ID NO: 511549 - DNA, 51 bp, Artificial
  Synthetic oligonucleotide
accgttgaatacgacatatctgtgccttgctgtacccggtagcatatgcag

SEQ ID NO: 511550 - DNA, 60 bp, Artificial
  Synthetic oligonucleotide
ctatatgctattaaagaagtagtttcagcaggtttagatataacaacattacctgaaatt

SEQ ID NO: 511551 - DNA, 60 bp, Artificial
  Synthetic oligonucleotide
ctagagaaattatttcatcttctattgaaacagtttgtaatgcacaaaattttgattcta

SEQ ID NO: 511552 - DNA, 60 bp, Artificial
  Synthetic oligonucleotide
cgaaatagtgttagaattattgccactaaacgattcaatggaaatgttttccaaatcgtt

SEQ ID NO: 511553 - DNA, 60 bp, Artificial
  Synthetic oligonucleotide
cttactctcacattaaaatgttaccataagcgcaaagtatatgtttttgagttcgaaaag

SEQ ID NO: 511554 - DNA, 60 bp, Artificial
  Synthetic oligonucleotide
cttctaaatgtttacgagcaaacattataattgttgctccaggtgattcataacaccctc

SEQ ID NO: 511555 - DNA, 60 bp, Artificial
  Synthetic oligonucleotide
ccaatttcaaatctaatttgatcattcccttttccagttgatccgtgtgctacataattt

SEQ ID NO: 511556 - DNA, 60 bp, Artificial
  Synthetic oligonucleotide
ccaattacagattcaatggaaatgttttctaaatcttttgatataaatcaaacaggagaa

SEQ ID NO: 511557 - DNA, 60 bp, Artificial
  Synthetic oligonucleotide
ccaatataaagcaggtaaagctctttttgaataagcttgaataactaaaccaaatttatt

SEQ ID NO: 511558 - DNA, 60 bp, Artificial
  Synthetic oligonucleotide
gaaaggaattgaaccttttgcaatttgattcgtaatcaaacactctatccgatgagttac

SEQ ID NO: 511559 - DNA, 60 bp, Artificial
  Synthetic oligonucleotide
gaatctatcattgaataactattatctaaatacggatcataaataaaacctttccatcca

SEQ ID NO: 511560 - DNA, 60 bp, Artificial
  Synthetic oligonucleotide
catacggtagacatgatccttgcgtaggtttaagagcaatacctattatagaaagtatgt

SEQ ID NO: 511561 - DNA, 60 bp, Artificial
  Synthetic oligonucleotide
cacgagaacttccaatacatttagcataagctaacgctatatttaatgagtttttatcgt

SEQ ID NO: 511562 - DNA, 60 bp, Artificial
  Synthetic oligonucleotide
ggaaaccaatattgcattccagctaaataaccaaataaaacaccacctattataacagta

SEQ ID NO: 511563 - DNA, 60 bp, Artificial
  Synthetic oligonucleotide
ggattcgaacctatgaagcttgcgcagcagatttacaatctgttccttttgaccactcag

SEQ ID NO: 511564 - DNA, 60 bp, Artificial
  Synthetic oligonucleotide
gtctcgttcgtctaatggttaggacctcgctctttcacggcggaaataagggttcaaatt

SEQ ID NO: 511565 - DNA, 60 bp, Artificial
  Synthetic oligonucleotide
aaaataacaatgttcatataaatcaatacacaataaaggtattgcgttataaccacctaa

SEQ ID NO: 511566 - DNA, 60 bp, Artificial
  Synthetic oligonucleotide
ttgcaatagcagtggtatcagaaccgcctctacctaatgtagtaaaattccctgaaaaag

SEQ ID NO: 511567 - DNA, 60 bp, Artificial
  Synthetic oligonucleotide
tgcaattaaagaagtagtttcagctggtttagatataacaacatttcctgaaattaaagc

SEQ ID NO: 511568 - DNA, 60 bp, Artificial
  Synthetic oligonucleotide
aacccatggactaaaagttatttctgataatggaggatatgataaccatcctatttttga

SEQ ID NO: 511569 - DNA, 60 bp, Artificial
  Synthetic oligonucleotide
aagatgtacttttttttgctcctttatatcctagaacaccagatgatatccatgaaatag

SEQ ID NO: 511570 - DNA, 60 bp, Artificial
  Synthetic oligonucleotide
tgataggaattgaacctataactaaaggattatgagtcctctactctaaccaattgagtt

SEQ ID NO: 511571 - DNA, 60 bp, Artificial
  Synthetic oligonucleotide
acatgatccacctaaatcagtattttctccaatataaacaccagcagaaactctaccttc

SEQ ID NO: 511572 - DNA, 60 bp, Artificial
  Synthetic oligonucleotide
accaattaaagaaggaacaccacttccttcaacaaaagttgatctaactgtatgacccgg

SEQ ID NO: 511573 - DNA, 60 bp, Artificial
  Synthetic oligonucleotide
tatacgaagtctcgttcgtctaatggttaggacctcgctctttcacggcggaaataagga

SEQ ID NO: 511574 - DNA, 60 bp, Artificial
  Synthetic oligonucleotide
tacttttcatacagtatcaacaaaatcttcaataagagatttgtcaagagcagtaggaat

SEQ ID NO: 511575 - DNA, 60 bp, Artificial
  Synthetic oligonucleotide
taaagctccaaaatcattaacaggagaagatgtgattgaatttcacattcatggaagtga

SEQ ID NO: 511576 - DNA, 60 bp, Artificial
  Synthetic oligonucleotide
gttgtatcatatggtgtttttattgatttaggtaattatgatggacttttacacatttca

SEQ ID NO: 511577 - DNA, 60 bp, Artificial
  Synthetic oligonucleotide
caaaacataatgattgtatttctttaactaaaatttgaaatgattctggaattccagatt

SEQ ID NO: 511578 - DNA, 60 bp, Artificial
  Synthetic oligonucleotide
caaaccagtactgtaatccagctaagtaaccgaataatactcctcctattataacagtat

SEQ ID NO: 511579 - DNA, 60 bp, Artificial
  Synthetic oligonucleotide
gtgcctattcctgatatttgaatactccaatcccaataatctactccaacccatggacta

SEQ ID NO: 511580 - DNA, 59 bp, Artificial
  Synthetic oligonucleotide
gcaatctatcatacaacataatccatttaatgctcctaaactaccacctgatataccag

SEQ ID NO: 511581 - DNA, 59 bp, Artificial
  Synthetic oligonucleotide
gcggttgaaaaaatagcacctggagttatggatagagaaagcgttaatgaatctctttt

SEQ ID NO: 511582 - DNA, 59 bp, Artificial
  Synthetic oligonucleotide
cccacatattatttcttcttaaagtaacataaacacctgctatttcacctatttttgac

SEQ ID NO: 511583 - DNA, 59 bp, Artificial
  Synthetic oligonucleotide
gtgtttttctttatatacaatcataattagtctatctattccaatcccaactccatttg

SEQ ID NO: 511584 - DNA, 58 bp, Artificial
  Synthetic oligonucleotide
gaaacttgtaaatcaagtggatctggaggtcaacatgttaatacaactaattctgcag

SEQ ID NO: 511585 - DNA, 58 bp, Artificial
  Synthetic oligonucleotide
atatttgtaaaaagattcatttctactatgtattcctaatgttaaaccaaattctgag

SEQ ID NO: 511586 - DNA, 57 bp, Artificial
  Synthetic oligonucleotide
catatgtgaatatccaataccattaaaatttgaagatataccatgcattattccatg

SEQ ID NO: 511587 - DNA, 57 bp, Artificial
  Synthetic oligonucleotide
ctcctcataatcagctatcatagcttctgttgttattaacaatccaccaatagatcc

SEQ ID NO: 511588 - DNA, 56 bp, Artificial
  Synthetic oligonucleotide
caatctggtgttggtgtaatagataaatctgttaattatcttgagtggttagaatc

SEQ ID NO: 511589 - DNA, 56 bp, Artificial
  Synthetic oligonucleotide
ccagattctatgatgttattatcacctaaactaataccaactccagcatttgctcc

SEQ ID NO: 511590 - DNA, 56 bp, Artificial
  Synthetic oligonucleotide
ctaggtgttctaatagatcctccagtatcgcttcctattgaaattaaatttcctcc

SEQ ID NO: 511591 - DNA, 55 bp, Artificial
  Synthetic oligonucleotide
gtcctttatgacctcttccacaagttttaccatttccagaagaaatccctcttcc

SEQ ID NO: 511592 - DNA, 55 bp, Artificial
  Synthetic oligonucleotide
caattggaactacgaatactaagttctaaattatcaatagatcttaaataaacag

SEQ ID NO: 511593 - DNA, 55 bp, Artificial
  Synthetic oligonucleotide
ggaaagatggcagagtggtttattgtatcggtcttgaaaaccgaaaaagttaatt

SEQ ID NO: 511594 - DNA, 55 bp, Artificial
  Synthetic oligonucleotide
gctaccataagcgcaaaataatttcacaaattgagttcggaaagagatcacgtgt

SEQ ID NO: 511595 - DNA, 55 bp, Artificial
  Synthetic oligonucleotide
cacaattgtttgttccgctacttccaatacagaattcttctagtctatcaagtga

SEQ ID NO: 511596 - DNA, 55 bp, Artificial
  Synthetic oligonucleotide
gtccagtacctgataaattacatccaccaaatggttgcattccaacaatcgcacc

SEQ ID NO: 511597 - DNA, 55 bp, Artificial
  Synthetic oligonucleotide
gccctaatggtcctgtagaagcatctataaaattagatatttcaggatgagcagg

SEQ ID NO: 511598 - DNA, 55 bp, Artificial
  Synthetic oligonucleotide
ggttaatgagtaaaaaaaaaggatgtttttcaatgtataatgtttttttttcatg

SEQ ID NO: 511599 - DNA, 55 bp, Artificial
  Synthetic oligonucleotide
atgttattactatatgtactggccaggctgctagtatggctgcattgattttagc

SEQ ID NO: 511600 - DNA, 55 bp, Artificial
  Synthetic oligonucleotide
gttgttcttccacctcctaatataacgggagaaatgcatatagggcatttcttcc

SEQ ID NO: 511601 - DNA, 55 bp, Artificial
  Synthetic oligonucleotide
gaggaggtggtagatctagtgctagagaaactgcttgtagagttgcaagtggatg

SEQ ID NO: 511602 - DNA, 55 bp, Artificial
  Synthetic oligonucleotide
gaggaggaggaagatcaagcgcaagagaaactacttgtagagtagcaagtggagc

SEQ ID NO: 511603 - DNA, 55 bp, Artificial
  Synthetic oligonucleotide
gaaccacccaatacttttatacactgcactaatcttgctccactattatctgtta

SEQ ID NO: 511604 - DNA, 55 bp, Artificial
  Synthetic oligonucleotide
gtttccctcctccagataatgttcccattatagaagaagatcctcctatatcatt

SEQ ID NO: 511605 - DNA, 55 bp, Artificial
  Synthetic oligonucleotide
acatacaagatttagaatcttgagcgaaagcttaggggttcaagtcccctgttcg

SEQ ID NO: 511606 - DNA, 55 bp, Artificial
  Synthetic oligonucleotide
aaatctagtggagctggagggcagcatgttaacactacgaattcttctgttaaag

SEQ ID NO: 511607 - DNA, 55 bp, Artificial
  Synthetic oligonucleotide
ttggatctggatcttgtggaggtttatatacagcaaattcaatggctattgtagc

SEQ ID NO: 511608 - DNA, 55 bp, Artificial
  Synthetic oligonucleotide
ctggatcttgacattgacctgttgatcccattgttctataagataatgaacagcc

SEQ ID NO: 511609 - DNA, 55 bp, Artificial
  Synthetic oligonucleotide
ctcaaaaaaatgaatattcgaacaaccttcatttctataacatttagttatatcg

SEQ ID NO: 511610 - DNA, 55 bp, Artificial
  Synthetic oligonucleotide
ctaggaaagatggtagagtggtttaatacatcggtcttgaaaaccgagaaagtta

SEQ ID NO: 511611 - DNA, 54 bp, Artificial
  Synthetic oligonucleotide
gataagactaaatccaaatattgattcattgtctcatgataaaatcacaactgg

SEQ ID NO: 511612 - DNA, 53 bp, Artificial
  Synthetic oligonucleotide
atattctctatgtaattgagaattcatagttctagcaccgatacaaacccaac

SEQ ID NO: 511613 - DNA, 53 bp, Artificial
  Synthetic oligonucleotide
caccagatgatatccatgaaatagttttcccatttaaactagttaaagttgat

SEQ ID NO: 511614 - DNA, 53 bp, Artificial
  Synthetic oligonucleotide
ccatattgacctaatattggagcgataggtggtgttggtgttgctttacctgg

SEQ ID NO: 511615 - DNA, 53 bp, Artificial
  Synthetic oligonucleotide
cagatattagtcatatttctggcttgattagtgctggagtttatgaaaatcca

SEQ ID NO: 511616 - DNA, 53 bp, Artificial
  Synthetic oligonucleotide
gaaagaggtgtaggtgaaacatattcatgtggatcaggaataattagttcttc

SEQ ID NO: 511617 - DNA, 53 bp, Artificial
  Synthetic oligonucleotide
gaaagaggtgttggtgaaacttattcttgtggatcaggtataatgagtgcatc

SEQ ID NO: 511618 - DNA, 52 bp, Artificial
  Synthetic oligonucleotide
gggttcttatatataagacctattatgttaggaataagtaaaaatataggag

SEQ ID NO: 511619 - DNA, 52 bp, Artificial
  Synthetic oligonucleotide
aaactgtattacaaacaggttatataagaaatgatagtcttattagaccagc

SEQ ID NO: 511620 - DNA, 52 bp, Artificial
  Synthetic oligonucleotide
gtgaacctcctttatgtcttactgaaattttaccatgacttcttccagaatg

SEQ ID NO: 511621 - DNA, 52 bp, Artificial
  Synthetic oligonucleotide
cccataacaatatcttgagttggaataattataggttcaccgttagatggtg

SEQ ID NO: 511622 - DNA, 52 bp, Artificial
  Synthetic oligonucleotide
atagtagatcctttaccaattattaattgacatacacttattggaatacctg

SEQ ID NO: 511623 - DNA, 51 bp, Artificial
  Synthetic oligonucleotide
cattccataatcagaaattttacccttttctataccatgctctccaggagt

SEQ ID NO: 511624 - DNA, 51 bp, Artificial
  Synthetic oligonucleotide
gcaagtatttgttttatttgaagcatacttcctcttgaaccagaatctaac

SEQ ID NO: 511625 - DNA, 51 bp, Artificial
  Synthetic oligonucleotide
cactgattattgaagaagtagtttccattgatcctgcaccaggggaaataa

SEQ ID NO: 511626 - DNA, 50 bp, Artificial
  Synthetic oligonucleotide
gttaacaaaacatgcttgattattaaccatagtccaaatagaagtagtcc

SEQ ID NO: 511627 - DNA, 50 bp, Artificial
  Synthetic oligonucleotide
attatttccacctccagataatgttcccattatagaagatgaccctccga

SEQ ID NO: 511628 - DNA, 50 bp, Artificial
  Synthetic oligonucleotide
gctagaagcataaaacaatcgtttgtttgtaataagtggattcctggaag

SEQ ID NO: 511629 - DNA, 50 bp, Artificial
  Synthetic oligonucleotide
ccctgtaatacaatttgtataaccaggtccagatgttactaacacaactc

SEQ ID NO: 511630 - DNA, 50 bp, Artificial
  Synthetic oligonucleotide
tttgggaatggtgaaagatcaggaaacacttctcttttaattttagcttc

SEQ ID NO: 511631 - DNA, 55 bp, Artificial
  Synthetic oligonucleotide
gaaggtacggataattacccacttacggctatggagcatttaccgaagtactcac

SEQ ID NO: 511632 - DNA, 55 bp, Artificial
  Synthetic oligonucleotide
gacagtgacagcaaagatccgggatttaaaccggggaagtgtgatcagcgcggcg

SEQ ID NO: 511633 - DNA, 55 bp, Artificial
  Synthetic oligonucleotide
gacatgaaggtcaggcccacaaacaggaggccgacaccgatacagatctcacctg

SEQ ID NO: 511634 - DNA, 55 bp, Artificial
  Synthetic oligonucleotide
gaggcaaagatcttaaacgagaataaggaagacctaaacggcaatatcgtcctcc

SEQ ID NO: 511635 - DNA, 55 bp, Artificial
  Synthetic oligonucleotide
gcagccgctacgatgtcaataagtgcactatatattctgtgcatacttagccctc

SEQ ID NO: 511636 - DNA, 55 bp, Artificial
  Synthetic oligonucleotide
gccgtttccggtcaaaagcggcgtagactgcgccttcactcccgtctgcctgaga

SEQ ID NO: 511637 - DNA, 55 bp, Artificial
  Synthetic oligonucleotide
gcgcgtgtcggagttgtagaaatcttgcgggatacggaaatgctgtttgacagac

SEQ ID NO: 511638 - DNA, 55 bp, Artificial
  Synthetic oligonucleotide
gcgcgtgttcctatgcggggcccttagaccgctaagatctcaaccagcaccagcc

SEQ ID NO: 511639 - DNA, 55 bp, Artificial
  Synthetic oligonucleotide
ggagtcttctcgtcgtgtaggcacagagccctgtcacaagctcgcttcccaccac

SEQ ID NO: 511640 - DNA, 55 bp, Artificial
  Synthetic oligonucleotide
ggcacagggacgatggaaaaggaacttcaacttcgagttctatatgaatcgggcc

SEQ ID NO: 511641 - DNA, 55 bp, Artificial
  Synthetic oligonucleotide
ggccgtgattcctgcgttaaaggataagagtatcgaaagagatttccgtactctg

SEQ ID NO: 511642 - DNA, 55 bp, Artificial
  Synthetic oligonucleotide
gggtgttcccctgtgatgggtgtggtagatcagacaacttctgaaatgcgggtac

SEQ ID NO: 511643 - DNA, 55 bp, Artificial
  Synthetic oligonucleotide
ggtcacagcagatcagttaaaccgcacttacgagatgtcaatttattccggtgga

SEQ ID NO: 511644 - DNA, 55 bp, Artificial
  Synthetic oligonucleotide
ggtgctgtaggagcagtacttcaaattcaggcgcgagatgcccacctctcccatg

SEQ ID NO: 511645 - DNA, 55 bp, Artificial
  Synthetic oligonucleotide
gtggagtggggcagcttctttatcgcagcagcgatcggttactctctctggcacg

SEQ ID NO: 511646 - DNA, 55 bp, Artificial
  Synthetic oligonucleotide
tagtcgtccacccactcggtttcccgatcccggccccagaactccagctcctttc

SEQ ID NO: 511647 - DNA, 55 bp, Artificial
  Synthetic oligonucleotide
tccagaagatgctaggaatgttatacgttgttggcactcaaccgatgtggcggcg

SEQ ID NO: 511648 - DNA, 55 bp, Artificial
  Synthetic oligonucleotide
tccttccgctccatatgcagagccttctccatgggcgttcgtacccatcgcagca

SEQ ID NO: 511649 - DNA, 55 bp, Artificial
  Synthetic oligonucleotide
ttccgtccttttcccatccgccacgctctatcctatgggcggggatgtatcctgg

SEQ ID NO: 511650 - DNA, 55 bp, Artificial
  Synthetic oligonucleotide
tttcaagctctacacttgttaagttggccgccttcctgctgacaccagggagagc

SEQ ID NO: 511651 - DNA, 55 bp, Artificial
  Synthetic oligonucleotide
tttccatacacccggagatggaacaccacggcagaccacatcaaccgtaatcagg

SEQ ID NO: 511652 - DNA, 55 bp, Artificial
  Synthetic oligonucleotide
ttttggggtatgtaagagccgttttcccagttcggaggaaacggtaaaaggggcc

SEQ ID NO: 511653 - DNA, 55 bp, Artificial
  Synthetic oligonucleotide
aaggcactgggaccggacgcgctctgcgatacctgccgcctttatccgagacaca

SEQ ID NO: 511654 - DNA, 55 bp, Artificial
  Synthetic oligonucleotide
caaagtcgatctgttttgcgatacaggacactttatctatgagtgggaagaatgg

SEQ ID NO: 511655 - DNA, 55 bp, Artificial
  Synthetic oligonucleotide
caagtaggattccatacagtgttttggcgtctgtggatatattcccgaaacgtcc

SEQ ID NO: 511656 - DNA, 55 bp, Artificial
  Synthetic oligonucleotide
cagctattcaacttagttacggtgaagaggactgtctacagactgtaggggacta

SEQ ID NO: 511657 - DNA, 55 bp, Artificial
  Synthetic oligonucleotide
catatgcagggattctccacggtcttttatccggaggagtccccggagattggac

SEQ ID NO: 511658 - DNA, 55 bp, Artificial
  Synthetic oligonucleotide
cccattgggagctgcggtccatagatctcacatgcaccagtcgggatgatgacgg

SEQ ID NO: 511659 - DNA, 55 bp, Artificial
  Synthetic oligonucleotide
ccccattgcatactccgcctcaaccaacacatcccgttccgaaatccccgctctg

SEQ ID NO: 511660 - DNA, 55 bp, Artificial
  Synthetic oligonucleotide
ccgcttacccattcccggatgactttcccatctgactcccgcacaagccgcagtt

SEQ ID NO: 511661 - DNA, 55 bp, Artificial
  Synthetic oligonucleotide
ccggttcttgagcttcgtggctactgcccggtgcagatggtatggcagcatccgg

SEQ ID NO: 511662 - DNA, 55 bp, Artificial
  Synthetic oligonucleotide
ccgtaggtcaggtcaaatttatgcgggttgatatcctggatcattcctatactcc

SEQ ID NO: 511663 - DNA, 55 bp, Artificial
  Synthetic oligonucleotide
cctggaatctgtctcccatagcttcttatcatactttgcaagcaccgcccgaaat

SEQ ID NO: 511664 - DNA, 55 bp, Artificial
  Synthetic oligonucleotide
cgatttgtttcccctccagatggctggtaaactttgcccactggtctgccagcga

SEQ ID NO: 511665 - DNA, 55 bp, Artificial
  Synthetic oligonucleotide
cgcagtcaacagatactgcttcatattacgcacctttgtggtgttctccttcagg

SEQ ID NO: 511666 - DNA, 55 bp, Artificial
  Synthetic oligonucleotide
cgcgagcaataccgggacctgatcctggaggcggaatcttctgatatggattatg

SEQ ID NO: 511667 - DNA, 55 bp, Artificial
  Synthetic oligonucleotide
cgctccaacaggttttcacgctcaaattccgcaatcgcgcctatcatggtgaaca

SEQ ID NO: 511668 - DNA, 55 bp, Artificial
  Synthetic oligonucleotide
ctcggcggatacagacatgcgcccctgtcgtgcaatcttgtccaccagctcagga

SEQ ID NO: 511669 - DNA, 55 bp, Artificial
  Synthetic oligonucleotide
ctgagcccctgacctccggtaagtacacctggtctatcaagagcaccggggatgg

SEQ ID NO: 511670 - DNA, 55 bp, Artificial
  Synthetic oligonucleotide
ctgattaactgtctgaacggcacttatgacctggaacacatgaagttccgtgagc

SEQ ID NO: 511671 - DNA, 55 bp, Artificial
  Synthetic oligonucleotide
ctgctcacagtgcatatcgtttggcgtgcagatgaccacaatgtctacattgggg

SEQ ID NO: 511672 - DNA, 55 bp, Artificial
  Synthetic oligonucleotide
cttcgcccgcctgtatttcctcactaagtaaaagcagattccggttaatccgctc

SEQ ID NO: 511673 - DNA, 53 bp, Artificial
  Synthetic oligonucleotide
gacggaatcggcagatgtgtacacgatcatgtgaccggtagcgatctcttcct

SEQ ID NO: 511674 - DNA, 52 bp, Artificial
  Synthetic oligonucleotide
cccactgccatatcggtcttgacggctacgggatcggctacgagggacatga

SEQ ID NO: 511675 - DNA, 52 bp, Artificial
  Synthetic oligonucleotide
agttgccattccgattccaaagggaaatgaggatctgttagaggcggtaaat

SEQ ID NO: 511676 - DNA, 55 bp, Artificial
  Synthetic oligonucleotide
ttttccctgtatctcgacacggggatctggtggttcatcacgaaagggttcgaat

SEQ ID NO: 511677 - DNA, 55 bp, Artificial
  Synthetic oligonucleotide
ggttcgccgtttcatactctttggactgaacggaagagaccgcctctttaagggc

SEQ ID NO: 511678 - DNA, 55 bp, Artificial
  Synthetic oligonucleotide
gctggagtgcatctcttcaggaaccgatgtatcaaaccgggtcggacacgttccg

SEQ ID NO: 511679 - DNA, 55 bp, Artificial
  Synthetic oligonucleotide
gccttggtattcgatccgcgcatacgtcaactcaccgctgacggaaatcccaagg

SEQ ID NO: 511680 - DNA, 55 bp, Artificial
  Synthetic oligonucleotide
gacgtaacgtcggaggaggtcaccaaccgtgttcaaggcgtttaaggagtttgcg

SEQ ID NO: 511681 - DNA, 55 bp, Artificial
  Synthetic oligonucleotide
cgggattgatgcgacaagtcaccgctttattggagtcatcgcggatttaagcggg

SEQ ID NO: 511682 - DNA, 55 bp, Artificial
  Synthetic oligonucleotide
cgggatgacacctaatacgttgacgtttggtttgagtttaccgagggcttcaaac

SEQ ID NO: 511683 - DNA, 55 bp, Artificial
  Synthetic oligonucleotide
cggctgtatgcgccgtgataaatccttcgattcggtccagtgcctcaaggacacg

SEQ ID NO: 511684 - DNA, 55 bp, Artificial
  Synthetic oligonucleotide
cggatcattctaaagaacgagcttcgagcattcctcagctaaaacaatcggtcgt

SEQ ID NO: 511685 - DNA, 55 bp, Artificial
  Synthetic oligonucleotide
cagatggaagatgtcatcactactttgacgtttccggaaataagccgtgaatttt

SEQ ID NO: 511686 - DNA, 55 bp, Artificial
  Synthetic oligonucleotide
aggaaggtcaagcaaaacatatgctcgatcgtcaaaatgaggaagtaatcgaagc

SEQ ID NO: 511687 - DNA, 55 bp, Artificial
  Synthetic oligonucleotide
agagacttgcgaaaatcagaccacctgataccggtgtatcggttgccggtttaac

SEQ ID NO: 511688 - DNA, 55 bp, Artificial
  Synthetic oligonucleotide
aatgttccggtttgagttgtgtcaatgtcgcaagaccggctgtcatcgcgagtgg

SEQ ID NO: 511689 - DNA, 53 bp, Artificial
  Synthetic oligonucleotide
gaagctgacaggcttcgcgaacgtaacgtttgacttggttgcgaacaacggcg

SEQ ID NO: 511690 - DNA, 52 bp, Artificial
  Synthetic oligonucleotide
cttgctacaggacgatcgagttctgcaaatgccttgtcactgacgacgaaca

SEQ ID NO: 511691 - DNA, 51 bp, Artificial
  Synthetic oligonucleotide
gggtggacatatagaatggaattacatgcgaaagttacacgcgttgccttg

SEQ ID NO: 511692 - DNA, 50 bp, Artificial
  Synthetic oligonucleotide
tagacgaaaacgttatcatagcgccgatcgcaaaagagggcgccaccttg

SEQ ID NO: 511693 - DNA, 55 bp, Artificial
  Synthetic oligonucleotide
tggagacgaatctgttgcaatctcgcagcagaaaagaacccgtcttacaaacagg

SEQ ID NO: 511694 - DNA, 55 bp, Artificial
  Synthetic oligonucleotide
tgaccttagcacgcttgacacaacatccacaattcctaatctcacacttccacaa

SEQ ID NO: 511695 - DNA, 55 bp, Artificial
  Synthetic oligonucleotide
tcccagtgccatatttgcttaactacagtaggcgcaaatacagccgaactcggtt

SEQ ID NO: 511696 - DNA, 55 bp, Artificial
  Synthetic oligonucleotide
gtgtagcgataatcaccagccgttgtttggtcgttacccagctgcattgcttgac

SEQ ID NO: 511697 - DNA, 55 bp, Artificial
  Synthetic oligonucleotide
gtaaaattgcgctatttagatgcttggacagaggcacgcagagcccatgcagcac

SEQ ID NO: 511698 - DNA, 55 bp, Artificial
  Synthetic oligonucleotide
gcttactaatggcactccagacaaacaacatactcattgcggttccttgtacagc

SEQ ID NO: 511699 - DNA, 55 bp, Artificial
  Synthetic oligonucleotide
gctgcgatttgcgtagagttgaattgccagcccagagatttacctgttagagtcc

SEQ ID NO: 511700 - DNA, 55 bp, Artificial
  Synthetic oligonucleotide
gctagataatactcccaagccccagctagttttggaaccttgggcagcggcagct

SEQ ID NO: 511701 - DNA, 55 bp, Artificial
  Synthetic oligonucleotide
ctgcggctacgccatgatttgcttaccccaggaaagtgaaagccgatatctatgg

SEQ ID NO: 511702 - DNA, 55 bp, Artificial
  Synthetic oligonucleotide
ctaatggtcgatccggttaaaggcatgatcgcaaatgtcggttgttgtgctgaaa

SEQ ID NO: 511703 - DNA, 55 bp, Artificial
  Synthetic oligonucleotide
cgttacggttgacttgttcgtaaccgggtgtatcccaaaggtttaaggttgcgcc

SEQ ID NO: 511704 - DNA, 55 bp, Artificial
  Synthetic oligonucleotide
cgtggttaacaaaggcgcgtgtacaccagaaattcccacctgataaagactccac

SEQ ID NO: 511705 - DNA, 55 bp, Artificial
  Synthetic oligonucleotide
cctctttggcatatattaaactagcgtgcattgcttcgatgttgcgaggcgcaac

SEQ ID NO: 511706 - DNA, 55 bp, Artificial
  Synthetic oligonucleotide
ccgtctgaatgccaatctacaggctgaccttgactgtctgtgagaatgctacgcc

SEQ ID NO: 511707 - DNA, 55 bp, Artificial
  Synthetic oligonucleotide
aattcaggagcgacaagacagccccagatttgaggaatcgaacaggtaaggcctt

SEQ ID NO: 511708 - DNA, 55 bp, Artificial
  Synthetic oligonucleotide
aagaatgaattagggcgcggcttacacccaaagcctctcctatttgttgcgcagc

SEQ ID NO: 511709 - DNA, 55 bp, Artificial
  Synthetic oligonucleotide
aaccctggtagagcgagatgtcaaactacttgctgatgatgacttctctcctacc

SEQ ID NO: 511710 - DNA, 55 bp, Artificial
  Synthetic oligonucleotide
tgttcttggctgatggtgtagggcgtcgatgttttagtggccaacggacccaacc

SEQ ID NO: 511711 - DNA, 55 bp, Artificial
  Synthetic oligonucleotide
gggtctgagccatatcttgtgactctgggtagcgatgttatattgactgctggtg

SEQ ID NO: 511712 - DNA, 55 bp, Artificial
  Synthetic oligonucleotide
gcgccaatgttgcttacgcctcagctgaccgacgccttggagcgatgaaggctca

SEQ ID NO: 511713 - DNA, 55 bp, Artificial
  Synthetic oligonucleotide
gaacaaggttgtcacccgttatggtgaggacttatctggccggacgttcgcgatc

SEQ ID NO: 511714 - DNA, 55 bp, Artificial
  Synthetic oligonucleotide
gaaaggtttgcatccctatcatgaagaagctttcattggctgccgttgcgtttgc

SEQ ID NO: 511715 - DNA, 55 bp, Artificial
  Synthetic oligonucleotide
ctcgttctcccgtgtcataactatcttcggcaatcttggagagcaccgcacggcg

SEQ ID NO: 511716 - DNA, 55 bp, Artificial
  Synthetic oligonucleotide
cggctgcctgatcgtcatgaaggttatccaagtacgttggatggaggaataacga

SEQ ID NO: 511717 - DNA, 55 bp, Artificial
  Synthetic oligonucleotide
ccggccgatatgttgcatttcaagcgcagtgtcttcaccggttttgtgaccgacg

SEQ ID NO: 511718 - DNA, 55 bp, Artificial
  Synthetic oligonucleotide
cacgatcgttttcgggattttgtactggacgctctatcctggccttggcacctac

SEQ ID NO: 511719 - DNA, 55 bp, Artificial
  Synthetic oligonucleotide
atcggcccagcgtcgtagctcagccccaaactgccggtactttccttctggcccc

SEQ ID NO: 511720 - DNA, 55 bp, Artificial
  Synthetic oligonucleotide
agcactcgctgcctcgggccaaccagcaaggcttattgacgccggcacccttgta

SEQ ID NO: 511721 - DNA, 55 bp, Artificial
  Synthetic oligonucleotide
aagggtcagtgatctgcgtttaaccccttaaacttgctgccccgtcttctctaag

SEQ ID NO: 511722 - DNA, 54 bp, Artificial
  Synthetic oligonucleotide
cttttcttgccacgcgggctgcaccgaatgtgcttgccgtcttgcgcttccacc

SEQ ID NO: 511723 - DNA, 54 bp, Artificial
  Synthetic oligonucleotide
caaattacggatgagctccttggtcatccgagcttggtccaaagtccgggtttc

SEQ ID NO: 511724 - DNA, 51 bp, Artificial
  Synthetic oligonucleotide
ctccaacgtgccgagtggctatccgggcgaaactgatcggccaacgccgtg

SEQ ID NO: 511725 - DNA, 51 bp, Artificial
  Synthetic oligonucleotide
tgatcgtggcgtcctttctcgatcgaaatctcgtcaccacttctgccgcac

SEQ ID NO: 511726 - DNA, 50 bp, Artificial
  Synthetic oligonucleotide
cggctgagtcgggctagctccaccatggcgcgtacgtctgcggcttgggg

SEQ ID NO: 511727 - DNA, 55 bp, Artificial
  Synthetic oligonucleotide
gatcgattgggaacgtcctatcaatgtcccctagttctgcgacaatctctgccta

SEQ ID NO: 511728 - DNA, 55 bp, Artificial
  Synthetic oligonucleotide
gatcttcgccggtgtctgtcatttgtttaggggaaatcctctatgatctaattgc

SEQ ID NO: 511729 - DNA, 55 bp, Artificial
  Synthetic oligonucleotide
gccatccctgcaaaattcatctgtcttgggagagcgatcgcctgaaagtaagaac

SEQ ID NO: 511730 - DNA, 55 bp, Artificial
  Synthetic oligonucleotide
gcggagggcgatcggtcaaggtataggattaagttattggttggctttcttaggt

SEQ ID NO: 511731 - DNA, 55 bp, Artificial
  Synthetic oligonucleotide
ggagaggcgatgagaaacaccgcgtccttcatgtgtttagcgtaggtgctaccct

SEQ ID NO: 511732 - DNA, 55 bp, Artificial
  Synthetic oligonucleotide
ggcgcaacgctatgtacgagtgaaacatcgtcaaggacaaatcttctacggactg

SEQ ID NO: 511733 - DNA, 55 bp, Artificial
  Synthetic oligonucleotide
gtaccattaaaaccgattcgggaatatggacattttctccctgttcagttacgag

SEQ ID NO: 511734 - DNA, 55 bp, Artificial
  Synthetic oligonucleotide
gtcatgagtaccggcgttatcgcctactatgtggtgatttcttcccgtgacggtt

SEQ ID NO: 511735 - DNA, 55 bp, Artificial
  Synthetic oligonucleotide
gtgcgtgggtcatgatatacagtcctaaatcaagagtggatttccatgcactaag

SEQ ID NO: 511736 - DNA, 55 bp, Artificial
  Synthetic oligonucleotide
gtgtcattgtcaccggggatgagattagcaccagtaaacctcaaccggatggtta

SEQ ID NO: 511737 - DNA, 55 bp, Artificial
  Synthetic oligonucleotide
gttatatcgagcgatttctctgcgggattacccaacagtgcagggattaatggct

SEQ ID NO: 511738 - DNA, 55 bp, Artificial
  Synthetic oligonucleotide
taggaaaacgaagggaagccaaataggagcagtcacaacgaagattatggtagcc

SEQ ID NO: 511739 - DNA, 55 bp, Artificial
  Synthetic oligonucleotide
tcaagagtctgacctattttaccgttctagaactatgacgcaacagtatcgcatt

SEQ ID NO: 511740 - DNA, 55 bp, Artificial
  Synthetic oligonucleotide
tgtacatcggaaccttgggctaaccaagaacagcgatcaccagtcaccgtagggg

SEQ ID NO: 511741 - DNA, 55 bp, Artificial
  Synthetic oligonucleotide
ttagtttcacccgttgctcctgatgttatggtagcttttggccgtcccaaaggac

SEQ ID NO: 511742 - DNA, 55 bp, Artificial
  Synthetic oligonucleotide
ttccggccagacttgattgagataggagtagtctaattgactggttatctctcgt

SEQ ID NO: 511743 - DNA, 55 bp, Artificial
  Synthetic oligonucleotide
tttagatgatagtctcgcttggcaaactaagtggggaggagaaaccctctggtgg

SEQ ID NO: 511744 - DNA, 55 bp, Artificial
  Synthetic oligonucleotide
aaactacctacaagcagctattgaaactccccaacgtcccctagcggcgattatc

SEQ ID NO: 511745 - DNA, 55 bp, Artificial
  Synthetic oligonucleotide
aactatcgcccaataactcagtcctccgagcaaaagacccaccggcattaagcgc

SEQ ID NO: 511746 - DNA, 55 bp, Artificial
  Synthetic oligonucleotide
aatataaactgtgctgtgtccccaactatctgcctgagcgagcagatgtttaagg

SEQ ID NO: 511747 - DNA, 55 bp, Artificial
  Synthetic oligonucleotide
aatatttgcacagggttcactcctttaatagcctattccactactattcgccagg

SEQ ID NO: 511748 - DNA, 55 bp, Artificial
  Synthetic oligonucleotide
caattgggaatcgcctccctgaagggagtcagtcaaccggatatcaaccccgcta

SEQ ID NO: 511749 - DNA, 55 bp, Artificial
  Synthetic oligonucleotide
caggctctggggagctttccgtggcaatttccagtgattctaaccgttggagagg

SEQ ID NO: 511750 - DNA, 55 bp, Artificial
  Synthetic oligonucleotide
cccgaaggggtgtatttcttgcctcctttacagcgcacggctattattgtgatca

SEQ ID NO: 511751 - DNA, 55 bp, Artificial
  Synthetic oligonucleotide
ccctgtacgagtgtagtcggtattaagagtcgctgtccctccgagggtgtagttg

SEQ ID NO: 511752 - DNA, 55 bp, Artificial
  Synthetic oligonucleotide
ccgaacccgtggttcctccccaaaatattgccgaacggaccaaagttagcattga

SEQ ID NO: 511753 - DNA, 55 bp, Artificial
  Synthetic oligonucleotide
ccggagtctcgctaataattgcttccggttcattagtggtaataggggcagtttg

SEQ ID NO: 511754 - DNA, 55 bp, Artificial
  Synthetic oligonucleotide
cgaaatcgtcgcatccttaaccgagtatcctgtcaagggattgggtcctgttgtc

SEQ ID NO: 511755 - DNA, 55 bp, Artificial
  Synthetic oligonucleotide
ctcagattatgaacgtctaaagtatagcgctcttctggaactttcggaaacccct

SEQ ID NO: 511756 - DNA, 55 bp, Artificial
  Synthetic oligonucleotide
ctggcacagtttacgctaaaactggcactcttaccggtgtgcgggccctatcggg

SEQ ID NO: 511757 - DNA, 55 bp, Artificial
  Synthetic oligonucleotide
ctttgagccttcccatcctaggttaggggtagaattcttgtcaaaagaccgctag

SEQ ID NO: 511758 - DNA, 55 bp, Artificial
  Synthetic oligonucleotide
gaaagtgcgcctatcggtcatttcccctccatcgaaattggagtgtttatgggcg

SEQ ID NO: 511759 - DNA, 55 bp, Artificial
  Synthetic oligonucleotide
gaccgttttagtccggaaaccctctcctatctctgtccgggagctaataccggct

SEQ ID NO: 511760 - DNA, 55 bp, Artificial
  Synthetic oligonucleotide
gaggttagggaaacgagttagtaaatgccgtactagcgtacccttgcccacaccg

SEQ ID NO: 511761 - DNA, 54 bp, Artificial
  Synthetic oligonucleotide
ggcaaattgtcgtcatttatccccatcgtggggtggaacgggaacaatcgctac

SEQ ID NO: 511762 - DNA, 52 bp, Artificial
  Synthetic oligonucleotide
cgtggaaattagttcccacatactggataactagggcgatccgcgactgggg

SEQ ID NO: 511763 - DNA, 50 bp, Artificial
  Synthetic oligonucleotide
tgcactgacatggaatcataagcttcaaaatcgagcagatcgtagcgggg

SEQ ID NO: 511764 - DNA, 55 bp, Artificial
  Synthetic oligonucleotide
tggatacctacttcccgcacttcaactcactgtcgctcttcacagtgcctcggcg

SEQ ID NO: 511765 - DNA, 55 bp, Artificial
  Synthetic oligonucleotide
gtgctcctgcgccaggggctgggctgtgcgctatgcatccgaaaccgcgtcgtca

SEQ ID NO: 511766 - DNA, 55 bp, Artificial
  Synthetic oligonucleotide
gggtcacactccccacttcggtcgcaacggaggtatttcatccatgcgagtcgac

SEQ ID NO: 511767 - DNA, 55 bp, Artificial
  Synthetic oligonucleotide
gggaccctcccgaagaaagcgcgaagcataaggccaaccgatgtcaacacacgcc

SEQ ID NO: 511768 - DNA, 55 bp, Artificial
  Synthetic oligonucleotide
gggacaaccggcgcaagtgcttgaggcaccgggaattcgcacccaatggcttgga

SEQ ID NO: 511769 - DNA, 55 bp, Artificial
  Synthetic oligonucleotide
gggaagctccagacgcaaaggcgcattatagagaagcccggcggtacactccacg

SEQ ID NO: 511770 - DNA, 55 bp, Artificial
  Synthetic oligonucleotide
ggagcaactacttgttgattcgctggtcctttggctccacgttgagacaggagac

SEQ ID NO: 511771 - DNA, 55 bp, Artificial
  Synthetic oligonucleotide
gatcaaggacatctggcactcccttcctcagagggaatgcggtgggagtcacctc

SEQ ID NO: 511772 - DNA, 55 bp, Artificial
  Synthetic oligonucleotide
gactgcaacgacgtttccccgggttggccccatagtttggtcggatagcggacgc

SEQ ID NO: 511773 - DNA, 55 bp, Artificial
  Synthetic oligonucleotide
ccagggcgatgatttccatgagcggggttctctctcgggaagggaattgaaacgg

SEQ ID NO: 511774 - DNA, 55 bp, Artificial
  Synthetic oligonucleotide
caagtacggttttcgcgagtccaagagattcgctggggccggaatgctgctgggg

SEQ ID NO: 511775 - DNA, 55 bp, Artificial
  Synthetic oligonucleotide
atgtaacggaattccctcaaatgcggggtttcgtcctggcaagggattgacccgc

SEQ ID NO: 511776 - DNA, 55 bp, Artificial
  Synthetic oligonucleotide
atgaatggctcgccgcgcaaagcgtgtgggacggtcgctcagatcagcctgcgac

SEQ ID NO: 511777 - DNA, 55 bp, Artificial
  Synthetic oligonucleotide
acagaggggacgcgggaggacatggggccgaagtatcgctgcgctaggattcgcg

SEQ ID NO: 511778 - DNA, 53 bp, Artificial
  Synthetic oligonucleotide
acgcttccaccgattcaagaccagtaacctccgggagccggcatggacccctc

SEQ ID NO: 511779 - DNA, 53 bp, Artificial
  Synthetic oligonucleotide
tcctcttgtctccgggaacggagtggttgtcgttgatcgatggggccgatcga

SEQ ID NO: 511780 - DNA, 51 bp, Artificial
  Synthetic oligonucleotide
aggtgcgcagtaccattgcccgcgcagggtgccatcgagtaccgaaggcgt

SEQ ID NO: 511781 - DNA, 55 bp, Artificial
  Synthetic oligonucleotide
tcctgacggcaaccgggtaaccattgcaaacgcgggattgatcagccttgacgga

SEQ ID NO: 511782 - DNA, 55 bp, Artificial
  Synthetic oligonucleotide
tcatggtatcggcgaccaggataaagtaaacatagtgctgctgaaatttgcagcg

SEQ ID NO: 511783 - DNA, 55 bp, Artificial
  Synthetic oligonucleotide
taaccgggcgcataaattcatattgcccgatgggcggctggtatttggcggactg

SEQ ID NO: 511784 - DNA, 55 bp, Artificial
  Synthetic oligonucleotide
ggaacgggcagatgcgaataataagggacagatcgaccaaattgtagccaaggcc

SEQ ID NO: 511785 - DNA, 55 bp, Artificial
  Synthetic oligonucleotide
gcgccagtattgtagtgaaagggaccacgctgggaaccataacggacactacggg

SEQ ID NO: 511786 - DNA, 55 bp, Artificial
  Synthetic oligonucleotide
gccgcccgagtatattcatttgaaacggttgcccgttgatgctaaaagaaataac

SEQ ID NO: 511787 - DNA, 55 bp, Artificial
  Synthetic oligonucleotide
ctgattatagcctgcaccaatggcatggcacaactttaacgaagcatatgaaccc

SEQ ID NO: 511788 - DNA, 55 bp, Artificial
  Synthetic oligonucleotide
cgtttccgggtggtgcaataaggtttgcaggggttggtccaatacattgcacagg

SEQ ID NO: 511789 - DNA, 55 bp, Artificial
  Synthetic oligonucleotide
cggggtaatgcggtaaaacacggtgtataaacctgagatgatacagccactcaac

SEQ ID NO: 511790 - DNA, 55 bp, Artificial
  Synthetic oligonucleotide
ccgtgcgtttcgcatgtaataggttggctgtctggcagatgatccgcgttgcttc

SEQ ID NO: 511791 - DNA, 55 bp, Artificial
  Synthetic oligonucleotide
ccggacctcaacgatacacttgtcttcctgcttcagtgtggttagttcaagaata

SEQ ID NO: 511792 - DNA, 55 bp, Artificial
  Synthetic oligonucleotide
cagcactgccgccaccggtaataatgcccgcgatccattttacccattcgttgtc

SEQ ID NO: 511793 - DNA, 55 bp, Artificial
  Synthetic oligonucleotide
accttactacttccaacagcgtgaaacaaacgccgcttggtacggactctaccca

SEQ ID NO: 511794 - DNA, 55 bp, Artificial
  Synthetic oligonucleotide
aatgggaaggcatcggtgggtttgcagcatatcaaaccgggtgatgatctctacc

SEQ ID NO: 511795 - DNA, 53 bp, Artificial
  Synthetic oligonucleotide
tgaacacgttgcgcgcccgctacagatggcgtatttccccgtttaactaccga

SEQ ID NO: 511796 - DNA, 53 bp, Artificial
  Synthetic oligonucleotide
tggacgccagcgtaagcgtttgcatgagtgttaacaatagcctggtatgttat

SEQ ID NO: 511797 - DNA, 52 bp, Artificial
  Synthetic oligonucleotide
cctttaaaggtgatggtgtaagggccacccgctgcgatggttttaaccgaaa

SEQ ID NO: 511798 - DNA, 55 bp, Artificial
  Synthetic oligonucleotide
ttggcagttctgtccgacagcctaccgctgctatcgagccagactctcacccagc

SEQ ID NO: 511799 - DNA, 55 bp, Artificial
  Synthetic oligonucleotide
tcttatggtgaaagggagcaccctgacattatttggcgttatagttcaactgctc

SEQ ID NO: 511800 - DNA, 55 bp, Artificial
  Synthetic oligonucleotide
tcccttctggcgcaactggattaagcacgacaaagctgagccattgcccctgccg

SEQ ID NO: 511801 - DNA, 55 bp, Artificial
  Synthetic oligonucleotide
gtaccagcccacatcgtagaggccctctcgcacagcgctgatgccgaaagtcttg

SEQ ID NO: 511802 - DNA, 55 bp, Artificial
  Synthetic oligonucleotide
gccgtctgctaacgtctctaggctgagaccgtcgtcaatttcttgggtgctgaca

SEQ ID NO: 511803 - DNA, 55 bp, Artificial
  Synthetic oligonucleotide
gccgattttgactcgggcgtagtggtctccctcagggattttgaaggtaggcgct

SEQ ID NO: 511804 - DNA, 55 bp, Artificial
  Synthetic oligonucleotide
gcccgctcggccttgtctagcgatttcatcagctgggactcgttctcgggctcat

SEQ ID NO: 511805 - DNA, 55 bp, Artificial
  Synthetic oligonucleotide
gaaacgctgtgcctttctcgtctatacacggttgcttttggttgccgaccaactt

SEQ ID NO: 511806 - DNA, 55 bp, Artificial
  Synthetic oligonucleotide
ctgagggtggaagccacccaggaaggtcagaatcgcagaaccagacccagtcgcc

SEQ ID NO: 511807 - DNA, 55 bp, Artificial
  Synthetic oligonucleotide
ctccaagagagcgcacctacgactaaccgtttaccctccagtttcgtcactctgc

SEQ ID NO: 511808 - DNA, 55 bp, Artificial
  Synthetic oligonucleotide
cggtactgtagggtggttgaaagataggaatcaggttctccggccagatgagggc

SEQ ID NO: 511809 - DNA, 55 bp, Artificial
  Synthetic oligonucleotide
cggcagcggtagataactgctactttagtaaagcggatttgtggaatagaagagg

SEQ ID NO: 511810 - DNA, 55 bp, Artificial
  Synthetic oligonucleotide
ccactgcgcatcagtggctaggtaactatgctgattggccttggattgtgttacg

SEQ ID NO: 511811 - DNA, 55 bp, Artificial
  Synthetic oligonucleotide
cagaggacaggttcctgggcgatacttaagcaacatcctgaggattgtccagagg

SEQ ID NO: 511812 - DNA, 55 bp, Artificial
  Synthetic oligonucleotide
cacccacagcgatattgacaagctcggcctctatgccaacctgggaataccggaa

SEQ ID NO: 511813 - DNA, 55 bp, Artificial
  Synthetic oligonucleotide
agacccgctcagcccttcgtcgcgggtaaagtgaatgatgctgcgaatcagctct

SEQ ID NO: 511814 - DNA, 51 bp, Artificial
  Synthetic oligonucleotide
cccgttaagggacggcggttatctccggtactctatttagctttggccgta

SEQ ID NO: 511815 - DNA, 55 bp, Artificial
  Synthetic oligonucleotide
tcgataacctgccctcgaactttgatgcattgggctcacgattggataatgccgc

SEQ ID NO: 511816 - DNA, 55 bp, Artificial
  Synthetic oligonucleotide
gtgcacagatcattgtgatctaaggacgtgtgatgagcggcgcaatctacaacga

SEQ ID NO: 511817 - DNA, 55 bp, Artificial
  Synthetic oligonucleotide
gggtcttgctgcgtccgtgtaggcactgagcaaagatcccgatatccaagtccca

SEQ ID NO: 511818 - DNA, 55 bp, Artificial
  Synthetic oligonucleotide
ggcctgtaaccggcggcgtaattggggttctcgtcatcgcgtgagccagctgcaa

SEQ ID NO: 511819 - DNA, 55 bp, Artificial
  Synthetic oligonucleotide
ggcaacctgggatccacacacgcacccaatcgtgactgaagtcgctggtatcgtg

SEQ ID NO: 511820 - DNA, 55 bp, Artificial
  Synthetic oligonucleotide
gccccagaaacgcaagtgatttgcgggcggcgagtgtaccacggcgaaatctgaa

SEQ ID NO: 511821 - DNA, 55 bp, Artificial
  Synthetic oligonucleotide
gcaaggtaccgacaacgcctgtatgcgcaacttcagtctctacttccatacccag

SEQ ID NO: 511822 - DNA, 55 bp, Artificial
  Synthetic oligonucleotide
gagcggaaccgctgcattaaaggtgatcgttccaccgtgtgggaatgacatgggg

SEQ ID NO: 511823 - DNA, 55 bp, Artificial
  Synthetic oligonucleotide
gactgaagtagtcacccaccgcaacgatgggcttacccgacgcagagaatcgatc

SEQ ID NO: 511824 - DNA, 55 bp, Artificial
  Synthetic oligonucleotide
ctgagccctctcggctggcgaatcttttgcgctggttctatttgcttccgtcact

SEQ ID NO: 511825 - DNA, 55 bp, Artificial
  Synthetic oligonucleotide
ctattcccaactgtatttcatacgaccccacttacagctacgagcttgcgacgat

SEQ ID NO: 511826 - DNA, 55 bp, Artificial
  Synthetic oligonucleotide
cgcgaatccgcaagtggcgcgacgggacgctccaacagaccctttcagtgacctt

SEQ ID NO: 511827 - DNA, 55 bp, Artificial
  Synthetic oligonucleotide
ccgcctggtgcaaccgtgagacttccacgcgtttgtttgtgccaagcgcagaggc

SEQ ID NO: 511828 - DNA, 55 bp, Artificial
  Synthetic oligonucleotide
cagcgacccggtagcatacacacgctctggatagagtagggcggtggtaagtgcg

SEQ ID NO: 511829 - DNA, 55 bp, Artificial
  Synthetic oligonucleotide
attcgtagacggtggtgctggccgaattacagtcgacaaccctgccacgggcgcc

SEQ ID NO: 511830 - DNA, 55 bp, Artificial
  Synthetic oligonucleotide
aatctgcccgacataccattcttggcggtcttgccgcgagtgggtggcacacggc

SEQ ID NO: 511831 - DNA, 54 bp, Artificial
  Synthetic oligonucleotide
ctgccaacgggtaaaagctgtaacagcgcaaaacacacttcccaagcgtttcct

SEQ ID NO: 511832 - DNA, 55 bp, Artificial
  Synthetic oligonucleotide
tttgcggccaatcctgcctcccagatagaagaggcggcgttatagcatggggagt

SEQ ID NO: 511833 - DNA, 55 bp, Artificial
  Synthetic oligonucleotide
ccggccttgcccggactttcgaattttaccatgagcgccggcacgaaacggtggc

SEQ ID NO: 511834 - DNA, 55 bp, Artificial
  Synthetic oligonucleotide
ctggtactgattgagctggagtagttcctgctgggatctcagttggtcgacgtgg

SEQ ID NO: 511835 - DNA, 55 bp, Artificial
  Synthetic oligonucleotide
gcgagcaaccatcagtgcaatatccttctcaattctagcgcgcccgtccgcgcct

SEQ ID NO: 511836 - DNA, 55 bp, Artificial
  Synthetic oligonucleotide
gcgcaagatcggtccgcgcagcaaggccgttctcatcgtaaacatgagcggcgtg

SEQ ID NO: 511837 - DNA, 55 bp, Artificial
  Synthetic oligonucleotide
gcgcgtgcgcaaaatgttccagcctatgtcgtgttctcggatcggactttggcgg

SEQ ID NO: 511838 - DNA, 55 bp, Artificial
  Synthetic oligonucleotide
tgtgaacatcccttgattgagggtgcaccggctcggcaatttgtcgttttggagg

SEQ ID NO: 511839 - DNA, 55 bp, Artificial
  Synthetic oligonucleotide
tgaccgatggatacggatgaacagcgaacgcttccgacgtgtagccgctctccgc

SEQ ID NO: 511840 - DNA, 55 bp, Artificial
  Synthetic oligonucleotide
ggcctatgggcagacgcacatcactgtcggtccgcgggtattggatcggtacgag

SEQ ID NO: 511841 - DNA, 55 bp, Artificial
  Synthetic oligonucleotide
gggccagaaccgcgactagccctggcctagagagacagtttaagaaacgcccggg

SEQ ID NO: 511842 - DNA, 55 bp, Artificial
  Synthetic oligonucleotide
ggtgagacgacggggtcccgcctagagtatcgttatgagcgacaatacgatggcc

SEQ ID NO: 511843 - DNA, 55 bp, Artificial
  Synthetic oligonucleotide
ggtttacttgaaaccagcttgataccgttatgtggacgagccgacagatagtccg

SEQ ID NO: 511844 - DNA, 54 bp, Artificial
  Synthetic oligonucleotide
aacgatcggtgaatgcgcggtcggaagctcgtcttgcctattcgacctatcgtg

SEQ ID NO: 511845 - DNA, 54 bp, Artificial
  Synthetic oligonucleotide
ggtctcaggatggcgggagttagtcattgtatggcctcgctgtttgcaacgaaa

SEQ ID NO: 511846 - DNA, 53 bp, Artificial
  Synthetic oligonucleotide
aaatccaaggcgaagtggttcgtcggaccggaggattgggagcgctcggacca

SEQ ID NO: 511847 - DNA, 51 bp, Artificial
  Synthetic oligonucleotide
ggcaccgcatcccaaaggtctcgtcgagatcggctatgtagatatcgaacc

SEQ ID NO: 511848 - DNA, 51 bp, Artificial
  Synthetic oligonucleotide
gcggttggtccgctgccgcacacattgatgtcgccgaatagcgaagcctgc

SEQ ID NO: 511849 - DNA, 55 bp, Artificial
  Synthetic oligonucleotide
ttaatgtacgatggtgcttcctcaccgaccgacaacggacacgccatgaacgacc

SEQ ID NO: 511850 - DNA, 55 bp, Artificial
  Synthetic oligonucleotide
tgcctcgccgctgcaaagaaacgtgtccggggcgctagcatggggtcaaacacca

SEQ ID NO: 511851 - DNA, 55 bp, Artificial
  Synthetic oligonucleotide
tcttgagtttcgcgagcatgagggacctctttcttgttcgtggttgacggtacga

SEQ ID NO: 511852 - DNA, 55 bp, Artificial
  Synthetic oligonucleotide
tcaacggtcttgccaggctgggagctgtccggaccatggcccgtgaagggccaag

SEQ ID NO: 511853 - DNA, 55 bp, Artificial
  Synthetic oligonucleotide
gggcgaaaccgtgtatcgcccgacctggatcggtgtgtggatgaaggtccttcgg

SEQ ID NO: 511854 - DNA, 55 bp, Artificial
  Synthetic oligonucleotide
gggacggggcacaatgacgggttagtttacgtgtgccgcctgccatgagttttcg

SEQ ID NO: 511855 - DNA, 55 bp, Artificial
  Synthetic oligonucleotide
gcttcatggcgaaacgcggtgcccggcagaatgtcgcactagtatcaatttggcc

SEQ ID NO: 511856 - DNA, 55 bp, Artificial
  Synthetic oligonucleotide
gcagcacgcgccgatgttagggcgcagcgtctgtctgtctacaacacgttaggcg

SEQ ID NO: 511857 - DNA, 55 bp, Artificial
  Synthetic oligonucleotide
gcacacattagccgtcattgatgtcggatagcgacgcaaagccgagcgagatacg

SEQ ID NO: 511858 - DNA, 55 bp, Artificial
  Synthetic oligonucleotide
ctctcgcttcagacatccggtcaatgacagatttgagtattcacgcgttatgccg

SEQ ID NO: 511859 - DNA, 55 bp, Artificial
  Synthetic oligonucleotide
ctccaactgggagagcatgccatccatcaggctttcagtcttggtgatcgctagc

SEQ ID NO: 511860 - DNA, 55 bp, Artificial
  Synthetic oligonucleotide
ctcaattgtgtagccatcctcagttaatagggacccaagaatctcgcccatcatt

SEQ ID NO: 511861 - DNA, 55 bp, Artificial
  Synthetic oligonucleotide
cggcgaccgccttcctggtttacccaccccacgccccgtgcagatgtcactcgag

SEQ ID NO: 511862 - DNA, 55 bp, Artificial
  Synthetic oligonucleotide
cgccttgccttctgtcatgtggtggaacgcgggaaatcgggcccagttcacaccg

SEQ ID NO: 511863 - DNA, 55 bp, Artificial
  Synthetic oligonucleotide
cgaaaacccgcgcgaggcctagcgatgagcatcgatttcacgtcgatccacaacc

SEQ ID NO: 511864 - DNA, 55 bp, Artificial
  Synthetic oligonucleotide
cagtttcgcaagttccggaccgatgcaccgcttctgccgcgaggagtgggcctat

SEQ ID NO: 511865 - DNA, 55 bp, Artificial
  Synthetic oligonucleotide
cacggctcgaaggggattggatgctttcgccagccgaaatggattgatcgaccac

SEQ ID NO: 511866 - DNA, 55 bp, Artificial
  Synthetic oligonucleotide
atcacaacgctgggcggcgcacgagacttggctctctatgcaaccgcctatgcgg

SEQ ID NO: 511867 - DNA, 55 bp, Artificial
  Synthetic oligonucleotide
agatatcccgccatgctcggaggcacgaacgcgcctaaagcccagccacgaaaac

SEQ ID NO: 511868 - DNA, 55 bp, Artificial
  Synthetic oligonucleotide
acgtgcagcggagtggatcgcgcgtggcgggtaagtcccgatgtccgggctgaaa

SEQ ID NO: 511869 - DNA, 55 bp, Artificial
  Synthetic oligonucleotide
aaccagcaatttcgctatttcgcagagccgaacactgtatcgcgtaatggccagg

SEQ ID NO: 511870 - DNA, 52 bp, Artificial
  Synthetic oligonucleotide
cggacgtggcaattctgtggcatcccgttagttgcggggcttgaggcaaggg

SEQ ID NO: 511871 - DNA, 51 bp, Artificial
  Synthetic oligonucleotide
gtatcttttcagcgcggttcgaacgcagtccagggcacttcgcgccagtcg

SEQ ID NO: 511872 - DNA, 51 bp, Artificial
  Synthetic oligonucleotide
tgaccgggtgtcaccgggacatgacgaaatgcgaccgggaatcaccgccag

SEQ ID NO: 511873 - DNA, 51 bp, Artificial
  Synthetic oligonucleotide
tgtcgaagctgcttgacctgatgaggaagctgggcagtgatgctgcgttga

SEQ ID NO: 511874 - DNA, 55 bp, Artificial
  Synthetic oligonucleotide
tttaatcccacttagataatgtatatgggccccatctgggtctctagttctgtca

SEQ ID NO: 511875 - DNA, 55 bp, Artificial
  Synthetic oligonucleotide
ttagtaacggatgcttggaaaccgcaagtaaacggcgtcgtccgttcttatctga

SEQ ID NO: 511876 - DNA, 55 bp, Artificial
  Synthetic oligonucleotide
tagcaactggtcctctccctacgtctatcttagactctaaaattacaccggtggc

SEQ ID NO: 511877 - DNA, 55 bp, Artificial
  Synthetic oligonucleotide
ggtctatgcctggtgactcattgacattagatccacatgcacaaaacgaaggtcc

SEQ ID NO: 511878 - DNA, 55 bp, Artificial
  Synthetic oligonucleotide
ggctataggtgttggttctactttaccttgggcaatagtgacctccaaagcacca

SEQ ID NO: 511879 - DNA, 55 bp, Artificial
  Synthetic oligonucleotide
ggagtgtctttggtgaggagaaaacccatggggccctcgatggtagaacgccagc

SEQ ID NO: 511880 - DNA, 55 bp, Artificial
  Synthetic oligonucleotide
gctgaataagctactgcatcttctgctgatatggatccgttagtttcaacttgca

SEQ ID NO: 511881 - DNA, 55 bp, Artificial
  Synthetic oligonucleotide
gccacaactgcaacggagtgcgataaattaagagatttgcccttttgagtgggaa

SEQ ID NO: 511882 - DNA, 55 bp, Artificial
  Synthetic oligonucleotide
gcattgttccatctgtaactcctgttgcagaaaacattatatctccgctagctaa

SEQ ID NO: 511883 - DNA, 55 bp, Artificial
  Synthetic oligonucleotide
gatgtactggcggtcctagtcatcgtagctgcaattggttttgcggcaactgctg

SEQ ID NO: 511884 - DNA, 55 bp, Artificial
  Synthetic oligonucleotide
gactcattagcgtcaattggcagatatctccaaggtgtcggatctaataaatggg

SEQ ID NO: 511885 - DNA, 55 bp, Artificial
  Synthetic oligonucleotide
cgtaaagcgttgctgctgatgcaaaagttcctatatggccaccaagttctgggaa

SEQ ID NO: 511886 - DNA, 55 bp, Artificial
  Synthetic oligonucleotide
cggccttactgttatcaccgattatattgataccgtggaaaccgtttcagtgggc

SEQ ID NO: 511887 - DNA, 55 bp, Artificial
  Synthetic oligonucleotide
cggagcagtttatccgggtgctggttctagcgaaggtttgcttgttattattggt

SEQ ID NO: 511888 - DNA, 55 bp, Artificial
  Synthetic oligonucleotide
cctttggacggagtagtcttaacgactggatgtgataaaactacaccagctgcgt

SEQ ID NO: 511889 - DNA, 55 bp, Artificial
  Synthetic oligonucleotide
cctggagatatggttgttaagattgtttatgacgaattggtaagctttcttggag

SEQ ID NO: 511890 - DNA, 55 bp, Artificial
  Synthetic oligonucleotide
ccatacgtaaaagtcccaacgcaaagagcatggtcgtaataactatctgaggttg

SEQ ID NO: 511891 - DNA, 55 bp, Artificial
  Synthetic oligonucleotide
ccagttttaaacgacaacgagatagactctgctgttgactctatccagacgccgg

SEQ ID NO: 511892 - DNA, 55 bp, Artificial
  Synthetic oligonucleotide
cataattatgttcgtatctatctggatcaggcgataatggggctacacccatgcc

SEQ ID NO: 511893 - DNA, 55 bp, Artificial
  Synthetic oligonucleotide
atcagacatgtttcctctgctccatgtggattgacgcttagcatattgtctggtc

SEQ ID NO: 511894 - DNA, 55 bp, Artificial
  Synthetic oligonucleotide
aaggttctcattggcaaagggatgcgcattgtttctgcttactactccatgagtg

SEQ ID NO: 511895 - DNA, 53 bp, Artificial
  Synthetic oligonucleotide
cgtgaacagtacggtgactcgaaacctctggctggagcaaatattatgggctg

SEQ ID NO: 511896 - DNA, 53 bp, Artificial
  Synthetic oligonucleotide
tgggaaacactgtggttataaaagcctctgagctagcgcctgtaactttattg

SEQ ID NO: 511897 - DNA, 50 bp, Artificial
  Synthetic oligonucleotide
gttagaaaagtatggagtaccgtttagtagaacagaggacggtaagatct

SEQ ID NO: 511898 - DNA, 50 bp, Artificial
  Synthetic oligonucleotide
tattgcaggtccttgtcaattagagacagaacagcatgcaatggatatgg

SEQ ID NO: 511899 - DNA, 55 bp, Artificial
  Synthetic oligonucleotide
ttttgatcgtgcgtaaacgacgcttcgctgttctcgactaaaaggacgtccgctt

SEQ ID NO: 511900 - DNA, 55 bp, Artificial
  Synthetic oligonucleotide
tggatgaaaagctcgtggatcctgtgcagctaccagttgagtttcagtcataaaa

SEQ ID NO: 511901 - DNA, 55 bp, Artificial
  Synthetic oligonucleotide
tgagtgcgagtaggtcgttgaccaaatctgattcttggaccagggcatccgtcag

SEQ ID NO: 511902 - DNA, 55 bp, Artificial
  Synthetic oligonucleotide
tcactacaatttcaaacccactgggatcgttacaacccagattgatcggcaacgt

SEQ ID NO: 511903 - DNA, 55 bp, Artificial
  Synthetic oligonucleotide
tagccgtggatgtttgtgactgtcagaaaagtttggcaagtagtcgctctagtgc

SEQ ID NO: 511904 - DNA, 55 bp, Artificial
  Synthetic oligonucleotide
gtgtattcactcagtttgtaggtaggattcaacggagccgcggacatgtagctag

SEQ ID NO: 511905 - DNA, 55 bp, Artificial
  Synthetic oligonucleotide
gtagccatcctttccggttgctgcagatacccgagttggaaggttagatcacgtc

SEQ ID NO: 511906 - DNA, 55 bp, Artificial
  Synthetic oligonucleotide
ggtacaatcgtttctcctcttctgcgaataagggctaccagacagccttctggca

SEQ ID NO: 511907 - DNA, 55 bp, Artificial
  Synthetic oligonucleotide
gggttgctgaaatcagttccatacgccgtgctgtatcgattccataaagacaggg

SEQ ID NO: 511908 - DNA, 55 bp, Artificial
  Synthetic oligonucleotide
gccagtacctattacaccggtgctttgcagacagtgacgtatccgattgcaaatt

SEQ ID NO: 511909 - DNA, 55 bp, Artificial
  Synthetic oligonucleotide
gcatatcaattgtaatggcgtcgaatccagtgtgagccatcgtttccgctgtcca

SEQ ID NO: 511910 - DNA, 55 bp, Artificial
  Synthetic oligonucleotide
gaattacggaagaaaactttgaatacttggaagagcctgtcctccgcttggctgg

SEQ ID NO: 511911 - DNA, 55 bp, Artificial
  Synthetic oligonucleotide
gaacgtaagtgccgattcgaataattccactctcatccaggtttctcagcgcctc

SEQ ID NO: 511912 - DNA, 55 bp, Artificial
  Synthetic oligonucleotide
ctcgaagctttgatggttgggaagcctattattcaattcgatagaggagactttc

SEQ ID NO: 511913 - DNA, 55 bp, Artificial
  Synthetic oligonucleotide
ctcctggtgctactacctgcaactaagaatattccggaccaaatcgcctagatga

SEQ ID NO: 511914 - DNA, 55 bp, Artificial
  Synthetic oligonucleotide
ctacctgtaaagctacggattcagattcaagcacgttcagtccgccgactagagc

SEQ ID NO: 511915 - DNA, 55 bp, Artificial
  Synthetic oligonucleotide
cgttacgataaagactgagaatctcattttgtgcagaaagatcttcaacctgttc

SEQ ID NO: 511916 - DNA, 55 bp, Artificial
  Synthetic oligonucleotide
cgcccctaatgcctgctgtattcctgtgagtatattactcatctgtattcccctg

SEQ ID NO: 511917 - DNA, 55 bp, Artificial
  Synthetic oligonucleotide
cctgctggagaatgtacccgctttaattcttcaggagcaacaccttcatcacgta

SEQ ID NO: 511918 - DNA, 55 bp, Artificial
  Synthetic oligonucleotide
ccgtccggaagctttagtctttaaccggacagtaacccttcgggacacatgggcc

SEQ ID NO: 511919 - DNA, 55 bp, Artificial
  Synthetic oligonucleotide
ccctgctagttgcggcacctttcataatgattggaaacgcacttgaatcaaatac

SEQ ID NO: 511920 - DNA, 55 bp, Artificial
  Synthetic oligonucleotide
ccccaagctccaattcaaccgtctctgctacgatgtaaatctcagattctggcaa

SEQ ID NO: 511921 - DNA, 55 bp, Artificial
  Synthetic oligonucleotide
cccatggcgctcctctccgtaatcaatgaaggctgcttgaaatgagggctgtact

SEQ ID NO: 511922 - DNA, 55 bp, Artificial
  Synthetic oligonucleotide
cacatctccgatgcaatggtacctactgtttctgaccgtcgttttaatacgaaat

SEQ ID NO: 511923 - DNA, 55 bp, Artificial
  Synthetic oligonucleotide
agtagaacccaatatataacaccaatcgggttgttttacaagaaagtggggaggt

SEQ ID NO: 511924 - DNA, 55 bp, Artificial
  Synthetic oligonucleotide
aaggacaatgaagaatgggtgcgcaaaggggtggcccaaaacgcaaacacacccg

SEQ ID NO: 511925 - DNA, 55 bp, Artificial
  Synthetic oligonucleotide
aaagtccacggatcgaatggagcttgacttaatgcactcttatgcatcagactac

SEQ ID NO: 511926 - DNA, 53 bp, Artificial
  Synthetic oligonucleotide
gaggagaatttggggatagttacggtctccaggcaaaagcccattctgatgaa

SEQ ID NO: 511927 - DNA, 53 bp, Artificial
  Synthetic oligonucleotide
ttctgttgacgtggaacgccagcgtccgaatgtattttggatggaacagcttg

SEQ ID NO: 511928 - DNA, 55 bp, Artificial
  Synthetic oligonucleotide
ttatttcatccatgcgatattctgctcttgcagatagtaaatgcattcgagccgg

SEQ ID NO: 511929 - DNA, 55 bp, Artificial
  Synthetic oligonucleotide
tctttgctctctaaagcttgcattattgcaaatgcgccaaacatggttgtcgtgc

SEQ ID NO: 511930 - DNA, 55 bp, Artificial
  Synthetic oligonucleotide
tcgttataggaagagtgatcgccacaagaggaacttctttgagaaccattaatgc

SEQ ID NO: 511931 - DNA, 55 bp, Artificial
  Synthetic oligonucleotide
gtctcacgtctgaaacggttctatttctattatctgacattgcctctaccattat

SEQ ID NO: 511932 - DNA, 55 bp, Artificial
  Synthetic oligonucleotide
gtccctcattaattgtagctccccagttgggactttcagggtctagccctaagcc

SEQ ID NO: 511933 - DNA, 55 bp, Artificial
  Synthetic oligonucleotide
gtccaatttctttacctctctcccaaagcatgaaatgagagccgttcaccaatgg

SEQ ID NO: 511934 - DNA, 55 bp, Artificial
  Synthetic oligonucleotide
ggtgcatgggttccattaaagtcactttcgcaaggcacacagggtttatggaatt

SEQ ID NO: 511935 - DNA, 55 bp, Artificial
  Synthetic oligonucleotide
ggtagccaagagtttagtcatgagcacaaattatgtcaaagcaattgaatcgggt

SEQ ID NO: 511936 - DNA, 55 bp, Artificial
  Synthetic oligonucleotide
gcctcctctggaccataagaggtattcacagaagaaccaggaccttcaggatgca

SEQ ID NO: 511937 - DNA, 55 bp, Artificial
  Synthetic oligonucleotide
gcagaccctacaccgggtaacacatacgcatccatattctttagctctgtgattg

SEQ ID NO: 511938 - DNA, 55 bp, Artificial
  Synthetic oligonucleotide
gatgttataagagagcatcctgtaatgctaaatagagcaccgacacttcatagac

SEQ ID NO: 511939 - DNA, 55 bp, Artificial
  Synthetic oligonucleotide
gaaatgtgttctcacgaccataaagatacaacatctcttgatgagactaccccag

SEQ ID NO: 511940 - DNA, 55 bp, Artificial
  Synthetic oligonucleotide
ctggaccaggatgcataactattgcatcgcctttagcttgctctagtctttctga

SEQ ID NO: 511941 - DNA, 55 bp, Artificial
  Synthetic oligonucleotide
ctcggggaggagtctggtcatgagatcaatacctcagataccacatggatcttag

SEQ ID NO: 511942 - DNA, 55 bp, Artificial
  Synthetic oligonucleotide
ccttggctgaatggaataatgtccggtgtgtaaaactcattacggcattgcctgt

SEQ ID NO: 511943 - DNA, 55 bp, Artificial
  Synthetic oligonucleotide
ccttggcatgtcggaaagtcggcacaagctagagaagcataatttgtgctagtcc

SEQ ID NO: 511944 - DNA, 55 bp, Artificial
  Synthetic oligonucleotide
cattgggttctgtgatggttgatatggctggtaatcgagaaattcttggaactct

SEQ ID NO: 511945 - DNA, 55 bp, Artificial
  Synthetic oligonucleotide
agttttagctgagcctatgcacatatgtgattatcaaaggcctatcacggttgct

SEQ ID NO: 511946 - DNA, 55 bp, Artificial
  Synthetic oligonucleotide
agatggctaggtggaactcttacaaattggaaaaccattcgaggttctataagac

SEQ ID NO: 511947 - DNA, 55 bp, Artificial
  Synthetic oligonucleotide
acaaatatcatgaccaggagatggcctactaagttcagacccgatatctcgatac

SEQ ID NO: 511948 - DNA, 55 bp, Artificial
  Synthetic oligonucleotide
aattggggcgaacattcggaccccggtcttagtgagaatggagtatcgcaatcgc

SEQ ID NO: 511949 - DNA, 55 bp, Artificial
  Synthetic oligonucleotide
aactgccttcctttgtatcattccacaggtctaattcttggcctatgtgcctgta

SEQ ID NO: 511950 - DNA, 54 bp, Artificial
  Synthetic oligonucleotide
tatttcacacagtcttagcactgtctcaataggtgggttttcaacgcataatga

SEQ ID NO: 511951 - DNA, 53 bp, Artificial
  Synthetic oligonucleotide
gtgaatttgataatgcggccttaaacttgcactacctccaccaatgatttgag

SEQ ID NO: 511952 - DNA, 50 bp, Artificial
  Synthetic oligonucleotide
gcttcatcgacttcaacccaatcacactcttcccttgttgcagcaatttt

SEQ ID NO: 511953 - DNA, 55 bp, Artificial
  Synthetic oligonucleotide
acgccccaaatccggtgcccgaccgctcaacacggcgctgcctgctgcagttgaa

SEQ ID NO: 511954 - DNA, 55 bp, Artificial
  Synthetic oligonucleotide
ttcctgcgccctactaccggttgatttatggcgacagtgatttgctgccgggcct

SEQ ID NO: 511955 - DNA, 55 bp, Artificial
  Synthetic oligonucleotide
ccattgcgcattctccgaaatgtatggcgttatattcgttattgattgccgcggt

SEQ ID NO: 511956 - DNA, 55 bp, Artificial
  Synthetic oligonucleotide
ccctctttgtaaatcaccacttccaatgagtactgatcgggtttgtccggtgtgg

SEQ ID NO: 511957 - DNA, 55 bp, Artificial
  Synthetic oligonucleotide
ccgaaaagtgtagctgttgcgcatcgatccccgactggcccagtggcagcttgtg

SEQ ID NO: 511958 - DNA, 55 bp, Artificial
  Synthetic oligonucleotide
cgactcaaagaaccctgggtccagccaccacctgcgcatttgcgcgccaaaccga

SEQ ID NO: 511959 - DNA, 55 bp, Artificial
  Synthetic oligonucleotide
cggagtggcgatcgaaggtgcttcgggcaaccagctgctgttatcaggtgacctg

SEQ ID NO: 511960 - DNA, 55 bp, Artificial
  Synthetic oligonucleotide
ttccgactcgccgcggaaaacatactggccactgtagggaattttcaacacgtcc

SEQ ID NO: 511961 - DNA, 55 bp, Artificial
  Synthetic oligonucleotide
gcgaataggaccggtgccacaccctttgcggcttggaagtggatggccgctccaa

SEQ ID NO: 511962 - DNA, 55 bp, Artificial
  Synthetic oligonucleotide
ggtcagaatgcttggactgtgccacttgactgaaaacggcttgggcgggcatacc

SEQ ID NO: 511963 - DNA, 55 bp, Artificial
  Synthetic oligonucleotide
ggtgcgcctgtagagggttcagccgccgatggtgacacagcagcggtattccgta

SEQ ID NO: 511964 - DNA, 55 bp, Artificial
  Synthetic oligonucleotide
tattccagggtggcgatgctaccagcgtaaacctgggcgttactcagattaccgt

SEQ ID NO: 511965 - DNA, 55 bp, Artificial
  Synthetic oligonucleotide
tcggatgtggataatgcgaccttaaccggtgccagaatccagattacaaacgtgg

SEQ ID NO: 511966 - DNA, 54 bp, Artificial
  Synthetic oligonucleotide
ttttcactggtaagccattacaacagcggggcaatcaccagacttacaatggcc

SEQ ID NO: 511967 - DNA, 53 bp, Artificial
  Synthetic oligonucleotide
caattggtgaagtgtcgacattggccatcctgctgggtggtgtagtgctcgtc

SEQ ID NO: 511968 - DNA, 52 bp, Artificial
  Synthetic oligonucleotide
gaaacgcccatcgtgctggtaggccccgatgctgccaccgtgaaagcgcgac

SEQ ID NO: 511969 - DNA, 51 bp, Artificial
  Synthetic oligonucleotide
ccatattgttgggcggctggttggtgagcagtaaagcaatggaacccaagt

SEQ ID NO: 511970 - DNA, 55 bp, Artificial
  Synthetic oligonucleotide
tgacctccgcacgacggccatcggtctcaacgatctgagcggttccacgatcagg

SEQ ID NO: 511971 - DNA, 55 bp, Artificial
  Synthetic oligonucleotide
aggccgcaaatccatggtggggacttgcgctgcgggaatagagaaggcgcatggg

SEQ ID NO: 511972 - DNA, 55 bp, Artificial
  Synthetic oligonucleotide
tctcgactttcatttaggaaaagccttcagtacggttggagatatcattccaccc

SEQ ID NO: 511973 - DNA, 55 bp, Artificial
  Synthetic oligonucleotide
caccagctctagatcgagacactgcacaaccagttcaaccgagcgactcagctgc

SEQ ID NO: 511974 - DNA, 55 bp, Artificial
  Synthetic oligonucleotide
cctcgttcgatcgctatggtcatgaaagcaacgagatttgtgtgaccagctacgt

SEQ ID NO: 511975 - DNA, 55 bp, Artificial
  Synthetic oligonucleotide
ctctcctatctgcagtccatcgaggccagacatcggaaccagcaaatggcgcaag

SEQ ID NO: 511976 - DNA, 55 bp, Artificial
  Synthetic oligonucleotide
gacgacctctaccgaaatcttgttgcttccactcttcacctacaagatcacttgt

SEQ ID NO: 511977 - DNA, 55 bp, Artificial
  Synthetic oligonucleotide
gagttgattgagtgatgaatcaacgttgaaaccatccggtgagtgcaacggctaa

SEQ ID NO: 511978 - DNA, 55 bp, Artificial
  Synthetic oligonucleotide
gggttgtccaaccctgttcatcggacgacgacggagtgaggcatcaccggtcaac

SEQ ID NO: 511979 - DNA, 55 bp, Artificial
  Synthetic oligonucleotide
gcaagggattttctcaatttattcgatttggcaccaatgttctcgctggggtgcc

SEQ ID NO: 511980 - DNA, 55 bp, Artificial
  Synthetic oligonucleotide
ggggttacgtgagggtttggagcagggtccggctggctgcttccggatcattgga

SEQ ID NO: 511981 - DNA, 55 bp, Artificial
  Synthetic oligonucleotide
ggctcaacgtgaatcctgcaggcatctgacttagccagttctgcgtccgcagcac

SEQ ID NO: 511982 - DNA, 54 bp, Artificial
  Synthetic oligonucleotide
gcccaaagagcaatttcggcgcgatattccaacatatgggcgtattccgtgcct

SEQ ID NO: 511983 - DNA, 54 bp, Artificial
  Synthetic oligonucleotide
gatcacgcctgccctggagtgggttgatggcctgaaggcgatgcctgaagccaa

SEQ ID NO: 511984 - DNA, 53 bp, Artificial
  Synthetic oligonucleotide
caacgcctccagcaatcccacctgcttgccattcactagcggctgatatgcca

SEQ ID NO: 511985 - DNA, 53 bp, Artificial
  Synthetic oligonucleotide
acgcgagcggaatctcataactgatcgattgggctgccgcacgaagacctccc

SEQ ID NO: 511986 - DNA, 52 bp, Artificial
  Synthetic oligonucleotide
gctgaaccgtgacccgatcttgccaacgtgacgctccttcaagaatggcgtc

SEQ ID NO: 511987 - DNA, 55 bp, Artificial
  Synthetic oligonucleotide
ttcggcctaatggccgcgggagaggcgaatgcggtactcatgcgtgcgtgaatcc

SEQ ID NO: 511988 - DNA, 55 bp, Artificial
  Synthetic oligonucleotide
tggtcaaccgtggactcatgggacctccatcctcagctcggtgagcctggctagc

SEQ ID NO: 511989 - DNA, 55 bp, Artificial
  Synthetic oligonucleotide
tcgtacataaactacccgattgtattgcgctgctaacctttcggtcgttgcgcct

SEQ ID NO: 511990 - DNA, 55 bp, Artificial
  Synthetic oligonucleotide
tcgcgacagattcggtttacaagctccgcccatactgtcctcccgggtgccacga

SEQ ID NO: 511991 - DNA, 55 bp, Artificial
  Synthetic oligonucleotide
tatcccaacgacaccctggcttatattggttggctgcttcccaccgcgcatggga

SEQ ID NO: 511992 - DNA, 55 bp, Artificial
  Synthetic oligonucleotide
ggcgggtaagtgacggtgtccttcgactggatgtcgtggtcggtgcttggcttgg

SEQ ID NO: 511993 - DNA, 55 bp, Artificial
  Synthetic oligonucleotide
gcatacgaactgccttccttggacgtacgaacctggagccgaagcacgacgagga

SEQ ID NO: 511994 - DNA, 55 bp, Artificial
  Synthetic oligonucleotide
cgcccagagcggacatcccagccgccccgaacgtaccgcttagtctactttaagc

SEQ ID NO: 511995 - DNA, 55 bp, Artificial
  Synthetic oligonucleotide
ccttgcgggtggtaacgggtgtcggtgaaacgggaatcctaccgaaggcctaggg

SEQ ID NO: 511996 - DNA, 55 bp, Artificial
  Synthetic oligonucleotide
ccgctcttcgatggacgattccagtgacatcggtttcttcctcctcggaactccg

SEQ ID NO: 511997 - DNA, 55 bp, Artificial
  Synthetic oligonucleotide
ccccgaaaggctgtcgatccgggatgcggcacagttagtatcaacgcgtcaccat

SEQ ID NO: 511998 - DNA, 55 bp, Artificial
  Synthetic oligonucleotide
catcgcacctccagtagttggtgcctaactgtattcccgccccgcgaggcctcct

SEQ ID NO: 511999 - DNA, 55 bp, Artificial
  Synthetic oligonucleotide
aggaccggcgactactcgagcgaagcgcaaccgttggcccagacgagagccactt

SEQ ID NO: 512000 - DNA, 55 bp, Artificial
  Synthetic oligonucleotide
agccatcggccctctccttaaatccgtgagtcgatcgaaccgtgccacccctcga

SEQ ID NO: 512001 - DNA, 55 bp, Artificial
  Synthetic oligonucleotide
acaggattgtggatcacatattctgggcacgaacttcgacgcaaccaggcaaaat

SEQ ID NO: 512002 - DNA, 54 bp, Artificial
  Synthetic oligonucleotide
ggtcatctacctggctctcatggtcgcgattggcctgtggagtttcaggaaaac

SEQ ID NO: 512003 - DNA, 51 bp, Artificial
  Synthetic oligonucleotide
agtcactctcctgggatcacattgccgatgctctcgcatgatgattacggg

SEQ ID NO: 512004 - DNA, 55 bp, Artificial
  Synthetic oligonucleotide
tggactgagaaagcgttaattgcactacgcccgtagaaactttgaactagtgcta

SEQ ID NO: 512005 - DNA, 55 bp, Artificial
  Synthetic oligonucleotide
ggtgtaactctttcagatgaatttcaacttcaccccgagcaatcaacctcttcaa

SEQ ID NO: 512006 - DNA, 55 bp, Artificial
  Synthetic oligonucleotide
ggtaagagtgaccaagcatttgatcgagcaatctatgagatggggttaaatgctg

SEQ ID NO: 512007 - DNA, 55 bp, Artificial
  Synthetic oligonucleotide
gggactgtagcctcgcttacaactgagttaattagttgagcacttccacgtggaa

SEQ ID NO: 512008 - DNA, 55 bp, Artificial
  Synthetic oligonucleotide
ggatgggtgtttgggcagatcctgcttataaatacttggcttatccagtcttagg

SEQ ID NO: 512009 - DNA, 55 bp, Artificial
  Synthetic oligonucleotide
ctcctgggtaacgtgaggtaaatggagttagccaaagtccggcaggtgctagtgc

SEQ ID NO: 512010 - DNA, 55 bp, Artificial
  Synthetic oligonucleotide
cgacaggcggtatctgctgcccttggaaaacagttggatcaggatctacccctac

SEQ ID NO: 512011 - DNA, 55 bp, Artificial
  Synthetic oligonucleotide
ccgctttagttgatgaatagctttcgcagctaaatacccactgctcattgcaccc

SEQ ID NO: 512012 - DNA, 55 bp, Artificial
  Synthetic oligonucleotide
cccgaataggtccgcgtgtgcctagaatctactcccgtgagtaacgaaactttac

SEQ ID NO: 512013 - DNA, 55 bp, Artificial
  Synthetic oligonucleotide
ccaggatgggaagggttctcccttcttcagctgcgttttaggcagttgggcaagg

SEQ ID NO: 512014 - DNA, 55 bp, Artificial
  Synthetic oligonucleotide
ccacttcttgccacacaaggcgcgaacaggttttccagttactgcagattcagtg

SEQ ID NO: 512015 - DNA, 55 bp, Artificial
  Synthetic oligonucleotide
ccacaagtggcaatctagtaaatccaccaggaagtcccattagattcagtgccgc

SEQ ID NO: 512016 - DNA, 55 bp, Artificial
  Synthetic oligonucleotide
catcaattgcctcatctaataaagcaccatcggtataaccaagtaaggcaactgc

SEQ ID NO: 512017 - DNA, 55 bp, Artificial
  Synthetic oligonucleotide
caccagaccacaacataggagatgtgttgccaataaaagccaggcaggcgctgag

SEQ ID NO: 512018 - DNA, 55 bp, Artificial
  Synthetic oligonucleotide
agagggcgaaactgttactgaaactagatgcggtattggttatttacataccggt

SEQ ID NO: 512019 - DNA, 55 bp, Artificial
  Synthetic oligonucleotide
aaccggcacaaagtatttagttaaaagtggaacggtaaccaaagtatgacgcgtg

SEQ ID NO: 512020 - DNA, 53 bp, Artificial
  Synthetic oligonucleotide
ttgggttatgcgaaatgcagacaaactctcgatcgatctaggggctattggaa

SEQ ID NO: 512021 - DNA, 55 bp, Artificial
  Synthetic oligonucleotide
gatgactgccgctatgacagtttattaacggacgcttttgatccgacattggccg

SEQ ID NO: 512022 - DNA, 55 bp, Artificial
  Synthetic oligonucleotide
gaggctactcgtattctggtagcgctcagtattgtcatacggataatgcggccga

SEQ ID NO: 512023 - DNA, 55 bp, Artificial
  Synthetic oligonucleotide
gactctatccttagtatcgcggccaataggctcgtcaatcgttcctccggcaacc

SEQ ID NO: 512024 - DNA, 55 bp, Artificial
  Synthetic oligonucleotide
gacgagagtctgagcgaccataaccgtcagttcctaaaacctcataatgtgccgg

SEQ ID NO: 512025 - DNA, 55 bp, Artificial
  Synthetic oligonucleotide
gaccggttgccaacagttgttccggtccaaacgtgtgatcaactcgagcgacctc

SEQ ID NO: 512026 - DNA, 55 bp, Artificial
  Synthetic oligonucleotide
gacccaaactctttgcaatcgatattcaactaccagaaatgctttacagcgatgt

SEQ ID NO: 512027 - DNA, 55 bp, Artificial
  Synthetic oligonucleotide
gaattggttatcgatgagcgccacttagggcttatgccggcgaatgagtcgactc

SEQ ID NO: 512028 - DNA, 55 bp, Artificial
  Synthetic oligonucleotide
gaaggtcgagtagattttggtgcggcaagagggattaatgagcgcgttactttgc

SEQ ID NO: 512029 - DNA, 55 bp, Artificial
  Synthetic oligonucleotide
cttttgccaatagccttttgcgatagagggtagcttaatgagcatttcgcccggc

SEQ ID NO: 512030 - DNA, 55 bp, Artificial
  Synthetic oligonucleotide
ctttcactaccctggagtttatagtggctcctacggctggctagttttgatagcc

SEQ ID NO: 512031 - DNA, 55 bp, Artificial
  Synthetic oligonucleotide
ctggcgaagatagactagcaaccctgctgctagactcagcaacagtcgccggaaa

SEQ ID NO: 512032 - DNA, 55 bp, Artificial
  Synthetic oligonucleotide
ctcgcttccgtctgagccagagcaggcgtcgtcaaactcaaaagtgacccaaggg

SEQ ID NO: 512033 - DNA, 55 bp, Artificial
  Synthetic oligonucleotide
ctcgctgtcagctaccaggcccgccgataggcagtgcttgctctatggggctaac

SEQ ID NO: 512034 - DNA, 55 bp, Artificial
  Synthetic oligonucleotide
ctcaagcacccatcgataaggatggtgttagtcgtatgcacaagcttgaaagaaa

SEQ ID NO: 512035 - DNA, 55 bp, Artificial
  Synthetic oligonucleotide
cgtgcctttattatggcaagcgtggtgtttatctcaattattctgagacgccatc

SEQ ID NO: 512036 - DNA, 55 bp, Artificial
  Synthetic oligonucleotide
cgtcatcctctgggttcggagatgtccaagtttgaatgtcatcaagccaagttcc

SEQ ID NO: 512037 - DNA, 55 bp, Artificial
  Synthetic oligonucleotide
cggtgtttaagggttctatgatgtggtgaagtgtcatgcagtgcaagccttacac

SEQ ID NO: 512038 - DNA, 55 bp, Artificial
  Synthetic oligonucleotide
ttgcgtggatttcagagcattgggatatcaagcgggtacttgttaatttgggttt

SEQ ID NO: 512039 - DNA, 55 bp, Artificial
  Synthetic oligonucleotide
tggtaatgcccgacctgaagaaacgattgagtttatccgcactcacaatatcccg

SEQ ID NO: 512040 - DNA, 55 bp, Artificial
  Synthetic oligonucleotide
tgagatgccactctcatcatgcgctgactcgccattgataacaaaaccacctgtg

SEQ ID NO: 512041 - DNA, 55 bp, Artificial
  Synthetic oligonucleotide
gtggggtaacgtgttatgccacagtcaccagtattatcaaacttaagagtcggcc

SEQ ID NO: 512042 - DNA, 55 bp, Artificial
  Synthetic oligonucleotide
gtgacgctccattgttagttgaaggttaaccatgctgggtgctagataagacagc

SEQ ID NO: 512043 - DNA, 55 bp, Artificial
  Synthetic oligonucleotide
ggttggccaacgattacctatggacgcaactacgggatcggcactgccatcggag

SEQ ID NO: 512044 - DNA, 55 bp, Artificial
  Synthetic oligonucleotide
ggtcatgccatgcataggcagttgattgggtcagcaaggtaaatcgctcactatc

SEQ ID NO: 512045 - DNA, 55 bp, Artificial
  Synthetic oligonucleotide
ggtcagattagctaccgacgtatgagatcttgtagatcgcgccagcgtaatcgtc

SEQ ID NO: 512046 - DNA, 55 bp, Artificial
  Synthetic oligonucleotide
ggcttagcgactgatccctctaactcttcaggcacaaactacgcggttggtggct

SEQ ID NO: 512047 - DNA, 55 bp, Artificial
  Synthetic oligonucleotide
ggctgctcgagacgatgtcgctaattagtttgctgtactggggaagcgctgcagc

SEQ ID NO: 512048 - DNA, 55 bp, Artificial
  Synthetic oligonucleotide
ggcggcagctagaaaagcaaccttagattatggaaacgctgttcgtaatcacggc

SEQ ID NO: 512049 - DNA, 55 bp, Artificial
  Synthetic oligonucleotide
ggccaccgtcgcgattcaaggagcgactcagggtaatgaccgccaagatattgta

SEQ ID NO: 512050 - DNA, 55 bp, Artificial
  Synthetic oligonucleotide
ggcacgcgattgtggcttatgaaacgcagcagtacctgcctatagttagggacgg

SEQ ID NO: 512051 - DNA, 55 bp, Artificial
  Synthetic oligonucleotide
gctgaaggtcttgatgggttacaagacatgatacgaaatcatgtggcttgggcgc

SEQ ID NO: 512052 - DNA, 55 bp, Artificial
  Synthetic oligonucleotide
gcgtcagcaacgtgcgcaagacccgtgtcaaccgaaaccactgcgcgggcatttg

SEQ ID NO: 512053 - DNA, 55 bp, Artificial
  Synthetic oligonucleotide
gccgatagtagtcaagcgaaattcgacaccataggccgtagctacgcccacagtg

SEQ ID NO: 512054 - DNA, 55 bp, Artificial
  Synthetic oligonucleotide
gcccggggcggactaggtgactatcaaactattggccgtgaagccatgctaacca

SEQ ID NO: 512055 - DNA, 55 bp, Artificial
  Synthetic oligonucleotide
gattacgctggttcaacccagttctcgggagctttctcggtcaactcgcagagtc

SEQ ID NO: 512056 - DNA, 55 bp, Artificial
  Synthetic oligonucleotide
aaccctattgaaacactctgttgggtgtcatcagtggcagtggtaccatgcgttt

SEQ ID NO: 512057 - DNA, 55 bp, Artificial
  Synthetic oligonucleotide
acatccctcaccagtttggtgaaaccatgagagagatcattgaaagagtgccaaa

SEQ ID NO: 512058 - DNA, 55 bp, Artificial
  Synthetic oligonucleotide
acgtaggctgtgctctccgtttgatacctcgccgagtgttgcacggcattccgcg

SEQ ID NO: 512059 - DNA, 55 bp, Artificial
  Synthetic oligonucleotide
agacttccatgctgggatcataggtaaaacgattgcgaactacgatgcgatcacc

SEQ ID NO: 512060 - DNA, 55 bp, Artificial
  Synthetic oligonucleotide
attgaaatgttgatcgatacagtggacgaaagcctccttgcggcgcgtgctgatg

SEQ ID NO: 512061 - DNA, 55 bp, Artificial
  Synthetic oligonucleotide
atttggtcgtgtgtatgctcggcacttaatgttattcttaagcgtgcggtgtctt

SEQ ID NO: 512062 - DNA, 55 bp, Artificial
  Synthetic oligonucleotide
caagagatcccgttttaagcggatgatattgcaatttattctcgtcgaaacattg

SEQ ID NO: 512063 - DNA, 55 bp, Artificial
  Synthetic oligonucleotide
caagattcgcctgcatgatatcgacgatccgttgccgtgactcacgactggccca

SEQ ID NO: 512064 - DNA, 55 bp, Artificial
  Synthetic oligonucleotide
caccgataatgaagcattggttctcgattgccctagctattaacaaattttgcca

SEQ ID NO: 512065 - DNA, 55 bp, Artificial
  Synthetic oligonucleotide
caccggtaggcgctatcccaaggcttttaaatatacgccagtagagcgcaacatc

SEQ ID NO: 512066 - DNA, 55 bp, Artificial
  Synthetic oligonucleotide
cagaggcaatggctaataagttaatggcatcagtgttgttttgtttgccgaacac

SEQ ID NO: 512067 - DNA, 55 bp, Artificial
  Synthetic oligonucleotide
cataacggtcattttgttaccggcatgaataaccgcattgtttggggtctcccac

SEQ ID NO: 512068 - DNA, 55 bp, Artificial
  Synthetic oligonucleotide
catcgaagtaactcgaacgcacctgccaaaagacgtgcacccaagcaaggaccgc

SEQ ID NO: 512069 - DNA, 55 bp, Artificial
  Synthetic oligonucleotide
cattgacacgcaaagcacaaacatcgttaatcatactagcacctgactcaacggc

SEQ ID NO: 512070 - DNA, 55 bp, Artificial
  Synthetic oligonucleotide
ccgaatccgttgattcccaactgccatcactttcacgttgtgtgaggcaagaagc

SEQ ID NO: 512071 - DNA, 55 bp, Artificial
  Synthetic oligonucleotide
ccgccttgaatttgcgccatggcaatagacctgtcaagtatgggactgaaataac

SEQ ID NO: 512072 - DNA, 55 bp, Artificial
  Synthetic oligonucleotide
cgggtagccgcaaagaaatggttttcgttgagggcttcaggtttggaaggatcgc

SEQ ID NO: 512073 - DNA, 55 bp, Artificial
  Synthetic oligonucleotide
cggattcctaagcgcctaggcattgcttggtggagccttctggggttggagtggt

SEQ ID NO: 512074 - DNA, 55 bp, Artificial
  Synthetic oligonucleotide
cggaacccttccttctcctcgcgcacatagcgaacacccaaggtagtgcgtaagg

SEQ ID NO: 512075 - DNA, 55 bp, Artificial
  Synthetic oligonucleotide
cgctcagcgcttgccttacgcttggtagtatcgaggctgtgtttcacttttgtta

SEQ ID NO: 512076 - DNA, 55 bp, Artificial
  Synthetic oligonucleotide
cgctcactcaccattcgaccttagtcgagcagccgttaaaacgtgtatttcgcac

SEQ ID NO: 512077 - DNA, 55 bp, Artificial
  Synthetic oligonucleotide
cgctacaccgccagcttcggtagagccgtatccagtgccacgggctaacttgagc

SEQ ID NO: 512078 - DNA, 55 bp, Artificial
  Synthetic oligonucleotide
cgcatccataaagagcttcccagttatgctaaccttagcgcctgagtgtatttcc

SEQ ID NO: 512079 - DNA, 55 bp, Artificial
  Synthetic oligonucleotide
cgactcactgttgaacctctgcgccagaaatgcgctcttgagtcagtgcatcccg

SEQ ID NO: 512080 - DNA, 55 bp, Artificial
  Synthetic oligonucleotide
cgacgtttcggtgggcgagacgaagaataataatgcggccattacagattaaggg

SEQ ID NO: 512081 - DNA, 55 bp, Artificial
  Synthetic oligonucleotide
cgaactcgcatgactgttacctagctttgagaggattaagaacactccaagttcg

SEQ ID NO: 512082 - DNA, 55 bp, Artificial
  Synthetic oligonucleotide
cctgagaggccgctgaacgctggataggagacggcaaacgctaagactggtgctt

SEQ ID NO: 512083 - DNA, 55 bp, Artificial
  Synthetic oligonucleotide
cctcagctttacaatatgaacctcaccagttagcttattatttacgtgaattggc

SEQ ID NO: 512084 - DNA, 55 bp, Artificial
  Synthetic oligonucleotide
cctcaaggatctcacgagcagatcgcatcatatctgtcccaccggaacaatgaac

SEQ ID NO: 512085 - DNA, 55 bp, Artificial
  Synthetic oligonucleotide
ccggctacaaaccaagtgattggtcatgttgtggagtgcgacgaatccacagttt

SEQ ID NO: 512086 - DNA, 55 bp, Artificial
  Synthetic oligonucleotide
ccggcgccattatgtcgaataacagttggcccgagcgaatcgacaggtcttacta

SEQ ID NO: 512087 - DNA, 55 bp, Artificial
  Synthetic oligonucleotide
ccgctgatagctaacctaaaaggttgacctactttgccaaaacctatattacgac

SEQ ID NO: 512088 - DNA, 54 bp, Artificial
  Synthetic oligonucleotide
gaaagcgttctttatagacggcatgcttgatcgagatgcctaaatgcttcggaa

SEQ ID NO: 512089 - DNA, 54 bp, Artificial
  Synthetic oligonucleotide
aatgtgcctcagcgtagtccggtttaatcgcgagtgccttctcataacacttaa

SEQ ID NO: 512090 - DNA, 53 bp, Artificial
  Synthetic oligonucleotide
taacatttctccagatgtggtgaatccaaaacgtcttcctagcatccattgtc

SEQ ID NO: 512091 - DNA, 52 bp, Artificial
  Synthetic oligonucleotide
ggacgaaacactggcttatcagagaagcagaacttgcacctgagattacagc

SEQ ID NO: 512092 - DNA, 52 bp, Artificial
  Synthetic oligonucleotide
taaggtgtgttcattgtcatcggtgatggggccatcggagccaggtaccgtc

SEQ ID NO: 512093 - DNA, 52 bp, Artificial
  Synthetic oligonucleotide
aacgattggacctctagtttgtgacgcacttagaagtcatggcgtaacagct

SEQ ID NO: 512094 - DNA, 51 bp, Artificial
  Synthetic oligonucleotide
ataaatagtgattagaaccaagcgcgaataccggctacccattgcagtgct

SEQ ID NO: 512095 - DNA, 55 bp, Artificial
  Synthetic oligonucleotide
ttatcttaacatttccagaagtcgtggagacgaacgcttttatcgggtctgcccc

SEQ ID NO: 512096 - DNA, 55 bp, Artificial
  Synthetic oligonucleotide
tgaccaccccacttggctatatgcgcgcccgctcaagcacagatggcctttatgc

SEQ ID NO: 512097 - DNA, 55 bp, Artificial
  Synthetic oligonucleotide
gggttcaggtggataagctgactcctgatgagttggtggatatctggcctctggc

SEQ ID NO: 512098 - DNA, 55 bp, Artificial
  Synthetic oligonucleotide
gcgcttcataaccagccccttaccaacatgggcctctttaaccaccaaacgatca

SEQ ID NO: 512099 - DNA, 55 bp, Artificial
  Synthetic oligonucleotide
gcctctatcgttgatgataacctgtatgaaggggatgagaccgttattgtgacgc

SEQ ID NO: 512100 - DNA, 55 bp, Artificial
  Synthetic oligonucleotide
gcaatatggttacggctttccttggaacgctggtgggcaatccgtggacctttcc

SEQ ID NO: 512101 - DNA, 55 bp, Artificial
  Synthetic oligonucleotide
gagattgtctggcttttgctttagtgacaggaacttagtataccctaactcacgt

SEQ ID NO: 512102 - DNA, 55 bp, Artificial
  Synthetic oligonucleotide
ccatccagcaacagatcccctttccgcactgtatcgccttcattcactgccagtg

SEQ ID NO: 512103 - DNA, 55 bp, Artificial
  Synthetic oligonucleotide
cagcgttaccagaacagatgtcagcaggtgaccgtctatcagtcccgtcattcca

SEQ ID NO: 512104 - DNA, 55 bp, Artificial
  Synthetic oligonucleotide
cacataagcctgattcggctaatccgtctccggccagcctgaggggtgtgcctgt

SEQ ID NO: 512105 - DNA, 55 bp, Artificial
  Synthetic oligonucleotide
atgcgtctcgcctgtctctatgcgagccgggcccagggacatagctggccaaatc

SEQ ID NO: 512106 - DNA, 54 bp, Artificial
  Synthetic oligonucleotide
tgatcggggataaacatcacccagatgctcacctaaacacaggccgggttgata

SEQ ID NO: 512107 - DNA, 53 bp, Artificial
  Synthetic oligonucleotide
cgcatgtgtctgacgctattgcagaggcagatgtcattttggcggttaatgca

SEQ ID NO: 512108 - DNA, 52 bp, Artificial
  Synthetic oligonucleotide
caacatgggctcagccttcaatctgctgctgaatcctatattcttttgtcga

SEQ ID NO: 512109 - DNA, 51 bp, Artificial
  Synthetic oligonucleotide
ttcatttgccgccagctgttcccagaaagagacaggacgggtgtcggtaaa

SEQ ID NO: 512110 - DNA, 50 bp, Artificial
  Synthetic oligonucleotide
cggtatttgtggaatctgaaagctcacgcatcggcaatcttcagatcccc

SEQ ID NO: 512111 - DNA, 50 bp, Artificial
  Synthetic oligonucleotide
cggcaccccaacctgttcaacgatatctttcgcacagcccaaaatcactg

SEQ ID NO: 512112 - DNA, 55 bp, Artificial
  Synthetic oligonucleotide
ggacacgaccaaacagattacctcgctggaaaatggaatccctccaaggtcgagc

SEQ ID NO: 512113 - DNA, 55 bp, Artificial
  Synthetic oligonucleotide
gcggcgtcccgccgatcgttaccgaatattccttctccaaagtcaaatagcctcc

SEQ ID NO: 512114 - DNA, 55 bp, Artificial
  Synthetic oligonucleotide
gacgcaaccttgaactgtcttagacgctttgtcatgacgaacgacacttccttcc

SEQ ID NO: 512115 - DNA, 55 bp, Artificial
  Synthetic oligonucleotide
gaccccagacggctacgccacgtaccgcatcgctccgggcgcggatttctcaaag

SEQ ID NO: 512116 - DNA, 55 bp, Artificial
  Synthetic oligonucleotide
cttcccaagtccggggagtagtcccctctcgagcgggataatgcacggttctcga

SEQ ID NO: 512117 - DNA, 55 bp, Artificial
  Synthetic oligonucleotide
ctgtaacgcggttttcatggattctaggctctatatgtggtgccatatgtggagg

SEQ ID NO: 512118 - DNA, 55 bp, Artificial
  Synthetic oligonucleotide
ctgacgccctgtcacctgcgtcgggtcctcctcatgattatacaggcaccgaccg

SEQ ID NO: 512119 - DNA, 55 bp, Artificial
  Synthetic oligonucleotide
cgtcctgaagggctgcgacgagtacctccgctttgtcatgctgaccggcatctcc

SEQ ID NO: 512120 - DNA, 55 bp, Artificial
  Synthetic oligonucleotide
cgggataacgattatgattgcggaagcgccgatggccttttcctgacgtgggacg

SEQ ID NO: 512121 - DNA, 55 bp, Artificial
  Synthetic oligonucleotide
cgggacgggccacgctgtcctgcgagttctatgacgagtgggagatatcgggctt

SEQ ID NO: 512122 - DNA, 55 bp, Artificial
  Synthetic oligonucleotide
cgaagtgcttctgaactttccccaggtcccacgcttctccgttttcagcatagcg

SEQ ID NO: 512123 - DNA, 55 bp, Artificial
  Synthetic oligonucleotide
ccccgaaggggtggagttcaagccgatccaagaggtatatcaaaggctaaggggc

SEQ ID NO: 512124 - DNA, 55 bp, Artificial
  Synthetic oligonucleotide
attgggtgggaacgatgagcgaagtgacgcttgcggagcttgccccgggtgagtc

SEQ ID NO: 512125 - DNA, 55 bp, Artificial
  Synthetic oligonucleotide
aaccatacgcaagtagatgccttctgcgtcattcttcattcgacctaacggacta

SEQ ID NO: 512126 - DNA, 54 bp, Artificial
  Synthetic oligonucleotide
tcgtttcgggcttcgtggggaaacgctgaggtgcagtatggtacgttgacccga

SEQ ID NO: 512127 - DNA, 53 bp, Artificial
  Synthetic oligonucleotide
aacgttgacgtcatcgacgcaaaacaggccttgattcagacgcacgcagctta

SEQ ID NO: 512128 - DNA, 51 bp, Artificial
  Synthetic oligonucleotide
cccatagatccgttcgccgtcgcagtaggcggagaagggcgcgtgcgtcca

SEQ ID NO: 512129 - DNA, 55 bp, Artificial
  Synthetic oligonucleotide
gcaaaatagccgccgcgtggtgatcccgagtaataccctcctttgttcacttcga

SEQ ID NO: 512130 - DNA, 55 bp, Artificial
  Synthetic oligonucleotide
gcacggtgctatgacgcgatttcctttccaagctaatacttatggattacccatc

SEQ ID NO: 512131 - DNA, 55 bp, Artificial
  Synthetic oligonucleotide
gcaggcgcctttagcgagtgcgaggatcttacttccatcaccctaccaagtggac

SEQ ID NO: 512132 - DNA, 55 bp, Artificial
  Synthetic oligonucleotide
gcagggaggttctcagatttggtgtacgggagcttcggggctaatacgtcgtgac

SEQ ID NO: 512133 - DNA, 55 bp, Artificial
  Synthetic oligonucleotide
gcgaccatggcctcagtaaccaataaaggtgcgggtttacccggaattagtgccg

SEQ ID NO: 512134 - DNA, 55 bp, Artificial
  Synthetic oligonucleotide
gcgcctgatctaaccgtgggaaagaccactactcaggcaattctgagggatgaac

SEQ ID NO: 512135 - DNA, 55 bp, Artificial
  Synthetic oligonucleotide
gcgtatctgtgcagctgtttgtgcaccttgcattttagtttctgaattacctgat

SEQ ID NO: 512136 - DNA, 55 bp, Artificial
  Synthetic oligonucleotide
ggatccaattctttgagcgttcgctctatgagtggggccgcgtccttctgatcgc

SEQ ID NO: 512137 - DNA, 55 bp, Artificial
  Synthetic oligonucleotide
ggctaaggcttccctttcctccgttacgcttgggatcaccttcgatctttcccgc

SEQ ID NO: 512138 - DNA, 55 bp, Artificial
  Synthetic oligonucleotide
gggtcccatcaccctttgcgaacaccccgtccaaagaaagatcaaatcgtcactc

SEQ ID NO: 512139 - DNA, 55 bp, Artificial
  Synthetic oligonucleotide
gttaccgtactactgcaccggtcacaagtagagccaggttcagtttcgttggatc

SEQ ID NO: 512140 - DNA, 55 bp, Artificial
  Synthetic oligonucleotide
gttgtgaaggtccctacccctgcgccaggattaaaggtcgcattaaccccaaccg

SEQ ID NO: 512141 - DNA, 55 bp, Artificial
  Synthetic oligonucleotide
gttttgacgctaagcatgagaggctcaatgcatataggaaaataaggcaccgcat

SEQ ID NO: 512142 - DNA, 55 bp, Artificial
  Synthetic oligonucleotide
tacgcggaggaaagcaagatatgtatgagggcggaatccgagtccccgcttgtgc

SEQ ID NO: 512143 - DNA, 55 bp, Artificial
  Synthetic oligonucleotide
tatccctctgaacatagaccctcaagccaatcacactcgttggccgagattcggc

SEQ ID NO: 512144 - DNA, 55 bp, Artificial
  Synthetic oligonucleotide
tgagaaagacactatcctgactggaggaaatgtttactctcccggagactcggta

SEQ ID NO: 512145 - DNA, 55 bp, Artificial
  Synthetic oligonucleotide
tgccactgtaaaaccgtcaagaaccacctccggttcactatccggaatatcatcg

SEQ ID NO: 512146 - DNA, 55 bp, Artificial
  Synthetic oligonucleotide
tgtcgacgacgtaattcaaaagatcgcttgtgctattgcagagcaagtgctacgt

SEQ ID NO: 512147 - DNA, 55 bp, Artificial
  Synthetic oligonucleotide
aacgtcagcgagcgtgaagcttcccgtgtcatccgccaacacgagcgcggtttgc

SEQ ID NO: 512148 - DNA, 55 bp, Artificial
  Synthetic oligonucleotide
acaaaccccatcatctcctgtgagtaactcccactaattcttcacgttcagacac

SEQ ID NO: 512149 - DNA, 55 bp, Artificial
  Synthetic oligonucleotide
agcacgctaattttctaaagcctggctaccaacccaataagacctggtggggttc

SEQ ID NO: 512150 - DNA, 55 bp, Artificial
  Synthetic oligonucleotide
caacgtttctaagggcctcaaaagcgagtacacaaagggcttgccagagaaccac

SEQ ID NO: 512151 - DNA, 55 bp, Artificial
  Synthetic oligonucleotide
caatagttagaattaagacctagctttgaggagtggtagcagcaggtgcctcctt

SEQ ID NO: 512152 - DNA, 55 bp, Artificial
  Synthetic oligonucleotide
cacccgataacccaagtcagacttgtgattgaagcgcccatcgacccgtgtatta

SEQ ID NO: 512153 - DNA, 55 bp, Artificial
  Synthetic oligonucleotide
ccatggcgactgaaagggtgccatgtagaccgagaccacctttatcccactgctc

SEQ ID NO: 512154 - DNA, 55 bp, Artificial
  Synthetic oligonucleotide
ccattcagtccgttgctcccagaggatctcggctgaggttaccgtggcgggcttt

SEQ ID NO: 512155 - DNA, 55 bp, Artificial
  Synthetic oligonucleotide
cccaacgctcaagtcgataacttttcccggcctcagctgcccaagaaaatcgaac

SEQ ID NO: 512156 - DNA, 55 bp, Artificial
  Synthetic oligonucleotide
ccgacacccactcgagatcggatcgattgaaataacacaatgggaacactgagcc

SEQ ID NO: 512157 - DNA, 55 bp, Artificial
  Synthetic oligonucleotide
ccggtcggttagccactcttttaaatacgcaatttcttctgcatacgtacttccc

SEQ ID NO: 512158 - DNA, 55 bp, Artificial
  Synthetic oligonucleotide
cgtggtcatctccaactcttacaatgggatagatgcctgacgcttctgctgctcg

SEQ ID NO: 512159 - DNA, 55 bp, Artificial
  Synthetic oligonucleotide
ctgagggatacaagtatataggggtagtcaaagatgggaaacaacatggtcaagg

SEQ ID NO: 512160 - DNA, 55 bp, Artificial
  Synthetic oligonucleotide
ctggtaacactccggcttctggtgaaactgtagtaattagaaggaatgtcccgca

SEQ ID NO: 512161 - DNA, 55 bp, Artificial
  Synthetic oligonucleotide
gagatgtattggattactgagatgtgattagcccaagcattacctatcccgagcc

SEQ ID NO: 512162 - DNA, 53 bp, Artificial
  Synthetic oligonucleotide
caacgatcaaaacctctcccgcgttcagcttgctgctaacttccggattaaaa

SEQ ID NO: 512163 - DNA, 53 bp, Artificial
  Synthetic oligonucleotide
atgttacggggcatggcgcgactaggtttcgagtgattccatttactccggct

SEQ ID NO: 512164 - DNA, 51 bp, Artificial
  Synthetic oligonucleotide
cccctcatcatccgcatgccgagcaagaagcccgctgtctgtcactctctg

SEQ ID NO: 512165 - DNA, 51 bp, Artificial
  Synthetic oligonucleotide
ctttctccaccgaatccggagggaggatctccggccctacgaacgctggtt

SEQ ID NO: 512166 - DNA, 55 bp, Artificial
  Synthetic oligonucleotide
gtcctgtctgcaccgtggtaggcgacttttcttaccgaagagacatgagactcag

SEQ ID NO: 512167 - DNA, 55 bp, Artificial
  Synthetic oligonucleotide
gggtgtcgtggactgagaccgaatcagatccatttccggagagggtggtagaacc

SEQ ID NO: 512168 - DNA, 55 bp, Artificial
  Synthetic oligonucleotide
ggcagtcccgaatgtgatgatgtatcattaggagtttgtagtggccctggtaggc

SEQ ID NO: 512169 - DNA, 55 bp, Artificial
  Synthetic oligonucleotide
ggagcaggtccgtcgcctcagtgactcctttaaccaatgtccaatcggttctgtc

SEQ ID NO: 512170 - DNA, 55 bp, Artificial
  Synthetic oligonucleotide
gcttccacccagtcatcagccagtctcgtggttatgcgaggtagcgtggagtgtg

SEQ ID NO: 512171 - DNA, 55 bp, Artificial
  Synthetic oligonucleotide
gcgcactcgcaagaaaagcttgacatatgtctgtttccgctcgccgaccagaggc

SEQ ID NO: 512172 - DNA, 55 bp, Artificial
  Synthetic oligonucleotide
gcacgttataccatgccgcgttttctttccaagtacggaattcataccccggtga

SEQ ID NO: 512173 - DNA, 55 bp, Artificial
  Synthetic oligonucleotide
gaggcgagtgcaaagtgtggaactgccatttggcctcaggcacaggagttaaaag

SEQ ID NO: 512174 - DNA, 55 bp, Artificial
  Synthetic oligonucleotide
gaccatgggacttgatgccgtggactagagaaaggaagatgccggcggttgaggc

SEQ ID NO: 512175 - DNA, 55 bp, Artificial
  Synthetic oligonucleotide
cttccaaatcacacacgtacaatggtcttggtgtgaacggaacacatcctagtgc

SEQ ID NO: 512176 - DNA, 55 bp, Artificial
  Synthetic oligonucleotide
cgaattcgatcctgatcggttcttggaccaccgagttcaaaagtatcttgtcccc

SEQ ID NO: 512177 - DNA, 55 bp, Artificial
  Synthetic oligonucleotide
cccatggtggaatctcgatatctccataacgggtatgtttctgacaaaagcttac

SEQ ID NO: 512178 - DNA, 55 bp, Artificial
  Synthetic oligonucleotide
caggaggattggtacatcaagctcaaccctaatggtcgtattccaaccatcgtcg

SEQ ID NO: 512179 - DNA, 55 bp, Artificial
  Synthetic oligonucleotide
cactggcgccactaactgagtgatgttgaatggtagggagtgagctatacgggca

SEQ ID NO: 512180 - DNA, 55 bp, Artificial
  Synthetic oligonucleotide
attgcgctcgtcacagctttcaaaggacaggccgtcacatctaaaacgagggccg

SEQ ID NO: 512181 - DNA, 55 bp, Artificial
  Synthetic oligonucleotide
aggttgcattaagtatgcccctcacacccgcgtggttcacatcgtcaccctcagg

SEQ ID NO: 512182 - DNA, 55 bp, Artificial
  Synthetic oligonucleotide
aatggcaccacaaatctaccttccgtgtcactacctaatatcctacatatccacg

SEQ ID NO: 512183 - DNA, 58 bp, Artificial
  Synthetic oligonucleotide
cttattctgaagaaattgaatgtcatagcaaattgaccgcagccaagaaatgtacatc

SEQ ID NO: 512184 - DNA, 55 bp, Artificial
  Synthetic oligonucleotide
gattcaaagagacaagccgagatgagatagctggcaaatctatggtgggattctg

SEQ ID NO: 512185 - DNA, 55 bp, Artificial
  Synthetic oligonucleotide
gcctgtgaaaagtgagtaccacgtcaggccataataaccaacacagccccagcac

SEQ ID NO: 512186 - DNA, 55 bp, Artificial
  Synthetic oligonucleotide
gcgaagaggtccgagtgcctacgagccgtaacactgcaaatagcgttcacgaaga

SEQ ID NO: 512187 - DNA, 55 bp, Artificial
  Synthetic oligonucleotide
gcgacagtgcgcgaaggaagaaagtactcataatactaaacggccgtgctcttcg

SEQ ID NO: 512188 - DNA, 55 bp, Artificial
  Synthetic oligonucleotide
gcgtccctgactctgtggggcacgttcttccctgtgccatataccgatatccgcc

SEQ ID NO: 512189 - DNA, 55 bp, Artificial
  Synthetic oligonucleotide
gcttgtgcatgtgtctatcagaatttggtaatgtactgtatgcagcgtaggctcc

SEQ ID NO: 512190 - DNA, 55 bp, Artificial
  Synthetic oligonucleotide
ggaattggacgtagcaaaagcgtctgtgcgtgttgtatttaagggacgggaatcg

SEQ ID NO: 512191 - DNA, 55 bp, Artificial
  Synthetic oligonucleotide
ggatatgggcatacacatggtcacgttgtgccgaaggctcatacattgcctgctg

SEQ ID NO: 512192 - DNA, 55 bp, Artificial
  Synthetic oligonucleotide
ggcccgccaccttctttattctccccatattagaatatagctctgtagtccacca

SEQ ID NO: 512193 - DNA, 55 bp, Artificial
  Synthetic oligonucleotide
gggacgagtgagaaggatctcacccggaagcctccaccaggtaaacgccagctac

SEQ ID NO: 512194 - DNA, 55 bp, Artificial
  Synthetic oligonucleotide
gggagccgccctgcgagcctatttacaagtccacgtgagagcttaaacaacctac

SEQ ID NO: 512195 - DNA, 55 bp, Artificial
  Synthetic oligonucleotide
gggagctcaaatataggagaatcctcaggagaagcagctgaaacctcaaggtctg

SEQ ID NO: 512196 - DNA, 55 bp, Artificial
  Synthetic oligonucleotide
ggtgccccttatcaagtccttttgatcgatatatcaagcatgttgctgcgacaga

SEQ ID NO: 512197 - DNA, 55 bp, Artificial
  Synthetic oligonucleotide
ggtgtgcggcatggcatggggttggaacatagtagggtcggggctgccagatttg

SEQ ID NO: 512198 - DNA, 55 bp, Artificial
  Synthetic oligonucleotide
gtactgagaatatctacaagtgaaccctgggtgtctccccaggcgaagcatcagc

SEQ ID NO: 512199 - DNA, 55 bp, Artificial
  Synthetic oligonucleotide
gtctctaacaagaggcaaggctatgatgactgattgataggcctatgagcatcta

SEQ ID NO: 512200 - DNA, 55 bp, Artificial
  Synthetic oligonucleotide
gtctgattcgaagaattgggctcgttcggggaaaggtcgatccaagatcacaaag

SEQ ID NO: 512201 - DNA, 55 bp, Artificial
  Synthetic oligonucleotide
gtgaatatgtctaggtttctcatcaatggtcctcgcgctgtgatgcatttctgca

SEQ ID NO: 512202 - DNA, 55 bp, Artificial
  Synthetic oligonucleotide
gttaacttatatttcaccaattccttaaccaacgctaaccggataacggcgggtg

SEQ ID NO: 512203 - DNA, 55 bp, Artificial
  Synthetic oligonucleotide
taacttgaagcgccacaagatcagtgagaattagcgcccgaatgcctccgaaccc

SEQ ID NO: 512204 - DNA, 55 bp, Artificial
  Synthetic oligonucleotide
tactcgcataggcttgccattggacggctgcggaggatggatgggcgcggcagtt

SEQ ID NO: 512205 - DNA, 55 bp, Artificial
  Synthetic oligonucleotide
tatcaagttgccgggttcctcagagccagtccctagttaactaccactgagccct

SEQ ID NO: 512206 - DNA, 55 bp, Artificial
  Synthetic oligonucleotide
tgatcacacagccagtctatttatctactgcagcctcagtctatgaactcaaggt

SEQ ID NO: 512207 - DNA, 55 bp, Artificial
  Synthetic oligonucleotide
tggggccaagggcctatgaaattgggagcggattgggatgtgaggaggctttctc

SEQ ID NO: 512208 - DNA, 55 bp, Artificial
  Synthetic oligonucleotide
tgttgtgtccgccataactcgtaggggaattcctgcacttagcagcagtagctcc

SEQ ID NO: 512209 - DNA, 55 bp, Artificial
  Synthetic oligonucleotide
tttgatgtcatttgatctagtctcatacatttcttagcgtgaatcccgctgggac

SEQ ID NO: 512210 - DNA, 55 bp, Artificial
  Synthetic oligonucleotide
aacaatgtgtacatctcttttccgcatcttgtgaccaatgcaattcctgacatgg

SEQ ID NO: 512211 - DNA, 55 bp, Artificial
  Synthetic oligonucleotide
accgggcagagtacgctgggaagggcggattaaaattcggtggcgtgttaacggg

SEQ ID NO: 512212 - DNA, 55 bp, Artificial
  Synthetic oligonucleotide
agaagtgtaatcgtattcttatacgtctgggtgtcaggactctcgggtctttcgc

SEQ ID NO: 512213 - DNA, 55 bp, Artificial
  Synthetic oligonucleotide
aggttagcatctgttagtagttaacttacacaatcacctcgcgtagccacacgtg

SEQ ID NO: 512214 - DNA, 55 bp, Artificial
  Synthetic oligonucleotide
atataaatagctcagtgttcatgcaaacacgctatcattgttaacccttcttcgg

SEQ ID NO: 512215 - DNA, 55 bp, Artificial
  Synthetic oligonucleotide
caaagcctcatacggtgtcggcactcttagaggaggtgaacccttaagaaatgcc

SEQ ID NO: 512216 - DNA, 55 bp, Artificial
  Synthetic oligonucleotide
ccagtttccgtgataaattggttgaggaaacatcaaccgcaagtctttctgcaag

SEQ ID NO: 512217 - DNA, 55 bp, Artificial
  Synthetic oligonucleotide
ccccggtcacgtcaaaccctccacactgcataccatcgccttctccttcgaatga

SEQ ID NO: 512218 - DNA, 55 bp, Artificial
  Synthetic oligonucleotide
ccgccaacgaagcggattgggtcgtaatggagcccaggaacaactccagactagg

SEQ ID NO: 512219 - DNA, 55 bp, Artificial
  Synthetic oligonucleotide
ccgcctccacgaaacattctcgaatccttataccgtatagagcagacacccagaa

SEQ ID NO: 512220 - DNA, 55 bp, Artificial
  Synthetic oligonucleotide
ccttgaacttcccaacaaactcctcgatgggtgaacggaataattcatccgaacc

SEQ ID NO: 512221 - DNA, 55 bp, Artificial
  Synthetic oligonucleotide
cgcgacgaaaaggaggaaccattgccagagtgccagagcgctccggatctacgaa

SEQ ID NO: 512222 - DNA, 55 bp, Artificial
  Synthetic oligonucleotide
cgcgatagaagagtgcagaacagcaaagaacactatagaacccatgtgctcatgg

SEQ ID NO: 512223 - DNA, 55 bp, Artificial
  Synthetic oligonucleotide
cgctcacgccacggcgctagtagacgctgcatagtatattcgacatgtagtctag

SEQ ID NO: 512224 - DNA, 55 bp, Artificial
  Synthetic oligonucleotide
cggatcaacgcagacgttctgtagactccaatgctgccgactagcaggcgccatg

SEQ ID NO: 512225 - DNA, 55 bp, Artificial
  Synthetic oligonucleotide
cgtacgatcgcttttatctggtgagagggctctggtagcagtaccgcctggctcg

SEQ ID NO: 512226 - DNA, 55 bp, Artificial
  Synthetic oligonucleotide
cttatatgtctggattagacgcttcattgcggacggatgtcggtgtctacttttg

SEQ ID NO: 512227 - DNA, 55 bp, Artificial
  Synthetic oligonucleotide
gaacctcccaagtgcatcaagttagatcagtactgaatagataagatggggtggg

SEQ ID NO: 512228 - DNA, 55 bp, Artificial
  Synthetic oligonucleotide
gaacctggtacggatacggtttatacggccattccagaggtgtgtcgtccgactt

SEQ ID NO: 512229 - DNA, 55 bp, Artificial
  Synthetic oligonucleotide
gaagttcatgttttggattcaatataactgaactgccgcagattcgatggaaggg

SEQ ID NO: 512230 - DNA, 55 bp, Artificial
  Synthetic oligonucleotide
gaccagttctcaagactctgctacaactgtgcatactctgatattcagcttctct

SEQ ID NO: 512231 - DNA, 55 bp, Artificial
  Synthetic oligonucleotide
gactgcgcttgtgtgtgcattggagaccagaacgtggagtcactggcggatgtcg

SEQ ID NO: 512232 - DNA, 54 bp, Artificial
  Synthetic oligonucleotide
aaaaccaacctcgaaaatatatccaatgataagttccgttgcggagcctaatct

SEQ ID NO: 512233 - DNA, 53 bp, Artificial
  Synthetic oligonucleotide
cggccttactttggcatatcgtcgagtaccaatggacatttgaatacgcttct

SEQ ID NO: 512234 - DNA, 52 bp, Artificial
  Synthetic oligonucleotide
ccccgtcttggtgcagagggctacaatcacgcgcatcgcccagttagaagtg

SEQ ID NO: 512235 - DNA, 50 bp, Artificial
  Synthetic oligonucleotide
cgtaccggcgatggtagcatgacatatcgggatgacatcttgcaactctg

SEQ ID NO: 512236 - DNA, 55 bp, Artificial
  Synthetic oligonucleotide
ctttcatcaataggctgaggtcgctacccaactctacgacttaaataggaatcca

SEQ ID NO: 512237 - DNA, 55 bp, Artificial
  Synthetic oligonucleotide
gcaacgtggcatacattacgacaggctaatgatcgatttccggattgactgacgg

SEQ ID NO: 512238 - DNA, 55 bp, Artificial
  Synthetic oligonucleotide
gcagaagtggtagttagtttcgtagttatcggcatataggccgcatttagccggc

SEQ ID NO: 512239 - DNA, 55 bp, Artificial
  Synthetic oligonucleotide
gccgctactgctacaggaagacgcaacgcaacgtcagactcacttcgcttgttgg

SEQ ID NO: 512240 - DNA, 55 bp, Artificial
  Synthetic oligonucleotide
gcctagttcgggctaaggcgactaaatcatgcggctaaaagcatgtgtgcgtgtc

SEQ ID NO: 512241 - DNA, 55 bp, Artificial
  Synthetic oligonucleotide
ggagtggagaaccatgggccacggaaacccagggagacagtccacagtttccgcc

SEQ ID NO: 512242 - DNA, 55 bp, Artificial
  Synthetic oligonucleotide
ggccctgtctatcatccgcagtggcgctcctaccgttcttttgctttcccgcggc

SEQ ID NO: 512243 - DNA, 55 bp, Artificial
  Synthetic oligonucleotide
ggctggggcgtccaagacttgcactgcctcgctggaaactcttatccccgaacgg

SEQ ID NO: 512244 - DNA, 55 bp, Artificial
  Synthetic oligonucleotide
ggctttggaggtcggagagcacggtaggtagagtatgattcagtaagggaagccc

SEQ ID NO: 512245 - DNA, 55 bp, Artificial
  Synthetic oligonucleotide
gggcacaccatgtgcagtagttagcttctagcatactcacaacgctggtagttcc

SEQ ID NO: 512246 - DNA, 55 bp, Artificial
  Synthetic oligonucleotide
ggtcaaccgtgctaaaccggatcgcatttacacagcatgcaagggtgcttaggcc

SEQ ID NO: 512247 - DNA, 55 bp, Artificial
  Synthetic oligonucleotide
ggtgagtctagcgttggcttcgacataatcactgtgtctctcaagcaacccttcg

SEQ ID NO: 512248 - DNA, 55 bp, Artificial
  Synthetic oligonucleotide
gtaatgtgtaacaaacatagaagcgccgccgttaccgattaagtaccgatcccag

SEQ ID NO: 512249 - DNA, 55 bp, Artificial
  Synthetic oligonucleotide
gtccagtggcactgaggacgtcgacaatcctattggccgtcaggaatatgcgtca

SEQ ID NO: 512250 - DNA, 55 bp, Artificial
  Synthetic oligonucleotide
gtccgtaccttgcgtttcgtatctctggtggccatggtaggtctgagtagcaagg

SEQ ID NO: 512251 - DNA, 55 bp, Artificial
  Synthetic oligonucleotide
gtctccgctgcacttgctatctgccttaacatcggagtagatccaccagatgtag

SEQ ID NO: 512252 - DNA, 55 bp, Artificial
  Synthetic oligonucleotide
gtgctatcggctttggattccatggtatacacgttcgttcggatgagcagagggg

SEQ ID NO: 512253 - DNA, 55 bp, Artificial
  Synthetic oligonucleotide
tacttgtagctatcttatatctagaggtccttctcctcctctatagggacgccgt

SEQ ID NO: 512254 - DNA, 55 bp, Artificial
  Synthetic oligonucleotide
tatttgtagcatcactcgatgcaatatctggctcggtcatcaagaaaccagagcg

SEQ ID NO: 512255 - DNA, 55 bp, Artificial
  Synthetic oligonucleotide
tcgatgcgactccacagacgccacacgtccaatgcagtgccttctagacgcttag

SEQ ID NO: 512256 - DNA, 55 bp, Artificial
  Synthetic oligonucleotide
agttttcattatcgtttggcagagtaacatgctatcaacggttttgacgctcccc

SEQ ID NO: 512257 - DNA, 55 bp, Artificial
  Synthetic oligonucleotide
atagcttcgtcaagaacctgagtggaaacactctcactctgaccgcagagcccac

SEQ ID NO: 512258 - DNA, 55 bp, Artificial
  Synthetic oligonucleotide
caaagacaccgtgctgcgaaaagacatattgtagtgattgtatcactaatgccct

SEQ ID NO: 512259 - DNA, 55 bp, Artificial
  Synthetic oligonucleotide
caatgtccctaagggcataaatgacgatacgcttacttccatcgaccttaatgat

SEQ ID NO: 512260 - DNA, 55 bp, Artificial
  Synthetic oligonucleotide
agatgggcaacagagtgaccatcgaagtcccgcgcaagtaaagtctgacaccgag

SEQ ID NO: 512261 - DNA, 55 bp, Artificial
  Synthetic oligonucleotide
aagcctcggcatgaccgactcagacgatcgacggggctgaagctgcgttagctcc

SEQ ID NO: 512262 - DNA, 55 bp, Artificial
  Synthetic oligonucleotide
cacatttcgctcgtgccaccctcgtcattatgcggtaggccgttagccgctagcg

SEQ ID NO: 512263 - DNA, 55 bp, Artificial
  Synthetic oligonucleotide
caccgacagttaacactagacctttgaactgcctattccgatacccagttaccct

SEQ ID NO: 512264 - DNA, 55 bp, Artificial
  Synthetic oligonucleotide
cattgatatgtcatatggaagtgggacatcccttgaagctcggaacctgccgacg

SEQ ID NO: 512265 - DNA, 55 bp, Artificial
  Synthetic oligonucleotide
cctcgtagaactgtatggaaggttcgcttggactcttccagcaagcttttgcccc

SEQ ID NO: 512266 - DNA, 55 bp, Artificial
  Synthetic oligonucleotide
cctgggacagtccaacctctggtacgggagttcttgatcggagtttgaccgatct

SEQ ID NO: 512267 - DNA, 55 bp, Artificial
  Synthetic oligonucleotide
cgccctcgagacaaaggagttggatcggcatacattaacagacttattccgccac

SEQ ID NO: 512268 - DNA, 55 bp, Artificial
  Synthetic oligonucleotide
cggcaacgaagatgtacatgacaaagagccaatgatattcgacttacaagcctgg

SEQ ID NO: 512269 - DNA, 55 bp, Artificial
  Synthetic oligonucleotide
cggccgctaaacatcttgcctagggaggaaactcctccaatccctgatccgatgc

SEQ ID NO: 512270 - DNA, 55 bp, Artificial
  Synthetic oligonucleotide
cgggatgaatatctcctcctactattgcttgtcatcgacataccactttgttcga

SEQ ID NO: 512271 - DNA, 55 bp, Artificial
  Synthetic oligonucleotide
cgttctggaagagtaatctcctattcaagcgaacgaggttgttctgttagtctcc

SEQ ID NO: 512272 - DNA, 54 bp, Artificial
  Synthetic oligonucleotide
tacccggattcttacatggacgggtctatgcttatgtctatctcctctacggct

SEQ ID NO: 512273 - DNA, 53 bp, Artificial
  Synthetic oligonucleotide
cacagtgcacggtccagacgtgataccgaggctgacactcgcgctagtcctaa

SEQ ID NO: 512274 - DNA, 52 bp, Artificial
  Synthetic oligonucleotide
aaaacgagggcaagagcgctgccggtacgagatggaaatgagattcgtgaag

SEQ ID NO: 512275 - DNA, 51 bp, Artificial
  Synthetic oligonucleotide
atcggagaagatggagacagaccatgggcggaagtacgatctttagatgca

SEQ ID NO: 512276 - DNA, 50 bp, Artificial
  Synthetic oligonucleotide
cacactctacagacaccatctacaagaccactctgtcctgaaaccccttc

SEQ ID NO: 512277 - DNA, 55 bp, Artificial
  Synthetic oligonucleotide
ggtcagacaggcgctgcctcctcgttagcagtgtcccgactttcggatcagctac

SEQ ID NO: 512278 - DNA, 55 bp, Artificial
  Synthetic oligonucleotide
gggcggcgcagatcatccaacagtcaatgttgtccgacatgaactcggcctacgc

SEQ ID NO: 512279 - DNA, 55 bp, Artificial
  Synthetic oligonucleotide
ggctccgagggtcgttcccttgcgattctcagtcacatttcttgttcagtcgtca

SEQ ID NO: 512280 - DNA, 55 bp, Artificial
  Synthetic oligonucleotide
gccgggcaaaactaggcaggaagcgtcatttctttacatccaacgacaaaaggtg

SEQ ID NO: 512281 - DNA, 55 bp, Artificial
  Synthetic oligonucleotide
ctgctatgctcgcgttcccaccgcgttctggagctacgtctctcggtgcagcctt

SEQ ID NO: 512282 - DNA, 55 bp, Artificial
  Synthetic oligonucleotide
ctccccgcttgaacgcattcgcttgaagtcacttctgaaagcttgagtttcggcg

SEQ ID NO: 512283 - DNA, 55 bp, Artificial
  Synthetic oligonucleotide
cgtcttactcaatcttgagaatcggctcatgcttcaggtgcgttgtgcccgtcgc

SEQ ID NO: 512284 - DNA, 55 bp, Artificial
  Synthetic oligonucleotide
cgcgcagtggtgtgtatgttttactaacttgctcgttatcccaggtttcatgtcc

SEQ ID NO: 512285 - DNA, 55 bp, Artificial
  Synthetic oligonucleotide
cgacccgtgagggttgataatccgatgccatgacgcggtgatgaagagaccccag

SEQ ID NO: 512286 - DNA, 55 bp, Artificial
  Synthetic oligonucleotide
cgaagtcccgtcggtggactaggacctcaggaccttcctggcctagcagtgcttg

SEQ ID NO: 512287 - DNA, 55 bp, Artificial
  Synthetic oligonucleotide
cctgtccgtctgatgttcctttacgcacgcctcatcactggctgtactcggctcg

SEQ ID NO: 512288 - DNA, 55 bp, Artificial
  Synthetic oligonucleotide
cctgtagcccacacgagctgcgcgttctttgtactctaagggacgcatacgattg

SEQ ID NO: 512289 - DNA, 55 bp, Artificial
  Synthetic oligonucleotide
ccgggcggagttcaggcagaatcgcatccgatctactctacacgcaggcctggtg

SEQ ID NO: 512290 - DNA, 55 bp, Artificial
  Synthetic oligonucleotide
ccactgctatgattatctgcagaattccccgatatctagctttcgcggagaccgc

SEQ ID NO: 512291 - DNA, 55 bp, Artificial
  Synthetic oligonucleotide
agctacgagagcaagcacgccctcacagacggtgtcagcgatgcctaccacgagg

SEQ ID NO: 512292 - DNA, 55 bp, Artificial
  Synthetic oligonucleotide
aatgccgagatgcgatgtagctggggagcctttggcaccgacgggtgggtatcgg

SEQ ID NO: 512293 - DNA, 52 bp, Artificial
  Synthetic oligonucleotide
ttgtgcagtctgtgcgatgtgggacaaatccgagagcgggcacgagaagggg

SEQ ID NO: 512294 - DNA, 55 bp, Artificial
  Synthetic oligonucleotide
tccccgtggccgtcatcaaccgacacgatgttcccggacctcaccctgccggcac

SEQ ID NO: 512295 - DNA, 55 bp, Artificial
  Synthetic oligonucleotide
tcacgccaaacatgcaaatgtcacgagaagaatcaaacttcgggttgtccatggc

SEQ ID NO: 512296 - DNA, 55 bp, Artificial
  Synthetic oligonucleotide
tatagcttatcataataccccgtatgcgggacatcacacagctgtccgccatacc

SEQ ID NO: 512297 - DNA, 55 bp, Artificial
  Synthetic oligonucleotide
gtctcagctcacatcgcatcccgttcccaaacgtcacgaaagaatagacgatcag

SEQ ID NO: 512298 - DNA, 55 bp, Artificial
  Synthetic oligonucleotide
gtcgttcattgtcggcgacgggacagcaacggcgcgaggtagaacggtacccact

SEQ ID NO: 512299 - DNA, 55 bp, Artificial
  Synthetic oligonucleotide
gtcctgccaaatgggctcatggttgattgctacaacaacattggctgcatgaatg

SEQ ID NO: 512300 - DNA, 55 bp, Artificial
  Synthetic oligonucleotide
ggcggcggagagtccattacgacggctagagtaattgacgagggaacggggaacg

SEQ ID NO: 512301 - DNA, 55 bp, Artificial
  Synthetic oligonucleotide
ggataaacggatgtgcaaataccgctaaaccgcagcacgacaagaagaatcggcg

SEQ ID NO: 512302 - DNA, 55 bp, Artificial
  Synthetic oligonucleotide
gcgagtcgaagtgagagcgtcatggcaggttgctgcgtcgttcgtcagtctcttg

SEQ ID NO: 512303 - DNA, 55 bp, Artificial
  Synthetic oligonucleotide
gagtaccacggcatcaactacgtcctgaccccgactgccatggacgtcatggacg

SEQ ID NO: 512304 - DNA, 55 bp, Artificial
  Synthetic oligonucleotide
ctgaaaatgtgagcgaccttgggccctcgtgcccatcatcaagaagaacgcgagc

SEQ ID NO: 512305 - DNA, 55 bp, Artificial
  Synthetic oligonucleotide
ccaacggaaccgaaggggcaaagaccatttccatgcggagtgccgaggcgagcca

SEQ ID NO: 512306 - DNA, 55 bp, Artificial
  Synthetic oligonucleotide
cagcggagtgtgtagccgcgtgtcaaacgatgcaacgggcgaaacacgttgagat

SEQ ID NO: 512307 - DNA, 55 bp, Artificial
  Synthetic oligonucleotide
agaaaccaaagccaggaacctgccctgcgtgcgtctcccgccgatccttctgacg

SEQ ID NO: 512308 - DNA, 55 bp, Artificial
  Synthetic oligonucleotide
aagctctggccgcatgtcgattccactcggcctagaccaattcgaggacgtgccg

SEQ ID NO: 512309 - DNA, 52 bp, Artificial
  Synthetic oligonucleotide
gatcaagtgccgagtacacccgcagccaacgaggagcataccgacacggaat

SEQ ID NO: 512310 - DNA, 50 bp, Artificial
  Synthetic oligonucleotide
ggctgccgtgttcctgaatgccacgagactgtgtgttactacaggtaaaa

SEQ ID NO: 512311 - DNA, 55 bp, Artificial
  Synthetic oligonucleotide
tagatgtgagtattctcgtcctagtcgtagaaattctcggcggttgggcatcggt

SEQ ID NO: 512312 - DNA, 55 bp, Artificial
  Synthetic oligonucleotide
gtcgtcggcatccaaaggcttccattgtaatagactgcgttcaagctcccgctct

SEQ ID NO: 512313 - DNA, 55 bp, Artificial
  Synthetic oligonucleotide
gtcagaggaaaccgtgatttggttagtgcgcatgttctctgggtaccatcgtgct

SEQ ID NO: 512314 - DNA, 55 bp, Artificial
  Synthetic oligonucleotide
ggtggcagaaagaccagggctaagtgtactctcatcgccttcaacgttaccgctg

SEQ ID NO: 512315 - DNA, 55 bp, Artificial
  Synthetic oligonucleotide
gctctgattttgcgtggcagaagatgccttctactcaggaaaaccttagcgtggc

SEQ ID NO: 512316 - DNA, 55 bp, Artificial
  Synthetic oligonucleotide
gcggatgaacagtcggcatacatcaaggccggaagcatgacagaccggtgatcgc

SEQ ID NO: 512317 - DNA, 55 bp, Artificial
  Synthetic oligonucleotide
gcaaccgcccgaaccctctcgtctgccgcccgaccaccctcatcaagcactctat

SEQ ID NO: 512318 - DNA, 55 bp, Artificial
  Synthetic oligonucleotide
ctgaatctgctcgcagaagtatttctcgcaagagtcggtgttgccgccaccgctc

SEQ ID NO: 512319 - DNA, 55 bp, Artificial
  Synthetic oligonucleotide
ctcgatggaggtggcccgtgctgattaattaccagtttagcgcctggggaggcta

SEQ ID NO: 512320 - DNA, 55 bp, Artificial
  Synthetic oligonucleotide
cgctcgcaacgttgtactcgggtcgcggctagagcatcactttggtcatgagccc

SEQ ID NO: 512321 - DNA, 55 bp, Artificial
  Synthetic oligonucleotide
cgacagacatcggaatcagtgcagccatgagcacccgcgcaaggtatccagtctc

SEQ ID NO: 512322 - DNA, 55 bp, Artificial
  Synthetic oligonucleotide
attcggacgctaaagcccgtttcctagaatctaacttctacaccggttacgggag

SEQ ID NO: 512323 - DNA, 55 bp, Artificial
  Synthetic oligonucleotide
attcaccttgcgtaggtgctccatattcgagcacttcacttggactactgttgtg

SEQ ID NO: 512324 - DNA, 55 bp, Artificial
  Synthetic oligonucleotide
atgtattgccactgtatctcagtaacggcgcaataatgtgctcgatcgtttactc

SEQ ID NO: 512325 - DNA, 54 bp, Artificial
  Synthetic oligonucleotide
cgtcggagggagagcaagcgctcatggtctcggttggtcaattgctgtgtagac

SEQ ID NO: 512326 - DNA, 52 bp, Artificial
  Synthetic oligonucleotide
ttcggcgtacttgacgcacccttggcatgcagacccactggccaaaggggta

SEQ ID NO: 512327 - DNA, 51 bp, Artificial
  Synthetic oligonucleotide
tgtcagtggcgattacgcagtggcccgacagggctctcttgtgatcaggca

SEQ ID NO: 512328 - DNA, 60 bp, Artificial
  Synthetic oligonucleotide
ggatacaagatattcctaggacaaatccggatagaaccttcaaagattaaagctattaag

SEQ ID NO: 512329 - DNA, 55 bp, Artificial
  Synthetic oligonucleotide
ctttgtcggcttaaaagtgatagtactcgagtcagccccatgacggtgcaatctg

SEQ ID NO: 512330 - DNA, 55 bp, Artificial
  Synthetic oligonucleotide
gacgctcaaacccgaactgtgtttggaaccgtgaggagacagcgacgaataagac

SEQ ID NO: 512331 - DNA, 55 bp, Artificial
  Synthetic oligonucleotide
gacttgttcctagaagtatcggaaatctcaattggtattgcgatgcgaggcagtg

SEQ ID NO: 512332 - DNA, 55 bp, Artificial
  Synthetic oligonucleotide
gcaaccctagcaaacgtaccgcctattacactaaaacttcctttgagcctacgcc

SEQ ID NO: 512333 - DNA, 55 bp, Artificial
  Synthetic oligonucleotide
gcagtgtggtattgcgaagtctgtgttctcgtccaatagtggttacgcaacttgc

SEQ ID NO: 512334 - DNA, 55 bp, Artificial
  Synthetic oligonucleotide
gcccggctagcattactcttgatcataagatcgccagatgaggagacattccacc

SEQ ID NO: 512335 - DNA, 55 bp, Artificial
  Synthetic oligonucleotide
gccgaagacaggtattgcttgatctcagtttccatcatcaagcggacccatatct

SEQ ID NO: 512336 - DNA, 55 bp, Artificial
  Synthetic oligonucleotide
gctagccacacaccgcatggaatccacgttccttattctggcatttggctctcga

SEQ ID NO: 512337 - DNA, 55 bp, Artificial
  Synthetic oligonucleotide
ggaaggcatatcccacagatctaccgcaaaagacagacagtggcaggcagactac

SEQ ID NO: 512338 - DNA, 55 bp, Artificial
  Synthetic oligonucleotide
ggcacccgtatgcggagacccgaagacaggacaaaggttaagtcgccgtcaaagc

SEQ ID NO: 512339 - DNA, 55 bp, Artificial
  Synthetic oligonucleotide
ggcgcaattacgggtgcaaaagggtcagtgtcgtcctgggttcccttatcagcgc

SEQ ID NO: 512340 - DNA, 55 bp, Artificial
  Synthetic oligonucleotide
ggtgagcatgtatacacgccgtagaacacatgacgctacagctcatgcgacccag

SEQ ID NO: 512341 - DNA, 55 bp, Artificial
  Synthetic oligonucleotide
ggtgggccctgtccgatcttatgacgaatatcgtgagataaacgtgtagttccac

SEQ ID NO: 512342 - DNA, 55 bp, Artificial
  Synthetic oligonucleotide
gtagcagagcagggaatggtctggaatctccgatcaaaagccaaatatgaaagct

SEQ ID NO: 512343 - DNA, 55 bp, Artificial
  Synthetic oligonucleotide
gtcaatggtgctaccatgcaacgaaacgaccggcgggaactacgggagggtgacg

SEQ ID NO: 512344 - DNA, 55 bp, Artificial
  Synthetic oligonucleotide
gtcactctccgtggggcgtccttacggcgcggcttctagtgtgttccgctaatgg

SEQ ID NO: 512345 - DNA, 55 bp, Artificial
  Synthetic oligonucleotide
gttcgtctcaaggccccataactcggattcatcccaatgccatggtcctcaacgt

SEQ ID NO: 512346 - DNA, 55 bp, Artificial
  Synthetic oligonucleotide
gtttcaaggacaaacccagccagtggttaattacacactgtaacggttccaggag

SEQ ID NO: 512347 - DNA, 55 bp, Artificial
  Synthetic oligonucleotide
tgacggtggatgtctctgtttcgccaccatcagcctttcacttgctagacgcttc

SEQ ID NO: 512348 - DNA, 55 bp, Artificial
  Synthetic oligonucleotide
tgccctcgaactagatgttagccgacagcctaacaaagacgctagaaccaaagcc

SEQ ID NO: 512349 - DNA, 55 bp, Artificial
  Synthetic oligonucleotide
acgccgtgaataagcgattacgattgcaagaggcgcgacaaatgtttgccacccc

SEQ ID NO: 512350 - DNA, 55 bp, Artificial
  Synthetic oligonucleotide
agaagctagttaattgccctctagatcaatccggcactacgcttctagccctacg

SEQ ID NO: 512351 - DNA, 55 bp, Artificial
  Synthetic oligonucleotide
agttatcatctgtgtgttgcaaggggtgagtttggttcgggtctgacggatgggc

SEQ ID NO: 512352 - DNA, 55 bp, Artificial
  Synthetic oligonucleotide
agttctctgcgctcttatccatccatggatcttttagcatcctcctcctaggtac

SEQ ID NO: 512353 - DNA, 55 bp, Artificial
  Synthetic oligonucleotide
atttgctggcaaatcacgtagtctcgcgttagcgcatccccacagctccacgctg

SEQ ID NO: 512354 - DNA, 55 bp, Artificial
  Synthetic oligonucleotide
cacgatctcaggtcaactggacttcgctgagcgttgcggtttcatctactcgtga

SEQ ID NO: 512355 - DNA, 55 bp, Artificial
  Synthetic oligonucleotide
ccagtatcggaatggagtggcgatcgcgctaggacatgttaatgctggggtgatg

SEQ ID NO: 512356 - DNA, 55 bp, Artificial
  Synthetic oligonucleotide
ccatatgatgaccggaggcggtttgcttactttgtaaacgcttctcttagtgccc

SEQ ID NO: 512357 - DNA, 55 bp, Artificial
  Synthetic oligonucleotide
ccatcgatccgaatgtgaagacagctttcccaaccggtgataacttcagttagat

SEQ ID NO: 512358 - DNA, 55 bp, Artificial
  Synthetic oligonucleotide
ccgacgtctgccgtcttgcgctgagtcctttccccgtaatccccgatcacgctca

SEQ ID NO: 512359 - DNA, 55 bp, Artificial
  Synthetic oligonucleotide
ccgggattccgaagtgggctggtcccctccagatgccccgaaacgcaaaaggttg

SEQ ID NO: 512360 - DNA, 55 bp, Artificial
  Synthetic oligonucleotide
cgaccgccgagttgatgccgccatctcagacacaacacataccgacgcggggatg

SEQ ID NO: 512361 - DNA, 55 bp, Artificial
  Synthetic oligonucleotide
cgaggacaacatctggatgttccggtagccacagaacgctcctacgggattgtca

SEQ ID NO: 512362 - DNA, 55 bp, Artificial
  Synthetic oligonucleotide
cgcgcactggatcaggggcgtcggtgtttccactcatgtatcaggtagtcggtcg

SEQ ID NO: 512363 - DNA, 55 bp, Artificial
  Synthetic oligonucleotide
cggggattactttcgcatcggaaacgcatccctacgctaccgacctgctggcgtc

SEQ ID NO: 512364 - DNA, 55 bp, Artificial
  Synthetic oligonucleotide
cgtctagtccatcgttgttcttttgacagagaggttagttccggtggcacacgcc

SEQ ID NO: 512365 - DNA, 55 bp, Artificial
  Synthetic oligonucleotide
cgtgttgcggcggcgagacaacaagatcttgtctactatatgctggatagcccaa

SEQ ID NO: 512366 - DNA, 55 bp, Artificial
  Synthetic oligonucleotide
ctgggcgaagctattatgagtaacttgagcagagtcagctagcgttcaaggacgg

SEQ ID NO: 512367 - DNA, 55 bp, Artificial
  Synthetic oligonucleotide
cttgcggtagatccgtaggatatgcctttctttaagcattgtctgctcgcgatcc

SEQ ID NO: 512368 - DNA, 54 bp, Artificial
  Synthetic oligonucleotide
tgactccccgcggtccagagagatgagacatccacggatacgctcaatgccgtt

SEQ ID NO: 512369 - DNA, 52 bp, Artificial
  Synthetic oligonucleotide
ccgggtttgctggctgatcgatcagggattgattggtcgagttctgtatcct

SEQ ID NO: 512370 - DNA, 51 bp, Artificial
  Synthetic oligonucleotide
ccccgcgactggtcgatcatcccaatccacagtcgcacgacgacatgcccc

SEQ ID NO: 512371 - DNA, 50 bp, Artificial
  Synthetic oligonucleotide
tgtgtcaaagcaaaaccccgatagagttttcgtagctggccacctcctgt

SEQ ID NO: 512372 - DNA, 50 bp, Artificial
  Synthetic oligonucleotide
acacgagaaggagaactgcacagtacgggttggacagaagttacgtactt

SEQ ID NO: 512373 - DNA, 55 bp, Artificial
  Synthetic oligonucleotide
ggatagcctaatgtagtccccttaggttatacccttatagcgcctttactagtgt

SEQ ID NO: 512374 - DNA, 55 bp, Artificial
  Synthetic oligonucleotide
ggagggccactgccatcgcaggatgattcattcgcggtgaccaacggcgagcaac

SEQ ID NO: 512375 - DNA, 55 bp, Artificial
  Synthetic oligonucleotide
ggagagagtctgcgcaaagaaagaagaagccgcaaccaaaacagcgacgcactcc

SEQ ID NO: 512376 - DNA, 55 bp, Artificial
  Synthetic oligonucleotide
ggacattgtgcttattttgggacgaggaagcatagatcggtcgccacgcggcagc

SEQ ID NO: 512377 - DNA, 55 bp, Artificial
  Synthetic oligonucleotide
ggaagtcggacgtgcggagagttgtggtcaacgctgagtgagatcttccgagatc

SEQ ID NO: 512378 - DNA, 55 bp, Artificial
  Synthetic oligonucleotide
ggaaagtagtctcgatgagcactctggaactccatttgttgaccgccgttgctga

SEQ ID NO: 512379 - DNA, 55 bp, Artificial
  Synthetic oligonucleotide
gcttgctaggtctaagtgtgttgtgcgtgcgagtcactaacttataggtaatgac

SEQ ID NO: 512380 - DNA, 55 bp, Artificial
  Synthetic oligonucleotide
gcttagtattatgggacacttgcatggaacaggcgtggctcggtatctcacgaca

SEQ ID NO: 512381 - DNA, 55 bp, Artificial
  Synthetic oligonucleotide
gcttaggaaggttgggtgacaacaaggctaccgtggagtcatctagatgcctggg

SEQ ID NO: 512382 - DNA, 55 bp, Artificial
  Synthetic oligonucleotide
gctgtttgatacccgtcggattttctcacattctagttgcagttctgtcgcatgg

SEQ ID NO: 512383 - DNA, 55 bp, Artificial
  Synthetic oligonucleotide
gctgtccgttgatgctttgaattgacagacgccatccatcgccctaggctgccaa

SEQ ID NO: 512384 - DNA, 55 bp, Artificial
  Synthetic oligonucleotide
gctggataaccacggaccggccctttaacgaaacacagcagacatcaactcgctc

SEQ ID NO: 512385 - DNA, 55 bp, Artificial
  Synthetic oligonucleotide
gctgcttgacgcgtgttttggtctcgtcgtccgtgtgttgtagccatttggtctg

SEQ ID NO: 512386 - DNA, 55 bp, Artificial
  Synthetic oligonucleotide
gctgccaccattgcgctgcaaatcccacaagacactccgtctgtctgtctgggga

SEQ ID NO: 512387 - DNA, 55 bp, Artificial
  Synthetic oligonucleotide
gctgataatctggcatcgtcatgtgtgctacgtcgtccacttgtttgttcctcgt

SEQ ID NO: 512388 - DNA, 55 bp, Artificial
  Synthetic oligonucleotide
gcgtccgcgagtatgaattgtatgtgctaataacctctggggactgccctctccg

SEQ ID NO: 512389 - DNA, 55 bp, Artificial
  Synthetic oligonucleotide
gcggtataggaactgaagggcagttctcttggagccaggcgtatgttgcagcctc

SEQ ID NO: 512390 - DNA, 55 bp, Artificial
  Synthetic oligonucleotide
gcgcgatgatgtgttttacgacatgccgcttacgtcgtgaagttggccatccggg

SEQ ID NO: 512391 - DNA, 55 bp, Artificial
  Synthetic oligonucleotide
gcgcaaatatgtctgccaagtcccaggttgcggaaagagcttcgttactggcacc

SEQ ID NO: 512392 - DNA, 55 bp, Artificial
  Synthetic oligonucleotide
gcctaggttcgcagggatgaccaaaacgctcctacgactcggctcccggtcagag

SEQ ID NO: 512393 - DNA, 55 bp, Artificial
  Synthetic oligonucleotide
gccggggaagtgggaaggttctagctcccgtgtggactcgcagtagagctcccaa

SEQ ID NO: 512394 - DNA, 55 bp, Artificial
  Synthetic oligonucleotide
gcagcatggagttgactaccacaagagacgctgtcctgcctttccatgcgatacg

SEQ ID NO: 512395 - DNA, 55 bp, Artificial
  Synthetic oligonucleotide
gcacgcctccagccaccgataacgacgtcagtgtgttgacaaagccatactctcc

SEQ ID NO: 512396 - DNA, 55 bp, Artificial
  Synthetic oligonucleotide
gcaattgtatgtgtatgggcattcaatctcacctccacaaagactgaacctctgc

SEQ ID NO: 512397 - DNA, 55 bp, Artificial
  Synthetic oligonucleotide
gcaatggtacacgacgcaatcaatacccgttcttcccaagctgaagactttgcgg

SEQ ID NO: 512398 - DNA, 55 bp, Artificial
  Synthetic oligonucleotide
gcaagaacggacatgggaggcctacaggccttaattatggaagcggttagcagca

SEQ ID NO: 512399 - DNA, 55 bp, Artificial
  Synthetic oligonucleotide
gatcgttgctggtaaacctgatgcctgcactatactacaaatcgatatagcccgg

SEQ ID NO: 512400 - DNA, 55 bp, Artificial
  Synthetic oligonucleotide
gatagaccgagcagcatcctagagtgagacgcccggtggatatatgatagcgatg

SEQ ID NO: 512401 - DNA, 55 bp, Artificial
  Synthetic oligonucleotide
gaggtaagcttgggcgagctgccaatcaggtgactgtactccgcatgtacttccg

SEQ ID NO: 512402 - DNA, 55 bp, Artificial
  Synthetic oligonucleotide
gagggcgtggtcccaccaaagctcatctcacttcgacaaacagggtatttgagcg

SEQ ID NO: 512403 - DNA, 55 bp, Artificial
  Synthetic oligonucleotide
gacgatacctcgctttccacatgctagtactttgagtcttagctcagtcttgcac

SEQ ID NO: 512404 - DNA, 55 bp, Artificial
  Synthetic oligonucleotide
tgtgagccagccgacgacccagatggctgtgcgtccagcatcttccgataccgac

SEQ ID NO: 512405 - DNA, 55 bp, Artificial
  Synthetic oligonucleotide
tgcatggagagtggccaggtccgcacgggagacactgcgcaagacacctacgtac

SEQ ID NO: 512406 - DNA, 55 bp, Artificial
  Synthetic oligonucleotide
tgagagccgtatcgtgggatttcatgggttgggttgtctcgcagtgacagggaga

SEQ ID NO: 512407 - DNA, 55 bp, Artificial
  Synthetic oligonucleotide
tctcgataacattatatgcagccacgtaacgcaacgtagtccagctaccgacccc

SEQ ID NO: 512408 - DNA, 55 bp, Artificial
  Synthetic oligonucleotide
tccgacgtttgtgttgttttagatagatgcccaatcagagcaacaatgtccgtca

SEQ ID NO: 512409 - DNA, 55 bp, Artificial
  Synthetic oligonucleotide
tcacttttgcataatgcatgaatagacactgggtctggtatgactgaatctcgtg

SEQ ID NO: 512410 - DNA, 55 bp, Artificial
  Synthetic oligonucleotide
tactttgagaaatcggggatcgagctgcccttgtcggatcccatcttgaagggac

SEQ ID NO: 512411 - DNA, 55 bp, Artificial
  Synthetic oligonucleotide
tactgcgagtccacacgggagctagaaccttcccacttccccggccgtcaaacgc

SEQ ID NO: 512412 - DNA, 55 bp, Artificial
  Synthetic oligonucleotide
gtttcacaagtgtccggacttgccatgaaatctatctcgtgtatttgccaacgca

SEQ ID NO: 512413 - DNA, 55 bp, Artificial
  Synthetic oligonucleotide
gttattcctagcgtactactgtctctgtcaattaatgcctcacttgcaccaagta

SEQ ID NO: 512414 - DNA, 55 bp, Artificial
  Synthetic oligonucleotide
gtgtgaatgaagcgatccagtgtccccggccaattttggagtttggatgggcggc

SEQ ID NO: 512415 - DNA, 55 bp, Artificial
  Synthetic oligonucleotide
gtggggaagagtgacggatgatttgttcaagtttggaggctgttctgcgaaaccg

SEQ ID NO: 512416 - DNA, 55 bp, Artificial
  Synthetic oligonucleotide
gtcagctatgccatagttacgtttagcgtctgtaaacttccttgaccaaaaggcc

SEQ ID NO: 512417 - DNA, 55 bp, Artificial
  Synthetic oligonucleotide
gtattcgagccttggcctctatcgatgctcgacgagacataacattatcctgcgg

SEQ ID NO: 512418 - DNA, 55 bp, Artificial
  Synthetic oligonucleotide
gtagcagctgtatccgccgaagttgctcctcagccagaggcaataacacctgggt

SEQ ID NO: 512419 - DNA, 55 bp, Artificial
  Synthetic oligonucleotide
gtagaaggcaatgatctagagacgacgcgagccgtgacttttgacgaaagggttg

SEQ ID NO: 512420 - DNA, 55 bp, Artificial
  Synthetic oligonucleotide
ggttctggacaagctatgcggaaagaccctactcgaagtcgtcatgtctaccaag

SEQ ID NO: 512421 - DNA, 55 bp, Artificial
  Synthetic oligonucleotide
ggtggccctacatataactcattagcccaccgcctctaattagtccagggcccac

SEQ ID NO: 512422 - DNA, 55 bp, Artificial
  Synthetic oligonucleotide
ggtgccgtgtactgccccgagtatacagtccttcatgcccatttcgggaatattg

SEQ ID NO: 512423 - DNA, 55 bp, Artificial
  Synthetic oligonucleotide
ggtgacatttagggctatctatgcctacaagtcaacctttcttagcccttagtgc

SEQ ID NO: 512424 - DNA, 55 bp, Artificial
  Synthetic oligonucleotide
gggttcagcgaatatcaattcaatgtctcgggaagaaggcggtgattagcacgtc

SEQ ID NO: 512425 - DNA, 55 bp, Artificial
  Synthetic oligonucleotide
gggtctccctttccgccaagactttctgtactgaactcagcaaagctatatggga

SEQ ID NO: 512426 - DNA, 55 bp, Artificial
  Synthetic oligonucleotide
ggggcacattcaagagcagtgatatgatcagtatgtccagtaaacacccttgcac

SEQ ID NO: 512427 - DNA, 55 bp, Artificial
  Synthetic oligonucleotide
gggctgtgcgctctgtatgcgacctcgagcggccgtacaatctggatttcggacg

SEQ ID NO: 512428 - DNA, 55 bp, Artificial
  Synthetic oligonucleotide
gggcgtgccaaagtctgtgcttcaggtatgctgagcatgttgctgccctgaatag

SEQ ID NO: 512429 - DNA, 55 bp, Artificial
  Synthetic oligonucleotide
gggaaccatcggctgagatcttgacccgtcaaggcatccacctagtgtagctcga

SEQ ID NO: 512430 - DNA, 55 bp, Artificial
  Synthetic oligonucleotide
ggcttccgggagacctagataattcagctcctggggccatagatgcttgattact

SEQ ID NO: 512431 - DNA, 55 bp, Artificial
  Synthetic oligonucleotide
ggctgaattgctttacctgagtggtctgctatttgttcgtctaacaacatgaacc

SEQ ID NO: 512432 - DNA, 55 bp, Artificial
  Synthetic oligonucleotide
ggctagggcgtgtggcgatggaactgtacaatcaaggcggcagggctatcccgca

SEQ ID NO: 512433 - DNA, 55 bp, Artificial
  Synthetic oligonucleotide
ggctaaatcgatcactgatgatcagtttgactgggcagtgagcaccggtttgatc

SEQ ID NO: 512434 - DNA, 55 bp, Artificial
  Synthetic oligonucleotide
ggcatcatacaactaaatagtcgtcgcagccgtcgactaggaacgagccgaagac

SEQ ID NO: 512435 - DNA, 55 bp, Artificial
  Synthetic oligonucleotide
ccttgacttcattaagggcgcagaggtcttcggagtgtcccgcgataccactggc

SEQ ID NO: 512436 - DNA, 55 bp, Artificial
  Synthetic oligonucleotide
ccttcggtggcttcactctttggccacggtcggactatctattgtccgaaggtcc

SEQ ID NO: 512437 - DNA, 55 bp, Artificial
  Synthetic oligonucleotide
ccttacaatcacttaagacctatcgcttgcttttacaacaccctatgggctgccc

SEQ ID NO: 512438 - DNA, 55 bp, Artificial
  Synthetic oligonucleotide
cctgccactgacacaagatcgactgctggcatactcgattgatctcagcatggat

SEQ ID NO: 512439 - DNA, 55 bp, Artificial
  Synthetic oligonucleotide
cctccggatccgcggctatgatgtcgaatcagtgttgctcttcaaggacagcacg

SEQ ID NO: 512440 - DNA, 55 bp, Artificial
  Synthetic oligonucleotide
cccttctacatatacaagtattcaccatgtcgtccgactacgccctgtcttccgc

SEQ ID NO: 512441 - DNA, 55 bp, Artificial
  Synthetic oligonucleotide
ccctggcattgcgcccataaacgagggaggattcgactttgtactctgcagaact

SEQ ID NO: 512442 - DNA, 55 bp, Artificial
  Synthetic oligonucleotide
cccgtagccgcacccgcctgtgagatattcccatcatactggactgccctgtccc

SEQ ID NO: 512443 - DNA, 55 bp, Artificial
  Synthetic oligonucleotide
cccaagcactgggacaacactgctcaggacaagaagcctctggcccgatctcacc

SEQ ID NO: 512444 - DNA, 55 bp, Artificial
  Synthetic oligonucleotide
acacaacggacaagattgagcgtgacggctggtgcgggctctggacgcatggcca

SEQ ID NO: 512445 - DNA, 55 bp, Artificial
  Synthetic oligonucleotide
ccatcggacgaagacaggcaatctcgtggcaaatagaatcgtccaaacacaacgg

SEQ ID NO: 512446 - DNA, 55 bp, Artificial
  Synthetic oligonucleotide
ccatcagtgagtcccattcttccttgtcggagacacccacaatactgtcgtggcc

SEQ ID NO: 512447 - DNA, 55 bp, Artificial
  Synthetic oligonucleotide
ccatagcaaaggccctccccgccgcagaaagcatacgcaaatggcgcccctcaac

SEQ ID NO: 512448 - DNA, 55 bp, Artificial
  Synthetic oligonucleotide
ccacccaaaacatgcagtgcaacgatctcctttacattcggttaagtgcggctag

SEQ ID NO: 512449 - DNA, 55 bp, Artificial
  Synthetic oligonucleotide
ccaatcagacggtcgcgctccccacaagccgagaggtgtcgactattcccaaggg

SEQ ID NO: 512450 - DNA, 55 bp, Artificial
  Synthetic oligonucleotide
ccaaccggtcttgagtcttgttgacgcgcaacagattgtacggcctgactgcttg

SEQ ID NO: 512451 - DNA, 55 bp, Artificial
  Synthetic oligonucleotide
catggccacgtttctctaatctcgacaaccgaattgagtgtcatgcacgaactac

SEQ ID NO: 512452 - DNA, 55 bp, Artificial
  Synthetic oligonucleotide
catccatctcttagattgtgaccatgatcctgattcggttgcgtttcttacagag

SEQ ID NO: 512453 - DNA, 55 bp, Artificial
  Synthetic oligonucleotide
caggttcggcattggattgaagtatacccatcagagtaccccacgaacctttcta

SEQ ID NO: 512454 - DNA, 55 bp, Artificial
  Synthetic oligonucleotide
cactcacggcaccgttctctgccttgggcatcggttctgagccatcatccgtccg

SEQ ID NO: 512455 - DNA, 55 bp, Artificial
  Synthetic oligonucleotide
cacagttacggctcatatctagtatcggtgtcggcatactagtaggaacatcgct

SEQ ID NO: 512456 - DNA, 55 bp, Artificial
  Synthetic oligonucleotide
caatcggcgccttcggtgtaacggtccaagctgagtatattgacaactagctaag

SEQ ID NO: 512457 - DNA, 55 bp, Artificial
  Synthetic oligonucleotide
accaagtcttcggctactggtcaatgtgatgcagtacattggttcctgctacagg

SEQ ID NO: 512458 - DNA, 55 bp, Artificial
  Synthetic oligonucleotide
caaactgactgtctcgtgctagttataccataactttgagcgctagtcgccgtga

SEQ ID NO: 512459 - DNA, 55 bp, Artificial
  Synthetic oligonucleotide
actccgtggtcagtgacggattacacagcagcaccggtcccggagaacaggccca

SEQ ID NO: 512460 - DNA, 55 bp, Artificial
  Synthetic oligonucleotide
aggtcgtcatccgagtctaacgcagccgcattgaccggtagagcagggagtcgga

SEQ ID NO: 512461 - DNA, 55 bp, Artificial
  Synthetic oligonucleotide
actgtagacatgttctcatagccatctctcacgacgcatcatacgccacattcct

SEQ ID NO: 512462 - DNA, 55 bp, Artificial
  Synthetic oligonucleotide
agatggacatcaggaacctcgcgaccgtcattgctcccaacattctgaccaatgc

SEQ ID NO: 512463 - DNA, 55 bp, Artificial
  Synthetic oligonucleotide
gacgacttcgagtagggtctttccgcatagcttgtccagaaccagtgaagcccac

SEQ ID NO: 512464 - DNA, 55 bp, Artificial
  Synthetic oligonucleotide
gaccctaacctggactctggctcgccgcggagtgcacaaacagagtgctcggtag

SEQ ID NO: 512465 - DNA, 55 bp, Artificial
  Synthetic oligonucleotide
gaagacgttgattcaaaagcagcttgtctatgagagaggtagacctttgcggcgc

SEQ ID NO: 512466 - DNA, 55 bp, Artificial
  Synthetic oligonucleotide
ctgtggcctcccagtcttgtccatcgtgggtagcaatcgtgactatcctggctcc

SEQ ID NO: 512467 - DNA, 55 bp, Artificial
  Synthetic oligonucleotide
ctgtacaagtcacacgacgggcccatctatcgatctctctggagtccacatgggc

SEQ ID NO: 512468 - DNA, 55 bp, Artificial
  Synthetic oligonucleotide
aacctttcggtgcaagccgtgacaatatatcctattctagaggttaccccttcct

SEQ ID NO: 512469 - DNA, 55 bp, Artificial
  Synthetic oligonucleotide
ctgagtggctccggatactcgtcggggtggtgaccgcagcgccttctttcacaag

SEQ ID NO: 512470 - DNA, 55 bp, Artificial
  Synthetic oligonucleotide
ctgactcatactgactgtctcgtgctagttataccataactttgagcgctagtcg

SEQ ID NO: 512471 - DNA, 55 bp, Artificial
  Synthetic oligonucleotide
ctctgttgggcgcaaatgccgaagagatggcagtaagctcaagagggtctccgac

SEQ ID NO: 512472 - DNA, 55 bp, Artificial
  Synthetic oligonucleotide
ctcgtgcctcagaacaccccttgggtcacgccccgtgtcctcgcgcgccagataa

SEQ ID NO: 512473 - DNA, 55 bp, Artificial
  Synthetic oligonucleotide
ctcggtcaagaagtgacaaggaatcgattcgggccaaagaattccgagacaagcg

SEQ ID NO: 512474 - DNA, 55 bp, Artificial
  Synthetic oligonucleotide
ctccgagtctacagcatgtacgaatgccgccaaagaaacaccttctgtccctcag

SEQ ID NO: 512475 - DNA, 55 bp, Artificial
  Synthetic oligonucleotide
ctcacacaacgcttcgtgaagcacgcatacacggagacgcggtccacagccaacg

SEQ ID NO: 512476 - DNA, 55 bp, Artificial
  Synthetic oligonucleotide
ctacttggaactcagacgcaacctgccatctggagtgaagattgacccactgggg

SEQ ID NO: 512477 - DNA, 55 bp, Artificial
  Synthetic oligonucleotide
ctaccgaatgcgcgaagagcacgaacacagactacaatcgctaggccaggtatga

SEQ ID NO: 512478 - DNA, 55 bp, Artificial
  Synthetic oligonucleotide
cgttactctggcacgcaaatatgaccggtagcaagttggcgaagtcattaccggt

SEQ ID NO: 512479 - DNA, 55 bp, Artificial
  Synthetic oligonucleotide
cgtggagggcgagcaactcgccacaaccgttgcgttttccgaatcaaaggcacat

SEQ ID NO: 512480 - DNA, 55 bp, Artificial
  Synthetic oligonucleotide
cgtgctgttagggcttgtggtgcagatatgcgtctatcgcgaaatgaatgccggt

SEQ ID NO: 512481 - DNA, 55 bp, Artificial
  Synthetic oligonucleotide
cgtctttggggccactgcgatgtgcagcgggtgtttgtcagttggctgggtgctg

SEQ ID NO: 512482 - DNA, 55 bp, Artificial
  Synthetic oligonucleotide
cgtccaagaaatatcagacgtctgcgctttgcgtagctgccctgtttgtattgac

SEQ ID NO: 512483 - DNA, 55 bp, Artificial
  Synthetic oligonucleotide
cgtaaggcgtgatgcgatcaggtaaaagcaaggcctcgcggttgggcatttgcaa

SEQ ID NO: 512484 - DNA, 55 bp, Artificial
  Synthetic oligonucleotide
cgggatatctgtcgaactgaatggtggcccttgtaggctctccatctagactgac

SEQ ID NO: 512485 - DNA, 55 bp, Artificial
  Synthetic oligonucleotide
cggcttctatccacccagtgggtcaatcttcactccagatggcaggttgcgtctg

SEQ ID NO: 512486 - DNA, 55 bp, Artificial
  Synthetic oligonucleotide
cggccggtattgagctacactaggtggatgccttgacgggtcaagatctcagccg

SEQ ID NO: 512487 - DNA, 55 bp, Artificial
  Synthetic oligonucleotide
cgcttctcttaaacaaacatcaaagaatccgactcaaacaagcctcaaccatggc

SEQ ID NO: 512488 - DNA, 55 bp, Artificial
  Synthetic oligonucleotide
cgcgccttgaaaagctgcccgctttctcagcttgccacaaagtccacaaagtagc

SEQ ID NO: 512489 - DNA, 55 bp, Artificial
  Synthetic oligonucleotide
cgaagatgtatgtgctgacgcgattgtgtttcaagctattgaagtgggcgcgcac

SEQ ID NO: 512490 - DNA, 55 bp, Artificial
  Synthetic oligonucleotide
ccttgtggatgggttgggagatcgagcatatgggttgtgcgacggatctgccatg

SEQ ID NO: 512491 - DNA, 54 bp, Artificial
  Synthetic oligonucleotide
aatgtacctatgcagcacggcgtattctcccgccgagacaacgcaccggagcat

SEQ ID NO: 512492 - DNA, 54 bp, Artificial
  Synthetic oligonucleotide
cccttttcaatcagcaaaggcctcatcagaagaccttctatcagtcagattccc

SEQ ID NO: 512493 - DNA, 53 bp, Artificial
  Synthetic oligonucleotide
gggcgtaaagaagatatggcgggttcaagactctttcatagacacatggagct

SEQ ID NO: 512494 - DNA, 53 bp, Artificial
  Synthetic oligonucleotide
aattgcatcccattccgtcttgccctggtccttttgacggacaaagtagtttt

SEQ ID NO: 512495 - DNA, 53 bp, Artificial
  Synthetic oligonucleotide
tgcgtcatcatcagcgtgacaagctcacactgatccctacctttgtgtgcgag

SEQ ID NO: 512496 - DNA, 52 bp, Artificial
  Synthetic oligonucleotide
ataagaagctgcggtgatgtaggaagaagacgtagttgtgtcgagacgaggt

SEQ ID NO: 512497 - DNA, 52 bp, Artificial
  Synthetic oligonucleotide
ctgcgggcctatgtactccgtaatagccatcaaatcgccaacgcgaaccgaa

SEQ ID NO: 512498 - DNA, 51 bp, Artificial
  Synthetic oligonucleotide
agggttccatgagctacaccggttcaattggctctgacatttgcttgatca

SEQ ID NO: 512499 - DNA, 51 bp, Artificial
  Synthetic oligonucleotide
ttgcaccgctcattcacgaagccaatagcttagtgtggcactgaatggggt

SEQ ID NO: 512500 - DNA, 50 bp, Artificial
  Synthetic oligonucleotide
caagacagatgaggcgacgagcaaaatgcaaaccatgttgattggctgcc

SEQ ID NO: 512501 - DNA, 50 bp, Artificial
  Synthetic oligonucleotide
tttcacaaccaatctgccagagatgaatctagctcacaccacctcctttt

SEQ ID NO: 512502 - DNA, 55 bp, Artificial
  Synthetic oligonucleotide
ggcctacactcacggacattgatatcatacaacgcacatcgacaactgatcgacg

SEQ ID NO: 512503 - DNA, 55 bp, Artificial
  Synthetic oligonucleotide
gcgcaaacatacaagaaacccagcctggcgatacaaatggagcagccccaccatg

SEQ ID NO: 512504 - DNA, 55 bp, Artificial
  Synthetic oligonucleotide
gatgggcgcggatgattgacgattttgtaccgcggggtgatcaagggaggatcgg

SEQ ID NO: 512505 - DNA, 55 bp, Artificial
  Synthetic oligonucleotide
gagtggtgcgtgttctgattgcactttagtggactggtttccatattgatgtacg

SEQ ID NO: 512506 - DNA, 55 bp, Artificial
  Synthetic oligonucleotide
ctggcagctactttcgtgcgatagtcacgtcatgcgatcataccagaaacctcca

SEQ ID NO: 512507 - DNA, 55 bp, Artificial
  Synthetic oligonucleotide
cgtttggcagccgtccagtgggttaaatcgggatctgccgtgaaggctccgagtc

SEQ ID NO: 512508 - DNA, 55 bp, Artificial
  Synthetic oligonucleotide
cggagatagaccggaattgcatgggcgtgacaatgctactgataaccatctgctg

SEQ ID NO: 512509 - DNA, 55 bp, Artificial
  Synthetic oligonucleotide
cccgcgagttctcctctttggactgccgtaacctaaacatcgtcaaacagccgca

SEQ ID NO: 512510 - DNA, 55 bp, Artificial
  Synthetic oligonucleotide
catgcgcacctgcggtaaaacgcgctcgaacgtcccactgcagatggccgaaagc

SEQ ID NO: 512511 - DNA, 55 bp, Artificial
  Synthetic oligonucleotide
cactccttgtcctgtaaggatggcttgtgctacggattctcgagaggagtataca

SEQ ID NO: 512512 - DNA, 55 bp, Artificial
  Synthetic oligonucleotide
atcgatgtacagtcaactctcccatattgcatacccctcgggaaatgctccaggc

SEQ ID NO: 512513 - DNA, 55 bp, Artificial
  Synthetic oligonucleotide
agctcgataggcttcctctgtggggttggtaaggtactattcaatgtagagtagc

SEQ ID NO: 512514 - DNA, 55 bp, Artificial
  Synthetic oligonucleotide
acaccgtaccttaatgatatttcgaatctccagcacgagtggagcgtaaagtccg

SEQ ID NO: 512515 - DNA, 53 bp, Artificial
  Synthetic oligonucleotide
agcggaatcgtatggaattgtcgagagacacgctgacccgttttcctaagtat

SEQ ID NO: 512516 - DNA, 51 bp, Artificial
  Synthetic oligonucleotide
ggctatactgtatacgcctcgctatcattgtctcgataggggagaaagggg

SEQ ID NO: 512517 - DNA, 50 bp, Artificial
  Synthetic oligonucleotide
tcgcgtgagcatatgagttcaatcatacgataaagccaacccagtctcgt

SEQ ID NO: 512518 - DNA, 50 bp, Artificial
  Synthetic oligonucleotide
ttttcggttgagacatcctgagacagacaggtgtcccagaagcttggttg

SEQ ID NO: 512519 - DNA, 55 bp, Artificial
  Synthetic oligonucleotide
ttcctcggactttgacgaggcgactcggaacaggttttggggtcgattcaccaaa

SEQ ID NO: 512520 - DNA, 55 bp, Artificial
  Synthetic oligonucleotide
tgtcaggcacacaagtaaggtagcctagtgactggatgaggtgctagcctgaacc

SEQ ID NO: 512521 - DNA, 55 bp, Artificial
  Synthetic oligonucleotide
tggctcccgacaagccctactcagcccttgaccgaaccactgcactaagccaccc

SEQ ID NO: 512522 - DNA, 55 bp, Artificial
  Synthetic oligonucleotide
tctggtccttgcaccatcgaaagcgatatgtatctggacgggagacctcctcaaa

SEQ ID NO: 512523 - DNA, 55 bp, Artificial
  Synthetic oligonucleotide
gtggtccttccactgtcgcaattcgtcgtatggcttaattcgcagaaaccttatg

SEQ ID NO: 512524 - DNA, 55 bp, Artificial
  Synthetic oligonucleotide
gtcctatttctggatagaatcgtggacctgttccgacgaggtcaagtcgcaggcg

SEQ ID NO: 512525 - DNA, 55 bp, Artificial
  Synthetic oligonucleotide
gtcattaccaaatcaagccttcgatataatagcgtctgcgacaatggcggttagc

SEQ ID NO: 512526 - DNA, 55 bp, Artificial
  Synthetic oligonucleotide
ggtggccataagctgcctggaaacgtcattgcccaattcttcgacgctgggaagt

SEQ ID NO: 512527 - DNA, 55 bp, Artificial
  Synthetic oligonucleotide
gcatctacgcgcctttgttatcgtgaaccattctgaccagagtcgcagccggtca

SEQ ID NO: 512528 - DNA, 55 bp, Artificial
  Synthetic oligonucleotide
gatgagttatggcgagaggctgctcggatgtgtctctttgaatctcagtcatggc

SEQ ID NO: 512529 - DNA, 55 bp, Artificial
  Synthetic oligonucleotide
cttgctgttatcgtgacatattggtcaaagcaacatgagggtaaacaggttgcgc

SEQ ID NO: 512530 - DNA, 55 bp, Artificial
  Synthetic oligonucleotide
ctgaggtcccattcggcccataaggatggcgacagaagaatacgattcggcggag

SEQ ID NO: 512531 - DNA, 55 bp, Artificial
  Synthetic oligonucleotide
ctccgtcccaaacgaagtgcctgaccgaccggccctaatccgaaattgcctcgtt

SEQ ID NO: 512532 - DNA, 55 bp, Artificial
  Synthetic oligonucleotide
cgtagccgattgatggcacgtctggaaactgcatccttggtatatctttatgcat

SEQ ID NO: 512533 - DNA, 55 bp, Artificial
  Synthetic oligonucleotide
cgctgctgtagtacatctgacgacggttattcatgagaacacggtcctgccacac

SEQ ID NO: 512534 - DNA, 55 bp, Artificial
  Synthetic oligonucleotide
ccgcttgctggtactgtccgcgattttggctgtagaatcgagttccgggttgtcg

SEQ ID NO: 512535 - DNA, 55 bp, Artificial
  Synthetic oligonucleotide
ccgcccgtccctgaatgtaccgccgagcatacccgcaccgcaaataggaagaaac

SEQ ID NO: 512536 - DNA, 55 bp, Artificial
  Synthetic oligonucleotide
cattctttgcccgcaagcccaaagcagtcatcattgaggttggtggacaggagct

SEQ ID NO: 512537 - DNA, 55 bp, Artificial
  Synthetic oligonucleotide
catgcggccaacggtacgtatatggaatggtgcgtcgtattctggcaaaacgggc

SEQ ID NO: 512538 - DNA, 55 bp, Artificial
  Synthetic oligonucleotide
cacctatgcgcaccgatttaggacgggatagcggaagtgaatcgcgtggaccagc

SEQ ID NO: 512539 - DNA, 55 bp, Artificial
  Synthetic oligonucleotide
acatacggttcgcacgccttactgttgtaatacccctgccttcgcggacactagg

SEQ ID NO: 512540 - DNA, 54 bp, Artificial
  Synthetic oligonucleotide
gatagagatgcgcaagacgacgcttggcgaggatcatcccgaaacgctgagtag

SEQ ID NO: 512541 - DNA, 53 bp, Artificial
  Synthetic oligonucleotide
agagacaaattggtgcattggtagagcattcactgccctctctttagcggctc

SEQ ID NO: 512542 - DNA, 51 bp, Artificial
  Synthetic oligonucleotide
tctgagccgtcttgatatgcctattggtggttggcgcacgcgtaggggctc

SEQ ID NO: 512543 - DNA, 50 bp, Artificial
  Synthetic oligonucleotide
atgaggactaccatctccgccaccgattgagaacacaacgaatcgcagag

SEQ ID NO: 512544 - DNA, 55 bp, Artificial
  Synthetic oligonucleotide
ttcggtatgtctttattctttatggcctcgccagcacgcttgctgacctagcccc

SEQ ID NO: 512545 - DNA, 55 bp, Artificial
  Synthetic oligonucleotide
tggcgaatgacagtgattgcataacatacggttgtgccgaccccttggaagtgat

SEQ ID NO: 512546 - DNA, 55 bp, Artificial
  Synthetic oligonucleotide
gtaagttgcttgatgaatgtggatacaacaccatgaatgacttggatggataggt

SEQ ID NO: 512547 - DNA, 55 bp, Artificial
  Synthetic oligonucleotide
gggccttcttaaggatagacaccgagagcattgaaagaccgtacgagaactcggc

SEQ ID NO: 512548 - DNA, 55 bp, Artificial
  Synthetic oligonucleotide
ggcccaactgatatcgagttgttgctcgactgctgtggcatgcttgtcagtgtct

SEQ ID NO: 512549 - DNA, 55 bp, Artificial
  Synthetic oligonucleotide
ggaacctaagccacgcgtccgtgaggacaagtatcgcccactgaagtgcagatac

SEQ ID NO: 512550 - DNA, 55 bp, Artificial
  Synthetic oligonucleotide
gacggtcctagtgtggcttgtggaccaaatgatgcgagattcggagggttagcac

SEQ ID NO: 512551 - DNA, 55 bp, Artificial
  Synthetic oligonucleotide
cgtttattacagtcgacgtctacaaaatggcacaggttccaagagtgtcctctca

SEQ ID NO: 512552 - DNA, 55 bp, Artificial
  Synthetic oligonucleotide
cgccctatgcaaagagggccctatttagagcctacgaatatatctagcaccgggg

SEQ ID NO: 512553 - DNA, 55 bp, Artificial
  Synthetic oligonucleotide
cgcccgtaagcttgaaaggacgcggtcacgagagacagtgcatatgttccacgtc

SEQ ID NO: 512554 - DNA, 55 bp, Artificial
  Synthetic oligonucleotide
cgaacttcagtggaattgacggctgagcagcactagcacgtaagaaaccctgtga

SEQ ID NO: 512555 - DNA, 55 bp, Artificial
  Synthetic oligonucleotide
cccgcgcaacccgagccatgtcagtcaatttcgtttgtctataatccatatgtta

SEQ ID NO: 512556 - DNA, 55 bp, Artificial
  Synthetic oligonucleotide
cattactgggaagtcgcgtcggatacattgccagagaaggagtcgcattggtagc

SEQ ID NO: 512557 - DNA, 55 bp, Artificial
  Synthetic oligonucleotide
acgacgaatatacagtacaaccgaaggcatacaacggtgataagagcgatggacg

SEQ ID NO: 512558 - DNA, 55 bp, Artificial
  Synthetic oligonucleotide
aattctacgacacgagtacgactacgatacaaaacgactcgcgcctagtcctcgt

SEQ ID NO: 512559 - DNA, 52 bp, Artificial
  Synthetic oligonucleotide
ccccaccccaattgcttcacacacaccttcatcttagtttcaagtgtcagag

SEQ ID NO: 512560 - DNA, 52 bp, Artificial
  Synthetic oligonucleotide
acttgtaagcgagagatagcctaaagcctgttcacgacagttcttaccggct

SEQ ID NO: 512561 - DNA, 55 bp, Artificial
  Synthetic oligonucleotide
tgcgtatgttccatccgcgctgactcggagctactcacatcaaagctgaccgtat

SEQ ID NO: 512562 - DNA, 55 bp, Artificial
  Synthetic oligonucleotide
tctcgaaaatgccgtagttgagcgtcgagcgcacaaagttgttgccctgcgcagg

SEQ ID NO: 512563 - DNA, 55 bp, Artificial
  Synthetic oligonucleotide
tacttccaaacccgtcccgagtcggcggactctctcccaggtttccgcacgacgt

SEQ ID NO: 512564 - DNA, 55 bp, Artificial
  Synthetic oligonucleotide
gtggattcctctctcagggtaacggcatgtcccataatatgagagctaatcgacg

SEQ ID NO: 512565 - DNA, 55 bp, Artificial
  Synthetic oligonucleotide
gtctgttaaccagttatcgtgtctccagaatgagtactcagcaaacaaaacccgg

SEQ ID NO: 512566 - DNA, 55 bp, Artificial
  Synthetic oligonucleotide
ggtgtccagtggcgaacatctatgggtgaaattagtcgagcagcattagctaatc

SEQ ID NO: 512567 - DNA, 55 bp, Artificial
  Synthetic oligonucleotide
ggggtcatctggcgcacgcaagtccgtagcggtcatgatgagctctaggttaacc

SEQ ID NO: 512568 - DNA, 55 bp, Artificial
  Synthetic oligonucleotide
ggcttgcgcccggctttatacttcagcttatgcctcagcatatcgtcgacggacc

SEQ ID NO: 512569 - DNA, 55 bp, Artificial
  Synthetic oligonucleotide
ggctgcattcaccgcccgccggttcgtccactgcatgtacggctctcgaatcagt

SEQ ID NO: 512570 - DNA, 55 bp, Artificial
  Synthetic oligonucleotide
ggctacctcccgtgtctatcccctaccacagcagaatgaatctagtgtagtctac

SEQ ID NO: 512571 - DNA, 55 bp, Artificial
  Synthetic oligonucleotide
ggacaacgtacgtgcagcacacttcagacttagaggtgatactgacgactagatg

SEQ ID NO: 512572 - DNA, 55 bp, Artificial
  Synthetic oligonucleotide
gcttggtttcactcagggttaggtcaactggcaggtgttaatgacagtggaggtc

SEQ ID NO: 512573 - DNA, 55 bp, Artificial
  Synthetic oligonucleotide
gctctttgtggccgttactagaaagtgacttgcggaggctcttcatggtggtggt

SEQ ID NO: 512574 - DNA, 55 bp, Artificial
  Synthetic oligonucleotide
gccaatttaaccctgccgtagaccgaattgtgttgggcaaggttccggcgcttcg

SEQ ID NO: 512575 - DNA, 55 bp, Artificial
  Synthetic oligonucleotide
gcactgcgcaaactcgctgacgaacacttattgggcgaacgctctctacagtacc

SEQ ID NO: 512576 - DNA, 55 bp, Artificial
  Synthetic oligonucleotide
gatacgaacgagtagcgggtgaggcaatgaccctgggaggagtcgagcgtatctg

SEQ ID NO: 512577 - DNA, 55 bp, Artificial
  Synthetic oligonucleotide
gaaacatataacttcacctgcaagtgttctgtttgtgccaacacgggccctacag

SEQ ID NO: 512578 - DNA, 55 bp, Artificial
  Synthetic oligonucleotide
cttgggaggctctgtgttgggcttgtacgggaacgacatggctgtgcggtaggtc

SEQ ID NO: 512579 - DNA, 55 bp, Artificial
  Synthetic oligonucleotide
cgtaagccctataccttcgttctctatagctcaacttatcccttactgtgctcag

SEQ ID NO: 512580 - DNA, 55 bp, Artificial
  Synthetic oligonucleotide
cgctgaggaatggaaataacatgggaccgcacggctgcgcactcttattcgagcg

SEQ ID NO: 512581 - DNA, 55 bp, Artificial
  Synthetic oligonucleotide
ccttgacacctccacgacatgggacatgcgacttgtcgtcctctaccgcctcatc

SEQ ID NO: 512582 - DNA, 55 bp, Artificial
  Synthetic oligonucleotide
ccggagagccgtgggtgaaacactgcttatccgaggggaatcacggttgccgagc

SEQ ID NO: 512583 - DNA, 55 bp, Artificial
  Synthetic oligonucleotide
ataccatctgccccagccgactgttgcccagcgccgtgtactgaaccccgcctta

SEQ ID NO: 512584 - DNA, 54 bp, Artificial
  Synthetic oligonucleotide
gtcacgacggtatataaatcgcttgcctacagggtcttcggcgccccgccattc

SEQ ID NO: 512585 - DNA, 52 bp, Artificial
  Synthetic oligonucleotide
atctacaccggaggtcagcgtacagttccacaatgtcgctttgagacgtgcc

SEQ ID NO: 512586 - DNA, 55 bp, Artificial
  Synthetic oligonucleotide
gtgaaaacaggttgttcgtagattttaggtatttgatgatcgtgctgtcgcaatc

SEQ ID NO: 512587 - DNA, 55 bp, Artificial
  Synthetic oligonucleotide
gtacattgtgtaaatacgccagaagagtatcctaatgcgagatgaacattgccac

SEQ ID NO: 512588 - DNA, 55 bp, Artificial
  Synthetic oligonucleotide
ggtgtacctaccagggttggtactgctcgtatctgtggaacattatttcggtctc

SEQ ID NO: 512589 - DNA, 55 bp, Artificial
  Synthetic oligonucleotide
gcgtcctgccctacgcgtaagctacctaggttatgaaagttgctaaacagagatt

SEQ ID NO: 512590 - DNA, 55 bp, Artificial
  Synthetic oligonucleotide
gcgataaggcattgaagtaaaccactgctgttgattggtccgataacggacacac

SEQ ID NO: 512591 - DNA, 55 bp, Artificial
  Synthetic oligonucleotide
gcgaatgcaaactagcctccgggtgaatatagtagtaggtaagccttattgtttt

SEQ ID NO: 512592 - DNA, 55 bp, Artificial
  Synthetic oligonucleotide
ctacccacatcaccgctccattctagaagaatactaaggaccgttcgcatttcta

SEQ ID NO: 512593 - DNA, 55 bp, Artificial
  Synthetic oligonucleotide
caggcgcagggtttaaattcttatgacctaagacgcaggaatataaccgagaagc

SEQ ID NO: 512594 - DNA, 55 bp, Artificial
  Synthetic oligonucleotide
cagcagtaagcacttccgaaggtgcgagcaggaggcgtagtattttcaagaccgc

SEQ ID NO: 512595 - DNA, 55 bp, Artificial
  Synthetic oligonucleotide
caacgcattcacacgtaaaggcacacgaagttcagggccacgaacattagcaaac

SEQ ID NO: 512596 - DNA, 55 bp, Artificial
  Synthetic oligonucleotide
agttataaaacggggactaagtaattttaaagaccgtttggtttgggttgcgttc

SEQ ID NO: 512597 - DNA, 55 bp, Artificial
  Synthetic oligonucleotide
acgagtatttcatagcgaaatgcgggttttcagaggaagattcaagtacttggaa

SEQ ID NO: 512598 - DNA, 54 bp, Artificial
  Synthetic oligonucleotide
ggaatttactgtgggcacatatgggtttctctatcccgctaaatttctgtcatc

SEQ ID NO: 512599 - DNA, 54 bp, Artificial
  Synthetic oligonucleotide
aggatactggtcgagaaggcacttaacctgtgtcgaagtaaatagttctggcgg

SEQ ID NO: 512600 - DNA, 54 bp, Artificial
  Synthetic oligonucleotide
tcatccgggatccttctggaggttgctttggttaagtccagtttcacaactact

SEQ ID NO: 512601 - DNA, 53 bp, Artificial
  Synthetic oligonucleotide
cgacttattatattatgtgtgggcgagatcatcagttgccgtctcatcataca

SEQ ID NO: 512602 - DNA, 51 bp, Artificial
  Synthetic oligonucleotide
gttggctggatgtatggggcctctcacgaagtcgggcagactttccgtttt

SEQ ID NO: 512603 - DNA, 55 bp, Artificial
  Synthetic oligonucleotide
tcgatagaagtgcttggaaagtttctggatcactaagctgtagtcgagatgagga

SEQ ID NO: 512604 - DNA, 55 bp, Artificial
  Synthetic oligonucleotide
aagacgggtgccaggccacatttgttcctccagctcagtctgcggacccagcgtg

SEQ ID NO: 512605 - DNA, 55 bp, Artificial
  Synthetic oligonucleotide
acaggactgaccaaaatatgtgtgcaggtcgagctacctgttcccgtcaagcacc

SEQ ID NO: 512606 - DNA, 55 bp, Artificial
  Synthetic oligonucleotide
catattagtatacgcacttctcagtgaacacaccaggccagagaatcacggtcgg

SEQ ID NO: 512607 - DNA, 55 bp, Artificial
  Synthetic oligonucleotide
catcgacgctagagcgagtcttgctttgtttcggttgtatcagtccgaatgggag

SEQ ID NO: 512608 - DNA, 55 bp, Artificial
  Synthetic oligonucleotide
cccctaattgctaccaagccaaattcttgatacaagccttctgcatgactcctac

SEQ ID NO: 512609 - DNA, 55 bp, Artificial
  Synthetic oligonucleotide
ccgcgagtacgtttccccatcttcacatatccgacctacctaatccgctcaacgc

SEQ ID NO: 512610 - DNA, 55 bp, Artificial
  Synthetic oligonucleotide
cgagagtaacacagtaatacaagggtctgctaactggctttcgctgtcctttctc

SEQ ID NO: 512611 - DNA, 55 bp, Artificial
  Synthetic oligonucleotide
gtgtgtatctggagtaatcagcgtcatgagccacatactggaagagaaacgaacc

SEQ ID NO: 512612 - DNA, 55 bp, Artificial
  Synthetic oligonucleotide
gactggctctccaaactggtgctgccaggtattgaggttctgcgtccaggtgacc

SEQ ID NO: 512613 - DNA, 55 bp, Artificial
  Synthetic oligonucleotide
gccctcgcgtcccctgtccgtcaccttgaggcgtgtctgtatctgcactttccct

SEQ ID NO: 512614 - DNA, 53 bp, Artificial
  Synthetic oligonucleotide
aacggctcgactgcgggtatcaaaatgccggtgtatgcgcctacgacctagta

SEQ ID NO: 512615 - DNA, 52 bp, Artificial
  Synthetic oligonucleotide
tatctctccaagtggactgcctatccccggatcttcttcgtacgtcaatacg

SEQ ID NO: 512616 - DNA, 52 bp, Artificial
  Synthetic oligonucleotide
aggtgttctgcctatatccgctttgactgacgtcgtgttcttccgtggtctt

SEQ ID NO: 512617 - DNA, 52 bp, Artificial
  Synthetic oligonucleotide
aacactgagggatatgacgtggacaacacaagggtgctctgggtggtccctt

SEQ ID NO: 512618 - DNA, 51 bp, Artificial
  Synthetic oligonucleotide
cgaggtcggctgttgcatctctaaacgcctgcttcgtttgcggattggtgt

SEQ ID NO: 512619 - DNA, 51 bp, Artificial
  Synthetic oligonucleotide
ttccagtatgtgacaatgctcatactcgtgtaggaccccggcctgtcgctc

SEQ ID NO: 512620 - DNA, 55 bp, Artificial
  Synthetic oligonucleotide
gtacagctcgaggaaaaccataacgaccgtccagtcttctctttgatcggccgca

SEQ ID NO: 512621 - DNA, 55 bp, Artificial
  Synthetic oligonucleotide
ggcctggcagtagaaataggctggttgttcagggcagtcgagtctgagaccgctc

SEQ ID NO: 512622 - DNA, 55 bp, Artificial
  Synthetic oligonucleotide
gctacttgcctcacggatattgagctcttgacgactgacttgctccgaccgcgga

SEQ ID NO: 512623 - DNA, 55 bp, Artificial
  Synthetic oligonucleotide
gctacttcacgtgcaattcaacgatgtcagaaggaacagcatggcacacgtgaga

SEQ ID NO: 512624 - DNA, 55 bp, Artificial
  Synthetic oligonucleotide
gcgtctacagttgctggtatggtgaggtacggcactctgccaggcactccaaggc

SEQ ID NO: 512625 - DNA, 55 bp, Artificial
  Synthetic oligonucleotide
gagccgtgtcccaatcacggcgagtgttcctgagggctattgctacgactgttgg

SEQ ID NO: 512626 - DNA, 55 bp, Artificial
  Synthetic oligonucleotide
cggcatggatggtatttcacggccaagcctacctccaaggacatcgacccagagc

SEQ ID NO: 512627 - DNA, 55 bp, Artificial
  Synthetic oligonucleotide
cgcgaccgcgaaaggtgtacgacctaatcctcccttctaccgaaatcgactgact

SEQ ID NO: 512628 - DNA, 55 bp, Artificial
  Synthetic oligonucleotide
cctcattgcggaatcttcgcacctgctctgctagagcaaattgtcgacacgccca

SEQ ID NO: 512629 - DNA, 55 bp, Artificial
  Synthetic oligonucleotide
ccagcgttcacgaggatacagcggtctgaggtgccatgagctcgaagtcttgtgt

SEQ ID NO: 512630 - DNA, 55 bp, Artificial
  Synthetic oligonucleotide
ccaccttcactcctgtcctcataaactcgcgcctgccgacgagtgacgagtgacc

SEQ ID NO: 512631 - DNA, 55 bp, Artificial
  Synthetic oligonucleotide
cagggcaatggtgctgtgtgagagtgtttcgccttggagcgatggagttggacag

SEQ ID NO: 512632 - DNA, 55 bp, Artificial
  Synthetic oligonucleotide
cactccgcttgtcgcttggccatgtacctgtctggttgatgcgtcgtggctggac

SEQ ID NO: 512633 - DNA, 55 bp, Artificial
  Synthetic oligonucleotide
caagtctttgtgatatgttacatgatgtctaagccgcttgacaacccgcggccgc

SEQ ID NO: 512634 - DNA, 55 bp, Artificial
  Synthetic oligonucleotide
aggaggcatggactgcggctggtattgaaccatgcccgggttgtaaggcggcgca

SEQ ID NO: 512635 - DNA, 53 bp, Artificial
  Synthetic oligonucleotide
gctcgagcaacaattcggtgtcaccatcaacgttccccgccagagcgagactg

SEQ ID NO: 512636 - DNA, 52 bp, Artificial
  Synthetic oligonucleotide
gccagatttccttccagacacgaaacgtgatctcatcgagaccaggcgcctt

SEQ ID NO: 512637 - DNA, 55 bp, Artificial
  Synthetic oligonucleotide
gaagcttgaacgccagtataggtattcgtgacaggatctataactactgtgctcc

SEQ ID NO: 512638 - DNA, 55 bp, Artificial
  Synthetic oligonucleotide
gagtatcctggatctccaaacactgaactcaaacctccaagcattaccgaccagg

SEQ ID NO: 512639 - DNA, 55 bp, Artificial
  Synthetic oligonucleotide
gatcagagtctagatgtgctccaccagctgattattagacagcataccatgggcc

SEQ ID NO: 512640 - DNA, 55 bp, Artificial
  Synthetic oligonucleotide
gatcgatcgagttcaataatatttcacctgcacccaattcctcgcaagcggtaca

SEQ ID NO: 512641 - DNA, 55 bp, Artificial
  Synthetic oligonucleotide
gcaacaacctggtccctgaagacacgcaaattatgcatgtgacttgaccctaaga

SEQ ID NO: 512642 - DNA, 55 bp, Artificial
  Synthetic oligonucleotide
gcaatcaccaaaggtgactctattctggcccgtaatcttagcaatgaacttgggc

SEQ ID NO: 512643 - DNA, 55 bp, Artificial
  Synthetic oligonucleotide
gcatcggatataacgtacgtcttctgatttccggtccgtccatgcattgcctcac

SEQ ID NO: 512644 - DNA, 55 bp, Artificial
  Synthetic oligonucleotide
gccatggcctgcgaaccgtggagacattcaccaagagctttccagagaaattgcc

SEQ ID NO: 512645 - DNA, 55 bp, Artificial
  Synthetic oligonucleotide
gcgataaccccttcgctagtgatgcctctatcatcggagtagacatctgaagcgg

SEQ ID NO: 512646 - DNA, 55 bp, Artificial
  Synthetic oligonucleotide
gcgtcatccactgacacaccagcatggacaacattggcagaattggcctcaactt

SEQ ID NO: 512647 - DNA, 55 bp, Artificial
  Synthetic oligonucleotide
ggaaatgttcaaggacttgagagtgggcacttcaaacaagtggcggaacgtgggg

SEQ ID NO: 512648 - DNA, 55 bp, Artificial
  Synthetic oligonucleotide
ggacccattgttagacgcagggattgcattaacattgacggttaaactcagtcgt

SEQ ID NO: 512649 - DNA, 55 bp, Artificial
  Synthetic oligonucleotide
ggaggcgagatttcttcggcgtatgtttcactttgaatgtagtagttcgcagcag

SEQ ID NO: 512650 - DNA, 55 bp, Artificial
  Synthetic oligonucleotide
ggatcctagtctcttcgccaacaaggaaccttcgtttgttcctgctcgttacact

SEQ ID NO: 512651 - DNA, 55 bp, Artificial
  Synthetic oligonucleotide
ggcgttatgttattcaaaagcggaaagatgttgccaattcggcgaggctcgagaa

SEQ ID NO: 512652 - DNA, 55 bp, Artificial
  Synthetic oligonucleotide
ggtatctcttcgaacagtgacttggtagcgattttagccttcaaacactgcgcaa

SEQ ID NO: 512653 - DNA, 55 bp, Artificial
  Synthetic oligonucleotide
ggtcatttcggccaatctcctaaattgaaaatcgttcgcatgagatgcacccagt

SEQ ID NO: 512654 - DNA, 55 bp, Artificial
  Synthetic oligonucleotide
gtacgttgatgtgggaggtataagcccggatcaagaatgtcaacgctccttgttg

SEQ ID NO: 512655 - DNA, 55 bp, Artificial
  Synthetic oligonucleotide
gtgcatccttcgcatagttcggtgccttcattgttaaattacatcacctctccaa

SEQ ID NO: 512656 - DNA, 55 bp, Artificial
  Synthetic oligonucleotide
gttaagtctaactactgagcatataccgccgatgctagccacttacctagatgta

SEQ ID NO: 512657 - DNA, 55 bp, Artificial
  Synthetic oligonucleotide
taccgtcaataatgatcttaccgctttggagctcagagagacggtacaaagcagt

SEQ ID NO: 512658 - DNA, 55 bp, Artificial
  Synthetic oligonucleotide
tagctaaccagcacgattgggtttctgaagttctcgtggggagaacaaaccgggg

SEQ ID NO: 512659 - DNA, 55 bp, Artificial
  Synthetic oligonucleotide
tcgagattccgacaaatgggaaacagtatcgggacttgggtacgatgacattgcg

SEQ ID NO: 512660 - DNA, 55 bp, Artificial
  Synthetic oligonucleotide
tttattcgtatgcttcaaggtaaaacctatttgttatcaaagatgccccttcccc

SEQ ID NO: 512661 - DNA, 55 bp, Artificial
  Synthetic oligonucleotide
acgtaatttggccgagaaataatgtggacattcttgcaaaagggtttcgtaaatc

SEQ ID NO: 512662 - DNA, 55 bp, Artificial
  Synthetic oligonucleotide
agcaattgaatatttggccttctagaaagtggtacggttttgatggcaggtcgtg

SEQ ID NO: 512663 - DNA, 55 bp, Artificial
  Synthetic oligonucleotide
atcggcaagtcccctaggtttgagctaggtctatgtatgttcgaatcataccgac

SEQ ID NO: 512664 - DNA, 55 bp, Artificial
  Synthetic oligonucleotide
atttctccccgttatttcctgggtctaatgaacttgatcagatctggcgcacact

SEQ ID NO: 512665 - DNA, 55 bp, Artificial
  Synthetic oligonucleotide
caaaagatctaaatataactgccataactcctcgctgtctgcaatagcactggtt

SEQ ID NO: 512666 - DNA, 55 bp, Artificial
  Synthetic oligonucleotide
caaaaggtagcagaaaagttgccatcaccagagagtgaatcggaaccagaaagtg

SEQ ID NO: 512667 - DNA, 55 bp, Artificial
  Synthetic oligonucleotide
cagtttggatggcccattctggactcaagacatcatatactaacaattttagacc

SEQ ID NO: 512668 - DNA, 55 bp, Artificial
  Synthetic oligonucleotide
ccaagtcatattcggtgccactgcttggaaatctggtgtggatttgcttcccatg

SEQ ID NO: 512669 - DNA, 55 bp, Artificial
  Synthetic oligonucleotide
ccaattcagggtctatgccactgaactcacctccaaaatccttcgcagggacaga

SEQ ID NO: 512670 - DNA, 55 bp, Artificial
  Synthetic oligonucleotide
ccagcgagcaattcgagtgtaggatcggtcaatcaatcgagatcatcgacaccaa

SEQ ID NO: 512671 - DNA, 55 bp, Artificial
  Synthetic oligonucleotide
ccagttcattgacgagtactagtctgagtcctatgacgccaatatacccgttacc

SEQ ID NO: 512672 - DNA, 55 bp, Artificial
  Synthetic oligonucleotide
ccatacaggtcaaaagcgacgttgatgtgatgtggttggcggccataaccgtctg

SEQ ID NO: 512673 - DNA, 55 bp, Artificial
  Synthetic oligonucleotide
ccctcatcgaatatattgcgacaatgtctcgttttctcggttttatgccgctcca

SEQ ID NO: 512674 - DNA, 55 bp, Artificial
  Synthetic oligonucleotide
ccttctaagatccagtactgccctgattgtatcaattcggctatcatcgatgacc

SEQ ID NO: 512675 - DNA, 55 bp, Artificial
  Synthetic oligonucleotide
ccttcttacctaatggagtggttctaacaattgggtgaacgttttcaactggatc

SEQ ID NO: 512676 - DNA, 55 bp, Artificial
  Synthetic oligonucleotide
cgagtgtactgttgactaactcattgggaaaagcatcgttgttcaatccacccac

SEQ ID NO: 512677 - DNA, 55 bp, Artificial
  Synthetic oligonucleotide
cgtgcctcaaccaatagcacgcatcagtggtcacgttatgtcctgcccgtgcaac

SEQ ID NO: 512678 - DNA, 55 bp, Artificial
  Synthetic oligonucleotide
cgtgcttccgtaggatacttccactggttcgttggtaaggaaatccgaatcaagc

SEQ ID NO: 512679 - DNA, 55 bp, Artificial
  Synthetic oligonucleotide
ctccgagtgggttgttttagaatacagtcaaatcataagggacattggcaaggaa

SEQ ID NO: 512680 - DNA, 55 bp, Artificial
  Synthetic oligonucleotide
ctctcatcctacctctccctgggaaattgtatcttttcgatccaatggtcgctcc

SEQ ID NO: 512681 - DNA, 55 bp, Artificial
  Synthetic oligonucleotide
ctgcagacaaatagtcgtgcgatatccgatcaaatgctttagtcaagtccaatat

SEQ ID NO: 512682 - DNA, 55 bp, Artificial
  Synthetic oligonucleotide
ctgttaccgctggacagctccattcttattataactgacataccagtacctacca

SEQ ID NO: 512683 - DNA, 54 bp, Artificial
  Synthetic oligonucleotide
ctaccgtggtgttacaatcagattctattttgccagtggcgatccaagcgagat

SEQ ID NO: 512684 - DNA, 53 bp, Artificial
  Synthetic oligonucleotide
accggaagtaggactgcttctagaatataataagttcgtgcgccgcaggatac

SEQ ID NO: 512685 - DNA, 50 bp, Artificial
  Synthetic oligonucleotide
accgtctcttctaatcatttctcccgggtgtatgcgggctaaacggtaat

SEQ ID NO: 512686 - DNA, 50 bp, Artificial
  Synthetic oligonucleotide
tcttcgtccaagacctcagctactggaggatccgcatgagtacggtcgat

SEQ ID NO: 512687 - DNA, 57 bp, Artificial
  Synthetic oligonucleotide
caaagtcgctaattataaaacctagcaagagcgatactctttgcaattaaacgcttg

SEQ ID NO: 512688 - DNA, 55 bp, Artificial
  Synthetic oligonucleotide
tccttgctcttagatactcgcactattctcgacccctgaaatcgccgctcggcta

SEQ ID NO: 512689 - DNA, 55 bp, Artificial
  Synthetic oligonucleotide
aagtgtgaaccctcgtagtagtgcttcgatgtgcaagatcgacccgctattaata

SEQ ID NO: 512690 - DNA, 55 bp, Artificial
  Synthetic oligonucleotide
actttgcgcttgctaaggtttcttaatatcggattgcttgccgctacgattgccg

SEQ ID NO: 512691 - DNA, 55 bp, Artificial
  Synthetic oligonucleotide
tcctgaaccgcccgcactcggaggagccggtcttagttccctcgctggagcccgt

SEQ ID NO: 512692 - DNA, 55 bp, Artificial
  Synthetic oligonucleotide
caagcaaagcgctcgattcagaagccatgactctgactgactgcaagctgggatg

SEQ ID NO: 512693 - DNA, 55 bp, Artificial
  Synthetic oligonucleotide
cgtgccaaatcaaatattcttcgtcaccgccaaatttctcgtgcaccaccggccc

SEQ ID NO: 512694 - DNA, 55 bp, Artificial
  Synthetic oligonucleotide
cttagcgtaagaaagcgtggcggaataagctctataagtcgtaatccttcagccc

SEQ ID NO: 512695 - DNA, 55 bp, Artificial
  Synthetic oligonucleotide
gtgtaaacttggccgacgagaagttagcgaagctaaaataaagttcggagctatt

SEQ ID NO: 512696 - DNA, 55 bp, Artificial
  Synthetic oligonucleotide
gcgttcctaccacaggctcgcttcacttacatctgtcaacaaagagaattttccg

SEQ ID NO: 512697 - DNA, 55 bp, Artificial
  Synthetic oligonucleotide
ggaaatttgtgaatcgcttcggcagtaaagtgggaaccgtatgtccaagcaccgc

SEQ ID NO: 512698 - DNA, 55 bp, Artificial
  Synthetic oligonucleotide
ggcggatgcgcaagtctagacagcaagctaaaacggagattaatacgagaatcgc

SEQ ID NO: 512699 - DNA, 55 bp, Artificial
  Synthetic oligonucleotide
ggtagccgtgatgaaatacgtgaaagggtgattggtataagaatgtgcacgtaag

SEQ ID NO: 512700 - DNA, 55 bp, Artificial
  Synthetic oligonucleotide
ggttgtaagaggcagccatctcagctgggacgtagtggacatgcccagccgacgg

SEQ ID NO: 512701 - DNA, 54 bp, Artificial
  Synthetic oligonucleotide
agagtactatcgagttcctggtccgcgtgggtcttctgcagatggcctcagctg

SEQ ID NO: 512702 - DNA, 54 bp, Artificial
  Synthetic oligonucleotide
aaatagatcgctgcgcaaagatggatataggcggttggttcgcaagaaacagct

SEQ ID NO: 512703 - DNA, 52 bp, Artificial
  Synthetic oligonucleotide
gaggttgccgagtatggatatggggattggagccatcattaatcgcacgggg

SEQ ID NO: 512704 - DNA, 55 bp, Artificial
  Synthetic oligonucleotide
gtcgctcgtattcatccaacatcccatgatcacgtcgttcgaaccttcagaagct

SEQ ID NO: 512705 - DNA, 55 bp, Artificial
  Synthetic oligonucleotide
gggcgatgtcagaggcgcaaggaggattgagtagcctcgagagcaaggtaggtgt

SEQ ID NO: 512706 - DNA, 55 bp, Artificial
  Synthetic oligonucleotide
gggcagtcgccatcctggatcctaactgcgcggacttgcatccttggacgacagg

SEQ ID NO: 512707 - DNA, 55 bp, Artificial
  Synthetic oligonucleotide
ggatttgagtgggcgcgtggctcaacgactcctctcgcaccgtgattgctagacg

SEQ ID NO: 512708 - DNA, 55 bp, Artificial
  Synthetic oligonucleotide
ggaccggttaccgcagacctcagcttcctgtcaacctcaatattccgaacgcccc

SEQ ID NO: 512709 - DNA, 55 bp, Artificial
  Synthetic oligonucleotide
gcaatcacgaagaggttggtgtatggtgggaacacagtgccccagctcatgccgg

SEQ ID NO: 512710 - DNA, 55 bp, Artificial
  Synthetic oligonucleotide
gagaaacaaggccttcgttccattcactcctaacttcgcgttcatttggccgtct

SEQ ID NO: 512711 - DNA, 55 bp, Artificial
  Synthetic oligonucleotide
cttgagattcacaatcggattagagcagggcagtctccgccatttattctccaac

SEQ ID NO: 512712 - DNA, 55 bp, Artificial
  Synthetic oligonucleotide
ctgcgcttccagaaaacctcgccacaagtcttcggtgccaagtgacgaacagctc

SEQ ID NO: 512713 - DNA, 55 bp, Artificial
  Synthetic oligonucleotide
cgggacgagcatactcaagtgcgaaccttacagatgccgtgatcgaatatcggca

SEQ ID NO: 512714 - DNA, 55 bp, Artificial
  Synthetic oligonucleotide
cgaccaagagcgtcacgaagcgtctcacggagatatggcatcagactgtcgacct

SEQ ID NO: 512715 - DNA, 55 bp, Artificial
  Synthetic oligonucleotide
cccgcttcctgttggtcgtcgccatagtcggcctcgttatcttgttatggagggg

SEQ ID NO: 512716 - DNA, 55 bp, Artificial
  Synthetic oligonucleotide
ccatctctcggcggagtgtttacagttgcgactgagcctgtggaatgtgcggagg

SEQ ID NO: 512717 - DNA, 55 bp, Artificial
  Synthetic oligonucleotide
ccagcacgagtcgtcagatcagactcacattgttgatccacatcgctcacggcac

SEQ ID NO: 512718 - DNA, 55 bp, Artificial
  Synthetic oligonucleotide
cagcagcagaagtctcagtgacaacatcgaaactattcgcagtagagcgaggagt

SEQ ID NO: 512719 - DNA, 55 bp, Artificial
  Synthetic oligonucleotide
aactagaccagagtgaggtcagcgctagaagcattgctcattgagcacgactggc

SEQ ID NO: 512720 - DNA, 52 bp, Artificial
  Synthetic oligonucleotide
acaggaagttacgacggccgtgtacgtgcttgggacctttcgaccgcagagg

SEQ ID NO: 512721 - DNA, 55 bp, Artificial
  Synthetic oligonucleotide
tctgggcaacttacgactcataaaatcgaagccttgtgttgcatctgcagaacaa

SEQ ID NO: 512722 - DNA, 55 bp, Artificial
  Synthetic oligonucleotide
gttcacatccaacacgtgtccacactctatttaatgggtatgatagtggtctaga

SEQ ID NO: 512723 - DNA, 55 bp, Artificial
  Synthetic oligonucleotide
gtagataaccctactgaaaagggacctgtgggtggtattactagggtccgccaag

SEQ ID NO: 512724 - DNA, 55 bp, Artificial
  Synthetic oligonucleotide
gtaaaacgcgactaaaagggactggtccgcaagatttggttagggtgttgggctg

SEQ ID NO: 512725 - DNA, 55 bp, Artificial
  Synthetic oligonucleotide
gggactagtcctccgggctaggcgtagtgctgacaacccaccctttaaaaccact

SEQ ID NO: 512726 - DNA, 55 bp, Artificial
  Synthetic oligonucleotide
gaaaggctttgggatgtaggtatctgaagggataccgatgtagtgttgaagaaaa

SEQ ID NO: 512727 - DNA, 55 bp, Artificial
  Synthetic oligonucleotide
ctcaatgcactttagagtcccttaaaacgttgtgatatccgaaaggcgtgtcaac

SEQ ID NO: 512728 - DNA, 55 bp, Artificial
  Synthetic oligonucleotide
cgagccgaaattgggaataaaatctcggcgcattaatgaacgtgattgaatcggc

SEQ ID NO: 512729 - DNA, 55 bp, Artificial
  Synthetic oligonucleotide
cgacaagacttgctatttcgcagaagcacgccctatacggcatttgatacttttg

SEQ ID NO: 512730 - DNA, 55 bp, Artificial
  Synthetic oligonucleotide
cacggaaataggcctttcccattaacgttgaaaaccttaacgcttatgagatacg

SEQ ID NO: 512731 - DNA, 55 bp, Artificial
  Synthetic oligonucleotide
caacagaacgcatgcccttgattccataagtatttgcacactgtttagatattac

SEQ ID NO: 512732 - DNA, 55 bp, Artificial
  Synthetic oligonucleotide
aattcatacgagtagcaaatatttggaaacgttggtcgcatgccatatgggttgt

SEQ ID NO: 512733 - DNA, 55 bp, Artificial
  Synthetic oligonucleotide
aaccataacctaagagacttcgctgaaatgaatggagggcttacatcagataaac

SEQ ID NO: 512734 - DNA, 54 bp, Artificial
  Synthetic oligonucleotide
ccgatgacgataactgacgtggcacaaattatctaagcggcgtaggcattctat

SEQ ID NO: 512735 - DNA, 54 bp, Artificial
  Synthetic oligonucleotide
ggggacttgttaatagaattcacgctaggttctaggggatcgctacgaaggatt

SEQ ID NO: 512736 - DNA, 53 bp, Artificial
  Synthetic oligonucleotide
gactaaaaggacagattctccgatttgggcgtagggctagcaacccaccttta

SEQ ID NO: 512737 - DNA, 50 bp, Artificial
  Synthetic oligonucleotide
tacctacacctataaacgaaggtagcacacccaccaataaagcagcgaga

SEQ ID NO: 512738 - DNA, 55 bp, Artificial
  Synthetic oligonucleotide
tattggtagctaactggatcttaaaggcggctgaaggctttaacctcctcccaga

SEQ ID NO: 512739 - DNA, 55 bp, Artificial
  Synthetic oligonucleotide
gggaccacaaccctaaccagcttcacacagcggcaactacgatctcgttcctctg

SEQ ID NO: 512740 - DNA, 55 bp, Artificial
  Synthetic oligonucleotide
gctccttagacacacgttcatctcatccaagtatcccttgttatctggtgttttc

SEQ ID NO: 512741 - DNA, 55 bp, Artificial
  Synthetic oligonucleotide
gcctatctcgaatgctcgagaaagcgcaatgtcgtgcgttggacctctcttacca

SEQ ID NO: 512742 - DNA, 55 bp, Artificial
  Synthetic oligonucleotide
gccagctaccttcactgacaagttgagaggcaaatgataaggtgagttggtcagc

SEQ ID NO: 512743 - DNA, 55 bp, Artificial
  Synthetic oligonucleotide
gaaccaaaccgtggcctcattggctggccagacataacaattattccccgggagc

SEQ ID NO: 512744 - DNA, 55 bp, Artificial
  Synthetic oligonucleotide
cgctattaacttagtgatagtcaacgcccgagagtctcagccattttagatacct

SEQ ID NO: 512745 - DNA, 55 bp, Artificial
  Synthetic oligonucleotide
cgccgatataggctctatatctgaagctagggttcgcttgctctcttcgagtggc

SEQ ID NO: 512746 - DNA, 55 bp, Artificial
  Synthetic oligonucleotide
ccgcccctgcatgttactatccaatggcatagttaatcgtatcttcacgtactcc

SEQ ID NO: 512747 - DNA, 55 bp, Artificial
  Synthetic oligonucleotide
cccctcaactatgtgctaaatctcacgaatctacattcctcaagattgcgaggtc

SEQ ID NO: 512748 - DNA, 55 bp, Artificial
  Synthetic oligonucleotide
cagtctccagcactacggtgtcctcgttctgaatctgcattcacgcctctacctc

SEQ ID NO: 512749 - DNA, 55 bp, Artificial
  Synthetic oligonucleotide
cagcttggaaatttgtagctgaattgactacgtgtagtaccggcttactttccag

SEQ ID NO: 512750 - DNA, 55 bp, Artificial
  Synthetic oligonucleotide
cacaattcgcatctatactgagtcatcccctctgtacttctcgggtagttcatcg

SEQ ID NO: 512751 - DNA, 55 bp, Artificial
  Synthetic oligonucleotide
aggtctcagaagggcttatggtttgggtttgctcaaacattagactccccgagcc

SEQ ID NO: 512752 - DNA, 54 bp, Artificial
  Synthetic oligonucleotide
ctcttcgaattgacatggcatgttactagcttcttaatcggatcggaaactttt

SEQ ID NO: 512753 - DNA, 54 bp, Artificial
  Synthetic oligonucleotide
gtgactgacgcagtgtgaccgcacagtgatgcaagaggcagtctaacgctgtca

SEQ ID NO: 512754 - DNA, 51 bp, Artificial
  Synthetic oligonucleotide
attccttagcccgtcacaccttccaaatgacaacttttccaatcttggctg

SEQ ID NO: 512755 - DNA, 55 bp, Artificial
  Synthetic oligonucleotide
gttcgtcgcctgtgcattctaggtgctgagcgatgtcggacgatcaggcacgtct

SEQ ID NO: 512756 - DNA, 55 bp, Artificial
  Synthetic oligonucleotide
gtctgagagactgagtgctctccttcgtctcccagtacaatctgatagcccgctc

SEQ ID NO: 512757 - DNA, 55 bp, Artificial
  Synthetic oligonucleotide
gtacacaaatgttctacagctagggccgttcgctatcacagtgcacatctgctac

SEQ ID NO: 512758 - DNA, 55 bp, Artificial
  Synthetic oligonucleotide
ggcgttagaccacgtgagtatgctgctgggccacgtgaggcgcgttgtttggctg

SEQ ID NO: 512759 - DNA, 55 bp, Artificial
  Synthetic oligonucleotide
ggcgttaaacgttgagatgtaccagtccgggacaaaggtgcgcgtccactagcgg

SEQ ID NO: 512760 - DNA, 55 bp, Artificial
  Synthetic oligonucleotide
ggaatgaccggaaccaaggatttcctcacgataaacgtatgccggagttgggctc

SEQ ID NO: 512761 - DNA, 55 bp, Artificial
  Synthetic oligonucleotide
gctcataagctaggttgcccaccttgcgttcaacttggtaaggtccagcgtaccg

SEQ ID NO: 512762 - DNA, 55 bp, Artificial
  Synthetic oligonucleotide
gcgcccgtcagatatgcagtgcacacaatcactcaggctgcaggggaatccaggc

SEQ ID NO: 512763 - DNA, 55 bp, Artificial
  Synthetic oligonucleotide
gaagtgaggtgcacgagaaacacgaagggtagatagagtacgcactgccctgggg

SEQ ID NO: 512764 - DNA, 55 bp, Artificial
  Synthetic oligonucleotide
ctacccacgctgtatactggccgatcttcgacgtaagatgcttccatctacgatg

SEQ ID NO: 512765 - DNA, 55 bp, Artificial
  Synthetic oligonucleotide
cagtagcctgagcacgcaccatgaccacggtgattgggaacaagacccaatcccg

SEQ ID NO: 512766 - DNA, 55 bp, Artificial
  Synthetic oligonucleotide
cagcgaggtaagcctagactttggactttatcgatattccgcatcctaacgaagt

SEQ ID NO: 512767 - DNA, 55 bp, Artificial
  Synthetic oligonucleotide
cagccacctaaccacattcaacacacctgcagcgccgcaagtagccccaacgaca

SEQ ID NO: 512768 - DNA, 55 bp, Artificial
  Synthetic oligonucleotide
cagacgcggcgctggcagatgcatactggactgtacgtgcctcggcccttaagct

SEQ ID NO: 512769 - DNA, 55 bp, Artificial
  Synthetic oligonucleotide
aggcatctgatttcagttcacctcccgagtcagatttccacttctgcaccttagc

SEQ ID NO: 512770 - DNA, 55 bp, Artificial
  Synthetic oligonucleotide
acctcgcttcgccttcgttggttaagggttgcgttggcatgctttaacatacttc

SEQ ID NO: 512771 - DNA, 55 bp, Artificial
  Synthetic oligonucleotide
acccaatagccaccagcagtagcggaagacccattataccctgcacacgagctgc

SEQ ID NO: 512772 - DNA, 55 bp, Artificial
  Synthetic oligonucleotide
tgctgctgatgaccaggggacgactgcgttaagggtctgatcttctcatcgcctg

SEQ ID NO: 512773 - DNA, 55 bp, Artificial
  Synthetic oligonucleotide
tcatatcagatgcaatcaagtcagaccgcgtgctgccactagcgccctccctctc

SEQ ID NO: 512774 - DNA, 55 bp, Artificial
  Synthetic oligonucleotide
gtccccaagacagtcgataaaatgcccacaccagtttcattggctcgggcccctg

SEQ ID NO: 512775 - DNA, 55 bp, Artificial
  Synthetic oligonucleotide
gtatgtcagttccgatgctattaccgccgcccactcgcttacacgaaccagacta

SEQ ID NO: 512776 - DNA, 55 bp, Artificial
  Synthetic oligonucleotide
gggagccgcggatgtgttcttgcttccggcctccgacttgacgttgtctagtgcc

SEQ ID NO: 512777 - DNA, 55 bp, Artificial
  Synthetic oligonucleotide
ggatgcgagactgccctttgttagcatcgacacctgatgcggaaagcgtgtctac

SEQ ID NO: 512778 - DNA, 55 bp, Artificial
  Synthetic oligonucleotide
gctttaccactgcaaatattcgcattcctagttgccctctcaggcttcctagccc

SEQ ID NO: 512779 - DNA, 55 bp, Artificial
  Synthetic oligonucleotide
gccttgtctctcatatcccgaaacattgctggccagacaaagaagcagtttgctg

SEQ ID NO: 512780 - DNA, 55 bp, Artificial
  Synthetic oligonucleotide
ctcttgctaataacctactatcatggcgcctgttggctcttatctcactggcctt

SEQ ID NO: 512781 - DNA, 55 bp, Artificial
  Synthetic oligonucleotide
ctaaaggaagatggatacgggagcaaaacagcattgcaaagctcaggtctagggc

SEQ ID NO: 512782 - DNA, 55 bp, Artificial
  Synthetic oligonucleotide
cggggtgacgactttaggcttgacgcccttatcatgaacggtcgcctcgacgtca

SEQ ID NO: 512783 - DNA, 55 bp, Artificial
  Synthetic oligonucleotide
cctcatacctaagcgcataggcgaagctagacatgtaggatgcatggatcggcct

SEQ ID NO: 512784 - DNA, 55 bp, Artificial
  Synthetic oligonucleotide
cctatactattgtagcctactggatgtaatagtggtgataagggtggcttcgccg

SEQ ID NO: 512785 - DNA, 55 bp, Artificial
  Synthetic oligonucleotide
cacgtcccagcttatctatcctccttcggccgactgcttgattacggttcctcac

SEQ ID NO: 512786 - DNA, 55 bp, Artificial
  Synthetic oligonucleotide
cacaatctgatttcacatagcgaaggcagacttgggtaacgaagttggccgggcc

SEQ ID NO: 512787 - DNA, 55 bp, Artificial
  Synthetic oligonucleotide
caacccacagtcgcgctgctgggaactgggacctcgattgattacttggtcacac

SEQ ID NO: 512788 - DNA, 55 bp, Artificial
  Synthetic oligonucleotide
atcctagaacgggagacttctgatgtataaactggcgaggttttaaagtaaagcg

SEQ ID NO: 512789 - DNA, 55 bp, Artificial
  Synthetic oligonucleotide
tccgtactgtagacgatactttcctgaagtccatttcctcattgtgcctgtccag

SEQ ID NO: 512790 - DNA, 55 bp, Artificial
  Synthetic oligonucleotide
gttgtcaagtggtattgcaaagcaaaggctaatggtgactggaggataagggtcg

SEQ ID NO: 512791 - DNA, 55 bp, Artificial
  Synthetic oligonucleotide
gtgacgagggcttcagacgcacgagtcactatttcctcggctggctgaattgggg

SEQ ID NO: 512792 - DNA, 55 bp, Artificial
  Synthetic oligonucleotide
ggtgtcctttcacgataatgctctacgaacactctgtatggggaattggatgaga

SEQ ID NO: 512793 - DNA, 55 bp, Artificial
  Synthetic oligonucleotide
ggaagaggcactaggtatgtacaatagtctagccgggaggttctagcactccatc

SEQ ID NO: 512794 - DNA, 55 bp, Artificial
  Synthetic oligonucleotide
gcatggtccgaccttgtccgagagggagagacaacctatttagcggctgccgggc

SEQ ID NO: 512795 - DNA, 55 bp, Artificial
  Synthetic oligonucleotide
gaggccagatagactgctttgtattaaattgtcctcgaaactcctaaagctcgtg

SEQ ID NO: 512796 - DNA, 55 bp, Artificial
  Synthetic oligonucleotide
cgtgttatcagtccaacccgtcacgaccgctaccacctgcagtaggtcagcgccg

SEQ ID NO: 512797 - DNA, 55 bp, Artificial
  Synthetic oligonucleotide
cgtctaagagccaatgcacgcaatgccgtcgaaccgacacctctacctagtatcc

SEQ ID NO: 512798 - DNA, 55 bp, Artificial
  Synthetic oligonucleotide
cgtatgccgagtacaacttccaaggctggtttgtcagcaacatggctgccggctg

SEQ ID NO: 512799 - DNA, 55 bp, Artificial
  Synthetic oligonucleotide
cgtagtgatattccggagcgtgttcgtcttggtgtccagcaaatactgccagcta

SEQ ID NO: 512800 - DNA, 55 bp, Artificial
  Synthetic oligonucleotide
cgcctcattcctcttggataaagcctccacgatggaagctgtcatggtaaggagc

SEQ ID NO: 512801 - DNA, 55 bp, Artificial
  Synthetic oligonucleotide
cgcatgttctcggctccggctctgctcatcgtaggagaaactacgaacggatgtt

SEQ ID NO: 512802 - DNA, 55 bp, Artificial
  Synthetic oligonucleotide
ccgattgccatttgcaccgcctgacgactacacgagttccagccctacaggtccc

SEQ ID NO: 512803 - DNA, 55 bp, Artificial
  Synthetic oligonucleotide
caagctaaatccacagcggtacatggacgcaccgttctgccagagcacttggcac

SEQ ID NO: 512804 - DNA, 54 bp, Artificial
  Synthetic oligonucleotide
ttgtggtataaactcaatacgtacctaggtgccacaagtcggccacttaccgac

SEQ ID NO: 512805 - DNA, 51 bp, Artificial
  Synthetic oligonucleotide
ggttgccgaccagggtgctgggcctagtagctgatcaggagcgcgtcaatc

SEQ ID NO: 512806 - DNA, 55 bp, Artificial
  Synthetic oligonucleotide
tcgctttgtcagcacccgcacttgcaagattcgcaatctcgtctcgcggcgtagc

SEQ ID NO: 512807 - DNA, 55 bp, Artificial
  Synthetic oligonucleotide
tatcacctgagacagcataattggttcaaggtcccagaataaagacttttgcgtc

SEQ ID NO: 512808 - DNA, 55 bp, Artificial
  Synthetic oligonucleotide
tactggccatacgttctgtgaaaactgccagaccgagtatcgccccaaggaggac

SEQ ID NO: 512809 - DNA, 55 bp, Artificial
  Synthetic oligonucleotide
ggcttttcgtgctgcatcagtttctcgagtatattcccattaacaacaacttttc

SEQ ID NO: 512810 - DNA, 55 bp, Artificial
  Synthetic oligonucleotide
ggaggggttgttgagcagttaatggataagtatttcctacgtctagattgggttt

SEQ ID NO: 512811 - DNA, 55 bp, Artificial
  Synthetic oligonucleotide
ggaggggaatgtggaaggaatacaaaggcttttcaatcttggcttggccactccc

SEQ ID NO: 512812 - DNA, 55 bp, Artificial
  Synthetic oligonucleotide
gcttctagtcttagcgctttcactttaaagacgcactgacaaagagcgataatcg

SEQ ID NO: 512813 - DNA, 55 bp, Artificial
  Synthetic oligonucleotide
gccttgtggtcagactttcgcggtagcggattcaatcatgaggcgttcgactgcg

SEQ ID NO: 512814 - DNA, 55 bp, Artificial
  Synthetic oligonucleotide
ctacctcaaggaggcaacgccaactgcggagcagtactatacgctcatgactgca

SEQ ID NO: 512815 - DNA, 55 bp, Artificial
  Synthetic oligonucleotide
cgcagaaccaccttgaattggccacgtcccgggattttaccttcttatcgacccc

SEQ ID NO: 512816 - DNA, 55 bp, Artificial
  Synthetic oligonucleotide
cctccacgccagcctatgacccctatcgctctaaatcgtcagtttaatggtcaat

SEQ ID NO: 512817 - DNA, 55 bp, Artificial
  Synthetic oligonucleotide
ccccggcatacacgtccagcacatcaggcgtatgcgtggcattcacgttacaacg

SEQ ID NO: 512818 - DNA, 55 bp, Artificial
  Synthetic oligonucleotide
caagatgaattcattgcaaccttggctagaatctgtagtgtgcgataggcttgag

SEQ ID NO: 512819 - DNA, 55 bp, Artificial
  Synthetic oligonucleotide
agcgacgcacggcgtctatctctcctgtcctttacccttgctgtgtagctgtggc

SEQ ID NO: 512820 - DNA, 55 bp, Artificial
  Synthetic oligonucleotide
aatgatttcttccgacagtcatggatatttggcgctcagggacaatgaggtagaa

SEQ ID NO: 512821 - DNA, 55 bp, Artificial
  Synthetic oligonucleotide
aacaggagcgaatcatgttctagtggacagcaaggatcctggagctagctaccag

SEQ ID NO: 512822 - DNA, 50 bp, Artificial
  Synthetic oligonucleotide
acccgaaatcacgactgggctccttgacatttcttccgactctccgcaca

SEQ ID NO: 512823 - DNA, 55 bp, Artificial
  Synthetic oligonucleotide
gtagtgcaaagatcagtcgtagtgtccgtgcgcgaagtgacacaggtacacagct

SEQ ID NO: 512824 - DNA, 55 bp, Artificial
  Synthetic oligonucleotide
gctggaagatccggggttgctgtcgagagttatcggactgtattgcttggtgcga

SEQ ID NO: 512825 - DNA, 55 bp, Artificial
  Synthetic oligonucleotide
gccgacaacgttttctcagctctggaatcccgcccagcattggcgaagactttag

SEQ ID NO: 512826 - DNA, 55 bp, Artificial
  Synthetic oligonucleotide
ctggctgccctgcatgatgctgagttgcatctatgtgtctacacattccgcctac

SEQ ID NO: 512827 - DNA, 55 bp, Artificial
  Synthetic oligonucleotide
ctgaattctgtactggtactataccttgtggagttcccaggccaattggagaacc

SEQ ID NO: 512828 - DNA, 55 bp, Artificial
  Synthetic oligonucleotide
cggctcctcggttactctggacctataggcagccacgtgaggttcaaagcctagc

SEQ ID NO: 512829 - DNA, 55 bp, Artificial
  Synthetic oligonucleotide
cgagagctagaaacatttcaccctcttcccaaactttgttaaatggaccgaggcg

SEQ ID NO: 512830 - DNA, 55 bp, Artificial
  Synthetic oligonucleotide
ccgtcaacactggcaccgcacgtgcttacagctaccttggcctgctgagtcagcg

SEQ ID NO: 512831 - DNA, 55 bp, Artificial
  Synthetic oligonucleotide
cccgcgtcttcctcttccgacctaggatatgtctgccggtagctttgacccatta

SEQ ID NO: 512832 - DNA, 55 bp, Artificial
  Synthetic oligonucleotide
caggctttctgcggtcccgcattggattacagctattgatcgcctcattatatgg

SEQ ID NO: 512833 - DNA, 55 bp, Artificial
  Synthetic oligonucleotide
cagagtagcatgtccagagtgcgcatgcccaagccatcaaatcatgaccagtcct

SEQ ID NO: 512834 - DNA, 55 bp, Artificial
  Synthetic oligonucleotide
cacaaacgctacctaagaaagcctggtctaccggaaaggtacaacttcgagcagc

SEQ ID NO: 512835 - DNA, 55 bp, Artificial
  Synthetic oligonucleotide
agtagtccgtaaaggtgctgagggaatcgtcctcgctcgttgtagatgctgccga

SEQ ID NO: 512836 - DNA, 52 bp, Artificial
  Synthetic oligonucleotide
ccaattcctagcatacaccaaatcagcagtcgatctaggggacacacccagt

SEQ ID NO: 512837 - DNA, 52 bp, Artificial
  Synthetic oligonucleotide
gcttgcaacgccgcatttcgacattctgctagctagccaccattagcgatcg

SEQ ID NO: 512838 - DNA, 51 bp, Artificial
  Synthetic oligonucleotide
catccacccagaggtccatgtgcgcatttctgatttaccagtcaagtacac

SEQ ID NO: 512839 - DNA, 50 bp, Artificial
  Synthetic oligonucleotide
ataccctgtcagaatggtcccctgagcggttcagtgcattttacgaccgg

SEQ ID NO: 512840 - DNA, 58 bp, Artificial
  Synthetic oligonucleotide
cacagcagtttagctctaggagaaacttaatacagagtataaacatcttcttaaggac

SEQ ID NO: 512841 - DNA, 55 bp, Artificial
  Synthetic oligonucleotide
tgaaaatatcggttcgaactcaatgaaatcgtgaggtatgagcctgatatcacta

SEQ ID NO: 512842 - DNA, 55 bp, Artificial
  Synthetic oligonucleotide
gtcgtgcaccgagacaaaacattagaggattggatgctgcaaaccaacacaggag

SEQ ID NO: 512843 - DNA, 55 bp, Artificial
  Synthetic oligonucleotide
ggtttgggctcccttacatccacattggatcctggatcactcttaggaagaagtc

SEQ ID NO: 512844 - DNA, 55 bp, Artificial
  Synthetic oligonucleotide
ggaagaagtctcagtagacctgattagtgagctacctgagtcttagggttacaac

SEQ ID NO: 512845 - DNA, 55 bp, Artificial
  Synthetic oligonucleotide
gcttgaggttccagtagaatcggaccgaggagtgaattgattcgccgtaacattc

SEQ ID NO: 512846 - DNA, 55 bp, Artificial
  Synthetic oligonucleotide
gccccaggctattgcgggacggttcacaccgtggaactttacgaattatattacg

SEQ ID NO: 512847 - DNA, 55 bp, Artificial
  Synthetic oligonucleotide
gcaaccgtggtaaatttggtgtaaactcactctatcagcgacagcacgattgcgg

SEQ ID NO: 512848 - DNA, 55 bp, Artificial
  Synthetic oligonucleotide
gatctgtgtgttctgctcaatacaggtactagtgctaactgtgactgagttgacc

SEQ ID NO: 512849 - DNA, 55 bp, Artificial
  Synthetic oligonucleotide
gacgcttaccttcctatataacaatgcatagcaggtcgtaacacccacaataccc

SEQ ID NO: 512850 - DNA, 55 bp, Artificial
  Synthetic oligonucleotide
cggcctcatcaaggtgacccacatagtcccagaacatacaacccttccgtaacag

SEQ ID NO: 512851 - DNA, 55 bp, Artificial
  Synthetic oligonucleotide
cgcccgttcttgtagttccgttagatcgaatgttttcttaagatgctccgccgac

SEQ ID NO: 512852 - DNA, 55 bp, Artificial
  Synthetic oligonucleotide
ccttataacttacaatgacttctgtacagttctacacctgtcctggtccagaacc

SEQ ID NO: 512853 - DNA, 55 bp, Artificial
  Synthetic oligonucleotide
ccagacatcgctgtcgatgccgtaatggacagaaatgaggagggaaaggcggacg

SEQ ID NO: 512854 - DNA, 55 bp, Artificial
  Synthetic oligonucleotide
atgcattgattaggactgtaatatgcacggcacctttaaggaccttcccttttgc

SEQ ID NO: 512855 - DNA, 54 bp, Artificial
  Synthetic oligonucleotide
gtactgccagtagtcactgtagtaattcgaccatggcagacattccagcgccag

SEQ ID NO: 512856 - DNA, 53 bp, Artificial
  Synthetic oligonucleotide
tatgtatgtacaaacaggggcgacgtacttcttatgcatcatctgtaagtccc

SEQ ID NO: 512857 - DNA, 55 bp, Artificial
  Synthetic oligonucleotide
ttccattacaaggtataccgatgaataactccctacctaatgacggatcccaaac

SEQ ID NO: 512858 - DNA, 55 bp, Artificial
  Synthetic oligonucleotide
tcaatggccggcggcgttcgctaggcaaggacggttactgcgcgtgggagcattc

SEQ ID NO: 512859 - DNA, 55 bp, Artificial
  Synthetic oligonucleotide
gtctggtgctcgtcgtttgtcgtgatgtcgaactgatggcaacggggtggatgcg

SEQ ID NO: 512860 - DNA, 55 bp, Artificial
  Synthetic oligonucleotide
gtccactgccgtcatgcgcttcgacaatgatgacctctactactcagcaacatct

SEQ ID NO: 512861 - DNA, 55 bp, Artificial
  Synthetic oligonucleotide
ggggtgccaatgcagaagggccacagaacttacatgactacccggacaatggatc

SEQ ID NO: 512862 - DNA, 55 bp, Artificial
  Synthetic oligonucleotide
ggggaacggccagctgtcaagcctccccagatgcaagacaccacaaccgctctag

SEQ ID NO: 512863 - DNA, 55 bp, Artificial
  Synthetic oligonucleotide
ggctcattaacatagcttgcacacttcacgatattgcttcctttacggaagccgc

SEQ ID NO: 512864 - DNA, 55 bp, Artificial
  Synthetic oligonucleotide
ggccctgtattcgacccatggatccatagccttgtcatcagctcatgatctggtg

SEQ ID NO: 512865 - DNA, 55 bp, Artificial
  Synthetic oligonucleotide
ggacacggaagtacgcattgtaaagggttgacgagcaaggcctgtgatagtagga

SEQ ID NO: 512866 - DNA, 55 bp, Artificial
  Synthetic oligonucleotide
gctatggcgtcacggagttggttggaactcgtatgagggcacgaggtttgctcgg

SEQ ID NO: 512867 - DNA, 55 bp, Artificial
  Synthetic oligonucleotide
gcggcttgttaaaaggggcagtgatgaagatccttatagaccttacacacgcttc

SEQ ID NO: 512868 - DNA, 55 bp, Artificial
  Synthetic oligonucleotide
gcccgacgtgccttttaagctaaagcctgtcgaggcgaggaagactgaactggat

SEQ ID NO: 512869 - DNA, 55 bp, Artificial
  Synthetic oligonucleotide
gcatgcagctgtagcgtcgacggccacgaccctaaacggcgaggattttgacagc

SEQ ID NO: 512870 - DNA, 55 bp, Artificial
  Synthetic oligonucleotide
gcaatcgggatactagcaatcgaaacagaactcgcgagactcgaactacgggacg

SEQ ID NO: 512871 - DNA, 55 bp, Artificial
  Synthetic oligonucleotide
gagccgcaatagacggatctataggcacatcgttgtcagaattgacggggtgggc

SEQ ID NO: 512872 - DNA, 55 bp, Artificial
  Synthetic oligonucleotide
gactgacttgatctggaggaatcacgaggattgatagtcaacagcgccatgagac

SEQ ID NO: 512873 - DNA, 55 bp, Artificial
  Synthetic oligonucleotide
aggtcggccgaggagcgtactgccatttctgccttgctccaatggaggcgctgga

SEQ ID NO: 512874 - DNA, 55 bp, Artificial
  Synthetic oligonucleotide
agtctcccacttctgcctttcgccggtcgtataattcttggctgatcgcgtttcg

SEQ ID NO: 512875 - DNA, 55 bp, Artificial
  Synthetic oligonucleotide
attttctaatcccaagcaggcccagcgaagcgtaatgagcgtagtacgtactagg

SEQ ID NO: 512876 - DNA, 55 bp, Artificial
  Synthetic oligonucleotide
catcaccagcctaggtccgttgacaacattccttaaagcacctgcactggaaaag

SEQ ID NO: 512877 - DNA, 55 bp, Artificial
  Synthetic oligonucleotide
ccagccatcgcagtgctgttaaaggctaccctctgcgagtgtcgagacttctgcg

SEQ ID NO: 512878 - DNA, 55 bp, Artificial
  Synthetic oligonucleotide
ccagtccggaaccgcatggctcatctggcttcacagactcggaatcgtctgctga

SEQ ID NO: 512879 - DNA, 55 bp, Artificial
  Synthetic oligonucleotide
ccatactctggtgagtgtccgacaagacgggcgggcttcgccttagtgggacccc

SEQ ID NO: 512880 - DNA, 55 bp, Artificial
  Synthetic oligonucleotide
ccatggctctgcgtgtcccttcgttgttgctgtccaacctcgaaagtcgcttatg

SEQ ID NO: 512881 - DNA, 55 bp, Artificial
  Synthetic oligonucleotide
cctgtaatgccacaaacgacatagttcggaagactataacccgtctgtctgtatc

SEQ ID NO: 512882 - DNA, 55 bp, Artificial
  Synthetic oligonucleotide
cgaggcatcgcagtctttcagctcgcgtttcaatgcaggacacgacgaacatcgg

SEQ ID NO: 512883 - DNA, 55 bp, Artificial
  Synthetic oligonucleotide
cgctaatgtcacgagtcggctggtagggtgcggcgtcaaggaaactccgaagaga

SEQ ID NO: 512884 - DNA, 55 bp, Artificial
  Synthetic oligonucleotide
cggtcggatcatgccagtgccgtatggtgatttgacagtcttataggtatgggcc

SEQ ID NO: 512885 - DNA, 55 bp, Artificial
  Synthetic oligonucleotide
cggtgttgttccttgtaagcccgatcccataacacacgatccaagtcagcgccgg

SEQ ID NO: 512886 - DNA, 55 bp, Artificial
  Synthetic oligonucleotide
cgtggagggagtgggataacatgctccaggacactacagaccaaggtgagacagc

SEQ ID NO: 512887 - DNA, 55 bp, Artificial
  Synthetic oligonucleotide
cgtgtctcccattgatgagtgtataaaggactggttaatgtggtactgttggctg

SEQ ID NO: 512888 - DNA, 51 bp, Artificial
  Synthetic oligonucleotide
gtcgggagctccaatgctccagctctcattgaccagctctgggttcagggg

SEQ ID NO: 512889 - DNA, 50 bp, Artificial
  Synthetic oligonucleotide
catctattgcggacctattggaactgggctgagaaccaagtatgcagtca

SEQ ID NO: 512890 - DNA, 55 bp, Artificial
  Synthetic oligonucleotide
ttccaacattcttagaggagtccgtattggttgcaacctatgcaaatcagcttgg

SEQ ID NO: 512891 - DNA, 55 bp, Artificial
  Synthetic oligonucleotide
ttcagctattcagtcgcgttacaagatcgtgtaggattacgctagccgtaccctc

SEQ ID NO: 512892 - DNA, 55 bp, Artificial
  Synthetic oligonucleotide
gtcacgcatgaccgattcttcatgaggtagggcacagtcgaaggtttccatgttg

SEQ ID NO: 512893 - DNA, 55 bp, Artificial
  Synthetic oligonucleotide
ggtccatctcccaattcttgctggccacttcttgcacggtaggattcatcgcggc

SEQ ID NO: 512894 - DNA, 55 bp, Artificial
  Synthetic oligonucleotide
gggcactttgtaacgacttaggtaggtagggcatctaaaaggtatcctatacgac

SEQ ID NO: 512895 - DNA, 55 bp, Artificial
  Synthetic oligonucleotide
gcttagatacgcttattaagtgttaagtctgcgtctagcgtaggggtttcccgct

SEQ ID NO: 512896 - DNA, 55 bp, Artificial
  Synthetic oligonucleotide
gcgcaagggtttagataccggtgtgcgccagggtccaaggggtttcttatcagag

SEQ ID NO: 512897 - DNA, 55 bp, Artificial
  Synthetic oligonucleotide
gcaagcgcgatcacctatctaggcagtatctaggcggcattaattaaccccatgt

SEQ ID NO: 512898 - DNA, 55 bp, Artificial
  Synthetic oligonucleotide
gagcccgcatctagcacagtatcgcgagttctacatagtaaaggattacttgttg

SEQ ID NO: 512899 - DNA, 55 bp, Artificial
  Synthetic oligonucleotide
gacccgggcgaaaccagtcgtgacctgagtgtccaagccagtaagacgagcgtcc

SEQ ID NO: 512900 - DNA, 55 bp, Artificial
  Synthetic oligonucleotide
ctgtaagggtagattgagcgcggaaacgaggaggtgtaccaatagagggagatgt

SEQ ID NO: 512901 - DNA, 55 bp, Artificial
  Synthetic oligonucleotide
ctctagctactgcgcagctagtctttaatcgcgtagtaggcgccctctactttgc

SEQ ID NO: 512902 - DNA, 55 bp, Artificial
  Synthetic oligonucleotide
cgccatatacccgaagtgcgtggtacaataccgctgctcgcatgaggcctggacg

SEQ ID NO: 512903 - DNA, 55 bp, Artificial
  Synthetic oligonucleotide
cgatcttagcctccccgcaaagcttacacggtatcaccccgtctaccgccctaga

SEQ ID NO: 512904 - DNA, 55 bp, Artificial
  Synthetic oligonucleotide
ccttacgcgtgagcacatcagccaagttcttaaggtacgtccaacagtcacttgc

SEQ ID NO: 512905 - DNA, 55 bp, Artificial
  Synthetic oligonucleotide
cctcctccgccatgtcaacaccgacaaggctgaaccacgttccggcacttggtcc

SEQ ID NO: 512906 - DNA, 55 bp, Artificial
  Synthetic oligonucleotide
acatcccactagccccaaataggtgtctcctagacaacccgggataggggagtcg

SEQ ID NO: 512907 - DNA, 55 bp, Artificial
  Synthetic oligonucleotide
tggtggaaattgggtaaagtctttgttggcgatagggttttgcgattcggctttg

SEQ ID NO: 512908 - DNA, 55 bp, Artificial
  Synthetic oligonucleotide
tacggtactgacccagcaaagatgaaccgcagccctgaatacgatagcccgctcg

SEQ ID NO: 512909 - DNA, 55 bp, Artificial
  Synthetic oligonucleotide
gttcgtgatacactcggcgcaatttaccaaggtagaagtgagtaaagccaagggg

SEQ ID NO: 512910 - DNA, 55 bp, Artificial
  Synthetic oligonucleotide
gtggtgcgagacctgaccacccaggagcgtagcattcttttgccgcttggcacac

SEQ ID NO: 512911 - DNA, 55 bp, Artificial
  Synthetic oligonucleotide
ggtctcccggtgtcatgcagccgctcatttctgccatgacatccctacgcgacat

SEQ ID NO: 512912 - DNA, 55 bp, Artificial
  Synthetic oligonucleotide
gggcagacacgcgagtaagtagatcacgtgcacaaccacattatttaaggacacg

SEQ ID NO: 512913 - DNA, 55 bp, Artificial
  Synthetic oligonucleotide
ggcggaaccggatgactcagacgcggaggaggaactaccgatcatggaggtcgga

SEQ ID NO: 512914 - DNA, 55 bp, Artificial
  Synthetic oligonucleotide
gctcctctctcttggattttcgcttaccggtgctagatcacctgcccattcagca

SEQ ID NO: 512915 - DNA, 55 bp, Artificial
  Synthetic oligonucleotide
gcccgttcctgcctccaatttccaaccacgacagcccacactttcgaggcagacc

SEQ ID NO: 512916 - DNA, 55 bp, Artificial
  Synthetic oligonucleotide
gcatgacgagctatataactgttcttgtatctgtccgaaagaaacatggcggcgc

SEQ ID NO: 512917 - DNA, 55 bp, Artificial
  Synthetic oligonucleotide
gcacctagatgcacacgatgtgaagggcacgcgatatgtagaacttacagttctc

SEQ ID NO: 512918 - DNA, 55 bp, Artificial
  Synthetic oligonucleotide
gcaacagagtgagcttcacacctatacggcgacctccgtcgagatatcccgcccg

SEQ ID NO: 512919 - DNA, 55 bp, Artificial
  Synthetic oligonucleotide
ctttactacaccaactcgttggcaatttctcatcgcaaactatatggcggtactc

SEQ ID NO: 512920 - DNA, 55 bp, Artificial
  Synthetic oligonucleotide
cgacctgacaccagtttactgggctctcgttttgctaatcatccgtgatgcctgc

SEQ ID NO: 512921 - DNA, 55 bp, Artificial
  Synthetic oligonucleotide
cctagggttaacgctaattggacgggctattcagtaatgatatgttcgaagctcc

SEQ ID NO: 512922 - DNA, 55 bp, Artificial
  Synthetic oligonucleotide
ccggagtggactttgcgatgagaactattccacgcaacctgaatttcctgaagag

SEQ ID NO: 512923 - DNA, 55 bp, Artificial
  Synthetic oligonucleotide
cccggtagccgagctcaggaacagctcgtcacaaacgtgtcttgtgcagacggcc

SEQ ID NO: 512924 - DNA, 55 bp, Artificial
  Synthetic oligonucleotide
ccatggagagttctcggcctcgagtctgcgtcctgtgtctttgggcccgtgcaca

SEQ ID NO: 512925 - DNA, 55 bp, Artificial
  Synthetic oligonucleotide
caacttggcctcctgcgcaccatcctataccagattcttcttcaagagccacagc

SEQ ID NO: 512926 - DNA, 55 bp, Artificial
  Synthetic oligonucleotide
agtcggagcatgacagcatacgggactccatcgttgccggtgccagcagacctgg

SEQ ID NO: 512927 - DNA, 55 bp, Artificial
  Synthetic oligonucleotide
agtcaagtccttcgcgaaaacagcgagctcatctcccgttcagcaagccactacc

SEQ ID NO: 512928 - DNA, 55 bp, Artificial
  Synthetic oligonucleotide
aagctaggtcgggtgtttctggcgggaagcgggtattcttcggcgagcgggcctt

SEQ ID NO: 512929 - DNA, 54 bp, Artificial
  Synthetic oligonucleotide
ggctatcgacacatttactaactgcggatttcctcgcaaataggacaggtactt

SEQ ID NO: 512930 - DNA, 53 bp, Artificial
  Synthetic oligonucleotide
ggggcggtatctcaacggcaattatgtggtagggattgcgagtcaagagtaga

SEQ ID NO: 512931 - DNA, 51 bp, Artificial
  Synthetic oligonucleotide
ctagcgggagtcagcttactgacgacgccgcactggctatagataacgggg

SEQ ID NO: 512932 - DNA, 55 bp, Artificial
  Synthetic oligonucleotide
ttttgaagcacgtgattactcgcaaagagaagtgtcgacctgagcacgacagtga

SEQ ID NO: 512933 - DNA, 55 bp, Artificial
  Synthetic oligonucleotide
tgcgttacttcaatcccgcaggtgcgcatccctcaggccgcatgggagaagaccc

SEQ ID NO: 512934 - DNA, 55 bp, Artificial
  Synthetic oligonucleotide
ggttatgccgtattgttgtaccttatcaagaaaacgcagtgagcagagtgtttga

SEQ ID NO: 512935 - DNA, 55 bp, Artificial
  Synthetic oligonucleotide
gggtcctcgtcagctggcacctctggcaacgtagcagtgacggctaatggcatgc

SEQ ID NO: 512936 - DNA, 55 bp, Artificial
  Synthetic oligonucleotide
ggcctagcgcgtctcctttccacgccgccaaaagacatggatcgcccgacgtact

SEQ ID NO: 512937 - DNA, 55 bp, Artificial
  Synthetic oligonucleotide
gcgtccaggttcgccgtcctgaggtagctctgagaacgatggaagtacctcacct

SEQ ID NO: 512938 - DNA, 55 bp, Artificial
  Synthetic oligonucleotide
gcctctcgctttcctgagttggaaggggacagggatctgcgagacgctcgacgga

SEQ ID NO: 512939 - DNA, 55 bp, Artificial
  Synthetic oligonucleotide
gagcaccaaatttacatgaacgtgcggcaaaagcatctaaggtacgcaggcatac

SEQ ID NO: 512940 - DNA, 55 bp, Artificial
  Synthetic oligonucleotide
ctgtctgcttgtcgcatcgcacgtcgaaagagtattcgtgccgtggccttgtcat

SEQ ID NO: 512941 - DNA, 55 bp, Artificial
  Synthetic oligonucleotide
cgaagctgcttgacttggtacggaatggtgcaagtgacaactctcgcggccgctg

SEQ ID NO: 512942 - DNA, 55 bp, Artificial
  Synthetic oligonucleotide
cctgtaagagctgggctagacgctcgcctgagatgttttcttcaatacgacggcg

SEQ ID NO: 512943 - DNA, 55 bp, Artificial
  Synthetic oligonucleotide
catcgttcggcaattcgaacacatttccggaaacaatcttgacctggtacaaggc

SEQ ID NO: 512944 - DNA, 55 bp, Artificial
  Synthetic oligonucleotide
aagtgggatacagtatgccagcacatcacgattcgcatcaggcaacgtcaagagc

SEQ ID NO: 512945 - DNA, 53 bp, Artificial
  Synthetic oligonucleotide
aaacgacctcggtggcggaaaatctttggacgtaggatacgtacgtgatccga

SEQ ID NO: 512946 - DNA, 52 bp, Artificial
  Synthetic oligonucleotide
gaccaagtcgtagtaccccttttgccgagtaacacgtgacatgttggtctgt

SEQ ID NO: 512947 - DNA, 52 bp, Artificial
  Synthetic oligonucleotide
tttgttactgcgtgtggtcggctctatgtcggctctctttaacactattgct

SEQ ID NO: 512948 - DNA, 51 bp, Artificial
  Synthetic oligonucleotide
cactgcgcacagtgttgctggaatagtacgttgcccgcccacctgtatatc

SEQ ID NO: 512949 - DNA, 55 bp, Artificial
  Synthetic oligonucleotide
acgttcttagtgacactagccgctgtcagtcggtgttactccgtcagaggttcag

SEQ ID NO: 512950 - DNA, 55 bp, Artificial
  Synthetic oligonucleotide
agggccaaaacaattagtgacccagccctagccgtcgtcacgttctggagcgctc

SEQ ID NO: 512951 - DNA, 55 bp, Artificial
  Synthetic oligonucleotide
ccaggcactgaacgtattcgacgctgcctcgtttcatagaacttgtctggggcgg

SEQ ID NO: 512952 - DNA, 55 bp, Artificial
  Synthetic oligonucleotide
ccataggccgcgacgcattccaagatcgtctttcggctctcaaccccgcatgggc

SEQ ID NO: 512953 - DNA, 55 bp, Artificial
  Synthetic oligonucleotide
cccatgacaaaacatgcgagctaccccttgcccgcgtcaagcttgcgctatgacc

SEQ ID NO: 512954 - DNA, 55 bp, Artificial
  Synthetic oligonucleotide
ccgggctcagatggaaaggacgtgcacggtgactcactggcatgagtaccaaacg

SEQ ID NO: 512955 - DNA, 55 bp, Artificial
  Synthetic oligonucleotide
tctctttccctcaccgtcggactactcggggtagccaatgacccagccccaccag

SEQ ID NO: 512956 - DNA, 55 bp, Artificial
  Synthetic oligonucleotide
ctcgtgcaaagcggtgtacaggggtgcacgcaactatatgacatagactgtatgc

SEQ ID NO: 512957 - DNA, 55 bp, Artificial
  Synthetic oligonucleotide
gatggtacggcctagagtagctttgtccttttgagctctatggatctgggaagag

SEQ ID NO: 512958 - DNA, 55 bp, Artificial
  Synthetic oligonucleotide
gggttcggggacgcttgtgcgcccacctccctgcgtgattcaaggtcgtgttttg

SEQ ID NO: 512959 - DNA, 55 bp, Artificial
  Synthetic oligonucleotide
tcgtccgtcaagtcaggtcagctcacgctgtacgcctacgtacccgccgagggta

SEQ ID NO: 512960 - DNA, 55 bp, Artificial
  Synthetic oligonucleotide
tctcttgcctgagtcgacggacacacctgccgaatggacggattctgtggcggct

SEQ ID NO: 512961 - DNA, 54 bp, Artificial
  Synthetic oligonucleotide
acccttcatcggaccttgtacggccacgttggtacggctgtggcacgacttcac

SEQ ID NO: 512962 - DNA, 52 bp, Artificial
  Synthetic oligonucleotide
gctggacgcgatgggatcctcggacgtggaaagaggcggaggggagaccgaa

SEQ ID NO: 512963 - DNA, 51 bp, Artificial
  Synthetic oligonucleotide
tctgtctgtcacgtgttcgagtcacagatgacaccgtatggaggcgcgcag

SEQ ID NO: 512964 - DNA, 51 bp, Artificial
  Synthetic oligonucleotide
cctacccggaaccttcaactcacacttttgatgcacattcttcccgcacgt

SEQ ID NO: 512965 - DNA, 51 bp, Artificial
  Synthetic oligonucleotide
cattgacagacgtgttccccagtgaagcgcctcctgacgtatccctgccac

SEQ ID NO: 512966 - DNA, 55 bp, Artificial
  Synthetic oligonucleotide
gcccgtccgactgctcattctcgttggtcatatctgggcatacctagcgccgctc

SEQ ID NO: 512967 - DNA, 55 bp, Artificial
  Synthetic oligonucleotide
gcaaggcacgggatgtattgacttcgtacacacaagcaaatctatctatgaggtc

SEQ ID NO: 512968 - DNA, 55 bp, Artificial
  Synthetic oligonucleotide
gagcatagacagaagaggcagcgtagggtacgatcgcgctgtagtgatattgcgc

SEQ ID NO: 512969 - DNA, 55 bp, Artificial
  Synthetic oligonucleotide
ctcggatcatgccgacaagatgtctcgagcgaagtatgacagtatcgtaatccgc

SEQ ID NO: 512970 - DNA, 55 bp, Artificial
  Synthetic oligonucleotide
cgcagtatatacgcccgaggcaatgactcgcatgatagagaagcgcaacgtcaaa

SEQ ID NO: 512971 - DNA, 55 bp, Artificial
  Synthetic oligonucleotide
cgatgctcgtactgctcacaagagctaagacgtgctctgatagatcgcggatgag

SEQ ID NO: 512972 - DNA, 55 bp, Artificial
  Synthetic oligonucleotide
cgatgcaaacgcccttgctagctatcaggtaggacaaatcgcctcgtgcgtcatc

SEQ ID NO: 512973 - DNA, 55 bp, Artificial
  Synthetic oligonucleotide
cctctcgagtacacctttcgcgcaatcaatgctgtcttcaggacgcagtggatcg

SEQ ID NO: 512974 - DNA, 55 bp, Artificial
  Synthetic oligonucleotide
ccctcgacgcgtctcacgctgtatgcacgagcgaccgatgcttgcaatgaactgt

SEQ ID NO: 512975 - DNA, 55 bp, Artificial
  Synthetic oligonucleotide
cactgttcgaacgtcaaggcgactgcagacagatcaacgcagccacagtatcgga

SEQ ID NO: 512976 - DNA, 55 bp, Artificial
  Synthetic oligonucleotide
agatattagatggcagtacactgtaagcataccacgtactcatccgcgctcgttc

SEQ ID NO: 512977 - DNA, 55 bp, Artificial
  Synthetic oligonucleotide
aatgggtatcgcaaacccgcccttgcgtgtgccggaaagagcagcgggcagactc

SEQ ID NO: 512978 - DNA, 53 bp, Artificial
  Synthetic oligonucleotide
atcttggtctcctcgttgcaagcgagtttctcaagatacctgccagcacgggg

SEQ ID NO: 512979 - DNA, 53 bp, Artificial
  Synthetic oligonucleotide
agcgtccccaaagaaatttcaacgggccaagcagtctacaagctgtttcacgc

SEQ ID NO: 512980 - DNA, 53 bp, Artificial
  Synthetic oligonucleotide
tgctctgttcaatcagctgcaatcaagtctaggcaaagatggcgaaccttgtg

SEQ ID NO: 512981 - DNA, 52 bp, Artificial
  Synthetic oligonucleotide
tgttgccaatgtctcttgcgtcatcgttcggggatcgaacgtaggcggcaca

SEQ ID NO: 512982 - DNA, 51 bp, Artificial
  Synthetic oligonucleotide
ggcgaacccgaagtcgattctgtaggactcgagggtggtctgaacaggggt

SEQ ID NO: 512983 - DNA, 55 bp, Artificial
  Synthetic oligonucleotide
tgacatcagctactatattgccgagttcttcaatacgttctcgtctctttccttg

SEQ ID NO: 512984 - DNA, 55 bp, Artificial
  Synthetic oligonucleotide
gcgccctgtcgtcaaaactggcgcgggtaaagtccgagtcatccctagccgcaag

SEQ ID NO: 512985 - DNA, 55 bp, Artificial
  Synthetic oligonucleotide
gcccgttggggttgtggcggacggtagatcggacgcatagctcctcttgctgagt

SEQ ID NO: 512986 - DNA, 55 bp, Artificial
  Synthetic oligonucleotide
gagggtggtaggggcacatgtactccatcgtgcaagcatcaatgctcttgaccca

SEQ ID NO: 512987 - DNA, 55 bp, Artificial
  Synthetic oligonucleotide
gagaaaagttcagatgtcaactcttagaccttgatagcgttcctaaagacgtctg

SEQ ID NO: 512988 - DNA, 55 bp, Artificial
  Synthetic oligonucleotide
ctcctagccgccattcaaaacaaggaccaggacacagcctggatggtttattcgg

SEQ ID NO: 512989 - DNA, 55 bp, Artificial
  Synthetic oligonucleotide
cggtggccctcaagcaatgcatcaagtggccaatccagagcgacggacaatggac

SEQ ID NO: 512990 - DNA, 55 bp, Artificial
  Synthetic oligonucleotide
cgcagggaggccttcattgatcgggtgttctacaatatcaaggacgtgtacgctg

SEQ ID NO: 512991 - DNA, 55 bp, Artificial
  Synthetic oligonucleotide
cgaacgtggcgcctcaagaacgacgtcctttctgcctggacgatagggcgagcac

SEQ ID NO: 512992 - DNA, 55 bp, Artificial
  Synthetic oligonucleotide
ccgctgtggacgatgagcgacttcatgcgcccttgctctctgctgaatgcgcgct

SEQ ID NO: 512993 - DNA, 55 bp, Artificial
  Synthetic oligonucleotide
cccttgccgtttcaaacggggctggtccctcgtacgatggctcacctcaagcgat

SEQ ID NO: 512994 - DNA, 55 bp, Artificial
  Synthetic oligonucleotide
cccacgtcaattctgcccacggcgcatgaatatgcatgagcttttgtatgttcag

SEQ ID NO: 512995 - DNA, 55 bp, Artificial
  Synthetic oligonucleotide
ccaaactcggttgcctcatcccgcgtgtcgatgtcgctaaagttgtggataagcc

SEQ ID NO: 512996 - DNA, 55 bp, Artificial
  Synthetic oligonucleotide
atcccgttctataaaagccttccgttcgtcctttatcgctcagacacaaacgacg

SEQ ID NO: 512997 - DNA, 53 bp, Artificial
  Synthetic oligonucleotide
agagaaggtctcttgctgcaacctctggaagatcgctctgggcagcttcaact

SEQ ID NO: 512998 - DNA, 51 bp, Artificial
  Synthetic oligonucleotide
ggtgctagggttcatggtggtgtttgctgcacagtgggctgcccttgaaaa

SEQ ID NO: 512999 - DNA, 50 bp, Artificial
  Synthetic oligonucleotide
gcgctcacacataaacgaggacactgctccgatcgaccttgagtccgatt

SEQ ID NO: 513000 - DNA, 55 bp, Artificial
  Synthetic oligonucleotide
ggatcgcgtcctatatcgcagtttaggtcactacctcaattctcatttcttacaa

SEQ ID NO: 513001 - DNA, 55 bp, Artificial
  Synthetic oligonucleotide
ggatcgaccaccagtaccgacgttactgttctggttctggacagatgacgacctc

SEQ ID NO: 513002 - DNA, 55 bp, Artificial
  Synthetic oligonucleotide
ggagccaagccgggtaaatttgcgggcgatggattgatggcccggtgacttgcct

SEQ ID NO: 513003 - DNA, 55 bp, Artificial
  Synthetic oligonucleotide
ggaaactcctttacgacctttacgagccgtcgggctatagcgaggtctaagttag

SEQ ID NO: 513004 - DNA, 55 bp, Artificial
  Synthetic oligonucleotide
gctgggaggcggttgaatctctattcatgcatgcaatgcggtcgctttctttagt

SEQ ID NO: 513005 - DNA, 55 bp, Artificial
  Synthetic oligonucleotide
gcggctaatagtcgctagtaagtagtcgagctagagttgtcgagcgacctctacg

SEQ ID NO: 513006 - DNA, 55 bp, Artificial
  Synthetic oligonucleotide
gcgagccttcggaaggatatgtagagcagtcaatagaacatatttatcgcctcat

SEQ ID NO: 513007 - DNA, 55 bp, Artificial
  Synthetic oligonucleotide
gcgaatgctccctccagtggtggcaagactcctcgctcatagtgctgtcgtggac

SEQ ID NO: 513008 - DNA, 55 bp, Artificial
  Synthetic oligonucleotide
gcgaacgcgacttggatacagtaccactcgccaattagaagtacatgggtaaccg

SEQ ID NO: 513009 - DNA, 55 bp, Artificial
  Synthetic oligonucleotide
gcctctcgatattcagggctttcctcggaaacgccagaagtgtccatgctctaag

SEQ ID NO: 513010 - DNA, 55 bp, Artificial
  Synthetic oligonucleotide
gccgcctgtatatcgcccgtgttacaccaaggtggggctgtgtgcatctgggctc

SEQ ID NO: 513011 - DNA, 55 bp, Artificial
  Synthetic oligonucleotide
gccgactcactatctccagcgctcatatccgccgatcgatatcccgggatggact

SEQ ID NO: 513012 - DNA, 55 bp, Artificial
  Synthetic oligonucleotide
gccatatctttgctcgtattcatagtctgccagtgccttaccaagatcaacgtca

SEQ ID NO: 513013 - DNA, 55 bp, Artificial
  Synthetic oligonucleotide
gcattagcgacgtcggtcgacttagacagcgcgaagctcgctcgcgataacgggg

SEQ ID NO: 513014 - DNA, 55 bp, Artificial
  Synthetic oligonucleotide
gatgcagcatgactgattaattacacggccgtcgattgggcgtctttgtcgtcgt

SEQ ID NO: 513015 - DNA, 55 bp, Artificial
  Synthetic oligonucleotide
gatccgacaccgagacggttccattgacagtctgacttggcggcatggtcgcgcc

SEQ ID NO: 513016 - DNA, 55 bp, Artificial
  Synthetic oligonucleotide
gagtcgaggggaaagatcgatcctgtgctttcagagcttcacttaggtatgtagg

SEQ ID NO: 513017 - DNA, 55 bp, Artificial
  Synthetic oligonucleotide
gacaaatcgatccatgagcgacataaagcacccacgtgcttgtgtcttgagcgta

SEQ ID NO: 513018 - DNA, 55 bp, Artificial
  Synthetic oligonucleotide
gaagttaagtaccgctaaagcccgaggattctatagtatcgtttaaaccgcgcgg

SEQ ID NO: 513019 - DNA, 55 bp, Artificial
  Synthetic oligonucleotide
gaaggcgaaccttttgactatgccgctgaacccaccaacttttacttcgagctcg

SEQ ID NO: 513020 - DNA, 55 bp, Artificial
  Synthetic oligonucleotide
gaactcgtgcggaaggctcctcgggtcgtaacggttatatagaagtccgttatcc

SEQ ID NO: 513021 - DNA, 55 bp, Artificial
  Synthetic oligonucleotide
gaacccctcgttctactccgctgtacgaactgcaacgaataccaagccagctagc

SEQ ID NO: 513022 - DNA, 55 bp, Artificial
  Synthetic oligonucleotide
ttttctcgaggcaacgctacccaaacacttagggacagtacaatctaccgaggtc

SEQ ID NO: 513023 - DNA, 55 bp, Artificial
  Synthetic oligonucleotide
tgtcgacgaaacccttagactattctacttcgcactaaggaagcctaggattaag

SEQ ID NO: 513024 - DNA, 55 bp, Artificial
  Synthetic oligonucleotide
tctacgttgccacagtacgccggtcgatcattttgccccgcatactcgccgggag

SEQ ID NO: 513025 - DNA, 55 bp, Artificial
  Synthetic oligonucleotide
tcggctgtccctactctacctctattagggatactatataagcgcggagcttgcg

SEQ ID NO: 513026 - DNA, 55 bp, Artificial
  Synthetic oligonucleotide
tccggactaatcttaacgcggataggtcgaaccgatatttacgccgtagccgagc

SEQ ID NO: 513027 - DNA, 55 bp, Artificial
  Synthetic oligonucleotide
tccagtctcgccgcaagagtagcaggccttgtccttagcaggctcggtgcactcg

SEQ ID NO: 513028 - DNA, 55 bp, Artificial
  Synthetic oligonucleotide
tccagacgtgtgtcagatgcgatcgaagtagagaagtgacataagttgagaccgc

SEQ ID NO: 513029 - DNA, 55 bp, Artificial
  Synthetic oligonucleotide
taggcagctccgtgcgcggcagtcgtcccgcttttactttcctcccgacgtagga

SEQ ID NO: 513030 - DNA, 55 bp, Artificial
  Synthetic oligonucleotide
tactagccggaactatggacccgaacacagcccgcggcctggtctcagtaaggcg

SEQ ID NO: 513031 - DNA, 55 bp, Artificial
  Synthetic oligonucleotide
taccacccggccgaaacatcaagaaccgacgtcagggtggctgaaaggatcggta

SEQ ID NO: 513032 - DNA, 55 bp, Artificial
  Synthetic oligonucleotide
gttgtggagagtattgttgtcacccatttccggaatccagtggtaggcttcgcat

SEQ ID NO: 513033 - DNA, 55 bp, Artificial
  Synthetic oligonucleotide
gtgtcttcaggtgagcgcgacttgggtacctcaagagatggagcaaggattgaca

SEQ ID NO: 513034 - DNA, 55 bp, Artificial
  Synthetic oligonucleotide
gtcgatactgaagacttacgcgggcctgagcaatactgcagagctacctccagat

SEQ ID NO: 513035 - DNA, 55 bp, Artificial
  Synthetic oligonucleotide
gtaggaagctaaacgtatactttccgagcgttttagggtagagtctcctatatgc

SEQ ID NO: 513036 - DNA, 55 bp, Artificial
  Synthetic oligonucleotide
gtacgctagggcgatgctctcggtaatctcgggtagggcgattagctccgggtac

SEQ ID NO: 513037 - DNA, 55 bp, Artificial
  Synthetic oligonucleotide
ggtgcatgcaatacctatcgcagagtcaaaattgaccgcagctctaccagacgac

SEQ ID NO: 513038 - DNA, 55 bp, Artificial
  Synthetic oligonucleotide
ggtccactcagtcctgctatgcttaccggcccgacagggtccaacgactacttca

SEQ ID NO: 513039 - DNA, 55 bp, Artificial
  Synthetic oligonucleotide
ggtatagatgctcgattagatccattgatgggttgcgcaggaacacttttcccac

SEQ ID NO: 513040 - DNA, 55 bp, Artificial
  Synthetic oligonucleotide
gggtcgaggagagctgaaggggaatgatacttatggagtacccgtagacatcgct

SEQ ID NO: 513041 - DNA, 55 bp, Artificial
  Synthetic oligonucleotide
ggggaggagcgtcggcgtatatagttagcggttaagaaggtaatagtaacggccc

SEQ ID NO: 513042 - DNA, 55 bp, Artificial
  Synthetic oligonucleotide
gggctaaggtaagcctagaacagcgacaagattctcgtaaccgggcagtaggtta

SEQ ID NO: 513043 - DNA, 55 bp, Artificial
  Synthetic oligonucleotide
gggactagctactcctagactaatttaatgcgttctaggtcgatccgactgccgc

SEQ ID NO: 513044 - DNA, 55 bp, Artificial
  Synthetic oligonucleotide
ggctatgtccaactgactccatgcgtgatagcagaaccgtatgtgagcaaggtgg

SEQ ID NO: 513045 - DNA, 55 bp, Artificial
  Synthetic oligonucleotide
ccgggaatctgctatgcggctcatttgatgtccacgagctgtatgccatacctcg

SEQ ID NO: 513046 - DNA, 55 bp, Artificial
  Synthetic oligonucleotide
ccgcgcgatgatgtctacggcacatacaactcctcctacctcccacaatcgcacg

SEQ ID NO: 513047 - DNA, 55 bp, Artificial
  Synthetic oligonucleotide
ccgaaggcctctatataccttcccgagttaaataaggacaactagccgtaagaag

SEQ ID NO: 513048 - DNA, 55 bp, Artificial
  Synthetic oligonucleotide
cccctcgtttcgcacgtgcaatcctgcgcaccgtattgtaccgggtgtcactcgc

SEQ ID NO: 513049 - DNA, 55 bp, Artificial
  Synthetic oligonucleotide
ccacaggactactgcggacgcgatatccgtcgctgcctccgagaagtggaagttg

SEQ ID NO: 513050 - DNA, 55 bp, Artificial
  Synthetic oligonucleotide
cagtcgctctaatacgccttaagcgccatcgacttctaacgccgattcgctcgct

SEQ ID NO: 513051 - DNA, 55 bp, Artificial
  Synthetic oligonucleotide
caggcggagtcggcgaacaaaacggtggagacggtagcaataccccgccgagtgt

SEQ ID NO: 513052 - DNA, 55 bp, Artificial
  Synthetic oligonucleotide
cagcagtcctaggctaccaattcagcgcctcaagcggcagccctgaagtctcccc

SEQ ID NO: 513053 - DNA, 55 bp, Artificial
  Synthetic oligonucleotide
cagaggtgcgcaaaacgcgtttggtgttcgtcaaatagcagggtcttaagctgcc

SEQ ID NO: 513054 - DNA, 55 bp, Artificial
  Synthetic oligonucleotide
cactctatcttgacaactttgacaatgcggcctgacgtagcacttgccggcggtg

SEQ ID NO: 513055 - DNA, 55 bp, Artificial
  Synthetic oligonucleotide
cactacttcaacgttcccgacagtggtggcgccttcaagatcacgctgtatgctc

SEQ ID NO: 513056 - DNA, 55 bp, Artificial
  Synthetic oligonucleotide
atggatccttggcatactaacatacgtctgccttaaagcgcgccttcggatacgc

SEQ ID NO: 513057 - DNA, 55 bp, Artificial
  Synthetic oligonucleotide
atgcgtattcttgcacgcggtcttggacggggcggcagagtccgtagactggctg

SEQ ID NO: 513058 - DNA, 55 bp, Artificial
  Synthetic oligonucleotide
atatgtactttgagaacatgcctggagacttcaccaagatttctccttggtcgcc

SEQ ID NO: 513059 - DNA, 55 bp, Artificial
  Synthetic oligonucleotide
ataactatacaatgtacctcctactccagatgaaggttttagccggatggacagt

SEQ ID NO: 513060 - DNA, 55 bp, Artificial
  Synthetic oligonucleotide
agctaataggcaggggaggacgtagcggccctcccgtcgcggctaattcgtctac

SEQ ID NO: 513061 - DNA, 55 bp, Artificial
  Synthetic oligonucleotide
agcgagcgcggacttcaatcttagactgccggagcacgctgggagacctcatggg

SEQ ID NO: 513062 - DNA, 55 bp, Artificial
  Synthetic oligonucleotide
agatggccagaccgatccaacgccacggacttctacgcttcactccacgccctcc

SEQ ID NO: 513063 - DNA, 55 bp, Artificial
  Synthetic oligonucleotide
acggtcatttctcccgacccaaacctgtccatcgatgaggtcgcagtacccatgc

SEQ ID NO: 513064 - DNA, 55 bp, Artificial
  Synthetic oligonucleotide
aaggccctataaccttaaccttcgtcgtagtataataagctcgatacggacgcca

SEQ ID NO: 513065 - DNA, 55 bp, Artificial
  Synthetic oligonucleotide
aagcggaatagggtatcttagttgtcgaggttgacaccttcattagtagcgtagt

SEQ ID NO: 513066 - DNA, 55 bp, Artificial
  Synthetic oligonucleotide
aaagctgctcttataaatctatcgaactattagcagaaggtatgccgccggggtt

SEQ ID NO: 513067 - DNA, 55 bp, Artificial
  Synthetic oligonucleotide
ctgggctgggaaaccgacaagttcaaatttctaccagtaagtcttattccagctg

SEQ ID NO: 513068 - DNA, 55 bp, Artificial
  Synthetic oligonucleotide
ctgctctctcctctattcgtcttcatctaacaaacagggaatcattgcactcgta

SEQ ID NO: 513069 - DNA, 55 bp, Artificial
  Synthetic oligonucleotide
ctcgacctctgtcactaagagtgcgtcgatgcgattcctcgcgggacagaccgcc

SEQ ID NO: 513070 - DNA, 55 bp, Artificial
  Synthetic oligonucleotide
cgtctgcctcgagttatgatccacatagtacgtccttcccaagttgtcctcacgg

SEQ ID NO: 513071 - DNA, 55 bp, Artificial
  Synthetic oligonucleotide
cgctttcttttcatcgagttgtggcttcgcaatcgctcccagatcgggtctcatg

SEQ ID NO: 513072 - DNA, 55 bp, Artificial
  Synthetic oligonucleotide
cgcttgctaccgcagcctctggtcatgcctggtccacgacgagagtccgataacg

SEQ ID NO: 513073 - DNA, 55 bp, Artificial
  Synthetic oligonucleotide
cgctctactaataggtaagcggagccgtactcggactcgcctctatacggcgtcg

SEQ ID NO: 513074 - DNA, 55 bp, Artificial
  Synthetic oligonucleotide
cgcggaactccatagaccggtccagtatcccgagtctgaatcggcgagatagcga

SEQ ID NO: 513075 - DNA, 55 bp, Artificial
  Synthetic oligonucleotide
cgcgcacacacggcccgcagtgcttacactcctgaaccttatgcatttcccacct

SEQ ID NO: 513076 - DNA, 55 bp, Artificial
  Synthetic oligonucleotide
cgcctgtagactctggctcgcaacgccagaagatgagggtggctggagactgcca

SEQ ID NO: 513077 - DNA, 55 bp, Artificial
  Synthetic oligonucleotide
cgcagtacggcttgattcccttggcacgcgtaacatgtgcaaggaggaagttggg

SEQ ID NO: 513078 - DNA, 55 bp, Artificial
  Synthetic oligonucleotide
cgcacgccacaatctactgcccacacagaccgcatgactaaagatcggcagcttc

SEQ ID NO: 513079 - DNA, 55 bp, Artificial
  Synthetic oligonucleotide
cgaggtaaacgatacgcccgtactatataataacgtcgtttaagacgaggctacc

SEQ ID NO: 513080 - DNA, 55 bp, Artificial
  Synthetic oligonucleotide
cgagcaatggagactatggtaggggtgcaaggaagtcgcagcagagatcggagtg

SEQ ID NO: 513081 - DNA, 55 bp, Artificial
  Synthetic oligonucleotide
cgagaccatcaagaacgaacgagctacggacctgcctccgtccaggactttcatg

SEQ ID NO: 513082 - DNA, 55 bp, Artificial
  Synthetic oligonucleotide
cgacgtgtgacgctatctgaacgcctgaactgcgaaacccgtaatcgaagccacc

SEQ ID NO: 513083 - DNA, 55 bp, Artificial
  Synthetic oligonucleotide
cgacacgagaccacaaaatgcccttacaaaactccagcaactctcagggccacag

SEQ ID NO: 513084 - DNA, 55 bp, Artificial
  Synthetic oligonucleotide
cgaacttctcgcgttctgccgagaggcgccgccggaatttaatgaacatcagcgg

SEQ ID NO: 513085 - DNA, 55 bp, Artificial
  Synthetic oligonucleotide
ccttttctatcgcgtcttggagtagcgttgttagggagacagctaggtcgtctag

SEQ ID NO: 513086 - DNA, 55 bp, Artificial
  Synthetic oligonucleotide
cctgtagcctccctccttctgcgatatacaaggagctctttagcgtgcgagacac

SEQ ID NO: 513087 - DNA, 55 bp, Artificial
  Synthetic oligonucleotide
cctagctcttacggtttcgagtctagcttttagttctaatgcgacgttggtttcg

SEQ ID NO: 513088 - DNA, 53 bp, Artificial
  Synthetic oligonucleotide
cagtaaattaattcgttagccctcgctcctaccgaccctgacacggagaaact

SEQ ID NO: 513089 - DNA, 52 bp, Artificial
  Synthetic oligonucleotide
gagctttcgaatgtgtcttgttttggcgtagagatcgataagcgatggtccg

SEQ ID NO: 513090 - DNA, 52 bp, Artificial
  Synthetic oligonucleotide
tttgttatgtagctctgtttgcagccttaatcgcgaatgccctacttttatc

SEQ ID NO: 513091 - DNA, 51 bp, Artificial
  Synthetic oligonucleotide
agtcatcgatacgtgagtcagataggcgggatgcgatttgtattgagaagc

SEQ ID NO: 513092 - DNA, 51 bp, Artificial
  Synthetic oligonucleotide
acaaacggacgtccctgagcggtgggtcactcatcatcatctacctagagt

SEQ ID NO: 513093 - DNA, 50 bp, Artificial
  Synthetic oligonucleotide
ttacgaaacggatctccttctataataggcgcactactactactcgcaca

SEQ ID NO: 513094 - DNA, 55 bp, Artificial
  Synthetic oligonucleotide
ggaaaggacgttggaatacgacatacccttctccataaagtcaaacgcatcgcgg

SEQ ID NO: 513095 - DNA, 55 bp, Artificial
  Synthetic oligonucleotide
gctgtgctccatttcatgagtggatggtatcccgccagttcgctgatgccatgag

SEQ ID NO: 513096 - DNA, 55 bp, Artificial
  Synthetic oligonucleotide
gctcgaattatggcagtcgtcatggcaggatggagacaacgatgttagagatcca

SEQ ID NO: 513097 - DNA, 55 bp, Artificial; identical to SEQ ID NO: 270615
  Synthetic oligonucleotide

SEQ ID NO: 513098 - DNA, 55 bp, Artificial
  Synthetic oligonucleotide
gccttggtggtaatcgccttgagagggtgacgatagagagggcattcggcctgcc

SEQ ID NO: 513099 - DNA, 55 bp, Artificial
  Synthetic oligonucleotide
gcctggggtcctttgccagcaatactgtagctcagtcgttgatgagtatgtatcg

SEQ ID NO: 513100 - DNA, 55 bp, Artificial
  Synthetic oligonucleotide
gcctcttaatagttcctagggtctgttagagtctgtaaaatgcaatggcctgatg

SEQ ID NO: 513101 - DNA, 55 bp, Artificial
  Synthetic oligonucleotide
gccctgcaggtgtataggaaacccagtataaataagccagggtacctaattagcc

SEQ ID NO: 513102 - DNA, 55 bp, Artificial
  Synthetic oligonucleotide
gcaggatccgccttatcgattgacatcttgtctgccattacccagactgggctaa

SEQ ID NO: 513103 - DNA, 55 bp, Artificial
  Synthetic oligonucleotide
gcagcgaagttcgatgtgtatgacctcgctgggagaaaacgggtcgaatcggccg

SEQ ID NO: 513104 - DNA, 55 bp, Artificial
  Synthetic oligonucleotide
gcacctcacggtcaatgacactattgatatcaccgtagcagacaacattatgatc

SEQ ID NO: 513105 - DNA, 55 bp, Artificial
  Synthetic oligonucleotide
gcaatcacaagagacatagattaccatccaggaccacctaatgcataaccccacc

SEQ ID NO: 513106 - DNA, 55 bp, Artificial
  Synthetic oligonucleotide
gagctcgctatgaaataccgcattcattagtgctaaaggtcatacacaccgcccc

SEQ ID NO: 513107 - DNA, 55 bp, Artificial
  Synthetic oligonucleotide
cttcccacggtagccttacgtggtaatatgctcgggcgccttgataaagttgcgc

SEQ ID NO: 513108 - DNA, 55 bp, Artificial
  Synthetic oligonucleotide
cttacctagcatagattctcgtcctcgtttggttttcccaaatacccctccagag

SEQ ID NO: 513109 - DNA, 55 bp, Artificial
  Synthetic oligonucleotide
ctgctagttaaagtttgaacgtctgaacttaccagctgttgcaagcatctggcca

SEQ ID NO: 513110 - DNA, 55 bp, Artificial
  Synthetic oligonucleotide
ctgaatagagcgcactaaccctgcggaaccccaacaatgtttagtcctcccagcg

SEQ ID NO: 513111 - DNA, 55 bp, Artificial
  Synthetic oligonucleotide
ttcagtacaagttacttcaacatctgccataccaacttactatgttgcccatggc

SEQ ID NO: 513112 - DNA, 55 bp, Artificial
  Synthetic oligonucleotide
tgtgaggtccttgctcgccactagcttggaccctgatgcagacagccgaaggcgt

SEQ ID NO: 513113 - DNA, 55 bp, Artificial
  Synthetic oligonucleotide
tgcgattcttctcgtggggatcatatttcctgtcctgttccatcaatgatggcga

SEQ ID NO: 513114 - DNA, 55 bp, Artificial
  Synthetic oligonucleotide
tcatccctctggctggggtgcagctgaggcacactcacaaaactcaacgatggcg

SEQ ID NO: 513115 - DNA, 55 bp, Artificial
  Synthetic oligonucleotide
taaggggcagaatcttccccgtcgctggcgttagggctattactgctcttccgtt

SEQ ID NO: 513116 - DNA, 55 bp, Artificial
  Synthetic oligonucleotide
gttcggctgatgtgtgccgttttggttaccatcatgagacaggccaagtgtccga

SEQ ID NO: 513117 - DNA, 55 bp, Artificial
  Synthetic oligonucleotide
gtggctcccactgaagtaaagaaaccaaaactggagacgcatagacgagatctag

SEQ ID NO: 513118 - DNA, 55 bp, Artificial
  Synthetic oligonucleotide
ggtggtcctggatggtagtccctaggtcttgagcgttactggaagaagattggcg

SEQ ID NO: 513119 - DNA, 55 bp, Artificial
  Synthetic oligonucleotide
ggtggaacctttggctgcaacgacaagaatttacctcttctctgactcagggatc

SEQ ID NO: 513120 - DNA, 55 bp, Artificial
  Synthetic oligonucleotide
gggcttataccgtgaacgccgccgtgtaaatcgtgagaacatgagtcgtaaagcg

SEQ ID NO: 513121 - DNA, 55 bp, Artificial
  Synthetic oligonucleotide
gggctcgcagaggtcgcacaaatcttcgatgtccccaatctttgtatcacggcct

SEQ ID NO: 513122 - DNA, 55 bp, Artificial
  Synthetic oligonucleotide
gggcacaggatccgcgtagttgaactctgtgttggcgacttgacgcttcagcttg

SEQ ID NO: 513123 - DNA, 55 bp, Artificial
  Synthetic oligonucleotide
gggagcggcaactatatacccaacagggcggttcttacggcgttcactctgttta

SEQ ID NO: 513124 - DNA, 55 bp, Artificial
  Synthetic oligonucleotide
ggctgcgtaagcgggcgtagacaggcttcaatgaccacgtccagcatacccgaga

SEQ ID NO: 513125 - DNA, 55 bp, Artificial
  Synthetic oligonucleotide
ggcgagaatgagcatcggttataacattacgaaggctttgcgatcaggacgccac

SEQ ID NO: 513126 - DNA, 55 bp, Artificial
  Synthetic oligonucleotide
ggcagctactggtgctccaatcacgaagatggcgagagacgatgcgatcaatggg

SEQ ID NO: 513127 - DNA, 55 bp, Artificial
  Synthetic oligonucleotide
ggcaccgggagatgccacgatttcttgggcggaatccaccttgttcgacgttttc

SEQ ID NO: 513128 - DNA, 55 bp, Artificial
  Synthetic oligonucleotide
ggaagtagtggttctcctcaggaatacgtccacggatgtactcgggctcggatcc

SEQ ID NO: 513129 - DNA, 55 bp, Artificial
  Synthetic oligonucleotide
aaagacctgcccggaagtcccgactgacggccctacgtaccaaccacttacgtcc

SEQ ID NO: 513130 - DNA, 55 bp, Artificial
  Synthetic oligonucleotide
aatgtatacctctagctgttcacagtaaggtgcacccaagctccatatagtgggg

SEQ ID NO: 513131 - DNA, 55 bp, Artificial
  Synthetic oligonucleotide
aattctggcgtaataaagataagtaatgccggccctagagactagttgctatgcc

SEQ ID NO: 513132 - DNA, 55 bp, Artificial
  Synthetic oligonucleotide
accatcgactccagaatgcaagtctaaacgagaagcgcacgcttcaaatgacaag

SEQ ID NO: 513133 - DNA, 55 bp, Artificial
  Synthetic oligonucleotide
agccagcccgtagcaagtacatcacttcctttccgatacgaaccagagggctttg

SEQ ID NO: 513134 - DNA, 55 bp, Artificial
  Synthetic oligonucleotide
agtgaatggcgtagggtcctggcgtccatgagatatgctccactctgaccatggc

SEQ ID NO: 513135 - DNA, 55 bp, Artificial
  Synthetic oligonucleotide
atcacggctggtcaccgcccgacaacacgaagcaacctgacacgggaaaatgtgt

SEQ ID NO: 513136 - DNA, 55 bp, Artificial
  Synthetic oligonucleotide
attaaagggagacatgtagaataaatagggccatctttgtccctcaaagacggtc

SEQ ID NO: 513137 - DNA, 55 bp, Artificial
  Synthetic oligonucleotide
cagctcgagcttccacaccaagatgaagctaaaccgatagtggttatggttgggt

SEQ ID NO: 513138 - DNA, 55 bp, Artificial
  Synthetic oligonucleotide
catcgatgacaccaagttcaagggtaaagtcgcctatacatccgtggtcagccat

SEQ ID NO: 513139 - DNA, 55 bp, Artificial
  Synthetic oligonucleotide
ccagtgtcaagactgtggcgtctgtccctattgccgtaaggccttcccagaccac

SEQ ID NO: 513140 - DNA, 55 bp, Artificial
  Synthetic oligonucleotide
ccattctagctagtcagccgtaaacatattcctcgcaaagcttgaatggatgtct

SEQ ID NO: 513141 - DNA, 55 bp, Artificial
  Synthetic oligonucleotide
ccccacggtgaaacagcttaggtagagggaagtatcttgatgccgagaggagagg

SEQ ID NO: 513142 - DNA, 55 bp, Artificial
  Synthetic oligonucleotide
cccctttaccgaggtagtggggacgtttaggagcaagagtttcgaccaaactaaa

SEQ ID NO: 513143 - DNA, 55 bp, Artificial
  Synthetic oligonucleotide
cctggacgcaccaacacaataagatcggtaaataaggcagtacgtctcgcagagg

SEQ ID NO: 513144 - DNA, 55 bp, Artificial
  Synthetic oligonucleotide
cctttggcgcctttagcttgaataaagggataggtgtcaagaccatctgacatac

SEQ ID NO: 513145 - DNA, 55 bp, Artificial
  Synthetic oligonucleotide
ctgaaatccgctactagaagtcgtataacggaagactggactattcggttcgaaa

SEQ ID NO: 513146 - DNA, 55 bp, Artificial
  Synthetic oligonucleotide
ctcccattaacttctcgtcctctggatactaggttgcctcttctaaccgctaata

SEQ ID NO: 513147 - DNA, 55 bp, Artificial
  Synthetic oligonucleotide
cggtaatgcgaaggtctcaggttcaagccctggcgggagcaatcccaacgccctc

SEQ ID NO: 513148 - DNA, 55 bp, Artificial
  Synthetic oligonucleotide
cggcaagcgctggattatcaattttatcaggccacaacccagagcttaagatgcg

SEQ ID NO: 513149 - DNA, 55 bp, Artificial
  Synthetic oligonucleotide
cggacttgcggctgctgcttgttagtatggatggggtgttaggataaagaaatga

SEQ ID NO: 513150 - DNA, 55 bp, Artificial
  Synthetic oligonucleotide
cgcgacttctttcccagccatgtccgcacgttccataaggagctggccctttcga

SEQ ID NO: 513151 - DNA, 55 bp, Artificial
  Synthetic oligonucleotide
cgcctcaatgatcattcccgctactgtgagcagcctcctacctagagcccagtcc

SEQ ID NO: 513152 - DNA, 55 bp, Artificial
  Synthetic oligonucleotide
cgccaggctccgcttcccatttgtgaagccaattacccaccgcgctttgtagagt

SEQ ID NO: 513153 - DNA, 55 bp, Artificial
  Synthetic oligonucleotide
cgcagttactccgggtacattgaaacctcaccttacacctcgcaactgacacgcc

SEQ ID NO: 513154 - DNA, 55 bp, Artificial
  Synthetic oligonucleotide
cgcacattttgtcggtctcatacgccgtcaccgaattcgttcccttacgcttcac

SEQ ID NO: 513155 - DNA, 55 bp, Artificial
  Synthetic oligonucleotide
cgatactattttggcgaagcttatgtgttcgccgacggttcagaaggctgttacg

SEQ ID NO: 513156 - DNA, 55 bp, Artificial
  Synthetic oligonucleotide
cgagaccgttacttagaccatggagatgggacatctattgcgtagggcctgcctg

SEQ ID NO: 513157 - DNA, 55 bp, Artificial
  Synthetic oligonucleotide
cgacactcggtggaaacgggctgcatgatacatctcctcggtggaaacgggctgc

SEQ ID NO: 513158 - DNA, 55 bp, Artificial
  Synthetic oligonucleotide
cgaatgaattgggctgactgattggtccagcaaacactgctaaccccagaagctc

SEQ ID NO: 513159 - DNA, 54 bp, Artificial
  Synthetic oligonucleotide
cattaccaaggagggtgctttggtcgaaagctcagcacctcagattctcgccca

SEQ ID NO: 513160 - DNA, 54 bp, Artificial
  Synthetic oligonucleotide
tccaccagtcattacgaatcattcctggaaatcataaaagggacgagcagccac

SEQ ID NO: 513161 - DNA, 52 bp, Artificial
  Synthetic oligonucleotide
gcctaagacgcggccgggctggcaggtagccacatcgccctttcggatgtgc

SEQ ID NO: 513162 - DNA, 52 bp, Artificial
  Synthetic oligonucleotide
gattgaacagcacaccggattgtaggctaggcgagctttcccaaacgatttc

SEQ ID NO: 513163 - DNA, 51 bp, Artificial
  Synthetic oligonucleotide
agtgctcgatgggtagactaccgcaaccgggcgacctgtgctgttcgaagt

SEQ ID NO: 513164 - DNA, 51 bp, Artificial
  Synthetic oligonucleotide
ctctacctttcagtgtgtgcaggggtccgcagcgctcagggtaagtgcgct

SEQ ID NO: 513165 - DNA, 51 bp, Artificial
  Synthetic oligonucleotide
aatgaactattagacgattcaatgagcgacaataggctgaaggcgcccagt

SEQ ID NO: 513166 - DNA, 50 bp, Artificial
  Synthetic oligonucleotide
cactggacctagccacactagccacagatgatccgtgctcagacactttt

SEQ ID NO: 513167 - DNA, 55 bp, Artificial
  Synthetic oligonucleotide
acaccgatatcgagaacactatcgcagggctttacgtaggattttattatacacg

SEQ ID NO: 513168 - DNA, 55 bp, Artificial
  Synthetic oligonucleotide
agcactcgtgcgtgaatcctgcattctcgagaagccctctcaactcctccttcga

SEQ ID NO: 513169 - DNA, 55 bp, Artificial
  Synthetic oligonucleotide
atcacttaagtccctcaccattagtcttctacattttcctcccctacctagatcc

SEQ ID NO: 513170 - DNA, 55 bp, Artificial
  Synthetic oligonucleotide
catcgtcctccgtggaaataccatgtttggcgctttcatttgtggtgtgattctt

SEQ ID NO: 513171 - DNA, 55 bp, Artificial
  Synthetic oligonucleotide
ccactcaaagtcagcccttagctggatctatagatttgtcggcaaacacacgtag

SEQ ID NO: 513172 - DNA, 55 bp, Artificial
  Synthetic oligonucleotide
ccatcttcatgccagttgccacgtatggagcaatgagaggagtcaaagtctcgtc

SEQ ID NO: 513173 - DNA, 55 bp, Artificial
  Synthetic oligonucleotide
ccctagcaattagcccagggtcatttgaaacctgcccaagcatagtacgtttctc

SEQ ID NO: 513174 - DNA, 55 bp, Artificial
  Synthetic oligonucleotide
cgaagcactgcagataagaaatgtccgtgtaatgtgctggttggtgtaccatgga

SEQ ID NO: 513175 - DNA, 55 bp, Artificial
  Synthetic oligonucleotide
gcatagaacagatgaggaagaatgtgacgggtctaaatcaatgtgccataagcct

SEQ ID NO: 513176 - DNA, 55 bp, Artificial
  Synthetic oligonucleotide
cgcatccacagtcattcatcactagtactccatagagttgatcgtcgttcgactg

SEQ ID NO: 513177 - DNA, 55 bp, Artificial
  Synthetic oligonucleotide
cgtcaagcgatgcctcgttcgatctctccacgtatacaacctaccgaagattcag

SEQ ID NO: 513178 - DNA, 55 bp, Artificial
  Synthetic oligonucleotide
cgtggactgacctctactgacatctttgactcattataaaactgctctgccctga

SEQ ID NO: 513179 - DNA, 55 bp, Artificial
  Synthetic oligonucleotide
ctgctttgagcgtatagcttcaaagtaatgtgtttcggagtttctgcactcaagg

SEQ ID NO: 513180 - DNA, 55 bp, Artificial
  Synthetic oligonucleotide
gcactatccaacagtagctgggacagaacgatagacagatagagcaatgcatgcg

SEQ ID NO: 513181 - DNA, 54 bp, Artificial
  Synthetic oligonucleotide
gactgcttggaaggagcacagttccaaaagtctacttatgaaatcaaggtcgaa

SEQ ID NO: 513182 - DNA, 54 bp, Artificial
  Synthetic oligonucleotide
cgaatggggagtctgatctgcacacatccctagttcaaaagtcggactgcttat

SEQ ID NO: 513183 - DNA, 51 bp, Artificial
  Synthetic oligonucleotide
tctacccatgcgacaaaatcctccatagtgcgtgagattaagacacttggg

SEQ ID NO: 513184 - DNA, 55 bp, Artificial
  Synthetic oligonucleotide
ttcgagcactgacgccaatgctaactcgagcacgggccctatctctggcgccaat

SEQ ID NO: 513185 - DNA, 55 bp, Artificial
  Synthetic oligonucleotide
tacttccgctctcatctcgactgagtagtcgacctccgaaggcttttccttccgg

SEQ ID NO: 513186 - DNA, 55 bp, Artificial
  Synthetic oligonucleotide
gttggctgcgggtttgaagggacagaacgctaaggttcttttggtacgtttgggt

SEQ ID NO: 513187 - DNA, 55 bp, Artificial
  Synthetic oligonucleotide
gtcagcgacttcgccaacttacagaagcctgactcagtagcccgctagtagtgaa

SEQ ID NO: 513188 - DNA, 55 bp, Artificial
  Synthetic oligonucleotide
gctccatctgttccggaggagtcacctgcgtcagaagtggcattccctgaacctg

SEQ ID NO: 513189 - DNA, 55 bp, Artificial
  Synthetic oligonucleotide
gccaacgtacatacacattctccccgaagtcacgacggatggtctaaacgctact

SEQ ID NO: 513190 - DNA, 55 bp, Artificial
  Synthetic oligonucleotide
gagggtatgcatgctggtgacacagttcagagctttaggtctggtatccctgagg

SEQ ID NO: 513191 - DNA, 55 bp, Artificial
  Synthetic oligonucleotide
cgtaagaaaggatttggaaagatcctagttgaacacaatgctggacttgaagcac

SEQ ID NO: 513192 - DNA, 55 bp, Artificial
  Synthetic oligonucleotide
cgactcgttcctactcaatatctgtgccgccgttccgtcccttcagcaaatcagc

SEQ ID NO: 513193 - DNA, 55 bp, Artificial
  Synthetic oligonucleotide
ccgttgaattatcaggagcgaccatcatgaatgtgccagcgatggggttgcctag

SEQ ID NO: 513194 - DNA, 55 bp, Artificial
  Synthetic oligonucleotide
ccataggagttatacggggcttatatgccatctcaaggaaaagtctcctcttggg

SEQ ID NO: 513195 - DNA, 55 bp, Artificial
  Synthetic oligonucleotide
catccacaccatcacccttctgcatctgaccacgataagcaggacacggaacaag

SEQ ID NO: 513196 - DNA, 55 bp, Artificial
  Synthetic oligonucleotide
cactgagagcttaacatggcaccacttccccaagtctgccatctccttgggaccg

SEQ ID NO: 513197 - DNA, 55 bp, Artificial
  Synthetic oligonucleotide
cacagccagagggcataccgctcgtgcgaaatcgtggtttcattgcatctgctca

SEQ ID NO: 513198 - DNA, 55 bp, Artificial
  Synthetic oligonucleotide
caatcacactaggaatcggtctcaacccactaagactcccactcccctcatcaaa

SEQ ID NO: 513199 - DNA, 55 bp, Artificial
  Synthetic oligonucleotide
agaggctgttgaaggagctcttcttgatctacaggagcgtttcacaggagcatcc

SEQ ID NO: 513200 - DNA, 52 bp, Artificial
  Synthetic oligonucleotide
agaggttacattctctcaaaagttaagtttgactcgaccgtgaccgttgttg

SEQ ID NO: 513201 - DNA, 55 bp, Artificial
  Synthetic oligonucleotide
tgtctgtcagtatcgcccgcagccgtgcacttgctgagagaaatgcaatgttctc

SEQ ID NO: 513202 - DNA, 55 bp, Artificial
  Synthetic oligonucleotide
gtagataagttaggcaaccttagtagccgtaaccgtcttttaggtagggataaac

SEQ ID NO: 513203 - DNA, 55 bp, Artificial
  Synthetic oligonucleotide
ggaggagcacacagagcacctagaccaggtctttaagcgtcttcagcaagcctag

SEQ ID NO: 513204 - DNA, 55 bp, Artificial
  Synthetic oligonucleotide
gcgacttaactagcgctcttagcgtaagcggtttaagatagcgtagtaggctacc

SEQ ID NO: 513205 - DNA, 55 bp, Artificial
  Synthetic oligonucleotide
gcgaaagaaactagggtaggtcggagtactagctagggtgtgctataggccgccc

SEQ ID NO: 513206 - DNA, 55 bp, Artificial
  Synthetic oligonucleotide
gccacgggacgcatacatgctgtatgtgctcgtacgggttgtcgtcttggactgc

SEQ ID NO: 513207 - DNA, 55 bp, Artificial
  Synthetic oligonucleotide
ctcatttcgattttacctttgagtcagatgcttatcgccatcggtgaccgacgtc

SEQ ID NO: 513208 - DNA, 55 bp, Artificial
  Synthetic oligonucleotide
cgtaacatggcatgtggcatacactggctgtctctccatgggatggcggtgaggc

SEQ ID NO: 513209 - DNA, 55 bp, Artificial
  Synthetic oligonucleotide
cggccgtcctggctctcgacggctaggagacgcgactggacgacaaccaacagaa

SEQ ID NO: 513210 - DNA, 55 bp, Artificial
  Synthetic oligonucleotide
cgaactataggggactagtaaggcgaaggcttgctagttaatttatacgtaggct

SEQ ID NO: 513211 - DNA, 55 bp, Artificial
  Synthetic oligonucleotide
cctaacccgacgtagttggttaagttaaaggaacggacacacgtaacgaagaggc

SEQ ID NO: 513212 - DNA, 55 bp, Artificial
  Synthetic oligonucleotide
ccacacttggctctatgtgcgcaaatgacagtctccgtagttcccgcgtcaaaca

SEQ ID NO: 513213 - DNA, 55 bp, Artificial
  Synthetic oligonucleotide
cagactacaatccacagcaatgcaccccaatagcgaggattgggctccccttgag

SEQ ID NO: 513214 - DNA, 55 bp, Artificial
  Synthetic oligonucleotide
atctttgcgacgtctctttacgctatagctacggtgccttactaactatgcgtct

SEQ ID NO: 513215 - DNA, 55 bp, Artificial
  Synthetic oligonucleotide
aaatagagacgaaccatgctgtgggttgccaaggcgtcgttggtttgtaaacgcg

SEQ ID NO: 513216 - DNA, 54 bp, Artificial
  Synthetic oligonucleotide
aatagaccgaacacacacaagaggcacctagttcgtttgtcggcacttagcacg

SEQ ID NO: 513217 - DNA, 50 bp, Artificial
  Synthetic oligonucleotide
agaaagcgtggatcaatcgatatcagcagtcatcccgtgttcgtccacct

SEQ ID NO: 513218 - DNA, 55 bp, Artificial
  Synthetic oligonucleotide
gtggtgttaaaatcgtaaacgtttatgaggtcgtgagtgtttgcaaccatcccag

SEQ ID NO: 513219 - DNA, 55 bp, Artificial
  Synthetic oligonucleotide
ggctctgcagccacgctgatttgcgattgcgattccattccgtcccgcatagatg

SEQ ID NO: 513220 - DNA, 55 bp, Artificial
  Synthetic oligonucleotide
ggcgggatgtcttggctgacactggtgaagtacttgataagatcgtaggcgctcc

SEQ ID NO: 513221 - DNA, 55 bp, Artificial
  Synthetic oligonucleotide
gcaccgtagagagaggcattacttcgaccggtttggcttacgcaagtcgctattc

SEQ ID NO: 513222 - DNA, 55 bp, Artificial
  Synthetic oligonucleotide
ctgggacggttcgtgcaagtttatggggtcacctgctcctgccgtgtctacatgc

SEQ ID NO: 513223 - DNA, 55 bp, Artificial
  Synthetic oligonucleotide
ctcgttcttacttgctttgcaattagcgctgctgtaacggaaggttaggtcaagt

SEQ ID NO: 513224 - DNA, 55 bp, Artificial
  Synthetic oligonucleotide
cggccgatgatatcttgacttcagcttcttttcaagatccgtatgtccaaccccg

SEQ ID NO: 513225 - DNA, 55 bp, Artificial
  Synthetic oligonucleotide
cgctgctagcgagccactttccgaacccctgaccccaggaattgaatccactact

SEQ ID NO: 513226 - DNA, 55 bp, Artificial
  Synthetic oligonucleotide
cgcggcttgtgagacatcctagaccggtatatccgtgccaccaacatactacggg

SEQ ID NO: 513227 - DNA, 55 bp, Artificial
  Synthetic oligonucleotide
cgataaggtacccgtggcgtgataatcaacatccttcagccgttgacatgtcgac

SEQ ID NO: 513228 - DNA, 55 bp, Artificial
  Synthetic oligonucleotide
cgaagacaagttcgagttgtttcactgccaatgcaaatatgcaacacggcacaac

SEQ ID NO: 513229 - DNA, 55 bp, Artificial
  Synthetic oligonucleotide
ccggcagtcaaacgtagaatcccttgatcgatatttcgaatgtggagttcgatag

SEQ ID NO: 513230 - DNA, 55 bp, Artificial
  Synthetic oligonucleotide
cccgatttgctacagcggcaggtgataaggaagctactgaagtagtactcgcggc

SEQ ID NO: 513231 - DNA, 55 bp, Artificial
  Synthetic oligonucleotide
aatgttgagacctacccggtcccagttgcattccaccagtaagtttctgttgtca

SEQ ID NO: 513232 - DNA, 54 bp, Artificial
  Synthetic oligonucleotide
atatttctagacagttcctgcgttatcatcctggactcgaagcgcagagagtgc

SEQ ID NO: 513233 - DNA, 54 bp, Artificial
  Synthetic oligonucleotide
tagggcgagagtcccacgacgccctagagccttctgctcaatcagccatccacc

SEQ ID NO: 513234 - DNA, 53 bp, Artificial
  Synthetic oligonucleotide
tgttatgttcgcattaggtggagggtaaggagccatgactctattcgcaaata

SEQ ID NO: 513235 - DNA, 55 bp, Artificial
  Synthetic oligonucleotide
tcccacagggttatgataacagcactaaatgggcaacacctatccataaatggtt

SEQ ID NO: 513236 - DNA, 55 bp, Artificial
  Synthetic oligonucleotide
gttgatatgaatgcaacaatagccttacatgtgagatctgaaaccgcccttttac

SEQ ID NO: 513237 - DNA, 55 bp, Artificial
  Synthetic oligonucleotide
gtcgccatctccaaaccgtatacaataacggcttcaggtgatggatacttgaaat

SEQ ID NO: 513238 - DNA, 55 bp, Artificial
  Synthetic oligonucleotide
gggccatggtaagccaaacatctcccattcacttgaaagtcactcatcgtatcag

SEQ ID NO: 513239 - DNA, 55 bp, Artificial
  Synthetic oligonucleotide
gcgaggctaagctgatcgaggaaggcgcttctctatctgcaatttgcagcttatc

SEQ ID NO: 513240 - DNA, 55 bp, Artificial
  Synthetic oligonucleotide
gcccgaggtatagactctggaatgttttctttgagtgttccatgggtcaaattcg

SEQ ID NO: 513241 - DNA, 55 bp, Artificial
  Synthetic oligonucleotide
gccagcactttccgcaatcaaaaggtgtgctccttgttgacaattatcaagtgct

SEQ ID NO: 513242 - DNA, 55 bp, Artificial
  Synthetic oligonucleotide
gataaccactttcacgacaaatgtcgttatttcctatgtgtcgagtgcgcctacc

SEQ ID NO: 513243 - DNA, 55 bp, Artificial
  Synthetic oligonucleotide
gaagggttcgttgcactgttcaatgaatggaatacaaattttggtttgaacgagg

SEQ ID NO: 513244 - DNA, 55 bp, Artificial
  Synthetic oligonucleotide
cttatcaaagccgtcctagcatggccagttatatcgagaggcagccagatacctg

SEQ ID NO: 513245 - DNA, 55 bp, Artificial
  Synthetic oligonucleotide
cgttcaaacaaatccacccaacacgattccctgtgtaatcacttccagcactgaa

SEQ ID NO: 513246 - DNA, 55 bp, Artificial
  Synthetic oligonucleotide
cagaacctgagaccggcttccatgggcgacattgaaatgccagatttcagatctc

SEQ ID NO: 513247 - DNA, 55 bp, Artificial
  Synthetic oligonucleotide
caccagcataggggctaaccaagtagccaaaactcagcgtagcatttctatcagg

SEQ ID NO: 513248 - DNA, 55 bp, Artificial
  Synthetic oligonucleotide
actaggccagactcaagactcccctgcgttttgtatggggtgcagtgcctagacc

SEQ ID NO: 513249 - DNA, 55 bp, Artificial
  Synthetic oligonucleotide
aagtagagacgttatatggtgaagcagcgagctcccagatattgactattggagg

SEQ ID NO: 513250 - DNA, 54 bp, Artificial
  Synthetic oligonucleotide
tctttgtattgaggccgcagatgtacttctttgaatacctgggtttaattgggc

SEQ ID NO: 513251 - DNA, 52 bp, Artificial
  Synthetic oligonucleotide
gaagatgcagtaccaccaaagggcacaccatataatcagaaccaattcgtgg

SEQ ID NO: 513252 - DNA, 55 bp, Artificial
  Synthetic oligonucleotide
tgtcttacaaactgaaaattttcgatacacccatccaccttccaacacgcaccca

SEQ ID NO: 513253 - DNA, 55 bp, Artificial
  Synthetic oligonucleotide
taatatcgaagcgatgcatagagagtacccaggtagcagatagtgacgtgctgga

SEQ ID NO: 513254 - DNA, 55 bp, Artificial
  Synthetic oligonucleotide
gttggtgctagatgttggaacgatgattttcttgttgggatagacttcgaagctg

SEQ ID NO: 513255 - DNA, 55 bp, Artificial
  Synthetic oligonucleotide
gttctgtaggaacgtttggtaccgactgtaccttttaaagtaccgagtccaatgg

SEQ ID NO: 513256 - DNA, 55 bp, Artificial
  Synthetic oligonucleotide
gtctctcctattgtctccaagatgtatgcttccgaaggtggagctagtgaaggct

SEQ ID NO: 513257 - DNA, 55 bp, Artificial
  Synthetic oligonucleotide
gggaccttccttatcttaacacgagacctcatagaggacgcaaattgagagtcgc

SEQ ID NO: 513258 - DNA, 55 bp, Artificial
  Synthetic oligonucleotide
ggactggttgattggtgtgttcctctcaccgtatggagaatgtccaaaacgccca

SEQ ID NO: 513259 - DNA, 55 bp, Artificial
  Synthetic oligonucleotide
gacccaaagtactcggatcaaccggtgccatataagggttttccttagccttggg

SEQ ID NO: 513260 - DNA, 55 bp, Artificial
  Synthetic oligonucleotide
cgtcacttcccctgttgagctcctcattggggtgaactgcatctctataaggtgc

SEQ ID NO: 513261 - DNA, 55 bp, Artificial
  Synthetic oligonucleotide
cggcggcaccctccttctcacacattcggcattgtaagacaactgtacaagaagg

SEQ ID NO: 513262 - DNA, 55 bp, Artificial
  Synthetic oligonucleotide
cccttcgccgatgggacttggataaccccatatctcagaaaggtatagtttgttt

SEQ ID NO: 513263 - DNA, 55 bp, Artificial
  Synthetic oligonucleotide
cagtttacaaaactacgttgagttgtatcgaaaacgctagatgttgggaagctcg

SEQ ID NO: 513264 - DNA, 55 bp, Artificial
  Synthetic oligonucleotide
aggtttagagaatggtaacctaatgttcaagcagtctaccatgcctcatgagtgg

SEQ ID NO: 513265 - DNA, 55 bp, Artificial
  Synthetic oligonucleotide
accttaacctctcacgttcttcgtcggaattttgtgaatcatcgggcatgatatc

SEQ ID NO: 513266 - DNA, 54 bp, Artificial
  Synthetic oligonucleotide
aactagttttcactgttatgtccggtaacgctgggtctataagggtcatattgg

SEQ ID NO: 513267 - DNA, 52 bp, Artificial
  Synthetic oligonucleotide
ggacatttcagacgcctaagccaattacctactgtgaggatggactctaaaa

SEQ ID NO: 513268 - DNA, 52 bp, Artificial
  Synthetic oligonucleotide
caactccattggtacggccggcacttgtctatctatgatatacggtgatcaa

SEQ ID NO: 513269 - DNA, 55 bp, Artificial
  Synthetic oligonucleotide
ttcagcgcggggagacaccgcagaccgctccattcgcaagtgcctggctttctga

SEQ ID NO: 513270 - DNA, 55 bp, Artificial
  Synthetic oligonucleotide
tgtgagcggggtgagacacggcaaagcatggtgaacatggcagatcggtgggccg

SEQ ID NO: 513271 - DNA, 55 bp, Artificial
  Synthetic oligonucleotide
tcgccgccagtttcgttgcagttggtgtcttcgcagcccctgagtgtacctggcc

SEQ ID NO: 513272 - DNA, 55 bp, Artificial
  Synthetic oligonucleotide
gtgcctgaaccttggcctcgacacccaggtaccgaccgagcttacgacccaccaa

SEQ ID NO: 513273 - DNA, 55 bp, Artificial
  Synthetic oligonucleotide
gggcggaagtgtccctttggatcgcgtccttatgtcccctgaaatgctagtcgcg

SEQ ID NO: 513274 - DNA, 55 bp, Artificial
  Synthetic oligonucleotide
gcttcgtcgaagtaggaagggcacatggagtaaattgacacgctggcaagtgctt

SEQ ID NO: 513275 - DNA, 55 bp, Artificial
  Synthetic oligonucleotide
gatggtctggcttcttggaaggcttggtagcgtggaaacgggctgtcggtgagcc

SEQ ID NO: 513276 - DNA, 55 bp, Artificial
  Synthetic oligonucleotide
gatcgctgtacgtctccctcaaaatgcgtagtccaggcactcatcggaaccctgc

SEQ ID NO: 513277 - DNA, 55 bp, Artificial
  Synthetic oligonucleotide
ctcgaggcaaatagggtgccaatcatcgaggttgcaacagcgtcagccttgcagc

SEQ ID NO: 513278 - DNA, 55 bp, Artificial
  Synthetic oligonucleotide
cgtgctcagttcaaccacgcatcgccgtggatccgactgcagggacttgagccca

SEQ ID NO: 513279 - DNA, 55 bp, Artificial
  Synthetic oligonucleotide
cgtagccattagctctgcgtcgacctccacggatgaacgcatgaccgttgtcgaa

SEQ ID NO: 513280 - DNA, 55 bp, Artificial
  Synthetic oligonucleotide
ccgcacctcagggaacccgtcaatgtatagctccaagggaacagggcgtacagag

SEQ ID NO: 513281 - DNA, 55 bp, Artificial
  Synthetic oligonucleotide
ccctccgccatgatgctaattgatcccgactccatggccttatatccttggccgc

SEQ ID NO: 513282 - DNA, 54 bp, Artificial
  Synthetic oligonucleotide
gtgcgtctctggctccgtggcccctccatctgaaagcaccggccgcctgtcgtc

SEQ ID NO: 513283 - DNA, 54 bp, Artificial
  Synthetic oligonucleotide
ttttgcctgttgactcgctaggttgcagcttgagcggctaagtagatcaatcag

SEQ ID NO: 513284 - DNA, 51 bp, Artificial
  Synthetic oligonucleotide
gcaaacagcttaccctaccaatagcgacctttccgtaagcgaactagatcg

SEQ ID NO: 513285 - DNA, 51 bp, Artificial
  Synthetic oligonucleotide
tgagccacaggcagcaagcggccagtgttctgtgacgggcagccacgaccg

SEQ ID NO: 513286 - DNA, 55 bp, Artificial
  Synthetic oligonucleotide
ttaagcgaggttatccaccattagcttgtctttgtggaacatacggagtgtcaaa

SEQ ID NO: 513287 - DNA, 55 bp, Artificial
  Synthetic oligonucleotide
acgacgtgtcaatgataaacgcgagcacagttggtgtgggtatcaggggaaagga

SEQ ID NO: 513288 - DNA, 55 bp, Artificial
  Synthetic oligonucleotide
agaatttgtgtgcaaagctattgcggataatatcaagagtggcgtgcttaacgac

SEQ ID NO: 513289 - DNA, 55 bp, Artificial
  Synthetic oligonucleotide
attatcgctcataccgctttcgcaccgtaccacaccatccgtgttgatacaatgc

SEQ ID NO: 513290 - DNA, 55 bp, Artificial
  Synthetic oligonucleotide
ccacatcctggatactctccaaagacgtaaccgatcctgaaagcgacatgctcga

SEQ ID NO: 513291 - DNA, 55 bp, Artificial
  Synthetic oligonucleotide
cgctaagaaatgctttgagacgacagacatgccagtacgcacctagcggttcgtt

SEQ ID NO: 513292 - DNA, 55 bp, Artificial
  Synthetic oligonucleotide
tgcgttgatcacgtgtgctatatatgagcgcacaacaagagtgtattcagtgctg

SEQ ID NO: 513293 - DNA, 55 bp, Artificial
  Synthetic oligonucleotide
gaggacctgcgcatattggtgacaccagaaaacgtgtgtcagtatgaagcgatgc

SEQ ID NO: 513294 - DNA, 55 bp, Artificial
  Synthetic oligonucleotide
gtgtgaagcactccatatgaacttcttgtctatgcagtaaagaatgcttgcgcgg

SEQ ID NO: 513295 - DNA, 55 bp, Artificial
  Synthetic oligonucleotide
ggacaataattcactatttctccgtttcgtgtgcaataacccttttgctccagtg

SEQ ID NO: 513296 - DNA, 55 bp, Artificial
  Synthetic oligonucleotide
gggcgatgttccatgcttgaagctcatgaaactacattcttgcccgaccagttca

SEQ ID NO: 513297 - DNA, 55 bp, Artificial
  Synthetic oligonucleotide
ggtacggcacatttatatgagcatggattagcaacatccttgcaagattgaaggg

SEQ ID NO: 513298 - DNA, 54 bp, Artificial
  Synthetic oligonucleotide
gccactattacgagaaacgtaatgcatcatgaaaaggtatcgcaaatgggtcgg

SEQ ID NO: 513299 - DNA, 54 bp, Artificial
  Synthetic oligonucleotide
aactctaatccgatatcatcacataattgcaggttccgtagcagggctgttcgt

SEQ ID NO: 513300 - DNA, 53 bp, Artificial
  Synthetic oligonucleotide
tgtgtcgatggggatggatcattactgcttctcgacaaggagtcagctcagta

SEQ ID NO: 513301 - DNA, 52 bp, Artificial
  Synthetic oligonucleotide
ggggtgcgaatttgttattggcgacacgaacgtaccaaggagtagcaccaac

SEQ ID NO: 513302 - DNA, 51 bp, Artificial
  Synthetic oligonucleotide
ctcaagactaacatcccgtcgctagctgcactcatcaaatcgcacattgtg

SEQ ID NO: 513303 - DNA, 55 bp, Artificial
  Synthetic oligonucleotide
tgggctctgacggatttacgaacctctggaccatgttagaactataagcccaatg

SEQ ID NO: 513304 - DNA, 55 bp, Artificial
  Synthetic oligonucleotide
tgcgcacgctagatagattatacctacaggcttcgacacagacttcttgccctcc

SEQ ID NO: 513305 - DNA, 55 bp, Artificial
  Synthetic oligonucleotide
tcgcgcgacaagtacagagtagcagcacctcctgattcaatgggtatctcatctc

SEQ ID NO: 513306 - DNA, 55 bp, Artificial
  Synthetic oligonucleotide
gtataccaccactaaacaccgtgcgccctagtctcatcgttgtgcctttccagaa

SEQ ID NO: 513307 - DNA, 55 bp, Artificial
  Synthetic oligonucleotide
ggtggagcgatgtagtgcggtcaggtcattattgcggttaggccaccagtgctat

SEQ ID NO: 513308 - DNA, 55 bp, Artificial
  Synthetic oligonucleotide
ggtgcggtaattgtcaatcgaatggaaagtgtggttgccctcccgaagcggtacg

SEQ ID NO: 513309 - DNA, 55 bp, Artificial
  Synthetic oligonucleotide
ggggaaccaggacagagtcaacaattgagggcgcggtctgagctgagggtagttg

SEQ ID NO: 513310 - DNA, 55 bp, Artificial
  Synthetic oligonucleotide
ggcgcatcgccctagcctctcatgacgccgcctcaagatgccacgccgaaacccc

SEQ ID NO: 513311 - DNA, 55 bp, Artificial
  Synthetic oligonucleotide
ggcgagtgcatgagagatgggatgacgattgcggggagctcggagctcgtacctc

SEQ ID NO: 513312 - DNA, 55 bp, Artificial
  Synthetic oligonucleotide
ggagctactgccgttacaggcacactaccacccctcagttcatgttctagcctcc

SEQ ID NO: 513313 - DNA, 55 bp, Artificial
  Synthetic oligonucleotide
gcgttgacaacagcgaagctagtcgaaatggcgattatgtaccctcgcgatggga

SEQ ID NO: 513314 - DNA, 55 bp, Artificial
  Synthetic oligonucleotide
gccactatatttcttcttctgaacccgttctaattcccgcggatggggaagacgg

SEQ ID NO: 513315 - DNA, 55 bp, Artificial
  Synthetic oligonucleotide
gcatgagttcagctccctttacgagctgcgagaagcctgactgcgccgtaacagg

SEQ ID NO: 513316 - DNA, 55 bp, Artificial
  Synthetic oligonucleotide
gcacgtgtttgctcaaaatggacgccttgtccggcaagaactcgacaggtcgcag

SEQ ID NO: 513317 - DNA, 55 bp, Artificial
  Synthetic oligonucleotide
gatgtttgaagggtagtccttgcaaacagatcagtgttccaacgagtcggacgga

SEQ ID NO: 513318 - DNA, 55 bp, Artificial
  Synthetic oligonucleotide
gacaacagcgaagctagtcgaaatggcgattatgtaccctcgcgctgggaagcac

SEQ ID NO: 513319 - DNA, 55 bp, Artificial
  Synthetic oligonucleotide
ctacaacgatcaccaagcctacatcgccatacatacgagagtgcctgcacgtgcg

SEQ ID NO: 513320 - DNA, 55 bp, Artificial
  Synthetic oligonucleotide
cgtggagagattcgagggtgtcaaagaagaggtaaaggacatgggcgttttagcg

SEQ ID NO: 513321 - DNA, 55 bp, Artificial
  Synthetic oligonucleotide
cgtgatagtacaggtgaaggcatcttggttgatcgtagttgcagacgggtgctgc

SEQ ID NO: 513322 - DNA, 55 bp, Artificial
  Synthetic oligonucleotide
cctcctgacgggaacaccaatgactttgaaagatggtaatagacataaagcgctt

SEQ ID NO: 513323 - DNA, 55 bp, Artificial
  Synthetic oligonucleotide
ccgagtatgtctgcccgaacaatttgggcttcacgggtgtcctaaagcagagata

SEQ ID NO: 513324 - DNA, 55 bp, Artificial
  Synthetic oligonucleotide
cccttgcgacaagagcatacctacatagaaccggtcccattgttcctggctgtgg

SEQ ID NO: 513325 - DNA, 55 bp, Artificial
  Synthetic oligonucleotide
cccatgcacatgactattcgacagctccagtattataacccagcacacagactcg

SEQ ID NO: 513326 - DNA, 55 bp, Artificial
  Synthetic oligonucleotide
catggatggggtggattggagtagataccaaagcgtccgaaacgctagaatcacg

SEQ ID NO: 513327 - DNA, 55 bp, Artificial
  Synthetic oligonucleotide
cagcacacggatcgatctgaagacacggtagagggtcggataaggcagggaggcc

SEQ ID NO: 513328 - DNA, 55 bp, Artificial
  Synthetic oligonucleotide
cactagcagtgccccgcccttaatccccagcactgccgtcactcaaccccatcgt

SEQ ID NO: 513329 - DNA, 55 bp, Artificial
  Synthetic oligonucleotide
caccactctaagacgccatcgaagattaagctccgtccatcatgcaagtgaggtg

SEQ ID NO: 513330 - DNA, 55 bp, Artificial
  Synthetic oligonucleotide
caaaaggtcgaaatagttaacatccgtcaaggatgtctgcaaacttgtccccagc

SEQ ID NO: 513331 - DNA, 55 bp, Artificial
  Synthetic oligonucleotide
agcgaagtagtcttcagggttcgaagacatctcgccttgctccttcagtaccgtt

SEQ ID NO: 513332 - DNA, 55 bp, Artificial
  Synthetic oligonucleotide
acgcgccttagtagtagctagacccgctttataggtaagctaggcctcgtctttc

SEQ ID NO: 513333 - DNA, 54 bp, Artificial
  Synthetic oligonucleotide
gcccaataggctgttagtgcattagcgataacatggtttccaagcggagaacaa

SEQ ID NO: 513334 - DNA, 55 bp, Artificial
  Synthetic oligonucleotide
ttccgccccttgacaactacgttcctagccccggccctctcccttaatattcccc

SEQ ID NO: 513335 - DNA, 55 bp, Artificial
  Synthetic oligonucleotide
gtctccggacttgcttggtcgacggtggatgatgacatcggttagctcgagtacg

SEQ ID NO: 513336 - DNA, 55 bp, Artificial
  Synthetic oligonucleotide
gtattgtggtctcgatgacgcacgtagacgaagtggataagttggaggacgtggc

SEQ ID NO: 513337 - DNA, 55 bp, Artificial
  Synthetic oligonucleotide
gggttggttcgcggacttgcggtgcggcgcgtacttagacattgttcgtggaggg

SEQ ID NO: 513338 - DNA, 55 bp, Artificial
  Synthetic oligonucleotide
gggaccaatcgactgctcgcgcctgtccaagaaacgagacgaattacgctcgcca

SEQ ID NO: 513339 - DNA, 55 bp, Artificial
  Synthetic oligonucleotide
ggccttcaaagctgcctgcggttcgtggctctttgttgaagtgtggccacatcag

SEQ ID NO: 513340 - DNA, 55 bp, Artificial
  Synthetic oligonucleotide
ggcatagtggggtgcctcggatttggggctccattcacacacgggcgatcctctc

SEQ ID NO: 513341 - DNA, 55 bp, Artificial
  Synthetic oligonucleotide
gcggggtcaatggatgcgtgtctgagacgagtgtcggtaagtgcttaaccaaact

SEQ ID NO: 513342 - DNA, 55 bp, Artificial
  Synthetic oligonucleotide
gcggggccaattgtccttgcagtccgaaggtggaattctgcggatacaggtacgt

SEQ ID NO: 513343 - DNA, 55 bp, Artificial
  Synthetic oligonucleotide
gccgagacgtcatgggatgaaggaggtcccgggcgtattgggacgatgctgttgg

SEQ ID NO: 513344 - DNA, 55 bp, Artificial
  Synthetic oligonucleotide
gaagcgagaaaccagatggcaagcagatggacctgagattggagatttgatcatg

SEQ ID NO: 513345 - DNA, 55 bp, Artificial
  Synthetic oligonucleotide
cggtcagacggtctctacacttgtgcgcgcctctcacggacatcgtgctctcgga

SEQ ID NO: 513346 - DNA, 55 bp, Artificial
  Synthetic oligonucleotide
cgggtctctgacatatgccctagtgaccggaccgacatgctcagtcatagcgtaa

SEQ ID NO: 513347 - DNA, 55 bp, Artificial
  Synthetic oligonucleotide
ccgtctaccaaaacgatcaggacacaacatcggagcttggctccatatccgagcc

SEQ ID NO: 513348 - DNA, 54 bp, Artificial
  Synthetic oligonucleotide
tacgccgaaaatctgcaaatgcgcacgctcgcaaggatgcccatgtgtggaaaa

SEQ ID NO: 513349 - DNA, 52 bp, Artificial
  Synthetic oligonucleotide
gaggttggtcgattcgaggaggaccctatcgcctttcttgaatgtgaccagc

SEQ ID NO: 513350 - DNA, 51 bp, Artificial
  Synthetic oligonucleotide
tcttgcctccccagttgatttcaagctgcgaaacagagtcgcaagggagcg

SEQ ID NO: 513351 - DNA, 55 bp, Artificial
  Synthetic oligonucleotide
tcctccgaactatacgttatcttcgacgcattatatgagtcacgacctcatacga

SEQ ID NO: 513352 - DNA, 55 bp, Artificial
  Synthetic oligonucleotide
tccaagattgaagaatcacttcggaaggaaattgccgccggtcggatgttcggcc

SEQ ID NO: 513353 - DNA, 55 bp, Artificial
  Synthetic oligonucleotide
ggttgaatacctgcttttgtcccaaaggcctgaagtgaatccgatatgccgtcta

SEQ ID NO: 513354 - DNA, 55 bp, Artificial
  Synthetic oligonucleotide
gggttgggagttggcactggaaagatgccctcaacagtgtggaactgctcatggc

SEQ ID NO: 513355 - DNA, 55 bp, Artificial
  Synthetic oligonucleotide
gggtcagtttgtgtccaaatagcggcctgcggccacatttcacacccctttctca

SEQ ID NO: 513356 - DNA, 55 bp, Artificial
  Synthetic oligonucleotide
ggggatgcaggataggccatctttgggtgagaatgaaacataagaattccgatgg

SEQ ID NO: 513357 - DNA, 55 bp, Artificial
  Synthetic oligonucleotide
gggcattgggtacctgtctggagtcgtgtacgtattcaaggcttgaaagtcaccg

SEQ ID NO: 513358 - DNA, 55 bp, Artificial
  Synthetic oligonucleotide
ggcttttgtcccactccgctgatcgtctcttagtgtaagctttctggtgatttct

SEQ ID NO: 513359 - DNA, 55 bp, Artificial
  Synthetic oligonucleotide
ggctgggtgagtagccaccaaaagcactgcagaattgtggtgtcaagaagtgtaa

SEQ ID NO: 513360 - DNA, 55 bp, Artificial
  Synthetic oligonucleotide
ggagagacttcagatggttgaatgtgtgaagagcgagttcgggatggttgtaaga

SEQ ID NO: 513361 - DNA, 55 bp, Artificial
  Synthetic oligonucleotide
gcgtgatcctcgtcagtcgcttccttcaatttgagatgaggtgtgagtggagtag

SEQ ID NO: 513362 - DNA, 55 bp, Artificial
  Synthetic oligonucleotide
gatcgctgtgaaatgttaagttaagcccctgcagattgctcggacccactgtcat

SEQ ID NO: 513363 - DNA, 55 bp, Artificial
  Synthetic oligonucleotide
gagtcatttggtaatgcacacacgctcgaaaactcgaacgcatccagatttggtc

SEQ ID NO: 513364 - DNA, 55 bp, Artificial
  Synthetic oligonucleotide
gagctgactgggtttaaagaagtgaagcgccgatgaggttgtgactacctgcacc

SEQ ID NO: 513365 - DNA, 55 bp, Artificial
  Synthetic oligonucleotide
gacgacacccaaacacacccgttacgaatgtggaattagtctaacgacacccttg

SEQ ID NO: 513366 - DNA, 55 bp, Artificial
  Synthetic oligonucleotide
gaccatagggtgtcaaaagttgcttggagctgtttcttgctatcttcagacccag

SEQ ID NO: 513367 - DNA, 55 bp, Artificial
  Synthetic oligonucleotide
cgcacaaacgtttgagttgaacattacaaaatgtgtcaaacaagcctatcccctc

SEQ ID NO: 513368 - DNA, 55 bp, Artificial
  Synthetic oligonucleotide
cgatacatgaactatatgtgtcggtcgttggttacctgcaaatcgggccaccgac

SEQ ID NO: 513369 - DNA, 55 bp, Artificial
  Synthetic oligonucleotide
ccttgggcaccgataaacccagatccagacagctcgaagtatcttattgtattgg

SEQ ID NO: 513370 - DNA, 55 bp, Artificial
  Synthetic oligonucleotide
ccgcgaccttatcatccaagactagagtgttcggccaataaacacgcacagtagg

SEQ ID NO: 513371 - DNA, 55 bp, Artificial
  Synthetic oligonucleotide
aagaccttcaacgacgaactcctagaacacttcagggagaggatcaacatagagg

SEQ ID NO: 513372 - DNA, 54 bp, Artificial
  Synthetic oligonucleotide
aagtttggttgcgaaggtagctgtatctgtctgtcgagtggtaacagaagcaag

SEQ ID NO: 513373 - DNA, 53 bp, Artificial
  Synthetic oligonucleotide
tgagatcatgttaatgtcagccggtcacatgaccaagtaccagctaatgcccc

SEQ ID NO: 513374 - DNA, 52 bp, Artificial
  Synthetic oligonucleotide
agatgaagccacaaaaggcatggatgaagacagctgcggctcacttgctgaa

SEQ ID NO: 513375 - DNA, 50 bp, Artificial
  Synthetic oligonucleotide
catagccttagcaccggctgtctttgcgggaccattaacagaaggatttc

SEQ ID NO: 513376 - DNA, 55 bp, Artificial
  Synthetic oligonucleotide
tttacggcagcggagagtacacctgcgattccatatatcgaagcttcggccccac

SEQ ID NO: 513377 - DNA, 55 bp, Artificial
  Synthetic oligonucleotide
ttactactcctacaccggcgcatggaaacacgtcgcgtctcggacctcgggccag

SEQ ID NO: 513378 - DNA, 55 bp, Artificial
  Synthetic oligonucleotide
tcgtccggtgtcgggaaaacgactcccttggaggacggggaaacggcggagctta

SEQ ID NO: 513379 - DNA, 55 bp, Artificial
  Synthetic oligonucleotide
gtggcggcgagaagcaaactgtaaccgcgcctgactgcactcaccttggctacac

SEQ ID NO: 513380 - DNA, 55 bp, Artificial
  Synthetic oligonucleotide
ggatcgcgtaccatgcgatgttcgactcctcaacttatccggtccttccgcagct

SEQ ID NO: 513381 - DNA, 55 bp, Artificial
  Synthetic oligonucleotide
ggagcagcttacaaaattccatgcagtcctgtcaaggtacgcgcaggttgtcgtt

SEQ ID NO: 513382 - DNA, 55 bp, Artificial
  Synthetic oligonucleotide
gctaacacgctgcgaggcgtaggtagatcggtgatgacaggggctggcagatgtt

SEQ ID NO: 513383 - DNA, 55 bp, Artificial
  Synthetic oligonucleotide
gccagggcctcatacgtgtacgagataccgtgaaaacgtacgtaacctcatgggc

SEQ ID NO: 513384 - DNA, 55 bp, Artificial
  Synthetic oligonucleotide
cgacgatacatctccagtcgtatattacgctcccttggcggaacccctcaccaac

SEQ ID NO: 513385 - DNA, 55 bp, Artificial
  Synthetic oligonucleotide
cctgaagcgcgagctgggatatatgttcataactctcatgctatattctcgtcga

SEQ ID NO: 513386 - DNA, 55 bp, Artificial
  Synthetic oligonucleotide
ccaatcgtcagccgctcattgttcacgattcagaccaaccgaaaccgcgggagac

SEQ ID NO: 513387 - DNA, 55 bp, Artificial
  Synthetic oligonucleotide
cagcgttgaccgcttttcgcctcacgttatcgccagttcgtagcgtcgaaatctc

SEQ ID NO: 513388 - DNA, 55 bp, Artificial
  Synthetic oligonucleotide
cacattcgagaaactcccgtatgcattcccgacccaggatgtaccttcgtggaag

SEQ ID NO: 513389 - DNA, 55 bp, Artificial
  Synthetic oligonucleotide
atcacctcaacctgcggtccaccattctgccccaagcccgcgtcctcagtccatc

SEQ ID NO: 513390 - DNA, 54 bp, Artificial
  Synthetic oligonucleotide
tccactaggcgccggaccgagaagttcgcattgtagatgaatcataggtcgcat

SEQ ID NO: 513391 - DNA, 53 bp, Artificial
  Synthetic oligonucleotide
tgttcccaaactctgcttgtgagacaacaagcgggagcgacgggaccatgcct

SEQ ID NO: 513392 - DNA, 50 bp, Artificial
  Synthetic oligonucleotide
gctgaatgggcggttgctctctcagagttcggtgacatcaatttgttaaa

SEQ ID NO: 513393 - DNA, 55 bp, Artificial
  Synthetic oligonucleotide
gcggttctatcgtgcttgctttcctaactgtcttcgaatgatggctagtgcttac

SEQ ID NO: 513394 - DNA, 55 bp, Artificial
  Synthetic oligonucleotide
gcggcacgcttgtagaaccaaccttcagaatcttgtggtggcatttcattaccag

SEQ ID NO: 513395 - DNA, 55 bp, Artificial
  Synthetic oligonucleotide
gcggagtgaattggtcgactgtttgttaggagtctggtgtgcgcgagacgtccct

SEQ ID NO: 513396 - DNA, 55 bp, Artificial
  Synthetic oligonucleotide
gcgctaccaaacgtggtgtcttgtccgtcacttctgacaaattagtgaatccacc

SEQ ID NO: 513397 - DNA, 55 bp, Artificial
  Synthetic oligonucleotide
gcgatatattgcaagagcacccgtagaatcaaaagatgatgcgcaaacggaagac

SEQ ID NO: 513398 - DNA, 55 bp, Artificial
  Synthetic oligonucleotide
gcgaggggagaagcagtagagaggccaccatgctggattatgaggcaggcgggtc

SEQ ID NO: 513399 - DNA, 55 bp, Artificial
  Synthetic oligonucleotide
gcgagagccagagccctgttctacaggcactgcgcccgtctcgaaagacaatcca

SEQ ID NO: 513400 - DNA, 55 bp, Artificial
  Synthetic oligonucleotide
gcgaagtgctgttgtttggctgaatcacctggccatgactggataaattgcaggg

SEQ ID NO: 513401 - DNA, 55 bp, Artificial
  Synthetic oligonucleotide
gccttgtagaaaattctagatggggctctgaaatggaatggaccacgggtcttgt

SEQ ID NO: 513402 - DNA, 55 bp, Artificial
  Synthetic oligonucleotide
gccttccccatctcttcccaattaccgaaacactctcaagcaggccacttccccg

SEQ ID NO: 513403 - DNA, 55 bp, Artificial
  Synthetic oligonucleotide
gccgtggcagcaagatcgggaactgcgtagtaatcgatgaacaagtgaccattcc

SEQ ID NO: 513404 - DNA, 55 bp, Artificial
  Synthetic oligonucleotide
gccgtctgtaaagcatgcccaatcaacttatggaacttactttcctctctgcccg

SEQ ID NO: 513405 - DNA, 55 bp, Artificial
  Synthetic oligonucleotide
gccctaggcacgtaccagagatttctgctcacgacaggtcgatgacttgtagggc

SEQ ID NO: 513406 - DNA, 55 bp, Artificial
  Synthetic oligonucleotide
gccccggttgccttgatgaacctaaacgtataaatagttgagcaatcagtttagc

SEQ ID NO: 513407 - DNA, 55 bp, Artificial
  Synthetic oligonucleotide
gcccagttatctaggttcttccatagtatgaaatatctcgtcgttgcggcattgt

SEQ ID NO: 513408 - DNA, 55 bp, Artificial
  Synthetic oligonucleotide
gccatactcacctgcacttgtatactgatatgtcatacgcgcacagatgctacag

SEQ ID NO: 513409 - DNA, 55 bp, Artificial
  Synthetic oligonucleotide
gccacaaaccactctaccatttcgttatcagacaacgtagactactccaggaggg

SEQ ID NO: 513410 - DNA, 55 bp, Artificial
  Synthetic oligonucleotide
gccaagtttggtctagaatgtacagtcttcatgggtgctgaagatactcgtcgtc

SEQ ID NO: 513411 - DNA, 55 bp, Artificial
  Synthetic oligonucleotide
gcatgctctagttgggcacttgcttctcggatcctacgggagctatcgatgagat

SEQ ID NO: 513412 - DNA, 55 bp, Artificial
  Synthetic oligonucleotide
gcatgaccgtgctagcaggcgtatggcttaaaagaaatcctgtcgttacggctgc

SEQ ID NO: 513413 - DNA, 55 bp, Artificial; identical to SEQ ID NO: 272718
  Synthetic oligonucleotide

SEQ ID NO: 513414 - DNA, 55 bp, Artificial
  Synthetic oligonucleotide
gcatcgctagtctaccatccgattcagaaagtctgcaccgtttgcctcctgctca

SEQ ID NO: 513415 - DNA, 55 bp, Artificial
  Synthetic oligonucleotide
gcagtggttctgttttgtgcggccaaagctcttctaactctgatgtgacaaagca

SEQ ID NO: 513416 - DNA, 55 bp, Artificial
  Synthetic oligonucleotide
gcagtagcagcaatgtcattcctaatgcgtacaaacagtactgagactttcaaac

SEQ ID NO: 513417 - DNA, 55 bp, Artificial
  Synthetic oligonucleotide
gcaggtgctgttaccagttcaacaaatacagttcataccggtcaaagtatggagc

SEQ ID NO: 513418 - DNA, 55 bp, Artificial
  Synthetic oligonucleotide
tcttaccgcaccattttcggccgtattagaccatctcttatattgcttccaaacc

SEQ ID NO: 513419 - DNA, 55 bp, Artificial
  Synthetic oligonucleotide
gcagccgaagatgttccaaggttgtcaagcaatatacatgtgaagcgctagtaga

SEQ ID NO: 513420 - DNA, 55 bp, Artificial
  Synthetic oligonucleotide
ggagtggatgattttcttggggatgaaccgaacccattcgaggacccaaataacg

SEQ ID NO: 513421 - DNA, 55 bp, Artificial
  Synthetic oligonucleotide
ggaggaagccactttaggtgttatgtgtcggtatatagatgaacccacagtttgc

SEQ ID NO: 513422 - DNA, 55 bp, Artificial
  Synthetic oligonucleotide
ggagatccatcatctcataggtacctcaactgaccaccagtagcggttctagctt

SEQ ID NO: 513423 - DNA, 55 bp, Artificial
  Synthetic oligonucleotide
ggagactttaaccgagtagtcttcgcttacttctcgaagctcgcgaaacagctct

SEQ ID NO: 513424 - DNA, 55 bp, Artificial
  Synthetic oligonucleotide
ggagacgacaactaaatgacgattctaaaccaaaccgcattcgagtgtcatgagt

SEQ ID NO: 513425 - DNA, 55 bp, Artificial
  Synthetic oligonucleotide
ggagaatgtgagtagcttcaggacagcaattgagcgatacactcatgtaacagat

SEQ ID NO: 513426 - DNA, 55 bp, Artificial
  Synthetic oligonucleotide
ggagaatcgcctttgatagacatatcggtcctatttgctgctgttagccttactt

SEQ ID NO: 513427 - DNA, 55 bp, Artificial
  Synthetic oligonucleotide
ggacttccatgtgctcaccaatttcctgttcttgagtgttgccttcgtggtttct

SEQ ID NO: 513428 - DNA, 55 bp, Artificial
  Synthetic oligonucleotide
ggactaggactcaaatgtatttggctgactatcgcctgaaccttgatgctaagca

SEQ ID NO: 513429 - DNA, 55 bp, Artificial
  Synthetic oligonucleotide
ggacgcaatggtttagaaacagaggattggttattgtttggccaatgagctagca

SEQ ID NO: 513430 - DNA, 55 bp, Artificial
  Synthetic oligonucleotide
ggacaaggacacggtttgtttacagtgtagcccaggtctgaggcacccttgaaga

SEQ ID NO: 513431 - DNA, 55 bp, Artificial
  Synthetic oligonucleotide
ggaagcgacgtaggattcatctttgtctagcttcgtgcgacgtaggattctagtc

SEQ ID NO: 513432 - DNA, 55 bp, Artificial
  Synthetic oligonucleotide
gctttagatagagggacccgtttattgcgtgttaacaactgtaacactcgtgtgc

SEQ ID NO: 513433 - DNA, 55 bp, Artificial
  Synthetic oligonucleotide
gctgtagctgttcaatggactccacttttgattcgatcgattccagaagaacctc

SEQ ID NO: 513434 - DNA, 55 bp, Artificial
  Synthetic oligonucleotide
gctgtacaacccactgaactaatggggtctattagagaagtagccgaatctgtac

SEQ ID NO: 513435 - DNA, 55 bp, Artificial
  Synthetic oligonucleotide
tcggcttttactgccatgccggacactcatacggctgtcatagtgttgaggaagc

SEQ ID NO: 513436 - DNA, 55 bp, Artificial
  Synthetic oligonucleotide
gctctgctgtttagctgtgtcatgtcagatgagccgtgcaaatatcgttttgccg

SEQ ID NO: 513437 - DNA, 55 bp, Artificial
  Synthetic oligonucleotide
gctctgcggtacaccaggatatataaaccttttggatgccttgaactcatggccc

SEQ ID NO: 513438 - DNA, 55 bp, Artificial
  Synthetic oligonucleotide
gctctatcgaatcccttctcttgatacggttgaactcactgttcagttgagatag

SEQ ID NO: 513439 - DNA, 55 bp, Artificial
  Synthetic oligonucleotide
gctattaaaatgagacggaaagtagcatttccaggactcccaccgccgcttttgc

SEQ ID NO: 513440 - DNA, 55 bp, Artificial
  Synthetic oligonucleotide
gctagcgagagcttctcatagaggtagacgcctgagatgagctccacgtgttcgg

SEQ ID NO: 513441 - DNA, 55 bp, Artificial
  Synthetic oligonucleotide
gctactaatctactcaagtgatgccgcgacgctaaagagatttgcaacccatgga

SEQ ID NO: 513442 - DNA, 55 bp, Artificial
  Synthetic oligonucleotide
tcgtatgcggctgcatcgtgtgcagaagtgtctgtgggccctgcgccggaagcat

SEQ ID NO: 513443 - DNA, 55 bp, Artificial
  Synthetic oligonucleotide
gcgttattgaaccagaagtgagaagttcaaatgcttccacccttcttcctgacag

SEQ ID NO: 513444 - DNA, 55 bp, Artificial
  Synthetic oligonucleotide
gcgtcggtatatatgctagacgcgttggattgagatctctgtctggtatttgacc

SEQ ID NO: 513445 - DNA, 55 bp, Artificial
  Synthetic oligonucleotide
tctccatgtttaagacttgggctcctcccattgttgctaaatacaggcactcggg

SEQ ID NO: 513446 - DNA, 55 bp, Artificial
  Synthetic oligonucleotide
gcgtagacgtccctcttaacagatactctgtaggccgtgctaacgtaaacacagc

SEQ ID NO: 513447 - DNA, 55 bp, Artificial
  Synthetic oligonucleotide
gcggttctcttcaaaggagccataatattccgacaaatacctcgctgacgtctcg

SEQ ID NO: 513448 - DNA, 55 bp, Artificial
  Synthetic oligonucleotide
gacggtaaccaatctaaaggtatggcagctgctcaattcgccccagctggttccc

SEQ ID NO: 513449 - DNA, 55 bp, Artificial
  Synthetic oligonucleotide
gacggcctggattattttgatggttacggggctgaggatgaggactacggtgagt

SEQ ID NO: 513450 - DNA, 55 bp, Artificial
  Synthetic oligonucleotide
gacgctgtattaccgatttcttgtgtggatctttctcgagaaactcagggactgt

SEQ ID NO: 513451 - DNA, 55 bp, Artificial
  Synthetic oligonucleotide
gaccttcgaattatggctcacggacataaaatagacctagtgtccttaaagcttg

SEQ ID NO: 513452 - DNA, 55 bp, Artificial
  Synthetic oligonucleotide
tctttccacttatataacaggtagccaagacgctcagcagcgtatgactcatcgc

SEQ ID NO: 513453 - DNA, 55 bp, Artificial
  Synthetic oligonucleotide
gacattgtcggactttggagcggttctgtgaccagatctcttatgttgcttgcta

SEQ ID NO: 513454 - DNA, 55 bp, Artificial
  Synthetic oligonucleotide
gacatcagagcccacatatttcagtactactctttccggaatcaccataagactg

SEQ ID NO: 513455 - DNA, 55 bp, Artificial
  Synthetic oligonucleotide
gacagtttactacttgaataacctgttctcggaagagcatttgccgttaaagtgc

SEQ ID NO: 513456 - DNA, 55 bp, Artificial
  Synthetic oligonucleotide
gacagccgggtgactactgaaagtccttatcgaagggtcttcttgagcttacgtt

SEQ ID NO: 513457 - DNA, 55 bp, Artificial
  Synthetic oligonucleotide
gacagcatatcataatagttcagtggcggagtgagaaatcagtcgcagatagacc

SEQ ID NO: 513458 - DNA, 55 bp, Artificial
  Synthetic oligonucleotide
gacaatactccgtccatcagaaaaccaagcttaatgtaacataacaacccacccc

SEQ ID NO: 513459 - DNA, 55 bp, Artificial
  Synthetic oligonucleotide
gaattccgatgcggactcttcatcgttctgaacagcaccgagggattcttccaat

SEQ ID NO: 513460 - DNA, 55 bp, Artificial
  Synthetic oligonucleotide
gaattccaagctgctcagaacgagaagctttattgtgggaacgtcgcctggatct

SEQ ID NO: 513461 - DNA, 55 bp, Artificial
  Synthetic oligonucleotide
gaagggttaaagcgcggcttaaagacaaacggattcagtaaatctgggaactgcc

SEQ ID NO: 513462 - DNA, 55 bp, Artificial
  Synthetic oligonucleotide
gaagcacgttcgtcgtcttttaccgtgctgaatcactagctgtttgaacttgtgc

SEQ ID NO: 513463 - DNA, 55 bp, Artificial
  Synthetic oligonucleotide
gaaccgattcttaagtatagtgaggtaatggggagcaacactggcagtagtgaca

SEQ ID NO: 513464 - DNA, 55 bp, Artificial
  Synthetic oligonucleotide
gaaatgtgggtgtgcctccgcccaaagcttacctactacagggttcctattgatt

SEQ ID NO: 513465 - DNA, 55 bp, Artificial
  Synthetic oligonucleotide
gaaatgattacggtcctccaagaggtagctacggtggttcaagaggtggttatga

SEQ ID NO: 513466 - DNA, 55 bp, Artificial
  Synthetic oligonucleotide
gaaagttggtttgcaaagaacatcgagaacccatatctagataccaagggcctag

SEQ ID NO: 513467 - DNA, 55 bp, Artificial
  Synthetic oligonucleotide
gaaagccctaattaagcctgatatggttattatcttcgattcagccggcagtgga

SEQ ID NO: 513468 - DNA, 55 bp, Artificial
  Synthetic oligonucleotide
gaaacgactgcggctagagtgctaagatagaatgtcattgctttctcgataggcc

SEQ ID NO: 513469 - DNA, 55 bp, Artificial
  Synthetic oligonucleotide
cttgtttggtgggacccattcagatgatttccatggtaagacaccttcttcccac

SEQ ID NO: 513470 - DNA, 55 bp, Artificial
  Synthetic oligonucleotide
cttgtcccattcaccggtagtagcgactctgtgggtttcgtagtccttagcaccg

SEQ ID NO: 513471 - DNA, 55 bp, Artificial
  Synthetic oligonucleotide
cttgccttggagtaaacgattgtggtgcagtctctgagataggcccgaatgggcc

SEQ ID NO: 513472 - DNA, 55 bp, Artificial
  Synthetic oligonucleotide
tgcaaattgtaaacgcggaagcaactacttccctcttaacttgtttatagtcccg

SEQ ID NO: 513473 - DNA, 55 bp, Artificial
  Synthetic oligonucleotide
cttcgtctacatttgtatccgaggatgcaacatttgcgggcggtccgcttcttga

SEQ ID NO: 513474 - DNA, 55 bp, Artificial
  Synthetic oligonucleotide
cttcgtactactgtagttgggacttagaacctaagaggcatctcgtgggaagaat

SEQ ID NO: 513475 - DNA, 55 bp, Artificial
  Synthetic oligonucleotide
cttccacggaatctgaatgtgcgccaagaccaacaatattacctggatcaccatg

SEQ ID NO: 513476 - DNA, 55 bp, Artificial
  Synthetic oligonucleotide
gcagcacctgcgtcattcacgctgaagcggacagcaagcattttcgatcagctcc

SEQ ID NO: 513477 - DNA, 55 bp, Artificial
  Synthetic oligonucleotide
gcagcacccaagtcagtgaccaaggaccggttatgaccagtgattaatgcggcac

SEQ ID NO: 513478 - DNA, 55 bp, Artificial
  Synthetic oligonucleotide
gcactcgcgatgagtgatcagtcagtaatactaggcgggttgttgagaaatgcgc

SEQ ID NO: 513479 - DNA, 55 bp, Artificial
  Synthetic oligonucleotide
gcaccagaggaggtgtcatacgtaactgaagatgtagccaaaccagctgaagagg

SEQ ID NO: 513480 - DNA, 55 bp, Artificial
  Synthetic oligonucleotide
gcacacgtttccgtgccatgtgtctgatacatagcgctatatcttcttggtagcc

SEQ ID NO: 513481 - DNA, 55 bp, Artificial
  Synthetic oligonucleotide
gcaattgcttttcagtgcaggtggtgacgataccatatttctttgggactggatg

SEQ ID NO: 513482 - DNA, 55 bp, Artificial
  Synthetic oligonucleotide
gcaattccgaactatgaatcagcgtagtggcagaatttgaaggagtagcatgcga

SEQ ID NO: 513483 - DNA, 55 bp, Artificial
  Synthetic oligonucleotide
tcttatgttttccgcagcaagagacaaatgggctacgcggtagtgatcactttcc

SEQ ID NO: 513484 - DNA, 55 bp, Artificial
  Synthetic oligonucleotide
gcaacaggaagaataggcggtatctgctaaaatccatatggtctgcttatccgta

SEQ ID NO: 513485 - DNA, 55 bp, Artificial
  Synthetic oligonucleotide
gattggcctatcgtcgtggtctattgcgtcggcatcataatctgctgttcttctc

SEQ ID NO: 513486 - DNA, 55 bp, Artificial
  Synthetic oligonucleotide
gatgcctaccttttcaaatctcattggttagtcggttcagatgcttggtcatacg

SEQ ID NO: 513487 - DNA, 55 bp, Artificial
  Synthetic oligonucleotide
gatcattgtgtccacataattgttacctgttcgaatcccatgggtggcaagtagg

SEQ ID NO: 513488 - DNA, 55 bp, Artificial
  Synthetic oligonucleotide
gatcatagggcttaatacaagggtataaaacgagctttgcgcggcacgtgactat

SEQ ID NO: 513489 - DNA, 55 bp, Artificial
  Synthetic oligonucleotide
gagttggtgacctttgaacgggatccagaatgagtagtcgtgtcgtctaagaagt

SEQ ID NO: 513490 - DNA, 55 bp, Artificial
  Synthetic oligonucleotide
gagttaagttgctgatatcaattggtaacgagcctatgccaggtgttctgcttgc

SEQ ID NO: 513491 - DNA, 55 bp, Artificial
  Synthetic oligonucleotide
gagtggacatcgggtctcaaacgctatggctagacgttggataacagttcttcca

SEQ ID NO: 513492 - DNA, 55 bp, Artificial
  Synthetic oligonucleotide
gagtcagtcttacgcgctgtgacctgcgcttaacgatcaatatataatggccgca

SEQ ID NO: 513493 - DNA, 55 bp, Artificial
  Synthetic oligonucleotide
gagtagcagccgccgaaactgacgtagctgccacagaggatgtagccctagcatt

SEQ ID NO: 513494 - DNA, 55 bp, Artificial
  Synthetic oligonucleotide
gaggcacgcatctgtaaacctatgtgtgttggcaatgtgaaaagcttcgagtccc

SEQ ID NO: 513495 - DNA, 55 bp, Artificial
  Synthetic oligonucleotide
gaggaacgaaggctagagtagcaatacggattcgatacccgagtagttctagcag

SEQ ID NO: 513496 - DNA, 55 bp, Artificial
  Synthetic oligonucleotide
gagctacaggccatgggaaggaataatcgtataggacaagatagagaaacttttg

SEQ ID NO: 513497 - DNA, 55 bp, Artificial
  Synthetic oligonucleotide
gagcatgctgccgcatctcgaattgtcttaaaagaaaccacagctatgctttcaa

SEQ ID NO: 513498 - DNA, 55 bp, Artificial
  Synthetic oligonucleotide
gagcaggttttgaaaagcgaattcgaatcaccattctttcaaggttcagttctcg

SEQ ID NO: 513499 - DNA, 55 bp, Artificial
  Synthetic oligonucleotide
gagatccagaggttacctatctttgatttagctactgcagccagtagtggagcgg

SEQ ID NO: 513500 - DNA, 55 bp, Artificial
  Synthetic oligonucleotide
gagacgatgatgaaggatcccagaacaacggtgaaataaatctagacaacggaag

SEQ ID NO: 513501 - DNA, 55 bp, Artificial
  Synthetic oligonucleotide
gacttcttcccgttctcttggagtgtacagttaaatcaaaagccgccctgtcagc

SEQ ID NO: 513502 - DNA, 55 bp, Artificial
  Synthetic oligonucleotide
gactagccctcgcactacacacaagttgaattatcgcccctcaggtaagttccca

SEQ ID NO: 513503 - DNA, 55 bp, Artificial
  Synthetic oligonucleotide
gacgtcaaagggccctccaacaagtggattaactactgctccaacgtctattgaa

SEQ ID NO: 513504 - DNA, 55 bp, Artificial
  Synthetic oligonucleotide
gtgactcgaatgtatacccaggaaaggctaagtcgcatgaacccagctggataga

SEQ ID NO: 513505 - DNA, 55 bp, Artificial
  Synthetic oligonucleotide
gtgaattgcgtagctgaaagaagaccgttacttgagcggaaggtatatgtcgtag

SEQ ID NO: 513506 - DNA, 55 bp, Artificial
  Synthetic oligonucleotide
gtgaaacaatacggcttaggtcgtcatttcgaccctcaaataatctcctccatgg

SEQ ID NO: 513507 - DNA, 55 bp, Artificial
  Synthetic oligonucleotide
gtctttagtacgagctggttttccagatgtggtcagatatgtagtcttggcaggt

SEQ ID NO: 513508 - DNA, 55 bp, Artificial
  Synthetic oligonucleotide
gtcttaccctctgttcttgttgtgttacccgccccaattcagaacattccttctc

SEQ ID NO: 513509 - DNA, 55 bp, Artificial
  Synthetic oligonucleotide
gtctggggaacaatctgctcagttctgtataatattgccctatctaaggaggcta

SEQ ID NO: 513510 - DNA, 55 bp, Artificial
  Synthetic oligonucleotide
gtcggatagattgctggagtgggtactcttgtagttaacgtagtggtagcatccg

SEQ ID NO: 513511 - DNA, 55 bp, Artificial
  Synthetic oligonucleotide
gtcctttatcatggagggctcggatgtacgtagatcgtagaggtacgaataaccg

SEQ ID NO: 513512 - DNA, 55 bp, Artificial
  Synthetic oligonucleotide
gtcccttaagctcatggtaaatattactcatgcatcatccggccaaaacgcaagc

SEQ ID NO: 513513 - DNA, 55 bp, Artificial
  Synthetic oligonucleotide
gtccctctgcaaaacttcccgacaagatcaatgatccttcaaaggtgcagctttc

SEQ ID NO: 513514 - DNA, 55 bp, Artificial
  Synthetic oligonucleotide
gtcattcatggctgttgtaccttttacctgtgcatcgaaagacatattgaccctt

SEQ ID NO: 513515 - DNA, 55 bp, Artificial
  Synthetic oligonucleotide
tcattgtttctttgacgtaagaacgcaaactctggcattatggaatgcataccgg

SEQ ID NO: 513516 - DNA, 55 bp, Artificial
  Synthetic oligonucleotide
gtcacccatcaaggccttttgagcttctggtattgaacataattggctcaacact

SEQ ID NO: 513517 - DNA, 55 bp, Artificial
  Synthetic oligonucleotide
gtcaaggcttctaactggagattagtcgaagttggccgtgtcgttttgatcaaaa

SEQ ID NO: 513518 - DNA, 55 bp, Artificial
  Synthetic oligonucleotide
gtcaacctgtgaagaactagggaccaaattctattattattccattgccaccggt

SEQ ID NO: 513519 - DNA, 55 bp, Artificial
  Synthetic oligonucleotide
tcccatcgttcaataggttttctagatcctcaaataaggttggccactctacggg

SEQ ID NO: 513520 - DNA, 55 bp, Artificial
  Synthetic oligonucleotide
gtaggacattggggattggcttcccgtttaatttaccgtaaaccaagtgcatacc

SEQ ID NO: 513521 - DNA, 55 bp, Artificial
  Synthetic oligonucleotide
gtaggaacagacaactcaggtagcgcatcttcgttcaacttgtgatcttgacgtt

SEQ ID NO: 513522 - DNA, 55 bp, Artificial
  Synthetic oligonucleotide
gtacaacacgaggactgccatagaaacagccgcggtatggtgcatgggtgcggta

SEQ ID NO: 513523 - DNA, 55 bp, Artificial
  Synthetic oligonucleotide
tccggattggtttcaccatcgtatacgtttgcgaattctttatcgtctgtatttt

SEQ ID NO: 513524 - DNA, 55 bp, Artificial
  Synthetic oligonucleotide
gtacaaacacatcttcccaatatccgtcaccacgtacttcagcataattattcgt

SEQ ID NO: 513525 - DNA, 55 bp, Artificial
  Synthetic oligonucleotide
gtaagcgggctctctcttccctcttgtggctttctctttcgaacaaatcatgcgg

SEQ ID NO: 513526 - DNA, 55 bp, Artificial
  Synthetic oligonucleotide
ggtttggacaatcgtagatgacacctttaccgaaaactggggtagtcaaatgagc

SEQ ID NO: 513527 - DNA, 55 bp, Artificial
  Synthetic oligonucleotide
ggtttaaccgcagaaatggtcgcaagattagagagtaaccatgcagtatacctag

SEQ ID NO: 513528 - DNA, 55 bp, Artificial
  Synthetic oligonucleotide
ggttggaattaacatagcgccctttggtgcggtatagttaggggaaactgggaaa

SEQ ID NO: 513529 - DNA, 55 bp, Artificial
  Synthetic oligonucleotide
ggttgacctcggaagactaccccaaattacttcgactgtgtgattatgggatctc

SEQ ID NO: 513530 - DNA, 55 bp, Artificial
  Synthetic oligonucleotide
ggttgaaagtggctgaatttacgacgtaatctgtcttgacacaagttcctgtatg

SEQ ID NO: 513531 - DNA, 55 bp, Artificial
  Synthetic oligonucleotide
ggttctgtcgttactttacgccacaccggttctgaaggtggttacttgcattcgc

SEQ ID NO: 513532 - DNA, 55 bp, Artificial
  Synthetic oligonucleotide
tcacaggaaccacctgcctaaactctggttcactctttgagcaatcctttggcac

SEQ ID NO: 513533 - DNA, 55 bp, Artificial
  Synthetic oligonucleotide
tcaagacgaacccaccaatctgggctggggagtaggtttgacctctggcttcccc

SEQ ID NO: 513534 - DNA, 55 bp, Artificial
  Synthetic oligonucleotide
tatatgcctaaaaggcgaattgtaatttcttccccggggctcacaacctaggttg

SEQ ID NO: 513535 - DNA, 55 bp, Artificial
  Synthetic oligonucleotide
tcaccgctagcacattttataatgtcagctacttctgggaactcggcaaacaggg

SEQ ID NO: 513536 - DNA, 55 bp, Artificial
  Synthetic oligonucleotide
tactatatcttacgtgtgaatgatgcgtcagtttcgaaacagttgctcggtcagt

SEQ ID NO: 513537 - DNA, 55 bp, Artificial
  Synthetic oligonucleotide
tcatataacgaatccaatggctattataaaccaatcagcagccaaggagttcctc

SEQ ID NO: 513538 - DNA, 55 bp, Artificial
  Synthetic oligonucleotide
taccagcacccttggaagatggttggtcttgaccatttggccataatctggtgac

SEQ ID NO: 513539 - DNA, 55 bp, Artificial
  Synthetic oligonucleotide
gttttgtatgatacgttcatcagtttccacgagtgtttccagtatgacaagccct

SEQ ID NO: 513540 - DNA, 55 bp, Artificial
  Synthetic oligonucleotide
gtttgcttcttgaggaggaccaagcaccaactcaagactcccgacaagtcaaacc

SEQ ID NO: 513541 - DNA, 55 bp, Artificial
  Synthetic oligonucleotide
gtttcgtgttgaggtattccttcctgatgttctgcaacgtatcatccgtgtccgg

SEQ ID NO: 513542 - DNA, 55 bp, Artificial
  Synthetic oligonucleotide
gtttcagccgtcgctttcgtttatgagtacattgttaacgtcaatgaatatggcc

SEQ ID NO: 513543 - DNA, 55 bp, Artificial
  Synthetic oligonucleotide
gtttaacatcaatgaccgttagctctgatacctttacgccagaatttctttggga

SEQ ID NO: 513544 - DNA, 55 bp, Artificial
  Synthetic oligonucleotide
gttgttggagaccccatattcgttttcgatccgtaacaaacgttcaatagctcgg

SEQ ID NO: 513545 - DNA, 55 bp, Artificial
  Synthetic oligonucleotide
gttggtgacttgtccagaccaaaggctatgtccgtcaaggagtctgtctacgctc

SEQ ID NO: 513546 - DNA, 55 bp, Artificial
  Synthetic oligonucleotide
gttgcggtttatttagcgcgaaattaatgcgaaagtcttgtccgaatagtgttcg

SEQ ID NO: 513547 - DNA, 55 bp, Artificial
  Synthetic oligonucleotide
gttgcgaatctcactgcacaaccatgttaaacggtttctgaaaatatcctcgggc

SEQ ID NO: 513548 - DNA, 55 bp, Artificial
  Synthetic oligonucleotide
gttgcagctgaaatactagtatcaaatatagccccaccaaacagactgaggcgca

SEQ ID NO: 513549 - DNA, 55 bp, Artificial
  Synthetic oligonucleotide
gtgtttccgtagtgatcaaacatacgtatcagtcttggataatctcgcaggtgtg

SEQ ID NO: 513550 - DNA, 55 bp, Artificial
  Synthetic oligonucleotide
gtgtggcagggattggaaaatgtccacacgatttcaccaaagatcacgttaagta

SEQ ID NO: 513551 - DNA, 55 bp, Artificial
  Synthetic oligonucleotide
gtgtgaagtaccaggaatatgcccaaaaggttagagaccaaatggtcgaagccgg

SEQ ID NO: 513552 - DNA, 55 bp, Artificial
  Synthetic oligonucleotide
gtgtcgccgttagcctattccgcgatgcacaccaacaaccagggtcagcgcatgc

SEQ ID NO: 513553 - DNA, 55 bp, Artificial
  Synthetic oligonucleotide
gtgtaaatgttaccgctagcgtcggttgtttctgaacaggaaaccacgactgtac

SEQ ID NO: 513554 - DNA, 55 bp, Artificial
  Synthetic oligonucleotide
gtggtaactctcatggtgttagagtgaccttcaccagccttgaaaccttgaacgg

SEQ ID NO: 513555 - DNA, 55 bp, Artificial
  Synthetic oligonucleotide
gtgggcttcaatttgagcgcgactttgaacgtggttcggttgtttaaggacccga

SEQ ID NO: 513556 - DNA, 55 bp, Artificial
  Synthetic oligonucleotide
gtgggaataatagactgttccgtttgcctttccatcttcctaactcggttactgc

SEQ ID NO: 513557 - DNA, 55 bp, Artificial
  Synthetic oligonucleotide
gtgggaacaactttccgtggaacaatctgttgagatagtaattgtgcgtactggg

SEQ ID NO: 513558 - DNA, 55 bp, Artificial
  Synthetic oligonucleotide
gtggacaaacgatagtgaagagggactccgacttgtaacctcgagacgcctaagg

SEQ ID NO: 513559 - DNA, 55 bp, Artificial
  Synthetic oligonucleotide
gtgatatcgcgtatgagcaaatggcacttaacatgactagcactgttaaacgagg

SEQ ID NO: 513560 - DNA, 55 bp, Artificial
  Synthetic oligonucleotide
ggggcccaaaagagcaatgatcccaaatggaattccctcgtacatcatatgattg

SEQ ID NO: 513561 - DNA, 55 bp, Artificial
  Synthetic oligonucleotide
ggggatttctgttagcaccaggatagcacaatacatcggagcacgcaatccagat

SEQ ID NO: 513562 - DNA, 55 bp, Artificial
  Synthetic oligonucleotide
gggctagcagcatattcttctctgattggagccaataatccattgatagcatcgg

SEQ ID NO: 513563 - DNA, 55 bp, Artificial
  Synthetic oligonucleotide
gggcgtatcagtacgacccatatcctgatgctgacggtcaagttataccttttcc

SEQ ID NO: 513564 - DNA, 55 bp, Artificial
  Synthetic oligonucleotide
gggcaagatgaaaggcattcttcacccgatccttatggtatcaatgataagtttt

SEQ ID NO: 513565 - DNA, 55 bp, Artificial
  Synthetic oligonucleotide
gggatgctcttcggctatgaatagcatgaaacggttcaaccatctgccgactaca

SEQ ID NO: 513566 - DNA, 55 bp, Artificial
  Synthetic oligonucleotide
gggatcaatacttaattaccactgcctgaggcccctatcagggaacaagtgtgga

SEQ ID NO: 513567 - DNA, 55 bp, Artificial
  Synthetic oligonucleotide
gggaccggcgaaatttgcccggttttgtccgtaaccggcttcatgagtcggcttc

SEQ ID NO: 513568 - DNA, 55 bp, Artificial
  Synthetic oligonucleotide
gggaaggcaaatcacatacaaatggcacactacattcttggtccatggcggttgg

SEQ ID NO: 513569 - DNA, 55 bp, Artificial
  Synthetic oligonucleotide
ggctgatggagacggaagtgtcatgtttatcaatttcaatggacggtacaatact

SEQ ID NO: 513570 - DNA, 55 bp, Artificial
  Synthetic oligonucleotide
ggctgatcatccgatgccattatcaaccattggtggatggtcaagacagcggcgc

SEQ ID NO: 513571 - DNA, 55 bp, Artificial
  Synthetic oligonucleotide
ggctatttctaaagggttggttagcgatcccgctggttcggatgctttgaacgtt

SEQ ID NO: 513572 - DNA, 55 bp, Artificial
  Synthetic oligonucleotide
ggcgtcactgggcgacattcttggtagactctgacgtctacgtaaaacttcatgc

SEQ ID NO: 513573 - DNA, 55 bp, Artificial
  Synthetic oligonucleotide
ggcgctggaaagttgctgggatcgattcggcaaagtacgtagtcgacagatacgg

SEQ ID NO: 513574 - DNA, 55 bp, Artificial
  Synthetic oligonucleotide
ggccttatagagtgtggtcgtggcggaggttgtttatctttcgagtactgaatgt

SEQ ID NO: 513575 - DNA, 55 bp, Artificial
  Synthetic oligonucleotide
ggccggcattgacatttgtaaaacgttgctcgcattattacgggataccttggaa

SEQ ID NO: 513576 - DNA, 55 bp, Artificial
  Synthetic oligonucleotide
ggccctctaacgactgtgaagtctttctaacatggtcctctgtaggaagcgtctt

SEQ ID NO: 513577 - DNA, 55 bp, Artificial
  Synthetic oligonucleotide
ggcccggcctggatccaatcggataacattgggtatgatgagatagactttatac

SEQ ID NO: 513578 - DNA, 55 bp, Artificial
  Synthetic oligonucleotide
ggcccaaaactacgcggagctttcctcatttggtgaagctgcgactctgagtaga

SEQ ID NO: 513579 - DNA, 55 bp, Artificial
  Synthetic oligonucleotide
ggccagagaagttttgagactaagaggtgctttggtcgacagaactcaaccatgg

SEQ ID NO: 513580 - DNA, 55 bp, Artificial
  Synthetic oligonucleotide
ggccacgactcatatcattaccaagatgattgaaatgtggcgacaaaggataggc

SEQ ID NO: 513581 - DNA, 55 bp, Artificial
  Synthetic oligonucleotide
ggccaacagttggggtctcgacgtggtaaatggtttctggagtagtcttaccgtc

SEQ ID NO: 513582 - DNA, 55 bp, Artificial
  Synthetic oligonucleotide
ggccaaatgtacaaacacatcttcccaatatccgtcaccacgtacttcagcataa

SEQ ID NO: 513583 - DNA, 55 bp, Artificial
  Synthetic oligonucleotide
ggcatcttgtccttgcaataaatatcctgctggactctcctcagcaatactatcg

SEQ ID NO: 513584 - DNA, 55 bp, Artificial
  Synthetic oligonucleotide
ggcacaattgagaaatacacctttggaaccaggtttggatttgggtgctatttct

SEQ ID NO: 513585 - DNA, 55 bp, Artificial
  Synthetic oligonucleotide
ggcaatggctgtactctagtgccgctgtcgtttgtcgccaaatcgggtgatgacg

SEQ ID NO: 513586 - DNA, 55 bp, Artificial
  Synthetic oligonucleotide
ggatgcaaaggttgccatcgttggataaagctggacgatcattttcattgcatcg

SEQ ID NO: 513587 - DNA, 55 bp, Artificial
  Synthetic oligonucleotide
ggatacaattgtcgagtttcatgcggacggtgattatgaccttggtagaatggac

SEQ ID NO: 513588 - DNA, 55 bp, Artificial
  Synthetic oligonucleotide
ggttcggacttattctggtgctctcggttgtacgaatccgtatagtcgttaagca

SEQ ID NO: 513589 - DNA, 55 bp, Artificial
  Synthetic oligonucleotide
ggttccgctgtgacactaatcgatatgctctggacgtctttatcacttgaacgtg

SEQ ID NO: 513590 - DNA, 55 bp, Artificial
  Synthetic oligonucleotide
ggttcacatatcccgttcaataaatcagacaatcccgtaatgagcacactagcat

SEQ ID NO: 513591 - DNA, 55 bp, Artificial
  Synthetic oligonucleotide
ggttacccgcggtcattctaccgatgatacgtgtaccagcaatagtggtatgaac

SEQ ID NO: 513592 - DNA, 55 bp, Artificial
  Synthetic oligonucleotide
ggttacaatcggctttatgcgagagtcaagaagaactgcgatggtctcttcgtcg

SEQ ID NO: 513593 - DNA, 55 bp, Artificial
  Synthetic oligonucleotide
ggtgttcatagtttactgctagaactactcgggtatcgaatccggattgctactc

SEQ ID NO: 513594 - DNA, 55 bp, Artificial
  Synthetic oligonucleotide
ggtgtcttggatagtcttccattcttgaaaggtcacagtcagatcgtgtgagaag

SEQ ID NO: 513595 - DNA, 55 bp, Artificial
  Synthetic oligonucleotide
ggtgtattcggactgtcaaattattatgcaacactttcgggtaaccacccgtccg

SEQ ID NO: 513596 - DNA, 55 bp, Artificial
  Synthetic oligonucleotide
ggtgctgagaggacttactatgtcggcaacaagttcaaatctgaagctctgagga

SEQ ID NO: 513597 - DNA, 55 bp, Artificial
  Synthetic oligonucleotide
ggtgcccttgcatcaacaagcaggtaaatacttccatactttacacactcaggac

SEQ ID NO: 513598 - DNA, 55 bp, Artificial
  Synthetic oligonucleotide
tccgtcagcggctcgtgagataaacgcccatagtataagagtatgtaacagcttt

SEQ ID NO: 513599 - DNA, 55 bp, Artificial
  Synthetic oligonucleotide
ggtctaccggctctgtcgatgtaagagaaaaccttaggagcgtaaccttgctcgg

SEQ ID NO: 513600 - DNA, 55 bp, Artificial
  Synthetic oligonucleotide
ggtcccgtgttccttcaagtggtaaaatagttcaccgccagggatatattgtagc

SEQ ID NO: 513601 - DNA, 55 bp, Artificial
  Synthetic oligonucleotide
ggtccatacacatcgtatccccagccatgcttggaataatctctccacgattcca

SEQ ID NO: 513602 - DNA, 55 bp, Artificial
  Synthetic oligonucleotide
ggtcagcatccggacgcgtgttcttgacggatctaaaccaattttgtcgaaggga

SEQ ID NO: 513603 - DNA, 55 bp, Artificial
  Synthetic oligonucleotide
ggtcaattggcgtcttcatccggttatgtcatagagccgttactggaatatcctg

SEQ ID NO: 513604 - DNA, 55 bp, Artificial
  Synthetic oligonucleotide
ggtatgccgctctcggtttcagtttcttggtttcattatggtccgagtcttcctc

SEQ ID NO: 513605 - DNA, 55 bp, Artificial
  Synthetic oligonucleotide
ggtaggaaatgaagattggcgttgcttaacggaaaggagtttcgcgaagtgagaa

SEQ ID NO: 513606 - DNA, 55 bp, Artificial
  Synthetic oligonucleotide
ggtacccatggcacccaacccaagaatatgaatagtacttctgtgtggtgcagtc

SEQ ID NO: 513607 - DNA, 55 bp, Artificial
  Synthetic oligonucleotide
ggtaagtatcgaagagaccaacgacatacaaacctaaatctcgctgaagccaaat

SEQ ID NO: 513608 - DNA, 55 bp, Artificial
  Synthetic oligonucleotide
gggtttgttcccacgttataaggatgctaggtatattcatcgacgttttgggctg

SEQ ID NO: 513609 - DNA, 55 bp, Artificial
  Synthetic oligonucleotide
gggttctaaatgttctgtatgagggttttgggttgcctcgcatagacgttgacga

SEQ ID NO: 513610 - DNA, 55 bp, Artificial
  Synthetic oligonucleotide
gggttatcgtcggtagcgtctccacgacatatacggcaagtagcgccatatggca

SEQ ID NO: 513611 - DNA, 55 bp, Artificial
  Synthetic oligonucleotide
gggtcggatcgtcgacagtcatactaattggtctcatattagaagctcgggtgta

SEQ ID NO: 513612 - DNA, 55 bp, Artificial
  Synthetic oligonucleotide
gggtatagcttaggattcaaactacctagttgatcttcccgagtgcgaacgctaa

SEQ ID NO: 513613 - DNA, 55 bp, Artificial
  Synthetic oligonucleotide
ggggtgagaccaatagtctacccttcaggcttgactccagagttgccatagagat

SEQ ID NO: 513614 - DNA, 55 bp, Artificial
  Synthetic oligonucleotide
ggggtcttgccgtgattagatcgatgttattgttgcgataagatgtgatttgtga

SEQ ID NO: 513615 - DNA, 55 bp, Artificial
  Synthetic oligonucleotide
ggggtcacttaaagggtgctcttaatttgggatgtacggaggaagacattgagaa

SEQ ID NO: 513616 - DNA, 55 bp, Artificial
  Synthetic oligonucleotide
caggttactaatgttcaatacttcagctccccttaacgaacaatcaacggcgtat

SEQ ID NO: 513617 - DNA, 55 bp, Artificial
  Synthetic oligonucleotide
caggcatttaccgcggctattaccgaacagtcgagagttgatcaactgaacgtgg

SEQ ID NO: 513618 - DNA, 55 bp, Artificial
  Synthetic oligonucleotide
cagcttgtgcggtattcgtctgtgtttgttgtaacggtaggtttgctgcctggaa

SEQ ID NO: 513619 - DNA, 55 bp, Artificial
  Synthetic oligonucleotide
cagccttaacaacgtcactttgtcccaacatacctgtcagttctaggaccgcatc

SEQ ID NO: 513620 - DNA, 55 bp, Artificial
  Synthetic oligonucleotide
cagcatctgcttactttccggcctttgaagcttatctggtttcactacggtatcc

SEQ ID NO: 513621 - DNA, 55 bp, Artificial
  Synthetic oligonucleotide
cagcaaaagtatggtcagaacgatcgacttcggggaactcacggctcactcgcac

SEQ ID NO: 513622 - DNA, 55 bp, Artificial
  Synthetic oligonucleotide
cagatgactccgtgaacaatctacctcctggacttctagtatcccttttggagtc

SEQ ID NO: 513623 - DNA, 55 bp, Artificial
  Synthetic oligonucleotide
cagagaagtgtgagataagcgacgttcgtttgtggatcgatttgaagaggtagtg

SEQ ID NO: 513624 - DNA, 55 bp, Artificial
  Synthetic oligonucleotide
cacgcgagacttcatgtacggggcctacactgtgtgtaacatgaggtgaccagct

SEQ ID NO: 513625 - DNA, 55 bp, Artificial
  Synthetic oligonucleotide
cacctctatagctttcccctttattcggccttctcctaaaaggtggtacataacc

SEQ ID NO: 513626 - DNA, 55 bp, Artificial
  Synthetic oligonucleotide
cacagttctcccacttaacggcggttcatccactgagctccccgtgtagactgtc

SEQ ID NO: 513627 - DNA, 55 bp, Artificial
  Synthetic oligonucleotide
cacagcgtcttggagttgtcgttcagaaccttgatcagtttccccgagttttccc

SEQ ID NO: 513628 - DNA, 55 bp, Artificial
  Synthetic oligonucleotide
cacagaaacgtcaggctaagaccaattacctggtgtatgaagcaacagtcgacgt

SEQ ID NO: 513629 - DNA, 55 bp, Artificial
  Synthetic oligonucleotide
cacaccatcggtccgttccctaactttgtcaagttacaacccagtaccagctttt

SEQ ID NO: 513630 - DNA, 55 bp, Artificial
  Synthetic oligonucleotide
cacacaacaccaatttacaatgctttcctactatccagggttgtcagcagaaagg

SEQ ID NO: 513631 - DNA, 55 bp, Artificial
  Synthetic oligonucleotide
caatgctgaatcgataaattagccctgacaatggcagtattccatagctgcgccc

SEQ ID NO: 513632 - DNA, 55 bp, Artificial
  Synthetic oligonucleotide
caatcccaaacagagacgtgaggtcaaaccagaacctcaattaaaggagatcgca

SEQ ID NO: 513633 - DNA, 55 bp, Artificial
  Synthetic oligonucleotide
caagtagacgttgtcggactttggagcggttctgtgaccagatctcttatgttgc

SEQ ID NO: 513634 - DNA, 55 bp, Artificial
  Synthetic oligonucleotide
caagagtagagacgaacgagagtgacgtgcttggggttgagacgccgtatggatg

SEQ ID NO: 513635 - DNA, 55 bp, Artificial
  Synthetic oligonucleotide
caacctccgccacgaccacactctataaggccaaatgtacaaacacatcttccca

SEQ ID NO: 513636 - DNA, 55 bp, Artificial
  Synthetic oligonucleotide
caaccctctgctattacactccaacagcaatcctttagaatggtagaccatgttg

SEQ ID NO: 513637 - DNA, 55 bp, Artificial
  Synthetic oligonucleotide
caaccagtggtggtcattggctctggtttggcaggcttaaccacaagtaatcgtc

SEQ ID NO: 513638 - DNA, 55 bp, Artificial
  Synthetic oligonucleotide
caaatcacagatgcacggtaactatagttcgcttttaccagctgaattccaatcg

SEQ ID NO: 513639 - DNA, 55 bp, Artificial
  Synthetic oligonucleotide
tgtgcctttcccaatcaccgaaaagtgttgaacgattcactgcgacaataatcag

SEQ ID NO: 513640 - DNA, 55 bp, Artificial
  Synthetic oligonucleotide
atttaatcgagatgtggtttccaggggaccacgcagatgtaggtggtggttgggc

SEQ ID NO: 513641 - DNA, 55 bp, Artificial
  Synthetic oligonucleotide
tgttagattgactgctgactacgatgctttggacattgctaacagaatcggttac

SEQ ID NO: 513642 - DNA, 55 bp, Artificial
  Synthetic oligonucleotide
attctgaacccaaggaggaaccacatagcataagactgccattgcagtacacgtg

SEQ ID NO: 513643 - DNA, 55 bp, Artificial
  Synthetic oligonucleotide
ccagataagggtcctgattcggcatcgttgagtaatcgactgatcaaatagtata

SEQ ID NO: 513644 - DNA, 55 bp, Artificial
  Synthetic oligonucleotide
ccactgcttatacactcacctaggttcgcatgagtattcttagctagtgcgagtt

SEQ ID NO: 513645 - DNA, 55 bp, Artificial
  Synthetic oligonucleotide
ccactattgctggtacgcgtatcatcggtagaatgaccgcgggtaaccgtagagg

SEQ ID NO: 513646 - DNA, 55 bp, Artificial
  Synthetic oligonucleotide
ccacgggcaaattttcttcaacgagcatcgaaaattctttgccaacaagcgagct

SEQ ID NO: 513647 - DNA, 55 bp, Artificial
  Synthetic oligonucleotide
ccacgatttggctacaatcgctccaacaaccgcacatgcccttgcaggtcgtttc

SEQ ID NO: 513648 - DNA, 55 bp, Artificial
  Synthetic oligonucleotide
ccacgacccaacacaagagacgggtggtatgtacaacggtgctggcttgctgcaa

SEQ ID NO: 513649 - DNA, 55 bp, Artificial
  Synthetic oligonucleotide
ccacctgggctccaattccatttgttatcaactctgaaactttcccattgagagt

SEQ ID NO: 513650 - DNA, 55 bp, Artificial
  Synthetic oligonucleotide
ccaatgagctcgatataagatgctggatccctctggtgaaggaacttggccatct

SEQ ID NO: 513651 - DNA, 55 bp, Artificial
  Synthetic oligonucleotide
ccaagtaacacagaacagttaacatgtcagggagagcaagtataacaggccaatg

SEQ ID NO: 513652 - DNA, 55 bp, Artificial
  Synthetic oligonucleotide
ccaacaggaaccagttatacccatggagatcagccctgttatcatacctgtggtg

SEQ ID NO: 513653 - DNA, 55 bp, Artificial
  Synthetic oligonucleotide
ccaaagtatatctcgtcttaaggggacggcaaatatggacgttggcaccggtatg

SEQ ID NO: 513654 - DNA, 55 bp, Artificial
  Synthetic oligonucleotide
ccaaagcatgaataaacaagtctttaggtaatgccacctagggcgtcactaacgc

SEQ ID NO: 513655 - DNA, 55 bp, Artificial
  Synthetic oligonucleotide
ccaaagatgggtaagggtaagccaagaggtttgaactccgctagaaagttgcgtg

SEQ ID NO: 513656 - DNA, 55 bp, Artificial
  Synthetic oligonucleotide
catttgatgggtgctagtccagtagggaaggaaacatacatgaaatcagtccgta

SEQ ID NO: 513657 - DNA, 55 bp, Artificial
  Synthetic oligonucleotide
catttacattagtcacatcatcaatactagtgtgcgaatgaacgtgaacgtggcc

SEQ ID NO: 513658 - DNA, 55 bp, Artificial
  Synthetic oligonucleotide
cattgacttgtatgggtttaaattcttgtttgccaccctgatcttggaacgtatg

SEQ ID NO: 513659 - DNA, 55 bp, Artificial
  Synthetic oligonucleotide
catgttatggtcagtgtgaagtttcaagaaatgcggaccagtgatgatttagggg

SEQ ID NO: 513660 - DNA, 55 bp, Artificial
  Synthetic oligonucleotide
catggaagcctttctgtcaatggcaacagacatgacatcagacttgtgaccgacg

SEQ ID NO: 513661 - DNA, 55 bp, Artificial
  Synthetic oligonucleotide
catgatctggtcgaattagctagtcaggaggttagggttcgtgctgggttaccgc

SEQ ID NO: 513662 - DNA, 55 bp, Artificial
  Synthetic oligonucleotide
catcttgagtattcgctgagtcgtttgtattgcgacggatttattgagattcatg

SEQ ID NO: 513663 - DNA, 55 bp, Artificial
  Synthetic oligonucleotide
catcggtcataggaggcataaatttggtgcttttcccgttatcatgttcgaaaac

SEQ ID NO: 513664 - DNA, 55 bp, Artificial
  Synthetic oligonucleotide
catcccgaccttctagtattagaagtggatcctcatcagctagagtacgtaggaa

SEQ ID NO: 513665 - DNA, 55 bp, Artificial
  Synthetic oligonucleotide
catagccttggcacggagagtcagtcttgaacttagaacgacactttcgcctcga

SEQ ID NO: 513666 - DNA, 55 bp, Artificial
  Synthetic oligonucleotide
cagttgatccaacagccactggttcatactccggcactaactctctagacgctac

SEQ ID NO: 513667 - DNA, 55 bp, Artificial
  Synthetic oligonucleotide
cagtgttaatgaacgtggtatcgggaggtattgcagaagcctctgcccaacaggc

SEQ ID NO: 513668 - DNA, 55 bp, Artificial
  Synthetic oligonucleotide
cagtgccacaagcgtctggaatggtaacagtaataatttaagcggcgcaaacccc

SEQ ID NO: 513669 - DNA, 55 bp, Artificial
  Synthetic oligonucleotide
cagtattcgtcttagcattgctgttttcgggccaatctgcaggaatcgtgtgcac

SEQ ID NO: 513670 - DNA, 55 bp, Artificial
  Synthetic oligonucleotide
caggttcgacatccacaaccttgaattcgacttgtctcataccgcctctgacaac

SEQ ID NO: 513671 - DNA, 55 bp, Artificial
  Synthetic oligonucleotide
acctctgtgggcttttcactttccgtcaagcgacatacaacattgatcgacatcc

SEQ ID NO: 513672 - DNA, 55 bp, Artificial
  Synthetic oligonucleotide
acctctcaatgatttctcatcgtggcacagtttatatgcttccttagcacaatcc

SEQ ID NO: 513673 - DNA, 55 bp, Artificial
  Synthetic oligonucleotide
ttacggatagaagcaaagaggccactccagataaacaacctaaacgtgtctacag

SEQ ID NO: 513674 - DNA, 55 bp, Artificial
  Synthetic oligonucleotide
ttctcgatataccactagaaaaggctgctttatccagtagacctgatgtttgatc

SEQ ID NO: 513675 - DNA, 55 bp, Artificial
  Synthetic oligonucleotide
ttctttgggttcgtcaagtactcggacatactatcctcatcccatttgacgttct

SEQ ID NO: 513676 - DNA, 55 bp, Artificial
  Synthetic oligonucleotide
ttgaaccaatgcgaaggtagaaagggcttagtggtcatctctggtatcgttcatg

SEQ ID NO: 513677 - DNA, 55 bp, Artificial
  Synthetic oligonucleotide
acagcgtaagtataggaatagattaaccctgctacagagctctttaccggagata

SEQ ID NO: 513678 - DNA, 55 bp, Artificial
  Synthetic oligonucleotide
acactgctatggatatggaaatcgaagattcaagccccatagatgacctgaagtt

SEQ ID NO: 513679 - DNA, 55 bp, Artificial
  Synthetic oligonucleotide
acaaattgtgacaaggatgtagtggatgcgtaggagaccataatgacatctgaca

SEQ ID NO: 513680 - DNA, 55 bp, Artificial
  Synthetic oligonucleotide
aatgttactcacctgcagagccatagaggccctgtacttgtcttcatctgcgacg

SEQ ID NO: 513681 - DNA, 55 bp, Artificial
  Synthetic oligonucleotide
aatgaccaattaagagcagatatatttccctcagaatcggaaggatccagtgact

SEQ ID NO: 513682 - DNA, 55 bp, Artificial
  Synthetic oligonucleotide
aatatgaattacttccatcacctgtttcaacgttggctgtatcccaggatcgttc

SEQ ID NO: 513683 - DNA, 55 bp, Artificial
  Synthetic oligonucleotide
aatataatactgagagaagcaactctaatcgaagcacccttaccctgtaggacag

SEQ ID NO: 513684 - DNA, 55 bp, Artificial
  Synthetic oligonucleotide
aataagggatatcatgacagattcgcacgctcaatataaggatgcattaacgtgg

SEQ ID NO: 513685 - DNA, 55 bp, Artificial
  Synthetic oligonucleotide
aagtcaagcctccaatgaagccattacgggatgttaagccgatgaagaaggtggc

SEQ ID NO: 513686 - DNA, 55 bp, Artificial
  Synthetic oligonucleotide
aagtaagacgcaaaggtggacaaaagacttctactcatcttcgccttgcggatcg

SEQ ID NO: 513687 - DNA, 55 bp, Artificial
  Synthetic oligonucleotide
ttgacgagcataaagttgatgctatgcttgatggattgttgcaggccatttcctc

SEQ ID NO: 513688 - DNA, 55 bp, Artificial
  Synthetic oligonucleotide
ttgagaaaggctactgctttcaacaagacccgtggtccattccatttcagagccc

SEQ ID NO: 513689 - DNA, 55 bp, Artificial
  Synthetic oligonucleotide
ttgctctatgaactccagtaagagatgatgtggcccctcgctctcaaacaccgag

SEQ ID NO: 513690 - DNA, 55 bp, Artificial
  Synthetic oligonucleotide
tttaatgcacttttcaacgtgggtgatttgcccaatttacgacattacggtatcg

SEQ ID NO: 513691 - DNA, 55 bp, Artificial
  Synthetic oligonucleotide
aacatcgggttccaatctccaataccattcatacttctgtactagcgggtgcttg

SEQ ID NO: 513692 - DNA, 55 bp, Artificial
  Synthetic oligonucleotide
ttttaggccgtcggccccgttcgatgttcacccgtcctggacagcttgctctccc

SEQ ID NO: 513693 - DNA, 55 bp, Artificial
  Synthetic oligonucleotide
aacagactacttgacacacaacattccatctttgccataaacgccaacccttggt

SEQ ID NO: 513694 - DNA, 55 bp, Artificial
  Synthetic oligonucleotide
aacactaagattttgaagctagacccatctaaggttaatgtgtatggtggtgctg

SEQ ID NO: 513695 - DNA, 55 bp, Artificial
  Synthetic oligonucleotide
aaattggggcagaaatattcctcctcaactggttcttgattattgtgtacagtgt

SEQ ID NO: 513696 - DNA, 55 bp, Artificial
  Synthetic oligonucleotide
aaataagcccttgtggtactttcttccaaggtaaggtaagccccagtgcacctaa

SEQ ID NO: 513697 - DNA, 55 bp, Artificial
  Synthetic oligonucleotide
aaaccacagagggatagagttcttgctcttggcgttacattgcatgatgaaccaa

SEQ ID NO: 513698 - DNA, 55 bp, Artificial
  Synthetic oligonucleotide
atggtgtcctatttccaccacagaatcgaggcaacaaacaacgctagttactgtc

SEQ ID NO: 513699 - DNA, 55 bp, Artificial
  Synthetic oligonucleotide
atcgctcactagtagacaacacacgttagaaggatcctttcaggtgcaacgggac

SEQ ID NO: 513700 - DNA, 55 bp, Artificial
  Synthetic oligonucleotide
atatacgtattggattcggtagaatttagccatgctgctaccatcgatgcatcag

SEQ ID NO: 513701 - DNA, 55 bp, Artificial
  Synthetic oligonucleotide
atacctttcatgaaccataaagctgcaaagtaacgcaaagagtgaccgtgtgcga

SEQ ID NO: 513702 - DNA, 55 bp, Artificial
  Synthetic oligonucleotide
atacagtagtttactctggagctgtgcttatgttgggtgtttaacaacgaactga

SEQ ID NO: 513703 - DNA, 55 bp, Artificial
  Synthetic oligonucleotide
ataagtggtctcgtaagtaccggtccatggttgggttgtggttacataactctcc

SEQ ID NO: 513704 - DNA, 55 bp, Artificial
  Synthetic oligonucleotide
agttattccccatccaagactgcattagcttttcaatgtgtctcttgttccatcg

SEQ ID NO: 513705 - DNA, 55 bp, Artificial
  Synthetic oligonucleotide
agttaacctcacattggttatcatcctcatagtctcttgacagctgtgattcgct

SEQ ID NO: 513706 - DNA, 55 bp, Artificial
  Synthetic oligonucleotide
agtgttgccaactagcccagtacttccgaagaataaaccggaagtaaccgcttcc

SEQ ID NO: 513707 - DNA, 55 bp, Artificial
  Synthetic oligonucleotide
agtgcctttcgaggtcttatttgccaaactaaagtacctggttctttccatatgc

SEQ ID NO: 513708 - DNA, 55 bp, Artificial
  Synthetic oligonucleotide
agtgaaaacggcacgtgggagatcagaagagtcgatttgagaaggatgatcagca

SEQ ID NO: 513709 - DNA, 55 bp, Artificial
  Synthetic oligonucleotide
agtacgactggacttacactacgcggtacaagggcacagagagctcacctgagtc

SEQ ID NO: 513710 - DNA, 55 bp, Artificial
  Synthetic oligonucleotide
agtaaaacaagcggtaacaaaagaccatagctgttcgtatcctaagtctctggcg

SEQ ID NO: 513711 - DNA, 55 bp, Artificial
  Synthetic oligonucleotide
agcggtcttgaaagtgtgcttagggacttgagcgaatacagtctttcttatgcgg

SEQ ID NO: 513712 - DNA, 55 bp, Artificial
  Synthetic oligonucleotide
agcctgattcagtggcggaagttgaaccggagactgatgagcccgattcagtggc

SEQ ID NO: 513713 - DNA, 55 bp, Artificial
  Synthetic oligonucleotide
agcatttcacatgctaataaaagccccgttacataataacatctcccctccacaa

SEQ ID NO: 513714 - DNA, 55 bp, Artificial
  Synthetic oligonucleotide
agagtacggcagcaacgactaccatattaagtatgaactctgcctctcacagctc

SEQ ID NO: 513715 - DNA, 55 bp, Artificial
  Synthetic oligonucleotide
agaggtgtaattgttccatgaaattctcgtttggctcaacactcggtttcttcct

SEQ ID NO: 513716 - DNA, 55 bp, Artificial
  Synthetic oligonucleotide
agaccgccgtcccttggctattacaggtggagcatccttagcaggcatatttagc

SEQ ID NO: 513717 - DNA, 55 bp, Artificial
  Synthetic oligonucleotide
agacacctgaatagtctcgtcatggacatctagcgattccattggcgagcagtgg

SEQ ID NO: 513718 - DNA, 55 bp, Artificial
  Synthetic oligonucleotide
actcacccactctacagatatgactaatcggcgcatgttttacacctctcttgta

SEQ ID NO: 513719 - DNA, 55 bp, Artificial
  Synthetic oligonucleotide
ttaagatagacgagtataaagttgttctggatcaaacacgccaggttaacgatca

SEQ ID NO: 513720 - DNA, 55 bp, Artificial
  Synthetic oligonucleotide
actagcgttttacctcctgtatatttcacggtgaccgcaagtccaataactgtgt

SEQ ID NO: 513721 - DNA, 55 bp, Artificial
  Synthetic oligonucleotide
actacaacgactgttgtccgcatcatcataacaaccaagacaatcgtcgaagagc

SEQ ID NO: 513722 - DNA, 55 bp, Artificial
  Synthetic oligonucleotide
acgtggtgacggatattgggaagatgtgtttgtacatttggccttatagagtgtg

SEQ ID NO: 513723 - DNA, 55 bp, Artificial
  Synthetic oligonucleotide
acgctgttcatggcactttataggtgcaccgaccgagacatgttccacggcagaa

SEQ ID NO: 513724 - DNA, 55 bp, Artificial
  Synthetic oligonucleotide
acgcgcagccctcagaaaagcaagtgatttccgaagtttcaacctacccagacta

SEQ ID NO: 513725 - DNA, 55 bp, Artificial
  Synthetic oligonucleotide
acgaacctgaatgtgaatggtgtgatgcagaggtctggggtcgtcattgaacttg

SEQ ID NO: 513726 - DNA, 55 bp, Artificial
  Synthetic oligonucleotide
cgtcagtagggattcccattgtacctacccaggaaacaggttctttcactgtctt

SEQ ID NO: 513727 - DNA, 55 bp, Artificial
  Synthetic oligonucleotide
cgtcacttgccaagggttgaaattgggaagccgggcggtcgtataggactgcaca

SEQ ID NO: 513728 - DNA, 55 bp, Artificial
  Synthetic oligonucleotide
tggatcacgaccaagagctggattccatcttagtggggccagttccagttggagt

SEQ ID NO: 513729 - DNA, 55 bp, Artificial
  Synthetic oligonucleotide
cgtaagtagggagactactgccataggaactgtcacaagttgttcgggtggttgc

SEQ ID NO: 513730 - DNA, 55 bp, Artificial
  Synthetic oligonucleotide
cgtaaggtgccagaggtccgtaaaccatcttgtctaaatgcgctgccagttcttg

SEQ ID NO: 513731 - DNA, 55 bp, Artificial
  Synthetic oligonucleotide
cggttggtcggtttgccaaaactagaagcggtgtattcggtagtctggatgtttc

SEQ ID NO: 513732 - DNA, 55 bp, Artificial
  Synthetic oligonucleotide
cggttcaagaacccacttcaatccttcgatttggcgatgccaatgttacttcctc

SEQ ID NO: 513733 - DNA, 55 bp, Artificial
  Synthetic oligonucleotide
cggttcaaagagtcatcggattcacctctggatctgacgtaaccggacaaagcgt

SEQ ID NO: 513734 - DNA, 55 bp, Artificial
  Synthetic oligonucleotide
cggtcgaaccatgctttctgtaatccttcagtagaaacagccctttcagaggagc

SEQ ID NO: 513735 - DNA, 55 bp, Artificial
  Synthetic oligonucleotide
cggtccatggttcggtgacagtggttgtaactgatgcggtgtagtttgaaggatc

SEQ ID NO: 513736 - DNA, 55 bp, Artificial
  Synthetic oligonucleotide
cggtatccctccacctcacatgctaaacaagcccataatgacaccctacgtgtcg

SEQ ID NO: 513737 - DNA, 55 bp, Artificial
  Synthetic oligonucleotide
cggggacattgggaactacggaggaaagatcggaatgctctgagctcttctcaaa

SEQ ID NO: 513738 - DNA, 55 bp, Artificial
  Synthetic oligonucleotide
cgggacgagatcatgaccgcgtatgggagagtgtacagggattaccacgcactgc

SEQ ID NO: 513739 - DNA, 55 bp, Artificial
  Synthetic oligonucleotide
cggagaacatcgacacgtgagtaaaccggctgggctaggccaatcctggaatcga

SEQ ID NO: 513740 - DNA, 55 bp, Artificial
  Synthetic oligonucleotide
cggactcatttcctcacttatcaattcgctcagtttcaggtcgcaacccgagtct

SEQ ID NO: 513741 - DNA, 55 bp, Artificial
  Synthetic oligonucleotide
cggactagctaatggtcctttgctcatactttgttcaaccaaattcgtgctgttg

SEQ ID NO: 513742 - DNA, 55 bp, Artificial
  Synthetic oligonucleotide
cggaaattcgctgtaattaggcaagtccgttgctccagaggaggaaacacacccc

SEQ ID NO: 513743 - DNA, 55 bp, Artificial
  Synthetic oligonucleotide
tggcattcacaaatttgtgcaaaaggttcttggaaagcatctgttggtcataaag

SEQ ID NO: 513744 - DNA, 55 bp, Artificial
  Synthetic oligonucleotide
cgctgaacacgttggtgttttgcacgttgtcggtgttccatccgtctcttcccaa

SEQ ID NO: 513745 - DNA, 55 bp, Artificial
  Synthetic oligonucleotide
cgctcaagataagagaactctcggtagattagcatcatcgatagccgtgacgtta

SEQ ID NO: 513746 - DNA, 55 bp, Artificial
  Synthetic oligonucleotide
cgctagatgaattaggaaacacttttgagcagggatctgttaagctgaagcgtac

SEQ ID NO: 513747 - DNA, 55 bp, Artificial
  Synthetic oligonucleotide
cgcctgtctggagcctgcagtttcaggtttctacgcagcctgcttcgagagcaaa

SEQ ID NO: 513748 - DNA, 55 bp, Artificial
  Synthetic oligonucleotide
cgcccttctgaaatggtcgtcaccaagcctgactgcagatgccttttcgccaccc

SEQ ID NO: 513749 - DNA, 55 bp, Artificial
  Synthetic oligonucleotide
cgccacgaccacactctataaggccaaatgtacaaacacatcttcccaatatccg

SEQ ID NO: 513750 - DNA, 55 bp, Artificial
  Synthetic oligonucleotide
cgcattttctgacagaacctgggacctgattacaagactaatagccgaccctgtg

SEQ ID NO: 513751 - DNA, 55 bp, Artificial
  Synthetic oligonucleotide
cgcagatatgcagacgcaaactacgcgaccttggaaagtcatctacagagaacgg

SEQ ID NO: 513752 - DNA, 55 bp, Artificial
  Synthetic oligonucleotide
cgatttgccacttcaaatgctgtagtctgcacaatttacgcctgaactaggtgag

SEQ ID NO: 513753 - DNA, 55 bp, Artificial
  Synthetic oligonucleotide
cgattcctataccagaccacttatgcaacgtggaaccaccaatagtcactgccgc

SEQ ID NO: 513754 - DNA, 55 bp, Artificial
  Synthetic oligonucleotide
cttacggattcacaatgggtatcgatcacacttccaagcaacacaagagatctgg

SEQ ID NO: 513755 - DNA, 55 bp, Artificial
  Synthetic oligonucleotide
cttaccagaaagcaacttagcaccctccttaatacccaagtccacatacttcttc

SEQ ID NO: 513756 - DNA, 55 bp, Artificial
  Synthetic oligonucleotide
ctgttctcaaaaccggtaagacaacctctttcaacatagacacagctttagcggc

SEQ ID NO: 513757 - DNA, 55 bp, Artificial
  Synthetic oligonucleotide
ctgttaggtgcttttgaggggatgatctatccagcaatcaacatgtacctttccg

SEQ ID NO: 513758 - DNA, 55 bp, Artificial
  Synthetic oligonucleotide
ctggttccttaacattcgcagtttccacggtaggagtacgcttacgaacccatcg

SEQ ID NO: 513759 - DNA, 55 bp, Artificial
  Synthetic oligonucleotide
ctgacatatatgccttcggtagaaaaggtggcaggttacagggtgaaaacatccg

SEQ ID NO: 513760 - DNA, 55 bp, Artificial
  Synthetic oligonucleotide
ctcttgtggagtgcttgggacccaatcatcatcactacgtgttatcttacgagcg

SEQ ID NO: 513761 - DNA, 55 bp, Artificial
  Synthetic oligonucleotide
ctcttatgaagatcttcccagtgtgattcattagacccgaatgcaacgccgtcct

SEQ ID NO: 513762 - DNA, 55 bp, Artificial
  Synthetic oligonucleotide
ctctgccacgtagtttcttaagagcaggggacttgcccagatttcctaaaccgtc

SEQ ID NO: 513763 - DNA, 55 bp, Artificial
  Synthetic oligonucleotide
ctctcggcaaatgccttggtgctattacgtaattttagccgctgaaggcggatgg

SEQ ID NO: 513764 - DNA, 55 bp, Artificial
  Synthetic oligonucleotide
ctccggttccatcagggaaacccgtgtaaattaggagttgcactgttcgaaatgg

SEQ ID NO: 513765 - DNA, 55 bp, Artificial
  Synthetic oligonucleotide
ctccggcgattttcctgtctacggtgaatcgttcaccctcaccactcactaggac

SEQ ID NO: 513766 - DNA, 55 bp, Artificial
  Synthetic oligonucleotide
tgctactttcctaaaggaagacttgccatactttgttaacgctttgggtaacgtc

SEQ ID NO: 513767 - DNA, 55 bp, Artificial
  Synthetic oligonucleotide
tggaaccaacttcggaaaccttaccgtaatattcacgccctataccgatttcata

SEQ ID NO: 513768 - DNA, 55 bp, Artificial
  Synthetic oligonucleotide
ctcccacgttacgtccttctgcagacaagttgcagcggtttacaatgctcaggcc

SEQ ID NO: 513769 - DNA, 55 bp, Artificial
  Synthetic oligonucleotide
ctccatagaaggctcattcttcttgtcgtcagttgaagaggtctcatttccctcc

SEQ ID NO: 513770 - DNA, 55 bp, Artificial
  Synthetic oligonucleotide
ctcagtgactggtagtcgaaattctcttggaaaattaagggaacgtgggaagtgc

SEQ ID NO: 513771 - DNA, 55 bp, Artificial
  Synthetic oligonucleotide
ctcaaaacgctgaactttccactattttccgctaaatgtgcaggaacatcacgag

SEQ ID NO: 513772 - DNA, 55 bp, Artificial
  Synthetic oligonucleotide
ctaggtaagcagaggatgggctcaaagtcccttccaatatttgcatagacaaaat

SEQ ID NO: 513773 - DNA, 55 bp, Artificial
  Synthetic oligonucleotide
ctagcaacgtatacagtgacatcgctttcaggctgcttccaacctcaatgaacga

SEQ ID NO: 513774 - DNA, 55 bp, Artificial
  Synthetic oligonucleotide
ctaattggacaatcgaaaacctttgacaacgctaggatttctatctcaccacccc

SEQ ID NO: 513775 - DNA, 55 bp, Artificial
  Synthetic oligonucleotide
cgttgtaggtagtacgaacatcgtaaaatttgttgactgctgtggaacgcttcat

SEQ ID NO: 513776 - DNA, 55 bp, Artificial
  Synthetic oligonucleotide
cgttacattagcggaggattctttctgggagcattttcaggcttacactaataca

SEQ ID NO: 513777 - DNA, 55 bp, Artificial
  Synthetic oligonucleotide
cgtctgaccattgaacaatttgtgcattagactccttgaaaacgtgttgctcagc

SEQ ID NO: 513778 - DNA, 55 bp, Artificial
  Synthetic oligonucleotide
cgtctagcgataacaacccatcagtataggaagcccaatgatgattcaaaggtga

SEQ ID NO: 513779 - DNA, 55 bp, Artificial
  Synthetic oligonucleotide
cgtcctgggaagctgcgtgcaataccaaggcaggacagatacctacgttacctcg

SEQ ID NO: 513780 - DNA, 55 bp, Artificial
  Synthetic oligonucleotide
cgtccctgtgaataatggtcatgacttcagtactgcagtgaggtcttccgcttac

SEQ ID NO: 513781 - DNA, 55 bp, Artificial
  Synthetic oligonucleotide
tggagcacaaggcggtttatgggccacaagcggatactggccgtgatgacgtcta

SEQ ID NO: 513782 - DNA, 55 bp, Artificial
  Synthetic oligonucleotide
ccgcagacgtatagcgacgaacccagactgaccaccaaacacaggaatgcgactg

SEQ ID NO: 513783 - DNA, 55 bp, Artificial
  Synthetic oligonucleotide
ccgattgccgtaggaatcttcatagctgttgcccttgccccattattcaacagag

SEQ ID NO: 513784 - DNA, 55 bp, Artificial
  Synthetic oligonucleotide
ccgattctattgtcaaggcttctaactggagattagtcgaagttggccgtgtggt

SEQ ID NO: 513785 - DNA, 55 bp, Artificial
  Synthetic oligonucleotide
ccgatcggaaatactcgatattggtgcaagtcgcagggaattcgatctagccacg

SEQ ID NO: 513786 - DNA, 55 bp, Artificial
  Synthetic oligonucleotide
ccgatcgctcaagctggatccgatcaaactatagtgaggagcaatattgttggcg

SEQ ID NO: 513787 - DNA, 55 bp, Artificial
  Synthetic oligonucleotide
ccgataatggttcttaggtcggtaatcgcaagggcaggtgtacagggtacgcttt

SEQ ID NO: 513788 - DNA, 55 bp, Artificial
  Synthetic oligonucleotide
ccgagaaaactacacctgtcgcacagtacaacttccataaggctgccattacatc

SEQ ID NO: 513789 - DNA, 55 bp, Artificial
  Synthetic oligonucleotide
ccgaaataaccaccagcaatagaaaccttctcgttaccggtgaatgaacctatcg

SEQ ID NO: 513790 - DNA, 55 bp, Artificial
  Synthetic oligonucleotide
ccctttcaccagcctcaagtgaaaaggcagtggtttcaggccgtaatagaatgac

SEQ ID NO: 513791 - DNA, 55 bp, Artificial
  Synthetic oligonucleotide
cccttggaagatggttggtcttgaccatttggccataatctggtgacacccacgg

SEQ ID NO: 513792 - DNA, 55 bp, Artificial
  Synthetic oligonucleotide
ccctcgcctgtgagtagagtggtttatatacgaggctgaaatggccctcatcttt

SEQ ID NO: 513793 - DNA, 55 bp, Artificial
  Synthetic oligonucleotide
ccctcaccttcaggaatcaagtgcttatctaattcgatcagcttcccgatcagtt

SEQ ID NO: 513794 - DNA, 55 bp, Artificial
  Synthetic oligonucleotide
cccggagaaatgaacaggggcagtttacgctccgtattttgtctcagggccacgt

SEQ ID NO: 513795 - DNA, 55 bp, Artificial
  Synthetic oligonucleotide
ccccttctccaaagaaattgatgcctaaggtgcggaatattacgagatagggaac

SEQ ID NO: 513796 - DNA, 55 bp, Artificial
  Synthetic oligonucleotide
cccctcaagatgctgatttcgttccctgatgtcttggcccggaagatatcttcgt

SEQ ID NO: 513797 - DNA, 55 bp, Artificial
  Synthetic oligonucleotide
ccccattgagtagctgtgttaccggcgcagtatatccggttgatggtggctatct

SEQ ID NO: 513798 - DNA, 55 bp, Artificial
  Synthetic oligonucleotide
tgggcgtaggcccaatgtttgggtccttttctggtgaagtggactcatggaaacg

SEQ ID NO: 513799 - DNA, 55 bp, Artificial; identical to SEQ ID NO: 273731
  Synthetic oligonucleotide

SEQ ID NO: 513800 - DNA, 55 bp, Artificial
  Synthetic oligonucleotide
tgtcacctacacagattcgtacagttcaatggtatcttccctcagcgcagggtac

SEQ ID NO: 513801 - DNA, 55 bp, Artificial
  Synthetic oligonucleotide
cccagtggattccccaaggacaagcaaaaccataaccttacaatccttccagtct

SEQ ID NO: 513802 - DNA, 55 bp, Artificial
  Synthetic oligonucleotide
cccagcagcttcccggattcggatccgcgcaggcctcctcggcgcaaaatgccta

SEQ ID NO: 513803 - DNA, 55 bp, Artificial
  Synthetic oligonucleotide
cccagaagatatagcacgacatatgagcaccgcccgccggtattatatttcctcg

SEQ ID NO: 513804 - DNA, 55 bp, Artificial
  Synthetic oligonucleotide
ccatgtgtattgacccagggcttaagattcaattggtgccctcaattggagctat

SEQ ID NO: 513805 - DNA, 55 bp, Artificial
  Synthetic oligonucleotide
ccatcacgtcgctggggctatacatagtgaaggaataaccttcgtgaaggaaacc

SEQ ID NO: 513806 - DNA, 55 bp, Artificial
  Synthetic oligonucleotide
ccagtccatggctcagttgtagttatgatggtgttggcagttgtaaggtgttctg

SEQ ID NO: 513807 - DNA, 55 bp, Artificial
  Synthetic oligonucleotide
ccaggcagatcgaaaggtgtaactgatgagtaccatgtgtttaacgatcttgagc

SEQ ID NO: 513808 - DNA, 55 bp, Artificial
  Synthetic oligonucleotide
ccaggatttactcagttcgaccccagagagcactatcataaagatcggactgagt

SEQ ID NO: 513809 - DNA, 55 bp, Artificial
  Synthetic oligonucleotide
ccagatgactagtaatcgtatgaggtgcacggaggcacatatatttggatcgttt

SEQ ID NO: 513810 - DNA, 55 bp, Artificial
  Synthetic oligonucleotide
cgatctactctaatatttactcaatccgttgtgatctcaagcaccctacggtccc

SEQ ID NO: 513811 - DNA, 55 bp, Artificial
  Synthetic oligonucleotide
cgataatcgcacggattctaccttttccccgtactcacccggattctaccatttt

SEQ ID NO: 513812 - DNA, 55 bp, Artificial
  Synthetic oligonucleotide
cgagtacaagtgccaaaaccttttgaaaatatcgtacttgttgatggtatcgcca

SEQ ID NO: 513813 - DNA, 55 bp, Artificial
  Synthetic oligonucleotide
cgaggtggcaattggtgtaaacggcaagatatgggtcaaatgcgaagaagtgaag

SEQ ID NO: 513814 - DNA, 55 bp, Artificial
  Synthetic oligonucleotide
cgaggcttctgcatcgttactagtgtcatgagatacatcagagctgtgcttattt

SEQ ID NO: 513815 - DNA, 55 bp, Artificial
  Synthetic oligonucleotide
cgagattggcgaaggttgattggccaggaaggttatatcgtatgaattatcgctt

SEQ ID NO: 513816 - DNA, 55 bp, Artificial
  Synthetic oligonucleotide
cgacgcctttccgttctgccactcagccgctactcaccgtgacacttgtcagttg

SEQ ID NO: 513817 - DNA, 55 bp, Artificial
  Synthetic oligonucleotide
cgaccaatgtgagcctacttacggacccgaatggatagccgcctctaagaacgta

SEQ ID NO: 513818 - DNA, 55 bp, Artificial
  Synthetic oligonucleotide
cgaatcagtaaacctgatcctgagtgtccgtccaaattaagacattatgaggttc

SEQ ID NO: 513819 - DNA, 55 bp, Artificial
  Synthetic oligonucleotide
cgaaggtatgagtagcaagtagctctacctagagaaccgtaaaacacagctcccc

SEQ ID NO: 513820 - DNA, 55 bp, Artificial
  Synthetic oligonucleotide
cgaagagcgcatatcaattgcgttgtcgacttaattgctctcttagtacaacggt

SEQ ID NO: 513821 - DNA, 55 bp, Artificial
  Synthetic oligonucleotide
cgaaattggaagctgcaataataggaagacagggaagttcgagcgtgtctgggtt

SEQ ID NO: 513822 - DNA, 55 bp, Artificial
  Synthetic oligonucleotide
ccttggcgttgcagggatctgagacctcttctgcaaaatacactaacctagatgc

SEQ ID NO: 513823 - DNA, 55 bp, Artificial
  Synthetic oligonucleotide
ccttcgatatgcaaaggcggggttgtaatcaggtaggtctcatctttaatcttca

SEQ ID NO: 513824 - DNA, 55 bp, Artificial
  Synthetic oligonucleotide
ccttatggggattcataccttaattcactccttacggggtcccgaatggttaagg

SEQ ID NO: 513825 - DNA, 55 bp, Artificial
  Synthetic oligonucleotide
ccttaaggccggccaaaacggttaaatcgcatatccccagttggcccgaaaggag

SEQ ID NO: 513826 - DNA, 55 bp, Artificial
  Synthetic oligonucleotide
cctggacaacgccacttatctgagcagaacaggtcttaccttagtctctgtagtc

SEQ ID NO: 513827 - DNA, 55 bp, Artificial
  Synthetic oligonucleotide
cctccgccagtgttggcgcctattttccttcggatcaggacatgcgcagaaagcg

SEQ ID NO: 513828 - DNA, 55 bp, Artificial
  Synthetic oligonucleotide
cctccgagagcatattgatcgaaatgagcggtaccattagctacagaattagccg

SEQ ID NO: 513829 - DNA, 55 bp, Artificial
  Synthetic oligonucleotide
cctcaacacagccctaatccaaccctgacgaacctgtctctcaacttaccctcca

SEQ ID NO: 513830 - DNA, 55 bp, Artificial
  Synthetic oligonucleotide
ccgttctgcgagatcgtctcggccaactttcccctgcgtaactgtctgacacgac

SEQ ID NO: 513831 - DNA, 55 bp, Artificial
  Synthetic oligonucleotide
ccgtgtctggtagcccgacatcttttgcatgacttgaaaccttgatctgcaccgc

SEQ ID NO: 513832 - DNA, 55 bp, Artificial
  Synthetic oligonucleotide
ccgtatgggcgcaaaacggctcaacaatgaatgtgtgaaggcgtccctctgtttg

SEQ ID NO: 513833 - DNA, 55 bp, Artificial
  Synthetic oligonucleotide
ccggttgtcgcaccgcggaagttacaaattcaataagaaccaagtccaggagata

SEQ ID NO: 513834 - DNA, 55 bp, Artificial
  Synthetic oligonucleotide
ccgggtcaacatgatcttaaaacgtccttgttgaacgctattatacacgctgatc

SEQ ID NO: 513835 - DNA, 55 bp, Artificial
  Synthetic oligonucleotide
ccgctcaacaaatcaacggaagtcaattcagaatccgtggtgccatcttccacag

SEQ ID NO: 513836 - DNA, 55 bp, Artificial
  Synthetic oligonucleotide
ccgcatgaacaatggccgatggattttgccagactatgtagacttcgcatttctg

SEQ ID NO: 513837 - DNA, 54 bp, Artificial
  Synthetic oligonucleotide
tcggcgtttacgttatcactgaatgacgtgccaaattgtgaaggcccgctaccg

SEQ ID NO: 513838 - DNA, 54 bp, Artificial
  Synthetic oligonucleotide
tgttcaaaagaagacctgttcctcttgtggttacccatccgctaagactagatc

SEQ ID NO: 513839 - DNA, 54 bp, Artificial
  Synthetic oligonucleotide
ttttgggtattcaattcctcaggactatcttcatgagccctgtgatgaacaaaa

SEQ ID NO: 513840 - DNA, 54 bp, Artificial
  Synthetic oligonucleotide
aaaatgcttgaattctgtgggatgctcagtgaccttttaaaagggttttgggta

SEQ ID NO: 513841 - DNA, 54 bp, Artificial
  Synthetic oligonucleotide
gtcaggtttactcttccgtttgttttagtgccgctgtctgccttgggttctttt

SEQ ID NO: 513842 - DNA, 54 bp, Artificial
  Synthetic oligonucleotide
aacttgaccaatgtgggatgcatcttccatggtaacaacttggtagccttccat

SEQ ID NO: 513843 - DNA, 54 bp, Artificial
  Synthetic oligonucleotide
gtacaaagccatatgactcacaaccgtaaacaaacacatagcgaaccttaaact

SEQ ID NO: 513844 - DNA, 54 bp, Artificial
  Synthetic oligonucleotide
gctgaactagtggggaaattccttggctacgtatcttctctagtcgaaccttcc

SEQ ID NO: 513845 - DNA, 54 bp, Artificial
  Synthetic oligonucleotide
gctaacacaaggcttgacaactttcatgagcgtcaatagtctacgtgtgggctc

SEQ ID NO: 513846 - DNA, 54 bp, Artificial
  Synthetic oligonucleotide
atcagacttgtaggacaagcctagaccaaccaaataaagcatctcgttgatttt

SEQ ID NO: 513847 - DNA, 54 bp, Artificial
  Synthetic oligonucleotide
cttgaccgatcagcattcgcctcacgttgcgtctgtttatgtggatcgtcactg

SEQ ID NO: 513848 - DNA, 53 bp, Artificial
  Synthetic oligonucleotide
ttttgggatgcttctggccatgggtacatcaagtcctccgacggctccgaaac

SEQ ID NO: 513849 - DNA, 53 bp, Artificial
  Synthetic oligonucleotide
ttttcagctaacgtatactatgaggatgtagaatcgcgcggatccaacgagtt

SEQ ID NO: 513850 - DNA, 53 bp, Artificial
  Synthetic oligonucleotide
ttcctgtagtaacgtctcttggcaaacttccagaattctgcaaccaaccaaaa

SEQ ID NO: 513851 - DNA, 53 bp, Artificial
  Synthetic oligonucleotide
ttatttgcatcttcataaacggaatgcatcacagaatccatccccgtttccat

SEQ ID NO: 513852 - DNA, 53 bp, Artificial
  Synthetic oligonucleotide
attcttggtgagggatgtgaacgtcactttggtgcattgttgtgctttggacc

SEQ ID NO: 513853 - DNA, 53 bp, Artificial
  Synthetic oligonucleotide
ccccagagtgcattagtaaagtgcgagagtcttccgtacaagagttatatagg

SEQ ID NO: 513854 - DNA, 53 bp, Artificial
  Synthetic oligonucleotide
ctcccgacgatatcaaacgtttggctaattctttggacttccctgactctgtt

SEQ ID NO: 513855 - DNA, 53 bp, Artificial
  Synthetic oligonucleotide
tacccgacctaagcatccttgtctacaacaagcacgcaagtagtcggctagcg

SEQ ID NO: 513856 - DNA, 53 bp, Artificial
  Synthetic oligonucleotide
gcgtagaggacgtttctgaactggaagaggcagaagtgctagaggaagtggtg

SEQ ID NO: 513857 - DNA, 52 bp, Artificial
  Synthetic oligonucleotide
aacagtaagaagggacgtgttgcattgattggtgccagaggttttaccggta

SEQ ID NO: 513858 - DNA, 52 bp, Artificial
  Synthetic oligonucleotide
aacgtcgcagaggatgatgtatctaccactttggctgatcaagattcattgt

SEQ ID NO: 513859 - DNA, 52 bp, Artificial
  Synthetic oligonucleotide
gtagtgacaagggcggtccgaaaccagcgcacttcgaacagtgcaagatcga

SEQ ID NO: 513860 - DNA, 52 bp, Artificial
  Synthetic oligonucleotide
aagattcactccttccggcggtatcttccttagagtcgctttgctccgtgat

SEQ ID NO: 513861 - DNA, 52 bp, Artificial
  Synthetic oligonucleotide
acaggccgttcagctccacgagcccgctgaccacctcacggaggtcttcccc

SEQ ID NO: 513862 - DNA, 52 bp, Artificial
  Synthetic oligonucleotide
ggcgtgagccctcatcacgtgaaggtagaatttatgagatgtttggagttgc

SEQ ID NO: 513863 - DNA, 52 bp, Artificial
  Synthetic oligonucleotide
tgtgcgtatgacttacccggagtttgaagtcaaatttgggagttacccggcc

SEQ ID NO: 513864 - DNA, 52 bp, Artificial
  Synthetic oligonucleotide
ccccaagattaccttaccattttccaggacaatcccagtgatgaaagtgaaa

SEQ ID NO: 513865 - DNA, 52 bp, Artificial
  Synthetic oligonucleotide
gacctgcaacagtcgttcttgagatggaatgaagtaattgctctttgaacga

SEQ ID NO: 513866 - DNA, 52 bp, Artificial
  Synthetic oligonucleotide
tgacgctacagaatctcccacacagatcccaatagacgtcaatgtagttatc

SEQ ID NO: 513867 - DNA, 52 bp, Artificial
  Synthetic oligonucleotide
gcaatattactcccacgcagctatccgtctgtgaaatagtgctagcaagatc

SEQ ID NO: 513868 - DNA, 52 bp, Artificial
  Synthetic oligonucleotide
tgcctggcttcccttcgactatgctaggctgagaagttggctttgagaaacc

SEQ ID NO: 513869 - DNA, 52 bp, Artificial
  Synthetic oligonucleotide
cgtcccggtggattgcatataagttccatatattccgagcatgtcataccgc

SEQ ID NO: 513870 - DNA, 51 bp, Artificial
  Synthetic oligonucleotide
tacttcgaaagcgccaaattttcccaatgatatagaggtgttaggcttcaa

SEQ ID NO: 513871 - DNA, 51 bp, Artificial
  Synthetic oligonucleotide
tcacctgtgaccgagttagcactaccggaattgactacaatagcgttgatg

SEQ ID NO: 513872 - DNA, 51 bp, Artificial
  Synthetic oligonucleotide
aacttgtcttcgattgtaaagtggctttggttcccacttgcaaatagcggt

SEQ ID NO: 513873 - DNA, 51 bp, Artificial
  Synthetic oligonucleotide
ctccgctacgttgcaacctgagtttacgagtagggaagtcagttcgaccga

SEQ ID NO: 513874 - DNA, 51 bp, Artificial
  Synthetic oligonucleotide
acagcgtcaatggctccgggcaaggtgtatctaccggtattaatgtctctg

SEQ ID NO: 513875 - DNA, 51 bp, Artificial
  Synthetic oligonucleotide
gcaggagaccttccctaagaaggagcctaagatcgacaacgctccactagc

SEQ ID NO: 513876 - DNA, 51 bp, Artificial
  Synthetic oligonucleotide
accaacgataagaagcctggagtcatcaacatttccgcaccagaagaaccg

SEQ ID NO: 513877 - DNA, 51 bp, Artificial
  Synthetic oligonucleotide
actatatacccgctacgagaaagaaggtcgtggtaagactatcaaagccca

SEQ ID NO: 513878 - DNA, 51 bp, Artificial
  Synthetic oligonucleotide
tctgtgatttgggtacggaggaatcgcggatccttacacggttcactagtc

SEQ ID NO: 513879 - DNA, 51 bp, Artificial
  Synthetic oligonucleotide
cggaaaagtggccatctttgctatgctcgtaaggctagcgctctctaagta

SEQ ID NO: 513880 - DNA, 51 bp, Artificial
  Synthetic oligonucleotide
caaaatactgccacatttgagcctatgtcggcaaggcagacagagcgcttg

SEQ ID NO: 513881 - DNA, 51 bp, Artificial
  Synthetic oligonucleotide
tctgtggcggctgcgatagtaactgcattcgtgttagaagacggccccact

SEQ ID NO: 513882 - DNA, 51 bp, Artificial
  Synthetic oligonucleotide
tggttactttgcatcgatttacgcacacgcccgtgaatacgttgcacacgg

SEQ ID NO: 513883 - DNA, 50 bp, Artificial
  Synthetic oligonucleotide
ggtgaactgtgtgagcgttgggtgcgatgtaagcaactccaaacatgtcg

SEQ ID NO: 513884 - DNA, 50 bp, Artificial
  Synthetic oligonucleotide
accacaaccttacaccatgctcttgtgttagagattcagcaagggaacac

SEQ ID NO: 513885 - DNA, 50 bp, Artificial
  Synthetic oligonucleotide
cgtagcgttgggtatgtgccaaacttattgggttggcgagatcagccgtt

SEQ ID NO: 513886 - DNA, 50 bp, Artificial
  Synthetic oligonucleotide
tgttaatgcaatcgggacagctcactgactgaacggtgaatagtggcccc

SEQ ID NO: 513887 - DNA, 50 bp, Artificial
  Synthetic oligonucleotide
tttgcgagaaggtataccagtggaagtgtcccagaaagcagtatgttcct

SEQ ID NO: 513888 - DNA, 55 bp, Artificial
  Synthetic oligonucleotide
cgttcagactaccaccggagagttgaaacttgtcgagagttcttctgcttaaggg

SEQ ID NO: 513889 - DNA, 55 bp, Artificial
  Synthetic oligonucleotide
ctagttaccggtaatgatgatcgaacggtagtgcgtgagtcgaaatcttcaacgg

SEQ ID NO: 513890 - DNA, 55 bp, Artificial
  Synthetic oligonucleotide
ctatggaccatatatgcttaccacgatgacccgtaaatgtttcggtattatccag

SEQ ID NO: 513891 - DNA, 55 bp, Artificial
  Synthetic oligonucleotide
ctcagacacgcgagtttacagcgaaatggacgtgtcaactgaagagtacgcaacg

SEQ ID NO: 513892 - DNA, 55 bp, Artificial
  Synthetic oligonucleotide
cttgcatgtcctactaaacaagaaaggctctgtggcctaggggtaactctgaacc

SEQ ID NO: 513893 - DNA, 55 bp, Artificial
  Synthetic oligonucleotide
cttgtacacacaataagccttgttcaggcccataacgataccggtcgtagaggtg

SEQ ID NO: 513894 - DNA, 55 bp, Artificial
  Synthetic oligonucleotide
cttttgcggatgcagtttcacccttaaatccgccatctgccgatgtgcagacgcc

SEQ ID NO: 513895 - DNA, 55 bp, Artificial
  Synthetic oligonucleotide
gaaacccatcagttcgacctcacttattctcaatggctatcctaggattcgcctt

SEQ ID NO: 513896 - DNA, 55 bp, Artificial
  Synthetic oligonucleotide
gaccagcgggtttacccatgatatgtgcaatgtcaaggtagtactgttttggtgg

SEQ ID NO: 513897 - DNA, 55 bp, Artificial
  Synthetic oligonucleotide
gagcagccagcgtccaccaatgcataccaagatctactctaagactgcccactcc

SEQ ID NO: 513898 - DNA, 55 bp, Artificial
  Synthetic oligonucleotide
gcaactctggtgaagcccattttggcataaactttccagataggcgattgaactg

SEQ ID NO: 513899 - DNA, 55 bp, Artificial
  Synthetic oligonucleotide
gcaccccgcaacgatgaaaggaactttccaacatgacgcttatgcatgagtcctg

SEQ ID NO: 513900 - DNA, 55 bp, Artificial
  Synthetic oligonucleotide
gctgtgtcacgaagctggtcataatcgtacttactgtcctcaccgtgaacaagcg

SEQ ID NO: 513901 - DNA, 55 bp, Artificial
  Synthetic oligonucleotide
ggcacaaagtaagctttggagctgttgcttctttgacgcaaggacaggcgtatca

SEQ ID NO: 513902 - DNA, 55 bp, Artificial
  Synthetic oligonucleotide
ggctgagtaagcaccatatacccgaatccttgaccgttccataatcccgaccacc

SEQ ID NO: 513903 - DNA, 55 bp, Artificial
  Synthetic oligonucleotide
gggcgagtcggcgattgctggtgctctcatgtcctagcaaaacgttgatggtgat

SEQ ID NO: 513904 - DNA, 55 bp, Artificial
  Synthetic oligonucleotide
gtaccctcttcggtccgctaatcgtccctacaacactcagacgggcgaggtggcc

SEQ ID NO: 513905 - DNA, 55 bp, Artificial
  Synthetic oligonucleotide
gttgggtgcacgcggcgttggtacgttggaaagcttgatgccacgacgagctgcc

SEQ ID NO: 513906 - DNA, 55 bp, Artificial
  Synthetic oligonucleotide
tgaattgaataggagaaggtcctgaatctgtcggccttagagatcctccttatgg

SEQ ID NO: 513907 - DNA, 55 bp, Artificial
  Synthetic oligonucleotide
ttgcaattacagcagaatactccttctgtatccgaagggctgtgtcgatgtagcc

SEQ ID NO: 513908 - DNA, 55 bp, Artificial
  Synthetic oligonucleotide
aatcggcacggcaatcacaacaatcgggtttcataacccaaagaccataggatca

SEQ ID NO: 513909 - DNA, 55 bp, Artificial
  Synthetic oligonucleotide
aatgactggcttgagacaagtggaatgacccgcggctatacacttacatacgctg

SEQ ID NO: 513910 - DNA, 55 bp, Artificial
  Synthetic oligonucleotide
atacgaacgccgatttgcagcagtgcatcttgaaacaaaacgccctcattacgcc

SEQ ID NO: 513911 - DNA, 55 bp, Artificial
  Synthetic oligonucleotide
atagggtaagtaaagatacgcgtaatgcaggtaccgggtaattgtagatcgggcg

SEQ ID NO: 513912 - DNA, 55 bp, Artificial
  Synthetic oligonucleotide
atattagcttgcaccagaaataccggttctgcgttagactcggagtccgacgtac

SEQ ID NO: 513913 - DNA, 55 bp, Artificial
  Synthetic oligonucleotide
caacgtctccactgtgtaaacgtaaagctgaaggcttttccgacctcgactcggt

SEQ ID NO: 513914 - DNA, 55 bp, Artificial
  Synthetic oligonucleotide
caatcccgatcattagttatcgtgctactcatcgcagaattgctagaactcagtg

SEQ ID NO: 513915 - DNA, 55 bp, Artificial
  Synthetic oligonucleotide
catatgctccaattgtgataaagacattttccggatgagatccaccaatccatgc

SEQ ID NO: 513916 - DNA, 55 bp, Artificial
  Synthetic oligonucleotide
catctatgctacaccttacctagtggtgtcactcatgttacttcagtcgccaagt

SEQ ID NO: 513917 - DNA, 55 bp, Artificial
  Synthetic oligonucleotide
cattgttgtttacgcatcgttcgtttccttcgtgaatagaacactcctgctaatg

SEQ ID NO: 513918 - DNA, 55 bp, Artificial
  Synthetic oligonucleotide
cccctcctctgcgacatctgtattggattccgcccgagaagtatcctcatctttg

SEQ ID NO: 513919 - DNA, 55 bp, Artificial
  Synthetic oligonucleotide
cctacaatgttgcaagtggagaactgtcggtaacaagaaacccaggtttactgcc

SEQ ID NO: 513920 - DNA, 55 bp, Artificial
  Synthetic oligonucleotide
ccttgctgaggatatgaggacgggtttcatgagcttgtattgggactcccatatc

SEQ ID NO: 513921 - DNA, 55 bp, Artificial
  Synthetic oligonucleotide
cgaaaagaattcatccatcatcatgtcttctagtgttgcaccagatgcactttcc

SEQ ID NO: 513922 - DNA, 55 bp, Artificial
  Synthetic oligonucleotide
cgagctcggatgactatggatttcgtgtaccggactacaatggtgagttactgtc

SEQ ID NO: 513923 - DNA, 55 bp, Artificial
  Synthetic oligonucleotide
cgcgcacttttcggacatagtaataaaagccgaggtagtttcggcggcttgcaac

SEQ ID NO: 513924 - DNA, 55 bp, Artificial
  Synthetic oligonucleotide
cggcatccaacgatcatgggtaacttgatacctgtggcttaaggagcttgtagca

SEQ ID NO: 513925 - DNA, 54 bp, Artificial
  Synthetic oligonucleotide
cgttgcctaaacaaaaccctcataagcgttcctcagaagttgttgctacagaag

SEQ ID NO: 513926 - DNA, 53 bp, Artificial
  Synthetic oligonucleotide
gcaatcacgacagacccagctttgagcataatccgaacagttcattaaacgat

SEQ ID NO: 513927 - DNA, 53 bp, Artificial
  Synthetic oligonucleotide
caattgcagttcaccaagatccctgtgttcgttgtcacaaaagcttgaatctg

SEQ ID NO: 513928 - DNA, 53 bp, Artificial
  Synthetic oligonucleotide
atttcgtctaccaagtctcctcaacataagttatcagatcagccgcgttcacg

SEQ ID NO: 513929 - DNA, 52 bp, Artificial
  Synthetic oligonucleotide
ccaactccactccgaataatccgtctcgtgccacaagtgtcctgtctacagg

SEQ ID NO: 513930 - DNA, 52 bp, Artificial
  Synthetic oligonucleotide
gtatcccaccgtcaatgtctttaaaaggaggaggtaccataacctgcgtttt

SEQ ID NO: 513931 - DNA, 52 bp, Artificial
  Synthetic oligonucleotide
ttttgcatggggcattccatatcgtgtggacaaggtgacactacgtgaactt

SEQ ID NO: 513932 - DNA, 51 bp, Artificial
  Synthetic oligonucleotide
gatgcgtccagagcaccagtcagtagccagaattttaccagcggcattgat

SEQ ID NO: 513933 - DNA, 51 bp, Artificial
  Synthetic oligonucleotide
ctagcgggaccgtcctgtaaatggatatttgcgtgaacccaatccaaagca

SEQ ID NO: 513934 - DNA, 55 bp, Artificial
  Synthetic oligonucleotide
tttcccatcctcacctctattcaacaacctgctacgtactcacctccacatcgtc

SEQ ID NO: 513935 - DNA, 55 bp, Artificial
  Synthetic oligonucleotide
ttgtgagatctccggagttatgagacgacttggtgttttaacatctgaggtggtt

SEQ ID NO: 513936 - DNA, 55 bp, Artificial
  Synthetic oligonucleotide
ttgtcattccctatcacagtagtcagtaacaacgacacattcggcaggggatttt

SEQ ID NO: 513937 - DNA, 55 bp, Artificial
  Synthetic oligonucleotide
ttggcatggcgtatcgcatagatgggataggtgttaataagttgatgataggaaa

SEQ ID NO: 513938 - DNA, 55 bp, Artificial
  Synthetic oligonucleotide
tcacgtgaagaagcacgagggttacacgtaacacccggaaatacgtacaaagcgt

SEQ ID NO: 513939 - DNA, 55 bp, Artificial
  Synthetic oligonucleotide
gttgcgtcagccaaacaactccactccagattgcatccaaatccaagcggaaggt

SEQ ID NO: 513940 - DNA, 55 bp, Artificial
  Synthetic oligonucleotide
gtcgttgacttagagtctcgagtgctctagaatcctccggatcaacgttttaccg

SEQ ID NO: 513941 - DNA, 55 bp, Artificial
  Synthetic oligonucleotide
ggggtggttttcgagagctttcggtagatgaataagttcgtatgtgggcgtttct

SEQ ID NO: 513942 - DNA, 55 bp, Artificial
  Synthetic oligonucleotide
gcttcgaaagctaagatggagtttgttgtaaggagggcccggtaagcgttgcatc

SEQ ID NO: 513943 - DNA, 55 bp, Artificial
  Synthetic oligonucleotide
gcggactttgttgaattgagcgtcgtcaagataagctatagacagcattagcaac

SEQ ID NO: 513944 - DNA, 55 bp, Artificial
  Synthetic oligonucleotide
gcattgagcaattacatctcggtgggagttaaaatgcaggaactggagacgtgac

SEQ ID NO: 513945 - DNA, 55 bp, Artificial
  Synthetic oligonucleotide
gcagtggatatacttcgtggtcttcattgtgggcagacttctgcgaagaagtgga

SEQ ID NO: 513946 - DNA, 55 bp, Artificial
  Synthetic oligonucleotide
gcacctcatcgtacagcgaacttcatgtaaggctgccaactctcctgtccgttgt

SEQ ID NO: 513947 - DNA, 55 bp, Artificial
  Synthetic oligonucleotide
gactctcggatggctaacacttcttctaccacaacctccaggataccgaagagcc

SEQ ID NO: 513948 - DNA, 55 bp, Artificial
  Synthetic oligonucleotide
cttgtgggaaaccttgccacaaactgcactgaagaagtagtaagaatcgcagcac

SEQ ID NO: 513949 - DNA, 55 bp, Artificial
  Synthetic oligonucleotide
ctctagatgataactcttggggcgcccggtgtaagtgagggtgattgactgggcc

SEQ ID NO: 513950 - DNA, 55 bp, Artificial
  Synthetic oligonucleotide
ctcgaagggtgtatccaggagttcactttcattggagtttgcatacctttcctca

SEQ ID NO: 513951 - DNA, 55 bp, Artificial
  Synthetic oligonucleotide
cgtctcgacattcaagccatctcgaatccaatccctaacgacattccgcacgaca

SEQ ID NO: 513952 - DNA, 55 bp, Artificial
  Synthetic oligonucleotide
cggtatcggttaaagcttctaatgactagccgacctctattgtggtgtcgatatg

SEQ ID NO: 513953 - DNA, 55 bp, Artificial
  Synthetic oligonucleotide
cgcgctactgtgccgttgactaggtagttgccagagccgaataccgtagactaaa

SEQ ID NO: 513954 - DNA, 55 bp, Artificial
  Synthetic oligonucleotide
ccattattctcgaggcaattgtcgaaatggaagtacatgtcccttctcgcacact

SEQ ID NO: 513955 - DNA, 55 bp, Artificial
  Synthetic oligonucleotide
aaacatagactagggaacttacaatgcatacattgcaggaggcgcaaaacgaagg

SEQ ID NO: 513956 - DNA, 55 bp, Artificial
  Synthetic oligonucleotide
aaacttcgtacacattttagcaacgctcgtactgctaccgatatacgcaaaagca

SEQ ID NO: 513957 - DNA, 55 bp, Artificial
  Synthetic oligonucleotide
cataaacacgttcaagattcagcgatgctgggcttatatgtctgacaggacccat

SEQ ID NO: 513958 - DNA, 55 bp, Artificial
  Synthetic oligonucleotide
cacgcccattgtcgcaagagtgggttgtctgcattctgcaagtgcgtcaaacagt

SEQ ID NO: 513959 - DNA, 55 bp, Artificial
  Synthetic oligonucleotide
aggtccggattagatgcgcccattctgcttgcaatgaatacgacctctgtgtaca

SEQ ID NO: 513960 - DNA, 55 bp, Artificial
  Synthetic oligonucleotide
atactgacgcattggctatttacaccacaggctatcgctacgagaatgggtggcg

SEQ ID NO: 513961 - DNA, 54 bp, Artificial
  Synthetic oligonucleotide
ttttacgtccgttggaaagcgcagtgttgccggaatggcttcagggtatgtttt

SEQ ID NO: 513962 - DNA, 54 bp, Artificial
  Synthetic oligonucleotide
taagttaccttacgtttgagaatacaggagagcgcgcttgggactaatgagctg

SEQ ID NO: 513963 - DNA, 53 bp, Artificial
  Synthetic oligonucleotide
gtagttgtcggtcttgtatgggtgaggggcgaatttgtcttcgaatgtcaaaa

SEQ ID NO: 513964 - DNA, 52 bp, Artificial
  Synthetic oligonucleotide
aaatagcttgcacccatcactgagtaacttttacgtatactggtgcgtcaaa

SEQ ID NO: 513965 - DNA, 52 bp, Artificial
  Synthetic oligonucleotide
ggccttcctcttagaaattctccaagtgtgttactcaaactccgagctctag

SEQ ID NO: 513966 - DNA, 51 bp, Artificial
  Synthetic oligonucleotide
cattccatgcctagtcttgttgcgatttaacgcgcactgccctttgaaggt

SEQ ID NO: 513967 - DNA, 55 bp, Artificial
  Synthetic oligonucleotide
tggacacgcatccctaattggaatagaatgatgtgtggcaatcttggctctagat

SEQ ID NO: 513968 - DNA, 55 bp, Artificial
  Synthetic oligonucleotide
tcgtgagcaccaaatgctcaaacatgtcaaactcaatgtcctcttcgctcctgtc

SEQ ID NO: 513969 - DNA, 55 bp, Artificial
  Synthetic oligonucleotide
gttcatcgcgtgttcccttagcttccggcacagggaattgactatagcaccacag

SEQ ID NO: 513970 - DNA, 55 bp, Artificial
  Synthetic oligonucleotide
gtgcaaaggttatatcaatggaaactgagactactcgagaaggagtcgtgggatt

SEQ ID NO: 513971 - DNA, 55 bp, Artificial
  Synthetic oligonucleotide
gtatctgatcccatgaccaacaccccaaggtaccaccgacatattagcccgttac

SEQ ID NO: 513972 - DNA, 55 bp, Artificial
  Synthetic oligonucleotide
gtaccaacagagtcggacctgagacctctctgatactaaatgtgagctcctgagt

SEQ ID NO: 513973 - DNA, 55 bp, Artificial
  Synthetic oligonucleotide
ggggaggagctacgacggtgaccgatgtgagtagggtttcgtcgcacagagcgtc

SEQ ID NO: 513974 - DNA, 55 bp, Artificial
  Synthetic oligonucleotide
ggagacgagtgctatcttgttggtggtaagtttaattcttccatgctccgactac

SEQ ID NO: 513975 - DNA, 55 bp, Artificial
  Synthetic oligonucleotide
gctgggtgacctcccatgaagtccaaactcaggagcttacatactgtaaacaggc

SEQ ID NO: 513976 - DNA, 55 bp, Artificial
  Synthetic oligonucleotide
gctgccgacgagatccaagctgacaatcccagcgtctctagaatctgtgagttcg

SEQ ID NO: 513977 - DNA, 55 bp, Artificial
  Synthetic oligonucleotide
gctctagaagcggaagatactgtggaactcggcttgtgtttactcggactaacct

SEQ ID NO: 513978 - DNA, 55 bp, Artificial
  Synthetic oligonucleotide
gcctcggtgccattccttacctgtgagaaacacgtcgatagacagctttaagaac

SEQ ID NO: 513979 - DNA, 55 bp, Artificial
  Synthetic oligonucleotide
gcaaggagatgggtaccccattgactagtataggatgaagcttgggtttagaggc

SEQ ID NO: 513980 - DNA, 55 bp, Artificial
  Synthetic oligonucleotide
gatgagcccacctagtcaatgcaagtcaatacagagtcaactctgtcaatgcgca

SEQ ID NO: 513981 - DNA, 55 bp, Artificial
  Synthetic oligonucleotide
gatgaagccggtccaagtcctctcctcaccgtcaagtggttcacatctataggtg

SEQ ID NO: 513982 - DNA, 55 bp, Artificial
  Synthetic oligonucleotide
gagtccagattgggtgatggcgtgattggcaagagttgttgcagcgaacgtgttg

SEQ ID NO: 513983 - DNA, 55 bp, Artificial
  Synthetic oligonucleotide
gagctctactccagcatctagagagacacaaggacaaggtaatagatgtgtatgg

SEQ ID NO: 513984 - DNA, 55 bp, Artificial
  Synthetic oligonucleotide
cgacactcaaaagtaccatcgacatatcaacttgttatgctaaggctatgcccaa

SEQ ID NO: 513985 - DNA, 55 bp, Artificial
  Synthetic oligonucleotide
cctccattggtccccactaaatcccactctatccacaatagtgtttgccaacacc

SEQ ID NO: 513986 - DNA, 55 bp, Artificial
  Synthetic oligonucleotide
ccgcgtcctccaatgcagaaccttatgcatgctagattgaatctacaagtaggcg

SEQ ID NO: 513987 - DNA, 55 bp, Artificial
  Synthetic oligonucleotide
cccctcgctccctcgaaccagtggagcacgtccccattgcaggcctcaaaatgct

SEQ ID NO: 513988 - DNA, 55 bp, Artificial
  Synthetic oligonucleotide
ccatgggactgcagtacgagtggatgactagttgcctcacatggaatagctagtc

SEQ ID NO: 513989 - DNA, 55 bp, Artificial
  Synthetic oligonucleotide
acttgacagggaaaggactaatggagtcagcctgctactttgggtgtcacctagc

SEQ ID NO: 513990 - DNA, 55 bp, Artificial
  Synthetic oligonucleotide
accttgtggtactggcgaatgcccaaggaagaagatttagggtggaggcccagga

SEQ ID NO: 513991 - DNA, 53 bp, Artificial
  Synthetic oligonucleotide
taatgatgcatagactgcaattagatgtttctctcccagcagttcagactcgt

SEQ ID NO: 513992 - DNA, 51 bp, Artificial
  Synthetic oligonucleotide
ctgagctcgtcatcccatctcggtaggcacaatatcaaaagccggagcaca

SEQ ID NO: 513993 - DNA, 50 bp, Artificial
  Synthetic oligonucleotide
caaacggagatgaaagtgttgccgcgtccctggagagactcttctgttgt

SEQ ID NO: 513994 - DNA, 55 bp, Artificial
  Synthetic oligonucleotide
tacaacacctgaagatatgtagatactgcgcacgctgtgttacctatgtgtactg

SEQ ID NO: 513995 - DNA, 55 bp, Artificial
  Synthetic oligonucleotide
gttgaggcaaaagtttggaacattagcatataagctccactgtctagcttgcagc

SEQ ID NO: 513996 - DNA, 55 bp, Artificial
  Synthetic oligonucleotide
gggtctgtaaatgttagtatcgtccaactcgtagcagagaaccgggcaaccaacc

SEQ ID NO: 513997 - DNA, 55 bp, Artificial
  Synthetic oligonucleotide
ggggccagtctggtaaatggatggtctgacttacctccaacagtcagcgggacgg

SEQ ID NO: 513998 - DNA, 55 bp, Artificial
  Synthetic oligonucleotide
gcctggcgcataacatatccgaggagccatcaaggtacctcgtacctgggacttc

SEQ ID NO: 513999 - DNA, 55 bp, Artificial
  Synthetic oligonucleotide
gccgaagttccactgtcaggggttatttgagttagttactgcaactggttccgag

SEQ ID NO: 514000 - DNA, 55 bp, Artificial
  Synthetic oligonucleotide
gacggtacgttctacctctcccatacacactgactggtaggccagcaactaagac

SEQ ID NO: 514001 - DNA, 55 bp, Artificial
  Synthetic oligonucleotide
cggtctccgagcgggagtgaagaatgttgctcccctaccatgctggttgaggtgg

SEQ ID NO: 514002 - DNA, 55 bp, Artificial
  Synthetic oligonucleotide
cgccttatccactccggtatactaaccttttaggattcctctgtccaaagacgcc

SEQ ID NO: 514003 - DNA, 55 bp, Artificial
  Synthetic oligonucleotide
ccgtcgaagctgtaaggttgagactgccggaaggaaaaggagatggtcagtcaga

SEQ ID NO: 514004 - DNA, 55 bp, Artificial
  Synthetic oligonucleotide
ccctgacagtgtacgagtgcttgtccatctcggggaggtaggcagtgtggccaag

SEQ ID NO: 514005 - DNA, 55 bp, Artificial
  Synthetic oligonucleotide
ccataaccacgatctggcgcttcactgccaacctgtcgcgtccgctatcgcatgc

SEQ ID NO: 514006 - DNA, 55 bp, Artificial
  Synthetic oligonucleotide
cagctggagatctaatgcaaatacatcgacgtagctaccaccgactgaagacggg

SEQ ID NO: 514007 - DNA, 55 bp, Artificial
  Synthetic oligonucleotide
caccgctgagtcgtacatagttggcacttttcctaatggaaagaccttggctgcc

SEQ ID NO: 514008 - DNA, 55 bp, Artificial
  Synthetic oligonucleotide
acgatgatgctgatgtcagttgttgttaggtgagctggcgagggcatgaggcatc

SEQ ID NO: 514009 - DNA, 53 bp, Artificial
  Synthetic oligonucleotide
ggcgttatgacatacgagtcggacctacacggtgtacatcatcctgtccttac

SEQ ID NO: 514010 - DNA, 52 bp, Artificial
  Synthetic oligonucleotide
ccaccaacacccttgctctttgtagcggtactctccgccatctccgaatccc

SEQ ID NO: 514011 - DNA, 55 bp, Artificial
  Synthetic oligonucleotide
ttctctccgtcaactctgcgcgcgagggccaccccaatgttctggcagtccatgg

SEQ ID NO: 514012 - DNA, 55 bp, Artificial
  Synthetic oligonucleotide
tgcgatgttacgattcttacttctgtgagaaaccgggtgacctctgggaagacgg

SEQ ID NO: 514013 - DNA, 55 bp, Artificial
  Synthetic oligonucleotide
tcgggaattggtggtagtagatgaccaaagtgttctagtaaactgcttgaatttg

SEQ ID NO: 514014 - DNA, 55 bp, Artificial
  Synthetic oligonucleotide
gttgggaggtcttccactgtttctagcgcttcgagactggacatggagggcagtt

SEQ ID NO: 514015 - DNA, 55 bp, Artificial
  Synthetic oligonucleotide
ggtgaactagtgtattgcgtaaaagtttaattcgatgacctgacatagcccggtg

SEQ ID NO: 514016 - DNA, 55 bp, Artificial
  Synthetic oligonucleotide
ggcgacgtctggtcaaccgtgtggagggcggcgagaattgtggcagtatccaggt

SEQ ID NO: 514017 - DNA, 55 bp, Artificial
  Synthetic oligonucleotide
gccaacaggtcaatctggctctcccaacagcggtacctcagtcaaacattgcaga

SEQ ID NO: 514018 - DNA, 55 bp, Artificial
  Synthetic oligonucleotide
gcaacctggtattccccttttctcatggcggcgtataaccctgagactgagcaat

SEQ ID NO: 514019 - DNA, 55 bp, Artificial
  Synthetic oligonucleotide
gaggcagcactgtgtattctgcagaaaaggacaagaccgtagtcttctggggtgc

SEQ ID NO: 514020 - DNA, 55 bp, Artificial
  Synthetic oligonucleotide
gaatcccattctcaaaaggtgactacgagcaaatagatatagctcatacctgcat

SEQ ID NO: 514021 - DNA, 55 bp, Artificial
  Synthetic oligonucleotide
ctgttttcttatatgtttggggaggatatacggctatggtgttgccagttatgcc

SEQ ID NO: 514022 - DNA, 55 bp, Artificial
  Synthetic oligonucleotide
cgggatggcataaaactcgctccagccatgggtactggcgtaaaactcaactcgg

SEQ ID NO: 514023 - DNA, 55 bp, Artificial
  Synthetic oligonucleotide
cgatgtcaaccaagcacagcagtatacgtaggagatagtggtgtccaagctgccg

SEQ ID NO: 514024 - DNA, 55 bp, Artificial
  Synthetic oligonucleotide
cgagatgcgaatgggagtgtgacgggaatggtcgcgcttgccactgatgtgacgg

SEQ ID NO: 514025 - DNA, 55 bp, Artificial
  Synthetic oligonucleotide
acttcgctcaaagagcattataccctacgagcattaattccaaagcgggtcgggt

SEQ ID NO: 514026 - DNA, 51 bp, Artificial
  Synthetic oligonucleotide
gggcacctcattcccgcttactgcgaaccggtccctattgcggccgtcatt

SEQ ID NO: 514027 - DNA, 51 bp, Artificial
  Synthetic oligonucleotide
tctcatatccaacatgtcctcagtctcatccgcagctcccttgcttttccc

SEQ ID NO: 514028 - DNA, 55 bp, Artificial
  Synthetic oligonucleotide
ttttcccctcctgtggcgtatgttcgatattgtggccctctttggcatggtctaa

SEQ ID NO: 514029 - DNA, 55 bp, Artificial
  Synthetic oligonucleotide
tatccgcgtatgttgcttgacctgacattctagaaataccgtggtcgtgcggcgc

SEQ ID NO: 514030 - DNA, 55 bp, Artificial
  Synthetic oligonucleotide
gtagctggcaagggctctgagtttgggttatgaatccagcctccatacgttccgc

SEQ ID NO: 514031 - DNA, 55 bp, Artificial
  Synthetic oligonucleotide
ggacaatatagtttgatgtctgggaagtctatctacggtgcaacattggtcaaaa

SEQ ID NO: 514032 - DNA, 55 bp, Artificial
  Synthetic oligonucleotide
gcttcagctgacggcttgttgccctcagtctgagctgctagacctttcgcatggt

SEQ ID NO: 514033 - DNA, 55 bp, Artificial
  Synthetic oligonucleotide
gctgcacaaggacatgctcgttcgcggcttctcatctgtcgctcatctatatcac

SEQ ID NO: 514034 - DNA, 55 bp, Artificial
  Synthetic oligonucleotide
gcgtttcctatcacgggcgaggcccaaagtctttgagtcagctctctaagtcgtg

SEQ ID NO: 514035 - DNA, 55 bp, Artificial
  Synthetic oligonucleotide
gagtccgatgattcgacccaggtcttccgcagggcagcaatccagtccctgtacg

SEQ ID NO: 514036 - DNA, 55 bp, Artificial
  Synthetic oligonucleotide
gacgagcaacgaccgtataccgaagtggcttgccggtttgaagtcactaggccac

SEQ ID NO: 514037 - DNA, 55 bp, Artificial
  Synthetic oligonucleotide
cgcgttatataaggcagaggccatcagcgaccgacaaacgtcacgtgaagtggcg

SEQ ID NO: 514038 - DNA, 55 bp, Artificial
  Synthetic oligonucleotide
ccctccacgtcacgatatctctccacagcaatccactagccacaccgcacgtaca

SEQ ID NO: 514039 - DNA, 55 bp, Artificial
  Synthetic oligonucleotide
ccatcagtacttctcacacgggcctccccagtggaagggtcgactcatcctgatc

SEQ ID NO: 514040 - DNA, 55 bp, Artificial
  Synthetic oligonucleotide
ccagtcaaagaggcgcactttctggtcctgtattgttacgccatacccataccgc

SEQ ID NO: 514041 - DNA, 55 bp, Artificial
  Synthetic oligonucleotide
cagtcgtacgaactcgagtagcgctttgcattgaaaacgtcgtcaatcccctgag

SEQ ID NO: 514042 - DNA, 55 bp, Artificial
  Synthetic oligonucleotide
ataccgtgactgtctgcactagcggaaggttgtcctgagtgcgtcggagcctgag

SEQ ID NO: 514043 - DNA, 54 bp, Artificial
  Synthetic oligonucleotide
gcgcccagtcataccgtttctatcgaccaatattgcggcactctttcgtcgtgg

SEQ ID NO: 514044 - DNA, 53 bp, Artificial
  Synthetic oligonucleotide
ggaataggccgatggttcgagcatatttggctgaggaatatttcgatgggcgt

SEQ ID NO: 514045 - DNA, 55 bp, Artificial
  Synthetic oligonucleotide
tttgacactgcgtccgtcgtcatgtgtgcgttggcatcacaactgattaccggac

SEQ ID NO: 514046 - DNA, 55 bp, Artificial
  Synthetic oligonucleotide
gtcaggcttgctctcccattggccagaagttaaggtaatgtccaatgtccacctg

SEQ ID NO: 514047 - DNA, 55 bp, Artificial
  Synthetic oligonucleotide
gcttttgaagccacgcagcagagtcatatatcaggcacaagagaacagcccaact

SEQ ID NO: 514048 - DNA, 55 bp, Artificial
  Synthetic oligonucleotide
gagcttcttaagcaggcacagtactcacctatgaccatcgagcagcaagtgccac

SEQ ID NO: 514049 - DNA, 55 bp, Artificial
  Synthetic oligonucleotide
gaagctcaccctgtctgccatctacaactggatctctggcacgttcagctactac

SEQ ID NO: 514050 - DNA, 55 bp, Artificial
  Synthetic oligonucleotide
cgtcatgttgcaatagtaccttgagagtgctgtcacttaacctgatcggcccggc

SEQ ID NO: 514051 - DNA, 55 bp, Artificial
  Synthetic oligonucleotide
cgctttcgagtgttccaaggctcttttgacacgtcctgataattggagcttcagc

SEQ ID NO: 514052 - DNA, 55 bp, Artificial
  Synthetic oligonucleotide
cgcgctggtcccagacactctccgaatacgactttatcataacgtacagagcggg

SEQ ID NO: 514053 - DNA, 55 bp, Artificial
  Synthetic oligonucleotide
cgaggcgcaaacagtcaacctgatcaattctgtggaaaacattgaccaagtcatg

SEQ ID NO: 514054 - DNA, 55 bp, Artificial
  Synthetic oligonucleotide
ccttgtcctttggcggccaagttacgtttggcagtggtatctttcctcggaaccg

SEQ ID NO: 514055 - DNA, 55 bp, Artificial
  Synthetic oligonucleotide
caaaacaacgagtgggtccagtcttccgccatatcatgtagagaataattagggc

SEQ ID NO: 514056 - DNA, 55 bp, Artificial
  Synthetic oligonucleotide
atcctttaccgatgacgagtcccgtcgggcgtacatggtttccctattgtcgggg

SEQ ID NO: 514057 - DNA, 54 bp, Artificial
  Synthetic oligonucleotide
ctcgcactgacgtcagcacatgactggattccagctatgctagcagtagtactg

SEQ ID NO: 514058 - DNA, 52 bp, Artificial
  Synthetic oligonucleotide
ctcggaggacatcccaatagtgctggcactcaaagcgatgggagtacaatct

SEQ ID NO: 514059 - DNA, 52 bp, Artificial
  Synthetic oligonucleotide
gcaagacttttataccgggcgaccaaattgtcaggggtaaacgtctctgcgg

SEQ ID NO: 514060 - DNA, 52 bp, Artificial
  Synthetic oligonucleotide
atgtaatgtcgtcgcccaacataccgagtttatgagatacaagggtcatatc

SEQ ID NO: 514061 - DNA, 51 bp, Artificial
  Synthetic oligonucleotide
acgggctcgaggcggtactctccaacattcccatactgtgctggcgctcat

SEQ ID NO: 514062 - DNA, 55 bp, Artificial
  Synthetic oligonucleotide
cggctgcacttttcttatctccgcatcccgtttgtctcagactcatcagcacgaa

SEQ ID NO: 514063 - DNA, 55 bp, Artificial
  Synthetic oligonucleotide
gtcgacaaccccttggaatcgaacctaccctctttgagggcaatccgctgtctga

SEQ ID NO: 514064 - DNA, 55 bp, Artificial
  Synthetic oligonucleotide
cgtgcgtcgctcgcggtttcccgaatggcgaggtttacctgaatgaaagctctcc

SEQ ID NO: 514065 - DNA, 55 bp, Artificial
  Synthetic oligonucleotide
ctatgttggatgggatcctctgtacggcttccagctctatcaatcagatccttcg

SEQ ID NO: 514066 - DNA, 55 bp, Artificial
  Synthetic oligonucleotide
ctcaggctcggatgcttgctcttttccagtgttcttcggctatgtaatagaagac

SEQ ID NO: 514067 - DNA, 55 bp, Artificial
  Synthetic oligonucleotide
ctggggacagtacggtggtcattatggatctaggacctattctcactggcagcag

SEQ ID NO: 514068 - DNA, 55 bp, Artificial
  Synthetic oligonucleotide
gaacgaacaccagccatcctatacagcagttagcgctatgacaatccgtgaagag

SEQ ID NO: 514069 - DNA, 55 bp, Artificial
  Synthetic oligonucleotide
gacctaagagccatatgagcgtaaaatggtcagtgaaagcatacacaggaatgcc

SEQ ID NO: 514070 - DNA, 55 bp, Artificial
  Synthetic oligonucleotide
gattgtcatctttaggagcagcggagataccgggaggagagtcggccatgagacg

SEQ ID NO: 514071 - DNA, 55 bp, Artificial
  Synthetic oligonucleotide
gcgcctcccatggagatggcaaatgttctaggcacccatcctctgaagagggctg

SEQ ID NO: 514072 - DNA, 55 bp, Artificial
  Synthetic oligonucleotide
gcgtaccctcgaggaacttaccatcgccctcaaacaagctcagcaagccgtggac

SEQ ID NO: 514073 - DNA, 55 bp, Artificial
  Synthetic oligonucleotide
gctgtgaggtactgtgcaggtacattcgcgtatacctcggtcatggtacttattg

SEQ ID NO: 514074 - DNA, 55 bp, Artificial
  Synthetic oligonucleotide
gtcagagtcatatgctgcctcaaactctcgccacagagcaaatttatgtcaggac

SEQ ID NO: 514075 - DNA, 55 bp, Artificial
  Synthetic oligonucleotide
gggttcaagctcgtttgaggggcgaggttgtacaacttgattccttgagattcga

SEQ ID NO: 514076 - DNA, 55 bp, Artificial
  Synthetic oligonucleotide
gtacgcagacatttccggcccagttaagtgctatcagcagggcgtatgaaggacc

SEQ ID NO: 514077 - DNA, 55 bp, Artificial
  Synthetic oligonucleotide
gtactccttggtaccggccttaccaccgaggtctcgggtgatagccttgccctca

SEQ ID NO: 514078 - DNA, 55 bp, Artificial; identical to SEQ ID NO: 278612
  Synthetic oligonucleotide

SEQ ID NO: 514079 - DNA, 55 bp, Artificial
  Synthetic oligonucleotide
aataagccccaattactatacctactgttggtcgttctgctgagacgtagcccca

SEQ ID NO: 514080 - DNA, 55 bp, Artificial
  Synthetic oligonucleotide
agcattaaacacgacgacttaccctcaaagcacactcgtctatatcggcagggac

SEQ ID NO: 514081 - DNA, 55 bp, Artificial
  Synthetic oligonucleotide
atgggtgctccttccttaaacgctctggcaaccattatgtcagtcacatggctgg

SEQ ID NO: 514082 - DNA, 55 bp, Artificial
  Synthetic oligonucleotide
caaaggctgtgtcagcaatcttgatattattgctcaagtggttcaaagcatctcg

SEQ ID NO: 514083 - DNA, 55 bp, Artificial
  Synthetic oligonucleotide
caacctcctaatcgtattcacactgtgcgactcttcggagcatgcgcgtaacctt

SEQ ID NO: 514084 - DNA, 55 bp, Artificial
  Synthetic oligonucleotide
cagtaaagttgttcaacaatgccccatactgctgtcggaaagccactccaagctc

SEQ ID NO: 514085 - DNA, 55 bp, Artificial
  Synthetic oligonucleotide
ccaggcaatgaaccacggcctttcatcccaacggcacagcatatgggttcactcc

SEQ ID NO: 514086 - DNA, 55 bp, Artificial
  Synthetic oligonucleotide
ccatctctaggactaaagattgattgtactccaggtcgactgaaccaagtatccg

SEQ ID NO: 514087 - DNA, 55 bp, Artificial
  Synthetic oligonucleotide
ccccgagaaactagctcgggcattgcaaggatcgaatgtcagaaacttcatggtc

SEQ ID NO: 514088 - DNA, 55 bp, Artificial
  Synthetic oligonucleotide
cccgaggctcttcctcctcgagatttcagcgggcctctatgcatggtccggtcac

SEQ ID NO: 514089 - DNA, 55 bp, Artificial
  Synthetic oligonucleotide
cccgggatcttggagacacatctagatattcttcgaagcctgcaaattcctccgg

SEQ ID NO: 514090 - DNA, 55 bp, Artificial
  Synthetic oligonucleotide
cgaacgatatccttacatctccatggtatgttccacaatctgcagctcacattat

SEQ ID NO: 514091 - DNA, 55 bp, Artificial
  Synthetic oligonucleotide
cgccgaagtggtatccccagcagttaactcggtctccagctgattcaccttaggc

SEQ ID NO: 514092 - DNA, 55 bp, Artificial
  Synthetic oligonucleotide
cgcttaccaatggacagcactgccagactgacatactgggcgacgtaagactgcc

SEQ ID NO: 514093 - DNA, 54 bp, Artificial
  Synthetic oligonucleotide
aagagggcatatgagatacgtcagacaaccggcgggagccatagactatgcacc

SEQ ID NO: 514094 - DNA, 53 bp, Artificial
  Synthetic oligonucleotide
acaagttccgccacttagacctaagcctgcacggcctgaatatgcacagtacg

SEQ ID NO: 514095 - DNA, 51 bp, Artificial
  Synthetic oligonucleotide
tatacccaaacctgaaagtcctaaaggcgatattaatgcccgtccatcccc

SEQ ID NO: 514096 - DNA, 51 bp, Artificial
  Synthetic oligonucleotide
cgtaacgcaaaagacgatctgttggctggtaaacacgtcctcgagaagcct

SEQ ID NO: 514097 - DNA, 51 bp, Artificial
  Synthetic oligonucleotide
cgccagtgctatggagaacgtgcaaatgggcctacggtgagccttcagacc

SEQ ID NO: 514098 - DNA, 50 bp, Artificial
  Synthetic oligonucleotide
ggacagggtaagagagcgttcctaggacaccccaagagagttgcacgaaa

SEQ ID NO: 514099 - DNA, 55 bp, Artificial
  Synthetic oligonucleotide
gcctcccctaatacttctgctaactgtcggtacagacactatgcacatactccca

SEQ ID NO: 514100 - DNA, 55 bp, Artificial
  Synthetic oligonucleotide
gcctggaatccatatgttgggacctcttgtgcatctctctggttgggttactatg

SEQ ID NO: 514101 - DNA, 55 bp, Artificial
  Synthetic oligonucleotide
gcgaaagggagtcgatctttaatgtccgttgccagcacggctgttatggcgaggc

SEQ ID NO: 514102 - DNA, 55 bp, Artificial
  Synthetic oligonucleotide
gcgaccgtcctcaattccagtgctcccactgatgcggcccctggtaggtaacagt

SEQ ID NO: 514103 - DNA, 55 bp, Artificial
  Synthetic oligonucleotide
gcgagctgaagagagaccatgcaaaagtgccgggccgtcaattccgccctggggt

SEQ ID NO: 514104 - DNA, 55 bp, Artificial
  Synthetic oligonucleotide
gcggcattggagggattactcatgcgtggcgcgcccctgaaattcgggaggagac

SEQ ID NO: 514105 - DNA, 55 bp, Artificial
  Synthetic oligonucleotide
gcgtagttatctttcctttctgttagttctacgctgatatccgctgcgtacgggc

SEQ ID NO: 514106 - DNA, 55 bp, Artificial
  Synthetic oligonucleotide
gcgtcgaatagtagcacagaggagggatacagtttgatagaggggtaatccttga

SEQ ID NO: 514107 - DNA, 55 bp, Artificial
  Synthetic oligonucleotide
gcgttaaggacgacctccgatagattattgctcacggaagtcatgacttgcctcc

SEQ ID NO: 514108 - DNA, 55 bp, Artificial
  Synthetic oligonucleotide
gcgttgcaccaggagattggctctaaggtgtctgtcgcccgattcaaccatatac

SEQ ID NO: 514109 - DNA, 55 bp, Artificial
  Synthetic oligonucleotide
gctcccctgacaacgaaacttccctagtgtcacatagccgaggggaatctggggt

SEQ ID NO: 514110 - DNA, 55 bp, Artificial
  Synthetic oligonucleotide
gctctacgagaacaatgccatgcagaaacatagccagtactacccgaccacccca

SEQ ID NO: 514111 - DNA, 55 bp, Artificial
  Synthetic oligonucleotide
gctctccgagaccgcattcagtctactctcgacgcaaatgcggataatcgacgcc

SEQ ID NO: 514112 - DNA, 55 bp, Artificial
  Synthetic oligonucleotide
ggaaatggttgcggaaagaactgtactacacagtaagtgtgacggtccttattcg

SEQ ID NO: 514113 - DNA, 55 bp, Artificial
  Synthetic oligonucleotide
ggaatatccaaacggaggatcgtaagacaccattctcagaggtggtggaaagggg

SEQ ID NO: 514114 - DNA, 55 bp, Artificial
  Synthetic oligonucleotide
ggacctgtggctttacgtctcgctacctgcattggagcctacgttgacctagacc

SEQ ID NO: 514115 - DNA, 55 bp, Artificial
  Synthetic oligonucleotide
ggactttctaccacgtaagctacaagttcagattgcgtttggcgtaagaggctga

SEQ ID NO: 514116 - DNA, 55 bp, Artificial
  Synthetic oligonucleotide
ggagtatcgattgaccatttgggtgttcccttcatgaatgataggacgatggccc

SEQ ID NO: 514117 - DNA, 55 bp, Artificial
  Synthetic oligonucleotide
ggattccccggccgtctttctgcggtaggccacaccctgctcgctctaacccatt

SEQ ID NO: 514118 - DNA, 55 bp, Artificial
  Synthetic oligonucleotide
ggcagtggctctcttcgtcatgattcgacggacactactcgtcgcttgaactaaa

SEQ ID NO: 514119 - DNA, 55 bp, Artificial
  Synthetic oligonucleotide
ggccgtgatccacaacagatacccactgttacaccagggatagtggcatcttgat

SEQ ID NO: 514120 - DNA, 55 bp, Artificial
  Synthetic oligonucleotide
ggcctcttttgtacacggaagatggcggtacgaggaaaactgtcaacccagcagc

SEQ ID NO: 514121 - DNA, 55 bp, Artificial
  Synthetic oligonucleotide
ggcctttgcacacatcgtttgcttcaccattcgtgtcatcaatgtcagcagtccc

SEQ ID NO: 514122 - DNA, 55 bp, Artificial
  Synthetic oligonucleotide
ggcgtgtcttctcatcttgccgagcgggctccgctgattgtgccccgtggactaa

SEQ ID NO: 514123 - DNA, 55 bp, Artificial
  Synthetic oligonucleotide
gggagtttatcaattgctcgtacctcaaatcgaaaatgggcttgtcgggttggtg

SEQ ID NO: 514124 - DNA, 55 bp, Artificial
  Synthetic oligonucleotide
cttcctaaatgggtctgcaataacgggcgacatcgcgaaatgagtcgagtgaccc

SEQ ID NO: 514125 - DNA, 55 bp, Artificial
  Synthetic oligonucleotide
cttcgtattctctatactctgcccttgcagcttcttacaccttcacgctacacgg

SEQ ID NO: 514126 - DNA, 55 bp, Artificial
  Synthetic oligonucleotide
cttgagtttcctagacggaatagaggcgctatgtagagcatgaatagaatgccag

SEQ ID NO: 514127 - DNA, 55 bp, Artificial
  Synthetic oligonucleotide
ctttcagttcaatacatcggaagcacgcatgacgtcttgacgattgtcgtctact

SEQ ID NO: 514128 - DNA, 55 bp, Artificial
  Synthetic oligonucleotide
gaaaaggggcttccgattagttctacagacgagactatcatcgccctacgaccag

SEQ ID NO: 514129 - DNA, 55 bp, Artificial
  Synthetic oligonucleotide
gacagatatggctgaagggtaagcggtcaactctatatagttccgagacagctgc

SEQ ID NO: 514130 - DNA, 55 bp, Artificial
  Synthetic oligonucleotide
gacgcgcagccccgaacccaagactgtaagatttgctacaccgttggaatcaccg

SEQ ID NO: 514131 - DNA, 55 bp, Artificial
  Synthetic oligonucleotide
gacggctttagtagccaggaggcgttgtggatgattgggtccagtgtggacgggg

SEQ ID NO: 514132 - DNA, 55 bp, Artificial
  Synthetic oligonucleotide
gactcgatgccacgatgtctgccatctcatgcctcatcccaataggtcccagagc

SEQ ID NO: 514133 - DNA, 55 bp, Artificial
  Synthetic oligonucleotide
gactcgtatgcagggtctctgcaagggtttccctcgggaatcccactcgggttgc

SEQ ID NO: 514134 - DNA, 55 bp, Artificial
  Synthetic oligonucleotide
gagccaccgaactatttgaaccgtgtttcccatctgaaaaccctaagtgaccaac

SEQ ID NO: 514135 - DNA, 55 bp, Artificial
  Synthetic oligonucleotide
gaggggagtactgtcagggtgctgctatagataggagttagtattactaggaagg

SEQ ID NO: 514136 - DNA, 55 bp, Artificial
  Synthetic oligonucleotide
gagttagcgggtatatcaccaatcgaagaaaaggcgataacagcggattctaagc

SEQ ID NO: 514137 - DNA, 55 bp, Artificial
  Synthetic oligonucleotide
gatcactgtaagcatcgaagcctgtatgctgagggcgagccaggatgaatgggcg

SEQ ID NO: 514138 - DNA, 55 bp, Artificial
  Synthetic oligonucleotide
gatccctgtccgaggctacgcggcctaagctacccgccggaacatcaccacaatg

SEQ ID NO: 514139 - DNA, 55 bp, Artificial
  Synthetic oligonucleotide
gatcgtcagtgtaatttctgcggagattaggcaggagaattcctccaggcagatg

SEQ ID NO: 514140 - DNA, 55 bp, Artificial
  Synthetic oligonucleotide
gcaagccttacctaaacgggagtgagctttatctaaaagggtgcgaaccttacct

SEQ ID NO: 514141 - DNA, 55 bp, Artificial
  Synthetic oligonucleotide
gcaagcgactctggtagcattcgcagtaaccggactggaatctcgacgactcatc

SEQ ID NO: 514142 - DNA, 55 bp, Artificial
  Synthetic oligonucleotide
gcacgttcatagttatatttctgcgagaactttgattcaatctctgggcgacgtt

SEQ ID NO: 514143 - DNA, 55 bp, Artificial
  Synthetic oligonucleotide
gcactagaggctttgtagcttgctttctaggctaaggtagtggtggaggaagtac

SEQ ID NO: 514144 - DNA, 55 bp, Artificial
  Synthetic oligonucleotide
gcagacgatcaacaaagtattgtccaatatgccacgagataatttgtacggcaga

SEQ ID NO: 514145 - DNA, 55 bp, Artificial
  Synthetic oligonucleotide
gcaggaagcgtcgccttttgaatcatggtaggtggcccgcagagaagtgctacat

SEQ ID NO: 514146 - DNA, 55 bp, Artificial
  Synthetic oligonucleotide
gccctctgacggaggtgtttctttaacaaacgtaaaggcagaatcaagagtgtca

SEQ ID NO: 514147 - DNA, 55 bp, Artificial
  Synthetic oligonucleotide
gcctaagcggcccaaagtaacgatctgcaaccgtccccgacgggacgtcgtcagt

SEQ ID NO: 514148 - DNA, 55 bp, Artificial
  Synthetic oligonucleotide
gcctactgcgcctaccggcataagcttctcatggttgtttgggtcgacgatccaa

SEQ ID NO: 514149 - DNA, 55 bp, Artificial
  Synthetic oligonucleotide
gcctatcaagtacgtaatgtgagtaaccgttctgcctagtccaccgtacaaggac

SEQ ID NO: 514150 - DNA, 55 bp, Artificial
  Synthetic oligonucleotide
gttgacgctaactggaagtagatcatgagggttagggtagtatatacgccgttgc

SEQ ID NO: 514151 - DNA, 55 bp, Artificial
  Synthetic oligonucleotide
gttgatgtcttgacgaagcttccagtagtgccagtcgtagtctggggtcggaaca

SEQ ID NO: 514152 - DNA, 55 bp, Artificial
  Synthetic oligonucleotide
gttgctccagctgcgcattgtgtgctcggatctccaattctcgttcatgtggagt

SEQ ID NO: 514153 - DNA, 55 bp, Artificial
  Synthetic oligonucleotide
gttgtaactcaattaagcttatcgaacggccttacattgaatgtgacggtgcgtc

SEQ ID NO: 514154 - DNA, 55 bp, Artificial
  Synthetic oligonucleotide
gttgttccgtctaacatccacaagtagcttagcggatcttggccttagggtctgg

SEQ ID NO: 514155 - DNA, 55 bp, Artificial
  Synthetic oligonucleotide
gtttacgtcgtgatggccgatgggcatgctcatgtagagacagaccctgtgctcc

SEQ ID NO: 514156 - DNA, 55 bp, Artificial
  Synthetic oligonucleotide
tacctagataccttgatcgacagacaaaaccacgctacttgtcttcatgatagcc

SEQ ID NO: 514157 - DNA, 55 bp, Artificial
  Synthetic oligonucleotide
tacgtcactgcatactatcgctgtgtcgaaagaacatacagagtatgatggtgat

SEQ ID NO: 514158 - DNA, 55 bp, Artificial
  Synthetic oligonucleotide
taggctcgaggtctagccgttacatggtagaagaacctgatggaacccgaaggcg

SEQ ID NO: 514159 - DNA, 55 bp, Artificial
  Synthetic oligonucleotide
tatcgtcgaactgcgcacaatgtctccaatcctcatagcaactgctatcgggctg

SEQ ID NO: 514160 - DNA, 55 bp, Artificial
  Synthetic oligonucleotide
tattggcgaaaacgtcggggcccacttggcggaaggtgcccattgagcataagta

SEQ ID NO: 514161 - DNA, 55 bp, Artificial
  Synthetic oligonucleotide
tcagcagacgcaatctgccgtcgcatcagctgagaagagcccggtctttgaatcg

SEQ ID NO: 514162 - DNA, 55 bp, Artificial
  Synthetic oligonucleotide
tccgatgcaactggatgtgagaatgagaatatcgtcctggcatttgagcacatgt

SEQ ID NO: 514163 - DNA, 55 bp, Artificial
  Synthetic oligonucleotide
tccgtgtggacgccattagaatggttgttgttcctccaggttgaaacttttgcgg

SEQ ID NO: 514164 - DNA, 55 bp, Artificial
  Synthetic oligonucleotide
tctctgtgactggtggcgcacaggttccctcagttggggcctcgcttcaggaacg

SEQ ID NO: 514165 - DNA, 55 bp, Artificial
  Synthetic oligonucleotide
tctggcaacgacccttaccatcgggcatgcagttgctaccgcaatgtctgtgcgc

SEQ ID NO: 514166 - DNA, 55 bp, Artificial
  Synthetic oligonucleotide
tctggttcgcactattcaatgccaaccatatcctccactcccctcgaccaaggat

SEQ ID NO: 514167 - DNA, 55 bp, Artificial
  Synthetic oligonucleotide
tgacattccgtggttagacacgctgtatgttgagtaacatggtaaacctgcagaa

SEQ ID NO: 514168 - DNA, 55 bp, Artificial
  Synthetic oligonucleotide
tgcaccaggctcctcctgatccgttggacagatcagatgcaatggcacgaaccat

SEQ ID NO: 514169 - DNA, 55 bp, Artificial
  Synthetic oligonucleotide
tgtacgtaagggctatcaaaggtaggaaggattagggttcgggacagcgtgaccc

SEQ ID NO: 514170 - DNA, 55 bp, Artificial
  Synthetic oligonucleotide
tgttataacctgatcatccccttgcatgttctgtctattgttctcccttgcagcg

SEQ ID NO: 514171 - DNA, 55 bp, Artificial
  Synthetic oligonucleotide
ttaaagttcccctacaggagcagatgatattttgataaggctcaatgtcactggt

SEQ ID NO: 514172 - DNA, 55 bp, Artificial
  Synthetic oligonucleotide
ttatccaagcagacatatgccgttaccttggaaatgatgctctcgtaagacctgg

SEQ ID NO: 514173 - DNA, 55 bp, Artificial
  Synthetic oligonucleotide
ttcgccagtcagcagaccgtccaagttctgcgacacgcgttagatttacttcatc

SEQ ID NO: 514174 - DNA, 55 bp, Artificial
  Synthetic oligonucleotide
tttggcctgtcattcctgacccactgtgcacgcggacggtttcatgcaccagaca

SEQ ID NO: 514175 - DNA, 55 bp, Artificial
  Synthetic oligonucleotide
gggccagggcatcccacccagcaggctagataatgatcaccttactgcactgccc

SEQ ID NO: 514176 - DNA, 55 bp, Artificial
  Synthetic oligonucleotide
gggccttgtccgacagtggggctttgttgctaagtggaaaggttctgttagctct

SEQ ID NO: 514177 - DNA, 55 bp, Artificial
  Synthetic oligonucleotide
ggggagatatgcgctacggcgctataccaggctagtactttgaaggcagcaagag

SEQ ID NO: 514178 - DNA, 55 bp, Artificial
  Synthetic oligonucleotide
ggggcatgaatcccgcgactcgtgcggctgttgcttactgcttggccaaaggaca

SEQ ID NO: 514179 - DNA, 55 bp, Artificial
  Synthetic oligonucleotide
gggtgagttgagcattagatgcgaacggtgcaggatccacctttgccgcgaggta

SEQ ID NO: 514180 - DNA, 55 bp, Artificial
  Synthetic oligonucleotide
ggtaacctacccgaaaacctatataggcagattagctaggcctgaaaacctgccc

SEQ ID NO: 514181 - DNA, 55 bp, Artificial
  Synthetic oligonucleotide
ggtcaacaggatcgcccacgttagcgtcttatcacgcaagataagccggcggtcg

SEQ ID NO: 514182 - DNA, 55 bp, Artificial
  Synthetic oligonucleotide
ggtccgcgaggcatcttgactgctttgtcgacttgaacccggttagttgtcgaag

SEQ ID NO: 514183 - DNA, 55 bp, Artificial
  Synthetic oligonucleotide
ggtcgaagtgggcattagccggaatcctcggactgggatgtgtgtaagtacggcg

SEQ ID NO: 514184 - DNA, 55 bp, Artificial
  Synthetic oligonucleotide
ggtcgggtagtactggctatgtttctgcatggcattgttctcgtagagctgtgcc

SEQ ID NO: 514185 - DNA, 55 bp, Artificial
  Synthetic oligonucleotide
ggtgcgattccccttcttcctccattagatcataaatatgtgactcctcctctcg

SEQ ID NO: 514186 - DNA, 55 bp, Artificial
  Synthetic oligonucleotide
ggttctaggccattgagcctacatattccggctgggaatttcccaccagctcgcc

SEQ ID NO: 514187 - DNA, 55 bp, Artificial
  Synthetic oligonucleotide
ggttgcgaggttgatcgttgcaaagtaaagaatatatgtcgcggccgcttgtgcc

SEQ ID NO: 514188 - DNA, 55 bp, Artificial
  Synthetic oligonucleotide
gtaacgggcatctcggacctccttcaacgtgcgatcaatatcgtaagtgattgat

SEQ ID NO: 514189 - DNA, 55 bp, Artificial
  Synthetic oligonucleotide
gtagagcgtagggtatgatattgggtgaatatggcttcatgaacatggaatgacc

SEQ ID NO: 514190 - DNA, 55 bp, Artificial
  Synthetic oligonucleotide
gtatagtaacgtccgccagtgtgctctaaagatcatcgactatgagggacgatca

SEQ ID NO: 514191 - DNA, 55 bp, Artificial
  Synthetic oligonucleotide
gtatcagtataacatcgagccgattccagggtggaaaatgttccggacagcatcc

SEQ ID NO: 514192 - DNA, 55 bp, Artificial
  Synthetic oligonucleotide
gtcattcttgacccactgtgcacgcggacggtttcatgcaccagacaacgtgggc

SEQ ID NO: 514193 - DNA, 55 bp, Artificial
  Synthetic oligonucleotide
gtcccgctgagccgagcgattaccgaccatagaccttctgacgcattcgcgatgg

SEQ ID NO: 514194 - DNA, 55 bp, Artificial
  Synthetic oligonucleotide
gtcgaaggaggctcgatatcgtcggatgtaatgattggaggtgtgtttgccgggg

SEQ ID NO: 514195 - DNA, 55 bp, Artificial
  Synthetic oligonucleotide
gtctatgatggtcctgtctggttagtattggaaacagcactgatccagactcccc

SEQ ID NO: 514196 - DNA, 55 bp, Artificial
  Synthetic oligonucleotide
gtctcagcactcagcagatgtccccatgcacttaatctggataacggaaaagcga

SEQ ID NO: 514197 - DNA, 55 bp, Artificial
  Synthetic oligonucleotide
gtgccactgacgacgtcccgtcggagacggttgcagatcgttactttgggctgct

SEQ ID NO: 514198 - DNA, 55 bp, Artificial
  Synthetic oligonucleotide
gtggacgtcccacaaccttgccgtataccgtaagcaagtaactaagtgctgctac

SEQ ID NO: 514199 - DNA, 55 bp, Artificial
  Synthetic oligonucleotide
gttaccatgcggaacaacgtcctctcgaacagacatactgaagtcccctaatcaa

SEQ ID NO: 514200 - DNA, 55 bp, Artificial
  Synthetic oligonucleotide
gttctgagtcagatgctcactcgtcgtacagctgcggtgtactggccgcataggg

SEQ ID NO: 514201 - DNA, 55 bp, Artificial
  Synthetic oligonucleotide
caccacattgatcgtttcacggacgtatccttgttccaagtttgtgtttcgcact

SEQ ID NO: 514202 - DNA, 55 bp, Artificial
  Synthetic oligonucleotide
caccccagagtgcagatagtcgggaatatacagaacctagtacatatcagcagta

SEQ ID NO: 514203 - DNA, 55 bp, Artificial
  Synthetic oligonucleotide
cagcagttgcagggatgatactttaacatgcccggaatcatatggctaatggggt

SEQ ID NO: 514204 - DNA, 55 bp, Artificial
  Synthetic oligonucleotide
cagcgatatgggcttatagacggctgctaattgaggatcaacagcggagcaggat

SEQ ID NO: 514205 - DNA, 55 bp, Artificial
  Synthetic oligonucleotide
cagggccaactctcagagctacttgccaccaagggcaatgatggccgcgaggtcg

SEQ ID NO: 514206 - DNA, 55 bp, Artificial
  Synthetic oligonucleotide
cagggtttgtgcggctaggctggagttaacacctggcagtcagcggttcaacctg

SEQ ID NO: 514207 - DNA, 55 bp, Artificial
  Synthetic oligonucleotide
caggtacgattcctcttctgcgctgtggcaaggctccttcctaactgctctagac

SEQ ID NO: 514208 - DNA, 55 bp, Artificial
  Synthetic oligonucleotide
cagtagatatgcgtgatagccgctactgtgcgcaatgactcggaggtgcgttcgg

SEQ ID NO: 514209 - DNA, 55 bp, Artificial
  Synthetic oligonucleotide
catagcatatggttagacttacttcacctagtgggagccactggcccttttccgc

SEQ ID NO: 514210 - DNA, 55 bp, Artificial
  Synthetic oligonucleotide
catctgtaagctccaacatcccgagcgcattaccgcaaaagcgaaccagccgcag

SEQ ID NO: 514211 - DNA, 55 bp, Artificial
  Synthetic oligonucleotide
ccaatccatgggtgtaatccggaagaagaccgctacacgcggtacggaaggcggt

SEQ ID NO: 514212 - DNA, 55 bp, Artificial
  Synthetic oligonucleotide
ccacctaacaagagcaaagttacaccaacgacatagccctcgccaagaacgtcgc

SEQ ID NO: 514213 - DNA, 55 bp, Artificial
  Synthetic oligonucleotide
ccacgctaggtcattcaactcaatttgcgtccaagcggcatgataccccagtacc

SEQ ID NO: 514214 - DNA, 55 bp, Artificial
  Synthetic oligonucleotide
ccacgtggcacgcgcaggggtattgccgcctgaggacccttcctaaactactatg

SEQ ID NO: 514215 - DNA, 55 bp, Artificial
  Synthetic oligonucleotide
ccactatcagcggaaccttgcagcatatgaacaagctttcctcacctcgcagcaa

SEQ ID NO: 514216 - DNA, 55 bp, Artificial
  Synthetic oligonucleotide
ccaggttgggaagtgtgagaacggcatggtttctagggacgatggctaaagaggt

SEQ ID NO: 514217 - DNA, 55 bp, Artificial
  Synthetic oligonucleotide
cccacgtcaaacctcgcatggcagattcataatttaggtatagcctgctggccag

SEQ ID NO: 514218 - DNA, 55 bp, Artificial
  Synthetic oligonucleotide
cccagcccacctgcagttaacgagcgaggcaattgagtcatgaaatactcggttc

SEQ ID NO: 514219 - DNA, 55 bp, Artificial
  Synthetic oligonucleotide
ccccagagagtgttgagaagagttccttggcctcatttgtgaccggatctttcct

SEQ ID NO: 514220 - DNA, 55 bp, Artificial
  Synthetic oligonucleotide
cccggatctcgaattcgtatgggttcttgtaaccccagcgggctctgtcgcctcc

SEQ ID NO: 514221 - DNA, 55 bp, Artificial
  Synthetic oligonucleotide
cccttaggactgaggattccttgagactggtgactcggtgagtcaagaatacact

SEQ ID NO: 514222 - DNA, 55 bp, Artificial
  Synthetic oligonucleotide
cccttcctgttattccaaccgtctgccgtaacgattgcttctcagtctaggtccc

SEQ ID NO: 514223 - DNA, 55 bp, Artificial
  Synthetic oligonucleotide
ccgagactaggtgtccaggatttggctgagggttggcaagtgaaagaggacttct

SEQ ID NO: 514224 - DNA, 55 bp, Artificial
  Synthetic oligonucleotide
ccgagtgagcggcgcaaatatataaaatggggagcggacgatttctgggactcgc

SEQ ID NO: 514225 - DNA, 55 bp, Artificial
  Synthetic oligonucleotide
aaaggcctcaggcaggaatttcatgtgacagaatagtgccctaaccctacaactc

SEQ ID NO: 514226 - DNA, 55 bp, Artificial
  Synthetic oligonucleotide
aaatgcaaatgtcccttgttacgtgaagatggactgtgttggggttgctatcttg

SEQ ID NO: 514227 - DNA, 55 bp, Artificial
  Synthetic oligonucleotide
aagctgcctagatatatggtgtacctaaaactaccctttgtgaacagcttgctgg

SEQ ID NO: 514228 - DNA, 55 bp, Artificial
  Synthetic oligonucleotide
acatacgtagcagtcgaggccattgcgacggtccgttgagttcgcgagttgggcg

SEQ ID NO: 514229 - DNA, 55 bp, Artificial
  Synthetic oligonucleotide
accagaatagcgattaagctggctagatgcatacccattcctgcagcaagaaggg

SEQ ID NO: 514230 - DNA, 55 bp, Artificial
  Synthetic oligonucleotide
acgacacgacacctacgctattacgactatataccctatagattggtgcacttca

SEQ ID NO: 514231 - DNA, 55 bp, Artificial
  Synthetic oligonucleotide
actcttattcgtacgttcctgccactttcgagactgcttactggctagctgagca

SEQ ID NO: 514232 - DNA, 55 bp, Artificial
  Synthetic oligonucleotide
agcatgtctctgccgggaccaaatgtccgtatcagcctcgattcccgacacctcg

SEQ ID NO: 514233 - DNA, 55 bp, Artificial
  Synthetic oligonucleotide
agccaggccctagctactcgcatatcgcgcattctgcagagcgtaatcgaaatca

SEQ ID NO: 514234 - DNA, 55 bp, Artificial
  Synthetic oligonucleotide
agtaacattactagacggactaatattcgttgcggagtggccataacagcttgcc

SEQ ID NO: 514235 - DNA, 55 bp, Artificial
  Synthetic oligonucleotide
agttctggaaacgagcgactcatttctcctcgtaatccaaacccagcatttcccc

SEQ ID NO: 514236 - DNA, 55 bp, Artificial
  Synthetic oligonucleotide
ataaagagcgccgacacggaccgaagccggttagcagcagcccgtgtggaacgtc

SEQ ID NO: 514237 - DNA, 55 bp, Artificial
  Synthetic oligonucleotide
ataaccggagcccttgtcgtcaccctctccaccagacgtagagatggcacatgcg

SEQ ID NO: 514238 - DNA, 55 bp, Artificial
  Synthetic oligonucleotide
atcaggcagtatcggagcacaaaggactaggcatgggcgggtgctgaaaccaagg

SEQ ID NO: 514239 - DNA, 55 bp, Artificial
  Synthetic oligonucleotide
atccgcatgctcgatatgcatccttttgtcctcctgtccgcctctgtttaacacg

SEQ ID NO: 514240 - DNA, 55 bp, Artificial
  Synthetic oligonucleotide
atcgactgaatccttaatgaagccccgtccactccagtaaacataaaaccaggaa

SEQ ID NO: 514241 - DNA, 55 bp, Artificial
  Synthetic oligonucleotide
atctagccggctctttgttatcagcattaccgatatccatcccatgacacagagc

SEQ ID NO: 514242 - DNA, 55 bp, Artificial
  Synthetic oligonucleotide
attccacctcttccagctacactccttaccaaccctggagtaggtgagccataga

SEQ ID NO: 514243 - DNA, 55 bp, Artificial
  Synthetic oligonucleotide
attggctgatggttgcccggccagctccattggaagggttgaaagtcagggtcgg

SEQ ID NO: 514244 - DNA, 55 bp, Artificial
  Synthetic oligonucleotide
caaccacgttcattctactcacgaatatcatgctagctgacttgccatcggagat

SEQ ID NO: 514245 - DNA, 55 bp, Artificial
  Synthetic oligonucleotide
caatgtctgggccgtcacacacagcttacgaaaacgattaatgacctccaacacg

SEQ ID NO: 514246 - DNA, 55 bp, Artificial
  Synthetic oligonucleotide
caattagcaaatcgatcgccacgcagaatatcaatcacaatacaacttccacagt

SEQ ID NO: 514247 - DNA, 55 bp, Artificial
  Synthetic oligonucleotide
cacaggcgcaccactccctgtaggcgctttcctcgcccgtcttttgttcgtctgg

SEQ ID NO: 514248 - DNA, 55 bp, Artificial
  Synthetic oligonucleotide
cacatggcgaacgttactagggaaacgccaatacaaagaccggctgtcctcctgg

SEQ ID NO: 514249 - DNA, 55 bp, Artificial
  Synthetic oligonucleotide
cggacaaagttccagaagataccgctgatgaatagcgatcgtgagaatttggtgg

SEQ ID NO: 514250 - DNA, 55 bp, Artificial
  Synthetic oligonucleotide
cggcacaaatccaagcctcagcaacggtctcaactacatggacgtcaacgggcag

SEQ ID NO: 514251 - DNA, 55 bp, Artificial
  Synthetic oligonucleotide
cggcacaggcgcatatttgtaggggctgtggtaattggcggggatcccagtgcag

SEQ ID NO: 514252 - DNA, 55 bp, Artificial
  Synthetic oligonucleotide
cggcttaagacgcacgaccctgttgtacaaccttggaagaggaacctcgctatag

SEQ ID NO: 514253 - DNA, 55 bp, Artificial
  Synthetic oligonucleotide
cgtacgctaaccgcctctgcgagtctacagggtaaagttttgatggtcctctatg

SEQ ID NO: 514254 - DNA, 55 bp, Artificial
  Synthetic oligonucleotide
cgtatgatactgagaggactaatatggcaagcgagacgttgcgtaatatgggtcc

SEQ ID NO: 514255 - DNA, 55 bp, Artificial
  Synthetic oligonucleotide
cgtcaacggtccgaaccactggggatgcgggttggccatatgtcgtacttgcgtg

SEQ ID NO: 514256 - DNA, 55 bp, Artificial
  Synthetic oligonucleotide
cgtctgcacaacgcattccaccggacgaattccaaattcaagggagcacactgca

SEQ ID NO: 514257 - DNA, 55 bp, Artificial
  Synthetic oligonucleotide
cgtgcatgtatattattgcgcctacggattgtaagttatagcttccgagcttttc

SEQ ID NO: 514258 - DNA, 55 bp, Artificial
  Synthetic oligonucleotide
cgtgtattctggagtccggaatgatgtgaacgcagcagagaaatcgtcgtcccgc

SEQ ID NO: 514259 - DNA, 55 bp, Artificial
  Synthetic oligonucleotide
cgttcaccaggcctcatctcgtcccaacagccctgttccacagcttcccaccctg

SEQ ID NO: 514260 - DNA, 55 bp, Artificial
  Synthetic oligonucleotide
cgttggacgcaaggatctcgggctctacccaaacgcggaggcccttgttggtatc

SEQ ID NO: 514261 - DNA, 55 bp, Artificial
  Synthetic oligonucleotide
ctacgaccgggtggctggtttgaacaagtcgagattgacttcgcaccccgatgtg

SEQ ID NO: 514262 - DNA, 55 bp, Artificial
  Synthetic oligonucleotide
ctacggtgatcgagctagatccatttcccgcagtgattcatcgcgctcacgtact

SEQ ID NO: 514263 - DNA, 55 bp, Artificial
  Synthetic oligonucleotide
ctactatggatagaaaagccggctaacttgccagcttctttctgccgaagatgat

SEQ ID NO: 514264 - DNA, 55 bp, Artificial
  Synthetic oligonucleotide
ctattgcacatagtactggaagcgctggtgcatccctagtcgtctgggtggctgg

SEQ ID NO: 514265 - DNA, 55 bp, Artificial
  Synthetic oligonucleotide
ctccgtttctcgagcggttgttcccatgcctcttcttggaaagactcaagtggta

SEQ ID NO: 514266 - DNA, 55 bp, Artificial
  Synthetic oligonucleotide
ctcgcgggttgtgtctttgtttgccggacacaacgacctgaaattcgctgtcccc

SEQ ID NO: 514267 - DNA, 55 bp, Artificial
  Synthetic oligonucleotide
ctctagtcggccatgattccaaacaaaggggtcccctaacccaactccgatagcg

SEQ ID NO: 514268 - DNA, 55 bp, Artificial
  Synthetic oligonucleotide
ctctctactggataccttgtcgctgggacgcccgtgtcgaatcagattgcgtttt

SEQ ID NO: 514269 - DNA, 55 bp, Artificial
  Synthetic oligonucleotide
ctctctcgtgtgattggccaccttcgccagtcgtctcaatacatcgactacactg

SEQ ID NO: 514270 - DNA, 55 bp, Artificial
  Synthetic oligonucleotide
ctgatcccaatttcaatgctgtcctatacgacccgacaaagccggttaatcagcg

SEQ ID NO: 514271 - DNA, 55 bp, Artificial
  Synthetic oligonucleotide
ctggacagtcccgccgtactttattgatagcgtggcgcatttagccggcttcatc

SEQ ID NO: 514272 - DNA, 55 bp, Artificial
  Synthetic oligonucleotide
ctgtatgaattcagttgcacagcctaggcacttagcaggccctgcccgctacacc

SEQ ID NO: 514273 - DNA, 55 bp, Artificial
  Synthetic oligonucleotide
cttccccatattgaaccccacctagtcggttcggaaacggattacagagcaccac

SEQ ID NO: 514274 - DNA, 55 bp, Artificial
  Synthetic oligonucleotide
ccgatacggccaccaaccatcccgtgttgtaccttgatgatcctcttcccaaggc

SEQ ID NO: 514275 - DNA, 55 bp, Artificial
  Synthetic oligonucleotide
ccgcactgagaggccgccagctgcctgaagtctccgctgtggactttactcgatg

SEQ ID NO: 514276 - DNA, 55 bp, Artificial
  Synthetic oligonucleotide
ccgccagtcgatgagcacaacagacctttgtacggtggcgacatatttggtgtgc

SEQ ID NO: 514277 - DNA, 55 bp, Artificial
  Synthetic oligonucleotide
ccgctgtcccagtcacgctgcgacgattcatctgtcaatacacatgcttaggaga

SEQ ID NO: 514278 - DNA, 55 bp, Artificial
  Synthetic oligonucleotide
ccgggaccaaatgtccgtatcagcctcgattcccgacacctcgcttggcctcacc

SEQ ID NO: 514279 - DNA, 55 bp, Artificial
  Synthetic oligonucleotide
ccgtgttaagctgacgatgctggctctactagtatcttcccatagctggtagcgc

SEQ ID NO: 514280 - DNA, 55 bp, Artificial
  Synthetic oligonucleotide
ccgttaagccgatccctaaaagaccatccggctcgacaatatctgataaaccaga

SEQ ID NO: 514281 - DNA, 55 bp, Artificial
  Synthetic oligonucleotide
cctccatcggcctgtggagatccctcgggtcgtgtcacaacagttgtgcggtcgt

SEQ ID NO: 514282 - DNA, 55 bp, Artificial
  Synthetic oligonucleotide
cctgcgtatcctggactaacactttgactatgcctctctcgtgcatcagtcttca

SEQ ID NO: 514283 - DNA, 55 bp, Artificial
  Synthetic oligonucleotide
cgaatatacatcgaaccggtacagttcgaaacacttggcggtcgtatgcatatcc

SEQ ID NO: 514284 - DNA, 55 bp, Artificial
  Synthetic oligonucleotide
cgaatgcgcatgaatatggtctgcttcgccaggactctcagttcacccgaggcct

SEQ ID NO: 514285 - DNA, 55 bp, Artificial
  Synthetic oligonucleotide
cgcttccattacatgctgttatccgacccagtctcatgtagataagagtcggccg

SEQ ID NO: 514286 - DNA, 55 bp, Artificial
  Synthetic oligonucleotide
cgatagttgtgcgtgaccaatcacagccgtcccgcctttgtttacatttggcccc

SEQ ID NO: 514287 - DNA, 55 bp, Artificial
  Synthetic oligonucleotide
cgctgccaaccggacccgattttattcacgtgagggacatgatgctttgtatccg

SEQ ID NO: 514288 - DNA, 55 bp, Artificial
  Synthetic oligonucleotide
cgcgttcatgttgtggtcggacgaataagggctttggtggagtgaaggatgcggg

SEQ ID NO: 514289 - DNA, 55 bp, Artificial
  Synthetic oligonucleotide
cgcgaagataacacgacaacgaaatcagcgacaagccacccaagcggctaaacgc

SEQ ID NO: 514290 - DNA, 55 bp, Artificial
  Synthetic oligonucleotide
cgcgccaaagccacgctggtggattcgtagataactggctccggcatgcaacagg

SEQ ID NO: 514291 - DNA, 54 bp, Artificial
  Synthetic oligonucleotide
ccttgtcgaacatcctcttccagccgacaagcaaggcaatgggacggccacttt

SEQ ID NO: 514292 - DNA, 54 bp, Artificial
  Synthetic oligonucleotide
gcggtgcgatctccgaatttctgcactattgaagcaaagtgatctcctaccgtc

SEQ ID NO: 514293 - DNA, 54 bp, Artificial
  Synthetic oligonucleotide
gaaatatacgaattctgcataggtacatacaagccctgatcgaaatgccaccaa

SEQ ID NO: 514294 - DNA, 54 bp, Artificial
  Synthetic oligonucleotide
acgcgtaccttaaacgtgagcttcatcttgcgccaccggatggatgagagatgg

SEQ ID NO: 514295 - DNA, 54 bp, Artificial
  Synthetic oligonucleotide
gaatgttcgatacaatctctgcgtgtacagacggactcgttccgtgaattcagt

SEQ ID NO: 514296 - DNA, 53 bp, Artificial
  Synthetic oligonucleotide
acatgtacttagttgacgctcgacccgcctcatacggtatttgtcccaacact

SEQ ID NO: 514297 - DNA, 53 bp, Artificial
  Synthetic oligonucleotide
agagggctccgttatgtgcctctcaacctcgccaaagccaggattatggtttt

SEQ ID NO: 514298 - DNA, 53 bp, Artificial
  Synthetic oligonucleotide
tcgcaaagctcccacttgaacttcgttggacgatatgggaatctgtcttccat

SEQ ID NO: 514299 - DNA, 53 bp, Artificial
  Synthetic oligonucleotide
gggcaagaatgaatcatgcaaggctgtttgtggagaagtcaagttcgattcgc

SEQ ID NO: 514300 - DNA, 53 bp, Artificial
  Synthetic oligonucleotide
ggggatggtggtaggctattgcctcggcactggtaagtgaatatcttgttccc

SEQ ID NO: 514301 - DNA, 53 bp, Artificial
  Synthetic oligonucleotide
caatctccaacccaaatgaagcgaccaaccaccggacactaacctgtaaaacc

SEQ ID NO: 514302 - DNA, 52 bp, Artificial
  Synthetic oligonucleotide
tcccaaattggagcttatggtatccattacgcttcccactctcttcctatgg

SEQ ID NO: 514303 - DNA, 52 bp, Artificial
  Synthetic oligonucleotide
ctcataccggacggacgcctttgcggaagatatggactgagtctcgtaggcg

SEQ ID NO: 514304 - DNA, 52 bp, Artificial
  Synthetic oligonucleotide
caccgatgaaaagatagcggtgtaatggagttataggcaggttttagagggg

SEQ ID NO: 514305 - DNA, 52 bp, Artificial
  Synthetic oligonucleotide
ccatgcagtggacgtgagaactgacggcggggtatataggcggaacgctgga

SEQ ID NO: 514306 - DNA, 51 bp, Artificial
  Synthetic oligonucleotide
ccccgtgggagaaataggcgtccagtgctatggcactcggtgagtgcgggt

SEQ ID NO: 514307 - DNA, 51 bp, Artificial
  Synthetic oligonucleotide
cgcgtggatggaggtttagtcgacgagtactatttatcgaccctaccgtcc

SEQ ID NO: 514308 - DNA, 51 bp, Artificial
  Synthetic oligonucleotide
tctgcgctcatgtgatggaaggacaggcattatattttgtctgaaaccgag

SEQ ID NO: 514309 - DNA, 51 bp, Artificial
  Synthetic oligonucleotide
actcgtgtcgccccttctggattcacctacatacactccgcccctccgggg

SEQ ID NO: 514310 - DNA, 51 bp, Artificial
  Synthetic oligonucleotide
atactgaattgtggcggctcgcttttctgagtcgagaagattgcgtacccc

SEQ ID NO: 514311 - DNA, 51 bp, Artificial
  Synthetic oligonucleotide
ggggcagtcgcccaccccagccgtggattcttctcccgagcggccgtccgc

SEQ ID NO: 514312 - DNA, 50 bp, Artificial
  Synthetic oligonucleotide
tggacaccactgcggcaaattttaggtccgttaaatggggtggtaatttt

SEQ ID NO: 514313 - DNA, 50 bp, Artificial
  Synthetic oligonucleotide
taatacgtctcgcggataaccccatgagccgttgcggttctgacttcgac

SEQ ID NO: 514314 - DNA, 50 bp, Artificial
  Synthetic oligonucleotide
gtccgcgtctgaaagttgggcgtccggagtatcactattgctgcaatatt

SEQ ID NO: 514315 - DNA, 55 bp, Artificial
  Synthetic oligonucleotide
ctgccttaggctagtgtcgacaatccagttacgacctcctctaaaccgatcttgc

SEQ ID NO: 514316 - DNA, 55 bp, Artificial
  Synthetic oligonucleotide
cttcttaagatgtcgtctgaggtgcatgaattcgagggtcttggaaaaggaaagg

SEQ ID NO: 514317 - DNA, 55 bp, Artificial
  Synthetic oligonucleotide
gaagaacttgttcgcatctgggctcttgaggagtgagacgacacccactatatca

SEQ ID NO: 514318 - DNA, 55 bp, Artificial
  Synthetic oligonucleotide
gacagctggattagtactctttgtcctggacagtagtatgtgagtatggacctgc

SEQ ID NO: 514319 - DNA, 55 bp, Artificial; identical to SEQ ID NO: 286084
  Synthetic oligonucleotide

SEQ ID NO: 514320 - DNA, 55 bp, Artificial
  Synthetic oligonucleotide
gacgtttaaggatctgattgaagtgtttcgaaacctagctgtcgactgttacctg

SEQ ID NO: 514321 - DNA, 55 bp, Artificial
  Synthetic oligonucleotide
gagagtaagagactactcatggaaatacccattacaactccggagctatcgtgtc

SEQ ID NO: 514322 - DNA, 55 bp, Artificial
  Synthetic oligonucleotide
gattgtcttctgtcagacacacatagacttctatatggatgactcgggcttaagc

SEQ ID NO: 514323 - DNA, 55 bp, Artificial
  Synthetic oligonucleotide
gcccagaatgctcgggaatccccatgagggctaaattcatgcttcagataatggg

SEQ ID NO: 514324 - DNA, 55 bp, Artificial
  Synthetic oligonucleotide
gctctagacaggtcgcgaactttactgttcaaggagacttcatctacttcagact

SEQ ID NO: 514325 - DNA, 55 bp, Artificial
  Synthetic oligonucleotide
gcttgacagagattctcgcggagttactttcgcctctcgcggagttactttcgcc

SEQ ID NO: 514326 - DNA, 55 bp, Artificial
  Synthetic oligonucleotide
ggattccccatccctgacatctttccaatggcaatcctcataccgccgagtatgg

SEQ ID NO: 514327 - DNA, 55 bp, Artificial
  Synthetic oligonucleotide
ggcctagtgaacaggatattcagacacagtgatagtatgaccggtaggcctggac

SEQ ID NO: 514328 - DNA, 55 bp, Artificial
  Synthetic oligonucleotide
ggggcccgagggtaaataatgcggacgaaatttgtagcagaaaagtcgataagtc

SEQ ID NO: 514329 - DNA, 55 bp, Artificial
  Synthetic oligonucleotide
gggtattgcataccaggcgtggagactggcaacgaggtaccgcgacgacggggtg

SEQ ID NO: 514330 - DNA, 55 bp, Artificial
  Synthetic oligonucleotide
gggtcaacaacgctgattgttctatgctgtggaatattcaatgatgcattccgac

SEQ ID NO: 514331 - DNA, 55 bp, Artificial
  Synthetic oligonucleotide
gggtgaaagcacctaggccgagcccacaagccatggaagtatatggtaatatgtc

SEQ ID NO: 514332 - DNA, 55 bp, Artificial
  Synthetic oligonucleotide
ggtcaccctgtatggacatgcccttccggttagatcgatgcagttgtctccagat

SEQ ID NO: 514333 - DNA, 55 bp, Artificial
  Synthetic oligonucleotide
ggtgggaggaaagataacgaatgctgttataagcaagtgcgggaagtttgtagca

SEQ ID NO: 514334 - DNA, 55 bp, Artificial
  Synthetic oligonucleotide
gtagctcctatggtcagaagcagaaacacatctaggaggttgcttggggtgtacc

SEQ ID NO: 514335 - DNA, 55 bp, Artificial
  Synthetic oligonucleotide
gtatgctttgcaggatgcgctctggtttgttatgtgacttccagttggtgtggag

SEQ ID NO: 514336 - DNA, 55 bp, Artificial
  Synthetic oligonucleotide
gtcgtagaggtacagctcagactctgcaaagtagctgttgttcacataagacgtc

SEQ ID NO: 514337 - DNA, 55 bp, Artificial
  Synthetic oligonucleotide
gttgtagacagttacgtctttgccttctggaggtttaatcccgtaacacattggc

SEQ ID NO: 514338 - DNA, 55 bp, Artificial
  Synthetic oligonucleotide
taaacgacgtctccagcagcactctttgcgcctcctgaatgtttgagtcctcccc

SEQ ID NO: 514339 - DNA, 55 bp, Artificial
  Synthetic oligonucleotide
tcaacttcagagtcgctggatagatctgtgctttctttcgtcacaacagttcccc

SEQ ID NO: 514340 - DNA, 55 bp, Artificial
  Synthetic oligonucleotide
tcacacccaccgatggaacaaatcaatcgtatcaaaacaacgctcaatgaagttg

SEQ ID NO: 514341 - DNA, 55 bp, Artificial
  Synthetic oligonucleotide
tgtgttaaacttcctttggcacgggatacagaacatattacccctactagacaga

SEQ ID NO: 514342 - DNA, 55 bp, Artificial
  Synthetic oligonucleotide
ttacagcgcagttcaaccatcccctcgtaaaggtagtagataaaccagtaccggg

SEQ ID NO: 514343 - DNA, 55 bp, Artificial
  Synthetic oligonucleotide
ttgagtccggcgtgagcagttgccatgtgctcgacagcttccttgacggaagagt

SEQ ID NO: 514344 - DNA, 55 bp, Artificial
  Synthetic oligonucleotide
tttctctgcaatgctatatgcatcgttcaacctcctttgatagtcctctaacctt

SEQ ID NO: 514345 - DNA, 55 bp, Artificial
  Synthetic oligonucleotide
acataccctagaccttgaaaccatgagtgtagctgagacttacagccttgagaga

SEQ ID NO: 514346 - DNA, 55 bp, Artificial
  Synthetic oligonucleotide
acctgggcgggccaagcatcttgagtgtaaacgtgctgttaaagcgcttgcgcgg

SEQ ID NO: 514347 - DNA, 55 bp, Artificial
  Synthetic oligonucleotide
acttcccaaacgacgagcctccaacccttcctgtcctctcagtctccgtgggcct

SEQ ID NO: 514348 - DNA, 55 bp, Artificial
  Synthetic oligonucleotide
agatcagttaccttcacagacgtcctgttctggagagctgtccgaagtctgaaaa

SEQ ID NO: 514349 - DNA, 55 bp, Artificial
  Synthetic oligonucleotide
agctcgagatcaagcctcgctaggtttccaagagaaacaggggacatgcttgttt

SEQ ID NO: 514350 - DNA, 55 bp, Artificial
  Synthetic oligonucleotide
cagagacatcagaacaaatccaggcctttcagagcattcacttgccctaatggaa

SEQ ID NO: 514351 - DNA, 55 bp, Artificial
  Synthetic oligonucleotide
cagcacaacacacaagaacagcgaggatgtaaaggagtttgtggggtttctggag

SEQ ID NO: 514352 - DNA, 55 bp, Artificial
  Synthetic oligonucleotide
cagcgtctgtttccatttattgcagtccttcttccagattgactgcctctgccca

SEQ ID NO: 514353 - DNA, 55 bp, Artificial
  Synthetic oligonucleotide
cagtagcttgatatttcgatgatgaatgaaagctccaccaacgcttctgcggcat

SEQ ID NO: 514354 - DNA, 55 bp, Artificial
  Synthetic oligonucleotide
catatccagaagacaattggttatcaccgaaacggtatattcattaccaagctcc

SEQ ID NO: 514355 - DNA, 55 bp, Artificial
  Synthetic oligonucleotide
ccacaaagatcgagccgaagcttgcggtaaggtttacaagggccgatggaacgcc

SEQ ID NO: 514356 - DNA, 55 bp, Artificial
  Synthetic oligonucleotide
ccactacttcggtcgtgtggtacgaaagcatcatcatggcaacgatggtgtatcc

SEQ ID NO: 514357 - DNA, 55 bp, Artificial
  Synthetic oligonucleotide
cccaccacacagacagcttgatgcttagctacagtgaggcgctagatcctgcaga

SEQ ID NO: 514358 - DNA, 55 bp, Artificial
  Synthetic oligonucleotide
ctacggtttgttgccgagcacaatgttgatggggccacgagagtatatcctcttg

SEQ ID NO: 514359 - DNA, 55 bp, Artificial
  Synthetic oligonucleotide
cgtcaagagaatgtctaaagtaactgtttcggaaggatccgtgtttgtccagaga

SEQ ID NO: 514360 - DNA, 55 bp, Artificial
  Synthetic oligonucleotide
cgggattgggactaaaggcaataaggcgcagaaagaatcacagaatggatccggg

SEQ ID NO: 514361 - DNA, 55 bp, Artificial
  Synthetic oligonucleotide
cggacaaccctcccgaagagttggtgaggaagattctgatccaccaggagcttct

SEQ ID NO: 514362 - DNA, 55 bp, Artificial
  Synthetic oligonucleotide
ccttacctcttcaccgcagaaccttctcaaactagcccattccatccacctacag

SEQ ID NO: 514363 - DNA, 55 bp, Artificial
  Synthetic oligonucleotide
cctcatagcacctccattcatccgtgtcgaaatcaggttttccctctgttccagc

SEQ ID NO: 514364 - DNA, 55 bp, Artificial
  Synthetic oligonucleotide
ccgactgtgccctatactgccatcaggaatataaaacttaactcaagccaaccct

SEQ ID NO: 514365 - DNA, 55 bp, Artificial
  Synthetic oligonucleotide
cccttcactatgagtgagtgtgaatactgcaagtctagaaacatgcttcctctga

SEQ ID NO: 514366 - DNA, 55 bp, Artificial
  Synthetic oligonucleotide
ccctgcctgatcggaggatcagctccaatcacaacatatctctccccgtcgcgga

SEQ ID NO: 514367 - DNA, 55 bp, Artificial
  Synthetic oligonucleotide
cccagaacgccaagaacagtaaaggccaacgccagtactagtacccgaaatcccg

SEQ ID NO: 514368 - DNA, 55 bp, Artificial
  Synthetic oligonucleotide
cccgtctattcctgagacatacatcagaacagggatgacatccacatttcctgga

SEQ ID NO: 514369 - DNA, 54 bp, Artificial
  Synthetic oligonucleotide
aaacctctagaggctctttgttatgtacacgcagagaacagtcttccacgcctc

SEQ ID NO: 514370 - DNA, 54 bp, Artificial
  Synthetic oligonucleotide
ctccaacctcaaggccattaatctccaaagacacatcatcgctcagatggtccc

SEQ ID NO: 514371 - DNA, 54 bp, Artificial
  Synthetic oligonucleotide
tctaggtttgctgtaaatggccgggcaccatccagggattttaacttggaaatc

SEQ ID NO: 514372 - DNA, 54 bp, Artificial
  Synthetic oligonucleotide
tatacaacaaattctttgcagtccatgcctccctgtaataacctgaaagggatg

SEQ ID NO: 514373 - DNA, 54 bp, Artificial
  Synthetic oligonucleotide
cggggatcattaacctttctgtgtccgatttgggtaaggtggcctgcatctatg

SEQ ID NO: 514374 - DNA, 53 bp, Artificial
  Synthetic oligonucleotide
ggggagaggcacccggagcaacgcttgctcaaagagtcggtccacttgggcta

SEQ ID NO: 514375 - DNA, 53 bp, Artificial
  Synthetic oligonucleotide
tctaaacatcttgtacgccgagtctatgctttctttcctcacctgaatctttt

SEQ ID NO: 514376 - DNA, 53 bp, Artificial
  Synthetic oligonucleotide
agtggatgacgcttgacggaacaaccctgtagatgcagtttggccccagaaga

SEQ ID NO: 514377 - DNA, 53 bp, Artificial
  Synthetic oligonucleotide
ttaaggtacaaatcccatctactggagcctgaggatgtgagcacatttcatga

SEQ ID NO: 514378 - DNA, 52 bp, Artificial
  Synthetic oligonucleotide
aagtgcatgcgaaaaggtttataagttgtattccgcgtatggtgctatcgtt

SEQ ID NO: 514379 - DNA, 51 bp, Artificial
  Synthetic oligonucleotide
acttgattgagaacataggcgaaaagctagtagttagcgggaaggaacaca

SEQ ID NO: 514380 - DNA, 51 bp, Artificial
  Synthetic oligonucleotide
cataatgatgccaaaccttgtgatcaagccccacagtgagctggatctcga

SEQ ID NO: 514381 - DNA, 50 bp, Artificial
  Synthetic oligonucleotide
tggtgcgtagatccagtgccaagcaactttaattcccgcctagacatgct

SEQ ID NO: 514382 - DNA, 50 bp, Artificial
  Synthetic oligonucleotide
gtccatatcttccgacgacacatggacgtccgtacctaacctccggtgaa

SEQ ID NO: 514383 - DNA, 50 bp, Artificial
  Synthetic oligonucleotide
cactctgtgcaaggagattcagttcacacaccctacatctatcatcatca

SEQ ID NO: 514384 - DNA, 55 bp, Artificial
  Synthetic oligonucleotide
tgaccaactgtatcagaagcgagcgagcttcaagccagaacgaagtgtggagacg

SEQ ID NO: 514385 - DNA, 55 bp, Artificial
  Synthetic oligonucleotide
gttcatttcagcggcaagcctgatacaagctgccctggaggatggacccattggg

SEQ ID NO: 514386 - DNA, 55 bp, Artificial
  Synthetic oligonucleotide
gggagcggaagatgctgcagggtgcgggattgcgagtcgatgtcggtctagacca

SEQ ID NO: 514387 - DNA, 55 bp, Artificial
  Synthetic oligonucleotide
ggcttctgttggggaactgcaaattctaccatccagggttcaattccctcttgac

SEQ ID NO: 514388 - DNA, 55 bp, Artificial
  Synthetic oligonucleotide
ggagcgaagggcaagtctgaaacatgacgaggcagtgcaaggggcccagcagcga

SEQ ID NO: 514389 - DNA, 55 bp, Artificial
  Synthetic oligonucleotide
gctgtcattcgggcaaagttcacgagcactcatctcattctggacttaacggcaa

SEQ ID NO: 514390 - DNA, 55 bp, Artificial
  Synthetic oligonucleotide
gcgcctctctcttcacggcagatcacatccgatcggcatccgagtcaacccttcg

SEQ ID NO: 514391 - DNA, 55 bp, Artificial
  Synthetic oligonucleotide
gcctaagctggttgaagctgctgtctctggccgattgaagcctgccatgaacgct

SEQ ID NO: 514392 - DNA, 55 bp, Artificial
  Synthetic oligonucleotide
gccggatcggggcgagtcgagttcgatcttttcctgtaacgaactgctgcgctga

SEQ ID NO: 514393 - DNA, 55 bp, Artificial
  Synthetic oligonucleotide
gcatcggatccacaaccgaacaagaaagcgacaagcaccaagctgcgtcaatcgg

SEQ ID NO: 514394 - DNA, 55 bp, Artificial
  Synthetic oligonucleotide
gcacgcatagatggaatgcattcgcttggtgtacagtgccgcggatcgggtttcg

SEQ ID NO: 514395 - DNA, 55 bp, Artificial
  Synthetic oligonucleotide
gaggtgaacagaggagcctttcattacgatgcgagccgagactggccacagatcg

SEQ ID NO: 514396 - DNA, 55 bp, Artificial
  Synthetic oligonucleotide
ctccatctttccctcctcacttaccatcacacatatcgccgctgttcacaacaag

SEQ ID NO: 514397 - DNA, 55 bp, Artificial
  Synthetic oligonucleotide
cgtggcgattcggaatggccctttccacgggtgagagatcgctgctactcggcga

SEQ ID NO: 514398 - DNA, 55 bp, Artificial
  Synthetic oligonucleotide
cggactcgccgattttgtgcggaaacacgcgcatcgaccctgcatgcgcatccct

SEQ ID NO: 514399 - DNA, 55 bp, Artificial
  Synthetic oligonucleotide
cgagcggggtgggcatacgtgcttgttattatacccattccttgcatagagggtt

SEQ ID NO: 514400 - DNA, 55 bp, Artificial
  Synthetic oligonucleotide
ccttctcgccagaaccatctgcaagggatgcctaccgatccagagccgcccagag

SEQ ID NO: 514401 - DNA, 55 bp, Artificial
  Synthetic oligonucleotide
cctagtggaatcaagaggacgaaatttgtacatgccgcaaccaactcatctgtac

SEQ ID NO: 514402 - DNA, 55 bp, Artificial
  Synthetic oligonucleotide
ccgagggctgttcgggtgccgaggtagtctcgatctgccaggaagctggattgct

SEQ ID NO: 514403 - DNA, 55 bp, Artificial
  Synthetic oligonucleotide
ccaaaagcatggccacaagaatgggacaaggcagtggagaaagagctgctgcacc

SEQ ID NO: 514404 - DNA, 55 bp, Artificial
  Synthetic oligonucleotide
catagagatgccggggactcgcttagaaggcttgaggatgagggtggtcctggtg

SEQ ID NO: 514405 - DNA, 55 bp, Artificial
  Synthetic oligonucleotide
cacggcatgtgcagagtactggaggagtacaagactatcaggtgacgtagatggg

SEQ ID NO: 514406 - DNA, 55 bp, Artificial
  Synthetic oligonucleotide
aatcactccgaaatcagcaagccgcaagggtagctccttgtacgatcgatcgcgg

SEQ ID NO: 514407 - DNA, 54 bp, Artificial
  Synthetic oligonucleotide
tccctcttctcggtgctgacagatcgatccatggcggctcgcacactggtgctc

SEQ ID NO: 514408 - DNA, 53 bp, Artificial
  Synthetic oligonucleotide
gatgatgtaagcaaggtggcagcatgagataaagatgatgttagctactgcgc

SEQ ID NO: 514409 - DNA, 55 bp, Artificial
  Synthetic oligonucleotide
tgtagcttcatgctataggggtaaagctccctcgccgatgtcacaccaccgctgt

SEQ ID NO: 514410 - DNA, 55 bp, Artificial
  Synthetic oligonucleotide
tgctacgatactttattgcctacccggcttctattactctcgcggttagctaact

SEQ ID NO: 514411 - DNA, 55 bp, Artificial
  Synthetic oligonucleotide
tcactaaaacgttaagaggtgggaaccgttgggaagttgatatactacgtactac

SEQ ID NO: 514412 - DNA, 55 bp, Artificial
  Synthetic oligonucleotide
tatcgaattgtgcaacagttgagtctaaaggagcttcaccattgggagtagaccc

SEQ ID NO: 514413 - DNA, 55 bp, Artificial
  Synthetic oligonucleotide
ggtagctgcggtgcagtgacgtcaggagctggaaaactaaaactgaagctcccat

SEQ ID NO: 514414 - DNA, 55 bp, Artificial
  Synthetic oligonucleotide
gggcctaccggaagagaagatgcaaagtctaacgacgtctgcattgatgccgcgt

SEQ ID NO: 514415 - DNA, 55 bp, Artificial
  Synthetic oligonucleotide
gcgggcggcgaagggagccatattggggagcggagcctcgatgtcgatgtcaaat

SEQ ID NO: 514416 - DNA, 55 bp, Artificial
  Synthetic oligonucleotide
gcccgcatctagaagcgtgaagccggcattgttatacgcagatatggccaggaag

SEQ ID NO: 514417 - DNA, 55 bp, Artificial
  Synthetic oligonucleotide
gcagcccctcgtactatagtaaggaaggattcgagacattcgagaacagtttccc

SEQ ID NO: 514418 - DNA, 55 bp, Artificial
  Synthetic oligonucleotide
ctgggtgtttagttgagagggtttattccaccttacgaagaatcaccttgacaga

SEQ ID NO: 514419 - DNA, 55 bp, Artificial
  Synthetic oligonucleotide
ccgcttcgggctcttgggcaaacggaccatccttgcgcatgcgattcacttgagc

SEQ ID NO: 514420 - DNA, 55 bp, Artificial
  Synthetic oligonucleotide
ccccatgtattgggtgtgccaacaagcgtttcgatagcaatttgagggtgtgcca

SEQ ID NO: 514421 - DNA, 55 bp, Artificial
  Synthetic oligonucleotide
ccccaaggttgctgagctctgccttcgagtcagtaaactgggtagatctagtgtt

SEQ ID NO: 514422 - DNA, 55 bp, Artificial
  Synthetic oligonucleotide
acttcaagagtcgtaggaatacctactgttccatttaccagctcgagtgatgggg

SEQ ID NO: 514423 - DNA, 53 bp, Artificial
  Synthetic oligonucleotide
ggagacacgaacgagaatggccccggtaccacgggtgtgaggaccctgcactt

SEQ ID NO: 514424 - DNA, 51 bp, Artificial
  Synthetic oligonucleotide
ccagtgtcacaacctacgttcctcgaatttcaactgacctagactagcccc

SEQ ID NO: 514425 - DNA, 51 bp, Artificial
  Synthetic oligonucleotide
aaccgtcccagtgccaggatagcatcgttcgccaggatgttaaacacggaa

SEQ ID NO: 514426 - DNA, 55 bp, Artificial
  Synthetic oligonucleotide
tacggttgtcatgccgtggccattacagccttccatatggtcagctgctctgggg

SEQ ID NO: 514427 - DNA, 55 bp, Artificial
  Synthetic oligonucleotide
gtccagcggagaggtaagtttcccacacaactctgccacctacaagtctaaccta

SEQ ID NO: 514428 - DNA, 55 bp, Artificial
  Synthetic oligonucleotide
gtcacagtcaccagataataccgtaggtctcggtttcgtttacatcatgcagttg

SEQ ID NO: 514429 - DNA, 55 bp, Artificial
  Synthetic oligonucleotide
ggctgttggatacccagcgcaagagccaccgtattctcctgtatgcatcgttaga

SEQ ID NO: 514430 - DNA, 55 bp, Artificial
  Synthetic oligonucleotide
ggcacggctgccaccattgtccaatttatgaacgacttacacacatcgggtttcc

SEQ ID NO: 514431 - DNA, 55 bp, Artificial
  Synthetic oligonucleotide
gcgctctggaggggttggtaggaatgaggggcaaccaggtgtacgacattgtggc

SEQ ID NO: 514432 - DNA, 55 bp, Artificial
  Synthetic oligonucleotide
gccctagtacacgaggtataggatgccctctatcacgcaaagtatataagctgat

SEQ ID NO: 514433 - DNA, 55 bp, Artificial
  Synthetic oligonucleotide
gcccctaccacgaatcgtcacaacacgatggtacgtagagagcccgcgtggatca

SEQ ID NO: 514434 - DNA, 55 bp, Artificial
  Synthetic oligonucleotide
gcatcgtggcgtcgtatgggtttcattctacgctcgtggcggactcggatacggc

SEQ ID NO: 514435 - DNA, 55 bp, Artificial
  Synthetic oligonucleotide
ctggttgccaacgctgtagacggcgctcttgttgttatgcgtgtgaagcgcaagg

SEQ ID NO: 514436 - DNA, 55 bp, Artificial
  Synthetic oligonucleotide
ctgctagtcataaagagcagcttctaatttaggctaggcgacagcatagcgacgc

SEQ ID NO: 514437 - DNA, 55 bp, Artificial
  Synthetic oligonucleotide
ccgtcttcgtcatgttgcgaatataatgcgtcgtctccatcgctggagctggtcg

SEQ ID NO: 514438 - DNA, 55 bp, Artificial
  Synthetic oligonucleotide
ccgaacctgctatataccactatgagaatcgaaaggggcgacccacgcttggctg

SEQ ID NO: 514439 - DNA, 55 bp, Artificial
  Synthetic oligonucleotide
cccgccctattggtctaggctgcctggtggtctactggcgctatatggcaaatac

SEQ ID NO: 514440 - DNA, 55 bp, Artificial
  Synthetic oligonucleotide
agggctaggagattagtcaatggtgcggagtagaggcatggtgggatagcttttc

SEQ ID NO: 514441 - DNA, 53 bp, Artificial
  Synthetic oligonucleotide
cgactcagttccgactcggttagcccacccaaatgttcacatgtgaccagggg

SEQ ID NO: 514442 - DNA, 50 bp, Artificial
  Synthetic oligonucleotide
gaacatccccagagttcttcttggcgttaactgcgctcttcgtagtgccg

SEQ ID NO: 514443 - DNA, 55 bp, Artificial
  Synthetic oligonucleotide
ttagttagcacagcgtacccacgtaagtcccctagcttgtctttaaagctcattg

SEQ ID NO: 514444 - DNA, 55 bp, Artificial
  Synthetic oligonucleotide
tgggcaagatttacaattgttgagcataaactctgctccccatgatggtacgccg

SEQ ID NO: 514445 - DNA, 55 bp, Artificial
  Synthetic oligonucleotide
ggtcccagtgctctccagtgtccgggtttcttagtaggtgttctagctggtcttg

SEQ ID NO: 514446 - DNA, 55 bp, Artificial
  Synthetic oligonucleotide
gggcatggaaacactcataactgtgggtcagtccgaaacaaaatcacctgtggcc

SEQ ID NO: 514447 - DNA, 55 bp, Artificial
  Synthetic oligonucleotide
ggagtctgttcgcaccgcagcacaatgtgcataatccagcccagaaatatgttgg

SEQ ID NO: 514448 - DNA, 55 bp, Artificial
  Synthetic oligonucleotide
ggaccgctgctttattaactcagtctgtggtggtgttaagacagaaggccccttc

SEQ ID NO: 514449 - DNA, 55 bp, Artificial
  Synthetic oligonucleotide
gcatccaggatgcaaacatggcgtatccggctggagacagcgaggcgcttttccc

SEQ ID NO: 514450 - DNA, 55 bp, Artificial
  Synthetic oligonucleotide
gattgcgattatctgggttgcatttgggctaattcatctgaagtaaacgagctgg

SEQ ID NO: 514451 - DNA, 55 bp, Artificial
  Synthetic oligonucleotide
gaattacatgtggttggtaactagatggccggtatcgctgtgtattagttgccgc

SEQ ID NO: 514452 - DNA, 55 bp, Artificial
  Synthetic oligonucleotide
gaaacatttgagacacggacatagtcattcagaagccaccgaaatatcgcacgtg

SEQ ID NO: 514453 - DNA, 55 bp, Artificial
  Synthetic oligonucleotide
ctgcatgtagtgcattaattatagcatgatgggcagcataatctggtactgtggg

SEQ ID NO: 514454 - DNA, 55 bp, Artificial
  Synthetic oligonucleotide
ctcccaatggggagtatcttagtacttatcacgcccagctcataaagatgtttcc

SEQ ID NO: 514455 - DNA, 55 bp, Artificial
  Synthetic oligonucleotide
cctgtgcgcacctagaggccggaagggagcacgcagagcacaaagacacactggt

SEQ ID NO: 514456 - DNA, 55 bp, Artificial
  Synthetic oligonucleotide
ccggcttgcttattacacctagtgcgccttcctgcgatttgtctcggttaggcga

SEQ ID NO: 514457 - DNA, 55 bp, Artificial
  Synthetic oligonucleotide
ccggatactccgacctgttcgtggtggacacagcgagtcagttatacttagtaac

SEQ ID NO: 514458 - DNA, 55 bp, Artificial
  Synthetic oligonucleotide
ccgctggacggggatgtacgccttaagcaccgacttatggttgttgtagattgca

SEQ ID NO: 514459 - DNA, 55 bp, Artificial
  Synthetic oligonucleotide
cccttgaacctgtcgcacatcccagtaaccgactcaacaatagaaattttctgtg

SEQ ID NO: 514460 - DNA, 55 bp, Artificial
  Synthetic oligonucleotide
ccacggaaacatgggctagtgcaaactctgcatctacttacttctcatggaagta

SEQ ID NO: 514461 - DNA, 55 bp, Artificial
  Synthetic oligonucleotide
agcaagaagacccaccccgagagtgtgtcataccccgtgtgacaggcaggcacag

SEQ ID NO: 514462 - DNA, 55 bp, Artificial
  Synthetic oligonucleotide
aagtcacggccctcccgaacggactcgtcgtacttccggcctaaatacagcgtgg

SEQ ID NO: 514463 - DNA, 55 bp, Artificial
  Synthetic oligonucleotide
aacatgatcactgcatgtattcgcacattggcagatcagtctcgaatatacacct

SEQ ID NO: 514464 - DNA, 55 bp, Artificial
  Synthetic oligonucleotide
aaatgtacacaaaatgccatacatgcggagtgatctattctgagacaactccctc

SEQ ID NO: 514465 - DNA, 55 bp, Artificial
  Synthetic oligonucleotide
aaatacctttaaaccgggaccggtgctctttcggtatcttaacaccgactgcctc

SEQ ID NO: 514466 - DNA, 54 bp, Artificial
  Synthetic oligonucleotide
acttatgactgccgatcggaaccacagacagaccggctggttaactaataacga

SEQ ID NO: 514467 - DNA, 53 bp, Artificial
  Synthetic oligonucleotide
taattggcgcaagggatagaaactgcgcatacacggttggcacaataataccc

SEQ ID NO: 514468 - DNA, 52 bp, Artificial
  Synthetic oligonucleotide
ccagacacacagcaataggcctgccaccggtgtacctctgttgtttcgcttc

SEQ ID NO: 514469 - DNA, 51 bp, Artificial
  Synthetic oligonucleotide
cggcagaaagattgaagaaaggcctagctcattccttatagacggcatctt

SEQ ID NO: 514470 - DNA, 51 bp, Artificial
  Synthetic oligonucleotide
gcatagaatactgactgaggaatggcccgagaagtgactggctcattctct

SEQ ID NO: 514471 - DNA, 51 bp, Artificial
  Synthetic oligonucleotide
caagacggaaagatttctctgatacgcaccaacagctttagatggcctaag

SEQ ID NO: 514472 - DNA, 55 bp, Artificial
  Synthetic oligonucleotide
ttaaccagcagtgtctactggaaggacgtggcctagcagggtttagggtgttgtg

SEQ ID NO: 514473 - DNA, 55 bp, Artificial
  Synthetic oligonucleotide
tgcccattactgcacacgccttcaacgctgaccgcacccgtatgttgctataacc

SEQ ID NO: 514474 - DNA, 55 bp, Artificial
  Synthetic oligonucleotide
gtcatgattagtagcattagccaacataatggccgtaccatgctagccctgatca

SEQ ID NO: 514475 - DNA, 55 bp, Artificial
  Synthetic oligonucleotide
gggtgggactgcatagccaaccatatgatattcgaatgtatggtcagatagcagc

SEQ ID NO: 514476 - DNA, 55 bp, Artificial
  Synthetic oligonucleotide
ggggtaactgtgcaagtggcgactcaagcgacgcgtttgtaaagtctggctgggt

SEQ ID NO: 514477 - DNA, 55 bp, Artificial
  Synthetic oligonucleotide
ggggaccccatgccaatatccatgaaggcattggaggtaccatggcagatgtcag

SEQ ID NO: 514478 - DNA, 55 bp, Artificial
  Synthetic oligonucleotide
gggacatatggacgaggctttacgggtgcatcaagtattaaaagacctgcccatc

SEQ ID NO: 514479 - DNA, 55 bp, Artificial
  Synthetic oligonucleotide
ggctagtgagtgggtcaaccattaccgtgagtcttgaaagagtctatgacctttg

SEQ ID NO: 514480 - DNA, 55 bp, Artificial
  Synthetic oligonucleotide
gcgctcagcaaagtgcactagccgatgtgcatcaagggttgttgccgtgtttcct

SEQ ID NO: 514481 - DNA, 55 bp, Artificial
  Synthetic oligonucleotide
gccgggcgaatatcacagtggctccaaggtaacattctaattgtgcacgattcaa

SEQ ID NO: 514482 - DNA, 55 bp, Artificial
  Synthetic oligonucleotide
gcagcagactgcgtctagagtttggcggcgacagattgctagaaaacatgtgtga

SEQ ID NO: 514483 - DNA, 55 bp, Artificial
  Synthetic oligonucleotide
gactgtccttgaagttgctctgttgttgtgcgatggtcacagatgatgctctgtc

SEQ ID NO: 514484 - DNA, 55 bp, Artificial
  Synthetic oligonucleotide
gacgtggctattaaactggcctacccatcttaacattggttgggttgtgatggac

SEQ ID NO: 514485 - DNA, 55 bp, Artificial
  Synthetic oligonucleotide
ctgctcgcctcaatatactgtggatgactgttatcgcctgcagactcatagtcgc

SEQ ID NO: 514486 - DNA, 55 bp, Artificial
  Synthetic oligonucleotide
cgcccagtgtcattttagtcgcatgctgatcgctgactccttcgcctgcaagcaa

SEQ ID NO: 514487 - DNA, 55 bp, Artificial
  Synthetic oligonucleotide
cgcatggtccacagcagccaaatctgacactgttgcatcttgattcgttggtgct

SEQ ID NO: 514488 - DNA, 55 bp, Artificial
  Synthetic oligonucleotide
cgactgcccacagctgcacaaacatgtctggaatggctttggcgcacgatgtcag

SEQ ID NO: 514489 - DNA, 55 bp, Artificial
  Synthetic oligonucleotide
ccttcccagtgggtatattctccattttcagtcgtatattgtgtgggcatatcgg

SEQ ID NO: 514490 - DNA, 55 bp, Artificial
  Synthetic oligonucleotide
cctgtgcatgtactcggcacggtagtgtgttgagcagcggtccaatgatcctgca

SEQ ID NO: 514491 - DNA, 55 bp, Artificial
  Synthetic oligonucleotide
ccgggatctggcctgtaatgtcatttgaatcgacgccactgcagggatattcggt

SEQ ID NO: 514492 - DNA, 55 bp, Artificial
  Synthetic oligonucleotide
ccaaccatcctgtatttggaaaagtactgaccgagtcggaattgattgccagata

SEQ ID NO: 514493 - DNA, 55 bp, Artificial
  Synthetic oligonucleotide
caagatcattgccatcaagcctgctagcaaacctagtgctgttcagtcaggtagg

SEQ ID NO: 514494 - DNA, 55 bp, Artificial
  Synthetic oligonucleotide
agaatgctcatctaccgcgtagtcccatagatgcatgaccccacttggcactcgc

SEQ ID NO: 514495 - DNA, 53 bp, Artificial
  Synthetic oligonucleotide
gtcgactgggtgccgcgtcgtctcctttgcgaatggattgcaatagagaggta

SEQ ID NO: 514496 - DNA, 52 bp, Artificial
  Synthetic oligonucleotide
caagagtaactgcagacgtggttgaaatgataccagaccgcgcctcttttgc

SEQ ID NO: 514497 - DNA, 55 bp, Artificial
  Synthetic oligonucleotide
ttcgcaaccttcccaccgctacctcccagtccgcgagcatacgcctgccgttcta

SEQ ID NO: 514498 - DNA, 55 bp, Artificial
  Synthetic oligonucleotide
gtcgaagggatcggcctgaaccggataaccaagaacctcgctcgagcattaccca

SEQ ID NO: 514499 - DNA, 55 bp, Artificial
  Synthetic oligonucleotide
gggacggcctggcaagtgacagaggcgaagagcgacgttccgagtcacaggagat

SEQ ID NO: 514500 - DNA, 55 bp, Artificial
  Synthetic oligonucleotide
ggcctccttcgccgctcccagcgtcgtcattgaagacaagggcctcaagggcggt

SEQ ID NO: 514501 - DNA, 55 bp, Artificial
  Synthetic oligonucleotide
gcgtcagtctgcgacgacgagaggggcaggtcagctcgttccttgtcaagcgctt

SEQ ID NO: 514502 - DNA, 55 bp, Artificial
  Synthetic oligonucleotide
gagccttatcagcagcttgctctacgcagtcggaccgcgttaatagacgcacctg

SEQ ID NO: 514503 - DNA, 55 bp, Artificial
  Synthetic oligonucleotide
gagcaactttggtgtttgagcttgtaccgcagcgcgaatacttggcgaggagggg

SEQ ID NO: 514504 - DNA, 55 bp, Artificial
  Synthetic oligonucleotide
gactctgcgtttacgagcttgtcagtaactccgcaacagacggggaggtgacgac

SEQ ID NO: 514505 - DNA, 55 bp, Artificial
  Synthetic oligonucleotide
cggaagggccgtcaacatcgggtatgtcgccaatgacggggatctcgctcgtcga

SEQ ID NO: 514506 - DNA, 55 bp, Artificial
  Synthetic oligonucleotide
cgcacttccgcattcgaagcaaatgctcggccgaagaaggatcattgacgctcag

SEQ ID NO: 514507 - DNA, 55 bp, Artificial
  Synthetic oligonucleotide
cgaatcgctagtacgcacgggcgagttggggagtgcggtaccgaggcaggtgact

SEQ ID NO: 514508 - DNA, 55 bp, Artificial
  Synthetic oligonucleotide
cgaatcatagaaatggaaagcgagcgtacctgccagctagtgccctcgcgaaggc

SEQ ID NO: 514509 - DNA, 55 bp, Artificial
  Synthetic oligonucleotide
ccagtacagcgtgtctgatacactcactagatttgtcaaatgtcgacccgctcct

SEQ ID NO: 514510 - DNA, 55 bp, Artificial
  Synthetic oligonucleotide
cacgcacattcgctccctctccgacgccagccgagtctttccccttgctcagatg

SEQ ID NO: 514511 - DNA, 55 bp, Artificial
  Synthetic oligonucleotide
acttcagctggtactataaaacgctgcaagttaaccatgtgatgactgtccttgc

SEQ ID NO: 514512 - DNA, 53 bp, Artificial
  Synthetic oligonucleotide
gaagcgaagaactgactctcgttcgtgctgtgcgctcgcagcggctcgtggat

SEQ ID NO: 514513 - DNA, 52 bp, Artificial
  Synthetic oligonucleotide
ttcgaggcggacgtgaggtcgctcgcgcgttggaggtagaacccaaagtacg

SEQ ID NO: 514514 - DNA, 55 bp, Artificial
  Synthetic oligonucleotide
ggttgcaaaattagtgcgattcagctctccgatggaacagtactcgctgacaaaa

SEQ ID NO: 514515 - DNA, 55 bp, Artificial
  Synthetic oligonucleotide
ggcagaaagccccgttcttgataggccgttgtcaggattgcagggtccagttttc

SEQ ID NO: 514516 - DNA, 55 bp, Artificial
  Synthetic oligonucleotide
ggatccaaaatggacgatcaacaaagagctggtgtccaatggtctcggtattgtt

SEQ ID NO: 514517 - DNA, 55 bp, Artificial
  Synthetic oligonucleotide
gcgttcaaggcaacgttcagactaagtttgacaatagacagccagtacgacgcgc

SEQ ID NO: 514518 - DNA, 55 bp, Artificial
  Synthetic oligonucleotide
gcggcagactatcggtgctgctttcccattccacagactccagccctttgccaga

SEQ ID NO: 514519 - DNA, 55 bp, Artificial
  Synthetic oligonucleotide
gcgacgatcatcatgcgcattttctgtaccttgctcggttggttctcggcctttg

SEQ ID NO: 514520 - DNA, 55 bp, Artificial
  Synthetic oligonucleotide
gattggccagtagcggaactggaaccataaccggatgcagaaccaacagggctcg

SEQ ID NO: 514521 - DNA, 55 bp, Artificial
  Synthetic oligonucleotide
gattccaatgtgggagctggaaggaacacgcaatctcgaagtgaatgatgtgagc

SEQ ID NO: 514522 - DNA, 55 bp, Artificial
  Synthetic oligonucleotide
ctcaggagaccctgcgtcgcatcctaagttacctgaacagctggatagtctcccc

SEQ ID NO: 514523 - DNA, 55 bp, Artificial
  Synthetic oligonucleotide
cgaggttccatggccgatgcccgtcgaaaatgtatatgcgtcgcgtgagcttcat

SEQ ID NO: 514524 - DNA, 55 bp, Artificial
  Synthetic oligonucleotide
cgaggaggtgaatgcgcaaacgtacaaaatgggctacaacataggcgtgcgtctg

SEQ ID NO: 514525 - DNA, 55 bp, Artificial
  Synthetic oligonucleotide
cctgagggatctttggacaattcctcgtcgtctaaaatggccacatcacatgcca

SEQ ID NO: 514526 - DNA, 55 bp, Artificial
  Synthetic oligonucleotide
atggacagggcggtgcgagctagtggtggttttacgccacgggaagtaccgtgtg

SEQ ID NO: 514527 - DNA, 55 bp, Artificial
  Synthetic oligonucleotide
atcccgtattcaagttcaacatagctccagaatggtctgcagtctcgtccggctc

SEQ ID NO: 514528 - DNA, 55 bp, Artificial
  Synthetic oligonucleotide
aggttcacaatctcctttgcccgacgaagcgactcaacactggctccgctccgtg

SEQ ID NO: 514529 - DNA, 52 bp, Artificial
  Synthetic oligonucleotide
gcgcaaacctcattcctgtgggctatgagaatgtccttctgctgactagacg

SEQ ID NO: 514530 - DNA, 52 bp, Artificial
  Synthetic oligonucleotide
tggccggtaggctttgatccacctcccgactatctacctgccaaatacattc

SEQ ID NO: 514531 - DNA, 55 bp, Artificial
  Synthetic oligonucleotide
ggtattcagtacggccttcgggcaaccattgtttgtgatgatcaacgtcttataa

SEQ ID NO: 514532 - DNA, 55 bp, Artificial
  Synthetic oligonucleotide
gggtcggggattccgcgtaggacccacggatgcctcttgacctcttccaacgtaa

SEQ ID NO: 514533 - DNA, 55 bp, Artificial
  Synthetic oligonucleotide
ccaagaagcgacctcagcgccgtatcacctccattcggagcttgacgagccttcg

SEQ ID NO: 514534 - DNA, 55 bp, Artificial
  Synthetic oligonucleotide
ccccggcgcacaagcaagtttcttcgtaaagctctgcggctcaggcttaaacaca

SEQ ID NO: 514535 - DNA, 55 bp, Artificial
  Synthetic oligonucleotide
cccctgctcaccgtatacatcttgaaagtcctaaagacacccttcccagtgttac

SEQ ID NO: 514536 - DNA, 55 bp, Artificial
  Synthetic oligonucleotide
ccctggtgtcgggtggcatatgccttcgtacatcgaaatgaagtgtgagttgtcg

SEQ ID NO: 514537 - DNA, 55 bp, Artificial
  Synthetic oligonucleotide
cgcctcattcggacacacaaagtcactccccaataacgcctcctgcgcacactcc

SEQ ID NO: 514538 - DNA, 55 bp, Artificial
  Synthetic oligonucleotide
ggatgataacgggaatctattctcctcttcgcctaaagctactcggaagttctcc

SEQ ID NO: 514539 - DNA, 55 bp, Artificial
  Synthetic oligonucleotide
cgtggggatttaattacagaccgtgatgcctttacgaattatcgcccagtctcgc

SEQ ID NO: 514540 - DNA, 55 bp, Artificial
  Synthetic oligonucleotide
gaaggtggcaacttacgggcgaaatagaactggggccatgatcccaccaagtact

SEQ ID NO: 514541 - DNA, 55 bp, Artificial
  Synthetic oligonucleotide
gcacggttagcaagacgaccactacactcgctgacgcactccgacaaggtggtgg

SEQ ID NO: 514542 - DNA, 55 bp, Artificial
  Synthetic oligonucleotide
gcagtactgctgtgtgcaaacttcttgacgtaactttcccatgtgcgcgcgaatc

SEQ ID NO: 514543 - DNA, 55 bp, Artificial
  Synthetic oligonucleotide
ggagacgcgccggcctgtccctatgaggtgagtcaggctgtaagagtcttcaaga

SEQ ID NO: 514544 - DNA, 52 bp, Artificial
  Synthetic oligonucleotide
aacctgtcacattgttagcattcagtcctatcaagacgcccattggaggctc

SEQ ID NO: 514545 - DNA, 51 bp, Artificial
  Synthetic oligonucleotide
cgtcttgcggtaggcattttcgtcccggttttcccagcccacacctccagc

SEQ ID NO: 514546 - DNA, 51 bp, Artificial
  Synthetic oligonucleotide
ttttgtgcggtgcgaaacttgtagtatcggaacctgattttgcctgtatgt

SEQ ID NO: 514547 - DNA, 50 bp, Artificial
  Synthetic oligonucleotide
atgcgctgcagctgcggttaggagaattgtacgggtccatacgggtaaac

SEQ ID NO: 514548 - DNA, 55 bp, Artificial
  Synthetic oligonucleotide
tttagaaactcgctgcgtaacctcgctgctgacgtattgaagaagttcatacaag

SEQ ID NO: 514549 - DNA, 55 bp, Artificial
  Synthetic oligonucleotide
gttacaacattgaaggtcgtgttcttagatggcagaactggagtctgcatgtcgg

SEQ ID NO: 514550 - DNA, 55 bp, Artificial
  Synthetic oligonucleotide
gttaagtttgagttcttttgcctggatttgtgagataacctcgcactaagagccg

SEQ ID NO: 514551 - DNA, 55 bp, Artificial
  Synthetic oligonucleotide
gcttccaaacgagcgctatttgagtcgttaacccaaggtgcgttagatgctgata

SEQ ID NO: 514552 - DNA, 55 bp, Artificial
  Synthetic oligonucleotide
gcagacgaaagtcgtgagcacggatgatacataagtcccacataacatatcgtgc

SEQ ID NO: 514553 - DNA, 55 bp, Artificial
  Synthetic oligonucleotide
gcaaggttagggattgattgatcgtagaggttgttggtgcgtctagcagaagtgc

SEQ ID NO: 514554 - DNA, 55 bp, Artificial
  Synthetic oligonucleotide
cttgtccgtacgcaacacaaatcgaagttgattctaattgggttgaaggtacaca

SEQ ID NO: 514555 - DNA, 55 bp, Artificial
  Synthetic oligonucleotide
ctattcaccctgtcctgtcaaactagctactccacccactggtatatttgcaagt

SEQ ID NO: 514556 - DNA, 55 bp, Artificial
  Synthetic oligonucleotide
cctttccagggaccagaactcgtgtgtcatccgaaaacattgcacctagtgcaca

SEQ ID NO: 514557 - DNA, 55 bp, Artificial
  Synthetic oligonucleotide
ccttgcacctggagtgcccatgattttgtttgtgacatcctttgtctgagtgccg

SEQ ID NO: 514558 - DNA, 55 bp, Artificial
  Synthetic oligonucleotide
cctcgcgatagtagttgttagcgacgaaaggcattttaacaacttcagcttggcg

SEQ ID NO: 514559 - DNA, 55 bp, Artificial
  Synthetic oligonucleotide
attatcgtttgggagtgatgaggtcattgcaccagaacagaagactgatccaaaa

SEQ ID NO: 514560 - DNA, 55 bp, Artificial
  Synthetic oligonucleotide
aggaactaaagcaggaccaataccacagctttgttatttctatttcgcagcacac

SEQ ID NO: 514561 - DNA, 55 bp, Artificial
  Synthetic oligonucleotide
aagaaccaaaacccagatgttagagcactaggcccacttttcgtacagactgttg

SEQ ID NO: 514562 - DNA, 54 bp, Artificial
  Synthetic oligonucleotide
atggacgagccttgaatgtcaaagtgcatgactcgcctgtacggtgatttacga

SEQ ID NO: 514563 - DNA, 52 bp, Artificial
  Synthetic oligonucleotide
ttgcgcgtgtgttattgtctttacttggttgattacagcctctgtaacgacg

SEQ ID NO: 514564 - DNA, 50 bp, Artificial
  Synthetic oligonucleotide
cgcgaggactctatgtaaacattccccgtcctgctatttattggggtgca

SEQ ID NO: 514565 - DNA, 55 bp, Artificial
  Synthetic oligonucleotide
ttgcaagaactgacggtgggaaggacgaaatcgagcctgtaagcagagtgctata

SEQ ID NO: 514566 - DNA, 55 bp, Artificial
  Synthetic oligonucleotide
ttatcccaaaccgcaaactagtgcccggactgttaaaataggtaaagtagttagt

SEQ ID NO: 514567 - DNA, 55 bp, Artificial
  Synthetic oligonucleotide
tgctgcatcgaccttcgcatgctgtgatgtagggttgtatcgcttgtgcgggtct

SEQ ID NO: 514568 - DNA, 55 bp, Artificial
  Synthetic oligonucleotide
taggagccataggagacaagggtcggccgctcaggggtgcgggcacggatgctag

SEQ ID NO: 514569 - DNA, 55 bp, Artificial
  Synthetic oligonucleotide
gtttgtctcaggcttgcccttggaataacacttcgttttagcggaatccgagtta

SEQ ID NO: 514570 - DNA, 55 bp, Artificial
  Synthetic oligonucleotide
gttcgtgaagtcactctatccaccaaccacgtgccgtttcccgacaccccacgtg

SEQ ID NO: 514571 - DNA, 55 bp, Artificial
  Synthetic oligonucleotide
ggtagtgagggcgccggttcgggctgtgaggtgggcgctttggttatagggatgt

SEQ ID NO: 514572 - DNA, 55 bp, Artificial
  Synthetic oligonucleotide
gctaccgggcagtttgtagctatctcgattgcggtgcaactagccttggggaagc

SEQ ID NO: 514573 - DNA, 55 bp, Artificial
  Synthetic oligonucleotide
gcccaaggacgagcatgacactgtacgaaaacgccagcagattagcccacaacaa

SEQ ID NO: 514574 - DNA, 55 bp, Artificial
  Synthetic oligonucleotide
gatctgtacccttgagcatagcgttaagtaggtcctttcgttcggttggatgctg

SEQ ID NO: 514575 - DNA, 55 bp, Artificial
  Synthetic oligonucleotide
ctgcctcttgcgcaaggaatctcgcttctgcggggacattgccgttgacggtcca

SEQ ID NO: 514576 - DNA, 55 bp, Artificial
  Synthetic oligonucleotide
ctcaggtgcacacagagttcggctaggcagagttgggcgtgtcaaagtgggtgca

SEQ ID NO: 514577 - DNA, 55 bp, Artificial
  Synthetic oligonucleotide
ctaagatgcctagttaacaagcctaaaacggaccaaaagagcttagctgaatatg

SEQ ID NO: 514578 - DNA, 55 bp, Artificial
  Synthetic oligonucleotide
cgtggggcacggtcaaccgtcaaggacctgagatatttcccaagccataagtcct

SEQ ID NO: 514579 - DNA, 55 bp, Artificial
  Synthetic oligonucleotide
cgcaaagcaactctccgtgcacgcaaccccagcgatgatgggccttgtagtagta

SEQ ID NO: 514580 - DNA, 55 bp, Artificial
  Synthetic oligonucleotide
caccatctgcggtccccggactttgagaatgtcaccatagcctgtctggagtgcg

SEQ ID NO: 514581 - DNA, 55 bp, Artificial
  Synthetic oligonucleotide
acctcgtcaagtcgacagggagtctgttcaggtgtcagcggtctcctctcccggc

SEQ ID NO: 514582 - DNA, 55 bp, Artificial
  Synthetic oligonucleotide
gggccacctctggcaggcgcgctgagaacgcgtatgaacggaaaagtcaccatcc

SEQ ID NO: 514583 - DNA, 55 bp, Artificial
  Synthetic oligonucleotide
ggcgtacgctcttgtttcacaatgacagtcttccagattgacctcagaagtctcg

SEQ ID NO: 514584 - DNA, 55 bp, Artificial
  Synthetic oligonucleotide
ggatctttcagaggagacatgtacagggcgggagtagcaaaccactcccacccaa

SEQ ID NO: 514585 - DNA, 55 bp, Artificial
  Synthetic oligonucleotide
ggaatagagtcaacggtcgttgcagcaggagacgaaggtccacagtaagcagggg

SEQ ID NO: 514586 - DNA, 55 bp, Artificial
  Synthetic oligonucleotide
gctgccaaggtcaacagagatccaacactcccgcgatcctacaggcttatagccc

SEQ ID NO: 514587 - DNA, 55 bp, Artificial
  Synthetic oligonucleotide
gctccataatactgtcccgcccaaagtcgcggagggaagttgcgtggtcgtgggg

SEQ ID NO: 514588 - DNA, 55 bp, Artificial
  Synthetic oligonucleotide
gccttctttcacatgtgtgaatcaggctgtggatgggcgctatctgaccaccagc

SEQ ID NO: 514589 - DNA, 55 bp, Artificial
  Synthetic oligonucleotide
gcctcttacttccgttgctgttggttacaaggctccctcgtttcactgcgacgac

SEQ ID NO: 514590 - DNA, 55 bp, Artificial
  Synthetic oligonucleotide
gcccctatcaatgttgatatcgttctattggaagcgctcgtcctctatataggtc

SEQ ID NO: 514591 - DNA, 55 bp, Artificial
  Synthetic oligonucleotide
gccagctggacccggcagaatgcaccaggatactctggggatcggttcacagtcc

SEQ ID NO: 514592 - DNA, 55 bp, Artificial
  Synthetic oligonucleotide
gcatcctaagtctttaccaaacttaccaaccctgcttagaatccacccacattgg

SEQ ID NO: 514593 - DNA, 55 bp, Artificial
  Synthetic oligonucleotide
gcaactccaggcctagtttcatgaattgtgtgtggctttcgtcagccgcgtcgct

SEQ ID NO: 514594 - DNA, 55 bp, Artificial
  Synthetic oligonucleotide
gatttatcattacgttagagcggatatcttgtcttccgtgcagaagttcgcacag

SEQ ID NO: 514595 - DNA, 55 bp, Artificial
  Synthetic oligonucleotide
gattaaccaccagccttccaatctgccaggggcagctcattaatcatgtccagct

SEQ ID NO: 514596 - DNA, 55 bp, Artificial
  Synthetic oligonucleotide
gatattagtcgacattccaaacgggctagaggtattattccgcgacttatcccca

SEQ ID NO: 514597 - DNA, 55 bp, Artificial
  Synthetic oligonucleotide
gataagatcaaagacaccgccaggataactattgtgcacatgaacaatcaagctc

SEQ ID NO: 514598 - DNA, 55 bp, Artificial
  Synthetic oligonucleotide
gaggaaccaaggcttacaagagaggagaatctgtaagaatttgctgcaaacccct

SEQ ID NO: 514599 - DNA, 55 bp, Artificial
  Synthetic oligonucleotide
gactgcagtcaaatttccccgccaaagtcggtcacggcggtcataatcgacagtg

SEQ ID NO: 514600 - DNA, 55 bp, Artificial
  Synthetic oligonucleotide
gacccaagcggagtgatgggcagtagttagctcggcatctgagagaggggctcgt

SEQ ID NO: 514601 - DNA, 55 bp, Artificial
  Synthetic oligonucleotide
gacccaaccagacttctggttcaacacagcccgtgaatcgacagggtagaggcgg

SEQ ID NO: 514602 - DNA, 55 bp, Artificial
  Synthetic oligonucleotide
gaatgcgggttatcgtggcaccggtattgtattacggctggtttgctggggtaac

SEQ ID NO: 514603 - DNA, 55 bp, Artificial
  Synthetic oligonucleotide
ttttgatgacccggaccccttatgtaagccagagtggaccttgggagtcacgtga

SEQ ID NO: 514604 - DNA, 55 bp, Artificial
  Synthetic oligonucleotide
tttgcgtcatggtagttcctacaaccctcaacatttatcccatgagtctcccaat

SEQ ID NO: 514605 - DNA, 55 bp, Artificial
  Synthetic oligonucleotide
tttgcggcatgtcccacaaatttacgcgccatatctcgagaaagttacagcggca

SEQ ID NO: 514606 - DNA, 55 bp, Artificial
  Synthetic oligonucleotide
tttccgactcgaaaggcgcgtaggttacataccagcacctactatcaccaagtct

SEQ ID NO: 514607 - DNA, 55 bp, Artificial
  Synthetic oligonucleotide
ttctcctcgcttgtactctgggcacaggtcccaccggttaacacatctaccccta

SEQ ID NO: 514608 - DNA, 55 bp, Artificial
  Synthetic oligonucleotide
ttccaactccctcctcatgaacccagtctgaagcaacatcgccttgtggagttag

SEQ ID NO: 514609 - DNA, 55 bp, Artificial
  Synthetic oligonucleotide
tgagtagtgcgttgagcgattagaaagagtttcatcgaactccagaactgccggc

SEQ ID NO: 514610 - DNA, 55 bp, Artificial
  Synthetic oligonucleotide
tctaatcttttcaccataccacccgcagcatccaccttgaacccgctcgatcccc

SEQ ID NO: 514611 - DNA, 55 bp, Artificial
  Synthetic oligonucleotide
tcaacggcccattagtcagtccctttcttcttttacgctcatgccttaaataccc

SEQ ID NO: 514612 - DNA, 55 bp, Artificial
  Synthetic oligonucleotide
tcaaaagagcgcagctcagtggaatatccgtgactattgcttgcctcttgctggg

SEQ ID NO: 514613 - DNA, 55 bp, Artificial
  Synthetic oligonucleotide
tatgcctctggtatcctggcatgcgacccatccatttcgactaaatcatgtggac

SEQ ID NO: 514614 - DNA, 55 bp, Artificial
  Synthetic oligonucleotide
tacacactggtcaccaggtggatggatatgtgttggttctttatgaaggagcttc

SEQ ID NO: 514615 - DNA, 55 bp, Artificial
  Synthetic oligonucleotide
gttcacaccgtggatacctaagttatgtcttatcagcaaactatgccattgcaag

SEQ ID NO: 514616 - DNA, 55 bp, Artificial
  Synthetic oligonucleotide
gtctgccaagcctcatggggctctgttgtagtggggattccggtacctcattagg

SEQ ID NO: 514617 - DNA, 55 bp, Artificial
  Synthetic oligonucleotide
gtcgctgccaagaactgccggcctactgtccggccatgactgatcgtcctcatcg

SEQ ID NO: 514618 - DNA, 55 bp, Artificial
  Synthetic oligonucleotide
ggttcacacagtagcagccttttatgtgtgctcgcaagcacatgacttattgcct

SEQ ID NO: 514619 - DNA, 55 bp, Artificial
  Synthetic oligonucleotide
ggggtggcgggatttggtgacaatgtatgctcgtggtgatacgtccaatgtgacg

SEQ ID NO: 514620 - DNA, 55 bp, Artificial
  Synthetic oligonucleotide
ggggtgctggggcctgcctggattataaccacctgcaaggtcacgtggtcacgtg

SEQ ID NO: 514621 - DNA, 55 bp, Artificial
  Synthetic oligonucleotide
ggggtgataagtgtcccatttcagacacatttgatctctctgtgcgctccatcct

SEQ ID NO: 514622 - DNA, 55 bp, Artificial
  Synthetic oligonucleotide
ggggagatccctgtggaaacgttaggcgaacctggagaggcatgctctattatgg

SEQ ID NO: 514623 - DNA, 55 bp, Artificial
  Synthetic oligonucleotide
gggcgatgttgcatatgtttggtatgagggacgcacctcgctcatagttgctttg

SEQ ID NO: 514624 - DNA, 55 bp, Artificial
  Synthetic oligonucleotide
ccgctatagagataccagaatatgccgacgatgatagaagctttccatcccctct

SEQ ID NO: 514625 - DNA, 55 bp, Artificial
  Synthetic oligonucleotide
cccttcggctccctgctaaggaaaagacgggaatatctaatcaacataccaagtc

SEQ ID NO: 514626 - DNA, 55 bp, Artificial
  Synthetic oligonucleotide
cccagcatctcagtcaggaatgacccagccaaaccgaaaccccgtctactgctac

SEQ ID NO: 514627 - DNA, 55 bp, Artificial
  Synthetic oligonucleotide
ccatttggccaggggaccattacagacgcttcgctaagtccagataataagtatc

SEQ ID NO: 514628 - DNA, 55 bp, Artificial
  Synthetic oligonucleotide
ccacatgtacgatcctcacagacagactatctcaccaaggactagatattaggga

SEQ ID NO: 514629 - DNA, 55 bp, Artificial
  Synthetic oligonucleotide
ccacacctgggtgtgcgctattcttttcttcagtccgggctagggcaactttatc

SEQ ID NO: 514630 - DNA, 55 bp, Artificial
  Synthetic oligonucleotide
catctgtatatccagataatcagcagacggtggggtaatcgaaacaggagtattg

SEQ ID NO: 514631 - DNA, 55 bp, Artificial
  Synthetic oligonucleotide
catcaacatggttcttgcagttgtggtattagctgtagtcctcctatcggcttag

SEQ ID NO: 514632 - DNA, 55 bp, Artificial
  Synthetic oligonucleotide
cagcgtctttgcgaacgcgatgtttgggcggtgaggttgtaatttcccaggttcg

SEQ ID NO: 514633 - DNA, 55 bp, Artificial
  Synthetic oligonucleotide
cactctttgggtttccataccctgcttcaaatagacccatggaagttgggtggtt

SEQ ID NO: 514634 - DNA, 55 bp, Artificial
  Synthetic oligonucleotide
caatctccagccatctggcagcccatcaaaccagcctttctggatattctgatcc

SEQ ID NO: 514635 - DNA, 55 bp, Artificial
  Synthetic oligonucleotide
caatccagcgctattctcacaggattctcttccactcatcggtcccggagagggg

SEQ ID NO: 514636 - DNA, 55 bp, Artificial
  Synthetic oligonucleotide
caatcaagactgtccccaggacagcatgcgtgtggacacgaccgttgatgagctg

SEQ ID NO: 514637 - DNA, 55 bp, Artificial
  Synthetic oligonucleotide
caaggtcaagcctgtccctctcttaaggtagttcaccactaagcaagccacacca

SEQ ID NO: 514638 - DNA, 55 bp, Artificial
  Synthetic oligonucleotide
attcaatggaataggaaccagtgcacttccgggtggtaagttctttgctgcagcg

SEQ ID NO: 514639 - DNA, 55 bp, Artificial
  Synthetic oligonucleotide
atgagcgctgaagcgtcataacgcagcgacgatgccaacagctccgtagccgccg

SEQ ID NO: 514640 - DNA, 55 bp, Artificial
  Synthetic oligonucleotide
atactgagacaacgcctgggttactttcgtccccagcccgggagggccgcacgtc

SEQ ID NO: 514641 - DNA, 55 bp, Artificial
  Synthetic oligonucleotide
aatcagcaccaccgctacacgaacagtcaagattggaatccgcagtcatcgtttg

SEQ ID NO: 514642 - DNA, 55 bp, Artificial
  Synthetic oligonucleotide
aagaccatcaggtctcggcccaacgacacggtgccgccattcgggtcagtcgctc

SEQ ID NO: 514643 - DNA, 55 bp, Artificial
  Synthetic oligonucleotide
aaatcccgctcacttccgagtctgatcaaactgagcttcttcgtacattccgctg

SEQ ID NO: 514644 - DNA, 55 bp, Artificial
  Synthetic oligonucleotide
gaagcggtcgggaccctttgtgtaggggagatctgatggcagttcggcaccgcct

SEQ ID NO: 514645 - DNA, 55 bp, Artificial
  Synthetic oligonucleotide
gaacctctaggaatcaattgccgtcttgtcgtacagccgcgtgcagatacacttg

SEQ ID NO: 514646 - DNA, 55 bp, Artificial
  Synthetic oligonucleotide
cttgtcgctgcatggctctcgttggcaactctcagtacgatgacgagtttcgttc

SEQ ID NO: 514647 - DNA, 55 bp, Artificial
  Synthetic oligonucleotide
cttctcaggacggagtaattaagaacaggtgtgttcgagacgtttggatgggcag

SEQ ID NO: 514648 - DNA, 55 bp, Artificial
  Synthetic oligonucleotide
ctggcttaccaaagacttagatctagtcctgagaggataacttctggtctcgatc

SEQ ID NO: 514649 - DNA, 55 bp, Artificial
  Synthetic oligonucleotide
ctgcctttgttacctccatgctggactgggacatctgtaccgaagactcctccct

SEQ ID NO: 514650 - DNA, 55 bp, Artificial
  Synthetic oligonucleotide
ctgcccttgttcaggaaacaccgttcgtttataaggtggccctcggcccacctca

SEQ ID NO: 514651 - DNA, 55 bp, Artificial
  Synthetic oligonucleotide
cgtgctgatgagtcctcaagtagtcttctgtgggcatcccagaccatatcatggc

SEQ ID NO: 514652 - DNA, 55 bp, Artificial
  Synthetic oligonucleotide
cgtcgatggtagctctcactctaaggcaccctgtttcctcttgtcataaagcttg

SEQ ID NO: 514653 - DNA, 55 bp, Artificial
  Synthetic oligonucleotide
cggtcgaatctatccgttggcttggatacggcaaagggactttcggtagcctggc

SEQ ID NO: 514654 - DNA, 55 bp, Artificial
  Synthetic oligonucleotide
ccgttgggttccacacggaacagtttacacagaacctcgccatccgaaatgtttg

SEQ ID NO: 514655 - DNA, 55 bp, Artificial
  Synthetic oligonucleotide
cctaacctttgtacaggagtgagcgccactgactatgctcttcagaggttctaag

SEQ ID NO: 514656 - DNA, 55 bp, Artificial
  Synthetic oligonucleotide
cctgacaagccgtaaaatcacttcgattaatctccacacaatcgccatgcttatc

SEQ ID NO: 514657 - DNA, 55 bp, Artificial
  Synthetic oligonucleotide
cctgctagttattatacttgcagcgacatgtgagaaatagcattccccgtattgc

SEQ ID NO: 514658 - DNA, 55 bp, Artificial
  Synthetic oligonucleotide
ccttaatgttcagtgctctttctcaactattgcactgaccagcttctggggtggc

SEQ ID NO: 514659 - DNA, 55 bp, Artificial
  Synthetic oligonucleotide
cgaggaatactcggaagggtgacagtttctagtcaaagattcgaacgatatcatc

SEQ ID NO: 514660 - DNA, 55 bp, Artificial
  Synthetic oligonucleotide
cgatgccattcccgttcagatcgagcataatcgaacaggattgaatctcaggtag

SEQ ID NO: 514661 - DNA, 55 bp, Artificial
  Synthetic oligonucleotide
cgccagggctagctttcatagcttacggttacgcgaataaccccgtcagacttga

SEQ ID NO: 514662 - DNA, 55 bp, Artificial
  Synthetic oligonucleotide
cgcctactcccatacatagtgactccgtacataaggatttgtcaccaccggacag

SEQ ID NO: 514663 - DNA, 55 bp, Artificial
  Synthetic oligonucleotide
cggtcatggccagatcgtgccaagagctaagtcgagttaagaccacccctcctta

SEQ ID NO: 514664 - DNA, 54 bp, Artificial
  Synthetic oligonucleotide
taggtaatgattcaaaaggcgccagccacaatgcactcgtcctatcgacattga

SEQ ID NO: 514665 - DNA, 54 bp, Artificial
  Synthetic oligonucleotide
aataggtatggaactgcacgcatattttcttccgtaacaagtgtggcctccatg

SEQ ID NO: 514666 - DNA, 54 bp, Artificial
  Synthetic oligonucleotide
gtgtgtgcgctcgaaggagcgggagagtcctgcggttatccaagagttagcacg

SEQ ID NO: 514667 - DNA, 54 bp, Artificial
  Synthetic oligonucleotide
gtgcaccagagcagtattctgcaagcactcatctcttaacacaactcattttgt

SEQ ID NO: 514668 - DNA, 53 bp, Artificial
  Synthetic oligonucleotide
acatgatgttcagtcatagtggcttgaagatggtggctcagctcactggaatg

SEQ ID NO: 514669 - DNA, 52 bp, Artificial
  Synthetic oligonucleotide
gatgcgaccacagcgaaagctcgtgcagtgtgttccgtacatactcatcaac

SEQ ID NO: 514670 - DNA, 52 bp, Artificial
  Synthetic oligonucleotide
tacccttttcgtttggtccacggccgcttttgcccttttcacgtctcagttc

SEQ ID NO: 514671 - DNA, 55 bp, Artificial
  Synthetic oligonucleotide
ggtatcatactggcaataccaccaaatgatctcaacatatcgactctttcacgtc

SEQ ID NO: 514672 - DNA, 55 bp, Artificial
  Synthetic oligonucleotide
ggtactccgacgtgatggtgagcggtagtgctgaatcctcgatccacccgttggc

SEQ ID NO: 514673 - DNA, 55 bp, Artificial
  Synthetic oligonucleotide
gggtggaagtaattcatgtcagtggagtcaggtgaaaagactttgtgggacgcgc

SEQ ID NO: 514674 - DNA, 55 bp, Artificial
  Synthetic oligonucleotide
gggctccggtgtttaaatgggcattagtcgctgctggacttaatgatatacaacg

SEQ ID NO: 514675 - DNA, 55 bp, Artificial
  Synthetic oligonucleotide
gggagcgttggaaccgataagaggatactcaaaatttacacgcaaattgattaaa

SEQ ID NO: 514676 - DNA, 55 bp, Artificial
  Synthetic oligonucleotide
gggaaggtttaatcagggaagacgttgcagtttcatcgtcagaatgtgatccctt

SEQ ID NO: 514677 - DNA, 55 bp, Artificial
  Synthetic oligonucleotide
ggctgggtctttcggcacattaggcaaatacaactgtatgagtccaactgcaaac

SEQ ID NO: 514678 - DNA, 55 bp, Artificial
  Synthetic oligonucleotide
ggccaaattatcatctgtgggtattgcttggtcttccgacggtgttaacttccat

SEQ ID NO: 514679 - DNA, 55 bp, Artificial
  Synthetic oligonucleotide
gctttgatgttgacataattccgacttagccatttgctcgttgccatgtggcctc

SEQ ID NO: 514680 - DNA, 55 bp, Artificial
  Synthetic oligonucleotide
gcttgagcaataaggctaggttgcacgcgaataactgaattgaacgaaaatgtga

SEQ ID NO: 514681 - DNA, 55 bp, Artificial
  Synthetic oligonucleotide
gcttcttccttagcgtgaaagcgcatgggcggtgttacaagaaatatacacggag

SEQ ID NO: 514682 - DNA, 55 bp, Artificial
  Synthetic oligonucleotide
gctatcacaacaactccttcctactcctcccaagagttatgcccctctccgccct

SEQ ID NO: 514683 - DNA, 55 bp, Artificial
  Synthetic oligonucleotide
gcgtttggaccatggatagcatctacaaagtggctctattacacttcaaaacctc

SEQ ID NO: 514684 - DNA, 55 bp, Artificial
  Synthetic oligonucleotide
gcgactggtctcatcgattcttagaaaatcttgcacatcgcacatttacgggaca

SEQ ID NO: 514685 - DNA, 55 bp, Artificial
  Synthetic oligonucleotide
gcacattgctctggcggtatacattccagtaaagaagtgaacctagaatcacggt

SEQ ID NO: 514686 - DNA, 55 bp, Artificial
  Synthetic oligonucleotide
gcaacagcaaacggaaacagcactgtaccgcaggtcgtcactgagtggcagtcaa

SEQ ID NO: 514687 - DNA, 55 bp, Artificial
  Synthetic oligonucleotide
gatgaagcaccactgaaactgataggtacttcaggagtaatggctgcactaggaa

SEQ ID NO: 514688 - DNA, 55 bp, Artificial
  Synthetic oligonucleotide
gatccttgctctataaccctttgttgtttatcctgccaccttgttttctgacacc

SEQ ID NO: 514689 - DNA, 55 bp, Artificial
  Synthetic oligonucleotide
gatcaaccgactcatttggaaaccccaacgtgattgtcaccactgtgtttgaacc

SEQ ID NO: 514690 - DNA, 55 bp, Artificial
  Synthetic oligonucleotide
gagtacagagaacacaaggatgaattcactaatatacctgccgctttgggtcacc

SEQ ID NO: 514691 - DNA, 55 bp, Artificial
  Synthetic oligonucleotide
gacgccttggtattacaaatgaaggcaacccttctatgggtgtatgggtcaaacc

SEQ ID NO: 514692 - DNA, 55 bp, Artificial
  Synthetic oligonucleotide
gaccgttggacttcttgggattacttccttaacttcgaggcgtttagaacacgga

SEQ ID NO: 514693 - DNA, 55 bp, Artificial
  Synthetic oligonucleotide
gaattgagtgtgatgtcaatctgtcaatggctgatttccaatttgccaactacga

SEQ ID NO: 514694 - DNA, 55 bp, Artificial
  Synthetic oligonucleotide
gaacagccaggaggtccgagaacattatagtaggggaaaacttgtttgctcccca

SEQ ID NO: 514695 - DNA, 55 bp, Artificial
  Synthetic oligonucleotide
ctgtaacctcccacggtgcaaggcttcgtggccagcgtaacccgtcattgtcacg

SEQ ID NO: 514696 - DNA, 55 bp, Artificial
  Synthetic oligonucleotide
ctggggttgcggtgaatggagatgactgcatatcttcagtgctaggtgccattcg

SEQ ID NO: 514697 - DNA, 55 bp, Artificial
  Synthetic oligonucleotide
tttgttaacacgcttgatccagaaactgaaaggcaacccattgtcacgactaaaa

SEQ ID NO: 514698 - DNA, 55 bp, Artificial
  Synthetic oligonucleotide
tttatcgcatcaatgtaaaattccttggagtgctaccaatgggagagtcactacc

SEQ ID NO: 514699 - DNA, 55 bp, Artificial
  Synthetic oligonucleotide
ttccttgtgtaggtcttcagggacaccctcatttataacatgactaagagcaacg

SEQ ID NO: 514700 - DNA, 55 bp, Artificial
  Synthetic oligonucleotide
ttaatccgataacacctaacccacatttggtcttctccacttctagcttatgggg

SEQ ID NO: 514701 - DNA, 55 bp, Artificial
  Synthetic oligonucleotide
tgtcggtccagcgtacgggtccattagtgccagcccagcgtacgggctcgtcgtt

SEQ ID NO: 514702 - DNA, 55 bp, Artificial
  Synthetic oligonucleotide
tgcattgaaacgactgcccaatacaagcacaaacttactgattggtagagttgcc

SEQ ID NO: 514703 - DNA, 55 bp, Artificial
  Synthetic oligonucleotide
tcatatacggatttcgttacagcgtttctatcaccaaaaggattgccttcaattg

SEQ ID NO: 514704 - DNA, 55 bp, Artificial
  Synthetic oligonucleotide
tcaattgagtgatttctggatgcagagagagtcatagctctcctatggtcagcac

SEQ ID NO: 514705 - DNA, 55 bp, Artificial
  Synthetic oligonucleotide
taggttcgaaaacaatggtaacgtcacatactggagaacaattgtcctactcagt

SEQ ID NO: 514706 - DNA, 55 bp, Artificial
  Synthetic oligonucleotide
gtttcaaaggcttacagttatcagtaacatcatcacttgacaaggcttcccctcg

SEQ ID NO: 514707 - DNA, 55 bp, Artificial
  Synthetic oligonucleotide
gttgtttacgggccttgaaaagaccaaacaagtatggggtgaattgctcatcaag

SEQ ID NO: 514708 - DNA, 55 bp, Artificial
  Synthetic oligonucleotide
gttggggtttgtctgcttgcagtcgacgttgaatgctgttgcccatcattgctat

SEQ ID NO: 514709 - DNA, 55 bp, Artificial
  Synthetic oligonucleotide
gttcagggtcaaccaaaccgagtgtcgaagaagttagtaaatctttgaaaccaac

SEQ ID NO: 514710 - DNA, 55 bp, Artificial
  Synthetic oligonucleotide
gttataatgagatgagagtagatgtgattacccgaggtaatatagcccggcctag

SEQ ID NO: 514711 - DNA, 55 bp, Artificial
  Synthetic oligonucleotide
gtgttggattggctaacgaattggccgctatgctcatacttactatctatccacc

SEQ ID NO: 514712 - DNA, 55 bp, Artificial
  Synthetic oligonucleotide
gtggcatggagcaattacctgacttggcgtatgcatcagctagagaacgtcgaga

SEQ ID NO: 514713 - DNA, 55 bp, Artificial
  Synthetic oligonucleotide
gtgatgcagatcaaggcagctcgtattcacaacgagcactgacaagactgagatc

SEQ ID NO: 514714 - DNA, 55 bp, Artificial
  Synthetic oligonucleotide
gtctataatacttctccattgtcggctacttatgtgcacgaaaactctcagtttg

SEQ ID NO: 514715 - DNA, 55 bp, Artificial
  Synthetic oligonucleotide
gtcggtgcaaactacctagcgatgtgatattatcactcaacgtatccaaagtagt

SEQ ID NO: 514716 - DNA, 55 bp, Artificial
  Synthetic oligonucleotide
gtcaatggcggtggaaaatattctggagagttgtgcaagctggtgtgtagttgtc

SEQ ID NO: 514717 - DNA, 55 bp, Artificial
  Synthetic oligonucleotide
gtcaaattatgtgtcccaatcgacctgaaagtttaactgtggttaccagggtgtc

SEQ ID NO: 514718 - DNA, 55 bp, Artificial
  Synthetic oligonucleotide
gtatgggcattttactaaacatattggcaacagaatggggcaccaaagatgtcaa

SEQ ID NO: 514719 - DNA, 55 bp, Artificial
  Synthetic oligonucleotide
ggttgactcgcaagcaacagtcactaaatatgttcgacaatattgggaacgagca

SEQ ID NO: 514720 - DNA, 55 bp, Artificial
  Synthetic oligonucleotide
ggtgttggtgagtccagtaggggtggagaggaatcggtactcgctcttgaaggac

SEQ ID NO: 514721 - DNA, 55 bp, Artificial
  Synthetic oligonucleotide
ggtgcgtgcccttgtggcggttcttagcaaggagcacaggacgtctgtagcatcg

SEQ ID NO: 514722 - DNA, 55 bp, Artificial
  Synthetic oligonucleotide
ggtgaaattagggtcaagtgctatcgacagtaccatacgtcaattgatgagtggg

SEQ ID NO: 514723 - DNA, 55 bp, Artificial
  Synthetic oligonucleotide
ccaaaataaaagtacagtggcaacgacactatgtagaaagactgtgagcaagccc

SEQ ID NO: 514724 - DNA, 55 bp, Artificial
  Synthetic oligonucleotide
catgtattaacaacaattgtcgctgtagcaattgaaagggttttacggctcgcct

SEQ ID NO: 514725 - DNA, 55 bp, Artificial
  Synthetic oligonucleotide
catgaactttgtggcaatcaccaagttaaggtgttaaccgtgtttaactttcccc

SEQ ID NO: 514726 - DNA, 55 bp, Artificial
  Synthetic oligonucleotide
catcttcactcaatgggtcagttgattctaatgtactacgggtgaatctggggag

SEQ ID NO: 514727 - DNA, 55 bp, Artificial
  Synthetic oligonucleotide
catcatacacgactatgactggcggtaaagcctattagtaaaagcgatggttagg

SEQ ID NO: 514728 - DNA, 55 bp, Artificial
  Synthetic oligonucleotide
cagatgatgtacaaccaagggcagtccctttaaatgcaacccggaatgacacacc

SEQ ID NO: 514729 - DNA, 55 bp, Artificial
  Synthetic oligonucleotide
cacgcactcgacattaccataaacgatgtcaaaatcgatgatcctgccttggttg

SEQ ID NO: 514730 - DNA, 55 bp, Artificial
  Synthetic oligonucleotide
cacctgggtttgaaaagttgggctacgaccctgacgtgtcaccttttatcattcc

SEQ ID NO: 514731 - DNA, 55 bp, Artificial
  Synthetic oligonucleotide
caatgggaccccataatacccacattaattagcaccggtatttccctagtcggtt

SEQ ID NO: 514732 - DNA, 55 bp, Artificial
  Synthetic oligonucleotide
caaggacggcagaatccatgttttgatctatatgattaaccctactggtcatggg

SEQ ID NO: 514733 - DNA, 55 bp, Artificial
  Synthetic oligonucleotide
atgacaattccgttagactgtgtgtatagcgatcagaagtgttatgatccacttg

SEQ ID NO: 514734 - DNA, 55 bp, Artificial
  Synthetic oligonucleotide
atcgtatgtagaacctttcttgagtttggtttcggggaaaagcaccgtgtgttcc

SEQ ID NO: 514735 - DNA, 55 bp, Artificial
  Synthetic oligonucleotide
atccaattcagccaaccgtccgctataaagatagcactccactaacggaatggta

SEQ ID NO: 514736 - DNA, 55 bp, Artificial
  Synthetic oligonucleotide
atataagttcgccacaccagacattaccaatctcgtagcgagtgtcaatgatagt

SEQ ID NO: 514737 - DNA, 55 bp, Artificial
  Synthetic oligonucleotide
agtcacgtgtgggtagggtaggagttagtttcttatttgggcacgtgtaagcgag

SEQ ID NO: 514738 - DNA, 55 bp, Artificial
  Synthetic oligonucleotide
agtaggcaattgctgttaccatcgcaaaacacacggcagcaaggcaggtgctcaa

SEQ ID NO: 514739 - DNA, 55 bp, Artificial
  Synthetic oligonucleotide
agcttgacgttgcccggagagctaattgttctgttagagtgtggccacatgtccc

SEQ ID NO: 514740 - DNA, 55 bp, Artificial
  Synthetic oligonucleotide
agctgaagtctgactggtttgtgaaattgaatccaaacggtcgtatcccaaccat

SEQ ID NO: 514741 - DNA, 55 bp, Artificial
  Synthetic oligonucleotide
acgatgttggatcatctccagtcgaatccagtccatttacaacctatacaaccgt

SEQ ID NO: 514742 - DNA, 55 bp, Artificial
  Synthetic oligonucleotide
accctcgtggtaatcgaacaaccaacggtgtccctgagcagtcgactcgacctgc

SEQ ID NO: 514743 - DNA, 55 bp, Artificial
  Synthetic oligonucleotide
accatattgaccgtattgtccatcttatgccttgttaactggaggaggattaact

SEQ ID NO: 514744 - DNA, 55 bp, Artificial
  Synthetic oligonucleotide
aaggtgaagcattgatatcagtaccaaaagcaccactatcttgtaattcaggggt

SEQ ID NO: 514745 - DNA, 55 bp, Artificial
  Synthetic oligonucleotide
aagcatccatttgaggtattttactacccttctaaattaggcactccagagcacc

SEQ ID NO: 514746 - DNA, 55 bp, Artificial
  Synthetic oligonucleotide
aacactatggaaagctcatcactagttctggtctacaggatattgccatgactcc

SEQ ID NO: 514747 - DNA, 55 bp, Artificial
  Synthetic oligonucleotide
aaagtcgtatccattgagtgaggccactaggtagaatatgacaagtgccgagagg

SEQ ID NO: 514748 - DNA, 55 bp, Artificial
  Synthetic oligonucleotide
ctgcccgatactcaatacctcctaattcctctttctgctcgtccgtcaacttaat

SEQ ID NO: 514749 - DNA, 55 bp, Artificial
  Synthetic oligonucleotide
ctgaaggtgaaagcacatcagtcgcaaagacagttcatcttactgcaggagtcta

SEQ ID NO: 514750 - DNA, 55 bp, Artificial
  Synthetic oligonucleotide
ctcagaattgctggatagtgatggtctttggacattaacaacattctgccaacca

SEQ ID NO: 514751 - DNA, 55 bp, Artificial
  Synthetic oligonucleotide
ctatcagcgaaaccattgatggaagcggtctttggaaccgaagggtaagttgacc

SEQ ID NO: 514752 - DNA, 55 bp, Artificial
  Synthetic oligonucleotide
ctaccctcggtaaccccattttccatgtcaacactaccataagtgacctcatgac

SEQ ID NO: 514753 - DNA, 55 bp, Artificial
  Synthetic oligonucleotide
ctaaccagcaccaacatcagagctatgggaataataattgctcatggcctaacta

SEQ ID NO: 514754 - DNA, 55 bp, Artificial
  Synthetic oligonucleotide
cgttggaggcatcgaaggatgtagcagaacaagtacttaggtttcgaagttaata

SEQ ID NO: 514755 - DNA, 55 bp, Artificial
  Synthetic oligonucleotide
cgtgatgctcactgcaaccaataataggcactcgagacaaatccacattcctatc

SEQ ID NO: 514756 - DNA, 55 bp, Artificial
  Synthetic oligonucleotide
cgtaccacgttgagcttccacgatgtcagttgattggatcgcagaaactccggtg

SEQ ID NO: 514757 - DNA, 55 bp, Artificial
  Synthetic oligonucleotide
cggtgatgtggatacagataaagcatggccatatcgtgtactaggtagtggtgcc

SEQ ID NO: 514758 - DNA, 55 bp, Artificial
  Synthetic oligonucleotide
cgggtcgacctccgagctcattcgtgtcattggtggccccgccataggagatatc

SEQ ID NO: 514759 - DNA, 55 bp, Artificial
  Synthetic oligonucleotide
cggggtcgcggtgaatgaataaggcgagccatatatacgtcttacattatcgggg

SEQ ID NO: 514760 - DNA, 55 bp, Artificial
  Synthetic oligonucleotide
ccaaccttccagcaatcaaaccagttgtcacttggtgagacaaggtcccttgttt

SEQ ID NO: 514761 - DNA, 55 bp, Artificial
  Synthetic oligonucleotide
ccataggcaaaccgaaagtgaaatccggtctgtaatcaagatagaacgcagaaca

SEQ ID NO: 514762 - DNA, 55 bp, Artificial
  Synthetic oligonucleotide
ccccacttgtcttacattaatcaacttgtgtttgccccgtatttgccataacttg

SEQ ID NO: 514763 - DNA, 55 bp, Artificial
  Synthetic oligonucleotide
ccggacccaagttgacctatttggctccctcttgacaggatgtatttacaccccg

SEQ ID NO: 514764 - DNA, 55 bp, Artificial
  Synthetic oligonucleotide
ccttggagaactatgcacaatccatatggtgaagcctatggtaatgctatgacac

SEQ ID NO: 514765 - DNA, 55 bp, Artificial
  Synthetic oligonucleotide
cgcacgagtggtaatttccgcgaccttgtcttcaatgtcggcataacttgcaatc

SEQ ID NO: 514766 - DNA, 55 bp, Artificial
  Synthetic oligonucleotide
cggacataacgcccagggtaatcaaactgatacattcggttctgaattagatagg

SEQ ID NO: 514767 - DNA, 55 bp, Artificial
  Synthetic oligonucleotide
cggctccactaatgcagggtctctttgtgtgtgtgccgagtattgtgtatcgtct

SEQ ID NO: 514768 - DNA, 55 bp, Artificial
  Synthetic oligonucleotide
cgggaaattcgtgctccgtttgatgtaaggggatcgacagtataattatcgtgac

SEQ ID NO: 514769 - DNA, 54 bp, Artificial
  Synthetic oligonucleotide
acggatgttgatctcgatagtgccgttgtttacttcaaggtcactcttcagccc

SEQ ID NO: 514770 - DNA, 54 bp, Artificial
  Synthetic oligonucleotide
gatttgtcgccgtccattggttgaagcagttagaatcaccaaatccgtggcttc

SEQ ID NO: 514771 - DNA, 54 bp, Artificial
  Synthetic oligonucleotide
ccccagattttcgattaccacatcccttcctctcatctattgggtgtacccgat

SEQ ID NO: 514772 - DNA, 54 bp, Artificial
  Synthetic oligonucleotide
aaccagaagtggactgtgttttagcgtgagtgttagtatgttgagcagtcattc

SEQ ID NO: 514773 - DNA, 53 bp, Artificial
  Synthetic oligonucleotide
gctattgcggatcctgcgacttcccaacactgtttcgcatacctacgcaggcg

SEQ ID NO: 514774 - DNA, 53 bp, Artificial
  Synthetic oligonucleotide
ccaatagagcactgcaactttgatgtgagcttgttgggttactgtgatgaggt

SEQ ID NO: 514775 - DNA, 52 bp, Artificial
  Synthetic oligonucleotide
aatagtgccactgacggatcgtctacaatgaaccttagtagtagtaatgccc

SEQ ID NO: 514776 - DNA, 52 bp, Artificial
  Synthetic oligonucleotide
ttcaatggagccaacttgatttgtcctcgtacttcaactacagcagtttatg

SEQ ID NO: 514777 - DNA, 50 bp, Artificial
  Synthetic oligonucleotide
attcctccacgtcgtatgatctaagccaccgagtgggattcgaggtagct

SEQ ID NO: 514778 - DNA, 55 bp, Artificial
  Synthetic oligonucleotide
ttccgcaatctccgggactcgcatcttgctcgtaagcgggagaagctcgggcgca

SEQ ID NO: 514779 - DNA, 55 bp, Artificial
  Synthetic oligonucleotide
tggagaggttccgcctccgcctatcgaacgtcgcggatcgaagacgacgtccatg

SEQ ID NO: 514780 - DNA, 55 bp, Artificial
  Synthetic oligonucleotide
tcttgcgtgagcttgagaacttcggttgggaagtcttgggctttgtagttgatgc

SEQ ID NO: 514781 - DNA, 55 bp, Artificial
  Synthetic oligonucleotide
tctcatcgttcgccgcattaacgacgagcccttcgatgttccctctgtccccggc

SEQ ID NO: 514782 - DNA, 55 bp, Artificial
  Synthetic oligonucleotide
tcaactacatcgctggctcgtccgaagcggtcgtcttgctcgagaacccggccgt

SEQ ID NO: 514783 - DNA, 55 bp, Artificial
  Synthetic oligonucleotide
tactggcgtagcagtcgcctcgtggttggaagtctctttcgcccggcggctcaac

SEQ ID NO: 514784 - DNA, 55 bp, Artificial
  Synthetic oligonucleotide
gctgtgaggacagagcgcggggattggattactgctcaacaggtgtggcggatcc

SEQ ID NO: 514785 - DNA, 55 bp, Artificial
  Synthetic oligonucleotide
gctcgcaggtatatcatctcgatgtgcgtcaacgactacacgtcgcagatctggg

SEQ ID NO: 514786 - DNA, 55 bp, Artificial
  Synthetic oligonucleotide
gcggacagacgatggcgagtcactacgcaatcatgaacggcagtgcgtccccgtc

SEQ ID NO: 514787 - DNA, 55 bp, Artificial
  Synthetic oligonucleotide
gcacactcatcgatcgctcgcagagacgtgtctgaccgccgactcgcagaatggg

SEQ ID NO: 514788 - DNA, 55 bp, Artificial
  Synthetic oligonucleotide
gaggacagagaacgagggcggacttgtcgtcgtaactgcggacaggtgcaaccag

SEQ ID NO: 514789 - DNA, 55 bp, Artificial
  Synthetic oligonucleotide
cgtctcggatcgtcaagtttcccgtaatctccctccactccttgatgaccgatgc

SEQ ID NO: 514790 - DNA, 55 bp, Artificial
  Synthetic oligonucleotide
agggcgaacctgctggcacgagggaggagcgccgacgcccaatcgccgcttgtac

SEQ ID NO: 514791 - DNA, 55 bp, Artificial
  Synthetic oligonucleotide
actagctaactgtacacggtgtaatggcaacagtacaggcactgcaagcattgca

SEQ ID NO: 514792 - DNA, 54 bp, Artificial
  Synthetic oligonucleotide
cacggtcctcgcaaacttgcggaacctgaggggattcgagtagcggactggttc

SEQ ID NO: 514793 - DNA, 53 bp, Artificial
  Synthetic oligonucleotide
aagcgtgcatctcctgcgcgagcacagcatgtgagttcggaaagcagacaagt

SEQ ID NO: 514794 - DNA, 51 bp, Artificial
  Synthetic oligonucleotide
cagggccggaggacagccctcttacggatgttgaggagtcggagggtgaga

SEQ ID NO: 514795 - DNA, 55 bp, Artificial
  Synthetic oligonucleotide
gtccaggaacagctcaagcttcaatccatctttgcggaaaccaatcactttgcgg

SEQ ID NO: 514796 - DNA, 55 bp, Artificial
  Synthetic oligonucleotide
ggaccttgtcgcacgctctcttgttctcagaccgcggtgcgatgtatcccctgag

SEQ ID NO: 514797 - DNA, 55 bp, Artificial
  Synthetic oligonucleotide
gcgacgtgcgggactcgacatgagcagaagacctgacgagatacgcttagcgtgg

SEQ ID NO: 514798 - DNA, 55 bp, Artificial
  Synthetic oligonucleotide
gcccaagaagattcgaacttctgctacaccgatatcaacagtgagtactaaccaa

SEQ ID NO: 514799 - DNA, 55 bp, Artificial
  Synthetic oligonucleotide
gccagcgagcctttgccatgaaccgagctcttcgtgcctgtgagtattataccgc

SEQ ID NO: 514800 - DNA, 55 bp, Artificial
  Synthetic oligonucleotide
gagggcgtagtactgtcgcagcactgatgtcagctacacacggccgagcgcagct

SEQ ID NO: 514801 - DNA, 55 bp, Artificial
  Synthetic oligonucleotide
gaaacccataagacagaagcacgcgtagaggaccgagttaccgacgttgatcgtg

SEQ ID NO: 514802 - DNA, 55 bp, Artificial
  Synthetic oligonucleotide
ctggaacttgaactccttcggggcctcaaacaccaggacaattgttgatccgagc

SEQ ID NO: 514803 - DNA, 55 bp, Artificial
  Synthetic oligonucleotide
cgtagtgactaccgcctctggggacagggagggctccgtttgtgggtgtggggtg

SEQ ID NO: 514804 - DNA, 55 bp, Artificial
  Synthetic oligonucleotide
cgcagtgtagcttaccgatagcctgacccagcttcaaatacaagccctgattcgt

SEQ ID NO: 514805 - DNA, 55 bp, Artificial
  Synthetic oligonucleotide
cgagcgggacaagcatgtacacccatttcaggacgtgccagctcactgctgtcag

SEQ ID NO: 514806 - DNA, 55 bp, Artificial
  Synthetic oligonucleotide
cgagactgccttctcggaaccggccaagtcaatgagggacagtcgcgagacgcga

SEQ ID NO: 514807 - DNA, 55 bp, Artificial
  Synthetic oligonucleotide
cacctgccttggacccacctgctgacgactagtcatggcactagccgtggaccca

SEQ ID NO: 514808 - DNA, 55 bp, Artificial
  Synthetic oligonucleotide
cacctagtccagttgacactcccggccgacgttggaacctgcagaggcgtcagac

SEQ ID NO: 514809 - DNA, 55 bp, Artificial
  Synthetic oligonucleotide
cacagtctgggcgcgagccgtacctccgtgcatcgccagatacgttgcatactcc

SEQ ID NO: 514810 - DNA, 53 bp, Artificial
  Synthetic oligonucleotide
ttccgcgaggtcgagcggaaagacatgccgaagggcaacctgtggatcgtgtg

SEQ ID NO: 514811 - DNA, 51 bp, Artificial
  Synthetic oligonucleotide
tgccagactcaacaccagacgagggaccaacctcctgaccagacgaagtcg

SEQ ID NO: 514812 - DNA, 55 bp, Artificial
  Synthetic oligonucleotide
ttcgagatatggccagtcacccggtagaaagttttccaaaacgattcccgaaggc

SEQ ID NO: 514813 - DNA, 55 bp, Artificial
  Synthetic oligonucleotide
tcttaacaagaataattccaacacaactctcctacgatctctcattgcaggggcg

SEQ ID NO: 514814 - DNA, 55 bp, Artificial
  Synthetic oligonucleotide
tcagcgtcacataccgacaattcggcatctctacccaattcgtagccccgagccg

SEQ ID NO: 514815 - DNA, 55 bp, Artificial
  Synthetic oligonucleotide
ggtgacgtgagctcgggtgaaagctctctgccgaggaatatgagtgccagacgac

SEQ ID NO: 514816 - DNA, 55 bp, Artificial
  Synthetic oligonucleotide
gggcccgtatccggggatttgggtctcaaggtctaggctgttgacaagaatgcgg

SEQ ID NO: 514817 - DNA, 55 bp, Artificial
  Synthetic oligonucleotide
gggacagcctcagatcctaaagcttatgtctgactctcttgcgaaaggtgttgct

SEQ ID NO: 514818 - DNA, 55 bp, Artificial
  Synthetic oligonucleotide
gcgcgaaaatgtggccaagcgcgaagatagacagagttccggtgaggtcaagcga

SEQ ID NO: 514819 - DNA, 55 bp, Artificial
  Synthetic oligonucleotide
ctcgtcataccgttccatcgtctctcaagaacttatctcatgtactgtacggtca

SEQ ID NO: 514820 - DNA, 55 bp, Artificial
  Synthetic oligonucleotide
ccttcccacttgatcaagtatcgtggcttccctctgaccagcctacagtccagga

SEQ ID NO: 514821 - DNA, 55 bp, Artificial
  Synthetic oligonucleotide
cctgccgggaggtggcgttgaagcagcagagccttattgacatggactcagctca

SEQ ID NO: 514822 - DNA, 55 bp, Artificial
  Synthetic oligonucleotide
cctgaggcccgcgtccctgagactaagttatagcgagggaataagctataacctc

SEQ ID NO: 514823 - DNA, 55 bp, Artificial
  Synthetic oligonucleotide
cctccgatgaccttttctctcgggcgtaatggtctgcgacatattgtaggaacga

SEQ ID NO: 514824 - DNA, 55 bp, Artificial
  Synthetic oligonucleotide
cctcccgagacattgtttcctttggcggcctctcagatataaacgtccgcccaga

SEQ ID NO: 514825 - DNA, 55 bp, Artificial
  Synthetic oligonucleotide
ccgccagctcactccctagattgttataaccagatcttggaggacgtctcccgga

SEQ ID NO: 514826 - DNA, 55 bp, Artificial
  Synthetic oligonucleotide
attgcccgatctcaattgctcgaccttaattgcctaagcctaaatcgctctactt

SEQ ID NO: 514827 - DNA, 52 bp, Artificial
  Synthetic oligonucleotide
agagcagtctcgtttcgacttcacgttcatttgtcacagggtttaggtgtgc

SEQ ID NO: 514828 - DNA, 52 bp, Artificial
  Synthetic oligonucleotide
acgtggggtgtttgagagtagtgccaaaacatagacggtactctcttaagcc

SEQ ID NO: 514829 - DNA, 55 bp, Artificial
  Synthetic oligonucleotide
tggtgttctcagcttccccgtctgcgactcgatcctcgtcggcaaagcattcgat

SEQ ID NO: 514830 - DNA, 55 bp, Artificial
  Synthetic oligonucleotide
tcggagcacaatgtaaccatttcgaaggagtggtttgacggagcttaccgtggac

SEQ ID NO: 514831 - DNA, 55 bp, Artificial
  Synthetic oligonucleotide
taaatcacatgctcgctgcgaggagttccgagttggatgaacttgacattgccac

SEQ ID NO: 514832 - DNA, 55 bp, Artificial
  Synthetic oligonucleotide
gtcggagccacaatcaatgatccagccgacggttttcgaaattggaggcggagag

SEQ ID NO: 514833 - DNA, 55 bp, Artificial
  Synthetic oligonucleotide
gtccttgttcaaaagcaccacgagacgggtagattgtgagttgaagcttgacggg

SEQ ID NO: 514834 - DNA, 55 bp, Artificial
  Synthetic oligonucleotide
gcgcttttccatcgagcttttgctcatatttgaccccgtacacaccctggacgcg

SEQ ID NO: 514835 - DNA, 55 bp, Artificial
  Synthetic oligonucleotide
gacgagcgccacgttgccgagatgcactggtggaccgtcacatttgctgtctttg

SEQ ID NO: 514836 - DNA, 55 bp, Artificial
  Synthetic oligonucleotide
gacctgagcgagtgcgttcttgtccagcgagtcttgcttcatatgaccaccaggc

SEQ ID NO: 514837 - DNA, 55 bp, Artificial
  Synthetic oligonucleotide
gaaggattgactacggctatattcaagccgctgatagttagtgcgggtgggtgcc

SEQ ID NO: 514838 - DNA, 55 bp, Artificial
  Synthetic oligonucleotide
ctgacgtggtgatgcacatgtaacatcccatagtatcggggtttcgatgcggacg

SEQ ID NO: 514839 - DNA, 55 bp, Artificial
  Synthetic oligonucleotide
cctcggccacacggcgatcagaagtcgagattaccatcggtttgtgccattatcc

SEQ ID NO: 514840 - DNA, 55 bp, Artificial
  Synthetic oligonucleotide
ccagataggaagtcgtttgctgcaggcagtatccatggctttaaggtatcgtagc

SEQ ID NO: 514841 - DNA, 55 bp, Artificial
  Synthetic oligonucleotide
caggaagatgcatcaacttctcgaaaaggtgtactatggcttccccagtactagg

SEQ ID NO: 514842 - DNA, 55 bp, Artificial
  Synthetic oligonucleotide
cacctgcatctccactttgcgaggctgtggcctagagcgaccgaagaatgcccga

SEQ ID NO: 514843 - DNA, 55 bp, Artificial
  Synthetic oligonucleotide
cacaagtggtgacttcatcctttgccacgatgacgtccaagagagagaacatatc

SEQ ID NO: 514844 - DNA, 54 bp, Artificial
  Synthetic oligonucleotide
gagaggtattttcctgatgctgggacgccgaagtggtatgcggctgctaggctc

SEQ ID NO: 514845 - DNA, 53 bp, Artificial
  Synthetic oligonucleotide
gtataagcaggtacactatagtccgctgggacagagttgttcgctcccatgtt

SEQ ID NO: 514846 - DNA, 55 bp, Artificial
  Synthetic oligonucleotide
tgtcgattacagcgatattggtactggtgatagtgtggggtgagtgacgaccttg

SEQ ID NO: 514847 - DNA, 55 bp, Artificial
  Synthetic oligonucleotide
tatgtcgcgctcgacgcgccacaggcggaagctgccacctacaatgctctcctcg

SEQ ID NO: 514848 - DNA, 55 bp, Artificial
  Synthetic oligonucleotide
gtggagcttgcacatctcagcctcgtactcgtctgctggctcagagcccagtgca

SEQ ID NO: 514849 - DNA, 55 bp, Artificial
  Synthetic oligonucleotide
gtcgtgtctgtacagggctactttgcgcgacgcggacagtgggtggacttgtgcg

SEQ ID NO: 514850 - DNA, 55 bp, Artificial
  Synthetic oligonucleotide
ggcttcagacactcggtcttccagtcggctcttaacctccttgagcgaaatgacc

SEQ ID NO: 514851 - DNA, 55 bp, Artificial
  Synthetic oligonucleotide
ggactgcgcgagctagacatgtcacacaactctctctcgttgctcagatcggacg

SEQ ID NO: 514852 - DNA, 55 bp, Artificial
  Synthetic oligonucleotide
gagttaaggtggttcgagagctggcccggcgacttgaactttgtcttgcacagtg

SEQ ID NO: 514853 - DNA, 55 bp, Artificial
  Synthetic oligonucleotide
gaaatgatccgaaggcacaaaggttccaggagaaacaaccaccgtcgaaccctcc

SEQ ID NO: 514854 - DNA, 55 bp, Artificial
  Synthetic oligonucleotide
gaaacgtatccacccaatctctgcttcccgatatctacatcagccgacgccatcc

SEQ ID NO: 514855 - DNA, 55 bp, Artificial
  Synthetic oligonucleotide
cgtggaaccacgcctcattcaacatcagctagtactccacgctttcgccgcctgc

SEQ ID NO: 514856 - DNA, 55 bp, Artificial
  Synthetic oligonucleotide
cggaagcagaggtaccagccatcttcttctgtacatgtcgcgccacaacccctcc

SEQ ID NO: 514857 - DNA, 55 bp, Artificial
  Synthetic oligonucleotide
ccatggcattcgctggtgtccacagcaagctctccgggagagaagagtgtcgcgg

SEQ ID NO: 514858 - DNA, 55 bp, Artificial
  Synthetic oligonucleotide
acgaccttggtgcttcccgccagcgacttggtccgggcgctcgctttcttgaacg

SEQ ID NO: 514859 - DNA, 55 bp, Artificial
  Synthetic oligonucleotide
aactccagatggatggcatggatcgagaccgccactagcgacgtcgagtagaggg

SEQ ID NO: 514860 - DNA, 53 bp, Artificial
  Synthetic oligonucleotide
gtgcaagtgctagtcatggacacgaaagctcagagcatggtcatgggcatggg

SEQ ID NO: 514861 - DNA, 53 bp, Artificial
  Synthetic oligonucleotide
tcagtcaccgggtaatacatctcaacatcccactccatgagcttggcttggac

SEQ ID NO: 514862 - DNA, 51 bp, Artificial
  Synthetic oligonucleotide
gtcatctgtgagggcatatgcggggaggtaggcctccgagtccgaatcgga

SEQ ID NO: 514863 - DNA, 55 bp, Artificial
  Synthetic oligonucleotide
tgaccttcttattcgtttgacgtatgtcatcttctgtcagaccatgcgtactatg

SEQ ID NO: 514864 - DNA, 55 bp, Artificial
  Synthetic oligonucleotide
tgaattccgaggagcggcgcagtcgtgaattagcacaggaactcacttcagcacg

SEQ ID NO: 514865 - DNA, 55 bp, Artificial
  Synthetic oligonucleotide
gtgtcgatattcaacgcgaatcctataagggtcaacctggagaatgtacctcccc

SEQ ID NO: 514866 - DNA, 55 bp, Artificial
  Synthetic oligonucleotide
gggtaaccctagggacaccattatggcctacagcactctatgccctggcctattc

SEQ ID NO: 514867 - DNA, 55 bp, Artificial
  Synthetic oligonucleotide
gcttacacagtggatgttccaattcatattgggccacccaaagttgggccgtcca

SEQ ID NO: 514868 - DNA, 55 bp, Artificial
  Synthetic oligonucleotide
gatttcttcagaccacgagaccgttgagcctatagtctctgaccacgagagtgta

SEQ ID NO: 514869 - DNA, 55 bp, Artificial
  Synthetic oligonucleotide
cttccctaatttctgcactacctcccctagttttccaccaccattcttcgccagc

SEQ ID NO: 514870 - DNA, 55 bp, Artificial
  Synthetic oligonucleotide
ctggacgaccctgcgggaaacacttacatagaagaaacgcagcatttgtcagttg

SEQ ID NO: 514871 - DNA, 55 bp, Artificial
  Synthetic oligonucleotide
ctgaaggatggtaatcctggtcgttatggctacggtaaagacacgggcgtggccc

SEQ ID NO: 514872 - DNA, 55 bp, Artificial
  Synthetic oligonucleotide
cagggaccctacagatgcagcctgtgcaaaagatgatttagatggcaaggagatt

SEQ ID NO: 514873 - DNA, 55 bp, Artificial
  Synthetic oligonucleotide
caccgcacacctaagagtatgtcgcgcggtattatatgtggacattctacgtgtg

SEQ ID NO: 514874 - DNA, 55 bp, Artificial
  Synthetic oligonucleotide
atatgagctcacagctaattgcctggggagataactctagtggacagctaggagt

SEQ ID NO: 514875 - DNA, 55 bp, Artificial
  Synthetic oligonucleotide
aggaagattaaggcagagcgctgaataatgctagagtacaagcacttggtaccat

SEQ ID NO: 514876 - DNA, 55 bp, Artificial
  Synthetic oligonucleotide
agacactcctccacaggtacacatcgtggtataaccataatacaacagcatagct

SEQ ID NO: 514877 - DNA, 55 bp, Artificial
  Synthetic oligonucleotide
aaaggttccaatggactactgccacgtactcatatattggagttggtagatacag

SEQ ID NO: 514878 - DNA, 51 bp, Artificial
  Synthetic oligonucleotide
cctcttgctacacgcctagttcgtgcttccagacttccttatactgacctc

SEQ ID NO: 514879 - DNA, 51 bp, Artificial
  Synthetic oligonucleotide
agcagattctacggaatgatcgaggtggccattattgtgtttgaacttggt

SEQ ID NO: 514880 - DNA, 55 bp, Artificial
  Synthetic oligonucleotide
tgacatgataatcaacccacatcgcccaactcgctagaatcagggcttctagcag

SEQ ID NO: 514881 - DNA, 55 bp, Artificial
  Synthetic oligonucleotide
gtaacctatcccgcctataccctgattcatagaaaatccatgattaaggctctct

SEQ ID NO: 514882 - DNA, 55 bp, Artificial
  Synthetic oligonucleotide
ggtacaacagaatagagcctagtcccgcggaacttcattcctattccttattgtc

SEQ ID NO: 514883 - DNA, 55 bp, Artificial
  Synthetic oligonucleotide
gatcgtacacatcttcgatcgtcaattggagttcgaattcgccgttcaatcgcat

SEQ ID NO: 514884 - DNA, 55 bp, Artificial
  Synthetic oligonucleotide
gagatggaaatacacaaattctcgcagtcgagtcaacgaatctcgcatgaactgg

SEQ ID NO: 514885 - DNA, 55 bp, Artificial
  Synthetic oligonucleotide
gaattttcatatctacaggggcgtactgatgtgaatatgttcgtgctactcaatg

SEQ ID NO: 514886 - DNA, 55 bp, Artificial
  Synthetic oligonucleotide
ctccaggagcacgtgacaagacgagttgaatatagattggacttggagaagaagt

SEQ ID NO: 514887 - DNA, 55 bp, Artificial
  Synthetic oligonucleotide
ctagcctcactttgaaaatgggtcaaaattgggttagtatcgaccattgatgaac

SEQ ID NO: 514888 - DNA, 55 bp, Artificial
  Synthetic oligonucleotide
cctcgacggttcttgtcatgtagcgttcggtcggaatttgaatgtagatcggaag

SEQ ID NO: 514889 - DNA, 55 bp, Artificial
  Synthetic oligonucleotide
ccagcattctttcacacgggctgggagatcaagaacggaacgctgatggaccaag

SEQ ID NO: 514890 - DNA, 55 bp, Artificial
  Synthetic oligonucleotide
ccaaaccgtgacatccgtatcgtatttattcccgtgcattgagaacaagtgatcg

SEQ ID NO: 514891 - DNA, 55 bp, Artificial
  Synthetic oligonucleotide
caaccacttgattacacgaggaagacaggtagtagcgcttcgggttgtccactcc

SEQ ID NO: 514892 - DNA, 55 bp, Artificial
  Synthetic oligonucleotide
ataacgcatccaaggcagcatcgaggcctacacaaaatcgtcccatggagtattc

SEQ ID NO: 514893 - DNA, 55 bp, Artificial
  Synthetic oligonucleotide
aggctgtgctatgtcaatgctactcatggtctgatcatttgcgagattgataaag

SEQ ID NO: 514894 - DNA, 55 bp, Artificial
  Synthetic oligonucleotide
aaacatgcatcgaatgcccacttgaatataagagtgcttgacagcaggagtaaaa

SEQ ID NO: 514895 - DNA, 55 bp, Artificial
  Synthetic oligonucleotide
aaacacgcctctcaatctccacacatgctcctttcccgcttattcctcctgagcc

SEQ ID NO: 514896 - DNA, 51 bp, Artificial
  Synthetic oligonucleotide
aaatatgcatcgtgaacgcattcaataccataatggcagtggaccctggtt

SEQ ID NO: 514897 - DNA, 55 bp, Artificial
  Synthetic oligonucleotide
ttgaaaaggtggcactgttcgcagtcggcaatcttgcccgacaattgctgcatat

SEQ ID NO: 514898 - DNA, 55 bp, Artificial
  Synthetic oligonucleotide
ttacgattgcacgcacggctgaatcatctctgccttcggactggattgcgggacc

SEQ ID NO: 514899 - DNA, 55 bp, Artificial
  Synthetic oligonucleotide
tggagatcacgagcgtcatcggcactcacctgcccaatcacttgcgcgcacgttt

SEQ ID NO: 514900 - DNA, 55 bp, Artificial
  Synthetic oligonucleotide
tctggggactactggaccggcgtatacgtggggcgactggtgtctgagcaaacgg

SEQ ID NO: 514901 - DNA, 55 bp, Artificial
  Synthetic oligonucleotide
tcacaatgtcgactcgccctttctcgtcggtcatggcttggcttcaaccactcgg

SEQ ID NO: 514902 - DNA, 55 bp, Artificial
  Synthetic oligonucleotide
gtgcaaaaggaccatgtggcacggtggcaacggggtgaatgcgacgtcattgtgg

SEQ ID NO: 514903 - DNA, 55 bp, Artificial
  Synthetic oligonucleotide
gtctcagcgggttcaatggctctgggttcataaccacgaaacacgatgctgtgga

SEQ ID NO: 514904 - DNA, 55 bp, Artificial
  Synthetic oligonucleotide
gggaacgaaatgcaccattggccttgtcgtcgcttcaagtgatcatcacggctag

SEQ ID NO: 514905 - DNA, 55 bp, Artificial
  Synthetic oligonucleotide
ggcatccggctctgcagcaacacggctaccgcttgtatggcgatttgctggaccc

SEQ ID NO: 514906 - DNA, 55 bp, Artificial
  Synthetic oligonucleotide
gcccttccaggaccaatcggtaaccctaggcatggtcaaacgacgagaggtgctc

SEQ ID NO: 514907 - DNA, 55 bp, Artificial
  Synthetic oligonucleotide
gacacacgttcgcacacgacgcacgactcgatgatatttcctttccagtcacatg

SEQ ID NO: 514908 - DNA, 55 bp, Artificial
  Synthetic oligonucleotide
cttctcatggccttccaggaccatcctctcgtaagatgaccaccttgctcgcttc

SEQ ID NO: 514909 - DNA, 55 bp, Artificial
  Synthetic oligonucleotide
ctatctggacgagcaagactcattccgaacagcatcatggcctcaaccacgcaca

SEQ ID NO: 514910 - DNA, 55 bp, Artificial
  Synthetic oligonucleotide
ccactacaggacaggacgtagcggttaaagaagtaccacagatgccttagatgcg

SEQ ID NO: 514911 - DNA, 55 bp, Artificial
  Synthetic oligonucleotide
atgcggcagctgacgtgccaggagaagaatcctgctccaggggctggggaacctt

SEQ ID NO: 514912 - DNA, 54 bp, Artificial
  Synthetic oligonucleotide
gatggcgtatcaatgtgcaaaggaatgaccaaagcaacgaatcgaatgtccagg

SEQ ID NO: 514913 - DNA, 54 bp, Artificial
  Synthetic oligonucleotide
gtcaaggttcgagtcttcacgacgaggctaccacaccagaaccgcgtccatttt

SEQ ID NO: 514914 - DNA, 54 bp, Artificial
  Synthetic oligonucleotide
ctttgttgcttcctacttcacgctcaatgatcctgtaccgtgctcgcgtcacct

SEQ ID NO: 514915 - DNA, 53 bp, Artificial
  Synthetic oligonucleotide
cccgacgtgactgtttgaatgccatttgagccgctgtttccttgacgttacga

SEQ ID NO: 514916 - DNA, 51 bp, Artificial
  Synthetic oligonucleotide
tgatcgagccaaaatcatcctccaggtggctatggttccgttccgcgaatt

SEQ ID NO: 514917 - DNA, 51 bp, Artificial
  Synthetic oligonucleotide
tgatgcactctcgatcaagatcgcacaaggaaacgagcagacggcggagac

SEQ ID NO: 514918 - DNA, 51 bp, Artificial
  Synthetic oligonucleotide
aatatttcgcaagttccagggccaaagtcaaccccacaaatttggcatcga

SEQ ID NO: 514919 - DNA, 55 bp, Artificial
  Synthetic oligonucleotide
taaatctcacacctggtatatctcctactgaatgaccttttcgtccaaatccaga

SEQ ID NO: 514920 - DNA, 55 bp, Artificial
  Synthetic oligonucleotide
ggataaaacccggtcatattattacaactcggaaccgactcgatgttgactctgt

SEQ ID NO: 514921 - DNA, 55 bp, Artificial
  Synthetic oligonucleotide
gcatcgcatgggactcggattagatacgcttacgaaattttgcagagagaatttc

SEQ ID NO: 514922 - DNA, 55 bp, Artificial
  Synthetic oligonucleotide
gcacatcgattccccttgatagaagatctgtagtgattaaaactctacgtattcc

SEQ ID NO: 514923 - DNA, 55 bp, Artificial
  Synthetic oligonucleotide
cttttccggtacctactgataacaagtttccgaccattatattcgcggacactcc

SEQ ID NO: 514924 - DNA, 55 bp, Artificial
  Synthetic oligonucleotide
cttccattgagggaattcgtgccagtctttaagcagatatacactgggccagttt

SEQ ID NO: 514925 - DNA, 55 bp, Artificial
  Synthetic oligonucleotide
ctggtaacgaatttctgtaaccaagtaattgtccaatcaatctgtctgcacgtga

SEQ ID NO: 514926 - DNA, 55 bp, Artificial
  Synthetic oligonucleotide
ctcgcctggtataaggagtcttaccgatgtttgaatttctctcgcagttaaagtc

SEQ ID NO: 514927 - DNA, 55 bp, Artificial
  Synthetic oligonucleotide
cgtggaattggttttatccagaatactactctcctctatgttcagatctcgttaa

SEQ ID NO: 514928 - DNA, 55 bp, Artificial
  Synthetic oligonucleotide
cggttaaatgggccaattttaatagccttgctggaatcattttgacccctaccag

SEQ ID NO: 514929 - DNA, 55 bp, Artificial
  Synthetic oligonucleotide
cgcaagagaaaatgcttccctgaccagagaagctccttcgcctatgtacatttgt

SEQ ID NO: 514930 - DNA, 55 bp, Artificial
  Synthetic oligonucleotide
cgcaaaagctccgccgcttcggacgaaaggatcgatatgagtgatcagctttcga

SEQ ID NO: 514931 - DNA, 55 bp, Artificial; identical to SEQ ID NO: 288548
  Synthetic oligonucleotide

SEQ ID NO: 514932 - DNA, 55 bp, Artificial
  Synthetic oligonucleotide
atcaacctcctactgttgttccggacggagatttggctagagtgaaaagagccgt

SEQ ID NO: 514933 - DNA, 53 bp, Artificial
  Synthetic oligonucleotide
aggtcatttcatgccagtaacaactttaagtcgaagtccagctgggcacttag

SEQ ID NO: 514934 - DNA, 53 bp, Artificial
  Synthetic oligonucleotide
actgcttcctcttatcagcaccgtgattactttggactttgcgcaattttcga

SEQ ID NO: 514935 - DNA, 50 bp, Artificial
  Synthetic oligonucleotide
gcttgcgtgtgatcttcgttttggcaacgaatatttcacatgtggctgcg

SEQ ID NO: 514936 - DNA, 56 bp, Artificial
  Synthetic oligonucleotide
ggatcattgcatgttaatgagaatggagcatattcaacaatatagcatgtgccatc

SEQ ID NO: 514937 - DNA, 55 bp, Artificial
  Synthetic oligonucleotide
gccagcatccattagaggatgtccaaagacacatgttgttgagtcacatacagta

SEQ ID NO: 514938 - DNA, 55 bp, Artificial
  Synthetic oligonucleotide
gctttagtaggtgtgctagtccaggaatatattcgggatcattatggcttccgac

SEQ ID NO: 514939 - DNA, 55 bp, Artificial
  Synthetic oligonucleotide
ggcaatataggcccagtatggagctttcaggaggcacgtatatcacaaaactacc

SEQ ID NO: 514940 - DNA, 55 bp, Artificial
  Synthetic oligonucleotide
ggcagaacctaaatagcccatgcaggatcttagtcctccaacaagctgatatact

SEQ ID NO: 514941 - DNA, 55 bp, Artificial
  Synthetic oligonucleotide
ggcatgggactaagaattccactaggtgatacaggactcattggagaccttgggg

SEQ ID NO: 514942 - DNA, 55 bp, Artificial
  Synthetic oligonucleotide
gggtggaagatgtggattatcacacaaactatcccatgcctgcaaatttgtttgt

SEQ ID NO: 514943 - DNA, 55 bp, Artificial
  Synthetic oligonucleotide
ggtgatacttcgggcaagaaagagtgtgtccactgtaaagttgaattcctacagc

SEQ ID NO: 514944 - DNA, 55 bp, Artificial
  Synthetic oligonucleotide
ggttagcgtggaggattgtccagaatcaaagttcttagttgaggagaatgtggat

SEQ ID NO: 514945 - DNA, 55 bp, Artificial
  Synthetic oligonucleotide
gtaactacccgcagaaacatgattcatatgagcacatgatgcacagtagaagcac

SEQ ID NO: 514946 - DNA, 55 bp, Artificial
  Synthetic oligonucleotide
gtaatgtaactgctctcagcaactctagcctcaacaatacaattcactggatcag

SEQ ID NO: 514947 - DNA, 55 bp, Artificial
  Synthetic oligonucleotide
gtggatatgccccgataagtacaaggcttatagaaatcctatgcagagagatgaa

SEQ ID NO: 514948 - DNA, 55 bp, Artificial
  Synthetic oligonucleotide
tctcggaacaaatttcgcagggatatagctgcctgtacacgatattgtgagttag

SEQ ID NO: 514949 - DNA, 55 bp, Artificial
  Synthetic oligonucleotide
tgagacggcctacttctaatgttttcactaggttggcctgtgctctttgaatagc

SEQ ID NO: 514950 - DNA, 55 bp, Artificial
  Synthetic oligonucleotide
tggccccacctccaaataatgacccatcgaatttagttgttcttgctccactgac

SEQ ID NO: 514951 - DNA, 55 bp, Artificial
  Synthetic oligonucleotide
tggggtgatgtactaccacctgaccttacttttggtctcgctcctgaattagggg

SEQ ID NO: 514952 - DNA, 55 bp, Artificial
  Synthetic oligonucleotide
tgtagacagtacagatcattcttccgggatttaaagtggatacagtatccccacg

SEQ ID NO: 514953 - DNA, 55 bp, Artificial
  Synthetic oligonucleotide
ttctaggttctgacatttggctaatgaccataggagcatggtagtcttgatccct

SEQ ID NO: 514954 - DNA, 55 bp, Artificial
  Synthetic oligonucleotide
aagctggtaagagcaataaatgaggatcctgttgtatgttcatcagagaagccag

SEQ ID NO: 514955 - DNA, 55 bp, Artificial
  Synthetic oligonucleotide
cacatacaagtttcacattgtaacagcaaaccttacgaatgccacttatgcccca

SEQ ID NO: 514956 - DNA, 55 bp, Artificial
  Synthetic oligonucleotide
caccagcctgaggtctataatatccaggtgggcactccatcgttggtggtgaacg

SEQ ID NO: 514957 - DNA, 55 bp, Artificial
  Synthetic oligonucleotide
cacgcaccgcaccacaactctatccgcccggctgtccgctcctcgttcttagatc

SEQ ID NO: 514958 - DNA, 55 bp, Artificial
  Synthetic oligonucleotide
caggcgtgcctcctccatcacctattgagagttaatcgtccaggctattatgcgg

SEQ ID NO: 514959 - DNA, 55 bp, Artificial
  Synthetic oligonucleotide
cgaactaggaaaacctgcagttacaattactcccaaatttgctgcaagccctcca

SEQ ID NO: 514960 - DNA, 55 bp, Artificial
  Synthetic oligonucleotide
ctctatttgaggtagtattgtatctacaacgtcggcgataagtgactctctcggc

SEQ ID NO: 514961 - DNA, 55 bp, Artificial
  Synthetic oligonucleotide
ctggttgaggggctaatgccataactggaataagactagaagcgctttgaatcat

SEQ ID NO: 514962 - DNA, 55 bp, Artificial
  Synthetic oligonucleotide
gaaactgcatgcgcaagtccacgttatgtctaaaacctgcaccctgttttggcgc

SEQ ID NO: 514963 - DNA, 55 bp, Artificial
  Synthetic oligonucleotide
gaagagctctacaagaaccataaaacttttcacgatggtgattcaggacttgacc

SEQ ID NO: 514964 - DNA, 55 bp, Artificial
  Synthetic oligonucleotide
gaagtatgtccagttagtttgttaccacccataccacatcctccaccgggtagac

SEQ ID NO: 514965 - DNA, 55 bp, Artificial
  Synthetic oligonucleotide
gacgacaattagggttataacaaggaggtattttcccatctcccgcagaagaacg

SEQ ID NO: 514966 - DNA, 55 bp, Artificial
  Synthetic oligonucleotide
gactttcatccagagccttgcttggccgatccttcaaggactcatccagtttatg

SEQ ID NO: 514967 - DNA, 55 bp, Artificial
  Synthetic oligonucleotide
gagggtctattttccctcctaatgcggatcagggagtttatttggcagcaacgga

SEQ ID NO: 514968 - DNA, 55 bp, Artificial
  Synthetic oligonucleotide
gatctgctactcagaaattatgacattctgtgggatgtagacttaggagggagcg

SEQ ID NO: 514969 - DNA, 55 bp, Artificial
  Synthetic oligonucleotide
gcattagactgagttgcggtatgacagacgcttagtcacggtgtaacattaaatg

SEQ ID NO: 514970 - DNA, 54 bp, Artificial
  Synthetic oligonucleotide
gaggtgaatttcctcttccaaagcattgtggagtcatacaaagtgggcataaca

SEQ ID NO: 514971 - DNA, 53 bp, Artificial
  Synthetic oligonucleotide
cttcgccatcaaagtcagtaagaaactgtccttgcaattgagctggttcagaa

SEQ ID NO: 514972 - DNA, 53 bp, Artificial
  Synthetic oligonucleotide
aatccgtcacggtttgggaagtacaacatatgggcggaaattctgtcaacact

SEQ ID NO: 514973 - DNA, 51 bp, Artificial
  Synthetic oligonucleotide
tcttgacacagccaatatggtcactagtaggtaggatgaaggatgacacta

SEQ ID NO: 514974 - DNA, 57 bp, Artificial
  Synthetic oligonucleotide
ggatgaattgtaaaggcaccattggcaattctattggatctcatatgttttgcaatg

SEQ ID NO: 514975 - DNA, 55 bp, Artificial
  Synthetic oligonucleotide
ggtgaccgatcccagtgtattctgaacaaagatccaacgttgatatgatgcataa

SEQ ID NO: 514976 - DNA, 55 bp, Artificial
  Synthetic oligonucleotide
ggtattgacacaaatcctttggagcgctgttagagtgttttcgggtaggatgggg

SEQ ID NO: 514977 - DNA, 55 bp, Artificial
  Synthetic oligonucleotide
gggtggctaaagttttaacgaatctagcggtctttctggtgttgacagttgagaa

SEQ ID NO: 514978 - DNA, 55 bp, Artificial
  Synthetic oligonucleotide
gggatgttgcaagcaccgtggattttacgggtttcgtcgtatggtaacataatag

SEQ ID NO: 514979 - DNA, 55 bp, Artificial
  Synthetic oligonucleotide
ggctgggtacattgaatcgggtacttcaaattctacagtggtatgatcggcattg

SEQ ID NO: 514980 - DNA, 55 bp, Artificial
  Synthetic oligonucleotide
ggccgtttattggacgttgtgagagattttggcctggttgtacgattccgcctga

SEQ ID NO: 514981 - DNA, 55 bp, Artificial
  Synthetic oligonucleotide
gcttctgataccgccattctcgcaaagtatgacatgattattgcatgggaaattc

SEQ ID NO: 514982 - DNA, 55 bp, Artificial
  Synthetic oligonucleotide
gctcaatgagtttctagacatcggcaggttaggtgagcaactctattctcaacgg

SEQ ID NO: 514983 - DNA, 55 bp, Artificial
  Synthetic oligonucleotide
gcggtgtgacagagtgcaccaccgaatccgatgttacagctgcactgaccgttga

SEQ ID NO: 514984 - DNA, 55 bp, Artificial
  Synthetic oligonucleotide
gccacttctcttcgtattcccctggaacacgtcgatgcactgggtcgtctcgccc

SEQ ID NO: 514985 - DNA, 55 bp, Artificial
  Synthetic oligonucleotide
gcatgtgaccccacctactctactgaaagtctatcagctattggtatacaggttc

SEQ ID NO: 514986 - DNA, 55 bp, Artificial
  Synthetic oligonucleotide
gaggtcatgtcatcattccagatctcctcttaaatgctggtggtgtcactgtatc

SEQ ID NO: 514987 - DNA, 55 bp, Artificial
  Synthetic oligonucleotide
gagggatttatgtattacaatgttgtcgttatgggacaagccaaaggcgatttca

SEQ ID NO: 514988 - DNA, 55 bp, Artificial
  Synthetic oligonucleotide
gagcacctgataaagttggacgagcatgtacctctggtaaacgtgggaatttacc

SEQ ID NO: 514989 - DNA, 55 bp, Artificial
  Synthetic oligonucleotide
gagaccattgatggcgtattcaacatccttgtcagtgtctcttgggatgatgggg

SEQ ID NO: 514990 - DNA, 55 bp, Artificial
  Synthetic oligonucleotide
gacgatcgaaagcatcaatagctgtgctagagttggtgttgtcatcatctccgtc

SEQ ID NO: 514991 - DNA, 55 bp, Artificial
  Synthetic oligonucleotide
gacccctcagggagttgccctggaccaactgctaacttcttacgttttggagaca

SEQ ID NO: 514992 - DNA, 55 bp, Artificial
  Synthetic oligonucleotide
gaatgccaagtttggtgatcctctgtcagtccctgtctatccaaaccatacattc

SEQ ID NO: 514993 - DNA, 55 bp, Artificial
  Synthetic oligonucleotide
ttggcatcgatccttaggaacaaccatcagaatatgacagtgatcgtagtttcgc

SEQ ID NO: 514994 - DNA, 55 bp, Artificial
  Synthetic oligonucleotide
ttaggaatccactcaatgacaggctacaaattcgcattgggaagagaaattctct

SEQ ID NO: 514995 - DNA, 55 bp, Artificial
  Synthetic oligonucleotide
tgatgtcgaaccttcaagagccaccctctatcgttatggtaacacctcttcctcc

SEQ ID NO: 514996 - DNA, 55 bp, Artificial
  Synthetic oligonucleotide
tgaatgtggcgtccgagttaacagtgacatttgtcaaatatgtcgttgtagcatc

SEQ ID NO: 514997 - DNA, 55 bp, Artificial
  Synthetic oligonucleotide
tctacggtgacaccaacgctattgcaccgggtggtgtacgtctcggttcgccagc

SEQ ID NO: 514998 - DNA, 55 bp, Artificial
  Synthetic oligonucleotide
tcgttagaggtggcgttgtaaacgacgttaaggatacgacatttacgggtgactt

SEQ ID NO: 514999 - DNA, 55 bp, Artificial
  Synthetic oligonucleotide
tcccgaacaagtgttgagtgaacatgataaactcccacaaggcattcaagagtct

SEQ ID NO: 515000 - DNA, 55 bp, Artificial
  Synthetic oligonucleotide
tccacgtttaaattgccaaactacactcattgcacaacgtggtaaaccaccacgt

SEQ ID NO: 515001 - DNA, 55 bp, Artificial; identical to SEQ ID NO: 289367
  Synthetic oligonucleotide

SEQ ID NO: 515002 - DNA, 55 bp, Artificial
  Synthetic oligonucleotide
tagcacaattgaagacacgtttaagtaaggatacctttacagagggtcgtgttag

SEQ ID NO: 515003 - DNA, 55 bp, Artificial
  Synthetic oligonucleotide
taataaccatggctcattaccaatagttctacgaagtacatttgctgctctttgc

SEQ ID NO: 515004 - DNA, 55 bp, Artificial
  Synthetic oligonucleotide
gttggcagagaatccagatcaactgacaatggaagacgaaacatccacctcctcc

SEQ ID NO: 515005 - DNA, 55 bp, Artificial
  Synthetic oligonucleotide
gttgatttgacatcattgatcttggtggccatatcttcagagtgagtaaggaggg

SEQ ID NO: 515006 - DNA, 55 bp, Artificial
  Synthetic oligonucleotide
gttcacgtgctagagaacacaacgctgccaaacgtttaggtcgtcacagaggtgc

SEQ ID NO: 515007 - DNA, 55 bp, Artificial
  Synthetic oligonucleotide
gtcttcggcggggattggattacatttggcgagaaattgctggacgagttcaaag

SEQ ID NO: 515008 - DNA, 55 bp, Artificial
  Synthetic oligonucleotide
gtccaaacaagacctggagacgttggaatcgtaaagttaacgtcaaccaaaagag

SEQ ID NO: 515009 - DNA, 55 bp, Artificial
  Synthetic oligonucleotide
gtatgccaatacaccccaaattaacaggcacgctgttcttgtagacagtcagttg

SEQ ID NO: 515010 - DNA, 55 bp, Artificial
  Synthetic oligonucleotide
gtagggattctggctgtggatgcattggtgtgtctggtttcttatgtggtcctac

SEQ ID NO: 515011 - DNA, 55 bp, Artificial
  Synthetic oligonucleotide
ggtggttcgagagaatgatcatccacattggtattgaaagaacgaccaaactctg

SEQ ID NO: 515012 - DNA, 55 bp, Artificial
  Synthetic oligonucleotide
ggtgagaaaggacgatgacgccgtactgaaagtcaaggcaattcgactcgttaga

SEQ ID NO: 515013 - DNA, 55 bp, Artificial
  Synthetic oligonucleotide
ccagcaactcaacaactagaaccatcgcaagagcaatctgttagtagtatgagtg

SEQ ID NO: 515014 - DNA, 55 bp, Artificial
  Synthetic oligonucleotide
ccacccaatctggtaacacaatggtaccacctaaacgatcgacatgcaaatagag

SEQ ID NO: 515015 - DNA, 55 bp, Artificial
  Synthetic oligonucleotide
ccaaccgacttcttgggataaacgagataagacggtgtatttacgggtggtgttt

SEQ ID NO: 515016 - DNA, 55 bp, Artificial
  Synthetic oligonucleotide
ccaaagaattcagaaccggccatccaattaccttgagcggctctaactggttcgt

SEQ ID NO: 515017 - DNA, 55 bp, Artificial
  Synthetic oligonucleotide
cagtattgtccagattctctcggtggaagttcagttgtttggtcaatcaaactgg

SEQ ID NO: 515018 - DNA, 55 bp, Artificial
  Synthetic oligonucleotide
cagaccataccggtggtggagagttgacaggtaccgtgaccgctgcagtcgcagt

SEQ ID NO: 515019 - DNA, 55 bp, Artificial
  Synthetic oligonucleotide
cacggtattagcggcaccaacagcaatgagattatcttttggatgccatgcacaa

SEQ ID NO: 515020 - DNA, 55 bp, Artificial
  Synthetic oligonucleotide
caccattgtacgaaaccatgacaagaatcgtggttgtatcattaccgacctattc

SEQ ID NO: 515021 - DNA, 55 bp, Artificial
  Synthetic oligonucleotide
caccagtgaaaccaaagcatggtcctcttccatcgacattatagaaatagattgc

SEQ ID NO: 515022 - DNA, 55 bp, Artificial
  Synthetic oligonucleotide
caccaattccaagcactggtaagacgaccatcgatacaagaaccggcatcgaaaa

SEQ ID NO: 515023 - DNA, 55 bp, Artificial
  Synthetic oligonucleotide
caacgacacagactggcattatcaatggtggggcgaagtctctgtatgctgtctc

SEQ ID NO: 515024 - DNA, 55 bp, Artificial
  Synthetic oligonucleotide
atctataccgctggacgatttcgataactctgactataggatcccaactcaacgt

SEQ ID NO: 515025 - DNA, 55 bp, Artificial
  Synthetic oligonucleotide
agccgttactacaacaacggtgactctggctattacaaatccagtcaagatagca

SEQ ID NO: 515026 - DNA, 55 bp, Artificial
  Synthetic oligonucleotide
acctactcccaaccctcactctatctcaccgacgccaggtgtttgcctggcagcg

SEQ ID NO: 515027 - DNA, 55 bp, Artificial
  Synthetic oligonucleotide
acaccagaaagactgctagattcgtcaaaactttagccacccaatatgccccaga

SEQ ID NO: 515028 - DNA, 55 bp, Artificial
  Synthetic oligonucleotide
aagtgaatcaccttggatacaaataccaaccgactccaatgcttgtgtacgttgg

SEQ ID NO: 515029 - DNA, 55 bp, Artificial
  Synthetic oligonucleotide
aactgtataaccacgtgcttcccatgtactacgaataccacctgatgggaatgat

SEQ ID NO: 515030 - DNA, 55 bp, Artificial
  Synthetic oligonucleotide
aacagaacccaaggtaccaaacttgcttctgatggtttaaagggtcgtgtctacg

SEQ ID NO: 515031 - DNA, 55 bp, Artificial
  Synthetic oligonucleotide
aaaatagtttagccacaccatccatctatggcattatcgttgcacagagtagtga

SEQ ID NO: 515032 - DNA, 55 bp, Artificial
  Synthetic oligonucleotide
gaacacattaaaccacaagttgctgaagatccaaatggttggacaactcaaagag

SEQ ID NO: 515033 - DNA, 55 bp, Artificial
  Synthetic oligonucleotide
cttgttctcaacttgactgcgaaagcaaaggtatgaaatgcgagctatctcaaga

SEQ ID NO: 515034 - DNA, 55 bp, Artificial
  Synthetic oligonucleotide
cttcacttacatatgcctcatttacacttgggaataatctgtgagcctctggatc

SEQ ID NO: 515035 - DNA, 55 bp, Artificial
  Synthetic oligonucleotide
ctggctctgtgggtaccttttctacggagaccacgggctttgataccagcggagg

SEQ ID NO: 515036 - DNA, 55 bp, Artificial
  Synthetic oligonucleotide
ctcgtgtcaaagacacgtgcactacaatcgtcggaggcagtcgcaaccaagggtg

SEQ ID NO: 515037 - DNA, 55 bp, Artificial
  Synthetic oligonucleotide
ctcgtcttatacttaccaactctctgcagacgtatggacgtcccatactgtatcg

SEQ ID NO: 515038 - DNA, 55 bp, Artificial
  Synthetic oligonucleotide
ctccaaatatttgtaggatggcatttcaaaggtgcccaccatttcgacggatctg

SEQ ID NO: 515039 - DNA, 55 bp, Artificial
  Synthetic oligonucleotide
ctatcgatggattcttttggatgcaatgtgtacatggtattgaacgtgttgcctc

SEQ ID NO: 515040 - DNA, 55 bp, Artificial
  Synthetic oligonucleotide
ctaactagtaactccaaacctgtgacaatcttgatgagtggatcgctcgaaggac

SEQ ID NO: 515041 - DNA, 55 bp, Artificial
  Synthetic oligonucleotide
cgtcatagtagaatgcatctggagcagagaatggttgacgtttaccgttgttgca

SEQ ID NO: 515042 - DNA, 55 bp, Artificial
  Synthetic oligonucleotide
cgtcaccaatcgatttaaagtaatggtaggaacgtttgtagctggccacgcactc

SEQ ID NO: 515043 - DNA, 55 bp, Artificial
  Synthetic oligonucleotide
cggtggttacgacaagcgtgtatcttggttcgatctcgacatgtcacaaccatac

SEQ ID NO: 515044 - DNA, 55 bp, Artificial
  Synthetic oligonucleotide
cggggtgatgaataaccattgggaaccaaactaccgctactgtggccaccagtgt

SEQ ID NO: 515045 - DNA, 55 bp, Artificial
  Synthetic oligonucleotide
cggaccaactacgtctattattattggttgcaactgaatcggcaccttgtggtga

SEQ ID NO: 515046 - DNA, 55 bp, Artificial
  Synthetic oligonucleotide
cgattttgttggcaacatcagcagcttcgaattctggggataaagtgacaaaagc

SEQ ID NO: 515047 - DNA, 55 bp, Artificial
  Synthetic oligonucleotide
cgaatgcagcgagtctaccgacaaagaatcgataggtgatcaactgtccgagtgg

SEQ ID NO: 515048 - DNA, 55 bp, Artificial
  Synthetic oligonucleotide
cccgcctagggttcgtaatcaacacagaaaagtctataacagtccccgtgcaagc

SEQ ID NO: 515049 - DNA, 55 bp, Artificial
  Synthetic oligonucleotide
ccccgatatgataacaattgcaatgaagccagtgccaagcaaattctggggattc

SEQ ID NO: 515050 - DNA, 55 bp, Artificial
  Synthetic oligonucleotide
cccaccgctacaaccaatagtcaatgagcaattatcccctttcctaatcggtagg

SEQ ID NO: 515051 - DNA, 55 bp, Artificial
  Synthetic oligonucleotide
ccattcggagcggtattcatcgaactctactttattttatcggccgtctgggaca

SEQ ID NO: 515052 - DNA, 54 bp, Artificial
  Synthetic oligonucleotide
tgaatggtgcactagaggagtagttagctgcaactacaatgtctacaatgttct

SEQ ID NO: 515053 - DNA, 51 bp, Artificial
  Synthetic oligonucleotide
tcggtcatagccaagccagcatctagagtattctggtttgtaatcacgggg

SEQ ID NO: 515054 - DNA, 51 bp, Artificial
  Synthetic oligonucleotide
ccactgccatccaaaagacccactttgattgtgtcgtcaccaaacaagtca

SEQ ID NO: 515055 - DNA, 55 bp, Artificial
  Synthetic oligonucleotide
accctaatccgcagtagctgcaccctgaagactataagctaatgggtagttgggt

SEQ ID NO: 515056 - DNA, 55 bp, Artificial
  Synthetic oligonucleotide
ttccataggtactagcatgcggcccgccaccctactagcaccccacctggctagc

SEQ ID NO: 515057 - DNA, 55 bp, Artificial
  Synthetic oligonucleotide
agggttgaggtattggggctttattaaggctttctaagtgggtcatttgaagccg

SEQ ID NO: 515058 - DNA, 55 bp, Artificial
  Synthetic oligonucleotide
caagattcctacgtcgcttgcgcgccatcgcaactgctctgcatcttcatggagc

SEQ ID NO: 515059 - DNA, 55 bp, Artificial
  Synthetic oligonucleotide
cacgcacgaattcctcttatatccgtggtccggcaaacggcaaagcttacgggac

SEQ ID NO: 515060 - DNA, 55 bp, Artificial
  Synthetic oligonucleotide
ccaattgatgccgcatcgcctactgcttgaaggcttgtgacggactcgtgcactg

SEQ ID NO: 515061 - DNA, 55 bp, Artificial
  Synthetic oligonucleotide
tgcatgcgtttcgatggagtttgaggtgtacagacaaccaaatgcagtgtccgtc

SEQ ID NO: 515062 - DNA, 55 bp, Artificial
  Synthetic oligonucleotide
cctcacggctcgtttggggcagggttcgcagtgaatggcggaagtgcccatttgg

SEQ ID NO: 515063 - DNA, 55 bp, Artificial
  Synthetic oligonucleotide
ctgattcgtcagggcacctctcgttcatatctacggggtctatgggtcctgcgga

SEQ ID NO: 515064 - DNA, 55 bp, Artificial
  Synthetic oligonucleotide
gcctttgtggaaaagcattcacaatgagcatatgaaaggaacattacgtttgaag

SEQ ID NO: 515065 - DNA, 55 bp, Artificial
  Synthetic oligonucleotide
tctctgcatgcaacgcactgcttcaaaaggggactgtagaagtagcctttgctgc

SEQ ID NO: 515066 - DNA, 54 bp, Artificial
  Synthetic oligonucleotide
ttgttttcgcgatcttgacgtagctctttcctgtagggcacgattaggcctgct

SEQ ID NO: 515067 - DNA, 54 bp, Artificial
  Synthetic oligonucleotide
ccccggaaaggataaaatgccaggagttgcctgagatgtacagacagctcagca

SEQ ID NO: 515068 - DNA, 53 bp, Artificial
  Synthetic oligonucleotide
gagaagtatagcggtcaagttaagcttagctcattcctcggtgtgctctgcag

SEQ ID NO: 515069 - DNA, 52 bp, Artificial
  Synthetic oligonucleotide
ccccgtgcctcctgctgcagcaaacagccgccccgaagatgcagcaaaacgc

SEQ ID NO: 515070 - DNA, 51 bp, Artificial
  Synthetic oligonucleotide
accaactatccgacaagatacgcggcaccgtgatgtgtctcaagggcattg

SEQ ID NO: 515071 - DNA, 50 bp, Artificial
  Synthetic oligonucleotide
actgccataatcaccagccgcctcaaaccatagcagcagttcaaggagcc

SEQ ID NO: 515072 - DNA, 55 bp, Artificial
  Synthetic oligonucleotide
tgtgcacacactgttaagtacacacccggagacgccagcacagcgcagctcgcag

SEQ ID NO: 515073 - DNA, 55 bp, Artificial
  Synthetic oligonucleotide
tgtaccgcctcgaagatctcccctagtgggaaggccctactcagtccctgcgtgc

SEQ ID NO: 515074 - DNA, 55 bp, Artificial
  Synthetic oligonucleotide
tgagacggtggctagcgcgttgggctgcgtccatctgacgacggcaacgtatagg

SEQ ID NO: 515075 - DNA, 55 bp, Artificial
  Synthetic oligonucleotide
tcaccgagcctaaagacagcaatcgtaagcgcactatacctcagagtgttacgcc

SEQ ID NO: 515076 - DNA, 55 bp, Artificial
  Synthetic oligonucleotide
gttcgcttgttcagtggttgttcagtacacagattcttgctcagtattagagtcg

SEQ ID NO: 515077 - DNA, 55 bp, Artificial
  Synthetic oligonucleotide
ggttggcttcctggatggtggggcggtcacagtggagcaggtgcgttggttcaag

SEQ ID NO: 515078 - DNA, 55 bp, Artificial
  Synthetic oligonucleotide
gaattatccagaacaatcggtcttgaaaagtaaaagattccttcagcagcgttag

SEQ ID NO: 515079 - DNA, 55 bp, Artificial
  Synthetic oligonucleotide
gaacgggcagtttggaggtgtgggagcgcctgctatcgtcgtgtgcggagtgtgt

SEQ ID NO: 515080 - DNA, 55 bp, Artificial
  Synthetic oligonucleotide
gaacaacggagactcttcgttagcctctgtcaccatgtagatcacaaacgaagca

SEQ ID NO: 515081 - DNA, 55 bp, Artificial
  Synthetic oligonucleotide
ctgaggcgaaggataacacgttgatcaccatccccaagactactcaggcgaagga

SEQ ID NO: 515082 - DNA, 55 bp, Artificial
  Synthetic oligonucleotide
cgtaggccgagttacgacggatggcgaacttttgcgcaaggaaccttacctgcaa

SEQ ID NO: 515083 - DNA, 55 bp, Artificial
  Synthetic oligonucleotide
cgaggtcccacatcaggattctgcatcgaggcatccattcggcatttatgacagt

SEQ ID NO: 515084 - DNA, 55 bp, Artificial
  Synthetic oligonucleotide
cataccttgggagtcataccctcactaagcttggcgtcaattgtttagtcagctg

SEQ ID NO: 515085 - DNA, 55 bp, Artificial
  Synthetic oligonucleotide
caggagatcttggaaccagtggccgggttgcgagctgtgtatgcggtagtggatg

SEQ ID NO: 515086 - DNA, 55 bp, Artificial
  Synthetic oligonucleotide
atattaaagcaacgcatggacacactcgactactctttcgaccaacttctactcg

SEQ ID NO: 515087 - DNA, 55 bp, Artificial
  Synthetic oligonucleotide
agaggacatgctggcggattatccaggtgcccgatttgagagtagcacggtgggg

SEQ ID NO: 515088 - DNA, 53 bp, Artificial
  Synthetic oligonucleotide
tggcaccaaatgcctccagtcctcctcgagtatgtcgtaagccagcttccaat

SEQ ID NO: 515089 - DNA, 55 bp, Artificial
  Synthetic oligonucleotide
ttatgtaattgggtaggggttgaggagttaggtgcaaaactccaagtcccgagtt

SEQ ID NO: 515090 - DNA, 55 bp, Artificial
  Synthetic oligonucleotide
tcgttacaacttattccatgatttcttttggtggacaacgagccaagctttctgc

SEQ ID NO: 515091 - DNA, 55 bp, Artificial
  Synthetic oligonucleotide
tcacaacatgagtcattcctgctttaaacccaattgaagcagttaagtgacaggg

SEQ ID NO: 515092 - DNA, 55 bp, Artificial
  Synthetic oligonucleotide
ggtctagggtcgcttcaatggctacttaccggcatgattttggccttgatttcag

SEQ ID NO: 515093 - DNA, 55 bp, Artificial
  Synthetic oligonucleotide
ggtcaaccgagcgtctcctgcagaatctagagaaattattccagcagctgctacc

SEQ ID NO: 515094 - DNA, 55 bp, Artificial
  Synthetic oligonucleotide
gggtccccttacaccagccggatcccaaggaagcatgatcgaaattttaattccg

SEQ ID NO: 515095 - DNA, 55 bp, Artificial
  Synthetic oligonucleotide
gccgagttatgctcattaattttcctttatgagtcatcacatcaactaggagcga

SEQ ID NO: 515096 - DNA, 55 bp, Artificial
  Synthetic oligonucleotide
gcataacctataatgtcccggccattcaaagcatggggtattacttttgcttgga

SEQ ID NO: 515097 - DNA, 55 bp, Artificial
  Synthetic oligonucleotide
gaattcacgaagatacccaaaaccgatcaaaacttgcggaattactgagatatcg

SEQ ID NO: 515098 - DNA, 55 bp, Artificial
  Synthetic oligonucleotide
gaaaagggtgcattaagttcacggtttagaggtgaacatgtcctacgtcgatacg

SEQ ID NO: 515099 - DNA, 55 bp, Artificial
  Synthetic oligonucleotide
ctttaatttcgaaaagagggacaatggaaattaatcttgtagagacgatggaccc

SEQ ID NO: 515100 - DNA, 55 bp, Artificial
  Synthetic oligonucleotide
cgtgtttagagtttcgattaaatcaagggttaattttccggcttcagaaaatccg

SEQ ID NO: 515101 - DNA, 55 bp, Artificial; identical to SEQ ID NO: 288906
  Synthetic oligonucleotide

SEQ ID NO: 515102 - DNA, 55 bp, Artificial; identical to SEQ ID NO: 288091
  Synthetic oligonucleotide

SEQ ID NO: 515103 - DNA, 55 bp, Artificial; identical to SEQ ID NO: 288522
  Synthetic oligonucleotide

SEQ ID NO: 515104 - DNA, 55 bp, Artificial
  Synthetic oligonucleotide
cctttccggagatcatattggcgtattcaatttatcgttgaaaggtcatgctacc

SEQ ID NO: 515105 - DNA, 51 bp, Artificial
  Synthetic oligonucleotide
tttactacttctaagggacaaacgagaacttttggcaactttgcgaaagca

SEQ ID NO: 515106 - DNA, 55 bp, Artificial
  Synthetic oligonucleotide
ttgcgaccttgtgatcatttaatgacgactactgagtatgttcggttggtagatc

SEQ ID NO: 515107 - DNA, 55 bp, Artificial
  Synthetic oligonucleotide
tgcgagtccctactgaaaagccaggagagtgcgtggggtgcatgggtggcaggcc

SEQ ID NO: 515108 - DNA, 55 bp, Artificial
  Synthetic oligonucleotide
gttgttgtggagagttcccgaagaagagaacccttgtctgcgtggagctgcaaaa

SEQ ID NO: 515109 - DNA, 55 bp, Artificial
  Synthetic oligonucleotide
gtgatcaatccacgaactatcaacaccttctaccaaccctttaatctgaacctcg

SEQ ID NO: 515110 - DNA, 55 bp, Artificial
  Synthetic oligonucleotide
gtgaagggtcagacgaaaggcggtttcttcctcacgttgggctcagcggtagctg

SEQ ID NO: 515111 - DNA, 55 bp, Artificial
  Synthetic oligonucleotide
gtctggtgcaagaaaaggacttagcttttcagtcactgctgagcgaacacgcaga

SEQ ID NO: 515112 - DNA, 55 bp, Artificial
  Synthetic oligonucleotide
ggtcgtggtgacgtttgatgagatacacacagacaagaagaatcaagcgggcgcc

SEQ ID NO: 515113 - DNA, 55 bp, Artificial
  Synthetic oligonucleotide
ggctggctcgggaaagcacccaccagagcatatccttgcctcatccaaccgggca

SEQ ID NO: 515114 - DNA, 55 bp, Artificial
  Synthetic oligonucleotide
ggctcttggacaagggcatatatggtattattacagagaatagcacccctggtcc

SEQ ID NO: 515115 - DNA, 55 bp, Artificial
  Synthetic oligonucleotide
gctgattatcggtcggagtattctagagtctccattcatccctgcttcacctcgc

SEQ ID NO: 515116 - DNA, 55 bp, Artificial
  Synthetic oligonucleotide
gcgggtcctttcaatgtaccttcaggagttgcatatgcgccgggtccaggtcctg

SEQ ID NO: 515117 - DNA, 55 bp, Artificial
  Synthetic oligonucleotide
gcagacagatcaaaggctccaggatagagcttcttcgtgtgagagcgaacttgca

SEQ ID NO: 515118 - DNA, 55 bp, Artificial
  Synthetic oligonucleotide
gacctagccaccatgatttcagagtacagccaagcaaagatccgtatccccgagg

SEQ ID NO: 515119 - DNA, 55 bp, Artificial
  Synthetic oligonucleotide
gaagagagagccggtcttccagtaaagtgtcactgcaccgtgggttcctatgacg

SEQ ID NO: 515120 - DNA, 55 bp, Artificial
  Synthetic oligonucleotide
ctgggacatccaatggtatagagttctaggatgcaaaccaaatatgcgagcagcc

SEQ ID NO: 515121 - DNA, 55 bp, Artificial
  Synthetic oligonucleotide
aaaatcagggctccgaccaggaccccacctagccccgcaaggcagttgcgatagc

SEQ ID NO: 515122 - DNA, 55 bp, Artificial
  Synthetic oligonucleotide
aaattatgaacccctgcccatgatcctcccagtaaaggggagccaatcagccacg

SEQ ID NO: 515123 - DNA, 55 bp, Artificial
  Synthetic oligonucleotide
atctccgtggatgttgagatgggatgtgtgatccaccttcagattaatgttgggg

SEQ ID NO: 515124 - DNA, 55 bp, Artificial
  Synthetic oligonucleotide
ccaacctcctttgaaacggtaggccatatagcacactacaatcttcgagaggtcc

SEQ ID NO: 515125 - DNA, 55 bp, Artificial
  Synthetic oligonucleotide
ccactggatatatcacaggtggacctcagtggaaactgcaagcccgagctcgcac

SEQ ID NO: 515126 - DNA, 55 bp, Artificial
  Synthetic oligonucleotide
cccggttgcaataatgttgtatcaatcgcttactgactgctgcgggtgcaatctc

SEQ ID NO: 515127 - DNA, 55 bp, Artificial
  Synthetic oligonucleotide
cccgtcactcaatagcatgattactcccagctctggttcatcccactcgggcagc

SEQ ID NO: 515128 - DNA, 55 bp, Artificial
  Synthetic oligonucleotide
ccctgcataacaggtattaagttgccttccgcaaagtcaggccgttaaaattagc

SEQ ID NO: 515129 - DNA, 55 bp, Artificial
  Synthetic oligonucleotide
ccggtccaaggcctagtaaacgtatgtatttacaggcgacgacccaggacccaga

SEQ ID NO: 515130 - DNA, 55 bp, Artificial
  Synthetic oligonucleotide
ccgtggctatatacggtccgtctctaacctatatgattgctggcagcgggagggc

SEQ ID NO: 515131 - DNA, 55 bp, Artificial
  Synthetic oligonucleotide
cgactgccaggatgaaccagtggcctttggataagatggctctcatcaccgatgt

SEQ ID NO: 515132 - DNA, 55 bp, Artificial
  Synthetic oligonucleotide
cgacttaggcctttgtgcaacagggtcaacctcaaattccctcttgctctgtttc

SEQ ID NO: 515133 - DNA, 55 bp, Artificial
  Synthetic oligonucleotide
cgcatgattgtttccatcgatagacgctcgtctcggctcatgaacagcccgccag

SEQ ID NO: 515134 - DNA, 55 bp, Artificial
  Synthetic oligonucleotide
cggatgcactcaaagatcgtgttcctttacgtgtgccatcatgaggaattggtgc

SEQ ID NO: 515135 - DNA, 55 bp, Artificial
  Synthetic oligonucleotide
ctcgttcggcacgtgatcgtagaagacgaacctttgtacgtatgcgcgctttgtc

SEQ ID NO: 515136 - DNA, 53 bp, Artificial
  Synthetic oligonucleotide
tacaccaagtaatgtaaatggcctcagccgagatagccgtctcgcactccatg

SEQ ID NO: 515137 - DNA, 52 bp, Artificial
  Synthetic oligonucleotide
tcccaccgttgtgggttccagttgccgagagtacggtgcgcgtatccgagcg

SEQ ID NO: 515138 - DNA, 51 bp, Artificial
  Synthetic oligonucleotide
ccccttggcacactagtaggcactggtgatacctctaaggcatatgtgggg

SEQ ID NO: 515139 - DNA, 51 bp, Artificial
  Synthetic oligonucleotide
tggcttggagacaactcgcactgcacgagatagaggcccttatatcggtag

SEQ ID NO: 515140 - DNA, 50 bp, Artificial
  Synthetic oligonucleotide
ggattcttgcgaagggccacttgagtccagggtgagtgataagtacgcaa

SEQ ID NO: 515141 - DNA, 55 bp, Artificial
  Synthetic oligonucleotide
ttcgagattccccgcaagttgctctaattcccgccgtgatgtttcagcccacgtc

SEQ ID NO: 515142 - DNA, 55 bp, Artificial
  Synthetic oligonucleotide
tgaggctggggctctatttgacggggaccttataatgtcctgctttgagctctcc

SEQ ID NO: 515143 - DNA, 55 bp, Artificial
  Synthetic oligonucleotide
gtgtaactcgttgcagcgccccgacataattctaagccgatgggaacgtgtgtac

SEQ ID NO: 515144 - DNA, 55 bp, Artificial
  Synthetic oligonucleotide
gtctcgagtggtggcggctgtcaataagttgcagaaaattcgagcgaacaatgtt

SEQ ID NO: 515145 - DNA, 55 bp, Artificial
  Synthetic oligonucleotide
gggaggtggatgcatgttgcgactgtttggggcgacaagatgttcgtgtttgggg

SEQ ID NO: 515146 - DNA, 55 bp, Artificial
  Synthetic oligonucleotide
ggcacagaggtacggagagaacagaggcggagcaaatgggagtggtgaactcccg

SEQ ID NO: 515147 - DNA, 55 bp, Artificial
  Synthetic oligonucleotide
cttggtccattcgggatcctacctcgtttgcaattgggccactacttggcaagga

SEQ ID NO: 515148 - DNA, 55 bp, Artificial
  Synthetic oligonucleotide
cttctggttccatgcaagtcgatatggagaccatgcaggcatcaaccggactata

SEQ ID NO: 515149 - DNA, 55 bp, Artificial
  Synthetic oligonucleotide
ccgcagctctaaccaatcgcggaaggcgcatctttcccatacactgcacgaagta

SEQ ID NO: 515150 - DNA, 55 bp, Artificial
  Synthetic oligonucleotide
cacggcaagtgtcctttgattgaggaattcaaacagcgctccgattcgctgatcc

SEQ ID NO: 515151 - DNA, 55 bp, Artificial
  Synthetic oligonucleotide
cacagtgctcacaggcgggaagggtgccatgtatgtctatacgaactacgcccat

SEQ ID NO: 515152 - DNA, 55 bp, Artificial
  Synthetic oligonucleotide
agaagacgctgttgccccgtgtatgtgatcctgatgtatggaagtagaatgcttg

SEQ ID NO: 515153 - DNA, 52 bp, Artificial
  Synthetic oligonucleotide
ggcgcggtacctctgggccttgataaggagttgtcaatctttgaggattcga

SEQ ID NO: 515154 - DNA, 52 bp, Artificial
  Synthetic oligonucleotide
gtcctcaactatgatatctgctgtcgtgtaggtcgggagctgaaaatggcga

SEQ ID NO: 515155 - DNA, 52 bp, Artificial
  Synthetic oligonucleotide
agtcctttgggacctcttcactgaatggaaagatgctgctacttacggtttt

SEQ ID NO: 515156 - DNA, 52 bp, Artificial
  Synthetic oligonucleotide
actgtcgcaccaaagccaggtcgtacgtgtaaagcttcaatcccacacgtct

SEQ ID NO: 515157 - DNA, 50 bp, Artificial
  Synthetic oligonucleotide
ccaacagctgttgtaacaagactcaaaggcagtcctcctgtgccacatcg

SEQ ID NO: 515158 - DNA, 55 bp, Artificial
  Synthetic oligonucleotide
tgtgtcctgtgtatttgtagggctgatgtcagtgacacatactacatgtgggagg

SEQ ID NO: 515159 - DNA, 55 bp, Artificial
  Synthetic oligonucleotide
gtgtctcgcatatgattggaataggccgtagcgatgggctctcctcacaaaagcg

SEQ ID NO: 515160 - DNA, 55 bp, Artificial
  Synthetic oligonucleotide
gtgcagtgaaattgcgggaggtaccttggtggcatgtggcgcagactttcgggta

SEQ ID NO: 515161 - DNA, 55 bp, Artificial
  Synthetic oligonucleotide
gggtcaccttgcacgtcaagggcacaaaagtatcgtgcatacagacttgaggacg

SEQ ID NO: 515162 - DNA, 55 bp, Artificial
  Synthetic oligonucleotide
ggggataccgccccgtccgggctgcgaggaaggcgatgtgtttgtggtgcttccc

SEQ ID NO: 515163 - DNA, 55 bp, Artificial
  Synthetic oligonucleotide
gggaacacaaggagctttcgaatgaggtttatggtgactgcaagctccggacaac

SEQ ID NO: 515164 - DNA, 55 bp, Artificial
  Synthetic oligonucleotide
ggataacgagccactgaaatgtcattttgtgatgattctcaaacatccttgcgcg

SEQ ID NO: 515165 - DNA, 55 bp, Artificial
  Synthetic oligonucleotide
gcgtaggtgtatgtgctgatatatactaaataggctgggaggctcgcgacggcat

SEQ ID NO: 515166 - DNA, 55 bp, Artificial
  Synthetic oligonucleotide
gcaatatataacagctaacgcgcccttcatcacttcagtcagcgcgctcaaatct

SEQ ID NO: 515167 - DNA, 55 bp, Artificial
  Synthetic oligonucleotide
gaaagtcactagcgcaggcggacaatgctgtaggtaggcacactcatcacctagt

SEQ ID NO: 515168 - DNA, 55 bp, Artificial
  Synthetic oligonucleotide
cttctctcattggcgttcgaatgaagcttctgtgtgtactctcaacttactgggg

SEQ ID NO: 515169 - DNA, 55 bp, Artificial
  Synthetic oligonucleotide
ctccgagactcaatgttcttgtccacctttccagtttagcggccacacttgcccc

SEQ ID NO: 515170 - DNA, 55 bp, Artificial
  Synthetic oligonucleotide
cgttggcgaagcaagacgcatgctgagccttcccaggtcgagtattgtcacgaga

SEQ ID NO: 515171 - DNA, 55 bp, Artificial
  Synthetic oligonucleotide
cgtgattatggaggataatcaagcttgcattgcgatggggaataatccgattacg

SEQ ID NO: 515172 - DNA, 55 bp, Artificial
  Synthetic oligonucleotide
cgctgtcttgaccgccttaggccacgcggggtacgtaagacgtccggaaatgggg

SEQ ID NO: 515173 - DNA, 55 bp, Artificial
  Synthetic oligonucleotide
cgatatcgccacagtcagggccaataccacgcgtgtatgcgtcatgtaggacggc

SEQ ID NO: 515174 - DNA, 55 bp, Artificial
  Synthetic oligonucleotide
caggagcttaatggtgtatatgagttgggagcgacagaggaccgccgaccgtttc

SEQ ID NO: 515175 - DNA, 55 bp, Artificial
  Synthetic oligonucleotide
caattccacactgtatgaagaggggtgtaaatcgcatattgtcgacgcctaagtg

SEQ ID NO: 515176 - DNA, 55 bp, Artificial
  Synthetic oligonucleotide
agtccgtgcttggagaatgccggcgtgtatacgtggaaatgggtccgagacccgg

SEQ ID NO: 515177 - DNA, 55 bp, Artificial
  Synthetic oligonucleotide
aacgtgtaacatgagtcctgacgaaggttgtcggaatgtgcactaacgttgcatg

SEQ ID NO: 515178 - DNA, 54 bp, Artificial
  Synthetic oligonucleotide
gggcacccgagaagcaacttaaagcacccactcctgtacgccgacgtgttctgg

SEQ ID NO: 515179 - DNA, 52 bp, Artificial
  Synthetic oligonucleotide
cgtgacaaactatgtgaccggagctatccattcctcgggccctccttccaac

SEQ ID NO: 515180 - DNA, 51 bp, Artificial
  Synthetic oligonucleotide
ctatggaacagcggacatcgcctcgtcttgaccttctcgggaaaatgctta

SEQ ID NO: 515181 - DNA, 51 bp, Artificial
  Synthetic oligonucleotide
gacgacgacgtcaagacaacactctcgctcgcccacccgcaactaattagc

SEQ ID NO: 515182 - DNA, 50 bp, Artificial
  Synthetic oligonucleotide
cgtccctgtgttgaaaaggaacacgcgtggcatgcttacgaaacccacaa

SEQ ID NO: 515183 - DNA, 58 bp, Artificial
  Synthetic oligonucleotide
gaatgtatttagggtgaatgccctcgggaaattattaaactaaagcagttcagaaaag

SEQ ID NO: 515184 - DNA, 55 bp, Artificial
  Synthetic oligonucleotide
ttttggatgtatcctataacaacttgcacgacctctacggtttacagtactcccc

SEQ ID NO: 515185 - DNA, 55 bp, Artificial
  Synthetic oligonucleotide
ttgattcgcattaaccgcctcattcggtatgtagtcggtcatttgtgactgatct

SEQ ID NO: 515186 - DNA, 55 bp, Artificial
  Synthetic oligonucleotide
tcgcgatagccacgccatgagttagacccatgtcatgctttacatgttaaaagta

SEQ ID NO: 515187 - DNA, 55 bp, Artificial
  Synthetic oligonucleotide
gggcaaggagagtactatcgattgtggaagcattgcaaagcagcgtaatagtggc

SEQ ID NO: 515188 - DNA, 55 bp, Artificial
  Synthetic oligonucleotide
ggctcaactaagcacagtaatagcgtaaagtcgccccaataaaggtagcaatata

SEQ ID NO: 515189 - DNA, 55 bp, Artificial
  Synthetic oligonucleotide
ggaagtctgctcagacattaacttgctcttaagatttggtgactgcatttgcccg

SEQ ID NO: 515190 - DNA, 55 bp, Artificial
  Synthetic oligonucleotide
gccaagctctatcagttatagtgggtaactgcatttcacctgcaacctcttattc

SEQ ID NO: 515191 - DNA, 55 bp, Artificial
  Synthetic oligonucleotide
gcactgcaggaaaatttaaccacactggtagaaactggaggaatttaatcactcc

SEQ ID NO: 515192 - DNA, 55 bp, Artificial
  Synthetic oligonucleotide
gaattacggaaacattacagacatagcaggtaatccgcttgtcaaagattcttac

SEQ ID NO: 515193 - DNA, 55 bp, Artificial
  Synthetic oligonucleotide
ctcgcactctacgttaatgtcctcttctacggtcaattgatctcccttgctttag

SEQ ID NO: 515194 - DNA, 55 bp, Artificial
  Synthetic oligonucleotide
cgaagttttccaggagggagttaggtctatgataactagagatgctcaccacaaa

SEQ ID NO: 515195 - DNA, 55 bp, Artificial
  Synthetic oligonucleotide
atgttttgggctgcccatgctgtagatccagaacatcatgagatagtggagttct

SEQ ID NO: 515196 - DNA, 55 bp, Artificial
  Synthetic oligonucleotide
acaccaaaactgcttcaagtgacttgtctctttgaatgcttacagagcttcctca

SEQ ID NO: 515197 - DNA, 55 bp, Artificial
  Synthetic oligonucleotide
aagcacaaagctctaccaatccaataacatgactaactgcctacgcacagaggac

SEQ ID NO: 515198 - DNA, 53 bp, Artificial
  Synthetic oligonucleotide
tggatcaagactataatcaccattcggaagcgctaaccctaaattgcctagat

SEQ ID NO: 515199 - DNA, 51 bp, Artificial
  Synthetic oligonucleotide
cagattagcactaaagggttgaagctcagctattatttcatgtgggcgctc

SEQ ID NO: 515200 - DNA, 55 bp, Artificial
  Synthetic oligonucleotide
tgctgaagaacacatcaaaatgatgaggagggtttggtttctactgggttgatga

SEQ ID NO: 515201 - DNA, 55 bp, Artificial
  Synthetic oligonucleotide
tagttcaggcgtcgataaaatgagatgccaattcagaggatagttgatgatggct

SEQ ID NO: 515202 - DNA, 55 bp, Artificial
  Synthetic oligonucleotide
gtaggttgatggtctaaactctcctggcttgtaatcatttgcagtatcgtacatc

SEQ ID NO: 515203 - DNA, 55 bp, Artificial
  Synthetic oligonucleotide
gggcctcctttcttgcgagttcatatccttctgtaattactctagggtgaattcc

SEQ ID NO: 515204 - DNA, 55 bp, Artificial
  Synthetic oligonucleotide
ggctggccagatgcttaggctagaagactgggtaatcatcggctaaacagaggtc

SEQ ID NO: 515205 - DNA, 55 bp, Artificial
  Synthetic oligonucleotide
ggattttaggcattccaattcctcaggggagatgtgcatatcttctgtgatctaa

SEQ ID NO: 515206 - DNA, 55 bp, Artificial
  Synthetic oligonucleotide
ggaggcgcagaggcttaatttaaaatccatggactagacaaagcttgggcacatg

SEQ ID NO: 515207 - DNA, 55 bp, Artificial
  Synthetic oligonucleotide
gccaacaaataacatatgttcacaaaagtgggctaagccaggatattcacttggt

SEQ ID NO: 515208 - DNA, 55 bp, Artificial
  Synthetic oligonucleotide
gcaataccctatattacaactcctgtggcatcaccaacttaataaggatagcctc

SEQ ID NO: 515209 - DNA, 55 bp, Artificial
  Synthetic oligonucleotide
gactcgcagaattcctattctcacaaatactgccgattctatagggatcatctgg

SEQ ID NO: 515210 - DNA, 55 bp, Artificial
  Synthetic oligonucleotide
gacacctaatacttatatggcccctcttgtcaaggtcttgagtggttcgactatt

SEQ ID NO: 515211 - DNA, 55 bp, Artificial
  Synthetic oligonucleotide
gaatggtcagtgcagatatatcgggtctggtagtcgtatggagaggaataacgcc

SEQ ID NO: 515212 - DNA, 55 bp, Artificial
  Synthetic oligonucleotide
gaaggacttaccaccttatggttttcctctaaatggcctaccaccttgctgtccc

SEQ ID NO: 515213 - DNA, 55 bp, Artificial
  Synthetic oligonucleotide
cgccaagaggtgcaggttggacttggggatgcgatattacagagaaattcctaca

SEQ ID NO: 515214 - DNA, 55 bp, Artificial
  Synthetic oligonucleotide
catactccagatgcaccattaatatcgactccataccatctgccttcctctccac

SEQ ID NO: 515215 - DNA, 55 bp, Artificial
  Synthetic oligonucleotide
caagtttgggctccttcagctattaccccaagaagtaaagtaagaagatcacaat

SEQ ID NO: 515216 - DNA, 55 bp, Artificial
  Synthetic oligonucleotide
aaacaacctgtttatgtaaccaagagcctattcaaaccagtcgaagctactaatc

SEQ ID NO: 515217 - DNA, 54 bp, Artificial
  Synthetic oligonucleotide
cattatgccctctaatgtgcaagaaatcaattaagcggtgcaataggtgatgta

SEQ ID NO: 515218 - DNA, 54 bp, Artificial
  Synthetic oligonucleotide
atagcacgcactgctcatgatgattttgagactgagacaaaatgcaaagctaag

SEQ ID NO: 515219 - DNA, 52 bp, Artificial
  Synthetic oligonucleotide
gtgttactggctatggattactgccatataagacacgtttagcttacgcccc

SEQ ID NO: 515220 - DNA, 51 bp, Artificial
  Synthetic oligonucleotide
gctccgaatagatagccagctcctctggaattcacagcccagtattctact

SEQ ID NO: 515221 - DNA, 55 bp, Artificial
  Synthetic oligonucleotide
tcactgattacgacactgaaagagttcccctgtctgagagcagtatcactcgatg

SEQ ID NO: 515222 - DNA, 55 bp, Artificial
  Synthetic oligonucleotide
gttcgaatttgtatgcttcatggtcccattgctctcgcgtagggagccctgagcc

SEQ ID NO: 515223 - DNA, 55 bp, Artificial
  Synthetic oligonucleotide
ggtggcatcctacactagagtagtagtgaccaacaatcatttcacataaggcctc

SEQ ID NO: 515224 - DNA, 55 bp, Artificial
  Synthetic oligonucleotide
ggtgatagaggaatcacatgatggtactatcacattgtagccaccctcgacacga

SEQ ID NO: 515225 - DNA, 55 bp, Artificial
  Synthetic oligonucleotide
gagaagtacggaccatgaacatcaagtgacagtagccatcttggctcaagcttgg

SEQ ID NO: 515226 - DNA, 55 bp, Artificial
  Synthetic oligonucleotide
ctacgacaatgttgacgatcccctaggagagtttattcatacccgtataaaggag

SEQ ID NO: 515227 - DNA, 55 bp, Artificial
  Synthetic oligonucleotide
ctaccctagagggccatggctactcgactcctctcagcacggtcttcaacatcgt

SEQ ID NO: 515228 - DNA, 55 bp, Artificial
  Synthetic oligonucleotide
cggacagtctggtcgccgcttcaacgctactgtcctcgtagagaggcctccgtct

SEQ ID NO: 515229 - DNA, 55 bp, Artificial
  Synthetic oligonucleotide
cgagtgggctacgccttccgcatggctgttcgagacaaggtcggtcactgtggga

SEQ ID NO: 515230 - DNA, 55 bp, Artificial
  Synthetic oligonucleotide
ccttgtggacactgcatttacacggcaatgtgatagattgaacacggcaatgtga

SEQ ID NO: 515231 - DNA, 55 bp, Artificial
  Synthetic oligonucleotide
cctgagaggcacacagctaggcgtactgcctacctactagatgcccattgattac

SEQ ID NO: 515232 - DNA, 55 bp, Artificial
  Synthetic oligonucleotide
caggcttatggtgagggagtctactcatagttcatagtctagcctccacgacgtg

SEQ ID NO: 515233 - DNA, 55 bp, Artificial
  Synthetic oligonucleotide
agtccagaggctacaggatgaggtggagtatatgcagacgaagctgttggggaag

SEQ ID NO: 515234 - DNA, 54 bp, Artificial
  Synthetic oligonucleotide
atgatcagctcatgtctcaacagcctcgtatggctgctctctcatgaccagtaa

SEQ ID NO: 515235 - DNA, 53 bp, Artificial
  Synthetic oligonucleotide
cgagaggtagtgaactattcctcgcaatgattaagtttgcgggagccaacgcg

SEQ ID NO: 515236 - DNA, 53 bp, Artificial
  Synthetic oligonucleotide
aaacaagtcgaaactctagcctacggaacaatactgaatagttggtgctgaca

SEQ ID NO: 515237 - DNA, 50 bp, Artificial
  Synthetic oligonucleotide
ctgcggctatcgagggagaatctgataggagaagtgcagagtacatttgc

SEQ ID NO: 515238 - DNA, 55 bp, Artificial
  Synthetic oligonucleotide
tgctaatgcgatcccggctctccactagaacccagaagaccgaataacggagggg

SEQ ID NO: 515239 - DNA, 55 bp, Artificial
  Synthetic oligonucleotide
ggacgtagtacatgtatcaccatccgattgaacgtagatggagcgctcttggggc

SEQ ID NO: 515240 - DNA, 55 bp, Artificial
  Synthetic oligonucleotide
gcgactagcaagaaaggcccctaccgcgaaatcataggtaaaggacggagtccgc

SEQ ID NO: 515241 - DNA, 55 bp, Artificial
  Synthetic oligonucleotide
gacttgtatcgctcaatcggagtcttctcatcgagcacacttttgtccatcgatg

SEQ ID NO: 515242 - DNA, 55 bp, Artificial
  Synthetic oligonucleotide
ctgcagaccgcgataaatcaccgcacctatcacatggaatgacgaggtagctcac

SEQ ID NO: 515243 - DNA, 55 bp, Artificial
  Synthetic oligonucleotide
cgtgtggtaaatcttcacaattctgttatcgtcacaagagccctgcttgcatgag

SEQ ID NO: 515244 - DNA, 55 bp, Artificial
  Synthetic oligonucleotide
cgctctctcaacgctgttgcttgttatgggtgtgagatgaaggttgtcgtcctgc

SEQ ID NO: 515245 - DNA, 55 bp, Artificial
  Synthetic oligonucleotide
cgatctggcacaccgatctgaggacctcgaaatgatgtataggtaagaacaagcg

SEQ ID NO: 515246 - DNA, 55 bp, Artificial
  Synthetic oligonucleotide
cgaggcggaagtcacggcttctcaacagatacatgagacgaagaaacaagaggag

SEQ ID NO: 515247 - DNA, 55 bp, Artificial
  Synthetic oligonucleotide
ccgtgtagtcggcaatggtggggaagtctgtgtgggcaacaaagtctttgaccag

SEQ ID NO: 515248 - DNA, 55 bp, Artificial
  Synthetic oligonucleotide
ccgccagggctacattgaatactgtgaccccggtggcgaatcttacgttgaaccg

SEQ ID NO: 515249 - DNA, 55 bp, Artificial
  Synthetic oligonucleotide
cccgtggggccggtgttgtagcggtcaacgacgagatctgtgctatcatcgaggc

SEQ ID NO: 515250 - DNA, 55 bp, Artificial
  Synthetic oligonucleotide
ccaaaacacgacctcgatcccgctcgcggtcacctcaagttgtgaggacagagag

SEQ ID NO: 515251 - DNA, 55 bp, Artificial
  Synthetic oligonucleotide
cagttgatagaaatacgaagcggagatgaccacattcttgacgtagacatcatcg

SEQ ID NO: 515252 - DNA, 55 bp, Artificial
  Synthetic oligonucleotide
caatgaggaaggccctggaggtagtaggggtgctgccctccgacgcaacgaagat

SEQ ID NO: 515253 - DNA, 55 bp, Artificial
  Synthetic oligonucleotide
caaatacgaatcagccttctgcgtcgtttcgtgaatctgctccctcgcgcggtca

SEQ ID NO: 515254 - DNA, 55 bp, Artificial
  Synthetic oligonucleotide
atctacaatcctgcacaattactcttacaaacactcggcatgtggctacttgcgc

SEQ ID NO: 515255 - DNA, 55 bp, Artificial
  Synthetic oligonucleotide
atccggcgacgaaagttcaatctcacgaagaggattaatttgagatgggaccaag

SEQ ID NO: 515256 - DNA, 55 bp, Artificial
  Synthetic oligonucleotide
acgacagaccgggatatcgttgtcggcaattagcaacagaggggaggaatagcac

SEQ ID NO: 515257 - DNA, 55 bp, Artificial
  Synthetic oligonucleotide
aatccgaaataacctattcgggaaaaccatgatggcggttaacgacgtagcaaag

SEQ ID NO: 515258 - DNA, 54 bp, Artificial
  Synthetic oligonucleotide
gtacgactgttgcctccccaactatacagctcgcctttatccgtaagcgcaaag

SEQ ID NO: 515259 - DNA, 52 bp, Artificial
  Synthetic oligonucleotide
tgtctcgaggtgcgcccattgacgttagttgctgctgtgtagtgcagctaaa

SEQ ID NO: 515260 - DNA, 51 bp, Artificial
  Synthetic oligonucleotide
atgaagagcaacgacaagagacgtcgagttaatctgccacgagggtctgtg

SEQ ID NO: 515261 - DNA, 51 bp, Artificial
  Synthetic oligonucleotide
ggtcgtgcaagctgcgttctaccaaggacgtatccatagaagttcgtatag

SEQ ID NO: 515262 - DNA, 50 bp, Artificial
  Synthetic oligonucleotide
attaaagcgccccaaaactcttttcgtgtccaccacgtagtactcacgaa

SEQ ID NO: 515263 - DNA, 60 bp, Artificial
  Synthetic oligonucleotide
ctaaggtcttaacatgactaactaaggtcttaacttcagtaactaaggtcttaacatgac

SEQ ID NO: 515264 - DNA, 60 bp, Artificial
  Synthetic oligonucleotide
ggtcctaacattacatacttaggtcttaaattgactaactaaggtcatacatggactaac

SEQ ID NO: 515265 - DNA, 59 bp, Artificial
  Synthetic oligonucleotide
cggataaacatttatcggcagctgtatataatagctcaacatatctatgggtatttgtc

SEQ ID NO: 515266 - DNA, 58 bp, Artificial
  Synthetic oligonucleotide
ggtcctactttcactaactcaggtcatatgtttattaacttaggtcttactttcactg

SEQ ID NO: 515267 - DNA, 56 bp, Artificial
  Synthetic oligonucleotide
cactaacttaggtcttactttcactaagtgaggtccttcttttactaacataggtc

SEQ ID NO: 515268 - DNA, 56 bp, Artificial
  Synthetic oligonucleotide
gtgtagttaggacctatattagttaccttaagacatacgttactgtattgaggacc

SEQ ID NO: 515269 - DNA, 55 bp, Artificial
  Synthetic oligonucleotide
ggggtcgtcacgtgcaggtttggcgaaacggttaattgttgtatgtttcacatga

SEQ ID NO: 515270 - DNA, 55 bp, Artificial
  Synthetic oligonucleotide
gggatgcaagatattcgaacgataaatcgggcggggagattaggattacgatttt

SEQ ID NO: 515271 - DNA, 55 bp, Artificial
  Synthetic oligonucleotide
gggacaggcggatctctattttccctcggtacataagaagttgcgccgtgaaaac

SEQ ID NO: 515272 - DNA, 55 bp, Artificial
  Synthetic oligonucleotide
ggctctgggtacgtacctacctccagttgcttcattatagaaaacgtcaactctt

SEQ ID NO: 515273 - DNA, 55 bp, Artificial
  Synthetic oligonucleotide
ggccccgcaaaataatggacctccagcaaattgaccatcctcgcaattattatat

SEQ ID NO: 515274 - DNA, 55 bp, Artificial
  Synthetic oligonucleotide
gggtttgatacactatcgtatattgaagagcaagccacattaattgggaagccca

SEQ ID NO: 515275 - DNA, 55 bp, Artificial
  Synthetic oligonucleotide
ggcaccgggtttgggctcagggtctagatacaggttactgggtcccggatttagg

SEQ ID NO: 515276 - DNA, 55 bp, Artificial
  Synthetic oligonucleotide
ggagttgttaggatgaaagttgacgtttagtaattcacgttggacgtgttcctta

SEQ ID NO: 515277 - DNA, 55 bp, Artificial
  Synthetic oligonucleotide
ggagtaccctcagttatagctttgtcaatagcaatcttaagtgccccaggtttcc

SEQ ID NO: 515278 - DNA, 55 bp, Artificial
  Synthetic oligonucleotide
ggacaaaccaaaatatcaccccgtatgtgcaaaattcaggtcaaaatgttggacc

SEQ ID NO: 515279 - DNA, 55 bp, Artificial
  Synthetic oligonucleotide
ggaagtgaacatacaatcagggtcacaactggcattgacatatatccaagtcgtc

SEQ ID NO: 515280 - DNA, 55 bp, Artificial
  Synthetic oligonucleotide
gctgccatacatacttctgccaacaacgtgtcactagccgtcgacgttgtgtcta

SEQ ID NO: 515281 - DNA, 55 bp, Artificial
  Synthetic oligonucleotide
cttttccttgtgagaacgttggttcgactccgcttgccgacaatttcataagaaa

SEQ ID NO: 515282 - DNA, 55 bp, Artificial
  Synthetic oligonucleotide
gaaagtaagacctatatgagtgaaggtaagacctaagttagtgtagttaggacct

SEQ ID NO: 515283 - DNA, 55 bp, Artificial
  Synthetic oligonucleotide
gacaatggcaagaagttgaatcgagtggtacatctatacctattagaggtttagc

SEQ ID NO: 515284 - DNA, 55 bp, Artificial
  Synthetic oligonucleotide
gagactatacccctaagcaaactcttggttgataactgtcgctacttgatcaagg

SEQ ID NO: 515285 - DNA, 55 bp, Artificial
  Synthetic oligonucleotide
gagcgcttacatatatttgctcacatgttgcacacccgcttaaggaagttttgcg

SEQ ID NO: 515286 - DNA, 55 bp, Artificial
  Synthetic oligonucleotide
gaggcgtgatctctggacacatggccgtattacccgtaaatgtcgggagtaacgg

SEQ ID NO: 515287 - DNA, 55 bp, Artificial
  Synthetic oligonucleotide
gagttattgttttaggcgtgtgttgcgatttgcccgcgaccaatggcatggagac

SEQ ID NO: 515288 - DNA, 55 bp, Artificial
  Synthetic oligonucleotide
gatgggagcatatttatcagcaccgaaaacgaataaagagtccatggatggaggg

SEQ ID NO: 515289 - DNA, 55 bp, Artificial
  Synthetic oligonucleotide
gattccacgtgtgggtgttgaaccaaggaattaattagatccgaaccttccgctc

SEQ ID NO: 515290 - DNA, 55 bp, Artificial
  Synthetic oligonucleotide
gcacgtgtgtgtacaacatttaaactgtactgttggcgccttaaaattgttgggc

SEQ ID NO: 515291 - DNA, 55 bp, Artificial
  Synthetic oligonucleotide
gcactctacgactcgtacagctaccagatactgtgtacttttctccagactacac

SEQ ID NO: 515292 - DNA, 55 bp, Artificial
  Synthetic oligonucleotide
gcatgcatattagaggtagtaaatgtgggtgcacacatagtactaatatttgtcc

SEQ ID NO: 515293 - DNA, 55 bp, Artificial
  Synthetic oligonucleotide
gcccaccccattccgctgttcagacgttacgattttcctttacccttattgagga

SEQ ID NO: 515294 - DNA, 55 bp, Artificial
  Synthetic oligonucleotide
gcccgtcccaaccgacctcgcgttcatttagtaggtcccctcaatctccctcccg

SEQ ID NO: 515295 - DNA, 55 bp, Artificial
  Synthetic oligonucleotide
gcgactagccgttattgcaaattcttgggacaacatagtctcgatcaaagaaccc

SEQ ID NO: 515296 - DNA, 55 bp, Artificial
  Synthetic oligonucleotide
gcgtaaaattacctttccggctgtttccatctcaactctacaggttaacgcctgg

SEQ ID NO: 515297 - DNA, 55 bp, Artificial
  Synthetic oligonucleotide
gctaacttgacctagtttaggacttcgcggtaagatagatggaggatcctagact

SEQ ID NO: 515298 - DNA, 55 bp, Artificial
  Synthetic oligonucleotide
tttgtcgacgaagttagaaaggcgccctggatgttattcttggagagcggtccag

SEQ ID NO: 515299 - DNA, 55 bp, Artificial; identical to SEQ ID NO: 289945
  Synthetic oligonucleotide

SEQ ID NO: 515300 - DNA, 55 bp, Artificial
  Synthetic oligonucleotide
ttcgaacagtgcggcgttgtaaccacgggaggtttgaggaggttcccttttggca

SEQ ID NO: 515301 - DNA, 55 bp, Artificial
  Synthetic oligonucleotide
ttcccacgaggattaggaggaagccggaggtccaggcgtacacgcacgagggtct

SEQ ID NO: 515302 - DNA, 55 bp, Artificial
  Synthetic oligonucleotide
ttacgtccatacagttataagcaagtggaatgttagaagcaaacactagcggtgg

SEQ ID NO: 515303 - DNA, 55 bp, Artificial
  Synthetic oligonucleotide
tgtaccaaatagtgtatgcctccgagacgtcacgaactatgtatatcgaacatca

SEQ ID NO: 515304 - DNA, 55 bp, Artificial
  Synthetic oligonucleotide
tgtaacttaaataaagtggagacaaagatatcgaggcacataacagctcgagggg

SEQ ID NO: 515305 - DNA, 55 bp, Artificial
  Synthetic oligonucleotide
tctaccgtaggtttccctggaacagagggcaataatgagctatcaccagatgtag

SEQ ID NO: 515306 - DNA, 55 bp, Artificial
  Synthetic oligonucleotide
tcgacttagaggttttaccaggcatgtcaagcttgggcgattacagctcccaacg

SEQ ID NO: 515307 - DNA, 55 bp, Artificial
  Synthetic oligonucleotide
tcgaacacctcggaggggagcttgaatgagtacaccgttgctcgttctgcgctcc

SEQ ID NO: 515308 - DNA, 55 bp, Artificial
  Synthetic oligonucleotide
tccgttttgaccggtcattttctttgcctggaggttacgtccatacagttataag

SEQ ID NO: 515309 - DNA, 55 bp, Artificial
  Synthetic oligonucleotide
tatgccgaatgaaatttacttgccaaaccagcgaagtaaaatcgagtgcatctgc

SEQ ID NO: 515310 - DNA, 55 bp, Artificial
  Synthetic oligonucleotide
tagttaattgattccgttttgaccggtcattttctttgcctggaggttacgtcca

SEQ ID NO: 515311 - DNA, 55 bp, Artificial
  Synthetic oligonucleotide
tagtcaagccaaagagtgttcattattggtgcacgccatagatactaatttcccc

SEQ ID NO: 515312 - DNA, 55 bp, Artificial
  Synthetic oligonucleotide
tagtactatgtgtgcacccacatttactacctctaatgtgcatgcaattttgggt

SEQ ID NO: 515313 - DNA, 55 bp, Artificial
  Synthetic oligonucleotide
taggaatatgacggttagcgtcagcgaaagggaagcgcagactccctgaagaagg

SEQ ID NO: 515314 - DNA, 55 bp, Artificial
  Synthetic oligonucleotide
tactcctccaatgggcgcttgaataccagaattgagtacaagctctaataccttc

SEQ ID NO: 515315 - DNA, 55 bp, Artificial
  Synthetic oligonucleotide
tactacgactattaatgctgatggcaccactgctaacctctgtgagaacggtgac

SEQ ID NO: 515316 - DNA, 55 bp, Artificial
  Synthetic oligonucleotide
gtttcctctggaacctgaatagttagttttgtatatgggtcgagagggtcgtaag

SEQ ID NO: 515317 - DNA, 55 bp, Artificial
  Synthetic oligonucleotide
gttcaactgtttgtctgcatgaaggtgaccatgtgtccggacccttatcacaaac

SEQ ID NO: 515318 - DNA, 55 bp, Artificial
  Synthetic oligonucleotide
gttatggagagatagtgataaaacaggaagtatgtccacgtggcgcttaggaaaa

SEQ ID NO: 515319 - DNA, 55 bp, Artificial
  Synthetic oligonucleotide
gtgcatttgctacacacttctccagcgacagtacttttgaaggcagtaagggcag

SEQ ID NO: 515320 - DNA, 55 bp, Artificial
  Synthetic oligonucleotide
gtgcagtcggcaggacagtacatagtatctggtagctgtacgagtcgtagagtct

SEQ ID NO: 515321 - DNA, 55 bp, Artificial
  Synthetic oligonucleotide
gtcagggttactatccacgtaggtgtcatccacttggttggggttactatccaca

SEQ ID NO: 515322 - DNA, 55 bp, Artificial
  Synthetic oligonucleotide
gtcaatgccggtgtaagggcgaccaggttcccacatatttcgattatgtgccgca

SEQ ID NO: 515323 - DNA, 55 bp, Artificial
  Synthetic oligonucleotide
gtatgtaacttttccttgtgagaacgttggttcgactccgcttgccgacaatttc

SEQ ID NO: 515324 - DNA, 55 bp, Artificial
  Synthetic oligonucleotide
gtagcgtagagtgaaggagttgcgaatgtcgaagagaaggtggcgcggttttacg

SEQ ID NO: 515325 - DNA, 55 bp, Artificial
  Synthetic oligonucleotide
gtagaagtgcctgttttgaaatttagggatacatttgtgcctgtaccggtcagga

SEQ ID NO: 515326 - DNA, 55 bp, Artificial
  Synthetic oligonucleotide
gtagaagattgtgggtctcctatcggtactatggatcacggtaaaatctatcttg

SEQ ID NO: 515327 - DNA, 55 bp, Artificial
  Synthetic oligonucleotide
ggtttaaagctgcagtagcttgcatggttgttggatctataggtattctcgattc

SEQ ID NO: 515328 - DNA, 55 bp, Artificial
  Synthetic oligonucleotide
ggtctaactttcactaactaagggcatacttcgactaacggacctcctaaggtaa

SEQ ID NO: 515329 - DNA, 55 bp, Artificial
  Synthetic oligonucleotide
ggtcatccggcgaggaaggtcgcttaacaaaccctacttaaatggtagtttgggg

SEQ ID NO: 515330 - DNA, 55 bp, Artificial
  Synthetic oligonucleotide
ccctaacggagtctcagagtgtttgaacacgtaaatcgtatgcatccgctgacat

SEQ ID NO: 515331 - DNA, 55 bp, Artificial
  Synthetic oligonucleotide
ccccaggaggagttaaccccgtcgccgaacacaccgcatcacgtcgacgtaaaat

SEQ ID NO: 515332 - DNA, 55 bp, Artificial
  Synthetic oligonucleotide
ccccaccaccctgtgaaatcgtggataaaacactgggcgacaaaacctcaaagtc

SEQ ID NO: 515333 - DNA, 55 bp, Artificial
  Synthetic oligonucleotide
ccactcgcccactcgtgtagtttcccaacatataatcgtcgtctcctgggtggga

SEQ ID NO: 515334 - DNA, 55 bp, Artificial
  Synthetic oligonucleotide
ccaaatggaaaggtgtcggatattggcatgttgttaattcccagaaggaccacta

SEQ ID NO: 515335 - DNA, 55 bp, Artificial
  Synthetic oligonucleotide
catgtgggcattgtgcattgatgggaggaccactattcttagttactgtatcggc

SEQ ID NO: 515336 - DNA, 55 bp, Artificial
  Synthetic oligonucleotide
catctcttgtcccactccacatcattactaccgctaccgcctgtacgagtctcta

SEQ ID NO: 515337 - DNA, 55 bp, Artificial
  Synthetic oligonucleotide
cagggccacatttaccaaggaaggtgtgtatctcgttcacctgtgtgaatccctc

SEQ ID NO: 515338 - DNA, 55 bp, Artificial
  Synthetic oligonucleotide
cacgtagcctccattttgtactactatttgtcatttcatgcaccatcatgcacaa

SEQ ID NO: 515339 - DNA, 55 bp, Artificial
  Synthetic oligonucleotide
cacgggagcggaatttgattacaaccttgacgaatcgggtgtattatgatgattg

SEQ ID NO: 515340 - DNA, 55 bp, Artificial
  Synthetic oligonucleotide
cacccatgcgaacatgttcacagttacggaaaactgccagttactaataacgaac

SEQ ID NO: 515341 - DNA, 55 bp, Artificial
  Synthetic oligonucleotide
cacccaaactctcctggagacggggtaggaaatcacccaaattcattctatgtcg

SEQ ID NO: 515342 - DNA, 55 bp, Artificial
  Synthetic oligonucleotide
caacgaagctacattgggaatttccgcctctcaagaaaatttagtcaaccagaca

SEQ ID NO: 515343 - DNA, 55 bp, Artificial
  Synthetic oligonucleotide
atgtacacatatgttgacgtcggggtggcatgtagaggtcagtgtgtgacatgtt

SEQ ID NO: 515344 - DNA, 55 bp, Artificial
  Synthetic oligonucleotide
atcggagtgtattcctgtgagattatatctaagtggtttcgacctaacgcccacg

SEQ ID NO: 515345 - DNA, 55 bp, Artificial
  Synthetic oligonucleotide
atccgtcaagagcccatgaggccatgaagttttgtgtctgattatgcataatacc

SEQ ID NO: 515346 - DNA, 55 bp, Artificial
  Synthetic oligonucleotide
atatgaatgcatatggaatcttcgtgtttccatgctgatacctttaacgcatgct

SEQ ID NO: 515347 - DNA, 55 bp, Artificial
  Synthetic oligonucleotide
atacacctgtcttttctccgacttgggatgttagagagattcctcgtgttattcc

SEQ ID NO: 515348 - DNA, 55 bp, Artificial
  Synthetic oligonucleotide
ataagtcgatacctcacgcgctcacacacataaacgtctaacctgaacgtgcagt

SEQ ID NO: 515349 - DNA, 55 bp, Artificial
  Synthetic oligonucleotide
agtgatgagaggcttcctgaacaaggtgtatcaggtgcatcactatcggggaggg

SEQ ID NO: 515350 - DNA, 55 bp, Artificial
  Synthetic oligonucleotide
agtaccaaagacgtgaggagtccgtcagatttattcccatcaacggattttccga

SEQ ID NO: 515351 - DNA, 55 bp, Artificial
  Synthetic oligonucleotide
acttttctccagactacactctacgactcatacagctgccagatactatgtactc

SEQ ID NO: 515352 - DNA, 55 bp, Artificial
  Synthetic oligonucleotide
actgaatgatgtattaccatccgctataccagtgggaattgctctggccttgacg

SEQ ID NO: 515353 - DNA, 55 bp, Artificial
  Synthetic oligonucleotide
accatatgtgattgcacgaagttgttacaggggtatcgcataaatctaagcacac

SEQ ID NO: 515354 - DNA, 55 bp, Artificial
  Synthetic oligonucleotide
aatgagaagtacgagcagggcgctctaggaatttggatgtaacaaagatcaatat

SEQ ID NO: 515355 - DNA, 55 bp, Artificial
  Synthetic oligonucleotide
aagaaggcaatcatttacgtacattttccagcaagacgtacacgtaattttcccc

SEQ ID NO: 515356 - DNA, 55 bp, Artificial
  Synthetic oligonucleotide
aactgaactttctttaacccagtgtgagttttcgggataggacatcggggaggtg

SEQ ID NO: 515357 - DNA, 55 bp, Artificial
  Synthetic oligonucleotide
aacccaggctgaccttggatttgtaatccccatgaatcagtctctcctatgctga

SEQ ID NO: 515358 - DNA, 55 bp, Artificial
  Synthetic oligonucleotide
aacacattcctagtggcgtttgcgcggggtctatctggactactcagacggggtt

SEQ ID NO: 515359 - DNA, 55 bp, Artificial
  Synthetic oligonucleotide
aaacttcctacacacgctgcagtggcatcagataaaagtgctccagccatttcat

SEQ ID NO: 515360 - DNA, 55 bp, Artificial
  Synthetic oligonucleotide
ctgtgcattctcccaccgagcgtaacccgttgggttaccgaacccttagtaaagc

SEQ ID NO: 515361 - DNA, 55 bp, Artificial
  Synthetic oligonucleotide
ctggtagctgtacgagtcgtagagtgcagtctggagaagagtacatagtatctgg

SEQ ID NO: 515362 - DNA, 55 bp, Artificial
  Synthetic oligonucleotide
ctgatatagcatgtaccaaagtggatttaccatgcgccacatgccctattgtacc

SEQ ID NO: 515363 - DNA, 55 bp, Artificial
  Synthetic oligonucleotide
ctgataggagcctggtattggctgctccctgagaggttatacaagtacctgacca

SEQ ID NO: 515364 - DNA, 55 bp, Artificial
  Synthetic oligonucleotide
ctctcgagagacgcattgaaataactccagtctgtttccagtttcataaaccagt

SEQ ID NO: 515365 - DNA, 55 bp, Artificial
  Synthetic oligonucleotide
ctctcagatcgtccaatacattgtgcgggtgtcggtaggcttaatcacgtatcag

SEQ ID NO: 515366 - DNA, 55 bp, Artificial
  Synthetic oligonucleotide
ctcgattggagtaggtcttcaggggacttcttcttcaaccaattccgtctgggac

SEQ ID NO: 515367 - DNA, 55 bp, Artificial
  Synthetic oligonucleotide
ctatagaagaagatcccaatgttatgtttgttaagtgtgttgtgcaacatggctc

SEQ ID NO: 515368 - DNA, 55 bp, Artificial
  Synthetic oligonucleotide
ctaggagaaggagcctatactcatcactaggtgagctcaaggagccagttcttag

SEQ ID NO: 515369 - DNA, 55 bp, Artificial
  Synthetic oligonucleotide
ctactagtagtcgatgtatacttggcagcctcagctatttcagcagttgcggcat

SEQ ID NO: 515370 - DNA, 55 bp, Artificial
  Synthetic oligonucleotide
ctaaggtaaacacatatatatgctcaccaccctctcaggtacatgcatacgaggg

SEQ ID NO: 515371 - DNA, 55 bp, Artificial
  Synthetic oligonucleotide
cgttctcccgaaaagggtttggagggagtgaaatttgccacgagtcggggttccc

SEQ ID NO: 515372 - DNA, 55 bp, Artificial
  Synthetic oligonucleotide
cgtgccagagttatagcaatgatatcgtgtaaccgtgccagagttataggcaatg

SEQ ID NO: 515373 - DNA, 55 bp, Artificial
  Synthetic oligonucleotide
cgtctgtgttggaggcgggaacggggtgggaataggagccggtgtagcagatgag

SEQ ID NO: 515374 - DNA, 55 bp, Artificial
  Synthetic oligonucleotide
cgtcatcctcttgcatatatacttaccgattctgcaacttccttgcttggggttg

SEQ ID NO: 515375 - DNA, 55 bp, Artificial
  Synthetic oligonucleotide
cgtacttggcccaatccatccattgtatcggtggaatcgttatatgacgtgtcac

SEQ ID NO: 515376 - DNA, 55 bp, Artificial
  Synthetic oligonucleotide
ccgaccccgataagttaatttgaaggaccgactgagatctccggacccgtcacgg

SEQ ID NO: 515377 - DNA, 55 bp, Artificial
  Synthetic oligonucleotide
ccgttttgaattccacttcagtgatagggccgagcgtcgccaaccaaatggcctc

SEQ ID NO: 515378 - DNA, 55 bp, Artificial
  Synthetic oligonucleotide
cctcattatcaacgtggtcagacatttccaggatcatttgcaaccattcaatcgg

SEQ ID NO: 515379 - DNA, 55 bp, Artificial
  Synthetic oligonucleotide
cctgctgaaattcctggttcatcgatacaagaacacctactcgatcatgtggaag

SEQ ID NO: 515380 - DNA, 55 bp, Artificial
  Synthetic oligonucleotide
ccttccgctttgctaaccattgggcccacgttggagtgttcctccttcgttttaa

SEQ ID NO: 515381 - DNA, 55 bp, Artificial
  Synthetic oligonucleotide
cctttatacctccaagccaccctactaaacatatcaccaaaccccattccggcaa

SEQ ID NO: 515382 - DNA, 55 bp, Artificial
  Synthetic oligonucleotide
cgaatgtactagctttaaatgctctatgtgaccacaatcgatgggcaccgaatgt

SEQ ID NO: 515383 - DNA, 55 bp, Artificial
  Synthetic oligonucleotide
cgctaattcacgaactatcattggaagggccttatacgggatttcttccttcgga

SEQ ID NO: 515384 - DNA, 55 bp, Artificial
  Synthetic oligonucleotide
cggaaggggttatgttattacactgcaatccctactcctacctagctcccgtaac

SEQ ID NO: 515385 - DNA, 55 bp, Artificial
  Synthetic oligonucleotide
cggtgcaaagtttgcgatgagcgattagtatatctcgaatctcgtcaagcatggt

SEQ ID NO: 515386 - DNA, 55 bp, Artificial
  Synthetic oligonucleotide
cgtacaagccgttagcaagacatgatagggagttgacaagttaaagaagttctgg

SEQ ID NO: 515387 - DNA, 54 bp, Artificial
  Synthetic oligonucleotide
ccccaaagatgacaggctcagagaaagcgctactgcaattcacttgaggtcccc

SEQ ID NO: 515388 - DNA, 53 bp, Artificial
  Synthetic oligonucleotide
gattgcaaggcaacacaggataagattgtttcagttgatcggtccccacttcc

SEQ ID NO: 515389 - DNA, 53 bp, Artificial
  Synthetic oligonucleotide
ggggcccacaccatccagtttctggtaatagttgagtcatgacgccgagctcc

SEQ ID NO: 515390 - DNA, 53 bp, Artificial
  Synthetic oligonucleotide
gcataaaatgtagagaacgatcgcgcacatccctatacgtggatagatctatc

SEQ ID NO: 515391 - DNA, 53 bp, Artificial
  Synthetic oligonucleotide
actaatggcggtggtaagggtaaaaggtatccgtgtacagagttaggtgaaaa

SEQ ID NO: 515392 - DNA, 53 bp, Artificial
  Synthetic oligonucleotide
cccgtttcttttgccacttctacccgcttgaccacaaactgggttggcatttc

SEQ ID NO: 515393 - DNA, 53 bp, Artificial
  Synthetic oligonucleotide
ttagttaatgtaagacccacgttagcccaagtatgacctcagtttgttgagtt

SEQ ID NO: 515394 - DNA, 53 bp, Artificial
  Synthetic oligonucleotide
gaaccccttgatctgttctagccgaccttgattccaaccttaagagttttgag

SEQ ID NO: 515395 - DNA, 53 bp, Artificial
  Synthetic oligonucleotide
cacagaacttcgcgtgagcgtcgaactgacgcagggagaagaatggattaaag

SEQ ID NO: 515396 - DNA, 52 bp, Artificial
  Synthetic oligonucleotide
cacaagacttccctcctgactgttcctatggcaacaccttgcagccaggatg

SEQ ID NO: 515397 - DNA, 51 bp, Artificial
  Synthetic oligonucleotide
cgtacctcgtgggacatattccacacgcaatagctagaatacaaagggagg

SEQ ID NO: 515398 - DNA, 51 bp, Artificial
  Synthetic oligonucleotide
ttgtagactctagccaggaaaggtgggacggtgggaacagaaacagtaggt

SEQ ID NO: 515399 - DNA, 51 bp, Artificial
  Synthetic oligonucleotide
ttcttcgtagtggagttccagtgatcacccctcacattgacacagtacaag

SEQ ID NO: 515400 - DNA, 51 bp, Artificial
  Synthetic oligonucleotide
catataaagccgttcctcctatcgcaccaaatccaggcatcacaccaccac

SEQ ID NO: 515401 - DNA, 50 bp, Artificial
  Synthetic oligonucleotide
tccccggaaatatgtgaaagccagcgaatggaaatgaatcaagtgtatac

SEQ ID NO: 515402 - DNA, 50 bp, Artificial
  Synthetic oligonucleotide
agtgtgtcctttgtgtgtgtcctcgcaggcaagactgcttatcatcacag

SEQ ID NO: 515403 - DNA, 55 bp, Artificial
  Synthetic oligonucleotide
gatggagactaacgtggatcatgggaatgttgtttgttgtcgtgcgtagcatgtt

SEQ ID NO: 515404 - DNA, 55 bp, Artificial
  Synthetic oligonucleotide
gatgtaaacgtcatgcatttgagtctcggacaacactcatgcgagcgtaacctgc

SEQ ID NO: 515405 - DNA, 55 bp, Artificial
  Synthetic oligonucleotide
gatgtgttgtctatccgtgggtttaatacgcgtcgagttgtgaatcagtgtgccc

SEQ ID NO: 515406 - DNA, 55 bp, Artificial
  Synthetic oligonucleotide
gcaaatcaaaaggaccacagagatctaatcacagtcaacttgtcgggccgtgcac

SEQ ID NO: 515407 - DNA, 55 bp, Artificial
  Synthetic oligonucleotide
gcctctcatcagtgcatctccgacgatcgtatgctgacaatcctgcagtcctaac

SEQ ID NO: 515408 - DNA, 55 bp, Artificial
  Synthetic oligonucleotide
gcgaatcgcaccctccgtgcacacgtgagtctggccgggatggatcaagaggtac

SEQ ID NO: 515409 - DNA, 55 bp, Artificial
  Synthetic oligonucleotide
gcgcccgtgagcccgcgatcgagccaaaagtacgcatgatggcggctccaaatgc

SEQ ID NO: 515410 - DNA, 55 bp, Artificial
  Synthetic oligonucleotide
gcgcgtcgagcacacgtctgtagacaacgcccacttaaatgatctcccctgcacc

SEQ ID NO: 515411 - DNA, 55 bp, Artificial
  Synthetic oligonucleotide
gcggctatatcgatttggcttccataaaacgatcgcctaatctgcacatccactc

SEQ ID NO: 515412 - DNA, 55 bp, Artificial
  Synthetic oligonucleotide
gctacgttatacatcgtcccacggtgaagcggtaaggctgacgtccagtggacaa

SEQ ID NO: 515413 - DNA, 55 bp, Artificial
  Synthetic oligonucleotide
gctactgacacgtcttcaacgtttagcgcttgacgcagactctggaacccattaa

SEQ ID NO: 515414 - DNA, 55 bp, Artificial
  Synthetic oligonucleotide
gctagaatttcgcaagtgaccaagccgtaccgtgaggcgtcgattcctgcccttg

SEQ ID NO: 515415 - DNA, 55 bp, Artificial
  Synthetic oligonucleotide
gctatggccctgaagatgtcggatccacaaaggaatccaagtaatacgacgccag

SEQ ID NO: 515416 - DNA, 55 bp, Artificial
  Synthetic oligonucleotide
ggagattacagcgatataagttagtcgtaatcgtcctccttggaccacttggcgc

SEQ ID NO: 515417 - DNA, 55 bp, Artificial
  Synthetic oligonucleotide
ggaggactcttctctcctacgagcactggatacaccaacaccaacctcacatgca

SEQ ID NO: 515418 - DNA, 55 bp, Artificial
  Synthetic oligonucleotide
ggatttgttcacctcaaacaccgcaataccatcaacgaacatgaagacgtcacaa

SEQ ID NO: 515419 - DNA, 55 bp, Artificial
  Synthetic oligonucleotide
gggtggctaggaagcccttggtgaacctcgaggcatgtatggacgcgttatcatg

SEQ ID NO: 515420 - DNA, 55 bp, Artificial
  Synthetic oligonucleotide
ggtatcatgttataggttcgcgccaaaatttcgcttaggatgagaaatacggcac

SEQ ID NO: 515421 - DNA, 55 bp, Artificial
  Synthetic oligonucleotide
ggtgacgtcaatgtaatccgtcatgtgaagattgaaatcctccaagttcagtcga

SEQ ID NO: 515422 - DNA, 55 bp, Artificial
  Synthetic oligonucleotide
ggtggtccggagatgggaaaccaggataggaatgagatggatcccgtaccgactg

SEQ ID NO: 515423 - DNA, 55 bp, Artificial
  Synthetic oligonucleotide
ggtgtcgtcattatcggtgctgtaacgcgagtcggtaccatactggtatcactct

SEQ ID NO: 515424 - DNA, 55 bp, Artificial
  Synthetic oligonucleotide
ggttgctaagacctcttcgagcattcaagtcgcacttggttcgcaggtgaggcgc

SEQ ID NO: 515425 - DNA, 55 bp, Artificial
  Synthetic oligonucleotide
gtgaagatcaacacactctgaatcaatttgtcgctcaaggaatggacacctaatg

SEQ ID NO: 515426 - DNA, 55 bp, Artificial
  Synthetic oligonucleotide
gtgccactcctggtcccgaataaggcgaagctcacgagtggtgatccttccgagg

SEQ ID NO: 515427 - DNA, 55 bp, Artificial
  Synthetic oligonucleotide
gtgtttgcgttcccggaccagttatacaaagatcttgccgctgactacgttgctg

SEQ ID NO: 515428 - DNA, 55 bp, Artificial
  Synthetic oligonucleotide
gttcttgtagtaaaagcacaaatctgggcgatagaggccagtagatgtagacgca

SEQ ID NO: 515429 - DNA, 55 bp, Artificial
  Synthetic oligonucleotide
tacatgtggtagagctttataaatggtgtgagggtagagctccaacgcacagtcg

SEQ ID NO: 515430 - DNA, 55 bp, Artificial
  Synthetic oligonucleotide
tccaatcagacagacatctcgaggccgccggaagagaaagtgcgcggggaagcgg

SEQ ID NO: 515431 - DNA, 55 bp, Artificial
  Synthetic oligonucleotide
ttgtgtcgactttaccacttggtgtcgttcctgtatgcaaaaggacagaatgtgg

SEQ ID NO: 515432 - DNA, 55 bp, Artificial
  Synthetic oligonucleotide
aaacatgccgtcgttggatccagaaccgagtaggctcccacgacaaggaacagcg

SEQ ID NO: 515433 - DNA, 55 bp, Artificial
  Synthetic oligonucleotide
aagaactttcgaggacaatctctggttgagttgtccccgccgcagccttggtagc

SEQ ID NO: 515434 - DNA, 55 bp, Artificial
  Synthetic oligonucleotide
acgcttagtaaaaccatcatttgctaccgatgccgtagcagaaatagtaccggcg

SEQ ID NO: 515435 - DNA, 55 bp, Artificial
  Synthetic oligonucleotide
agctcgaacctcatcatatggttcagcctctcgattctgatctcaagatctcgac

SEQ ID NO: 515436 - DNA, 55 bp, Artificial
  Synthetic oligonucleotide
aggataagttgcccactttgcgacgttccgagccatttaaacagcaacgtggagg

SEQ ID NO: 515437 - DNA, 55 bp, Artificial
  Synthetic oligonucleotide
atcccagggtaccggagtcctgtgaggttcgctggtacggacgtggatccttggc

SEQ ID NO: 515438 - DNA, 55 bp, Artificial
  Synthetic oligonucleotide
attcgctatcacaggtaccagactaaacaagccccatgtccaccttgcctcgagc

SEQ ID NO: 515439 - DNA, 55 bp, Artificial
  Synthetic oligonucleotide
caccacaccacgcttttgcggtctacagcacgacctcgagccattactgcaccgc

SEQ ID NO: 515440 - DNA, 55 bp, Artificial
  Synthetic oligonucleotide
ccaagccgattcctaacgtgtccaagatgtcgtttgtccatgtaccaccgcctgg

SEQ ID NO: 515441 - DNA, 55 bp, Artificial
  Synthetic oligonucleotide
ccacgcacacattgctgttcttgtagtaaaagcacaaatctgggcgatagaggcc

SEQ ID NO: 515442 - DNA, 55 bp, Artificial
  Synthetic oligonucleotide
ccatattaggttgtcgtagcaaaatcaaatatgatccattcttcggaagcggctg

SEQ ID NO: 515443 - DNA, 55 bp, Artificial
  Synthetic oligonucleotide
ccccgctataataccgtatgcctgaaagcgctttactgtcgttaagagctgaaaa

SEQ ID NO: 515444 - DNA, 55 bp, Artificial
  Synthetic oligonucleotide
ccgtaagggccatcctcctacgtaggaccataaaactgaggacgttttggcagaa

SEQ ID NO: 515445 - DNA, 55 bp, Artificial
  Synthetic oligonucleotide
ccttaccaagtaaaatgcgatgaaatccctttcagtcaaggttcgtttggtgccg

SEQ ID NO: 515446 - DNA, 55 bp, Artificial
  Synthetic oligonucleotide
cgacgccagtaggagattgcgtgaaattcgataggcgacacggacttcaatcgtt

SEQ ID NO: 515447 - DNA, 55 bp, Artificial
  Synthetic oligonucleotide
cgcgtcatcttgacgtactacggtatctgtgtcatcggtctagtgcaactcgtag

SEQ ID NO: 515448 - DNA, 55 bp, Artificial
  Synthetic oligonucleotide
cggcaatctctactaccttcaccgccggtactatttctgctacggcatcggtagc

SEQ ID NO: 515449 - DNA, 55 bp, Artificial
  Synthetic oligonucleotide
cgtctgggatcttccagtagagagccaagctgtagcctggtccatcgtaggagcc

SEQ ID NO: 515450 - DNA, 55 bp, Artificial
  Synthetic oligonucleotide
ctactaccttcaccgccggtactatttctgctacggcatcggtagcaaatgatgg

SEQ ID NO: 515451 - DNA, 55 bp, Artificial
  Synthetic oligonucleotide
ctcaatgctcataccgtcgaaccaaccatgcatatcgcgagaaagcgcaagcctg

SEQ ID NO: 515452 - DNA, 55 bp, Artificial
  Synthetic oligonucleotide
ctctcagctccgtgttggggtgcagcgtgcctgaggagccatcgcggacgatatt

SEQ ID NO: 515453 - DNA, 55 bp, Artificial
  Synthetic oligonucleotide
ctggcggtgatcataagccatctccaacgcaagttcaagctgctcgtagtttggt

SEQ ID NO: 515454 - DNA, 55 bp, Artificial
  Synthetic oligonucleotide
cttgcgtgtgaatctctatggggatttcgttgtatttgtatggctcgtgtctcag

SEQ ID NO: 515455 - DNA, 55 bp, Artificial
  Synthetic oligonucleotide
cttggtgcttgctacaacgctccctgtttaattagctagtgcagccgtattggag

SEQ ID NO: 515456 - DNA, 55 bp, Artificial
  Synthetic oligonucleotide
gacaccaacctccgcgttagttcgtgattctggcactgttagctccacgatcacg

SEQ ID NO: 515457 - DNA, 54 bp, Artificial
  Synthetic oligonucleotide
cccgtcattacttccatacgatgccaaaggtaatgctcgctcttactcttttag

SEQ ID NO: 515458 - DNA, 54 bp, Artificial
  Synthetic oligonucleotide
gacgcgtggagctggtcgggtgtcagttggcaattccccgcaaaagactctctc

SEQ ID NO: 515459 - DNA, 53 bp, Artificial
  Synthetic oligonucleotide
gagagcagctgctaggtccatgtgacgaggccctgggagcgccttcggcatga

SEQ ID NO: 515460 - DNA, 51 bp, Artificial
  Synthetic oligonucleotide
gaaccccggtcagaagcactgggacgctggcatcagagttgtgaggtacgt

SEQ ID NO: 515461 - DNA, 51 bp, Artificial
  Synthetic oligonucleotide
ctttgtagcttatcagccgaatgcgaagtcacacatgaagcatccacgtct

SEQ ID NO: 515462 - DNA, 51 bp, Artificial
  Synthetic oligonucleotide
gcaacaagaaccaacactcgcgtgataaaccttctactcttgacgcgtcgt

SEQ ID NO: 515463 - DNA, 51 bp, Artificial
  Synthetic oligonucleotide
gagagggtttagtgagcagctacgcttcggacccggtgcttgccttaggag

SEQ ID NO: 515464 - DNA, 51 bp, Artificial
  Synthetic oligonucleotide
tccgctcgcctctgcgccacaccactccgttttcacttgtccccagtatgg

SEQ ID NO: 515465 - DNA, 51 bp, Artificial
  Synthetic oligonucleotide
gcatgattcattcttgcgtatctgcaaacaatccgctcaacgcacgtatcc

SEQ ID NO: 515466 - DNA, 55 bp, Artificial
  Synthetic oligonucleotide
tgatcagcacgcatacctcactcgtaaacttgcccgccttacgaacagcagcatc

SEQ ID NO: 515467 - DNA, 55 bp, Artificial
  Synthetic oligonucleotide
gttgctcccgttgtcaataatgttccttccatccacaccagagtttgcgctcact

SEQ ID NO: 515468 - DNA, 55 bp, Artificial
  Synthetic oligonucleotide
gtgccgtgtgcagggagggagatattccagtatcccgtcacgtgcaacatactcg

SEQ ID NO: 515469 - DNA, 55 bp, Artificial
  Synthetic oligonucleotide
gctctccccatcatgcacgatggattgcatgacgcataatccactgtccagctgt

SEQ ID NO: 515470 - DNA, 55 bp, Artificial
  Synthetic oligonucleotide
gacagcagacaagcgccattgcaacaattcggagtcgtgcgttgtagtgtgttgg

SEQ ID NO: 515471 - DNA, 55 bp, Artificial
  Synthetic oligonucleotide
cctcacgaccagtgcacagcgccacgcccaatcgtgtggtttatatacgccgccg

SEQ ID NO: 515472 - DNA, 55 bp, Artificial
  Synthetic oligonucleotide
ccccttcgttgagcgctgtctgaatctctttcaaccacaccacgtaacgtgtgta

SEQ ID NO: 515473 - DNA, 55 bp, Artificial
  Synthetic oligonucleotide
ccccacgagggcacgctaagagtaccagcatcacccacgcttttactctagccag

SEQ ID NO: 515474 - DNA, 55 bp, Artificial
  Synthetic oligonucleotide
ccagagcacccatttgccttcgcattactagcgaccatgttgaaacagccacaat

SEQ ID NO: 515475 - DNA, 55 bp, Artificial
  Synthetic oligonucleotide
ccacgcacacaaaagtacattaacaacatgaagcaggagtgtgtttgttcacttg

SEQ ID NO: 515476 - DNA, 55 bp, Artificial
  Synthetic oligonucleotide
catcctttgcatgtaggtactgtctcaaccctcctatacaagccattccggaaca

SEQ ID NO: 515477 - DNA, 55 bp, Artificial
  Synthetic oligonucleotide
atccgaagcgctagtgtaggattcaacaagtgaaacgcgttagcaaaaggggcct

SEQ ID NO: 515478 - DNA, 55 bp, Artificial
  Synthetic oligonucleotide
aatcgcctttctttataggcgttgcaaatgccgcaggtgtttccactacttcagc

SEQ ID NO: 515479 - DNA, 54 bp, Artificial
  Synthetic oligonucleotide
gtagtcactgggctaattgccagcggtgtgactttcagtatcgagccgaggatc

SEQ ID NO: 515480 - DNA, 53 bp, Artificial
  Synthetic oligonucleotide
gcgatggtccgtagtgaaggcgctctgtttaagattcctgtattagaccgaat

SEQ ID NO: 515481 - DNA, 53 bp, Artificial
  Synthetic oligonucleotide
tgtccctaacattgcggtgaaaggtaatcgtgaacatcttagaggtaggcata

SEQ ID NO: 515482 - DNA, 51 bp, Artificial
  Synthetic oligonucleotide
ttcacatgcacgtgaacgcccgagtgagaatgagaacttgcagtcataagt

SEQ ID NO: 515483 - DNA, 55 bp, Artificial
  Synthetic oligonucleotide
tgggtgacgcaaattggcggcagagtgtgggcccgcggcatttccggtcatacag

SEQ ID NO: 515484 - DNA, 55 bp, Artificial
  Synthetic oligonucleotide
gtccatctcatgcaccttctcaaagtaagggacgttgtaggacggccagtagccc

SEQ ID NO: 515485 - DNA, 55 bp, Artificial
  Synthetic oligonucleotide
gggtctgggctggagtatgcctttgtctcgctcgccctcaaagactggttcgtca

SEQ ID NO: 515486 - DNA, 55 bp, Artificial
  Synthetic oligonucleotide
gcgctcacacgtccagcctgctcaatgctgtctcgttcttgtcccgataccctca

SEQ ID NO: 515487 - DNA, 55 bp, Artificial
  Synthetic oligonucleotide
gcctcttgcggctgtcgtgtccacgcctctgtgctgaactgtcatttgccaccac

SEQ ID NO: 515488 - DNA, 55 bp, Artificial
  Synthetic oligonucleotide
ctgaggagcggcgtagggttgtggggtttggttggaggtcaatcgctcagtgggc

SEQ ID NO: 515489 - DNA, 55 bp, Artificial
  Synthetic oligonucleotide
cgtcgtttgaacacgagctcacacaacgcaatcattaccatgcaaacgcgcacac

SEQ ID NO: 515490 - DNA, 55 bp, Artificial
  Synthetic oligonucleotide
cctgccttgaatactttgaccaccacgttttgagaacaactacgactcacacccc

SEQ ID NO: 515491 - DNA, 55 bp, Artificial
  Synthetic oligonucleotide
ccccgtccacagacgttgactttcacctctttgagccgttggcgacgtatctcgt

SEQ ID NO: 515492 - DNA, 55 bp, Artificial
  Synthetic oligonucleotide
catagctagggataacaacttgcacccttaccttttgttgcacgttgatgatggt

SEQ ID NO: 515493 - DNA, 55 bp, Artificial
  Synthetic oligonucleotide
caacgagacatccaggtgcccaaagtggtggagttgattggcgaagggcttgcac

SEQ ID NO: 515494 - DNA, 55 bp, Artificial
  Synthetic oligonucleotide
aggtctgacacggccacgggctttccagacttgagggcctgtgtgacgaaccctg

SEQ ID NO: 515495 - DNA, 54 bp, Artificial
  Synthetic oligonucleotide
gcagtttgagcgtggggagatatctgtgcttgtgtgttcagacacgatggcccg

SEQ ID NO: 515496 - DNA, 53 bp, Artificial
  Synthetic oligonucleotide
gtgcgttttatggcggtcctgccggagtagtctggacttacatggatgctggt

SEQ ID NO: 515497 - DNA, 52 bp, Artificial
  Synthetic oligonucleotide
cctggtacactaccacagcaagcagttcaccacaccagcagcccgaatctat

SEQ ID NO: 515498 - DNA, 51 bp, Artificial
  Synthetic oligonucleotide
cacgcagcccacgatcacctcaaggtgccaccagcacatgcaattggtttt

SEQ ID NO: 515499 - DNA, 51 bp, Artificial
  Synthetic oligonucleotide
aggcgataggcaggagattcatatgtcaccaacctgcagttgtcggttctg

SEQ ID NO: 515500 - DNA, 55 bp, Artificial
  Synthetic oligonucleotide
tgccatcgatcacggattcaatcgtacgggcttggttctggacgacggtaagtgc

SEQ ID NO: 515501 - DNA, 55 bp, Artificial
  Synthetic oligonucleotide
gcgacgtggtccgtcatgggcgaccgctcccgttggctctggagaaagtacgcta

SEQ ID NO: 515502 - DNA, 55 bp, Artificial
  Synthetic oligonucleotide
gccgtgcatgaactcttacgactcgaccggaggaaacgcaacgacgtattcgacg

SEQ ID NO: 515503 - DNA, 55 bp, Artificial
  Synthetic oligonucleotide
gccgcatgattgtgtattgtcggctcatgaccgcgggttaggtcacgcccctcga

SEQ ID NO: 515504 - DNA, 55 bp, Artificial
  Synthetic oligonucleotide
gcccgacggacacggatcattatggacacgaatcgtattgcggactctttcccag

SEQ ID NO: 515505 - DNA, 55 bp, Artificial
  Synthetic oligonucleotide
gagttgaaactcgcggttctcaagcgtgagcacttggtcggcgcgcgaattgaga

SEQ ID NO: 515506 - DNA, 55 bp, Artificial
  Synthetic oligonucleotide
cttcccattggccgatatctgccacgatggcaaataactaccgtccatcgtccgg

SEQ ID NO: 515507 - DNA, 55 bp, Artificial
  Synthetic oligonucleotide
ctgacttcaacgttgcgacaggcggcatcaaatagtgtatcaaggcgtcgcactc

SEQ ID NO: 515508 - DNA, 55 bp, Artificial
  Synthetic oligonucleotide
cgtttccgacgatcgtcttcaagaaccggtggggccgcgcaatgctgccgtgccg

SEQ ID NO: 515509 - DNA, 55 bp, Artificial
  Synthetic oligonucleotide
cgttgacagccaatcgttcttgtttgatgcgccgataatgtaggtcgttgaagct

SEQ ID NO: 515510 - DNA, 55 bp, Artificial
  Synthetic oligonucleotide
cgtgcgggcgtatcgactccgcaaaggggatcgcttggtttctcgccaatatcac

SEQ ID NO: 515511 - DNA, 55 bp, Artificial
  Synthetic oligonucleotide
cgtcgtcgcaatccagtcggggtgttggatcgtaccgtccgtttgcacatagggc

SEQ ID NO: 515512 - DNA, 55 bp, Artificial
  Synthetic oligonucleotide
cgcgctcacggacgccgacttttcgagcggtgactttagcgggaccttgatccag

SEQ ID NO: 515513 - DNA, 55 bp, Artificial
  Synthetic oligonucleotide
cgattaacgttactcggtaatgtcagccatcgctgtaaatcgaccgcgagatgca

SEQ ID NO: 515514 - DNA, 55 bp, Artificial
  Synthetic oligonucleotide
cgacacgattgcgcgcgtatactcatttcaagtgcatcgaatccgtggatggatg

SEQ ID NO: 515515 - DNA, 54 bp, Artificial
  Synthetic oligonucleotide
cggctagagtgaagtacgctacggaaattaatagcggaagaatcaaggcaatag

SEQ ID NO: 515516 - DNA, 53 bp, Artificial
  Synthetic oligonucleotide
gaatcgtgagagttgtacctggggacagcgatctcgaatactagtacagcaat

SEQ ID NO: 515517 - DNA, 55 bp, Artificial
  Synthetic oligonucleotide
ggtcggtcgcggcaccaagggtgtgaggcgggtatgacagtctgtgtgctgaaac

SEQ ID NO: 515518 - DNA, 55 bp, Artificial
  Synthetic oligonucleotide
ggtagaaggcgttagagccattgtgtctggtctggcaactacggcgttctttgcg

SEQ ID NO: 515519 - DNA, 55 bp, Artificial
  Synthetic oligonucleotide
gggcgtggcaactgtttctgccagatgttcagcagcctgatatgcaccaaccgcc

SEQ ID NO: 515520 - DNA, 55 bp, Artificial
  Synthetic oligonucleotide
ggatgtatgtgtgtattggcgtgcaccgatgtgtctctgcgttcgtcggttgact

SEQ ID NO: 515521 - DNA, 55 bp, Artificial
  Synthetic oligonucleotide
ggagaggtgagggaggaaccgtgtctgtggttcgtctccaaagcatgtgaggcgc

SEQ ID NO: 515522 - DNA, 55 bp, Artificial
  Synthetic oligonucleotide
gccggacgggctggcctttctgttacggcgaaggaactggtctcttgcagcactg

SEQ ID NO: 515523 - DNA, 55 bp, Artificial
  Synthetic oligonucleotide
gccagggaaagtgggctgccacgcaggtccgggccatcttggctcgatgctcata

SEQ ID NO: 515524 - DNA, 55 bp, Artificial
  Synthetic oligonucleotide
gcagcggatttcaaggcgtctgctagatgcagccactcctttgccaactgcggtg

SEQ ID NO: 515525 - DNA, 55 bp, Artificial
  Synthetic oligonucleotide
gcagccgtttatttcacacaaatgaaagctggctccaagcacactgatggacgga

SEQ ID NO: 515526 - DNA, 55 bp, Artificial
  Synthetic oligonucleotide
gagtaccaacgtaccggatgttcaatgaatgcaagcatatgtatagatctacgga

SEQ ID NO: 515527 - DNA, 55 bp, Artificial
  Synthetic oligonucleotide
gagtaaagagccccatggcgcatgcccagtagctgtcgacgaacggccagacgaa

SEQ ID NO: 515528 - DNA, 55 bp, Artificial
  Synthetic oligonucleotide
gaggcgacccaccctgcatggttccgcaagagaggcacatcgtcaaatcgctctc

SEQ ID NO: 515529 - DNA, 55 bp, Artificial
  Synthetic oligonucleotide
gaggaaccagatttgtgtgaaggggactacgaagaagtcttcaggccagtgcgac

SEQ ID NO: 515530 - DNA, 55 bp, Artificial
  Synthetic oligonucleotide
gagacttgcatgtgtatggactagatgggtgggagtcacgtaggaggtccaggac

SEQ ID NO: 515531 - DNA, 55 bp, Artificial
  Synthetic oligonucleotide
gaacaacagaacccgcccgcttgctgtcccctactttctcctcctacacacgagc

SEQ ID NO: 515532 - DNA, 55 bp, Artificial
  Synthetic oligonucleotide
cttgccaggtcgggaggcaagtcgcttttcccagaatattcaaccggaatcgaac

SEQ ID NO: 515533 - DNA, 55 bp, Artificial
  Synthetic oligonucleotide
ctgcttgttgtctccagaacgatgtgactgatacactctcgaagtttcttcaagc

SEQ ID NO: 515534 - DNA, 55 bp, Artificial
  Synthetic oligonucleotide
tgcgaggcgtgaacaggttgcaaggcacattcggtaagacccactcgggaaccgg

SEQ ID NO: 515535 - DNA, 55 bp, Artificial
  Synthetic oligonucleotide
tgacctgtgtccgaagcggagacatgccgatactctttaccgatttcctgtggtc

SEQ ID NO: 515536 - DNA, 55 bp, Artificial
  Synthetic oligonucleotide
tctatagtttaaccgctactgctgggactgcatattatgtacttacggtagtact

SEQ ID NO: 515537 - DNA, 55 bp, Artificial
  Synthetic oligonucleotide
tctaggttcttgaacgcatgcctctttggtcgcattccctattgcggcacccctg

SEQ ID NO: 515538 - DNA, 55 bp, Artificial
  Synthetic oligonucleotide
tctagaatttgtggtactcatccctccgacgaatcgaatcttccgcctactgccg

SEQ ID NO: 515539 - DNA, 55 bp, Artificial
  Synthetic oligonucleotide
tcggaagcgagcattttcaccaaagcgatatctgccgagtggacggctcctggac

SEQ ID NO: 515540 - DNA, 55 bp, Artificial
  Synthetic oligonucleotide
tcctttagaaactgtgaactgcgattcctcatgttcttcacagacacccgtctcc

SEQ ID NO: 515541 - DNA, 55 bp, Artificial
  Synthetic oligonucleotide
tatcagcgacaacctggggctcacgccgaacagtgccccgaagcaggagacagga

SEQ ID NO: 515542 - DNA, 55 bp, Artificial
  Synthetic oligonucleotide
taactccgaggttgtgcgtatgcatttgatggaaactgccttgtcatatttctaa

SEQ ID NO: 515543 - DNA, 55 bp, Artificial
  Synthetic oligonucleotide
gttgtttcaagcctgcgttgaggatgtggtgagtatgtgttgtttacgtggcccg

SEQ ID NO: 515544 - DNA, 55 bp, Artificial
  Synthetic oligonucleotide
gtgtcgcgttttcgggactcagcactcgctcgactcgtggcaagagagacgccag

SEQ ID NO: 515545 - DNA, 55 bp, Artificial
  Synthetic oligonucleotide
gtggtacctcctgtcctcagatttcgttggaagtcctaggtctgtcagaccactg

SEQ ID NO: 515546 - DNA, 55 bp, Artificial
  Synthetic oligonucleotide
gtgcagatgtcaacagacaacgagaccatgagtcggacactggaaaactctagag

SEQ ID NO: 515547 - DNA, 55 bp, Artificial
  Synthetic oligonucleotide
gtctctaacataccttttacctacaactgtacggaacgtaacaaacctccaggca

SEQ ID NO: 515548 - DNA, 55 bp, Artificial
  Synthetic oligonucleotide
gtcccctgtcctcttacctctgtttaccagagatgtctgccggcccaggaactgg

SEQ ID NO: 515549 - DNA, 55 bp, Artificial
  Synthetic oligonucleotide
ggtggcaaagagagcaggactgaagaaggtctacttccctgtctataagtacggc

SEQ ID NO: 515550 - DNA, 55 bp, Artificial
  Synthetic oligonucleotide
ggtcttctggtaacggggatcggtagcaggtagcaacgcaagccgatgtagacat

SEQ ID NO: 515551 - DNA, 55 bp, Artificial
  Synthetic oligonucleotide
ccaagcaacaacacatatggaggtggacctctaacgaaaacgcgagccagcggag

SEQ ID NO: 515552 - DNA, 55 bp, Artificial
  Synthetic oligonucleotide
caggtgatcgatgctgcgctaggatcacataaatgacaagtgtcgtcattgcctg

SEQ ID NO: 515553 - DNA, 55 bp, Artificial
  Synthetic oligonucleotide
cccagcaaatactcatacaacgcacccttgttattcgcagcgagggcatcgaaag

SEQ ID NO: 515554 - DNA, 55 bp, Artificial
  Synthetic oligonucleotide
cagcgaaaatgctgacgaaacactgtccataactggagccattgaccattataac

SEQ ID NO: 515555 - DNA, 55 bp, Artificial
  Synthetic oligonucleotide
cactgggtggatactattcctctctccaggccgaaacgaaatatcagccgtgact

SEQ ID NO: 515556 - DNA, 55 bp, Artificial
  Synthetic oligonucleotide
cccttccaacacaccctcacattttcttgtgaagtccctaacagctagtcggcaa

SEQ ID NO: 515557 - DNA, 55 bp, Artificial
  Synthetic oligonucleotide
cactatcctcagtggatagctagagacgtgacaccggaaacaccacaacggactg

SEQ ID NO: 515558 - DNA, 55 bp, Artificial
  Synthetic oligonucleotide
ccggcctagaacagagcgctacagtggtaatggcaaagcgaccaacgtgtgcaga

SEQ ID NO: 515559 - DNA, 55 bp, Artificial
  Synthetic oligonucleotide
cacacaacccaccaaagagaatcgatacagaattgcagcgcccgcaaacgtgcag

SEQ ID NO: 515560 - DNA, 55 bp, Artificial
  Synthetic oligonucleotide
cctcctacctcgtctgccatccagtctataccacggttcccttatttgtctccca

SEQ ID NO: 515561 - DNA, 55 bp, Artificial
  Synthetic oligonucleotide
cctgagaagcatcaaccgagtcagtgatcgcctggggcatgtagacggctttgcc

SEQ ID NO: 515562 - DNA, 55 bp, Artificial
  Synthetic oligonucleotide
attcctcaaactcccgcatccgtcctctttccttctgacgcttccgggtcattcg

SEQ ID NO: 515563 - DNA, 55 bp, Artificial
  Synthetic oligonucleotide
ccttctgggatctgtgcgaagtggaagggcgcagccatggggaagaactaccgag

SEQ ID NO: 515564 - DNA, 55 bp, Artificial
  Synthetic oligonucleotide
atattgtaccaccacgcatccgcgccggggtgactgtgacttaggtaagcggtac

SEQ ID NO: 515565 - DNA, 55 bp, Artificial
  Synthetic oligonucleotide
cgaccatgtactcgcaaaagctacactccccagaaaacggtagttcccagcattt

SEQ ID NO: 515566 - DNA, 55 bp, Artificial
  Synthetic oligonucleotide
cgaggcggtaagacatgcgaggaagagtggatctcgatacttcagttccacgcat

SEQ ID NO: 515567 - DNA, 55 bp, Artificial
  Synthetic oligonucleotide
cgcacagtcagtcgctctgctgcgtatgacgaaatgggagggctggttcgcatcc

SEQ ID NO: 515568 - DNA, 55 bp, Artificial
  Synthetic oligonucleotide
cgggtgagtgaagtccgcggaggtggccaaacagtggggtttcgtgaagaaaaca

SEQ ID NO: 515569 - DNA, 55 bp, Artificial
  Synthetic oligonucleotide
cggttgctcttcttcgtctactgcggtgtgcggcgagtttccccatcctccggtg

SEQ ID NO: 515570 - DNA, 55 bp, Artificial
  Synthetic oligonucleotide
cgtactcagggcatgcaataccaatcagataacaactgaagctagactccccgtt

SEQ ID NO: 515571 - DNA, 55 bp, Artificial
  Synthetic oligonucleotide
agccaatccatgttgcccgagacaacagtaaggtaccgcagatcaaccggggccc

SEQ ID NO: 515572 - DNA, 55 bp, Artificial
  Synthetic oligonucleotide
acggtttgtacctacttgacgcctcagtttaagcagaactgtagtttatcgggac

SEQ ID NO: 515573 - DNA, 55 bp, Artificial
  Synthetic oligonucleotide
cgtcgtacaacgcgtgcaggacattcacatgcggcgacggcaggtgagaggaacg

SEQ ID NO: 515574 - DNA, 55 bp, Artificial
  Synthetic oligonucleotide
cgtgcaccagccaacgcgactctcttccgtatctcgagacgctttcgcaatccga

SEQ ID NO: 515575 - DNA, 55 bp, Artificial
  Synthetic oligonucleotide
aaagacggacgttctctctgtttcttgggtccaggcgaaaagaaccgtgtcggtg

SEQ ID NO: 515576 - DNA, 55 bp, Artificial
  Synthetic oligonucleotide
ctgctgcccggaatcctgagcacactgaagtcacaatctctggcagtactagatg

SEQ ID NO: 515577 - DNA, 54 bp, Artificial
  Synthetic oligonucleotide
tccggcgtcttccgttgcctgctctgtcgctcgaagttgttttatcttctcgcc

SEQ ID NO: 515578 - DNA, 54 bp, Artificial
  Synthetic oligonucleotide
ccccgtccgacctcgcgttctgttgggttcgaaggaactgctcacggagaggcg

SEQ ID NO: 515579 - DNA, 54 bp, Artificial
  Synthetic oligonucleotide
ggccctttgcgccagactgcggctggacatctcgcgtgtctcaagcacaacata

SEQ ID NO: 515580 - DNA, 54 bp, Artificial
  Synthetic oligonucleotide
gctcaaaccgaaacgtcgtcggcttcaacagacggtttctacagagccgctcac

SEQ ID NO: 515581 - DNA, 54 bp, Artificial
  Synthetic oligonucleotide
cctttctcactgcgactccttgaacagacatccgcaggcaatcgctcctatata

SEQ ID NO: 515582 - DNA, 53 bp, Artificial
  Synthetic oligonucleotide
ggggacactgcaggctggcgcaatggcgttttgatcctcgtagatgggagaga

SEQ ID NO: 515583 - DNA, 53 bp, Artificial
  Synthetic oligonucleotide
cctttaagacagcaagtccacctaacgcattacctgtgatggtgcaccgttaa

SEQ ID NO: 515584 - DNA, 53 bp, Artificial
  Synthetic oligonucleotide
tctggaatagcggacgcgctcttcaggtgtgacctccgtatcttgaagagatg

SEQ ID NO: 515585 - DNA, 53 bp, Artificial
  Synthetic oligonucleotide
atcgagatttggcactcatgtgacaggatgggtgcgcatcgtcacgcttctca

SEQ ID NO: 515586 - DNA, 52 bp, Artificial
  Synthetic oligonucleotide
tgcgtgaactggatcgaagagtgtgaagatcgcacatcatagcaggtgacac

SEQ ID NO: 515587 - DNA, 52 bp, Artificial
  Synthetic oligonucleotide
cgttcagtcattgactgcaatgcaatggatctgtgcggtttcagttcgagtt

SEQ ID NO: 515588 - DNA, 52 bp, Artificial
  Synthetic oligonucleotide
gacctccacagtcgcccatcaaacctgtgtatcacggtcataaacacattcg

SEQ ID NO: 515589 - DNA, 52 bp, Artificial
  Synthetic oligonucleotide
gactttgtttcacgaaatggctggtgcgggaagctgcgacacagaggcgggg

SEQ ID NO: 515590 - DNA, 52 bp, Artificial
  Synthetic oligonucleotide
tgctttgttccattgcccgcctagttgaaagccactctggagaagcgccaga

SEQ ID NO: 515591 - DNA, 52 bp, Artificial
  Synthetic oligonucleotide
atgtataaagacatgcacgtagagatcgcaacactaatcttgacaggctccc

SEQ ID NO: 515592 - DNA, 52 bp, Artificial
  Synthetic oligonucleotide
gtccaggcgccagatgtgagcggagacaaaggggcgtgcggtcgagttcccg

SEQ ID NO: 515593 - DNA, 51 bp, Artificial
  Synthetic oligonucleotide
ttcacacatgacgtcaggaacggagcaaacgagtcgcgccgtcgcttgttc

SEQ ID NO: 515594 - DNA, 51 bp, Artificial
  Synthetic oligonucleotide
tttacgccaagttgtccgtggcagaaaagcgacggtctgcccagcaatttt

SEQ ID NO: 515595 - DNA, 51 bp, Artificial
  Synthetic oligonucleotide
atgccagaacgtcaacagctaggtcatgctcacaaactatggtttctggcc

SEQ ID NO: 515596 - DNA, 51 bp, Artificial
  Synthetic oligonucleotide
attgaacggtcctctagtagtattgatcgtcgttacaaacggccatgcaat

SEQ ID NO: 515597 - DNA, 50 bp, Artificial
  Synthetic oligonucleotide
cccatgcaaaccacgtcagcacaacagctaatacagtcatgccccgtttt

SEQ ID NO: 515598 - DNA, 55 bp, Artificial
  Synthetic oligonucleotide
gatgatcatccaccgctgtgtttgaccgatcgtctatacgagaagtcaccagtgg

SEQ ID NO: 515599 - DNA, 55 bp, Artificial
  Synthetic oligonucleotide
gcaccataagttttgcaagctgaggtaatagcagggcaagaccagtttccttttg

SEQ ID NO: 515600 - DNA, 55 bp, Artificial
  Synthetic oligonucleotide
gcatgtagtacaaccagttgaacaagcagcgcatatcatatttgtggtatccttg

SEQ ID NO: 515601 - DNA, 55 bp, Artificial
  Synthetic oligonucleotide
gccaagccttccctgtatataaacacttttaaggggcacacactcttgactagaa

SEQ ID NO: 515602 - DNA, 55 bp, Artificial
  Synthetic oligonucleotide
gccgtccaaggtgcttaccccatcttgagtgacttcgcttcccaaactgtttcct

SEQ ID NO: 515603 - DNA, 55 bp, Artificial
  Synthetic oligonucleotide
gctcgtttctactattgccgctacctctactttccaccctgaagccaaccctgca

SEQ ID NO: 515604 - DNA, 55 bp, Artificial
  Synthetic oligonucleotide
gcttgagagtggtcctttacccaaaggtaatcggtttacatcttttcgtggagtg

SEQ ID NO: 515605 - DNA, 55 bp, Artificial
  Synthetic oligonucleotide
ggaccacatattctcgattaggatctgatcaggaggctgagctggccaatcaagc

SEQ ID NO: 515606 - DNA, 55 bp, Artificial
  Synthetic oligonucleotide
ggccataatagaagtacctgtagattcggcgtgcttgtaatcatagggctcaggg

SEQ ID NO: 515607 - DNA, 55 bp, Artificial
  Synthetic oligonucleotide
ggttgagcttgctccctcgcccaagagttagccaatctatattcctgcgccctga

SEQ ID NO: 515608 - DNA, 55 bp, Artificial
  Synthetic oligonucleotide
tacccgatggtaacaccattaccgtccaagactagagattcagatgccctgaact

SEQ ID NO: 515609 - DNA, 55 bp, Artificial
  Synthetic oligonucleotide
tactggatattttaactgcgttctaggttgtatccgaaatgacatgaagggcctc

SEQ ID NO: 515610 - DNA, 55 bp, Artificial
  Synthetic oligonucleotide
tagctatgggctcttgggcgccaagaagatgtaggtccagtaggattgaagtagc

SEQ ID NO: 515611 - DNA, 55 bp, Artificial
  Synthetic oligonucleotide
tatagattcagatggggcgaaagcagttgcttccgaaatagctaaatgtactaat

SEQ ID NO: 515612 - DNA, 55 bp, Artificial
  Synthetic oligonucleotide
tcccttgcccaagagttagccaatctatattcctgcgccctgagcataacggacc

SEQ ID NO: 515613 - DNA, 55 bp, Artificial
  Synthetic oligonucleotide
tcgtagaagggctcccagtaatccttcttggagatcttaccttcgtcgtagagct

SEQ ID NO: 515614 - DNA, 55 bp, Artificial
  Synthetic oligonucleotide
tctgcactgccctctaggtgaggcttaaggataaggagggatctcacaattgtcc

SEQ ID NO: 515615 - DNA, 55 bp, Artificial
  Synthetic oligonucleotide
tggagagagtaggacatttagctatttcggaagctactgctttcgccccatctgg

SEQ ID NO: 515616 - DNA, 55 bp, Artificial
  Synthetic oligonucleotide
ttcactcaatagggctatataaaatacaccatctgtatgacccacaagcgtccct

SEQ ID NO: 515617 - DNA, 55 bp, Artificial
  Synthetic oligonucleotide
tttgccaaagagttgcatagcattaacgcaccttatgagcaaattgagttgtaac

SEQ ID NO: 515618 - DNA, 55 bp, Artificial
  Synthetic oligonucleotide
agaaccaccactttcttagtacatcaagcgattatttggagtagagctgctattc

SEQ ID NO: 515619 - DNA, 55 bp, Artificial
  Synthetic oligonucleotide
agtaatacttctacgagtatgattactgcggaggcgagtactaagcaagatatgg

SEQ ID NO: 515620 - DNA, 55 bp, Artificial
  Synthetic oligonucleotide
attgctcgttaataggatgctgaataagctgttcctcacccaacattcgctgcta

SEQ ID NO: 515621 - DNA, 55 bp, Artificial
  Synthetic oligonucleotide
cacggacatttctacccagatgagacacgaagttattaggctgatgtccacatcg

SEQ ID NO: 515622 - DNA, 55 bp, Artificial
  Synthetic oligonucleotide
cagaagcactcacaccctccgaccactggtgacttttcgtatagacgatcggtca

SEQ ID NO: 515623 - DNA, 55 bp, Artificial
  Synthetic oligonucleotide
cagttgcacaaccattggagtaaggcataaccttgcaacctctataaactaatcc

SEQ ID NO: 515624 - DNA, 55 bp, Artificial
  Synthetic oligonucleotide
cataacatcagtggatatagcattcatatgcagaataccagttaaggcggtgctc

SEQ ID NO: 515625 - DNA, 55 bp, Artificial
  Synthetic oligonucleotide
ccctcttctcatttcgccctgaatcggaggagattgctgccaccattgacttccc

SEQ ID NO: 515626 - DNA, 55 bp, Artificial
  Synthetic oligonucleotide
cccttagcattcttaacgatctcactgttttgaccattgatgcaccaagcaagat

SEQ ID NO: 515627 - DNA, 55 bp, Artificial
  Synthetic oligonucleotide
cgtctttagcaaatctttacgaacccaggtttcaacttcgagtggggattaaggt

SEQ ID NO: 515628 - DNA, 55 bp, Artificial
  Synthetic oligonucleotide
ctacaatgaactcagagttacccctgaagaacacccctgcttacttactgaagct

SEQ ID NO: 515629 - DNA, 55 bp, Artificial
  Synthetic oligonucleotide
ctgttccataacttagattgagggaattcgacgggtgagagcttccagtaaaggg

SEQ ID NO: 515630 - DNA, 55 bp, Artificial
  Synthetic oligonucleotide
cttaacaagctatggcccctaaatttcaacagttgttggctaaatggtaactttc

SEQ ID NO: 515631 - DNA, 55 bp, Artificial
  Synthetic oligonucleotide
gaacattgaggttagtcgagcctgagagtttagagaggttctgggtctcattttg

SEQ ID NO: 515632 - DNA, 55 bp, Artificial
  Synthetic oligonucleotide
gaagtcagaagaactcccaccaagaccgaaatcagaattaaggccaccaagccct

SEQ ID NO: 515633 - DNA, 55 bp, Artificial
  Synthetic oligonucleotide
gagattagtgcactttgctaatccataagctaagcctgaagcaccttaatcacca

SEQ ID NO: 515634 - DNA, 55 bp, Artificial
  Synthetic oligonucleotide
gagccttcttaccagcgtttctaccgtggaacataagagtaccgatcaatctttc

SEQ ID NO: 515635 - DNA, 55 bp, Artificial
  Synthetic oligonucleotide
gatcgtctatacgaaaagtcaccagtggttggagggtgtgagtgcttctgactag

SEQ ID NO: 515636 - DNA, 54 bp, Artificial
  Synthetic oligonucleotide
atgtgcttcagtctccctcgctcaaaaggcaagttcggctgaaattaatttgag

SEQ ID NO: 515637 - DNA, 53 bp, Artificial
  Synthetic oligonucleotide
ttagttaatgccgaaaagatgggtaagaagcaagtcctcttaagacccgtttc

SEQ ID NO: 515638 - DNA, 51 bp, Artificial
  Synthetic oligonucleotide
ctcgtttgtttgttcacctaaaatgagggacgagggaatgaggtcttacgg

SEQ ID NO: 515639 - DNA, 51 bp, Artificial
  Synthetic oligonucleotide
aaccacaacctaagcctgatgcacctacgtcaccaatttaattcttacttt

SEQ ID NO: 515640 - DNA, 55 bp, Artificial
  Synthetic oligonucleotide
tattgcgctaatgtttgaatcccatcattttactgaggttcattcgcttttcagc

SEQ ID NO: 515641 - DNA, 55 bp, Artificial
  Synthetic oligonucleotide
gttggtaaatcagctccacaaggaagttagcagtaatgattattgcatacacctg

SEQ ID NO: 515642 - DNA, 55 bp, Artificial
  Synthetic oligonucleotide
gggtccaaataacaacatctccgtaattgatcctcttacagttgactccggcttt

SEQ ID NO: 515643 - DNA, 55 bp, Artificial
  Synthetic oligonucleotide
gggtactgtaggtgtggtggacatgagtaaaggggtggactgcgggatattattg

SEQ ID NO: 515644 - DNA, 55 bp, Artificial
  Synthetic oligonucleotide
gggagtctgtcagttaggggtcttaactacttactggaacctctgaatcaacaac

SEQ ID NO: 515645 - DNA, 55 bp, Artificial
  Synthetic oligonucleotide
ggcgaggccttggtctgcgatatgagaatgtaaaactgttcggaacaaacaaggc

SEQ ID NO: 515646 - DNA, 55 bp, Artificial
  Synthetic oligonucleotide
gctccagataactcctcaagagttcatgcggtcttataagcgggtatactagtac

SEQ ID NO: 515647 - DNA, 55 bp, Artificial
  Synthetic oligonucleotide
gacgatgaccagactatttgggaagctaataatcttttggacaaatgcggtttcg

SEQ ID NO: 515648 - DNA, 55 bp, Artificial
  Synthetic oligonucleotide
gaaggttcagcagtcacgagtaaacagttggaaagctctgtgaagaataatactg

SEQ ID NO: 515649 - DNA, 55 bp, Artificial
  Synthetic oligonucleotide
ctgagtatccctgtgtctgtgtaagtaaccccacataaactgttcatagcccgac

SEQ ID NO: 515650 - DNA, 55 bp, Artificial
  Synthetic oligonucleotide
cggatgcatattggtatttaggagtagatggagtgcttgcagatgcagtacgagg

SEQ ID NO: 515651 - DNA, 55 bp, Artificial
  Synthetic oligonucleotide
cgaggttaacagaagatgcctgctcttgaacaaacactgctgagttgttttcagg

SEQ ID NO: 515652 - DNA, 55 bp, Artificial
  Synthetic oligonucleotide
cctccagacagtcttcccatgggacgttgagaccgtagaacgctcagtgaacaag

SEQ ID NO: 515653 - DNA, 55 bp, Artificial
  Synthetic oligonucleotide
ccgacagttcttcacgtcttttaggtcaattcgcctcacacaatctgcggcagtt

SEQ ID NO: 515654 - DNA, 55 bp, Artificial
  Synthetic oligonucleotide
ccctccaccacttgaaagactggacagatattggcttaactcacgtaagattcct

SEQ ID NO: 515655 - DNA, 55 bp, Artificial
  Synthetic oligonucleotide
cacatatcgccctccaagatcagttcactgctcagactgtgaccgttgcatcgtc

SEQ ID NO: 515656 - DNA, 55 bp, Artificial
  Synthetic oligonucleotide
caaccctatgcccaagagggttggaacttatcttgtttctagcctcaatgtgtac

SEQ ID NO: 515657 - DNA, 55 bp, Artificial
  Synthetic oligonucleotide
agattagcgaggggattggaagtggttaaaatattactcagtcacgtgggactga

SEQ ID NO: 515658 - DNA, 55 bp, Artificial
  Synthetic oligonucleotide
acgtaaggatagtcactccgaccaactgttgaatggcagccaatacgaatgcgtg

SEQ ID NO: 515659 - DNA, 55 bp, Artificial
  Synthetic oligonucleotide
acataatccggtcaggtgataattttaagtcggatcacaggggaattggcgaagt

SEQ ID NO: 515660 - DNA, 55 bp, Artificial; identical to SEQ ID NO: 292180
  Synthetic oligonucleotide

SEQ ID NO: 515661 - DNA, 54 bp, Artificial
  Synthetic oligonucleotide
atccgcaattactgtacgagtcgaagttgtataaattactggcaggaggtgtag

SEQ ID NO: 515662 - DNA, 54 bp, Artificial
  Synthetic oligonucleotide
gtgggaacagaaacagtagtgtgagctgtatgagcccactgatcacgcccaaaa

SEQ ID NO: 515663 - DNA, 53 bp, Artificial
  Synthetic oligonucleotide
aaggatagatcaaatgccgtagatacaattgccaattcgctaagtcccgctca

SEQ ID NO: 515664 - DNA, 50 bp, Artificial
  Synthetic oligonucleotide
gaggtggaagaacttggagtcatttgcggccacttaatgctaggcttggc

SEQ ID NO: 515665 - DNA, 55 bp, Artificial
  Synthetic oligonucleotide
tggatgatctgctagcagcacactacgtcatagatagccatgcagtgttagtcag

SEQ ID NO: 515666 - DNA, 55 bp, Artificial
  Synthetic oligonucleotide
gtccagaagacatcattcggagtcttcatctcgtagttcttcgcctcctccgcca

SEQ ID NO: 515667 - DNA, 55 bp, Artificial
  Synthetic oligonucleotide
gtagcgttaactttgaagtccattctttcttgttcccgcttgctacggctgttgc

SEQ ID NO: 515668 - DNA, 55 bp, Artificial
  Synthetic oligonucleotide
ggaaccatcgcaataattgtcgcttgtctaactaagacatcgttcaatcctggga

SEQ ID NO: 515669 - DNA, 55 bp, Artificial
  Synthetic oligonucleotide
gatataagtcaatagcaacgtcatttaaaggaaatgctctcgcatggacttcgtc

SEQ ID NO: 515670 - DNA, 55 bp, Artificial
  Synthetic oligonucleotide
gaatatgttagttagtatacaagtctcgtgtacggaggcactgcgttcctccata

SEQ ID NO: 515671 - DNA, 55 bp, Artificial
  Synthetic oligonucleotide
cttattgaatgacccacgtttcaccattagcgaacttcatcactaaggtcagaca

SEQ ID NO: 515672 - DNA, 55 bp, Artificial
  Synthetic oligonucleotide
ctattggaatatgaaaaggttgcaggaagaatcctttattgcgccgtgtgaaata

SEQ ID NO: 515673 - DNA, 55 bp, Artificial
  Synthetic oligonucleotide
cggtttgggtgagaataagacttacagtttgactgacaatatgactgacggcttt

SEQ ID NO: 515674 - DNA, 55 bp, Artificial
  Synthetic oligonucleotide
cggaaatgtttctgaatggtataacgaatgcgacaatgccattagaaggtcagaa

SEQ ID NO: 515675 - DNA, 55 bp, Artificial
  Synthetic oligonucleotide
cgcagtgccacagtacacgacttagggatactaacttacgaaaccgttaacatat

SEQ ID NO: 515676 - DNA, 55 bp, Artificial
  Synthetic oligonucleotide
catagactattagtaaatgcagttgcaatgtgggcttcaccacgttatgcttgga

SEQ ID NO: 515677 - DNA, 55 bp, Artificial
  Synthetic oligonucleotide
cagggaaaaccgtccgtgatttgaacgatctcctgagattcggcaaatttgattg

SEQ ID NO: 515678 - DNA, 55 bp, Artificial
  Synthetic oligonucleotide
cagccatcgaaaatgatagagcacctccatattcagaggcaacattggacgtaaa

SEQ ID NO: 515679 - DNA, 55 bp, Artificial
  Synthetic oligonucleotide
cacaaaactacggaaacggtggaaacttaccagttggagctattcctaatgcagc

SEQ ID NO: 515680 - DNA, 55 bp, Artificial
  Synthetic oligonucleotide
aggaaatgttccaattgctactctctgcatgatacttccggccatggcttatgcg

SEQ ID NO: 515681 - DNA, 55 bp, Artificial
  Synthetic oligonucleotide
agcatgcatattacgatgttggcagtatcgtgatgcggtttcctctaatttgatg

SEQ ID NO: 515682 - DNA, 55 bp, Artificial; identical to SEQ ID NO: 291318
  Synthetic oligonucleotide

SEQ ID NO: 515683 - DNA, 55 bp, Artificial
  Synthetic oligonucleotide
ggctcacaagaaagccccacctaatgaacagctggacagctgcttgcacgcaaag

SEQ ID NO: 515684 - DNA, 55 bp, Artificial
  Synthetic oligonucleotide
ggcgctgtccattctctccgtcttacccctcttcctgagtcgcagcggagctgga

SEQ ID NO: 515685 - DNA, 55 bp, Artificial
  Synthetic oligonucleotide
ggcgccagcaaactcacagattgatgcgacaataacaatctgcttcagcgtcagc

SEQ ID NO: 515686 - DNA, 55 bp, Artificial
  Synthetic oligonucleotide
ggcgcagtggcgtcactctactgaaggaggatatcattcgcttaatcctgcgtcg

SEQ ID NO: 515687 - DNA, 55 bp, Artificial
  Synthetic oligonucleotide
ggcactgagccgaagttgggttgttattgcgggtcggtgtttatgcttctagtgc

SEQ ID NO: 515688 - DNA, 55 bp, Artificial
  Synthetic oligonucleotide
ggattcgcggtttggtacgccatctcacttccataacgaataccttagattaacc

SEQ ID NO: 515689 - DNA, 55 bp, Artificial
  Synthetic oligonucleotide
ggaggtgcacgtgcgatacgtcgaggtatactgtgagaagatcagcgacctcctc

SEQ ID NO: 515690 - DNA, 55 bp, Artificial
  Synthetic oligonucleotide
gcggtgggactgcgggactcacttgtctttcacgcgtctctcagggcgctttctg

SEQ ID NO: 515691 - DNA, 55 bp, Artificial
  Synthetic oligonucleotide
gcggaaggtaacgacaaaccatttcactacgcacagcggggtaacgagtgggccg

SEQ ID NO: 515692 - DNA, 55 bp, Artificial
  Synthetic oligonucleotide
gcggaagagcgctgtatgcttttaacaggcgcgaaggatccgaacgaccctcggg

SEQ ID NO: 515693 - DNA, 55 bp, Artificial
  Synthetic oligonucleotide
gcgcggccataaaacagacggcagaaggtcggggcttgaaggagccgaaacaccc

SEQ ID NO: 515694 - DNA, 55 bp, Artificial
  Synthetic oligonucleotide
gcgcgcctccgttactcgtgatgtgcctggaaaggtgcagccactgctgcaggtt

SEQ ID NO: 515695 - DNA, 55 bp, Artificial
  Synthetic oligonucleotide
gcgaagggtgcacgaatacgcccacgagcaaaacagacgtcaacacgtgtggccc

SEQ ID NO: 515696 - DNA, 55 bp, Artificial
  Synthetic oligonucleotide
gcctgttcgccgatctttctccctgaactcaatgagtctcggatcgacacgcacc

SEQ ID NO: 515697 - DNA, 55 bp, Artificial
  Synthetic oligonucleotide
gccggtgcgtgcctcgctgattcggagagacgtgcggatcagcacccctaaacaa

SEQ ID NO: 515698 - DNA, 55 bp, Artificial
  Synthetic oligonucleotide
gcccgtgtgactttgtggtccgcgtggcacgagaatggttaagcgcgtgtgcgag

SEQ ID NO: 515699 - DNA, 55 bp, Artificial
  Synthetic oligonucleotide
gcatcgactgtccacggtaatcgtcgaggagccaacaatgcgacggcaacgctgc

SEQ ID NO: 515700 - DNA, 55 bp, Artificial
  Synthetic oligonucleotide
gcagccctatccgcataggcctctagcataacattccgaagatctgaacgcgtgc

SEQ ID NO: 515701 - DNA, 55 bp, Artificial
  Synthetic oligonucleotide
gcaacgacgagacgtggttctggggcctccttcctctgcacatgatcgagtcgcc

SEQ ID NO: 515702 - DNA, 55 bp, Artificial
  Synthetic oligonucleotide
gagttcaccattatccgcagacgtaaatctacgaaaggcaaacaggacgcaacca

SEQ ID NO: 515703 - DNA, 55 bp, Artificial
  Synthetic oligonucleotide
gaggtttccacaggtcgccttttaaacgactccacgttactcgataatgccgtcg

SEQ ID NO: 515704 - DNA, 55 bp, Artificial
  Synthetic oligonucleotide
gagcggcggaagttcatgcacgcgtactctggtcgcatggagcaccggaagatgg

SEQ ID NO: 515705 - DNA, 55 bp, Artificial
  Synthetic oligonucleotide
gagccccggtggtccacatgccttactgcggttgtccatatcgttcaccgtagcc

SEQ ID NO: 515706 - DNA, 55 bp, Artificial
  Synthetic oligonucleotide
gacgtcgctcattctcgtagatcaccatgtcaatggtggtaatgttgtgtcgcac

SEQ ID NO: 515707 - DNA, 55 bp, Artificial
  Synthetic oligonucleotide
gacctggtttcatgatcatcactcgagggcctctaggccgttcctttcccgcacc

SEQ ID NO: 515708 - DNA, 55 bp, Artificial
  Synthetic oligonucleotide
gaacttcgcaacgcgcttgtgagcagtactccacagccactagaagaacgtgcgg

SEQ ID NO: 515709 - DNA, 55 bp, Artificial
  Synthetic oligonucleotide
gaaagtgtgaagcagctccaagcgatgaggcttctgagcaaagtgatcgtcggaa

SEQ ID NO: 515710 - DNA, 55 bp, Artificial
  Synthetic oligonucleotide
tttcccactgctttagagattggataagcaagatttcccgcgtgcgagagcgtca

SEQ ID NO: 515711 - DNA, 55 bp, Artificial
  Synthetic oligonucleotide
ttcagttgcggaaacttgtttgctggcgcatgtctaaaggctaacagaggggcga

SEQ ID NO: 515712 - DNA, 55 bp, Artificial
  Synthetic oligonucleotide
tgggcatgtcgtggaagcgaaaatagtacttcttcacatagcacaggtccatcgg

SEQ ID NO: 515713 - DNA, 55 bp, Artificial
  Synthetic oligonucleotide
tgagcaaacgcctttaaccactttctctctatgaaagcacactgccgctctacgt

SEQ ID NO: 515714 - DNA, 55 bp, Artificial
  Synthetic oligonucleotide
tccccgtgaacgatgaatagacggcgctcagtgagctctacaaggggtgtagggc

SEQ ID NO: 515715 - DNA, 55 bp, Artificial
  Synthetic oligonucleotide
tccagactcgtgcgagcgcacttcggctatcagcgggcgcacatacgggataaca

SEQ ID NO: 515716 - DNA, 55 bp, Artificial
  Synthetic oligonucleotide
tccacacaccaggggagaggaccagctttactgttgcctctcggagtgtccttct

SEQ ID NO: 515717 - DNA, 55 bp, Artificial
  Synthetic oligonucleotide
tatcgcagttgcgacgtcccaaactttccatccgcacggggacaaatgacatggc

SEQ ID NO: 515718 - DNA, 55 bp, Artificial
  Synthetic oligonucleotide
tacggcccctgcagcccgccatcccaagcacatgccgttggtgcaactcggatgt

SEQ ID NO: 515719 - DNA, 55 bp, Artificial
  Synthetic oligonucleotide
taatcggacgaggacttgtggcaagaggagtcggtacgcacacatatagatagag

SEQ ID NO: 515720 - DNA, 55 bp, Artificial
  Synthetic oligonucleotide
gttttgatagcaagcaaattcgtcgtgccatagcggcacaatgtggctttctacc

SEQ ID NO: 515721 - DNA, 55 bp, Artificial
  Synthetic oligonucleotide
gttgtttcccgatggttatccaacgaggcgccctgtgatttaccacagcgatccg

SEQ ID NO: 515722 - DNA, 55 bp, Artificial
  Synthetic oligonucleotide
gtgtcgttcggtgcctgcagttagcgcttgaggagcagcgtgagcgtcaggagga

SEQ ID NO: 515723 - DNA, 55 bp, Artificial
  Synthetic oligonucleotide
gtggtcgatactttacaacagcttcacgtacggttcgtactcgtcgactgttgca

SEQ ID NO: 515724 - DNA, 55 bp, Artificial
  Synthetic oligonucleotide
gtgcgtctgtgtcgacattcacttcgctcttttcatcctggaagcacagaggagg

SEQ ID NO: 515725 - DNA, 55 bp, Artificial
  Synthetic oligonucleotide
gtgcccgcgtgccaacttaaggtccaacttgtttgcgcctgccctacccttcgcg

SEQ ID NO: 515726 - DNA, 55 bp, Artificial
  Synthetic oligonucleotide
gtgcatgccgatgcggttcagtgtctagccgacgatacccgccgcgttttatctc

SEQ ID NO: 515727 - DNA, 55 bp, Artificial
  Synthetic oligonucleotide
gtcctggagtagataagatcacgggcgggaataagagaatgacccactgagagca

SEQ ID NO: 515728 - DNA, 55 bp, Artificial
  Synthetic oligonucleotide
gtcctccagagcattctcagtggggcacagcttggagacacgtttgtccacttcc

SEQ ID NO: 515729 - DNA, 55 bp, Artificial
  Synthetic oligonucleotide
gtccggtacgataacaacctctctgacaagtgcaggctgaagtttgcgacggagg

SEQ ID NO: 515730 - DNA, 55 bp, Artificial
  Synthetic oligonucleotide
ggttccgggcaaagtctcggatgctaaaccgggaaacgtacgaatgcatatgggg

SEQ ID NO: 515731 - DNA, 55 bp, Artificial
  Synthetic oligonucleotide
ggtgcgggcgacgcttgtaaagacgagcactttacccttccctgtgcgtaccatg

SEQ ID NO: 515732 - DNA, 55 bp, Artificial
  Synthetic oligonucleotide
ggtgacagacgacatctgggtctatgacgatgcagagaacagtatgaagcagcgc

SEQ ID NO: 515733 - DNA, 55 bp, Artificial
  Synthetic oligonucleotide
ggtaacgctcggaataacaccgcagcctcccctaactcacatgcttggtgacgac

SEQ ID NO: 515734 - DNA, 55 bp, Artificial
  Synthetic oligonucleotide
gggtcatcgtaggatgcggcagcatcgttcgcccttgaagcagcctccatttcgg

SEQ ID NO: 515735 - DNA, 55 bp, Artificial
  Synthetic oligonucleotide
ggggtgcatctccgtcgagatccatacaccacggtacttgttcacagagctgtgg

SEQ ID NO: 515736 - DNA, 55 bp, Artificial
  Synthetic oligonucleotide
ggggacactacaacctttccacttccagagacgagagtgctgggacggccaccca

SEQ ID NO: 515737 - DNA, 55 bp, Artificial
  Synthetic oligonucleotide
gggagggcgacgtctgctaaaagctgcgccaacggcgtcaaacatgtgcttgtcg

SEQ ID NO: 515738 - DNA, 55 bp, Artificial
  Synthetic oligonucleotide
ccgccactgacactctacgcatgtggcgaacatcattgttgtgcgcgtgtgtatg

SEQ ID NO: 515739 - DNA, 55 bp, Artificial
  Synthetic oligonucleotide
ccgcataggacacggcacagaaacggtggagcgtggatctgtggtgagacacggg

SEQ ID NO: 515740 - DNA, 55 bp, Artificial
  Synthetic oligonucleotide
cccggtagtcttgggcattgcacccatgtcggatcagtatgagctcgtgatgctc

SEQ ID NO: 515741 - DNA, 55 bp, Artificial
  Synthetic oligonucleotide
ccagccgcaacaacaggtgccaaaggaagagcctgtgacggcgccaattacacca

SEQ ID NO: 515742 - DNA, 55 bp, Artificial
  Synthetic oligonucleotide
ccacgaccgggccaccgctcaccagtggcggatcattcagtagcactgagcagcg

SEQ ID NO: 515743 - DNA, 55 bp, Artificial
  Synthetic oligonucleotide
cagttatacgccgaggttgaacgactctcgagaatttgctccgaacgtgtggagg

SEQ ID NO: 515744 - DNA, 55 bp, Artificial
  Synthetic oligonucleotide
cagcacatccgatccggcacgacaacgttcagtggcgccttcgagccacgactcc

SEQ ID NO: 515745 - DNA, 55 bp, Artificial
  Synthetic oligonucleotide
cagaacactatgcactccacttacgagaggccttcacctctttaagaaccagcat

SEQ ID NO: 515746 - DNA, 55 bp, Artificial
  Synthetic oligonucleotide
cactcccgtagcggtcaaaactgctttacttgggacatcgtcaatagccggctcc

SEQ ID NO: 515747 - DNA, 55 bp, Artificial
  Synthetic oligonucleotide
cacggaccacaacggccttgtagtgagcatgtagtccacatacgagtaacgcccg

SEQ ID NO: 515748 - DNA, 55 bp, Artificial
  Synthetic oligonucleotide
cacccctagccaccttccatcctaaaatcgcgaaaacatgtctgtcgaggaggcc

SEQ ID NO: 515749 - DNA, 55 bp, Artificial
  Synthetic oligonucleotide
cacccacaagactggagcttgctccctcgaaggcgccaagtatattcatgatcac

SEQ ID NO: 515750 - DNA, 55 bp, Artificial
  Synthetic oligonucleotide
caaacacgaattatttataaacccgtctcactcactattcgacccacgcggtgca

SEQ ID NO: 515751 - DNA, 55 bp, Artificial
  Synthetic oligonucleotide
attggggtgtggcgttttgcacatattccgtgtgggaggtacttgccctgcgctg

SEQ ID NO: 515752 - DNA, 55 bp, Artificial
  Synthetic oligonucleotide
atatcaccgttgtcttgcactcccacgcacacatttcgtccgtttctcttgctgt

SEQ ID NO: 515753 - DNA, 55 bp, Artificial
  Synthetic oligonucleotide
aggccctaccgcgctcgagatcaccctcttgtgaaaatcggcgcacctctcgcga

SEQ ID NO: 515754 - DNA, 55 bp, Artificial
  Synthetic oligonucleotide
agcagtgcgtgtccctgtcgcagtcgtcgcacccaacaacgtcgatgctcccagc

SEQ ID NO: 515755 - DNA, 55 bp, Artificial
  Synthetic oligonucleotide
acggtttcgttccacacagcttgtagcgatgcgtgtcggctcttaatgaggcggc

SEQ ID NO: 515756 - DNA, 55 bp, Artificial
  Synthetic oligonucleotide
accgctgacccgttgtacgactctgattccggtgaggcgcctacttcattaggcc

SEQ ID NO: 515757 - DNA, 55 bp, Artificial
  Synthetic oligonucleotide
accgacgttggaagggccgcgttgggcgagacgaggtgtgtgctgcgatgatgtt

SEQ ID NO: 515758 - DNA, 55 bp, Artificial
  Synthetic oligonucleotide
acacactgcaattggggactggaagagacttcgtgggagcagggatgccttaggc

SEQ ID NO: 515759 - DNA, 55 bp, Artificial
  Synthetic oligonucleotide
acaaatactattcgggagacggagctgggtgatgtgccgccgattgacctggcac

SEQ ID NO: 515760 - DNA, 55 bp, Artificial
  Synthetic oligonucleotide
aatgacaagacgtgccagcggtgctacgatccgtctgtggcgtcgtatgagctgc

SEQ ID NO: 515761 - DNA, 55 bp, Artificial
  Synthetic oligonucleotide
aagcggctcacgtacaccggggtggattgtagtagcgctgtaagggccctgcacc

SEQ ID NO: 515762 - DNA, 55 bp, Artificial
  Synthetic oligonucleotide
aagattatccgtgcaaagcggacgtcgggtcgttcttgggcctggcgagcggtgg

SEQ ID NO: 515763 - DNA, 55 bp, Artificial
  Synthetic oligonucleotide
aacagcccatccctctgtccctgcccatgccgatcctcttctggtggtggcagtg

SEQ ID NO: 515764 - DNA, 55 bp, Artificial
  Synthetic oligonucleotide
ctgtgaaggcgctcaatccctccttgcaagcccgccgtgatccctattacaagcg

SEQ ID NO: 515765 - DNA, 55 bp, Artificial
  Synthetic oligonucleotide
ctgtaacatcacagactttgagtcgcgatgatagcaaccatgtcgccccagtctg

SEQ ID NO: 515766 - DNA, 55 bp, Artificial
  Synthetic oligonucleotide
ctggctactgagagcaatccgtgactgttctccggcaaaccctccacgtgtcggt

SEQ ID NO: 515767 - DNA, 55 bp, Artificial
  Synthetic oligonucleotide
ctgcgctgcgctctcctcatggcagccaccactaaactgaactcaagggaccggc

SEQ ID NO: 515768 - DNA, 55 bp, Artificial
  Synthetic oligonucleotide
ctgccccacatgacgcacacgtggaatggactcaataaagagtcggtcgttacga

SEQ ID NO: 515769 - DNA, 55 bp, Artificial
  Synthetic oligonucleotide
ctccttcgcaaagctctgtaacgtacagcaaatcctccgtcgtctgcattgaggc

SEQ ID NO: 515770 - DNA, 55 bp, Artificial
  Synthetic oligonucleotide
ctcaccacacacgatgggataacgggtcccttgcttttgtggaggataatgtagc

SEQ ID NO: 515771 - DNA, 55 bp, Artificial
  Synthetic oligonucleotide
cgtgtatagtatgtaggtagctttgagtacacggagttcaaatcacagttgcggg

SEQ ID NO: 515772 - DNA, 55 bp, Artificial
  Synthetic oligonucleotide
cgtggcgccatacacgacaaagatctcctccgcaggggcaatgtcccggatcgca

SEQ ID NO: 515773 - DNA, 55 bp, Artificial
  Synthetic oligonucleotide
cgtgagaaaaggaggagagcggcagaagcgtcggtcgaattacaagcgggccgcg

SEQ ID NO: 515774 - DNA, 55 bp, Artificial
  Synthetic oligonucleotide
cgtcgatgtggacaaatttcaaactctacggcctcacaccgcctgatcgcgtgcg

SEQ ID NO: 515775 - DNA, 55 bp, Artificial
  Synthetic oligonucleotide
cgtccgaagcttcgtgcaagacacttctgctggtacactgtgagcgcacgagcac

SEQ ID NO: 515776 - DNA, 55 bp, Artificial
  Synthetic oligonucleotide
cggtatggtcacgcgatatgagcccagtgcattaccttgctggtcacacagattg

SEQ ID NO: 515777 - DNA, 55 bp, Artificial
  Synthetic oligonucleotide
cggcatatatgttcaacgtaagagtccgcgtgatacgctgcatgtgaacaaccaa

SEQ ID NO: 515778 - DNA, 55 bp, Artificial
  Synthetic oligonucleotide
cggaggctactcgagaaaagggttggaaaggggctcaacgaggattcagccaaca

SEQ ID NO: 515779 - DNA, 55 bp, Artificial
  Synthetic oligonucleotide
ccgccggtgtgtgcggtagtaaagcaccgggtatatacacgacttccttacaagt

SEQ ID NO: 515780 - DNA, 55 bp, Artificial
  Synthetic oligonucleotide
ccgttgatctccatacggttcacacacaactgcagaagtattgtcaatggaggtg

SEQ ID NO: 515781 - DNA, 55 bp, Artificial
  Synthetic oligonucleotide
cctcccatcaccggaggtgcacttgactccaaccaagagcgatgtcgtggctcct

SEQ ID NO: 515782 - DNA, 55 bp, Artificial
  Synthetic oligonucleotide
cctcgcctacacgcgcactagcgaagcctcacacattccggagtccgtgaatacc

SEQ ID NO: 515783 - DNA, 55 bp, Artificial
  Synthetic oligonucleotide
cgaggtgctgtcacgcgcactgagtagccgtgagtggcttagaagtagggaagcg

SEQ ID NO: 515784 - DNA, 55 bp, Artificial
  Synthetic oligonucleotide
cgatggggcattacacaaggaaagctgctagagctacggaagctcaactataggt

SEQ ID NO: 515785 - DNA, 55 bp, Artificial
  Synthetic oligonucleotide
cgcaacccgcgagccccaataatgggtgtcgcctactgaagcttcaagcctctgc

SEQ ID NO: 515786 - DNA, 55 bp, Artificial
  Synthetic oligonucleotide
cgccagccgcggacaaagatgctcggtactgtgtcggtctctgcagggtacacca

SEQ ID NO: 515787 - DNA, 55 bp, Artificial
  Synthetic oligonucleotide
cgcccaagtgacgacaagggagagtgcatagccgactgttgcgtgcgttgccgaa

SEQ ID NO: 515788 - DNA, 55 bp, Artificial
  Synthetic oligonucleotide
cgcgatcggaagagcaccggaattcgtcgaggaagtaccatcctcatctttgtga

SEQ ID NO: 515789 - DNA, 54 bp, Artificial
  Synthetic oligonucleotide
gtgcggtctcggctggacttcgttctgcgtcagtgagcccgcggacgttgtctt

SEQ ID NO: 515790 - DNA, 54 bp, Artificial
  Synthetic oligonucleotide
cactcgtctttcctgcctcttacactgagcagctgatccgtcattgcccttcat

SEQ ID NO: 515791 - DNA, 54 bp, Artificial
  Synthetic oligonucleotide
tccgttctttcccgccatcacaagtgagcttctcatgctgagctctgcctacct

SEQ ID NO: 515792 - DNA, 54 bp, Artificial
  Synthetic oligonucleotide
tctgtcgtcaacacgtgctacggtaaaactaccgctcgcaaaagagaggtcaat

SEQ ID NO: 515793 - DNA, 54 bp, Artificial
  Synthetic oligonucleotide
ggttttcgcgaacacctttcgcccagccttctcacataactttatgcttccgcg

SEQ ID NO: 515794 - DNA, 53 bp, Artificial
  Synthetic oligonucleotide
gatgggtggtcatgtgtcctctgttgtggaatcacactcggtatgaaatgaca

SEQ ID NO: 515795 - DNA, 53 bp, Artificial
  Synthetic oligonucleotide
catacgtcgaacatggctgcccgcacggagagcgctgcgaatggtggacagat

SEQ ID NO: 515796 - DNA, 53 bp, Artificial
  Synthetic oligonucleotide
gtatgcgctggaagccgttaacatggcacagtcacatgcaagtgtgcaggtaa

SEQ ID NO: 515797 - DNA, 52 bp, Artificial
  Synthetic oligonucleotide
agcgcgtctatttgcgttttggcgtcgctgttgacagcaacttctgtcgcta

SEQ ID NO: 515798 - DNA, 52 bp, Artificial
  Synthetic oligonucleotide
gtacaccatcctccctgctattccgctatacgatgacgagctgcttcagatg

SEQ ID NO: 515799 - DNA, 51 bp, Artificial
  Synthetic oligonucleotide
catattcagcttggtggcacttgaactgcacaagtgtgttgcagaccggtg

SEQ ID NO: 515800 - DNA, 50 bp, Artificial
  Synthetic oligonucleotide
attcgtcaccacccgaggtgctatatcctcgcctaaaccacagtgacaaa

SEQ ID NO: 515801 - DNA, 50 bp, Artificial
  Synthetic oligonucleotide
gattaggagtgttccgcttgcttcctctattgttgccagtggtgcggaga

SEQ ID NO: 515802 - DNA, 55 bp, Artificial
  Synthetic oligonucleotide
ctgtgaagcacctggtgtctcagaaaagaatgcagtcttctaatgtgtacagggg

SEQ ID NO: 515803 - DNA, 55 bp, Artificial
  Synthetic oligonucleotide
ctgtgcgaaggtcctcaggtaataactgtaacattgactcatcagcgtttctaag

SEQ ID NO: 515804 - DNA, 55 bp, Artificial
  Synthetic oligonucleotide
gaaagacttcttggacttggtgttcggcgaaattaaaacgcctgccccagttaag

SEQ ID NO: 515805 - DNA, 55 bp, Artificial
  Synthetic oligonucleotide
gaatggtattgacccctagccatcctctacacgggcctttgtattgacaatagtg

SEQ ID NO: 515806 - DNA, 55 bp, Artificial
  Synthetic oligonucleotide
gaatttgcacagtttcatgcttgtcctcttaaaggggaaatagaacgaggttcac

SEQ ID NO: 515807 - DNA, 55 bp, Artificial
  Synthetic oligonucleotide
gatgtgctcctggaaagaaggaagatcctagtgttgttcaattaggtggtaaagg

SEQ ID NO: 515808 - DNA, 55 bp, Artificial
  Synthetic oligonucleotide
gcagacattggcttgcatgtctacggggaacgtactctcgtcgtgcgtcttcacg

SEQ ID NO: 515809 - DNA, 55 bp, Artificial
  Synthetic oligonucleotide
gcagatgctttccataatgaagttcctccaacagctactgaagttggtgatactg

SEQ ID NO: 515810 - DNA, 55 bp, Artificial
  Synthetic oligonucleotide
gcagggtcacaccataacaactcactaattaatgggtcttcacaactacatggtc

SEQ ID NO: 515811 - DNA, 55 bp, Artificial
  Synthetic oligonucleotide
gcctgttgtcaacccttcttcaaacctgatcatattttcatcggaattgccagtg

SEQ ID NO: 515812 - DNA, 55 bp, Artificial
  Synthetic oligonucleotide
gctacagtggggctagcactcttctactcactagccggcactattacaacaatca

SEQ ID NO: 515813 - DNA, 55 bp, Artificial
  Synthetic oligonucleotide
gctttgaaacgtcggccgcgaagggcgatcgagtggtggtggaccataccttggt

SEQ ID NO: 515814 - DNA, 55 bp, Artificial
  Synthetic oligonucleotide
ggcggagactgctgggcttttaatagtctttacaatagcgtcgtataaatggtag

SEQ ID NO: 515815 - DNA, 55 bp, Artificial
  Synthetic oligonucleotide
gggagagagtgatactgtatccttgtggatgctgaggcacacgaggagtaaggaa

SEQ ID NO: 515816 - DNA, 55 bp, Artificial
  Synthetic oligonucleotide
gggtgtgggaaggcgtacttcatttataacaacttgatgttcatgcgaacggatt

SEQ ID NO: 515817 - DNA, 55 bp, Artificial
  Synthetic oligonucleotide
ggtattgtcattggtgtcgttcgattgactcgttccattcgattggaccaatcta

SEQ ID NO: 515818 - DNA, 55 bp, Artificial
  Synthetic oligonucleotide
ttgtgtagagacgtagcccgagttaatctcttcgaggataagtgccttagaaatc

SEQ ID NO: 515819 - DNA, 55 bp, Artificial
  Synthetic oligonucleotide
ttggccatcatcagtcgagctccgagtaggggagtagaggggatggggcaccgag

SEQ ID NO: 515820 - DNA, 55 bp, Artificial
  Synthetic oligonucleotide
ttcggtgaccatacacactttatttgggatgagcacagcgccgtagaaatggacg

SEQ ID NO: 515821 - DNA, 55 bp, Artificial
  Synthetic oligonucleotide
tgattggtaaacacttgacatccatttcgttccaggtctatcattcgtcgacagg

SEQ ID NO: 515822 - DNA, 55 bp, Artificial
  Synthetic oligonucleotide
taaactcgtgtgttgatgtgtctccaagaacaatacaattagccaagaacatccc

SEQ ID NO: 515823 - DNA, 55 bp, Artificial
  Synthetic oligonucleotide
gtttaattcgattgactgaggcaagagctaaggcggaatgcagagaagttgcaac

SEQ ID NO: 515824 - DNA, 55 bp, Artificial
  Synthetic oligonucleotide
gttggtccaacgatgaataaatttcccattctataacgatcgccttgagcgcatt

SEQ ID NO: 515825 - DNA, 55 bp, Artificial
  Synthetic oligonucleotide
gtgtggggttataccgggtctggttttatctaagatccgattttaacaggtgtcg

SEQ ID NO: 515826 - DNA, 55 bp, Artificial
  Synthetic oligonucleotide
gtgtgaagcgagacgcctgttcttcactcaaccttcccgttcaaattacaacagg

SEQ ID NO: 515827 - DNA, 55 bp, Artificial
  Synthetic oligonucleotide
gtgagcataccataatgggagagaagcagctggaccataactataaccagatcca

SEQ ID NO: 515828 - DNA, 55 bp, Artificial
  Synthetic oligonucleotide
gtgaacgactctttaaatatcattgtgcgactgacacaagtcgagaagatctgcc

SEQ ID NO: 515829 - DNA, 55 bp, Artificial
  Synthetic oligonucleotide
gtcttgctgctgtcggtgtaggtcatctcgccgccaaagtagaacgccgaggccg

SEQ ID NO: 515830 - DNA, 55 bp, Artificial
  Synthetic oligonucleotide
gtctgttgatcttttaatgccaggtgtaggtgaaattgttggtggttcaatgaga

SEQ ID NO: 515831 - DNA, 55 bp, Artificial
  Synthetic oligonucleotide
gtcgcgaaatgcgaatatttgttggtaaccacgtcatccttttcggcaaatcgag

SEQ ID NO: 515832 - DNA, 55 bp, Artificial
  Synthetic oligonucleotide
gtataacagtgcttaagcgacaatcccagcatttgccagttttcggttggattca

SEQ ID NO: 515833 - DNA, 55 bp, Artificial
  Synthetic oligonucleotide
gtagatctactagagaacgactcagggatggggttattatctaatgagcttggga

SEQ ID NO: 515834 - DNA, 55 bp, Artificial
  Synthetic oligonucleotide
gtagagacgattacagagcaactgaccgtagagatgactacagaccaagtgatgg

SEQ ID NO: 515835 - DNA, 55 bp, Artificial
  Synthetic oligonucleotide
aaacaaaggtcccaacaccaagacgaacggttcaaaggatggcgtggtcggctcc

SEQ ID NO: 515836 - DNA, 55 bp, Artificial
  Synthetic oligonucleotide
aaagccctttacactgctccagcaagtcaacgagccattttaatgagtgctagac

SEQ ID NO: 515837 - DNA, 55 bp, Artificial
  Synthetic oligonucleotide
aacttctccaacacctggtctatcaagaatttcaaatggattagctggaagaatc

SEQ ID NO: 515838 - DNA, 55 bp, Artificial
  Synthetic oligonucleotide
acaacctgggccacggcatcggacggagcggcgacattgcggcagtgcagcccaa

SEQ ID NO: 515839 - DNA, 55 bp, Artificial
  Synthetic oligonucleotide
acacagggaggacatcctttatagcgggaggacgtccctaaaccacaaaggacgt

SEQ ID NO: 515840 - DNA, 55 bp, Artificial
  Synthetic oligonucleotide
agaggtgggcacaccaatcacacggaccaaacaggagagagcaagcaccagcgaa

SEQ ID NO: 515841 - DNA, 55 bp, Artificial
  Synthetic oligonucleotide
atagtagaatgacaacactcatggcagacctaggttatgacgaagacttcttaac

SEQ ID NO: 515842 - DNA, 55 bp, Artificial
  Synthetic oligonucleotide
atgaagtcttcgagtgttgtgaagtactgggacactaccattatgtgaaatccat

SEQ ID NO: 515843 - DNA, 55 bp, Artificial
  Synthetic oligonucleotide
attcggttggcaccgtcgtctcccggcgtctcttcaacaatgccgccgtccagga

SEQ ID NO: 515844 - DNA, 55 bp, Artificial
  Synthetic oligonucleotide
cacattgaaggcagccagtaacagtctgtccgttcttgagagtaatatcgatggt

SEQ ID NO: 515845 - DNA, 55 bp, Artificial
  Synthetic oligonucleotide
cacccgcgacctgcccatacgcgaactcgacaagaagaagaagcttgcgaagatc

SEQ ID NO: 515846 - DNA, 55 bp, Artificial
  Synthetic oligonucleotide
cacttcctgatgcaacaaatgactgttcatcaagcatagcaagaatacctgctgg

SEQ ID NO: 515847 - DNA, 55 bp, Artificial
  Synthetic oligonucleotide
caggaatggtcagcggaataatgtgggctattgcacaagtttgttggtttgtggc

SEQ ID NO: 515848 - DNA, 55 bp, Artificial
  Synthetic oligonucleotide
catgagcaagatccttgcaccaggtcgtgttgttatcattctctcaggaagattc

SEQ ID NO: 515849 - DNA, 55 bp, Artificial
  Synthetic oligonucleotide
cattaccaaatacatctttgacgtcagatggtggatggggatgtacaatacgtgc

SEQ ID NO: 515850 - DNA, 55 bp, Artificial
  Synthetic oligonucleotide
ctggtcgttggtccataagaatcattcccataaaaccacaaactggactgaaatc

SEQ ID NO: 515851 - DNA, 55 bp, Artificial
  Synthetic oligonucleotide
ctcttaactggcaagtcaacaccggaatctaatgtggattaagtcgtttatatct

SEQ ID NO: 515852 - DNA, 55 bp, Artificial
  Synthetic oligonucleotide
ctagccatagctggaagtctctttctagcagtagcttcccaaagaccttcatgtc

SEQ ID NO: 515853 - DNA, 55 bp, Artificial
  Synthetic oligonucleotide
ctaagcattccagtggctcgtgatttcatgacaactgactttatttcaacaccag

SEQ ID NO: 515854 - DNA, 55 bp, Artificial
  Synthetic oligonucleotide
cggcaatcagttgacgtacgcacagttttcgatgtcgcctcacgtaccagcttcg

SEQ ID NO: 515855 - DNA, 55 bp, Artificial
  Synthetic oligonucleotide
cgccagcacagccagtggcggaactcgacgcacagtttcgaccaattcggtttga

SEQ ID NO: 515856 - DNA, 55 bp, Artificial
  Synthetic oligonucleotide
cgcacacgcacacgggttactgcacacgggtattgacgcccgcgaaacgatggca

SEQ ID NO: 515857 - DNA, 55 bp, Artificial
  Synthetic oligonucleotide
cgacatgaagttctttgctaaggaccaaaacgactttatgggtccactcccaggt

SEQ ID NO: 515858 - DNA, 55 bp, Artificial
  Synthetic oligonucleotide
cgaagctgatctggacaaggaaggtgttgagagtgtggttccatgccagaggggc

SEQ ID NO: 515859 - DNA, 55 bp, Artificial
  Synthetic oligonucleotide
cctctattgacaccactcgtcatcgactcactcattcgtcttcttcaaagtggct

SEQ ID NO: 515860 - DNA, 55 bp, Artificial
  Synthetic oligonucleotide
cctagagagggcacttccttcttgagcaccagagactacaagaatacgagtaggg

SEQ ID NO: 515861 - DNA, 55 bp, Artificial
  Synthetic oligonucleotide
ccgtcgacacttgtatccagttccacgactcgtttgcagaggagttcaacgactg

SEQ ID NO: 515862 - DNA, 55 bp, Artificial
  Synthetic oligonucleotide
ccgctcgtggaaacaacgcttatatgaaacttcttgttcgcctttatggtttcct

SEQ ID NO: 515863 - DNA, 55 bp, Artificial
  Synthetic oligonucleotide
ccacgccaagggaggacttggaaagtgggtaaaacagtgcacaaacagactgttt

SEQ ID NO: 515864 - DNA, 54 bp, Artificial
  Synthetic oligonucleotide
cctctcaataatactcccggatattgctaaggaggtgagagtgcagccaagtag

SEQ ID NO: 515865 - DNA, 54 bp, Artificial
  Synthetic oligonucleotide
gtgatgaccgtggagctattctcccataacactggtgtggtatttgaactgaga

SEQ ID NO: 515866 - DNA, 54 bp, Artificial
  Synthetic oligonucleotide
agttagttcctgtgcgatgagacgcatgattgcgatagtgataggacataaatg

SEQ ID NO: 515867 - DNA, 54 bp, Artificial
  Synthetic oligonucleotide
cagttgagcgttctgttgtgcatcaccactgcaagtttgttgatgtacttcccc

SEQ ID NO: 515868 - DNA, 53 bp, Artificial
  Synthetic oligonucleotide
tatggtcctttgcctcttcggacgcttttatagtcgcttcaaacttctggtag

SEQ ID NO: 515869 - DNA, 52 bp, Artificial
  Synthetic oligonucleotide
gagtcgatacatgtgtttgtcttggacgatcccaccaatcattacttggagg

SEQ ID NO: 515870 - DNA, 52 bp, Artificial
  Synthetic oligonucleotide
acaactactgcacttctcattggaaattgtcacacaatgggagacttgggag

SEQ ID NO: 515871 - DNA, 52 bp, Artificial
  Synthetic oligonucleotide
tgggctaataaggggtgcagaacacttgcgttgagttacaaagacattgctc

SEQ ID NO: 515872 - DNA, 55 bp, Artificial
  Synthetic oligonucleotide
ttgccgaacgtgacttgccagcaacacggaggtatttggcgtagcttgacgctgc

SEQ ID NO: 515873 - DNA, 55 bp, Artificial
  Synthetic oligonucleotide
gtacagcgaactttgtcttctcgtgatcggtctgcttgaaagacagacaggacac

SEQ ID NO: 515874 - DNA, 55 bp, Artificial
  Synthetic oligonucleotide
ggggcgttcgtatcgcagcctgcagccaccagtgtcgacgcaagctgttcgttgc

SEQ ID NO: 515875 - DNA, 55 bp, Artificial
  Synthetic oligonucleotide
gccgccgaccatgagaatggaattgagcgcaggaacaaacacgtagtttgagtgc

SEQ ID NO: 515876 - DNA, 55 bp, Artificial
  Synthetic oligonucleotide
gatcggagtcgtgtcgcatgagcaaccctgagctgccggatggccatgtaggtca

SEQ ID NO: 515877 - DNA, 55 bp, Artificial
  Synthetic oligonucleotide
gacgtctgcgtcgatctattcgcaagcgccaccgctaattgttgtgccacaccga

SEQ ID NO: 515878 - DNA, 55 bp, Artificial
  Synthetic oligonucleotide
cgttgggttacattgttgtttcgtccaggatgcactctcgttcagtcgaaatctc

SEQ ID NO: 515879 - DNA, 55 bp, Artificial
  Synthetic oligonucleotide
cgtcgcatcctgcatggtacagcgttacgacgacaggagatcaggagggcggcac

SEQ ID NO: 515880 - DNA, 55 bp, Artificial
  Synthetic oligonucleotide
cgcttacgctcgcggagctacactcagccacgagtcactttgcaggacgcaccga

SEQ ID NO: 515881 - DNA, 55 bp, Artificial
  Synthetic oligonucleotide
cgcctgttgcctcgactcgataggagccagctcggcaatgtcaagcgcgacgaag

SEQ ID NO: 515882 - DNA, 55 bp, Artificial
  Synthetic oligonucleotide
cgattgacaaatccgctacctcatccatgcactaatgatttggcaacagcctgcg

SEQ ID NO: 515883 - DNA, 55 bp, Artificial
  Synthetic oligonucleotide
cctttcgtgcagtccgatgtttggaagtgcggtttccgtgtggtttgaagccgag

SEQ ID NO: 515884 - DNA, 55 bp, Artificial
  Synthetic oligonucleotide
ccccaccccgcctcctcactgtttggtgggtttgcttgtcacgatcgttcgttca

SEQ ID NO: 515885 - DNA, 54 bp, Artificial
  Synthetic oligonucleotide
gtaaggacggcctgctcgcttcaatgctgagatggaggatgtgggaactgatcg

SEQ ID NO: 515886 - DNA, 54 bp, Artificial
  Synthetic oligonucleotide
agcttccttttgcgcaacacgccgaatgccgagtgctatgttgccactcccgcc

SEQ ID NO: 515887 - DNA, 52 bp, Artificial
  Synthetic oligonucleotide
aatcttttccttggcgaaggtggagacggttgtgagagcatcctgcaacacc

SEQ ID NO: 515888 - DNA, 50 bp, Artificial
  Synthetic oligonucleotide
ccccgctagcatccataatactgagacgacttacatgagcttgaccacct

SEQ ID NO: 515889 - DNA, 60 bp, Artificial
  Synthetic oligonucleotide
ctatagaacttgctttgctcgaaattcgttttgattatgcatcttgtgccttcgatagtg

SEQ ID NO: 515890 - DNA, 58 bp, Artificial
  Synthetic oligonucleotide
cagaagtcctctaagagtgaatcaggaacgcctgtgtaaaatgttatgtcgttctatt

SEQ ID NO: 515891 - DNA, 55 bp, Artificial
  Synthetic oligonucleotide
tttaagagggatttctggagccctaaccagaagaagagagatcagggtttgagtc

SEQ ID NO: 515892 - DNA, 55 bp, Artificial
  Synthetic oligonucleotide
cagcctatagactaaaacacatgtcttcaggctgctatttgagcgtaatggacga

SEQ ID NO: 515893 - DNA, 55 bp, Artificial
  Synthetic oligonucleotide
cagtccaacctcctggcgcacaacctaattctaatacgcggtgtccttattttaa

SEQ ID NO: 515894 - DNA, 55 bp, Artificial
  Synthetic oligonucleotide
cccaagtagtgcacgagaatgtaaacctacatgtattgccttacatataaccctc

SEQ ID NO: 515895 - DNA, 55 bp, Artificial
  Synthetic oligonucleotide
tgtcagatcgatataatagagcgataagctcgacagttaatgagtatgtaatccc

SEQ ID NO: 515896 - DNA, 55 bp, Artificial
  Synthetic oligonucleotide
ctcctgcattaagtactgttacatcaaaatgtggtccttatgcactattaggtgg

SEQ ID NO: 515897 - DNA, 55 bp, Artificial
  Synthetic oligonucleotide
taacaccacccaaaactggagtagtaacaccacccaaaactggagtagtaacacc

SEQ ID NO: 515898 - DNA, 54 bp, Artificial
  Synthetic oligonucleotide
cccgcaaacactactcatcctttagtctaatctcacgttgtatcctaacccgtc

SEQ ID NO: 515899 - DNA, 54 bp, Artificial
  Synthetic oligonucleotide
cctgggcggactaagctatggcccaaatctagtgcttaacgagccaaatgagaa

SEQ ID NO: 515900 - DNA, 54 bp, Artificial
  Synthetic oligonucleotide
cttcttaggcaagcaccctaatcaacgcctgtgttaaccacaactccgtaatcg

SEQ ID NO: 515901 - DNA, 53 bp, Artificial
  Synthetic oligonucleotide
ttgccccacagagtactgttccggtaatataggctgggaaaccgtctatatgg

SEQ ID NO: 515902 - DNA, 53 bp, Artificial
  Synthetic oligonucleotide
accccatatcctacagctaaaaccgcgtgattaacatcgctgggttattaaga

SEQ ID NO: 515903 - DNA, 52 bp, Artificial
  Synthetic oligonucleotide
gttgataggttgaagtgaccgagcttatcgtatgccaaagagtcagctccac

SEQ ID NO: 515904 - DNA, 51 bp, Artificial
  Synthetic oligonucleotide
ctaatcccctaacatagatttccggtacacttaatagccgaaatctgtacc

SEQ ID NO: 515905 - DNA, 50 bp, Artificial
  Synthetic oligonucleotide
agctccagccccacccgaagtaccatgtgctttactaatgataggattac

SEQ ID NO: 515906 - DNA, 55 bp, Artificial
  Synthetic oligonucleotide
ttggtggcggatttctcctgggcctagcaactgaccatcgcatagctacgttatc

SEQ ID NO: 515907 - DNA, 55 bp, Artificial
  Synthetic oligonucleotide
tcggaaacggcggaagttcgatcgtcacggcagagttgggtctatagtccaacgc

SEQ ID NO: 515908 - DNA, 55 bp, Artificial
  Synthetic oligonucleotide
tcgacccctggcgtacaatttgccacagcggacctccaaggacgccgcaaagagg

SEQ ID NO: 515909 - DNA, 55 bp, Artificial
  Synthetic oligonucleotide
tccttttggccacgagctatcgttgtgttttgcacaggtaaagttgaagtcgcgt

SEQ ID NO: 515910 - DNA, 55 bp, Artificial
  Synthetic oligonucleotide
ggaaccggtcgcgtagcgaggctctcgattcacatacacgctcgttcgcgccact

SEQ ID NO: 515911 - DNA, 55 bp, Artificial
  Synthetic oligonucleotide
gcgaaacgtttctatcaatgcccgaacgtctcgttttgaggcgttttgagccccg

SEQ ID NO: 515912 - DNA, 55 bp, Artificial
  Synthetic oligonucleotide
gagtaaccttgggagagcccatgcggtttcgttctaacaaagagcgccgcagtgc

SEQ ID NO: 515913 - DNA, 55 bp, Artificial
  Synthetic oligonucleotide
gaggcgagggactggcgtgaggtttaaactattcctgcgaaactcccgcccgggg

SEQ ID NO: 515914 - DNA, 55 bp, Artificial
  Synthetic oligonucleotide
gaggatttccagttggcaatgcatctctctcgagactgtacgttggagacggggc

SEQ ID NO: 515915 - DNA, 55 bp, Artificial
  Synthetic oligonucleotide
ccgcccacgagccccgacagatagtccatagctcacttcaaggtgggtagctcgc

SEQ ID NO: 515916 - DNA, 55 bp, Artificial
  Synthetic oligonucleotide
cccctccacgaccaactgtggctacgctagaccccaagtacaacgacccggcatt

SEQ ID NO: 515917 - DNA, 55 bp, Artificial
  Synthetic oligonucleotide
cactctgatgtggccactcgtcattccggcttctctcaggcagctccgtgttgcc

SEQ ID NO: 515918 - DNA, 55 bp, Artificial
  Synthetic oligonucleotide
actgatgttgccgcgtttctcgcttgttccgaaccggcccctgcactagcgcgag

SEQ ID NO: 515919 - DNA, 53 bp, Artificial
  Synthetic oligonucleotide
ggcgcgccttcggactacgaatcgaccgacctaagactaaaacgcgagcctcg

SEQ ID NO: 515920 - DNA, 53 bp, Artificial
  Synthetic oligonucleotide
tacgtgctctcgctcagtggcagaatcgaggaaggcggcaacgcaaaacattg

SEQ ID NO: 515921 - DNA, 50 bp, Artificial
  Synthetic oligonucleotide
cgctcttttacaggtacatcgcgcccaacttttcacggcaacgttgcgac

SEQ ID NO: 515922 - DNA, 50 bp, Artificial
  Synthetic oligonucleotide
gtcttcggcgcgcttcacctgtagccgcttgagttcaagttgaatttcaa

SEQ ID NO: 515923 - DNA, 60 bp, Artificial
  Synthetic oligonucleotide
taccagcacaacaactcgggcttcgtggggtacatgggccccaccatgcgcgagggtcag

SEQ ID NO: 515924 - DNA, 60 bp, Artificial
  Synthetic oligonucleotide
taccgccttggcgcacacagcactcggcactcaacggctcactcgcaccacacactcggc

SEQ ID NO: 515925 - DNA, 60 bp, Artificial
  Synthetic oligonucleotide
aacaggtggtacctttggacttgtccgcgaaacgcccccgtcattaaagtttaacgagcc

SEQ ID NO: 515926 - DNA, 60 bp, Artificial
  Synthetic oligonucleotide
aaccggtcctgctggggcggggagctgaaaacggccgttaagaccaactgcccgaacgtg

SEQ ID NO: 515927 - DNA, 60 bp, Artificial
  Synthetic oligonucleotide
aacgctcgcgctcgcgtaaacaacctcccggcacgcacttcctcgtacctcccggtacga

SEQ ID NO: 515928 - DNA, 60 bp, Artificial
  Synthetic oligonucleotide
cgaaaaactgaataatgcggaagttgggttaatcgttaatttttacggtagggtggaata

SEQ ID NO: 515929 - DNA, 60 bp, Artificial
  Synthetic oligonucleotide
ttaagttatgtgccaataaagttaatgattaacgatgtgaactttgtctgtttattcaaa

SEQ ID NO: 515930 - DNA, 60 bp, Artificial
  Synthetic oligonucleotide
ttaacgagcctccgcccttaagttatgtgccaataaagttaatgattaacgatgtgaact

SEQ ID NO: 515931 - DNA, 60 bp, Artificial
  Synthetic oligonucleotide
atggtagctctccttaccgccttggcgcacacagcactcgacactcaacggctcactcgc

SEQ ID NO: 515932 - DNA, 60 bp, Artificial
  Synthetic oligonucleotide
ccggcaggggacggtgctgggatttgagctggctcgccagggctatgacccggcggttga

SEQ ID NO: 515933 - DNA, 60 bp, Artificial
  Synthetic oligonucleotide
ctggatctgcctcctctgcgtcaagaccacgggtcccgtgagcttgaacctgaaagagag

SEQ ID NO: 515934 - DNA, 60 bp, Artificial
  Synthetic oligonucleotide
acatctgcatcactgccgccagttccactgcttcgcccgggaggcgcacagcttcatcta

SEQ ID NO: 515935 - DNA, 58 bp, Artificial
  Synthetic oligonucleotide
tcttcgttcacctctcgtcaggcctacctgacgctccagagctcgtcttcccgtcctc

SEQ ID NO: 515936 - DNA, 56 bp, Artificial
  Synthetic oligonucleotide
gcacctgcactaacgaactaattctgtggcttgccaacggcagcgtctgcaaagcc

SEQ ID NO: 515937 - DNA, 56 bp, Artificial
  Synthetic oligonucleotide
catcatcttatattaccccaaaaagtgacgcacctcgttttccgaccgtttgtcgc

SEQ ID NO: 515938 - DNA, 56 bp, Artificial
  Synthetic oligonucleotide
ccaggactccggcatgtacaaatccgagtacgacctggaccaaaggaactcctacc

SEQ ID NO: 515939 - DNA, 55 bp, Artificial
  Synthetic oligonucleotide
gcggatcccggtttcggtacagagttcacggcgccgcaccctatagcccaggtat

SEQ ID NO: 515940 - DNA, 55 bp, Artificial
  Synthetic oligonucleotide
gcgctgcgaaccttggctacatgtggttattggcaacgcagatggacgtgggacc

SEQ ID NO: 515941 - DNA, 55 bp, Artificial
  Synthetic oligonucleotide
gcgacgaggaatgcggttaggtaaggggcggtgggtatataaggggctgcacccg

SEQ ID NO: 515942 - DNA, 55 bp, Artificial
  Synthetic oligonucleotide
gcccctcagaacgcaaagtataagtggtacgatatagccgtacccgaagggaatt

SEQ ID NO: 515943 - DNA, 55 bp, Artificial
  Synthetic oligonucleotide
gcggttctttatgctgaggatgtgaacttagaagcaccagacacccacttggtgt

SEQ ID NO: 515944 - DNA, 55 bp, Artificial
  Synthetic oligonucleotide
gccccacgccggggtattatggtgagaatctgtctctgcacgatctgtacgattt

SEQ ID NO: 515945 - DNA, 55 bp, Artificial
  Synthetic oligonucleotide
gccaccgagggacctgagcgagtccgcattgaccggatcggaaaacctctcgaga

SEQ ID NO: 515946 - DNA, 55 bp, Artificial
  Synthetic oligonucleotide
gcgtgcgtcttcgtttcgtaactgcaccacgctgcggccccaccggttctgaatc

SEQ ID NO: 515947 - DNA, 55 bp, Artificial
  Synthetic oligonucleotide
gctcctaccggcacaacgagcgttcccagtttacctgcaaacaagctgacgtccc

SEQ ID NO: 515948 - DNA, 55 bp, Artificial
  Synthetic oligonucleotide
gccaagtgtggcagatcttgcggtacacttcgaaggactgcggcataaaatcaaa

SEQ ID NO: 515949 - DNA, 55 bp, Artificial
  Synthetic oligonucleotide
gcagtggagcccaccgcatgcgtcatcaagcaaaccgccatcctggcccaattgc

SEQ ID NO: 515950 - DNA, 55 bp, Artificial
  Synthetic oligonucleotide
gctgagcccgtgctctgacagggcccagtctgcaagatgagggttggaagcaacg

SEQ ID NO: 515951 - DNA, 55 bp, Artificial
  Synthetic oligonucleotide
gcagggcgcacatatcacacgtgaggaccagccagtgcccaaaagtgcccctaat

SEQ ID NO: 515952 - DNA, 55 bp, Artificial
  Synthetic oligonucleotide
ggacaaacagtattggaactttagaaacggggactccactaacggtcaaccatac

SEQ ID NO: 515953 - DNA, 55 bp, Artificial
  Synthetic oligonucleotide
cgttgacgtggtggtttcgctacgtggcgctatcacgcgaaagggctcaaagtcc

SEQ ID NO: 515954 - DNA, 55 bp, Artificial
  Synthetic oligonucleotide
ctcttcgcggtctttccagtactcttggatcggaaacccgtcggcctccgaacgg

SEQ ID NO: 515955 - DNA, 55 bp, Artificial
  Synthetic oligonucleotide
ctgccgccagttccactgcttcgcccgggaggcgcacagcttcatctactttgtg

SEQ ID NO: 515956 - DNA, 55 bp, Artificial
  Synthetic oligonucleotide
ctgcgcgggcataagcgcgcggggactgagcaaatgcacatagacagcctgcgat

SEQ ID NO: 515957 - DNA, 55 bp, Artificial
  Synthetic oligonucleotide
ctgctctttcatcacggggtagccgtgcctcgcaacgttctacattactaccgtc

SEQ ID NO: 515958 - DNA, 55 bp, Artificial
  Synthetic oligonucleotide
ctggagcatgaattccagcacggggacatgcacttacagtgcaagtttggatttg

SEQ ID NO: 515959 - DNA, 55 bp, Artificial
  Synthetic oligonucleotide
ctggtctcctaccttggaattttgcacgaaaaccgccttgggcaaaacgtgcttc

SEQ ID NO: 515960 - DNA, 55 bp, Artificial
  Synthetic oligonucleotide
ctgttttgtgtgttcgcagatgggcgatacggactactgggagctggtccagaaa

SEQ ID NO: 515961 - DNA, 55 bp, Artificial
  Synthetic oligonucleotide
cttaggtgttatattccacacggtctcctgtcgagccaaacgttcatcagtgatg

SEQ ID NO: 515962 - DNA, 55 bp, Artificial
  Synthetic oligonucleotide
ctttccggggttcatctctaaagaccgaatgagctgtgctatagtcaacactgcc

SEQ ID NO: 515963 - DNA, 55 bp, Artificial
  Synthetic oligonucleotide
cttttgataacaaaaccacgtgcgtccccagctcgcctccttgcgtcgtcgccaa

SEQ ID NO: 515964 - DNA, 55 bp, Artificial
  Synthetic oligonucleotide
gaactttggttgtttattcaaaggggattacctgggaggtataaagggagcggct

SEQ ID NO: 515965 - DNA, 55 bp, Artificial
  Synthetic oligonucleotide
gagagcggtgtttctccttcttcagtcgtgttttcaccgatgtggagagcacact

SEQ ID NO: 515966 - DNA, 55 bp, Artificial
  Synthetic oligonucleotide
gaggtggctctggatgttgagatacatgggcataagcccgtctctgggatggagg

SEQ ID NO: 515967 - DNA, 55 bp, Artificial
  Synthetic oligonucleotide
gagtgctggcgagaagagttttctcctgtcgcgctgtcgccatgaagacttgggg

SEQ ID NO: 515968 - DNA, 55 bp, Artificial
  Synthetic oligonucleotide
gcacaggtaacatgggtgtccttgctggtcaggcatcgcagttgaacgctgttgt

SEQ ID NO: 515969 - DNA, 55 bp, Artificial
  Synthetic oligonucleotide
gcaccactatcggcactgatggcagtctgactctcaacatccgggcgcccctgca

SEQ ID NO: 515970 - DNA, 55 bp, Artificial
  Synthetic oligonucleotide
tacgcgtcccaccgcgactttataaatcgtctgatggactatttccagcgagccg

SEQ ID NO: 515971 - DNA, 55 bp, Artificial
  Synthetic oligonucleotide
tagacggaacagaagcggggagatgagcggctccgctccgtagcacggcggacaa

SEQ ID NO: 515972 - DNA, 55 bp, Artificial
  Synthetic oligonucleotide
tagcgaatcggtggacggctacgattgatgacggatggtgaagccgaccgagtgc

SEQ ID NO: 515973 - DNA, 55 bp, Artificial
  Synthetic oligonucleotide
taggctgccggccgctaacctggtagatacttttgtcaatgtgggtgctcgctgg

SEQ ID NO: 515974 - DNA, 55 bp, Artificial
  Synthetic oligonucleotide
tatcttgaagtcgcagttggggcctccgccctgcgcgcgcgagttgcgatacaca

SEQ ID NO: 515975 - DNA, 55 bp, Artificial
  Synthetic oligonucleotide
tatttatggtgacgtccgcggccatggtgaacggttacatcaacgtacaactgcc

SEQ ID NO: 515976 - DNA, 55 bp, Artificial
  Synthetic oligonucleotide
tccctggcacgcatgaccacctgcgctagctctaggtctacccatcgggaacagg

SEQ ID NO: 515977 - DNA, 55 bp, Artificial
  Synthetic oligonucleotide
tctaccttaccaacacaacaactcgggcttcgtggggtacatgggccccaccatg

SEQ ID NO: 515978 - DNA, 55 bp, Artificial
  Synthetic oligonucleotide
tctggaacccaccctgaagatggagtactctgagggccccgtgcaccgccccata

SEQ ID NO: 515979 - DNA, 55 bp, Artificial
  Synthetic oligonucleotide
tgagacagtcgcggaggacccgttcccagagggtttcgaaaacgtgcgcggggtt

SEQ ID NO: 515980 - DNA, 55 bp, Artificial
  Synthetic oligonucleotide
tggttaagcaggcaaaagttacctacgagaaggaccacagcaaccaccggcttag

SEQ ID NO: 515981 - DNA, 55 bp, Artificial
  Synthetic oligonucleotide
tgtaaagagacggggcgggctcggcagcgggaccacgctgtacgccagctggcag

SEQ ID NO: 515982 - DNA, 55 bp, Artificial
  Synthetic oligonucleotide
tgtcctcgggatccctcactctcacccaaacaccacccctcaccgttacctcggg

SEQ ID NO: 515983 - DNA, 55 bp, Artificial
  Synthetic oligonucleotide
tgttacccaaggaactaccagttcagaagcattattagcgcaacaagctgctccc

SEQ ID NO: 515984 - DNA, 55 bp, Artificial
  Synthetic oligonucleotide
ttacctataactacccattcaacagtctctgtcaaagctccggtcgcaaacccca

SEQ ID NO: 515985 - DNA, 55 bp, Artificial
  Synthetic oligonucleotide
ttactataaccctgctgcgcgggcataagcgcgcgggaactcagcaaatgcacat

SEQ ID NO: 515986 - DNA, 55 bp, Artificial
  Synthetic oligonucleotide
ttcctctctgctgttgcccgagtacgccttgcatccctccatcgtgcccaccccg

SEQ ID NO: 515987 - DNA, 55 bp, Artificial
  Synthetic oligonucleotide
ttttcgcctcgtgtgccgcccaaacgtcagcccaatggcacctgtgagcccaacc

SEQ ID NO: 515988 - DNA, 55 bp, Artificial
  Synthetic oligonucleotide
ggcaaagcacgtaggaattgctgttaagttaatttccaaacaccgctgaagcagc

SEQ ID NO: 515989 - DNA, 55 bp, Artificial
  Synthetic oligonucleotide
ggcacccatagcggcagactccagcggcgtccggttgaaatacgacaccacacac

SEQ ID NO: 515990 - DNA, 55 bp, Artificial
  Synthetic oligonucleotide
ggcaggtacataggtcgctcctcgccctactcctctcagagtataaaacgtctgc

SEQ ID NO: 515991 - DNA, 55 bp, Artificial
  Synthetic oligonucleotide
ggcggagatgactgacggcctagatttagaaatggacggaattatcaccgagcag

SEQ ID NO: 515992 - DNA, 55 bp, Artificial
  Synthetic oligonucleotide
ggcgtcctaaaatggtgcctgctatcctgagacgcccgacatcacctgtgaccag

SEQ ID NO: 515993 - DNA, 55 bp, Artificial
  Synthetic oligonucleotide
ggcttagacaaattttcggcgtcttttccgggtttatgtccccggtcacctttat

SEQ ID NO: 515994 - DNA, 55 bp, Artificial
  Synthetic oligonucleotide
ggcttctcagctaaatgccgtggtggacctccaggacagaaacacagagctgtcc

SEQ ID NO: 515995 - DNA, 55 bp, Artificial
  Synthetic oligonucleotide
ggggcatttcaccatggatctgcgagtggagttgcaaacttttgagagtacccgg

SEQ ID NO: 515996 - DNA, 55 bp, Artificial
  Synthetic oligonucleotide
ggggtgcttggcatggacggggtggttatcatgaatgtgaggtttactggcccca

SEQ ID NO: 515997 - DNA, 55 bp, Artificial
  Synthetic oligonucleotide
ggggtttagctggtaatcgaggtgggcggtaggcagcgtgagattcttgtactgg

SEQ ID NO: 515998 - DNA, 55 bp, Artificial
  Synthetic oligonucleotide
gggtatgtggaaccaagcggtagaggaggctaccgtggcggtatacgccgacgta

SEQ ID NO: 515999 - DNA, 55 bp, Artificial
  Synthetic oligonucleotide
ggtataaaaggggcggccgggtgtcccttcctcagttaccgcagggatgagtggg

SEQ ID NO: 516000 - DNA, 55 bp, Artificial
  Synthetic oligonucleotide
ggttggttagggcctgggcgactattgttagggttgcagcacataaagaccatgg

SEQ ID NO: 516001 - DNA, 55 bp, Artificial
  Synthetic oligonucleotide
gtagccccgatgtaagcttgttgcatgggcggcgatataaaatgcaaggtgctgc

SEQ ID NO: 516002 - DNA, 55 bp, Artificial
  Synthetic oligonucleotide
gtctcacggcctcacggtcgaccccaatctgcaccagctcaaggtagacgtgaac

SEQ ID NO: 516003 - DNA, 55 bp, Artificial
  Synthetic oligonucleotide
gtgggactggctgttgactggccccttaccgctacggacaagctccgcctacaaa

SEQ ID NO: 516004 - DNA, 55 bp, Artificial
  Synthetic oligonucleotide
taatgactatctctcggcggctaatatgttgtatcccatcccgcctaacgccacg

SEQ ID NO: 516005 - DNA, 55 bp, Artificial
  Synthetic oligonucleotide
tacatgggcccgaccatgcgcgaaggacagccatacccggccaactacccctatc

SEQ ID NO: 516006 - DNA, 55 bp, Artificial
  Synthetic oligonucleotide
cccgccgaagcggattcaaaaggaggggttaaatacagcagcatttgccgccaaa

SEQ ID NO: 516007 - DNA, 55 bp, Artificial
  Synthetic oligonucleotide
cccgcaggaggtggacgaatggctgcgttccgaatactgccccactcctggctat

SEQ ID NO: 516008 - DNA, 55 bp, Artificial
  Synthetic oligonucleotide
cccgcaccaggtgcagaccctgcgaatgtggcggtaaacatattaggaaccagcc

SEQ ID NO: 516009 - DNA, 55 bp, Artificial
  Synthetic oligonucleotide
ccccttcaccttacggacgacaacgctttaacccttaacgctacggctcccttgc

SEQ ID NO: 516010 - DNA, 55 bp, Artificial
  Synthetic oligonucleotide
cccctcagaatggtctggctctgattccaaagttaacgtttatgctcaggctgcg

SEQ ID NO: 516011 - DNA, 55 bp, Artificial
  Synthetic oligonucleotide
ccccgtcattaaagtttaacgagcctccgcccttaagttatgtgccaataaagtt

SEQ ID NO: 516012 - DNA, 55 bp, Artificial
  Synthetic oligonucleotide
ccccgccctgggttctggtttcgatccctattttgtctactcgggcaccattccc

SEQ ID NO: 516013 - DNA, 55 bp, Artificial
  Synthetic oligonucleotide
cccattaagtaccgcgaatgccctccgccgctttggggtcactgctaccttctgc

SEQ ID NO: 516014 - DNA, 55 bp, Artificial
  Synthetic oligonucleotide
ccagcctaatggaagaagtgtcatggtatgttgagttactttggaatgataggcc

SEQ ID NO: 516015 - DNA, 55 bp, Artificial
  Synthetic oligonucleotide
ccaccttttcaccgcacagaggtagaatacctgtgtacttttctaacgctacctc

SEQ ID NO: 516016 - DNA, 55 bp, Artificial
  Synthetic oligonucleotide
catcttggaacgctcgggaatcttgcccgccactagctgcgccctacccacagat

SEQ ID NO: 516017 - DNA, 55 bp, Artificial
  Synthetic oligonucleotide
cagtcaggtacttgcaactgtgtcagcactggctgtaaagggcagcctagctccc

SEQ ID NO: 516018 - DNA, 55 bp, Artificial
  Synthetic oligonucleotide
caggtttacctcgcatagccgggttagggcgcgggctaggtccaggtgatacctg

SEQ ID NO: 516019 - DNA, 55 bp, Artificial
  Synthetic oligonucleotide
caggacggacgctcccgcgttcgagaccgtgtgtcctcagtactggtacggttac

SEQ ID NO: 516020 - DNA, 55 bp, Artificial
  Synthetic oligonucleotide
cagcggatgacactatagccgatagaaccgaaattggttcagggaacatgtttgc

SEQ ID NO: 516021 - DNA, 55 bp, Artificial
  Synthetic oligonucleotide
cagcgctgcagacctaatattttgagaccctcggcccagcgtgtgtcatcccgga

SEQ ID NO: 516022 - DNA, 55 bp, Artificial
  Synthetic oligonucleotide
aacaggcccagctctcctaccacctcacctccatgggccaccagctctcctacgt

SEQ ID NO: 516023 - DNA, 55 bp, Artificial
  Synthetic oligonucleotide
aagcgagctcctagatgggaccagaaaagcaaggctcccggtaagaccccgcgca

SEQ ID NO: 516024 - DNA, 55 bp, Artificial
  Synthetic oligonucleotide
aatccccgtagttggcccgctgccctggtgtaccaggaaagtcccgctctcacca

SEQ ID NO: 516025 - DNA, 55 bp, Artificial
  Synthetic oligonucleotide
acccacactgattattacacgcatactcggagctatgctaaccagcgtagccccg

SEQ ID NO: 516026 - DNA, 55 bp, Artificial
  Synthetic oligonucleotide
acccggaggaggttgatctgtactgccacgaagacggttttccaccgagcgactg

SEQ ID NO: 516027 - DNA, 55 bp, Artificial
  Synthetic oligonucleotide
actggcccgactcacccatggaccggaaccccaccatgaacttgctgacgggagt

SEQ ID NO: 516028 - DNA, 55 bp, Artificial; identical to SEQ ID NO: 322526
  Synthetic oligonucleotide

SEQ ID NO: 516029 - DNA, 55 bp, Artificial
  Synthetic oligonucleotide
atctcctcccagagaatggtctgcgccatagtcaacacggccggcagggagaccg

SEQ ID NO: 516030 - DNA, 55 bp, Artificial
  Synthetic oligonucleotide
attaaaattttatggccgcaaaggtcaatatgaggccacacgtcatcatttcccg

SEQ ID NO: 516031 - DNA, 55 bp, Artificial
  Synthetic oligonucleotide
attgttctactgggtatttaaaccggccggccacgtcaagaggccactcttgagt

SEQ ID NO: 516032 - DNA, 55 bp, Artificial
  Synthetic oligonucleotide
caaatactagacaaggacacgcttggcccgctaattggccatatccaatcattgg

SEQ ID NO: 516033 - DNA, 55 bp, Artificial
  Synthetic oligonucleotide
caccgaatcctactttaacattgggaacaagtttagaaatcctaccgtcgccccg

SEQ ID NO: 516034 - DNA, 55 bp, Artificial
  Synthetic oligonucleotide
cacgctggacataaacattacctcttttggcatgttataattcaccacctcccgg

SEQ ID NO: 516035 - DNA, 55 bp, Artificial
  Synthetic oligonucleotide
cactgaattgtcttatcagcttatgttagactccattggggatagaagtcgctat

SEQ ID NO: 516036 - DNA, 55 bp, Artificial
  Synthetic oligonucleotide
cactgcttcgcccgggaggcgcacagcttcatctactttgtgattcccgaggacc

SEQ ID NO: 516037 - DNA, 55 bp, Artificial
  Synthetic oligonucleotide
cagacatattcttaggtgttatattccacacggtttcctgtcgagccaaacgctc

SEQ ID NO: 516038 - DNA, 55 bp, Artificial
  Synthetic oligonucleotide
cagcactcggcactcaacggctcactcgcaccacacactcggcacctgccctata

SEQ ID NO: 516039 - DNA, 55 bp, Artificial
  Synthetic oligonucleotide
cgttagagtaaccctgctgcgcgggcataagcgcgcgggcactcaataagtgcac

SEQ ID NO: 516040 - DNA, 55 bp, Artificial
  Synthetic oligonucleotide
cgtgctagcggggcaggcttctcagctaaatgccgtggtggacctccaggacaga

SEQ ID NO: 516041 - DNA, 55 bp, Artificial
  Synthetic oligonucleotide
cggttgaggtcctggatctgcctcctctgcgtcaagaccacgggtcccgtgagct

SEQ ID NO: 516042 - DNA, 55 bp, Artificial
  Synthetic oligonucleotide
cgggtttggcagggcgaaggtcacatcgttaaagagtatctttcccgcgcgaggc

SEQ ID NO: 516043 - DNA, 55 bp, Artificial
  Synthetic oligonucleotide
cggagttacaaactcaggtttctccacgcctacgggcgtgtaggggcggaatcga

SEQ ID NO: 516044 - DNA, 55 bp, Artificial
  Synthetic oligonucleotide
cggacccgcaccctctgcagctaggaatgaaaccccgcagcatgtcgggaaccgg

SEQ ID NO: 516045 - DNA, 55 bp, Artificial
  Synthetic oligonucleotide
cgctgaagaacttcctaccaccttttcaccgcacagaggtagaatacctgtgtac

SEQ ID NO: 516046 - DNA, 55 bp, Artificial
  Synthetic oligonucleotide
cgcgttaatgatttactttagtcaatgtataacgtatactcctcctatagggagg

SEQ ID NO: 516047 - DNA, 55 bp, Artificial
  Synthetic oligonucleotide
cgcgtctcgcttgtacatagccacgaaaacccgaataaagatcgcaacgaccgaa

SEQ ID NO: 516048 - DNA, 55 bp, Artificial
  Synthetic oligonucleotide
cgcgggtctctgtctcaaaaggaggtaggcgatccctactgtacggagtgcgccg

SEQ ID NO: 516049 - DNA, 55 bp, Artificial
  Synthetic oligonucleotide
cgccttccgcaatgtgcaaaataacggagtggatgaacttattgacggctttagc

SEQ ID NO: 516050 - DNA, 55 bp, Artificial
  Synthetic oligonucleotide
cgccgagacaaccgagatcgtgttggtcgtagtgtcatgccaaatggaacgccgg

SEQ ID NO: 516051 - DNA, 55 bp, Artificial
  Synthetic oligonucleotide
cgcaggaaaagtgctttgtcaaagactctctgaaaccaacctggttttgccaccc

SEQ ID NO: 516052 - DNA, 55 bp, Artificial
  Synthetic oligonucleotide
ccttcgatgatgccgcagtggtcttacatgcacatctcgggccaggacgcctcgg

SEQ ID NO: 516053 - DNA, 55 bp, Artificial
  Synthetic oligonucleotide
ccttcagaagggttgaggtagagccactgcagactttcgtggggaggtaaggtgt

SEQ ID NO: 516054 - DNA, 55 bp, Artificial
  Synthetic oligonucleotide
cctgcccgccggctatacactgcagggaaccgggactggaacaatgacagtggag

SEQ ID NO: 516055 - DNA, 55 bp, Artificial
  Synthetic oligonucleotide
cctccggtttgcacaagcgggccaataagtaccttacctggtactttaacggctc

SEQ ID NO: 516056 - DNA, 55 bp, Artificial
  Synthetic oligonucleotide
ccgctcactggcctgtaaccccgaacttctcagcgaaagtcagctaattggcact

SEQ ID NO: 516057 - DNA, 55 bp, Artificial
  Synthetic oligonucleotide
ccctgctagtggagcgggagcggggtccctgtgttctaaccgtggtttgcaactg

SEQ ID NO: 516058 - DNA, 55 bp, Artificial
  Synthetic oligonucleotide
ccgggtacggtcaaaggtccccattttatgactccacgtcagctgatcgctaggg

SEQ ID NO: 516059 - DNA, 55 bp, Artificial
  Synthetic oligonucleotide
ccgtacacctttcgctacaggtaacgcggtgtaagaagcctagcggtatggccgg

SEQ ID NO: 516060 - DNA, 55 bp, Artificial
  Synthetic oligonucleotide
ccgtccttttacgccagccaccggccgtttattaaccgcctgatggactacttgc

SEQ ID NO: 516061 - DNA, 54 bp, Artificial
  Synthetic oligonucleotide
gcgtagctaggaaatctagcggtagaagcaagaagcctatgcggggtggatttt

SEQ ID NO: 516062 - DNA, 54 bp, Artificial
  Synthetic oligonucleotide
agccatcaactactcgatgctgagcctgggcaagttttacgcgcgcaaaatcta

SEQ ID NO: 516063 - DNA, 54 bp, Artificial
  Synthetic oligonucleotide
tcctatcagcttatgctagactccattggggaccgcagccggtacttttccatg

SEQ ID NO: 516064 - DNA, 54 bp, Artificial
  Synthetic oligonucleotide
atcggggcaatccccggcatcgcatcagtggccattcaggcggcccacaacaaa

SEQ ID NO: 516065 - DNA, 54 bp, Artificial
  Synthetic oligonucleotide
cacctccggcttaaccctttatttcccggaaccctcagatgctgtgccgtctga

SEQ ID NO: 516066 - DNA, 53 bp, Artificial
  Synthetic oligonucleotide
agcacggggacatgcacttacagtgcaagtttggatttgaacagattaaaacc

SEQ ID NO: 516067 - DNA, 53 bp, Artificial
  Synthetic oligonucleotide
aacgttgcactacacctttcgccagggctacgtgcgtcaggcctgcaagatct

SEQ ID NO: 516068 - DNA, 52 bp, Artificial
  Synthetic oligonucleotide
aaacgaccttagagttgacggggctagcattaagtttgacagcatttgtctt

SEQ ID NO: 516069 - DNA, 52 bp, Artificial
  Synthetic oligonucleotide
tttccgttaaagtgggcgcgggactcaggtttgatagcaacggcgccattgc

SEQ ID NO: 516070 - DNA, 52 bp, Artificial
  Synthetic oligonucleotide
aaacgtgcccgcagtttgagcagagcaagcattttagcgcgtagagttttgg

SEQ ID NO: 516071 - DNA, 52 bp, Artificial
  Synthetic oligonucleotide
cggcaaccgggtgtggaactccagcacggggcagatgctgagggacaagcta

SEQ ID NO: 516072 - DNA, 52 bp, Artificial
  Synthetic oligonucleotide
tcacgcaacagagcacttgaaaagagggcgacagactcagcaacgtagcccc

SEQ ID NO: 516073 - DNA, 52 bp, Artificial
  Synthetic oligonucleotide
cttcagtagactgcacagtctcccagaagtctcctgacttaagcacatcatc

SEQ ID NO: 516074 - DNA, 52 bp, Artificial
  Synthetic oligonucleotide
atgtatccttgttacggttcttttgcaaggcctactaatcagcaaggagggc

SEQ ID NO: 516075 - DNA, 52 bp, Artificial
  Synthetic oligonucleotide
cgcttgcagaggagggtcatgcggcaggggtgtccgttggagccgtagataa

SEQ ID NO: 516076 - DNA, 52 bp, Artificial
  Synthetic oligonucleotide
aagcacatcgtagtcatgctcatgcagataaaggcaggtaagttccggaacc

SEQ ID NO: 516077 - DNA, 52 bp, Artificial
  Synthetic oligonucleotide
taatcgtatagttcgtgcgagggagcaaggaggtcgggaccgaggttgctac

SEQ ID NO: 516078 - DNA, 52 bp, Artificial
  Synthetic oligonucleotide
aagaatcacccaggggcgtgctctcgctccgtctcggtgaggggctttctgt

SEQ ID NO: 516079 - DNA, 51 bp, Artificial
  Synthetic oligonucleotide
aagctctggagccataacacaacagagcacttgaaaagagggtgacaagct

SEQ ID NO: 516080 - DNA, 51 bp, Artificial
  Synthetic oligonucleotide
ttacaaagcggttaagctgggatgggtgcatacgtggggatatgagatgca

SEQ ID NO: 516081 - DNA, 51 bp, Artificial
  Synthetic oligonucleotide
cgtggagactcgcccaggtgtttttctcaggtgttttccgcgttccgggtc

SEQ ID NO: 516082 - DNA, 51 bp, Artificial
  Synthetic oligonucleotide
tgaacttccagggtggggtgtttagcccctatctgacatctcggcttcctc

SEQ ID NO: 516083 - DNA, 51 bp, Artificial
  Synthetic oligonucleotide
ccgctgctttcacgcacatggtagccacgggagagctcttattggggcgag

SEQ ID NO: 516084 - DNA, 51 bp, Artificial
  Synthetic oligonucleotide
agctgtagggtgtccctgaccatgaagcggacgaagagggagcgcaggtcc

SEQ ID NO: 516085 - DNA, 51 bp, Artificial
  Synthetic oligonucleotide
cccctggaggtcggccaagtagcaacgaagcatgagctcatagctaaggga

SEQ ID NO: 516086 - DNA, 51 bp, Artificial
  Synthetic oligonucleotide
caaagcgcccgtcttggctcctaaaaccttctaccactggctaacctacac

SEQ ID NO: 516087 - DNA, 51 bp, Artificial
  Synthetic oligonucleotide
taaagcagccatgccaagcgcttaccgtgccaagagcgactcagacgaaaa

SEQ ID NO: 516088 - DNA, 51 bp, Artificial
  Synthetic oligonucleotide
gcatttgaaggtggtcgcgaaaggtcctaaactggcgacctatggccattt

SEQ ID NO: 516089 - DNA, 51 bp, Artificial
  Synthetic oligonucleotide
cctccaaaagggactgccggactttatcagtcagagcatgctgcacaactt

SEQ ID NO: 516090 - DNA, 51 bp, Artificial
  Synthetic oligonucleotide
gatcggaaaacctctcgagaaaggcgtctaaccagtcacagtcgcaaggta

SEQ ID NO: 516091 - DNA, 50 bp, Artificial
  Synthetic oligonucleotide
ctactggccgcgtggtaaaagtttgaatataatctacaacaggagctggt

SEQ ID NO: 516092 - DNA, 50 bp, Artificial
  Synthetic oligonucleotide
ttaagcataacatggtgtgtggcaactgcgaggacagggcctctcagatg

SEQ ID NO: 516093 - DNA, 50 bp, Artificial
  Synthetic oligonucleotide
taatgaacatggggtgctaatgaatcattctggtttggatccccaatact

SEQ ID NO: 516094 - DNA, 50 bp, Artificial
  Synthetic oligonucleotide
cttgccggcccgcggcataaagttgcgtgtgacgcggaagggtccgggca

SEQ ID NO: 516095 - DNA, 50 bp, Artificial
  Synthetic oligonucleotide
cctcccgtaactgggccgcttttcgagggtggagcttcacccgtttgaaa

SEQ ID NO: 516096 - DNA, 55 bp, Artificial
  Synthetic oligonucleotide
tttcagccctgtagcatagattctgaccatggcatagaggatcttgagagccttg

SEQ ID NO: 516097 - DNA, 55 bp, Artificial
  Synthetic oligonucleotide
ttgtcctcgtcacgggagcctggtcaaacctccgtcccaaccggttctcgctgca

SEQ ID NO: 516098 - DNA, 55 bp, Artificial
  Synthetic oligonucleotide
ttcaaaggacggtcaaagtacgctgctgtggtcgtggacaagagtctgggtagct

SEQ ID NO: 516099 - DNA, 55 bp, Artificial
  Synthetic oligonucleotide
tcctgcggaagattatgattcgaagggtgaaatatcgagcctagtgatgccgggg

SEQ ID NO: 516100 - DNA, 55 bp, Artificial
  Synthetic oligonucleotide
gtgcaggccagcttaggcccctttatagccctattagggttggatttccagagcc

SEQ ID NO: 516101 - DNA, 55 bp, Artificial
  Synthetic oligonucleotide
gtcccctgtctcccgtcaccgtgaagtagcccatgtctgggtacttgtccacccg

SEQ ID NO: 516102 - DNA, 55 bp, Artificial
  Synthetic oligonucleotide
gtcaggcttcacagccagtgtgtggcctccagtgagctccatctcgaacgcaccc

SEQ ID NO: 516103 - DNA, 55 bp, Artificial
  Synthetic oligonucleotide
gggttccggagacactggagtgcctcttcaggcgtacgacgatctgacttctctg

SEQ ID NO: 516104 - DNA, 55 bp, Artificial
  Synthetic oligonucleotide
ggcgacagcgtctagttctgtaccgtgagccgagactccctgaacgtcgcatacg

SEQ ID NO: 516105 - DNA, 55 bp, Artificial
  Synthetic oligonucleotide
gcctaggcccggcatctcatatatagcagtcaaaacaaatgtgagtggggtggga

SEQ ID NO: 516106 - DNA, 55 bp, Artificial
  Synthetic oligonucleotide
gccatcccttctccacggcacccggtacgcaacgcgtatagtcttggtgtatggg

SEQ ID NO: 516107 - DNA, 55 bp, Artificial
  Synthetic oligonucleotide
gattcccagatcatgcttgcacagaggggccacttcagacagctggacttggact

SEQ ID NO: 516108 - DNA, 55 bp, Artificial
  Synthetic oligonucleotide
cttcggggtctttcgggcgccggcgttagtgaggggttcatcgctccgggatttt

SEQ ID NO: 516109 - DNA, 55 bp, Artificial
  Synthetic oligonucleotide
ctctgctcagcacggtgtgtaaaacttgggtggtttccatcggagattcctttcc

SEQ ID NO: 516110 - DNA, 55 bp, Artificial
  Synthetic oligonucleotide
cgtaagcgttagtagagatgggtactggatcaacaaggttaagcaggcggtatcc

SEQ ID NO: 516111 - DNA, 55 bp, Artificial
  Synthetic oligonucleotide
cggataacgctgggtcgctcggatagcgatcacatgcaatggtgtagcccgtgca

SEQ ID NO: 516112 - DNA, 55 bp, Artificial
  Synthetic oligonucleotide
atcgctggggaagttccgtcagttgaagagccacacacaaacgtgttgcccacgg

SEQ ID NO: 516113 - DNA, 55 bp, Artificial
  Synthetic oligonucleotide
agacgggcgctatgctggcaaacgacttgagccatttggataggtacatgacggg

SEQ ID NO: 516114 - DNA, 55 bp, Artificial
  Synthetic oligonucleotide
acgctactcagcttgagtgcagggtcaacatccatcacaaacagcctacgcttag

SEQ ID NO: 516115 - DNA, 55 bp, Artificial
  Synthetic oligonucleotide
aaaggtagggttaacacactaccggggtacgggttagcgaagcacctaccacccc

SEQ ID NO: 516116 - DNA, 53 bp, Artificial
  Synthetic oligonucleotide
gccgtcatgaacaagctctttagcatgtacaagaagttgctgcacaagaacgg

SEQ ID NO: 516117 - DNA, 52 bp, Artificial
  Synthetic oligonucleotide
cccctccgctctctatgtactcgttgatgtgatcgtagtcaaacaggacctc

SEQ ID NO: 516118 - DNA, 51 bp, Artificial
  Synthetic oligonucleotide
ctagacaccatggtcaggagttccaccttgtcgcaatcctcacccgtcaga

SEQ ID NO: 516119 - DNA, 51 bp, Artificial
  Synthetic oligonucleotide
gtgcgtgtgtaatgcgtaccaatatagaccacgccccttggcacctcccac

SEQ ID NO: 516120 - DNA, 50 bp, Artificial
  Synthetic oligonucleotide
gtacccagactccgacgggtcgtctggaatatggaccaggctcccttgat

SEQ ID NO: 516121 - DNA, 60 bp, Artificial
  Synthetic oligonucleotide
gccccacatgaacacctacgctttcaagaccttcgaaagagctctgattgagccagtcga

SEQ ID NO: 516122 - DNA, 60 bp, Artificial
  Synthetic oligonucleotide
gcggacatgttccgtgtgccaacgagcacggcattcattggggacacactacatttcctc

SEQ ID NO: 516123 - DNA, 60 bp, Artificial
  Synthetic oligonucleotide
cagtattgctagcggtagtgataggagtaggactagcggtagttactaaccagctaacta

SEQ ID NO: 516124 - DNA, 60 bp, Artificial
  Synthetic oligonucleotide
cagacaacaatctcatctggcccattacccactaccgcacactcccaaaatccaaaagca

SEQ ID NO: 516125 - DNA, 60 bp, Artificial
  Synthetic oligonucleotide
cactgacggcagggtgacaagaggacacatcacctccaacgtgaactcactcaactacct

SEQ ID NO: 516126 - DNA, 60 bp, Artificial
  Synthetic oligonucleotide
ggcgtgctaagtgttacgccagcgacgtcaagaacggcagaactggccttcttacaagac

SEQ ID NO: 516127 - DNA, 60 bp, Artificial
  Synthetic oligonucleotide
caccgaaagagactttcaaaaccttcgaaaaagcgctcatccagaacagcgcccctgtgg

SEQ ID NO: 516128 - DNA, 60 bp, Artificial
  Synthetic oligonucleotide
caagttttgccggtactacctgaatgccacacatcgcaacccgagaaaccttgccaacgc

SEQ ID NO: 516129 - DNA, 60 bp, Artificial
  Synthetic oligonucleotide
ggcttaattactgctacaagtgtgggcaccctctctacttaaataaacctcacacctgcc

SEQ ID NO: 516130 - DNA, 60 bp, Artificial
  Synthetic oligonucleotide
gagattgagccacgcgatgtggcccggtacccccccgagacagtgcttaagaggttcacc

SEQ ID NO: 516131 - DNA, 60 bp, Artificial
  Synthetic oligonucleotide
agtgcagaacccaccaagtcaccgttagggagctggttaagttcgctggaaaagtcgaaa

SEQ ID NO: 516132 - DNA, 60 bp, Artificial
  Synthetic oligonucleotide
agtacggcccagacaactgtctcatatggcccatcacgcattacagagaattgcccagaa

SEQ ID NO: 516133 - DNA, 60 bp, Artificial
  Synthetic oligonucleotide
agctttacgcctcctggctattggctaagcacaacaaagaccttgcggacgtggccagaa

SEQ ID NO: 516134 - DNA, 60 bp, Artificial
  Synthetic oligonucleotide
agctaagaaccagagaaatggccactattaggggtgccatcgaacgcattacagacacca

SEQ ID NO: 516135 - DNA, 60 bp, Artificial
  Synthetic oligonucleotide
gaaccggggacatggccactattaggggtgccatcgatcgtatcacagacaccaccgtac

SEQ ID NO: 516136 - DNA, 60 bp, Artificial
  Synthetic oligonucleotide
cggggtatctcgacgtcattgacgagtacttggccggacccatacccgaaacctgccact

SEQ ID NO: 516137 - DNA, 60 bp, Artificial
  Synthetic oligonucleotide
gttcggagaacggaaatttgaacagctgatgaaagcactaaactggcaaacattcacctt

SEQ ID NO: 516138 - DNA, 60 bp, Artificial
  Synthetic oligonucleotide
tcaccggtcactaactccatagctaaccctaaacagaccgaggctatcgggaaagcttgg

SEQ ID NO: 516139 - DNA, 60 bp, Artificial
  Synthetic oligonucleotide
acatggccccacaggcgtggaaagaaacgatggacttcatagcagagaacgcagaaagga

SEQ ID NO: 516140 - DNA, 60 bp, Artificial
  Synthetic oligonucleotide
ctcaatccagtggtcgagcgaaacgccctagctggtgttgtccgagacttctgcccattg

SEQ ID NO: 516141 - DNA, 60 bp, Artificial
  Synthetic oligonucleotide
acacgaacggcttacatcagtgacacactccactttatggaccgtagagacctagtccga

SEQ ID NO: 516142 - DNA, 60 bp, Artificial
  Synthetic oligonucleotide
ctctacgcctcactcgagctagcgtgccgcactgacaacaaggaaaacgtagcgcaatca

SEQ ID NO: 516143 - DNA, 59 bp, Artificial
  Synthetic oligonucleotide
cgaagactgctatgacaaagacgtaaccgtggccacggtgaaccttacaggtaatgcca

SEQ ID NO: 516144 - DNA, 59 bp, Artificial
  Synthetic oligonucleotide
caggaccgattaggtttctaaccgaaaatcctgttagtgccagagcggctcacttccta

SEQ ID NO: 516145 - DNA, 56 bp, Artificial
  Synthetic oligonucleotide
acacttgtggtgtgccccactaacgagctcagaagagactggatagacaagctgcc

SEQ ID NO: 516146 - DNA, 55 bp, Artificial
  Synthetic oligonucleotide
gatggcaactccgcgcacattgaaaactgcagtaaccagccagagctcccggagc

SEQ ID NO: 516147 - DNA, 55 bp, Artificial
  Synthetic oligonucleotide
gagatttacatcggtttgacccgccactctaaccaccttctcatactcactccgg

SEQ ID NO: 516148 - DNA, 55 bp, Artificial
  Synthetic oligonucleotide
gcccagggaccccaactgcccgatacccgcaatccaatcgaccaagctgcctcta

SEQ ID NO: 516149 - DNA, 55 bp, Artificial
  Synthetic oligonucleotide
ctcatgagctttgactacacagatccaaccttccgtaattaccccttcccgcact

SEQ ID NO: 516150 - DNA, 55 bp, Artificial
  Synthetic oligonucleotide
gccggatacacgagaacgtcgagtacatcttcgctgaccccatccaataccttgg

SEQ ID NO: 516151 - DNA, 55 bp, Artificial
  Synthetic oligonucleotide
ggccacgttgctcacacttacgcagggtgccaagggctgactgctcccaaaatcc

SEQ ID NO: 516152 - DNA, 55 bp, Artificial
  Synthetic oligonucleotide
ggctggacgtaggccacatacactggcgcggaccagacaataaggacgttcaact

SEQ ID NO: 516153 - DNA, 55 bp, Artificial
  Synthetic oligonucleotide
gggccccacttttgacgcaaacactgagtgctccatcgcttataaccacaccagg

SEQ ID NO: 516154 - DNA, 55 bp, Artificial
  Synthetic oligonucleotide
ggttaagagtgggaaagattaaaggacccaccaccaccataacttgccaacttct

SEQ ID NO: 516155 - DNA, 55 bp, Artificial
  Synthetic oligonucleotide
gtactccgattggaaattcgaaacctccgaatttatgccagatgaggcccggccc

SEQ ID NO: 516156 - DNA, 55 bp, Artificial
  Synthetic oligonucleotide
gtcaggtatccaatcaggatgctgcgactcattccgggaataacacgcctgaaca

SEQ ID NO: 516157 - DNA, 55 bp, Artificial
  Synthetic oligonucleotide
gtttgaagtaatcaaagccaagcactacggagtacccgcggacatcatcgagggg

SEQ ID NO: 516158 - DNA, 55 bp, Artificial
  Synthetic oligonucleotide
taagaccttcgaaaaagctcttgtgcaaaacagcgcccccgtagtcataatggac

SEQ ID NO: 516159 - DNA, 55 bp, Artificial
  Synthetic oligonucleotide
ttcgagctcattaaggccaaataccactcaatccccgaggagattatcgccgggt

SEQ ID NO: 516160 - DNA, 55 bp, Artificial
  Synthetic oligonucleotide
aagcgattgagaaccaattactctatgtagttggtaccttactcccaaaagagcg

SEQ ID NO: 516161 - DNA, 55 bp, Artificial
  Synthetic oligonucleotide
aagcttaggtattatcactaatccctatgccgtcaaactacacactcacggagca

SEQ ID NO: 516162 - DNA, 55 bp, Artificial
  Synthetic oligonucleotide
agatctacaggacgttgcgcgcaattacgcccttgacctccggatagcataccaa

SEQ ID NO: 516163 - DNA, 55 bp, Artificial
  Synthetic oligonucleotide
caataccactaaccctagctaacaaattactcctgtacgctaagtccattaacac

SEQ ID NO: 516164 - DNA, 55 bp, Artificial
  Synthetic oligonucleotide
cactaggcacagctcaaggctgaacgtagtttcagatgccgctgacagcgccacc

SEQ ID NO: 516165 - DNA, 55 bp, Artificial
  Synthetic oligonucleotide
cattagagattgcacaactaaccgcacatccttaacctttagatggcaggcgcgc

SEQ ID NO: 516166 - DNA, 55 bp, Artificial
  Synthetic oligonucleotide
ccaggaggacatggaggagccgcatacttccacacttacgacaccctaacctggc

SEQ ID NO: 516167 - DNA, 55 bp, Artificial
  Synthetic oligonucleotide
cccagccaaatcgtgggcaccccaccaggagagagcaaactcacacgccagatgc

SEQ ID NO: 516168 - DNA, 55 bp, Artificial
  Synthetic oligonucleotide
cccgctctgcaccattcatcctggagtagagtacgtcctcgcagatcccatccaa

SEQ ID NO: 516169 - DNA, 55 bp, Artificial
  Synthetic oligonucleotide
ccgaaattatgatcaactgcgagaccaaccaaacccaaatcggaacatgggtgcg

SEQ ID NO: 516170 - DNA, 55 bp, Artificial
  Synthetic oligonucleotide
cctacccatacggcatacatcagcgacacactacattttatggataggaaggact

SEQ ID NO: 516171 - DNA, 55 bp, Artificial
  Synthetic oligonucleotide
cgaactgaacagagatactctgacaaaagagatctacattgccctaaccagacac

SEQ ID NO: 516172 - DNA, 55 bp, Artificial
  Synthetic oligonucleotide
ctcaagtcggcagtgcaccctcactcaccctacttccaccaaactaacaccgccg

SEQ ID NO: 516173 - DNA, 55 bp, Artificial
  Synthetic oligonucleotide
ctcagactctgggaacaccagactgccccactctggacggagcttacataaggcc

SEQ ID NO: 516174 - DNA, 54 bp, Artificial
  Synthetic oligonucleotide
tgtgaaaattgccaacgctccaggaaatggcacggacctcacgatggaccacgt

SEQ ID NO: 516175 - DNA, 54 bp, Artificial
  Synthetic oligonucleotide
agaggggcaaggaaagttgcaagatctagtcaacccaattaagacatgggtttc

SEQ ID NO: 516176 - DNA, 54 bp, Artificial
  Synthetic oligonucleotide
tcccactgggttccatcgggctaaccgttccactaacttaaagtgtgctaaggt

SEQ ID NO: 516177 - DNA, 53 bp, Artificial
  Synthetic oligonucleotide
ccgaactccctgagaaacatgcgcgcgagctctacgacaatcaccacgggcac

SEQ ID NO: 516178 - DNA, 53 bp, Artificial; identical to SEQ ID NO: 396240
  Synthetic oligonucleotide

SEQ ID NO: 516179 - DNA, 53 bp, Artificial
  Synthetic oligonucleotide
atattcagcggtcaactcgaaggcactgttctcccgcttaccccactctgcaa

SEQ ID NO: 516180 - DNA, 53 bp, Artificial
  Synthetic oligonucleotide
agccaaggacgaaaccctcttctggaaaactatcgacgctcgaatcaaaatca

SEQ ID NO: 516181 - DNA, 53 bp, Artificial
  Synthetic oligonucleotide
tacctctcttagtccctcacacatcatgataaactgcgagaccaaccctaccc

SEQ ID NO: 516182 - DNA, 52 bp, Artificial
  Synthetic oligonucleotide
aaccggctaaaccggtttaaaacttaacacaaactcgaactcatgagcttcg

SEQ ID NO: 516183 - DNA, 52 bp, Artificial
  Synthetic oligonucleotide
tgttcctaaattacaaagatgccatggggttaccacaagaccccataccctt

SEQ ID NO: 516184 - DNA, 52 bp, Artificial
  Synthetic oligonucleotide
atctggagtcaactcttacgaccaaatgctggggctctcagcatgggaagca

SEQ ID NO: 516185 - DNA, 50 bp, Artificial
  Synthetic oligonucleotide
aacttcatgagcccaccagattggcacatcgaagcactcaaccggaacgt

SEQ ID NO: 516186 - DNA, 50 bp, Artificial
  Synthetic oligonucleotide
agcggagctaaagaccatccaaacatacaacccatacgcacaaaccaagg

SEQ ID NO: 516187 - DNA, 50 bp, Artificial
  Synthetic oligonucleotide
cctcctcccagaaatgcacatcttggtcccctcactactgaagaaggcca

SEQ ID NO: 516188 - DNA, 60 bp, Artificial
  Synthetic oligonucleotide
ccctgcccagacatttttaacccaggcaccggcaccttccgaacctgggtcagaaaccct

SEQ ID NO: 516189 - DNA, 60 bp, Artificial
  Synthetic oligonucleotide
ccgaatggctgagtttatgccgccagcggtagacagaactgtctagcgactgggcgggtg

SEQ ID NO: 516190 - DNA, 60 bp, Artificial
  Synthetic oligonucleotide
cctaccgcatttcagcatttaatccgagagtaatgagaagggtagtaatccaaggatggt

SEQ ID NO: 516191 - DNA, 60 bp, Artificial
  Synthetic oligonucleotide
ttcaatgaacacatgaagtggagaaatatgtggtcaaaatccaacgatgggatggactta

SEQ ID NO: 516192 - DNA, 60 bp, Artificial
  Synthetic oligonucleotide
cctggtcggattacccgttggctggatatttgccgtctgtctcatcatctgttttgtcca

SEQ ID NO: 516193 - DNA, 60 bp, Artificial
  Synthetic oligonucleotide
ccttatgggggaggcatgaccaccacaaaattcactctcagaatcctgtatgacgaacac

SEQ ID NO: 516194 - DNA, 60 bp, Artificial
  Synthetic oligonucleotide
cgacggtaccaaccaaaacgtaaactaccaagtacaaagtggtaaggagaaaaacatata

SEQ ID NO: 516195 - DNA, 60 bp, Artificial
  Synthetic oligonucleotide
ttaggtgggttaccgcactaactccctgccaagtgaaactcggggacgagtgagtacggg

SEQ ID NO: 516196 - DNA, 60 bp, Artificial
  Synthetic oligonucleotide
cggagtctatttttttattctacgtggacttcaaaatggcggcgggtcacaatatggcgg

SEQ ID NO: 516197 - DNA, 60 bp, Artificial
  Synthetic oligonucleotide
ctgcccctacacatcaataacataaaccagatacatatccgatcccaaataaaaagacaa

SEQ ID NO: 516198 - DNA, 60 bp, Artificial
  Synthetic oligonucleotide
cttagatgatgagagcagtatgctagcactatttggacctatgatgttaaaaagaaacat

SEQ ID NO: 516199 - DNA, 60 bp, Artificial
  Synthetic oligonucleotide
gaaggactgctagaatcatccagtggcatccacccactcggagattctgcactataaaag

SEQ ID NO: 516200 - DNA, 60 bp, Artificial
  Synthetic oligonucleotide
tggctaagtcacaaaatggcggcgcggcagggataccaaatggcggcgtagcgggggggg

SEQ ID NO: 516201 - DNA, 60 bp, Artificial
  Synthetic oligonucleotide
gacttctaaatggtttttacaaagagaactagcacaaatgccacttttcagactcactgt

SEQ ID NO: 516202 - DNA, 60 bp, Artificial
  Synthetic oligonucleotide
gcaacgaaagtgagtggggccagacttcgccataaggcctttatcttcttgccattggtc

SEQ ID NO: 516203 - DNA, 60 bp, Artificial
  Synthetic oligonucleotide
gcatgtgacctgcaatttccgttcggctcaccactaactgacaacccttgcgtcaacttc

SEQ ID NO: 516204 - DNA, 60 bp, Artificial
  Synthetic oligonucleotide
tgccaaaagcacaggagacggggcagttaacataaacactagagtagttataaaatgccc

SEQ ID NO: 516205 - DNA, 60 bp, Artificial
  Synthetic oligonucleotide
tggcaaccctttgctgcacaaagggagattactagccaaagttcctatagggacatattg

SEQ ID NO: 516206 - DNA, 60 bp, Artificial
  Synthetic oligonucleotide
tcctgatataagtaagtgtacttccgaatggctgagttttccacgcccgtccgcagcgag

SEQ ID NO: 516207 - DNA, 60 bp, Artificial
  Synthetic oligonucleotide
tccgagttgccattggactcaggagctgtgaatcagtaacgaaagtgagtagggccagac

SEQ ID NO: 516208 - DNA, 60 bp, Artificial
  Synthetic oligonucleotide
tcatccagtggcatccacccactaggagattctgcactataaaaggcatctggccgctcc

SEQ ID NO: 516209 - DNA, 60 bp, Artificial
  Synthetic oligonucleotide
tacccacgctacggccgtcgcagacttcgacctaggcggtatagaagatcttatcgccgc

SEQ ID NO: 516210 - DNA, 60 bp, Artificial
  Synthetic oligonucleotide
tacacttccgggttcatgaggctcaatttggctcgcttcgctcgcaccacgtttgctgcc

SEQ ID NO: 516211 - DNA, 60 bp, Artificial
  Synthetic oligonucleotide
taaaatgcccctatacaattcccatgctagcagacaactctaatgaaaaccagggctatg

SEQ ID NO: 516212 - DNA, 60 bp, Artificial
  Synthetic oligonucleotide
gtggggaggccacggagaggagcgatttgaaacagccattggagaccccaaaaccattcc

SEQ ID NO: 516213 - DNA, 60 bp, Artificial
  Synthetic oligonucleotide
gtgctgcgggctcgcgagaggccaataactacaagcgcaattcggggggggcgcattcga

SEQ ID NO: 516214 - DNA, 60 bp, Artificial
  Synthetic oligonucleotide
gtgcagatacacacacaacctcctttcctagacacagaactaacagggcccagcatacac

SEQ ID NO: 516215 - DNA, 60 bp, Artificial
  Synthetic oligonucleotide
gggctctttggccacgcaagtattaagagaatgtcagaggaatcagcaactcctacactt

SEQ ID NO: 516216 - DNA, 60 bp, Artificial
  Synthetic oligonucleotide
ggatacccaccaaactttagatataataatcagaatgcaaacagaagtgaccactttaga

SEQ ID NO: 516217 - DNA, 60 bp, Artificial
  Synthetic oligonucleotide
ggaatatgactatgatgggcttgttcgaacagatactctccgacgaatgctacaatactc

SEQ ID NO: 516218 - DNA, 60 bp, Artificial
  Synthetic oligonucleotide
gcgcattcgagggggaccacattgggcatgcgcaactcgggagggggcgttaacatttgg

SEQ ID NO: 516219 - DNA, 60 bp, Artificial
  Synthetic oligonucleotide
gcgaccccctcccctgggaccaacttcttcggagtcgcgcgctacgcctttggctgcgcg

SEQ ID NO: 516220 - DNA, 60 bp, Artificial
  Synthetic oligonucleotide
gccattggtcagtaaacgagggttgccatagacttcgggctccagttttagggcttccgg

SEQ ID NO: 516221 - DNA, 60 bp, Artificial
  Synthetic oligonucleotide
actctggctaagctcacaaaattatcctccacttcaaaaccaaggttcagaatatcaatg

SEQ ID NO: 516222 - DNA, 60 bp, Artificial
  Synthetic oligonucleotide
agtagtctacaacccagcaaacgacaaaggagtgggcaacaaagtatgggtagactggtg

SEQ ID NO: 516223 - DNA, 60 bp, Artificial
  Synthetic oligonucleotide
atcaaactaggaaattcatcacaaggatccatatccacagccctactagcttggagtaat

SEQ ID NO: 516224 - DNA, 60 bp, Artificial
  Synthetic oligonucleotide
atgacgaacacctcaggtttatgaactactggactgtcagtaacgaagacttagacctgt

SEQ ID NO: 516225 - DNA, 60 bp, Artificial
  Synthetic oligonucleotide
acgacagatggggatatggtacatacttcgccacgatagacggcaggaagggagaaaaaa

SEQ ID NO: 516226 - DNA, 60 bp, Artificial
  Synthetic oligonucleotide
caaggatggtggccgctactacagtgcctaccgggacaggaacacctgagatacagacca

SEQ ID NO: 516227 - DNA, 60 bp, Artificial
  Synthetic oligonucleotide
accccgtcaccgtatcccccaatagtgacgactttgcagaggtacaagtccgaaaccctc

SEQ ID NO: 516228 - DNA, 60 bp, Artificial
  Synthetic oligonucleotide
acccccagtcagagctctgtgacacaaccctgctaaccgtctatgcaaccgcatgtgacc

SEQ ID NO: 516229 - DNA, 60 bp, Artificial
  Synthetic oligonucleotide
agacacgctagtgtctagcagcctgggcgggtgccggagctgagacgccagtcacagcgg

SEQ ID NO: 516230 - DNA, 60 bp, Artificial
  Synthetic oligonucleotide
aggcagtacactgttcacctgtcggtgtctacctctataagtcactaagcactccgagcg

SEQ ID NO: 516231 - DNA, 60 bp, Artificial
  Synthetic oligonucleotide
acatcgtgcacttcctgggcggggtttacgtcataatataactaagtgcacttccgaatg

SEQ ID NO: 516232 - DNA, 60 bp, Artificial
  Synthetic oligonucleotide
acagaaagctcgcaaactactaagaggtatgtggagaccccccactcaaaatgtctcagg

SEQ ID NO: 516233 - DNA, 60 bp, Artificial
  Synthetic oligonucleotide
tttctaagtccaagcaggctatccccagactttccaggcctataccaagaagtagtctac

SEQ ID NO: 516234 - DNA, 60 bp, Artificial
  Synthetic oligonucleotide
aaagaaacatacaactcacagataacacaggcacaacaatagcagatgaagatgcaaaag

SEQ ID NO: 516235 - DNA, 60 bp, Artificial
  Synthetic oligonucleotide
catggcgtcgctggcgggtaaggagatggcggcgttccgtcttccgtagaggtggacgta

SEQ ID NO: 516236 - DNA, 60 bp, Artificial
  Synthetic oligonucleotide
ccactctgtactttcagagacatcccactaaagactatattatcacctgggaccaagaca

SEQ ID NO: 516237 - DNA, 60 bp, Artificial
  Synthetic oligonucleotide
ccattatccattagtaggcccaaaagcttatctgttcccaacacgcttaccacaagtgtg

SEQ ID NO: 516238 - DNA, 60 bp, Artificial
  Synthetic oligonucleotide
tttggcggggctggcccccctgcacccccctgggtaaatcaaaaaatgggcgcccggcca

SEQ ID NO: 516239 - DNA, 60 bp, Artificial
  Synthetic oligonucleotide
agaaagacctgtgcaagcttccgctcctaacgatcggggcctctgcggctagcctgcggt

SEQ ID NO: 516240 - DNA, 60 bp, Artificial
  Synthetic oligonucleotide
agccaaactgatcatgggggggatgtgacccaataaagtctgttaaaccacaaacatcct

SEQ ID NO: 516241 - DNA, 59 bp, Artificial
  Synthetic oligonucleotide
ttggccatactacaatccttcatttgcatgtagactgaccaatactgttaacttcccct

SEQ ID NO: 516242 - DNA, 58 bp, Artificial
  Synthetic oligonucleotide
tccgaaagtttcgattactgcgaggaagagaaggaggaccaagcggcggaggaggcga

SEQ ID NO: 516243 - DNA, 58 bp, Artificial
  Synthetic oligonucleotide
ctaacacaatacatgcaatatgattatgtgaggcctaggcctgtagaatacggaggaa

SEQ ID NO: 516244 - DNA, 58 bp, Artificial
  Synthetic oligonucleotide
tcctacactttttacaggaccagcgggcaagcggccccgcagagataccagtgtccaa

SEQ ID NO: 516245 - DNA, 58 bp, Artificial
  Synthetic oligonucleotide
tgacgtttcagccgctcaattcaaacactctcaccccgccaaagcactattagaaagg

SEQ ID NO: 516246 - DNA, 58 bp, Artificial
  Synthetic oligonucleotide
tgggagccactctatgactatgtaaaatatgacccctttgggggaggcttcagtacta

SEQ ID NO: 516247 - DNA, 57 bp, Artificial
  Synthetic oligonucleotide
tatgccgccagcggtagacagaactgtctagcgactgggcgggtgccggaggatccc

SEQ ID NO: 516248 - DNA, 56 bp, Artificial
  Synthetic oligonucleotide
ggtgcgtatgctacaataaaaccttagacagatggagaagagcgcaggcttccact

SEQ ID NO: 516249 - DNA, 55 bp, Artificial
  Synthetic oligonucleotide
acatgcagataataccctatctctggtccccaaacagggtaaaccccggcctgga

SEQ ID NO: 516250 - DNA, 55 bp, Artificial
  Synthetic oligonucleotide
tgatgggcttgttcgaacagatactctccgacgaatgctacaatactccacggag

SEQ ID NO: 516251 - DNA, 55 bp, Artificial
  Synthetic oligonucleotide
gtcggtgtctacctctataagtcactaagcactccgagcgtcaacgaggagtgcg

SEQ ID NO: 516252 - DNA, 55 bp, Artificial
  Synthetic oligonucleotide
ggtggatttagaaacgcttggtggctagaaccgagaaatgacatgggagaaatga

SEQ ID NO: 516253 - DNA, 55 bp, Artificial
  Synthetic oligonucleotide
tgcacaaagggagattactagccaaagttcctatagggacatattggagtactgg

SEQ ID NO: 516254 - DNA, 55 bp, Artificial
  Synthetic oligonucleotide
cccagacatctatgtcctatgcataatctggtgggcagcagaatggtggaatgaa

SEQ ID NO: 516255 - DNA, 55 bp, Artificial
  Synthetic oligonucleotide
cccaggcaccggcaccttccgaacctgggtcagaaaccctctcgaggtacacaaa

SEQ ID NO: 516256 - DNA, 55 bp, Artificial
  Synthetic oligonucleotide
ccctatctctggtccccaaacagggtaaacccaggcctggatgtcacaggccact

SEQ ID NO: 516257 - DNA, 55 bp, Artificial
  Synthetic oligonucleotide
cataatggacttttatggctgggaggaggcatagatgtgactgtatggactcttt

SEQ ID NO: 516258 - DNA, 55 bp, Artificial
  Synthetic oligonucleotide
caggagctgtgaatcagtaacgaaagtgagtagggccagacttcgccataaggcc

SEQ ID NO: 516259 - DNA, 55 bp, Artificial
  Synthetic oligonucleotide
cacacaacctcctttcctagacacagaactaacagggcccagcatacacccaggc

SEQ ID NO: 516260 - DNA, 55 bp, Artificial
  Synthetic oligonucleotide
cacaaggatccatatccacagccctactagcttggagtaatatagggcgacacgg

SEQ ID NO: 516261 - DNA, 55 bp, Artificial
  Synthetic oligonucleotide
caagtccacccagagccgaaacatcgcagtgtgcgtttctcggaggagacaggcc

SEQ ID NO: 516262 - DNA, 55 bp, Artificial
  Synthetic oligonucleotide
cgttcggctcaccactaactgacaacccttgcgtcaacttccaggtgctaggttc

SEQ ID NO: 516263 - DNA, 55 bp, Artificial
  Synthetic oligonucleotide
ctcccacgggaatccgcgatccatgcgctgataacccagcctatcctgtgcccca

SEQ ID NO: 516264 - DNA, 55 bp, Artificial
  Synthetic oligonucleotide
ctgacgaggactttggaaaactaggactaccaaagagcccacacgacctagactt

SEQ ID NO: 516265 - DNA, 55 bp, Artificial
  Synthetic oligonucleotide
ctggctgacggctattgaaggctaccataacctcgactgccgctgcggtaactgg

SEQ ID NO: 516266 - DNA, 55 bp, Artificial
  Synthetic oligonucleotide
caaagagaactagcacaaatgccacttttcagactcactgtcacttggatagact

SEQ ID NO: 516267 - DNA, 55 bp, Artificial
  Synthetic oligonucleotide
atgaactactggactgtcagtaacgaagacttagacctgtgtagatacctagggg

SEQ ID NO: 516268 - DNA, 55 bp, Artificial
  Synthetic oligonucleotide
gccgctacttttggatatatgatagagggcctggaaatgcagtttatgttgccag

SEQ ID NO: 516269 - DNA, 55 bp, Artificial
  Synthetic oligonucleotide
ggccagacttcgccataaggcctttatcttcttgccattggtcagtaaacgaggg

SEQ ID NO: 516270 - DNA, 55 bp, Artificial
  Synthetic oligonucleotide
ggcccaaaagcttatctgttcccaacacgcttaccacaagtgtggaccaaacaag

SEQ ID NO: 516271 - DNA, 55 bp, Artificial
  Synthetic oligonucleotide
acttccgaatggctgagttttccacgcccgtccgcagcgagaagcgccaccgaag

SEQ ID NO: 516272 - DNA, 54 bp, Artificial
  Synthetic oligonucleotide
ttcaatggtggatttagaaacgcttggtggctagaaccgagaaatgacatggga

SEQ ID NO: 516273 - DNA, 54 bp, Artificial
  Synthetic oligonucleotide
tgagtaccaacctcccacgggaatccgcgatccatgcgctgataacccagccta

SEQ ID NO: 516274 - DNA, 54 bp, Artificial
  Synthetic oligonucleotide
tcggggacgagtgagtacgggacatcccgtgtaatggctacataactacccggc

SEQ ID NO: 516275 - DNA, 54 bp, Artificial
  Synthetic oligonucleotide
cgcccggccaggaaccaaaatggcggcgtagcgggggggggacccccccgcacc

SEQ ID NO: 516276 - DNA, 54 bp, Artificial
  Synthetic oligonucleotide
cctcttgcacataaccacaaactgacaacattgaccacaggaaactctgcaaaa

SEQ ID NO: 516277 - DNA, 54 bp, Artificial
  Synthetic oligonucleotide
aaacaccagtatgaagacaaaataaaagagtactgccagccctcagtaatgttg

SEQ ID NO: 516278 - DNA, 53 bp, Artificial
  Synthetic oligonucleotide
gactcactgtcacttggatagacttaacaagttactgggtggaaggccgcgga

SEQ ID NO: 516279 - DNA, 53 bp, Artificial
  Synthetic oligonucleotide
caaggccgtgggagtttcacttatcggtgtctgcttattaaggtcaccaagca

SEQ ID NO: 516280 - DNA, 53 bp, Artificial
  Synthetic oligonucleotide
actacccctggatgcctaaaccccccgaccagtttcgtgtaaccttcaaactg

SEQ ID NO: 516281 - DNA, 53 bp, Artificial
  Synthetic oligonucleotide
ttttaacccaggcaccggcaccttccgaacctgggtcagaaaccctctcgagg

SEQ ID NO: 516282 - DNA, 52 bp, Artificial
  Synthetic oligonucleotide
ttatcgccgcggcagaaaggtaaggagacggcgccgttatagaaggagaaaa

SEQ ID NO: 516283 - DNA, 52 bp, Artificial
  Synthetic oligonucleotide
ttcccatgctagcagacaactctaatgaaaaccagggctatgtaccttactc

SEQ ID NO: 516284 - DNA, 52 bp, Artificial
  Synthetic oligonucleotide
ttggagtaatatagggcgacacggaccttttatgatggccgaggaggacatt

SEQ ID NO: 516285 - DNA, 51 bp, Artificial
  Synthetic oligonucleotide
gacatcatatacaatccctttgtggacaaaggcataggcaacatggtctgg

SEQ ID NO: 516286 - DNA, 50 bp, Artificial
  Synthetic oligonucleotide
aactggaaatggggcggcaaccccatatctggacaggttgtcagaaaccc

SEQ ID NO: 516287 - DNA, 60 bp, Artificial
  Synthetic oligonucleotide
cgcactggggatccgcgtttcagtataaatcttccaaggttctactgaagttctacatct

SEQ ID NO: 516288 - DNA, 60 bp, Artificial
  Synthetic oligonucleotide
gcaagccaactatgagctaatctttctcccacaaagtaggtcaaagaaactgcgctctaa

SEQ ID NO: 516289 - DNA, 60 bp, Artificial
  Synthetic oligonucleotide
cgcaccggggatcctaggcattttggattgcgctttgttgtggtcctttgttatactcca

SEQ ID NO: 516290 - DNA, 60 bp, Artificial
  Synthetic oligonucleotide
gcaagccatgagagaatatcggcgtctagtgtctcagagggttcatccaagtctgtgtac

SEQ ID NO: 516291 - DNA, 60 bp, Artificial; identical to SEQ ID NO: 411906
  Synthetic oligonucleotide

SEQ ID NO: 516292 - DNA, 60 bp, Artificial
  Synthetic oligonucleotide
gctaatgcctgttctgctttccttagagtggaactaacaaggttatagtacaccagttcc

SEQ ID NO: 516293 - DNA, 60 bp, Artificial
  Synthetic oligonucleotide
cctggccctgtttgcacatgcatgcaacagtcaagctcggcatggtgccaaactggttgt

SEQ ID NO: 516294 - DNA, 60 bp, Artificial
  Synthetic oligonucleotide
gctcctcttatttcttcaagtgcctcatacaacatatggtactgaattggactattgtaa

SEQ ID NO: 516295 - DNA, 60 bp, Artificial
  Synthetic oligonucleotide
gctgagatgaaatgctttggcaacactgctgtggccaagtgtaaccagcaacatgatgag

SEQ ID NO: 516296 - DNA, 60 bp, Artificial
  Synthetic oligonucleotide
ggaatctattgctgtagctagatctgccgtcaactacaggaaccaatgtaatccctaccc

SEQ ID NO: 516297 - DNA, 60 bp, Artificial
  Synthetic oligonucleotide
ggactactacaagaggcaaggatcaactccactggctctaatggatatattgatgttctc

SEQ ID NO: 516298 - DNA, 60 bp, Artificial
  Synthetic oligonucleotide
ggcaatttccactggatcgtcatgcctaccctcaatgtccacccaggttggggcatttgg

SEQ ID NO: 516299 - DNA, 60 bp, Artificial
  Synthetic oligonucleotide
ggggaggtctcctcagtttaaaaactgtgttgtcccaaccgcgacctgttagatttgatc

SEQ ID NO: 516300 - DNA, 60 bp, Artificial
  Synthetic oligonucleotide
gggtcactatcaaccagctcactcaaccttctatcaaacaaagtgatttgatcatcactt

SEQ ID NO: 516301 - DNA, 60 bp, Artificial
  Synthetic oligonucleotide
ggtgccccaccctccaagtgtgtgtctttcggtatttactcatgtaaaagtatctaaata

SEQ ID NO: 516302 - DNA, 60 bp, Artificial; identical to SEQ ID NO: 21857
  Synthetic oligonucleotide

SEQ ID NO: 516303 - DNA, 60 bp, Artificial
  Synthetic oligonucleotide
ccaggattgctaactctgaaattccttttcaattcccctgaaagcagatccctcctgaac

SEQ ID NO: 516304 - DNA, 60 bp, Artificial
  Synthetic oligonucleotide
gtcaaggcaccagttttgtcctttacagttccagagtgtttgcatggaaggatgtctgag

SEQ ID NO: 516305 - DNA, 60 bp, Artificial
  Synthetic oligonucleotide
gtgccttgcttaaagcttcagaattactctctctatcactcaatctgcaatcttctatta

SEQ ID NO: 516306 - DNA, 60 bp, Artificial
  Synthetic oligonucleotide
gtgttatgaccattatttgtgcatgaattgtctgacactgcttcttacaatctccgatag

SEQ ID NO: 516307 - DNA, 60 bp, Artificial
  Synthetic oligonucleotide
gttgaagatttgagctcaaccagagagttgacggtctgatttaaactgcgaagcctctgt

SEQ ID NO: 516308 - DNA, 60 bp, Artificial
  Synthetic oligonucleotide
cattccgagtggatgtctattagcacacagaggtccaaaaactttatccttgggctccat

SEQ ID NO: 516309 - DNA, 60 bp, Artificial
  Synthetic oligonucleotide
gtttcaatttagccttgatataagacttcatcagtgcattgacgacaggaaatgggacct

SEQ ID NO: 516310 - DNA, 60 bp, Artificial
  Synthetic oligonucleotide
catgaaccagatccctttggtgggcttggcacttggggcttctatggtaccatttttggg

SEQ ID NO: 516311 - DNA, 60 bp, Artificial
  Synthetic oligonucleotide
catctctagaaggcttatgggcaccttcacttggactttatccgactcagccgggaatga

SEQ ID NO: 516312 - DNA, 60 bp, Artificial
  Synthetic oligonucleotide
catccagcatttgcaacaaaaattcaccatactccagttcatctagcaacccctcatccc

SEQ ID NO: 516313 - DNA, 60 bp, Artificial
  Synthetic oligonucleotide
catcattgggccccatttgctatgatccatactatagtttaagaacccttccctgacgtt

SEQ ID NO: 516314 - DNA, 60 bp, Artificial
  Synthetic oligonucleotide
cagtttgtggagaccataactgacagcacttgaattattaaaccttaggtaaacatttct

SEQ ID NO: 516315 - DNA, 60 bp, Artificial
  Synthetic oligonucleotide
taaactggtgtccctaaaacggaaccagtcagtcacctctttcagagggtctatgagggt

SEQ ID NO: 516316 - DNA, 60 bp, Artificial
  Synthetic oligonucleotide
tacaaactccttgttcaacaattgtgtcacaagtattaaatagttctgtaggatttttac

SEQ ID NO: 516317 - DNA, 60 bp, Artificial
  Synthetic oligonucleotide
ctgtacacaggtgtacaaagacaattacagattgaacagcattgaactcgatatgtccac

SEQ ID NO: 516318 - DNA, 60 bp, Artificial
  Synthetic oligonucleotide
ctgttggctcacgatagaaatggatatagtgcccatttgcaggttgcacaatggcgatct

SEQ ID NO: 516319 - DNA, 60 bp, Artificial
  Synthetic oligonucleotide
ctgggaagaccactgccaaatgtcgaggcctacacctatgggttacttatccctgatagc

SEQ ID NO: 516320 - DNA, 60 bp, Artificial
  Synthetic oligonucleotide
cttcaaccagtatgaagccatggcctgcgacttcgatagtgggaagataactgttcaata

SEQ ID NO: 516321 - DNA, 60 bp, Artificial
  Synthetic oligonucleotide
ctggcaacttgtggtcttctaggtttaatctcgtttctgttcctgtgcgggaggtcctgc

SEQ ID NO: 516322 - DNA, 60 bp, Artificial
  Synthetic oligonucleotide
ctgagtgtgatctgacattcaaatgccagatcctcagacaacccatagtgtgtgagactg

SEQ ID NO: 516323 - DNA, 60 bp, Artificial
  Synthetic oligonucleotide
cttgacgcctttttgaaactctctgagtctttagggagtctgaaaatatggatatattga

SEQ ID NO: 516324 - DNA, 60 bp, Artificial
  Synthetic oligonucleotide
cttgcacctgctttgacagccgcactcagactaaaattgtacccagagatgttaatggca

SEQ ID NO: 516325 - DNA, 60 bp, Artificial
  Synthetic oligonucleotide
ctctgtgttgtgttcacaaccattagcctcacaactatctaattctatgcatagagaaag

SEQ ID NO: 516326 - DNA, 60 bp, Artificial
  Synthetic oligonucleotide
cttggcatagtcccgaattggttgttcaataattcagggttcctaacatcccaaattttc

SEQ ID NO: 516327 - DNA, 60 bp, Artificial
  Synthetic oligonucleotide
ctttgaatctgctacatttatgtcagacctcccataaaacttcagaagttctttgatgtc

SEQ ID NO: 516328 - DNA, 60 bp, Artificial
  Synthetic oligonucleotide
ctccatctgtcatggaatgatgtttaccgaaccagttggttcatttctaggcataaatcc

SEQ ID NO: 516329 - DNA, 60 bp, Artificial; identical to SEQ ID NO: 390362
  Synthetic oligonucleotide

SEQ ID NO: 516330 - DNA, 60 bp, Artificial
  Synthetic oligonucleotide
ctcaccctgcttgtagcttttacaaagaatactaaatgccttctgtccttcacctgtgca

SEQ ID NO: 516331 - DNA, 60 bp, Artificial
  Synthetic oligonucleotide
gaatctttataaggctaacctggtcatcactggaggtataagtgacaggtatcacatcat

SEQ ID NO: 516332 - DNA, 60 bp, Artificial
  Synthetic oligonucleotide
gaatgtgacaggttacacgtgcattgccttacacaacaaaaatatgctcacccaccatag

SEQ ID NO: 516333 - DNA, 60 bp, Artificial
  Synthetic oligonucleotide
ctactctgaaatgcactcttgtttattgcctcagataggagcttttgtgcccccctagta

SEQ ID NO: 516334 - DNA, 60 bp, Artificial
  Synthetic oligonucleotide
ctacaggcttcatcaaaggatcagcaacatatcctaaccagcctaacatctcaaccattc

SEQ ID NO: 516335 - DNA, 60 bp, Artificial
  Synthetic oligonucleotide
ctacacagtaggcttctgcaacattaattggaacttcaacgaccttatgaagatgccatt

SEQ ID NO: 516336 - DNA, 60 bp, Artificial
  Synthetic oligonucleotide
ctaaggaaccgtagagatctgatgtgtgatgtaagattccctggcccatatcaaaccaag

SEQ ID NO: 516337 - DNA, 60 bp, Artificial
  Synthetic oligonucleotide
gacatagaaccttgacttgaattcagctgcgaacctgcctatgacactttttggactaat

SEQ ID NO: 516338 - DNA, 60 bp, Artificial
  Synthetic oligonucleotide
gaccaaaggggcttgtggactcttaacagcagaaaacacccactcccctaactcacaggc

SEQ ID NO: 516339 - DNA, 60 bp, Artificial
  Synthetic oligonucleotide
gaccacaaccagtgtaacctgactgattacttcaagaagtcccactttgatcatgtgctc

SEQ ID NO: 516340 - DNA, 60 bp, Artificial
  Synthetic oligonucleotide
cgtaaatttggaactcagtttgttctgaagtgtctttaccaacgatggtagcctttcctc

SEQ ID NO: 516341 - DNA, 60 bp, Artificial
  Synthetic oligonucleotide
gaggttctcataagggttcctgtcccctggtgcttcagatataaacatgcccagtgacct

SEQ ID NO: 516342 - DNA, 60 bp, Artificial
  Synthetic oligonucleotide
gataaggccatagttggcttaataaggtttccacactatcaatgtcctctagcgctccaa

SEQ ID NO: 516343 - DNA, 60 bp, Artificial
  Synthetic oligonucleotide
gatagtaatggcgggtgatgtcccaaactggtttgcaagatctgctgggctgattcccac

SEQ ID NO: 516344 - DNA, 60 bp, Artificial
  Synthetic oligonucleotide
gatggcattgaccgtgtgctggcttctagtacaattatagtcatgttggctctatcaata

SEQ ID NO: 516345 - DNA, 60 bp, Artificial
  Synthetic oligonucleotide
gattcctataataattatggtagtcgtggtttgttttgtttgcagctgggtaagaaagta

SEQ ID NO: 516346 - DNA, 60 bp, Artificial
  Synthetic oligonucleotide
cgcactggggatccgcgttttccagtatccatccgaagttctccattcaatagtgaggaa

SEQ ID NO: 516347 - DNA, 60 bp, Artificial
  Synthetic oligonucleotide
atcgattgggcagtttgcatactttaacagtgacaacgtgcggctttgtatgcgatttac

SEQ ID NO: 516348 - DNA, 60 bp, Artificial
  Synthetic oligonucleotide
atcaactaaatcactcaaccttttgtcgaacaaggtgatttggtcatcgcttgatgtgta

SEQ ID NO: 516349 - DNA, 60 bp, Artificial
  Synthetic oligonucleotide
ataatctcaagagatgcattatccatggctgcactccaggggccgcaccaagtgtgaggc

SEQ ID NO: 516350 - DNA, 60 bp, Artificial
  Synthetic oligonucleotide
agttgtaacatggaatccttcaactccatgacttgggaatatgttaatgcagtaggaaag

SEQ ID NO: 516351 - DNA, 60 bp, Artificial
  Synthetic oligonucleotide
tgcaaatggaccaagaaggctcagtccctcagaagcagggagcgatgtcttatgagggaa

SEQ ID NO: 516352 - DNA, 60 bp, Artificial
  Synthetic oligonucleotide
tgcgaagaggcagacaaatgggcaactgcaacggggcatccaagtctaaccagccagact

SEQ ID NO: 516353 - DNA, 60 bp, Artificial
  Synthetic oligonucleotide
tgctcagtcctccagggtctcgggctcaggtgtcccagatgcccagtccttgtaaagcat

SEQ ID NO: 516354 - DNA, 60 bp, Artificial
  Synthetic oligonucleotide
aggacttcactattaattcaacatcggtgaatcctagtgaggaggccgcagtaccattgc

SEQ ID NO: 516355 - DNA, 60 bp, Artificial; identical to SEQ ID NO: 21862
  Synthetic oligonucleotide

SEQ ID NO: 516356 - DNA, 60 bp, Artificial
  Synthetic oligonucleotide
agcctctgacatatgagtcattattgatcccactaaatctgattccagaggaatcacaca

SEQ ID NO: 516357 - DNA, 60 bp, Artificial
  Synthetic oligonucleotide
agcacagggaccgattatggctgggggcttgcaaatttctttagtgcaggcataacaaac

SEQ ID NO: 516358 - DNA, 60 bp, Artificial
  Synthetic oligonucleotide
tggttgctcttaatctgattgcactcatggctaacttgtaggggtcatccactattgatg

SEQ ID NO: 516359 - DNA, 60 bp, Artificial
  Synthetic oligonucleotide
tgtaatgaatctcattaagggacaggactcaactgcctctctacttaatgttgagacatc

SEQ ID NO: 516360 - DNA, 60 bp, Artificial
  Synthetic oligonucleotide
tgtgactcagtttgtacttagttttcctcatgaacccctcagtgatttggctaacagcac

SEQ ID NO: 516361 - DNA, 60 bp, Artificial
  Synthetic oligonucleotide
agagcccaaattccttgacgattcttcaagcactctagtgatcagttttgtgtctgagtc

SEQ ID NO: 516362 - DNA, 60 bp, Artificial
  Synthetic oligonucleotide
tgtgcttgtgcaagtcgggtgctgccagacacaggagaattgttcactggtgggctcccc

SEQ ID NO: 516363 - DNA, 60 bp, Artificial
  Synthetic oligonucleotide
actgcacagggtcagacccgaccccccggggggcccccatggggaccccccgtgggggaa

SEQ ID NO: 516364 - DNA, 60 bp, Artificial
  Synthetic oligonucleotide
actgaggcattaacaaacattcctgcatccagcaatgatatatcatttagagcttcaaac

SEQ ID NO: 516365 - DNA, 60 bp, Artificial
  Synthetic oligonucleotide
acctggtaggctttccaactcatagacacatacgtggtgaaccctgcccactaccccata

SEQ ID NO: 516366 - DNA, 60 bp, Artificial
  Synthetic oligonucleotide
acagcagacgtcagacctggttggacatcaagtaggtcagcaatgtccatcccatgagaa

SEQ ID NO: 516367 - DNA, 60 bp, Artificial
  Synthetic oligonucleotide
acaacttgagccactcaaccacagttgatgctgccaatcactgtggcacagtcgcaaatg

SEQ ID NO: 516368 - DNA, 60 bp, Artificial
  Synthetic oligonucleotide
acaaccaacgccctgttcttattgaacaaagaagagtcagaaattagagaccatgtagtt

SEQ ID NO: 516369 - DNA, 60 bp, Artificial
  Synthetic oligonucleotide
tgttagctccaatgttgcagttaattcatccaatccatagttgaaagttggtgtgtttat

SEQ ID NO: 516370 - DNA, 60 bp, Artificial
  Synthetic oligonucleotide
aataactcaagagactctcgctcatcaacagataggttctttgatttcaacttggaggtc

SEQ ID NO: 516371 - DNA, 60 bp, Artificial
  Synthetic oligonucleotide
aagcgcagtgatgtaatagtgtcatacaacttaacctgtgttatattacacaacaagaac

SEQ ID NO: 516372 - DNA, 60 bp, Artificial
  Synthetic oligonucleotide
aacatagtcatttaagttcatctggctagacataaacccatcctcaggaggtggtgaggg

SEQ ID NO: 516373 - DNA, 60 bp, Artificial
  Synthetic oligonucleotide
aacaatggtaggctagcaataaccagtgcaccatctaacaatgagtggtttccctcagac

SEQ ID NO: 516374 - DNA, 60 bp, Artificial
  Synthetic oligonucleotide
aacaaggatgttgagaagtcatggcctttaccacagaagcgttcacaaacataccctgat

SEQ ID NO: 516375 - DNA, 60 bp, Artificial
  Synthetic oligonucleotide
ttaagagttttgttgacaacaacacttttgttgctcgccaaatctagtgcggttgcacaa

SEQ ID NO: 516376 - DNA, 60 bp, Artificial
  Synthetic oligonucleotide
caatgtagggccagccttctcctgagagacacagtttgtataagagattctcatacgggt

SEQ ID NO: 516377 - DNA, 60 bp, Artificial
  Synthetic oligonucleotide
tcccctttcttcattcacttgtattttgatgttaagttctctctgtatggtcagtaaggt

SEQ ID NO: 516378 - DNA, 60 bp, Artificial
  Synthetic oligonucleotide
caaggcaccaaggctcctgcccacaaaggcagccctgaagaccagaatgatgagtcatat

SEQ ID NO: 516379 - DNA, 60 bp, Artificial
  Synthetic oligonucleotide
tccttccctgagactccaaaagcctttttatgtcgtctgccccttggcaagtaaggacca

SEQ ID NO: 516380 - DNA, 60 bp, Artificial
  Synthetic oligonucleotide
tcccccacatatagttctctatttgagccaacctgctccttataacttagtccaaatttc

SEQ ID NO: 516381 - DNA, 60 bp, Artificial
  Synthetic oligonucleotide
tcagagagggcatggttccaaactgattgttaagtaaggaggagtctttgacatcccaca

SEQ ID NO: 516382 - DNA, 60 bp, Artificial; identical to SEQ ID NO: 463481
  Synthetic oligonucleotide

SEQ ID NO: 516383 - DNA, 60 bp, Artificial
  Synthetic oligonucleotide
cactcctggaatttgagtatctgaggaagtcttagcctctttggaaaagaacctgtccaa

SEQ ID NO: 516384 - DNA, 60 bp, Artificial
  Synthetic oligonucleotide
tctcatgtgatccaatggcctcatcgaacaattcgttcatctccttgagatcattgttgt

SEQ ID NO: 516385 - DNA, 60 bp, Artificial
  Synthetic oligonucleotide
tctcctagtattgagtatgtgaagacttttgatcttgttcagcaatgacctccaggctgg

SEQ ID NO: 516386 - DNA, 60 bp, Artificial
  Synthetic oligonucleotide
cagagctgtgctagtgatgttaggtctgtagggattgcttttcagctcacctgtaacttt

SEQ ID NO: 516387 - DNA, 60 bp, Artificial
  Synthetic oligonucleotide
caaacagtcccctttcttcattcacttgtattttgatgttaagttctctctgtatggtca

SEQ ID NO: 516388 - DNA, 60 bp, Artificial
  Synthetic oligonucleotide
caggaggtgccccatataatagaggaagtgatgaacatagtcctcatcactctgtccctc

SEQ ID NO: 516389 - DNA, 60 bp, Artificial
  Synthetic oligonucleotide
taggaagactctctagtacggcactggtgagcccaggctgcacgctgaacaaatcttgga

SEQ ID NO: 516390 - DNA, 60 bp, Artificial
  Synthetic oligonucleotide
attattcagcctgttcggatcagctacgtcccaaatccttacaacccctggagacctcac

SEQ ID NO: 516391 - DNA, 60 bp, Artificial
  Synthetic oligonucleotide
attaattcaacatcggtgaatcctagtgaggaggccgcagtaccattgctgaatgtgaca

SEQ ID NO: 516392 - DNA, 60 bp, Artificial
  Synthetic oligonucleotide
atgtgtttgttcagacagttggacaccaaacacagaaagttcgtaatcaaaagtagttca

SEQ ID NO: 516393 - DNA, 60 bp, Artificial
  Synthetic oligonucleotide
atgggggattgcaggtttcttcacattagggataacaaattcacttcaaatatctgaaat

SEQ ID NO: 516394 - DNA, 60 bp, Artificial
  Synthetic oligonucleotide
tagcagcacaagcaaacatcatgcaatctactagtgcacagtgtggactagtcaaggcac

SEQ ID NO: 516395 - DNA, 60 bp, Artificial
  Synthetic oligonucleotide
tgatatttcataaattcttcccttttccacttacagtctgtgggctttaaatcttttcta

SEQ ID NO: 516396 - DNA, 60 bp, Artificial
  Synthetic oligonucleotide
atgcagtttcaatgtcaacaagactatctttcaaatcgggacacgatctaatccacgaca

SEQ ID NO: 516397 - DNA, 60 bp, Artificial
  Synthetic oligonucleotide
atgacagagccttacttagggattcagagttgctctccctctcactgatccttacatcct

SEQ ID NO: 516398 - DNA, 60 bp, Artificial
  Synthetic oligonucleotide
tgattcttagcaacctgggtttccacaagcaaactgaatgccttttgaccttcaccagaa

SEQ ID NO: 516399 - DNA, 60 bp, Artificial
  Synthetic oligonucleotide
atctgaagggtacatcttacaaaaggactctaatagctcagacttctcaaccctcctaaa

SEQ ID NO: 516400 - DNA, 59 bp, Artificial
  Synthetic oligonucleotide
tttactgaccaggtccttatggtgtattagtgataaggcatccattatataatatcttt

SEQ ID NO: 516401 - DNA, 59 bp, Artificial
  Synthetic oligonucleotide
accttttggtgagctgtgattgggaaaggtttcccaggtacacacctcctgaggctgat

SEQ ID NO: 516402 - DNA, 59 bp, Artificial
  Synthetic oligonucleotide
tgtgttattaggcttgatttgtatagtttcaagcatgttgcccccatcgaggagtgaag

SEQ ID NO: 516403 - DNA, 59 bp, Artificial
  Synthetic oligonucleotide
attcaccatcctcaaaaaaccttctacaaagattgggagccatatcatctagggtgcat

SEQ ID NO: 516404 - DNA, 58 bp, Artificial
  Synthetic oligonucleotide
caaagtacaactcctcttggtttggtggacctctttgtgttctcaacttctttctatc

SEQ ID NO: 516405 - DNA, 58 bp, Artificial
  Synthetic oligonucleotide
cctttcaatctgaattgcccttggggatctgatatcagcaggtcatttaaagatctgc

SEQ ID NO: 516406 - DNA, 57 bp, Artificial
  Synthetic oligonucleotide
gaatgtgctctgaagatgagatgcccagtttgctatgaagcatgcctttggtgtgag

SEQ ID NO: 516407 - DNA, 57 bp, Artificial
  Synthetic oligonucleotide
tagtgagtccaggttgaacattgaataggtcctgaatgtctagtccatgagagtgtt

SEQ ID NO: 516408 - DNA, 57 bp, Artificial
  Synthetic oligonucleotide
gggcccccgtgacccaccgccttttggcggtgggtcacgggggcgttctcttacaga

SEQ ID NO: 516409 - DNA, 57 bp, Artificial
  Synthetic oligonucleotide
gctgaaccttctatgtcaatgaaaacctctttgttattcttgaacaatttctgtgcc

SEQ ID NO: 516410 - DNA, 57 bp, Artificial
  Synthetic oligonucleotide
aaaagaaagcctcaatgtttttgtcagtctgcaggtctggatggtcagatatatcat

SEQ ID NO: 516411 - DNA, 57 bp, Artificial
  Synthetic oligonucleotide
agtgttgagttgaacatgtcacaattcaaccagacactccctaacgcatgttctgtg

SEQ ID NO: 516412 - DNA, 57 bp, Artificial
  Synthetic oligonucleotide
cccccaagcgataagagaaccatccatacccgaactgtaaatcagtcttatacatag

SEQ ID NO: 516413 - DNA, 57 bp, Artificial
  Synthetic oligonucleotide
agataaaaagatgtccctttggtatgctagctcctgtctttccggaaaatgctttct

SEQ ID NO: 516414 - DNA, 56 bp, Artificial
  Synthetic oligonucleotide
gtttatcatcgaagataagacaacttgtaccatgaagttcctgcaaacttgctgtg

SEQ ID NO: 516415 - DNA, 56 bp, Artificial
  Synthetic oligonucleotide
cgttccagattgtcaatgcattgcattagatcttcatctgacatttgtgttgaatc

SEQ ID NO: 516416 - DNA, 56 bp, Artificial
  Synthetic oligonucleotide
tgaagctattgtcataggaacaacgaccatccactatggggactagggtgatacct

SEQ ID NO: 516417 - DNA, 56 bp, Artificial
  Synthetic oligonucleotide
ctctgagttgatatcaatcaatacacaaaggtcaaggaatttgattctaggactcc

SEQ ID NO: 516418 - DNA, 56 bp, Artificial
  Synthetic oligonucleotide
ttttggcatccctcagaacatcggtcttcaccggtgttgtgaactcactgagccct

SEQ ID NO: 516419 - DNA, 55 bp, Artificial
  Synthetic oligonucleotide
catggcctttaccacagaagcgttcacaaacataccctgatccaacagtgagatg

SEQ ID NO: 516420 - DNA, 55 bp, Artificial
  Synthetic oligonucleotide
ccacagttgatgctgccaatcactgtggcacagtcgcaaatggtgtcttggacac

SEQ ID NO: 516421 - DNA, 55 bp, Artificial
  Synthetic oligonucleotide
gttctttaacggctgacgtgaagtacaatggggacaattctgcagagctctcaac

SEQ ID NO: 516422 - DNA, 55 bp, Artificial
  Synthetic oligonucleotide
gtgttcgtccctcttccacttgactacatgagaaatgagtgatagagactctgag

SEQ ID NO: 516423 - DNA, 55 bp, Artificial
  Synthetic oligonucleotide
ccaccctttcatccaacagtgacatgtgggaccgatcgtgcgcttctgacagctc

SEQ ID NO: 516424 - DNA, 55 bp, Artificial
  Synthetic oligonucleotide
gtggttgacccaatcaggcatcatggagttctcatatgtgcaccgaccatccacc

SEQ ID NO: 516425 - DNA, 55 bp, Artificial
  Synthetic oligonucleotide
ccagaagagttctttggcactgtatattcaacacaatctaaacaaggatgttgag

SEQ ID NO: 516426 - DNA, 55 bp, Artificial
  Synthetic oligonucleotide
gtccataaacacagagtctcctcccttgaaaaggtcttcacaagcgtttgccata

SEQ ID NO: 516427 - DNA, 55 bp, Artificial
  Synthetic oligonucleotide
gtccacccttaacttcacaatgcctctgtcctgttccaagaacaacactcaccat

SEQ ID NO: 516428 - DNA, 55 bp, Artificial
  Synthetic oligonucleotide
ggcctccaagttgacacctggggttgtgcgctgacagtcaatttcctttccggtg

SEQ ID NO: 516429 - DNA, 55 bp, Artificial
  Synthetic oligonucleotide
ccaggactcagtatacctctactaagtaagattacttcaacactggactcctctg

SEQ ID NO: 516430 - DNA, 55 bp, Artificial
  Synthetic oligonucleotide
gtatgatcacacacttatgtctgtagtgacaaccttccatttgagcattccaaac

SEQ ID NO: 516431 - DNA, 55 bp, Artificial
  Synthetic oligonucleotide
gtacttaaacagccagtcatttgaacacctctgtccagaaggaatagaccagagg

SEQ ID NO: 516432 - DNA, 55 bp, Artificial
  Synthetic oligonucleotide
ggtttggggtcctcgattgtgatatggcccttagcagcacaagcaaacatcatgc

SEQ ID NO: 516433 - DNA, 55 bp, Artificial
  Synthetic oligonucleotide
ggctcatggaattgtctatccccatgtgacacagttttagaatttcctcatggtg

SEQ ID NO: 516434 - DNA, 55 bp, Artificial
  Synthetic oligonucleotide
ggtgtgagttaataaggtctgaggatagaactgtgtaatgttcatctctcttcca

SEQ ID NO: 516435 - DNA, 55 bp, Artificial
  Synthetic oligonucleotide
cccattggtctctgctgttataaacctcatcaaggggcaggattcgactgcctct

SEQ ID NO: 516436 - DNA, 55 bp, Artificial
  Synthetic oligonucleotide
gggcacatcattggtccccatttactatgatccatgctgtaattcaacaaccctt

SEQ ID NO: 516437 - DNA, 55 bp, Artificial
  Synthetic oligonucleotide
ccctgatagctcaaaggacaaggcagttgtacatttccagaaggcttatgggcac

SEQ ID NO: 516438 - DNA, 55 bp, Artificial
  Synthetic oligonucleotide
ccccttgtgaacttactgcaaagcttattctgaagtgtcttaattaatgaaggga

SEQ ID NO: 516439 - DNA, 55 bp, Artificial
  Synthetic oligonucleotide
gggctctcatcctgtgtgagggtttattccgatcttgttaatggctccaaaggca

SEQ ID NO: 516440 - DNA, 55 bp, Artificial
  Synthetic oligonucleotide
gggcctgagtaaaagtatttgtctctcagttctccaattgaataaatgctttcac

SEQ ID NO: 516441 - DNA, 55 bp, Artificial
  Synthetic oligonucleotide
tttgctgacaaacgtctggaaaggtcccagcaactcaattccatcatctgagggg

SEQ ID NO: 516442 - DNA, 55 bp, Artificial
  Synthetic oligonucleotide
tttgagctcatatcagacataaagggaagcagctgatcctcgtaaattttggggt

SEQ ID NO: 516443 - DNA, 55 bp, Artificial
  Synthetic oligonucleotide
tgttattctggttgtgtgtaaagtccactgtgattgagaactccagtactccctt

SEQ ID NO: 516444 - DNA, 55 bp, Artificial
  Synthetic oligonucleotide
actccctaatgttttacagagacctatgaaccctgaagaaatgcaactttgaaag

SEQ ID NO: 516445 - DNA, 55 bp, Artificial
  Synthetic oligonucleotide
agatgcattatccatggctgcactccaggggccgcaccaagtgtgaggcccacac

SEQ ID NO: 516446 - DNA, 55 bp, Artificial
  Synthetic oligonucleotide
agctcactaacctatcatttacactgctataacaacaacctaaccagtgtttgtc

SEQ ID NO: 516447 - DNA, 55 bp, Artificial
  Synthetic oligonucleotide
agtaggattgatttgaaacacagaaagtactcagtattctcaaaggtcctggttg

SEQ ID NO: 516448 - DNA, 55 bp, Artificial
  Synthetic oligonucleotide
tgcataacactttgagcattcccctgttttctggtacaacagtctaaatctggac

SEQ ID NO: 516449 - DNA, 55 bp, Artificial
  Synthetic oligonucleotide
tgagagtgctttacttagagcttctgaattgctttccctgtcactaagcctacag

SEQ ID NO: 516450 - DNA, 55 bp, Artificial
  Synthetic oligonucleotide
tgagaactggcgagatcagaaaataagacagtgtaatgttcatctctcttccact

SEQ ID NO: 516451 - DNA, 55 bp, Artificial
  Synthetic oligonucleotide
tgaagatagagtctgttctcaataaatggaggcattcatccaacaatcttctgtc

SEQ ID NO: 516452 - DNA, 55 bp, Artificial
  Synthetic oligonucleotide
tctttctcccacaaagtaggtcaaagaaactgcgctctaattcgcctaggatcca

SEQ ID NO: 516453 - DNA, 55 bp, Artificial; identical to SEQ ID NO: 340180
  Synthetic oligonucleotide

SEQ ID NO: 516454 - DNA, 55 bp, Artificial
  Synthetic oligonucleotide
caactccatgacttgggaatatgttaatgcagtaggaaagccttgtgcttgtgcg

SEQ ID NO: 516455 - DNA, 55 bp, Artificial
  Synthetic oligonucleotide
caatcttacccattgcctctctcacaactgactcttgcaactcagtcaagtggga

SEQ ID NO: 516456 - DNA, 55 bp, Artificial
  Synthetic oligonucleotide
cacaattgacatctagaacaacacataagtcaaggaatttcactctgggagacca

SEQ ID NO: 516457 - DNA, 55 bp, Artificial
  Synthetic oligonucleotide
tccataataaggctttcacaaaagacaacgtcaaatgcctaggatcctcggtgcg

SEQ ID NO: 516458 - DNA, 55 bp, Artificial
  Synthetic oligonucleotide
tccaagacatcaatgtttgaagttaggtaatccttcgggttaagtaattgctcac

SEQ ID NO: 516459 - DNA, 55 bp, Artificial
  Synthetic oligonucleotide
tattgatctatgcacctgaccactgtaaagaacctctaatctgctcggtatgaag

SEQ ID NO: 516460 - DNA, 55 bp, Artificial
  Synthetic oligonucleotide
caggaatgatgagcggcaaccctggacacacgattccagactctatcagaatcgc

SEQ ID NO: 516461 - DNA, 55 bp, Artificial
  Synthetic oligonucleotide
caggctctgctaagacccaaacgcccaactcaaaggagttactcagtgagatgca

SEQ ID NO: 516462 - DNA, 55 bp, Artificial
  Synthetic oligonucleotide
caggggtaacccggggcagatgacaccagcctcaatcaagatggtctccactgat

SEQ ID NO: 516463 - DNA, 55 bp, Artificial
  Synthetic oligonucleotide
taagatacaccttataatcattgggcttgcacttcttgacaaccccaaccaggtc

SEQ ID NO: 516464 - DNA, 55 bp, Artificial
  Synthetic oligonucleotide
taagacttcatcagtgcattgacgacaggaaatgggacctccacaagcttgtgca

SEQ ID NO: 516465 - DNA, 55 bp, Artificial
  Synthetic oligonucleotide
cagtgttgctaccccagaggtcactcttccgagcaggtgccaccatgggtcaagc

SEQ ID NO: 516466 - DNA, 55 bp, Artificial
  Synthetic oligonucleotide
gcaaggatcaactccactggctctaatggatatattgatgttctctacatctgcc

SEQ ID NO: 516467 - DNA, 55 bp, Artificial; identical to SEQ ID NO: 369980
  Synthetic oligonucleotide

SEQ ID NO: 516468 - DNA, 55 bp, Artificial
  Synthetic oligonucleotide
cgccacctatcttggcccactaaactgtaagtcatgttggcaaaggttcgacagc

SEQ ID NO: 516469 - DNA, 55 bp, Artificial
  Synthetic oligonucleotide
gatggtgaagtaccaaactgatttgctagttcttctgagctaacaccaatccatg

SEQ ID NO: 516470 - DNA, 55 bp, Artificial
  Synthetic oligonucleotide
cgcttcaacagatttatcgtcatgattgtgtgtgcagccactcttgtctgcactg

SEQ ID NO: 516471 - DNA, 55 bp, Artificial
  Synthetic oligonucleotide
cggatacacttgactccatggttagagacacatgcgagggtcaggggatgcacgt

SEQ ID NO: 516472 - DNA, 55 bp, Artificial
  Synthetic oligonucleotide
cggcactggtgagcccaggctgcacgctgaacaaatcttggatgtcaagcccatg

SEQ ID NO: 516473 - DNA, 55 bp, Artificial
  Synthetic oligonucleotide
cggcatgcagttcactgaaccaactgagtcattcatgggaatcctgccaaatgag

SEQ ID NO: 516474 - DNA, 55 bp, Artificial
  Synthetic oligonucleotide
gagctcaaccagagagttgacggtctgatttaaactgcgaagcctctgtagatct

SEQ ID NO: 516475 - DNA, 55 bp, Artificial
  Synthetic oligonucleotide
gagcacccatcctcacagttagaggtacaggctcccactcaggtccgactctctc

SEQ ID NO: 516476 - DNA, 55 bp, Artificial
  Synthetic oligonucleotide
gacattccagtctctgactcaaactcactgatgcgtggtcttgatcctcctttgt

SEQ ID NO: 516477 - DNA, 55 bp, Artificial
  Synthetic oligonucleotide
gacattcaaatgccagatcctcagataacccatagtgtatgagactgaggcccac

SEQ ID NO: 516478 - DNA, 55 bp, Artificial
  Synthetic oligonucleotide
gacagagcacaactcctctcggccttgtagatctctttgtgttctcgacatcctt

SEQ ID NO: 516479 - DNA, 55 bp, Artificial
  Synthetic oligonucleotide
ctatttgggtctgaaacaaggaattatagcataaccagcggtcctggacttctgg

SEQ ID NO: 516480 - DNA, 55 bp, Artificial
  Synthetic oligonucleotide
ctcaacaatctgtcaaactgtgtgcaccctgcagttgagcacagaagcaggatgg

SEQ ID NO: 516481 - DNA, 55 bp, Artificial
  Synthetic oligonucleotide
gaatcctagtgaggaggccgcagtaccattgctgaatgtgacaggttacacgtgc

SEQ ID NO: 516482 - DNA, 55 bp, Artificial
  Synthetic oligonucleotide
gaaaccaaatgaccattaggaccttgtatagaataacaccttgaagactccccag

SEQ ID NO: 516483 - DNA, 55 bp, Artificial
  Synthetic oligonucleotide
ctctaaattatctcttagctcatcagggtggactctgcagtgttgtgaagggccc

SEQ ID NO: 516484 - DNA, 55 bp, Artificial
  Synthetic oligonucleotide
ctcttgtctgcactgtccatttctatacagcgtgataacagtttaagcccctcaa

SEQ ID NO: 516485 - DNA, 55 bp, Artificial
  Synthetic oligonucleotide
cttgagtctctctagttcggagtcctctggacatatggagctcatagttgcctgg

SEQ ID NO: 516486 - DNA, 55 bp, Artificial
  Synthetic oligonucleotide
ctgaattcctaacatcccatacccttattataccatcacctctcaccatcggacc

SEQ ID NO: 516487 - DNA, 55 bp, Artificial
  Synthetic oligonucleotide
ctggcataaagctattatcataatcacaccgaccatctactatcgggaccaatgt

SEQ ID NO: 516488 - DNA, 55 bp, Artificial
  Synthetic oligonucleotide
cttagttttcctcatgaacccctcagtgatttggctaacagcactaacaagcagt

SEQ ID NO: 516489 - DNA, 55 bp, Artificial
  Synthetic oligonucleotide
ctgggactgctgagaaaatcatcaataccaccactagtttccagctcaactggct

SEQ ID NO: 516490 - DNA, 55 bp, Artificial
  Synthetic oligonucleotide
ctgtcttaatctggcaactgaacttgttttcatactgtttgtcaaggctagacaa

SEQ ID NO: 516491 - DNA, 55 bp, Artificial
  Synthetic oligonucleotide
ggcattatgaaggatcccttgccccatatctaagattgagctgatatgagagggc

SEQ ID NO: 516492 - DNA, 55 bp, Artificial
  Synthetic oligonucleotide
ggcacaggttcccattcaggcccgatcctctcaaaatcaggggatctaaccccgt

SEQ ID NO: 516493 - DNA, 55 bp, Artificial
  Synthetic oligonucleotide
ggactcttcttcagttttcttgtcacccttcactggtggaagtgcatccaagtca

SEQ ID NO: 516494 - DNA, 55 bp, Artificial
  Synthetic oligonucleotide
ggactcctttaaggtcaggaatgtgccatcacccttcctaatgcatgcaccagat

SEQ ID NO: 516495 - DNA, 55 bp, Artificial
  Synthetic oligonucleotide
ccgactgcactgctttccccttaatctaaattctccttgagaactgtgtaccatt

SEQ ID NO: 516496 - DNA, 55 bp, Artificial
  Synthetic oligonucleotide
ccgatggataaaccactttctgcctcaaaaccatccttaatgggaacatctcatt

SEQ ID NO: 516497 - DNA, 55 bp, Artificial
  Synthetic oligonucleotide
gcttatccacagtggtctttagagactcacagagcctgaagtattctgactcttc

SEQ ID NO: 516498 - DNA, 55 bp, Artificial
  Synthetic oligonucleotide
gctgcattcagtgtcctcttgctaatctgaaatgtcccatctgctatgagccttg

SEQ ID NO: 516499 - DNA, 55 bp, Artificial
  Synthetic oligonucleotide
cctccaggctgggacacaactctgcttagattctatttgatcaatgtcgtcaatg

SEQ ID NO: 516500 - DNA, 55 bp, Artificial
  Synthetic oligonucleotide
cctcgataggcaccccttcatcagaaccctttgcattgccgatgacaagacttgc

SEQ ID NO: 516501 - DNA, 55 bp, Artificial
  Synthetic oligonucleotide
cctgtctttgaacatgcctatatttgcctgagtatgcgttagcgttcatttgtaa

SEQ ID NO: 516502 - DNA, 55 bp, Artificial
  Synthetic oligonucleotide
gcactggggatccgagttaaagtatcaatcttccgtgtataatctcaagagatgc

SEQ ID NO: 516503 - DNA, 55 bp, Artificial
  Synthetic oligonucleotide
gccacagactggtcaataattgtgtcaatagtttctgccaactgatgtggttctt

SEQ ID NO: 516504 - DNA, 55 bp, Artificial
  Synthetic oligonucleotide
gccatcccaacatcaatcaactttatgtctctccttccctgagactccaaaagcc

SEQ ID NO: 516505 - DNA, 55 bp, Artificial
  Synthetic oligonucleotide
ccttttgtcgaacaaggtgatttggtcatcgcttgatgtgtaagcgtctggcctt

SEQ ID NO: 516506 - DNA, 55 bp, Artificial
  Synthetic oligonucleotide
gcgtttgccatataaagaactcttggatcagggatctcagagtctgagcttgcac

SEQ ID NO: 516507 - DNA, 55 bp, Artificial
  Synthetic oligonucleotide
gcgtttagttgcgctatttagttgcacaactgttctctgtgaaaccatcgagcac

SEQ ID NO: 516508 - DNA, 54 bp, Artificial
  Synthetic oligonucleotide
aaacttcagcctcccagaatcagggcccacagaagtgtatgaagttggcgactc

SEQ ID NO: 516509 - DNA, 54 bp, Artificial
  Synthetic oligonucleotide
tgatcatgaatcgaataacacctagagacttccccagttttctggtatagcaag

SEQ ID NO: 516510 - DNA, 54 bp, Artificial
  Synthetic oligonucleotide
ctagttgttgagtggtgaggttccccaagtagaccccacttacctgtggcctct

SEQ ID NO: 516511 - DNA, 54 bp, Artificial
  Synthetic oligonucleotide
taagtctttgcgaccgtgtgtatctactaagcgccttatatcatctgaaccttg

SEQ ID NO: 516512 - DNA, 54 bp, Artificial
  Synthetic oligonucleotide
ctaacaccaatccatgatttgggtttgttgttctcatttctggggttgggtttt

SEQ ID NO: 516513 - DNA, 53 bp, Artificial
  Synthetic oligonucleotide
tgggttatcaacaaccttgtgtaggtcatttatgtcaccagcgtttaccctat

SEQ ID NO: 516514 - DNA, 53 bp, Artificial
  Synthetic oligonucleotide
atggaccttctcacaaattgctctgtaatcatcgtcagacatcaatgattggt

SEQ ID NO: 516515 - DNA, 53 bp, Artificial
  Synthetic oligonucleotide
gagtggtgaatctacagaatccacccgcacaagtctgtcattcacacttggga

SEQ ID NO: 516516 - DNA, 53 bp, Artificial
  Synthetic oligonucleotide
tcacaggatttccccttgagtctgaacctgcccacaactgtttcatacatcac

SEQ ID NO: 516517 - DNA, 53 bp, Artificial
  Synthetic oligonucleotide
gagatctggtcatcactggaagtatatgaattaagagtcccttcgtagagtaa

SEQ ID NO: 516518 - DNA, 53 bp, Artificial
  Synthetic oligonucleotide
gagcaaactcaaatgtttagttggaaggtttagacctgttgttgcagagctca

SEQ ID NO: 516519 - DNA, 52 bp, Artificial
  Synthetic oligonucleotide
ggaggttactgtcttcaaaggtggatgctgattgaagccgagatgaagtgct

SEQ ID NO: 516520 - DNA, 52 bp, Artificial
  Synthetic oligonucleotide
aatctgatctgtcaagcgatcgggggtctcttttgtgattagatggcatagg

SEQ ID NO: 516521 - DNA, 52 bp, Artificial
  Synthetic oligonucleotide
tgttagcctatcaggggtctcttttgtgattaaatggcataggtatgacaca

SEQ ID NO: 516522 - DNA, 52 bp, Artificial
  Synthetic oligonucleotide
gtcttttggttggagttgtcaaaataccgtaaatcaggtatgtgaccttgac

SEQ ID NO: 516523 - DNA, 52 bp, Artificial
  Synthetic oligonucleotide
gatgggtataccatattgcaactattcaaagttctggtacctgaatgatacc

SEQ ID NO: 516524 - DNA, 52 bp, Artificial
  Synthetic oligonucleotide
gggtgtcattgactttattgatgtcaagacccacccttagtgctttcacatc

SEQ ID NO: 516525 - DNA, 52 bp, Artificial
  Synthetic oligonucleotide
tcgttgttggcaggctgcttggggcgcaggggacgagattgccctgcgcaca

SEQ ID NO: 516526 - DNA, 52 bp, Artificial
  Synthetic oligonucleotide
ggtcaaaaaatagagagaccaaccgtcccgacgggtcggttgtctgcttgtc

SEQ ID NO: 516527 - DNA, 52 bp, Artificial
  Synthetic oligonucleotide
ggtcttagcgaatgagaaatctagtcgtctcccatctgtgtcattgatactc

SEQ ID NO: 516528 - DNA, 51 bp, Artificial
  Synthetic oligonucleotide
ttttagggctgactctgatggtttcaagcatatttccaccatctaataagc

SEQ ID NO: 516529 - DNA, 51 bp, Artificial
  Synthetic oligonucleotide
aggtctaactttccaagagtgtctcatgagcagccttttgtctggtggtac

SEQ ID NO: 516530 - DNA, 51 bp, Artificial
  Synthetic oligonucleotide
gactcaactcttggtcacttaaagggtcaacatcaagtagtgaacacattt

SEQ ID NO: 516531 - DNA, 51 bp, Artificial
  Synthetic oligonucleotide
ctcactaatctatcattcacgctactatagcagacccctacccagtacttc

SEQ ID NO: 516532 - DNA, 51 bp, Artificial
  Synthetic oligonucleotide
caggctttcttgctatataatcacatgggttgaggtgcttaaggcccgtgt

SEQ ID NO: 516533 - DNA, 51 bp, Artificial
  Synthetic oligonucleotide
ccctggaaccatctaaccaatcctttacatcagtggtggtgttcagtaaaa

SEQ ID NO: 516534 - DNA, 51 bp, Artificial
  Synthetic oligonucleotide
ttacaaatatattctgaggccaatgagccataaagatcagatgtatagtgt

SEQ ID NO: 516535 - DNA, 51 bp, Artificial
  Synthetic oligonucleotide
caagaatgggcacatcattggtccccatttactatgatccatactatagtt

SEQ ID NO: 516536 - DNA, 50 bp, Artificial
  Synthetic oligonucleotide
ggctaacaagcctatcatttacactaacatggcaacaccccagccagtaa

SEQ ID NO: 516537 - DNA, 50 bp, Artificial
  Synthetic oligonucleotide
tagtgctgtaacacgtagaacgaacaaggtcacaaacttcaggacctagc

SEQ ID NO: 516538 - DNA, 50 bp, Artificial
  Synthetic oligonucleotide
caacattgcgcaacacagtgtgcaggtccatcatgtcttcctgaggcaac

SEQ ID NO: 516539 - DNA, 50 bp, Artificial
  Synthetic oligonucleotide
ctaagagtctcgaactttcaggcttccttgcaacataatcacaagcgttg

SEQ ID NO: 516540 - DNA, 50 bp, Artificial
  Synthetic oligonucleotide
cgcaccggggatcctaggctttttggtttgcgctttgaaccagttgctat

SEQ ID NO: 516541 - DNA, 50 bp, Artificial; identical to SEQ ID NO: 319676
  Synthetic oligonucleotide

SEQ ID NO: 516542 - DNA, 50 bp, Artificial; identical to SEQ ID NO: 365582
  Synthetic oligonucleotide

SEQ ID NO: 516543 - DNA, 50 bp, Artificial
  Synthetic oligonucleotide
agcaagatccaatgctgttgcacacccagagttagtcatgggatccaggc

SEQ ID NO: 516544 - DNA, 50 bp, Artificial
  Synthetic oligonucleotide
cacattatgaggaacttccaccattttgtgaatatgccaggctaaaagcg

SEQ ID NO: 516545 - DNA, 50 bp, Artificial
  Synthetic oligonucleotide
atctgatgacagtgtccctacacgcagaacattcttttgttgtgtcgact

SEQ ID NO: 516546 - DNA, 60 bp, Artificial
  Synthetic oligonucleotide
ttggttcaaccattgggcccgtgtgatgggcctagtgtggtcactgatttctaattctat

SEQ ID NO: 516547 - DNA, 60 bp, Artificial
  Synthetic oligonucleotide
ttacagtggagcctatttagctatgggcatatttgcgaccacacttatcatacattccat

SEQ ID NO: 516548 - DNA, 60 bp, Artificial
  Synthetic oligonucleotide
tcggctaagcgctttccgggtgcgagattcgcactaacgccggtgtatgcaagtgcttgg

SEQ ID NO: 516549 - DNA, 60 bp, Artificial
  Synthetic oligonucleotide
tcagctatgaacctgcgagctgctctcacaagcttccaagtggcgcagtaccgaaacatt

SEQ ID NO: 516550 - DNA, 60 bp, Artificial
  Synthetic oligonucleotide
tagggatgttacctcgtcttcggtccatttgtaaccaccgccaattggtggtagctgatt

SEQ ID NO: 516551 - DNA, 60 bp, Artificial
  Synthetic oligonucleotide
gttggtagcgcgaccttggttgtgcccacacacgcgtctatgttggactgcattaacaaa

SEQ ID NO: 516552 - DNA, 60 bp, Artificial
  Synthetic oligonucleotide
gtgtcaaacgtgcaaagggcgttggtttgtgtcttgatgagaactgcttcaggggcactt

SEQ ID NO: 516553 - DNA, 60 bp, Artificial
  Synthetic oligonucleotide
gcctgcaaatcaccttgcaacgggtctgtgagctcagtaaaccgtgctcagcgggctata

SEQ ID NO: 516554 - DNA, 60 bp, Artificial
  Synthetic oligonucleotide
gccactgtcactgggaatgttgtgtccttgtggttctacatcactgctgctggcacgtct

SEQ ID NO: 516555 - DNA, 60 bp, Artificial
  Synthetic oligonucleotide
gccaaagataaggctaaagcgcgacaactagctcacctgctgttggacttggctaaccca

SEQ ID NO: 516556 - DNA, 60 bp, Artificial
  Synthetic oligonucleotide
cctcaagcaaccctcgtcaccatgggttattgggcgtgtgtggcggccttagccgtctac

SEQ ID NO: 516557 - DNA, 60 bp, Artificial
  Synthetic oligonucleotide
aagaatgattgtagggatgttacctcgtcttcggtccatttgtaaccaccgccaattggt

SEQ ID NO: 516558 - DNA, 60 bp, Artificial
  Synthetic oligonucleotide
agcccaggagacgtcgcagtgacgggtgagcgatgggattttgagtctcccgggggagga

SEQ ID NO: 516559 - DNA, 60 bp, Artificial
  Synthetic oligonucleotide
caagaattactattcttgtgggcccctccaggtaattcctagagggcttttgtctcgtta

SEQ ID NO: 516560 - DNA, 59 bp, Artificial
  Synthetic oligonucleotide
actaaagtggttttcgtgcccaatcctgacttcgagaaaggcgtggtcatcaccgccta

SEQ ID NO: 516561 - DNA, 55 bp, Artificial
  Synthetic oligonucleotide
aagggggagtgaaagagagtgttaccgcttcggtcacccgtgcctatgggaaacc

SEQ ID NO: 516562 - DNA, 55 bp, Artificial
  Synthetic oligonucleotide
acaggccggaatcaacggcgctgagttccccactaagtctttacaaagctactgc

SEQ ID NO: 516563 - DNA, 55 bp, Artificial
  Synthetic oligonucleotide
tatcggtcggatggcgtcttatacaatactcgttggggcaacattccatactccg

SEQ ID NO: 516564 - DNA, 55 bp, Artificial
  Synthetic oligonucleotide
gttatagttggaagagccttttccacagcttatgcttttgtgcttttggctgctt

SEQ ID NO: 516565 - DNA, 55 bp, Artificial
  Synthetic oligonucleotide
agggcatcgcgggaattgtacatttacgacccctttgaccaactgagtgggttgc

SEQ ID NO: 516566 - DNA, 55 bp, Artificial
  Synthetic oligonucleotide
gtgcgggttgggcctgctacacatgttttgggttccaccggacagcgagtgtcga

SEQ ID NO: 516567 - DNA, 55 bp, Artificial
  Synthetic oligonucleotide
ggtagtggtgcgcggcaacgggtacaccgcagttggtaacaagcttgtcgatggc

SEQ ID NO: 516568 - DNA, 55 bp, Artificial
  Synthetic oligonucleotide
attgtacccgtcctgtgtcagtttatgctaacgcttcttgtgtgcaattggtttg

SEQ ID NO: 516569 - DNA, 55 bp, Artificial
  Synthetic oligonucleotide
cactacgcagccagctttgaccgttgggtccctcatctgcaggcactgttaggat

SEQ ID NO: 516570 - DNA, 55 bp, Artificial
  Synthetic oligonucleotide
cttgaaacagatttggagagttgcgatcgctccactcctgccttggtgcggtggt

SEQ ID NO: 516571 - DNA, 55 bp, Artificial
  Synthetic oligonucleotide
cttctacgattggtacgttgggctcaacaatgttatctatgattgtattgctgtc

SEQ ID NO: 516572 - DNA, 55 bp, Artificial
  Synthetic oligonucleotide
ctgaatgggtcgatggtaaggcgcgtgctctgccggattccttgttttcgtctgg

SEQ ID NO: 516573 - DNA, 55 bp, Artificial
  Synthetic oligonucleotide
ctacgtcaagagagtgccaaagtactgggaccccaatgacacccggggcaccaca

SEQ ID NO: 516574 - DNA, 55 bp, Artificial
  Synthetic oligonucleotide
cggttcttcatgattggtcatggttcactcactgcagatgccggagggctcacgt

SEQ ID NO: 516575 - DNA, 55 bp, Artificial
  Synthetic oligonucleotide
ccattggccgtgatcgcgtgtttgctccccatatggccttctcttgctctgcttg

SEQ ID NO: 516576 - DNA, 53 bp, Artificial
  Synthetic oligonucleotide
tgcgtctgtggctcggggacttgggcctgggaatcaatgctgactccggggtc

SEQ ID NO: 516577 - DNA, 53 bp, Artificial
  Synthetic oligonucleotide
ttgcccaagggagcccagctagagtgggaccgtcaccaggaagaaaagagaag

SEQ ID NO: 516578 - DNA, 52 bp, Artificial
  Synthetic oligonucleotide
ggcaactgtgtcccataccacgtgggtcattgtcacacgacttcactcttcg

SEQ ID NO: 516579 - DNA, 52 bp, Artificial
  Synthetic oligonucleotide
agaactgcttcaggggcacttgtgattgtcaacgcaggagtggccccccacc

SEQ ID NO: 516580 - DNA, 51 bp, Artificial
  Synthetic oligonucleotide
tcatcacatttgggacagattgcaataacaccattgcggtcccagtttcag

SEQ ID NO: 516581 - DNA, 60 bp, Artificial
  Synthetic oligonucleotide
gttacgtcattacaaaagcagacatggaggcattggctaaagacttgctaaagtatcaat

SEQ ID NO: 516582 - DNA, 60 bp, Artificial
  Synthetic oligonucleotide
gtctgcgtttgtgcccccgacggtgatggcgcctacctaaccgctgtaactgagggttgc

SEQ ID NO: 516583 - DNA, 60 bp, Artificial
  Synthetic oligonucleotide
gtcctgaaagatctgacctacaaggggcgtaatctcgccaatgaattgtggagtacgggg

SEQ ID NO: 516584 - DNA, 60 bp, Artificial
  Synthetic oligonucleotide
gtatgctaatgccttgcactcggtggctggtccccgagcgctatccattgtatggtggtg

SEQ ID NO: 516585 - DNA, 60 bp, Artificial
  Synthetic oligonucleotide
ggtgtcaaactagttgaggtttgtgacaaaccgatctgggacgactacaactgcggtccc

SEQ ID NO: 516586 - DNA, 60 bp, Artificial
  Synthetic oligonucleotide
ggtcctccctgataccttcagcgtcaaaaggacccagtcaaatgttaggatgttttgaca

SEQ ID NO: 516587 - DNA, 60 bp, Artificial
  Synthetic oligonucleotide
ggtatgttaacaacctcctgcaccgctacaccgtgctgccctcaggcgaggtgaccatcc

SEQ ID NO: 516588 - DNA, 60 bp, Artificial
  Synthetic oligonucleotide
gggtgaaaccagaaaaggttattgtctcccccagtatcataggtctcactttttgtggtc

SEQ ID NO: 516589 - DNA, 60 bp, Artificial
  Synthetic oligonucleotide
ggggggtagccatggagtgctcatacaagcccaaagggtctcaagtttatgacccttatg

SEQ ID NO: 516590 - DNA, 60 bp, Artificial
  Synthetic oligonucleotide
ggctgtaactggctcagtgtaccgcacatctttgaacctaacgcaatcccctgggtctac

SEQ ID NO: 516591 - DNA, 60 bp, Artificial
  Synthetic oligonucleotide
gctgggtccttgttccttgttgagcttcgtgctacctgggaattcgcaaactacctcacc

SEQ ID NO: 516592 - DNA, 60 bp, Artificial
  Synthetic oligonucleotide
gcccacatcactacagcttttagaacaggagtatgcctagatagtgatgttagtgagaca

SEQ ID NO: 516593 - DNA, 60 bp, Artificial
  Synthetic oligonucleotide
gcatgggttgtctaatctttcagtctgagccggtatttcttaggttaaacctagacacgt

SEQ ID NO: 516594 - DNA, 60 bp, Artificial
  Synthetic oligonucleotide
gcagggacccaagccacaacactagtgggtggtctcatttacaggccagaactaccgccc

SEQ ID NO: 516595 - DNA, 60 bp, Artificial
  Synthetic oligonucleotide
gattctcaaacaagagaagattcgcgactcagacattcgtcagattgtctgctcagatcc

SEQ ID NO: 516596 - DNA, 60 bp, Artificial
  Synthetic oligonucleotide
gagcctggtgaatattttcttactccagtaaattgccctttaataggtgtcctaccaata

SEQ ID NO: 516597 - DNA, 60 bp, Artificial
  Synthetic oligonucleotide
ctttgtacgtggacagctgttgcaacacttattggagcatattacatgtttagggcagat

SEQ ID NO: 516598 - DNA, 60 bp, Artificial
  Synthetic oligonucleotide
ctttgtaagagttaacccaaactgtctatgtcatataaaagttgatggctgtagtggcac

SEQ ID NO: 516599 - DNA, 60 bp, Artificial
  Synthetic oligonucleotide
cttactttatggttctaaccatggggggtggtacattcacagttggtaggtatcttgtat

SEQ ID NO: 516600 - DNA, 60 bp, Artificial
  Synthetic oligonucleotide
ctggctttaggtttatgaactacatagtcacagcaggccatgttgttaatggaagtgaat

SEQ ID NO: 516601 - DNA, 60 bp, Artificial
  Synthetic oligonucleotide
ctcatcgccgaatgtgaatacatccggaggggttgttcaggtaaattcaaccactccaaa

SEQ ID NO: 516602 - DNA, 60 bp, Artificial
  Synthetic oligonucleotide
ctatttaaattctttcaggggcttaaagccaaacttaagcaggttagagcaacaagtgta

SEQ ID NO: 516603 - DNA, 60 bp, Artificial
  Synthetic oligonucleotide
cgttgagcaatgcctacattatacacaccgagctcttagtgatgctagcttgccaaggcg

SEQ ID NO: 516604 - DNA, 60 bp, Artificial
  Synthetic oligonucleotide
cgggatggcatgagtggtgctcctgtggttgacattaatggccatgtccttggggtacat

SEQ ID NO: 516605 - DNA, 60 bp, Artificial
  Synthetic oligonucleotide
cgctagcgcggaaacaaacatcacaccccctgtccaagggccagcccgtgagggttggtt

SEQ ID NO: 516606 - DNA, 60 bp, Artificial
  Synthetic oligonucleotide
ttgtttgtccatccatgcttagtcaacctcccatttatgcaacattgtgcaccaaaccac

SEQ ID NO: 516607 - DNA, 60 bp, Artificial
  Synthetic oligonucleotide
ttgccaaagtaatcaccatgagtggttcatcagctacatctgagagaggtgcaaccctca

SEQ ID NO: 516608 - DNA, 60 bp, Artificial
  Synthetic oligonucleotide
ttgaacttgtccggttagctgttgggagagaactcacgatcctgagacatgaactaagct

SEQ ID NO: 516609 - DNA, 60 bp, Artificial
  Synthetic oligonucleotide
ttcgggctgctgattggattattgttggcacatgcaactagcggcttcagaactggtcaa

SEQ ID NO: 516610 - DNA, 60 bp, Artificial
  Synthetic oligonucleotide
tgtgacagcagacccagctgattttgacatattacagaaaatgccccttgggtatttgga

SEQ ID NO: 516611 - DNA, 60 bp, Artificial
  Synthetic oligonucleotide
tgtccttgatggggatagctggcggcaaaccatttgtgctccagatgaacagtctgtcat

SEQ ID NO: 516612 - DNA, 60 bp, Artificial
  Synthetic oligonucleotide
tgtatcgtgcatcgttaaaccttacacagtccccgggatcaacatcttgggggggccttg

SEQ ID NO: 516613 - DNA, 60 bp, Artificial
  Synthetic oligonucleotide
tggtcaccattcatgggtggtttccaccgtagggtcaaaagattagtggacaaaggtaat

SEQ ID NO: 516614 - DNA, 60 bp, Artificial
  Synthetic oligonucleotide
tggagactatcagacctcaagatacagtttacaccactcgtgggttcatcggctgtaact

SEQ ID NO: 516615 - DNA, 60 bp, Artificial
  Synthetic oligonucleotide
tgcacttccaccctccgagtccctttaaggactacttggagatgtgcttggcaaacaccg

SEQ ID NO: 516616 - DNA, 60 bp, Artificial
  Synthetic oligonucleotide
tgatctatccaactttgtctactgacccaagagaccgtgtgattatagcatcgtcagtca

SEQ ID NO: 516617 - DNA, 60 bp, Artificial
  Synthetic oligonucleotide
tgagggttgcgagcatgatggtcactactcctacgtctgcccgacgcgggatgggatgtc

SEQ ID NO: 516618 - DNA, 60 bp, Artificial
  Synthetic oligonucleotide
tgaccttgagccccgcagaaagaagcctaaggatgcaactaaagagctaaccaggctcaa

SEQ ID NO: 516619 - DNA, 60 bp, Artificial
  Synthetic oligonucleotide
tgaccccattcctctagccattggctatccattacgtgggtactattggccgactacagg

SEQ ID NO: 516620 - DNA, 60 bp, Artificial
  Synthetic oligonucleotide
tctggaatcctattgtggaggctgggcctaatgtccatggaaccgaacagggcatgcctc

SEQ ID NO: 516621 - DNA, 60 bp, Artificial
  Synthetic oligonucleotide
tctaccggtcagcatgaatctagagggcacaatcggagaagatgcaaatgatgtgtacgt

SEQ ID NO: 516622 - DNA, 60 bp, Artificial
  Synthetic oligonucleotide
tcattggtgttcatcagacaaacactggtttcactggtggcgcagtcattatacgccagg

SEQ ID NO: 516623 - DNA, 60 bp, Artificial
  Synthetic oligonucleotide
tcaggtcttccaaagtatttctgatgcacagaatggggttccctgcattgcaactggtaa

SEQ ID NO: 516624 - DNA, 60 bp, Artificial
  Synthetic oligonucleotide
tcactattgcactacagaagaattggacaagatcggtaaccgaggggagtgctggtcact

SEQ ID NO: 516625 - DNA, 60 bp, Artificial
  Synthetic oligonucleotide
tcacaattgcagttggaaatatccctactaaggcacgagctggagagagcaagacccacc

SEQ ID NO: 516626 - DNA, 60 bp, Artificial
  Synthetic oligonucleotide
tatggtgatgacaggctttccacttatcctgagttacctgataactataaggatattgtc

SEQ ID NO: 516627 - DNA, 60 bp, Artificial
  Synthetic oligonucleotide
tagaggaacatggctgggagccctatgtcaacgctttccgtgccattgactccggggagc

SEQ ID NO: 516628 - DNA, 60 bp, Artificial
  Synthetic oligonucleotide
tacctgaggtcccctggtgggccctcgtcgcgacaagtcttgctgtgtggcgtaccttca

SEQ ID NO: 516629 - DNA, 60 bp, Artificial
  Synthetic oligonucleotide
taatagcaaaccagcattgggaatgctagagaggatcaccgagagtactagtgcatctat

SEQ ID NO: 516630 - DNA, 60 bp, Artificial
  Synthetic oligonucleotide
gttgaggaggatgagacaacttagaacgacccagacccccctggcacgcgtcaatcctga

SEQ ID NO: 516631 - DNA, 60 bp, Artificial
  Synthetic oligonucleotide
gttcgtgtgaagtggggcgatgtctctgcttttgctaaggtttgctatatacaccctgaa

SEQ ID NO: 516632 - DNA, 60 bp, Artificial
  Synthetic oligonucleotide
cactgggcctaccagctcccgtgtgaccttcgacctcccctcgggtgaggacgatgagta

SEQ ID NO: 516633 - DNA, 60 bp, Artificial
  Synthetic oligonucleotide
ccaaatagagctgcccgttggtccggccctatggcgttgccttttgacgacactcttagg

SEQ ID NO: 516634 - DNA, 60 bp, Artificial
  Synthetic oligonucleotide
cactgattcaaatagccgagtccaatatatccaaagagtgccagctggcgccatagtcat

SEQ ID NO: 516635 - DNA, 60 bp, Artificial
  Synthetic oligonucleotide
ccaagagtggtaggatggctatgcctttccatattggtgttgcagacaagttaatgtcaa

SEQ ID NO: 516636 - DNA, 60 bp, Artificial
  Synthetic oligonucleotide
agggcggttggtggtttgtcaagaaattgcttggtaggtcagcaaatactgatgctcagt

SEQ ID NO: 516637 - DNA, 60 bp, Artificial
  Synthetic oligonucleotide
ccaatgtttggttctgtgccgattggcacctgtgggatggagcggacataccgacctagt

SEQ ID NO: 516638 - DNA, 60 bp, Artificial
  Synthetic oligonucleotide
agggcaccgaccaaattccccctgggatatcaggacactaccacgtcacatgatctatcc

SEQ ID NO: 516639 - DNA, 60 bp, Artificial
  Synthetic oligonucleotide
aggagggtcgctggtacgtgaccttctggactcagtacgatcctgatgagtgggtctggt

SEQ ID NO: 516640 - DNA, 60 bp, Artificial
  Synthetic oligonucleotide
cactaatgagcaacgcaccaatagcagagtccagtacatttctagagttcgtgctgggac

SEQ ID NO: 516641 - DNA, 60 bp, Artificial
  Synthetic oligonucleotide
cacttgacggcgattacatccgccgtgaccagctccctccatggctcgcacacctctggg

SEQ ID NO: 516642 - DNA, 60 bp, Artificial
  Synthetic oligonucleotide
agtcagaatagaaataggcctggtgagccagaccctggtgagcttacctttcaggtcttc

SEQ ID NO: 516643 - DNA, 60 bp, Artificial
  Synthetic oligonucleotide
agtcattaggtgcacagtatgcactgtggaggttgaaatggctagaagttagacttcagc

SEQ ID NO: 516644 - DNA, 60 bp, Artificial
  Synthetic oligonucleotide
agaggttcaactggaatgtgcaatctagataccttgttggaccgcggtctggctggtggg

SEQ ID NO: 516645 - DNA, 60 bp, Artificial
  Synthetic oligonucleotide
aacgtgtatgaaacctgattttggctgtttggttatggacacctggttgccacatcctgt

SEQ ID NO: 516646 - DNA, 60 bp, Artificial
  Synthetic oligonucleotide
ccataacttatgccgttcaaactcggaatggtatgagtggttcacctgttactaacttgg

SEQ ID NO: 516647 - DNA, 60 bp, Artificial
  Synthetic oligonucleotide
aaacactgggcctaacaccacaactggatccatatcgaatgatatcagtgtttggccaat

SEQ ID NO: 516648 - DNA, 60 bp, Artificial
  Synthetic oligonucleotide
ataggaatcgccgtcgtagggcgaatcttaatacaactgggcctaaacctgcggtgtcgc

SEQ ID NO: 516649 - DNA, 60 bp, Artificial
  Synthetic oligonucleotide
ccatcagaagataagaacaggtatttcacccacagcacgggtaatcccaaatggggttat

SEQ ID NO: 516650 - DNA, 60 bp, Artificial
  Synthetic oligonucleotide
cagcagatgaaggaatactataatgacagcgttatagtagattggtctgtgtatgtgttc

SEQ ID NO: 516651 - DNA, 60 bp, Artificial
  Synthetic oligonucleotide
cacctagactgggctgatgtcttggcttggagatccgatgagtggggaacgcttcgtcta

SEQ ID NO: 516652 - DNA, 60 bp, Artificial
  Synthetic oligonucleotide
acgcgtacatgcaccctgataaggatataagtcaacttatgcatgattgggagagggttg

SEQ ID NO: 516653 - DNA, 60 bp, Artificial
  Synthetic oligonucleotide
acaaggaactcctagagaagggtttctccaaatcacaactacgtgacatggccgaggttc

SEQ ID NO: 516654 - DNA, 60 bp, Artificial
  Synthetic oligonucleotide
aaccccgttgatagcaatatgagccacaccatgagaataacagggtatcctgagtcaaaa

SEQ ID NO: 516655 - DNA, 60 bp, Artificial
  Synthetic oligonucleotide
cccccattgtgctcgacggcagtgtgcttcgtctggaggttggtacgccttctacaagca

SEQ ID NO: 516656 - DNA, 60 bp, Artificial
  Synthetic oligonucleotide
attggcccatcttcttacccaatgacaccagattcacttgttcttatggctggatatttc

SEQ ID NO: 516657 - DNA, 60 bp, Artificial
  Synthetic oligonucleotide
actacggcaattctgctgttgcgcaacatgcccgaccaccactccaatcggccctggtct

SEQ ID NO: 516658 - DNA, 60 bp, Artificial
  Synthetic oligonucleotide
cacatcctgtcttaacgtttgaggacctaatgtctaagtgttacaatacccatgggaatg

SEQ ID NO: 516659 - DNA, 60 bp, Artificial
  Synthetic oligonucleotide
cctaaagctcagcaaaattgaggatggggatatacgacaaatcgtgtgttcagatccgat

SEQ ID NO: 516660 - DNA, 59 bp, Artificial
  Synthetic oligonucleotide
agtgttcgtgtaggaaggaggaaagtgcccaacaacctacacctgcaccgcccgtgcag

SEQ ID NO: 516661 - DNA, 59 bp, Artificial
  Synthetic oligonucleotide
ggattgctccagatacggatgtcccatttatggaaaggttgagtgcatggtatacagga

SEQ ID NO: 516662 - DNA, 59 bp, Artificial
  Synthetic oligonucleotide
acaaatggtcccaatggtgaacttcttcttaacgttccacaaaggtcggcgtttgcaga

SEQ ID NO: 516663 - DNA, 59 bp, Artificial
  Synthetic oligonucleotide
gagagggttgattcacttatatatggtgatgatagattgtctacttatcctgagttgcc

SEQ ID NO: 516664 - DNA, 59 bp, Artificial
  Synthetic oligonucleotide
ccagaagaatgcaaactagactattggagacagctagtgggtcctggtacccgctggct

SEQ ID NO: 516665 - DNA, 58 bp, Artificial
  Synthetic oligonucleotide
cttaacggtcccgacaaagacctttgggaccgttatgacacccttatatatggtgatg

SEQ ID NO: 516666 - DNA, 57 bp, Artificial
  Synthetic oligonucleotide
ttggtggtttgtgaagcgcgtgataacatcaagcactcgcgccaacacagtgcaatt

SEQ ID NO: 516667 - DNA, 57 bp, Artificial
  Synthetic oligonucleotide
tcaagatgcaaggaatgggtgagcgggtagaccagttcttctttattcaaccaaaca

SEQ ID NO: 516668 - DNA, 57 bp, Artificial
  Synthetic oligonucleotide
tgccggacgctcccaggaatcggcccgcctccattccggggtggtcccggcagagca

SEQ ID NO: 516669 - DNA, 56 bp, Artificial
  Synthetic oligonucleotide
tccgagtcccttcaaggactacttggagatgtgcctggcaaacaccgccaagtact

SEQ ID NO: 516670 - DNA, 56 bp, Artificial
  Synthetic oligonucleotide
gacccttatgatcgggttttacaacatgggagcagaagtgcaagaattaaggggat

SEQ ID NO: 516671 - DNA, 56 bp, Artificial
  Synthetic oligonucleotide
atggctgaaacgctgcgtgaggcagaatatactgacactgagagtgaggaatatga

SEQ ID NO: 516672 - DNA, 56 bp, Artificial
  Synthetic oligonucleotide
tagagttgtccctggttaggcatgaacttgagagagttagaccagcagaaaaagtg

SEQ ID NO: 516673 - DNA, 56 bp, Artificial
  Synthetic oligonucleotide
cagtagccacacacaacatggctccaccacccgagtccggaccctatacctatcaa

SEQ ID NO: 516674 - DNA, 56 bp, Artificial
  Synthetic oligonucleotide
ttctcttggcagtggtggggctcttcatggaggacacctcctatgtccaaaacttg

SEQ ID NO: 516675 - DNA, 56 bp, Artificial
  Synthetic oligonucleotide
ctccagtgacaaatgttgacggtcgtattattggggtacatcaaagtaacacaggc

SEQ ID NO: 516676 - DNA, 55 bp, Artificial
  Synthetic oligonucleotide
atttcatctgcggtgcccccgccttttggctggctcataaaaggcggttggtggt

SEQ ID NO: 516677 - DNA, 55 bp, Artificial
  Synthetic oligonucleotide
accctcggcaagacgatgtcaacttatcagaataaagcctatgatggcccacttt

SEQ ID NO: 516678 - DNA, 55 bp, Artificial
  Synthetic oligonucleotide
atcaagagtccactcccgcctaccccaaaatgatgcggtggtccactgaggcaga

SEQ ID NO: 516679 - DNA, 55 bp, Artificial
  Synthetic oligonucleotide
agtaacagcagcacatgttactgggaatcataaggtagccaccatcagctaccag

SEQ ID NO: 516680 - DNA, 55 bp, Artificial
  Synthetic oligonucleotide
tccaatatatccaaagagtgccagctggcgccatagtcatactctggtgcctggg

SEQ ID NO: 516681 - DNA, 55 bp, Artificial
  Synthetic oligonucleotide
tccgccgtgaccagctccctccatggctcgcacacctctgggactggttgtttga

SEQ ID NO: 516682 - DNA, 55 bp, Artificial
  Synthetic oligonucleotide
agatgtctactacagggctatggcacagagctctgtcaacagtggggccatccac

SEQ ID NO: 516683 - DNA, 55 bp, Artificial
  Synthetic oligonucleotide
agacacttgaaggcctgacattctgtggatttacagttggcccagatagactgcc

SEQ ID NO: 516684 - DNA, 55 bp, Artificial
  Synthetic oligonucleotide
acgatcctggtctgtgccctcctgaacgaacataagcggctcaaggatgagaatg

SEQ ID NO: 516685 - DNA, 55 bp, Artificial
  Synthetic oligonucleotide
tgcaccgctacaccgtgctgccctcaggcgaggtgaccatccaaactcgtggcaa

SEQ ID NO: 516686 - DNA, 55 bp, Artificial
  Synthetic oligonucleotide
actcggaatggtatgagtggttcacctgttactaacttggatggtaggatccttg

SEQ ID NO: 516687 - DNA, 55 bp, Artificial
  Synthetic oligonucleotide
tgcttccaaatttgccaagcacagcatgtatgatgctctccgtgattctgattgg

SEQ ID NO: 516688 - DNA, 55 bp, Artificial
  Synthetic oligonucleotide
tgggacaggtgttacacttgctgtccaagggatgactgaacttagtgaatacaac

SEQ ID NO: 516689 - DNA, 55 bp, Artificial
  Synthetic oligonucleotide
tggctgtgacccaaattaatgctccaaatactgggccaaacaatgcgccagcagt

SEQ ID NO: 516690 - DNA, 55 bp, Artificial
  Synthetic oligonucleotide
cgtggaaactccaacgtggagatctcactggacccagagaaacttggtggctgac

SEQ ID NO: 516691 - DNA, 55 bp, Artificial
  Synthetic oligonucleotide
ccggcccgcgacagacgtggtggatgactgacactaatgaggagggcggtcaatc

SEQ ID NO: 516692 - DNA, 55 bp, Artificial
  Synthetic oligonucleotide
ccctggacgtgggagatagcccttacgggcttggtattggcgctcatgctagcgg

SEQ ID NO: 516693 - DNA, 55 bp, Artificial
  Synthetic oligonucleotide
ctcatggtgacacgttctcttatccctgcccaactagggacggaatgtctggagc

SEQ ID NO: 516694 - DNA, 55 bp, Artificial
  Synthetic oligonucleotide
cccaatgaggtgtttatgcacatcaagagagtccgctactccttctttgcgaagg

SEQ ID NO: 516695 - DNA, 55 bp, Artificial
  Synthetic oligonucleotide
ctgtgccgattggcacctgtgggatggagcggacataccgacctagtggcttagg

SEQ ID NO: 516696 - DNA, 55 bp, Artificial
  Synthetic oligonucleotide
ctgttgcgccatgattatgaacgtgtacgtcctcagcaaccggcaacccctaggt

SEQ ID NO: 516697 - DNA, 55 bp, Artificial
  Synthetic oligonucleotide
cttcgaaaagcactatcctgtagaaactcagttcgctgactgggcctggcgagtc

SEQ ID NO: 516698 - DNA, 55 bp, Artificial
  Synthetic oligonucleotide
gaactacatagtcacagcaggccatgttgttaatggaagtgaatgggcgacggct

SEQ ID NO: 516699 - DNA, 55 bp, Artificial
  Synthetic oligonucleotide
gaccaatctgtgattacaacattcctgatgaacccctcttaggcattctaccacc

SEQ ID NO: 516700 - DNA, 55 bp, Artificial
  Synthetic oligonucleotide
gagcgtcgcttagtgccagaggactacccgcttattggtggggtgcccctggaca

SEQ ID NO: 516701 - DNA, 55 bp, Artificial
  Synthetic oligonucleotide
gatacagtttacaccactcgtgggttcatcggctgtaactggctcagtgtaccgc

SEQ ID NO: 516702 - DNA, 55 bp, Artificial
  Synthetic oligonucleotide
ttggctgtttggttatggacacctggttgccacatcctgtcttaacgtttgagga

SEQ ID NO: 516703 - DNA, 55 bp, Artificial
  Synthetic oligonucleotide
gcactacgtgatgctgattgggaacatctccctgcagagggaatgagctcagtgc

SEQ ID NO: 516704 - DNA, 55 bp, Artificial
  Synthetic oligonucleotide
ccaaccaggtgacccctttggcctactcgctttcgggcttactccagtcatctac

SEQ ID NO: 516705 - DNA, 55 bp, Artificial
  Synthetic oligonucleotide
gccatgcaacgtgagatgggaatcttacgtgaggagattaatgatagtcttctcc

SEQ ID NO: 516706 - DNA, 55 bp, Artificial
  Synthetic oligonucleotide
caacactagtgggtggtctcatttacaggccagaactaccgccctcagcaacccc

SEQ ID NO: 516707 - DNA, 55 bp, Artificial
  Synthetic oligonucleotide
caatctagataccttgttggaccgcggtctggctggtggggtatggacaccggag

SEQ ID NO: 516708 - DNA, 55 bp, Artificial
  Synthetic oligonucleotide
gtcactactcctacgtctgcccgacgcgggatgggatgtctggtgctcctctgct

SEQ ID NO: 516709 - DNA, 55 bp, Artificial
  Synthetic oligonucleotide
gtagtggcacaggttttagacttggcaatgatattgtcacagctgcacatgtcat

SEQ ID NO: 516710 - DNA, 55 bp, Artificial
  Synthetic oligonucleotide
ttgcaggctactttcaagcgggcagcgagattggctctggcacccagacagcact

SEQ ID NO: 516711 - DNA, 55 bp, Artificial
  Synthetic oligonucleotide
ggcctctgcaccaaccctaacgggtcctgttaatgatagggtagtacctggcccc

SEQ ID NO: 516712 - DNA, 55 bp, Artificial
  Synthetic oligonucleotide
ggaggctgggcctaatgtccatggaaccgaacagggcatgcctcttacccgtggc

SEQ ID NO: 516713 - DNA, 55 bp, Artificial
  Synthetic oligonucleotide
ggaaatgtcaaacgcaagcaacgtgctccaggtaaccagcgagctaaacctcctg

SEQ ID NO: 516714 - DNA, 55 bp, Artificial
  Synthetic oligonucleotide
gcttccttcaccctcacagccgccgatgtacctggccccaagcagggttggttct

SEQ ID NO: 516715 - DNA, 55 bp, Artificial
  Synthetic oligonucleotide
catggccctgcgtaaggagtatacttcccttgtggaccaagcggtcgacgctggg

SEQ ID NO: 516716 - DNA, 55 bp, Artificial
  Synthetic oligonucleotide
gctgatgtgcgggaggtttggataccaaccgttgtcactaatgagcaacgcacca

SEQ ID NO: 516717 - DNA, 55 bp, Artificial
  Synthetic oligonucleotide
gcggggataacaccaccccgcttgaagatctccaagaagcactgctgcgactggg

SEQ ID NO: 516718 - DNA, 55 bp, Artificial
  Synthetic oligonucleotide
gcctatattggcacattggcactagatagactcaagctacttgaacgtaaccgtg

SEQ ID NO: 516719 - DNA, 55 bp, Artificial
  Synthetic oligonucleotide
gccgtttcccagacggttacggcgacattgggtacgataggagctaatagctcgg

SEQ ID NO: 516720 - DNA, 55 bp, Artificial
  Synthetic oligonucleotide
gccgccacgtacccacgtgagtggtcttttgcaacaaaagctctgaggagggagt

SEQ ID NO: 516721 - DNA, 55 bp, Artificial
  Synthetic oligonucleotide
gccattggctatccattacgtgggtactattggccgactacaggtttccaacgtg

SEQ ID NO: 516722 - DNA, 54 bp, Artificial
  Synthetic oligonucleotide
tttggccaataattccatcaggtagcccagttgttgacttctatgtgagtggaa

SEQ ID NO: 516723 - DNA, 54 bp, Artificial
  Synthetic oligonucleotide
tactcctacaaaaaggcttccaaatatcgaggccttgtgggggaaattgatctc

SEQ ID NO: 516724 - DNA, 54 bp, Artificial
  Synthetic oligonucleotide
ggctggtggggtatggacaccggagagtcaccaactgacacagttggtccagca

SEQ ID NO: 516725 - DNA, 54 bp, Artificial
  Synthetic oligonucleotide
ggctaaagggaagaccaaacgtggccgtgggaagaagcataccatcggggctcg

SEQ ID NO: 516726 - DNA, 53 bp, Artificial
  Synthetic oligonucleotide
tgccaaggcgcttcactcggagacaattggagtacatttggaggggtggacca

SEQ ID NO: 516727 - DNA, 53 bp, Artificial
  Synthetic oligonucleotide
ctttggttatggagttctggaaatggttaaggttgacactggttcagtgcaac

SEQ ID NO: 516728 - DNA, 52 bp, Artificial
  Synthetic oligonucleotide
gtatactagataggtacgttatgttaccttctggtgaagtcaccaaacaggt

SEQ ID NO: 516729 - DNA, 52 bp, Artificial
  Synthetic oligonucleotide
gatgctcagtaccttgtctatgcgtccttggctgacgcacagaataatcggc

SEQ ID NO: 516730 - DNA, 51 bp, Artificial
  Synthetic oligonucleotide
ggttagctatggagcgttcctataaaccagggggtcttaatatctatgacc

SEQ ID NO: 516731 - DNA, 51 bp, Artificial
  Synthetic oligonucleotide
cgatctatggtttggcctcaacatgctgatgtgggagaaaggcttggttcc

SEQ ID NO: 516732 - DNA, 50 bp, Artificial
  Synthetic oligonucleotide
tggctggactagtgcgaccaactaaaagattacctgacattttatcgctg

SEQ ID NO: 516733 - DNA, 50 bp, Artificial
  Synthetic oligonucleotide
tgcaccatttgtgcgcgtttgcccagaatcactctgtactgtcaccgcag

SEQ ID NO: 516734 - DNA, 50 bp, Artificial
  Synthetic oligonucleotide
atgctgacacggtctataaggccattcccagtagtgggacggaatggtca

SEQ ID NO: 516735 - DNA, 50 bp, Artificial
  Synthetic oligonucleotide
tacaattactcagctttgtccattgttccataccttgatgtttatagtac

SEQ ID NO: 516736 - DNA, 50 bp, Artificial
  Synthetic oligonucleotide
ccacttatagaacattgccagacaattatgttaatcaagttgttaacatg

SEQ ID NO: 516737 - DNA, 57 bp, Artificial
  Synthetic oligonucleotide
ctccaactcttcattaatacaatgtagtgccaataaaggattaggatgaacagcatc

SEQ ID NO: 516738 - DNA, 55 bp, Artificial
  Synthetic oligonucleotide
tgttagccataccggctctcatgtgcggtctgatcctatcccactcgagcgcagg

SEQ ID NO: 516739 - DNA, 55 bp, Artificial
  Synthetic oligonucleotide
tgcaggtaacaattgccacttgtctttgaggcaacgaagtattaattgcttcgac

SEQ ID NO: 516740 - DNA, 55 bp, Artificial
  Synthetic oligonucleotide
tagaaaagtctaccatgatgcacccgttagagttaaactcgcggcgttgcaacgc

SEQ ID NO: 516741 - DNA, 55 bp, Artificial
  Synthetic oligonucleotide
gggttgtacaacggaacatccgccaataatcctacgtcacgaatgtgacatgtgc

SEQ ID NO: 516742 - DNA, 55 bp, Artificial
  Synthetic oligonucleotide
gccgcgagaaatgttgaagcgaatatttcattacgccaaatgggctagagtcccg

SEQ ID NO: 516743 - DNA, 55 bp, Artificial
  Synthetic oligonucleotide
gcaagagcagatcctaccaatgtgacttcgtcaaaatcgtctattctttcgctcg

SEQ ID NO: 516744 - DNA, 55 bp, Artificial
  Synthetic oligonucleotide
gaaactatgggtgccgtggctagacatcccgtttactatcccaatctgtggcgag

SEQ ID NO: 516745 - DNA, 55 bp, Artificial
  Synthetic oligonucleotide
ctgtctgtggcagagttgcgataagttgattatcaacggtcacgattacgccgag

SEQ ID NO: 516746 - DNA, 55 bp, Artificial
  Synthetic oligonucleotide
ctgaatgctaacatcacgaaactgccgcctatatatacagaactgccactgacca

SEQ ID NO: 516747 - DNA, 55 bp, Artificial
  Synthetic oligonucleotide
ctagacaataagcgcgacgtgtactacaaaagcacaccgttctacctcaacgtgc

SEQ ID NO: 516748 - DNA, 55 bp, Artificial
  Synthetic oligonucleotide
cgttgggcggactcgacgttggaaatttaaccgctcaaatgaccggtatagccga

SEQ ID NO: 516749 - DNA, 55 bp, Artificial
  Synthetic oligonucleotide
cggcaatgaaagtgatcaatcggacaacggcaatgaaagtgatcaagaactagaa

SEQ ID NO: 516750 - DNA, 55 bp, Artificial
  Synthetic oligonucleotide
cgctcaactcaaccttgccgacgttcagatagaagctagccgtggtgtccaagcg

SEQ ID NO: 516751 - DNA, 55 bp, Artificial
  Synthetic oligonucleotide
cgacggcggtttattacataccgctttcgaacagatgatacaaatgggaggcgtc

SEQ ID NO: 516752 - DNA, 55 bp, Artificial
  Synthetic oligonucleotide
ccgatcaagtgcacggcgccaggattttagccgttttcccgacgccttcttacag

SEQ ID NO: 516753 - DNA, 55 bp, Artificial
  Synthetic oligonucleotide
catccgcaagactgcgttgtttaaacgatggatctagacgcgaagctgctttcgc

SEQ ID NO: 516754 - DNA, 55 bp, Artificial
  Synthetic oligonucleotide
cacaatactagataacacacaacccatgtaaatatattcggacactagtgcggca

SEQ ID NO: 516755 - DNA, 55 bp, Artificial
  Synthetic oligonucleotide
caactacgatcgctgtccacatgatgactgatgttggagcgacgcggtgggcggt

SEQ ID NO: 516756 - DNA, 55 bp, Artificial
  Synthetic oligonucleotide
attcggcgcgtatgtagacatttacgatttgagcacaccacaacgcgtagagcga

SEQ ID NO: 516757 - DNA, 55 bp, Artificial
  Synthetic oligonucleotide
aggtggcgcgtttgctcgatctaaagaccgctgacggcattagtctgaagagtca

SEQ ID NO: 516758 - DNA, 55 bp, Artificial
  Synthetic oligonucleotide
aactgtactggctggtttgcgagaaaatgtaaacagccatccggattgtgtcgac

SEQ ID NO: 516759 - DNA, 55 bp, Artificial
  Synthetic oligonucleotide
aacagatccgcattatagacagatgcagcgccaaatgtatgtgctcgattcgccg

SEQ ID NO: 516760 - DNA, 54 bp, Artificial
  Synthetic oligonucleotide
gtcgtggcccaaaacgatgtcggtaatgctcccgtatacaatttgattatatac

SEQ ID NO: 516761 - DNA, 51 bp, Artificial
  Synthetic oligonucleotide
tgcagagagattttgatgcaatcgggaaccaaaagtttgcctgggaacggt

SEQ ID NO: 516762 - DNA, 60 bp, Artificial
  Synthetic oligonucleotide
ccggatgagtggtgtgaagggttctccagaagagtacccagagtgttataactactgaag

SEQ ID NO: 516763 - DNA, 60 bp, Artificial
  Synthetic oligonucleotide
gtccagatctttttgtggccttgactaggcacaaaactaaattagtcctcgtgactaatt

SEQ ID NO: 516764 - DNA, 60 bp, Artificial
  Synthetic oligonucleotide
cccgttacagtcgcgccagttacccgaaagatggtgtggggtggttccaagctaggagga

SEQ ID NO: 516765 - DNA, 60 bp, Artificial
  Synthetic oligonucleotide
cccggttttctgtgcatttccgggttagtgtggtttttctagagtctagagtttgtcctc

SEQ ID NO: 516766 - DNA, 60 bp, Artificial
  Synthetic oligonucleotide
cccgacaaagagaatttgacagggagaagaatcaaagcttggggaggaaatcttgaatct

SEQ ID NO: 516767 - DNA, 60 bp, Artificial
  Synthetic oligonucleotide
gtgaaggccaacatgggtcgaaatgttgatgtgtataccttcggtgagagtactggcatg

SEQ ID NO: 516768 - DNA, 60 bp, Artificial
  Synthetic oligonucleotide
gtggtgatgcctttgacgccacctcctgatcattctaactcctacttcgccatcgcaatc

SEQ ID NO: 516769 - DNA, 60 bp, Artificial
  Synthetic oligonucleotide
gttaagcgttttacgtaaagataagaagcttagattcctcgaggctctaaatagatgtgt

SEQ ID NO: 516770 - DNA, 60 bp, Artificial
  Synthetic oligonucleotide
cattcctgatgataggtacaatgatttccttaagaacaatgccaatgttgtaccattcac

SEQ ID NO: 516771 - DNA, 60 bp, Artificial
  Synthetic oligonucleotide
catgaggcttcacgtactccaatggatactgaggacggacaaggttttgaaggttccata

SEQ ID NO: 516772 - DNA, 60 bp, Artificial
  Synthetic oligonucleotide
gttcaattacattcaaacagttccaactcaggccatcaggtcaagggagcacgaaatccc

SEQ ID NO: 516773 - DNA, 60 bp, Artificial
  Synthetic oligonucleotide
gttgccaaatttcagaggcatggaggggagagtcattgtttacgatggagcctgcctgga

SEQ ID NO: 516774 - DNA, 60 bp, Artificial
  Synthetic oligonucleotide
gttgctggtagggactcctcaattctcgtaatgggggatcctgcacaaagtagctacgat

SEQ ID NO: 516775 - DNA, 60 bp, Artificial
  Synthetic oligonucleotide
cactggagagttctgtacctttctattcaacacactagcaaacatagccttcacgttgtg

SEQ ID NO: 516776 - DNA, 60 bp, Artificial
  Synthetic oligonucleotide
gtttaagcacctcgggcatttacctcagtccttactctgctgtgccacactcgcaccccg

SEQ ID NO: 516777 - DNA, 60 bp, Artificial
  Synthetic oligonucleotide
cacctgtaggaatgtcaatctcagttagtagtcaacgagtggcggcagcctcgttgtata

SEQ ID NO: 516778 - DNA, 60 bp, Artificial
  Synthetic oligonucleotide
taaaggaacgtcttgtgaggtgcatacatgggagactgctttaaggaagattgacgggac

SEQ ID NO: 516779 - DNA, 60 bp, Artificial
  Synthetic oligonucleotide
taacctacttcccaaactttgagcgggctgaaaagttgcaaggatgtctgctagggggcc

SEQ ID NO: 516780 - DNA, 60 bp, Artificial
  Synthetic oligonucleotide
cacaacactgtactaaatttgacaacaggcttagagtagctaaagctgggcaaacccttg

SEQ ID NO: 516781 - DNA, 60 bp, Artificial
  Synthetic oligonucleotide
tacaatgatctgagagctctactgcctggtgatcctatgttctcaaagaagtttatgcgg

SEQ ID NO: 516782 - DNA, 60 bp, Artificial
  Synthetic oligonucleotide
tagactggcatgggaggatgggtgggccaggactttagccttaaagtataagtaaggcag

SEQ ID NO: 516783 - DNA, 60 bp, Artificial
  Synthetic oligonucleotide
caaggacaaaaagcttagattccttgaggctctgaacagatgtgtcacctcacatgacat

SEQ ID NO: 516784 - DNA, 60 bp, Artificial
  Synthetic oligonucleotide
caactttcactattagtaagtcgcgaaatttggttgagggtaatcattgcagcctgacaa

SEQ ID NO: 516785 - DNA, 60 bp, Artificial
  Synthetic oligonucleotide
tatgagagtcccctagatgttggaaattcatccattcaggacaaggcctccaatgactta

SEQ ID NO: 516786 - DNA, 60 bp, Artificial
  Synthetic oligonucleotide
gaaagaatgtgtcgacaattacctatttgaagcaatatttgcctacagattaggtgagag

SEQ ID NO: 516787 - DNA, 60 bp, Artificial
  Synthetic oligonucleotide
cttagaattgacttattatatcacgggtgacccttgccaaagtgattatgatagcgaatt

SEQ ID NO: 516788 - DNA, 60 bp, Artificial
  Synthetic oligonucleotide
ctggtttatatgcctgatggagtgaggtctgaaagttacacccaacctcttgaaaatggc

SEQ ID NO: 516789 - DNA, 60 bp, Artificial
  Synthetic oligonucleotide
gaacagtttcgaccagaatgtatactggctactctagtttgtccacccgaaatcttggca

SEQ ID NO: 516790 - DNA, 60 bp, Artificial
  Synthetic oligonucleotide
ctgcactgcagccagtggaagggttagttagaaaccccacggataaggagatgactgccg

SEQ ID NO: 516791 - DNA, 60 bp, Artificial
  Synthetic oligonucleotide
gaagtcatacatagcaacaactagacataggaataagctcttgattcttagtggtgatgc

SEQ ID NO: 516792 - DNA, 60 bp, Artificial
  Synthetic oligonucleotide
gaatctggaggagtcagtgtggcgaccctagtgagcctgtctcgcgcacttggattccct

SEQ ID NO: 516793 - DNA, 60 bp, Artificial
  Synthetic oligonucleotide
gaccatcggaataagacaccggtttctgataagttaaaggtggataagagtaatatcttt

SEQ ID NO: 516794 - DNA, 60 bp, Artificial
  Synthetic oligonucleotide
gagagatagtggagcacaagcacaagttaccaaagaagatcgctgggctgttcagcgacg

SEQ ID NO: 516795 - DNA, 60 bp, Artificial
  Synthetic oligonucleotide
ctaaaggagtgcaagaaggcgcaaggtaagatgcggaagagattctacttcgagcttgga

SEQ ID NO: 516796 - DNA, 60 bp, Artificial
  Synthetic oligonucleotide
cgtcagattgttaaaggaaggtggtggagcgcaaatgtcaaatgagaatctaaatgctga

SEQ ID NO: 516797 - DNA, 60 bp, Artificial
  Synthetic oligonucleotide
gatgggacaaaaattgagggcagtgttgaaaatgaccagccacatggggcatcacatact

SEQ ID NO: 516798 - DNA, 60 bp, Artificial
  Synthetic oligonucleotide
gccattgccatttgattctgctatttgaccctctgcaggcaaggtatcataataagatgg

SEQ ID NO: 516799 - DNA, 60 bp, Artificial
  Synthetic oligonucleotide
gcctctcactgctcattatatcaacagctgcactcatcgctttggcccttcagtttgtca

SEQ ID NO: 516800 - DNA, 60 bp, Artificial
  Synthetic oligonucleotide
gctttcgaaaaaagcccgtgggtggcatttgactttgccaccggtctcaaaatgaatcgt

SEQ ID NO: 516801 - DNA, 60 bp, Artificial
  Synthetic oligonucleotide
ggacgactcaaagttctctagaaagttctttgcagacatttggagcgtcaaaactgagga

SEQ ID NO: 516802 - DNA, 60 bp, Artificial
  Synthetic oligonucleotide
ggagtgtatctatggaaaactcacatagacccggcgaaggaacttatgacggttcctccc

SEQ ID NO: 516803 - DNA, 60 bp, Artificial
  Synthetic oligonucleotide
gggaagagtagcccttgagggcgagactcctgtttatcgaacttggatcaagtgggtgga

SEQ ID NO: 516804 - DNA, 60 bp, Artificial
  Synthetic oligonucleotide
cgaacatgcaagggtcctagcgaattctttccttaatatgaccaccggcatatgtctaag

SEQ ID NO: 516805 - DNA, 60 bp, Artificial
  Synthetic oligonucleotide
gggatagaccactcttctgtgggtggcgcatgagcccgtacggaattgtgaaggagccga

SEQ ID NO: 516806 - DNA, 60 bp, Artificial
  Synthetic oligonucleotide
gggcaagagctactaccctcaaactgtactccagcacacattcggcattcgggcacttgt

SEQ ID NO: 516807 - DNA, 60 bp, Artificial
  Synthetic oligonucleotide
ggtccggactcttggtgaggtgggtctgaaatgcgctaacgcaatgtacgtcgatgtagc

SEQ ID NO: 516808 - DNA, 60 bp, Artificial
  Synthetic oligonucleotide
gtagctgtggggaatcgtactatatacactctggcaaaaacttcttctgcttagatagct

SEQ ID NO: 516809 - DNA, 60 bp, Artificial
  Synthetic oligonucleotide
gtcatgaaattccttggtcttccgcccgacctcattgctgattacactttcattaaaacc

SEQ ID NO: 516810 - DNA, 60 bp, Artificial
  Synthetic oligonucleotide
agcactcgtagcactttaccgtctgtaggggataatatccactcactcccacacgggggt

SEQ ID NO: 516811 - DNA, 60 bp, Artificial
  Synthetic oligonucleotide
agcacacacggctacgaccgaacaatgtacctgaatactctcttcgggtacatcgccttg

SEQ ID NO: 516812 - DNA, 60 bp, Artificial
  Synthetic oligonucleotide
tgcaagaggttgattgagagacagacctcctggggactttttgggtatagttttttcgac

SEQ ID NO: 516813 - DNA, 60 bp, Artificial
  Synthetic oligonucleotide
tgcctttgaaaaatgtcccggggctggtaagttccgctacgaggcgttacgtgagagagg

SEQ ID NO: 516814 - DNA, 60 bp, Artificial
  Synthetic oligonucleotide
agaggtaccagctctaccttaatgactgaggtgactgggggcaggactggccaaattcaa

SEQ ID NO: 516815 - DNA, 60 bp, Artificial
  Synthetic oligonucleotide
tggaatttcaacttggccagaaacacacctcccgaaaattggaggaaaaaggggttcaca

SEQ ID NO: 516816 - DNA, 60 bp, Artificial
  Synthetic oligonucleotide
agaatcagactacacagcgtttgatgtttcacaagaccacaccatcctggcttttgaagt

SEQ ID NO: 516817 - DNA, 60 bp, Artificial
  Synthetic oligonucleotide
actgcactattggagcaagcgcacgctcatgaactttctgagtgagttgcaacctgaggt

SEQ ID NO: 516818 - DNA, 60 bp, Artificial
  Synthetic oligonucleotide
ttaaaggaacagcttgtgaagtgcatacatgggaggttgctttaaagaagattgacggga

SEQ ID NO: 516819 - DNA, 60 bp, Artificial
  Synthetic oligonucleotide
ttaccacatccaaaactgaggatgttagatataggacctggacaatcaccaaactgcaga

SEQ ID NO: 516820 - DNA, 60 bp, Artificial
  Synthetic oligonucleotide
accgatggcaccggagccagtgaagacacatttgttcctaagtgagggggtgaacgagat

SEQ ID NO: 516821 - DNA, 60 bp, Artificial
  Synthetic oligonucleotide
ttacccaaggcacaaggccggagacactgcaacttttgtcatggctgcaaggaaaaggct

SEQ ID NO: 516822 - DNA, 60 bp, Artificial
  Synthetic oligonucleotide
acccctactgcatatatgatgggtgctgttgtgttttcacaggcatgcatgcaaatttaa

SEQ ID NO: 516823 - DNA, 60 bp, Artificial
  Synthetic oligonucleotide
accagagtacgacgcccgctgcctggagaagttcatcagggcgtgtgagaccacagaatt

SEQ ID NO: 516824 - DNA, 60 bp, Artificial; identical to SEQ ID NO: 478296
  Synthetic oligonucleotide

SEQ ID NO: 516825 - DNA, 60 bp, Artificial
  Synthetic oligonucleotide
aatggttcattcaattccgtgtgcactgagtcagattatgaagcctttgatgcaagccag

SEQ ID NO: 516826 - DNA, 60 bp, Artificial
  Synthetic oligonucleotide
ttattggagcaagcgagatcttgtcactttcttggatgccgttgatccaagtctgttaat

SEQ ID NO: 516827 - DNA, 60 bp, Artificial
  Synthetic oligonucleotide
aagtttcattgaatacgctaagaaccttaagcccgccaagcactggtaggcccttaggtt

SEQ ID NO: 516828 - DNA, 60 bp, Artificial
  Synthetic oligonucleotide
aacttaagtataaaggggttttcacgaacctttttactacaatgccagaagttgggagca

SEQ ID NO: 516829 - DNA, 60 bp, Artificial
  Synthetic oligonucleotide
ttcatttcacttgccggtgatccatgtcaaagtacatatgattcgcaaaaggatcgggca

SEQ ID NO: 516830 - DNA, 60 bp, Artificial
  Synthetic oligonucleotide
aaatttaacaggcttaatttccgcgctttacgtccatggctttcacttacagaaacccct

SEQ ID NO: 516831 - DNA, 60 bp, Artificial
  Synthetic oligonucleotide
ttccaacactctgtaacacatgccagttctggtcgagtttcacttacatttcggctgcaa

SEQ ID NO: 516832 - DNA, 60 bp, Artificial
  Synthetic oligonucleotide
ttgaggagttctcaaaattgtgtctcaagtgcgaaaccttaaacacaaacatgctaccag

SEQ ID NO: 516833 - DNA, 60 bp, Artificial
  Synthetic oligonucleotide
ttgcttacttctgttctcattatggaatacgattaaatgtgctctacacaagagaggaat

SEQ ID NO: 516834 - DNA, 60 bp, Artificial
  Synthetic oligonucleotide
ttgggtggcggcctagggagtttcatgaggtatgatagcacgaaacgcaaatttttgagt

SEQ ID NO: 516835 - DNA, 60 bp, Artificial
  Synthetic oligonucleotide
tttggaagacgtgcttcaacaagcgaggcgccaccgggtaggagcgtatctatggaaaac

SEQ ID NO: 516836 - DNA, 60 bp, Artificial
  Synthetic oligonucleotide
tatttgccatccaccttggatttgaggaagggcatatggtccaaagaggggatcatttcc

SEQ ID NO: 516837 - DNA, 60 bp, Artificial
  Synthetic oligonucleotide
tcaaagtgttgaattggatgaagttacacctgaggaaccattgaggcatgagagcccacc

SEQ ID NO: 516838 - DNA, 60 bp, Artificial
  Synthetic oligonucleotide
attttctgaggaagtcaaatctaccttattcaggggacaacatccatcaattcccccacg

SEQ ID NO: 516839 - DNA, 60 bp, Artificial
  Synthetic oligonucleotide
atttgttggatccattttcaggggaaggttaccgtgtgaatttttgaatgggacagcttg

SEQ ID NO: 516840 - DNA, 60 bp, Artificial
  Synthetic oligonucleotide
tcagaaaattccccatgttttgtggatggtatctaagcccttatggaattatcaagtctc

SEQ ID NO: 516841 - DNA, 60 bp, Artificial
  Synthetic oligonucleotide
atgtaccgtatccgttcaatggaaggtactcaagctgtcaactttggtgaggtcactggg

SEQ ID NO: 516842 - DNA, 60 bp, Artificial
  Synthetic oligonucleotide
tcagcacctgctgaattcggaaaatgagttcagatgtgtcccgaaaggcttggatgttaa

SEQ ID NO: 516843 - DNA, 60 bp, Artificial
  Synthetic oligonucleotide
atgaaaagcgggctgcttcagagaatgtgctttggtgttggggcttcaaaagaatttatc

SEQ ID NO: 516844 - DNA, 60 bp, Artificial
  Synthetic oligonucleotide
tcgcgagaaaagaatgggcatgctggtttcagagcaattcacagatgagcatagcaggaa

SEQ ID NO: 516845 - DNA, 60 bp, Artificial
  Synthetic oligonucleotide
atcccagactcagttagagagatactaactggctatggaatggagttcagtgtgcactcc

SEQ ID NO: 516846 - DNA, 60 bp, Artificial
  Synthetic oligonucleotide
tcttcttcaacactctgagtaatatggtattcagttgcatgaggtaccatctgagcaaaa

SEQ ID NO: 516847 - DNA, 60 bp, Artificial
  Synthetic oligonucleotide
atacgactagccagcaagaatttgtagagtatttcaaagagggcccgactaggttcgaca

SEQ ID NO: 516848 - DNA, 60 bp, Artificial
  Synthetic oligonucleotide
ataaacccctgcaattccactctcacgagagtgcccgtttgaatgacacggggcgaagct

SEQ ID NO: 516849 - DNA, 60 bp, Artificial
  Synthetic oligonucleotide
tgaaaatggctacctgcttagttcgagtagcatactcattaaagacagaaccactggggt

SEQ ID NO: 516850 - DNA, 60 bp, Artificial
  Synthetic oligonucleotide
tgattcttgcgaagaagtgctaacttttggtgaatccactggcaggaatttcacttgggg

SEQ ID NO: 516851 - DNA, 60 bp, Artificial
  Synthetic oligonucleotide
aggtgatgctatcactgatgatgttcgaacttttggtaattttgacgcagtatcagctgg

SEQ ID NO: 516852 - DNA, 60 bp, Artificial
  Synthetic oligonucleotide
aggtcaaggatacgaggctaaaggggcccagctcacggatatcaaggagcttcatggatt

SEQ ID NO: 516853 - DNA, 60 bp, Artificial
  Synthetic oligonucleotide
tgatttacagcagttttacataccgttcaatgagtacccaagtttgacgcaatcaattgg

SEQ ID NO: 516854 - DNA, 60 bp, Artificial
  Synthetic oligonucleotide
agctactgggcagtcaaaattgttcaggtttttggtggacgactgtgttatgcgtgaggt

SEQ ID NO: 516855 - DNA, 60 bp, Artificial
  Synthetic oligonucleotide
agcatctgtataaagtttactcctatctactgtgccttaaaaagcctgaccttgagagtg

SEQ ID NO: 516856 - DNA, 60 bp, Artificial
  Synthetic oligonucleotide
agcatatacttgacagaatgacccttaaagcaaaagttcaatacacaactgagcccacct

SEQ ID NO: 516857 - DNA, 59 bp, Artificial
  Synthetic oligonucleotide
tctttatgccctccaaatcaaatccagagaggaattggattctgaattctggttcgctg

SEQ ID NO: 516858 - DNA, 59 bp, Artificial
  Synthetic oligonucleotide
cagatcggcatatttttgcaggcagcgagagtgacatcatgaggactctcagtggccga

SEQ ID NO: 516859 - DNA, 59 bp, Artificial
  Synthetic oligonucleotide
gtggattgaggaatttgtgggagtacaattgttcaaccacatcttatcccgctccctcc

SEQ ID NO: 516860 - DNA, 59 bp, Artificial
  Synthetic oligonucleotide
caaatggttgaaaccatcaataggtacatatccagtatcgataaaactaggtatggtgg

SEQ ID NO: 516861 - DNA, 58 bp, Artificial
  Synthetic oligonucleotide
gagtgccttgagaactatgcaattgaggtttcttatgcctacagtttaagtgagaggc

SEQ ID NO: 516862 - DNA, 58 bp, Artificial
  Synthetic oligonucleotide
tcagatggcgctatctttcagattgcccgttagcgatgttcttaatggcttcacttcc

SEQ ID NO: 516863 - DNA, 58 bp, Artificial
  Synthetic oligonucleotide
aaaacctgatcatcactctgcaatcgccaagatcaggcaaagctcagatgactctatc

SEQ ID NO: 516864 - DNA, 58 bp, Artificial
  Synthetic oligonucleotide
aacgctgagtgtgggttattgccttgttcaaaaaaagcttacactcaagtactagccg

SEQ ID NO: 516865 - DNA, 57 bp, Artificial
  Synthetic oligonucleotide
gccaatgaagtcttgctctagcaccaatgcagcagcaagagacagcatgaatgataa

SEQ ID NO: 516866 - DNA, 57 bp, Artificial
  Synthetic oligonucleotide
cttgtgaccttcgtggagctgaatttgacgacgttaccttcatttctgctcatactg

SEQ ID NO: 516867 - DNA, 57 bp, Artificial
  Synthetic oligonucleotide
tgtgtgggcgaagacatatgtcgacaccatggtggggactgattctgattatgaggc

SEQ ID NO: 516868 - DNA, 57 bp, Artificial
  Synthetic oligonucleotide
tttgcttcgctggtgatgacatgtgcgctaacaaaagactaagattgtcttctgagt

SEQ ID NO: 516869 - DNA, 57 bp, Artificial
  Synthetic oligonucleotide
gcaagattgaatgctactaatccagagtacatctccgagctgtctaaaggagggccc

SEQ ID NO: 516870 - DNA, 56 bp, Artificial
  Synthetic oligonucleotide
ggagtcatggtgggcacgtttggctctggcaaaagtcacagtgtagttgaattgct

SEQ ID NO: 516871 - DNA, 56 bp, Artificial
  Synthetic oligonucleotide
gctatcggggtgaatctggatttactgggaaaaagatttgattatgaagctgagag

SEQ ID NO: 516872 - DNA, 56 bp, Artificial
  Synthetic oligonucleotide
aaactaagtttgacaataagcattcagctttgatctacctctgtttaactagacac

SEQ ID NO: 516873 - DNA, 56 bp, Artificial
  Synthetic oligonucleotide
gaggctgggtactcaaaaattcatttgttggaatgtgcactgaatctgactatgag

SEQ ID NO: 516874 - DNA, 55 bp, Artificial
  Synthetic oligonucleotide
ggggccaagtttgcggcctttgacttctttgaggcagtaaccagtgaagctgcat

SEQ ID NO: 516875 - DNA, 55 bp, Artificial
  Synthetic oligonucleotide
aggccggggaatacaagttgtgttttgctaatcactggggagtcagtcaggctgg

SEQ ID NO: 516876 - DNA, 55 bp, Artificial
  Synthetic oligonucleotide
gggtacgtatacacagttagcatctaagatgactaggtcgggctttaaggagcca

SEQ ID NO: 516877 - DNA, 55 bp, Artificial
  Synthetic oligonucleotide
gggtgggcctcatatgtagcaaatttgcgcatcacctcgtggccataactaaagg

SEQ ID NO: 516878 - DNA, 55 bp, Artificial
  Synthetic oligonucleotide
ggtacacagtgggtagctacagattcctcaacccaaaatttgcgaataggctacc

SEQ ID NO: 516879 - DNA, 55 bp, Artificial
  Synthetic oligonucleotide
ggtacgcgcgaggtgggtgcacaaaatactcgccaaagagcatcgcgagaagagg

SEQ ID NO: 516880 - DNA, 55 bp, Artificial
  Synthetic oligonucleotide
ggtatgggtctgagttcgttataagttctagtgacaaatcaagtcaggttgttag

SEQ ID NO: 516881 - DNA, 55 bp, Artificial
  Synthetic oligonucleotide
ggtccaaaggattcattcccaagtagctccctaatttcttcgggaactcctttga

SEQ ID NO: 516882 - DNA, 55 bp, Artificial
  Synthetic oligonucleotide
cctgatggggtgaggtctgaaagttacacccaacctcttgaaaatggctacctgc

SEQ ID NO: 516883 - DNA, 55 bp, Artificial
  Synthetic oligonucleotide
ggtctttgccgggagaattccggtggccacggtgagtgagtctcaggggatgacc

SEQ ID NO: 516884 - DNA, 55 bp, Artificial
  Synthetic oligonucleotide
tgcaaaataagtgcttgttccattcaaatgctatcaagttcttcaaggaagggga

SEQ ID NO: 516885 - DNA, 55 bp, Artificial
  Synthetic oligonucleotide
gggctttgaatcagagagtctggctggattagtgctagatcagaaatatggaccc

SEQ ID NO: 516886 - DNA, 55 bp, Artificial
  Synthetic oligonucleotide
gggcctgcccaatgatctcatagaggactacaagtacatcaagacacaccttggt

SEQ ID NO: 516887 - DNA, 55 bp, Artificial
  Synthetic oligonucleotide
gggcatcagagtgtcgagcagtgccaactgattgtaaacggtgagtcagtaaagc

SEQ ID NO: 516888 - DNA, 55 bp, Artificial
  Synthetic oligonucleotide
gggcagacccagactgagaccgctagcggagatgactccagatctcaccaatcca

SEQ ID NO: 516889 - DNA, 55 bp, Artificial
  Synthetic oligonucleotide
ccttgtgtaattgaaggccaatctgttgaaggtacatgtctttaattagatgtgg

SEQ ID NO: 516890 - DNA, 55 bp, Artificial
  Synthetic oligonucleotide
gggagcaccagcttactgaagttggggtttatcttgccaggcactgcgctgatgt

SEQ ID NO: 516891 - DNA, 55 bp, Artificial
  Synthetic oligonucleotide
tgcacatcacatggtgtctataacgaaaggggaggcccttgttagtcctgtaaga

SEQ ID NO: 516892 - DNA, 55 bp, Artificial
  Synthetic oligonucleotide
agatagggtttgatgtgacagcaatttgtgggtttgccggttctgggaagagtcg

SEQ ID NO: 516893 - DNA, 55 bp, Artificial
  Synthetic oligonucleotide
ggcaataggtctcctagcattcagcattactgcattcatcatcgctagtttcagt

SEQ ID NO: 516894 - DNA, 55 bp, Artificial
  Synthetic oligonucleotide
ggatgatccaggtttgtccaactcgatcagtgtggccgtgatgtttgagaatctt

SEQ ID NO: 516895 - DNA, 55 bp, Artificial
  Synthetic oligonucleotide
ggaggtcatcaatggattcactagccaactcatccaaagagatcaagtcaagtgg

SEQ ID NO: 516896 - DNA, 55 bp, Artificial
  Synthetic oligonucleotide
ggagcaggccttgagggccctggttttcatcctacacaagtcgttcaacgattcg

SEQ ID NO: 516897 - DNA, 55 bp, Artificial
  Synthetic oligonucleotide
ggagatctacaatctgctgtgtgcgcattgcgtagaattcaaaactcctgacgag

SEQ ID NO: 516898 - DNA, 55 bp, Artificial
  Synthetic oligonucleotide
caacccactatgcttgccaggaacaagtaactggccaactagaggtggacctcta

SEQ ID NO: 516899 - DNA, 55 bp, Artificial
  Synthetic oligonucleotide
caaacagttccaactcaggccatcaggtcaagggagcacgaaatcccaaagggat

SEQ ID NO: 516900 - DNA, 55 bp, Artificial
  Synthetic oligonucleotide
atgtcgtgctgttctttactcgggttgactttgattaaatgcataactgccgcag

SEQ ID NO: 516901 - DNA, 55 bp, Artificial
  Synthetic oligonucleotide
cacactgggttgatagcaagaggtgtgctcgatgctcgaacttccacgcctagct

SEQ ID NO: 516902 - DNA, 55 bp, Artificial
  Synthetic oligonucleotide
cacagagtccgactatgaagcatttgatgcttcgcaggaccaatacatcatggcc

SEQ ID NO: 516903 - DNA, 55 bp, Artificial
  Synthetic oligonucleotide
cacgagcctctagtttgcggttgcaatgaagacctctcctatcgcacattaccgc

SEQ ID NO: 516904 - DNA, 55 bp, Artificial
  Synthetic oligonucleotide
gttgtgtacagcattgtataccctgcagaggtggacgctggtttcagtcaaagcc

SEQ ID NO: 516905 - DNA, 55 bp, Artificial
  Synthetic oligonucleotide
cagagaaaaccagggagtggttcactaagtcgggtgtttatttgtcacccttcgc

SEQ ID NO: 516906 - DNA, 55 bp, Artificial
  Synthetic oligonucleotide
cagatccaataagagagagtgctaaactccgggcagcagagatgtatgggccgtt

SEQ ID NO: 516907 - DNA, 55 bp, Artificial
  Synthetic oligonucleotide
tcgaggttggagtaactgaggtgataccaccagggatagaaagtctgagtttcgc

SEQ ID NO: 516908 - DNA, 55 bp, Artificial
  Synthetic oligonucleotide
gttcctccatgacgagttgcacttcttaagcccatttgacgtggcttttctgttt

SEQ ID NO: 516909 - DNA, 55 bp, Artificial
  Synthetic oligonucleotide
gttcagataatggggccgcgcactaataaggttaggggtgtagatgctaggggtg

SEQ ID NO: 516910 - DNA, 55 bp, Artificial
  Synthetic oligonucleotide
cagatcctcagctttgaccactagtcttttaatgcccactagagcaggtaaggcc

SEQ ID NO: 516911 - DNA, 55 bp, Artificial
  Synthetic oligonucleotide
cccactgagcatgttgctggcgtcatactgaaggtcgtaatcatgtgcgcaagcg

SEQ ID NO: 516912 - DNA, 55 bp, Artificial
  Synthetic oligonucleotide
atcctgggatcctcctctgttaatctcattctaagtgaaaaggacatcaccaaag

SEQ ID NO: 516913 - DNA, 55 bp, Artificial
  Synthetic oligonucleotide
cccatggtgtaggtacacagagaaggttctcactgcgaatctaccggacaattac

SEQ ID NO: 516914 - DNA, 55 bp, Artificial
  Synthetic oligonucleotide
atcatcttgcaggaaatatctggaatcaaggggaagaagaactggggctctgcga

SEQ ID NO: 516915 - DNA, 55 bp, Artificial
  Synthetic oligonucleotide
gtgcaccacaagggctcacaatggaggatttcttaagttgcgcttgcgaagcgcg

SEQ ID NO: 516916 - DNA, 55 bp, Artificial
  Synthetic oligonucleotide
ccccggctacatagatcttgtgatctcagtcttccgtccaagcactctggttctg

SEQ ID NO: 516917 - DNA, 55 bp, Artificial
  Synthetic oligonucleotide
ccgcaagagagctacaagaagctagagtggtagcaccgatcacgaggattctgag

SEQ ID NO: 516918 - DNA, 55 bp, Artificial
  Synthetic oligonucleotide
ccgggtgattgggctatcacagaagtgtgacgggttcaagtgtgttcctggtatc

SEQ ID NO: 516919 - DNA, 55 bp, Artificial
  Synthetic oligonucleotide
gtcatcaattgagacagctaacaaggcttttaacttggaggagctaaggatcatg

SEQ ID NO: 516920 - DNA, 55 bp, Artificial
  Synthetic oligonucleotide
atatgtgcgcaaacaccaaattagttatttcgagagagcacgaatggttcttggg

SEQ ID NO: 516921 - DNA, 55 bp, Artificial
  Synthetic oligonucleotide
tgagcacttttcacccgttctaccggtgaatgattgcctagctgtggccatcgca

SEQ ID NO: 516922 - DNA, 55 bp, Artificial
  Synthetic oligonucleotide
ccggtggtaatattcagttggtgactagactgtaccagaatagagccctaggccg

SEQ ID NO: 516923 - DNA, 55 bp, Artificial
  Synthetic oligonucleotide
ggttttctaggttcttaatgaatcttctcctaggaagtcaagagttgcagccatc

SEQ ID NO: 516924 - DNA, 55 bp, Artificial
  Synthetic oligonucleotide
tgagcaggacactgagctgttcgctcttgatattggtgtggcttacagatgcgtt

SEQ ID NO: 516925 - DNA, 55 bp, Artificial
  Synthetic oligonucleotide
ggttgcaacatcagtgttgcattggatagttgcattgactaggagcagacagggt

SEQ ID NO: 516926 - DNA, 55 bp, Artificial
  Synthetic oligonucleotide
ggtgttccggtcccagggtgtggcaatcagtgaggctctacagctaggcttgaca

SEQ ID NO: 516927 - DNA, 55 bp, Artificial
  Synthetic oligonucleotide
ggtgttagttggtgtgttcaagcgtcactatggcttagggccaaggcgcgtgtat

SEQ ID NO: 516928 - DNA, 55 bp, Artificial
  Synthetic oligonucleotide
gatggacttgccctaaaggccggtattcgatcttttgtggagagtgagcgcttgg

SEQ ID NO: 516929 - DNA, 55 bp, Artificial
  Synthetic oligonucleotide
gatgctttggtgacccgctacaattgaggtactactccgctgaggacaccaatct

SEQ ID NO: 516930 - DNA, 55 bp, Artificial
  Synthetic oligonucleotide
gatgctgacatctcaatcgaaagtgtcttcatggtccaagagtttgccagtcgga

SEQ ID NO: 516931 - DNA, 55 bp, Artificial
  Synthetic oligonucleotide
gatgattccatcaggagcttcatctctagcctggtatttaaggaaggtcacaagc

SEQ ID NO: 516932 - DNA, 55 bp, Artificial
  Synthetic oligonucleotide
aatgataacatgcgatcgacctccagccaacttcctgaagagaaaccacaagtgg

SEQ ID NO: 516933 - DNA, 55 bp, Artificial
  Synthetic oligonucleotide
gatatgagtggtgcactcggaataagaatttagagcacataccggaggtaaggga

SEQ ID NO: 516934 - DNA, 55 bp, Artificial
  Synthetic oligonucleotide
ttcatccattcaggataaggcctcccatgacttgttcataatgccgttcataaat

SEQ ID NO: 516935 - DNA, 55 bp, Artificial
  Synthetic oligonucleotide
gataaggctcgttatgggcctttggccaaacctgagagatccccgtgtccgaaga

SEQ ID NO: 516936 - DNA, 55 bp, Artificial
  Synthetic oligonucleotide
gagggtgtggcaaaagatgcgactgtgcgtcagatgtgcgaaccctttgctaagg

SEQ ID NO: 516937 - DNA, 55 bp, Artificial
  Synthetic oligonucleotide
gaggatgagcccgtatgggatcataaaagaaccgaatctgattcttgataggtgg

SEQ ID NO: 516938 - DNA, 55 bp, Artificial
  Synthetic oligonucleotide
gagctgttcaattacatccaaacagttccaactcaggccatcaggtcaagggagc

SEQ ID NO: 516939 - DNA, 55 bp, Artificial
  Synthetic oligonucleotide
gagcagcacagggctgcacaagaggaggctgccaggctagggttccagagtggta

SEQ ID NO: 516940 - DNA, 55 bp, Artificial
  Synthetic oligonucleotide
gagcacagcagttagcccatatagagcgcatttcatcaaaacactaagccatcgc

SEQ ID NO: 516941 - DNA, 55 bp, Artificial
  Synthetic oligonucleotide
gagattaaggttttctaatccaagagttgaagcagggaagttaaatacagcctca

SEQ ID NO: 516942 - DNA, 55 bp, Artificial
  Synthetic oligonucleotide
ctagacataggaataagctcttgattcttagtggtgatgcctttgacgccacctc

SEQ ID NO: 516943 - DNA, 55 bp, Artificial
  Synthetic oligonucleotide
gagaattgtattgacaattatgcgatagaggtctcctatgcataccggctgggag

SEQ ID NO: 516944 - DNA, 55 bp, Artificial
  Synthetic oligonucleotide
gacgccacctcctgatcattctaactcctacttcgccatcgcaatcggtttgggc

SEQ ID NO: 516945 - DNA, 55 bp, Artificial
  Synthetic oligonucleotide
ctagtggaggccgtggccacactaaggccattgaaacacctttaggttcacaggt

SEQ ID NO: 516946 - DNA, 55 bp, Artificial
  Synthetic oligonucleotide
gaatgggcatgctggtttcagagcaattcacagatgagcatagcaggaatcaggg

SEQ ID NO: 516947 - DNA, 55 bp, Artificial
  Synthetic oligonucleotide
ctcaccgggcgatccttactatgtccagcgaaggttctcagggttcaaagggatc

SEQ ID NO: 516948 - DNA, 55 bp, Artificial
  Synthetic oligonucleotide
gaagtgatctcaaagtgctgtacagaggtggagtacactccctcctttgatagag

SEQ ID NO: 516949 - DNA, 55 bp, Artificial
  Synthetic oligonucleotide
ctcacgtcgtgagtaaacagattgacgtaacgccacaatcgtggtcaaggaccag

SEQ ID NO: 516950 - DNA, 55 bp, Artificial
  Synthetic oligonucleotide
gaaggtctcattaggacccctactgatgatgaaacaattgctcatgccacataca

SEQ ID NO: 516951 - DNA, 55 bp, Artificial
  Synthetic oligonucleotide
gaagagccagaccctttggaaaattcctgttggacaccttcctcaagagaatccc

SEQ ID NO: 516952 - DNA, 55 bp, Artificial
  Synthetic oligonucleotide
gaactttccgtttaatcacgtgaaaggttacagatggctttctcctacagaacgc

SEQ ID NO: 516953 - DNA, 55 bp, Artificial
  Synthetic oligonucleotide
gaacgcaaagtaccgcatcaccaggtcttgaataccaatgtgggcaccaaaggtg

SEQ ID NO: 516954 - DNA, 55 bp, Artificial
  Synthetic oligonucleotide
ctgctatttgaccctctgcaggcaaggtatcataataagatggacgaagcggttc

SEQ ID NO: 516955 - DNA, 55 bp, Artificial
  Synthetic oligonucleotide
tttgtagagtatttcaaagagggcccgactaggttcgacaccgaaaaggctcgga

SEQ ID NO: 516956 - DNA, 55 bp, Artificial
  Synthetic oligonucleotide
cttgaggggctgactggggccttcagctcagaacttttcgatgggaaaagaagcc

SEQ ID NO: 516957 - DNA, 55 bp, Artificial
  Synthetic oligonucleotide
tggctctcacatacagaagtccattagaggatatagttgcagcctttgacccggc

SEQ ID NO: 516958 - DNA, 55 bp, Artificial
  Synthetic oligonucleotide
cgcacatttacctttgagcgggcgattctgaaaagtccacagttcaggcctgatg

SEQ ID NO: 516959 - DNA, 55 bp, Artificial
  Synthetic oligonucleotide
ggacattaaagagtatatcctgtggggagtaactgaggtgataccccagcccggg

SEQ ID NO: 516960 - DNA, 55 bp, Artificial
  Synthetic oligonucleotide
cgcacgctcatgaactttctgagtgagttgcaacctgaggtggtgcttgctaccg

SEQ ID NO: 516961 - DNA, 55 bp, Artificial
  Synthetic oligonucleotide
gctgagagcgaggcattcgttgtgaatccggatggcagattacatggcacattca

SEQ ID NO: 516962 - DNA, 55 bp, Artificial
  Synthetic oligonucleotide
gctatgatcttagaggtaatgaatctatctgctttgcgggagatgacatgtgcgc

SEQ ID NO: 516963 - DNA, 55 bp, Artificial
  Synthetic oligonucleotide
gcgtcaccggtggtttggagaccaataatgataaatctggcaccccgtccttttc

SEQ ID NO: 516964 - DNA, 55 bp, Artificial
  Synthetic oligonucleotide
gcgctcgggataaacaaccatacaccaacaattcccggacatcttaagaaatacc

SEQ ID NO: 516965 - DNA, 55 bp, Artificial
  Synthetic oligonucleotide
gcgccaatgcaatgtatgttgatgtggtcatgttacggcttgtggaaactacggc

SEQ ID NO: 516966 - DNA, 55 bp, Artificial
  Synthetic oligonucleotide
actgatggtgcaattaagtgtcacattccggtctgttcaagtcaaaccctgggcc

SEQ ID NO: 516967 - DNA, 55 bp, Artificial
  Synthetic oligonucleotide
cgctaagaaccttaagcccgccaagcactggtaggcccttaggttgttgggcggt

SEQ ID NO: 516968 - DNA, 55 bp, Artificial
  Synthetic oligonucleotide
gcccgtgggtggcatttgactttgccaccggtctcaaaatgaatcgtctaacacc

SEQ ID NO: 516969 - DNA, 55 bp, Artificial
  Synthetic oligonucleotide
gcccctgatggggtttggtcagagtcttatgaacagcccctggcttctggtcaac

SEQ ID NO: 516970 - DNA, 55 bp, Artificial
  Synthetic oligonucleotide
ttaccaggacccctagctagaggttgcaaggcgtcaagggtgagaagcttggatg

SEQ ID NO: 516971 - DNA, 55 bp, Artificial
  Synthetic oligonucleotide
gcattactggcccattaagaccctgcttaatttcctagatgtgttgaaacctaac

SEQ ID NO: 516972 - DNA, 55 bp, Artificial
  Synthetic oligonucleotide
gcatagaggtggaaatggtgagcatctgagcaatgcatgtgagaggttcgaaagc

SEQ ID NO: 516973 - DNA, 55 bp, Artificial
  Synthetic oligonucleotide
accctcaaactgtactccagcacacattcggcattcgggcacttgtgatcagccc

SEQ ID NO: 516974 - DNA, 55 bp, Artificial
  Synthetic oligonucleotide
gcagcccactgaggacatgaggtacgaccccgggaacatttacagtcgaccttcc

SEQ ID NO: 516975 - DNA, 55 bp, Artificial
  Synthetic oligonucleotide
gcacgattgtgtaccccactgagatatttgttggggctcggcgatccttgaaccc

SEQ ID NO: 516976 - DNA, 55 bp, Artificial
  Synthetic oligonucleotide
gcaataacctcaaatccttttgagacagggaatgcttacagtgtggcaccccaaa

SEQ ID NO: 516977 - DNA, 55 bp, Artificial
  Synthetic oligonucleotide
gcaagctgtatggttctgacgcaccgttagttttcaaagatgaggtcaagatggt

SEQ ID NO: 516978 - DNA, 55 bp, Artificial
  Synthetic oligonucleotide
cggcgttgaggcaagttgcattggtgaggtgcgaggagctacctttgagcacgtg

SEQ ID NO: 516979 - DNA, 55 bp, Artificial
  Synthetic oligonucleotide
gatgttcgaacttttggtaattttgacgcagtatcagctgggcatcttaagcctc

SEQ ID NO: 516980 - DNA, 55 bp, Artificial
  Synthetic oligonucleotide
gatggtcttgctcatttcggggttgcatgaaggattggttcttcgataaattgcc

SEQ ID NO: 516981 - DNA, 55 bp, Artificial
  Synthetic oligonucleotide
aatttatgcaagcgaataaaggcaagtgcgtgcattatgtgagtccacgtagggg

SEQ ID NO: 516982 - DNA, 55 bp, Artificial; identical to SEQ ID NO: 403986
  Synthetic oligonucleotide

SEQ ID NO: 516983 - DNA, 54 bp, Artificial
  Synthetic oligonucleotide
ttttgctccgaaccgcaagggttgaggacctcaaatctctattgccggggagac

SEQ ID NO: 516984 - DNA, 54 bp, Artificial
  Synthetic oligonucleotide
atgactgccggagcatctctgaaggaaattagcctgatgcgtgatgagatccgg

SEQ ID NO: 516985 - DNA, 54 bp, Artificial
  Synthetic oligonucleotide
tggaggagatattccgagtctttgacatcaaggctgaagtttgcgatggctccg

SEQ ID NO: 516986 - DNA, 54 bp, Artificial
  Synthetic oligonucleotide
agacgtgctctgacgccatgtatgatcttggagttgattcaaatgggagtttgg

SEQ ID NO: 516987 - DNA, 54 bp, Artificial
  Synthetic oligonucleotide
agattccacagaagttctataaccaatgtttggtacaggaatacagtacaggac

SEQ ID NO: 516988 - DNA, 54 bp, Artificial
  Synthetic oligonucleotide
cgaaagctgagatggttgctaatatcgcctcttttgaggttcaagtgctcagac

SEQ ID NO: 516989 - DNA, 54 bp, Artificial
  Synthetic oligonucleotide
caatctcgaatttcaactcaagcagtgttggctctgactaacgtggagaaggac

SEQ ID NO: 516990 - DNA, 54 bp, Artificial
  Synthetic oligonucleotide
cttagccagaaacagactaaagccatcctcacttaaggctaatgatatgattct

SEQ ID NO: 516991 - DNA, 54 bp, Artificial
  Synthetic oligonucleotide
caatgagagagtttacaatgatgaccctattctgactgtttgcacagaaggtga

SEQ ID NO: 516992 - DNA, 54 bp, Artificial
  Synthetic oligonucleotide
gatgagcggaagattggggttatggtgggaacatttggttctggcaagagtcat

SEQ ID NO: 516993 - DNA, 54 bp, Artificial
  Synthetic oligonucleotide
ggactcataagacacccaactagtgctgagtgcatagctcacaagacgcaccaa

SEQ ID NO: 516994 - DNA, 53 bp, Artificial
  Synthetic oligonucleotide
ggggatgacatgtgcgccttgagaaacttgagagagattgacactcatgagtt

SEQ ID NO: 516995 - DNA, 53 bp, Artificial
  Synthetic oligonucleotide
aaagttaacggtgatggtaactgcttctggtacactctggagcatttcactgg

SEQ ID NO: 516996 - DNA, 53 bp, Artificial
  Synthetic oligonucleotide
cgggtctggggatggagggtctgattatgagttattcccaacgtagcttgggg

SEQ ID NO: 516997 - DNA, 53 bp, Artificial
  Synthetic oligonucleotide
agtagaaacaccatctggcctgacacggagatcgcgtcggaggatctccagat

SEQ ID NO: 516998 - DNA, 53 bp, Artificial
  Synthetic oligonucleotide
ggaggtgcttgaattagcagctgaatgctcagttacctccatactagcggaaa

SEQ ID NO: 516999 - DNA, 53 bp, Artificial
  Synthetic oligonucleotide
ccccataactgcatgaatacacacggctatgagattcctactccaatggatgg

SEQ ID NO: 517000 - DNA, 53 bp, Artificial
  Synthetic oligonucleotide
gatatcaagccgagggaattgactgttgtgcttggtacatttggggctgggaa

SEQ ID NO: 517001 - DNA, 53 bp, Artificial
  Synthetic oligonucleotide
gttgcatcatacttgatgaggtccaattattcccacctggctatttggaccta

SEQ ID NO: 517002 - DNA, 53 bp, Artificial
  Synthetic oligonucleotide
caaatcgttctcagcgacggatgatcacctcgagtacctagagaggaagagaa

SEQ ID NO: 517003 - DNA, 53 bp, Artificial
  Synthetic oligonucleotide
tagcatactaactgtgaatatcaagggaagagccctatttagtctagctggta

SEQ ID NO: 517004 - DNA, 53 bp, Artificial
  Synthetic oligonucleotide
cttagggaggcactactcttgagcgatggtgtaggtcagggcatcttcagggt

SEQ ID NO: 517005 - DNA, 52 bp, Artificial
  Synthetic oligonucleotide
gctctcagggagtgatggttatctgtcccaggagatttctggcgaaggattg

SEQ ID NO: 517006 - DNA, 52 bp, Artificial
  Synthetic oligonucleotide
gatgttactgagaacatctaagagtgaactcctaaagaagatcctgagtggc

SEQ ID NO: 517007 - DNA, 52 bp, Artificial
  Synthetic oligonucleotide
gcaggtccagtttccaagggtcgttcaacttactcacgtaagcgaagggctc

SEQ ID NO: 517008 - DNA, 52 bp, Artificial
  Synthetic oligonucleotide
tgctgaaccctctgacgaggagcccaaggtgaaagatgtgatgccggatgct

SEQ ID NO: 517009 - DNA, 52 bp, Artificial
  Synthetic oligonucleotide
cgactaccttagccctaagattgggacatttcttgttagctcattcacagaa

SEQ ID NO: 517010 - DNA, 52 bp, Artificial
  Synthetic oligonucleotide
tgcaacgaattcaatcatttcgacaaacctagctgtctgcttgcggaagaga

SEQ ID NO: 517011 - DNA, 52 bp, Artificial
  Synthetic oligonucleotide
aaaacttatttgctggaggagccaacgctgccattgttcccataacgaggtc

SEQ ID NO: 517012 - DNA, 52 bp, Artificial
  Synthetic oligonucleotide
aggtttttagcactaataccgatttgtatttgtgtgtgattagactgtagtt

SEQ ID NO: 517013 - DNA, 52 bp, Artificial
  Synthetic oligonucleotide
ggttggcgtttgggggattttgggattgttaaaaggccacagcttgtccaag

SEQ ID NO: 517014 - DNA, 52 bp, Artificial
  Synthetic oligonucleotide
gtaggggggaattcactgacatctacaatcaaataatgtctggaaacggtct

SEQ ID NO: 517015 - DNA, 52 bp, Artificial
  Synthetic oligonucleotide
gtagggtgtgctaggtaataatgagcttgtttagggtgccatacagtagtag

SEQ ID NO: 517016 - DNA, 52 bp, Artificial
  Synthetic oligonucleotide
tcttatttatgaaaagccagctgtgcactaagtacgagaagcagtttgttga

SEQ ID NO: 517017 - DNA, 52 bp, Artificial
  Synthetic oligonucleotide
tctcacacctcctaaggattacaccggagcggccataagcgttgtgattggt

SEQ ID NO: 517018 - DNA, 52 bp, Artificial
  Synthetic oligonucleotide
tcgcgagcaccgtattgacagcctagtcacagaccagtttgctgagtgtcat

SEQ ID NO: 517019 - DNA, 52 bp, Artificial
  Synthetic oligonucleotide
gtgtccacatccagcgtggagtacatagtggagctcttcacggccgaggtgc

SEQ ID NO: 517020 - DNA, 52 bp, Artificial
  Synthetic oligonucleotide
tccagaatcagtccatgatcggaaattgataatgatcttggggacatttgga

SEQ ID NO: 517021 - DNA, 52 bp, Artificial
  Synthetic oligonucleotide
gagaaaatccttgcttcattcagatcacaggtgaaagtgttgtcattaaggg

SEQ ID NO: 517022 - DNA, 51 bp, Artificial
  Synthetic oligonucleotide
cggcatttaccttagtccttacagtggcatgccacattcacaccgcggata

SEQ ID NO: 517023 - DNA, 51 bp, Artificial
  Synthetic oligonucleotide
accttttttaaacctgacgttctcaattgcattaaaagatttgagtcaaat

SEQ ID NO: 517024 - DNA, 51 bp, Artificial
  Synthetic oligonucleotide
gcgacaaagtctatgctgagcaagaagctataggactcgctgcaaaagtcc

SEQ ID NO: 517025 - DNA, 51 bp, Artificial
  Synthetic oligonucleotide
cgaggcaatttccacaactagcatcaacagtcttggaccgaaattgggtga

SEQ ID NO: 517026 - DNA, 51 bp, Artificial
  Synthetic oligonucleotide
gggaactttacggctttcaaaccgaaaataatctttggagatcctaatcag

SEQ ID NO: 517027 - DNA, 51 bp, Artificial
  Synthetic oligonucleotide
ggggtgattgcttttggttggcaatctctcatttcactggagttagtgtgc

SEQ ID NO: 517028 - DNA, 51 bp, Artificial
  Synthetic oligonucleotide
tacctggaaatccaagctttacctcaagtttcaattcatctgttggtgctt

SEQ ID NO: 517029 - DNA, 51 bp, Artificial
  Synthetic oligonucleotide
atgtgggaaatgatgcaaagctcttgacttttggtgaatctactggcctta

SEQ ID NO: 517030 - DNA, 51 bp, Artificial
  Synthetic oligonucleotide
tatcccaatggaaagaatagtaaacatgaaccctggggccagtttttatga

SEQ ID NO: 517031 - DNA, 50 bp, Artificial
  Synthetic oligonucleotide
ttatgatggagcctgcctggatccagaaagaggtcacatatgctcgtatc

SEQ ID NO: 517032 - DNA, 50 bp, Artificial
  Synthetic oligonucleotide
tggtgacccgattcaatccaacacaaaagtggtccggagtgcagattaca

SEQ ID NO: 517033 - DNA, 50 bp, Artificial
  Synthetic oligonucleotide
ttctggcatgcagtctcctccatctttggtctagaggcgatggaacttaa

SEQ ID NO: 517034 - DNA, 50 bp, Artificial
  Synthetic oligonucleotide
aaaggctcccagggagtgatggttatctgtcccaggagatttctggcgaa

SEQ ID NO: 517035 - DNA, 50 bp, Artificial
  Synthetic oligonucleotide
gaggcagaactctttgaacgaatgtacgttcaggaagctttgtgagccat

SEQ ID NO: 517036 - DNA, 50 bp, Artificial
  Synthetic oligonucleotide
cttgcaacagaagtaagcggtttgggcgaagcacagccctattccttcgt

SEQ ID NO: 517037 - DNA, 60 bp, Artificial
  Synthetic oligonucleotide
ttgaatctcggtaatggtagacccaccagcctctggtttgagacccaggctcctttgcca

SEQ ID NO: 517038 - DNA, 60 bp, Artificial
  Synthetic oligonucleotide
tgatctgattcactgtttgggtaattcccgcacagcacagaccccctggctaggggtaag

SEQ ID NO: 517039 - DNA, 60 bp, Artificial
  Synthetic oligonucleotide
tccaaaacctacaccagttggagaggcttctagacatctcaggggacgttccaagaagaa

SEQ ID NO: 517040 - DNA, 60 bp, Artificial
  Synthetic oligonucleotide
tatagcccaaaccatcgaaggatacgccctgaaccattggaacacaattgattctatgct

SEQ ID NO: 517041 - DNA, 60 bp, Artificial
  Synthetic oligonucleotide
tacatacaggacgtcgcactgttatacgtgggtgggtgggcatacccctgtatagcccaa

SEQ ID NO: 517042 - DNA, 60 bp, Artificial
  Synthetic oligonucleotide
gttgaggataggattaggcctagaacgattgtttccatggacatgttggggtgggatgta

SEQ ID NO: 517043 - DNA, 60 bp, Artificial
  Synthetic oligonucleotide
ggtgtatgcagataacgcctatatgtacttccctagagaggatgtctggtatagtataga

SEQ ID NO: 517044 - DNA, 60 bp, Artificial
  Synthetic oligonucleotide
gccggacaaatactacccacatacaagcccagccatgagataacacctcctctgacaacc

SEQ ID NO: 517045 - DNA, 60 bp, Artificial
  Synthetic oligonucleotide
gccaaaccctgctcttcagaagaatctaccaatgtcttacggaacgtgtgaccctacaga

SEQ ID NO: 517046 - DNA, 60 bp, Artificial
  Synthetic oligonucleotide
gacggactcccttgggattcctctgtttgggaactcacaaggattgccaatccaaaacct

SEQ ID NO: 517047 - DNA, 60 bp, Artificial
  Synthetic oligonucleotide
ccgatattagtttggatactgctgaggacatcgaatacactgatctcgggagcgcactac

SEQ ID NO: 517048 - DNA, 60 bp, Artificial
  Synthetic oligonucleotide
caccctcgtcactaaccagcgtaacccacatcacaaacacttcccagaaccttggctatg

SEQ ID NO: 517049 - DNA, 60 bp, Artificial
  Synthetic oligonucleotide
atgtgacgcatctattgggatcaatcgtttcggaccaaccagcaaagcgcatgctcaatg

SEQ ID NO: 517050 - DNA, 60 bp, Artificial
  Synthetic oligonucleotide
aacgtggcattatggggaaggctccatatgccgctttcacaggctccgttgcaggacagt

SEQ ID NO: 517051 - DNA, 60 bp, Artificial
  Synthetic oligonucleotide
acaagctccggagagtcttccttaacaacgtgtcaatcgggcgcgaatacacagaggatg

SEQ ID NO: 517052 - DNA, 60 bp, Artificial
  Synthetic oligonucleotide
acactcagctgacaccccaataggtgatagcaactgggagcccaccaggaaccccgagtt

SEQ ID NO: 517053 - DNA, 60 bp, Artificial
  Synthetic oligonucleotide
acctgtatgaggaacagcttgggtctaaggatgtgagtctcccgattggggccggacaaa

SEQ ID NO: 517054 - DNA, 60 bp, Artificial
  Synthetic oligonucleotide
agcgcactacttgagcactcggtgaaagtctttagacccaagccctatgatgagctaatt

SEQ ID NO: 517055 - DNA, 60 bp, Artificial
  Synthetic oligonucleotide
aggcgtctacgcccttactggaaccttcaacgccgtatggtttcagggtacacttagtga

SEQ ID NO: 517056 - DNA, 60 bp, Artificial
  Synthetic oligonucleotide
agtacacacgcaggatggcaaagatccggcaggagaatgacatggttagtgaagaatggg

SEQ ID NO: 517057 - DNA, 60 bp, Artificial
  Synthetic oligonucleotide
atagtatagacctcaccaagggtgaagccaactgtaccagggacattgcaatgacaacag

SEQ ID NO: 517058 - DNA, 60 bp, Artificial
  Synthetic oligonucleotide
atgacaacagcaatgtacttgctaactagggggtggacgagcaacgaaggggtaccacta

SEQ ID NO: 517059 - DNA, 60 bp, Artificial
  Synthetic oligonucleotide
atgccctagtcgctcgactatagaagtcacttggtctcattagccaagggaacctgccat

SEQ ID NO: 517060 - DNA, 57 bp, Artificial
  Synthetic oligonucleotide
acatggtcgggactgatgacaatgcaagacgagtggactgtaactgctaactatcag

SEQ ID NO: 517061 - DNA, 57 bp, Artificial
  Synthetic oligonucleotide
tgggtgatcgtgaggcctccagcttcgacttctggcacctgctaaagcagatcaaaa

SEQ ID NO: 517062 - DNA, 55 bp, Artificial
  Synthetic oligonucleotide
gccaactccttggctttcgagtatatgaagtacatagagggctcatcaaacccag

SEQ ID NO: 517063 - DNA, 55 bp, Artificial
  Synthetic oligonucleotide
ccataggaggacatcgtgtctacaatgccgtttcaaatggtcgggtgtccaccgc

SEQ ID NO: 517064 - DNA, 55 bp, Artificial
  Synthetic oligonucleotide
gtgtttaggaggctgctgggatatgacccaataggttcagggagcaccccagagc

SEQ ID NO: 517065 - DNA, 55 bp, Artificial
  Synthetic oligonucleotide
caaacctaaactacgatcggatcctatcgataacctccaatcctttggacaaggt

SEQ ID NO: 517066 - DNA, 55 bp, Artificial
  Synthetic oligonucleotide
tcacagaggcagcatctcctaggatgctggacctgtatgaggaacagcttgggtc

SEQ ID NO: 517067 - DNA, 52 bp, Artificial
  Synthetic oligonucleotide
ctgattcagggcagcatgcggaccattatctggtccaatgttggcgtctcca

SEQ ID NO: 517068 - DNA, 52 bp, Artificial
  Synthetic oligonucleotide
aatgattcgccacattaaccgcgcggagacaatcacctacaaccttaagaca

SEQ ID NO: 517069 - DNA, 52 bp, Artificial
  Synthetic oligonucleotide
aaaactcggtgtgggcgttcgaccaatacatatacactgcacaggagctaaa

SEQ ID NO: 517070 - DNA, 51 bp, Artificial
  Synthetic oligonucleotide
gagccatgggccgaccaaaacctacagcccaggttattgagaagctttcct

SEQ ID NO: 517071 - DNA, 60 bp, Artificial
  Synthetic oligonucleotide
gacactgagcgaggcctttcaatggtctggcccgggcacaggtgcttggactctctttcg

SEQ ID NO: 517072 - DNA, 60 bp, Artificial
  Synthetic oligonucleotide
gaccactaatctgctccattcgggaaaaggacctgaattaggtccatgtcacaatttggt

SEQ ID NO: 517073 - DNA, 60 bp, Artificial
  Synthetic oligonucleotide
gacgacagaaagtcgtccaagcatgcctccgataaactcaggaaaaccgagtgttacgga

SEQ ID NO: 517074 - DNA, 60 bp, Artificial
  Synthetic oligonucleotide
gacgctcatgctagagagctccgtgctttgacttctcaaatgagccgtttggtagccctt

SEQ ID NO: 517075 - DNA, 60 bp, Artificial
  Synthetic oligonucleotide
tgtcttatggctgactgtttggtcgaccttgggattccaaaacttaaattggtggcagcg

SEQ ID NO: 517076 - DNA, 60 bp, Artificial
  Synthetic oligonucleotide
gagagactcgaaagagttaaacggaccttggatttagaagattgtgttgtaaattcatgt

SEQ ID NO: 517077 - DNA, 60 bp, Artificial
  Synthetic oligonucleotide
tggttataccctcgctactagtgaccaaatttggttgctagagggtgttaaacaccttcc

SEQ ID NO: 517078 - DNA, 60 bp, Artificial
  Synthetic oligonucleotide
gaggaagctgggttagttggacccaatttgccccatttcacggatgtcataaaaaatgct

SEQ ID NO: 517079 - DNA, 60 bp, Artificial
  Synthetic oligonucleotide
gaggatctgtcaaccgcttcaaaggggcgtggacagaataccccgactccgtgatgtata

SEQ ID NO: 517080 - DNA, 60 bp, Artificial
  Synthetic oligonucleotide
gaggcccaaggtgaaacctgggatcatgtggtaatgtttagactttcgaagaccactaat

SEQ ID NO: 517081 - DNA, 60 bp, Artificial
  Synthetic oligonucleotide
gataccactatccgatcgaaggatctaccgatttaaacgttttcccaaacgtcggttgct

SEQ ID NO: 517082 - DNA, 60 bp, Artificial
  Synthetic oligonucleotide
gatgtcctgttgatgtaactaaatggtggtgtgacttccacaggtattcctacattaaag

SEQ ID NO: 517083 - DNA, 60 bp, Artificial; identical to SEQ ID NO: 404479
  Synthetic oligonucleotide

SEQ ID NO: 517084 - DNA, 60 bp, Artificial
  Synthetic oligonucleotide
gccataggcgtcagggccttggtagatagtttagcaactcagatagcacatgaccaaata

SEQ ID NO: 517085 - DNA, 60 bp, Artificial
  Synthetic oligonucleotide
tggtgccagaacgggtactgtaactgcagagtcacttgttgtaggcctggtgagggtgtt

SEQ ID NO: 517086 - DNA, 60 bp, Artificial
  Synthetic oligonucleotide
gcctctgccaaacagctgtatcaagatacagctaagattacgaacacaagggcattagag

SEQ ID NO: 517087 - DNA, 60 bp, Artificial
  Synthetic oligonucleotide
gctcgcaacctcatcagcaccgcttctaggtatccccgtaagttgaaggcttactctgat

SEQ ID NO: 517088 - DNA, 60 bp, Artificial
  Synthetic oligonucleotide
tggctcttgggataccagagcactttgtgacaacgtggttcaattcccacgagaggagtc

SEQ ID NO: 517089 - DNA, 60 bp, Artificial
  Synthetic oligonucleotide
gggcattagagacgtacactcgaacaatgataagcagcgataaagaaatgcgtagcctat

SEQ ID NO: 517090 - DNA, 60 bp, Artificial
  Synthetic oligonucleotide
gggcctcccctatgctgatgatcacgtttgtagcgtaccctcctatcctcccagctatac

SEQ ID NO: 517091 - DNA, 60 bp, Artificial
  Synthetic oligonucleotide
gggtctagtcggactttaacacaacagtcctcggcggctacttctgatgatctacataga

SEQ ID NO: 517092 - DNA, 60 bp, Artificial
  Synthetic oligonucleotide
ttagccgttcctgtcagtgccgaatggtatactgaacagttcgaggtacggtatgcgctg

SEQ ID NO: 517093 - DNA, 60 bp, Artificial
  Synthetic oligonucleotide
cgataacgaatgatggaatgaacctagagagagccataccagcaacaatcacgtttcatg

SEQ ID NO: 517094 - DNA, 60 bp, Artificial
  Synthetic oligonucleotide
cgatacaaacgttttcccaaacgtcggctgctgttgggatcgattggttaggaccgtcat

SEQ ID NO: 517095 - DNA, 60 bp, Artificial
  Synthetic oligonucleotide
cgcccactcctgggctcgcttcgtttgatatttgggtggccgttgctgcggctaagggtt

SEQ ID NO: 517096 - DNA, 60 bp, Artificial
  Synthetic oligonucleotide
ttaacgatcctagactcagactacaatttagtgtcaggtattccctcccacatgaaggca

SEQ ID NO: 517097 - DNA, 60 bp, Artificial
  Synthetic oligonucleotide
cggatttcgcccacggagagtgccagatgcactctactggtggtgtgacatgtgcaatta

SEQ ID NO: 517098 - DNA, 60 bp, Artificial
  Synthetic oligonucleotide
cggtgccaggcataccgatcgttatatatctctagctgcctctgttgagaatcgtcacag

SEQ ID NO: 517099 - DNA, 60 bp, Artificial
  Synthetic oligonucleotide
cggtgctgagtgtcatgctatgctaggaggattctcgaaatattccaccaatttttctgt

SEQ ID NO: 517100 - DNA, 60 bp, Artificial
  Synthetic oligonucleotide
cgtatcagagaaggactggtgatgctttcactttctttggcaacacactggtaacaatgg

SEQ ID NO: 517101 - DNA, 60 bp, Artificial
  Synthetic oligonucleotide
cgtcaagcaaattaaaccagcagatgttgagtcccttcagcttgatgaaggacccagtag

SEQ ID NO: 517102 - DNA, 60 bp, Artificial
  Synthetic oligonucleotide
cgtttctagcaggaagtgtattaaagggtacacatacacttcgttggatgtcagaccgac

SEQ ID NO: 517103 - DNA, 60 bp, Artificial
  Synthetic oligonucleotide
ctagaacattccgaatcggacgatttccacctgaaaaggtgagacctttgggtcgatgtt

SEQ ID NO: 517104 - DNA, 60 bp, Artificial
  Synthetic oligonucleotide
ttaaaaaataccaagtgtgacctcttttctgctgaagcacattgtttagtcgcgttaact

SEQ ID NO: 517105 - DNA, 60 bp, Artificial
  Synthetic oligonucleotide
ctcccggaagggtagggtcaaattgcattgactgtgccatttccaacttgccagaggcga

SEQ ID NO: 517106 - DNA, 60 bp, Artificial; identical to SEQ ID NO: 383669
  Synthetic oligonucleotide

SEQ ID NO: 517107 - DNA, 60 bp, Artificial
  Synthetic oligonucleotide
ctgctgattcggtattgatgcacgattgcatcaaggccgagcgcatactatttgatgaag

SEQ ID NO: 517108 - DNA, 60 bp, Artificial
  Synthetic oligonucleotide
ctgtgaagaccttttggcctatgttaagctgggttttgaagccgacactttttcccaaga

SEQ ID NO: 517109 - DNA, 60 bp, Artificial
  Synthetic oligonucleotide
ctttttcctatctgggattgtgattttcgctcgtcctgcaacaattacgaggttgttccg

SEQ ID NO: 517110 - DNA, 60 bp, Artificial
  Synthetic oligonucleotide
gaaaaataagggttgatgtttgcgattgagataacttcatggttatccaagttcgtgttc

SEQ ID NO: 517111 - DNA, 60 bp, Artificial
  Synthetic oligonucleotide
gaaatggctttgaccccaaagatgactgcgcttacattctcagctgatgacgaagcatca

SEQ ID NO: 517112 - DNA, 60 bp, Artificial
  Synthetic oligonucleotide
gaagaactatcaacttagagagttctaaagtttgtattcgtgacgatgtttattccgatc

SEQ ID NO: 517113 - DNA, 60 bp, Artificial
  Synthetic oligonucleotide
gaatcgctgagttttcccagcgacattcaaaggatgcagcttcgcgctttaggtgacgta

SEQ ID NO: 517114 - DNA, 60 bp, Artificial
  Synthetic oligonucleotide
gttgttttcgagtctgagttagctgcgctcgaaggatctaagtcttggtccgacgatgcg

SEQ ID NO: 517115 - DNA, 60 bp, Artificial
  Synthetic oligonucleotide
gttttaccaaccaggaatctgaccgcgtgccagtaggattccactgtgtgtgtcgtagat

SEQ ID NO: 517116 - DNA, 60 bp, Artificial
  Synthetic oligonucleotide
tgctttgttgagtttacctagtttggtagcgaatagaatgaaattcgttcgaagaactat

SEQ ID NO: 517117 - DNA, 60 bp, Artificial
  Synthetic oligonucleotide
taattgactggtgaatcgcctcgaaggtaacttcgagatgcctcacgacttaccagaagt

SEQ ID NO: 517118 - DNA, 60 bp, Artificial
  Synthetic oligonucleotide
tacaaaggattgagtacaggaatccattcttcccgttggatgcgtctgtccgagtctcat

SEQ ID NO: 517119 - DNA, 60 bp, Artificial
  Synthetic oligonucleotide
tacttcgatattaaatacaataaaggtaaggattgtattgatgactttttgggaggttgt

SEQ ID NO: 517120 - DNA, 60 bp, Artificial
  Synthetic oligonucleotide
tagtcaatgctgactgtgtgatatgtaacagtgatggattgtcaaatgccgtgaaagctt

SEQ ID NO: 517121 - DNA, 60 bp, Artificial
  Synthetic oligonucleotide
tcaagttctgtgcgccgtcacccgtaccgtaacagctagtgctgaaggttctctagagat

SEQ ID NO: 517122 - DNA, 60 bp, Artificial
  Synthetic oligonucleotide
tcacgagttgtgatctagatttgtccgtgtttaatgactggacgaaaggggtcgacactc

SEQ ID NO: 517123 - DNA, 60 bp, Artificial
  Synthetic oligonucleotide
tccctttggtcaatttcgcgttcctttagtttctaggatgcttatcccgaactcccgtag

SEQ ID NO: 517124 - DNA, 60 bp, Artificial
  Synthetic oligonucleotide
tccggaaatctcctgtgatgccgacatacgcgcttgtggatttgtttcttacgcctctgg

SEQ ID NO: 517125 - DNA, 60 bp, Artificial
  Synthetic oligonucleotide
tcctccagattctctggtcgaggataattgactggtgaatcacctcgaaggtaacttcga

SEQ ID NO: 517126 - DNA, 60 bp, Artificial; identical to SEQ ID NO: 460925
  Synthetic oligonucleotide

SEQ ID NO: 517127 - DNA, 60 bp, Artificial
  Synthetic oligonucleotide
tcggttgctgttgggatcgattggttaggactgtcatttcagaaaaggttgaaatggctt

SEQ ID NO: 517128 - DNA, 60 bp, Artificial
  Synthetic oligonucleotide
tcgtcggtcttccgggggttaaattggagtccgattgggtgtatttgacaatgacacaat

SEQ ID NO: 517129 - DNA, 60 bp, Artificial
  Synthetic oligonucleotide
tctactaagcgttccatccaaccactgatccatggcaaatagaagcaatgctatcgaagt

SEQ ID NO: 517130 - DNA, 60 bp, Artificial
  Synthetic oligonucleotide
tgacactttgaacgtcgacaggccagttccagcgactataaccttccacgctaaggggat

SEQ ID NO: 517131 - DNA, 60 bp, Artificial
  Synthetic oligonucleotide
tgagtctcatgaggctcgttggaaacagctgtacgctagtgtagtgtgaactacactggt

SEQ ID NO: 517132 - DNA, 60 bp, Artificial
  Synthetic oligonucleotide
tgatggtatacccgaaatcaaaccggacactaaggtgttccgtgttttgattggtttcgt

SEQ ID NO: 517133 - DNA, 60 bp, Artificial; identical to SEQ ID NO: 468675
  Synthetic oligonucleotide

SEQ ID NO: 517134 - DNA, 60 bp, Artificial
  Synthetic oligonucleotide
tgcccgcgatgtaattttccagtgtctaaccgccagcgtcgtaatgcgcggcgggctgcg

SEQ ID NO: 517135 - DNA, 60 bp, Artificial
  Synthetic oligonucleotide
gggtgttaagcttgctgctccgcagagctctttttcgcaagcccccgctttgtttaacgg

SEQ ID NO: 517136 - DNA, 60 bp, Artificial
  Synthetic oligonucleotide
ggtcccaacgcagcgagaagctctgttggcgattaagaagcggaacatgaatgttccgga

SEQ ID NO: 517137 - DNA, 60 bp, Artificial
  Synthetic oligonucleotide
ggttgtttaaatttgtcaatcagacaccactatccgatcggaggatctaccgatacaaac

SEQ ID NO: 517138 - DNA, 60 bp, Artificial
  Synthetic oligonucleotide
gtaattctccagtgtctaaccgccagcgtcgtaatgcgcggcgggctgcgaatttcccca

SEQ ID NO: 517139 - DNA, 60 bp, Artificial
  Synthetic oligonucleotide
gtacgttccgcttgctgtcacgttttatgttatggccgcatggcgttacaaaatgattgc

SEQ ID NO: 517140 - DNA, 60 bp, Artificial
  Synthetic oligonucleotide
gtatactcgaacaatgataagcagcgataaagaaatgcgtagcctattgagaagtcgtgc

SEQ ID NO: 517141 - DNA, 60 bp, Artificial; identical to SEQ ID NO: 436317
  Synthetic oligonucleotide

SEQ ID NO: 517142 - DNA, 60 bp, Artificial
  Synthetic oligonucleotide
gtattctctgagcataataccacttactctaacaactccgaatcggacgatttccaactt

SEQ ID NO: 517143 - DNA, 60 bp, Artificial
  Synthetic oligonucleotide
gtccgcaaaaattgggatgtggtaccccatgtggactgaggaggtctctgccaaacagct

SEQ ID NO: 517144 - DNA, 60 bp, Artificial
  Synthetic oligonucleotide
gtcgacactcggttggtaccgcacatgagtgttggtggattaccccacagggtcccaacg

SEQ ID NO: 517145 - DNA, 60 bp, Artificial
  Synthetic oligonucleotide
gtcgatgttgacaagcctgctataccagcaagtaggaacttgctgactgcctgatcaccg

SEQ ID NO: 517146 - DNA, 60 bp, Artificial
  Synthetic oligonucleotide
gtctctgccaaacagctgtatcaagatacggccaaaattacgaatacaagggcattggag

SEQ ID NO: 517147 - DNA, 60 bp, Artificial
  Synthetic oligonucleotide
gtctgtttgagtctcatgaggctcgttggaaacagctgtacgctagtgtagtgtgaacta

SEQ ID NO: 517148 - DNA, 60 bp, Artificial
  Synthetic oligonucleotide
gtgcatgagtctcagggcatttcagaagatcacgtgacccttgttagactaaagagtact

SEQ ID NO: 517149 - DNA, 60 bp, Artificial
  Synthetic oligonucleotide
gtgcgacgggagctaagggggctcctattccattacctgtggttcctgtaccacaagccc

SEQ ID NO: 517150 - DNA, 60 bp, Artificial
  Synthetic oligonucleotide
gtgcgacgggagcttttaaggttcctattccattacctgtggttcctgtaccacaagccc

SEQ ID NO: 517151 - DNA, 60 bp, Artificial
  Synthetic oligonucleotide
gtgcgatgggagctttaagggcccctattccattacctgtggttcctataccacaagccc

SEQ ID NO: 517152 - DNA, 60 bp, Artificial
  Synthetic oligonucleotide
gtggtttccgggtttgatatcccgaagatcccgtccatagctcccaaagtggagtcatgt

SEQ ID NO: 517153 - DNA, 60 bp, Artificial
  Synthetic oligonucleotide
gtgttacggagaagcccggtgtagaactaaaccccggagaaaccgtaaaagtgaaagcgg

SEQ ID NO: 517154 - DNA, 60 bp, Artificial
  Synthetic oligonucleotide
gttaaatcggtacgtaaaaggaactctcttgtccttgcctcggagttcggtctctgggac

SEQ ID NO: 517155 - DNA, 60 bp, Artificial
  Synthetic oligonucleotide
gttaggaccgtcatttcagaaaaggttgaaatggctttgaccccaaagatgactgcgctt

SEQ ID NO: 517156 - DNA, 60 bp, Artificial
  Synthetic oligonucleotide
gttgggatcgattggttaggaccgtcatttcagaaaaggttgaaatggctttgaccccga

SEQ ID NO: 517157 - DNA, 60 bp, Artificial; identical to SEQ ID NO: 307167
  Synthetic oligonucleotide

SEQ ID NO: 517158 - DNA, 60 bp, Artificial
  Synthetic oligonucleotide
ttggcagttcccaatcctctgaaacttctccaaaaattcggtcccaaaaaccttcaagtc

SEQ ID NO: 517159 - DNA, 60 bp, Artificial
  Synthetic oligonucleotide
aatttccccaaccaacgtaatgttggtgcgacgggagctttgagggctcctattccatta

SEQ ID NO: 517160 - DNA, 60 bp, Artificial
  Synthetic oligonucleotide
acaagcctgctataccagcaagtaggaacttgctgattgcctgatcaccgtttcgatgtt

SEQ ID NO: 517161 - DNA, 60 bp, Artificial
  Synthetic oligonucleotide
ccacaagccctcaatcagcgaacctggcgcctacctaatggtcaagtctgggtaaccaga

SEQ ID NO: 517162 - DNA, 60 bp, Artificial
  Synthetic oligonucleotide
accgttctgatgttgccatttccagacgtggggagttcttagaagaagggggtgtacctc

SEQ ID NO: 517163 - DNA, 60 bp, Artificial
  Synthetic oligonucleotide
ccaaacagctgtatcaagatacagcaaaaatcacaaacacaagggcattggagacgtaca

SEQ ID NO: 517164 - DNA, 60 bp, Artificial
  Synthetic oligonucleotide
ccaaacagctgtaccaagatacagctaagattacgaacacaagggcattagagacgtaca

SEQ ID NO: 517165 - DNA, 60 bp, Artificial
  Synthetic oligonucleotide
catttccagacgtggggagttcttagaataggggggagtacctcggtgtgactcgagtat

SEQ ID NO: 517166 - DNA, 60 bp, Artificial
  Synthetic oligonucleotide
cagtatgctggagattggtatcgtgatcctgacaatttttacgaacctgtgcttaaaagt

SEQ ID NO: 517167 - DNA, 60 bp, Artificial
  Synthetic oligonucleotide
caggcccatcagctgtagtcagactgttgaaatcgcagctcaacatgcagagttctcccc

SEQ ID NO: 517168 - DNA, 60 bp, Artificial
  Synthetic oligonucleotide
acgaaggtcaatttaaacgaggcattcatattaacaatgacatggcctcgatctttgttc

SEQ ID NO: 517169 - DNA, 60 bp, Artificial
  Synthetic oligonucleotide
acgcctctggaagttccgaggtatcgaaatggaccccgaaggtgagtcaggttaaacccg

SEQ ID NO: 517170 - DNA, 60 bp, Artificial
  Synthetic oligonucleotide
acgttaccatttccagacgtggggagttcttagaataggggggagtacctcggtgtgact

SEQ ID NO: 517171 - DNA, 60 bp, Artificial
  Synthetic oligonucleotide
cactgccggtaagactctaattctaccttacaacaggttatctgagctctcaggcccatc

SEQ ID NO: 517172 - DNA, 60 bp, Artificial
  Synthetic oligonucleotide
cactgaagcgtttctttgtgaatcgactaccaaggaaacgaaaacctttatcggtaaatt

SEQ ID NO: 517173 - DNA, 60 bp, Artificial
  Synthetic oligonucleotide
agatgcctcacgacttaccagaaatagctggttcgtgtgtgagatgcggatttcgcccac

SEQ ID NO: 517174 - DNA, 60 bp, Artificial
  Synthetic oligonucleotide
caattgacaggtgaaatacctcgaagataacttcgagatgcctcacgacttaccagaaat

SEQ ID NO: 517175 - DNA, 60 bp, Artificial
  Synthetic oligonucleotide
agattagggcacaagcaaaagacgaattcgtggcctacacgcggaagattaattcgaatg

SEQ ID NO: 517176 - DNA, 60 bp, Artificial
  Synthetic oligonucleotide
tttcgcccacggagagtaccaaacgcactctactggtggtgtgacatgtgcaattatttg

SEQ ID NO: 517177 - DNA, 60 bp, Artificial
  Synthetic oligonucleotide
caaccgtggtttgttggtacctggctgtgaagaccttttggcctatgttaagctgggttt

SEQ ID NO: 517178 - DNA, 60 bp, Artificial
  Synthetic oligonucleotide
aggcgtcgggagcagcgcgaaactttatattttctggcccagctcccgtcgggcctcccc

SEQ ID NO: 517179 - DNA, 60 bp, Artificial
  Synthetic oligonucleotide
agtttcttgtgatgccgacgtgcgggcatgtgggtttcgtttcataccgacctttgaaga

SEQ ID NO: 517180 - DNA, 60 bp, Artificial
  Synthetic oligonucleotide
atacaaggtgacagcggtgtctggtgatatacctaggacaaagattcgtcactgtatctg

SEQ ID NO: 517181 - DNA, 60 bp, Artificial
  Synthetic oligonucleotide
atccgatcgaaggatctaccgatttaagcgttttcccaaacgtcggttgctgttgggatc

SEQ ID NO: 517182 - DNA, 60 bp, Artificial
  Synthetic oligonucleotide
atccgatcgaagggtcttccgatcaaacgtgttcccaaacgtcggttgctgttgggatcg

SEQ ID NO: 517183 - DNA, 60 bp, Artificial
  Synthetic oligonucleotide
atggctcttttcggagcctcagactcgaaagaagcatgcactttcgtgagaaccgcagac

SEQ ID NO: 517184 - DNA, 60 bp, Artificial
  Synthetic oligonucleotide
atgggagacgtacactcgaacaatgataagcagcgataaagagatgcgtagcctattgag

SEQ ID NO: 517185 - DNA, 60 bp, Artificial
  Synthetic oligonucleotide
tttcgatgttaccatttccagacgtggggagttcttagaataggggggagtacctcggcg

SEQ ID NO: 517186 - DNA, 60 bp, Artificial
  Synthetic oligonucleotide
atggtcagtcttacctttaggtaagccgagtcccttacaagggctcgaggtactttatat

SEQ ID NO: 517187 - DNA, 60 bp, Artificial
  Synthetic oligonucleotide
cgagaaacttgttgcgtgaagtgatttacacggtccgaagtatcttcgggttaacgatcc

SEQ ID NO: 517188 - DNA, 60 bp, Artificial
  Synthetic oligonucleotide
cgacggacctcatcgtgactgccaacaagaaatcagcgcaagatgttagaatggctcttt

SEQ ID NO: 517189 - DNA, 60 bp, Artificial
  Synthetic oligonucleotide
cgaagcatcattagagaaggctgtcactgaagctctcgctggttcgatggagctgaatat

SEQ ID NO: 517190 - DNA, 60 bp, Artificial
  Synthetic oligonucleotide
cctttgccagtcttgaagggtcgtagtgacagggttacgcttgaaaaactgcagactaca

SEQ ID NO: 517191 - DNA, 60 bp, Artificial
  Synthetic oligonucleotide
cctcctgagaataccggggatgccgaaggataggattaaaactacccatgaagcccaagg

SEQ ID NO: 517192 - DNA, 60 bp, Artificial
  Synthetic oligonucleotide
ccgtccccgatcctttacgtgagctgcaacgtttaggaacgaagaagattcccgacgggg

SEQ ID NO: 517193 - DNA, 60 bp, Artificial
  Synthetic oligonucleotide
aaagagtactaaatgtgaccttttcaaatcattcccttattgtttagtagctctgactcg

SEQ ID NO: 517194 - DNA, 60 bp, Artificial
  Synthetic oligonucleotide
ccggccgatgaggctgtctcagacgaagttcccgggtatgtgttttctcccgtggaaaga

SEQ ID NO: 517195 - DNA, 60 bp, Artificial
  Synthetic oligonucleotide
aaattacgtagagaaggacactccaataacggagattgaccccttctatttaccgtatga

SEQ ID NO: 517196 - DNA, 60 bp, Artificial
  Synthetic oligonucleotide
ttttccgttaagttcctatggctactttttctctcgagtccctgttatcaggctcgtacg

SEQ ID NO: 517197 - DNA, 60 bp, Artificial
  Synthetic oligonucleotide
ccgatgcttggggtagtggcaaaatcgcctacgcctcaatgagaactgagttggggaaga

SEQ ID NO: 517198 - DNA, 60 bp, Artificial
  Synthetic oligonucleotide
ccgatagatggtcagatagtcacgttacataaccgagacctccctgcgctagtgtcgttc

SEQ ID NO: 517199 - DNA, 60 bp, Artificial
  Synthetic oligonucleotide
ttttcccaaacgtcggttgctgttgggatcgattggttaggaccgtcatttcagaaaagg

SEQ ID NO: 517200 - DNA, 60 bp, Artificial
  Synthetic oligonucleotide
cccgacgggggtcttgatgaatcctacttgaaggcgcactttatgagtttcgtcgatcgc

SEQ ID NO: 517201 - DNA, 60 bp, Artificial
  Synthetic oligonucleotide
aatggattccttatctttacccaccgtgagtgacgttgttgttcctgctcttaacgttga

SEQ ID NO: 517202 - DNA, 60 bp, Artificial
  Synthetic oligonucleotide
aatgatgctgtttgccggagatgactctttggcggtctctaacagtccgattactggaga

SEQ ID NO: 517203 - DNA, 59 bp, Artificial
  Synthetic oligonucleotide
caaactttctcctacaatggctacacttatggcattgaacgttgcgtgatctacgccgg

SEQ ID NO: 517204 - DNA, 59 bp, Artificial
  Synthetic oligonucleotide
ctccgactgaacccgtcgccctcatttgattccactgtttgggtggcgcttaggaaact

SEQ ID NO: 517205 - DNA, 59 bp, Artificial
  Synthetic oligonucleotide
tcgtacaataagctgtccggtctttttaaggccgattatgacaaaggcttggtgccgag

SEQ ID NO: 517206 - DNA, 58 bp, Artificial
  Synthetic oligonucleotide
tggatcctggaaatcccatggtcggtcaaactgagccttctgaaccccctgagcttaa

SEQ ID NO: 517207 - DNA, 58 bp, Artificial
  Synthetic oligonucleotide
ggggtccgaattttaacttgatacattagtgtacataattccattattatgttgccgc

SEQ ID NO: 517208 - DNA, 58 bp, Artificial
  Synthetic oligonucleotide
aaacactagaatgtttggatttcttccctgatggagagatcttagactttggtggttc

SEQ ID NO: 517209 - DNA, 58 bp, Artificial
  Synthetic oligonucleotide
gcctcgatctttgttcgctgatgaggttaataagcacaaagggccctacctcggtgga

SEQ ID NO: 517210 - DNA, 57 bp, Artificial
  Synthetic oligonucleotide
gagtcccttcaacttgatgaaggacccagtagtgagaccgttgttttgaaacctcaa

SEQ ID NO: 517211 - DNA, 57 bp, Artificial
  Synthetic oligonucleotide
gcgaattttcctggtctcgagatcgcatttagagactcttgtcattcgtcgcacagt

SEQ ID NO: 517212 - DNA, 57 bp, Artificial
  Synthetic oligonucleotide
tttgatgaagtcgggcttctacattttggccaattggtcgctgtggccagaaaagtt

SEQ ID NO: 517213 - DNA, 57 bp, Artificial
  Synthetic oligonucleotide
tttgatcagacccacttacgtaggctgtattgaggcgcccgaattttgcaggaacaa

SEQ ID NO: 517214 - DNA, 56 bp, Artificial
  Synthetic oligonucleotide
tggagtggtttcctgtgctcctcgtgttcctaagtccgcaaaaattgggatgtggt

SEQ ID NO: 517215 - DNA, 56 bp, Artificial
  Synthetic oligonucleotide
gctgtcactgaagctctcgctggttcgatggagctgaatatgggtataaggcgatg

SEQ ID NO: 517216 - DNA, 56 bp, Artificial
  Synthetic oligonucleotide
ctatcgaagtcaacggtgtgtggtacagccgagccgatagtgcccccgtagcaaac

SEQ ID NO: 517217 - DNA, 56 bp, Artificial
  Synthetic oligonucleotide
gtggatgcttcgtgcaaatgctatgaatgcctacgtatatgtgcgtagatgcctat

SEQ ID NO: 517218 - DNA, 56 bp, Artificial
  Synthetic oligonucleotide
acgttgacagtctcgtgcgagactatgtcagcaatgtgagagccgatgatagcaat

SEQ ID NO: 517219 - DNA, 55 bp, Artificial
  Synthetic oligonucleotide
aatgtatgcattaggctcgggtaccccctcttcggagggttccataaggagacca

SEQ ID NO: 517220 - DNA, 55 bp, Artificial
  Synthetic oligonucleotide
aagttcaggggacttggatggggtccgtgttttaaactgatgcaagttttagtgt

SEQ ID NO: 517221 - DNA, 55 bp, Artificial
  Synthetic oligonucleotide
aaccggacactaaggtgttccgtgttttgattggtttcgtcgccgagtctggtgg

SEQ ID NO: 517222 - DNA, 55 bp, Artificial
  Synthetic oligonucleotide
tgcctccgttatctacggagaagcccgaggtagaattaaaccccggcgaaaccgt

SEQ ID NO: 517223 - DNA, 55 bp, Artificial
  Synthetic oligonucleotide
tcataagcgctctggctttatctataagaccaatgagacctacgaggtaggtttc

SEQ ID NO: 517224 - DNA, 55 bp, Artificial
  Synthetic oligonucleotide
gttgttaatgtgtctcctttggtacaggtgatgagtaagatgaaggcttatatgg

SEQ ID NO: 517225 - DNA, 55 bp, Artificial
  Synthetic oligonucleotide
atagtactggtgcgatggaaggatacagacccacattcagttgctaaagccgtcg

SEQ ID NO: 517226 - DNA, 55 bp, Artificial
  Synthetic oligonucleotide
gtggctcatcgcctagcttggcgaaaggtcaaggtaaagctagacacggttcgtg

SEQ ID NO: 517227 - DNA, 55 bp, Artificial
  Synthetic oligonucleotide
aaagaacagactcgcgattggcgagagcatcgggaagtgacgttaatccctacgc

SEQ ID NO: 517228 - DNA, 55 bp, Artificial
  Synthetic oligonucleotide
gtctaaccgccagcgtcgtaatgcgcggcgggctgcgaatttccccaaccaacgt

SEQ ID NO: 517229 - DNA, 55 bp, Artificial
  Synthetic oligonucleotide
tgctcaaatcctggttttcggctgagcgacttttgtttgatgaatgcttcttgac

SEQ ID NO: 517230 - DNA, 55 bp, Artificial; identical to SEQ ID NO: 459971
  Synthetic oligonucleotide

SEQ ID NO: 517231 - DNA, 55 bp, Artificial
  Synthetic oligonucleotide
aaatggtggtgtgacttccacaggtattcctacattaaagacaaaagggccggtg

SEQ ID NO: 517232 - DNA, 55 bp, Artificial
  Synthetic oligonucleotide
accctttgagaacgaaagaccatctgtcaaccaagcaagttgtccattccgaaat

SEQ ID NO: 517233 - DNA, 55 bp, Artificial
  Synthetic oligonucleotide
tcgttgttaaaacgcagtcgattgagtactataactcaaagtcgtggttgacacg

SEQ ID NO: 517234 - DNA, 55 bp, Artificial
  Synthetic oligonucleotide
actgaacaattcgaggttaggtacgcgttgatggacgaatctttagttcgctatg

SEQ ID NO: 517235 - DNA, 55 bp, Artificial
  Synthetic oligonucleotide
tgcccggaccgaacttttgtgatcagcgcgctgaagagtgttctgtccaatgtcc

SEQ ID NO: 517236 - DNA, 55 bp, Artificial
  Synthetic oligonucleotide
gaggcattcatattaacaatgacatggcctcgatctttgttcgctgatgagatta

SEQ ID NO: 517237 - DNA, 55 bp, Artificial
  Synthetic oligonucleotide
ttgtccgtgtttaatgactggacgaaaggggtcgacactcggttggtaccgcaca

SEQ ID NO: 517238 - DNA, 55 bp, Artificial
  Synthetic oligonucleotide
gacgataagcccttaggcatcccgtctcgtttgtaaattatgagtgtaatttctg

SEQ ID NO: 517239 - DNA, 55 bp, Artificial
  Synthetic oligonucleotide
ccaagatacagctaagattacgaacacaagggcattagagacgtacactcgaaca

SEQ ID NO: 517240 - DNA, 55 bp, Artificial
  Synthetic oligonucleotide
ccggctttgaacgttgacagtctcgtgcgagactatgtcagcaatgtgagagccg

SEQ ID NO: 517241 - DNA, 55 bp, Artificial
  Synthetic oligonucleotide
ccagcagatgttgagtcccttcagcttgatgaaggacccagtagtgagaccgttg

SEQ ID NO: 517242 - DNA, 55 bp, Artificial
  Synthetic oligonucleotide
cgtaaatcatttcagtactgtacggtagctcctcatgataacgatgatcagatag

SEQ ID NO: 517243 - DNA, 55 bp, Artificial
  Synthetic oligonucleotide
ccagttttgagatgtctctgagttcattgccgagggtgtgtctgttaacgacgga

SEQ ID NO: 517244 - DNA, 55 bp, Artificial
  Synthetic oligonucleotide
cccagcgacattcaaaggatgcagcttcgcgctttaggtgacgtagaagtcctcg

SEQ ID NO: 517245 - DNA, 55 bp, Artificial
  Synthetic oligonucleotide
gaaatagctggttcgtgtgtgagatgcggatttcgcccacggagagtaccaaacg

SEQ ID NO: 517246 - DNA, 55 bp, Artificial
  Synthetic oligonucleotide
ccccggattaaactattcacacgattttaatgtactgtcccaatacatgatcacg

SEQ ID NO: 517247 - DNA, 55 bp, Artificial; identical to SEQ ID NO: 362429
  Synthetic oligonucleotide

SEQ ID NO: 517248 - DNA, 55 bp, Artificial
  Synthetic oligonucleotide
tgttggtgcgacgggagctttgagggctcctattccattacctgtggttcctgta

SEQ ID NO: 517249 - DNA, 55 bp, Artificial
  Synthetic oligonucleotide
cccggtttaagctattcacacgattttaatacactgtcccaatacatggtcacga

SEQ ID NO: 517250 - DNA, 55 bp, Artificial
  Synthetic oligonucleotide
ctgggaaaggatccgagggtccttgtcacaatttggttgccatatctagacatcg

SEQ ID NO: 517251 - DNA, 55 bp, Artificial
  Synthetic oligonucleotide
cccgtttgtcaaagggctagactagcgcagcttcagatacaaggattgaggtgac

SEQ ID NO: 517252 - DNA, 55 bp, Artificial; identical to SEQ ID NO: 384161
  Synthetic oligonucleotide

SEQ ID NO: 517253 - DNA, 55 bp, Artificial
  Synthetic oligonucleotide
ccgagcgcattatcgatcttggtggcaattatgtcacccatgcgaaacaaggtcg

SEQ ID NO: 517254 - DNA, 55 bp, Artificial
  Synthetic oligonucleotide
ccgaggtatcgaaatggaccccgaaggtgagtcaggttaaacccgacccttctgt

SEQ ID NO: 517255 - DNA, 55 bp, Artificial
  Synthetic oligonucleotide
ctccaccatactacgaaggtttattccgtaatgtatggatttacttgcaaagccg

SEQ ID NO: 517256 - DNA, 55 bp, Artificial
  Synthetic oligonucleotide
ctccaataacggagattgaccccttctatttaccgtatgatgatcttgacgtgga

SEQ ID NO: 517257 - DNA, 55 bp, Artificial
  Synthetic oligonucleotide
ccgcacatgagtgttggtggattaccccacagggtcccaacgcagcgagaagctc

SEQ ID NO: 517258 - DNA, 55 bp, Artificial
  Synthetic oligonucleotide
cgttgacaatctcattcgagattatgtcagtaacgtgagagccgatgatagcaat

SEQ ID NO: 517259 - DNA, 55 bp, Artificial
  Synthetic oligonucleotide
cgtgtaagaataccttcaggaccgatttcgacattggaaatgcactatgggttca

SEQ ID NO: 517260 - DNA, 55 bp, Artificial
  Synthetic oligonucleotide
cggagaagcccgaggtagaattaaaccccggcgaaaccgtaaaagtgaaggccga

SEQ ID NO: 517261 - DNA, 55 bp, Artificial
  Synthetic oligonucleotide
atttcagaaaaggttgaaatggctttgaccccaaagatgactgcgcttacattct

SEQ ID NO: 517262 - DNA, 55 bp, Artificial
  Synthetic oligonucleotide
tttcctgcgatgattttatatatattgccagtggttaggcgggtgtgatgcttct

SEQ ID NO: 517263 - DNA, 55 bp, Artificial
  Synthetic oligonucleotide
gggtatgtttcgcttcaatggaattctgacgcgattaccgacaaatgtagacatg

SEQ ID NO: 517264 - DNA, 55 bp, Artificial
  Synthetic oligonucleotide
gggcccctattccattacctgtggttcctgtaccacaagccctcaatcagcgcaa

SEQ ID NO: 517265 - DNA, 55 bp, Artificial; identical to SEQ ID NO: 340074
  Synthetic oligonucleotide

SEQ ID NO: 517266 - DNA, 55 bp, Artificial
  Synthetic oligonucleotide
gggatgtggtaccccatgtggactgaggaggtctctgccaaacagctgtaccaag

SEQ ID NO: 517267 - DNA, 55 bp, Artificial
  Synthetic oligonucleotide
ggccgcatggcgttacaaaatgattgcccctggtatcgatgctgtgaaaacaaga

SEQ ID NO: 517268 - DNA, 55 bp, Artificial
  Synthetic oligonucleotide
ggagcctcagactcgaaagaagcatgcactttcgtgagaaccgcagactccattc

SEQ ID NO: 517269 - DNA, 55 bp, Artificial
  Synthetic oligonucleotide
ggacgatttccacctgaaaaggtgagacctttgggtcgatgttctaatggttccg

SEQ ID NO: 517270 - DNA, 55 bp, Artificial
  Synthetic oligonucleotide
ggaatccattcttcccgttggatgcgtctgtttgagtctcatgaggctcgttgga

SEQ ID NO: 517271 - DNA, 55 bp, Artificial
  Synthetic oligonucleotide
ggaacttgctgactgcctgatcaccgtcttgatgttaccatttccagacgtgggg

SEQ ID NO: 517272 - DNA, 55 bp, Artificial
  Synthetic oligonucleotide
gcttggattcttctgtttcgccatttgatgtttgtgtggatatccttgacacaat

SEQ ID NO: 517273 - DNA, 55 bp, Artificial
  Synthetic oligonucleotide
caatatcccacacgtatgaattggagagcctttctggtgtagttgacgacgccac

SEQ ID NO: 517274 - DNA, 55 bp, Artificial
  Synthetic oligonucleotide
cgggatagccctcattttcaagtgttacctctgcacttagggttctgttgaggtg

SEQ ID NO: 517275 - DNA, 55 bp, Artificial
  Synthetic oligonucleotide
gcgcaacttgcgcttgcctaatggtcaagtctgggtaaccagaaaaccaaccgat

SEQ ID NO: 517276 - DNA, 55 bp, Artificial
  Synthetic oligonucleotide
gccggagatgactctttggcggtctctaacagtccgattactggagataccgacc

SEQ ID NO: 517277 - DNA, 55 bp, Artificial
  Synthetic oligonucleotide
gcccggtgtagaactaaaccccggagaaaccgtaaaagtgaaagcggagcagtcc

SEQ ID NO: 517278 - DNA, 55 bp, Artificial
  Synthetic oligonucleotide
cactctggctcaagtgaaggaagtaattgctttcggtgacaccgagcaaatcccc

SEQ ID NO: 517279 - DNA, 55 bp, Artificial
  Synthetic oligonucleotide
gcacactgcgttaggcgcggtgtgcgtaagttgatagcttccgtcatgatggacc

SEQ ID NO: 517280 - DNA, 55 bp, Artificial
  Synthetic oligonucleotide
gatttctataaatcgtagtcgttgttgaaacgcagttgattgggtactataaccc

SEQ ID NO: 517281 - DNA, 55 bp, Artificial
  Synthetic oligonucleotide
cagacaccactatccgatcggaggatctaccgatacaaacgttttcccaaacgtc

SEQ ID NO: 517282 - DNA, 55 bp, Artificial
  Synthetic oligonucleotide
gatgccgacatacgcgcttgtggatttgtttcttacgcctctggaagttccgagg

SEQ ID NO: 517283 - DNA, 55 bp, Artificial
  Synthetic oligonucleotide
cagacccctcgttcccgaatctacgtccaataaagtgactcagtggttcaaatcc

SEQ ID NO: 517284 - DNA, 55 bp, Artificial
  Synthetic oligonucleotide
cagcgaacctggcgcctacctaatggtcaagtctgggtaaccagaaaaccaaccg

SEQ ID NO: 517285 - DNA, 54 bp, Artificial
  Synthetic oligonucleotide
acacgtcaacaagctttcaaagatgccagagatcgagctctgatgacgatagcg

SEQ ID NO: 517286 - DNA, 54 bp, Artificial
  Synthetic oligonucleotide
acccaatttgccccgtctcacggatgtcattaaaagcgcgggactccgaagttt

SEQ ID NO: 517287 - DNA, 54 bp, Artificial
  Synthetic oligonucleotide
gtgaaagctttaacggctcccactggtaccataagcttagtcgatggtgtagct

SEQ ID NO: 517288 - DNA, 54 bp, Artificial
  Synthetic oligonucleotide
attgctccgcacttgttcgattggtactcgaggcctgttactagttgctctgac

SEQ ID NO: 517289 - DNA, 53 bp, Artificial
  Synthetic oligonucleotide
tgtgtgcgctaagctcgagtaccccccctccggagggtttccataggagacca

SEQ ID NO: 517290 - DNA, 53 bp, Artificial
  Synthetic oligonucleotide
ttttgccgttgtcattaagaggtacggttacattggacatcccgggagtaccg

SEQ ID NO: 517291 - DNA, 53 bp, Artificial
  Synthetic oligonucleotide
agacacttcgttgatttcgacggaggttgatcctttctaccttccatacgacg

SEQ ID NO: 517292 - DNA, 53 bp, Artificial
  Synthetic oligonucleotide
cgctttgttcggattgcgggttgatagggtatcaatgtgcttgtcacgactta

SEQ ID NO: 517293 - DNA, 52 bp, Artificial
  Synthetic oligonucleotide
tctaattggatctagaaaacccttaccgcgagaaaaagaggatttgtgcgtg

SEQ ID NO: 517294 - DNA, 52 bp, Artificial
  Synthetic oligonucleotide
aattcgaatgcagcggctaatcttagtcgcctttggaaactctgcggtggga

SEQ ID NO: 517295 - DNA, 52 bp, Artificial
  Synthetic oligonucleotide
accttaaagggtagtcgtcgttgcgacgcaccaatgatacgctgcaccttgg

SEQ ID NO: 517296 - DNA, 52 bp, Artificial
  Synthetic oligonucleotide
agccgtttgtgatacgtccctccccactcacgtgtgttacgacgacacgtac

SEQ ID NO: 517297 - DNA, 52 bp, Artificial
  Synthetic oligonucleotide
gctggttatggccggtggaagggtctcaaggtaggtggcggtgagcgatcct

SEQ ID NO: 517298 - DNA, 52 bp, Artificial
  Synthetic oligonucleotide
tggtgaaactttctacctttgtcacatttaacgatgaatgtataactgacat

SEQ ID NO: 517299 - DNA, 52 bp, Artificial
  Synthetic oligonucleotide
atttccaactttgaattcctacaagttgaggtctttggaccggttgtttaaa

SEQ ID NO: 517300 - DNA, 52 bp, Artificial
  Synthetic oligonucleotide
atttttctgtttataaggagctttacacctctgatcaaaagcgttttaactt

SEQ ID NO: 517301 - DNA, 52 bp, Artificial
  Synthetic oligonucleotide
ttgggggggcctatgaactacaattaacgcaggaatttactgcaccccattc

SEQ ID NO: 517302 - DNA, 52 bp, Artificial
  Synthetic oligonucleotide
cttgagttatgcccaattcagagtgtgattcagattcaaccggagcgtgatg

SEQ ID NO: 517303 - DNA, 51 bp, Artificial
  Synthetic oligonucleotide
aaacacgtcaacaggcctttaaggatgccagagatcgtgctctgatgacga

SEQ ID NO: 517304 - DNA, 51 bp, Artificial
  Synthetic oligonucleotide
cctttgaagaattaagtcgtccgaaatggacaccgaaggtgagtcaggtca

SEQ ID NO: 517305 - DNA, 51 bp, Artificial
  Synthetic oligonucleotide
cgagctatgaatgctcacggaaccacttttttaaaggggacgatgatgttt

SEQ ID NO: 517306 - DNA, 51 bp, Artificial
  Synthetic oligonucleotide
ctagggttaccagcgcacctcgtgaactggtggtgtgaattacatataagg

SEQ ID NO: 517307 - DNA, 51 bp, Artificial
  Synthetic oligonucleotide
cttccgctacatctctcccagtttagggttcaggtatcagtccgaagactt

SEQ ID NO: 517308 - DNA, 51 bp, Artificial
  Synthetic oligonucleotide
gagaggagtcacataagagatcgtgattgtggtatcggattttccgttgat

SEQ ID NO: 517309 - DNA, 51 bp, Artificial
  Synthetic oligonucleotide
gtatatatcgtggagatgactctgtctatgacagatggttgttctttagct

SEQ ID NO: 517310 - DNA, 51 bp, Artificial
  Synthetic oligonucleotide
gttttatcacgagcgtacggttcaacccctgcctcccctgatttaccaact

SEQ ID NO: 517311 - DNA, 50 bp, Artificial
  Synthetic oligonucleotide
ccccatgtggactgagaaggtctctgccaaacagctgtatcaagatacag

SEQ ID NO: 517312 - DNA, 50 bp, Artificial
  Synthetic oligonucleotide
gacgtgccatagacgtaggcctcgtttcatctggtgaggaacagatgatg

SEQ ID NO: 517313 - DNA, 50 bp, Artificial
  Synthetic oligonucleotide
ccaacacaaggaatcttcgtagtttgggaacttatcttggatggtcaata

SEQ ID NO: 517314 - DNA, 50 bp, Artificial
  Synthetic oligonucleotide
gcccatgcgtgatgtatcttgcgcgtggttgtcaagcctgaggaagaaag

SEQ ID NO: 517315 - DNA, 50 bp, Artificial
  Synthetic oligonucleotide
gtagtatggtgcctcaacactagtaagcgtgttgagaagcgggtgagact

SEQ ID NO: 517316 - DNA, 50 bp, Artificial
  Synthetic oligonucleotide
tcagaccgacaaaaactgagaagggccatagtttcggtcagaggttaagt

SEQ ID NO: 517317 - DNA, 50 bp, Artificial
  Synthetic oligonucleotide
aacgccgcaccggagatgcctttacctattttggtaacactctcgtaaca

SEQ ID NO: 517318 - DNA, 50 bp, Artificial
  Synthetic oligonucleotide
aacatggacccccccactccttacatatgttcaaagttcctactgacgga

SEQ ID NO: 517319 - DNA, 50 bp, Artificial
  Synthetic oligonucleotide
tgccacaagccctcaatcagcgcaacttgcgcttgcctaatggtcaagtc

SEQ ID NO: 517320 - DNA, 60 bp, Artificial
  Synthetic oligonucleotide
gtagagaatccacatgggatcatctggaaagtatctccatgtgccgcatgggtcccatca

SEQ ID NO: 517321 - DNA, 60 bp, Artificial
  Synthetic oligonucleotide
gtcagcgagcattatatcccagacatgaaagcaagctaacagagtgcaactgggatagct

SEQ ID NO: 517322 - DNA, 60 bp, Artificial
  Synthetic oligonucleotide
gtccacatactattgggttaggtcaaggccttgttgtaggatcagtggaactaccgcctg

SEQ ID NO: 517323 - DNA, 60 bp, Artificial
  Synthetic oligonucleotide
gtccttatactaaaactgctttctctgtagtcatgacacagacgataaagcgtgcatgtt

SEQ ID NO: 517324 - DNA, 60 bp, Artificial
  Synthetic oligonucleotide
gtctatgtgatacacgccaattctgctgcttgtgagatctaagcacagtggggcatttat

SEQ ID NO: 517325 - DNA, 60 bp, Artificial
  Synthetic oligonucleotide
gtctattactatgtaatacagggactgccagaaacctaaatgagcttaagatagaatgtc

SEQ ID NO: 517326 - DNA, 60 bp, Artificial
  Synthetic oligonucleotide
cccaaaagatgctagggaaactggatggacctttgagaactaagctacaggtatacctcc

SEQ ID NO: 517327 - DNA, 60 bp, Artificial
  Synthetic oligonucleotide
gtctgatctactaatggaacgccacaactattttggtagggaggtgtgccaattcctaga

SEQ ID NO: 517328 - DNA, 60 bp, Artificial
  Synthetic oligonucleotide
ccattgagaagcgaaggcttagacttgggttacctgagatcctaataactggactatccc

SEQ ID NO: 517329 - DNA, 60 bp, Artificial
  Synthetic oligonucleotide
gtctgcacttcacggcgcctgggagtccggactcaaaatgtctcaaaattaaggttaaga

SEQ ID NO: 517330 - DNA, 60 bp, Artificial
  Synthetic oligonucleotide
ccatcttaaagaacgatcaagccttaggtatggaaatgtccttgatgtgaatgctattga

SEQ ID NO: 517331 - DNA, 60 bp, Artificial
  Synthetic oligonucleotide
ccatctctaggagagtaccccactcttaggagggacctcgttgaatgctcttgcagtgtg

SEQ ID NO: 517332 - DNA, 60 bp, Artificial
  Synthetic oligonucleotide
gtctgctcaaaggataaaggtctaacataccacaaagtttctagcaactgctatagccca

SEQ ID NO: 517333 - DNA, 60 bp, Artificial
  Synthetic oligonucleotide
gtgaaggaggcaatcccaggggaaacatccgcagtagagtgtttagacttattagatcgg

SEQ ID NO: 517334 - DNA, 60 bp, Artificial
  Synthetic oligonucleotide
ccatacccaccactattggggggctgaggtttgagagaatccatgacagccagggtaaaa

SEQ ID NO: 517335 - DNA, 60 bp, Artificial
  Synthetic oligonucleotide
ccagtctgggtgcccccctcatttcacatccaactccttttctgatgattgggcaggtaa

SEQ ID NO: 517336 - DNA, 60 bp, Artificial
  Synthetic oligonucleotide
gtgaatgccattgacatagaggaaccgagtggtcaaacagcggactggtatacgattggg

SEQ ID NO: 517337 - DNA, 60 bp, Artificial
  Synthetic oligonucleotide
ccagatgaccatcttaaagaacgatcaagccttaggtatggaaatgtccttgatgtgaat

SEQ ID NO: 517338 - DNA, 60 bp, Artificial
  Synthetic oligonucleotide
ccagataactacgttatcttgaacgggaagctttacataatagattacaaggtttctgtc

SEQ ID NO: 517339 - DNA, 60 bp, Artificial
  Synthetic oligonucleotide
gtgatggcaagtaacataatgaataaacattgggacaaaccatattttagtcaaaccagg

SEQ ID NO: 517340 - DNA, 60 bp, Artificial
  Synthetic oligonucleotide
ccactctcataaaatcatcatgagggagcacaagaccaaatgggtacaagagagctcatc

SEQ ID NO: 517341 - DNA, 60 bp, Artificial
  Synthetic oligonucleotide
gtgcccgtaccataaaaaaagatgggtgcatatggaatgcagaccttgtgggcatagagc

SEQ ID NO: 517342 - DNA, 60 bp, Artificial
  Synthetic oligonucleotide
gtgtactccactatagaacaaagcttttaaatggcaaaccaattcattttccaagatgtt

SEQ ID NO: 517343 - DNA, 60 bp, Artificial
  Synthetic oligonucleotide
ccacaggataacaaaaggccgaaggtatctttttgaaggggacatgatattggattctct

SEQ ID NO: 517344 - DNA, 60 bp, Artificial
  Synthetic oligonucleotide
gtgtcagcactggaagataaactcgcagattacaagcgaagaatggcagatgctgtgtcc

SEQ ID NO: 517345 - DNA, 60 bp, Artificial
  Synthetic oligonucleotide
gtgtcatagtcatatatccatacttcgttatttatttaatgggcccataaaatgtgaaac

SEQ ID NO: 517346 - DNA, 60 bp, Artificial
  Synthetic oligonucleotide
ccacaactattttggtagagaagtgtgccaatacttagacatagagtttaggaatgatac

SEQ ID NO: 517347 - DNA, 60 bp, Artificial
  Synthetic oligonucleotide
gggcatttatcttcccttgttggcatggtgagaatttgcaagtatagttaattagtggag

SEQ ID NO: 517348 - DNA, 60 bp, Artificial
  Synthetic oligonucleotide
gggcccaatcatctgcgcaggacccatccactcaaacaagagtgctggcataccccacct

SEQ ID NO: 517349 - DNA, 60 bp, Artificial
  Synthetic oligonucleotide
cctgatatgtggcagagaatacaggaggtttgcgcaacaaattactgggctgcaatatta

SEQ ID NO: 517350 - DNA, 60 bp, Artificial
  Synthetic oligonucleotide
cctcttgcactgtcagtcccacctaaaaatacaaaaggtgggaagtgcttttatggaggt

SEQ ID NO: 517351 - DNA, 60 bp, Artificial
  Synthetic oligonucleotide
cctcttagaccctgagtttgacatcttccctgatgccttgacgatcttattgcctcgagt

SEQ ID NO: 517352 - DNA, 60 bp, Artificial
  Synthetic oligonucleotide
gggctcccagacctagatgtgactgtcgatgccacaggtgtgacagtggacataggggct

SEQ ID NO: 517353 - DNA, 60 bp, Artificial
  Synthetic oligonucleotide
ggggaggaacattccatgccatctcatgccggtccacaaaccttgagaacatggtgaaca

SEQ ID NO: 517354 - DNA, 60 bp, Artificial
  Synthetic oligonucleotide
ggggcaaagaaatggtggaccactttcacttgggtgatgatatggacccagaactcagag

SEQ ID NO: 517355 - DNA, 60 bp, Artificial
  Synthetic oligonucleotide
cctcaacggaacttatctacatttagtccggaggcagggtatgtggcatttattggtcgg

SEQ ID NO: 517356 - DNA, 60 bp, Artificial
  Synthetic oligonucleotide
ggggctgcatggcaacatgaatgaggaggcaaaaatacaccttgagaccgtagaatgggc

SEQ ID NO: 517357 - DNA, 60 bp, Artificial
  Synthetic oligonucleotide
gggtggcatctgcatatagaggtcattgcatggttaggctgagtgggttcaagatcaaac

SEQ ID NO: 517358 - DNA, 60 bp, Artificial
  Synthetic oligonucleotide
cctaaacgagcttacactccaattgacttctgtggcatgattacaggtaacacattaaaa

SEQ ID NO: 517359 - DNA, 60 bp, Artificial
  Synthetic oligonucleotide
cctaaaaggccagccacaccatcagatttctgttctatagtagctggcaatatgttgcta

SEQ ID NO: 517360 - DNA, 60 bp, Artificial
  Synthetic oligonucleotide
ccgtggaactatagaattaacctctactaatctcaaccattattctattactgggacaac

SEQ ID NO: 517361 - DNA, 60 bp, Artificial
  Synthetic oligonucleotide
ggtaaggcattggatgtactcgcctgtcatcctgactattctagcaatagggcttgctga

SEQ ID NO: 517362 - DNA, 60 bp, Artificial
  Synthetic oligonucleotide
cagtcaggcttgagccatctctaggagagtaccccactcttaggagggacctcgttgaat

SEQ ID NO: 517363 - DNA, 60 bp, Artificial
  Synthetic oligonucleotide
ccgtaacgaaatggatcacatataccataactttcaaatcccagagatatttgtagataa

SEQ ID NO: 517364 - DNA, 60 bp, Artificial
  Synthetic oligonucleotide
ccggaggttgggtatgtggcatttattggtaagtatgggcagcaactcaacttcggtgtt

SEQ ID NO: 517365 - DNA, 60 bp, Artificial
  Synthetic oligonucleotide
ggtcaaattcacagtggttaataaccattttccccaatacattgcaaatcctgtgccaga

SEQ ID NO: 517366 - DNA, 60 bp, Artificial
  Synthetic oligonucleotide
ggtcgagacaatggctaggtgtgtctgtgaactgagcccacatgagactgttgccaaccc

SEQ ID NO: 517367 - DNA, 60 bp, Artificial
  Synthetic oligonucleotide
ggtctaaatctaaattgcaacgtgatagacaagtttatatctgaagccagtgttattgag

SEQ ID NO: 517368 - DNA, 60 bp, Artificial
  Synthetic oligonucleotide
ggtgcccccctcatttcacatccaactccttttctgatgattgggcaggtaagatggaca

SEQ ID NO: 517369 - DNA, 60 bp, Artificial
  Synthetic oligonucleotide
ggtggaacacaattccgccagataaattctactgggactatgtccgaaatatgctctaga

SEQ ID NO: 517370 - DNA, 60 bp, Artificial
  Synthetic oligonucleotide
ggtgtgaggctaatcactctaaccagtgagctcaagtcagctactgtctgcgcatctcac

SEQ ID NO: 517371 - DNA, 60 bp, Artificial
  Synthetic oligonucleotide
ccctgaaacattgagagcattacttaaacctgcaggtgagacaactattgaatggagaac

SEQ ID NO: 517372 - DNA, 60 bp, Artificial
  Synthetic oligonucleotide
ggttggattggaacaggatatgttactaacatccatccgattggttatgtgttgcctaaa

SEQ ID NO: 517373 - DNA, 60 bp, Artificial
  Synthetic oligonucleotide
cccattgccatataccaataaatccaccaaaagatgatatttcaaagaaagtttgtaggg

SEQ ID NO: 517374 - DNA, 60 bp, Artificial
  Synthetic oligonucleotide
gtacccctagagaaaacaattcaacatggatccttatcgtattgacaccttccgtaacag

SEQ ID NO: 517375 - DNA, 60 bp, Artificial
  Synthetic oligonucleotide
catcaatcctgcctagccatgacaggttcgaattacctatagaattatgtggcttgataa

SEQ ID NO: 517376 - DNA, 60 bp, Artificial
  Synthetic oligonucleotide
taaagatgttattcttcgaagatgttttgataattcttaccaatcttgcctcctcttaga

SEQ ID NO: 517377 - DNA, 60 bp, Artificial
  Synthetic oligonucleotide
taacatggaataattggcaggtatctagagaatttacaactggaccaattgacttgtcaa

SEQ ID NO: 517378 - DNA, 60 bp, Artificial
  Synthetic oligonucleotide
catagctccagtgaagctagtgtttgccatcataaagaaactaatgagagctgtgagctg

SEQ ID NO: 517379 - DNA, 60 bp, Artificial
  Synthetic oligonucleotide
catagcagcaaaaatagcactgcccatgtaagatgcaaaggggatgagactgcattcagt

SEQ ID NO: 517380 - DNA, 60 bp, Artificial
  Synthetic oligonucleotide
taagcattgtggtctatctgacatcttttgtggttccaatactattgaaagctctttaca

SEQ ID NO: 517381 - DNA, 60 bp, Artificial
  Synthetic oligonucleotide
taatctatcatagcccagcactcgtattgcgtgcatatgtaacagacaactatgaacaaa

SEQ ID NO: 517382 - DNA, 60 bp, Artificial
  Synthetic oligonucleotide
cagttggaatcagggatccaaaggccatgcacatcatttcaggggggtaattctcaacct

SEQ ID NO: 517383 - DNA, 60 bp, Artificial
  Synthetic oligonucleotide
cagtccatatttctcctggagcgccatcaacctcttagaccctgagtttgacatcttccc

SEQ ID NO: 517384 - DNA, 60 bp, Artificial
  Synthetic oligonucleotide
tacataatgatttaactactcatcacttcaagcctactgatagtctaccgcatgtagtgc

SEQ ID NO: 517385 - DNA, 60 bp, Artificial
  Synthetic oligonucleotide
tacatattcagggatatttagttaattgtttactaatttgggtatttacgggtttatata

SEQ ID NO: 517386 - DNA, 60 bp, Artificial
  Synthetic oligonucleotide
cagggtaaaatatctggtagccccctggacatcacagctataagaggatccttttctgtt

SEQ ID NO: 517387 - DNA, 60 bp, Artificial
  Synthetic oligonucleotide
cagggattataaaattgaaccatgggtatctatactagatcattccttaactaaggctat

SEQ ID NO: 517388 - DNA, 60 bp, Artificial
  Synthetic oligonucleotide
tacttgtgggggatgtatacaatgttttacagatatagcatgcaagttagagataacatc

SEQ ID NO: 517389 - DNA, 60 bp, Artificial
  Synthetic oligonucleotide
tagacatcaagaccgactcaggctatggatccttaatggatcatggcgcatatggtgaac

SEQ ID NO: 517390 - DNA, 60 bp, Artificial
  Synthetic oligonucleotide
tagatatggaggcagacattgagcactttctgcaggatgagagctcatatactggagatc

SEQ ID NO: 517391 - DNA, 60 bp, Artificial
  Synthetic oligonucleotide
cagctgttaggcagttcttggaattctttccagatggtcactgtggggaagttcgaggta

SEQ ID NO: 517392 - DNA, 60 bp, Artificial
  Synthetic oligonucleotide
tagcattgttagttttgtccatccttttgttcacattatgctgcccgcgtagaccaagtt

SEQ ID NO: 517393 - DNA, 60 bp, Artificial
  Synthetic oligonucleotide
cagctagtaatatacaatggaaagcattagctcgcagttttacattaggggtgtgtaaca

SEQ ID NO: 517394 - DNA, 60 bp, Artificial
  Synthetic oligonucleotide
taggataaacgtggagaatgggctgtctcttggagaaccaggcctgtacgaccaaatcta

SEQ ID NO: 517395 - DNA, 60 bp, Artificial
  Synthetic oligonucleotide
tagtgtggaggcagttgcaaactactctgccatacccaccactattggggggctgaggtt

SEQ ID NO: 517396 - DNA, 60 bp, Artificial
  Synthetic oligonucleotide
cagattgtcatgccccttgctgaggttaagggatgtacctgggctgatggttatacaatg

SEQ ID NO: 517397 - DNA, 60 bp, Artificial
  Synthetic oligonucleotide
tataagtgaaccgacaagccacagttcttttactactaaacatacatatgttgataacgt

SEQ ID NO: 517398 - DNA, 60 bp, Artificial
  Synthetic oligonucleotide
tatattctctttaattccaggggttgcacactctcttgctgttgaactatgtgtgccagg

SEQ ID NO: 517399 - DNA, 60 bp, Artificial
  Synthetic oligonucleotide
cagagagtaggcctccataagggtcttggttgtggcttcagatactcccgcagttggaat

SEQ ID NO: 517400 - DNA, 60 bp, Artificial
  Synthetic oligonucleotide
cagacggatctaacatctctacacagtggcccagcaggagaaatgacggggttgttcaat

SEQ ID NO: 517401 - DNA, 60 bp, Artificial
  Synthetic oligonucleotide
cagaacagtatcccagctgtgattgggtacaagttcgcagtgacagttgatgaaatgtca

SEQ ID NO: 517402 - DNA, 60 bp, Artificial
  Synthetic oligonucleotide
cagaaatgttcttagagacattcgaattttacccgcttgttattgatatgcacagagttt

SEQ ID NO: 517403 - DNA, 60 bp, Artificial
  Synthetic oligonucleotide
ccacaacggaatgcagctacatttaacccggaggtcgggtatgtggcatttattggtaag

SEQ ID NO: 517404 - DNA, 60 bp, Artificial
  Synthetic oligonucleotide
ccaagctgccatcacaatgtgtgcaatcatgggtaaggaaggctgcagagggctccttac

SEQ ID NO: 517405 - DNA, 60 bp, Artificial
  Synthetic oligonucleotide
gtgtctcagtacaatcgccataacacattcagagttgtaacttgtgcaaataataatgtc

SEQ ID NO: 517406 - DNA, 60 bp, Artificial
  Synthetic oligonucleotide
ccaactggactagaccctggtgatcatctcaaagagaagtcgatgctcagttacgggaat

SEQ ID NO: 517407 - DNA, 60 bp, Artificial
  Synthetic oligonucleotide
ccaactgaactgtgggggacatgagagtcaagtgactctgagaggcaacctcatcttcct

SEQ ID NO: 517408 - DNA, 60 bp, Artificial
  Synthetic oligonucleotide
ccaaattctgatagatggagatggtactagtaactggcttgaggagatcaggctcagtag

SEQ ID NO: 517409 - DNA, 60 bp, Artificial
  Synthetic oligonucleotide
gtgtttacaacgagggtattgagggaatcatagggccaatatggaaagaatttaatatat

SEQ ID NO: 517410 - DNA, 60 bp, Artificial
  Synthetic oligonucleotide
gttagacccacactgagatggatagcagcgtctcaccaaatctcagagacagaagccctt

SEQ ID NO: 517411 - DNA, 60 bp, Artificial
  Synthetic oligonucleotide
cattctgtaatctagttgatgtgcttcaaccattaattagtgagagagttcagatctctc

SEQ ID NO: 517412 - DNA, 60 bp, Artificial
  Synthetic oligonucleotide
gttcatggtcttaaatggcccatacactgaggagtacaagctagaaatgatcatagaggc

SEQ ID NO: 517413 - DNA, 60 bp, Artificial
  Synthetic oligonucleotide
gttccatcgatttattggaaggtgaagctctagtcaattcaatggtacattcagatgata

SEQ ID NO: 517414 - DNA, 60 bp, Artificial
  Synthetic oligonucleotide
gttcctggaaacatttgaattctaccctttggttattgacatgcatagagtgctaaagga

SEQ ID NO: 517415 - DNA, 60 bp, Artificial
  Synthetic oligonucleotide
cattagccatcataccctttccagtgatcgttccaaaattgagtcaagcgtgtcatacta

SEQ ID NO: 517416 - DNA, 60 bp, Artificial
  Synthetic oligonucleotide
cattaatccaaaagggacatatgcaaagaaatgtggttcagttcaaaaagttggtggcct

SEQ ID NO: 517417 - DNA, 60 bp, Artificial
  Synthetic oligonucleotide
catgtaagatgcaaaggggatgagactgcattcagtgtcttggagggggtccatagctac

SEQ ID NO: 517418 - DNA, 60 bp, Artificial
  Synthetic oligonucleotide
catggctgagcacagacccatctgaaacattgagggatggtccttttcttagccatgtgc

SEQ ID NO: 517419 - DNA, 60 bp, Artificial
  Synthetic oligonucleotide
catggagcaccaccctctattgcctggactgctattgcgttgacacaatggataactcac

SEQ ID NO: 517420 - DNA, 60 bp, Artificial
  Synthetic oligonucleotide
gttgaggttcatgacgttagactcagctatgagtagcgacgacggcatgggggaaactag

SEQ ID NO: 517421 - DNA, 60 bp, Artificial
  Synthetic oligonucleotide
gtttacctcagatagcaatttggaactgttagagaatctagtctggatactaaaccactt

SEQ ID NO: 517422 - DNA, 60 bp, Artificial
  Synthetic oligonucleotide
catgcagtggtcgatgagcagtgccaactgaactgtgggggacatgagagtcaagtgact

SEQ ID NO: 517423 - DNA, 60 bp, Artificial
  Synthetic oligonucleotide
catgatgaggttgtggaatgggcacctgtttaaatagtgtgccatcagatatgggtaacc

SEQ ID NO: 517424 - DNA, 60 bp, Artificial
  Synthetic oligonucleotide
catgagctactcagaatcaccatacagcactggaataccatcatgcaatgtaaaaagatt

SEQ ID NO: 517425 - DNA, 60 bp, Artificial
  Synthetic oligonucleotide
catgaaagggttttcacaatctatgtcaagacttctagtgacatagacaacaataaaagc

SEQ ID NO: 517426 - DNA, 60 bp, Artificial
  Synthetic oligonucleotide
catctgttactataatagaagccatacgttacctttcatcttctcaaatcaatccaagtg

SEQ ID NO: 517427 - DNA, 60 bp, Artificial
  Synthetic oligonucleotide
gtttctatcccttgctaaaaactggacagagcgggttgaggaatggcttgatctcccatg

SEQ ID NO: 517428 - DNA, 60 bp, Artificial
  Synthetic oligonucleotide
gttttaaatctctaacccatacaaggtcactatgcaagaaaaaactccctaatgcagcat

SEQ ID NO: 517429 - DNA, 60 bp, Artificial
  Synthetic oligonucleotide
catcattgaccacattgactcaccatcatcaatttgggtttttgctggagcacctgatag

SEQ ID NO: 517430 - DNA, 60 bp, Artificial
  Synthetic oligonucleotide
taaacctcttcatcacagatcttcaatttccgtgcaatatgtctatgtattgcacaccat

SEQ ID NO: 517431 - DNA, 60 bp, Artificial
  Synthetic oligonucleotide
gatgggcatcttgctgcatctgttacaattatagaggcaatacgttacttgtcatcctca

SEQ ID NO: 517432 - DNA, 60 bp, Artificial
  Synthetic oligonucleotide
cttgcaaagaactggacagaacgggttgaagactggcttgacctcccatgcaagctgcta

SEQ ID NO: 517433 - DNA, 60 bp, Artificial
  Synthetic oligonucleotide
cttgagcagttgttggacatgtactacaaggacatgaggtgctactcccagagagagctg

SEQ ID NO: 517434 - DNA, 60 bp, Artificial
  Synthetic oligonucleotide
gatgtcatagctgtggagctctcagaggggtcacttgacattgaatccatctttgacggg

SEQ ID NO: 517435 - DNA, 60 bp, Artificial
  Synthetic oligonucleotide
gatgtcgttgggcaggagactgccagtctgggtgtccccctcatttcacatccaactcct

SEQ ID NO: 517436 - DNA, 60 bp, Artificial
  Synthetic oligonucleotide
gatgtgactgtcgatgccactggtgttacagtggacataggggctgtgccagactcagca

SEQ ID NO: 517437 - DNA, 60 bp, Artificial
  Synthetic oligonucleotide
gattcacctctgatagcaatctagaagttctggagaacttgacttggatcttaaacaagc

SEQ ID NO: 517438 - DNA, 60 bp, Artificial
  Synthetic oligonucleotide
cttcctacatataatcgatttgaaatacctattgaattatgcggtcttcttaactgctca

SEQ ID NO: 517439 - DNA, 60 bp, Artificial
  Synthetic oligonucleotide
cttcatacaaggggaaagtcttctttgaacggccaacttttgatggatacgttggctggg

SEQ ID NO: 517440 - DNA, 60 bp, Artificial
  Synthetic oligonucleotide
gattctagggcaatgaattatttaataagtcctgaaggagaagtgtttttcctctcaaga

SEQ ID NO: 517441 - DNA, 60 bp, Artificial
  Synthetic oligonucleotide
gcaagactgcttatcgcacagccatatgaaatcatataggtactcacacatcttgattct

SEQ ID NO: 517442 - DNA, 60 bp, Artificial
  Synthetic oligonucleotide
ctgtgccagacactgcccttacactccataggatgtcagggtatctagccagatgggttg

SEQ ID NO: 517443 - DNA, 60 bp, Artificial
  Synthetic oligonucleotide
gcaattggggttgtgaagaatggggttgtttagcaataaatgacggttgcttatatggtt

SEQ ID NO: 517444 - DNA, 60 bp, Artificial
  Synthetic oligonucleotide
gcacttgggctgatggttatacaatgtatcttggattcgcacctggggcagaaatgttcc

SEQ ID NO: 517445 - DNA, 60 bp, Artificial
  Synthetic oligonucleotide
ctggtcttctgccctcggatagggttctctggataggtgatgttgcttgtcaacctatga

SEQ ID NO: 517446 - DNA, 60 bp, Artificial
  Synthetic oligonucleotide
ctggtaaatgcccaacatctataccagcagatacgaactggttaactttctcaagagaaa

SEQ ID NO: 517447 - DNA, 60 bp, Artificial; identical to SEQ ID NO: 408256
  Synthetic oligonucleotide

SEQ ID NO: 517448 - DNA, 60 bp, Artificial
  Synthetic oligonucleotide
ctggaagtaaatacgacactaagactagtggggtacctggcattaggagatgtgagacgc

SEQ ID NO: 517449 - DNA, 60 bp, Artificial
  Synthetic oligonucleotide
ctgcaatgacaccgacaataaagttcagggctattacttgtgcattgtaggagctaactc

SEQ ID NO: 517450 - DNA, 60 bp, Artificial
  Synthetic oligonucleotide
ctgatgacaagctgcaaggtagcatcaacctgtcagagctacctgagtctgggttctttg

SEQ ID NO: 517451 - DNA, 60 bp, Artificial
  Synthetic oligonucleotide
ctgatctttgcgacagtcactacctaaagcctgagaaaactattcaggagcggctagaaa

SEQ ID NO: 517452 - DNA, 60 bp, Artificial
  Synthetic oligonucleotide
ctgatcaattctgcgactccaggggtcttgacgaagagagcaccattatgtggggttaac

SEQ ID NO: 517453 - DNA, 60 bp, Artificial
  Synthetic oligonucleotide
gcatgtctgcacttcacagcacctgggagtccggactcaaaatgtctcaaaattaaggtc

SEQ ID NO: 517454 - DNA, 60 bp, Artificial
  Synthetic oligonucleotide
ctgaggtttgagagaagccatgacagccagggtaaaatatctggtagccccctggacatc

SEQ ID NO: 517455 - DNA, 60 bp, Artificial
  Synthetic oligonucleotide
gcattcatgcaatccaatttacgacgaccatggctccttcatgatattagatatcgataa

SEQ ID NO: 517456 - DNA, 60 bp, Artificial
  Synthetic oligonucleotide
ctgacatatttcagtagttaatagtggaatacactactgaaatatgtcaagccaattcat

SEQ ID NO: 517457 - DNA, 60 bp, Artificial
  Synthetic oligonucleotide
gacaatgccatcacacttcacaggatgtcgggatatctagcgcgatgggttgctgacaca

SEQ ID NO: 517458 - DNA, 60 bp, Artificial
  Synthetic oligonucleotide
gacatgtgcacagatgccggagattaaaagcctaaaagtaatctaccatagcccagctat

SEQ ID NO: 517459 - DNA, 60 bp, Artificial
  Synthetic oligonucleotide
gaatgcataaatgggggtgtgaggctaataactctaaccagtgagctcaagtcagctacc

SEQ ID NO: 517460 - DNA, 60 bp, Artificial
  Synthetic oligonucleotide
gaccaaagcatttgtatgtgtccatgcccactgctcagtcaactatgaaagctgaagaat

SEQ ID NO: 517461 - DNA, 60 bp, Artificial
  Synthetic oligonucleotide
gaatagacgtaaccagaggattgtatggcatcaaatgacatcaaatatctgtatttgcca

SEQ ID NO: 517462 - DNA, 60 bp, Artificial
  Synthetic oligonucleotide
gaagttgcggaagaaatcctctttctaccagtcatatcttagaagaacacactctatggg

SEQ ID NO: 517463 - DNA, 60 bp, Artificial
  Synthetic oligonucleotide
gaagtcaacgacattacaagattaaactctggcggcaatacccagtggaagacccttgct

SEQ ID NO: 517464 - DNA, 60 bp, Artificial
  Synthetic oligonucleotide
gaccctggattgaagaagacaccccggaattgtactcgcaccctatttttttggaattct

SEQ ID NO: 517465 - DNA, 60 bp, Artificial
  Synthetic oligonucleotide
gacctaaatcccaagttgtggtatatagcttatcaactgagagaaaagaagcggtatcat

SEQ ID NO: 517466 - DNA, 60 bp, Artificial
  Synthetic oligonucleotide
gaccttgttgaatgctcttgcagtgtgttgactctgtcaatggtcaagaggatgggcaag

SEQ ID NO: 517467 - DNA, 60 bp, Artificial
  Synthetic oligonucleotide
gacgcattgtcagaactaccatttgagtttgaagtcgtaatcattcgcgctgatccttta

SEQ ID NO: 517468 - DNA, 60 bp, Artificial
  Synthetic oligonucleotide
gactcagggactagttctggtcttctaccctcggatagggttctctggataggtgatgtt

SEQ ID NO: 517469 - DNA, 60 bp, Artificial
  Synthetic oligonucleotide
gacttctaagcccctgtgatgctgattggcttgggatgcttgtcgtgaagaaggctaagg

SEQ ID NO: 517470 - DNA, 60 bp, Artificial
  Synthetic oligonucleotide
gagttcgacaacaaatgtaatacttggctttgcagagcatacaatgagggtatatctttc

SEQ ID NO: 517471 - DNA, 60 bp, Artificial
  Synthetic oligonucleotide
gataactcacagtacatacaatatgctccctggtcaaattaatgaccctacatcaatcct

SEQ ID NO: 517472 - DNA, 60 bp, Artificial
  Synthetic oligonucleotide
gataattctcaaccttcaggttcatgacggctggccctactgggagatactcctttagag

SEQ ID NO: 517473 - DNA, 60 bp, Artificial
  Synthetic oligonucleotide
cttttcaccagctcgagcctggacttgagcagctattggatatgtactacaaggatatga

SEQ ID NO: 517474 - DNA, 60 bp, Artificial
  Synthetic oligonucleotide
cttttatggaggcgagaagtttaaagaagtcaatgcgacaatgaatatggcagaagtctg

SEQ ID NO: 517475 - DNA, 60 bp, Artificial
  Synthetic oligonucleotide
ctttgtggtaggataaacgtggagaatgggctgtctcttggagaaccaggcctgtacgac

SEQ ID NO: 517476 - DNA, 60 bp, Artificial
  Synthetic oligonucleotide
gataccaaggaagcaaactgctaatttgagtgtgaccatctatgcagttgcaaagaacct

SEQ ID NO: 517477 - DNA, 60 bp, Artificial
  Synthetic oligonucleotide
ctttgcacagggaataaattgctttcctgttcttaaggaaagtcaatgcagatgtagggt

SEQ ID NO: 517478 - DNA, 60 bp, Artificial
  Synthetic oligonucleotide
ctttaattgagagcttgaatttaagcagccatatagttcaatctgaatgtgtaagcctga

SEQ ID NO: 517479 - DNA, 60 bp, Artificial
  Synthetic oligonucleotide
cttgttcaggtacaatagcaggaaattcaaagaatccttatcaatacaaaacccagcaca

SEQ ID NO: 517480 - DNA, 60 bp, Artificial
  Synthetic oligonucleotide
gatatcctaataactggactgtccccaattctggatgtggccctccttcagatagagtca

SEQ ID NO: 517481 - DNA, 60 bp, Artificial
  Synthetic oligonucleotide
cttgtggcccttgcacagaataacaaggctagattctattctaaagttaaactgttaggc

SEQ ID NO: 517482 - DNA, 60 bp, Artificial
  Synthetic oligonucleotide
gatatgaggaacaccatcatggcatcgaagactattgggacatcagaggagaagttgcgg

SEQ ID NO: 517483 - DNA, 60 bp, Artificial
  Synthetic oligonucleotide
cttggagggggtccatagctacactgtcagtctcagttttgatcatgcagtagtcgatga

SEQ ID NO: 517484 - DNA, 60 bp, Artificial
  Synthetic oligonucleotide
gatctataacatgacgaacggtctccaaaggaactgggtggcaataaagcggaattggct

SEQ ID NO: 517485 - DNA, 60 bp, Artificial
  Synthetic oligonucleotide
gcttatgtacaggttctgcatagccaatgagatctacactaaggctagatctatggatgc

SEQ ID NO: 517486 - DNA, 60 bp, Artificial
  Synthetic oligonucleotide
ggaatgcatcacaactgggagggcgctccttcctgcggtgaacccaggacaagaggcatg

SEQ ID NO: 517487 - DNA, 60 bp, Artificial
  Synthetic oligonucleotide
cggtggggacacgggcccaatcatctgcgcaggacccatccactcaaacaagagtgctga

SEQ ID NO: 517488 - DNA, 60 bp, Artificial
  Synthetic oligonucleotide
ggacatgatattggattctctagaagccatagagaagcgaaggcttagacttgggttacc

SEQ ID NO: 517489 - DNA, 60 bp, Artificial
  Synthetic oligonucleotide
ggaccaaatagcattcagtggagagcttttctgcaagtcaatagcccccatatatgtaat

SEQ ID NO: 517490 - DNA, 60 bp, Artificial
  Synthetic oligonucleotide
cggccaacttttgatggatacgtaggctggggctgtggcagtgggaagtctaggactgag

SEQ ID NO: 517491 - DNA, 60 bp, Artificial
  Synthetic oligonucleotide
ggactacatggtaatctcacagaagaagctaaaattcaccttgagacagttgaatgggcc

SEQ ID NO: 517492 - DNA, 60 bp, Artificial
  Synthetic oligonucleotide
cggaggcagcaacattgattgtcatgccattagcagaggtcaagggttgcacctggaacg

SEQ ID NO: 517493 - DNA, 60 bp, Artificial
  Synthetic oligonucleotide
ggactagactttgaggtggttatcatacgggcagacccaatacgtgaaatggtgcatgtt

SEQ ID NO: 517494 - DNA, 60 bp, Artificial
  Synthetic oligonucleotide
ggagccagcaagacagaagtttacaactccttcagggatcctctccatgctgctgtgaac

SEQ ID NO: 517495 - DNA, 60 bp, Artificial
  Synthetic oligonucleotide
ggagctaataatagaatctttctgtactaatatggagttgattatcttgctaatatttgg

SEQ ID NO: 517496 - DNA, 60 bp, Artificial
  Synthetic oligonucleotide
ggatattggacaacaaaaagacctggctgcattaaggttatgtatagaagtttggcgttg

SEQ ID NO: 517497 - DNA, 60 bp, Artificial
  Synthetic oligonucleotide
cgcatggggttgtgaagaatggggatgtctggcagttgggactggctgtgtatatggatc

SEQ ID NO: 517498 - DNA, 60 bp, Artificial
  Synthetic oligonucleotide
ggatcatgcaggggggacatgcagttctgcaaggtagcaggttgtgaacatggagaagag

SEQ ID NO: 517499 - DNA, 60 bp, Artificial
  Synthetic oligonucleotide
cgcaagcaacaattacaatagatgaagtcagatgtggtggatgttatggttgcccagaag

SEQ ID NO: 517500 - DNA, 60 bp, Artificial
  Synthetic oligonucleotide
ggcaagtgatccatgaggagataggggagaatagagagggtaaccaagatgatgttagga

SEQ ID NO: 517501 - DNA, 60 bp, Artificial
  Synthetic oligonucleotide
ggctacaagggaaaaggtgtatggactggagtgatggaagacacccatgtccaaattctg

SEQ ID NO: 517502 - DNA, 60 bp, Artificial
  Synthetic oligonucleotide
cgatcgggaaagtgttgcacagtcaatccaagggaaaattgatgagttgcggagacagct

SEQ ID NO: 517503 - DNA, 60 bp, Artificial
  Synthetic oligonucleotide
ggctcaagaattccatcatagagaaccatgggctgaagtcagcccgtagtcttggccctg

SEQ ID NO: 517504 - DNA, 60 bp, Artificial
  Synthetic oligonucleotide
cgaggacaaagctggcttagatgggcatatttctggtctaatgaccctctgggggcagtg

SEQ ID NO: 517505 - DNA, 60 bp, Artificial
  Synthetic oligonucleotide
ggcttattaacccagcaaatacattggacctatctggtttgcagccaactgaggacggat

SEQ ID NO: 517506 - DNA, 60 bp, Artificial
  Synthetic oligonucleotide
cgaattttacccgcttgttattgatatgcacagagttttgaaggatgggatggatgtcaa

SEQ ID NO: 517507 - DNA, 60 bp, Artificial
  Synthetic oligonucleotide
ggcttgataaactctgaattacctactatagcgatagcaggtttagaatcagacaatttg

SEQ ID NO: 517508 - DNA, 60 bp, Artificial
  Synthetic oligonucleotide
gggaattagattggacaaagaacgatgtcagagattagtgacatcacctggcttgtttct

SEQ ID NO: 517509 - DNA, 60 bp, Artificial
  Synthetic oligonucleotide
gggcagaacgtattagagaatttatggagaaagaatgccccttcatcaaaccagaaatga

SEQ ID NO: 517510 - DNA, 60 bp, Artificial
  Synthetic oligonucleotide
ccttatatatgttgtcaacccgtgggagacaaactgtaaaggagaacaaagggactcgca

SEQ ID NO: 517511 - DNA, 60 bp, Artificial
  Synthetic oligonucleotide
ccttagttataggacagtgtatctacacatttactagtatattctctttaattccagggg

SEQ ID NO: 517512 - DNA, 60 bp, Artificial
  Synthetic oligonucleotide
gggcatagagctacgagtagatgacgctgtgtgctactctaagatcactagtgtggaagc

SEQ ID NO: 517513 - DNA, 60 bp, Artificial; identical to SEQ ID NO: 30127
  Synthetic oligonucleotide

SEQ ID NO: 517514 - DNA, 60 bp, Artificial
  Synthetic oligonucleotide
gccaattcatttttgaagatgtaccacaacggaatgcagctacatttaacccggaggttg

SEQ ID NO: 517515 - DNA, 60 bp, Artificial
  Synthetic oligonucleotide
ctctgatatagcccatgctgagctgagccttggagggaaatgcaatttccacctattcag

SEQ ID NO: 517516 - DNA, 60 bp, Artificial
  Synthetic oligonucleotide
ctcgttgagtgctcttgtagtgtgttgactctgtcaatggtcaagaggatgggtaagatg

SEQ ID NO: 517517 - DNA, 60 bp, Artificial
  Synthetic oligonucleotide
ctcggtccaggtgtacatcagtgaggagatgtcgttgggcaggagactgccagtctgggt

SEQ ID NO: 517518 - DNA, 60 bp, Artificial
  Synthetic oligonucleotide
ctcctgctgccagaactttcttgcagcaatttggtatcaacatctaaacctctccattac

SEQ ID NO: 517519 - DNA, 60 bp, Artificial
  Synthetic oligonucleotide
gcccagctatggtcttgagagcatatgtaactggtgatatgaacattcggggggcagaac

SEQ ID NO: 517520 - DNA, 60 bp, Artificial
  Synthetic oligonucleotide
gcccatgaaatgtgaaactgagctgtcccctttccttttcaccactgtctttttcaactt

SEQ ID NO: 517521 - DNA, 60 bp, Artificial
  Synthetic oligonucleotide
ctcattgcgtaagcctctgttagactgttgggacttctttatccctatccgcaaaaagaa

SEQ ID NO: 517522 - DNA, 60 bp, Artificial
  Synthetic oligonucleotide
gcccgattgatctatcaatcaaaggttatggacggtcaataaggatcataggtgaagaca

SEQ ID NO: 517523 - DNA, 60 bp, Artificial
  Synthetic oligonucleotide
gccctcctacggacaactctaatggcatgaatcaagagaccaagtcaatcaaaattgcac

SEQ ID NO: 517524 - DNA, 60 bp, Artificial
  Synthetic oligonucleotide
ctatttgatacagtcgtatacataagattagcacaggttaaagcaagttatgcaaaggaa

SEQ ID NO: 517525 - DNA, 60 bp, Artificial
  Synthetic oligonucleotide
gcctccatcagggtcttggtcgtggcttcagatacccctgtagttggaatcagggacccg

SEQ ID NO: 517526 - DNA, 60 bp, Artificial
  Synthetic oligonucleotide
ctatatgcggcattaaagcagagattagatcagagatagtgaaaagccataagatactgg

SEQ ID NO: 517527 - DNA, 60 bp, Artificial
  Synthetic oligonucleotide
gctacaggggaacctaaataagtgttcatctctctttggtgtgggaatgtcattactttt

SEQ ID NO: 517528 - DNA, 60 bp, Artificial
  Synthetic oligonucleotide
gctagatgatcctacgccagaattatatgatcacccgatattcttagaattctataattc

SEQ ID NO: 517529 - DNA, 60 bp, Artificial
  Synthetic oligonucleotide
ctagtaacattaatgcagatagactataaacaggaaccatgggtttcgattatggcacat

SEQ ID NO: 517530 - DNA, 60 bp, Artificial
  Synthetic oligonucleotide
ctagccaaaagcttgatctaacaagtgccgatcaatcgtcatatataaaggagttcgaca

SEQ ID NO: 517531 - DNA, 60 bp, Artificial
  Synthetic oligonucleotide
ctagcaattggggttgtgaagagtggggttgcttagcaattggggcaggctgcctatatg

SEQ ID NO: 517532 - DNA, 60 bp, Artificial
  Synthetic oligonucleotide
actattggacatgtactacaaggatatgaggtgctactcccagagagagctgagtgctct

SEQ ID NO: 517533 - DNA, 60 bp, Artificial
  Synthetic oligonucleotide
gctcagtaagacggcacaaccaagtgttgatcttacatttggtggcatcaaatttacatt

SEQ ID NO: 517534 - DNA, 60 bp, Artificial
  Synthetic oligonucleotide
gctctgacgactcagcgatcatgattagcatacgccctaagtcagacatggatgaagttc

SEQ ID NO: 517535 - DNA, 60 bp, Artificial
  Synthetic oligonucleotide
ctacaggtatatctccttaggaagcatctggactgcatggtgcgaattgcatctcagcca

SEQ ID NO: 517536 - DNA, 60 bp, Artificial
  Synthetic oligonucleotide
gctctttacatgttaacaactaggggaagacagactactaaggacaacaaagggatgaga

SEQ ID NO: 517537 - DNA, 60 bp, Artificial
  Synthetic oligonucleotide
ctaagccccaaaagatgctagggaaactggatgggcctttgagaactaagctacaggtat

SEQ ID NO: 517538 - DNA, 60 bp, Artificial
  Synthetic oligonucleotide
gctgaggagtacatttcttatggtggtgaacggaaaattctatgtattcagtcagcactg

SEQ ID NO: 517539 - DNA, 60 bp, Artificial
  Synthetic oligonucleotide
cgttgggaagggtgggcattctggctcaaaatttatgtgctgtcatgacactaagtgctc

SEQ ID NO: 517540 - DNA, 60 bp, Artificial
  Synthetic oligonucleotide
tggggtttatgtcataggtttcacgctccctatcatcttgaaggccttgtatatgttatc

SEQ ID NO: 517541 - DNA, 60 bp, Artificial
  Synthetic oligonucleotide
agaattaacccctggtaggttcagaactatagtatgtggcctatttccgactcaaatcca

SEQ ID NO: 517542 - DNA, 60 bp, Artificial
  Synthetic oligonucleotide
tgtgcagaaagtgcaagatcagatatatggttctggggagccacgatttgattatatatg

SEQ ID NO: 517543 - DNA, 60 bp, Artificial
  Synthetic oligonucleotide
agaaagcttatacacctattgatttttgctcattggtaacaggcaatctaatatcagata

SEQ ID NO: 517544 - DNA, 60 bp, Artificial
  Synthetic oligonucleotide
tgtggggttaactttaaaacacggttgacatgcagttgatgtatccgtgggcgactaggg

SEQ ID NO: 517545 - DNA, 60 bp, Artificial
  Synthetic oligonucleotide
tgtgtatgatcttaaaggacaaaagggtttattgcaaatccaagctaataggcgagcata

SEQ ID NO: 517546 - DNA, 60 bp, Artificial; identical to SEQ ID NO: 317855
  Synthetic oligonucleotide

SEQ ID NO: 517547 - DNA, 60 bp, Artificial
  Synthetic oligonucleotide
actgtgtatcttatgggacctatccaaacttgtataacaactaagagttgtcttttgggc

SEQ ID NO: 517548 - DNA, 60 bp, Artificial
  Synthetic oligonucleotide
actggtatacgattggggtctatgtcatagggtttacacttcctatcatcttgaaggcct

SEQ ID NO: 517549 - DNA, 60 bp, Artificial
  Synthetic oligonucleotide
tgtgtccatgcccactgctcagtcaactatgaaagctgaggaattaacccctggtaggtt

SEQ ID NO: 517550 - DNA, 60 bp, Artificial
  Synthetic oligonucleotide
actgagcaaatgcttcaacgttgacctcaaatctgttgcaatgaatgccaacacagtcag

SEQ ID NO: 517551 - DNA, 60 bp, Artificial
  Synthetic oligonucleotide
actacacaagtatacacgaccggctatttggcctacaagatgacccaagtattgaagata

SEQ ID NO: 517552 - DNA, 60 bp, Artificial
  Synthetic oligonucleotide
tgtgtgctactctaagattactagtgtggaggcagttgcaaactactctgccatacccac

SEQ ID NO: 517553 - DNA, 60 bp, Artificial
  Synthetic oligonucleotide
actaactgcagcagaacttcaaataagtagaatacgtgatgatataatatctagacatag

SEQ ID NO: 517554 - DNA, 60 bp, Artificial
  Synthetic oligonucleotide
tgttccgccagttgacccagagattcaatgtgctgcattgatgatagcagatgtaagagg

SEQ ID NO: 517555 - DNA, 60 bp, Artificial
  Synthetic oligonucleotide
acctaaggtttttggctcacctcagtactaaatctgagtctaggtcatctgatccgttca

SEQ ID NO: 517556 - DNA, 60 bp, Artificial
  Synthetic oligonucleotide
acccaggacaagaggcatgtctgcacttcacagcacctgggagtccggactcaaaatgtc

SEQ ID NO: 517557 - DNA, 60 bp, Artificial
  Synthetic oligonucleotide
accatattttagtcaaaccaggaatataagtcttaaggggatgtcaggagcattgcaaga

SEQ ID NO: 517558 - DNA, 60 bp, Artificial
  Synthetic oligonucleotide
accactcacaatttcagggttacgtagggcagcgaggtggacgctctcaggttagctact

SEQ ID NO: 517559 - DNA, 60 bp, Artificial
  Synthetic oligonucleotide
ttaaaggagtatctcccagtggggccagccgtcatgaacctgaaggtcgagaattatccc

SEQ ID NO: 517560 - DNA, 60 bp, Artificial
  Synthetic oligonucleotide
ttacatgcaacatttagaagtgaagggaaatatgtgagtgtctcaaaagggatcagattg

SEQ ID NO: 517561 - DNA, 60 bp, Artificial
  Synthetic oligonucleotide
ttactaaggtgtatataaggtactattacatattctgctcatactgcggcatgattcact

SEQ ID NO: 517562 - DNA, 60 bp, Artificial
  Synthetic oligonucleotide
acatcaggtaccaagcagttgatgctgtgagtaatgtatggtttgtccataaagggataa

SEQ ID NO: 517563 - DNA, 60 bp, Artificial
  Synthetic oligonucleotide
acataagacggcacaaccaagtgtcgatcttacttttggtggggtcaaattcacagtggt

SEQ ID NO: 517564 - DNA, 60 bp, Artificial
  Synthetic oligonucleotide
acagctgttagacatgtactacaaggacatgaggtgctactcccagagagaactgagtgc

SEQ ID NO: 517565 - DNA, 60 bp, Artificial
  Synthetic oligonucleotide
acagctgtccagaaggaatggcttgttcacttaagataactaccaatacaattgggagct

SEQ ID NO: 517566 - DNA, 60 bp, Artificial
  Synthetic oligonucleotide
ttagatgggcatatttctggtctaatgaccctctgggggcagtgctctcaggggagttgg

SEQ ID NO: 517567 - DNA, 60 bp, Artificial
  Synthetic oligonucleotide
acactttgatgctacacaaggtgataagtggaatcaaaatttagttaagacaatgaatct

SEQ ID NO: 517568 - DNA, 60 bp, Artificial
  Synthetic oligonucleotide
agtcgacacatggcacaactagccaaactaaggttgtccacaatgatattgaatcatttg

SEQ ID NO: 517569 - DNA, 60 bp, Artificial
  Synthetic oligonucleotide
agtatctctaagggaatacgattggataaagaaagatgtcagcgtatagttagttcacca

SEQ ID NO: 517570 - DNA, 60 bp, Artificial
  Synthetic oligonucleotide
agtaggcctccatcagggtcttggttgtggcttcagatacccccgcagttggaatcaggg

SEQ ID NO: 517571 - DNA, 60 bp, Artificial
  Synthetic oligonucleotide
tggaaagttcttgtaattttgatttgcatactagtacagcaggacaacaagcatttacaa

SEQ ID NO: 517572 - DNA, 60 bp, Artificial
  Synthetic oligonucleotide
agggatccgcaaggctgacgtgacgaggaggctaactggcagagtcttctctgacaccat

SEQ ID NO: 517573 - DNA, 60 bp, Artificial
  Synthetic oligonucleotide
agggactgatttcaaggctagatactgtacacccgacaattatataattcacaacaggaa

SEQ ID NO: 517574 - DNA, 60 bp, Artificial
  Synthetic oligonucleotide
tggaacaattggcaaacttcacgagagtttactaccggcccgattgacttgtcaataaaa

SEQ ID NO: 517575 - DNA, 60 bp, Artificial
  Synthetic oligonucleotide
agggaatcactctgtttgtgagaaaaagaccttaccccttacatggactgggtttatctc

SEQ ID NO: 517576 - DNA, 60 bp, Artificial
  Synthetic oligonucleotide
tggaatcagggacccgaaggccatgcacatcatctcagggggataattctcgaccttcag

SEQ ID NO: 517577 - DNA, 60 bp, Artificial
  Synthetic oligonucleotide
aggcgaattcacaatgacttcaccatggatagaagaaaatacgccagaattgtacactca

SEQ ID NO: 517578 - DNA, 60 bp, Artificial
  Synthetic oligonucleotide
aggaagacccaaggcattgacaatagagctatggggaacatcttcagggactgtctcgag

SEQ ID NO: 517579 - DNA, 60 bp, Artificial
  Synthetic oligonucleotide
agctggtacattgggtactacaagaacaaagaggagtcaacagagctgaatgccctcgga

SEQ ID NO: 517580 - DNA, 60 bp, Artificial
  Synthetic oligonucleotide
agctgggctagaagctggtaacttgacatacctagtgaatctgtcaaggagaatgtctaa

SEQ ID NO: 517581 - DNA, 60 bp, Artificial
  Synthetic oligonucleotide
agcctctgttagactgttgggacttctttatccctatccgcaaaaagaagacagatggct

SEQ ID NO: 517582 - DNA, 60 bp, Artificial
  Synthetic oligonucleotide
tggagaagaggcatctgaagccaagtgtagatgctcacttgtacacaagcccggagaagt

SEQ ID NO: 517583 - DNA, 60 bp, Artificial
  Synthetic oligonucleotide
agccctagggttcttcctcatggacaaccctgcattcgcggggggagcaggatttagatt

SEQ ID NO: 517584 - DNA, 60 bp, Artificial
  Synthetic oligonucleotide
agcccctaatataacaattcaatggatagaccaacaataaatgcatttagggatcgcatt

SEQ ID NO: 517585 - DNA, 60 bp, Artificial
  Synthetic oligonucleotide
agcaggatcaaggccttcataggccagctctctcgcgaaatcctcaagctcagtcaaatt

SEQ ID NO: 517586 - DNA, 60 bp, Artificial
  Synthetic oligonucleotide
tggaggcatcaaatttacattggttaataaccattttccccaatacacagcaaatcctgt

SEQ ID NO: 517587 - DNA, 60 bp, Artificial
  Synthetic oligonucleotide
tggcaaacatcacgagaatttcagaccggaccaatagatctatcaattaaaggctatgga

SEQ ID NO: 517588 - DNA, 60 bp, Artificial
  Synthetic oligonucleotide
agatggatactaagcctactgatccgactgggattgaaccagatgaccatcttaaagaac

SEQ ID NO: 517589 - DNA, 60 bp, Artificial
  Synthetic oligonucleotide
agagctcactcatgccctcaacgattcattcaagaggaacctaagcagtaatgtggttca

SEQ ID NO: 517590 - DNA, 60 bp, Artificial
  Synthetic oligonucleotide
agagagcatactagtgcatggggttgcgaatcatggggctgcctagctattggaacgggg

SEQ ID NO: 517591 - DNA, 60 bp, Artificial
  Synthetic oligonucleotide
tggggctgtaatccacctgattgcccaggagtagggacagggtgtactgcctgtggggcc

SEQ ID NO: 517592 - DNA, 60 bp, Artificial
  Synthetic oligonucleotide
agacaatttgagctacttagtcagattatctaagaggatgtctcctatacatctttgtcg

SEQ ID NO: 517593 - DNA, 60 bp, Artificial
  Synthetic oligonucleotide
aaggacatgaggtgctactcccagagagagctgagtgctcttaggtggcctagtgggaag

SEQ ID NO: 517594 - DNA, 60 bp, Artificial
  Synthetic oligonucleotide
ttgtggtatgaggtttaagacagagcaggtcaattcttcacgtagtgtggttttgtttaa

SEQ ID NO: 517595 - DNA, 60 bp, Artificial
  Synthetic oligonucleotide
aagcttgccgaataacttagaaaagttgggttgctacctcgaagaatatggccagaagat

SEQ ID NO: 517596 - DNA, 60 bp, Artificial
  Synthetic oligonucleotide
ttgtttagccttatatcaaaatcagactcaaaatgtagaatatagccagttaatgagtca

SEQ ID NO: 517597 - DNA, 60 bp, Artificial
  Synthetic oligonucleotide
aagccttcgcttctctatggcttcaagagaatccaatatcatgtccccttcaaaaagata

SEQ ID NO: 517598 - DNA, 60 bp, Artificial
  Synthetic oligonucleotide
tttagatcaaaaagatccaggccagacccctatattggtgtgcaaatcacctcagaaagt

SEQ ID NO: 517599 - DNA, 60 bp, Artificial
  Synthetic oligonucleotide
tttctaactgtccaactacatgtatctgtgggatgtcttacaattccacagaagctctga

SEQ ID NO: 517600 - DNA, 60 bp, Artificial
  Synthetic oligonucleotide
aagatgatgttaggattgagatggcaagacccagaagggtaaggcattggatgtactcac

SEQ ID NO: 517601 - DNA, 60 bp, Artificial
  Synthetic oligonucleotide
aagatataattgtgcggaagtgctttgacaatgcatatgaatcgtgtaaatatcttgatt

SEQ ID NO: 517602 - DNA, 60 bp, Artificial
  Synthetic oligonucleotide
tttgatgatgtatcatgccgagttgatgtcacgtctaataacattgcctcatgctcagta

SEQ ID NO: 517603 - DNA, 60 bp, Artificial
  Synthetic oligonucleotide
tttggacagtgctattcatccagactcgttgtccactgatttacagcttatgagagaggg

SEQ ID NO: 517604 - DNA, 60 bp, Artificial
  Synthetic oligonucleotide
tttgggccccaggcattatcatggaagggaaccactctatctgtgagaaaaagaccttac

SEQ ID NO: 517605 - DNA, 60 bp, Artificial
  Synthetic oligonucleotide
aagaacagctgggcaatggaaactgggagagagaactggcggggcctcttccacaggata

SEQ ID NO: 517606 - DNA, 60 bp, Artificial
  Synthetic oligonucleotide
aaccttgagaatatggtgaacagctggtacattgggtactacaagaacaaagaggagtca

SEQ ID NO: 517607 - DNA, 60 bp, Artificial
  Synthetic oligonucleotide
ttttaaaagatggcatggatgtaaactttatgcggaaagctcttcgccagaggtatgggc

SEQ ID NO: 517608 - DNA, 60 bp, Artificial
  Synthetic oligonucleotide
aacaagaacacattacaagcaaggcaacaaacagtgtcagcactggaagacaaactcgcg

SEQ ID NO: 517609 - DNA, 60 bp, Artificial
  Synthetic oligonucleotide
aaattgcatagcagcaaaaatagcactgcccatgttagatgcaaaggggatgagactgca

SEQ ID NO: 517610 - DNA, 60 bp, Artificial
  Synthetic oligonucleotide
ttttagctcacctcagttctaaatctgagtctaggtcatctgacccgtttagggaagcaa

SEQ ID NO: 517611 - DNA, 60 bp, Artificial
  Synthetic oligonucleotide
aaataatatggagaggaaaagctgaccagtcacagtccagccagaactcgtttgagacag

SEQ ID NO: 517612 - DNA, 60 bp, Artificial
  Synthetic oligonucleotide
aaagagtaagcctccatcagggtcttggtcgtggcttcagatacccctgtagttggaatc

SEQ ID NO: 517613 - DNA, 60 bp, Artificial
  Synthetic oligonucleotide
aaacaagagtgctgacatacctcacctgctgggttactctgagaagatatgtcagataga

SEQ ID NO: 517614 - DNA, 60 bp, Artificial
  Synthetic oligonucleotide
ttttcaacttctacctcagtgtacttatatatatgcaagtagcatatatataggtacaca

SEQ ID NO: 517615 - DNA, 60 bp, Artificial
  Synthetic oligonucleotide
aaaagctcaaggatgcagaaaaggcggtggaaatggacccagatgacgttaacaagaaca

SEQ ID NO: 517616 - DNA, 60 bp, Artificial; identical to SEQ ID NO: 35430
  Synthetic oligonucleotide

SEQ ID NO: 517617 - DNA, 60 bp, Artificial
  Synthetic oligonucleotide
aaaactggcagagaaggtacattcacctggtgtgactagcagcctgagtaagggacatgt

SEQ ID NO: 517618 - DNA, 60 bp, Artificial
  Synthetic oligonucleotide
tttttgttggcttagtctggtgtgtgctattagtcttagaattgattgtatgggctgcta

SEQ ID NO: 517619 - DNA, 60 bp, Artificial
  Synthetic oligonucleotide
ttatccgttatgtaatctcagggtggtttaggacgtcaccttaagtgactattttttgta

SEQ ID NO: 517620 - DNA, 60 bp, Artificial
  Synthetic oligonucleotide
acacaaagaccctcttcgtttggaaaccatgtcgctgagcaaatgctccaacgttgacct

SEQ ID NO: 517621 - DNA, 60 bp, Artificial
  Synthetic oligonucleotide
acaataatcctacaatcgatttgagtgaggtctgcaattttgcattccatacatctttat

SEQ ID NO: 517622 - DNA, 60 bp, Artificial
  Synthetic oligonucleotide
acaacggaatgcagctacatttaacccggacacggggtatgtggcgtttatcagtaagta

SEQ ID NO: 517623 - DNA, 60 bp, Artificial
  Synthetic oligonucleotide
ttatgttgcaggaatggcagagctaggtgctttcttctctatactacaggatatgagaaa

SEQ ID NO: 517624 - DNA, 60 bp, Artificial
  Synthetic oligonucleotide
aattggggatagtccagttattaggatctcaggtaacccaagtctaagcctccgcttctc

SEQ ID NO: 517625 - DNA, 60 bp, Artificial
  Synthetic oligonucleotide
aattcctagatatagaatttaggaatgacacacctgctcaggacattctcctcgatttct

SEQ ID NO: 517626 - DNA, 60 bp, Artificial
  Synthetic oligonucleotide
aattattgcggattgattcatctaaaacaaggcttaattttggaacagggttttactaat

SEQ ID NO: 517627 - DNA, 60 bp, Artificial
  Synthetic oligonucleotide
aatgtgaaactgagctgtcccctttctttttcaccactgtctttcttaccttctacctca

SEQ ID NO: 517628 - DNA, 60 bp, Artificial
  Synthetic oligonucleotide
aatgtcacacctatgacacctgaaataatgctcagttgctcagcatatttggttaaagca

SEQ ID NO: 517629 - DNA, 60 bp, Artificial
  Synthetic oligonucleotide
ttattattgtaaccagcattaattaggtatagttaggtatgttatagtaagtgtcatagt

SEQ ID NO: 517630 - DNA, 60 bp, Artificial
  Synthetic oligonucleotide
ttcctggatgtcccaaaatttgtggatggcagctacatgcagacatatcatagcactgtg

SEQ ID NO: 517631 - DNA, 60 bp, Artificial
  Synthetic oligonucleotide
ttgaccattgacagagtcaacacactgcaagagcattcaacgaggtccctcctaagagtg

SEQ ID NO: 517632 - DNA, 60 bp, Artificial
  Synthetic oligonucleotide
aatcagcagatgaatcaaatggtatgctagtagcaaaaagcgatatcagactaaaaaaga

SEQ ID NO: 517633 - DNA, 60 bp, Artificial
  Synthetic oligonucleotide
aatcaagatcagtcaggctcctaggtgcccccgtgaagaaatcaggtggggtcaccacta

SEQ ID NO: 517634 - DNA, 60 bp, Artificial
  Synthetic oligonucleotide
aatagcactgcccatgtaagatgcaaaggggatgagactgcattcagtgtcttggagggg

SEQ ID NO: 517635 - DNA, 60 bp, Artificial
  Synthetic oligonucleotide
aataatgactggaccagtactctgtctcgcagatagacattgcttgcaagacttcgtacc

SEQ ID NO: 517636 - DNA, 60 bp, Artificial
  Synthetic oligonucleotide
ttgcacctggaacgatgggtacacaatgtacctaggatttgccccaggtgcagaaatgtt

SEQ ID NO: 517637 - DNA, 60 bp, Artificial
  Synthetic oligonucleotide
aagtctccgtcaaattgcatagcagcaaaaatagtactgcccacgtaagatgcaaagggg

SEQ ID NO: 517638 - DNA, 60 bp, Artificial
  Synthetic oligonucleotide
aagtctcaagtgatggcaagtaacataatgaataaacattgggacaaaccatattttagt

SEQ ID NO: 517639 - DNA, 60 bp, Artificial
  Synthetic oligonucleotide
aagtatctccttgtgccgcatgggtcccatcggcagtcatagagctaacaatgccctcag

SEQ ID NO: 517640 - DNA, 60 bp, Artificial
  Synthetic oligonucleotide
ttgcagtgtgttgactctgtcaatggtcaagaggatgggcaagatgaccaacacagtatg

SEQ ID NO: 517641 - DNA, 60 bp, Artificial
  Synthetic oligonucleotide
aagggtgtgagtgtgacttacttgggctcagatatggaggtgtctggcttgactggccta

SEQ ID NO: 517642 - DNA, 60 bp, Artificial
  Synthetic oligonucleotide
aagggaatgtagagggtacagcagaatcaatttgtagttattggttgaagactatgtctc

SEQ ID NO: 517643 - DNA, 60 bp, Artificial
  Synthetic oligonucleotide
ttgcatgacaggcgccacagtctctatcaaactacatagcagcaaaaatagcactgccca

SEQ ID NO: 517644 - DNA, 60 bp, Artificial
  Synthetic oligonucleotide
ttggggaagaagacagagttcacagcagcatggagaggatccctgaaggagttgtaaact

SEQ ID NO: 517645 - DNA, 60 bp, Artificial
  Synthetic oligonucleotide
ttggtgatgctcttgcaccatttggtctagattttgaagtggttatcatacgagcagacc

SEQ ID NO: 517646 - DNA, 60 bp, Artificial
  Synthetic oligonucleotide
caatggtaaggcatgccacttatgatgatgttagatcagctatacctgattttgtcgata

SEQ ID NO: 517647 - DNA, 60 bp, Artificial
  Synthetic oligonucleotide
caatgctgggctgatcacaatccagctctctgaagcatacaagatcaatcatgacttcac

SEQ ID NO: 517648 - DNA, 60 bp, Artificial
  Synthetic oligonucleotide
caatgcagtggggactcgggcccaatcatctgtgcaggacccatccactcaaacaagagt

SEQ ID NO: 517649 - DNA, 60 bp, Artificial
  Synthetic oligonucleotide
caatccacgtcaaaggggcattggtagatggaactgaattcacttttgagggtagttgca

SEQ ID NO: 517650 - DNA, 60 bp, Artificial
  Synthetic oligonucleotide
caatcatctgcgcaggacccatccactcaaataagagtgctgacataccccacctgctgg

SEQ ID NO: 517651 - DNA, 60 bp, Artificial
  Synthetic oligonucleotide
caagtactgggaagtcccttactttagtcaaactaggaacataagtttaaaagggatgtc

SEQ ID NO: 517652 - DNA, 60 bp, Artificial
  Synthetic oligonucleotide
tcatttgcatggctgagcacagacccatctgaaacattgagggatggtccttttcttagc

SEQ ID NO: 517653 - DNA, 60 bp, Artificial
  Synthetic oligonucleotide
caagctgctatctgagccatcaccgacatctttgaccaaaggcccatcaaccaaccgtga

SEQ ID NO: 517654 - DNA, 60 bp, Artificial
  Synthetic oligonucleotide
tccaaatgttattgaaggcactgttgacaggaatttggttgcatcggtaccaggcataaa

SEQ ID NO: 517655 - DNA, 60 bp, Artificial
  Synthetic oligonucleotide
caagaggatataacccgccatgaacaacaacttgttgttgccagacaaaagctcaaggat

SEQ ID NO: 517656 - DNA, 60 bp, Artificial
  Synthetic oligonucleotide
caaccgcatgagaaatgatataatatcaagacatggacaatcactgttgaacaagccaca

SEQ ID NO: 517657 - DNA, 60 bp, Artificial
  Synthetic oligonucleotide
tccagtgatcgttccaaaattgagtcaagcgtgtcatactataggttattctttgttaaa

SEQ ID NO: 517658 - DNA, 60 bp, Artificial
  Synthetic oligonucleotide
caacaattttactaaatcaaattgttagttcagaaaaatatgaactattccctcatatca

SEQ ID NO: 517659 - DNA, 60 bp, Artificial
  Synthetic oligonucleotide
tcgcaagtgaaccagaagcatgttatagatacctactgggtcaaaactaaatttagtggt

SEQ ID NO: 517660 - DNA, 60 bp, Artificial
  Synthetic oligonucleotide
caaattatatcgatgttatgtcaactaaagtatttgatagactgtatgaacttatcagtt

SEQ ID NO: 517661 - DNA, 60 bp, Artificial
  Synthetic oligonucleotide
caaatcctgtgccagacactgccctcactctccaccgcctctcaggctatctagctaaat

SEQ ID NO: 517662 - DNA, 60 bp, Artificial
  Synthetic oligonucleotide
tcgcatcgccgagtccactgatccagagactgccaaggacattatagcagacttaatgat

SEQ ID NO: 517663 - DNA, 60 bp, Artificial
  Synthetic oligonucleotide
tcggtttttctttctttgtaaaggactgggcagaacgtattagggaatttatggagaaag

SEQ ID NO: 517664 - DNA, 60 bp, Artificial
  Synthetic oligonucleotide
tctaagatcactagtgtggaggcagttgcaaactactccgccatacccaccactattggg

SEQ ID NO: 517665 - DNA, 60 bp, Artificial
  Synthetic oligonucleotide
tctaatgaatgatcctatattagtagcatgtgctaacaatattttgctatctatgcatgg

SEQ ID NO: 517666 - DNA, 60 bp, Artificial
  Synthetic oligonucleotide
caaactcgcagattacaagcgaagaatggcagatgctgtgtcccggaaaaagatggatac

SEQ ID NO: 517667 - DNA, 60 bp, Artificial
  Synthetic oligonucleotide
caaaatcctattacggctgtaataggttacaagtatgctagcaaagtagatgaaatcagc

SEQ ID NO: 517668 - DNA, 60 bp, Artificial
  Synthetic oligonucleotide
tctcaaggcgtgttgatatcatggagaacccaagggtcttctttggcgtaattgtagtct

SEQ ID NO: 517669 - DNA, 60 bp, Artificial
  Synthetic oligonucleotide
caaaaagataccttcggccttttgttatcctgtggaagaggccccgccagttctctctcc

SEQ ID NO: 517670 - DNA, 60 bp, Artificial
  Synthetic oligonucleotide
atttcatgaaaaaagtccttcgccagcgctacggaacaatgactgcagaagaatggatga

SEQ ID NO: 517671 - DNA, 60 bp, Artificial
  Synthetic oligonucleotide
atttatgtacccagaaactttaaaagcgctactgaaacctgcaggtgaaacaaccattga

SEQ ID NO: 517672 - DNA, 60 bp, Artificial
  Synthetic oligonucleotide
atttaccttatccggaagataaatgacccaagtatagtgactgccatgaccatgcagtca

SEQ ID NO: 517673 - DNA, 60 bp, Artificial
  Synthetic oligonucleotide
tatctatggagaaccgttctcagtatacggtcgatttttgcttactgcagtaggtgactg

SEQ ID NO: 517674 - DNA, 60 bp, Artificial
  Synthetic oligonucleotide
tatgacagggtatgcacattgcttgaggaagttgagcacctaacaggaaaatttgttgtt

SEQ ID NO: 517675 - DNA, 60 bp, Artificial
  Synthetic oligonucleotide
cacttcaattgaggtttcgaatgcaggcgaagcaacatatgaaagtatgtaagttagatg

SEQ ID NO: 517676 - DNA, 60 bp, Artificial
  Synthetic oligonucleotide
cactgtgagcctacagaagctgcatttcaggcccattacaaagtctgtcaagttactcat

SEQ ID NO: 517677 - DNA, 60 bp, Artificial
  Synthetic oligonucleotide
tatgagaaggaccctgatgaccttaacaaaagagcattgagtgaccgagaaagcgttgca

SEQ ID NO: 517678 - DNA, 60 bp, Artificial
  Synthetic oligonucleotide
cactgctcagtcaactatgaaagctgaggaattaacccctggtaggttcaggactatagt

SEQ ID NO: 517679 - DNA, 60 bp, Artificial
  Synthetic oligonucleotide
tatgagccatctgtcttctttttgcggataggaataaagaagtcccaacagtctaacaga

SEQ ID NO: 517680 - DNA, 60 bp, Artificial
  Synthetic oligonucleotide
tatgcagggttgttatcgtaccttatccctcttcaggtatcggagtcggttttttgttgg

SEQ ID NO: 517681 - DNA, 60 bp, Artificial
  Synthetic oligonucleotide
cactattggggggctgaggtttgagagaagccatgacagccagggtaaaatatctggtag

SEQ ID NO: 517682 - DNA, 60 bp, Artificial
  Synthetic oligonucleotide
tatttgtgggagagtttgaagccaagatgtgcctatacctagttgagcgtatttcaaagg

SEQ ID NO: 517683 - DNA, 60 bp, Artificial
  Synthetic oligonucleotide
tatttgttgcaggcatggcagagctaggtgcattttttgctgtccttcaagatatgagga

SEQ ID NO: 517684 - DNA, 60 bp, Artificial
  Synthetic oligonucleotide
tcaaagtggagcgctcaggatgtcttgtacaaatacttctggttatttgctttagatcca

SEQ ID NO: 517685 - DNA, 60 bp, Artificial
  Synthetic oligonucleotide
tcaacatgtcagtttggggatcctggagatatcatgagtccaagagataaaggattttta

SEQ ID NO: 517686 - DNA, 60 bp, Artificial
  Synthetic oligonucleotide
cacattaaaagatcaatgctggtttactatacactatttaaagcagattacagtaccagc

SEQ ID NO: 517687 - DNA, 60 bp, Artificial
  Synthetic oligonucleotide
tcaaggttacccatatctgatggcacactatttaaacaggtgcccatttcacaacctcat

SEQ ID NO: 517688 - DNA, 60 bp, Artificial
  Synthetic oligonucleotide
tcaagtgactctaaaaggcaaccttatcttcctggatgtcccaaaatttgtggatggcag

SEQ ID NO: 517689 - DNA, 60 bp, Artificial
  Synthetic oligonucleotide
cacagagttttgaaggatgggatggatgtcaacttcatgcggaaagtactccgccagcgt

SEQ ID NO: 517690 - DNA, 60 bp, Artificial
  Synthetic oligonucleotide
tcaatagcatgggtagcaattgctttgactcaatggataacacacaatacgtataatatg

SEQ ID NO: 517691 - DNA, 60 bp, Artificial
  Synthetic oligonucleotide
tcacacttcacaggatgtcgggatatctagcgcgatgggttgctgacacatgcaaggcta

SEQ ID NO: 517692 - DNA, 60 bp, Artificial
  Synthetic oligonucleotide
caatttaaaatcttgcacttggcgtgaattaacgcataatacagttagccaaactaaagt

SEQ ID NO: 517693 - DNA, 60 bp, Artificial
  Synthetic oligonucleotide
tcacagtggttaataaccattttccccaatatgtctcaaatcctgtgccagacaatgcca

SEQ ID NO: 517694 - DNA, 60 bp, Artificial
  Synthetic oligonucleotide
tcacttcttcctcattgcgtaagcctctgttagactgttgggacttctttatccccatcc

SEQ ID NO: 517695 - DNA, 60 bp, Artificial
  Synthetic oligonucleotide
caattcgacaaaattagacctccttcggggggtcaccaatggctggccaatctcctcccc

SEQ ID NO: 517696 - DNA, 60 bp, Artificial
  Synthetic oligonucleotide
caattatagaggccttcgactgagtctctcagaaattactgctacgtgtacaggggaagt

SEQ ID NO: 517697 - DNA, 60 bp, Artificial
  Synthetic oligonucleotide
caattagtgctaaatgttatgaggaagaacaactcgtcgatgaattccgatcagctttaa

SEQ ID NO: 517698 - DNA, 60 bp, Artificial
  Synthetic oligonucleotide
caatgttcactgttgtcttcttatagcccagctacaatcctttctgatcaagtagatagt

SEQ ID NO: 517699 - DNA, 60 bp, Artificial
  Synthetic oligonucleotide
tcagaactgatggatcgaatatttcaacacaatggcctagtaggaggaatgaaggtgttg

SEQ ID NO: 517700 - DNA, 60 bp, Artificial
  Synthetic oligonucleotide
caatgtatcttggattcgcacctggggcagaaatgttccttgatgcttttgacttctacc

SEQ ID NO: 517701 - DNA, 60 bp, Artificial
  Synthetic oligonucleotide
tgagattctgataactggtctatccccaattctggatgtggctctcctccagatagaatc

SEQ ID NO: 517702 - DNA, 60 bp, Artificial
  Synthetic oligonucleotide
tgagcattgtggtctatcttacatcatttgtggttccaatacttctgaaggctctttaca

SEQ ID NO: 517703 - DNA, 60 bp, Artificial
  Synthetic oligonucleotide
atgaccatcttaaagaacgatcaagtctcaggtatggaaatgtccttgatgtgaatgcca

SEQ ID NO: 517704 - DNA, 60 bp, Artificial
  Synthetic oligonucleotide
atgaatgccaacactgtcaggcttgagccatctctaggagagtaccccactcttaggaga

SEQ ID NO: 517705 - DNA, 60 bp, Artificial
  Synthetic oligonucleotide
tgagtctcctaatgccccatgggtatttgcatgtgcccctgacagatgcccaccaacttg

SEQ ID NO: 517706 - DNA, 60 bp, Artificial
  Synthetic oligonucleotide
atctcccatgcaagctactatctgagccatctcccacgtctttgactaaaggcccatcca

SEQ ID NO: 517707 - DNA, 60 bp, Artificial
  Synthetic oligonucleotide
tgagttgattagctgcatccacatgtgtctatataggaacaatttagaccaactatttca

SEQ ID NO: 517708 - DNA, 60 bp, Artificial
  Synthetic oligonucleotide
tgatagatggagatgggactagtaactggcttgaggagatcaggctcagtagtgatgcca

SEQ ID NO: 517709 - DNA, 60 bp, Artificial
  Synthetic oligonucleotide
atccccatccgcaaaaagaagactgatggctcatacagtgtcttggatgaggatgatgag

SEQ ID NO: 517710 - DNA, 60 bp, Artificial
  Synthetic oligonucleotide
atcaggagcccttgaaaatatgaaggaaccgctaattgcactgataatataggcataata

SEQ ID NO: 517711 - DNA, 60 bp, Artificial
  Synthetic oligonucleotide
atcaatttgggtctttgcaggagcacctgatagatgcccccctacctgcttatttgttgc

SEQ ID NO: 517712 - DNA, 60 bp, Artificial
  Synthetic oligonucleotide
tgatcctttacgagatacgatccatgtcaattcaaatcagtttttagagatatttggccc

SEQ ID NO: 517713 - DNA, 60 bp, Artificial
  Synthetic oligonucleotide
tgcaagcaggcaagaggattactctaaccttctgacccagtgcttggaagggggggcctc

SEQ ID NO: 517714 - DNA, 60 bp, Artificial
  Synthetic oligonucleotide
atatgagcctatgcagggttgttatcgtaccttatccctcttcaggtatcggagtcggtt

SEQ ID NO: 517715 - DNA, 60 bp, Artificial
  Synthetic oligonucleotide
tgcactagggccttatagggtccaggttgtttatgaaagaacctactgcatgacaggagt

SEQ ID NO: 517716 - DNA, 60 bp, Artificial
  Synthetic oligonucleotide
atatcagaggtgatctgtctgttttacagatacaggcaaataggagagcttattcgggta

SEQ ID NO: 517717 - DNA, 60 bp, Artificial
  Synthetic oligonucleotide
tgcactgatagtataggcatagtaagtactaacatgcaggcatgtattattcagggatca

SEQ ID NO: 517718 - DNA, 60 bp, Artificial
  Synthetic oligonucleotide
tgccagctcactacagagtgcagtttgagcattgggatcagttccatcccaaattttggt

SEQ ID NO: 517719 - DNA, 60 bp, Artificial
  Synthetic oligonucleotide
atacgggcgtttcttactaacagctgtaggtgactgtgcttacttaggaccttatgaaga

SEQ ID NO: 517720 - DNA, 60 bp, Artificial
  Synthetic oligonucleotide
tgcccaccatcacttgcatggatcagtatagcattaaatcagtggatcacgcataataca

SEQ ID NO: 517721 - DNA, 60 bp, Artificial
  Synthetic oligonucleotide
ataactcacagtacatataacatgctccctggccaaatcaatgatcccacctcagtcctg

SEQ ID NO: 517722 - DNA, 60 bp, Artificial
  Synthetic oligonucleotide
tgcctgcaagaaccatacagatggcttcccactaggccacctaagagcactcagctctct

SEQ ID NO: 517723 - DNA, 60 bp, Artificial
  Synthetic oligonucleotide
agtttccatgcatgctttcatacgcacaaatcatgcatacgttacttcaaaggatcaatt

SEQ ID NO: 517724 - DNA, 60 bp, Artificial
  Synthetic oligonucleotide
tgctaaaggacggaatggatgtcaactttatgagaaaagtcctccgtcagcgttacggca

SEQ ID NO: 517725 - DNA, 60 bp, Artificial
  Synthetic oligonucleotide
tgctagggaaactggatggacctttgagaactaagctacaggtatacctcctcaggaaac

SEQ ID NO: 517726 - DNA, 60 bp, Artificial
  Synthetic oligonucleotide
agtggaactgccacctgtcccaatacagcaggtggaaacattaaagctggaaagttcttg

SEQ ID NO: 517727 - DNA, 60 bp, Artificial
  Synthetic oligonucleotide
tgctgacacatgcaaggctagtgtccttaagttggctgaagcaagtgctcagattgtcat

SEQ ID NO: 517728 - DNA, 60 bp, Artificial
  Synthetic oligonucleotide
tgcttgaatggggtaaggaaatggttgatcattttcatctgggtgatgacatggatccag

SEQ ID NO: 517729 - DNA, 60 bp, Artificial
  Synthetic oligonucleotide
tctcctccccagatggtgttcagggctgcagttctcagctcctcatcaaacatgatgagg

SEQ ID NO: 517730 - DNA, 60 bp, Artificial
  Synthetic oligonucleotide
tctcctggagtgccatcaacctctttgaccctgagtttgacatcttccctgatgccttga

SEQ ID NO: 517731 - DNA, 60 bp, Artificial
  Synthetic oligonucleotide
attgtcatgccacttgctgaagtaaaaggttgtacctggactgaggggctgactatgtat

SEQ ID NO: 517732 - DNA, 60 bp, Artificial
  Synthetic oligonucleotide
attctctgaagggggaatctttaacataacttctccaatgtgtctagtgtcaaagcagaa

SEQ ID NO: 517733 - DNA, 60 bp, Artificial
  Synthetic oligonucleotide
attcaatcgtaaagatgtgattctgcggagatgttttgacaattcatatcaatcttgcct

SEQ ID NO: 517734 - DNA, 60 bp, Artificial
  Synthetic oligonucleotide
tcttaggagagacctcgttgaatgctcttgtagtgtgttgactttgtcaatggtcaagag

SEQ ID NO: 517735 - DNA, 60 bp, Artificial
  Synthetic oligonucleotide
attattatcagggtttactaatcatcaggtaatcagggtttaactggaaatgagatatta

SEQ ID NO: 517736 - DNA, 60 bp, Artificial
  Synthetic oligonucleotide
tctttatacatctactggggttttagcagcaaaggatgaccctgtgtatatttgggcccc

SEQ ID NO: 517737 - DNA, 60 bp, Artificial
  Synthetic oligonucleotide
attaccccaaagagtgatatgttattcaccacgtggtatcacacacccaggagattatat

SEQ ID NO: 517738 - DNA, 60 bp, Artificial
  Synthetic oligonucleotide
attaaggcatgtgatgccgcaatgtgctatggatctactacagctaacctaattagggga

SEQ ID NO: 517739 - DNA, 60 bp, Artificial
  Synthetic oligonucleotide
tgaactaataatagaatcattttgcaccaatatggaactaattatcttactaatgtttgg

SEQ ID NO: 517740 - DNA, 60 bp, Artificial
  Synthetic oligonucleotide
atgtactacaaggacatgaggtgctactcccagagagagctgagtgctcttaggtggcct

SEQ ID NO: 517741 - DNA, 60 bp, Artificial
  Synthetic oligonucleotide
atgtacaggttttgcattgccaatgagatctataccaaggctagatctatggatgcagac

SEQ ID NO: 517742 - DNA, 60 bp, Artificial
  Synthetic oligonucleotide
tgagagagggtgtatacagagaattaggtcttgatatcagtcaaccgaatgtgttaaaga

SEQ ID NO: 517743 - DNA, 60 bp, Artificial
  Synthetic oligonucleotide
tgaccttaagcggagataaagtctcaagtggtattagaaatagctatatcgaatcgcata

SEQ ID NO: 517744 - DNA, 60 bp, Artificial
  Synthetic oligonucleotide
atgctcagtagagagtacatgctcgccatatataaataggttgtcattggtagaaggctc

SEQ ID NO: 517745 - DNA, 60 bp, Artificial
  Synthetic oligonucleotide
atggagcaccgccctcccttgcatggactgctattgctctgacacagtggataactcaca

SEQ ID NO: 517746 - DNA, 60 bp, Artificial
  Synthetic oligonucleotide
atgggggctcactaaaccctaaccaggagcgaatgctcttccctcaggcccaagagtatg

SEQ ID NO: 517747 - DNA, 60 bp, Artificial
  Synthetic oligonucleotide
atgggttgggtgggccatttatccattatataatctcagggtgggttaggacgtcacctt

SEQ ID NO: 517748 - DNA, 60 bp, Artificial
  Synthetic oligonucleotide
atggtgaacagctggtacattgggtactacaagaacaaagaggagtcaacagagctaaat

SEQ ID NO: 517749 - DNA, 60 bp, Artificial
  Synthetic oligonucleotide
tgacccatgtaatgtgttcccaacatacaatagacaagagatacctatagaattgtgtgg

SEQ ID NO: 517750 - DNA, 60 bp, Artificial
  Synthetic oligonucleotide
tgaagcccttgcaagcaggcaagaggattactccaaccttctaacccagtgcttggaagg

SEQ ID NO: 517751 - DNA, 59 bp, Artificial
  Synthetic oligonucleotide
tgccagaggatagtatcagctccagggctatttttaatgacatcatgcctattcctttc

SEQ ID NO: 517752 - DNA, 59 bp, Artificial
  Synthetic oligonucleotide
tgggatctttgatattgcaagtgttcacactgtttgtttcttcgttgcggttaaaggaa

SEQ ID NO: 517753 - DNA, 59 bp, Artificial
  Synthetic oligonucleotide
ggttgagaatggttatacaataggtgaactcaatgataatcaagaccttgttgaacaac

SEQ ID NO: 517754 - DNA, 59 bp, Artificial
  Synthetic oligonucleotide
taccacaaataacatgccttcttacgttggatttacaattctcttgtgtgccacaattg

SEQ ID NO: 517755 - DNA, 59 bp, Artificial
  Synthetic oligonucleotide
gccaaatccagttcaatgcatacaataaaggatacaatacaatgcccagaatatcatac

SEQ ID NO: 517756 - DNA, 59 bp, Artificial
  Synthetic oligonucleotide
gggattcgaaagccaaagcacctgtttctgtcaatgcccaatgcgcaatccagtatgaa

SEQ ID NO: 517757 - DNA, 59 bp, Artificial
  Synthetic oligonucleotide
tcctaaagtgcgaacatttgacattccaaattataggcctcaacaattatgtcaacctg

SEQ ID NO: 517758 - DNA, 59 bp, Artificial
  Synthetic oligonucleotide
taaacctctccgttataaccctttactttccgtgcaatatgtctatgtattgcacacca

SEQ ID NO: 517759 - DNA, 59 bp, Artificial
  Synthetic oligonucleotide
tcctgcaaattcctgaggattgcatttcttgggtgtctgatcagttctgcgactccagg

SEQ ID NO: 517760 - DNA, 59 bp, Artificial
  Synthetic oligonucleotide
gccagaaatttttgtcgacaacccaatcgccttaaatgtaaagtgggcagatgttatag

SEQ ID NO: 517761 - DNA, 59 bp, Artificial
  Synthetic oligonucleotide
gcagcagaacttcaaataagtagaatacgtgatgatataatatctagacatagccaagc

SEQ ID NO: 517762 - DNA, 59 bp, Artificial
  Synthetic oligonucleotide
tctccattacaaactcttaaatttccgtgcaatatgtctatgtattgcacaccattata

SEQ ID NO: 517763 - DNA, 59 bp, Artificial
  Synthetic oligonucleotide
aaaaagaatcaacatggtggcctcagagagatctacgttatggatgcgaatgcccggct

SEQ ID NO: 517764 - DNA, 59 bp, Artificial
  Synthetic oligonucleotide
aggcttagaattcattgagcaactattacaggtagaagcacagaaagggaattgtcaat

SEQ ID NO: 517765 - DNA, 59 bp, Artificial
  Synthetic oligonucleotide
aagaccagtggatcatgcagaggggacatgcagttttgcaaggtggcaggttgcgaaca

SEQ ID NO: 517766 - DNA, 59 bp, Artificial
  Synthetic oligonucleotide
aagatactggacttggcatcactgagccagacatcgtacattagagaatatgataaaaa

SEQ ID NO: 517767 - DNA, 59 bp, Artificial
  Synthetic oligonucleotide
atccctgaaacaccaacttcatttcttatacatgatatggcttatcggtatattaatct

SEQ ID NO: 517768 - DNA, 59 bp, Artificial
  Synthetic oligonucleotide
cgatatgtggcaaaggatacaagaaatatgtgcaacaaactactgggctgcaatattag

SEQ ID NO: 517769 - DNA, 59 bp, Artificial
  Synthetic oligonucleotide
ctaaaatatacaagtggccatcattaggagtatataggtacaataaagatcagcagcag

SEQ ID NO: 517770 - DNA, 59 bp, Artificial
  Synthetic oligonucleotide
attgttggacctgctaatgcaaaggtgccccatagtgccagttcagacacactgagctt

SEQ ID NO: 517771 - DNA, 59 bp, Artificial
  Synthetic oligonucleotide
aatgactggaccctggatcgatgaggataccccggagctttattcgcaccctgtctttt

SEQ ID NO: 517772 - DNA, 59 bp, Artificial
  Synthetic oligonucleotide
catcatcaacattcatgaatgtttagctcatgaagccatgatttttgctttccttagcc

SEQ ID NO: 517773 - DNA, 59 bp, Artificial
  Synthetic oligonucleotide
aaggcactgaggtgggcttcaggagaaagtgaaatccagtcctcactaggtcattctat

SEQ ID NO: 517774 - DNA, 59 bp, Artificial
  Synthetic oligonucleotide
ctatagaacaaagcttttaaatggcaaaccaattcattttccaagatgttcctcaacgg

SEQ ID NO: 517775 - DNA, 58 bp, Artificial
  Synthetic oligonucleotide
tggatgtcaacttcatgcggaaagtactccgccagcgttatgggacactgactgcaga

SEQ ID NO: 517776 - DNA, 58 bp, Artificial
  Synthetic oligonucleotide
gtgcggaagtgctttgacaatgcatatgaatcgtgtaaatatcttgatttaaggaatg

SEQ ID NO: 517777 - DNA, 58 bp, Artificial
  Synthetic oligonucleotide
ggctcataaagagttgggtatctaaaggcttatgtattgaaaaggtttatagcccaac

SEQ ID NO: 517778 - DNA, 58 bp, Artificial
  Synthetic oligonucleotide
gggtccttcaaggttacccatatctgatggcacactatttaaacaggtgcccattcca

SEQ ID NO: 517779 - DNA, 58 bp, Artificial
  Synthetic oligonucleotide
tttgaaatttgaggtgcaggaattgactaaattttatcagatctgctatgaatatgta

SEQ ID NO: 517780 - DNA, 58 bp, Artificial
  Synthetic oligonucleotide
ccgccagcgttatgggacactgactgcagaggagtggatgacaactaagatagaagca

SEQ ID NO: 517781 - DNA, 58 bp, Artificial
  Synthetic oligonucleotide
cagggaaatttgttgttagggagaggaacattgtcaggagccgcatagacctgttcca

SEQ ID NO: 517782 - DNA, 58 bp, Artificial
  Synthetic oligonucleotide
tcgatgagcagtgccaactgaactgtgggggacatgagagtcaagtgactctaaaagg

SEQ ID NO: 517783 - DNA, 57 bp, Artificial
  Synthetic oligonucleotide
tggtgaaataacagacagaccagctgttgagcatatactccaagttatgaaggatca

SEQ ID NO: 517784 - DNA, 57 bp, Artificial
  Synthetic oligonucleotide
agatacagcaggtacctttttggtactagacgttgatcatgcaggcaatataattgc

SEQ ID NO: 517785 - DNA, 57 bp, Artificial
  Synthetic oligonucleotide
gtgcagcaataagattaaatttgggcgatatcaaatataaaagtgtctcagctgctg

SEQ ID NO: 517786 - DNA, 57 bp, Artificial
  Synthetic oligonucleotide
cagagtggttggatagattttgcagagttggagttccaccaattgacccagaaatcc

SEQ ID NO: 517787 - DNA, 57 bp, Artificial
  Synthetic oligonucleotide
ggaagcaatagggaaagtgctactatttgctggggtcccttcaaacatcataacagc

SEQ ID NO: 517788 - DNA, 57 bp, Artificial
  Synthetic oligonucleotide
taccccacctgcttggttactctgagaagatttgtcagatagatcggctgatacatg

SEQ ID NO: 517789 - DNA, 57 bp, Artificial
  Synthetic oligonucleotide
aggtttgatcttagagcaagggtttacaaatcgatgtttaacatgcatatgttcgaa

SEQ ID NO: 517790 - DNA, 57 bp, Artificial
  Synthetic oligonucleotide
tgcacaccattatactgcaaggcttctgttaagatagttaataagtggagaacacta

SEQ ID NO: 517791 - DNA, 57 bp, Artificial
  Synthetic oligonucleotide
ccacactcaatcaattttggagagagcagtgtaacaggtaagggcgaattacccccc

SEQ ID NO: 517792 - DNA, 57 bp, Artificial
  Synthetic oligonucleotide
atcaatcatatctgcgcaggactcaatcaatggggatacaattggaccaaaggatca

SEQ ID NO: 517793 - DNA, 57 bp, Artificial
  Synthetic oligonucleotide
ggatgtatacaatgttttacagatatagcatgcaagttagagataacatcaacgggg

SEQ ID NO: 517794 - DNA, 57 bp, Artificial
  Synthetic oligonucleotide
atgagggatttacatcggatagcaacctggaaattatggaatcattagtctggatct

SEQ ID NO: 517795 - DNA, 57 bp, Artificial
  Synthetic oligonucleotide
tccatattgcaggatatgagaaacaccattatggcatctaaaactgttggcacagct

SEQ ID NO: 517796 - DNA, 57 bp, Artificial
  Synthetic oligonucleotide
catacgaatgctttcgcttaattgcacattttgcagattcctttttagcagagaatt

SEQ ID NO: 517797 - DNA, 57 bp, Artificial
  Synthetic oligonucleotide
caaagcttttaaatggcaaaccaattcattttccaagatgttcctcaacggaatctc

SEQ ID NO: 517798 - DNA, 57 bp, Artificial
  Synthetic oligonucleotide
ctaccactggtcttgttgcagctgcgccacatttagaccgtgtaacaggatacaatc

SEQ ID NO: 517799 - DNA, 57 bp, Artificial
  Synthetic oligonucleotide
tcagttctaaatctgagtctaggtcatctgatccgtttagggaagcaatgacagatg

SEQ ID NO: 517800 - DNA, 57 bp, Artificial
  Synthetic oligonucleotide
gaggacggatttagtactgtgagcagtatgtcaagtagactatggtcagaagaagtt

SEQ ID NO: 517801 - DNA, 57 bp, Artificial
  Synthetic oligonucleotide
gaaccagatcaatcagataggcaaatcgagctattgggcttgcattaaagacttctc

SEQ ID NO: 517802 - DNA, 57 bp, Artificial
  Synthetic oligonucleotide
gaaatgttccttgatgcttttgacttctacccactggttatcgagatgcacagggtt

SEQ ID NO: 517803 - DNA, 57 bp, Artificial
  Synthetic oligonucleotide
accaatgatagattacacaagtatccatgacaaattgttcggtatccaagatgatcc

SEQ ID NO: 517804 - DNA, 56 bp, Artificial
  Synthetic oligonucleotide
acagattcactataccagaacaatttgtagacaatccaatatcgctaaactataaa

SEQ ID NO: 517805 - DNA, 56 bp, Artificial
  Synthetic oligonucleotide
tcagtaagtatgggcaacatctcaacttcactgttgctcgagtcttcttcctcaac

SEQ ID NO: 517806 - DNA, 56 bp, Artificial
  Synthetic oligonucleotide
ggtatagggggtcatgtgcaattctcaaaaaagaccattgacgatttagatactga

SEQ ID NO: 517807 - DNA, 56 bp, Artificial
  Synthetic oligonucleotide
atatactctcagtttctactatattggagcataatgataggatagatgagactagg

SEQ ID NO: 517808 - DNA, 56 bp, Artificial
  Synthetic oligonucleotide
cgaagatgttttgataattcttaccaatcttgcctcctcttagagcaagatagtac

SEQ ID NO: 517809 - DNA, 56 bp, Artificial
  Synthetic oligonucleotide
ggggtatgagcagctggatttatgttcattacctggagtatataaatgtttctatg

SEQ ID NO: 517810 - DNA, 56 bp, Artificial
  Synthetic oligonucleotide
gtggtgattacaaaatacggacattagcttcactttctctagacacaataacatcg

SEQ ID NO: 517811 - DNA, 56 bp, Artificial
  Synthetic oligonucleotide
caaggtgatgaatcaaaaacaggtgtcagaaatgcatttgtaaagtcaagtctgcc

SEQ ID NO: 517812 - DNA, 56 bp, Artificial
  Synthetic oligonucleotide
gcacaagggaattagataacattaaaagcctaacaattaacgatacttacagtttt

SEQ ID NO: 517813 - DNA, 56 bp, Artificial
  Synthetic oligonucleotide
atgccttgacgatcttattgcctcgagtcagggcaaagacaatgatgaacttcgta

SEQ ID NO: 517814 - DNA, 56 bp, Artificial
  Synthetic oligonucleotide
ttacaagagaagaatggcagatgctgtgtcccggaaaaagatggatactaagccta

SEQ ID NO: 517815 - DNA, 56 bp, Artificial
  Synthetic oligonucleotide
gcttaacagaatgttctgcatttcttacttcaattaaggcatgtgatgctgcaatg

SEQ ID NO: 517816 - DNA, 56 bp, Artificial
  Synthetic oligonucleotide
cacatgtgtctatataggaacaatttagaccaactatttcacaactttactgcccc

SEQ ID NO: 517817 - DNA, 56 bp, Artificial
  Synthetic oligonucleotide
ggttaatataaagcggaattggttgcaagggaatctcaactacacgagcagctact

SEQ ID NO: 517818 - DNA, 56 bp, Artificial
  Synthetic oligonucleotide
gccagagagttgatgttgacattattgtgtattgcaatggtcagagaaaagtaatc

SEQ ID NO: 517819 - DNA, 56 bp, Artificial
  Synthetic oligonucleotide
tgaaattacgtgctttgaaaatcgaaattaatgctgatatgtcaaaatggagtgca

SEQ ID NO: 517820 - DNA, 56 bp, Artificial
  Synthetic oligonucleotide
ggattccagtgttgaggtcttttcagatttaggagtttcttttgtgtttgacgcag

SEQ ID NO: 517821 - DNA, 55 bp, Artificial
  Synthetic oligonucleotide
catatagactcaaccactaccgtattgctggcacaatccagcaggctggctggtt

SEQ ID NO: 517822 - DNA, 55 bp, Artificial
  Synthetic oligonucleotide
taaccattttccccaatacacagcaaatcctgtgccagacactgccctcactctc

SEQ ID NO: 517823 - DNA, 55 bp, Artificial
  Synthetic oligonucleotide
ggtgtgtagactagatggggaatgggttactttcagggaggttctggctgcagct

SEQ ID NO: 517824 - DNA, 55 bp, Artificial
  Synthetic oligonucleotide
catcaaaacagctacatcaaataattgtaatgacactggcaataaagtgcagggg

SEQ ID NO: 517825 - DNA, 55 bp, Artificial
  Synthetic oligonucleotide
cccttgttggcatggtgagaatttgcaagtatagttaattagtggagaacactac

SEQ ID NO: 517826 - DNA, 55 bp, Artificial
  Synthetic oligonucleotide
ccccttcgaatctgacaaggagaatctgctcctgcctcctcatctagtggaccta

SEQ ID NO: 517827 - DNA, 55 bp, Artificial
  Synthetic oligonucleotide
catcacttcaagcctactgatagtctaccgcatgtagtgccaaattataaaggca

SEQ ID NO: 517828 - DNA, 55 bp, Artificial
  Synthetic oligonucleotide
cccatgctttatgtagccccacatatgctgcattaaccgcttaaactggaatcat

SEQ ID NO: 517829 - DNA, 55 bp, Artificial
  Synthetic oligonucleotide
catccagactcgttgtccactgatttacagcttatgagagagggtgtatacagag

SEQ ID NO: 517830 - DNA, 55 bp, Artificial
  Synthetic oligonucleotide
ggtcttggtcgtggcttcagatacccctgcagttggaatcagggacccgaaggcc

SEQ ID NO: 517831 - DNA, 55 bp, Artificial
  Synthetic oligonucleotide
cagcacaatagccatcataataggaatcatagccgcttatctgatttggaccagg

SEQ ID NO: 517832 - DNA, 55 bp, Artificial
  Synthetic oligonucleotide
tagtgaggcgatgctatgacaatgcatatgattcatgcaggtttctccaagaaga

SEQ ID NO: 517833 - DNA, 55 bp, Artificial
  Synthetic oligonucleotide
cagccgtactacattcctgattatcggggaatccctttaattcaccctaacatca

SEQ ID NO: 517834 - DNA, 55 bp, Artificial
  Synthetic oligonucleotide
cagctgaggccatatgtgcatactggttaaaatcaatgtcgttagtaaagactat

SEQ ID NO: 517835 - DNA, 55 bp, Artificial
  Synthetic oligonucleotide
caggaccaattgacataaacacggctgaatccgtaaatgatctagttctggcatg

SEQ ID NO: 517836 - DNA, 55 bp, Artificial
  Synthetic oligonucleotide
ccgaggctgctcaatgttcatgaagaaaaggatcatgattgatcaaagtctcctg

SEQ ID NO: 517837 - DNA, 55 bp, Artificial
  Synthetic oligonucleotide
caggacgtatcaggctctgagaaggcagcttgagagacaggacctgtgtgaggat

SEQ ID NO: 517838 - DNA, 55 bp, Artificial
  Synthetic oligonucleotide
tacttttcgcgtagtgtgttgtgcgaacaataatctgtttgggtttgtgatgcct

SEQ ID NO: 517839 - DNA, 55 bp, Artificial
  Synthetic oligonucleotide
caggagcggctagagatcaatagatgtgaggccattgacaaaactcaggacctcc

SEQ ID NO: 517840 - DNA, 55 bp, Artificial
  Synthetic oligonucleotide
tacttgatctagtccataggtgcagtcaaagtgatctttctctgaaatataggac

SEQ ID NO: 517841 - DNA, 55 bp, Artificial
  Synthetic oligonucleotide
tacggctgtaataggttacaagtatgctagcaaagtagatgaaatcagcgacgtt

SEQ ID NO: 517842 - DNA, 55 bp, Artificial
  Synthetic oligonucleotide
ggtgctactcccagagagaactgagtgctcttaggtggcctagtgggaagccatc

SEQ ID NO: 517843 - DNA, 55 bp, Artificial
  Synthetic oligonucleotide
ccgacaataaagttcagggctattacttgtgcattgtaggagctaactcctctcc

SEQ ID NO: 517844 - DNA, 55 bp, Artificial
  Synthetic oligonucleotide
cagggtaaaatcgatgaactgaggagacagctggctgaccgtgtggctgcaggga

SEQ ID NO: 517845 - DNA, 55 bp, Artificial
  Synthetic oligonucleotide
caggtcttgagacgacaggagatggatttagcactgtaagttcaatgtcaagtcg

SEQ ID NO: 517846 - DNA, 55 bp, Artificial
  Synthetic oligonucleotide
taatgtccttgtccacactaattcaaccacaaccaaagttgccctaaaactggga

SEQ ID NO: 517847 - DNA, 55 bp, Artificial
  Synthetic oligonucleotide
cataacagaatcaaaagggcttttcttaggttttaggtttcttctgtacagggtg

SEQ ID NO: 517848 - DNA, 55 bp, Artificial
  Synthetic oligonucleotide
ggtggttattggtagcacgtcagcagaaagaaattcttgcatggcatcagggttg

SEQ ID NO: 517849 - DNA, 55 bp, Artificial
  Synthetic oligonucleotide
ggtgtctcctgcaaatcgtgtgtgctcttgcactggtggtccctggagagctgta

SEQ ID NO: 517850 - DNA, 55 bp, Artificial
  Synthetic oligonucleotide
ccaccacttattcacttcttcctcattgcgtaagcctctattggactgttgggac

SEQ ID NO: 517851 - DNA, 55 bp, Artificial
  Synthetic oligonucleotide
gtgccccaattctcagcaagacatccagataaaaggggaactcgtctacttgttc

SEQ ID NO: 517852 - DNA, 55 bp, Artificial
  Synthetic oligonucleotide
gtgccagacactgccctcactctccaccgcctctcgggatatttagctaaatggg

SEQ ID NO: 517853 - DNA, 55 bp, Artificial
  Synthetic oligonucleotide
gtgcagtttgagcattgggatcagttccatcccaaattttggtgcagtgtgtcag

SEQ ID NO: 517854 - DNA, 55 bp, Artificial
  Synthetic oligonucleotide
cccagtttgcaagaggttaaaagggctactcgaacagaacgagagaatataccag

SEQ ID NO: 517855 - DNA, 55 bp, Artificial
  Synthetic oligonucleotide
ccagaagcatgttatagatacctactgggtcaaaactaaatttagtggttccaac

SEQ ID NO: 517856 - DNA, 55 bp, Artificial
  Synthetic oligonucleotide
gtgatgacatggatccagagcttcggggcctggcacaggcattgattgaccaaaa

SEQ ID NO: 517857 - DNA, 55 bp, Artificial
  Synthetic oligonucleotide
gtccatcgccaatgcatgaactgcactggttataaaacgctgactaagacaaggg

SEQ ID NO: 517858 - DNA, 55 bp, Artificial
  Synthetic oligonucleotide
gtgacaggatacaattagacattcaaacagtccagatggattccatgccaaatat

SEQ ID NO: 517859 - DNA, 55 bp, Artificial
  Synthetic oligonucleotide
ccaggaaagtgtgcattcagttaggtactgaacaaacttgtaagacagttgatag

SEQ ID NO: 517860 - DNA, 55 bp, Artificial
  Synthetic oligonucleotide
gtcctatgtgtcttcttactattctcactggtattacttagtattctctgtcctg

SEQ ID NO: 517861 - DNA, 55 bp, Artificial
  Synthetic oligonucleotide
gtgaagtcagcttgaaaggtacatgcaccttaacacatagaatggttgaggactc

SEQ ID NO: 517862 - DNA, 55 bp, Artificial
  Synthetic oligonucleotide
ccatccttttgttcacattatgctgcccgcgtagaccaagttacagaaaagagca

SEQ ID NO: 517863 - DNA, 55 bp, Artificial
  Synthetic oligonucleotide
gtgaaagcaatggacctaggtgcatcaccacaagtggctcagcttgcagtggcac

SEQ ID NO: 517864 - DNA, 55 bp, Artificial
  Synthetic oligonucleotide
ccatcgtttgccagaacaaagcttcaggtgtggcttattaacaaactcctccagt

SEQ ID NO: 517865 - DNA, 55 bp, Artificial
  Synthetic oligonucleotide
ccatgtcatctgatgacgggatgggcgaaactagcgagatgagatctaggtctct

SEQ ID NO: 517866 - DNA, 55 bp, Artificial
  Synthetic oligonucleotide
ccatttgagtttgaagtcgtaatcattcgcgctgatcctttacgagatacgatcc

SEQ ID NO: 517867 - DNA, 55 bp, Artificial
  Synthetic oligonucleotide
cccaaagatcaaaactggctaacattctctaaagagcataccagtgcttggggtt

SEQ ID NO: 517868 - DNA, 55 bp, Artificial
  Synthetic oligonucleotide
cccaatacacagctaatccggtgccagacaatgccctcaccctccacaggctctc

SEQ ID NO: 517869 - DNA, 55 bp, Artificial
  Synthetic oligonucleotide
catgcagtgttagaggccatcaatggcagatcgcagagtgctcaaatggcttgct

SEQ ID NO: 517870 - DNA, 55 bp, Artificial
  Synthetic oligonucleotide
catgctccctggccaaatcaatgatcccacctcagtcctgcctagccatgacagg

SEQ ID NO: 517871 - DNA, 55 bp, Artificial
  Synthetic oligonucleotide
gttgacctcaaatctgttgcaatgaatgccaacacagtcaggcttgagccatctc

SEQ ID NO: 517872 - DNA, 55 bp, Artificial
  Synthetic oligonucleotide
cattatgtggggttaactttaaaacacggttggtacgcagccggtgtgtctgtgg

SEQ ID NO: 517873 - DNA, 55 bp, Artificial
  Synthetic oligonucleotide
gttccgttgatgtaagcttcttcactaatgagttctttgccaatgacacagttgc

SEQ ID NO: 517874 - DNA, 55 bp, Artificial
  Synthetic oligonucleotide
cattcacctggtgtgactagcagcctgagtaagggacatgtagtacctcgggtgg

SEQ ID NO: 517875 - DNA, 55 bp, Artificial
  Synthetic oligonucleotide
cattcaggtcttaaaagatcaaagtattggtcaatacatgcgtataataacggga

SEQ ID NO: 517876 - DNA, 55 bp, Artificial
  Synthetic oligonucleotide
catttcacatccaactccttttctgatgattgggcaggtaagatggacagggctg

SEQ ID NO: 517877 - DNA, 55 bp, Artificial
  Synthetic oligonucleotide
ccaacttaagccagttggaagtgcttataaactaattacagtccgttatagtcgg

SEQ ID NO: 517878 - DNA, 55 bp, Artificial
  Synthetic oligonucleotide
ccacacaaaagaacatgagtaccatctaaactgtcttctgacaattcaatggtct

SEQ ID NO: 517879 - DNA, 55 bp, Artificial
  Synthetic oligonucleotide
gtatgggcaacaactcaatttcggtgttgctagagtcttcttcctcaaccagaag

SEQ ID NO: 517880 - DNA, 55 bp, Artificial
  Synthetic oligonucleotide
gtcaacttcggggaaagcagtgtatcagggaaagtggagctaccaccagttctac

SEQ ID NO: 517881 - DNA, 55 bp, Artificial
  Synthetic oligonucleotide
gtcaactttatgagaaaagtcctccgtcagcgttacggcacattgactgcagagc

SEQ ID NO: 517882 - DNA, 55 bp, Artificial
  Synthetic oligonucleotide
gtcagatcataaagctgcctcagtatgtgaatgagaatgctatatctagctactc

SEQ ID NO: 517883 - DNA, 55 bp, Artificial
  Synthetic oligonucleotide
cccatccactcaaacaagagtgctgacatacctcacctgctgggttactctgaga

SEQ ID NO: 517884 - DNA, 55 bp, Artificial
  Synthetic oligonucleotide
ccacaggttttctcaagaaatcggttcaaatgacacacacttttctcattggact

SEQ ID NO: 517885 - DNA, 55 bp, Artificial
  Synthetic oligonucleotide
gtgtaatatattcaactcttgccttcaaacagaagatgtagatagcttggaggtg

SEQ ID NO: 517886 - DNA, 55 bp, Artificial
  Synthetic oligonucleotide
gtggtgtgggcttttctgtcatggagaattctctggcttggctaattctggatga

SEQ ID NO: 517887 - DNA, 55 bp, Artificial
  Synthetic oligonucleotide
gtcagggcaaagacaatgatgaactttgtatccttcacccaatcatctccacctg

SEQ ID NO: 517888 - DNA, 55 bp, Artificial
  Synthetic oligonucleotide
accacatttgatcaagaagcacagcttttagtttcccagaagggaatttgcccag

SEQ ID NO: 517889 - DNA, 55 bp, Artificial
  Synthetic oligonucleotide
tgttgcatggatgggtgttggccactctcataaaatcatcatgagggagcacaag

SEQ ID NO: 517890 - DNA, 55 bp, Artificial
  Synthetic oligonucleotide
acgagaagcagattcatgcttcatagaccatatgtatcaggaccaattgacataa

SEQ ID NO: 517891 - DNA, 55 bp, Artificial
  Synthetic oligonucleotide
actaatcagtgaatgtatttgcactaggggatgggttgggtgggccatttatcca

SEQ ID NO: 517892 - DNA, 55 bp, Artificial
  Synthetic oligonucleotide
tgtgtccttaaggtataccaggaaagtgtgcattcaattaggcactgaacaaacc

SEQ ID NO: 517893 - DNA, 55 bp, Artificial
  Synthetic oligonucleotide
actggacagagcgggttgaggaatggcttgatctcccatgcaagctactatctga

SEQ ID NO: 517894 - DNA, 55 bp, Artificial
  Synthetic oligonucleotide
acttgtccagtaggggtgggtccattctagaccaaattgagagggcacagtcagg

SEQ ID NO: 517895 - DNA, 55 bp, Artificial
  Synthetic oligonucleotide
tgtgcatggccttcgggtccctgattccaactgcaggggtatctgaagccacgac

SEQ ID NO: 517896 - DNA, 55 bp, Artificial
  Synthetic oligonucleotide
tgtgcacaagcccggagaagtcgttgtatcatatggagggatgcgtgtcagacca

SEQ ID NO: 517897 - DNA, 55 bp, Artificial
  Synthetic oligonucleotide
tggttaataaccattttccccaatacacagcaaatcctgtgccagacactgccct

SEQ ID NO: 517898 - DNA, 55 bp, Artificial
  Synthetic oligonucleotide
tggtggtgaacggaaaattctatgtattcagtcagcactggaaaaggcacttaga

SEQ ID NO: 517899 - DNA, 55 bp, Artificial
  Synthetic oligonucleotide
agaattcaaagcttaaacaaagtgagacattatccacaccatgcagactctcgtt

SEQ ID NO: 517900 - DNA, 55 bp, Artificial
  Synthetic oligonucleotide
agacttgggttacctgatatcctgataactggactgtccccaattctggacgtgg

SEQ ID NO: 517901 - DNA, 55 bp, Artificial
  Synthetic oligonucleotide
agattgttaatcagggagaatttactatgacatccccatggattgaggaaaacac

SEQ ID NO: 517902 - DNA, 55 bp, Artificial
  Synthetic oligonucleotide
tgggacagtttgaagcaattcatgatgttgtcaagggttatcgtgtggatatgcc

SEQ ID NO: 517903 - DNA, 55 bp, Artificial
  Synthetic oligonucleotide
tggctgtgtagagtgtatgatgagggtttaggttttatatttaagcctttctggt

SEQ ID NO: 517904 - DNA, 55 bp, Artificial
  Synthetic oligonucleotide
tggctattcatgtgcacctgcattggagtggagttaagcattagtctgaagcagc

SEQ ID NO: 517905 - DNA, 55 bp, Artificial
  Synthetic oligonucleotide
tggagtatcatgcccacaatcacaatgcccatattgtttcacccactgtgagcct

SEQ ID NO: 517906 - DNA, 55 bp, Artificial
  Synthetic oligonucleotide
agcacttcaaggctttcccagaagctcgtgctcaaatgctcagcacctcctgggg

SEQ ID NO: 517907 - DNA, 55 bp, Artificial
  Synthetic oligonucleotide
agcccttacctggatgttgaagacattggggatttcctaacattcaacaatctcc

SEQ ID NO: 517908 - DNA, 55 bp, Artificial
  Synthetic oligonucleotide
tggaatctggatgatttgattaccggtggcttttcctgttctgagttcaatgaaa

SEQ ID NO: 517909 - DNA, 55 bp, Artificial
  Synthetic oligonucleotide
tggaactgttagagaatctagtctggatactaaaccacttaaagaccaaccaatg

SEQ ID NO: 517910 - DNA, 55 bp, Artificial
  Synthetic oligonucleotide
aaaagtcctccgccaacgctatggaacaatgactgctgaagaatggatgactcag

SEQ ID NO: 517911 - DNA, 55 bp, Artificial
  Synthetic oligonucleotide
aaatcaaggactggactgccctcctgcagtcacctatacctctagtcacatgagg

SEQ ID NO: 517912 - DNA, 55 bp, Artificial
  Synthetic oligonucleotide
aacaggtgtcagaaatgcatttgtaaagtcaagtctgcctgcaataacaggggta

SEQ ID NO: 517913 - DNA, 55 bp, Artificial; identical to SEQ ID NO: 303497
  Synthetic oligonucleotide

SEQ ID NO: 517914 - DNA, 55 bp, Artificial
  Synthetic oligonucleotide
tttaggaatgacacacctgctcaggacattctcctcgatttcttaccacctggat

SEQ ID NO: 517915 - DNA, 55 bp, Artificial
  Synthetic oligonucleotide
aagattgttgaagtcaaagcagcattcgatgcagttgggcaaatagcttgggcta

SEQ ID NO: 517916 - DNA, 55 bp, Artificial
  Synthetic oligonucleotide
aagctagatctaactagtttagatgagtctgcatacatccaggagcatgacaaaa

SEQ ID NO: 517917 - DNA, 55 bp, Artificial
  Synthetic oligonucleotide
aaggaagaccttccgccaggtgtcagtccagagcctagtctttggcagtcaaaga

SEQ ID NO: 517918 - DNA, 55 bp, Artificial
  Synthetic oligonucleotide
ttgtggatggcagctacatgcagacatatcatagcactgtgcccacaggggcaaa

SEQ ID NO: 517919 - DNA, 55 bp, Artificial
  Synthetic oligonucleotide
aaggatgcacctggaatgatggctataccatgtatcttggatttgcaccaggagc

SEQ ID NO: 517920 - DNA, 55 bp, Artificial
  Synthetic oligonucleotide
ttgcaacgtgatagacaagtttatatctgaagccagtgttattgagactcaggtc

SEQ ID NO: 517921 - DNA, 55 bp, Artificial
  Synthetic oligonucleotide
ttgagctgcctatagaattatgtggcttgataaattcagaattgcccactatagc

SEQ ID NO: 517922 - DNA, 55 bp, Artificial
  Synthetic oligonucleotide
ttcagagataaaggatccagctctgggctactttctcatggatcatccttttgga

SEQ ID NO: 517923 - DNA, 55 bp, Artificial
  Synthetic oligonucleotide
ttcacgctccctatcatcttgaaggccttgtatatgttatcaacccgtgggagac

SEQ ID NO: 517924 - DNA, 55 bp, Artificial
  Synthetic oligonucleotide
ttcacatttgagggtagttgcatgttcccagatggttgcgatgcagtggactgca

SEQ ID NO: 517925 - DNA, 55 bp, Artificial
  Synthetic oligonucleotide
aatggcatgaatcaagagaccaagtcaatcaaaattgcacagctgggagagtgca

SEQ ID NO: 517926 - DNA, 55 bp, Artificial
  Synthetic oligonucleotide
ttatctatccttctgttcacattatgctgcccacgcagaccaagttacagaaaag

SEQ ID NO: 517927 - DNA, 55 bp, Artificial
  Synthetic oligonucleotide
acactaatggggcaaaaatatttgacattgtcgtatatgtaaaacaagctaaagt

SEQ ID NO: 517928 - DNA, 55 bp, Artificial
  Synthetic oligonucleotide
ttagaatgtgttcgtcgggacctgtattgggtaccaagagcaacccaccgatgtg

SEQ ID NO: 517929 - DNA, 55 bp, Artificial
  Synthetic oligonucleotide
acatcatttgtggttccaatacttctgaaggctctttacatgctaacaaccagag

SEQ ID NO: 517930 - DNA, 55 bp, Artificial
  Synthetic oligonucleotide
caacagtcgcaagttcaaagaatcattgtctattcagaatccagctcagctcttc

SEQ ID NO: 517931 - DNA, 55 bp, Artificial
  Synthetic oligonucleotide
tccccaatatgtctcaaatcctgtgccagacaatgccatcacactccacaggatg

SEQ ID NO: 517932 - DNA, 55 bp, Artificial
  Synthetic oligonucleotide
caagattaaactctggcggcaatacccagtggaagacccttgctagaacttacac

SEQ ID NO: 517933 - DNA, 55 bp, Artificial
  Synthetic oligonucleotide
tcagagacattaggtatcaggcagtggatgctgtaagcaacgtgtggttcatcca

SEQ ID NO: 517934 - DNA, 55 bp, Artificial
  Synthetic oligonucleotide
caattgagctgggctaaatcaggattctcaccagcagctagaaccttccttgccc

SEQ ID NO: 517935 - DNA, 55 bp, Artificial
  Synthetic oligonucleotide
caattgcaattctagagcctgaacctaagtcatcattgtgcagatctgcatccaa

SEQ ID NO: 517936 - DNA, 55 bp, Artificial
  Synthetic oligonucleotide
caatttacgacgaccatggctccttcatgatattagatatcgataacaccggcac

SEQ ID NO: 517937 - DNA, 55 bp, Artificial
  Synthetic oligonucleotide
caatttggtgaccctggagatataatgagtacacccacagggatgaaatgtccgg

SEQ ID NO: 517938 - DNA, 55 bp, Artificial
  Synthetic oligonucleotide
cacagcggggtatccagggctgagctgagtcatcctggagtgggtgacagcagtg

SEQ ID NO: 517939 - DNA, 55 bp, Artificial
  Synthetic oligonucleotide
cacctcaatgtggcatttcatgctggtttataaaatctggagagtggataaaagg

SEQ ID NO: 517940 - DNA, 55 bp, Artificial
  Synthetic oligonucleotide
cacgagagtttactaccggcccgattgacttgtcaataaaaggatatgggcggtc

SEQ ID NO: 517941 - DNA, 55 bp, Artificial
  Synthetic oligonucleotide
cacgattccaggagaatttgagaaagtcattaactgtatatgagcctatgcaggg

SEQ ID NO: 517942 - DNA, 55 bp, Artificial
  Synthetic oligonucleotide
tatttcaacacaatggcctagtaggaggaatgaaggtgttgtgcaggcaatgagg

SEQ ID NO: 517943 - DNA, 55 bp, Artificial
  Synthetic oligonucleotide
tatgtcgaagctgttgtcaaagatcattgaattgagccaagagctgagtcaaggt

SEQ ID NO: 517944 - DNA, 55 bp, Artificial
  Synthetic oligonucleotide
cactccacaggatgtcaggatacttagcgcggtgggtagctgacacatgcaaagc

SEQ ID NO: 517945 - DNA, 55 bp, Artificial
  Synthetic oligonucleotide
cactgagtcgctaaaactacacaggttatgttctaactgtacaggatatagggca

SEQ ID NO: 517946 - DNA, 55 bp, Artificial
  Synthetic oligonucleotide
cactggctgaagtgaaaggttgcacctggactgaagggctgactatgtatctggg

SEQ ID NO: 517947 - DNA, 55 bp, Artificial
  Synthetic oligonucleotide
cacttgtgcacaagcccggggaagtcgttgtgtcttatggagggatgcgtgtcag

SEQ ID NO: 517948 - DNA, 55 bp, Artificial
  Synthetic oligonucleotide
tatcactaggggatgggttgggtgggccatttatccgttatgtaatctcagggtg

SEQ ID NO: 517949 - DNA, 55 bp, Artificial
  Synthetic oligonucleotide
cagataatggatgctcttttcggcatgtttcacaattgcctgtgcatgtggtgta

SEQ ID NO: 517950 - DNA, 55 bp, Artificial
  Synthetic oligonucleotide
agttcagactctgggactagttctggtcttctgccctcggatagggttctctgga

SEQ ID NO: 517951 - DNA, 55 bp, Artificial
  Synthetic oligonucleotide
tgccgcatgggtcccatcagcagtcatagaactaacaatgccctcaggggaggtg

SEQ ID NO: 517952 - DNA, 55 bp, Artificial
  Synthetic oligonucleotide
atagatgctgtccgtgcagccttcaatgctgttgggcagctaagctgggctaaat

SEQ ID NO: 517953 - DNA, 55 bp, Artificial
  Synthetic oligonucleotide
atatcgggtatcggcacttgtggtggatgtgttcaatgctttacagatatagcat

SEQ ID NO: 517954 - DNA, 55 bp, Artificial
  Synthetic oligonucleotide
atatgctccctggtcaaattaatgaccctacatcaatcctgcctagccatgacag

SEQ ID NO: 517955 - DNA, 55 bp, Artificial
  Synthetic oligonucleotide
atcttgcctcctcttagagcaagatagtacactaaccattgcgtccaccaatcac

SEQ ID NO: 517956 - DNA, 55 bp, Artificial
  Synthetic oligonucleotide
tgacggagtgccctactttcttgacctcaatcaaggcttgtgataaagcaatctg

SEQ ID NO: 517957 - DNA, 55 bp, Artificial
  Synthetic oligonucleotide
atgctcagcacctcctggggtcctgactggccagcaatccagtccctgtagtggg

SEQ ID NO: 517958 - DNA, 55 bp, Artificial
  Synthetic oligonucleotide
tgacaggttgagccaaacgaggtcaagaagaaataaccgatggatacctgtctgt

SEQ ID NO: 517959 - DNA, 55 bp, Artificial
  Synthetic oligonucleotide
atggttgatcattttcatctgggtgatgacatggatccagaacttagaggccttg

SEQ ID NO: 517960 - DNA, 55 bp, Artificial
  Synthetic oligonucleotide
attaaaataatattacgtattgttaaatacatggtgccagggttgggatcaatgc

SEQ ID NO: 517961 - DNA, 55 bp, Artificial
  Synthetic oligonucleotide
attatatatgtcatgctgctagtagaaaggatgtagtagtgcgcaagtgttacga

SEQ ID NO: 517962 - DNA, 55 bp, Artificial
  Synthetic oligonucleotide
tcttagctgtattgcattctacccctcagaatgtgatgcatcatggtgcattgca

SEQ ID NO: 517963 - DNA, 55 bp, Artificial
  Synthetic oligonucleotide
attctaccctttggttattgacatgcatagagtgctaaaggacggaatggatgtc

SEQ ID NO: 517964 - DNA, 55 bp, Artificial
  Synthetic oligonucleotide
tctgtagttctgccacaagtggtaagaaaagcacggagattcaattccactcagg

SEQ ID NO: 517965 - DNA, 55 bp, Artificial
  Synthetic oligonucleotide
tctcgagaatttcaaactgggccaatagatttgtcaataaagggttacggcagga

SEQ ID NO: 517966 - DNA, 55 bp, Artificial
  Synthetic oligonucleotide
atttagtgtctttactgggaaccaggatggaaatgtgatttatagtcctgggctg

SEQ ID NO: 517967 - DNA, 55 bp, Artificial
  Synthetic oligonucleotide
caaaataggttccgggctgctgaacaacaggttaactttgcatgccaaagggttg

SEQ ID NO: 517968 - DNA, 55 bp, Artificial
  Synthetic oligonucleotide
caaagacagatcgctgtctccagaaggttccagaatcatctttgtcaaagaaggg

SEQ ID NO: 517969 - DNA, 55 bp, Artificial
  Synthetic oligonucleotide
caaaggcagggagcccttgcaaagatggaaacaaaggaagctcaggctgtgagga

SEQ ID NO: 517970 - DNA, 55 bp, Artificial
  Synthetic oligonucleotide
caaagggatgagaattcgattcaaggatgacagctcatttgaagatgtgaatggg

SEQ ID NO: 517971 - DNA, 55 bp, Artificial
  Synthetic oligonucleotide
caacacactgcaagagcattcaacgaggtccctcctaagagtggggtactctccc

SEQ ID NO: 517972 - DNA, 55 bp, Artificial
  Synthetic oligonucleotide
gctacgtttaacccggaggtcgggtatgtggcatttattgctaaacatggggccc

SEQ ID NO: 517973 - DNA, 55 bp, Artificial
  Synthetic oligonucleotide
gccttaggtatggaaatgtccttgatgtgaatgctattgacatagaagaaccgag

SEQ ID NO: 517974 - DNA, 55 bp, Artificial
  Synthetic oligonucleotide
gcctgggctaccagacctagatgtgactgtcgatgccacaggtgtaacagtggac

SEQ ID NO: 517975 - DNA, 55 bp, Artificial
  Synthetic oligonucleotide
gcctctcatcctcaacatgtatcgttattacaagcatgggctggttcctcaggac

SEQ ID NO: 517976 - DNA, 55 bp, Artificial
  Synthetic oligonucleotide
gcctccctcgccttgtcagtgaggtggtacctagtcctcagctttgcgaaggcct

SEQ ID NO: 517977 - DNA, 55 bp, Artificial
  Synthetic oligonucleotide
gcctatgacagcacaactccaagtaaagtcattgagatctagatttgctttgcca

SEQ ID NO: 517978 - DNA, 55 bp, Artificial
  Synthetic oligonucleotide
ctcaaccagaagaaggccaagatggtcttacataagacggcacaaccaagtgtcg

SEQ ID NO: 517979 - DNA, 55 bp, Artificial
  Synthetic oligonucleotide
gccctcaacgattcattcaagaggaacctaagcagtaatgtggttcagtggtccc

SEQ ID NO: 517980 - DNA, 55 bp, Artificial
  Synthetic oligonucleotide
ctcaatcaaagcttgtgacaaggcaatatgctatggcgcacagagtagcaccctc

SEQ ID NO: 517981 - DNA, 55 bp, Artificial
  Synthetic oligonucleotide
ctccctggcgctgagacccctgtgcttcacgttgatggtgcgggagaactctacc

SEQ ID NO: 517982 - DNA, 55 bp, Artificial
  Synthetic oligonucleotide
ctccgttggacaacttgcttgggctaaatctggattctctcctgctgccagaact

SEQ ID NO: 517983 - DNA, 55 bp, Artificial
  Synthetic oligonucleotide
gccaatgacacagttgcattttaaatcctttctgctgatgcatgtttcttcattc

SEQ ID NO: 517984 - DNA, 55 bp, Artificial
  Synthetic oligonucleotide
ctgactattttagcaatagggcttgctgagagctgcgatgagatggtccatgctg

SEQ ID NO: 517985 - DNA, 55 bp, Artificial
  Synthetic oligonucleotide
gcattgggatcagttccatcccaaattttggtgcagtgtgtcagaagtttcactc

SEQ ID NO: 517986 - DNA, 55 bp, Artificial
  Synthetic oligonucleotide
gcattgccaatgagatctacaccaaggctagatctatggatgcagacattgagct

SEQ ID NO: 517987 - DNA, 55 bp, Artificial
  Synthetic oligonucleotide
ctgagtttgacattttccctgatgccttgacgatcttattgcctcgagtcagggc

SEQ ID NO: 517988 - DNA, 55 bp, Artificial
  Synthetic oligonucleotide
gcatgtaatatgatgaaaagttgtttaattgcactagggccttatagggtccagg

SEQ ID NO: 517989 - DNA, 55 bp, Artificial
  Synthetic oligonucleotide
ctggattgcgttgggtggcccttggagagacccaggcctctcatcctcaacatgt

SEQ ID NO: 517990 - DNA, 55 bp, Artificial
  Synthetic oligonucleotide
gcagggtgctcagattgtgttgaagaaatggcatgcgcattaaatatacaagcag

SEQ ID NO: 517991 - DNA, 55 bp, Artificial
  Synthetic oligonucleotide
gcagctacatttaacccggaggtcgggtatgtggcatttattggtaagtatgggc

SEQ ID NO: 517992 - DNA, 55 bp, Artificial
  Synthetic oligonucleotide
ctggtaggttcaggactatagtctgcggtttatttccaactcaaattcaagtacg

SEQ ID NO: 517993 - DNA, 55 bp, Artificial
  Synthetic oligonucleotide
cgtaggctggggctgtggcagtgggaagtctaggactgagtcaggagaactctgc

SEQ ID NO: 517994 - DNA, 55 bp, Artificial
  Synthetic oligonucleotide
ggaatataagtcttaaggggatgtcaggagcattgcaagaggatggtcatttggc

SEQ ID NO: 517995 - DNA, 55 bp, Artificial
  Synthetic oligonucleotide
ggaagtggctagtaatggccagtttagtctggccagcctttgcactaagaaatgt

SEQ ID NO: 517996 - DNA, 55 bp, Artificial
  Synthetic oligonucleotide
ggaaggtgaagctctagtcaattcaatggtacattcagatgataatcatacatcc

SEQ ID NO: 517997 - DNA, 55 bp, Artificial
  Synthetic oligonucleotide
ggaagcatctggactgcatggtgcgaattgcatctcagccattcagcctaatccc

SEQ ID NO: 517998 - DNA, 55 bp, Artificial
  Synthetic oligonucleotide
ggaaccgagtggtcaaacagcggactggtatacgattggggtctatgtcataggg

SEQ ID NO: 517999 - DNA, 55 bp, Artificial
  Synthetic oligonucleotide
ggaaatgggtagagaatccacatgggatcatctggaaagtgtctccatgtgccgc

SEQ ID NO: 518000 - DNA, 55 bp, Artificial
  Synthetic oligonucleotide
gctttcgctttagttcaagtatccatggcaggggctcgacgcagaaggctagcct

SEQ ID NO: 518001 - DNA, 55 bp, Artificial
  Synthetic oligonucleotide
gcttgagccttccctgggagagtaccccactcttaggagagacctcgtggaatgc

SEQ ID NO: 518002 - DNA, 55 bp, Artificial
  Synthetic oligonucleotide
cgttgccttctatacgccatctaggtgataagtttacccataaaagtgctggaga

SEQ ID NO: 518003 - DNA, 55 bp, Artificial
  Synthetic oligonucleotide
gcttataccggctagctatgcagcagtccagatgcaatctgcagggatttactct

SEQ ID NO: 518004 - DNA, 55 bp, Artificial
  Synthetic oligonucleotide
gcttagaatctatgcagatgtgcacatcaactaaaacagatcatgctagggagat

SEQ ID NO: 518005 - DNA, 55 bp, Artificial
  Synthetic oligonucleotide
gctggtttactatacactatttaaagcagattacagtaccagcaaggaaagccca

SEQ ID NO: 518006 - DNA, 55 bp, Artificial
  Synthetic oligonucleotide
gctgccatgatgaaaactatcattggcatcatactgtttggagaccagaatccaa

SEQ ID NO: 518007 - DNA, 55 bp, Artificial
  Synthetic oligonucleotide
gctgcaggaattctaaagcacgccttgtttctaaccctgactgggccttacacag

SEQ ID NO: 518008 - DNA, 55 bp, Artificial
  Synthetic oligonucleotide
gctgcagctaatagttttgctgagaattatagtcctactagccaagatatggacc

SEQ ID NO: 518009 - DNA, 55 bp, Artificial
  Synthetic oligonucleotide
gctgagacacagaatttgaatgcaggctggactgatacagcacacggatctggga

SEQ ID NO: 518010 - DNA, 55 bp, Artificial
  Synthetic oligonucleotide
gctcctcactgcattctcaggcattcctagctattcttcactcagcgtcttcact

SEQ ID NO: 518011 - DNA, 55 bp, Artificial
  Synthetic oligonucleotide
gctccacctggctatgtcgggtctatgaagaaggaattagtgtaatattccaatc

SEQ ID NO: 518012 - DNA, 55 bp, Artificial
  Synthetic oligonucleotide
ctaccagtcatatcttagaagaacacactctatgggaatacaactggatcagcgt

SEQ ID NO: 518013 - DNA, 55 bp, Artificial
  Synthetic oligonucleotide
gctcaggctgtgaggaaacatgccatagatgctggttgtaacatcattgaccaca

SEQ ID NO: 518014 - DNA, 55 bp, Artificial
  Synthetic oligonucleotide
ctactggggttttagcagcaaaggatgaccctgtgtatatttgggccccaggcat

SEQ ID NO: 518015 - DNA, 55 bp, Artificial
  Synthetic oligonucleotide
gctatgcattcagatctaccagctgctcagatatagtatgggacacaagctatcg

SEQ ID NO: 518016 - DNA, 55 bp, Artificial
  Synthetic oligonucleotide
gctagtgtttgccatcataaagaaactaatgagagctgtgagctgcctgatgggg

SEQ ID NO: 518017 - DNA, 55 bp, Artificial
  Synthetic oligonucleotide
gatacagatgtttccgacgaaaatgcattcaagctcctaaccttatccaccaggc

SEQ ID NO: 518018 - DNA, 55 bp, Artificial
  Synthetic oligonucleotide
gaaaggtactccgccaacgttatggtacattaactgcagagcaatggatgaccca

SEQ ID NO: 518019 - DNA, 55 bp, Artificial
  Synthetic oligonucleotide
gaaatccatgtggttgtgcgacactttgaccctgatcattatcaggcctgccttg

SEQ ID NO: 518020 - DNA, 55 bp, Artificial
  Synthetic oligonucleotide
gagtggggttgcttagcaattggggcaggctgcctatatggctcatgtcaagata

SEQ ID NO: 518021 - DNA, 55 bp, Artificial
  Synthetic oligonucleotide
gagtactgagcgaaatctgactcaggatgtcagcaagcaaaagccatctatccat

SEQ ID NO: 518022 - DNA, 55 bp, Artificial
  Synthetic oligonucleotide
gaggtggttatcatacgggcagacccaatacgtgaaatggtgcatgttgacagct

SEQ ID NO: 518023 - DNA, 55 bp, Artificial
  Synthetic oligonucleotide
gaggtccactcttgaactttccatcaactcctaacaaggttgcactttccacagc

SEQ ID NO: 518024 - DNA, 55 bp, Artificial
  Synthetic oligonucleotide
gagggagcacaaaaccaaatgggttcaagagagctcatctaaggattttgtgtgc

SEQ ID NO: 518025 - DNA, 55 bp, Artificial
  Synthetic oligonucleotide
gaggcgtctcggatacgtaagaccaataaatggataccagtttgccctattgcta

SEQ ID NO: 518026 - DNA, 55 bp, Artificial
  Synthetic oligonucleotide
gagcaaagccagaggatttggtcgcagataagtggtttggatttacccgaacaag

SEQ ID NO: 518027 - DNA, 55 bp, Artificial
  Synthetic oligonucleotide
gagacatcatagactctatagccagcctagatctagagaggttgtcaaccttgaa

SEQ ID NO: 518028 - DNA, 55 bp, Artificial
  Synthetic oligonucleotide
gagaagctgaggaagaaatcctcattttatcaatcttaccttcgaaggacacagt

SEQ ID NO: 518029 - DNA, 55 bp, Artificial
  Synthetic oligonucleotide
gaacgggaagctttacataatagattacaaggtttctgtcgatgctacatacggt

SEQ ID NO: 518030 - DNA, 55 bp, Artificial
  Synthetic oligonucleotide
gactattgggacatcagaggagaagttgcggaagaaatcctctttctaccagtca

SEQ ID NO: 518031 - DNA, 55 bp, Artificial
  Synthetic oligonucleotide
gacggcacaaccaagtgttgatcttacatttggtggcatcaagtttacactggtt

SEQ ID NO: 518032 - DNA, 55 bp, Artificial
  Synthetic oligonucleotide
gacggcacaaccaaatgttgatcttacttttggaggggtcaaatttacactggtt

SEQ ID NO: 518033 - DNA, 55 bp, Artificial
  Synthetic oligonucleotide
gaactagggtcagctgaattcagaatgaagtactttgatcccacagaaaggactc

SEQ ID NO: 518034 - DNA, 55 bp, Artificial
  Synthetic oligonucleotide
gaagccaagatgtgcctatacctagttgagcgtatttcaaaggaaaggtgccgct

SEQ ID NO: 518035 - DNA, 55 bp, Artificial
  Synthetic oligonucleotide
gaccagacaattggtgtagatgtacatgccttaggccattggtttgatggccgcc

SEQ ID NO: 518036 - DNA, 55 bp, Artificial
  Synthetic oligonucleotide
gaatcatggggatgtctagctattgggacagggtgtgtttatggttcttgtcagg

SEQ ID NO: 518037 - DNA, 55 bp, Artificial
  Synthetic oligonucleotide
gacaggcctgggctaccagacctagatgtgactgtcgatgccacgggtgtgacag

SEQ ID NO: 518038 - DNA, 55 bp, Artificial
  Synthetic oligonucleotide
gacacagtacagggtattgcattttcaggtagccctctttatacatctactgggg

SEQ ID NO: 518039 - DNA, 55 bp, Artificial
  Synthetic oligonucleotide
gcagcaaaggatgaccctgtgtatatttgggccccaggcattatcatggaaggga

SEQ ID NO: 518040 - DNA, 55 bp, Artificial
  Synthetic oligonucleotide
gcagacatatcatagcactgtgcccacaggagcaaatatcccaagcccaacagac

SEQ ID NO: 518041 - DNA, 55 bp, Artificial
  Synthetic oligonucleotide
ctgtagtgggccgaagcccttttagtagccaattgaacacttttaaattttagcc

SEQ ID NO: 518042 - DNA, 55 bp, Artificial
  Synthetic oligonucleotide
gcaatgtctttattatctccagtttatagttcaccatgtttgcaaccagaagagc

SEQ ID NO: 518043 - DNA, 55 bp, Artificial
  Synthetic oligonucleotide
gcaagctgcactgaagctagatatccatttaggaaaagactttgtactcaaacgg

SEQ ID NO: 518044 - DNA, 55 bp, Artificial
  Synthetic oligonucleotide
gcaagcgacttcacagccaggtaaggaagcaaggagagagaggttgcctcctaga

SEQ ID NO: 518045 - DNA, 55 bp, Artificial
  Synthetic oligonucleotide
gcaaagaaatgtggttcagttcagaaggttgatggccttatttcaggtataggca

SEQ ID NO: 518046 - DNA, 55 bp, Artificial
  Synthetic oligonucleotide
cttaagcttttaagatacatgacattagactcaaccatgtcatctgatgacggga

SEQ ID NO: 518047 - DNA, 55 bp, Artificial
  Synthetic oligonucleotide
cttcctagtacaacatgtctatgtgttgtacgccatttcagcagcttgtatcttc

SEQ ID NO: 518048 - DNA, 55 bp, Artificial
  Synthetic oligonucleotide
cttcgggtggtcagctaattacctttcaggtgatttggtggtcagaaagtaatct

SEQ ID NO: 518049 - DNA, 55 bp, Artificial
  Synthetic oligonucleotide
cttctgaaccggtactaagagcaaatactgtaggagaaagtcctatcacatcatg

SEQ ID NO: 518050 - DNA, 55 bp, Artificial
  Synthetic oligonucleotide
cttctttgaacggccaacttttgatggatacgttggctggggctgtggtagtggg

SEQ ID NO: 518051 - DNA, 55 bp, Artificial
  Synthetic oligonucleotide
cttgcacttggcgtgaattaacgcataatacagttagccaaactaaagttgtcca

SEQ ID NO: 518052 - DNA, 55 bp, Artificial
  Synthetic oligonucleotide
gatggccaaatgctgtggaagaatctttcaaattggctatgttacccttcatgat

SEQ ID NO: 518053 - DNA, 55 bp, Artificial
  Synthetic oligonucleotide
gatggcaagacccagacgggtaaggcattggatgtactcacctgtcatcctgacc

SEQ ID NO: 518054 - DNA, 55 bp, Artificial
  Synthetic oligonucleotide
gatgatggaaccgattggtttctgtatgtctcacagcagattcaagccgggcaac

SEQ ID NO: 518055 - DNA, 55 bp, Artificial
  Synthetic oligonucleotide
gatgaagtcagatgtggtggatgttatggttgcccagaaggaatggcctgttcgc

SEQ ID NO: 518056 - DNA, 55 bp, Artificial
  Synthetic oligonucleotide
gatctgtatgagagctctgccgattcctactattgatcgactcctggatcgcatc

SEQ ID NO: 518057 - DNA, 55 bp, Artificial
  Synthetic oligonucleotide
cttgccacagagagtaggcctccatcagggtcttggttgtggcttcagatacccc

SEQ ID NO: 518058 - DNA, 55 bp, Artificial
  Synthetic oligonucleotide
cttgggctaaatctggcttctcccctgctgctagagccttcctgcagcagtttgg

SEQ ID NO: 518059 - DNA, 55 bp, Artificial
  Synthetic oligonucleotide
cttgttcaatgatgacgtccgccacagcaaccagactttgacaccaggtttggcc

SEQ ID NO: 518060 - DNA, 55 bp, Artificial
  Synthetic oligonucleotide
ctttggcagtcaaagactatctggcagatgatggacagtggaaggtttcctaagg

SEQ ID NO: 518061 - DNA, 55 bp, Artificial
  Synthetic oligonucleotide
gggctgcctctaatatgggaaggttacattgacttgccaggttactatgaaacag

SEQ ID NO: 518062 - DNA, 55 bp, Artificial
  Synthetic oligonucleotide
gggctgatcagaccagcaaaggcgttgtgcatcatcacagcggggtatccagggc

SEQ ID NO: 518063 - DNA, 55 bp, Artificial
  Synthetic oligonucleotide
cctctcctgtttatgcaccctcaactactgattttaggtcagtggaggcacttgc

SEQ ID NO: 518064 - DNA, 55 bp, Artificial
  Synthetic oligonucleotide
gggcgctccttcctgcggtgaacccaggacaagaggcatgtctgcacttcacagc

SEQ ID NO: 518065 - DNA, 55 bp, Artificial
  Synthetic oligonucleotide
cctggattgtttcctaaactgaaccaatcatcatgtgataaggttgggctgcctc

SEQ ID NO: 518066 - DNA, 55 bp, Artificial
  Synthetic oligonucleotide
cctggggtcctgactggccagcaatccagtccctgtagtgggccgaagccctttt

SEQ ID NO: 518067 - DNA, 55 bp, Artificial
  Synthetic oligonucleotide
gggcaggtaagatggacagggctggtctagggttcagtggctgctctgatggatg

SEQ ID NO: 518068 - DNA, 55 bp, Artificial
  Synthetic oligonucleotide
ccttgcccaatttggcataaacatctaaattcctgtaaaaccccaccccttcccc

SEQ ID NO: 518069 - DNA, 55 bp, Artificial
  Synthetic oligonucleotide
cctttccggcacactccgcaatccttctcaggatcaccgcagcatcaaagccttg

SEQ ID NO: 518070 - DNA, 55 bp, Artificial
  Synthetic oligonucleotide
gggagttacagaaaatccaaactagctataggctaagaaaaccgatgacgggaga

SEQ ID NO: 518071 - DNA, 55 bp, Artificial
  Synthetic oligonucleotide
gggaggcaagtgatccatgaggagataggggagaatagagtgggcaaccaagatg

SEQ ID NO: 518072 - DNA, 55 bp, Artificial
  Synthetic oligonucleotide
gggactgccagaaacctaaatgagcttaagatagaatgtccacatactattgggt

SEQ ID NO: 518073 - DNA, 55 bp, Artificial
  Synthetic oligonucleotide
gggaaaatgttttgttcctgaccagagtgttgtcagtatcatcaagcatgggatc

SEQ ID NO: 518074 - DNA, 55 bp, Artificial
  Synthetic oligonucleotide
ggctttgcaccaggcgcagaaatgttccttgaaacatttgagttctaccctttag

SEQ ID NO: 518075 - DNA, 55 bp, Artificial
  Synthetic oligonucleotide
cgaccatggctccttcatgatattagatatcgataacaccggcacattaatccct

SEQ ID NO: 518076 - DNA, 55 bp, Artificial
  Synthetic oligonucleotide
ggcttaggccaggctacagtgtcaatccattagaatagagtcagagcataggcgt

SEQ ID NO: 518077 - DNA, 55 bp, Artificial
  Synthetic oligonucleotide
ggctatctgtgggtattggttacgtaccatgtctcttgtcaagacaataagggtc

SEQ ID NO: 518078 - DNA, 55 bp, Artificial
  Synthetic oligonucleotide
ggctaggtgtgtctgtgaactgagcccacatgagactgttgccaaccctaggctc

SEQ ID NO: 518079 - DNA, 55 bp, Artificial
  Synthetic oligonucleotide
ggcgtcagcaatgtatcaactgccatccgtgataacttcttcccaagattcgtgc

SEQ ID NO: 518080 - DNA, 55 bp, Artificial
  Synthetic oligonucleotide
ggcgcattcagagcactgggcatgcttatggacttttctgagaacacagccttat

SEQ ID NO: 518081 - DNA, 55 bp, Artificial
  Synthetic oligonucleotide
ggcctagcagaagaaatgatggtgttgtacagtatatgaggttagttcaggctga

SEQ ID NO: 518082 - DNA, 55 bp, Artificial
  Synthetic oligonucleotide
ggccgccttaatcttgagacatccttccactgttatggtgcatgtacaaaatatg

SEQ ID NO: 518083 - DNA, 55 bp, Artificial
  Synthetic oligonucleotide
ggtctatccccaattctggatgtggctctcctccagatagaatcacttgcaaggc

SEQ ID NO: 518084 - DNA, 55 bp, Artificial
  Synthetic oligonucleotide
ccgagttgatgtcacgtctaataacattgcctcatgctcagtagagagtacatgc

SEQ ID NO: 518085 - DNA, 55 bp, Artificial
  Synthetic oligonucleotide
ggtcggtatgggcaacaacttaacttcagtgttgttagagtcttcttcctcaacc

SEQ ID NO: 518086 - DNA, 55 bp, Artificial
  Synthetic oligonucleotide
ggtcgggaaaacagcgatacacgtcaaaggggcattggtagatgggactgaattc

SEQ ID NO: 518087 - DNA, 55 bp, Artificial
  Synthetic oligonucleotide
ggtcaagatcgctacttacccctagaaagttcaccacccaagcatcactagcccg

SEQ ID NO: 518088 - DNA, 55 bp, Artificial
  Synthetic oligonucleotide
ccggaagcaggatacaccacatattatcaggttacgcccagcctagtgaaggatg

SEQ ID NO: 518089 - DNA, 55 bp, Artificial
  Synthetic oligonucleotide
ggtagtgagaaagactatgcagtggcatctgctaaagcccatcggatgttcaagg

SEQ ID NO: 518090 - DNA, 55 bp, Artificial
  Synthetic oligonucleotide
ccgtgcaatatgtctatgtattgcacaccattatactgcaaggcttctgttaaga

SEQ ID NO: 518091 - DNA, 55 bp, Artificial
  Synthetic oligonucleotide
gggttgtaatccagctgactgccctggtattggtacaggttgtacagcatgtggc

SEQ ID NO: 518092 - DNA, 55 bp, Artificial
  Synthetic oligonucleotide
gggtccaggttgtttatgaaagaacctactgcatgacaggagttttaattgaggg

SEQ ID NO: 518093 - DNA, 55 bp, Artificial
  Synthetic oligonucleotide
gggtcaaggccttgttgtaggatcagtggaactgccacctgtcccaatacagcag

SEQ ID NO: 518094 - DNA, 55 bp, Artificial
  Synthetic oligonucleotide
ggggttcaggggttgggttcactttaacatgccaggtttctttaactgaatgctc

SEQ ID NO: 518095 - DNA, 55 bp, Artificial
  Synthetic oligonucleotide
ggggtcatgtggtacattgatgctgtaggtcaggcatggaaggcagttctagatg

SEQ ID NO: 518096 - DNA, 55 bp, Artificial
  Synthetic oligonucleotide
cctagggtgatggttgggtctgtactatgtcttgcagataggcactgtttgcagg

SEQ ID NO: 518097 - DNA, 55 bp, Artificial
  Synthetic oligonucleotide
ggggcctcttccacaggataacaaaaggccggaggtatctttttgaaggggacat

SEQ ID NO: 518098 - DNA, 55 bp, Artificial
  Synthetic oligonucleotide
cctctactaatctcaaccattattctattactgggacaactattgcatctgggtg

SEQ ID NO: 518099 - DNA, 55 bp, Artificial
  Synthetic oligonucleotide
ggggaatctttaacataacttctccaatgtgtctagtgtcaaagcagaatcgctt

SEQ ID NO: 518100 - DNA, 55 bp, Artificial
  Synthetic oligonucleotide
gggcttttctgtcatggagaattctctggcttggctaattctggatgaagggatc

SEQ ID NO: 518101 - DNA, 55 bp, Artificial
  Synthetic oligonucleotide
gggctggttcctcaggacaaacttgctgccatgatgaaaactatcattggcatca

SEQ ID NO: 518102 - DNA, 55 bp, Artificial
  Synthetic oligonucleotide
gggctgctagtgctgagacacaaaatttgaatgcaggctggactgatacagcaca

SEQ ID NO: 518103 - DNA, 55 bp, Artificial
  Synthetic oligonucleotide
ggcaatataattgctaaggtctatgcatgcagggcaacatgtgagatcacaactg

SEQ ID NO: 518104 - DNA, 55 bp, Artificial
  Synthetic oligonucleotide
cgattcaaggatgacagctcatttgaagatgtgaatgggatccggaagccaaagc

SEQ ID NO: 518105 - DNA, 55 bp, Artificial
  Synthetic oligonucleotide
ggattcgcacctggggcagaaatgttccttgatgcttttgacttctacccactgg

SEQ ID NO: 518106 - DNA, 55 bp, Artificial
  Synthetic oligonucleotide
ggatgtcgggatatctagcgcgatgggttgctgacacatgcaaggctagtgtcct

SEQ ID NO: 518107 - DNA, 55 bp, Artificial
  Synthetic oligonucleotide
ggatgtacctcaacggaacttatctacatttagtccggaggcagggtatgtggca

SEQ ID NO: 518108 - DNA, 55 bp, Artificial
  Synthetic oligonucleotide
ggatgaggatgatgagcctggggccctacaaggttaccctcatctgatggcacac

SEQ ID NO: 518109 - DNA, 55 bp, Artificial
  Synthetic oligonucleotide
cgcatgatttgaacctattgttggatgcaataaagtatgctgttccaggcctagg

SEQ ID NO: 518110 - DNA, 55 bp, Artificial; identical to SEQ ID NO: 421438
  Synthetic oligonucleotide

SEQ ID NO: 518111 - DNA, 55 bp, Artificial
  Synthetic oligonucleotide
ggatcaaaagtacaagaaaggagctcctcttgcttctgtgatgtattcttggtgc

SEQ ID NO: 518112 - DNA, 55 bp, Artificial
  Synthetic oligonucleotide
cgccaattctgctgcttgtgagatctaagcacagtggggcatttatcttcccttg

SEQ ID NO: 518113 - DNA, 55 bp, Artificial
  Synthetic oligonucleotide
cggaaagctcttcgccagaggtatgggctgcttactgcagaacaatggatgactc

SEQ ID NO: 518114 - DNA, 55 bp, Artificial
  Synthetic oligonucleotide
ggagaatttgagaaagtcattaacagtatacgagcccatgcagggttgttatcgc

SEQ ID NO: 518115 - DNA, 55 bp, Artificial
  Synthetic oligonucleotide
cggatctgggataatacctatgaaaactgatcttgaattggacttctctcttcct

SEQ ID NO: 518116 - DNA, 55 bp, Artificial
  Synthetic oligonucleotide
cggccttttgttatcctgtggaagaggccccgccagttctctctcccagtttcca

SEQ ID NO: 518117 - DNA, 55 bp, Artificial
  Synthetic oligonucleotide
cggggcaacccttaggaatgtctatgacatgaggatagaatgcccacattctgtc

SEQ ID NO: 518118 - DNA, 55 bp, Artificial
  Synthetic oligonucleotide
ggacaggaatgattgaccttcccggatactatgaagctgtacatccttgcacagt

SEQ ID NO: 518119 - DNA, 55 bp, Artificial
  Synthetic oligonucleotide
ggacaggaagaagtatcaggccttattgaacaggatgggtcttcctgaggactgg

SEQ ID NO: 518120 - DNA, 55 bp, Artificial
  Synthetic oligonucleotide
ggacagcttgcctgggctaaatctggattctctcctgctgctagaactttcttgc

SEQ ID NO: 518121 - DNA, 55 bp, Artificial
  Synthetic oligonucleotide
ggacacaaccaactctggaacttttgttcaatctaccatcattcgatttggtgac

SEQ ID NO: 518122 - DNA, 55 bp, Artificial
  Synthetic oligonucleotide
ggccagacctgcctgaagtgcagagtcattggcagacatcacctccctggcgctg

SEQ ID NO: 518123 - DNA, 54 bp, Artificial
  Synthetic oligonucleotide
cctactatagcgatagcaggtttagaatcagacaatttgagctacttagtcaga

SEQ ID NO: 518124 - DNA, 54 bp, Artificial
  Synthetic oligonucleotide
cactagaggctctagatgcttcttaaatggagagttggttaagactgtcaacac

SEQ ID NO: 518125 - DNA, 54 bp, Artificial
  Synthetic oligonucleotide
ttacaggaggcctcgggatggggatgaggttgctctaaggatagcagagaagat

SEQ ID NO: 518126 - DNA, 54 bp, Artificial
  Synthetic oligonucleotide
tctatcctaccggaactaatgatcgagtccatatgtacaaacatggaactgata

SEQ ID NO: 518127 - DNA, 54 bp, Artificial
  Synthetic oligonucleotide
tgaatcctcttaccgatgtaagatagcttctaactgcatatcatacattgagaa

SEQ ID NO: 518128 - DNA, 54 bp, Artificial
  Synthetic oligonucleotide
cctgccacctggtactgcttttgatgtccgcaattgcacaccggacaacttcat

SEQ ID NO: 518129 - DNA, 54 bp, Artificial
  Synthetic oligonucleotide
gaccttgcatctatgaaggctacaagcaacttttctaaagactgggagctctac

SEQ ID NO: 518130 - DNA, 54 bp, Artificial
  Synthetic oligonucleotide
agcacaatgagatttgtactggtacatgcccgaaaacaattcctggagaaaaga

SEQ ID NO: 518131 - DNA, 54 bp, Artificial
  Synthetic oligonucleotide
gggcagccactttactagaaggagaggtcttagtcaattctatggtccattctg

SEQ ID NO: 518132 - DNA, 54 bp, Artificial
  Synthetic oligonucleotide
gctcagcatatttggttaaagcagcatgccctcttcttgttggtgtcatctcct

SEQ ID NO: 518133 - DNA, 54 bp, Artificial
  Synthetic oligonucleotide
agcgagatctgaagtttgaagtgcaagagttgactaaattttatcagatctgtt

SEQ ID NO: 518134 - DNA, 54 bp, Artificial
  Synthetic oligonucleotide
gacccagatgacgttaacaagaacacattacaagcaaggcaacaaacagtgtca

SEQ ID NO: 518135 - DNA, 54 bp, Artificial
  Synthetic oligonucleotide
cgatgtgtcttaaagcaggaggagtgtaaatctacaacgagcgaccatgctcag

SEQ ID NO: 518136 - DNA, 54 bp, Artificial
  Synthetic oligonucleotide
atagcaattgcaggtttggaatcaggtaatttggaatacttagttgggttatct

SEQ ID NO: 518137 - DNA, 53 bp, Artificial
  Synthetic oligonucleotide
acaacctcatcaggtttgatgaggagctgagaactgcagccctgaacaccatc

SEQ ID NO: 518138 - DNA, 53 bp, Artificial
  Synthetic oligonucleotide
ggagcaaatattgaagacttagttgactattctaaagaatggctgtccagagc

SEQ ID NO: 518139 - DNA, 53 bp, Artificial
  Synthetic oligonucleotide
gtatgcgcagaaaataaaggcctgacaatccataagggttctaagaaatgcct

SEQ ID NO: 518140 - DNA, 53 bp, Artificial
  Synthetic oligonucleotide
gtacgggagctaaaaaggtaatatgctttagccctcggggtgtgagtcagcca

SEQ ID NO: 518141 - DNA, 53 bp, Artificial
  Synthetic oligonucleotide
cgctgagacccctgtgcttcacgttgatggtgcgggagaactctaccaagtag

SEQ ID NO: 518142 - DNA, 53 bp, Artificial
  Synthetic oligonucleotide
ggcatgagtcgacacatggcacaactagccaaactaaggttgtccacaatgat

SEQ ID NO: 518143 - DNA, 53 bp, Artificial
  Synthetic oligonucleotide
ctgagattatgtatagaagtttggcgctggtgtaaagcaaataatgcacctta

SEQ ID NO: 518144 - DNA, 53 bp, Artificial
  Synthetic oligonucleotide
aatcgtaccgatagtataagcataataagtactaacatgcagatatacacata

SEQ ID NO: 518145 - DNA, 53 bp, Artificial
  Synthetic oligonucleotide
ggggcacttgaaaaagcacttagatgggcatcaggtgaaagctttatcgaact

SEQ ID NO: 518146 - DNA, 53 bp, Artificial
  Synthetic oligonucleotide
tacagattgcctatgagtgctttagattgatcactcattttgcagatatgttc

SEQ ID NO: 518147 - DNA, 53 bp, Artificial
  Synthetic oligonucleotide
attcaacttaatccctagggaggggagggtagagtggggaggaacattccatg

SEQ ID NO: 518148 - DNA, 53 bp, Artificial
  Synthetic oligonucleotide
ttgttgataagagcacccatatcagcaattggaagagtgatgtcctagtcggc

SEQ ID NO: 518149 - DNA, 53 bp, Artificial
  Synthetic oligonucleotide
tcgaaggcccgccaatacagtttggaggcattgatctgtcacgacttatggca

SEQ ID NO: 518150 - DNA, 53 bp, Artificial
  Synthetic oligonucleotide
atggtgcctggggttctggggttggttttactcttacttgccagatctcactg

SEQ ID NO: 518151 - DNA, 53 bp, Artificial
  Synthetic oligonucleotide
gacattagattcgacaatgtcttctgatgatggaatgggtgaaactagtgaga

SEQ ID NO: 518152 - DNA, 53 bp, Artificial
  Synthetic oligonucleotide
ggtgcacaaagtgttacacttgttagagggcaaaataccgtgagggtttccgg

SEQ ID NO: 518153 - DNA, 53 bp, Artificial
  Synthetic oligonucleotide
aagagagaagatgttgctcattctggctcaatacattcaactttccaatcagg

SEQ ID NO: 518154 - DNA, 53 bp, Artificial
  Synthetic oligonucleotide
agtctaccccagccctttgatattgcatggatggatgttggccactctcataa

SEQ ID NO: 518155 - DNA, 53 bp, Artificial
  Synthetic oligonucleotide
gcctatttggcttttacactcccacttaaggaaggcactagaggatctaggtg

SEQ ID NO: 518156 - DNA, 53 bp, Artificial
  Synthetic oligonucleotide
gcacactatttaaacaggtgcccatttcacaacctcatcaggtttgatgagga

SEQ ID NO: 518157 - DNA, 53 bp, Artificial
  Synthetic oligonucleotide
ataatgtcacattcattagacaaggcaatagagtatgcaactgagcggaaaat

SEQ ID NO: 518158 - DNA, 53 bp, Artificial
  Synthetic oligonucleotide
ctgtgagctgcctgatggggaaattgatggatagggggaggcaagtgatccat

SEQ ID NO: 518159 - DNA, 53 bp, Artificial
  Synthetic oligonucleotide
cgaaagagcgctgtaaactcaatccggatgaaatgattagtgaacctggagat

SEQ ID NO: 518160 - DNA, 52 bp, Artificial
  Synthetic oligonucleotide
tagcagtatctcaatacaataggcacaacacattccgtgtagtatgttgtgc

SEQ ID NO: 518161 - DNA, 52 bp, Artificial
  Synthetic oligonucleotide
aaggcttatcaaaagctgggtctctaaaggtttatccatagacaaaatatac

SEQ ID NO: 518162 - DNA, 52 bp, Artificial
  Synthetic oligonucleotide
atttaaatctgggtctaagtttgttagcatctcaaaagggatgaggctggac

SEQ ID NO: 518163 - DNA, 52 bp, Artificial
  Synthetic oligonucleotide
gaagaatggggttgtttagcaataaatgatggttgcttatatggctcgtgtc

SEQ ID NO: 518164 - DNA, 52 bp, Artificial
  Synthetic oligonucleotide
tgattatacaaccatccatgataagctattcggtatacaagatgatccaaac

SEQ ID NO: 518165 - DNA, 52 bp, Artificial
  Synthetic oligonucleotide
catctataactaagcaaaacccaaagattagtcttgcaagtctagatgaatc

SEQ ID NO: 518166 - DNA, 52 bp, Artificial
  Synthetic oligonucleotide
gcaccttggttattcaatatgggatacattactcagccagtcttcgaatttg

SEQ ID NO: 518167 - DNA, 52 bp, Artificial
  Synthetic oligonucleotide
ttttacaatgtgggtctttctcttagtcttagagtcaatcctttgggctgcc

SEQ ID NO: 518168 - DNA, 52 bp, Artificial
  Synthetic oligonucleotide
tttcaactacacggaatctgaactttcgaggcatgatctgtttggtaaggtt

SEQ ID NO: 518169 - DNA, 52 bp, Artificial
  Synthetic oligonucleotide
gaattcattgagcagctattgcaggtagaagcacaaaaaggtaaccgtcaat

SEQ ID NO: 518170 - DNA, 52 bp, Artificial
  Synthetic oligonucleotide
gcttttgttttgttcaatatgccacttcaaagtggccactcacagggctata

SEQ ID NO: 518171 - DNA, 51 bp, Artificial
  Synthetic oligonucleotide
gtcaaaaaaagcgcaaatagcttctagtatagacttagaggtccaaactgg

SEQ ID NO: 518172 - DNA, 51 bp, Artificial
  Synthetic oligonucleotide
ccctgctatccccggtctatagctcaccatgcttacagccagaagacttaa

SEQ ID NO: 518173 - DNA, 51 bp, Artificial
  Synthetic oligonucleotide
gttcgaagtgatatagtgtcacggcatgggcaggctctattaaataagccc

SEQ ID NO: 518174 - DNA, 51 bp, Artificial
  Synthetic oligonucleotide
gggttttccctccaaattggcttgaccaacttgtgggagaataatctcctc

SEQ ID NO: 518175 - DNA, 51 bp, Artificial
  Synthetic oligonucleotide
aagtatcaagggagttcacaactggtccaatagacctatcgataaagggct

SEQ ID NO: 518176 - DNA, 51 bp, Artificial
  Synthetic oligonucleotide
ggaagctcaggctgtaaggaagcatgccatagatgctggttgtaaccttgt

SEQ ID NO: 518177 - DNA, 51 bp, Artificial
  Synthetic oligonucleotide
gacccttgctagaacttacactttaggattgtgcaaccaacatccacataa

SEQ ID NO: 518178 - DNA, 51 bp, Artificial
  Synthetic oligonucleotide
gttcgtgtccctattgtcttaacccgtctgaggcaacaacatctgcccttc

SEQ ID NO: 518179 - DNA, 51 bp, Artificial
  Synthetic oligonucleotide
caacaacttgttgttgccagacaaaagctcaaggatgcagaaaaggcggtg

SEQ ID NO: 518180 - DNA, 51 bp, Artificial
  Synthetic oligonucleotide
gtttctaggcatggccaagcattactaaataaaccccacggtttgaaacta

SEQ ID NO: 518181 - DNA, 51 bp, Artificial
  Synthetic oligonucleotide
tcctactattgggataaatgccaaacacgaagaagtttgcactgggaagtg

SEQ ID NO: 518182 - DNA, 51 bp, Artificial
  Synthetic oligonucleotide
agttgcccgcttgagagttaaccggataaaggatagcgtccattctttgga

SEQ ID NO: 518183 - DNA, 51 bp, Artificial
  Synthetic oligonucleotide
agggacccagtctcaaggcgtgttgatatcatggggaacccgagggtcttc

SEQ ID NO: 518184 - DNA, 51 bp, Artificial
  Synthetic oligonucleotide
ctgaacattgcatctaccagccacatggaagtgcataagaaggttacaagt

SEQ ID NO: 518185 - DNA, 51 bp, Artificial
  Synthetic oligonucleotide
gtgaaccaccctgcagcttacttgcaagtcaagcatgctgatacacctatc

SEQ ID NO: 518186 - DNA, 51 bp, Artificial
  Synthetic oligonucleotide
tgggtcattgacagcagtagagtgcatagactacctggatcgtctctatgc

SEQ ID NO: 518187 - DNA, 51 bp, Artificial
  Synthetic oligonucleotide
tggtctactaaacagttcattacctagtatagcaatagcaggcttagaagc

SEQ ID NO: 518188 - DNA, 51 bp, Artificial
  Synthetic oligonucleotide
tacaagctgattacagtccgttatagccgcaaagtctgtgtccagtttgga

SEQ ID NO: 518189 - DNA, 51 bp, Artificial
  Synthetic oligonucleotide
gctgcaagggaatctcaattatacaagtagctacctgcattcatgttctat

SEQ ID NO: 518190 - DNA, 51 bp, Artificial
  Synthetic oligonucleotide
agaatcccaccctttcccccagtatggtgtttcaaaacaccatacgccatt

SEQ ID NO: 518191 - DNA, 51 bp, Artificial
  Synthetic oligonucleotide
gatgctgttgactgcagatctagcatcattgacccttcattgatactgtca

SEQ ID NO: 518192 - DNA, 51 bp, Artificial
  Synthetic oligonucleotide
gagtccctaagactctatccatgcagctgtctcgtttctcttaccacacag

SEQ ID NO: 518193 - DNA, 51 bp, Artificial
  Synthetic oligonucleotide
actttagtgcattagatcccatcttgttgtcttagaaggtcactatgtata

SEQ ID NO: 518194 - DNA, 51 bp, Artificial
  Synthetic oligonucleotide
gccccacatatgctgcattaaccgcttaaactggaatcattatactactaa

SEQ ID NO: 518195 - DNA, 51 bp, Artificial
  Synthetic oligonucleotide
ggcacccatatatgtaccaacactggatgattttaggtcgatggaagcatt

SEQ ID NO: 518196 - DNA, 51 bp, Artificial
  Synthetic oligonucleotide
ggggcaatagcagccgaatctatgttcattgtctgaagtatataaacgttt

SEQ ID NO: 518197 - DNA, 51 bp, Artificial
  Synthetic oligonucleotide
cccagaatcagctatcaaaggtaagatccatgattctcagtgttttaaagg

SEQ ID NO: 518198 - DNA, 50 bp, Artificial
  Synthetic oligonucleotide
atccggcaccgagcagagatcaaatctcagaaggttggaatgatatgtat

SEQ ID NO: 518199 - DNA, 50 bp, Artificial
  Synthetic oligonucleotide
aaaagatgggtgcatatggaatgcagaccttgtgggcatagagctacgag

SEQ ID NO: 518200 - DNA, 50 bp, Artificial
  Synthetic oligonucleotide
ggcgattcttattgacatcagttggggattgtgcatatttagggccttat

SEQ ID NO: 518201 - DNA, 50 bp, Artificial
  Synthetic oligonucleotide
atgctatgacctttcttgtaattcaacacactgtaagccgactatgcaca

SEQ ID NO: 518202 - DNA, 50 bp, Artificial
  Synthetic oligonucleotide
agtgatgccaggctgtatgacgtcattgaatccatccgaaggttatgtga

SEQ ID NO: 518203 - DNA, 50 bp, Artificial
  Synthetic oligonucleotide
tcccttccttccagttcgaaatacacatataagaggaagttaacaagtcc

SEQ ID NO: 518204 - DNA, 50 bp, Artificial
  Synthetic oligonucleotide
ttcaagagagtttactactgggccaatcgatctatcaataaaaggttatg

SEQ ID NO: 518205 - DNA, 50 bp, Artificial
  Synthetic oligonucleotide
ctgaagacaagggcttggttgctcatactgcaagagaaagctgtaaatac

SEQ ID NO: 518206 - DNA, 50 bp, Artificial
  Synthetic oligonucleotide
cattgcaagaggatggtcatttggctgcaagtgttactcttattgaggca

SEQ ID NO: 518207 - DNA, 50 bp, Artificial
  Synthetic oligonucleotide
ctgtgggatgtcttacaattccacagaagctctgagagtccatcgccaat

SEQ ID NO: 518208 - DNA, 50 bp, Artificial
  Synthetic oligonucleotide
cacttgcgaaggcattaaatatggacacatcaagacataactatatacgg

SEQ ID NO: 518209 - DNA, 50 bp, Artificial
  Synthetic oligonucleotide
tatttcgtctcgaaactcaaggagggctacatgggggaaagcatcagtgg

SEQ ID NO: 518210 - DNA, 50 bp, Artificial
  Synthetic oligonucleotide
ctaattttgtcgaattggatcatggaatttagcctaattggatatatcaa

SEQ ID NO: 518211 - DNA, 50 bp, Artificial
  Synthetic oligonucleotide
tctgcgatcatgatcagcatacgccccaagtcagacatggatgaagtccg

SEQ ID NO: 518212 - DNA, 50 bp, Artificial
  Synthetic oligonucleotide
gagagatgccaacgcatagttagctcaccaggactcttcatgctgacaac

SEQ ID NO: 518213 - DNA, 50 bp, Artificial
  Synthetic oligonucleotide
ctgaaacgatctatcaccactatatctacttttaccagttcgaaatcttg

SEQ ID NO: 518214 - DNA, 60 bp, Artificial
  Synthetic oligonucleotide
cccaccatgtgcagaaaaacacccattggaatggtgaagcatttacaggacccttggccg

SEQ ID NO: 518215 - DNA, 60 bp, Artificial
  Synthetic oligonucleotide
ggcacttatgagccagcctaccttggtggaaaggaccccagggtccagggtggtccctcc

SEQ ID NO: 518216 - DNA, 60 bp, Artificial
  Synthetic oligonucleotide
ccattttcacaactgccacacatgcaaataggcagtggttccccagtctactttaccaca

SEQ ID NO: 518217 - DNA, 60 bp, Artificial
  Synthetic oligonucleotide
ccattgggactcctataggggggaaccagtggtcgtttgggacgactatggcatgggaaa

SEQ ID NO: 518218 - DNA, 60 bp, Artificial
  Synthetic oligonucleotide
ggcccgattcacgcatgaggctgatggggatgctgtatacccccctgcgcgccaattccg

SEQ ID NO: 518219 - DNA, 60 bp, Artificial
  Synthetic oligonucleotide
ccatcaagatcggaatgaatgccattgaggatgggcctgtcatataccagagacactcaa

SEQ ID NO: 518220 - DNA, 60 bp, Artificial
  Synthetic oligonucleotide
gggacggttctagagttttatgagggctacattttccactacgccatctatgttggtaac

SEQ ID NO: 518221 - DNA, 60 bp, Artificial
  Synthetic oligonucleotide
ccacaatccagggtgctagtgcgtgcaaggacgtcaagaaactcgccagccaactgatgt

SEQ ID NO: 518222 - DNA, 60 bp, Artificial
  Synthetic oligonucleotide
ccaagaggcagcagggaccaatggcctgccacctaaacagcaaagagaccgaccccccag

SEQ ID NO: 518223 - DNA, 60 bp, Artificial
  Synthetic oligonucleotide
gggattaacccgtacattgcgcacatggcgcgtatgtacacagtgtggtctggggggttt

SEQ ID NO: 518224 - DNA, 60 bp, Artificial
  Synthetic oligonucleotide
gggtgttgcatatgacatgcagtctgacggtagaggtaaggtgagggtggacagggtcca

SEQ ID NO: 518225 - DNA, 60 bp, Artificial
  Synthetic oligonucleotide
cagtgcgcgcagtcaagtggatcattgacatgttccgcgagcaacatcaagctggcatgg

SEQ ID NO: 518226 - DNA, 60 bp, Artificial
  Synthetic oligonucleotide
cagtcattcttggtggcatagggctagccattggatttaccagagacaaggtcactaaag

SEQ ID NO: 518227 - DNA, 60 bp, Artificial
  Synthetic oligonucleotide
ggttcagtcattgattcatggacccccgcttttaatttgaagcatcagcctttctttgct

SEQ ID NO: 518228 - DNA, 60 bp, Artificial
  Synthetic oligonucleotide
gtactgttggagagacaacgtgggtacaaggaccattctcacaactaccacacatgcaaa

SEQ ID NO: 518229 - DNA, 60 bp, Artificial
  Synthetic oligonucleotide
gtgaaatgagatggcgtctaacgacgctatccccgctgctagcccaaaggctaacaacga

SEQ ID NO: 518230 - DNA, 60 bp, Artificial
  Synthetic oligonucleotide
cacaggtgcgaacactcttgtgctgtggcaggagcgcatgctcagctatgatggacacca

SEQ ID NO: 518231 - DNA, 60 bp, Artificial
  Synthetic oligonucleotide
cacaaaccccacatggagttcgtgcactactagacatcacttctataactagacagtttt

SEQ ID NO: 518232 - DNA, 60 bp, Artificial
  Synthetic oligonucleotide
gttcgactgtcttggaaacacgccttatggcaagggtgccatgtccaagacctcgcttcc

SEQ ID NO: 518233 - DNA, 60 bp, Artificial
  Synthetic oligonucleotide
caaacatgaagattgggctcaagaaagttcttgaacccaaatctgagacacccacggtaa

SEQ ID NO: 518234 - DNA, 60 bp, Artificial
  Synthetic oligonucleotide
gacccagctaagttgacacaagtccttaaggagtatggccttaagcccacccgtcccgac

SEQ ID NO: 518235 - DNA, 60 bp, Artificial
  Synthetic oligonucleotide
gaaaagaatgtttggcacacgcacagctgctttatccctagagggcccccccaaagaaca

SEQ ID NO: 518236 - DNA, 60 bp, Artificial
  Synthetic oligonucleotide
ctggctccagaggaaattggtcaatagtggaaaatttaaccaccccacacaggactggtc

SEQ ID NO: 518237 - DNA, 60 bp, Artificial
  Synthetic oligonucleotide
ctgcttgaacggaccacttcatgtggtccgttcgtgcagggtcttaagggcgattactgg

SEQ ID NO: 518238 - DNA, 60 bp, Artificial
  Synthetic oligonucleotide
gacccgcctggcacaacaggtccgaccacatcccacgttgttgttgctaatccggagcaa

SEQ ID NO: 518239 - DNA, 60 bp, Artificial
  Synthetic oligonucleotide
gacgcaactcgtactccaggacatgcattgcgacaaaaatacacaatgaccaccatacag

SEQ ID NO: 518240 - DNA, 60 bp, Artificial
  Synthetic oligonucleotide
ctagtgcgacaaccgtcggcgaacgcactgtgaatgcccgcaacccccaaaattttactc

SEQ ID NO: 518241 - DNA, 60 bp, Artificial
  Synthetic oligonucleotide
gagagctctcatcaaggtcctccgacccccatgtcgtctcctcagttaatgcgcttctcg

SEQ ID NO: 518242 - DNA, 60 bp, Artificial
  Synthetic oligonucleotide
gatctgaatccttatttggcccaccttcgtcgcatgtataatgggtggaccggatccatg

SEQ ID NO: 518243 - DNA, 60 bp, Artificial
  Synthetic oligonucleotide
gatgactatggaatgagtaaccccattcatgacgcccttaggctacaagaacttgctgac

SEQ ID NO: 518244 - DNA, 60 bp, Artificial
  Synthetic oligonucleotide
gcaatacaccttttgggaagggtgtcatgaagaccacaactctcaacagactgctaatac

SEQ ID NO: 518245 - DNA, 60 bp, Artificial
  Synthetic oligonucleotide
cgcacccatgacacaggtcttggactggaacgggactagacattgggcccccggagccat

SEQ ID NO: 518246 - DNA, 60 bp, Artificial
  Synthetic oligonucleotide
cgcaatctcctgcccgaattcgtaaatgatgatggcgtctaaggacgccccaacatcccc

SEQ ID NO: 518247 - DNA, 60 bp, Artificial
  Synthetic oligonucleotide
cgcaatcattctctctcaacatcgcaacactactgccggttgggtgctcaccctaaccgc

SEQ ID NO: 518248 - DNA, 60 bp, Artificial
  Synthetic oligonucleotide
cctctaccatctacaaggtgagaaattcccatataacgcctttgacaacaactgttataa

SEQ ID NO: 518249 - DNA, 60 bp, Artificial
  Synthetic oligonucleotide
gcgatgtggcgctcctcaattatgttaatcccaacaccggccgggttctgtttgaggcca

SEQ ID NO: 518250 - DNA, 60 bp, Artificial
  Synthetic oligonucleotide
cccttctgggctacactggaactttacaacatatcatccaaagtgtacgaactagtgtca

SEQ ID NO: 518251 - DNA, 60 bp, Artificial
  Synthetic oligonucleotide
cccttacgtgtacaaacgtggtaacgactatgtggttgtgggtgtgcacactgccgcggg

SEQ ID NO: 518252 - DNA, 60 bp, Artificial
  Synthetic oligonucleotide
ccccggaggcaccgcggctggaaacaccccccatggccgcgcctcccctgggcagccccc

SEQ ID NO: 518253 - DNA, 60 bp, Artificial
  Synthetic oligonucleotide
cccccaccgcaggcgtggcctcagcagacccgtcacaactcctcaccagggtggcccttg

SEQ ID NO: 518254 - DNA, 60 bp, Artificial
  Synthetic oligonucleotide
aggccatcagggaagcaacgaaaggaggagcgagcaaccctcggcctcgtgacgggtaat

SEQ ID NO: 518255 - DNA, 60 bp, Artificial
  Synthetic oligonucleotide
tcttattctgggcggttttcctctcaagtgccccagaccaccttttataaggaaccaccc

SEQ ID NO: 518256 - DNA, 60 bp, Artificial
  Synthetic oligonucleotide
agctgtgcagaccaacaatgagctaactggcgcactacaccatctgaggtgcgctaggat

SEQ ID NO: 518257 - DNA, 60 bp, Artificial
  Synthetic oligonucleotide
agcgtcgggccccccgccccgctggtctgcaatgtggacaatgggacttacactaccggg

SEQ ID NO: 518258 - DNA, 60 bp, Artificial
  Synthetic oligonucleotide
agcccactgatccacatccaagaccgaagcataaacactcagaatctcccatacatcaac

SEQ ID NO: 518259 - DNA, 60 bp, Artificial
  Synthetic oligonucleotide
agcacttgtggaagtgtactcaaatttgtttgacgacttgcgcaaatcatcagttgcaat

SEQ ID NO: 518260 - DNA, 60 bp, Artificial
  Synthetic oligonucleotide
acttgtgggtctaccaccaatgtcagtggactggaaaggtaccacgatctatggtcgtgc

SEQ ID NO: 518261 - DNA, 60 bp, Artificial
  Synthetic oligonucleotide
actaaaagagtatggtctcaagccaacccgtcctgacaagactgaagggcctctggtcat

SEQ ID NO: 518262 - DNA, 60 bp, Artificial
  Synthetic oligonucleotide
tgatccctgatgtcagagcagtggactaccacaggatggatggtgctgagcccacttgct

SEQ ID NO: 518263 - DNA, 60 bp, Artificial
  Synthetic oligonucleotide
tgcaggctccccagggtgagttcaccgtttcacctaagaactcccctggcgaggtcctag

SEQ ID NO: 518264 - DNA, 60 bp, Artificial
  Synthetic oligonucleotide
tgcctggcaccatattggaaatgtgggacggagagatctaccactacggcttgtacgtgg

SEQ ID NO: 518265 - DNA, 60 bp, Artificial
  Synthetic oligonucleotide
tgctacctcagggtagcgccgcgtgaagcattttgtgagaacttgagtgaacttcatcac

SEQ ID NO: 518266 - DNA, 60 bp, Artificial
  Synthetic oligonucleotide
acaaaagcgaggggccactagtcattagcaaagacctgtccgggttgactttcctgaggc

SEQ ID NO: 518267 - DNA, 60 bp, Artificial
  Synthetic oligonucleotide
tggtacagtacctgacccagtgggtcacactgaaggaacccacaaaatagtgtttgagat

SEQ ID NO: 518268 - DNA, 60 bp, Artificial
  Synthetic oligonucleotide
aatatgtcccgagcgtttgacagctcaatgtgggggtctccactcgacctgtttgtccac

SEQ ID NO: 518269 - DNA, 60 bp, Artificial
  Synthetic oligonucleotide
ttaacaccaactatgaccaggctctcgccacctacaatgcttggttcataggtggtacag

SEQ ID NO: 518270 - DNA, 60 bp, Artificial
  Synthetic oligonucleotide
ttcatcaccgcgacacatgtcatccctgagggttgcaccgaggcctttggggttccagtt

SEQ ID NO: 518271 - DNA, 60 bp, Artificial
  Synthetic oligonucleotide
aacatggacctcggcaccaccccaggtgactgtggctgcccctacatttacaagcgcggg

SEQ ID NO: 518272 - DNA, 60 bp, Artificial
  Synthetic oligonucleotide
ttgggataaacatggactcagcccaagttgaggtcgtccaccgggcccttcaagaccgga

SEQ ID NO: 518273 - DNA, 60 bp, Artificial
  Synthetic oligonucleotide
tttatgtacgccaaccgcgcagtgtgtgacgttatacctaaccccgccacccgtgatatc

SEQ ID NO: 518274 - DNA, 60 bp, Artificial
  Synthetic oligonucleotide
tttgcctatcaatggagtctttgtctttgtttcttgggtctctcgcttttaccagttgaa

SEQ ID NO: 518275 - DNA, 60 bp, Artificial
  Synthetic oligonucleotide
ataacaaccaatcttgcaaaccctgcccccttggactatgtcaactttgaggcgtgttca

SEQ ID NO: 518276 - DNA, 60 bp, Artificial
  Synthetic oligonucleotide
agtttctgaaaaggacgttcgtgaaaaccccacaaggtattcgcgctctccttgacagga

SEQ ID NO: 518277 - DNA, 60 bp, Artificial
  Synthetic oligonucleotide
tacggtcctggtgtcaggataggcctttcccttgagtcaatttctgatggttcacacgtt

SEQ ID NO: 518278 - DNA, 60 bp, Artificial
  Synthetic oligonucleotide
taagggcatggaccttggaactatcccaggggattgtggagctccctatgtctataagag

SEQ ID NO: 518279 - DNA, 60 bp, Artificial
  Synthetic oligonucleotide
atgagtatgcactcggactcaaagatgagttgcgacctgtggataagattgctgttgcca

SEQ ID NO: 518280 - DNA, 60 bp, Artificial
  Synthetic oligonucleotide
tactacttggtgcgtcgccccttgccggcatggttcgcagtatgtgcgaacgggttcagg

SEQ ID NO: 518281 - DNA, 60 bp, Artificial
  Synthetic oligonucleotide
attgttggatgagggaaaaaaccatgttggctgggcaatcgttgatggtgagcgcttggt

SEQ ID NO: 518282 - DNA, 60 bp, Artificial
  Synthetic oligonucleotide
gttttggaggtcatccaacgagcccctcccgccgggcacgtacgagccagcttatctcgg

SEQ ID NO: 518283 - DNA, 60 bp, Artificial
  Synthetic oligonucleotide
gttgacgcaacccgcaccccaggacacgcattgcgtcaaaagtacacaatgaccactata

SEQ ID NO: 518284 - DNA, 59 bp, Artificial
  Synthetic oligonucleotide
gtgggccgggtggggcggtagttttgaggtccggctatcgatctctggttctggcgtgt

SEQ ID NO: 518285 - DNA, 58 bp, Artificial
  Synthetic oligonucleotide
gtctacaaacatggtcaaggcatttatgtacgccaaccgtgcagtgtgtgacgtgata

SEQ ID NO: 518286 - DNA, 58 bp, Artificial
  Synthetic oligonucleotide
accatgatctggcaccaccggtcgcccctagaatgcccggtgagctcctgttactctt

SEQ ID NO: 518287 - DNA, 57 bp, Artificial
  Synthetic oligonucleotide
cataaaccagagcgtggagtttgggtacaaccaagccctccagtccaattccttccg

SEQ ID NO: 518288 - DNA, 57 bp, Artificial
  Synthetic oligonucleotide
acccacaccacgtccggaagaacgaccactggaatggtgactctttcacgggccccc

SEQ ID NO: 518289 - DNA, 56 bp, Artificial
  Synthetic oligonucleotide
tggcgttgcatgccggcacggacacacaaggtgaaacaaaagtggctcaacgagtt

SEQ ID NO: 518290 - DNA, 56 bp, Artificial
  Synthetic oligonucleotide
taaccatttccccgactcgtgtgcatcaacaatcgtgggggccatggacacctccc

SEQ ID NO: 518291 - DNA, 56 bp, Artificial
  Synthetic oligonucleotide
gatgcagtgattgcaactaattctgctaaatttaccccaaaattgggcgctataca

SEQ ID NO: 518292 - DNA, 55 bp, Artificial
  Synthetic oligonucleotide
gcccaccttcgtcgcatgtataatgggtggaccggatccatgcgcgtgcgagtcc

SEQ ID NO: 518293 - DNA, 55 bp, Artificial
  Synthetic oligonucleotide
gccaaccgcgcagtgtgtgacgtgatacctaatcccgccacccgtgacatcaccg

SEQ ID NO: 518294 - DNA, 55 bp, Artificial
  Synthetic oligonucleotide
gcattttgacatccacccgtacaattcaattggcacgacggccatcgttgggcac

SEQ ID NO: 518295 - DNA, 55 bp, Artificial
  Synthetic oligonucleotide
gcatagccatggcacgatccgctctggctaaggctcaagctgagatgaccagtcg

SEQ ID NO: 518296 - DNA, 55 bp, Artificial
  Synthetic oligonucleotide
gcacactgcctccttgttagcaggcaccacgtatgagctggccgagaattcaatg

SEQ ID NO: 518297 - DNA, 55 bp, Artificial
  Synthetic oligonucleotide
gcacacctctgggtggaccgagatgggaagccggaacgtgtaatcggacgtgtgc

SEQ ID NO: 518298 - DNA, 55 bp, Artificial
  Synthetic oligonucleotide
tgggtctctgagcagaaccggcttgcaccctttcacgccgacgctctgcgcttga

SEQ ID NO: 518299 - DNA, 55 bp, Artificial
  Synthetic oligonucleotide
gacccagtgggtcacactgaaggaacccacaaaatagtgtttgagatggagggca

SEQ ID NO: 518300 - DNA, 55 bp, Artificial
  Synthetic oligonucleotide
gacccatcccaaagtgtgacctttgcaactaatgatgctagctttgtcccttacc

SEQ ID NO: 518301 - DNA, 55 bp, Artificial
  Synthetic oligonucleotide
gagggtgatggtaaagtttgcaatcatgtgaacgctatcatgcccgtaactggca

SEQ ID NO: 518302 - DNA, 55 bp, Artificial
  Synthetic oligonucleotide
gagggtcaccagacatatctatgtccgctctcaggcactggaggagtggtgccgg

SEQ ID NO: 518303 - DNA, 55 bp, Artificial
  Synthetic oligonucleotide
ttacatctataagagaggtaacgactatgtggtggctggagtccacacagctgcc

SEQ ID NO: 518304 - DNA, 55 bp, Artificial
  Synthetic oligonucleotide
gttcaccacctggtatggtcgactgacgcagtctgaggggccagcagggtatgcg

SEQ ID NO: 518305 - DNA, 55 bp, Artificial
  Synthetic oligonucleotide
ttgattgcgtactgcatcctgaaggtctaccacacggctgaagtggcgtaccctg

SEQ ID NO: 518306 - DNA, 55 bp, Artificial
  Synthetic oligonucleotide
tcatcgactgtttccgggccttggcagggacgcgcttcacggcaaacccagtttc

SEQ ID NO: 518307 - DNA, 55 bp, Artificial
  Synthetic oligonucleotide
tccggcagttgggcccaccactggcggcggatattatgtccacattggcaacggc

SEQ ID NO: 518308 - DNA, 55 bp, Artificial
  Synthetic oligonucleotide
gggtcggcttgaccgtaattccattgaaagacagctctggtggacccggggaccc

SEQ ID NO: 518309 - DNA, 55 bp, Artificial
  Synthetic oligonucleotide
tcagcagacccgtcacaactcctcaccagggtggcccttgccacctcgccagagg

SEQ ID NO: 518310 - DNA, 55 bp, Artificial
  Synthetic oligonucleotide
ggcttctagcattatggcaggcatagcaggcgatgtgctaggctcagttgtgggt

SEQ ID NO: 518311 - DNA, 55 bp, Artificial
  Synthetic oligonucleotide
ggtacaccagacttttctggtaagctctttggcgtcctaagccagagggaccatg

SEQ ID NO: 518312 - DNA, 55 bp, Artificial
  Synthetic oligonucleotide
ggtcaatagtggaaaatttaaccaccccacacaggactggtcacaggacacccca

SEQ ID NO: 518313 - DNA, 55 bp, Artificial
  Synthetic oligonucleotide
ggtccacacagctgccgcccgcggagggaacactgtcatctgtgcaacacaagga

SEQ ID NO: 518314 - DNA, 55 bp, Artificial
  Synthetic oligonucleotide
ggcactgactatgaccctgcaggggatctccccgcaaccttaggggcacctgact

SEQ ID NO: 518315 - DNA, 55 bp, Artificial
  Synthetic oligonucleotide
ggatctacactttgtgtgccctgtcagaggtcactggtttagctcctgatgtaat

SEQ ID NO: 518316 - DNA, 55 bp, Artificial
  Synthetic oligonucleotide
ggagtccgtgcactgctagacatcacttccataactaggcagttttactggttga

SEQ ID NO: 518317 - DNA, 55 bp, Artificial
  Synthetic oligonucleotide
tgagggctacattttccactacgccatctatgttggtaacgggaagacaattggc

SEQ ID NO: 518318 - DNA, 55 bp, Artificial
  Synthetic oligonucleotide
ggaggttttgtcctctacatcagtaacacaactggtgagagacaagcaggcagct

SEQ ID NO: 518319 - DNA, 55 bp, Artificial
  Synthetic oligonucleotide
ggagcggggtttggtgcttggggtgcacaaaccaccagcggctattagcctcgca

SEQ ID NO: 518320 - DNA, 55 bp, Artificial
  Synthetic oligonucleotide
gctgagttctgtgcgctctaaccccttttcctccgttagctcggggtccgtgggg

SEQ ID NO: 518321 - DNA, 55 bp, Artificial
  Synthetic oligonucleotide
ggtgcgggagacaagaggtacacattctcacaaacagaaatgctagtgaatggat

SEQ ID NO: 518322 - DNA, 55 bp, Artificial
  Synthetic oligonucleotide
gctctcgccacctacaatgcttggttcataggtggtacagtacctgacccagtgg

SEQ ID NO: 518323 - DNA, 55 bp, Artificial
  Synthetic oligonucleotide
gctcgtgccttctgccggtttgtcactgacgcttacgacatgactccctacaagg

SEQ ID NO: 518324 - DNA, 55 bp, Artificial
  Synthetic oligonucleotide
gctccttgcttgagatggatgaaggtgacatgttccactacggtgtgtacttgtc

SEQ ID NO: 518325 - DNA, 55 bp, Artificial
  Synthetic oligonucleotide
gctagtaaacgggttgaagccttacacggaacccactgctggggtgccaccacag

SEQ ID NO: 518326 - DNA, 55 bp, Artificial
  Synthetic oligonucleotide
gctacgtgggaatggcatcagcttacaacaagctgcaacataatattgctggcac

SEQ ID NO: 518327 - DNA, 55 bp, Artificial
  Synthetic oligonucleotide
gcgataatgggttgggcattctgagtatggcgagcctaggtaagaagctgcgcgg

SEQ ID NO: 518328 - DNA, 55 bp, Artificial
  Synthetic oligonucleotide
ggtttcttacaccctggatggcctgccactctttgaggccaagatctattcctca

SEQ ID NO: 518329 - DNA, 55 bp, Artificial
  Synthetic oligonucleotide
gcctcctgtctgcaaagtgcggtgctgtcaatactccaggtggccggctctgcct

SEQ ID NO: 518330 - DNA, 55 bp, Artificial
  Synthetic oligonucleotide
gccgagggatggatagtgactctaacagccgtagcggaactctatggctggcttg

SEQ ID NO: 518331 - DNA, 55 bp, Artificial
  Synthetic oligonucleotide
gcccaggcaagaggccatgtttaggtggatgaggttttctgacctcagcacgtgg

SEQ ID NO: 518332 - DNA, 55 bp, Artificial
  Synthetic oligonucleotide
caacctctagtggctacccgcaccacgtgcggaagaatgaacattggaatgggga

SEQ ID NO: 518333 - DNA, 55 bp, Artificial
  Synthetic oligonucleotide
caactggtccctcctgggcggacgatgagcgggaggttgactacaatgaggtaat

SEQ ID NO: 518334 - DNA, 55 bp, Artificial
  Synthetic oligonucleotide
cacaggtggctgcatttcgaaagcttgcagctgacaacaagtacggccttgctga

SEQ ID NO: 518335 - DNA, 55 bp, Artificial
  Synthetic oligonucleotide
cacctgcatttaacacacgcaggcaaccgctctttgctcgcctccgcaggagggg

SEQ ID NO: 518336 - DNA, 55 bp, Artificial
  Synthetic oligonucleotide
cacgacctgttgccctcatgacaaaccccaggttcccagttggtccgataaaggc

SEQ ID NO: 518337 - DNA, 55 bp, Artificial
  Synthetic oligonucleotide
cacgccttgtggattggaacggcacaaggttgtccgccccgggttccatgcacac

SEQ ID NO: 518338 - DNA, 55 bp, Artificial
  Synthetic oligonucleotide
cagcgacgaaaacccaacctggagattgcggtctgccctacgttgacgatagggg

SEQ ID NO: 518339 - DNA, 55 bp, Artificial
  Synthetic oligonucleotide
cagttttgtgaatgaagatggcgtcgaatgacgccgctccatctaatgatggtgc

SEQ ID NO: 518340 - DNA, 55 bp, Artificial
  Synthetic oligonucleotide
catatttgggttacaatccagacggagacacacttgaaggccccagagttgcccc

SEQ ID NO: 518341 - DNA, 55 bp, Artificial
  Synthetic oligonucleotide
catcgctgacgtgagggttctggaacctatagaaataccccttgaggatgtgagg

SEQ ID NO: 518342 - DNA, 55 bp, Artificial
  Synthetic oligonucleotide
catgcaaataggcagtggttccccggtttacttcaccacacggttgcacccagtc

SEQ ID NO: 518343 - DNA, 55 bp, Artificial
  Synthetic oligonucleotide
catggtgacaggtggatctattggcattaacgtaccgcttgaacctgaaaccaga

SEQ ID NO: 518344 - DNA, 55 bp, Artificial
  Synthetic oligonucleotide
cattaatgaagagggacccatcatctttgagaaacacgcccaatatgagctccac

SEQ ID NO: 518345 - DNA, 55 bp, Artificial
  Synthetic oligonucleotide
ccaccaataccctacactgggcaacctttcagactcaactcccatggctaccata

SEQ ID NO: 518346 - DNA, 55 bp, Artificial
  Synthetic oligonucleotide
ccactggcagctagaatgggtacccatgcaactatgaggatccagggtcgaactg

SEQ ID NO: 518347 - DNA, 55 bp, Artificial
  Synthetic oligonucleotide
ccatcatgcacgctggcactatggatagcatacgccaaaccaaacatttggactc

SEQ ID NO: 518348 - DNA, 55 bp, Artificial
  Synthetic oligonucleotide
cccaaagacccatacagttgatgtccctattaggtgaagctgcattacatggccc

SEQ ID NO: 518349 - DNA, 55 bp, Artificial
  Synthetic oligonucleotide
cccaagcatctggtcgagaatagtcaactttggatcaggttggggcttctgggtc

SEQ ID NO: 518350 - DNA, 55 bp, Artificial
  Synthetic oligonucleotide
aacaacgttcactgctcaaggtccgacagacttggggtgggcggcagtgctggca

SEQ ID NO: 518351 - DNA, 55 bp, Artificial
  Synthetic oligonucleotide
aacaccactgtctctgtactggagaccagtgtacacccctcagtacctcatatcc

SEQ ID NO: 518352 - DNA, 55 bp, Artificial
  Synthetic oligonucleotide
aacatcgctcgcacggcagcccgtttgggtgaatggccctcggcgctctgtgtgg

SEQ ID NO: 518353 - DNA, 55 bp, Artificial
  Synthetic oligonucleotide
aactaagtgttcccaccaaccagcgcccctcgggcggaacgatccaaggtgcggc

SEQ ID NO: 518354 - DNA, 55 bp, Artificial
  Synthetic oligonucleotide
aactacaccttcacatccacaggtgcaaacacccttgtattgtggcaagagcgca

SEQ ID NO: 518355 - DNA, 55 bp, Artificial
  Synthetic oligonucleotide
aacttgatatcacgcatctctatggcaagatcagctctggctaaagcccaagctg

SEQ ID NO: 518356 - DNA, 55 bp, Artificial
  Synthetic oligonucleotide
aatctcggtcctgtgtgcagacgggttgacttcctggtctactgttctgccccag

SEQ ID NO: 518357 - DNA, 55 bp, Artificial
  Synthetic oligonucleotide
aatgttgacccttggcagataccaacttatgggtcgactttaactgaagccgctc

SEQ ID NO: 518358 - DNA, 55 bp, Artificial
  Synthetic oligonucleotide
acaattggcccagacaccacaaccaaccaagtcctcctggaattacccgtgggac

SEQ ID NO: 518359 - DNA, 55 bp, Artificial
  Synthetic oligonucleotide
accagcactggaacggtgaatcgttcaccgggccgcttgccgaccaagcctcaca

SEQ ID NO: 518360 - DNA, 55 bp, Artificial
  Synthetic oligonucleotide
acttccgcagggaagatgtgtggatcaatcgcatggacagcgacgaaaacccaac

SEQ ID NO: 518361 - DNA, 55 bp, Artificial
  Synthetic oligonucleotide
aggattccattctcaggcaaatgtactggaccaagggcccgaaccatcaagaccc

SEQ ID NO: 518362 - DNA, 55 bp, Artificial
  Synthetic oligonucleotide
agggactccaggtcaaggaatcaggccggaacgtgggcggcatgccaactggcac

SEQ ID NO: 518363 - DNA, 55 bp, Artificial
  Synthetic oligonucleotide
agtatgagcttcccgattattctggtcaagttgcttccaaccataatctggcccc

SEQ ID NO: 518364 - DNA, 55 bp, Artificial
  Synthetic oligonucleotide
atataaggctgagggcgggccgcctaagcgccacctctgggtgcaggttccgcat

SEQ ID NO: 518365 - DNA, 55 bp, Artificial
  Synthetic oligonucleotide
atgatccggtgtgcgcgcgccttcggtggggtgtgtgacgccctcaaggagtgct

SEQ ID NO: 518366 - DNA, 55 bp, Artificial
  Synthetic oligonucleotide
atggcacgcgcctctccgctccgggcgccatgcacacctcagcctactccggcag

SEQ ID NO: 518367 - DNA, 55 bp, Artificial
  Synthetic oligonucleotide
caacaaggatcccacacgtgcacacattcaggccacacgcgcacgtgttgaggac

SEQ ID NO: 518368 - DNA, 55 bp, Artificial
  Synthetic oligonucleotide
gaccacgaaggcctagtcattgagcccatcacttacgacgcggcacttcacaagt

SEQ ID NO: 518369 - DNA, 55 bp, Artificial
  Synthetic oligonucleotide
gacaggcttctcaaaccccaattacgagactggttcatctgtgtcgcgcacatcg

SEQ ID NO: 518370 - DNA, 55 bp, Artificial
  Synthetic oligonucleotide
ctttccaaattggcattagacctgatggttacatggtgacaggtggctccattgg

SEQ ID NO: 518371 - DNA, 55 bp, Artificial
  Synthetic oligonucleotide
ctggtgatatagtcaccaatggtattggctcactcgtgaacgctggggccaatgc

SEQ ID NO: 518372 - DNA, 55 bp, Artificial
  Synthetic oligonucleotide
ctctgggattgtacggcgcctcaacaaatcatataaggctgagggcgggccgcct

SEQ ID NO: 518373 - DNA, 55 bp, Artificial
  Synthetic oligonucleotide
ctcggtggggataaaagggtgggcctcatcccgagaaacgcggttgaccactggg

SEQ ID NO: 518374 - DNA, 55 bp, Artificial
  Synthetic oligonucleotide
ctagctgctgaacaacaagctcttgtttacaaactgaacaccgaaggcccagtac

SEQ ID NO: 518375 - DNA, 55 bp, Artificial
  Synthetic oligonucleotide
cgtcacgtgttctcaacttgcccacacgtcagacgtcctcgaatcgggaccagtc

SEQ ID NO: 518376 - DNA, 55 bp, Artificial
  Synthetic oligonucleotide
cggtatgctgatggtcgggtgcgcgctctaattgaccctacgagcctgactcggc

SEQ ID NO: 518377 - DNA, 55 bp, Artificial
  Synthetic oligonucleotide
cgctagagggtggcgatcaaaataagggacactatgcaggacacccaatattaag

SEQ ID NO: 518378 - DNA, 55 bp, Artificial
  Synthetic oligonucleotide
cgcgtggttgtcctcccacctggccctcattttggattgactgaggtcacgcgcc

SEQ ID NO: 518379 - DNA, 55 bp, Artificial
  Synthetic oligonucleotide
cgccttctgttgttgggtcttggatctaaacgactcttggctcagcaggaggatg

SEQ ID NO: 518380 - DNA, 55 bp, Artificial
  Synthetic oligonucleotide
cgcacctttggctcacaccctatgggaaggttaccgagagacgctctggaccacc

SEQ ID NO: 518381 - DNA, 55 bp, Artificial
  Synthetic oligonucleotide
cgaggttcagatgctaagcagtgacgctcccaatgctcacgagatagtgtttgag

SEQ ID NO: 518382 - DNA, 55 bp, Artificial
  Synthetic oligonucleotide
cgactcctggctcaataggaaatacgtgcagcgcacaactggcttctacgacccc

SEQ ID NO: 518383 - DNA, 55 bp, Artificial
  Synthetic oligonucleotide
cccaaggccgatgaggagagtgagcttgcaatggtccggtcaatagaagatgctg

SEQ ID NO: 518384 - DNA, 55 bp, Artificial
  Synthetic oligonucleotide
cccaggtgtaccaacaacttgggcgctactcctttgaggagggaggacctctagg

SEQ ID NO: 518385 - DNA, 55 bp, Artificial
  Synthetic oligonucleotide
ccccactctcactctactggcgtgtggtgcacgttcctcagaacgttattccatc

SEQ ID NO: 518386 - DNA, 55 bp, Artificial
  Synthetic oligonucleotide
ccccgggaaaaccaagagggacctgtgtgatcccgacacaggtatgccaaccgga

SEQ ID NO: 518387 - DNA, 55 bp, Artificial
  Synthetic oligonucleotide
cccctgaacattgggtctgtcaatgaacttgccccgtttctgacgtacggagacg

SEQ ID NO: 518388 - DNA, 55 bp, Artificial
  Synthetic oligonucleotide
cccctgttggtcttgcccataaccgggcagttgactacaagcagtgggagctgcc

SEQ ID NO: 518389 - DNA, 55 bp, Artificial
  Synthetic oligonucleotide
ccttttcggcactgtctcctggaacgctaatgccggccccgggacgatcctcaca

SEQ ID NO: 518390 - DNA, 55 bp, Artificial
  Synthetic oligonucleotide
cctcttacagtttccacatgttttggttgacgccagacaaacggaacccgtcatc

SEQ ID NO: 518391 - DNA, 55 bp, Artificial
  Synthetic oligonucleotide
ccgggtcaacagatggaaaatggggtctcaccagaaggcctattgcccagacgcc

SEQ ID NO: 518392 - DNA, 55 bp, Artificial
  Synthetic oligonucleotide
ccgctgcaaacaaggtcgccaatgtggccaaagttttactccctggcatacttga

SEQ ID NO: 518393 - DNA, 55 bp, Artificial
  Synthetic oligonucleotide
cccgtccagataagacagaggggcccttggtcgtcagcagggaactctccgggtt

SEQ ID NO: 518394 - DNA, 55 bp, Artificial
  Synthetic oligonucleotide
cccggcatctccccaaatgaggtgcgtaacccgggcgctttcccacacaacattc

SEQ ID NO: 518395 - DNA, 54 bp, Artificial
  Synthetic oligonucleotide
ctagtagtgcctcctatactagctcttttaatcaagggtggtttaatacagatc

SEQ ID NO: 518396 - DNA, 54 bp, Artificial
  Synthetic oligonucleotide
tggggttcagatctggcaaccatgatccgctgcgctcgagcgttcggagggtta

SEQ ID NO: 518397 - DNA, 54 bp, Artificial
  Synthetic oligonucleotide
gagaccagctcctgtcactcgagggcgagcgatggccgtacgcctccgtgacta

SEQ ID NO: 518398 - DNA, 54 bp, Artificial
  Synthetic oligonucleotide
ctacgtggcacctccatccagtagggcttctagcaatggcacagtctcaaccgt

SEQ ID NO: 518399 - DNA, 54 bp, Artificial
  Synthetic oligonucleotide
gatcttccaagcaaacaggcacttcgactgcaagcgtcagacgtttgggtggtc

SEQ ID NO: 518400 - DNA, 54 bp, Artificial
  Synthetic oligonucleotide
agggcccttggcttctgcccaaccggcccagacaaaggccccaccatccatgga

SEQ ID NO: 518401 - DNA, 54 bp, Artificial
  Synthetic oligonucleotide
taggtgacaagagtctgccggtccccaatcccacggttgtcataaacgatcctt

SEQ ID NO: 518402 - DNA, 54 bp, Artificial
  Synthetic oligonucleotide
agtagccagccgcagccaacaatgcggctggttgctatgttgtacactcccctc

SEQ ID NO: 518403 - DNA, 53 bp, Artificial
  Synthetic oligonucleotide
tcgacaaccccacagttacgcaagacatcgatgctgttaccaacttgcaaatt

SEQ ID NO: 518404 - DNA, 53 bp, Artificial
  Synthetic oligonucleotide
caccagacgtcacagggttcttaatgccactcctggatgactacgaattccag

SEQ ID NO: 518405 - DNA, 53 bp, Artificial
  Synthetic oligonucleotide
ttgtgagcggcactgaaatccgtaagcgtaagcccatagattggacccccccc

SEQ ID NO: 518406 - DNA, 53 bp, Artificial
  Synthetic oligonucleotide
cgttttgggtctctcccagtctactcataacatcaacacatgttataccaaga

SEQ ID NO: 518407 - DNA, 53 bp, Artificial
  Synthetic oligonucleotide
acgacacctgtgtcgcccaattacatagcatcctaccgaggcatttccactgg

SEQ ID NO: 518408 - DNA, 52 bp, Artificial
  Synthetic oligonucleotide
ccccgcttttaatttgaagcatcagcctttctttgctcgctttcacccgagg

SEQ ID NO: 518409 - DNA, 52 bp, Artificial
  Synthetic oligonucleotide
cccacacgcgttcgggtgggctttggacaattaagcgattgtcgccgtcccc

SEQ ID NO: 518410 - DNA, 52 bp, Artificial
  Synthetic oligonucleotide
gggatctggaacggggcgcaggaggaatcagtaatggcggggcaaattatag

SEQ ID NO: 518411 - DNA, 52 bp, Artificial
  Synthetic oligonucleotide
tccaccgtcaggcagccggatgagacaaacacagcatttagtgtccccccac

SEQ ID NO: 518412 - DNA, 52 bp, Artificial
  Synthetic oligonucleotide
cggtgccactgacgagcaacaaccagtgacatggtcttctagtggtggagtt

SEQ ID NO: 518413 - DNA, 51 bp, Artificial
  Synthetic oligonucleotide
atctgaggccttctggcgtcgaatcatgtatgttgacgtcaagtgcgcgga

SEQ ID NO: 518414 - DNA, 51 bp, Artificial
  Synthetic oligonucleotide
tggtggagggtctgctacataccccagcccaaacacaggctgagttacgac

SEQ ID NO: 518415 - DNA, 51 bp, Artificial
  Synthetic oligonucleotide
tgtcttgtagagttcttacgaggccatcccctgattttgagttcacctttt

SEQ ID NO: 518416 - DNA, 51 bp, Artificial
  Synthetic oligonucleotide
aagttcgtcttgacgagcttccagccaaccaccacattgttactgtacact

SEQ ID NO: 518417 - DNA, 51 bp, Artificial
  Synthetic oligonucleotide
acacaggaggagcccagaatgcgcatcgtcgcttggctctacaccccgctg

SEQ ID NO: 518418 - DNA, 51 bp, Artificial
  Synthetic oligonucleotide
tctttacctgactggtatgagagagaacgtgtcctccaaacctgtggacca

SEQ ID NO: 518419 - DNA, 51 bp, Artificial
  Synthetic oligonucleotide
cgtcagcagggaactctccgggttaaccttcctcaggcgtactattgtcag

SEQ ID NO: 518420 - DNA, 50 bp, Artificial
  Synthetic oligonucleotide
ttagtcccacagtcttcataaccacaacgcacgtcataccaaccagtgca

SEQ ID NO: 518421 - DNA, 50 bp, Artificial
  Synthetic oligonucleotide
acccttgtattgtggcaagagcgcatgctcagctatgatggacaccaagc

SEQ ID NO: 518422 - DNA, 50 bp, Artificial
  Synthetic oligonucleotide
aggctagtaatgctcttttagctaagaatcttaacactaggtatgctctc

SEQ ID NO: 518423 - DNA, 60 bp, Artificial
  Synthetic oligonucleotide
tacgagacctacaagggatcctacatcacgagcgcaaccacctgtcaagctctgcaacaa

SEQ ID NO: 518424 - DNA, 60 bp, Artificial
  Synthetic oligonucleotide
atcgacagaactcagttctcgtcaacaacctgaggagggtaaacctagtagttcaaacta

SEQ ID NO: 518425 - DNA, 60 bp, Artificial
  Synthetic oligonucleotide
taatctagcagtagtttacgatagactaaacttgcaatctcgtgttaacctcaaaaacct

SEQ ID NO: 518426 - DNA, 60 bp, Artificial
  Synthetic oligonucleotide
atgcaatgtctcacgacataattgttggaaatcctttctggatatacctccaacagtcct

SEQ ID NO: 518427 - DNA, 60 bp, Artificial
  Synthetic oligonucleotide
attctgccccaagggtaagaaaaattgtagatgttggatctgcagcgaagaaggtcacta

SEQ ID NO: 518428 - DNA, 60 bp, Artificial
  Synthetic oligonucleotide
gtaggaaaaatatctcatgcacctctgcaagagataagcccgatagaaaactattggagc

SEQ ID NO: 518429 - DNA, 60 bp, Artificial
  Synthetic oligonucleotide
gtaaagacaaatcaaatccgttaaaggattcctcctatccaaaaggagagataggcctca

SEQ ID NO: 518430 - DNA, 60 bp, Artificial
  Synthetic oligonucleotide
catggagttcacccggaagggatgggaattattggtctgattgcttgccaagcgttaggc

SEQ ID NO: 518431 - DNA, 60 bp, Artificial
  Synthetic oligonucleotide
catgggataaatcatacaagaagaccgcaacagtcgagtatcttccagagataactgcac

SEQ ID NO: 518432 - DNA, 60 bp, Artificial
  Synthetic oligonucleotide
cattagctagatcacaatctaggatgctaggtttaaggcccccagatgaccttagaacca

SEQ ID NO: 518433 - DNA, 60 bp, Artificial
  Synthetic oligonucleotide
ccaaagcacaactatgtgacatatgcaggttagacgagtttacctgtctgttcgaaaaga

SEQ ID NO: 518434 - DNA, 60 bp, Artificial
  Synthetic oligonucleotide
ccaacgatgcagtgttcggcggagttaaaggtaacttatcctacgggaaacttatcttta

SEQ ID NO: 518435 - DNA, 60 bp, Artificial
  Synthetic oligonucleotide
ggtctgcacttactaaagggttatcccaactaagaaccttaaccggttcaatagagagtt

SEQ ID NO: 518436 - DNA, 60 bp, Artificial
  Synthetic oligonucleotide
ccagcatgtgaccgcaatcaacggcattattgaaagtatggtccagccttagttttggac

SEQ ID NO: 518437 - DNA, 60 bp, Artificial
  Synthetic oligonucleotide
ggatttcaccaagttgctatgcatcctgactcaatagaatggacagctttttgggtccca

SEQ ID NO: 518438 - DNA, 60 bp, Artificial
  Synthetic oligonucleotide
ggaattaattctacacaatccgttgataagaagctccgttatggacgaatgactattagc

SEQ ID NO: 518439 - DNA, 60 bp, Artificial
  Synthetic oligonucleotide
ccctaacaataggacaagataaacagtctagcccaatctcggaatctgacccagagtcag

SEQ ID NO: 518440 - DNA, 60 bp, Artificial
  Synthetic oligonucleotide
ggaatgctttcaaaggaagcattaactttaccaattggtataatgtattcatagctagtg

SEQ ID NO: 518441 - DNA, 60 bp, Artificial
  Synthetic oligonucleotide
ccgaggaagcgatgctttgtgtaggagaacagcaagacaggatgtttatccaacctaaca

SEQ ID NO: 518442 - DNA, 60 bp, Artificial
  Synthetic oligonucleotide
gcaggattcatggctgaatcaatggatatgctcatcctggaggaacaactccttcaattg

SEQ ID NO: 518443 - DNA, 60 bp, Artificial
  Synthetic oligonucleotide
ctacactgttacgtagatacaggtgcaggattgtgtttagccagtaaacacgtcatccca

SEQ ID NO: 518444 - DNA, 60 bp, Artificial
  Synthetic oligonucleotide
gatcttttcgatcacgtaccttacagcctatgccctcactaacagcattcatagtgtagc

SEQ ID NO: 518445 - DNA, 60 bp, Artificial
  Synthetic oligonucleotide
ctattatgttagcacgaaagagattcatgttgacataaaggatacaaaaggtactgtcta

SEQ ID NO: 518446 - DNA, 60 bp, Artificial
  Synthetic oligonucleotide
ctcaaatacatccactgggatgatgaaaaatctcttcacgagatagacaacgatctgtta

SEQ ID NO: 518447 - DNA, 60 bp, Artificial
  Synthetic oligonucleotide
gatcatggttaggaattctcaactatgctcgcgcatacattcctaacttgggccgccttt

SEQ ID NO: 518448 - DNA, 60 bp, Artificial
  Synthetic oligonucleotide
ctcgtcatagagatgaaaagatttggcaatctcgtaggtctcccaatcttggtgaagatc

SEQ ID NO: 518449 - DNA, 60 bp, Artificial
  Synthetic oligonucleotide
cttgtacactatgttcttaggactagactacgtgtcaaatgctctagaacaagaacagaa

SEQ ID NO: 518450 - DNA, 60 bp, Artificial
  Synthetic oligonucleotide
ttgtcgacacaggtgcaagtatgtgtgttgcaagcaaacacgtaattccagaagagcact

SEQ ID NO: 518451 - DNA, 60 bp, Artificial
  Synthetic oligonucleotide
ttgggccagtaacctctatactggagctgtttatacagttttagcccttgatttgttggt

SEQ ID NO: 518452 - DNA, 60 bp, Artificial
  Synthetic oligonucleotide
ttaggacatgtcaagattgttctaaacagatgcaaagccctaggaatagtgcttagcaag

SEQ ID NO: 518453 - DNA, 60 bp, Artificial
  Synthetic oligonucleotide
acagtaaatttgactgtaaaagtggtttttatcaagttcccatggaacaagatagtatcc

SEQ ID NO: 518454 - DNA, 60 bp, Artificial
  Synthetic oligonucleotide
acagtcaggacagacaacgtgaatctcttaaaaggattcatgaacacaaaaattactgga

SEQ ID NO: 518455 - DNA, 60 bp, Artificial
  Synthetic oligonucleotide
tggagtttagaccaaaagaacctatctgcatagatgacctgttctctacagtaggaaaaa

SEQ ID NO: 518456 - DNA, 60 bp, Artificial
  Synthetic oligonucleotide
tgctaggattgaaaagcgaaagcacctggtccgcaacaaaagatgcaagtgcttcctatg

SEQ ID NO: 518457 - DNA, 60 bp, Artificial
  Synthetic oligonucleotide
tgacgatagaacacatcgacggaaaagacaatcacctagctgacactctaagcagactag

SEQ ID NO: 518458 - DNA, 60 bp, Artificial
  Synthetic oligonucleotide
tctcgagagtgaagtaaggtctaaaacaggccgaggtcctcaaaccggttattatcatat

SEQ ID NO: 518459 - DNA, 60 bp, Artificial
  Synthetic oligonucleotide
agagtacaacctattggttgaacaaaagagtagcatcactcttgactcacagtcaccaaa

SEQ ID NO: 518460 - DNA, 60 bp, Artificial
  Synthetic oligonucleotide
tctacagaaacgttcagatctctatccagaccagtggatatgagaattggcagaatggag

SEQ ID NO: 518461 - DNA, 60 bp, Artificial
  Synthetic oligonucleotide
agccatgttcgtaataccagaacaacttgggctattcaatgatgctttctctagatggga

SEQ ID NO: 518462 - DNA, 60 bp, Artificial
  Synthetic oligonucleotide
agccgaaaaacgtaaaccgttacaggtaaagttaaagaaagatcaggtatggtcatggag

SEQ ID NO: 518463 - DNA, 60 bp, Artificial
  Synthetic oligonucleotide
atatgataactggcagaatggagaggccaatctactagtaaccagaagcatgacagggag

SEQ ID NO: 518464 - DNA, 60 bp, Artificial
  Synthetic oligonucleotide
tactaagtcatccaaggtgttcgaaagaccacttgtgaccaaggaccactttgtccataa

SEQ ID NO: 518465 - DNA, 60 bp, Artificial
  Synthetic oligonucleotide
atacgagaaggagatcaatcctattggatgggaaaagcaaatcactggacagctatggtc

SEQ ID NO: 518466 - DNA, 60 bp, Artificial
  Synthetic oligonucleotide
tagacgtatgcgcttagtctcgctgtctacagtcttcctttaaacctgtaccgttccttt

SEQ ID NO: 518467 - DNA, 60 bp, Artificial
  Synthetic oligonucleotide
tcccagatctatttcctctaaccaggaatctgaagtagcccagtcctggagcgcacaatt

SEQ ID NO: 518468 - DNA, 60 bp, Artificial
  Synthetic oligonucleotide
agccgttgggagaatagtatccaagaatggtatgaaaagtctcacacagccaatctcgag

SEQ ID NO: 518469 - DNA, 60 bp, Artificial
  Synthetic oligonucleotide
agcgttaggcgatatgacgcaagattagaaaaggtcctacaagacttgaaggacgcgtca

SEQ ID NO: 518470 - DNA, 59 bp, Artificial
  Synthetic oligonucleotide
aaaggtgattataagcagggtagattagtaagatggcaaatgtggttttcaagatatgt

SEQ ID NO: 518471 - DNA, 59 bp, Artificial
  Synthetic oligonucleotide
cagaatggagaggcaaatttgctgatcacaagaggcatgacgggaaggttatccaacac

SEQ ID NO: 518472 - DNA, 59 bp, Artificial
  Synthetic oligonucleotide
acgaagactgggagacagctaaaactgcggttaatggtgtccccaacgtcaagcacaag

SEQ ID NO: 518473 - DNA, 59 bp, Artificial
  Synthetic oligonucleotide
tcctttagtttgcgtgttttatccgcttacacggattgtcctttgtaaccactttcacg

SEQ ID NO: 518474 - DNA, 58 bp, Artificial
  Synthetic oligonucleotide
tgataacacagaaaaggatcagtactcactgcctgggattcacactatcctgaagaga

SEQ ID NO: 518475 - DNA, 58 bp, Artificial
  Synthetic oligonucleotide
gccatggacattgctgtaggtttacatccgcaatggacagcgcaacaacgattagcct

SEQ ID NO: 518476 - DNA, 56 bp, Artificial
  Synthetic oligonucleotide
ctgggctctcgacatagcccaaaacaaaggacgattaggccaaggcccaattagat

SEQ ID NO: 518477 - DNA, 56 bp, Artificial
  Synthetic oligonucleotide
cacaactcctagtagaccaccgctatacgaaggaaggataccaagtgcatcaaggg

SEQ ID NO: 518478 - DNA, 56 bp, Artificial
  Synthetic oligonucleotide
acatagtagcaatgctgcgatttccggattatgtggagatacaggagtttaagcca

SEQ ID NO: 518479 - DNA, 55 bp, Artificial
  Synthetic oligonucleotide
gagacccttgaacaagaaatagaccctcaggttaccctgagactgtccatgcagg

SEQ ID NO: 518480 - DNA, 55 bp, Artificial
  Synthetic oligonucleotide
ggtggtgttctaaaggcacaaaccactgaaggacaagaactaatctgcagtactg

SEQ ID NO: 518481 - DNA, 55 bp, Artificial
  Synthetic oligonucleotide
gtaaaccgttacaggtaaagttaaagaaagatcaggtatggtcatggagtcagtc

SEQ ID NO: 518482 - DNA, 55 bp, Artificial
  Synthetic oligonucleotide
taagccatgcagtagcccaagctacaacaccaaaactgagcccaaaactgaagca

SEQ ID NO: 518483 - DNA, 55 bp, Artificial
  Synthetic oligonucleotide
gcacctctgcaagagataagcccgatagaaaactattggagcatgaacctaggta

SEQ ID NO: 518484 - DNA, 55 bp, Artificial
  Synthetic oligonucleotide
tattccgaccctgacatggtgttactattaatggagcatctgacggccggaagtg

SEQ ID NO: 518485 - DNA, 55 bp, Artificial
  Synthetic oligonucleotide
gccttcaacgccggtctagtcaaggtaatttatccctccaacaatctacaagaaa

SEQ ID NO: 518486 - DNA, 55 bp, Artificial
  Synthetic oligonucleotide
ggagcttaatggtaggccccacgataacgacatccaccagctccactcgcgacga

SEQ ID NO: 518487 - DNA, 55 bp, Artificial
  Synthetic oligonucleotide
ggagtcaacgattcagaaggaagaattaatggaccttgcggtcttaaaggcgcaa

SEQ ID NO: 518488 - DNA, 55 bp, Artificial
  Synthetic oligonucleotide
tcttaggactagactacgtgtcaaatgctctagaacaagaacagaagcttcggca

SEQ ID NO: 518489 - DNA, 55 bp, Artificial
  Synthetic oligonucleotide
gtctaaaacaggccgaggtcctcaaaccggttattatcatatagccgcagtccag

SEQ ID NO: 518490 - DNA, 55 bp, Artificial
  Synthetic oligonucleotide
gggttatcccaactaagaaccttaaccggttcaatagagagttacactctcaggg

SEQ ID NO: 518491 - DNA, 55 bp, Artificial
  Synthetic oligonucleotide
aagaccgcaacagtcgagtatcttccagagataactgcactccgtccgaaaagac

SEQ ID NO: 518492 - DNA, 55 bp, Artificial
  Synthetic oligonucleotide
aatggagggccccagacacgtgaagacgcgtctgccgacagtgggtctcggacaa

SEQ ID NO: 518493 - DNA, 55 bp, Artificial
  Synthetic oligonucleotide
accaggaatctgaagtagcccagtcctggagcgcacaattgcctgtagtagcgtg

SEQ ID NO: 518494 - DNA, 55 bp, Artificial
  Synthetic oligonucleotide
acgtcctggactgtcgtataccttatagcgttggacagagtaccgtgttaggcag

SEQ ID NO: 518495 - DNA, 55 bp, Artificial
  Synthetic oligonucleotide
actctcagggacgatttgtcctctcttttgcaggaacaatagccatggagtcctc

SEQ ID NO: 518496 - DNA, 55 bp, Artificial
  Synthetic oligonucleotide
atacggtgtagaggacacatccgctaggatgagcatgtatactgccatcagatcc

SEQ ID NO: 518497 - DNA, 55 bp, Artificial
  Synthetic oligonucleotide
atgacatcactcataaggatcagtatagtcttccaggaataaatacgatcctcaa

SEQ ID NO: 518498 - DNA, 55 bp, Artificial
  Synthetic oligonucleotide
atgtttactgtatacccaaagtttggagtaagtcttgacacacaacgttttgacc

SEQ ID NO: 518499 - DNA, 55 bp, Artificial
  Synthetic oligonucleotide
cagagggacccatacccctcaaaaccatatcttagaacaccttcacggttttcct

SEQ ID NO: 518500 - DNA, 55 bp, Artificial
  Synthetic oligonucleotide
caggacgtttatacaaccatccagtctagagagactacaaagaacgggaatgtcc

SEQ ID NO: 518501 - DNA, 55 bp, Artificial
  Synthetic oligonucleotide
catcggtaataacttctgtcaggagtactctcctttcatacagttcacaggacac

SEQ ID NO: 518502 - DNA, 55 bp, Artificial
  Synthetic oligonucleotide
ccaatcgaaatccttgacggataagattgaacctgaacctttaaccaaggatgag

SEQ ID NO: 518503 - DNA, 55 bp, Artificial
  Synthetic oligonucleotide
ccattgccgcaaagataatcaatgacgttacgaaagtaatacgagattgtccttg

SEQ ID NO: 518504 - DNA, 55 bp, Artificial
  Synthetic oligonucleotide
ccccaaaggcgaattagtcaagccaaagacttttgcaaaggccgtaacaagccct

SEQ ID NO: 518505 - DNA, 55 bp, Artificial
  Synthetic oligonucleotide
cttggcctatgatggcctcctgcagcaacgaagggataccattacacatggcacc

SEQ ID NO: 518506 - DNA, 55 bp, Artificial
  Synthetic oligonucleotide
ctccgtctgaatagcaatcctccacgggacgctgtgagcctggagacctgatgcc

SEQ ID NO: 518507 - DNA, 55 bp, Artificial
  Synthetic oligonucleotide
cccgataagggaataggtagctacagagatcccggcctacgggccaattaagggg

SEQ ID NO: 518508 - DNA, 55 bp, Artificial
  Synthetic oligonucleotide
ccctcttctatcatgtattctcttatgtcttatcaacaattgttctgaatagcgc

SEQ ID NO: 518509 - DNA, 55 bp, Artificial
  Synthetic oligonucleotide
ccgtgggtcaaaccatagatgacttctggtcaaatctaggtgtaaaccagctaga

SEQ ID NO: 518510 - DNA, 55 bp, Artificial
  Synthetic oligonucleotide
cggttaaagctgaaccaagtcctgtacaggataaaccagctaacacaaatggtac

SEQ ID NO: 518511 - DNA, 55 bp, Artificial
  Synthetic oligonucleotide
cgcgacacgcgtaaaagatgacaccatacacttgtggtgagaatcaataggccac

SEQ ID NO: 518512 - DNA, 55 bp, Artificial
  Synthetic oligonucleotide
cctctatactggagctgtttatacagttttagcccttgatttgttggtcagcgcc

SEQ ID NO: 518513 - DNA, 54 bp, Artificial
  Synthetic oligonucleotide
aaaattgtagatgttggatctgcagcgaagaaggtcactatgccaatgagtgcc

SEQ ID NO: 518514 - DNA, 54 bp, Artificial
  Synthetic oligonucleotide
aggttctttacttagatcaaataggaattaccgaaccgtcatttaatgaacagg

SEQ ID NO: 518515 - DNA, 54 bp, Artificial
  Synthetic oligonucleotide
agtatgtgtgttgcaagcaaacacgtaattccagaagagcactgggaaaacagt

SEQ ID NO: 518516 - DNA, 54 bp, Artificial
  Synthetic oligonucleotide
gcctatgcacatagattggtcaaagaagagatcacgaagatttgtagtctctct

SEQ ID NO: 518517 - DNA, 53 bp, Artificial
  Synthetic oligonucleotide
gtaatccaggatgaagcctacagagagttggaaagaatgtcttgtacagacgt

SEQ ID NO: 518518 - DNA, 53 bp, Artificial
  Synthetic oligonucleotide
ccagagtcagaagaagagatatacgtcttagacgatatgcataagcctaggac

SEQ ID NO: 518519 - DNA, 53 bp, Artificial
  Synthetic oligonucleotide
tccagatatgggatgcggagatccaagacatacaaaggaaaacctcatgcgtc

SEQ ID NO: 518520 - DNA, 53 bp, Artificial
  Synthetic oligonucleotide
aggaataatcaactatgcagcgtcacactatagcatagaagtgacaaagctga

SEQ ID NO: 518521 - DNA, 53 bp, Artificial
  Synthetic oligonucleotide
agaaacgggatcaactctcccgtcaaactcgctctcattgatgaccgaatcaa

SEQ ID NO: 518522 - DNA, 52 bp, Artificial
  Synthetic oligonucleotide
atcccacgaaggttatcaaggttaaacccatgaaatatagcccaatggaccg

SEQ ID NO: 518523 - DNA, 52 bp, Artificial
  Synthetic oligonucleotide
tggtatcagagctagttatgagtgagtaggttcttataaggtattcgggtaa

SEQ ID NO: 518524 - DNA, 52 bp, Artificial
  Synthetic oligonucleotide
cttaggtcacctttacaggttaaacttaagaaagagatcacctggtcttgga

SEQ ID NO: 518525 - DNA, 52 bp, Artificial
  Synthetic oligonucleotide
agattgctcataaccttgcagtaacctttgataggttaaatttaggaaaccg

SEQ ID NO: 518526 - DNA, 52 bp, Artificial
  Synthetic oligonucleotide
agatatgggttagttcgaatgatctatccgagcaacaacttgcaagaattaa

SEQ ID NO: 518527 - DNA, 52 bp, Artificial
  Synthetic oligonucleotide
tgcgaaaagatcagtctctatgagacgatgttaactgatatctcagttcagg

SEQ ID NO: 518528 - DNA, 51 bp, Artificial
  Synthetic oligonucleotide
ggagattaaccctaattagtggatctaaggggctacttataaacccttatc

SEQ ID NO: 518529 - DNA, 50 bp, Artificial
  Synthetic oligonucleotide
actctcacgagtaaattggttattatggagccagggcaatcgtccaaatc

SEQ ID NO: 518530 - DNA, 50 bp, Artificial
  Synthetic oligonucleotide
ggctattccacgatgttttctcaagatgggagtccattacaaagaactat

SEQ ID NO: 518531 - DNA, 50 bp, Artificial
  Synthetic oligonucleotide
ctagatcaagagtcacaactcttaactgcgtttacatgtccctcgggtca

SEQ ID NO: 518532 - DNA, 50 bp, Artificial
  Synthetic oligonucleotide
acgcatagacctcaatcgcatatcttggaacacatccaaaagttcccaga

SEQ ID NO: 518533 - DNA, 50 bp, Artificial
  Synthetic oligonucleotide
tcctctctttgaggatcaagtcagaaattaccggagaaaccaaagacgtc

SEQ ID NO: 518534 - DNA, 50 bp, Artificial
  Synthetic oligonucleotide
catggaaagagattcaaaatctcagcctaccccaggcaccaacattaccc

SEQ ID NO: 518535 - DNA, 50 bp, Artificial
  Synthetic oligonucleotide
gaacatgtttctggtcaaaagaatgttctagctgatataatgactcggga

SEQ ID NO: 518536 - DNA, 50 bp, Artificial
  Synthetic oligonucleotide
ccaggagtcgtatcaggggtggtacccagggtattatttgcttacaagtt

SEQ ID NO: 518537 - DNA, 50 bp, Artificial
  Synthetic oligonucleotide
cagagataacttccaaggacacgggtcctactgataacacagccctagaa

SEQ ID NO: 518538 - DNA, 60 bp, Artificial
  Synthetic oligonucleotide
gatatactgaggccgttccataccatgttagccccttgaatgacagatacccatggtgtt

SEQ ID NO: 518539 - DNA, 60 bp, Artificial
  Synthetic oligonucleotide
gcactggatccaactcccctgtcaccctgggtgattggggagcagggccagaattcaacc

SEQ ID NO: 518540 - DNA, 60 bp, Artificial
  Synthetic oligonucleotide
gccgttatagagacagcgtaacacatatatacctagacggaccgcccccttcaagtcacg

SEQ ID NO: 518541 - DNA, 60 bp, Artificial
  Synthetic oligonucleotide
gcgatggtctgcgtatgaagggactcgttcctcttgtgtttgagcagcatttctctcatg

SEQ ID NO: 518542 - DNA, 60 bp, Artificial
  Synthetic oligonucleotide
gcgattgaggattacccgtctcaaatatctcgcctgccttagaacagtaccttttgttat

SEQ ID NO: 518543 - DNA, 60 bp, Artificial
  Synthetic oligonucleotide
gcgcctttagggcgaagcccgtttctctccactctctcggccgggggtggtctggctggc

SEQ ID NO: 518544 - DNA, 60 bp, Artificial
  Synthetic oligonucleotide
gcgtccagttgattttactgaatttggaaagcttgcttctaattttgaggcgtttaagtt

SEQ ID NO: 518545 - DNA, 60 bp, Artificial
  Synthetic oligonucleotide
ggcaagagcaagtatgctaatgaggttgagggtaccaagtattggaagccccgtgggcaa

SEQ ID NO: 518546 - DNA, 60 bp, Artificial
  Synthetic oligonucleotide
ggcagctcactaagtgaagttgcccaggcaaaccccgaagtttttattcgctatgggagg

SEQ ID NO: 518547 - DNA, 60 bp, Artificial
  Synthetic oligonucleotide
ggccgatgttgaatttgaggtagttaacattccaagatggctgcgtgtatcctcctttta

SEQ ID NO: 518548 - DNA, 60 bp, Artificial
  Synthetic oligonucleotide
ggggggatatgtacaatttttagcccgcgatatattcatcacctccaataaacctgtgga

SEQ ID NO: 518549 - DNA, 60 bp, Artificial
  Synthetic oligonucleotide
gggggtgaaatatctgctgtggatgcgggtgggattccagagtcttcttgtgctgtcatc

SEQ ID NO: 518550 - DNA, 60 bp, Artificial
  Synthetic oligonucleotide
ggtctaggtgattgtgcggagaacgagcaactagccgctgggggcagtgaattgccgctt

SEQ ID NO: 518551 - DNA, 60 bp, Artificial
  Synthetic oligonucleotide
ggtcttttgtgccaggagttcgtttcgcaggtcgccagacagatcctgcgaaattgaatt

SEQ ID NO: 518552 - DNA, 60 bp, Artificial
  Synthetic oligonucleotide
ggtgttttacatctttatctctggagtctatccagagctggtttctggggttgttgggct

SEQ ID NO: 518553 - DNA, 60 bp, Artificial
  Synthetic oligonucleotide
ggttggctgccgtactgtgagtgcctacgtctgtgtgaccggtaccctcatcgtgtacct

SEQ ID NO: 518554 - DNA, 60 bp, Artificial
  Synthetic oligonucleotide
ggttgtgcattatggaggatgtgttggaatgcaaggtattggagatggtctaccaaaagg

SEQ ID NO: 518555 - DNA, 60 bp, Artificial
  Synthetic oligonucleotide
ggtttatcctcaacaaaatatctctactcgtgatcagacgacaattatgccggcatactg

SEQ ID NO: 518556 - DNA, 60 bp, Artificial
  Synthetic oligonucleotide
gtagcgagtttactcttaatgttgttaaatcgcatacctttggtaagattgcaaaatcct

SEQ ID NO: 518557 - DNA, 60 bp, Artificial
  Synthetic oligonucleotide
gtatgtatcagggggaccggggtggactggcactagcgctgctaaggttaatattagtcc

SEQ ID NO: 518558 - DNA, 60 bp, Artificial
  Synthetic oligonucleotide
gtcataatcaaccgccgttgcacatacggtagatagccccccctcctggtcaaattgtgc

SEQ ID NO: 518559 - DNA, 60 bp, Artificial
  Synthetic oligonucleotide
gtctatgatgacgttgtcctgttgatggtagccgtcccaccagagccctctaggtttgta

SEQ ID NO: 518560 - DNA, 60 bp, Artificial
  Synthetic oligonucleotide
gtcttttaggataaattctctgaattgtacataaatagtcagccttaccacataattttg

SEQ ID NO: 518561 - DNA, 60 bp, Artificial
  Synthetic oligonucleotide
gtgcttgtggactgtaaccggccacagactacgcgtgtatccggccacaaaaccaggggt

SEQ ID NO: 518562 - DNA, 60 bp, Artificial
  Synthetic oligonucleotide
gtgggtcagtcttggatgggaagtccactgtgaattgccgtctaaatctgaacaagtata

SEQ ID NO: 518563 - DNA, 60 bp, Artificial
  Synthetic oligonucleotide
cgccctattcaagaaattacttctttcgctcagatggaatctcagtacgcacctcttgtg

SEQ ID NO: 518564 - DNA, 60 bp, Artificial
  Synthetic oligonucleotide
cgccgcgttctggtacctccactgcagagattgggccaagagtcgacgccgcgcggagat

SEQ ID NO: 518565 - DNA, 60 bp, Artificial
  Synthetic oligonucleotide
cgcgagtaatacgcctccttctggttgctgtgcgacgtacctaaaaatagaatggcccca

SEQ ID NO: 518566 - DNA, 60 bp, Artificial
  Synthetic oligonucleotide
cgcggaatctaaagttgtaaatgccaactttatttctgtaacggcgccggccgcgggtgt

SEQ ID NO: 518567 - DNA, 60 bp, Artificial
  Synthetic oligonucleotide
cggtgtatccgcagcaaaatatctctacgcgtgatcagactactattatgccggcgtatt

SEQ ID NO: 518568 - DNA, 60 bp, Artificial
  Synthetic oligonucleotide
cgtacccccctgtacagcgtgacgtacccccctgtacatgggcgggactgtacagggggg

SEQ ID NO: 518569 - DNA, 60 bp, Artificial
  Synthetic oligonucleotide
cgtcgtatttgatccatccgtagaagtcgtctataattacacttgtttgttggtggtatc

SEQ ID NO: 518570 - DNA, 60 bp, Artificial
  Synthetic oligonucleotide
ctactccgtgaacagggttcaaggcccggacactattgttcgcaatgaccgtgactacac

SEQ ID NO: 518571 - DNA, 60 bp, Artificial
  Synthetic oligonucleotide
ctatgggaggggtttgagggattatatgaatgttagaggcctagtaaagcctcgtgactt

SEQ ID NO: 518572 - DNA, 60 bp, Artificial
  Synthetic oligonucleotide
ctccggaggaggaggatgccgtgaagaaccttgcgccggacgctaagtacttaatctgtg

SEQ ID NO: 518573 - DNA, 60 bp, Artificial
  Synthetic oligonucleotide
ctcctgttccatgcgatgcttgtaggaagtctgttaatttaaatgacagatggtcaaagt

SEQ ID NO: 518574 - DNA, 60 bp, Artificial
  Synthetic oligonucleotide
ctcgaatcctcctttcacttgaacttggtatgggtagcggtccataattttgagcatttc

SEQ ID NO: 518575 - DNA, 60 bp, Artificial
  Synthetic oligonucleotide
ctcgcagtttaaacgaatctgcgaccgataccccgttcgagtggagctcaaagggcttag

SEQ ID NO: 518576 - DNA, 60 bp, Artificial
  Synthetic oligonucleotide
ctcgcgaggcttgcgagagctgctccttatatctccggagatgaccacgccccggacgtg

SEQ ID NO: 518577 - DNA, 60 bp, Artificial
  Synthetic oligonucleotide
ctcgtgactttaagacccatgtaattgtacttgtgggggaacctgggagtggcaagagca

SEQ ID NO: 518578 - DNA, 60 bp, Artificial
  Synthetic oligonucleotide
ctcttgaagcacgtcttaacggtcttatgcatcagtcccatcctactagcggttcttatc

SEQ ID NO: 518579 - DNA, 60 bp, Artificial
  Synthetic oligonucleotide
ctgaaaatgtctgtaaagagaaagtataacgtcatgaaaggggacgagacccccgggaga

SEQ ID NO: 518580 - DNA, 60 bp, Artificial
  Synthetic oligonucleotide
ctgccaagcgatcgacaaaggaactttcactgcctccacatgccgaaatatcagaaaaag

SEQ ID NO: 518581 - DNA, 60 bp, Artificial
  Synthetic oligonucleotide
ctgcggtaacgcctccttggccacgtcatcctataaaagtgaaagaagtgcgctgctgta

SEQ ID NO: 518582 - DNA, 60 bp, Artificial
  Synthetic oligonucleotide
ctggatgcagtctcgtagtcaagatgaacggaatcgtcatactcgtgaattgtatggcct

SEQ ID NO: 518583 - DNA, 60 bp, Artificial
  Synthetic oligonucleotide
cttctccaccactgagaacgtcattttgggcttgaatttacggctatgccccacccccgt

SEQ ID NO: 518584 - DNA, 60 bp, Artificial
  Synthetic oligonucleotide
gaagaatggaagaagcggaccccaaccacataaaaggtggcgggaggagtagtttacgta

SEQ ID NO: 518585 - DNA, 60 bp, Artificial
  Synthetic oligonucleotide
gaagcatggaagaagcggaccccaaccacataaaaggtgggtgttcacgctgaataatcc

SEQ ID NO: 518586 - DNA, 60 bp, Artificial
  Synthetic oligonucleotide
gaatgcgtcgcttacataaccaataaatttgtaaagttgatcagtatcaacgttacttgt

SEQ ID NO: 518587 - DNA, 60 bp, Artificial
  Synthetic oligonucleotide
gagacaaacttctgaataaatgaatggaaacacatgataattggttcaaagcgagttttt

SEQ ID NO: 518588 - DNA, 60 bp, Artificial
  Synthetic oligonucleotide
tggatagtgtgtgcccgcagtggaaacaggtctgtttcaactacggtatagcatgttggc

SEQ ID NO: 518589 - DNA, 60 bp, Artificial
  Synthetic oligonucleotide
tggcatccaagataacaacagtggacccaacacctctttgattagaggtgatggggtctc

SEQ ID NO: 518590 - DNA, 60 bp, Artificial
  Synthetic oligonucleotide
tggcctcggctgtccccatttctccccccctaagggggggagtctcagtattaccttgaa

SEQ ID NO: 518591 - DNA, 60 bp, Artificial
  Synthetic oligonucleotide
tgggcggcctcgtatagaggtaactagtgatgatgcttataaggtcgtgcattatggagg

SEQ ID NO: 518592 - DNA, 60 bp, Artificial
  Synthetic oligonucleotide
tggtccaacttcattctgctctcaaggatggactcacccaagcccagtacgtcgaccaat

SEQ ID NO: 518593 - DNA, 60 bp, Artificial
  Synthetic oligonucleotide
tggtgctctggaatgctggttctactgattgtggccacatatttcattcctcgtttccct

SEQ ID NO: 518594 - DNA, 60 bp, Artificial
  Synthetic oligonucleotide
tggtttcttttattatttgggtggaaccaatcaattgtttggtccagctcaggtttgggg

SEQ ID NO: 518595 - DNA, 60 bp, Artificial
  Synthetic oligonucleotide
tgtatggccttgattggtctgatatacagtatccttggctgagcggtgtaacctctggaa

SEQ ID NO: 518596 - DNA, 60 bp, Artificial
  Synthetic oligonucleotide
tgttgacgataagtcaattagcgttgacagtttacttactctcgatcgtcataagaagta

SEQ ID NO: 518597 - DNA, 60 bp, Artificial
  Synthetic oligonucleotide
tgtttgcgctcgacgaaccggtttcccccactttctatactcgtaccccccttcgccgcg

SEQ ID NO: 518598 - DNA, 60 bp, Artificial
  Synthetic oligonucleotide
ttaccttgaagactccccctccgtggatggtagtgcggtgaatatgtcccacctatccgc

SEQ ID NO: 518599 - DNA, 60 bp, Artificial
  Synthetic oligonucleotide
ttaccttgggatgatctactgagactgtgtgaccggtatccattgactgtagagactaaa

SEQ ID NO: 518600 - DNA, 60 bp, Artificial
  Synthetic oligonucleotide
ttacggctatgccccacccccgtccggaaggtacgggcattttgcatcatcattagttgc

SEQ ID NO: 518601 - DNA, 60 bp, Artificial
  Synthetic oligonucleotide
ttactgctgtgaatgaagcctttaaggaaaaggatgttgtttatgctgtctgcgggaagg

SEQ ID NO: 518602 - DNA, 60 bp, Artificial
  Synthetic oligonucleotide
ttattgagagtgaacactatacgtttaagccgctgtctggcactcattgtgccgttatag

SEQ ID NO: 518603 - DNA, 60 bp, Artificial
  Synthetic oligonucleotide
ttcagttagggtagcatagcaacagtactctcacgaccatggcacgattcaaacgagttt

SEQ ID NO: 518604 - DNA, 60 bp, Artificial
  Synthetic oligonucleotide
ttcggatactacagacggggaagatggcactggagacacagactgcgacgaagacgctat

SEQ ID NO: 518605 - DNA, 60 bp, Artificial
  Synthetic oligonucleotide
ttcgtataccgcgtccgtatctgatatagcagttaggatgtttttctgcaatccgtcgga

SEQ ID NO: 518606 - DNA, 60 bp, Artificial
  Synthetic oligonucleotide
ttctatgggtgggtcccatatgatgagctcctgagggtgggggatagatatccccttaaa

SEQ ID NO: 518607 - DNA, 60 bp, Artificial
  Synthetic oligonucleotide
ttctctttggctactgtaacaaaatggtgtccccgtattgaacgcccgaataacatggaa

SEQ ID NO: 518608 - DNA, 60 bp, Artificial
  Synthetic oligonucleotide
ttgactgtagagactaaagggggtactgttccttttttggcccgcagtattttgattacc

SEQ ID NO: 518609 - DNA, 60 bp, Artificial
  Synthetic oligonucleotide
ttggaaaggtaggggtagggggttggtgccgcctgagggggggaggaactggccgatgtt

SEQ ID NO: 518610 - DNA, 60 bp, Artificial
  Synthetic oligonucleotide
ttgttctgtacatcgctccccttagctggctcgatgtgcgcacgatctccgacaatagtt

SEQ ID NO: 518611 - DNA, 60 bp, Artificial
  Synthetic oligonucleotide
tttgcggagcatgcgcagtaggccgcgcagcggccgttatttgcgaagcatcatggcagc

SEQ ID NO: 518612 - DNA, 60 bp, Artificial
  Synthetic oligonucleotide
ttttagacgtcgttatgtgcgacgatttagagccgtaagagtcgtacaggggatatggtt

SEQ ID NO: 518613 - DNA, 60 bp, Artificial
  Synthetic oligonucleotide
gttacgcctccaccgatgacgtgtcgagcgcggcattttcaaatctgtgccggggatagt

SEQ ID NO: 518614 - DNA, 60 bp, Artificial
  Synthetic oligonucleotide
gttatcggattagcatctacctccctcgacgactcatcaggaacctacgctactatgcga

SEQ ID NO: 518615 - DNA, 60 bp, Artificial
  Synthetic oligonucleotide
gttgtctgttgatcgggcgaaggcatatcggggtacaacgaaagcgaggaggtcttttgt

SEQ ID NO: 518616 - DNA, 60 bp, Artificial
  Synthetic oligonucleotide
gttgtcttcgtcggatccgtttgccttttcaatatgagctgtgtcacacaacgattcttt

SEQ ID NO: 518617 - DNA, 60 bp, Artificial
  Synthetic oligonucleotide
taaatcgcatacctttggtaagattgcaaaatcctggtagatgtattgtgcctgtggtag

SEQ ID NO: 518618 - DNA, 60 bp, Artificial
  Synthetic oligonucleotide
taacggtttctgaaggcggggtgtgccaaatatggtcttctccggaggatgtttccaaga

SEQ ID NO: 518619 - DNA, 60 bp, Artificial
  Synthetic oligonucleotide
taactttgagttcagtttctgcatcgtagttattgactgtgaagcagaatcgtcgcagtg

SEQ ID NO: 518620 - DNA, 60 bp, Artificial
  Synthetic oligonucleotide
tacagggcctccagggtgcggtaaatcccggtatgcagcagaccatgcttccggtactcc

SEQ ID NO: 518621 - DNA, 60 bp, Artificial
  Synthetic oligonucleotide
tacttatcgagtgtggagctccgcggaaccaggggaagcgcagcgacctgtctactgctg

SEQ ID NO: 518622 - DNA, 60 bp, Artificial
  Synthetic oligonucleotide
tagccggatgtttcgtagacgatatagacgcacacgaaagcggacttctgggacaatgtg

SEQ ID NO: 518623 - DNA, 60 bp, Artificial
  Synthetic oligonucleotide
tagtattacccaccacttcgtaacacacttggtaacgctcctttttcttttgaccttgaa

SEQ ID NO: 518624 - DNA, 60 bp, Artificial
  Synthetic oligonucleotide
tagtattacccctcacctcgagcccatcggccccagataagataacagagcactataaaa

SEQ ID NO: 518625 - DNA, 60 bp, Artificial
  Synthetic oligonucleotide
tagtattacccgtcacttcgtaaccacttcgtaacggctggccttgagcgagttcgttgg

SEQ ID NO: 518626 - DNA, 60 bp, Artificial
  Synthetic oligonucleotide
tagtgacgtaagcgtatcgaggtgccgggcatagtattacccggcacctcgtcacagaca

SEQ ID NO: 518627 - DNA, 60 bp, Artificial
  Synthetic oligonucleotide
tataccggtgtgatagcattccataaaaaagatgacgccaatgctactgggaaacataca

SEQ ID NO: 518628 - DNA, 60 bp, Artificial
  Synthetic oligonucleotide
tattacgcatttttgttgttggtatccgtcccaccatagtcctctgggcttgtaatatat

SEQ ID NO: 518629 - DNA, 60 bp, Artificial
  Synthetic oligonucleotide
tcccgggggaacaaagtcgtcaatattaaatctcagcatgtccaccgcccaggagggcgt

SEQ ID NO: 518630 - DNA, 60 bp, Artificial
  Synthetic oligonucleotide
tcgacgtatagttatattcattacgccgcatgcgggtcactggctcaacgcggataagca

SEQ ID NO: 518631 - DNA, 60 bp, Artificial
  Synthetic oligonucleotide
tcgcagaaaacacctttcgttcctacccgtcctacaatcattacgccactgactgccttc

SEQ ID NO: 518632 - DNA, 60 bp, Artificial
  Synthetic oligonucleotide
tcgcggccagtgaggtcaatcactgtggcaccccatgcccgtacttccgaaatcgagacc

SEQ ID NO: 518633 - DNA, 60 bp, Artificial
  Synthetic oligonucleotide
tctggtgtcgccgacaccccgcaattctccccgtggatgcaatggggaattgccacgctt

SEQ ID NO: 518634 - DNA, 60 bp, Artificial
  Synthetic oligonucleotide
tcttgtcttaaaatatctcgggggtattgggttgacgagttccaagtaacttcgtatacc

SEQ ID NO: 518635 - DNA, 60 bp, Artificial
  Synthetic oligonucleotide
tgaattttgttccgagtataatagcaagcgttggcacatccgctggaggcactttgacaa

SEQ ID NO: 518636 - DNA, 60 bp, Artificial
  Synthetic oligonucleotide
tgccaatgtacgcctcatggagatccaagagtttaagaagtctaaccaagtggtgctctg

SEQ ID NO: 518637 - DNA, 60 bp, Artificial
  Synthetic oligonucleotide
tgctgttgataaccatcccaccatagaccacgcggtttataatagatggagtcggtattg

SEQ ID NO: 518638 - DNA, 60 bp, Artificial
  Synthetic oligonucleotide
acctctggaaatgaggcccgttctcttggttctgtcacgagttggcagttttctaaaaac

SEQ ID NO: 518639 - DNA, 60 bp, Artificial
  Synthetic oligonucleotide
acgaccgcattgaaccggtagtagtcccaattaaggaagttggcacaaaagtcctttaag

SEQ ID NO: 518640 - DNA, 60 bp, Artificial
  Synthetic oligonucleotide
acggaggtgggcttagattcatcgtcataatcaaccgccgttgcacatacggtagatagc

SEQ ID NO: 518641 - DNA, 60 bp, Artificial
  Synthetic oligonucleotide
acgtctcaaacccctgcatatgctatgttgccttggcataaaggcggccctcttcagaag

SEQ ID NO: 518642 - DNA, 60 bp, Artificial
  Synthetic oligonucleotide
actatggccggaaggaccaccgcgtttaatattattcaggatgtgtgggtgaaatgtatt

SEQ ID NO: 518643 - DNA, 60 bp, Artificial
  Synthetic oligonucleotide
agaacgtcattttgggcttgaatttacggctatgccccacccccgtccggaaggtacggg

SEQ ID NO: 518644 - DNA, 60 bp, Artificial
  Synthetic oligonucleotide
agaattcaaccttaacctttcttattctgtagtattcaaagggtatagagattttgttgg

SEQ ID NO: 518645 - DNA, 60 bp, Artificial
  Synthetic oligonucleotide
ccaatgttactgtcattacagggcctccagggtgcggtaaatcccggtatgcagcagacc

SEQ ID NO: 518646 - DNA, 60 bp, Artificial
  Synthetic oligonucleotide
agaccgctcgaaatctgactcatgaggcagataagtacgcgtttgcgataatcggcaaag

SEQ ID NO: 518647 - DNA, 60 bp, Artificial
  Synthetic oligonucleotide
ccaaaccctgactccacaatcaaacacttggagcctgtgacccagcaaactgtcggaact

SEQ ID NO: 518648 - DNA, 60 bp, Artificial
  Synthetic oligonucleotide
agctacaaattcaacacattccacgaggtaatggtacaagaccccatgaatgtagccccc

SEQ ID NO: 518649 - DNA, 60 bp, Artificial
  Synthetic oligonucleotide
agctataccccagccagttcattcgttatgggcggggactgagggactatgcctcggtat

SEQ ID NO: 518650 - DNA, 60 bp, Artificial
  Synthetic oligonucleotide
aggtttgggggtgaagtacctggagtggtaggtaaagggctgccttatggtgtggcggga

SEQ ID NO: 518651 - DNA, 60 bp, Artificial
  Synthetic oligonucleotide
catccgggatcttacctggtaagactgccgaacccctataacgcgattaacctatacttt

SEQ ID NO: 518652 - DNA, 60 bp, Artificial
  Synthetic oligonucleotide
ataagaagtatagaggcactcaacgtggacatatgacctttaaaccagctgttatcggat

SEQ ID NO: 518653 - DNA, 60 bp, Artificial
  Synthetic oligonucleotide
caatgccgtatttcagtctggacaggctgaaacttctgcttttagggtttatagtattga

SEQ ID NO: 518654 - DNA, 60 bp, Artificial
  Synthetic oligonucleotide
cacctggtaatggatgtcatttgcactcatgttctgcatagcatattttagccccagaaa

SEQ ID NO: 518655 - DNA, 60 bp, Artificial
  Synthetic oligonucleotide
cacggtcacgcggcaattacccgaagaattggcagagttctgtttttcttcgcagaaaac

SEQ ID NO: 518656 - DNA, 60 bp, Artificial
  Synthetic oligonucleotide
cactcacttcagcacacggcacacctatggaacatgccccacaaacgcctaagaaagacc

SEQ ID NO: 518657 - DNA, 60 bp, Artificial
  Synthetic oligonucleotide
cactcggggttccgcactcccagtagtcaccccctttagtacaatactctttgttctgta

SEQ ID NO: 518658 - DNA, 60 bp, Artificial
  Synthetic oligonucleotide
attttattccgtctcacaagcatcctctagcgctttcagatagccagacatcgattgagt

SEQ ID NO: 518659 - DNA, 60 bp, Artificial
  Synthetic oligonucleotide
cagacacaactaaaggcaaaaacgttacaacaactaatgtggcactaattaacgttaacc

SEQ ID NO: 518660 - DNA, 60 bp, Artificial
  Synthetic oligonucleotide
attagaggtgatggggtctctggggtaaaattcatatttagcctttctaatacggtagta

SEQ ID NO: 518661 - DNA, 60 bp, Artificial
  Synthetic oligonucleotide
cagacttttaacaaggtgaagtggtattttggtgcccgctgccacatcgagaaagcgaaa

SEQ ID NO: 518662 - DNA, 60 bp, Artificial
  Synthetic oligonucleotide
atggtatttgataaagctaattgggtgcaatttagccacgttggatagagtgttcgtccc

SEQ ID NO: 518663 - DNA, 60 bp, Artificial
  Synthetic oligonucleotide
cagataacgttggaggaagccatgatattgaagcaagcgggccgcaaggtggtggatcat

SEQ ID NO: 518664 - DNA, 60 bp, Artificial
  Synthetic oligonucleotide
caggccccccaggaatggtactcctcaactgctgtcccagctgtagaagctctctatcgg

SEQ ID NO: 518665 - DNA, 60 bp, Artificial
  Synthetic oligonucleotide
caggtaattggcgatttaaccgcgtgaagagcctgctcgggggtcgtgcccatattgaga

SEQ ID NO: 518666 - DNA, 60 bp, Artificial
  Synthetic oligonucleotide
atggctggttaccttgggatgatctactgagactgtgtgaccggtatccattgactgtag

SEQ ID NO: 518667 - DNA, 60 bp, Artificial
  Synthetic oligonucleotide
atgcaagaattgataacgttggcgctgacggactggctcgatatatgattaccggcaaag

SEQ ID NO: 518668 - DNA, 60 bp, Artificial
  Synthetic oligonucleotide
atgatccttcgcaatatcactgagtctgatttgcccattctgtataccttcgacaaggga

SEQ ID NO: 518669 - DNA, 60 bp, Artificial
  Synthetic oligonucleotide
atatgaatggagccttgttaggatcttttggtggctccaatcttcctgggacagtcccgg

SEQ ID NO: 518670 - DNA, 60 bp, Artificial
  Synthetic oligonucleotide
ccgtcggatgtctctttcgccggttgatatcgttgccacgactgcgtccaaatcactgcg

SEQ ID NO: 518671 - DNA, 60 bp, Artificial
  Synthetic oligonucleotide
aagtacagtaaaaagcgccgctcccgtggcatgcaacgaatcaaaacttctcgctggcct

SEQ ID NO: 518672 - DNA, 60 bp, Artificial
  Synthetic oligonucleotide
ccgtcttccaactggaggagggagaaaacaacactccacactttcaaggctacgtggcac

SEQ ID NO: 518673 - DNA, 60 bp, Artificial
  Synthetic oligonucleotide
aagcataaaaagcgcgtactaaccggacggcagaaggtatgtcatccggcggtctaggtg

SEQ ID NO: 518674 - DNA, 60 bp, Artificial
  Synthetic oligonucleotide
aagaggattacgccaagtgcaacgtaggcgcagactgataagaagacgccgaccacgcaa

SEQ ID NO: 518675 - DNA, 60 bp, Artificial
  Synthetic oligonucleotide
cctatactttcaagggctcgtattcatacctagagccacaagctacttaccagacacaac

SEQ ID NO: 518676 - DNA, 60 bp, Artificial
  Synthetic oligonucleotide
cctccttttatggtgagtacaaattctgtagaaaggcgggaattgaagatacccgtcttt

SEQ ID NO: 518677 - DNA, 60 bp, Artificial
  Synthetic oligonucleotide
cctcgtatagaggtaactagtgatgatgcttataaggtcgtgcattatggaggatgcgtt

SEQ ID NO: 518678 - DNA, 60 bp, Artificial
  Synthetic oligonucleotide
aagagccagtgggcccgtaattttgctgagcctagcgacacctactggaagcctagtaga

SEQ ID NO: 518679 - DNA, 60 bp, Artificial
  Synthetic oligonucleotide
aagacgctattcccggaggcgtaaacttcgatatgcgcgtagacgacccagtgctcgcag

SEQ ID NO: 518680 - DNA, 60 bp, Artificial
  Synthetic oligonucleotide
aactggggaagcgtgtacacaaagataacgcgaaccgcacccacttatgacgtacccccc

SEQ ID NO: 518681 - DNA, 60 bp, Artificial
  Synthetic oligonucleotide
cgaatcaatgtctatcttacctggaatgatgaatgttttgtggaaagaattgatacacca

SEQ ID NO: 518682 - DNA, 60 bp, Artificial
  Synthetic oligonucleotide
cgacaagggagaccaggtctgtacgtttcccttgtccgacaggcgttcccttttcaaagt

SEQ ID NO: 518683 - DNA, 60 bp, Artificial
  Synthetic oligonucleotide
aacgttcagtgcgtgcgagggagagtatttttttgtgggcgcaacagagaaagtcgcggt

SEQ ID NO: 518684 - DNA, 60 bp, Artificial
  Synthetic oligonucleotide
aaccaggggtccccacagatagggtcctgtaaccaagaaggagccaagggtccccccggc

SEQ ID NO: 518685 - DNA, 60 bp, Artificial
  Synthetic oligonucleotide
cgaggcctgtgtgctcgacattggtgtgggtatttaaatggagccacagctggtttcttt

SEQ ID NO: 518686 - DNA, 60 bp, Artificial
  Synthetic oligonucleotide
aaagtgtgagtggaaggagctttaaccatcactcgatgaggggtacaaacgaccctaagg

SEQ ID NO: 518687 - DNA, 60 bp, Artificial
  Synthetic oligonucleotide
acctatccgcggagagcattttgtaagtggttttgtcaacccaatggttggttgtgacta

SEQ ID NO: 518688 - DNA, 60 bp, Artificial
  Synthetic oligonucleotide
cccgcacccaatcaattattaggcgcgagatgaaaacacccccctcgggatgacagtcgt

SEQ ID NO: 518689 - DNA, 60 bp, Artificial
  Synthetic oligonucleotide
cccggacgtggaagacggaagtggaggttctgtgcggcccccctggatgcggcaagagcc

SEQ ID NO: 518690 - DNA, 60 bp, Artificial
  Synthetic oligonucleotide
accgaggttaataagatgacccttattggtattcatactcctactaaggatcttattcag

SEQ ID NO: 518691 - DNA, 60 bp, Artificial
  Synthetic oligonucleotide
accccaaatttgtctacaatgggcgctctgtacacgcgctaccgcatccgcggaatcaaa

SEQ ID NO: 518692 - DNA, 60 bp, Artificial
  Synthetic oligonucleotide
acagttgtgtcgcggccagtgaggtcaatcactgtggcaccccatgcccgtacttccgaa

SEQ ID NO: 518693 - DNA, 60 bp, Artificial
  Synthetic oligonucleotide
aatatggtcttctccggaggatgtttccaaggtggctgcggggccgggtccttcttctgc

SEQ ID NO: 518694 - DNA, 60 bp, Artificial
  Synthetic oligonucleotide
acagcgaactgtgcttttcgacgatttttgcggatcttcactccctttctcgcagtttaa

SEQ ID NO: 518695 - DNA, 60 bp, Artificial
  Synthetic oligonucleotide
ccgtaatgcgacgctcaattgcgtctgtattgtaattacgaaatttatacaaatcgcatg

SEQ ID NO: 518696 - DNA, 60 bp, Artificial
  Synthetic oligonucleotide
ccggtactccctactataagcctcgtggcgattggtgggatggttaccatgctaatgcta

SEQ ID NO: 518697 - DNA, 59 bp, Artificial
  Synthetic oligonucleotide
ggacaatgtggtgtaaacttactaaggttgctacagtacaagttaagaacgactctacg

SEQ ID NO: 518698 - DNA, 59 bp, Artificial
  Synthetic oligonucleotide
ccttgtaggtgaggcgtctttgttgtcgggcatagttcacgtccgtatattccatattt

SEQ ID NO: 518699 - DNA, 59 bp, Artificial
  Synthetic oligonucleotide
agtgaatcaatgatgtatgcgttgattccctggaagaaagaaattactacaggtgctgt

SEQ ID NO: 518700 - DNA, 58 bp, Artificial
  Synthetic oligonucleotide
cgagcagttccctgtaacgtatgtgagaaatttccgcgggctggctgaacttttgaaa

SEQ ID NO: 518701 - DNA, 58 bp, Artificial
  Synthetic oligonucleotide
atattagtccgcttgattggtggcggtgggcttatattagaatgcatccatctcctga

SEQ ID NO: 518702 - DNA, 58 bp, Artificial
  Synthetic oligonucleotide
cgtttaatacttacctatcagtagataaatgcaaaatataccgtcagactcaacaggg

SEQ ID NO: 518703 - DNA, 57 bp, Artificial
  Synthetic oligonucleotide
tgaatgtacgcctcctgaacgccatctggataaaaacaaagtgagtgttagtattac

SEQ ID NO: 518704 - DNA, 57 bp, Artificial
  Synthetic oligonucleotide
tacgctatcagcactaggggcaccatggtcattcccagcaggacagaagtcaatcag

SEQ ID NO: 518705 - DNA, 57 bp, Artificial
  Synthetic oligonucleotide
cagtcctctaagatggatgcaacaacggatatggtcgatattaagaatggaaacatc

SEQ ID NO: 518706 - DNA, 56 bp, Artificial
  Synthetic oligonucleotide
cattacgccgcatgcgggtcactggctcaacgcggataagcacgagcgcgttagcg

SEQ ID NO: 518707 - DNA, 56 bp, Artificial
  Synthetic oligonucleotide
caagatggctgcgggggcggtgtcttcttctccggtaacgcctccttggatacgtc

SEQ ID NO: 518708 - DNA, 55 bp, Artificial
  Synthetic oligonucleotide
caatattaaatctcagcatgtccaccgcccaggagggcgttgtgactgtggtagc

SEQ ID NO: 518709 - DNA, 55 bp, Artificial
  Synthetic oligonucleotide
tatgtgtttgcttgtaaattcttgaaagcctcctttgatcggtactttgtagggg

SEQ ID NO: 518710 - DNA, 55 bp, Artificial
  Synthetic oligonucleotide
aaattgtcccctacgagcacacagataaccgtaagtgcttttacctgtacctccg

SEQ ID NO: 518711 - DNA, 55 bp, Artificial
  Synthetic oligonucleotide
gtggtactttctactgctcagactcttccccttggtgtcggtgagattggccttg

SEQ ID NO: 518712 - DNA, 55 bp, Artificial
  Synthetic oligonucleotide
tgaggttgagggtaccaagtattggaagccccgtgggcaatggtgggatgggtat

SEQ ID NO: 518713 - DNA, 55 bp, Artificial
  Synthetic oligonucleotide
ttgtgcctgtggtaggtgcagtctcgtttcccacaatgccgtacttgcaatagtc

SEQ ID NO: 518714 - DNA, 55 bp, Artificial
  Synthetic oligonucleotide
caacgtggacatatgacctttaaaccagctgttatcggattagcatctacctccc

SEQ ID NO: 518715 - DNA, 55 bp, Artificial
  Synthetic oligonucleotide
ttgggtgcaatttagccacgttggatagagtgttcgtcccattctgtattgtaag

SEQ ID NO: 518716 - DNA, 55 bp, Artificial
  Synthetic oligonucleotide
agtaggccgcgcagcggccgttatttgcgaagcatcatggcagcacggcgagaca

SEQ ID NO: 518717 - DNA, 55 bp, Artificial
  Synthetic oligonucleotide
agaccatacccatgggatgtcaactggtacaacgaattcactgcagaaggacgcg

SEQ ID NO: 518718 - DNA, 55 bp, Artificial
  Synthetic oligonucleotide
acgtttaagccgctgtctggcactcattgtgccgttatagagacagcgtaacaca

SEQ ID NO: 518719 - DNA, 55 bp, Artificial
  Synthetic oligonucleotide
ttaaacattcttggttgcactggcttcgtaagttgtaggtattcgcggattccac

SEQ ID NO: 518720 - DNA, 55 bp, Artificial
  Synthetic oligonucleotide
ataaacctgtggaagagtggttccctaattgtgactgttccgccttatttagacg

SEQ ID NO: 518721 - DNA, 55 bp, Artificial
  Synthetic oligonucleotide
tggaaacaggtctgtttcaactacggtatagcatgttggctgacggagtgtcgag

SEQ ID NO: 518722 - DNA, 55 bp, Artificial
  Synthetic oligonucleotide
ggatgtgttggaatgcaaggtattggagatggtctaccaaaaggagcaactgcac

SEQ ID NO: 518723 - DNA, 55 bp, Artificial
  Synthetic oligonucleotide
gcgttgacagtttacttactctcgatcgtcataagaagtatagaggcactcaacg

SEQ ID NO: 518724 - DNA, 55 bp, Artificial
  Synthetic oligonucleotide
gcgcaattggcaaaaatctcggagatggagctatcttcgagcactctctcggaaa

SEQ ID NO: 518725 - DNA, 55 bp, Artificial
  Synthetic oligonucleotide
ccatatgcgtctgcttgtaaattcttcgaaccctcctttgacttgtaccttgtag

SEQ ID NO: 518726 - DNA, 55 bp, Artificial
  Synthetic oligonucleotide
gcgaccgataccccgttcgagtggagctcaaagggcttagttgtccgatggcagc

SEQ ID NO: 518727 - DNA, 55 bp, Artificial
  Synthetic oligonucleotide
cccaaccacataaaaggtgggtgttcacgctgaataatccttccgaagacgagcg

SEQ ID NO: 518728 - DNA, 55 bp, Artificial
  Synthetic oligonucleotide
cccaccatagaccacgcggtttataatagatggagtcggtattgtaggcggttgc

SEQ ID NO: 518729 - DNA, 55 bp, Artificial
  Synthetic oligonucleotide
gatgccgcagcagagacgctaagaacatcactgggtgaccttcgctccgtggctg

SEQ ID NO: 518730 - DNA, 55 bp, Artificial
  Synthetic oligonucleotide
ccccgggagacgctggtgcttcacaattaataactatgacacaccagaccttact

SEQ ID NO: 518731 - DNA, 55 bp, Artificial
  Synthetic oligonucleotide
gaatttggaaagcttgcttctaattttgaggcgtttaagtttactcgttgtcgtg

SEQ ID NO: 518732 - DNA, 55 bp, Artificial
  Synthetic oligonucleotide
ccccttagctggctcgatgtgcgcacgatctccgacaatagttttgatcgtccca

SEQ ID NO: 518733 - DNA, 55 bp, Artificial
  Synthetic oligonucleotide
ccgaatacgtctcgttggcgccgaactttgaggcgatacagttcgttaaaatgcg

SEQ ID NO: 518734 - DNA, 55 bp, Artificial
  Synthetic oligonucleotide
ctgtacccagtattgagccaccatttccggttacctcccatccataatcccgctg

SEQ ID NO: 518735 - DNA, 55 bp, Artificial
  Synthetic oligonucleotide
ctggaggagggagaaaacaacactccacactttcaaggctacgtggcactcactg

SEQ ID NO: 518736 - DNA, 55 bp, Artificial
  Synthetic oligonucleotide
ctctttcgccggttgatatcgttgccacgactgcgtccaaatcactgcgtcgtcc

SEQ ID NO: 518737 - DNA, 55 bp, Artificial
  Synthetic oligonucleotide
ccgttccataccatgttagccccttgaatgacagatacccatggtgttcctctgg

SEQ ID NO: 518738 - DNA, 55 bp, Artificial
  Synthetic oligonucleotide
cctacccgtcctacaatcattacgccactgactgccttcgcccacgcatcgatgg

SEQ ID NO: 518739 - DNA, 55 bp, Artificial
  Synthetic oligonucleotide
cctgtcaccctgggtgattggggagcagggccagaattcaaccttaacctttctt

SEQ ID NO: 518740 - DNA, 55 bp, Artificial
  Synthetic oligonucleotide
ctcaatcttcgtccgccaccccaatcttgtgtcgaactacgtcgcagctactatc

SEQ ID NO: 518741 - DNA, 55 bp, Artificial
  Synthetic oligonucleotide
cgagagctgctccttatatctccggagatgaccacgccccggacgtggaagacgg

SEQ ID NO: 518742 - DNA, 55 bp, Artificial
  Synthetic oligonucleotide
cgcgcctttcaccatttggcctccagacgtcatggcgttcagacgcaggcggttc

SEQ ID NO: 518743 - DNA, 55 bp, Artificial
  Synthetic oligonucleotide
cgccggttgatatcgttgccacgactgcgtccaaatcactgcgtcgtccttgttg

SEQ ID NO: 518744 - DNA, 55 bp, Artificial
  Synthetic oligonucleotide
cgagttgaacgtgtaacgaatactgcgcgagcgagaccctggaagggtcgagcga

SEQ ID NO: 518745 - DNA, 55 bp, Artificial
  Synthetic oligonucleotide
ggtaactagtgatgatgcttataaggtcgtgcattatggaggatgcgttggaatg

SEQ ID NO: 518746 - DNA, 55 bp, Artificial
  Synthetic oligonucleotide
ggtaagattgcaaaatcctggtagatgtattgtgcctgtggtaggtgcagtctcg

SEQ ID NO: 518747 - DNA, 55 bp, Artificial
  Synthetic oligonucleotide
caggtctgtacgtttcccttgtccgacaggcgttcccttttcaaagtacgtgcca

SEQ ID NO: 518748 - DNA, 55 bp, Artificial
  Synthetic oligonucleotide
ggtatccgtcccaccatagtcctctgggcttgtaatatattgagtctggagcgtg

SEQ ID NO: 518749 - DNA, 55 bp, Artificial
  Synthetic oligonucleotide
ggggaccggggtggactggcactagcgctgctaaggttaatattagtccgcttga

SEQ ID NO: 518750 - DNA, 55 bp, Artificial
  Synthetic oligonucleotide
gggctcgggtcaactataattaccgtatcgcttcctggcttcgcgagtgttcgcg

SEQ ID NO: 518751 - DNA, 55 bp, Artificial
  Synthetic oligonucleotide
gggcgctctgtacacgcgctaccgcatccgcggaatcaaaattcggctcacgtac

SEQ ID NO: 518752 - DNA, 55 bp, Artificial
  Synthetic oligonucleotide
ggtttagccagattaaagaaatgttgggctcccggtgtcacatcgagaaagcccg

SEQ ID NO: 518753 - DNA, 55 bp, Artificial
  Synthetic oligonucleotide
ggcgggaggagtagtttacgtaggggtcataggttagggcagtggacttagggaa

SEQ ID NO: 518754 - DNA, 55 bp, Artificial
  Synthetic oligonucleotide
ggcggcgtggcacattgggagatttgccgcggtaccccgacacaaaaccgggatt

SEQ ID NO: 518755 - DNA, 55 bp, Artificial
  Synthetic oligonucleotide
cagtctggacaggctgaaacttctgcttttagggtttatagtattgagctttcgc

SEQ ID NO: 518756 - DNA, 55 bp, Artificial
  Synthetic oligonucleotide
gtgaagaaccttgcgccggacgctaagtacttaatctgtggccgggaggttgggg

SEQ ID NO: 518757 - DNA, 55 bp, Artificial
  Synthetic oligonucleotide
ggccacagactacgcgtgtatccggccacaaaaccaggggtccccacagataggg

SEQ ID NO: 518758 - DNA, 55 bp, Artificial
  Synthetic oligonucleotide
gtgcttcacaattaataactatgacacaccagaccttactgctgtgaatgaagcc

SEQ ID NO: 518759 - DNA, 54 bp, Artificial
  Synthetic oligonucleotide
agaagatttaatgaaatgtattattgtgagaggggggagcctattaagccatac

SEQ ID NO: 518760 - DNA, 54 bp, Artificial
  Synthetic oligonucleotide
cgctactaagccgtctttgatgtcctctaggcactctgctaggtctttatccac

SEQ ID NO: 518761 - DNA, 54 bp, Artificial
  Synthetic oligonucleotide
tagtattacccgcgactttgtagctgacctcgtagcgcgccccccttctatttg

SEQ ID NO: 518762 - DNA, 54 bp, Artificial
  Synthetic oligonucleotide
aacgaattcactgcagaaggacgcgttcccgcggactaggggggggggggaaaa

SEQ ID NO: 518763 - DNA, 53 bp, Artificial
  Synthetic oligonucleotide
cctttgatcggtactttgtaggggtatctgtcacaaattttgagtaggtcgtc

SEQ ID NO: 518764 - DNA, 53 bp, Artificial
  Synthetic oligonucleotide
gtaatcttcagattggttctaatgttcccagatctatgcgcggtcgtcctcat

SEQ ID NO: 518765 - DNA, 53 bp, Artificial
  Synthetic oligonucleotide
gtcattagaggcatgggtgacccacaaggcaaaaaatggctcaccctggtacc

SEQ ID NO: 518766 - DNA, 53 bp, Artificial
  Synthetic oligonucleotide
ttgttaaatcgcatgggtttcgataaattgcagaacccttgtatatgaggtgt

SEQ ID NO: 518767 - DNA, 53 bp, Artificial
  Synthetic oligonucleotide
tcatggcagcacggcgagacagcggagcccgtcgctggtgctttaccctgaat

SEQ ID NO: 518768 - DNA, 53 bp, Artificial
  Synthetic oligonucleotide
tacaggggggtacgtcatccttatctccgaccaataggagcgctccccgccca

SEQ ID NO: 518769 - DNA, 53 bp, Artificial
  Synthetic oligonucleotide
gggaagcgatctgatctcgatgccgcagcagagacgctaagaacatcactggg

SEQ ID NO: 518770 - DNA, 52 bp, Artificial
  Synthetic oligonucleotide
aaatgccatttttccttctccagcggtaacggtggcgggggtggacgagcca

SEQ ID NO: 518771 - DNA, 52 bp, Artificial
  Synthetic oligonucleotide
tttacaacctattaatccaggaccacaaaatcgtataggagatacgcctgaa

SEQ ID NO: 518772 - DNA, 52 bp, Artificial
  Synthetic oligonucleotide
ccaataatagtagacctcagatttgtagtgtcgggggcgaatagggttgaca

SEQ ID NO: 518773 - DNA, 52 bp, Artificial
  Synthetic oligonucleotide
tatgggcggggactgagggactatgcctcggtattgggtcttgttaaaccac

SEQ ID NO: 518774 - DNA, 52 bp, Artificial
  Synthetic oligonucleotide
tctttcggcgccctcgtattgggaagggtttgtttcgtgttaaattgactag

SEQ ID NO: 518775 - DNA, 52 bp, Artificial
  Synthetic oligonucleotide
gcccgtcctccaaagaaggaagctcctcataagcgttatgtcttcactctca

SEQ ID NO: 518776 - DNA, 52 bp, Artificial
  Synthetic oligonucleotide
gtacgacgatttaggagccgtaagagtcgtacaggggatatggtattaaaat

SEQ ID NO: 518777 - DNA, 52 bp, Artificial
  Synthetic oligonucleotide
gagcgaactgcctgaatgttacatatatagttatttctgcaatatatctaag

SEQ ID NO: 518778 - DNA, 52 bp, Artificial
  Synthetic oligonucleotide
gaatgccgctccggacgtgaacaacctcactgttgcctctactggacccaat

SEQ ID NO: 518779 - DNA, 52 bp, Artificial
  Synthetic oligonucleotide
ctgactcatgaggcagataagtacgcgtttgcgataatcggcaaagaagttg

SEQ ID NO: 518780 - DNA, 51 bp, Artificial
  Synthetic oligonucleotide
gcaactaaatccagagaatcgttctccccggtcgcgagcctgcttgtacaa

SEQ ID NO: 518781 - DNA, 51 bp, Artificial
  Synthetic oligonucleotide
ggttgcctcccgcattgggcggcgctagtttacgcgcggacgctcgaataa

SEQ ID NO: 518782 - DNA, 51 bp, Artificial
  Synthetic oligonucleotide
ccggaagttgcggtttcgtcgtcgtagacgttatcataggcgtattactgg

SEQ ID NO: 518783 - DNA, 50 bp, Artificial
  Synthetic oligonucleotide
gcagaaacggcgaactacacagtttgccatagcgatacgaagtggcggct

SEQ ID NO: 518784 - DNA, 50 bp, Artificial
  Synthetic oligonucleotide
ctgcagatctgagtcaattgaagttccctagttttgcagagttgactgct

SEQ ID NO: 518785 - DNA, 60 bp, Artificial
  Synthetic oligonucleotide
tcttaggaccagtgatataccaccaccactgagtaactcatcgtcactttcagatgttgt

SEQ ID NO: 518786 - DNA, 60 bp, Artificial
  Synthetic oligonucleotide
agggagtgctgggtcaagaccacctagaagtcattttgaggctattcaggggcttttgga

SEQ ID NO: 518787 - DNA, 60 bp, Artificial
  Synthetic oligonucleotide
tgtcatgcctgtaccgcttcctcactgaggatatagcctgtttgggtgaatggtagaact

SEQ ID NO: 518788 - DNA, 60 bp, Artificial
  Synthetic oligonucleotide
tgtgttaagaggtttgatcctacttacgattgtaacaacataataagacagtgggctaat

SEQ ID NO: 518789 - DNA, 60 bp, Artificial; identical to SEQ ID NO: 392501
  Synthetic oligonucleotide

SEQ ID NO: 518790 - DNA, 60 bp, Artificial
  Synthetic oligonucleotide
agcattaatcaatagctcgaacggtgtactagacttgtctaggctggagctccctaggct

SEQ ID NO: 518791 - DNA, 60 bp, Artificial
  Synthetic oligonucleotide
cgctggcgtttatgcgactgttatgccgcccgagcgtttatcctttttctacgataagct

SEQ ID NO: 518792 - DNA, 60 bp, Artificial
  Synthetic oligonucleotide
caatctcaaatttccgttgtcagccgatttcctagcttcaatcaaggaagaggccaattc

SEQ ID NO: 518793 - DNA, 60 bp, Artificial
  Synthetic oligonucleotide
ccttccaatagcaacagagctacacacaatctgtacgaagacaccagggtggctccggac

SEQ ID NO: 518794 - DNA, 60 bp, Artificial
  Synthetic oligonucleotide
gctttcctgagcatgtcagaccgtccgtcttcatctgaagacctcatcccaccaacaccc

SEQ ID NO: 518795 - DNA, 60 bp, Artificial
  Synthetic oligonucleotide
tccctaggctgtttaatgtcacaatacctggtgttgtgtcaggtaaacataaagtgattg

SEQ ID NO: 518796 - DNA, 60 bp, Artificial
  Synthetic oligonucleotide
ttagtttaggtagttacacctgcaatacttggtataatggcgtctctggtccagtaaatg

SEQ ID NO: 518797 - DNA, 60 bp, Artificial
  Synthetic oligonucleotide
gctgagtaggaataatgtgaacagttgtgcagctgtactaatagggggttcctctgtgtt

SEQ ID NO: 518798 - DNA, 60 bp, Artificial
  Synthetic oligonucleotide
ggtgaacacgaagatctgcgcttctcacggtgtgccgcctaactactatccttactcgcc

SEQ ID NO: 518799 - DNA, 60 bp, Artificial
  Synthetic oligonucleotide
aaccgttgtgggtataaggaatgatggaacatataccattgggcttggtgctctactaga

SEQ ID NO: 518800 - DNA, 60 bp, Artificial
  Synthetic oligonucleotide
gagtttttgagagagataggtaaatgttgaccacgaattgaagtgtcaaacacgactgct

SEQ ID NO: 518801 - DNA, 60 bp, Artificial
  Synthetic oligonucleotide
tttagatgttctgtagcgtgcggtgcgaaagtttactgcgatattttagctggtagcagc

SEQ ID NO: 518802 - DNA, 60 bp, Artificial
  Synthetic oligonucleotide
aaactataaacctaccgcctttctttcggaaagtcgttatcaatccgacaagttggtatc

SEQ ID NO: 518803 - DNA, 59 bp, Artificial
  Synthetic oligonucleotide
gcatcaacgaagaaaataagatgttgctaatgcaagtttcctatctaagaagcttgttg

SEQ ID NO: 518804 - DNA, 58 bp, Artificial
  Synthetic oligonucleotide
aataaggtggaaccgaacctgttaaagaaattggcttatcaaccgggttcattattcg

SEQ ID NO: 518805 - DNA, 56 bp, Artificial
  Synthetic oligonucleotide
cgatcagatgctttggtgatagaaatcaaatacctttcatcaatagagtaccacac

SEQ ID NO: 518806 - DNA, 55 bp, Artificial
  Synthetic oligonucleotide
ctatggaggttgaaccaattaacagtgtgcatgacataacgcatgacgttaatgg

SEQ ID NO: 518807 - DNA, 55 bp, Artificial
  Synthetic oligonucleotide
gcactcaacgtctcctaaggtgtccagctcttccaatcggactataaccggtaag

SEQ ID NO: 518808 - DNA, 55 bp, Artificial
  Synthetic oligonucleotide
gcacgattaatcgcatctgacgatactgaagataaaaggatgaaggctaaactgg

SEQ ID NO: 518809 - DNA, 55 bp, Artificial
  Synthetic oligonucleotide
gcacagcctttgttgaatcactaataagtatgtccggtcgttgtgctgtgaagac

SEQ ID NO: 518810 - DNA, 55 bp, Artificial
  Synthetic oligonucleotide
ctcagcgtatcgtatgtaggtactatagcgatttggcgtacttagcccgacgtcg

SEQ ID NO: 518811 - DNA, 55 bp, Artificial
  Synthetic oligonucleotide
gttttgtgagagttgacgaaaactataaacctaccgcctttctttcggaaagtcg

SEQ ID NO: 518812 - DNA, 55 bp, Artificial
  Synthetic oligonucleotide
gagcagcggtagctataggggcagccatatacgctcagacttttactggtgtctc

SEQ ID NO: 518813 - DNA, 55 bp, Artificial
  Synthetic oligonucleotide
gagaggtatgcatagggatgatgttctcgaacatcctgaattgcgcctacaacac

SEQ ID NO: 518814 - DNA, 55 bp, Artificial
  Synthetic oligonucleotide
gacttcgtgggttttgtcgacccgaagttgctgtctgaccacgaattgaagtgtc

SEQ ID NO: 518815 - DNA, 55 bp, Artificial
  Synthetic oligonucleotide
ctccgatatgatgaacggtaaatatatcaccgagactcattatacaaggtcagag

SEQ ID NO: 518816 - DNA, 55 bp, Artificial
  Synthetic oligonucleotide
ctcgcttagctgaggtgtcggagagtcgtttgtccagtaactcaatgttgctttc

SEQ ID NO: 518817 - DNA, 55 bp, Artificial
  Synthetic oligonucleotide
ctcgtgcgacgtcttagtaattaaaactggcttgcgcttgtagctgggctgtggt

SEQ ID NO: 518818 - DNA, 55 bp, Artificial
  Synthetic oligonucleotide
gacgataaaccgatcgaaaaggatgtagcagacgttgatccgaagctggactcct

SEQ ID NO: 518819 - DNA, 55 bp, Artificial
  Synthetic oligonucleotide
taatgttcacgctagcgattttgcgaggaactttgtcctttcgaggttacgtgag

SEQ ID NO: 518820 - DNA, 55 bp, Artificial
  Synthetic oligonucleotide
ctctagccacagccatgagacatgctgagaattatttgttggctaggaagtgtgg

SEQ ID NO: 518821 - DNA, 55 bp, Artificial
  Synthetic oligonucleotide
gacaaactaactcagaattgcagagttgagaaacccaacattatagccgttcagg

SEQ ID NO: 518822 - DNA, 55 bp, Artificial
  Synthetic oligonucleotide
ctgagagaggagaatggagtattgtgtgggcgcactagttgtatacacacatgcc

SEQ ID NO: 518823 - DNA, 55 bp, Artificial
  Synthetic oligonucleotide
cttacgttgtgtaacggagcactttagggatgttgtgttgcgcttacgtgaaaga

SEQ ID NO: 518824 - DNA, 55 bp, Artificial
  Synthetic oligonucleotide
tacgaacgcatacatccgcgtctcatctggtgcggcatataaactagagtacgaa

SEQ ID NO: 518825 - DNA, 55 bp, Artificial
  Synthetic oligonucleotide
ggtgtatccggtaggcttgagcttaaaggggcatttagtttgtctagagaggcct

SEQ ID NO: 518826 - DNA, 55 bp, Artificial
  Synthetic oligonucleotide
ggtgattcccgagaacaacttgagagtaagggtgggcgatgccgctcaagggaag

SEQ ID NO: 518827 - DNA, 55 bp, Artificial
  Synthetic oligonucleotide
ggtattctagatcctaacgctgctaggtcggaagtatttaaagttgtaaacaagg

SEQ ID NO: 518828 - DNA, 55 bp, Artificial
  Synthetic oligonucleotide
gggttgcttagctttcgatgttgcccttatgttcccggttgaactcttgtacgga

SEQ ID NO: 518829 - DNA, 55 bp, Artificial
  Synthetic oligonucleotide
ggtgtgaatggggcctacaggtgactaacagcctgccctttaagggcgctggaag

SEQ ID NO: 518830 - DNA, 55 bp, Artificial
  Synthetic oligonucleotide
gggcacaagtaagtacaccgtattatgggacggtagcgccgcgagagtgagtggt

SEQ ID NO: 518831 - DNA, 55 bp, Artificial
  Synthetic oligonucleotide
ggttacgaaaacactcctagacaatttggaagagcattcacggcagcgatagtgc

SEQ ID NO: 518832 - DNA, 55 bp, Artificial
  Synthetic oligonucleotide
gggaagaggggatgagactatcttaccccgcgttagcggcagtgaaaatccttcc

SEQ ID NO: 518833 - DNA, 55 bp, Artificial
  Synthetic oligonucleotide
ggctttggtcggcagtacgccgttgtgagcggtagcgtagctattacacgcggcg

SEQ ID NO: 518834 - DNA, 55 bp, Artificial
  Synthetic oligonucleotide
ggctttagtcaacgatcgtacaaagtaactggtgtacggttgccgcgtttgttag

SEQ ID NO: 518835 - DNA, 55 bp, Artificial
  Synthetic oligonucleotide
gtgagcgttgtcaccgtaaatttgaatggtcaggctcgctttagagtgcggtcga

SEQ ID NO: 518836 - DNA, 55 bp, Artificial
  Synthetic oligonucleotide
ggctccggacatcttcctgggtaacaggaggtgaagtctgtgacttctactattt

SEQ ID NO: 518837 - DNA, 55 bp, Artificial
  Synthetic oligonucleotide
ggccccagtcactttaatagcgggtagggttgtgggattggagttgaaaagtaag

SEQ ID NO: 518838 - DNA, 55 bp, Artificial
  Synthetic oligonucleotide
ggagtcggaaactctaacaccaaataagctcgttttcgaaaaggatccagacaag

SEQ ID NO: 518839 - DNA, 55 bp, Artificial
  Synthetic oligonucleotide
ggaggcgcgcggtgttcttctctaagttgggtgagggttatacttacgcgggagg

SEQ ID NO: 518840 - DNA, 55 bp, Artificial
  Synthetic oligonucleotide
gcttttaagttcaccggtaatgttaaagttaccgaattttctcctaaaggcgcag

SEQ ID NO: 518841 - DNA, 55 bp, Artificial
  Synthetic oligonucleotide
gctccctaaaccaaacccacattcgtcgcactcgccttacccgcgttgtcgactc

SEQ ID NO: 518842 - DNA, 55 bp, Artificial
  Synthetic oligonucleotide
gtgggttagcgaggatgctgatgcttacattgtgtaacggagcactttaagaatg

SEQ ID NO: 518843 - DNA, 55 bp, Artificial
  Synthetic oligonucleotide
gcgtccgacgcttggtctaacgaccattgcgacttcttcacactagacgcccgcg

SEQ ID NO: 518844 - DNA, 55 bp, Artificial
  Synthetic oligonucleotide
gcgcttctcacggtgtgccgcctaactactatccttactcgccagactgtctgca

SEQ ID NO: 518845 - DNA, 55 bp, Artificial
  Synthetic oligonucleotide
gcgctctgaagaggttaagcagccacaggttatgcaaccacaacaaagggccttg

SEQ ID NO: 518846 - DNA, 55 bp, Artificial
  Synthetic oligonucleotide
gcgcctctagtgtcgaggcgttataagtgccctctaagtgaggtttacccagcgt

SEQ ID NO: 518847 - DNA, 55 bp, Artificial
  Synthetic oligonucleotide
gccgtgtcttgcgcgcggagccagaagacgcatgttatcgtgggtacacgtgtgg

SEQ ID NO: 518848 - DNA, 55 bp, Artificial
  Synthetic oligonucleotide
gttcaacgtggcgataccaggaatagtgtcgggaaaacacaaggtgatgggtgcg

SEQ ID NO: 518849 - DNA, 55 bp, Artificial
  Synthetic oligonucleotide
cccacgttcaagtggtgaatcttttcttggagagcagagtgcccggtatcacgtg

SEQ ID NO: 518850 - DNA, 55 bp, Artificial
  Synthetic oligonucleotide
ccatagaggattttattgtgaacactaccccaggcagtcaggttgccttgcccga

SEQ ID NO: 518851 - DNA, 55 bp, Artificial
  Synthetic oligonucleotide
ccactagccatttcgttgctgtaaacggttttctggaagatctgttagatgggtg

SEQ ID NO: 518852 - DNA, 55 bp, Artificial
  Synthetic oligonucleotide
ccacgtgcactttcctctacctcagacattcgaaagcaggtgttaaatgggtcgg

SEQ ID NO: 518853 - DNA, 55 bp, Artificial
  Synthetic oligonucleotide
ccacatggaagttcgacttactttataggtaaagcggccggaaaggcgtttcgtg

SEQ ID NO: 518854 - DNA, 55 bp, Artificial
  Synthetic oligonucleotide
catcatctacaggcaaaacacggtgtcttatcacaatattgggctttaccggctg

SEQ ID NO: 518855 - DNA, 55 bp, Artificial
  Synthetic oligonucleotide
cagtgggtttatgccgactctcgtgttaccgaagtattcgcctataccttgcgtc

SEQ ID NO: 518856 - DNA, 55 bp, Artificial
  Synthetic oligonucleotide
caggtgaggcgactgcgtacgttttgaaaacacagtactcgaagccagaagctgg

SEQ ID NO: 518857 - DNA, 55 bp, Artificial
  Synthetic oligonucleotide
cacgttaaggctgggcatgttaattgtcacgtgtgtaacccagtattagacgtga

SEQ ID NO: 518858 - DNA, 55 bp, Artificial
  Synthetic oligonucleotide
cacggcagcgatagtgcaagggatatcctcaggcaaactggaggtgaacacgaag

SEQ ID NO: 518859 - DNA, 55 bp, Artificial
  Synthetic oligonucleotide
cacgaggaacaagaagcgcgggaggttaaggacaatgccgaaaccgcgatggaac

SEQ ID NO: 518860 - DNA, 55 bp, Artificial
  Synthetic oligonucleotide
cacccggtgagtttattattacgaatctactcggaaaaggtgaaagagctcgacc

SEQ ID NO: 518861 - DNA, 55 bp, Artificial
  Synthetic oligonucleotide
caccaccactgagtaactcatcgtcactttcagatgttgtcgataccgtagtctc

SEQ ID NO: 518862 - DNA, 55 bp, Artificial
  Synthetic oligonucleotide
caagtcaggaaagaaaattctataacgtgtctcagttggcaccgggaggttgtag

SEQ ID NO: 518863 - DNA, 55 bp, Artificial
  Synthetic oligonucleotide
atacgacgtctgcattcgtggatagaacatttgagtacgccgtgtcttgcgcgcg

SEQ ID NO: 518864 - DNA, 55 bp, Artificial
  Synthetic oligonucleotide
aggttgatgatgcatcagtcgacgccatctgcagacgcgtcaggacttttgactc

SEQ ID NO: 518865 - DNA, 55 bp, Artificial
  Synthetic oligonucleotide
agccaatatcatgttaagctatggtagtgtgttgaagagaacgataccatcaggg

SEQ ID NO: 518866 - DNA, 55 bp, Artificial
  Synthetic oligonucleotide
agcaatacactactgtatagcgaggagcgaagtgtgcgacccaatggacgtgttc

SEQ ID NO: 518867 - DNA, 55 bp, Artificial
  Synthetic oligonucleotide
acctccgagtagatcatcccaaatcggcatcttgtttcagtagaccaccggcatc

SEQ ID NO: 518868 - DNA, 55 bp, Artificial
  Synthetic oligonucleotide
acctcagaggaattggacgccatagtcgcaccatttagtgaaagggcggtggacg

SEQ ID NO: 518869 - DNA, 55 bp, Artificial
  Synthetic oligonucleotide
accaagcaaccccacattcttgtcggcttatcaaggcatacccgctcgttagtgt

SEQ ID NO: 518870 - DNA, 55 bp, Artificial
  Synthetic oligonucleotide
ttctgtgtacgcctttataacgtcgaatatgtcgaacgtgcactgcactagggct

SEQ ID NO: 518871 - DNA, 55 bp, Artificial
  Synthetic oligonucleotide
ttgacaggattcagacctggattgttcagcactattcctggtattgttccttgga

SEQ ID NO: 518872 - DNA, 55 bp, Artificial
  Synthetic oligonucleotide
aaccggtaaggaattggtattcagcaatgacaaaatgttgcgaacagcagacagt

SEQ ID NO: 518873 - DNA, 55 bp, Artificial
  Synthetic oligonucleotide
ttttagtaagcgaccgttggatatagataccgtggttctaagtgacaatttcggt

SEQ ID NO: 518874 - DNA, 55 bp, Artificial
  Synthetic oligonucleotide
ctaggcgggcctctttcgaggctaacccatcgacaataaggttaggtctttatat

SEQ ID NO: 518875 - DNA, 55 bp, Artificial
  Synthetic oligonucleotide
ctacgggtgtagcggggtgtacgccggtagcaggtagcgttttcgtcgaacccag

SEQ ID NO: 518876 - DNA, 55 bp, Artificial
  Synthetic oligonucleotide
cgttgtggtacactaccatagggtggtgccttttgtggcggctaaagccgcagtt

SEQ ID NO: 518877 - DNA, 55 bp, Artificial
  Synthetic oligonucleotide
cgtcgtcgtttatgctaatgaatgcgaggggtgactactacgaatgcggcgtgtg

SEQ ID NO: 518878 - DNA, 55 bp, Artificial
  Synthetic oligonucleotide
cgtagtgcatcctgagacaagtgtggttgttaccagatctggtcagacggtgtcg

SEQ ID NO: 518879 - DNA, 55 bp, Artificial
  Synthetic oligonucleotide
cgtacacatcatcgaaatttcgaacgcggatagcgttcacttactctatgaagcg

SEQ ID NO: 518880 - DNA, 55 bp, Artificial
  Synthetic oligonucleotide
cggtggtttagtgcgttgcggaaacgaaatgagcgtagtgaatgttatcagcggg

SEQ ID NO: 518881 - DNA, 55 bp, Artificial
  Synthetic oligonucleotide
cggcataaacgcaccaagagtaatgtgtcgatattatagcgatcttacttgcctg

SEQ ID NO: 518882 - DNA, 55 bp, Artificial
  Synthetic oligonucleotide
cgctcaagaggacacaggtaatatggtttacatcgattgtaattctcatccgttg

SEQ ID NO: 518883 - DNA, 55 bp, Artificial
  Synthetic oligonucleotide
cgctacacctgtccagtccactcaccacataatagtaaaggctgtgttcaggaac

SEQ ID NO: 518884 - DNA, 55 bp, Artificial
  Synthetic oligonucleotide
cgacgttcgaaaatcctatgcgtcagtatgccaggttgttctcagcaacggctgt

SEQ ID NO: 518885 - DNA, 55 bp, Artificial
  Synthetic oligonucleotide
cgaacggtgtactagacttgtctaggctggagctccctaggctgtttaatgtcac

SEQ ID NO: 518886 - DNA, 55 bp, Artificial
  Synthetic oligonucleotide
cctgcttcccatcacgccaagagacgtggggttaaacaagaattcgcgtatctcg

SEQ ID NO: 518887 - DNA, 55 bp, Artificial
  Synthetic oligonucleotide
cctctaaagaacaatggttgagggatctacttggatacctcttggttcggaggcg

SEQ ID NO: 518888 - DNA, 55 bp, Artificial
  Synthetic oligonucleotide
cctcgctgaaatttggaggataatacgaaaacttgacctagcctgcagaaactcg

SEQ ID NO: 518889 - DNA, 55 bp, Artificial
  Synthetic oligonucleotide
cctcgaccttatctttcgtttaagagaagttagtagtccctgtgtcacagtcccc

SEQ ID NO: 518890 - DNA, 55 bp, Artificial
  Synthetic oligonucleotide
cctactgtctcagtcataaggtgataatgtattctggtatgaaccttgacgatct

SEQ ID NO: 518891 - DNA, 55 bp, Artificial
  Synthetic oligonucleotide
tcagatagttttaaggttggaggtcctaggaacctcggctaaggctgtgtacgac

SEQ ID NO: 518892 - DNA, 55 bp, Artificial
  Synthetic oligonucleotide
ccggtgcccagtagatgtgtgctacttgttatcaactctaactgatgaggccggt

SEQ ID NO: 518893 - DNA, 55 bp, Artificial
  Synthetic oligonucleotide
ccgcgtttgttagtcaccaccgcctctggctaagggtcggtcacggtgcaagtcg

SEQ ID NO: 518894 - DNA, 55 bp, Artificial
  Synthetic oligonucleotide
cccttcccgtgatacaaggtaggacaaccgtggacactttcgaagcattaatcaa

SEQ ID NO: 518895 - DNA, 55 bp, Artificial
  Synthetic oligonucleotide
ccctagctctacatcacaagtgcgaggaacccaaaactctgcagatgtcgttgaa

SEQ ID NO: 518896 - DNA, 55 bp, Artificial
  Synthetic oligonucleotide
cccgttcaggccaatgtcggaaactctggagtacagactgccaaacactctagtg

SEQ ID NO: 518897 - DNA, 55 bp, Artificial
  Synthetic oligonucleotide
tccatcggaagatgattccgggtgcgtaacgttggtgaattctccgttcgttcca

SEQ ID NO: 518898 - DNA, 54 bp, Artificial
  Synthetic oligonucleotide
taaagttgcaccaccaacttcagtctacaaagtgtccttcaaaagacgcttagt

SEQ ID NO: 518899 - DNA, 54 bp, Artificial
  Synthetic oligonucleotide
ttaagacaggacatagttagaagcgttgctagttgggacctgcgagtgcaacgc

SEQ ID NO: 518900 - DNA, 54 bp, Artificial
  Synthetic oligonucleotide
aaaatacgagtgtggggccggaataccttaccacaaagataatgagccagtcta

SEQ ID NO: 518901 - DNA, 54 bp, Artificial
  Synthetic oligonucleotide
gacagtcacagtagcccgaaagatgttattttgagggttaataggctttcatcc

SEQ ID NO: 518902 - DNA, 54 bp, Artificial
  Synthetic oligonucleotide
cttattccgaataacatgtctgctaaggctggtttggattttggtaccactttt

SEQ ID NO: 518903 - DNA, 54 bp, Artificial
  Synthetic oligonucleotide
accggacccacccgggtatattcgtactgatgggtacactagagcctatttaat

SEQ ID NO: 518904 - DNA, 54 bp, Artificial
  Synthetic oligonucleotide
cagctatagcgatatcgctgttggccgaagacagtcacagtagcccgaaagatg

SEQ ID NO: 518905 - DNA, 53 bp, Artificial
  Synthetic oligonucleotide
gtcctcaaggtggttttgggcatgttggtggcggacccacaaagattttatcc

SEQ ID NO: 518906 - DNA, 53 bp, Artificial
  Synthetic oligonucleotide
gagttatggctacatctaccgaaattaagttgggagacttcctgaaattgcct

SEQ ID NO: 518907 - DNA, 52 bp, Artificial
  Synthetic oligonucleotide
aagcggccggaaaggcgtttcgtgaaggtacgtccggcaggttgtacgttaa

SEQ ID NO: 518908 - DNA, 52 bp, Artificial
  Synthetic oligonucleotide
gccactcacttactcacagcgctcatctgcgttgtaactggaactttctctc

SEQ ID NO: 518909 - DNA, 52 bp, Artificial
  Synthetic oligonucleotide
acaatacctggtgttgtgtcaggtaaacataaagtgattggggcaagagctc

SEQ ID NO: 518910 - DNA, 51 bp, Artificial
  Synthetic oligonucleotide
ttttcctcctcgctattccacatttgtattcagaacgcgcgtttgttttcc

SEQ ID NO: 518911 - DNA, 51 bp, Artificial
  Synthetic oligonucleotide
aaatctaccacatgttccgaaccctttcagacaatatgccaggaaacacga

SEQ ID NO: 518912 - DNA, 51 bp, Artificial
  Synthetic oligonucleotide
agcttctgtcgattctgtcaccagccgacattgagagaggcatcgtagggt

SEQ ID NO: 518913 - DNA, 51 bp, Artificial
  Synthetic oligonucleotide
cccattcacaagtattctgtgatgcattttgtcactagaactgggtttgaa

SEQ ID NO: 518914 - DNA, 51 bp, Artificial
  Synthetic oligonucleotide
ccgtctatctctttgctcataccgactatggtcatgctggcaagttaaatg

SEQ ID NO: 518915 - DNA, 51 bp, Artificial
  Synthetic oligonucleotide
gctcagcgtgagtaaccatgttgctcgcggagaggtgttgtggacaagggt

SEQ ID NO: 518916 - DNA, 51 bp, Artificial
  Synthetic oligonucleotide
ggctgcctgtgggtgtttacgtggcgcttcctcacttgctctttagatgtg

SEQ ID NO: 518917 - DNA, 51 bp, Artificial
  Synthetic oligonucleotide
ggggtaagcatgcggcttggctccttggggaggttctggtaagaatgttac

SEQ ID NO: 518918 - DNA, 50 bp, Artificial
  Synthetic oligonucleotide
tctgcctgtggctgacaactacgcagcagctaaggagaatcccatgtata

SEQ ID NO: 518919 - DNA, 50 bp, Artificial
  Synthetic oligonucleotide
atatctagacggtgggagagttagagtgacaccagacgcgcagaggatgt

SEQ ID NO: 518920 - DNA, 50 bp, Artificial
  Synthetic oligonucleotide
agctaaattgtacccgaatggtgtgtttcctaacggggacactcgacctt

SEQ ID NO: 518921 - DNA, 50 bp, Artificial
  Synthetic oligonucleotide
acactccgcctaatgacggagcacaagtcgaataagtctagtagcgacga

SEQ ID NO: 518922 - DNA, 50 bp, Artificial
  Synthetic oligonucleotide
gagtgacttctgcgatgggtgggatgtgtttataggtattacactagttg

SEQ ID NO: 518923 - DNA, 50 bp, Artificial
  Synthetic oligonucleotide
gggatttcgagccaacggagatctgtacttaagtgcgtctcaaggagcac

SEQ ID NO: 518924 - DNA, 60 bp, Artificial
  Synthetic oligonucleotide
ccggtgaaacattttggcgttacaattttgatataactgaaagcaagtattcttgcaaag

SEQ ID NO: 518925 - DNA, 60 bp, Artificial; identical to SEQ ID NO: 358411
  Synthetic oligonucleotide

SEQ ID NO: 518926 - DNA, 60 bp, Artificial
  Synthetic oligonucleotide
actacttcagttcaagttgagtacctccaaattactagtactccaatagttgttgattgt

SEQ ID NO: 518927 - DNA, 59 bp, Artificial
  Synthetic oligonucleotide
gctcctaaacgtacaggtgttattttgacacgtagttttaagtataacattagatctgc

SEQ ID NO: 518928 - DNA, 59 bp, Artificial
  Synthetic oligonucleotide
gttgtgttgcagtatgggcattataagtatagcagacttctttatggtttaaagatgtc

SEQ ID NO: 518929 - DNA, 58 bp, Artificial
  Synthetic oligonucleotide
ttagacaccttgttcctcttttacgtaaaggacaaccttggttaattgttcgtagacg

SEQ ID NO: 518930 - DNA, 58 bp, Artificial
  Synthetic oligonucleotide
ccgactttgcatttaataattggtttctcttaactaatacctcatctcttgtagacgg

SEQ ID NO: 518931 - DNA, 58 bp, Artificial
  Synthetic oligonucleotide
tcctggtatgatttttgtcttaacatctcacaatgtccaacctttacgtgcaccaact

SEQ ID NO: 518932 - DNA, 58 bp, Artificial
  Synthetic oligonucleotide
gttagtaagggatgtaaatctcctacatgtactatttgttctaggatacgtacttcac

SEQ ID NO: 518933 - DNA, 57 bp, Artificial
  Synthetic oligonucleotide
ccttcttgttaatgtactctcaatctttagttcatcttttagcgttgtggctatgtc

SEQ ID NO: 518934 - DNA, 57 bp, Artificial
  Synthetic oligonucleotide
cgtaatgttttgcctacactcactcagatgaatcttaagtatgctatatcagctaag

SEQ ID NO: 518935 - DNA, 57 bp, Artificial
  Synthetic oligonucleotide
ctaaatattaccaccaatcaacaaggtcttatacagtcttacagtgtatgcactgag

SEQ ID NO: 518936 - DNA, 56 bp, Artificial
  Synthetic oligonucleotide
cctaggtgaacactagtataactcattacaaatgtgctggagtaattaaagatcgc

SEQ ID NO: 518937 - DNA, 56 bp, Artificial
  Synthetic oligonucleotide
ctgatactgtcgatgttactaatggtttgggtacttactatgttttagatcgtgtg

SEQ ID NO: 518938 - DNA, 56 bp, Artificial
  Synthetic oligonucleotide
gagcagattagtgcttttactaaacccagttctatcaaagaaatgcagtcacaatc

SEQ ID NO: 518939 - DNA, 55 bp, Artificial
  Synthetic oligonucleotide
ggacttcacctactataacagttgagactattgtccagggtcgcaaatacccctc

SEQ ID NO: 518940 - DNA, 55 bp, Artificial
  Synthetic oligonucleotide
ggagaggtgctgttttgggttacattggtgctactgtgagattgcaagctggtaa

SEQ ID NO: 518941 - DNA, 55 bp, Artificial
  Synthetic oligonucleotide
ggagcgtgcaatcctattctgcagctccgcgcctgatatagttttgagatggcta

SEQ ID NO: 518942 - DNA, 55 bp, Artificial
  Synthetic oligonucleotide
ggagtggctcctggttctgcagttcttaggcagtggttaccagctggcactatcc

SEQ ID NO: 518943 - DNA, 55 bp, Artificial
  Synthetic oligonucleotide
ggatggcataaataatcccattttagtgggttgggattaccctaagtgtgaccgg

SEQ ID NO: 518944 - DNA, 55 bp, Artificial
  Synthetic oligonucleotide
ggattagcgggtaaagtaagagttggtacaggagttatggttgagtgtgataacc

SEQ ID NO: 518945 - DNA, 55 bp, Artificial
  Synthetic oligonucleotide
ggcacttgcagcgatgttgtaccagccaaaataccaccaggtgagcagtttagac

SEQ ID NO: 518946 - DNA, 55 bp, Artificial
  Synthetic oligonucleotide
ggccggtggtttggagttgactaccatgagatactttgttaaagtaggacaagtc

SEQ ID NO: 518947 - DNA, 55 bp, Artificial
  Synthetic oligonucleotide
gggaatgctgatgaaccccagaaggatgtttatgaattgcgctatagtggcgcga

SEQ ID NO: 518948 - DNA, 55 bp, Artificial
  Synthetic oligonucleotide
gggattaccccaagtgtgatcgctccatgcctaacatgcttcgcattgctgcgtc

SEQ ID NO: 518949 - DNA, 55 bp, Artificial
  Synthetic oligonucleotide
gggctggctactctagcacagaatcacatctcgataagcaacagtgctagaaggt

SEQ ID NO: 518950 - DNA, 55 bp, Artificial
  Synthetic oligonucleotide
gggtaaaagctctgtttgagtgcgctaaggcacaaatcttgccaatacatgctgt

SEQ ID NO: 518951 - DNA, 55 bp, Artificial
  Synthetic oligonucleotide
gagtgctgctgaatttaaatacatggttgctaatggacttcatgcaccacatgga

SEQ ID NO: 518952 - DNA, 55 bp, Artificial
  Synthetic oligonucleotide
gagtaaagggttctagtgatgcccgtctagaaccccaacagtctggcactcagcc

SEQ ID NO: 518953 - DNA, 55 bp, Artificial
  Synthetic oligonucleotide
gggtgctggctctgattatggtgttgcaccaggaactgctgttcttaaaaggtgg

SEQ ID NO: 518954 - DNA, 55 bp, Artificial
  Synthetic oligonucleotide
gggttgggactaccctaagtgtgacagagcattgcctaacatgatacgcatgatc

SEQ ID NO: 518955 - DNA, 55 bp, Artificial
  Synthetic oligonucleotide
gggttgggattatccaaaatgtgatcgtgctatgccaaacatactacgtattgtt

SEQ ID NO: 518956 - DNA, 55 bp, Artificial
  Synthetic oligonucleotide
gactggcttgcaccaactcacagcccgtattggcaaattcggtgaccaaccccaa

SEQ ID NO: 518957 - DNA, 55 bp, Artificial
  Synthetic oligonucleotide
ggtacactcaaaagctgcactgtcacttatgcaaacaatccgagtagcaaaatgg

SEQ ID NO: 518958 - DNA, 55 bp, Artificial
  Synthetic oligonucleotide
gactgctaacatggttaagtctaaaggagtttgtgctaccggtgattgttatgtg

SEQ ID NO: 518959 - DNA, 55 bp, Artificial
  Synthetic oligonucleotide
gcagagcgtgctgaagatagacgtatcaagttaacatcaggtttgactgctatgt

SEQ ID NO: 518960 - DNA, 55 bp, Artificial
  Synthetic oligonucleotide
gcatctgcttgatagtaacctactagaccaacttggaatagacatccgccacttc

SEQ ID NO: 518961 - DNA, 55 bp, Artificial
  Synthetic oligonucleotide
gcatggctttctcatttcatgccgtcagtggattacacttatacggatgaggtga

SEQ ID NO: 518962 - DNA, 55 bp, Artificial
  Synthetic oligonucleotide
gcaactcgtggagcgacttgcgtcattggtactacaaagttctacggtggctggg

SEQ ID NO: 518963 - DNA, 55 bp, Artificial
  Synthetic oligonucleotide
gccacaattttaatcctaattggagaaggccaaaggactgtactacttttgtagg

SEQ ID NO: 518964 - DNA, 55 bp, Artificial
  Synthetic oligonucleotide
gccactccctagtagcactctgctagtttcaaaccctgacctacaccgagcctgg

SEQ ID NO: 518965 - DNA, 55 bp, Artificial
  Synthetic oligonucleotide
gcccaacccaccttgcgatcaattcgtaatctggtttgtgaggctcgctcggctg

SEQ ID NO: 518966 - DNA, 55 bp, Artificial
  Synthetic oligonucleotide
gcctccggaactaagtactataatggtatggtgcttaagtttgtggacaaaattg

SEQ ID NO: 518967 - DNA, 55 bp, Artificial
  Synthetic oligonucleotide
gattgcgttgacaccaacctattctcctttagcggacaacccggctactgcctgt

SEQ ID NO: 518968 - DNA, 55 bp, Artificial
  Synthetic oligonucleotide
gcgatttggtttatactggtggattaataagtttactggtatacctgtcggtacc

SEQ ID NO: 518969 - DNA, 55 bp, Artificial
  Synthetic oligonucleotide
gcgggacccgattatcaggcattttgtaaatcgatagccccaattagtggtgctg

SEQ ID NO: 518970 - DNA, 55 bp, Artificial
  Synthetic oligonucleotide
gatgttaaagttatagctcaagtaccgcaaagaacagggttaatattaagccgca

SEQ ID NO: 518971 - DNA, 55 bp, Artificial
  Synthetic oligonucleotide
gcgttgcgtgactttacgttaaagggttatgttcttgctaccattattgtgtttc

SEQ ID NO: 518972 - DNA, 55 bp, Artificial
  Synthetic oligonucleotide
gctactcagcctttacaaagattaaaggctggtgcgcgtattaccattaaacctc

SEQ ID NO: 518973 - DNA, 55 bp, Artificial
  Synthetic oligonucleotide
gatgggcttatgaataacgcttctctgtatagctcattggctccacacgtgcgtt

SEQ ID NO: 518974 - DNA, 55 bp, Artificial
  Synthetic oligonucleotide
gctcctcattacccacaacttgctgaactcgtacctacaccagctgcactgctgt

SEQ ID NO: 518975 - DNA, 55 bp, Artificial
  Synthetic oligonucleotide
gctgttaacttacctaaccaaatggctgcaccaatgtcaatggtattgcggcggt

SEQ ID NO: 518976 - DNA, 55 bp, Artificial
  Synthetic oligonucleotide
ggaactgagttcgcttgcaaagcacatcattctcttaccactccacaatgtgatt

SEQ ID NO: 518977 - DNA, 55 bp, Artificial
  Synthetic oligonucleotide
ggaagtcgagtgccacatatagttcgcaaagatcttacaaagtacactatgttgg

SEQ ID NO: 518978 - DNA, 55 bp, Artificial
  Synthetic oligonucleotide
gatcgtatgagcctgactgttatgtcttatcagatgcaaggatgtatgcttgttc

SEQ ID NO: 518979 - DNA, 55 bp, Artificial
  Synthetic oligonucleotide
ggaccgcacaccttatgttaaacggcttcgtaaggttgcagtgtgggtgggtgca

SEQ ID NO: 518980 - DNA, 55 bp, Artificial
  Synthetic oligonucleotide
ggactgaaactgatatgactaaaggccctcatgagttctgttctcaacatactgt

SEQ ID NO: 518981 - DNA, 55 bp, Artificial
  Synthetic oligonucleotide
gtgccgctcgactagagccctgcaatggtacagacatagattattgtgtccgtgc

SEQ ID NO: 518982 - DNA, 55 bp, Artificial
  Synthetic oligonucleotide
gtgctgtgcgtcctagtctaagggttctgtgttctgtcacgggattccattctat

SEQ ID NO: 518983 - DNA, 55 bp, Artificial
  Synthetic oligonucleotide
gtggtcggcgtgctagcttcactaattgtgttgactacacgtgtaaggcccatag

SEQ ID NO: 518984 - DNA, 55 bp, Artificial
  Synthetic oligonucleotide
gtggtgattatgcagcatgtaaatcacagttagttgagtatggtagtttctgtga

SEQ ID NO: 518985 - DNA, 55 bp, Artificial
  Synthetic oligonucleotide
gtgtgcttctacggaggggaccaatttctttacataggtgacagagttgtttcct

SEQ ID NO: 518986 - DNA, 55 bp, Artificial
  Synthetic oligonucleotide
gtgtgtttgtacaggatccagcacctattgacattgatgctttccctgtgagacc

SEQ ID NO: 518987 - DNA, 55 bp, Artificial
  Synthetic oligonucleotide
gttcgatgaccccatagaggttgttgaaagagaggcttctagtattgttaacaca

SEQ ID NO: 518988 - DNA, 55 bp, Artificial
  Synthetic oligonucleotide
gttcggtgatctctcattgggagtgtgcactgttgtttgtgtgggtattgtgaac

SEQ ID NO: 518989 - DNA, 55 bp, Artificial
  Synthetic oligonucleotide
gttctgatggtaagttattgccacttgttgtacctgatcagataatgtatacgcc

SEQ ID NO: 518990 - DNA, 55 bp, Artificial
  Synthetic oligonucleotide
gttgctatagcggtcgtgtttcagcggcctttcacgctaattcttccgaaccagc

SEQ ID NO: 518991 - DNA, 55 bp, Artificial
  Synthetic oligonucleotide
gttttacttcgctgtagtgatcgtgccgcacgtgagtaacatgcaattgcttgcg

SEQ ID NO: 518992 - DNA, 55 bp, Artificial
  Synthetic oligonucleotide
taacgtctatgttgtatcatatgcttagacgggttaattcagaccgtatagctgc

SEQ ID NO: 518993 - DNA, 55 bp, Artificial
  Synthetic oligonucleotide
taatgatggcacactcaaaagctgcactgtcacttatgcaaacaatccgagtagc

SEQ ID NO: 518994 - DNA, 55 bp, Artificial
  Synthetic oligonucleotide
tacaacctgtaagctacattactgttgtagcctattcagggctgtgtgtagacaa

SEQ ID NO: 518995 - DNA, 55 bp, Artificial
  Synthetic oligonucleotide
tacacagctgttatctggtttaggcgtaaccgccaccagaaatttcactgtgtgg

SEQ ID NO: 518996 - DNA, 55 bp, Artificial
  Synthetic oligonucleotide
tacatcactactagagacatgtatcaacctagacttccacaagttagtgacttcg

SEQ ID NO: 518997 - DNA, 55 bp, Artificial
  Synthetic oligonucleotide
tagagctcacattacgcatccaggtgttgatggtcgttgtgtatataagggcagg

SEQ ID NO: 518998 - DNA, 55 bp, Artificial
  Synthetic oligonucleotide
tcgtttggctaatgaatgttgccaagtactatcagaagtggtagtctctggtaac

SEQ ID NO: 518999 - DNA, 55 bp, Artificial
  Synthetic oligonucleotide
tcttgtatatatgtatcagtagttgttagtggacacggctttgatagggatacgc

SEQ ID NO: 519000 - DNA, 55 bp, Artificial
  Synthetic oligonucleotide
tgccatcaggtttcaaattaatgtcacaaccgacatattacagctcactgcaggc

SEQ ID NO: 519001 - DNA, 55 bp, Artificial
  Synthetic oligonucleotide
tgcgcaatgttttcactgctcagaacacagctcaggatttcaatggcaatgaatc

SEQ ID NO: 519002 - DNA, 55 bp, Artificial
  Synthetic oligonucleotide
tgttaaagagtaatgtgtgttttgacaatggcgagcccgtctttaagggcccaga

SEQ ID NO: 519003 - DNA, 55 bp, Artificial
  Synthetic oligonucleotide
ttccttaatggagcttgtggtagcgtgggttacactcttaagggtaaaacactct

SEQ ID NO: 519004 - DNA, 55 bp, Artificial
  Synthetic oligonucleotide
ttctggttgcatgcttagggcttgtattaaaactgcccaagctgatacagctggt

SEQ ID NO: 519005 - DNA, 55 bp, Artificial
  Synthetic oligonucleotide
ggtacgatcagagctgcttttaattaacatgatcccttgctttggcttgacaagg

SEQ ID NO: 519006 - DNA, 55 bp, Artificial
  Synthetic oligonucleotide
ggtagtggtactaatggcactgttgtaaaattctctgaagcagttcaggttaaag

SEQ ID NO: 519007 - DNA, 55 bp, Artificial
  Synthetic oligonucleotide
ggtctcccgaactattcttatccagaattgtcgctggaccgttttaaccatacaa

SEQ ID NO: 519008 - DNA, 55 bp, Artificial
  Synthetic oligonucleotide
ggtgaatccaaatctcaatctcggaatccttcaagtgacagaaaccataacagtc

SEQ ID NO: 519009 - DNA, 55 bp, Artificial
  Synthetic oligonucleotide
ggtgagtattttgctattatgttgttgctctactggttgctgtggcttctttagt

SEQ ID NO: 519010 - DNA, 55 bp, Artificial
  Synthetic oligonucleotide
ggtgccagatgtagagtctaaaacattgagtgttaatgcgtctgatgatggttgt

SEQ ID NO: 519011 - DNA, 55 bp, Artificial
  Synthetic oligonucleotide
ggtgctatccgaagtggtagtgtcaggcaacaacctctatgttaaaccaggtggc

SEQ ID NO: 519012 - DNA, 55 bp, Artificial
  Synthetic oligonucleotide
ggtgggattaccctaagtgtgaccgttctatgccaaatttgttgcgcataacgtc

SEQ ID NO: 519013 - DNA, 55 bp, Artificial
  Synthetic oligonucleotide
ggtggtgcctctatttgtttatattgccgcgcccatatacctcacccaggtgttg

SEQ ID NO: 519014 - DNA, 55 bp, Artificial
  Synthetic oligonucleotide
ggtttgcgcccaccgcgtaatagttttgaagcccttatgctcaattttaagcttt

SEQ ID NO: 519015 - DNA, 55 bp, Artificial
  Synthetic oligonucleotide
gtacaaagaggctagagctgttaacagaaagtctaaggttattggtgctatgcat

SEQ ID NO: 519016 - DNA, 55 bp, Artificial
  Synthetic oligonucleotide
gtagtcttactacacttatttctgctggcatatttagtgtgccatctgatgtgtc

SEQ ID NO: 519017 - DNA, 55 bp, Artificial
  Synthetic oligonucleotide
gtatagcagctactcgtggtgttcctgttgttataggcactacgaaattctatgg

SEQ ID NO: 519018 - DNA, 55 bp, Artificial
  Synthetic oligonucleotide
gtatcgttgcacttgtctggtgggattgtggcattaatttgcctgctcatctagg

SEQ ID NO: 519019 - DNA, 55 bp, Artificial
  Synthetic oligonucleotide
gtcagcggacacgttacccagcatagcactccttgcaccgagcctaggtaggata

SEQ ID NO: 519020 - DNA, 55 bp, Artificial
  Synthetic oligonucleotide
gtccacctttgctattggcttttccaagtattaccctaatgcacgcatttgctac

SEQ ID NO: 519021 - DNA, 55 bp, Artificial
  Synthetic oligonucleotide
gtccagctgaatttaagtacatggttgctaatggtttgaatgcaccagatggccc

SEQ ID NO: 519022 - DNA, 55 bp, Artificial
  Synthetic oligonucleotide
gtcgttagtgctacaatgaagggtgctaacttgcatattaaggttaaccagacca

SEQ ID NO: 519023 - DNA, 55 bp, Artificial
  Synthetic oligonucleotide
gtctatcctgagcgtttgttctttggacagagtgaatgtgttaggtgtgacgtag

SEQ ID NO: 519024 - DNA, 55 bp, Artificial
  Synthetic oligonucleotide
gtgaaaagaacctacaacttatgcgtaaggttgacttgtataatggtgctgtcat

SEQ ID NO: 519025 - DNA, 55 bp, Artificial
  Synthetic oligonucleotide
gtgactactcactctataccgggcattccagcaggtgttatccatagagatggac

SEQ ID NO: 519026 - DNA, 55 bp, Artificial
  Synthetic oligonucleotide
gtgatgcccgcctagaaccctgcactagcgacaaccgacccgatgtcgtcgttag

SEQ ID NO: 519027 - DNA, 55 bp, Artificial; identical to SEQ ID NO: 440310
  Synthetic oligonucleotide

SEQ ID NO: 519028 - DNA, 55 bp, Artificial
  Synthetic oligonucleotide
gtgcagctcgactagaaccctgtaatggcacggacattgataagtgtgttcgtgc

SEQ ID NO: 519029 - DNA, 55 bp, Artificial
  Synthetic oligonucleotide
cagtaaacaatggcatgtcattctctcaattctgtctaagcactgaatctggtgc

SEQ ID NO: 519030 - DNA, 55 bp, Artificial
  Synthetic oligonucleotide
cagtagtcgcaaatgcaatgcttaagtgtgttgctctttgcgacgaaatggtgct

SEQ ID NO: 519031 - DNA, 55 bp, Artificial
  Synthetic oligonucleotide
cagtcaactgttcgaccttatgagtggtcttgctaaggctactattagggttgta

SEQ ID NO: 519032 - DNA, 55 bp, Artificial
  Synthetic oligonucleotide
cagtggggttatgtaggcaatcttgctactaatcacgatcgttattgctctgtcc

SEQ ID NO: 519033 - DNA, 55 bp, Artificial
  Synthetic oligonucleotide
cagtttggaagcaagtgctgtgtgtcctagtctaagggtttcgtgttccgtcacg

SEQ ID NO: 519034 - DNA, 55 bp, Artificial
  Synthetic oligonucleotide
catacctagatctttcataactttaccctaccatgtaactcattctgtagtgggt

SEQ ID NO: 519035 - DNA, 55 bp, Artificial
  Synthetic oligonucleotide
catgatcccttgcttcggcttgacaaggatctagtcttatacacaatggtaagcc

SEQ ID NO: 519036 - DNA, 55 bp, Artificial
  Synthetic oligonucleotide
catggcgcatgtggtcactccgctatcggcacctccagtgctagcccagaccaca

SEQ ID NO: 519037 - DNA, 55 bp, Artificial
  Synthetic oligonucleotide
cattagccgatataactaccactattgtcaagctcaaagccacacctgttgtgtc

SEQ ID NO: 519038 - DNA, 55 bp, Artificial
  Synthetic oligonucleotide
ccaacggctttcgctgttataggtgatttaaagtgtactacggcttccattaatg

SEQ ID NO: 519039 - DNA, 55 bp, Artificial
  Synthetic oligonucleotide
ccaccctaaaggagattgtaggtcctaaggaacttttgctctcatgggaaagtgg

SEQ ID NO: 519040 - DNA, 55 bp, Artificial
  Synthetic oligonucleotide
ccacgccatgttatcggtaaatacaagggtgaacaatggttacatatggtctcca

SEQ ID NO: 519041 - DNA, 55 bp, Artificial
  Synthetic oligonucleotide
ccagggttttactattagtggcatgacatacccattggcatactgtgtgccacca

SEQ ID NO: 519042 - DNA, 55 bp, Artificial
  Synthetic oligonucleotide
ccagtccactctctggatgcgttcaggaaagcatgtccaagtgacataggtcgtg

SEQ ID NO: 519043 - DNA, 55 bp, Artificial
  Synthetic oligonucleotide
ccccagaaactaggcttattgctggtattgtagacatgatgggcaatgggaggtg

SEQ ID NO: 519044 - DNA, 55 bp, Artificial
  Synthetic oligonucleotide
cccctaccgggtcactcttaaggcgtttcctccgtgggatagccactagtgacta

SEQ ID NO: 519045 - DNA, 55 bp, Artificial
  Synthetic oligonucleotide
cccttcaacgccaaggaagcagctagaaagaccagagtggaaacgtgtgccaaac

SEQ ID NO: 519046 - DNA, 55 bp, Artificial
  Synthetic oligonucleotide
cctacatgctttaacgatgcttttgagtgtcttaagagctttgtggaaacacttt

SEQ ID NO: 519047 - DNA, 55 bp, Artificial
  Synthetic oligonucleotide
cctcacagtattcgttctatccaaagtgatagaaaagcttgggctgccttctacg

SEQ ID NO: 519048 - DNA, 55 bp, Artificial
  Synthetic oligonucleotide
cctcgaaacgactggcaccatgtctgacgctgcagagtggcaactcatcgtattt

SEQ ID NO: 519049 - DNA, 55 bp, Artificial
  Synthetic oligonucleotide
cctcgcagggctctgagtatgactatgtcgtattctgtgtcactacggattcagg

SEQ ID NO: 519050 - DNA, 55 bp, Artificial
  Synthetic oligonucleotide
cctgttgtacgaatcgacagaggttttaccgtttggctaatgagtgttgtcaggt

SEQ ID NO: 519051 - DNA, 55 bp, Artificial
  Synthetic oligonucleotide
aatcttcaactggtagcaaagtctacacttgagttggctactaacatcacacagc

SEQ ID NO: 519052 - DNA, 55 bp, Artificial
  Synthetic oligonucleotide
acatgagggttttgcaccttggtgcagggtcggataagggagttgcacctggtac

SEQ ID NO: 519053 - DNA, 55 bp, Artificial
  Synthetic oligonucleotide
accctagtggtgaccatttggaccgcagttgacagatcatctaagaaggacgcag

SEQ ID NO: 519054 - DNA, 55 bp, Artificial
  Synthetic oligonucleotide
acgtgtgtggtatgtgctaaacttcgtaccccacctactataacagttgagactg

SEQ ID NO: 519055 - DNA, 55 bp, Artificial
  Synthetic oligonucleotide
agctcggattactgtagggttaagctgtaccggtctgcaccgcccgtcagcggac

SEQ ID NO: 519056 - DNA, 55 bp, Artificial
  Synthetic oligonucleotide
aggcagggagtctagttgttgatgctgtgtctagtgtggcaactctttgccagcc

SEQ ID NO: 519057 - DNA, 55 bp, Artificial
  Synthetic oligonucleotide
aggtggtctactccttcaaattaatacgcaccctttcttcggattgacaaggtgc

SEQ ID NO: 519058 - DNA, 55 bp, Artificial
  Synthetic oligonucleotide
agtactaagcattgacgtaaatccgagacctaaagaggccccggtagtccttgcg

SEQ ID NO: 519059 - DNA, 55 bp, Artificial
  Synthetic oligonucleotide
atgtcacctgtttaccaagctgttgcacccactgaagttgtgttcaactgtgtta

SEQ ID NO: 519060 - DNA, 55 bp, Artificial
  Synthetic oligonucleotide
attattcagatggcttctgatggtcaacatctttacatgtttgacggtacacaag

SEQ ID NO: 519061 - DNA, 55 bp, Artificial
  Synthetic oligonucleotide
attgatcctatgaggcagtacatgaaccgttacgagacaccaacctctaaaagtg

SEQ ID NO: 519062 - DNA, 55 bp, Artificial
  Synthetic oligonucleotide
attggtaaagtaacacttgttactcaggatgatagacatcttcaggcttgggatg

SEQ ID NO: 519063 - DNA, 55 bp, Artificial
  Synthetic oligonucleotide
attttgcgaaaataggtaaggagacatgttgtaatgtgtgcactaatcgtgccac

SEQ ID NO: 519064 - DNA, 55 bp, Artificial
  Synthetic oligonucleotide
cacaagttcagagttgcatggatgttgttgcgtccggcaattataagggagatga

SEQ ID NO: 519065 - DNA, 55 bp, Artificial
  Synthetic oligonucleotide
cacagcgatttattgtgaaaaccacaaacctacgctgtgcatacctattgtcgct

SEQ ID NO: 519066 - DNA, 55 bp, Artificial
  Synthetic oligonucleotide
cacctcattccgttaatgtcccggggacagcggtgggatgttgttagacctagaa

SEQ ID NO: 519067 - DNA, 55 bp, Artificial
  Synthetic oligonucleotide
cactctactagacttactattactgaacttttacagttcgtgacagatcctgcgc

SEQ ID NO: 519068 - DNA, 55 bp, Artificial
  Synthetic oligonucleotide
cactgtgcaaccactgctgaacccaactgctccagacttcaaaccagctacatcg

SEQ ID NO: 519069 - DNA, 55 bp, Artificial
  Synthetic oligonucleotide
cagacggtgattatccaatagatggtgtgtataaatcccttcaacctcttaaagt

SEQ ID NO: 519070 - DNA, 55 bp, Artificial
  Synthetic oligonucleotide
cagacttgcaacctaatagttattatagtctcccagttggtggctatgttagact

SEQ ID NO: 519071 - DNA, 55 bp, Artificial
  Synthetic oligonucleotide
caggcagctcttacctgagcccacaaggtaatcaggggagtaatgtcgaagctca

SEQ ID NO: 519072 - DNA, 55 bp, Artificial
  Synthetic oligonucleotide
caggctgtaccgcagaaccaacactttctgggcctttaacccggaaactgatgcc

SEQ ID NO: 519073 - DNA, 55 bp, Artificial
  Synthetic oligonucleotide
cagggtgagtcctttaacatccttgcatgttatgatggtatgccttctggtgttt

SEQ ID NO: 519074 - DNA, 55 bp, Artificial
  Synthetic oligonucleotide
cgtggccatctctacattcaaggtataaaactaggtactggctattctttgtcag

SEQ ID NO: 519075 - DNA, 55 bp, Artificial
  Synthetic oligonucleotide
cgtggggattctcgggacggctttccaccaaccatgacgcggtatgcacatatca

SEQ ID NO: 519076 - DNA, 55 bp, Artificial
  Synthetic oligonucleotide
cgtggtacatcaacatatcgcctacaaactggtgatgttttagtacttatggctc

SEQ ID NO: 519077 - DNA, 55 bp, Artificial
  Synthetic oligonucleotide
cgtgtcagaacttgcttttgaccggacgggtggtatctacattaatggctaccgc

SEQ ID NO: 519078 - DNA, 55 bp, Artificial
  Synthetic oligonucleotide
ctaccattccattggtaatgagacgtgcgagcagcctgttatcacttatggttcc

SEQ ID NO: 519079 - DNA, 55 bp, Artificial
  Synthetic oligonucleotide
ctccaggtttacggacataattattacttaccggtgatggctgcacctacaggtg

SEQ ID NO: 519080 - DNA, 55 bp, Artificial
  Synthetic oligonucleotide
ctcggttgcatcgtcaatgctgataatagtaccgcttccactgttcaaacatgtg

SEQ ID NO: 519081 - DNA, 55 bp, Artificial
  Synthetic oligonucleotide
ctctaatttggacaaatctgcgggctatccctttaacaagctggggaaggcgcgt

SEQ ID NO: 519082 - DNA, 55 bp, Artificial
  Synthetic oligonucleotide
ctcttgtcatgggcacgctaatagttactttctttgtgaacttctatggtgtgca

SEQ ID NO: 519083 - DNA, 55 bp, Artificial
  Synthetic oligonucleotide
ctgccagcggtatgtctgtaatggcaaccccaggtgtctgatgctattatcacaa

SEQ ID NO: 519084 - DNA, 55 bp, Artificial
  Synthetic oligonucleotide
ctggagtgttgtacgtaatcgtattgtagttatgctctctaagcttctgcgtgac

SEQ ID NO: 519085 - DNA, 55 bp, Artificial
  Synthetic oligonucleotide
ctggctaaagggccgttacaagtaggagattcagttctcttgcaaggccattctc

SEQ ID NO: 519086 - DNA, 55 bp, Artificial
  Synthetic oligonucleotide
ctgtctttagaatattgggttacacctctcactcctaggcaatatttactcgcct

SEQ ID NO: 519087 - DNA, 55 bp, Artificial
  Synthetic oligonucleotide
cttagcgttgacgtctatcctaaaccagagccggttggtaaggttgggattgacg

SEQ ID NO: 519088 - DNA, 55 bp, Artificial
  Synthetic oligonucleotide
cttagttccgctgcctatacaccaactctgtaaacaccagtgaccaccgtagggt

SEQ ID NO: 519089 - DNA, 55 bp, Artificial
  Synthetic oligonucleotide
cttatgtatgttacgtattatgcctgtaggtacagatcacctgcatttgttgtgc

SEQ ID NO: 519090 - DNA, 55 bp, Artificial
  Synthetic oligonucleotide
ctttggaagtgcaggtgttgtagctaatggtgtcaaagccaaaggctacccacaa

SEQ ID NO: 519091 - DNA, 55 bp, Artificial
  Synthetic oligonucleotide
gacatgggatgaacacttgctgtttcctgcagtagcattattgtcttctcatcct

SEQ ID NO: 519092 - DNA, 55 bp, Artificial
  Synthetic oligonucleotide
gacctctatagtgttaatcaatatttagtatgagaggcaatcagagggcgctatc

SEQ ID NO: 519093 - DNA, 55 bp, Artificial
  Synthetic oligonucleotide
gactcccgtgctccttcccgttctcagtcaaggtctcagagtcgcggtcgtggtg

SEQ ID NO: 519094 - DNA, 55 bp, Artificial
  Synthetic oligonucleotide
gactgctaacaatctaactgcacctagaaattcttgggaggctatggctctgaac

SEQ ID NO: 519095 - DNA, 55 bp, Artificial
  Synthetic oligonucleotide
cgaaagttagtgctgaagtttcacgacaggttatccaagacgtgaaagatggcac

SEQ ID NO: 519096 - DNA, 55 bp, Artificial
  Synthetic oligonucleotide
cgacaccaattccgatcatttatagcggtactcaaaccacattgtgggtagacgt

SEQ ID NO: 519097 - DNA, 55 bp, Artificial
  Synthetic oligonucleotide
cgacaggttatccaagacgtgaaagatggcactgttaccttcaacttgctagcgt

SEQ ID NO: 519098 - DNA, 55 bp, Artificial
  Synthetic oligonucleotide
cgagttcgcttgcaaagcacatcacgctcttacagtaccacagtgcgattatgtg

SEQ ID NO: 519099 - DNA, 55 bp, Artificial
  Synthetic oligonucleotide
cgcaccacccgtcagtggacagaactaaccaatatagcactccttacgtctcgcc

SEQ ID NO: 519100 - DNA, 55 bp, Artificial
  Synthetic oligonucleotide
cgcatgatctctgctatgatacttggttccaaacacacaacatgttgtaccactg

SEQ ID NO: 519101 - DNA, 55 bp, Artificial
  Synthetic oligonucleotide
cgccatacattgttaggttctcacaagttaattattgtcgcatgggtcattgctt

SEQ ID NO: 519102 - DNA, 55 bp, Artificial
  Synthetic oligonucleotide
cgcctgcataaaggattccagggacgtcagattatgggtagttgtgcttttgaag

SEQ ID NO: 519103 - DNA, 55 bp, Artificial
  Synthetic oligonucleotide
cgctgcaaccactgtttgtactgttgcgttagcttcttatgctgacgttttggtt

SEQ ID NO: 519104 - DNA, 55 bp, Artificial
  Synthetic oligonucleotide
cggaggggaccaattcctttacataggtgacagaattgttacttatctctcaact

SEQ ID NO: 519105 - DNA, 55 bp, Artificial
  Synthetic oligonucleotide
cggcatctcgtaatggtgttacttgtgctgtgacgccatctactcttgttatgcg

SEQ ID NO: 519106 - DNA, 55 bp, Artificial
  Synthetic oligonucleotide
cggttatactactcttacagatgagtttactgttggcgaggttattaagcagatg

SEQ ID NO: 519107 - DNA, 55 bp, Artificial
  Synthetic oligonucleotide
cggttttgttgaggcctataataattgcactggaggtgccgaaattagggatctc

SEQ ID NO: 519108 - DNA, 55 bp, Artificial
  Synthetic oligonucleotide
cgtagtgttcgcgtcaaatgcagtacggttgtaggtggcatgatacgctattacg

SEQ ID NO: 519109 - DNA, 55 bp, Artificial
  Synthetic oligonucleotide
cgtgctcgtgcacctcctggagaacaatttactcacattgtacctctgttacgca

SEQ ID NO: 519110 - DNA, 55 bp, Artificial
  Synthetic oligonucleotide
cgtcgtggtcaaccatgggttgtcgtgcgtaaacgcatagtgcagatgtgttgtg

SEQ ID NO: 519111 - DNA, 54 bp, Artificial; identical to SEQ ID NO: 378615
  Synthetic oligonucleotide

SEQ ID NO: 519112 - DNA, 54 bp, Artificial
  Synthetic oligonucleotide
ctaataactattgccgtatgggacattgttttagaacagacccgggagtttgtg

SEQ ID NO: 519113 - DNA, 54 bp, Artificial
  Synthetic oligonucleotide
acaaaccggcacactgacacaataccatctatttcactcctagcttcgctaggc

SEQ ID NO: 519114 - DNA, 54 bp, Artificial
  Synthetic oligonucleotide
cgcttaagttggctggtactgccgtaataaatttaaaaccagaccagattaatg

SEQ ID NO: 519115 - DNA, 54 bp, Artificial
  Synthetic oligonucleotide
acctggcggtactagtagtggtgatgcaaccactgcctttgctaactcagtttt

SEQ ID NO: 519116 - DNA, 54 bp, Artificial
  Synthetic oligonucleotide
tctggtgaagtgtgtggaagtcaagttccgtcttgtctgaaacctgtaactgtg

SEQ ID NO: 519117 - DNA, 54 bp, Artificial
  Synthetic oligonucleotide
gatgccgggaatagacgacgtgctgcctctgctcccggaacaaaccgttcaaaa

SEQ ID NO: 519118 - DNA, 54 bp, Artificial
  Synthetic oligonucleotide
agcagtcgcccagtgggagagcgccatacaggttgtagctgagcggggaacaaa

SEQ ID NO: 519119 - DNA, 53 bp, Artificial
  Synthetic oligonucleotide
gggtatctgtgttgatggcatttacggctatgttctgcgtcaacctaacttgg

SEQ ID NO: 519120 - DNA, 53 bp, Artificial
  Synthetic oligonucleotide
tgcagtttggctatttggcccatgtgatgtatcgcttatgtactacaacttgg

SEQ ID NO: 519121 - DNA, 53 bp, Artificial
  Synthetic oligonucleotide
tctagtgcaggatcgcgtagagccaattcaggtactagaacccctacctctgg

SEQ ID NO: 519122 - DNA, 53 bp, Artificial
  Synthetic oligonucleotide
agcctgttgtaacacctactttaaccacacaggtgttatttcagtagctcgtg

SEQ ID NO: 519123 - DNA, 53 bp, Artificial
  Synthetic oligonucleotide
gtcttatgggttgggactaccctaagtgtgatagagcattgcccaacatgata

SEQ ID NO: 519124 - DNA, 52 bp, Artificial
  Synthetic oligonucleotide
gtagcactcgctctttatgagaaagcgccataactacattagttgtgtgggg

SEQ ID NO: 519125 - DNA, 52 bp, Artificial
  Synthetic oligonucleotide
gattctgagcgatttgcgtgcgtgcatccgcctcagtgaactcttgttagtt

SEQ ID NO: 519126 - DNA, 52 bp, Artificial
  Synthetic oligonucleotide
gctgtagagagaatgttaaagactgtcacctctgcttgattgcaagtgaaca

SEQ ID NO: 519127 - DNA, 52 bp, Artificial
  Synthetic oligonucleotide
gtctacctggtgaagcagtgtggcctatgtatctcagatctggtctaaccta

SEQ ID NO: 519128 - DNA, 52 bp, Artificial
  Synthetic oligonucleotide
cataggagcgtggaatcctattctgcggctcagtgcctgatatagctgtaaa

SEQ ID NO: 519129 - DNA, 51 bp, Artificial
  Synthetic oligonucleotide
agactggcttaagtcgttgaagttaaatctcacacaacagggtttgcttgg

SEQ ID NO: 519130 - DNA, 51 bp, Artificial
  Synthetic oligonucleotide
atcgccagtatttgactaaatatacactcctggacttggcttatgctctac

SEQ ID NO: 519131 - DNA, 51 bp, Artificial
  Synthetic oligonucleotide
agcagtacaagctcgcctcaattatgtcgcactgcaaacaaatgtactaca

SEQ ID NO: 519132 - DNA, 51 bp, Artificial
  Synthetic oligonucleotide
ccctctgcgcttttacaaatctagataagttgaagttcaaagaggtctgta

SEQ ID NO: 519133 - DNA, 51 bp, Artificial
  Synthetic oligonucleotide
tggtatgtaccctaccttgtaaaattcactaccaatctctactgtcggata

SEQ ID NO: 519134 - DNA, 51 bp, Artificial
  Synthetic oligonucleotide
tgtaggttctagctttgacggtgttatgtatggtggttttgaagaccaacc

SEQ ID NO: 519135 - DNA, 51 bp, Artificial
  Synthetic oligonucleotide
gcttcataatgatactctcaaggctacaacctttgaggaggctgaaacctc

SEQ ID NO: 519136 - DNA, 50 bp, Artificial
  Synthetic oligonucleotide
agacgtgatgctacattcgccacacatgtgtgttttaaggactgttataa

SEQ ID NO: 519137 - DNA, 50 bp, Artificial
  Synthetic oligonucleotide
cagtatctggcctcttacaacaagtacaaatacttttctggtactgcttc

SEQ ID NO: 519138 - DNA, 50 bp, Artificial
  Synthetic oligonucleotide
gctgttaaacattgccaatgtggtactgttgcaacatgctacaattctgt

SEQ ID NO: 519139 - DNA, 50 bp, Artificial
  Synthetic oligonucleotide
ctgaattttcccttgtttgccggtttgatactagatgtagatctagcctc

SEQ ID NO: 519140 - DNA, 50 bp, Artificial
  Synthetic oligonucleotide
ttgtctatggtggctgtccatcttgtgataaaccccttatgcacactata

SEQ ID NO: 519141 - DNA, 60 bp, Artificial
  Synthetic oligonucleotide
tgttatgagtcaaagcttaagtgacagggttgaccgaatgtaccatgaattagtacagac

SEQ ID NO: 519142 - DNA, 60 bp, Artificial
  Synthetic oligonucleotide
tgtgactttctttggtgattgtggctcgatacttattgcatcgaacgctgctattactca

SEQ ID NO: 519143 - DNA, 60 bp, Artificial
  Synthetic oligonucleotide
tgctaagatcccgatcgctaaggctaacgtaggtaaaactcgactattcaccgcttgtcc

SEQ ID NO: 519144 - DNA, 60 bp, Artificial
  Synthetic oligonucleotide
tatatgcctcgcaatctcgagggaaccttcgagttccaggtgcctcactattcgaggtat

SEQ ID NO: 519145 - DNA, 60 bp, Artificial
  Synthetic oligonucleotide
tagtctaagtaaagaacgcccgtgacctagttgatttcccgtggaaacgtaatgtgtgtt

SEQ ID NO: 519146 - DNA, 60 bp, Artificial
  Synthetic oligonucleotide
tagccttggcgctgagaaggtattacctaagtttcttggaccatgtgatgacgaacagga

SEQ ID NO: 519147 - DNA, 60 bp, Artificial
  Synthetic oligonucleotide
taagcccggtatgcttggagaccaggtttgtttgccgacttacggaatgtcgttaaactc

SEQ ID NO: 519148 - DNA, 60 bp, Artificial
  Synthetic oligonucleotide
gtctggcgcttcaactatctactcctgaaattaatcagctgaagatacgtgatgcacagg

SEQ ID NO: 519149 - DNA, 60 bp, Artificial
  Synthetic oligonucleotide
gacttggcccgcgtatctgattctcctgctattctagctcgatatcagaccgcttccgaa

SEQ ID NO: 519150 - DNA, 60 bp, Artificial
  Synthetic oligonucleotide
gaactctccagaagctgtacaacgtcgtatcgattttgcttacaatgtcgatattgcgga

SEQ ID NO: 519151 - DNA, 60 bp, Artificial
  Synthetic oligonucleotide
ctggtttatgagaaactgggaccaaattgtagcagctgatagacacgttattaatggaca

SEQ ID NO: 519152 - DNA, 60 bp, Artificial
  Synthetic oligonucleotide
ctcttcctagtggtcattatcttaccgctattattaattccgtctttgtcaacttagtta

SEQ ID NO: 519153 - DNA, 60 bp, Artificial
  Synthetic oligonucleotide
cggagatacgtttgacgtcaatagccttattgaagcaccccgtctcgatatagctcaata

SEQ ID NO: 519154 - DNA, 60 bp, Artificial
  Synthetic oligonucleotide
cgctttttatgttactgcattcaattttactacagacgccgatataactgagtcaggcag

SEQ ID NO: 519155 - DNA, 60 bp, Artificial
  Synthetic oligonucleotide
agtatatccgaggatacgttagtaacatgtggtaaaatgtcagcagttggccaagctacg

SEQ ID NO: 519156 - DNA, 60 bp, Artificial
  Synthetic oligonucleotide
aaacttacgagcgcagacataactgcaccactgaaagattatcagcattctgttggacgc

SEQ ID NO: 519157 - DNA, 60 bp, Artificial
  Synthetic oligonucleotide
atcaagatggccgttggcagccccacaaaatctagattagtccgaatgtcctattttgat

SEQ ID NO: 519158 - DNA, 60 bp, Artificial
  Synthetic oligonucleotide
caaggccctgaagatgtagaatccgcatcttattctatctacggcaggttgaaaaacatt

SEQ ID NO: 519159 - DNA, 59 bp, Artificial
  Synthetic oligonucleotide
agtaatgcctcattactttgtccctggtggcgatgtaactgtcgccatggacaaggata

SEQ ID NO: 519160 - DNA, 59 bp, Artificial
  Synthetic oligonucleotide
cgactattgaccctatgaccttgcaacggaataaatatggtgttgtgagaccttacgtc

SEQ ID NO: 519161 - DNA, 58 bp, Artificial
  Synthetic oligonucleotide
caataaaacgcgacacctcttgtggatatcctttcgttaaggaaggatggacacgagc

SEQ ID NO: 519162 - DNA, 58 bp, Artificial
  Synthetic oligonucleotide
ctgtagccagaattcatggcacgaattgcgtgtgtttgttgactcgtttctatcaggg

SEQ ID NO: 519163 - DNA, 57 bp, Artificial
  Synthetic oligonucleotide
tagtgatatctctcgtcaagtaaatggaatgttgcctaaggtagataggatgttacc

SEQ ID NO: 519164 - DNA, 57 bp, Artificial
  Synthetic oligonucleotide
cccttagatttagatatgtcttatctaacatctgtagatgatggtcgcaatcactct

SEQ ID NO: 519165 - DNA, 55 bp, Artificial
  Synthetic oligonucleotide
gccgaaagtattctttcgacgagtggtttagtttctcaaaggcatctaaggtggt

SEQ ID NO: 519166 - DNA, 55 bp, Artificial
  Synthetic oligonucleotide
gcccgtctagctcccgacgtgatataaacgtagcattaagcccgtctagctcccg

SEQ ID NO: 519167 - DNA, 55 bp, Artificial
  Synthetic oligonucleotide
gcccggcagagaacttggtattggattcgcgctcttttccccaattgagtgatct

SEQ ID NO: 519168 - DNA, 55 bp, Artificial
  Synthetic oligonucleotide
gcgacggctgtaataacagtacaatttcagacgcaaccatttcaagcgggaagag

SEQ ID NO: 519169 - DNA, 55 bp, Artificial
  Synthetic oligonucleotide
gcgtacgctcataacgccttgtagcggaaacaatacttgtgctgtggtgtgcgtg

SEQ ID NO: 519170 - DNA, 55 bp, Artificial
  Synthetic oligonucleotide
ggtggcgaggtaacatcaacctcaatcttcgctttgctaagacgcagtaccatca

SEQ ID NO: 519171 - DNA, 55 bp, Artificial
  Synthetic oligonucleotide
gccagtcatgttcctgatgccaagcaacttaaacagcaggctgctggcatgtatg

SEQ ID NO: 519172 - DNA, 55 bp, Artificial
  Synthetic oligonucleotide
gtcccatcaggacgttagagtaaggttgcacccacaaattgaatcacatcaggac

SEQ ID NO: 519173 - DNA, 55 bp, Artificial
  Synthetic oligonucleotide
gtgacagggttgaccgaatgtaccatgaattagtacagactaatgtagcccagat

SEQ ID NO: 519174 - DNA, 55 bp, Artificial
  Synthetic oligonucleotide
gtgagtggtttaatcagcatgtcatcacccgtttaatgttggtgactggacatga

SEQ ID NO: 519175 - DNA, 55 bp, Artificial
  Synthetic oligonucleotide
gtgcggtgattgttgttcaccttatgtactgtttaattcagcgtcgagggcaaag

SEQ ID NO: 519176 - DNA, 55 bp, Artificial
  Synthetic oligonucleotide
gtgcgtggtttatgcgccacgcacgatttaatactaccagttagtcacacttgag

SEQ ID NO: 519177 - DNA, 55 bp, Artificial
  Synthetic oligonucleotide
tagagacattagtatgatccggctaatagtaggtttggatgacctccaaagcggc

SEQ ID NO: 519178 - DNA, 55 bp, Artificial
  Synthetic oligonucleotide
agcatacaggataggtgttttagaacagtcgattggttacgtccccaagatgtag

SEQ ID NO: 519179 - DNA, 55 bp, Artificial
  Synthetic oligonucleotide
acttctcccgccccacagacatttagtgctggtacttataccgtcactacgagtg

SEQ ID NO: 519180 - DNA, 55 bp, Artificial
  Synthetic oligonucleotide
acgtatgtccccaagtctattcacagtgcagatgcattcagacggcgtctggacc

SEQ ID NO: 519181 - DNA, 55 bp, Artificial
  Synthetic oligonucleotide
tgtggatcatatttccgtagggtctaatgtgtattccacggactgggacattatc

SEQ ID NO: 519182 - DNA, 55 bp, Artificial
  Synthetic oligonucleotide
ttgcaaggtgctttgtggttgtggaataaaatgaactctcagcaaacttctgtgt

SEQ ID NO: 519183 - DNA, 55 bp, Artificial
  Synthetic oligonucleotide
tttggattatacaggactaataccacgtgctcgtgatatatgggaacaaccctct

SEQ ID NO: 519184 - DNA, 55 bp, Artificial
  Synthetic oligonucleotide
cgccgttcgaaaacaaagtttacgcggcgcggatccgattgatccctgagaatgg

SEQ ID NO: 519185 - DNA, 55 bp, Artificial
  Synthetic oligonucleotide
cgcgtacaccttgctttattaagcgctttgattggaaagcaactggtaaggctgg

SEQ ID NO: 519186 - DNA, 55 bp, Artificial
  Synthetic oligonucleotide
cgcccgtgacctagttgatttcccgtggaaacgtaatgtgtgttaggctaatact

SEQ ID NO: 519187 - DNA, 55 bp, Artificial
  Synthetic oligonucleotide
cccgtaaggctgaaaatgaattctgggatggagtgaaacagtcgcataagataat

SEQ ID NO: 519188 - DNA, 55 bp, Artificial
  Synthetic oligonucleotide
cgcaatctcgagggaactttcgagttccaggtgcctcattattcgaggtatccac

SEQ ID NO: 519189 - DNA, 55 bp, Artificial
  Synthetic oligonucleotide
cgatcctgccattacagggtacactgctggatgtgcccctggtaggatcgtaatt

SEQ ID NO: 519190 - DNA, 55 bp, Artificial
  Synthetic oligonucleotide
caatccggtctgaaggtgcaacctcctacgaactctgactctcgacagcgtgcca

SEQ ID NO: 519191 - DNA, 55 bp, Artificial
  Synthetic oligonucleotide
cctaagtcagctattggacttaaactaatagcaccacccgaacttaaactccatg

SEQ ID NO: 519192 - DNA, 55 bp, Artificial
  Synthetic oligonucleotide
cgtaacaatttgatggctaaccacctaactgctttgtcagaatggctaatgacgc

SEQ ID NO: 519193 - DNA, 55 bp, Artificial
  Synthetic oligonucleotide
cgtagaagtcgctgttaaaattatggtcgactggtttatgagaaactgggaccaa

SEQ ID NO: 519194 - DNA, 55 bp, Artificial
  Synthetic oligonucleotide
ctagtgaattggaagagtatgcaggagctttccctgcagcgcacggttcagcgac

SEQ ID NO: 519195 - DNA, 55 bp, Artificial
  Synthetic oligonucleotide
ctagttgccgttggtacggcatcccatatgtatatggctcgagatgtagcgtcta

SEQ ID NO: 519196 - DNA, 55 bp, Artificial
  Synthetic oligonucleotide
ctgggaccaaattgtagcagctgatagacacgttattaatggacacgaattggaa

SEQ ID NO: 519197 - DNA, 55 bp, Artificial
  Synthetic oligonucleotide
ctttgctatgcgtgtgtaggcaaaaggaagtgagagagttgaccgtctctcatgg

SEQ ID NO: 519198 - DNA, 55 bp, Artificial
  Synthetic oligonucleotide
ccgtttgttacgcgatgtacgaacactcttaagtagggtgtataaactagccggc

SEQ ID NO: 519199 - DNA, 55 bp, Artificial
  Synthetic oligonucleotide
ataactctgatgcaccgagagatctcatcgagacttaaggaggcacacacttcag

SEQ ID NO: 519200 - DNA, 55 bp, Artificial
  Synthetic oligonucleotide
gatcgtattaagactgaatcgctcaactctccagaagctgtacaacgtcgtatcg

SEQ ID NO: 519201 - DNA, 54 bp, Artificial
  Synthetic oligonucleotide
ctgagcgttctgcgcaggtcattagtcagtgtaagaatgcctggacacgcataa

SEQ ID NO: 519202 - DNA, 54 bp, Artificial
  Synthetic oligonucleotide
gtttacgcggcgcggatccgattgatccctgagaatggagtcactgaagtcaca

SEQ ID NO: 519203 - DNA, 54 bp, Artificial
  Synthetic oligonucleotide
cgctcaaggaccctattcaacactggtttctcttagtacattattttagcactt

SEQ ID NO: 519204 - DNA, 54 bp, Artificial
  Synthetic oligonucleotide
actgataatcgtcaacatacggtggttaatttcttgcaacgtccccaggttatt

SEQ ID NO: 519205 - DNA, 53 bp, Artificial
  Synthetic oligonucleotide
ctctttttgtaaccaatagtaaaataggacctggtaagatcataggaatccat

SEQ ID NO: 519206 - DNA, 53 bp, Artificial
  Synthetic oligonucleotide
ggcgaaagttgtgaatgagttttctaacgtcactcttaaatggtacgtgtcga

SEQ ID NO: 519207 - DNA, 52 bp, Artificial
  Synthetic oligonucleotide
cggaacaactcacggctgttacaacaaacaacacctacgtaatgaccatctt

SEQ ID NO: 519208 - DNA, 52 bp, Artificial
  Synthetic oligonucleotide
gttcacgacgctataaatcacatattccatacagacgtggagccacggtcac

SEQ ID NO: 519209 - DNA, 52 bp, Artificial
  Synthetic oligonucleotide
cggtaggtgctatagcaaatactgttgaaggcctgggtgtacccgttctttc

SEQ ID NO: 519210 - DNA, 51 bp, Artificial
  Synthetic oligonucleotide
aggatattgctagtgctatgcccacaactcatgcaggacgagtttctacag

SEQ ID NO: 519211 - DNA, 51 bp, Artificial
  Synthetic oligonucleotide
gaaagcaactggtaaggctggaagcgtgctttatgcaacacctattactcc

SEQ ID NO: 519212 - DNA, 51 bp, Artificial
  Synthetic oligonucleotide
ttttacatgcaagattgttagtggagatctagttgccgttggtacggcatc

SEQ ID NO: 519213 - DNA, 60 bp, Artificial
  Synthetic oligonucleotide
ctgattgtccattatgtgccggcattaaggccgtatacaagaatgagaaactgataatta

SEQ ID NO: 519214 - DNA, 60 bp, Artificial
  Synthetic oligonucleotide
aatattggcagcccagaccccacaattcgcctcggactggacgcggctaagaatactgaa

SEQ ID NO: 519215 - DNA, 60 bp, Artificial
  Synthetic oligonucleotide
ccctccacatataccaatatggtatagagggggatcatgacattcccaaacttacaatac

SEQ ID NO: 519216 - DNA, 60 bp, Artificial
  Synthetic oligonucleotide
aatgtcggtactatgcacaattgcgatgtagctgaattacgagtgtccctattgcgcaac

SEQ ID NO: 519217 - DNA, 60 bp, Artificial
  Synthetic oligonucleotide
cataccgacacatcaacgtgtggagcattacatagtgacaacgtccgatggtattagatt

SEQ ID NO: 519218 - DNA, 60 bp, Artificial
  Synthetic oligonucleotide
atcatcgttaaacaagacgcttcgtactactacaccatagcaacaggtaccgatgtgtta

SEQ ID NO: 519219 - DNA, 59 bp, Artificial
  Synthetic oligonucleotide
ttcattcggggcactgaaattgacgatatcacaaatcttgaatatggtagataaacaga

SEQ ID NO: 519220 - DNA, 56 bp, Artificial
  Synthetic oligonucleotide
caaatttacggacatgcccactggatattacgggccgcacaatttcggtcagccgt

SEQ ID NO: 519221 - DNA, 55 bp, Artificial
  Synthetic oligonucleotide
ggcacaaagattgaatactgcaataccgtgagtgtagacccgccaacgaacttgc

SEQ ID NO: 519222 - DNA, 55 bp, Artificial
  Synthetic oligonucleotide
ggaatatgatccaccaaaactggttcataggaatatgtgtataacacttgaggtg

SEQ ID NO: 519223 - DNA, 55 bp, Artificial
  Synthetic oligonucleotide
tagtgttcgtcagcaaaacgcaactacagaattatggccccatgctacaacgtga

SEQ ID NO: 519224 - DNA, 55 bp, Artificial
  Synthetic oligonucleotide
gctgaatcgtggcacaatggagactcctgtgatttcggatatatttgctgtgttg

SEQ ID NO: 519225 - DNA, 55 bp, Artificial
  Synthetic oligonucleotide
gctatggatgtctatagacactggttgaaagagcacatgagacatcgtattgtga

SEQ ID NO: 519226 - DNA, 55 bp, Artificial
  Synthetic oligonucleotide
gcatacagccaattcgcatcaagtccaatgcgtacttactaatggaagcctaccc

SEQ ID NO: 519227 - DNA, 55 bp, Artificial
  Synthetic oligonucleotide
gcagtgctgagggatatcttaacaattataaattccggaaggtatgcacggacct

SEQ ID NO: 519228 - DNA, 55 bp, Artificial
  Synthetic oligonucleotide
ggccaatacaaagttgtatcacacatatagatttggccaaccgttagtcgataag

SEQ ID NO: 519229 - DNA, 55 bp, Artificial
  Synthetic oligonucleotide
gttagctgatgatttggcagacataactacctgtgaccatcacacccgggcatgc

SEQ ID NO: 519230 - DNA, 55 bp, Artificial
  Synthetic oligonucleotide
gactacgtacagctattggagatactcggagataaaattgcggtcaacaaagtgc

SEQ ID NO: 519231 - DNA, 55 bp, Artificial
  Synthetic oligonucleotide
ggtgcagtcacgtgtgctctcatacctgttcatgctcggcaagactaagtggacc

SEQ ID NO: 519232 - DNA, 55 bp, Artificial
  Synthetic oligonucleotide
gacagctcgtcacaaaccaccgacaacaacgacgattcaaattcttctaaggagg

SEQ ID NO: 519233 - DNA, 55 bp, Artificial
  Synthetic oligonucleotide
gtgcagcaccagatgacaatgagtttaaaacagccattctagagttgacagggtt

SEQ ID NO: 519234 - DNA, 55 bp, Artificial
  Synthetic oligonucleotide
tgatggccaacctcgttactaatctactcaaaatatgtaagaaacgtttcaggag

SEQ ID NO: 519235 - DNA, 55 bp, Artificial
  Synthetic oligonucleotide
ccgactggtgagaatggagtatgttaaaataccagagagcaaggtagtgacacgg

SEQ ID NO: 519236 - DNA, 55 bp, Artificial
  Synthetic oligonucleotide
cattgagtggacctagcaaagtgttcacacccaacatctatgtgtggcccactac

SEQ ID NO: 519237 - DNA, 55 bp, Artificial
  Synthetic oligonucleotide
cagggcacaccataaatatgacgacagagagtttctaactaaattgggtgcagag

SEQ ID NO: 519238 - DNA, 55 bp, Artificial
  Synthetic oligonucleotide
cagagtagccacattggtgccggatggtatggattgcctacgcactcgacaggtg

SEQ ID NO: 519239 - DNA, 55 bp, Artificial
  Synthetic oligonucleotide
cacggtgacatgcttgaatgacgaacaaatagagaatataggccaggccataacc

SEQ ID NO: 519240 - DNA, 55 bp, Artificial
  Synthetic oligonucleotide
cacctacttcaacccaaactggagaagccaagccgccatgtaccaagagaacaac

SEQ ID NO: 519241 - DNA, 55 bp, Artificial
  Synthetic oligonucleotide
atttgtggagcacgtaatcaattgtgcagactttgagagattggttaatgacaag

SEQ ID NO: 519242 - DNA, 55 bp, Artificial
  Synthetic oligonucleotide
agtcacacagtagcatacaccattagctcacgaagctctcagcaaccacaattcg

SEQ ID NO: 519243 - DNA, 55 bp, Artificial
  Synthetic oligonucleotide
actatactgtgacggagacaaaatcaagcaacctggcccaatcagtgaaggtgca

SEQ ID NO: 519244 - DNA, 55 bp, Artificial
  Synthetic oligonucleotide
acaatttggacctgaagagtgtgttccagatttaaacaaagtggacatcagaacc

SEQ ID NO: 519245 - DNA, 55 bp, Artificial
  Synthetic oligonucleotide
aatgggtctgattgaaactatattgtcgaaccatccaagtgcaatcgaagcgaac

SEQ ID NO: 519246 - DNA, 55 bp, Artificial
  Synthetic oligonucleotide
aaaactggtagcagtgcccaactgccaccattaggtagcgcagacacgagaaggg

SEQ ID NO: 519247 - DNA, 54 bp, Artificial
  Synthetic oligonucleotide
ttttgtagcatgatactagctaaaacgtcggacacaacagcagaggtagcggct

SEQ ID NO: 519248 - DNA, 54 bp, Artificial
  Synthetic oligonucleotide
gggccaaatcatcagagagttaggggcagagtgcagatttttggtcccaataga

SEQ ID NO: 519249 - DNA, 54 bp, Artificial
  Synthetic oligonucleotide
cctaccactgaccattttgtttgtatactccatacaattgaagcagagacaggc

SEQ ID NO: 519250 - DNA, 52 bp, Artificial
  Synthetic oligonucleotide
tgacaattgcgtgttcaatgtgctattggattgcatgcaggatgatcccgca

SEQ ID NO: 519251 - DNA, 52 bp, Artificial
  Synthetic oligonucleotide
agtaatgaagacaaattgatagtctcgatgtggttacggcaaaacccaaaac

SEQ ID NO: 519252 - DNA, 51 bp, Artificial
  Synthetic oligonucleotide
ggcagtactttaagcatgaagtgcttcactggtttgaaggaatttaaagcc

SEQ ID NO: 519253 - DNA, 51 bp, Artificial
  Synthetic oligonucleotide
catcttagatggttacaatatgaacaagcaaccgttgttgatttacaatgg

SEQ ID NO: 519254 - DNA, 60 bp, Artificial
  Synthetic oligonucleotide
aatgattgtgatgcagagttgaggatttggagtgtgcaggaggacgatttggcggcaggg

SEQ ID NO: 519255 - DNA, 55 bp, Artificial
  Synthetic oligonucleotide
gtcacagtctttcttaaatgatcccacacctgtagaagtgacagtccaagccagg

SEQ ID NO: 519256 - DNA, 55 bp, Artificial
  Synthetic oligonucleotide
ggaatgctacaagtttacaggcctcaaaaccagggttaaagacatggtaccgtga

SEQ ID NO: 519257 - DNA, 55 bp, Artificial
  Synthetic oligonucleotide
gaccttttacagacgagtcctccagagtcattaataacagcccttgttaaagagt

SEQ ID NO: 519258 - DNA, 55 bp, Artificial
  Synthetic oligonucleotide
ctatcttcagatctgggatcacctacggatttattgcagtacgattgcaatggac

SEQ ID NO: 519259 - DNA, 55 bp, Artificial
  Synthetic oligonucleotide
cgtccatcagtgtgcaggcctcatatgatcactttatcctccctcgaaatcaggg

SEQ ID NO: 519260 - DNA, 55 bp, Artificial
  Synthetic oligonucleotide
catttggtattcattccaagattcagaatgcaacagcctcgtgggagaagccgaa

SEQ ID NO: 519261 - DNA, 55 bp, Artificial
  Synthetic oligonucleotide
cagctttacaagagatgtgcactgagatacccttctcggaacaagatccagccaa

SEQ ID NO: 519262 - DNA, 55 bp, Artificial
  Synthetic oligonucleotide
agcaatgtcacgtcagaggcaagcaattccttactggctaaagcacatagaaaag

SEQ ID NO: 519263 - DNA, 55 bp, Artificial
  Synthetic oligonucleotide
aaacaagcctatcgtcagcataagaatcctaacaatggaccactgctggccatat

SEQ ID NO: 519264 - DNA, 54 bp, Artificial
  Synthetic oligonucleotide
ctcaggaatgcattagagttccttagaaaggaagagttgttctacatcttgatt

SEQ ID NO: 519265 - DNA, 53 bp, Artificial
  Synthetic oligonucleotide
gcatcaagcctcttggcaccataattcagcaagtataggggagaatgccatag

SEQ ID NO: 519266 - DNA, 53 bp, Artificial
  Synthetic oligonucleotide
aaaatcgtctacatagctgaactgaccgctcagtacttattcacaatcatgct

SEQ ID NO: 519267 - DNA, 52 bp, Artificial
  Synthetic oligonucleotide
cagcaatgaaacgcggagaaatgatacgggatgtttcggcatcctccaagaa

SEQ ID NO: 519268 - DNA, 52 bp, Artificial
  Synthetic oligonucleotide
cagatcataatcactcgagttaacatggggttcttagtagaagttaggagga

SEQ ID NO: 519269 - DNA, 52 bp, Artificial
  Synthetic oligonucleotide
gctatagtgggatattcttaaagcctgaagagacatttgtgcattcagggtt

SEQ ID NO: 519270 - DNA, 50 bp, Artificial
  Synthetic oligonucleotide
gggattgtaacataccccaatcattggctcactacaggtcacatgaaagt

SEQ ID NO: 519271 - DNA, 60 bp, Artificial
  Synthetic oligonucleotide
ggttaaccatacctctagtaggactagcagacggatggactagccacagtggtgagctcc

SEQ ID NO: 519272 - DNA, 60 bp, Artificial
  Synthetic oligonucleotide
catggccagcaggagagattatgacggcagtcggtctaacatgcgctatgatcggggcat

SEQ ID NO: 519273 - DNA, 60 bp, Artificial
  Synthetic oligonucleotide
ccaaccacgtggaaggcgccagcccatcccaaaagatcggcgctccagtggcaggtcctg

SEQ ID NO: 519274 - DNA, 60 bp, Artificial
  Synthetic oligonucleotide
ccaatctccaatttccttcctacttggtggctccatcttagccctagtcacggctagctg

SEQ ID NO: 519275 - DNA, 60 bp, Artificial
  Synthetic oligonucleotide
ccacaggagggacctcagactaatggcaaacgccatctgctcatctgtccctgtctcatg

SEQ ID NO: 519276 - DNA, 60 bp, Artificial
  Synthetic oligonucleotide
ggtaccagtggcatagaagtgggagcacaattggaaaagcttttacgtcaacactcaaag

SEQ ID NO: 519277 - DNA, 60 bp, Artificial
  Synthetic oligonucleotide
ggtacataatgttggctgcactaggactattgctggcagcagtgttgggtgacctcacat

SEQ ID NO: 519278 - DNA, 60 bp, Artificial
  Synthetic oligonucleotide
ccaggagaaagcgtcaagaatgtgcagaccaagccgggggtttttaaaacgccagaggga

SEQ ID NO: 519279 - DNA, 60 bp, Artificial
  Synthetic oligonucleotide
gggtgggctcccgcaccatttagttgtgactggactcctagtgacgagagaattaggtta

SEQ ID NO: 519280 - DNA, 60 bp, Artificial
  Synthetic oligonucleotide
ggggggtaccatcacccgcgtggagtctgagaacaaggtcgtcattctcgactcgttcga

SEQ ID NO: 519281 - DNA, 60 bp, Artificial
  Synthetic oligonucleotide
ccccatgattctgaagagcgccattgacaaacgattaagaacagctgtcttggctccgac

SEQ ID NO: 519282 - DNA, 60 bp, Artificial
  Synthetic oligonucleotide
ggggaagaatgaaggttgcctacagatttgaggacatagaattttgctctcatacaccag

SEQ ID NO: 519283 - DNA, 60 bp, Artificial
  Synthetic oligonucleotide
cccggccatttgggcgtgcccccgcaagactgctagccgagtagcgttgggttgcgaaag

SEQ ID NO: 519284 - DNA, 60 bp, Artificial
  Synthetic oligonucleotide
gggcccggagtggatgcagctatggcagtcctcaccttaaccctactgatgattagttat

SEQ ID NO: 519285 - DNA, 60 bp, Artificial
  Synthetic oligonucleotide
gggccccactgacccccggcatagatcacgcaacttgggtaaggtcatcgataccctcac

SEQ ID NO: 519286 - DNA, 60 bp, Artificial
  Synthetic oligonucleotide
ccctgtgctgttcccaaaaataaggaatggggaggttacagacacttacgagaactactc

SEQ ID NO: 519287 - DNA, 60 bp, Artificial
  Synthetic oligonucleotide
gggcaaaggaggtccgcagcttatccaggagggccgtcaaccacatcaagtccgtgtggg

SEQ ID NO: 519288 - DNA, 60 bp, Artificial
  Synthetic oligonucleotide
tagtcacacaccaacgcccccccctaggaggcggcgtcatgtggtcctggaccaatccaa

SEQ ID NO: 519289 - DNA, 60 bp, Artificial
  Synthetic oligonucleotide
atcagacgtgaatctacaaccagaggttgaactagatacatcagaggttgggatcacaat

SEQ ID NO: 519290 - DNA, 60 bp, Artificial
  Synthetic oligonucleotide
atcagtacactgaaggggtcgtcaggtggtcctatgctatgcccctctggccacgtcgcg

SEQ ID NO: 519291 - DNA, 60 bp, Artificial
  Synthetic oligonucleotide
tagacgtcaagatgatgaacatggaggctacggaattagcggttgtgagatcttactgct

SEQ ID NO: 519292 - DNA, 60 bp, Artificial
  Synthetic oligonucleotide
tacggagcagatggcccctggtcataagatcttggccaaagccattttcaaactaaccta

SEQ ID NO: 519293 - DNA, 60 bp, Artificial
  Synthetic oligonucleotide
atctaagagtagaaactaagtgtccatgtggctatgagatgacagcactaaggaacgtta

SEQ ID NO: 519294 - DNA, 60 bp, Artificial
  Synthetic oligonucleotide
atgaagaatccagtggtggatggaatagtcgccacagacatacctgatctagacgccagt

SEQ ID NO: 519295 - DNA, 60 bp, Artificial
  Synthetic oligonucleotide
tacatcaaaggtagggcagttcccatggccacctactccttcctaggcatgtggtccttc

SEQ ID NO: 519296 - DNA, 60 bp, Artificial
  Synthetic oligonucleotide
atgttgggagataccatgtttggtagaatgggaggacaagttcacctagccatcatggca

SEQ ID NO: 519297 - DNA, 60 bp, Artificial
  Synthetic oligonucleotide
gtgggaagtatgcccaggctttgctgttaaaactgggcgcatggaccggtacgtacatct

SEQ ID NO: 519298 - DNA, 60 bp, Artificial
  Synthetic oligonucleotide
caatgaaccagtagctgtaagtttcgacactaaggcttgggacacccaagtaactagtag

SEQ ID NO: 519299 - DNA, 60 bp, Artificial
  Synthetic oligonucleotide
gtcgagtcgcttgacactatcactagatccccctccttcacggacaacagtacgcctccg

SEQ ID NO: 519300 - DNA, 60 bp, Artificial
  Synthetic oligonucleotide
cagcacggttgttaacaccacaaagggtgcctaactacaacttattcgttatggatgaag

SEQ ID NO: 519301 - DNA, 60 bp, Artificial
  Synthetic oligonucleotide
gtacgagctgactccatctgaaacaactgtaagactacgcgcctacctgaataccccggg

SEQ ID NO: 519302 - DNA, 60 bp, Artificial
  Synthetic oligonucleotide
gtaagacatggtttggggcatatgcagcctctccctactgtgaggtagaacggaagcttg

SEQ ID NO: 519303 - DNA, 60 bp, Artificial
  Synthetic oligonucleotide
ggttgtgacagttcataatggggatgcccacgcagtgggaaacagcacgtccaatcatgg

SEQ ID NO: 519304 - DNA, 60 bp, Artificial
  Synthetic oligonucleotide
cagtagtgatataggatagtctacctcaaactaacactacactcaatgcacacagcactt

SEQ ID NO: 519305 - DNA, 60 bp, Artificial
  Synthetic oligonucleotide
gcgtatatgtccaaggcacacggcataaaccctaacatcaggaccggagttcgtactgtg

SEQ ID NO: 519306 - DNA, 60 bp, Artificial
  Synthetic oligonucleotide
ctgggtcctttcttggatcaacccactctatgtccggccatttgggcgtgcccccgcaag

SEQ ID NO: 519307 - DNA, 60 bp, Artificial
  Synthetic oligonucleotide
ctgggttcctacgggaaggaccacctggtctatccatgcacgtggggagtggatgacaac

SEQ ID NO: 519308 - DNA, 60 bp, Artificial
  Synthetic oligonucleotide
cttcagtcgtggagaccgctgtaatctggaggacagggataggagccaattaagcccact

SEQ ID NO: 519309 - DNA, 60 bp, Artificial
  Synthetic oligonucleotide
gcggagctgctatctctggcaacgtccgcttgggctccatgagaatcacgggacccaaga

SEQ ID NO: 519310 - DNA, 60 bp, Artificial
  Synthetic oligonucleotide
gcgcggctgtgtgcactaggggtgtagcgaagtctctcgattttgtcccggtagagagca

SEQ ID NO: 519311 - DNA, 60 bp, Artificial
  Synthetic oligonucleotide
gaactgggagcccctcgattgtggagttcacctgggtaccatacctgccaggagggtaaa

SEQ ID NO: 519312 - DNA, 60 bp, Artificial
  Synthetic oligonucleotide
gaatggggccgttattcaagcaggagaaggaacactggtcccatattgggcgagtgtacg

SEQ ID NO: 519313 - DNA, 60 bp, Artificial
  Synthetic oligonucleotide
gaatggtcttggggtgggctcccgcaccatttagttgtgactggactcctagtgacgaga

SEQ ID NO: 519314 - DNA, 60 bp, Artificial
  Synthetic oligonucleotide
gacaccttgcaaaacgtggtgaatatggccatgacggacaccactccttttgggcaacag

SEQ ID NO: 519315 - DNA, 60 bp, Artificial
  Synthetic oligonucleotide
gccataggccgaataggcctaaattcccacctgcactccccatttgggcgcggcctgact

SEQ ID NO: 519316 - DNA, 60 bp, Artificial
  Synthetic oligonucleotide
gacgacagaatccagatgcccaaccatgggagaggctcataatcccaaggcaacttatgc

SEQ ID NO: 519317 - DNA, 60 bp, Artificial
  Synthetic oligonucleotide
gcaggactgtaactgttccatatacccaggccacattacagggcaccgtatggcgtggga

SEQ ID NO: 519318 - DNA, 60 bp, Artificial
  Synthetic oligonucleotide
gcacatggtgtgagggcaatcgaggacgggatcaattatgcaaccggtaatttacctggt

SEQ ID NO: 519319 - DNA, 60 bp, Artificial
  Synthetic oligonucleotide
gagagcataagggtggttgctatgactgctaccccagcagggtcagtaaccacaacaggg

SEQ ID NO: 519320 - DNA, 60 bp, Artificial
  Synthetic oligonucleotide
gagggctgcggatgggcgggatggctactgtccccccgtggctctcgccctaactggggc

SEQ ID NO: 519321 - DNA, 60 bp, Artificial
  Synthetic oligonucleotide
gatagagacaactatgtctaacaaaaaaccaggaagacccggctcaggctgggttgtcaa

SEQ ID NO: 519322 - DNA, 60 bp, Artificial
  Synthetic oligonucleotide
ccggaattgccgggaagactgggtcctttcttggataaacccactctatgcccggtcatt

SEQ ID NO: 519323 - DNA, 60 bp, Artificial
  Synthetic oligonucleotide
ggcgcggtccaatggatgaataggctcattgcctttgcttccagaggtaaccacgtcgcc

SEQ ID NO: 519324 - DNA, 60 bp, Artificial
  Synthetic oligonucleotide
ccgtcacacaagtagttgactttagtcttgaccccaccttcacaataaccacccagaccg

SEQ ID NO: 519325 - DNA, 60 bp, Artificial
  Synthetic oligonucleotide
ccgtgggtagcgttggtctgggcaaaatactagtggacgtcttggctgggtacggtgctg

SEQ ID NO: 519326 - DNA, 60 bp, Artificial
  Synthetic oligonucleotide
ggccggtcacgcaaatgtactccagcgctgagggagaccttgtggggtggcctagccccc

SEQ ID NO: 519327 - DNA, 60 bp, Artificial
  Synthetic oligonucleotide
cctcgcagagtcgcgcctggaatagtatggaggtggaagactttgggtttggtctcacca

SEQ ID NO: 519328 - DNA, 60 bp, Artificial
  Synthetic oligonucleotide
cctgtgcctactcctactcacggtaggggtaggcatctttttgctccccgctcggtagac

SEQ ID NO: 519329 - DNA, 60 bp, Artificial
  Synthetic oligonucleotide
cgaaaagaggctagccatgcccttagtaggactagcaaattggggggggtagcaacagtg

SEQ ID NO: 519330 - DNA, 60 bp, Artificial
  Synthetic oligonucleotide
cgaaggggcttggggccacggaccagacaagaatagtgaaagaagtgggtgcgagaacct

SEQ ID NO: 519331 - DNA, 60 bp, Artificial
  Synthetic oligonucleotide
cggaggctatgaccagatattccgctccccccggtgaccctcccaaaccagaatatgacc

SEQ ID NO: 519332 - DNA, 60 bp, Artificial
  Synthetic oligonucleotide
cggattatgcgtccggggggttggatttcgtaaggtcccaggcagaaaagataagatctg

SEQ ID NO: 519333 - DNA, 60 bp, Artificial
  Synthetic oligonucleotide
cggtcacagagcatgacatcaagactgagcgggacgtctacctatcctgcaagttagatc

SEQ ID NO: 519334 - DNA, 60 bp, Artificial
  Synthetic oligonucleotide
cggtgtgcgccagagcaaaagcccctccaccgtcctgggacaccatgtggaaatgtctaa

SEQ ID NO: 519335 - DNA, 60 bp, Artificial
  Synthetic oligonucleotide
cgtcatttctagggaagatcagagggggagcggacaagttgtcacttacgcgctgaacac

SEQ ID NO: 519336 - DNA, 60 bp, Artificial
  Synthetic oligonucleotide
gctggctccagggcttagaatagtggggatagacgtggtgagaataggtgtgctaaccct

SEQ ID NO: 519337 - DNA, 60 bp, Artificial
  Synthetic oligonucleotide
gctcggtacggggatcagtgcagccatggaaatcctctcgcaaaacccagtgtcagtacg

SEQ ID NO: 519338 - DNA, 60 bp, Artificial
  Synthetic oligonucleotide
gcgtcgtggacgggttggaagggatgtaacacaaattggagatgaataccactactcagg

SEQ ID NO: 519339 - DNA, 60 bp, Artificial
  Synthetic oligonucleotide
ttagccacaaccgttgtgcgaacgtataagagggtcaggccttttccatataggcaggga

SEQ ID NO: 519340 - DNA, 60 bp, Artificial
  Synthetic oligonucleotide
aaaatgtggcgctccaagaagacacctatggggttttcttatgacaccaagtgctttgac

SEQ ID NO: 519341 - DNA, 60 bp, Artificial
  Synthetic oligonucleotide
tggtcggactgtcctctgccgaaaatgccttgctcatagccctatttgggtatgtaggat

SEQ ID NO: 519342 - DNA, 60 bp, Artificial
  Synthetic oligonucleotide
acagtggcaatgagagatttaaacatgagtataccaacattactcaactccggagccatg

SEQ ID NO: 519343 - DNA, 60 bp, Artificial
  Synthetic oligonucleotide
actgtggtaactggagatgtgaaaggggtgttgaccaaaggcaagagagtgattgcacct

SEQ ID NO: 519344 - DNA, 60 bp, Artificial
  Synthetic oligonucleotide
acttctggcatgatcgtgaccggttagttgaatttggagttccgcatgctacgcgacaat

SEQ ID NO: 519345 - DNA, 60 bp, Artificial
  Synthetic oligonucleotide
aaccttcatactattatacctgacttcagcatcagttgttacaagatggaaagttgacat

SEQ ID NO: 519346 - DNA, 60 bp, Artificial
  Synthetic oligonucleotide
tgatgggtgcataatagttaagagtgctacaaaagatcgtcaaaaagtactcaaatgggt

SEQ ID NO: 519347 - DNA, 60 bp, Artificial
  Synthetic oligonucleotide
tcaatgaggcgaccaaacatctgaaaagcttcaagcgtgacattggacagatgctcgacg

SEQ ID NO: 519348 - DNA, 60 bp, Artificial
  Synthetic oligonucleotide
acacgtgggacaaggggaaggcgcggtccaatggatgaataggctcattgcctttgcttc

SEQ ID NO: 519349 - DNA, 60 bp, Artificial
  Synthetic oligonucleotide
aaccgttgattagggatgaggtgtcgtttagcgtgggcctcaactccttcgtagtcggat

SEQ ID NO: 519350 - DNA, 60 bp, Artificial
  Synthetic oligonucleotide
tgctagcaacccaagctcagtcaagatcgggtttaaagaaggggactacccagggcccgg

SEQ ID NO: 519351 - DNA, 60 bp, Artificial
  Synthetic oligonucleotide
aatgggaggtggagcacggtgttgtcactaggttggcaaagagatataccggagttggat

SEQ ID NO: 519352 - DNA, 60 bp, Artificial
  Synthetic oligonucleotide
tgcatcaccatggagagagtctacttgaggccaagaacacgccgtggatggattcgacta

SEQ ID NO: 519353 - DNA, 60 bp, Artificial
  Synthetic oligonucleotide
aaatggggaggtggtttggttagggtgccactctcgcgtaattcgacacatgagatgtac

SEQ ID NO: 519354 - DNA, 60 bp, Artificial
  Synthetic oligonucleotide
agcatgggagactgcccgacacactccagtgaactcctggttggggaacattatcatgta

SEQ ID NO: 519355 - DNA, 60 bp, Artificial
  Synthetic oligonucleotide
acacacccgatcacgaagtatatcatgacttgcatgtcggcagacttggaagttgtgact

SEQ ID NO: 519356 - DNA, 60 bp, Artificial
  Synthetic oligonucleotide
tgccttttgtcaaagcagacttgtcagtacccctgctactcttagggtgttggggacagt

SEQ ID NO: 519357 - DNA, 60 bp, Artificial
  Synthetic oligonucleotide
tcatctgtgtgaacttcgtgattgacagctcaacacgagtgcgggcaaccgtaaacacag

SEQ ID NO: 519358 - DNA, 60 bp, Artificial
  Synthetic oligonucleotide
accaattcctacaaccatcatggccaagaacgaggtgttctgcgtagaccccgccaaagg

SEQ ID NO: 519359 - DNA, 60 bp, Artificial
  Synthetic oligonucleotide
ataccggccacatcacggggcacagaatggcgtgggatatgatgatgaactggtctccca

SEQ ID NO: 519360 - DNA, 60 bp, Artificial
  Synthetic oligonucleotide
ttttccatgcaaggggcgtgggccaaggtcattgtcatcctcttactgatggctggagtt

SEQ ID NO: 519361 - DNA, 60 bp, Artificial
  Synthetic oligonucleotide
acatgtggaacttcataagcggcattcaatacatcgccggcttatctaccttaccaggaa

SEQ ID NO: 519362 - DNA, 60 bp, Artificial
  Synthetic oligonucleotide
acatgccctcaatgagctcccagaatcattggagacactcatgctcatcgccctgttagg

SEQ ID NO: 519363 - DNA, 60 bp, Artificial
  Synthetic oligonucleotide
atacaaggttcagagttccggaccgtgggatgagaaagagattgtagtagacttcgacta

SEQ ID NO: 519364 - DNA, 60 bp, Artificial
  Synthetic oligonucleotide
aagaccatctagaattctgggagggcgtctttacggggttgacccatatcgatgcccact

SEQ ID NO: 519365 - DNA, 60 bp, Artificial
  Synthetic oligonucleotide
ataacgcccaaaagtcccgtctacaccgctgagatggaggattatggtaccgtcacactc

SEQ ID NO: 519366 - DNA, 60 bp, Artificial
  Synthetic oligonucleotide
tgatgagacagaatatggtgtcaagacggactccggatgtccagatggtgccagatgcta

SEQ ID NO: 519367 - DNA, 60 bp, Artificial
  Synthetic oligonucleotide
aagaaaatcccggaagatacaggaaaactaatcagaggctgccgaacgttgatggagagc

SEQ ID NO: 519368 - DNA, 60 bp, Artificial
  Synthetic oligonucleotide
tgtgccaagaccatctagaattctgggaggcagtattcaccggcctcacgcacattgatg

SEQ ID NO: 519369 - DNA, 60 bp, Artificial
  Synthetic oligonucleotide
tatgacactcgctgtttcgactcaacagtgacggagagggacatcagaaccgaggagtcc

SEQ ID NO: 519370 - DNA, 60 bp, Artificial
  Synthetic oligonucleotide
tattgcttggcgactggttgcgtgtccataattggacgactgcatctcaatcaaaggact

SEQ ID NO: 519371 - DNA, 60 bp, Artificial
  Synthetic oligonucleotide
acccgacagagcgtggaactctggttatgaatggattacagagtacacaggaaagacggt

SEQ ID NO: 519372 - DNA, 60 bp, Artificial
  Synthetic oligonucleotide
acctacacatacaaaacttggaattacaacaacctctccaaggtagtagaaccagcctta

SEQ ID NO: 519373 - DNA, 60 bp, Artificial
  Synthetic oligonucleotide
aacgggagacctgccagtttggatatcgcacaaactggctgacgctggaatagcttacaa

SEQ ID NO: 519374 - DNA, 60 bp, Artificial
  Synthetic oligonucleotide
agtgtgccattgctagcattgggatgttactctcaagtgaaccctacaactctgacagca

SEQ ID NO: 519375 - DNA, 60 bp, Artificial
  Synthetic oligonucleotide
ttaagccggagtttgtggtggctatgctacatgctggtgctagctgaagccctgatccaa

SEQ ID NO: 519376 - DNA, 60 bp, Artificial
  Synthetic oligonucleotide
acctgcccctaataggggcgacactccaccatgattcactcccctgtgaggaactactgt

SEQ ID NO: 519377 - DNA, 59 bp, Artificial
  Synthetic oligonucleotide
tggagtgaaggtgtcttgtaaatacatgaggtaggtgtaaagatgtatataaagtagtg

SEQ ID NO: 519378 - DNA, 58 bp, Artificial
  Synthetic oligonucleotide
acgtgattccaatggtgacccagttagctatgacagacacaactccctttgggcaaca

SEQ ID NO: 519379 - DNA, 58 bp, Artificial
  Synthetic oligonucleotide
aattgtcagagaagctctgaaaaggagactgcggaccctgattctggctcccacgaga

SEQ ID NO: 519380 - DNA, 58 bp, Artificial
  Synthetic oligonucleotide
gattcgccacagcactgcacttcctcaacagcatgtctaaggtgaggaaagatactca

SEQ ID NO: 519381 - DNA, 58 bp, Artificial
  Synthetic oligonucleotide
atacatgtccaaagcccacggtattgaccctaacatccgtactggggtgaggactatt

SEQ ID NO: 519382 - DNA, 58 bp, Artificial
  Synthetic oligonucleotide
cctcttgttcctgctgctagcggacgctagggtctgcgcttgcttgtggatgctcctc

SEQ ID NO: 519383 - DNA, 58 bp, Artificial
  Synthetic oligonucleotide
cagatcgtaggtcacgtgaagaacgggaccatgcggatctcaggctcacgctggtgta

SEQ ID NO: 519384 - DNA, 57 bp, Artificial
  Synthetic oligonucleotide
ctcaggtcgggttgtcaatatgctaaagcgcggaacgtcccgcggaaatccgctagc

SEQ ID NO: 519385 - DNA, 57 bp, Artificial
  Synthetic oligonucleotide
gtatctgtacgaggcttcaccaaaggaggtgacggacacgaagaacccattccggtg

SEQ ID NO: 519386 - DNA, 57 bp, Artificial
  Synthetic oligonucleotide
tacattcccgtcgtgggagcaccgcttggcggtgtggcggctgccttagcacacggt

SEQ ID NO: 519387 - DNA, 57 bp, Artificial
  Synthetic oligonucleotide
ttgggaaacataatcatgtatgctcctgcaatctgggtacgtatggttctgatgacc

SEQ ID NO: 519388 - DNA, 57 bp, Artificial
  Synthetic oligonucleotide
gtccacggtcacccagtctttcctcggaacaacaatatcaggggttctctggactgt

SEQ ID NO: 519389 - DNA, 57 bp, Artificial
  Synthetic oligonucleotide
gcttccggaaagcgctcccaagtaggactgattgaggtcctaggaagaatgcccgaa

SEQ ID NO: 519390 - DNA, 57 bp, Artificial
  Synthetic oligonucleotide
atatatcacagcgtgtcgcgagcccgaccccgccttttactctgtagcctactccta

SEQ ID NO: 519391 - DNA, 57 bp, Artificial
  Synthetic oligonucleotide
cggcctgactacaacccgcctctgcttgagacttggaaaaaaccggactatgaccca

SEQ ID NO: 519392 - DNA, 57 bp, Artificial
  Synthetic oligonucleotide
gtcttccgttacacagtcttttttgggcactaacatctctggggttctatggaccgt

SEQ ID NO: 519393 - DNA, 56 bp, Artificial
  Synthetic oligonucleotide
agttgttagtctgtgtggaccgacaaggacagttccgaatcggaagcttgcttaac

SEQ ID NO: 519394 - DNA, 56 bp, Artificial
  Synthetic oligonucleotide
agtgcaaccccagaaaatacccgagaacgttcaaacaactccaggaaggttcgtca

SEQ ID NO: 519395 - DNA, 56 bp, Artificial
  Synthetic oligonucleotide
gactgagaggctatactgtggtggccccatgtacaactcacggggccaactctgcg

SEQ ID NO: 519396 - DNA, 56 bp, Artificial
  Synthetic oligonucleotide
gtcatgacagcggtaggactgatgttcgctatagtgggaggcctcgctgagttgga

SEQ ID NO: 519397 - DNA, 55 bp, Artificial
  Synthetic oligonucleotide
ggagaagacccagctaacttgagagtggtaacatcacagtccccatacgttgtgg

SEQ ID NO: 519398 - DNA, 55 bp, Artificial
  Synthetic oligonucleotide
tgtcgaagggagggcgcaagccagcccgcttgatcgtgtacccagacctatcggt

SEQ ID NO: 519399 - DNA, 55 bp, Artificial
  Synthetic oligonucleotide
gctcgacggactgaataagcggaaggcgaaacgtcggggagggagttgctcttgg

SEQ ID NO: 519400 - DNA, 55 bp, Artificial
  Synthetic oligonucleotide
ggagagtgtaaagaagtgggtcttactcttataccacatcttggtggcacaccca

SEQ ID NO: 519401 - DNA, 55 bp, Artificial
  Synthetic oligonucleotide
ggagccaaggaggtacgcagcttatccaagagggccatcaaccacatccggtccg

SEQ ID NO: 519402 - DNA, 55 bp, Artificial
  Synthetic oligonucleotide
ggaggctgctcagctggagcctatgatgtcataatatgcgatgaatgccattgcg

SEQ ID NO: 519403 - DNA, 55 bp, Artificial
  Synthetic oligonucleotide
gctcctgcatgcaagcctctcctgagggatgagatctccttttctgtgggactca

SEQ ID NO: 519404 - DNA, 55 bp, Artificial
  Synthetic oligonucleotide
gctaggtccacctgggccgagaacatatacaccccaatcatgcagatcagagctc

SEQ ID NO: 519405 - DNA, 55 bp, Artificial
  Synthetic oligonucleotide
ggacttggctctctatccgcacacgcctaggcaatggatcgtgtatagtcaacgc

SEQ ID NO: 519406 - DNA, 55 bp, Artificial
  Synthetic oligonucleotide
tggccgcaactgacaagtgggagatggaccattcaacaataaccaggctggaaaa

SEQ ID NO: 519407 - DNA, 55 bp, Artificial
  Synthetic oligonucleotide
tggggaagacctatatgactgtgccttaggagggaactggacttgtataccgggg

SEQ ID NO: 519408 - DNA, 55 bp, Artificial
  Synthetic oligonucleotide
gctctaccatgacggcagtggggattaggctagaaagattaccggtagtgagagc

SEQ ID NO: 519409 - DNA, 55 bp, Artificial
  Synthetic oligonucleotide
gctctagcacgctccatgacacagccatatacttggtagacggggtaacaaatac

SEQ ID NO: 519410 - DNA, 55 bp, Artificial
  Synthetic oligonucleotide
ggactgttgggtacagggatcagtgcggcaatggagattttgtcacagaacccgg

SEQ ID NO: 519411 - DNA, 55 bp, Artificial
  Synthetic oligonucleotide
ggaccagacacactagcaagaggttgttacaggactgcgtgaatactggtgctag

SEQ ID NO: 519412 - DNA, 55 bp, Artificial
  Synthetic oligonucleotide
gctgcggagcgatccatgtaagccctcagaaccgtctcggaagtaggaccccaca

SEQ ID NO: 519413 - DNA, 55 bp, Artificial
  Synthetic oligonucleotide
tggtgctgcagatcttgcactactccaccactgagatttgtcacgaaaagtggat

SEQ ID NO: 519414 - DNA, 55 bp, Artificial
  Synthetic oligonucleotide
ggaattaccacaacctcgccaaggtagtagaaccagccttggcatacctccccta

SEQ ID NO: 519415 - DNA, 55 bp, Artificial
  Synthetic oligonucleotide
ggaaggaaaacccctgacgtccacagttggactaaggtaagttcctaacagcccc

SEQ ID NO: 519416 - DNA, 55 bp, Artificial
  Synthetic oligonucleotide
ggaagacaacggggaggatttgacagtcgtggtggaaccaattgtgggacgtctc

SEQ ID NO: 519417 - DNA, 55 bp, Artificial
  Synthetic oligonucleotide
ggaacactgttcagccggagtagtccgacccacactagttggagtgggtggaaca

SEQ ID NO: 519418 - DNA, 55 bp, Artificial
  Synthetic oligonucleotide
ggaaagtgaagcaccaagggaacttaagaacaaagcacatcttgaacccgggtaa

SEQ ID NO: 519419 - DNA, 55 bp, Artificial
  Synthetic oligonucleotide
gcatcactgtgccagtttcagccgtggaggtcaagaacaacagtgacacctacat

SEQ ID NO: 519420 - DNA, 55 bp, Artificial
  Synthetic oligonucleotide
gcagttgcaagccgttacatgcatttgaccaaggttggggccctctctcatacgc

SEQ ID NO: 519421 - DNA, 55 bp, Artificial
  Synthetic oligonucleotide
ttgggacctggctacctccttaaggatgtcttgacgcgagtgccatacttcgtta

SEQ ID NO: 519422 - DNA, 55 bp, Artificial
  Synthetic oligonucleotide
gcagggacattagtgaagggaccttgcaattttgagataacagctggcgacgtgc

SEQ ID NO: 519423 - DNA, 55 bp, Artificial
  Synthetic oligonucleotide
ttggtggacattttggcgggttacggtgctgggatttccggcgcgctcgtggctt

SEQ ID NO: 519424 - DNA, 55 bp, Artificial
  Synthetic oligonucleotide
gcagctcgattggagcggcattcacatccaccatgaaaggtgtggaacgaatggc

SEQ ID NO: 519425 - DNA, 55 bp, Artificial
  Synthetic oligonucleotide
gcagcctctccctactgtgaggtagaacggaagcttggttacatctggtatacaa

SEQ ID NO: 519426 - DNA, 55 bp, Artificial
  Synthetic oligonucleotide
gcactttagctgtatgaggatgtacccgacgtctatagttggactagggaagacc

SEQ ID NO: 519427 - DNA, 55 bp, Artificial
  Synthetic oligonucleotide
gcaccagaacctcccgagggagtgagaagcgtcctcaatgagaccaccaactggc

SEQ ID NO: 519428 - DNA, 55 bp, Artificial
  Synthetic oligonucleotide
ttgtttgacatcacgcgcaaattaccgactgccattatggggaatgcctacggct

SEQ ID NO: 519429 - DNA, 55 bp, Artificial
  Synthetic oligonucleotide
gcaagtgaccacctacgctctcaacaccgtgacgaatgggaagaaccaggttgga

SEQ ID NO: 519430 - DNA, 55 bp, Artificial
  Synthetic oligonucleotide
gattactgaacgatcctggtgtgtcgctcggtgtttgggcctttcgaactgggct

SEQ ID NO: 519431 - DNA, 55 bp, Artificial
  Synthetic oligonucleotide
gattacactagtgtgattcaagacacagctcactacctcgtagacgggatgacca

SEQ ID NO: 519432 - DNA, 55 bp, Artificial
  Synthetic oligonucleotide
gatgtggtcgctcatgtattttcataggagggacctacggctagcctccatggcc

SEQ ID NO: 519433 - DNA, 55 bp, Artificial
  Synthetic oligonucleotide
tttcaggtggatcttggcatggaatggatcgtttagttgtatttaaagaaccaca

SEQ ID NO: 519434 - DNA, 55 bp, Artificial
  Synthetic oligonucleotide
gatgtccggagccatgctagcaaggccgttaaccatatcaactccgtatgggagg

SEQ ID NO: 519435 - DNA, 55 bp, Artificial
  Synthetic oligonucleotide
gatgggatcaacgtaacaaagtccttcagggaaatgaattatgactggagcctgt

SEQ ID NO: 519436 - DNA, 55 bp, Artificial
  Synthetic oligonucleotide
gatgagtagttgcaagccgctgcatgcatttgatcaaggctggggacccctcgaa

SEQ ID NO: 519437 - DNA, 55 bp, Artificial
  Synthetic oligonucleotide
gatcgttgacttcagtctagaccccactttcaccataaccacacagactgtcccc

SEQ ID NO: 519438 - DNA, 55 bp, Artificial
  Synthetic oligonucleotide
gatcagcgtggctcaggacaggttgtcacatacccattgaatacctggactaacc

SEQ ID NO: 519439 - DNA, 55 bp, Artificial
  Synthetic oligonucleotide
gctaccgactagtagatgaaacctcttgcaacagagacggtgtagccatagtgcc

SEQ ID NO: 519440 - DNA, 55 bp, Artificial
  Synthetic oligonucleotide
gcgtgtgccaccgccggaatcgctagccccttggtgtttgcaggtttgcacatgg

SEQ ID NO: 519441 - DNA, 55 bp, Artificial
  Synthetic oligonucleotide
gcgtggaacagcatgaagattgaggactttggatttggggtgttatccacaaagg

SEQ ID NO: 519442 - DNA, 55 bp, Artificial
  Synthetic oligonucleotide
gcgtctgacggcttgcgagatctagctgtcgccgtagagcccgtcatcttttctc

SEQ ID NO: 519443 - DNA, 55 bp, Artificial
  Synthetic oligonucleotide
tgtctcttccggtgagagggcctcagggatgtttgactccgtggtgctctgcgaa

SEQ ID NO: 519444 - DNA, 55 bp, Artificial
  Synthetic oligonucleotide
gcgtaccctgtgttaagactggcaataagtcgcaatgttgggtaccggtggcccc

SEQ ID NO: 519445 - DNA, 55 bp, Artificial
  Synthetic oligonucleotide
gcgggatactgcctgcctggcgaagtcctacgctcaaatgtggctcctcctgtac

SEQ ID NO: 519446 - DNA, 55 bp, Artificial
  Synthetic oligonucleotide
gcggcaagaggaataatcgcaacacgggtcaagctaggagaagcagctgcgattt

SEQ ID NO: 519447 - DNA, 55 bp, Artificial
  Synthetic oligonucleotide
gcgcattctccgaatgccgtttgacatgatatttggaggtgtaggatttctggga

SEQ ID NO: 519448 - DNA, 55 bp, Artificial
  Synthetic oligonucleotide
gcgagtgccccgggaggtctcgtagaccgtgcatcatgagcacacttcctaaacc

SEQ ID NO: 519449 - DNA, 55 bp, Artificial
  Synthetic oligonucleotide
gcctaagtacccaccggcactccctatctgggctcggcctgactacaatccaccc

SEQ ID NO: 519450 - DNA, 55 bp, Artificial
  Synthetic oligonucleotide
gccgtcgccatggctctttgagcctagtagacaagcggggaagcaggaaattggc

SEQ ID NO: 519451 - DNA, 55 bp, Artificial
  Synthetic oligonucleotide
gccggaggtctactaggacgtctgggaattggctggggatcgattctccaggagg

SEQ ID NO: 519452 - DNA, 55 bp, Artificial
  Synthetic oligonucleotide
gccctgagtacagggtagtcgtcagtggttcgacacttgaaataacgagtctcga

SEQ ID NO: 519453 - DNA, 55 bp, Artificial
  Synthetic oligonucleotide
gcccggtaggtattatagaagtcaggaaacagcaaccgggtcaaaggactaccac

SEQ ID NO: 519454 - DNA, 55 bp, Artificial; identical to SEQ ID NO: 478983
  Synthetic oligonucleotide

SEQ ID NO: 519455 - DNA, 55 bp, Artificial
  Synthetic oligonucleotide
gccccttgtcagagctacactgataagttgtgttagtagtaaatggcagctagta

SEQ ID NO: 519456 - DNA, 55 bp, Artificial
  Synthetic oligonucleotide
gccatcaccaaggtaatgtacaattgggtgaagcagcagcccgtcgtaataccag

SEQ ID NO: 519457 - DNA, 55 bp, Artificial
  Synthetic oligonucleotide
gccatactaccacaagggcaggtgaagtgtaagataggagatacagttgtacagg

SEQ ID NO: 519458 - DNA, 55 bp, Artificial
  Synthetic oligonucleotide
gccaaatgctgattaacaggatgcacaaaaccaaccgcaatggacccaggtatga

SEQ ID NO: 519459 - DNA, 55 bp, Artificial
  Synthetic oligonucleotide
gcatggctcgacggaagtcggaacttataacaactactctatacagcaatcactg

SEQ ID NO: 519460 - DNA, 55 bp, Artificial
  Synthetic oligonucleotide
gtccaccgtgcgatctccgtccttctctgacaacacaaccccaccagcggtaccg

SEQ ID NO: 519461 - DNA, 55 bp, Artificial
  Synthetic oligonucleotide
tcagtgggctgcgtggtaatctgtggcagggtctccaccactggtaagccagtgc

SEQ ID NO: 519462 - DNA, 55 bp, Artificial
  Synthetic oligonucleotide
gtagcctgatcggtcaccgagctagatccacctgggccgagaatatatacacccc

SEQ ID NO: 519463 - DNA, 55 bp, Artificial
  Synthetic oligonucleotide
gtacaggtgttccatcccacctggccactgacactgaactgaaggcgattcacgg

SEQ ID NO: 519464 - DNA, 55 bp, Artificial
  Synthetic oligonucleotide
tcattgcacgcgcagaggcggttgtccacgtgtgggtaccctccttgcaggttcg

SEQ ID NO: 519465 - DNA, 55 bp, Artificial
  Synthetic oligonucleotide
ggttgtgacttatgccctcaacactttcacgaacctgtgcgtccagctcattaga

SEQ ID NO: 519466 - DNA, 55 bp, Artificial
  Synthetic oligonucleotide
tcccatctacccggagtacgacgacagagaaccatcggtgccagccgagtgccac

SEQ ID NO: 519467 - DNA, 55 bp, Artificial
  Synthetic oligonucleotide
ggttcagcataactccagccgcgccatcatacactcttaagcttggggaatatgg

SEQ ID NO: 519468 - DNA, 55 bp, Artificial
  Synthetic oligonucleotide
tcctacaaccatcatggcgaagaatgaggtgttttgcgttgatacgtcgaagggg

SEQ ID NO: 519469 - DNA, 55 bp, Artificial
  Synthetic oligonucleotide
tctatggatgcgccctacctccttctaggccggctccaataccgccgcctaggag

SEQ ID NO: 519470 - DNA, 55 bp, Artificial
  Synthetic oligonucleotide
ggtggtctggttagggtgccactctcgcgtaattcaacacatgagatgtactggg

SEQ ID NO: 519471 - DNA, 55 bp, Artificial
  Synthetic oligonucleotide
ggtgcccgtcataacggcagatggtgaggtatacataagaaatggacaaaggggt

SEQ ID NO: 519472 - DNA, 55 bp, Artificial
  Synthetic oligonucleotide
tctattgcttcactccctccccagtggtggtgggcacgaccgacaagttcggggc

SEQ ID NO: 519473 - DNA, 55 bp, Artificial
  Synthetic oligonucleotide
ggtcccggtgatcacagctgatggtgaggtctacataagaaaggggcagagaggc

SEQ ID NO: 519474 - DNA, 55 bp, Artificial
  Synthetic oligonucleotide
ggtatgccatggaaatcagaccactgaaaacgacacctggactagtttatgcagg

SEQ ID NO: 519475 - DNA, 55 bp, Artificial
  Synthetic oligonucleotide
ggtagagatgagtccactcctgttttccacgacccagttggctatcctgccctgc

SEQ ID NO: 519476 - DNA, 55 bp, Artificial
  Synthetic oligonucleotide
tctctccgatggaaaagaaggtcatcacctggggcgctgacacagccgcttgtgg

SEQ ID NO: 519477 - DNA, 55 bp, Artificial
  Synthetic oligonucleotide
ggtaaccatgtgtcgcccacacattatgtgcccgagactgacacctcccggcaaa

SEQ ID NO: 519478 - DNA, 55 bp, Artificial
  Synthetic oligonucleotide
tctgtgccatctgagtacctcctccccaagaagaagtttccaactgcactacccc

SEQ ID NO: 519479 - DNA, 55 bp, Artificial
  Synthetic oligonucleotide
gggtgtgcgagaagatggccttatatgacattgcccagaagcttcccctggcagt

SEQ ID NO: 519480 - DNA, 55 bp, Artificial
  Synthetic oligonucleotide
tatctgtggctcttgaccctcagggtcgccgcaaatactacctaaccagagaccc

SEQ ID NO: 519481 - DNA, 55 bp, Artificial
  Synthetic oligonucleotide
taggctcattgcctttgcttccagaggtaaccacgtcgccccaacccactacgtg

SEQ ID NO: 519482 - DNA, 55 bp, Artificial
  Synthetic oligonucleotide
tagcttacaacgaccgacgatggtgctttgatggacccaccgtgaacacagtgct

SEQ ID NO: 519483 - DNA, 55 bp, Artificial
  Synthetic oligonucleotide
tagctccaaagcccaccgtcagaccacaccgaggtgtgccactcagcggagagtg

SEQ ID NO: 519484 - DNA, 55 bp, Artificial
  Synthetic oligonucleotide
tactggatgacaacgaaggctaaacaacgaggaggagtcatctgggatgtgccag

SEQ ID NO: 519485 - DNA, 55 bp, Artificial
  Synthetic oligonucleotide
tcaacgctacgacgaccggtccgagcgtgcctatcccggagcccaactacaagag

SEQ ID NO: 519486 - DNA, 55 bp, Artificial
  Synthetic oligonucleotide
taaggaatggggaggttacagacacttacgagaactactcattcctgaatgcaag

SEQ ID NO: 519487 - DNA, 55 bp, Artificial
  Synthetic oligonucleotide
gttttctgctgatgtactcctggaatcctcttgtgaggaggatctgtctactggt

SEQ ID NO: 519488 - DNA, 55 bp, Artificial
  Synthetic oligonucleotide
gttgttttcgaacgaagaacagtccgcaacggtaatcggaggcattcagctcgct

SEQ ID NO: 519489 - DNA, 55 bp, Artificial
  Synthetic oligonucleotide
gttgtccatcttaccctgttcttttacaactatgcctgcactatccaccgggctg

SEQ ID NO: 519490 - DNA, 55 bp, Artificial
  Synthetic oligonucleotide
gttccttgttggtcaagcggaagcagcacttgaaaatctcatcgtcctcaatgct

SEQ ID NO: 519491 - DNA, 55 bp, Artificial
  Synthetic oligonucleotide
gttccggaccgtgggatgagaaagagattgtagtagacttcgactactgccctgg

SEQ ID NO: 519492 - DNA, 55 bp, Artificial
  Synthetic oligonucleotide
gttaagactgactcaggatgcccagatggtgccagatgttatgtgctgaacccag

SEQ ID NO: 519493 - DNA, 55 bp, Artificial
  Synthetic oligonucleotide
gtggaaatgcctaatccggctcaaacctacactcacaggtcccacgcctctgctt

SEQ ID NO: 519494 - DNA, 55 bp, Artificial
  Synthetic oligonucleotide
gtgcggccctgtgtattgtttcactcctagcccagtggtggtgggtacaaccgac

SEQ ID NO: 519495 - DNA, 55 bp, Artificial
  Synthetic oligonucleotide
gtctgctcgagatgtggcgctcaaagaagaccccgatgggtttctcctatgacac

SEQ ID NO: 519496 - DNA, 55 bp, Artificial
  Synthetic oligonucleotide
tcaacggcgtcctatggacagtctatcatggggccggttctaagaccttggccgg

SEQ ID NO: 519497 - DNA, 55 bp, Artificial
  Synthetic oligonucleotide
gtccttccgagaaatgaattacgactggagcctatatgaggaagatagcctgcta

SEQ ID NO: 519498 - DNA, 55 bp, Artificial
  Synthetic oligonucleotide
gtcctgtgcgaggcgtacgatacgggttgcgcgtggtacgagctgactccatctg

SEQ ID NO: 519499 - DNA, 55 bp, Artificial
  Synthetic oligonucleotide
gtcctgtagtaattggcaccactgacaggaagggatttcccacgtacacgtgggg

SEQ ID NO: 519500 - DNA, 55 bp, Artificial
  Synthetic oligonucleotide
gtcctgagcgtatgagtagctgtcggccgctacgagattttgaccagggttgggg

SEQ ID NO: 519501 - DNA, 55 bp, Artificial
  Synthetic oligonucleotide
ggcggtctgtacccacagttctacgagccggaggctgacatgctaagtgaaacgg

SEQ ID NO: 519502 - DNA, 55 bp, Artificial
  Synthetic oligonucleotide
ggcgggaagtaccttcaggctgcacttttgcggctaggggcctggactggcacat

SEQ ID NO: 519503 - DNA, 55 bp, Artificial
  Synthetic oligonucleotide
ggcgacgagcccaaccaccgtgatctagtggagagggactgtgcaactataacta

SEQ ID NO: 519504 - DNA, 55 bp, Artificial
  Synthetic oligonucleotide
ggccgctaacgtgcagtgggatgagatggcggacataacaggctcaagtccagtc

SEQ ID NO: 519505 - DNA, 55 bp, Artificial
  Synthetic oligonucleotide
ggccgacgatagacgtcaagatgatgaacatggaggctacggagttagcagtcgt

SEQ ID NO: 519506 - DNA, 55 bp, Artificial
  Synthetic oligonucleotide
ggccgaaaagaggctagccatgcccttagtaggactagcaaaacaaggagggtag

SEQ ID NO: 519507 - DNA, 55 bp, Artificial
  Synthetic oligonucleotide
ggccatttgtggtcgctacctcttcaattgggcggtgagaaccaagctcaaactc

SEQ ID NO: 519508 - DNA, 55 bp, Artificial
  Synthetic oligonucleotide
ggccagtcagtgaggctttgactgctgtgggattgacatttgcgttggcaggagg

SEQ ID NO: 519509 - DNA, 55 bp, Artificial
  Synthetic oligonucleotide
ggcatggcactgttgtggtggaattgtcttatgcaggtactgatgggccctgtag

SEQ ID NO: 519510 - DNA, 55 bp, Artificial
  Synthetic oligonucleotide
ggcagtcctcaccttaaccctactgatgattagttatgtgacagactacttcagg

SEQ ID NO: 519511 - DNA, 55 bp, Artificial
  Synthetic oligonucleotide
ggcacatggcatcagcctaccaactagcccaggggaactgggagcccctcgattg

SEQ ID NO: 519512 - DNA, 55 bp, Artificial
  Synthetic oligonucleotide
ggcaaggcccaggagcaaagacaggtgacttactgccaatattgaggtgtgtgct

SEQ ID NO: 519513 - DNA, 55 bp, Artificial
  Synthetic oligonucleotide
ggcaaatctaaacttgagtctgtccacgctagggatctggactaaacacacaagt

SEQ ID NO: 519514 - DNA, 55 bp, Artificial
  Synthetic oligonucleotide
ggatggaagacatggggaaagaccaagttgatgcaggttccattggcaaaggacg

SEQ ID NO: 519515 - DNA, 55 bp, Artificial
  Synthetic oligonucleotide
ggatgcgtcgtacgtgctctagatgtgggactaatgcgtcaggatgacataacgt

SEQ ID NO: 519516 - DNA, 55 bp, Artificial
  Synthetic oligonucleotide
ggatgacaactaaggcaaaacaacgaggaggagtcatctgggatgtgccagctcc

SEQ ID NO: 519517 - DNA, 55 bp, Artificial
  Synthetic oligonucleotide
ggatactcaaccctgggaaattgtcagaacaactagatagagaagggcacaagag

SEQ ID NO: 519518 - DNA, 55 bp, Artificial
  Synthetic oligonucleotide
ggagttaatgaggcgaccaaacatctgaaaagcttcaagcgtgacattgggcaga

SEQ ID NO: 519519 - DNA, 55 bp, Artificial
  Synthetic oligonucleotide
ggagggccagggcacgaggaaccagtgatgacccagagctatggctggaacattg

SEQ ID NO: 519520 - DNA, 55 bp, Artificial
  Synthetic oligonucleotide
ggagggagggcctaccaacatgccctcaatgagctcccagaatcattggagacac

SEQ ID NO: 519521 - DNA, 55 bp, Artificial
  Synthetic oligonucleotide
tggaaccccttggttaggaggatttgcttgctcacgttgtctactgagccagaag

SEQ ID NO: 519522 - DNA, 55 bp, Artificial
  Synthetic oligonucleotide
gggtggttgccatgactgctaccccagcagggtcagtaaccacaacagggcaaaa

SEQ ID NO: 519523 - DNA, 55 bp, Artificial
  Synthetic oligonucleotide
gggtggccgtgatgcaatcatcttgctcacctgcttgttacatcctcagcttggg

SEQ ID NO: 519524 - DNA, 55 bp, Artificial
  Synthetic oligonucleotide
gggtggaacctcgtaacgatgaggtccaacgttgatgtgttctacttagggactg

SEQ ID NO: 519525 - DNA, 55 bp, Artificial
  Synthetic oligonucleotide
gggtgacgggtgcctggtcccctactgggctagtgtcagggaagacctcatatcc

SEQ ID NO: 519526 - DNA, 55 bp, Artificial
  Synthetic oligonucleotide
ggggccacgcagtggatgaatcgactgatagcgttcgcttcgaggggcaaccacg

SEQ ID NO: 519527 - DNA, 55 bp, Artificial
  Synthetic oligonucleotide
ggggacatgaaagaaggggacatggcaaccgggataacctatgcatcatacgggt

SEQ ID NO: 519528 - DNA, 55 bp, Artificial
  Synthetic oligonucleotide
ggggacacgttgtgggaattttccgagcagctgtgtgctccaggggagtcgcgaa

SEQ ID NO: 519529 - DNA, 55 bp, Artificial
  Synthetic oligonucleotide
ggggaagctgcccttgggtcatcatgctactcccgatagttgctggactgaaact

SEQ ID NO: 519530 - DNA, 55 bp, Artificial
  Synthetic oligonucleotide
tctgtgtgatactgactgttgtgacagttgttgccaatgaaatgcggctactgga

SEQ ID NO: 519531 - DNA, 55 bp, Artificial
  Synthetic oligonucleotide
ggggaacaccctcacatgttatgtgaaggcgctagcagcctgtaaggcagcgggc

SEQ ID NO: 519532 - DNA, 55 bp, Artificial
  Synthetic oligonucleotide
gggctggggctccatccagtatgccaacatatccggcccttccgaggataagccg

SEQ ID NO: 519533 - DNA, 55 bp, Artificial
  Synthetic oligonucleotide
tcttcttgctgcccgctcgataggcgggtagcctaacactccattcctaatccgc

SEQ ID NO: 519534 - DNA, 55 bp, Artificial
  Synthetic oligonucleotide
gggcgtatgctagtggtggctttaagggattttaaccctgagctgtctgaactag

SEQ ID NO: 519535 - DNA, 55 bp, Artificial
  Synthetic oligonucleotide
gggcggaatccgtcgcaggttggggacgagtattgctatggcggacatacgaatg

SEQ ID NO: 519536 - DNA, 55 bp, Artificial
  Synthetic oligonucleotide
gggcgaggtaaagtcatgcacatggccggaaacccacacactgtggagtgacagc

SEQ ID NO: 519537 - DNA, 55 bp, Artificial
  Synthetic oligonucleotide
gggccgagaacatatacaccccgatcatgcagatcagagccctcatcggccctga

SEQ ID NO: 519538 - DNA, 55 bp, Artificial
  Synthetic oligonucleotide
gggatcaacgtaacgaaatcctttagggaaatgaattacgattggagcctgtacg

SEQ ID NO: 519539 - DNA, 55 bp, Artificial
  Synthetic oligonucleotide
gggagctgctgtgaaaggcaacaagtctgttcatggcgaccccggattgtggatg

SEQ ID NO: 519540 - DNA, 55 bp, Artificial
  Synthetic oligonucleotide
gggaccagagctgttagctgcacaagacagaggactgactggggaatggtcgctg

SEQ ID NO: 519541 - DNA, 55 bp, Artificial
  Synthetic oligonucleotide
gggacatttatcacagcgtgtcccgggctcggccccgcatgttactcctgtgcct

SEQ ID NO: 519542 - DNA, 55 bp, Artificial
  Synthetic oligonucleotide
gggacagtgaccactacagggcagaaacacccaatagaagaattcatagccccag

SEQ ID NO: 519543 - DNA, 55 bp, Artificial
  Synthetic oligonucleotide
ccaggctaacctcactgagggccaacccgataaggagtgtgcagtcacttgcagg

SEQ ID NO: 519544 - DNA, 55 bp, Artificial
  Synthetic oligonucleotide
ccagatgctttgactctacagtcacagagcgagacatacggactgagcaggatat

SEQ ID NO: 519545 - DNA, 55 bp, Artificial
  Synthetic oligonucleotide
ccaccggatgatagtagacggtgctgcctgcagctatcacatataaactggcgcc

SEQ ID NO: 519546 - DNA, 55 bp, Artificial
  Synthetic oligonucleotide
ccacaggagggaccttagactgatggcaaatgcgatctgttcatctgtccctgta

SEQ ID NO: 519547 - DNA, 55 bp, Artificial
  Synthetic oligonucleotide
ccacaagaggtccccaaagggtacttaggtgggtgcacaacaggctcgactgccc

SEQ ID NO: 519548 - DNA, 55 bp, Artificial
  Synthetic oligonucleotide
ccaatcagcactctgaagggatcgtccggtggtcctgtgctatgcccctcaggcc

SEQ ID NO: 519549 - DNA, 55 bp, Artificial
  Synthetic oligonucleotide
ccaaggcagatgtgggttgcggatttgaccccgagagaaaggttgtgtcctgcgg

SEQ ID NO: 519550 - DNA, 55 bp, Artificial
  Synthetic oligonucleotide
cattccaacggcgaccggcagtaatggatgtgttgtgcgtgctctggatgtgggt

SEQ ID NO: 519551 - DNA, 55 bp, Artificial
  Synthetic oligonucleotide
cataccttggaaagagggaagatagctggtgtggtagtctgattggacatcgagc

SEQ ID NO: 519552 - DNA, 55 bp, Artificial
  Synthetic oligonucleotide
cagtgccagtttctgccgtagaggtcaagaacaccagtcacatctacatggcaac

SEQ ID NO: 519553 - DNA, 55 bp, Artificial
  Synthetic oligonucleotide
caggggaggtgttgaaggacttggactccagaagttaggatatgtgctgcgtgac

SEQ ID NO: 519554 - DNA, 55 bp, Artificial
  Synthetic oligonucleotide
cagggaaagagaactccatctgcaaggaaagtgtgagacttgcatttacaacatg

SEQ ID NO: 519555 - DNA, 55 bp, Artificial
  Synthetic oligonucleotide
caggaatgaggtggtagccagctggtatggagaggaggaaatattcggcatgccc

SEQ ID NO: 519556 - DNA, 55 bp, Artificial
  Synthetic oligonucleotide
cagccgagccatctggttcatgtggctaggggctcgataccttgagttcgaggcc

SEQ ID NO: 519557 - DNA, 55 bp, Artificial
  Synthetic oligonucleotide
cagcactgggcctcagcagaaccttcagctggttaacaccaacggcagttggcac

SEQ ID NO: 519558 - DNA, 55 bp, Artificial
  Synthetic oligonucleotide
cagagggaagcatggggagtacaggtatgtttcgcaaggggaacggccttcgggc

SEQ ID NO: 519559 - DNA, 55 bp, Artificial
  Synthetic oligonucleotide
cagagagaggcctagggttgaagttcgccaataaaggagcccagatattgtatga

SEQ ID NO: 519560 - DNA, 55 bp, Artificial
  Synthetic oligonucleotide
cagacttgtcagtacccctgctactcttagggtgttggggacagttcacaatgac

SEQ ID NO: 519561 - DNA, 55 bp, Artificial
  Synthetic oligonucleotide
cagaagtgatagacgaggtatagtaaccagtcatcacacattgggtgaaaagtgg

SEQ ID NO: 519562 - DNA, 55 bp, Artificial
  Synthetic oligonucleotide
cactcttcgcaaagcatgggctgtcttggagtgtgtgatggttggaatggtgtta

SEQ ID NO: 519563 - DNA, 55 bp, Artificial
  Synthetic oligonucleotide
cacggtcctggcgattgaagaggtgggccaagtgattaagattgtcttaagggcg

SEQ ID NO: 519564 - DNA, 55 bp, Artificial
  Synthetic oligonucleotide
caccgacgtccatgcacacagcactttagctgtatgaggatatacccgacgtcta

SEQ ID NO: 519565 - DNA, 55 bp, Artificial
  Synthetic oligonucleotide
cacaatcacccagcatatggtggaagtgccagtgatcacagctgacggggaagtg

SEQ ID NO: 519566 - DNA, 55 bp, Artificial
  Synthetic oligonucleotide
ccggtctaggtgcaatgatccttatgacagctacagtgttgttgtggattgcaga

SEQ ID NO: 519567 - DNA, 55 bp, Artificial
  Synthetic oligonucleotide
ccgggcaaacgccagtcgagttcctagataagcctgaagacaactcatgtcagcc

SEQ ID NO: 519568 - DNA, 55 bp, Artificial
  Synthetic oligonucleotide
ccggccttccaaatggtgtgccctattggatggacaggatcagtggagtgcactc

SEQ ID NO: 519569 - DNA, 55 bp, Artificial
  Synthetic oligonucleotide
ccggccctacgcctttgctctaccgcataggcccagtcaacaatgaggtcgtcct

SEQ ID NO: 519570 - DNA, 55 bp, Artificial
  Synthetic oligonucleotide
ccgcagcgagcatatgcctataatggggaggaagcaggctctttgggagcactgg

SEQ ID NO: 519571 - DNA, 55 bp, Artificial
  Synthetic oligonucleotide
ccgcagagccacgttgacataacggactgtgataagacccagttgaacctcacag

SEQ ID NO: 519572 - DNA, 55 bp, Artificial
  Synthetic oligonucleotide
ccgagcgtttgagcagttgtcggccactacatgcgtttgatcagggttggggccc

SEQ ID NO: 519573 - DNA, 55 bp, Artificial
  Synthetic oligonucleotide
ccctgcctgtttgcctaggaatacaaagatcgttggccctggtaggtttgacacc

SEQ ID NO: 519574 - DNA, 55 bp, Artificial
  Synthetic oligonucleotide
ccctagcagaatctgggttgatcagccctcttgtttatgccggactaaccttggc

SEQ ID NO: 519575 - DNA, 55 bp, Artificial
  Synthetic oligonucleotide
ccctactgctggcactacccgcctaaaccttgtggtatcgttccagctcgaacgg

SEQ ID NO: 519576 - DNA, 55 bp, Artificial
  Synthetic oligonucleotide
cccgttaggtggtctgacaacaccagcagttacatggccggcagagacactgccg

SEQ ID NO: 519577 - DNA, 55 bp, Artificial
  Synthetic oligonucleotide
cccgtctacaccgctgagatggaggattatggtaccgtcacactcgaatgtgaac

SEQ ID NO: 519578 - DNA, 55 bp, Artificial
  Synthetic oligonucleotide
cccctgcaccttttagctgtgactggactcctagtgatgagagaatcaggctacc

SEQ ID NO: 519579 - DNA, 55 bp, Artificial
  Synthetic oligonucleotide
cccctctacatcctgcagtacagcctgcttaagacgccatatttcgtgcgagcac

SEQ ID NO: 519580 - DNA, 55 bp, Artificial
  Synthetic oligonucleotide
ccccggcatagatcacgcaacttgggtaaggtcatcgataccctcacgtgtggtt

SEQ ID NO: 519581 - DNA, 55 bp, Artificial
  Synthetic oligonucleotide
ccccgagttgtcagaactagttgactacaaggggactttcttagacagggaggca

SEQ ID NO: 519582 - DNA, 55 bp, Artificial
  Synthetic oligonucleotide
ccccagcagtcaagagggagcataccggcacggagatagtagacgtgatgtgcca

SEQ ID NO: 519583 - DNA, 55 bp, Artificial
  Synthetic oligonucleotide
cccatgggacacaaactccggagtgacaaacgtttgcatgacagacacaacccct

SEQ ID NO: 519584 - DNA, 55 bp, Artificial
  Synthetic oligonucleotide
cccagcgtatggtggcacttggggatactgcctgggatttcggatcagtaggagg

SEQ ID NO: 519585 - DNA, 55 bp, Artificial
  Synthetic oligonucleotide
cccactaggtaagtgcagactcattaacgagactggttaccgttacgtggacgac

SEQ ID NO: 519586 - DNA, 55 bp, Artificial
  Synthetic oligonucleotide
ccatgtagaaaccaggatgagctaatagggagggctaggatttcgcaaggggcgg

SEQ ID NO: 519587 - DNA, 55 bp, Artificial
  Synthetic oligonucleotide
ccagtgtcgggccacaggttttgtgccactagcgtgcagtgcagcccggacaaaa

SEQ ID NO: 519588 - DNA, 55 bp, Artificial
  Synthetic oligonucleotide
ccagtcatcctaacagatgggccagagagggttgttttggcagggcctatcccag

SEQ ID NO: 519589 - DNA, 55 bp, Artificial
  Synthetic oligonucleotide
agaccttaaagctgacgctcgctgtcctacgcaaggtgaagccaccatgcgtgag

SEQ ID NO: 519590 - DNA, 55 bp, Artificial
  Synthetic oligonucleotide
agaattttgctctcatacaccagtccccgttaggtggtctgacaacaccagcagt

SEQ ID NO: 519591 - DNA, 55 bp, Artificial
  Synthetic oligonucleotide
acggggcagtatattcagtgagtcctctggacctcccagccataattgaaaggct

SEQ ID NO: 519592 - DNA, 55 bp, Artificial
  Synthetic oligonucleotide
acgaacagtcttctttgtcctcatgatgttggtcgctccatcctatggaatgcga

SEQ ID NO: 519593 - DNA, 55 bp, Artificial
  Synthetic oligonucleotide
acccctactcagagcaacacttataagctgtgtcagtagttattggcaactggtc

SEQ ID NO: 519594 - DNA, 55 bp, Artificial
  Synthetic oligonucleotide
acatctacaccatagaagaccaaaggctggaagataccacccacctccagtatgc

SEQ ID NO: 519595 - DNA, 55 bp, Artificial
  Synthetic oligonucleotide
acagtcgttcaggttatcgctacggacacgtcgcttggtcctatgccctgcaggc

SEQ ID NO: 519596 - DNA, 55 bp, Artificial
  Synthetic oligonucleotide
aatatgacgacagagagccatccgtgcctgcggaatgtcataggccggtaaggcc

SEQ ID NO: 519597 - DNA, 55 bp, Artificial
  Synthetic oligonucleotide
aagtctttcccgacgctccccgcctccacgactgactcggactcgggccatccca

SEQ ID NO: 519598 - DNA, 55 bp, Artificial
  Synthetic oligonucleotide
aaggcagtcgtgccgccagtggaagggtcctatccggatttccggctcagcccat

SEQ ID NO: 519599 - DNA, 55 bp, Artificial
  Synthetic oligonucleotide
aagatcggcgctccactggcaagtcctggggacgtccaggatatccttggcccct

SEQ ID NO: 519600 - DNA, 55 bp, Artificial
  Synthetic oligonucleotide
aagagcgccattgacaaacgattaagaacagctgtcttggctccgactcgggtgg

SEQ ID NO: 519601 - DNA, 55 bp, Artificial
  Synthetic oligonucleotide
aagagcgcaattgacaagcggctaagaacagccgtcttggctccgacacgagtgg

SEQ ID NO: 519602 - DNA, 55 bp, Artificial
  Synthetic oligonucleotide
aagagcacgattgtactagtgtgattcaagacacagcccactatctcgtagacgg

SEQ ID NO: 519603 - DNA, 55 bp, Artificial
  Synthetic oligonucleotide
aagagattcccaccagcactaccagtctgggcccggccagattacaacccaccgg

SEQ ID NO: 519604 - DNA, 55 bp, Artificial
  Synthetic oligonucleotide
aacgtggactacggtgaagggagaatttgttgaaccattgtacacactaaaagcg

SEQ ID NO: 519605 - DNA, 55 bp, Artificial
  Synthetic oligonucleotide
aacgaattatccaagactgtgtaaccatcgggaaagaggaaggcaattggctggt

SEQ ID NO: 519606 - DNA, 55 bp, Artificial
  Synthetic oligonucleotide
aacctatcccaaaggcacgccagccaacgggccggcactgggctcagcctggtta

SEQ ID NO: 519607 - DNA, 55 bp, Artificial
  Synthetic oligonucleotide
aacattgtggacgttcagtacctctatggagtctcctcggctgtagtgtcgtggg

SEQ ID NO: 519608 - DNA, 55 bp, Artificial
  Synthetic oligonucleotide
aaatgcagggttaaaatgcagggtctgaagctgaaaggaatgacctacccgatgt

SEQ ID NO: 519609 - DNA, 55 bp, Artificial
  Synthetic oligonucleotide
aaacatgagtataccaacattactcaactccggagccatggcctggctcttgctg

SEQ ID NO: 519610 - DNA, 55 bp, Artificial
  Synthetic oligonucleotide
aaaaggccgaatacatctatcaaggaaccacggaaatggatgattcagatctaat

SEQ ID NO: 519611 - DNA, 55 bp, Artificial
  Synthetic oligonucleotide
aaaaccagtggcaaagttagaaggacaggtggaacattattacaaaggggtcacc

SEQ ID NO: 519612 - DNA, 55 bp, Artificial
  Synthetic oligonucleotide
cacaagcacaatggaaagttggtcaggttgtccttgagccggaactccaccgcag

SEQ ID NO: 519613 - DNA, 55 bp, Artificial
  Synthetic oligonucleotide
caatcattcaactaccacgggtcattcgtcaccgacgatatctctccaggagggc

SEQ ID NO: 519614 - DNA, 55 bp, Artificial
  Synthetic oligonucleotide
caagctggtaaccctttgtttggagaaagaggagtgatccatccacaatcaacgc

SEQ ID NO: 519615 - DNA, 55 bp, Artificial
  Synthetic oligonucleotide
caaccgatgatgacaagtcagacgcggactccttgtcttccatgcctccccttga

SEQ ID NO: 519616 - DNA, 55 bp, Artificial
  Synthetic oligonucleotide
caaagtcgtgaaagtaatgagaccaggagctgatggcataacagtgatggacgtc

SEQ ID NO: 519617 - DNA, 55 bp, Artificial
  Synthetic oligonucleotide
caaacatgagttgaacgcgatcttggaagacaacgctatcgacttgactgtggtg

SEQ ID NO: 519618 - DNA, 55 bp, Artificial
  Synthetic oligonucleotide
caaacatcacaacatggaagaatgtggcctacctgcccagaggacaagacatgtg

SEQ ID NO: 519619 - DNA, 55 bp, Artificial
  Synthetic oligonucleotide
caaacagtcagttttgtgaccagggactgatagggtctggcgctaaggataaaag

SEQ ID NO: 519620 - DNA, 55 bp, Artificial
  Synthetic oligonucleotide
attgggccgtaaagactaagctcaaactcactccattgcccagcgcagccaacct

SEQ ID NO: 519621 - DNA, 55 bp, Artificial
  Synthetic oligonucleotide
attactatagtggggaggatccagccaatctgagagttgtaacgtcacagtcccc

SEQ ID NO: 519622 - DNA, 55 bp, Artificial
  Synthetic oligonucleotide
atgtgggagaggcgctcatggagctagctgtcaaaagctttggtcaggcacccac

SEQ ID NO: 519623 - DNA, 55 bp, Artificial
  Synthetic oligonucleotide
atcctacccggattgaaagctaaagctgcccgggaagcacaaagtaggaccgccg

SEQ ID NO: 519624 - DNA, 55 bp, Artificial
  Synthetic oligonucleotide
atccgtgcccgcggagtgccataggccatcccggcctaaatttccacccgcactt

SEQ ID NO: 519625 - DNA, 55 bp, Artificial
  Synthetic oligonucleotide
atccatcctcccttgttcatttaccaacatgcctgctttgtcaaccggcttgatt

SEQ ID NO: 519626 - DNA, 55 bp, Artificial
  Synthetic oligonucleotide
atccacccaagccatgcggtattgtccctgcgcggagcgtgtgtggtcccgtgta

SEQ ID NO: 519627 - DNA, 55 bp, Artificial
  Synthetic oligonucleotide
atccaacagaagaggacatagatgtccctgagtgcttcactgccagtgagccagt

SEQ ID NO: 519628 - DNA, 55 bp, Artificial
  Synthetic oligonucleotide
atcacagcgtgccccgggctcgaccccgcatgttactcctgtgcctactcctact

SEQ ID NO: 519629 - DNA, 55 bp, Artificial
  Synthetic oligonucleotide
atcaagactgagcgggacgtctacctatcctgcaagttagatccggaagccagag

SEQ ID NO: 519630 - DNA, 55 bp, Artificial
  Synthetic oligonucleotide
agttcctgcagcgtatgctgctcaagggtacaaggtcctagtgctgaatccatca

SEQ ID NO: 519631 - DNA, 55 bp, Artificial
  Synthetic oligonucleotide
agttacgcagatgtacaccagcgctgaaggggacctcgtagggtggcctagcccc

SEQ ID NO: 519632 - DNA, 55 bp, Artificial
  Synthetic oligonucleotide
aggcatgttgccactaataaaggccatccttatcagctgtgttagtagcaggtgg

SEQ ID NO: 519633 - DNA, 55 bp, Artificial
  Synthetic oligonucleotide
aggaactactgtcttcacgcggaaagcgtctagccatggcgttagtacgagtgtc

SEQ ID NO: 519634 - DNA, 55 bp, Artificial
  Synthetic oligonucleotide
agagaatcaggctacctacagacaaatacttgagggtagagacaaaatgcccatg

SEQ ID NO: 519635 - DNA, 55 bp, Artificial
  Synthetic oligonucleotide
gaaggggtcgtctggtggtcctctgatgtgtccctccggtcatgtcgtggggatc

SEQ ID NO: 519636 - DNA, 55 bp, Artificial
  Synthetic oligonucleotide
gaacgatcctggtgtgtcgctcggtgtttgggcctttcgaactgggcttattctg

SEQ ID NO: 519637 - DNA, 55 bp, Artificial
  Synthetic oligonucleotide
gaaccgtttccccataggaagcaatgcatggatcaaatggtcgtaggcgaggact

SEQ ID NO: 519638 - DNA, 55 bp, Artificial
  Synthetic oligonucleotide
gaaccagtgatgacccagagctatggctggaacattgtgacattaaagagtgggg

SEQ ID NO: 519639 - DNA, 55 bp, Artificial
  Synthetic oligonucleotide
gaaagactggagatacctttggttcttcgacactaactcctaatggcacagagcg

SEQ ID NO: 519640 - DNA, 55 bp, Artificial
  Synthetic oligonucleotide
cttgggcagccaattcttggatatagccggcctaaagataccagtagaagaaacg

SEQ ID NO: 519641 - DNA, 55 bp, Artificial
  Synthetic oligonucleotide
cttccaatacggtatctgactccggcagtaaagagggagcataccgggacagaga

SEQ ID NO: 519642 - DNA, 55 bp, Artificial
  Synthetic oligonucleotide
ctgtgcgaggcgtacgatacaggatgcgcgtggtacgagctcactcctgcagaaa

SEQ ID NO: 519643 - DNA, 55 bp, Artificial
  Synthetic oligonucleotide
ctgggagtgatgttgggacctggttatccattaagacagcagtcgggaacggatc

SEQ ID NO: 519644 - DNA, 55 bp, Artificial
  Synthetic oligonucleotide
ctgcgagtattgccgcacggggaatcatttcaacaagagtcagtcttggggaagc

SEQ ID NO: 519645 - DNA, 55 bp, Artificial
  Synthetic oligonucleotide
ctgcagctgaggtgaggaacatcagcggcctctacacggtaaccaacgactgctc

SEQ ID NO: 519646 - DNA, 55 bp, Artificial
  Synthetic oligonucleotide
ctgatcagatggcatctggcttgcaacttgggcaaggtgaagtggtactgatagg

SEQ ID NO: 519647 - DNA, 55 bp, Artificial
  Synthetic oligonucleotide
ctgagacccaacaggaagggaggaaatttgtggctagcctcttggtgtcagccct

SEQ ID NO: 519648 - DNA, 55 bp, Artificial
  Synthetic oligonucleotide
ctgacttcagcatcagttgttacaagatggaaagttgacatagctggcatattgc

SEQ ID NO: 519649 - DNA, 55 bp, Artificial
  Synthetic oligonucleotide
ctcttctggcgagagggcttccggtatgttcgacaccgtagtgctctgtgagtgc

SEQ ID NO: 519650 - DNA, 55 bp, Artificial
  Synthetic oligonucleotide
ctcccctatgctaccagtgcattgaaaatgtttaccccgactagactggagagcg

SEQ ID NO: 519651 - DNA, 55 bp, Artificial
  Synthetic oligonucleotide
ctccccgctcggtagagcggcacaacctagcaacactccatagctagagttccac

SEQ ID NO: 519652 - DNA, 55 bp, Artificial
  Synthetic oligonucleotide
ctcagtggatgaaccgactgatagcgttcgcttcaaggggtaatcacgtatcgcc

SEQ ID NO: 519653 - DNA, 55 bp, Artificial
  Synthetic oligonucleotide
ctatgaaccgaaagtgtcagatgtgacgacggaacccagatgcccgactatgggg

SEQ ID NO: 519654 - DNA, 55 bp, Artificial
  Synthetic oligonucleotide
ctagcgaaggccgaaataggttaaccatacctttagtaggacgagcataatgggg

SEQ ID NO: 519655 - DNA, 55 bp, Artificial
  Synthetic oligonucleotide
ctacgcagggagacgtggtagtcgtcgctaccgacgccctcatgactgggtacac

SEQ ID NO: 519656 - DNA, 55 bp, Artificial
  Synthetic oligonucleotide
ctaccacataaaagaggggagcgtgaagttcctactaatttggcgtctctaccaa

SEQ ID NO: 519657 - DNA, 55 bp, Artificial
  Synthetic oligonucleotide
gatagcatttgcttccaggggtaaccatgtgtcgcccactcactatgtaccggag

SEQ ID NO: 519658 - DNA, 55 bp, Artificial
  Synthetic oligonucleotide
gatactcaggaatggaagccctcaatcggttggagaaactggcaagaagtaccct

SEQ ID NO: 519659 - DNA, 55 bp, Artificial
  Synthetic oligonucleotide
gataacagactggtgttgtaggtcttgcaccaccccaccactgagatttgttaca

SEQ ID NO: 519660 - DNA, 55 bp, Artificial
  Synthetic oligonucleotide
gagtgtcactcaactgacgccaccacaattttgggtatagggaccgttctcgacc

SEQ ID NO: 519661 - DNA, 55 bp, Artificial
  Synthetic oligonucleotide
gagtcatcacaacacgaggacaggatacaaggttcagagttccggaccgtgggat

SEQ ID NO: 519662 - DNA, 55 bp, Artificial
  Synthetic oligonucleotide
gagccctatgggcttttcatatgacacccggtgttttgactcaacagtcacggag

SEQ ID NO: 519663 - DNA, 55 bp, Artificial
  Synthetic oligonucleotide
gagcacaggacccttcgagtccttgagatggtggaagactggctgcacagagggc

SEQ ID NO: 519664 - DNA, 55 bp, Artificial
  Synthetic oligonucleotide
gagatgtatggagcggtgtactcagttaaccccttggacctcccggccataattg

SEQ ID NO: 519665 - DNA, 55 bp, Artificial
  Synthetic oligonucleotide
gagaccccgcggaaatcaaagcaaggcccaacctggcaaagctgtaaaccagggg

SEQ ID NO: 519666 - DNA, 55 bp, Artificial
  Synthetic oligonucleotide
gacttgctagtcattccaataacggctggcagcaatggatgcgtcgtacgtgctc

SEQ ID NO: 519667 - DNA, 55 bp, Artificial
  Synthetic oligonucleotide
gacttacccaatgtgctctaacaaattcagcctagctaggaatcccacagacacg

SEQ ID NO: 519668 - DNA, 55 bp, Artificial
  Synthetic oligonucleotide
gactgatggcaaatgcgatctgttcatctgtccctgtatcatgggttcccacagg

SEQ ID NO: 519669 - DNA, 55 bp, Artificial
  Synthetic oligonucleotide
gactcgggtggcagcaactctcagaaaacttggagcgccacccctcagagcgtgg

SEQ ID NO: 519670 - DNA, 55 bp, Artificial
  Synthetic oligonucleotide
gactaaggttgagaactgggctattcgaaatccaggatacgctctagccgcagcc

SEQ ID NO: 519671 - DNA, 55 bp, Artificial
  Synthetic oligonucleotide
gacgacacctcttgcaacagagaaggtgtggccatactaccacaagggcaggtga

SEQ ID NO: 519672 - DNA, 55 bp, Artificial
  Synthetic oligonucleotide
gacccagtggtggatgttaacttacagccagaagtacaagtggatacatcagagg

SEQ ID NO: 519673 - DNA, 55 bp, Artificial
  Synthetic oligonucleotide
gaccaggcagggacagccggggtaaggctcacagtgcttgctacggcaactcccc

SEQ ID NO: 519674 - DNA, 55 bp, Artificial
  Synthetic oligonucleotide
gaccagccaaatcacagagatctagtggagagggattgtgcaactataactaaaa

SEQ ID NO: 519675 - DNA, 55 bp, Artificial
  Synthetic oligonucleotide
gacaggcctaagtgcagctatggaaatgatgtcccagaacccagtctcggtgggg

SEQ ID NO: 519676 - DNA, 55 bp, Artificial
  Synthetic oligonucleotide
gacactattaccgatcatatggtggaggtgcccgtcataacggcagatggtgagg

SEQ ID NO: 519677 - DNA, 55 bp, Artificial
  Synthetic oligonucleotide
gacaccgctgtaatgggaacatcaattaaaggaaacagagctgtgcatagtgacc

SEQ ID NO: 519678 - DNA, 55 bp, Artificial
  Synthetic oligonucleotide
gacaatactcagttccctcactataaccagcctgctacgcaaactgcatgagtgg

SEQ ID NO: 519679 - DNA, 55 bp, Artificial
  Synthetic oligonucleotide
cgcgagcccgaccccgcattttactccttggcctactcctacttagcgtaggggt

SEQ ID NO: 519680 - DNA, 55 bp, Artificial
  Synthetic oligonucleotide
cgcgtggtatgagctaacaccagccgagaccacggtccgactacgcgcttacctc

SEQ ID NO: 519681 - DNA, 55 bp, Artificial
  Synthetic oligonucleotide
cgcgtaaggaactggcagagctcaccataactcctaaaagctccattgttgaagc

SEQ ID NO: 519682 - DNA, 55 bp, Artificial
  Synthetic oligonucleotide
cgccgaacggacttcttgagtttcgcaccggagcagccgagatatatggcggcca

SEQ ID NO: 519683 - DNA, 55 bp, Artificial
  Synthetic oligonucleotide
cgcagcttatccaggagggccgttaaccacatcaagtccgtgtgggaggacctcc

SEQ ID NO: 519684 - DNA, 55 bp, Artificial
  Synthetic oligonucleotide
cgctcgctgttcatgaccagccacgtgggagcaggctacgccaaagacggagtgt

SEQ ID NO: 519685 - DNA, 55 bp, Artificial
  Synthetic oligonucleotide
cgcgagttcgtccgcgagccaactctcagcgccatcacttaaggccacgtgcaca

SEQ ID NO: 519686 - DNA, 55 bp, Artificial
  Synthetic oligonucleotide
cgcggaaatccagaaatactactacaagaaggaatttcatgggttcatttacaca

SEQ ID NO: 519687 - DNA, 55 bp, Artificial
  Synthetic oligonucleotide
cgctgaccggctagtatctagtaagaccaacaaaatgtacatccccgatgaagga

SEQ ID NO: 519688 - DNA, 55 bp, Artificial
  Synthetic oligonucleotide
cgctttgaagaacaagcctcgagatgccacgtggacgagggcatgcccacagcac

SEQ ID NO: 519689 - DNA, 55 bp, Artificial
  Synthetic oligonucleotide
cctgtggctgctactgataacaggagtgcaggggcaactagactgcaaacctgag

SEQ ID NO: 519690 - DNA, 55 bp, Artificial
  Synthetic oligonucleotide
cggcataaaccctaacatcaggaccggagttcgtactgtgacaaccggggagtcc

SEQ ID NO: 519691 - DNA, 55 bp, Artificial
  Synthetic oligonucleotide
cggccaactgctcacggagacgacatgttgatcaaatcaaaggtcatggctcttc

SEQ ID NO: 519692 - DNA, 55 bp, Artificial
  Synthetic oligonucleotide
cggggttgactcatatcgacgcccacttcctttcacaaacgaaacaggcagggga

SEQ ID NO: 519693 - DNA, 55 bp, Artificial
  Synthetic oligonucleotide
cctactttctgtaggggtaggcatccttttgctcccagcccgataggctgagagc

SEQ ID NO: 519694 - DNA, 55 bp, Artificial
  Synthetic oligonucleotide
cggtaggatcagcactacgggcaaacctgtgctaattccagatcgggaggtgatg

SEQ ID NO: 519695 - DNA, 55 bp, Artificial
  Synthetic oligonucleotide
cgtcccagctcaatcggtatgcggtccagtgtactgtttcactcccagcccggtg

SEQ ID NO: 519696 - DNA, 55 bp, Artificial
  Synthetic oligonucleotide
ccgtagaactcacaacagcagaagtaataccagggtcagtttggaacttgggtaa

SEQ ID NO: 519697 - DNA, 55 bp, Artificial
  Synthetic oligonucleotide
ccgtggggatcgctgcaacttggaagacagggatagaagccagctgagccctctg

SEQ ID NO: 519698 - DNA, 55 bp, Artificial
  Synthetic oligonucleotide
cgtgcccccgcgagactgctagccgagtagtgttgggtcgcgaaaggccttgtgg

SEQ ID NO: 519699 - DNA, 55 bp, Artificial
  Synthetic oligonucleotide
cgtgtcgcgagcccgaccccgcttattactcctttgcctactcctactcagcgta

SEQ ID NO: 519700 - DNA, 55 bp, Artificial
  Synthetic oligonucleotide
cctaactctataaagattgggttggatgaaggaagttacccagggcccggactgc

SEQ ID NO: 519701 - DNA, 54 bp, Artificial
  Synthetic oligonucleotide
tggcagctgtaggcatcgtatgcgctctagcaggtgccatcacagaaaaccagg

SEQ ID NO: 519702 - DNA, 54 bp, Artificial
  Synthetic oligonucleotide
ggttaccgttaggctgcgggcttacttcaacacgcccggcctacccgtatgcca

SEQ ID NO: 519703 - DNA, 54 bp, Artificial
  Synthetic oligonucleotide
gactagtggttagaggagacccctcccattatcaacaaacgcagcacaaagggg

SEQ ID NO: 519704 - DNA, 54 bp, Artificial
  Synthetic oligonucleotide
tgccttagcgcacggcgttagggcagttgaggacgggattaactatgcaacagg

SEQ ID NO: 519705 - DNA, 54 bp, Artificial
  Synthetic oligonucleotide
tagcgtggaccataacccggaatcttcaggcagggaccttacgtagaggagggg

SEQ ID NO: 519706 - DNA, 54 bp, Artificial
  Synthetic oligonucleotide
caggctcgaccccgcatgttactcctgtgcctactcctactttccgtaggggta

SEQ ID NO: 519707 - DNA, 54 bp, Artificial
  Synthetic oligonucleotide
ctaaggtgagcgcattcagaggcgatggcatggaaccatttcaactgggggttc

SEQ ID NO: 519708 - DNA, 54 bp, Artificial
  Synthetic oligonucleotide
ccccgctcggtagagcggcacacattagctacactccatagctaactgttcccg

SEQ ID NO: 519709 - DNA, 54 bp, Artificial
  Synthetic oligonucleotide
atcaaccctaatatcaggaccggggtacgaactgtgacgaccggggaatccatt

SEQ ID NO: 519710 - DNA, 54 bp, Artificial
  Synthetic oligonucleotide
acccaatgtgcagcaacacattctccctggcgaagaatcctactgacactgggc

SEQ ID NO: 519711 - DNA, 54 bp, Artificial
  Synthetic oligonucleotide
agttgtggctatgaccgcaacccctgctgggacagtgacaacgactgggcaaaa

SEQ ID NO: 519712 - DNA, 54 bp, Artificial
  Synthetic oligonucleotide
ttgtgggtggcagaagtcccggcccagaagatagctggcgtgcttctaatttct

SEQ ID NO: 519713 - DNA, 54 bp, Artificial
  Synthetic oligonucleotide
ggaagacacaagagggtattggttctgatcccactgcgggcagcggcggaatca

SEQ ID NO: 519714 - DNA, 54 bp, Artificial
  Synthetic oligonucleotide
atgccaaagatcatgactataataagggccagtacgctgaataagaacaagcac

SEQ ID NO: 519715 - DNA, 54 bp, Artificial
  Synthetic oligonucleotide
tggctcttggcggtcctcgggcctggctatctccttagagaggttttgacaggc

SEQ ID NO: 519716 - DNA, 54 bp, Artificial
  Synthetic oligonucleotide
tgggcggtaagtacgtccaaatgatgctgataacccttggtagatggactggca

SEQ ID NO: 519717 - DNA, 54 bp, Artificial
  Synthetic oligonucleotide
gtttaccatcactccagcatataaatctctccttgtgagcacgctctggtggat

SEQ ID NO: 519718 - DNA, 54 bp, Artificial
  Synthetic oligonucleotide
gattcctgatgagccatggaaacaaggttatgaatggataacagactttgaagg

SEQ ID NO: 519719 - DNA, 54 bp, Artificial
  Synthetic oligonucleotide
cgagatgccacgtggacgagggcatgcccacagcacatcttaatctgggcgggg

SEQ ID NO: 519720 - DNA, 54 bp, Artificial
  Synthetic oligonucleotide
cgtgcagcgcttcttagtccgaggcctatcagtaccttgaagggatcgtcgggg

SEQ ID NO: 519721 - DNA, 54 bp, Artificial
  Synthetic oligonucleotide
ggtatccagcaaaaccggccacttatacatacctgacaaaggttttacactaca

SEQ ID NO: 519722 - DNA, 53 bp, Artificial
  Synthetic oligonucleotide
cgcggtggtagtaaacccgtcagtaaggaccgtcagagaagctggcattctga

SEQ ID NO: 519723 - DNA, 53 bp, Artificial
  Synthetic oligonucleotide
aggagacccaataggggcctacaaagatgtgataggtaggaacttgagtgaat

SEQ ID NO: 519724 - DNA, 53 bp, Artificial
  Synthetic oligonucleotide
tgaacatgagcataccaacactgctcaactctggagccatggcctggctcttg

SEQ ID NO: 519725 - DNA, 53 bp, Artificial
  Synthetic oligonucleotide
aatcaattgacatggtgcacacttattacacagctgacccaaattcacggaac

SEQ ID NO: 519726 - DNA, 53 bp, Artificial
  Synthetic oligonucleotide
tggcgcagccgccctggatctatcagggtggtttacgtcaggctacagcgggg

SEQ ID NO: 519727 - DNA, 53 bp, Artificial
  Synthetic oligonucleotide
cgaggcacggcaaagttgaggtggctcgtagagcgtgggtttctcaaaccaag

SEQ ID NO: 519728 - DNA, 53 bp, Artificial
  Synthetic oligonucleotide
ttacctgttgccgcgcaggggccctagattgggtgtgcgcgcgacgaggaaaa

SEQ ID NO: 519729 - DNA, 53 bp, Artificial
  Synthetic oligonucleotide
ttcacgaggcacggcaaaactgagatggcttgtggaacgcgggtttcttaaac

SEQ ID NO: 519730 - DNA, 53 bp, Artificial
  Synthetic oligonucleotide
tcagcagagcccaggactgcacgataaactggtagagatctttcatacaatag

SEQ ID NO: 519731 - DNA, 53 bp, Artificial; identical to SEQ ID NO: 378570
  Synthetic oligonucleotide

SEQ ID NO: 519732 - DNA, 53 bp, Artificial
  Synthetic oligonucleotide
catgtgagacaggcggccctagacctggtcgtttattatgtgatgaataaacc

SEQ ID NO: 519733 - DNA, 53 bp, Artificial
  Synthetic oligonucleotide
tacggactatttgtggctttccgtgacacgaacctagagcggcttggtacatc

SEQ ID NO: 519734 - DNA, 53 bp, Artificial
  Synthetic oligonucleotide
cccctcactacttacactttgctacagatgtggcccctcctcttgctggtact

SEQ ID NO: 519735 - DNA, 53 bp, Artificial
  Synthetic oligonucleotide
ggggaggttttacgggagttggccattaaaagctttggccaaccagcccctag

SEQ ID NO: 519736 - DNA, 53 bp, Artificial
  Synthetic oligonucleotide
attcgaactgttctcacagccaatcctgactcacgatcttaccgactggcaat

SEQ ID NO: 519737 - DNA, 52 bp, Artificial
  Synthetic oligonucleotide
tggaacaccgtgtggattgtcaacaacccatggatggcggtgaaagacccag

SEQ ID NO: 519738 - DNA, 52 bp, Artificial
  Synthetic oligonucleotide
ggatcgtgcagaaggaaaacgtccagtttgaagttgcagttttcatacatgg

SEQ ID NO: 519739 - DNA, 52 bp, Artificial
  Synthetic oligonucleotide
ctttggctagtgaacttggaggagtttcactgacccgcgaatcgtttgacgt

SEQ ID NO: 519740 - DNA, 52 bp, Artificial
  Synthetic oligonucleotide
gtttgactccgtggtgctctgcgaatgttacgacgctggcgtcgcgtggtat

SEQ ID NO: 519741 - DNA, 52 bp, Artificial
  Synthetic oligonucleotide
gcaactaagagcaataaggggcacatggcatcagcctaccaattggcacagg

SEQ ID NO: 519742 - DNA, 52 bp, Artificial
  Synthetic oligonucleotide
ctttgcttccagaggaaaccacgttgccccgacccactacgtgactgaatcg

SEQ ID NO: 519743 - DNA, 52 bp, Artificial
  Synthetic oligonucleotide
tggtgggcgtagtttgcgctgcaatactgcgacgccacgctgggccctccga

SEQ ID NO: 519744 - DNA, 52 bp, Artificial
  Synthetic oligonucleotide
cggaagcttggatacatctggtatacgaagaattgcactcctgcctgtttgc

SEQ ID NO: 519745 - DNA, 52 bp, Artificial
  Synthetic oligonucleotide
ctattacgtggcgacactcaagaatgtgaccgaagtgagggggttcacgaaa

SEQ ID NO: 519746 - DNA, 52 bp, Artificial
  Synthetic oligonucleotide
ttcatgtgtgaaacaacaaaacggattgggagagtaactggcagtgacggga

SEQ ID NO: 519747 - DNA, 52 bp, Artificial
  Synthetic oligonucleotide
gatgcttccagacttgacttgtcaggatggtttgtatcgggcttcagcgggg

SEQ ID NO: 519748 - DNA, 52 bp, Artificial
  Synthetic oligonucleotide
ccgtaaggaaagcgcaagctttgagcattgacaacgctccggccccagtccc

SEQ ID NO: 519749 - DNA, 52 bp, Artificial
  Synthetic oligonucleotide
ctagattgggtgtgcgcgcgacgagaaagacctctgaacggtcccagcctag

SEQ ID NO: 519750 - DNA, 52 bp, Artificial
  Synthetic oligonucleotide
agtagttcacctgtgtgagctgacaaacttagtagtgtttgtgaggattgtg

SEQ ID NO: 519751 - DNA, 52 bp, Artificial
  Synthetic oligonucleotide
ggatgggtcgcatcacagctggcaaacccgactgcttctacggctttcgtgg

SEQ ID NO: 519752 - DNA, 52 bp, Artificial
  Synthetic oligonucleotide
tgccatggacgtgggtgaaatgtgtgaggacaccgtcacatataaatgcccc

SEQ ID NO: 519753 - DNA, 52 bp, Artificial
  Synthetic oligonucleotide
gactgtggatgctcctgatcatggcggtcatatccacagcggtaaacagaga

SEQ ID NO: 519754 - DNA, 52 bp, Artificial
  Synthetic oligonucleotide
tgatgatgcagagctacggctggaatttggtctcgctgaagagcggtgttga

SEQ ID NO: 519755 - DNA, 52 bp, Artificial
  Synthetic oligonucleotide
tgacgacaaccttagagagataaaaccagttgcaaaactagaagggcttgtg

SEQ ID NO: 519756 - DNA, 52 bp, Artificial
  Synthetic oligonucleotide
tcagcgatagggatccttgaggttttcagaatgcctcctgaccacttcgctc

SEQ ID NO: 519757 - DNA, 51 bp, Artificial
  Synthetic oligonucleotide
gggcggcaatggtagagtattcatacatatttctggatgagtatcactgtg

SEQ ID NO: 519758 - DNA, 51 bp, Artificial; identical to SEQ ID NO: 478779
  Synthetic oligonucleotide

SEQ ID NO: 519759 - DNA, 51 bp, Artificial
  Synthetic oligonucleotide
ttgggcctttcgaactgggcttattctgttatcttcatacaatccatactt

SEQ ID NO: 519760 - DNA, 51 bp, Artificial
  Synthetic oligonucleotide
ttgggtcccgactggacgcacttcatggtctctccatgcccgaggagaatg

SEQ ID NO: 519761 - DNA, 51 bp, Artificial
  Synthetic oligonucleotide
aacgaattggggcctaccggcttgaccacaaggtggtatgcatacagcgaa

SEQ ID NO: 519762 - DNA, 51 bp, Artificial
  Synthetic oligonucleotide
tgtgtcaggaccaccttgagttctgggagggtgtctttaccggactcacgc

SEQ ID NO: 519763 - DNA, 51 bp, Artificial
  Synthetic oligonucleotide
aggactagcaaaacaaggagggtagcaacagtggtgagttcgttggatggc

SEQ ID NO: 519764 - DNA, 51 bp, Artificial
  Synthetic oligonucleotide
gttcagtcacggtccctcacccgaacatcactgagacagccttgccaacta

SEQ ID NO: 519765 - DNA, 51 bp, Artificial
  Synthetic oligonucleotide
aaacagcctttgccacattagtaattaaatggttggcctttggaggagaat

SEQ ID NO: 519766 - DNA, 51 bp, Artificial
  Synthetic oligonucleotide
tgtagtgattggcaccactgaccggaaagggctccccacatatacttgggg

SEQ ID NO: 519767 - DNA, 51 bp, Artificial
  Synthetic oligonucleotide
tatttcgtgcgagcacacatccttttgcgtgcttgcatgttccttcgtggc

SEQ ID NO: 519768 - DNA, 51 bp, Artificial
  Synthetic oligonucleotide
atacgacggagtggtgatgacaagcttgtccaaagcaaccaatgagagttg

SEQ ID NO: 519769 - DNA, 51 bp, Artificial
  Synthetic oligonucleotide
ggcatcagcctaccaattggcacagggcaactgggaacccctcggttgcgg

SEQ ID NO: 519770 - DNA, 51 bp, Artificial
  Synthetic oligonucleotide
atggaatgtacaggtgtcttccaagaaatggctcaacacgtagttgatggc

SEQ ID NO: 519771 - DNA, 51 bp, Artificial
  Synthetic oligonucleotide
acaccgagggtcagtgcatgccaaggcctcctccaaacttcaagagtgcca

SEQ ID NO: 519772 - DNA, 51 bp, Artificial
  Synthetic oligonucleotide
tactaattttcctgatggcacccaaaggcatgacacgcatgtcgctgggat

SEQ ID NO: 519773 - DNA, 51 bp, Artificial
  Synthetic oligonucleotide
ccctcatgcaacactgttctggaagacaataacccagtggagttatggaca

SEQ ID NO: 519774 - DNA, 51 bp, Artificial
  Synthetic oligonucleotide
cgctaggagctgaaggtcttaccactgtttggaaggattactcacatgaaa

SEQ ID NO: 519775 - DNA, 51 bp, Artificial
  Synthetic oligonucleotide
aattgagggagctgcaggtcgtatatggaacgcaaccacagctgttgctat

SEQ ID NO: 519776 - DNA, 50 bp, Artificial
  Synthetic oligonucleotide
tcaatgccgacacggggtgctcaatcgacttggctaggaaagaattgaaa

SEQ ID NO: 519777 - DNA, 50 bp, Artificial
  Synthetic oligonucleotide
gcatgcaggcagatcttgagatcttaacaagcacctgggttcttgcgggg

SEQ ID NO: 519778 - DNA, 50 bp, Artificial
  Synthetic oligonucleotide
gatattactacctcactcgtgaccctgttataccactatctcgggctgca

SEQ ID NO: 519779 - DNA, 50 bp, Artificial
  Synthetic oligonucleotide
ttgcgggtatcattatggagagcccctgcaacttcaacgtctctgcggag

SEQ ID NO: 519780 - DNA, 50 bp, Artificial
  Synthetic oligonucleotide
ctcgagagagaattccaaaggtggggtcgaagggattggattacaatacc

SEQ ID NO: 519781 - DNA, 50 bp, Artificial
  Synthetic oligonucleotide
ttcacctttagacctaggttccacgaaaccgtacaggagtgtaattgttc

SEQ ID NO: 519782 - DNA, 50 bp, Artificial
  Synthetic oligonucleotide
cgggttcacctttgagacaccggaagacttacctcattatcccataggga

SEQ ID NO: 519783 - DNA, 50 bp, Artificial
  Synthetic oligonucleotide
acttggagctacaggccttaccacccagtggtacgaatattcagacggga

SEQ ID NO: 519784 - DNA, 50 bp, Artificial
  Synthetic oligonucleotide
cttacacccctgatggaaaagtcaccacaacacagctgcttcctggaagc

SEQ ID NO: 519785 - DNA, 50 bp, Artificial
  Synthetic oligonucleotide
gagattagtagtgatatatagttatctacctcaagctaacactacactca

SEQ ID NO: 519786 - DNA, 50 bp, Artificial
  Synthetic oligonucleotide
tgtatgggcgcggcctgattacaacccacctctgcttgagacttggaaaa

SEQ ID NO: 519787 - DNA, 50 bp, Artificial
  Synthetic oligonucleotide
tatctcacgaaggttgagaactgggcgttgaggaatcctgggtacgctct

SEQ ID NO: 519788 - DNA, 50 bp, Artificial
  Synthetic oligonucleotide
ggggatctccctgtctggatatcgtacaaggtcgctgaagctgggataag

SEQ ID NO: 519789 - DNA, 60 bp, Artificial
  Synthetic oligonucleotide
cgtactttggattgacggtgatgtccctctgtgccccaacaagccccttccaacaaggaa

SEQ ID NO: 519790 - DNA, 60 bp, Artificial
  Synthetic oligonucleotide
cggtttaccaagaaagtcaacgcggtcatcaaccgaagccaggggcttaagaaagttctg

SEQ ID NO: 519791 - DNA, 60 bp, Artificial
  Synthetic oligonucleotide
tacctagactcctggcccaagatgtcttaccggtacgatttggtccgcagatgtagagcc

SEQ ID NO: 519792 - DNA, 60 bp, Artificial
  Synthetic oligonucleotide
tactctccgcgtacgtgaaaatcatagggataggttccgggtgattcaacagaggaagtg

SEQ ID NO: 519793 - DNA, 60 bp, Artificial
  Synthetic oligonucleotide
cgggtctaagacactgctgtctaatctatgcagttgtctatatggatgggttgtgttctc

SEQ ID NO: 519794 - DNA, 60 bp, Artificial
  Synthetic oligonucleotide
cgggcttgtgtttactgctcgcggtgtaatcaaagtgtactttaagtcagtgggcaatca

SEQ ID NO: 519795 - DNA, 60 bp, Artificial
  Synthetic oligonucleotide
tacttggtggttgctccaggcaacaacgttccgataaacattagggggtacttccgtttg

SEQ ID NO: 519796 - DNA, 60 bp, Artificial
  Synthetic oligonucleotide
cggcttgaatgttgcatgccaattggtgattgcatcatagtaagagttatctggattaca

SEQ ID NO: 519797 - DNA, 60 bp, Artificial
  Synthetic oligonucleotide
cggctaagggaagccgcaaggggcaacacaacatcccaagaatgagttttggaatatgca

SEQ ID NO: 519798 - DNA, 60 bp, Artificial
  Synthetic oligonucleotide
ggaccgacaattgcccgcaaggtcggaaagcacgcactcaagtacggataccgaaagctc

SEQ ID NO: 519799 - DNA, 60 bp, Artificial
  Synthetic oligonucleotide
cggagccatgctccgataacagagtgttcatcctgtgatggcatcccgaagggatccaca

SEQ ID NO: 519800 - DNA, 60 bp, Artificial
  Synthetic oligonucleotide
tataaatagcttcgtgtgtcaaatgacactgcggataggttaagaaaaggtggcgtcctt

SEQ ID NO: 519801 - DNA, 60 bp, Artificial
  Synthetic oligonucleotide
cggacagcgtctgaggtttcaattccagttgctgttagaagtggtattcctcctgtgatt

SEQ ID NO: 519802 - DNA, 60 bp, Artificial
  Synthetic oligonucleotide
tataagatggctgtgaagacgtgggttgctttggatggctcgatggtctctagggttgca

SEQ ID NO: 519803 - DNA, 60 bp, Artificial
  Synthetic oligonucleotide
tatagacgtggttggtcgtctacccaacgacgtggttattctcgacagtcattgatgaaa

SEQ ID NO: 519804 - DNA, 60 bp, Artificial
  Synthetic oligonucleotide
cgcgttgggggcgcactcacggattttaatattacccgtgagtgctctcttggccccacg

SEQ ID NO: 519805 - DNA, 60 bp, Artificial
  Synthetic oligonucleotide
tatcgtcaataatattgtacaaagcgtcgtctatgtatagactgaagtctactgattcac

SEQ ID NO: 519806 - DNA, 60 bp, Artificial
  Synthetic oligonucleotide
cgcggggtaattaaggtgtactttaagtctgtgggcaaccagtagcccagtgtaatgagc

SEQ ID NO: 519807 - DNA, 60 bp, Artificial
  Synthetic oligonucleotide
tatggtggctagggttgcaaagttcccagtccatttctggttagtgtacgacaagaaccc

SEQ ID NO: 519808 - DNA, 60 bp, Artificial
  Synthetic oligonucleotide
cgcagttggtctggcgtgttcatttgcgctttaccgtctgtgtgtgaaggaccttgttct

SEQ ID NO: 519809 - DNA, 60 bp, Artificial
  Synthetic oligonucleotide
tatgttggctgtgaagtttttgcaggctcttgtggatagttacagtccggatacgaaggg

SEQ ID NO: 519810 - DNA, 60 bp, Artificial
  Synthetic oligonucleotide
cgatcgaaaaccacatttaagcccgtccggatgtctccacacattcgatgaattgtttgg

SEQ ID NO: 519811 - DNA, 60 bp, Artificial
  Synthetic oligonucleotide
cgatagcccttcttatagggccggggggcattggtttccgtgtgggccggcccggtaaag

SEQ ID NO: 519812 - DNA, 60 bp, Artificial
  Synthetic oligonucleotide
cgagttgttctcagcggaagtctgagacatagcgtgtctgatgctaacactctctgggac

SEQ ID NO: 519813 - DNA, 60 bp, Artificial
  Synthetic oligonucleotide
ggagagtatgggcgaacaggcccatgtatcggaaaccagctctgtaccggaagtatacaa

SEQ ID NO: 519814 - DNA, 60 bp, Artificial
  Synthetic oligonucleotide
gctgtaggcgtaccgcccattcgaaagggaaactctttcgaaccatgctcagatattcgt

SEQ ID NO: 519815 - DNA, 60 bp, Artificial
  Synthetic oligonucleotide
gtttctgtggacgaccaacaaggcaggtgtgacctttacccctgggggtggtatgttcct

SEQ ID NO: 519816 - DNA, 60 bp, Artificial
  Synthetic oligonucleotide
ctgagccttgtcgttctaggtcatacattaaacttaggcgtttgcgatacaagggaactg

SEQ ID NO: 519817 - DNA, 60 bp, Artificial
  Synthetic oligonucleotide
ctgagatagggtttggtaatacccctctcagaagacctggtgaaggaaaccctaatggcg

SEQ ID NO: 519818 - DNA, 60 bp, Artificial
  Synthetic oligonucleotide
ctctctaaaactcctaagacatgcgtcgaaacgtttgcccaggccgtgggcttaaataga

SEQ ID NO: 519819 - DNA, 60 bp, Artificial
  Synthetic oligonucleotide
ctcgcatttacctaatgcgagtcttgcatcggtcttctgagactgccaataaatatgtac

SEQ ID NO: 519820 - DNA, 60 bp, Artificial
  Synthetic oligonucleotide
ctcctatgaggagaggcacgttcagtgactcgacgattcaggagcaataaatgtttcccc

SEQ ID NO: 519821 - DNA, 60 bp, Artificial
  Synthetic oligonucleotide
gggtggtacgcagtccggatccgtcggaatcggtaacgattccgcgtggagggcgctagc

SEQ ID NO: 519822 - DNA, 60 bp, Artificial
  Synthetic oligonucleotide
taaaaaaacctggtcatgtatgctggagtctaatggagttgaccctagtgctaaacaagg

SEQ ID NO: 519823 - DNA, 60 bp, Artificial
  Synthetic oligonucleotide
gggtgacatcggagacgtgtctaggggtgcgttgtacatcgtaatggctagaggcaatgc

SEQ ID NO: 519824 - DNA, 60 bp, Artificial
  Synthetic oligonucleotide
ctcaagtactgctgcaagagccagccagtgtgctggctcgtctacgataagtccccgact

SEQ ID NO: 519825 - DNA, 60 bp, Artificial
  Synthetic oligonucleotide
taacggattttggtgatatggcgctctggatattaggatgatgagccccgatatcaaaaa

SEQ ID NO: 519826 - DNA, 60 bp, Artificial
  Synthetic oligonucleotide
ctagccattggagttttgtggcccattcatgtggaaattcagttttaatcatttccaaat

SEQ ID NO: 519827 - DNA, 60 bp, Artificial
  Synthetic oligonucleotide
ctagatgcgtatgttatacgtataaatgatggtctgtattcccgactggttatttctact

SEQ ID NO: 519828 - DNA, 60 bp, Artificial
  Synthetic oligonucleotide
ggaaagaattactgcctctgccaggtatatccgagaaacagactgctttattgcgacagc

SEQ ID NO: 519829 - DNA, 60 bp, Artificial
  Synthetic oligonucleotide
ctagagtaaggtggttcaacatctggaaatagtttatttgcgctatattctagccattgg

SEQ ID NO: 519830 - DNA, 60 bp, Artificial
  Synthetic oligonucleotide
ctacggctgtcactcttcggctgggttcggaggtgcgttacccgtgacctctgcgcaagc

SEQ ID NO: 519831 - DNA, 60 bp, Artificial
  Synthetic oligonucleotide
taagcagtgtaacttcatctggctttgggcggaccgctgaggtcccgccacctgtccata

SEQ ID NO: 519832 - DNA, 60 bp, Artificial
  Synthetic oligonucleotide
taagggcggagccctgtatcttgttatggcccccgctaacgggcttgtgtttactgctcg

SEQ ID NO: 519833 - DNA, 60 bp, Artificial
  Synthetic oligonucleotide
ctaagaagacctatgtgagtcgcagcttggaggatattcactctgtgaaggaaatgtcca

SEQ ID NO: 519834 - DNA, 60 bp, Artificial
  Synthetic oligonucleotide
ctaaatatagacgtgatcagtctacttatcaacgtcgtcgttattcacgtaattacgtgt

SEQ ID NO: 519835 - DNA, 60 bp, Artificial
  Synthetic oligonucleotide
cgttgttgatgtgacgacacgtgttccatataagggcttattcgtcatatgaggtaatga

SEQ ID NO: 519836 - DNA, 60 bp, Artificial
  Synthetic oligonucleotide
taatcagactaccgatgacattagaatgtcacaacaacgtatacatgagaatcagtttgg

SEQ ID NO: 519837 - DNA, 60 bp, Artificial
  Synthetic oligonucleotide
taatggttatggatggcacatctcggacgttcctattggatcgggctttgaagataggca

SEQ ID NO: 519838 - DNA, 60 bp, Artificial
  Synthetic oligonucleotide
tacattattctgccagtagttgtgtcggcccagggaccttgcccatgtagattttccggt

SEQ ID NO: 519839 - DNA, 60 bp, Artificial
  Synthetic oligonucleotide
ccgcgtttacctttccacgtggcgtatgcagagtgggcgaacggttgagtggggaacacg

SEQ ID NO: 519840 - DNA, 60 bp, Artificial
  Synthetic oligonucleotide
gggctcgttgggcccccaccaccgaagcagactctcctgggtccaataagcttgttccaa

SEQ ID NO: 519841 - DNA, 60 bp, Artificial
  Synthetic oligonucleotide
tcgcccccctgccaaattactgatataccccttgtctttatgaaaagacgagccctgccc

SEQ ID NO: 519842 - DNA, 60 bp, Artificial
  Synthetic oligonucleotide
ccgatgagagcgtaatctagggttttgtggaacttggatttgaagaagtctagggcaaac

SEQ ID NO: 519843 - DNA, 60 bp, Artificial
  Synthetic oligonucleotide
ccgaaagctcactcagtctggaaagtctacccgtgagactgctcccctcacatacgataa

SEQ ID NO: 519844 - DNA, 60 bp, Artificial
  Synthetic oligonucleotide
ggagggcgaatagcccgctgacacgtggggcgcactcgcggaatttaatgttacccgcga

SEQ ID NO: 519845 - DNA, 60 bp, Artificial
  Synthetic oligonucleotide
tcgtggatagcttcacagccgtaggatgtgctttgagatccgaggttttgaaaaactctc

SEQ ID NO: 519846 - DNA, 60 bp, Artificial
  Synthetic oligonucleotide
tctacacttacgtggtatagatgttggtctctccattgtcttagatcttcatggcattga

SEQ ID NO: 519847 - DNA, 60 bp, Artificial
  Synthetic oligonucleotide
ccctagtagacataggacgcatagtctgtagtaaaacatgaagatgtggagtcccatcct

SEQ ID NO: 519848 - DNA, 60 bp, Artificial; identical to SEQ ID NO: 463187
  Synthetic oligonucleotide

SEQ ID NO: 519849 - DNA, 60 bp, Artificial
  Synthetic oligonucleotide
tctccgacgtcgaagaattttgcacttgtagtgcgtacgtatttggagcattgtattata

SEQ ID NO: 519850 - DNA, 60 bp, Artificial
  Synthetic oligonucleotide
tctcgatgtatgatttgacatctgacgagctcttagctccctgaatgtttggatggtaag

SEQ ID NO: 519851 - DNA, 60 bp, Artificial
  Synthetic oligonucleotide
tctctgggacttagccgcgtttccgtcggctcgagttttatcgatactctctcgatgcgc

SEQ ID NO: 519852 - DNA, 60 bp, Artificial
  Synthetic oligonucleotide
gggagtacctctggtactaagcggcgtaagaagccgcgaaccacgaagtggactggatcc

SEQ ID NO: 519853 - DNA, 60 bp, Artificial
  Synthetic oligonucleotide
tcttccgagactgcgagcccagctggtctttccggtacgagttggtccgcagatgtagag

SEQ ID NO: 519854 - DNA, 60 bp, Artificial
  Synthetic oligonucleotide
cccccaattctagcctatagttttggtggtattttggtactcagggcaaaatttgtattg

SEQ ID NO: 519855 - DNA, 60 bp, Artificial
  Synthetic oligonucleotide
cccatctgaacccatccgggagtctctatacatttgatgagttatttggtgctaggattc

SEQ ID NO: 519856 - DNA, 60 bp, Artificial
  Synthetic oligonucleotide
cccagagaaagtctctaagactttcggcatctgagctgcagcgaggataagtaaggaaga

SEQ ID NO: 519857 - DNA, 60 bp, Artificial
  Synthetic oligonucleotide
ccattccacgttgctgttgccaatactgtttggagagcgccctcccagtcgaagctctcc

SEQ ID NO: 519858 - DNA, 60 bp, Artificial
  Synthetic oligonucleotide
tgaaaggaaaaccactatataaaggagttgcttggcacgtaagaaaaggatgagataaga

SEQ ID NO: 519859 - DNA, 60 bp, Artificial
  Synthetic oligonucleotide
tgaacggagggcatatgcacgaagtggttgccgaacgcactcatgctctgggacttggtc

SEQ ID NO: 519860 - DNA, 60 bp, Artificial
  Synthetic oligonucleotide
tgaacttggcgaaatgcgtcctttgatgaacgttcgtgtccatcactctgtagtataact

SEQ ID NO: 519861 - DNA, 60 bp, Artificial
  Synthetic oligonucleotide
ccagccattatgctggctcgtatacgataagtccccgactgggattactgacctgacccc

SEQ ID NO: 519862 - DNA, 60 bp, Artificial
  Synthetic oligonucleotide
ccactcctccgttgaagtagttgtgtctgccgagactgcgggcccaagaggtcttaccgg

SEQ ID NO: 519863 - DNA, 60 bp, Artificial; identical to SEQ ID NO: 465786
  Synthetic oligonucleotide

SEQ ID NO: 519864 - DNA, 60 bp, Artificial
  Synthetic oligonucleotide
tattctaatattagcaagaacgccctcttagtttactattgttggatgtcggacgtcaca

SEQ ID NO: 519865 - DNA, 60 bp, Artificial
  Synthetic oligonucleotide
cgaccaatttgtctaatagacgttataatatgtggtctacatttaaggatctcgatcatg

SEQ ID NO: 519866 - DNA, 60 bp, Artificial
  Synthetic oligonucleotide
tatttctactcttcgtatttagtacgattcttcagtcgggaatttttttctatggtacct

SEQ ID NO: 519867 - DNA, 60 bp, Artificial
  Synthetic oligonucleotide
tcaaggaattggttatagccagaggtcaaacaacttgaccgttaccagacatttgaagtt

SEQ ID NO: 519868 - DNA, 60 bp, Artificial
  Synthetic oligonucleotide
cgaaatatgagaatcacactgagaatgcactgctcttgtatatggcatgtacgcatgctt

SEQ ID NO: 519869 - DNA, 60 bp, Artificial
  Synthetic oligonucleotide
cgaaaaccacatttaagctcatctggtagtctatacaccttcgatgagttatttggtgct

SEQ ID NO: 519870 - DNA, 60 bp, Artificial
  Synthetic oligonucleotide
cctggtcccccccactaataaaatgatgacgtgggcccttgtactccactcattttagtt

SEQ ID NO: 519871 - DNA, 60 bp, Artificial
  Synthetic oligonucleotide
tcagcccaacgaatacacgagaatcaattcgggcccgaatttgttatggcccataattca

SEQ ID NO: 519872 - DNA, 60 bp, Artificial
  Synthetic oligonucleotide
tcagggaacagggcatttgcactgtattggaattgctgtaggcgtaccgcccattcgaaa

SEQ ID NO: 519873 - DNA, 60 bp, Artificial
  Synthetic oligonucleotide
tcatagtaagagttatctggattacaaagaacaattgatgggatccctcctttgattttc

SEQ ID NO: 519874 - DNA, 60 bp, Artificial
  Synthetic oligonucleotide
tcatgtacggtagacctaacaatctcgttcaattccgctaacgaaattgaaatgttggag

SEQ ID NO: 519875 - DNA, 60 bp, Artificial
  Synthetic oligonucleotide
cctgacgtggcgcaatctgatccactccatcatgttatcttggaggctgtttaccgggtg

SEQ ID NO: 519876 - DNA, 60 bp, Artificial
  Synthetic oligonucleotide
cctgaatgttaggatggtaaccactaatatcaaagtggcgctgataacgcaagtctctcc

SEQ ID NO: 519877 - DNA, 60 bp, Artificial
  Synthetic oligonucleotide
cctctggtactaagcggcgtaagaagccgcgaaccacgaagtggactggatcccgcagcg

SEQ ID NO: 519878 - DNA, 60 bp, Artificial
  Synthetic oligonucleotide
tcattgtcagtcatcctcttgtcatgtatctccattatgactgagcctgtggcgttaatt

SEQ ID NO: 519879 - DNA, 60 bp, Artificial
  Synthetic oligonucleotide
cctattgcactccttgaggcccatgactctcctggccctatttctattgggccgttgtag

SEQ ID NO: 519880 - DNA, 60 bp, Artificial
  Synthetic oligonucleotide
cctatgaatttcaccagaaatagacgtggtttgacaactacttcgcgtagaagtagttat

SEQ ID NO: 519881 - DNA, 60 bp, Artificial
  Synthetic oligonucleotide
tcccctactgggattactgacctgaccccatcagacatcttcgatgtgccctcggggtta

SEQ ID NO: 519882 - DNA, 60 bp, Artificial
  Synthetic oligonucleotide
tccgcatatgtagagacttcttggtcggactggtctgttgtctggctcctagacaaatta

SEQ ID NO: 519883 - DNA, 60 bp, Artificial
  Synthetic oligonucleotide
ccgtacttggggtttaccgtcaggtcgtactggctgccgacgagtcccttccaacaaggg

SEQ ID NO: 519884 - DNA, 60 bp, Artificial
  Synthetic oligonucleotide
tccggtttaagcagtagtaacttcaattcgggctttgggcggaccggtgaggttccgcca

SEQ ID NO: 519885 - DNA, 60 bp, Artificial
  Synthetic oligonucleotide
ccgggctagcttccacaagttcgttaagcggttaggcgtacgaactgagtggaagaactc

SEQ ID NO: 519886 - DNA, 60 bp, Artificial
  Synthetic oligonucleotide
ccggacgtttaggagcccagacgtccctcgtggatgtgaaggcccatgtaaggtccagtc

SEQ ID NO: 519887 - DNA, 60 bp, Artificial
  Synthetic oligonucleotide
tcctgggcctgtgtatcagtggaggcatgttactaagttttttaaacgtttaggggttag

SEQ ID NO: 519888 - DNA, 60 bp, Artificial
  Synthetic oligonucleotide
tccttgttgccacgtggggcgcactcgcggaaattaatgttacccgcgagtgccctggcc

SEQ ID NO: 519889 - DNA, 60 bp, Artificial
  Synthetic oligonucleotide
gattatggaaggtattccgttaggaagaaggcgtttcttcccgtactttggatttacggt

SEQ ID NO: 519890 - DNA, 60 bp, Artificial
  Synthetic oligonucleotide
gattatgcatggaatgccatttgatagcagccgtttcttgccatacttcggatttactgt

SEQ ID NO: 519891 - DNA, 60 bp, Artificial
  Synthetic oligonucleotide
gatgttgtactggttgttgaatggtgtttggtcgtactgtgttaccctcatgtgtagtgg

SEQ ID NO: 519892 - DNA, 60 bp, Artificial
  Synthetic oligonucleotide
gatgcgtccccaacaggttctgctgttaccccgaaggacatcttcgggtacccggaagga

SEQ ID NO: 519893 - DNA, 60 bp, Artificial
  Synthetic oligonucleotide
gatgcagcgcatccctcatctccgaatccgcatcggaatgggctgagtcgatagcactcc

SEQ ID NO: 519894 - DNA, 60 bp, Artificial
  Synthetic oligonucleotide
gtcatgtaatgaattaaacaattggattcaaagtattcattctgagaggaagacatgtct

SEQ ID NO: 519895 - DNA, 60 bp, Artificial
  Synthetic oligonucleotide
gatcagcctgggacttggactgtaacgaggaatgtgtgtcataggttcgtcgttaaaaag

SEQ ID NO: 519896 - DNA, 60 bp, Artificial
  Synthetic oligonucleotide
gatagcagccgtttcttgccatacttcggatttactgtaatgtccttttggcttccaact

SEQ ID NO: 519897 - DNA, 60 bp, Artificial
  Synthetic oligonucleotide
gatactcctccttgctcttggagcttctgatgatatccgccattttggcgtcctttgttg

SEQ ID NO: 519898 - DNA, 60 bp, Artificial
  Synthetic oligonucleotide
gtcccctgcggtgcgatctgccctgccatgctttggcggctttataaagccgttctcaga

SEQ ID NO: 519899 - DNA, 60 bp, Artificial
  Synthetic oligonucleotide
gagttccttcggtgttggagttgttcgggttcctggtaaaatggtccatccatatcaaat

SEQ ID NO: 519900 - DNA, 60 bp, Artificial
  Synthetic oligonucleotide
gagtggtacccaatatgttctgaccaacaatagttccaaggtgtcgtacataacatatcc

SEQ ID NO: 519901 - DNA, 60 bp, Artificial
  Synthetic oligonucleotide
gagtgcgaacggagtggaaggacacaacgacagcggaagcgtcggacatcaagggcgggg

SEQ ID NO: 519902 - DNA, 60 bp, Artificial
  Synthetic oligonucleotide
gagtctaatggagttgaccctaatgctaaacaagggtcttcttactatggtcctgggcct

SEQ ID NO: 519903 - DNA, 60 bp, Artificial
  Synthetic oligonucleotide
gaggttgatacagaccgtattaactttctctcccatttaccgtaaccaacgtgtgagaaa

SEQ ID NO: 519904 - DNA, 60 bp, Artificial
  Synthetic oligonucleotide
gaggtaatgaccaactttagttttgcacgtggcgcgttctacaatgttgcatttaatttg

SEQ ID NO: 519905 - DNA, 60 bp, Artificial
  Synthetic oligonucleotide
gtcgattttcatacatcgacgcatgagtctaaccctagtttgttctagggttgatgggaa

SEQ ID NO: 519906 - DNA, 60 bp, Artificial
  Synthetic oligonucleotide
gaggcaatgcctggagttacgaagttagggggcgtataagagtgtatttcaaatcagtcg

SEQ ID NO: 519907 - DNA, 60 bp, Artificial
  Synthetic oligonucleotide
ggtcagacatgtcccttgacgcgtatggcgcggagtaggtttgaggagggtcagggaaca

SEQ ID NO: 519908 - DNA, 60 bp, Artificial
  Synthetic oligonucleotide
gtctcatcgatgagacccgttcgccctttcgttgcagtaatgaagtatacatggacaccc

SEQ ID NO: 519909 - DNA, 60 bp, Artificial
  Synthetic oligonucleotide
gtctgagaataattactcttatacccccgttcagacgcaggagtcgctctcaggtgtgaa

SEQ ID NO: 519910 - DNA, 60 bp, Artificial
  Synthetic oligonucleotide
gtctgtattcccgactggttatttctacttttcgtatttagtacgattcttcagtcggga

SEQ ID NO: 519911 - DNA, 60 bp, Artificial
  Synthetic oligonucleotide
gagccctttacatagttcttgccccggctaacggggttgttttcaccgcccgcggggtaa

SEQ ID NO: 519912 - DNA, 60 bp, Artificial
  Synthetic oligonucleotide
gagccataacacggccctgtccacattcatcacgttccccagtctaggaagaaatggatc

SEQ ID NO: 519913 - DNA, 60 bp, Artificial
  Synthetic oligonucleotide
gagcagttagttaatcaaccagggcgtcctgtttctaacaggcgtcctgctctacaggtc

SEQ ID NO: 519914 - DNA, 60 bp, Artificial
  Synthetic oligonucleotide
ggtgtaccccgattgagctctcgctcataagtctctatgaattggggtaaaggggacaat

SEQ ID NO: 519915 - DNA, 60 bp, Artificial
  Synthetic oligonucleotide
gcgcccgcctgacgtattgaggtttgcccgccgctctaatttgagtgccgtctttataag

SEQ ID NO: 519916 - DNA, 60 bp, Artificial
  Synthetic oligonucleotide
ggtgtatcaggctttgggagttaaatctcagcgggagttggagcagttagttacccaccc

SEQ ID NO: 519917 - DNA, 60 bp, Artificial
  Synthetic oligonucleotide
gcgcgtgtggtcccctgatgacatggcaataacgaaggccaatgggagtggcgctgattg

SEQ ID NO: 519918 - DNA, 60 bp, Artificial
  Synthetic oligonucleotide
gcgctaggaggagcaatcaactgagaactcatattaaatatcctggccgcgcagcggaat

SEQ ID NO: 519919 - DNA, 60 bp, Artificial
  Synthetic oligonucleotide
gcgagatcgcttccaggtgctacggaagttctatgctactgtcactggtggtccttcggg

SEQ ID NO: 519920 - DNA, 60 bp, Artificial
  Synthetic oligonucleotide
gtaaggggatacatatggtgttatctttggtgcaaaaatgtgattagcattagcagatat

SEQ ID NO: 519921 - DNA, 60 bp, Artificial
  Synthetic oligonucleotide
gcgctgattgggcaatttagaggtgtacgagctgggaccacatgcaattgcgacatgaca

SEQ ID NO: 519922 - DNA, 60 bp, Artificial
  Synthetic oligonucleotide
gccttagtgtcgtacgtggtgaagtccactcctccgttaaagtagttgtgtcttccgaga

SEQ ID NO: 519923 - DNA, 60 bp, Artificial
  Synthetic oligonucleotide
gcctatagttttggtggtattttggtactcagggcaaaatttgtattgaagtgccattaa

SEQ ID NO: 519924 - DNA, 60 bp, Artificial
  Synthetic oligonucleotide
gtacgataccggagatttcttgcagtatgcaaggactttgtggggcatccttgcgttttg

SEQ ID NO: 519925 - DNA, 60 bp, Artificial
  Synthetic oligonucleotide
gccgagactgcgagcccaggatgtcttaccggtacgagttggtccgcagatgtagaggga

SEQ ID NO: 519926 - DNA, 60 bp, Artificial
  Synthetic oligonucleotide
gtagacggcgtgttattaaccctaataggtcaagtgacgataacaacatgtcaccgtatc

SEQ ID NO: 519927 - DNA, 60 bp, Artificial
  Synthetic oligonucleotide
gtaggtttgaggagggtcagggaacagggcatttgcactgtactggaattgctgtaggcg

SEQ ID NO: 519928 - DNA, 60 bp, Artificial
  Synthetic oligonucleotide
gcattgcgatgaacgcgtagcgttacaaattacaatacatagcgcagcctcgggctaaag

SEQ ID NO: 519929 - DNA, 60 bp, Artificial
  Synthetic oligonucleotide
gtattcacagtcatggcaatttagccataagtcctgctttgaaggatcgtttttacatac

SEQ ID NO: 519930 - DNA, 60 bp, Artificial
  Synthetic oligonucleotide
gtattcgaactgggctagtctagtagcccactcaaacgggaaggactttcggaccatccc

SEQ ID NO: 519931 - DNA, 60 bp, Artificial
  Synthetic oligonucleotide
gcagactcatttgatgtctactggtactgattatggaggaaagcagacctataaagcgcc

SEQ ID NO: 519932 - DNA, 60 bp, Artificial
  Synthetic oligonucleotide
gtatttaattgtggatggagagggcgaatagcccgctgacacaccgtgggggcgcactcg

SEQ ID NO: 519933 - DNA, 60 bp, Artificial
  Synthetic oligonucleotide
gtcacattttaacaccatgggccattatttgttaagctgacatctttaactccattgtac

SEQ ID NO: 519934 - DNA, 60 bp, Artificial
  Synthetic oligonucleotide
gcaataatgtatcctttaaagtacagacgtggctggtcgtctagtcaacgacgagggtat

SEQ ID NO: 519935 - DNA, 60 bp, Artificial
  Synthetic oligonucleotide
gcaaatggtaagagccatccttgtgctcttcccttgcgacgtatgaatacgtcgggtccc

SEQ ID NO: 519936 - DNA, 60 bp, Artificial
  Synthetic oligonucleotide
gattgggcaatttagaggtgaacgagttgggaccacatgcaattgcgacatgacatattt

SEQ ID NO: 519937 - DNA, 60 bp, Artificial
  Synthetic oligonucleotide
gattggacttgtgatatcgagtcacccgggtccaatgccgatgggtctagtttatttagt

SEQ ID NO: 519938 - DNA, 60 bp, Artificial
  Synthetic oligonucleotide
gattgagctctcgctcataagtctctatgaattggggtaaaggggacaatatatagtata

SEQ ID NO: 519939 - DNA, 60 bp, Artificial
  Synthetic oligonucleotide
gtggttcgttgcttaagtgatgttactcgtggacctggtattactcatcgtgtggggaaa

SEQ ID NO: 519940 - DNA, 60 bp, Artificial
  Synthetic oligonucleotide
gtgtatgacaagacgcctactgggattactgacctgaccccgtcagacatcttcgatgtg

SEQ ID NO: 519941 - DNA, 60 bp, Artificial
  Synthetic oligonucleotide
gaaggaacgttattatattcgttatgtttataaacgtgttctctctgtggagaaggatag

SEQ ID NO: 519942 - DNA, 60 bp, Artificial
  Synthetic oligonucleotide
gaagctaaagtggccgcatatatgttttttagttagggtatattattaatggaggatcga

SEQ ID NO: 519943 - DNA, 60 bp, Artificial
  Synthetic oligonucleotide
gttaactgtaaactgtttagacattatctttacggtgggtgccctgaacggtatgtcgac

SEQ ID NO: 519944 - DNA, 60 bp, Artificial
  Synthetic oligonucleotide
gttacagatgaggacttctcaacagggacagaacacgtcatgctggcataacgtgtattt

SEQ ID NO: 519945 - DNA, 60 bp, Artificial
  Synthetic oligonucleotide
gaaagttctgtactctgatatagttaggcttagctccaatgtgagtcagtgtgcgtacca

SEQ ID NO: 519946 - DNA, 60 bp, Artificial
  Synthetic oligonucleotide
gaaaatacgagaatattaaatgtggtataaggaaaattgaagagctaagtctttatgaaa

SEQ ID NO: 519947 - DNA, 60 bp, Artificial
  Synthetic oligonucleotide
cttttgctcatgagccactcttagtgctatataaaggtgatgtgatctctccactttgaa

SEQ ID NO: 519948 - DNA, 60 bp, Artificial
  Synthetic oligonucleotide
cttgtcgttctaggtcatacattaaacttaggcgtttgcgatacaagggaactgttaaga

SEQ ID NO: 519949 - DNA, 60 bp, Artificial
  Synthetic oligonucleotide
gttcccattgacgtcgagtttcttgtcacactggataatacagtgtgtgtggaatcctct

SEQ ID NO: 519950 - DNA, 60 bp, Artificial
  Synthetic oligonucleotide
cttggcaaaatgcgtcatctgatgaacattcgagtcacatactctgtaatatagtttcca

SEQ ID NO: 519951 - DNA, 60 bp, Artificial
  Synthetic oligonucleotide
cttgcccaagtggtcttaccggtacgagttggtccgcagatgtagagggatcttcttctg

SEQ ID NO: 519952 - DNA, 60 bp, Artificial
  Synthetic oligonucleotide
gttggatgtctgatactgtgtctaaggcatctacttttgtatcgtttgatctggattata

SEQ ID NO: 519953 - DNA, 60 bp, Artificial
  Synthetic oligonucleotide
gttgtatgatatagatgttcgtggaagactgagggtgtattttaagagtgttggtaacca

SEQ ID NO: 519954 - DNA, 60 bp, Artificial
  Synthetic oligonucleotide
cttccctctgtgtacgttctggtcaaaaagactagtatacccctgctggtgaaagtacta

SEQ ID NO: 519955 - DNA, 60 bp, Artificial
  Synthetic oligonucleotide
gctgaccttgtcccctcggacattttcgatgtgccgagtggattgaccaattggccttgt

SEQ ID NO: 519956 - DNA, 60 bp, Artificial
  Synthetic oligonucleotide
gggttaaccgtaaggtcatactggctgccgactagtcccttccaacaagggacgaacttg

SEQ ID NO: 519957 - DNA, 60 bp, Artificial
  Synthetic oligonucleotide
ctgtctgtaacacagacaaccttgtctctgtaactcggttcgccaagggacttggtgtgc

SEQ ID NO: 519958 - DNA, 60 bp, Artificial
  Synthetic oligonucleotide
ctgtaggcacaccaaccggacaataacctacaagatggctgtgaagacgtgggttgcttt

SEQ ID NO: 519959 - DNA, 60 bp, Artificial
  Synthetic oligonucleotide
ctgtaacacagacaacctagtgtctgtaacgaggttcgccaagggacttggagtgcgaac

SEQ ID NO: 519960 - DNA, 60 bp, Artificial
  Synthetic oligonucleotide
gtttaactgggacatggacatggttatgttggattgtgttctctggagtccaacgactga

SEQ ID NO: 519961 - DNA, 60 bp, Artificial
  Synthetic oligonucleotide
ctggatgggtctatggtggctagggttgcaaagttcccagtccatttctggttagtgtac

SEQ ID NO: 519962 - DNA, 60 bp, Artificial
  Synthetic oligonucleotide
ctgctgtagaaggaaactgcaagacgatctcagttaggtcatgagacagctgatactcat

SEQ ID NO: 519963 - DNA, 60 bp, Artificial
  Synthetic oligonucleotide
ctgcgcaagctagtgctgctaccagcacccctgtgtgtgttccctgtgctcctcaggtac

SEQ ID NO: 519964 - DNA, 60 bp, Artificial
  Synthetic oligonucleotide
gcgtgcctctttttgaccagtcaattatatttatatggtgtacagagggtgttacgtgga

SEQ ID NO: 519965 - DNA, 60 bp, Artificial
  Synthetic oligonucleotide
gagaagtgagctccctcctgttgcgttatataatacaaatggacggctgtgatttatcca

SEQ ID NO: 519966 - DNA, 60 bp, Artificial
  Synthetic oligonucleotide
gtcttaccggtacgagttggtccgcagatgtagagggagttccttcggtgttggagttgt

SEQ ID NO: 519967 - DNA, 60 bp, Artificial
  Synthetic oligonucleotide
gactgcccacttcactgtagactctctcactgacaggtgaggacatctcgtcagaagcta

SEQ ID NO: 519968 - DNA, 60 bp, Artificial
  Synthetic oligonucleotide
gtcttccgaggcttcttgcccaagttgtcttaccggtacgatttggtccgcagatgtaga

SEQ ID NO: 519969 - DNA, 60 bp, Artificial
  Synthetic oligonucleotide
gacgtgtttaataaaatgcgtcagtatgacgcttgattacataacagcacactcgaaccg

SEQ ID NO: 519970 - DNA, 60 bp, Artificial
  Synthetic oligonucleotide
gtgagagtttgtcccagagaaagtctctgaggcttgttgcagtagagctgcaatggggat

SEQ ID NO: 519971 - DNA, 60 bp, Artificial
  Synthetic oligonucleotide
gacggagcctgttgcgttaattggaacctgctgcctgtactcgataacgcaatggtcgat

SEQ ID NO: 519972 - DNA, 60 bp, Artificial
  Synthetic oligonucleotide
gacgctctgccgagtactcgaactgttgtagtttagtagcccactcaaaagggaaggcct

SEQ ID NO: 519973 - DNA, 60 bp, Artificial
  Synthetic oligonucleotide
ggtatttatttgcattgagggcgaatagcccgctgacacgtggggcgcactcgcggaatt

SEQ ID NO: 519974 - DNA, 60 bp, Artificial
  Synthetic oligonucleotide
ggtataggtgacgtgtctaagggagcactctatattgttgttgctaggcagttgtatgat

SEQ ID NO: 519975 - DNA, 60 bp, Artificial
  Synthetic oligonucleotide
gtgcgtaccactcggcaatgctgtataccccggacgcacgtgttactgatttgtcagctg

SEQ ID NO: 519976 - DNA, 60 bp, Artificial
  Synthetic oligonucleotide
gaccgagtggaaggatacggtgtctgcggaggcctccgacattaagggtggagcccttta

SEQ ID NO: 519977 - DNA, 60 bp, Artificial
  Synthetic oligonucleotide
gaccacatttaagccccaccgggtgcctgcatacgttcgacgagctattcggtgccagga

SEQ ID NO: 519978 - DNA, 60 bp, Artificial
  Synthetic oligonucleotide
gaccaatataccctcgtctttattaaaagacgcgcccactccgcaattctgacgtggctc

SEQ ID NO: 519979 - DNA, 60 bp, Artificial
  Synthetic oligonucleotide
gtgcttgttcctccgaaatacctgcatgcagactgagggcttgaggacttacagtataca

SEQ ID NO: 519980 - DNA, 60 bp, Artificial
  Synthetic oligonucleotide
ggtaaagttgaaccgaatcgatcaaagggatttattaagttaaaacgtttacggtttaag

SEQ ID NO: 519981 - DNA, 60 bp, Artificial
  Synthetic oligonucleotide
gtggaccttcggcttgtaaagagcaggcattagttcgtaggttttttacaattaatcaca

SEQ ID NO: 519982 - DNA, 60 bp, Artificial
  Synthetic oligonucleotide
ggtaaaactgactccagtcgatcaaggtcgtatattaagttaaaacgtctacgttttaag

SEQ ID NO: 519983 - DNA, 60 bp, Artificial
  Synthetic oligonucleotide
gacaccttacaaacaatacacactatataccctcctatgaggagaggcacgttcagtgac

SEQ ID NO: 519984 - DNA, 60 bp, Artificial
  Synthetic oligonucleotide
gacacagtggtcaatcttcatacagctacgatttagtcttgcgctaagttgagacgccgt

SEQ ID NO: 519985 - DNA, 60 bp, Artificial
  Synthetic oligonucleotide
gtgggccccacttggtggattacacgtggcactgtacgctccacgtggtccccccctgtc

SEQ ID NO: 519986 - DNA, 60 bp, Artificial
  Synthetic oligonucleotide
gacaatttcatttaattgggccattgaaatagttaaattcgattgggctcgttgggcccc

SEQ ID NO: 519987 - DNA, 60 bp, Artificial
  Synthetic oligonucleotide
gacaattgatattcatctctgtgagactctatataattaaatgcactaggaggatttgcc

SEQ ID NO: 519988 - DNA, 60 bp, Artificial
  Synthetic oligonucleotide
gctagccgacaaagtgggacccactcacgtgattagcacttgccttgtaccttccctctg

SEQ ID NO: 519989 - DNA, 60 bp, Artificial
  Synthetic oligonucleotide
gctcaaacagtgtttttgcaaactctatcgttaacccgtgagtgagccaactgagccaaa

SEQ ID NO: 519990 - DNA, 60 bp, Artificial
  Synthetic oligonucleotide
aggtagctggtaccgacgggcaaatactccgatgtataccaggcggagattttcatccgt

SEQ ID NO: 519991 - DNA, 60 bp, Artificial
  Synthetic oligonucleotide
ttatggcccataattcacccatttcaactttcattacataccctactctgggtaaaactg

SEQ ID NO: 519992 - DNA, 60 bp, Artificial
  Synthetic oligonucleotide
aggggacaatatatagtataagttcctaagggcttaagggacacgtgtaggccatccgtt

SEQ ID NO: 519993 - DNA, 60 bp, Artificial
  Synthetic oligonucleotide
agggcccatgctcaacgggtcccgagcggctttggctttcacctgggattgtcccctgcg

SEQ ID NO: 519994 - DNA, 60 bp, Artificial
  Synthetic oligonucleotide
ttcagggaagagcttcgaggcactatactcgaagttgtatagtttagtggcccagtcata

SEQ ID NO: 519995 - DNA, 60 bp, Artificial
  Synthetic oligonucleotide
aggattttgttttctggggggctgaaagcatattaaagcgcaagtaccgtacgatgaaac

SEQ ID NO: 519996 - DNA, 60 bp, Artificial
  Synthetic oligonucleotide
ttcatagtttaaatagacaagtttctatacgtataactcggtaaagtaatcatagttatg

SEQ ID NO: 519997 - DNA, 60 bp, Artificial
  Synthetic oligonucleotide
ggattcattgtccgtcatccttttgtcgtgaatctccactattacagttccagcagcgtt

SEQ ID NO: 519998 - DNA, 60 bp, Artificial
  Synthetic oligonucleotide
aggatgcagccacagtgcatacacgaggatcaatttggtccagagttcgttatggggcat

SEQ ID NO: 519999 - DNA, 60 bp, Artificial
  Synthetic oligonucleotide
aggacttacagtatacagctcctgctggagccattcacctatgaccggatggtcagacat

SEQ ID NO: 520000 - DNA, 60 bp, Artificial
  Synthetic oligonucleotide
aggacgtgcgatacttctcacggcctttacgcgtggttctgccgagaaccaacgcaaatc

SEQ ID NO: 520001 - DNA, 60 bp, Artificial
  Synthetic oligonucleotide
agctttcacccgagtacatgtaatgtacgactgcgttagcattgaaccattcagcctgat

SEQ ID NO: 520002 - DNA, 60 bp, Artificial
  Synthetic oligonucleotide
agcttacccttgaattttgcgaagtgggttgcttggtgaacatttgaatcgctaaccctg

SEQ ID NO: 520003 - DNA, 60 bp, Artificial
  Synthetic oligonucleotide
agctgagtactgaaactgctgcaaccttgttgcccattcgaatgggaatgctttccttac

SEQ ID NO: 520004 - DNA, 60 bp, Artificial
  Synthetic oligonucleotide
agcgttattgctaagcagtatctcacgctggataaaattcagcgttgggagatgcctgcc

SEQ ID NO: 520005 - DNA, 60 bp, Artificial
  Synthetic oligonucleotide
agcgtaagtgttgtttgtacgaggacatatacaagaagtatggcggttcagagtcaaaag

SEQ ID NO: 520006 - DNA, 60 bp, Artificial
  Synthetic oligonucleotide
agcgatacttgactggcaatttgaatttgagcatggcgcctctctttgtggtcacggacc

SEQ ID NO: 520007 - DNA, 60 bp, Artificial
  Synthetic oligonucleotide
ggattttaatattacccgtgagtgctctcttggccccacgcgaggcctttaggccgagcg

SEQ ID NO: 520008 - DNA, 60 bp, Artificial
  Synthetic oligonucleotide
ttcccctgggtccaggattggtgtacccaatctgtctaggtgcctgtatggatgcagcgc

SEQ ID NO: 520009 - DNA, 60 bp, Artificial
  Synthetic oligonucleotide
agatgtagagggagttccttcggtgttggagttgttcgggttccttgtaaaatggtccat

SEQ ID NO: 520010 - DNA, 60 bp, Artificial
  Synthetic oligonucleotide
ggcaaaaaaacagaggacgacgactgagatagggtttggtaatacacccgctaggaggca

SEQ ID NO: 520011 - DNA, 60 bp, Artificial
  Synthetic oligonucleotide
agagggagcactatatcttgtatgtgctccgtcaggtggtgcaaccattaaggttggggg

SEQ ID NO: 520012 - DNA, 60 bp, Artificial
  Synthetic oligonucleotide
agagccagccgatatgctggctcgtgtacgataagacgcctactgggattgctgaccttg

SEQ ID NO: 520013 - DNA, 60 bp, Artificial
  Synthetic oligonucleotide
agacgtccgtcattgcaggtcgcagagtatctgtggacgaccaacaaagctggtgtgacg

SEQ ID NO: 520014 - DNA, 60 bp, Artificial
  Synthetic oligonucleotide
agaccttccaatatgctgaggatcaggcatttaatgcaggaggacgtgcgctgttgctca

SEQ ID NO: 520015 - DNA, 60 bp, Artificial
  Synthetic oligonucleotide
atcctcttgtcgtgaatctccattatgactgagcctgtggcgttaattggcacttgctgc

SEQ ID NO: 520016 - DNA, 60 bp, Artificial
  Synthetic oligonucleotide
atcattacactctatataccctcctatgaggagaggcacgttcagtgactcgacgattca

SEQ ID NO: 520017 - DNA, 60 bp, Artificial
  Synthetic oligonucleotide
atatggccttctcgtctcccgtatccaatgtacgccggcgtctcaacttcgggagtcctc

SEQ ID NO: 520018 - DNA, 60 bp, Artificial
  Synthetic oligonucleotide
ggatgtgagggaatacaattggtgtttatacattcttgtactgttgatctaactatttcg

SEQ ID NO: 520019 - DNA, 60 bp, Artificial
  Synthetic oligonucleotide
tgtgttagtgatgttacccgtggttctggtattacccatcgggtaggtaagcgtttttgc

SEQ ID NO: 520020 - DNA, 60 bp, Artificial
  Synthetic oligonucleotide
ataatggagttatttttcaatagaccacgctgtttattatggcgtgtgtatgatcaagtt

SEQ ID NO: 520021 - DNA, 60 bp, Artificial
  Synthetic oligonucleotide
ttacaaagcttcgaagaagctttcaccctcgtacatgtaatgtacgactgcgttagcatt

SEQ ID NO: 520022 - DNA, 60 bp, Artificial
  Synthetic oligonucleotide
ataaggcttgatcgtatgggacggggtgaatataagtgtaggcgtctatacttacatggt

SEQ ID NO: 520023 - DNA, 60 bp, Artificial
  Synthetic oligonucleotide
ttacaagacgtgcattgcggaattcattacgcaataccgtttatccggtttaagcagtgt

SEQ ID NO: 520024 - DNA, 60 bp, Artificial
  Synthetic oligonucleotide
ttaccatcgctcccggtaatacagtgtccatgacactcaaggattcgcgtaataaggtag

SEQ ID NO: 520025 - DNA, 60 bp, Artificial
  Synthetic oligonucleotide
ttacccacccaggacgtcttgttccgaacagacgtccgtcattgcaggtcgcagagtatc

SEQ ID NO: 520026 - DNA, 60 bp, Artificial
  Synthetic oligonucleotide
ggattcacagtcatggtaatttagccatatcaccgtcccttaaagaccgtttttatatac

SEQ ID NO: 520027 - DNA, 60 bp, Artificial
  Synthetic oligonucleotide
ttaccggtacgagttggtccgcagatgtagagggatttccggcgccctgctccgtcctag

SEQ ID NO: 520028 - DNA, 60 bp, Artificial
  Synthetic oligonucleotide
ttactgctcgcggtgtaatcaaggtgtactttaagtcagtgggcaaccagtagcccattt

SEQ ID NO: 520029 - DNA, 60 bp, Artificial
  Synthetic oligonucleotide
ttatatggtatgtagtgtggtctatatcgtatagagaccaatctaataccatgccagaca

SEQ ID NO: 520030 - DNA, 60 bp, Artificial
  Synthetic oligonucleotide
agtgataacagcggaagcatgattgagacattgacgaggaatcgtttgaatcgtaagaga

SEQ ID NO: 520031 - DNA, 60 bp, Artificial
  Synthetic oligonucleotide
agtcttcatcctcgtttacgaggattatacatggaatgccatttgatagcagccgtttct

SEQ ID NO: 520032 - DNA, 60 bp, Artificial
  Synthetic oligonucleotide
agtcgagtgcttagcagatgatagtcttagtttagccttgattgaggcgaatttaacacc

SEQ ID NO: 520033 - DNA, 60 bp, Artificial
  Synthetic oligonucleotide
agtcgaatatgtataattcgcgaaacaaacgtggtgctactactacttcgagacgaagtt

SEQ ID NO: 520034 - DNA, 60 bp, Artificial
  Synthetic oligonucleotide
agtcccaatgcttgcctcaggttgtggttgaatctgatctgcaggtgtatgatgttgtac

SEQ ID NO: 520035 - DNA, 60 bp, Artificial
  Synthetic oligonucleotide
ttatcatgcaacgggagtacgttccagaaggactacacaaacctgcctgtctgtaacaca

SEQ ID NO: 520036 - DNA, 60 bp, Artificial
  Synthetic oligonucleotide
agtcagaggtagcttcaacaagtgtgacgttatgaattaggcggtaagcatctacactta

SEQ ID NO: 520037 - DNA, 60 bp, Artificial
  Synthetic oligonucleotide
aggttgtgaagtcgattcctccgttgaagtaattgtgtcttccgaggcttcttgcccaag

SEQ ID NO: 520038 - DNA, 60 bp, Artificial
  Synthetic oligonucleotide
aggttcctggatacgtcgtccatccaaactaagtcagaggtagcttcaataagggtgacg

SEQ ID NO: 520039 - DNA, 60 bp, Artificial
  Synthetic oligonucleotide
ttatgaaagaacccagccgcgaagcggctggctgaccttttatttatcagtacaacggtc

SEQ ID NO: 520040 - DNA, 60 bp, Artificial
  Synthetic oligonucleotide
acattgtattgggcctcctggtcgtatgtggcccaatccacctgcatattgtagtagtta

SEQ ID NO: 520041 - DNA, 60 bp, Artificial
  Synthetic oligonucleotide
ttgctgaagcttaaggttagttttaagcgtaagtgttgtttgtacgaggacatatacaag

SEQ ID NO: 520042 - DNA, 60 bp, Artificial
  Synthetic oligonucleotide
acataaagagcggagctctttacctagtcatggctccggctaacggagctgtctttgtag

SEQ ID NO: 520043 - DNA, 60 bp, Artificial
  Synthetic oligonucleotide
acagcccgtggtgtaatcaagtgctactttaagtctgtgggtaatcagtagcccactgta

SEQ ID NO: 520044 - DNA, 60 bp, Artificial
  Synthetic oligonucleotide
acagacaacctggtgtccgtgaaccggttcgccaagggattaggagtgcggaccgagtgg

SEQ ID NO: 520045 - DNA, 60 bp, Artificial
  Synthetic oligonucleotide
acacactaaccggaccataacgtacaagatggctatcaagtgttgggttgccctggatgg

SEQ ID NO: 520046 - DNA, 60 bp, Artificial
  Synthetic oligonucleotide
aattgtgtgtacccccattgagttcccgctcataagtccttatgtattgtgttaatgttt

SEQ ID NO: 520047 - DNA, 60 bp, Artificial
  Synthetic oligonucleotide
aatgttggagcgtgttctctctgctcctgtaaccgatgctgaatcccctggatctaatac

SEQ ID NO: 520048 - DNA, 60 bp, Artificial
  Synthetic oligonucleotide
aatattttaactgttggagccctgaaagggatatcaaccgaatgctttgctgtggagagc

SEQ ID NO: 520049 - DNA, 60 bp, Artificial
  Synthetic oligonucleotide
ttggtgtatgatagtcagcccagcggtaccctgccggctgcgcatgggatctttgatctc

SEQ ID NO: 520050 - DNA, 60 bp, Artificial
  Synthetic oligonucleotide
aataaagggatgagacccaatagagaggacccgatagctctcgtttcaacttggtgaaat

SEQ ID NO: 520051 - DNA, 60 bp, Artificial
  Synthetic oligonucleotide
aagggcggagccctctaccttgtggtagcccccgctaacgggctagtgttcacagcccgt

SEQ ID NO: 520052 - DNA, 60 bp, Artificial
  Synthetic oligonucleotide
aaggattgctccccgcattacgataaatggatttgactgccgctttactttgaacgatgt

SEQ ID NO: 520053 - DNA, 60 bp, Artificial
  Synthetic oligonucleotide
aagcgagtgatggcattctcgtaaataagaggttgtcaccaattggggtctcgctcaaac

SEQ ID NO: 520054 - DNA, 60 bp, Artificial
  Synthetic oligonucleotide
ttgtggatgcggacttgatcaatttccgttcataatgaccatatcccacatgagaaaaat

SEQ ID NO: 520055 - DNA, 60 bp, Artificial; identical to SEQ ID NO: 301574
  Synthetic oligonucleotide

SEQ ID NO: 520056 - DNA, 60 bp, Artificial
  Synthetic oligonucleotide
ggccaagaagcagagaaccacaactgagatagggtttggaaatacccctgcacgacctaa

SEQ ID NO: 520057 - DNA, 60 bp, Artificial; identical to SEQ ID NO: 300312
  Synthetic oligonucleotide

SEQ ID NO: 520058 - DNA, 60 bp, Artificial
  Synthetic oligonucleotide
aaatgagaatcagtttgggcctgaatttgctatggcccataacacgtctatatccacatt

SEQ ID NO: 520059 - DNA, 60 bp, Artificial
  Synthetic oligonucleotide
aaatcagtcgggaatcagtgatgtaagaactcctggcttgtaatgaataagacgtgttta

SEQ ID NO: 520060 - DNA, 60 bp, Artificial
  Synthetic oligonucleotide
ttgtgtttacagcccgcggtgtaatcaaggtgtactttaagtcagtgggcaatcagtagc

SEQ ID NO: 520061 - DNA, 60 bp, Artificial
  Synthetic oligonucleotide
aaagactgccttctgactctgcgggctaaacgcagcaagactacgaccgaactaggattc

SEQ ID NO: 520062 - DNA, 60 bp, Artificial
  Synthetic oligonucleotide
ggccgatttaagggacaggtgtacagcaggaaacggggccgtaatgcaaaggtgtatcag

SEQ ID NO: 520063 - DNA, 60 bp, Artificial
  Synthetic oligonucleotide
aaactctctcattcaattggtagattggtagactatatatactataaccttctttagagg

SEQ ID NO: 520064 - DNA, 60 bp, Artificial
  Synthetic oligonucleotide
agaataattacgaggataattccgttggtcaagtgtacatcagggaattgattagtgtgc

SEQ ID NO: 520065 - DNA, 60 bp, Artificial
  Synthetic oligonucleotide
agaagaagggttcggactctggagccggaggctccagaagcgtataccagcgaaggtatt

SEQ ID NO: 520066 - DNA, 60 bp, Artificial
  Synthetic oligonucleotide
ttcctgtgctcgtcacaccagaagtgatgttgcaaattaattgggcactcagtctcaaat

SEQ ID NO: 520067 - DNA, 60 bp, Artificial
  Synthetic oligonucleotide
acttggcgaaatgcgtcctttgatgaacattagtatcgctaaccctatagtacaatttcc

SEQ ID NO: 520068 - DNA, 60 bp, Artificial
  Synthetic oligonucleotide
acttggactgtaacgaggaatgtgtgtcataggttcgtcgttaaaaagtcttggtccgtg

SEQ ID NO: 520069 - DNA, 60 bp, Artificial
  Synthetic oligonucleotide
acttctctgccgaattgtgaggtctagatatccatctacccaaaaaaggtatctaatata

SEQ ID NO: 520070 - DNA, 60 bp, Artificial
  Synthetic oligonucleotide
actgttaagattgaacgtgttcactcggatgtgaatatgaatgggttaactcccaagatt

SEQ ID NO: 520071 - DNA, 60 bp, Artificial
  Synthetic oligonucleotide
ttcgagaacgaatacggccgtgaggttgcacttactgtatgtgagaaacaggttcctcgc

SEQ ID NO: 520072 - DNA, 60 bp, Artificial
  Synthetic oligonucleotide
actgtaacgaggaatgtgtgtcataggttcgttgttaaaaagtcttggtccgtgatgctg

SEQ ID NO: 520073 - DNA, 60 bp, Artificial
  Synthetic oligonucleotide
ttcgtcatgtgttcaagcgtgtattgtcagtggagaaggattctatgatgatagacattg

SEQ ID NO: 520074 - DNA, 60 bp, Artificial
  Synthetic oligonucleotide
actcacggattttaatattacccgtgagtgctctcttggccccacgcgaggcctttaggc

SEQ ID NO: 520075 - DNA, 60 bp, Artificial
  Synthetic oligonucleotide
ttctccaggctttatttctattgggacttgcagcccaaatctcgacgtcgaagctgttct

SEQ ID NO: 520076 - DNA, 60 bp, Artificial
  Synthetic oligonucleotide
actaaattcccccagaagtcccgtgatgaaggcaggatgcagccacaatgcatacacgag

SEQ ID NO: 520077 - DNA, 60 bp, Artificial
  Synthetic oligonucleotide
acgttttaagggaactgtgaaagttgaacgtcttaccccgaatgttaacatggacgggct

SEQ ID NO: 520078 - DNA, 60 bp, Artificial
  Synthetic oligonucleotide
acgtatacatacgtaggctcaaacttgcgaagtttgtgcgtgatgtcacgcaacgcttcc

SEQ ID NO: 520079 - DNA, 60 bp, Artificial
  Synthetic oligonucleotide
acggttgcgcgtgtgggccccacagccttatcgtggggcccacgttttggcttttagtcg

SEQ ID NO: 520080 - DNA, 60 bp, Artificial
  Synthetic oligonucleotide
ttgaacgggttcatgcggacgtcaacatggacggtagagcaccgaagatcgagggagtgt

SEQ ID NO: 520081 - DNA, 60 bp, Artificial
  Synthetic oligonucleotide
acgcgaagcgtctcaccgctttgtggtgaaacggcgttggccgtttaagctggaatgtaa

SEQ ID NO: 520082 - DNA, 60 bp, Artificial
  Synthetic oligonucleotide
acgcaaatcccaggagaccattacttacaaggttagtattaaccttggtgtgtcagcatc

SEQ ID NO: 520083 - DNA, 60 bp, Artificial
  Synthetic oligonucleotide
accttgttctgttgctgagggcgaagcgctcaaggacggtgacggaactggggttcggcg

SEQ ID NO: 520084 - DNA, 60 bp, Artificial
  Synthetic oligonucleotide
acctcagcaaaatgtcgggccgatttaagggacaagtgtacatcaggaaaaggggtcgta

SEQ ID NO: 520085 - DNA, 60 bp, Artificial
  Synthetic oligonucleotide
accggatggccgcgcgatacccgctcaacgtggtccccacgtgacaagacatgtcggcca

SEQ ID NO: 520086 - DNA, 60 bp, Artificial
  Synthetic oligonucleotide
accggatggccgcccgatttttttggggtacatctcttattgggcctcatgggcctcctt

SEQ ID NO: 520087 - DNA, 60 bp, Artificial
  Synthetic oligonucleotide
accctaatggcgggccggtataagggtttggtctattcccggaaaaagggacgttatggc

SEQ ID NO: 520088 - DNA, 60 bp, Artificial
  Synthetic oligonucleotide
accataacgtacaagatggctatcaagtgttgggttgccctggatgggtctatggtggct

SEQ ID NO: 520089 - DNA, 60 bp, Artificial
  Synthetic oligonucleotide
accaatctttcatagattcactcatacaaggtatccagtccatatctggattagtaatag

SEQ ID NO: 520090 - DNA, 60 bp, Artificial
  Synthetic oligonucleotide
tggtactccaggttattatgttcgtgtacaaaacactgattacattgaggtcgcttgcga

SEQ ID NO: 520091 - DNA, 60 bp, Artificial
  Synthetic oligonucleotide
tggtgcaaggatccatagccatggtaacttggccattacttcagctctgagagatcggtt

SEQ ID NO: 520092 - DNA, 60 bp, Artificial
  Synthetic oligonucleotide
caaccagggcgtcctgtttctaacaggcgtcctgctctacaggtcgcagagtatctgtgg

SEQ ID NO: 520093 - DNA, 60 bp, Artificial
  Synthetic oligonucleotide
caaccaggacggtctgtggttaacagacgtccgtcactgcaggtcgcagagtttctgtgg

SEQ ID NO: 520094 - DNA, 60 bp, Artificial
  Synthetic oligonucleotide
catgatggttgatgttgaaggaagtacatatttgtctaataggcgttttaattgttgggc

SEQ ID NO: 520095 - DNA, 60 bp, Artificial; identical to SEQ ID NO: 339644
  Synthetic oligonucleotide

SEQ ID NO: 520096 - DNA, 60 bp, Artificial
  Synthetic oligonucleotide
tggttcggaaggagtacaattggtgttaatacactcttgaactgtagtcctaactatgtc

SEQ ID NO: 520097 - DNA, 60 bp, Artificial
  Synthetic oligonucleotide
caaagagaattggagcagctagttaaccaaccagggcgtcctgtttctaacaggcgtcct

SEQ ID NO: 520098 - DNA, 60 bp, Artificial
  Synthetic oligonucleotide
cagtatgcaaaggcgtattccgcacttggagttaattcaaaacgggagttggagcagtta

SEQ ID NO: 520099 - DNA, 60 bp, Artificial
  Synthetic oligonucleotide
tgtagtgcgttgtttatatcagactccgagtccgatgtaccgttaccaattgtgctttta

SEQ ID NO: 520100 - DNA, 60 bp, Artificial
  Synthetic oligonucleotide
atttggtgctaggatccacagtcatggcaatctagctataactcccgctttgcaagatcg

SEQ ID NO: 520101 - DNA, 60 bp, Artificial
  Synthetic oligonucleotide
atttagtacgattcttcagtcgggaattaatttctatggtacctttcagagtgagcgaat

SEQ ID NO: 520102 - DNA, 60 bp, Artificial
  Synthetic oligonucleotide
atttaagggacaggtgtacagcaggaaacgtggtcgtaatgcaaaggtgtatcaggcttt

SEQ ID NO: 520103 - DNA, 60 bp, Artificial
  Synthetic oligonucleotide
tgtcaatttaaggcgcgcgtgaagctaagcgcggctaaatcaagtagcccaattgggttc

SEQ ID NO: 520104 - DNA, 60 bp, Artificial
  Synthetic oligonucleotide
attgtctttttcaaagatgtgggatccactggttaatagtttcccccccactattcatgg

SEQ ID NO: 520105 - DNA, 60 bp, Artificial
  Synthetic oligonucleotide
attggctgatgtagttggcgcttctcctagtactttgggtcggtacttttatgatactca

SEQ ID NO: 520106 - DNA, 60 bp, Artificial
  Synthetic oligonucleotide
attggctcgatcaaaaaaggtgccttgtactttgtaatagctccgggtaacggagtagag

SEQ ID NO: 520107 - DNA, 60 bp, Artificial
  Synthetic oligonucleotide
attgatatttgtggtgatgttgatgggttaggggatgaggctttagacgctggatccgtt

SEQ ID NO: 520108 - DNA, 60 bp, Artificial
  Synthetic oligonucleotide
attacatattagggattcagtagggaatgggctcttgtactccggtgtgacctccgggaa

SEQ ID NO: 520109 - DNA, 60 bp, Artificial
  Synthetic oligonucleotide
atgtgtgttgttatatgccttggatagaatgtcaattctcggagatcggaattgaatgtc

SEQ ID NO: 520110 - DNA, 60 bp, Artificial
  Synthetic oligonucleotide
ggcgttttaattgttggtctacatttaaagacgttgatcgagactcatgtaatggcgttt

SEQ ID NO: 520111 - DNA, 60 bp, Artificial
  Synthetic oligonucleotide
tgcaatacgcagaacctggtgtctgtaacgaggttcgccaagggacttggggtgcgaacg

SEQ ID NO: 520112 - DNA, 60 bp, Artificial
  Synthetic oligonucleotide
tgccacgtggggcgcactcgcggaaatttaatgttacccgcgagtgcctgggcccacgcg

SEQ ID NO: 520113 - DNA, 60 bp, Artificial
  Synthetic oligonucleotide
tgcgagcccagctggtctttccggtacgagttggtccgcagatgtagagggagttccttc

SEQ ID NO: 520114 - DNA, 60 bp, Artificial
  Synthetic oligonucleotide
tgagacagttgatactcatctcgatgagactccacataattaaaaacacttggtggtacg

SEQ ID NO: 520115 - DNA, 60 bp, Artificial
  Synthetic oligonucleotide
tgctggctcgtatacgataagtccccgactgggattactgacctgaccccatcagacatc

SEQ ID NO: 520116 - DNA, 60 bp, Artificial
  Synthetic oligonucleotide
tggaatatattcttttcttttgtcggccacttgcgtgtcttgtacgcgaagctaaagtgg

SEQ ID NO: 520117 - DNA, 60 bp, Artificial
  Synthetic oligonucleotide
tggaatgtaacggcagtacgttccagaaagactacacgaacctgcctgtctgcaatacgc

SEQ ID NO: 520118 - DNA, 60 bp, Artificial
  Synthetic oligonucleotide
tggaatttatattggtaggtggacctttaggatcttgacgcgtggggcgcactcacggat

SEQ ID NO: 520119 - DNA, 60 bp, Artificial; identical to SEQ ID NO: 345524
  Synthetic oligonucleotide

SEQ ID NO: 520120 - DNA, 60 bp, Artificial
  Synthetic oligonucleotide
cacgaggcattttttgatctggggtacaaaccaaagttatatgaactggtgtaactgggg

SEQ ID NO: 520121 - DNA, 60 bp, Artificial
  Synthetic oligonucleotide
tggagtgaatcagttgtgagactgatagtgtataaataggcattcataattccgtacaat

SEQ ID NO: 520122 - DNA, 60 bp, Artificial
  Synthetic oligonucleotide
caccgttgtgtatggaatagacataaggacttacagtgtacaattcgtctcggagccacg

SEQ ID NO: 520123 - DNA, 60 bp, Artificial
  Synthetic oligonucleotide
tggctctatggttaacagggtgtgcaaatttccagtatatttctggttagtgtatgacaa

SEQ ID NO: 520124 - DNA, 60 bp, Artificial
  Synthetic oligonucleotide
caggcggatcttactgatgcgactggtacttcgtggcagactggagccgctactgccaat

SEQ ID NO: 520125 - DNA, 60 bp, Artificial
  Synthetic oligonucleotide
ggatcgtttattggaatgcctaggactggttcctgcatttctccctctggggataaatgc

SEQ ID NO: 520126 - DNA, 60 bp, Artificial
  Synthetic oligonucleotide
caccagggtctagcatgtcagtccctaacctgttaagctccttatatggatgtgaggcct

SEQ ID NO: 520127 - DNA, 60 bp, Artificial
  Synthetic oligonucleotide
cacagcccgtggtgtaatgaaggtgtactttaagtcagtgggcaaccagtagcccacttg

SEQ ID NO: 520128 - DNA, 60 bp, Artificial
  Synthetic oligonucleotide
tgggcgagtcctaactatatgactcaatatcattgggttatagtggatcgtgatgttggt

SEQ ID NO: 520129 - DNA, 60 bp, Artificial
  Synthetic oligonucleotide
caatatatactagaagatatatggttagtatgtggtccctacactaccggatgacctaga

SEQ ID NO: 520130 - DNA, 60 bp, Artificial
  Synthetic oligonucleotide
tgtcatgaatctccactattactgttcctgatgcgtttataggcacttgctgcctatatt

SEQ ID NO: 520131 - DNA, 60 bp, Artificial
  Synthetic oligonucleotide
atggcggagtaccctcagtcagcctttgttggaggtagtgcgattttgcgtcaaggcccg

SEQ ID NO: 520132 - DNA, 60 bp, Artificial
  Synthetic oligonucleotide
catttgactgcccacttcactgttgcttgtctcactgacaagtgaggacatctcgtcaga

SEQ ID NO: 520133 - DNA, 60 bp, Artificial
  Synthetic oligonucleotide
ggatgtcagatattgtatccaaagcatccacatatgtatcttttgatctatcttatgttg

SEQ ID NO: 520134 - DNA, 60 bp, Artificial
  Synthetic oligonucleotide
atggacgggaagcgtctgtaatatccgtatccacagtcgaatgggcttgtcctattgcac

SEQ ID NO: 520135 - DNA, 60 bp, Artificial
  Synthetic oligonucleotide
atggacacccaacggggcaggagttcaggttgctgcaccgggtgctgtctatctcatgac

SEQ ID NO: 520136 - DNA, 60 bp, Artificial
  Synthetic oligonucleotide
tgacgtcggtgagatcgttagatagttggtattcagtacgatcggaggtcgtataggcta

SEQ ID NO: 520137 - DNA, 60 bp, Artificial
  Synthetic oligonucleotide
atgcttagtttgaacatgtattctacaaaaaatagacgaggatcgtctgcctatcgagga

SEQ ID NO: 520138 - DNA, 60 bp, Artificial
  Synthetic oligonucleotide
tgtggggaaacggttctgcattaagtctgtgttatttacaggcaagatatggatggatga

SEQ ID NO: 520139 - DNA, 60 bp, Artificial
  Synthetic oligonucleotide
tgaggcccaatgggccgatgacacgtggtggggcgcactcgcggattttaatattacccg

SEQ ID NO: 520140 - DNA, 60 bp, Artificial
  Synthetic oligonucleotide
tgtgggtcgcgagggggaacccggagcacgcacccaaaacactaaatgaaacatacccaa

SEQ ID NO: 520141 - DNA, 60 bp, Artificial
  Synthetic oligonucleotide
cataaggacttacagtgtacaattcttctcggagccatgctccgataacaggatgtgcat

SEQ ID NO: 520142 - DNA, 60 bp, Artificial
  Synthetic oligonucleotide
atgcccggcgcgtgccgatagtcacgctgtagctgggcctgcttcgaagaagctttcacc

SEQ ID NO: 520143 - DNA, 60 bp, Artificial
  Synthetic oligonucleotide
tgacaacacatagaggataatctgaattacaggcacgataactattgtaaaggcttgggc

SEQ ID NO: 520144 - DNA, 60 bp, Artificial
  Synthetic oligonucleotide
atgcagtaccaggggtacgagcagctcagtagatctggatccgtggagcaaaccagcccc

SEQ ID NO: 520145 - DNA, 60 bp, Artificial
  Synthetic oligonucleotide
atgactcaatatcattgggttatagtggatcgtgatgttggttctacgtttccgactcag

SEQ ID NO: 520146 - DNA, 60 bp, Artificial
  Synthetic oligonucleotide
tgtggtcccctgatgacatggcattagcgaaggccaatggtagtggcgcggattgggcaa

SEQ ID NO: 520147 - DNA, 60 bp, Artificial
  Synthetic oligonucleotide
atctcatgacgaacttgccccgggggagcagcgaagaccagcgacacacgggggagacct

SEQ ID NO: 520148 - DNA, 60 bp, Artificial
  Synthetic oligonucleotide
cattcgtttatcgtgaatctccactatcacagttcctgttgcattgataggaacttgttg

SEQ ID NO: 520149 - DNA, 60 bp, Artificial
  Synthetic oligonucleotide
atgtctaatccggcaacccctttgggtgattacacctcaagtcagcatcagggtggtacg

SEQ ID NO: 520150 - DNA, 60 bp, Artificial
  Synthetic oligonucleotide
cattgaaggatcgtttctatataaggcatgtcttgaaacgtgtcatatcagttgacaagg

SEQ ID NO: 520151 - DNA, 60 bp, Artificial
  Synthetic oligonucleotide
atgtcgtcgattatgttatatgccgcttctggatcgtagactgtaaagtctacattattc

SEQ ID NO: 520152 - DNA, 60 bp, Artificial
  Synthetic oligonucleotide
ggatatgagcgaagaggatagaggtcgatatattgtgttacgctatttatagagaaatct

SEQ ID NO: 520153 - DNA, 60 bp, Artificial
  Synthetic oligonucleotide
catttagatcatgagacaattgatattcatctctgtgagactctatataattaaatgcac

SEQ ID NO: 520154 - DNA, 60 bp, Artificial
  Synthetic oligonucleotide
atgtcggccactcatgatgcgtctgttgaggttagatatgtgtggtcccaggataaaaac

SEQ ID NO: 520155 - DNA, 60 bp, Artificial
  Synthetic oligonucleotide
tgtcagcatctgctaccgtcctcaagtactgctgcaagagccagccattatgctggctcg

SEQ ID NO: 520156 - DNA, 59 bp, Artificial
  Synthetic oligonucleotide
acacgccattccctgcttgaggagcagtgatgtactccccggtgcgtgaatccatggtt

SEQ ID NO: 520157 - DNA, 59 bp, Artificial
  Synthetic oligonucleotide
cagctactctctggatgtttcatacagtatttcagagtactggagggctgccttgcagc

SEQ ID NO: 520158 - DNA, 59 bp, Artificial
  Synthetic oligonucleotide
gataaatttggatgaagtaaatggtaagattctacacttaccacgtaaaggtccctgtt

SEQ ID NO: 520159 - DNA, 59 bp, Artificial
  Synthetic oligonucleotide
taattaaagaagacttggatagcacgtctctttaaaagggggtgcgctctgagtcggtt

SEQ ID NO: 520160 - DNA, 59 bp, Artificial
  Synthetic oligonucleotide
cctgtccataggactggtcccgagatttcaatacccgtaagggaggctgtttctgcgcc

SEQ ID NO: 520161 - DNA, 59 bp, Artificial
  Synthetic oligonucleotide
cctcaggtacaggcgtccgtggatctaccctctgtcagtagggtatcatgagccctgct

SEQ ID NO: 520162 - DNA, 59 bp, Artificial
  Synthetic oligonucleotide
atgtatcccgccaaataccaagtgttcccatctggtataaattactcagatacccctgt

SEQ ID NO: 520163 - DNA, 59 bp, Artificial
  Synthetic oligonucleotide
ttgtgatattggggtgataggaatgagacgatatggtgatgtcaaagtgttttggattg

SEQ ID NO: 520164 - DNA, 59 bp, Artificial
  Synthetic oligonucleotide
tgacttggtcaactggtgtctcgcaaactgggtgatatattattggtgtctggggtcct

SEQ ID NO: 520165 - DNA, 59 bp, Artificial
  Synthetic oligonucleotide
catggttgttgttgtcgaccgaaaacctcatttgggatcgtctggatgtctacatacat

SEQ ID NO: 520166 - DNA, 59 bp, Artificial
  Synthetic oligonucleotide
cattgagagataactggctcggtcagttgaagtgttgatgattgagcgcatgactgagt

SEQ ID NO: 520167 - DNA, 59 bp, Artificial
  Synthetic oligonucleotide
ttggtgaaatgaatcggggaatgggtccttatttatagcagagtccgttagggtatatt

SEQ ID NO: 520168 - DNA, 58 bp, Artificial
  Synthetic oligonucleotide
gttatggttcactgggtcgatgctccgggcccaggtagtcttgcccgtgcgtgtaggc

SEQ ID NO: 520169 - DNA, 58 bp, Artificial
  Synthetic oligonucleotide
agggaagatacaaggggaacgtctataagcgtgtgaagccgggaacttcaggcggtaa

SEQ ID NO: 520170 - DNA, 58 bp, Artificial
  Synthetic oligonucleotide
atatagtataagttcctaagggcttaagggacacgtgtaggccatccgttataatatt

SEQ ID NO: 520171 - DNA, 58 bp, Artificial
  Synthetic oligonucleotide
ctaggaggcaggataacaacagacaagatgccgggcccatttaagggtcaggtttaca

SEQ ID NO: 520172 - DNA, 58 bp, Artificial
  Synthetic oligonucleotide
ttggtgattgcatcatagtaagagttatctggattacaaagaacaattgatgggatcc

SEQ ID NO: 520173 - DNA, 58 bp, Artificial
  Synthetic oligonucleotide
aagtacttagttgtgggagcgctcgagctcagtgttttactccttactacatatgctt

SEQ ID NO: 520174 - DNA, 58 bp, Artificial
  Synthetic oligonucleotide
cttcttaccgtacttagggtttacggtgaagtccctctgggccgctaccaactgtttc

SEQ ID NO: 520175 - DNA, 58 bp, Artificial
  Synthetic oligonucleotide
gcgcttaatctgtttccgtttatatagacgattaagcatatcggaaaaagaattgaga

SEQ ID NO: 520176 - DNA, 58 bp, Artificial
  Synthetic oligonucleotide
aattatgtggccctaatgcacgggcccactttgttttaccactcctgctgggcccctc

SEQ ID NO: 520177 - DNA, 58 bp, Artificial
  Synthetic oligonucleotide
caaccaggacgtcctattgctaataggcgtccggcactgcaggtcgcagagtatctgt

SEQ ID NO: 520178 - DNA, 58 bp, Artificial
  Synthetic oligonucleotide
ggaatggtatatcgtcaataatattgtacaaagcgtcgtctatgtatagactgaagtc

SEQ ID NO: 520179 - DNA, 57 bp, Artificial
  Synthetic oligonucleotide
gtcatggtaatttagccatcactgcttcgttgaaggaacgttattatattcgttatg

SEQ ID NO: 520180 - DNA, 57 bp, Artificial
  Synthetic oligonucleotide
aatggaaggccatctgagaacgaagtctgttgggcaggactctcgtatgttactgaa

SEQ ID NO: 520181 - DNA, 57 bp, Artificial
  Synthetic oligonucleotide
catatacaagaagtatggcggttcagagtcaaaagagaaagtatactcctccggcca

SEQ ID NO: 520182 - DNA, 57 bp, Artificial
  Synthetic oligonucleotide
gccactattataaataggggtagatgggcctctgaagaggcccagaaactcctagcg

SEQ ID NO: 520183 - DNA, 57 bp, Artificial
  Synthetic oligonucleotide
gtttgtgcaccttctcagggttttgatatatatgtaaatggttatttccgagtgtac

SEQ ID NO: 520184 - DNA, 57 bp, Artificial
  Synthetic oligonucleotide
actccttcgggcgaagagacagcggagcacggaagagattggtttcggcaatactcc

SEQ ID NO: 520185 - DNA, 57 bp, Artificial
  Synthetic oligonucleotide
caccatgggccattatttgttaagctgacatctttaactccattgtactatgtattg

SEQ ID NO: 520186 - DNA, 57 bp, Artificial
  Synthetic oligonucleotide
ccatgtttcaccgggttttaatgtaattgggctgtgaagcccatatcttgatgtaga

SEQ ID NO: 520187 - DNA, 57 bp, Artificial
  Synthetic oligonucleotide
atgtcttgaagaattgctcccctgcaattctgacatatttcgtaatttaaacaatct

SEQ ID NO: 520188 - DNA, 57 bp, Artificial
  Synthetic oligonucleotide
cgtgttttatctgttgagaaggatactttgatggtagacttggaaggaattacatac

SEQ ID NO: 520189 - DNA, 56 bp, Artificial
  Synthetic oligonucleotide
tacaatttccacgggatagggtctttaagtgaaaagaatgacgacgagaaataatg

SEQ ID NO: 520190 - DNA, 56 bp, Artificial
  Synthetic oligonucleotide
taggccgcagcggagatggctttaaattgggccggcccccccggaaagtagggcga

SEQ ID NO: 520191 - DNA, 56 bp, Artificial
  Synthetic oligonucleotide
gggttgctttggatggctcgatggtctctagggttgcgaagttcccaatctatttc

SEQ ID NO: 520192 - DNA, 56 bp, Artificial
  Synthetic oligonucleotide
agcgcatttttgagttccgctcacacgtatcgttttttgcgcccgtgtgacatgtg

SEQ ID NO: 520193 - DNA, 56 bp, Artificial
  Synthetic oligonucleotide
atacgaagggatacgaatacatacgggatcttatatgtattctacgctcgcgacat

SEQ ID NO: 520194 - DNA, 56 bp, Artificial
  Synthetic oligonucleotide
caacaaaattaacaacccagtacattaatcttatattccctcgattgaggagaggc

SEQ ID NO: 520195 - DNA, 56 bp, Artificial
  Synthetic oligonucleotide
actgattcacaccagtagttatgtattcccaatgacatagcccattgcgttttacc

SEQ ID NO: 520196 - DNA, 56 bp, Artificial
  Synthetic oligonucleotide
ttgccttcaacaggggaggaggttgttaccttctcaccagctatgctcgaggctct

SEQ ID NO: 520197 - DNA, 55 bp, Artificial
  Synthetic oligonucleotide
ggccgtgaggttgcacttactgtatgtgagaaacaggttcctcgctctcaccttg

SEQ ID NO: 520198 - DNA, 55 bp, Artificial
  Synthetic oligonucleotide
ggtgacgatagcaagatgtcacattttaggattcatgagaatcaatatggcccag

SEQ ID NO: 520199 - DNA, 55 bp, Artificial
  Synthetic oligonucleotide
ggctggtttcggaggtgcgttacccgtgacctctgcgcaagctagtgctgctacc

SEQ ID NO: 520200 - DNA, 55 bp, Artificial
  Synthetic oligonucleotide
ggctatcaagtgttgggttgccctggatgggtctatggtggctagggttgcaaag

SEQ ID NO: 520201 - DNA, 55 bp, Artificial
  Synthetic oligonucleotide
ggtgtacccaatctgtctaggtgcctgtatggatgcagcgcatccctcatctccg

SEQ ID NO: 520202 - DNA, 55 bp, Artificial
  Synthetic oligonucleotide
ggcggaccgttgaggttccgccagctgtccctacaaggacagcgtctgaggtttc

SEQ ID NO: 520203 - DNA, 55 bp, Artificial
  Synthetic oligonucleotide
ggcgctatattctagccattggagttttgttgcccattcgtgtgggaattcctcc

SEQ ID NO: 520204 - DNA, 55 bp, Artificial
  Synthetic oligonucleotide
ggggtacgagcagctcagtagatctggatccgtggagcaaaccagccccggtgct

SEQ ID NO: 520205 - DNA, 55 bp, Artificial
  Synthetic oligonucleotide
ggggtacaaaccaaagttatatgaactggtgtaactggggtacaatttatatggt

SEQ ID NO: 520206 - DNA, 55 bp, Artificial
  Synthetic oligonucleotide
gggtgttgtactggttagtattcttctctcgtcgcatttgtaagaggaatgggaa

SEQ ID NO: 520207 - DNA, 55 bp, Artificial
  Synthetic oligonucleotide
ggggtaaaggggacaatatatagtataagttcctaagggcttaagggacacgtgt

SEQ ID NO: 520208 - DNA, 55 bp, Artificial
  Synthetic oligonucleotide
ggggacaatatatatgctagaagatatttaggttagattgtggtccctacaccct

SEQ ID NO: 520209 - DNA, 55 bp, Artificial
  Synthetic oligonucleotide
ggggaacccggagcacgcacccaaaacactaaatgaaacatacccaactgatcta

SEQ ID NO: 520210 - DNA, 55 bp, Artificial
  Synthetic oligonucleotide
gggttaggggatgaggctttagacgctggatccgtttattcgtcgtcacagaaac

SEQ ID NO: 520211 - DNA, 55 bp, Artificial
  Synthetic oligonucleotide
gggttcgtctggatgtctccatacatttgacgaattgtttggtgcacggatacac

SEQ ID NO: 520212 - DNA, 55 bp, Artificial
  Synthetic oligonucleotide
gggttgcaaagttccccgtccatttctggttagtgtacgacaagaaccctggtga

SEQ ID NO: 520213 - DNA, 55 bp, Artificial
  Synthetic oligonucleotide
ggcggctggtgatttcaaggactcgatacagggatggaatgacctctctctgcgt

SEQ ID NO: 520214 - DNA, 55 bp, Artificial
  Synthetic oligonucleotide
ggcgttcctattctgttcatttctctatatggatgtatctcgtttgccacatctg

SEQ ID NO: 520215 - DNA, 55 bp, Artificial
  Synthetic oligonucleotide
gggctgtgaagcccatatcttgatgaggaagcggaccttatcaatttcctctccc

SEQ ID NO: 520216 - DNA, 55 bp, Artificial
  Synthetic oligonucleotide
ggtccgcagatgtagagggagtttcttcggtgttggagttgttcgggttcctggt

SEQ ID NO: 520217 - DNA, 55 bp, Artificial
  Synthetic oligonucleotide
ggcgcccagccctgcaggttgctgaatacctgtggacgtccaataaggcgggtgt

SEQ ID NO: 520218 - DNA, 55 bp, Artificial
  Synthetic oligonucleotide
gggatccacatacggtggaggagtagaagggaacagcgattcagctgagtactga

SEQ ID NO: 520219 - DNA, 55 bp, Artificial
  Synthetic oligonucleotide
ggtctacatttaaagacgttgatcgagactcatgtaatggcgtttatgctaacat

SEQ ID NO: 520220 - DNA, 55 bp, Artificial
  Synthetic oligonucleotide
ggcgacatctctgggctttgtgatattggggtgataggaatgagacgatatggtg

SEQ ID NO: 520221 - DNA, 55 bp, Artificial
  Synthetic oligonucleotide
ggctacgtttagttggaccagtacaggggcaggtataaagttttctcctggtggg

SEQ ID NO: 520222 - DNA, 55 bp, Artificial
  Synthetic oligonucleotide
ggtctgtgatgctggaagctaatggagtggatcctagtgtgaaacaagggtctac

SEQ ID NO: 520223 - DNA, 55 bp, Artificial
  Synthetic oligonucleotide
ggtgaattcgttaagacgttgaagagacgtcgatctgagcgcggagaggtgacaa

SEQ ID NO: 520224 - DNA, 55 bp, Artificial
  Synthetic oligonucleotide
gggagtacgttccagaaggactacacaaacctgcctgtctgtaacacagacaacc

SEQ ID NO: 520225 - DNA, 55 bp, Artificial
  Synthetic oligonucleotide
tagatgttcgtggaagactgagggtgtattttaagagtgttggtaaccagtaagt

SEQ ID NO: 520226 - DNA, 55 bp, Artificial
  Synthetic oligonucleotide
tagccatggtaacttggccattacttcagctctgagagatcggttttacatacgt

SEQ ID NO: 520227 - DNA, 55 bp, Artificial
  Synthetic oligonucleotide
taggtatagctccaggtaacggagttgagtttaatgtgtttggcaagacccgtct

SEQ ID NO: 520228 - DNA, 55 bp, Artificial
  Synthetic oligonucleotide
tattaaaagacgcgcccactccgcaattctgacgtggctcgcttgtgtcccttgg

SEQ ID NO: 520229 - DNA, 55 bp, Artificial
  Synthetic oligonucleotide
tcccatttaccataaccaacgtgggagaagtctacatcttttgcactgaattgtg

SEQ ID NO: 520230 - DNA, 55 bp, Artificial
  Synthetic oligonucleotide
tcgacaagatcttgacggtcggagccctgaacggaatatcaacggagtgcttcgc

SEQ ID NO: 520231 - DNA, 55 bp, Artificial
  Synthetic oligonucleotide
tcgctttggggcgttgagtccgtcgattcttgggtgaatcgttcgaccgtcgggg

SEQ ID NO: 520232 - DNA, 55 bp, Artificial
  Synthetic oligonucleotide
tcgtcatatgacgtaatgaccaactttagttttgcacgtggcgcgttctacaatg

SEQ ID NO: 520233 - DNA, 55 bp, Artificial
  Synthetic oligonucleotide
tctcacgctggataaaattcagcgttgggagatgcctgccggttctgttgttcag

SEQ ID NO: 520234 - DNA, 55 bp, Artificial
  Synthetic oligonucleotide
tcttcaagagtcatttctatgtcttgaagaattgctcccctgcaattctgacata

SEQ ID NO: 520235 - DNA, 55 bp, Artificial
  Synthetic oligonucleotide
tcttttgtcaagttgtaacaggcagtgaagatgtgcgggtaagagctcagtagca

SEQ ID NO: 520236 - DNA, 55 bp, Artificial
  Synthetic oligonucleotide
tgaccaacaatagttccaaggtgtcgtacataacatatcccagcatatctcgtag

SEQ ID NO: 520237 - DNA, 55 bp, Artificial
  Synthetic oligonucleotide
tgaggaactgaagagggaggaagagggataaataggtaaacgcggataagattcc

SEQ ID NO: 520238 - DNA, 55 bp, Artificial
  Synthetic oligonucleotide
tgagttatttggtgctaggattcatagccatggtaatctagccatcgttcccgca

SEQ ID NO: 520239 - DNA, 55 bp, Artificial
  Synthetic oligonucleotide
tgatataccccttgtctttatgaaaagacgagccctgccccgcgattgacgtgtc

SEQ ID NO: 520240 - DNA, 55 bp, Artificial
  Synthetic oligonucleotide
tgatatcgagtcacccgggtccaatgccgatgggtctagtttatttagtctggcg

SEQ ID NO: 520241 - DNA, 55 bp, Artificial
  Synthetic oligonucleotide
tgcaggctcttgtggatagttacagtccggatacgaagggatacgaatacatacg

SEQ ID NO: 520242 - DNA, 55 bp, Artificial
  Synthetic oligonucleotide
tggtaaccactaatatcaaagtggcgctgataacgcaagtctctccttttgtcga

SEQ ID NO: 520243 - DNA, 55 bp, Artificial
  Synthetic oligonucleotide
tggttatgttggattgtgttctctggagtccaacgactgaggcagactctcctgg

SEQ ID NO: 520244 - DNA, 55 bp, Artificial
  Synthetic oligonucleotide
tgtctgtaacgaggttcgccaagggacttggagtgcgaacggagtggaaggacac

SEQ ID NO: 520245 - DNA, 55 bp, Artificial
  Synthetic oligonucleotide
tgtggtggtcgaccgcagaccacatttaagccccactggatgcctgcatacgttc

SEQ ID NO: 520246 - DNA, 55 bp, Artificial
  Synthetic oligonucleotide
tgtgtcggcccagggaccttgcccatgtagattttccggtccttgttggaccgac

SEQ ID NO: 520247 - DNA, 55 bp, Artificial
  Synthetic oligonucleotide
ttaactgatattaatagcgaaggggactgtttaacgggatacttaagactatcag

SEQ ID NO: 520248 - DNA, 55 bp, Artificial
  Synthetic oligonucleotide
ttacccgtgagtgctctcttggccccacgcgaggcctttaggccgagcgaaagtg

SEQ ID NO: 520249 - DNA, 55 bp, Artificial
  Synthetic oligonucleotide
ttcatctggctttgggcggaccgctgaggtcccgccacctgtccataggactggt

SEQ ID NO: 520250 - DNA, 55 bp, Artificial
  Synthetic oligonucleotide
ttccagaaggactacacgaacctgcctgtgtgcaatacgcagaacctggtgtccg

SEQ ID NO: 520251 - DNA, 55 bp, Artificial
  Synthetic oligonucleotide
ttcctagttcttggatggtctgcagactagcatccatcaaccagtttaggtcccc

SEQ ID NO: 520252 - DNA, 55 bp, Artificial
  Synthetic oligonucleotide
ttgcgtgtcttgtacgcgaagctaaagtggccgcatatatgcttttagttagggc

SEQ ID NO: 520253 - DNA, 55 bp, Artificial
  Synthetic oligonucleotide
ttggaacctgctgcctgtactcgataacgcaatggtcgatcttcatacagcttct

SEQ ID NO: 520254 - DNA, 55 bp, Artificial
  Synthetic oligonucleotide
ttgtgtctgccgagactgcgggcccaagaggtcttaccggtacgagttggtccgc

SEQ ID NO: 520255 - DNA, 55 bp, Artificial
  Synthetic oligonucleotide
ttttggctcagaacagtgttttgaaactctatcctttactagcgagtgagccaaa

SEQ ID NO: 520256 - DNA, 55 bp, Artificial
  Synthetic oligonucleotide
ttttgtttccgcctcacagcttctcagcaagcgtacttatagtacgccatgttgg

SEQ ID NO: 520257 - DNA, 55 bp, Artificial
  Synthetic oligonucleotide
ggtgttgatccaaccaagaaggtgtcagctagttattatggtccggggccttgca

SEQ ID NO: 520258 - DNA, 55 bp, Artificial
  Synthetic oligonucleotide
gtaacttcatctggctttgggcggaccggtgaggttccgccagctgtccctcgga

SEQ ID NO: 520259 - DNA, 55 bp, Artificial
  Synthetic oligonucleotide
gtacagacgtggctggtcgtctagtcaacgacgagggtatttacgtcagtctatg

SEQ ID NO: 520260 - DNA, 55 bp, Artificial
  Synthetic oligonucleotide
gtaccttcaattcgggctttgggcggaccggtgaggttccgccagctgtccctac

SEQ ID NO: 520261 - DNA, 55 bp, Artificial
  Synthetic oligonucleotide
gtatgatcatacgtggcaagatctggttggacgtgaataatgcatccgtaccagg

SEQ ID NO: 520262 - DNA, 55 bp, Artificial
  Synthetic oligonucleotide
gtattttggttggtgtacgacaagtcaccaggggcttctgtacctaacacaggtg

SEQ ID NO: 520263 - DNA, 55 bp, Artificial
  Synthetic oligonucleotide
gtcagcccagcggtaccctgccggctgcgcatgggatctttgatctcattgacag

SEQ ID NO: 520264 - DNA, 55 bp, Artificial
  Synthetic oligonucleotide
gtcatgaatctccacaataactgctccagttgcgttgataggtacctgttgcctg

SEQ ID NO: 520265 - DNA, 55 bp, Artificial
  Synthetic oligonucleotide
gtccactcctccgttaaagtagttgtgtctgccgagactgcgagcccagctggtc

SEQ ID NO: 520266 - DNA, 55 bp, Artificial
  Synthetic oligonucleotide
gtctactggtactgattatggaggaaagcagacctataaagcgccttcaatgcct

SEQ ID NO: 520267 - DNA, 55 bp, Artificial
  Synthetic oligonucleotide
gtctgtggttaacagacgtccgtcactgcaggtcgcagagtttctgtggacgacc

SEQ ID NO: 520268 - DNA, 55 bp, Artificial
  Synthetic oligonucleotide
gtgagtcgcagcttggaggatattcactctgtgaaggaaatgtccaaccaggcag

SEQ ID NO: 520269 - DNA, 55 bp, Artificial
  Synthetic oligonucleotide
gtgccttgtactttgtaatagctccgggtaacggagtagagggacggatgtttgg

SEQ ID NO: 520270 - DNA, 55 bp, Artificial
  Synthetic oligonucleotide
gtggaaccatcaattcgaataaggcccatggagatgttaaaatgtcagcccaaca

SEQ ID NO: 520271 - DNA, 55 bp, Artificial
  Synthetic oligonucleotide
gtggatcgaatattcatagaaaggcccaggatgatggtaaaatgtcagcccaacg

SEQ ID NO: 520272 - DNA, 55 bp, Artificial
  Synthetic oligonucleotide
tagagaggacccgatagctctcgtttcaacttggtgaaatgaatcggggaatggg

SEQ ID NO: 520273 - DNA, 55 bp, Artificial
  Synthetic oligonucleotide
taccggtacgatttggtccgcagatgtacaggcttcttctccggactccagggct

SEQ ID NO: 520274 - DNA, 55 bp, Artificial
  Synthetic oligonucleotide
tacccctctcagaagacctggtgaaggaaaccctaatggcgggccggtataaggg

SEQ ID NO: 520275 - DNA, 55 bp, Artificial
  Synthetic oligonucleotide
tacaagatggatatcaagtgttgggttgccctggatggttctatggtggctaggg

SEQ ID NO: 520276 - DNA, 55 bp, Artificial
  Synthetic oligonucleotide
taagaagccgcgaaccacgaagtggactgggtcccgcagcgcatctagagaggcg

SEQ ID NO: 520277 - DNA, 55 bp, Artificial
  Synthetic oligonucleotide
gttttaagcgtaagtgttgtttgtacgaggacatatacaagaagtatggcggttc

SEQ ID NO: 520278 - DNA, 55 bp, Artificial
  Synthetic oligonucleotide
gtttccccttaaatttcgcaaagtgtgttctttgatgaacatttgtgtcgctgac

SEQ ID NO: 520279 - DNA, 55 bp, Artificial
  Synthetic oligonucleotide
gtttattcagtacacctggactaccggaggtagtccaattacagttggtgcagga

SEQ ID NO: 520280 - DNA, 55 bp, Artificial
  Synthetic oligonucleotide
gttgttgcagtctgaataatagttctccatctgtcatcagattttgttggggaga

SEQ ID NO: 520281 - DNA, 55 bp, Artificial
  Synthetic oligonucleotide
gttgttcttcagtaggctgatgatgttctagtgatactgcaaggaatagaatcac

SEQ ID NO: 520282 - DNA, 55 bp, Artificial
  Synthetic oligonucleotide
gttgcccagacatatggttgctcaatctggactctaccgagaaactcggacttgg

SEQ ID NO: 520283 - DNA, 55 bp, Artificial
  Synthetic oligonucleotide
gttaggcccagacgcgattgatccaggtgatagcgcgtctaatttgggtgatcca

SEQ ID NO: 520284 - DNA, 55 bp, Artificial
  Synthetic oligonucleotide
gtgttgtttgtacgaggacatatacaagaagtatggctgttccaagtcagaagag

SEQ ID NO: 520285 - DNA, 55 bp, Artificial
  Synthetic oligonucleotide
gtgtactttaagtctgtgggcaaccagtagcccagtgtaatgagccccttgggcg

SEQ ID NO: 520286 - DNA, 55 bp, Artificial
  Synthetic oligonucleotide
gtggttccatatctacttggagacgaagctattccaggtttccttcatccagagg

SEQ ID NO: 520287 - DNA, 55 bp, Artificial
  Synthetic oligonucleotide
gtggtgttactacttcgagacgaagccattcacggtatcccgtgtctaggcgttc

SEQ ID NO: 520288 - DNA, 55 bp, Artificial
  Synthetic oligonucleotide
cgcgtagcgttacaaattacaatacatagcgcagcctcgggctaaagaccgagtc

SEQ ID NO: 520289 - DNA, 55 bp, Artificial
  Synthetic oligonucleotide
cgcattatctcgttacgctttggaacaggggtactcccgtaaccggctcctgatg

SEQ ID NO: 520290 - DNA, 55 bp, Artificial
  Synthetic oligonucleotide
cgcaaaagaacgcttgggtattgtattttgttcctcagacgtacgatatgactgt

SEQ ID NO: 520291 - DNA, 55 bp, Artificial
  Synthetic oligonucleotide
cgaggatcaatttggtccagagttcgttatggggcataataatgccatttcaagc

SEQ ID NO: 520292 - DNA, 55 bp, Artificial
  Synthetic oligonucleotide
cgagcccaagatgtcttaccggtacgacttggtccgcagatgtagagggagttcc

SEQ ID NO: 520293 - DNA, 55 bp, Artificial
  Synthetic oligonucleotide
cgacaagtcaccaggggcttctgtacctaacacaggtgatatatttgatgggacg

SEQ ID NO: 520294 - DNA, 55 bp, Artificial
  Synthetic oligonucleotide
cgaaggagaggcacgtttagtgactcgacgcatttgaagcaataaatgtctcctc

SEQ ID NO: 520295 - DNA, 55 bp, Artificial
  Synthetic oligonucleotide
cctgggttaagttctattgggccgtgctgcccaagtcttgtcattgatgtggacc

SEQ ID NO: 520296 - DNA, 55 bp, Artificial
  Synthetic oligonucleotide
cctggacagtcatattggaggccaatggtgttgatccaaccaagaaggtgtcagc

SEQ ID NO: 520297 - DNA, 55 bp, Artificial
  Synthetic oligonucleotide
cctgcatgcagactgagggcttgaggacttacagtatacagctcctgctggagcc

SEQ ID NO: 520298 - DNA, 55 bp, Artificial
  Synthetic oligonucleotide
cctcgtctcttaaagatcggttttacattcgtcatgtgttcaagcgtgtattgtc

SEQ ID NO: 520299 - DNA, 55 bp, Artificial
  Synthetic oligonucleotide
cctccgttgaagtaattgtgtcttccgaggcttcttgcccaagtggtcttaccgg

SEQ ID NO: 520300 - DNA, 55 bp, Artificial
  Synthetic oligonucleotide
ccgttgacaattttagcttgcccttgaacttggcgaaatgtgttccttgatgaac

SEQ ID NO: 520301 - DNA, 55 bp, Artificial
  Synthetic oligonucleotide
ccgtcatccttttgtcgtgaatctccactattacagttccagcagcgttaatggg

SEQ ID NO: 520302 - DNA, 55 bp, Artificial
  Synthetic oligonucleotide
ccgggttttaatgtaattgggctgtgaagcccatatcttgatgtagatgcggacc

SEQ ID NO: 520303 - DNA, 55 bp, Artificial
  Synthetic oligonucleotide
ccggacaataacctacaagatggctgtgaagacgtgggttgctttggatggctcg

SEQ ID NO: 520304 - DNA, 55 bp, Artificial
  Synthetic oligonucleotide
ccgctttgtggtgaaacggcgttggccgtttaagttggaatgcaacggcagtacg

SEQ ID NO: 520305 - DNA, 55 bp, Artificial
  Synthetic oligonucleotide
ccgcgcagcggaatgggttctaaagtttatgtttgtgtctaagaacacttggagc

SEQ ID NO: 520306 - DNA, 55 bp, Artificial
  Synthetic oligonucleotide
ccgacgggcaaatactccgatgtataccaggcggagattttcatccgtgcctgtc

SEQ ID NO: 520307 - DNA, 55 bp, Artificial
  Synthetic oligonucleotide
cccttaggtcaagcactatgaatacttcgtggggaaggaagagaacccgtactgg

SEQ ID NO: 520308 - DNA, 55 bp, Artificial
  Synthetic oligonucleotide
ccctgctcttcttagggcttcttctacttgccctaagtattcctcgttcctcaaa

SEQ ID NO: 520309 - DNA, 55 bp, Artificial
  Synthetic oligonucleotide
ccctaatgctaaacaagggtcttcttactatggtcctgggcctgtgtatcagtgg

SEQ ID NO: 520310 - DNA, 55 bp, Artificial
  Synthetic oligonucleotide
cccgtaaacctgttaatagacgttcctatgtttcatcacgtacacattctagacg

SEQ ID NO: 520311 - DNA, 55 bp, Artificial
  Synthetic oligonucleotide
cccgccagagaccctgacgtggcgcattctcctccgcgcactgatgttatcttgg

SEQ ID NO: 520312 - DNA, 55 bp, Artificial
  Synthetic oligonucleotide
cccgcaaggtcggaaagcacgcactcaagtacggataccgaaagctcactcagtc

SEQ ID NO: 520313 - DNA, 55 bp, Artificial
  Synthetic oligonucleotide
cccctcggacattttcgatgtgccgagtggattgaccaattggccttctacctgg

SEQ ID NO: 520314 - DNA, 55 bp, Artificial
  Synthetic oligonucleotide
ctggcacttcccatggtacgtggtattcttgcggagcaagtttctctactttggc

SEQ ID NO: 520315 - DNA, 55 bp, Artificial
  Synthetic oligonucleotide
ctgcaagacgatctcagttaggtcatgagacagctgatactcatctctatgcgat

SEQ ID NO: 520316 - DNA, 55 bp, Artificial
  Synthetic oligonucleotide
ctgatccactccatcatgttatcttggaggctgtttaccgggtgaccggatcccc

SEQ ID NO: 520317 - DNA, 55 bp, Artificial
  Synthetic oligonucleotide
ctgagccaaaggtccttttatagtatatgaggccccaatgggcccgatgacacgt

SEQ ID NO: 520318 - DNA, 55 bp, Artificial
  Synthetic oligonucleotide
ctccgaatccgcatcggaatgggctgagtcgatagcactcctgacggcccaggac

SEQ ID NO: 520319 - DNA, 55 bp, Artificial
  Synthetic oligonucleotide
ctcacggcctttacgcgtggttctgccgacaaccaacgcaaatcccaggagacca

SEQ ID NO: 520320 - DNA, 55 bp, Artificial
  Synthetic oligonucleotide
ctagtggggatgtggcagacataaaagaaggtgcactctatattgtttgtgcacc

SEQ ID NO: 520321 - DNA, 55 bp, Artificial
  Synthetic oligonucleotide
ctagatatagacgtggtggatcgttaacccatcgacgaggttattcacgttatac

SEQ ID NO: 520322 - DNA, 55 bp, Artificial
  Synthetic oligonucleotide
ctacacttggtaagaccgagccttgtcgtactaggtcatatattaaactgagacg

SEQ ID NO: 520323 - DNA, 55 bp, Artificial
  Synthetic oligonucleotide
ctaatctatgcagttgtctatatggatgggttgtgttctcaacctcagagtccgc

SEQ ID NO: 520324 - DNA, 55 bp, Artificial
  Synthetic oligonucleotide
cgttcagacgcaggagtcgctctcaggtgtgaaagcaggtgattcatccgagcac

SEQ ID NO: 520325 - DNA, 55 bp, Artificial; identical to SEQ ID NO: 377316
  Synthetic oligonucleotide

SEQ ID NO: 520326 - DNA, 55 bp, Artificial
  Synthetic oligonucleotide
cgttaggaagaaggcgtttcttcccgtactttggatttacggtgatgtccctctg

SEQ ID NO: 520327 - DNA, 55 bp, Artificial
  Synthetic oligonucleotide
cgtgttcactcggatgtgaatatgaatgggttaactcccaagattgacggagtgt

SEQ ID NO: 520328 - DNA, 55 bp, Artificial
  Synthetic oligonucleotide
cgtcgagtttcttgtcacgctggatactacagtgtgtgtggaaccctccttcaga

SEQ ID NO: 520329 - DNA, 55 bp, Artificial
  Synthetic oligonucleotide
cggtggtggcatacttgtaaataagtgtgtgtaccccgattgagctctcgctcat

SEQ ID NO: 520330 - DNA, 55 bp, Artificial
  Synthetic oligonucleotide
cggtgaattgcttcgacagtatcctcacagttggtgccctaaatggaatatctac

SEQ ID NO: 520331 - DNA, 55 bp, Artificial
  Synthetic oligonucleotide
cgggtggaaacgcagtttggctgttgtgctaatttctctctcagtattttgggtg

SEQ ID NO: 520332 - DNA, 55 bp, Artificial
  Synthetic oligonucleotide
cgggcttggatagtttccaccaggaccggttgcttacatacggggacttccggcg

SEQ ID NO: 520333 - DNA, 55 bp, Artificial
  Synthetic oligonucleotide
cggcgatatctacgtttattacgtatccttcacttggtaagaccgagccttgtcg

SEQ ID NO: 520334 - DNA, 55 bp, Artificial
  Synthetic oligonucleotide
cggccctgtccacattcatcacgttccccagtctaggaagaaatggatccagccg

SEQ ID NO: 520335 - DNA, 55 bp, Artificial
  Synthetic oligonucleotide
cggccatatctacgtttattacatatccgacgcttggtaagtctgagccttgtcg

SEQ ID NO: 520336 - DNA, 55 bp, Artificial
  Synthetic oligonucleotide
cggattaggagggatgcgaatgaacgatttatcgtgaagaagaagtggcagactc

SEQ ID NO: 520337 - DNA, 55 bp, Artificial
  Synthetic oligonucleotide
cggatggccgcgcgttttcgcttccctctaaccgtggtcgttggattatcctctc

SEQ ID NO: 520338 - DNA, 55 bp, Artificial
  Synthetic oligonucleotide
cggactcttgaggatgtactctctagtcttgttaggacttcgagaagcctggatg

SEQ ID NO: 520339 - DNA, 55 bp, Artificial
  Synthetic oligonucleotide
cggaagtctgagacatagcgtgtctgatgctaacactctctgggacttagccgcg

SEQ ID NO: 520340 - DNA, 55 bp, Artificial
  Synthetic oligonucleotide
caaatgacactgcggataggttaagaaaaggtggcgtccttgtatcctgaaaggc

SEQ ID NO: 520341 - DNA, 55 bp, Artificial
  Synthetic oligonucleotide
caaagcgtcgtctatgtatagactgaagtctactgattcacaccagtagttatgt

SEQ ID NO: 520342 - DNA, 55 bp, Artificial
  Synthetic oligonucleotide
caaactctatcgttaacccgtgagtgagccaactgagccaaaggtccttttatag

SEQ ID NO: 520343 - DNA, 55 bp, Artificial
  Synthetic oligonucleotide
attgtgtcttccgaggcttcttgcccatgttgtctttccggtacgacttggtccg

SEQ ID NO: 520344 - DNA, 55 bp, Artificial
  Synthetic oligonucleotide
atggctcaactcctaagattgaaggcgtatttactatggtcattgttgttgatcg

SEQ ID NO: 520345 - DNA, 55 bp, Artificial
  Synthetic oligonucleotide
atggccgccacgtgtttcaatctgagaccgttgaattaaatacgataagcggaac

SEQ ID NO: 520346 - DNA, 55 bp, Artificial
  Synthetic oligonucleotide
atgctcgtatacttatacggttaatacgtagatactgcaggtgtagagactgggt

SEQ ID NO: 520347 - DNA, 55 bp, Artificial
  Synthetic oligonucleotide
atgcgtcgaaacgtttgcccaggccgtgggcttaaatagatagcgggccgaaagg

SEQ ID NO: 520348 - DNA, 55 bp, Artificial
  Synthetic oligonucleotide
atgaatctccactattactgatcctgttgcgttgataggaacctgttgtctgtac

SEQ ID NO: 520349 - DNA, 55 bp, Artificial
  Synthetic oligonucleotide
atatccgtatccacagtcgaatgggcttgtcctattgcactccttgaggcccatg

SEQ ID NO: 520350 - DNA, 55 bp, Artificial
  Synthetic oligonucleotide
atatatatgctagaagatatttaggttagattgtggtccctacacccttgcggcc

SEQ ID NO: 520351 - DNA, 55 bp, Artificial
  Synthetic oligonucleotide
ataaggcatgtcttgaaacgtgtcatatcagttgacaaggactccttaatggttg

SEQ ID NO: 520352 - DNA, 55 bp, Artificial
  Synthetic oligonucleotide
agttgtgtctgccgagactgcgggcccagctggtctttccggtacgagttggtcc

SEQ ID NO: 520353 - DNA, 55 bp, Artificial
  Synthetic oligonucleotide
agtcattgtggttgatcgtaaacctcatcttagttcttctggctctcttcataca

SEQ ID NO: 520354 - DNA, 55 bp, Artificial
  Synthetic oligonucleotide
aggattcatgagaatcagtatggcccagagtttgtaatgcttcataacacggcga

SEQ ID NO: 520355 - DNA, 55 bp, Artificial
  Synthetic oligonucleotide
agccagaggtcaaacaacttgaccgttaccagacatttgaagtttgatatgtctc

SEQ ID NO: 520356 - DNA, 55 bp, Artificial
  Synthetic oligonucleotide
agatggagattccagttcaaaggaaacagcacatctggatccgttgcttatgact

SEQ ID NO: 520357 - DNA, 55 bp, Artificial
  Synthetic oligonucleotide
agaacgccctcttagtttactattgttggatgtcggacgtcacatctaaggcgtc

SEQ ID NO: 520358 - DNA, 55 bp, Artificial
  Synthetic oligonucleotide
actcgaaccgccgccgaggcttaagacgagtcggtgcggttccctgcgatacatg

SEQ ID NO: 520359 - DNA, 55 bp, Artificial
  Synthetic oligonucleotide
actagaagttctttcaaggatctggtgacacctggcggccatccgttataatatt

SEQ ID NO: 520360 - DNA, 55 bp, Artificial
  Synthetic oligonucleotide
acggctgtgatttatccacgtgtctttcatcttgcgagccgacaaaagtgagtgg

SEQ ID NO: 520361 - DNA, 55 bp, Artificial
  Synthetic oligonucleotide
acataggacgaatagtctgtagcaaaacatgaagatgtggagtcccatcctggtg

SEQ ID NO: 520362 - DNA, 55 bp, Artificial
  Synthetic oligonucleotide
aactgggacatagacattgtaatgttggattgggttctctgaattccaatttgtg

SEQ ID NO: 520363 - DNA, 55 bp, Artificial
  Synthetic oligonucleotide
aacacttatccacagggagcgaatgacaattgtcgtcacaccaacagcaccttga

SEQ ID NO: 520364 - DNA, 55 bp, Artificial
  Synthetic oligonucleotide
aaagggaaggcgtcaaatcagaaacagggtgccaataatagaaggacagctcccc

SEQ ID NO: 520365 - DNA, 55 bp, Artificial
  Synthetic oligonucleotide
aaagacgtgccccgccccgcaattctgacgtggctcgatcgtatgcgttggatta

SEQ ID NO: 520366 - DNA, 55 bp, Artificial
  Synthetic oligonucleotide
cccctcctgttccaaggagggattcgctacaggtggctacgtttagttggaccag

SEQ ID NO: 520367 - DNA, 55 bp, Artificial
  Synthetic oligonucleotide
cccctcagaaattagatccccggaaaatcaatatgtttatattaatctgcagccc

SEQ ID NO: 520368 - DNA, 55 bp, Artificial
  Synthetic oligonucleotide
cccagatggtgtctctagatgagcgtctccaattcccccccttgaaactgggcgt

SEQ ID NO: 520369 - DNA, 55 bp, Artificial; identical to SEQ ID NO: 356339
  Synthetic oligonucleotide

SEQ ID NO: 520370 - DNA, 55 bp, Artificial
  Synthetic oligonucleotide
ccaggtatatccgagaaacagactgctttattgcgacagctgattaggcgtgtcg

SEQ ID NO: 520371 - DNA, 55 bp, Artificial
  Synthetic oligonucleotide
ccaatgggattgatcccagtaagtcgcagtccacatcatattatgggcctgggcc

SEQ ID NO: 520372 - DNA, 55 bp, Artificial
  Synthetic oligonucleotide
ccaacatgcttgtaaggattcattatcagtcatccttttgtcatgaatctccact

SEQ ID NO: 520373 - DNA, 55 bp, Artificial
  Synthetic oligonucleotide
ccaaatataccctccggtggaagatcatttcccagaagtgtcctcgcaggtttct

SEQ ID NO: 520374 - DNA, 55 bp, Artificial
  Synthetic oligonucleotide
ccaaataaccagatactcttcgttcttgatccgtctttttgatgagctgtaattg

SEQ ID NO: 520375 - DNA, 55 bp, Artificial
  Synthetic oligonucleotide
catgttactaagttttttaaacgtttaggggttagcacagagtggaagaattctt

SEQ ID NO: 520376 - DNA, 55 bp, Artificial
  Synthetic oligonucleotide
catgatgatgcaaagatgtcacagcaacgtatacatgaggatcagtttggtcccg

SEQ ID NO: 520377 - DNA, 55 bp, Artificial
  Synthetic oligonucleotide
catctggaaatagtttatttgcgctatattctagccattggagttttgtggccca

SEQ ID NO: 520378 - DNA, 55 bp, Artificial
  Synthetic oligonucleotide
cagtcctttattgtgggtgacatataagttaaccagtccatatctggattaacac

SEQ ID NO: 520379 - DNA, 55 bp, Artificial
  Synthetic oligonucleotide
cagtagttgtcacgtgcgaacgctgagatcgctggccatctgaggacgaagtctg

SEQ ID NO: 520380 - DNA, 55 bp, Artificial
  Synthetic oligonucleotide
caggtactggggtcttgtggctgatttacgattcacagccgaacggagctcagcc

SEQ ID NO: 520381 - DNA, 55 bp, Artificial
  Synthetic oligonucleotide
caggagtggaggacaatatgggacaagccgtgtaacgactgtggagacgctgccg

SEQ ID NO: 520382 - DNA, 55 bp, Artificial
  Synthetic oligonucleotide
cagctttatcaacgtttattacttatccacaactcggtaagactgagcccaaacg

SEQ ID NO: 520383 - DNA, 55 bp, Artificial
  Synthetic oligonucleotide
cagctatttcgacttttattactttccctactcttggtaaggttgaaccgaatcg

SEQ ID NO: 520384 - DNA, 55 bp, Artificial
  Synthetic oligonucleotide
cagctatctccacgtttattaccttccctaaacttggtaagattgaacctactcg

SEQ ID NO: 520385 - DNA, 55 bp, Artificial
  Synthetic oligonucleotide
cagcccacggcttgaatgttgcatgccaattggtgattgcatcatagtaagagtt

SEQ ID NO: 520386 - DNA, 55 bp, Artificial
  Synthetic oligonucleotide
cagagtgttcatcctgtgatggcatcccgaagggatccacatacggtggaggagt

SEQ ID NO: 520387 - DNA, 55 bp, Artificial
  Synthetic oligonucleotide
cagactccgagtccgatgtaccgttaccaattgtgcttttagtcgcccatgtttc

SEQ ID NO: 520388 - DNA, 55 bp, Artificial
  Synthetic oligonucleotide
cagactactcagacagtgttaccgccaatcccagagacggaaagagaaatgggcc

SEQ ID NO: 520389 - DNA, 55 bp, Artificial
  Synthetic oligonucleotide
cacctggatttaactctattgggttatgaagtccaaatcttgctgatgcagtaga

SEQ ID NO: 520390 - DNA, 55 bp, Artificial
  Synthetic oligonucleotide
cacccatttcaactttcattacataccctactctgggtaaaactgactccagtcg

SEQ ID NO: 520391 - DNA, 55 bp, Artificial
  Synthetic oligonucleotide
caatgccttgttcccacgtggggcgcactcgcggaaatttaatgttacccgcgag

SEQ ID NO: 520392 - DNA, 55 bp, Artificial
  Synthetic oligonucleotide
caagtgtacagcaggaaacggggccgtaatgcaaaggtgtatcaggctttgggag

SEQ ID NO: 520393 - DNA, 55 bp, Artificial
  Synthetic oligonucleotide
gattcagtagggaatgggctcttgtactccggtgtgacctccgggaagagcttgg

SEQ ID NO: 520394 - DNA, 55 bp, Artificial
  Synthetic oligonucleotide
gatgtccctctgtgccccaacaagccccttccaacaaggaacgaacttgaacggg

SEQ ID NO: 520395 - DNA, 55 bp, Artificial
  Synthetic oligonucleotide
gatggccataaaggcatgggttgccttggatggctctatggttagcagggtgtgc

SEQ ID NO: 520396 - DNA, 55 bp, Artificial
  Synthetic oligonucleotide
gcgtttatgctaacataagcaagaatgccctcttagtgtattattgttggatgtc

SEQ ID NO: 520397 - DNA, 55 bp, Artificial
  Synthetic oligonucleotide
gatgatttctgtaaggtcatgagacagttgatactcatctcgatgagactccaca

SEQ ID NO: 520398 - DNA, 55 bp, Artificial
  Synthetic oligonucleotide
gctcagaacagtgttttgaaattctatccttactagcgagtgagccaaatgagcc

SEQ ID NO: 520399 - DNA, 55 bp, Artificial
  Synthetic oligonucleotide
gatcaggcatttaatgcaggaggacgtgcgctgttgctcacggcatttacccgcg

SEQ ID NO: 520400 - DNA, 55 bp, Artificial
  Synthetic oligonucleotide
gctcatacagtgtttcacaaactctatgcttaaccagtgagtgagccagtgagtt

SEQ ID NO: 520401 - DNA, 55 bp, Artificial
  Synthetic oligonucleotide
gctcatagtggcatgtttgtaaataagagggtgtaccccgaatgagctctcgtcc

SEQ ID NO: 520402 - DNA, 55 bp, Artificial
  Synthetic oligonucleotide
gagttgttcgggttcctggtgtagtcatccatccaaattagatcttctgttgcag

SEQ ID NO: 520403 - DNA, 55 bp, Artificial
  Synthetic oligonucleotide
gctcatctggtagtctatacaccttcgatgagttatttggtgctaggatccacag

SEQ ID NO: 520404 - DNA, 55 bp, Artificial
  Synthetic oligonucleotide
gaggggtagtcagagccaggcatagggttgaagaccccagcctgaacggagggca

SEQ ID NO: 520405 - DNA, 55 bp, Artificial
  Synthetic oligonucleotide
gaggcacgtttagtgactcgacgcatttgaagcaataaatgtctcctctgaaccc

SEQ ID NO: 520406 - DNA, 55 bp, Artificial
  Synthetic oligonucleotide
gaggatttctggtactctccagattaagcatgtatcgcaggaccctatggatgca

SEQ ID NO: 520407 - DNA, 55 bp, Artificial
  Synthetic oligonucleotide
gctgatattaatatggatggtcctactcaaaagattgaaggagtcttctctatgg

SEQ ID NO: 520408 - DNA, 55 bp, Artificial
  Synthetic oligonucleotide
gctggggagagttgggcctcgaaaagtatattatcaggcgaaggtggatcggagg

SEQ ID NO: 520409 - DNA, 55 bp, Artificial
  Synthetic oligonucleotide
gaggacgacgactgagatagggtttggtaatacacccgctaggaggcaggataac

SEQ ID NO: 520410 - DNA, 55 bp, Artificial
  Synthetic oligonucleotide
gcttttagttagggcatattattaatggaggatcgatgcgggtggaaacgcagtt

SEQ ID NO: 520411 - DNA, 55 bp, Artificial
  Synthetic oligonucleotide
ggaacgtcttatttaagttccctcgtgatgtcccatgtgtatatgcttagctgca

SEQ ID NO: 520412 - DNA, 55 bp, Artificial
  Synthetic oligonucleotide
gagctctcgtccaaaagtctctatgaattggtgtaatggtgccaatatatactag

SEQ ID NO: 520413 - DNA, 55 bp, Artificial
  Synthetic oligonucleotide
gcgcgatacccgctcaacgtggtccccacgtgacaagacatgtcggccactcatg

SEQ ID NO: 520414 - DNA, 55 bp, Artificial
  Synthetic oligonucleotide
gcgccccgctccgcaattctgacgtggctcgcttgtgtcccttggattaaattag

SEQ ID NO: 520415 - DNA, 55 bp, Artificial
  Synthetic oligonucleotide
gcggcgtaagaagccgcgaaccacgaagtggactggatcccgcagcgcatctaga

SEQ ID NO: 520416 - DNA, 55 bp, Artificial
  Synthetic oligonucleotide
gcgggctaaacgcagcaagactacgaccgaactaggattcggtcagacgccgaga

SEQ ID NO: 520417 - DNA, 55 bp, Artificial
  Synthetic oligonucleotide
gcgagtcttgcatcggtcttctgagactgccaataaatatgtacccctcacattg

SEQ ID NO: 520418 - DNA, 55 bp, Artificial
  Synthetic oligonucleotide
gcgacgacacgtgttccatataagggtttattcgtcatctgaggtaatgaccaac

SEQ ID NO: 520419 - DNA, 55 bp, Artificial
  Synthetic oligonucleotide
gcggtccggtctctgatcctgaaaatgattgtacaacaggatcttcagaattacc

SEQ ID NO: 520420 - DNA, 55 bp, Artificial
  Synthetic oligonucleotide
gcgaagtgtgttcgctgatgaacatttgtgtcactaactctgtagtacaacttcc

SEQ ID NO: 520421 - DNA, 55 bp, Artificial
  Synthetic oligonucleotide
gccgcgcagcgggatgcttaactgatattaatagcgaaggggactgtttaacggg

SEQ ID NO: 520422 - DNA, 55 bp, Artificial
  Synthetic oligonucleotide
gcgtaccacgtagagttcgttttggacccactgatgaatttctggtggaaggtta

SEQ ID NO: 520423 - DNA, 55 bp, Artificial
  Synthetic oligonucleotide
gcccattaatgcagctttgtatgattgatctggattacacagtacaatggttgga

SEQ ID NO: 520424 - DNA, 55 bp, Artificial
  Synthetic oligonucleotide
gcccagagtttgtaatggttcataacacggctatatctacgtttattacgtatcc

SEQ ID NO: 520425 - DNA, 55 bp, Artificial
  Synthetic oligonucleotide
gcgtcatacaggagagactgtgacgtacaaggtaggcttggatctgttctgcgtc

SEQ ID NO: 520426 - DNA, 55 bp, Artificial
  Synthetic oligonucleotide
gcgtcatctgatgaacattcgagtcacatactctgtaatatagtttccatggaat

SEQ ID NO: 520427 - DNA, 55 bp, Artificial
  Synthetic oligonucleotide
gcgtgtattgtcagtggagaaggattctatgatgatagacattgagggatcgacc

SEQ ID NO: 520428 - DNA, 55 bp, Artificial
  Synthetic oligonucleotide
gcattccctagtatgaaggagattagctggcataagttacgtggtcaatgcatga

SEQ ID NO: 520429 - DNA, 55 bp, Artificial
  Synthetic oligonucleotide
gcagatgatagtcttagtttagccttgattgaggcgaatttaacaccctcgagta

SEQ ID NO: 520430 - DNA, 55 bp, Artificial
  Synthetic oligonucleotide
gcacacataaaatgcgtaatacaattggcttcaaagtattcaatctgtgcaggag

SEQ ID NO: 520431 - DNA, 55 bp, Artificial
  Synthetic oligonucleotide
gcacaactggcctgaaatgatagttggcgaaggatagaatggaaggccatctgag

SEQ ID NO: 520432 - DNA, 55 bp, Artificial
  Synthetic oligonucleotide
gaatgaccgcgcagcggactcggttccggagtttatgaaacagagactataaaag

SEQ ID NO: 520433 - DNA, 55 bp, Artificial
  Synthetic oligonucleotide
ggaggttggtgattccggcccatataggggtttggctcagttaggcccagacgcg

SEQ ID NO: 520434 - DNA, 55 bp, Artificial
  Synthetic oligonucleotide
ggagtggaaggacacaacgacagcggaagcgtcggacattaagggcggagccctc

SEQ ID NO: 520435 - DNA, 55 bp, Artificial
  Synthetic oligonucleotide
gaagacttactgtgaataagttggtgtctgcccattctctaatgggctcgggtac

SEQ ID NO: 520436 - DNA, 55 bp, Artificial
  Synthetic oligonucleotide
gaaccacagttgaggatctgaatgttctcgtagaggtcattgggacaacgtgtgg

SEQ ID NO: 520437 - DNA, 55 bp, Artificial
  Synthetic oligonucleotide
ggagttaaatctcagcgggagttggagcagttagttacccacccaggacgtcttg

SEQ ID NO: 520438 - DNA, 55 bp, Artificial
  Synthetic oligonucleotide
ggataatctgaattacaggcacgataactattgtaaaggcttgggctgcgaaggg

SEQ ID NO: 520439 - DNA, 55 bp, Artificial
  Synthetic oligonucleotide
gaaatagacagtgaagatggtaatcaccgtcgctgtgatgctcacgagtgacgag

SEQ ID NO: 520440 - DNA, 55 bp, Artificial
  Synthetic oligonucleotide
ggatcagtttggtcccgaatttgttctgggtcataatacagctttgtctacattc

SEQ ID NO: 520441 - DNA, 55 bp, Artificial
  Synthetic oligonucleotide
ggatgatcactatgttgaacaactatgttcaaggaattggtgatagccagaggtc

SEQ ID NO: 520442 - DNA, 55 bp, Artificial
  Synthetic oligonucleotide
ggatgcctgcatacgttcgacgagctattcggtgccaggattcacagccacggga

SEQ ID NO: 520443 - DNA, 55 bp, Artificial
  Synthetic oligonucleotide
cttggggcatattttggctcagaacagtgttttgaaattctatccttactagcga

SEQ ID NO: 520444 - DNA, 55 bp, Artificial
  Synthetic oligonucleotide
cttggagcttctgatgatatccgccattttggcgtcctttgttgttgacgcgtcg

SEQ ID NO: 520445 - DNA, 55 bp, Artificial
  Synthetic oligonucleotide
cttgcagtatgcaaggactttgtggggcatccttgcgttttgtacgttgggatgg

SEQ ID NO: 520446 - DNA, 55 bp, Artificial
  Synthetic oligonucleotide
ggcattctcgtaaataagaggttgtcaccaattggggtctcgctcaaactgcgct

SEQ ID NO: 520447 - DNA, 55 bp, Artificial
  Synthetic oligonucleotide
ggccgcagtcttaaccaattcgtttaattgggccattgaaagggtgatacttgac

SEQ ID NO: 520448 - DNA, 55 bp, Artificial
  Synthetic oligonucleotide
ctgttcctgctgcgttaataggaacctgctgtcgatattctataacgcaatgatc

SEQ ID NO: 520449 - DNA, 55 bp, Artificial
  Synthetic oligonucleotide
ctggctcgtgtacgataagacgcctactgggattgctgaccttgtcccctcggac

SEQ ID NO: 520450 - DNA, 55 bp, Artificial
  Synthetic oligonucleotide
ggaattcattacgcaataccgtttatccggtttaagcagtgtaacttcatctggc

SEQ ID NO: 520451 - DNA, 55 bp, Artificial
  Synthetic oligonucleotide
ggacctttaggatcttgacgcgtggggcgcactcacggattttaatattacccgt

SEQ ID NO: 520452 - DNA, 55 bp, Artificial
  Synthetic oligonucleotide
ggacggtatgcctcccttaatagtgcgatcgggtctatacttaatgttaacggta

SEQ ID NO: 520453 - DNA, 55 bp, Artificial
  Synthetic oligonucleotide
gacgcctactgggattactgacctgaccccgtcggacatcttcgatgtgccgtcg

SEQ ID NO: 520454 - DNA, 55 bp, Artificial
  Synthetic oligonucleotide
gacgaggatcgtctgcctatcgaggaacttattcacgtaaacatggtgctagacg

SEQ ID NO: 520455 - DNA, 55 bp, Artificial
  Synthetic oligonucleotide
gacgaggatcgtctgcatatcggggaacttattctcgtaaacctgttggtagacg

SEQ ID NO: 520456 - DNA, 55 bp, Artificial
  Synthetic oligonucleotide
ggagcgtcgtaatactttcatagaggggaccacttagaaaattggtctgatgacc

SEQ ID NO: 520457 - DNA, 55 bp, Artificial
  Synthetic oligonucleotide
ggaggatcgatgcgggtggaaacgcactttggctgttgtgctaatttctctctca

SEQ ID NO: 520458 - DNA, 55 bp, Artificial
  Synthetic oligonucleotide
gacattggaatgtgttatacctactgcactccttgtagcccaagtttcacctgga

SEQ ID NO: 520459 - DNA, 55 bp, Artificial
  Synthetic oligonucleotide
gacattatctttacggtgggtgccctgaacggtatgtcgaccgaatgtttcgccg

SEQ ID NO: 520460 - DNA, 55 bp, Artificial
  Synthetic oligonucleotide
gacagtgtccagagctgtctgtcataggtttgttgtgaagaagacctggacagtc

SEQ ID NO: 520461 - DNA, 55 bp, Artificial
  Synthetic oligonucleotide
gacaagaaccctggtgatagtaatcctgggccctcagccatatttgatactctct

SEQ ID NO: 520462 - DNA, 55 bp, Artificial
  Synthetic oligonucleotide
gacagtattcggcccaggccccatcttggggccggaagaagacaagaacaccccg

SEQ ID NO: 520463 - DNA, 55 bp, Artificial
  Synthetic oligonucleotide
ggagggagcaggaggtgaatgggctttgatatggtggttcaatttcagggaatag

SEQ ID NO: 520464 - DNA, 55 bp, Artificial
  Synthetic oligonucleotide
gacacaacgacagcggaagcgtcggacatcaagggcggagccctctaccttgtgg

SEQ ID NO: 520465 - DNA, 54 bp, Artificial
  Synthetic oligonucleotide
agttgtcttaccggtacgagttggtccgcagatgtagagtgaacgtcttcgttc

SEQ ID NO: 520466 - DNA, 54 bp, Artificial
  Synthetic oligonucleotide
aaaacaatggtctgtgatgctggaagctaatggagtggatcctagtgtgaaaca

SEQ ID NO: 520467 - DNA, 54 bp, Artificial
  Synthetic oligonucleotide
ggtgtaagggcccatgtaaaacacacacggtggatgtgataaagactatttatc

SEQ ID NO: 520468 - DNA, 54 bp, Artificial
  Synthetic oligonucleotide
gcgttaggcatgttgactttgtatgggtacccttgaccgctctcgtctaatcct

SEQ ID NO: 520469 - DNA, 54 bp, Artificial
  Synthetic oligonucleotide
ggcaaacgtggatcgaatattcatagaaatgcccacgatgatgttaaaatgtca

SEQ ID NO: 520470 - DNA, 54 bp, Artificial
  Synthetic oligonucleotide
aatttgatggcacccgtgaagtagttgtgtaggcctaaacttctggcccaggcg

SEQ ID NO: 520471 - DNA, 54 bp, Artificial
  Synthetic oligonucleotide
ttgagcgctcaacggaacgcctcgaagagggtccccagaaatccaagggtgcgc

SEQ ID NO: 520472 - DNA, 54 bp, Artificial
  Synthetic oligonucleotide
ggatgctatgtccaaggcatctacgtttgtgtcatttgatcttgattatgttgg

SEQ ID NO: 520473 - DNA, 54 bp, Artificial
  Synthetic oligonucleotide
gggcgctagctcttgctttcaccgtaactacggtaactcttgttttgctgttcg

SEQ ID NO: 520474 - DNA, 54 bp, Artificial
  Synthetic oligonucleotide
tgcggccccaaggatctggcccattcggtcttgcctatacgtgaagctccttcg

SEQ ID NO: 520475 - DNA, 54 bp, Artificial
  Synthetic oligonucleotide
agcctggtacatggactgttacccgcaatgtttgtcacaggttcgttgttaaaa

SEQ ID NO: 520476 - DNA, 54 bp, Artificial
  Synthetic oligonucleotide
tcactccctaagagggagtgtagaacttctcatgaagttccatctgatacacaa

SEQ ID NO: 520477 - DNA, 54 bp, Artificial
  Synthetic oligonucleotide
gagcactctatcttgtatgtgctcctggaggtggtgcaaccgttagggttgggg

SEQ ID NO: 520478 - DNA, 54 bp, Artificial
  Synthetic oligonucleotide
tcgcacaagatcggggagacagtattcggcccaggccccatcttggggccggaa

SEQ ID NO: 520479 - DNA, 54 bp, Artificial
  Synthetic oligonucleotide
cggaattgagttgagcgcaaattttgagttccgcccgtacagtcaattgtttcg

SEQ ID NO: 520480 - DNA, 54 bp, Artificial
  Synthetic oligonucleotide
gtacacgaagtggacctctacccgcagctctaacagagatgcgttgcaggtaca

SEQ ID NO: 520481 - DNA, 54 bp, Artificial
  Synthetic oligonucleotide
taactatgtcgtttaattgggctaacgataacgtaatgttcgactgagtcctgt

SEQ ID NO: 520482 - DNA, 54 bp, Artificial
  Synthetic oligonucleotide
gttgatctaactatttcgtttaactgggacatagacattgtaatgttggattgg

SEQ ID NO: 520483 - DNA, 54 bp, Artificial
  Synthetic oligonucleotide
taaccgatgtctcaggtgaagaagaggacccgtcggggggacgaagtggagtgg

SEQ ID NO: 520484 - DNA, 54 bp, Artificial
  Synthetic oligonucleotide
catgttatggctcatacagtgtttcacaaactctatgcttaaccagtgagtgag

SEQ ID NO: 520485 - DNA, 53 bp, Artificial
  Synthetic oligonucleotide
ctttgtgtattgccggggtacctcgggcgcaccaatcaggttcgcctgtcata

SEQ ID NO: 520486 - DNA, 53 bp, Artificial
  Synthetic oligonucleotide
actgtgaagattgaacgtgtctatcctgagttgaacatggatggattgactcc

SEQ ID NO: 520487 - DNA, 53 bp, Artificial
  Synthetic oligonucleotide
taatcagtagcccactgtaattgagcccattgggcgatctatgatctgaaata

SEQ ID NO: 520488 - DNA, 53 bp, Artificial
  Synthetic oligonucleotide
aggatttacagtaaagtccttctggcagccgatcagagccttccagtgaggac

SEQ ID NO: 520489 - DNA, 53 bp, Artificial
  Synthetic oligonucleotide
cgtgactccgttgtgaatggaatatgcatatggacttactgaatataattctt

SEQ ID NO: 520490 - DNA, 53 bp, Artificial
  Synthetic oligonucleotide
gaaggacagtacgatgattgatcttgaaggaacgacagcactatctaataggc

SEQ ID NO: 520491 - DNA, 53 bp, Artificial
  Synthetic oligonucleotide
ttagctgttggtcatcgtttagggatctcgagagagattcatgtaatggagtc

SEQ ID NO: 520492 - DNA, 53 bp, Artificial
  Synthetic oligonucleotide
ggagacgacagcatagtaattcaaacaagggccgtgatgagtcaaagctttca

SEQ ID NO: 520493 - DNA, 53 bp, Artificial
  Synthetic oligonucleotide
gacgtggctcgcttgtgtcccttggattaaattagatgtggtcccatccttta

SEQ ID NO: 520494 - DNA, 53 bp, Artificial
  Synthetic oligonucleotide
tgtctctgatggctagtggtgcattttgggcgagtcctaactatatgactcaa

SEQ ID NO: 520495 - DNA, 53 bp, Artificial
  Synthetic oligonucleotide
cttacgtggcgctctctcatccacccattcatgctatcttggaggctgtttac

SEQ ID NO: 520496 - DNA, 53 bp, Artificial
  Synthetic oligonucleotide
tcaagttcgcgagccgttgactctagaggaaggcgaggactttcttcaattcc

SEQ ID NO: 520497 - DNA, 53 bp, Artificial
  Synthetic oligonucleotide
tccgccagctgtccctacaaggacagcgtctgaggtttcaattcccgtaaggg

SEQ ID NO: 520498 - DNA, 53 bp, Artificial
  Synthetic oligonucleotide
gtaaactgcttcgacaagatcttgacggtcggagccctgaacggaatatcaac

SEQ ID NO: 520499 - DNA, 53 bp, Artificial
  Synthetic oligonucleotide
ggtaatgttgacccatgccgcagcaggtcatatattaagttaaaacgcttacg

SEQ ID NO: 520500 - DNA, 52 bp, Artificial
  Synthetic oligonucleotide
gttaagaggcgatggacgttcaccctggagactaacgggaggctcgcatctg

SEQ ID NO: 520501 - DNA, 52 bp, Artificial
  Synthetic oligonucleotide
aatcatattaataggttgtactggctgcgcagctgaatgcattagtactgta

SEQ ID NO: 520502 - DNA, 52 bp, Artificial
  Synthetic oligonucleotide
aataaccgggttggttaggggtaggtctgtttctgtttggagcacgtggcat

SEQ ID NO: 520503 - DNA, 52 bp, Artificial
  Synthetic oligonucleotide
aagcatctacgcttaccacgtacaggtctctgttcagccactcttgtatttc

SEQ ID NO: 520504 - DNA, 52 bp, Artificial
  Synthetic oligonucleotide
agttcattcggcaccttatgtggatggagatcatgctattcagccatcaaga

SEQ ID NO: 520505 - DNA, 52 bp, Artificial
  Synthetic oligonucleotide
ttaccgggtgaccggatccccccctccctttttaccggtttcccaggttacc

SEQ ID NO: 520506 - DNA, 52 bp, Artificial
  Synthetic oligonucleotide
ataagaagccgcaggagtcattgccgcattcacgtgcagcatttaatatttt

SEQ ID NO: 520507 - DNA, 52 bp, Artificial
  Synthetic oligonucleotide
ataagtaaggaagacatatttagtttgaagtctgaagaagagggttttttta

SEQ ID NO: 520508 - DNA, 52 bp, Artificial
  Synthetic oligonucleotide
gcacgtgccctcgtgacatcacgcaaacatgaaacgtccaagttttttctcg

SEQ ID NO: 520509 - DNA, 52 bp, Artificial
  Synthetic oligonucleotide
atccttactagcgagtgagccaaatgagccactctgttttgtattaaataat

SEQ ID NO: 520510 - DNA, 52 bp, Artificial
  Synthetic oligonucleotide
gactgtctcactgacatgtgaggacatctcgtcagaagctatcgtggatagc

SEQ ID NO: 520511 - DNA, 52 bp, Artificial
  Synthetic oligonucleotide
tttctggttagtgtacgacaagaacccgggtgatacgaatccctctccatcg

SEQ ID NO: 520512 - DNA, 52 bp, Artificial
  Synthetic oligonucleotide
cttccgtttgtatttcaagagtgtcggtaatcagtaggattaccgtctttgt

SEQ ID NO: 520513 - DNA, 52 bp, Artificial
  Synthetic oligonucleotide
tccgttaggaagaacacgttttttcccgtactttggattgacggtgatgtcc

SEQ ID NO: 520514 - DNA, 52 bp, Artificial
  Synthetic oligonucleotide
atgggccttaaataggctgtatttggtgggcttctttcggtcgggcgctcgg

SEQ ID NO: 520515 - DNA, 51 bp, Artificial
  Synthetic oligonucleotide
agggttcgctttcgtactatcagaagaagtacataaggaataagattaggg

SEQ ID NO: 520516 - DNA, 51 bp, Artificial
  Synthetic oligonucleotide
ttatgttcctcgactgcggatgaatgaatttatccgcagaccaatcggaga

SEQ ID NO: 520517 - DNA, 51 bp, Artificial
  Synthetic oligonucleotide
tctggacctggagctaggctcaggcttgcatagtccagacagtcgttgtac

SEQ ID NO: 520518 - DNA, 51 bp, Artificial
  Synthetic oligonucleotide
ggataaaaacttcgtcacgaagttggtgagtcacacaatgtgggacccttt

SEQ ID NO: 520519 - DNA, 51 bp, Artificial
  Synthetic oligonucleotide
tgatgatgttctagtgatactgcaaggaatagaatcacatatgattctaat

SEQ ID NO: 520520 - DNA, 51 bp, Artificial
  Synthetic oligonucleotide
taagtccgacaacatagacgatgtaatcgtctgtagattccataatccgag

SEQ ID NO: 520521 - DNA, 51 bp, Artificial
  Synthetic oligonucleotide
gcgtaaggcccccttgggggccgctcattagggacttttaggttggtttgc

SEQ ID NO: 520522 - DNA, 51 bp, Artificial
  Synthetic oligonucleotide
taaggcagtgaagatggggaataccattctggtggagttcagtagcaatag

SEQ ID NO: 520523 - DNA, 51 bp, Artificial
  Synthetic oligonucleotide
ctttagacgctggatccgtttattcgtcgtcacagaaactgttagtttctg

SEQ ID NO: 520524 - DNA, 51 bp, Artificial
  Synthetic oligonucleotide
acagggacatgggtcaccgcttcgtgattaagaggaggtgggtgaattggt

SEQ ID NO: 520525 - DNA, 51 bp, Artificial
  Synthetic oligonucleotide
accggatggccgcgcgattttttacccttttgacgtggcgctctctctgcc

SEQ ID NO: 520526 - DNA, 51 bp, Artificial
  Synthetic oligonucleotide
accatacaggcgtacgccctcgagaatgcacattcgtcctcctgtaaatcg

SEQ ID NO: 520527 - DNA, 51 bp, Artificial
  Synthetic oligonucleotide
tttcatacaactacgactgattctagcagttaactgagacgctgtggacgg

SEQ ID NO: 520528 - DNA, 51 bp, Artificial
  Synthetic oligonucleotide
tatactcgaatgctcgctttggggcgttgagtccgtcgattcttgggtgaa

SEQ ID NO: 520529 - DNA, 51 bp, Artificial
  Synthetic oligonucleotide
atacctgtggacgtccaataaggccggtgttacgttttctcctgggggttc

SEQ ID NO: 520530 - DNA, 51 bp, Artificial
  Synthetic oligonucleotide
tccttagttgttgcagtctggataatatttcgccatcgttcatgatgttta

SEQ ID NO: 520531 - DNA, 51 bp, Artificial
  Synthetic oligonucleotide
agtttcttctttcgataacgagcactgcggatatgtaagaaataagttctt

SEQ ID NO: 520532 - DNA, 51 bp, Artificial
  Synthetic oligonucleotide
gaatggacggtcaagatttggtgttacaagactatcatagcacgagacgta

SEQ ID NO: 520533 - DNA, 51 bp, Artificial
  Synthetic oligonucleotide
tggatgtcttcatacatttgacgaacttttcggtgcaaggattcatagtca

SEQ ID NO: 520534 - DNA, 51 bp, Artificial
  Synthetic oligonucleotide
ggattcaaagtattcattctgagaggaagacatgtctttgatccaatcgtc

SEQ ID NO: 520535 - DNA, 51 bp, Artificial
  Synthetic oligonucleotide
ttaggacttcgagaagcctggatgttagggtggtaaccctgaatgtcaaaa

SEQ ID NO: 520536 - DNA, 51 bp, Artificial
  Synthetic oligonucleotide
ccggttcgaagtaaccgggctgtgaagttgaagatgtatgacgacatgtta

SEQ ID NO: 520537 - DNA, 51 bp, Artificial
  Synthetic oligonucleotide
gaggataagttagtgctatataaagatgatgtgacgtttagagagagaata

SEQ ID NO: 520538 - DNA, 50 bp, Artificial
  Synthetic oligonucleotide
tgaggacgtattggtaggggtaatgttgtttgacgagttgcagaaactcg

SEQ ID NO: 520539 - DNA, 50 bp, Artificial
  Synthetic oligonucleotide
ggttgagaaggaatacaattgttgttgatacattcttgggccgctgtttt

SEQ ID NO: 520540 - DNA, 50 bp, Artificial
  Synthetic oligonucleotide
ggatgtcggatactgtgtctaaggcatccacgtttgtatcatttgatcta

SEQ ID NO: 520541 - DNA, 50 bp, Artificial
  Synthetic oligonucleotide
ttgatgggaactgcaggtttattcttgttgcgtcattagtgaggctgtat

SEQ ID NO: 520542 - DNA, 50 bp, Artificial
  Synthetic oligonucleotide
tgagtcattaaattgctatataaagatgacctgacatcccaaagttgaaa

SEQ ID NO: 520543 - DNA, 50 bp, Artificial
  Synthetic oligonucleotide
aggcgtcttcaatgcctaattataagaaagctatgaacattaatattcgg

SEQ ID NO: 520544 - DNA, 50 bp, Artificial
  Synthetic oligonucleotide
gtatctgggtcggataatggttatggatggcacatctcggacgttcctat

SEQ ID NO: 520545 - DNA, 50 bp, Artificial
  Synthetic oligonucleotide
gcatttattgctgcgtgtgtcttgtcattcatttacaagacgtgcattgc

SEQ ID NO: 520546 - DNA, 50 bp, Artificial
  Synthetic oligonucleotide
agtgctgcaactgccgaggtgcatgccaaatatgatacattgtacttggg

SEQ ID NO: 520547 - DNA, 50 bp, Artificial
  Synthetic oligonucleotide
tctcaagatatgccttgacatcggagctagacttagctccctgaatgttc

SEQ ID NO: 520548 - DNA, 50 bp, Artificial
  Synthetic oligonucleotide
gtggatcctagtgtgaaacaagggtctacttactatggtcctggaccttg

SEQ ID NO: 520549 - DNA, 50 bp, Artificial
  Synthetic oligonucleotide
cccttcacactatgacggtagacctgcacggtggaaaggattttagggtt

SEQ ID NO: 520550 - DNA, 50 bp, Artificial
  Synthetic oligonucleotide
ggggagaccttggcttacaagctgggaatcgacctagaggtacaggttgt

SEQ ID NO: 520551 - DNA, 50 bp, Artificial
  Synthetic oligonucleotide
gaggataagttagtgctatataaaggtgatgtgacataaaggtgtggaaa

SEQ ID NO: 520552 - DNA, 50 bp, Artificial
  Synthetic oligonucleotide
caagtctcctgcgaagctcccataggatgtggagatggggattgccatct

SEQ ID NO: 520553 - DNA, 50 bp, Artificial
  Synthetic oligonucleotide
tcccgcccaataattcaattataaatagacgggtgttttggcatgtagtg

SEQ ID NO: 520554 - DNA, 60 bp, Artificial
  Synthetic oligonucleotide
aacagtacatccaaattgaagactcaagatggactgaattaaggactgtaatcaaaaaga

SEQ ID NO: 520555 - DNA, 60 bp, Artificial
  Synthetic oligonucleotide
ttattgatccatcaaatatctcagccactgataaagccaactcctcctcaaactctcagt

SEQ ID NO: 520556 - DNA, 60 bp, Artificial
  Synthetic oligonucleotide
aggaattggaaatatttgactccagccaaattttggcccaagagcatttcctattatcct

SEQ ID NO: 520557 - DNA, 60 bp, Artificial
  Synthetic oligonucleotide
caatcactagaccaatccaagtggcttcaggtagcagaacaaaaactcagggaactcgaa

SEQ ID NO: 520558 - DNA, 60 bp, Artificial
  Synthetic oligonucleotide
cgaacaagctttggatcgtgctagaagattgctttggtggcattataattgtctggtgtg

SEQ ID NO: 520559 - DNA, 60 bp, Artificial
  Synthetic oligonucleotide
ctgtatgccaaggtatctttacgtcttgcttgctgttgtctgcattgactgtaccttcgg

SEQ ID NO: 520560 - DNA, 60 bp, Artificial
  Synthetic oligonucleotide
cttcctcctctgtcacccaaacgctcgtcaccttaacgcagttagccacgctgtctgcac

SEQ ID NO: 520561 - DNA, 60 bp, Artificial
  Synthetic oligonucleotide
ttatcattgctacacattttgtggatcttattgaagatttttggcagactacgcagggta

SEQ ID NO: 520562 - DNA, 60 bp, Artificial
  Synthetic oligonucleotide
gactcaacctttgtgtgtcacaagaggtacatgacgttgccatggaattttgctgtcctc

SEQ ID NO: 520563 - DNA, 60 bp, Artificial
  Synthetic oligonucleotide
gcgtacttcagggggttcaagaggaccctccacgactaggagataaatctcctgcgtcgc

SEQ ID NO: 520564 - DNA, 60 bp, Artificial
  Synthetic oligonucleotide
ttactggtaggatttttcttgttgataaaaattctagaaacactgaggaagctagacttg

SEQ ID NO: 520565 - DNA, 60 bp, Artificial
  Synthetic oligonucleotide
ggtctctttacctttgccacgcgtagccgctgatgctacgttaacgcatggcgcaatatc

SEQ ID NO: 520566 - DNA, 60 bp, Artificial
  Synthetic oligonucleotide
gtccctgcgtggaaagtgaccgagaaagagattcctttcgtcgagtcgagtacttggtcg

SEQ ID NO: 520567 - DNA, 60 bp, Artificial
  Synthetic oligonucleotide
tcccgagaaaggagttcctcttcaccccaacgtgcgggctcccctatcccgcgtacttca

SEQ ID NO: 520568 - DNA, 56 bp, Artificial
  Synthetic oligonucleotide
atcaagaggaacgtattgctagctaccaacctgattatcctgttcctgcacgtatt

SEQ ID NO: 520569 - DNA, 55 bp, Artificial
  Synthetic oligonucleotide
ttgactccagccaaattttggcccaagagcatttcctattatcctagagaaatag

SEQ ID NO: 520570 - DNA, 55 bp, Artificial
  Synthetic oligonucleotide
gtgtacaggaattgttaatgagttgcttagccatgttaatgattaaaccacgctg

SEQ ID NO: 520571 - DNA, 55 bp, Artificial
  Synthetic oligonucleotide
ggagtacccaatcccaagcaaccatcagcacctcgcgtgacctggacaccggaag

SEQ ID NO: 520572 - DNA, 55 bp, Artificial
  Synthetic oligonucleotide
agcgtaattctaaacacattgttacatttaaaggaaagccctatccttgggagac

SEQ ID NO: 520573 - DNA, 54 bp, Artificial
  Synthetic oligonucleotide
gactaggagataaatctcctgcgtcgcataagttggggaagttatcaggtttat

SEQ ID NO: 520574 - DNA, 54 bp, Artificial
  Synthetic oligonucleotide
tttactatgtacctagcaaatataatcctgctgacggcccaaccaggaagaaac

SEQ ID NO: 520575 - DNA, 52 bp, Artificial
  Synthetic oligonucleotide
aacactgaggaagctagacttgtggtggacttctctcagttttccaaaggac

SEQ ID NO: 520576 - DNA, 51 bp, Artificial
  Synthetic oligonucleotide
tttatcatattcctcttaatcctgctagtggtagcaggcttgctatatctg

SEQ ID NO: 520577 - DNA, 60 bp, Artificial
  Synthetic oligonucleotide
cctggactcgccctgaacgttgttgcaggcctcaaggcgattgcagaaggggttatggac

SEQ ID NO: 520578 - DNA, 60 bp, Artificial
  Synthetic oligonucleotide
cctggtgtctagcgtcaagtgggatcaggtcaccttgaatggtaaggcactacataagga

SEQ ID NO: 520579 - DNA, 60 bp, Artificial
  Synthetic oligonucleotide
cctgtttaacatcgctgacaccttgctgggtgggctccctaccgatctggtgtccaatgc

SEQ ID NO: 520580 - DNA, 60 bp, Artificial
  Synthetic oligonucleotide
cggcccatggttccgggccatagagaaagcaattgtggacacattgcctgaatggtgctt

SEQ ID NO: 520581 - DNA, 60 bp, Artificial
  Synthetic oligonucleotide
ctatatgctgtgatgcacttacctgctgaggcgctgctacccgacggggtttacaccacg

SEQ ID NO: 520582 - DNA, 60 bp, Artificial
  Synthetic oligonucleotide
ctggctatttgagaagtcaggccgtgattacatccccggccgccaactccagttttatgc

SEQ ID NO: 520583 - DNA, 60 bp, Artificial
  Synthetic oligonucleotide
cttgatgcaaccccggcaactggttttccgtcctgaagtgctttggaatcaccccatcca

SEQ ID NO: 520584 - DNA, 60 bp, Artificial
  Synthetic oligonucleotide
cttgtttaatatcgcagataccctattgggcggactcccgacggatttggtgtccaatgc

SEQ ID NO: 520585 - DNA, 60 bp, Artificial
  Synthetic oligonucleotide
gagcgtactagactctcacccagcttattggtctgctgaagccactatcataaatgtggc

SEQ ID NO: 520586 - DNA, 60 bp, Artificial
  Synthetic oligonucleotide
gatgtggcccttcaccagatgtcagaggcttttggtcatcgcccgttagaagtccgagcc

SEQ ID NO: 520587 - DNA, 60 bp, Artificial
  Synthetic oligonucleotide
gcaacccccgatggagacccatcaatatgtcgccgccacgggggttaatactgctagaga

SEQ ID NO: 520588 - DNA, 60 bp, Artificial
  Synthetic oligonucleotide
gctacaaccacgagcgcaaattgatacgagcctggattaaggtcacccgggtccgaggct

SEQ ID NO: 520589 - DNA, 60 bp, Artificial
  Synthetic oligonucleotide
ggaacatggcggtgatcttgcactgttaccggtttgagggggtggcagtaatggctttca

SEQ ID NO: 520590 - DNA, 60 bp, Artificial
  Synthetic oligonucleotide
ggacatagtccactgccgcatggccgctcctagccagcggaaggccgtcctatcgacgct

SEQ ID NO: 520591 - DNA, 60 bp, Artificial
  Synthetic oligonucleotide
ggcagacccctaatggagacacatcagtatgtctcagccacaggggtcaacacagcccgt

SEQ ID NO: 520592 - DNA, 60 bp, Artificial
  Synthetic oligonucleotide
gggtcactggttgtacgaggaaagtggctgtcagctggtataaatctttgacacattggc

SEQ ID NO: 520593 - DNA, 60 bp, Artificial
  Synthetic oligonucleotide
ggtactattaccacctggcacttatcataccacctcgtatcttttgatccacgacggtaa

SEQ ID NO: 520594 - DNA, 60 bp, Artificial
  Synthetic oligonucleotide
ggtccttggttccgtgccattgagaagagaattgtagcacaacttccatcaggctggttt

SEQ ID NO: 520595 - DNA, 60 bp, Artificial
  Synthetic oligonucleotide
ggttactggccccccgtgaccgattgtcagtcgtcggtaccttggtcggtcggtatggga

SEQ ID NO: 520596 - DNA, 60 bp, Artificial
  Synthetic oligonucleotide
gtcatggcatgcatacactatatgctgtgatgcacttacctgctgaggcgctgttacccg

SEQ ID NO: 520597 - DNA, 60 bp, Artificial
  Synthetic oligonucleotide
tagccggcagcagaccgagctattgattgggctttttagcccagtgcagcttaggtttga

SEQ ID NO: 520598 - DNA, 60 bp, Artificial
  Synthetic oligonucleotide
tctaacacacacattatggcgactgaggcttccaattatgctcaatatcgcatacaggcc

SEQ ID NO: 520599 - DNA, 60 bp, Artificial
  Synthetic oligonucleotide
tgcagcttgtctttgagcccgctgtttcttggtcgcatccggtacagcgcgttattcata

SEQ ID NO: 520600 - DNA, 60 bp, Artificial
  Synthetic oligonucleotide
tggcagttacgccgggctgttgcttgcttgcggtatgggggttgttcctgacgtggtgag

SEQ ID NO: 520601 - DNA, 60 bp, Artificial
  Synthetic oligonucleotide
tgtaccccggaggaacccggggtgtcggggggcctcggcgtggcacacgatcagatgcag

SEQ ID NO: 520602 - DNA, 60 bp, Artificial
  Synthetic oligonucleotide
tgtgctttccagtctactattgctgaacttcagcgtcttaaaatgaaggtaggtaaaacc

SEQ ID NO: 520603 - DNA, 60 bp, Artificial
  Synthetic oligonucleotide
tgttgttagagcttttgccggatgggtcagcggtttatgaaggggacctgttttcatctg

SEQ ID NO: 520604 - DNA, 60 bp, Artificial
  Synthetic oligonucleotide
ttaagttgaaggtcaactttggtgacgtcgggtcctatgcaggtttattggtagcttgcg

SEQ ID NO: 520605 - DNA, 60 bp, Artificial
  Synthetic oligonucleotide
ttaccaccggtgagaccattgcccacggtaaagtcggccagggcatttcagcttggagca

SEQ ID NO: 520606 - DNA, 60 bp, Artificial
  Synthetic oligonucleotide
ttagtgtactcacggtgacactaaatatggctaggttggctaaccttgccattgccgcag

SEQ ID NO: 520607 - DNA, 60 bp, Artificial
  Synthetic oligonucleotide
atgtctgtataggcaggagacggccgcctattgcctacttggcagtggaatatatcaagt

SEQ ID NO: 520608 - DNA, 60 bp, Artificial
  Synthetic oligonucleotide
atagacaggagacagcggcctattgcctactcggtagcgggatataccaggttccccctg

SEQ ID NO: 520609 - DNA, 60 bp, Artificial
  Synthetic oligonucleotide
agcgtgcgaaatccgtcaccttgttaggagaccccaaacagatcccagctcttgactttg

SEQ ID NO: 520610 - DNA, 60 bp, Artificial
  Synthetic oligonucleotide
cactttgtactgtgtatcaccgcttgtgcccctgcacctatgccgtacacccctttcccg

SEQ ID NO: 520611 - DNA, 60 bp, Artificial
  Synthetic oligonucleotide
cagcagtactctaaaacattctacgttctcccgctccgtggaaagttatccttttgggaa

SEQ ID NO: 520612 - DNA, 60 bp, Artificial
  Synthetic oligonucleotide
agcggcttgccccccccaatcaccagggctgatgctaggcccaattggatgtcctccaca

SEQ ID NO: 520613 - DNA, 60 bp, Artificial
  Synthetic oligonucleotide
cattgctacgaatttcgcgacttcagggttgccgctttcaagggtgatgattcagtggtc

SEQ ID NO: 520614 - DNA, 60 bp, Artificial
  Synthetic oligonucleotide
acttagatgtgagagagatgtgtttcgatcgtgagtatagctgtctatgctgcctctgta

SEQ ID NO: 520615 - DNA, 60 bp, Artificial
  Synthetic oligonucleotide
actcgtccttgacttccgtaatctaacgcctggcaatactaattctaggttgacccggat

SEQ ID NO: 520616 - DNA, 60 bp, Artificial
  Synthetic oligonucleotide
ccctgcacgatctacatccgcgtgaagttgccagggcgatgcgtgctcatggtatgcaca

SEQ ID NO: 520617 - DNA, 60 bp, Artificial
  Synthetic oligonucleotide
acatcgctggctgatgtgccttcttgcgatggggacttaccatctccaactgcacccatg

SEQ ID NO: 520618 - DNA, 60 bp, Artificial
  Synthetic oligonucleotide
aatcgatgcacccgggagcgataactgtccacgaggcccagggcagcacgtttaacaccg

SEQ ID NO: 520619 - DNA, 60 bp, Artificial
  Synthetic oligonucleotide
aaatgggatcaggtcaccttgaatggtaaggcattacataaggaaacacattccggcctt

SEQ ID NO: 520620 - DNA, 60 bp, Artificial
  Synthetic oligonucleotide
cctgccatagattttgagcatgccggcctggtccccgcaatacgccccgagcttgcgccc

SEQ ID NO: 520621 - DNA, 59 bp, Artificial
  Synthetic oligonucleotide
tgatgtcgggtcctatgcaggcctgttggttgcttgcggcctgggggttacccctgacg

SEQ ID NO: 520622 - DNA, 59 bp, Artificial
  Synthetic oligonucleotide
cccagctttatcgtggtcataaaccgggctcgccagggttttggcgagactatacgcct

SEQ ID NO: 520623 - DNA, 59 bp, Artificial
  Synthetic oligonucleotide
aataacatccgccgttgcattctcacggggcgcccggctactgatctttccttttgcac

SEQ ID NO: 520624 - DNA, 58 bp, Artificial
  Synthetic oligonucleotide
tgggagctatcggccccagcccgactgatcaggcatcagtggctgcgcccatgcataa

SEQ ID NO: 520625 - DNA, 58 bp, Artificial
  Synthetic oligonucleotide
tttataggtataatcggtttacccagcggcactcgctggcaggtggtttatggttgca

SEQ ID NO: 520626 - DNA, 57 bp, Artificial
  Synthetic oligonucleotide
tgctgctctaggttgatgacctatttacgtgggatctcttttaaggtcacagttggt

SEQ ID NO: 520627 - DNA, 57 bp, Artificial
  Synthetic oligonucleotide
ccagaaagactgcaacaagtttacaaccgatgagcccatcgcacacggtaaagttgg

SEQ ID NO: 520628 - DNA, 56 bp, Artificial
  Synthetic oligonucleotide
acggaccaactggctatccccaaccaatccctttgctgccgaactctccaccatgc

SEQ ID NO: 520629 - DNA, 56 bp, Artificial
  Synthetic oligonucleotide
ctctgttatatgacctctgccgctgaagtagtcctacttggggacccaaagcagat

SEQ ID NO: 520630 - DNA, 55 bp, Artificial
  Synthetic oligonucleotide
cctcccgctagagcgggtggtgcgcaaaggatgttgctgtgttgcccgtaagttg

SEQ ID NO: 520631 - DNA, 55 bp, Artificial
  Synthetic oligonucleotide
ccgcgtgaagttgccagggcgatgcgtgctcatggtatgcacactctatacgctg

SEQ ID NO: 520632 - DNA, 55 bp, Artificial
  Synthetic oligonucleotide
aacattgcagataccctgcttggtggcctgcccaccgatcttgtgtcgaacgccg

SEQ ID NO: 520633 - DNA, 55 bp, Artificial
  Synthetic oligonucleotide
ccgaattagtcatccctagcgagcgcctccattatcgtaaccagggttggcgctc

SEQ ID NO: 520634 - DNA, 55 bp, Artificial
  Synthetic oligonucleotide
tgccccaggaagagtcgacatccggcatgattatggtttgtatccacggggcccc

SEQ ID NO: 520635 - DNA, 55 bp, Artificial
  Synthetic oligonucleotide
ctctacacctgacatgggcggtcctgtttatcgcagtcaaaatgctgagcttgtc

SEQ ID NO: 520636 - DNA, 55 bp, Artificial
  Synthetic oligonucleotide
tctcacagggcgcccggctactgatctttccttttgcacgcgtgggttcgagcgc

SEQ ID NO: 520637 - DNA, 55 bp, Artificial
  Synthetic oligonucleotide
actaagccgccatacgtcccttcagagcgttgatctggaaccacctcgaaacccc

SEQ ID NO: 520638 - DNA, 55 bp, Artificial
  Synthetic oligonucleotide
tccagaaggactgcaataaattcaccacagacgagccggttcaacatggcaaggt

SEQ ID NO: 520639 - DNA, 55 bp, Artificial
  Synthetic oligonucleotide
gtgtttcgatcgtgagtatagctgtctatgctgcctctgtatgaaaactgtccgt

SEQ ID NO: 520640 - DNA, 55 bp, Artificial
  Synthetic oligonucleotide
gctaaggccatgcaccctgggtctatcactgtgcacgaggcgcaggggagcactt

SEQ ID NO: 520641 - DNA, 55 bp, Artificial
  Synthetic oligonucleotide
gctgagcccgcccatcttgatgtctcggggacctatgccgtttacggacgtcagc

SEQ ID NO: 520642 - DNA, 55 bp, Artificial
  Synthetic oligonucleotide
atattatggccactgaggcatccaactatgctcagtaccgggtcgtccgagccac

SEQ ID NO: 520643 - DNA, 55 bp, Artificial
  Synthetic oligonucleotide
gcctgtgcttccgccgggctttcaagttgtctcgttgctgaagctattgcgcgag

SEQ ID NO: 520644 - DNA, 55 bp, Artificial
  Synthetic oligonucleotide
agtttcagctaatggtgagccatcggtcaagttatatacttctgttgaggctgcc

SEQ ID NO: 520645 - DNA, 55 bp, Artificial
  Synthetic oligonucleotide
ggcccgtctgcaggcttcctataaagaatgtttgcatcgcaaagaacctgcagcg

SEQ ID NO: 520646 - DNA, 55 bp, Artificial
  Synthetic oligonucleotide
ggcgatgcttacacttacatctccacttatagtaacagcctcggcagctccaacc

SEQ ID NO: 520647 - DNA, 55 bp, Artificial
  Synthetic oligonucleotide
ggtcgcacggcggaaatgtggcccgtcttgtcttgagattggtgctcatcccagg

SEQ ID NO: 520648 - DNA, 55 bp, Artificial
  Synthetic oligonucleotide
gggtagcacttttgatcagaccacacttatagctacccaagacgctaggggcttg

SEQ ID NO: 520649 - DNA, 55 bp, Artificial
  Synthetic oligonucleotide
gccaccccttgcccgatgccctacacaccgtaccccaaaagctctgttgtctacg

SEQ ID NO: 520650 - DNA, 54 bp, Artificial
  Synthetic oligonucleotide
actgccaattttatccggcgggcagttctacgtggccagctttacacagataat

SEQ ID NO: 520651 - DNA, 54 bp, Artificial
  Synthetic oligonucleotide
ccgcccttctgtaatacctcgtggtaaccccgaccagaatcttgcaacgttgca

SEQ ID NO: 520652 - DNA, 53 bp, Artificial
  Synthetic oligonucleotide
ttagccctgggttggtacataacctcatcggcatgctgcagaccattgctgac

SEQ ID NO: 520653 - DNA, 53 bp, Artificial
  Synthetic oligonucleotide
cagggttgagcagaacccaaagaggcttgaggcggcgtatcgggagacctgct

SEQ ID NO: 520654 - DNA, 53 bp, Artificial
  Synthetic oligonucleotide
ggggttacagactccatcctgcataatttctacctgacacagccggtggaggt

SEQ ID NO: 520655 - DNA, 52 bp, Artificial
  Synthetic oligonucleotide
aggaacctgacacccgggaataccaacacccgtgtgtcccgttatacgagca

SEQ ID NO: 520656 - DNA, 51 bp, Artificial
  Synthetic oligonucleotide
ggacaccggggccaatttccccgaggtacgttctttctacacctgttgagt

SEQ ID NO: 520657 - DNA, 51 bp, Artificial
  Synthetic oligonucleotide
tggtgagcctacagtcctgctttatgggtctgttgagcaggctcagcttga

SEQ ID NO: 520658 - DNA, 51 bp, Artificial
  Synthetic oligonucleotide
acgagccggttcaacatggcaaggtcgggcagggcatttcggcgtggtcaa

SEQ ID NO: 520659 - DNA, 51 bp, Artificial
  Synthetic oligonucleotide
tgatgctagtcagaattgcaggtgctgcctgttccgtaggcaccgtggacc

SEQ ID NO: 520660 - DNA, 50 bp, Artificial
  Synthetic oligonucleotide
cgcctgtggttatacctaaggcttttcaggcgccccagactgatttaaag

SEQ ID NO: 520661 - DNA, 50 bp, Artificial
  Synthetic oligonucleotide
ccttttgttgcagccgcctcatgacatatttgcgaggcatttcctttaaa

SEQ ID NO: 520662 - DNA, 50 bp, Artificial
  Synthetic oligonucleotide
aagctattgcgcgagtcaagcttttgtccgtttctgaggatgtctagtta

SEQ ID NO: 520663 - DNA, 50 bp, Artificial
  Synthetic oligonucleotide
tatactactatgctgggcgctgggcctgttaatatcaccggattgggagc

SEQ ID NO: 520664 - DNA, 55 bp, Artificial
  Synthetic oligonucleotide
ctggttccagccatcaatgagggtgccaaccctgtatctgcatctgttgggacgc

SEQ ID NO: 520665 - DNA, 55 bp, Artificial
  Synthetic oligonucleotide
cttctgtgttcaggaccaggggacacaggtccgagttcatagactgacacgtcag

SEQ ID NO: 520666 - DNA, 55 bp, Artificial
  Synthetic oligonucleotide
gaccacgccgatagtttaacatcgacactcttctcgaagcacagctttgtcacgt

SEQ ID NO: 520667 - DNA, 55 bp, Artificial
  Synthetic oligonucleotide
gacttcgtaaggtaattgttgacgtgtacctaatggggtattgccgcaaacggct

SEQ ID NO: 520668 - DNA, 55 bp, Artificial
  Synthetic oligonucleotide
gattgtgccatgatgagattatctcccgagaaggtcggtttgcattagtctcccg

SEQ ID NO: 520669 - DNA, 55 bp, Artificial
  Synthetic oligonucleotide
gcccgtcggagagctagcgattatcaaactagagctcgtggcctctgaggttacc

SEQ ID NO: 520670 - DNA, 55 bp, Artificial
  Synthetic oligonucleotide
gcctgatccattaattgaatccttagagcgctcatttccgtggtgtaattcgccg

SEQ ID NO: 520671 - DNA, 55 bp, Artificial
  Synthetic oligonucleotide
gcgagaaaccgagtatacgaggagtcggacgatgagtataccgtttcgtgggacc

SEQ ID NO: 520672 - DNA, 55 bp, Artificial
  Synthetic oligonucleotide
gcgcccatgtcttttatcgatgggcccgccctgcgaatgtgtgtcgggcataggg

SEQ ID NO: 520673 - DNA, 55 bp, Artificial
  Synthetic oligonucleotide
gcgggactccacgccagtgtgctgccactgtggaatctctaatacccctcatgag

SEQ ID NO: 520674 - DNA, 55 bp, Artificial
  Synthetic oligonucleotide
ggcactgtgccatgcgcgctcccgatacaagggatagggtcgtggagcggataag

SEQ ID NO: 520675 - DNA, 55 bp, Artificial
  Synthetic oligonucleotide
ggccatccggaagggtggaataggtcaaactagtcacattcccgctaacagatgg

SEQ ID NO: 520676 - DNA, 55 bp, Artificial
  Synthetic oligonucleotide
gtcggctcggcggacagatattgactgccgcacaaggaacagtgaacagattcgt

SEQ ID NO: 520677 - DNA, 55 bp, Artificial
  Synthetic oligonucleotide
gttgagcagtggttttacacccgtaaagccttgccttgacgcctaccactaccga

SEQ ID NO: 520678 - DNA, 55 bp, Artificial
  Synthetic oligonucleotide
gttgtggttaagtgtgggtgtgtctggttcgtcttacatattcatgagctacttg

SEQ ID NO: 520679 - DNA, 55 bp, Artificial
  Synthetic oligonucleotide
taagagacatattgaccgtgaactcggaccccgttccaacgtcagaacaaggaat

SEQ ID NO: 520680 - DNA, 55 bp, Artificial
  Synthetic oligonucleotide
tcatgagattagatagaaacgaaagcgggcagatgcgtctagaaaatcacgtcag

SEQ ID NO: 520681 - DNA, 55 bp, Artificial
  Synthetic oligonucleotide
tgcccggcttgtctatactgcgctttcactaaggcggttaggtgtgctaataggc

SEQ ID NO: 520682 - DNA, 55 bp, Artificial
  Synthetic oligonucleotide
tggctgtacgtcgggagtcgtgcagacggagttatggtgtaaaagggcatgcggt

SEQ ID NO: 520683 - DNA, 55 bp, Artificial
  Synthetic oligonucleotide
ttatcctctctatgtcgcgcgggctcactattaacgattcgttgacgcgtaacga

SEQ ID NO: 520684 - DNA, 55 bp, Artificial
  Synthetic oligonucleotide
aaaccccgaagaagcgtttgtgatagtgggaactgtatagaggtgtagcgttccg

SEQ ID NO: 520685 - DNA, 55 bp, Artificial
  Synthetic oligonucleotide
aggtacgtaacatgtcggcgcgaaatcgatcctctcggcagagccatcgataatg

SEQ ID NO: 520686 - DNA, 55 bp, Artificial
  Synthetic oligonucleotide
agttgaccttattcgtcggcaggctataggcgtgctcccgggatacctcggcccc

SEQ ID NO: 520687 - DNA, 55 bp, Artificial
  Synthetic oligonucleotide
cacacgtagcagaacgcatgtaagcatggaagcgccatagagtagttgcttgggg

SEQ ID NO: 520688 - DNA, 55 bp, Artificial
  Synthetic oligonucleotide
ccatgagctcgtgctccgtcaggaatcgaatagtgcacgacagcttggtaacggc

SEQ ID NO: 520689 - DNA, 55 bp, Artificial
  Synthetic oligonucleotide
ccttcccgtgcctgcacgccttctgcataccttgcctcaagacgtggatctcgcg

SEQ ID NO: 520690 - DNA, 55 bp, Artificial
  Synthetic oligonucleotide
cgctagcgctccgtctaaacctcccagcgtggttcttgacacggttggtgggtgg

SEQ ID NO: 520691 - DNA, 55 bp, Artificial
  Synthetic oligonucleotide
cgcttcagaccacactaagggactttgcgcggggcgtgctggactgcttcgccat

SEQ ID NO: 520692 - DNA, 55 bp, Artificial
  Synthetic oligonucleotide
ctgggcgcatcgtcttccaacgaccgtctcctacgcctcgtgccgttatcggaag

SEQ ID NO: 520693 - DNA, 55 bp, Artificial
  Synthetic oligonucleotide
ctctcctgcggatgttttaaaaccgaccagctcgtaactcactctggcgaagtgg

SEQ ID NO: 520694 - DNA, 55 bp, Artificial
  Synthetic oligonucleotide
ctcaaccggcggaaatcttagggtcgtgtagcttctgacgaaggtgcctccgggg

SEQ ID NO: 520695 - DNA, 55 bp, Artificial
  Synthetic oligonucleotide
ctatttagccccgtggctacggcgtactccaacttgttaaaacaccgcactgcgg

SEQ ID NO: 520696 - DNA, 55 bp, Artificial
  Synthetic oligonucleotide
cggtggttccccagaccgcacacattgcatatcaagaccatctcgcgctctatac

SEQ ID NO: 520697 - DNA, 55 bp, Artificial
  Synthetic oligonucleotide
cggcccgtcctcatttggccttggcaaagtaaacagccgctaatgcactcccatg

SEQ ID NO: 520698 - DNA, 54 bp, Artificial
  Synthetic oligonucleotide
aggatcatgtcggtcgcacgggcggtaagaatggcgctagttccgccgcgtttt

SEQ ID NO: 520699 - DNA, 53 bp, Artificial
  Synthetic oligonucleotide
ggtagccgagtggatggtgggtctagcgcgcctgccccagtagcatgcgtata

SEQ ID NO: 520700 - DNA, 53 bp, Artificial
  Synthetic oligonucleotide
taccacaggataccgcagcagccgccgcactacgagctgtatgaatcagacag

SEQ ID NO: 520701 - DNA, 53 bp, Artificial
  Synthetic oligonucleotide
cgcggattgagcaatataccgtcgctaccctaaacacacgggtgattaaactt

SEQ ID NO: 520702 - DNA, 52 bp, Artificial
  Synthetic oligonucleotide
cccgtatcttacaaatttcacgataaccatttgctggcactaccccacaaaa

SEQ ID NO: 520703 - DNA, 52 bp, Artificial
  Synthetic oligonucleotide
gcagaagccgcccgtacatcaaccgaccggcctctcgatcgaccttgtacat

SEQ ID NO: 520704 - DNA, 52 bp, Artificial
  Synthetic oligonucleotide
gccaaaataacgtagtaccctattatcgcggccgacacacacgcaatagtga

SEQ ID NO: 520705 - DNA, 51 bp, Artificial
  Synthetic oligonucleotide
ccggctttactccaccagcttcaggctctgtctacacagttttctaacccc

SEQ ID NO: 520706 - DNA, 51 bp, Artificial
  Synthetic oligonucleotide
atacacagcacgtctgcgggctgtaaattcgctacgctgttatattattct

SEQ ID NO: 520707 - DNA, 50 bp, Artificial
  Synthetic oligonucleotide
ggggcatgcgtgggtgataccccacaacaatccacttcagcatttaacgg

SEQ ID NO: 520708 - DNA, 50 bp, Artificial
  Synthetic oligonucleotide
caagaacattggcccgcgccgtacttacgggtgcatgtaaacaacataga

SEQ ID NO: 520709 - DNA, 60 bp, Artificial
  Synthetic oligonucleotide
cttgacctcccacaaatcgctaagaagtatgaacattacttccctggagtggagtttcct

SEQ ID NO: 520710 - DNA, 60 bp, Artificial
  Synthetic oligonucleotide
cctgcctgggacgatctaggatatatgatgcttttcaatctgtcaagtttgataggggct

SEQ ID NO: 520711 - DNA, 60 bp, Artificial
  Synthetic oligonucleotide
ggtattttgctacctctatagtcgatgctggaataaccatacctcatgtaggtgtggtca

SEQ ID NO: 520712 - DNA, 60 bp, Artificial
  Synthetic oligonucleotide
ggtgttccgcaaacgatactcccccaagttggtgatcagttcgtctggagagatgccctg

SEQ ID NO: 520713 - DNA, 60 bp, Artificial
  Synthetic oligonucleotide
caacggattcacgttctcgaggaataccatgtcagtatggatggtggcttttatgctcca

SEQ ID NO: 520714 - DNA, 60 bp, Artificial
  Synthetic oligonucleotide
atctaagacacccttctcaatcttcatggacataccaggtttctggcaaagacgtgatta

SEQ ID NO: 520715 - DNA, 60 bp, Artificial
  Synthetic oligonucleotide
atactgagtatatgcgggtgttagcgttgtatgcatggaaaaagaccacaggccgagatt

SEQ ID NO: 520716 - DNA, 60 bp, Artificial
  Synthetic oligonucleotide
tgtcggaccgtgctcccacactggcaaccgtgatgcccggcacatctcttgattgagtag

SEQ ID NO: 520717 - DNA, 59 bp, Artificial
  Synthetic oligonucleotide
ggctgtagatagatgtaactcgatatgaggataactactaaagatagacgaaaattacg

SEQ ID NO: 520718 - DNA, 55 bp, Artificial
  Synthetic oligonucleotide
gtcagtcatgccttcatcaaggatgaagttttgcctatgtcttacgtcgagaggg

SEQ ID NO: 520719 - DNA, 55 bp, Artificial
  Synthetic oligonucleotide
ggtcagactatccaaggggaggaactcgcactggactgtcatggacgacctacgt

SEQ ID NO: 520720 - DNA, 55 bp, Artificial
  Synthetic oligonucleotide
gttcgtgaacatgttatgctcacctactggtccccttgtgattggttcgtcaggt

SEQ ID NO: 520721 - DNA, 55 bp, Artificial
  Synthetic oligonucleotide
ggtaagacaagtgcgtctcagtctacaaagggaagtgtggcccctgctgccatac

SEQ ID NO: 520722 - DNA, 55 bp, Artificial
  Synthetic oligonucleotide
tggagcaatccgttttggtgtgcgggcggcaccactcagtgggcgtcatcacatc

SEQ ID NO: 520723 - DNA, 55 bp, Artificial
  Synthetic oligonucleotide
gctttagacgatctctttgtcgtagaagacaaattgcgtagacacaagttgcctc

SEQ ID NO: 520724 - DNA, 55 bp, Artificial
  Synthetic oligonucleotide
gctgtggatgcaacttatgacaatcttattgcatcctggattattgacatacaca

SEQ ID NO: 520725 - DNA, 55 bp, Artificial
  Synthetic oligonucleotide
gcatacaaattgtgggttaacacgacttgtttggactgcttcgattttgatgggg

SEQ ID NO: 520726 - DNA, 55 bp, Artificial
  Synthetic oligonucleotide
gcagcactccaactaaattgtgcacactatccggaagtgcatgctaaagtggatg

SEQ ID NO: 520727 - DNA, 55 bp, Artificial
  Synthetic oligonucleotide
gatgtgcacgagaaagtgtatgatggcccggcgtgggttggtgttcaaacccgcg

SEQ ID NO: 520728 - DNA, 55 bp, Artificial
  Synthetic oligonucleotide
gactatactcgttcaagatgatatcaaaggatctttggacctacgaagaatcgag

SEQ ID NO: 520729 - DNA, 55 bp, Artificial
  Synthetic oligonucleotide
ctggggagttcaatcgtaatagacatgtgtgatgtacttacgtctctaggacgcc

SEQ ID NO: 520730 - DNA, 55 bp, Artificial
  Synthetic oligonucleotide
ctctcttggttcttgtgagagcttgacacctgaaacagtgcacgctctaaattgg

SEQ ID NO: 520731 - DNA, 55 bp, Artificial
  Synthetic oligonucleotide
ctccaaaccaccacattatgagttcaaaactccaacgcccgtgttggaggagctt

SEQ ID NO: 520732 - DNA, 55 bp, Artificial
  Synthetic oligonucleotide
cgtttcgccaacgttaaggtactgtgattttgtacttacgactcagggtcgacct

SEQ ID NO: 520733 - DNA, 55 bp, Artificial
  Synthetic oligonucleotide
ccgttcttggtgggataccacacgagtagatatcatgacctttgattctacggtg

SEQ ID NO: 520734 - DNA, 55 bp, Artificial
  Synthetic oligonucleotide
ccacggctagcctcaacggatcactccgaaaaggtagaaaagtgggttggacacc

SEQ ID NO: 520735 - DNA, 55 bp, Artificial
  Synthetic oligonucleotide
caggtttgcaagcgagggatgggagacggtgaaactgccgatggatagcaaagag

SEQ ID NO: 520736 - DNA, 55 bp, Artificial
  Synthetic oligonucleotide
cacccatgacctttgcaaggaattgcaagagatgtacccttttgagcttggggtg

SEQ ID NO: 520737 - DNA, 55 bp, Artificial
  Synthetic oligonucleotide
agttcgaaactgtgattgtggcttgccctagagttatattggtccaaaacaaccc

SEQ ID NO: 520738 - DNA, 55 bp, Artificial
  Synthetic oligonucleotide
aagttcaatccctacatttatatgaaaccgcgaaacatcacatgtaggtgtggtg

SEQ ID NO: 520739 - DNA, 52 bp, Artificial
  Synthetic oligonucleotide
caaaacagagacctttggtcaagactatcatcgtgaattcgcctataacagg

SEQ ID NO: 520740 - DNA, 51 bp, Artificial
  Synthetic oligonucleotide
cgaacaccaattgggccggtttagatcatggtgatgcagtcatgcaagtac

SEQ ID NO: 520741 - DNA, 51 bp, Artificial
  Synthetic oligonucleotide
accccagtgttggcaacccttgtttaagggtcccatacggggaaaccatcc

SEQ ID NO: 520742 - DNA, 60 bp, Artificial
  Synthetic oligonucleotide
ttgaacaatgtacggacttcggttagtacgttgtgtaatatgattgggaaagtagtaact

SEQ ID NO: 520743 - DNA, 60 bp, Artificial
  Synthetic oligonucleotide
ttcgcctgagtaaatcgagatttaccttgacggggtttgcttgacgttgcgtcagacccg

SEQ ID NO: 520744 - DNA, 60 bp, Artificial
  Synthetic oligonucleotide
tggcgggggtatttatgggggcagctttgggtcgagtggtattggaaaaagtttgtagct

SEQ ID NO: 520745 - DNA, 60 bp, Artificial
  Synthetic oligonucleotide
tggacgaagaatctggaatgttagacgcgcagtgtcaattaagaccgcagaaggaactat

SEQ ID NO: 520746 - DNA, 60 bp, Artificial
  Synthetic oligonucleotide
tcgtgcctttgttaggaatcaaacgcataaaacagctacggcaggtgtaagacctggaaa

SEQ ID NO: 520747 - DNA, 60 bp, Artificial
  Synthetic oligonucleotide
tcccacagaagctacgttgactggagctctggcaggtatattgggtacgcttatgggggt

SEQ ID NO: 520748 - DNA, 60 bp, Artificial
  Synthetic oligonucleotide
gtacttttgatgtccggactgaaccgaatccgatgtcatcacgagacccaaggatagcgc

SEQ ID NO: 520749 - DNA, 60 bp, Artificial
  Synthetic oligonucleotide
gagcaacctattggggccactatagaccccggtgttttagaggagatgaagcgaaaatcc

SEQ ID NO: 520750 - DNA, 60 bp, Artificial
  Synthetic oligonucleotide
catttatggaacagcgttttaagttaatgcatgcagtggggattaatgtgcaaagtacag

SEQ ID NO: 520751 - DNA, 60 bp, Artificial
  Synthetic oligonucleotide
cataatgtgacccatgagtgttgtgtgtgtaaagagacaaaaggtatttcatggtattgc

SEQ ID NO: 520752 - DNA, 60 bp, Artificial
  Synthetic oligonucleotide
cagttgataagggagttaatgtgctccgtcgaatgttgggaggtactttcggtgctatgt

SEQ ID NO: 520753 - DNA, 60 bp, Artificial
  Synthetic oligonucleotide
cagtgcccgatgtgtaggagtccaaattttgaacgatggggcacgtatcaacagatgacc

SEQ ID NO: 520754 - DNA, 60 bp, Artificial
  Synthetic oligonucleotide
aacctgaccatatatagcccaagttgtagtggttgtaatgtccctatcaaaatttgctat

SEQ ID NO: 520755 - DNA, 60 bp, Artificial
  Synthetic oligonucleotide
agagtatacgatgaaggaaaccaggtgtattattatccggcccctaagccagagggtttt

SEQ ID NO: 520756 - DNA, 59 bp, Artificial
  Synthetic oligonucleotide
tgtacgtgcgtggtggcagttcgtttgaggtttgtgttccagtccaacctagtttaggt

SEQ ID NO: 520757 - DNA, 58 bp, Artificial
  Synthetic oligonucleotide
gagatggacaagattttggataacggtttaggagtggttagtaagttattaaaagacg

SEQ ID NO: 520758 - DNA, 57 bp, Artificial
  Synthetic oligonucleotide
gttataagatatcctggtaacttcggatgtatgaaaactatttctgccgaatgtcag

SEQ ID NO: 520759 - DNA, 55 bp, Artificial
  Synthetic oligonucleotide
gtggtatgatcattgccgcgactacacttgcgggtgaatctttcgctgtaagtgt

SEQ ID NO: 520760 - DNA, 55 bp, Artificial
  Synthetic oligonucleotide
gtggccgcaagtagcatacgtgttaagtttgttaggtataattggtataactgcg

SEQ ID NO: 520761 - DNA, 55 bp, Artificial
  Synthetic oligonucleotide
gtgcttaaactcggttcacttagtatctaatacgctgtaccagcagaagtgtgga

SEQ ID NO: 520762 - DNA, 55 bp, Artificial
  Synthetic oligonucleotide
gtcctcacgaagtgtatccgcatttgtggcaatctgcgttggcttggagttctat

SEQ ID NO: 520763 - DNA, 55 bp, Artificial
  Synthetic oligonucleotide
gtcccattgacccagatggatgttataggtactttagtatcaggaggaccaacac

SEQ ID NO: 520764 - DNA, 55 bp, Artificial
  Synthetic oligonucleotide
gtagaaggccttaatagttgtgtttgggtacaacatcatcctgataggcccagta

SEQ ID NO: 520765 - DNA, 55 bp, Artificial
  Synthetic oligonucleotide
ggtgcggctttgggtcgagtggtactggagaaagtttgtagcttctcatcggaac

SEQ ID NO: 520766 - DNA, 55 bp, Artificial
  Synthetic oligonucleotide
gggtataggtaagtcctacaatacaactgagttatgtaagagagctctacagtcg

SEQ ID NO: 520767 - DNA, 55 bp, Artificial
  Synthetic oligonucleotide
gggacttcctctggtaagttttatgcgagccaaatcagggcaaaacctgagatgg

SEQ ID NO: 520768 - DNA, 55 bp, Artificial
  Synthetic oligonucleotide
gggaagagaagatcatagcgctttcgaacaacttcgttaaggttagtaagggtag

SEQ ID NO: 520769 - DNA, 55 bp, Artificial
  Synthetic oligonucleotide
ggcgacgcaaccccaggaatccgccaattcaggtacggttatttccgctgttcca

SEQ ID NO: 520770 - DNA, 55 bp, Artificial
  Synthetic oligonucleotide
ggaatgttagacgcgcagtgtcaattaagaccgcagaaggaactatagtgtggcg

SEQ ID NO: 520771 - DNA, 55 bp, Artificial
  Synthetic oligonucleotide
gcctttccgtggattctgtgtggtagatggagtggtgcgtatgtacgcccggggt

SEQ ID NO: 520772 - DNA, 55 bp, Artificial
  Synthetic oligonucleotide
gttaatgcgccttacctttgcaatctcaaagttccattcgggaagagtttatata

SEQ ID NO: 520773 - DNA, 55 bp, Artificial
  Synthetic oligonucleotide
taaagctggctactagagaaaattgtcgagctgccctgtatcaagcgcacggtca

SEQ ID NO: 520774 - DNA, 55 bp, Artificial
  Synthetic oligonucleotide
tacccaccgagtctttgacttattaccatcacaagaaagggaatttgctgctcgc

SEQ ID NO: 520775 - DNA, 55 bp, Artificial
  Synthetic oligonucleotide
taggggtttaggtatgtgtagtgaagaggatgttaggactttcgcattaccgccc

SEQ ID NO: 520776 - DNA, 55 bp, Artificial
  Synthetic oligonucleotide
tatggcgtcgtaccgtgccgctagacttaatgctgagcatggaataggtatagac

SEQ ID NO: 520777 - DNA, 55 bp, Artificial
  Synthetic oligonucleotide
tatggctgaggatctaacagtatggatggagaaagtgcatactcttactgaagtg

SEQ ID NO: 520778 - DNA, 55 bp, Artificial
  Synthetic oligonucleotide
acttggtgtacgaaacgaagagaacatgtatccgattttgatttagtatggacgg

SEQ ID NO: 520779 - DNA, 55 bp, Artificial
  Synthetic oligonucleotide
actggtcgtaacgttggaggacatttattatggagtatgccagtacatcctcaag

SEQ ID NO: 520780 - DNA, 55 bp, Artificial
  Synthetic oligonucleotide
tctagctaacctggacaaggtctcggtagaaggaacgacgaattggactcatgct

SEQ ID NO: 520781 - DNA, 55 bp, Artificial
  Synthetic oligonucleotide
actaagaactggggccgatgggccaataacggccgaccttgttcttcaagttagg

SEQ ID NO: 520782 - DNA, 55 bp, Artificial
  Synthetic oligonucleotide
acagtataatttgtgctacggtacgttacgttcgcagggcacccgttaatgtctc

SEQ ID NO: 520783 - DNA, 55 bp, Artificial
  Synthetic oligonucleotide
ttagataccgatttatatccgattggtagagtggatgcaaagctagctcatgctc

SEQ ID NO: 520784 - DNA, 55 bp, Artificial
  Synthetic oligonucleotide
ttatggaccaccgagtgtaaagacgaatgactggaactacgcattcaatgacgag

SEQ ID NO: 520785 - DNA, 55 bp, Artificial
  Synthetic oligonucleotide
ttatggatgcgtgcactaagtgtctacatctatagtcgtttgtggttcaagtttt

SEQ ID NO: 520786 - DNA, 55 bp, Artificial
  Synthetic oligonucleotide
aagttaatgcatgcagtggggattaatgtgcaaagtacagaatggaccctcttgg

SEQ ID NO: 520787 - DNA, 55 bp, Artificial
  Synthetic oligonucleotide
tttaggattaattggacgcgaaatgatgcattcagttattaccgtagtcaagcgg

SEQ ID NO: 520788 - DNA, 55 bp, Artificial
  Synthetic oligonucleotide
cagtatgatgaacatcctgtagtgcgttctcaagttcctgttacgtggaaacaac

SEQ ID NO: 520789 - DNA, 55 bp, Artificial
  Synthetic oligonucleotide
cactacggtgctagatacgacaacaacgttacagtctagcggatttggtcgcgct

SEQ ID NO: 520790 - DNA, 55 bp, Artificial
  Synthetic oligonucleotide
caagctgctgtaggaactcaaccttggcgtacgatggttgtttggccttctggtc

SEQ ID NO: 520791 - DNA, 55 bp, Artificial
  Synthetic oligonucleotide
ccaacttggcgcctaatatataatggtaccaagaagggtatgcctgagtacttta

SEQ ID NO: 520792 - DNA, 55 bp, Artificial
  Synthetic oligonucleotide
ccaatctggataaggtttctatagaaggaacaaccaattggacacatgctcgagg

SEQ ID NO: 520793 - DNA, 55 bp, Artificial
  Synthetic oligonucleotide
ccaggaaatattcgcgaggtttggtaggaatccagaattgaaagacttcaacacc

SEQ ID NO: 520794 - DNA, 55 bp, Artificial
  Synthetic oligonucleotide
cccatctagtgcagcgtcgagttatgccgtttcgctcggagagatttcggttggt

SEQ ID NO: 520795 - DNA, 55 bp, Artificial
  Synthetic oligonucleotide
cctagtgctcgcaataataataaccacttgcgtattcgcgtggcacacgatccga

SEQ ID NO: 520796 - DNA, 55 bp, Artificial
  Synthetic oligonucleotide
cctataataggtcgttatattgcagcgaaggatgcttatcgtaaccatgcttacg

SEQ ID NO: 520797 - DNA, 55 bp, Artificial
  Synthetic oligonucleotide
cgacactgaatttacatcacaggctctagaacgtcttgtggatgaaggttatata

SEQ ID NO: 520798 - DNA, 55 bp, Artificial
  Synthetic oligonucleotide
cgactagtatccctcattgtgaaagcgtcaattggaatagtagtgagggatttcc

SEQ ID NO: 520799 - DNA, 55 bp, Artificial
  Synthetic oligonucleotide
cgcagggtgatcatgctaatgtcggtcacttttgctcaatagtttcccagcagta

SEQ ID NO: 520800 - DNA, 55 bp, Artificial
  Synthetic oligonucleotide
cgcctggacaaagcgttataagaccaatgaccccgaatatgagaacgtaatccgc

SEQ ID NO: 520801 - DNA, 55 bp, Artificial
  Synthetic oligonucleotide
cgctatactaggaatacccaagacacgatactctgctatgaagttgaacactgca

SEQ ID NO: 520802 - DNA, 55 bp, Artificial
  Synthetic oligonucleotide
cgcttttccaaacatacctgaagctagacacattggagctatatataggaggcgc

SEQ ID NO: 520803 - DNA, 55 bp, Artificial
  Synthetic oligonucleotide
cgtaacgaatcggtgttcgttatgaggcgtcagtcaacctgaccatatatagccc

SEQ ID NO: 520804 - DNA, 55 bp, Artificial
  Synthetic oligonucleotide
gccttccatagcgaattacggtgcaactaacaattttagatagtagccatgaaca

SEQ ID NO: 520805 - DNA, 55 bp, Artificial
  Synthetic oligonucleotide
gccctgtttcagtctataatagtttggtcaagctaaagaaccatccatttgcagg

SEQ ID NO: 520806 - DNA, 55 bp, Artificial
  Synthetic oligonucleotide
gcaggtggactagtgagaattggagatcacgaccttggattgagggatgttagcc

SEQ ID NO: 520807 - DNA, 55 bp, Artificial
  Synthetic oligonucleotide
gcagcgagctcttacgtgcgagtcgtactccagtgacgacgggtattaagtgtgt

SEQ ID NO: 520808 - DNA, 55 bp, Artificial
  Synthetic oligonucleotide
gaggggcttaagagcccacatacccgagtattttcacaacctcgcgcttacgtgt

SEQ ID NO: 520809 - DNA, 55 bp, Artificial
  Synthetic oligonucleotide
atctactggtcaaggggtgtataatcatggttatgctagtcacattcaaatcacg

SEQ ID NO: 520810 - DNA, 55 bp, Artificial
  Synthetic oligonucleotide
gactctgcgtttggtaaaatgcttattcaagacaagtttcctcagagttgggtgc

SEQ ID NO: 520811 - DNA, 55 bp, Artificial
  Synthetic oligonucleotide
gacaatagaaccctgtgaagctatagagttgacaaatgccgaaacatttggtagt

SEQ ID NO: 520812 - DNA, 55 bp, Artificial
  Synthetic oligonucleotide
gacaactttggcaacaaggttgtctaagtatggcactcacatcgtgacaggagac

SEQ ID NO: 520813 - DNA, 55 bp, Artificial
  Synthetic oligonucleotide
ctttaggcactaatttagtagagcctttgcatgcattacgattagatgcatcagg

SEQ ID NO: 520814 - DNA, 55 bp, Artificial
  Synthetic oligonucleotide
ctgcacaactcgcacctcaggccacgcactacatgtgtaatggctgtatggttgc

SEQ ID NO: 520815 - DNA, 55 bp, Artificial
  Synthetic oligonucleotide
ctcgtgcttcgttatctagtatagaggctaattctgatgctatatgtgatgtgcc

SEQ ID NO: 520816 - DNA, 55 bp, Artificial
  Synthetic oligonucleotide
ctatagattttggtactacgagagtagaaagtgctaaggaagctctttgggatgg

SEQ ID NO: 520817 - DNA, 55 bp, Artificial
  Synthetic oligonucleotide
cgtgatagatgctcaccagtcctcggtaagggaaattgtgatcccagatgagcca

SEQ ID NO: 520818 - DNA, 52 bp, Artificial
  Synthetic oligonucleotide
atgcccaggcgacatgggaacaggaggacgcgcgcgataatgagtccctaac

SEQ ID NO: 520819 - DNA, 51 bp, Artificial
  Synthetic oligonucleotide
gcgtgttgcaactcgcttcgttcgtgagaaagttgttagacccgtttgtaa

SEQ ID NO: 520820 - DNA, 50 bp, Artificial
  Synthetic oligonucleotide
ggtatgcacatgatgtatgtaattccgagaccacatggtctgaatggatg

SEQ ID NO: 520821 - DNA, 50 bp, Artificial
  Synthetic oligonucleotide
ccactatccaaccttactattgcaccaacgtatcctactcaaacccaggt

SEQ ID NO: 520822 - DNA, 50 bp, Artificial
  Synthetic oligonucleotide
atgaggttgagttacggaggcaactatggaaaattagatgcgcatcagag

SEQ ID NO: 520823 - DNA, 50 bp, Artificial
  Synthetic oligonucleotide
ctacctctgggcgcatgcaaattagactacatccaacggggtctaccacc

SEQ ID NO: 520824 - DNA, 50 bp, Artificial
  Synthetic oligonucleotide
ttttatcgatatacgcgtgctgaattcgcgggaatgtcgtataaagtccc

SEQ ID NO: 520825 - DNA, 60 bp, Artificial
  Synthetic oligonucleotide
tttagctacctgcctacgggcggcacttgcacggaatctgacgctccagcgcccacgcct

SEQ ID NO: 520826 - DNA, 60 bp, Artificial
  Synthetic oligonucleotide
tgcgttcggggattgatgcatgcgtctgttgctcatcgctgtgctgatccttggcggatt

SEQ ID NO: 520827 - DNA, 60 bp, Artificial
  Synthetic oligonucleotide
tacatgtacgtgcgtaacggagcagggcaccaaagccaaaatctcgatcccggtgtgtgt

SEQ ID NO: 520828 - DNA, 60 bp, Artificial
  Synthetic oligonucleotide
ggcactcttcgttgctcattgttcgacggccggttcgatagtggctgacggcgcttttgt

SEQ ID NO: 520829 - DNA, 60 bp, Artificial
  Synthetic oligonucleotide
gcctatactcttcgtatgaactggcgtctagacattcactactgggttgcccgatggatg

SEQ ID NO: 520830 - DNA, 60 bp, Artificial
  Synthetic oligonucleotide
gaacaaaggtttgacgtacccgctgcccgctggtgttgctagcgatatggccgcagccaa

SEQ ID NO: 520831 - DNA, 60 bp, Artificial
  Synthetic oligonucleotide
ctctcttgacggggttacgagccgtaacctagattacggtctgtcaaccgtttacagcct

SEQ ID NO: 520832 - DNA, 60 bp, Artificial
  Synthetic oligonucleotide
cgttgctgcttctcctggcgccgcgtgctctgcgatgttggcggcagacgcgtatttggc

SEQ ID NO: 520833 - DNA, 60 bp, Artificial
  Synthetic oligonucleotide
cgtatttggctgggcagaaggctaagttcgcgggtatgaaagctaccggtaatgggacga

SEQ ID NO: 520834 - DNA, 60 bp, Artificial
  Synthetic oligonucleotide
cggcatcgcggtttcgatcttgtgttcgtcacgcaatggccgaacaagattcaccaccag

SEQ ID NO: 520835 - DNA, 60 bp, Artificial
  Synthetic oligonucleotide
acgagtcaggcgtccagctgcgttgatggctatgtcgtgagtggctcagcatgtgtgccc

SEQ ID NO: 520836 - DNA, 60 bp, Artificial
  Synthetic oligonucleotide
cagtagcaccggggccgggcaatccggcccctttctatgggggattggtgatgctcggtc

SEQ ID NO: 520837 - DNA, 60 bp, Artificial
  Synthetic oligonucleotide
catggatccgcccattccaagcagctacctggggcaatggtctagtggccttggtggcgg

SEQ ID NO: 520838 - DNA, 60 bp, Artificial
  Synthetic oligonucleotide
catgggcatacaagcaaataggcagaaccatccgtaactagtgaaaggggaaacaccatg

SEQ ID NO: 520839 - DNA, 60 bp, Artificial
  Synthetic oligonucleotide
ccgcaatttcggtcggcttcaagtggatcaagggcgcgatcttcggttgatcgcagtagc

SEQ ID NO: 520840 - DNA, 60 bp, Artificial
  Synthetic oligonucleotide
cgcagcgttcaatcgcagcctgagctctattgcatggcatccggcacaaccgagcaggac

SEQ ID NO: 520841 - DNA, 60 bp, Artificial
  Synthetic oligonucleotide
cgatggactacttcaactctcgtacgagccagtggggaaagccggtcgttcaacaaaact

SEQ ID NO: 520842 - DNA, 57 bp, Artificial; identical to SEQ ID NO: 321743
  Synthetic oligonucleotide

SEQ ID NO: 520843 - DNA, 55 bp, Artificial
  Synthetic oligonucleotide
tggaaggatgcttgttccgcacggccggaagagcttggttgggagggtggctcga

SEQ ID NO: 520844 - DNA, 55 bp, Artificial
  Synthetic oligonucleotide
ggcgttgtatacccgttaccgcagtgcgacgctgcacacggcgagccacaagttc

SEQ ID NO: 520845 - DNA, 55 bp, Artificial
  Synthetic oligonucleotide
gccgatatgggccttttcgcatgcgctgcgctgattgtcgcttgcctcggcagcg

SEQ ID NO: 520846 - DNA, 55 bp, Artificial
  Synthetic oligonucleotide
gatgatcgaactgggtggcgaaaagtgccgccgcgcagatggtacgtataccgcc

SEQ ID NO: 520847 - DNA, 55 bp, Artificial
  Synthetic oligonucleotide
cgtacgagccagtggggaaagccggtcgttcaacaaaactgcccaagcgttaacg

SEQ ID NO: 520848 - DNA, 55 bp, Artificial
  Synthetic oligonucleotide
ctgcagcagttcagcggacgatggactacttcaactctcgtacgagccagtgggg

SEQ ID NO: 520849 - DNA, 55 bp, Artificial
  Synthetic oligonucleotide
ccgcgtgctctgcgatgttggcggcagacgcgtatttggctgggcagaaggctaa

SEQ ID NO: 520850 - DNA, 55 bp, Artificial
  Synthetic oligonucleotide
cgttgatggctatgtcgtgagtggctcagcatgtgtgcccgaccctgctggtccg

SEQ ID NO: 520851 - DNA, 53 bp, Artificial
  Synthetic oligonucleotide
gcaggcgctttcccgtggatggaaaagttgcccgatcacaacgactggacaca

SEQ ID NO: 520852 - DNA, 53 bp, Artificial
  Synthetic oligonucleotide
cgtaacaggtgcagccctgttgccgcttgtgaagggtgcattgaatctcatca

SEQ ID NO: 520853 - DNA, 53 bp, Artificial
  Synthetic oligonucleotide
agtcatggcgcggtacgtctacgaatgcctgcaattcaaccagcagaccggca

SEQ ID NO: 520854 - DNA, 51 bp, Artificial
  Synthetic oligonucleotide
cgatcgcgcgcgatggcccggcctataacccctatcgggcgccccggcagg

SEQ ID NO: 520855 - DNA, 50 bp, Artificial
  Synthetic oligonucleotide
gcgcttttgttgatgccgagtaggtcggctagagccgtgtcgttcttcaa

SEQ ID NO: 520856 - DNA, 60 bp, Artificial
  Synthetic oligonucleotide
ttgcgttcagcgcttttggggttatgagggcaacccacagaataagatactaacggcaga

SEQ ID NO: 520857 - DNA, 60 bp, Artificial
  Synthetic oligonucleotide
ccacagattgctccggattcgactggagtgtctctaactggctcctccaagatgaaatgg

SEQ ID NO: 520858 - DNA, 60 bp, Artificial
  Synthetic oligonucleotide
gttgtccgatggcagccttttcgcacagcgagtgtcaggagttcagaagtctggaagcta

SEQ ID NO: 520859 - DNA, 60 bp, Artificial
  Synthetic oligonucleotide
ccccgcttacacgggagtaaccgtcttgggtggtacttccagcgactattatcaaacgct

SEQ ID NO: 520860 - DNA, 60 bp, Artificial
  Synthetic oligonucleotide
ggtgctgagggaactccgccggtgagcaaatcccggcagtggtatccacgtgttcccgag

SEQ ID NO: 520861 - DNA, 60 bp, Artificial
  Synthetic oligonucleotide
ggggtatgcaccaagaagaataccgcgtaagggggaaacgacgcggtcggatccggagaa

SEQ ID NO: 520862 - DNA, 60 bp, Artificial
  Synthetic oligonucleotide
cctcccagtacaaatgggaagtacctgccgccccagaagaggtcccagggttcgaagcct

SEQ ID NO: 520863 - DNA, 60 bp, Artificial
  Synthetic oligonucleotide
cgaatggggagctgtttcaatttccatcgatgaggacaaccctacagggagggcaccaca

SEQ ID NO: 520864 - DNA, 60 bp, Artificial
  Synthetic oligonucleotide
cgaggcacaaaaagtttaaacaaaagcgcgcactcataactagccggaaatacgttgttg

SEQ ID NO: 520865 - DNA, 60 bp, Artificial
  Synthetic oligonucleotide
cgcccgaagagcgaggttccgatactctggaatcggagactgagagggaagaggaaaacc

SEQ ID NO: 520866 - DNA, 60 bp, Artificial
  Synthetic oligonucleotide
ctgaacccaatctcgattttccgtaccttcttagctctcgggaggtatgagttcgccatg

SEQ ID NO: 520867 - DNA, 60 bp, Artificial
  Synthetic oligonucleotide
gggcacatctccgaaaggaggatcccaatccgcccaaacttaaaggaaccctatccaaaa

SEQ ID NO: 520868 - DNA, 60 bp, Artificial
  Synthetic oligonucleotide
ggcgccgtatcaatctcgatagatgaagacaatagctctacagggaacgaagtcagaatt

SEQ ID NO: 520869 - DNA, 60 bp, Artificial
  Synthetic oligonucleotide
gagtcaagtaaaatcccgtcaactgaggatagggagcgcgttatcggtaaaacagtagag

SEQ ID NO: 520870 - DNA, 60 bp, Artificial
  Synthetic oligonucleotide
gaagatccggagggaactcggtaaaggtgcgcaaactcgttacatcgagtctttaaattt

SEQ ID NO: 520871 - DNA, 60 bp, Artificial
  Synthetic oligonucleotide
gactcaatcaaggatagttcctcaggaactgtcaccttcgggccgtctctatcagagagc

SEQ ID NO: 520872 - DNA, 60 bp, Artificial
  Synthetic oligonucleotide
gacgtaaaaccagcggtccggtgttgatggctgtcaaacactgagtaactcacagcaacg

SEQ ID NO: 520873 - DNA, 60 bp, Artificial
  Synthetic oligonucleotide
tgcttacaagtagcactcaatgggatcccccaggttcgcccctcactcctttcaaggata

SEQ ID NO: 520874 - DNA, 60 bp, Artificial
  Synthetic oligonucleotide
aaagctccctccgaaaggcttcctctcacgtctcaaaccttctgaaaagaaggatatagc

SEQ ID NO: 520875 - DNA, 60 bp, Artificial
  Synthetic oligonucleotide
aaattggaacgactccgtaaggataggcaacggatgttctcacttctgtgagcacagggg

SEQ ID NO: 520876 - DNA, 60 bp, Artificial
  Synthetic oligonucleotide
aagagagacttaatattgatgactggcccaccgaattgggaaggggccttggcttgcaaa

SEQ ID NO: 520877 - DNA, 60 bp, Artificial
  Synthetic oligonucleotide
aattccaaacactgagacagtgctaggtttgccaggtgtttaccccagcgatcgcgaagt

SEQ ID NO: 520878 - DNA, 60 bp, Artificial
  Synthetic oligonucleotide
acaaaggactttcacagcgaagcttattaacggaatcgagtggcactcctcagatgagga

SEQ ID NO: 520879 - DNA, 60 bp, Artificial
  Synthetic oligonucleotide
ttgtatccgtggccctagatacatttcttgtgttctgggcgttatgcaaaggcagcattc

SEQ ID NO: 520880 - DNA, 60 bp, Artificial
  Synthetic oligonucleotide
acggactcaaagtcgaggtctctgacaaactggaattttgttctcatgagttcaaaagtt

SEQ ID NO: 520881 - DNA, 60 bp, Artificial
  Synthetic oligonucleotide
tcgtgggagaagtaccttgtgccgactgattgctctggatttgactggagcgttgcggaa

SEQ ID NO: 520882 - DNA, 60 bp, Artificial
  Synthetic oligonucleotide
actgaaatccttgcggctacaagccgccaggtggctggagcgcgcccagtctgttaaaat

SEQ ID NO: 520883 - DNA, 60 bp, Artificial
  Synthetic oligonucleotide
tcaaacatattggcggcgagttagacggcagttggcttggaaacatcgcttacgacgttt

SEQ ID NO: 520884 - DNA, 60 bp, Artificial
  Synthetic oligonucleotide
agacgatgctctcgaatcagtcaacactaacctagaggtgtataaagatctaggttttaa

SEQ ID NO: 520885 - DNA, 60 bp, Artificial
  Synthetic oligonucleotide
tattgtccgcaatacctgtcacggtaataggactctattttgtctacctaaagatttcag

SEQ ID NO: 520886 - DNA, 60 bp, Artificial
  Synthetic oligonucleotide
tatgatgtctcgcaacgtggctggacggtggggaattacaaaggttgcaagataaagaat

SEQ ID NO: 520887 - DNA, 60 bp, Artificial
  Synthetic oligonucleotide
ataatccgggaagtgggaatctggaggttatctccaactatatcgccgcttgtgtatcag

SEQ ID NO: 520888 - DNA, 60 bp, Artificial
  Synthetic oligonucleotide
atacatggatatgagatcttcccggggatgtccagcattcaggtcacaatcaattatttg

SEQ ID NO: 520889 - DNA, 60 bp, Artificial
  Synthetic oligonucleotide
tagagtataacccaggtagtctaagctctatgactttaaaataacgagcatactgaactc

SEQ ID NO: 520890 - DNA, 60 bp, Artificial
  Synthetic oligonucleotide
cagaaccacaaccttgtaagaaattcaggttttggggttatgaaggcgttccacaaaaca

SEQ ID NO: 520891 - DNA, 59 bp, Artificial
  Synthetic oligonucleotide
ttgaaccaattaatagcagagagctcctacacggatatattgacctcactatcgaacaa

SEQ ID NO: 520892 - DNA, 59 bp, Artificial
  Synthetic oligonucleotide
ctgttgaacgaaatcaatatgagcgaattcttagagggcgtggtgaatctgtagcctca

SEQ ID NO: 520893 - DNA, 58 bp, Artificial
  Synthetic oligonucleotide
cacccaatcccgtaatgctgacttgactatcatggtgggaccccctaactggcaaggc

SEQ ID NO: 520894 - DNA, 58 bp, Artificial
  Synthetic oligonucleotide
gcggatttatcccccccccatccaaaaagacagttcgtataattacaccgtttcatac

SEQ ID NO: 520895 - DNA, 58 bp, Artificial
  Synthetic oligonucleotide
ctgcggaaccttaccgagatactacttctcccgccagaagggagagacagaatggggc

SEQ ID NO: 520896 - DNA, 58 bp, Artificial
  Synthetic oligonucleotide
gtgcaagctggtctctgtgatccgataaggacatttgtgaagagagaaccacacaagc

SEQ ID NO: 520897 - DNA, 58 bp, Artificial
  Synthetic oligonucleotide
ggttgaaccagcctacttgcaagatgtaactcctcaaaataagatcgaggaggatccc

SEQ ID NO: 520898 - DNA, 57 bp, Artificial
  Synthetic oligonucleotide
acgttcgggccgagtctatcagactgcccagctttcagctctggaatacttagggcc

SEQ ID NO: 520899 - DNA, 55 bp, Artificial
  Synthetic oligonucleotide
acttatcttcagacctacccgacgtacgagcacaaacgatcgaaaattaaacgta

SEQ ID NO: 520900 - DNA, 55 bp, Artificial
  Synthetic oligonucleotide
aggccaactcaccgagggtgggttgaagatccaaaattattgccgatcttagctc

SEQ ID NO: 520901 - DNA, 55 bp, Artificial
  Synthetic oligonucleotide
gttttgggagctatgacatgattatgtccccccctaaaagctgtgtactagaaat

SEQ ID NO: 520902 - DNA, 55 bp, Artificial
  Synthetic oligonucleotide
cccatacagaaggattcttcgtataactacaccgtctcatacgggaattacacgg

SEQ ID NO: 520903 - DNA, 55 bp, Artificial
  Synthetic oligonucleotide
ccgggagtacacaatcgaaatgctcttactcgcctcgctctacatgtgcaccgta

SEQ ID NO: 520904 - DNA, 55 bp, Artificial
  Synthetic oligonucleotide
ccgggtatgccagctgtgtacggttatatgacggcactctagccctcatgacctg

SEQ ID NO: 520905 - DNA, 55 bp, Artificial
  Synthetic oligonucleotide
ggccaagatatgccggcaacacccagaaatgggtacctacacccagggcttcggg

SEQ ID NO: 520906 - DNA, 55 bp, Artificial
  Synthetic oligonucleotide
tgcctgtccgatgggactttgctagcccaggagttccccggtatacagaaatcgg

SEQ ID NO: 520907 - DNA, 55 bp, Artificial
  Synthetic oligonucleotide
gaacgacgaagcgagagcgagtagcacagtgttacgtgggtattctacgcactgc

SEQ ID NO: 520908 - DNA, 55 bp, Artificial
  Synthetic oligonucleotide
gagaacgaacaaaactttaatgtgatggcaacgatccctcctgtccccggtttga

SEQ ID NO: 520909 - DNA, 55 bp, Artificial
  Synthetic oligonucleotide
gaattaataggcaattggcaacaccaccttattgcgactgactgctccggctttg

SEQ ID NO: 520910 - DNA, 55 bp, Artificial
  Synthetic oligonucleotide
gaccctgagatggtccagctcctttactcgtggctccttgatccagtgttgccac

SEQ ID NO: 520911 - DNA, 54 bp, Artificial
  Synthetic oligonucleotide
tggaccttttatctggtgacgacatttaccatacccgtcgtatgtctcgcattg

SEQ ID NO: 520912 - DNA, 54 bp, Artificial
  Synthetic oligonucleotide
agccgagtggataaagatttggcgagcctgactacagctcagagacagcagtat

SEQ ID NO: 520913 - DNA, 54 bp, Artificial
  Synthetic oligonucleotide
gtgatgaaccccatccccgcaattcccggattaacaaccccggagcgacgtttg

SEQ ID NO: 520914 - DNA, 54 bp, Artificial
  Synthetic oligonucleotide
ctttaaatttgcatgaccgagtataaagaaccgctttgtgaaggcgtgcgagac

SEQ ID NO: 520915 - DNA, 52 bp, Artificial
  Synthetic oligonucleotide
tggtggaagcgtggaggcctgatctagcacccgaatactccaaagcggacgt

SEQ ID NO: 520916 - DNA, 52 bp, Artificial
  Synthetic oligonucleotide
ttttcctcgcgcgacattactcgagaattatgggagaggggttacaacgaaa

SEQ ID NO: 520917 - DNA, 52 bp, Artificial
  Synthetic oligonucleotide
gaggagttcagcatgtccgaggtcgcttcaattatgaaggcccggaaaggaa

SEQ ID NO: 520918 - DNA, 52 bp, Artificial
  Synthetic oligonucleotide
acctaatcctgttgcgagcccccaagcacgcgcggtcttacctcggctgtaa

SEQ ID NO: 520919 - DNA, 51 bp, Artificial
  Synthetic oligonucleotide
gttagctaaaatcccgtcatctgaggaccgggagcgcgtcataaataaaac

SEQ ID NO: 520920 - DNA, 51 bp, Artificial
  Synthetic oligonucleotide
cagtcggctcaaacctagcgaaatacgctgagctaggtttcaaagtcgagg

SEQ ID NO: 520921 - DNA, 51 bp, Artificial
  Synthetic oligonucleotide
aaactagtggggccccatgaattaaacttcgtcaatgtcctgtcaaacaca

SEQ ID NO: 520922 - DNA, 50 bp, Artificial
  Synthetic oligonucleotide
tgatgtgtcccagcgaggttggaatgttggtaatcacaaaggatgcaata

SEQ ID NO: 520923 - DNA, 55 bp, Artificial
  Synthetic oligonucleotide
gttatgcaaatcgcggaagtacgatagctctaaatcaaaatacaaacggttgtag

SEQ ID NO: 520924 - DNA, 55 bp, Artificial
  Synthetic oligonucleotide
gtcgcgatagtatccaccctggcagtagacaacaggctttccaagactgcactga

SEQ ID NO: 520925 - DNA, 55 bp, Artificial
  Synthetic oligonucleotide
aactgaattagcttttgctggtttatatgctcttagatcgcccgattatcagcat

SEQ ID NO: 520926 - DNA, 55 bp, Artificial
  Synthetic oligonucleotide
atgcactccaagaattgacactagccatagcttgaatcgctgaattagtccaagg

SEQ ID NO: 520927 - DNA, 55 bp, Artificial
  Synthetic oligonucleotide
caaacaaacttctggtgctcgtcttcccaatgttactcgattccaacctaaacaa

SEQ ID NO: 520928 - DNA, 55 bp, Artificial
  Synthetic oligonucleotide
caatcattacaatgcctaaacaaactaaagccgcctccaaagctaacgctaagaa

SEQ ID NO: 520929 - DNA, 55 bp, Artificial
  Synthetic oligonucleotide
gtacaagcccttgctactagccaacgttcagtgagtgaaatgcgtaatgtaatcc

SEQ ID NO: 520930 - DNA, 55 bp, Artificial
  Synthetic oligonucleotide
cctaccacattatgcactcaaatggcaacgagttagaaaagcccagatgtatgga

SEQ ID NO: 520931 - DNA, 55 bp, Artificial
  Synthetic oligonucleotide
ggaacaccaggaagcgatatgtatgataagtttaggatgcacatatgtaccgcgg

SEQ ID NO: 520932 - DNA, 55 bp, Artificial
  Synthetic oligonucleotide
cgatatcatcaatcttgcgtttggattgtgaagaagtatcaggcactactgaagt

SEQ ID NO: 520933 - DNA, 55 bp, Artificial
  Synthetic oligonucleotide
cgcttgctagttgcatgggaaggccacttgcagttgttacaaccacagtcccagc

SEQ ID NO: 520934 - DNA, 55 bp, Artificial
  Synthetic oligonucleotide
cttgttcgcgatggataacattccattatactaatacatgtgtggccttcgcttc

SEQ ID NO: 520935 - DNA, 55 bp, Artificial
  Synthetic oligonucleotide
gacctagcatgattggaagcataagtcataactgaaccacctctagcgtcaacat

SEQ ID NO: 520936 - DNA, 54 bp, Artificial
  Synthetic oligonucleotide
aaaaccagactactaccagtgatgaaaccagttcggataatatgtcaacttcga

SEQ ID NO: 520937 - DNA, 53 bp, Artificial
  Synthetic oligonucleotide
cccctccggaaaccactaatggtattgtaaatcctagtttctttgatcgtgct

SEQ ID NO: 520938 - DNA, 51 bp, Artificial
  Synthetic oligonucleotide
cgaaggatcagtttggtcaattatatcttgtccaatactttctaactcgcg

SEQ ID NO: 520939 - DNA, 51 bp, Artificial
  Synthetic oligonucleotide
aaccaagttcgcaaaagcatcttgcaagtatcatgcaagttgtaatgctct

SEQ ID NO: 520940 - DNA, 60 bp, Artificial
  Synthetic oligonucleotide
gcaaaaagcctccgctttcacggagtttctatcctcagtgttatacatctctcctgtgcc

SEQ ID NO: 520941 - DNA, 60 bp, Artificial
  Synthetic oligonucleotide
gttacaaagttttcaagacgacacattggaaatactaggttttggagttatacgtaacca

SEQ ID NO: 520942 - DNA, 60 bp, Artificial
  Synthetic oligonucleotide
gagacgtaaaagaagctttaagaaggcaagagtttaccatcatggaaggtaaaaaagcta

SEQ ID NO: 520943 - DNA, 60 bp, Artificial
  Synthetic oligonucleotide
atatgtccaaattgcttaatgaatatgactagaatatacgagtcgccattttagttacaa

SEQ ID NO: 520944 - DNA, 60 bp, Artificial
  Synthetic oligonucleotide
agtattaattttaatgagcttggttttccgatgcgctctgggaattatggtatagatgat

SEQ ID NO: 520945 - DNA, 60 bp, Artificial
  Synthetic oligonucleotide
aggcgacttgttggtgttgcaggaatttgatggagaaaaatacacaggtcttgagatacg

SEQ ID NO: 520946 - DNA, 60 bp, Artificial
  Synthetic oligonucleotide
tctttgagaaggcaatattattactcaatctgtatatgcaaaaaccaacatggccacatt

SEQ ID NO: 520947 - DNA, 60 bp, Artificial
  Synthetic oligonucleotide
tggccacattgtgttaatgagtacaagagccaggcggaaaaaattttaggtgaagaccca

SEQ ID NO: 520948 - DNA, 60 bp, Artificial
  Synthetic oligonucleotide
ccatctcttaacatgaatataataccctccttcttctattgtcctagactaatatagcac

SEQ ID NO: 520949 - DNA, 60 bp, Artificial
  Synthetic oligonucleotide
ttactgcaaactggtgaaatatcatattcagaggtcatacaaggaataggcttaactaag

SEQ ID NO: 520950 - DNA, 60 bp, Artificial
  Synthetic oligonucleotide
aagcaagtacttagagaagttgttagagaagtggttatatagtggctagagaatttagta

SEQ ID NO: 520951 - DNA, 60 bp, Artificial
  Synthetic oligonucleotide
tttgggtgcaggtgttacagacagattaaaagaggttataagacaagaaagactcaaata

SEQ ID NO: 520952 - DNA, 60 bp, Artificial
  Synthetic oligonucleotide
tttttgataactggatgatataacttataactcattttacaattcttagttcatatatat

SEQ ID NO: 520953 - DNA, 60 bp, Artificial
  Synthetic oligonucleotide
ctcattgctttaagatgacttgtatgtttagcatccatatgagaaatagcatattggtcg

SEQ ID NO: 520954 - DNA, 59 bp, Artificial
  Synthetic oligonucleotide
cgatagcatagatactacataaaacgttaattagatagtttagccatctctcgaactcc

SEQ ID NO: 520955 - DNA, 59 bp, Artificial
  Synthetic oligonucleotide
tatattccctggattggatatgacccctggcatgtagattcgagtctgcttttagctta

SEQ ID NO: 520956 - DNA, 58 bp, Artificial
  Synthetic oligonucleotide
ggatactttaccaaaatcccatccaattattaagtatgttgaagctcgaaagattccc

SEQ ID NO: 520957 - DNA, 58 bp, Artificial
  Synthetic oligonucleotide
ccccatagtattaattgtataggcacattcggaaaggtaactttcgacatacttatac

SEQ ID NO: 520958 - DNA, 58 bp, Artificial
  Synthetic oligonucleotide
ccgaattacaaactaggttatacagtgagtatcatacctacattaataaggactacgc

SEQ ID NO: 520959 - DNA, 56 bp, Artificial
  Synthetic oligonucleotide
gacagggtcaatcttatgctataattacgaaagaccttacgaaatgttttcatccg

SEQ ID NO: 520960 - DNA, 56 bp, Artificial
  Synthetic oligonucleotide
gctaagctaccatcatcacctatacggcttcctagagttaaattgttaactttaac

SEQ ID NO: 520961 - DNA, 55 bp, Artificial
  Synthetic oligonucleotide
gccccagtaacttacacgacgtccgcctttagactcacctgtagcaacatatccg

SEQ ID NO: 520962 - DNA, 55 bp, Artificial
  Synthetic oligonucleotide
gccggaccgagagctaatgcgtaaagctccaccaaagcagtacctcaagaaaggt

SEQ ID NO: 520963 - DNA, 55 bp, Artificial
  Synthetic oligonucleotide
gcctacgggaattccaaatggaggcactaccgggcaagctcttgtaaaggcatcg

SEQ ID NO: 520964 - DNA, 55 bp, Artificial
  Synthetic oligonucleotide
gcgaaacaacagtatttcaacaggctgtgtcacaaggtaccttagcggtcttagc

SEQ ID NO: 520965 - DNA, 55 bp, Artificial
  Synthetic oligonucleotide
ggaggtgttgtaacagggacaatcgaccaggactggttgaatcagaacgtatatt

SEQ ID NO: 520966 - DNA, 55 bp, Artificial
  Synthetic oligonucleotide
gcgagggcgtgaacgatgaaaatcatgcttgctgttgcgtgcggcctgtgcaacg

SEQ ID NO: 520967 - DNA, 55 bp, Artificial
  Synthetic oligonucleotide
ggagcaattgaatgggaggcatccttcataatatgcaaggtttgcaatatcgtgc

SEQ ID NO: 520968 - DNA, 55 bp, Artificial
  Synthetic oligonucleotide
gcgatatggattagcgtaaaatctattgcccgccgtgctatatacattgaggcct

SEQ ID NO: 520969 - DNA, 55 bp, Artificial
  Synthetic oligonucleotide
gccagctagaagatagaactgcggtatgttctgtttgtgcaagtgctaactcgtt

SEQ ID NO: 520970 - DNA, 55 bp, Artificial
  Synthetic oligonucleotide
gccagcgaggaacgatcagaaaatatatggtgaagccatgagaaagcacgcaaga

SEQ ID NO: 520971 - DNA, 55 bp, Artificial
  Synthetic oligonucleotide
gccagaaggcttggaagtctaccccggcagttttcgcaaggacacccagcagggg

SEQ ID NO: 520972 - DNA, 55 bp, Artificial
  Synthetic oligonucleotide
gccactcgaataactcatgcttaatacagacctttccgttatccatcccaaggaa

SEQ ID NO: 520973 - DNA, 55 bp, Artificial
  Synthetic oligonucleotide
gcatttcgtgttcgtcgtaacgagtctgtcgcgtttcccggcaataaccagctcg

SEQ ID NO: 520974 - DNA, 55 bp, Artificial
  Synthetic oligonucleotide
gcattgcgaaggatagacaggaatgcagggttaacatcctggaattcatctccga

SEQ ID NO: 520975 - DNA, 55 bp, Artificial
  Synthetic oligonucleotide
gcattagagatgtcgcgtgaagaacgcattacgtatgagcgtgtttctggggcgc

SEQ ID NO: 520976 - DNA, 55 bp, Artificial
  Synthetic oligonucleotide
gcatgaaatttatagctggggctatggaactgaattatctgaactaatagggcag

SEQ ID NO: 520977 - DNA, 55 bp, Artificial
  Synthetic oligonucleotide
gcatctgatgcgtccatagcacataagccctcgatagataataggtacttgtccg

SEQ ID NO: 520978 - DNA, 55 bp, Artificial
  Synthetic oligonucleotide
gcatacccgtatgtattatctctttccacagtaactaggtttggtgacggagcgc

SEQ ID NO: 520979 - DNA, 55 bp, Artificial
  Synthetic oligonucleotide
gcataatatttcaagatgcccttatctcgcggatacttaccaacatccagattgc

SEQ ID NO: 520980 - DNA, 55 bp, Artificial
  Synthetic oligonucleotide
gcaggggttagtgagagaaacggtaaggcattcacacaaacactattcacaccga

SEQ ID NO: 520981 - DNA, 55 bp, Artificial
  Synthetic oligonucleotide
gcagcctatgccggacacataggcggctaataataacgcaactacacaccccaca

SEQ ID NO: 520982 - DNA, 55 bp, Artificial
  Synthetic oligonucleotide
gcagagcctgttaggttggaggtagcattgttcgacgttatcgatggcgcagcac

SEQ ID NO: 520983 - DNA, 55 bp, Artificial
  Synthetic oligonucleotide
gcacttgcaaatgcctttgggtatcgtgatatcggagagtgtatggacactatgg

SEQ ID NO: 520984 - DNA, 55 bp, Artificial
  Synthetic oligonucleotide
ggagaaattcgcatagtcccatttaatttgggatttcaagctttgctggaagagg

SEQ ID NO: 520985 - DNA, 55 bp, Artificial
  Synthetic oligonucleotide
ggaatactcactgccgtcaaacaatagtattcctcgcacacgaggttgccctctt

SEQ ID NO: 520986 - DNA, 55 bp, Artificial
  Synthetic oligonucleotide
ggaagcggttagacacataccgcaattcgaaatactggcgggaagcaaaccccag

SEQ ID NO: 520987 - DNA, 55 bp, Artificial
  Synthetic oligonucleotide
gcttttggctttccagctttgtcagagcgctacgtcaaagtgtcataatcgattt

SEQ ID NO: 520988 - DNA, 55 bp, Artificial
  Synthetic oligonucleotide
gcttgcgaatagaccaattgagtttatagaaacattttgcaaacaagcgcaaggc

SEQ ID NO: 520989 - DNA, 55 bp, Artificial
  Synthetic oligonucleotide
gcttctaataaaacccgtatcgaagacatggtgcacgaagaatgccaacgtcaag

SEQ ID NO: 520990 - DNA, 55 bp, Artificial
  Synthetic oligonucleotide
gctgttatctggtaaagtgtacgacatagggcggggcaataaggcaacgccacac

SEQ ID NO: 520991 - DNA, 55 bp, Artificial
  Synthetic oligonucleotide
gctggccagtaaagcatacgaagtcctggtgtcgcctcaaacggttttaggtatc

SEQ ID NO: 520992 - DNA, 55 bp, Artificial
  Synthetic oligonucleotide
ggagaatatcgagtctaaacaagactacgaactgactccgagtattgccgctgag

SEQ ID NO: 520993 - DNA, 55 bp, Artificial
  Synthetic oligonucleotide
gctgcgtctaactgatctaactggtcgcctgtgaacttgatgtctagagactcga

SEQ ID NO: 520994 - DNA, 55 bp, Artificial
  Synthetic oligonucleotide
gctcagaagcacaagttattaccatgactgtacaaccagacggatgcgtactagt

SEQ ID NO: 520995 - DNA, 55 bp, Artificial
  Synthetic oligonucleotide
gctaccggatttgaacgtatgggagcaaacgaggctatgatgggtactcgtgtta

SEQ ID NO: 520996 - DNA, 55 bp, Artificial
  Synthetic oligonucleotide
gcgttgacgtaggcgcgaatcctatcgtgttcagcacatgggcaaagtctggtgg

SEQ ID NO: 520997 - DNA, 55 bp, Artificial
  Synthetic oligonucleotide
gcgttaggaatctatgaacatattcaatcacgacagactgcgaaagtgcaacgag

SEQ ID NO: 520998 - DNA, 55 bp, Artificial
  Synthetic oligonucleotide
gcgtgagaatttacctccccacatctcagaaagctctttcgcaatcttattttcg

SEQ ID NO: 520999 - DNA, 55 bp, Artificial
  Synthetic oligonucleotide
gcgtctggtaagcatcgctagagcattcaacaactacaccccaaatgaagactcc

SEQ ID NO: 521000 - DNA, 55 bp, Artificial
  Synthetic oligonucleotide
gcgtacaaacatgggttcactaaccacgatggacggtacagcggtttatccgtgg

SEQ ID NO: 521001 - DNA, 55 bp, Artificial
  Synthetic oligonucleotide
gcgtaaacttcaatccctcatcaacgccacggttaaggcgaacaacgcctgtcac

SEQ ID NO: 521002 - DNA, 55 bp, Artificial
  Synthetic oligonucleotide
gcggcgcacgtgctgccgatcacggtattatccaaccgtatcgttggtcgttgat

SEQ ID NO: 521003 - DNA, 55 bp, Artificial
  Synthetic oligonucleotide
gcggcaattcctcgccagcgatgctacttttcgcgtgatggacgtaaggttgtgg

SEQ ID NO: 521004 - DNA, 55 bp, Artificial
  Synthetic oligonucleotide
gcggagacgtgcgaagctggcctattccagacatccctcaactcgacttataaaa

SEQ ID NO: 521005 - DNA, 55 bp, Artificial
  Synthetic oligonucleotide
gcggacaattcgagcttccgttaatcgcgctcttgctgaataccctgcccgtgat

SEQ ID NO: 521006 - DNA, 55 bp, Artificial
  Synthetic oligonucleotide
gcgccaccgttacgggctttgaacatcgcatccagtaaaggctgtgctgcggctt

SEQ ID NO: 521007 - DNA, 55 bp, Artificial
  Synthetic oligonucleotide
gcgcaattcatggcaagtggtgatgaacgtattcgtcagcaacgcgatatcctgg

SEQ ID NO: 521008 - DNA, 55 bp, Artificial
  Synthetic oligonucleotide
gcgcaatgtcgatagcacgtagctgttcatacatacgtcttgacatatctctagc

SEQ ID NO: 521009 - DNA, 55 bp, Artificial
  Synthetic oligonucleotide
gcgcaacaatgatcgtagtcggcaccactggtaaacctatgagcggtggcggatc

SEQ ID NO: 521010 - DNA, 55 bp, Artificial
  Synthetic oligonucleotide
gcgattccgttcgaagcactacttgaattacgcctgcttttcatatcgcacccgc

SEQ ID NO: 521011 - DNA, 55 bp, Artificial
  Synthetic oligonucleotide
gcgattacggttcacctggtgcgagcgccggacaactgatcgaactggatggtgt

SEQ ID NO: 521012 - DNA, 55 bp, Artificial
  Synthetic oligonucleotide
gaacgccatcaataatctcaccgggttgaccccaagtttcaataagtaactcggg

SEQ ID NO: 521013 - DNA, 55 bp, Artificial
  Synthetic oligonucleotide
gaacatggttcgcccaacccgcgagcaaccggatatgcgtccgggcaacattaac

SEQ ID NO: 521014 - DNA, 55 bp, Artificial
  Synthetic oligonucleotide
gaaagtcatgacgacggtttaaatgcttgggctaatgaagttgttacatcaactg

SEQ ID NO: 521015 - DNA, 55 bp, Artificial
  Synthetic oligonucleotide
gaaagaaggcaataagcttttggttatcacaaactgtgtcaagggacacaagatg

SEQ ID NO: 521016 - DNA, 55 bp, Artificial
  Synthetic oligonucleotide
gaaactcgttatgaagtatttcgtgccaagttgtttggatgtgatcaagtgcatg

SEQ ID NO: 521017 - DNA, 55 bp, Artificial
  Synthetic oligonucleotide
gaaactactttgtacgcatattgtccttcatgtgtacgagtataaccgtcacggt

SEQ ID NO: 521018 - DNA, 55 bp, Artificial
  Synthetic oligonucleotide
gaaaagtggtcaaacctgtttgataatccgcgaggtcttaagtttaagatcggtg

SEQ ID NO: 521019 - DNA, 55 bp, Artificial
  Synthetic oligonucleotide
ctttccgcgctcaagcattagtaagaaagacttgtcacttgctaacgctgtgggt

SEQ ID NO: 521020 - DNA, 55 bp, Artificial
  Synthetic oligonucleotide
ctttccaggctctgattgattccggcgcacagacgcatgaaagcgtcataaacgc

SEQ ID NO: 521021 - DNA, 55 bp, Artificial
  Synthetic oligonucleotide
ctttatagtacagagcagatggtagcgtatcgacgtcgtgaactatttagtccgg

SEQ ID NO: 521022 - DNA, 55 bp, Artificial
  Synthetic oligonucleotide
cttgtgtaatccctcctccccataaattgatgtgccagaacagtctaatataatc

SEQ ID NO: 521023 - DNA, 55 bp, Artificial
  Synthetic oligonucleotide
ctgtgttacttcacgtttcgcagttcaagcatgtggtttccatcctgaggcttct

SEQ ID NO: 521024 - DNA, 55 bp, Artificial
  Synthetic oligonucleotide
ctgtaaggagaattatgtcacagtatggttatcaattagagtgtggtcgccgggg

SEQ ID NO: 521025 - DNA, 55 bp, Artificial
  Synthetic oligonucleotide
ctgtaacgtgcatttgtcagccaacataatctgctatcgaccggcattgatagcc

SEQ ID NO: 521026 - DNA, 55 bp, Artificial
  Synthetic oligonucleotide
ctggtggaaccttctcggctctaagaactcgcgagacattcggcttgcactggca

SEQ ID NO: 521027 - DNA, 55 bp, Artificial
  Synthetic oligonucleotide
ctgcgggatcacaaccaggcgattctctggtcggcctctcatgcgccaatcgaac

SEQ ID NO: 521028 - DNA, 55 bp, Artificial
  Synthetic oligonucleotide
ctgcaaggggtactgtcacaaataccctagctttagatattagcacggcagagta

SEQ ID NO: 521029 - DNA, 55 bp, Artificial
  Synthetic oligonucleotide
ctgatggtacgttgcgttgtaagactgaccttggattaatcttggatggacttgc

SEQ ID NO: 521030 - DNA, 55 bp, Artificial
  Synthetic oligonucleotide
ctgagtgctcagtagcagggatagaagcaacaaccatttccttctctacgtctgc

SEQ ID NO: 521031 - DNA, 55 bp, Artificial
  Synthetic oligonucleotide
ctgaaggtggctactgtttcctgtacgatggtaagccggtttccattcatgaagc

SEQ ID NO: 521032 - DNA, 55 bp, Artificial
  Synthetic oligonucleotide
ctgaaggactaaaccacaatggcacaggatgcactttccgacggcttcgttcgtc

SEQ ID NO: 521033 - DNA, 55 bp, Artificial
  Synthetic oligonucleotide
ctgaaagcgtggtcgtgggaggcgttcggtactggtcgtactggcctgtaaacga

SEQ ID NO: 521034 - DNA, 55 bp, Artificial
  Synthetic oligonucleotide
ctctcttttgtcacacgtatctaggttctgtgtggtgcgtacagaccaaacaccc

SEQ ID NO: 521035 - DNA, 55 bp, Artificial
  Synthetic oligonucleotide
ctcgtttcgtacgtgaggtaggggtagctagtatcaacgaccctaacatccgtca

SEQ ID NO: 521036 - DNA, 55 bp, Artificial
  Synthetic oligonucleotide
ctcgtactcctgaagctgtggtattgaaacattctggtaaccctgagatcttcgc

SEQ ID NO: 521037 - DNA, 55 bp, Artificial
  Synthetic oligonucleotide
ctcggcccgtacgttgggtacttacaatcggggcaattgtagtagtttataggtg

SEQ ID NO: 521038 - DNA, 55 bp, Artificial
  Synthetic oligonucleotide
ctcgaatgtggtttcgatttctgcacacgcggaaagcggcagttcgtagaccggc

SEQ ID NO: 521039 - DNA, 55 bp, Artificial
  Synthetic oligonucleotide
ctccttccggatctccttgaggtcatctttaacactatgagttttcccacggacc

SEQ ID NO: 521040 - DNA, 55 bp, Artificial
  Synthetic oligonucleotide
gcactagaccatatccgcgaagagcacttcaaacagaagcgcggaacaaatgaac

SEQ ID NO: 521041 - DNA, 55 bp, Artificial
  Synthetic oligonucleotide
gcacgattgtgggcaggtgatcatccctacaggtggcggcaagacttacatcatg

SEQ ID NO: 521042 - DNA, 55 bp, Artificial
  Synthetic oligonucleotide
gcacgacgaaccatacccataactgccggcccaatttgggttactgcaccagagg

SEQ ID NO: 521043 - DNA, 55 bp, Artificial
  Synthetic oligonucleotide
gcaccttgcaaccccggacgtttacgattacgtgggaaagcatcttgccgactcc

SEQ ID NO: 521044 - DNA, 55 bp, Artificial
  Synthetic oligonucleotide
gcaccaaatgagcttgatcctcgatttgtagtacgtgattttggtccaggtctag

SEQ ID NO: 521045 - DNA, 55 bp, Artificial
  Synthetic oligonucleotide
gcaataggtgcagttgcgaattgtgttaatgccatccccgacatttggagagtca

SEQ ID NO: 521046 - DNA, 55 bp, Artificial
  Synthetic oligonucleotide
gcaacaaacatgtcttgggaattagaacatttcgctacaatggtatccgggtgtg

SEQ ID NO: 521047 - DNA, 55 bp, Artificial
  Synthetic oligonucleotide
gatttctggggacctaagtattatgggaaacttactaacggacctactgatgtac

SEQ ID NO: 521048 - DNA, 55 bp, Artificial
  Synthetic oligonucleotide
gatgctttcaacttacgctcatgagaaattcgaaaatcatcctgtagagctttac

SEQ ID NO: 521049 - DNA, 55 bp, Artificial
  Synthetic oligonucleotide
gatgacgaggggcaagaccctaacaagatgtatgtgtttggctcctatgaccaca

SEQ ID NO: 521050 - DNA, 55 bp, Artificial
  Synthetic oligonucleotide
gatcgtatcttctacgggcgcacctcaactgatattcgctggtctgcggacgatg

SEQ ID NO: 521051 - DNA, 55 bp, Artificial
  Synthetic oligonucleotide
gatcgtacgcattacccaatatacctaagtcaaaacctgcaccgttaccccaagg

SEQ ID NO: 521052 - DNA, 55 bp, Artificial
  Synthetic oligonucleotide
gagtcgctaaggaatccgctaggttcttccttcctatagccacgccttctagact

SEQ ID NO: 521053 - DNA, 55 bp, Artificial
  Synthetic oligonucleotide
gagtatcaacccgttcctagaaacgaatgggtctattctaattggcgatgaagtc

SEQ ID NO: 521054 - DNA, 55 bp, Artificial
  Synthetic oligonucleotide
gagtacccatcatagcctcgtttgctcccatacgttcaaatccagtagcaaatgc

SEQ ID NO: 521055 - DNA, 55 bp, Artificial
  Synthetic oligonucleotide
gagggtcgccatccggctctctccccacaaaatttatgtacgattctcttgttag

SEQ ID NO: 521056 - DNA, 55 bp, Artificial
  Synthetic oligonucleotide
gaggccaaatgactcacgttaccgcgggttataattatcgcctgatttagtcgat

SEQ ID NO: 521057 - DNA, 55 bp, Artificial
  Synthetic oligonucleotide
gagcctagcctatttcctggctaaacgtggcttaaaatacgatacaaacgcattg

SEQ ID NO: 521058 - DNA, 55 bp, Artificial
  Synthetic oligonucleotide
gagcagtttacagcggccgataaacgttctcttacacgtcctgaatggatctgtg

SEQ ID NO: 521059 - DNA, 55 bp, Artificial
  Synthetic oligonucleotide
gagaggattaacctatgcgttatgacaaccgaatgtctggtaagaaggcaatcga

SEQ ID NO: 521060 - DNA, 55 bp, Artificial
  Synthetic oligonucleotide
gactataaggacgcgacagaccttgtggtgcataccatacacgataaagctaccc

SEQ ID NO: 521061 - DNA, 55 bp, Artificial
  Synthetic oligonucleotide
gacgttaaatggagactaccagaatttccagaaaacggtggtggtgatttagccc

SEQ ID NO: 521062 - DNA, 55 bp, Artificial
  Synthetic oligonucleotide
gacgtgggtgtctggggtgctagctttgaaagtatgtcagattactataagggtc

SEQ ID NO: 521063 - DNA, 55 bp, Artificial
  Synthetic oligonucleotide
gaccaatccaacaggttgtctggggatatagtgtaaaacctagacgggttccatc

SEQ ID NO: 521064 - DNA, 55 bp, Artificial
  Synthetic oligonucleotide
gacagggtattcatttgctgtttgagcgcatcaatttgtgccacaagctcgtcat

SEQ ID NO: 521065 - DNA, 55 bp, Artificial
  Synthetic oligonucleotide
gaattacgccccgttgaacaacttgtcctaattgaggaacttggtttgacgcagt

SEQ ID NO: 521066 - DNA, 55 bp, Artificial
  Synthetic oligonucleotide
gaatcgctcttggggaagctccattactagtcctttatcattcttagctaagtat

SEQ ID NO: 521067 - DNA, 55 bp, Artificial
  Synthetic oligonucleotide
gaatagcggcgaattcacttgcaacccgtagccctaaacgtttacattcgggttc

SEQ ID NO: 521068 - DNA, 55 bp, Artificial
  Synthetic oligonucleotide
gaatacgatcaggaagggaaaagtggtataaatttcgtgtgtccacgtgacagcg

SEQ ID NO: 521069 - DNA, 55 bp, Artificial
  Synthetic oligonucleotide
tatcttcatcgggagacctcaaacgtgggataatgaaaattctccaccccaagca

SEQ ID NO: 521070 - DNA, 55 bp, Artificial
  Synthetic oligonucleotide
tagtcttgttagacacgttaagtgaaactgtgatatgagggtaggcacctgttac

SEQ ID NO: 521071 - DNA, 55 bp, Artificial
  Synthetic oligonucleotide
tagcagggaacccggccagactaacgtctgtccaccctgtccgactcagagcgaa

SEQ ID NO: 521072 - DNA, 55 bp, Artificial
  Synthetic oligonucleotide
tacggagttaagaacaactacgggttagagactcagcctaactcaggtatcagcc

SEQ ID NO: 521073 - DNA, 55 bp, Artificial
  Synthetic oligonucleotide
taatcgaatactacccatgattgactgtcggcattgtatttccaacatgtgaccg

SEQ ID NO: 521074 - DNA, 55 bp, Artificial
  Synthetic oligonucleotide
taagtatggtatctggaaaagttggtatcggagtcacaaatccacaaggaactgt

SEQ ID NO: 521075 - DNA, 55 bp, Artificial
  Synthetic oligonucleotide
gttgtgggactcggtacggatagcatctttaataaactgcgacatcaacttctcc

SEQ ID NO: 521076 - DNA, 55 bp, Artificial
  Synthetic oligonucleotide
gttctctataaacacgctcgtggtgaacctaccactgagaaagaacgtaatctcg

SEQ ID NO: 521077 - DNA, 55 bp, Artificial
  Synthetic oligonucleotide
gttctcattcccgtggagtaggtgctcgcgggatgaacgggcttaatgacaacgg

SEQ ID NO: 521078 - DNA, 55 bp, Artificial
  Synthetic oligonucleotide
gttcacagatattcgcgtcattgtaacacatttgcatgatgaccatgcaggttcc

SEQ ID NO: 521079 - DNA, 55 bp, Artificial
  Synthetic oligonucleotide
gttacaacccgttaccctggcttcgtcaaatgttgcgagcggttgcggtgtcctc

SEQ ID NO: 521080 - DNA, 55 bp, Artificial
  Synthetic oligonucleotide
gttaagctcttgccaggtatcagagaaacaacacaactccgttgggtggaactgg

SEQ ID NO: 521081 - DNA, 55 bp, Artificial
  Synthetic oligonucleotide
gttaaactagatgcggagacgcaaagattgtatcaacgaatcctggacacaggcc

SEQ ID NO: 521082 - DNA, 55 bp, Artificial
  Synthetic oligonucleotide
gtgttttccgcggtgttatcctacggcctaatgcgcatcgcaatacctgaggata

SEQ ID NO: 521083 - DNA, 55 bp, Artificial
  Synthetic oligonucleotide
gtgtgtttaaactgtcacggtctgagttgctttcaccgtaatatgaaacaatctc

SEQ ID NO: 521084 - DNA, 55 bp, Artificial
  Synthetic oligonucleotide
gtgtacgaagggcagtgttatacattggcgataaatgtcagttaccaccagtaga

SEQ ID NO: 521085 - DNA, 55 bp, Artificial
  Synthetic oligonucleotide
gtggtttcgtagcttccacattatacttagcgtgttgctcggtaataacgcgccc

SEQ ID NO: 521086 - DNA, 55 bp, Artificial
  Synthetic oligonucleotide
gtgggtgcttactgcccacttgttccaggcgataatgctcctgtactttagttga

SEQ ID NO: 521087 - DNA, 55 bp, Artificial
  Synthetic oligonucleotide
gtggcatggtgaaaccggtaatttcaagaccaagtgctttacgtcgttccccgag

SEQ ID NO: 521088 - DNA, 55 bp, Artificial
  Synthetic oligonucleotide
gtgaaccattggagccatacgttacaaggtgcggtttgcggttggcacacaagta

SEQ ID NO: 521089 - DNA, 55 bp, Artificial
  Synthetic oligonucleotide
gtcttcttggaattggtcagcgtacttttgttgaacgtctgacaggttcttttcg

SEQ ID NO: 521090 - DNA, 55 bp, Artificial
  Synthetic oligonucleotide
gtctgatgtattccatcatagctagatgttgtgtagtaagtccttctgtttcatc

SEQ ID NO: 521091 - DNA, 55 bp, Artificial
  Synthetic oligonucleotide
gtctgaacgcagacttattgtgcaactaatcccagaaacagcttggtataataac

SEQ ID NO: 521092 - DNA, 55 bp, Artificial
  Synthetic oligonucleotide
gtctcgttcgagttattggccatactcaccggactgtaactccggcgctaacgct

SEQ ID NO: 521093 - DNA, 55 bp, Artificial
  Synthetic oligonucleotide
gtctcgattgtgtacttagaattgtgagccggagcttttgagctaagaatagccc

SEQ ID NO: 521094 - DNA, 55 bp, Artificial
  Synthetic oligonucleotide
gtcgtggagtagagcggttttcccactgaccttccatgtacttatttagcgcttc

SEQ ID NO: 521095 - DNA, 55 bp, Artificial
  Synthetic oligonucleotide
gtcgtctggttgtacagctaacgctacgtcttggtatgggaatcctaaaacgtag

SEQ ID NO: 521096 - DNA, 55 bp, Artificial
  Synthetic oligonucleotide
gtcggtctgcatcgtcataataagaagctcgtacaacgtcaccaaccttaagttc

SEQ ID NO: 521097 - DNA, 55 bp, Artificial
  Synthetic oligonucleotide
gtcgataaagttcgagtatccttccctccattagaaccagaagagatgacgaagg

SEQ ID NO: 521098 - DNA, 55 bp, Artificial
  Synthetic oligonucleotide
tttcccggtaggctccgtcatgctgagatctgacgctaagaacccaaatacgatg

SEQ ID NO: 521099 - DNA, 55 bp, Artificial
  Synthetic oligonucleotide
ttggtaccctggtggtgagtattatgtttctgttcatggcatcaccgcccctggc

SEQ ID NO: 521100 - DNA, 55 bp, Artificial
  Synthetic oligonucleotide
ttggtacattgtccctgatcctgttgctacaaacagatagtctacagtagagtcc

SEQ ID NO: 521101 - DNA, 55 bp, Artificial
  Synthetic oligonucleotide
ttgaggaggtgagcgcgccagaggctaagcccgcacgcgttgagacgaaaagcga

SEQ ID NO: 521102 - DNA, 55 bp, Artificial
  Synthetic oligonucleotide
ttctacaatacgtgctaatttctcagcacgtgaagtggtttgtttataccaagca

SEQ ID NO: 521103 - DNA, 55 bp, Artificial
  Synthetic oligonucleotide
ttcaaatgtcacgttggagagatgaaggtgatcctagaggatggggagcagtagg

SEQ ID NO: 521104 - DNA, 55 bp, Artificial
  Synthetic oligonucleotide
ttatctcataccagcataagctacgctcaaaagcgcggatcttatttgcgttctc

SEQ ID NO: 521105 - DNA, 55 bp, Artificial
  Synthetic oligonucleotide
tgttactggaaaccttactatcaatggaacgaccactactgtcaattctacggtc

SEQ ID NO: 521106 - DNA, 55 bp, Artificial
  Synthetic oligonucleotide
tggtctacgtattgccttttgtgtgggtatcacggaagacaacgagtcgcaggag

SEQ ID NO: 521107 - DNA, 55 bp, Artificial
  Synthetic oligonucleotide
tggaaaccttcatagaagttccagttcgcttgaatctttcccagtcgagctactt

SEQ ID NO: 521108 - DNA, 55 bp, Artificial
  Synthetic oligonucleotide
tgcgacctctgttggtcgtaagtgggatgtccgtcactcttacagtcgtcctccg

SEQ ID NO: 521109 - DNA, 55 bp, Artificial
  Synthetic oligonucleotide
tgcatcggagattatcttggattcacaatcggcaatacttacgaggcggtagtgg

SEQ ID NO: 521110 - DNA, 55 bp, Artificial
  Synthetic oligonucleotide
tgcaataaacaaaacggtgtgaagaacatccttatcacgttcacgcactgtgata

SEQ ID NO: 521111 - DNA, 55 bp, Artificial
  Synthetic oligonucleotide
tgagtcaacgtaacatcgttgaacagcagttcgggattcagtggaatccggtaac

SEQ ID NO: 521112 - DNA, 55 bp, Artificial
  Synthetic oligonucleotide
tgacggctctacttggtcagatgaattgccaatcggtatcgatgaatacccttcg

SEQ ID NO: 521113 - DNA, 55 bp, Artificial
  Synthetic oligonucleotide
tcttttatctttccctgcgtctacttcaccggataccagcgcataacaaacctcg

SEQ ID NO: 521114 - DNA, 55 bp, Artificial
  Synthetic oligonucleotide
tcgtttccgcatcagagagaatgtcatgcttaaagttgtacatgtcctcatctcc

SEQ ID NO: 521115 - DNA, 55 bp, Artificial
  Synthetic oligonucleotide
tcgtaaacagcggacgcggagtggttgaaacgggtgataatgatcagcttgccgc

SEQ ID NO: 521116 - DNA, 55 bp, Artificial
  Synthetic oligonucleotide
tcgctcaagtaaaagtgccaggaggtaaagcttgggagcatgctgcatctattcg

SEQ ID NO: 521117 - DNA, 55 bp, Artificial
  Synthetic oligonucleotide
tcgccgacagaacctacacagtcccgatcacgtacagtccatcaaattatactga

SEQ ID NO: 521118 - DNA, 55 bp, Artificial
  Synthetic oligonucleotide
tcgccatctgccgactctgtttcgttatctgcaactagtgcatctccgcagtcag

SEQ ID NO: 521119 - DNA, 55 bp, Artificial
  Synthetic oligonucleotide
tccgcttctttggtgccaacggtcaagcgtcagtgccttcagatcagggcgcgtt

SEQ ID NO: 521120 - DNA, 55 bp, Artificial
  Synthetic oligonucleotide
tccaatcagaaagcttaccgttagggtcgccttccccttggtgagcccaccaacg

SEQ ID NO: 521121 - DNA, 55 bp, Artificial
  Synthetic oligonucleotide
tcagtgtcctactcaagagcagttatctaaagaacccgtggggttcctgtttgat

SEQ ID NO: 521122 - DNA, 55 bp, Artificial
  Synthetic oligonucleotide
tcaccctggcgtcaatcgccgtactttaaggagagacgaccatggctcgtactat

SEQ ID NO: 521123 - DNA, 55 bp, Artificial
  Synthetic oligonucleotide
tcaacgcatacatgccgcagctttcagttgcagcggtacaggcgtacaatcgcgc

SEQ ID NO: 521124 - DNA, 55 bp, Artificial
  Synthetic oligonucleotide
tatttaccatcagtaaagtttcgcatgattcttgaagggcaccaacaccacgttg

SEQ ID NO: 521125 - DNA, 55 bp, Artificial
  Synthetic oligonucleotide
tattcgtcggagcattgttattatatgccacgactagtttcgaccataatgtctg

SEQ ID NO: 521126 - DNA, 55 bp, Artificial
  Synthetic oligonucleotide
tatgaaagaattctatgaatggaacgctgaaggattacgtgacgaactttcagag

SEQ ID NO: 521127 - DNA, 55 bp, Artificial
  Synthetic oligonucleotide
gggccgaaccatgatcgcagaatccgagatccgccaaacgttagccgccttgcgt

SEQ ID NO: 521128 - DNA, 55 bp, Artificial
  Synthetic oligonucleotide
gggcccgccgtatccaaaacgagctggccctaaagacgctgattcctactgatgt

SEQ ID NO: 521129 - DNA, 55 bp, Artificial
  Synthetic oligonucleotide
gggattaggaacctcagcggtcgttaacactggtacatctggtgcaacggttccg

SEQ ID NO: 521130 - DNA, 55 bp, Artificial
  Synthetic oligonucleotide
gggatcttcgcttactctggtggtgctcctggaatggatagccatttcatgtttg

SEQ ID NO: 521131 - DNA, 55 bp, Artificial; identical to SEQ ID NO: 426457
  Synthetic oligonucleotide

SEQ ID NO: 521132 - DNA, 55 bp, Artificial
  Synthetic oligonucleotide
gggagccaaattgatgtaaagggtcctaagtctccattattggtgtaaaggttct

SEQ ID NO: 521133 - DNA, 55 bp, Artificial
  Synthetic oligonucleotide
gggaatgatttacattttacccgtaacagtcacggcgtaggcttttgggatcgcc

SEQ ID NO: 521134 - DNA, 55 bp, Artificial
  Synthetic oligonucleotide
gggaaggtgagagacgtcgtttccctatcacagcagacgtagagattggtataac

SEQ ID NO: 521135 - DNA, 55 bp, Artificial
  Synthetic oligonucleotide
gggaagatagactgtgctaccatcgctacgctgttcttagaagcgtcctgctgtc

SEQ ID NO: 521136 - DNA, 55 bp, Artificial
  Synthetic oligonucleotide
ggcttcataagggtagtcttatcagctgatgtaggaatagttccgatacctgctg

SEQ ID NO: 521137 - DNA, 55 bp, Artificial
  Synthetic oligonucleotide
ggcttatactgcacatgcttgggatagcccgtgcggtcatatcgtgagatactcc

SEQ ID NO: 521138 - DNA, 55 bp, Artificial
  Synthetic oligonucleotide
ggctatcgtgattttgatctagtgtggactcgtaaaatgaaagaatacttggttg

SEQ ID NO: 521139 - DNA, 55 bp, Artificial
  Synthetic oligonucleotide
ggctatcatcgtagtgctcaaaatcccttccggtattgaatggcgggtctatgta

SEQ ID NO: 521140 - DNA, 55 bp, Artificial
  Synthetic oligonucleotide
ggcgttacgtaagctgagaagcccacgaaacacgttggatcacaaggagatacat

SEQ ID NO: 521141 - DNA, 55 bp, Artificial
  Synthetic oligonucleotide
ggcgtaggtgataactaccactacggcgcctccattgccaacacagttttgatcg

SEQ ID NO: 521142 - DNA, 55 bp, Artificial
  Synthetic oligonucleotide
ggcgcggagttaatcgaaggtcttgagaaagaactgtgcgtaccacaagtggtcg

SEQ ID NO: 521143 - DNA, 55 bp, Artificial
  Synthetic oligonucleotide
ggcctctcatgcgccaatcgaacgatgcgaaatcccagcgatcaagaccagtcac

SEQ ID NO: 521144 - DNA, 55 bp, Artificial
  Synthetic oligonucleotide
ggcctacgacccatctcaagttatcctttcattaggtggttgggaaccgtggggt

SEQ ID NO: 521145 - DNA, 55 bp, Artificial
  Synthetic oligonucleotide
ggcccaagagataacgtcagggccgacaactacgaagtcaataaatacaaccgag

SEQ ID NO: 521146 - DNA, 55 bp, Artificial
  Synthetic oligonucleotide
ggcattggctagatgtagctacctagtcgttgaggttcgagtcctctctcaggat

SEQ ID NO: 521147 - DNA, 55 bp, Artificial
  Synthetic oligonucleotide
ggcactcgctgccgcagataaggatccctttctatatcaaatggaagaggtaatc

SEQ ID NO: 521148 - DNA, 55 bp, Artificial
  Synthetic oligonucleotide
ggcaacttcttttcaacagcgaggcttgaggtttaccttcaagatgcgcacgggg

SEQ ID NO: 521149 - DNA, 55 bp, Artificial
  Synthetic oligonucleotide
ggatgctatgtttgtggtgtcaagttcagtgagtgcttagatctacatcacgtca

SEQ ID NO: 521150 - DNA, 55 bp, Artificial
  Synthetic oligonucleotide
ggatccccgaaccatcaagaaaggcagcctcaccggcttctctaacatagagccg

SEQ ID NO: 521151 - DNA, 55 bp, Artificial
  Synthetic oligonucleotide
ggatcaccgataccgatgagacaagccaggactatagcgcccctttccctgaatc

SEQ ID NO: 521152 - DNA, 55 bp, Artificial
  Synthetic oligonucleotide
ggataccctaccacaagtatcctacctttctctgacgtaaccttagaaccaagcg

SEQ ID NO: 521153 - DNA, 55 bp, Artificial
  Synthetic oligonucleotide
ggagttgtggcaaatggacggatacagatgtacagaaccgccattatatgaaagc

SEQ ID NO: 521154 - DNA, 55 bp, Artificial
  Synthetic oligonucleotide
ggagtaactagaggtttaaaagacgctattctagaagacggtaagggtagtcctc

SEQ ID NO: 521155 - DNA, 55 bp, Artificial
  Synthetic oligonucleotide
ggaggttcatcatgatctcttcgtgttcttgctcggtcagattccaacggttccg

SEQ ID NO: 521156 - DNA, 55 bp, Artificial
  Synthetic oligonucleotide
gtcctgagccataagataaagtatacatggtcatatcatgcataaactctagctg

SEQ ID NO: 521157 - DNA, 55 bp, Artificial
  Synthetic oligonucleotide
gtccctggattctggcccgatgacgacgttcaggtattgtcgtgtgacgaactgg

SEQ ID NO: 521158 - DNA, 55 bp, Artificial
  Synthetic oligonucleotide
gtccataaatctgcgtgcatttcatgtggttgtgttaccccgctacgagtaggag

SEQ ID NO: 521159 - DNA, 55 bp, Artificial
  Synthetic oligonucleotide
gtccaacaagaccatcggacttagccccattaacagtccacagaggaccttcccc

SEQ ID NO: 521160 - DNA, 55 bp, Artificial
  Synthetic oligonucleotide
gtcaggcatgttttctttcggcggaccaaagaatttcaacggaacaaggaatccg

SEQ ID NO: 521161 - DNA, 55 bp, Artificial
  Synthetic oligonucleotide
gtcagccaggttttatcactgacaagtgagcgcccgattatcacgcagcgaacag

SEQ ID NO: 521162 - DNA, 55 bp, Artificial
  Synthetic oligonucleotide
gtataacaaaggtaacggaggcggatacgtaccgaacaaagatggtacagtcgtg

SEQ ID NO: 521163 - DNA, 55 bp, Artificial
  Synthetic oligonucleotide
gtagtctggatttgccctgagctaggtatatgcattaatgaagcgatagtcctat

SEQ ID NO: 521164 - DNA, 55 bp, Artificial
  Synthetic oligonucleotide
gtagtaatgacttgggataaaacggaacaacttataagcgctgatttaagcgagt

SEQ ID NO: 521165 - DNA, 55 bp, Artificial
  Synthetic oligonucleotide
gtagggctgtccaggaataactgatacgtcttggtagattcctgtctcttgcccg

SEQ ID NO: 521166 - DNA, 55 bp, Artificial
  Synthetic oligonucleotide
gtagaacttcccaacacctcttgtgcaatcttacgcgaagaataaccttgtgctt

SEQ ID NO: 521167 - DNA, 55 bp, Artificial
  Synthetic oligonucleotide
gtaccaaccttgtggttcttcaaatgcaatataaggactcgtaccacgtggaacg

SEQ ID NO: 521168 - DNA, 55 bp, Artificial
  Synthetic oligonucleotide
gtacagcgtagttatacgtgttaacaacttgagagtactgattacgtaagtgctg

SEQ ID NO: 521169 - DNA, 55 bp, Artificial
  Synthetic oligonucleotide
gtacaagggaacaatccttttcgagaaagaatattgtttgccgcttggaactttc

SEQ ID NO: 521170 - DNA, 55 bp, Artificial
  Synthetic oligonucleotide
gtaagcgagagcttggccgtgagttaaagctacccatcaaggtgttaacggttcg

SEQ ID NO: 521171 - DNA, 55 bp, Artificial
  Synthetic oligonucleotide
ggttggaagaatgtttggtagagctgttaaaatggatgatagcatggcagatggc

SEQ ID NO: 521172 - DNA, 55 bp, Artificial
  Synthetic oligonucleotide
ggttgcgcccagttacgttacgatcatccagagagaattggcctgtattttccca

SEQ ID NO: 521173 - DNA, 55 bp, Artificial
  Synthetic oligonucleotide
ggttacagtccctactgtgattcctgttcctactggcgcagattgggatcttagc

SEQ ID NO: 521174 - DNA, 55 bp, Artificial
  Synthetic oligonucleotide
ggtgcttcaaatgtttggactttcagaaaaggatttcgatgagtacagagacttg

SEQ ID NO: 521175 - DNA, 55 bp, Artificial
  Synthetic oligonucleotide
ggtccttctagctgcttacggacctcctctaacgtcatgctaggggttctaccta

SEQ ID NO: 521176 - DNA, 55 bp, Artificial
  Synthetic oligonucleotide
ggtattccagaaagaatggtcgatgatgtccagacataccagaatagcggggatc

SEQ ID NO: 521177 - DNA, 55 bp, Artificial
  Synthetic oligonucleotide
ggtatcacctacagaaggctttaaaccaccaacgtagttactgcggagcataccg

SEQ ID NO: 521178 - DNA, 55 bp, Artificial
  Synthetic oligonucleotide
ggtagggctagaagcacaccataaggacgggtggagttggtgtgaagagagacgc

SEQ ID NO: 521179 - DNA, 55 bp, Artificial
  Synthetic oligonucleotide
ggtagaagttgacgcaaaagggcgtgtaatcagaggtaacactccagagcagttg

SEQ ID NO: 521180 - DNA, 55 bp, Artificial
  Synthetic oligonucleotide
ggtaaaagtaataacgtagcggatgttcgtttaggtgatatcctgtcatcagggg

SEQ ID NO: 521181 - DNA, 55 bp, Artificial
  Synthetic oligonucleotide
gggttccccaggatacgaatgtctccgctatagaagttagcgttctcacagtacc

SEQ ID NO: 521182 - DNA, 55 bp, Artificial
  Synthetic oligonucleotide
gggtattttgaccgacgtattaacaaatccgaaaaccgcaacttcgacaagtcta

SEQ ID NO: 521183 - DNA, 55 bp, Artificial
  Synthetic oligonucleotide
ggggctccatgatcgggcttattgggagggctgcgtaggggctacttaggtacca

SEQ ID NO: 521184 - DNA, 55 bp, Artificial
  Synthetic oligonucleotide
gggcttgtgggacgcatttcatcggctacagagggtagcgtgtcgattagcactg

SEQ ID NO: 521185 - DNA, 55 bp, Artificial
  Synthetic oligonucleotide
gggcgcttgccaacacaatgacggtagcagtcaatgaaaacattgaagcattgct

SEQ ID NO: 521186 - DNA, 55 bp, Artificial
  Synthetic oligonucleotide
ccataagcgctagttggtcatgtgtaggtgcttatcataacgacccaatagtact

SEQ ID NO: 521187 - DNA, 55 bp, Artificial
  Synthetic oligonucleotide
ccagataagttaaaggtagggttccagaaacgaagcgatacctatacagggaaac

SEQ ID NO: 521188 - DNA, 55 bp, Artificial
  Synthetic oligonucleotide
ccactctggttcggggcaaaacctttcggatatttcaatcgtcttacttgccaga

SEQ ID NO: 521189 - DNA, 55 bp, Artificial
  Synthetic oligonucleotide
ccacgtgtatcattagtagctaactcaggtacttttgttatggatgatggacgta

SEQ ID NO: 521190 - DNA, 55 bp, Artificial
  Synthetic oligonucleotide
ccacggtcgggcagcattcgtttacgccgaaacctgataccacgctggtattagc

SEQ ID NO: 521191 - DNA, 55 bp, Artificial
  Synthetic oligonucleotide
ccacattgtaccttgacgtgggtttactggttctgttttcgatacagagatatcc

SEQ ID NO: 521192 - DNA, 55 bp, Artificial
  Synthetic oligonucleotide
ccacatcaccgggtccataacggttcgataaccgtattccccgcgccagttcttg

SEQ ID NO: 521193 - DNA, 55 bp, Artificial
  Synthetic oligonucleotide
ccaagtggcatacctgcatgagcattagggttcatacgagctgatgtgtcactgt

SEQ ID NO: 521194 - DNA, 55 bp, Artificial
  Synthetic oligonucleotide
ccaagtcatcataatcacgcctacgaaccaatatacggcgttaggatgtgaaagg

SEQ ID NO: 521195 - DNA, 55 bp, Artificial
  Synthetic oligonucleotide
cattccgtcctcagtacctgatggttggtcgtcaaggcttcactaataccatcgt

SEQ ID NO: 521196 - DNA, 55 bp, Artificial
  Synthetic oligonucleotide
cattaatgatgcatcgctttccaatttgggtaagtttacggttagagcagcaaac

SEQ ID NO: 521197 - DNA, 55 bp, Artificial
  Synthetic oligonucleotide
catgattctatgagggattcccgccaacctgtaataaggtcgagtccaagtgcgg

SEQ ID NO: 521198 - DNA, 55 bp, Artificial
  Synthetic oligonucleotide
catcttacatccgtaaccgtgacatctctacattccgtattgtatctgacccaac

SEQ ID NO: 521199 - DNA, 55 bp, Artificial
  Synthetic oligonucleotide
catccttaccgcgactggcattagattccagtgtaccaatgcgcttagaaagctc

SEQ ID NO: 521200 - DNA, 55 bp, Artificial
  Synthetic oligonucleotide
catcacgaacagttacccaaggtttgtttcctacagagaaccctgcgagcggttg

SEQ ID NO: 521201 - DNA, 55 bp, Artificial
  Synthetic oligonucleotide
catagtcccaaaagcttgctctgtatttatacccgatgatttcccctttgtcacc

SEQ ID NO: 521202 - DNA, 55 bp, Artificial
  Synthetic oligonucleotide
cagtgtgatcagacgcgtatccgggtatctgtccagtccaaactcccgcccttac

SEQ ID NO: 521203 - DNA, 55 bp, Artificial
  Synthetic oligonucleotide
caggtcttataggtaggttcctcgtgagacgggttatgcttggatatttagttgc

SEQ ID NO: 521204 - DNA, 55 bp, Artificial
  Synthetic oligonucleotide
caggtactccgtcacctagactaggcttgtaatgtctgttgcttgtaaaccaagc

SEQ ID NO: 521205 - DNA, 55 bp, Artificial
  Synthetic oligonucleotide
caggatctccggcgttggtataaatttagaaacgtccttcccacagttgtcacag

SEQ ID NO: 521206 - DNA, 55 bp, Artificial
  Synthetic oligonucleotide
cagctgattttattctgctgggagggatagtactaatcgttgttgctatcggctc

SEQ ID NO: 521207 - DNA, 55 bp, Artificial
  Synthetic oligonucleotide
cagcgtaccgatgctgataacaataatgtcgatttgggcgagattcataacgtgc

SEQ ID NO: 521208 - DNA, 55 bp, Artificial
  Synthetic oligonucleotide
cagatggtgtagcacctgattatgatgctatggcaatggatggattctgcacggc

SEQ ID NO: 521209 - DNA, 55 bp, Artificial
  Synthetic oligonucleotide
cagatacaggttcgattagttctccgttagaataacgtgaacttggtaagtccgc

SEQ ID NO: 521210 - DNA, 55 bp, Artificial
  Synthetic oligonucleotide
cagactacgctgcttgagtggaagcagtatcgggccgctatcgctgttatcgact

SEQ ID NO: 521211 - DNA, 55 bp, Artificial
  Synthetic oligonucleotide
cactggagtggtgccgtgggctcaacaatatgacctggcagcaagtgtggtaagc

SEQ ID NO: 521212 - DNA, 55 bp, Artificial
  Synthetic oligonucleotide
ccgcatttgggattaccgatcatcaagaccgagaagaggataggatccctacttt

SEQ ID NO: 521213 - DNA, 55 bp, Artificial
  Synthetic oligonucleotide
ccgcaagttcatcacaacttagccgtcactggcgcgaaggtttgtcacttcggag

SEQ ID NO: 521214 - DNA, 55 bp, Artificial
  Synthetic oligonucleotide
ccgatttcgcccgtgaataattgttccggagcgccatacttagatgcttcaatcc

SEQ ID NO: 521215 - DNA, 55 bp, Artificial
  Synthetic oligonucleotide
ccgatgcaggaaagactcctagtgactctgactatacgtggtatgatgtagaggg

SEQ ID NO: 521216 - DNA, 55 bp, Artificial
  Synthetic oligonucleotide
ccgagcttattgggaaaagcagggtcattaaggttatcgccaggacgggccagaa

SEQ ID NO: 521217 - DNA, 55 bp, Artificial
  Synthetic oligonucleotide
ccgacgcgttatctggcagggacacacagaaaattaccccgctgttggggtagaa

SEQ ID NO: 521218 - DNA, 55 bp, Artificial
  Synthetic oligonucleotide
ccgaccaaaactgaattaagtggccctggtggtggacccattcagcaaataacac

SEQ ID NO: 521219 - DNA, 55 bp, Artificial
  Synthetic oligonucleotide
ccctgtaaccgttaacatggtcatcatactgctggcgatgctacccaacgaatag

SEQ ID NO: 521220 - DNA, 55 bp, Artificial
  Synthetic oligonucleotide
ccctgattgtcgtttgatacgcagaccatttgattcagcagctcaagcatgggct

SEQ ID NO: 521221 - DNA, 55 bp, Artificial
  Synthetic oligonucleotide
cccggtagagttcacatcgacagtacgagcccagcgattagtggcctgagtacca

SEQ ID NO: 521222 - DNA, 55 bp, Artificial
  Synthetic oligonucleotide
cccggcgggccaaatcctcttcgatggtcacatctgggctgaacatcacctcgaa

SEQ ID NO: 521223 - DNA, 55 bp, Artificial
  Synthetic oligonucleotide
cccgataataagactgaatgtacctgaagcgtagtcttgctttgtgaaggcatcc

SEQ ID NO: 521224 - DNA, 55 bp, Artificial
  Synthetic oligonucleotide
ccccggagcttccgaaaatctcactgtttgattgacctatgcgcccacaattccg

SEQ ID NO: 521225 - DNA, 55 bp, Artificial
  Synthetic oligonucleotide
ccccgctacgagtaggaggaagcatacctgcaacgtattctatatggaataactg

SEQ ID NO: 521226 - DNA, 55 bp, Artificial
  Synthetic oligonucleotide
cccagaaaagcagaaatacgtaacggcggtcacacacttccattgcaagatagag

SEQ ID NO: 521227 - DNA, 55 bp, Artificial
  Synthetic oligonucleotide
cccactgttcaggctcgcacgttacgacgcctatcgcgtgcttctctacgatatt

SEQ ID NO: 521228 - DNA, 55 bp, Artificial
  Synthetic oligonucleotide
cccactccatgatttacctaatccttggaatagtccttgagctcctgatgatgca

SEQ ID NO: 521229 - DNA, 55 bp, Artificial
  Synthetic oligonucleotide
cccaatatagcctacatccattacatgttgtccaggattctacagcatagtgccc

SEQ ID NO: 521230 - DNA, 55 bp, Artificial
  Synthetic oligonucleotide
cccaaggtcgtgccatgtttgccagatcgtacgcattacccaatatacctaagtc

SEQ ID NO: 521231 - DNA, 55 bp, Artificial
  Synthetic oligonucleotide
ccattcttaattaccatacaaacacggttggctcggcctggagtttgtctggccc

SEQ ID NO: 521232 - DNA, 55 bp, Artificial
  Synthetic oligonucleotide
ccattccatgggatgtatgctacttggtgaatgtagggatgatgtgaaggaagtg

SEQ ID NO: 521233 - DNA, 55 bp, Artificial
  Synthetic oligonucleotide
ccatgtcaacttaggatcaaaggcaacatacttgacaggtatctcggcggagttc

SEQ ID NO: 521234 - DNA, 55 bp, Artificial
  Synthetic oligonucleotide
ccatgacagtttgaggtacaccgccctgatatttgtccgcgatggtctgctgaac

SEQ ID NO: 521235 - DNA, 55 bp, Artificial
  Synthetic oligonucleotide
ccatcctgattacagatttcgtatcagcgaacatcgttccgattgaacacacaac

SEQ ID NO: 521236 - DNA, 55 bp, Artificial
  Synthetic oligonucleotide
ccatccgtcgttcaaggttgcgtctctgaccgagtcaatgaacctactgccggtc

SEQ ID NO: 521237 - DNA, 55 bp, Artificial
  Synthetic oligonucleotide
ccatcacactacttgcatttattcctaatgccgtcgcaatccctgaactaaacca

SEQ ID NO: 521238 - DNA, 55 bp, Artificial
  Synthetic oligonucleotide
ccatagtatctctgtgctattgcttgcatcgtttcttcatgttgaactacgtgct

SEQ ID NO: 521239 - DNA, 55 bp, Artificial
  Synthetic oligonucleotide
atcaaccaagtccagtacatatcctctgtctctttactcatactaatgccaactc

SEQ ID NO: 521240 - DNA, 55 bp, Artificial
  Synthetic oligonucleotide
atacgtcgcgcactctctttcagactgtcagcagctaactgtaatttacgcgccg

SEQ ID NO: 521241 - DNA, 55 bp, Artificial
  Synthetic oligonucleotide
agttacccatggcagagggttctttctcttcgcatacgaactagggagacccgct

SEQ ID NO: 521242 - DNA, 55 bp, Artificial
  Synthetic oligonucleotide
agtactgatatgccactaagtccgtttataaagtcgcacccagtgggctacattt

SEQ ID NO: 521243 - DNA, 55 bp, Artificial
  Synthetic oligonucleotide
aggtatgtctgcaaaatacgaagtaggagacgagttccaacttcagaaaggctct

SEQ ID NO: 521244 - DNA, 55 bp, Artificial
  Synthetic oligonucleotide
aggaggattagaaggaggtactgggtatagttctaatgacagataccgtcccggt

SEQ ID NO: 521245 - DNA, 55 bp, Artificial
  Synthetic oligonucleotide
agacagttaaaagtgactaattacggacttgaagttgtattctgggttacgctcg

SEQ ID NO: 521246 - DNA, 55 bp, Artificial
  Synthetic oligonucleotide
agaaggtagtattggtttcttagtagataaccctcaccctttcgtggttaaggtt

SEQ ID NO: 521247 - DNA, 55 bp, Artificial
  Synthetic oligonucleotide
agaagcaactggagaggtgacattcgaggggaaggtcggaacagtcataccaaac

SEQ ID NO: 521248 - DNA, 55 bp, Artificial
  Synthetic oligonucleotide
acttagaacggtaaggttggtgacccattaccacacgactctcgtcagagctggt

SEQ ID NO: 521249 - DNA, 55 bp, Artificial
  Synthetic oligonucleotide
actatttgcgttagacggaaagaaagcaaacctatcagacaacgacgtacaaaga

SEQ ID NO: 521250 - DNA, 55 bp, Artificial
  Synthetic oligonucleotide
acgtggatgttgagtcctgcgagtactttgaacaggtcgctcatttcatagagtg

SEQ ID NO: 521251 - DNA, 55 bp, Artificial
  Synthetic oligonucleotide
acgtcttgcgtggaaggcgatgttatcagaactactgtggttcattgaaggttcc

SEQ ID NO: 521252 - DNA, 55 bp, Artificial
  Synthetic oligonucleotide
acgtcgtcataggcacaggcgtgaaccgttagcccgtcgatttccgtggtgcctg

SEQ ID NO: 521253 - DNA, 55 bp, Artificial
  Synthetic oligonucleotide
acggttcaaatgaagttcttatctgacactaagcaacaatcacttgctgctggtt

SEQ ID NO: 521254 - DNA, 55 bp, Artificial
  Synthetic oligonucleotide
acccttatacaggaggacgtagagaaataacagcaagtgagataacaactgagtg

SEQ ID NO: 521255 - DNA, 55 bp, Artificial
  Synthetic oligonucleotide
acatgggccgtgtacttcaggacggctctattagttatgacgtagcagaacctgt

SEQ ID NO: 521256 - DNA, 55 bp, Artificial
  Synthetic oligonucleotide
acaggcgcgaaaaccgagagtgcgaatagtaattcaaaggtatgtgttaggagaa

SEQ ID NO: 521257 - DNA, 55 bp, Artificial
  Synthetic oligonucleotide
aattgatcgttgcgtaatcagattcagttagcgtagtattagctgggacgcgtac

SEQ ID NO: 521258 - DNA, 55 bp, Artificial
  Synthetic oligonucleotide
aattgagaccgtagaacctttattgacgtaatagttagtacggacatagtgtcct

SEQ ID NO: 521259 - DNA, 55 bp, Artificial
  Synthetic oligonucleotide
aattaagcgtctccgttatatcgctgaaggggcaatcaagtctcatcgtgacgta

SEQ ID NO: 521260 - DNA, 55 bp, Artificial
  Synthetic oligonucleotide
aagtctaaaccattaccatgacttgcagcgaagttatcacttaatgcctcaaagc

SEQ ID NO: 521261 - DNA, 55 bp, Artificial
  Synthetic oligonucleotide
aagtatacacaattcgcagtatggacttcagctacattaggtggacgtaaaggtt

SEQ ID NO: 521262 - DNA, 55 bp, Artificial
  Synthetic oligonucleotide
aagcaactcattgagaagcagaagaatttctacttccgtctctcccttgctggca

SEQ ID NO: 521263 - DNA, 55 bp, Artificial
  Synthetic oligonucleotide
aacgggatagggcaaatccttgatgctgtaagatcgcatcgcgaattcgagcgcc

SEQ ID NO: 521264 - DNA, 55 bp, Artificial
  Synthetic oligonucleotide
aacgaagttaaagttcgtgacgccgatggtaatattggttacgttaaaagccaat

SEQ ID NO: 521265 - DNA, 55 bp, Artificial
  Synthetic oligonucleotide
aaattgtaccagtacttccctgctttcctcgtcttctacctgcccgtactgcgat

SEQ ID NO: 521266 - DNA, 55 bp, Artificial
  Synthetic oligonucleotide
cactccggtcgtaacacaggataatcttacgtgttgcgttctttaagattgaatc

SEQ ID NO: 521267 - DNA, 55 bp, Artificial
  Synthetic oligonucleotide
cacgcagcggcttctctggtccttcttggatgtctggtcgagtgacgatatccag

SEQ ID NO: 521268 - DNA, 55 bp, Artificial
  Synthetic oligonucleotide
cacctccgtaagcgtcgataccatcgtgacgaagattgatgtgttgctgggtggc

SEQ ID NO: 521269 - DNA, 55 bp, Artificial
  Synthetic oligonucleotide
caccgttaatcattctgtagaagttaacgtggttttcccaaatcgccatacgctg

SEQ ID NO: 521270 - DNA, 55 bp, Artificial
  Synthetic oligonucleotide
caccgctaagcgataaaggtgaaccgattttacccggtactgacttttcttgccg

SEQ ID NO: 521271 - DNA, 55 bp, Artificial
  Synthetic oligonucleotide
caccccacagagtgtagtaatcatactggcaggtagcgtcacccggtgcatagga

SEQ ID NO: 521272 - DNA, 55 bp, Artificial
  Synthetic oligonucleotide
caccaacagtgggttgtttataattcccatctgtcgaaaaccagtgttacctatt

SEQ ID NO: 521273 - DNA, 55 bp, Artificial
  Synthetic oligonucleotide
cacacctaacacagtaaatgaaaacgcaggtgctcagatgcgtcaggcagaggtg

SEQ ID NO: 521274 - DNA, 55 bp, Artificial
  Synthetic oligonucleotide
cacaaagatgtttcacacctacctttagaccagattcaatatgctatcacccctc

SEQ ID NO: 521275 - DNA, 55 bp, Artificial
  Synthetic oligonucleotide
caatggttaagcgcaagtacgatccagagggtaaccggaccgacatttcacgtta

SEQ ID NO: 521276 - DNA, 55 bp, Artificial
  Synthetic oligonucleotide
caatcggggactgactctgtttgaagagtcattgcacaaacctgatcataaactc

SEQ ID NO: 521277 - DNA, 55 bp, Artificial
  Synthetic oligonucleotide
caatcatgagtaaagctaacaccgtgctaatgttttccctgattaatgatcccgc

SEQ ID NO: 521278 - DNA, 55 bp, Artificial
  Synthetic oligonucleotide
caaggctgctacaggagacgttaacggagttacaacgaatgagaaaagcgcggac

SEQ ID NO: 521279 - DNA, 55 bp, Artificial
  Synthetic oligonucleotide
caacgtggactatcacacttaacaaagcgtataacaccttatggtggttctggac

SEQ ID NO: 521280 - DNA, 55 bp, Artificial
  Synthetic oligonucleotide
caacggggcgaacgtgccgaaatgctcattgatggggcgatccgtgtgattgcta

SEQ ID NO: 521281 - DNA, 55 bp, Artificial
  Synthetic oligonucleotide
caacgagagcacgttgtttatcacttcctttctcaccacgcatctccacagcgct

SEQ ID NO: 521282 - DNA, 55 bp, Artificial
  Synthetic oligonucleotide
caacaggatggttacgataagatccagtcattatgggacgcgggtcatcgtaacg

SEQ ID NO: 521283 - DNA, 55 bp, Artificial
  Synthetic oligonucleotide
atttagacaagaccctatggatgaaactcaacgtctagatggctctttaatggtc

SEQ ID NO: 521284 - DNA, 55 bp, Artificial
  Synthetic oligonucleotide
attgtcatcggaaagaatggcaatttgtaggacatgtgagcattttcaacgcaga

SEQ ID NO: 521285 - DNA, 55 bp, Artificial
  Synthetic oligonucleotide
atgtcagtaatcggatatacaacgaagcaaagatcactggagcgagacgccggat

SEQ ID NO: 521286 - DNA, 55 bp, Artificial
  Synthetic oligonucleotide
atgcttatcagaccacaggtgttgcacgtttccgcgcttacgtagtgtctgttcc

SEQ ID NO: 521287 - DNA, 55 bp, Artificial
  Synthetic oligonucleotide
atgaagggcaattgcaaacagaaattcaggcacagcgtcgtattggtaacgtggc

SEQ ID NO: 521288 - DNA, 55 bp, Artificial
  Synthetic oligonucleotide
atcgtacacttggatatcgcccttaatctttctatcagacgcttgaatccatccc

SEQ ID NO: 521289 - DNA, 55 bp, Artificial
  Synthetic oligonucleotide
atcggctagtggtggcgtaacaatggattctatgcgcactgcatacaatgggcat

SEQ ID NO: 521290 - DNA, 55 bp, Artificial
  Synthetic oligonucleotide
atccggtcttatcttggttctccggagacagaggttgtgctgcacttcccgtcgg

SEQ ID NO: 521291 - DNA, 55 bp, Artificial
  Synthetic oligonucleotide
atcccatgcttttgcatccgttacacctaattgctcacgaatgtctcgaacgtca

SEQ ID NO: 521292 - DNA, 55 bp, Artificial
  Synthetic oligonucleotide
atccacagagttcgaaactctgctcctgaaacgtgttgctggtcaagatacacct

SEQ ID NO: 521293 - DNA, 55 bp, Artificial
  Synthetic oligonucleotide
cgctggtattgtgtctggaccatcgcgcaccgtcgcttggcgagttctcgacgct

SEQ ID NO: 521294 - DNA, 55 bp, Artificial
  Synthetic oligonucleotide
cgctatgttcagtcgcgcttacagaacctgcaactaattcggtttctacgttagc

SEQ ID NO: 521295 - DNA, 55 bp, Artificial
  Synthetic oligonucleotide
cgtggatgcttaacatctctatcttagatgcagctatggaaatattcggtgagcg

SEQ ID NO: 521296 - DNA, 55 bp, Artificial
  Synthetic oligonucleotide
cgttgccaccgtcgcggacggtttacaaaatgtcgtcacggggttgggtggcgac

SEQ ID NO: 521297 - DNA, 55 bp, Artificial
  Synthetic oligonucleotide
cgctaaggctctcttcatcggctccgcaatcaattagagcaatgtgctgagtacc

SEQ ID NO: 521298 - DNA, 55 bp, Artificial
  Synthetic oligonucleotide
cgctaacttcgggcaatggtcgagcgttgagtacatcgaatcctaccaggtgccg

SEQ ID NO: 521299 - DNA, 55 bp, Artificial
  Synthetic oligonucleotide
cgttgttcgtaaagttactttcggtaacggcggtcgtatgaatgaccacccatcc

SEQ ID NO: 521300 - DNA, 55 bp, Artificial
  Synthetic oligonucleotide
ctaactgttgacgtgtctcgtggtgtaggacatgattactcagcattcgcagtat

SEQ ID NO: 521301 - DNA, 55 bp, Artificial
  Synthetic oligonucleotide
cgcgtcacgcaagtacacggtaacggtcgaagtgcttaccgagttcggattaaca

SEQ ID NO: 521302 - DNA, 55 bp, Artificial
  Synthetic oligonucleotide
cgcgcctatgacgttctcgattgcagccactgcggaatctgatgaaacaatcgtg

SEQ ID NO: 521303 - DNA, 55 bp, Artificial
  Synthetic oligonucleotide
ctaccgcagaactttgcgcatcaagatcaccttcttggaatgacgtaatcatagc

SEQ ID NO: 521304 - DNA, 55 bp, Artificial
  Synthetic oligonucleotide
cgcgaagcagatatgtttggtaaaaccattgttacctatgatctggttggacgtg

SEQ ID NO: 521305 - DNA, 55 bp, Artificial
  Synthetic oligonucleotide
cgcctaagtctaagatcatggcgtacttaccgttatcttccagcccatatcgaaa

SEQ ID NO: 521306 - DNA, 55 bp, Artificial
  Synthetic oligonucleotide
cgccgcacgcgtgacatcatcgcgagtcctgaataccaatcgctatggccgtgtc

SEQ ID NO: 521307 - DNA, 55 bp, Artificial
  Synthetic oligonucleotide
cgccattaacaacgcaattgatcatgttcgccatgacctgcttgagatgaaccgc

SEQ ID NO: 521308 - DNA, 55 bp, Artificial
  Synthetic oligonucleotide
cgcaggtgctcctggtgtaggggctgctgctccaccttggttaggcttacgacct

SEQ ID NO: 521309 - DNA, 55 bp, Artificial
  Synthetic oligonucleotide
cgcaggaaaagtatgcgaagatttggtaaggtcttactgtgcagagaacagatgg

SEQ ID NO: 521310 - DNA, 55 bp, Artificial
  Synthetic oligonucleotide
ctagcccattttaaaagagacagacgctatttccacgtctatagaatagacagag

SEQ ID NO: 521311 - DNA, 55 bp, Artificial
  Synthetic oligonucleotide
cgcagaacatgcacagcgtgaagaaagtaggctggcgaatcccgatattatcagg

SEQ ID NO: 521312 - DNA, 55 bp, Artificial
  Synthetic oligonucleotide
cgcacccgcgagtcgtaagcaacagatggttctcgaatctaaagcacagatcctc

SEQ ID NO: 521313 - DNA, 55 bp, Artificial
  Synthetic oligonucleotide
cgcaccagtttggctttactaacaaagcccatcaagtacctgcaccacagcaaca

SEQ ID NO: 521314 - DNA, 55 bp, Artificial
  Synthetic oligonucleotide
cgatcgtaggaacacctgcgggtcgctgattcaataattcgttagcgagttcgtt

SEQ ID NO: 521315 - DNA, 55 bp, Artificial
  Synthetic oligonucleotide
ctagtggtggcggggaaagagatgcaggttctgaggcacgtcaacgtctcactgc

SEQ ID NO: 521316 - DNA, 55 bp, Artificial
  Synthetic oligonucleotide
cgggtttccgaacgtttcattccaatgctctttagaacaaaagtgaagttgtccg

SEQ ID NO: 521317 - DNA, 55 bp, Artificial
  Synthetic oligonucleotide
cggtattaagacggagttttccgcgcaacggaacgtgcttaagctcgtcgcgatt

SEQ ID NO: 521318 - DNA, 55 bp, Artificial
  Synthetic oligonucleotide
cggtccggtgaacgcagacaactctacgggtcgtttccagaacctgattttgact

SEQ ID NO: 521319 - DNA, 55 bp, Artificial
  Synthetic oligonucleotide
cgggacaccggttggacgctttctatttctacacgtaaagcaccagggtctaacg

SEQ ID NO: 521320 - DNA, 55 bp, Artificial
  Synthetic oligonucleotide
cggtgcggttcttacagtactgtataacaaggaatggatacttccagtaacggga

SEQ ID NO: 521321 - DNA, 55 bp, Artificial
  Synthetic oligonucleotide
cggtggcttcgaatacagtgctgaaattagctttaacgtccggagacagttctac

SEQ ID NO: 521322 - DNA, 55 bp, Artificial
  Synthetic oligonucleotide
cggttgccgtttcgacgcaaacgcttcttgtcacctttgcgatccctgcaccggg

SEQ ID NO: 521323 - DNA, 55 bp, Artificial
  Synthetic oligonucleotide
cggttggcgattaagactttggcacgatgattcagctcaccgtacttccacgtgg

SEQ ID NO: 521324 - DNA, 55 bp, Artificial
  Synthetic oligonucleotide
cgtacctgaaactacccagatgcgtttagccatgcaagctgaattacggtttgac

SEQ ID NO: 521325 - DNA, 55 bp, Artificial
  Synthetic oligonucleotide
cgtagttcttacgaatatgatgccttcgtttgggctgatacttcacctaatgtcg

SEQ ID NO: 521326 - DNA, 55 bp, Artificial
  Synthetic oligonucleotide
cgggaacatgtcccgctcttattgtactacttgtttatgatggatgtcaaagtac

SEQ ID NO: 521327 - DNA, 55 bp, Artificial
  Synthetic oligonucleotide
cgtccatattccggatatctcgtgtgtggatctcagaatctttccataccccggt

SEQ ID NO: 521328 - DNA, 55 bp, Artificial
  Synthetic oligonucleotide
cgtctgacccaacaacttacaacaacgttgaggatatcgttcagaaccgtatgtc

SEQ ID NO: 521329 - DNA, 55 bp, Artificial
  Synthetic oligonucleotide
cgtgactggattgaaactactcaggtagctatgtttgctggtgtaccatcattca

SEQ ID NO: 521330 - DNA, 55 bp, Artificial
  Synthetic oligonucleotide
cggctattcaggcagatgaatgggcgcacgagttgctatatgaagcatctaccgc

SEQ ID NO: 521331 - DNA, 55 bp, Artificial
  Synthetic oligonucleotide
cggctaacatagaagctgtaaatgcgcctactgcaatgatagctccgtaaatagg

SEQ ID NO: 521332 - DNA, 55 bp, Artificial
  Synthetic oligonucleotide
cggcaggcacaccttctatgctcaacgatagttttcctaaagcaggagctcctac

SEQ ID NO: 521333 - DNA, 55 bp, Artificial
  Synthetic oligonucleotide
cggcaccgccgatgttcgctagggaaatgaggcgggcggataagaacctgaagcc

SEQ ID NO: 521334 - DNA, 55 bp, Artificial
  Synthetic oligonucleotide
cggagaggaaggcggcttatactatttctaccccgttgacggtgattccacgatc

SEQ ID NO: 521335 - DNA, 55 bp, Artificial
  Synthetic oligonucleotide
cggaacagtattaaacaacccatggggatgtggactattggcatggtgcctggtc

SEQ ID NO: 521336 - DNA, 55 bp, Artificial
  Synthetic oligonucleotide
cgtgatgttgataacacgatcacagccgtactcttggaaccactctgcgatctgg

SEQ ID NO: 521337 - DNA, 55 bp, Artificial
  Synthetic oligonucleotide
cggaaattgaatttgcggaaaacattccgtcaaacgtgagtatcgatctgcgggt

SEQ ID NO: 521338 - DNA, 55 bp, Artificial
  Synthetic oligonucleotide
cgtgcatcattgtttgagtatatggattggatcgttgctcactcccgccgcatgg

SEQ ID NO: 521339 - DNA, 55 bp, Artificial
  Synthetic oligonucleotide
cgctggtttgttacaccagaggggaactttatgtttcaatcatggtatgcaacag

SEQ ID NO: 521340 - DNA, 55 bp, Artificial
  Synthetic oligonucleotide
ccttatgtaagtcgatttctggggttacctcttctacttggtcaatccaaccagt

SEQ ID NO: 521341 - DNA, 55 bp, Artificial
  Synthetic oligonucleotide
cctgttcgcttaacttcatcgcgtaccgttcgataatcgcgattgacttcggatc

SEQ ID NO: 521342 - DNA, 55 bp, Artificial
  Synthetic oligonucleotide
cctggttggaagccaggaataatgaaccgatatactaatgccccgtatttggcgg

SEQ ID NO: 521343 - DNA, 55 bp, Artificial
  Synthetic oligonucleotide
ctccggtgatcctaagaccgttgaagttaacaagctgatccaatacttcgaactg

SEQ ID NO: 521344 - DNA, 55 bp, Artificial
  Synthetic oligonucleotide
cctgctaattgagggtatccattgaatactgcatcgtatgacattgattgtcctg

SEQ ID NO: 521345 - DNA, 55 bp, Artificial
  Synthetic oligonucleotide
cctgcaatggctccgttgttaggtgcgtaagtccagtagaactctaggttacgtg

SEQ ID NO: 521346 - DNA, 55 bp, Artificial
  Synthetic oligonucleotide
cctcataacgacagcaacggcacttctgctggttgtagtcgtaagggacacttac

SEQ ID NO: 521347 - DNA, 55 bp, Artificial
  Synthetic oligonucleotide
cctaatacaaatactagggctataccttagaatcgatgtacggggctcacagggg

SEQ ID NO: 521348 - DNA, 55 bp, Artificial
  Synthetic oligonucleotide
cctaagtttatcaagtccttggtggctaccgaattcgatatccgctacgaggctg

SEQ ID NO: 521349 - DNA, 55 bp, Artificial
  Synthetic oligonucleotide
ccgttccccggtaaatacatcacttacatgacgacatctgcggatgcaagagacg

SEQ ID NO: 521350 - DNA, 55 bp, Artificial
  Synthetic oligonucleotide
ccgtgtaacttgattgctccacgtactgagttgaattgagttacagtgtaacctg

SEQ ID NO: 521351 - DNA, 55 bp, Artificial
  Synthetic oligonucleotide
ccgtcttgtcgtctgttcttagactgatgtaattcgttggtgctaagtagcggtt

SEQ ID NO: 521352 - DNA, 55 bp, Artificial
  Synthetic oligonucleotide
ccgtagccgttacggtactactgttgtttacgctaacaccaccaagtcctacaac

SEQ ID NO: 521353 - DNA, 55 bp, Artificial
  Synthetic oligonucleotide
ccggtaactggtcaaaacaaaagttatcagggcttgcaagcgtattcccgcgatc

SEQ ID NO: 521354 - DNA, 55 bp, Artificial
  Synthetic oligonucleotide
ccggctacagaagcttggcttaacagctttcattctatagcaaacgagaagggct

SEQ ID NO: 521355 - DNA, 55 bp, Artificial
  Synthetic oligonucleotide
ccggcgtcactggacttttccaagtgagttactgcaaaattgttgtgcgggagct

SEQ ID NO: 521356 - DNA, 55 bp, Artificial
  Synthetic oligonucleotide
ccggcccactgcgtgtacgttgccgtggttggcggaacagatgaagatgtgggga

SEQ ID NO: 521357 - DNA, 55 bp, Artificial
  Synthetic oligonucleotide
ccggagtatctgcgattcctgcggtaacaaaagcatcctcaggaatgtatgcgat

SEQ ID NO: 521358 - DNA, 55 bp, Artificial
  Synthetic oligonucleotide
ccggagcaacagcggcagaatcgcgccgtgatatcgttcctagtctcgcaaccgc

SEQ ID NO: 521359 - DNA, 55 bp, Artificial
  Synthetic oligonucleotide
ccggacgcatgtcaccaacaaagatcgtggtcttacggtacagatagggcaaatt

SEQ ID NO: 521360 - DNA, 55 bp, Artificial
  Synthetic oligonucleotide
ccgctaagcgcggcgtgatccactttgatgtggagctaggcattagcctagagga

SEQ ID NO: 521361 - DNA, 55 bp, Artificial
  Synthetic oligonucleotide
ccgctaagcaataaagaagcgtatcacctatcaataggcggtgatcggatcaaag

SEQ ID NO: 521362 - DNA, 55 bp, Artificial
  Synthetic oligonucleotide
ccgcgtcagagttgacaagcttaatccagaggagcagttgccagcgaacattgtt

SEQ ID NO: 521363 - DNA, 55 bp, Artificial
  Synthetic oligonucleotide
cgagaggacatcaccttgtctggatagacacagatacgctatttccatcgccacc

SEQ ID NO: 521364 - DNA, 55 bp, Artificial
  Synthetic oligonucleotide
cgactgggaaggtaaacgcactagattccctgtaacagccgatgcggagattggc

SEQ ID NO: 521365 - DNA, 55 bp, Artificial
  Synthetic oligonucleotide
cgactataacagaagctggatttgttcaacgtttcgagggttcattgattccagg

SEQ ID NO: 521366 - DNA, 55 bp, Artificial
  Synthetic oligonucleotide
cgaccttgtggatcgcgaaaagcaggacaaatttgtttcgtcagttgaggcgctg

SEQ ID NO: 521367 - DNA, 55 bp, Artificial
  Synthetic oligonucleotide
cgacatccctgccgaatttcgtaataattatgtcccgaccgaagcgtccattgcg

SEQ ID NO: 521368 - DNA, 55 bp, Artificial
  Synthetic oligonucleotide
cgagagggatcggtgtcgtcaaactttcgaccacaaccagggcaggttttgaact

SEQ ID NO: 521369 - DNA, 55 bp, Artificial
  Synthetic oligonucleotide
cgagatacgtgctcaggcttactctaacttaacctatcatcctattggcgacttc

SEQ ID NO: 521370 - DNA, 55 bp, Artificial
  Synthetic oligonucleotide
cgacaggctcactcaagaagtcacaagggatattgttgacgaacacaaccactgc

SEQ ID NO: 521371 - DNA, 55 bp, Artificial
  Synthetic oligonucleotide
cgaacttggtaagcctggtattgcgttcagtctttataactctaagcccgtagat

SEQ ID NO: 521372 - DNA, 55 bp, Artificial
  Synthetic oligonucleotide
cgaactcaaatgcgtatatcgctggcttcgaaaaccagtctactggtaacggggc

SEQ ID NO: 521373 - DNA, 55 bp, Artificial
  Synthetic oligonucleotide
ctccatgttgttaatgttccctgagctgttggatggtaatactttaacctcccac

SEQ ID NO: 521374 - DNA, 55 bp, Artificial
  Synthetic oligonucleotide
cgaacaggttaaggctactcaaggtacattctcatatggtttcgggcaacagacg

SEQ ID NO: 521375 - DNA, 55 bp, Artificial
  Synthetic oligonucleotide
cgaaagcctggtcttgtacatactcgttatcagggtctgtgtccgtaatgtacat

SEQ ID NO: 521376 - DNA, 55 bp, Artificial
  Synthetic oligonucleotide
ctcccatagaactaccatcacagaagaacttaacaggcatcggctttatagtgtc

SEQ ID NO: 521377 - DNA, 55 bp, Artificial
  Synthetic oligonucleotide
cgaaactgacgctggtgcattctattgcccatacgttccattgatggctaccggt

SEQ ID NO: 521378 - DNA, 55 bp, Artificial
  Synthetic oligonucleotide
cgaggcctgagaaacagtatccccgcatgaaattgggtcggccatttgaacggcc

SEQ ID NO: 521379 - DNA, 55 bp, Artificial
  Synthetic oligonucleotide
cgatatggtagattacgatgcagaagacttatcaacattcgctacagttaaaggg

SEQ ID NO: 521380 - DNA, 55 bp, Artificial
  Synthetic oligonucleotide
cctttcaatgagtgaatgtaccgatgggtattggctgtatgatgaaacgcgcggc

SEQ ID NO: 521381 - DNA, 55 bp, Artificial
  Synthetic oligonucleotide
ccttgatacagtcgccagccccgagaacccactatgtatcaccttagtatcgagg

SEQ ID NO: 521382 - DNA, 55 bp, Artificial
  Synthetic oligonucleotide
ccttgactagttctgatggtagatgaagtggttggtacccattcgagaatgtagg

SEQ ID NO: 521383 - DNA, 54 bp, Artificial
  Synthetic oligonucleotide
aagcacttcctcaatgcttggagcattaacaacgtcttcgtctgttattcctgt

SEQ ID NO: 521384 - DNA, 54 bp, Artificial
  Synthetic oligonucleotide
aaaagcgatgtacaagctaggtggtattgtcctaccgtttaaccgtgagtatct

SEQ ID NO: 521385 - DNA, 54 bp, Artificial
  Synthetic oligonucleotide
taagttaacgttctcgaaacggaatgtctgatacttaatggtaggacggctaag

SEQ ID NO: 521386 - DNA, 54 bp, Artificial
  Synthetic oligonucleotide
tgtgaccctgaccgaaacaatcagaaaaggtgtggatagcttcgacacgcttat

SEQ ID NO: 521387 - DNA, 54 bp, Artificial
  Synthetic oligonucleotide
cttaatgacggtggagttaacaagggagaacgtgctcttatggagaactatcaa

SEQ ID NO: 521388 - DNA, 54 bp, Artificial
  Synthetic oligonucleotide
ttctacagcagtacagtagaagtctgcaataggagcaaaaggtacagaagttgt

SEQ ID NO: 521389 - DNA, 54 bp, Artificial
  Synthetic oligonucleotide
ttttgttaagctccgtattgatctgtgcggttgtcatcgttccaacatcaaccg

SEQ ID NO: 521390 - DNA, 54 bp, Artificial
  Synthetic oligonucleotide
tcccaacggtactagcagatattcctaaacggaatgaagtgtttgtacctgact

SEQ ID NO: 521391 - DNA, 54 bp, Artificial
  Synthetic oligonucleotide
aaccgaccgaggcaagaccatgattacaactgatgttatttacgcacgtccatt

SEQ ID NO: 521392 - DNA, 54 bp, Artificial
  Synthetic oligonucleotide
tccgggtctttgacttccttgacatggcagtgagccgtcacgatgatagtcatg

SEQ ID NO: 521393 - DNA, 54 bp, Artificial
  Synthetic oligonucleotide
cgcgtgttctttactgctgatcttggtttggctaaagtttatgccggacgtgca

SEQ ID NO: 521394 - DNA, 54 bp, Artificial
  Synthetic oligonucleotide
gaagttataccctgatgaatgtgccaaacgtcttcctgtatttgattgccgagt

SEQ ID NO: 521395 - DNA, 54 bp, Artificial
  Synthetic oligonucleotide
ggtagaacacgtgatacgttatcccaaaagtcaaatgagtctgatacgacacta

SEQ ID NO: 521396 - DNA, 54 bp, Artificial
  Synthetic oligonucleotide
atctcccagctgatcgcttcctgacggagagcgaacgagcgtgttccgaactca

SEQ ID NO: 521397 - DNA, 54 bp, Artificial
  Synthetic oligonucleotide
gaatagatttccagagcatcgcgcacaaggtacatggaatcaattgcaccgtgc

SEQ ID NO: 521398 - DNA, 54 bp, Artificial
  Synthetic oligonucleotide
gggcagttatcacattctgtggattcgcattatggcacggtggtgtatcagata

SEQ ID NO: 521399 - DNA, 54 bp, Artificial
  Synthetic oligonucleotide
attatcaggcagtgcgctacggctatgggttacccattggttattaagtcgggg

SEQ ID NO: 521400 - DNA, 54 bp, Artificial
  Synthetic oligonucleotide
ccaccgtatactcctaatcccgaaccttctttagagaacaacgcaacttgtttc

SEQ ID NO: 521401 - DNA, 54 bp, Artificial
  Synthetic oligonucleotide
atcggtcgttatgtagcagtccctatggcaaccatctctggttccatgatgact

SEQ ID NO: 521402 - DNA, 54 bp, Artificial
  Synthetic oligonucleotide
gaacgagtaaagctaggagaagtcattaagcagcaaaacgactatcctgcaaag

SEQ ID NO: 521403 - DNA, 53 bp, Artificial
  Synthetic oligonucleotide
tcctgacgagcgtctctggaaacctgagttggataagtctggcaacggttacg

SEQ ID NO: 521404 - DNA, 53 bp, Artificial
  Synthetic oligonucleotide
tccggatactgaggtgcatgccctgttttgtaaaagtcagttcttaacattgg

SEQ ID NO: 521405 - DNA, 53 bp, Artificial
  Synthetic oligonucleotide
acgcattccttgaaagtgtcgttgacctgcttcgtgatggtatgactaccaaa

SEQ ID NO: 521406 - DNA, 53 bp, Artificial
  Synthetic oligonucleotide
tcgttcagttaaacttcgtggtcagctttcccagggtttagctctaccagtaa

SEQ ID NO: 521407 - DNA, 53 bp, Artificial
  Synthetic oligonucleotide
acccgaagcgcatcgttaacgagataatcgcgtctggctgcgttcctgaccat

SEQ ID NO: 521408 - DNA, 53 bp, Artificial
  Synthetic oligonucleotide
ctgatagcattgggtataactgatttgatgcgaccgctgataatgtctgcgct

SEQ ID NO: 521409 - DNA, 53 bp, Artificial
  Synthetic oligonucleotide
gtatcggttctatccccggaaacaaatgtacctgaacaaacgtaagttccact

SEQ ID NO: 521410 - DNA, 53 bp, Artificial
  Synthetic oligonucleotide
tgcaaacggcataccaacgtgtccatttggattctgacgtgctgatgtatcgc

SEQ ID NO: 521411 - DNA, 53 bp, Artificial
  Synthetic oligonucleotide
tgcacttgagccaacaggcccattgcaaaacttgtcgtcccagaaagggccat

SEQ ID NO: 521412 - DNA, 53 bp, Artificial
  Synthetic oligonucleotide
ggtgtttactttgttatgggaatgacaggaggaatgcctagtggagtaagctc

SEQ ID NO: 521413 - DNA, 53 bp, Artificial
  Synthetic oligonucleotide
aagtgtggagtcatgcattcaaaggacctggtgggcaatggtacatcgaaaac

SEQ ID NO: 521414 - DNA, 53 bp, Artificial
  Synthetic oligonucleotide
aagccagccattgtattccagtactcgctataactcaccgttccacggtaagt

SEQ ID NO: 521415 - DNA, 53 bp, Artificial
  Synthetic oligonucleotide
aagcacagaagatggtggattagtaacaagtaaaatagtaacatttacaagaa

SEQ ID NO: 521416 - DNA, 53 bp, Artificial
  Synthetic oligonucleotide
cctggtcaggaacccacaaggatttaatcgtgaacccaccttcgatattctta

SEQ ID NO: 521417 - DNA, 53 bp, Artificial
  Synthetic oligonucleotide
cctatccgtggtaaggaagttaaggtcttgtctctaagggagcgccaagtaga

SEQ ID NO: 521418 - DNA, 53 bp, Artificial
  Synthetic oligonucleotide
gcgttcaattcgcccataccagaaccactatgcagcttggtttgcgttcggtc

SEQ ID NO: 521419 - DNA, 53 bp, Artificial
  Synthetic oligonucleotide
caactgcgggcaatgctttatagcaaggatcttatcgatgaggttaatagggg

SEQ ID NO: 521420 - DNA, 53 bp, Artificial
  Synthetic oligonucleotide
atattcgtcgcgctcggcagagtttaaatcactcttctacaagagcgcggcat

SEQ ID NO: 521421 - DNA, 53 bp, Artificial
  Synthetic oligonucleotide
atacggggtcgcgaagtccgtcgatgttgatttgacatatcagggttcgaata

SEQ ID NO: 521422 - DNA, 53 bp, Artificial
  Synthetic oligonucleotide
atgtacagcttcccggtgaccccaaggtctttcaggaaggtatcggactgctt

SEQ ID NO: 521423 - DNA, 53 bp, Artificial
  Synthetic oligonucleotide
agggggctatttatgaacaggtttcgactagatgaagcgataagcataacacg

SEQ ID NO: 521424 - DNA, 53 bp, Artificial
  Synthetic oligonucleotide
tagtgactggttactagttgtgacttcatcggacgtgctgctggagcattata

SEQ ID NO: 521425 - DNA, 53 bp, Artificial
  Synthetic oligonucleotide
aggctccgcttgacgaagctactcagaacgaagtcacttctcgcgctattaaa

SEQ ID NO: 521426 - DNA, 52 bp, Artificial
  Synthetic oligonucleotide
atccggtttatactccggacattctcctgccttgtagcaagtgttacatgct

SEQ ID NO: 521427 - DNA, 52 bp, Artificial
  Synthetic oligonucleotide
gcatgtaccccagtataagaaccttctgcacgatctttgcttcgcatctcga

SEQ ID NO: 521428 - DNA, 52 bp, Artificial
  Synthetic oligonucleotide
atctcagtgttttgatggagagattcctatgttacttcgtcagttcggtgat

SEQ ID NO: 521429 - DNA, 52 bp, Artificial
  Synthetic oligonucleotide
gtggaattatctaaaaccacgggtgtgtctgactgggtaataggtggtacta

SEQ ID NO: 521430 - DNA, 52 bp, Artificial
  Synthetic oligonucleotide
tgttgtcgattggggatctaacacggttattgacttccagtaccagacaggc

SEQ ID NO: 521431 - DNA, 52 bp, Artificial
  Synthetic oligonucleotide
tgcttcgcatgtattagctatggtagagcgtggattatacgacgcgtctatt

SEQ ID NO: 521432 - DNA, 52 bp, Artificial
  Synthetic oligonucleotide
acaaacccttgatatggatttgtacctcatcagtgtcaacgtccttgtccat

SEQ ID NO: 521433 - DNA, 52 bp, Artificial
  Synthetic oligonucleotide
tagttgttacaccaacggtaccacctgcggtatgagtagggttaccattgat

SEQ ID NO: 521434 - DNA, 52 bp, Artificial
  Synthetic oligonucleotide
attgaagtccatcggattcttacgcaacgcgtcatacatacgacgaatcgga

SEQ ID NO: 521435 - DNA, 52 bp, Artificial
  Synthetic oligonucleotide
gagactcgacttccttcctgatagggcgaccattagatgtaactgaatcctt

SEQ ID NO: 521436 - DNA, 51 bp, Artificial
  Synthetic oligonucleotide
gtcacgaaatggtcgtcttgttattcgtccagattcaggagatccggttaa

SEQ ID NO: 521437 - DNA, 51 bp, Artificial
  Synthetic oligonucleotide
atcgttgatctgcttaccacaccacaaaactttagcatcaaaggattcgaa

SEQ ID NO: 521438 - DNA, 51 bp, Artificial
  Synthetic oligonucleotide
cctggaacctttatgctaacagtgtgcaacggcacgaactacgattgacta

SEQ ID NO: 521439 - DNA, 51 bp, Artificial
  Synthetic oligonucleotide
tttaatgtagccgtcgtgtaccagcgcattgcgcagacaggctaagtcacc

SEQ ID NO: 521440 - DNA, 51 bp, Artificial
  Synthetic oligonucleotide
ttgtccctctggtgattttgctcaagggatcatcattgccagcttgtacca

SEQ ID NO: 521441 - DNA, 51 bp, Artificial
  Synthetic oligonucleotide
gagaattccttgttgccaaactcgtgagtccacacagggcgaccaaggcgc

SEQ ID NO: 521442 - DNA, 51 bp, Artificial
  Synthetic oligonucleotide
tcctaactacgcggatactcatgagtctatagctagacatttagactatag

SEQ ID NO: 521443 - DNA, 51 bp, Artificial
  Synthetic oligonucleotide
ccaagtcatttacaaccggggtcaaatcgtccagctgcggcatatcgtttt

SEQ ID NO: 521444 - DNA, 51 bp, Artificial
  Synthetic oligonucleotide
ttctaagagtacatatgatatactagataatgtttatttttcaaaaagtca

SEQ ID NO: 521445 - DNA, 51 bp, Artificial
  Synthetic oligonucleotide
agtgtatggaaaacaagccagactgtattcaacaggagttaagttcaatcg

SEQ ID NO: 521446 - DNA, 51 bp, Artificial
  Synthetic oligonucleotide
cacagagtgttagttcagttcttcataaggtattagaggaatgggtaagac

SEQ ID NO: 521447 - DNA, 51 bp, Artificial
  Synthetic oligonucleotide
cagtctggacgttgtgtgaatccgaacatttcccaaggatgggttgctggg

SEQ ID NO: 521448 - DNA, 51 bp, Artificial
  Synthetic oligonucleotide
atgctgttggttatgctttggcttattctggtggagacgatagtcattatt

SEQ ID NO: 521449 - DNA, 51 bp, Artificial
  Synthetic oligonucleotide
tctctcgcatcttgtttgcgacactcatcgctctgtccctccaggaagtaa

SEQ ID NO: 521450 - DNA, 51 bp, Artificial
  Synthetic oligonucleotide
ctttaacttgcccctctagctctgcgatacaagctgttaacttatcgattg

SEQ ID NO: 521451 - DNA, 51 bp, Artificial
  Synthetic oligonucleotide
ctacaggcggtttgtacacacgccgcatagcttccttcgtgctcgatccgg

SEQ ID NO: 521452 - DNA, 51 bp, Artificial
  Synthetic oligonucleotide
gtcttagcggactcatcaggacttcgtggtggcgaagcagacttacgttac

SEQ ID NO: 521453 - DNA, 51 bp, Artificial
  Synthetic oligonucleotide
ctagcaagcctatgacgacctataatacctgggctatccttccatactaca

SEQ ID NO: 521454 - DNA, 51 bp, Artificial
  Synthetic oligonucleotide
agtgcatcaagataacaaggaagtaaaagaaagtatagataagcaatttaa

SEQ ID NO: 521455 - DNA, 51 bp, Artificial
  Synthetic oligonucleotide
tgtcaatcagaccgttattctgaataccctggagagtagcagtcggttgtt

SEQ ID NO: 521456 - DNA, 51 bp, Artificial
  Synthetic oligonucleotide
gatgcacagcggggtctttgatccgttcacggtaaatcacctctctcttgg

SEQ ID NO: 521457 - DNA, 50 bp, Artificial
  Synthetic oligonucleotide
ctattaatataaaccccactaatattactataactagtattaaaaaaacc

SEQ ID NO: 521458 - DNA, 50 bp, Artificial
  Synthetic oligonucleotide
acgaatatggtccaggtgtaaacgattctacagctttagctgtattacag

SEQ ID NO: 521459 - DNA, 50 bp, Artificial
  Synthetic oligonucleotide
actcaaaggggcacagcatttcatagtatggcagaagatcacttcagggg

SEQ ID NO: 521460 - DNA, 50 bp, Artificial
  Synthetic oligonucleotide
tgccagggcaactggctagaacatcacgcactgatacgccagagatttct

SEQ ID NO: 521461 - DNA, 50 bp, Artificial
  Synthetic oligonucleotide
tacggacattattccggatgagcgatacgttaacgtctgttgggatttac

SEQ ID NO: 521462 - DNA, 50 bp, Artificial
  Synthetic oligonucleotide
cacccttgtctcagcctacagacacagagttatcagcgcagcgacttgca

SEQ ID NO: 521463 - DNA, 50 bp, Artificial
  Synthetic oligonucleotide
aaaggatgttagcgccttgtatgctaatgagtgaacgccaggacgggata

SEQ ID NO: 521464 - DNA, 50 bp, Artificial
  Synthetic oligonucleotide
accctatgtcaacgtcgaagcaaactcaggttggacgggcgctgattact

SEQ ID NO: 521465 - DNA, 60 bp, Artificial; identical to SEQ ID NO: 404592
  Synthetic oligonucleotide

SEQ ID NO: 521466 - DNA, 60 bp, Artificial
  Synthetic oligonucleotide
gccgaataaaaggttgcttcgcctcgaagaaacctaatttgaggttgcgtattcaatacg

SEQ ID NO: 521467 - DNA, 60 bp, Artificial
  Synthetic oligonucleotide
gcgtatgctttaactttactttaagtaaagtaaagaattgatgtgacgttaactattata

SEQ ID NO: 521468 - DNA, 60 bp, Artificial
  Synthetic oligonucleotide
gctgaagaaagatgaagtttctggtagtgaaatcaaaccggaaggtgatgttgctcgtta

SEQ ID NO: 521469 - DNA, 60 bp, Artificial
  Synthetic oligonucleotide
ggaatgaacggtccagattaattccttaacgacgaaggaaggaatctatgaggggaccac

SEQ ID NO: 521470 - DNA, 60 bp, Artificial
  Synthetic oligonucleotide
ggaatgtaaactaatctctgattggttcagcataaaggcccaccaactaaaaggtgggga

SEQ ID NO: 521471 - DNA, 60 bp, Artificial
  Synthetic oligonucleotide
ggacacgtggacggaccgaaatactcctgcatctctataaatacccaaaacctgtcaagg

SEQ ID NO: 521472 - DNA, 60 bp, Artificial
  Synthetic oligonucleotide
ggatgcgattggaagaagatatcatcggattcagccgataatcgacaatatgtgccatgc

SEQ ID NO: 521473 - DNA, 60 bp, Artificial
  Synthetic oligonucleotide
ggccacaggcccgtaaagatgaatgaacggtccagattaattccttagcgacgaagaaag

SEQ ID NO: 521474 - DNA, 60 bp, Artificial
  Synthetic oligonucleotide
ggcgctggggcttattattacccccagcgtcgggacgggacatgggctttttaaatgggc

SEQ ID NO: 521475 - DNA, 60 bp, Artificial
  Synthetic oligonucleotide
ggctgatgcaggttattatgaaggttatcaagacgatgctgatgttgcatcagagaagcg

SEQ ID NO: 521476 - DNA, 60 bp, Artificial
  Synthetic oligonucleotide
ggcttgcggcctataaataggaccctgctaaatggcattaacaacagagcgggttaaact

SEQ ID NO: 521477 - DNA, 60 bp, Artificial
  Synthetic oligonucleotide
gggaaaccgtcccaaattcaaacttcgattgcttgccccgcaagccatcagaagtctata

SEQ ID NO: 521478 - DNA, 60 bp, Artificial
  Synthetic oligonucleotide
gggcggaatcacaatacaagacccgtactcatggatgcgattggaagaatatatcatcgg

SEQ ID NO: 521479 - DNA, 60 bp, Artificial
  Synthetic oligonucleotide
gggtatctgattgggctatattaaccccttaagggccgaaggcccgtttaaatatgtgtt

SEQ ID NO: 521480 - DNA, 60 bp, Artificial
  Synthetic oligonucleotide
ggtaatttaacatagatctgagaagagatatgggccgttggatgcctccatcggacgatg

SEQ ID NO: 521481 - DNA, 60 bp, Artificial
  Synthetic oligonucleotide
ggtatgttgattatgtatttatcataaatacataatggtatacgtatagcataaaataca

SEQ ID NO: 521482 - DNA, 60 bp, Artificial
  Synthetic oligonucleotide
ggtctggtaagaaagggagaagaactccacgtcgtggttattccaggccatataaatctg

SEQ ID NO: 521483 - DNA, 60 bp, Artificial
  Synthetic oligonucleotide
ggtgtataggttaaacagcatggtgttcttttatcatgaataccttgaagaactaggtgg

SEQ ID NO: 521484 - DNA, 60 bp, Artificial
  Synthetic oligonucleotide
ggttaaacagcatggtgttcttttatcatgaataccttgaagaactaggcggtgattact

SEQ ID NO: 521485 - DNA, 60 bp, Artificial
  Synthetic oligonucleotide
gtaaccagaacaacggaataatatgagctggcatggtgggccagatgtcccgagttagtg

SEQ ID NO: 521486 - DNA, 60 bp, Artificial
  Synthetic oligonucleotide
gtacacaatagaatacagtatacggaacgtatactgacaaagtaattaaatgataggcga

SEQ ID NO: 521487 - DNA, 60 bp, Artificial
  Synthetic oligonucleotide
gtaccgaagtatattaagcagctcgtgaggtatttggtagaatacctgaccagaagacgt

SEQ ID NO: 521488 - DNA, 60 bp, Artificial
  Synthetic oligonucleotide
gtataaaacatacaacacactatgaaatacaagacgctatgacaaatgtacgggtatctg

SEQ ID NO: 521489 - DNA, 60 bp, Artificial
  Synthetic oligonucleotide
gtatctgaatgagtatcttaactatctagggccgaaggcccgtgagcaatacgcgtattg

SEQ ID NO: 521490 - DNA, 60 bp, Artificial
  Synthetic oligonucleotide
gtatgaagaaactgataccaggtgctcactttgagaagaagaaaggcacacaaggacagg

SEQ ID NO: 521491 - DNA, 60 bp, Artificial
  Synthetic oligonucleotide
gtcaaacacgacatgtatatgttgtattgtatactagtgtagcttgtaaggctgtattag

SEQ ID NO: 521492 - DNA, 60 bp, Artificial
  Synthetic oligonucleotide
gtcaaggtaaccggtcaacattattctggcttgcgcagcaagcaacacgaattaaatatt

SEQ ID NO: 521493 - DNA, 60 bp, Artificial
  Synthetic oligonucleotide
gtcaaggtcactgtacaatattattctggctgcgagcatttttaacgaattaaattatta

SEQ ID NO: 521494 - DNA, 60 bp, Artificial
  Synthetic oligonucleotide
cgatataagggacataacgggtttagacaacggtttattcggattagaatataacgtcac

SEQ ID NO: 521495 - DNA, 60 bp, Artificial
  Synthetic oligonucleotide
cgccggaagtatggcagcaaggcggcaaccagccacgactactcgtcgctagggtcaata

SEQ ID NO: 521496 - DNA, 60 bp, Artificial
  Synthetic oligonucleotide
cgcctcgcaaggtacttcttagatctattgaagctgtgtttaacggaagcttaagcggaa

SEQ ID NO: 521497 - DNA, 60 bp, Artificial
  Synthetic oligonucleotide
cggaacgtatactaatcaaaaaattaaatgacaggcgaagcatgattaacaggtgtttag

SEQ ID NO: 521498 - DNA, 60 bp, Artificial
  Synthetic oligonucleotide
cggaagatcgttcacaccttccacgaagcttcgtggtagggcctattagtgcgtatgctt

SEQ ID NO: 521499 - DNA, 60 bp, Artificial
  Synthetic oligonucleotide
cgggttgggcgccggaagtatggcagcaaggcggcaaccagtcacgactgctcgtcgtta

SEQ ID NO: 521500 - DNA, 60 bp, Artificial
  Synthetic oligonucleotide
cgggttttgtcatcttacaaaagcccggtccaggattagaataatgtcacgtgccgaata

SEQ ID NO: 521501 - DNA, 60 bp, Artificial
  Synthetic oligonucleotide
cgtgctttaacaaatgcacgtgagtgatataagggacataacgggttcagataacggtat

SEQ ID NO: 521502 - DNA, 60 bp, Artificial
  Synthetic oligonucleotide
ctctacgtatcgatcagagatgatgacggagaaatgcgtccagtgctcatagtaccattc

SEQ ID NO: 521503 - DNA, 60 bp, Artificial
  Synthetic oligonucleotide
ctcttccttttcgttgtttcacacaacgaaaatggttagcaattggaattggtctggtaa

SEQ ID NO: 521504 - DNA, 60 bp, Artificial
  Synthetic oligonucleotide
cttaccacgaagcttcgtggtagggccctattagcgcgtatgcttttgctttactttact

SEQ ID NO: 521505 - DNA, 60 bp, Artificial
  Synthetic oligonucleotide
cttcaacaaatgcacgtgagtgatataagggacataacgggtttagataacggtatcttt

SEQ ID NO: 521506 - DNA, 60 bp, Artificial
  Synthetic oligonucleotide
cttcgcctcgaagaaacctcttttgaggtagcgtattcaatacgctaccgaatatctatt

SEQ ID NO: 521507 - DNA, 60 bp, Artificial
  Synthetic oligonucleotide
cttggcaaccaccactttagtggtgggtcagatgtcccgagttagtgcgccacgtaagcg

SEQ ID NO: 521508 - DNA, 60 bp, Artificial
  Synthetic oligonucleotide
cttttgcatgggaccaccaagagttagtgctcttcgactttccacgtagcttcgaggagt

SEQ ID NO: 521509 - DNA, 60 bp, Artificial
  Synthetic oligonucleotide
gaacaacggaataatatgagctggcaacgtagggtccatgtcccgagttaatgcgccacg

SEQ ID NO: 521510 - DNA, 60 bp, Artificial
  Synthetic oligonucleotide
gaacttgaagcaggagtcgcaacagggacatcagatgtcgaatgtcttctgaggaagaca

SEQ ID NO: 521511 - DNA, 60 bp, Artificial
  Synthetic oligonucleotide
gaagagtgttgtgatacgtatgacaaatctgcaagtactcttagggaatatcgaggagag

SEQ ID NO: 521512 - DNA, 60 bp, Artificial
  Synthetic oligonucleotide
gaagcatgattaacaggtgtttaggtataattaaaataattatgtcaagtaattataata

SEQ ID NO: 521513 - DNA, 60 bp, Artificial
  Synthetic oligonucleotide
gacatcagatgtcgaatgtcttctgaggaagacaaccgtgttgaggaagaatgtaacgga

SEQ ID NO: 521514 - DNA, 60 bp, Artificial
  Synthetic oligonucleotide
gacgggatcaacaaccggctgtcataccacaggcatctctggttaacccttctcaacaat

SEQ ID NO: 521515 - DNA, 60 bp, Artificial
  Synthetic oligonucleotide
gacgtataggggtgtcccgaggtaatttaacatagctctgaaaagagatatgagtcgttg

SEQ ID NO: 521516 - DNA, 60 bp, Artificial
  Synthetic oligonucleotide
gacgtccggtagcttccgaaggaagtaaggattgcttcgcggcgaagcaaaccatttata

SEQ ID NO: 521517 - DNA, 60 bp, Artificial
  Synthetic oligonucleotide
gagaggcggtgaagcaaactacgaagcatatttcgggtatttatagacttatagcgcagc

SEQ ID NO: 521518 - DNA, 60 bp, Artificial
  Synthetic oligonucleotide
gagtcgcaacagggacatcagatgttgaatgtcttctgaggaagacaaccgtgttgagga

SEQ ID NO: 521519 - DNA, 60 bp, Artificial
  Synthetic oligonucleotide
gagtgtcacgatgatattaatcaagtgataaacgtcaaagttgaagatgttgatcttgat

SEQ ID NO: 521520 - DNA, 60 bp, Artificial
  Synthetic oligonucleotide
gatatgtttatgtaaacataaactattgtatggaatgaaatccaaataacatacaagacg

SEQ ID NO: 521521 - DNA, 60 bp, Artificial
  Synthetic oligonucleotide
gatcaagagttcttgggaaatcaaccagccgacaacctgtctggaagccccaggtttatt

SEQ ID NO: 521522 - DNA, 60 bp, Artificial
  Synthetic oligonucleotide
gattaacaggtgtttaggtataattaaaataattatgtcaagtaattataatacggaaaa

SEQ ID NO: 521523 - DNA, 60 bp, Artificial
  Synthetic oligonucleotide
gattaggtatcctaacgatccagggccgaaggcccgtgagcaatatgcgtcgaaataatg

SEQ ID NO: 521524 - DNA, 60 bp, Artificial
  Synthetic oligonucleotide
tcgtcggaacgacctgcatctagagaggcggcgaggaaactacgaagcgtatatcgggta

SEQ ID NO: 521525 - DNA, 60 bp, Artificial
  Synthetic oligonucleotide
tcgtcggagcgatgtgcatctagagaggcggtgaagcaaactacgaggcatatatcgggt

SEQ ID NO: 521526 - DNA, 60 bp, Artificial
  Synthetic oligonucleotide
tctatgcatctcctatatcctggcgtggcttgtgctctctccttccgttcaaggtgggtt

SEQ ID NO: 521527 - DNA, 60 bp, Artificial
  Synthetic oligonucleotide
tctctataaataccctaaacctgtcaaggataattgctctctcccttctgtcaaggtggt

SEQ ID NO: 521528 - DNA, 60 bp, Artificial
  Synthetic oligonucleotide
tcttttgaggaagacaaccgtgttgaggaagaatgttacagaggtggattatttatattt

SEQ ID NO: 521529 - DNA, 60 bp, Artificial
  Synthetic oligonucleotide
tgaacatagccatctggttaaactggtatgtagtggggaacttgaagcaggagtcgcaac

SEQ ID NO: 521530 - DNA, 60 bp, Artificial
  Synthetic oligonucleotide
tgaagaagacgcttgaagcttggttgagttcttcaccgttgatgaagagaagagttgcat

SEQ ID NO: 521531 - DNA, 60 bp, Artificial
  Synthetic oligonucleotide
tgaccatagtacccttgctaatgatgacgtataggggtgtcccgaagtaatttaacatag

SEQ ID NO: 521532 - DNA, 60 bp, Artificial
  Synthetic oligonucleotide
tgataggcgaagcatgattaacaggtgtttaggtataattaacataattatgagaagtaa

SEQ ID NO: 521533 - DNA, 60 bp, Artificial
  Synthetic oligonucleotide
tgatcttgatatgcgagacagggttgtattgaagctgcagttcagattatgttacacata

SEQ ID NO: 521534 - DNA, 60 bp, Artificial
  Synthetic oligonucleotide
tgattacatctgacggaagatcgttcacaccttccacgaagcttcgtggtagggcctatt

SEQ ID NO: 521535 - DNA, 60 bp, Artificial
  Synthetic oligonucleotide
tgggaagatcggaagaaacttctgttctgtcagaagttgaagagctatgttagaaggatt

SEQ ID NO: 521536 - DNA, 60 bp, Artificial
  Synthetic oligonucleotide
tggttttgctctttgaggtacccaggtatattaaggagctcgtgaggtatttggtagaat

SEQ ID NO: 521537 - DNA, 60 bp, Artificial
  Synthetic oligonucleotide
tggttttgctctttgaggtaccgaagtatactaagcagctcgtgaggtacccggtagaat

SEQ ID NO: 521538 - DNA, 60 bp, Artificial
  Synthetic oligonucleotide
tgtaatatagcatagctatgtgaagagataagcatgtggccgacaactttagttgtgggc

SEQ ID NO: 521539 - DNA, 60 bp, Artificial
  Synthetic oligonucleotide
tgtgccatgcgtcgattcaggagctggaagaaagtcgcctcgtaaggtacttcttagatc

SEQ ID NO: 521540 - DNA, 60 bp, Artificial
  Synthetic oligonucleotide
tgtgtggtaatttgttgtgttagcaataaatcaatggtgtataggttaaacagcatggtg

SEQ ID NO: 521541 - DNA, 60 bp, Artificial
  Synthetic oligonucleotide
tgttattctatgggtatgtattatgcttgcgtgttatgttcctggatttgtgaagaagac

SEQ ID NO: 521542 - DNA, 60 bp, Artificial
  Synthetic oligonucleotide
ttacaattattggtaaaggaaaggttgagtccaatggagttgctgggacagattgtacta

SEQ ID NO: 521543 - DNA, 60 bp, Artificial
  Synthetic oligonucleotide
ttactttactaaagtaaagcaagatgctttgctttatactattcgctgttgttgagtaca

SEQ ID NO: 521544 - DNA, 60 bp, Artificial
  Synthetic oligonucleotide
ttagatctattgaagctgtgtttaacggaagcttaagcttcagcggaaataataggaacg

SEQ ID NO: 521545 - DNA, 60 bp, Artificial
  Synthetic oligonucleotide
ttatggtttcgcataggcgcttgaagctctcgttgagagagattactcagttgaaagaag

SEQ ID NO: 521546 - DNA, 60 bp, Artificial
  Synthetic oligonucleotide
ttattttggaacgaaatacatcacgctatgaaatacaagacgctatgacaaatgtacggg

SEQ ID NO: 521547 - DNA, 60 bp, Artificial
  Synthetic oligonucleotide
ttcgtagattgtactcgtatgtcgtattagaacatagatgtattgtatgtaaccatatgc

SEQ ID NO: 521548 - DNA, 60 bp, Artificial
  Synthetic oligonucleotide
ttcgtggtagggccctataagcgcgtatactttaactttactttagtaaagtaaagattg

SEQ ID NO: 521549 - DNA, 60 bp, Artificial
  Synthetic oligonucleotide
ttcgtggtagggccctattagcgcgtatgcttttgctttactttactaaagtaaagcaag

SEQ ID NO: 521550 - DNA, 60 bp, Artificial
  Synthetic oligonucleotide
ttcttagatctattgaagctgtgtttaatggaagcttcagcggaaataacaggaacgttc

SEQ ID NO: 521551 - DNA, 60 bp, Artificial
  Synthetic oligonucleotide
ttgaaagaagaacaagatgagttctgggtttcttatgaaacatatcttcgtgctcacgaa

SEQ ID NO: 521552 - DNA, 60 bp, Artificial
  Synthetic oligonucleotide
ttgcaacacttgaagacgttgggtttggatacgaaggtggacgatgaagatttggaatat

SEQ ID NO: 521553 - DNA, 60 bp, Artificial
  Synthetic oligonucleotide
ttggtagaatacctgaccagacgacgtgtatggatgcagaggacgcagttgacggaggca

SEQ ID NO: 521554 - DNA, 60 bp, Artificial
  Synthetic oligonucleotide
ttgtgttggataagccttgcaaccaccactttagtggtgggccagatgtcccgagttagt

SEQ ID NO: 521555 - DNA, 60 bp, Artificial
  Synthetic oligonucleotide
tttgttaatgtttacattaactagtatctgttatgtacaaattaaaatacagtatacgga

SEQ ID NO: 521556 - DNA, 60 bp, Artificial
  Synthetic oligonucleotide
gtgaagagataagcatgtggccgacaactttagttgtgggccagatgtcccgagttagtg

SEQ ID NO: 521557 - DNA, 60 bp, Artificial
  Synthetic oligonucleotide
gtgactgatataagggacataacgggtttagataacggtttattcggattagaatataac

SEQ ID NO: 521558 - DNA, 60 bp, Artificial
  Synthetic oligonucleotide
gtgagtgatataagggacataacgggttcagataacggtatctttggttcagaatataac

SEQ ID NO: 521559 - DNA, 60 bp, Artificial
  Synthetic oligonucleotide
gtggacggaccgaaatactcctgcatctctatgcatctcctatatcctggcgtggcttgt

SEQ ID NO: 521560 - DNA, 60 bp, Artificial
  Synthetic oligonucleotide
gtgttgaggaagaatgtaactgaggtggattatttatatttggcattctattgtagttct

SEQ ID NO: 521561 - DNA, 60 bp, Artificial
  Synthetic oligonucleotide
gttacacatacaagaagaagctggacataacgcttctgggttgtcgtttgaaggttcata

SEQ ID NO: 521562 - DNA, 60 bp, Artificial
  Synthetic oligonucleotide
gttgaatgaacggtccagattaattccttagcgacgaagaaaggaatcttaaaggggacc

SEQ ID NO: 521563 - DNA, 60 bp, Artificial
  Synthetic oligonucleotide
gtttactctgcgaagcagcgtgttatgttgtttatgtttccatttatgcccttcattaat

SEQ ID NO: 521564 - DNA, 60 bp, Artificial
  Synthetic oligonucleotide
taaattattaattcgtaggacacgtggacggaccgaaatactcctgcatctctatgcatc

SEQ ID NO: 521565 - DNA, 60 bp, Artificial
  Synthetic oligonucleotide
tacgggtatttgattaggtatcctaacgatctagggccgaaggcccgtgagcaatatgcg

SEQ ID NO: 521566 - DNA, 60 bp, Artificial
  Synthetic oligonucleotide
tacttactccgcgaagcggtgtggtttcgtgttttgttccttatatgccctcattatgaa

SEQ ID NO: 521567 - DNA, 60 bp, Artificial
  Synthetic oligonucleotide
tataaatctgctgttcctacgacgagggttgttgttcatcaatccgcagtgctgaagaaa

SEQ ID NO: 521568 - DNA, 60 bp, Artificial
  Synthetic oligonucleotide
tatgactaatgtacgggtatctgattaggtatcctaacgatctagggccgaaggcccgtg

SEQ ID NO: 521569 - DNA, 60 bp, Artificial
  Synthetic oligonucleotide
tatgtatttatcataaatacataatggtatacgtatagcataaaatacattaaccaacat

SEQ ID NO: 521570 - DNA, 60 bp, Artificial
  Synthetic oligonucleotide
tattacccccagcgctcaggacgggacatcacgtgcaactaacagacgcacgtgagaatg

SEQ ID NO: 521571 - DNA, 60 bp, Artificial
  Synthetic oligonucleotide
tattacccccagcgctcaggacgggacatcacgtgcgtcaacaaatgcacgtgaccgata

SEQ ID NO: 521572 - DNA, 60 bp, Artificial
  Synthetic oligonucleotide
tattacccccagcgctcaggacgggacatgggctttttaaatgggctttgcgagtttgaa

SEQ ID NO: 521573 - DNA, 60 bp, Artificial
  Synthetic oligonucleotide
tattacccccagcgctcgggacgggacatgggctaatggattgtggataaagggcccaaa

SEQ ID NO: 521574 - DNA, 60 bp, Artificial
  Synthetic oligonucleotide
tattaccccccgtgctcgggacgggacatgacgtcagcaatgcagataatgggcctaata

SEQ ID NO: 521575 - DNA, 60 bp, Artificial
  Synthetic oligonucleotide
tattcatttccagggttatattgaaatgaagaaacgtacgtctcttgctggtatgaagaa

SEQ ID NO: 521576 - DNA, 60 bp, Artificial
  Synthetic oligonucleotide
tattgtggaagacagacgggatcaacaaccggctgtcataccacaggcatctctggttaa

SEQ ID NO: 521577 - DNA, 60 bp, Artificial
  Synthetic oligonucleotide
tatttgggaaattgatagttgtataaaacatacaacacactatgaaatacaagacgctat

SEQ ID NO: 521578 - DNA, 60 bp, Artificial
  Synthetic oligonucleotide
tcacgactactcgtcgctaggatcgatattggttcctgaaaacaccgtcaaggtatttcg

SEQ ID NO: 521579 - DNA, 60 bp, Artificial
  Synthetic oligonucleotide
tcactcgtcggaagagaaatggagttctgggaatcgtctgccatgccagacgatgtcaag

SEQ ID NO: 521580 - DNA, 60 bp, Artificial
  Synthetic oligonucleotide
tcattatgaaggggaatgtctaaatgaccttgtgacgtcatttgatcctttgctgagctg

SEQ ID NO: 521581 - DNA, 60 bp, Artificial
  Synthetic oligonucleotide
tccatgggagtatggtgagttcattcctaccattgaagataagctcagagatgttatgca

SEQ ID NO: 521582 - DNA, 60 bp, Artificial
  Synthetic oligonucleotide
tccgcgaagcgatatggatcgtactcttaggcccaatagcacttaggcccaattgtaatt

SEQ ID NO: 521583 - DNA, 60 bp, Artificial
  Synthetic oligonucleotide
tcgaggagagttaaagaaaaaacaagctattgcaagttgggagttgcagaggaagccatg

SEQ ID NO: 521584 - DNA, 60 bp, Artificial
  Synthetic oligonucleotide
tcgtaggacacgtggacggaccgaaatactcctgcatctctataaataccctaaacctgt

SEQ ID NO: 521585 - DNA, 60 bp, Artificial
  Synthetic oligonucleotide
atagcgcagctagaagtaaatactgtacagataatgtattttgtaatttacgaagaattt

SEQ ID NO: 521586 - DNA, 60 bp, Artificial
  Synthetic oligonucleotide
atagcgaatatctgaagaaaccatgtgtggtaatttgttgtgttagcaataaatcaatgg

SEQ ID NO: 521587 - DNA, 60 bp, Artificial
  Synthetic oligonucleotide
atacaacacgctatgaaatacaagacgctatgacaaaagtacgggtatatgattaggtat

SEQ ID NO: 521588 - DNA, 60 bp, Artificial
  Synthetic oligonucleotide
ataagaataatgtcacgtgccgaataaaaggttgcttcgcctcgaagaaacctaatttga

SEQ ID NO: 521589 - DNA, 60 bp, Artificial
  Synthetic oligonucleotide
ataacggtatctttggtttagaatataacgtcacgtgtgaaagcgaaaggcacgtgacta

SEQ ID NO: 521590 - DNA, 60 bp, Artificial
  Synthetic oligonucleotide
ataaaatacattaaccaacatacaccacactataaaatacaacacactataacaaatgta

SEQ ID NO: 521591 - DNA, 60 bp, Artificial
  Synthetic oligonucleotide
agtggggaacttgaagcaggagtcgcaacagggacatcagatgttgaatgtcttttgagg

SEQ ID NO: 521592 - DNA, 60 bp, Artificial
  Synthetic oligonucleotide
agtgatgataggattgtctttgtatacgcatgacgtcacttgatcctatgatgagctggg

SEQ ID NO: 521593 - DNA, 60 bp, Artificial
  Synthetic oligonucleotide
agtattagtaacagcaacaactgtaatgaattatgtgatctgaagtgttatcttgtttgt

SEQ ID NO: 521594 - DNA, 60 bp, Artificial
  Synthetic oligonucleotide
aggtgtttaggtataattaaaataattatgtcaagtaattataatacggaaaatgaataa

SEQ ID NO: 521595 - DNA, 60 bp, Artificial
  Synthetic oligonucleotide
aggggtgtcccgaggtaatttaacatatatctgagaagagatatgggccgttggatgcct

SEQ ID NO: 521596 - DNA, 60 bp, Artificial
  Synthetic oligonucleotide
aggatatgaagacttctattattcgctatagcgaatacttgaagaaaccatgtgtggtaa

SEQ ID NO: 521597 - DNA, 60 bp, Artificial
  Synthetic oligonucleotide
aggagctggaagaaagtcgcctcgtaaggtacttcttagatctattgaagctgtgtttaa

SEQ ID NO: 521598 - DNA, 60 bp, Artificial
  Synthetic oligonucleotide
aggaacgttcgtggatttctctacgtatcgatcagagatgatgacggagaaatgcgtcca

SEQ ID NO: 521599 - DNA, 60 bp, Artificial
  Synthetic oligonucleotide
aggaaaggggaaagttgaatgtgatatattcggtggagattatgttgcgccaggaataga

SEQ ID NO: 521600 - DNA, 60 bp, Artificial
  Synthetic oligonucleotide
cacgtggacgatcaggatccgtgattacatctgacggaagatcgttcacacctaccacga

SEQ ID NO: 521601 - DNA, 60 bp, Artificial
  Synthetic oligonucleotide
cacgctatgaaatacaagacgctatgacaaatgtacgggtatttgattggttatcttaac

SEQ ID NO: 521602 - DNA, 60 bp, Artificial
  Synthetic oligonucleotide
caaggacaggccagagcgtatgcaatgaaagaagatacaagagttgaaggtccatgggag

SEQ ID NO: 521603 - DNA, 60 bp, Artificial
  Synthetic oligonucleotide
caacacactataaaatacaacacactataacaaatgtgcgggtatccgattgggctatat

SEQ ID NO: 521604 - DNA, 60 bp, Artificial
  Synthetic oligonucleotide
attgattgtggataacgggcccaaagggcccgtttagatgggtttgggcttatgggcttt

SEQ ID NO: 521605 - DNA, 60 bp, Artificial
  Synthetic oligonucleotide
attaaatatttaattcgtaggacacgtggacggaccgaaatactcctgcatctctataaa

SEQ ID NO: 521606 - DNA, 60 bp, Artificial
  Synthetic oligonucleotide
atgtaacggaggtggattatttatatttggcattctattgtagttctggagtaagtataa

SEQ ID NO: 521607 - DNA, 60 bp, Artificial
  Synthetic oligonucleotide
atggaagaagagttaaagcttatccaaagcttcccagttatgctccaacacgttgggtcc

SEQ ID NO: 521608 - DNA, 60 bp, Artificial
  Synthetic oligonucleotide
atgcttcttgtgtgcaaggtgaagcccggaagaatacttcattgggctatgatcaagagt

SEQ ID NO: 521609 - DNA, 60 bp, Artificial
  Synthetic oligonucleotide
atgcgtcgattctggagctggaagaaagtcgcctcgcaaggtacttcttagatctattga

SEQ ID NO: 521610 - DNA, 60 bp, Artificial
  Synthetic oligonucleotide
atcggaggcaaccggagacgtagagttcggcagaggtattgtggaagacagacgggatca

SEQ ID NO: 521611 - DNA, 60 bp, Artificial
  Synthetic oligonucleotide
atattatgagctggcaacgtagggtccatgtcccgagttagtgcgccacgtaagcgctgg

SEQ ID NO: 521612 - DNA, 60 bp, Artificial
  Synthetic oligonucleotide
atatcgggtatttatagacttatagcgtagctagaagtatacactgtacagatattgtat

SEQ ID NO: 521613 - DNA, 60 bp, Artificial
  Synthetic oligonucleotide
atatcatcggattcagccgataatcgacaatatgtgccatgcgtcgattcaggagctgga

SEQ ID NO: 521614 - DNA, 60 bp, Artificial
  Synthetic oligonucleotide
atatacgaagcgtacatcgggtattttatagacttattagcgcagctagaagtatatact

SEQ ID NO: 521615 - DNA, 60 bp, Artificial
  Synthetic oligonucleotide
aatggcattaacaacagagcgggtgaaactattctttgaatggtttctgtttattggagc

SEQ ID NO: 521616 - DNA, 60 bp, Artificial
  Synthetic oligonucleotide
aatatgtgttggacgtagtccaagcacaaaaaagtaagcagaacaacggaataatatgag

SEQ ID NO: 521617 - DNA, 60 bp, Artificial
  Synthetic oligonucleotide
aatatctattaatatgtgagtctctgccgaaaaaaaacagagcgaaagcgtagcagaagc

SEQ ID NO: 521618 - DNA, 60 bp, Artificial
  Synthetic oligonucleotide
aatatataggaatgttatcatggcatcgacacaagagaagttctcttggagtgattgtca

SEQ ID NO: 521619 - DNA, 60 bp, Artificial
  Synthetic oligonucleotide
aaggcccgtgagtaatatacgtcgaaataatgtttaacaaacaaatatacatgatacgga

SEQ ID NO: 521620 - DNA, 60 bp, Artificial
  Synthetic oligonucleotide
aagcgatggattgggcggaatcacaattcaagacttgtactcatggatgcgattggaaga

SEQ ID NO: 521621 - DNA, 60 bp, Artificial
  Synthetic oligonucleotide
aagacgctatgacagatgtacgggtatttgattgtgtatcggaacgtataagggccacag

SEQ ID NO: 521622 - DNA, 60 bp, Artificial
  Synthetic oligonucleotide
aagacgctatgacaaaagtacgggtatctgattaggtatcctaacgatccagggccgaag

SEQ ID NO: 521623 - DNA, 60 bp, Artificial
  Synthetic oligonucleotide
aagacgctatgacaaatgtacgggtatctgaatgagttttagtatcgcttaagggccgca

SEQ ID NO: 521624 - DNA, 60 bp, Artificial
  Synthetic oligonucleotide
aagacctgtacccatggatgcgattggaagaagatatcatcggattcagccgataatcga

SEQ ID NO: 521625 - DNA, 60 bp, Artificial
  Synthetic oligonucleotide
aactaggtggtgattattcagtatatcaagatctctattgtgatgaggtactctcttctt

SEQ ID NO: 521626 - DNA, 60 bp, Artificial
  Synthetic oligonucleotide
aacgttggacctatgttctaatacacggtatattaatatacgaaatataaatgggtattg

SEQ ID NO: 521627 - DNA, 60 bp, Artificial
  Synthetic oligonucleotide
aacggtccagattaattccttagcgacgaagaaaggaatctttcaggggaccacacaata

SEQ ID NO: 521628 - DNA, 60 bp, Artificial
  Synthetic oligonucleotide
aacgagatacaatacggtatgaaatacaacacgctatgacaaatgtacgggtatctgaat

SEQ ID NO: 521629 - DNA, 60 bp, Artificial
  Synthetic oligonucleotide
aacgaaagaggaatattttatggaacccagggttctattatctcttcttctcgttgtgat

SEQ ID NO: 521630 - DNA, 60 bp, Artificial
  Synthetic oligonucleotide
aaatcaatggtgtataggttaaacagcatggtgttcttttatcatgaataccttgaagaa

SEQ ID NO: 521631 - DNA, 60 bp, Artificial
  Synthetic oligonucleotide
aaaacctcttacgctaagcatctcgtaaagacgcgtgatgctttttattcgacaggtgga

SEQ ID NO: 521632 - DNA, 60 bp, Artificial
  Synthetic oligonucleotide
agcgctggggcttattattacccccagcgctcgggacgggacatgggctaattgattgtg

SEQ ID NO: 521633 - DNA, 60 bp, Artificial
  Synthetic oligonucleotide
agcgctggggcttattattacccccagcgctcaggacgggacatcacgtgcttcaacaaa

SEQ ID NO: 521634 - DNA, 60 bp, Artificial
  Synthetic oligonucleotide
agcgctggggcttattattacccccagcgctcaggacgggacatcacgtgcaactaacag

SEQ ID NO: 521635 - DNA, 60 bp, Artificial
  Synthetic oligonucleotide
agcacgggggactattattaccccccgtgctcgggacgggacatgacgttagcaaggatt

SEQ ID NO: 521636 - DNA, 60 bp, Artificial
  Synthetic oligonucleotide
agcaaggattataatgggctttttaatagcccatttattgaattgggccgggttttgtca

SEQ ID NO: 521637 - DNA, 60 bp, Artificial
  Synthetic oligonucleotide
agatgttatgcaggacatgaagaacacagggaagagacccatagagtatattgaagagtg

SEQ ID NO: 521638 - DNA, 60 bp, Artificial
  Synthetic oligonucleotide
agatggaatgaacggtccagattagttccttaacgacgaaggaaggtatctatcagggga

SEQ ID NO: 521639 - DNA, 60 bp, Artificial
  Synthetic oligonucleotide
agagttgcatcaactctaacaagaacaccatttgaagcaactggacctgagagagaaaga

SEQ ID NO: 521640 - DNA, 60 bp, Artificial
  Synthetic oligonucleotide
acgcgtattgaatgattacttagcgacgaagaaaggaatctttatggggaccactgaaaa

SEQ ID NO: 521641 - DNA, 60 bp, Artificial
  Synthetic oligonucleotide
acgagtgttgaatgtatacaacatacaacacactatgaaatacaagacgctatgacaaat

SEQ ID NO: 521642 - DNA, 60 bp, Artificial
  Synthetic oligonucleotide
acgaattaaattattaattcgtaggacacgtggacggaccgaaatactcctgcatttcta

SEQ ID NO: 521643 - DNA, 60 bp, Artificial
  Synthetic oligonucleotide
accatttatatatgtgcgtaggcttgcggcctataaataggacgcagctaaatggcatta

SEQ ID NO: 521644 - DNA, 60 bp, Artificial
  Synthetic oligonucleotide
acaatacaagacccgtactcatggatgcgattggaagaatatatcatcggattcagccga

SEQ ID NO: 521645 - DNA, 60 bp, Artificial
  Synthetic oligonucleotide
aatttgaggttgcgtattcaatacgctaccgagtatctattaatatgtgagtctctgccg

SEQ ID NO: 521646 - DNA, 60 bp, Artificial
  Synthetic oligonucleotide
aattgtaattacattgaatgacgtcatttgatcctttgctgagctggggcggggcttagt

SEQ ID NO: 521647 - DNA, 60 bp, Artificial
  Synthetic oligonucleotide
aatgtacgggtatttgattggttatcttaacgtgtaagggccgcaggcccgtcaagatgg

SEQ ID NO: 521648 - DNA, 60 bp, Artificial
  Synthetic oligonucleotide
aatgtacgggtatctgattgggctatattaaccccttaagggccgaaggcccgtttaaat

SEQ ID NO: 521649 - DNA, 60 bp, Artificial
  Synthetic oligonucleotide
cagcatggtgttcttttatcatgaataccttgaagaactaggtggtgattattcagtata

SEQ ID NO: 521650 - DNA, 60 bp, Artificial
  Synthetic oligonucleotide
caggtttatttattaaacctgaacatagccatctggttaaactggtatgtagtggggaac

SEQ ID NO: 521651 - DNA, 60 bp, Artificial
  Synthetic oligonucleotide
cagtatacggaacgtatactaatcaaaaaattaaatgacaggcgaagcatgattaacagg

SEQ ID NO: 521652 - DNA, 60 bp, Artificial
  Synthetic oligonucleotide
cagttgattaatacttgtaaatggattatacgtatagaagatgtatatccaatatgtacg

SEQ ID NO: 521653 - DNA, 60 bp, Artificial
  Synthetic oligonucleotide
cattggatgaacataacacgtggacgatcaggatccgtgattacatctgacggaagatcg

SEQ ID NO: 521654 - DNA, 60 bp, Artificial
  Synthetic oligonucleotide
ccaaaagaccatagtacccttgctaatgatgacgtataggggtgtcccgaggtaatttaa

SEQ ID NO: 521655 - DNA, 60 bp, Artificial
  Synthetic oligonucleotide
ccaaaagacctttgtacccctgacaatgatggcgtataggggtgtcccgaggtaatttaa

SEQ ID NO: 521656 - DNA, 60 bp, Artificial
  Synthetic oligonucleotide
ccatattctctctctgtttcatcaacctaaagctttcatggctattacgcatgttagtga

SEQ ID NO: 521657 - DNA, 60 bp, Artificial
  Synthetic oligonucleotide
cccggcccaataaataagagaacgtgttcaaaatcgaggtatgaccgaaggtcaaggtaa

SEQ ID NO: 521658 - DNA, 60 bp, Artificial
  Synthetic oligonucleotide
ccggtagaatacctgaccagaagacgtgtatggatgcagagaacgcagttatcggaggca

SEQ ID NO: 521659 - DNA, 60 bp, Artificial
  Synthetic oligonucleotide
cctatgttctaatacacggtatattaatatacgaaatataaatgggtattgatgtaaatg

SEQ ID NO: 521660 - DNA, 60 bp, Artificial
  Synthetic oligonucleotide
cctattttgaggtagcgtattcaatacgctaccgaatatctattaatatgtgagtctctg

SEQ ID NO: 521661 - DNA, 60 bp, Artificial
  Synthetic oligonucleotide
ccttgaagaactaggtggtgattactcagtatatcaagatctctattgtgatgaggtact

SEQ ID NO: 521662 - DNA, 60 bp, Artificial
  Synthetic oligonucleotide
cgaaataatgtttaacaaacaaatatacatgatacggatagttgaatccataaacaacga

SEQ ID NO: 521663 - DNA, 60 bp, Artificial
  Synthetic oligonucleotide
cgataatcgacaatatgtgccatgcgtcgattcaggagctggaagaaagtcgcctcgtaa

SEQ ID NO: 521664 - DNA, 60 bp, Artificial
  Synthetic oligonucleotide
cagaaggattcttgtttatggagatcaagaggatgcccttgccggagtgaagggtatgaa

SEQ ID NO: 521665 - DNA, 59 bp, Artificial
  Synthetic oligonucleotide
aacctgttaatacaagtgtattttagaataggcataattaattgtaattaacgttatcg

SEQ ID NO: 521666 - DNA, 59 bp, Artificial
  Synthetic oligonucleotide
cgctatgacaaatatacgggtatctgaacgagttttagtatcgattaagggccgcaggc

SEQ ID NO: 521667 - DNA, 59 bp, Artificial
  Synthetic oligonucleotide
cggtatctttggttcagaatataacgtcacgtgtgaaagtggataggcacgtgactaag

SEQ ID NO: 521668 - DNA, 59 bp, Artificial
  Synthetic oligonucleotide
acccccgccccaggttcacgggatcatcacgtgaattgcacatgtactatggctataaa

SEQ ID NO: 521669 - DNA, 59 bp, Artificial
  Synthetic oligonucleotide
tatgaaggttatcaagacgatgctgatgttgcatcagagaagcgccatcaagcgttgta

SEQ ID NO: 521670 - DNA, 59 bp, Artificial
  Synthetic oligonucleotide
gtgattgtcagaagatagttatatcagactacgatgtaacattactctaatgtaatatc

SEQ ID NO: 521671 - DNA, 59 bp, Artificial
  Synthetic oligonucleotide
cagagcgggtgaaactattcttcgaatggtttctgttcatcggagcaatatttattgcg

SEQ ID NO: 521672 - DNA, 58 bp, Artificial
  Synthetic oligonucleotide
gctggcaacgtagggtccatgtcccgagttagtgcgccacgtaagcgctggggcttat

SEQ ID NO: 521673 - DNA, 58 bp, Artificial
  Synthetic oligonucleotide
agagaacgtgttcaaattcgtgatatgaccgaaggtcaaggtaaccggtcaacattat

SEQ ID NO: 521674 - DNA, 58 bp, Artificial
  Synthetic oligonucleotide
tatcaagtgtattatacaaattctaattgtaattaacgttatcgttaattgtatagtg

SEQ ID NO: 521675 - DNA, 58 bp, Artificial
  Synthetic oligonucleotide
cgtgacagcaggacgggacatgggctttttaaatgggctttgcgagtttgaacagttc

SEQ ID NO: 521676 - DNA, 57 bp, Artificial
  Synthetic oligonucleotide
gttgtcttgcagaggaagcttgtactttccactataaatacgctgttgctgaatgaa

SEQ ID NO: 521677 - DNA, 57 bp, Artificial
  Synthetic oligonucleotide
ccacagcaagagattatgtgctgtgatagtacgaaggataaattaaatgattcaagg

SEQ ID NO: 521678 - DNA, 56 bp, Artificial
  Synthetic oligonucleotide
cgttgggtccttaggcttaggactgtatatgatgttagagtagatgagtgtaagcg

SEQ ID NO: 521679 - DNA, 56 bp, Artificial
  Synthetic oligonucleotide
ggtgattactcagtatatcaagatctctattgtgatgaggttctctcttcttcatc

SEQ ID NO: 521680 - DNA, 56 bp, Artificial
  Synthetic oligonucleotide
gagtgaaggatatgaagacttctattattcgctatagcgaatacctgaagaaacca

SEQ ID NO: 521681 - DNA, 56 bp, Artificial
  Synthetic oligonucleotide
agacaaccgtgttgaggaagaatgtaacagaggtggattatttatatttggcattc

SEQ ID NO: 521682 - DNA, 56 bp, Artificial
  Synthetic oligonucleotide
gtattcaatacgctaccgaatatctattaatatgtgagtctctgccgaaaaaaaac

SEQ ID NO: 521683 - DNA, 55 bp, Artificial
  Synthetic oligonucleotide
cgagatgcgaaaatggaggctatttaaacctgatggtattgtgatttccgaaatc

SEQ ID NO: 521684 - DNA, 55 bp, Artificial
  Synthetic oligonucleotide
ctcgtcttcctgtcgaattgagagagaagattgtacgtgagcatatgaaagagga

SEQ ID NO: 521685 - DNA, 55 bp, Artificial
  Synthetic oligonucleotide
acacaacgaaaatggttagcaattggaattggtctggtaagaaagggagaagaac

SEQ ID NO: 521686 - DNA, 55 bp, Artificial
  Synthetic oligonucleotide
ccctaaacctgtcaaggataattgctctctcccttctgtcaaggtggttgtgcta

SEQ ID NO: 521687 - DNA, 55 bp, Artificial
  Synthetic oligonucleotide
tcaagtgataaacgtcaaagttgaagatgttgatcttgatatgcgagacagggtt

SEQ ID NO: 521688 - DNA, 55 bp, Artificial
  Synthetic oligonucleotide
ctctgattggttcagcagaaaggcccaccaactaaaaggtggggagaatgtcccg

SEQ ID NO: 521689 - DNA, 55 bp, Artificial
  Synthetic oligonucleotide
gctctctgcatatctgcatcttgtggattttgactatggggagttgtttccttca

SEQ ID NO: 521690 - DNA, 55 bp, Artificial
  Synthetic oligonucleotide
ccgacatagcttttgcatgggaccaccaagagttagtgctcttcgactttccacg

SEQ ID NO: 521691 - DNA, 55 bp, Artificial
  Synthetic oligonucleotide
ctgaccagacgacgtgtatggatgcagaggacgcagttgacggaggcaactggag

SEQ ID NO: 521692 - DNA, 55 bp, Artificial
  Synthetic oligonucleotide
cccttgctaatgatgacgtataggggtgtcccgaagtaatttaacatagctctga

SEQ ID NO: 521693 - DNA, 55 bp, Artificial
  Synthetic oligonucleotide
ctgctcgtctttagggtcaatattggttcctgaaaacaccgtcaaggtatttcgg

SEQ ID NO: 521694 - DNA, 55 bp, Artificial
  Synthetic oligonucleotide
tcctggcgtggcttgtgctctctccttccgttcaaggtgggtttgctgtggcgag

SEQ ID NO: 521695 - DNA, 55 bp, Artificial
  Synthetic oligonucleotide
agaactccacgtcgtggttattccaggccatataaatctgctgttcctacgacga

SEQ ID NO: 521696 - DNA, 55 bp, Artificial
  Synthetic oligonucleotide
ccgaaatcactcgtcggaagagaaatggagttctgggaatcgtctgccatgcctg

SEQ ID NO: 521697 - DNA, 55 bp, Artificial
  Synthetic oligonucleotide
aacaagctattgcaagttgggagttgcagaggaagccatggatggatgaggtaga

SEQ ID NO: 521698 - DNA, 55 bp, Artificial
  Synthetic oligonucleotide
cgctcgggacgggacatgggctaatggattgtggatatagggcccaaagggcccg

SEQ ID NO: 521699 - DNA, 55 bp, Artificial
  Synthetic oligonucleotide
cactttagtggtgggccagatgtcccgagttagtgcgccacgtaagcgctggggc

SEQ ID NO: 521700 - DNA, 55 bp, Artificial
  Synthetic oligonucleotide
ttatgcttgcgtgttatgttcctggatttgtgaagaagacgcttgaagcttggtt

SEQ ID NO: 521701 - DNA, 55 bp, Artificial
  Synthetic oligonucleotide
ttaggcccaatagaaatacactgagggacactgtttgatccttggacagcctggc

SEQ ID NO: 521702 - DNA, 55 bp, Artificial
  Synthetic oligonucleotide
ttacttagcgacgaagaaaggaatctttatggggaccactgaaaagacagctgtc

SEQ ID NO: 521703 - DNA, 55 bp, Artificial
  Synthetic oligonucleotide
ccttcattacttcctttggaggaagacgatgatgtatcgtatgtagatggtacga

SEQ ID NO: 521704 - DNA, 55 bp, Artificial
  Synthetic oligonucleotide
ttaaccccttaagggccgaaggcccgtttaaatatgtgttggacgtagtccaagc

SEQ ID NO: 521705 - DNA, 55 bp, Artificial
  Synthetic oligonucleotide
cgggtttagacaacggtttattcggattagaatataacgtcacgtgtgatagcga

SEQ ID NO: 521706 - DNA, 55 bp, Artificial
  Synthetic oligonucleotide
ggaaggttctgcttgttagttgcggtgtgagcttcaatggaagcttctatggtgg

SEQ ID NO: 521707 - DNA, 55 bp, Artificial
  Synthetic oligonucleotide
aaggctgtattagaacatagaatgtatattgaagtgtaaatcatttgtaatgaag

SEQ ID NO: 521708 - DNA, 55 bp, Artificial
  Synthetic oligonucleotide
ggtgagttcattcctaccattgaagataagctcagagatgttatgcaggacatga

SEQ ID NO: 521709 - DNA, 55 bp, Artificial
  Synthetic oligonucleotide
ggatgtaccctgcagagttaaatatggagttattgaagaagaacatatgaagctc

SEQ ID NO: 521710 - DNA, 55 bp, Artificial
  Synthetic oligonucleotide
cagatgtacgggtatttgattgtgtatcggaacgtataagggccacaggcccgtc

SEQ ID NO: 521711 - DNA, 55 bp, Artificial
  Synthetic oligonucleotide
cgtgcatctaacagacgcacgtgagaatacagtagcttgcagcgaaagatagacg

SEQ ID NO: 521712 - DNA, 55 bp, Artificial
  Synthetic oligonucleotide
ggaagcttctatggtggaaatagaaatgttcgtggtcagctgcagatatcgatgg

SEQ ID NO: 521713 - DNA, 55 bp, Artificial
  Synthetic oligonucleotide
taacatagctctgaaaagagatatgagtcgttggatgcctccatcggacgatgga

SEQ ID NO: 521714 - DNA, 55 bp, Artificial
  Synthetic oligonucleotide
caagaacaccatttgaagcaactggacctgagagagaaagaaattgggatgcaag

SEQ ID NO: 521715 - DNA, 55 bp, Artificial
  Synthetic oligonucleotide
gaggtacccaggtatattaaggagctcgtgaggtatttggtagaatacctgacca

SEQ ID NO: 521716 - DNA, 55 bp, Artificial
  Synthetic oligonucleotide
cagtttaataggagatgtctaattagatggaagaaggatgtaccctgcagagtta

SEQ ID NO: 521717 - DNA, 55 bp, Artificial
  Synthetic oligonucleotide
gatacgtatgacaaatctgcaagtactcttagggaatatcgaggagagttaaaga

SEQ ID NO: 521718 - DNA, 55 bp, Artificial
  Synthetic oligonucleotide
gtgctcgggacgggacatgacgtcagcaatgaagataatgggcctaataaagccc

SEQ ID NO: 521719 - DNA, 55 bp, Artificial
  Synthetic oligonucleotide
gggtcaatattggttcctgaaaacaccgtcaaggtatttcggattgagcctactg

SEQ ID NO: 521720 - DNA, 55 bp, Artificial
  Synthetic oligonucleotide
gggtttggatacgaaggtggacgatgaagatttggaatatttgcaacgtgtctgg

SEQ ID NO: 521721 - DNA, 55 bp, Artificial
  Synthetic oligonucleotide
gtcgaatgtcttttgaggaagacaaccgtgttgaggaagaatgtaacggaggtgg

SEQ ID NO: 521722 - DNA, 55 bp, Artificial
  Synthetic oligonucleotide
caggtgctcactttgagaagaagaaaggcacacaaggacaggccagagcgtatgc

SEQ ID NO: 521723 - DNA, 55 bp, Artificial
  Synthetic oligonucleotide
caggatccgtgattacatctgacggaagatcgttcacaccttccacgaagcttcg

SEQ ID NO: 521724 - DNA, 55 bp, Artificial
  Synthetic oligonucleotide
atatgagctggcatggtgggccagatgtcccgagttagtgcgccacgtaagcgct

SEQ ID NO: 521725 - DNA, 55 bp, Artificial
  Synthetic oligonucleotide
gcaaggtgaagcccggaagaatacttcactgggccatgattaagagttcttggga

SEQ ID NO: 521726 - DNA, 55 bp, Artificial
  Synthetic oligonucleotide
gcagctcgtgaggtacccggtagaatacctgaccagaagacgtgtatggatgcag

SEQ ID NO: 521727 - DNA, 55 bp, Artificial
  Synthetic oligonucleotide
caacacactatgaaatacaagacgctatgacaaatgtacgggtatctgaatgagt

SEQ ID NO: 521728 - DNA, 55 bp, Artificial
  Synthetic oligonucleotide
ggttatcttaacgtgtaagggccgcaggcccgtcaagatggaatgaacggtccag

SEQ ID NO: 521729 - DNA, 55 bp, Artificial
  Synthetic oligonucleotide
ctttgtatacgcatgacgtcacttgatcctatgatgagctggggcggggcttagt

SEQ ID NO: 521730 - DNA, 55 bp, Artificial
  Synthetic oligonucleotide
cacactataacaaatgtgcgggtatccgattgggctatattaaccccttaagggc

SEQ ID NO: 521731 - DNA, 55 bp, Artificial
  Synthetic oligonucleotide
cccgaggtaatttaacatagctctgaaaagagatatgagtcgttggatgcctcca

SEQ ID NO: 521732 - DNA, 55 bp, Artificial
  Synthetic oligonucleotide
ccccgtgccaggttcaagggatcaaaggagtcaaataatgaccgttagatcaaat

SEQ ID NO: 521733 - DNA, 55 bp, Artificial
  Synthetic oligonucleotide
gctggacataacgcttctgggttgtcgtttgaaggttcatacagagttgaagaac

SEQ ID NO: 521734 - DNA, 55 bp, Artificial
  Synthetic oligonucleotide
gcgagacagggttgtattgaagctgcagttcagattatgttacacatacaagaag

SEQ ID NO: 521735 - DNA, 55 bp, Artificial
  Synthetic oligonucleotide
tatccaaagcttcccagttatgctccaacacgttgggtccttaggcttaggactg

SEQ ID NO: 521736 - DNA, 55 bp, Artificial
  Synthetic oligonucleotide
gggatgcaagaagacaaacaacacctgtagttagtcaacctgttaatacaagtgt

SEQ ID NO: 521737 - DNA, 54 bp, Artificial
  Synthetic oligonucleotide
aaatggtaagagtaaataattgattaaccatggtaaaatgtaacttagtaacta

SEQ ID NO: 521738 - DNA, 53 bp, Artificial
  Synthetic oligonucleotide
catgggctaattgattgtggataacgggcccaaagggcccgtttagatgggtt

SEQ ID NO: 521739 - DNA, 53 bp, Artificial
  Synthetic oligonucleotide
caactaacagcagcacgtgagaatgcagtaacttgcagcgaaagatagacgtc

SEQ ID NO: 521740 - DNA, 53 bp, Artificial
  Synthetic oligonucleotide
tcgctatagcgaatacctgaagaaaccatgtgtggtaatttgttgtgttagca

SEQ ID NO: 521741 - DNA, 53 bp, Artificial
  Synthetic oligonucleotide
tagtgctcttcgactttccacgtagcttcgaggagtacgttaactatggagcc

SEQ ID NO: 521742 - DNA, 53 bp, Artificial
  Synthetic oligonucleotide
tcgtgaggtatttggtagaatacctgaccagaagacgtgtatggatgcagaga

SEQ ID NO: 521743 - DNA, 53 bp, Artificial
  Synthetic oligonucleotide
atgatacggatagttgaatacataaacaactaggtatacaatacaacaatctg

SEQ ID NO: 521744 - DNA, 52 bp, Artificial
  Synthetic oligonucleotide
cccctgggaatactgtttgatcctgggacagcctggcacggggcttagtatt

SEQ ID NO: 521745 - DNA, 52 bp, Artificial
  Synthetic oligonucleotide
tcggacgatggaggttgaatgaacttctgctgacgtaagcgctggggcttat

SEQ ID NO: 521746 - DNA, 52 bp, Artificial
  Synthetic oligonucleotide
tggaacccagggttctattatctcttcttctcgttgtgattgtattcaatcc

SEQ ID NO: 521747 - DNA, 51 bp, Artificial
  Synthetic oligonucleotide
ccccgtgctcgggacgggacatgacgttagcaaggattataatgggctttt

SEQ ID NO: 521748 - DNA, 51 bp, Artificial
  Synthetic oligonucleotide
tgagaagtaataataatacggaaaatgaataagtatgagggcgaaagagga

SEQ ID NO: 521749 - DNA, 51 bp, Artificial
  Synthetic oligonucleotide
gtagaaggtatgaagctctattaaatgaagatccctcatctgtaaatttgc

SEQ ID NO: 521750 - DNA, 51 bp, Artificial
  Synthetic oligonucleotide
cggattagaatataacgtcacgtgtgaaagcgaaagacacgtgacgaagac

SEQ ID NO: 521751 - DNA, 51 bp, Artificial
  Synthetic oligonucleotide
gttgtcttgcagagtaagcttgcactttcctctataaatacgcaagcttca

SEQ ID NO: 521752 - DNA, 50 bp, Artificial
  Synthetic oligonucleotide
cgacgaagaaaggaatcttaaaggggaccacattaagacagctgtcattg

SEQ ID NO: 521753 - DNA, 60 bp, Artificial
  Synthetic oligonucleotide
cgaatggtcgtcggcctggtttagtaacatacaaatcagagtcccatgatacataccctg

SEQ ID NO: 521754 - DNA, 60 bp, Artificial
  Synthetic oligonucleotide
cgcaggccacctgcgggggacctatagtgactcacccgtagataagtcgggatccagcta

SEQ ID NO: 521755 - DNA, 60 bp, Artificial
  Synthetic oligonucleotide
cggaccctaatgagggtacgtaacatggatgagatggaccttatagatgcaatgtctctc

SEQ ID NO: 521756 - DNA, 60 bp, Artificial
  Synthetic oligonucleotide
cgggggacctatagtgactcacccgtagataagtcgggatccagctatgtataacaactg

SEQ ID NO: 521757 - DNA, 60 bp, Artificial
  Synthetic oligonucleotide
gaaagagcatggggttttaaatccctatactctatggatctatcctctgccaccgaccgt

SEQ ID NO: 521758 - DNA, 60 bp, Artificial
  Synthetic oligonucleotide
gaagatccagagttgaaaatgagaccaatagctatggtggattactatagtcaattggtt

SEQ ID NO: 521759 - DNA, 60 bp, Artificial
  Synthetic oligonucleotide
gcgggaaatctaaaggaactcttttcccgatccatgggatccaaggttggttcgccactt

SEQ ID NO: 521760 - DNA, 60 bp, Artificial
  Synthetic oligonucleotide
ggacttaagttcgtagaccttctaactgtagcaggtttcgggttccgcgtgaaatctcgt

SEQ ID NO: 521761 - DNA, 60 bp, Artificial
  Synthetic oligonucleotide
ggagagactaaagtctctattcacaatcgaaagcatggtatcgtccctatccctggatat

SEQ ID NO: 521762 - DNA, 60 bp, Artificial
  Synthetic oligonucleotide
ggcggcagaacaagcgagcctagggctcggtcgctacggcgcctgactacccgacggccc

SEQ ID NO: 521763 - DNA, 60 bp, Artificial
  Synthetic oligonucleotide
ggttttcgtgatcgtatcacgaataccacggagacccccaggggtaaatccctcccactc

SEQ ID NO: 521764 - DNA, 60 bp, Artificial
  Synthetic oligonucleotide
gttaacgagtgagcagtatgcttccgcctgagtacaggctatggtgggaattcccttcag

SEQ ID NO: 521765 - DNA, 60 bp, Artificial
  Synthetic oligonucleotide
tatacatgaaggatagggagatagacaagctggcagacatgtctatgcggttcatacgac

SEQ ID NO: 521766 - DNA, 60 bp, Artificial
  Synthetic oligonucleotide
tgcgatcaactcagccgaggtctcaaagccttgggttactgagtagtttgtagccctggt

SEQ ID NO: 521767 - DNA, 60 bp, Artificial
  Synthetic oligonucleotide
tgtacttaggaactcacacaccgcaacaaatagggtattcgtacccggggggttgcgtgt

SEQ ID NO: 521768 - DNA, 60 bp, Artificial
  Synthetic oligonucleotide
ttcccactgtgaagtggttactacttcctgcttctactttgatagtagggtaggaggctt

SEQ ID NO: 521769 - DNA, 60 bp, Artificial
  Synthetic oligonucleotide
ttcccttcagcacgcctaatggtcccgaggtagagttcaagtgtggtcaacctctagggg

SEQ ID NO: 521770 - DNA, 60 bp, Artificial
  Synthetic oligonucleotide
atagaaccagtaccaaccgaaccatggtatgttcgattaagtcagtattacgtaagtaat

SEQ ID NO: 521771 - DNA, 60 bp, Artificial
  Synthetic oligonucleotide
aacgctaaataaggtgttggatgatcatccgatcaggccaatgcctaatttaaacggtct

SEQ ID NO: 521772 - DNA, 60 bp, Artificial
  Synthetic oligonucleotide
agctccgtactcaggtacagaacagatgattcgtattgtaactaaggatattcctcggtt

SEQ ID NO: 521773 - DNA, 60 bp, Artificial
  Synthetic oligonucleotide
ccgacggccccacggtgtggtttagctagaaagccaactagcgtgattacctaccgggga

SEQ ID NO: 521774 - DNA, 60 bp, Artificial
  Synthetic oligonucleotide
cccgaccttttgcaattgtcgattatataacccagagcgcattgactcctctacacgata

SEQ ID NO: 521775 - DNA, 60 bp, Artificial
  Synthetic oligonucleotide
ccaagaggatgacgcatccgacaccgacactataaccggacatgaatgggatggtcctag

SEQ ID NO: 521776 - DNA, 60 bp, Artificial
  Synthetic oligonucleotide
catgtgtctaaaaacacatatgaatttgctaagagatgagtaaggaaaggcattgagata

SEQ ID NO: 521777 - DNA, 60 bp, Artificial
  Synthetic oligonucleotide
aggtcaagtcttttgatttgatattgcctcctaaaccgagtgacacccgccatccttcca

SEQ ID NO: 521778 - DNA, 60 bp, Artificial
  Synthetic oligonucleotide
atggtcctagtcattatgactggactaaccaggatgacggtttcttaatcatagaaccag

SEQ ID NO: 521779 - DNA, 60 bp, Artificial
  Synthetic oligonucleotide
cactaatggtcttctatgaaaacttaccaagctggatccagataaaactggtaacctcct

SEQ ID NO: 521780 - DNA, 60 bp, Artificial
  Synthetic oligonucleotide
cactacatgggcggtgtagattaagaggaagttcaattggtaagtcttatgactcaacca

SEQ ID NO: 521781 - DNA, 59 bp, Artificial
  Synthetic oligonucleotide
gttcactacgccgcacgtctgtgtggtatagtggactttgataggtatatccttcttgg

SEQ ID NO: 521782 - DNA, 57 bp, Artificial
  Synthetic oligonucleotide
ctgatgtccaataaaccgtacctggtagctcagtctgaccttttaaggtttgccgag

SEQ ID NO: 521783 - DNA, 57 bp, Artificial
  Synthetic oligonucleotide
tcttcttcaagtcggtcccaaagtcaactattggtaagttgagaacaatgagaattg

SEQ ID NO: 521784 - DNA, 56 bp, Artificial
  Synthetic oligonucleotide
ttcgccacttctggcttccaccttgtcatcctatgtatctggaactcttaacgacc

SEQ ID NO: 521785 - DNA, 55 bp, Artificial
  Synthetic oligonucleotide
taaacggtctacaaccaaatcgccctaaattgctggtcggtcagacgcgagctgc

SEQ ID NO: 521786 - DNA, 55 bp, Artificial
  Synthetic oligonucleotide
tagggctcggtcgctacggcgcctgactacccgacggccccacggtgtggtttag

SEQ ID NO: 521787 - DNA, 55 bp, Artificial
  Synthetic oligonucleotide
aggaacttctccgaatctagccgcgtttacccgacacgcaattcacttattcttc

SEQ ID NO: 521788 - DNA, 55 bp, Artificial
  Synthetic oligonucleotide
gtggttactacttcctgcttctactttgatagtagggtaggaggcttggacgatc

SEQ ID NO: 521789 - DNA, 55 bp, Artificial
  Synthetic oligonucleotide
gtcagatttatgtgacaagcttgaaatcctaaagactccggttgctagaaatgag

SEQ ID NO: 521790 - DNA, 55 bp, Artificial
  Synthetic oligonucleotide
gtattcaaggaccaccgtgcattccatattggtacatctacaaatggtataggta

SEQ ID NO: 521791 - DNA, 55 bp, Artificial
  Synthetic oligonucleotide
gggacactgaaatctaacgatgttagaccacttccaatccttgattggagaggga

SEQ ID NO: 521792 - DNA, 55 bp, Artificial
  Synthetic oligonucleotide
ggacttttactcaggatcccttcaacaactggggtaagaccatggggcacaagtt

SEQ ID NO: 521793 - DNA, 55 bp, Artificial
  Synthetic oligonucleotide
cagtctaataaactgtaatcctgggtaacttgcttcaccgttggcgggcaccgat

SEQ ID NO: 521794 - DNA, 55 bp, Artificial
  Synthetic oligonucleotide
gacaacaagatgataagatttgttcttactctcttggggtacaccaggtctatta

SEQ ID NO: 521795 - DNA, 55 bp, Artificial
  Synthetic oligonucleotide
ccaaagagagatctaattcacggttttatccgtgagatcttgtgtctaggtctag

SEQ ID NO: 521796 - DNA, 55 bp, Artificial
  Synthetic oligonucleotide
cttttcccgatccatgggatccaaggttggttcgccacttctggcttccaccttg

SEQ ID NO: 521797 - DNA, 55 bp, Artificial
  Synthetic oligonucleotide
cgtcggttgaagatattgtctttgttatcagacaatcccttgaccttaataccta

SEQ ID NO: 521798 - DNA, 55 bp, Artificial
  Synthetic oligonucleotide
ccgatgggagcctatagttcctggactacttttactctaacacatcatcttgtcg

SEQ ID NO: 521799 - DNA, 55 bp, Artificial
  Synthetic oligonucleotide
cgaatcggaattccgaagaggagatttcgatttgatgcttcttaagcggcatccc

SEQ ID NO: 521800 - DNA, 54 bp, Artificial
  Synthetic oligonucleotide
atggccctgagaggaattgcgtctactcatcctacttcattgattcgagctgct

SEQ ID NO: 521801 - DNA, 53 bp, Artificial
  Synthetic oligonucleotide
agacaagctggcagacatgtctatgcggttcatacgacccgtacagtccatgc

SEQ ID NO: 521802 - DNA, 51 bp, Artificial
  Synthetic oligonucleotide
cgatcgatcatgatgcaatggggctcttggagacctttcggtccccaaaag

SEQ ID NO: 521803 - DNA, 50 bp, Artificial
  Synthetic oligonucleotide
gcgggcaccgattatagatttcgtatctataacgcaggccacctgcgggg

SEQ ID NO: 521804 - DNA, 50 bp, Artificial
  Synthetic oligonucleotide
taggaggcttggacgatctaatacgttaataagcaatggtcgcagtcgga

SEQ ID NO: 521805 - DNA, 60 bp, Artificial
  Synthetic oligonucleotide
ttggtaaagcaaccaatttctgcgagttcttttcttggtaccagaatttctggtttatcg

SEQ ID NO: 521806 - DNA, 60 bp, Artificial
  Synthetic oligonucleotide
aattttcacagctaatctacaatgcggatacaattggcgattgggtcccacctcaggaac

SEQ ID NO: 521807 - DNA, 60 bp, Artificial
  Synthetic oligonucleotide
atcgatacagatccactagatgaccctgacgttatcctcgatgttgaccagttacttagg

SEQ ID NO: 521808 - DNA, 60 bp, Artificial
  Synthetic oligonucleotide
taccctatatggatagacaagttccgatgtactacagaagtgcacaatcacttgtaatga

SEQ ID NO: 521809 - DNA, 60 bp, Artificial
  Synthetic oligonucleotide
ccacaaattaatcctacaccagtggaattttcacagctaatctacaatgcggatacaatt

SEQ ID NO: 521810 - DNA, 60 bp, Artificial
  Synthetic oligonucleotide
ccagtataggattatcagagctatcgtcggcaataattaggttgtcatatctagcacatg

SEQ ID NO: 521811 - DNA, 60 bp, Artificial
  Synthetic oligonucleotide
cctcaggaactcaaacaaacttacactcaagatatcactggtttgaagccaaaatccaaa

SEQ ID NO: 521812 - DNA, 60 bp, Artificial
  Synthetic oligonucleotide
ctgatacaacaactattccattgattgtcaggcgtgatgatcaattgtattatactggcc

SEQ ID NO: 521813 - DNA, 60 bp, Artificial
  Synthetic oligonucleotide
gttcctgcagtacctaatacattggcttgccaacttattggctacatcgatacagatcca

SEQ ID NO: 521814 - DNA, 60 bp, Artificial
  Synthetic oligonucleotide
gagtgatgttaatgccatcactgttttaaatggcagtgattttcttacaactgtcaaggt

SEQ ID NO: 521815 - DNA, 60 bp, Artificial
  Synthetic oligonucleotide
gttacttaggcaggctacgtcacaggtgggtgcccgacaatggaacttctctgatacaac

SEQ ID NO: 521816 - DNA, 60 bp, Artificial
  Synthetic oligonucleotide
ggattgggtctgtggattttccatgccacaaattaatcctacaccagtggaattttcaca

SEQ ID NO: 521817 - DNA, 60 bp, Artificial
  Synthetic oligonucleotide
gtcgcaaggccgactattgccccacttcaaactaacattagaagtgctaggagtgatgtt

SEQ ID NO: 521818 - DNA, 56 bp, Artificial
  Synthetic oligonucleotide
gcagtgattttcttacaactgtcaaggtccgaggttctaacaatttgactgactcc

SEQ ID NO: 521819 - DNA, 55 bp, Artificial
  Synthetic oligonucleotide
gaccctgacgttatcctcgatgttgaccagttacttaggcaggctacgtcacagg

SEQ ID NO: 521820 - DNA, 55 bp, Artificial
  Synthetic oligonucleotide
cgaggttctaacaatttgactgactccaagtctagaatcttggtaaagcaaccaa

SEQ ID NO: 521821 - DNA, 55 bp, Artificial
  Synthetic oligonucleotide
caccagtggaattttcacagctaatctacaatgcggatacaattggcgattgggt

SEQ ID NO: 521822 - DNA, 55 bp, Artificial
  Synthetic oligonucleotide
attggcttgccaacttattggctacatcgatacagatccactagatgaccctgac

SEQ ID NO: 521823 - DNA, 55 bp, Artificial
  Synthetic oligonucleotide
ttgattgtcaggcgtgatgatcaattgtattatactggccaagacaaagagaacg

SEQ ID NO: 521824 - DNA, 53 bp, Artificial
  Synthetic oligonucleotide
tcatattttgatactaacgacatcaaatgtgatgggtatatattatttcaggc

SEQ ID NO: 521825 - DNA, 60 bp, Artificial
  Synthetic oligonucleotide
ctgtgcacaagctttctgattgacccacctagaacaaccaaatgcttcattccacctatc

SEQ ID NO: 521826 - DNA, 60 bp, Artificial
  Synthetic oligonucleotide
gttctgttgctgcagcaatcgaaaggtcagtggagttcgacaacttttcaaaggaagcag

SEQ ID NO: 521827 - DNA, 60 bp, Artificial
  Synthetic oligonucleotide
ctgcattgcagcaacatctgggaatgtgggaggagtgacactgatcaacggatgcggata

SEQ ID NO: 521828 - DNA, 60 bp, Artificial
  Synthetic oligonucleotide
taaagtctcgcagactctgtttgaagcaatccagggcacccaaatggagaactgtgcagt

SEQ ID NO: 521829 - DNA, 60 bp, Artificial
  Synthetic oligonucleotide
ctctggtaaagaggatcttgaagtctgcttcagaaagaagcgcaagagctgtaaagacat

SEQ ID NO: 521830 - DNA, 60 bp, Artificial
  Synthetic oligonucleotide
ctctagaaccaactgcagactgtggagtggaaaaaggctttacaacggaaaggattaaga

SEQ ID NO: 521831 - DNA, 60 bp, Artificial
  Synthetic oligonucleotide
tacaaaccaagtagagcagcctgcgaattctgtgttgagcaacatcttcatttctatggg

SEQ ID NO: 521832 - DNA, 60 bp, Artificial
  Synthetic oligonucleotide
ctagaaggagaaattgaagcagtgagaagaattgcctacatgaaccaagcctcaagtctg

SEQ ID NO: 521833 - DNA, 60 bp, Artificial
  Synthetic oligonucleotide
cgggtatttcaacacacctttgaggtttgacaatttccaaggacaaatctacgtgtcaga

SEQ ID NO: 521834 - DNA, 60 bp, Artificial
  Synthetic oligonucleotide
tcaggggaaggtgtcgcactgaggagcaacggctgctgactagtgcattgaagatcagtg

SEQ ID NO: 521835 - DNA, 60 bp, Artificial
  Synthetic oligonucleotide
tgagtcccagagtgtctggttctgtcgctgcagcaatcgaaaagtcagtggagttcgaca

SEQ ID NO: 521836 - DNA, 60 bp, Artificial
  Synthetic oligonucleotide
cgctatcagggagatgcttggagacggaacatctgagacaacaagtgtgaatgtcagggc

SEQ ID NO: 521837 - DNA, 60 bp, Artificial
  Synthetic oligonucleotide
cgctaaccaacatggatggtctaaatacaacttcaacctgagagcattcccaggagaaga

SEQ ID NO: 521838 - DNA, 60 bp, Artificial; identical to SEQ ID NO: 467685
  Synthetic oligonucleotide

SEQ ID NO: 521839 - DNA, 60 bp, Artificial
  Synthetic oligonucleotide
tggaggtgtactattgacagagaccatcacggaaagccctgctctgacagaatggaccac

SEQ ID NO: 521840 - DNA, 60 bp, Artificial
  Synthetic oligonucleotide
ccaaagcgctatcagggagatgcttggagatggaacatctgagacaacaagtgtgaatgt

SEQ ID NO: 521841 - DNA, 60 bp, Artificial
  Synthetic oligonucleotide
tggctagaacatgtgtagctgtgtcaatggttgcaacagcattctgttcagcagatatca

SEQ ID NO: 521842 - DNA, 60 bp, Artificial
  Synthetic oligonucleotide
cattcagagtagtgccgttccattctgtaccagacaggctagggttcgctagaactagtt

SEQ ID NO: 521843 - DNA, 60 bp, Artificial
  Synthetic oligonucleotide
catacactacactagcagaaggagccaacattccaagcaagtacctaaggcacatgagga

SEQ ID NO: 521844 - DNA, 60 bp, Artificial
  Synthetic oligonucleotide
tgggagtggcatggttgacaacaagaggagaaataaaggggtctccaacatggcgtacaa

SEQ ID NO: 521845 - DNA, 60 bp, Artificial
  Synthetic oligonucleotide
caggagaagagttcatcaaatgctgtggatttactttggggatcggaggtgcttggtttc

SEQ ID NO: 521846 - DNA, 60 bp, Artificial
  Synthetic oligonucleotide
cagaggatgtccaccggaggaatgcagggggaggaaaggaaggatgatgtctctagaacc

SEQ ID NO: 521847 - DNA, 60 bp, Artificial
  Synthetic oligonucleotide
gggattcggcgtggcggggaggagaggtcaggggtggcaaagtctcgcagacgttgtttg

SEQ ID NO: 521848 - DNA, 60 bp, Artificial
  Synthetic oligonucleotide
ggcaactgaatcaagtatttccaaccagtgcatggctctgattatgaagtcagtgttgtc

SEQ ID NO: 521849 - DNA, 60 bp, Artificial
  Synthetic oligonucleotide
ggatctacaaggtctgcattgcagcaacatctgggaatgtgggaggagtgacactgatca

SEQ ID NO: 521850 - DNA, 60 bp, Artificial
  Synthetic oligonucleotide
ggagatgcttggagatggaacatctgagacaacaagtgtgaatgtcagggctctggtaaa

SEQ ID NO: 521851 - DNA, 60 bp, Artificial
  Synthetic oligonucleotide
gggtgaaggtgtctccttttggtggtgagcatgatatctccaaatgcgggaggaaaggat

SEQ ID NO: 521852 - DNA, 60 bp, Artificial
  Synthetic oligonucleotide
gggtgtagcaggttttgggattgctctgttcctagtaggttggaaggcatgtatttgggt

SEQ ID NO: 521853 - DNA, 60 bp, Artificial
  Synthetic oligonucleotide
gtcaaaagtggtaaagtctcgcagacgctgtttgaagcaatccagggcacccaaatggag

SEQ ID NO: 521854 - DNA, 60 bp, Artificial
  Synthetic oligonucleotide
gcagacccaaaaggtcagactacaggaaagggcaaggatcaaaggcaactgaatcaagta

SEQ ID NO: 521855 - DNA, 60 bp, Artificial
  Synthetic oligonucleotide
gatgcttgcaggatctgcagagaggcaaagctgaaggttggagtgaacggcacattcaca

SEQ ID NO: 521856 - DNA, 60 bp, Artificial
  Synthetic oligonucleotide
gatgcggatatttcaacacacccctgaggtttgacaatttccaaggacaaatctacgtgt

SEQ ID NO: 521857 - DNA, 60 bp, Artificial
  Synthetic oligonucleotide
gatgagtggaaggtttccaagtgactggtacacacctactacaaagtaccggatcctata

SEQ ID NO: 521858 - DNA, 60 bp, Artificial
  Synthetic oligonucleotide
gatcaagaattcaccggaaggagctaagtctaagatcttttctatcattcagaagaaagt

SEQ ID NO: 521859 - DNA, 60 bp, Artificial
  Synthetic oligonucleotide
gtcacagacagtttcggagggctagcggttttcaaccaaggcgctatcagggagatgctt

SEQ ID NO: 521860 - DNA, 60 bp, Artificial
  Synthetic oligonucleotide
gagttcaagggggtgctgcaggccaaaaacggaaatggacttttgaagcagatgagtgga

SEQ ID NO: 521861 - DNA, 60 bp, Artificial
  Synthetic oligonucleotide
gaggagggtcttatgaaagacggttggtgccggtctagcaatcattgctggtgtcctcct

SEQ ID NO: 521862 - DNA, 60 bp, Artificial
  Synthetic oligonucleotide
gaggaacgttgagctagatgagtatgtggacacaccaaatacagggggtgtttatccttc

SEQ ID NO: 521863 - DNA, 60 bp, Artificial
  Synthetic oligonucleotide
gtgccgttccattctgtaccagacaggctagggttcgctagaactagttcttttacacta

SEQ ID NO: 521864 - DNA, 60 bp, Artificial
  Synthetic oligonucleotide
gtggtgagcatgacatctccaaatgtgggaggaaaggattaaaagttttcatctgcggag

SEQ ID NO: 521865 - DNA, 60 bp, Artificial
  Synthetic oligonucleotide
gtgttcacacatcatgaggaacgttgagctagatgagtatgtagacacaccaaatacagg

SEQ ID NO: 521866 - DNA, 60 bp, Artificial
  Synthetic oligonucleotide
gaagcagatgagtggaaggtttccaagtgactggtacacacctactacaaagtaccggat

SEQ ID NO: 521867 - DNA, 60 bp, Artificial; identical to SEQ ID NO: 392030
  Synthetic oligonucleotide

SEQ ID NO: 521868 - DNA, 60 bp, Artificial
  Synthetic oligonucleotide
ctgtggatttactttggggatcggaggtgcttggtttcaagcttatttgaatggagaggt

SEQ ID NO: 521869 - DNA, 60 bp, Artificial
  Synthetic oligonucleotide
tgtttgaagcaatccagggcacccaaatggagaactgtgcagtgaaggctgtatttgata

SEQ ID NO: 521870 - DNA, 60 bp, Artificial
  Synthetic oligonucleotide
aggattaagactggggaggtggacttggatagctgttgcactcagcatggatgtacaaaa

SEQ ID NO: 521871 - DNA, 60 bp, Artificial
  Synthetic oligonucleotide
agaggcaaacgagaacaggcggacagagagtagacatggcagatgttaccaagctaaacg

SEQ ID NO: 521872 - DNA, 60 bp, Artificial
  Synthetic oligonucleotide
agagctgtaaagacattcatggttggagaacaaggaaagtctgcaattgttatctcagga

SEQ ID NO: 521873 - DNA, 60 bp, Artificial
  Synthetic oligonucleotide
agagccggcctcgctaaccaacatggatggtctaaatacaacttcaaccagagagcattc

SEQ ID NO: 521874 - DNA, 60 bp, Artificial
  Synthetic oligonucleotide
agacgcaattaccggtttttcggtgaaggtgttgactttcagcagccctacaattgtagt

SEQ ID NO: 521875 - DNA, 60 bp, Artificial
  Synthetic oligonucleotide
agaatcatggacactctgtgcacaagctttctgattgacccacctagaacaaccaaatgc

SEQ ID NO: 521876 - DNA, 60 bp, Artificial
  Synthetic oligonucleotide
agaagcgcaagagctgtaaagacattcatggttggagagcaagggaagtctgcaattgtt

SEQ ID NO: 521877 - DNA, 60 bp, Artificial
  Synthetic oligonucleotide
agaagatctaccgctactaaaagtggtataaagatctcctacagagaagatagaggtatt

SEQ ID NO: 521878 - DNA, 60 bp, Artificial
  Synthetic oligonucleotide
agaagaaagtcaggggaaggtgtcgcactgaggagcaacggctgctgactagtgcattga

SEQ ID NO: 521879 - DNA, 60 bp, Artificial
  Synthetic oligonucleotide
agaactagttcttttacactaagagccaacctcgctaaccagcatggatggtctaaatac

SEQ ID NO: 521880 - DNA, 60 bp, Artificial
  Synthetic oligonucleotide
ttgaatggaatgtccggaatctacaaggtctgcattgcagcaacatctgggaatgtggga

SEQ ID NO: 521881 - DNA, 60 bp, Artificial
  Synthetic oligonucleotide
acgttgtttgaagcaatccagggcacccaagtggagaactgtgcagtaagggctgtattt

SEQ ID NO: 521882 - DNA, 60 bp, Artificial
  Synthetic oligonucleotide
acgcaatcccacctcagctgaaccaaacattcggtgtagcaggttttgggattgctctgt

SEQ ID NO: 521883 - DNA, 60 bp, Artificial
  Synthetic oligonucleotide
accaaacccaagaaggactcaacatacacaatccaagggctgaggttgtccaatgtgaag

SEQ ID NO: 521884 - DNA, 60 bp, Artificial
  Synthetic oligonucleotide
acacttatcaacggatgcggatatttcaacacacctttgaggtttgacaatttccaagga

SEQ ID NO: 521885 - DNA, 60 bp, Artificial
  Synthetic oligonucleotide
aatgcgggaggaaaggattaaaagttttcatctgcggaggtacaacaggttatgtaacaa

SEQ ID NO: 521886 - DNA, 60 bp, Artificial
  Synthetic oligonucleotide
tttcggtgaaggtgttgactttcagcagccctacaattgtagtggttggattgaatggaa

SEQ ID NO: 521887 - DNA, 60 bp, Artificial
  Synthetic oligonucleotide
aagatcagtgatggcgagaacaagttccaaagaatcatggacactctgtgcacaagcttt

SEQ ID NO: 521888 - DNA, 60 bp, Artificial
  Synthetic oligonucleotide
tttggatctggtgactgagttcaagggggtgctgcaggccaaaaacggaaatggactctt

SEQ ID NO: 521889 - DNA, 60 bp, Artificial
  Synthetic oligonucleotide
ttttacactaagagccggccttgctaaccaacatggatggtctaaatacaacttcaacca

SEQ ID NO: 521890 - DNA, 60 bp, Artificial
  Synthetic oligonucleotide
ttttacactaagagctaacctcgctaaccagcatggatggtctaaatacagcttcaacca

SEQ ID NO: 521891 - DNA, 60 bp, Artificial
  Synthetic oligonucleotide
tgggctgattgtagttgtgttggtggtgctgggacttaagctgtggggatgcattaggag

SEQ ID NO: 521892 - DNA, 60 bp, Artificial
  Synthetic oligonucleotide
caccggaaggagctaagtctaagatcttttctatcattcagaagaaagtcaggggaaggt

SEQ ID NO: 521893 - DNA, 60 bp, Artificial
  Synthetic oligonucleotide
tgtctaggtttaacaattcctaggactggttatgttgggagtgctcctggaggtgtgcta

SEQ ID NO: 521894 - DNA, 60 bp, Artificial
  Synthetic oligonucleotide
caattgtagtggttggattgaatggaatgtccggaatctacaaggtctgcattgcagcaa

SEQ ID NO: 521895 - DNA, 60 bp, Artificial
  Synthetic oligonucleotide
caagtgaatgtcacagacagtttcggagggctagcggttttcaaccaaagcgctatcagg

SEQ ID NO: 521896 - DNA, 60 bp, Artificial; identical to SEQ ID NO: 341333
  Synthetic oligonucleotide

SEQ ID NO: 521897 - DNA, 60 bp, Artificial
  Synthetic oligonucleotide
caagacctgaaacatctcaaagcaacacagatcgaagctggcaagtgaatgtcacagaca

SEQ ID NO: 521898 - DNA, 60 bp, Artificial
  Synthetic oligonucleotide
caaccagtgcatggctctgattgtgaggtcagtgttgtcagcggaccagctgtttgcacc

SEQ ID NO: 521899 - DNA, 60 bp, Artificial
  Synthetic oligonucleotide
tgtgttctgctaagatcttctagtgatacgcctttgtgttcacacatcatgaggaacgtt

SEQ ID NO: 521900 - DNA, 60 bp, Artificial
  Synthetic oligonucleotide
atgtacaaaagggattagggtggaggttccatcgcctgtactggtatcggccaaatgcaa

SEQ ID NO: 521901 - DNA, 60 bp, Artificial; identical to SEQ ID NO: 334610
  Synthetic oligonucleotide

SEQ ID NO: 521902 - DNA, 60 bp, Artificial
  Synthetic oligonucleotide
atggacactctgtgcacaagctttctgattgacccacctagaacaaccaaatgcttcatt

SEQ ID NO: 521903 - DNA, 60 bp, Artificial
  Synthetic oligonucleotide
atgcttcattccacctatctctagtctcttgatgtacattcaggacggaaactcagtgtt

SEQ ID NO: 521904 - DNA, 60 bp, Artificial
  Synthetic oligonucleotide
tgttccttttgaaagaggttctttgtgagccttgtacctgtgacaacccaacatgtctag

SEQ ID NO: 521905 - DNA, 60 bp, Artificial
  Synthetic oligonucleotide
atctgcagagaggcaaagctgaaggttggagtgaacggcacattcacaatgtctgtggct

SEQ ID NO: 521906 - DNA, 60 bp, Artificial
  Synthetic oligonucleotide
atctccaaatgcgggaggaaaggattaaaagttttcatctgcggaggtacaacaggttat

SEQ ID NO: 521907 - DNA, 60 bp, Artificial
  Synthetic oligonucleotide
atcgaaaggtcagtggagttcgacaacttttcaaaggaggcagctgcaaacatcgagatg

SEQ ID NO: 521908 - DNA, 60 bp, Artificial
  Synthetic oligonucleotide
ataggggaatatctgaacattagcagctggttggaaactaaaacattgacgaagacagag

SEQ ID NO: 521909 - DNA, 60 bp, Artificial
  Synthetic oligonucleotide
agttgctctagattttatggggatggaaaggatcaagaattccccggaaggagctaagtc

SEQ ID NO: 521910 - DNA, 60 bp, Artificial
  Synthetic oligonucleotide
agtgcattgaagatcagtgatggcgagaacaagttccaaagaatcatggacactctgtgc

SEQ ID NO: 521911 - DNA, 59 bp, Artificial
  Synthetic oligonucleotide
tggaacatctgagacaacaagtgtgaatgtcagggctctggtaaagaggatcttgaagt

SEQ ID NO: 521912 - DNA, 59 bp, Artificial
  Synthetic oligonucleotide
tggcgtacaacctttcactgttcattggaatggtcttccctgcaatcaccacgttcttc

SEQ ID NO: 521913 - DNA, 57 bp, Artificial
  Synthetic oligonucleotide
ctgcagactgtggagtggaaaaaggctttacaacggaaaggattaagactgggaagg

SEQ ID NO: 521914 - DNA, 57 bp, Artificial
  Synthetic oligonucleotide
gacagatgatgaattctggctagagctggatcaagatgtgtacgtagacaagaggat

SEQ ID NO: 521915 - DNA, 55 bp, Artificial
  Synthetic oligonucleotide
tgaatggagaagtccaaggagacggtgcagcatccgcagaagatgtgaaggaaaa

SEQ ID NO: 521916 - DNA, 55 bp, Artificial
  Synthetic oligonucleotide
cggaaagaggcaaacgagaacaggcggacagagagtggacatggcagatgttacc

SEQ ID NO: 521917 - DNA, 55 bp, Artificial
  Synthetic oligonucleotide
cctgtcaaaaggtgaaatgagcatctggcaaaacgggcaggcaatcatgaggatt

SEQ ID NO: 521918 - DNA, 55 bp, Artificial; identical to SEQ ID NO: 366096
  Synthetic oligonucleotide

SEQ ID NO: 521919 - DNA, 55 bp, Artificial
  Synthetic oligonucleotide
cccacctagaacaaccaaatgcttcattccacctatctccagtctcttgacgtac

SEQ ID NO: 521920 - DNA, 55 bp, Artificial
  Synthetic oligonucleotide
ccaagcctcaagtctgcagaaccaagtggagattggactgataggggaatatctg

SEQ ID NO: 521921 - DNA, 55 bp, Artificial
  Synthetic oligonucleotide
caggcggacagagagtagacatggcagatgttaccaagctaaacgtggtgacagc

SEQ ID NO: 521922 - DNA, 55 bp, Artificial
  Synthetic oligonucleotide
cagacaggctagggttcgctagaactagttcttttacactaagagctaacctcgc

SEQ ID NO: 521923 - DNA, 55 bp, Artificial
  Synthetic oligonucleotide
caacatacacaatccaagggctgaggttgtccaatgtgaagtacgaggcaagacc

SEQ ID NO: 521924 - DNA, 55 bp, Artificial
  Synthetic oligonucleotide
caacacacccctgaggtttgacaatttccaaggacaaatctacgtgtcagacacc

SEQ ID NO: 521925 - DNA, 55 bp, Artificial
  Synthetic oligonucleotide
actgttggaatccctactataggttatgtcgacaacattaaggaggtgacaggga

SEQ ID NO: 521926 - DNA, 55 bp, Artificial
  Synthetic oligonucleotide
aagatcttttctatcattcagaagaaagtcaggggaaggtgtcgtactgaggagc

SEQ ID NO: 521927 - DNA, 55 bp, Artificial
  Synthetic oligonucleotide
aagagccaacctcgctaaccagcatggatggtctaaatacagcttcaacctgaga

SEQ ID NO: 521928 - DNA, 55 bp, Artificial
  Synthetic oligonucleotide
aaagttttcatctgcggaggtacaacaggttatgtaaccagaggatgtccaccgg

SEQ ID NO: 521929 - DNA, 55 bp, Artificial
  Synthetic oligonucleotide
gggcacccaaatggagaactgtgcagtgaaggctgtatttgatacttcctttgtg

SEQ ID NO: 521930 - DNA, 55 bp, Artificial
  Synthetic oligonucleotide
gcagcctgcgaattctgtgttgagcaacatcttcatttctatgggtgtagcaggt

SEQ ID NO: 521931 - DNA, 55 bp, Artificial
  Synthetic oligonucleotide
ggttggggaacaagggaggtctgcaattgttatctcaggagtggggcttttctct

SEQ ID NO: 521932 - DNA, 55 bp, Artificial
  Synthetic oligonucleotide
ggtttccaagtgactggtacacacctactacaaagtaccggatcctatacttggg

SEQ ID NO: 521933 - DNA, 55 bp, Artificial
  Synthetic oligonucleotide
gagttgctctagatcttatggggatgaagaggatcaagaattcaccggagggagc

SEQ ID NO: 521934 - DNA, 55 bp, Artificial
  Synthetic oligonucleotide
gacattcatggttggggaacaagggaagtctgcaattgttatctcaggagtgggg

SEQ ID NO: 521935 - DNA, 55 bp, Artificial
  Synthetic oligonucleotide
ctgggaatgtgggaggagtgacactgatcaacggatgcgggtatttcaacacacc

SEQ ID NO: 521936 - DNA, 55 bp, Artificial
  Synthetic oligonucleotide
gttttggagggctggcggttttcaaccaaggcgctatcagggagatgcttggaga

SEQ ID NO: 521937 - DNA, 55 bp, Artificial
  Synthetic oligonucleotide
ctagtgatacgcctttgtgttcacacatcatgaggaacgttgagctagatgagta

SEQ ID NO: 521938 - DNA, 55 bp, Artificial
  Synthetic oligonucleotide
tacattcaggacggaaattcagtgttggcaatggacttcatgaagaacggagaag

SEQ ID NO: 521939 - DNA, 55 bp, Artificial
  Synthetic oligonucleotide
cggagggctagcggttttcaaccaaggcgctatcagggagatgcttggagatgga

SEQ ID NO: 521940 - DNA, 55 bp, Artificial; identical to SEQ ID NO: 460379
  Synthetic oligonucleotide

SEQ ID NO: 521941 - DNA, 55 bp, Artificial
  Synthetic oligonucleotide
tcggaggtgcttggtttcaagcttatttgaatggagaggtccaaggagacggtgc

SEQ ID NO: 521942 - DNA, 54 bp, Artificial
  Synthetic oligonucleotide
gtcttagaaactaccctgacaccacctggataggtgactctcgaagcgatcagt

SEQ ID NO: 521943 - DNA, 52 bp, Artificial
  Synthetic oligonucleotide
atctgcggaggtacaacaggttatgtaaccagaggatgtccaccggaggaat

SEQ ID NO: 521944 - DNA, 50 bp, Artificial
  Synthetic oligonucleotide
gctgaggttgtccaatgtgaagtacgaggcaagacctgaaacatctcaaa

SEQ ID NO: 521945 - DNA, 50 bp, Artificial
  Synthetic oligonucleotide
aaaacggaaatggacttttgaagcagatgagtggaaggtttccaagtgac

SEQ ID NO: 521946 - DNA, 60 bp, Artificial
  Synthetic oligonucleotide
gaccccctgcacgtgtggggctatatggacgtgctacccaacaagtacgtgtagtggatc

SEQ ID NO: 521947 - DNA, 60 bp, Artificial
  Synthetic oligonucleotide
gaatggaggtcatgggtctacacccactgttgtgatcgatggcaacatccatcttcaaga

SEQ ID NO: 521948 - DNA, 60 bp, Artificial
  Synthetic oligonucleotide
gaataaattgttatggtgaaacgcacgcgtactgttcgtccaaaaaggacaaagcgggcc

SEQ ID NO: 521949 - DNA, 60 bp, Artificial
  Synthetic oligonucleotide
gaaggtcaggtgcgtgtcagtcgcttaggaaacagaggcactataagattgcgctctggc

SEQ ID NO: 521950 - DNA, 60 bp, Artificial
  Synthetic oligonucleotide
gaagctatggaacttacactgattgggtctcacactggggacagcactgtagtaaaccca

SEQ ID NO: 521951 - DNA, 60 bp, Artificial
  Synthetic oligonucleotide
gaacatgtgcaggtagaggaggaacgtggggtcagccataatgaaacgcaaaagacagat

SEQ ID NO: 521952 - DNA, 60 bp, Artificial
  Synthetic oligonucleotide
ctttgggtagacgctttgtatatcaaattggtctagcaggacgcactataggtactgtga

SEQ ID NO: 521953 - DNA, 60 bp, Artificial
  Synthetic oligonucleotide
ctttggaggtttgggtattggtactggtaagggaacaggaggagctacaggatatagacc

SEQ ID NO: 521954 - DNA, 60 bp, Artificial
  Synthetic oligonucleotide
ctttcctacagtcagtggatctttagtatccagcgaaggtcagctttttaaccgtccata

SEQ ID NO: 521955 - DNA, 60 bp, Artificial
  Synthetic oligonucleotide
cttggtggtctcgggattggtactgggcggggaactgggggggctacagggtataatcca

SEQ ID NO: 521956 - DNA, 60 bp, Artificial
  Synthetic oligonucleotide
ctggttaccgaatgttggtaaggtctatctaccgccatcaagacctgttgccagagtact

SEQ ID NO: 521957 - DNA, 60 bp, Artificial
  Synthetic oligonucleotide
ctggggttataccagaagtaattggtccaacagacctaatacctatagatacagtcaggc

SEQ ID NO: 521958 - DNA, 60 bp, Artificial
  Synthetic oligonucleotide
ctgctcctgtacaggtctgcctttttaatgcgtcactggttacttgcactattgttactt

SEQ ID NO: 521959 - DNA, 60 bp, Artificial
  Synthetic oligonucleotide
ctgctacattagtaacttttgaaaaccctgcctttgatgcaagtatgtccctaatatttg

SEQ ID NO: 521960 - DNA, 60 bp, Artificial
  Synthetic oligonucleotide
ctgacatgtcagtgtataatcctgataaggagcgcttagtgtggggttgtaggggtctcg

SEQ ID NO: 521961 - DNA, 60 bp, Artificial
  Synthetic oligonucleotide
ctgacaatgctacacctccagataaaggcttagccccttcgacgtattatccgacgccca

SEQ ID NO: 521962 - DNA, 60 bp, Artificial
  Synthetic oligonucleotide
ctccttttatatagtggactcaggctcacgaggctctgttgtaggagaggacatagagct

SEQ ID NO: 521963 - DNA, 60 bp, Artificial
  Synthetic oligonucleotide
ctcaaactgttattaatgggcaagcagaaagtgtgtttgttaccagtacaaataataaca

SEQ ID NO: 521964 - DNA, 60 bp, Artificial
  Synthetic oligonucleotide
ctaacacgcgcccacccccaggaagttgcccacctcttaaattggtacatagtacaattg

SEQ ID NO: 521965 - DNA, 60 bp, Artificial
  Synthetic oligonucleotide
cgtttggtgtttgcactaagtgctgtgaagccagggcgcacgaagattgcatcaaacata

SEQ ID NO: 521966 - DNA, 60 bp, Artificial
  Synthetic oligonucleotide
cgtgctactatacgcacgcgttcaggggcacaaataggatcacaggttcacttttataga

SEQ ID NO: 521967 - DNA, 60 bp, Artificial
  Synthetic oligonucleotide
gctcacctgacatgtaccctgccagccctgttggccctgactctacttaccctagcctag

SEQ ID NO: 521968 - DNA, 60 bp, Artificial
  Synthetic oligonucleotide
gctatgtaaatgcttcaaatctgaatgcaatgcctatgtgcctagaattaatcgcaaccc

SEQ ID NO: 521969 - DNA, 60 bp, Artificial
  Synthetic oligonucleotide
gctatagacctataggaggtacaacaaggcctatccctgacaccatacctgttagacctg

SEQ ID NO: 521970 - DNA, 60 bp, Artificial
  Synthetic oligonucleotide
gcgaacagttatatgttaggcatataggtgctcgtggaggagccatgggagatactatac

SEQ ID NO: 521971 - DNA, 60 bp, Artificial
  Synthetic oligonucleotide
gccttttggagatcaggcagcgacaaattgtatctgccaccaacggctgtatccagagtt

SEQ ID NO: 521972 - DNA, 60 bp, Artificial
  Synthetic oligonucleotide
gcctttgaataatggagattgtcctcctattgaattatttcacacttacattcaagatgg

SEQ ID NO: 521973 - DNA, 60 bp, Artificial
  Synthetic oligonucleotide
gccagcttaaaactaataccagaagcggtactacctcagctactaagcgcttgcgcagca

SEQ ID NO: 521974 - DNA, 60 bp, Artificial
  Synthetic oligonucleotide
gcattggaactggcaaggggtctgggggttttggaggttatagaccaattggtggaacaa

SEQ ID NO: 521975 - DNA, 60 bp, Artificial
  Synthetic oligonucleotide
gcaggttttgctttatgctgctcgaaaaaagggtctgactatgttggggatgtgtcctgt

SEQ ID NO: 521976 - DNA, 60 bp, Artificial
  Synthetic oligonucleotide
gcacagagccattctggacctattgtgatacttaccttagaaatggcctagatgggaacc

SEQ ID NO: 521977 - DNA, 60 bp, Artificial
  Synthetic oligonucleotide
gcaatattagaggtaacaccacagcaagcacctccaacacgcttagcatttgaatacccg

SEQ ID NO: 521978 - DNA, 60 bp, Artificial
  Synthetic oligonucleotide
gcaacaggtgccaacaactaatgtagattttttaagtaggccttcccgcctagttcaatt

SEQ ID NO: 521979 - DNA, 60 bp, Artificial
  Synthetic oligonucleotide
gcaaacaacacagttgtggataccaacttaggaggaataacttatccagagtctgcttta

SEQ ID NO: 521980 - DNA, 60 bp, Artificial
  Synthetic oligonucleotide
gatgtctcatatgaatttgagagagatatagctgaattacgagcccctcccgatatagac

SEQ ID NO: 521981 - DNA, 60 bp, Artificial
  Synthetic oligonucleotide
gatactgcatagacttcttttaggcatggtaaggttatatagttaggaatataggaatag

SEQ ID NO: 521982 - DNA, 60 bp, Artificial
  Synthetic oligonucleotide
gagccatagatcagtaccagcaacaggtctttcacgagttgaccgacttaaagcagaggc

SEQ ID NO: 521983 - DNA, 60 bp, Artificial
  Synthetic oligonucleotide
gagagctgcgttagatggtaatccaatacaagtggactctaaacataaagctccagtcca

SEQ ID NO: 521984 - DNA, 60 bp, Artificial
  Synthetic oligonucleotide
gagaccgttttcgtgcactgcaagaggctctcatggagagttatgaaagcggggctactg

SEQ ID NO: 521985 - DNA, 60 bp, Artificial
  Synthetic oligonucleotide
gactcaaacgttcttggacagattgtgtatctggtgtgccagtacttgcaacgaaaacgg

SEQ ID NO: 521986 - DNA, 60 bp, Artificial; identical to SEQ ID NO: 395820
  Synthetic oligonucleotide

SEQ ID NO: 521987 - DNA, 60 bp, Artificial
  Synthetic oligonucleotide
gacccctatgatgggctaacattttggactgtagacctccaagaaaagctgtccctcgac

SEQ ID NO: 521988 - DNA, 60 bp, Artificial
  Synthetic oligonucleotide
ccggaagtacggaacaacaggacagtgggcagtgattgttaacaatgaaccaatatctcc

SEQ ID NO: 521989 - DNA, 60 bp, Artificial
  Synthetic oligonucleotide
ccgcacccctgtttacctatgaacatccggacctcatgccagatgctttggaccatctgc

SEQ ID NO: 521990 - DNA, 60 bp, Artificial
  Synthetic oligonucleotide
ccgaggtaatcgggccagttgatatgttgcctatcgacacagttaatcctgtggaaccta

SEQ ID NO: 521991 - DNA, 60 bp, Artificial
  Synthetic oligonucleotide
ccctaacacagaacgcctcgtatggaaaattgtaggggttgaattaggacgtggaggtcc

SEQ ID NO: 521992 - DNA, 60 bp, Artificial
  Synthetic oligonucleotide
cccaccactgttgatgatagacagaacacatcatttgatcctaagcaggtacaaatgttt

SEQ ID NO: 521993 - DNA, 60 bp, Artificial
  Synthetic oligonucleotide
ccagttgcaagatatcgaataattgccctgatgacatacgcaataaaatagagcataaca

SEQ ID NO: 521994 - DNA, 60 bp, Artificial
  Synthetic oligonucleotide
ccaggatccaaagcctcctcaatatcagcttggctcttctatttactttacaattccgag

SEQ ID NO: 521995 - DNA, 60 bp, Artificial
  Synthetic oligonucleotide
ccagaaggttgtacaatcgatttgttgagcaggttggaaccagaaacatagattttctag

SEQ ID NO: 521996 - DNA, 60 bp, Artificial
  Synthetic oligonucleotide
ccactttcggtgagttgcctttatccttaccacagcgaccgaaaatggttgtcacagtgc

SEQ ID NO: 521997 - DNA, 60 bp, Artificial
  Synthetic oligonucleotide
catgaagctgaagattctaatgaaacgtcacaggtagctggcttggatagagtgggggac

SEQ ID NO: 521998 - DNA, 60 bp, Artificial
  Synthetic oligonucleotide
catatgggaatgagccatggacattagtacaaacaagccttgagacctttcgtacccctc

SEQ ID NO: 521999 - DNA, 60 bp, Artificial
  Synthetic oligonucleotide
catataaagggtccactagaggaacaaagcgcaaacgaaaacactaatatgaccgttttt

SEQ ID NO: 522000 - DNA, 60 bp, Artificial
  Synthetic oligonucleotide
cagttaagtttgcagctgaatgttgtgtctaatacaccgagacaacaggcaaaacggaga

SEQ ID NO: 522001 - DNA, 60 bp, Artificial
  Synthetic oligonucleotide
cagtgttacaaatgatgctagtaatgaaattgtagttcctaaggtttctggtgaccagtt

SEQ ID NO: 522002 - DNA, 60 bp, Artificial
  Synthetic oligonucleotide
caggggcggttggaagggactgtgtagacattgtgggtcgatagaatgattgggaaacaa

SEQ ID NO: 522003 - DNA, 60 bp, Artificial
  Synthetic oligonucleotide
cagggaaactcccgcgaactgttttgccagcaagagagtgaggaaagcgagctacagaca

SEQ ID NO: 522004 - DNA, 60 bp, Artificial
  Synthetic oligonucleotide
cagcgaacaggagtcctcagttatgctgcaatttaaatctgagtttggtgtgtcttataa

SEQ ID NO: 522005 - DNA, 60 bp, Artificial
  Synthetic oligonucleotide
cagcactgactatgcaaccatggaagaacaaggcctaaacctgaaatatattgcagggca

SEQ ID NO: 522006 - DNA, 60 bp, Artificial
  Synthetic oligonucleotide
cagcaagcacagaatactgtatcttcttcggtatactttgctactcctagtgggtctctc

SEQ ID NO: 522007 - DNA, 60 bp, Artificial
  Synthetic oligonucleotide
cagaggacgctgctacgactgttgcagacatggttcaaggtccaaatacccatagaaacc

SEQ ID NO: 522008 - DNA, 60 bp, Artificial
  Synthetic oligonucleotide
cactgggagatctgcgtttacgatgctatggatgctataagccactaacacctacagaaa

SEQ ID NO: 522009 - DNA, 60 bp, Artificial
  Synthetic oligonucleotide
cgtgagcaactttatgctcgccaccagtggtgcagggatggccttgtgggggacgctatt

SEQ ID NO: 522010 - DNA, 60 bp, Artificial
  Synthetic oligonucleotide
cgtctgggcttgtctgctactgcctctctatggtttgttggaggattagacgtgatacca

SEQ ID NO: 522011 - DNA, 60 bp, Artificial
  Synthetic oligonucleotide
cgtatcagaactgatattacatctccgaaagtatccagaaaaactgcaaagcgcaaaagg

SEQ ID NO: 522012 - DNA, 60 bp, Artificial
  Synthetic oligonucleotide
cggtacacggactgtgccaaaggtaggtcaagttttaacaagaggtgactgactcaaacg

SEQ ID NO: 522013 - DNA, 60 bp, Artificial
  Synthetic oligonucleotide
cggaagtctagccctcctttgtcctcggtgttcgaggggccatttcaaccatgggagatt

SEQ ID NO: 522014 - DNA, 60 bp, Artificial
  Synthetic oligonucleotide
cgcgccccagtaattgtttggcacaaacatatatcctgcttcagtctcaatttagctgtc

SEQ ID NO: 522015 - DNA, 60 bp, Artificial
  Synthetic oligonucleotide
cgccaataattcttgtaaggggtctacccaacacgcttaaatgctggagatatcgcaaat

SEQ ID NO: 522016 - DNA, 60 bp, Artificial
  Synthetic oligonucleotide
cgatctggattttgctgacattagagtattaggacgtcctagatacagtgaaaccgaaga

SEQ ID NO: 522017 - DNA, 60 bp, Artificial
  Synthetic oligonucleotide
cgagtgctcatttggttttcagtacaactgaggaaaatgagactattagtttaccttcct

SEQ ID NO: 522018 - DNA, 60 bp, Artificial
  Synthetic oligonucleotide
cgagcgtcatggcaaacgataaaggtagcaattgggattcgggcttgggatgctcatatc

SEQ ID NO: 522019 - DNA, 60 bp, Artificial
  Synthetic oligonucleotide
cgaaggggacagagactggtttctaaaggtggtgccactgcctacttctgttaaagttgg

SEQ ID NO: 522020 - DNA, 60 bp, Artificial
  Synthetic oligonucleotide
cgaaagtatattcctagtcctgtaagatcaattgcagatttgagtcccaggcttgacgct

SEQ ID NO: 522021 - DNA, 60 bp, Artificial
  Synthetic oligonucleotide
ccttgaaccagatgttttagcacacataaatgcaatgaatccctctatattagaggactg

SEQ ID NO: 522022 - DNA, 60 bp, Artificial
  Synthetic oligonucleotide
ccttacaccacctctaatgttgtcacagaagaacaacctgcagttttagatgtgtcaaca

SEQ ID NO: 522023 - DNA, 60 bp, Artificial
  Synthetic oligonucleotide
cctgcaacgtcaggtcaattacctcaatctgatcttggctcctacacctactttcctaca

SEQ ID NO: 522024 - DNA, 60 bp, Artificial
  Synthetic oligonucleotide
cctctcacagaacttgatgcttttaggtgcatgataaaagactttcatgttgtataccga

SEQ ID NO: 522025 - DNA, 60 bp, Artificial
  Synthetic oligonucleotide
cctccaaatacaggaaagtctatgctctgcaactcactaattcattttttaggtggtagt

SEQ ID NO: 522026 - DNA, 60 bp, Artificial
  Synthetic oligonucleotide
cctcagtcctggagcactgggacattaacttgcaaccaccctcttcatctatgcttgagg

SEQ ID NO: 522027 - DNA, 60 bp, Artificial
  Synthetic oligonucleotide
cctagaacaagtacacctgtgcaacgtgcagtgcaatcacttagtaccctcagacgagct

SEQ ID NO: 522028 - DNA, 60 bp, Artificial
  Synthetic oligonucleotide
cctacaataccactggaccctttaggtgttccagatatagttacggtagaccctattgct

SEQ ID NO: 522029 - DNA, 60 bp, Artificial
  Synthetic oligonucleotide
ccgtgttcgttgtaacatgctcgcattagggacgtcgccaagacagatttaatctacaat

SEQ ID NO: 522030 - DNA, 60 bp, Artificial
  Synthetic oligonucleotide
ccgtctcctgaagaagtgggacgaagacataaattggttgaaggaaagggtctctcacga

SEQ ID NO: 522031 - DNA, 60 bp, Artificial
  Synthetic oligonucleotide
tgcagctagctcctccaccacctaaacgcattgctttagatcctagttttactgacaata

SEQ ID NO: 522032 - DNA, 60 bp, Artificial
  Synthetic oligonucleotide
tgcaaaccagctatcggggaacactgggatgtagcaaagccttgtgatggtgaagtaaat

SEQ ID NO: 522033 - DNA, 60 bp, Artificial
  Synthetic oligonucleotide
tgaggcgcccttgcaaccgcctgtgcaaccagaggatactcccttagttataattgatcc

SEQ ID NO: 522034 - DNA, 60 bp, Artificial
  Synthetic oligonucleotide
tgacttgatttcaagagataaatcagcgtgtttagtaagaggacattggagagcaccttg

SEQ ID NO: 522035 - DNA, 60 bp, Artificial
  Synthetic oligonucleotide
tgacaggtcaggaggttactgctgcacgtccaactggtgttgtaacatatggctcgcccg

SEQ ID NO: 522036 - DNA, 60 bp, Artificial
  Synthetic oligonucleotide
tctccatagaggagggggcggaacctttgagtagcacacccacacaagcttttaataggg

SEQ ID NO: 522037 - DNA, 60 bp, Artificial
  Synthetic oligonucleotide
tcgatcgttgtcagtagaagttgtttataggcaaccgttatcggtcgtttaaatagccaa

SEQ ID NO: 522038 - DNA, 60 bp, Artificial
  Synthetic oligonucleotide
tcctgtttgtaaaggggtgcatcgccatcttaccggagtggagaactgagtgaccacggt

SEQ ID NO: 522039 - DNA, 60 bp, Artificial
  Synthetic oligonucleotide
tcctcctctattgctagctctactcggcggcctatacccctcctctcccacgaaaccaac

SEQ ID NO: 522040 - DNA, 60 bp, Artificial
  Synthetic oligonucleotide
tcccctgcagtcctagacattgaacttacagattttgggcccagaacacgtggtgacacc

SEQ ID NO: 522041 - DNA, 60 bp, Artificial
  Synthetic oligonucleotide
tcatgcctgctggaagtactttgacacatacctcagaaatgtgctggatgggtatcccat

SEQ ID NO: 522042 - DNA, 60 bp, Artificial
  Synthetic oligonucleotide
tattagagtaagtagactaggccgcagagccactattagaacacgaagtggtgctcaagt

SEQ ID NO: 522043 - DNA, 60 bp, Artificial
  Synthetic oligonucleotide
tatggggtgtcataggtattcaggtatctcggggacagcctttagggggaaccgtaactg

SEQ ID NO: 522044 - DNA, 60 bp, Artificial
  Synthetic oligonucleotide
tatgatggcatgtattatgaggaaccaaatggagacagagtgtattttcaactgtttgac

SEQ ID NO: 522045 - DNA, 60 bp, Artificial
  Synthetic oligonucleotide
tatcttacccacaacaaaatgttactccagcgtttttacctagtactcctctagaacctt

SEQ ID NO: 522046 - DNA, 60 bp, Artificial
  Synthetic oligonucleotide
tagtattagcacagtggaaaacaagtaagtgtagagacaccgtgacaaacttattatcag

SEQ ID NO: 522047 - DNA, 60 bp, Artificial
  Synthetic oligonucleotide
taggctgcgtgcggtttgctttgcttgtaatacttaggctaataataggaaacatgattg

SEQ ID NO: 522048 - DNA, 60 bp, Artificial
  Synthetic oligonucleotide
tagcagatttggatttaggaaggggactattgctacgagggctggaactaacataggcgg

SEQ ID NO: 522049 - DNA, 60 bp, Artificial
  Synthetic oligonucleotide
tacttgttaataaaggtgctgtctcaacaattatgttgttcagtcttttttactgactca

SEQ ID NO: 522050 - DNA, 60 bp, Artificial
  Synthetic oligonucleotide
tacgaccctccatacctatagaatcgttaggtcccagagcttttatacctgtagatactg

SEQ ID NO: 522051 - DNA, 60 bp, Artificial
  Synthetic oligonucleotide
tacctcccccttgccctccgaccaacggccactcaccacagcaccgagacgatacacaag

SEQ ID NO: 522052 - DNA, 60 bp, Artificial
  Synthetic oligonucleotide
tttggtttaaaagtagtttgtcacccgctacacttaaacatggtgctttacctgagtgga

SEQ ID NO: 522053 - DNA, 60 bp, Artificial
  Synthetic oligonucleotide
tttgagtcctcagctgcaagctgttagcctttctgccgggtctaaaaacagtaggagacg

SEQ ID NO: 522054 - DNA, 60 bp, Artificial
  Synthetic oligonucleotide
tttaatagggttatcaatcaaggtcaacggttgtacaatcgttttgtacaacaggttcaa

SEQ ID NO: 522055 - DNA, 60 bp, Artificial
  Synthetic oligonucleotide
ttgttgcaaggagaattgtgttttgtgtgcactgggtgttccaaaggacgacttcgaaat

SEQ ID NO: 522056 - DNA, 60 bp, Artificial
  Synthetic oligonucleotide
ttgtgggttgtgtaccaccaattggggaacactgggataaagcaaagccatgtaatgaaa

SEQ ID NO: 522057 - DNA, 60 bp, Artificial
  Synthetic oligonucleotide
ttgaaaatgagtctactcagttaactgaccatattgagtattggaactctgttagattgg

SEQ ID NO: 522058 - DNA, 60 bp, Artificial
  Synthetic oligonucleotide
ttatacaggatggggacatgctggaggtaggttttggtgccatggattttcgaagtctgt

SEQ ID NO: 522059 - DNA, 60 bp, Artificial
  Synthetic oligonucleotide
ttagtccgcgacttcagtcaatttcattgtcacctcagcagaagtccaagagaaggctct

SEQ ID NO: 522060 - DNA, 60 bp, Artificial
  Synthetic oligonucleotide
ttaggtgctcattgggatttagcaaaaccttgtgaagcagatgttagacagcctggtgat

SEQ ID NO: 522061 - DNA, 60 bp, Artificial
  Synthetic oligonucleotide
ttaaaaaggatccatatactgtagatgtatggtttgaccataatcctgacaattcctttc

SEQ ID NO: 522062 - DNA, 60 bp, Artificial
  Synthetic oligonucleotide
tgtttggttacccagcagtggaaaattatatctacctcctgcaaggccctcgcctagggt

SEQ ID NO: 522063 - DNA, 60 bp, Artificial
  Synthetic oligonucleotide
tgttaaggcttcagcgcttgaaggtcttttgcataaatctttacagagcattactattcg

SEQ ID NO: 522064 - DNA, 60 bp, Artificial
  Synthetic oligonucleotide
tgtcgcccgctactcttaaacatggtgctttacctgagtggatacgggcgcaaactactc

SEQ ID NO: 522065 - DNA, 60 bp, Artificial
  Synthetic oligonucleotide
tgtaccgaaagcggtacagtcaacaactagttacctatgattgttgccaacaattataac

SEQ ID NO: 522066 - DNA, 60 bp, Artificial
  Synthetic oligonucleotide
tgtaacaactacaacatgtaaatttgggctgcttgtattagtattagcacagtggaagac

SEQ ID NO: 522067 - DNA, 60 bp, Artificial
  Synthetic oligonucleotide
tggttcagtaaaaggtattacactcaggttccagtcgaagacccagagattcttactgca

SEQ ID NO: 522068 - DNA, 60 bp, Artificial
  Synthetic oligonucleotide
tggcgcgtgctaaaagggtcaagcgtgactctgtaactcatatatatcagacctgcaaac

SEQ ID NO: 522069 - DNA, 60 bp, Artificial
  Synthetic oligonucleotide
tggcactttacaactctcaaattactgatgaatgcgaccgagctttagtggacctaaaac

SEQ ID NO: 522070 - DNA, 60 bp, Artificial
  Synthetic oligonucleotide
tgctgaggaccagggaaattccctggcattgtataacaagcaagtaactgaggaatgtga

SEQ ID NO: 522071 - DNA, 60 bp, Artificial
  Synthetic oligonucleotide
tgctcacaggtggtgttaaacgaattaggaatacctatacatccagtactccatctacgc

SEQ ID NO: 522072 - DNA, 60 bp, Artificial
  Synthetic oligonucleotide
tgcgggaccaggagcaggggcggaggatatagaactatttactattactaacccctcaac

SEQ ID NO: 522073 - DNA, 60 bp, Artificial
  Synthetic oligonucleotide
ggtatagatgtgaacagaaatgtcctaagccttacagttacatgacctctgtgtttaaat

SEQ ID NO: 522074 - DNA, 60 bp, Artificial
  Synthetic oligonucleotide
ggtactgtgaaacgcaaacgtttggctgttacaggctcttctaggtctaagaccaccaaa

SEQ ID NO: 522075 - DNA, 60 bp, Artificial
  Synthetic oligonucleotide
gggggtagtacagtggacgtcaggtacggccaccacgcactggactatgtcccctatact

SEQ ID NO: 522076 - DNA, 60 bp, Artificial
  Synthetic oligonucleotide
ggggacctcgcagcagtaccccactgcagtcagtgctaaaaagagcaaggcagctgtacc

SEQ ID NO: 522077 - DNA, 60 bp, Artificial
  Synthetic oligonucleotide
gggcaagggagctatataataggcgtgtcagacaaataagaacacagaacataaacttcc

SEQ ID NO: 522078 - DNA, 60 bp, Artificial
  Synthetic oligonucleotide
gggacattcctgttagagaggttattcctgggctcacaatcactgcaatccctgcaggtg

SEQ ID NO: 522079 - DNA, 60 bp, Artificial
  Synthetic oligonucleotide
ggctgtgtgggtaccgaacaaaggacgtctgtatttgccaccacaacgacctgtggctaa

SEQ ID NO: 522080 - DNA, 60 bp, Artificial
  Synthetic oligonucleotide
ggctcgcccgacatttaccataccggctcagttgaccttgattccatatcccccattata

SEQ ID NO: 522081 - DNA, 60 bp, Artificial
  Synthetic oligonucleotide
ggcgggaccgatcccggtcacagtatataagcatcagacctatacggggggcatccatgg

SEQ ID NO: 522082 - DNA, 60 bp, Artificial
  Synthetic oligonucleotide
ggcctatgcagcttgtggtgactgcgtgaaggcagtactgtttatagagcgaacttgcta

SEQ ID NO: 522083 - DNA, 60 bp, Artificial
  Synthetic oligonucleotide
ggcaaggtttgtaaaaaactgcactcacatggttaaactctacaggcgacacgaattaaa

SEQ ID NO: 522084 - DNA, 60 bp, Artificial
  Synthetic oligonucleotide
ggatttaattttgccatcacagctattgtgtgaagaatcattgtcaccagacgacagccc

SEQ ID NO: 522085 - DNA, 60 bp, Artificial
  Synthetic oligonucleotide
ggatgtgaacctgcttggggcgaacattgggatgtagctaaaccttgcagtgatgaatat

SEQ ID NO: 522086 - DNA, 60 bp, Artificial
  Synthetic oligonucleotide
ggatgctgttgtaggaaagcctttagctgaaatagttatacgctgtacgtggtgttttgc

SEQ ID NO: 522087 - DNA, 60 bp, Artificial
  Synthetic oligonucleotide
ggaggttaaagggtatagaaattcaaagaggtggaccattaggtattggaactactggtc

SEQ ID NO: 522088 - DNA, 60 bp, Artificial
  Synthetic oligonucleotide
ggagccaccagatagggactttcttgatgtaaacaaattgggacgaccccagtattccac

SEQ ID NO: 522089 - DNA, 60 bp, Artificial
  Synthetic oligonucleotide
ggaagttataggccctgcagaaatattgcccattagtcccgaagcacctgctatcgtgcc

SEQ ID NO: 522090 - DNA, 60 bp, Artificial
  Synthetic oligonucleotide
ggaagaacctcctgatagacaatttttagatgtagcgcgtttaggacgtccactatattc

SEQ ID NO: 522091 - DNA, 60 bp, Artificial
  Synthetic oligonucleotide
ggaaagattagtatggaaacttagaggtattgaaattatgcgtgggggacctttaggtat

SEQ ID NO: 522092 - DNA, 60 bp, Artificial
  Synthetic oligonucleotide
gcttgcatttctgactcatgtggtctgcattctttacgccaccgcacccgtgagtatctt

SEQ ID NO: 522093 - DNA, 60 bp, Artificial
  Synthetic oligonucleotide
gcttacatctgttacatctggtccctttctctcaagaacttctgtcacatttgatgtccc

SEQ ID NO: 522094 - DNA, 60 bp, Artificial
  Synthetic oligonucleotide
tacccctccatggggagaatactgggatgttactgaagcatgtcctggcagacaagtgga

SEQ ID NO: 522095 - DNA, 60 bp, Artificial
  Synthetic oligonucleotide
tacaggtactaaaacgaaagtttcttaatagtccccagcatagtacaccccagcggccta

SEQ ID NO: 522096 - DNA, 60 bp, Artificial
  Synthetic oligonucleotide
taatcaatttgctctgatagacacatccgtctataatccagaacgagagcgattggtatg

SEQ ID NO: 522097 - DNA, 60 bp, Artificial
  Synthetic oligonucleotide
taaataagaccaggtttgctgattagcagaatttctcatggctgcttattttccgcgtag

SEQ ID NO: 522098 - DNA, 60 bp, Artificial
  Synthetic oligonucleotide
gtttggagactatatggtattcaaattgacagaggtggtcctttaggcattggttcaact

SEQ ID NO: 522099 - DNA, 60 bp, Artificial
  Synthetic oligonucleotide
gttggaagcaatcatagaacagttccttcaacgggtctctcgcgacttacaagacttcag

SEQ ID NO: 522100 - DNA, 60 bp, Artificial
  Synthetic oligonucleotide
gttgcagataagatactgcagtatggcagtcttggggtttacttggggggcctcggaatt

SEQ ID NO: 522101 - DNA, 60 bp, Artificial
  Synthetic oligonucleotide
gttcctaaagtctcaggtaatcagtatagggcttttcgagtacaattaccagatccaaac

SEQ ID NO: 522102 - DNA, 60 bp, Artificial
  Synthetic oligonucleotide
gttcagctgctaatagaccacgaccagttaatcctcaaggtcccgctatagttcctttga

SEQ ID NO: 522103 - DNA, 60 bp, Artificial
  Synthetic oligonucleotide
gttagtacctctgatcctatatctgatattagcttaccagaaagtacacctactgtagta

SEQ ID NO: 522104 - DNA, 60 bp, Artificial
  Synthetic oligonucleotide
gtgtgaggcttttctttgttacaactgcgtcttgtattcgaactgtacatcatctattaa

SEQ ID NO: 522105 - DNA, 60 bp, Artificial
  Synthetic oligonucleotide
gtggtggagggtcgtgttaaaccatatcaattggttcacattagctctttagctgctaca

SEQ ID NO: 522106 - DNA, 60 bp, Artificial
  Synthetic oligonucleotide
gtgctgcaaagcagtgatgaggactttgtagataatgctagtgtaggaccgggaaatcac

SEQ ID NO: 522107 - DNA, 60 bp, Artificial
  Synthetic oligonucleotide
gtgcactgtttttagactgtgttgcactacctcagagtgttacagtagcacctgttgacc

SEQ ID NO: 522108 - DNA, 60 bp, Artificial
  Synthetic oligonucleotide
gtgcaaacaggaccaccagcacctaaacgattagcattagaaaggtcaagtaaaacatca

SEQ ID NO: 522109 - DNA, 60 bp, Artificial
  Synthetic oligonucleotide
gtgacctgcagacctccagagagtgaacatcgcacacaaacgtcgcgcgaccactttcgg

SEQ ID NO: 522110 - DNA, 60 bp, Artificial
  Synthetic oligonucleotide
gtcggtgcagatctagacaataccttcgtggaacaaccgcgggcgcccgccagattcgct

SEQ ID NO: 522111 - DNA, 60 bp, Artificial
  Synthetic oligonucleotide
gtcctattcaggcgcctgtagaatctattgagctgcaacctataggagaaacctcggatt

SEQ ID NO: 522112 - DNA, 60 bp, Artificial
  Synthetic oligonucleotide
gtcccattagatccacttggtggcgctgaagttattccattggatgtcataaatccagaa

SEQ ID NO: 522113 - DNA, 60 bp, Artificial
  Synthetic oligonucleotide
gtagcttttgcaaacagtaatcaacgcagccggtttattgacactgttccacttcctaag

SEQ ID NO: 522114 - DNA, 60 bp, Artificial
  Synthetic oligonucleotide
ggtgatgggaggactcggacgggtgatgcatcaatgcttgtttcatttcagtcagagagc

SEQ ID NO: 522115 - DNA, 60 bp, Artificial
  Synthetic oligonucleotide
ggtcagaatacgcagatgagagatggacattaactgatactagctcacagttaatattga

SEQ ID NO: 522116 - DNA, 60 bp, Artificial
  Synthetic oligonucleotide
attagttgatacaagtatagagacttttagaagcgctccagatggtcacttcaaaaaggg

SEQ ID NO: 522117 - DNA, 60 bp, Artificial
  Synthetic oligonucleotide
attgtccactgtgtgctgtccttcggctttctgtgtttcctcgcgcaagagggacattca

SEQ ID NO: 522118 - DNA, 60 bp, Artificial
  Synthetic oligonucleotide
atttagaattgacacttcttgtgcaaactgtgagacagggatacgagtgattatacactc

SEQ ID NO: 522119 - DNA, 60 bp, Artificial
  Synthetic oligonucleotide
acgatggaagcactttcagagcgtttaagtgcgtaccaggacagaatactaacattgtat

SEQ ID NO: 522120 - DNA, 60 bp, Artificial
  Synthetic oligonucleotide
accggctgtaagctcacggccggatgacgagggaggatcaggggacgtagatattcatta

SEQ ID NO: 522121 - DNA, 60 bp, Artificial
  Synthetic oligonucleotide
caacaccaagtggctcactgaattccacagaaggtcagctgttcaataaaccgttttggt

SEQ ID NO: 522122 - DNA, 60 bp, Artificial
  Synthetic oligonucleotide
accccttacaagattgtagcaccttgtgttacctgtggtgcaaaactgcgactgttcgtg

SEQ ID NO: 522123 - DNA, 60 bp, Artificial
  Synthetic oligonucleotide
acatcatgggagacttgaacgattattggcagaggctaaggaccccccagtaatgctatt

SEQ ID NO: 522124 - DNA, 60 bp, Artificial
  Synthetic oligonucleotide
caactaacactgcagaccctacaggagtcacagtacgcagacgaacaatggacaatgcag

SEQ ID NO: 522125 - DNA, 60 bp, Artificial
  Synthetic oligonucleotide
caagcaactattccagacgtagttctggacctgcaagagtttgtccagcccattgacctg

SEQ ID NO: 522126 - DNA, 60 bp, Artificial
  Synthetic oligonucleotide
caagttcctctcgacgacgaggaggaaacggtggtgcggtatctcctgaagaagtgggct

SEQ ID NO: 522127 - DNA, 60 bp, Artificial
  Synthetic oligonucleotide
acacggctagccctgctagatgacgccacaaaagtaacctgggattatctagactcgtat

SEQ ID NO: 522128 - DNA, 60 bp, Artificial
  Synthetic oligonucleotide
acaatacggcccgccatccccacagaccccaataataccccctgatggcctacctattga

SEQ ID NO: 522129 - DNA, 60 bp, Artificial
  Synthetic oligonucleotide
aatttaatccagaagaggaaaggctggtttgggcctgtgtcggggtggaagtaggtagag

SEQ ID NO: 522130 - DNA, 60 bp, Artificial
  Synthetic oligonucleotide
aattggttctgttgaccctagggtaacctctcacacagcatcgtctgtccacataaatcc

SEQ ID NO: 522131 - DNA, 60 bp, Artificial
  Synthetic oligonucleotide
aattagtaaacagtgttatacaagatggagacatgtgtgatataggttttggagcagtta

SEQ ID NO: 522132 - DNA, 60 bp, Artificial
  Synthetic oligonucleotide
aatggattctaaaacaaacagtaataacccatcagacagaatctgaaacatttgagttag

SEQ ID NO: 522133 - DNA, 60 bp, Artificial
  Synthetic oligonucleotide
aatattacagaagattttagtaattctcacatagtactttctgcaggaagcaggcggtcc

SEQ ID NO: 522134 - DNA, 60 bp, Artificial
  Synthetic oligonucleotide
aataggccatactggctgtttagggcccaaggaatgaacaatggtattgcctggaataac

SEQ ID NO: 522135 - DNA, 60 bp, Artificial
  Synthetic oligonucleotide
caatttggaccgacttagaagacttcaagaggaggctagggatccacctcttatctgtgt

SEQ ID NO: 522136 - DNA, 60 bp, Artificial
  Synthetic oligonucleotide
aaggtatgtaccgatttcggttgattttatagcctgaggtaaactcaagttcagacaggg

SEQ ID NO: 522137 - DNA, 60 bp, Artificial
  Synthetic oligonucleotide
cacagacggggatctttcagacctgatagacgatggggaagtagtggaggctgattgctg

SEQ ID NO: 522138 - DNA, 60 bp, Artificial
  Synthetic oligonucleotide
aaggtatcagctaatcaatacagggtgtttagactaacactgccagaccctaatcaattt

SEQ ID NO: 522139 - DNA, 60 bp, Artificial
  Synthetic oligonucleotide
aggacaatgaaaatcctaataagtactcggccactcaggggacggataacaggcaaaatg

SEQ ID NO: 522140 - DNA, 60 bp, Artificial
  Synthetic oligonucleotide
aggacctaacatttgctgtcaagaccggctctacgaccttgcttggattcgaacacctat

SEQ ID NO: 522141 - DNA, 60 bp, Artificial
  Synthetic oligonucleotide
agcttagcaaaatcaccatacgctaatgaagagtggacattaactgagacgagtgcagat

SEQ ID NO: 522142 - DNA, 60 bp, Artificial
  Synthetic oligonucleotide
aggatgtaaacctgctgttggtcaacattgggacaaagcagaaccttgccctaacacgcg

SEQ ID NO: 522143 - DNA, 60 bp, Artificial
  Synthetic oligonucleotide
aggccattaggtgctcaaacaccaacgcggggtacaaccggcccagcccctcgaccctcc

SEQ ID NO: 522144 - DNA, 60 bp, Artificial
  Synthetic oligonucleotide
agattctcacatttcctactgtcattcagcgcatagaggggactgccttgcacttgaagg

SEQ ID NO: 522145 - DNA, 60 bp, Artificial
  Synthetic oligonucleotide
agtacgacccacaattcctgttgacactataggcccatctgaggtagttccaatagatgt

SEQ ID NO: 522146 - DNA, 60 bp, Artificial
  Synthetic oligonucleotide
agtataactcacgaacccaatgatacagtagtagtaccaaaggtttcaggagatcaattt

SEQ ID NO: 522147 - DNA, 60 bp, Artificial
  Synthetic oligonucleotide
agtcaacccacaggcagaaaatgtcactattgatgaaggtccagcttctgcacatattat

SEQ ID NO: 522148 - DNA, 60 bp, Artificial
  Synthetic oligonucleotide
agtcacccagcattttcataatcctgcctattatgcagaggaagaggccataggggagtc

SEQ ID NO: 522149 - DNA, 60 bp, Artificial
  Synthetic oligonucleotide
agtcgggtgcaaacctttcgctttgagcagccatgcacagatgaatcgggtgagcaacct

SEQ ID NO: 522150 - DNA, 60 bp, Artificial
  Synthetic oligonucleotide
agtgcatcccccccctggaaaccctgtgatagcgagtgctgcagaggacagtgaagctgt

SEQ ID NO: 522151 - DNA, 60 bp, Artificial
  Synthetic oligonucleotide
agacttcacagcacgttacgatgcactgcaagacgagcttctgactctttatgaagctgc

SEQ ID NO: 522152 - DNA, 60 bp, Artificial
  Synthetic oligonucleotide
agtttaattttgaaaatcccgcctttgacaatgacatcactctagagtttcaacaagatc

SEQ ID NO: 522153 - DNA, 60 bp, Artificial
  Synthetic oligonucleotide
atactaacagttaacatctcagacattcttaagcctatctttgcgtgtaaaactctctct

SEQ ID NO: 522154 - DNA, 60 bp, Artificial
  Synthetic oligonucleotide
acttggtggcgctgaagttattccattggatgtcataaatccagaagcgcctgctatcat

SEQ ID NO: 522155 - DNA, 60 bp, Artificial
  Synthetic oligonucleotide
acttcagacattatatgagacataccgaggagtttgaagtggagcttgtgactcaattgt

SEQ ID NO: 522156 - DNA, 60 bp, Artificial
  Synthetic oligonucleotide
actgttgcagacaaaatattgcaatatgggagtgctggtgtgtttcttgggaatcttgct

SEQ ID NO: 522157 - DNA, 60 bp, Artificial
  Synthetic oligonucleotide
atcaccagaataggagctgaagttgtacctccactaagtgtttcagagacaagggcgaaa

SEQ ID NO: 522158 - DNA, 60 bp, Artificial
  Synthetic oligonucleotide
atcatctcgaatgatcactagggcgcgcgatttttataataggtttgtacaacaggttcc

SEQ ID NO: 522159 - DNA, 60 bp, Artificial
  Synthetic oligonucleotide
atgctcaaacacctagggagggaacatctaccatagttaggccacgtcctaccataccca

SEQ ID NO: 522160 - DNA, 60 bp, Artificial
  Synthetic oligonucleotide
atgctcctgctattgttacacctgatgctatacctgcagacacaggcatagacgggctgt

SEQ ID NO: 522161 - DNA, 60 bp, Artificial
  Synthetic oligonucleotide
attaatgctatgaatgcaggtatcttagaagactggcaactagggtttgtaccaactcct

SEQ ID NO: 522162 - DNA, 60 bp, Artificial
  Synthetic oligonucleotide
caccgtatacggttttggagactcaccgccaacggtcgattgaatcctgccaaattctgt

SEQ ID NO: 522163 - DNA, 60 bp, Artificial
  Synthetic oligonucleotide
aaacaggtacaaatgtttgtagttgggtgtattccctgtttaggagaacattgggataag

SEQ ID NO: 522164 - DNA, 60 bp, Artificial
  Synthetic oligonucleotide
cacctgtgtgttgggattatatagaccactatttacgaaatggattggatggtaattatg

SEQ ID NO: 522165 - DNA, 60 bp, Artificial
  Synthetic oligonucleotide
aactgttttgtacaatattgaacgtgttcgattaccaattacacagtgatccacccagaa

SEQ ID NO: 522166 - DNA, 60 bp, Artificial
  Synthetic oligonucleotide
aactggcttgcacagttaacattggttaaccatcaaatggctgcaaccccagaaagtttt

SEQ ID NO: 522167 - DNA, 60 bp, Artificial
  Synthetic oligonucleotide
aaacttatgtgcaatggcgatcctactaaactaaatgtacgttgtttactgtgcatgaag

SEQ ID NO: 522168 - DNA, 60 bp, Artificial
  Synthetic oligonucleotide
aagacgccaccagatacgggacaacagggacgtggattgtgcgggatggccacaatgtgt

SEQ ID NO: 522169 - DNA, 60 bp, Artificial
  Synthetic oligonucleotide
aacaggttccaaccagtcaacaacagttgattggagaatcttttcgcgccagtacctctg

SEQ ID NO: 522170 - DNA, 60 bp, Artificial
  Synthetic oligonucleotide
aaagtagtcatggcgaacccaccaggtaataacggaggcacagggtgcatatatttgtta

SEQ ID NO: 522171 - DNA, 60 bp, Artificial
  Synthetic oligonucleotide
aagcgtcgcactactaaacgacgccgtgttaccagagcagtctcataactgtgaaacttc

SEQ ID NO: 522172 - DNA, 60 bp, Artificial
  Synthetic oligonucleotide
caccgaaaacggtgggaaatgtaaggagcacacaggaagtagagggtgcagaaacttcag

SEQ ID NO: 522173 - DNA, 60 bp, Artificial
  Synthetic oligonucleotide
aaaagcaatgtattgtgttttatggaccaccagatacaggcaaatcgtatttttgtaaca

SEQ ID NO: 522174 - DNA, 59 bp, Artificial
  Synthetic oligonucleotide
cggtattcaaggaatgtttgttttgctctgactaaccatgggaacagaccgcacccggt

SEQ ID NO: 522175 - DNA, 59 bp, Artificial
  Synthetic oligonucleotide
cagtagattaggtaacactgccacaatgaaactcaggagtggcacacacacgggtggca

SEQ ID NO: 522176 - DNA, 59 bp, Artificial
  Synthetic oligonucleotide
agaattgaaggaaggatgtagcaaatggtttgatttagaagctgactgttctgacaata

SEQ ID NO: 522177 - DNA, 59 bp, Artificial
  Synthetic oligonucleotide
ggtatatttgccaccaacaccacctgtggctcgagttcaaagcacggatgaatatgtgg

SEQ ID NO: 522178 - DNA, 59 bp, Artificial
  Synthetic oligonucleotide
cgctccaagggtaaacgcaaacgtgtcaaacagtaggaactcactactcttaatcactg

SEQ ID NO: 522179 - DNA, 59 bp, Artificial
  Synthetic oligonucleotide
gttttaactacagtagacgtatttgaggacacagccactgttaacggacatcctacagt

SEQ ID NO: 522180 - DNA, 59 bp, Artificial
  Synthetic oligonucleotide
caatggcaactagaagcggtaccattattggtcaaagagtacattactattatgatatc

SEQ ID NO: 522181 - DNA, 59 bp, Artificial
  Synthetic oligonucleotide
ggcctacttatactacaacagaccaaggtttcataagagtgagccgtgaaggtgctcgt

SEQ ID NO: 522182 - DNA, 59 bp, Artificial
  Synthetic oligonucleotide
gagtatctcttccggaccctaatcagtttgcattttccgaacggcctgcacacgaccct

SEQ ID NO: 522183 - DNA, 59 bp, Artificial
  Synthetic oligonucleotide
gggataacacaaggggtactaaccttagtattagtgtagctgcagacgcccaacctctt

SEQ ID NO: 522184 - DNA, 59 bp, Artificial
  Synthetic oligonucleotide
ctcttgaaaggactcttgaccacgtgcctggcatgccagtgttttcacccctgtattgg

SEQ ID NO: 522185 - DNA, 59 bp, Artificial
  Synthetic oligonucleotide
aagacttcaggcagaagctagggaccctcaactcatcctaatcaacggtgcagctaatc

SEQ ID NO: 522186 - DNA, 59 bp, Artificial
  Synthetic oligonucleotide
agcttccttaggcccgaggcctggtcgggtgcctatgagacaggaacttcctcacatat

SEQ ID NO: 522187 - DNA, 59 bp, Artificial
  Synthetic oligonucleotide
aatatacttctgcagcacggatcttgcagggaccgtcgggtaggattggtgtgagcaga

SEQ ID NO: 522188 - DNA, 58 bp, Artificial
  Synthetic oligonucleotide
acgtgagcagctatatgctagacattattttactaggaatggagttgttggtgacagt

SEQ ID NO: 522189 - DNA, 58 bp, Artificial
  Synthetic oligonucleotide
ggtttgccctaaatgtctggaagttcaagcaattattgacctgctgagatattatgaa

SEQ ID NO: 522190 - DNA, 58 bp, Artificial
  Synthetic oligonucleotide
tgcaacctaatcttgcagaggcacctttagatgtaactggtgcaatctgtaaatatcc

SEQ ID NO: 522191 - DNA, 58 bp, Artificial
  Synthetic oligonucleotide
gtcaatcactgtgcttgcttgctaatacatacatgatcagcatgttgctaatacataa

SEQ ID NO: 522192 - DNA, 58 bp, Artificial
  Synthetic oligonucleotide
ttaacattttggaaggtggatttgcgagataaatttacctccgagcttgatcagacac

SEQ ID NO: 522193 - DNA, 58 bp, Artificial
  Synthetic oligonucleotide
atgaagctgcatcaacagacataaacagccaaatacgtcattggcagttaactagaca

SEQ ID NO: 522194 - DNA, 58 bp, Artificial
  Synthetic oligonucleotide
cacagagtgccgtcggcaattaggcgcggaattcagtcctttgccaactatgcaaggg

SEQ ID NO: 522195 - DNA, 58 bp, Artificial
  Synthetic oligonucleotide
tactgactcatggggtcgttatttgttacaccccttataaattgaatacccgccatgg

SEQ ID NO: 522196 - DNA, 58 bp, Artificial
  Synthetic oligonucleotide
gtctgcagtactagatgtgcaaccaattccacccccaaaacggtttgctttagatgtg

SEQ ID NO: 522197 - DNA, 58 bp, Artificial
  Synthetic oligonucleotide
gaggcgatgttactgtgtgccgcgaatcagcgtggccataaaagggtgggctttacat

SEQ ID NO: 522198 - DNA, 58 bp, Artificial
  Synthetic oligonucleotide
gtgcaacaatggttagacattataaacgaggagaaatgaaggatatgagtatatctgc

SEQ ID NO: 522199 - DNA, 58 bp, Artificial
  Synthetic oligonucleotide
ttcctacacccagcggttcactagtaagtagtgagtcacaaatatttaacaggccatt

SEQ ID NO: 522200 - DNA, 58 bp, Artificial
  Synthetic oligonucleotide
gaggctatacatatgcagctgttgctaactagtttaagccgttcgaggtttgcatctg

SEQ ID NO: 522201 - DNA, 58 bp, Artificial
  Synthetic oligonucleotide
catgcaattagaagtgaattgttagaagcctcaaaattgttgctacaacagcaatgtg

SEQ ID NO: 522202 - DNA, 58 bp, Artificial
  Synthetic oligonucleotide
aatgactactcgcagtggtcttaatataggacaacgggtgcatgtgtatgtagacata

SEQ ID NO: 522203 - DNA, 58 bp, Artificial
  Synthetic oligonucleotide
cggtgcgagtgagtcgtctaggagctcgaggcacaatagttaccagaagtggtctcca

SEQ ID NO: 522204 - DNA, 58 bp, Artificial
  Synthetic oligonucleotide
tagtgggcatacaggtatctagaggtcagccattaggaggggcaattactggacactc

SEQ ID NO: 522205 - DNA, 58 bp, Artificial
  Synthetic oligonucleotide
tgcttggttaccaactggtaaactgtatctgcctccacaacctgtggccagagtattg

SEQ ID NO: 522206 - DNA, 58 bp, Artificial
  Synthetic oligonucleotide
ctcagttaactgaccatattgagtattggaactctgttagattggaaaatgttttggg

SEQ ID NO: 522207 - DNA, 58 bp, Artificial
  Synthetic oligonucleotide
tataggttttggggcaatgaactttaatgttttacaacaagatagatctagtgttcct

SEQ ID NO: 522208 - DNA, 58 bp, Artificial
  Synthetic oligonucleotide
tcttaaccaacagctgctagaagagtgcagccaggagttattagagctaaaacgaaag

SEQ ID NO: 522209 - DNA, 57 bp, Artificial
  Synthetic oligonucleotide
ataagaaagctaaactattaacaaagtttgaagactactttggggttccgtatacag

SEQ ID NO: 522210 - DNA, 57 bp, Artificial
  Synthetic oligonucleotide
gcctctgagatttggaggcttaaagacacaagtgccgaacttgttttgcaaacagag

SEQ ID NO: 522211 - DNA, 57 bp, Artificial
  Synthetic oligonucleotide
cctcaaacaagtactccagctcgcattttagattcagcagtgggtcgggccagacaa

SEQ ID NO: 522212 - DNA, 57 bp, Artificial
  Synthetic oligonucleotide
gactctaattgagcaagagtctacaaatttacgagaccatattaactattgggactc

SEQ ID NO: 522213 - DNA, 57 bp, Artificial
  Synthetic oligonucleotide
gactcgtatttaagaaatgctctggacggaaataccatctgtttagatctaaaacac

SEQ ID NO: 522214 - DNA, 57 bp, Artificial
  Synthetic oligonucleotide
gtctctttactcttattgttaacaacaatcacgccagatagtaatttggttaccagg

SEQ ID NO: 522215 - DNA, 57 bp, Artificial
  Synthetic oligonucleotide
aatactttaaaatgctatcgctaccgctgcaaaccgagatgtaaaggcctttttact

SEQ ID NO: 522216 - DNA, 57 bp, Artificial
  Synthetic oligonucleotide
cctttcggatatacaacttactgaaacaccacaacgaactattaggtttagcaggtt

SEQ ID NO: 522217 - DNA, 57 bp, Artificial
  Synthetic oligonucleotide
gagacttagagctgtagagtttgggagaggaggtcctttaggcatttcaataagtgg

SEQ ID NO: 522218 - DNA, 57 bp, Artificial
  Synthetic oligonucleotide
caatccattgtcagaaagtattgaagcattttcggatgatctacttcttgatgaagc

SEQ ID NO: 522219 - DNA, 57 bp, Artificial
  Synthetic oligonucleotide
tcagggctcacagatatcggacctatttgatgactctgaagtggtgcagggaaactc

SEQ ID NO: 522220 - DNA, 57 bp, Artificial
  Synthetic oligonucleotide
ccccgaaaagaagacgaccagacactccagactccaccggatctgctgtccctactc

SEQ ID NO: 522221 - DNA, 57 bp, Artificial
  Synthetic oligonucleotide
aatgtactattcgaggaaggagggtcacaaaaatttgggccttcagactttacctac

SEQ ID NO: 522222 - DNA, 56 bp, Artificial
  Synthetic oligonucleotide
gtaattaacagtaccagacgcaatcaatcttttattatacctcagttaccacaggg

SEQ ID NO: 522223 - DNA, 56 bp, Artificial
  Synthetic oligonucleotide
gacagggattatggcccgcctattcaacagaaggacagcccagatccctgttccag

SEQ ID NO: 522224 - DNA, 56 bp, Artificial
  Synthetic oligonucleotide
tagtggatgttataggggcgtcggggtccgattactatctgcaccctgcactatct

SEQ ID NO: 522225 - DNA, 56 bp, Artificial
  Synthetic oligonucleotide
cacttgcagctgatttggactgtagaagatttagtatatgcgtgttgcagtagttg

SEQ ID NO: 522226 - DNA, 56 bp, Artificial
  Synthetic oligonucleotide
acttagaccgaatttggtatagttttggcgcgttctgcaaatccaaccgttaacga

SEQ ID NO: 522227 - DNA, 56 bp, Artificial
  Synthetic oligonucleotide
tagataattggcagctagcttttgtacctccaccacctcaaagtatagaagataat

SEQ ID NO: 522228 - DNA, 55 bp, Artificial
  Synthetic oligonucleotide
ggacggcagtgtgtgtattacagaacgagaagatactgcaggaggagcttggagc

SEQ ID NO: 522229 - DNA, 55 bp, Artificial
  Synthetic oligonucleotide
ggaccaaagtgataaatggcataaagtggaaggtgctgcagattataatgggacc

SEQ ID NO: 522230 - DNA, 55 bp, Artificial
  Synthetic oligonucleotide
gcttggacatttacacgacctttgcactcttggcgggagtctgtaccggtactgg

SEQ ID NO: 522231 - DNA, 55 bp, Artificial
  Synthetic oligonucleotide
ggaacatagaggacattgtaacatactatggcctagtaagggcagaaaacatgtt

SEQ ID NO: 522232 - DNA, 55 bp, Artificial
  Synthetic oligonucleotide
ggaaccaaatggagacagagtgtattttcaactgtttgacgaggatgcacaaaca

SEQ ID NO: 522233 - DNA, 55 bp, Artificial
  Synthetic oligonucleotide
ttcgggcacgcaggacacggagggcagccgcggaggatctctacaggacctgtaa

SEQ ID NO: 522234 - DNA, 55 bp, Artificial
  Synthetic oligonucleotide
ttcgagacctcagaaagtatagagtatcccgtcccagctacaccccaggctgcac

SEQ ID NO: 522235 - DNA, 55 bp, Artificial
  Synthetic oligonucleotide
ggctatggtgcatgtaattttaaggcgtttcagcaagacaaagcaggcatatcac

SEQ ID NO: 522236 - DNA, 55 bp, Artificial
  Synthetic oligonucleotide
ggctactgagcttgaggtgtttcaaaggcgacgtttgagtcttgtttggaggggc

SEQ ID NO: 522237 - DNA, 55 bp, Artificial
  Synthetic oligonucleotide
ggcgccaaaggcaagttagcaaccgataacggtctacaaggtgagtacaagttca

SEQ ID NO: 522238 - DNA, 55 bp, Artificial
  Synthetic oligonucleotide
ggcgagagcagtcctatgcccgccattttctcagcagaggtggaactcccgggga

SEQ ID NO: 522239 - DNA, 55 bp, Artificial
  Synthetic oligonucleotide
ttcattgtgtctacgtgtgacctttacacttggcgggaacgcgtaccaaagtcgg

SEQ ID NO: 522240 - DNA, 55 bp, Artificial
  Synthetic oligonucleotide
ggctgcaaccgcttgcagatgcaaagttagggtttctagatgatgctacacatgc

SEQ ID NO: 522241 - DNA, 55 bp, Artificial
  Synthetic oligonucleotide
ggcataaatgaagctaatcgtgctcttacgcccctccaggtacaaaggggagggg

SEQ ID NO: 522242 - DNA, 55 bp, Artificial
  Synthetic oligonucleotide
ttcctaactggcttgcacagttgacgctagtcagtcatcaaatggcatcgtcagc

SEQ ID NO: 522243 - DNA, 55 bp, Artificial
  Synthetic oligonucleotide
ggctgctgcacccgaccctgattttagagatatagttactttacacagagctcga

SEQ ID NO: 522244 - DNA, 55 bp, Artificial
  Synthetic oligonucleotide
ggattagggaatgtcaattttaccaccttttctcaatcacgttctgacgctccct

SEQ ID NO: 522245 - DNA, 55 bp, Artificial
  Synthetic oligonucleotide
agaaatgggttggatggacactatgtctcactagactgtaaatatagagccccca

SEQ ID NO: 522246 - DNA, 55 bp, Artificial
  Synthetic oligonucleotide
ggatgcgcagccgaaaccaccagaagatccatacaagggtcttaccttctggaca

SEQ ID NO: 522247 - DNA, 55 bp, Artificial
  Synthetic oligonucleotide
ggctgtattccgccaactggtgaatattgggatgtggctaaaccttgcaatgaac

SEQ ID NO: 522248 - DNA, 55 bp, Artificial
  Synthetic oligonucleotide
ggatgcacaccgcctactggggcttactgggacgtggctacaccatgtaaggagc

SEQ ID NO: 522249 - DNA, 55 bp, Artificial
  Synthetic oligonucleotide
ggctgtcattgaagtgacaccttcaggccctccacctagaagagttgccacaagc

SEQ ID NO: 522250 - DNA, 55 bp, Artificial
  Synthetic oligonucleotide
ggatgagtatgtcaccaggacaagtatattctatcatgcaagcactgatcgatta

SEQ ID NO: 522251 - DNA, 55 bp, Artificial
  Synthetic oligonucleotide
ggagtgctagatggactctagttttgccagctgaaggactttgtgcatgtgaact

SEQ ID NO: 522252 - DNA, 55 bp, Artificial
  Synthetic oligonucleotide
ggagacatagttactataccagatattaccttagagaacttagtgtgtcctgctg

SEQ ID NO: 522253 - DNA, 55 bp, Artificial
  Synthetic oligonucleotide
ggactgtgcaactatggtcaggcattatttaagagctgagacccaagccttaagt

SEQ ID NO: 522254 - DNA, 55 bp, Artificial
  Synthetic oligonucleotide
ggcttgtattttgatgttgaagggagcagacatttgtatgttgactttaaagtgg

SEQ ID NO: 522255 - DNA, 55 bp, Artificial
  Synthetic oligonucleotide
ggactcaaccgttagtagatgccaaaattggtatgttggatgatgctactcatgc

SEQ ID NO: 522256 - DNA, 55 bp, Artificial
  Synthetic oligonucleotide
gcctatgataatggatacgatgacgagtgtactatagcatatgagtatgctcgga

SEQ ID NO: 522257 - DNA, 55 bp, Artificial
  Synthetic oligonucleotide
gccgtccaactagaaagcgaggtcccacaacgcctccgcacccttctcccggaaa

SEQ ID NO: 522258 - DNA, 55 bp, Artificial
  Synthetic oligonucleotide
gccggacctacgggatcggacagagcgggaagggcgcgaatgcttgtggtgttta

SEQ ID NO: 522259 - DNA, 55 bp, Artificial
  Synthetic oligonucleotide
aaacataatggtcaggctaagtttgttaaggatgctgcacatatggtcagactgt

SEQ ID NO: 522260 - DNA, 55 bp, Artificial
  Synthetic oligonucleotide
gccgcggggtcaaaagggcagcgtctacaacctctgcgtcttctagacgagttgt

SEQ ID NO: 522261 - DNA, 55 bp, Artificial
  Synthetic oligonucleotide
gcccggggattagacacgttaacactctgctaaccgggtcggtgtccattgtgtg

SEQ ID NO: 522262 - DNA, 55 bp, Artificial
  Synthetic oligonucleotide
gccccgatgacattaaagcaaagtttgagcaagacacctgggctgatagactgct

SEQ ID NO: 522263 - DNA, 55 bp, Artificial
  Synthetic oligonucleotide
gcccaaaatcgaaagtagactatgaccttagcccacgtatagcagcaattacaat

SEQ ID NO: 522264 - DNA, 55 bp, Artificial
  Synthetic oligonucleotide
gccattattagatactaagatagctctgatagatgatgccacaccaagtacatgg

SEQ ID NO: 522265 - DNA, 55 bp, Artificial
  Synthetic oligonucleotide
gcattgtacccattactcctgaggttattgcacagctacacagcataaaccctac

SEQ ID NO: 522266 - DNA, 55 bp, Artificial
  Synthetic oligonucleotide
gcatctcatatctattatgctacacccagtggctcattaactagcagtgattctc

SEQ ID NO: 522267 - DNA, 55 bp, Artificial
  Synthetic oligonucleotide
gcatcccatttccagtgttctgcgaatcatttaagccgttccttaagggagtgcc

SEQ ID NO: 522268 - DNA, 55 bp, Artificial
  Synthetic oligonucleotide
gcagtcgcgtggcaaattgtatctacctccaagcaaaccagttgcaactgtgatg

SEQ ID NO: 522269 - DNA, 55 bp, Artificial
  Synthetic oligonucleotide
agctattttagctgcttaagcacaatttgctgatggagaccctacctggacaact

SEQ ID NO: 522270 - DNA, 55 bp, Artificial
  Synthetic oligonucleotide
gcagactcaattattcatggtaggttgtacacctccgataggtgctcactgggat

SEQ ID NO: 522271 - DNA, 55 bp, Artificial
  Synthetic oligonucleotide
gcagaagcttgggatccgccattaatttgcttaaaaggttctgctaataccttaa

SEQ ID NO: 522272 - DNA, 55 bp, Artificial
  Synthetic oligonucleotide
gcacttcacctgccttgggagacaccatactaccgcctactggacaagaccaagc

SEQ ID NO: 522273 - DNA, 55 bp, Artificial
  Synthetic oligonucleotide
gcactcacatggttaaactctacaggcgacacgaattaaaacaaatgtcaaggtg

SEQ ID NO: 522274 - DNA, 55 bp, Artificial
  Synthetic oligonucleotide
agctgacttaagccctaggcttagatctatcacaattacaccgccaaagcactca

SEQ ID NO: 522275 - DNA, 55 bp, Artificial
  Synthetic oligonucleotide
gcacacataaatgcaatgaatccctctatattagaggactggaacttagcatttg

SEQ ID NO: 522276 - DNA, 55 bp, Artificial
  Synthetic oligonucleotide
gcaattcagatgcaattggtgctaacatctctcaatgaatcaccctttggttccg

SEQ ID NO: 522277 - DNA, 55 bp, Artificial
  Synthetic oligonucleotide
tttatatctggcacacaaacaatcattgccactaacaagttgggagctgtgaggg

SEQ ID NO: 522278 - DNA, 55 bp, Artificial
  Synthetic oligonucleotide
gcaaggagcgccttgtctgggcagttataggagtacaggtctcccgaggtcaacc

SEQ ID NO: 522279 - DNA, 55 bp, Artificial
  Synthetic oligonucleotide
gcaactaagtgcaaatggcctgacttcctgcgcatgactaacgaggtgtatggtg

SEQ ID NO: 522280 - DNA, 55 bp, Artificial
  Synthetic oligonucleotide
ttctaatccccaaccgcgcccggttgcaccctgtgagtaagacccgcacctgggt

SEQ ID NO: 522281 - DNA, 55 bp, Artificial
  Synthetic oligonucleotide
gcttgcttagtaagagggcactggagagcaccttgcagaaattgtatcaagcagg

SEQ ID NO: 522282 - DNA, 55 bp, Artificial
  Synthetic oligonucleotide
ttctccttgcgatcccgttactagcactacaccgcccaccgaccctcgtggagag

SEQ ID NO: 522283 - DNA, 55 bp, Artificial
  Synthetic oligonucleotide
agagtgataagacatgtagtccgaattgggtcgtagctgtgtttggggctagaga

SEQ ID NO: 522284 - DNA, 55 bp, Artificial
  Synthetic oligonucleotide
aaacccgacgtaaacgtgctgcccctcaagatttatacaggcattgcttgcaggg

SEQ ID NO: 522285 - DNA, 55 bp, Artificial
  Synthetic oligonucleotide
ttgcacggtgtatataattagaaatcggctacatatccgctgcatcctgtgtcgg

SEQ ID NO: 522286 - DNA, 55 bp, Artificial
  Synthetic oligonucleotide
ttgtgctctgccgacacagcaagtattcgaggacttgaacttcttcttctagggg

SEQ ID NO: 522287 - DNA, 55 bp, Artificial
  Synthetic oligonucleotide
gcttgcaccctagcttgatgttcagacgtaggcgcagacgcaaacggtacatctc

SEQ ID NO: 522288 - DNA, 55 bp, Artificial
  Synthetic oligonucleotide
gctgttgcagccctaaaacgaaagttagttggttctccagtacaaacggtagcag

SEQ ID NO: 522289 - DNA, 55 bp, Artificial
  Synthetic oligonucleotide
gctgacattcttgctcatattcatgttatgaatccctcgatacttgacgagtggc

SEQ ID NO: 522290 - DNA, 55 bp, Artificial
  Synthetic oligonucleotide
gctctggtaataggcgtcctatttcggtgtccatgcctactgtcccactggcccg

SEQ ID NO: 522291 - DNA, 55 bp, Artificial
  Synthetic oligonucleotide
gctctcgcaaacgtatcagggatacttatagtccttctgctccatctacctcaac

SEQ ID NO: 522292 - DNA, 55 bp, Artificial
  Synthetic oligonucleotide
gctcagcaaacgctagtaaatcatcaaacagcctctacggctgactcgtttcaac

SEQ ID NO: 522293 - DNA, 55 bp, Artificial
  Synthetic oligonucleotide
agatcagttgaaagcagacatcgatcaagacttggacttttacaggcggaggctc

SEQ ID NO: 522294 - DNA, 55 bp, Artificial
  Synthetic oligonucleotide
aaacatgagtgcacgaaaaagagttaaacgtgcaagtgcttacgacctttacaga

SEQ ID NO: 522295 - DNA, 55 bp, Artificial
  Synthetic oligonucleotide
agcaagccttgctgacgcagctaatgaagtcctcaaatcagagggcaacacagta

SEQ ID NO: 522296 - DNA, 55 bp, Artificial
  Synthetic oligonucleotide
gctagggctgcccctacagttgagttcagagacattattgagctcaatcggggag

SEQ ID NO: 522297 - DNA, 55 bp, Artificial
  Synthetic oligonucleotide
gcgtgctaaagcaccttaatcggtgcagaccgcaggcggtttcagatgagctggc

SEQ ID NO: 522298 - DNA, 55 bp, Artificial
  Synthetic oligonucleotide
gcgtgatcttcatttgctttgcccacactgcgctcgtgaactttgtcgccatggg

SEQ ID NO: 522299 - DNA, 55 bp, Artificial
  Synthetic oligonucleotide
gcggggagaaacacagcacaccatagagctggagtgcgtgtactgcttggcgcca

SEQ ID NO: 522300 - DNA, 55 bp, Artificial
  Synthetic oligonucleotide
gccttgcaggtttctgcgtgcgctcaggaatttcattgtgtgaactgcaagtccc

SEQ ID NO: 522301 - DNA, 55 bp, Artificial
  Synthetic oligonucleotide
gccttgaccttaaacataaagcacctctgcagataagatgtccgccattactgat

SEQ ID NO: 522302 - DNA, 55 bp, Artificial
  Synthetic oligonucleotide
gccttcaatcatcaccatatgctagcgaagaatggagcttaagtgatactagtgc

SEQ ID NO: 522303 - DNA, 55 bp, Artificial
  Synthetic oligonucleotide
gcctgaaatgcatagaagttagagtgattgttgacctgctgagaagttttgaact

SEQ ID NO: 522304 - DNA, 55 bp, Artificial
  Synthetic oligonucleotide
taattctcacatagtactttctgcaggaagcaggcggtccactcttacagtgccc

SEQ ID NO: 522305 - DNA, 55 bp, Artificial
  Synthetic oligonucleotide
acaacaaggcctatccctgacaccatacctgttagacctgcagtacctgtggagc

SEQ ID NO: 522306 - DNA, 55 bp, Artificial
  Synthetic oligonucleotide
tgggaatgagccatggtccttgctagatacaagctgggaccgctatatgtctgag

SEQ ID NO: 522307 - DNA, 55 bp, Artificial
  Synthetic oligonucleotide
tgggacaaatatgacaatcactgtagcctctaacgatggcccttccacatatgac

SEQ ID NO: 522308 - DNA, 55 bp, Artificial
  Synthetic oligonucleotide
gtttctactcgtctctacttaccaagcaccgggcgcggtgccttaacctagttcg

SEQ ID NO: 522309 - DNA, 55 bp, Artificial
  Synthetic oligonucleotide
tgggctaaggctttgtcctgtgtggataatcctcctgctaaggacgattgccctc

SEQ ID NO: 522310 - DNA, 55 bp, Artificial
  Synthetic oligonucleotide
gttgtggataccaacttaggaggaataacttatccagagtctgctttagaggatg

SEQ ID NO: 522311 - DNA, 55 bp, Artificial
  Synthetic oligonucleotide
gttgtccaccagtaaaactagtgcacactatgatagaagatggggatatgagtga

SEQ ID NO: 522312 - DNA, 55 bp, Artificial
  Synthetic oligonucleotide
gttggtaaggtctatctaccgccatcaagacctgttgccagagtactcagcacag

SEQ ID NO: 522313 - DNA, 55 bp, Artificial
  Synthetic oligonucleotide
gttggcaacaataatttcctgtgcacatatttcaaccgggagcggtctgtataaa

SEQ ID NO: 522314 - DNA, 55 bp, Artificial
  Synthetic oligonucleotide
acagaggttccacaatatagcggatgtttggaccggccggtgcctggagtgctgg

SEQ ID NO: 522315 - DNA, 55 bp, Artificial
  Synthetic oligonucleotide
gttgctggagaagttgatataaatggcctgtattttagagaagtaacgggagatg

SEQ ID NO: 522316 - DNA, 55 bp, Artificial
  Synthetic oligonucleotide
acagatgctcccataaatatgcttcactatatttagctgccagtacagttttcac

SEQ ID NO: 522317 - DNA, 55 bp, Artificial
  Synthetic oligonucleotide
tgtaacaggaacggatgtttattttcacgcaggcagtgatcgcttgttggtggtt

SEQ ID NO: 522318 - DNA, 55 bp, Artificial
  Synthetic oligonucleotide
gttatttcaagcacagataacacagcaatactagatgtacaacccataccacccc

SEQ ID NO: 522319 - DNA, 55 bp, Artificial
  Synthetic oligonucleotide
tgtagaaaagaaggtattacacgattgggcatgcaaccgttaccggtactacccg

SEQ ID NO: 522320 - DNA, 55 bp, Artificial
  Synthetic oligonucleotide
gtgtctagtgatactcaaattttcaatagaccattctggctgcaacgtgcccagg

SEQ ID NO: 522321 - DNA, 55 bp, Artificial
  Synthetic oligonucleotide
aacagtaccgacgcaaggtcttacaagacttagacgactgcaagaggaggctcgg

SEQ ID NO: 522322 - DNA, 55 bp, Artificial
  Synthetic oligonucleotide
accctaacaagtttggccttccagatgcaagcttgtatgacccagcttcgcagcg

SEQ ID NO: 522323 - DNA, 55 bp, Artificial
  Synthetic oligonucleotide
gtggtctgcattctttacgccaccgcacccgtgagtatcttgccagcgcaggtgt

SEQ ID NO: 522324 - DNA, 55 bp, Artificial
  Synthetic oligonucleotide
gtgctccagtaatcaatggagggtatttcgcgtgcgtctccccgaccctaacagg

SEQ ID NO: 522325 - DNA, 55 bp, Artificial
  Synthetic oligonucleotide
gtgcgtaagcctttaaaagacgttgtgattcgctgcttaaaatgtcttgctcgtt

SEQ ID NO: 522326 - DNA, 55 bp, Artificial
  Synthetic oligonucleotide
gtgcagtcagagttagtaggttaggtgatacaggtactattcgtaccagaagtgg

SEQ ID NO: 522327 - DNA, 55 bp, Artificial
  Synthetic oligonucleotide
gtgcaacctgcacagcaaccatctaaaactatcgtggctggagctaggccacgtt

SEQ ID NO: 522328 - DNA, 55 bp, Artificial
  Synthetic oligonucleotide
aagcgtgcttcagcagaacagttatacagacaatgtgcaactggtgactgtcccc

SEQ ID NO: 522329 - DNA, 55 bp, Artificial
  Synthetic oligonucleotide
tgaggaggatgagcaacggatcgcaaccctaaaacgaaagtatgctcagactccg

SEQ ID NO: 522330 - DNA, 55 bp, Artificial
  Synthetic oligonucleotide
tgacataccgttgttggaggttacgccagatgtgcctggggtgcctgacatcccc

SEQ ID NO: 522331 - DNA, 55 bp, Artificial
  Synthetic oligonucleotide
tctatagccgcagaagagccaaacgcagccgcctggttgtcgtgctcatctcagg

SEQ ID NO: 522332 - DNA, 55 bp, Artificial
  Synthetic oligonucleotide
tcgatccaaatacctaaaaggttactggctgtctgcctttgtaccgccttcggta

SEQ ID NO: 522333 - DNA, 55 bp, Artificial
  Synthetic oligonucleotide
aatagcagtgattctcagttatttaataggccttattggcttagaagagctcagg

SEQ ID NO: 522334 - DNA, 55 bp, Artificial
  Synthetic oligonucleotide
tgctgcacgcttcacacttccagatcctaatcgctttgctttgcaagaccccagc

SEQ ID NO: 522335 - DNA, 55 bp, Artificial
  Synthetic oligonucleotide
tccaggtacacgcggggccgcttatcagcacacccgatgtgggtgggcaaggtat

SEQ ID NO: 522336 - DNA, 55 bp, Artificial
  Synthetic oligonucleotide
tcacaggagttgagggacagcctactataataactgcggaagatgactcagttgc

SEQ ID NO: 522337 - DNA, 55 bp, Artificial
  Synthetic oligonucleotide
tcacacttgatagtctgaccagtgcagatctagattcacgtgccaactcatcttg

SEQ ID NO: 522338 - DNA, 55 bp, Artificial
  Synthetic oligonucleotide
tattgaacgtgttcgattaccaattacacagtgatccacccagaaatagaagtgt

SEQ ID NO: 522339 - DNA, 55 bp, Artificial
  Synthetic oligonucleotide
tatggtattcaaattgacagaggtggtcctttaggcattggttcaactggacatc

SEQ ID NO: 522340 - DNA, 55 bp, Artificial
  Synthetic oligonucleotide
aatcagcgtgtttagtaagaggacattggagagcaccttgcagacagtgcctcag

SEQ ID NO: 522341 - DNA, 55 bp, Artificial
  Synthetic oligonucleotide
tataacaatcaaatcatttctgcctctgtcactagctcttcacggtgctctttcg

SEQ ID NO: 522342 - DNA, 55 bp, Artificial
  Synthetic oligonucleotide
tagttggttgtactccagctacaggtgaatactgggatgttgctaaaccttgtgg

SEQ ID NO: 522343 - DNA, 55 bp, Artificial
  Synthetic oligonucleotide
taggggtgccatgttgttttcaagacgccatttcagatatgttaaaacccacaac

SEQ ID NO: 522344 - DNA, 55 bp, Artificial
  Synthetic oligonucleotide
tagctctactcggcggcctatacccctcctctcccacgaaaccaacaggaacggg

SEQ ID NO: 522345 - DNA, 55 bp, Artificial
  Synthetic oligonucleotide
tagaggactggaacttagcatttgttccacagcctactacatctattgaggacca

SEQ ID NO: 522346 - DNA, 55 bp, Artificial
  Synthetic oligonucleotide
aatgttatgttaactttgcagaggaaagtgtaaagtacggtcaaaccggctgctg

SEQ ID NO: 522347 - DNA, 55 bp, Artificial
  Synthetic oligonucleotide
aattaatggtacagatgaggaaggtgacaggtttgagataccaactataccatca

SEQ ID NO: 522348 - DNA, 55 bp, Artificial
  Synthetic oligonucleotide
tggacaatattggtgattggtgcgtaataacagaggccgagtgtgtggatagtgt

SEQ ID NO: 522349 - DNA, 55 bp, Artificial
  Synthetic oligonucleotide
taccataacccaacctatgttgtcaatgtacactctactgcaagttcaggcgaga

SEQ ID NO: 522350 - DNA, 55 bp, Artificial
  Synthetic oligonucleotide
tggctgtgttccctgcactggggagcattgggatgtagctaaggcttgtggggct

SEQ ID NO: 522351 - DNA, 55 bp, Artificial
  Synthetic oligonucleotide
tacacacatagaaccttcacttttaattccccagcctgaaatgccagctgtggat

SEQ ID NO: 522352 - DNA, 55 bp, Artificial
  Synthetic oligonucleotide
ttagcagatttgggactaaggccagtgtcaaaacacgtagtggagttatagcagg

SEQ ID NO: 522353 - DNA, 55 bp, Artificial
  Synthetic oligonucleotide
ggtactcgaggtaccatgcaaaccagggctggtactgttttaggagggaatgttc

SEQ ID NO: 522354 - DNA, 55 bp, Artificial
  Synthetic oligonucleotide
aaagtagactgtgatctaagcccacggttagcagcaatctcattacaagagaaac

SEQ ID NO: 522355 - DNA, 55 bp, Artificial
  Synthetic oligonucleotide
ggtaacaccacagcaagcacctccaacacgcttagcatttgaatacccgcacaca

SEQ ID NO: 522356 - DNA, 55 bp, Artificial
  Synthetic oligonucleotide
gggtttactaaacggacgcaagcgtcctcgtagcgcatacagtagttcatatgct

SEQ ID NO: 522357 - DNA, 55 bp, Artificial
  Synthetic oligonucleotide
gggtcgcaagtttctgtatcagacaggattgtttaatggtcgaaaacgtgtacgt

SEQ ID NO: 522358 - DNA, 55 bp, Artificial
  Synthetic oligonucleotide
ggggtgttgtgctgtttattagagtgtacggatccggttgaatacggacaacaac

SEQ ID NO: 522359 - DNA, 55 bp, Artificial
  Synthetic oligonucleotide
ggggtgcaaatcagcttaagtgttggaggtatagaacacgatcaaggtatgctca

SEQ ID NO: 522360 - DNA, 55 bp, Artificial
  Synthetic oligonucleotide
ggggtataccacacctttaatctgtcactcaacaagacactataaatgcttggac

SEQ ID NO: 522361 - DNA, 55 bp, Artificial
  Synthetic oligonucleotide
actgcctgatccaaataagctagccttagttgactctactgtctatgatgctaaa

SEQ ID NO: 522362 - DNA, 55 bp, Artificial
  Synthetic oligonucleotide
ggggctgtgggatgtgatgtgtaaccatgaacctatttgctcccctgaatctgtt

SEQ ID NO: 522363 - DNA, 55 bp, Artificial
  Synthetic oligonucleotide
ggggccttggaattgggacgggtagagggtctggaggctctacaggatatcgccc

SEQ ID NO: 522364 - DNA, 55 bp, Artificial
  Synthetic oligonucleotide
ggggccaatcaggtgaaatgccttcgccataaacttaaggtccagcatcacggac

SEQ ID NO: 522365 - DNA, 55 bp, Artificial
  Synthetic oligonucleotide
ggggattcactggaagatagatctgaggaatcgatggacacaccaaacggacagg

SEQ ID NO: 522366 - DNA, 55 bp, Artificial
  Synthetic oligonucleotide
actgcgggtaggccgcttaggtcagaaggtatccctccgcacacggagtggtgtg

SEQ ID NO: 522367 - DNA, 55 bp, Artificial
  Synthetic oligonucleotide
ggggaagcttccgggatggaaaacataagcgtgctatgcggcagtggtggccgca

SEQ ID NO: 522368 - DNA, 55 bp, Artificial
  Synthetic oligonucleotide
gggctgacacattattaaaggcgttcagtagtattatttacctgggtcatttagg

SEQ ID NO: 522369 - DNA, 55 bp, Artificial
  Synthetic oligonucleotide
gggcgccccagatcaacggtttagggacgttcttcggctctcggccccaaggtat

SEQ ID NO: 522370 - DNA, 55 bp, Artificial
  Synthetic oligonucleotide
gggcacaacacatgttggtgaggttgctcctattgttcctgcacgtcccaatata

SEQ ID NO: 522371 - DNA, 55 bp, Artificial
  Synthetic oligonucleotide
actgcgtgaaggcagtactgtttatagagcgaacttgctatcctacggtgtggcg

SEQ ID NO: 522372 - DNA, 55 bp, Artificial
  Synthetic oligonucleotide
gggatgttacaaaaccatgtaaagataggcctttgaataatggagattgtcctcc

SEQ ID NO: 522373 - DNA, 55 bp, Artificial
  Synthetic oligonucleotide
gggactctgcgtcaaacctatacagacaatgtcaagtaaccgggaattgtccacc

SEQ ID NO: 522374 - DNA, 55 bp, Artificial
  Synthetic oligonucleotide
gggaatcacagttactttcctacacccagtggttctctagttactagtgaggccc

SEQ ID NO: 522375 - DNA, 55 bp, Artificial
  Synthetic oligonucleotide
gggaaattccctggcattgtataacaagcaagtaactgaggaatgtgatttagcc

SEQ ID NO: 522376 - DNA, 55 bp, Artificial
  Synthetic oligonucleotide
acctatcgctatataagttcccaggccacaatgtgtcctcctaaggtcccttcgg

SEQ ID NO: 522377 - DNA, 55 bp, Artificial
  Synthetic oligonucleotide
gtcttgctcgtttagattttatggaaaagcttgctcatttacgaaattgcagacc

SEQ ID NO: 522378 - DNA, 55 bp, Artificial
  Synthetic oligonucleotide
acgcatgatcaacacaagcctcgcctacttcattccgcacctgtgttcagtcagt

SEQ ID NO: 522379 - DNA, 55 bp, Artificial
  Synthetic oligonucleotide
acgccaccaggggcaagcggaggcctccgggcggtgaacctaccgagcggcagcc

SEQ ID NO: 522380 - DNA, 55 bp, Artificial
  Synthetic oligonucleotide
gtcataaccgtcttgcaaggctctatgctttggttaaggaggcatatggagtggg

SEQ ID NO: 522381 - DNA, 55 bp, Artificial
  Synthetic oligonucleotide
tgttgtgtctaatacaccgagacaacaggcaaaacggagactgtttggagacagt

SEQ ID NO: 522382 - DNA, 55 bp, Artificial
  Synthetic oligonucleotide
gtcaggattagtaggctagctcagaaacctggaatgacaactcgcagtggtttac

SEQ ID NO: 522383 - DNA, 55 bp, Artificial
  Synthetic oligonucleotide
acgcccaagagtagtcaccacatcctccaaagctaaacctgtaaaacgaaggcgc

SEQ ID NO: 522384 - DNA, 55 bp, Artificial
  Synthetic oligonucleotide
gtagcaccttgtgttacctgtggtgcaaaactgcgactgttcgtgtacgctacgg

SEQ ID NO: 522385 - DNA, 55 bp, Artificial
  Synthetic oligonucleotide
gtaccgcggtgtactatggcacgccgagtggctctctaacatccagtgattcaca

SEQ ID NO: 522386 - DNA, 55 bp, Artificial
  Synthetic oligonucleotide
gtacccagggatcattcattgacagtgatgaggtggatcagggaaattccttggc

SEQ ID NO: 522387 - DNA, 55 bp, Artificial
  Synthetic oligonucleotide
gtaccattaaggacatcagggtccactagcagtctagcctctgcaggatcaagag

SEQ ID NO: 522388 - DNA, 55 bp, Artificial
  Synthetic oligonucleotide
gtaatggatactgtagacgatgaaaaggttgcagttcctaaggtttctgctcaac

SEQ ID NO: 522389 - DNA, 55 bp, Artificial
  Synthetic oligonucleotide
gtaataggggaaccacctgagtggattgtaagacaaaccatgtttcaacatagcc

SEQ ID NO: 522390 - DNA, 55 bp, Artificial
  Synthetic oligonucleotide
gtaaggttcctttggaagcagatatcctggcacatttatatgctatggacccatc

SEQ ID NO: 522391 - DNA, 55 bp, Artificial
  Synthetic oligonucleotide
gtaaggatgctaagcttcctaaatgaatgtccattaaattctaggggtgatcctg

SEQ ID NO: 522392 - DNA, 55 bp, Artificial
  Synthetic oligonucleotide
ggtgtaagggaaacaattagaactcgtgtaggcacaacaataggagccagggtac

SEQ ID NO: 522393 - DNA, 55 bp, Artificial
  Synthetic oligonucleotide
ggtgggcccttaggtgttggtagcactggtcacccattatttgataggtttatgg

SEQ ID NO: 522394 - DNA, 55 bp, Artificial
  Synthetic oligonucleotide
ggtggacctttaggaataggtactacaggccatccttactttaacaaagtaggtg

SEQ ID NO: 522395 - DNA, 55 bp, Artificial
  Synthetic oligonucleotide
ggtgcttttcaataggccgtactggcttgagcgggcccaagggcagaataatggc

SEQ ID NO: 522396 - DNA, 55 bp, Artificial
  Synthetic oligonucleotide
ggtgctcatttaatattgtccagttcaggtcgcagaggatctgtttacactgttc

SEQ ID NO: 522397 - DNA, 55 bp, Artificial
  Synthetic oligonucleotide
ggtgatacagagaatccagcaacataccctaacgaagaggtagcagaccaacgaa

SEQ ID NO: 522398 - DNA, 55 bp, Artificial
  Synthetic oligonucleotide
ggtgaaggaacctcttctgaacatgtgtacattctgaatggtgtttctggacagc

SEQ ID NO: 522399 - DNA, 55 bp, Artificial
  Synthetic oligonucleotide
ggtcatcccctgctaaacaaactggatgacacagaaaatggcccctcgcctcccg

SEQ ID NO: 522400 - DNA, 55 bp, Artificial
  Synthetic oligonucleotide
ttacaagctttgttgaagagcggagggttacacttatgctgttagagtctaaagc

SEQ ID NO: 522401 - DNA, 55 bp, Artificial
  Synthetic oligonucleotide
attggggaacactgggataaagcaaagccatgtaatgaaaggcctgatccaggca

SEQ ID NO: 522402 - DNA, 55 bp, Artificial
  Synthetic oligonucleotide
cgaccgatctctctttattttgtcctacgtgttccagagtcagctttcgccatgg

SEQ ID NO: 522403 - DNA, 55 bp, Artificial
  Synthetic oligonucleotide
atttgttgagcaggttggaaccagaaacatagattttctaggtcagccttcccgc

SEQ ID NO: 522404 - DNA, 55 bp, Artificial
  Synthetic oligonucleotide
ccttacgcgggcccctgaggcagttcagtttacatttgaaaatcccgcctttgac

SEQ ID NO: 522405 - DNA, 55 bp, Artificial
  Synthetic oligonucleotide
attttgttgtgtttgcatcagatgcccaaagatatggtactactggagaatggac

SEQ ID NO: 522406 - DNA, 55 bp, Artificial
  Synthetic oligonucleotide
cctgcttattgttgttcacaatcacaccagctgcatacttggttaccaggaatgg

SEQ ID NO: 522407 - DNA, 55 bp, Artificial
  Synthetic oligonucleotide
cctgctatcgggcagcattgggatgtcacagagccatgtaatcctcctttggaga

SEQ ID NO: 522408 - DNA, 55 bp, Artificial
  Synthetic oligonucleotide
caaaacctgtggcacaggcgactgccctcctgatgtaaaggcgaagtttgagcaa

SEQ ID NO: 522409 - DNA, 55 bp, Artificial
  Synthetic oligonucleotide
cctgcaaatacagggaagtcactgtttgcaatgagcctaataaatatgttaggtg

SEQ ID NO: 522410 - DNA, 55 bp, Artificial
  Synthetic oligonucleotide
cctgcaaaaccagtggctcgtgtgttacgaacggatgattatgtgacaggaactg

SEQ ID NO: 522411 - DNA, 55 bp, Artificial
  Synthetic oligonucleotide
cctgatgaggatctcttggacacctatgagaccatttctgattctagccgccttg

SEQ ID NO: 522412 - DNA, 55 bp, Artificial
  Synthetic oligonucleotide
cctgacgaagttggaagaggaaatacaagtgttccaagaacaaatcttacacgac

SEQ ID NO: 522413 - DNA, 55 bp, Artificial
  Synthetic oligonucleotide
cctctggcacaacactggatccagatattgctgaccctggcattgagttacacct

SEQ ID NO: 522414 - DNA, 55 bp, Artificial
  Synthetic oligonucleotide
cctcctgtagctgcacctgaccctgagtacactgatgtggtccacctagggcgtc

SEQ ID NO: 522415 - DNA, 55 bp, Artificial
  Synthetic oligonucleotide
cctccaccacccaaacgagtgttgttggattcctcagtaagaaacacaacagatg

SEQ ID NO: 522416 - DNA, 55 bp, Artificial
  Synthetic oligonucleotide
caacagaccttattggttacacagagctttaggagccaacaatggtatactttgg

SEQ ID NO: 522417 - DNA, 55 bp, Artificial
  Synthetic oligonucleotide
caacagttgattggagaatcttttcgcgccagtacctctgagtttgaaaaccccg

SEQ ID NO: 522418 - DNA, 55 bp, Artificial
  Synthetic oligonucleotide
cctcagagaattgggttatatcagctttcgctgctgcctcagatgttatagaggc

SEQ ID NO: 522419 - DNA, 55 bp, Artificial
  Synthetic oligonucleotide
cctagtcctgtaagatcaattgcagatttgagtcccaggcttgacgctgttcaca

SEQ ID NO: 522420 - DNA, 55 bp, Artificial
  Synthetic oligonucleotide
cctagggcgttgttccacgcacaggaaacacaggcgcatgcaaacgctgtgcagg

SEQ ID NO: 522421 - DNA, 55 bp, Artificial
  Synthetic oligonucleotide
cctacaagtagtacacctttagacagagttcagagagtactaactagagcccgcc

SEQ ID NO: 522422 - DNA, 55 bp, Artificial
  Synthetic oligonucleotide
caagatagatcaggagttcctttagatatagtggcaacaacatgtaaatggcctg

SEQ ID NO: 522423 - DNA, 55 bp, Artificial
  Synthetic oligonucleotide
ccgcaggttacattagggtcagtagattaggatcgcgtgctactatacgcacgcg

SEQ ID NO: 522424 - DNA, 55 bp, Artificial
  Synthetic oligonucleotide
ccgcacaaggttagggacaccatccctggacagggctcctaccattgtctgcctc

SEQ ID NO: 522425 - DNA, 55 bp, Artificial
  Synthetic oligonucleotide
ccgcaatcaccagttccaggagtaacctggggatttgatccacctccacgtacag

SEQ ID NO: 522426 - DNA, 55 bp, Artificial
  Synthetic oligonucleotide
cccttgcaaagattagactttacagaattagacatagaagaagcacctacagcaa

SEQ ID NO: 522427 - DNA, 55 bp, Artificial
  Synthetic oligonucleotide
ccctacgagggacatattttctggaatgtggacttaactgaacgactaactgctg

SEQ ID NO: 522428 - DNA, 55 bp, Artificial
  Synthetic oligonucleotide
ctcaaccatactgatggataacctgtttcctaccaatttagaggactactgctct

SEQ ID NO: 522429 - DNA, 55 bp, Artificial
  Synthetic oligonucleotide
ctcaaacacacctggatgaaacctgagtcggtcgcctcaggaccgaaggcggtgc

SEQ ID NO: 522430 - DNA, 55 bp, Artificial
  Synthetic oligonucleotide
ctatttactacttagacgagcacgacaactggattaaaacacacggaagggtaga

SEQ ID NO: 522431 - DNA, 55 bp, Artificial
  Synthetic oligonucleotide
ctattgttacaagtgtaactgcagagtgagaatagtagtagttgcaagcgctgga

SEQ ID NO: 522432 - DNA, 55 bp, Artificial
  Synthetic oligonucleotide
ctatgtgtgtagatcaaaagcacaaagctccacagcaatatagtttaccaccttt

SEQ ID NO: 522433 - DNA, 55 bp, Artificial
  Synthetic oligonucleotide
ctatctcgcagttgctacaggcgggaaagccaaagcatgtcatgttggcattgtt

SEQ ID NO: 522434 - DNA, 55 bp, Artificial
  Synthetic oligonucleotide
ctatcacacaggcagctatttcgttcttggctgtcagcctttgtaccgccttcgg

SEQ ID NO: 522435 - DNA, 55 bp, Artificial
  Synthetic oligonucleotide
ctaggccgcagagccactattagaacacgaagtggtgctcaagtaggtactcagg

SEQ ID NO: 522436 - DNA, 55 bp, Artificial
  Synthetic oligonucleotide
ctagacaataccttcgtggaacaaccgcgggcgcccgccagattcgctgccaaga

SEQ ID NO: 522437 - DNA, 55 bp, Artificial
  Synthetic oligonucleotide
ctactgtggacctttcagactttgaactttcaatgacctttgaccttcaccccag

SEQ ID NO: 522438 - DNA, 55 bp, Artificial
  Synthetic oligonucleotide
ctacatacaatggatcctcggattcttgaggcctggcatataggtttgcagcccc

SEQ ID NO: 522439 - DNA, 55 bp, Artificial
  Synthetic oligonucleotide
atcttcttcggtatactttgctactcctagtgggtctctcacatctagcgatgct

SEQ ID NO: 522440 - DNA, 55 bp, Artificial
  Synthetic oligonucleotide
cgttctggtagaccaataacatcaactcctgtaagaccatctgtaacagtagatg

SEQ ID NO: 522441 - DNA, 55 bp, Artificial
  Synthetic oligonucleotide
cgtgctagtaagcaccttatagctgttttcatggctgaagtgtgccctgttagac

SEQ ID NO: 522442 - DNA, 55 bp, Artificial
  Synthetic oligonucleotide
atggcaaacacagccccatgcttaatttcggaattgtgtgaccagtttagccttg

SEQ ID NO: 522443 - DNA, 55 bp, Artificial
  Synthetic oligonucleotide
cggttgattttatagcctgaggtaaactcaagttcagacagggacaaactgactc

SEQ ID NO: 522444 - DNA, 55 bp, Artificial
  Synthetic oligonucleotide
atgtccattattactctgaacttagctccatacaggctgaagaaggtatggaact

SEQ ID NO: 522445 - DNA, 55 bp, Artificial
  Synthetic oligonucleotide
cggatgagtatgtgacccgcaccaatatcttctatcatgcaaatagtgatcgctt

SEQ ID NO: 522446 - DNA, 55 bp, Artificial
  Synthetic oligonucleotide
cggaggcttgcgccaggtttccacatctatatactctgggacacccagtggctct

SEQ ID NO: 522447 - DNA, 55 bp, Artificial
  Synthetic oligonucleotide
cggacagccccaacggtccgaacaaagggaatctaccaccgacggacgaggacga

SEQ ID NO: 522448 - DNA, 55 bp, Artificial
  Synthetic oligonucleotide
cggaatctgcaatccatgtgcacgggacgtctccaagaaagagcgtgaggcattc

SEQ ID NO: 522449 - DNA, 55 bp, Artificial
  Synthetic oligonucleotide
atgtttaccaggcatatgatgtcgcggggtggccttaccaatgaaacagtacccc

SEQ ID NO: 522450 - DNA, 55 bp, Artificial
  Synthetic oligonucleotide
cggaacagaaggtgcgaatcagtgcatccttgtgactggcaatgcgaaccaggtg

SEQ ID NO: 522451 - DNA, 55 bp, Artificial
  Synthetic oligonucleotide
cgcttgctggaactttgtggatgtatatatgcggaatgcattagatggcaatccc

SEQ ID NO: 522452 - DNA, 55 bp, Artificial
  Synthetic oligonucleotide
atgtttgtagttgggtgtattccctgtttaggagaacattgggataaggctgaag

SEQ ID NO: 522453 - DNA, 55 bp, Artificial
  Synthetic oligonucleotide
cgccccacctgtagacgttgatgggcctgctgtgctagatgtttccttagatgtc

SEQ ID NO: 522454 - DNA, 55 bp, Artificial
  Synthetic oligonucleotide
cgatgtgtattgatgctaaacatagagtaccacaacaaataaagttacctcccct

SEQ ID NO: 522455 - DNA, 55 bp, Artificial
  Synthetic oligonucleotide
cgatccagcttactcatttaatccgagctagcagcagggtgcgcaccttcctcgg

SEQ ID NO: 522456 - DNA, 55 bp, Artificial
  Synthetic oligonucleotide
ccaatgagcaatggactcttgctgacacaagtgccgacagatttgattccccacc

SEQ ID NO: 522457 - DNA, 55 bp, Artificial
  Synthetic oligonucleotide
ccaaactctgtgagtcccagtgacttttactacgcacctgacagcacacaggacc

SEQ ID NO: 522458 - DNA, 55 bp, Artificial
  Synthetic oligonucleotide
catggttcaatgggcgtatgacaatgattatgtagaagaatcacaagtagcgtac

SEQ ID NO: 522459 - DNA, 55 bp, Artificial
  Synthetic oligonucleotide
catggagggtgacatagattcaggtacagaccctgaggaaggaaccagctcgggg

SEQ ID NO: 522460 - DNA, 55 bp, Artificial
  Synthetic oligonucleotide
catctgtgcaaccactcccggtgagtaagccaaccgtctctgataaatgctgacc

SEQ ID NO: 522461 - DNA, 55 bp, Artificial
  Synthetic oligonucleotide
catcacacggacatttaaaagcgaccggaccacctataccgactgggtaatagca

SEQ ID NO: 522462 - DNA, 55 bp, Artificial
  Synthetic oligonucleotide
catattaaaacagacatactaattcctgacgaatccttgcatccgttagagcccc

SEQ ID NO: 522463 - DNA, 55 bp, Artificial
  Synthetic oligonucleotide
cacaggccaaacacgtaaaagactgttgtacaatggtcagactgtataagagagc

SEQ ID NO: 522464 - DNA, 55 bp, Artificial
  Synthetic oligonucleotide
caccaccatattcaaacttaggaaacagtacttactttcctatgccaagtggttc

SEQ ID NO: 522465 - DNA, 55 bp, Artificial
  Synthetic oligonucleotide
catagtaggttgcaaacctgccataggccaacattgggacattgctgaaccctgt

SEQ ID NO: 522466 - DNA, 55 bp, Artificial
  Synthetic oligonucleotide
cagtttcggtatttgacattaaaaggcgccaaagggcattcacataccgatttcg

SEQ ID NO: 522467 - DNA, 55 bp, Artificial
  Synthetic oligonucleotide
caccctctgacgttttgacacgttttgttggaagagctcggaatttgtacaaccg

SEQ ID NO: 522468 - DNA, 55 bp, Artificial
  Synthetic oligonucleotide
caccctggcatgtacacctcagacataaacacagggcttcacgtgatatatccac

SEQ ID NO: 522469 - DNA, 55 bp, Artificial
  Synthetic oligonucleotide
caggacagtgggcagtgattgttaacaatgaaccaatatctccccttgactctgt

SEQ ID NO: 522470 - DNA, 55 bp, Artificial
  Synthetic oligonucleotide
caggaagtcagttcagagtttttcgcatgaaactaccagatccgaatcgctttgc

SEQ ID NO: 522471 - DNA, 55 bp, Artificial
  Synthetic oligonucleotide
cagcccggggattgtcctgccattgaattgctatctacacatatacaagatggtg

SEQ ID NO: 522472 - DNA, 55 bp, Artificial
  Synthetic oligonucleotide
cagcagtcgatccaaaactctgcagctgcaaggggcttttggcactgagcgaaga

SEQ ID NO: 522473 - DNA, 55 bp, Artificial
  Synthetic oligonucleotide
cacggcttctttctgcagctggggatccacccataatcctggttaagggtccgac

SEQ ID NO: 522474 - DNA, 55 bp, Artificial
  Synthetic oligonucleotide
cagcaaccgcctgaaaaggaagatccttatgcagggtttacattttggacagttg

SEQ ID NO: 522475 - DNA, 55 bp, Artificial
  Synthetic oligonucleotide
cagatggccacttggagtccgaacactggaagattatatttaccacctgcaaagc

SEQ ID NO: 522476 - DNA, 55 bp, Artificial
  Synthetic oligonucleotide
cagagttccattgtgttctgccaagtacaggtgtggtgttctggaacggtcgtac

SEQ ID NO: 522477 - DNA, 55 bp, Artificial
  Synthetic oligonucleotide
cagaggctgaatgtagtgaggatgatagtgtgagtgaggatgtcgtcgatcatgc

SEQ ID NO: 522478 - DNA, 55 bp, Artificial
  Synthetic oligonucleotide
cactccgtccgtcactagtgtcttacaaactaattatacgcgttctcaattgctg

SEQ ID NO: 522479 - DNA, 55 bp, Artificial
  Synthetic oligonucleotide
cagactggtttgctttctactggaaaacgtgtaagacccttaactacctctgcta

SEQ ID NO: 522480 - DNA, 55 bp, Artificial
  Synthetic oligonucleotide
cagacgatgaaactgcagattcttttgtacaggtagaccctatagacacttgttc

SEQ ID NO: 522481 - DNA, 55 bp, Artificial
  Synthetic oligonucleotide
cagaatacaggcacactgtgggaactgcgaacgcgccatcaggctcgtggtcctg

SEQ ID NO: 522482 - DNA, 55 bp, Artificial
  Synthetic oligonucleotide
cactcctgtcatgggacaatactggaccagagcatccgtatgtgtaaatcaggtc

SEQ ID NO: 522483 - DNA, 55 bp, Artificial
  Synthetic oligonucleotide
caattcagcaatcccgcattcgatgtggcccctgacagcacgcatgggtttgggg

SEQ ID NO: 522484 - DNA, 55 bp, Artificial
  Synthetic oligonucleotide
ccctaaagtgtctggaaaccagtttagggtgtttcgccttatgctgccagacccc

SEQ ID NO: 522485 - DNA, 55 bp, Artificial
  Synthetic oligonucleotide
cccggggacaccggaggacacactgaaagacctgctaaaagacatcttacgtcgg

SEQ ID NO: 522486 - DNA, 55 bp, Artificial
  Synthetic oligonucleotide
cccgcccacgtcttccctgcttgcggatgcctaccgattcatagaatctgctgcc

SEQ ID NO: 522487 - DNA, 55 bp, Artificial
  Synthetic oligonucleotide
cccgaaggtctccccacatcagtatagggtctttcgttgtaatctaccagatcct

SEQ ID NO: 522488 - DNA, 55 bp, Artificial
  Synthetic oligonucleotide
ccccttgcatacgcgttcccatagcctcagctaacctgtccattcagcaataaat

SEQ ID NO: 522489 - DNA, 55 bp, Artificial
  Synthetic oligonucleotide
cccctaagtagtacacctgagcaacgattaaacagagcttttcagagagcacgtg

SEQ ID NO: 522490 - DNA, 55 bp, Artificial
  Synthetic oligonucleotide
cccctaaacgttttgccttagacgttggcaataaacccacaggcacacatctaac

SEQ ID NO: 522491 - DNA, 55 bp, Artificial
  Synthetic oligonucleotide
ccccgccgtctggtagtttgcaggacacctataggtttgttacctctgctgccat

SEQ ID NO: 522492 - DNA, 55 bp, Artificial
  Synthetic oligonucleotide
ccccgacccctgtgcaacgtatcctgagcacggatgaatttgtggcacggaccaa

SEQ ID NO: 522493 - DNA, 55 bp, Artificial
  Synthetic oligonucleotide
cccatccacatactacactattcccagtggctctcttgttagcagtgagtctcaa

SEQ ID NO: 522494 - DNA, 55 bp, Artificial
  Synthetic oligonucleotide
cccagtacagacaacagacaaaatgtagggttcgatcctaagcagacacagatgt

SEQ ID NO: 522495 - DNA, 55 bp, Artificial
  Synthetic oligonucleotide
cccaggctaagcatgttaaggactgcacggtgatggtcagacactataagagggc

SEQ ID NO: 522496 - DNA, 55 bp, Artificial
  Synthetic oligonucleotide
cccaggaagttgcccacctcttaaattggtacatagtacaattgaggatggcgac

SEQ ID NO: 522497 - DNA, 55 bp, Artificial
  Synthetic oligonucleotide
cccacctccacagcagccgttgtcagatgactacagatttatagattctctggca

SEQ ID NO: 522498 - DNA, 55 bp, Artificial
  Synthetic oligonucleotide
caattccgggtctttcgtgttatccttccagatcccaatcagtttgcacttccag

SEQ ID NO: 522499 - DNA, 55 bp, Artificial
  Synthetic oligonucleotide
cccaagcgtggcttaagactacaaaccaggtaaagcatgtccgagactgctgtgc

SEQ ID NO: 522500 - DNA, 55 bp, Artificial
  Synthetic oligonucleotide
ccatacaagtcaacacaaggtaaccgcgcccggtttatctgattataaatcgcac

SEQ ID NO: 522501 - DNA, 55 bp, Artificial
  Synthetic oligonucleotide
ccagtttggctttgacaaccctgtctatgatgacactctggaattccctgtgcct

SEQ ID NO: 522502 - DNA, 55 bp, Artificial
  Synthetic oligonucleotide
ccagttcctaaaacgaaagtatgtatacagtccgcaggcagatatagcagctttg

SEQ ID NO: 522503 - DNA, 55 bp, Artificial
  Synthetic oligonucleotide
ccagggaaccgtggacaatgacggacactagcaaggaaacgtacagagcacctcc

SEQ ID NO: 522504 - DNA, 55 bp, Artificial
  Synthetic oligonucleotide
caattgagtcagcgccagtcccagagtttcaggatatccggagtctttcgaggcc

SEQ ID NO: 522505 - DNA, 55 bp, Artificial
  Synthetic oligonucleotide
ccagccttcccgcgcagtaacctttgaaaatcccgcctttgaggatgatgctgac

SEQ ID NO: 522506 - DNA, 55 bp, Artificial
  Synthetic oligonucleotide
ccagagtaccgagagactcggctactaacatttaccgaacatgtaaacaggccgg

SEQ ID NO: 522507 - DNA, 55 bp, Artificial
  Synthetic oligonucleotide
ccagacccaaataaatttgctcttgtagagccttctatatataatccagaccatg

SEQ ID NO: 522508 - DNA, 55 bp, Artificial
  Synthetic oligonucleotide
ccagaagcggtactacctcagctactaagcgcttgcgcagcatatctgcaagtgg

SEQ ID NO: 522509 - DNA, 55 bp, Artificial
  Synthetic oligonucleotide
ccactaggaagaaagtttctctaccaggctggcttaacaggccttggttctacta

SEQ ID NO: 522510 - DNA, 55 bp, Artificial
  Synthetic oligonucleotide
ccaccatgatacagtgggcatacgataatgaccacaccgaggagagcgatattgc

SEQ ID NO: 522511 - DNA, 55 bp, Artificial
  Synthetic oligonucleotide
ctggacctattgtgatacttaccttagaaatggcctagatgggaaccaggtctgc

SEQ ID NO: 522512 - DNA, 55 bp, Artificial
  Synthetic oligonucleotide
agggcgggtaccatgggcgatgcaattccagaggagctttatattaagggttctg

SEQ ID NO: 522513 - DNA, 55 bp, Artificial
  Synthetic oligonucleotide
gacgcggagtcacctgcacttatccctctgcaggaggtgacagtatatgccccag

SEQ ID NO: 522514 - DNA, 55 bp, Artificial
  Synthetic oligonucleotide
gacgtagttctggacctgcaagagtttgtccagcccattgacctgtattgcgacg

SEQ ID NO: 522515 - DNA, 55 bp, Artificial
  Synthetic oligonucleotide
ctgctgtgctggaaacgaattctttgcattagttagaggtacttggagaggaccc

SEQ ID NO: 522516 - DNA, 55 bp, Artificial
  Synthetic oligonucleotide
ctgctgtacaggtagactctttgtcatacgaaaatggcgggacgcagagctcctt

SEQ ID NO: 522517 - DNA, 55 bp, Artificial
  Synthetic oligonucleotide
gactcgtttgactgtttggagggagctagtagctggtactttgtatctgaagctg

SEQ ID NO: 522518 - DNA, 55 bp, Artificial
  Synthetic oligonucleotide
gactgtaaatatagggctccaatgcagattaagtgtcctcctattctcattacca

SEQ ID NO: 522519 - DNA, 55 bp, Artificial
  Synthetic oligonucleotide
gactgtcacatctgtcagaacacagtatcgctggttgtgtactctacccacgacg

SEQ ID NO: 522520 - DNA, 55 bp, Artificial
  Synthetic oligonucleotide
atagagaacggcttgtgtggcaactaactggaatagaaatcaaacgtggaggtcc

SEQ ID NO: 522521 - DNA, 55 bp, Artificial
  Synthetic oligonucleotide
gacttaagcagtataagccatcttgcagacacatttacctctggcacaacactgg

SEQ ID NO: 522522 - DNA, 55 bp, Artificial
  Synthetic oligonucleotide
gagaaaggcaaatgtccgcctattaagttggtgcattccaccatacaagatggtg

SEQ ID NO: 522523 - DNA, 55 bp, Artificial
  Synthetic oligonucleotide
ctgatgagtctttacttgatatctatgaacctattgccaatgacctgcagctagt

SEQ ID NO: 522524 - DNA, 55 bp, Artificial
  Synthetic oligonucleotide
ctgatgaatttgtaacacgcactgatgctttctattatgcttccacagagcggca

SEQ ID NO: 522525 - DNA, 55 bp, Artificial
  Synthetic oligonucleotide
ctgatacgagtcagcagattgggtgagcgagctacaattacaaccagaagcggtc

SEQ ID NO: 522526 - DNA, 55 bp, Artificial
  Synthetic oligonucleotide
ctgaggtgtggaaacttaaagacactagtgttgaactggtgttgcaaacagaacc

SEQ ID NO: 522527 - DNA, 55 bp, Artificial
  Synthetic oligonucleotide
ctgacgcctgtataatgtccgagccgcccaagataaggagtgtggccgctgcact

SEQ ID NO: 522528 - DNA, 55 bp, Artificial
  Synthetic oligonucleotide
gaaagattagtatggcgattaacaggattagaaataggtagaggtggacctctgg

SEQ ID NO: 522529 - DNA, 55 bp, Artificial
  Synthetic oligonucleotide
agtggtgcattggcgccacatgctgtatagcctgtaaccgttgtattgtgtatgt

SEQ ID NO: 522530 - DNA, 55 bp, Artificial
  Synthetic oligonucleotide
gaaataaacgtgcttctgcagaggagctatataaacaatgtgccactggtgactg

SEQ ID NO: 522531 - DNA, 55 bp, Artificial
  Synthetic oligonucleotide
ctttgctctaatttcaggcacagctaaccaggtaaagtgctaccgctttcgtgtg

SEQ ID NO: 522532 - DNA, 55 bp, Artificial
  Synthetic oligonucleotide
agttccttcaacgggtctctcgcgacttacaagacttcaggcagaagctagggac

SEQ ID NO: 522533 - DNA, 55 bp, Artificial
  Synthetic oligonucleotide
gaacatccggacctcatgccagatgctttggaccatctgcggtatttggacggct

SEQ ID NO: 522534 - DNA, 55 bp, Artificial
  Synthetic oligonucleotide
gaagatttctagctcagcaaggggcaggatgttcaactgtgagaaagagggctgt

SEQ ID NO: 522535 - DNA, 55 bp, Artificial
  Synthetic oligonucleotide
cttgccaaagctaattaccagcctttctatctcgtgcgcagtctttggagagggc

SEQ ID NO: 522536 - DNA, 55 bp, Artificial
  Synthetic oligonucleotide
gaatttgagagagatatagctgaattacgagcccctcccgatatagactttaggg

SEQ ID NO: 522537 - DNA, 55 bp, Artificial
  Synthetic oligonucleotide
ctgttagtactgtctttacatgggttggaggttgtgggtctgctgaacaagctcg

SEQ ID NO: 522538 - DNA, 55 bp, Artificial
  Synthetic oligonucleotide
gaccacgaccagttaatcctcaaggtcccgctatagttcctttgagtactgatgg

SEQ ID NO: 522539 - DNA, 55 bp, Artificial
  Synthetic oligonucleotide
ctgtggatgttataggccctgcagaggttttacctatatctccagaagcaccagc

SEQ ID NO: 522540 - DNA, 55 bp, Artificial
  Synthetic oligonucleotide
gaccatgttgcacaagtaggtgaatgtcctcctgtgcagctcatcaactccataa

SEQ ID NO: 522541 - DNA, 55 bp, Artificial
  Synthetic oligonucleotide
ctgtcagcctttgtaccgccttcggttatctttgttcctctatcgttattgttgc

SEQ ID NO: 522542 - DNA, 55 bp, Artificial
  Synthetic oligonucleotide
gacccaaagacctctacacctgtctccagagttgacagtgggctacaatctatca

SEQ ID NO: 522543 - DNA, 55 bp, Artificial
  Synthetic oligonucleotide
ctgtagaccccaaacaaacacagttatttatggtaggctgtgcacctcctattgg

SEQ ID NO: 522544 - DNA, 55 bp, Artificial
  Synthetic oligonucleotide
ctggtcacatcactcgaaccccgcatttgatgtcatacccggcagcgacaatgcc

SEQ ID NO: 522545 - DNA, 55 bp, Artificial
  Synthetic oligonucleotide
gcaaacgtttggctgttacaggctcttctaggtctaagaccaccaaacgtaaacg

SEQ ID NO: 522546 - DNA, 55 bp, Artificial
  Synthetic oligonucleotide
ctccccgggtcctcgtagagtcataatcactagaagtgactttaataacccctcc

SEQ ID NO: 522547 - DNA, 55 bp, Artificial
  Synthetic oligonucleotide
gatgtagctaaggcttgtggggctttgcaggctggggactgtccacctatacagc

SEQ ID NO: 522548 - DNA, 55 bp, Artificial
  Synthetic oligonucleotide
gatggtgaaactggtttatattttagtagtactcctcccagcactacgtcctcaa

SEQ ID NO: 522549 - DNA, 55 bp, Artificial
  Synthetic oligonucleotide
gatggagacctccgcatttccaactactcttgatggttattgctcgcactttgag

SEQ ID NO: 522550 - DNA, 55 bp, Artificial
  Synthetic oligonucleotide
ctcctacgcctcgacctccaagacacgccagcaggagagtcctgctaggagacga

SEQ ID NO: 522551 - DNA, 55 bp, Artificial
  Synthetic oligonucleotide
gatatgacagagaaactgtctgctgaactatctcagttttctttaggtaagaggt

SEQ ID NO: 522552 - DNA, 55 bp, Artificial
  Synthetic oligonucleotide
gagttttacgagtaatgttaccagatcctaacaagtttgcactggtagatcccac

SEQ ID NO: 522553 - DNA, 55 bp, Artificial
  Synthetic oligonucleotide
gagtcttggaccatagctgtttataatgcgagggaggaggtgttagaggcagcca

SEQ ID NO: 522554 - DNA, 55 bp, Artificial
  Synthetic oligonucleotide
ctccttcggggagcgaggtacctatgagcatatctgggtctagttcagccaattc

SEQ ID NO: 522555 - DNA, 55 bp, Artificial
  Synthetic oligonucleotide
gagtcaaatacgccagcaaccggtagcggttctctgtggtgccaaacacagctct

SEQ ID NO: 522556 - DNA, 55 bp, Artificial
  Synthetic oligonucleotide
gaggtactgatcgtatgttaatagttggtcatccttactatgatgtcactgatgc

SEQ ID NO: 522557 - DNA, 55 bp, Artificial
  Synthetic oligonucleotide
gaggaggagcgtccagtattcaaagttgatagtaattgcgacagctgtcaaagag

SEQ ID NO: 522558 - DNA, 55 bp, Artificial
  Synthetic oligonucleotide
gagcttaacttagatgctttggtcctcccagagaacttattaagtgacgaggctt

SEQ ID NO: 522559 - DNA, 55 bp, Artificial
  Synthetic oligonucleotide
atcaatttagggttttcaggttacaattgcctgatcctaacagatttgcattggt

SEQ ID NO: 522560 - DNA, 55 bp, Artificial
  Synthetic oligonucleotide
gagcggccatggagcgttgcaggtcttagcgtgtgttcaggtgtgcccatgtgcc

SEQ ID NO: 522561 - DNA, 55 bp, Artificial
  Synthetic oligonucleotide
aggcgaacagatgttctacggaagtactaccacaggttaacacagcagatccagg

SEQ ID NO: 522562 - DNA, 55 bp, Artificial
  Synthetic oligonucleotide
ataggccttattggcttagaagagctcagggaactaacaatggcatttgctgggg

SEQ ID NO: 522563 - DNA, 55 bp, Artificial
  Synthetic oligonucleotide
ctctgctgccataacatgtcaaaagaccgccccacctaaggaaaaggagggcccc

SEQ ID NO: 522564 - DNA, 55 bp, Artificial
  Synthetic oligonucleotide
gagacgaaaacttttctttggtgagaggtacttggagagggccgtgtagaacttg

SEQ ID NO: 522565 - DNA, 55 bp, Artificial
  Synthetic oligonucleotide
atagtaggttgcactcctccatggggtgaatattgggatgtcacagagagttgtc

SEQ ID NO: 522566 - DNA, 55 bp, Artificial
  Synthetic oligonucleotide
gagacgttactagattacacagacctatactaacagaaacatcagagggtatagt

SEQ ID NO: 522567 - DNA, 55 bp, Artificial
  Synthetic oligonucleotide
gagccatggacattagtacaaacaagccttgagacctttcgtacccctcctgcag

SEQ ID NO: 522568 - DNA, 55 bp, Artificial
  Synthetic oligonucleotide
gagcaactacattcttagtctggacgttgtgatcgattggtgaacagcacaccgc

SEQ ID NO: 522569 - DNA, 55 bp, Artificial
  Synthetic oligonucleotide
ctgaaatccatcctattcctgaaggaccttccattgatactcctgtggttactac

SEQ ID NO: 522570 - DNA, 54 bp, Artificial
  Synthetic oligonucleotide
tacctctagctttattagtccctttgaaaggaatatccaggaaggggatgtatt

SEQ ID NO: 522571 - DNA, 54 bp, Artificial
  Synthetic oligonucleotide
ccagcttttgatcctgaagagtctctgttactgcctggtgacccagactcagca

SEQ ID NO: 522572 - DNA, 54 bp, Artificial
  Synthetic oligonucleotide
gaatggatccagcagcaaacaaatgtgtcttataatgtaggggatgcggttaag

SEQ ID NO: 522573 - DNA, 54 bp, Artificial
  Synthetic oligonucleotide
tacacaatgagcacattcggttaaaccgcataggccaaagagcatcccttcagc

SEQ ID NO: 522574 - DNA, 54 bp, Artificial
  Synthetic oligonucleotide
taatggtcccatacagtttcctagcccttacacaccattgggccctgctgttgg

SEQ ID NO: 522575 - DNA, 54 bp, Artificial
  Synthetic oligonucleotide
taacagacacgtgggaaaaagttgaaggtcacgtagattactttggagcctacc

SEQ ID NO: 522576 - DNA, 54 bp, Artificial
  Synthetic oligonucleotide
ggaaactcagaggcttacaattaggtcgtggaggtcctttaggtgttggaacta

SEQ ID NO: 522577 - DNA, 54 bp, Artificial
  Synthetic oligonucleotide
agagatcgcccagacggggtctgggtcgcatccgagggacctgaaggagaccca

SEQ ID NO: 522578 - DNA, 54 bp, Artificial
  Synthetic oligonucleotide
ccgcctttgatcctgaggtaactatagaatttgagcgggacttggcacaagtta

SEQ ID NO: 522579 - DNA, 54 bp, Artificial
  Synthetic oligonucleotide
ccggacgacaccccagaggaggagtcattgtcaccttaccaggtcgatagcctc

SEQ ID NO: 522580 - DNA, 54 bp, Artificial
  Synthetic oligonucleotide
tgcattgtcataagaggcgatccgaatacggttaagtgtttaaggtataggttc

SEQ ID NO: 522581 - DNA, 54 bp, Artificial
  Synthetic oligonucleotide
ccatattggctcagacgagcacaaggtaccaataacggtatttgttggggtaac

SEQ ID NO: 522582 - DNA, 54 bp, Artificial
  Synthetic oligonucleotide
aatctgactcatgtggtctaaattctttcctaccgcgcccctataattatttgg

SEQ ID NO: 522583 - DNA, 54 bp, Artificial
  Synthetic oligonucleotide
aacttctatatctagtcatccaacagttattcaaggtagcggtgacactttagc

SEQ ID NO: 522584 - DNA, 54 bp, Artificial
  Synthetic oligonucleotide
ccattggcagatacaaaggtcgcacttatagatgatgctacggggccctgttgg

SEQ ID NO: 522585 - DNA, 54 bp, Artificial
  Synthetic oligonucleotide
gccatttgcaataaatgcgtggaagttagagcgcttgtggactggataagacac

SEQ ID NO: 522586 - DNA, 54 bp, Artificial
  Synthetic oligonucleotide
agcaggatcatctattattccacttacagacacaggcataccagatgtcacagt

SEQ ID NO: 522587 - DNA, 54 bp, Artificial
  Synthetic oligonucleotide
agcctacttgtttaattagaggatactttagagcgccttgtacagagtgtttgc

SEQ ID NO: 522588 - DNA, 54 bp, Artificial
  Synthetic oligonucleotide
gaccctgatatttttacatcacagacgtttgcaaacccagtgtatgatccagaa

SEQ ID NO: 522589 - DNA, 54 bp, Artificial
  Synthetic oligonucleotide
gccaaaatatgtaagattggcaagattaaacttggcaggatgtttgtaccgtaa

SEQ ID NO: 522590 - DNA, 54 bp, Artificial
  Synthetic oligonucleotide
agtacctctgagtttgaaaaccccgcctttacagatgacatatcatctttgttt

SEQ ID NO: 522591 - DNA, 54 bp, Artificial
  Synthetic oligonucleotide
tcaaggtccaaatacccatagaaacttggatgattcacctgcaggaccgttgct

SEQ ID NO: 522592 - DNA, 54 bp, Artificial
  Synthetic oligonucleotide
caattcgacttttccaggagctattgctcggaagcctagcacttctttgtcctc

SEQ ID NO: 522593 - DNA, 54 bp, Artificial
  Synthetic oligonucleotide
caccagactcgttaaaactttccattacgtctgagtttgtctagctctgcctct

SEQ ID NO: 522594 - DNA, 54 bp, Artificial
  Synthetic oligonucleotide
tagaccagggccctttaagaagtactcctttatcatctcgcgccatctctagag

SEQ ID NO: 522595 - DNA, 54 bp, Artificial
  Synthetic oligonucleotide
tcactgccgatggcacagtgataaggccaaacattgttgtggaaccggtaggtc

SEQ ID NO: 522596 - DNA, 54 bp, Artificial
  Synthetic oligonucleotide
ttagatgctgacggtaatcctgtgtacaaatttacagatcaagcttggaaagcg

SEQ ID NO: 522597 - DNA, 54 bp, Artificial
  Synthetic oligonucleotide
ccaactccttcacaagtgggaacaggacgtcgattacctcctacaacgggtctt

SEQ ID NO: 522598 - DNA, 54 bp, Artificial
  Synthetic oligonucleotide
ccaatgacctgcagctagtaattggcattggtagaagggtgcgaccgatatcgg

SEQ ID NO: 522599 - DNA, 54 bp, Artificial
  Synthetic oligonucleotide
gtatagcttgaggctgggtgaattactcatttggcacactttactttgtagctg

SEQ ID NO: 522600 - DNA, 54 bp, Artificial
  Synthetic oligonucleotide
ggcacgtcggcaaacgaacgaccgaccgtgcacgtggtggtacagcacggaggg

SEQ ID NO: 522601 - DNA, 54 bp, Artificial
  Synthetic oligonucleotide
ataggcagtagaactataggcagtagaactataggcaacagctaactaaataag

SEQ ID NO: 522602 - DNA, 54 bp, Artificial
  Synthetic oligonucleotide
gtaaactacaatatgcactggttggagtcagaacaccgtctacggtgcttggct

SEQ ID NO: 522603 - DNA, 54 bp, Artificial
  Synthetic oligonucleotide
acttgactcatgtggtctgcatttttgttaccccacccgacaattaatcctcct

SEQ ID NO: 522604 - DNA, 54 bp, Artificial
  Synthetic oligonucleotide
ccttttgggttgacacctattgcggtacctgtaatgcaagtgtcagagtgtcta

SEQ ID NO: 522605 - DNA, 54 bp, Artificial
  Synthetic oligonucleotide
ccttcagatttagttccaattgacgccctaagccctggtagcagttcaatagta

SEQ ID NO: 522606 - DNA, 54 bp, Artificial
  Synthetic oligonucleotide
cgtagaagatgcctatagatacatacagtcttgggccactaagtgtcctactgc

SEQ ID NO: 522607 - DNA, 54 bp, Artificial
  Synthetic oligonucleotide
cgtatccatgttggtcatttatagatgtgcatttgagaaacgcattggatggta

SEQ ID NO: 522608 - DNA, 54 bp, Artificial
  Synthetic oligonucleotide
ctctgcacacaggacggcatacacagcctagagagccttctgtgccgaaataca

SEQ ID NO: 522609 - DNA, 54 bp, Artificial
  Synthetic oligonucleotide
gtggtgtgtagagacggttattttcatcttgttagaagtcagtggagagcattg

SEQ ID NO: 522610 - DNA, 54 bp, Artificial
  Synthetic oligonucleotide
ggaatctcatgcggcgggagagcgtcctgctatactttgccagacaggctggta

SEQ ID NO: 522611 - DNA, 54 bp, Artificial
  Synthetic oligonucleotide
accccggagattccagttcaaatcaggcacaagcaactataacaccttctgtat

SEQ ID NO: 522612 - DNA, 54 bp, Artificial
  Synthetic oligonucleotide
gggggggacttcagaggaggaccacaccccccccgactctcacttaccttactt

SEQ ID NO: 522613 - DNA, 54 bp, Artificial
  Synthetic oligonucleotide
ctttaggtattggctccactggtcatcctctactaaacaaactttatgacacag

SEQ ID NO: 522614 - DNA, 53 bp, Artificial
  Synthetic oligonucleotide
aagtatattagtccaacgaaagatgcagacatagatttgagtccgcaattgca

SEQ ID NO: 522615 - DNA, 53 bp, Artificial
  Synthetic oligonucleotide
agcagatcgtttattgcaatggctgggaagtgttatatatttgggaggtttgg

SEQ ID NO: 522616 - DNA, 53 bp, Artificial
  Synthetic oligonucleotide
cggggattaggggaaatgtaaccacccgcagtggggttcagttaggttcgcag

SEQ ID NO: 522617 - DNA, 53 bp, Artificial
  Synthetic oligonucleotide
ctcctctggagcttaagaactcctacatacaggacggtgacatgttggagata

SEQ ID NO: 522618 - DNA, 53 bp, Artificial
  Synthetic oligonucleotide
ccttggtggatcctaaaatatatgatcctaacagagaacgtttggtttggaga

SEQ ID NO: 522619 - DNA, 53 bp, Artificial
  Synthetic oligonucleotide
ttagtcgtgcaagagatttatacaacaggcgtgttcaacaagtgcgaacgcgc

SEQ ID NO: 522620 - DNA, 53 bp, Artificial
  Synthetic oligonucleotide
agcacgtgcgggactgctccgttatggtcaagcactataaaagagccataatg

SEQ ID NO: 522621 - DNA, 53 bp, Artificial
  Synthetic oligonucleotide
tgatgggcagcccataaccgattgtacacttgtgtctagcacctgcacttcac

SEQ ID NO: 522622 - DNA, 53 bp, Artificial
  Synthetic oligonucleotide
ttccaggggtcagcccctaggcgtgggcctatcgggccatgtccaatacaaca

SEQ ID NO: 522623 - DNA, 53 bp, Artificial
  Synthetic oligonucleotide
tcatgggccaccagacactgggaaatcgtattttgtatactcattagtgcaat

SEQ ID NO: 522624 - DNA, 53 bp, Artificial
  Synthetic oligonucleotide
actttatacatctaggtttgaatttgaaaatcccgcctttgaggaggacgtca

SEQ ID NO: 522625 - DNA, 53 bp, Artificial
  Synthetic oligonucleotide
gttagatgtgggagctgtatgaagactctaactgactctgagaaggactactg

SEQ ID NO: 522626 - DNA, 53 bp, Artificial
  Synthetic oligonucleotide
tgccgggttgtagtggggattggtatgtggtgcgtgaagctgaatgtagtgac

SEQ ID NO: 522627 - DNA, 53 bp, Artificial
  Synthetic oligonucleotide
ctcctaccactagcacacctagtcaacgattggacagaactataaatagggca

SEQ ID NO: 522628 - DNA, 53 bp, Artificial
  Synthetic oligonucleotide
catgccaacagtcccactgccccgtagactgcacgctgaaacatactcagggc

SEQ ID NO: 522629 - DNA, 53 bp, Artificial
  Synthetic oligonucleotide
cagccccttctatagttacattaagtgaaggcagtgtgcctgatgtcacagta

SEQ ID NO: 522630 - DNA, 53 bp, Artificial
  Synthetic oligonucleotide
caggtaagtacaagctgaggcaaacgatttatgagtcaaaaggttggcacaac

SEQ ID NO: 522631 - DNA, 53 bp, Artificial
  Synthetic oligonucleotide
acctagtgggtctttggtgtccagtgattccaatatgttcaacagaccttatt

SEQ ID NO: 522632 - DNA, 53 bp, Artificial
  Synthetic oligonucleotide
gtgccagatacgaggctgatcactattttcaatgtgcatgtaaagttcaagtt

SEQ ID NO: 522633 - DNA, 53 bp, Artificial
  Synthetic oligonucleotide
aacaaaccgttttggttgcaaagagctcagggtacaaacaatggtatatgttg

SEQ ID NO: 522634 - DNA, 53 bp, Artificial
  Synthetic oligonucleotide
caggggccatctcaactggtctcatatgagtttagtaaccaggcttttgaccc

SEQ ID NO: 522635 - DNA, 53 bp, Artificial
  Synthetic oligonucleotide
caggcccatagatgttgtagatccttccaattctgctatagtacctctatcag

SEQ ID NO: 522636 - DNA, 53 bp, Artificial
  Synthetic oligonucleotide
actgggatcgttgggggtgccgttgtgataagctgcctatatagccttgtatt

SEQ ID NO: 522637 - DNA, 53 bp, Artificial
  Synthetic oligonucleotide
gggacctttaagaagtacacctttatctgaccgcgtcatctccagggcgcgag

SEQ ID NO: 522638 - DNA, 52 bp, Artificial
  Synthetic oligonucleotide
attaccattgaacccgtgggtcccgccgacccgtccattgtaaccttggtgg

SEQ ID NO: 522639 - DNA, 52 bp, Artificial
  Synthetic oligonucleotide
ctccattacaaagtaccctgacatgcttaaaatggctgcagaccgttatggg

SEQ ID NO: 522640 - DNA, 52 bp, Artificial
  Synthetic oligonucleotide
ttgcaaacttatagagtagactccctttgttctatctgtggaagtcgtgtaa

SEQ ID NO: 522641 - DNA, 52 bp, Artificial
  Synthetic oligonucleotide
cagatgtatatgaggttgtaaaaactccactgacaacacctgtttccactag

SEQ ID NO: 522642 - DNA, 52 bp, Artificial
  Synthetic oligonucleotide
acggatcagccagcagaccagcttccagaagacgaggagctactaacgggcc

SEQ ID NO: 522643 - DNA, 52 bp, Artificial
  Synthetic oligonucleotide
aagatgacccgtgcacgtaggaaacgtgcggcaatctcggacatttaccctt

SEQ ID NO: 522644 - DNA, 52 bp, Artificial
  Synthetic oligonucleotide
aagatagaccgttatcgttcactgattgtaaaggtaagataagttcactgca

SEQ ID NO: 522645 - DNA, 52 bp, Artificial
  Synthetic oligonucleotide
ctaccacatccccaccagcccaccacccttcggaggtgagcagcacagagga

SEQ ID NO: 522646 - DNA, 52 bp, Artificial
  Synthetic oligonucleotide
caactagaagtggattggaaataggacaaagagtgcacttatactttgattt

SEQ ID NO: 522647 - DNA, 52 bp, Artificial
  Synthetic oligonucleotide
agacattattttaccaggaatggtgtcgttggtgacagcatacctcagcttc

SEQ ID NO: 522648 - DNA, 52 bp, Artificial
  Synthetic oligonucleotide
gttaagcaacgagtcgttgtcaccggatgatgcaccagaggaggagcacctg

SEQ ID NO: 522649 - DNA, 52 bp, Artificial
  Synthetic oligonucleotide
gaaggaacaactttatgccagacatatgttaaacagggctggaaaggttgga

SEQ ID NO: 522650 - DNA, 52 bp, Artificial
  Synthetic oligonucleotide
ctgttgtctgtgcagggcacaaccgataacctcacaagcaacagccttacac

SEQ ID NO: 522651 - DNA, 52 bp, Artificial
  Synthetic oligonucleotide
ccttatgcaaaagaagagtggacattggcggacactagtgctgatcgcttct

SEQ ID NO: 522652 - DNA, 52 bp, Artificial
  Synthetic oligonucleotide
agggccaggcaaggcacatactcccccacctgcatcctctagccttttctcc

SEQ ID NO: 522653 - DNA, 52 bp, Artificial
  Synthetic oligonucleotide
ccataaggtatagcactactggactctggacagtgcattataaatcccatgt

SEQ ID NO: 522654 - DNA, 52 bp, Artificial
  Synthetic oligonucleotide
ccagtttcggtatttgtccttgtctttgcaacactgtgaattatatgtgacc

SEQ ID NO: 522655 - DNA, 52 bp, Artificial
  Synthetic oligonucleotide
gtattgaagacaactacagatatattcgctctttggcgactcgttgtcctcc

SEQ ID NO: 522656 - DNA, 52 bp, Artificial
  Synthetic oligonucleotide
gtatctcccccctacccctgtttccaaggtcctaagcacagattcctatatt

SEQ ID NO: 522657 - DNA, 51 bp, Artificial
  Synthetic oligonucleotide
tggcattgtacaacgagcaagtaactgaggaatgcgaaacagcaattgcag

SEQ ID NO: 522658 - DNA, 51 bp, Artificial
  Synthetic oligonucleotide
acctattgagctacaattattaggcgaacattctggcgatagtactattgt

SEQ ID NO: 522659 - DNA, 51 bp, Artificial
  Synthetic oligonucleotide
ctctgcaattgcatatgagtatgctttgttagctacagaagatgtaaacgc

SEQ ID NO: 522660 - DNA, 51 bp, Artificial
  Synthetic oligonucleotide
tgggaaacatttgtctttagtacctgtgaggtgtaggtggtgcttaggact

SEQ ID NO: 522661 - DNA, 51 bp, Artificial
  Synthetic oligonucleotide
catatcagatcagcatttaggtcacattttgaggtgagcactagtttcatg

SEQ ID NO: 522662 - DNA, 51 bp, Artificial
  Synthetic oligonucleotide
ctctgagtccactccaacatctggggagtcctcaatggctgatcacataat

SEQ ID NO: 522663 - DNA, 51 bp, Artificial
  Synthetic oligonucleotide
tggttggaggagctagagaagaaatagaattacaaccagtacaaagtaggt

SEQ ID NO: 522664 - DNA, 51 bp, Artificial
  Synthetic oligonucleotide
tagaggtgccacttatgcttatggttcactagacagcttgtaatacaaatc

SEQ ID NO: 522665 - DNA, 51 bp, Artificial
  Synthetic oligonucleotide
gagcttccagatggctctgactcagtgaatgagctacttgacaccgatagt

SEQ ID NO: 522666 - DNA, 51 bp, Artificial
  Synthetic oligonucleotide
cctgcaggtggccagtcaattgatttcctactacatcctggcctgttccct

SEQ ID NO: 522667 - DNA, 51 bp, Artificial
  Synthetic oligonucleotide
ggagaccaaattcggtctgctagatgatgctacatatggagcatggcagta

SEQ ID NO: 522668 - DNA, 51 bp, Artificial
  Synthetic oligonucleotide
ggggtcgtttacctcgtcccttagtggccacaccagcctgcccggcaatgc

SEQ ID NO: 522669 - DNA, 51 bp, Artificial
  Synthetic oligonucleotide
ggaaaatgacaagtggaaatacctgcatagtagagtcagaatgtacagctt

SEQ ID NO: 522670 - DNA, 51 bp, Artificial
  Synthetic oligonucleotide
gagttggctgttatacacgattcagcagcaaatacagttgtaatagatgac

SEQ ID NO: 522671 - DNA, 51 bp, Artificial
  Synthetic oligonucleotide
taaggtagatgtaccaaaagtgtctggaaatcaatacagagcattacgagt

SEQ ID NO: 522672 - DNA, 51 bp, Artificial
  Synthetic oligonucleotide
ggaccagtatatgagaagctcttttgatggcaaccctgtgtccttagactg

SEQ ID NO: 522673 - DNA, 51 bp, Artificial
  Synthetic oligonucleotide
gatagtgcatggtttattgtgcatgaagctgattgtgtggatgatatagac

SEQ ID NO: 522674 - DNA, 51 bp, Artificial
  Synthetic oligonucleotide
ctcctattgttcctgcacgtcccaatatattaatcgatgctgtaggtcccc

SEQ ID NO: 522675 - DNA, 51 bp, Artificial
  Synthetic oligonucleotide
gatgcactgcaagatcagataatgactctttatgaagagggacctactgac

SEQ ID NO: 522676 - DNA, 51 bp, Artificial
  Synthetic oligonucleotide
gggcctacagaggtgttacctgttgaccctgcagggccatccatagtacct

SEQ ID NO: 522677 - DNA, 51 bp, Artificial
  Synthetic oligonucleotide
tcaccttatggagacgaaccatggagaatcacagatgtgagcttagagatg

SEQ ID NO: 522678 - DNA, 51 bp, Artificial
  Synthetic oligonucleotide
ccagcgccagcagatattagtgtttatgtggaccctaactattctggtgtt

SEQ ID NO: 522679 - DNA, 51 bp, Artificial
  Synthetic oligonucleotide
gtctaaaacgaaagttcagaaaaagtccgcctgaacagtcagtggcggctc

SEQ ID NO: 522680 - DNA, 51 bp, Artificial
  Synthetic oligonucleotide
ccagaaaacgaggccttacccacattggtttacaaccagtgcctacattaa

SEQ ID NO: 522681 - DNA, 51 bp, Artificial
  Synthetic oligonucleotide
aatattggtttgtcattgcatacggacagtacctgtacggtaaggcttcct

SEQ ID NO: 522682 - DNA, 51 bp, Artificial
  Synthetic oligonucleotide
gtactactgctatacatgagctaactatgttttccacaccagaaagccatg

SEQ ID NO: 522683 - DNA, 51 bp, Artificial
  Synthetic oligonucleotide
gacgcccttagccctggtagtagttccatagtaccccttcaagaagccggt

SEQ ID NO: 522684 - DNA, 51 bp, Artificial
  Synthetic oligonucleotide
aagttctagttgtgaggatctgctaagagccaataacaggttagcagcgtg

SEQ ID NO: 522685 - DNA, 51 bp, Artificial
  Synthetic oligonucleotide
gtctgttttttttgcgtggacactcatccaaccgataccggttgacagctt

SEQ ID NO: 522686 - DNA, 51 bp, Artificial
  Synthetic oligonucleotide
tgaccagtttcctcttggacgtaagttccttgcacaatctaacctttcccc

SEQ ID NO: 522687 - DNA, 51 bp, Artificial
  Synthetic oligonucleotide
ccacctaaggtggactggtcttatggcaactttgcagatttgtaatgctac

SEQ ID NO: 522688 - DNA, 51 bp, Artificial
  Synthetic oligonucleotide
tgagatacccgaaaggagtagagaagtcatatggcaaccttgacagtcttt

SEQ ID NO: 522689 - DNA, 51 bp, Artificial
  Synthetic oligonucleotide
gcccaaggggataacaatcacaatgggtgctctggactcactataactctg

SEQ ID NO: 522690 - DNA, 51 bp, Artificial
  Synthetic oligonucleotide
agtaacaggagacatgccatcttggatactgaagctaattagcatacagga

SEQ ID NO: 522691 - DNA, 50 bp, Artificial
  Synthetic oligonucleotide
cagatgtattagctcacattcatgctatgaatcctagtattctcgaagag

SEQ ID NO: 522692 - DNA, 50 bp, Artificial
  Synthetic oligonucleotide
aggagccaacaatggtatactttggggtaaccaatgttttataacagtgg

SEQ ID NO: 522693 - DNA, 50 bp, Artificial
  Synthetic oligonucleotide
tcacatgtgtactttggaacacctagtggttctctagtttccagtgaatc

SEQ ID NO: 522694 - DNA, 50 bp, Artificial
  Synthetic oligonucleotide
actgtttgacgaggatgcacaaacatatggacagtcaggacaatggactg

SEQ ID NO: 522695 - DNA, 50 bp, Artificial
  Synthetic oligonucleotide
aaactgggtgacactgaaaatccaacggcctatcaaaatgtcttaccaag

SEQ ID NO: 522696 - DNA, 50 bp, Artificial
  Synthetic oligonucleotide
acaggtacctgttagaagttttgaatttgtgactcagccttctcgattgg

SEQ ID NO: 522697 - DNA, 50 bp, Artificial
  Synthetic oligonucleotide
tctgccagctgcggatctattcccagcttctacggttataagtgtggatg

SEQ ID NO: 522698 - DNA, 50 bp, Artificial
  Synthetic oligonucleotide
tcaaagcactgacgatagacaaaatacttctgtggatcctaagcaaacac

SEQ ID NO: 522699 - DNA, 50 bp, Artificial
  Synthetic oligonucleotide
ttgtgtacgtgcttcagaacaagctatacgcagtcttcaagtgcttctct

SEQ ID NO: 522700 - DNA, 50 bp, Artificial
  Synthetic oligonucleotide
cagacgttcttgtcccagacagtccttttactcctttacaaccaccttat

SEQ ID NO: 522701 - DNA, 50 bp, Artificial
  Synthetic oligonucleotide
ttgttgccaacaataatcgcgccatacttgttcctgcaggctaatctttt

SEQ ID NO: 522702 - DNA, 50 bp, Artificial
  Synthetic oligonucleotide
ggggagatgccaagctggatcctaaagcagatctgtatacaggagcagtt

SEQ ID NO: 522703 - DNA, 50 bp, Artificial
  Synthetic oligonucleotide
gattagtatggcaattgaagggagttcagatagatagaggtggtcctcta

SEQ ID NO: 522704 - DNA, 50 bp, Artificial
  Synthetic oligonucleotide
aaacacagctatttatagtaggttgtacaccttcattaggggaacattgg

SEQ ID NO: 522705 - DNA, 50 bp, Artificial
  Synthetic oligonucleotide
cgcgaatttaacgtgcaaccgatatcggttgcgggaggaagttttattta

SEQ ID NO: 522706 - DNA, 50 bp, Artificial
  Synthetic oligonucleotide
gagcgatgataatcgccaggacgtatctttagaccctaagcaaacccaac

SEQ ID NO: 522707 - DNA, 50 bp, Artificial
  Synthetic oligonucleotide
aagacgacaaagatcatccgaaagtgacccacggagatctggaccgcttg

SEQ ID NO: 522708 - DNA, 50 bp, Artificial
  Synthetic oligonucleotide
gagcgagatacagattctgatatctcggacctattagacgattgtgaact

SEQ ID NO: 522709 - DNA, 50 bp, Artificial
  Synthetic oligonucleotide
gcccctctgtattataccccatccctgacaattgttgtcacatatacaga

SEQ ID NO: 522710 - DNA, 50 bp, Artificial
  Synthetic oligonucleotide
tagcctttgaatatgcaaagctagccacggcagataggaatgcaagagca

SEQ ID NO: 522711 - DNA, 50 bp, Artificial
  Synthetic oligonucleotide
actaacaagttgggagctgtgagggtcggcttggaatccctaggtgcttc

SEQ ID NO: 522712 - DNA, 50 bp, Artificial
  Synthetic oligonucleotide
actaggtcgtagaggaacgatacgcaccagaagtggtacacaaattggcc

SEQ ID NO: 522713 - DNA, 50 bp, Artificial
  Synthetic oligonucleotide
cccatacctaaagaaactattgaaatgcagcaactaggagaagctagtgg

SEQ ID NO: 522714 - DNA, 50 bp, Artificial
  Synthetic oligonucleotide
agcgaaatggtgcagtgggcatatgataatgggttcgacactgaaagcca

SEQ ID NO: 522715 - DNA, 50 bp, Artificial
  Synthetic oligonucleotide
aactcctatcgaaccacctccggttagggtaatctatagtgattctccag

SEQ ID NO: 522716 - DNA, 50 bp, Artificial
  Synthetic oligonucleotide
ctactcctacattacaagtgtcacaatatagggcaaaggaagctatacac

SEQ ID NO: 522717 - DNA, 50 bp, Artificial
  Synthetic oligonucleotide
cagggggtgaaaacattgagctaacgtactttgggtcccctaggacaagt

SEQ ID NO: 522718 - DNA, 50 bp, Artificial
  Synthetic oligonucleotide
cccctcaaggaccagacattagtacggtggatgtcacatcaagttctgat

SEQ ID NO: 522719 - DNA, 50 bp, Artificial
  Synthetic oligonucleotide
gggtagaagatgcgtacaagtatattacttcatgggccacgaaatgtcct

SEQ ID NO: 522720 - DNA, 50 bp, Artificial
  Synthetic oligonucleotide
agaaccctccagcacaggtggagaacacagactatagagttgatgttgct

SEQ ID NO: 522721 - DNA, 50 bp, Artificial
  Synthetic oligonucleotide
ggtgatgtttacagtataccaacacttccaccaggtactgccttacgaat

SEQ ID NO: 522722 - DNA, 50 bp, Artificial
  Synthetic oligonucleotide
tgaggcatttttacgaagcaattgtcaggctaaatttgtaaaggattgta

SEQ ID NO: 522723 - DNA, 50 bp, Artificial
  Synthetic oligonucleotide
agagtttcttcacaatacacctaaacataattgcatacttatttatggac

SEQ ID NO: 522724 - DNA, 50 bp, Artificial
  Synthetic oligonucleotide
ctctgtattatggtgcccgccaaagaggcatcacaaggattggatataat

SEQ ID NO: 522725 - DNA, 50 bp, Artificial
  Synthetic oligonucleotide
gtatgttgaatggcacaaaacgactaagaacagacataactacatctaat

SEQ ID NO: 522726 - DNA, 50 bp, Artificial
  Synthetic oligonucleotide
gttaaccaccgaggtactgcagtatctgcacacaatggacccaagcattc

SEQ ID NO: 522727 - DNA, 60 bp, Artificial
  Synthetic oligonucleotide
gatatatccaccgagttggggaacgtgaacaattcaatcagtaatgccctagacaagcta

SEQ ID NO: 522728 - DNA, 60 bp, Artificial
  Synthetic oligonucleotide
gatataatgaggtatacaataattcaaaaagccatacagatgaacttcaagcttacaata

SEQ ID NO: 522729 - DNA, 60 bp, Artificial
  Synthetic oligonucleotide
gttgaacctgttcttctactacaagtcaggactaatgaaaatagtaaactgattcacctt

SEQ ID NO: 522730 - DNA, 60 bp, Artificial
  Synthetic oligonucleotide
caagatgccctaatgactgcttattcggggtctattcagacgtctggcctcttagcctaa

SEQ ID NO: 522731 - DNA, 60 bp, Artificial
  Synthetic oligonucleotide
caaggcaaggagtggtatattcctcttcccaaccatatcatgactaaaggagcttttcta

SEQ ID NO: 522732 - DNA, 60 bp, Artificial
  Synthetic oligonucleotide
ccttttcatctcaaattatactcataagaagtgcatatagtgacccctctaatcatgaag

SEQ ID NO: 522733 - DNA, 60 bp, Artificial
  Synthetic oligonucleotide
ctatatcaggagcagccctagttactgcagggatagcattagccgagacaagaaccttgg

SEQ ID NO: 522734 - DNA, 60 bp, Artificial
  Synthetic oligonucleotide
cggtgtcagagttactgcaatggttcaaggagacaatcaagccatagctgttactacaag

SEQ ID NO: 522735 - DNA, 60 bp, Artificial
  Synthetic oligonucleotide
cgggaaaatcgcagggtcgttgtgggctcagggaattgtcatatgcaacctcaccacact

SEQ ID NO: 522736 - DNA, 60 bp, Artificial
  Synthetic oligonucleotide
gtcactgattgacagacctaataatcattgtgtcattagaaaaaacttagacctgctgag

SEQ ID NO: 522737 - DNA, 60 bp, Artificial
  Synthetic oligonucleotide
gcctcgctttgcttccatggggaaaatctcacctttacttatctctgtagatgaaccaat

SEQ ID NO: 522738 - DNA, 60 bp, Artificial
  Synthetic oligonucleotide
gaaatggacaccgaatccaacaacggcacaacatctgacattctgtaccctgaatgtcac

SEQ ID NO: 522739 - DNA, 60 bp, Artificial
  Synthetic oligonucleotide
tgccctaatcccctattagccggtgtggttgatccgaactacaaccaggaactggaacta

SEQ ID NO: 522740 - DNA, 60 bp, Artificial
  Synthetic oligonucleotide
accacatattagagttgttaagataggggatccacccaaacatgggactagatatctgga

SEQ ID NO: 522741 - DNA, 60 bp, Artificial
  Synthetic oligonucleotide
ggatgcataaacgactagaaaggtcagttatctatgttgcggatcctaattgccccccta

SEQ ID NO: 522742 - DNA, 60 bp, Artificial
  Synthetic oligonucleotide
gggacacagtctatccagcttcaaacctgttatatcgcactaatggatctcatgattcga

SEQ ID NO: 522743 - DNA, 60 bp, Artificial
  Synthetic oligonucleotide
tgaattattgggatgacacagacattgtacatgcaatatcaatatgtactgcagttacaa

SEQ ID NO: 522744 - DNA, 59 bp, Artificial
  Synthetic oligonucleotide
acgggatctactatcaggtgttggagctaacaatagcggagtctgcataacaaatagcg

SEQ ID NO: 522745 - DNA, 59 bp, Artificial
  Synthetic oligonucleotide
cacactattgtactcttgtagaatcttaacgagtgtctaatgtcagattttagcaacac

SEQ ID NO: 522746 - DNA, 59 bp, Artificial
  Synthetic oligonucleotide
agggtaccctatgtcggatcaactaccgaagaaagatcagagataaagttaggatccgt

SEQ ID NO: 522747 - DNA, 59 bp, Artificial
  Synthetic oligonucleotide
agtcaagactagagagatggtttatgaaaagacaaccgactggatgttcgggagtgatc

SEQ ID NO: 522748 - DNA, 59 bp, Artificial
  Synthetic oligonucleotide
ccgaaagttgacgaaagatcagattatgcatcaacaggtattgaggatattgtactcga

SEQ ID NO: 522749 - DNA, 58 bp, Artificial
  Synthetic oligonucleotide
ggatatcagaggtaacagtctatacataatcttaacttacgcttcaagcatagtgatg

SEQ ID NO: 522750 - DNA, 58 bp, Artificial
  Synthetic oligonucleotide
cgagttggtactaatgtattgtgatgtagttgaaggaaggtggaatataagttcatgt

SEQ ID NO: 522751 - DNA, 58 bp, Artificial
  Synthetic oligonucleotide
cggaatttacacgaatcacatacataacttatacctaggataaaaggaatcaaccacg

SEQ ID NO: 522752 - DNA, 57 bp, Artificial
  Synthetic oligonucleotide
gcaagtaattcgacaatgttcaagtagtacacagataagggaacagactatgaattc

SEQ ID NO: 522753 - DNA, 57 bp, Artificial
  Synthetic oligonucleotide
gtgttcagaattttacaggtacattgaacactatcctccatttacatgctgatgttc

SEQ ID NO: 522754 - DNA, 57 bp, Artificial
  Synthetic oligonucleotide
gaggtatagaacctctaaatccagacaatttctggagatgtacatctggtaacccat

SEQ ID NO: 522755 - DNA, 57 bp, Artificial
  Synthetic oligonucleotide
ctaagaaagtgattgtctactcactcatcaagttcaaagataccaaaagttcagagc

SEQ ID NO: 522756 - DNA, 57 bp, Artificial
  Synthetic oligonucleotide
gaccaatcctgcattagaatcaattagtattcaggctcttaaaagtcttctaggatc

SEQ ID NO: 522757 - DNA, 57 bp, Artificial
  Synthetic oligonucleotide
ggacctagaaaattaccagatattacctttaatgctaggttagaaattggtgtaccg

SEQ ID NO: 522758 - DNA, 56 bp, Artificial
  Synthetic oligonucleotide
gaaaaggtatcaaataggatggccacaaattgatgaaaactcgatcgtaaacgatg

SEQ ID NO: 522759 - DNA, 56 bp, Artificial
  Synthetic oligonucleotide
ccagtccctttcataaatgtacctcaaatgaataagtttgtatatgacccagaacc

SEQ ID NO: 522760 - DNA, 56 bp, Artificial
  Synthetic oligonucleotide
gggtattatgttagcttaggatttgagaacccaccaaatgatgacgatataacatc

SEQ ID NO: 522761 - DNA, 56 bp, Artificial
  Synthetic oligonucleotide
gatataccttgttccgacaatttccagatgttaattaagagaaaagagatcaggcc

SEQ ID NO: 522762 - DNA, 55 bp, Artificial
  Synthetic oligonucleotide
gcttagctgataggacagtatttgtatccagagatgcagaacatgcagtatgcga

SEQ ID NO: 522763 - DNA, 55 bp, Artificial
  Synthetic oligonucleotide
gctctcttggaatctcctgaactgatggaatttgctccagctaattacccactat

SEQ ID NO: 522764 - DNA, 55 bp, Artificial
  Synthetic oligonucleotide
ggacaatcagcacaattccttacctataccttactgcagtggaggtgggtgtcag

SEQ ID NO: 522765 - DNA, 55 bp, Artificial
  Synthetic oligonucleotide
ggacgtatatatcatcccgaaccccggagaacattcgattagatcagctgctcga

SEQ ID NO: 522766 - DNA, 55 bp, Artificial
  Synthetic oligonucleotide
ggaggggaataaactattagtgaaacagatcagaataagaacgctaggacatgcg

SEQ ID NO: 522767 - DNA, 55 bp, Artificial
  Synthetic oligonucleotide
gcgctgaacattgattacctcagaccaccagagacaataatccgaaagcataccc

SEQ ID NO: 522768 - DNA, 55 bp, Artificial
  Synthetic oligonucleotide
ggatgacacttcctcagggaggaaattatctatcacatcaattgaggttatttgg

SEQ ID NO: 522769 - DNA, 55 bp, Artificial
  Synthetic oligonucleotide
gcgaggttatactgtctctacataattgaagtgggtgactcagtcattggggact

SEQ ID NO: 522770 - DNA, 55 bp, Artificial
  Synthetic oligonucleotide
ggaaggtccagatcaatctagcagcaattcttcacactacattgtcggggatcct

SEQ ID NO: 522771 - DNA, 55 bp, Artificial
  Synthetic oligonucleotide
gcgaccgagagagaaatcaaagtgtacacgaactccataaccggaagtattgctg

SEQ ID NO: 522772 - DNA, 55 bp, Artificial
  Synthetic oligonucleotide
gcctcggcgttcatacccagttacgacaatatatctcctgctgttcttcgatccc

SEQ ID NO: 522773 - DNA, 55 bp, Artificial
  Synthetic oligonucleotide
ggatgctgaggcttttgtcaaatgtcctagtaagcttacaacaaatatggaatac

SEQ ID NO: 522774 - DNA, 55 bp, Artificial
  Synthetic oligonucleotide
gaaaatcggatctttattagttgtcaagttattaccaagggtcggtgactatacg

SEQ ID NO: 522775 - DNA, 55 bp, Artificial
  Synthetic oligonucleotide
gaactccaatgactataccattatccatagtctcatcctctaggacgttctcccc

SEQ ID NO: 522776 - DNA, 55 bp, Artificial
  Synthetic oligonucleotide
gaagcagtcttagagcttaaagaggccacaggacagattgctgtcgcactagaca

SEQ ID NO: 522777 - DNA, 55 bp, Artificial
  Synthetic oligonucleotide
gaagggctgaacaagaccctgtggagaagtgaatgcagaatagagaaggttcaag

SEQ ID NO: 522778 - DNA, 55 bp, Artificial
  Synthetic oligonucleotide
gaccttgctggaatgttggcacaggttaggtcaaagttaggtttgacaaacagtg

SEQ ID NO: 522779 - DNA, 55 bp, Artificial
  Synthetic oligonucleotide
gacgaccacctggagatgggaattggagtacgctagcagcagatccttatgcagt

SEQ ID NO: 522780 - DNA, 55 bp, Artificial
  Synthetic oligonucleotide
gactgcaatgaagcaccagggaacagttgaccctaaattggccttagagcttgga

SEQ ID NO: 522781 - DNA, 55 bp, Artificial
  Synthetic oligonucleotide
gacttatggggccccactgttatagtgagggcaaatgggactatgagtaagtacg

SEQ ID NO: 522782 - DNA, 55 bp, Artificial
  Synthetic oligonucleotide
gacttgcacggacctacactattcctggaatatactgggaaattgacaaaagccc

SEQ ID NO: 522783 - DNA, 55 bp, Artificial
  Synthetic oligonucleotide
gagagtgttcttctgtcatgtgggttagaattgaacggacctaagattatacagc

SEQ ID NO: 522784 - DNA, 55 bp, Artificial
  Synthetic oligonucleotide
gagcttggactgtcggtttaccaatctattgccaagagtgcaatatatgtgggat

SEQ ID NO: 522785 - DNA, 55 bp, Artificial
  Synthetic oligonucleotide
gaggaactgccaagtgttgttagagagcctcttggcttgccatgtgtgtgactac

SEQ ID NO: 522786 - DNA, 55 bp, Artificial
  Synthetic oligonucleotide
gagggagatgaatatctaggtttgatatggtctccatacaatattggagctcaag

SEQ ID NO: 522787 - DNA, 55 bp, Artificial
  Synthetic oligonucleotide
gatcagtcaaattcgatatcagggttacctggtccactattacccagccgtgacc

SEQ ID NO: 522788 - DNA, 55 bp, Artificial
  Synthetic oligonucleotide
gatgccacagctggtaggactggtcctccaagacaggcaaacccaaactcggatg

SEQ ID NO: 522789 - DNA, 55 bp, Artificial
  Synthetic oligonucleotide
gcactgagcatttgagggtgatgtctgaccttgctcctgaaatcagaagattgaa

SEQ ID NO: 522790 - DNA, 55 bp, Artificial
  Synthetic oligonucleotide
gcagtgtgctctctgattaagatctcgattgttccagtaggtggatcatttacac

SEQ ID NO: 522791 - DNA, 55 bp, Artificial
  Synthetic oligonucleotide
gcatacgaactgtctaagacacgtgtaaatataactttagatcagctcagagtac

SEQ ID NO: 522792 - DNA, 55 bp, Artificial
  Synthetic oligonucleotide
gcatgactgagatattcaaccttgatgagagctcatggtcagtcaaagggatact

SEQ ID NO: 522793 - DNA, 55 bp, Artificial
  Synthetic oligonucleotide
gccaccgctgggtgcagtttagtcaaagttttccctataggtgttattgtctcct

SEQ ID NO: 522794 - DNA, 55 bp, Artificial
  Synthetic oligonucleotide
gccgatcttatttataagattcccagtcagataccattgcccagataacagcaac

SEQ ID NO: 522795 - DNA, 55 bp, Artificial
  Synthetic oligonucleotide
gccgcattaatccccgccagcttgggaggactcaactatatgaacatgtctcgat

SEQ ID NO: 522796 - DNA, 55 bp, Artificial
  Synthetic oligonucleotide
gcctaattacaaagaggagtgtgatctgcaaccaagattatgcaacacccatgac

SEQ ID NO: 522797 - DNA, 55 bp, Artificial
  Synthetic oligonucleotide
gtggcattagtccttgacatcaaacgttctcctgggacaagacccagaatagctg

SEQ ID NO: 522798 - DNA, 55 bp, Artificial
  Synthetic oligonucleotide
gtgtatcgctggaactatctaggatgattaaacctgatgcggtttatcaagcacc

SEQ ID NO: 522799 - DNA, 55 bp, Artificial
  Synthetic oligonucleotide
gtgtctaagactaattcaccttctagtccccaggaaactacactatctgttgggg

SEQ ID NO: 522800 - DNA, 55 bp, Artificial
  Synthetic oligonucleotide
gtgtgagagagcccttgagtaggtacaatgagaccgtgaggagattgcttttacc

SEQ ID NO: 522801 - DNA, 55 bp, Artificial
  Synthetic oligonucleotide
gtgtgtatgcgtggtacttaatacgtcaaaccatgcggtacatggccctccagag

SEQ ID NO: 522802 - DNA, 55 bp, Artificial
  Synthetic oligonucleotide
gttgagtccaaagatcctgagagaattaacaaaatggtccgtttcatgattcagg

SEQ ID NO: 522803 - DNA, 55 bp, Artificial
  Synthetic oligonucleotide
gttttatgttgaaggaagtgtgttaaacctaggagacccttcaacagtcaggtcg

SEQ ID NO: 522804 - DNA, 55 bp, Artificial
  Synthetic oligonucleotide
taaagaaggcttgaccccagatgttgaatcatggagtgacactagacggcacctg

SEQ ID NO: 522805 - DNA, 55 bp, Artificial
  Synthetic oligonucleotide
taaggggactatcatcaacgggtacagaaagaagaatgctggcgtctggcctaga

SEQ ID NO: 522806 - DNA, 55 bp, Artificial
  Synthetic oligonucleotide
tacaagagtttagatctacttaagaatctagtcctgattcctgcaccattagggg

SEQ ID NO: 522807 - DNA, 55 bp, Artificial
  Synthetic oligonucleotide
tagataccaggaaagaggcttgggttacacagaatcagagatcaagaacacaacc

SEQ ID NO: 522808 - DNA, 55 bp, Artificial
  Synthetic oligonucleotide
tagccactctgagcaagtggatcaccggagacactaaaatagtagagtctgtggt

SEQ ID NO: 522809 - DNA, 55 bp, Artificial
  Synthetic oligonucleotide
tatattcgcattcacgatgtatttacaagggaagacaacacgtattgacccggcg

SEQ ID NO: 522810 - DNA, 55 bp, Artificial
  Synthetic oligonucleotide
tcaaggaagcagtcagccagacagaattcatgagagcaggacagagaccggaaag

SEQ ID NO: 522811 - DNA, 55 bp, Artificial
  Synthetic oligonucleotide
tcagtccaacttaggcagagatggcagggccagtgcagcaacgactactttgaca

SEQ ID NO: 522812 - DNA, 55 bp, Artificial
  Synthetic oligonucleotide
tcatgggttctgataatctagacaaccttgatatctatcagcaacgagcgttact

SEQ ID NO: 522813 - DNA, 55 bp, Artificial
  Synthetic oligonucleotide
tccatgatatccaataaaccccagacaggcacgctgcttatgggatcagacacac

SEQ ID NO: 522814 - DNA, 55 bp, Artificial
  Synthetic oligonucleotide
tcccaagcaattccccgcaatttgcaacacttaactttacaaagatagctgtgca

SEQ ID NO: 522815 - DNA, 55 bp, Artificial
  Synthetic oligonucleotide
tcctcagcgcacacgccagcaacatgcggagccatgtcgcacttgcagcaagatg

SEQ ID NO: 522816 - DNA, 55 bp, Artificial
  Synthetic oligonucleotide
tcgatatcagggttacctggtccactattacccagccgtgacctagatctttccg

SEQ ID NO: 522817 - DNA, 55 bp, Artificial
  Synthetic oligonucleotide
tcgcagtgatggaggcaaatctaggaatgatgaaaattctagaccccggctgtgc

SEQ ID NO: 522818 - DNA, 55 bp, Artificial
  Synthetic oligonucleotide
tgactcacagactcagctcctggggatacaagtgacgcttccctccgtaggcaat

SEQ ID NO: 522819 - DNA, 55 bp, Artificial
  Synthetic oligonucleotide
tgcaattgcgaacacgagcactatgatgatggctgccgaggggaggttgcagctt

SEQ ID NO: 522820 - DNA, 55 bp, Artificial
  Synthetic oligonucleotide
tgctgcttatgggatcagacacacaatctccaagtccgtcaaagacctatcaagg

SEQ ID NO: 522821 - DNA, 55 bp, Artificial
  Synthetic oligonucleotide
tggacctaagattatacagcaattatcaggacatgactatgctaatggggagact

SEQ ID NO: 522822 - DNA, 55 bp, Artificial
  Synthetic oligonucleotide
tgtcatttgggatttgtacaagagtacaaatgcttatggaacggtgtcactgaaa

SEQ ID NO: 522823 - DNA, 55 bp, Artificial
  Synthetic oligonucleotide
ttcgattgaggccgcacgagagcagctagaactgagcaaccagatcctatcccgg

SEQ ID NO: 522824 - DNA, 55 bp, Artificial
  Synthetic oligonucleotide
ggcacaagcttacatattagatgcacaggtaagatgagcaaacgactacaggcct

SEQ ID NO: 522825 - DNA, 55 bp, Artificial
  Synthetic oligonucleotide
ggccacgatcgagcgccttatgaagatgtaccttgaaatgggtcccagtgctccg

SEQ ID NO: 522826 - DNA, 55 bp, Artificial
  Synthetic oligonucleotide
gggacgacgctaccaagctcgctaacacaagatgtgtaatatctgaagaccatct

SEQ ID NO: 522827 - DNA, 55 bp, Artificial
  Synthetic oligonucleotide
gggcaagaccaaagaataaacgtcctggattaaaaccaattgtggtttcaccatc

SEQ ID NO: 522828 - DNA, 55 bp, Artificial
  Synthetic oligonucleotide
gggctatgatcccgcagagtaattaataaccactttccatgtaatcttatggaaa

SEQ ID NO: 522829 - DNA, 55 bp, Artificial
  Synthetic oligonucleotide
ggggaggagggtgctattccaccagagactttaaagtcagctgtcaaggtctttg

SEQ ID NO: 522830 - DNA, 55 bp, Artificial
  Synthetic oligonucleotide
ggggatccggtatcatctgcgatggcggatatgaagttttacacacaggttgagt

SEQ ID NO: 522831 - DNA, 55 bp, Artificial
  Synthetic oligonucleotide
gggtgcgagattaagggtgctagtgccatactacaaggctcagattatgcatcac

SEQ ID NO: 522832 - DNA, 55 bp, Artificial
  Synthetic oligonucleotide
ggtatgtgttacgtaacatagttttacgcactccaggagatggttcatgggtcac

SEQ ID NO: 522833 - DNA, 55 bp, Artificial
  Synthetic oligonucleotide
ggtcaaacaagggattgcgtgttcaccccagttgctggcactttccctcggagat

SEQ ID NO: 522834 - DNA, 55 bp, Artificial
  Synthetic oligonucleotide
ggtggtaaagcaaattctgtttgacatcgatttctcactagaaccagagccatca

SEQ ID NO: 522835 - DNA, 55 bp, Artificial
  Synthetic oligonucleotide
ggttaaaggttgtcccggagggtgtgtagctgtaatctctcctgcatttaccccg

SEQ ID NO: 522836 - DNA, 55 bp, Artificial
  Synthetic oligonucleotide
ggttgcacccgcattcctacattccacctaggataccgtcattggtgttatagtc

SEQ ID NO: 522837 - DNA, 55 bp, Artificial
  Synthetic oligonucleotide
gtacgcacttgggttcttttctactagcaagactgcatgtcacccaatctacaag

SEQ ID NO: 522838 - DNA, 55 bp, Artificial
  Synthetic oligonucleotide
gtactaactcctctacccacttcagcaaatttgacccatcggctagatgacggag

SEQ ID NO: 522839 - DNA, 55 bp, Artificial
  Synthetic oligonucleotide
gtatcagggttacctggtccattattacccagtcgtgacctaactcatccaggtg

SEQ ID NO: 522840 - DNA, 55 bp, Artificial
  Synthetic oligonucleotide
gtatcgagagtgttgccgatacgtatgctattaggaatggaatcctgtaccttga

SEQ ID NO: 522841 - DNA, 55 bp, Artificial
  Synthetic oligonucleotide
gtcaccttagagcagcattgagacttgtatcactctacctttgggcttatgggga

SEQ ID NO: 522842 - DNA, 55 bp, Artificial
  Synthetic oligonucleotide
gtccaggtattgccctcaaacacagagggtttctcgggaaaagattatccactcc

SEQ ID NO: 522843 - DNA, 55 bp, Artificial
  Synthetic oligonucleotide
gtcgagtctactgaagtcacttgccgcatttaaaagacatagagagcaaccaact

SEQ ID NO: 522844 - DNA, 55 bp, Artificial
  Synthetic oligonucleotide
gtcggaatgagcgcgttctttcttacgcttaagttcggcttgggtaatagatgga

SEQ ID NO: 522845 - DNA, 55 bp, Artificial
  Synthetic oligonucleotide
gtcggaatgagtgcattctttcttacactcaagttcggtttgggcaacaggtgga

SEQ ID NO: 522846 - DNA, 55 bp, Artificial
  Synthetic oligonucleotide
gtctagacagtgaccttacaatgtaccttagagacaaggcgttatcacctgtcag

SEQ ID NO: 522847 - DNA, 55 bp, Artificial
  Synthetic oligonucleotide
gtgatggtctgccattatgatagagaattgctagggaggtgtctcatagcacgct

SEQ ID NO: 522848 - DNA, 55 bp, Artificial
  Synthetic oligonucleotide
gtgcggcaactgctactttgacaaccaagataaggatatttgtaccggctactaa

SEQ ID NO: 522849 - DNA, 55 bp, Artificial
  Synthetic oligonucleotide
gtgctagggaatctatagcaggtatgcttgacactactaagggtttaatccgtgc

SEQ ID NO: 522850 - DNA, 55 bp, Artificial
  Synthetic oligonucleotide
gtgcttggttacgaaggtttctcaatttaaataagctattgtctttgcactggag

SEQ ID NO: 522851 - DNA, 55 bp, Artificial
  Synthetic oligonucleotide
cactctgacatggaatctggcatgactaaggatgaggaaactatcctagtggaac

SEQ ID NO: 522852 - DNA, 55 bp, Artificial
  Synthetic oligonucleotide
cagaaagagtagattgtggactttgtattcaaagagttaaacccacgagtcatcc

SEQ ID NO: 522853 - DNA, 55 bp, Artificial
  Synthetic oligonucleotide
cagaccactactgcgagactatattgcctttacatacttgaggtgggtgactcag

SEQ ID NO: 522854 - DNA, 55 bp, Artificial
  Synthetic oligonucleotide
cagagataacgactgttttccacaaccaattgaccaatcctgcattagagtcaat

SEQ ID NO: 522855 - DNA, 55 bp, Artificial
  Synthetic oligonucleotide
cagagcatagcaggaaatcaacagcagacaacatgacattagcacattcggggtc

SEQ ID NO: 522856 - DNA, 55 bp, Artificial
  Synthetic oligonucleotide
caggaggtttctcagtcgtcccttctacctgctaggaagagacatggctgctaag

SEQ ID NO: 522857 - DNA, 55 bp, Artificial
  Synthetic oligonucleotide
cagtgcagcaacgactactttgacaactaaagtgaggatctttgttccagcgaat

SEQ ID NO: 522858 - DNA, 55 bp, Artificial
  Synthetic oligonucleotide
catccagtgagctttaaatcgccatgcttaaacattaatttgtccagggcctatc

SEQ ID NO: 522859 - DNA, 55 bp, Artificial
  Synthetic oligonucleotide
catgagaaggtactaagagccttcccaatagaagttgaacaaaattcggagggga

SEQ ID NO: 522860 - DNA, 55 bp, Artificial
  Synthetic oligonucleotide
catggcaagctaacaagagtagaagccgccactagcggcatacacatgcttggac

SEQ ID NO: 522861 - DNA, 55 bp, Artificial
  Synthetic oligonucleotide
catggcgacagttcttcagagtggtccttattatactccaaattaccatgctgtg

SEQ ID NO: 522862 - DNA, 55 bp, Artificial
  Synthetic oligonucleotide
ccacgggctgctcatgaaatactggctaattcaatgactggcgctagagagtctc

SEQ ID NO: 522863 - DNA, 55 bp, Artificial
  Synthetic oligonucleotide
ccactgaggtgtacttggttgctctttacccaaggatgaataaactaatctctcc

SEQ ID NO: 522864 - DNA, 55 bp, Artificial
  Synthetic oligonucleotide
ccagaccccacaccgatgaggttaggggttctgacatgggatgggtcctatactg

SEQ ID NO: 522865 - DNA, 55 bp, Artificial
  Synthetic oligonucleotide
ccagagatttgcctatcagcctagccgataggacagtatttgtatccagagatgc

SEQ ID NO: 522866 - DNA, 55 bp, Artificial
  Synthetic oligonucleotide
ccagggcctatctaactcagaacaaagatcacaactagagtctgaaggagtgggt

SEQ ID NO: 522867 - DNA, 55 bp, Artificial
  Synthetic oligonucleotide
ccatagaccaagaccaaagattgaaagactagaatgatcctgtacagcgatagac

SEQ ID NO: 522868 - DNA, 55 bp, Artificial
  Synthetic oligonucleotide
cccattaggagtgggtcaatcaactgaaaacccggaagacttgtttaaggaaata

SEQ ID NO: 522869 - DNA, 55 bp, Artificial
  Synthetic oligonucleotide
cccattgaatctgctggacgtataattgagggccaatcaactcgagacagcctcc

SEQ ID NO: 522870 - DNA, 55 bp, Artificial
  Synthetic oligonucleotide
ccccattaatgctaggtttgagcaacaagacttcggagaaagactatggtcaccc

SEQ ID NO: 522871 - DNA, 55 bp, Artificial
  Synthetic oligonucleotide
cccctcagtcatggagctggctggaagtgttctagatgtaaagactcaaactctc

SEQ ID NO: 522872 - DNA, 55 bp, Artificial
  Synthetic oligonucleotide
ccctaccttaactctggttgaggatcaagtaattacggagttggctcatatcaca

SEQ ID NO: 522873 - DNA, 55 bp, Artificial
  Synthetic oligonucleotide
ccgcagtcggctaccgacatgttcctcattcaacttggagggaaggtgcagtcag

SEQ ID NO: 522874 - DNA, 55 bp, Artificial
  Synthetic oligonucleotide
ccgcctggcgttagaagttgggaatgatgtctataacacaatagcttcactagag

SEQ ID NO: 522875 - DNA, 55 bp, Artificial
  Synthetic oligonucleotide
ccggatgggacactgcgatttaatgcacgaagtggaatcaccgaacagcgtgcag

SEQ ID NO: 522876 - DNA, 55 bp, Artificial
  Synthetic oligonucleotide
aaactctggtggaaggccatcagttactctttcctggtttagccgctaccgcgtc

SEQ ID NO: 522877 - DNA, 55 bp, Artificial
  Synthetic oligonucleotide
aaatccacacggatcatctagagattgggttcacatctcaccaggggtaggttcg

SEQ ID NO: 522878 - DNA, 55 bp, Artificial
  Synthetic oligonucleotide
aagtatatttatgaaggacaaggcgataagctgtcctaaacaagattggatgggg

SEQ ID NO: 522879 - DNA, 55 bp, Artificial
  Synthetic oligonucleotide
actattgagggacatctatccagtgttatgattgctatccctggttcaggtattg

SEQ ID NO: 522880 - DNA, 55 bp, Artificial
  Synthetic oligonucleotide
actgcatactgcactatagttaggacaaaacccctaccggacctagtcgtgggct

SEQ ID NO: 522881 - DNA, 55 bp, Artificial
  Synthetic oligonucleotide
actgctctaaaccgggctcgtacattgaatgaacagggcttttctttggtgccac

SEQ ID NO: 522882 - DNA, 55 bp, Artificial
  Synthetic oligonucleotide
agaacatgtcttgaatggctttatgctcctactacgggaattgctgtaagcgttg

SEQ ID NO: 522883 - DNA, 55 bp, Artificial
  Synthetic oligonucleotide
agacacaacaaaagggctcattagatcagggttaaggaaaggcggaatccagcct

SEQ ID NO: 522884 - DNA, 55 bp, Artificial
  Synthetic oligonucleotide
agatgggaactaacattatttgcacttgatgtgatcagatctccgagtgcagccg

SEQ ID NO: 522885 - DNA, 55 bp, Artificial
  Synthetic oligonucleotide
agccagcccaaatattgtcctcaagaagcatacacagcgagtcttattcgagaca

SEQ ID NO: 522886 - DNA, 55 bp, Artificial
  Synthetic oligonucleotide
agggaaggatgtatcatgtaaaggccatctgcacacgacagaagacaaaccgata

SEQ ID NO: 522887 - DNA, 55 bp, Artificial
  Synthetic oligonucleotide
aggtgcgggtgtttgtcccagtaacagatgaacctgagctaagatggagattgac

SEQ ID NO: 522888 - DNA, 55 bp, Artificial
  Synthetic oligonucleotide
agtacagatgactgatcagccttatacgccaagcttaactaagaagctacctgat

SEQ ID NO: 522889 - DNA, 55 bp, Artificial
  Synthetic oligonucleotide
atagaacaattcctggataggtgctatagtgtactgattcaggcatgggtgatgg

SEQ ID NO: 522890 - DNA, 55 bp, Artificial
  Synthetic oligonucleotide
ataggaacataggggacccattggtatcagctttagcagatgttaaacgactgat

SEQ ID NO: 522891 - DNA, 55 bp, Artificial
  Synthetic oligonucleotide
atgcctaccaggtcaaacaagagattgcgtgttcactccagttgccggcactttc

SEQ ID NO: 522892 - DNA, 55 bp, Artificial
  Synthetic oligonucleotide
caaaacgattctttggagagataatcggaactattgcgatagggatagccacctc

SEQ ID NO: 522893 - DNA, 55 bp, Artificial
  Synthetic oligonucleotide
caagattttggagaaatctgttctatacgttagtgatccatctagtccacctgac

SEQ ID NO: 522894 - DNA, 55 bp, Artificial
  Synthetic oligonucleotide
caagggatttcttcaagaggcgcctgaagttggttggcttctcgctttgcggcgg

SEQ ID NO: 522895 - DNA, 55 bp, Artificial
  Synthetic oligonucleotide
caataaggcgattcatggtagcattagttcttgacatcaaacgttctcctgggac

SEQ ID NO: 522896 - DNA, 55 bp, Artificial
  Synthetic oligonucleotide
caattagcattcaagccctcaaaagcctcttaggacctaccctaccagaagtgct

SEQ ID NO: 522897 - DNA, 55 bp, Artificial
  Synthetic oligonucleotide
cacaggtttaccgttgccacctgaccttaacagttgtgttacacacagggatgtg

SEQ ID NO: 522898 - DNA, 55 bp, Artificial
  Synthetic oligonucleotide
caccaatcatctggaacttacttacttcccgaaatcacccatagaccggtatcgg

SEQ ID NO: 522899 - DNA, 55 bp, Artificial
  Synthetic oligonucleotide
cacctcaagtgttcaggggatttcaatttccccgggatagatatgcatgtgttcc

SEQ ID NO: 522900 - DNA, 55 bp, Artificial
  Synthetic oligonucleotide
cactccccggaattggaagagtggggcatcggagagaatatatcctccgcagtga

SEQ ID NO: 522901 - DNA, 55 bp, Artificial
  Synthetic oligonucleotide
cactcccttttagagagtataagccgcagacagaaggagtgagcaatctggtagg

SEQ ID NO: 522902 - DNA, 55 bp, Artificial
  Synthetic oligonucleotide
cgccctcttggtttgtcttctacttcctggtataagacaataagtgtactgaatc

SEQ ID NO: 522903 - DNA, 55 bp, Artificial
  Synthetic oligonucleotide
cgcttgcattatcgcttattcagactcacgacccagtcaaacagctcaggggagc

SEQ ID NO: 522904 - DNA, 55 bp, Artificial
  Synthetic oligonucleotide
cggaagtacttaaagtcagcactgaaccagtcaacattcaaccatttgatgggtg

SEQ ID NO: 522905 - DNA, 55 bp, Artificial
  Synthetic oligonucleotide
ctgaggagcttcatgatgcccttgctaagaccgttgctcagaccgttcttgagat

SEQ ID NO: 522906 - DNA, 55 bp, Artificial
  Synthetic oligonucleotide
ctctcagtgtgacatcctagcttggtctagaggaggatggattgaagtggaccaa

SEQ ID NO: 522907 - DNA, 55 bp, Artificial
  Synthetic oligonucleotide
ctcgtcagacgagtactacataacatatttcaatggcatagatcgtcccaaaacc

SEQ ID NO: 522908 - DNA, 55 bp, Artificial
  Synthetic oligonucleotide
cggccctcgacattattgaattcatactcagcaccgattcccaagagaacacggc

SEQ ID NO: 522909 - DNA, 55 bp, Artificial
  Synthetic oligonucleotide
cggcctcacttatcagagactaagagaattacattggttgttacatctgatctaa

SEQ ID NO: 522910 - DNA, 55 bp, Artificial
  Synthetic oligonucleotide
cgtaaagagacgggctatgacataggtagcaatgtagagaatctccgagatgtct

SEQ ID NO: 522911 - DNA, 55 bp, Artificial
  Synthetic oligonucleotide
cgtagcaatgtgacagatggacgtgctcggcagatgtatgcaattgcacaagacc

SEQ ID NO: 522912 - DNA, 55 bp, Artificial
  Synthetic oligonucleotide
cgtcaggaatatcggtgacccactaactgcatccctagcagatgtcaagagacta

SEQ ID NO: 522913 - DNA, 55 bp, Artificial
  Synthetic oligonucleotide
cgtccagacattccgatgccagaaatggccgagcaagaaaagactcccctgcgtt

SEQ ID NO: 522914 - DNA, 55 bp, Artificial
  Synthetic oligonucleotide
ctccaactcaaggacgaagctagaatcctgaggggtgcattcctacatcactgca

SEQ ID NO: 522915 - DNA, 55 bp, Artificial
  Synthetic oligonucleotide
cgtgttagatcacaatatcggcctcacttatcagagactaagagaattacattgg

SEQ ID NO: 522916 - DNA, 55 bp, Artificial
  Synthetic oligonucleotide
cgtgttgcggaggagcttaacatatcagaagaggagcgtgaaattctaaaggaag

SEQ ID NO: 522917 - DNA, 55 bp, Artificial
  Synthetic oligonucleotide
ctacggataacagacatgagcactctggtctctgcagttatcaccatcgaggccc

SEQ ID NO: 522918 - DNA, 55 bp, Artificial
  Synthetic oligonucleotide
ctaagggcgcgtagagtaccttcagatagaacactacattaatcgggtgaaacaa

SEQ ID NO: 522919 - DNA, 55 bp, Artificial
  Synthetic oligonucleotide
cgttgacaaatgaaccgtatggggcagctgtccaattgagaggagatctgattct

SEQ ID NO: 522920 - DNA, 55 bp, Artificial
  Synthetic oligonucleotide
ctaagacacgtgtaaatataactttagatcagctcagagtactaactcctctacc

SEQ ID NO: 522921 - DNA, 55 bp, Artificial
  Synthetic oligonucleotide
ctaagatggctgaccatactgatgtcctattgccggaggtacatttgagttcccc

SEQ ID NO: 522922 - DNA, 55 bp, Artificial
  Synthetic oligonucleotide
ctttctaagccgaaaactgctaaatgcaattaggggaagcacagattgcaaggcg

SEQ ID NO: 522923 - DNA, 55 bp, Artificial
  Synthetic oligonucleotide
ccgtaagaattcagagacaataggtatattctctcgtgcagaaaccaaaagcatg

SEQ ID NO: 522924 - DNA, 55 bp, Artificial
  Synthetic oligonucleotide
ctttagaactgctgtctggggtaataataacagggtctgaacattgtagggtctg

SEQ ID NO: 522925 - DNA, 55 bp, Artificial
  Synthetic oligonucleotide
cctactaggatgtgcagaccctgcatctagcaatcaatatgtatcactaggaacc

SEQ ID NO: 522926 - DNA, 55 bp, Artificial
  Synthetic oligonucleotide
cctagagtcttccgtagaatgtgggatgctgatctgatcgaaccaagagcagggc

SEQ ID NO: 522927 - DNA, 55 bp, Artificial
  Synthetic oligonucleotide
cctccggatcgcagtcagtgaggatgcaaacaagcccttacgacaaggggcactc

SEQ ID NO: 522928 - DNA, 55 bp, Artificial
  Synthetic oligonucleotide
cttcgaaggcttgacctgtctgtgggactcagtgatgtgctcgggccctctgtcc

SEQ ID NO: 522929 - DNA, 55 bp, Artificial
  Synthetic oligonucleotide
cctctactccaagaacgcttggattaatgcttaaaatcatgctgggtccaaccca

SEQ ID NO: 522930 - DNA, 55 bp, Artificial
  Synthetic oligonucleotide
cttactatccatccggcgctgcgagcagaaatccagcgtgtgattcgaggcagcc

SEQ ID NO: 522931 - DNA, 55 bp, Artificial
  Synthetic oligonucleotide
cctgggctgtcgtaggtgtgggaaggttgtattccgagtgcgcctccgaggcatc

SEQ ID NO: 522932 - DNA, 55 bp, Artificial
  Synthetic oligonucleotide
cgaaagtaccacgatcaagtgcaagggatccaacctattccagtgatgttagggg

SEQ ID NO: 522933 - DNA, 55 bp, Artificial
  Synthetic oligonucleotide
ctgtagtagacactaggtcaacattatgcattatcacacctgagttggttgcgtt

SEQ ID NO: 522934 - DNA, 55 bp, Artificial
  Synthetic oligonucleotide
ctggaggatcgccccgctgttatatgagattactgtggctgataagcaacagggt

SEQ ID NO: 522935 - DNA, 55 bp, Artificial
  Synthetic oligonucleotide
cgaggcagttacagcagcttcaaaggtcagagattacatgaaagcagacaaagtt

SEQ ID NO: 522936 - DNA, 55 bp, Artificial
  Synthetic oligonucleotide
cgcaattcgcaacacttaactttacaaagatagctgtgcaatgtctcatgtgggg

SEQ ID NO: 522937 - DNA, 55 bp, Artificial
  Synthetic oligonucleotide
cgcatatagcatcccttgactatacaaagttgagtatagatgctgtcatgtgggg

SEQ ID NO: 522938 - DNA, 55 bp, Artificial
  Synthetic oligonucleotide
cgcatctcctgaaagtctcctcgcagagtgtcttaagctgaatctcagcgtacgg

SEQ ID NO: 522939 - DNA, 55 bp, Artificial
  Synthetic oligonucleotide
cgcatgatcgaatgtgggttattaggatgtagcattctgtcacagataatgtacc

SEQ ID NO: 522940 - DNA, 55 bp, Artificial
  Synthetic oligonucleotide
cgcatgctattaggaatggaatcctgtaccttgacaagtgacagactaggtgggt

SEQ ID NO: 522941 - DNA, 54 bp, Artificial
  Synthetic oligonucleotide
agtgcatgtgtgttcacacctatagcaggaagttatatgaggaggtttgttgca

SEQ ID NO: 522942 - DNA, 54 bp, Artificial
  Synthetic oligonucleotide
gacagaagaggctcgcaggcaggtcagagagctcgtgagcaatctcgaaggaga

SEQ ID NO: 522943 - DNA, 54 bp, Artificial
  Synthetic oligonucleotide
aaccaatccagcactctctactttatccattcaagccctcatgtcactctgcgg

SEQ ID NO: 522944 - DNA, 54 bp, Artificial
  Synthetic oligonucleotide
gatagtgaccttacaatgtaccttcgggacaaggcgttgtcacctgtcaaaagt

SEQ ID NO: 522945 - DNA, 54 bp, Artificial
  Synthetic oligonucleotide
ccgggctactagtaccgaaatacggtccctaccttacaagtcaagatttcaaaa

SEQ ID NO: 522946 - DNA, 54 bp, Artificial
  Synthetic oligonucleotide
ggcactagtaaggaatctagctgtcttgccccaactaaggaatgaggttgcagc

SEQ ID NO: 522947 - DNA, 54 bp, Artificial
  Synthetic oligonucleotide
gggagtggggctatcatgagcctactagaattgcatataccacacgagaccata

SEQ ID NO: 522948 - DNA, 53 bp, Artificial
  Synthetic oligonucleotide
ttcttattattcccctgccgtgctttacccattgaccatcgaaaataagactg

SEQ ID NO: 522949 - DNA, 53 bp, Artificial
  Synthetic oligonucleotide
gcggatgtggagcccctatacacgaccccgactatataggagggataggtaag

SEQ ID NO: 522950 - DNA, 53 bp, Artificial
  Synthetic oligonucleotide
ctctctagacaggacacctcaggttttcaggggatttcaattccctcgggatc

SEQ ID NO: 522951 - DNA, 53 bp, Artificial
  Synthetic oligonucleotide
cacaacatgaaggcattagggcatgaattgaaggcgaccgagactatcattag

SEQ ID NO: 522952 - DNA, 53 bp, Artificial
  Synthetic oligonucleotide
atcaaagggaccacgtgctccttttatatgcatcttgagagaccctgtgcatg

SEQ ID NO: 522953 - DNA, 53 bp, Artificial
  Synthetic oligonucleotide
gcatagccgtgcaaatatgggtcgctgtaatcaagagcatgactgcacctgag

SEQ ID NO: 522954 - DNA, 52 bp, Artificial
  Synthetic oligonucleotide
tagtacattacctcaacagtatgatctcggggatccaactacacctcgacaa

SEQ ID NO: 522955 - DNA, 52 bp, Artificial
  Synthetic oligonucleotide
ttagcgaccaccactgtgcggtcgttgatacctatctggattcagaatggtg

SEQ ID NO: 522956 - DNA, 52 bp, Artificial
  Synthetic oligonucleotide
aagactctacaccgcctatcaatatctgcagtcccaaggaataatgctctaa

SEQ ID NO: 522957 - DNA, 52 bp, Artificial
  Synthetic oligonucleotide
cttatctttactcaatgccgttgggatgcaaaacttggaccgataatcagcc

SEQ ID NO: 522958 - DNA, 52 bp, Artificial
  Synthetic oligonucleotide
gctcactgtccacagccaagaacgccaattccgagcccacacttaagtctgg

SEQ ID NO: 522959 - DNA, 52 bp, Artificial
  Synthetic oligonucleotide
ccaggtcaagataggaacatgtagtatggtgcattgtgatatggaggggact

SEQ ID NO: 522960 - DNA, 52 bp, Artificial
  Synthetic oligonucleotide
cggataatctaagcacggcagaatcagcactgacccttttaaacgagatcct

SEQ ID NO: 522961 - DNA, 51 bp, Artificial
  Synthetic oligonucleotide
atacagcaattatcaggacatgactatgctaatggggagactagtctagaa

SEQ ID NO: 522962 - DNA, 51 bp, Artificial
  Synthetic oligonucleotide
acttctagcaagaagaatgtgcctgatgactctgttataccctagctctag

SEQ ID NO: 522963 - DNA, 51 bp, Artificial
  Synthetic oligonucleotide
actgctgagcgtacgaaatcaaattacttatgatgtatcagttctcacccc

SEQ ID NO: 522964 - DNA, 51 bp, Artificial
  Synthetic oligonucleotide
cgtgatcttctagagagtaaatctatcactggccagataattcatgcagat

SEQ ID NO: 522965 - DNA, 51 bp, Artificial
  Synthetic oligonucleotide
gaaccccagagacagggaagcgtaagaagatcaggacaattgctgcctacc

SEQ ID NO: 522966 - DNA, 51 bp, Artificial
  Synthetic oligonucleotide
cagtggtatcgatcccatttgatggaagatatacaatccggaatattagct

SEQ ID NO: 522967 - DNA, 51 bp, Artificial
  Synthetic oligonucleotide
ctactggattcgatcattcaggactatgggatccagagggtaacctctgca

SEQ ID NO: 522968 - DNA, 50 bp, Artificial
  Synthetic oligonucleotide
cccctttggcccaagcacctcttcccattcactttctcagtcagatagta

SEQ ID NO: 522969 - DNA, 50 bp, Artificial
  Synthetic oligonucleotide
ccgcgacccaaagaagactctccacatatccagctaatccgtcgatccga

SEQ ID NO: 522970 - DNA, 50 bp, Artificial
  Synthetic oligonucleotide
ttactgcctgtagactcaatcagggcattaaggagcagtacaggtctgac

SEQ ID NO: 522971 - DNA, 50 bp, Artificial
  Synthetic oligonucleotide
agcgatccgtctagtccacctgattttgatcgacatatcgatatagaatc

SEQ ID NO: 522972 - DNA, 50 bp, Artificial
  Synthetic oligonucleotide
gattagtccaaaggggagagcatttggggcattcccattaggagtgggtc

SEQ ID NO: 522973 - DNA, 60 bp, Artificial
  Synthetic oligonucleotide
ccaggaccgctacgacccattcctccagcatcttaacaccgtcatccgacctacacacat

SEQ ID NO: 522974 - DNA, 60 bp, Artificial
  Synthetic oligonucleotide
ctacacacatccccggtggtttagaagattcactctatatcccacttattgctaaccacg

SEQ ID NO: 522975 - DNA, 60 bp, Artificial
  Synthetic oligonucleotide
ctcaacctgaacgctcagaagcaaaatcaagctctccgctcaattttgttctctccaaat

SEQ ID NO: 522976 - DNA, 60 bp, Artificial
  Synthetic oligonucleotide
cttcgtggtgctgggatctttacgtctcgatccgagaatcagttaagaagctatcacaaa

SEQ ID NO: 522977 - DNA, 60 bp, Artificial
  Synthetic oligonucleotide
gaaattcgcttttcgcaaaacggggtaacaggctactgtaacgactataagtcccctaac

SEQ ID NO: 522978 - DNA, 60 bp, Artificial
  Synthetic oligonucleotide
gaagggatcgaacacgtactacggtcatcagtaccggacgttggatacacacgcacgcaa

SEQ ID NO: 522979 - DNA, 60 bp, Artificial
  Synthetic oligonucleotide
gaatacataacattcctaggaaggacatgttacggaggtttaaaccatcgagatcttatc

SEQ ID NO: 522980 - DNA, 60 bp, Artificial
  Synthetic oligonucleotide
gattcttcggagcagcagagtatcggacgatttccactcgcatgtgggaacttcccttcc

SEQ ID NO: 522981 - DNA, 60 bp, Artificial
  Synthetic oligonucleotide
gcccagctccagaaagctcggccaccggaagcggatacatggaatcacctccagccgttg

SEQ ID NO: 522982 - DNA, 60 bp, Artificial
  Synthetic oligonucleotide
ggaattacccccccactctttgacaaagagcccagagtgaatctgggagtgtcaagacca

SEQ ID NO: 522983 - DNA, 60 bp, Artificial
  Synthetic oligonucleotide
ggaggcacgtcttcgatattgaatgatatcgcgcgacgattaacacgaaagtacggtcgt

SEQ ID NO: 522984 - DNA, 60 bp, Artificial
  Synthetic oligonucleotide
ggggcagagcattccattacatactcccagagggcacatcagcagatccgctgttacagg

SEQ ID NO: 522985 - DNA, 60 bp, Artificial
  Synthetic oligonucleotide
gtacaaggtctccttgacgttatggaccttaagaacaatacttggcgtactgttcctctg

SEQ ID NO: 522986 - DNA, 60 bp, Artificial
  Synthetic oligonucleotide
tgccataaatgaatctctggtacaaggtctccttgacgttatggaccttaagaacaatac

SEQ ID NO: 522987 - DNA, 60 bp, Artificial
  Synthetic oligonucleotide
tggtgacgatgaacggatcgaaccagagcgaatagctgatatcgccaatccaattggttg

SEQ ID NO: 522988 - DNA, 60 bp, Artificial
  Synthetic oligonucleotide
tgttcctctgtcccatgacacactaggccgcccaatgtggcttctagattggcgtcaaaa

SEQ ID NO: 522989 - DNA, 60 bp, Artificial
  Synthetic oligonucleotide
tttagaattgttaaatcaaactcacatccatatagtcaggcgggagtctggcgttaccta

SEQ ID NO: 522990 - DNA, 60 bp, Artificial
  Synthetic oligonucleotide
cagcagagtatcggacgatttccactcgcatgtgggaacttcccttcctatcagctgtcg

SEQ ID NO: 522991 - DNA, 60 bp, Artificial
  Synthetic oligonucleotide
aatcacctccagccgttgaaggtcaacagacagcagcaattatggatcctggaataatgc

SEQ ID NO: 522992 - DNA, 60 bp, Artificial
  Synthetic oligonucleotide
actgcttatgtataacttacaattttgaacccatgtaagtttaacatttgattcaatgaa

SEQ ID NO: 522993 - DNA, 60 bp, Artificial
  Synthetic oligonucleotide
agagggcacggaccgaccatttgttacacacaaggtgatgattcattatgtggtgacgat

SEQ ID NO: 522994 - DNA, 60 bp, Artificial
  Synthetic oligonucleotide
agccttccaatcgtgagggcattcgacgtattgacccaattggatcaagtaagtttcgag

SEQ ID NO: 522995 - DNA, 60 bp, Artificial
  Synthetic oligonucleotide
cacgcaactaaccgatttaagtgaaaagacgaaagtaagaggtgtatggggcagagcatt

SEQ ID NO: 522996 - DNA, 60 bp, Artificial
  Synthetic oligonucleotide
cacgaccctccctgcccccaggtcacaagcccccaataaacctgaatacgcacggattgc

SEQ ID NO: 522997 - DNA, 60 bp, Artificial
  Synthetic oligonucleotide
aggaggaactttctatcacataggacaagatcctacggttagcgttccatatatactttc

SEQ ID NO: 522998 - DNA, 60 bp, Artificial
  Synthetic oligonucleotide
atgatatcgcgcgacgattaacacgaaagtacggtcgtgtatctcatgaagaggtaccga

SEQ ID NO: 522999 - DNA, 60 bp, Artificial
  Synthetic oligonucleotide
caaactcacatccatatagtcaggcgggagtctggcgttacctaccatgacgagttcgca

SEQ ID NO: 523000 - DNA, 60 bp, Artificial
  Synthetic oligonucleotide
attttcaagctggatatcgtgttttcaaacacgttatcgaagcttacccactaccagcgg

SEQ ID NO: 523001 - DNA, 57 bp, Artificial
  Synthetic oligonucleotide
ttaccaaacacaccaattcaagacattgatgtcggttgctatcagcaggcaatgacc

SEQ ID NO: 523002 - DNA, 57 bp, Artificial
  Synthetic oligonucleotide
attgggcacacaaagggataccatccggtagctattatacatccataatcggctcaa

SEQ ID NO: 523003 - DNA, 55 bp, Artificial
  Synthetic oligonucleotide
aagaagatctaatcgccgcccatattcttggaatcccctgttctccaagactagg

SEQ ID NO: 523004 - DNA, 55 bp, Artificial
  Synthetic oligonucleotide
cagaccaaggtaataatgagactcctctaccagtccaggcaacccaaccagccgc

SEQ ID NO: 523005 - DNA, 55 bp, Artificial
  Synthetic oligonucleotide
cgcaaaacggggtaacaggctactgtaacgactataagtcccctaacaaggtctt

SEQ ID NO: 523006 - DNA, 55 bp, Artificial
  Synthetic oligonucleotide
acacgaaagtacggtcgtgtatctcatgaagaggtaccgaaagagctccgagtgt

SEQ ID NO: 523007 - DNA, 55 bp, Artificial
  Synthetic oligonucleotide
cggggtaacaggctactgtaacgactataagtcccctaacaaggtcttatggcgg

SEQ ID NO: 523008 - DNA, 55 bp, Artificial
  Synthetic oligonucleotide
gttacgaaatttgcaggcaactatttatacacaagaagatcgctgcaccagacgg

SEQ ID NO: 523009 - DNA, 55 bp, Artificial
  Synthetic oligonucleotide
gtgaaaagacgaaagtaagaggtgtatggggcagagcattccattacatactccc

SEQ ID NO: 523010 - DNA, 55 bp, Artificial
  Synthetic oligonucleotide
cgttcctccaacaataccaaacagaacaattccacagccaggaccgctacgaccc

SEQ ID NO: 523011 - DNA, 55 bp, Artificial
  Synthetic oligonucleotide
ggttactaatctatccggaatatccagttccgtcaggcgctatctcagcgtatcg

SEQ ID NO: 523012 - DNA, 55 bp, Artificial
  Synthetic oligonucleotide
caccggtgaacaacacatgaaagctatattgcagtacagtttaccaaacacacca

SEQ ID NO: 523013 - DNA, 55 bp, Artificial
  Synthetic oligonucleotide
caaagaaggaggaactttctatcacataggacaagatcctacggttagcgttcca

SEQ ID NO: 523014 - DNA, 55 bp, Artificial
  Synthetic oligonucleotide
gacccaagaatgaaggaaatcatgaaagggcaattcgacgagcgaaagcagtgtt

SEQ ID NO: 523015 - DNA, 55 bp, Artificial
  Synthetic oligonucleotide
gactggagttcttttgatgctacagtcagcagatttgaaattcatgcagcgtttg

SEQ ID NO: 523016 - DNA, 54 bp, Artificial
  Synthetic oligonucleotide
cacggattgcagactccctggaagacgaatatcaaatcggattccaacggatca

SEQ ID NO: 523017 - DNA, 53 bp, Artificial
  Synthetic oligonucleotide
taacaccgtcatccgacctacacacatccccggtggtttagaagattcactct

SEQ ID NO: 523018 - DNA, 51 bp, Artificial
  Synthetic oligonucleotide
gacactaggcagctcccgtaattttcgggaagggttcacataaccctgcct

SEQ ID NO: 523019 - DNA, 60 bp, Artificial
  Synthetic oligonucleotide
cggtggtcactcacaggatctcgtgttacatgagaccggaacgtgtatgagctgtggcgg

SEQ ID NO: 523020 - DNA, 60 bp, Artificial
  Synthetic oligonucleotide
cggtcatccgcacaggcgagagcatcgccttccatcacgagttcgactgcggatgggtcg

SEQ ID NO: 523021 - DNA, 60 bp, Artificial
  Synthetic oligonucleotide
gtgcggtggctacgctcctctggagactacggaccgcagtcagccgctgccggctcgacc

SEQ ID NO: 523022 - DNA, 60 bp, Artificial
  Synthetic oligonucleotide
gtgggaagggggagcaaaattctctgccaataaagtagagacgtgtgtgagcaaaacagt

SEQ ID NO: 523023 - DNA, 60 bp, Artificial
  Synthetic oligonucleotide
cgcctaggggttttccgcagtgtagatcagaacggagaccccgcgtggcaaaggttgcgc

SEQ ID NO: 523024 - DNA, 60 bp, Artificial
  Synthetic oligonucleotide
cgagcactcatacgaggataataattatcccgatttggatcacacgttgcagctacgttg

SEQ ID NO: 523025 - DNA, 60 bp, Artificial
  Synthetic oligonucleotide
gtgggttatcaacgataaggcgtacgccattccacaggcagactttaaccctctaattca

SEQ ID NO: 523026 - DNA, 60 bp, Artificial
  Synthetic oligonucleotide
gttgtgaggcgaaagaaacatactccgaggtggaaccctatgccgggggtcacaattcca

SEQ ID NO: 523027 - DNA, 60 bp, Artificial
  Synthetic oligonucleotide
cgaagtggaggaacaatgagctttagtgggtattctaaagatctccccccgggtttagag

SEQ ID NO: 523028 - DNA, 60 bp, Artificial
  Synthetic oligonucleotide
gttgttcccaacagctttcctctagcggtctactgtgatggtcatttacaggattttgtg

SEQ ID NO: 523029 - DNA, 60 bp, Artificial
  Synthetic oligonucleotide
cctggcgcgatgacgtgtcagtgagggtgttgtctaaagactatagggatcaatgatagg

SEQ ID NO: 523030 - DNA, 60 bp, Artificial
  Synthetic oligonucleotide
ccgctaatctagagtctcagatttgggcttatatccctaacactgataacaaacataact

SEQ ID NO: 523031 - DNA, 60 bp, Artificial
  Synthetic oligonucleotide
ccctagctacggctgtgtaaactggactaatgccaactttccttttaatgactgccactg

SEQ ID NO: 523032 - DNA, 60 bp, Artificial
  Synthetic oligonucleotide
taaaagacccgtcagcgaacagcctcctcattagcgactgctgggacttcttggtcggtg

SEQ ID NO: 523033 - DNA, 60 bp, Artificial
  Synthetic oligonucleotide
taacagaggaattctcagcttttattcaaaaagattgcaaaaacgactcattggaaacct

SEQ ID NO: 523034 - DNA, 60 bp, Artificial
  Synthetic oligonucleotide
taagtggacttcaatcaacacgtgaatgggtggcaagaactgagactataccaccacaat

SEQ ID NO: 523035 - DNA, 60 bp, Artificial
  Synthetic oligonucleotide
taatctagcatctgctatagctagagccagtgggaattatggctgtgtgaactggaacaa

SEQ ID NO: 523036 - DNA, 60 bp, Artificial
  Synthetic oligonucleotide
tacaacccgagcgacagtcgcaacaactggaagagagcaactatcagaatgaaagtggac

SEQ ID NO: 523037 - DNA, 60 bp, Artificial
  Synthetic oligonucleotide
tacgcatacctgacagtcaaccaccgggtatcaactctgaataatcagagagctttctac

SEQ ID NO: 523038 - DNA, 60 bp, Artificial
  Synthetic oligonucleotide
ccaaaaaatctttcgttgatctctatactcttatacaacaccctccacactgctacgccc

SEQ ID NO: 523039 - DNA, 60 bp, Artificial
  Synthetic oligonucleotide
catttacaggccaggggaaactactagtgtgattcagccgttactgggcatggttacccc

SEQ ID NO: 523040 - DNA, 60 bp, Artificial
  Synthetic oligonucleotide
catccacagaacatcatgaatacctatgggcctctaactgcatttccacacaccatacca

SEQ ID NO: 523041 - DNA, 60 bp, Artificial
  Synthetic oligonucleotide
tactcataaaaacacgtattcatctaagtggacttcaatcaacacgtgaatgggtggcaa

SEQ ID NO: 523042 - DNA, 60 bp, Artificial
  Synthetic oligonucleotide
cagttcaacagactgctacaagaggtacgtttccgattgcttgctattggagattgtagc

SEQ ID NO: 523043 - DNA, 60 bp, Artificial
  Synthetic oligonucleotide
tagacagcgagaaagagctactgctcgccgatgtcaattacgattgggaagccagtctgg

SEQ ID NO: 523044 - DNA, 60 bp, Artificial
  Synthetic oligonucleotide
tataactagtaacggggaccttaccgtaaccgtagacggtcctgttattagcgacgccca

SEQ ID NO: 523045 - DNA, 60 bp, Artificial
  Synthetic oligonucleotide
cagcttcctcaacatttatgccactggacaaataagctgcagaatagcatgggaagctga

SEQ ID NO: 523046 - DNA, 60 bp, Artificial
  Synthetic oligonucleotide
tatgttaacgagatgtagattaatttatgcaaagtgggaggagccttttttgattggacg

SEQ ID NO: 523047 - DNA, 60 bp, Artificial
  Synthetic oligonucleotide
tcacagcatctggaatctgcaacagtacgcctacatcacagtcgcatctcaggcgcagga

SEQ ID NO: 523048 - DNA, 60 bp, Artificial
  Synthetic oligonucleotide
tcagcagtactaagatcaaccccagtaataattacatccaacgtagacatgaccatggtg

SEQ ID NO: 523049 - DNA, 60 bp, Artificial
  Synthetic oligonucleotide
gcaaaagactacggaggtaaaattggacattacttcttcagagcaaagcgtgcctttgct

SEQ ID NO: 523050 - DNA, 60 bp, Artificial
  Synthetic oligonucleotide
gctctggggtacccgcatcatgatttactcaaggactcgactccgttccttactatgccg

SEQ ID NO: 523051 - DNA, 60 bp, Artificial
  Synthetic oligonucleotide
gcttcacgcaagctgagataggaccatccaagattcatgttcatgtagtatgcgggggag

SEQ ID NO: 523052 - DNA, 60 bp, Artificial
  Synthetic oligonucleotide
gagatgtggtcacctgtagatggttccaaaagagcccacttagacatgccttttgttcag

SEQ ID NO: 523053 - DNA, 60 bp, Artificial
  Synthetic oligonucleotide
ggaaactacgggattgaaaggccattccctatcagttatcagcaaatggaactctgtcat

SEQ ID NO: 523054 - DNA, 60 bp, Artificial
  Synthetic oligonucleotide
ggaacaaatcaaatatctgaacgtaatgatgcacaaatacgtgtaccccctaaatcttat

SEQ ID NO: 523055 - DNA, 60 bp, Artificial
  Synthetic oligonucleotide
gacgaggccgctcggtctcatgatctcgcctatcagtcctatctcgatgctggtgtaaat

SEQ ID NO: 523056 - DNA, 60 bp, Artificial
  Synthetic oligonucleotide
ggacaggtacgagccactgtcaggatttaggaccagggaatggccagacgactacactga

SEQ ID NO: 523057 - DNA, 60 bp, Artificial
  Synthetic oligonucleotide
gaccggccagtacgggaaagactaacttggccaaggctatcgctcaggcggtaaaggtgt

SEQ ID NO: 523058 - DNA, 60 bp, Artificial
  Synthetic oligonucleotide
gaatgggttgcaagaactgaacgtataccaccacaatggttcacatcgcaatacactcaa

SEQ ID NO: 523059 - DNA, 60 bp, Artificial
  Synthetic oligonucleotide
gaatcagctacgagacaaggtcctagtcagggacgaaccaatctttaagggagacgtatt

SEQ ID NO: 523060 - DNA, 60 bp, Artificial
  Synthetic oligonucleotide
ggagaaccaactaacccttcagacgccgctgcaaaagaacacgacgaggcttacagcaaa

SEQ ID NO: 523061 - DNA, 60 bp, Artificial
  Synthetic oligonucleotide
ggcgaaaaaagactttcagtctgtcgccaaacaaaattgtgttacctgggaccagcaccg

SEQ ID NO: 523062 - DNA, 60 bp, Artificial
  Synthetic oligonucleotide
ggcgctgaacaagacattgtctacaacaatgatctaacagccgccttacatgtgttctgc

SEQ ID NO: 523063 - DNA, 60 bp, Artificial
  Synthetic oligonucleotide
ggctaagccgagggctaacccggctcaggtgttcgcggaacaccgcaagcgggaggggat

SEQ ID NO: 523064 - DNA, 60 bp, Artificial
  Synthetic oligonucleotide
ggcttcgccatctttgacagatatgttgcaatcaacttccgggggtgggacttccggggt

SEQ ID NO: 523065 - DNA, 60 bp, Artificial
  Synthetic oligonucleotide
cttgctctaacctggcctataagtggctggacaatattcagtctcagctcgagattaacg

SEQ ID NO: 523066 - DNA, 60 bp, Artificial
  Synthetic oligonucleotide
ggcttctgctggagttgggctgtctgatcaggagtggattaattactggcatggagctat

SEQ ID NO: 523067 - DNA, 60 bp, Artificial
  Synthetic oligonucleotide
gggacaggtcccagacgagacaacatgggtagaccacttaatgtggttcctcagacgcct

SEQ ID NO: 523068 - DNA, 60 bp, Artificial
  Synthetic oligonucleotide
ctgtgggaaaacctcatagcgagatgtggtcgcctatagatggttccaaaagagcccact

SEQ ID NO: 523069 - DNA, 60 bp, Artificial
  Synthetic oligonucleotide
ctgtagaggatacccaccagactacgactttggagtcatatcaactggattcagactcag

SEQ ID NO: 523070 - DNA, 60 bp, Artificial
  Synthetic oligonucleotide
ctgacgaacgatacagaagccttagccagttctttgcagcggtggaacgaagaatgggaa

SEQ ID NO: 523071 - DNA, 60 bp, Artificial
  Synthetic oligonucleotide
gggaggggatccagttcgacttctgtgggttttactatcactccacaagaattgcatcca

SEQ ID NO: 523072 - DNA, 60 bp, Artificial
  Synthetic oligonucleotide
gggctgcaaacatgatttctgtggctttcactatcacagtgcacgcttagccaatctagg

SEQ ID NO: 523073 - DNA, 60 bp, Artificial
  Synthetic oligonucleotide
gggtgggtcacaaatacacgtgcatatgctccgcctcaggcagacttcaatccattagtt

SEQ ID NO: 523074 - DNA, 60 bp, Artificial
  Synthetic oligonucleotide
ctccaaggtgaggcgtcccgtgttccacgacgactggtgtagtcagccggtagatcgcct

SEQ ID NO: 523075 - DNA, 60 bp, Artificial
  Synthetic oligonucleotide
ggtgttgagggacttagcttttttgtgccacacaaaaataaacacggagcatggaaaagc

SEQ ID NO: 523076 - DNA, 60 bp, Artificial
  Synthetic oligonucleotide
ctacaattatgtgggtcctggtaatcctttggataatggcccccctaagggcccagtgga

SEQ ID NO: 523077 - DNA, 60 bp, Artificial
  Synthetic oligonucleotide
gtcagttacactcactctatctttgcagacagagataccggagctctttagcaccatggc

SEQ ID NO: 523078 - DNA, 60 bp, Artificial
  Synthetic oligonucleotide
cgtgtggatgtacccaaatcaggcgtgggacaccactccgatatccagggacactcccat

SEQ ID NO: 523079 - DNA, 60 bp, Artificial
  Synthetic oligonucleotide
gtcattctgcttccggctttcgtcgcggtgacatctcgctgctctgtctgggggtgagtg

SEQ ID NO: 523080 - DNA, 60 bp, Artificial
  Synthetic oligonucleotide
agtcttttgaagagcctacagatgaaataccaagtgaaacagcgacaggagcacttgaag

SEQ ID NO: 523081 - DNA, 60 bp, Artificial
  Synthetic oligonucleotide
aggctacctggcaatcggaaaatgactggtttccgccactagagagcggggtggttgact

SEQ ID NO: 523082 - DNA, 60 bp, Artificial
  Synthetic oligonucleotide
tctccgaagaaggtaaccgcgactcagggaacacagaccgatcctgagccttcgagtgag

SEQ ID NO: 523083 - DNA, 60 bp, Artificial
  Synthetic oligonucleotide
aggagacaggagggcctgtccataagatggcgcgctggggagagcttcctcaggtgggtg

SEQ ID NO: 523084 - DNA, 60 bp, Artificial
  Synthetic oligonucleotide
tctgaggcacaggacacgacgagcaacggaaacgagctcaacatacgaggagccgtgccc

SEQ ID NO: 523085 - DNA, 60 bp, Artificial
  Synthetic oligonucleotide
agccagagctctggctcagctgcggggaatcgttggaagagcagcaagatggctaagccg

SEQ ID NO: 523086 - DNA, 60 bp, Artificial
  Synthetic oligonucleotide
agcatggtcagaaactttcccaaatatcagttcttccactacaagccgagatataaataa

SEQ ID NO: 523087 - DNA, 60 bp, Artificial
  Synthetic oligonucleotide
tgactatccatatgtgttaggtcacaatcaggacacccttcccggacacttaccgggcga

SEQ ID NO: 523088 - DNA, 60 bp, Artificial
  Synthetic oligonucleotide
agacgccctacgcagagcttggaatggaacttctcctttacggccacccgctcagcaagt

SEQ ID NO: 523089 - DNA, 60 bp, Artificial
  Synthetic oligonucleotide
tgagttgctcgattggatcgactggagcagtcaacctaccaatgagtctgaagtactccg

SEQ ID NO: 523090 - DNA, 60 bp, Artificial
  Synthetic oligonucleotide
tggacctgaatctccaggcgctcagactgattttctggagcgttttggtcctagccgctg

SEQ ID NO: 523091 - DNA, 60 bp, Artificial
  Synthetic oligonucleotide
tgtctcatgcattcagactgggtcgagcaagctaaatgtatcttgggcggcacggaattc

SEQ ID NO: 523092 - DNA, 60 bp, Artificial
  Synthetic oligonucleotide
acgggggaaggagggaaagccattagtaagctgtacgacggcgctgtgacgggatggtct

SEQ ID NO: 523093 - DNA, 60 bp, Artificial
  Synthetic oligonucleotide
acgaagaattttacacgactccattgagcttcgaagaaaccaaaattttcgtgaaatggt

SEQ ID NO: 523094 - DNA, 60 bp, Artificial
  Synthetic oligonucleotide
accacacagtgtacttcaggacagggacagagaagcggctgctaccaccgctgaacacgg

SEQ ID NO: 523095 - DNA, 60 bp, Artificial
  Synthetic oligonucleotide
acatatgtcatccgaattgatattaaggactggcgagttcatgaacgggctattatgggc

SEQ ID NO: 523096 - DNA, 60 bp, Artificial
  Synthetic oligonucleotide
tgtgtttactattaactaaaccaaccacacttatatgaccttatgtctttagggtgggtg

SEQ ID NO: 523097 - DNA, 60 bp, Artificial
  Synthetic oligonucleotide
ttccatgaaattctctcatggctgaataccccagatctgggacatagcgagctgataagc

SEQ ID NO: 523098 - DNA, 60 bp, Artificial
  Synthetic oligonucleotide
aaggtacccagggtagacagacacaccttgctcgataccgaggacgggaccttaccgatg

SEQ ID NO: 523099 - DNA, 60 bp, Artificial
  Synthetic oligonucleotide
aagatgagaccaaaccagacctggaacccaatacaccagatcacaacttctcgtggtggg

SEQ ID NO: 523100 - DNA, 60 bp, Artificial
  Synthetic oligonucleotide
aagaccagatgagaccgtatcagaaacacggtccgtggtggccaggacccggctacagag

SEQ ID NO: 523101 - DNA, 60 bp, Artificial
  Synthetic oligonucleotide
ttctatagacagcatttagcgggtgtgactcctcctgagactgttgctccttcttctgta

SEQ ID NO: 523102 - DNA, 60 bp, Artificial
  Synthetic oligonucleotide
aacatccagggttataatgctatacaggtcggccactgggtggcgaccgtgctagacaag

SEQ ID NO: 523103 - DNA, 60 bp, Artificial
  Synthetic oligonucleotide
ttgccagacaaaattgcattacctgggatcaatgtagggagttactttttacgtataaac

SEQ ID NO: 523104 - DNA, 60 bp, Artificial
  Synthetic oligonucleotide
aacataccgagtgatcacaaagccgctttcggggttacagggtacaggcttgctgtcgct

SEQ ID NO: 523105 - DNA, 60 bp, Artificial
  Synthetic oligonucleotide
ttttgccccctaatcctccctctgttgatcaggggtcccatttggggagcaagcggccat

SEQ ID NO: 523106 - DNA, 60 bp, Artificial
  Synthetic oligonucleotide
ttttgggtgaagggtccaactgacaagtactgggagtccccaagaagcatggtgggagag

SEQ ID NO: 523107 - DNA, 60 bp, Artificial
  Synthetic oligonucleotide
aaaccagagggaatgacctaccaatcgtccgttctcacatacggcgcagccacgggaccg

SEQ ID NO: 523108 - DNA, 60 bp, Artificial
  Synthetic oligonucleotide
aaaaacactgcgcacgcgctctctttactgacgactggtgctctcaacctcgagacgatg

SEQ ID NO: 523109 - DNA, 60 bp, Artificial
  Synthetic oligonucleotide
cacaggtcctggaaatccactccctcacggagctcctcgcaatgaaattgatctctctgc

SEQ ID NO: 523110 - DNA, 60 bp, Artificial
  Synthetic oligonucleotide
tcaggacgagaccgtcgcctgtctgacctacagggacagacacaacgagtctcacgctca

SEQ ID NO: 523111 - DNA, 60 bp, Artificial
  Synthetic oligonucleotide
caatgtgtggcttttactggcacagtactcgcctcgcgcggtcgggtacagactggatct

SEQ ID NO: 523112 - DNA, 60 bp, Artificial
  Synthetic oligonucleotide
tcaggtcatagagtgccatacaagcctctctgacctaagtatccaagatgaagagagcac

SEQ ID NO: 523113 - DNA, 60 bp, Artificial
  Synthetic oligonucleotide
caatacgatgcaattaagtcagaggggcagaatagaggtctgagctactttggatacaag

SEQ ID NO: 523114 - DNA, 60 bp, Artificial
  Synthetic oligonucleotide
caagttactctcatcactggggcaaagtgcctgactggtcggagaactgggcggagccag

SEQ ID NO: 523115 - DNA, 60 bp, Artificial
  Synthetic oligonucleotide
tccgggggtgggacttccggggtcaaaggtcacttccgggtcaaaggttgtttttccggt

SEQ ID NO: 523116 - DNA, 60 bp, Artificial
  Synthetic oligonucleotide
caaaggcgaccatgcaaaattcagggtacgacgtgaaccctgtcaactgtggtagcagca

SEQ ID NO: 523117 - DNA, 60 bp, Artificial
  Synthetic oligonucleotide
tcgcatctggaggatctcgcagtacgggtactttcaactacaatctgacctgacggacgg

SEQ ID NO: 523118 - DNA, 60 bp, Artificial
  Synthetic oligonucleotide
atcgagatccgagtccgattccggacaagcgagctcgatggagctcgacctctcaccaga

SEQ ID NO: 523119 - DNA, 60 bp, Artificial
  Synthetic oligonucleotide
atccgcttccggggtcaaaggtcacttccgggtcaaaggttgtttttccggtgacgtcac

SEQ ID NO: 523120 - DNA, 60 bp, Artificial
  Synthetic oligonucleotide
atatttgtcagggtcgcaaaagtgcccattccgggggagtcagactcttatttgaaccta

SEQ ID NO: 523121 - DNA, 60 bp, Artificial
  Synthetic oligonucleotide
atactgatcaaatgaagccagaaacggttgagaccactgtaaccacagcacaggaaacta

SEQ ID NO: 523122 - DNA, 60 bp, Artificial
  Synthetic oligonucleotide
ataacaaacctagtaactggatgcccggtccgagtattggatatataggaaacacaacaa

SEQ ID NO: 523123 - DNA, 60 bp, Artificial
  Synthetic oligonucleotide
ataagtgacgctgagatgctggaggctgccatggagattgatggcgccagcgaatagaaa

SEQ ID NO: 523124 - DNA, 60 bp, Artificial
  Synthetic oligonucleotide
atacgacaaccagtctagcacaaaatttgtatactctagatattcgccatataacaaacc

SEQ ID NO: 523125 - DNA, 60 bp, Artificial
  Synthetic oligonucleotide
tctaatacaaactctaactcaatgagtgaaaatgtggaacaacacaaccctattaatgca

SEQ ID NO: 523126 - DNA, 60 bp, Artificial
  Synthetic oligonucleotide
agtgcggagcatacgagttttcgtatacagatcaaagtccaatagattgggactattcaa

SEQ ID NO: 523127 - DNA, 60 bp, Artificial
  Synthetic oligonucleotide
atacgacaactcatctagcactaaatttgtatacgctagatattcaccatataacaaacc

SEQ ID NO: 523128 - DNA, 60 bp, Artificial
  Synthetic oligonucleotide
atacgatgtgacacctgtaaatggtgcctgctcccgactagactctgttaatttggcata

SEQ ID NO: 523129 - DNA, 59 bp, Artificial
  Synthetic oligonucleotide
actactcctactggctgagacagctgggacggtttatgtttcagtacgttagctgggag

SEQ ID NO: 523130 - DNA, 59 bp, Artificial
  Synthetic oligonucleotide
ggtcagtctcagatacaaggttctaacatactttctgaagtaactagactgagaccagt

SEQ ID NO: 523131 - DNA, 59 bp, Artificial
  Synthetic oligonucleotide
gtcctgccgattaaaaagtaggtcatgacgtcacaatggcctacgtgacttggtgtacg

SEQ ID NO: 523132 - DNA, 59 bp, Artificial
  Synthetic oligonucleotide
caaatatgggataaagaacttgatacagatctaaaacctagactacatgttacagctcc

SEQ ID NO: 523133 - DNA, 59 bp, Artificial
  Synthetic oligonucleotide
caggattaactctaccaggatacaaataccttggtccaggaaactcactagaccaagga

SEQ ID NO: 523134 - DNA, 58 bp, Artificial
  Synthetic oligonucleotide
tcaaaattgcctacgaagagacctggatttatatcttccaataacccaacccgaaaca

SEQ ID NO: 523135 - DNA, 58 bp, Artificial
  Synthetic oligonucleotide
ttttcgggcacagccaatgacagcgatggggtgacatgacgtcaacgatcctgattgg

SEQ ID NO: 523136 - DNA, 58 bp, Artificial
  Synthetic oligonucleotide
atgagagccagctacagaatgtattatgcgctcgataccccgatttattatccgatcc

SEQ ID NO: 523137 - DNA, 58 bp, Artificial
  Synthetic oligonucleotide
tcgtggtgggtctggcagatatgatgacataaccaagtggctgcctacacctacagga

SEQ ID NO: 523138 - DNA, 58 bp, Artificial
  Synthetic oligonucleotide
cttgaatcctcaggtggaactaagctaatagaacagttactaaatatgctacacatac

SEQ ID NO: 523139 - DNA, 58 bp, Artificial
  Synthetic oligonucleotide
caaaactgcgagagacgaattcttcagttcatttatacatagtggaaatgttcatagt

SEQ ID NO: 523140 - DNA, 58 bp, Artificial
  Synthetic oligonucleotide
catttccattaaataatccatgtccttctcattcacagacctatatattgaactcggc

SEQ ID NO: 523141 - DNA, 58 bp, Artificial
  Synthetic oligonucleotide
tctacaggtagtttcaataatcaaacagaatttcaatacttgggggagggcttggtta

SEQ ID NO: 523142 - DNA, 58 bp, Artificial
  Synthetic oligonucleotide
aggtgaggcatcaccggtagcaggaggatcagcacaagttgatccacgtacaggagga

SEQ ID NO: 523143 - DNA, 58 bp, Artificial
  Synthetic oligonucleotide
caagagatcctgtagaagttgaagactacagaattgctatgattccagataataaagg

SEQ ID NO: 523144 - DNA, 57 bp, Artificial
  Synthetic oligonucleotide
gaatgggaagaggcacagaacgtatgctcaagcgaaaacgaactagttcaattctta

SEQ ID NO: 523145 - DNA, 57 bp, Artificial
  Synthetic oligonucleotide
ctaaccaagtaaaccaattcaaagccatatgttccggtcaaacaattagaattgacc

SEQ ID NO: 523146 - DNA, 57 bp, Artificial
  Synthetic oligonucleotide
agaagactggatgatgacagatccagacagttatatagaaatgatggctcaaaccgg

SEQ ID NO: 523147 - DNA, 57 bp, Artificial
  Synthetic oligonucleotide
ctagccgctgctttggggctgaagtctgctatgcggcgcatatggcagcctttaact

SEQ ID NO: 523148 - DNA, 57 bp, Artificial
  Synthetic oligonucleotide
agatagcctatcaagcacgaacacaggggaactatcgccatcgccacacacgtctac

SEQ ID NO: 523149 - DNA, 56 bp, Artificial
  Synthetic oligonucleotide
ttcagactgggtcgagcaagctaaatgtatcttgggcggcacggagtttagaattg

SEQ ID NO: 523150 - DNA, 56 bp, Artificial
  Synthetic oligonucleotide
gtgggaacacagtcagtacagttcatgagaaaccgatcagggatagaacggttcag

SEQ ID NO: 523151 - DNA, 56 bp, Artificial
  Synthetic oligonucleotide
tttttgctggtcatggatggaactatattaaagtgtgtcatgccattgcttgtgta

SEQ ID NO: 523152 - DNA, 56 bp, Artificial
  Synthetic oligonucleotide
agaagcgcgttcgaagcagcagcgtgtgctcagtgtcggactgggtttctggtccg

SEQ ID NO: 523153 - DNA, 56 bp, Artificial
  Synthetic oligonucleotide
cggttctctccttactcgaggatccaggcgagggaccctcgagtcaacgagaggtc

SEQ ID NO: 523154 - DNA, 56 bp, Artificial
  Synthetic oligonucleotide
aggacctagtggagttcaacctgttgaaacggcacaacaatcaccaactatgtctg

SEQ ID NO: 523155 - DNA, 56 bp, Artificial
  Synthetic oligonucleotide
aacagttggagagcgacttcaacgaggaactgaccttggactaaggtacgatggca

SEQ ID NO: 523156 - DNA, 56 bp, Artificial
  Synthetic oligonucleotide
gagcaaacaacaataactactttatccagcgaagttccgtccagacgggaaccaga

SEQ ID NO: 523157 - DNA, 55 bp, Artificial
  Synthetic oligonucleotide
ccacatccatattttactacacctggaaatacacaagcagaccaagcacgtgacc

SEQ ID NO: 523158 - DNA, 55 bp, Artificial
  Synthetic oligonucleotide
tacctatgggcctctaactgcatttccacacaccataccaatctacccacaagga

SEQ ID NO: 523159 - DNA, 55 bp, Artificial
  Synthetic oligonucleotide
ccactccctcacggagctcctcgcaatgaaattgatctctctgctgcgaaacatg

SEQ ID NO: 523160 - DNA, 55 bp, Artificial
  Synthetic oligonucleotide
ccagacctggaacccaatacaccagatcacaacttctcgtggtgggtctggcaga

SEQ ID NO: 523161 - DNA, 55 bp, Artificial
  Synthetic oligonucleotide
ccatacaagcctctctgacctaagtatccaagatgaagagagcacactctccggc

SEQ ID NO: 523162 - DNA, 55 bp, Artificial
  Synthetic oligonucleotide
cccaaatcaggcgtgggacaccactccgatatccagggacactcccatttgggtc

SEQ ID NO: 523163 - DNA, 55 bp, Artificial
  Synthetic oligonucleotide
cccattccgggagagtcagactcttacctaaacctatacgtcacgggacaaatta

SEQ ID NO: 523164 - DNA, 55 bp, Artificial
  Synthetic oligonucleotide
aatgactggtttccgccactagagagcggggtggttgacttaggagacctgtcgg

SEQ ID NO: 523165 - DNA, 55 bp, Artificial
  Synthetic oligonucleotide
ccttatactttgtcaacggatggaaaatccggtccggagtacaatgtgccgcgag

SEQ ID NO: 523166 - DNA, 55 bp, Artificial
  Synthetic oligonucleotide
gtgttaaaatggattcacctccatctacacctagaaatgcagacatacctgaaac

SEQ ID NO: 523167 - DNA, 55 bp, Artificial
  Synthetic oligonucleotide
cgctccagagacacagctacaaactactctcagctactgcagcatggcagcggga

SEQ ID NO: 523168 - DNA, 55 bp, Artificial
  Synthetic oligonucleotide
aaccactccttggcaatactttgacttcaactgctgggcttcacatttcagccca

SEQ ID NO: 523169 - DNA, 55 bp, Artificial
  Synthetic oligonucleotide
gtcgcactagacaccaataacacacttccatacacaccagcagcacctagaagtg

SEQ ID NO: 523170 - DNA, 55 bp, Artificial
  Synthetic oligonucleotide
ttgagagctgctacaggccaacgaacgcgcagatggccattggggtacaactgcg

SEQ ID NO: 523171 - DNA, 55 bp, Artificial
  Synthetic oligonucleotide
tgcatacaatcccagatccaggagatggtaccataccaatgtcacatcctcctgg

SEQ ID NO: 523172 - DNA, 55 bp, Artificial
  Synthetic oligonucleotide
agatgcacagatgtcccgcatggaaaatcatcccgaaacggaaacccagtcgaaa

SEQ ID NO: 523173 - DNA, 55 bp, Artificial
  Synthetic oligonucleotide
tgccagagcaaactcttagcctggtgggaagagtgtgtgatgcacaacgattggg

SEQ ID NO: 523174 - DNA, 55 bp, Artificial
  Synthetic oligonucleotide
actaaagaggaactaactatgctacgtccagatctggtgattatgtttgaaagct

SEQ ID NO: 523175 - DNA, 55 bp, Artificial
  Synthetic oligonucleotide
tggagactacggaccgcagtcagccgctgccggctcgacctacttcgtccagtga

SEQ ID NO: 523176 - DNA, 55 bp, Artificial
  Synthetic oligonucleotide
acgggtgttcaattttgaatggacacataattccaagcatacacagacacacctt

SEQ ID NO: 523177 - DNA, 55 bp, Artificial
  Synthetic oligonucleotide
caaacagatctctaggactgcctccaaaactactaactgaacctaccacagaagg

SEQ ID NO: 523178 - DNA, 55 bp, Artificial
  Synthetic oligonucleotide
tgtctttagggtgggtgggtgggaattactatgtattcctttgagttagttggtc

SEQ ID NO: 523179 - DNA, 55 bp, Artificial
  Synthetic oligonucleotide
caatgagtgaaaatgtggaacaacacaaccctattaatgcaggcactgaattgtc

SEQ ID NO: 523180 - DNA, 55 bp, Artificial
  Synthetic oligonucleotide
tcagggtacgacgtgaaccctgtcaactgtggtagcagcagattagacgcgcact

SEQ ID NO: 523181 - DNA, 55 bp, Artificial
  Synthetic oligonucleotide
cacaggaggatgggaagcaggaacattcttttatgataatcacatagtcacagcc

SEQ ID NO: 523182 - DNA, 55 bp, Artificial; identical to SEQ ID NO: 474717
  Synthetic oligonucleotide

SEQ ID NO: 523183 - DNA, 55 bp, Artificial
  Synthetic oligonucleotide
cactgcacacgcatcaagactcatacatctaaatatgccagaacacgaaacatac

SEQ ID NO: 523184 - DNA, 55 bp, Artificial; identical to SEQ ID NO: 346862
  Synthetic oligonucleotide

SEQ ID NO: 523185 - DNA, 55 bp, Artificial
  Synthetic oligonucleotide
cagatttgggcttatatccctaacactgataacaaacataactgtggaacacccc

SEQ ID NO: 523186 - DNA, 55 bp, Artificial
  Synthetic oligonucleotide
cagtcgcaacaactggaagagagcaactatcagaatgaaagtggaccttccgggc

SEQ ID NO: 523187 - DNA, 55 bp, Artificial
  Synthetic oligonucleotide
tgtttaaagctaaacaggccattgcacctgctctgccaggtacctcctcaggagg

SEQ ID NO: 523188 - DNA, 55 bp, Artificial
  Synthetic oligonucleotide
gatctctatactcttatacaacaccctccacactgctacgtcagtgtgtatgaga

SEQ ID NO: 523189 - DNA, 55 bp, Artificial
  Synthetic oligonucleotide
gctgtaaatagaagagtaaattattgggatgaacccaattttgaaccggatgctg

SEQ ID NO: 523190 - DNA, 55 bp, Artificial
  Synthetic oligonucleotide
gactgcggatgggtcgacaacacacgctcgagcgtcatgcctcagatggcctgca

SEQ ID NO: 523191 - DNA, 55 bp, Artificial
  Synthetic oligonucleotide
gaccttgcttcagatggttcacattaagatttgtcagaaatatacggccttgtct

SEQ ID NO: 523192 - DNA, 55 bp, Artificial
  Synthetic oligonucleotide
gaagccttagccagttctttgcagcggtggaacgaagaatgggaatccttgccac

SEQ ID NO: 523193 - DNA, 55 bp, Artificial
  Synthetic oligonucleotide
ggagaagacgcaaccttctccttcacattttcatgcaacaaactcacacttgaca

SEQ ID NO: 523194 - DNA, 55 bp, Artificial
  Synthetic oligonucleotide
ggaggctgccatggagattgatggcgccagcgaatagaaagcccggtggttgggt

SEQ ID NO: 523195 - DNA, 55 bp, Artificial
  Synthetic oligonucleotide
gaagccagaaacggttgagaccactgtaaccacagcacaggaaactaagcgcggc

SEQ ID NO: 523196 - DNA, 55 bp, Artificial
  Synthetic oligonucleotide
ggcgactcacgcagactcgctccacgctaataaagcatggagattactactaaaa

SEQ ID NO: 523197 - DNA, 55 bp, Artificial
  Synthetic oligonucleotide
ggcgtacgccattccacaggcagactttaaccctctaattcacaccagacgatac

SEQ ID NO: 523198 - DNA, 55 bp, Artificial
  Synthetic oligonucleotide
cttggttaataaaagatgtactagcatagaagactggatgatgacagatccagac

SEQ ID NO: 523199 - DNA, 55 bp, Artificial
  Synthetic oligonucleotide
tttttccggtgacgtcacgggatgtgacgcagtacagaccgacgagatatttggc

SEQ ID NO: 523200 - DNA, 55 bp, Artificial
  Synthetic oligonucleotide
cttgcctccgactccagtgaagaagaacaagaggatcctcaggtcatagagtgcc

SEQ ID NO: 523201 - DNA, 55 bp, Artificial
  Synthetic oligonucleotide
aacagtacgcctacatcacagtcgcatctcaggcgcaggacacaacggacaacgc

SEQ ID NO: 523202 - DNA, 55 bp, Artificial
  Synthetic oligonucleotide
gggagagatgctcggactcatctccgggaacatcgaggaaggagagccaccgatc

SEQ ID NO: 523203 - DNA, 55 bp, Artificial
  Synthetic oligonucleotide
ctaaccagaaaactgccaggtgattttggacttttagaagaaactgaatggccac

SEQ ID NO: 523204 - DNA, 55 bp, Artificial
  Synthetic oligonucleotide
gtcacaatcaggacacccttcccggacacttaccgggcgagcactatgtacttcc

SEQ ID NO: 523205 - DNA, 55 bp, Artificial
  Synthetic oligonucleotide
gtaactggatgcctggtccaagtatcggatatataggaaacacaacaaccggctc

SEQ ID NO: 523206 - DNA, 55 bp, Artificial
  Synthetic oligonucleotide
aacatattcatggtattccatgggagcgtttattaatgtatctgagcgaaggaga

SEQ ID NO: 523207 - DNA, 55 bp, Artificial
  Synthetic oligonucleotide
ggtcggaaatagaaaccgacataagagcctgctttggtgaaaactgtgcacccac

SEQ ID NO: 523208 - DNA, 55 bp, Artificial
  Synthetic oligonucleotide
ggtcctaattacccagcacaaggtattgccaacgaagtatcactatgggacacaa

SEQ ID NO: 523209 - DNA, 55 bp, Artificial
  Synthetic oligonucleotide
ctctttactgacgactggtgctctcaacctcgagacgatgtcgagtggcgcgtcg

SEQ ID NO: 523210 - DNA, 55 bp, Artificial
  Synthetic oligonucleotide
gggatacaatccctttcaagcaggacactggctatgctgcgtcctaaacaaatcc

SEQ ID NO: 523211 - DNA, 55 bp, Artificial
  Synthetic oligonucleotide
ctctcatggctgaataccccagatctgggacatagcgagctgataagcatacttc

SEQ ID NO: 523212 - DNA, 55 bp, Artificial
  Synthetic oligonucleotide
ctatctttgcagacagagataccggagctctttagcaccatggcaggcaaccagt

SEQ ID NO: 523213 - DNA, 55 bp, Artificial
  Synthetic oligonucleotide
ctcgggaggagctttgacgtcaatccaaggaagagtaaggcaatccctatcgacc

SEQ ID NO: 523214 - DNA, 54 bp, Artificial
  Synthetic oligonucleotide
gcgtcatggaaattaactggtaatatgggtcaaggtacatctcagccgcatgtg

SEQ ID NO: 523215 - DNA, 54 bp, Artificial
  Synthetic oligonucleotide
gataataattatcccgatttggatcacacgttgcagctacgttgcttcaggtac

SEQ ID NO: 523216 - DNA, 54 bp, Artificial
  Synthetic oligonucleotide
gacttgtcctgcctgggcaccgttacactggtcccggaaactcggacgacaggg

SEQ ID NO: 523217 - DNA, 54 bp, Artificial
  Synthetic oligonucleotide
atgctagattcggctgatggcacactaccgatgccacatccacctggtactatc

SEQ ID NO: 523218 - DNA, 54 bp, Artificial
  Synthetic oligonucleotide
ggagagattgaaccaagagaagtagccgaatggctatccatctgtctctctcgg

SEQ ID NO: 523219 - DNA, 54 bp, Artificial
  Synthetic oligonucleotide
gtggttgacttaggagacctgtcggccatatcacgtgacgagccagacagtgat

SEQ ID NO: 523220 - DNA, 54 bp, Artificial
  Synthetic oligonucleotide
aatactccaatggtggaccatttctaactcctatagtaccaacagcagacacac

SEQ ID NO: 523221 - DNA, 53 bp, Artificial
  Synthetic oligonucleotide
cggctcgacctacttcgtccagtgagtctttactctctgcctgaatactgcct

SEQ ID NO: 523222 - DNA, 53 bp, Artificial
  Synthetic oligonucleotide
ggggtacttagactacaaccaaatgaacgtccacttctcacctagtgaatttc

SEQ ID NO: 523223 - DNA, 53 bp, Artificial
  Synthetic oligonucleotide
cgagaaaacttccgctaatctagagtctcagatttgggcttatatccctaaca

SEQ ID NO: 523224 - DNA, 53 bp, Artificial
  Synthetic oligonucleotide
gaagatactcagttcccagtactttcatgggagcaatgccaagcaaaatctgc

SEQ ID NO: 523225 - DNA, 53 bp, Artificial
  Synthetic oligonucleotide
gattcttacagccactatcattgaaaggtgcatcagcaccaacctcggagact

SEQ ID NO: 523226 - DNA, 52 bp, Artificial
  Synthetic oligonucleotide
acatacgcggctacgtttgtgaatgggaagtgggtcttgcctcaggttagga

SEQ ID NO: 523227 - DNA, 52 bp, Artificial
  Synthetic oligonucleotide
aggagtcttatgggtcacctaacgatgcgctaactgaaattacaacccccat

SEQ ID NO: 523228 - DNA, 52 bp, Artificial
  Synthetic oligonucleotide
cttaccgatgacgcatcctccgggaaccatctacgtcaaactcgccaacatt

SEQ ID NO: 523229 - DNA, 52 bp, Artificial
  Synthetic oligonucleotide
cgtggaaccagacagggggtggactacccgattccgtgtcaaaaacctttaa

SEQ ID NO: 523230 - DNA, 52 bp, Artificial
  Synthetic oligonucleotide
caacgcagagtacatgggctgtcttgtggcctgttaatgtataacatgctat

SEQ ID NO: 523231 - DNA, 52 bp, Artificial
  Synthetic oligonucleotide
cacatacaaatactagatggtaggttggtaatatggtatagattaactgtta

SEQ ID NO: 523232 - DNA, 52 bp, Artificial
  Synthetic oligonucleotide
cagtccaccgtttattataacatcgaatgtggacatgaccgtggttcaagaa

SEQ ID NO: 523233 - DNA, 52 bp, Artificial
  Synthetic oligonucleotide
catactacacaacaccaaatgacccaggtgtaacaccacacgtgcacggaga

SEQ ID NO: 523234 - DNA, 52 bp, Artificial
  Synthetic oligonucleotide
cgggggagactggtggatgcagttacttacgcaccttatcctgctgttattt

SEQ ID NO: 523235 - DNA, 52 bp, Artificial
  Synthetic oligonucleotide
cctgctcccgactggactctgttgacttggcatatgattcgtctgaatatag

SEQ ID NO: 523236 - DNA, 52 bp, Artificial
  Synthetic oligonucleotide
cgaccaataggcgtcctggcggttggactctgcccggtttcagatatcttgg

SEQ ID NO: 523237 - DNA, 51 bp, Artificial
  Synthetic oligonucleotide
gggaagctgaaccatatataactaaaaactggagacctgaattcaggcact

SEQ ID NO: 523238 - DNA, 51 bp, Artificial
  Synthetic oligonucleotide
ttacatccttttgtatggtgttatctagttgataagtatgtacctattgaa

SEQ ID NO: 523239 - DNA, 50 bp, Artificial
  Synthetic oligonucleotide
agtggttcgctcccatctttaacggtcatgaatataaacgaatgtcaccg

SEQ ID NO: 523240 - DNA, 50 bp, Artificial
  Synthetic oligonucleotide
ggtgctataagatttacaatgggttaccaacatggacaattaaccacatc

SEQ ID NO: 523241 - DNA, 50 bp, Artificial
  Synthetic oligonucleotide
tgggaggagccaaaaatgcaaaccccaataaatacaccaacagactctca

SEQ ID NO: 523242 - DNA, 50 bp, Artificial
  Synthetic oligonucleotide
aggagcagaaacatcatgggaccaggcaacagacatggaatgggaatcag

SEQ ID NO: 523243 - DNA, 50 bp, Artificial
  Synthetic oligonucleotide
aaactcaagacgccaaagactggggtggtcgaattggtcactacttcttc

SEQ ID NO: 523244 - DNA, 50 bp, Artificial
  Synthetic oligonucleotide
cttggtgcaaaaaatctagtggaagaacatgtattaggtaagacagttta

SEQ ID NO: 523245 - DNA, 50 bp, Artificial
  Synthetic oligonucleotide
tctgatttcaatcgtcgaaaataatctaagaaagggcgacgtaagcaatc

SEQ ID NO: 523246 - DNA, 55 bp, Artificial
  Synthetic oligonucleotide
tacgaagcccaactttaggaggctgggccagaagtagtggatcatattgagaatg

SEQ ID NO: 523247 - DNA, 55 bp, Artificial
  Synthetic oligonucleotide
ggtcgtctatttgcaccctaccagcgtgagggtgtcctttggatgctcacaatgg

SEQ ID NO: 523248 - DNA, 55 bp, Artificial
  Synthetic oligonucleotide
ggcctgcatatttgggtaagtaccaatgtaagcctccatatcagcaccacttggg

SEQ ID NO: 523249 - DNA, 55 bp, Artificial
  Synthetic oligonucleotide
ggagtaaccaaggtttgggacgctacagatgcaactgatacaactacaggtgcct

SEQ ID NO: 523250 - DNA, 55 bp, Artificial
  Synthetic oligonucleotide
gccgccacaagggctggtgtcaagtaccaataatttcctcgtctatagtaaatgg

SEQ ID NO: 523251 - DNA, 55 bp, Artificial
  Synthetic oligonucleotide
gccacacgaggagatgtcaccatttctagacgatgagacactcaaacaaaatcta

SEQ ID NO: 523252 - DNA, 55 bp, Artificial
  Synthetic oligonucleotide
gacctaccatcgttaaacttcttgagaagttgagcaccattgactcccaaaccat

SEQ ID NO: 523253 - DNA, 55 bp, Artificial
  Synthetic oligonucleotide
ctggtcgtctagggtcggatgaagcatccaattctgggtctggaaaggggtttgg

SEQ ID NO: 523254 - DNA, 55 bp, Artificial
  Synthetic oligonucleotide
cgggtacctgcaacttcagtagactcgataatgccaaacttatactcagaggtgt

SEQ ID NO: 523255 - DNA, 55 bp, Artificial
  Synthetic oligonucleotide
ccgtggtgatccccaatgtgttccatatgatggtaggacgtgttccacaacttgc

SEQ ID NO: 523256 - DNA, 55 bp, Artificial
  Synthetic oligonucleotide
ccgaggagcatacatttgagatttgggatcgcaccccttggcacccctgagcaac

SEQ ID NO: 523257 - DNA, 55 bp, Artificial
  Synthetic oligonucleotide
ccccgtgcttcatgtaggagccttaccaaaaccttaccgaaacacgagtaacaca

SEQ ID NO: 523258 - DNA, 55 bp, Artificial
  Synthetic oligonucleotide
ccattttgttaccaccagacaacttacctagacgaatagtcatttcacggacatc

SEQ ID NO: 523259 - DNA, 55 bp, Artificial
  Synthetic oligonucleotide
acagtcatgaacacacactcgtagacctccttatcttcacccacatacttctgaa

SEQ ID NO: 523260 - DNA, 52 bp, Artificial
  Synthetic oligonucleotide
gtaacgcggtcactgtgatgccttacacaaaacgcgagccttgcaaaatgaa

SEQ ID NO: 523261 - DNA, 51 bp, Artificial
  Synthetic oligonucleotide
atgttgactatagcaccgtcttcgtgaagtcgtggttggctaaaactgttt

SEQ ID NO: 523262 - DNA, 51 bp, Artificial
  Synthetic oligonucleotide
agccataccatagacgatgaatgggttggggtcttggcggttctccacgta

SEQ ID NO: 523263 - DNA, 60 bp, Artificial
  Synthetic oligonucleotide
ccaggaccaagctcaactcgcagcatgaaaagatcctggaactctacactgactctgtta

SEQ ID NO: 523264 - DNA, 60 bp, Artificial
  Synthetic oligonucleotide
cccaagtaggtgaatggtcgttgcccttaccaggagggttaatggatgtaggtgtgtttg

SEQ ID NO: 523265 - DNA, 60 bp, Artificial
  Synthetic oligonucleotide
tgcaattcgaccttggaatcaggatgtggttgattatgagatggtgtattggccacctgg

SEQ ID NO: 523266 - DNA, 60 bp, Artificial
  Synthetic oligonucleotide
tgcacgcgtcgctgatactattgggagcggtccggtcaactcggagtccattccagccct

SEQ ID NO: 523267 - DNA, 60 bp, Artificial
  Synthetic oligonucleotide
tgtgtgaacggcaaaaaggggcaatatcgttacccgcttgactactacgggaaacccagt

SEQ ID NO: 523268 - DNA, 60 bp, Artificial
  Synthetic oligonucleotide
cccactcacatcattccggatgacactgaccggatctctatcggtccggacacctttgac

SEQ ID NO: 523269 - DNA, 60 bp, Artificial
  Synthetic oligonucleotide
ggttcgaggccctcaagatggtactggagaaaattgggtatggtgacagggtcgactaca

SEQ ID NO: 523270 - DNA, 60 bp, Artificial
  Synthetic oligonucleotide
ggttcctatggccgcactcgaagataagggtagactctttacttctaagtacgtgcttgc

SEQ ID NO: 523271 - DNA, 60 bp, Artificial
  Synthetic oligonucleotide
ggttcatcagtcttcctggtgccttgggagacttgggtgtgtttggtcagaattgtgcat

SEQ ID NO: 523272 - DNA, 60 bp, Artificial
  Synthetic oligonucleotide
ccccagtgtttggagctcgcacaaagaacgttccagacaggacaaatgtactaaccacca

SEQ ID NO: 523273 - DNA, 60 bp, Artificial
  Synthetic oligonucleotide
cccctaggatccactggatgttagtacactggtatcgcggtacctttgtacgcctgtttt

SEQ ID NO: 523274 - DNA, 60 bp, Artificial
  Synthetic oligonucleotide
ggtgtccgggtgtgtgggatagacccagatgtgcagtggatgcgagcatttgagtcagag

SEQ ID NO: 523275 - DNA, 60 bp, Artificial
  Synthetic oligonucleotide
ggtgtcatcttgtggcgaggtcgagagggcctaacatgtatgccaatttatgaccttcac

SEQ ID NO: 523276 - DNA, 60 bp, Artificial
  Synthetic oligonucleotide
ggtggaaagacacctcaaccgggccatgacaattgtgcaggctgtttcttcctttgtggt

SEQ ID NO: 523277 - DNA, 60 bp, Artificial
  Synthetic oligonucleotide
ggtcgcttacggacagtggcctgaaaccctgtccgacaatgacgccactgctattgacaa

SEQ ID NO: 523278 - DNA, 60 bp, Artificial
  Synthetic oligonucleotide
ccctcccctgcaactttagaagtatcaaagacactgctcaatagccgccacacctccagt

SEQ ID NO: 523279 - DNA, 60 bp, Artificial
  Synthetic oligonucleotide
tgtgcctgcttgcttggcataatggcaaagaggagtatgagaacttctgccgcaagatca

SEQ ID NO: 523280 - DNA, 60 bp, Artificial
  Synthetic oligonucleotide
tgcatgaatcaattagatggaccaagaatgccagctacactcaagaacatgttacctcgc

SEQ ID NO: 523281 - DNA, 60 bp, Artificial
  Synthetic oligonucleotide
ccgctggttgtgacccctgccaacaagggtcaagatttcccagaaacatccacaatctat

SEQ ID NO: 523282 - DNA, 60 bp, Artificial
  Synthetic oligonucleotide
ccggcgagagtaacacattcccagaaacttcagtggccctagttaaggaagtatttacct

SEQ ID NO: 523283 - DNA, 60 bp, Artificial
  Synthetic oligonucleotide
cctaaacctgggtggcacccccacaaagagaatgcttatgtacaactttccaaccagagc

SEQ ID NO: 523284 - DNA, 60 bp, Artificial
  Synthetic oligonucleotide
tgcccatgagagaaatccatgagtcaattagatggacaaaggatcctagaaacacgcagg

SEQ ID NO: 523285 - DNA, 60 bp, Artificial
  Synthetic oligonucleotide
cctctgagtatttccactcttgtagttccgttcttggttccctctactactggattgcta

SEQ ID NO: 523286 - DNA, 60 bp, Artificial
  Synthetic oligonucleotide
tgccgtgaacaccgtcttggcatatggggagtggcctagttacttatcagatcttgatgc

SEQ ID NO: 523287 - DNA, 60 bp, Artificial
  Synthetic oligonucleotide
cctgaatgatactatcaggatgaagagaacatttggtaggttgttccaagttttccattc

SEQ ID NO: 523288 - DNA, 60 bp, Artificial
  Synthetic oligonucleotide
gtttacagacttttccaagaattggctcgaataccatctaggattagtacacaaaatgac

SEQ ID NO: 523289 - DNA, 60 bp, Artificial
  Synthetic oligonucleotide
tgttagcaactcttagtctgctggggtgtgattcttcaccgtggcactggttgaaggaga

SEQ ID NO: 523290 - DNA, 60 bp, Artificial
  Synthetic oligonucleotide
caatacgctggactaaggatccaaagaacacacaagaccacgtgcgatctctatgcctat

SEQ ID NO: 523291 - DNA, 60 bp, Artificial
  Synthetic oligonucleotide
caatatggagacaattaagaatattgcagatatggcaactggcgttgttagctcagttga

SEQ ID NO: 523292 - DNA, 60 bp, Artificial
  Synthetic oligonucleotide
gttctttttggatcccccactccgatgtccatagctggtctattggtcatcatctgtgct

SEQ ID NO: 523293 - DNA, 60 bp, Artificial
  Synthetic oligonucleotide
caccacctggtgcagcccccccgagaacacgaaaggatgccatgttagggacacacgtaa

SEQ ID NO: 523294 - DNA, 60 bp, Artificial
  Synthetic oligonucleotide
cacctccagtgtggtttcgagcaagcacttctgttctcccggttgcgtcccatatgctgt

SEQ ID NO: 523295 - DNA, 60 bp, Artificial
  Synthetic oligonucleotide
cacgctaggcaattccaccatcaccacgcaagaggcagctaatgccgtggttgcctatgg

SEQ ID NO: 523296 - DNA, 60 bp, Artificial
  Synthetic oligonucleotide
gttatcaacacaccaagcaagacaaagttggaaccgagtgtgtttcatcaggtgtttgag

SEQ ID NO: 523297 - DNA, 60 bp, Artificial
  Synthetic oligonucleotide
cactcgagactctggcctttcactccggaccgaagaattattcggcctggtgtgagacaa

SEQ ID NO: 523298 - DNA, 60 bp, Artificial
  Synthetic oligonucleotide
gtgggaccgcgacctaatggttgtagaaagcagggcccaaggaattgacaccatagccag

SEQ ID NO: 523299 - DNA, 60 bp, Artificial
  Synthetic oligonucleotide
cagcagaaattaccaactatgccagccagcttactgagatgctcattggagcagacggaa

SEQ ID NO: 523300 - DNA, 60 bp, Artificial
  Synthetic oligonucleotide
tgatgtctggtttctacctcttctcccgaatcctcattgtccccacccacctccgtgaac

SEQ ID NO: 523301 - DNA, 60 bp, Artificial
  Synthetic oligonucleotide
cagtcccagtaggaagatgtcttaagttgcctgcctattctgtgcttagaaaggcatggc

SEQ ID NO: 523302 - DNA, 60 bp, Artificial
  Synthetic oligonucleotide
cagtccttgctgatgcacacgatgaaattctcagacactactcagaatcaatcgctgcac

SEQ ID NO: 523303 - DNA, 60 bp, Artificial
  Synthetic oligonucleotide
cataaactaggacggttgaaatgggtgcacaagtgagcaagaacactgctggatcacaca

SEQ ID NO: 523304 - DNA, 60 bp, Artificial
  Synthetic oligonucleotide
catatgctgtgcaaacggcaaaaaggggcaatatcgttacccgcttgtatactacgggaa

SEQ ID NO: 523305 - DNA, 60 bp, Artificial
  Synthetic oligonucleotide
gtgaggttgactcagtcattgaaaagcaggctctgaagtacaattcaaatgtgttcagcc

SEQ ID NO: 523306 - DNA, 60 bp, Artificial
  Synthetic oligonucleotide
catgccaatgaaagaaatccacgagtccatacggtggaccaaggacgcgcgaaataccca

SEQ ID NO: 523307 - DNA, 60 bp, Artificial
  Synthetic oligonucleotide
ccaacaaacggagggtatacccactatgtgcgcgtttgcagtgggagcctgcaaatttag

SEQ ID NO: 523308 - DNA, 60 bp, Artificial
  Synthetic oligonucleotide
gtgacactatggatctaagcaggggctcactctacgctgctttacagctggctgtgagtt

SEQ ID NO: 523309 - DNA, 60 bp, Artificial
  Synthetic oligonucleotide
ccaagcagtccgtactggtatcttgacataccgtgcagttttggatagtgaaggatgccc

SEQ ID NO: 523310 - DNA, 60 bp, Artificial
  Synthetic oligonucleotide
tgtgtgtgcctggtcagcatatctgagacgatgttccgctgtcccagaccagtccagtaa

SEQ ID NO: 523311 - DNA, 60 bp, Artificial
  Synthetic oligonucleotide
ccagcgtatgacgtacacccattgggcattgcgtgcggtccactccgaccgcacggaaca

SEQ ID NO: 523312 - DNA, 60 bp, Artificial
  Synthetic oligonucleotide
gtcaaaatttcacagttattttctgtgatggctgattcaaccacgccatctgaaaaccat

SEQ ID NO: 523313 - DNA, 60 bp, Artificial
  Synthetic oligonucleotide
ctgcctaaccaaaaacccaaagtccccacgttgcgagtggctaaagtgcaaggtccggca

SEQ ID NO: 523314 - DNA, 60 bp, Artificial
  Synthetic oligonucleotide
ctgctatccacgaccggctacctgtcggtctgggttcaaaatcccctcactggccccaat

SEQ ID NO: 523315 - DNA, 60 bp, Artificial
  Synthetic oligonucleotide
cttaacgtttggcaagaaccctcacctgtcaattgggaccaccactttcagtgaccccat

SEQ ID NO: 523316 - DNA, 60 bp, Artificial
  Synthetic oligonucleotide
ggcacacgttgggactactctgccactaacaactgtacccactttgtttccaatatcact

SEQ ID NO: 523317 - DNA, 60 bp, Artificial
  Synthetic oligonucleotide
tgggacattaactcctcttccaccctagacttcactattccattcatctctcaatcttac

SEQ ID NO: 523318 - DNA, 60 bp, Artificial
  Synthetic oligonucleotide
tgggacaacgtgacctttctcaaaagatcattcgtccgcgacgagaggttcccatttctc

SEQ ID NO: 523319 - DNA, 60 bp, Artificial
  Synthetic oligonucleotide
ggatgatagcatatggagacgatgtaatcgcatcttacccctggccgatcgatgcctcct

SEQ ID NO: 523320 - DNA, 60 bp, Artificial
  Synthetic oligonucleotide
ggatctcccaccccgatgtcaatagctggtctgttggtcatcatctgtgctgatcttgcc

SEQ ID NO: 523321 - DNA, 60 bp, Artificial
  Synthetic oligonucleotide
cttttgttgcgtgcactcccaccggcggggttgttccacaattactccagtatatgtttg

SEQ ID NO: 523322 - DNA, 60 bp, Artificial
  Synthetic oligonucleotide
tggctgtgataccatagccagatgtcaatgcacaaccggggtgtatttctgtgcctcaag

SEQ ID NO: 523323 - DNA, 60 bp, Artificial
  Synthetic oligonucleotide
gacaggtcattgtttatgcatcacttagaactccatgcttcttcttagtcaagccatttc

SEQ ID NO: 523324 - DNA, 60 bp, Artificial
  Synthetic oligonucleotide
gaccattatgcaggacagctgatgtccctggatatccccactgagcagatgtgcctagag

SEQ ID NO: 523325 - DNA, 60 bp, Artificial
  Synthetic oligonucleotide
tggattccgtggtacctgttaacaacaccgaggggaaagtgttatccattgagtcatatc

SEQ ID NO: 523326 - DNA, 60 bp, Artificial
  Synthetic oligonucleotide
gactacatgcaggggcgtcccggtcaacacggttgcgccgtgggatgcaaccccgacgtt

SEQ ID NO: 523327 - DNA, 60 bp, Artificial
  Synthetic oligonucleotide
gactctttctgatcaaccatacctcactcgaattggtctgagaaatagtgagttatgggt

SEQ ID NO: 523328 - DNA, 60 bp, Artificial
  Synthetic oligonucleotide
gagggttgcgctcagcacacccccagtgtagcttgggccgatgaggctccgaattcccca

SEQ ID NO: 523329 - DNA, 60 bp, Artificial
  Synthetic oligonucleotide
tggacatccccacagggcagatgtgcttagacgaggctttgtatgggactgaaggccttg

SEQ ID NO: 523330 - DNA, 60 bp, Artificial
  Synthetic oligonucleotide
gctgtgtgaacggcagaaaggggcaaaatcgttatccgcttgactactgcgggacgccca

SEQ ID NO: 523331 - DNA, 60 bp, Artificial
  Synthetic oligonucleotide
gagtggaccaagggcgcttaaagcatggtgtcagcaatcttttctaacccatgtttcaca

SEQ ID NO: 523332 - DNA, 60 bp, Artificial
  Synthetic oligonucleotide
gctgcttatggtgacaacgataagttgttatcataaagcttttgggttggccacctggaa

SEQ ID NO: 523333 - DNA, 60 bp, Artificial
  Synthetic oligonucleotide
gctagggcatccaactactacgcatccggctacgttactggatggtaccagaccaacctg

SEQ ID NO: 523334 - DNA, 60 bp, Artificial
  Synthetic oligonucleotide
tggactatctctcttacactactacttcctaccatgtctacgactccatgtggtatacta

SEQ ID NO: 523335 - DNA, 60 bp, Artificial
  Synthetic oligonucleotide
gcctgatgacattcgaccattttacatccacccggtcatggatccagacacttacgaaca

SEQ ID NO: 523336 - DNA, 60 bp, Artificial
  Synthetic oligonucleotide
gcaccgggaaatcactagcaactggcatcattgctcgggcaatagcagacaagtatcact

SEQ ID NO: 523337 - DNA, 60 bp, Artificial
  Synthetic oligonucleotide
gccgttgcaatggttggcacacgttgggactactctgccaccaacaactgtacacacttt

SEQ ID NO: 523338 - DNA, 60 bp, Artificial
  Synthetic oligonucleotide
cctggctaaacacgttggtgaccgtactgatggaccattagccatgattagaggagcccg

SEQ ID NO: 523339 - DNA, 60 bp, Artificial
  Synthetic oligonucleotide
cctttgacacaatggcatatgccaacagggcagctccctggcccgatccacctgaatacg

SEQ ID NO: 523340 - DNA, 60 bp, Artificial
  Synthetic oligonucleotide
tgctacctcctctcaggccattgcttcctctatcaactccctttccagttctattgatgg

SEQ ID NO: 523341 - DNA, 60 bp, Artificial
  Synthetic oligonucleotide
cgatgagatctccaattacgtcggtcaggttagagacatgatggttggctcagacactgt

SEQ ID NO: 523342 - DNA, 60 bp, Artificial
  Synthetic oligonucleotide
cgcacatgctcataggagccgggtttgcaatgccgggcgactgtggaggaatcctacggt

SEQ ID NO: 523343 - DNA, 60 bp, Artificial
  Synthetic oligonucleotide
tggttagatatgttttaggcggcgtgaacatatcagtgatacaggattaacaattaggct

SEQ ID NO: 523344 - DNA, 60 bp, Artificial
  Synthetic oligonucleotide
cgcattgtggacgtcccatctttggctcacgtcataatgggaagagttctgctgggtaga

SEQ ID NO: 523345 - DNA, 60 bp, Artificial
  Synthetic oligonucleotide
cgccaacccagtggatgcaccaaccctgcccgactcttcgagcaatcgattttacaccct

SEQ ID NO: 523346 - DNA, 60 bp, Artificial
  Synthetic oligonucleotide
gggacgcccagtatcaccatggattgatttgagagttgcgctcagcacatccccagtgta

SEQ ID NO: 523347 - DNA, 60 bp, Artificial
  Synthetic oligonucleotide
cgcttcatgtcctgttcctaactactataaacagtgttgtcctcttctatgcggaaaggc

SEQ ID NO: 523348 - DNA, 60 bp, Artificial
  Synthetic oligonucleotide
cgggggccctgagtctactctgggttccctcattagttctgctggttctttggctggaac

SEQ ID NO: 523349 - DNA, 60 bp, Artificial
  Synthetic oligonucleotide
cgggtggcctagctatccgtggaagagtagttgtcatcaattaccatctctggaatgact

SEQ ID NO: 523350 - DNA, 60 bp, Artificial
  Synthetic oligonucleotide
tgctgtctggtccgctttgttgcggtgcttgtcatgttttttcgtaatcctgaccttatt

SEQ ID NO: 523351 - DNA, 60 bp, Artificial
  Synthetic oligonucleotide
cgtaccaagattgatatcgctgaaggtccgggatccatgaacttggccaatgttcttagc

SEQ ID NO: 523352 - DNA, 60 bp, Artificial
  Synthetic oligonucleotide
ctaaaaatggtagagattgggaaactctaaaactacaagatttggtcaagaagattacag

SEQ ID NO: 523353 - DNA, 60 bp, Artificial
  Synthetic oligonucleotide
ggcggtccagcaaaggatcaagcaatatttgccttaagcctgagcccggcctcagataaa

SEQ ID NO: 523354 - DNA, 60 bp, Artificial
  Synthetic oligonucleotide
ggcggtaatggtagagtgggttattgcgcctctttaacccgcaattactttgctgccaca

SEQ ID NO: 523355 - DNA, 60 bp, Artificial
  Synthetic oligonucleotide
ggcgaggtcaaacccggtgtcaacatcaaccggatgtctcgcctccacccctcccccgcc

SEQ ID NO: 523356 - DNA, 60 bp, Artificial
  Synthetic oligonucleotide
ctatcatcgctggtaggatgttgcttggtggactcattgagtacatgcaggcgaatcctg

SEQ ID NO: 523357 - DNA, 60 bp, Artificial
  Synthetic oligonucleotide
ctatggatcttgcttgtttcagattggataaacccttctttgaggattctatttgtgtct

SEQ ID NO: 523358 - DNA, 60 bp, Artificial
  Synthetic oligonucleotide
ctatggcttcgcttgaggaaaagggtttgccttatacttcaaagttagttattgccacga

SEQ ID NO: 523359 - DNA, 60 bp, Artificial
  Synthetic oligonucleotide
ctcagataaaaggttgtcacgcacgcttttgggcgagattttgaattactacacacactg

SEQ ID NO: 523360 - DNA, 60 bp, Artificial
  Synthetic oligonucleotide
ctcaggtcaccttaggtggtaagccaatggacctcgccatcttaaagtgcaaactgccat

SEQ ID NO: 523361 - DNA, 60 bp, Artificial
  Synthetic oligonucleotide
ctccccgaacattgaggcgtgcggttatagtgaccgggtgatgcagctcacactgggtaa

SEQ ID NO: 523362 - DNA, 60 bp, Artificial
  Synthetic oligonucleotide
ctcgtgataaccttgattacccctaccatcctgttgatccctccactgatctggctctct

SEQ ID NO: 523363 - DNA, 60 bp, Artificial
  Synthetic oligonucleotide
ctgaaggtaccctgttagcttacgcgcaggatctgatcaggagtctctttacagtgctgt

SEQ ID NO: 523364 - DNA, 60 bp, Artificial
  Synthetic oligonucleotide
ttgcctggttcgctttgttgcagtgcttgtcatgtttttccggaaccctgattttattaa

SEQ ID NO: 523365 - DNA, 60 bp, Artificial
  Synthetic oligonucleotide
tatggctacaaagcccccaccttccagggtctctgtggtgcacctctcctcacggacgac

SEQ ID NO: 523366 - DNA, 60 bp, Artificial
  Synthetic oligonucleotide
aagatcagaagtgtcccagtgggacgctgtctggccttacctgcgttttcggccctgcgc

SEQ ID NO: 523367 - DNA, 60 bp, Artificial
  Synthetic oligonucleotide
tctaaacaggggctcactctacgttgctttacaactagctgtgagttaaaaaacgtctaa

SEQ ID NO: 523368 - DNA, 60 bp, Artificial
  Synthetic oligonucleotide
agggcctggatcaatgaacatcgccaatgtacttagcacaacagccgcccaatcgatagc

SEQ ID NO: 523369 - DNA, 60 bp, Artificial
  Synthetic oligonucleotide
aggtaccaatcacacatgctcattggctcggggtttgcaatgccaggtgactgcgggggt

SEQ ID NO: 523370 - DNA, 60 bp, Artificial
  Synthetic oligonucleotide
ttgagaatgatagggattctaatataatcaggccccttccccaaggtaagattgcttgta

SEQ ID NO: 523371 - DNA, 60 bp, Artificial
  Synthetic oligonucleotide
tatctctacctttctcacttgggtggccaaagtctttggttaccttcttgtcctctttgg

SEQ ID NO: 523372 - DNA, 60 bp, Artificial
  Synthetic oligonucleotide
aggtctcacaacagaagcggaggtttactcacttcctccagatcccaagcattttgatgg

SEQ ID NO: 523373 - DNA, 60 bp, Artificial
  Synthetic oligonucleotide
tatcctcggtatccatgtcgctggggtagctggttacaacggcttctccgcgcgcttcac

SEQ ID NO: 523374 - DNA, 60 bp, Artificial
  Synthetic oligonucleotide
tctactgcgctagttaagattcctccggcccctgaatgtggctaatcctaaccactgatc

SEQ ID NO: 523375 - DNA, 60 bp, Artificial
  Synthetic oligonucleotide
agtacactggtatacctagcctcggtatcgcggtaccgttgcttacagtacctttgtacg

SEQ ID NO: 523376 - DNA, 60 bp, Artificial
  Synthetic oligonucleotide
aactacacgcaaggaggcaatgttgggcactcatgtgatctgggacgtggggttacaatc

SEQ ID NO: 523377 - DNA, 60 bp, Artificial
  Synthetic oligonucleotide
ttgacaaggaccctcacctgtcaatcgggaccaccactttcagtgaccccgtgcgaagtg

SEQ ID NO: 523378 - DNA, 60 bp, Artificial
  Synthetic oligonucleotide
tagccagctacccacaccaaatagacgcaggcctcctagctcagacaggaaaagattatg

SEQ ID NO: 523379 - DNA, 60 bp, Artificial
  Synthetic oligonucleotide
agtgcgtgcttgaagtttaaagaccgcatggctagatgcgagtgtagtttggttggagtc

SEQ ID NO: 523380 - DNA, 60 bp, Artificial
  Synthetic oligonucleotide
agtggctcgtcgacaccctttcttggtctgagacaattgcacccctcactgttttctctg

SEQ ID NO: 523381 - DNA, 60 bp, Artificial
  Synthetic oligonucleotide
tccggttatccctattacaatcactctagctccaatgtgctctgagtttgcaggtctcag

SEQ ID NO: 523382 - DNA, 60 bp, Artificial
  Synthetic oligonucleotide
tacgcgcctaccctgactgcccttggactgccatgcacgatactcactccatgtggaatt

SEQ ID NO: 523383 - DNA, 60 bp, Artificial
  Synthetic oligonucleotide
ataccttgcacaccattgtaggaagaacgccccgctgtatgcggcagaagctcgcagagt

SEQ ID NO: 523384 - DNA, 60 bp, Artificial
  Synthetic oligonucleotide
ttttcccggttgcgtcccatatgctgtgcaaacggcaaaaagggacaatatcgttacccg

SEQ ID NO: 523385 - DNA, 60 bp, Artificial
  Synthetic oligonucleotide
actgattcaactcagaaggccgttagggcaaagtataggatgttcacttatattaggtgt

SEQ ID NO: 523386 - DNA, 60 bp, Artificial
  Synthetic oligonucleotide
acaaaacccaaggcgcgtactctggcctccctaggctgaaacgccaggagaaaatgagac

SEQ ID NO: 523387 - DNA, 60 bp, Artificial
  Synthetic oligonucleotide
agaaaatactacccaattactgtgaccgggcccacgttccggtacatggaagcaaatgat

SEQ ID NO: 523388 - DNA, 60 bp, Artificial
  Synthetic oligonucleotide
agaactcccgccttaggtcagagtgcaccatagaatcatttctgggtagagcagcatgtg

SEQ ID NO: 523389 - DNA, 60 bp, Artificial
  Synthetic oligonucleotide
agacagcctccattcagggagatagggtggcagatgtgatcgagagctctataggagata

SEQ ID NO: 523390 - DNA, 60 bp, Artificial
  Synthetic oligonucleotide
ttgctctcaactctgctcgtatggctcagtcaggtccacgtccagaacctgttgtgatct

SEQ ID NO: 523391 - DNA, 60 bp, Artificial
  Synthetic oligonucleotide
ttgtggtgcgttcactcgtgcctgaggtgtatgatggcgagtttcaaatactcgcatatg

SEQ ID NO: 523392 - DNA, 60 bp, Artificial
  Synthetic oligonucleotide
aatggcatgcaatggtcggccttggatgaaccaaatttccccgtttcctcagaatccaat

SEQ ID NO: 523393 - DNA, 60 bp, Artificial
  Synthetic oligonucleotide
aagtaccaagcagatctccctctcccgggagggagttcatgcagtcgtcgcctatgaacc

SEQ ID NO: 523394 - DNA, 60 bp, Artificial
  Synthetic oligonucleotide
tcactacttgtgatacctgtcgtgccccttgcttgtgctacagggactacacctttcgtt

SEQ ID NO: 523395 - DNA, 60 bp, Artificial
  Synthetic oligonucleotide
agagcctattgagctagttggtagtcctccggcccctgaatgcggctaatcctaaccacg

SEQ ID NO: 523396 - DNA, 60 bp, Artificial
  Synthetic oligonucleotide
tccaagcactctgctaaccagaaagtgtaccctgaagccttccgccggatggcacgttgg

SEQ ID NO: 523397 - DNA, 60 bp, Artificial
  Synthetic oligonucleotide
tctgtggagccggcttaatatcaaggggtaagctttatgggattgttacagctagaacag

SEQ ID NO: 523398 - DNA, 60 bp, Artificial
  Synthetic oligonucleotide
tatgtcccttgcatgctaccccggaatgtctttcagctgcaccccccacaattccctgct

SEQ ID NO: 523399 - DNA, 60 bp, Artificial
  Synthetic oligonucleotide
agattgagaagcatgtcagtagggccttcatatgccttcaggcactaacaacctttgtct

SEQ ID NO: 523400 - DNA, 60 bp, Artificial
  Synthetic oligonucleotide
aagcccggaccaactatcctcatgaacgatcaagaagttggagtgctggatgcaaaagaa

SEQ ID NO: 523401 - DNA, 60 bp, Artificial
  Synthetic oligonucleotide
acaacatggggacgctgtatatgagacacgtgaatgatggtagccccggcccaattgtga

SEQ ID NO: 523402 - DNA, 60 bp, Artificial
  Synthetic oligonucleotide
tcggtggccatgaggcaagcatttggcaacttgtatgcaaccttccataagaaccccggt

SEQ ID NO: 523403 - DNA, 60 bp, Artificial
  Synthetic oligonucleotide
acctgattttgacgttactccccccatacacattccgggtgaggtcaagaacataatgga

SEQ ID NO: 523404 - DNA, 60 bp, Artificial
  Synthetic oligonucleotide
tatgggctggaaggtttctgagagcgtgtttagtcaccctacatcgagtgagttctttga

SEQ ID NO: 523405 - DNA, 60 bp, Artificial
  Synthetic oligonucleotide
tttaaaacagcctgggggttgtacccacccctggggcccacgcggcgctagtactctggt

SEQ ID NO: 523406 - DNA, 60 bp, Artificial
  Synthetic oligonucleotide
atgccagtatacgatctccatcattatggcactgttacaactaatcagggtgacacatgc

SEQ ID NO: 523407 - DNA, 60 bp, Artificial
  Synthetic oligonucleotide
atgcgccgcacagggcccctcccacggtggacttggaattcgaagagaacgccgtgtttt

SEQ ID NO: 523408 - DNA, 60 bp, Artificial
  Synthetic oligonucleotide
atgggggctcaagtatcgacacaaaagactggagcacacgaaaccggtttgagtgctagt

SEQ ID NO: 523409 - DNA, 60 bp, Artificial
  Synthetic oligonucleotide
tgagcccctaagccttggtcgtactgcactatctctctaagacggtctctctttgaccgc

SEQ ID NO: 523410 - DNA, 60 bp, Artificial
  Synthetic oligonucleotide
actaccccccaaacaaatatatccctgcccaagttcatgactggctcgagtttgctcata

SEQ ID NO: 523411 - DNA, 60 bp, Artificial
  Synthetic oligonucleotide
attcccttacttagtacacccagttatgccaatgtcagaaatacatgaatcaatacgctg

SEQ ID NO: 523412 - DNA, 60 bp, Artificial
  Synthetic oligonucleotide
tacagtgacagaatcgcacaacttacacttggaaacagcacgataaccacacaagaggct

SEQ ID NO: 523413 - DNA, 60 bp, Artificial
  Synthetic oligonucleotide
aaaacccgaactcagaaaagccatgatacaaggcccagaacatgaatttggaatggctct

SEQ ID NO: 523414 - DNA, 60 bp, Artificial
  Synthetic oligonucleotide
attgccacgacaaataaatcagattggtcatctcgtaccttgtgcgctccaggtgctttg

SEQ ID NO: 523415 - DNA, 60 bp, Artificial
  Synthetic oligonucleotide
ttaccttctcccccaactaaccctatccacaccccactgactgactcctttggattttga

SEQ ID NO: 523416 - DNA, 60 bp, Artificial
  Synthetic oligonucleotide
caaactcagcaagtagccctctgtgggattctgcttcaaaccctagcgtgttttaccaac

SEQ ID NO: 523417 - DNA, 60 bp, Artificial
  Synthetic oligonucleotide
acagcctggtttgtgggagaagacctactgttggtaccctaccatgctgctaacaattgg

SEQ ID NO: 523418 - DNA, 60 bp, Artificial
  Synthetic oligonucleotide
aaaacagacactttcccggaaaactccaccatctatgacgtcacgtttctgaaacgttgg

SEQ ID NO: 523419 - DNA, 60 bp, Artificial
  Synthetic oligonucleotide
tcataggggctgggtttgcaatgccgggcgactgtggaggaattctgcgatgcacccacg

SEQ ID NO: 523420 - DNA, 60 bp, Artificial
  Synthetic oligonucleotide
caaatgaaagtgccttcgtggttcgtactcgaacacgagtgggaacacaacttcgactga

SEQ ID NO: 523421 - DNA, 60 bp, Artificial
  Synthetic oligonucleotide
tttccgcgactttgaagcatacgtccctcggcaaacccctggtgtcggtcccatccctac

SEQ ID NO: 523422 - DNA, 60 bp, Artificial
  Synthetic oligonucleotide
caaattgctgaggttgttaatacctcgcttcagaccaaaccagttacccttgatatccca

SEQ ID NO: 523423 - DNA, 60 bp, Artificial
  Synthetic oligonucleotide
caacacaagcggacttatgtatcccctacgttgctgacacaaactatgtgaagactgatt

SEQ ID NO: 523424 - DNA, 60 bp, Artificial
  Synthetic oligonucleotide
ttacaacacctttggatccgatcgggcaggctcagattatggtaagattaacagcagcca

SEQ ID NO: 523425 - DNA, 60 bp, Artificial
  Synthetic oligonucleotide
acggtgcacgtgcagtgtaacgcatctaaatttcatcaggggtgtctattggtagtgtgc

SEQ ID NO: 523426 - DNA, 60 bp, Artificial
  Synthetic oligonucleotide
tcacttttctgaagcgatggtttgtcccggatgaaactatcccttactactatcaccctg

SEQ ID NO: 523427 - DNA, 60 bp, Artificial
  Synthetic oligonucleotide
ttctaggcatccctattgcccagaagcaaagtgcgtcctggcttaaaaagtttaacgata

SEQ ID NO: 523428 - DNA, 60 bp, Artificial
  Synthetic oligonucleotide
acacccaaggccgctctagacgatccctctttgatgaacctgaacctggcctctttgtcc

SEQ ID NO: 523429 - DNA, 60 bp, Artificial
  Synthetic oligonucleotide
tttaaaacagcttgagggttgttcccaccctcaaggcctactgggcgctagtacaccggt

SEQ ID NO: 523430 - DNA, 60 bp, Artificial
  Synthetic oligonucleotide
atatacagttagaggtaaattaaacatggcactggctacccaaaagtgcaaggactgcca

SEQ ID NO: 523431 - DNA, 60 bp, Artificial
  Synthetic oligonucleotide
acaccgggccgtcagtggactataagcaggcaaacaaggtaatgacacatgtagcagaca

SEQ ID NO: 523432 - DNA, 60 bp, Artificial
  Synthetic oligonucleotide
tgagaagtttagggatattcgtgcccacttgcccaccacaatccaggaaactaatgatgc

SEQ ID NO: 523433 - DNA, 60 bp, Artificial
  Synthetic oligonucleotide
atccgaactacgctggcaactccattaagccgaccggcactagccgtactgccattacta

SEQ ID NO: 523434 - DNA, 60 bp, Artificial
  Synthetic oligonucleotide
actacgagcaagcacttctgtttccccggttgcgccctatatgctgtgtgaacggcagaa

SEQ ID NO: 523435 - DNA, 60 bp, Artificial
  Synthetic oligonucleotide
atcgttgaggatcccgtatatgggtatggcttcagcatatgcctcattctatgatggata

SEQ ID NO: 523436 - DNA, 60 bp, Artificial
  Synthetic oligonucleotide
acccccagggtgtggtctaccaagaggtagaaccatgccactggatggttgccgttgcaa

SEQ ID NO: 523437 - DNA, 60 bp, Artificial
  Synthetic oligonucleotide
aaaagagtgaccgtgatacgtggaaaccatgagtacatgtgtatccgtggaggatcgccc

SEQ ID NO: 523438 - DNA, 60 bp, Artificial
  Synthetic oligonucleotide
actagtatcagcttgtgttcccggttacccggctttccccagttgctctgggttaacaaa

SEQ ID NO: 523439 - DNA, 59 bp, Artificial
  Synthetic oligonucleotide
gaatgaacaatcaggtttacaatgtgcactggttcccctctggtgctcactttccaact

SEQ ID NO: 523440 - DNA, 59 bp, Artificial
  Synthetic oligonucleotide
accctatccacaccccactgactgactcctttggattttgacctcagaatgcctacctg

SEQ ID NO: 523441 - DNA, 59 bp, Artificial
  Synthetic oligonucleotide
tggagaatggatgccacgtgacaccatacccgcagtgagacccgctgcaaacggcatcc

SEQ ID NO: 523442 - DNA, 59 bp, Artificial
  Synthetic oligonucleotide
gatgtggctgcgtgatggagatttccaggatgttgtcacctccctttgtcatttggcct

SEQ ID NO: 523443 - DNA, 59 bp, Artificial
  Synthetic oligonucleotide
ccaaaccctcgcccaacgcatctctggcaacccggacgatgtgtattcccccaccgccg

SEQ ID NO: 523444 - DNA, 59 bp, Artificial
  Synthetic oligonucleotide
aacggcagaaaggggcaaaatcgttatccgcttgattactgcgggacgcctagtatcac

SEQ ID NO: 523445 - DNA, 58 bp, Artificial
  Synthetic oligonucleotide
acccgcctgccctgccttcatctgaagctgcacccagggaggcggttcctgactgtcc

SEQ ID NO: 523446 - DNA, 58 bp, Artificial
  Synthetic oligonucleotide
attccaatcctggtatgtttggctctgctgttggttgtgaccctgattttcattggac

SEQ ID NO: 523447 - DNA, 58 bp, Artificial
  Synthetic oligonucleotide
gtctacacacctcataagacacaactgtaccccaccgttgcttgtgatgacaacacta

SEQ ID NO: 523448 - DNA, 58 bp, Artificial
  Synthetic oligonucleotide
tgttaccattactgcattctccaaatagtgaataaactacacaacaatataacacaat

SEQ ID NO: 523449 - DNA, 58 bp, Artificial
  Synthetic oligonucleotide
ttgccgggtacaaaatatgtaattaccacttggccactcaggaagatatgcagaatgc

SEQ ID NO: 523450 - DNA, 58 bp, Artificial
  Synthetic oligonucleotide
atcagggttcaaaactgagaataacaccctagacgtggtcaaagcaacccaggcttgt

SEQ ID NO: 523451 - DNA, 57 bp, Artificial
  Synthetic oligonucleotide
gatccgactgggttcatttcccgcaaatggtgtctacctcacccttcaagcccccca

SEQ ID NO: 523452 - DNA, 57 bp, Artificial
  Synthetic oligonucleotide
agaagacacatggattcaaattaccaggtagggtgactaatttacttcaagtagccc

SEQ ID NO: 523453 - DNA, 57 bp, Artificial
  Synthetic oligonucleotide
accaaggcagggcagtgtggaggggtggtgacatcagttggaaaggtcattggtata

SEQ ID NO: 523454 - DNA, 57 bp, Artificial
  Synthetic oligonucleotide
atgtggattccctttgtgattcaacccatatttgggatgatgagatttttcagataa

SEQ ID NO: 523455 - DNA, 57 bp, Artificial
  Synthetic oligonucleotide
ggccttataccccgacttgccgagtttctctaggagagtccctttcccagccgtgag

SEQ ID NO: 523456 - DNA, 57 bp, Artificial
  Synthetic oligonucleotide
gaagttgtccaggctgcaaaccgtgttgctgactccattgagacaactgcctcagca

SEQ ID NO: 523457 - DNA, 56 bp, Artificial
  Synthetic oligonucleotide
actcctaatatccaaggtcgaagggaatttcaagatcctgggtatgcacatagctg

SEQ ID NO: 523458 - DNA, 56 bp, Artificial
  Synthetic oligonucleotide
aattctgaactgccgtacaggcacctccgtttccattgaggtgccatacgttgggg

SEQ ID NO: 523459 - DNA, 56 bp, Artificial
  Synthetic oligonucleotide
tctggtgacatcaccaggaagacagatgatgtacccttgattgatttgaacaacct

SEQ ID NO: 523460 - DNA, 56 bp, Artificial
  Synthetic oligonucleotide
taggatggaagtagaattccttaagcggaagcctggttacttcccagagtcaactt

SEQ ID NO: 523461 - DNA, 56 bp, Artificial
  Synthetic oligonucleotide
tgattggctaaagaagtttacatcctatgtcaacgcttttaaaggacttgactggg

SEQ ID NO: 523462 - DNA, 56 bp, Artificial
  Synthetic oligonucleotide
gtctctgacgcagtcgagaacggagtggtctcattcctcacttggctcgccaagat

SEQ ID NO: 523463 - DNA, 56 bp, Artificial
  Synthetic oligonucleotide
gcctccatggaaaagacatttaccaacactacatcaaaattttggatccatatctc

SEQ ID NO: 523464 - DNA, 56 bp, Artificial
  Synthetic oligonucleotide
taatgaaggacagacccgacattacccaaactgctagactggaagctcccattcag

SEQ ID NO: 523465 - DNA, 56 bp, Artificial
  Synthetic oligonucleotide
acaggagagtaggcagtgagctatgggcaaacctctacagtattacttagagggaa

SEQ ID NO: 523466 - DNA, 55 bp, Artificial
  Synthetic oligonucleotide
tcctccggcccctgaatgtggctaatcctaaccactgatcctgtgagcacgcacc

SEQ ID NO: 523467 - DNA, 55 bp, Artificial
  Synthetic oligonucleotide
ggcatcccaactatgccaacacccggctcgtatcagtttcttaccacagatgagg

SEQ ID NO: 523468 - DNA, 55 bp, Artificial
  Synthetic oligonucleotide
gccactggatggttgccgttgcaatggttggcacccgttgggactactctgctac

SEQ ID NO: 523469 - DNA, 55 bp, Artificial
  Synthetic oligonucleotide
gcccagccaactttaaaacttgcatgcctctaatctgtggagaggcctaccaact

SEQ ID NO: 523470 - DNA, 55 bp, Artificial
  Synthetic oligonucleotide
gccccgactaggattgatggcaggagaacttaatgtcaatctcgctgttgcaccc

SEQ ID NO: 523471 - DNA, 55 bp, Artificial
  Synthetic oligonucleotide
gcctagacccctgatttcctataaggccaatggtgaagctagagaagatagttca

SEQ ID NO: 523472 - DNA, 55 bp, Artificial
  Synthetic oligonucleotide
gcctccaggagcccctattccaactaccagagatgactacacatggcagtctagt

SEQ ID NO: 523473 - DNA, 55 bp, Artificial
  Synthetic oligonucleotide
gcgacatcctgttgcctggcatcccaaggagaactcccggctgtcttacatcaca

SEQ ID NO: 523474 - DNA, 55 bp, Artificial
  Synthetic oligonucleotide
tctatacagggttttccaccagaatcctggtattatcaccgggtgtgctgtgggg

SEQ ID NO: 523475 - DNA, 55 bp, Artificial
  Synthetic oligonucleotide
gcgcactaacaatagtgcgacgattgtcatgccgtacataaatagtgtgcccatg

SEQ ID NO: 523476 - DNA, 55 bp, Artificial
  Synthetic oligonucleotide
gcgcgtactctggtgctcccaagcagatacttaagaaacccgttctccgcacggc

SEQ ID NO: 523477 - DNA, 55 bp, Artificial
  Synthetic oligonucleotide
gctagttgccacccttgtgaaagatggtagtgcttcaaccccaccagtccaattg

SEQ ID NO: 523478 - DNA, 55 bp, Artificial
  Synthetic oligonucleotide
gctgttatctgtccttaataggctcacagaaggtttcaccacatatggggtgcag

SEQ ID NO: 523479 - DNA, 55 bp, Artificial
  Synthetic oligonucleotide
gcttggtgctcgtcgtaggtggcatagccggcctatgttacggtgcatacaagac

SEQ ID NO: 523480 - DNA, 55 bp, Artificial
  Synthetic oligonucleotide
gctttgatgagttaccgcagggccgcggcagtggtgggctctatgctttcctaga

SEQ ID NO: 523481 - DNA, 55 bp, Artificial
  Synthetic oligonucleotide
ggaaccattggacctcaacacaagtgcagggtttccatatgtcacactaggggtc

SEQ ID NO: 523482 - DNA, 55 bp, Artificial
  Synthetic oligonucleotide
ggacactgttaggaaatgcactcatatacccacatcagatgatcaacctccggac

SEQ ID NO: 523483 - DNA, 55 bp, Artificial
  Synthetic oligonucleotide
ggaccaagaatgccagctacactcaagaacatgttacctcgctgtgtctattggc

SEQ ID NO: 523484 - DNA, 55 bp, Artificial
  Synthetic oligonucleotide
ggaccgattaccatggcaggtcttattaatttgagtagcactcccacaagtagaa

SEQ ID NO: 523485 - DNA, 55 bp, Artificial
  Synthetic oligonucleotide
ggactaaggatcctagaaacacacaggatcacgtcaggtccttgtgtatgttagc

SEQ ID NO: 523486 - DNA, 55 bp, Artificial
  Synthetic oligonucleotide
ggactaattcttcagtagacatacaagttccatatgctaattgcacccctggctg

SEQ ID NO: 523487 - DNA, 55 bp, Artificial
  Synthetic oligonucleotide
ggagtactatggatacctaaatttggcagggagccccactcatcgcactatgatg

SEQ ID NO: 523488 - DNA, 55 bp, Artificial
  Synthetic oligonucleotide
ggatatggggatgttcggccaaaacatgtaccatcactaccttggacgggcaggg

SEQ ID NO: 523489 - DNA, 55 bp, Artificial
  Synthetic oligonucleotide
ggatccaaagaacacacaagaccacgtgcggtctctatgcctattggcttggcac

SEQ ID NO: 523490 - DNA, 55 bp, Artificial
  Synthetic oligonucleotide
ggtccattaccttgggtaactcaactataacaacccaggagtgtgcaaatgtggt

SEQ ID NO: 523491 - DNA, 55 bp, Artificial
  Synthetic oligonucleotide
tctttgagtctcagtccagctgctgaccccagactgtcacgcacactgttgggcg

SEQ ID NO: 523492 - DNA, 55 bp, Artificial
  Synthetic oligonucleotide
ggtcgtgctcaaatgaaattgagttgacattgatcaatgaaagttgcactgaact

SEQ ID NO: 523493 - DNA, 55 bp, Artificial
  Synthetic oligonucleotide
ggtgcgcggtatccaaccgcgtaacggtcaagcacttctgtctccccggtccgaa

SEQ ID NO: 523494 - DNA, 55 bp, Artificial
  Synthetic oligonucleotide
ggtgtgaagagcctactgtgctcactttgattcctccggcccctgaatgtggcta

SEQ ID NO: 523495 - DNA, 55 bp, Artificial
  Synthetic oligonucleotide
ggttatcccatggatttgtggtgggtattacagagatgtggcccgcgccaacaac

SEQ ID NO: 523496 - DNA, 55 bp, Artificial
  Synthetic oligonucleotide
ggttgtagaaagcagggcccaaggaattgacaccatagccaggtgctcgtgtagg

SEQ ID NO: 523497 - DNA, 55 bp, Artificial
  Synthetic oligonucleotide
tgaccactggtaagctgcttctagcctacacaccaccaggaggtagtgctcccgc

SEQ ID NO: 523498 - DNA, 55 bp, Artificial
  Synthetic oligonucleotide
gtacctcccatgcggtatctcatactcctaggtctatcccaatgagttcttggcg

SEQ ID NO: 523499 - DNA, 55 bp, Artificial
  Synthetic oligonucleotide
gtagtcctccggcccctgaatgcggctaatcctaaccacggagcgtccaccagca

SEQ ID NO: 523500 - DNA, 55 bp, Artificial
  Synthetic oligonucleotide
gtagttgtgataccagaacaccagctagcatcacatgaaggtggcaatgtgtcgg

SEQ ID NO: 523501 - DNA, 55 bp, Artificial
  Synthetic oligonucleotide
tgatgttagcatgaaggctggacatttaattaccacatacctctctcgtctggca

SEQ ID NO: 523502 - DNA, 55 bp, Artificial
  Synthetic oligonucleotide
gtcagtgctctggtgcgttagtacctttgcacgcctgttttcccttcccttaaac

SEQ ID NO: 523503 - DNA, 55 bp, Artificial
  Synthetic oligonucleotide
gtccaggagaggatcaccaaagagagtctggagcgcaacgtcaaccgcgccctta

SEQ ID NO: 523504 - DNA, 55 bp, Artificial
  Synthetic oligonucleotide
gtctaccatcgggcaaaacacattgaagcgtggattccacgtgctcccagagcct

SEQ ID NO: 523505 - DNA, 55 bp, Artificial
  Synthetic oligonucleotide
gtctcgactacatggatgccatcgacttctcccaatctcctggctacccttggac

SEQ ID NO: 523506 - DNA, 55 bp, Artificial
  Synthetic oligonucleotide
tacccgcatcggtggataaacctgaggactaacaattcggcaaccctcatactgc

SEQ ID NO: 523507 - DNA, 55 bp, Artificial
  Synthetic oligonucleotide
tacattggaatctaaagatgggagtagtggtaaagggccccagtgtgcgcagatg

SEQ ID NO: 523508 - DNA, 55 bp, Artificial
  Synthetic oligonucleotide
gtgtgggatattggattacagtccacaatagttatgacaataccctggacttcag

SEQ ID NO: 523509 - DNA, 55 bp, Artificial
  Synthetic oligonucleotide
gtgtttactactgcaaatctagaaacaagcattatccagtcaccttccaaggacc

SEQ ID NO: 523510 - DNA, 55 bp, Artificial; identical to SEQ ID NO: 443909
  Synthetic oligonucleotide

SEQ ID NO: 523511 - DNA, 55 bp, Artificial
  Synthetic oligonucleotide
gttcccaccctcaaggcctactgggcgctagtacaccggtatctcggtacccttg

SEQ ID NO: 523512 - DNA, 55 bp, Artificial
  Synthetic oligonucleotide
taaggaaacttctcgagagacgccctctaagatggtattacttgccatcgttgag

SEQ ID NO: 523513 - DNA, 55 bp, Artificial
  Synthetic oligonucleotide
gttgattgaggcgtccagcttgaatgattcagtggctatgaggtgttattatggg

SEQ ID NO: 523514 - DNA, 55 bp, Artificial
  Synthetic oligonucleotide
taaccatacctcactcgaattggtctgagagatagtgggatatgggtaaattttc

SEQ ID NO: 523515 - DNA, 55 bp, Artificial
  Synthetic oligonucleotide
ggccaaagtctttggttaccttcttgtcctctttggatctcccactccgatgtcc

SEQ ID NO: 523516 - DNA, 55 bp, Artificial
  Synthetic oligonucleotide
ggccgaccatgtcgttcttgacaatatggctcagctcactattggcgacacgtcc

SEQ ID NO: 523517 - DNA, 55 bp, Artificial
  Synthetic oligonucleotide
ggcctgaaaccctgtccgacaatgacgccactgctattgacaagcccacggagcc

SEQ ID NO: 523518 - DNA, 55 bp, Artificial
  Synthetic oligonucleotide
ggcctgagtatctctctgatcttgacgccacatctgtagacaaacccacccatcc

SEQ ID NO: 523519 - DNA, 55 bp, Artificial
  Synthetic oligonucleotide
ggcctgtgggtacagtgatcgggtgatgcaactcacgctaggcaattccaccatc

SEQ ID NO: 523520 - DNA, 55 bp, Artificial
  Synthetic oligonucleotide
tccacaatagttatgacaataccctggacttcaggggtgcaattcaggtacacag

SEQ ID NO: 523521 - DNA, 55 bp, Artificial
  Synthetic oligonucleotide
ggcgatcgcgtagattacatagattacctcaatcactctcaccacctgtacaaga

SEQ ID NO: 523522 - DNA, 55 bp, Artificial
  Synthetic oligonucleotide
ggcgtgcaggctacaccattcatgtgcagtgcaacgcgtctaagtttcatcaagg

SEQ ID NO: 523523 - DNA, 55 bp, Artificial
  Synthetic oligonucleotide
ggctaatttagacaataaaggaatgctattcactagtaactttgttctggcctcc

SEQ ID NO: 523524 - DNA, 55 bp, Artificial
  Synthetic oligonucleotide
gggaagacagctcccgcgacctactagtgtcgtctaccactgcccagggctgtga

SEQ ID NO: 523525 - DNA, 55 bp, Artificial
  Synthetic oligonucleotide
gggaagatcctgcgactaaattggctgaagtcgaggacaagattttcttgctata

SEQ ID NO: 523526 - DNA, 55 bp, Artificial
  Synthetic oligonucleotide
gggacatcagggctatgatcccagaaaacatcacggaaaccagcgaggcgctagt

SEQ ID NO: 523527 - DNA, 55 bp, Artificial
  Synthetic oligonucleotide
gggacgttggactacaatctacagtctcattagttgttccttggatatcagctag

SEQ ID NO: 523528 - DNA, 55 bp, Artificial
  Synthetic oligonucleotide
gggactgcgcccaccacgcgtcgggaagcaatgttgggcacccacataatttggg

SEQ ID NO: 523529 - DNA, 55 bp, Artificial
  Synthetic oligonucleotide
gggactgttctgggcgacactatgtgtatcagataatgtacataccaccaggcgc

SEQ ID NO: 523530 - DNA, 55 bp, Artificial
  Synthetic oligonucleotide
gggattccaaacctggaagctctagaccttaccaccagtgctgggtttccctacg

SEQ ID NO: 523531 - DNA, 55 bp, Artificial
  Synthetic oligonucleotide
gggctcaaaggatagaaccagtctgtatactgctacatgggataccagggtgtgg

SEQ ID NO: 523532 - DNA, 55 bp, Artificial
  Synthetic oligonucleotide
tcaacttgctctcaactctgcccgcatggctcaatctggtcctcgcccagaacct

SEQ ID NO: 523533 - DNA, 55 bp, Artificial
  Synthetic oligonucleotide
ggggcaatatcgttacccgcttgactactacgggaaacccagtatcatcttcgat

SEQ ID NO: 523534 - DNA, 55 bp, Artificial
  Synthetic oligonucleotide
gggtagcatggcttttagaatagttaatgagcatgacacacataggactttagtc

SEQ ID NO: 523535 - DNA, 55 bp, Artificial
  Synthetic oligonucleotide
gggtctgcagtagggtgtgatcctgaggtattctggtcgaaagtgccagtaatgc

SEQ ID NO: 523536 - DNA, 55 bp, Artificial
  Synthetic oligonucleotide
tcttggtctgagacaattgcacccctcactgttttctctggacccaaggccctca

SEQ ID NO: 523537 - DNA, 55 bp, Artificial
  Synthetic oligonucleotide
gggttatataactttatggtaccagacaaactttgtagccactactactggtggg

SEQ ID NO: 523538 - DNA, 55 bp, Artificial
  Synthetic oligonucleotide
ggtacataccagttgagtgtgaagcccacgattggtatcctgtggaagaaaccca

SEQ ID NO: 523539 - DNA, 55 bp, Artificial
  Synthetic oligonucleotide
ggtatgattacccaactaagactggtcagtgtggaggtgtgttgtgtacaactgg

SEQ ID NO: 523540 - DNA, 55 bp, Artificial
  Synthetic oligonucleotide
cactggccacgtccatcattggtcggaaacttgctgagtatgagcactcagaggt

SEQ ID NO: 523541 - DNA, 55 bp, Artificial
  Synthetic oligonucleotide
cagattgtgcgccaaggaaactccaccactaacatctacggaagtaacaacaatg

SEQ ID NO: 523542 - DNA, 55 bp, Artificial
  Synthetic oligonucleotide
cagcacactccaagcttaaagccccaactctacgcccagtagttgtgcaaggacc

SEQ ID NO: 523543 - DNA, 55 bp, Artificial
  Synthetic oligonucleotide
cagggctacgcaaagccattgttcagggaatccccactacaaacaccccaggttc

SEQ ID NO: 523544 - DNA, 55 bp, Artificial
  Synthetic oligonucleotide
catccagcagcttggtaacagttttggtcaaggctttaccgctgagattactaac

SEQ ID NO: 523545 - DNA, 55 bp, Artificial
  Synthetic oligonucleotide
ccaacccagcactaatgtcaccatcagtagaggcttgtgggtactccgataggct

SEQ ID NO: 523546 - DNA, 55 bp, Artificial
  Synthetic oligonucleotide
ccaactcaggaaatccacatacctggagaggttagaaacattcagactttgtgtc

SEQ ID NO: 523547 - DNA, 55 bp, Artificial
  Synthetic oligonucleotide
ccacaacattacttggggaggtcctgaactactactccaactggtcaggttcaat

SEQ ID NO: 523548 - DNA, 55 bp, Artificial
  Synthetic oligonucleotide
ccacaatctatgacgtcaccttcctgaaacgttggttcgtgcctgatgacatccg

SEQ ID NO: 523549 - DNA, 55 bp, Artificial
  Synthetic oligonucleotide
ccacaccaaatagacgcaggcctcctagctcagacaggaaaagattatggcctgc

SEQ ID NO: 523550 - DNA, 55 bp, Artificial
  Synthetic oligonucleotide
ccaccagcaaaccagctggaagggcgtcgtaacgggtaactctgtggcggaaccg

SEQ ID NO: 523551 - DNA, 55 bp, Artificial
  Synthetic oligonucleotide
ccacctaatatgggatattgggctacagtccagtgcaacattagtagccccatgg

SEQ ID NO: 523552 - DNA, 55 bp, Artificial
  Synthetic oligonucleotide
ccactgcccacggtgctgacaaacttgccagatgccactgcaatacaggagtgta

SEQ ID NO: 523553 - DNA, 55 bp, Artificial
  Synthetic oligonucleotide
ccagctgaattggccaaggctggggcgaaactgggtctacacatgacaccaccag

SEQ ID NO: 523554 - DNA, 55 bp, Artificial
  Synthetic oligonucleotide
ccatactctggtaatccagcacactccaagcttaaagccccaactctacgcccag

SEQ ID NO: 523555 - DNA, 55 bp, Artificial
  Synthetic oligonucleotide
ccatagccaggtgctcgtgtaggtgtggggtgtattactgtgagtccatgagaaa

SEQ ID NO: 523556 - DNA, 55 bp, Artificial
  Synthetic oligonucleotide
ccgcccttttaacaacgcacttgggcgaactgcactggtgtactggtaattcctg

SEQ ID NO: 523557 - DNA, 55 bp, Artificial
  Synthetic oligonucleotide
ccctggcggtacccataggtaacaagtgacactatggatctaaacaggggctcac

SEQ ID NO: 523558 - DNA, 55 bp, Artificial
  Synthetic oligonucleotide
ccctatgtgtacggagtttacaggtatcaggtcaaagaccattgttccacaaggg

SEQ ID NO: 523559 - DNA, 55 bp, Artificial
  Synthetic oligonucleotide
ccctatgtgaatgccagtccatctgagagtgccctaacccatgattactggacca

SEQ ID NO: 523560 - DNA, 55 bp, Artificial
  Synthetic oligonucleotide
cccgtcccggaattgctcattacgcccttttatagacatggtgtgaagactcgca

SEQ ID NO: 523561 - DNA, 55 bp, Artificial
  Synthetic oligonucleotide
cccgccgctctggatcctacctttacccatccctacccaagccccagtacacctc

SEQ ID NO: 523562 - DNA, 55 bp, Artificial
  Synthetic oligonucleotide
cccgagaagagtgtgattggcttgacctatacaaggaaggcatctccacagatgc

SEQ ID NO: 523563 - DNA, 55 bp, Artificial
  Synthetic oligonucleotide
cccctttgtttggaggacgatactgaaaattgcaagcaaaccatgtccccagatg

SEQ ID NO: 523564 - DNA, 55 bp, Artificial
  Synthetic oligonucleotide
ccccgaccaaatttctgagaccaccgaggctctagtgatagtgaatacctccgcc

SEQ ID NO: 523565 - DNA, 55 bp, Artificial
  Synthetic oligonucleotide
ccccagtgtagcttgggccgatgaggctccgaattccccacgggcgaccgtgtca

SEQ ID NO: 523566 - DNA, 55 bp, Artificial
  Synthetic oligonucleotide
ccccagaccaggcatggcaattgacccaccggcgcagtctagtggtgccaccaat

SEQ ID NO: 523567 - DNA, 55 bp, Artificial
  Synthetic oligonucleotide
cccagtgggaccaatgaagctgtggtgtgcgtaaataccagcacgttcccaaacg

SEQ ID NO: 523568 - DNA, 55 bp, Artificial
  Synthetic oligonucleotide
cccagtgatgcccatgaaggaaatccatgagtcaattagatggacaaaggaccct

SEQ ID NO: 523569 - DNA, 55 bp, Artificial
  Synthetic oligonucleotide
cccactagtgtgtgggaaggccattcagctgagagatagaaagtccaaggtcagg

SEQ ID NO: 523570 - DNA, 55 bp, Artificial
  Synthetic oligonucleotide
cccacagtgttagctactttagcactgttaggatgtcacgagtccccatgggctt

SEQ ID NO: 523571 - DNA, 55 bp, Artificial
  Synthetic oligonucleotide
cccacactctgtccagatgtgcgagtatacatcgtcaaggtccagcgcatgacgt

SEQ ID NO: 523572 - DNA, 55 bp, Artificial
  Synthetic oligonucleotide
ccatggatcagacaaggtcaccaggttggccctacatagggtcgaaaaggaggcc

SEQ ID NO: 523573 - DNA, 55 bp, Artificial
  Synthetic oligonucleotide
aactcgtacctaaatggaactgggttcgcgttgatgagttatcgcagggccgcag

SEQ ID NO: 523574 - DNA, 55 bp, Artificial
  Synthetic oligonucleotide
aactgaaaagggagagtttacaggtttaggtgtctatgatcgtgtgtgtgttata

SEQ ID NO: 523575 - DNA, 55 bp, Artificial
  Synthetic oligonucleotide
aagattatggcctgctaatgacaccggcggacaaaggaactacctttgaagccgt

SEQ ID NO: 523576 - DNA, 55 bp, Artificial
  Synthetic oligonucleotide
tttggcgtggttctattatattcactctgactgttttcgccagcagtttccaccg

SEQ ID NO: 523577 - DNA, 55 bp, Artificial
  Synthetic oligonucleotide
acctaaatctggttttcctcgcttcactatcccttttactggtttaggctcagca

SEQ ID NO: 523578 - DNA, 55 bp, Artificial
  Synthetic oligonucleotide
ttgtttcctatcccatccaaccggagactctcgcaaacacccaaaccaatgcagc

SEQ ID NO: 523579 - DNA, 55 bp, Artificial
  Synthetic oligonucleotide
acggctgtgtgccaaaatagttaaatggctgccgagccactgcaggacacaacca

SEQ ID NO: 523580 - DNA, 55 bp, Artificial
  Synthetic oligonucleotide
acgggtgaccgtgttccagcctgcgtggcggccaacccagctcatgctgggacgc

SEQ ID NO: 523581 - DNA, 55 bp, Artificial
  Synthetic oligonucleotide
actacacacactggtctggatctcttagaatctctctgatgtacactggcccagc

SEQ ID NO: 523582 - DNA, 55 bp, Artificial
  Synthetic oligonucleotide
agacccaaagaacacgcaagatcacgtgcgatctctatgcctattggcttggcat

SEQ ID NO: 523583 - DNA, 55 bp, Artificial
  Synthetic oligonucleotide
agagggagtaagaagataggggatgggtgggctacatttcagggtattccaacct

SEQ ID NO: 523584 - DNA, 55 bp, Artificial
  Synthetic oligonucleotide
agatgctcttgaaatgcttgctgactctagacctgtatctaccacactctctttc

SEQ ID NO: 523585 - DNA, 55 bp, Artificial
  Synthetic oligonucleotide
agcacggtgtggttggataatccatgtacaatgtaacgcgaccaaatttcatcaa

SEQ ID NO: 523586 - DNA, 55 bp, Artificial
  Synthetic oligonucleotide
agccccaactctacgcccagtagttgtgcaaggacctaacacagagtttgcgttg

SEQ ID NO: 523587 - DNA, 55 bp, Artificial
  Synthetic oligonucleotide
aggggagtagtccgactccgctccggtaatgccgcaccagtacaccggtacgcta

SEQ ID NO: 523588 - DNA, 55 bp, Artificial
  Synthetic oligonucleotide
aggtcgtccaggctgctaaccgtgtcgctgactccattgagaccactgcctcggc

SEQ ID NO: 523589 - DNA, 55 bp, Artificial
  Synthetic oligonucleotide
cactatcctcaagtctttgatctggactacaagtgttttgatgccaccctcccct

SEQ ID NO: 523590 - DNA, 55 bp, Artificial
  Synthetic oligonucleotide
cacgatccagtgtgctgttggtcgtaatgagtaattgcgggatgggaccaactac

SEQ ID NO: 523591 - DNA, 55 bp, Artificial
  Synthetic oligonucleotide
cacctggagccgtcataccaactgaccaggacacctatcagtggcagactgcagc

SEQ ID NO: 523592 - DNA, 55 bp, Artificial
  Synthetic oligonucleotide
cacagcgccgtgcgattctggtatgacaggttcttccttgccgacgctattagcg

SEQ ID NO: 523593 - DNA, 55 bp, Artificial
  Synthetic oligonucleotide
caaggacagtgccagtaatgcggccaccaaaatggacttttcccaggacccctcc

SEQ ID NO: 523594 - DNA, 55 bp, Artificial
  Synthetic oligonucleotide
caagaggcagctaatgcagtcgtgtgctatgccgaatggcctgaatatttgccag

SEQ ID NO: 523595 - DNA, 55 bp, Artificial
  Synthetic oligonucleotide
caaccttgcttggtgtcttcacgcgctactatacgcagtggtctggttccgtcga

SEQ ID NO: 523596 - DNA, 55 bp, Artificial
  Synthetic oligonucleotide
caaatgccttcttgcctgtaggtaaagtggagtactatggatacctaaacctagc

SEQ ID NO: 523597 - DNA, 55 bp, Artificial
  Synthetic oligonucleotide
caaagcattccatcagaatcctggcaccataacaggttcagcagtaggatgtgac

SEQ ID NO: 523598 - DNA, 55 bp, Artificial
  Synthetic oligonucleotide
atgttgtctacggtactgacaatctggatggattagatttaaccacctcagcagg

SEQ ID NO: 523599 - DNA, 55 bp, Artificial
  Synthetic oligonucleotide
ttatccattagtccgatgttctcagagttttccggggcaagaaataatgtccctc

SEQ ID NO: 523600 - DNA, 55 bp, Artificial
  Synthetic oligonucleotide
ttcccactaacgcatcacccactttacctattacagtcacaatagctccaatgtg

SEQ ID NO: 523601 - DNA, 55 bp, Artificial
  Synthetic oligonucleotide
ttctgctggtgaatctttcactctgcgtggtatccaatctcccggattccaaatc

SEQ ID NO: 523602 - DNA, 55 bp, Artificial
  Synthetic oligonucleotide
atacaagcccagcagactccggacttcaaccgaacaaacccgggcgaggcaggag

SEQ ID NO: 523603 - DNA, 55 bp, Artificial
  Synthetic oligonucleotide
agtccccacgttgcgagtggctaaagtgcaaggtccggcatttgactacgcggtc

SEQ ID NO: 523604 - DNA, 55 bp, Artificial
  Synthetic oligonucleotide
agtatcaaagacactgctcaatagccgccacacctccagtgtggtttcgagcaag

SEQ ID NO: 523605 - DNA, 55 bp, Artificial
  Synthetic oligonucleotide
aggtggaccagagatgcacgcaacacacaagatcaggtgcgttctctgtgcctgc

SEQ ID NO: 523606 - DNA, 55 bp, Artificial
  Synthetic oligonucleotide
cttacagcaattagggcagtctcttttcagcaggcagttccaagaaatgcactca

SEQ ID NO: 523607 - DNA, 55 bp, Artificial
  Synthetic oligonucleotide
cttataagaacctgcacaacatcctctcttgggcacgtgctggcactgtccagga

SEQ ID NO: 523608 - DNA, 55 bp, Artificial
  Synthetic oligonucleotide
ctttggatatcaacccagctccactcactttggaacaggcagcttatgggattcc

SEQ ID NO: 523609 - DNA, 55 bp, Artificial
  Synthetic oligonucleotide
ctttggtatacctagagtaccgtctctttgctggatatcagggcccctacacagg

SEQ ID NO: 523610 - DNA, 55 bp, Artificial
  Synthetic oligonucleotide
gaaaggaggcaatgcttggaacacatgtggtgtgggatattggattacagtccac

SEQ ID NO: 523611 - DNA, 55 bp, Artificial
  Synthetic oligonucleotide
gaaatttacactgttaagggagggatgccatctggttgctctggcaccagtatat

SEQ ID NO: 523612 - DNA, 55 bp, Artificial
  Synthetic oligonucleotide
gaaccacttacaacccagactttaacaacaccatgcctggtaaggcgggtagaac

SEQ ID NO: 523613 - DNA, 55 bp, Artificial
  Synthetic oligonucleotide
gaagactgcccctttcaccaatctatcatccacccttctaagcctgtccagaagg

SEQ ID NO: 523614 - DNA, 55 bp, Artificial
  Synthetic oligonucleotide
gacgcacctgacaaaatccaaggtgcatactcgggcctccctaggctgaaacgcc

SEQ ID NO: 523615 - DNA, 55 bp, Artificial
  Synthetic oligonucleotide
gactcctatgctgcaacagcaggcaaacagagcctcaaacaagaccctgataagt

SEQ ID NO: 523616 - DNA, 55 bp, Artificial
  Synthetic oligonucleotide
gagcatggatacacaattcgggatcttgggaacctgggtcctctttccacagctt

SEQ ID NO: 523617 - DNA, 55 bp, Artificial
  Synthetic oligonucleotide
gaggatctggatggtctgaagctgaagcttaggttttatgctaaaccgaagcacg

SEQ ID NO: 523618 - DNA, 55 bp, Artificial
  Synthetic oligonucleotide
gaggctaagtgtctacgctagcactttcaataggggtcgcctgaggatgggtttc

SEQ ID NO: 523619 - DNA, 55 bp, Artificial
  Synthetic oligonucleotide
tggatgtctagtactttctaccgcaggactaagggtagcaattacacctctgggg

SEQ ID NO: 523620 - DNA, 55 bp, Artificial
  Synthetic oligonucleotide
gaggtttccttatattatgcatattagagcagctaaggcctatagcaagtcaggc

SEQ ID NO: 523621 - DNA, 55 bp, Artificial
  Synthetic oligonucleotide
gagtcaattagatggacaaaggatcctagaaacacgcaggaccatgtccgctcct

SEQ ID NO: 523622 - DNA, 55 bp, Artificial
  Synthetic oligonucleotide
gagtctatcacagagcaaaacatgttgaggcctggatacccagagcccctagagc

SEQ ID NO: 523623 - DNA, 55 bp, Artificial
  Synthetic oligonucleotide
gagtgtgttaggtattgctatatctatgcttaaggaattggacagccagcgtccc

SEQ ID NO: 523624 - DNA, 55 bp, Artificial
  Synthetic oligonucleotide
gatacactgacccagacacatacactagtgccggttacttatcttgttggtacca

SEQ ID NO: 523625 - DNA, 55 bp, Artificial
  Synthetic oligonucleotide
gatccccaagaaacagagagcccgtgtgtacctcaccaccagtgtgacacacgag

SEQ ID NO: 523626 - DNA, 55 bp, Artificial
  Synthetic oligonucleotide
gatcccctaagcatggatgaggccatttatggaactgaaggcctggaagctctgg

SEQ ID NO: 523627 - DNA, 55 bp, Artificial
  Synthetic oligonucleotide
gatcttgtcacagtcactgccactttggccttgttgggttgtgatggttctccct

SEQ ID NO: 523628 - DNA, 55 bp, Artificial
  Synthetic oligonucleotide
gatgcctgtcacaaagcttacacgcggtaggcgcgtactcgtgtcgcaaggacct

SEQ ID NO: 523629 - DNA, 55 bp, Artificial
  Synthetic oligonucleotide
gcaacccatgaggattgggagaacgttgagtgggaagattataacagagatcttc

SEQ ID NO: 523630 - DNA, 55 bp, Artificial
  Synthetic oligonucleotide
gcacacaagccagtgtgtatgtagtcgtaatgagcaattgtgggacggaaccgac

SEQ ID NO: 523631 - DNA, 55 bp, Artificial
  Synthetic oligonucleotide
gcaccagcactaaattcacccaacgttgaagcgtgtgggtatagtgacagggtgc

SEQ ID NO: 523632 - DNA, 55 bp, Artificial
  Synthetic oligonucleotide
gcacgcactttgtccaaaggtgtaccaatacctacctccccaacaccggcttctc

SEQ ID NO: 523633 - DNA, 55 bp, Artificial
  Synthetic oligonucleotide
gcacttctgtttccccggttgcgccctatatgctgtgtgaacggcagaaaggggc

SEQ ID NO: 523634 - DNA, 55 bp, Artificial
  Synthetic oligonucleotide
gcagccatcatttcgcgagagatgcttgatgccgtcgctacccttgctgagttcc

SEQ ID NO: 523635 - DNA, 55 bp, Artificial
  Synthetic oligonucleotide
gcagcccggctttatgtttacagcagagagcttagggaccgctgaatctgccagg

SEQ ID NO: 523636 - DNA, 55 bp, Artificial
  Synthetic oligonucleotide
gcagtgtaacgcatctaaatttcatcaggggtgtctattggtagtgtgcgtgcca

SEQ ID NO: 523637 - DNA, 55 bp, Artificial
  Synthetic oligonucleotide
gccaccacctgcaatttgcgtaagagggaatttagagacaagcataagtggttgt

SEQ ID NO: 523638 - DNA, 55 bp, Artificial
  Synthetic oligonucleotide
cgtgcctggtggcaaggcatgtgacctattattgagtgatgttgaacgccttatg

SEQ ID NO: 523639 - DNA, 55 bp, Artificial
  Synthetic oligonucleotide
cgtcccaatgttaaatcaaggaaccacaaatgcggaggcaggtgagccagacgtg

SEQ ID NO: 523640 - DNA, 55 bp, Artificial
  Synthetic oligonucleotide
cgtaccaacaattgtgccactttggtgctgccgtacgtgaattcatcagccactg

SEQ ID NO: 523641 - DNA, 55 bp, Artificial
  Synthetic oligonucleotide
cggggccgtgaatgctgctaatcccaacctccgagcgtgtgcgcacaaaccagtg

SEQ ID NO: 523642 - DNA, 55 bp, Artificial
  Synthetic oligonucleotide
cgctgttgtgcgcgacaagaagaaacccaatggacttaaagtgattgacattgcc

SEQ ID NO: 523643 - DNA, 55 bp, Artificial
  Synthetic oligonucleotide
cgctcagctacaaacccagtagtagacctggcagatgaggctagaaacaccccac

SEQ ID NO: 523644 - DNA, 55 bp, Artificial
  Synthetic oligonucleotide
cgaggttcgatcttgagctgacctttgtgatcacgagcactcaagagcagtccac

SEQ ID NO: 523645 - DNA, 55 bp, Artificial
  Synthetic oligonucleotide
cgagcacttgcagagtactttaattcatcagtttactccctgccacccgatccca

SEQ ID NO: 523646 - DNA, 55 bp, Artificial
  Synthetic oligonucleotide
cgaccatcactacccaagaggcagcaaacattgtggtcgcctacggacagtggcc

SEQ ID NO: 523647 - DNA, 55 bp, Artificial
  Synthetic oligonucleotide
cgaatcctggcaaacatggtagtgctgtcggttgcaacccagacctacactggac

SEQ ID NO: 523648 - DNA, 55 bp, Artificial
  Synthetic oligonucleotide
cctcttccaatccaactcggtccgtctggaccgggattcaatttggtctcccacc

SEQ ID NO: 523649 - DNA, 55 bp, Artificial
  Synthetic oligonucleotide
tgtagcttgggccgatgaggctccaaattccccacgggcgaccgtgttggagcct

SEQ ID NO: 523650 - DNA, 55 bp, Artificial
  Synthetic oligonucleotide
cctaatacacccagttatgccaatgacagaaatacatgaatcaatccgctggacc

SEQ ID NO: 523651 - DNA, 55 bp, Artificial
  Synthetic oligonucleotide
cctaacctccgagcgtgtgcgcacaatccagtgttgctacgtcgtaacgcgtaag

SEQ ID NO: 523652 - DNA, 55 bp, Artificial
  Synthetic oligonucleotide
ccgttgggttactcttgaccttcctggcgtcgtggaggaaccaacagcttacggc

SEQ ID NO: 523653 - DNA, 55 bp, Artificial
  Synthetic oligonucleotide
ccggcctcatagggcgggccattgctagacaggctaatacaagcacatactcact

SEQ ID NO: 523654 - DNA, 55 bp, Artificial
  Synthetic oligonucleotide
ccgctggaccaaggatgctaaatctacccaggatcatgttaggtctctgtgccta

SEQ ID NO: 523655 - DNA, 55 bp, Artificial
  Synthetic oligonucleotide
ctggcaacacatgtcatttgggatataggtttacaatcaacatgcaaacttgtgg

SEQ ID NO: 523656 - DNA, 55 bp, Artificial
  Synthetic oligonucleotide
ctgcgtagagcggttacacaaggcctcccaaccatgtacaccccaggttctggcc

SEQ ID NO: 523657 - DNA, 55 bp, Artificial
  Synthetic oligonucleotide
cgtgtgggtatagtgacagggtgcaacaaatcactcttggtaactccaccattac

SEQ ID NO: 523658 - DNA, 55 bp, Artificial
  Synthetic oligonucleotide
cgttcccctgcctttggtgctttccctgtcaagaaacaaccagctgttctcactc

SEQ ID NO: 523659 - DNA, 55 bp, Artificial
  Synthetic oligonucleotide
ctctttcgggttctaaacccatctggactatgtcttgcctctggattggcggtcg

SEQ ID NO: 523660 - DNA, 55 bp, Artificial
  Synthetic oligonucleotide
ctacaggcaacgccccaccaagggtgtcagtaccatttatggggattagcggagc

SEQ ID NO: 523661 - DNA, 55 bp, Artificial
  Synthetic oligonucleotide
ctagtcattacaggtacactactccagacacatactcaaaagctggctatatcac

SEQ ID NO: 523662 - DNA, 55 bp, Artificial
  Synthetic oligonucleotide
ctcctgaagttgtccaggctgcgaaccgtgttgctgattccatcgagtccaccgc

SEQ ID NO: 523663 - DNA, 55 bp, Artificial
  Synthetic oligonucleotide
ctagttggtagtcctccggcccctgaatgcggctaatcctaaccacggagcgtcc

SEQ ID NO: 523664 - DNA, 55 bp, Artificial
  Synthetic oligonucleotide
ctatatccacccggtcatggacccagacacttacgaacaatcagtgatgtggctg

SEQ ID NO: 523665 - DNA, 55 bp, Artificial
  Synthetic oligonucleotide
tggggtagatgggttagaacccatagacataacaaccagtgcaggttatccctat

SEQ ID NO: 523666 - DNA, 54 bp, Artificial
  Synthetic oligonucleotide
tctaggcaggaaccaattttgatcgtgctaagaggcaagcctggacagggcaaa

SEQ ID NO: 523667 - DNA, 54 bp, Artificial
  Synthetic oligonucleotide
ggatgattatccagagtgtcatttagcactagttgctaatcaacaagagcccac

SEQ ID NO: 523668 - DNA, 54 bp, Artificial
  Synthetic oligonucleotide
acacattaagtcctccaaccatcttaaacccagatgccctagctaggagatttg

SEQ ID NO: 523669 - DNA, 54 bp, Artificial
  Synthetic oligonucleotide
cctcgataatcgggagagcaatagcagaacaattcaactcagcagtctactccc

SEQ ID NO: 523670 - DNA, 54 bp, Artificial
  Synthetic oligonucleotide
tcatggttgttcccaccatgattgtctactggacgttgtactcttgtattccgg

SEQ ID NO: 523671 - DNA, 54 bp, Artificial
  Synthetic oligonucleotide
gcaatcagacctatgacatgatcgggggtaacccatctgggtgcgttgcaacct

SEQ ID NO: 523672 - DNA, 54 bp, Artificial
  Synthetic oligonucleotide
ttgctatggcgaagcgtaatatattgactgcaacaacgaacaaaggtgagttta

SEQ ID NO: 523673 - DNA, 54 bp, Artificial
  Synthetic oligonucleotide
cgcgctctcctgggtggccgtacatcggtaccaagagacgcccagacctgcttt

SEQ ID NO: 523674 - DNA, 54 bp, Artificial
  Synthetic oligonucleotide
attgcagaaactagaaaaggggagttcaacctcttaggcatccactctaactgt

SEQ ID NO: 523675 - DNA, 54 bp, Artificial
  Synthetic oligonucleotide
gagtaatgggataggagatgcctacaacaggctcgcccatgagtagagcatgga

SEQ ID NO: 523676 - DNA, 54 bp, Artificial
  Synthetic oligonucleotide
ccagggaggattgacaacattttgcatattgccatggtggaatcacttatacca

SEQ ID NO: 523677 - DNA, 54 bp, Artificial
  Synthetic oligonucleotide
atccagacttattgaagcatctagcctgaatgactctgtcgcaatgagacaaac

SEQ ID NO: 523678 - DNA, 53 bp, Artificial
  Synthetic oligonucleotide
ttgcctatggtgaatggccctccttcctaaacccacaagaggcaaacccagtt

SEQ ID NO: 523679 - DNA, 53 bp, Artificial
  Synthetic oligonucleotide
tgaggatgaagaacttgcttatgacttgctgcataggactgttgattcacaac

SEQ ID NO: 523680 - DNA, 53 bp, Artificial
  Synthetic oligonucleotide
tgggccagtgcactcgcaacaagtgccggctcttaccgctgttgagacgggca

SEQ ID NO: 523681 - DNA, 53 bp, Artificial
  Synthetic oligonucleotide
ttttgcaggatacgaagggccatataccggattgcccaatgccaaaccaaaag

SEQ ID NO: 523682 - DNA, 53 bp, Artificial
  Synthetic oligonucleotide
aggagtctatgacaatgttatgatcattccaacacatgctgatgcaggcaaag

SEQ ID NO: 523683 - DNA, 53 bp, Artificial
  Synthetic oligonucleotide
tccatcaacaagttcactgatctcggagagaaattggttccggctgttcaggc

SEQ ID NO: 523684 - DNA, 53 bp, Artificial
  Synthetic oligonucleotide
caagttgctaccttggagcactcgtgcccaactacagaacaacaggagaccat

SEQ ID NO: 523685 - DNA, 53 bp, Artificial
  Synthetic oligonucleotide
acaaaccccagggcgcttacaaccatggctctggtagtatcacacaggtaaat

SEQ ID NO: 523686 - DNA, 53 bp, Artificial
  Synthetic oligonucleotide
accagctcaagattattgcgtacggggacgatgttattgccagctacccgtac

SEQ ID NO: 523687 - DNA, 53 bp, Artificial
  Synthetic oligonucleotide
cgcattatggttggaacaaatgtctcaaaagtttgcacctctttatgccactg

SEQ ID NO: 523688 - DNA, 53 bp, Artificial
  Synthetic oligonucleotide
ctgacgtgggtgcaaatggatggactcctacggtaaacactggccttggagat

SEQ ID NO: 523689 - DNA, 53 bp, Artificial
  Synthetic oligonucleotide
cttgatcctaaggagatagcagaaaccggccttaagtatggtttaacaatcac

SEQ ID NO: 523690 - DNA, 53 bp, Artificial
  Synthetic oligonucleotide
gcgaatactgttgagtcacaccattcaattagcactgaggcgacgcccgcact

SEQ ID NO: 523691 - DNA, 53 bp, Artificial
  Synthetic oligonucleotide
gtcacttccaactttgccggaccaaatgagcgtgctgcgcgttccattggtgc

SEQ ID NO: 523692 - DNA, 53 bp, Artificial
  Synthetic oligonucleotide
gggaatgtcaaatgaagattgtaatacagttgagatgaaaccagttgatgagt

SEQ ID NO: 523693 - DNA, 53 bp, Artificial
  Synthetic oligonucleotide
aggtcaaaatgggcccagctgtcctaagcaaatcggacgctagattagaggag

SEQ ID NO: 523694 - DNA, 53 bp, Artificial
  Synthetic oligonucleotide
agcggatggtatggttgagaggtgcctgcaaacctttgtgaaagtaatctcag

SEQ ID NO: 523695 - DNA, 52 bp, Artificial
  Synthetic oligonucleotide
ttgcatatggacagtggcctagttacaacatagatggtggtgaacacctaga

SEQ ID NO: 523696 - DNA, 52 bp, Artificial
  Synthetic oligonucleotide
ggggaatcttaagatgtcaacatggtgttattgggttcatcactgcaggagg

SEQ ID NO: 523697 - DNA, 52 bp, Artificial
  Synthetic oligonucleotide
ataccagatttcgatgtgacaccgccaatacacatcccaggcgaagtcaaaa

SEQ ID NO: 523698 - DNA, 52 bp, Artificial
  Synthetic oligonucleotide
gaggtattccgataccaccccactcgcacttcctggatagtgcgttagatat

SEQ ID NO: 523699 - DNA, 52 bp, Artificial
  Synthetic oligonucleotide
gaatggcaaaccctactccactcccttccctggggtcgtgggcgagaaagac

SEQ ID NO: 523700 - DNA, 52 bp, Artificial
  Synthetic oligonucleotide
ccaatagtcttgggtatttgatgtgtaaacctttcctaactggaaccactac

SEQ ID NO: 523701 - DNA, 52 bp, Artificial
  Synthetic oligonucleotide
aacagtgcatagacaagtacgggctcaaccttcctatggtcacttacgtgaa

SEQ ID NO: 523702 - DNA, 52 bp, Artificial
  Synthetic oligonucleotide
tatgctaattgcacccctggctgtgatccaactcagcaggccccttggaccc

SEQ ID NO: 523703 - DNA, 52 bp, Artificial
  Synthetic oligonucleotide
acctagctgccttcgccccagtgaccgtggctgaccccatggccgttgagcg

SEQ ID NO: 523704 - DNA, 52 bp, Artificial
  Synthetic oligonucleotide
actcctccctgctcagggagtggtatgataaattctgattgaattcgaccaa

SEQ ID NO: 523705 - DNA, 52 bp, Artificial
  Synthetic oligonucleotide
tacacttgcacgccagtttgccacccctcacccgtcgtaacttagaagctaa

SEQ ID NO: 523706 - DNA, 52 bp, Artificial
  Synthetic oligonucleotide
gtgatcatgggcgctcaggtctcaacgcaaaagagtggatctcatgagaacc

SEQ ID NO: 523707 - DNA, 52 bp, Artificial
  Synthetic oligonucleotide
gtagggcaggtttggtaggggagataaatctccctcttgagggtactactaa

SEQ ID NO: 523708 - DNA, 52 bp, Artificial
  Synthetic oligonucleotide
gtacactctgtgtaacagtgaaaacaatgtgatcacttcggtgagctagtag

SEQ ID NO: 523709 - DNA, 52 bp, Artificial
  Synthetic oligonucleotide
ggtcctatcctagtggagggagggtgccaccccttctctctttagagagtgc

SEQ ID NO: 523710 - DNA, 52 bp, Artificial
  Synthetic oligonucleotide
tgccaaccaaagggtctgctattggtgactatatagtggttgttaattctgc

SEQ ID NO: 523711 - DNA, 52 bp, Artificial
  Synthetic oligonucleotide
aggagactccccgacggcgttactgtggatgaggttgctttcagcaaacaaa

SEQ ID NO: 523712 - DNA, 51 bp, Artificial
  Synthetic oligonucleotide
atctatcaggtggaccagagatgcacgacacacacaagaccacgtgcgttc

SEQ ID NO: 523713 - DNA, 51 bp, Artificial
  Synthetic oligonucleotide
atgttacactgacctcgcacagcatcaagggctcaaagattatgtcaacca

SEQ ID NO: 523714 - DNA, 51 bp, Artificial
  Synthetic oligonucleotide
accttccacccgcacgcgtttccataccgtttatgagcactgccaatgcat

SEQ ID NO: 523715 - DNA, 51 bp, Artificial
  Synthetic oligonucleotide
atttttgaagtttaagttagttaatggaccatatgaaccattttttgtgcc

SEQ ID NO: 523716 - DNA, 51 bp, Artificial
  Synthetic oligonucleotide
caaccataccctagatttaccatacctttcatgagtattgcctcagcttat

SEQ ID NO: 523717 - DNA, 51 bp, Artificial
  Synthetic oligonucleotide
aaacactttgatggttatgcacaacagccagttgttataatggatgatctt

SEQ ID NO: 523718 - DNA, 51 bp, Artificial
  Synthetic oligonucleotide
tctcatcgatgattttgggcagaatgtggaggaacccgaatataaagtttt

SEQ ID NO: 523719 - DNA, 51 bp, Artificial
  Synthetic oligonucleotide
tattgtaaccctcaaggagagaacagtgctcggtgaatcaaggggaagagt

SEQ ID NO: 523720 - DNA, 51 bp, Artificial
  Synthetic oligonucleotide
tcttgagtgggaagaatacaacagggatgtccttgtgtctagagttagtgc

SEQ ID NO: 523721 - DNA, 51 bp, Artificial
  Synthetic oligonucleotide
tactattcaggacttgctgtggggattaacccatacaaagattggcacttt

SEQ ID NO: 523722 - DNA, 51 bp, Artificial
  Synthetic oligonucleotide
taccttttgcacagttagtaacaattctaatgttcttaatcttgatgttac

SEQ ID NO: 523723 - DNA, 51 bp, Artificial
  Synthetic oligonucleotide
taccaccaaggcggttgaaacagcccgcctcaattccggcttcgtgtaccc

SEQ ID NO: 523724 - DNA, 51 bp, Artificial
  Synthetic oligonucleotide
gggtgtgaagtatggtctcactataacacctgcagacaagtccacagagtt

SEQ ID NO: 523725 - DNA, 51 bp, Artificial
  Synthetic oligonucleotide
ggggaattcaccatgcttggtatttatgaccgagttgcagtcttgcccacg

SEQ ID NO: 523726 - DNA, 51 bp, Artificial
  Synthetic oligonucleotide
tgcctccagtaaccggttttatactctagatagtgtagattgggagaagac

SEQ ID NO: 523727 - DNA, 51 bp, Artificial
  Synthetic oligonucleotide
cccacatactattatagccactttagctctgttagggtgttcaggttcacc

SEQ ID NO: 523728 - DNA, 51 bp, Artificial
  Synthetic oligonucleotide
cctcggaagacggtgacactctcatgtcactggcttgcgagtacgatgaag

SEQ ID NO: 523729 - DNA, 51 bp, Artificial
  Synthetic oligonucleotide
ctcacactttaacctgggaatgcatgattgggtccaaggactcggtcaggt

SEQ ID NO: 523730 - DNA, 51 bp, Artificial
  Synthetic oligonucleotide
gacccaggagagatcatgaccctaggaattatgttgagacctacccaatcc

SEQ ID NO: 523731 - DNA, 51 bp, Artificial
  Synthetic oligonucleotide
gcgagcgcttaccagtggttttacgacgggtaccccacgtttggagaacat

SEQ ID NO: 523732 - DNA, 50 bp, Artificial
  Synthetic oligonucleotide
atcagtttcttaccacagatgaggattcgagcccctgtgccttaccagac

SEQ ID NO: 523733 - DNA, 50 bp, Artificial
  Synthetic oligonucleotide
cttgatgccagcaaatctcacagaacctctctctcttgaagaggttgtgt

SEQ ID NO: 523734 - DNA, 50 bp, Artificial
  Synthetic oligonucleotide
ggtttacaatgtgattggtgggatgccttctggatgctcaggcacctccg

SEQ ID NO: 523735 - DNA, 50 bp, Artificial
  Synthetic oligonucleotide
agagtgtattgacaaatatgggctcaaccttccgatggtgacctacatta

SEQ ID NO: 523736 - DNA, 50 bp, Artificial
  Synthetic oligonucleotide
agacaggagatacttccactgcttctatgggctgtttctactcagtccag

SEQ ID NO: 523737 - DNA, 50 bp, Artificial
  Synthetic oligonucleotide
ggaaagatactcttgagttactcaccaccaggtgctaaacccccgaccac

SEQ ID NO: 523738 - DNA, 50 bp, Artificial
  Synthetic oligonucleotide
agtcaagctcccgaaacttttgaggcttggtgtgatgatatggtgtcact

SEQ ID NO: 523739 - DNA, 50 bp, Artificial
  Synthetic oligonucleotide
ccctctgtattcttccaggctaatggagttcctgcccgatttagcgtgcc

SEQ ID NO: 523740 - DNA, 50 bp, Artificial
  Synthetic oligonucleotide
tatgtagttgagggtggtatgccatcaggatgttcaggcactagcatatt

SEQ ID NO: 523741 - DNA, 50 bp, Artificial
  Synthetic oligonucleotide
acaggtaagagatatgatggttggcagcgacacagtagtggagaagatcg

SEQ ID NO: 523742 - DNA, 50 bp, Artificial
  Synthetic oligonucleotide
cattaactgtacacctatggacaacatgttgaggcacaataacgtgtcat

SEQ ID NO: 523743 - DNA, 50 bp, Artificial
  Synthetic oligonucleotide
tgtggttatagtgaccgtgtggctcagttaacacttggaaacagcacaat

SEQ ID NO: 523744 - DNA, 60 bp, Artificial
  Synthetic oligonucleotide
tggttgcgatagcgggcgtgacaaaaaatttcgtcgggcagatgtggcagaagaggttgt

SEQ ID NO: 523745 - DNA, 60 bp, Artificial
  Synthetic oligonucleotide
cgttgagtgcattggtggttttcatggtctaacgattaagtgtcaaaatttgcagggcgg

SEQ ID NO: 523746 - DNA, 60 bp, Artificial
  Synthetic oligonucleotide
cgtctttaatcgtgtccgcagtggtgcgaaaaagctagaatggtgcgaatttcttaccgc

SEQ ID NO: 523747 - DNA, 60 bp, Artificial
  Synthetic oligonucleotide
cgcccttgtggggcgtctccgttaattagttcgtccagtacgttaattcttcagctacgt

SEQ ID NO: 523748 - DNA, 60 bp, Artificial
  Synthetic oligonucleotide
actttctagctataaatttagcgtccgttaaataatcaccgcgtgcagatgtatggttta

SEQ ID NO: 523749 - DNA, 60 bp, Artificial
  Synthetic oligonucleotide
agaagtgatccgaattgagcggagcgaggatgagccgatctcctctgcttgggaattatt

SEQ ID NO: 523750 - DNA, 60 bp, Artificial
  Synthetic oligonucleotide
cgataaccctcctaatttagaagcccaacagcaacacgccctaaaccaaacacgcaaaga

SEQ ID NO: 523751 - DNA, 60 bp, Artificial
  Synthetic oligonucleotide
tgtataaccattcggttggaaccaatagccattaggttcagataatttcggactaccaac

SEQ ID NO: 523752 - DNA, 60 bp, Artificial
  Synthetic oligonucleotide
ccgggatggttctataatcgaaccgtgcgttaaggaaacgcgaccaccaaggagaaagga

SEQ ID NO: 523753 - DNA, 60 bp, Artificial
  Synthetic oligonucleotide
tgtgccgcactgtacaatgcggcagacgcgttcgcatcgaggggtttgcatgaccatcat

SEQ ID NO: 523754 - DNA, 60 bp, Artificial
  Synthetic oligonucleotide
aggcgtagagcggaactccaaagcgaccgcaggaaaactcattgctgctgttatattctc

SEQ ID NO: 523755 - DNA, 60 bp, Artificial
  Synthetic oligonucleotide
ccgaacttatagcattagcgaacgccgatgataatgcagattagatcgctttagtgtttt

SEQ ID NO: 523756 - DNA, 60 bp, Artificial
  Synthetic oligonucleotide
cccaagcggaaaacaaggcaaaaaaacagatcaaaaagaagccaaaaaagacgctagcca

SEQ ID NO: 523757 - DNA, 60 bp, Artificial
  Synthetic oligonucleotide
cattcgccccgcgtcgttcacacattccgtgggatagcgtaaaaaaatccgagccattct

SEQ ID NO: 523758 - DNA, 60 bp, Artificial
  Synthetic oligonucleotide
cagctcaataactggttccatatgttcacccattttcatgctcactccccttaaccttga

SEQ ID NO: 523759 - DNA, 60 bp, Artificial
  Synthetic oligonucleotide
cacgctaaagaaatcaagagaggagtaactaatgcatagttacaccatctatttaagaga

SEQ ID NO: 523760 - DNA, 60 bp, Artificial
  Synthetic oligonucleotide
cacctaatgaatatggtaagtgcagggtatttataagaaattacagaagtgaagagtttt

SEQ ID NO: 523761 - DNA, 60 bp, Artificial
  Synthetic oligonucleotide
caagtcgtgctatatcagtggcgcttacccactgaccatcatcaaacctaaatccggcta

SEQ ID NO: 523762 - DNA, 60 bp, Artificial
  Synthetic oligonucleotide
caagtccggcgagataccggcttcctacgacggctgccgaatcgccgatgagtggctgac

SEQ ID NO: 523763 - DNA, 60 bp, Artificial
  Synthetic oligonucleotide
caacccgcgacggtgcgacgtatggtggtacattatagtttgctactaagaatgaaccat

SEQ ID NO: 523764 - DNA, 60 bp, Artificial
  Synthetic oligonucleotide
atcgagcgtcataccacgcatgattttaaccatttttcgaccagtagaaaaacgcgttaa

SEQ ID NO: 523765 - DNA, 60 bp, Artificial
  Synthetic oligonucleotide
ataaccaatccatacatacccgtctgataaacaaacttcgtcatatggtgtataaccatt

SEQ ID NO: 523766 - DNA, 60 bp, Artificial
  Synthetic oligonucleotide
ttcaataccgcagaggaagcccatagagcctgggccactgcaaaagctcaggtcatcgag

SEQ ID NO: 523767 - DNA, 60 bp, Artificial
  Synthetic oligonucleotide
ataacctttaaagcgattaagggtaatataaccttaagtaaaaacatcactataagcgtg

SEQ ID NO: 523768 - DNA, 60 bp, Artificial
  Synthetic oligonucleotide
tcgcgctatctcaataaggctaatgtaaataatatcgtaacgcctatgcagttgaaaaaa

SEQ ID NO: 523769 - DNA, 60 bp, Artificial
  Synthetic oligonucleotide
tcattttcacttaacgacttatttccagttgaacgttcagtacataacaaatctgatttg

SEQ ID NO: 523770 - DNA, 60 bp, Artificial
  Synthetic oligonucleotide
tatttgcgcaggtcatacaggtgaatattcgaatcgccgatggtgtaaaaaccgattttt

SEQ ID NO: 523771 - DNA, 60 bp, Artificial
  Synthetic oligonucleotide
tttaaataacatctatagctggagtttaagcggttttccatggcaagtagatggtgaaaa

SEQ ID NO: 523772 - DNA, 60 bp, Artificial
  Synthetic oligonucleotide
tcgtggcgatgatccgaaaccttggaaccgaaaagacctgcctcggaaccttcaataccg

SEQ ID NO: 523773 - DNA, 60 bp, Artificial
  Synthetic oligonucleotide
tagcgcgcgcgctcgatttgtggttctgatacctaaccgtggtgctacaatcgcaccggt

SEQ ID NO: 523774 - DNA, 60 bp, Artificial
  Synthetic oligonucleotide
taccacccagagtgggacgcaggccagcgagtgatctgccatgtggacaagcatgaccct

SEQ ID NO: 523775 - DNA, 60 bp, Artificial
  Synthetic oligonucleotide
aacttgtcttaaacttcttacgattctatcagccattgttcacacctcttatttgtatcg

SEQ ID NO: 523776 - DNA, 60 bp, Artificial
  Synthetic oligonucleotide
gttgctgtccataatgtagcttatgaaattagttatatgcaatactggttaactgacaat

SEQ ID NO: 523777 - DNA, 60 bp, Artificial
  Synthetic oligonucleotide
gtggtggctggtaacgtccttctgtacttacctgaacccgagggtgtctcgtataaccct

SEQ ID NO: 523778 - DNA, 60 bp, Artificial
  Synthetic oligonucleotide
gtgatagaaaggaatgataaaatgacagagccaagaattgaaaaactttttggttgcgat

SEQ ID NO: 523779 - DNA, 60 bp, Artificial
  Synthetic oligonucleotide
gtctgagcgcatagctgtagcgtaggtgcgtcacagacgactgggttggacggtgatggg

SEQ ID NO: 523780 - DNA, 60 bp, Artificial
  Synthetic oligonucleotide
gtcaagtaacattgtgttaccgttccagtcataaaattcaatcgtcatgtactcattacg

SEQ ID NO: 523781 - DNA, 60 bp, Artificial
  Synthetic oligonucleotide
tgaactacctccatgcttggcaattcgccttacctaatgcttagcattaaatatgtcaag

SEQ ID NO: 523782 - DNA, 60 bp, Artificial
  Synthetic oligonucleotide
tgagctcaagcaatcttcccctacttgaaaaagtggcagcttatccccgaccgaaaaaat

SEQ ID NO: 523783 - DNA, 60 bp, Artificial
  Synthetic oligonucleotide
gggattaacgcaaagtttggaatcgttagaaaaggccactaatttgttgggcgagaatgg

SEQ ID NO: 523784 - DNA, 60 bp, Artificial
  Synthetic oligonucleotide
ggatgcccctactacgagcgctggaagggggttctccgtcgttgttacagcaagtccggc

SEQ ID NO: 523785 - DNA, 60 bp, Artificial
  Synthetic oligonucleotide
gccgtgaatagcttgataaatattatcaaagcgcaaggacaaaaggatctaagcaactat

SEQ ID NO: 523786 - DNA, 60 bp, Artificial
  Synthetic oligonucleotide
tgcgtcgcaatcggcatcgtctacaatgcaatcgaaggaggttgctcaaaatgacggaaa

SEQ ID NO: 523787 - DNA, 60 bp, Artificial
  Synthetic oligonucleotide
gcaggctgacgcattcaaggagatccgcgatcacctacgcagtgaaaacaggtttgagcc

SEQ ID NO: 523788 - DNA, 60 bp, Artificial
  Synthetic oligonucleotide
acctgaacaagcgaaccggtcgctggtacgcgcagatatgggacagcatgaaatgcatcc

SEQ ID NO: 523789 - DNA, 60 bp, Artificial
  Synthetic oligonucleotide
acgacacacatttgcgagcttaatgataagcatgggcgaagatcctttatgggtctctaa

SEQ ID NO: 523790 - DNA, 60 bp, Artificial
  Synthetic oligonucleotide
gagccattctgtttacgcccttgtggggcgtctccgttaattagttcgtccagtacgtta

SEQ ID NO: 523791 - DNA, 60 bp, Artificial
  Synthetic oligonucleotide
gagcaatttcagcggattaggttgatgtagcgaggagtggtgcgaaatcatcaccgaaaa

SEQ ID NO: 523792 - DNA, 60 bp, Artificial
  Synthetic oligonucleotide
acgtaacattggtaacatatagttatacgtacgctttgataagtgttgacgttcaatatt

SEQ ID NO: 523793 - DNA, 59 bp, Artificial
  Synthetic oligonucleotide
cgatggatcgcctgtacgagcgcgggacgatggtgccgtttttgtggggcagtcaccgt

SEQ ID NO: 523794 - DNA, 59 bp, Artificial
  Synthetic oligonucleotide
cgccccatgcacaagcccgtctatgacccgacgcagccctatggtgggcaccgcagggt

SEQ ID NO: 523795 - DNA, 59 bp, Artificial
  Synthetic oligonucleotide
tttcatgcgctatggtagcggcgactggttcatgatcgtcccggatatgcggtaagata

SEQ ID NO: 523796 - DNA, 58 bp, Artificial
  Synthetic oligonucleotide
ttgtcttttaccatgtagttgagacatataagcccatgttaattctgtacactgtccc

SEQ ID NO: 523797 - DNA, 58 bp, Artificial
  Synthetic oligonucleotide
gggttattaaagtttgttgggaaagaagatgcagaggaaaacatcagaaaggaattag

SEQ ID NO: 523798 - DNA, 58 bp, Artificial
  Synthetic oligonucleotide
accgtcgtttaaccaacctctaaataagtctttcgcttggtctgggaatgctttcatt

SEQ ID NO: 523799 - DNA, 58 bp, Artificial
  Synthetic oligonucleotide
atcttgtaaatgtgctggtgtaccaaaagatgcacaaaagatactttgtgatgaagga

SEQ ID NO: 523800 - DNA, 58 bp, Artificial
  Synthetic oligonucleotide
cacccttaccaccctgactgaacgaggtatccatcatgtctctgctgcaaagcctttg

SEQ ID NO: 523801 - DNA, 57 bp, Artificial
  Synthetic oligonucleotide
gtattggatagaattcatgcgccgcacacgcgcaggagaattgacgatgctcaccgc

SEQ ID NO: 523802 - DNA, 57 bp, Artificial
  Synthetic oligonucleotide
ctccatttgaaagaccatgactagcagctgttacagtaattgtattactagatctag

SEQ ID NO: 523803 - DNA, 57 bp, Artificial
  Synthetic oligonucleotide
agttttctcgtaatctgcaacctgcgggtctactggttgtgataaatcgcggaattt

SEQ ID NO: 523804 - DNA, 56 bp, Artificial
  Synthetic oligonucleotide
aatcgttttatgacgcattttatacgtatgtgaaacgacgtgatacaatcactaag

SEQ ID NO: 523805 - DNA, 56 bp, Artificial
  Synthetic oligonucleotide
aattgcaaacctgcatgacccgataggctcccaggacgcagccacgatggcctacg

SEQ ID NO: 523806 - DNA, 56 bp, Artificial
  Synthetic oligonucleotide
tgccatttgtttttaggctccacagcaatgaatgcaccgcagcagccgcattcata

SEQ ID NO: 523807 - DNA, 56 bp, Artificial
  Synthetic oligonucleotide
gcaaagaacgtatattcaatgtcatttagagacgcgactgatgacattaaagttgg

SEQ ID NO: 523808 - DNA, 56 bp, Artificial
  Synthetic oligonucleotide
ccgaaaaaatcgcctcgcgaccgtgtacttcgcagaatactaagcatgaagcttga

SEQ ID NO: 523809 - DNA, 56 bp, Artificial
  Synthetic oligonucleotide
ccatttgacgctattataagagatgcaccaataaccggaattatagctatgtaacc

SEQ ID NO: 523810 - DNA, 56 bp, Artificial
  Synthetic oligonucleotide
agtcggcataaacccatctggatgcgctaccgattttgtgagggacaggcaaccgg

SEQ ID NO: 523811 - DNA, 56 bp, Artificial
  Synthetic oligonucleotide
ttatctacgaacccgaaactggcctttttacctggaggcaaacgctctccaatcga

SEQ ID NO: 523812 - DNA, 55 bp, Artificial
  Synthetic oligonucleotide
ggaagattttcatatccgcaccgtgagcctgaacttcaatgtactcgccagtgcc

SEQ ID NO: 523813 - DNA, 55 bp, Artificial
  Synthetic oligonucleotide
ggaagattacctgtgctgctatcatccaatgatattttctgacgacggtttcttt

SEQ ID NO: 523814 - DNA, 55 bp, Artificial
  Synthetic oligonucleotide
gctttggaggtgatgaagatggcgaagtacacactagaattaaggacattagaga

SEQ ID NO: 523815 - DNA, 55 bp, Artificial
  Synthetic oligonucleotide
gctttcattaactgcgtagaaaacgaagtggcagcatatatcacgatgaaaatcg

SEQ ID NO: 523816 - DNA, 55 bp, Artificial
  Synthetic oligonucleotide
gctttaacggacaagctcaaggaacagagtcacttattgcagttggagcaagaaa

SEQ ID NO: 523817 - DNA, 55 bp, Artificial
  Synthetic oligonucleotide
gcttctgtccgcatttccgaactggtggcgtgagcatattctaactcgccaaggc

SEQ ID NO: 523818 - DNA, 55 bp, Artificial
  Synthetic oligonucleotide
gctgtaccgtcaacaatcagtttgtacacaccaccatcaatcagtgcagtaccat

SEQ ID NO: 523819 - DNA, 55 bp, Artificial
  Synthetic oligonucleotide
gctgcgaataccctgtggagtgttattaatggcgatgctactaaacccgctaaca

SEQ ID NO: 523820 - DNA, 55 bp, Artificial
  Synthetic oligonucleotide
gctctcaaggacgagagcaatacgatgttaccacctgaccctgattagatgcctg

SEQ ID NO: 523821 - DNA, 55 bp, Artificial
  Synthetic oligonucleotide
gctccgggtgaagataattttcatgaccttccgggttggggtaagcctaataagg

SEQ ID NO: 523822 - DNA, 55 bp, Artificial
  Synthetic oligonucleotide
gctacgtgctgaagttagttcaattgcacctgcagggtttagtgtacctacaccc

SEQ ID NO: 523823 - DNA, 55 bp, Artificial
  Synthetic oligonucleotide
gcgtgtgagggcatgggctatctgtccttatgtgtcctgatgcaatacactcacc

SEQ ID NO: 523824 - DNA, 55 bp, Artificial
  Synthetic oligonucleotide
gcgtccgttaaataatcaccgcgtgcagatgtatggtttaaccaacctaaaccgg

SEQ ID NO: 523825 - DNA, 55 bp, Artificial
  Synthetic oligonucleotide
gcgtaggtgcgtcacagacgactgggttggacggtgatgggttggccttatgcca

SEQ ID NO: 523826 - DNA, 55 bp, Artificial
  Synthetic oligonucleotide
gcgtacctgtgccctgctggtaagtggactatcgggtacggacagaccaagggta

SEQ ID NO: 523827 - DNA, 55 bp, Artificial
  Synthetic oligonucleotide
gcggtttacaaggctgttaacgctttgcaggcgactaaatggcaggttaacaagg

SEQ ID NO: 523828 - DNA, 55 bp, Artificial
  Synthetic oligonucleotide
gcggaggttaccccgtgtcctgtgagccgtgacaccatgttagcaccggatgcca

SEQ ID NO: 523829 - DNA, 55 bp, Artificial
  Synthetic oligonucleotide
ggcgtcacgctctaagcagtaccgccacgggcatagagtcatggtgtctgcggag

SEQ ID NO: 523830 - DNA, 55 bp, Artificial
  Synthetic oligonucleotide
ggcgcaaatcgctatggctgcggttaacgtccttgaaggttacggtcaagcaggt

SEQ ID NO: 523831 - DNA, 55 bp, Artificial
  Synthetic oligonucleotide
ggcgaggatcgctgatgagccttgtatgagataattgacggatttgtgcctcgag

SEQ ID NO: 523832 - DNA, 55 bp, Artificial
  Synthetic oligonucleotide
ggcgaacacccggcccacaagctgctaccgcgtaattgcggagcgattgcattgt

SEQ ID NO: 523833 - DNA, 55 bp, Artificial
  Synthetic oligonucleotide
ggcccgaaccgtaaggacatgcctttcttgttcgctaaggacaaggtaacgaaca

SEQ ID NO: 523834 - DNA, 55 bp, Artificial
  Synthetic oligonucleotide
ggcccctttccgcgttagtatcgctgttatggtctgtcctctggctatcctcggg

SEQ ID NO: 523835 - DNA, 55 bp, Artificial
  Synthetic oligonucleotide
ggccccgaggtacgcttagggttagtctacagcgacgcacaatgcgctgagctgc

SEQ ID NO: 523836 - DNA, 55 bp, Artificial
  Synthetic oligonucleotide
ggccagccacaaagtccgcgtgcgcaaatggtgatggacgcaacaggaggacgct

SEQ ID NO: 523837 - DNA, 55 bp, Artificial
  Synthetic oligonucleotide
ggatgcccgtgttcctcgtactgagttgcatgggaggctctctgggtatcggctc

SEQ ID NO: 523838 - DNA, 55 bp, Artificial
  Synthetic oligonucleotide
acccattccctgatggtaagttacctctggtggtcgttccatacatgcctcgtaa

SEQ ID NO: 523839 - DNA, 55 bp, Artificial
  Synthetic oligonucleotide
tgccggcgtaggggctgtcagagcctctggtacatgcattggggttgccttgggt

SEQ ID NO: 523840 - DNA, 55 bp, Artificial
  Synthetic oligonucleotide
ggatagacactggctccctatggctaagtcgctgggtgtcggtgaagacactaag

SEQ ID NO: 523841 - DNA, 55 bp, Artificial
  Synthetic oligonucleotide
ggagtattgccagcctcggacttcatctgaagaactttagaaggggatgtccgcg

SEQ ID NO: 523842 - DNA, 55 bp, Artificial
  Synthetic oligonucleotide
ggagtatccccaacaggtggtaatgtcagtgtatccgcagaagaggtaaggctac

SEQ ID NO: 523843 - DNA, 55 bp, Artificial
  Synthetic oligonucleotide
ggaggtatccaatagtgaaagcacgagagagatacaatcagcttacaaccgcacg

SEQ ID NO: 523844 - DNA, 55 bp, Artificial
  Synthetic oligonucleotide
ggactacaacgagttcgctatgggcttaccatcacagattgctggtggacgttac

SEQ ID NO: 523845 - DNA, 55 bp, Artificial
  Synthetic oligonucleotide
ggacaatcgtctatactttagttcaccagttattcgcgagaagttccgtggacct

SEQ ID NO: 523846 - DNA, 55 bp, Artificial
  Synthetic oligonucleotide
ggaagccagtcttagtgtggtctagctccttgtattcatctttagagtcctggac

SEQ ID NO: 523847 - DNA, 55 bp, Artificial
  Synthetic oligonucleotide
tggcagctcaaaccgcatgaagggtctggagggtgcgaacatggccaggaccatc

SEQ ID NO: 523848 - DNA, 55 bp, Artificial
  Synthetic oligonucleotide
gcactctacatcgcgggccacatctcgcagcactgacttgtgcgtgtcgaagtag

SEQ ID NO: 523849 - DNA, 55 bp, Artificial
  Synthetic oligonucleotide
gcactacaaagataatggcaagtgttactcaaacaatacctacactgactggtgg

SEQ ID NO: 523850 - DNA, 55 bp, Artificial
  Synthetic oligonucleotide
gcacggttgtctgatatcgccaaaggtggggcgttcgtaatgcaaaaggcactga

SEQ ID NO: 523851 - DNA, 55 bp, Artificial
  Synthetic oligonucleotide
gcaccattcgttatagaatcgaaccactgcgccgattgataccagaggggagctc

SEQ ID NO: 523852 - DNA, 55 bp, Artificial
  Synthetic oligonucleotide
gcacatgacaaggtgcaacaccctggacattataacaacggcatagaggtttggg

SEQ ID NO: 523853 - DNA, 55 bp, Artificial
  Synthetic oligonucleotide
atctcgaccccaccccaatcatcgttttctctgcattggtgataagtgttgagat

SEQ ID NO: 523854 - DNA, 55 bp, Artificial
  Synthetic oligonucleotide
gattcggattaccagggtcgagatgtccgtcgcctgtgagccacctgcggagatg

SEQ ID NO: 523855 - DNA, 55 bp, Artificial
  Synthetic oligonucleotide
gattcacacctacctacttctggagctgtcgttgattatgtgtcttcccaactag

SEQ ID NO: 523856 - DNA, 55 bp, Artificial
  Synthetic oligonucleotide
gatgcctaaccaatcatcagcctccatcccatcaacaattacgtgagggtggttc

SEQ ID NO: 523857 - DNA, 55 bp, Artificial
  Synthetic oligonucleotide
gatgacacgccgtgatgccgaacgtgttactgctgtagaaatccagcgagatgcg

SEQ ID NO: 523858 - DNA, 55 bp, Artificial
  Synthetic oligonucleotide
gatacaggcgcaacatatagctttgctaacaacatggttgtagcagttcccaaag

SEQ ID NO: 523859 - DNA, 55 bp, Artificial
  Synthetic oligonucleotide
gagtttaaagagagaagaccacttgatggctatatcccatttcatcaagtggcac

SEQ ID NO: 523860 - DNA, 55 bp, Artificial
  Synthetic oligonucleotide
gagtatcgcgttgcgagctgcacaggttaatgatctggcaaaagcatacggcact

SEQ ID NO: 523861 - DNA, 55 bp, Artificial
  Synthetic oligonucleotide
acgctaaattcatcgtactggcttccgctttccgtttcggtgtatcacaggatac

SEQ ID NO: 523862 - DNA, 55 bp, Artificial
  Synthetic oligonucleotide
gagcatggcctttgcctacggtaagttgcaccgtaagaaacctattctgggttgc

SEQ ID NO: 523863 - DNA, 55 bp, Artificial
  Synthetic oligonucleotide
gagcagaacatgggcggtgtatattccctctttgctactactatgcaatcgccag

SEQ ID NO: 523864 - DNA, 55 bp, Artificial
  Synthetic oligonucleotide
acgggatcagcggaactgatcgacgctcctaaaggcacggcgtccaatccttagc

SEQ ID NO: 523865 - DNA, 55 bp, Artificial
  Synthetic oligonucleotide
gcgccatcagaaggaaagcggtgttcatctgtatgtctggttcgattttgtccgt

SEQ ID NO: 523866 - DNA, 55 bp, Artificial
  Synthetic oligonucleotide
gcgactgactctccgtatggcaccgctgcacagatgccaggccacaaggctggta

SEQ ID NO: 523867 - DNA, 55 bp, Artificial
  Synthetic oligonucleotide
gcgacggtaagagcgtgaccttgtactgtgacggtagaagtgtggccgtggacca

SEQ ID NO: 523868 - DNA, 55 bp, Artificial
  Synthetic oligonucleotide
gcgaacaccgcatctaccaacgcctctaccgctgtgtccacggctaacgccgcta

SEQ ID NO: 523869 - DNA, 55 bp, Artificial
  Synthetic oligonucleotide
gccttacaaactcgttctcggtcattagattaaccagtcgagtggaatatcatgg

SEQ ID NO: 523870 - DNA, 55 bp, Artificial
  Synthetic oligonucleotide
gcctgatcgatacatcgctggctaacatcaaggcagcagttccggagattgaccg

SEQ ID NO: 523871 - DNA, 55 bp, Artificial
  Synthetic oligonucleotide
ataacaatacgcttgaagacaccaacgactttattgttccaaacaagccgttagg

SEQ ID NO: 523872 - DNA, 55 bp, Artificial
  Synthetic oligonucleotide
gccggttgcattccaataccagtatggagcaacagcttatggtatggcgatgtct

SEQ ID NO: 523873 - DNA, 55 bp, Artificial
  Synthetic oligonucleotide
gccgatagcgtatgaagtatcggataaccgaacgaaagcgattgacacgttaagc

SEQ ID NO: 523874 - DNA, 55 bp, Artificial
  Synthetic oligonucleotide
ttgaagccgggaggctctattattatcattcaaacacgctggcatgaagacgacc

SEQ ID NO: 523875 - DNA, 55 bp, Artificial
  Synthetic oligonucleotide
gccaccgtacttctcactgtaccagccagtatctccgctagttcggaaccacccg

SEQ ID NO: 523876 - DNA, 55 bp, Artificial
  Synthetic oligonucleotide
tgctacacagaacgccatatccgcgccccatgctgtcaaccatcattgacatgtt

SEQ ID NO: 523877 - DNA, 55 bp, Artificial
  Synthetic oligonucleotide
gccaatgtaggaggcaagcatcctaagctctagaccagcaccgtcatagcccacg

SEQ ID NO: 523878 - DNA, 55 bp, Artificial
  Synthetic oligonucleotide
gcattagcgaacgccgatgataatgcagattagatcgctttagtgttttatgctt

SEQ ID NO: 523879 - DNA, 55 bp, Artificial
  Synthetic oligonucleotide
gcatggcaagctactcttcaagccggagcccgtgtcgtacgtcgttgagcataag

SEQ ID NO: 523880 - DNA, 55 bp, Artificial
  Synthetic oligonucleotide
gcataactggaccggatactggcgacacgtcaacggcgaaagtaagccgatgacg

SEQ ID NO: 523881 - DNA, 55 bp, Artificial
  Synthetic oligonucleotide
acctcacttatgacatgccgggcttactcactgatgataaccgtgcggtgctggg

SEQ ID NO: 523882 - DNA, 55 bp, Artificial
  Synthetic oligonucleotide
gcagatggtagagaagtaaatgttaagtgtgtggctgaattagacaatgacttga

SEQ ID NO: 523883 - DNA, 55 bp, Artificial
  Synthetic oligonucleotide
taatgctagattaagttatgctaatagagtcgcaaagaccatggcccaaggcgga

SEQ ID NO: 523884 - DNA, 55 bp, Artificial
  Synthetic oligonucleotide
tcgttccactcatcggggaaagcaagtcccaggtcctcaccggcccaaccggctt

SEQ ID NO: 523885 - DNA, 55 bp, Artificial
  Synthetic oligonucleotide
taagcgaccacatcgctgcataacttatccactcaagcaatatatccgcacccgc

SEQ ID NO: 523886 - DNA, 55 bp, Artificial
  Synthetic oligonucleotide
taacaacctcaagagggtataacttatgtgggcgcaaatcgctatggctgcggtt

SEQ ID NO: 523887 - DNA, 55 bp, Artificial
  Synthetic oligonucleotide
gttttcactagctggaagtgttgccggtggtttaacgggagctaaatacgggaaa

SEQ ID NO: 523888 - DNA, 55 bp, Artificial
  Synthetic oligonucleotide
gttgctagtatcccgctggttgttgtagaggcactacggaatcgtccaatgtctg

SEQ ID NO: 523889 - DNA, 55 bp, Artificial
  Synthetic oligonucleotide
gttctcatcgaaccaagcaatacgctcatcccatgtcttcttatctaagccatag

SEQ ID NO: 523890 - DNA, 55 bp, Artificial
  Synthetic oligonucleotide
gttaccacttccgatgctgaccataagtatggtatctctggtattgacaccaagg

SEQ ID NO: 523891 - DNA, 55 bp, Artificial
  Synthetic oligonucleotide
gtgtatcgttagcctactaggtaggaaaggagccgggtaaccctgactgtagaag

SEQ ID NO: 523892 - DNA, 55 bp, Artificial
  Synthetic oligonucleotide
ataataaagagcttgaaatatgcggagttgcaaaagaaacagtacagggatgggg

SEQ ID NO: 523893 - DNA, 55 bp, Artificial
  Synthetic oligonucleotide
gtgggagcagggacgtgacatccttgaggaggcccgtaagggtatcattgctcag

SEQ ID NO: 523894 - DNA, 55 bp, Artificial
  Synthetic oligonucleotide
tctctcatgaagcgggtcacctccggagagggtgagtccatcacgcttgattctc

SEQ ID NO: 523895 - DNA, 55 bp, Artificial
  Synthetic oligonucleotide
gtgatgcactagcctccttcggcctcatgcctgattcattgatgcaatctccggg

SEQ ID NO: 523896 - DNA, 55 bp, Artificial
  Synthetic oligonucleotide
aatgaaccatcgtcaaatactgccactacaacacctgtgtgaccaatcccatata

SEQ ID NO: 523897 - DNA, 55 bp, Artificial
  Synthetic oligonucleotide
gtcgctattcgaaacactgtaatcgggtgttcggtggcggcagtcctcggccttg

SEQ ID NO: 523898 - DNA, 55 bp, Artificial
  Synthetic oligonucleotide
gtccgggccaacaactgctacggcgtttacacccgccgtcacaacgagtacgcac

SEQ ID NO: 523899 - DNA, 55 bp, Artificial
  Synthetic oligonucleotide
gtccctgtccgtcgggttgacgcgatgctgaactctgaggctcgggtagtctgac

SEQ ID NO: 523900 - DNA, 55 bp, Artificial
  Synthetic oligonucleotide
tcttgatgtctccagcatttgcaagtggacataacctacccggtaacttcgagtt

SEQ ID NO: 523901 - DNA, 55 bp, Artificial
  Synthetic oligonucleotide
tcgcacgggataacgagctcatcactcctacaggacggatcgcagaagcataccc

SEQ ID NO: 523902 - DNA, 55 bp, Artificial
  Synthetic oligonucleotide
tccgttggtgatattgtaactctgcgagaggacgatggttcaccttgcccgtact

SEQ ID NO: 523903 - DNA, 55 bp, Artificial
  Synthetic oligonucleotide
tccgtcctgtaacctctaagctgtcacgctttaacctggtagttccatggttcaa

SEQ ID NO: 523904 - DNA, 55 bp, Artificial
  Synthetic oligonucleotide
tccctgaatataaatattgtaccgaaccaagcgtggcaaaccctaccggcacctt

SEQ ID NO: 523905 - DNA, 55 bp, Artificial
  Synthetic oligonucleotide
tccaatgatccaagttcctgagttgctgaaaccggttgattcaagcgcgattccg

SEQ ID NO: 523906 - DNA, 55 bp, Artificial
  Synthetic oligonucleotide
aaacgtatgccagaccttgcacatgagttacgtacttggcaaccacaaccagacc

SEQ ID NO: 523907 - DNA, 55 bp, Artificial
  Synthetic oligonucleotide
tcatgcgcgagtgtatgcgctctaatcatatacgggaggcttaacggcctccctt

SEQ ID NO: 523908 - DNA, 55 bp, Artificial
  Synthetic oligonucleotide
tcagtaactatcgttacccagcaatccgaatcctagatacagcggaaggcgagtg

SEQ ID NO: 523909 - DNA, 55 bp, Artificial
  Synthetic oligonucleotide
tcactcttgaagaaaggcgagctatcacagcacaccctgaaaagtttattgggcg

SEQ ID NO: 523910 - DNA, 55 bp, Artificial
  Synthetic oligonucleotide
aaaggacgctttgctccatattaagtacgtaccaaccggagctgtccaggcaaaa

SEQ ID NO: 523911 - DNA, 55 bp, Artificial
  Synthetic oligonucleotide
tcgggaaaattcggcatgtccaccacgcaacggggaacgtcacgcgaacgtgaca

SEQ ID NO: 523912 - DNA, 55 bp, Artificial
  Synthetic oligonucleotide
tatgagggtaaagaattttatcgtccatacgcaagtttcgtaaccgcatacggac

SEQ ID NO: 523913 - DNA, 55 bp, Artificial
  Synthetic oligonucleotide
tatgagagggaggcgaaagccgcgactggcacccgtaaggtgccgcattgtgccg

SEQ ID NO: 523914 - DNA, 55 bp, Artificial
  Synthetic oligonucleotide
aacaacggagggtgccaacccatgaaccactcacagacgggttccacccctggcg

SEQ ID NO: 523915 - DNA, 55 bp, Artificial
  Synthetic oligonucleotide
aaccatcacgctccttcactggctctttgcagctcgcggcgacatcccctcgcag

SEQ ID NO: 523916 - DNA, 55 bp, Artificial
  Synthetic oligonucleotide
tacttcgagcgcaaaccgcagacagcggtgattaaggccttcgccggcgcagctg

SEQ ID NO: 523917 - DNA, 55 bp, Artificial
  Synthetic oligonucleotide
tacgaagtttcaggattgggtcatgaccaaaaggacggaaccctgcgaacacacc

SEQ ID NO: 523918 - DNA, 55 bp, Artificial
  Synthetic oligonucleotide
taatgctggcgggcaacggtactcaggcgcttcaggcgcgtcgcaacgtccggcc

SEQ ID NO: 523919 - DNA, 55 bp, Artificial
  Synthetic oligonucleotide
gggtttcgatcaggataccgacttcgccagtagagccaccccacggattggggcc

SEQ ID NO: 523920 - DNA, 55 bp, Artificial
  Synthetic oligonucleotide
gggttcgtacttaacgacctgaccaccagatgtaaacaccttcataaggctgggc

SEQ ID NO: 523921 - DNA, 55 bp, Artificial
  Synthetic oligonucleotide
atcctcgtactcttgcattacaatatccatactacaccctcagtaatggctcccg

SEQ ID NO: 523922 - DNA, 55 bp, Artificial
  Synthetic oligonucleotide
gggtcttgaggtcgcaacttatattaaccagttggtgcctacgaaccctaccggc

SEQ ID NO: 523923 - DNA, 55 bp, Artificial
  Synthetic oligonucleotide
ggggcgtctctcagcaggtgccacaccaacgtttctccggtcagcacactgacca

SEQ ID NO: 523924 - DNA, 55 bp, Artificial
  Synthetic oligonucleotide
ggggcctccctggaccatattgttctagtccatcaatgggtcgccgacttatttc

SEQ ID NO: 523925 - DNA, 55 bp, Artificial
  Synthetic oligonucleotide
ggggattggtaacctagaggttaagcggggcactctggaagaaacctctcggaag

SEQ ID NO: 523926 - DNA, 55 bp, Artificial
  Synthetic oligonucleotide
ggggatagcggaagtaatacacatgagggtgaaacttgtattggtatgctagttg

SEQ ID NO: 523927 - DNA, 55 bp, Artificial
  Synthetic oligonucleotide
ggggagactctccctcacccagacatacttggccgcctcagacgcctcttggaag

SEQ ID NO: 523928 - DNA, 55 bp, Artificial
  Synthetic oligonucleotide
ttggcgtagccaaccattgcctcaatttgcggtgtcattaagtcacgctggtcct

SEQ ID NO: 523929 - DNA, 55 bp, Artificial
  Synthetic oligonucleotide
gggatatccctggtggggataattcaccaatcttttcagaagtaccccgaatcac

SEQ ID NO: 523930 - DNA, 55 bp, Artificial
  Synthetic oligonucleotide
gggatagccaccgccgaaaataattacattgacatggcgccgagtatggttagat

SEQ ID NO: 523931 - DNA, 55 bp, Artificial
  Synthetic oligonucleotide
gggacacacatcccgatacgacaaaggggtttatcggcaaaccttggcattggcg

SEQ ID NO: 523932 - DNA, 55 bp, Artificial
  Synthetic oligonucleotide
ggcttgtaataggtttaagtgggagaacttaccaactggtttagaaagtagacat

SEQ ID NO: 523933 - DNA, 55 bp, Artificial
  Synthetic oligonucleotide
ggctgtcgtatcgcatgggttaaccatggtgaaactcagtacgcagccgggtatg

SEQ ID NO: 523934 - DNA, 55 bp, Artificial
  Synthetic oligonucleotide
ggctctgacggctcatacccgagagacgcctgcccgtacattccgattcgcatgg

SEQ ID NO: 523935 - DNA, 55 bp, Artificial
  Synthetic oligonucleotide
ggctcagcattaggtactccaacctcatgggcttataacgcggccctagacgtgt

SEQ ID NO: 523936 - DNA, 55 bp, Artificial
  Synthetic oligonucleotide
ggctaaggtggctaacctatttgttgtacgtcttcacgggcgtggtgactggggt

SEQ ID NO: 523937 - DNA, 55 bp, Artificial
  Synthetic oligonucleotide
atacgagttggtgcttggaggccttccagcgcgcaccctgagcgcaaaccctcca

SEQ ID NO: 523938 - DNA, 55 bp, Artificial
  Synthetic oligonucleotide
gtaggtgctccaacttcagcaactgatggggttatcattagtgctaatcctgtga

SEQ ID NO: 523939 - DNA, 55 bp, Artificial
  Synthetic oligonucleotide
gtagcgtaaccaagcgctccgtaatgactctggcgtatggctccaaggagtttgg

SEQ ID NO: 523940 - DNA, 55 bp, Artificial
  Synthetic oligonucleotide
gtaatcacgacaaatctctaaattaactattgacaaccacggcatacaaggctac

SEQ ID NO: 523941 - DNA, 55 bp, Artificial
  Synthetic oligonucleotide
gtaagggattcaatcttttatggcggtttaaattcccaagctattggtgtttgcg

SEQ ID NO: 523942 - DNA, 55 bp, Artificial
  Synthetic oligonucleotide
gtaagaggagagactgcacaggaattatgtgctaacggcatactatatggtcgaa

SEQ ID NO: 523943 - DNA, 55 bp, Artificial
  Synthetic oligonucleotide
aatgtatggattgccatatgctgtatatagctattatattgactctaccgtggcg

SEQ ID NO: 523944 - DNA, 55 bp, Artificial
  Synthetic oligonucleotide
atcccacacgaaccccatagcgttctgcgatggttttactgatcttgcgggagtc

SEQ ID NO: 523945 - DNA, 55 bp, Artificial
  Synthetic oligonucleotide
ggttcggggttttgtctttgtgcgccataatccacaaagcgcttcgcttaaccac

SEQ ID NO: 523946 - DNA, 55 bp, Artificial
  Synthetic oligonucleotide
ggttccatatgttcacccattttcatgctcactccccttaaccttgataccagcg

SEQ ID NO: 523947 - DNA, 55 bp, Artificial
  Synthetic oligonucleotide
ggtggtccacttatccgtggtgtgtctgcactaggtaaagtaatggtaggtgggg

SEQ ID NO: 523948 - DNA, 55 bp, Artificial
  Synthetic oligonucleotide
ggtgcaacgtgtaacccggatgcacccgaagagtgtgagtcctgccaatgaagtg

SEQ ID NO: 523949 - DNA, 55 bp, Artificial
  Synthetic oligonucleotide
ggtctgcctgctgacttcaactataaggagggttacgagaagttgatggctcctt

SEQ ID NO: 523950 - DNA, 55 bp, Artificial
  Synthetic oligonucleotide
tgagttcaatagtgagaacccaatatcagatgatgagttgaccattgtacgtggt

SEQ ID NO: 523951 - DNA, 55 bp, Artificial
  Synthetic oligonucleotide
ggtcatatctgttataagctatgccgtacatgttgaacgcttgttctagcttact

SEQ ID NO: 523952 - DNA, 55 bp, Artificial
  Synthetic oligonucleotide
ggtcacggcaactttcaagtagcatttgcattaagttgattacactatccctcca

SEQ ID NO: 523953 - DNA, 55 bp, Artificial
  Synthetic oligonucleotide
ggtacattcttagtgaagaccaaataagggatgagaggatacggaggtcgctcac

SEQ ID NO: 523954 - DNA, 55 bp, Artificial
  Synthetic oligonucleotide
ttaccgcgcccacgtacaatgaaaactccatcgcgcatgttagcagggataacgc

SEQ ID NO: 523955 - DNA, 55 bp, Artificial
  Synthetic oligonucleotide
ccgcgttggtgcgctctcgcatcccttacggtcggactggccgttggaggtaata

SEQ ID NO: 523956 - DNA, 55 bp, Artificial
  Synthetic oligonucleotide
ccgcatgatacgcctgccggcccatctctaacaggacgaacggcgaagcgatgag

SEQ ID NO: 523957 - DNA, 55 bp, Artificial
  Synthetic oligonucleotide
ccgcaggcaaatttaccgtccttgaatgtccagcggtacacgataccagcgtcga

SEQ ID NO: 523958 - DNA, 55 bp, Artificial
  Synthetic oligonucleotide
ccgacccattcgatgccggtgatactcagtggcagccaattagaggccgagatgc

SEQ ID NO: 523959 - DNA, 55 bp, Artificial
  Synthetic oligonucleotide
aggccgccctttgcactctgcattgagccaacacaatagtgagcacccatattag

SEQ ID NO: 523960 - DNA, 55 bp, Artificial
  Synthetic oligonucleotide
agggccggtggctggtctcgtagatgatgtcattaagatcgggcagggcatcccg

SEQ ID NO: 523961 - DNA, 55 bp, Artificial
  Synthetic oligonucleotide
atgttcgccccatcacgtcctttcatgcgatttgagatgccacgcagagcacagc

SEQ ID NO: 523962 - DNA, 55 bp, Artificial
  Synthetic oligonucleotide
cccttacttagctatataacgtaaatgattaggaagtcacacggtagaacgtgcc

SEQ ID NO: 523963 - DNA, 55 bp, Artificial
  Synthetic oligonucleotide
cccttacagatgcggtgaatcaggtgttaaaacataccagaacgaagttaacggg

SEQ ID NO: 523964 - DNA, 55 bp, Artificial
  Synthetic oligonucleotide
ccctgcgtacataaacgtggtgactggcggttccccagagaaccttgacgccctc

SEQ ID NO: 523965 - DNA, 55 bp, Artificial
  Synthetic oligonucleotide
ccctcgcacatcgtccgctcatcacgctgaagcctcccgctcaaggcttccgtgt

SEQ ID NO: 523966 - DNA, 55 bp, Artificial
  Synthetic oligonucleotide
cccggcactgggctacgtctccaacaccgcgcaagcgttgaaggataaagacgtg

SEQ ID NO: 523967 - DNA, 55 bp, Artificial
  Synthetic oligonucleotide
cccgctgtaatccgagtcatccgtagcaggctctacagacgcactgatggagtcc

SEQ ID NO: 523968 - DNA, 55 bp, Artificial
  Synthetic oligonucleotide
cccgctgaatcgtgatgcgttctactggtggtcagaagcggataagccgctccag

SEQ ID NO: 523969 - DNA, 55 bp, Artificial
  Synthetic oligonucleotide
ccccaattgggatgaagctgtcaaaggttacgtgagcaccatccttaatcgtgaa

SEQ ID NO: 523970 - DNA, 55 bp, Artificial
  Synthetic oligonucleotide
cccatcctacttcacttgctatttcaacgtttccatagtcgaagtgttcgacacc

SEQ ID NO: 523971 - DNA, 55 bp, Artificial
  Synthetic oligonucleotide
agtcctgaaacagatgctcgtacatgggcaaactatgacccaagtggtactaatg

SEQ ID NO: 523972 - DNA, 55 bp, Artificial
  Synthetic oligonucleotide
cgatcggctcgactccacacctacggctgccaaggtgaagccaatctcaccacgg

SEQ ID NO: 523973 - DNA, 55 bp, Artificial
  Synthetic oligonucleotide
agatgacattatggtagcactaggttccggtatggctatgggtagtgttattggc

SEQ ID NO: 523974 - DNA, 55 bp, Artificial
  Synthetic oligonucleotide
cgaggagcaacacgcaaatgaaatgctatcacaaatttatgaccgagttgaagcg

SEQ ID NO: 523975 - DNA, 55 bp, Artificial
  Synthetic oligonucleotide
cgagaaggtatgggaggctgtgcgtatcggtatggatgaatctacgcctaaatcc

SEQ ID NO: 523976 - DNA, 55 bp, Artificial
  Synthetic oligonucleotide
cgacggtctgtcaccccgtcccgtggtctcactcaaagggccgtataaagcggtc

SEQ ID NO: 523977 - DNA, 55 bp, Artificial
  Synthetic oligonucleotide
cgacaatgaggtagtcacgaatgaacctaaacaactgggtgagccaagcacggac

SEQ ID NO: 523978 - DNA, 55 bp, Artificial
  Synthetic oligonucleotide
ccttggaaccgaaaagacctgcctcggaaccttcaataccgcagaggaagcccat

SEQ ID NO: 523979 - DNA, 55 bp, Artificial
  Synthetic oligonucleotide
cctggcaaccctcttcccaaccaaggtaatcgctaagtccatcgtgactggtgct

SEQ ID NO: 523980 - DNA, 55 bp, Artificial
  Synthetic oligonucleotide
cctgcactgcaatttgtcgatcctgtgttgcgcgtgctaatgatgccttgccgga

SEQ ID NO: 523981 - DNA, 55 bp, Artificial
  Synthetic oligonucleotide
cctcgattttcaaagcccgctcaataaggcgagcacggaatttctcagacagccg

SEQ ID NO: 523982 - DNA, 55 bp, Artificial
  Synthetic oligonucleotide
cctattagtgagtgtgtaaccagtttgcacctaacattgagtcagacgccaatgg

SEQ ID NO: 523983 - DNA, 55 bp, Artificial
  Synthetic oligonucleotide
cctacagttggtaactcgtcaatctcaatcgttctgatgttgacatctgcacttg

SEQ ID NO: 523984 - DNA, 55 bp, Artificial
  Synthetic oligonucleotide
agcatggtgggccacaccgacaaagcggacggcaaagccaagacggtaggcgcaa

SEQ ID NO: 523985 - DNA, 55 bp, Artificial
  Synthetic oligonucleotide
ccgtgtttgaagagattcgacacgtctggccggaggcgtgtgtgcgtgccaacgc

SEQ ID NO: 523986 - DNA, 55 bp, Artificial
  Synthetic oligonucleotide
ccgtgcattaacctggttgccattgacggtttccgggattgagtggaagggacaa

SEQ ID NO: 523987 - DNA, 55 bp, Artificial
  Synthetic oligonucleotide
ccggtcgctggtacgcgcagatatgggacagcatgaaatgcatccacctgggcaa

SEQ ID NO: 523988 - DNA, 55 bp, Artificial
  Synthetic oligonucleotide
ccggtccgaagccacctgaagcggtgctttggccaaccatgcaacagcagtaacc

SEQ ID NO: 523989 - DNA, 55 bp, Artificial
  Synthetic oligonucleotide
ccgctggtatgcggtacgcgttaactgtagaggctatatcccactggtacacgcc

SEQ ID NO: 523990 - DNA, 55 bp, Artificial
  Synthetic oligonucleotide
cagtacgtaacctttaccagtgcatccggtaagccactgtataacttacaggcgc

SEQ ID NO: 523991 - DNA, 55 bp, Artificial
  Synthetic oligonucleotide
cagggcttaggcggtggcaataaactgagactataaggagttatgatgccggacc

SEQ ID NO: 523992 - DNA, 55 bp, Artificial
  Synthetic oligonucleotide
caggctggcagagttccccagcccgaccgctcggatgtaattatgggcaacgaga

SEQ ID NO: 523993 - DNA, 55 bp, Artificial
  Synthetic oligonucleotide
cagctggcatgctcaccggctgatgttcgattacgtcattcatcccaattccctc

SEQ ID NO: 523994 - DNA, 55 bp, Artificial
  Synthetic oligonucleotide
caaccggcttccccaggtacttcgtcaagcccgcaatgttgtccgcagtgtcccc

SEQ ID NO: 523995 - DNA, 55 bp, Artificial
  Synthetic oligonucleotide
cagcacagtgttgctgttccagattgagtacgacgctgaccctgtgaagacaggt

SEQ ID NO: 523996 - DNA, 55 bp, Artificial
  Synthetic oligonucleotide
cactgatcctgaaccaacgagcaagaacgcatgggatactaagcagaccaaggct

SEQ ID NO: 523997 - DNA, 55 bp, Artificial
  Synthetic oligonucleotide
cactccatggagttcgatatcggaatctgtgaggtctacggctactaccgccggg

SEQ ID NO: 523998 - DNA, 55 bp, Artificial
  Synthetic oligonucleotide
tgtggtagtgatgcaagtacccaaaatagtgaactttcggaaggtgtgagaaaag

SEQ ID NO: 523999 - DNA, 55 bp, Artificial
  Synthetic oligonucleotide
cacggctgggacggagactttgcgtacatggcttgggttcacgacgaaatccaag

SEQ ID NO: 524000 - DNA, 55 bp, Artificial
  Synthetic oligonucleotide
ttcatcaacctttcctcggttagccatgcgggcgatttatgtaataactactgag

SEQ ID NO: 524001 - DNA, 55 bp, Artificial
  Synthetic oligonucleotide
agtctggtgcatgggatgtaaacgtatggcctgtatgtgagaagttcccttgcag

SEQ ID NO: 524002 - DNA, 55 bp, Artificial
  Synthetic oligonucleotide
cacatggctgttcaagtcccaactcttggcggtcctcaggttcgaagccgtggca

SEQ ID NO: 524003 - DNA, 55 bp, Artificial
  Synthetic oligonucleotide
caatccgacggtgacgtgattgatattagtcatctgtccgagtgtcaatcggtgc

SEQ ID NO: 524004 - DNA, 55 bp, Artificial
  Synthetic oligonucleotide
agtgccgcgagctgacgtcgtgccggctatggttctgaagccggtccccttatct

SEQ ID NO: 524005 - DNA, 55 bp, Artificial
  Synthetic oligonucleotide
agtttccctaatacacaaccagcagctggtgtagttatatctattacagatgcag

SEQ ID NO: 524006 - DNA, 55 bp, Artificial
  Synthetic oligonucleotide
caaggattccataccaaggccattgtagatatccgagaggccttggccagtcccg

SEQ ID NO: 524007 - DNA, 55 bp, Artificial
  Synthetic oligonucleotide
attggcagggttgtcggacggcattctgagggaatccggttgggatgacccgaac

SEQ ID NO: 524008 - DNA, 55 bp, Artificial
  Synthetic oligonucleotide
ccagtacttcatgccactggctaacaccattaacatgccgaagaactacggtaag

SEQ ID NO: 524009 - DNA, 55 bp, Artificial
  Synthetic oligonucleotide
ccaggaagagattaagcagtggccccaggcactacgtgacaagctagttgtcgtg

SEQ ID NO: 524010 - DNA, 55 bp, Artificial; identical to SEQ ID NO: 355821
  Synthetic oligonucleotide

SEQ ID NO: 524011 - DNA, 55 bp, Artificial
  Synthetic oligonucleotide
ccaccaagtcgtcttaccatctattaaaccttaacgcgttttccattgccaccgc

SEQ ID NO: 524012 - DNA, 55 bp, Artificial
  Synthetic oligonucleotide
ccaattcgtcattcatgagtttgccagtcgcagaaagggaagacatgctacttca

SEQ ID NO: 524013 - DNA, 55 bp, Artificial
  Synthetic oligonucleotide
ccaatggtgaagtcaatctacctaacaactgcctagcagtattgcagtgttatgc

SEQ ID NO: 524014 - DNA, 55 bp, Artificial
  Synthetic oligonucleotide
ccaatctaagccacacactgagaactcctgaagcaatcccttcattgcccgggat

SEQ ID NO: 524015 - DNA, 55 bp, Artificial
  Synthetic oligonucleotide
ccaagtgtggataactggaactcttacgttaaggtttatcgcagaggattcactg

SEQ ID NO: 524016 - DNA, 55 bp, Artificial
  Synthetic oligonucleotide
ccaaggcgttcagccaaccaaaacccagaccgtaccagtgaccgataccaccggt

SEQ ID NO: 524017 - DNA, 55 bp, Artificial
  Synthetic oligonucleotide
cattcgggcgaataatttctttggtaatggtacaacaggtacaaacccatgcgat

SEQ ID NO: 524018 - DNA, 55 bp, Artificial
  Synthetic oligonucleotide
ttgaaactatcgtaaaccgtgttgttaaaggtgctgatctggtatccgttgagtc

SEQ ID NO: 524019 - DNA, 55 bp, Artificial
  Synthetic oligonucleotide
catgggagccccggaactcgatggacccgaaggtcgtaacggtctggaggttcag

SEQ ID NO: 524020 - DNA, 55 bp, Artificial
  Synthetic oligonucleotide
catggacttaatcaccacagaagagtggctattcttcaacgcatacgatgaccgt

SEQ ID NO: 524021 - DNA, 55 bp, Artificial
  Synthetic oligonucleotide
catgccgaagaactacggtaagactgttaaggtgtatgagtacgttcctctgctc

SEQ ID NO: 524022 - DNA, 55 bp, Artificial
  Synthetic oligonucleotide
catgcaggcaggctgaggggaacgaccgtgattaaacatgacctgcgggtagggg

SEQ ID NO: 524023 - DNA, 55 bp, Artificial
  Synthetic oligonucleotide
catatgttagcactagctggagtttcaccagtgacgctatactagccgccatgct

SEQ ID NO: 524024 - DNA, 55 bp, Artificial
  Synthetic oligonucleotide
cagtggctactctaaggcgcttgtttctaagtcttacaactcaaccattgactcg

SEQ ID NO: 524025 - DNA, 55 bp, Artificial
  Synthetic oligonucleotide
ctggtagcccgtggccgatacctatttgaccgcatgaggcagagctatgagttcg

SEQ ID NO: 524026 - DNA, 55 bp, Artificial
  Synthetic oligonucleotide
ctggtactcagaccgacaagaaccaagtggtaatcgacaccactgttattgcccg

SEQ ID NO: 524027 - DNA, 55 bp, Artificial
  Synthetic oligonucleotide
ctggcggcctctctatctcgaccaccggatgtcaaatacatggtatccagacagg

SEQ ID NO: 524028 - DNA, 55 bp, Artificial
  Synthetic oligonucleotide
ctggaagccaagaccgtagctgatattgctaatgcacttgctacggcttacccgg

SEQ ID NO: 524029 - DNA, 55 bp, Artificial
  Synthetic oligonucleotide
tggcgacaggaggcacgggaatggcacacacaacagaaggtacggggagcgcatg

SEQ ID NO: 524030 - DNA, 55 bp, Artificial
  Synthetic oligonucleotide
ctcggaaatcgtcgggtacggcacttggcgtgtaatgggccgtgtgtccacgggt

SEQ ID NO: 524031 - DNA, 55 bp, Artificial
  Synthetic oligonucleotide
ctcgctccgtaagctggataagtctgcatcggtatcgtgctgtggtatcactgct

SEQ ID NO: 524032 - DNA, 55 bp, Artificial
  Synthetic oligonucleotide
ctcccttgtagcgattagggttctagtgaccgaatgaatcagcattgctttccgc

SEQ ID NO: 524033 - DNA, 55 bp, Artificial
  Synthetic oligonucleotide
atgatacgattttcgcaccatagcgccgatgattaacgaaagttaagggtcgcgc

SEQ ID NO: 524034 - DNA, 55 bp, Artificial
  Synthetic oligonucleotide
ctcatggggtgcatgatgttgaaatgggttatatattagaggacttattagcgac

SEQ ID NO: 524035 - DNA, 55 bp, Artificial
  Synthetic oligonucleotide
acgtcattgacaccggctccagtaaggatgtcggtaaatatggtgatatcccgct

SEQ ID NO: 524036 - DNA, 55 bp, Artificial
  Synthetic oligonucleotide
ctattgctctactgtttatcataaggagggacaagccgtgaacaggttacaaagt

SEQ ID NO: 524037 - DNA, 55 bp, Artificial
  Synthetic oligonucleotide
ctatcacagaggctatcatatccgagccttataatttccgtgagttgttcagtcg

SEQ ID NO: 524038 - DNA, 55 bp, Artificial
  Synthetic oligonucleotide
ctagctaacaagataaggggtgtggtggatagtgaggggtaaacataacatggga

SEQ ID NO: 524039 - DNA, 55 bp, Artificial
  Synthetic oligonucleotide
ctactagaagagaacagggtgctagggctgtgttttatgtgtcgttcggtagaca

SEQ ID NO: 524040 - DNA, 55 bp, Artificial
  Synthetic oligonucleotide
ctacctggattggttctactcttattcgtatggagaataacccattccctgatgg

SEQ ID NO: 524041 - DNA, 55 bp, Artificial
  Synthetic oligonucleotide
acgtctgtcttgaggtttacttgccctcacgcggaacgtgcctcttacagcacct

SEQ ID NO: 524042 - DNA, 55 bp, Artificial
  Synthetic oligonucleotide
gagagggttgattgctgctgcgagtgcagcggcggtcacgagtacatcggtcatg

SEQ ID NO: 524043 - DNA, 55 bp, Artificial
  Synthetic oligonucleotide
gacttagagcaaaatggtgaaatgagcgacccattgagaaataataaaggtactg

SEQ ID NO: 524044 - DNA, 55 bp, Artificial
  Synthetic oligonucleotide
gactgacgcataccgtgcaagtgagagcgttaaacaacaacctaagaggtaacat

SEQ ID NO: 524045 - DNA, 55 bp, Artificial
  Synthetic oligonucleotide
gactcatggagttggtatttggggtgacggatctacagggttttatcgagatatc

SEQ ID NO: 524046 - DNA, 55 bp, Artificial
  Synthetic oligonucleotide
gactatcctttgaaccccgacgattatagccggagctaaccttttggtcgtgctt

SEQ ID NO: 524047 - DNA, 55 bp, Artificial
  Synthetic oligonucleotide
gacggaggctttagtatcaaatgatgcacttgaattaccatgtaccagttcagca

SEQ ID NO: 524048 - DNA, 55 bp, Artificial
  Synthetic oligonucleotide
gacactatacaaccactgaaacggacagctcctaactagtgacgtatcgataagg

SEQ ID NO: 524049 - DNA, 55 bp, Artificial
  Synthetic oligonucleotide
gacaccagcacagcagcttgcccgtgagtcagaggtcggcgcagaagatattcag

SEQ ID NO: 524050 - DNA, 55 bp, Artificial
  Synthetic oligonucleotide
gaaggtgtagtccgtgagatatggcctcggctgtactcatctgcgttggacaaga

SEQ ID NO: 524051 - DNA, 55 bp, Artificial
  Synthetic oligonucleotide
gaaggcgcatcagtcaagattattgcattggagacaggactaacccctggtcagg

SEQ ID NO: 524052 - DNA, 55 bp, Artificial
  Synthetic oligonucleotide
gaaggacggttacgctgaccagctaatcagccctgtgactcactacgctcaggcc

SEQ ID NO: 524053 - DNA, 55 bp, Artificial
  Synthetic oligonucleotide
cttggcggtaccacggtcgtagcttgacagactgggcatgtcccaatggtcccca

SEQ ID NO: 524054 - DNA, 55 bp, Artificial
  Synthetic oligonucleotide
ctgtttactaaatcagatatccaggcgtttctcacgtcgtccatacctgttaagg

SEQ ID NO: 524055 - DNA, 55 bp, Artificial
  Synthetic oligonucleotide
ctgttagtaaggcaagtgaggatagcgcagggtttaacgtagctgtagacgctcg

SEQ ID NO: 524056 - DNA, 55 bp, Artificial
  Synthetic oligonucleotide
ctgtggtcacggctaccccaccagccttagtctcaggacttacctgggctggtgt

SEQ ID NO: 524057 - DNA, 55 bp, Artificial
  Synthetic oligonucleotide
ctgtacgaccggtcatatcggggcggaagttctgtacaaactcacgggcaagtgg

SEQ ID NO: 524058 - DNA, 55 bp, Artificial
  Synthetic oligonucleotide
ctggtgtacgagagttctatacagactcttatagtgacactaagaaggcacaagc

SEQ ID NO: 524059 - DNA, 55 bp, Artificial
  Synthetic oligonucleotide
cgatctgtgcgacaggattgttgaacgtggcggccgtgcgacggcggtacaggct

SEQ ID NO: 524060 - DNA, 55 bp, Artificial
  Synthetic oligonucleotide
cgatttcgtaaccgcttattgcaaaacacaaccacggtgattcgaaccgtggcac

SEQ ID NO: 524061 - DNA, 55 bp, Artificial
  Synthetic oligonucleotide
cgcaacatgcggcacgagccgtagagacagcaggtgctatctttgagtacctgtc

SEQ ID NO: 524062 - DNA, 55 bp, Artificial
  Synthetic oligonucleotide
cgcacgctctgccaacttacgataaacagtaaaagtagtctgaggagtcccgaga

SEQ ID NO: 524063 - DNA, 55 bp, Artificial
  Synthetic oligonucleotide
cgcactggcctaggcattgagacagccttccacatggaatccattgttgcgctgg

SEQ ID NO: 524064 - DNA, 55 bp, Artificial
  Synthetic oligonucleotide
cgcaggcagccgcgcattatacagacacgcctgtgttaagcgacctgttgcttaa

SEQ ID NO: 524065 - DNA, 55 bp, Artificial
  Synthetic oligonucleotide
cgcatttacagaaggctcttactcaggtgtgcgtgagttcttcactgactctaca

SEQ ID NO: 524066 - DNA, 55 bp, Artificial
  Synthetic oligonucleotide
cgccatacgctgtgaatactctgtctctagctcagtcgagcgtttaacaaagtcc

SEQ ID NO: 524067 - DNA, 55 bp, Artificial
  Synthetic oligonucleotide
actacggtgacatgcttgcacctatgttacgcgatgtgatgctcgctcacccgca

SEQ ID NO: 524068 - DNA, 55 bp, Artificial
  Synthetic oligonucleotide
cgccgaactactttaaaccacaaaacgctaaaagcacgcaagaattagtgagcgg

SEQ ID NO: 524069 - DNA, 55 bp, Artificial
  Synthetic oligonucleotide
cgccgggcttcttagcatgggtactagcctgcttgggtcactaagcgggagcagc

SEQ ID NO: 524070 - DNA, 55 bp, Artificial
  Synthetic oligonucleotide
cgcgatcaattaacgcaggcagccgcgcattatacagacacgcctgtgttaagcg

SEQ ID NO: 524071 - DNA, 55 bp, Artificial
  Synthetic oligonucleotide
cgcgtaggataatctctgggtcgtccgaccatgcatatccgagcaaattaatgct

SEQ ID NO: 524072 - DNA, 55 bp, Artificial
  Synthetic oligonucleotide
cgcgttgtgagcgttcgagcgtactgccgttattgtctgaagcaagaacgcgtgt

SEQ ID NO: 524073 - DNA, 55 bp, Artificial
  Synthetic oligonucleotide
cggactcattcgcccctttgaatctgcggatatcctcatagtgtggatacacagc

SEQ ID NO: 524074 - DNA, 55 bp, Artificial
  Synthetic oligonucleotide
cgttctggcttgctgacccggtgcgagcggtatgctgagttgactatccgtagtg

SEQ ID NO: 524075 - DNA, 55 bp, Artificial
  Synthetic oligonucleotide
cgttaaagtgaacagggtcgccgtaaatgttctgtccatttgaaggtgcacacgg

SEQ ID NO: 524076 - DNA, 55 bp, Artificial
  Synthetic oligonucleotide
cgtgtcctgagtggtgcgaaaacgatagaatggtgcgcaattctgaccgaaaccc

SEQ ID NO: 524077 - DNA, 55 bp, Artificial
  Synthetic oligonucleotide
cgtaccaccataggtaagcaagaaggttggagccttcgagtcactacgcaatgat

SEQ ID NO: 524078 - DNA, 55 bp, Artificial
  Synthetic oligonucleotide
cgtaaatacattaagtttcctatagcggttcataacctgggttgggacgttgagt

SEQ ID NO: 524079 - DNA, 55 bp, Artificial
  Synthetic oligonucleotide
cggttgttaaattctatgatatagacgcagacgaactagaggatatgacattcag

SEQ ID NO: 524080 - DNA, 55 bp, Artificial
  Synthetic oligonucleotide
cggtgtccgccagtgggttctcaccagcgtcgttcgtaggatcagtctcgtccca

SEQ ID NO: 524081 - DNA, 55 bp, Artificial
  Synthetic oligonucleotide
cggtacgtcgtgggaccgggcaaatcattcaggataccttccccggcgagactgg

SEQ ID NO: 524082 - DNA, 55 bp, Artificial
  Synthetic oligonucleotide
cgggtttgagacgaactccaaacgctccctcggtgtagagaattggggcgacagc

SEQ ID NO: 524083 - DNA, 55 bp, Artificial
  Synthetic oligonucleotide
cgggccggttgtattccagtgatagttctttgctttgatgtaaagcagagtcaag

SEQ ID NO: 524084 - DNA, 55 bp, Artificial
  Synthetic oligonucleotide
cgggtggacttgccgcttggcttaggaattgggctaggctggtccgtcttcgacg

SEQ ID NO: 524085 - DNA, 54 bp, Artificial
  Synthetic oligonucleotide
tccacggagctgggataaggacactttgcctccctcttcgtgcgaagtcctatc

SEQ ID NO: 524086 - DNA, 54 bp, Artificial
  Synthetic oligonucleotide
gaccagttcatttcccagacggacacatcggctatcttcgcagacctggactac

SEQ ID NO: 524087 - DNA, 54 bp, Artificial
  Synthetic oligonucleotide
aatgcataattagttgcgtctgctaatgtttggaaattgaaacgtgtgtcattg

SEQ ID NO: 524088 - DNA, 54 bp, Artificial
  Synthetic oligonucleotide
aggaacctaatcgggccgagatggcaaccgatgaggactactatgacaatatcc

SEQ ID NO: 524089 - DNA, 54 bp, Artificial
  Synthetic oligonucleotide
actcgcttagtggtacacaagggagaagggctaggaagcgctagggcgcgcctt

SEQ ID NO: 524090 - DNA, 54 bp, Artificial
  Synthetic oligonucleotide
ggggcttcagctcgattctaggcaggtctatgggcttaggaggtgtaggtacgt

SEQ ID NO: 524091 - DNA, 54 bp, Artificial
  Synthetic oligonucleotide
aaggccggcaggcattagggcttgacaagctggtaacaaggcagtatgattcac

SEQ ID NO: 524092 - DNA, 54 bp, Artificial
  Synthetic oligonucleotide
ttgttccctagacataaactctagttatccgtcacagatggcatacaaggtttt

SEQ ID NO: 524093 - DNA, 54 bp, Artificial
  Synthetic oligonucleotide
tctacgagctggggagcgggaagctcttcatcgtccggaataagcgtgaggtgt

SEQ ID NO: 524094 - DNA, 53 bp, Artificial
  Synthetic oligonucleotide
ccgcctaggtcgtcaaaactgataacgtggtctgtaaagtcaatccctgctac

SEQ ID NO: 524095 - DNA, 53 bp, Artificial
  Synthetic oligonucleotide
cacaataaacctacactatataaaaacgtaacgtattctgttgcgattggttg

SEQ ID NO: 524096 - DNA, 53 bp, Artificial
  Synthetic oligonucleotide
agagagtaaaggcgtgaagtttgactacgagttgtggaagattccctacgtag

SEQ ID NO: 524097 - DNA, 53 bp, Artificial
  Synthetic oligonucleotide
tgtaatctcacgacgctttatacacacgccgtctttacttgctcgtactggtg

SEQ ID NO: 524098 - DNA, 53 bp, Artificial
  Synthetic oligonucleotide
cggcactgtgcagtgctgcgccgtgcagctcaaatgccgcgtaatcgcggcac

SEQ ID NO: 524099 - DNA, 53 bp, Artificial
  Synthetic oligonucleotide
caactgtgtgtgtcttaatgataacatagcggcacagatgagcagaccttaag

SEQ ID NO: 524100 - DNA, 53 bp, Artificial
  Synthetic oligonucleotide
acgttaccacttgatacttgtaaccacgcacctgcatcaccaatacccttagg

SEQ ID NO: 524101 - DNA, 53 bp, Artificial
  Synthetic oligonucleotide
gcaccagcggagacgacggaagtcgaaacttacggtgacgttgaagatacatc

SEQ ID NO: 524102 - DNA, 53 bp, Artificial
  Synthetic oligonucleotide
atacctcaaacgtcaagcctgtgagcacattcggccttggttccgtatcgtct

SEQ ID NO: 524103 - DNA, 52 bp, Artificial
  Synthetic oligonucleotide
tgttgggtacgtcaggctggaacagtgcagccggcgagatgaaagtgccagc

SEQ ID NO: 524104 - DNA, 52 bp, Artificial
  Synthetic oligonucleotide
tgcccaaggatttgggcaactcttttccttcttatgaagaggcactaaggtt

SEQ ID NO: 524105 - DNA, 52 bp, Artificial
  Synthetic oligonucleotide
tggcctaaggtttaccattgagtgaccctaaggactgagcctagacctaagg

SEQ ID NO: 524106 - DNA, 52 bp, Artificial
  Synthetic oligonucleotide
tgcgggaatcgaaaggctgcccgctctgtcaacgaacctggacggtcatctt

SEQ ID NO: 524107 - DNA, 52 bp, Artificial
  Synthetic oligonucleotide
cgggatgcgataccattgaggatagactgacaaggtgcatagttattgaggg

SEQ ID NO: 524108 - DNA, 52 bp, Artificial
  Synthetic oligonucleotide
ctcacaaaatcaagttatagatttggcaaaatggttagttggtcaagggttg

SEQ ID NO: 524109 - DNA, 52 bp, Artificial
  Synthetic oligonucleotide
ccgaagggagtccagtggttgattagaaagtcagtttacgagcatatttatt

SEQ ID NO: 524110 - DNA, 52 bp, Artificial
  Synthetic oligonucleotide
ctctcagcactctggggtaacttatggcactgaaactcgcgaacaacgcagt

SEQ ID NO: 524111 - DNA, 52 bp, Artificial
  Synthetic oligonucleotide
cacacagttaatgtccaggttacccctctgcgggacaggtgccaggaacggg

SEQ ID NO: 524112 - DNA, 52 bp, Artificial
  Synthetic oligonucleotide
atcccacagagatacaggagataacaccatgcacaacgagatcccgatggtt

SEQ ID NO: 524113 - DNA, 52 bp, Artificial
  Synthetic oligonucleotide
gcccaagagtacctaaattcactgcgggatcaaggtttagaccctacaatgt

SEQ ID NO: 524114 - DNA, 52 bp, Artificial
  Synthetic oligonucleotide
ggacgttacttccggccgaagttgaaggaattgattgggacgcccttcgaca

SEQ ID NO: 524115 - DNA, 52 bp, Artificial
  Synthetic oligonucleotide
ataaccctttaaaaaaaagcttgattagtgtttaataaaacaaaaagaaagg

SEQ ID NO: 524116 - DNA, 52 bp, Artificial
  Synthetic oligonucleotide
acctaacgatccactggatgaatacacagggtgttcaaaggtacaccactgg

SEQ ID NO: 524117 - DNA, 52 bp, Artificial
  Synthetic oligonucleotide
acactgacctgattcaggttaagggtaagcacaagcgtgctactgagcatgt

SEQ ID NO: 524118 - DNA, 52 bp, Artificial
  Synthetic oligonucleotide
ggttgcctacacgattcccgctggtacttacaacgatgatgcctacgagaca

SEQ ID NO: 524119 - DNA, 52 bp, Artificial; identical to SEQ ID NO: 297662
  Synthetic oligonucleotide

SEQ ID NO: 524120 - DNA, 52 bp, Artificial
  Synthetic oligonucleotide
gtgccctggaacgctggtgcactcgaccggtagtgtcgaggtcgtgcgcgta

SEQ ID NO: 524121 - DNA, 52 bp, Artificial
  Synthetic oligonucleotide
taacgtagctgtagacgctcgtaaggctaagaagagactatcagtgatagac

SEQ ID NO: 524122 - DNA, 52 bp, Artificial
  Synthetic oligonucleotide
taatgaatcagacacggcatggaatcgccgcttattgtccgagttaatcgcg

SEQ ID NO: 524123 - DNA, 52 bp, Artificial
  Synthetic oligonucleotide
tatccaagatttcgttgagggagtagtcttttgtagctgggtctttcagagc

SEQ ID NO: 524124 - DNA, 51 bp, Artificial
  Synthetic oligonucleotide
agtctgggcacggctcgccgtcatacccgttttcagcgttgacgaatcccc

SEQ ID NO: 524125 - DNA, 51 bp, Artificial
  Synthetic oligonucleotide
aatctgacaaacggtgtgaggggctttcctcgcatcagcttgagctatacg

SEQ ID NO: 524126 - DNA, 51 bp, Artificial
  Synthetic oligonucleotide
aactgagctggtcctatgacaaccactgctgctggataaatgagatgcggc

SEQ ID NO: 524127 - DNA, 51 bp, Artificial
  Synthetic oligonucleotide
ataagcgataaaaagataatcaaacactacgaaaaagaagaagccttattc

SEQ ID NO: 524128 - DNA, 51 bp, Artificial
  Synthetic oligonucleotide
ttttacagagcccgtaatcgggacacatgcccctgaaaatatttatcgggg

SEQ ID NO: 524129 - DNA, 51 bp, Artificial
  Synthetic oligonucleotide
tatgatgcgtttgacctgtcaagtatcgagccaggtacaacggttcgccta

SEQ ID NO: 524130 - DNA, 51 bp, Artificial
  Synthetic oligonucleotide
tctgcgatggagattgcggaagagattggggtgacccggaattcagtcctt

SEQ ID NO: 524131 - DNA, 51 bp, Artificial
  Synthetic oligonucleotide
ggtaagaataccattgggataggcagtactcgcggcctggatggtaagccg

SEQ ID NO: 524132 - DNA, 51 bp, Artificial
  Synthetic oligonucleotide
tgccgattattcggcaggcgttcccttccagtcagatttcgaggccgcgtc

SEQ ID NO: 524133 - DNA, 51 bp, Artificial
  Synthetic oligonucleotide
ggatcaccaccgattttccggccaacaactcgatcaggaagaaccggagac

SEQ ID NO: 524134 - DNA, 51 bp, Artificial
  Synthetic oligonucleotide
gccacacttccagtagtatctccaccatgtattggttctatgtctgttctt

SEQ ID NO: 524135 - DNA, 51 bp, Artificial
  Synthetic oligonucleotide
gcactctgggaatttcaatccggcgaactacgcgatcaagtcggtccatca

SEQ ID NO: 524136 - DNA, 51 bp, Artificial
  Synthetic oligonucleotide
cttctatgaattgcgagagcatctcttagaggttcacggtgcaatcttggc

SEQ ID NO: 524137 - DNA, 51 bp, Artificial
  Synthetic oligonucleotide
tggtgtgattctcagcgaccaagcgggttctacttctgataaagcctactt

SEQ ID NO: 524138 - DNA, 51 bp, Artificial
  Synthetic oligonucleotide
ccgttgttaaacccttattgaaccccagtttattcgacccgatagccttag

SEQ ID NO: 524139 - DNA, 50 bp, Artificial
  Synthetic oligonucleotide
ttaggtaagtatgcagacctcacacctattagtgcggttctagaggtgta

SEQ ID NO: 524140 - DNA, 50 bp, Artificial
  Synthetic oligonucleotide
cacgtgacgttatttacaaggagtcaatccaaaacacggttatccaagaa

SEQ ID NO: 524141 - DNA, 50 bp, Artificial
  Synthetic oligonucleotide
ggtcatcgagtcagcagttgatctctaccgaaagacagaccgattcgata

SEQ ID NO: 524142 - DNA, 50 bp, Artificial
  Synthetic oligonucleotide
ggtttgcgtaatggtgggcaagagttaagactttatcgctatggtttaac

SEQ ID NO: 524143 - DNA, 50 bp, Artificial
  Synthetic oligonucleotide
gtcatcatcagtagggtttgaactactatccccactatctacttgcacac

SEQ ID NO: 524144 - DNA, 50 bp, Artificial
  Synthetic oligonucleotide
aaattaccaaactaaatattatagtcaactagaaccatttccagtatcag

SEQ ID NO: 524145 - DNA, 60 bp, Artificial
  Synthetic oligonucleotide
catccaaggggtctttaccatctatgatattttgctgaatatttccaaactgggtaattg

SEQ ID NO: 524146 - DNA, 60 bp, Artificial
  Synthetic oligonucleotide
catctattgctaaaaactgctttagataaaaagtccataagcacctctggaaattctgtt

SEQ ID NO: 524147 - DNA, 60 bp, Artificial
  Synthetic oligonucleotide
ggtatgggagctgtattggccgtgttagctgaagtctttgaattagcctctgtgacagga

SEQ ID NO: 524148 - DNA, 60 bp, Artificial
  Synthetic oligonucleotide
ggtatcttgtataagtcttttccaccatatgagatgctgttcagtaccacaaagtccgta

SEQ ID NO: 524149 - DNA, 60 bp, Artificial
  Synthetic oligonucleotide
ccaaataagagagcccacacaccaggaggaggaaccacaatacgaggagataccaatata

SEQ ID NO: 524150 - DNA, 60 bp, Artificial
  Synthetic oligonucleotide
ccaaccttagcaggaaaataaacttctccttctcttctaagcttttcaatagtagtatac

SEQ ID NO: 524151 - DNA, 60 bp, Artificial
  Synthetic oligonucleotide
gggttacttgtgatgctacctttgagaatgattcccctgagaaaaaaacccttccttgct

SEQ ID NO: 524152 - DNA, 60 bp, Artificial
  Synthetic oligonucleotide
gggtggcgttctctctgctttggtggacatgattgtaatggcaacagaattaagtgcagc

SEQ ID NO: 524153 - DNA, 60 bp, Artificial
  Synthetic oligonucleotide
gggtggagatggccagaaaatggtcagattaaatgaattatgggcccgagccacagaaaa

SEQ ID NO: 524154 - DNA, 60 bp, Artificial
  Synthetic oligonucleotide
gggtctacatggaaatctaagttctgcaagggccctacatgcaggattaatatgaagcct

SEQ ID NO: 524155 - DNA, 60 bp, Artificial
  Synthetic oligonucleotide
cccaccctcataagttttggcgggacaactgacctcaaaaagctgggaggagagtcaggg

SEQ ID NO: 524156 - DNA, 60 bp, Artificial
  Synthetic oligonucleotide
gggtcccggggggtcctcgaaaagaacttgactcagagaaactgggttcctcctcggtag

SEQ ID NO: 524157 - DNA, 60 bp, Artificial
  Synthetic oligonucleotide
gggtactatccagtggaattatggagccctgatccttctagaaatgaaaactccaggtat

SEQ ID NO: 524158 - DNA, 60 bp, Artificial
  Synthetic oligonucleotide
ggggcttctgggcatggagaagtcatcgtcagtcgactgcgaaggggtcccggagggtcc

SEQ ID NO: 524159 - DNA, 60 bp, Artificial
  Synthetic oligonucleotide
cctcaaagttctcacaaatctggctctgagagttattggcaggtggtactcattcattgt

SEQ ID NO: 524160 - DNA, 60 bp, Artificial
  Synthetic oligonucleotide
cctccagccaacccaacggcccggacgaaaacttggaaccctctcaagcagcctagattt

SEQ ID NO: 524161 - DNA, 60 bp, Artificial
  Synthetic oligonucleotide
gggaggaggacaccgctgcctgggccattttttcaaagcacaaagggcgggagaagctgc

SEQ ID NO: 524162 - DNA, 60 bp, Artificial
  Synthetic oligonucleotide
ggccaaaggaccccgtgcaagttccaaagctgcttataagaggaggcgtagaagtcctag

SEQ ID NO: 524163 - DNA, 60 bp, Artificial
  Synthetic oligonucleotide
cagaatgggaatggcagctaccagtgactggctgggctacagtgataatataactgttag

SEQ ID NO: 524164 - DNA, 60 bp, Artificial
  Synthetic oligonucleotide
gttggtggggaaccattggaactccaattcctggtggaaaaccatcacacccagtatggg

SEQ ID NO: 524165 - DNA, 60 bp, Artificial
  Synthetic oligonucleotide
gttggcgctaggcctttactgcacacgtcccaatctctacagtacaaggcatctggccct

SEQ ID NO: 524166 - DNA, 60 bp, Artificial
  Synthetic oligonucleotide
gttccctggtcttatgccttttgttagattcataaattacatagatccaacacagtgggc

SEQ ID NO: 524167 - DNA, 60 bp, Artificial
  Synthetic oligonucleotide
cagcctctagtaggtcctcagatgtgcctactgctggaactctgccctgttactcagtgg

SEQ ID NO: 524168 - DNA, 60 bp, Artificial
  Synthetic oligonucleotide
gttaagaagaggaggaggcaaggggcccctggcctcttatactagttaaaaaagtcaggg

SEQ ID NO: 524169 - DNA, 60 bp, Artificial
  Synthetic oligonucleotide
cagctgccagatgctcccgggacttttgtggctccgcccactaggtcactggggcgggtc

SEQ ID NO: 524170 - DNA, 60 bp, Artificial
  Synthetic oligonucleotide
gtgctatccgccaagttgcggttttagtttacaggaagtgaaagctgcctcacagctgcc

SEQ ID NO: 524171 - DNA, 60 bp, Artificial
  Synthetic oligonucleotide
gtgacaacttttggatattccaaagaagtcccagttgttaatatggctcttgtaccttgg

SEQ ID NO: 524172 - DNA, 60 bp, Artificial
  Synthetic oligonucleotide
gtccttgtttaaaggtcacctttaaagggaaagccatgccaaacctggcataaataaagt

SEQ ID NO: 524173 - DNA, 60 bp, Artificial
  Synthetic oligonucleotide
caggtgctagatccctcagctaaagctctcctggataaggatggtaaatttcctgttgaa

SEQ ID NO: 524174 - DNA, 60 bp, Artificial
  Synthetic oligonucleotide
gtcacattaaaatatctaggcagccccctccaatgccaccctgcactgttgtactctatg

SEQ ID NO: 524175 - DNA, 60 bp, Artificial
  Synthetic oligonucleotide
gtacctccaagtagacagcagtttgagtatgaagaaggtcaaagggtaagaagagaaaca

SEQ ID NO: 524176 - DNA, 60 bp, Artificial
  Synthetic oligonucleotide
cagttatctagccttgctactgttgaggggctaacaggagtggaagctcttgcctctttg

SEQ ID NO: 524177 - DNA, 60 bp, Artificial
  Synthetic oligonucleotide
gtacccaaacttatagtaaaaggaggggttgaagttttgaatgtgattacaggccctgac

SEQ ID NO: 524178 - DNA, 60 bp, Artificial
  Synthetic oligonucleotide
cataagacatatcttgttagaccctaatttgatagtatcatgctgattaaaaagtaagct

SEQ ID NO: 524179 - DNA, 60 bp, Artificial
  Synthetic oligonucleotide
ggtctattgcacagcctagttcaaagggcaatttttcaggggggcaattaacattaagag

SEQ ID NO: 524180 - DNA, 60 bp, Artificial
  Synthetic oligonucleotide
catatccatgcatagacctctgtctccggtggcccctttggaaggtacccacctttggct

SEQ ID NO: 524181 - DNA, 60 bp, Artificial
  Synthetic oligonucleotide
gcagataatctatgtctgcctgtggtgaggaataatactaggcctccccctgaaagaaca

SEQ ID NO: 524182 - DNA, 60 bp, Artificial
  Synthetic oligonucleotide
ctccaattatatgcacccaccagtgcaaggcttcttgggttagatctaacccaaaccact

SEQ ID NO: 524183 - DNA, 60 bp, Artificial
  Synthetic oligonucleotide
ctccattttaggaagcagacaatgaagccaggccatcccagcaatatagagacatacatc

SEQ ID NO: 524184 - DNA, 60 bp, Artificial
  Synthetic oligonucleotide
gcaagatgggctttgacatcagggcctatgcatgtgtataacagtgtggaaagttattac

SEQ ID NO: 524185 - DNA, 60 bp, Artificial; identical to SEQ ID NO: 382429
  Synthetic oligonucleotide

SEQ ID NO: 524186 - DNA, 60 bp, Artificial
  Synthetic oligonucleotide
ctctatgcttatttggggtaagcacatacagaagagctttatctgcaccatggctatgcc

SEQ ID NO: 524187 - DNA, 60 bp, Artificial
  Synthetic oligonucleotide
ctctggtaatttgtaataaatccataagctcatatctttcctcctgagaaagtatttgat

SEQ ID NO: 524188 - DNA, 60 bp, Artificial
  Synthetic oligonucleotide
gatgggcgcacttttgtctattgtagcggagattattgagttgggggctctgacaggatt

SEQ ID NO: 524189 - DNA, 60 bp, Artificial
  Synthetic oligonucleotide
gatcccagaatgggcataaatggccctgatggggagaacaaggagtggtacacctacagt

SEQ ID NO: 524190 - DNA, 60 bp, Artificial
  Synthetic oligonucleotide
ctgtacctgaaccccagaatgggtgtaaatgcttgggacatagagacttactcaaactgg

SEQ ID NO: 524191 - DNA, 60 bp, Artificial
  Synthetic oligonucleotide
gagagttctacaatcctgacacaggaggatactggtcctactcttatggatcagcaggat

SEQ ID NO: 524192 - DNA, 60 bp, Artificial
  Synthetic oligonucleotide
ctgtggggggagaacccctagaaatgcaaggcctagttgccagttctaccaccacttatc

SEQ ID NO: 524193 - DNA, 60 bp, Artificial
  Synthetic oligonucleotide
gaccctgattactatgatattctgtttcctggtgtacaatccttttcctatgcaatcaat

SEQ ID NO: 524194 - DNA, 60 bp, Artificial
  Synthetic oligonucleotide
cttaagcatccaattaagcctctccctagtgagtttctacctgtaggtgcttaccttaat

SEQ ID NO: 524195 - DNA, 60 bp, Artificial
  Synthetic oligonucleotide
cttacaaacctagcctggagggttttaggaacagagtactcattcattgttaccaggcca

SEQ ID NO: 524196 - DNA, 60 bp, Artificial
  Synthetic oligonucleotide
cttacctatagattcagccgtgagacgggtgtttcagctataatactctgccacctcgca

SEQ ID NO: 524197 - DNA, 60 bp, Artificial
  Synthetic oligonucleotide
ctttgcagggtcagggcaccacacctctatgggataatagccatccctatcaaggacagc

SEQ ID NO: 524198 - DNA, 60 bp, Artificial
  Synthetic oligonucleotide
cttcatctgggtgcattccagtgcagggaacaacctaccacatgtttgctgtggggggag

SEQ ID NO: 524199 - DNA, 60 bp, Artificial
  Synthetic oligonucleotide
ggagatgctctagccagattttttgagaatgctagatgggcagtaacagctgtccctaga

SEQ ID NO: 524200 - DNA, 60 bp, Artificial; identical to SEQ ID NO: 420155
  Synthetic oligonucleotide

SEQ ID NO: 524201 - DNA, 60 bp, Artificial
  Synthetic oligonucleotide
ggacctggtcaattgcttgctggcatattgccttttgtgatctactctccaagaaaagac

SEQ ID NO: 524202 - DNA, 60 bp, Artificial
  Synthetic oligonucleotide
cctgtttaataaggtgcagtgattgttaggctacacgccagtgtctgggcggtgtgccaa

SEQ ID NO: 524203 - DNA, 60 bp, Artificial
  Synthetic oligonucleotide
ggaatcctgaggatgctgtgagtcagaagtgaaacccgttagttccttggctaccaggat

SEQ ID NO: 524204 - DNA, 60 bp, Artificial
  Synthetic oligonucleotide
ggaatatttccccaagcagcagtatttaagcttaaaagagccataagctcttttacttca

SEQ ID NO: 524205 - DNA, 60 bp, Artificial
  Synthetic oligonucleotide
ggaagacatcctcacatttggtatctaaggcatactctgttactagcttccaggacacct

SEQ ID NO: 524206 - DNA, 60 bp, Artificial
  Synthetic oligonucleotide
cgctgcagggcctgcaattcccatagaaggccttaattatcacatgttttctgtgggtgg

SEQ ID NO: 524207 - DNA, 60 bp, Artificial
  Synthetic oligonucleotide
gctaagctttccctgagggtctccttaacagtgaaatttaacacataggaaaatcttgtg

SEQ ID NO: 524208 - DNA, 60 bp, Artificial
  Synthetic oligonucleotide
gcggtggacctagcaggcctaagtgctgtagaggccttgtctcttactggacttacaaca

SEQ ID NO: 524209 - DNA, 60 bp, Artificial
  Synthetic oligonucleotide
gccttactcctccacaagtaaggtcaattcagaggcgcttagaagaagcgagaaattatg

SEQ ID NO: 524210 - DNA, 60 bp, Artificial
  Synthetic oligonucleotide
ctaagaacaggaccagatagcattacccagatagaggtgtttttaaatcccagaatggga

SEQ ID NO: 524211 - DNA, 60 bp, Artificial
  Synthetic oligonucleotide
ctaaggcctagtgcggcctgtaagcggcctagtgcagcgtgtaagccttacagaggcatt

SEQ ID NO: 524212 - DNA, 60 bp, Artificial
  Synthetic oligonucleotide
ctaggtttatatggtgatatagaacctgcctggggaatccagcttaggaaagaagaagat

SEQ ID NO: 524213 - DNA, 60 bp, Artificial
  Synthetic oligonucleotide
ctagtgtttcaaaccttatcaggagctagtgctttagtaggagcaggcttaaaatatggc

SEQ ID NO: 524214 - DNA, 60 bp, Artificial
  Synthetic oligonucleotide
ctatcctgtagaggcctgggctccagatccagtaaaaaatgataattctagatactatgg

SEQ ID NO: 524215 - DNA, 60 bp, Artificial
  Synthetic oligonucleotide
ctcaaactggtacacatttagttatgatgtgtatcctaaagtgactctactgccagagaa

SEQ ID NO: 524216 - DNA, 60 bp, Artificial
  Synthetic oligonucleotide
gccagtttgatgaccattgatggaatttcaggaattgaagccttggcccagttaggattt

SEQ ID NO: 524217 - DNA, 60 bp, Artificial; identical to SEQ ID NO: 471486
  Synthetic oligonucleotide

SEQ ID NO: 524218 - DNA, 60 bp, Artificial
  Synthetic oligonucleotide
acccctagaggaagtaaaggaagccttgtggttagctctagctcaccgcatcctcttatc

SEQ ID NO: 524219 - DNA, 60 bp, Artificial
  Synthetic oligonucleotide
tgcctacctacagtgtagctagagtttctttgccaattcttaatgaggatattacctgtg

SEQ ID NO: 524220 - DNA, 60 bp, Artificial
  Synthetic oligonucleotide
acctttggctctgcggatgaggtcccaggctgctcagataagtcagctagaccactttct

SEQ ID NO: 524221 - DNA, 60 bp, Artificial
  Synthetic oligonucleotide
tgccagtgctgtggttgctgcaggagtgacaacttttggatattccaaagaagtcccagt

SEQ ID NO: 524222 - DNA, 60 bp, Artificial
  Synthetic oligonucleotide
actccccaaacatgctgacaaggatgtttgacaaggaagtttaattagccccgggtgcgt

SEQ ID NO: 524223 - DNA, 60 bp, Artificial
  Synthetic oligonucleotide
acttcatcacaacgtatgtcgggtcctcctcgtctgtcattagttgaggtgcgctggtac

SEQ ID NO: 524224 - DNA, 60 bp, Artificial
  Synthetic oligonucleotide
acttgagaggcttttgaggcttccaggcagagaatactcacagaccccacacagtctaga

SEQ ID NO: 524225 - DNA, 60 bp, Artificial
  Synthetic oligonucleotide
tgatccccttctaatccttgctcattacctggatttcagcaagcctcctggtaactgcac

SEQ ID NO: 524226 - DNA, 60 bp, Artificial
  Synthetic oligonucleotide
tgactaagataatcaaagagacaagttggaaaatcgagaggatcattattaaccttagat

SEQ ID NO: 524227 - DNA, 60 bp, Artificial
  Synthetic oligonucleotide
agcaaatcttactcctacagttgggggtaacaagtactcattcatagtcataattacagg

SEQ ID NO: 524228 - DNA, 60 bp, Artificial
  Synthetic oligonucleotide
tctttccatttaacaacttcactatgaatagacttatgaaaactttctacaggctcatgc

SEQ ID NO: 524229 - DNA, 60 bp, Artificial
  Synthetic oligonucleotide
tcttgggcatagttagttaccttatagctttagatctctgtagggagtctctccaattat

SEQ ID NO: 524230 - DNA, 60 bp, Artificial
  Synthetic oligonucleotide
tcttgatttggactttcctggtgtgaggccctttgttagatttgttaactacatagatcc

SEQ ID NO: 524231 - DNA, 60 bp, Artificial
  Synthetic oligonucleotide
tccctcatattatctaggttatttataccttgcccaggttgcagagacttgttcatactt

SEQ ID NO: 524232 - DNA, 60 bp, Artificial
  Synthetic oligonucleotide
tccaagtgggcggagaaactcgccagttgcctagcaatatctgagtcagaacatgtcagt

SEQ ID NO: 524233 - DNA, 60 bp, Artificial
  Synthetic oligonucleotide
agctacccggggacccagacttaataagatacagaagtcagtttggacaggaaaaaacaa

SEQ ID NO: 524234 - DNA, 60 bp, Artificial
  Synthetic oligonucleotide
tcaattgctacacctaattcaaaattaagcttatcaaatggcatattcacatttaatgac

SEQ ID NO: 524235 - DNA, 60 bp, Artificial
  Synthetic oligonucleotide
aggaggggctcgggggcttataggaggggccaaagggcacgtgccttcgggttacagaaa

SEQ ID NO: 524236 - DNA, 60 bp, Artificial
  Synthetic oligonucleotide
aaaatatggcctagagcaagtgtctgtagtaaacaggaataagaggacattatttcatgg

SEQ ID NO: 524237 - DNA, 60 bp, Artificial
  Synthetic oligonucleotide
aaacttagtgatgtggggtgactaacattgaacttcagccagtagctgaacagctgccag

SEQ ID NO: 524238 - DNA, 60 bp, Artificial
  Synthetic oligonucleotide
aaagtactggtctattgcacaacctaattcaaatgccaacttatctgcaggacagttaat

SEQ ID NO: 524239 - DNA, 60 bp, Artificial
  Synthetic oligonucleotide
ttgcctggaataaatcctattcaactaagacagcagtttaggggtagaggagaagtgcca

SEQ ID NO: 524240 - DNA, 60 bp, Artificial
  Synthetic oligonucleotide
ttctctagtactctctgctaataataatcttctctttgctaagactacatctgcagcttg

SEQ ID NO: 524241 - DNA, 60 bp, Artificial
  Synthetic oligonucleotide
ttcctggaggctttgcacacgatatacctgtggctaatatggctcttgtaccttatatgc

SEQ ID NO: 524242 - DNA, 60 bp, Artificial; identical to SEQ ID NO: 479226
  Synthetic oligonucleotide

SEQ ID NO: 524243 - DNA, 60 bp, Artificial
  Synthetic oligonucleotide
aagaagtcagagtttatcaggggactgaaggattacccggggacccagatcttaatagat

SEQ ID NO: 524244 - DNA, 60 bp, Artificial
  Synthetic oligonucleotide
ttagttgaggtgcgctggtacttgggtggactgggtgaaaattgtgcataccaccactcc

SEQ ID NO: 524245 - DNA, 60 bp, Artificial
  Synthetic oligonucleotide
aaggtgtctcatatggcctagtattccaaaccttatctggagttagtgctttagttggtg

SEQ ID NO: 524246 - DNA, 60 bp, Artificial
  Synthetic oligonucleotide
aagttattacagggatttgcctagattaaatcctatccaactgaggcaaagatacagatt

SEQ ID NO: 524247 - DNA, 60 bp, Artificial
  Synthetic oligonucleotide
ttaacctcaggtaagtcaatagctgctattgttggcaactgttagtattaatcacccaga

SEQ ID NO: 524248 - DNA, 60 bp, Artificial
  Synthetic oligonucleotide
aatcctatgctcttttgacaagtgcgcctgggcttttcagcactgcgattggcattggat

SEQ ID NO: 524249 - DNA, 60 bp, Artificial
  Synthetic oligonucleotide
aatggttttaccacacctttgcaatgtataaaacttaaggtacattgagatacacaaaag

SEQ ID NO: 524250 - DNA, 60 bp, Artificial
  Synthetic oligonucleotide
tgtactatacacaattaccaggccttactcctccacaagtaaggtcaattcaaaggcgct

SEQ ID NO: 524251 - DNA, 60 bp, Artificial
  Synthetic oligonucleotide
acaaactgttagtggtgttagttctctagcacaggttggttatagattttttagtgactg

SEQ ID NO: 524252 - DNA, 60 bp, Artificial
  Synthetic oligonucleotide
acaaataacctgcttagcattcagcagccccagtacagctgtgccagagtacaattgccc

SEQ ID NO: 524253 - DNA, 60 bp, Artificial
  Synthetic oligonucleotide
tggttcctatactggaggtcttaccaccccccctgtacttcaatttactaatacagtaac

SEQ ID NO: 524254 - DNA, 60 bp, Artificial
  Synthetic oligonucleotide
tggtgtcccactctgtgttgaaggctgaccaccatgcatcccactctcgggtgccatgtg

SEQ ID NO: 524255 - DNA, 60 bp, Artificial
  Synthetic oligonucleotide
tacctacacccccactgctgcaagtttgcccacctattcaatggctgtgataaaattgcc

SEQ ID NO: 524256 - DNA, 60 bp, Artificial
  Synthetic oligonucleotide
cagaagggatagggctaccaattgaaggtatgaattatcacatgtttgctgtgggtgggg

SEQ ID NO: 524257 - DNA, 60 bp, Artificial
  Synthetic oligonucleotide
atgggattgggcctttatgtaaaggggatcaattgcatattgcttctgctgacatatgtg

SEQ ID NO: 524258 - DNA, 60 bp, Artificial
  Synthetic oligonucleotide
attaacccctggatgtttttgtaggccctcccacacacttttgcctacagcatgtaatag

SEQ ID NO: 524259 - DNA, 60 bp, Artificial
  Synthetic oligonucleotide
tacacctgaaatgggggatgcagatgagcacctgaggggctacagtcaaagggttacttg

SEQ ID NO: 524260 - DNA, 60 bp, Artificial
  Synthetic oligonucleotide
attgccacacccaattcaaaagttaacctctccatgggcaaattaacatttagagctttg

SEQ ID NO: 524261 - DNA, 60 bp, Artificial
  Synthetic oligonucleotide
caaactgtttctggaattagctctttgatttcagttgggataaggctgggaagggaagtt

SEQ ID NO: 524262 - DNA, 60 bp, Artificial
  Synthetic oligonucleotide
caaggagttcagtcttgccattttctcagggtctccccctttgtcaggatgatactccag

SEQ ID NO: 524263 - DNA, 60 bp, Artificial
  Synthetic oligonucleotide
taattctcccagcaagcgaagcagatcaaattcagtattgtgcattatatgcttccacca

SEQ ID NO: 524264 - DNA, 60 bp, Artificial
  Synthetic oligonucleotide
caatataaggcatctggtcccggggggcaatcatcacccacctgcccagatttccaggaa

SEQ ID NO: 524265 - DNA, 60 bp, Artificial
  Synthetic oligonucleotide
taacaatcaagctttggcttcacgcccggaaactgaaaccacaaatggcccggaaactaa

SEQ ID NO: 524266 - DNA, 60 bp, Artificial
  Synthetic oligonucleotide
taaatcactttgcccactatttgaatgttatagaagggtgggcaagcagccttgttcaca

SEQ ID NO: 524267 - DNA, 60 bp, Artificial
  Synthetic oligonucleotide
caccaggaggtgccaatcaaagagttgctcctcaatggatgttgcctttgcttctaggct

SEQ ID NO: 524268 - DNA, 60 bp, Artificial
  Synthetic oligonucleotide
cacctacagtgaagtgatacactcaactgatgggagtagctctagtcaaaaccttctgag

SEQ ID NO: 524269 - DNA, 60 bp, Artificial
  Synthetic oligonucleotide
taaacgccctctaggcggagacggaagacaattgactcttggcacggacggaagaggaat

SEQ ID NO: 524270 - DNA, 60 bp, Artificial
  Synthetic oligonucleotide
cactttcagttatgatgtgtatcctaaagtgactgtcattcctgaaaacatgcctaccta

SEQ ID NO: 524271 - DNA, 60 bp, Artificial
  Synthetic oligonucleotide
cagaaattgattatgagttccctggtcttatgccttttgttagattcataaattacatag

SEQ ID NO: 524272 - DNA, 60 bp, Artificial
  Synthetic oligonucleotide
gtttgcctgaggctcttagacaggtagtttttaactctgaaatttagggtttttacaaac

SEQ ID NO: 524273 - DNA, 60 bp, Artificial
  Synthetic oligonucleotide
agggtgcacataatgcagatgcagccttcagacaggcccctagtgcaaatatcataatct

SEQ ID NO: 524274 - DNA, 60 bp, Artificial
  Synthetic oligonucleotide
aggtagtaggaaacccaaaccacagtaggaagcaagataagcaaagacactctccccaca

SEQ ID NO: 524275 - DNA, 60 bp, Artificial
  Synthetic oligonucleotide
tcaaagctaggtcctagcacatctcctaaagttacaacatcgtctataaagtaaccaacc

SEQ ID NO: 524276 - DNA, 60 bp, Artificial
  Synthetic oligonucleotide
agtaggtgtagggacactcataaacacacatattaaagacacagctaaacatggcactgc

SEQ ID NO: 524277 - DNA, 60 bp, Artificial
  Synthetic oligonucleotide
tattacaggcaattaccaggccttaatcccgcccagattagggatgtatacagaagatta

SEQ ID NO: 524278 - DNA, 60 bp, Artificial
  Synthetic oligonucleotide
tagtcagagcttaaccctcctggaatattttctgacagtaaactaaaaggttcaatgcaa

SEQ ID NO: 524279 - DNA, 60 bp, Artificial
  Synthetic oligonucleotide
tagtcaaaggaggggtagaagttctagaagttagaacagggaatgatgctattactcaaa

SEQ ID NO: 524280 - DNA, 60 bp, Artificial
  Synthetic oligonucleotide
taggaggcaaataggttatgctggtcaagaggtagctaggtatgctactgctacagttca

SEQ ID NO: 524281 - DNA, 60 bp, Artificial
  Synthetic oligonucleotide
taggagatactggccctgcacagcccattgagggaattaatttccacatgtttgctgtag

SEQ ID NO: 524282 - DNA, 60 bp, Artificial
  Synthetic oligonucleotide
atagctgtgcaaaggtgtcattgccaatgcttaatgaggacctgacctgtgataaaatac

SEQ ID NO: 524283 - DNA, 60 bp, Artificial
  Synthetic oligonucleotide
tagctgtgccagagttagccttcctatgttaaatgaggatatgacctgtgacaaaattct

SEQ ID NO: 524284 - DNA, 60 bp, Artificial
  Synthetic oligonucleotide
tactcctggtattaatcagctgcccacttatagtacagctaaaattaaactgccaccctt

SEQ ID NO: 524285 - DNA, 60 bp, Artificial
  Synthetic oligonucleotide
atctggccctggagccacatcactacctacctctcctgctgaccaggagttccatatagt

SEQ ID NO: 524286 - DNA, 59 bp, Artificial
  Synthetic oligonucleotide
ccagagtcttgttgtgtatcctcatcagcatctacacatattaaaatatctttcaatgg

SEQ ID NO: 524287 - DNA, 59 bp, Artificial
  Synthetic oligonucleotide
ggtcccataaacagaaagtacctccttttaggcatattgagaactatagctttaagata

SEQ ID NO: 524288 - DNA, 59 bp, Artificial
  Synthetic oligonucleotide
gccccctctgcaaaggagataaacttttcctaagtgctgcagatattgtggggatgcat

SEQ ID NO: 524289 - DNA, 58 bp, Artificial
  Synthetic oligonucleotide
gcttatcaaaaggcatattcacatttagtgatttaccaccacataaatccagcaatgc

SEQ ID NO: 524290 - DNA, 58 bp, Artificial
  Synthetic oligonucleotide
tttacctgcctgaaaggacctgcagaggggctctgttccaagtaagtaacatgcccta

SEQ ID NO: 524291 - DNA, 58 bp, Artificial
  Synthetic oligonucleotide
gctaaattgctgaaggatggagcttatcctatagagttgtgggcccctgacccttcca

SEQ ID NO: 524292 - DNA, 58 bp, Artificial
  Synthetic oligonucleotide
gagattttctttggaaatactccaaagtacagtaagtatatgggtgctgtaatctctg

SEQ ID NO: 524293 - DNA, 58 bp, Artificial
  Synthetic oligonucleotide
cctactttaggaggctctgcagactccccattacctgcctaagaaacaagggagttag

SEQ ID NO: 524294 - DNA, 58 bp, Artificial
  Synthetic oligonucleotide
gggcggtggagtgaagttaggggtgaagtcagacgagcaggtagagtccctcccggaa

SEQ ID NO: 524295 - DNA, 57 bp, Artificial
  Synthetic oligonucleotide
ttttccttagtagtatagatcagaaaagcactcacacacttattgctaaacacagct

SEQ ID NO: 524296 - DNA, 57 bp, Artificial
  Synthetic oligonucleotide
taatttccagtccctacttcagctttgagtatatctttccaagtccttatgtcctca

SEQ ID NO: 524297 - DNA, 57 bp, Artificial
  Synthetic oligonucleotide
taccaatatacctagaactcctgccagagaatcccaatcaacatttggctcttactt

SEQ ID NO: 524298 - DNA, 57 bp, Artificial
  Synthetic oligonucleotide
ggggcagcctaattcaacagattggctagggtttagtgacaatgtaacagtgtctac

SEQ ID NO: 524299 - DNA, 57 bp, Artificial
  Synthetic oligonucleotide
cctgtgaaaatttgtatatgtgggaggcagttgtgcttaaaactgaattaataggag

SEQ ID NO: 524300 - DNA, 57 bp, Artificial
  Synthetic oligonucleotide
agtgatcttcttgactgcctctctcgcgctactcttagtaataagactcagaatgcc

SEQ ID NO: 524301 - DNA, 56 bp, Artificial
  Synthetic oligonucleotide
tgggacctttgtgcaaaggagatggcttatttgttagctgctgtgatgttgtaggg

SEQ ID NO: 524302 - DNA, 56 bp, Artificial
  Synthetic oligonucleotide
cagagcaaaaagctgacagtgcaatgggttaagcagaagtttctaattgcagacac

SEQ ID NO: 524303 - DNA, 56 bp, Artificial
  Synthetic oligonucleotide
agagggtatctggacaaggaggaaaatcagaaccaacctctgagctattccatgct

SEQ ID NO: 524304 - DNA, 56 bp, Artificial
  Synthetic oligonucleotide
ggcttgtttcattagaggaaaattgctaaagcaattagaattaagctccagcagac

SEQ ID NO: 524305 - DNA, 56 bp, Artificial
  Synthetic oligonucleotide
gaattaataggagttactagcttaataactttgcatactccaggtgttgcagatcc

SEQ ID NO: 524306 - DNA, 56 bp, Artificial
  Synthetic oligonucleotide
tgtcttcacttaggccaatggaagacaaagctgtctctgctcctaaaaacccctcc

SEQ ID NO: 524307 - DNA, 56 bp, Artificial
  Synthetic oligonucleotide
tatcctgccttgttatagctgtgctagaattgctttgcctctccttaatgaagacc

SEQ ID NO: 524308 - DNA, 56 bp, Artificial
  Synthetic oligonucleotide
aggaggagttgccctcaatgttaattgtcctgcagataagctcaactttgaacttg

SEQ ID NO: 524309 - DNA, 55 bp, Artificial
  Synthetic oligonucleotide
gtctgcatggctctggtagtctggagactgactgcgcgacgaggtggcattctct

SEQ ID NO: 524310 - DNA, 55 bp, Artificial
  Synthetic oligonucleotide
gtcttaagggtgtcatgttgagctataagcatgctagtaatgcaggagcaggttg

SEQ ID NO: 524311 - DNA, 55 bp, Artificial
  Synthetic oligonucleotide
gtcttctgtaagcttaaagtacagattcacaagatggaggtccaggtcacctagg

SEQ ID NO: 524312 - DNA, 55 bp, Artificial
  Synthetic oligonucleotide
gtcccatagatcctcaagccaagccccacatacctgagtatttctcagttcaatt

SEQ ID NO: 524313 - DNA, 55 bp, Artificial
  Synthetic oligonucleotide
caggcccagattctataactcaaattgaggcctacttaaatccaaggatgggaaa

SEQ ID NO: 524314 - DNA, 55 bp, Artificial
  Synthetic oligonucleotide
caggagctagtgctttagtaggagcaggcttaaaatatggcctagagcaagtgtc

SEQ ID NO: 524315 - DNA, 55 bp, Artificial
  Synthetic oligonucleotide
gtcacctttaaagggaaagccatgccaaacctggcataaataaagtgccaggcag

SEQ ID NO: 524316 - DNA, 55 bp, Artificial
  Synthetic oligonucleotide
cagtgagctctttgctaaatagcttgttctctggtcttatgccaccaattcaggg

SEQ ID NO: 524317 - DNA, 55 bp, Artificial
  Synthetic oligonucleotide
gtaggccctcccacacacttttgcctacagcatgtaatagactttggtcccagtt

SEQ ID NO: 524318 - DNA, 55 bp, Artificial
  Synthetic oligonucleotide
gtagaggccctttctggaatagaagccctagagactttagggtggagtgcagaac

SEQ ID NO: 524319 - DNA, 55 bp, Artificial
  Synthetic oligonucleotide
aatcaccaagccaacaagcccttacctgggtatttctaagctccaccactccttc

SEQ ID NO: 524320 - DNA, 55 bp, Artificial
  Synthetic oligonucleotide
cataaatatccatgtttatgaggctaaagtgggtgcaggcctagctgctacaggg

SEQ ID NO: 524321 - DNA, 55 bp, Artificial
  Synthetic oligonucleotide
gtggaggtgcttgcagttaaaacaggccctgacagcattactcaaatagaggcct

SEQ ID NO: 524322 - DNA, 55 bp, Artificial
  Synthetic oligonucleotide
gtggagtgtttcaaatgccagataatacaaggagacacaggggcctagcaagata

SEQ ID NO: 524323 - DNA, 55 bp, Artificial
  Synthetic oligonucleotide
ccctgattcctctgattcttgggtagggggatttgggtccaccggggtataggga

SEQ ID NO: 524324 - DNA, 55 bp, Artificial
  Synthetic oligonucleotide
ggggcttataggaggggccaaagggcacgtgccttcgggttacagaaactgcaag

SEQ ID NO: 524325 - DNA, 55 bp, Artificial
  Synthetic oligonucleotide
ccctcctggaatattttctgacagtaaactaaaaggttcaatgcaaagagcacag

SEQ ID NO: 524326 - DNA, 55 bp, Artificial
  Synthetic oligonucleotide
ggggtaagcacatacagaagagctttatctgcaccatggctatgcctgctaataa

SEQ ID NO: 524327 - DNA, 55 bp, Artificial
  Synthetic oligonucleotide
ggggtggaagtgcttaatgtagtaactgggcctgattctactacagaaattgagc

SEQ ID NO: 524328 - DNA, 55 bp, Artificial
  Synthetic oligonucleotide
cccatagaaggccttaattatcacatgttttctgtgggtggtgagcccctagaac

SEQ ID NO: 524329 - DNA, 55 bp, Artificial
  Synthetic oligonucleotide
cccagaccctggttcgagccttgggtttgaataaagggacacatgagttagcacc

SEQ ID NO: 524330 - DNA, 55 bp, Artificial
  Synthetic oligonucleotide
cccaaaccacagtaggaagcaagataagcaaagacactctccccacaccaagcaa

SEQ ID NO: 524331 - DNA, 55 bp, Artificial
  Synthetic oligonucleotide
ccatactgctccataggcaagcctagaagctccattaacagtttgctttcttctc

SEQ ID NO: 524332 - DNA, 55 bp, Artificial
  Synthetic oligonucleotide
ccacagcaaatctatcaattgcacagcccagttcaaagttcaacttgtcagcagg

SEQ ID NO: 524333 - DNA, 55 bp, Artificial
  Synthetic oligonucleotide
ccaaggaaaagaccccgctatgctcgtgatgcaactactggtacctgccctcctg

SEQ ID NO: 524334 - DNA, 55 bp, Artificial
  Synthetic oligonucleotide
ccaaaccagagagtatagcatttaaagcacaagcaatctccccaaacttttggtt

SEQ ID NO: 524335 - DNA, 55 bp, Artificial
  Synthetic oligonucleotide
catggcgcccaggaaaaggccccgctgtgttaatgctccacaatgtcccccagtg

SEQ ID NO: 524336 - DNA, 55 bp, Artificial
  Synthetic oligonucleotide
catcaaaatgaggcatcaataatgataaccaagctactccagccatgtattgaca

SEQ ID NO: 524337 - DNA, 55 bp, Artificial
  Synthetic oligonucleotide
catagcataaacaagaagccctccccagtttcctcctcacctttatgcacactct

SEQ ID NO: 524338 - DNA, 55 bp, Artificial
  Synthetic oligonucleotide
ggtgactaacattgaacttcagccagtagctgaacagctgccagatgctcccggg

SEQ ID NO: 524339 - DNA, 55 bp, Artificial
  Synthetic oligonucleotide
ggtggagcaaaccagagaatagctcctgactggcttcttcctcttattctaggcc

SEQ ID NO: 524340 - DNA, 55 bp, Artificial
  Synthetic oligonucleotide
gtaaatccatcagtggaaatattcccacacctgttcttaacctggggacagaaca

SEQ ID NO: 524341 - DNA, 55 bp, Artificial
  Synthetic oligonucleotide
gtaagaggaggggttgaggttttaaatgttataacgggccctgactctactacag

SEQ ID NO: 524342 - DNA, 55 bp, Artificial
  Synthetic oligonucleotide
attctagatactatggaactgttactggaggaactacaacacctcctgtccttag

SEQ ID NO: 524343 - DNA, 55 bp, Artificial
  Synthetic oligonucleotide
atggagccctgatccttctagaaatgaaaactccaggtattttggctctatgacc

SEQ ID NO: 524344 - DNA, 55 bp, Artificial
  Synthetic oligonucleotide
tggagttgtgttccaaactgtttcaggcctcagtgccttaattggggccggggtc

SEQ ID NO: 524345 - DNA, 55 bp, Artificial
  Synthetic oligonucleotide
atcctattcaactaagacagcagtttaggggtagaggagaagtgccaccaactag

SEQ ID NO: 524346 - DNA, 55 bp, Artificial
  Synthetic oligonucleotide
actcaactgatgggagtagctctagtcaaaaccttctgagtagtcaaatgcccac

SEQ ID NO: 524347 - DNA, 55 bp, Artificial
  Synthetic oligonucleotide
tgccagagtccttcctcttttcaccggaaagacagaggcttaggcctccggcccc

SEQ ID NO: 524348 - DNA, 55 bp, Artificial
  Synthetic oligonucleotide
tagctgctattgttggcaactgttagtattaatcacccagacaactcagaagttt

SEQ ID NO: 524349 - DNA, 55 bp, Artificial
  Synthetic oligonucleotide
agaagcccccaacaaaaaagtctgtgaaaaacccacgtgttccagatcttgcaga

SEQ ID NO: 524350 - DNA, 55 bp, Artificial
  Synthetic oligonucleotide
agcccatgcagggtgaaaacaatcaggtggaggaagttagggtgtttgatggcac

SEQ ID NO: 524351 - DNA, 55 bp, Artificial
  Synthetic oligonucleotide
atacagtgactacaatattgctgaatgagaatggggtaggacctctgtgtaaggg

SEQ ID NO: 524352 - DNA, 55 bp, Artificial
  Synthetic oligonucleotide
agtgattttccttgcactaaatccataagtgctgctgccagagtggtcttcccag

SEQ ID NO: 524353 - DNA, 55 bp, Artificial
  Synthetic oligonucleotide
tagtctggagactgactgcgcgacgaggtggcattctcttgggtgggagaggcgg

SEQ ID NO: 524354 - DNA, 55 bp, Artificial
  Synthetic oligonucleotide
tctgtttcctggtgtacaatccttttcctatgcaatcaatgttgtagcagattgg

SEQ ID NO: 524355 - DNA, 55 bp, Artificial
  Synthetic oligonucleotide
tctccaagaacaggcatgcattggcatgatgagctttgtggtaattatagtggaa

SEQ ID NO: 524356 - DNA, 55 bp, Artificial
  Synthetic oligonucleotide
tccaccatatgagatgctgttcagtaccacaaagtccgtaccaatccaggtaaca

SEQ ID NO: 524357 - DNA, 55 bp, Artificial
  Synthetic oligonucleotide
agctaaattggataaagatgggttttatcctattgaagagtggtgtccagaccca

SEQ ID NO: 524358 - DNA, 55 bp, Artificial
  Synthetic oligonucleotide
tcctcgaaaagaacttgactcagagaaactgggttcctcctcggtagaggtgggg

SEQ ID NO: 524359 - DNA, 55 bp, Artificial
  Synthetic oligonucleotide
gtgggaggcagtggcttgtaaaacagaggtggtaggtataagcaccctcattaat

SEQ ID NO: 524360 - DNA, 55 bp, Artificial
  Synthetic oligonucleotide
gtggtccaccataatgatgggagtgactcctcaaaacagttactcagtgtacagc

SEQ ID NO: 524361 - DNA, 55 bp, Artificial
  Synthetic oligonucleotide
gtgtatagctcatttgttatggctttggttctggaacaccaagacctaggttcgc

SEQ ID NO: 524362 - DNA, 55 bp, Artificial
  Synthetic oligonucleotide
gtgtatcctaaagtgactgtcattcctgaaaacatgcctacctacagtgtagcta

SEQ ID NO: 524363 - DNA, 55 bp, Artificial
  Synthetic oligonucleotide
gtgttccaaggaacagaacctcttccaggagaccccactttaactagacatatgg

SEQ ID NO: 524364 - DNA, 55 bp, Artificial
  Synthetic oligonucleotide
tgtccacaggcgcagcaaagttaagtccatgttggccattaaaagtgtccagtag

SEQ ID NO: 524365 - DNA, 55 bp, Artificial
  Synthetic oligonucleotide
acagctcttggcagacatcccagatgggccactggaggactgtgagtgttttggc

SEQ ID NO: 524366 - DNA, 55 bp, Artificial
  Synthetic oligonucleotide
acagtttactgacaaaacaaatacctagcattgatggacagccaatggatgggac

SEQ ID NO: 524367 - DNA, 55 bp, Artificial
  Synthetic oligonucleotide
cagcccattgagggaattaatttccacatgtttgctgtaggaggggaacccctgg

SEQ ID NO: 524368 - DNA, 55 bp, Artificial
  Synthetic oligonucleotide
gtttatgaggctaaagtgggtgcaggcctagctgctacagggccttcagagccta

SEQ ID NO: 524369 - DNA, 55 bp, Artificial
  Synthetic oligonucleotide
cagaagcaagagttgttttgccactgttaattggtcctttgaaaaggacatttct

SEQ ID NO: 524370 - DNA, 55 bp, Artificial
  Synthetic oligonucleotide
taaacacacatattaaagacacagctaaacatggcactgccacacaagctccagg

SEQ ID NO: 524371 - DNA, 55 bp, Artificial
  Synthetic oligonucleotide
cactggctatttgcctaaggtagaaggccaaccaatgaatgacaagaatggtgag

SEQ ID NO: 524372 - DNA, 55 bp, Artificial
  Synthetic oligonucleotide
cacatttagttatgatgtgtatcctaaagtgactctactgccagagaatctaccc

SEQ ID NO: 524373 - DNA, 55 bp, Artificial
  Synthetic oligonucleotide
tggtgatatagaacctgcctggggaatccagcttaggaaagaagaagatggcccc

SEQ ID NO: 524374 - DNA, 55 bp, Artificial
  Synthetic oligonucleotide
taaccccatgcaagttagagaccttcataggagactaggccaacctataccaaac

SEQ ID NO: 524375 - DNA, 55 bp, Artificial
  Synthetic oligonucleotide
caagtctgcctgtatttatattgcattaagggaatatttccccaagcagcagtat

SEQ ID NO: 524376 - DNA, 55 bp, Artificial
  Synthetic oligonucleotide
caagacttttagcaagcaatgctgtagataatgtttacaatgttggtgagcaggg

SEQ ID NO: 524377 - DNA, 55 bp, Artificial
  Synthetic oligonucleotide
ctggatttcaagtacaacctgatgggcagtatagattcaggggttttcccagata

SEQ ID NO: 524378 - DNA, 55 bp, Artificial
  Synthetic oligonucleotide
ctgcacacgtcccaatctctacagtacaaggcatctggccctggagccacatcac

SEQ ID NO: 524379 - DNA, 55 bp, Artificial
  Synthetic oligonucleotide
gcaaagctagcttgcgagccagaataagatccatccacattttcaccacctgatc

SEQ ID NO: 524380 - DNA, 55 bp, Artificial
  Synthetic oligonucleotide
gcaaggtactttcaggtacagcttagacaaagagctgttagaaatccttatcctg

SEQ ID NO: 524381 - DNA, 55 bp, Artificial
  Synthetic oligonucleotide
gcaatcagggcctacaaatgtctataattatctggacaattattatagacagctt

SEQ ID NO: 524382 - DNA, 55 bp, Artificial
  Synthetic oligonucleotide
gcagacaatgaagccaggccatcccagcaatatagagacatacatccccagttcc

SEQ ID NO: 524383 - DNA, 55 bp, Artificial
  Synthetic oligonucleotide
ctcattacctggatttcagcaagcctcctggtaactgcaccaagtgtcttactgg

SEQ ID NO: 524384 - DNA, 55 bp, Artificial
  Synthetic oligonucleotide
gcagatacatgtatgactctaattctggctcccaaccagtggaaggttctagctt

SEQ ID NO: 524385 - DNA, 55 bp, Artificial
  Synthetic oligonucleotide
gcaggggcttgttcaggcagcaaaggccaaattggataaagatgggtattatcct

SEQ ID NO: 524386 - DNA, 55 bp, Artificial
  Synthetic oligonucleotide
gcagtgattgttaggctacacgccagtgtctgggcggtgtgccaaaatgtaagga

SEQ ID NO: 524387 - DNA, 55 bp, Artificial
  Synthetic oligonucleotide
aaatcttcatcccatcctctattaaattcttcccaccattgatcccattcaggag

SEQ ID NO: 524388 - DNA, 55 bp, Artificial
  Synthetic oligonucleotide
gcattgatggacagccaatggatgggactgataatcaagtacaggatgtaactgt

SEQ ID NO: 524389 - DNA, 55 bp, Artificial
  Synthetic oligonucleotide
ctcactttcagagtcacagggaacacatactcgtttgctgtaactatgccaggtg

SEQ ID NO: 524390 - DNA, 55 bp, Artificial
  Synthetic oligonucleotide
gccccacaggggataagaaggaatggtatggctacagtgaggtggtccaccataa

SEQ ID NO: 524391 - DNA, 55 bp, Artificial
  Synthetic oligonucleotide
ctactgctgaactgctacaggcccacattgccaatcttgtgacagttggaggcct

SEQ ID NO: 524392 - DNA, 55 bp, Artificial
  Synthetic oligonucleotide
gcctagacagcccagatggtggcgataacaatcaagctttggcttcacgcccgga

SEQ ID NO: 524393 - DNA, 55 bp, Artificial
  Synthetic oligonucleotide
gcctgataatactaggagacacaggggcctagcaagatactttcaggtacagctt

SEQ ID NO: 524394 - DNA, 55 bp, Artificial
  Synthetic oligonucleotide
cttatagctttagatctctgtagggagtctctccaattatatgcacccaccagtg

SEQ ID NO: 524395 - DNA, 55 bp, Artificial
  Synthetic oligonucleotide
tttagaggagaagctccaggaggagcaagacaaagacagactcctgattggatgc

SEQ ID NO: 524396 - DNA, 55 bp, Artificial
  Synthetic oligonucleotide
cttctaggcctgtatggtgatattccacccgcctgggaatcacgcctaagaaccc

SEQ ID NO: 524397 - DNA, 55 bp, Artificial
  Synthetic oligonucleotide
cttatagcaatctaaaggcttcaaaactatcttacagattacaaagctaacagtg

SEQ ID NO: 524398 - DNA, 55 bp, Artificial
  Synthetic oligonucleotide
ctttggtggacatgattgtaatggcaacagaattaagtgcagcatctggactggc

SEQ ID NO: 524399 - DNA, 55 bp, Artificial
  Synthetic oligonucleotide
ctttgtcagggtgcagcttcaagcaagcctgcctgtatttatattgcattaaggg

SEQ ID NO: 524400 - DNA, 55 bp, Artificial
  Synthetic oligonucleotide
gaagtgcctaagcttgtgatttctggaggtgttgaagtactaggcctcaaaactg

SEQ ID NO: 524401 - DNA, 55 bp, Artificial
  Synthetic oligonucleotide
gaagttacagctgaagcttatgctgctttgacatcaattacctcaactttcccgc

SEQ ID NO: 524402 - DNA, 55 bp, Artificial
  Synthetic oligonucleotide
gaatttctggatgaaatgcaattacaggttgccaccaacaaagaagcaacagcaa

SEQ ID NO: 524403 - DNA, 55 bp, Artificial
  Synthetic oligonucleotide
gacacaggaggatactggtcctactcttatggatcagcaggatactctgaccagc

SEQ ID NO: 524404 - DNA, 55 bp, Artificial
  Synthetic oligonucleotide
ctgttcaaacaaacaagcataccaagccacgcctgccatgtgattaatgagttcc

SEQ ID NO: 524405 - DNA, 55 bp, Artificial
  Synthetic oligonucleotide
gagactatatatttagaggagaagctccaggaggagcaagacaaagacagactcc

SEQ ID NO: 524406 - DNA, 55 bp, Artificial
  Synthetic oligonucleotide
gagatgcccgtcatcagatagggtatgctagcagagagctggttgtgagagggac

SEQ ID NO: 524407 - DNA, 55 bp, Artificial
  Synthetic oligonucleotide
ctggtcaagaggtagctaggtatgctactgctacagttcaggacagtcttgccag

SEQ ID NO: 524408 - DNA, 55 bp, Artificial
  Synthetic oligonucleotide
gagctatacctggagcccaggatggggattaatagccccacaggggataagaagg

SEQ ID NO: 524409 - DNA, 55 bp, Artificial
  Synthetic oligonucleotide
gaggctgaagtgacttcccttatgtccttagaggccctatctggaatagaagcct

SEQ ID NO: 524410 - DNA, 55 bp, Artificial
  Synthetic oligonucleotide
gatactatggaactgttactggaggtactacaacacctcctgtgcttagtacaac

SEQ ID NO: 524411 - DNA, 55 bp, Artificial
  Synthetic oligonucleotide
ggatatgacttgtcaaacattgatgatgtgggaggcagtggcttgtaaaacagag

SEQ ID NO: 524412 - DNA, 55 bp, Artificial
  Synthetic oligonucleotide
ttataaaacccagactggtgtatagctcatttgtcatgatctggatttccacccc

SEQ ID NO: 524413 - DNA, 55 bp, Artificial
  Synthetic oligonucleotide
ggcttcacgcccggaaactgaaaccacaaatggcccggaaactaatgtaccggaa

SEQ ID NO: 524414 - DNA, 55 bp, Artificial
  Synthetic oligonucleotide
ggcttccaggcggagaatactcacagaccccacacagtctagacgctcagaagca

SEQ ID NO: 524415 - DNA, 55 bp, Artificial
  Synthetic oligonucleotide
ggctttacaagtttggatacctgatcttgatttggactttcctggtgtgaggccc

SEQ ID NO: 524416 - DNA, 55 bp, Artificial
  Synthetic oligonucleotide
aaattcaaggtagaaaggcaaatccaagcaagtgagtataaccctgcctctctcc

SEQ ID NO: 524417 - DNA, 55 bp, Artificial
  Synthetic oligonucleotide
cctctaattacaagactaactatcctgatggcactgtaaaacctcctgtgaaagc

SEQ ID NO: 524418 - DNA, 55 bp, Artificial
  Synthetic oligonucleotide
cctggtgttaggagaatgctactgcatagactgctttgccttatggtttggcctg

SEQ ID NO: 524419 - DNA, 55 bp, Artificial
  Synthetic oligonucleotide
gggatagaagttttaaatataattccagggccggacaccacaatgacagttgagg

SEQ ID NO: 524420 - DNA, 55 bp, Artificial
  Synthetic oligonucleotide
gggcaccacacctctatgggataatagccatccctatcaaggacagccttggcag

SEQ ID NO: 524421 - DNA, 55 bp, Artificial
  Synthetic oligonucleotide
gggcataaatggccctgatggggagaacaaggagtggtacacctacagtgaagtg

SEQ ID NO: 524422 - DNA, 55 bp, Artificial
  Synthetic oligonucleotide
ggagagcccctagatatgaaatatatagttactaacagcaaagctgaatatccag

SEQ ID NO: 524423 - DNA, 55 bp, Artificial
  Synthetic oligonucleotide
ggacttttgtggctccgcccactaggtcactggggcgggtcagcggtcaagctaa

SEQ ID NO: 524424 - DNA, 55 bp, Artificial
  Synthetic oligonucleotide
ggatgcagatgagcacctgaggggctacagtcaaagggttacttgtgatgctacc

SEQ ID NO: 524425 - DNA, 55 bp, Artificial
  Synthetic oligonucleotide
cctgttaagggacaaacaactgttctgtggttaagttgctaggtggcgcttagca

SEQ ID NO: 524426 - DNA, 55 bp, Artificial
  Synthetic oligonucleotide
cctagattaaatcctatccaactgaggcaaagatacagattgcttggagagcaac

SEQ ID NO: 524427 - DNA, 55 bp, Artificial
  Synthetic oligonucleotide
ggaattagctctttgatttcagttgggataaggctgggaagggaagtttcagtgg

SEQ ID NO: 524428 - DNA, 55 bp, Artificial
  Synthetic oligonucleotide
ccttgctactgttgaggggctaacaggagtggaagctcttgcctctttgggcatc

SEQ ID NO: 524429 - DNA, 55 bp, Artificial
  Synthetic oligonucleotide
ggcatttccatagaagctatagttacaggggaggctttagcagctttagaggctg

SEQ ID NO: 524430 - DNA, 55 bp, Artificial
  Synthetic oligonucleotide
cgcggtggatttaagtgctgctacaggcatttccatagaagctatagttacaggg

SEQ ID NO: 524431 - DNA, 55 bp, Artificial
  Synthetic oligonucleotide
gctccagctgacctcatcatttatatattgtttccatttggttaccaaaggctgc

SEQ ID NO: 524432 - DNA, 55 bp, Artificial
  Synthetic oligonucleotide
cgggtcctcctcgtctgtcattagttgaggtgcgctggtacttgggtggagtggg

SEQ ID NO: 524433 - DNA, 55 bp, Artificial
  Synthetic oligonucleotide
ttgccaatgcttaatgaggacctgacctgtgataaaatactgatgtgggaggctg

SEQ ID NO: 524434 - DNA, 55 bp, Artificial
  Synthetic oligonucleotide
cggttgttgctacgtgtttataatacttggcaaggaggggatagcttccttagtg

SEQ ID NO: 524435 - DNA, 55 bp, Artificial
  Synthetic oligonucleotide
gcgggaagccaataacagcaactttgacatttcatcacgagccctttaaacgccc

SEQ ID NO: 524436 - DNA, 54 bp, Artificial
  Synthetic oligonucleotide
ggcccctcaaagaaaaaggcaagagtgcggagcttgtcctgtaaaaaaaacgtg

SEQ ID NO: 524437 - DNA, 54 bp, Artificial
  Synthetic oligonucleotide
aaaatgagaatgctaggtactttgctacttacacaggtgggctgaacacacccc

SEQ ID NO: 524438 - DNA, 54 bp, Artificial
  Synthetic oligonucleotide
cttcctggcgagagttgcgggtgcggccggaaatgttctcaactctctcagaaa

SEQ ID NO: 524439 - DNA, 54 bp, Artificial
  Synthetic oligonucleotide
ttagaaatgtattatgcacaattaccaggccttactcctccacaagtaaggtca

SEQ ID NO: 524440 - DNA, 54 bp, Artificial
  Synthetic oligonucleotide
ttgtaccagggcagatgcccccaacaaaaaagtgtgtgaaaaaccctcgtgttc

SEQ ID NO: 524441 - DNA, 54 bp, Artificial
  Synthetic oligonucleotide
tgcaatggagaggtctccctcggtattttcaggttactcttcgtaagaggtggg

SEQ ID NO: 524442 - DNA, 54 bp, Artificial
  Synthetic oligonucleotide
atgctagtaatgcaggagcaggttgtaggccccttactaatgcatgaaggggtt

SEQ ID NO: 524443 - DNA, 54 bp, Artificial
  Synthetic oligonucleotide
ttaatgtgggaagcagtaagctgcaaaacagaggtggtgggtataagcagttta

SEQ ID NO: 524444 - DNA, 54 bp, Artificial
  Synthetic oligonucleotide
gagtaaactgggccaaattatagaagtcagcaggtgggtaaggcaagctaattt

SEQ ID NO: 524445 - DNA, 54 bp, Artificial
  Synthetic oligonucleotide
gtaagcactttgctgaacacactgtttacacagatgtccccaaatgttcagggt

SEQ ID NO: 524446 - DNA, 54 bp, Artificial
  Synthetic oligonucleotide
ttggctgacgtcccagatggatttgtttgtcctaacggacaaaggggaaacgag

SEQ ID NO: 524447 - DNA, 54 bp, Artificial
  Synthetic oligonucleotide
gttttggcagacatctgccgtgggagggctgccaagagctgtaggcagtcagcc

SEQ ID NO: 524448 - DNA, 54 bp, Artificial
  Synthetic oligonucleotide
gtagaatcacagctttcatctttggcagttatagaaaatgcttcggcagccgaa

SEQ ID NO: 524449 - DNA, 54 bp, Artificial
  Synthetic oligonucleotide
cagaccccagccatatattccctcaggtctccagcccctctaggcccaaagtga

SEQ ID NO: 524450 - DNA, 54 bp, Artificial
  Synthetic oligonucleotide
cgtgttccagatcttgcagaatgtcatgtaacaaatgtccttgtataccgtgtc

SEQ ID NO: 524451 - DNA, 53 bp, Artificial; identical to SEQ ID NO: 299768
  Synthetic oligonucleotide

SEQ ID NO: 524452 - DNA, 53 bp, Artificial
  Synthetic oligonucleotide
ttggtacccctgcccctttatctctaataggtagttgatctagatggtgtaca

SEQ ID NO: 524453 - DNA, 53 bp, Artificial
  Synthetic oligonucleotide
tttaagtgctgctacaggcatttctatagaagctatagttacaggggaggctc

SEQ ID NO: 524454 - DNA, 53 bp, Artificial
  Synthetic oligonucleotide
ttcttttccaccatatgagatgcagttcaatgccactaagtccgtaccaatcc

SEQ ID NO: 524455 - DNA, 53 bp, Artificial
  Synthetic oligonucleotide
tcacatctgggtcaccaggaacagcctctgtaccctcataaatcctgacttct

SEQ ID NO: 524456 - DNA, 53 bp, Artificial
  Synthetic oligonucleotide
ctttgaagatgtcaaaggacaaaccggagataagagacacctacagtctggac

SEQ ID NO: 524457 - DNA, 53 bp, Artificial
  Synthetic oligonucleotide
tactagaagctcacattgctaatctagtaacggtcggaggcctaacagaagct

SEQ ID NO: 524458 - DNA, 53 bp, Artificial
  Synthetic oligonucleotide
cagtgccttccatgacaaaaagatgtcatatgtatgctccaatccaaaccaca

SEQ ID NO: 524459 - DNA, 52 bp, Artificial
  Synthetic oligonucleotide
aaaagtttgcagacgcggtaaagatggctgccagagtccttcctcttttcac

SEQ ID NO: 524460 - DNA, 52 bp, Artificial
  Synthetic oligonucleotide
cttccttgctattctactgcaagaattccactccctaatctaaatgaggatc

SEQ ID NO: 524461 - DNA, 52 bp, Artificial
  Synthetic oligonucleotide
gcaagacaaatgtatagaaggctaggacaaaaatacagggtgaccagggacg

SEQ ID NO: 524462 - DNA, 52 bp, Artificial
  Synthetic oligonucleotide
ggaggacagttaacatttagagtttttcccccaagcaaatcaagtatagcag

SEQ ID NO: 524463 - DNA, 52 bp, Artificial
  Synthetic oligonucleotide
ggaggagtactcagcctgttttttgatatagcagagctagcctcagctctta

SEQ ID NO: 524464 - DNA, 52 bp, Artificial
  Synthetic oligonucleotide
ggagttacatgtttgtggttaacatactaaaggtcagtcatgtgagaccatg

SEQ ID NO: 524465 - DNA, 52 bp, Artificial
  Synthetic oligonucleotide
cctgaccttgctaggacccttaaccgctatggccaaaatatcactgagcttc

SEQ ID NO: 524466 - DNA, 52 bp, Artificial
  Synthetic oligonucleotide
ggggcaatcatcacccacctgcccagatttccaggaattccacagatgttct

SEQ ID NO: 524467 - DNA, 52 bp, Artificial
  Synthetic oligonucleotide
caggtacagccccatccaagtagtccctcatattatccagatttgaaattcc

SEQ ID NO: 524468 - DNA, 52 bp, Artificial
  Synthetic oligonucleotide
gttagtaaactgtagaactggaggggtattggttcccccagtataggatcca

SEQ ID NO: 524469 - DNA, 52 bp, Artificial
  Synthetic oligonucleotide
aggtgtggtgccctgacccctctaaaaatgaaaatagtagatactatggaag

SEQ ID NO: 524470 - DNA, 52 bp, Artificial
  Synthetic oligonucleotide
agcaagttccccacactttaggtctgccaataagttgctgcttatgttctct

SEQ ID NO: 524471 - DNA, 52 bp, Artificial
  Synthetic oligonucleotide
tgaaagctatattagacagagatggttactatcctgtggaggcctggggccc

SEQ ID NO: 524472 - DNA, 52 bp, Artificial
  Synthetic oligonucleotide
tagatgatcctcttgtaattatgggacattatctagaatttagtcagtgtga

SEQ ID NO: 524473 - DNA, 52 bp, Artificial
  Synthetic oligonucleotide
tagacaaggtatgaggcaaaatgtactcattcatagtcacaattccaggggg

SEQ ID NO: 524474 - DNA, 52 bp, Artificial
  Synthetic oligonucleotide
taaatccagcccttaaaggtgtgctggacaaggacggggcctacccaataga

SEQ ID NO: 524475 - DNA, 51 bp, Artificial
  Synthetic oligonucleotide
ggtgccacatgtcatatcttcatttagtaggggcagttggattcttgcaca

SEQ ID NO: 524476 - DNA, 51 bp, Artificial
  Synthetic oligonucleotide
ttaggttgtagagtaaaatgcaaggtgtaagcaattctggcaattacagtg

SEQ ID NO: 524477 - DNA, 51 bp, Artificial
  Synthetic oligonucleotide
tagaacaggcaaatccaagcaagtgagtatgaaccctgcctctctcctttt

SEQ ID NO: 524478 - DNA, 51 bp, Artificial
  Synthetic oligonucleotide
aacaggcacagctccacctaaatgatctcttaagttatcaaggttatgaaa

SEQ ID NO: 524479 - DNA, 51 bp, Artificial
  Synthetic oligonucleotide
atcactgtttaaccctccaggaatattttctacaacaagcacaaaaggctc

SEQ ID NO: 524480 - DNA, 51 bp, Artificial
  Synthetic oligonucleotide
cctttaatgttacaggaaacttatactcatttgctgttacaaggcctggag

SEQ ID NO: 524481 - DNA, 51 bp, Artificial
  Synthetic oligonucleotide
atacttacaagtgttaataaagctgtaggtggagaaaccgactctctgtgt

SEQ ID NO: 524482 - DNA, 51 bp, Artificial
  Synthetic oligonucleotide
gcatcttgtatgaggccagcactgcaagcccgccaaaactagcgcgccaag

SEQ ID NO: 524483 - DNA, 51 bp, Artificial
  Synthetic oligonucleotide
acaaaacaaatacctagcattgatggacagccaatggatgggactgataat

SEQ ID NO: 524484 - DNA, 51 bp, Artificial
  Synthetic oligonucleotide
gattggcagctacaggcccttcagagcctatatcaggcataaactttcata

SEQ ID NO: 524485 - DNA, 50 bp, Artificial
  Synthetic oligonucleotide
gttcaaatgattcatgaggctggatgcattgtaaagctttattgtgtgaa

SEQ ID NO: 524486 - DNA, 50 bp, Artificial
  Synthetic oligonucleotide
cttctgtaccggggatgttgtcaaatgctgtaggcctaggtgttgttttt

SEQ ID NO: 524487 - DNA, 50 bp, Artificial
  Synthetic oligonucleotide
agcaaggaagcagagggttggacttggcagtactactatagctagctgac

SEQ ID NO: 524488 - DNA, 50 bp, Artificial
  Synthetic oligonucleotide
cagctatggaaagagagatggagaaagtccaagcatgcctatagtagggc

SEQ ID NO: 524489 - DNA, 50 bp, Artificial
  Synthetic oligonucleotide
cacagtaaaagggggccgtgtcaatgcagaataacaaaagtattctctca

SEQ ID NO: 524490 - DNA, 50 bp, Artificial
  Synthetic oligonucleotide
accttctgagtagtcaaatgcccacttatagttgtgctagggtacaatta

SEQ ID NO: 524491 - DNA, 50 bp, Artificial
  Synthetic oligonucleotide
accataataacataagtacaagggtcatgccactttgcaatactctatgt

SEQ ID NO: 524492 - DNA, 60 bp, Artificial
  Synthetic oligonucleotide
catctttcggacacaggtgacccaccaaagtctagatttagacgaccctctcactatcaa

SEQ ID NO: 524493 - DNA, 60 bp, Artificial
  Synthetic oligonucleotide
gtacgttgctagctacaatgaagtcgaccaacttagcaagttgctcatcgacagaaagtt

SEQ ID NO: 524494 - DNA, 60 bp, Artificial
  Synthetic oligonucleotide
catgtacattgtaatgagagtgcacgcatacctttctacgcacatgggattcccgacaag

SEQ ID NO: 524495 - DNA, 60 bp, Artificial
  Synthetic oligonucleotide
ggtttgtggacccgttgaccggaaaaactttggatgactcaccatacactgacatcagcc

SEQ ID NO: 524496 - DNA, 60 bp, Artificial
  Synthetic oligonucleotide
tgtcggccagattacgtgcggatacttaactccgcgagttgagcctgtcactcctgaaac

SEQ ID NO: 524497 - DNA, 60 bp, Artificial
  Synthetic oligonucleotide
ggtggggtttatcatcagctagatgacatccaagacatcataagtgaaaagaacttgaca

SEQ ID NO: 524498 - DNA, 60 bp, Artificial
  Synthetic oligonucleotide
ggtctaccatatcacttgagccttagaggaaaagtgctaatgctcgaaccaactagacct

SEQ ID NO: 524499 - DNA, 60 bp, Artificial
  Synthetic oligonucleotide
ccagttatgacagcccaagtctcaacagcgatattgggtcactgtacagtgcaacaagct

SEQ ID NO: 524500 - DNA, 60 bp, Artificial
  Synthetic oligonucleotide
gggtgcgtttaacattctaaactacgtcacacctgaatttctccgaaccgcaagagttgt

SEQ ID NO: 524501 - DNA, 60 bp, Artificial
  Synthetic oligonucleotide
gggtgaccgggaaactacaccggggaagacccaacatgcaatggttacaaaatgggtccg

SEQ ID NO: 524502 - DNA, 60 bp, Artificial
  Synthetic oligonucleotide
tgcaaggcgtgcataaacgaagctgcaaatagggacaaggatgaaatctacactgatgct

SEQ ID NO: 524503 - DNA, 60 bp, Artificial
  Synthetic oligonucleotide
gggctatgaccaactaacccacgagattcgtcgtttctacaagtgggtacttgaacaagc

SEQ ID NO: 524504 - DNA, 60 bp, Artificial
  Synthetic oligonucleotide
ccgcgattcatttgcaggcatacctattacaaaacagccactttcgaatgcttgcctgag

SEQ ID NO: 524505 - DNA, 60 bp, Artificial
  Synthetic oligonucleotide
ccgcgtgaaatctcttgggggacactagatctgcaaaacagcacaccatcagaaccattt

SEQ ID NO: 524506 - DNA, 60 bp, Artificial
  Synthetic oligonucleotide
cctggagtgggacagatcatctgaaccaacacacagactggaagctatttgtgcagcgat

SEQ ID NO: 524507 - DNA, 60 bp, Artificial
  Synthetic oligonucleotide
gggaactattcgtacgcaccacacatggcgaatttacttgtccagatgttggaaaactga

SEQ ID NO: 524508 - DNA, 60 bp, Artificial
  Synthetic oligonucleotide
ggcttacctttttatctgagtcggaaaggaagggttctactggtagaaccaacacgacca

SEQ ID NO: 524509 - DNA, 60 bp, Artificial
  Synthetic oligonucleotide
ggctcattgattgtaccattggatttcgatcgagctaggctagcattgcagggcgaaagc

SEQ ID NO: 524510 - DNA, 60 bp, Artificial
  Synthetic oligonucleotide
cgaaaggagacaacatattggtttacgtggcaagttacaatgacgtagacacacttgcac

SEQ ID NO: 524511 - DNA, 60 bp, Artificial
  Synthetic oligonucleotide
ggcaagagagcctacaaaatctcaccggccaagttccgcggctgcaacattcctagggta

SEQ ID NO: 524512 - DNA, 60 bp, Artificial
  Synthetic oligonucleotide
ggatggcagcattaatccatcacatagtattgcctatgaataggactacttgtgatacat

SEQ ID NO: 524513 - DNA, 60 bp, Artificial
  Synthetic oligonucleotide
tgttatgaaggaggtctcatttggatgctctgatgggtgtggcgggctgtgcgcatacac

SEQ ID NO: 524514 - DNA, 60 bp, Artificial
  Synthetic oligonucleotide
tgttagtcatgggtattgtttcaccaaatgtgctactagccatgtacaacaatggagtgt

SEQ ID NO: 524515 - DNA, 60 bp, Artificial
  Synthetic oligonucleotide
caaatttgacggctcaatgcatccgcaaatacacgaagttcttaagaagtacaagctcag

SEQ ID NO: 524516 - DNA, 60 bp, Artificial
  Synthetic oligonucleotide
gttcgagaagattatcgcggttctagctttgctcacaatgtgcatcgatgcagaaaggag

SEQ ID NO: 524517 - DNA, 60 bp, Artificial
  Synthetic oligonucleotide
gttacaaagtgatgagagccatattaaccaagaatgtgacgcaacatttgacacatggtg

SEQ ID NO: 524518 - DNA, 60 bp, Artificial
  Synthetic oligonucleotide
caagtataacaagccaataatcttgaacgaagtgaactttcaatcgtttgaatgcgcagt

SEQ ID NO: 524519 - DNA, 60 bp, Artificial
  Synthetic oligonucleotide
gtgttgatagcacagcctgtgaggaggagctttgatgcggcacggatgtgcgcacgcaaa

SEQ ID NO: 524520 - DNA, 60 bp, Artificial
  Synthetic oligonucleotide
gtgtggcgggctgtgcgcatacaccaaaacttctctccgacgtgctattaaggagggaga

SEQ ID NO: 524521 - DNA, 60 bp, Artificial
  Synthetic oligonucleotide
caattacacgataatttgcaagtggttgcgaaatgtccaggccaactcgttaccaagcat

SEQ ID NO: 524522 - DNA, 60 bp, Artificial
  Synthetic oligonucleotide
gtgtccattttggagtgggacagatcatctgaaccaacacatagattggaagctatttgt

SEQ ID NO: 524523 - DNA, 60 bp, Artificial
  Synthetic oligonucleotide
gtggtgagtgctatcgaagctgatgtcaaaccaaagagcacaggcgtcagagaacgagtt

SEQ ID NO: 524524 - DNA, 60 bp, Artificial
  Synthetic oligonucleotide
gtggcggcacaaatttcagcgctcaatgctgctaggatcgaggcatggggttatgacgat

SEQ ID NO: 524525 - DNA, 60 bp, Artificial
  Synthetic oligonucleotide
cacgtttgcaaccattacaggagtcatggtttattcttagagtttacgcgaacaacggca

SEQ ID NO: 524526 - DNA, 60 bp, Artificial
  Synthetic oligonucleotide
tgtgtttacaggcaacaactcagagcaagaagtggatgtacgatgcacttgaggataatc

SEQ ID NO: 524527 - DNA, 60 bp, Artificial
  Synthetic oligonucleotide
cactattagcaggtaaagtttgtgttgatgatttcaacggccaattttactcgcagcatt

SEQ ID NO: 524528 - DNA, 60 bp, Artificial
  Synthetic oligonucleotide
tgtgttggatagttcggcaatggcattctactgtttgttgcaggaggtcaagtttccagg

SEQ ID NO: 524529 - DNA, 60 bp, Artificial
  Synthetic oligonucleotide
gtgccaaccgacctctgtgtttgcgaggcgtcagacgttatggaacgaagtgctttaaag

SEQ ID NO: 524530 - DNA, 60 bp, Artificial
  Synthetic oligonucleotide
cagatgcatatgaaaagcacgtcacacggtttaaccctaatggtcaacgaaagttatcaa

SEQ ID NO: 524531 - DNA, 60 bp, Artificial
  Synthetic oligonucleotide
gtcgatccactcacgggagcaactctggatgaacaaattcatgccgatatgcgtttaatt

SEQ ID NO: 524532 - DNA, 60 bp, Artificial
  Synthetic oligonucleotide
gtcagctctattttaaccaaactccaccaaggttcatgtgataaactatatagtttgcgt

SEQ ID NO: 524533 - DNA, 60 bp, Artificial
  Synthetic oligonucleotide
gtagtaattgttcatgtcagtgaccaacacagtcaagtattgggttgggtgatgacgcga

SEQ ID NO: 524534 - DNA, 60 bp, Artificial
  Synthetic oligonucleotide
gtagcgagtatgtcgctgaagttgatcaagtatgtgaaagcattaactagaggaaagggc

SEQ ID NO: 524535 - DNA, 60 bp, Artificial
  Synthetic oligonucleotide
gccgaacctatcgaaattggcaaagtggattgtgacgcctttgaagaagccacacatcgg

SEQ ID NO: 524536 - DNA, 60 bp, Artificial
  Synthetic oligonucleotide
tgcagttggtggtacaataacacacaaatcgttttccaccctaattagtcacttaatcaa

SEQ ID NO: 524537 - DNA, 60 bp, Artificial
  Synthetic oligonucleotide
gaaatggacaatgtgggttacctgtagtgagcaccaaggatggcgcaatagttggaattc

SEQ ID NO: 524538 - DNA, 60 bp, Artificial
  Synthetic oligonucleotide
gaagaggatagacaggatgcaaaaactgccatggcacacatgtatcgcgagtttgtttac

SEQ ID NO: 524539 - DNA, 60 bp, Artificial
  Synthetic oligonucleotide
gaagattaagagcatcatggcacagaagcatgcatctgtggaaatcatcactaagaaatc

SEQ ID NO: 524540 - DNA, 60 bp, Artificial
  Synthetic oligonucleotide
gaagtatacttcctgaacatcgaattgaggcagtatgcgctgccatgattgaagcatggg

SEQ ID NO: 524541 - DNA, 60 bp, Artificial
  Synthetic oligonucleotide
tgcgaacacgagtaggtggtttaaagtgaaggattatcggaaatttggtgcacgtgtagc

SEQ ID NO: 524542 - DNA, 60 bp, Artificial
  Synthetic oligonucleotide
gacgatgctttcaaacctcgattttgggcaattcgaatacataacagatagtgaggtgat

SEQ ID NO: 524543 - DNA, 60 bp, Artificial
  Synthetic oligonucleotide
gcaataccgaatagtaacgtttgtggatggatgagtgttcgtgactataagcggcagggt

SEQ ID NO: 524544 - DNA, 60 bp, Artificial
  Synthetic oligonucleotide
gcaacagaagcagccttcatgtgtttcgcatatggtcttaaagtcatcactcataatgtt

SEQ ID NO: 524545 - DNA, 60 bp, Artificial
  Synthetic oligonucleotide
gacttgaaaattcccacgaagaatcatttggtgatcgggaatacaggagatgcaaagtac

SEQ ID NO: 524546 - DNA, 60 bp, Artificial
  Synthetic oligonucleotide
gacttggaagagtcggtaggaataaggcaggaattgcattgcgtatcggatacacggaga

SEQ ID NO: 524547 - DNA, 60 bp, Artificial
  Synthetic oligonucleotide
gagagggtgaattacgacagaccggccaagcacgaccgatcaattttgaccagattccta

SEQ ID NO: 524548 - DNA, 60 bp, Artificial
  Synthetic oligonucleotide
gcaaataatcggaacggcacggaatatcatggcagttgttcaaaatgagaggttggttgc

SEQ ID NO: 524549 - DNA, 60 bp, Artificial
  Synthetic oligonucleotide
gagatactgcagtgaacctcgaacacttactggtgtataaccctgaccagttggatatat

SEQ ID NO: 524550 - DNA, 60 bp, Artificial
  Synthetic oligonucleotide
gattttgtcaaaatcccatactatgttcgagacgtcccagacaagctttacgcagatatt

SEQ ID NO: 524551 - DNA, 60 bp, Artificial
  Synthetic oligonucleotide
gattacacgaaatgggtgcgtgatgttgtagcaactcagttgggccaatggccaacaatg

SEQ ID NO: 524552 - DNA, 60 bp, Artificial
  Synthetic oligonucleotide
gatgtaaccgaaccttcatgaaacaaaagcacgtaatgaagggaagatactctcaatggg

SEQ ID NO: 524553 - DNA, 60 bp, Artificial
  Synthetic oligonucleotide
gatcaaagtttgacaactatggtcgctatattgaacacccttgcagtgaaggtctcaggc

SEQ ID NO: 524554 - DNA, 60 bp, Artificial
  Synthetic oligonucleotide
gagttcattcgacactgtggtggagcacgaaagcaagtccctatttaggggattgagaga

SEQ ID NO: 524555 - DNA, 60 bp, Artificial
  Synthetic oligonucleotide
gatactcgaattcaagaacgtcacgtttgatttggatcacgtcaatcgtatgactgaata

SEQ ID NO: 524556 - DNA, 60 bp, Artificial
  Synthetic oligonucleotide
gataatacggcaatgccatattttgtaattcgtggacggtgcaatggaaagttggttaat

SEQ ID NO: 524557 - DNA, 60 bp, Artificial
  Synthetic oligonucleotide
cgcaaacaatagagcacgcttgaaagagtatagcttcataatgttggatgagtgtcacgt

SEQ ID NO: 524558 - DNA, 60 bp, Artificial
  Synthetic oligonucleotide
cgcaacagctagtgcgtggaaagggttagaagagaagcttcaaccaatgtttgctagacg

SEQ ID NO: 524559 - DNA, 60 bp, Artificial
  Synthetic oligonucleotide
cgcaatcaaacagttgacttcgagctagatgacgagataacacgaggtaaccacacacag

SEQ ID NO: 524560 - DNA, 60 bp, Artificial
  Synthetic oligonucleotide
cgccctttgagacagtctcagctgacgttgtgtttgaggcagctcttttatcattcatac

SEQ ID NO: 524561 - DNA, 60 bp, Artificial
  Synthetic oligonucleotide
cgcgactaccgttttatcttaaagacgttccagataaggtgtatgagaaactgtggaagt

SEQ ID NO: 524562 - DNA, 60 bp, Artificial
  Synthetic oligonucleotide
ggacccactgaccggaaatgtgtatgatgagactgaattcaagagtgtttgggagttgac

SEQ ID NO: 524563 - DNA, 60 bp, Artificial
  Synthetic oligonucleotide
cggagctagggttgaactacgactttaacgatcgtacatacagtaaggaacaattgagct

SEQ ID NO: 524564 - DNA, 60 bp, Artificial
  Synthetic oligonucleotide
cggattggtcctctcagcacgaagactctttggttggcacagcggaagttgtagccaaat

SEQ ID NO: 524565 - DNA, 60 bp, Artificial
  Synthetic oligonucleotide
cgttcgatgttacgtttgaggactattggcgaacacagctaaactctaatcgattgtgtg

SEQ ID NO: 524566 - DNA, 60 bp, Artificial
  Synthetic oligonucleotide
tggtttgggctacggtggatacataatcacaaatcgtcacctattcaagaataacaatgg

SEQ ID NO: 524567 - DNA, 60 bp, Artificial
  Synthetic oligonucleotide
tggtggtttagtcacggtcattcatcaagggttagactccaccgctcagtgtttacaact

SEQ ID NO: 524568 - DNA, 60 bp, Artificial
  Synthetic oligonucleotide
gctaagacaaaacgcagtaggcaaaaacttaagttcaggcaagcacgtgataacaaatat

SEQ ID NO: 524569 - DNA, 60 bp, Artificial
  Synthetic oligonucleotide
ctcgtgagaaattttggagcattggaatgtgtgcaccatcaaactaaggagagtgtttct

SEQ ID NO: 524570 - DNA, 60 bp, Artificial
  Synthetic oligonucleotide
tggcttcgacccaactgaatattcctttgtgagatttgtggacccgctaacaggattggt

SEQ ID NO: 524571 - DNA, 60 bp, Artificial
  Synthetic oligonucleotide
gcggttagttgaagcgacactggacttaactcacacaggcgtcatacacgaaggaaaatc

SEQ ID NO: 524572 - DNA, 60 bp, Artificial
  Synthetic oligonucleotide
gcggtccagaaggagctctacgtgtatcctcccatgtaacctcgtacgctctttacattt

SEQ ID NO: 524573 - DNA, 60 bp, Artificial
  Synthetic oligonucleotide
ctgagcgacacacagcagaagacgtctctcgtgagatgcacaatctcatgggtgttcgta

SEQ ID NO: 524574 - DNA, 60 bp, Artificial
  Synthetic oligonucleotide
gcgctggtgagcgcattcaaaggcttggaagggttggtcggtttaaacccgggactgcta

SEQ ID NO: 524575 - DNA, 60 bp, Artificial
  Synthetic oligonucleotide
gcgcatgccaaaatccaagggtgctatcgctttaaatttagcccacttactcgagtatac

SEQ ID NO: 524576 - DNA, 60 bp, Artificial
  Synthetic oligonucleotide
cttgggaactggaaggttgatactggtatgagtaaggttagttcggtcgctgcaaggccg

SEQ ID NO: 524577 - DNA, 60 bp, Artificial
  Synthetic oligonucleotide
cttgttgttgcgtaactcatgataatggtgttgcgtatgaatcagcttacatggctccta

SEQ ID NO: 524578 - DNA, 60 bp, Artificial
  Synthetic oligonucleotide
gaaaaagcttcaagtcagcttagatatgcagtcatgggtgtcagtcacatagatcctgcg

SEQ ID NO: 524579 - DNA, 60 bp, Artificial
  Synthetic oligonucleotide
tcaaacgtttccggacactttctggcgtggtaaaccacttcatgagcgacagatcacacg

SEQ ID NO: 524580 - DNA, 60 bp, Artificial
  Synthetic oligonucleotide
ttggaagcgtcatggaacgagctgtcttggtcggaaaaattttatgcaagttggcattgg

SEQ ID NO: 524581 - DNA, 60 bp, Artificial
  Synthetic oligonucleotide
acatcatgacgactggctttgcattccattactacgcaaacaaccctgagcagttacgcg

SEQ ID NO: 524582 - DNA, 60 bp, Artificial
  Synthetic oligonucleotide
accattgtactcagtgtgacaacatctgtgcatcactcactatggctcgacctgtcaatc

SEQ ID NO: 524583 - DNA, 60 bp, Artificial
  Synthetic oligonucleotide
ttgaaccaggcgagttttcttacatccaatttgttgatccgttgactggagcacaaattg

SEQ ID NO: 524584 - DNA, 60 bp, Artificial
  Synthetic oligonucleotide
tattgctcaacctttgcgacccatcggaaaagcagatttgaggggcttgtacgacatatc

SEQ ID NO: 524585 - DNA, 60 bp, Artificial
  Synthetic oligonucleotide
acctcgacacttatagtaggcactattactagcttcgaatcacgagacggacggtccatt

SEQ ID NO: 524586 - DNA, 60 bp, Artificial
  Synthetic oligonucleotide
tatggtaggcaatattactagctttgaatcacgagacggacgatccaatgaatgttacta

SEQ ID NO: 524587 - DNA, 60 bp, Artificial
  Synthetic oligonucleotide
acgagttaagctccatactagcaaaatgcggcaacctagagtcaacggaatctctgtagt

SEQ ID NO: 524588 - DNA, 60 bp, Artificial
  Synthetic oligonucleotide
acgattaacttggcattaatgtgcgataatcagcttgattcaaacggcaacttcgtttgg

SEQ ID NO: 524589 - DNA, 60 bp, Artificial
  Synthetic oligonucleotide
acggctgaattggatgttgacaacagagcagtcatgtatcgaaaagtgagcatatcctac

SEQ ID NO: 524590 - DNA, 60 bp, Artificial
  Synthetic oligonucleotide
acgtaccaaggatcaccagagcaatatttcgatgagcgatttatgggtcagaatggacag

SEQ ID NO: 524591 - DNA, 60 bp, Artificial
  Synthetic oligonucleotide
acgtggagttgttgacggaccaaggagcatggagcactttaagagttacgttgtccgcgt

SEQ ID NO: 524592 - DNA, 60 bp, Artificial
  Synthetic oligonucleotide
acttccagttacaactcagaatgtctcagtgagcctcctttcacagtgcaccgtcaaaca

SEQ ID NO: 524593 - DNA, 60 bp, Artificial
  Synthetic oligonucleotide
acttcggcagatcatggcacacttcagtgatttggctgaggcatacattgaaaagcgcaa

SEQ ID NO: 524594 - DNA, 60 bp, Artificial
  Synthetic oligonucleotide
agaacagcgacttgctcataatatgaaactattgaggaaggcaagtgttgtaagcgctga

SEQ ID NO: 524595 - DNA, 60 bp, Artificial
  Synthetic oligonucleotide
agaacgagagacaaatcagaattgtggtacatgtcgacgagaggcatcaagatagatgga

SEQ ID NO: 524596 - DNA, 60 bp, Artificial
  Synthetic oligonucleotide
agacacgatccattttatgctaagccaacaattcgtatgcgtggcttgtcagcttttggt

SEQ ID NO: 524597 - DNA, 60 bp, Artificial
  Synthetic oligonucleotide
agacggtgtacccattagagccatttattcgcgcagctaaacccacattgcgagcgataa

SEQ ID NO: 524598 - DNA, 60 bp, Artificial
  Synthetic oligonucleotide
agaggttatcgtgtttgcaatgtaggcacaaattacttgacatgagttgggaagaataca

SEQ ID NO: 524599 - DNA, 60 bp, Artificial
  Synthetic oligonucleotide
ttctgggcaggagagtatgaggtcaaagtcgaccatgtccaacttcctactactttaaac

SEQ ID NO: 524600 - DNA, 60 bp, Artificial
  Synthetic oligonucleotide
agagttagggatagagatgttgatgctggaacagtagggacgtttatagtgccaagactt

SEQ ID NO: 524601 - DNA, 60 bp, Artificial
  Synthetic oligonucleotide
agatcacacgaggctgtagtggctttataatcagtagagctttcttaaatggatactact

SEQ ID NO: 524602 - DNA, 60 bp, Artificial
  Synthetic oligonucleotide
agatgagaactattctgagcacagttgaacaagatgcaccttttccgcgtatcgatttca

SEQ ID NO: 524603 - DNA, 60 bp, Artificial
  Synthetic oligonucleotide
tcgacagctcgttaactccatacctcataaacgcagttttggcaattcgagcaacttaca

SEQ ID NO: 524604 - DNA, 60 bp, Artificial
  Synthetic oligonucleotide
aaaactcaagttcagggatgcttatgaccggaagatgggtagagaggtgtatgcagatga

SEQ ID NO: 524605 - DNA, 60 bp, Artificial
  Synthetic oligonucleotide
tcgacacatggaacgcaaaatacgcgctgttgatcttggcacaaatgcaggagccaagaa

SEQ ID NO: 524606 - DNA, 60 bp, Artificial
  Synthetic oligonucleotide
aaaccacttagttataggaaacagtggggatgataagagcgttgaattgccagctaggga

SEQ ID NO: 524607 - DNA, 60 bp, Artificial
  Synthetic oligonucleotide
aaagatgacacttgctgatgtaccgaaagagagttcattcgacactgtggtggagcacga

SEQ ID NO: 524608 - DNA, 60 bp, Artificial
  Synthetic oligonucleotide
aaagccatgacttcgaagctatcacttccaaaagttaggggaaaagccatcatgaatctt

SEQ ID NO: 524609 - DNA, 60 bp, Artificial
  Synthetic oligonucleotide
aaaggcttgcgccactccatagatctaagaatcccttcaggcctacaagctctcattgta

SEQ ID NO: 524610 - DNA, 60 bp, Artificial
  Synthetic oligonucleotide
aacaagtgtgggaaccaatataggtccctacatgactttgaagagaatcatagctgcgat

SEQ ID NO: 524611 - DNA, 60 bp, Artificial
  Synthetic oligonucleotide
tccgaccatttctcaacactgggactgaattatgatttttcgtccaggacaaagcataaa

SEQ ID NO: 524612 - DNA, 60 bp, Artificial
  Synthetic oligonucleotide
aacatgatggaacgtagaggttttacagagtgtaactttgtgacggatacagaggagata

SEQ ID NO: 524613 - DNA, 60 bp, Artificial
  Synthetic oligonucleotide
tttgtgaaagacgtgccagataagatgcatgaggaagtatgggacgctatccaacaacac

SEQ ID NO: 524614 - DNA, 60 bp, Artificial
  Synthetic oligonucleotide
aaccgaattttggaggggatacacagacgcgtacgttgctaataggagtgaatcgtcgac

SEQ ID NO: 524615 - DNA, 60 bp, Artificial
  Synthetic oligonucleotide
aacgtttcggtccacgcgaggagtgtataagatgagaaattcagtggaagtgaagctaca

SEQ ID NO: 524616 - DNA, 60 bp, Artificial
  Synthetic oligonucleotide
tttctttcgacctctcatggggcactattcaaaaagtatactcagtaaagaagctttcgt

SEQ ID NO: 524617 - DNA, 60 bp, Artificial
  Synthetic oligonucleotide
aagcattacctggtcggtggaatgataggagttaactcgtttgaggaaggaagtctaaag

SEQ ID NO: 524618 - DNA, 60 bp, Artificial
  Synthetic oligonucleotide
aagggtgaatgattggacgtttttgcctgaggcgcacgggtacttcccgtcagagctcgt

SEQ ID NO: 524619 - DNA, 60 bp, Artificial
  Synthetic oligonucleotide
aagtatagaggtgatgctggttttggtagagtgtcaagtgcaagtgctgcaaagataagc

SEQ ID NO: 524620 - DNA, 60 bp, Artificial
  Synthetic oligonucleotide
tttctacgtgacacgtgataacgccattgatgtgggtcaggacatgtgcgacacgaagaa

SEQ ID NO: 524621 - DNA, 60 bp, Artificial
  Synthetic oligonucleotide
aagtgtgtcgaatgtatgcaaatggagatgatctactacttgcagtgaacccaacacatg

SEQ ID NO: 524622 - DNA, 60 bp, Artificial
  Synthetic oligonucleotide
tcgattacagtttatggaaccatggaacattggtgaacagatgcttaaaaatttatacac

SEQ ID NO: 524623 - DNA, 60 bp, Artificial
  Synthetic oligonucleotide
aatgggtcgtgcggaagtcttcttgtcgctgttaatgatcaccacgtggtcggtattcat

SEQ ID NO: 524624 - DNA, 60 bp, Artificial
  Synthetic oligonucleotide
aatgtgacaataatcctacatgggatttaaaatacccacgtttcaatggtacagtttgta

SEQ ID NO: 524625 - DNA, 60 bp, Artificial
  Synthetic oligonucleotide
tcaataaaagctgagttgaggccaattgaaaaagttcacgcgaataagacaagaacattc

SEQ ID NO: 524626 - DNA, 60 bp, Artificial
  Synthetic oligonucleotide
ttggcacaacgtagaattatggatacagcagcgagtgacttactggatgttacatgtgat

SEQ ID NO: 524627 - DNA, 60 bp, Artificial
  Synthetic oligonucleotide
ttggaaggcatgtgtcgataacgcacacatagttaggcttaatcctctaagcagtgctaa

SEQ ID NO: 524628 - DNA, 60 bp, Artificial
  Synthetic oligonucleotide
aggcaagatggagccaccccagattatcacgttggcgatgacatacgtcctggaatgcac

SEQ ID NO: 524629 - DNA, 60 bp, Artificial
  Synthetic oligonucleotide
aggtaattcagttgatccgaaaattgttgatctaccacagactgatccgccaagcatgta

SEQ ID NO: 524630 - DNA, 60 bp, Artificial
  Synthetic oligonucleotide
tacggagaggcacactgcgactgatgttactagaaatatacataacctcttaggaatgag

SEQ ID NO: 524631 - DNA, 60 bp, Artificial
  Synthetic oligonucleotide
aggaatgggtcgaaaaactaggaatttcatccatatgtatggggtcgagccagaaaatta

SEQ ID NO: 524632 - DNA, 60 bp, Artificial
  Synthetic oligonucleotide
ttattgacagaggtcataaagttactaacgttgatgggcgtaccatgaaagttggcaacg

SEQ ID NO: 524633 - DNA, 60 bp, Artificial
  Synthetic oligonucleotide
ttatcaagcggccagcaaaactagcaccagttagatgccacgcaactttagcgcaagcca

SEQ ID NO: 524634 - DNA, 60 bp, Artificial
  Synthetic oligonucleotide
ttcaagggagatcgctgaactaggtttgacatacgaattcgatgacttgacagctgacat

SEQ ID NO: 524635 - DNA, 60 bp, Artificial
  Synthetic oligonucleotide
agtgactcacgccgcataacatattcaaagacaaacattagttatggcgagcgtattcaa

SEQ ID NO: 524636 - DNA, 60 bp, Artificial
  Synthetic oligonucleotide
taccagctcaacaaggcaaacactcatgcgagtttgcctgatccggtaacttgccacgtg

SEQ ID NO: 524637 - DNA, 60 bp, Artificial
  Synthetic oligonucleotide
agttatagctgtgacacatgagaagaagcttatacacatctgtgatcagagaggagttcc

SEQ ID NO: 524638 - DNA, 60 bp, Artificial
  Synthetic oligonucleotide
agttggaaaaggtcaacgtgtagcgaagtgtttaaggagcggatcagtagaatttttgaa

SEQ ID NO: 524639 - DNA, 60 bp, Artificial
  Synthetic oligonucleotide
ataacaatggcatcctgaaggtccagtcacaacatggagactttgtcgtaaagaatacaa

SEQ ID NO: 524640 - DNA, 60 bp, Artificial
  Synthetic oligonucleotide
agctacatagtaggggttacgttgtgaacacaatggctatgcaggaaactaagaaaaaat

SEQ ID NO: 524641 - DNA, 60 bp, Artificial
  Synthetic oligonucleotide
agcagcgttagcttgttttgcatacaacttaccagtaatggctagtaatgtcacgacaag

SEQ ID NO: 524642 - DNA, 60 bp, Artificial
  Synthetic oligonucleotide
atagtggacagccatcgactgttgtggataacactctaatggttatgttggctatgcagt

SEQ ID NO: 524643 - DNA, 60 bp, Artificial
  Synthetic oligonucleotide
gtttgccacaccatttatcgaagaagggtaaagtcttattgttggaacccacaagaccgt

SEQ ID NO: 524644 - DNA, 60 bp, Artificial
  Synthetic oligonucleotide
ttaatagaggccactctagaccttacaggagttggtgtaatacacgaaaacaaatctcgc

SEQ ID NO: 524645 - DNA, 60 bp, Artificial
  Synthetic oligonucleotide
tgttcaggaaatagaacattatgcagacccacaggcagctgatttttggaggggatacac

SEQ ID NO: 524646 - DNA, 60 bp, Artificial
  Synthetic oligonucleotide
atgcagatgattacacaatggagcgaacgtttggggaggcatacactaagcgaggcaaga

SEQ ID NO: 524647 - DNA, 60 bp, Artificial
  Synthetic oligonucleotide
agcaagaagtatgttagagctcctcgaaagcacatcgatgatgaatgatgagctacatag

SEQ ID NO: 524648 - DNA, 59 bp, Artificial
  Synthetic oligonucleotide
tgggtggcatttggttaacttacgagcatctgcttaggggtcatcaggaagatgtcaca

SEQ ID NO: 524649 - DNA, 59 bp, Artificial
  Synthetic oligonucleotide
tcactgcaaaaactctcagcactaacacgccgatggtaaagtgcactgatccgttcgac

SEQ ID NO: 524650 - DNA, 59 bp, Artificial
  Synthetic oligonucleotide
ctaagaaatccacaaaattggactatgtcacaaggagtcacaaaatttgtgcacgcgtt

SEQ ID NO: 524651 - DNA, 59 bp, Artificial
  Synthetic oligonucleotide
ggaaaaatgctcattaatcatgcggtcatccaggtatatgcgttgtatacaaggtacat

SEQ ID NO: 524652 - DNA, 59 bp, Artificial
  Synthetic oligonucleotide
gactaaacacaaagaggaattgtggtttatgtctcatagaggtcttgaaattgaaggca

SEQ ID NO: 524653 - DNA, 59 bp, Artificial
  Synthetic oligonucleotide
ggagcacgaagcaaagtctatgttaacgggtctagtggattacacacctatagccaatc

SEQ ID NO: 524654 - DNA, 59 bp, Artificial
  Synthetic oligonucleotide
ggttaacatgccacaacaaacatctttcgccgagtgcgataaagttgttaagtgtgtga

SEQ ID NO: 524655 - DNA, 58 bp, Artificial
  Synthetic oligonucleotide
gtgaaagatttaatgaagtactccaaaccaatagttgttggaactgttgattgtgagc

SEQ ID NO: 524656 - DNA, 58 bp, Artificial
  Synthetic oligonucleotide
atatgcttaacatcgtggtgtctctggtgtgctaacaatggtacatcatctgagttag

SEQ ID NO: 524657 - DNA, 58 bp, Artificial
  Synthetic oligonucleotide
caccgcacagaggctatttgtgcttcaatgattgaagcgtggggctatcccgaccttc

SEQ ID NO: 524658 - DNA, 58 bp, Artificial
  Synthetic oligonucleotide
ggtcagcgcgaacttgcgattggttctctcatcgtgcccatgaatttggatcgagcac

SEQ ID NO: 524659 - DNA, 58 bp, Artificial
  Synthetic oligonucleotide
tgctacagaggcagcattcctctcttttgcgtatggattgcctgtcacaacacaaagc

SEQ ID NO: 524660 - DNA, 58 bp, Artificial
  Synthetic oligonucleotide
gatgagaatgatttcctaatccgaggtaatgttgggtcaggtaaatcaacgggtctac

SEQ ID NO: 524661 - DNA, 57 bp, Artificial
  Synthetic oligonucleotide
gcgttttcgcttacaggaatctgcaacatgctggcctcaaggtacatgaaggatcac

SEQ ID NO: 524662 - DNA, 57 bp, Artificial
  Synthetic oligonucleotide
cctcatttgagcatgtgcagcaattcgtcgacgttacgaaaaacattgcatctcata

SEQ ID NO: 524663 - DNA, 57 bp, Artificial
  Synthetic oligonucleotide
ggaggtccatctccacagctagaagtgctctcaaacgctatccagtatggcgaagta

SEQ ID NO: 524664 - DNA, 57 bp, Artificial
  Synthetic oligonucleotide
caacaacaggacttatcgaacacccgagcaaccagggctgaattcgatagatggtat

SEQ ID NO: 524665 - DNA, 57 bp, Artificial
  Synthetic oligonucleotide
gtcacttacggtgagcgcattcaaagacttggtcgggttggtaggtgcaagccgggg

SEQ ID NO: 524666 - DNA, 57 bp, Artificial
  Synthetic oligonucleotide
ttcttcccagacacactgagtgctgagctcccaagaatacttgtcgaccacaacacg

SEQ ID NO: 524667 - DNA, 57 bp, Artificial
  Synthetic oligonucleotide
gaaaattgttcagggagcttgggcttaattacgatttttcatcaagaacaaatgaca

SEQ ID NO: 524668 - DNA, 57 bp, Artificial
  Synthetic oligonucleotide
ctaagcatgagaacaacaaatatcataggactgacataactacatgtgagttcttcg

SEQ ID NO: 524669 - DNA, 56 bp, Artificial
  Synthetic oligonucleotide
cgattatgtaaaggttccatactttatacgaggcattcctgagaaagtgtattcag

SEQ ID NO: 524670 - DNA, 56 bp, Artificial
  Synthetic oligonucleotide
tgatgaagaatcaatccttgcgtcactcaacatgaaggcagccgttggagctctct

SEQ ID NO: 524671 - DNA, 56 bp, Artificial
  Synthetic oligonucleotide
acttcgttttctatgacggcacgatgcatccagcgattcatgaagctctgaagaaa

SEQ ID NO: 524672 - DNA, 56 bp, Artificial
  Synthetic oligonucleotide
cattgcaagggaaggatattgttacctgaacattttcttagcaatgcttgtaaatg

SEQ ID NO: 524673 - DNA, 56 bp, Artificial
  Synthetic oligonucleotide
gaacgtttccactaggttgtttggcctggatggaaatgtttcaaccactggcgaga

SEQ ID NO: 524674 - DNA, 56 bp, Artificial
  Synthetic oligonucleotide
gaactacccccgcaaattgtctcgaccatatctattgcaggaggagtagctccgag

SEQ ID NO: 524675 - DNA, 56 bp, Artificial
  Synthetic oligonucleotide
tcatcaaattccaaccgtttctggaatgtgtggtgctccagtaattgacgttgcaa

SEQ ID NO: 524676 - DNA, 55 bp, Artificial
  Synthetic oligonucleotide
gtttgcaacaaaatccatacgacatcacaacatgagttcctcatacgcggtggag

SEQ ID NO: 524677 - DNA, 55 bp, Artificial
  Synthetic oligonucleotide
gccaagcttatctgatgtggcaacaacgtgtgctcagctacgtataatatttcct

SEQ ID NO: 524678 - DNA, 55 bp, Artificial
  Synthetic oligonucleotide
gccaagatacggacttcagcgcaatctcaccgactacagcttagcacggtatgca

SEQ ID NO: 524679 - DNA, 55 bp, Artificial
  Synthetic oligonucleotide
gccaaccagaccactaacggaaaacgtagcaagacatttaagtggtgctccattc

SEQ ID NO: 524680 - DNA, 55 bp, Artificial
  Synthetic oligonucleotide
gcagtggatcaggcaccaaattgacaccaaagcaacgcaagcgagcttgctattg

SEQ ID NO: 524681 - DNA, 55 bp, Artificial
  Synthetic oligonucleotide
ggtagatctcacaccacacaacccgttacttgcatgtgagagacataacacaata

SEQ ID NO: 524682 - DNA, 55 bp, Artificial
  Synthetic oligonucleotide
ggtagagttctattgattgaacccaccagaccattagcagagaacgttcatcggc

SEQ ID NO: 524683 - DNA, 55 bp, Artificial
  Synthetic oligonucleotide
gccaaggtatggcctacagaggaatttgactgatatgagtcttgcgcggtatgca

SEQ ID NO: 524684 - DNA, 55 bp, Artificial
  Synthetic oligonucleotide
gtgtcgcatcgcgtgggtggaaaactgtgggattctatagtgtatctggacatac

SEQ ID NO: 524685 - DNA, 55 bp, Artificial
  Synthetic oligonucleotide
gccacatgtgcaagcgttaatgcgcactatcgccatcgaacgagagaagcggcaa

SEQ ID NO: 524686 - DNA, 55 bp, Artificial
  Synthetic oligonucleotide
gccagttgaaactagctgtgatgggcttaagtcatgtcgacccagctaagcgatt

SEQ ID NO: 524687 - DNA, 55 bp, Artificial
  Synthetic oligonucleotide
ggtacgacgctgtaaaaggtgagtatggtctcaacgacgagagtatggctctcgc

SEQ ID NO: 524688 - DNA, 55 bp, Artificial
  Synthetic oligonucleotide
gcctaccataaatctagaaatgtgtggcaagcgtatggccttgttggaagttctc

SEQ ID NO: 524689 - DNA, 55 bp, Artificial
  Synthetic oligonucleotide
gcctgacgactttgaacaacgtcgagcagactttgaggagcataccgagtggatc

SEQ ID NO: 524690 - DNA, 55 bp, Artificial
  Synthetic oligonucleotide
tacatgatatgtatgaggagtgccagcattttgttaaaacatatgctagcgttgc

SEQ ID NO: 524691 - DNA, 55 bp, Artificial
  Synthetic oligonucleotide
gcgaccaactgtggcgttacaatttagagactaaaccagggcaatgtggtgggct

SEQ ID NO: 524692 - DNA, 55 bp, Artificial
  Synthetic oligonucleotide
gttggtagtaacgaagtttgtttacaggcaacaacccaaagtaagaagtggatgt

SEQ ID NO: 524693 - DNA, 55 bp, Artificial
  Synthetic oligonucleotide
gttggatgagcaatccatcactgacataactttagtgcaagaccactttgggcgg

SEQ ID NO: 524694 - DNA, 55 bp, Artificial
  Synthetic oligonucleotide
gttggttcctcaaacacaaagcaactacagatcaccagtgtgaatcaaatctacc

SEQ ID NO: 524695 - DNA, 55 bp, Artificial
  Synthetic oligonucleotide
ggtcgttacaatatctcaccacgtgtgcttgtcacaaacgcttctgaagtgagca

SEQ ID NO: 524696 - DNA, 55 bp, Artificial
  Synthetic oligonucleotide
gatcaagagaggatttgtggttcatgtcacattgtggaataagcgttgagggtca

SEQ ID NO: 524697 - DNA, 55 bp, Artificial
  Synthetic oligonucleotide
gatcagcgttttctgacacagtttcgacgtcatcgtttactatagcaggaatcac

SEQ ID NO: 524698 - DNA, 55 bp, Artificial
  Synthetic oligonucleotide
gatccctatgttctactgttaagtatcctgtctccaagggttcttttggctttgt

SEQ ID NO: 524699 - DNA, 55 bp, Artificial
  Synthetic oligonucleotide
tgcgcgacaacaagacaaggacgttaatgttggaacgttctctgtagcacgagtg

SEQ ID NO: 524700 - DNA, 55 bp, Artificial
  Synthetic oligonucleotide
gatgtgcattgcgcatcggtcatacagagaaaggtttgagcgaagttcctagcag

SEQ ID NO: 524701 - DNA, 55 bp, Artificial
  Synthetic oligonucleotide
gattaaacagtggagatacaacccagacgaagtctgttggggctcactacaactt

SEQ ID NO: 524702 - DNA, 55 bp, Artificial
  Synthetic oligonucleotide
gttgcgactgaagcagcgttcttaagtttcgcatttggactccctgtgatgacga

SEQ ID NO: 524703 - DNA, 55 bp, Artificial
  Synthetic oligonucleotide
gatttcggccacaccacctgggcgcgaatgtgagttcaccacgcaacatccagtt

SEQ ID NO: 524704 - DNA, 55 bp, Artificial
  Synthetic oligonucleotide
gttgacgaaattagcttgagaactgaagttgtaggggctgtgatttctgagaagc

SEQ ID NO: 524705 - DNA, 55 bp, Artificial
  Synthetic oligonucleotide
gttgtgagtttattgctttcgatcgccagagaatttcaacgtctattgcttgcgc

SEQ ID NO: 524706 - DNA, 55 bp, Artificial
  Synthetic oligonucleotide
gttatgccaaatactacgcaaattcaggtatcgccgtgttctcagagagacattg

SEQ ID NO: 524707 - DNA, 55 bp, Artificial
  Synthetic oligonucleotide
gttataggaaacagtgggaatgataagagcgttgaattgccagctagggaggatg

SEQ ID NO: 524708 - DNA, 55 bp, Artificial
  Synthetic oligonucleotide
tcataccgaaaggttagtatatcttacggagagagaattcagagacttgggcgag

SEQ ID NO: 524709 - DNA, 55 bp, Artificial
  Synthetic oligonucleotide
gcaacaatcttgtttggctctttccctgttgacgtggccccatacatgaatggag

SEQ ID NO: 524710 - DNA, 55 bp, Artificial
  Synthetic oligonucleotide
tcataccaagtggaaagatcacatgtgatatgtgtgctagagctgtgcctgattc

SEQ ID NO: 524711 - DNA, 55 bp, Artificial
  Synthetic oligonucleotide
gcaatcccgaatagaggagttacaggatggttgactgttacagactatgtgagga

SEQ ID NO: 524712 - DNA, 55 bp, Artificial
  Synthetic oligonucleotide
ggtaggtttaaacctggcgttgcagtgaggattggtcacactgagaaaggcttag

SEQ ID NO: 524713 - DNA, 55 bp, Artificial
  Synthetic oligonucleotide
gcaattggcttaaagggagtatggaacaagaaacttctagcgcgagatttaatca

SEQ ID NO: 524714 - DNA, 55 bp, Artificial
  Synthetic oligonucleotide
gcaccagagatggagccattctcggattacatagtctctcaaactttgcacattc

SEQ ID NO: 524715 - DNA, 55 bp, Artificial
  Synthetic oligonucleotide
gtgttgtttgtcgcttgactaatgagtctgatggtcattccgcttcgctatatgg

SEQ ID NO: 524716 - DNA, 55 bp, Artificial
  Synthetic oligonucleotide
gcttatattcctccatcccaagccatagacaaccaaatggcttctggttctcaag

SEQ ID NO: 524717 - DNA, 55 bp, Artificial
  Synthetic oligonucleotide
gcttgtatcgggttacaaggacgatggaatgcttcacttatacaacgcgatctcc

SEQ ID NO: 524718 - DNA, 55 bp, Artificial
  Synthetic oligonucleotide
gggatccgcagtgggttcatattcgctatcccatgttgaagttcggtgtggggta

SEQ ID NO: 524719 - DNA, 55 bp, Artificial
  Synthetic oligonucleotide
ggaaaactcggtgtttggactggctcattaaagtcagagttgagacccatggaaa

SEQ ID NO: 524720 - DNA, 55 bp, Artificial
  Synthetic oligonucleotide
ggaaacagtggggatgataagagcgttgaattgccagctagggaggatggacaca

SEQ ID NO: 524721 - DNA, 55 bp, Artificial
  Synthetic oligonucleotide
ggaacacggagccccgcatgttattgaggctgtgcaaaacgtcaaacagaagcat

SEQ ID NO: 524722 - DNA, 55 bp, Artificial
  Synthetic oligonucleotide
ggaacatctccaaatctgaatggagagtggacaatgatggatggagatgagcaag

SEQ ID NO: 524723 - DNA, 55 bp, Artificial
  Synthetic oligonucleotide
ggaattgttgaagaggtgagctatgaaagcaaagctatgtgtcggggactgcgtg

SEQ ID NO: 524724 - DNA, 55 bp, Artificial
  Synthetic oligonucleotide
tgcagcgcttaaagttgatttaacaccacacaatccgttgaaagcatgcgatcgc

SEQ ID NO: 524725 - DNA, 55 bp, Artificial
  Synthetic oligonucleotide
gtcgagcttcatgagggtgatgtatcacgggtgaatcttggcgtgaattacgaag

SEQ ID NO: 524726 - DNA, 55 bp, Artificial
  Synthetic oligonucleotide
gtcattgcaggagtcatcacgataactacatgtatggctgggtttacatactggt

SEQ ID NO: 524727 - DNA, 55 bp, Artificial
  Synthetic oligonucleotide
ggactggttacggtcattcaccaaggattggactccatcgctcaatgtctacagc

SEQ ID NO: 524728 - DNA, 55 bp, Artificial
  Synthetic oligonucleotide
gtagacaactacaaggggcaccgttcaatgtaagtcctacgctacagatgagagg

SEQ ID NO: 524729 - DNA, 55 bp, Artificial
  Synthetic oligonucleotide
ggacttcagcgaaacttaaccgactttagccttgcacgctatgcatttgatttct

SEQ ID NO: 524730 - DNA, 55 bp, Artificial
  Synthetic oligonucleotide
tgcacactgcggaagttcaactagtagattcgttgagtggtgattgtcgcacgaa

SEQ ID NO: 524731 - DNA, 55 bp, Artificial
  Synthetic oligonucleotide
ggatatgcaagtattatagaggatggaatgagtttatggccaagcttccgactgg

SEQ ID NO: 524732 - DNA, 55 bp, Artificial
  Synthetic oligonucleotide
taggtgaacggaatgatggtgttttccgccacattaacaagcttaatgacttgtg

SEQ ID NO: 524733 - DNA, 55 bp, Artificial
  Synthetic oligonucleotide
taccgaaacttgaaccagagcgaatcgtttcaatcctcgaatgggacagagcggt

SEQ ID NO: 524734 - DNA, 55 bp, Artificial
  Synthetic oligonucleotide
ggatggttgtgtgttgggcatacatagtttgaccaatcaagagcacgcggtcaat

SEQ ID NO: 524735 - DNA, 55 bp, Artificial
  Synthetic oligonucleotide
ggatttcgatcgagctaggctagcattgcagggcgaaagcataacaagggagtca

SEQ ID NO: 524736 - DNA, 55 bp, Artificial; identical to SEQ ID NO: 422278
  Synthetic oligonucleotide

SEQ ID NO: 524737 - DNA, 55 bp, Artificial
  Synthetic oligonucleotide
ggcaagatcaagtgcacacaactcaattgagcaagggtgatagtggtactgttct

SEQ ID NO: 524738 - DNA, 55 bp, Artificial
  Synthetic oligonucleotide
ggcggctgggcctctgatggagataatggtcaatggagtgaagacccaattctca

SEQ ID NO: 524739 - DNA, 55 bp, Artificial
  Synthetic oligonucleotide
ggcaataacagcgggcaaccctcaactgttgtcgataacacgctaatggtcatcc

SEQ ID NO: 524740 - DNA, 55 bp, Artificial
  Synthetic oligonucleotide
ggcacaacattgccagagaccgtcaaaattcctttctttgtgaaagacgtgccag

SEQ ID NO: 524741 - DNA, 55 bp, Artificial
  Synthetic oligonucleotide
ggcagtgatatgagcagcaatgagctacacgagtgttcggactgtgtacgcgagt

SEQ ID NO: 524742 - DNA, 55 bp, Artificial
  Synthetic oligonucleotide
tacatgccagaccccgaggaattgtataacactcgcgctacgcacgaacaactga

SEQ ID NO: 524743 - DNA, 55 bp, Artificial; identical to SEQ ID NO: 411987
  Synthetic oligonucleotide

SEQ ID NO: 524744 - DNA, 55 bp, Artificial
  Synthetic oligonucleotide
gcgagcggattgaaccagaatcactcacttctgcgtgtacaagcaagcttaacgg

SEQ ID NO: 524745 - DNA, 55 bp, Artificial
  Synthetic oligonucleotide
gcgcacgtacaaggtaaagatagtgcgttccaatgccacaatgttaccacatcag

SEQ ID NO: 524746 - DNA, 55 bp, Artificial
  Synthetic oligonucleotide
gtggcaaccaaacctcgacaaccctcgtgacgttaggaagagcatggaattgttc

SEQ ID NO: 524747 - DNA, 55 bp, Artificial
  Synthetic oligonucleotide
gcgcgtcaccagtggcaacggagcacacacaagcgatgaaatcactcatggatgg

SEQ ID NO: 524748 - DNA, 55 bp, Artificial
  Synthetic oligonucleotide
ggggctatgatgaactactcgcaaggattagaagattttacgcttggatcctgga

SEQ ID NO: 524749 - DNA, 55 bp, Artificial
  Synthetic oligonucleotide
gcggacaacatgtatgttaagattcttgcatggatatctctcttcgttggctgct

SEQ ID NO: 524750 - DNA, 55 bp, Artificial
  Synthetic oligonucleotide
gcggcgttgataaacgtgcaagagtcggatgcaaaagactacacgcaaatggtca

SEQ ID NO: 524751 - DNA, 55 bp, Artificial
  Synthetic oligonucleotide
ggggattggactaagggctggaagttcaatgcgaacacaattgcttggggttcgt

SEQ ID NO: 524752 - DNA, 55 bp, Artificial
  Synthetic oligonucleotide
gtgctgcaacccgcatttatgcaagtgggtactataccagtgaatgatattgccc

SEQ ID NO: 524753 - DNA, 55 bp, Artificial
  Synthetic oligonucleotide
gggctctggaacacaacagcaagttacttcgtagagctcaggtggtggacatcaa

SEQ ID NO: 524754 - DNA, 55 bp, Artificial
  Synthetic oligonucleotide
tagatgtggattcacgcagcgtctcatacaataaggtgaatgtcagctacgggga

SEQ ID NO: 524755 - DNA, 55 bp, Artificial
  Synthetic oligonucleotide
gcgtaagcataaagggaacaatagtggtcaaccttcaaccgtggtcgataacaca

SEQ ID NO: 524756 - DNA, 55 bp, Artificial
  Synthetic oligonucleotide
gctaaatagggtgattgttttagtttcatgaactacaacaagtgacctatttagc

SEQ ID NO: 524757 - DNA, 55 bp, Artificial
  Synthetic oligonucleotide
gtgcaacccacgcttgattgtgacaatcgcatggtctcataccggaaggtcagta

SEQ ID NO: 524758 - DNA, 55 bp, Artificial
  Synthetic oligonucleotide
tagcacaattaccaagtcaactcgtgactaagcatgtagttaaaggggagtgcgc

SEQ ID NO: 524759 - DNA, 55 bp, Artificial
  Synthetic oligonucleotide
gctacttgaaatgcaaccctttgctagcttggcaaaggagggctcagctccgtac

SEQ ID NO: 524760 - DNA, 55 bp, Artificial
  Synthetic oligonucleotide
gctgatgtttctagtaactatgatgcattcgctgagattcagggaattactgggg

SEQ ID NO: 524761 - DNA, 55 bp, Artificial
  Synthetic oligonucleotide
gtgaggcctgatttgttaccaacactcatgaagatcattaaccaaagagaagatg

SEQ ID NO: 524762 - DNA, 55 bp, Artificial
  Synthetic oligonucleotide
gggcactttcgcagttccaaaggtcaaatctattcatgagaagatgttacttcct

SEQ ID NO: 524763 - DNA, 55 bp, Artificial
  Synthetic oligonucleotide
gctgtcctgacttgcttgcacacgtactatcacgtaaacatagccctcgagtaac

SEQ ID NO: 524764 - DNA, 55 bp, Artificial
  Synthetic oligonucleotide
gcttacctcttgtaagcacagttgatggtgcgattctaggggttcatagtttgtc

SEQ ID NO: 524765 - DNA, 55 bp, Artificial
  Synthetic oligonucleotide
gggcaatgtggtagcccgtttgttagcacaagagatggggctattgttgggatac

SEQ ID NO: 524766 - DNA, 55 bp, Artificial
  Synthetic oligonucleotide
gcttagtgaggtgttacctctacctttgcattggagaaggggtctttctattacg

SEQ ID NO: 524767 - DNA, 55 bp, Artificial
  Synthetic oligonucleotide
gtgaggatcggtataagcgaactggtttaatggggcaggatgaatcgagctatca

SEQ ID NO: 524768 - DNA, 55 bp, Artificial
  Synthetic oligonucleotide
cccagcatatgagagcatatatgatgaactccaagagttattttctcagcttgga

SEQ ID NO: 524769 - DNA, 55 bp, Artificial
  Synthetic oligonucleotide
ccatctggtgattggaaattcgggcgatccgaaatatgtagatatgccagcagag

SEQ ID NO: 524770 - DNA, 55 bp, Artificial
  Synthetic oligonucleotide
ccatctggtcagttctcatgtgccaaatgtgatttggtgcaaccagattacgagg

SEQ ID NO: 524771 - DNA, 55 bp, Artificial; identical to SEQ ID NO: 355292
  Synthetic oligonucleotide

SEQ ID NO: 524772 - DNA, 55 bp, Artificial
  Synthetic oligonucleotide
ccaccacaacgcaggtctgactgaagagcaacaattggctcttagaatcaaaatt

SEQ ID NO: 524773 - DNA, 55 bp, Artificial
  Synthetic oligonucleotide
ccacaagtcttcttggttcgtgtaccgttaagcaggcgcgaaccatgttacaatt

SEQ ID NO: 524774 - DNA, 55 bp, Artificial
  Synthetic oligonucleotide
ccacaagactacaatctaattcgatttgtggatccacttacgggtgcaactcttg

SEQ ID NO: 524775 - DNA, 55 bp, Artificial
  Synthetic oligonucleotide
ccaatacagggaagaaattaggtacgctatggatcatgaccttggagctgtttgt

SEQ ID NO: 524776 - DNA, 55 bp, Artificial
  Synthetic oligonucleotide
ccaaatgagcactactacaacttgctcgaggcattccgtaatggtgtttcgtaca

SEQ ID NO: 524777 - DNA, 55 bp, Artificial
  Synthetic oligonucleotide
catgaatacaagtttgtgcaaatggatgaatgtcatgagttccaagcgcacatga

SEQ ID NO: 524778 - DNA, 55 bp, Artificial
  Synthetic oligonucleotide
catctgtcattgcatattgtgggcgaatgaggacgagtgcaaaaggattagtgga

SEQ ID NO: 524779 - DNA, 55 bp, Artificial
  Synthetic oligonucleotide
catctgaccccttaattggttcttcatttgggtgatcgtaaatgtgtagagggag

SEQ ID NO: 524780 - DNA, 55 bp, Artificial
  Synthetic oligonucleotide
catcgctgaatcgtatatcgtgatgcggaatcaaacagagcgttatatgccacga

SEQ ID NO: 524781 - DNA, 55 bp, Artificial
  Synthetic oligonucleotide
catagtgcctgaaggggtcggatcattttggatccactggatatcaacccaagac

SEQ ID NO: 524782 - DNA, 55 bp, Artificial
  Synthetic oligonucleotide
caggaacgtttattcaagttggcaagagattagatcgagaacaaccacccaatgc

SEQ ID NO: 524783 - DNA, 55 bp, Artificial
  Synthetic oligonucleotide
caggaaccgtcatcaggatcgggacaaccataaaagggcttcaggagataccagc

SEQ ID NO: 524784 - DNA, 55 bp, Artificial
  Synthetic oligonucleotide
cagcttcgctcactatgacgccgcatgtgctccaagcagaaacagccttgaggag

SEQ ID NO: 524785 - DNA, 55 bp, Artificial
  Synthetic oligonucleotide
tgtgttgatgatttcaacggccaattttactcgcagcatttgaatggaccgtgga

SEQ ID NO: 524786 - DNA, 55 bp, Artificial
  Synthetic oligonucleotide
cgaactgataacataaagaaaggtgacattgcatctttccggaacaagttgtcag

SEQ ID NO: 524787 - DNA, 55 bp, Artificial
  Synthetic oligonucleotide
cctttaatggggcactatgacaaaagcgcactaaacaaagctgcctatatacgtg

SEQ ID NO: 524788 - DNA, 55 bp, Artificial
  Synthetic oligonucleotide
ccttctttgagcatgaggctagtctccttatgcaagaggcgccgaaaacttataa

SEQ ID NO: 524789 - DNA, 55 bp, Artificial
  Synthetic oligonucleotide
ccttctaagggctatggagcatatgaggttaggaagaatccaaacggaataagga

SEQ ID NO: 524790 - DNA, 55 bp, Artificial
  Synthetic oligonucleotide
ccttcggtgaggtatacgagtttgacagctccttcaaccgctgccctgagtgtga

SEQ ID NO: 524791 - DNA, 55 bp, Artificial
  Synthetic oligonucleotide
ccttaacatacgtctggcgtttatggaggaatgggatatcggtgagcagatgctg

SEQ ID NO: 524792 - DNA, 55 bp, Artificial
  Synthetic oligonucleotide
ccttaaatgtccgtggagtgttggaatgaccaagttctacggtggttggaattca

SEQ ID NO: 524793 - DNA, 55 bp, Artificial
  Synthetic oligonucleotide
tgtagttgggaaccgagctccttgttggtgtctagttgcagagaggttctcctcg

SEQ ID NO: 524794 - DNA, 55 bp, Artificial
  Synthetic oligonucleotide
ccgtcgtggacaatacactgatggttgtgttggccgtctactacactttgctgaa

SEQ ID NO: 524795 - DNA, 55 bp, Artificial
  Synthetic oligonucleotide
ccgtacgatctcgtcaaggcattatatttaacagatgcggtaacattgatgaccg

SEQ ID NO: 524796 - DNA, 55 bp, Artificial
  Synthetic oligonucleotide
ccggtccaagattcgtgctatgtcaaaattggtaataaaccgatcgtagcttgcg

SEQ ID NO: 524797 - DNA, 55 bp, Artificial
  Synthetic oligonucleotide
ccgagcttcgatcaatggagaaggtgttgagtaacaagacgagatcatttacagc

SEQ ID NO: 524798 - DNA, 55 bp, Artificial
  Synthetic oligonucleotide
ccgacagctgccaaagcaccaacggttttatatgttgtaaaccacgcccaagagt

SEQ ID NO: 524799 - DNA, 55 bp, Artificial
  Synthetic oligonucleotide
ccgacaagaaattaacagtcgattttgacacaactcaagatcttccagcagacac

SEQ ID NO: 524800 - DNA, 55 bp, Artificial
  Synthetic oligonucleotide
cccgtgagatgcacaatctcatgggtgttcgtatggtttagtcgcactgggcacc

SEQ ID NO: 524801 - DNA, 55 bp, Artificial
  Synthetic oligonucleotide
cccgaaaccagctagtcacgaagcatgtggtgaagggtaagtgcctactcttcga

SEQ ID NO: 524802 - DNA, 55 bp, Artificial
  Synthetic oligonucleotide
cccatcacggttatgacttatggttatgcattgaatcacttccattacaaccctc

SEQ ID NO: 524803 - DNA, 55 bp, Artificial
  Synthetic oligonucleotide
cccatcacaattatgacatccggttttgcactccatatgtatgcgaataatcctg

SEQ ID NO: 524804 - DNA, 55 bp, Artificial
  Synthetic oligonucleotide
cccatactatgttcgagacgtcccagacaagctttacgcagatatttacgaagtc

SEQ ID NO: 524805 - DNA, 55 bp, Artificial
  Synthetic oligonucleotide
atgatgtgcgtagaggaatgcactccttacagggtgcacgcttctgagcctttag

SEQ ID NO: 524806 - DNA, 55 bp, Artificial
  Synthetic oligonucleotide
atcagtgccattcagtgatgtagaagccattagagattatggtcatatgtcaact

SEQ ID NO: 524807 - DNA, 55 bp, Artificial
  Synthetic oligonucleotide
ttacacgatgtatggagtcgatcccactgaatattcaataatacgatatgtggac

SEQ ID NO: 524808 - DNA, 55 bp, Artificial
  Synthetic oligonucleotide
agttataatgaggttgatcaacttagtgctttactcatcgctagagggtaccgcg

SEQ ID NO: 524809 - DNA, 55 bp, Artificial
  Synthetic oligonucleotide
aggcattgattaaagtgaacacactaacgccgtcagacgcattaaaggcaagcgc

SEQ ID NO: 524810 - DNA, 55 bp, Artificial
  Synthetic oligonucleotide
aggaggtgcctaagtcggtagcaactgaagccgctctgctgtgttttgcatacgg

SEQ ID NO: 524811 - DNA, 55 bp, Artificial
  Synthetic oligonucleotide
agaggttatcggaaacaatcgttgaaggaatacgttcacaaatggcttgcgaggg

SEQ ID NO: 524812 - DNA, 55 bp, Artificial
  Synthetic oligonucleotide
agacgcagtgcacacaatcctgcgcactcccggtgttagcactaggatccccagg

SEQ ID NO: 524813 - DNA, 55 bp, Artificial
  Synthetic oligonucleotide
acttccgcgaatccttgttgatcacacgaataaaacaatgcatgtggtagactcg

SEQ ID NO: 524814 - DNA, 55 bp, Artificial
  Synthetic oligonucleotide
acgaatggacacttgtttaggcgcaataatggaatcttgactgtgcgcacatggc

SEQ ID NO: 524815 - DNA, 55 bp, Artificial
  Synthetic oligonucleotide
acctagaacatgtgggtaacacgctttctgtgctgtgtaaacatgcgaaaatgag

SEQ ID NO: 524816 - DNA, 55 bp, Artificial
  Synthetic oligonucleotide
acagaggatgggatgagtttatggccaagcttccgactggttggttgtattgtga

SEQ ID NO: 524817 - DNA, 55 bp, Artificial
  Synthetic oligonucleotide
tttacaaacgtagatgcaagcgaggaagagttggtaaagtatcatgagatgtacg

SEQ ID NO: 524818 - DNA, 55 bp, Artificial
  Synthetic oligonucleotide
tttcgagtcgtacaacggatataagtcaactgagcttcatgtcacacgttgggaa

SEQ ID NO: 524819 - DNA, 55 bp, Artificial
  Synthetic oligonucleotide
aagaggggcagtcggatcaggcaaatctactggtctgccgtttcatctgagtaag

SEQ ID NO: 524820 - DNA, 55 bp, Artificial
  Synthetic oligonucleotide
aaccatacatgccgcgatatggtttaaagagaaacttgcgtgacaaatcgctagc

SEQ ID NO: 524821 - DNA, 55 bp, Artificial
  Synthetic oligonucleotide
aaccagagctagccaggatacgcgcactgatccgcagtcaattcgattctgttcg

SEQ ID NO: 524822 - DNA, 55 bp, Artificial
  Synthetic oligonucleotide
ttttcagacgagtgagattctgccgaacccacaatcaacctgccccgtgaggagg

SEQ ID NO: 524823 - DNA, 55 bp, Artificial
  Synthetic oligonucleotide
aaacacgaaagacccactcatgatgacataggtcctggttggagtggagttgtac

SEQ ID NO: 524824 - DNA, 55 bp, Artificial
  Synthetic oligonucleotide
cagataaatggcagcaacacacaccatggattacgcgacattccgcaaaatcaac

SEQ ID NO: 524825 - DNA, 55 bp, Artificial
  Synthetic oligonucleotide
cagagacttgggcgagttggtcgccataaacctggtgttgcattgagaataggtc

SEQ ID NO: 524826 - DNA, 55 bp, Artificial
  Synthetic oligonucleotide
cagagacgcgcgcgacagaaagcttggccgcgaaatatatgccgatgactataca

SEQ ID NO: 524827 - DNA, 55 bp, Artificial
  Synthetic oligonucleotide
cactgagaaaggactgtgtgagattccgcagacagttgcgactgaagcagcgttc

SEQ ID NO: 524828 - DNA, 55 bp, Artificial
  Synthetic oligonucleotide
cacgtgaggtgtaccgatatatctctcatggatcccatgtgcagcgagtgtgggg

SEQ ID NO: 524829 - DNA, 55 bp, Artificial
  Synthetic oligonucleotide
cacgagtgaaggatacagacggcacattatccgtgagaaccctagaggaacacgc

SEQ ID NO: 524830 - DNA, 55 bp, Artificial
  Synthetic oligonucleotide
cacgaaatggatcagcaagctgctatggattgctccaatgaaacatttgctgctt

SEQ ID NO: 524831 - DNA, 55 bp, Artificial
  Synthetic oligonucleotide
cacccgagcaaccagggctgaatttgataggtggtatgaagcagtacagaaggaa

SEQ ID NO: 524832 - DNA, 55 bp, Artificial
  Synthetic oligonucleotide
cacaggcccttgtatctgatgtagcgagtgtttcactccattcgggttatagttc

SEQ ID NO: 524833 - DNA, 55 bp, Artificial
  Synthetic oligonucleotide
caatggacgaaaatcccagagttgacataagaattgtgcaggaagaattcggtga

SEQ ID NO: 524834 - DNA, 55 bp, Artificial
  Synthetic oligonucleotide
caatcgcaaccatgtggagagctagatatgcacaagattatacaagcgaaaatat

SEQ ID NO: 524835 - DNA, 55 bp, Artificial
  Synthetic oligonucleotide
caatcagtcaaggaaccgcgacaggtattgttccggccgttccgattgtgttccc

SEQ ID NO: 524836 - DNA, 55 bp, Artificial
  Synthetic oligonucleotide
caaggattggactccatcgctcaatgtttacagctcaaaggaaggtggaatggag

SEQ ID NO: 524837 - DNA, 55 bp, Artificial
  Synthetic oligonucleotide
caagcatggagcagataaagcattgaagatagatctaacgcctcataacccatta

SEQ ID NO: 524838 - DNA, 55 bp, Artificial
  Synthetic oligonucleotide
caagaggttcaaaagactgcagattttgtacgaaaggctcacagggaaacttggg

SEQ ID NO: 524839 - DNA, 55 bp, Artificial
  Synthetic oligonucleotide
caacctgtcaaaccagttgcaatctcagttaatgagctagtgaggaagactcttg

SEQ ID NO: 524840 - DNA, 55 bp, Artificial
  Synthetic oligonucleotide
caacccaaatggcacgaggaaattagcaataggcaaattaattgtctccacaaac

SEQ ID NO: 524841 - DNA, 55 bp, Artificial
  Synthetic oligonucleotide
caaagtttagttgacatgtgtactatccagcaagttcgtactatgcatcacttcg

SEQ ID NO: 524842 - DNA, 55 bp, Artificial
  Synthetic oligonucleotide
atgtcaatgctggagtcgagaggccaaacagacaacgtgaccaacctagttcgtc

SEQ ID NO: 524843 - DNA, 55 bp, Artificial
  Synthetic oligonucleotide
gaccaactgccaacagttgaacagtttgaggacgttgttaggagacttggcgacg

SEQ ID NO: 524844 - DNA, 55 bp, Artificial
  Synthetic oligonucleotide
gacatctcagctgtacctgtttacacgcaatctcgaacagatctatgggttcatg

SEQ ID NO: 524845 - DNA, 55 bp, Artificial
  Synthetic oligonucleotide
gaatgggtgcggaagtggagttataatcccgatgaggtgtgctggggaagtctcg

SEQ ID NO: 524846 - DNA, 55 bp, Artificial
  Synthetic oligonucleotide
gaatcacgtgtgttgtcttaggtttggctgtgtttatcgtccctgaccaaaccat

SEQ ID NO: 524847 - DNA, 55 bp, Artificial
  Synthetic oligonucleotide
gaagggaatctagtcgcatgtgggcaggccgacagtgctttagtgactaaacatg

SEQ ID NO: 524848 - DNA, 55 bp, Artificial
  Synthetic oligonucleotide
tggaatcgttcttttgacctagagagccaagctaataagatcaacgcggcatgga

SEQ ID NO: 524849 - DNA, 55 bp, Artificial
  Synthetic oligonucleotide
gaaatgctgaactcccaagaatactgattgatcattctacaaagactatgcacgt

SEQ ID NO: 524850 - DNA, 55 bp, Artificial
  Synthetic oligonucleotide
gaaagataatcgaggaggagccttttctgatcatgttatctgttgtgtctcccac

SEQ ID NO: 524851 - DNA, 55 bp, Artificial
  Synthetic oligonucleotide
gaaacagtttaacgataagttcacgagttgtccgggaagctatggctactatcac

SEQ ID NO: 524852 - DNA, 55 bp, Artificial
  Synthetic oligonucleotide
gaaacaaccaatatctcatggcgagcgaattcaacgattaggtcgagttggacga

SEQ ID NO: 524853 - DNA, 55 bp, Artificial
  Synthetic oligonucleotide
ctttgctaagccaattaccagaaggttgggtttattgtgatgctgatggatcccg

SEQ ID NO: 524854 - DNA, 55 bp, Artificial
  Synthetic oligonucleotide
ctttcggacacaagtgactcatcagagcttagatttggatgatcctcttactatt

SEQ ID NO: 524855 - DNA, 55 bp, Artificial
  Synthetic oligonucleotide
tggaatgggataggagcgtggaaccagttagccgacttgaagcaatcgtcgcagc

SEQ ID NO: 524856 - DNA, 55 bp, Artificial
  Synthetic oligonucleotide
cttgcgcgattattcagctcagaacatagcgactttgcaacatgcgaaggcaatg

SEQ ID NO: 524857 - DNA, 55 bp, Artificial
  Synthetic oligonucleotide
cttcgatgagtttgttatgcatgtgagaccagcacctgagcgagttgatgcgcat

SEQ ID NO: 524858 - DNA, 55 bp, Artificial
  Synthetic oligonucleotide
cttacaagcatacgggttcatggataacagtttcacaatatagatctatgggcgc

SEQ ID NO: 524859 - DNA, 55 bp, Artificial
  Synthetic oligonucleotide
ctgttttgaattaagccccttttacacagtaaatgtcgtggcttttgatggaacc

SEQ ID NO: 524860 - DNA, 55 bp, Artificial
  Synthetic oligonucleotide
tggctgtagctatataccacactaagagattttgtaagaacgttttgtggaagag

SEQ ID NO: 524861 - DNA, 55 bp, Artificial
  Synthetic oligonucleotide
gataataggcaaaggcaggcaacatataaaggcacggtatgtacgtatgcgggag

SEQ ID NO: 524862 - DNA, 55 bp, Artificial
  Synthetic oligonucleotide
gataacatcgcgtggggttcgatgagtatcttaggcagtaaaccggaagggttgt

SEQ ID NO: 524863 - DNA, 55 bp, Artificial
  Synthetic oligonucleotide
gagtgtcacctgtactcgactcagatggcagatcgattataatggcacggaggcg

SEQ ID NO: 524864 - DNA, 55 bp, Artificial
  Synthetic oligonucleotide
gagtggtcttatggtatggtgcatcgaaaatggttgctcaccaaacataaacgga

SEQ ID NO: 524865 - DNA, 55 bp, Artificial
  Synthetic oligonucleotide
gagtatataaacccgaccttgttaggtactgcaaaatggttgttatatgtagctg

SEQ ID NO: 524866 - DNA, 55 bp, Artificial
  Synthetic oligonucleotide
gagtaacctcaatagggaggcttacatcaaggatatcatgaagtactccaagcca

SEQ ID NO: 524867 - DNA, 55 bp, Artificial
  Synthetic oligonucleotide
gaggtgatgaaacaaatcctcctggaagagccttatctactggtcgttggtgctg

SEQ ID NO: 524868 - DNA, 55 bp, Artificial
  Synthetic oligonucleotide
gaggctagtctttcctccatccctgagcctactacttatgaggaagcttttcctc

SEQ ID NO: 524869 - DNA, 55 bp, Artificial
  Synthetic oligonucleotide
gagctgccatggagcagcaacaaggaagcaggggaccttacactatcgaagtggg

SEQ ID NO: 524870 - DNA, 55 bp, Artificial
  Synthetic oligonucleotide
gagctcctcgaaagcacatcgatgatgaatgatgagctacatagtaggggttacg

SEQ ID NO: 524871 - DNA, 55 bp, Artificial
  Synthetic oligonucleotide
gagcgaacgtttggggaggcatacactaagcgaggcaagaggaaaggcagcactg

SEQ ID NO: 524872 - DNA, 55 bp, Artificial
  Synthetic oligonucleotide
gagcaaattcgtgggattgaaaggaaagtgggatagctcgttgctaacacgcgat

SEQ ID NO: 524873 - DNA, 55 bp, Artificial
  Synthetic oligonucleotide
gagattattcaaaacttggagtggatgttcagtgcgagccggagatgaagttggc

SEQ ID NO: 524874 - DNA, 55 bp, Artificial
  Synthetic oligonucleotide
gagatggcaccaactaccattggttcaagactttgctcgtacgtagagagcgctc

SEQ ID NO: 524875 - DNA, 55 bp, Artificial
  Synthetic oligonucleotide
gagagtgcacgcatacctttctacgcacatgggattcccgacaagttgtatgaag

SEQ ID NO: 524876 - DNA, 55 bp, Artificial
  Synthetic oligonucleotide
gactgtttcaagtagtaacttcactctaaattcaattgcgacactgtggaggaac

SEQ ID NO: 524877 - DNA, 55 bp, Artificial
  Synthetic oligonucleotide
tgctatatcaatgtgttccttgcgatgctagtcaatgtgaatgaaagcgaggcta

SEQ ID NO: 524878 - DNA, 55 bp, Artificial
  Synthetic oligonucleotide
gactacattggagatgataagattacaatgcagcacataatctcgaacccaggga

SEQ ID NO: 524879 - DNA, 55 bp, Artificial
  Synthetic oligonucleotide
gacgcaccttttccgcgtatcgacttcacaaatatctttcggacacaagtgactc

SEQ ID NO: 524880 - DNA, 55 bp, Artificial
  Synthetic oligonucleotide
cgtgaggggttttatattcccaagctcagcaaagagaggttggttgccatattag

SEQ ID NO: 524881 - DNA, 55 bp, Artificial
  Synthetic oligonucleotide
cgtgaagcgagttgaaatgatcttacgacaagctggcatccaacagtgcgttttc

SEQ ID NO: 524882 - DNA, 55 bp, Artificial
  Synthetic oligonucleotide
cgtctcactgggagtcggtgacctactctttccgagtgtagggtggcgcaacctg

SEQ ID NO: 524883 - DNA, 55 bp, Artificial
  Synthetic oligonucleotide
cgtcagactccagtagttggaaggcattacacacatatttgaggcctagtgaaga

SEQ ID NO: 524884 - DNA, 55 bp, Artificial
  Synthetic oligonucleotide
cgtacctactatgtctgcaagtgagtgaggttacacctcgacacttatagtaggc

SEQ ID NO: 524885 - DNA, 55 bp, Artificial
  Synthetic oligonucleotide
cggtgtttaagatactcaataaagtgaaaaccgtctttagcacgtttggagagag

SEQ ID NO: 524886 - DNA, 55 bp, Artificial
  Synthetic oligonucleotide
cggctgggttacggttgacaaacctatttaacacatgttatacgagggcaaccag

SEQ ID NO: 524887 - DNA, 55 bp, Artificial
  Synthetic oligonucleotide
cggcgttggggcttaatttcgatttcgaatcacggacgagagataaatcagaact

SEQ ID NO: 524888 - DNA, 55 bp, Artificial
  Synthetic oligonucleotide
cggatgcgaaggcatttacgaaaatggtgcgtgacgtactaattgacaaactcgg

SEQ ID NO: 524889 - DNA, 55 bp, Artificial
  Synthetic oligonucleotide
cgcggcattgaaacgaagtgttctgtggagacaactattagacgagggagcgacc

SEQ ID NO: 524890 - DNA, 55 bp, Artificial
  Synthetic oligonucleotide
cgcgaatcaatgacaccgtatcacagaatttcatacgagacttcggagctttaga

SEQ ID NO: 524891 - DNA, 55 bp, Artificial
  Synthetic oligonucleotide
cgcatgtcgctaatgaaattgctcacggaccccataaggatctactggtgcgagg

SEQ ID NO: 524892 - DNA, 55 bp, Artificial
  Synthetic oligonucleotide
cgcatggaaacagtttacacacgaacgtttggcggacacaaggtgtattgctaag

SEQ ID NO: 524893 - DNA, 55 bp, Artificial
  Synthetic oligonucleotide
cgcatacctgagaaaggattggtcggacaaagcactaaaagtcgacctaatgcca

SEQ ID NO: 524894 - DNA, 55 bp, Artificial
  Synthetic oligonucleotide
cgcagatggctcccagtatgatagcagcctaacaccgcttctctttgatgctgtg

SEQ ID NO: 524895 - DNA, 55 bp, Artificial
  Synthetic oligonucleotide
cgcacacatgtgcgacatctggatgggtcgaaaccacggtatgacattacccttg

SEQ ID NO: 524896 - DNA, 55 bp, Artificial
  Synthetic oligonucleotide
cgagggttcgtatgccgacgaaacatcacctggtcttaggtaataacctagacga

SEQ ID NO: 524897 - DNA, 55 bp, Artificial
  Synthetic oligonucleotide
cgagagaagcggcaaattgatataagtgtgcatgcggacattttacgcataacta

SEQ ID NO: 524898 - DNA, 55 bp, Artificial
  Synthetic oligonucleotide
cgactaaggatggttgtgtgctgggcatacatagtttgaccaatcaagagcacgc

SEQ ID NO: 524899 - DNA, 55 bp, Artificial
  Synthetic oligonucleotide
cgacgctggagtgaatcatgagagtgagtccttattcaaaggacttcgagattac

SEQ ID NO: 524900 - DNA, 55 bp, Artificial
  Synthetic oligonucleotide
cgaattgacacgtgaaatacggaagttttacacttggcttctatctcaagcacct

SEQ ID NO: 524901 - DNA, 55 bp, Artificial
  Synthetic oligonucleotide
ctcgcgggatcttttcagatggctagcagttatacaatctgagctgatgactttc

SEQ ID NO: 524902 - DNA, 55 bp, Artificial
  Synthetic oligonucleotide
ctgaacttgcgcctgtcctttatggaagattggggacttggtgaacaaatgctca

SEQ ID NO: 524903 - DNA, 55 bp, Artificial
  Synthetic oligonucleotide
ctcctttgcttgagcgccttggttgcaattgcccaaggaacagcttccatgctaa

SEQ ID NO: 524904 - DNA, 55 bp, Artificial
  Synthetic oligonucleotide
ctccgcagtgcgatttgtggacccactaacaggtgctactctcgacgagaatccc

SEQ ID NO: 524905 - DNA, 55 bp, Artificial
  Synthetic oligonucleotide
ctcatcgaatcatgaagtatcgaattggaggaattttgccagacttgcgaagaat

SEQ ID NO: 524906 - DNA, 55 bp, Artificial
  Synthetic oligonucleotide
ctcagagattacaacgtgatctcaagtgttgtttgtcgcttgactaatgagtctg

SEQ ID NO: 524907 - DNA, 55 bp, Artificial
  Synthetic oligonucleotide
ctatcctgggataagcactggttttggcaacctgacaaaattgcatggggttcac

SEQ ID NO: 524908 - DNA, 55 bp, Artificial
  Synthetic oligonucleotide
ctgcgcttcgtgaagctagacagaaacaacctgctgtcatacccgaatcatatgg

SEQ ID NO: 524909 - DNA, 55 bp, Artificial
  Synthetic oligonucleotide
ctagtctgtataaatacgtagactaccttctcttacatgagtctagcatcgtaga

SEQ ID NO: 524910 - DNA, 55 bp, Artificial
  Synthetic oligonucleotide
cgttggtacaacagaagagaacacggagagacacaccaccgatgatgtaaatagg

SEQ ID NO: 524911 - DNA, 55 bp, Artificial
  Synthetic oligonucleotide
ctgctagcacgtatcaacacacttggtcgaaaatacagtttgttcgcagaggctg

SEQ ID NO: 524912 - DNA, 55 bp, Artificial
  Synthetic oligonucleotide
ctggttgcgagtaagagccccacagatcaaagtgataaagttgtcagcaacacct

SEQ ID NO: 524913 - DNA, 54 bp, Artificial
  Synthetic oligonucleotide
gagtagggtgcgtaagcagcgcaacggtacatgctactacaagcgcaaaagtcc

SEQ ID NO: 524914 - DNA, 54 bp, Artificial
  Synthetic oligonucleotide
gcgggaattacgtgaacaagcacgcgagaaaagaaacgaggaggccaggagagt

SEQ ID NO: 524915 - DNA, 54 bp, Artificial
  Synthetic oligonucleotide
cagcctttagaaacctatacactggtgctaaagtttcagaagatgagttgaatg

SEQ ID NO: 524916 - DNA, 54 bp, Artificial
  Synthetic oligonucleotide
tcaagatgatatctcgactgaatgatgcgcttagcaagtcaggatttggggatc

SEQ ID NO: 524917 - DNA, 54 bp, Artificial
  Synthetic oligonucleotide
catagtattagcgtggcttggccaccttaaataaatactatgttcactctactg

SEQ ID NO: 524918 - DNA, 54 bp, Artificial
  Synthetic oligonucleotide
ctgaatgtgaacggcgtatttcaatggggagacagaggttaccatgcaaagcga

SEQ ID NO: 524919 - DNA, 54 bp, Artificial
  Synthetic oligonucleotide
tgataacttgcaagctgtagtacaatcactggtgagccagaaacgagcggagtt

SEQ ID NO: 524920 - DNA, 54 bp, Artificial
  Synthetic oligonucleotide
actcgatgttaacggtatgttccaatggggtgagcgtggctaccatgctaagcg

SEQ ID NO: 524921 - DNA, 54 bp, Artificial; identical to SEQ ID NO: 433995
  Synthetic oligonucleotide

SEQ ID NO: 524922 - DNA, 54 bp, Artificial
  Synthetic oligonucleotide
tggggtgacagaggataccactcaaagaggttcctatcaaactacttcgaagta

SEQ ID NO: 524923 - DNA, 54 bp, Artificial
  Synthetic oligonucleotide
taagcttaagaatgtagctactgcatgttacgcactatcagtgatgttcccaga

SEQ ID NO: 524924 - DNA, 54 bp, Artificial
  Synthetic oligonucleotide
atcacttcgtcaaggaagttacctttgaggtcggggagtcatcaactagtcaac

SEQ ID NO: 524925 - DNA, 54 bp, Artificial
  Synthetic oligonucleotide
atgttagagaatttatacgcagagatagtctatacaccaattctggcacctgat

SEQ ID NO: 524926 - DNA, 54 bp, Artificial
  Synthetic oligonucleotide
gacagagaagaaatcgtgatgagatcctgtgaacgtatttacaatgggcaactt

SEQ ID NO: 524927 - DNA, 53 bp, Artificial
  Synthetic oligonucleotide
tctgttgtgtggctctgctacgatgggtattgcgagttccgtggcgagagacc

SEQ ID NO: 524928 - DNA, 53 bp, Artificial
  Synthetic oligonucleotide
ttagggattacaacccgatagcttcagtgatttgccagttaacgaatgaatcg

SEQ ID NO: 524929 - DNA, 53 bp, Artificial
  Synthetic oligonucleotide
tgctttagtgactaaacatgttgtgaaaggaagatgcccacacttcgagcagt

SEQ ID NO: 524930 - DNA, 53 bp, Artificial
  Synthetic oligonucleotide
ttttcaagatcacaacggacaagctttctatgagacagcaaacccactcaaaa

SEQ ID NO: 524931 - DNA, 53 bp, Artificial
  Synthetic oligonucleotide
tgttaacgctgaacgccatctgacaactgatgcatctgctagccgccatactt

SEQ ID NO: 524932 - DNA, 53 bp, Artificial
  Synthetic oligonucleotide
ttttctcgtcgaaggttgttgatgagttagcttcgaacatcggaaaacaagtc

SEQ ID NO: 524933 - DNA, 53 bp, Artificial
  Synthetic oligonucleotide
tatgtttgagcgcattagttgcaattgcacaaggaacagcctccatgttgaac

SEQ ID NO: 524934 - DNA, 53 bp, Artificial
  Synthetic oligonucleotide
aacccaatttcgcgccacatttgtgtcattgagaatgactccaacggggttag

SEQ ID NO: 524935 - DNA, 53 bp, Artificial
  Synthetic oligonucleotide
agctcgaatttagagcaccacgtgcgagtgacaaagtgaagatcgttggaaca

SEQ ID NO: 524936 - DNA, 53 bp, Artificial
  Synthetic oligonucleotide
gaattttcagacaaagagcatctcaagtactatgtctgagacaagtgcaacgt

SEQ ID NO: 524937 - DNA, 52 bp, Artificial
  Synthetic oligonucleotide
ctatgtggctagctacaatgaggtggacacactgggaaagcttctaacagat

SEQ ID NO: 524938 - DNA, 52 bp, Artificial
  Synthetic oligonucleotide
atacgttactttgctaatggtgacgatttaataattgcagtcaatccgattg

SEQ ID NO: 524939 - DNA, 52 bp, Artificial
  Synthetic oligonucleotide
agtaaggatcgtggggaaacccacaaaacaagcactgaagtggaaccaacat

SEQ ID NO: 524940 - DNA, 52 bp, Artificial
  Synthetic oligonucleotide
aggtggatctcacaccccatgtgcccctaaagatgtgtgacaacaccaatgc

SEQ ID NO: 524941 - DNA, 52 bp, Artificial
  Synthetic oligonucleotide
gaactttggtttatgtcaacgcgaggcatcaagtacgaggaaatgtatattc

SEQ ID NO: 524942 - DNA, 52 bp, Artificial
  Synthetic oligonucleotide
attgagcgacaatgggtttgttgatatcaatgaaagcctctacgtagaaatg

SEQ ID NO: 524943 - DNA, 52 bp, Artificial
  Synthetic oligonucleotide
actggtacaaagccgtacgcctcctacatgatggcagttaaaactctagaac

SEQ ID NO: 524944 - DNA, 52 bp, Artificial
  Synthetic oligonucleotide
gatgaaggctgcaacagcatgttttcaattgtcaaccttaccaacacattgc

SEQ ID NO: 524945 - DNA, 52 bp, Artificial
  Synthetic oligonucleotide
ttgctagacgcgagtttagtaaaacagtcacaaagaggaagggacttcgttg

SEQ ID NO: 524946 - DNA, 52 bp, Artificial
  Synthetic oligonucleotide
gccaatggttgatgcgatacgatatggtgatttaacgcatagcaagacaatc

SEQ ID NO: 524947 - DNA, 52 bp, Artificial
  Synthetic oligonucleotide
aatgcggccgttaagcgtggatttgtatacaacttcgatgaagattgttacg

SEQ ID NO: 524948 - DNA, 52 bp, Artificial
  Synthetic oligonucleotide
aagtatgcaaaacctttacaaggaggttttccccaagtaaatataggaggtt

SEQ ID NO: 524949 - DNA, 52 bp, Artificial
  Synthetic oligonucleotide
ggggacactagatctgcaaaacagcacaccatcagaaccatttgtgcttagt

SEQ ID NO: 524950 - DNA, 52 bp, Artificial
  Synthetic oligonucleotide
tgagcaatgagtcagatgggcacattgagacactgtatggtgttgggtatgg

SEQ ID NO: 524951 - DNA, 52 bp, Artificial
  Synthetic oligonucleotide
cagcgtctcaggttccgaaatgcccgggatagaaaactaggatatgaggtac

SEQ ID NO: 524952 - DNA, 51 bp, Artificial
  Synthetic oligonucleotide
caaatcgaattgtataacacaagggcaactttacgccaatttgaaaactgg

SEQ ID NO: 524953 - DNA, 51 bp, Artificial
  Synthetic oligonucleotide
caactggttacaaaacacgttgttaaaggaccgtgccaatgtttcatgaaa

SEQ ID NO: 524954 - DNA, 51 bp, Artificial
  Synthetic oligonucleotide
cactacaagggtttgtacaagcgcaaggcagtgggtcaaactgtgacgtca

SEQ ID NO: 524955 - DNA, 51 bp, Artificial
  Synthetic oligonucleotide
cagaagcatgcatctgtggaaatcatcactaagaaatccacaaaattggac

SEQ ID NO: 524956 - DNA, 51 bp, Artificial
  Synthetic oligonucleotide
atcgccgtccctcctgtctaaattgtacaatttgttatcaattggttcttc

SEQ ID NO: 524957 - DNA, 51 bp, Artificial
  Synthetic oligonucleotide
atagaagaactcgaagaacattggcgtgcacttatgcaagtacttttagtc

SEQ ID NO: 524958 - DNA, 51 bp, Artificial
  Synthetic oligonucleotide
agagtcgtctgggttccaccgatgcttcaaaggagagtgaatgctcaagcg

SEQ ID NO: 524959 - DNA, 51 bp, Artificial
  Synthetic oligonucleotide
acaatgaagtggacatgttatcgaagcttcttgtagatcgtcatttcagag

SEQ ID NO: 524960 - DNA, 51 bp, Artificial
  Synthetic oligonucleotide
aatttaaagctgacaaaatcgacaaagacatccttaagtgtgcgacactcg

SEQ ID NO: 524961 - DNA, 51 bp, Artificial
  Synthetic oligonucleotide
tttgtgaaggcgcgggacgctaaatacggatacgctgtgactggttcggat

SEQ ID NO: 524962 - DNA, 51 bp, Artificial
  Synthetic oligonucleotide
aacacaagggccacacaaaggcagtttgacgcatggtacgaaggggttatg

SEQ ID NO: 524963 - DNA, 51 bp, Artificial
  Synthetic oligonucleotide
aaaaccctaccagttggtgtttcggccacacacatgtcaaacgttgcatat

SEQ ID NO: 524964 - DNA, 51 bp, Artificial
  Synthetic oligonucleotide
gcactggagtgaaagatagagatgtgaatgctggtacggttggaactttca

SEQ ID NO: 524965 - DNA, 51 bp, Artificial
  Synthetic oligonucleotide
ggacattcgcaacgcaacattctgtgtcgttggtgcacacttttctgatgc

SEQ ID NO: 524966 - DNA, 51 bp, Artificial
  Synthetic oligonucleotide
tgctgtagaatgtttgcgaatggtgatgacttactcctagcagtgcatcct

SEQ ID NO: 524967 - DNA, 51 bp, Artificial
  Synthetic oligonucleotide
tatctatatattatgctacgtacctactatgtctgcaagtgagtgaggtta

SEQ ID NO: 524968 - DNA, 51 bp, Artificial
  Synthetic oligonucleotide
ctcctaaaagacgttaactacaaaggaaagattctcaagacgtcagcaact

SEQ ID NO: 524969 - DNA, 51 bp, Artificial
  Synthetic oligonucleotide
ctccaatgaactgtgttattgaacttaagcacaaaggggcgccatcagtac

SEQ ID NO: 524970 - DNA, 51 bp, Artificial
  Synthetic oligonucleotide
tggtagagtgtcaagtgcaagtgctgcaaagataagctatacattgagcac

SEQ ID NO: 524971 - DNA, 51 bp, Artificial
  Synthetic oligonucleotide
cctgtcatgtagttgattcttatggatctctaactacaggttaccatgtgc

SEQ ID NO: 524972 - DNA, 51 bp, Artificial
  Synthetic oligonucleotide
tgtcgagatgctcaaagcaaatggttttcataagtgtaactacattacaga

SEQ ID NO: 524973 - DNA, 51 bp, Artificial
  Synthetic oligonucleotide
ccaagttgcgaagagaattcacttgggaagagtacattgagtatctggaaa

SEQ ID NO: 524974 - DNA, 50 bp, Artificial
  Synthetic oligonucleotide
aacacctctgtttacctatgaacagaatcacatgtctcacttgtgcaaac

SEQ ID NO: 524975 - DNA, 50 bp, Artificial
  Synthetic oligonucleotide
tgaagatacttctaaatggactcatggtatggtgcattgaaaatggcacc

SEQ ID NO: 524976 - DNA, 50 bp, Artificial
  Synthetic oligonucleotide
tcacgagcacagtctcagaaaccagtgttacatgcagagtgaataactca

SEQ ID NO: 524977 - DNA, 50 bp, Artificial
  Synthetic oligonucleotide
tagcgcggaaaagtcaagatcaagtcagctctattttaaccaaactccgc

SEQ ID NO: 524978 - DNA, 50 bp, Artificial
  Synthetic oligonucleotide
aactctaacacacagtatggaattggatttggctgctatataatcgcaaa

SEQ ID NO: 524979 - DNA, 50 bp, Artificial
  Synthetic oligonucleotide
ggagtggactaaaccttgtatcctcagcacccaaaggcgcttttaaaaca

SEQ ID NO: 524980 - DNA, 50 bp, Artificial
  Synthetic oligonucleotide
tgcacattcaccaagaggatatcgagcttgtaacaatggcagctcgcgta

SEQ ID NO: 524981 - DNA, 50 bp, Artificial
  Synthetic oligonucleotide
acacagcagccaatattagcacgctacaggcagcaaaagcgcagctaaaa

SEQ ID NO: 524982 - DNA, 50 bp, Artificial
  Synthetic oligonucleotide
acagcagcacaagtggccaatgacatagctcatgacaacaaaacagacat

SEQ ID NO: 524983 - DNA, 50 bp, Artificial
  Synthetic oligonucleotide
gatgggtattgttacatactcatctttcttgcaatgatgattaatgtgcg

SEQ ID NO: 524984 - DNA, 50 bp, Artificial
  Synthetic oligonucleotide
acctaaacttgaaccagagaggatcgtctcaattttagaatgggataggt

SEQ ID NO: 524985 - DNA, 50 bp, Artificial
  Synthetic oligonucleotide
gactatgcacccggaagttcataaaatactgacaccatacaagctacgtg

SEQ ID NO: 524986 - DNA, 50 bp, Artificial
  Synthetic oligonucleotide
cttgtgcccaccacctggcgaattagatcgatatgccccttcagaactga

SEQ ID NO: 524987 - DNA, 50 bp, Artificial
  Synthetic oligonucleotide
ctgtcatgtattagcgcatgtaaggttgcattcacactgcaaaccgacat

SEQ ID NO: 524988 - DNA, 50 bp, Artificial
  Synthetic oligonucleotide
ctctcgcgaaagagtggtctcaaatccaggaattcaagcatactttatag

SEQ ID NO: 524989 - DNA, 50 bp, Artificial
  Synthetic oligonucleotide
atctttaaccgatgccctgagtgcgattgtgctattgatgagcactattg

SEQ ID NO: 524990 - DNA, 50 bp, Artificial
  Synthetic oligonucleotide
tggtgttatgatttcgtcatagcagtgattgcagatctcaatcaggagcc

SEQ ID NO: 524991 - DNA, 50 bp, Artificial
  Synthetic oligonucleotide
ctatctacacgttactagagcacattcagattgcaggcaacggttcgatt

SEQ ID NO: 524992 - DNA, 60 bp, Artificial
  Synthetic oligonucleotide
acaacccttcaagattgtccattccctgtcagtactgtagcagaggaggtatatgatgat

SEQ ID NO: 524993 - DNA, 60 bp, Artificial
  Synthetic oligonucleotide
acctatagttattagtaaggcattagaaacatcaaaaattgcagtaaattgttttggaca

SEQ ID NO: 524994 - DNA, 60 bp, Artificial
  Synthetic oligonucleotide
agtgccgtgtctccgaaataatctctgtaaccatcatcgaacacgcttaacatctcaacc

SEQ ID NO: 524995 - DNA, 60 bp, Artificial
  Synthetic oligonucleotide
atcatttacctttgataactgtaaaaaataattagcaccatattctaggctaggtaatgg

SEQ ID NO: 524996 - DNA, 60 bp, Artificial
  Synthetic oligonucleotide
cacataaagtagatgttctatagaacttaaccatgttgacaaacctagtggtaaacatgg

SEQ ID NO: 524997 - DNA, 60 bp, Artificial
  Synthetic oligonucleotide
gtcgatgcaaaaaggaagatatccagctcctaaggagcagaaagaaataatatgcgcatt

SEQ ID NO: 524998 - DNA, 60 bp, Artificial
  Synthetic oligonucleotide
gtatatcacgatccacatggttatcttatagcaaatatgtcagatcctaactataattgc

SEQ ID NO: 524999 - DNA, 57 bp, Artificial
  Synthetic oligonucleotide
ggttgtccatatgatactgctcaaactttcattgttcatacgtcatgtagtattctg

SEQ ID NO: 525000 - DNA, 55 bp, Artificial
  Synthetic oligonucleotide
tgccggacaagtatacgtcaagttaatctcttttagggatgattcgacgtcagtg

SEQ ID NO: 525001 - DNA, 55 bp, Artificial
  Synthetic oligonucleotide
ggataacgcgtctgctccgttattcacaagacatcttactatattgtcataacag

SEQ ID NO: 525002 - DNA, 55 bp, Artificial
  Synthetic oligonucleotide
ggaagtgatcttgtagtggcaatgagacatatgtcactagctggactaatatcag

SEQ ID NO: 525003 - DNA, 55 bp, Artificial
  Synthetic oligonucleotide
cgactgtaccagttacggatatgatacctgattatagcattacaacgttttcaga

SEQ ID NO: 525004 - DNA, 55 bp, Artificial
  Synthetic oligonucleotide
cctcagctgctgctacaaatctttggtcagtgtcggtaagtgtcatatttatcac

SEQ ID NO: 525005 - DNA, 55 bp, Artificial
  Synthetic oligonucleotide
catctgaatatgtaaacgatgtcataatgtttgaccggttttgcacacgatctcg

SEQ ID NO: 525006 - DNA, 52 bp, Artificial
  Synthetic oligonucleotide
ttagttgttatgatgtaaactcacgtgcggaaataacagaaactatacctac

SEQ ID NO: 525007 - DNA, 51 bp, Artificial
  Synthetic oligonucleotide
ggttaatgttccaggtggactaggtattgacgtaaacggattaggaaagtt

SEQ ID NO: 525008 - DNA, 51 bp, Artificial
  Synthetic oligonucleotide
tgttcctggtcttatgaccgcggcgttaaatatacaaactagtgtaaatac

SEQ ID NO: 525009 - DNA, 60 bp, Artificial
  Synthetic oligonucleotide
gcaggtctcgacatggtgactcctactgttgtatagcgggggagggtctgccgatctcga

SEQ ID NO: 525010 - DNA, 60 bp, Artificial
  Synthetic oligonucleotide
gcaggttaagctaaaggatgaacgatttatgagcctatcgagcgccatgccgcaagcaag

SEQ ID NO: 525011 - DNA, 60 bp, Artificial
  Synthetic oligonucleotide
gcagtcaaatcagttattatcgtatggtgatgtcacaagatttctatctagtaattcaat

SEQ ID NO: 525012 - DNA, 60 bp, Artificial
  Synthetic oligonucleotide
gcagtgaggatgagtatatcagagtttagcgagatacctctagatggttttgatatacca

SEQ ID NO: 525013 - DNA, 60 bp, Artificial
  Synthetic oligonucleotide
gcagttaagacaaatgcagatgctggcgtgtctatggattcatcaacacaatcacgacct

SEQ ID NO: 525014 - DNA, 60 bp, Artificial
  Synthetic oligonucleotide
gcagttcagataccgatttattactcttccaatccagaattagaaaaaagatgtattgag

SEQ ID NO: 525015 - DNA, 60 bp, Artificial
  Synthetic oligonucleotide
gcagttttaaagttaggagctaatgatgtttggagaccttctactctaacaaaacgtaaa

SEQ ID NO: 525016 - DNA, 60 bp, Artificial
  Synthetic oligonucleotide
gcatataacgaggcggtgaggatgagcatatcggaatttagcgaggtgccgttagacgga

SEQ ID NO: 525017 - DNA, 60 bp, Artificial
  Synthetic oligonucleotide
gcatatgctagattataaaactgtgcctaaagatttagaagtactgaagactcatgctct

SEQ ID NO: 525018 - DNA, 60 bp, Artificial
  Synthetic oligonucleotide
gcatcatcatacgaatgagtcattcttcttaggatttgatctaagtattgatttagtgca

SEQ ID NO: 525019 - DNA, 60 bp, Artificial
  Synthetic oligonucleotide
gcatgaaatcgcaacttcgactgaccatttagtctctccttccctttctgaatatgcgga

SEQ ID NO: 525020 - DNA, 60 bp, Artificial
  Synthetic oligonucleotide
gcatggccggctactgtcgaaacctacgttaaagcaaagtcgttatctactatcgtcctt

SEQ ID NO: 525021 - DNA, 60 bp, Artificial
  Synthetic oligonucleotide
gcattaaatctcctgacttcacagtttgtttggaatacgttttgaaaaatgtcgttgaaa

SEQ ID NO: 525022 - DNA, 60 bp, Artificial
  Synthetic oligonucleotide
gcattaagtggaattgatttatctcatttgcgtacaccgaagatagaacctacgatggtt

SEQ ID NO: 525023 - DNA, 60 bp, Artificial
  Synthetic oligonucleotide
gcattagaatagttgatacaaaactacagtcatatggtggagaaactccgaatttatcga

SEQ ID NO: 525024 - DNA, 60 bp, Artificial
  Synthetic oligonucleotide
gcattcgcatcgtacgcagaagcgtttcgtgatgatgtgagactaagacagatcaaacgt

SEQ ID NO: 525025 - DNA, 60 bp, Artificial
  Synthetic oligonucleotide
gcattgaaggcggtttcaacaccagagccaaagggatatgtgttagaaatcaatgatgtg

SEQ ID NO: 525026 - DNA, 60 bp, Artificial
  Synthetic oligonucleotide
gcattgagtggaatcgacttgagtcacctgaggactcctagaattgagcctcagacgcta

SEQ ID NO: 525027 - DNA, 60 bp, Artificial
  Synthetic oligonucleotide
gcatttaggtgagaatccaaattcttatgatcgtcaactaaccgttgaaaaatatcgtcc

SEQ ID NO: 525028 - DNA, 60 bp, Artificial
  Synthetic oligonucleotide
gccaaatacagatcgggagagtgtatgcattcaagccaacaaaaaatccagagccaaagg

SEQ ID NO: 525029 - DNA, 60 bp, Artificial
  Synthetic oligonucleotide
gccaacaggaagttatacacaacacggaacattgttttctacaccaaagttatatgctgt

SEQ ID NO: 525030 - DNA, 60 bp, Artificial
  Synthetic oligonucleotide
gccaacagttgcacttgaaatcttggacaaagcgatgtcaaatacaacgggtgctacgca

SEQ ID NO: 525031 - DNA, 60 bp, Artificial
  Synthetic oligonucleotide
gccaacgcatttcattgatggtcgggagataatcgacgcggagggcttaggagttgacat

SEQ ID NO: 525032 - DNA, 60 bp, Artificial
  Synthetic oligonucleotide
gccaactggttcagtttactttaaagaatatacggatattgcttctttctcagttgatcc

SEQ ID NO: 525033 - DNA, 60 bp, Artificial
  Synthetic oligonucleotide
gccaataagggcattccgattgattgagttggctaaagaggcaatgtatgatcgagaaac

SEQ ID NO: 525034 - DNA, 60 bp, Artificial
  Synthetic oligonucleotide
gccacaatggacgtgcagtcatttgagaaggaattgcctctttaatggaatgtgtgcaaa

SEQ ID NO: 525035 - DNA, 60 bp, Artificial
  Synthetic oligonucleotide
gccagagaatagatcgaatcaaagggagaaggcgcaacttgcagcggagatagagacggg

SEQ ID NO: 525036 - DNA, 60 bp, Artificial
  Synthetic oligonucleotide
gccagcacgagacttcggtcattttggattatcccactactctagggcgactaccccaat

SEQ ID NO: 525037 - DNA, 60 bp, Artificial
  Synthetic oligonucleotide
gccagttaacgtgaataatccaggaaatgcaccgggtatgattgaaatagaagtaatata

SEQ ID NO: 525038 - DNA, 60 bp, Artificial
  Synthetic oligonucleotide
gccataaggagagtagaagcgacgctaccgcaggagatcctagcaacgggggcggagcta

SEQ ID NO: 525039 - DNA, 60 bp, Artificial
  Synthetic oligonucleotide
gccatatacgaggaatgattttgataggcgggagttgccggaactacctggtgtacagaa

SEQ ID NO: 525040 - DNA, 60 bp, Artificial
  Synthetic oligonucleotide
gattgtacaggtaatgtccaaaagatcaagatcattaaattctgctgcgttctattatag

SEQ ID NO: 525041 - DNA, 60 bp, Artificial
  Synthetic oligonucleotide
gatttcgcaaaacattttaataggtatgcctcgatggctatacaacaatatctgagagtt

SEQ ID NO: 525042 - DNA, 60 bp, Artificial
  Synthetic oligonucleotide
gatttgacataccacctgagctgatcagatagagtggtgcccccaggttgccgtgatgcg

SEQ ID NO: 525043 - DNA, 60 bp, Artificial
  Synthetic oligonucleotide
gcaaaaaatctataaaacgatagggaaagccgctgaaaggtttgcagagagcgagatagg

SEQ ID NO: 525044 - DNA, 60 bp, Artificial
  Synthetic oligonucleotide
gcaaacacaattaaacaacataaatgtagaaatgagtatttgatacaatggtataatcat

SEQ ID NO: 525045 - DNA, 60 bp, Artificial
  Synthetic oligonucleotide
gcaaacgatctctaaatcgcctggtcgcttggatgaggaagaatataacgtgatacgttc

SEQ ID NO: 525046 - DNA, 60 bp, Artificial
  Synthetic oligonucleotide
gcaaatcggcagaattggggatcattattacacaacgagctgctataccggagctgaagc

SEQ ID NO: 525047 - DNA, 60 bp, Artificial
  Synthetic oligonucleotide
gcaaatgacgtcagttgccattactggatcgttaagactttttccttctgaacgtgtgtt

SEQ ID NO: 525048 - DNA, 60 bp, Artificial
  Synthetic oligonucleotide
gcaaattttgcccaaattaaaaagtgatttaagtggattgaagaagaaacgagcaatcat

SEQ ID NO: 525049 - DNA, 60 bp, Artificial
  Synthetic oligonucleotide
gcaacagcgtacttcaccgcaccaacaggtgacacgaaatggaaggaagttgcgcgggcg

SEQ ID NO: 525050 - DNA, 60 bp, Artificial
  Synthetic oligonucleotide
gcaacaggctcgcgtgtaatggatgccgcggattgtttccgaaattcggcggatcgggac

SEQ ID NO: 525051 - DNA, 60 bp, Artificial
  Synthetic oligonucleotide
gcaacgtaatcgcacgagaagaagagctcgaattacagcgtctcgctggtgcgctcaaaa

SEQ ID NO: 525052 - DNA, 60 bp, Artificial
  Synthetic oligonucleotide
gcaagatgacgcgttgtacaaccaacaacctggttacgctcgtcgcattaagccgtttgc

SEQ ID NO: 525053 - DNA, 60 bp, Artificial
  Synthetic oligonucleotide
gcaagcgatgaagtgagtttagtgccttaccaagagcaggtgaggccgcccagttatgtt

SEQ ID NO: 525054 - DNA, 60 bp, Artificial
  Synthetic oligonucleotide
gcaatcggaagaatcaaataagtggatatcaatgggatcatcatgtactgtgaaagtgtg

SEQ ID NO: 525055 - DNA, 60 bp, Artificial
  Synthetic oligonucleotide
gcaatgtgtaggtacgtgtgagcgtgttgcttttgtttcaaaggacatgagcttaatcat

SEQ ID NO: 525056 - DNA, 60 bp, Artificial; identical to SEQ ID NO: 405858
  Synthetic oligonucleotide

SEQ ID NO: 525057 - DNA, 60 bp, Artificial
  Synthetic oligonucleotide
gcaattatgatatgtggagagagcagaaacgagttctacggacgagtcaaatcgctacaa

SEQ ID NO: 525058 - DNA, 60 bp, Artificial
  Synthetic oligonucleotide
gcacaggagacgccacaaggagtaactcttaatgtaggtggggtaaacatgagagcgggc

SEQ ID NO: 525059 - DNA, 60 bp, Artificial
  Synthetic oligonucleotide
gcaccagtttacttagaaaagcgtcgtgcgcaaatatcagcactgctaactatgttgcag

SEQ ID NO: 525060 - DNA, 60 bp, Artificial
  Synthetic oligonucleotide
gcaccttgggattcagatgatgtgttcatgttgcattgtgttgcgcctcatcatatcaac

SEQ ID NO: 525061 - DNA, 60 bp, Artificial
  Synthetic oligonucleotide
gcactactacagatgggtacccaacagtgtcaatctcgtccgtttcagcaatcatcccag

SEQ ID NO: 525062 - DNA, 60 bp, Artificial
  Synthetic oligonucleotide
gcactcactatgtatgcccactcctgatgcgccaatgtcgaatcaccaggcggccaccat

SEQ ID NO: 525063 - DNA, 60 bp, Artificial
  Synthetic oligonucleotide
gcactcttcctgactgtctggtgtcaaatgtactccatactaggcatgtcttcagccaaa

SEQ ID NO: 525064 - DNA, 60 bp, Artificial
  Synthetic oligonucleotide
gcactgtttaggtgtagttggatcattacagcgaaagttggaacatctgcctcatcataa

SEQ ID NO: 525065 - DNA, 60 bp, Artificial
  Synthetic oligonucleotide
gcagacagatgaaactaataagtggatttctatgggatcttcatgcacgataaaagtatg

SEQ ID NO: 525066 - DNA, 60 bp, Artificial
  Synthetic oligonucleotide
gcagatatacaggtctatgggtctgatagctttctgccggatcgagatcgcttcgtgtcg

SEQ ID NO: 525067 - DNA, 60 bp, Artificial
  Synthetic oligonucleotide
gcagatccaactacagctccacaaactgaaagaatgatgcgtataaattggaaaaaatgg

SEQ ID NO: 525068 - DNA, 60 bp, Artificial
  Synthetic oligonucleotide
gcagcaatatctgcgagttggctatctcgaggaaagacgttatgtcacgcaactatttgg

SEQ ID NO: 525069 - DNA, 60 bp, Artificial
  Synthetic oligonucleotide
gcagcactgactatgtttccagatatgacaagattcggcgatttacagtatccaatcacg

SEQ ID NO: 525070 - DNA, 60 bp, Artificial
  Synthetic oligonucleotide
gcagcagaggttacgcagcatggtcggtttaggcaacgcgcggggcagaatatcacaacc

SEQ ID NO: 525071 - DNA, 60 bp, Artificial
  Synthetic oligonucleotide
gcaggatcatatagattgattgatcgcgaccaatcgacgtttctggtggtgtcacgagat

SEQ ID NO: 525072 - DNA, 60 bp, Artificial
  Synthetic oligonucleotide
gcgagataggatcagccgcgatagatggattgatccaggggagcgtgcagtcgttagtta

SEQ ID NO: 525073 - DNA, 60 bp, Artificial
  Synthetic oligonucleotide
gcgatatgtgcaacaactgtttgggagagttccaactggtgaattcccattgcatcagat

SEQ ID NO: 525074 - DNA, 60 bp, Artificial; identical to SEQ ID NO: 12650
  Synthetic oligonucleotide

SEQ ID NO: 525075 - DNA, 60 bp, Artificial
  Synthetic oligonucleotide
gcgatggaggagattacagctttagagtgccagttggagaatttccaatattaaagggcg

SEQ ID NO: 525076 - DNA, 60 bp, Artificial
  Synthetic oligonucleotide
gcgattacgaattaatgagatgtttacacgttatgagatttcactatgggtttaaggcga

SEQ ID NO: 525077 - DNA, 60 bp, Artificial
  Synthetic oligonucleotide
gcgattggaacgacataccaaggaaccatcagacgcggccccgagacgtactagactact

SEQ ID NO: 525078 - DNA, 60 bp, Artificial
  Synthetic oligonucleotide
gcgattggatcaagtggtatcaaacgggatataccatcgacatcaggaaagttctattgc

SEQ ID NO: 525079 - DNA, 60 bp, Artificial
  Synthetic oligonucleotide
gcgcaaagacattatacggtcatgaacatttctcaaagtctgcaccatcctgctcaccct

SEQ ID NO: 525080 - DNA, 60 bp, Artificial
  Synthetic oligonucleotide
gcgcagagtgtatctcgattatagtttgcatagtttgctgttagtcatgtctcgaggatc

SEQ ID NO: 525081 - DNA, 60 bp, Artificial
  Synthetic oligonucleotide
gcgccattaaagaaggccacgaaattgtccttcctggagtgtaggtggtaagcacctctg

SEQ ID NO: 525082 - DNA, 60 bp, Artificial
  Synthetic oligonucleotide
gcgcggagatatacagccattattccaaaatcaaaacgatccaatcatgatatatttcgt

SEQ ID NO: 525083 - DNA, 60 bp, Artificial
  Synthetic oligonucleotide
gcgctacaatggctcaaaaggtagaaaaggtcgcttacgcatcatatgcggaggcattta

SEQ ID NO: 525084 - DNA, 60 bp, Artificial
  Synthetic oligonucleotide
gcgctattgacggacgtccatcattttacgttcctcctggtcgatacggtctggtgagag

SEQ ID NO: 525085 - DNA, 60 bp, Artificial
  Synthetic oligonucleotide
gcgctgaagtttggggtgaagatactaggcgacaaaattgatatccccctcttcttaaga

SEQ ID NO: 525086 - DNA, 60 bp, Artificial
  Synthetic oligonucleotide
gcgctgagcagcaggagatgatgacgcagtcgttgcaatacctcaccgagcgtgacgaat

SEQ ID NO: 525087 - DNA, 60 bp, Artificial
  Synthetic oligonucleotide
gcggacgacacgcacaaagagtttggactgatcagtttcaactattacgcgagcactaag

SEQ ID NO: 525088 - DNA, 60 bp, Artificial
  Synthetic oligonucleotide
gcggagcttaccgtatccaagatgggacggatgttttaagcttaatgattactgagagtg

SEQ ID NO: 525089 - DNA, 60 bp, Artificial
  Synthetic oligonucleotide
gcggatgacactccagatccagtgtctccaggtgaaaaggcagctcatagacgtatacat

SEQ ID NO: 525090 - DNA, 60 bp, Artificial
  Synthetic oligonucleotide
gcggatgagtgtgaccgaatttagtgagatcccgctggatggatttgacataccaccgga

SEQ ID NO: 525091 - DNA, 60 bp, Artificial
  Synthetic oligonucleotide
gcggcaccgataggggcgcgggagagtgccgttatgctggtgtcaaataacattaaggat

SEQ ID NO: 525092 - DNA, 60 bp, Artificial
  Synthetic oligonucleotide
gcggcatcagacacaaataatggtagagtatggtggtcaaatccttatccatgtctacgt

SEQ ID NO: 525093 - DNA, 60 bp, Artificial
  Synthetic oligonucleotide
gcggcgcctgaattaaacgtgcttgtttcggagggaggcgacgaccggaactcgaaggac

SEQ ID NO: 525094 - DNA, 60 bp, Artificial
  Synthetic oligonucleotide
gcgggatgacggggtggtataacaggactatgcagcaagcgccaatcgtgctaactcctg

SEQ ID NO: 525095 - DNA, 60 bp, Artificial
  Synthetic oligonucleotide
gcgggatttataaagttaccagattactacggaaaacaaattaggtcgaaattatatggg

SEQ ID NO: 525096 - DNA, 60 bp, Artificial
  Synthetic oligonucleotide
gcgggcccatcgctatgcagcgacgtacgattctcaacgccatcatgcacggagcagtta

SEQ ID NO: 525097 - DNA, 60 bp, Artificial
  Synthetic oligonucleotide
gcgggccttatcatttccaggctacatatatgttaacgttaagtatattagatgctacca

SEQ ID NO: 525098 - DNA, 60 bp, Artificial
  Synthetic oligonucleotide
gcggggcctgactttcatgctcgtcttttggctctggcagaggaggcgggacgccacaag

SEQ ID NO: 525099 - DNA, 60 bp, Artificial
  Synthetic oligonucleotide
gcggggctttttctagcgccttaatcaaacataggataccagccaagagggatgaatatc

SEQ ID NO: 525100 - DNA, 60 bp, Artificial
  Synthetic oligonucleotide
gcggttgaacaacctaaaccaacgttcaaaactgagcgttggcatgaacagccggattca

SEQ ID NO: 525101 - DNA, 60 bp, Artificial
  Synthetic oligonucleotide
gcgtagagtcctctttaatgcgggtacgtaatcctcgcgtgcatcaggtcaatgatgagc

SEQ ID NO: 525102 - DNA, 60 bp, Artificial
  Synthetic oligonucleotide
gccatgttggacacacacgtgctcggggatgggagcactatcgtcaagttaattgtcacg

SEQ ID NO: 525103 - DNA, 60 bp, Artificial
  Synthetic oligonucleotide
gccattgatggcgtcatccagggcagcgtacaatcaatactaacgggccaatcatatgga

SEQ ID NO: 525104 - DNA, 60 bp, Artificial
  Synthetic oligonucleotide
gccattggtagtggtgacggagcacgctattgcaaactttaccaaagctgagatggcact

SEQ ID NO: 525105 - DNA, 60 bp, Artificial
  Synthetic oligonucleotide
gcccagatatgatccaggtttcattgaacgcaggtgcaagaggtgatgtacagcagattt

SEQ ID NO: 525106 - DNA, 60 bp, Artificial
  Synthetic oligonucleotide
gcccatactctatccgctgactatatcaattaccacatgaacttatccaccacatcgggt

SEQ ID NO: 525107 - DNA, 60 bp, Artificial
  Synthetic oligonucleotide
gccccactgactcccaacgaatcctcacgcgtactcgcttggtatatacccgagtcacaa

SEQ ID NO: 525108 - DNA, 60 bp, Artificial
  Synthetic oligonucleotide
gccccgacgatcgaggttccgattccccaaactgactggtctccgccaattggatccctt

SEQ ID NO: 525109 - DNA, 60 bp, Artificial
  Synthetic oligonucleotide
gcccgccatgactatctcatatccgcgcagcttcacgtgaggatcataccaccccgcggc

SEQ ID NO: 525110 - DNA, 60 bp, Artificial
  Synthetic oligonucleotide
gcccgggatatagtccaagagatttggatcgagagcgtgataaatacatattggcgcgaa

SEQ ID NO: 525111 - DNA, 60 bp, Artificial
  Synthetic oligonucleotide
gcccttcagaatggttaagatcggagagcatgtaggcaatgattcagtgttcaagacaaa

SEQ ID NO: 525112 - DNA, 60 bp, Artificial
  Synthetic oligonucleotide
gccgaaagttgccctcgatatcctagataaggcaatgtctaaccaaacaggcgctacaat

SEQ ID NO: 525113 - DNA, 60 bp, Artificial
  Synthetic oligonucleotide
gccgagttgatgtgtctcgctcttacgatcgggatctcagtcgtcctaatgattacgagc

SEQ ID NO: 525114 - DNA, 60 bp, Artificial
  Synthetic oligonucleotide
gccgcgttttcagttgatcctcagctttattgtgattataacatcgtaataatgaaatat

SEQ ID NO: 525115 - DNA, 60 bp, Artificial
  Synthetic oligonucleotide
gccgctaattccatagctaacttagccctaatcaaaacagttttgtcacgtatagcgaat

SEQ ID NO: 525116 - DNA, 60 bp, Artificial
  Synthetic oligonucleotide
gccgctagacggattcgacataccaccagagctgatcagatagagtggagcccccagacc

SEQ ID NO: 525117 - DNA, 60 bp, Artificial
  Synthetic oligonucleotide
gccgcttaaggaactcggagtacgccaggatgagggatctgcgcagaaagatgcggaatc

SEQ ID NO: 525118 - DNA, 60 bp, Artificial
  Synthetic oligonucleotide
gccggattcagacgaagaccagaactcaactggtggtgtaataaatgattgggcgagaga

SEQ ID NO: 525119 - DNA, 60 bp, Artificial
  Synthetic oligonucleotide
gccggtcatcctccttaccagaagaacctgggccctcctttactgttaacaatccgcctg

SEQ ID NO: 525120 - DNA, 60 bp, Artificial
  Synthetic oligonucleotide
gccgtggagcgaaaactggttcattatgctaaaggtagaccattggaagcagatctaaca

SEQ ID NO: 525121 - DNA, 60 bp, Artificial
  Synthetic oligonucleotide
gccgttgcacaaaacgcttatgtgtgagggcagttatggcacggcataacgctcgcacat

SEQ ID NO: 525122 - DNA, 60 bp, Artificial
  Synthetic oligonucleotide
gcctacatgtgagggcagttatggcacggcataacgctcacatgcgcccgtgtcgctgtc

SEQ ID NO: 525123 - DNA, 60 bp, Artificial
  Synthetic oligonucleotide
gcctacattgcctgataatgttcaatatgttatacaatgcataggatcaagaacatacca

SEQ ID NO: 525124 - DNA, 60 bp, Artificial
  Synthetic oligonucleotide
gcctacggcacgcaaatgcatacgagacgtttggttagatcgaagaccgtacacccaatc

SEQ ID NO: 525125 - DNA, 60 bp, Artificial
  Synthetic oligonucleotide
gcctgcagatcggcgaaagagttcgctctattgcaagacaatcttactgtgttacgttat

SEQ ID NO: 525126 - DNA, 60 bp, Artificial
  Synthetic oligonucleotide
gccttaactgaagctcagaattatggacttaatataccaataacaggatcaatggatact

SEQ ID NO: 525127 - DNA, 60 bp, Artificial
  Synthetic oligonucleotide
gcgaaacatactcgagaatatgcggagttttattcgcagtcaaatcagttattatcgtat

SEQ ID NO: 525128 - DNA, 60 bp, Artificial
  Synthetic oligonucleotide
gcgaaattgggtaaccctcttgctccaaattacaaaaacgtcgtgtctgtagaaacatgt

SEQ ID NO: 525129 - DNA, 60 bp, Artificial
  Synthetic oligonucleotide
gcgaactttgcgacaggtacaggatataatggatgggctacaatcgatgttgaatataga

SEQ ID NO: 525130 - DNA, 60 bp, Artificial
  Synthetic oligonucleotide
gcgagacaatcattaccgtattgtcaaatcaagatagggagaaacttcgctttgagagcg

SEQ ID NO: 525131 - DNA, 60 bp, Artificial
  Synthetic oligonucleotide
gagtggcaagacaagctgtctatgggagaggagcggcaggggagtgccataacgtttgag

SEQ ID NO: 525132 - DNA, 60 bp, Artificial
  Synthetic oligonucleotide
gagtggcgccccaaggtttgcgtcgcgtggagtggttgatcccacggcgcaaattcccac

SEQ ID NO: 525133 - DNA, 60 bp, Artificial
  Synthetic oligonucleotide
gagtgggctgaaggtgagaatccatatgaatcaaaagaagtgactgcatcattgtgagag

SEQ ID NO: 525134 - DNA, 60 bp, Artificial
  Synthetic oligonucleotide
gagtggggctcttaaggatgaaaaagcagcgtttggtgcgatggcggaagcattacgtga

SEQ ID NO: 525135 - DNA, 60 bp, Artificial
  Synthetic oligonucleotide
gagtggtatggcgacggcgaggggggcgatacagatctatcggctaggcaaaacaatcca

SEQ ID NO: 525136 - DNA, 60 bp, Artificial
  Synthetic oligonucleotide
gagtgtaatcactctaatgaacagtacactgcacacaatactggaagatccgggaatggc

SEQ ID NO: 525137 - DNA, 60 bp, Artificial
  Synthetic oligonucleotide
gagtgtaatcactcttatgaatgatacattacataccataatggaagatcctggaatggc

SEQ ID NO: 525138 - DNA, 60 bp, Artificial
  Synthetic oligonucleotide
gagtgtaatcactttaatgaatgacacactgcattctataattcaggaccctggaatggc

SEQ ID NO: 525139 - DNA, 60 bp, Artificial
  Synthetic oligonucleotide
gagtgtaatcactttaatgaatgacacactacattctattattcaagatccaggaatggc

SEQ ID NO: 525140 - DNA, 60 bp, Artificial
  Synthetic oligonucleotide
gagtgtaatcactttgatgaatagtacattgcatacaatactagaagacccaggaatggc

SEQ ID NO: 525141 - DNA, 60 bp, Artificial
  Synthetic oligonucleotide
gagttaccatccaatctatttaggagcgatgcactatgacgtcgcgtaccgcgaattaaa

SEQ ID NO: 525142 - DNA, 60 bp, Artificial
  Synthetic oligonucleotide
gagttaggaacctcagcgctggaggggaatgggaggaacgccacactcggggaattaact

SEQ ID NO: 525143 - DNA, 60 bp, Artificial
  Synthetic oligonucleotide
gataaatgggaccaagacggaagtgccttcatggtttaagagccttaacccaatgcttgg

SEQ ID NO: 525144 - DNA, 60 bp, Artificial
  Synthetic oligonucleotide
gataaggggatggttgaaatctcgtcctcaaaacagacattgaaactagctgttgaagat

SEQ ID NO: 525145 - DNA, 60 bp, Artificial
  Synthetic oligonucleotide
gataatgatccgcatttactaagaatgcgaacttttaggaatgaaatcacaaagagtgac

SEQ ID NO: 525146 - DNA, 60 bp, Artificial
  Synthetic oligonucleotide
gataattggaagtgaaaagaagaacaagatcctaccaaaaactgctgctcggtttaaaat

SEQ ID NO: 525147 - DNA, 60 bp, Artificial
  Synthetic oligonucleotide
gatacaatatctgcgtaacgcttaaaggtgacacttagcgagggggaatcctaataacct

SEQ ID NO: 525148 - DNA, 60 bp, Artificial; identical to SEQ ID NO: 401682
  Synthetic oligonucleotide

SEQ ID NO: 525149 - DNA, 60 bp, Artificial
  Synthetic oligonucleotide
gatacagtatttggtatgtctgagtgagctaaaaacttaacacactagtcacgatgtgac

SEQ ID NO: 525150 - DNA, 60 bp, Artificial
  Synthetic oligonucleotide
gatacattcgaggtatttgaatcactagacgctcctcctcctttagcttcattaatctat

SEQ ID NO: 525151 - DNA, 60 bp, Artificial
  Synthetic oligonucleotide
gatacgcaagatcaaggatgagcggctatcgatgttagcgagcatgatgcctcagcaatc

SEQ ID NO: 525152 - DNA, 60 bp, Artificial
  Synthetic oligonucleotide
gatactcagctagaccgctattggacagcgttaaatctaatgattgactcatcagacttg

SEQ ID NO: 525153 - DNA, 60 bp, Artificial
  Synthetic oligonucleotide
gatactgtttttaccagccagatgcagtagatgattggattgctccagatatttacccaa

SEQ ID NO: 525154 - DNA, 60 bp, Artificial
  Synthetic oligonucleotide
gatagaactgcagaatatgattcaggtatatccgatgttgaataatttcagagaaattat

SEQ ID NO: 525155 - DNA, 60 bp, Artificial
  Synthetic oligonucleotide
gatagcacatatgaccttggtaatagctgcggtcatcgctttgataacttctgctagcac

SEQ ID NO: 525156 - DNA, 60 bp, Artificial
  Synthetic oligonucleotide
gatagctgacggtggtgatctgtcgttaaattttgttactggattactaccgccgttgct

SEQ ID NO: 525157 - DNA, 60 bp, Artificial
  Synthetic oligonucleotide
gatatagctgataggtacttattatactatattcgtgacgtccaatctagggacgttgga

SEQ ID NO: 525158 - DNA, 60 bp, Artificial
  Synthetic oligonucleotide
gatatccacacggaaagcggtgcccgtcgctctagtcacgaatgacgcgaaattcgtccc

SEQ ID NO: 525159 - DNA, 60 bp, Artificial
  Synthetic oligonucleotide
gatatcgcttcattctcaattgatccacaactttattgtgattacaatgtcgtgttgatg

SEQ ID NO: 525160 - DNA, 60 bp, Artificial
  Synthetic oligonucleotide
gagcggcgtgtcgaatcttgtcctcaatgccgcattgggaatacctcatgggacgtacat

SEQ ID NO: 525161 - DNA, 60 bp, Artificial
  Synthetic oligonucleotide
gagcggtaaactctgcattgactggcgaggcgctgggtgaatccatgaagagagccgtaa

SEQ ID NO: 525162 - DNA, 60 bp, Artificial
  Synthetic oligonucleotide
gagcgtatccacagcgtgcagcggctgaacgaagaattccccgcgaaagcgatatccaca

SEQ ID NO: 525163 - DNA, 60 bp, Artificial
  Synthetic oligonucleotide
gagcgttggtaaagtaccacaaatactgactttaaatgatattgtcataatcatgaaatc

SEQ ID NO: 525164 - DNA, 60 bp, Artificial
  Synthetic oligonucleotide
gagcgtttcaaggcgcaagaagccaggatggagcaagaacggaaggagtatgaagcgtac

SEQ ID NO: 525165 - DNA, 60 bp, Artificial
  Synthetic oligonucleotide
gagctgaagcgttggttacaactgctatccatatacaccgatggatcagagggtgtggta

SEQ ID NO: 525166 - DNA, 60 bp, Artificial
  Synthetic oligonucleotide
gagctggatagaacaggatagacattctatggagattcccactggtaaagtcagtctccc

SEQ ID NO: 525167 - DNA, 60 bp, Artificial
  Synthetic oligonucleotide
gagctgggaatcacccgagaaggagtggcggaacaaacggaaaagctgagagatctgcga

SEQ ID NO: 525168 - DNA, 60 bp, Artificial
  Synthetic oligonucleotide
gagcttacaaaaggagctggggatcacccgagaaggagtggcggagcaaacggaaaagct

SEQ ID NO: 525169 - DNA, 60 bp, Artificial
  Synthetic oligonucleotide
gagcttgagtaatatggtagattcaaatgtcccctacactatggtgaaagtggacccgtc

SEQ ID NO: 525170 - DNA, 60 bp, Artificial
  Synthetic oligonucleotide
gaggacagtaggtagagtggcgccccaaggtttacgtcgtgcagggtggttgacctcgcg

SEQ ID NO: 525171 - DNA, 60 bp, Artificial
  Synthetic oligonucleotide
gaggagcgaacgtggttactaccgttagaccacatcgtagacactgtaccgtgtttgcgg

SEQ ID NO: 525172 - DNA, 60 bp, Artificial
  Synthetic oligonucleotide
gaggatccaggaatggcgtattttccttatattgcatctgtcctgacagttttatttaca

SEQ ID NO: 525173 - DNA, 60 bp, Artificial
  Synthetic oligonucleotide
gaggatcctggaatggcgtattttccatatatcgcttctgtcttaactgtgctgttcacg

SEQ ID NO: 525174 - DNA, 60 bp, Artificial
  Synthetic oligonucleotide
gaggatgttaagaaaagtttcttacacttaattgatcatctctaaagggtcagggctgct

SEQ ID NO: 525175 - DNA, 60 bp, Artificial
  Synthetic oligonucleotide
gaggatttgagactgatagagagtttattctaaccaaaataatgcaaatgacgtcagttg

SEQ ID NO: 525176 - DNA, 60 bp, Artificial
  Synthetic oligonucleotide
gaggcagactcaattcccgaggacgttcgattccaggtcaaacttgaagtggggcgtcat

SEQ ID NO: 525177 - DNA, 60 bp, Artificial
  Synthetic oligonucleotide
gaggcatttagggatgacttacgattaaggcagattaagaaacgggtaaatgaacaagta

SEQ ID NO: 525178 - DNA, 60 bp, Artificial
  Synthetic oligonucleotide
gaggcgttgaagtctaacgcgcaaaggattgtatacgatgatgaactacagatgcatata

SEQ ID NO: 525179 - DNA, 60 bp, Artificial
  Synthetic oligonucleotide
gaggcttgattttacaatgcatgaatggaagcataccgagaatattaaatttaagtgacg

SEQ ID NO: 525180 - DNA, 60 bp, Artificial
  Synthetic oligonucleotide
gaggggagatcatccgtacgaagcataacgcgcaggtgattgcaaaatttggacgagacc

SEQ ID NO: 525181 - DNA, 60 bp, Artificial
  Synthetic oligonucleotide
gagggttagcgaagaaacgaaagaagccgctcctagcgcaaatcggctggagaggttgcg

SEQ ID NO: 525182 - DNA, 60 bp, Artificial
  Synthetic oligonucleotide
gagggttagcgaagagatgaaagaagccgcttccagcgtaagtcggctggaggggttgcg

SEQ ID NO: 525183 - DNA, 60 bp, Artificial
  Synthetic oligonucleotide
gaggtgactaaacagatggttcaagatgtatcaaatgatgtgagagaaacgtatgcacgg

SEQ ID NO: 525184 - DNA, 60 bp, Artificial
  Synthetic oligonucleotide
gaggttgcgcgcgaagcgtcaaggaaggaaaacattttggcgtatacgagtacaggcgga

SEQ ID NO: 525185 - DNA, 60 bp, Artificial
  Synthetic oligonucleotide
gagtagtaccgcacgacgaatcgccacagcggcgggtactgcgataagcaaagcggcgtc

SEQ ID NO: 525186 - DNA, 60 bp, Artificial
  Synthetic oligonucleotide
gagtcagatgaagatcaaggggcgacagcaggcaccgttaataattgggtggtagaggtg

SEQ ID NO: 525187 - DNA, 60 bp, Artificial
  Synthetic oligonucleotide
gagtcggcatgcactgagtatataaataacgggctgccacccatccaaaacaccaggaat

SEQ ID NO: 525188 - DNA, 60 bp, Artificial
  Synthetic oligonucleotide
gagtcggctggagaggttgcgtgaggcaagagcgaatatgtttaaggaagtagaggctgg

SEQ ID NO: 525189 - DNA, 60 bp, Artificial
  Synthetic oligonucleotide
gagtgacgcaagtctggctcggatcgctggctccagatcaaaacacctgaaagagatcga

SEQ ID NO: 525190 - DNA, 60 bp, Artificial
  Synthetic oligonucleotide
gagtgcgctgacatccaacaccgcaaaaaagatctataacacaatagggaaggcggctga

SEQ ID NO: 525191 - DNA, 60 bp, Artificial
  Synthetic oligonucleotide
gatggagagatgtgttcggaggtcttacgttccagtgctatgcgctagaagtttacgtta

SEQ ID NO: 525192 - DNA, 60 bp, Artificial
  Synthetic oligonucleotide
gatggcaccacgcccacaggttcagagcgtggtaccaagggaggagtcgcgttggatgga

SEQ ID NO: 525193 - DNA, 60 bp, Artificial
  Synthetic oligonucleotide
gatggcgaccgcgattgcaacaggaagagcgatcgagggcgcgtataaactaaaaaaggt

SEQ ID NO: 525194 - DNA, 60 bp, Artificial
  Synthetic oligonucleotide
gatggctgtcataactgcagttcaaggtagacctggaggaataaattttgcacttgacat

SEQ ID NO: 525195 - DNA, 60 bp, Artificial
  Synthetic oligonucleotide
gatggtgcttagattgttgtcaacatacggacttgacttactgccaaggatgcttaatat

SEQ ID NO: 525196 - DNA, 60 bp, Artificial
  Synthetic oligonucleotide
gatggtggcaagtattctatactatagtcgattatattaatcagattgtacaggtaatgt

SEQ ID NO: 525197 - DNA, 60 bp, Artificial
  Synthetic oligonucleotide
gatggttgcgactacgctggaacatagatttgaagacataccggataaaagacttgctat

SEQ ID NO: 525198 - DNA, 60 bp, Artificial
  Synthetic oligonucleotide
gatgtacgtgcgtcagaactgactgggtgttcgccattcaagacagtgaagatcgaagag

SEQ ID NO: 525199 - DNA, 60 bp, Artificial
  Synthetic oligonucleotide
gatgtattaatgtctgtagacgtcaggataccgcgtgaagtcacaaagaacatagacgtc

SEQ ID NO: 525200 - DNA, 60 bp, Artificial
  Synthetic oligonucleotide
gatgtcaaatcaaactggtgccacgatggctcaaaaagtggagaaagtcgcgtacgcttc

SEQ ID NO: 525201 - DNA, 60 bp, Artificial
  Synthetic oligonucleotide
gatgtccaaaagatcacgatcactaaattctgccgcgttctattatagggtttaggtata

SEQ ID NO: 525202 - DNA, 60 bp, Artificial
  Synthetic oligonucleotide
gatgtccatgtcaggattgttctcgatggccataatcaaacatcgcataccccagtttat

SEQ ID NO: 525203 - DNA, 60 bp, Artificial
  Synthetic oligonucleotide
gatgtgaaacaagagggcatacgaactggcttgcgatatcgacccgatgctgagacaaat

SEQ ID NO: 525204 - DNA, 60 bp, Artificial
  Synthetic oligonucleotide
gatgcgatcaattggatttctccttaactaaaggtattaatgttagtgctaatcttgatt

SEQ ID NO: 525205 - DNA, 60 bp, Artificial
  Synthetic oligonucleotide
gatgttctcgatataacggctgatccaactacagcgccacaaactgaacgaatgatgcgt

SEQ ID NO: 525206 - DNA, 60 bp, Artificial
  Synthetic oligonucleotide
gatgttggtagacttaaagataattcagttttgtatatagatatacgaacagatagagga

SEQ ID NO: 525207 - DNA, 60 bp, Artificial
  Synthetic oligonucleotide
gatgttttgctctcaacaatcaacttatcaacgtcaactcgattttaaagatagttttcg

SEQ ID NO: 525208 - DNA, 60 bp, Artificial
  Synthetic oligonucleotide
gattaaacgttcatccgaggagttaaaacagaggcaaattcagatgaacttagttgattg

SEQ ID NO: 525209 - DNA, 60 bp, Artificial
  Synthetic oligonucleotide
gattagatcgaatgcagttaagacaaatgcagacactggcgtgtctatggattcatcgac

SEQ ID NO: 525210 - DNA, 60 bp, Artificial
  Synthetic oligonucleotide
gattagatttatttacgattgtagcttcaacagtgaacaaatatggagtacctagacata

SEQ ID NO: 525211 - DNA, 60 bp, Artificial
  Synthetic oligonucleotide
gattatgcgttcatccgaggagttaaaacagagacaaatccagattaatttagttgattg

SEQ ID NO: 525212 - DNA, 60 bp, Artificial
  Synthetic oligonucleotide
gattcagaatacacgaaacattgttccattggcgctttcagctagaaatataatatcaca

SEQ ID NO: 525213 - DNA, 60 bp, Artificial
  Synthetic oligonucleotide
gattcatgtacaattaaggtatgtccattgaatacgcagacattaggaatcggatgtctc

SEQ ID NO: 525214 - DNA, 60 bp, Artificial
  Synthetic oligonucleotide
gattccggcatatctgacgttgaataatgaaatagagatcacatttgccaccataagact

SEQ ID NO: 525215 - DNA, 60 bp, Artificial
  Synthetic oligonucleotide
gattccttgatggacccagctattttaacgtcattatcttcaaatcttaacgcagttatg

SEQ ID NO: 525216 - DNA, 60 bp, Artificial
  Synthetic oligonucleotide
gattcgcttctggtgaagagttggacatatctgaattagctgatctaatactgaatgagt

SEQ ID NO: 525217 - DNA, 60 bp, Artificial
  Synthetic oligonucleotide
gattctaggtcagcaacctgcatagtaaagagaacatctaggaccatttccaccccctac

SEQ ID NO: 525218 - DNA, 60 bp, Artificial
  Synthetic oligonucleotide
gattgactgagaagccacagtcaatcatatcgcgtgtggctcagccttaatcccgtttaa

SEQ ID NO: 525219 - DNA, 60 bp, Artificial
  Synthetic oligonucleotide
gattgaggaacatgttggtaatgattcagtgttcaagacaaaactggttcgtgatgaaca

SEQ ID NO: 525220 - DNA, 60 bp, Artificial
  Synthetic oligonucleotide
gattgcggcgtcggacacaaataacggtagagtatggtggtcaaacccttatccatgttt

SEQ ID NO: 525221 - DNA, 60 bp, Artificial
  Synthetic oligonucleotide
gattggtctaaagttcctatactaaatgagatgtctgaattgtttgatcaaaattggaag

SEQ ID NO: 525222 - DNA, 60 bp, Artificial
  Synthetic oligonucleotide
gatatgcttcgatggctatccaacaatatctgagagtcggctacgctgaagaagtcagat

SEQ ID NO: 525223 - DNA, 60 bp, Artificial
  Synthetic oligonucleotide
gatatgtcagaattagccgatttgatacttaatgaatggctttgtaacccaatggacata

SEQ ID NO: 525224 - DNA, 60 bp, Artificial
  Synthetic oligonucleotide
gatcaaaataggaaggaacttcgctttgagggcggttgcgactccagaaccgaagggata

SEQ ID NO: 525225 - DNA, 60 bp, Artificial
  Synthetic oligonucleotide
gatcaaggtcttgggtgataagatagacgtcccactcttcctaaaaaatgcgtgactgca

SEQ ID NO: 525226 - DNA, 60 bp, Artificial
  Synthetic oligonucleotide
gatcactaaattctgccgcgttctattatagggtttaggtatagcttagattagaattgt

SEQ ID NO: 525227 - DNA, 60 bp, Artificial
  Synthetic oligonucleotide
gatcattactacacgacaagttgctacaccggagctgaagcattagttacgacagctatc

SEQ ID NO: 525228 - DNA, 60 bp, Artificial
  Synthetic oligonucleotide
gatcattgggcctagggtaagctcgaggattcgtaactcttatattgaccgaattgatgt

SEQ ID NO: 525229 - DNA, 60 bp, Artificial
  Synthetic oligonucleotide
gatcccattggattattacgtgagttctttattttgtgtctgccacatccgaagaagatt

SEQ ID NO: 525230 - DNA, 60 bp, Artificial
  Synthetic oligonucleotide
gatccgcaactttattgcgattataacgttgtattgatgaagtatgattcaacattagag

SEQ ID NO: 525231 - DNA, 60 bp, Artificial
  Synthetic oligonucleotide
gatcgaagagcatgtggggaataattcagttttcgagacgaaattagtccgtgatgagca

SEQ ID NO: 525232 - DNA, 60 bp, Artificial
  Synthetic oligonucleotide
gatcgatgtctcggaaccagtcggaatcagcagggctgtcgagatccaaaccactaacaa

SEQ ID NO: 525233 - DNA, 60 bp, Artificial
  Synthetic oligonucleotide
gatcgctcgcgcgattgaatctaaatacggtacgaaggttgatgtttacagagatgaagc

SEQ ID NO: 525234 - DNA, 60 bp, Artificial
  Synthetic oligonucleotide
gatcgctggttagcaactattttaatagaaccaaacgttacaacaactaccagaacatac

SEQ ID NO: 525235 - DNA, 60 bp, Artificial
  Synthetic oligonucleotide
gatctaaaacggtgcacccaatttacttaggatctatgcactatgatataacgtatgaaa

SEQ ID NO: 525236 - DNA, 60 bp, Artificial
  Synthetic oligonucleotide
gatctctaagatcaagagagatgatgctggtcagcaagtttgtcccaattatgtcacgct

SEQ ID NO: 525237 - DNA, 60 bp, Artificial
  Synthetic oligonucleotide
gatcttaacggcaggtgatgtcactgtagcgcgctttgaccttcttgacgtgtccgggat

SEQ ID NO: 525238 - DNA, 60 bp, Artificial
  Synthetic oligonucleotide
gatgaaattagaacaattggatcagaaaagaatcaaaacgtaacaattaaccctggtccg

SEQ ID NO: 525239 - DNA, 60 bp, Artificial
  Synthetic oligonucleotide
gatgaatatcactgtatatcgacttacttgctcccacaaccgggagcggatacggaaatg

SEQ ID NO: 525240 - DNA, 60 bp, Artificial
  Synthetic oligonucleotide
gatgaatctactaaaaggtatgaattgcaatgtgtgggtgcgtgtgagcgtgttgctttt

SEQ ID NO: 525241 - DNA, 60 bp, Artificial
  Synthetic oligonucleotide
gatgacaacttttctgctttcccgtacttatacataccagtgaactatggtcagatggtg

SEQ ID NO: 525242 - DNA, 60 bp, Artificial
  Synthetic oligonucleotide
gatgagattgagaaacaaatggacagagtcgtaaaagaaatgagacgtcagttggaaatg

SEQ ID NO: 525243 - DNA, 60 bp, Artificial
  Synthetic oligonucleotide
gatgcataatggaaatcagagagcaattgtgccgtatgttccacccccttatgcgcatgc

SEQ ID NO: 525244 - DNA, 60 bp, Artificial
  Synthetic oligonucleotide
gatgcatataatgaagcagtgcggatgagtgtgaccgaatttagtgagatcccgctggat

SEQ ID NO: 525245 - DNA, 60 bp, Artificial
  Synthetic oligonucleotide
gatgccacgcgctaccgtgatgcttacatgctcctacaaagatattagaatgttggatgg

SEQ ID NO: 525246 - DNA, 60 bp, Artificial
  Synthetic oligonucleotide
gatgcgtttagatataaccccgtgcgaaacgacgggatagtattaccgaggattgttgac

SEQ ID NO: 525247 - DNA, 60 bp, Artificial
  Synthetic oligonucleotide
gatggaaatgatgtcattagtttgatgatatcggcggatggagtagagggtacgcaagaa

SEQ ID NO: 525248 - DNA, 60 bp, Artificial
  Synthetic oligonucleotide
gatggaaccatggtgacaaccagaatcaatcgcgtggccgcatttatggacgcgaacatc

SEQ ID NO: 525249 - DNA, 60 bp, Artificial
  Synthetic oligonucleotide
gatggacaagcggttctgcagatacataatcctactcaacagaatgcaatggtacagatt

SEQ ID NO: 525250 - DNA, 60 bp, Artificial
  Synthetic oligonucleotide
gatggacgtgcaacctctgagagttcagctgaaggaagatcatagtacaatacaatacgg

SEQ ID NO: 525251 - DNA, 60 bp, Artificial
  Synthetic oligonucleotide
gatggagagactggaagacgagatagaactgctaatgagagagatggaactgatggagcg

SEQ ID NO: 525252 - DNA, 60 bp, Artificial
  Synthetic oligonucleotide
ggcgcgggagagtgccgttatgctagtgtcaaataacattaaggatgtggcgcgtgcaac

SEQ ID NO: 525253 - DNA, 60 bp, Artificial
  Synthetic oligonucleotide
ggcggcgagcgcggggataagatatacacagaggaggatcaacaggcttgaggcagagca

SEQ ID NO: 525254 - DNA, 60 bp, Artificial
  Synthetic oligonucleotide
ggcggtccaacttcatacaccgcagcttcggtatcgcagtggattctgtcgactccgctt

SEQ ID NO: 525255 - DNA, 60 bp, Artificial
  Synthetic oligonucleotide
ggcgtattcgagcacgggtggagatactaagacggagttccttcatttaattgatcacct

SEQ ID NO: 525256 - DNA, 60 bp, Artificial
  Synthetic oligonucleotide
ggcgtcctcaaattgtgctaccctctcacactgttgaggaaatgttgactaacactggcc

SEQ ID NO: 525257 - DNA, 60 bp, Artificial
  Synthetic oligonucleotide
ggcgtgggtggtcaaagtcagctttcgcatgcgctacaggaatggagccagctgaatgtg

SEQ ID NO: 525258 - DNA, 60 bp, Artificial
  Synthetic oligonucleotide
ggcatgtgacacatacgcggttggaaaaattgagcaatggtcggtgcggcagctacgcgc

SEQ ID NO: 525259 - DNA, 60 bp, Artificial
  Synthetic oligonucleotide
ggctataaaatggcttcgctcatttatagacaactgcttactaattcatacacagtcaat

SEQ ID NO: 525260 - DNA, 60 bp, Artificial
  Synthetic oligonucleotide
ggctataaaatggcttcgctcatttatagacaattgcttacaaattcatataccgttgac

SEQ ID NO: 525261 - DNA, 60 bp, Artificial
  Synthetic oligonucleotide
ggctataaaatggcttcgctcatatacagacagctactcgctaattcttatacagttgat

SEQ ID NO: 525262 - DNA, 60 bp, Artificial
  Synthetic oligonucleotide
ggctattaaagctgtacaatggggaagtacaatctaatcttgtcagaatatctatctttt

SEQ ID NO: 525263 - DNA, 60 bp, Artificial
  Synthetic oligonucleotide
ggctccaataacgatgtatgagctacgaaatctcatgcgtttggacggatattcgcatgt

SEQ ID NO: 525264 - DNA, 60 bp, Artificial
  Synthetic oligonucleotide
ggctggtgtagtagtgagcattggtggtgtaaatataagagcgggaaggatcacggcgtg

SEQ ID NO: 525265 - DNA, 60 bp, Artificial
  Synthetic oligonucleotide
ggcttacacttcaacggaggaggatgttaagaaaagtttcttacacttaatagatcatct

SEQ ID NO: 525266 - DNA, 60 bp, Artificial
  Synthetic oligonucleotide
ggctttaaaagagagaatttccgtctggctagcggttagctccttttaatgtatggtatt

SEQ ID NO: 525267 - DNA, 60 bp, Artificial
  Synthetic oligonucleotide
ggcttttaaagcgctacagtgatgtctctcagtattgacgtgacgagtcttccttccatt

SEQ ID NO: 525268 - DNA, 60 bp, Artificial; identical to SEQ ID NO: 116335
  Synthetic oligonucleotide

SEQ ID NO: 525269 - DNA, 60 bp, Artificial
  Synthetic oligonucleotide
ggcttttttaaaagttctgttccgaaagagcgcgtgcggaaagatggaaaagcttaccga

SEQ ID NO: 525270 - DNA, 60 bp, Artificial
  Synthetic oligonucleotide
ggcttttttttatgaaaagtcttgtggaagccatggctacttttaaagacgcttgctatc

SEQ ID NO: 525271 - DNA, 60 bp, Artificial
  Synthetic oligonucleotide
ggcttttttttgaaaagtcttgtgttagccatggcaacctttaaggatgcttgttttcat

SEQ ID NO: 525272 - DNA, 60 bp, Artificial
  Synthetic oligonucleotide
gggaaacatcagtaatgttagtatcaaattcaatcgatgatgtggcacacgcaacagcgt

SEQ ID NO: 525273 - DNA, 60 bp, Artificial
  Synthetic oligonucleotide
gggaacgcacaggagacgccacaaggagtaactcttaatgtaggtggggtaaacatgaga

SEQ ID NO: 525274 - DNA, 60 bp, Artificial
  Synthetic oligonucleotide
gggaatttatattaacaaaaatcatgcaaatgacttcagtggctattactggatcactta

SEQ ID NO: 525275 - DNA, 60 bp, Artificial
  Synthetic oligonucleotide
gggacatatattacatggaggggcaataaccgttgagggtagaggatttcgacaggcgta

SEQ ID NO: 525276 - DNA, 60 bp, Artificial
  Synthetic oligonucleotide
gggacatttttacaatcgcaatagattacagtgaatatgatacacacctcactcgataca

SEQ ID NO: 525277 - DNA, 60 bp, Artificial
  Synthetic oligonucleotide
gggaccaacctcgtgttttaccagttgaatgatgccttgtttaaggagtacggcctggaa

SEQ ID NO: 525278 - DNA, 60 bp, Artificial
  Synthetic oligonucleotide
gggacctagagagaacgttgcagttattcaagtaggtggttcaaatgtcttagatattac

SEQ ID NO: 525279 - DNA, 60 bp, Artificial
  Synthetic oligonucleotide
gggacgtacgaagttgaccctttgatgctgccagcgtatgagatcgaccagaccaagaac

SEQ ID NO: 525280 - DNA, 60 bp, Artificial
  Synthetic oligonucleotide
gggacgttttgaccgggttaacaggtaacgctctaactgccgacatgcagcaagcgttct

SEQ ID NO: 525281 - DNA, 60 bp, Artificial
  Synthetic oligonucleotide
gggagagtatactgcaacattgtttgtaaagaagctgaaatgggataacgtaccactata

SEQ ID NO: 525282 - DNA, 60 bp, Artificial
  Synthetic oligonucleotide
ggatcaagtggtatcaaacgggatataccatcgacatcaggaaagttctattgcctggat

SEQ ID NO: 525283 - DNA, 60 bp, Artificial
  Synthetic oligonucleotide
ggatcagatatactcataagaagataaacagacgagacgcggagcaggagattgcgaacc

SEQ ID NO: 525284 - DNA, 60 bp, Artificial
  Synthetic oligonucleotide
ggatcagtctattttaaagagtactcaaatatcattgatttttccgttgacccacaatta

SEQ ID NO: 525285 - DNA, 60 bp, Artificial; identical to SEQ ID NO: 421462
  Synthetic oligonucleotide

SEQ ID NO: 525286 - DNA, 60 bp, Artificial
  Synthetic oligonucleotide
ggatccggcaaaaggtgaagaacagggattagtgacgtcagagggcgcattcgaagaatt

SEQ ID NO: 525287 - DNA, 60 bp, Artificial
  Synthetic oligonucleotide
ggatcgacggcgtcagcttgggctaacatttcagaacagacgcaagatgctgttagcgaa

SEQ ID NO: 525288 - DNA, 60 bp, Artificial
  Synthetic oligonucleotide
ggatcgggacatctttacaattgcaatagattacagtgaatatgatacacacctcactcg

SEQ ID NO: 525289 - DNA, 60 bp, Artificial
  Synthetic oligonucleotide
ggatcggtctattttaaagagtattccaatattgttgatttttctgttgacccacaattg

SEQ ID NO: 525290 - DNA, 60 bp, Artificial
  Synthetic oligonucleotide
ggatctttaggcgcttcttttgatgtagatgctgcgatagaatttggtgcacatgtgttt

SEQ ID NO: 525291 - DNA, 60 bp, Artificial
  Synthetic oligonucleotide
ggatgcgtggataaccgattcgtacaacccacgacacatacgatcgttagaactgtgtag

SEQ ID NO: 525292 - DNA, 60 bp, Artificial
  Synthetic oligonucleotide
ggatggtgtttagattgctgtcaatatactgatttaacttattgtagcgggtgtaccatg

SEQ ID NO: 525293 - DNA, 60 bp, Artificial
  Synthetic oligonucleotide
ggattggcaggtcccggagtagtgattcctaccgctgtataacgggggagggtatgccat

SEQ ID NO: 525294 - DNA, 60 bp, Artificial
  Synthetic oligonucleotide
ggcaagatgccagccgtcttttccgggatgctcactggaaactgcaaaatgtaccccttc

SEQ ID NO: 525295 - DNA, 60 bp, Artificial
  Synthetic oligonucleotide
ggcacccaaatcgcagggagtgacacgccagctcatggatgtctacttttaacgatacca

SEQ ID NO: 525296 - DNA, 60 bp, Artificial
  Synthetic oligonucleotide
ggcacttgtgaaatcgaatggaaatgttgggcattgttcatcacaggaatcagtgtataa

SEQ ID NO: 525297 - DNA, 60 bp, Artificial
  Synthetic oligonucleotide
ggcagtgatgaaaggagatcggaaacatggaaggaatagccgagacggcccctcaaaaaa

SEQ ID NO: 525298 - DNA, 60 bp, Artificial
  Synthetic oligonucleotide
ggcatatatttaccaataacgggatcactagacgctgtatatacgaattcaactagtgga

SEQ ID NO: 525299 - DNA, 60 bp, Artificial
  Synthetic oligonucleotide
ggcatgattcaaggtattaaggaagcgatgtccccatataaggatctacgctatgagggc

SEQ ID NO: 525300 - DNA, 60 bp, Artificial
  Synthetic oligonucleotide
ggcattttgttcatcaaagtcacgatggagcacgcgacagatatgcctgtaattaatgaa

SEQ ID NO: 525301 - DNA, 60 bp, Artificial
  Synthetic oligonucleotide
ggccaacaggatcggtttactttaaagaatatacagatgttgcatcattttccgtagatc

SEQ ID NO: 525302 - DNA, 60 bp, Artificial
  Synthetic oligonucleotide
ggccaacaggctcagtctattttaaagagtattcaaatattgttgatttctccgttgacc

SEQ ID NO: 525303 - DNA, 60 bp, Artificial
  Synthetic oligonucleotide
ggccgatccaactacagcaccacaaaccgagagaatgatgcgtattaattggaaaaaatg

SEQ ID NO: 525304 - DNA, 60 bp, Artificial
  Synthetic oligonucleotide
ggccgctttcattggagcgtggaaaatgaagcgtacgatcaaggagggggctacatttag

SEQ ID NO: 525305 - DNA, 60 bp, Artificial
  Synthetic oligonucleotide
ggcctcgattgactcgtggcttgaattactgcgtcacttatgatgcgtgactgctaggtg

SEQ ID NO: 525306 - DNA, 60 bp, Artificial
  Synthetic oligonucleotide
ggcctgagcgtattatccatcagcctatcctagagtcgatttatgtatcgcatttatcac

SEQ ID NO: 525307 - DNA, 60 bp, Artificial
  Synthetic oligonucleotide
ggcgaaagtatgctgtgttaagttaacagctatggatttagaactaccgataacagcgaa

SEQ ID NO: 525308 - DNA, 60 bp, Artificial
  Synthetic oligonucleotide
ggcgacggtaacaacttatggtgacggtctccccgcgttgaaccattagagcggcgaggc

SEQ ID NO: 525309 - DNA, 60 bp, Artificial
  Synthetic oligonucleotide
ggcgatgtatgatcgagagacggtttggctccaatgtttcaaaagtttttctcaaccgta

SEQ ID NO: 525310 - DNA, 60 bp, Artificial
  Synthetic oligonucleotide
ggcgcacatcccgcggcgctaaacatcgttatgacggaggagatgtacgttgattcgatt

SEQ ID NO: 525311 - DNA, 60 bp, Artificial
  Synthetic oligonucleotide
ggcgccccgaggtctgtatcgtgtagagtggttgatctcacgatgcagactcctactgct

SEQ ID NO: 525312 - DNA, 60 bp, Artificial
  Synthetic oligonucleotide
gggtgtggtatctggaatgatgaaggatggcaggagggagtgtttatgctgggacgtgtg

SEQ ID NO: 525313 - DNA, 60 bp, Artificial
  Synthetic oligonucleotide
gggtgtggtggtctaacccctacccttgccttagaggtacattgatagcgtccgaatgta

SEQ ID NO: 525314 - DNA, 60 bp, Artificial
  Synthetic oligonucleotide
gggttattaacagccgcggcgataggcctacagcgcgccagacagagccaccagcgcaga

SEQ ID NO: 525315 - DNA, 60 bp, Artificial
  Synthetic oligonucleotide
gggtttaagaatatatatgattggacctttctaccaacagattttactacaactgatgcc

SEQ ID NO: 525316 - DNA, 60 bp, Artificial
  Synthetic oligonucleotide
ggtaaacagctaaagcctaatccgaataatttagtgcaggatgtctcggatttaactcga

SEQ ID NO: 525317 - DNA, 60 bp, Artificial
  Synthetic oligonucleotide
ggtactcacccttacgtgcgacaagattgtggatggacgtggtaatgctgtctttctaac

SEQ ID NO: 525318 - DNA, 60 bp, Artificial
  Synthetic oligonucleotide
ggtagaggtgcagaaacaggaggaggaagttgaacgccggaagacacaggaagcgcgact

SEQ ID NO: 525319 - DNA, 60 bp, Artificial
  Synthetic oligonucleotide
ggtagagtggcgccccgaggtctgtatcgtgtagagtggttgatctcacgatgcagactc

SEQ ID NO: 525320 - DNA, 60 bp, Artificial
  Synthetic oligonucleotide
ggtatacgtaggtccagagaacgtgagacaaaacaggcagaccagctacgctatgcgggg

SEQ ID NO: 525321 - DNA, 60 bp, Artificial
  Synthetic oligonucleotide
ggtattgcaccaccgccacaattcaaaaaacgctataatacaaatgacaattcaagagga

SEQ ID NO: 525322 - DNA, 60 bp, Artificial
  Synthetic oligonucleotide
ggtcagcataaaccatattttgggcaactgcagtattcaggtcagatgatggctctttca

SEQ ID NO: 525323 - DNA, 60 bp, Artificial
  Synthetic oligonucleotide
ggtcgaatatcatctcaagcaggaatacgaaaacttgttcaagaagacaaaaagacaaga

SEQ ID NO: 525324 - DNA, 60 bp, Artificial
  Synthetic oligonucleotide
ggtcggcgtcgaattaagatgcgaaaaggttttggtgatgcactaaggagctacgctttc

SEQ ID NO: 525325 - DNA, 60 bp, Artificial
  Synthetic oligonucleotide
ggtgaagtattgtattgtgacgattttcaatacgttgttgaaattggcaggttataaaga

SEQ ID NO: 525326 - DNA, 60 bp, Artificial
  Synthetic oligonucleotide
ggtgaatggaaagactcattatcacaaatgcttcttacaaaaggttggccaacaggatca

SEQ ID NO: 525327 - DNA, 60 bp, Artificial
  Synthetic oligonucleotide
ggtgacaaaattgatgtcccactcttcctacgaaacgcgtgacagcggtgatcccgggac

SEQ ID NO: 525328 - DNA, 60 bp, Artificial
  Synthetic oligonucleotide
ggtgacctcttacaataaaatcttaacggaagaagatttgcagatgcggcgattggcaac

SEQ ID NO: 525329 - DNA, 60 bp, Artificial
  Synthetic oligonucleotide
ggtgactataacttcgcattaccagtgggtcagtggccagtaatgactggaggcgctgta

SEQ ID NO: 525330 - DNA, 60 bp, Artificial
  Synthetic oligonucleotide
ggtgagtgcgtgcaatcagaggacagggccgctgaacttaactactcttgccgaccagat

SEQ ID NO: 525331 - DNA, 60 bp, Artificial
  Synthetic oligonucleotide
ggtgcccccaggttaccgtgatgcgggattggcaggtctcgacatggtaattcctactgt

SEQ ID NO: 525332 - DNA, 60 bp, Artificial
  Synthetic oligonucleotide
ggtgcgccgagaagcggtgccatacggatacagaggtgcgtaggttccgcgactgtatga

SEQ ID NO: 525333 - DNA, 60 bp, Artificial
  Synthetic oligonucleotide
ggtggatataccgaggatgattcaagaatggttagttgattgttcactagagaaatttac

SEQ ID NO: 525334 - DNA, 60 bp, Artificial
  Synthetic oligonucleotide
ggtgtgaatcataaactagatgtaactacaactacttgtactattagaaattgtagaaaa

SEQ ID NO: 525335 - DNA, 60 bp, Artificial
  Synthetic oligonucleotide
ggtgtttccaattcgtgtgtaatgggtgagtgagctgatgtggtcgccaggacacgtgcc

SEQ ID NO: 525336 - DNA, 60 bp, Artificial
  Synthetic oligonucleotide
ggttactacaaaagacgaaattgagcaacagatggatagaattgttaaagagatgagacg

SEQ ID NO: 525337 - DNA, 60 bp, Artificial
  Synthetic oligonucleotide
ggttatgtccaaaagatcacggtcattaaattcagcagctttttactatagggtttgata

SEQ ID NO: 525338 - DNA, 60 bp, Artificial
  Synthetic oligonucleotide
ggttcgccggagcccacacatgccagctatgttacgccgctgcacacaccgcccatcgga

SEQ ID NO: 525339 - DNA, 60 bp, Artificial
  Synthetic oligonucleotide
ggttgacctcgcggcgtaaattcccactgctgtataacgggggagggtgcgcgatactac

SEQ ID NO: 525340 - DNA, 60 bp, Artificial
  Synthetic oligonucleotide
ggtttagctaactctgtatctacattaacagactcactgtccgacgcagcttcttcaatt

SEQ ID NO: 525341 - DNA, 60 bp, Artificial
  Synthetic oligonucleotide
gggagctataaaatgtggagtttccctgctgggagaagtgaatattcccgaatttctgcg

SEQ ID NO: 525342 - DNA, 60 bp, Artificial
  Synthetic oligonucleotide
gggagtataaacgtaaaacgggagcgagagagggggcctcgattgactcgtggcttgaat

SEQ ID NO: 525343 - DNA, 60 bp, Artificial
  Synthetic oligonucleotide
ggaagcgaagagatagcacaatgtctccaaaataggtacggagtgagtattccagtatat

SEQ ID NO: 525344 - DNA, 60 bp, Artificial
  Synthetic oligonucleotide
gggatacagcagtacgattcgcggaaagcgacattggttcagcggcaatcgatgggctca

SEQ ID NO: 525345 - DNA, 60 bp, Artificial
  Synthetic oligonucleotide
gggatgggaatcgtccaaccgtatatgaggaatgattttgaccgaaatgagatgccggat

SEQ ID NO: 525346 - DNA, 60 bp, Artificial
  Synthetic oligonucleotide
gggatgtcgtgttagatctcgggacgggaccagaggctaagatacttgaactgatacccg

SEQ ID NO: 525347 - DNA, 60 bp, Artificial
  Synthetic oligonucleotide
gggattcatgcagggtcgacataagtgccaactgtgctttctaaaaaatggttgtgaccg

SEQ ID NO: 525348 - DNA, 60 bp, Artificial
  Synthetic oligonucleotide
gggattgtacgacataaagtttgtaaaaaggttgtactgaaacaacagtgtaacgtaatc

SEQ ID NO: 525349 - DNA, 60 bp, Artificial
  Synthetic oligonucleotide
gggcatgttcgactttacaggaagcgaggattgtgctcgaggccaatgtgatggagatac

SEQ ID NO: 525350 - DNA, 60 bp, Artificial
  Synthetic oligonucleotide
gggcctgaccgacaaccatttggttacttcttgacggcagcggaagttacacaacacgga

SEQ ID NO: 525351 - DNA, 60 bp, Artificial
  Synthetic oligonucleotide
gggcgatcttatagaagaggaatcgctacaccggcgaaggactttggtcactttggccta

SEQ ID NO: 525352 - DNA, 60 bp, Artificial
  Synthetic oligonucleotide
gggcgcaactatggcacaaaaagtagagaaggttgcttatgcttcgtatgcggaggcgtt

SEQ ID NO: 525353 - DNA, 60 bp, Artificial
  Synthetic oligonucleotide
gggcgtcgcctcacgtgtgtttgactatgatgtacaattttgaagtgtccagtgcggtgt

SEQ ID NO: 525354 - DNA, 60 bp, Artificial
  Synthetic oligonucleotide
gggcttgcgattacttttagggatatgctggagagtgtgaagacttacaaccttgtcccg

SEQ ID NO: 525355 - DNA, 60 bp, Artificial
  Synthetic oligonucleotide
ggggaggtaggtgtgaatcggcacgagagacagctagcgcttggaggagtacagcgagtc

SEQ ID NO: 525356 - DNA, 60 bp, Artificial
  Synthetic oligonucleotide
ggggatggactcattctttgctgtccgaaattgcgaccaagatcgaatgttgggattaag

SEQ ID NO: 525357 - DNA, 60 bp, Artificial
  Synthetic oligonucleotide
ggggcgaaagacggattggaggattagcaacgcaggagattgccgactttgtgaagaaga

SEQ ID NO: 525358 - DNA, 60 bp, Artificial
  Synthetic oligonucleotide
ggggcgcgagagagtgccgttatgttagtgtcaaataacattaaagatgtagcgcgtgca

SEQ ID NO: 525359 - DNA, 60 bp, Artificial
  Synthetic oligonucleotide
ggggcgcgggagagtgctgttatgttagtgtcgaataacattaaggatgtggtgcgtgca

SEQ ID NO: 525360 - DNA, 60 bp, Artificial
  Synthetic oligonucleotide
ggggcgtcatggtttacgactattctgaactggagagggattatcaaaaaggacgatctt

SEQ ID NO: 525361 - DNA, 60 bp, Artificial
  Synthetic oligonucleotide
ggggctttgatcgtatgatagttactaagaagttgaagtggcagaatgtaccactttact

SEQ ID NO: 525362 - DNA, 60 bp, Artificial
  Synthetic oligonucleotide
gggggaagtaaatgttcccgaatttctgcgttacgcgtgaaggcgggtggcatacggatc

SEQ ID NO: 525363 - DNA, 60 bp, Artificial
  Synthetic oligonucleotide
gggggattagctactcaagagatagtcgattatgtcagaaagaaggttggagttgaagtt

SEQ ID NO: 525364 - DNA, 60 bp, Artificial
  Synthetic oligonucleotide
ggggtggaaggcacgcaggagcgttgggaagagtggaaattcgaaacaatttcatgcgta

SEQ ID NO: 525365 - DNA, 60 bp, Artificial
  Synthetic oligonucleotide
ggggtgttatggtttacgactattctgaactagagagggattctcaaaaggggcgatctt

SEQ ID NO: 525366 - DNA, 60 bp, Artificial
  Synthetic oligonucleotide
gggtatacagacgcgagtgtcggttgtgggagagagtgacccattcatacgtctcttaga

SEQ ID NO: 525367 - DNA, 60 bp, Artificial
  Synthetic oligonucleotide
gggtcaatgtttcgctcgatccactcaagttggactgatcctcttcagatagttgaagat

SEQ ID NO: 525368 - DNA, 60 bp, Artificial
  Synthetic oligonucleotide
gggtgacagactcaatgctgtcgaaccaagaattaatgacttggatacactcacgtctga

SEQ ID NO: 525369 - DNA, 60 bp, Artificial
  Synthetic oligonucleotide
gggtgcagattactcagcgccactttgcctacgtttgcgctcgctcccccgactggaatg

SEQ ID NO: 525370 - DNA, 60 bp, Artificial
  Synthetic oligonucleotide
gggtgcgattaaagtgggcgtaagcttaattggagagattgacttgcccgagtttatgcg

SEQ ID NO: 525371 - DNA, 60 bp, Artificial
  Synthetic oligonucleotide
gggtgtaatcattgcatatgatggacaagcgccagtgaatgttaacaacccaggagtagc

SEQ ID NO: 525372 - DNA, 60 bp, Artificial
  Synthetic oligonucleotide
gctatttttgcctcttcccaaacgttgtcgcaatggaggtgtgcctgcccaacggtcatc

SEQ ID NO: 525373 - DNA, 60 bp, Artificial
  Synthetic oligonucleotide
gctcagaagtgctagatattacagcagacccaaccactgcgccacaaactgaacgtatga

SEQ ID NO: 525374 - DNA, 60 bp, Artificial
  Synthetic oligonucleotide
gcccgcgcgattgaatctaaatacggtacgaaggttgatgtttacagggatgaggcgtca

SEQ ID NO: 525375 - DNA, 60 bp, Artificial
  Synthetic oligonucleotide
gctcgtgaccccatgggacggttcggacctcgcgatggtttctacgcacctgtccggcga

SEQ ID NO: 525376 - DNA, 60 bp, Artificial
  Synthetic oligonucleotide
gctctaccgattacgaaccattatctcgcgtgggccccgaatgcaccgagacatggcgac

SEQ ID NO: 525377 - DNA, 60 bp, Artificial
  Synthetic oligonucleotide
gctcttaaaacgtcaaagtgttcatataaagtaatcaaatattgcattgtttcaattttt

SEQ ID NO: 525378 - DNA, 60 bp, Artificial
  Synthetic oligonucleotide
gctgaatgtgaatctcgtctgaggggacatgctcgcactatgcttggacgctctctgccg

SEQ ID NO: 525379 - DNA, 60 bp, Artificial
  Synthetic oligonucleotide
gctgatcttgattggtggtttcgtatgatcctagagtggtcagttaaggatagagaaggg

SEQ ID NO: 525380 - DNA, 60 bp, Artificial
  Synthetic oligonucleotide
gctgatttgaagttttccactcaaatgtcttacaactggagaagcattaacacggaaaaa

SEQ ID NO: 525381 - DNA, 60 bp, Artificial
  Synthetic oligonucleotide
gctgcagacgattggatcgaccctaacttgttcggaattcgggggcagcacaatcagata

SEQ ID NO: 525382 - DNA, 60 bp, Artificial
  Synthetic oligonucleotide
gctgcagatgactggatcgatcctaacttgtttggaattcgggggcaacataatcagata

SEQ ID NO: 525383 - DNA, 60 bp, Artificial
  Synthetic oligonucleotide
gctgctggaattaatgttggaccgatatcgcctgattatactcaacatatggcaaccatc

SEQ ID NO: 525384 - DNA, 60 bp, Artificial
  Synthetic oligonucleotide
gctggaaagattgcgtgaggcaagagcgaatatgtttaaggaagtagaggctggtgttag

SEQ ID NO: 525385 - DNA, 60 bp, Artificial
  Synthetic oligonucleotide
gctggatcagtattggacagcgttgaaccttatgatcgattcatccgacttagtgccaaa

SEQ ID NO: 525386 - DNA, 60 bp, Artificial
  Synthetic oligonucleotide
gctgtatatcattctttgaccgagatgagcgattctggtttaatcaactccaccaaaatc

SEQ ID NO: 525387 - DNA, 60 bp, Artificial
  Synthetic oligonucleotide
gctgtcttctaagtggaactcttcagattccatttcgaccaaaccatcgatggggagatg

SEQ ID NO: 525388 - DNA, 60 bp, Artificial
  Synthetic oligonucleotide
gctgtgaagaaatacattatgtaggaagcggggatggtcgtacattaatgaattttgcga

SEQ ID NO: 525389 - DNA, 60 bp, Artificial
  Synthetic oligonucleotide
gctgtgcaatcctatggacatatcactttactattatcaacaaagtagcgaatcaaataa

SEQ ID NO: 525390 - DNA, 60 bp, Artificial
  Synthetic oligonucleotide
gctgttatggcacggcataacgctcacatacgcccgtgtcattgtcgtggataacgggtc

SEQ ID NO: 525391 - DNA, 60 bp, Artificial
  Synthetic oligonucleotide
gcttaatcatattgccggtcggcgtttaggcgcttgtgaccgcgtggttagggggggatt

SEQ ID NO: 525392 - DNA, 60 bp, Artificial
  Synthetic oligonucleotide
gcttaatggtacatcaacggaaataccgcagtggtttaagagtctaaatcccatgcttgg

SEQ ID NO: 525393 - DNA, 60 bp, Artificial
  Synthetic oligonucleotide
gcttacatactacagtgggatctggatcaagcgcaaaaggatctggagaacgcacggaca

SEQ ID NO: 525394 - DNA, 60 bp, Artificial
  Synthetic oligonucleotide
gcttacgcttcgtacgcggaggcattcagagatgatttgagattgcgtcagattaagaag

SEQ ID NO: 525395 - DNA, 60 bp, Artificial
  Synthetic oligonucleotide
gcttcagaaatagtggagatagagatatattggtgatcgcgattgattatagtgagtacg

SEQ ID NO: 525396 - DNA, 60 bp, Artificial
  Synthetic oligonucleotide
gcttccgcagagatgggacgactttgcttttatgggacgttcgaagcgaccgttgtgatt

SEQ ID NO: 525397 - DNA, 60 bp, Artificial
  Synthetic oligonucleotide
gcttgccgacctcaactacacattgagtgtaatcactctaatgaataacacattgcacac

SEQ ID NO: 525398 - DNA, 60 bp, Artificial
  Synthetic oligonucleotide
gcttggaactagacatgtcagagttagcgaatttgatactgaatgaatggctatgtaatc

SEQ ID NO: 525399 - DNA, 60 bp, Artificial
  Synthetic oligonucleotide
gctttttctccgaacgccgaaatgagttcgcgcaaagtggctagacgtcgtcataaggat

SEQ ID NO: 525400 - DNA, 60 bp, Artificial
  Synthetic oligonucleotide
gcgtatgagatgggcggagctttttctagcgccttaatcaaacataggataccagccaag

SEQ ID NO: 525401 - DNA, 60 bp, Artificial
  Synthetic oligonucleotide
gcgtatggagcggcggtcgaggcgcttaaagacgatgagactacgcgtatgctcaaggcg

SEQ ID NO: 525402 - DNA, 60 bp, Artificial
  Synthetic oligonucleotide
gcgtattacgtccagtctcctatcggccacacctatcgacgctgtagatggcgctagtga

SEQ ID NO: 525403 - DNA, 60 bp, Artificial
  Synthetic oligonucleotide
gcgtgaaagattgctgggtcaacgcaacctagaacgtatcgctgcccgagacgtgctgca

SEQ ID NO: 525404 - DNA, 60 bp, Artificial
  Synthetic oligonucleotide
gcgtgcaagaaccagtaggacgtacgtttagagaggcttataaggaattttttcagatag

SEQ ID NO: 525405 - DNA, 60 bp, Artificial
  Synthetic oligonucleotide
gcgtgggatcgtacgacataaagtttgtaagaaggtcgtcctgaaacaacagtgtaacgt

SEQ ID NO: 525406 - DNA, 60 bp, Artificial
  Synthetic oligonucleotide
gcgttaagtgggatcgatttgtcgcatatgaggagtccaaagattgaaccaactatcatc

SEQ ID NO: 525407 - DNA, 60 bp, Artificial
  Synthetic oligonucleotide
gcgttacgattacgtcattgaactgacggagccagaagatagcgagtggagtggccacga

SEQ ID NO: 525408 - DNA, 60 bp, Artificial
  Synthetic oligonucleotide
gcgtttcgtgatgatgtaagattgagacaaattaaacgtcatgtaaatgagcaaattttg

SEQ ID NO: 525409 - DNA, 60 bp, Artificial
  Synthetic oligonucleotide
gctaaaaacatcacatattgaattttatagtatgtcaaccagatgtagaatgtttacgca

SEQ ID NO: 525410 - DNA, 60 bp, Artificial
  Synthetic oligonucleotide
gctaaaatatattcatggtcgtttcatgtagggttcagaaagcagaaactattagatgct

SEQ ID NO: 525411 - DNA, 60 bp, Artificial
  Synthetic oligonucleotide
gctaaagctgcggacctattagactactctctgggttcctactatgagacccgatccggc

SEQ ID NO: 525412 - DNA, 60 bp, Artificial
  Synthetic oligonucleotide
gctaaagtcacgcctgttgtcgtcactatggcttcctcactcagagctgcgatctctaag

SEQ ID NO: 525413 - DNA, 60 bp, Artificial; identical to SEQ ID NO: 414319
  Synthetic oligonucleotide

SEQ ID NO: 525414 - DNA, 60 bp, Artificial; identical to SEQ ID NO: 414370
  Synthetic oligonucleotide

SEQ ID NO: 525415 - DNA, 60 bp, Artificial
  Synthetic oligonucleotide
gctaagtgtccctcaacgtgagactttcgtaaacgccctagggttgaaggaaagtgatga

SEQ ID NO: 525416 - DNA, 60 bp, Artificial
  Synthetic oligonucleotide
gctaattcgatgcacaatatggctatcgggacgttaattcagagagaggtcgggaaagaa

SEQ ID NO: 525417 - DNA, 60 bp, Artificial
  Synthetic oligonucleotide
gctaccgcaagattgggatgtactaacggataccataagctggtccccatcaatacccac

SEQ ID NO: 525418 - DNA, 60 bp, Artificial
  Synthetic oligonucleotide
gctactaaacactgagaccttatctgtacggggggccaacccgctaatgttcagagcgaa

SEQ ID NO: 525419 - DNA, 60 bp, Artificial
  Synthetic oligonucleotide
gctactgagtatgataggtggggccgaaagaaaagtcgcaccgattggggcgcgtgagag

SEQ ID NO: 525420 - DNA, 60 bp, Artificial
  Synthetic oligonucleotide
gctagacgaatgggaaagtggacaaaatccatatgaatcatcagaagtgactgcgcctat

SEQ ID NO: 525421 - DNA, 60 bp, Artificial
  Synthetic oligonucleotide
gctagagataccagtaaaacatgatgatcatttgctacgtgattcagaattagctgggtt

SEQ ID NO: 525422 - DNA, 60 bp, Artificial
  Synthetic oligonucleotide
gctagattggattccccatcttcctctcgtgaatgcgatcttcgtcttgctcctccgaca

SEQ ID NO: 525423 - DNA, 60 bp, Artificial
  Synthetic oligonucleotide
gctagcggttagctccttttaatgtatggtattgaatataccacagttctaacctttctg

SEQ ID NO: 525424 - DNA, 60 bp, Artificial
  Synthetic oligonucleotide
gctagtagcgtaagtagacggaatactatacaatctattggaagcgttagatcagcatgg

SEQ ID NO: 525425 - DNA, 60 bp, Artificial
  Synthetic oligonucleotide
gctataagaaatagaaactggcttgctgatacttctagagcagctaaattggatgaggat

SEQ ID NO: 525426 - DNA, 60 bp, Artificial
  Synthetic oligonucleotide
gctatccagcaatacttaagagttggctacgctgaagagatgcgatatgtgcaacaactg

SEQ ID NO: 525427 - DNA, 60 bp, Artificial
  Synthetic oligonucleotide
gctatgccgaaggttgcattggatatattggacaaagctatgtcaaatcagacgggcgca

SEQ ID NO: 525428 - DNA, 60 bp, Artificial
  Synthetic oligonucleotide
gctatgtccccatggatgacaggtactccccctcttccttagctcgactgtttacaatgg

SEQ ID NO: 525429 - DNA, 60 bp, Artificial
  Synthetic oligonucleotide
gctattcgcgcctatggatgcgtctctcacttcagagatacggaggactgtacttcaact

SEQ ID NO: 525430 - DNA, 60 bp, Artificial
  Synthetic oligonucleotide
gctattgcaaggcagtgtacattcaatgataacgggggaatcttacggcgagtcagtgaa

SEQ ID NO: 525431 - DNA, 60 bp, Artificial; identical to SEQ ID NO: 111101
  Synthetic oligonucleotide

SEQ ID NO: 525432 - DNA, 60 bp, Artificial
  Synthetic oligonucleotide
ggacattatgacgagattccagccgcagtcaactcgcgtgaaggggaaagtcattcctta

SEQ ID NO: 525433 - DNA, 60 bp, Artificial
  Synthetic oligonucleotide
ggaccttctgattctgcatcgaacgatccactcaccagcttttcgattagatcgaatgca

SEQ ID NO: 525434 - DNA, 60 bp, Artificial
  Synthetic oligonucleotide
ggacgtaccctgaacgaggcgtatcgcgaatttcttaatctggcgattagcaatacgtat

SEQ ID NO: 525435 - DNA, 60 bp, Artificial
  Synthetic oligonucleotide
ggactatatattgtatagattcttgctatttgttgcaattgtcacgccattcgtaaactc

SEQ ID NO: 525436 - DNA, 60 bp, Artificial
  Synthetic oligonucleotide
ggactatgaattcactattatcaaaagcaccaccacaattagtccattggtccaggaaaa

SEQ ID NO: 525437 - DNA, 60 bp, Artificial
  Synthetic oligonucleotide
ggactgctaccgccattactcactggcgacactgaacccgcttttcatactgacgtggtc

SEQ ID NO: 525438 - DNA, 60 bp, Artificial
  Synthetic oligonucleotide
ggactgttgtcaacacactgacttaacttactgtcgaggttgtaccatgtatcatgtatg

SEQ ID NO: 525439 - DNA, 60 bp, Artificial
  Synthetic oligonucleotide
ggacttcattatctacagattccttgtaattatagctgtattgacaccatttcttagtgc

SEQ ID NO: 525440 - DNA, 60 bp, Artificial
  Synthetic oligonucleotide
ggacttttcatggtgaaacgccgcatgctaccactgattattcgacaacttcaaacttgt

SEQ ID NO: 525441 - DNA, 60 bp, Artificial
  Synthetic oligonucleotide
ggagaaagcgtctcagcgcaagctgtcgaagtggcttaacgacacgagacaccccaccca

SEQ ID NO: 525442 - DNA, 60 bp, Artificial
  Synthetic oligonucleotide
ggagaatcggagaccattactacacaactcactgttatacaggagcagaggcattagtaa

SEQ ID NO: 525443 - DNA, 60 bp, Artificial
  Synthetic oligonucleotide
ggagagactagaagaggaggtggagatgctaatgagggaactggagctgctagagcgagc

SEQ ID NO: 525444 - DNA, 60 bp, Artificial
  Synthetic oligonucleotide
ggagaggaggtgcaggaggaaaccaccaaagtgggtataacgatcgagggagtcatgagt

SEQ ID NO: 525445 - DNA, 60 bp, Artificial
  Synthetic oligonucleotide
ggagatgactagaccgccaagttatgtaccaacggctccaccgcagacagcaatgccgaa

SEQ ID NO: 525446 - DNA, 60 bp, Artificial
  Synthetic oligonucleotide
ggagatgcgaactgtgatagcacggaacatcgaggccgacctcaacttccatgcgagcca

SEQ ID NO: 525447 - DNA, 60 bp, Artificial
  Synthetic oligonucleotide
ggagatgtgccggcaagtaaaggaagcagtaggatcttgtagcttcacaggttttagtgg

SEQ ID NO: 525448 - DNA, 60 bp, Artificial
  Synthetic oligonucleotide
ggaggcgggagataccttcttcgccttcaaggaagctaccatcgcccccgtacgaaacct

SEQ ID NO: 525449 - DNA, 60 bp, Artificial
  Synthetic oligonucleotide
ggagggggcgaaagacgtgaggagaccacacgcgcgcgggagacttcagtcatgttggtt

SEQ ID NO: 525450 - DNA, 60 bp, Artificial
  Synthetic oligonucleotide
ggagtcattcagggaagcgtgcaatctatactcacaggtcaatcatacggagaggcggtg

SEQ ID NO: 525451 - DNA, 60 bp, Artificial
  Synthetic oligonucleotide
ggagtgacactaaatgtaggtggtgtaaacatgagagcgggtgtaattgtagcttatgat

SEQ ID NO: 525452 - DNA, 60 bp, Artificial
  Synthetic oligonucleotide
ggagtggtcagttcccgtgttagtatattcagatggtatcatgatatggcctgcgcaggt

SEQ ID NO: 525453 - DNA, 60 bp, Artificial
  Synthetic oligonucleotide
ggagttaagtcggactcagtccctgaatgctcagttggaagcggatgctaagtcagctca

SEQ ID NO: 525454 - DNA, 60 bp, Artificial
  Synthetic oligonucleotide
ggagttcttaacagtaagccccatcggacctgatgactggttgagaagccacaaccagtc

SEQ ID NO: 525455 - DNA, 60 bp, Artificial
  Synthetic oligonucleotide
ggatacatttgagattgttgcgtcgtctgaaaaattggtgattactgatgttgtaaatgg

SEQ ID NO: 525456 - DNA, 60 bp, Artificial
  Synthetic oligonucleotide
ggatacgatggaagcaacctgacactgacgaggctccctcccttgcaactaacgatatcg

SEQ ID NO: 525457 - DNA, 60 bp, Artificial
  Synthetic oligonucleotide
ggatagcgatgggacaatcatgtacaataaaagtgtgtccattgaacactcaaacactag

SEQ ID NO: 525458 - DNA, 60 bp, Artificial
  Synthetic oligonucleotide
ggatatcgatgggacagtcttgtaccataaaggtatgtccattgaatacgcagactttag

SEQ ID NO: 525459 - DNA, 60 bp, Artificial
  Synthetic oligonucleotide
ggatatgaactatcagaatgtatcaacttcagagccttttttgacatcgacgctgtgtct

SEQ ID NO: 525460 - DNA, 60 bp, Artificial
  Synthetic oligonucleotide
ggatatgcagtatcccgtggaccgtcccctgaattggctgcgtcaaatcaacttagctgc

SEQ ID NO: 525461 - DNA, 60 bp, Artificial
  Synthetic oligonucleotide
ggatattagtactataaagagatttataccgaaaggtgtattctacgctttcataaataa

SEQ ID NO: 525462 - DNA, 60 bp, Artificial
  Synthetic oligonucleotide
gctttttgagcccttagcgtgcaagccgcaatggaggtgcgtgtgccaaactttcactcc

SEQ ID NO: 525463 - DNA, 60 bp, Artificial
  Synthetic oligonucleotide
ggaaaaatacagattttaaggtgcagagcaattatggcgagatcgtttcggaggaagttg

SEQ ID NO: 525464 - DNA, 60 bp, Artificial
  Synthetic oligonucleotide
ggaaagaattcgacgccttactgtcaagtaaaaataggacgaaattttgcattgaaggcg

SEQ ID NO: 525465 - DNA, 60 bp, Artificial
  Synthetic oligonucleotide
ggaaaggcagcagagcgatttgttgagagtgaaatcggtgcagcggcaatagatggtttg

SEQ ID NO: 525466 - DNA, 60 bp, Artificial
  Synthetic oligonucleotide
ggaaagtattatgaacatgctccgatagaattgatttatgcctgcagatcggcgaaagag

SEQ ID NO: 525467 - DNA, 60 bp, Artificial
  Synthetic oligonucleotide
ggaaattagttaaatatgcaaaatgtaaacctctagaagctaatttaactgcaaatgaac

SEQ ID NO: 525468 - DNA, 60 bp, Artificial
  Synthetic oligonucleotide
ggaaccaataaaagcattccggctgatagaattggcaaaagaggcgatgtatgatcgaga

SEQ ID NO: 525469 - DNA, 60 bp, Artificial
  Synthetic oligonucleotide
ggaacgcatatcgactagggacatccttcagacgcgcgatttacactcattgtgcatgcc

SEQ ID NO: 525470 - DNA, 60 bp, Artificial
  Synthetic oligonucleotide
ggaactcgagatcaaccggaggagaagaaattcgcagcggttctgttaatgacaggttgc

SEQ ID NO: 525471 - DNA, 60 bp, Artificial
  Synthetic oligonucleotide
ggaaggcagcgccgataggggcgcgggagagtgccgttatgctggtgtcaaataacatta

SEQ ID NO: 525472 - DNA, 60 bp, Artificial
  Synthetic oligonucleotide
ggaaggttccaaccggcgagtttccgctgcatcagatgatgttaatgaaacgtgatttcc

SEQ ID NO: 525473 - DNA, 60 bp, Artificial
  Synthetic oligonucleotide
ggaataattatgggattagatatgctagctaacatgactaatgatccaaaagtaatacag

SEQ ID NO: 525474 - DNA, 60 bp, Artificial
  Synthetic oligonucleotide
ggaatagaggacaaagtgattcatccgcgagtgatgatgaggttcaaaattcccagaacg

SEQ ID NO: 525475 - DNA, 60 bp, Artificial
  Synthetic oligonucleotide
ggaatagctttgaccgaaaaagcgaagctgaattcgtatgcaccaatatcacttgaaaag

SEQ ID NO: 525476 - DNA, 60 bp, Artificial
  Synthetic oligonucleotide
ggaatagttcagggaagtgtgcactccattataacaggggaatcttatggcgaatctgtg

SEQ ID NO: 525477 - DNA, 60 bp, Artificial
  Synthetic oligonucleotide
ggaatattatgattttgagaggctacagctatgttgaccgaacacgacatactgatgcac

SEQ ID NO: 525478 - DNA, 60 bp, Artificial
  Synthetic oligonucleotide
ggaatatttaattgtttagaaccagtagaacttaatgctgttaagtatgttctgtttaat

SEQ ID NO: 525479 - DNA, 60 bp, Artificial
  Synthetic oligonucleotide
ggaatcagcgaatgagatcgcgagaatgagcggagagacgggaacgtggggaccggaccg

SEQ ID NO: 525480 - DNA, 60 bp, Artificial; identical to SEQ ID NO: 418619
  Synthetic oligonucleotide

SEQ ID NO: 525481 - DNA, 60 bp, Artificial
  Synthetic oligonucleotide
ggaatcgacgtcgtacatttcgaagatttagcggctcattggcatgcactaggagcagcg

SEQ ID NO: 525482 - DNA, 60 bp, Artificial
  Synthetic oligonucleotide
gaaatgattttgaccgaaatgagatgccggatttaccaggtgtaatgaggtccaattatg

SEQ ID NO: 525483 - DNA, 60 bp, Artificial
  Synthetic oligonucleotide
ggaatgcaagaggaggcgatccaagaaatagcgggaatgactgccgacgttttagaggcg

SEQ ID NO: 525484 - DNA, 60 bp, Artificial
  Synthetic oligonucleotide
ggaattcccaagatcctgtctccatattgccactcaatagcatggcccaacgcggtaatt

SEQ ID NO: 525485 - DNA, 60 bp, Artificial
  Synthetic oligonucleotide
ggaattcttaaatttgtctgcgacgagtatgttcagcagcgtaatacatacgagacgtat

SEQ ID NO: 525486 - DNA, 60 bp, Artificial
  Synthetic oligonucleotide
ggaattggatgcaaaactacggacgtggatacatttgagattgttgcctcgtctgaaaaa

SEQ ID NO: 525487 - DNA, 60 bp, Artificial
  Synthetic oligonucleotide
ggaatttaggataggcgcacctcagtttcatacgatacagcggaatcacaggatgcgatt

SEQ ID NO: 525488 - DNA, 60 bp, Artificial
  Synthetic oligonucleotide
ggacaaaaccttcgattttaatttcattgtatcgcacgatgaaacagaaaagtcaatccg

SEQ ID NO: 525489 - DNA, 60 bp, Artificial
  Synthetic oligonucleotide
ggacacaaaattatggtatgtatttaccaataacggggtcactagacgctgtatatacga

SEQ ID NO: 525490 - DNA, 60 bp, Artificial
  Synthetic oligonucleotide
ggacataactagattaaaggacgactcgatattatatattgatatcagaactgatcgtgg

SEQ ID NO: 525491 - DNA, 60 bp, Artificial
  Synthetic oligonucleotide
ggacatggaatgatattcgtaagtactaagaaaacgattcagttgaatgatgtattaatg

SEQ ID NO: 525492 - DNA, 60 bp, Artificial
  Synthetic oligonucleotide
cgtgtggagttgacagcgatgaaacggcgacgagcgatggctcatatggtcttgatcatt

SEQ ID NO: 525493 - DNA, 60 bp, Artificial
  Synthetic oligonucleotide
cgtgtgttattgaggtgggagttaacgaaggcgcaacgtagcgcgttgcttagactcttc

SEQ ID NO: 525494 - DNA, 60 bp, Artificial
  Synthetic oligonucleotide
cgtgttgcttgggaagccaccgcggatccctcagagattggctttactcgcgacgtatac

SEQ ID NO: 525495 - DNA, 60 bp, Artificial
  Synthetic oligonucleotide
cgtgttttctcgctcccggttttcatcttatcgtgctgtcagggaccgttcgcttctgaa

SEQ ID NO: 525496 - DNA, 60 bp, Artificial
  Synthetic oligonucleotide
cgttaaggatgtggcgcgtgcaacggcgtactttacttcacctacgggagacccaaattg

SEQ ID NO: 525497 - DNA, 60 bp, Artificial
  Synthetic oligonucleotide
cgttaagggcggctatttgcccatatggcatttgacaggagacgaaagcctaaacgactt

SEQ ID NO: 525498 - DNA, 60 bp, Artificial
  Synthetic oligonucleotide
cgttaaggtgtataacgcggataggaaacatggaattaccagtgaagaccattgtattag

SEQ ID NO: 525499 - DNA, 60 bp, Artificial
  Synthetic oligonucleotide
cgttattactgaaaatgtattcatacagtcgccgttcaaaatcaaaacgtttaagaatga

SEQ ID NO: 525500 - DNA, 60 bp, Artificial
  Synthetic oligonucleotide
cgttcaaagtcagtgaaacgaatgttacaataccagcgtggtttaagagcttaaatccaa

SEQ ID NO: 525501 - DNA, 60 bp, Artificial; identical to SEQ ID NO: 377362
  Synthetic oligonucleotide

SEQ ID NO: 525502 - DNA, 60 bp, Artificial
  Synthetic oligonucleotide
cgttcagtagcgcaatacatgcgaggcgtatgataagatcacgcgctgtacaccctatct

SEQ ID NO: 525503 - DNA, 60 bp, Artificial
  Synthetic oligonucleotide
cgttcttacaatcgatttcgaaaaagatgcgaagctaaataatacctcagaagtggtatt

SEQ ID NO: 525504 - DNA, 60 bp, Artificial
  Synthetic oligonucleotide
cgttgcagttggatatgtctgaattggctgatctaatattgaatgaatggttgtgtaatc

SEQ ID NO: 525505 - DNA, 60 bp, Artificial
  Synthetic oligonucleotide
cgttggcttataattatgaacccgagcaattgaataagactgaccccgagatgaactatt

SEQ ID NO: 525506 - DNA, 60 bp, Artificial
  Synthetic oligonucleotide
cgttggtagacgcgaaatcaaagtgtcaaagggtatggggatagtaccaccgtacacgag

SEQ ID NO: 525507 - DNA, 60 bp, Artificial
  Synthetic oligonucleotide
cgttggtggatatctcgtcaactctagggttaaagaacggaacgagattcgggcttgcga

SEQ ID NO: 525508 - DNA, 60 bp, Artificial
  Synthetic oligonucleotide
cgttgtatccactattttagaacatcggacgagggatatcccggataatacgttggcggt

SEQ ID NO: 525509 - DNA, 60 bp, Artificial
  Synthetic oligonucleotide
cgtttagagatgatctacgactgcgacagataaagaaacgtgtgaatgaacaagtattgc

SEQ ID NO: 525510 - DNA, 60 bp, Artificial
  Synthetic oligonucleotide
cgttttgtgtcagtgggaagtgctacacattaccactgctgtgctaatgacttgagttac

SEQ ID NO: 525511 - DNA, 60 bp, Artificial
  Synthetic oligonucleotide
ctaaaagaaatggctacgcaaacagaagggatgaatttcgatgatatatctgctgcagta

SEQ ID NO: 525512 - DNA, 60 bp, Artificial
  Synthetic oligonucleotide
ctaacagtcttgttcacattgcacaaagcatcaattccgacgatgaaaattgcgctgaag

SEQ ID NO: 525513 - DNA, 60 bp, Artificial
  Synthetic oligonucleotide
ctaacgtgactacgccaacgttggacttcactaatgaattgactaactggcgtgcccgtg

SEQ ID NO: 525514 - DNA, 60 bp, Artificial
  Synthetic oligonucleotide
ctaactacacgtgaaattgaacaagtcgaattacttaaacgcatctacgataaattaata

SEQ ID NO: 525515 - DNA, 60 bp, Artificial
  Synthetic oligonucleotide
ctaactcctgcggcactgactatgtttccggatatggcaaaattcggcgatttacagtat

SEQ ID NO: 525516 - DNA, 60 bp, Artificial
  Synthetic oligonucleotide
ctaactcggcgtgatccgtgacatgcgtagtgtgacacctgctcccaggtcaatgggggt

SEQ ID NO: 525517 - DNA, 60 bp, Artificial
  Synthetic oligonucleotide
ctaacttcgactttatgcttgtattacccaactgaagctgcaacagaaataaacgataat

SEQ ID NO: 525518 - DNA, 60 bp, Artificial
  Synthetic oligonucleotide
ctaagaatgagaatgaaacaagttgcaatgcaattgatcgaagatttgtaggtctaacct

SEQ ID NO: 525519 - DNA, 60 bp, Artificial
  Synthetic oligonucleotide
ctaagtaggtttggtaagaaggtaggtaacgcgctgacatcaaataccgcgaagaagatt

SEQ ID NO: 525520 - DNA, 60 bp, Artificial
  Synthetic oligonucleotide
ctaagtataaatttgggattgtatcaaaattggtgaaaccgaattacattttttctagcc

SEQ ID NO: 525521 - DNA, 60 bp, Artificial
  Synthetic oligonucleotide
ctaagtgggattgatttaacacacctacggaccccgaagatagaaccaaccgttgtatcc

SEQ ID NO: 525522 - DNA, 60 bp, Artificial
  Synthetic oligonucleotide
ctaatccgtgaccaacaaatcggcagaattggggatcattactacacgacaagctgctac

SEQ ID NO: 525523 - DNA, 60 bp, Artificial
  Synthetic oligonucleotide
cggtgacgtgatccaacgttcgaccgaggaactaaaacaaagacagatccagattcatgt

SEQ ID NO: 525524 - DNA, 60 bp, Artificial
  Synthetic oligonucleotide
cggttgcccttgaaatactggacaaagcgatgtcaaacacaactggtgcaacgcaaacac

SEQ ID NO: 525525 - DNA, 60 bp, Artificial
  Synthetic oligonucleotide
cggtttctgcaaaattgttacatcatcctacaactgaaataaggtcagaattttacttgc

SEQ ID NO: 525526 - DNA, 60 bp, Artificial
  Synthetic oligonucleotide
cgtaatacgttcacgcttcttaactcacgaggtatttgacctgtcatccgatctcccagg

SEQ ID NO: 525527 - DNA, 60 bp, Artificial
  Synthetic oligonucleotide
cgtaatagatgttcgcgcctcagagttgatcggttgctcacctttcaggaccgtgacgat

SEQ ID NO: 525528 - DNA, 60 bp, Artificial
  Synthetic oligonucleotide
cgtaatctgggatccagccacgcgctctacggcggcatctgcgggggccacagggagatc

SEQ ID NO: 525529 - DNA, 60 bp, Artificial
  Synthetic oligonucleotide
cgtaccatcatcgcgcggaccctcgagtccgacataaactacatccgtactcagtcaaca

SEQ ID NO: 525530 - DNA, 60 bp, Artificial
  Synthetic oligonucleotide
cgtagctgtaatacaagttggtggttctaatatattagatataacagcagatccaacaac

SEQ ID NO: 525531 - DNA, 60 bp, Artificial
  Synthetic oligonucleotide
cgtatagtagcgcgatacacgcgagacgcatgattagatcgcgagcggtacacccaatct

SEQ ID NO: 525532 - DNA, 60 bp, Artificial
  Synthetic oligonucleotide
cgtatctatttgaaagagagaccgttactacagctaacaccgaggtgaacacctacctct

SEQ ID NO: 525533 - DNA, 60 bp, Artificial
  Synthetic oligonucleotide
catcaatcccgctagatggtttcgaaatgccattaacctgagaacagtaggtagagtggc

SEQ ID NO: 525534 - DNA, 60 bp, Artificial
  Synthetic oligonucleotide
cgtcactaagtctatcacctggaatgctaaatcctggaggagtaccatggatcgcaattg

SEQ ID NO: 525535 - DNA, 60 bp, Artificial
  Synthetic oligonucleotide
cgtcagaccggtatattcaccgagacaaaaggagcgagaagacgataaatacttatatgg

SEQ ID NO: 525536 - DNA, 60 bp, Artificial
  Synthetic oligonucleotide
cgtcatgtccaacgatggaacgtacttcgcctccctaccggaaatcactatagacaaagc

SEQ ID NO: 525537 - DNA, 60 bp, Artificial
  Synthetic oligonucleotide
cgtcccaaatacactctgatacaatccttaggatcactcagggactcgatgacgcaaata

SEQ ID NO: 525538 - DNA, 60 bp, Artificial
  Synthetic oligonucleotide
cgtccgacggatggcggtcagtacgcgacacaaactgatctagggatggttgcggcctcg

SEQ ID NO: 525539 - DNA, 60 bp, Artificial
  Synthetic oligonucleotide
cgtcgtactaacagcaaaccacgccattttacttacgatctaatgatgattaccttcact

SEQ ID NO: 525540 - DNA, 60 bp, Artificial
  Synthetic oligonucleotide
cgtctacactatgtttatactatccaactgaagctgcaactcaaatagatgatagttctt

SEQ ID NO: 525541 - DNA, 60 bp, Artificial
  Synthetic oligonucleotide
cgtctctaaagtggtagctaagcagcaaacgatctctaaatcgcctggtcgcttggatga

SEQ ID NO: 525542 - DNA, 60 bp, Artificial
  Synthetic oligonucleotide
cgtctgtatgtggtggcgtgtcagatggcgtggtttggtacctgccaatcactcatccgt

SEQ ID NO: 525543 - DNA, 60 bp, Artificial
  Synthetic oligonucleotide
cgtgaaattgaacaggtcgaactacttaaacgtatacatgataaattaatgactagacca

SEQ ID NO: 525544 - DNA, 60 bp, Artificial
  Synthetic oligonucleotide
cgtgaaattgaacaggtcgaattacttagacgtatatacgataaattagtgaccagacca

SEQ ID NO: 525545 - DNA, 60 bp, Artificial
  Synthetic oligonucleotide
cgtgacgttcgtgagcttctcacgatactgccgacttccactactgcaggcaagatcact

SEQ ID NO: 525546 - DNA, 60 bp, Artificial
  Synthetic oligonucleotide
cgtgagaacgctagaagagtgggagagtggaaaaaatccttatgagccaagagaagtgac

SEQ ID NO: 525547 - DNA, 60 bp, Artificial
  Synthetic oligonucleotide
cgtgattttccaacacgtgatcgcaacatcgtagaagcacgtgtgaagaggtctggtgat

SEQ ID NO: 525548 - DNA, 60 bp, Artificial; identical to SEQ ID NO: 376643
  Synthetic oligonucleotide

SEQ ID NO: 525549 - DNA, 60 bp, Artificial
  Synthetic oligonucleotide
cgtggagtggttgatcccacggcgcaaattcccactgttgtctagcgggggagggtatgc

SEQ ID NO: 525550 - DNA, 60 bp, Artificial
  Synthetic oligonucleotide
cgtgggatggcattactactttgactccacttacttccggcatcgtaacggttaagggta

SEQ ID NO: 525551 - DNA, 60 bp, Artificial
  Synthetic oligonucleotide
cgtggggttttgagaagatcaggtatgccttaggccctggcgggatgacggggtggtata

SEQ ID NO: 525552 - DNA, 60 bp, Artificial
  Synthetic oligonucleotide
cgtgtcaccgcacgttatctctccgatcccttagcttcggctttattgcttgggactcag

SEQ ID NO: 525553 - DNA, 60 bp, Artificial
  Synthetic oligonucleotide
cgtgtcgacggagatgataattatgtagtattacagttcgcaaatgaaattactaaaagc

SEQ ID NO: 525554 - DNA, 60 bp, Artificial
  Synthetic oligonucleotide
cgtgtcggtatatcggggatgtgtgcgaatgttggtaatgcacgtaagtccatagctatt

SEQ ID NO: 525555 - DNA, 60 bp, Artificial
  Synthetic oligonucleotide
ctcaaaattgatatgagggagaccatgcgcttgtggacgcgcgctggctcggacgacgcc

SEQ ID NO: 525556 - DNA, 60 bp, Artificial
  Synthetic oligonucleotide
ctcaaattacattgttaacaagttacgaggattcgagactgacagagaattcatactaac

SEQ ID NO: 525557 - DNA, 60 bp, Artificial
  Synthetic oligonucleotide
ctcaaccgtacgaagaggacatcgaaggaaaaatgaagagatgtggcgtacaactgctcg

SEQ ID NO: 525558 - DNA, 60 bp, Artificial
  Synthetic oligonucleotide
ctcaatcagtgcagacctggaagcagggatttctgactaagatacagacgttgttcaaac

SEQ ID NO: 525559 - DNA, 60 bp, Artificial
  Synthetic oligonucleotide
ctcaccagcttttcgattagatcgaatgcagttaagacaaatgcagacgctggcgtgtct

SEQ ID NO: 525560 - DNA, 60 bp, Artificial
  Synthetic oligonucleotide
ctcacgatgataatctcaattataagttatcatgtaataatccagaatcatgtgaattgt

SEQ ID NO: 525561 - DNA, 60 bp, Artificial
  Synthetic oligonucleotide
ctcactagagaaatttacgttaatgtcaaaaatctattcttggtcatttcatgtcgggtt

SEQ ID NO: 525562 - DNA, 60 bp, Artificial
  Synthetic oligonucleotide
ctcactgtgctgatagaacccttcgccgtgacaacgtgaaacagattcttactcgtgaac

SEQ ID NO: 525563 - DNA, 60 bp, Artificial
  Synthetic oligonucleotide
ctcagcaaatttgggaaaaaggttggtgatgctctcacttcaaccaccgcgcaaaaaatc

SEQ ID NO: 525564 - DNA, 60 bp, Artificial
  Synthetic oligonucleotide
ctcagctttggagtatggtgatatgaaagttgatcccatcggattattacgtgagttctt

SEQ ID NO: 525565 - DNA, 60 bp, Artificial
  Synthetic oligonucleotide
ctcagggttgggatatactactgcacaccacactattcggttaatatccgcaatttttgg

SEQ ID NO: 525566 - DNA, 60 bp, Artificial
  Synthetic oligonucleotide
ctcatccgatctatatgggatcgatggattacgctataagctacgaacagctggtttcta

SEQ ID NO: 525567 - DNA, 60 bp, Artificial
  Synthetic oligonucleotide
ctcatcgtatactgagcattacagtgtgtcacaaagatgtaaattgtttactaagtataa

SEQ ID NO: 525568 - DNA, 60 bp, Artificial
  Synthetic oligonucleotide
ctcatgcgtttggacggatattcgcatgttgaaaggaagcacataccaagagcgcacgtc

SEQ ID NO: 525569 - DNA, 60 bp, Artificial
  Synthetic oligonucleotide
ctccaacaaaatataaaggatggtgtctggattgttgtcaacatactgatttgacttact

SEQ ID NO: 525570 - DNA, 60 bp, Artificial
  Synthetic oligonucleotide
ctccaaggtcaccatgatacgagattggcaggtctcgatgtggtgattcctactgttgta

SEQ ID NO: 525571 - DNA, 60 bp, Artificial
  Synthetic oligonucleotide
ctccaaggtcactatgtcgtgggattggcaggtcccggaatagtgattcccaccgctgta

SEQ ID NO: 525572 - DNA, 60 bp, Artificial
  Synthetic oligonucleotide
ccccatcttcacagcgccgggcctgaccaacctggtgtgacgtgggacagactccattca

SEQ ID NO: 525573 - DNA, 60 bp, Artificial
  Synthetic oligonucleotide
ctcctcgtttatgggtgttcctcccagcgtgttatcggtcgttgattccagtggagtcac

SEQ ID NO: 525574 - DNA, 60 bp, Artificial
  Synthetic oligonucleotide
ctccttttgcttatcgtcattgtgtcaccatttgtcaagacgcaaaattatggaattaat

SEQ ID NO: 525575 - DNA, 60 bp, Artificial
  Synthetic oligonucleotide
ctcgaaggacgtcacttaccggagctggaaacgcatacggaacccttatgaaagcatcat

SEQ ID NO: 525576 - DNA, 60 bp, Artificial
  Synthetic oligonucleotide
ctcgaatgcgctgtaggacttcagccaccctgcagcgtagggcttgggcccggagtaagg

SEQ ID NO: 525577 - DNA, 60 bp, Artificial
  Synthetic oligonucleotide
ctcgaggatctataaagtgttttacatctcatctctctcaattatttaatcctatgctta

SEQ ID NO: 525578 - DNA, 60 bp, Artificial
  Synthetic oligonucleotide
ctcgattcactcatttatctgatgccgattacccaccctgttaagagtatcgtcatggta

SEQ ID NO: 525579 - DNA, 60 bp, Artificial
  Synthetic oligonucleotide
ctcggatcacaacttcaaataacaatcaaggtagaatcgtgatatctgaatcaaaagacg

SEQ ID NO: 525580 - DNA, 60 bp, Artificial
  Synthetic oligonucleotide
ctcggcttgccgctaaaagatcaaatgtaatggcttacacttcaacggaggaggatgtta

SEQ ID NO: 525581 - DNA, 60 bp, Artificial
  Synthetic oligonucleotide
ctcgtaagtcgattttcttgcagttgtgtatacgctacccaacaaattcgttctcaagcc

SEQ ID NO: 525582 - DNA, 60 bp, Artificial
  Synthetic oligonucleotide
ctcgttgcaaagagtagtgaatgtggcggggaatcattggataggacaggcggctgcagc

SEQ ID NO: 525583 - DNA, 60 bp, Artificial
  Synthetic oligonucleotide
ctctctgccgaacgtctgtgacgacgaggttgctcagcagtctggcaccgtgctaacgtc

SEQ ID NO: 525584 - DNA, 60 bp, Artificial
  Synthetic oligonucleotide
ctctcttggctttatatacattgatccgatttccgttgttaataagagtacttttcggac

SEQ ID NO: 525585 - DNA, 60 bp, Artificial
  Synthetic oligonucleotide
ctctggaggcgcagttaaagagaataaatatgtccagccacgtcatcactgggttattaa

SEQ ID NO: 525586 - DNA, 60 bp, Artificial
  Synthetic oligonucleotide
ctaatcgaaaaagcaaagcgcgagctcgagcaacgctcgataactccgctcttgcgggag

SEQ ID NO: 525587 - DNA, 60 bp, Artificial
  Synthetic oligonucleotide
ctaatgcggcgacatttgaagaagtggctacagatgagaaactagtaattactgatgttg

SEQ ID NO: 525588 - DNA, 60 bp, Artificial
  Synthetic oligonucleotide
ctaattcgatgcataatatggctatcgggacattaattcagagagaagtcggaaaaggag

SEQ ID NO: 525589 - DNA, 60 bp, Artificial
  Synthetic oligonucleotide
ctacaagcacacatatttaatgtatactcttataaaaatcctttatggcatggactacga

SEQ ID NO: 525590 - DNA, 60 bp, Artificial
  Synthetic oligonucleotide
ctacacaaactgaaggtatgaattttgatgatatttcagcggcagtccttaaaactaaga

SEQ ID NO: 525591 - DNA, 60 bp, Artificial
  Synthetic oligonucleotide
ctacacgtgagattgaacaagttgaactacttaaacgtattcatgataaactaatggtgc

SEQ ID NO: 525592 - DNA, 60 bp, Artificial
  Synthetic oligonucleotide
ctaccagacccattgagtccgggagaacggggaatgcagatgaaaattcaagagctcgaa

SEQ ID NO: 525593 - DNA, 60 bp, Artificial
  Synthetic oligonucleotide
ctacgacatgtactattcgaaactgtaagaaattaggtccaagagaaaacgtagctgtaa

SEQ ID NO: 525594 - DNA, 60 bp, Artificial
  Synthetic oligonucleotide
ctacgcaaggcagtagattcgtacgaaaaacttctagacgcagaagatgcgaagatggcg

SEQ ID NO: 525595 - DNA, 60 bp, Artificial
  Synthetic oligonucleotide
ctacgctttcaaggtcgcaatcgagtttcatggatcagaggcggaaacattaaatgatgc

SEQ ID NO: 525596 - DNA, 60 bp, Artificial
  Synthetic oligonucleotide
ctacgtgttgaagggggcgggatgatcacgcattcgaatagtaagtggcctgccatgact

SEQ ID NO: 525597 - DNA, 60 bp, Artificial; identical to SEQ ID NO: 379171
  Synthetic oligonucleotide

SEQ ID NO: 525598 - DNA, 60 bp, Artificial
  Synthetic oligonucleotide
ctactaacgaggacttatttctaagcgcgcctgatatgcgagagtgggcggtgaaggaaa

SEQ ID NO: 525599 - DNA, 60 bp, Artificial
  Synthetic oligonucleotide
ctactagagaaattgagcaagttgaactactcaaacgaatttatgacatgatgataacta

SEQ ID NO: 525600 - DNA, 60 bp, Artificial
  Synthetic oligonucleotide
ctactatcatcgctacaacacttgagcatcgattcaaagacatacctgatgatcgattag

SEQ ID NO: 525601 - DNA, 60 bp, Artificial
  Synthetic oligonucleotide
ctactcgtgaaattgaacaggttgaattacttaaacgtatacatgacaacctgataacta

SEQ ID NO: 525602 - DNA, 60 bp, Artificial
  Synthetic oligonucleotide
ctactgactctctctattaatccgtctagccctggtgtcctctccgtagtccagacatta

SEQ ID NO: 525603 - DNA, 60 bp, Artificial
  Synthetic oligonucleotide
ctagaagactaaacatcttctatgcagcctacataccatgtagcatgaatcacgactggg

SEQ ID NO: 525604 - DNA, 60 bp, Artificial
  Synthetic oligonucleotide
ctagacctctcaggacatctatacgtgacgttgatgtcaggcgcttatgtcacagatctg

SEQ ID NO: 525605 - DNA, 60 bp, Artificial
  Synthetic oligonucleotide
ctagagttaaaagtaaatttgattatgtgatggatgactctggtgtaaaaaacaatcttt

SEQ ID NO: 525606 - DNA, 60 bp, Artificial
  Synthetic oligonucleotide
ctagatggatttgacataccaccggaactcaccagatagagtgaagctccaagatcacta

SEQ ID NO: 525607 - DNA, 60 bp, Artificial
  Synthetic oligonucleotide
ctagcacattaacaagcgatttgggaatcctattgaaacataatacaacagttgaggcaa

SEQ ID NO: 525608 - DNA, 60 bp, Artificial
  Synthetic oligonucleotide
ctagcggatggcgtcttgtcgaaattggagttagtgagggaaaaccgacaggaggtcgtg

SEQ ID NO: 525609 - DNA, 60 bp, Artificial
  Synthetic oligonucleotide
ctagttcgacttactgtacagggtaacgttccgagggctattcagagcgaaatggatcaa

SEQ ID NO: 525610 - DNA, 60 bp, Artificial
  Synthetic oligonucleotide
ctagtttaccaattcaatataggaaatttatgcctacattgcctgataatgttcaatatg

SEQ ID NO: 525611 - DNA, 60 bp, Artificial
  Synthetic oligonucleotide
ctatgtcaaatcagacgggcgcaactatggcacaaaaagttgagaaggtcgcttacgctt

SEQ ID NO: 525612 - DNA, 60 bp, Artificial
  Synthetic oligonucleotide
ctattacctggatggaagctaacatatgtaggatataacggaaaggataccagaggtcac

SEQ ID NO: 525613 - DNA, 60 bp, Artificial
  Synthetic oligonucleotide
ctattcatttacgaaggagaaactccaaatgccacgaccaaaggatactttataacgaat

SEQ ID NO: 525614 - DNA, 60 bp, Artificial
  Synthetic oligonucleotide
ctattcgtataaaaatcctctgtggcatggtttgcgggcagcaatacttaacaggaccac

SEQ ID NO: 525615 - DNA, 60 bp, Artificial
  Synthetic oligonucleotide
ctattctgatggatgacaagctcccatctgtcggtcgcgctcgcatggctctcaggacac

SEQ ID NO: 525616 - DNA, 60 bp, Artificial
  Synthetic oligonucleotide
ctatttgaaacattcaaagcagatacagacgtgtagcgtaatagatgttcgcgcttcaga

SEQ ID NO: 525617 - DNA, 60 bp, Artificial; identical to SEQ ID NO: 369523
  Synthetic oligonucleotide

SEQ ID NO: 525618 - DNA, 60 bp, Artificial
  Synthetic oligonucleotide
cgatcattaatactcttttgaaattggctggatataaagagcaggttactacaaaagacg

SEQ ID NO: 525619 - DNA, 60 bp, Artificial
  Synthetic oligonucleotide
cgatctggagaacgccagacgggatctagcgacggaggaggaagtgagactaagagaaga

SEQ ID NO: 525620 - DNA, 60 bp, Artificial
  Synthetic oligonucleotide
cgatcttatccataatggtgtgcctcaaagactttcagatacgataattctaaacaaccg

SEQ ID NO: 525621 - DNA, 60 bp, Artificial
  Synthetic oligonucleotide
cgatgaaactttaaatgaactatggctgacgaacggaaaatattcatcagacgtatacgc

SEQ ID NO: 525622 - DNA, 60 bp, Artificial
  Synthetic oligonucleotide
cgatgaatataatcaattagcgcgtgccttcaagatatcggatgtttatgcgcctcttat

SEQ ID NO: 525623 - DNA, 60 bp, Artificial
  Synthetic oligonucleotide
cgatgcattatgatatatcctacgctaccttgaagagtaacgcacagcggatagtttatg

SEQ ID NO: 525624 - DNA, 60 bp, Artificial
  Synthetic oligonucleotide
cgatggatacgaactatcaaaacgtgtctaatcctgaaccatttctaacgtcgacattat

SEQ ID NO: 525625 - DNA, 60 bp, Artificial
  Synthetic oligonucleotide
cgatggatatgaacgaggtgcgtctcttagtgttccctgctcgtgtgtaatgggtgagtg

SEQ ID NO: 525626 - DNA, 60 bp, Artificial
  Synthetic oligonucleotide
cgatggctatacaacaatatttaagagttggatatttggaagagatcagatatgtgcaac

SEQ ID NO: 525627 - DNA, 60 bp, Artificial
  Synthetic oligonucleotide
cgatggtgatgataattatgcggtactacaatttaatactgatgttaccaaacaaatggt

SEQ ID NO: 525628 - DNA, 60 bp, Artificial
  Synthetic oligonucleotide
cgatgtaatatttcagctgatggccgtaatgcaacgaaggcggtacaatcccactttcca

SEQ ID NO: 525629 - DNA, 60 bp, Artificial
  Synthetic oligonucleotide
cgatgtggtgattcctactgttgtatagcgggggagagtagcccaacctcgctacactta

SEQ ID NO: 525630 - DNA, 60 bp, Artificial
  Synthetic oligonucleotide
cgatgttgttgatggtgtaaaccataaacttgatgtgactacaaatacctgtacaattag

SEQ ID NO: 525631 - DNA, 60 bp, Artificial
  Synthetic oligonucleotide
cgattacgtctaccacgggagcgaacgaaaccgctaggaacgaaaaagcagcgtatggag

SEQ ID NO: 525632 - DNA, 60 bp, Artificial
  Synthetic oligonucleotide
cgattattctgagctggagcatgatccgttgaagggccgtgtctataggaaagagttggt

SEQ ID NO: 525633 - DNA, 60 bp, Artificial
  Synthetic oligonucleotide
cgattgaatctaaatacggtacaaaggtcgatgtttacaaggatgaggcgtcagcgcaga

SEQ ID NO: 525634 - DNA, 60 bp, Artificial
  Synthetic oligonucleotide
cgattgcagcaagagctctaacggtcatcaaagcatgcaacacattaaaagaagtcagaa

SEQ ID NO: 525635 - DNA, 60 bp, Artificial
  Synthetic oligonucleotide
cgatttttaagactaagctaatccgtgaccagcaaatcggcagaattggggatcattact

SEQ ID NO: 525636 - DNA, 60 bp, Artificial; identical to SEQ ID NO: 370059
  Synthetic oligonucleotide

SEQ ID NO: 525637 - DNA, 60 bp, Artificial
  Synthetic oligonucleotide
cgcaactgaatgcgctcgtgtgcgacggccgtgtctactttgttccaggtgctaactaaa

SEQ ID NO: 525638 - DNA, 60 bp, Artificial
  Synthetic oligonucleotide
cgcaagtgctccgacgttttctcagcgtacgagtcaaatggagtccgtgtcgcttgggat

SEQ ID NO: 525639 - DNA, 60 bp, Artificial
  Synthetic oligonucleotide
cgcaatgctgcgtcctttgcaatatgccaagcgtgaaagattgctgggtcaacgcaacct

SEQ ID NO: 525640 - DNA, 60 bp, Artificial
  Synthetic oligonucleotide
cgcaatggaggtgtgcttgcccaacggtcatcagatcgtggacttgataaacaacgcttt

SEQ ID NO: 525641 - DNA, 60 bp, Artificial
  Synthetic oligonucleotide
cgcaattcatttcgtaatgcttgtcgtttcattctgtggaattagagcacaatcaacgaa

SEQ ID NO: 525642 - DNA, 60 bp, Artificial
  Synthetic oligonucleotide
cgcactaagaatgaggatgaagcgagtcgcaatgcaattgatcgaagatttgtaatgtta

SEQ ID NO: 525643 - DNA, 60 bp, Artificial
  Synthetic oligonucleotide
cgcactctcgaactattccgaaagaaggatcagaagcgatttctcagtgtggaatgggtt

SEQ ID NO: 525644 - DNA, 60 bp, Artificial
  Synthetic oligonucleotide
cgcactgcttaggctcttctgctttgtctgttatggatatgctccccgcgcggatggaac

SEQ ID NO: 525645 - DNA, 60 bp, Artificial
  Synthetic oligonucleotide
cgcagggagtgacacgccagctcatggatgtctacttttaacgataccaggaccgggatc

SEQ ID NO: 525646 - DNA, 60 bp, Artificial
  Synthetic oligonucleotide
cgcatatagaacagcagattttgccacaaattaagaaggctattaaagaggatcacgagg

SEQ ID NO: 525647 - DNA, 60 bp, Artificial
  Synthetic oligonucleotide
cgcatcgtacgcagaagcgtttcgtgatgatgtgaggttaaggcagatcaaacgtcatgt

SEQ ID NO: 525648 - DNA, 60 bp, Artificial
  Synthetic oligonucleotide
cgaacgttttggttcactggcaaacggcactcatttcatgattggaactgtcccttcgaa

SEQ ID NO: 525649 - DNA, 60 bp, Artificial
  Synthetic oligonucleotide
cgaagagggcaaactacgaatagttccactgaagactgcaaatcacagaggcgattacga

SEQ ID NO: 525650 - DNA, 60 bp, Artificial
  Synthetic oligonucleotide
cgaagggatatgtgttggaaatctgtgatgttggtgcatatcgaattcaggatggaaatg

SEQ ID NO: 525651 - DNA, 60 bp, Artificial
  Synthetic oligonucleotide
cgaagggtcacaccgtcttcacagatgaggagttgcgtaagaagtataacagtgttgagc

SEQ ID NO: 525652 - DNA, 60 bp, Artificial
  Synthetic oligonucleotide
cgaagtctccagaggatattggaccatctgattctgcttcaaacgatccactcaccagct

SEQ ID NO: 525653 - DNA, 60 bp, Artificial
  Synthetic oligonucleotide
cgaatactcctgtggtttcaggacgtccacgaccactaaagacaagtgggctataactag

SEQ ID NO: 525654 - DNA, 60 bp, Artificial
  Synthetic oligonucleotide
cgaatcttgcccgtaactgcgatgcgatttaaaattccaatgtcacagcagccacagata

SEQ ID NO: 525655 - DNA, 60 bp, Artificial
  Synthetic oligonucleotide
cgaatgagtgtgacagagttcagtgggatcccgctagatggatttgacataccgccggaa

SEQ ID NO: 525656 - DNA, 60 bp, Artificial; identical to SEQ ID NO: 367901
  Synthetic oligonucleotide

SEQ ID NO: 525657 - DNA, 60 bp, Artificial
  Synthetic oligonucleotide
cgaatgtatgacacagtggtacaatcatttactaatgccaataacgttacaatccctgtc

SEQ ID NO: 525658 - DNA, 60 bp, Artificial
  Synthetic oligonucleotide
cgacatctcttcagccccagccgtgcaatacatcatatcgactgaatacaatgaccgatc

SEQ ID NO: 525659 - DNA, 60 bp, Artificial
  Synthetic oligonucleotide
cgacgccgcaatgctatcagacacgcggaacccgggatgtcccaatcaaggcgacacgaa

SEQ ID NO: 525660 - DNA, 60 bp, Artificial
  Synthetic oligonucleotide
cgacgcctggatgttacagtgggacatcgaccaagcgataatcgatctggagaacgccag

SEQ ID NO: 525661 - DNA, 60 bp, Artificial
  Synthetic oligonucleotide
cgacgtgcgatggtgctggatctgacgttcacaattcgacgcgtggaagcgacacttcct

SEQ ID NO: 525662 - DNA, 60 bp, Artificial
  Synthetic oligonucleotide
cgactagatgacatttcgacagtgttaaataatgctagcgatttgattctcaaattattc

SEQ ID NO: 525663 - DNA, 60 bp, Artificial
  Synthetic oligonucleotide
cgactcactcaaagaatcacaagtggtggtgttgagacgcctgactacgattacgtcgac

SEQ ID NO: 525664 - DNA, 60 bp, Artificial
  Synthetic oligonucleotide
cgactcagcggaaggagatcagagcttacgcacataaagaaaacgagacccccgcgggag

SEQ ID NO: 525665 - DNA, 60 bp, Artificial
  Synthetic oligonucleotide
cgagaagttgagagacaaatcaacacttgcccttacaccggatacaaagggggaattttc

SEQ ID NO: 525666 - DNA, 60 bp, Artificial
  Synthetic oligonucleotide
cgagacgccaacattcgccgattcagtaagagtcaactcaagacatccatcgcttgcaaa

SEQ ID NO: 525667 - DNA, 60 bp, Artificial
  Synthetic oligonucleotide
cgagactacctcctccgctgtaccgtcgctgtcattaaatccaggtctgcttaatcctgg

SEQ ID NO: 525668 - DNA, 60 bp, Artificial
  Synthetic oligonucleotide
cgagagcataacccatggacctcacggaggcagaaggttctacggatatccaccccgagc

SEQ ID NO: 525669 - DNA, 60 bp, Artificial
  Synthetic oligonucleotide
cgagcacgggtggagatactaagacggagttccttcatttaattgatcacctctaaaggg

SEQ ID NO: 525670 - DNA, 60 bp, Artificial
  Synthetic oligonucleotide
cgagctaccgcagctaccagatacatactttgatggagacgagcaatatggtcgtagctt

SEQ ID NO: 525671 - DNA, 60 bp, Artificial
  Synthetic oligonucleotide
cgaggaatgacgggattgtggtccctaggttacttgacatcactcttcgagcgtatgacg

SEQ ID NO: 525672 - DNA, 60 bp, Artificial
  Synthetic oligonucleotide
cgaggagggtatctgctaaggctgtgattaagggtaatcacttaccgataaagttagtct

SEQ ID NO: 525673 - DNA, 60 bp, Artificial
  Synthetic oligonucleotide
cgagtctagtcggctacagacgtttcaaagcgacgatgtttgatggctccaaataccgcc

SEQ ID NO: 525674 - DNA, 60 bp, Artificial
  Synthetic oligonucleotide
cgagtgtcatacatcaacgcagattagcgcgttcgcgaggtgcacacccgatttatttag

SEQ ID NO: 525675 - DNA, 60 bp, Artificial
  Synthetic oligonucleotide
cgatacgcccaaatggctgtgcagcaatatttacgagtcggttacatcgaggagagacgt

SEQ ID NO: 525676 - DNA, 60 bp, Artificial
  Synthetic oligonucleotide
cgatataaaagtaaaggatgcatccgtatctgaagcaagtgctactacgactgtcgatcg

SEQ ID NO: 525677 - DNA, 60 bp, Artificial
  Synthetic oligonucleotide
cgctgatgcgatcgcgtatcgatatacgtcattggaagatgaatcaaagggttgcaatca

SEQ ID NO: 525678 - DNA, 60 bp, Artificial
  Synthetic oligonucleotide
cgctgatgcttatacggtgttgagacctgaatttgtcatccacggtgtcgctccaattgt

SEQ ID NO: 525679 - DNA, 60 bp, Artificial
  Synthetic oligonucleotide
cgctgtgtctatattatccagcagaagctgagacagagattgctgatagttcatggaaag

SEQ ID NO: 525680 - DNA, 60 bp, Artificial
  Synthetic oligonucleotide
cgcttcagggcgagcaatcgagggggcgtataagttgaagaaagtgataaatgcacttag

SEQ ID NO: 525681 - DNA, 60 bp, Artificial
  Synthetic oligonucleotide
cgcttgccctatacgtacccatcggctggaatggttatggcgcacatcccgcggcactaa

SEQ ID NO: 525682 - DNA, 60 bp, Artificial
  Synthetic oligonucleotide
cgctttatctcaagaaatagctatatcacaattaattgacttagcattacttccattaga

SEQ ID NO: 525683 - DNA, 60 bp, Artificial
  Synthetic oligonucleotide
cggaaaagctgagagatcttcggcgtaaagagaaaggcgaatcacgggctaagtcagtga

SEQ ID NO: 525684 - DNA, 60 bp, Artificial
  Synthetic oligonucleotide
cggaaaagctgagagatttgcggcgtaaagaaaaaggtgaaccacgggctaaggtagtga

SEQ ID NO: 525685 - DNA, 60 bp, Artificial
  Synthetic oligonucleotide
cggaactaagacagaagtgccttcatggtttaaaagccttaacccgatgcttggcgttgt

SEQ ID NO: 525686 - DNA, 60 bp, Artificial
  Synthetic oligonucleotide
cggaactctttaccgcaagccccactggacctgatgattgactgagaagccacagtcaat

SEQ ID NO: 525687 - DNA, 60 bp, Artificial
  Synthetic oligonucleotide
cggaagcggcggaactctttaccgcaagccccattggacctgatggttgactgagaagcc

SEQ ID NO: 525688 - DNA, 60 bp, Artificial
  Synthetic oligonucleotide
cggacgtagaagaagttattctagttatcataggtatgaaagcattaatgaattgagtcc

SEQ ID NO: 525689 - DNA, 60 bp, Artificial
  Synthetic oligonucleotide
cggactgatgctaaaatgttgatggagggccagcaagagaagtgcgttgcacatgaggtt

SEQ ID NO: 525690 - DNA, 60 bp, Artificial
  Synthetic oligonucleotide
cggagattctacggcaatccaccacgcgcgccgctcgcgtaccccgggagagattatgaa

SEQ ID NO: 525691 - DNA, 60 bp, Artificial
  Synthetic oligonucleotide
cggaggcgttcagagacgatttaagattgcgtcaaattaaaaagcatgtaaacgagcaag

SEQ ID NO: 525692 - DNA, 60 bp, Artificial
  Synthetic oligonucleotide
cggagtgagcatccctgtatacaaagcgggggcaactggtacgttcataaacattgagaa

SEQ ID NO: 525693 - DNA, 60 bp, Artificial
  Synthetic oligonucleotide
cggatgcgtactcacgtcgtatatggaggtccaacccatatccctgtctacggggcacgt

SEQ ID NO: 525694 - DNA, 60 bp, Artificial
  Synthetic oligonucleotide
cggatggttgctttactgaaaggaaaaattatctctattgggaagttccaatttcaaagt

SEQ ID NO: 525695 - DNA, 60 bp, Artificial
  Synthetic oligonucleotide
cggatgtctacgcggacggagacgtgtcatggttatcagtcagacaagcacgagcacacg

SEQ ID NO: 525696 - DNA, 60 bp, Artificial
  Synthetic oligonucleotide
cggccaccatgagagaactaatttgcagctatttcaaggtcgatcatgcagatgggttga

SEQ ID NO: 525697 - DNA, 60 bp, Artificial
  Synthetic oligonucleotide
cggcgaccttcaagtgtctgacgtctgtgttatgttaccaacccggcgcacccgcggaca

SEQ ID NO: 525698 - DNA, 60 bp, Artificial
  Synthetic oligonucleotide
cggctgcagcggaaattcaaaaactgagggagaggaggcaaaggttggagggggcgaaag

SEQ ID NO: 525699 - DNA, 60 bp, Artificial
  Synthetic oligonucleotide
cgggaatgaccgcagacgtcttagaagcggcttcggaggaggtacccttaattggcgcgg

SEQ ID NO: 525700 - DNA, 60 bp, Artificial
  Synthetic oligonucleotide
cgggaatggcgtattttccttacatcgcatctgtcctaacagttctgtttacactacata

SEQ ID NO: 525701 - DNA, 60 bp, Artificial
  Synthetic oligonucleotide
cgggagatcgcgactctgagatctgcgaacgtaaggctgaatgctgagaaccaccgaatg

SEQ ID NO: 525702 - DNA, 60 bp, Artificial
  Synthetic oligonucleotide
cgggcgattgctcgtgccgcttatgtatagtccgcatgtgcacgggtgcggggtatacag

SEQ ID NO: 525703 - DNA, 60 bp, Artificial
  Synthetic oligonucleotide
cggggcacgttgattgcagcggaatgtgtcttgggtgacccgtataaaactttgcgacgg

SEQ ID NO: 525704 - DNA, 60 bp, Artificial
  Synthetic oligonucleotide
cggggtacacaatcaaattcgcttagtgagggggacgcgaatcggatataggggtgaagc

SEQ ID NO: 525705 - DNA, 60 bp, Artificial
  Synthetic oligonucleotide
cggggtggtataacaggactatgcagcaagcgccaatcgtgctaactcctgcagcactga

SEQ ID NO: 525706 - DNA, 60 bp, Artificial
  Synthetic oligonucleotide
cgggtggagatactaagacggagttccttcatttaattgatcacctctaaagggtccagg

SEQ ID NO: 525707 - DNA, 60 bp, Artificial
  Synthetic oligonucleotide
cgcatgagagggggttacctttattatgctgtatgcacatatttaagtttcatccgggtt

SEQ ID NO: 525708 - DNA, 60 bp, Artificial
  Synthetic oligonucleotide
cgcatgtcgtatgacgctgcgttcactaatgaaaactggacgtgatgctgatgcacatag

SEQ ID NO: 525709 - DNA, 60 bp, Artificial
  Synthetic oligonucleotide
cgcattcaagatttagaggaaaaagtgaagcaggatactataaggacacgatacaaccga

SEQ ID NO: 525710 - DNA, 60 bp, Artificial
  Synthetic oligonucleotide
cgccagatccattgagtcccggagaacagttgctctataataaagtttcagagttagaga

SEQ ID NO: 525711 - DNA, 60 bp, Artificial
  Synthetic oligonucleotide
cgccggatagagattttttcgaacgcacaagggaactcaatgcagacacaggctggtgta

SEQ ID NO: 525712 - DNA, 60 bp, Artificial
  Synthetic oligonucleotide
cgccgtaaaacataccagggcttctctaagctacttaacacgtaccttcgagtaacttgg

SEQ ID NO: 525713 - DNA, 60 bp, Artificial
  Synthetic oligonucleotide
cgcctatgtgtgaggtctgttatggcacggcataacgctcacatacgcacgtgtcactgt

SEQ ID NO: 525714 - DNA, 60 bp, Artificial
  Synthetic oligonucleotide
cgcgagtttttccaaattgcattgcaacaggagggcgcttcgctaatacatcagagacgg

SEQ ID NO: 525715 - DNA, 60 bp, Artificial
  Synthetic oligonucleotide
cgcgataatatattaccgcagattagggaagcgatggaggaggatcacgagataattgga

SEQ ID NO: 525716 - DNA, 60 bp, Artificial
  Synthetic oligonucleotide
cgcgccacggcgtattttacagcacctacgggagatccgaaatggaaggaggttgcgcgc

SEQ ID NO: 525717 - DNA, 60 bp, Artificial
  Synthetic oligonucleotide
cgcgcgacccccggtttaaacatagagtatatcagcaactgagtgctgtaactctgctta

SEQ ID NO: 525718 - DNA, 60 bp, Artificial
  Synthetic oligonucleotide
cgcgcgttcggcaatgagctacgggaggtttatcaattcatgaatggtcaagttcgtgcg

SEQ ID NO: 525719 - DNA, 60 bp, Artificial
  Synthetic oligonucleotide
cgcggatgggatacgtcgacgcatccctatctatcatggccgcgacagggggcgattgct

SEQ ID NO: 525720 - DNA, 60 bp, Artificial
  Synthetic oligonucleotide
cgcggatggtcaaagtcgtcctttacatgtgctgcagggatggagcccgctgagtgcgaa

SEQ ID NO: 525721 - DNA, 60 bp, Artificial
  Synthetic oligonucleotide
cgcggatgtttactcggtattgagacccgagtttgcaatacatggtgtgaatccaatgcc

SEQ ID NO: 525722 - DNA, 60 bp, Artificial
  Synthetic oligonucleotide
cgcggcgtttgtcaacgctatcctttcgatccctaacgttcccaagggcttaatctggga

SEQ ID NO: 525723 - DNA, 60 bp, Artificial
  Synthetic oligonucleotide
cgcgtatgcatcatatgcggaagcatttagagatgatctacgactgcgacagataaagaa

SEQ ID NO: 525724 - DNA, 60 bp, Artificial; identical to SEQ ID NO: 13851
  Synthetic oligonucleotide

SEQ ID NO: 525725 - DNA, 60 bp, Artificial
  Synthetic oligonucleotide
cgcgtctcaaggaatgatggggaacctacgcctcctacttagtcggcttgaagcaggacc

SEQ ID NO: 525726 - DNA, 60 bp, Artificial
  Synthetic oligonucleotide
cgcgtctttagaatggcgtcttcattcgctaccattgatgcccagtgtttcaggttttgt

SEQ ID NO: 525727 - DNA, 60 bp, Artificial
  Synthetic oligonucleotide
cgcgtgagagcgcagtagcacttgtttccaacagtttgaaggacgttccacgcgccacgg

SEQ ID NO: 525728 - DNA, 60 bp, Artificial
  Synthetic oligonucleotide
cgcgtggtaagtccagtggtaaaggcaatgattcaaccgagagagctgatgatggctccg

SEQ ID NO: 525729 - DNA, 60 bp, Artificial
  Synthetic oligonucleotide
cgcgtttctatgacatccgtcctgctataatggggcaggcgctttcacgacaacagggac

SEQ ID NO: 525730 - DNA, 60 bp, Artificial
  Synthetic oligonucleotide
cgctactcaggattttattgatgcttacttggcttacccctaccagttaacaaaaactga

SEQ ID NO: 525731 - DNA, 60 bp, Artificial
  Synthetic oligonucleotide
cactagatgaatgggaaagcggaaaaaatccatatgaaccatcagaagtgactgcatcta

SEQ ID NO: 525732 - DNA, 60 bp, Artificial
  Synthetic oligonucleotide
cgctagatgaatgggagaacggaaaaaatccatatgaaccgatagaggtgactgcatcta

SEQ ID NO: 525733 - DNA, 60 bp, Artificial
  Synthetic oligonucleotide
cgctatgaccgccattggtccagttagacgcccgtaccttcactcggtcgctggtggcat

SEQ ID NO: 525734 - DNA, 60 bp, Artificial
  Synthetic oligonucleotide
cgctcctatctctttggaaaaacgtcgcgcacaaatttccgctttactaacaatgctaca

SEQ ID NO: 525735 - DNA, 60 bp, Artificial
  Synthetic oligonucleotide
cgctcgctttatacgtacctattggctggaatggttatggcgcacatcccgcggcgttaa

SEQ ID NO: 525736 - DNA, 60 bp, Artificial
  Synthetic oligonucleotide
cgctgatgcgatcgcataccgatatgtgtcattagaagatgaatcgaaaggttgcaacca

SEQ ID NO: 525737 - DNA, 60 bp, Artificial
  Synthetic oligonucleotide
gaataaacccgcactgcccacagtatggctctccggcgtcccaaggaatggttgggaatc

SEQ ID NO: 525738 - DNA, 60 bp, Artificial
  Synthetic oligonucleotide
gaataatacattgcacacaatactagaggatccagggatggcgtattttccttatattgc

SEQ ID NO: 525739 - DNA, 60 bp, Artificial
  Synthetic oligonucleotide
gaataatacgtcctttttgggttcgactcatataacggtgtttcagtccaatatcttgat

SEQ ID NO: 525740 - DNA, 60 bp, Artificial
  Synthetic oligonucleotide
gaataatgcagtcttgaagttaggagttaatgatacatggagaccatcacccccgaccaa

SEQ ID NO: 525741 - DNA, 60 bp, Artificial
  Synthetic oligonucleotide
gaatacaaatgaagctacaaaatctagaagaaaatcgcaatgagatcctgcacatacagg

SEQ ID NO: 525742 - DNA, 60 bp, Artificial
  Synthetic oligonucleotide
gaatacctactcaaagatagttttcttccaaagtgggaacttgatggaattaaggatctt

SEQ ID NO: 525743 - DNA, 60 bp, Artificial
  Synthetic oligonucleotide
gaatacgcagactttaggaataggctgtacaactacaaatacagcaacatttgaggaagt

SEQ ID NO: 525744 - DNA, 60 bp, Artificial
  Synthetic oligonucleotide
gaatacgcagactttaggaataggttgtattaccacaaatacagcaacatttgaagaggt

SEQ ID NO: 525745 - DNA, 60 bp, Artificial
  Synthetic oligonucleotide
gaatactcagacgttaggaattggatgtcaaacgacaaatacagctacttttgaaacaat

SEQ ID NO: 525746 - DNA, 60 bp, Artificial
  Synthetic oligonucleotide
gaatattacaggggggcgcgagtcagattgtataacgttcttaaacagaacttggttaag

SEQ ID NO: 525747 - DNA, 60 bp, Artificial
  Synthetic oligonucleotide
gaatattctaaatcaattgaaacgatgatagctcactataacaataaatgtgcacgaaat

SEQ ID NO: 525748 - DNA, 60 bp, Artificial
  Synthetic oligonucleotide
gaatcacaaacttgatgtcacaactactacttgtactatcagaaattgtaaaaaattggg

SEQ ID NO: 525749 - DNA, 60 bp, Artificial
  Synthetic oligonucleotide
gaatccagagcccaagggctatgtcttaaacgttccgggaccaggcgcctatagaataca

SEQ ID NO: 525750 - DNA, 60 bp, Artificial
  Synthetic oligonucleotide
gaatgacagtcaggaatcttgagaaccaattcgtttgaaagcaagcgccgcattacactt

SEQ ID NO: 525751 - DNA, 60 bp, Artificial
  Synthetic oligonucleotide
gaatgaggatgaagcgagtcgcaatgcaattgatcgaagatttgtaatgtcaacctgaga

SEQ ID NO: 525752 - DNA, 60 bp, Artificial
  Synthetic oligonucleotide
gaatgctgactggaaattgtaaaatgtacccattcataaaaggaacagctaagttgaaaa

SEQ ID NO: 525753 - DNA, 60 bp, Artificial
  Synthetic oligonucleotide
gaatgcttctgtgcttatgaaaccaaacactgacgtactcaatctgtctaaaactcaaac

SEQ ID NO: 525754 - DNA, 60 bp, Artificial
  Synthetic oligonucleotide
gaattacgttggaggtgtgaaacattagctaaccataacatgaataacataatgttatca

SEQ ID NO: 525755 - DNA, 60 bp, Artificial
  Synthetic oligonucleotide
gaattatgcagtcttgaaattaggagttaatgatgcatggaggccatcacctccaacaaa

SEQ ID NO: 525756 - DNA, 60 bp, Artificial
  Synthetic oligonucleotide
gaattccaaagcatgctgcctttattctctcctggatcaaagtacccctctgggtggaca

SEQ ID NO: 525757 - DNA, 60 bp, Artificial
  Synthetic oligonucleotide
gaattccgcaatattagggaggaatgatggttacgccttgccccgtattttagatgtgtc

SEQ ID NO: 525758 - DNA, 60 bp, Artificial
  Synthetic oligonucleotide
gaattgcaatgtgtgggtgcgtgtgagcgtgttgcttttgtctctaaggacatgagcttg

SEQ ID NO: 525759 - DNA, 60 bp, Artificial
  Synthetic oligonucleotide
gacaaccgctacgtgtacaataagaaactgtaaaaaacttggaccaagagaaaatgttgc

SEQ ID NO: 525760 - DNA, 60 bp, Artificial
  Synthetic oligonucleotide
gacacatcagtcacgtacccttgggcgcatccacgggatacggaattcggagcttaccac

SEQ ID NO: 525761 - DNA, 60 bp, Artificial
  Synthetic oligonucleotide
gacagacttcgagtttgtggggagagtgccacctgctgcggatttcatcgacatacttag

SEQ ID NO: 525762 - DNA, 60 bp, Artificial
  Synthetic oligonucleotide
gacagcatacttcacggctccgacgggggacaccaactggaaggaggttgctcggcttgc

SEQ ID NO: 525763 - DNA, 60 bp, Artificial
  Synthetic oligonucleotide
gacaggacattcaagttattggaaacaaaggggttggaaaatctgagattggaaaaaggt

SEQ ID NO: 525764 - DNA, 60 bp, Artificial
  Synthetic oligonucleotide
gacaggcgtatactgagttcatgaatgcagcgtgggggatgccaacaaccccagagctcc

SEQ ID NO: 525765 - DNA, 60 bp, Artificial
  Synthetic oligonucleotide
gacaggcgtgcctcgcgacgcgacaagtccggacggaccagtcatcctcgacatcagcta

SEQ ID NO: 525766 - DNA, 60 bp, Artificial
  Synthetic oligonucleotide
gacatttcattatgtagatttattggattacgtgttgaatcttctgtgttaagggttcgg

SEQ ID NO: 525767 - DNA, 60 bp, Artificial
  Synthetic oligonucleotide
gaccaagaaccgctataagtacgtcggaatgaagacgtcgtcgcagttgaatgcgctcgt

SEQ ID NO: 525768 - DNA, 60 bp, Artificial
  Synthetic oligonucleotide
gaacgattgagtaagattagaaagtcgaaagacgagaggttgtcgatgctagcgagcatg

SEQ ID NO: 525769 - DNA, 60 bp, Artificial
  Synthetic oligonucleotide
gaacggattgcaatagacgagaactttgacactttagttgcggcaacggatggcagcgat

SEQ ID NO: 525770 - DNA, 60 bp, Artificial
  Synthetic oligonucleotide
gaacgtatcccagatttggctgtagaggatgtgatgagccaaaagaaattactatcaatg

SEQ ID NO: 525771 - DNA, 60 bp, Artificial
  Synthetic oligonucleotide
gaacgtattcgttctggaccaaaagcgaaagacactatgtggtcaaatagctggaaagaa

SEQ ID NO: 525772 - DNA, 60 bp, Artificial
  Synthetic oligonucleotide
gaacgtgactttaacatcgcttctttgtatgtacgtgaaaatttcgaaatttgcacagat

SEQ ID NO: 525773 - DNA, 60 bp, Artificial
  Synthetic oligonucleotide
gaacgtgatttgcaaaataaaattggatcccttacttcttcgattgaatggtatttaaga

SEQ ID NO: 525774 - DNA, 60 bp, Artificial
  Synthetic oligonucleotide
gaactacaactagatatatcagagttagctgatttaatacttaatgaatggttgtgtaac

SEQ ID NO: 525775 - DNA, 60 bp, Artificial
  Synthetic oligonucleotide
gaactgagggtggcactctggctgagcttaattggcttcaggcggagtctgggtcaatgt

SEQ ID NO: 525776 - DNA, 60 bp, Artificial
  Synthetic oligonucleotide
gaacttagtcaagaccaccgatgagattgggaacatacgcgctgtaagaaatgaaaacgc

SEQ ID NO: 525777 - DNA, 60 bp, Artificial
  Synthetic oligonucleotide
gaacttctaaagagaattcacgatatgttgatggcgacgtcagttgataaaatagacatg

SEQ ID NO: 525778 - DNA, 60 bp, Artificial
  Synthetic oligonucleotide
gaagaatctagaagacgtttatttgaaatcagtgctaaactatggcaaggcagtctattt

SEQ ID NO: 525779 - DNA, 60 bp, Artificial
  Synthetic oligonucleotide
gaagacagaaacagttccgttgtcgaagaagaacctgacaatactgaacatcgtaacgac

SEQ ID NO: 525780 - DNA, 60 bp, Artificial
  Synthetic oligonucleotide
gaagacgagacagcaacaggaatcatgtttgagctcagccggtgtgtgatgacattagct

SEQ ID NO: 525781 - DNA, 60 bp, Artificial
  Synthetic oligonucleotide
gaagagacctgtctgagagaggacgccctgggcgaagacgtcgcgagtgggaatggtgac

SEQ ID NO: 525782 - DNA, 60 bp, Artificial
  Synthetic oligonucleotide
gaagagccacgagcagacttattctaccttacgaatagatgcaattatgatatgtggcgc

SEQ ID NO: 525783 - DNA, 60 bp, Artificial
  Synthetic oligonucleotide
gaagaggtcgcaacagctgaaaaattggcaataacggatgttgtagatggagtgaattat

SEQ ID NO: 525784 - DNA, 60 bp, Artificial
  Synthetic oligonucleotide
gaagatggcgagaccagctgtccgggcagctttgggcgacccacaagtgatgaatctcgt

SEQ ID NO: 525785 - DNA, 60 bp, Artificial
  Synthetic oligonucleotide
gaagatttagcggctcattggcatgcactaggagcagcgcaagaggtgaagggtcgtact

SEQ ID NO: 525786 - DNA, 60 bp, Artificial
  Synthetic oligonucleotide
gaagcgatacaaacgtacattaaacccttttgcgcagctttcggaataataaatttagca

SEQ ID NO: 525787 - DNA, 60 bp, Artificial
  Synthetic oligonucleotide
gaagcgttggttacaactgctatccatatacatcgatggatcagagggtgtggtatctgg

SEQ ID NO: 525788 - DNA, 60 bp, Artificial
  Synthetic oligonucleotide
gaagcgtttcgtgatgatgtgagactaagacagatcaaacgttatgttaatgaacagatc

SEQ ID NO: 525789 - DNA, 60 bp, Artificial
  Synthetic oligonucleotide
gaagcgtttcgtgatgatgtgagactcaggcagattaagcgtcatgtcaacgaacagatc

SEQ ID NO: 525790 - DNA, 60 bp, Artificial
  Synthetic oligonucleotide
gaagctctgaactacttacccaagaggaacaatggccacgtattaacacgcgttgtggat

SEQ ID NO: 525791 - DNA, 60 bp, Artificial
  Synthetic oligonucleotide
gaagctgatttgcaaggcaaatttagttcattagtgtcatcagttgagtggtatctaagg

SEQ ID NO: 525792 - DNA, 60 bp, Artificial
  Synthetic oligonucleotide
gaaggagtggcggaacaaacggaaaaactgagagatctgcgacgtaaagagaaaggtgaa

SEQ ID NO: 525793 - DNA, 60 bp, Artificial
  Synthetic oligonucleotide
gaaggctcccctcccaccgctcattatccctaataggcgaatagttggatatcagaacct

SEQ ID NO: 525794 - DNA, 60 bp, Artificial
  Synthetic oligonucleotide
gaagtatgagttgcagagcgtcgggagctgcgaacgcgttgcttttgtttccaaaggcac

SEQ ID NO: 525795 - DNA, 60 bp, Artificial
  Synthetic oligonucleotide
gaagtcagaattgtggtggagtctaatgttttggaaattctaggaatagcaattaataga

SEQ ID NO: 525796 - DNA, 60 bp, Artificial
  Synthetic oligonucleotide
gaagtcagatatgtgcaacaactgtttgggaaagttccaacgggtgaatttccattgcat

SEQ ID NO: 525797 - DNA, 60 bp, Artificial
  Synthetic oligonucleotide
gaagttggagtgtgatgttattgacgtgcggttggcggagatcatcgggtgttcaccatt

SEQ ID NO: 525798 - DNA, 60 bp, Artificial
  Synthetic oligonucleotide
gaagtttgagagtgtgagtgtaaccccaatggccacacgtatccagcataacggcgtaat

SEQ ID NO: 525799 - DNA, 60 bp, Artificial
  Synthetic oligonucleotide
gagaagtgactgcagcaatgtaagaggttgagctgccgtcgactgtcttcggaagcggcg

SEQ ID NO: 525800 - DNA, 60 bp, Artificial
  Synthetic oligonucleotide
gagaatcaaataagtggatatcgatgggatcatcatgtaccgtgaaagtgtgtccgctaa

SEQ ID NO: 525801 - DNA, 60 bp, Artificial
  Synthetic oligonucleotide
gagaatggtaatgtagataagctagaagactaaacatcttctatgcagcctacataccat

SEQ ID NO: 525802 - DNA, 60 bp, Artificial
  Synthetic oligonucleotide
gagaattcagatgatacgaaactgctccacaacttgatttccgcagcgccgaatgcttct

SEQ ID NO: 525803 - DNA, 60 bp, Artificial
  Synthetic oligonucleotide
gagacatcaatgatgagttcagaaagcctgctaagcttagctgagattattaccagcgca

SEQ ID NO: 525804 - DNA, 60 bp, Artificial
  Synthetic oligonucleotide
gagaccgttagcgcatcgtacattacgtctaactatatagagcgcataagtaaaattcga

SEQ ID NO: 525805 - DNA, 60 bp, Artificial
  Synthetic oligonucleotide
gagacgaggagtgctggcgttgagcacgtggagagatggtttaatagtctgggagttcca

SEQ ID NO: 525806 - DNA, 60 bp, Artificial
  Synthetic oligonucleotide
gagactattcatatacgaaggagaaactccaaatgtcacgaccaaaggatacatcgtaac

SEQ ID NO: 525807 - DNA, 60 bp, Artificial
  Synthetic oligonucleotide
gagagaatgtggccgtaatacaagttggtggtgctgacatacttgatataacatctgatc

SEQ ID NO: 525808 - DNA, 60 bp, Artificial
  Synthetic oligonucleotide
gagagaattagtttgtgaccacttcaaggttgatcacgtggatggactacgctatgtccc

SEQ ID NO: 525809 - DNA, 60 bp, Artificial
  Synthetic oligonucleotide
gagagagcttccttgtccatgcgatcattaccacgttctcatgtttatgacgtactagat

SEQ ID NO: 525810 - DNA, 60 bp, Artificial
  Synthetic oligonucleotide
gagagagggggcttcgattgactcgtggcttgagttactgcgtcacttatgatgcgtgac

SEQ ID NO: 525811 - DNA, 60 bp, Artificial
  Synthetic oligonucleotide
gagagatacgtccaaatagcttacgactcaccatccgtagtcgatggagctgcatactat

SEQ ID NO: 525812 - DNA, 60 bp, Artificial
  Synthetic oligonucleotide
gagagcgcgtgcggaaagatggaaaagcttaccgacctcaactacacattgagtgtaatc

SEQ ID NO: 525813 - DNA, 60 bp, Artificial
  Synthetic oligonucleotide
gagaggaagagggaagatcttgaaagaagtcaagaacagttcaggacgcaagaggtggag

SEQ ID NO: 525814 - DNA, 60 bp, Artificial
  Synthetic oligonucleotide
gagagtaagcacgattgagcagagctatgttgcgtctgcggtgacacctttaaggttaaa

SEQ ID NO: 525815 - DNA, 60 bp, Artificial
  Synthetic oligonucleotide
gagatacactttagctagatattatgatattcgtcctgggctgatgggtcgttcactgat

SEQ ID NO: 525816 - DNA, 60 bp, Artificial
  Synthetic oligonucleotide
gagatccccagtgcgttaaagattcactcggaacatacacccaaagtgcatatatacacg

SEQ ID NO: 525817 - DNA, 60 bp, Artificial
  Synthetic oligonucleotide
gagatgaagcgtcagcgcagataatcgagatcgaacggagcttacaaaaggagctgggaa

SEQ ID NO: 525818 - DNA, 60 bp, Artificial
  Synthetic oligonucleotide
gagattagatctgaattttacgcaatattggatacatgggatattagtactataaagaga

SEQ ID NO: 525819 - DNA, 60 bp, Artificial
  Synthetic oligonucleotide
gagattctcgctcatatcattagtgctatcgaatgatgattatcaaacgccaattatgaa

SEQ ID NO: 525820 - DNA, 60 bp, Artificial
  Synthetic oligonucleotide
gagattggacgcctggaatgactgcgcaggcactagctctactagccacttttaccgtct

SEQ ID NO: 525821 - DNA, 60 bp, Artificial
  Synthetic oligonucleotide
gagcaatcatacacactactctactagtggctgctgtggttgcgctgctgacatcagttt

SEQ ID NO: 525822 - DNA, 60 bp, Artificial
  Synthetic oligonucleotide
gagcacgtaggtaatgaaccagtctttaaaactaagctaattcgtgatcagcaaatcggc

SEQ ID NO: 525823 - DNA, 60 bp, Artificial
  Synthetic oligonucleotide
gagcagatctattctacttaaccaataggcgcaatatgggcttggagcctagcatttatg

SEQ ID NO: 525824 - DNA, 60 bp, Artificial
  Synthetic oligonucleotide
gagcatggattcctcacgatgcatcaatgaattatattgtgaagaaacggcagaggctat

SEQ ID NO: 525825 - DNA, 60 bp, Artificial
  Synthetic oligonucleotide
gagccagattacattcggtcagtctagaatgtttattccgcatataacattaagttttag

SEQ ID NO: 525826 - DNA, 60 bp, Artificial
  Synthetic oligonucleotide
gagccagtacttgatggcccatatcaacctactacgttcaatccaccagtaagttattgg

SEQ ID NO: 525827 - DNA, 60 bp, Artificial
  Synthetic oligonucleotide
gagccggttttccctgacaaatcccaagtccttttgaagtatgccaaccaggggatggac

SEQ ID NO: 525828 - DNA, 60 bp, Artificial
  Synthetic oligonucleotide
gagcgaatgatgcgtattaattggaaaaaatggtggcaagtattttacactgtagttgat

SEQ ID NO: 525829 - DNA, 60 bp, Artificial
  Synthetic oligonucleotide
gaccagaattcgctatacatggtgtgaatgctatgcctggcccgctaacgcgggcgattg

SEQ ID NO: 525830 - DNA, 60 bp, Artificial
  Synthetic oligonucleotide
gacccaccagtaccagatatttcattatgtagatttatcggattgcgcgttgaatcttct

SEQ ID NO: 525831 - DNA, 60 bp, Artificial
  Synthetic oligonucleotide
gaccgaacgcattagatatcactgctgatccaacaacagtcccacaaattcaaagaatca

SEQ ID NO: 525832 - DNA, 60 bp, Artificial
  Synthetic oligonucleotide
gaccggaccgccaaccgttcggttatttcttaacagcagcagaggttacgcagcatggtc

SEQ ID NO: 525833 - DNA, 60 bp, Artificial
  Synthetic oligonucleotide
gacctgatacttaatgaatggttatgcaatccaatggacataacgttgtattactatcaa

SEQ ID NO: 525834 - DNA, 60 bp, Artificial
  Synthetic oligonucleotide
gacctgatgactgactgagaagccacagtcaatcatatcgcgtgtggctcaagccttaat

SEQ ID NO: 525835 - DNA, 60 bp, Artificial
  Synthetic oligonucleotide
gacctgatggttggttgagaagccacaaccaatcatatcgcgtgtgacttagtcttaatc

SEQ ID NO: 525836 - DNA, 60 bp, Artificial
  Synthetic oligonucleotide
gacctttactgttcgttgagacgctactacctggagacacctccgattacggcgacggta

SEQ ID NO: 525837 - DNA, 60 bp, Artificial
  Synthetic oligonucleotide
gacgaacatgacacagccggatgtttgggatgctctgttgacgatgtctccattgtccgc

SEQ ID NO: 525838 - DNA, 60 bp, Artificial
  Synthetic oligonucleotide
gacgacgaatctagatattacatcgacgattcgcggagcctctttcctcacttgtacgtt

SEQ ID NO: 525839 - DNA, 60 bp, Artificial
  Synthetic oligonucleotide
gacgagatcctacgtggacgattcgcgcactctctttccgcatctctacgtcgcgatgaa

SEQ ID NO: 525840 - DNA, 60 bp, Artificial
  Synthetic oligonucleotide
gacgaggttcgcagaagataggtcgggtgaggaaatagcgtatgagatgggcggggcttt

SEQ ID NO: 525841 - DNA, 60 bp, Artificial
  Synthetic oligonucleotide
gacgcatataacgaggcggtgaggatgagcatatcggagtttagtgaagtgccgctagac

SEQ ID NO: 525842 - DNA, 60 bp, Artificial
  Synthetic oligonucleotide
gacgccaccaaggttcaccggaccaggatggagtggagtgttagcgagtctccgctgcat

SEQ ID NO: 525843 - DNA, 60 bp, Artificial
  Synthetic oligonucleotide
gacgccttatcctcacattcgccggagaatccagtatcttggctacgtgcctgaagatgt

SEQ ID NO: 525844 - DNA, 60 bp, Artificial
  Synthetic oligonucleotide
gacgcgaatctacaactggatatgtctgaattagctgatctaatactaaatgagtggctg

SEQ ID NO: 525845 - DNA, 60 bp, Artificial
  Synthetic oligonucleotide
gacggtggatacgatttcaattgtcctgctagtacaacagacgtgacacactatggcggt

SEQ ID NO: 525846 - DNA, 60 bp, Artificial
  Synthetic oligonucleotide
gactacacgtgaaattgaacaggttgaattactgaagcgtatctacgacaaattgatggt

SEQ ID NO: 525847 - DNA, 60 bp, Artificial
  Synthetic oligonucleotide
gactacgtgaatcaaattgtgcaagcaatgtccaaaagatcgagatcattaaattctgct

SEQ ID NO: 525848 - DNA, 60 bp, Artificial
  Synthetic oligonucleotide
gactatgaagtgaactgggaagtgaggggactagtcatgcaaaatatggatgggaaagta

SEQ ID NO: 525849 - DNA, 60 bp, Artificial
  Synthetic oligonucleotide
gactgcatctttgtaagaggttgagctgccgtcgtctgtccacggaagcgacggagttct

SEQ ID NO: 525850 - DNA, 60 bp, Artificial
  Synthetic oligonucleotide
gactggaacaacttaggtagcttcctggatattatactgaaaggaccggaacttggtgag

SEQ ID NO: 525851 - DNA, 60 bp, Artificial
  Synthetic oligonucleotide
gactggtggcgctgtatcactacgacctgcaggagtaacactatcaacacagttcacgga

SEQ ID NO: 525852 - DNA, 60 bp, Artificial
  Synthetic oligonucleotide
gactgtatgatgctgcagattttcgccatagactcatctgctactgtgtacgtaggtcct

SEQ ID NO: 525853 - DNA, 60 bp, Artificial
  Synthetic oligonucleotide
gagaaatcgtttttcaaaatgcagcatttacaatgtggaagttaacgtatctggaacata

SEQ ID NO: 525854 - DNA, 60 bp, Artificial
  Synthetic oligonucleotide
gagaaatgaatcaatgtttaccttcttaaattttccatcaattaagcaattttcaaatgg

SEQ ID NO: 525855 - DNA, 60 bp, Artificial
  Synthetic oligonucleotide
gagaaattatgttcgccaccatgagactctctgcactagagtagcgcctaggcagcataa

SEQ ID NO: 525856 - DNA, 60 bp, Artificial
  Synthetic oligonucleotide
gagaactcatttgtctatatagattattgggatgattcacaagcttttaggaatatggtg

SEQ ID NO: 525857 - DNA, 60 bp, Artificial
  Synthetic oligonucleotide
gagaagattaatgcgtttaccctaagagatcactagggagctccccactcccgttttgtg

SEQ ID NO: 525858 - DNA, 60 bp, Artificial
  Synthetic oligonucleotide
gagaagcggagatttaaggaggatcgtaatggtgaaaacatcgcggaagcgttgtgcaca

SEQ ID NO: 525859 - DNA, 60 bp, Artificial
  Synthetic oligonucleotide
gagaaggattgaaaatttctctatgccccaaggtaactcacagcggacgctagcaggagt

SEQ ID NO: 525860 - DNA, 60 bp, Artificial
  Synthetic oligonucleotide
ctggaaaaaatggtggcaagtattttacactatagtcgattatgtgaaccaaattgtaca

SEQ ID NO: 525861 - DNA, 60 bp, Artificial
  Synthetic oligonucleotide
ctggaccggggtcggtgggtggcggctgatgctaatgacgctagactgctggtgtttcca

SEQ ID NO: 525862 - DNA, 60 bp, Artificial
  Synthetic oligonucleotide
ctggattcgctgcgccagtctgtgagagtggagaagtcattaatcttgccgcacgtatgt

SEQ ID NO: 525863 - DNA, 60 bp, Artificial
  Synthetic oligonucleotide
ctggcgacgccagagataccatatacgatggagtcggccaatgaaatcgcaagaatgagt

SEQ ID NO: 525864 - DNA, 60 bp, Artificial
  Synthetic oligonucleotide
ctgggacgcactgaaaagctatgtgctacagactctcgggatgcccgcccatcactaccc

SEQ ID NO: 525865 - DNA, 60 bp, Artificial
  Synthetic oligonucleotide
ctgggatggcgtattttccttacattgcatctgtcctgacagtcttgtttacactacaca

SEQ ID NO: 525866 - DNA, 60 bp, Artificial
  Synthetic oligonucleotide
ctgggggcgctgaaatttggagttaagatattaggcgataaaattgatgttcccctcttc

SEQ ID NO: 525867 - DNA, 60 bp, Artificial
  Synthetic oligonucleotide
ctgggtgacaagattgatgtcccactcttcttacgaaacgcatgacagcggtgatcccgg

SEQ ID NO: 525868 - DNA, 60 bp, Artificial
  Synthetic oligonucleotide
ctggtcacgattccgcgcaaccatcggagtaaacgcaactctcgtggaactgggcacctc

SEQ ID NO: 525869 - DNA, 60 bp, Artificial
  Synthetic oligonucleotide
ctggtgcgcgaccgtttgcagaacatcccgagaggcggtgtatgttacttccaccatgat

SEQ ID NO: 525870 - DNA, 60 bp, Artificial
  Synthetic oligonucleotide
ctggtgtcattcctccagtaaatgtggacagaccaattccactaggtcgtagagacgttc

SEQ ID NO: 525871 - DNA, 60 bp, Artificial
  Synthetic oligonucleotide
ctggtttctaacgcgatgagattagtttatgattccgagttacaaatgcattgtctccgt

SEQ ID NO: 525872 - DNA, 60 bp, Artificial
  Synthetic oligonucleotide
ctgtacaatacctcaaagccagtgggactcgtgtggatgcattcaggatcatgggtatat

SEQ ID NO: 525873 - DNA, 60 bp, Artificial
  Synthetic oligonucleotide
ctgtcggtacctgattcttggatgacaatggattttgatcgtctaatacgcgacattgtg

SEQ ID NO: 525874 - DNA, 60 bp, Artificial
  Synthetic oligonucleotide
ctgtcttcggaagcggcggaactcttcaccgcaagccccattagacctgatgattgactg

SEQ ID NO: 525875 - DNA, 60 bp, Artificial
  Synthetic oligonucleotide
ctgtgctgatagaactcttcgtcgtgataacgtcaagaccattttgactcgtgatctgcc

SEQ ID NO: 525876 - DNA, 60 bp, Artificial
  Synthetic oligonucleotide
ctgttagacaggaatatgcagtaccagttggaccagtttttccgccaggcatgaattgga

SEQ ID NO: 525877 - DNA, 60 bp, Artificial
  Synthetic oligonucleotide
ctgttcaatgggatgtgcgcgaagcaaaattttgagagagcaatgattgcagcaacggat

SEQ ID NO: 525878 - DNA, 60 bp, Artificial
  Synthetic oligonucleotide
ctgttccaactgatgagctgtagatgacccgtgatgcagtgttgtcctaatcccttaagc

SEQ ID NO: 525879 - DNA, 60 bp, Artificial
  Synthetic oligonucleotide
ctgttttactgaacgtattaggtactggggaggagctaccagacccattgagtccgggag

SEQ ID NO: 525880 - DNA, 60 bp, Artificial
  Synthetic oligonucleotide
cttaaagataattcagttttgtatatagatatacgaacagatagaggagacgtggactgg

SEQ ID NO: 525881 - DNA, 60 bp, Artificial
  Synthetic oligonucleotide
cttaataacttctgcgagcacactaacgagcgatttgggaatcattctaaagaatactac

SEQ ID NO: 525882 - DNA, 60 bp, Artificial
  Synthetic oligonucleotide
cttaccgacctcaattacacattgaatgtaatcactataatgaatgatacgttgcataca

SEQ ID NO: 525883 - DNA, 60 bp, Artificial
  Synthetic oligonucleotide
cttagaatgcgagtatgtcgtagtgaagcatggcgtcggtacgcatgtcgttggtagcaa

SEQ ID NO: 525884 - DNA, 60 bp, Artificial
  Synthetic oligonucleotide
cttagcaaccccagagataccgtttacaactgaggcggcaaatgagattgcgcgtgtgac

SEQ ID NO: 525885 - DNA, 60 bp, Artificial
  Synthetic oligonucleotide
cttatagaataacaattgacatgattagaccagctgctatgactcaatacgttcaacgaa

SEQ ID NO: 525886 - DNA, 60 bp, Artificial
  Synthetic oligonucleotide
cttatataacatctgtcctaacagttttgttcatgttgcacaaagcatctattccaacaa

SEQ ID NO: 525887 - DNA, 60 bp, Artificial
  Synthetic oligonucleotide
cttatatatcaggttagaggtcggcgcatacccttataccgtccagtactatcaaggtcg

SEQ ID NO: 525888 - DNA, 60 bp, Artificial
  Synthetic oligonucleotide
cttcaccgcacccacaggcgacccatcatggaaggggactgcgcggctggcgactcagcg

SEQ ID NO: 525889 - DNA, 60 bp, Artificial
  Synthetic oligonucleotide
ctcttcaccgcaagccccattagacttgatgattgactgagaagccacagtcaatcatat

SEQ ID NO: 525890 - DNA, 60 bp, Artificial
  Synthetic oligonucleotide
ctcttttgacttaaaaagatggatatacttacactcgatagaaaaagctgatatagaagg

SEQ ID NO: 525891 - DNA, 60 bp, Artificial
  Synthetic oligonucleotide
ctgaaacgaaagtgtctccttttgcattgtgccgagttgatgtgtctcgctcttacgatc

SEQ ID NO: 525892 - DNA, 60 bp, Artificial
  Synthetic oligonucleotide
ctgaaaggtttgcagagagcgagatagggtcagccgcgatagatggattgatccagggga

SEQ ID NO: 525893 - DNA, 60 bp, Artificial
  Synthetic oligonucleotide
ctgaacgttctggggacaggggacgagattcctgatccgttaagcccaggggaacgtggc

SEQ ID NO: 525894 - DNA, 60 bp, Artificial
  Synthetic oligonucleotide
ctgaagatagacatgcgtgagacggtgagactttggactcgatcggcattagacgattca

SEQ ID NO: 525895 - DNA, 60 bp, Artificial
  Synthetic oligonucleotide
ctgaagcattggattttcagaatttcatgctaactaaaataaaagaacgcatgactacat

SEQ ID NO: 525896 - DNA, 60 bp, Artificial
  Synthetic oligonucleotide
ctgaatttgtaatgtctcgtcgaggtggtatgtcctgtttttaatgttggtggaatctca

SEQ ID NO: 525897 - DNA, 60 bp, Artificial
  Synthetic oligonucleotide
ctgacacgacggtagtaatttccatgacaacagctaccattgaatccagcttaacccacc

SEQ ID NO: 525898 - DNA, 60 bp, Artificial
  Synthetic oligonucleotide
ctgacagtggagttagatctgaagtccctattgttaaagaatctccaggtactttacctg

SEQ ID NO: 525899 - DNA, 60 bp, Artificial
  Synthetic oligonucleotide
ctgacggcttggtccccgtgatagattgggtggagcctaggtctaattaccgtttcatgt

SEQ ID NO: 525900 - DNA, 60 bp, Artificial
  Synthetic oligonucleotide
ctgacttttctgtcggagcaatatgttggcgatgacacgttgttctatactaagttacat

SEQ ID NO: 525901 - DNA, 60 bp, Artificial
  Synthetic oligonucleotide
ctgagaagcaaactccacctatgatcaagaaacctttcacgaggacgatcgtccttaaga

SEQ ID NO: 525902 - DNA, 60 bp, Artificial
  Synthetic oligonucleotide
ctgagaagccacagtcaatcatatcgcgtgtggctcagccttaatcccgtttaaccaatc

SEQ ID NO: 525903 - DNA, 60 bp, Artificial
  Synthetic oligonucleotide
ctgagcacactgccaataatagtacgatgatggatggatttctaaggtcttgggtcccct

SEQ ID NO: 525904 - DNA, 60 bp, Artificial
  Synthetic oligonucleotide
ctgagtgcgaatctaggctgcgaggccatgctagaactatgttcggccgttctcttccgg

SEQ ID NO: 525905 - DNA, 60 bp, Artificial
  Synthetic oligonucleotide
ctgatcatcaagccgatgaggatgaacagggtgaagacgctagcgatgacgaacatccta

SEQ ID NO: 525906 - DNA, 60 bp, Artificial
  Synthetic oligonucleotide
ctgatcgtgtgaccgctcactggaagcgtggtatgttgtcatttgtatctcaaatgcatg

SEQ ID NO: 525907 - DNA, 60 bp, Artificial
  Synthetic oligonucleotide
ctgatcgttaaagcaaagcgtgagctcgagcagcgctcgattagctcattgctgcgctct

SEQ ID NO: 525908 - DNA, 60 bp, Artificial
  Synthetic oligonucleotide
ctgatgaggcaaataaatggatttcaatgggatcatcttgtactataaaggtatgtccac

SEQ ID NO: 525909 - DNA, 60 bp, Artificial
  Synthetic oligonucleotide
ctgattgtctcgtgtcaaatatgctccatactaggcatgtcttcagccaaatgttgacca

SEQ ID NO: 525910 - DNA, 60 bp, Artificial
  Synthetic oligonucleotide
ctgcactttctttaggaaacgcttttatttcggaaggacgataccattatgcacttgaca

SEQ ID NO: 525911 - DNA, 60 bp, Artificial
  Synthetic oligonucleotide
ctgcatcagatgatgttaatgagacgtgatttcccaacgcgcgaccgtaacatcgtagaa

SEQ ID NO: 525912 - DNA, 60 bp, Artificial
  Synthetic oligonucleotide
ctgcatcattgtgagaggttgagctgccgtcgtctgtctgcggaagcggcggagttctta

SEQ ID NO: 525913 - DNA, 60 bp, Artificial; identical to SEQ ID NO: 385205
  Synthetic oligonucleotide

SEQ ID NO: 525914 - DNA, 60 bp, Artificial
  Synthetic oligonucleotide
ctgcgtgtcacatcaccaccgtaatgagtccttttttctgggttttgatttaggtataga

SEQ ID NO: 525915 - DNA, 60 bp, Artificial
  Synthetic oligonucleotide
ctgctaactatgttgcagaaaccagtgtcatttaaatcaaataaaattacgattaatgat

SEQ ID NO: 525916 - DNA, 60 bp, Artificial
  Synthetic oligonucleotide
ctgctagatagcataaattttgacagaatggcatttttaccattaacattacaacaagag

SEQ ID NO: 525917 - DNA, 60 bp, Artificial
  Synthetic oligonucleotide
ctgctagcacattaacaagcgatttgggaattctattgaagcataatacaacggtcgagg

SEQ ID NO: 525918 - DNA, 60 bp, Artificial; identical to SEQ ID NO: 111021
  Synthetic oligonucleotide

SEQ ID NO: 525919 - DNA, 60 bp, Artificial
  Synthetic oligonucleotide
ctgcttcaaacgatccactcaccagcttttcgattagatcgaatgcagttaagacaaatg

SEQ ID NO: 525920 - DNA, 60 bp, Artificial
  Synthetic oligonucleotide
gaaaaactagtaatcactgacgtagttgacggtgtgaatcataaattggatgttactacc

SEQ ID NO: 525921 - DNA, 60 bp, Artificial
  Synthetic oligonucleotide
gaaaaagttcacttcgctagttttaccgctccagtgtgtgaaagtggagaggtaattaac

SEQ ID NO: 525922 - DNA, 60 bp, Artificial
  Synthetic oligonucleotide
gaaaaccataataaagataatggactatattatttatagaatagcatttgtaattgtagt

SEQ ID NO: 525923 - DNA, 60 bp, Artificial
  Synthetic oligonucleotide
gaaacaaactcaattcccgcggacgttcgattccaggtcaaacttgaagtggggtgttat

SEQ ID NO: 525924 - DNA, 60 bp, Artificial; identical to SEQ ID NO: 390773
  Synthetic oligonucleotide

SEQ ID NO: 525925 - DNA, 60 bp, Artificial
  Synthetic oligonucleotide
gaaacgatctcatgcgtaccaatggccacagttctaaatataaacggagcgttggtagac

SEQ ID NO: 525926 - DNA, 60 bp, Artificial
  Synthetic oligonucleotide
gaaacggcgggtactacgtacggttgatgagagtaggtggatcatacacttaatcagatc

SEQ ID NO: 525927 - DNA, 60 bp, Artificial
  Synthetic oligonucleotide
gaaactagaatcgaaatgaaggcaagcgatgaagtgagtttagtgccttatcaggagcag

SEQ ID NO: 525928 - DNA, 60 bp, Artificial
  Synthetic oligonucleotide
gaaactcaagatgcaaatgtggatagacgcttacatattacagtgggatctggatcaagc

SEQ ID NO: 525929 - DNA, 60 bp, Artificial
  Synthetic oligonucleotide
gaaagaaagctcaaaatcgatatctaagagggacaagcaaaagggaatgcgcgatggtga

SEQ ID NO: 525930 - DNA, 60 bp, Artificial
  Synthetic oligonucleotide
gaaagacactatgtggccaaatagctggaaagagttcgacgccttactgtcaagtgaaaa

SEQ ID NO: 525931 - DNA, 60 bp, Artificial
  Synthetic oligonucleotide
gaaagacgcgcatagggacccagggctaatcccatacgtggcatgcgctttgcgaattaa

SEQ ID NO: 525932 - DNA, 60 bp, Artificial
  Synthetic oligonucleotide
gaaaggagatcggaaacatggaaggaatagccgagacggctcctcaaaaaaggaaggtat

SEQ ID NO: 525933 - DNA, 60 bp, Artificial
  Synthetic oligonucleotide
gaaaggtgaaccacggactaaggcggtgatgaaaggggatcggaaacatggaaggaatag

SEQ ID NO: 525934 - DNA, 60 bp, Artificial
  Synthetic oligonucleotide
gaaatacctcaatggtttaagagtttgaatccgatgttgggtgtggtgaatctgggggct

SEQ ID NO: 525935 - DNA, 60 bp, Artificial; identical to SEQ ID NO: 391283
  Synthetic oligonucleotide

SEQ ID NO: 525936 - DNA, 60 bp, Artificial
  Synthetic oligonucleotide
gaaatggttacgcaaactgaaggactgaacttcgatgatatctctgctgctgtgctaaaa

SEQ ID NO: 525937 - DNA, 60 bp, Artificial
  Synthetic oligonucleotide
gaaatgtataatgagtatacaatgttaattagagacgaaatagtcaaaatgctagaagta

SEQ ID NO: 525938 - DNA, 60 bp, Artificial
  Synthetic oligonucleotide
gaacaaataattcagatagatggttagccacaatactaattgagcctaatgtaacatcac

SEQ ID NO: 525939 - DNA, 60 bp, Artificial
  Synthetic oligonucleotide
gaacaagttgagttgcttaaacgtatacatgacaacctgataactaggtcagttgacgtt

SEQ ID NO: 525940 - DNA, 60 bp, Artificial
  Synthetic oligonucleotide
gaacacagtcacgtgcactggtggtagttacagcttcgcgttgcctgtaggtagtcatcc

SEQ ID NO: 525941 - DNA, 60 bp, Artificial
  Synthetic oligonucleotide
gaacagcacattgcacacgatacttgaagatccagggatggcgtattttccttatatagc

SEQ ID NO: 525942 - DNA, 60 bp, Artificial
  Synthetic oligonucleotide
gaacatgcaccaatagaattaatttatgcttgtagatcagcaaaagaatttgctatacta

SEQ ID NO: 525943 - DNA, 60 bp, Artificial
  Synthetic oligonucleotide
gaaccgtcaagtaaaataatacattgggagtaccagttgtataagagtgaatggaaggtt

SEQ ID NO: 525944 - DNA, 60 bp, Artificial
  Synthetic oligonucleotide
gaaccgtcagaagtgactgcatccatgtgagaggttgagttaccgtcgtctgtcttcgga

SEQ ID NO: 525945 - DNA, 60 bp, Artificial
  Synthetic oligonucleotide
gaaccgtcttacaaacgcgtgcccataatgcacttggcagcagacctggactgcatgaca

SEQ ID NO: 525946 - DNA, 60 bp, Artificial
  Synthetic oligonucleotide
gaacctaaacatcaagaaccgggagcgcctcatagcctttgcgtgcctgtggcggcgagc

SEQ ID NO: 525947 - DNA, 60 bp, Artificial; identical to SEQ ID NO: 391904
  Synthetic oligonucleotide

SEQ ID NO: 525948 - DNA, 60 bp, Artificial
  Synthetic oligonucleotide
gaacgaatgatgcgcgtaaactggaaaaaatggtggcaagtattctacactgtagttgat

SEQ ID NO: 525949 - DNA, 60 bp, Artificial
  Synthetic oligonucleotide
gaacgatccgatgatgatttacatcatctggagacggattgaaatcttcgcaaatgctca

SEQ ID NO: 525950 - DNA, 60 bp, Artificial; identical to SEQ ID NO: 391978
  Synthetic oligonucleotide

SEQ ID NO: 525951 - DNA, 60 bp, Artificial
  Synthetic oligonucleotide
cttccaccactgcaggcaagatcacttgcgacatgaaatccgtggttaactttgtcaacg

SEQ ID NO: 525952 - DNA, 60 bp, Artificial
  Synthetic oligonucleotide
cttcctaaaactgctatgcgatttaaagtaccattaagccagcagccacaaattcatatt

SEQ ID NO: 525953 - DNA, 60 bp, Artificial
  Synthetic oligonucleotide
cttcgaacactgaataagaggaatgagctcatagatgagtacgatctagaactctcagat

SEQ ID NO: 525954 - DNA, 60 bp, Artificial
  Synthetic oligonucleotide
cttcgtgtcgtttgctgccgcgccgcttaaggaactcggattacgcgcggatgagggagc

SEQ ID NO: 525955 - DNA, 60 bp, Artificial; identical to SEQ ID NO: 389337
  Synthetic oligonucleotide

SEQ ID NO: 525956 - DNA, 60 bp, Artificial
  Synthetic oligonucleotide
cttggacggaagtatcaacttcgatcgcagatatttctacaacagttgatacagtatcaa

SEQ ID NO: 525957 - DNA, 60 bp, Artificial
  Synthetic oligonucleotide
cttgggcctgacgctacccccttggatccacatgcaattgtggtccagaatcaccctcat

SEQ ID NO: 525958 - DNA, 60 bp, Artificial
  Synthetic oligonucleotide
cttgtacaatcagaaattgtaagaaattaggaccgagagaaaatgtagcgattgtacaag

SEQ ID NO: 525959 - DNA, 60 bp, Artificial
  Synthetic oligonucleotide
cttgtaccatcagaaattgtaaaaaattaggaccaagagaaaacgtagcaattatacaag

SEQ ID NO: 525960 - DNA, 60 bp, Artificial
  Synthetic oligonucleotide
cttgtccgattgaagtacaataaagagataacaaaagagtttgggaaggagttagaggag

SEQ ID NO: 525961 - DNA, 60 bp, Artificial
  Synthetic oligonucleotide
cttgtttgactacgttggtgcacccggtactgagataatacattggcgcatcactcatag

SEQ ID NO: 525962 - DNA, 60 bp, Artificial
  Synthetic oligonucleotide
ctttacatttcataaaccaaacattttcccatattctgcttcattcacactaaacagatc

SEQ ID NO: 525963 - DNA, 60 bp, Artificial
  Synthetic oligonucleotide
ctttaccgcaagacccattggacctgatgattgactgagaagccacagtcaatcatatcg

SEQ ID NO: 525964 - DNA, 60 bp, Artificial
  Synthetic oligonucleotide
ctttactattatcagcaaagtagcgaatcaaataaatggatctcaatgggaacggattgc

SEQ ID NO: 525965 - DNA, 60 bp, Artificial
  Synthetic oligonucleotide
ctttagatggatttgacataccacctgagctgatcagatagagtggtgcccccaggttac

SEQ ID NO: 525966 - DNA, 60 bp, Artificial
  Synthetic oligonucleotide
ctttcaactaccaacagtagagtgtgatatccctaatcagttaaccatgtaccagggggt

SEQ ID NO: 525967 - DNA, 60 bp, Artificial
  Synthetic oligonucleotide
ctttcactcctttatcgagggtattactactagttacttacggtctcctgcttgctggaa

SEQ ID NO: 525968 - DNA, 60 bp, Artificial
  Synthetic oligonucleotide
ctttcatctgatggcgtagaggcgacacaagagcgctgggaagagtggaaatttgaaact

SEQ ID NO: 525969 - DNA, 60 bp, Artificial
  Synthetic oligonucleotide
ctttctcatttacgaacaccaaaaatagaacctacgatggtcgctaccacgttagaacac

SEQ ID NO: 525970 - DNA, 60 bp, Artificial
  Synthetic oligonucleotide
ctttcttccaaagggattgaccagaagatgagagtacttaatgcttgttttagtgttaaa

SEQ ID NO: 525971 - DNA, 60 bp, Artificial
  Synthetic oligonucleotide
ctttgacctgtgactcggtttctctctgactccatgaccccacggcggactcggttactc

SEQ ID NO: 525972 - DNA, 60 bp, Artificial
  Synthetic oligonucleotide
ctttgctgagactgacgtgttttctcgctctcggttttcatcttatcgtgctgtcaggga

SEQ ID NO: 525973 - DNA, 60 bp, Artificial
  Synthetic oligonucleotide
ctttgcttgactatctactctctaatccttcgttgtgtcctgatggtttagatcgttcca

SEQ ID NO: 525974 - DNA, 60 bp, Artificial
  Synthetic oligonucleotide
ctttggcctatcacattattctcgcgctacgacgccaatccttggcaaaatgcctgccgt

SEQ ID NO: 525975 - DNA, 60 bp, Artificial
  Synthetic oligonucleotide
cttttctgtttcgtgtgctatggatacgcgccacgtgcggatgggacaatacctgattgg

SEQ ID NO: 525976 - DNA, 60 bp, Artificial
  Synthetic oligonucleotide
cttttgatccggataacaggaagctggtgctcctggttatgcagtccaaaataccgttcg

SEQ ID NO: 525977 - DNA, 60 bp, Artificial
  Synthetic oligonucleotide
cttttgtctctaaggacatgagcttaatcatattgccggtcggcgtttaggcgcttgtga

SEQ ID NO: 525978 - DNA, 60 bp, Artificial
  Synthetic oligonucleotide
gaaaaaagattcgagtcactaaaactaagagttactgagaaatacaatacttgggtacaa

SEQ ID NO: 525979 - DNA, 60 bp, Artificial
  Synthetic oligonucleotide
gaaaaaatggtggcaagtattttatactatagtcgattatgttaatcaaattgtacaagt

SEQ ID NO: 525980 - DNA, 60 bp, Artificial
  Synthetic oligonucleotide
tgatgcgtattaattggaaaaaatggtggcaagtattttacactgtagttgattacgtaa

SEQ ID NO: 525981 - DNA, 60 bp, Artificial
  Synthetic oligonucleotide
tgatgctaatgacgctagactgctggtgtttccaattcgtgtgtaatgggtgagtgagct

SEQ ID NO: 525982 - DNA, 60 bp, Artificial
  Synthetic oligonucleotide
tgatggccttgtacaaggaagcgtacactctatattaactggtgaatcgtacggcgagtc

SEQ ID NO: 525983 - DNA, 60 bp, Artificial
  Synthetic oligonucleotide
tgatgtactcaagaacgtgaagcatcttcaaaggttgcaggcgatcacggagagtgagga

SEQ ID NO: 525984 - DNA, 60 bp, Artificial
  Synthetic oligonucleotide
tgatgtccgaacctcagagatagtaggctgcagtacagtcactcaagtgatgattggaga

SEQ ID NO: 525985 - DNA, 60 bp, Artificial
  Synthetic oligonucleotide
tgatgtggatacaggagcagcgcgagacgctaaatctccgggggagaagacgacgtgcga

SEQ ID NO: 525986 - DNA, 60 bp, Artificial
  Synthetic oligonucleotide
tgatgttcgacgcatggatgctccaatgggacatagaccaggcgatcatcgatctgtaga

SEQ ID NO: 525987 - DNA, 60 bp, Artificial
  Synthetic oligonucleotide
tgatgttgtctgccgcgggaattaatctcggtcctatatcgcctgattatcaacagcata

SEQ ID NO: 525988 - DNA, 60 bp, Artificial
  Synthetic oligonucleotide
tgattcgatctaaaacggtgcacccaatttacttaggatctatgcactatgatataacat

SEQ ID NO: 525989 - DNA, 60 bp, Artificial
  Synthetic oligonucleotide
tgattttggagtggtcagcacaggggcgtgagcaaaagctgtacgatctaaccagatcaa

SEQ ID NO: 525990 - DNA, 60 bp, Artificial
  Synthetic oligonucleotide
tgcaaagcgcctcgtacattacatccgattatgttgaacgattaagcaaagtgagaaaat

SEQ ID NO: 525991 - DNA, 60 bp, Artificial
  Synthetic oligonucleotide
tgcaaagcgcttcgtatattacatccgattacgttgagcgactaagtaaagtgagaaaat

SEQ ID NO: 525992 - DNA, 60 bp, Artificial
  Synthetic oligonucleotide
tgcaaatgaagatgatgttcgacgcctggatgctacagtgggacatcgaccaagcgataa

SEQ ID NO: 525993 - DNA, 60 bp, Artificial
  Synthetic oligonucleotide
tgcaacctgaaagaccaggtgtgattatgaccggaacagataatgtaaacgtatggatgg

SEQ ID NO: 525994 - DNA, 60 bp, Artificial
  Synthetic oligonucleotide
tgcacgcgatgatgaatgacgtatcaccagaggatctagaccgtgtgcgtactgagggag

SEQ ID NO: 525995 - DNA, 60 bp, Artificial
  Synthetic oligonucleotide
tgcagaaataaagtactgcaaggggatgggaatcgtccaaccatatatgaaaaatgattt

SEQ ID NO: 525996 - DNA, 60 bp, Artificial
  Synthetic oligonucleotide
tgcagagataaagtactgtaaggggatgggaatcgtccaaccgtatatgaggaatgattt

SEQ ID NO: 525997 - DNA, 60 bp, Artificial; identical to SEQ ID NO: 468379
  Synthetic oligonucleotide

SEQ ID NO: 525998 - DNA, 60 bp, Artificial
  Synthetic oligonucleotide
tgcatagcgcgctcctgaaagagagtagggcccgcgcgctcctagcccccgcctacgagg

SEQ ID NO: 525999 - DNA, 60 bp, Artificial
  Synthetic oligonucleotide
tgcatatattgcgtggacctctacacttccaacgtcgcgcaatattaggagcgctgaagt

SEQ ID NO: 526000 - DNA, 60 bp, Artificial
  Synthetic oligonucleotide
tgcatcggagttagcagatcttatattaaacgaatggctgtgcaatcctatggatatatc

SEQ ID NO: 526001 - DNA, 60 bp, Artificial
  Synthetic oligonucleotide
tgcattacttatgctagagtgctcgtatcccgatgtgcgtatattagatgggaatggagc

SEQ ID NO: 526002 - DNA, 60 bp, Artificial
  Synthetic oligonucleotide
tgccaattcagaactggatatgtcagaattagccgatttgatacttaatgaatggctttg

SEQ ID NO: 526003 - DNA, 60 bp, Artificial
  Synthetic oligonucleotide
tgccagtacgttgacaagtgatttaggcgtaattttgaaacataacacaacaacggaggc

SEQ ID NO: 526004 - DNA, 60 bp, Artificial
  Synthetic oligonucleotide
tgccatgactatttcatatccacgcagcttcacgtgaggatcagaccaccccacggcact

SEQ ID NO: 526005 - DNA, 60 bp, Artificial
  Synthetic oligonucleotide
tgccattagttaagaaggagtatgataagcacgagaataagtttcatattgagatcccca

SEQ ID NO: 526006 - DNA, 60 bp, Artificial
  Synthetic oligonucleotide
tgcccaccgtgcatgatagagatatttccggtactttaggagaaataacaggatctttag

SEQ ID NO: 526007 - DNA, 60 bp, Artificial
  Synthetic oligonucleotide
tgccgtcgtctgtcttcggaagcgacggaacccttcaccgcaagatccattggacctgat

SEQ ID NO: 526008 - DNA, 60 bp, Artificial
  Synthetic oligonucleotide
tgccgttttaagagcgctcagttcactcgctgttcataccgagctgtacgctccttcata

SEQ ID NO: 526009 - DNA, 60 bp, Artificial
  Synthetic oligonucleotide
tgcgatactacgtgtagtgacctttatgagcgggtgcgtaacgatggctacctcgatggt

SEQ ID NO: 526010 - DNA, 60 bp, Artificial
  Synthetic oligonucleotide
tgacgtgaaagttccgcacttaactttcggagtattgtttatctcagataatatgattcc

SEQ ID NO: 526011 - DNA, 60 bp, Artificial
  Synthetic oligonucleotide
tgacgtggtcacatatggggcacggaccatttctatagggttgtcggcaggtggaacgcc

SEQ ID NO: 526012 - DNA, 60 bp, Artificial
  Synthetic oligonucleotide
tgactaaggcgatagagcatggttcaatgtctattccttatcagcatgtcaatgtgccga

SEQ ID NO: 526013 - DNA, 60 bp, Artificial; identical to SEQ ID NO: 466594
  Synthetic oligonucleotide

SEQ ID NO: 526014 - DNA, 60 bp, Artificial
  Synthetic oligonucleotide
tgagaaaatacaacattagtggagattatgctaatgccacgagaacttttttggctatat

SEQ ID NO: 526015 - DNA, 60 bp, Artificial
  Synthetic oligonucleotide
tgagaagcgtgatgaaacaatacgcgcaagggaaacatcagtaatgctagtgtcaaattc

SEQ ID NO: 526016 - DNA, 60 bp, Artificial
  Synthetic oligonucleotide
tgagacaaatgttgtttttccgaggaacctggatgtcctaattagggcatatgatcataa

SEQ ID NO: 526017 - DNA, 60 bp, Artificial
  Synthetic oligonucleotide
tgagaggttagtgatcactgacgttgtagatggagtcaatcataaattgaacgtgacgac

SEQ ID NO: 526018 - DNA, 60 bp, Artificial
  Synthetic oligonucleotide
tgagatgttttatatgtgtttagatatgatattggctgcagcaaatttgaatgtgggaaa

SEQ ID NO: 526019 - DNA, 60 bp, Artificial
  Synthetic oligonucleotide
tgagattgctagagcgggttggaaaatgatcgatgcttcatcgcgaagtcgcactcttcc

SEQ ID NO: 526020 - DNA, 60 bp, Artificial
  Synthetic oligonucleotide
tgagcaacttgaaaatctgtttttccccttccgacattccaagtttgacttctcttcaca

SEQ ID NO: 526021 - DNA, 60 bp, Artificial
  Synthetic oligonucleotide
tgagcctaatcatattgccggtcggtgtctaggcgcttgtgaccgcgtgtttaggggggg

SEQ ID NO: 526022 - DNA, 60 bp, Artificial
  Synthetic oligonucleotide
tgaggctgcaacagaaataaatgataactcgtggaaagatactctctctcagttgttttt

SEQ ID NO: 526023 - DNA, 60 bp, Artificial
  Synthetic oligonucleotide
tgaggggcgcgctgatagcatcagagtgtcaacttggagatgtatatcacaccttacgtc

SEQ ID NO: 526024 - DNA, 60 bp, Artificial; identical to SEQ ID NO: 467131
  Synthetic oligonucleotide

SEQ ID NO: 526025 - DNA, 60 bp, Artificial
  Synthetic oligonucleotide
tgagtcagtacttgctgatgccagtgagacaatgttagctaacgtaacgtctgttagaca

SEQ ID NO: 526026 - DNA, 60 bp, Artificial
  Synthetic oligonucleotide
tgagtgaaggtagactactaacattcgctcatgccgacagtgagttgctaaatgcgaact

SEQ ID NO: 526027 - DNA, 60 bp, Artificial
  Synthetic oligonucleotide
tgagtgagctgatgtggtcgccaggacacgtgccggtgtcttggtggtgggtggcgccta

SEQ ID NO: 526028 - DNA, 60 bp, Artificial
  Synthetic oligonucleotide
tgataagtatgtagctatgctaagctgcttgaactctgcaagtaagaatacgttcacgta

SEQ ID NO: 526029 - DNA, 60 bp, Artificial
  Synthetic oligonucleotide
tgataccaattcaccatacctcgcaaaaccaacatatctcatgggaacagtatttagcca

SEQ ID NO: 526030 - DNA, 60 bp, Artificial
  Synthetic oligonucleotide
tgataggagagaacttcctgagttacccggggtccagagatcaaaatacgatatcagaga

SEQ ID NO: 526031 - DNA, 60 bp, Artificial
  Synthetic oligonucleotide
tgataggtgggggtgagaagcgtgatgaaacaatacgcgcaagggaaacatcagtaatgc

SEQ ID NO: 526032 - DNA, 60 bp, Artificial
  Synthetic oligonucleotide
tgatagttaccaagaaattgaagtggcagaatgtaccactttactgttttgatgaatcta

SEQ ID NO: 526033 - DNA, 60 bp, Artificial
  Synthetic oligonucleotide
tgatcaaatactgtatagtcacaattgtcaatactcttttaaaattggcaggatataaag

SEQ ID NO: 526034 - DNA, 60 bp, Artificial
  Synthetic oligonucleotide
tgatcctaattattttataggaattaagcttgacaacataccgtatgaatatgatgtgaa

SEQ ID NO: 526035 - DNA, 60 bp, Artificial; identical to SEQ ID NO: 467575
  Synthetic oligonucleotide

SEQ ID NO: 526036 - DNA, 60 bp, Artificial
  Synthetic oligonucleotide
tgatgatgtgagactaaggcagatcaaacgtcatgttaatgaacagatcctcccaaagtt

SEQ ID NO: 526037 - DNA, 60 bp, Artificial
  Synthetic oligonucleotide
tgatgattatcaaacgccaattatgaattcagtaacagttagacaggacttagagcgaca

SEQ ID NO: 526038 - DNA, 60 bp, Artificial
  Synthetic oligonucleotide
tgatgcgagtgaattggaagaaatggtggcaagtgttttatacaatagttgactacgtga

SEQ ID NO: 526039 - DNA, 60 bp, Artificial
  Synthetic oligonucleotide
tgatgcggtgaggatgagcttcacagagttctcgtcagtcccgctagatggtttcgaact

SEQ ID NO: 526040 - DNA, 60 bp, Artificial; identical to SEQ ID NO: 470553
  Synthetic oligonucleotide

SEQ ID NO: 526041 - DNA, 60 bp, Artificial
  Synthetic oligonucleotide
tggaattagcgagagcgttacagtgtgagtcggagtcgagaagtgacgaggagaccaaga

SEQ ID NO: 526042 - DNA, 60 bp, Artificial
  Synthetic oligonucleotide
tggacccagctattttaacgtcattatcttcaaatcttaacgcagttatgttttggctag

SEQ ID NO: 526043 - DNA, 60 bp, Artificial
  Synthetic oligonucleotide
tggacccgtcaaccctaattagtcttggcaccgttattaagtccattcagagcgattgtg

SEQ ID NO: 526044 - DNA, 60 bp, Artificial
  Synthetic oligonucleotide
tggactacgagcggcaatcttaaataggactacattaccaaacaatataccaccaattta

SEQ ID NO: 526045 - DNA, 60 bp, Artificial
  Synthetic oligonucleotide
tggacttatccgttagagagacgaggatacgacgcgcgacatgagattgctagagcgggt

SEQ ID NO: 526046 - DNA, 60 bp, Artificial
  Synthetic oligonucleotide
tggagacgatcgcaaggctatgaaatcggtggagaatccagcgggcggtgattctgtggc

SEQ ID NO: 526047 - DNA, 60 bp, Artificial
  Synthetic oligonucleotide
tggagcaacaaacaacactggcggaggataccacgcacttgtaggaagagccactggaaa

SEQ ID NO: 526048 - DNA, 60 bp, Artificial; identical to SEQ ID NO: 470873
  Synthetic oligonucleotide

SEQ ID NO: 526049 - DNA, 60 bp, Artificial
  Synthetic oligonucleotide
tggagtttccctgctgggagaagtgaatattcccgaatttctgcgctacgcgtgaaggcg

SEQ ID NO: 526050 - DNA, 60 bp, Artificial
  Synthetic oligonucleotide
tggatacgcgggagcttcaatcgtgcacatattaaatcgctcgaattatgcagactatta

SEQ ID NO: 526051 - DNA, 60 bp, Artificial
  Synthetic oligonucleotide
tggatatatcactttactattatcaacaaaatagcgaatcaaataaatggatatcaatgg

SEQ ID NO: 526052 - DNA, 60 bp, Artificial
  Synthetic oligonucleotide
tggatcagacatgattcaggtgtccttaaatgcaggagcccgaggagacatacaacagat

SEQ ID NO: 526053 - DNA, 60 bp, Artificial
  Synthetic oligonucleotide
tggatccgtatatttcaatgaatacagtgacatagcatcattctcaataaatccacagtt

SEQ ID NO: 526054 - DNA, 60 bp, Artificial
  Synthetic oligonucleotide
tggatcgatcctaacttgtttggaattcgggggcaacataatcagataaaacgggaagta

SEQ ID NO: 526055 - DNA, 60 bp, Artificial
  Synthetic oligonucleotide
tggatctactccccgatgtttaacgcgcggttgcgaataactcatggagagatcgcgacc

SEQ ID NO: 526056 - DNA, 60 bp, Artificial
  Synthetic oligonucleotide
tggatgattcgctgtcagcaatcccatacatctatataccaattagggaaggccaaattg

SEQ ID NO: 526057 - DNA, 60 bp, Artificial
  Synthetic oligonucleotide
tggattcgaattagataaggtacagatgatgataccattcagcgagagagtgtttcggat

SEQ ID NO: 526058 - DNA, 60 bp, Artificial
  Synthetic oligonucleotide
tggcacgctttgcgtacggcgatcttgaatcgaacggcgttgcctggaattatgccgccc

SEQ ID NO: 526059 - DNA, 60 bp, Artificial
  Synthetic oligonucleotide
tggcagaatgtaccactttactgttttgatgaatctactaaaaggtatgaactgcaatgt

SEQ ID NO: 526060 - DNA, 60 bp, Artificial
  Synthetic oligonucleotide
tggcagcgatctcgcgttgattgacacacacctatcaggcgagaattcaactttaatagc

SEQ ID NO: 526061 - DNA, 60 bp, Artificial
  Synthetic oligonucleotide
tggcataggcgagaggatctgatcgcggcactgaatgtatttcgtaccatggcaaacgag

SEQ ID NO: 526062 - DNA, 60 bp, Artificial
  Synthetic oligonucleotide
tggccagtgatgaaaggaggagcggtaacattgcgcacagcgggagtgacattatctaca

SEQ ID NO: 526063 - DNA, 60 bp, Artificial
  Synthetic oligonucleotide
tggcgaaaaatgagaaggtgattaatcagcaaatcgaccacacgaaaaaagagataatga

SEQ ID NO: 526064 - DNA, 60 bp, Artificial
  Synthetic oligonucleotide
tggcgagaccagctgttcaggcagccttgagcgatccacaggtgatgaatctcgttgagg

SEQ ID NO: 526065 - DNA, 60 bp, Artificial
  Synthetic oligonucleotide
tggcgccgtgctaacgtccctgcagaagactaccaagttcactgttgtgaagtgtggttg

SEQ ID NO: 526066 - DNA, 60 bp, Artificial
  Synthetic oligonucleotide
tggcgtgtctatggattcatcaacgcaatcacgaccttcaagcaacgttgggtgcgatca

SEQ ID NO: 526067 - DNA, 60 bp, Artificial
  Synthetic oligonucleotide
tggcgttgtgaatcaatctaacactattaacggcttctactttgcttccaagacgcgggg

SEQ ID NO: 526068 - DNA, 60 bp, Artificial
  Synthetic oligonucleotide
tggctgaccaaaagcagtcgggattgatactatgtactaaagatgaagtgttggctgagc

SEQ ID NO: 526069 - DNA, 60 bp, Artificial
  Synthetic oligonucleotide
tggcttacctgctagagtgtctacgttggaatctctaaagattgatactatcttgcctcc

SEQ ID NO: 526070 - DNA, 60 bp, Artificial
  Synthetic oligonucleotide
tgggaacggactgtacggtaaaagtttgtccactcaatacacaaactttaggaattggat

SEQ ID NO: 526071 - DNA, 60 bp, Artificial
  Synthetic oligonucleotide
tgcgatgaccgagtcagcgcgggttacaggtgtgataagctacgatcgaggtttccgctc

SEQ ID NO: 526072 - DNA, 60 bp, Artificial; identical to SEQ ID NO: 469400
  Synthetic oligonucleotide

SEQ ID NO: 526073 - DNA, 60 bp, Artificial
  Synthetic oligonucleotide
tgcgctaagtgcccggagcttagggaacaaatcacgaggctatcttctcaacccgtctcc

SEQ ID NO: 526074 - DNA, 60 bp, Artificial
  Synthetic oligonucleotide
tgcgctgaagacatcaaaatgctcgtataaggtggtgaagtactgcattgtgacaatttt

SEQ ID NO: 526075 - DNA, 60 bp, Artificial
  Synthetic oligonucleotide
tgcggaggaggtacattatgtaggatgcggcgatttacgcaccttgatgctgtttaagaa

SEQ ID NO: 526076 - DNA, 60 bp, Artificial
  Synthetic oligonucleotide
tgcggcctcggggaagactgcgaggacaatatgttcgcatgtgcggtcctggtgcgccga

SEQ ID NO: 526077 - DNA, 60 bp, Artificial
  Synthetic oligonucleotide
tgcggggtgatcgcgaaacaaagttcacagccgtattgtcaaataaaaattggaagagta

SEQ ID NO: 526078 - DNA, 60 bp, Artificial
  Synthetic oligonucleotide
tgcggtaaagtggttagagcagtaaatggagtgtattataccattaaaattgggagaact

SEQ ID NO: 526079 - DNA, 60 bp, Artificial
  Synthetic oligonucleotide
tgcgtacaacgaagcagtgaggatgagtataacggagctcagtgaagtgcctttagatgg

SEQ ID NO: 526080 - DNA, 60 bp, Artificial
  Synthetic oligonucleotide
tgcgtaggggcgtctctagctcaaacgaacgtagcgctgatcgaacacccacaccgccca

SEQ ID NO: 526081 - DNA, 60 bp, Artificial
  Synthetic oligonucleotide
tgcgtggaaacgcgcaacggattgtttatgatgatgaattacagatgcatattttacgtg

SEQ ID NO: 526082 - DNA, 60 bp, Artificial
  Synthetic oligonucleotide
tgcgttaagtgggattgatttatcacacatgaggaccccaaaaatcgagcctactatcat

SEQ ID NO: 526083 - DNA, 60 bp, Artificial
  Synthetic oligonucleotide
tgcgttttaagatcccaatgtcacagcaaccacagatacatatttatgctgcaccttggg

SEQ ID NO: 526084 - DNA, 60 bp, Artificial
  Synthetic oligonucleotide
tgctaattcagaattagacatgtcagagttagctgacttaatacttaatgagtggctttg

SEQ ID NO: 526085 - DNA, 60 bp, Artificial
  Synthetic oligonucleotide
tgctaatttgctgaccgtcactctgcaaagatggggaacgcttcctctatcgttcagacg

SEQ ID NO: 526086 - DNA, 60 bp, Artificial
  Synthetic oligonucleotide
tgctacgtcctgggagagttggaggtgtattgtttcaagttgcgctcagtcgttgctata

SEQ ID NO: 526087 - DNA, 60 bp, Artificial
  Synthetic oligonucleotide
tgctactgtgattcaacctgtcctgcaggatatatcagtgttgctccagcgcatatcacc

SEQ ID NO: 526088 - DNA, 60 bp, Artificial
  Synthetic oligonucleotide
tgctatctgatgggttgactgatagaaggacgcattgccaatacttgatcaatccctcaa

SEQ ID NO: 526089 - DNA, 60 bp, Artificial
  Synthetic oligonucleotide
tgctatggtattatatactgacgtgtctcaatgggattcgtctcagcataacactcagcc

SEQ ID NO: 526090 - DNA, 60 bp, Artificial
  Synthetic oligonucleotide
tgctcggatgagtggggagacagggacttgggggccggaccgacaacctttcggctattt

SEQ ID NO: 526091 - DNA, 60 bp, Artificial
  Synthetic oligonucleotide
tgctcgtcttttggctctggcagaggaggcgggacgccacaaggaaaccagtgactggcg

SEQ ID NO: 526092 - DNA, 60 bp, Artificial
  Synthetic oligonucleotide
tgctgaacacactcgcctgtagctatttagctgtgtatggcacattagctatgcaagaac

SEQ ID NO: 526093 - DNA, 60 bp, Artificial
  Synthetic oligonucleotide
tgctgacatattagaggcagcgtcggaagaagttccctttttcggagcgggtatggcgac

SEQ ID NO: 526094 - DNA, 60 bp, Artificial
  Synthetic oligonucleotide
tgctgcagtattgaagactaaaattgatcgatccactcaaatatctccaaacacattacc

SEQ ID NO: 526095 - DNA, 60 bp, Artificial
  Synthetic oligonucleotide
tgctgcttttggaattatcaatctggctgctaccatgataatgatgttcatggcgaaaaa

SEQ ID NO: 526096 - DNA, 60 bp, Artificial
  Synthetic oligonucleotide
tgctgtagaacggaagttagttaattatgctaaaggtaaaccattagaagcagatttgac

SEQ ID NO: 526097 - DNA, 60 bp, Artificial
  Synthetic oligonucleotide
tgctgtgtaccactatgttgttagcggctggaaaaatatcagataaaatacaggaggaga

SEQ ID NO: 526098 - DNA, 60 bp, Artificial
  Synthetic oligonucleotide
tgcttcgtatgcggaggcgttcagagacgatttaagattgcgtcaaattaagaagcatgt

SEQ ID NO: 526099 - DNA, 60 bp, Artificial
  Synthetic oligonucleotide
tgctttgcgttcgaagtttatatcaattcaattctaccgtggagcgaacttgatccagag

SEQ ID NO: 526100 - DNA, 60 bp, Artificial
  Synthetic oligonucleotide
tggaaattgacgtatttagaacacaaattaatgccaattttggaccaaaatttcattgag

SEQ ID NO: 526101 - DNA, 60 bp, Artificial
  Synthetic oligonucleotide
tggaagggtgttatggcatcaagctccgcagacatcgggtacatctcaggaggatccgcc

SEQ ID NO: 526102 - DNA, 60 bp, Artificial
  Synthetic oligonucleotide
tcgacactatgtttatattacccaacggaagctagaacagaaataaatgataatgagtgg

SEQ ID NO: 526103 - DNA, 60 bp, Artificial
  Synthetic oligonucleotide
tcgacattatgcttgtattatccagtagaagcagagacagaaatagcagatagttcatgg

SEQ ID NO: 526104 - DNA, 60 bp, Artificial
  Synthetic oligonucleotide
tcgacggaaataccgcagtggtttaagagtctaaaccccatgcttggagtagtgaatcta

SEQ ID NO: 526105 - DNA, 60 bp, Artificial
  Synthetic oligonucleotide
tcgactggtcgcgattccgcgcaactatcggagtagacacaactctcgtggagctgggta

SEQ ID NO: 526106 - DNA, 60 bp, Artificial
  Synthetic oligonucleotide
tcgagaaccatgatgcatagcgcgcttctaaaagagtcaagtgcaagaactctcctctcg

SEQ ID NO: 526107 - DNA, 60 bp, Artificial; identical to SEQ ID NO: 461179
  Synthetic oligonucleotide

SEQ ID NO: 526108 - DNA, 60 bp, Artificial
  Synthetic oligonucleotide
tcgagagctgaggtgatagaatggaaggatgagatggcggagagaccgtggcatgtccga

SEQ ID NO: 526109 - DNA, 60 bp, Artificial
  Synthetic oligonucleotide
tcgaggcggttgacatgtacccgcgcgcgtgtaagattagattcggtacgaaggagaatg

SEQ ID NO: 526110 - DNA, 60 bp, Artificial
  Synthetic oligonucleotide
tcgatcagctggtgatcagagcatggattcatctcgatgcatcaatgaactatattgcga

SEQ ID NO: 526111 - DNA, 60 bp, Artificial
  Synthetic oligonucleotide
tcgatcattcaagatccaggaatggcgtattttccatacattgcatctgttctgactgtt

SEQ ID NO: 526112 - DNA, 60 bp, Artificial
  Synthetic oligonucleotide
tcgatgatgcgtcaattgtacagtactcccgtgactgatgtgtcgcttgcactaccatgg

SEQ ID NO: 526113 - DNA, 60 bp, Artificial
  Synthetic oligonucleotide
tcgatttgattcaccctttcatcaaggtaatagagatttgtcaaatctggaggactttcg

SEQ ID NO: 526114 - DNA, 60 bp, Artificial
  Synthetic oligonucleotide
tcgcaacgggacgagcaatagagggggcgtataaattaaagaaggtcatcaatgcactca

SEQ ID NO: 526115 - DNA, 60 bp, Artificial
  Synthetic oligonucleotide
tcgcatcgtacgcagaagcgtttcgtgatgacgtaagactaagacagattaaacgccatg

SEQ ID NO: 526116 - DNA, 60 bp, Artificial
  Synthetic oligonucleotide
tcgccaatcctgataagtttcaattcttctcatcggcgtctggaacgttagtaatgaacg

SEQ ID NO: 526117 - DNA, 60 bp, Artificial
  Synthetic oligonucleotide
tcgcctagaagtgtcgggtttcaggtcgacgtcagcttatacgccgaactctcagatgta

SEQ ID NO: 526118 - DNA, 60 bp, Artificial
  Synthetic oligonucleotide
tcgcgccccttgacattgtaacgcgtactgaacctatccgaagtgataagacggttgacc

SEQ ID NO: 526119 - DNA, 60 bp, Artificial
  Synthetic oligonucleotide
tcgcgctggatatactcgacaaagcaatgtcaaatcaaacgggcgcgactatggctcaaa

SEQ ID NO: 526120 - DNA, 60 bp, Artificial
  Synthetic oligonucleotide
tcgctcgtaagcttgtacatccagcgcccacccgtagaacgcgtgagctacgataccgcc

SEQ ID NO: 526121 - DNA, 60 bp, Artificial
  Synthetic oligonucleotide
tcgcttttaagccagttaaaaatccagaacctaagggttatgtcttgaatgtcccggggc

SEQ ID NO: 526122 - DNA, 60 bp, Artificial
  Synthetic oligonucleotide
tcggagaggggtgtgattttcgcctcgaagagtcaccggacaaatgaggagcgcttctac

SEQ ID NO: 526123 - DNA, 60 bp, Artificial
  Synthetic oligonucleotide
tcggagcaatatgttggtgatgacacgttattctatgctaagctacataccacggatacg

SEQ ID NO: 526124 - DNA, 60 bp, Artificial
  Synthetic oligonucleotide
tcggagtgagatctcgaccctctgggtgggggatccccttctttcgtacgacgattacag

SEQ ID NO: 526125 - DNA, 60 bp, Artificial
  Synthetic oligonucleotide
tcggatgatgtattctttttccactgcgtgtcgcatttccatgcaaacgagtcgttcttc

SEQ ID NO: 526126 - DNA, 60 bp, Artificial
  Synthetic oligonucleotide
tcggctaatgagattgcgagaatgagtggagaaacgggaacgtggggtccggaccgacag

SEQ ID NO: 526127 - DNA, 60 bp, Artificial
  Synthetic oligonucleotide
tcggggaataatcttgctatccggttgcccgggaatacgggactgaatatccaaaatggt

SEQ ID NO: 526128 - DNA, 60 bp, Artificial
  Synthetic oligonucleotide
tcgtcttgtactataaaagtatgtccactgaatgcgcagacgttaggaatcgggtgtctg

SEQ ID NO: 526129 - DNA, 60 bp, Artificial
  Synthetic oligonucleotide
tcgtgtgttgaaatatgaagttttgcggatctatccaatcagtaattataatcatgaacg

SEQ ID NO: 526130 - DNA, 60 bp, Artificial
  Synthetic oligonucleotide
tcgttatcccttagagttagacgcttctaataatcgcgtccagatggctgaacgttttgg

SEQ ID NO: 526131 - DNA, 60 bp, Artificial
  Synthetic oligonucleotide
tcattaagatcaccgtatacaaacgcaaacttctttcaagactagagtgcttagatgtga

SEQ ID NO: 526132 - DNA, 60 bp, Artificial
  Synthetic oligonucleotide
tccaaaggcacgaacctaatcattttaccggtagcgtctaatccacgctgatgtagccgc

SEQ ID NO: 526133 - DNA, 60 bp, Artificial
  Synthetic oligonucleotide
tccaacggcgtgtgattatggcggcgctgaaatatggagtcaagatcatgtcgagggcgg

SEQ ID NO: 526134 - DNA, 60 bp, Artificial; identical to SEQ ID NO: 124352
  Synthetic oligonucleotide

SEQ ID NO: 526135 - DNA, 60 bp, Artificial
  Synthetic oligonucleotide
tccaagtgccaattaggcgctagtgcgggaacgctagcgcggaggggggaaaataagata

SEQ ID NO: 526136 - DNA, 60 bp, Artificial
  Synthetic oligonucleotide
tccaattatgatatacgcgaacttcgacaaaagattaagaatgagcgtgagatggcaccg

SEQ ID NO: 526137 - DNA, 60 bp, Artificial
  Synthetic oligonucleotide
tccacaactgtattgtgactataatatagttttgatgcgctataattcaagcttggaact

SEQ ID NO: 526138 - DNA, 60 bp, Artificial; identical to SEQ ID NO: 458844
  Synthetic oligonucleotide

SEQ ID NO: 526139 - DNA, 60 bp, Artificial
  Synthetic oligonucleotide
tccaccttgcccgcgtaagctcgccggaaagctatcacatagtcgtcacccacattacgg

SEQ ID NO: 526140 - DNA, 60 bp, Artificial
  Synthetic oligonucleotide
tccagcagttgcagcactctttcccaatgcaccaccatttgaacaccatgctacagtagg

SEQ ID NO: 526141 - DNA, 60 bp, Artificial
  Synthetic oligonucleotide
tccagcgatgcaaattcccactgctgtataacgggggagggtgcgcggcgctatacactt

SEQ ID NO: 526142 - DNA, 60 bp, Artificial
  Synthetic oligonucleotide
tccaggtgagaggatggatccagcggtgagaatggtcgccggagttgttggtcacttact

SEQ ID NO: 526143 - DNA, 60 bp, Artificial
  Synthetic oligonucleotide
tccagtattggctgctctaggggctatcatcgctaagatcggtgagagattttctaggct

SEQ ID NO: 526144 - DNA, 60 bp, Artificial
  Synthetic oligonucleotide
tccagtgtataaacctggagcaaatggtacgtttattaatctggaaaagtcgctacagaa

SEQ ID NO: 526145 - DNA, 60 bp, Artificial
  Synthetic oligonucleotide
tccatagctaacttagccctgatcaaaacagttttgtcacgtatagcgaataaatattcg

SEQ ID NO: 526146 - DNA, 60 bp, Artificial
  Synthetic oligonucleotide
tccatgtcgcttgggatacttaaccaagccatgtcaagtacaactggtgcgagtggggcg

SEQ ID NO: 526147 - DNA, 60 bp, Artificial
  Synthetic oligonucleotide
tccattgcatcaaatgatgttgatgagacgcgatttccccacgcgcgatcgcagtatcgt

SEQ ID NO: 526148 - DNA, 60 bp, Artificial
  Synthetic oligonucleotide
tcccagaagtgagagagctagtttcggctttttgagaagaacagccatggtgagatttga

SEQ ID NO: 526149 - DNA, 60 bp, Artificial; identical to SEQ ID NO: 459457
  Synthetic oligonucleotide

SEQ ID NO: 526150 - DNA, 60 bp, Artificial
  Synthetic oligonucleotide
tccccacagacccaacacaccctagtcctcactaggtgggtgcccccctggggtaggaga

SEQ ID NO: 526151 - DNA, 60 bp, Artificial
  Synthetic oligonucleotide
tcccggttaataggaattttattacattacgcttttcgaagaagaatcgacgagtgcttg

SEQ ID NO: 526152 - DNA, 60 bp, Artificial
  Synthetic oligonucleotide
tccctgtaggcataattgaacgtaattcaaatgttacgccagcggtcattaggagatacc

SEQ ID NO: 526153 - DNA, 60 bp, Artificial
  Synthetic oligonucleotide
tccgattaatagggccgtcgcacaaaacgcttatgtgtgagggtggttacggcacggcgt

SEQ ID NO: 526154 - DNA, 60 bp, Artificial
  Synthetic oligonucleotide
tccgccttaactccactgaccgctccaggcattgtttcaacccctgaggcaccctacccg

SEQ ID NO: 526155 - DNA, 60 bp, Artificial
  Synthetic oligonucleotide
tccgctccactaaagaaggccacgaaattgtcctttttggagtgtaggtggtaagcacct

SEQ ID NO: 526156 - DNA, 60 bp, Artificial
  Synthetic oligonucleotide
tccggcaacgtttttagcaaatcacatactaatcgaatgtttagaaaaaagctcgaacaa

SEQ ID NO: 526157 - DNA, 60 bp, Artificial
  Synthetic oligonucleotide
tccgtatgaaccaaaggaagtgactgcaacaatgtaagaggttgagctaccgtcgactgt

SEQ ID NO: 526158 - DNA, 60 bp, Artificial
  Synthetic oligonucleotide
tccgtcgttgattccagtggcgttacgtcctcaatgcctatttccggtttccaggtcatg

SEQ ID NO: 526159 - DNA, 60 bp, Artificial
  Synthetic oligonucleotide
tcctatacgactcctacatgctatcagacacgcgggacccgggacgtaccgatcaaagcc

SEQ ID NO: 526160 - DNA, 60 bp, Artificial
  Synthetic oligonucleotide
tcctgactaaagggtggccaactggatcagtctactttaaagaatataccgatatcgctt

SEQ ID NO: 526161 - DNA, 60 bp, Artificial
  Synthetic oligonucleotide
tccttaatgaggatacagaatccgagagttcatcaggttaatgacgagttaaaacgaatg

SEQ ID NO: 526162 - DNA, 60 bp, Artificial
  Synthetic oligonucleotide
tcgaaatgttatttaattatctagaaccagtggacataaatggaacggagtatgtattat

SEQ ID NO: 526163 - DNA, 60 bp, Artificial
  Synthetic oligonucleotide
tcttgtggcgtacaagtttgtcttgccgtacatgttagatttggtggatgggcgtcctca

SEQ ID NO: 526164 - DNA, 60 bp, Artificial
  Synthetic oligonucleotide
tctttaccaggaataacaactttggatgttggagttagagatttgcgtttaaagatgaag

SEQ ID NO: 526165 - DNA, 60 bp, Artificial
  Synthetic oligonucleotide
tctttccgtcattagccgatcgaacatcgaaagtagatgagtcgatgactaaggtgtcga

SEQ ID NO: 526166 - DNA, 60 bp, Artificial
  Synthetic oligonucleotide
tcttttacaccgtcgttgactacgtaaatcaaataattcaagcaatgtccaagagatcac

SEQ ID NO: 526167 - DNA, 60 bp, Artificial
  Synthetic oligonucleotide
tgaaagctttccagaaagtaaagggtagggtgaacggagtagcgcaaagactaagaggtc

SEQ ID NO: 526168 - DNA, 60 bp, Artificial
  Synthetic oligonucleotide
tgaaatccaaaaccagtatgtggaggtgtactgttgggacggggtacttaggatcactga

SEQ ID NO: 526169 - DNA, 60 bp, Artificial
  Synthetic oligonucleotide
tgaaattggatctgcggcgattgacggaatagttcaaggtagcgttcactcaatcatgac

SEQ ID NO: 526170 - DNA, 60 bp, Artificial
  Synthetic oligonucleotide
tgaacaagtattgccaaaattacgtgttgaactgactgtgatgaagagaaagcgtgcgat

SEQ ID NO: 526171 - DNA, 60 bp, Artificial
  Synthetic oligonucleotide
tgaacatctaggtcgagcaagtgatcattactttaagtataatgctaccacaggaatgga

SEQ ID NO: 526172 - DNA, 60 bp, Artificial
  Synthetic oligonucleotide
tgaaccgatagaggtgactgcatctatgtgagaggttgagttgccgtcgtctgtcttcgg

SEQ ID NO: 526173 - DNA, 60 bp, Artificial
  Synthetic oligonucleotide
tgaacgaagacatagctatacctctatagtgctatacgtaatcgaattagggtatgagcg

SEQ ID NO: 526174 - DNA, 60 bp, Artificial
  Synthetic oligonucleotide
tgaacgccggaaggcgcaggaagcgcgactagaacagggacggaaggagtacggagcata

SEQ ID NO: 526175 - DNA, 60 bp, Artificial
  Synthetic oligonucleotide
tgaacgtactgagtcacaggctaacgctcatgttacatccttcggctcgcgtctattcaa

SEQ ID NO: 526176 - DNA, 60 bp, Artificial
  Synthetic oligonucleotide
tgaactgatcagatagagtggtgcccccaggttaccgtgatgtgagattggcaggtctcg

SEQ ID NO: 526177 - DNA, 60 bp, Artificial
  Synthetic oligonucleotide
tgaagatataccagacaaaaaacttgctatgagcatactagccaagaataacgcgataac

SEQ ID NO: 526178 - DNA, 60 bp, Artificial
  Synthetic oligonucleotide
tgaagattgctcttaaaacatcaaggtgttcttacaaagttattaaatactgtatagtgt

SEQ ID NO: 526179 - DNA, 60 bp, Artificial
  Synthetic oligonucleotide
tgaagcacgcttatcaagctatcgatccaaacactggcagggagtaccttagggctgggc

SEQ ID NO: 526180 - DNA, 60 bp, Artificial
  Synthetic oligonucleotide
tgaagcgagggtcaacgaagagataaaggaagctgcttcgagcgtgggcagattggagag

SEQ ID NO: 526181 - DNA, 60 bp, Artificial
  Synthetic oligonucleotide
tgaagcgttaacaccagtaccgatggctgtggcggtgaatgtagggagaggctcgtttga

SEQ ID NO: 526182 - DNA, 60 bp, Artificial
  Synthetic oligonucleotide
tgaatatagagagcctgctccatatgcgcatgttcaacgatacatacgctattgcggcat

SEQ ID NO: 526183 - DNA, 60 bp, Artificial
  Synthetic oligonucleotide
tgaatggaaaggtctatgctaatcccgagataatctcaaaactaatgaactagacctctg

SEQ ID NO: 526184 - DNA, 60 bp, Artificial
  Synthetic oligonucleotide
tgaatgtgcggggaaagaacagacggagaatggtactggagctgacgtttgccataagga

SEQ ID NO: 526185 - DNA, 60 bp, Artificial
  Synthetic oligonucleotide
tgaattagcgttcgtacctcattcgctggcatatattactcttcacagtagttataactc

SEQ ID NO: 526186 - DNA, 60 bp, Artificial
  Synthetic oligonucleotide
tgacaacctgataactaggtcagttgacgttatagatatgtcgaaggaattcaatcagaa

SEQ ID NO: 526187 - DNA, 60 bp, Artificial
  Synthetic oligonucleotide
tgacatctgtagctatcactgggtcactaagactatttccatcagaacgcgtactgacaa

SEQ ID NO: 526188 - DNA, 60 bp, Artificial
  Synthetic oligonucleotide
tgaccttagtggagatggttggctgtcgaagacgattcacggtttgaatctgctgtgtac

SEQ ID NO: 526189 - DNA, 60 bp, Artificial
  Synthetic oligonucleotide
tgacgcactatacgggattgaatcacattatgagtcggcggaagccattaatgggtcaga

SEQ ID NO: 526190 - DNA, 60 bp, Artificial
  Synthetic oligonucleotide
tgacgcggacacttatgtaggatccaaaatatactcgcaagacaaatatagaatattaga

SEQ ID NO: 526191 - DNA, 60 bp, Artificial
  Synthetic oligonucleotide
tgacgtatttgtacgaatttttcaatcattaagcgatgttgttatagacgtttgtaattt

SEQ ID NO: 526192 - DNA, 60 bp, Artificial
  Synthetic oligonucleotide
tgacgtcaggaagatctacctcgctttgctctttccaaatcaaatcctattggacatacg

SEQ ID NO: 526193 - DNA, 60 bp, Artificial
  Synthetic oligonucleotide
tgacgtcgccatttctgatatggatcaaagcataggatctagtgttgcaaatattactgc

SEQ ID NO: 526194 - DNA, 60 bp, Artificial
  Synthetic oligonucleotide
tctacattatgaacccacagtcttcagttaatattgatacgtataccttcaactgtccct

SEQ ID NO: 526195 - DNA, 60 bp, Artificial
  Synthetic oligonucleotide
tctacgaacaaacattggagaagacgagctgtgacgtgatcgtaacaaaagagaatgctg

SEQ ID NO: 526196 - DNA, 60 bp, Artificial
  Synthetic oligonucleotide
tctagcgcaagtcggttggagaagttgcgtgaggcaagagcgaatatgtttaaagaagta

SEQ ID NO: 526197 - DNA, 60 bp, Artificial
  Synthetic oligonucleotide
tctatcatgcgttaacgagtccggttccggatctttcattatgcagatttattggattaa

SEQ ID NO: 526198 - DNA, 60 bp, Artificial
  Synthetic oligonucleotide
tctcacgatgcggactcctactgctgtctaacgggggagggtatgcggcgctatacactt

SEQ ID NO: 526199 - DNA, 60 bp, Artificial
  Synthetic oligonucleotide
tctcacttcaaccaccgcgcaaaaaatctataaaacgatagggaaagccgctgaaaggtt

SEQ ID NO: 526200 - DNA, 60 bp, Artificial
  Synthetic oligonucleotide
tctcccgactacatccaaaacttagcaacgatcggagtattggcaacaccagagatacct

SEQ ID NO: 526201 - DNA, 60 bp, Artificial
  Synthetic oligonucleotide
tctcgatcttcgcactccaggagattattagaaaggttcgagaggctcagaccgcgctac

SEQ ID NO: 526202 - DNA, 60 bp, Artificial
  Synthetic oligonucleotide
tctctgacacaagtttatgccgtctctatcctgaatgtgctgcttcggctgtagctaagc

SEQ ID NO: 526203 - DNA, 60 bp, Artificial
  Synthetic oligonucleotide
tctcttccggatatctgtgactttgaggagactacccatgttggccagtcgtccgctcca

SEQ ID NO: 526204 - DNA, 60 bp, Artificial
  Synthetic oligonucleotide
tctgaacgtagggggtgtgaacatgagagctggtgtgataatagcttatgatgggcaagc

SEQ ID NO: 526205 - DNA, 60 bp, Artificial
  Synthetic oligonucleotide
tctgactgttttgtttactctacataaagcatcaattccaacaatgaaaatagcgttaaa

SEQ ID NO: 526206 - DNA, 60 bp, Artificial
  Synthetic oligonucleotide
tctgatgaggatcacgaggttgggagtacagagccagaaaattacattactgaggagtat

SEQ ID NO: 526207 - DNA, 60 bp, Artificial
  Synthetic oligonucleotide
tctgatgttgcgaatgtgctctcaagagtagtttctgtaagacatctggaaaatttggtg

SEQ ID NO: 526208 - DNA, 60 bp, Artificial
  Synthetic oligonucleotide
tctgattgatcatatctaggtccaggggtaaacggcagcttgagggcaacttaaaactta

SEQ ID NO: 526209 - DNA, 60 bp, Artificial
  Synthetic oligonucleotide
tctgattgctctggagaacccaggtgaagggtctcaagagaaattagatcgcgagacact

SEQ ID NO: 526210 - DNA, 60 bp, Artificial
  Synthetic oligonucleotide
tctgcgtcagctagaagttgaacacccattgaataacgcttgtttaattactgacagtgg

SEQ ID NO: 526211 - DNA, 60 bp, Artificial
  Synthetic oligonucleotide
tctggtatagctgcagttgaagtacaatcatcagacgaattatttgcattaatcaggtgt

SEQ ID NO: 526212 - DNA, 60 bp, Artificial
  Synthetic oligonucleotide
tctggtctactgaatataatgacggctcgcttttcgccactaacacagacttgcctgtta

SEQ ID NO: 526213 - DNA, 60 bp, Artificial
  Synthetic oligonucleotide
tctggtgactcagtcaatgccgtcgttgcccagagagctaagaatcgtgacaggtttgag

SEQ ID NO: 526214 - DNA, 60 bp, Artificial
  Synthetic oligonucleotide
tctgtaccgttattcctatacgcgcacgaacttaaggttattccattagaggtgggttcc

SEQ ID NO: 526215 - DNA, 60 bp, Artificial
  Synthetic oligonucleotide
tctgtatctgttccatgatgacttccaggctgtggagtacgtcttccaacgcgacccacg

SEQ ID NO: 526216 - DNA, 60 bp, Artificial
  Synthetic oligonucleotide
tctgttaactacttgacgcaatttgagacgaaagcggagtttcagtcgaggtgtctaggc

SEQ ID NO: 526217 - DNA, 60 bp, Artificial
  Synthetic oligonucleotide
tcttaagtcggcttggttcggggatatcaaaagcagtaaccagcaataccgcacgacaga

SEQ ID NO: 526218 - DNA, 60 bp, Artificial
  Synthetic oligonucleotide
tcttacgatcgggatctcagtcgtcctaatgattacgagcgctgccgacgctctggaggc

SEQ ID NO: 526219 - DNA, 60 bp, Artificial
  Synthetic oligonucleotide
tcttattaaggtgggagctatctaaagcgcagcgtagcgcagtactccggcttttctgtt

SEQ ID NO: 526220 - DNA, 60 bp, Artificial
  Synthetic oligonucleotide
tcttcaactttttgcaaaagacaagcgattagagggcacgttgcgaagatgcgaacgttt

SEQ ID NO: 526221 - DNA, 60 bp, Artificial
  Synthetic oligonucleotide
tcttcttctattgcgcattgtactgaccttggtaacattgttaaatcaagaatggcttta

SEQ ID NO: 526222 - DNA, 60 bp, Artificial
  Synthetic oligonucleotide
tcttgccatccggttgcctggtaatacaggactaaatattcagaatggcgggcttcaatt

SEQ ID NO: 526223 - DNA, 60 bp, Artificial
  Synthetic oligonucleotide
tcttgtgagctatattctgaaaaccataataaagataatggactatatcatttatagaat

SEQ ID NO: 526224 - DNA, 60 bp, Artificial
  Synthetic oligonucleotide
ttgactctcagatctgtcacaatgcgaccaacctcgcaagaacaacgaaatgagatgttt

SEQ ID NO: 526225 - DNA, 60 bp, Artificial
  Synthetic oligonucleotide
ttgacttactgtagaggctgttctatatatcatgtttgtcagtggtgcaatcaatatggt

SEQ ID NO: 526226 - DNA, 60 bp, Artificial
  Synthetic oligonucleotide
ttgagacactggtatgcgctaatacaacagttggccgacgactatggacatgctcctctg

SEQ ID NO: 526227 - DNA, 60 bp, Artificial
  Synthetic oligonucleotide
ttgaggaagacgtgtacgcatgtgcgagcgcgatcctggatttctatctggcgacaacta

SEQ ID NO: 526228 - DNA, 60 bp, Artificial
  Synthetic oligonucleotide
ttgaggaagtggccgcaagtgaaaaattagtgataactgatgttgttgatggtgtgaatc

SEQ ID NO: 526229 - DNA, 60 bp, Artificial
  Synthetic oligonucleotide
ttgataaactaactacacgtgaaattgaacaagtcgaattacttaaacgcatctacgata

SEQ ID NO: 526230 - DNA, 60 bp, Artificial
  Synthetic oligonucleotide
tagatcatctctaaagggtcagggctgctgcttcatggcacacgcgcaatttaaacttac

SEQ ID NO: 526231 - DNA, 60 bp, Artificial
  Synthetic oligonucleotide
ttgatcattcatgcactgattcgctcatttctcctcggaatatcagagtgtgcgttggca

SEQ ID NO: 526232 - DNA, 60 bp, Artificial
  Synthetic oligonucleotide
ttgatctaccagtaggaaattggatgttgctagcgccaacaagaccgggtgtagtagtgg

SEQ ID NO: 526233 - DNA, 60 bp, Artificial
  Synthetic oligonucleotide
ttgatgatttgtctgatgacattaaagagtttattcctcccaacgccacatctacggaag

SEQ ID NO: 526234 - DNA, 60 bp, Artificial
  Synthetic oligonucleotide
ttgcacagatcaattggacttggctaactacgttcgacaaccgaacatcagcattaaatc

SEQ ID NO: 526235 - DNA, 60 bp, Artificial
  Synthetic oligonucleotide
ttgcgcgtgtaacaggagaaacctcaacgtgggggccggcccgtcagccgtatggctttt

SEQ ID NO: 526236 - DNA, 60 bp, Artificial
  Synthetic oligonucleotide
ttgcgcgtgtaactggagaaacttcaacttggggaccggctcgtcagccgtatggttttt

SEQ ID NO: 526237 - DNA, 60 bp, Artificial
  Synthetic oligonucleotide
ttgcggctgtggtagcgttgataacgtcagccagtacgctgacgagtgacttgggtgtaa

SEQ ID NO: 526238 - DNA, 60 bp, Artificial
  Synthetic oligonucleotide
ttgcggtggcagtacaacaagtttgcggtaataacacacggtaaaggtcactacagagtt

SEQ ID NO: 526239 - DNA, 60 bp, Artificial
  Synthetic oligonucleotide
ttgctcaaactagctttgcaccagtggattggggaccaggtgaaacgcctgattctacgt

SEQ ID NO: 526240 - DNA, 60 bp, Artificial
  Synthetic oligonucleotide
ttgctcacccttcaggaccgtgacgatcgaagaacatgtgggtaatgagccgatttttaa

SEQ ID NO: 526241 - DNA, 60 bp, Artificial
  Synthetic oligonucleotide
ttgctgaattaagatggcagtacaacagatttgctgtaataacacatggtaaaggtcact

SEQ ID NO: 526242 - DNA, 60 bp, Artificial
  Synthetic oligonucleotide
ttgcttatgtcctcgcaaaatgtattcactattccgccaggttcgggtgcgtctttgcag

SEQ ID NO: 526243 - DNA, 60 bp, Artificial
  Synthetic oligonucleotide
ttgcttcgcctctgctacaggaatctctattcctactatgcgcacgtgcggcatgggagg

SEQ ID NO: 526244 - DNA, 60 bp, Artificial
  Synthetic oligonucleotide
ttggatgcaaaactacggacgtgagtacatttgagacagttgcgtcgtctgaaaaattag

SEQ ID NO: 526245 - DNA, 60 bp, Artificial
  Synthetic oligonucleotide
ttggcgttgtcaacttgggagcaacttttttgatgatggtttgcgcaaagagtgaaagag

SEQ ID NO: 526246 - DNA, 60 bp, Artificial
  Synthetic oligonucleotide
ttggctatatcacctcaatggacttgcagtcacttaaaaagaaattgcttattcaatggg

SEQ ID NO: 526247 - DNA, 60 bp, Artificial
  Synthetic oligonucleotide
ttggggcaaactcagtgtggactccagtctcctcgaataaaattaaagggtggtgcattg

SEQ ID NO: 526248 - DNA, 60 bp, Artificial
  Synthetic oligonucleotide
ttggggcgtgtactactgagatgggagctcacgaaagcgcaacgcagtgcgctactcaga

SEQ ID NO: 526249 - DNA, 60 bp, Artificial
  Synthetic oligonucleotide
ttgggtgtaattctaaaacataatacaacaacggaggcgatacaaacgtatattaaaccc

SEQ ID NO: 526250 - DNA, 60 bp, Artificial
  Synthetic oligonucleotide
ttggtagcaacacacccatccacggttgcttgctggtggtcattccaaatgcaggatcat

SEQ ID NO: 526251 - DNA, 60 bp, Artificial
  Synthetic oligonucleotide
ttggtaggaacgaacagtatgtttcatcagatatcgaagcattcaataaatacatgctgt

SEQ ID NO: 526252 - DNA, 60 bp, Artificial
  Synthetic oligonucleotide
ttggtaggagtgaacaatacatttcaccagatgcagaggcgttcggtaaatacatgttgt

SEQ ID NO: 526253 - DNA, 60 bp, Artificial
  Synthetic oligonucleotide
ttcccccgaatcctcagctcgtgtgggaggtgccgcgtagcggggtgtcaaatctggtca

SEQ ID NO: 526254 - DNA, 60 bp, Artificial
  Synthetic oligonucleotide
ttcccttctgtgtgtgacctttcgctctgctattatcttaatacaccttccgagtttgga

SEQ ID NO: 526255 - DNA, 60 bp, Artificial
  Synthetic oligonucleotide
ttccgataagcagaacgttccaatgattaagaagccattcacacgagtaatcgtgctgaa

SEQ ID NO: 526256 - DNA, 60 bp, Artificial
  Synthetic oligonucleotide
ttccgatttttggtgcgggtgcggcgaatgttgtggcaacaactcgtgcagtccaaggtg

SEQ ID NO: 526257 - DNA, 60 bp, Artificial
  Synthetic oligonucleotide
ttccgcacaaaaccattcacgaatgcgcaatggggacgaggtaatactggagcgactagt

SEQ ID NO: 526258 - DNA, 60 bp, Artificial
  Synthetic oligonucleotide
ttccgcgactagtcacgaagtccttggggcgtgctaaccccgcgggcaagaccaagatac

SEQ ID NO: 526259 - DNA, 60 bp, Artificial
  Synthetic oligonucleotide
ttccgctggttctatatcaggctttaatcatgtcaatttatccacgggcggcgaatcaaa

SEQ ID NO: 526260 - DNA, 60 bp, Artificial
  Synthetic oligonucleotide
ttcctagagcgcttttgatgctcgagtgttcacacgcagatgtgagggtactagatggga

SEQ ID NO: 526261 - DNA, 60 bp, Artificial
  Synthetic oligonucleotide
ttcctttcgaccacgtctatccctctggttcggcaacctactgtcccggcgccatcgcta

SEQ ID NO: 526262 - DNA, 60 bp, Artificial
  Synthetic oligonucleotide
ttcgagaggagcactacccttacacaacgcacggcgcggtcacaactcccggagtactct

SEQ ID NO: 526263 - DNA, 60 bp, Artificial
  Synthetic oligonucleotide
ttcgatgggattagcgaaattgcgtttggaggcttactactttgtttaggtaaaaggaaa

SEQ ID NO: 526264 - DNA, 60 bp, Artificial; identical to SEQ ID NO: 479973
  Synthetic oligonucleotide

SEQ ID NO: 526265 - DNA, 60 bp, Artificial
  Synthetic oligonucleotide
ttcggctttactgcttgggactcagtcggtacgctctctgaaggttccccctatcgaggc

SEQ ID NO: 526266 - DNA, 60 bp, Artificial
  Synthetic oligonucleotide
ttcgggcgctcctactggaagtacaccaggtaatgtacaactacctacccccagaccaca

SEQ ID NO: 526267 - DNA, 60 bp, Artificial
  Synthetic oligonucleotide
ttcggtgtgtatgttgtaatcctttaattcgaggaatttttagtgttgtttgtactgtag

SEQ ID NO: 526268 - DNA, 60 bp, Artificial
  Synthetic oligonucleotide
ttcgtcagtcccgctagatggtttcgaattaccattaacctaagatcagtaggtagagtg

SEQ ID NO: 526269 - DNA, 60 bp, Artificial
  Synthetic oligonucleotide
ttcgtgagaggtatacggatagatcaacatgttggcgtgtgtgtgatcgaaaacagtact

SEQ ID NO: 526270 - DNA, 60 bp, Artificial
  Synthetic oligonucleotide
ttcgtggtcacaatgaaggagccagttcccgacccaccggtaccggatatttcgttatgt

SEQ ID NO: 526271 - DNA, 60 bp, Artificial
  Synthetic oligonucleotide
ttcgttaggtgcagctcaggaagtaatagggcggaccttccgggaagcgtacagagaatt

SEQ ID NO: 526272 - DNA, 60 bp, Artificial
  Synthetic oligonucleotide
ttcgttggctcacgtttgtcagtggtgcattcaaaataaacgctgcttcttggacaatga

SEQ ID NO: 526273 - DNA, 60 bp, Artificial
  Synthetic oligonucleotide
ttctactcgcagtcaaatcagctactatcctatggtgatgtcacaagatttttgtcgagc

SEQ ID NO: 526274 - DNA, 60 bp, Artificial
  Synthetic oligonucleotide
ttctgagccatatgacgaaaatattgctgaaaagattcagatatgtggtagggagctatt

SEQ ID NO: 526275 - DNA, 60 bp, Artificial
  Synthetic oligonucleotide
ttctgttctttgtctccgatcctctccggacctgctgatgctgctgtcttcaaggttggt

SEQ ID NO: 526276 - DNA, 60 bp, Artificial
  Synthetic oligonucleotide
ttcttagagacccggatgtttggactggcttcatccaaggagtccgtgatgggatccgca

SEQ ID NO: 526277 - DNA, 60 bp, Artificial
  Synthetic oligonucleotide
ttcttcaatttcaagaggagcatctattcgctcagttggatcatcagcatcagcatggac

SEQ ID NO: 526278 - DNA, 60 bp, Artificial
  Synthetic oligonucleotide
ttctttgtgactacagaagctagtttaccaattcaatataggaaatttatgcctacattg

SEQ ID NO: 526279 - DNA, 60 bp, Artificial
  Synthetic oligonucleotide
ttgaaacaattgctgatagtgaaaaattggcaataattgatgttgtcgatagcgtaaatc

SEQ ID NO: 526280 - DNA, 60 bp, Artificial
  Synthetic oligonucleotide
ttgaagacgtcaaaatgttcgtataaagtagtaaagtattgcattgtaacaatccttaat

SEQ ID NO: 526281 - DNA, 60 bp, Artificial
  Synthetic oligonucleotide
ttgaagattaccgcaaaagtggaatgatggaggaggccgtaaagcaatctgctttgatta

SEQ ID NO: 526282 - DNA, 60 bp, Artificial
  Synthetic oligonucleotide
ttgacaggaattgatctttcacatttgaaggtagcagacattcatccccatattatcgaa

SEQ ID NO: 526283 - DNA, 60 bp, Artificial
  Synthetic oligonucleotide
ttgacataccgccggaactcaccagatagagtgaagctccaaggtcactatgtcgtggga

SEQ ID NO: 526284 - DNA, 60 bp, Artificial
  Synthetic oligonucleotide
tttaggtttttactactcatcgctctgatgtcaccatttgtgaggacgcaaaattatggt

SEQ ID NO: 526285 - DNA, 60 bp, Artificial
  Synthetic oligonucleotide
tttatccaatcatgttataaaagtaatgttaatgtagggcattgtagttcgattgaaagc

SEQ ID NO: 526286 - DNA, 60 bp, Artificial
  Synthetic oligonucleotide
tttcaaattgatcgtcgtgctagggtgattgtcatcgtaccaaatgcaattcaatcgagt

SEQ ID NO: 526287 - DNA, 60 bp, Artificial
  Synthetic oligonucleotide
tttcaacgaagagcgataatgggagctataaaatgtggagtttccctgctgggggaagta

SEQ ID NO: 526288 - DNA, 60 bp, Artificial
  Synthetic oligonucleotide
tttcaatcttgcgcacacgtgtgtcaggattgtatggactaccagcagccaacccgaata

SEQ ID NO: 526289 - DNA, 60 bp, Artificial
  Synthetic oligonucleotide
tttcacctcgaccaccgcacagaaaatctataagactataggaaaagccgcggagagatt

SEQ ID NO: 526290 - DNA, 60 bp, Artificial
  Synthetic oligonucleotide
tttcagatagcgattcagcaagagggcgcatcattgatacatcagagacgattaatgcgt

SEQ ID NO: 526291 - DNA, 60 bp, Artificial
  Synthetic oligonucleotide
tttcccaagtttggccgcgatgaaccatattctgacatggagtctttggagcgtatatgt

SEQ ID NO: 526292 - DNA, 60 bp, Artificial
  Synthetic oligonucleotide
tttcccaccaaatgatagagacagcattttaacaattttactactgtcgactctcgcgga

SEQ ID NO: 526293 - DNA, 60 bp, Artificial
  Synthetic oligonucleotide
tttcgcgtaccacgaatgcagaccccctcaatacacatctatgcggctccatgggattcg

SEQ ID NO: 526294 - DNA, 60 bp, Artificial
  Synthetic oligonucleotide
tttgaatcgggctttccgcacatgggtgagggacaatgcgccgtgctctattcacaagaa

SEQ ID NO: 526295 - DNA, 60 bp, Artificial
  Synthetic oligonucleotide
tttgagagcggttgcaacaccagaaccgaagggatatgtgctggaaatctgtgatgttgg

SEQ ID NO: 526296 - DNA, 60 bp, Artificial
  Synthetic oligonucleotide
tttgagaggttatagttatgtcgaccgaacacgacatactgatgcacagatacacacagt

SEQ ID NO: 526297 - DNA, 60 bp, Artificial
  Synthetic oligonucleotide
tttgagggagtaccagggagatgagaccaccctgctgctgtgggacgtacgtagcgatag

SEQ ID NO: 526298 - DNA, 60 bp, Artificial
  Synthetic oligonucleotide
tttgcaacgtccgcttcaagaaatgcagatgaggttgtatatattcaaccaaccatcaca

SEQ ID NO: 526299 - DNA, 60 bp, Artificial; identical to SEQ ID NO: 485016
  Synthetic oligonucleotide

SEQ ID NO: 526300 - DNA, 60 bp, Artificial
  Synthetic oligonucleotide
tttggattctatgaaggatcatcaccgtgcgtaggtttaccatatagacttgtgaactgt

SEQ ID NO: 526301 - DNA, 60 bp, Artificial
  Synthetic oligonucleotide
tttggccaagtaacattttgatccctcatctcactgaaattgtcaaccatttcgaaactt

SEQ ID NO: 526302 - DNA, 60 bp, Artificial
  Synthetic oligonucleotide
tttggcgtggtcccaatccaaggtccaattaacagagctgttgcgcaaaacgcctatgtg

SEQ ID NO: 526303 - DNA, 60 bp, Artificial
  Synthetic oligonucleotide
tttggctgagcttaactggctacaagtggatcctggctcaatgtttcgatcaattcattc

SEQ ID NO: 526304 - DNA, 60 bp, Artificial
  Synthetic oligonucleotide
ttttaattctccagacttagaaaagctcatacgaattccattcaaaggcaaaataccagc

SEQ ID NO: 526305 - DNA, 60 bp, Artificial
  Synthetic oligonucleotide
ttttacaccctcattagattttgttattcccggtgttcgagaagttctagtcttaggaga

SEQ ID NO: 526306 - DNA, 60 bp, Artificial
  Synthetic oligonucleotide
ttttactacaactgatgccataataacctcatacgatggatgtttaggtatattcggatt

SEQ ID NO: 526307 - DNA, 60 bp, Artificial
  Synthetic oligonucleotide
ttttccaaccgggtagatggtttatgcggcccgctcaagcggttactccagtaattagtg

SEQ ID NO: 526308 - DNA, 60 bp, Artificial
  Synthetic oligonucleotide
ttttctagccatgaatcatgcgcattaaacgtacataattgtaaatggtgtcagatcaac

SEQ ID NO: 526309 - DNA, 60 bp, Artificial
  Synthetic oligonucleotide
ttttctatacggtagtagattatattaaccagattgtgcaagttatgtccaaaagatcac

SEQ ID NO: 526310 - DNA, 60 bp, Artificial
  Synthetic oligonucleotide
ttttctttaaaatcgtgttgtgtgacgtctcatcctctggcgtaggtcgattcatctatc

SEQ ID NO: 526311 - DNA, 60 bp, Artificial
  Synthetic oligonucleotide
ttttggactacttggaacaaccctattgaatctagatgctaattatgttgagactgcccg

SEQ ID NO: 526312 - DNA, 60 bp, Artificial
  Synthetic oligonucleotide
tttttgttgctaccccgcgattacgcgaggctctgcgcagcagaggacatgcagatatac

SEQ ID NO: 526313 - DNA, 60 bp, Artificial
  Synthetic oligonucleotide
ttggtaggagtgaacagtacatttcaccggatgcagaagcgttcaataagtacatgttgt

SEQ ID NO: 526314 - DNA, 60 bp, Artificial
  Synthetic oligonucleotide
ttggtcgataagaatacaatcgagttaacacggggggaggcgcggaatgttttcgaacgc

SEQ ID NO: 526315 - DNA, 60 bp, Artificial
  Synthetic oligonucleotide
ttgtaacaaactaggaccgagagaaaatgtggctataatacaagttggtggttctaacat

SEQ ID NO: 526316 - DNA, 60 bp, Artificial
  Synthetic oligonucleotide
ttgtaagaggttgagctgccgtcgtctgtccacggaagcgacggagttcttaacagtaag

SEQ ID NO: 526317 - DNA, 60 bp, Artificial
  Synthetic oligonucleotide
ttgtagaaaattaggaccaagagagaatgtggcaattatacaagttggcggctcagaagt

SEQ ID NO: 526318 - DNA, 60 bp, Artificial
  Synthetic oligonucleotide
ttgtctccgtgggcctctaaaatttcaacgccgcacgctaatgaacgcgcttctatatgg

SEQ ID NO: 526319 - DNA, 60 bp, Artificial
  Synthetic oligonucleotide
ttgtgcagccgctatcttagacttctatctaactaccaccatatcgcaaggaggtattca

SEQ ID NO: 526320 - DNA, 60 bp, Artificial
  Synthetic oligonucleotide
ttgtgtaatccaatggatattactctgtactattatcaacagacagatgaagccaataag

SEQ ID NO: 526321 - DNA, 60 bp, Artificial
  Synthetic oligonucleotide
ttgtgtcaccatttgtcagaacacaaaactatggaattaacttaccaatcactggttcca

SEQ ID NO: 526322 - DNA, 60 bp, Artificial
  Synthetic oligonucleotide
ttgtgtttatattatcctactgaagcttcaactcaaattggggatacagaatggaaagat

SEQ ID NO: 526323 - DNA, 60 bp, Artificial
  Synthetic oligonucleotide
ttgttgacatcagtttgtaccctttcaagtgatatgagtgtggccttcaagataaatggg

SEQ ID NO: 526324 - DNA, 60 bp, Artificial
  Synthetic oligonucleotide
ttgttgacgtcggtatgcacgctttcaagtgatatgagcgtggcgtttaagcttaatggt

SEQ ID NO: 526325 - DNA, 60 bp, Artificial
  Synthetic oligonucleotide
ttgttttcattacagaaggatcacaaaactaaatagagagttgttgagaattggggcaaa

SEQ ID NO: 526326 - DNA, 60 bp, Artificial
  Synthetic oligonucleotide
tttaaaactgtagaattaaactatgaatatgaacgagatggaaaaactgtgtatgcaacg

SEQ ID NO: 526327 - DNA, 60 bp, Artificial
  Synthetic oligonucleotide
tttaaacgtttgcgtcatctgacagagagcagaaaaaatgaacttggattgggagatatc

SEQ ID NO: 526328 - DNA, 60 bp, Artificial
  Synthetic oligonucleotide
tttaacttcaacgttgtgtttatattatcctactgaagcttcaactcaaattggggatac

SEQ ID NO: 526329 - DNA, 60 bp, Artificial
  Synthetic oligonucleotide
tttaagccaattacttatcagtacacatacactagagatggagaacaaattacagcgcac

SEQ ID NO: 526330 - DNA, 60 bp, Artificial
  Synthetic oligonucleotide
tttaagtcaaacggtgatttacctaatcgattatctatacgaaagacgcagccacgtgag

SEQ ID NO: 526331 - DNA, 60 bp, Artificial
  Synthetic oligonucleotide
tttaataaggtggcagtcttgatttgtgaagcattaaattcagttaaagtcacgcagtct

SEQ ID NO: 526332 - DNA, 60 bp, Artificial
  Synthetic oligonucleotide
tttacaacgagtatttacagtggcttccattagaagcatgcttatcaaataaggactaag

SEQ ID NO: 526333 - DNA, 60 bp, Artificial
  Synthetic oligonucleotide
tttacaatgggaatggctggtctccacatcacgactgagcctgcgtataagcgagtccca

SEQ ID NO: 526334 - DNA, 60 bp, Artificial
  Synthetic oligonucleotide
tttacacatcatgcgcaagaatggattgtttcatgagagcgacgagcctcgagcagatct

SEQ ID NO: 526335 - DNA, 60 bp, Artificial
  Synthetic oligonucleotide
tttacagatttcttttaattatagttatattatcaccactccttaatgcacaaaattatg

SEQ ID NO: 526336 - DNA, 60 bp, Artificial
  Synthetic oligonucleotide
tttaccaatacaatatcagaagttcatgccaacactgcctaataatgttcaatacgtaat

SEQ ID NO: 526337 - DNA, 60 bp, Artificial
  Synthetic oligonucleotide
tttaccacattgacgtccgaacctcagagatggtaggatgcagtacagtcactcaagtga

SEQ ID NO: 526338 - DNA, 60 bp, Artificial
  Synthetic oligonucleotide
tttacccctcgcgaatctcatttttccggatcgcgaagatgtaatcatggcggagttcac

SEQ ID NO: 526339 - DNA, 60 bp, Artificial
  Synthetic oligonucleotide
tttaccgtctaggtgtagggtcgtacgctacctgagtccagccctccggtagcgcgtggg

SEQ ID NO: 526340 - DNA, 60 bp, Artificial
  Synthetic oligonucleotide
tttacgataccctttatctcacgaatcataattcatacataaagaacgatgctattcatt

SEQ ID NO: 526341 - DNA, 60 bp, Artificial
  Synthetic oligonucleotide
tttactcaactacatattaaaatcagtgactcgaataatggactacattatatatagatc

SEQ ID NO: 526342 - DNA, 60 bp, Artificial
  Synthetic oligonucleotide
tttagaatgaatataactacaagctacacttacatgttatctgataatatatacgtagca

SEQ ID NO: 526343 - DNA, 60 bp, Artificial
  Synthetic oligonucleotide
tttagatcgactcagcagtctaggtccctaggcagaatccacggaatcagaaatagcgac

SEQ ID NO: 526344 - DNA, 60 bp, Artificial
  Synthetic oligonucleotide
tttagatgtcgttaggtccttgcgtaagatgtcatctgccattacggtgcactcccacga

SEQ ID NO: 526345 - DNA, 60 bp, Artificial
  Synthetic oligonucleotide
tgtagttgattacattaatcagatagtacaagtaatgtccaaaagatcaagatcgttaga

SEQ ID NO: 526346 - DNA, 60 bp, Artificial
  Synthetic oligonucleotide
tgtataccgctgaaacagctgaggccatttgtatacttaaaacttgtttgatcctgaatt

SEQ ID NO: 526347 - DNA, 60 bp, Artificial
  Synthetic oligonucleotide
tgtatcaaatgatgtgagagaaacgtatgcacggatgaatgctaaagtcaaagctctagt

SEQ ID NO: 526348 - DNA, 60 bp, Artificial
  Synthetic oligonucleotide
tgtattaatgtctgtggacgttaggataccacgtgaagtgacaaagaacatagacgtcaa

SEQ ID NO: 526349 - DNA, 60 bp, Artificial
  Synthetic oligonucleotide
tgtattatgtacgggtggtgactataacttcgcattaccagtgggtcagtggccagtaat

SEQ ID NO: 526350 - DNA, 60 bp, Artificial
  Synthetic oligonucleotide
tgtcaaacaacgaatgtagactcatttgaaacagttgctgagaatgaaaaattagctata

SEQ ID NO: 526351 - DNA, 60 bp, Artificial
  Synthetic oligonucleotide
tgtcaaggggtaacttggatcatgatgtcgaggacttttggatggatggttttgcattct

SEQ ID NO: 526352 - DNA, 60 bp, Artificial
  Synthetic oligonucleotide
tgtcattgacttcgaacgtgaatataagtcatggcgatttgacgccgatctatgaacggc

SEQ ID NO: 526353 - DNA, 60 bp, Artificial
  Synthetic oligonucleotide
tgtccactcaatacacaaactttaggaattggatgcaaaactacggatgtggatacattt

SEQ ID NO: 526354 - DNA, 60 bp, Artificial
  Synthetic oligonucleotide
tgtcctattgtatctccaagaaacagaacgggttgttcacatcagaagaaatgtgcatgt

SEQ ID NO: 526355 - DNA, 60 bp, Artificial
  Synthetic oligonucleotide
tgtcgcagctaattgatttggcattacttccattggatatgttttcgatgttttccggta

SEQ ID NO: 526356 - DNA, 60 bp, Artificial
  Synthetic oligonucleotide
tgtcgtccacgggaaatctcacggtcactagtaacgtcgtgttattaaccttcgatttaa

SEQ ID NO: 526357 - DNA, 60 bp, Artificial
  Synthetic oligonucleotide
tgtcgtgggattggcaggtcccggagtagtgattcccaccgctgtataacgggggaggta

SEQ ID NO: 526358 - DNA, 60 bp, Artificial
  Synthetic oligonucleotide
tgtctacaaatgtgactgacttaacgaacagatcctctgcgcacgcggcgatactatctt

SEQ ID NO: 526359 - DNA, 60 bp, Artificial
  Synthetic oligonucleotide
tgtctctagatgtcgcaacgcagaactttgtagagacatacctctcgtacccataccaac

SEQ ID NO: 526360 - DNA, 60 bp, Artificial
  Synthetic oligonucleotide
tgtctctcagatgcatgctatcatgaacgatgtgacacccgaagagcttgaaagagtgag

SEQ ID NO: 526361 - DNA, 60 bp, Artificial
  Synthetic oligonucleotide
tgtcttcaaaaccggtacggagtgagcatccctgtatacaaagcgggggcaactggtacg

SEQ ID NO: 526362 - DNA, 60 bp, Artificial
  Synthetic oligonucleotide
tgtgaatgtaaataatccgggagcgggaccgggtatgatagaaatagaggtaatttacta

SEQ ID NO: 526363 - DNA, 60 bp, Artificial
  Synthetic oligonucleotide
tgtgactctgaaaatattcacgctcgtaagtcgattttcttgcagttgtgtatacgctac

SEQ ID NO: 526364 - DNA, 60 bp, Artificial
  Synthetic oligonucleotide
tgtgagatactgtcacatgcgctcttccctagccttttaacataccgtgttgtggcggat

SEQ ID NO: 526365 - DNA, 60 bp, Artificial
  Synthetic oligonucleotide
tgtgagctttgacctgtgactcggtttctctctgactccatgaccccacggcggactcgg

SEQ ID NO: 526366 - DNA, 60 bp, Artificial
  Synthetic oligonucleotide
tgtgatcgagagacattttatcacattgacgtccgaacctcagagatggtaggctgcagt

SEQ ID NO: 526367 - DNA, 60 bp, Artificial
  Synthetic oligonucleotide
tgtgcatgccaactcctgacgcgccaatgtccaattatcaggcggccaccatgagagagc

SEQ ID NO: 526368 - DNA, 60 bp, Artificial
  Synthetic oligonucleotide
tgtggccggcaaggaaccatggaaacctttacgtaatcagaggacgaatgaggttgtcgc

SEQ ID NO: 526369 - DNA, 60 bp, Artificial
  Synthetic oligonucleotide
tgtggtacctcccgattacccacccagttaagtgtttagttgcgcttgaagtgtcggact

SEQ ID NO: 526370 - DNA, 60 bp, Artificial
  Synthetic oligonucleotide
tgttaagcggggcgcgtcccatgttgacgtttacagagtagatgtggtagacgtgctgtt

SEQ ID NO: 526371 - DNA, 60 bp, Artificial
  Synthetic oligonucleotide
tgttacatatataagttttcagatcatataaggcgaataaggatgaagcacggtactaag

SEQ ID NO: 526372 - DNA, 60 bp, Artificial
  Synthetic oligonucleotide
tgttactaccgcaacttgtactattagaaattgcaagaagctagggccaagagagaatgt

SEQ ID NO: 526373 - DNA, 60 bp, Artificial
  Synthetic oligonucleotide
tgggaccaaaacagaagtgccttcatggtttaaaagccttaatccaatgcttggcgttgt

SEQ ID NO: 526374 - DNA, 60 bp, Artificial
  Synthetic oligonucleotide
tgggagtggtaagaaggcgtcacactacagaaatctgttcatggaatcatggcgtgggtg

SEQ ID NO: 526375 - DNA, 60 bp, Artificial
  Synthetic oligonucleotide
tgggattaatcttaacgttgtaacgacaaagcaacttctttacgaaacgtaccttgcatc

SEQ ID NO: 526376 - DNA, 60 bp, Artificial
  Synthetic oligonucleotide
tgggcacttatatgtgacgctcgtcacggggaggtacctctcagatctacgaacgtggtt

SEQ ID NO: 526377 - DNA, 60 bp, Artificial
  Synthetic oligonucleotide
tgggcagctgttatctagcagtgcataccgtaggcttgaaacaatcatctccaagcacgt

SEQ ID NO: 526378 - DNA, 60 bp, Artificial
  Synthetic oligonucleotide
tgggcatggtaccaccgtacacacggaatgattttgccagacgggagatccgggaattac

SEQ ID NO: 526379 - DNA, 60 bp, Artificial
  Synthetic oligonucleotide
tgggcgagaacgttgaacaacaaatacgcggttcgggtaaagcggaagtcccactgtagg

SEQ ID NO: 526380 - DNA, 60 bp, Artificial
  Synthetic oligonucleotide
tggggagacaaaccgatgtcgctctcaatgtctcatgatgggtcgtccatccgttctgct

SEQ ID NO: 526381 - DNA, 60 bp, Artificial
  Synthetic oligonucleotide
tggggagatgttaggtttctacgtttagtgtggtccgctcccacgcttgatggactagtt

SEQ ID NO: 526382 - DNA, 60 bp, Artificial
  Synthetic oligonucleotide
tgggtaatgagccgatttttaagactaagctaatccgtgaccagcaaatcggcagaattg

SEQ ID NO: 526383 - DNA, 60 bp, Artificial
  Synthetic oligonucleotide
tgggtatgtcgacgatggatcctccgtgactggtatcgagacaattagcattgagaaccc

SEQ ID NO: 526384 - DNA, 60 bp, Artificial
  Synthetic oligonucleotide
tgggtgcagaattgcttgagagttatagaaggagcgggatgatggatgaagctatcaagc

SEQ ID NO: 526385 - DNA, 60 bp, Artificial
  Synthetic oligonucleotide
tgggtggacaataccggctaacgcctccattagagtcgtgctaagcgattggatcaagtg

SEQ ID NO: 526386 - DNA, 60 bp, Artificial
  Synthetic oligonucleotide
tgggtgtcagagaaagattatgagacgttaatgctaacggacttggggaaccaaaaaatt

SEQ ID NO: 526387 - DNA, 60 bp, Artificial
  Synthetic oligonucleotide
tggtaaagatcaatcagatcgtataacccgattatatcgtgcacttcaaaccgaggaaga

SEQ ID NO: 526388 - DNA, 60 bp, Artificial
  Synthetic oligonucleotide
tggtagtacaattcaggctaagaccgcactttcagttgaagcgatcatgaacatacaagg

SEQ ID NO: 526389 - DNA, 60 bp, Artificial
  Synthetic oligonucleotide
tggtcaaatagctggaaagaattcgacgccttactgtcaagtgaaaataggacgaaattt

SEQ ID NO: 526390 - DNA, 60 bp, Artificial
  Synthetic oligonucleotide
tggtcatcattaaacaaagaagaaaagctggatcaacttaagacatcgaaggctgaagta

SEQ ID NO: 526391 - DNA, 60 bp, Artificial
  Synthetic oligonucleotide
tggtgcattgaatgctgtcagttaactgaattgactttttgtcacggatgttcgttggct

SEQ ID NO: 526392 - DNA, 60 bp, Artificial
  Synthetic oligonucleotide
tggtgcgggaatcgcaactggaatcgcaacagcgcgggctgtcgaaggggcctataagct

SEQ ID NO: 526393 - DNA, 60 bp, Artificial
  Synthetic oligonucleotide
tggtgttaaaaataatcttttgggcaaagcggcgactattgatcaggcactaaatggaaa

SEQ ID NO: 526394 - DNA, 60 bp, Artificial
  Synthetic oligonucleotide
tggttgaccatgaccagcactattatttctaattttgggatatataacaaaacttctcta

SEQ ID NO: 526395 - DNA, 60 bp, Artificial
  Synthetic oligonucleotide
tggtttaaaagtctaaatcccatgcttggagtggtgaatttaggtgcaactttcatcatg

SEQ ID NO: 526396 - DNA, 60 bp, Artificial
  Synthetic oligonucleotide
tgtaacaagttaggtccaagagagaacgtcgcaataatccaagtaggtggttcagacgtt

SEQ ID NO: 526397 - DNA, 60 bp, Artificial
  Synthetic oligonucleotide
tgtaacatcaaatcatagaacatcagcgactgaggtgcataactgcaaatggtgctcaat

SEQ ID NO: 526398 - DNA, 60 bp, Artificial
  Synthetic oligonucleotide
tgtaagggaatgggaatcgttcaaccatatatgagaaatgatttcgaccgaaatgagatg

SEQ ID NO: 526399 - DNA, 60 bp, Artificial
  Synthetic oligonucleotide
tgtacgcgaatcataatagatcaaaaatcgatcaatctttgactgttagaacagaatctc

SEQ ID NO: 526400 - DNA, 60 bp, Artificial
  Synthetic oligonucleotide
tgtactgttggacgtctatcccggagcatgcccagattccattttcagtgtccatcaggc

SEQ ID NO: 526401 - DNA, 60 bp, Artificial
  Synthetic oligonucleotide
tgtagacaacgtatgcatggatgaaatggttcgagaatcgcagagaaatggaatcgcacc

SEQ ID NO: 526402 - DNA, 60 bp, Artificial
  Synthetic oligonucleotide
tgtagtattaatgagatatgataatgcatctgaattagatgcgtcggagttagcagatct

SEQ ID NO: 526403 - DNA, 60 bp, Artificial
  Synthetic oligonucleotide
ttagaaacgaccaaccaacaagaaatacaaacctttcactttctcaatcaaccgagaatc

SEQ ID NO: 526404 - DNA, 60 bp, Artificial
  Synthetic oligonucleotide
ttagaaagagatcccctaaaagggcgagcctacaggaaggaggttgttacaccagcgaga

SEQ ID NO: 526405 - DNA, 60 bp, Artificial
  Synthetic oligonucleotide
ttagagaacttacataatccaagtttcaaaatacagattacacgtaattgtagcgaactg

SEQ ID NO: 526406 - DNA, 60 bp, Artificial
  Synthetic oligonucleotide
ttagagatatggattggaagatggaatcaatgtataatgaacttttaagctttatccaat

SEQ ID NO: 526407 - DNA, 60 bp, Artificial
  Synthetic oligonucleotide
ttagcaacgcttacgctacgtgttacctcgatccaatcagatttcgagtctagagtatcg

SEQ ID NO: 526408 - DNA, 60 bp, Artificial
  Synthetic oligonucleotide
ttaggaccaagagaaaacgtggcagttatccaggttggtggctcaaatatacttgacata

SEQ ID NO: 526409 - DNA, 60 bp, Artificial
  Synthetic oligonucleotide
ttaggagtcaatgatacatggaggccgtcatctccaactaaatataaaggatggtgttta

SEQ ID NO: 526410 - DNA, 60 bp, Artificial
  Synthetic oligonucleotide
ttagtgcatgccggttgattgattatcctttaggtgacgcattacccttaaacactttag

SEQ ID NO: 526411 - DNA, 60 bp, Artificial
  Synthetic oligonucleotide
ttagtgccttaccaagagcaggtgaggccgcccagttatgttccgtcagccccaataccc

SEQ ID NO: 526412 - DNA, 60 bp, Artificial
  Synthetic oligonucleotide
ttataatctagaccagataatagagtttggctatggagagggtcgtgtttcacgaacgct

SEQ ID NO: 526413 - DNA, 60 bp, Artificial
  Synthetic oligonucleotide
ttatagctcatacaacgtgttcagtgaatggagtgaatgagtataattataatggtggat

SEQ ID NO: 526414 - DNA, 60 bp, Artificial
  Synthetic oligonucleotide
ttatattgagcgtatcagcaaggtacgcaagaccaaagatgaacggctctcgatgttagc

SEQ ID NO: 526415 - DNA, 60 bp, Artificial
  Synthetic oligonucleotide
ttatcaacgcaagcacgctccatcatgttcagactattttgcttcgtttgctttggatat

SEQ ID NO: 526416 - DNA, 60 bp, Artificial
  Synthetic oligonucleotide
ttatcgattggaatacgacgatatgactggagacacgccaagaactcaaaggatccggca

SEQ ID NO: 526417 - DNA, 60 bp, Artificial
  Synthetic oligonucleotide
ttatgaatggcgaaacaaaagaggaagaagtcgtacaagagcagtactcgatgctatgta

SEQ ID NO: 526418 - DNA, 60 bp, Artificial
  Synthetic oligonucleotide
ttatggcacggcataacgctcacatacgcacgtgtcactgtcgtggataacgcgtcatcc

SEQ ID NO: 526419 - DNA, 60 bp, Artificial
  Synthetic oligonucleotide
ttattagagatgatcgcgctattcaccttctaagggctttaccaatgctatggatccctg

SEQ ID NO: 526420 - DNA, 60 bp, Artificial
  Synthetic oligonucleotide
ttattatcagatccttgcacagataattccgagaaaaattcgcatccgcttattttattc

SEQ ID NO: 526421 - DNA, 60 bp, Artificial
  Synthetic oligonucleotide
ttatttccattactaagtgaaaaacatcagcgtatagtgaatattggaccgagaaatgaa

SEQ ID NO: 526422 - DNA, 60 bp, Artificial
  Synthetic oligonucleotide
ttcaagcaatgtccaaaagatctagatcgttagattcagcggctttttactatagagttt

SEQ ID NO: 526423 - DNA, 60 bp, Artificial
  Synthetic oligonucleotide
ttcaagttatgtccaaaagatcgcgatcgttgaattcagcagctttctactatagagtct

SEQ ID NO: 526424 - DNA, 60 bp, Artificial
  Synthetic oligonucleotide
ttcacaaccctattgtcaaataaaaattggaagagtgatcgcttttaaaccagttaagaa

SEQ ID NO: 526425 - DNA, 60 bp, Artificial
  Synthetic oligonucleotide
ttcacacagcatggaccattactatcagacacaaagctctatggagtgatgaagttcagt

SEQ ID NO: 526426 - DNA, 60 bp, Artificial
  Synthetic oligonucleotide
ttcaccgacaactgtcactaacagattagcgcgttatttcactcctgcaagcttaactcg

SEQ ID NO: 526427 - DNA, 60 bp, Artificial
  Synthetic oligonucleotide
ttcacgcgatttgcggaggatagaatgggtgaagagatcgcaaatgaaatgggcggtgtg

SEQ ID NO: 526428 - DNA, 60 bp, Artificial
  Synthetic oligonucleotide
ttcagagatgatttgagattgcgtcagattaagaagcatgtgaacgaacaagtattgccc

SEQ ID NO: 526429 - DNA, 60 bp, Artificial
  Synthetic oligonucleotide
ttcagagtaatgaacaaataatcatgaatgacatctcgtattaacatctgcgcactaaca

SEQ ID NO: 526430 - DNA, 60 bp, Artificial
  Synthetic oligonucleotide
ttcataaagggtactgccaagttgaaaacagtccagaagttagttgatgctgtcaaccat

SEQ ID NO: 526431 - DNA, 60 bp, Artificial
  Synthetic oligonucleotide
ttcatacgcaccagtttacttagaaaagcgtcgtgcgcaaatatcagcactgctaactat

SEQ ID NO: 526432 - DNA, 60 bp, Artificial
  Synthetic oligonucleotide
ttcccatacttgtctcgcgctgtccgttgcctgtctccgcttgctgctcactgtgctgat

SEQ ID NO: 526433 - DNA, 60 bp, Artificial
  Synthetic oligonucleotide
tgttcactatgggtatggccggactgcacattaccactgagccttcctataaacgtgtgc

SEQ ID NO: 526434 - DNA, 60 bp, Artificial
  Synthetic oligonucleotide
tgttcgcatttgcgacgcaattgcttatttgatggagtttgtgcaaagcagcattttgaa

SEQ ID NO: 526435 - DNA, 60 bp, Artificial
  Synthetic oligonucleotide
tgttgcaagtgtactttcaaaagtagtttccgtaagacatcttgagaatttagtattgag

SEQ ID NO: 526436 - DNA, 60 bp, Artificial
  Synthetic oligonucleotide
tgttgccttaataacttctgcgagcacactaacgagcgatttggggatcattctaaagaa

SEQ ID NO: 526437 - DNA, 60 bp, Artificial
  Synthetic oligonucleotide
tgtttccgcggctagtatgtcttggagtggggatacgagcgtcccattaaaagaggtaaa

SEQ ID NO: 526438 - DNA, 60 bp, Artificial
  Synthetic oligonucleotide
tgtttcgtcaaccttggcacaagtttcaatgaacgcaggagcacgcggagatattcaagc

SEQ ID NO: 526439 - DNA, 60 bp, Artificial
  Synthetic oligonucleotide
tgtttcttacaaagggttggccaacaggatctgtttactttaaagagtactcaagtattg

SEQ ID NO: 526440 - DNA, 60 bp, Artificial
  Synthetic oligonucleotide
tgttttagcgactccagagataccatttacaactgaggcggcgaatgagattgcgcgtgt

SEQ ID NO: 526441 - DNA, 60 bp, Artificial
  Synthetic oligonucleotide
tgttttatactgtagtcgattacattaatcaaattgttcaagtaatgtccaaaagatcgc

SEQ ID NO: 526442 - DNA, 60 bp, Artificial
  Synthetic oligonucleotide
ttaaacaggccgtgctattaaatgtgttaggtagtggtgaagagattccagatccgctaa

SEQ ID NO: 526443 - DNA, 60 bp, Artificial
  Synthetic oligonucleotide
ttaaacttacgttaaaaattgcggatgtcagctgcggtcttgctcgcacccggtgacgtg

SEQ ID NO: 526444 - DNA, 60 bp, Artificial
  Synthetic oligonucleotide
ttaaagactacaatgatattactacattttctatgaatccacaactatattgtgattata

SEQ ID NO: 526445 - DNA, 60 bp, Artificial
  Synthetic oligonucleotide
ttaaagtatgtccattaaatacacagacattaggtattggatgtcttactactgacacta

SEQ ID NO: 526446 - DNA, 60 bp, Artificial
  Synthetic oligonucleotide
ttaaatcaaataaaattacgattaatgatattctgcgcgacataaagccattctttgtga

SEQ ID NO: 526447 - DNA, 60 bp, Artificial
  Synthetic oligonucleotide
ttaaatccaatgctaggagtggtgaatctgggcgcgacatttctgatgatggtttgcgct

SEQ ID NO: 526448 - DNA, 60 bp, Artificial
  Synthetic oligonucleotide
ttaaattgggattctagatctagtcaaccaagcgtacatggatattctacttctgagaat

SEQ ID NO: 526449 - DNA, 60 bp, Artificial
  Synthetic oligonucleotide
ttaacagcaagtaccatcggacctgatgactggttgagaagccacaaccagtcatatcgc

SEQ ID NO: 526450 - DNA, 60 bp, Artificial
  Synthetic oligonucleotide
ttaagcggtatagatctatcacacttacgcacaccgaagatacaaccgaagacgttggag

SEQ ID NO: 526451 - DNA, 60 bp, Artificial
  Synthetic oligonucleotide
ttaagtcctactcgcgccattgcgaatcagatgttacacagcttctatgaacgctataca

SEQ ID NO: 526452 - DNA, 60 bp, Artificial
  Synthetic oligonucleotide
ttaagtggaattgatttatctcatctacgtacaccaaagatagaacctacgatggttgcg

SEQ ID NO: 526453 - DNA, 60 bp, Artificial
  Synthetic oligonucleotide
ttaatataccaataacaggatcaatggatactgtatactccaactctactcaagaagaag

SEQ ID NO: 526454 - DNA, 60 bp, Artificial
  Synthetic oligonucleotide
ttaatcctggcggtaaagcatggacccttatcgacccaacgctcaatgcatccgatccct

SEQ ID NO: 526455 - DNA, 60 bp, Artificial
  Synthetic oligonucleotide
ttaattcccatattaacagtcgtttattaattacgctaaattcaaatcccaacattttgt

SEQ ID NO: 526456 - DNA, 60 bp, Artificial
  Synthetic oligonucleotide
ttacaagtggactttgcgttcgagctattcatcgcagcgtgagatcgatagacagcttaa

SEQ ID NO: 526457 - DNA, 60 bp, Artificial
  Synthetic oligonucleotide
ttacattcttcaaaaccaatcatatatatgctcgggtcagctccatcttactggatttac

SEQ ID NO: 526458 - DNA, 60 bp, Artificial
  Synthetic oligonucleotide
ttacgacaatgggctgaaattattcatagatattggcctaacccctcgcagattcgttac

SEQ ID NO: 526459 - DNA, 60 bp, Artificial
  Synthetic oligonucleotide
ttacggcagatatttagtagaagcagaacgcaagtattaatggcacatgtggatatagat

SEQ ID NO: 526460 - DNA, 60 bp, Artificial
  Synthetic oligonucleotide
ttacttcacaaatatgctggacgctcgacccaataacggccagcgagtgatcttggatcg

SEQ ID NO: 526461 - DNA, 60 bp, Artificial
  Synthetic oligonucleotide
ttactttaaatgctgcagttttcaaatttcactcaagagaagtttacgtttttggattct

SEQ ID NO: 526462 - DNA, 60 bp, Artificial
  Synthetic oligonucleotide
gttaaaaattccttgtgcaatggagcaaaagcaaaggagattcactaagaacgtattcgt

SEQ ID NO: 526463 - DNA, 60 bp, Artificial
  Synthetic oligonucleotide
gttaaaaattgcgcatgtcagctgcggtcttgctcgcacccggtgacatgatccaacgtt

SEQ ID NO: 526464 - DNA, 60 bp, Artificial; identical to SEQ ID NO: 443137
  Synthetic oligonucleotide

SEQ ID NO: 526465 - DNA, 60 bp, Artificial
  Synthetic oligonucleotide
gttaaaacatgccggagccacatgcagttatctacgtcacggaggaactgacgcacctga

SEQ ID NO: 526466 - DNA, 60 bp, Artificial
  Synthetic oligonucleotide
gttaaaatttggtgaagatggacacgattgcagcaagagctctgacggttattaaagctt

SEQ ID NO: 526467 - DNA, 60 bp, Artificial
  Synthetic oligonucleotide
gttaaaatttggtgaagatggacacgattgctgcgagagccctaactgttatcagagctt

SEQ ID NO: 526468 - DNA, 60 bp, Artificial; identical to SEQ ID NO: 124513
  Synthetic oligonucleotide

SEQ ID NO: 526469 - DNA, 60 bp, Artificial
  Synthetic oligonucleotide
gtttatttaggatggaaccttacgcgatattgtatgttacgcaggagatcgaatacctac

SEQ ID NO: 526470 - DNA, 60 bp, Artificial
  Synthetic oligonucleotide
gttaaattagtctcgtgatggatgagttagcgatacctatcattgatggtcgattcccga

SEQ ID NO: 526471 - DNA, 60 bp, Artificial
  Synthetic oligonucleotide
gttaaattatcccttgtcatgagtctagctacgatcgccgaaaattatatgatgcataat

SEQ ID NO: 526472 - DNA, 60 bp, Artificial
  Synthetic oligonucleotide
gttaaattattccaggatggacagtgttgagttcgctatcttgaatactacgcagcagcc

SEQ ID NO: 526473 - DNA, 60 bp, Artificial
  Synthetic oligonucleotide
gttaaattgtgtcaggatggaggacattaacttgactattttcaacgatgatgcattacc

SEQ ID NO: 526474 - DNA, 60 bp, Artificial
  Synthetic oligonucleotide
gttaaatttccgtagccatgcctgctcagaacgagcaacgtccggagaaaattaaaacga

SEQ ID NO: 526475 - DNA, 60 bp, Artificial
  Synthetic oligonucleotide
gttaaggtatcacatgtcgcattacatggatgtgagagtgtcaatgaaggggcttagttt

SEQ ID NO: 526476 - DNA, 60 bp, Artificial
  Synthetic oligonucleotide
gttaattggagacgtcgccgccaacgctttagccctagctagcgccaatagggacaggtt

SEQ ID NO: 526477 - DNA, 60 bp, Artificial
  Synthetic oligonucleotide
gttaatttttccagagaccatgggtaaattcacttcattcttgaagcgcgcgggaagtgc

SEQ ID NO: 526478 - DNA, 60 bp, Artificial
  Synthetic oligonucleotide
gttacatcggaataattggaaaaatttctggtttagaagtacataaattactcgataaat

SEQ ID NO: 526479 - DNA, 60 bp, Artificial
  Synthetic oligonucleotide
gttactaagtttgcaaacacaattaaacaacataaatgtagaaatgagtatttgatacaa

SEQ ID NO: 526480 - DNA, 60 bp, Artificial
  Synthetic oligonucleotide
gttagaaagcacttattggactcagtaaattcagactcttttgttaagtattcatatcat

SEQ ID NO: 526481 - DNA, 60 bp, Artificial
  Synthetic oligonucleotide
gttagaacacagatttgaagatataccagacaaaaagctcgcactaagtgttttagctaa

SEQ ID NO: 526482 - DNA, 60 bp, Artificial
  Synthetic oligonucleotide
gttagacggattcgacataccaccagagctgatcagatagagtggagcccccaggtcatc

SEQ ID NO: 526483 - DNA, 60 bp, Artificial
  Synthetic oligonucleotide
gttagaggaggtttacgatttcatgaatggcgaggcgaaggaggaggaagtagttcagga

SEQ ID NO: 526484 - DNA, 60 bp, Artificial
  Synthetic oligonucleotide
gttagaggtccaggcacgcactatcctaccagccgatccagtgttgtttgagaacgtggc

SEQ ID NO: 526485 - DNA, 60 bp, Artificial
  Synthetic oligonucleotide
gttagacgtgtcaggacacctgtatgtgacactgttgagtggatcatatgtcacggacct

SEQ ID NO: 526486 - DNA, 60 bp, Artificial
  Synthetic oligonucleotide
gttaggagctaatgatgtttggagaccttctactctaacaaaacgtaaaggatggtgctt

SEQ ID NO: 526487 - DNA, 60 bp, Artificial
  Synthetic oligonucleotide
gttataactccgcagttatcggaattcttccacgaaatggtcaaagcgtattaagtccta

SEQ ID NO: 526488 - DNA, 60 bp, Artificial
  Synthetic oligonucleotide
gtgtcccaattgatggtttcgaaatgccattaacctaaggtcagtaggtagagtggcgcc

SEQ ID NO: 526489 - DNA, 60 bp, Artificial
  Synthetic oligonucleotide
gtgtctggattgttgtcaacatactgatttgacttactgtagaggctgttctatatatca

SEQ ID NO: 526490 - DNA, 60 bp, Artificial
  Synthetic oligonucleotide
gtgtgacgaaaataaatggaatacatctgtggcaggtatattcaactgcttagaaccagt

SEQ ID NO: 526491 - DNA, 60 bp, Artificial
  Synthetic oligonucleotide
gtgtgtccacttaatgtgcagactcttggaattgggtgtctaactaccgatactgcaaca

SEQ ID NO: 526492 - DNA, 60 bp, Artificial
  Synthetic oligonucleotide
gtgtgtgatgacattagcttatgcagaaagaatcaaagttgtgactttcaatgcgccaga

SEQ ID NO: 526493 - DNA, 60 bp, Artificial
  Synthetic oligonucleotide
gtgtgtgcgaagcagcatttcgaagaagtgatgaatcgcataactgaaaggaacgatgca

SEQ ID NO: 526494 - DNA, 60 bp, Artificial
  Synthetic oligonucleotide
gtgttattgcggatttaattattctcatctcccaaatctagaacgcgactttaacatcgc

SEQ ID NO: 526495 - DNA, 60 bp, Artificial
  Synthetic oligonucleotide
gtgttgcttttgtctctaaggacatgagcttaatcatattgccgatcggcgtttaggcgc

SEQ ID NO: 526496 - DNA, 60 bp, Artificial
  Synthetic oligonucleotide
gtgttggcgacgccagagataccgtatacaatggagtcagcgaatgaaattgctcggatg

SEQ ID NO: 526497 - DNA, 60 bp, Artificial
  Synthetic oligonucleotide
gtgttgtcacgttcatacggcgatttggaatcacatggtacgtaaccacttgtttaacgc

SEQ ID NO: 526498 - DNA, 60 bp, Artificial
  Synthetic oligonucleotide
gtgtttcacatttccatgccaatgaatctttcttcctaggctttgatttaggaatcgatg

SEQ ID NO: 526499 - DNA, 60 bp, Artificial; identical to SEQ ID NO: 119829
  Synthetic oligonucleotide

SEQ ID NO: 526500 - DNA, 60 bp, Artificial
  Synthetic oligonucleotide
gttaaaaaatccttgagtcatggagcaaaagcaacgtaaatttactaaaaacatctttgt

SEQ ID NO: 526501 - DNA, 60 bp, Artificial
  Synthetic oligonucleotide
gttaaaaaatcgcatatgtcagctgcgatactacttgcacccggtgacgtgattaagcgt

SEQ ID NO: 526502 - DNA, 60 bp, Artificial
  Synthetic oligonucleotide
gttaaaaaatcgttcaagatggacacaatcgttgcgcgagcgctcactgtaatgagatca

SEQ ID NO: 526503 - DNA, 60 bp, Artificial
  Synthetic oligonucleotide
gttaaaaagagatcggtaccatgctatccaggttagtgtcgggtacggagacaagaataa

SEQ ID NO: 526504 - DNA, 60 bp, Artificial
  Synthetic oligonucleotide
gttaaaaagaggttggtgccatgctatccaggttagtatcgggtgcagaaacaagaatcg

SEQ ID NO: 526505 - DNA, 60 bp, Artificial
  Synthetic oligonucleotide
gttaaaaagaggttggtgccatgctatccaggttagttcccggtgtagaaactagaatag

SEQ ID NO: 526506 - DNA, 60 bp, Artificial
  Synthetic oligonucleotide
gttaaaaagatccagtgccgttgcagagatggggaaaattatcaaaagactcagcaaatt

SEQ ID NO: 526507 - DNA, 60 bp, Artificial
  Synthetic oligonucleotide
gttaaaaagtaccctctaactcgcagaagatggggaaaatcataaagtcgctgagtaggt

SEQ ID NO: 526508 - DNA, 60 bp, Artificial
  Synthetic oligonucleotide
gttaaaaagtccttggcatcccgcatcatgggtaaaatcatcaaatccctcgggaagttt

SEQ ID NO: 526509 - DNA, 60 bp, Artificial
  Synthetic oligonucleotide
gttaaaaagtggtgcgtaacttgcataatgggcaagttcattaaacaactgagtaagttt

SEQ ID NO: 526510 - DNA, 60 bp, Artificial
  Synthetic oligonucleotide
gttaaaaagtgtacccttagcgaagatgggtaaagtcatacgatctctaagccgattcgg

SEQ ID NO: 526511 - DNA, 60 bp, Artificial
  Synthetic oligonucleotide
gttaaaaagtgtcgctgccatgctatccgggctgatccaaaggtttgaggaagaaaagat

SEQ ID NO: 526512 - DNA, 60 bp, Artificial
  Synthetic oligonucleotide
gttaaaaagtgttctcctactcgcgaagatggggaagataattaaatcgctaagtagatt

SEQ ID NO: 526513 - DNA, 60 bp, Artificial
  Synthetic oligonucleotide
gttaaaaagttccctacgattacggaagatgggtaaaatcatcaaatcactaagccgatt

SEQ ID NO: 526514 - DNA, 60 bp, Artificial
  Synthetic oligonucleotide
gttaaaaatctcgagagatggacactatcgctgcaagagcactcactgtgatgcgggcat

SEQ ID NO: 526515 - DNA, 60 bp, Artificial
  Synthetic oligonucleotide
gttgcttgaatcctgtctagaacagttctcggccaacgtccgtgcaagaccagcgcaacc

SEQ ID NO: 526516 - DNA, 60 bp, Artificial
  Synthetic oligonucleotide
gttggaaatgattgacaagttgactacacgtgaaatagaacaagttgaattactaaaacg

SEQ ID NO: 526517 - DNA, 60 bp, Artificial
  Synthetic oligonucleotide
gttggaacgctcccgatgtccaccccgtcgttaaagccatacaactggcctacgatcacc

SEQ ID NO: 526518 - DNA, 60 bp, Artificial
  Synthetic oligonucleotide
gttggtagttgcgagcgtgttgcctttgtctctaaaggcacgaacctaatcattttaccg

SEQ ID NO: 526519 - DNA, 60 bp, Artificial
  Synthetic oligonucleotide
gttggtcccgttagacgcccataccttcactcagtcgctggtggcatgtcgtcattcatt

SEQ ID NO: 526520 - DNA, 60 bp, Artificial
  Synthetic oligonucleotide
gttgtcaaaaggacttgagtcgagggtcacggcgctcgagaaaacgtcacagatacactc

SEQ ID NO: 526521 - DNA, 60 bp, Artificial
  Synthetic oligonucleotide
gtttaaattcactatggcttctgagtttggaattttgtacactgatcagatctacgaaca

SEQ ID NO: 526522 - DNA, 60 bp, Artificial
  Synthetic oligonucleotide
gtttaagacggttagtgacgtggacatagagagggaatatcggaccgctctaccacaaat

SEQ ID NO: 526523 - DNA, 60 bp, Artificial
  Synthetic oligonucleotide
gtttaagcgcattatggatgaggaaagagcagcggctaacagggaacataaagtaattca

SEQ ID NO: 526524 - DNA, 60 bp, Artificial
  Synthetic oligonucleotide
gtttaattatcccttgtcatgaatctagctacaatcgccaagaattatagcatgcataat

SEQ ID NO: 526525 - DNA, 60 bp, Artificial
  Synthetic oligonucleotide
gtttacagttgacaaattgagacaattgtacgcaagacgaaagattgctgattacgactc

SEQ ID NO: 526526 - DNA, 60 bp, Artificial
  Synthetic oligonucleotide
gtttaggcgggttcagcgaatccgagtatgcacaaccgattattcgaacgttcgagagga

SEQ ID NO: 526527 - DNA, 60 bp, Artificial
  Synthetic oligonucleotide
gtttatttttccagaagccatgggaaagttcacatcttttttgaagcgcgcgggcaatgc

SEQ ID NO: 526528 - DNA, 60 bp, Artificial
  Synthetic oligonucleotide
gtttcaaaatacagattacacgtaattgtagcgaactgtcttttgactggaatgaagcat

SEQ ID NO: 526529 - DNA, 60 bp, Artificial
  Synthetic oligonucleotide
gtttcagagcacattcgaatgatgttcgaaagccgttttctcagtccttacgcaatgtat

SEQ ID NO: 526530 - DNA, 60 bp, Artificial
  Synthetic oligonucleotide
gtttcatggatcagaggcggaaacactaaatgacgcaaatccccgactacataaggtgta

SEQ ID NO: 526531 - DNA, 60 bp, Artificial
  Synthetic oligonucleotide
gtttccgaaactcggcggatcgggacatttttacaatcgcaatagattacagtgaatatg

SEQ ID NO: 526532 - DNA, 60 bp, Artificial
  Synthetic oligonucleotide
gtttcgaactaccattaacctaagatcagtaggtagagtggcgccccgaggtttgcaccg

SEQ ID NO: 526533 - DNA, 60 bp, Artificial
  Synthetic oligonucleotide
gtttctcgtatccctgcatacagggcaaccttgggacgccagatttccaatacaggagtc

SEQ ID NO: 526534 - DNA, 60 bp, Artificial
  Synthetic oligonucleotide
gtttgagattgtgaactacgaaacggaggattgcgaccacacacggtggagaataaatta

SEQ ID NO: 526535 - DNA, 60 bp, Artificial
  Synthetic oligonucleotide
gtttgcaccgcgtggagtggttgatccagcgatgcaaattcctactgctgtataacgggg

SEQ ID NO: 526536 - DNA, 60 bp, Artificial
  Synthetic oligonucleotide
gtttggaattttgtacactgatcagatctacgaacaaacattggagaagacgagctgtga

SEQ ID NO: 526537 - DNA, 60 bp, Artificial
  Synthetic oligonucleotide
gttttggatgtcaatgctaaaacgttatgcggggtgatcgcgaaacaaagttcacaaccc

SEQ ID NO: 526538 - DNA, 60 bp, Artificial
  Synthetic oligonucleotide
taaacagatcgcagccagctcatgataacttgatgggcacaatgtggttgaacgctggtt

SEQ ID NO: 526539 - DNA, 60 bp, Artificial
  Synthetic oligonucleotide
taaagtgaatgcaaacttagattcatcaatatctatatcgactaattcaaagaaggagaa

SEQ ID NO: 526540 - DNA, 60 bp, Artificial
  Synthetic oligonucleotide
taaagttggctggttataaagaacaggttactactaaggatgaagttgaacagcagatgg

SEQ ID NO: 526541 - DNA, 60 bp, Artificial
  Synthetic oligonucleotide
taaatacaagatcacagagacggagatagcgaatgctaaaaatctagatccggcaatcaa

SEQ ID NO: 526542 - DNA, 60 bp, Artificial
  Synthetic oligonucleotide
taaatcaggaattgcagcagtggaaattcaatctattgatgagttgtttactttgattag

SEQ ID NO: 526543 - DNA, 60 bp, Artificial
  Synthetic oligonucleotide
taaatgaacaggttctgcctaaaatgcgggtggagttgtctgcaatgaagagacgacgtg

SEQ ID NO: 526544 - DNA, 60 bp, Artificial
  Synthetic oligonucleotide
taaatgcctccatcttctcagcgccgggcctgaccaacctggtgtgacgtgggacaggca

SEQ ID NO: 526545 - DNA, 60 bp, Artificial
  Synthetic oligonucleotide
gttatacaatgtataggatcaagaacataccaaatagaagatagtgggtcaaaatcatca

SEQ ID NO: 526546 - DNA, 60 bp, Artificial
  Synthetic oligonucleotide
gttatgacgggcccgggtaagcgaacccacggaggggcgtgctgtcaggcgaacataaca

SEQ ID NO: 526547 - DNA, 60 bp, Artificial
  Synthetic oligonucleotide
gttatgcaccagttaactggggagcaggtgagactaatgactctacaactgtcgagccat

SEQ ID NO: 526548 - DNA, 60 bp, Artificial
  Synthetic oligonucleotide
gttatggcgcacatcccgcggcactaaatatcgttatgacggatgagatgtacgttgatt

SEQ ID NO: 526549 - DNA, 60 bp, Artificial
  Synthetic oligonucleotide
gttcaacgaatttttccacaaggcgggccttatcatttccaggctacatatatgttaacg

SEQ ID NO: 526550 - DNA, 60 bp, Artificial
  Synthetic oligonucleotide
gttcacagccgtattgtcaaataaaaattggaagagtgatcgcctttaaaccggttaaaa

SEQ ID NO: 526551 - DNA, 60 bp, Artificial
  Synthetic oligonucleotide
gttcaccattcaggactgtaaatataggagatcacgttggagcaaactctatttttggga

SEQ ID NO: 526552 - DNA, 60 bp, Artificial
  Synthetic oligonucleotide
gttcagagcgttggtaaagtaccacagatactgactttaaatgatattaccataatcatg

SEQ ID NO: 526553 - DNA, 60 bp, Artificial
  Synthetic oligonucleotide
gttcatataaagtgatcaaatactgtatagtcacaattgtcaatactcttttaaaattgg

SEQ ID NO: 526554 - DNA, 60 bp, Artificial
  Synthetic oligonucleotide
gttcatgagtttgtcgggcgcaatgcctcaggtgaacggcggattcgaccgtgtaatagt

SEQ ID NO: 526555 - DNA, 60 bp, Artificial
  Synthetic oligonucleotide
gttcatgttgggacgtgtcttattaaggtgggagctatctaaagcgcagcgtagcgcagt

SEQ ID NO: 526556 - DNA, 60 bp, Artificial
  Synthetic oligonucleotide
gttcccataagagagggtcaaattgtgaacccaacgttcatttccagataccgtcagatt

SEQ ID NO: 526557 - DNA, 60 bp, Artificial
  Synthetic oligonucleotide
gttccttcatttaattgatcacctctaaagggtccagggtaccttcttgacgtagtgcga

SEQ ID NO: 526558 - DNA, 60 bp, Artificial
  Synthetic oligonucleotide
gttcgatcacatttatcctactggttcagcgacatactgtcctggtgcaatcgcaaatgc

SEQ ID NO: 526559 - DNA, 60 bp, Artificial
  Synthetic oligonucleotide
gttcgcccgggatatagtccgagagatttggatcgagagcgtgataaatacatattagcg

SEQ ID NO: 526560 - DNA, 60 bp, Artificial
  Synthetic oligonucleotide
gttcgggttcgcaactgccactcattgacaataattcagtgcccgcggtgtcgcgtaata

SEQ ID NO: 526561 - DNA, 60 bp, Artificial
  Synthetic oligonucleotide
gttctaacagttttgttcacattacataaagcttcaattccaacaatgaaaatagcattg

SEQ ID NO: 526562 - DNA, 60 bp, Artificial
  Synthetic oligonucleotide
gttctaacatattagatataacagctgatcccacaacttctccacaaacagaacgaatga

SEQ ID NO: 526563 - DNA, 60 bp, Artificial
  Synthetic oligonucleotide
gttctatggatacaccatatatgaattcaacaatgagtgaaacattctcaacttctactt

SEQ ID NO: 526564 - DNA, 60 bp, Artificial
  Synthetic oligonucleotide
gttctcaaacacgttacacatcgattcgaggaaagcggataccacgtcatatcatacgat

SEQ ID NO: 526565 - DNA, 60 bp, Artificial
  Synthetic oligonucleotide
gttctgatgttcttgatataacagctgatccaaccacagcaccacaaactgagcgaatga

SEQ ID NO: 526566 - DNA, 60 bp, Artificial
  Synthetic oligonucleotide
gttctgcctaaaatgcgggtggaattatctgcaatgaagagacgacgcgcgatagcacat

SEQ ID NO: 526567 - DNA, 60 bp, Artificial
  Synthetic oligonucleotide
gttctttacagtaaaccccatcagacctgatggctggctaagaagccatagtcagccata

SEQ ID NO: 526568 - DNA, 60 bp, Artificial
  Synthetic oligonucleotide
gttgaaggaaagtgatgatcccgcagcaaagtataacgaatacttgaaagataaagcagc

SEQ ID NO: 526569 - DNA, 60 bp, Artificial
  Synthetic oligonucleotide
gttgagagtgaaatcggtgcagcggcaatagatggtttggtgcaaggtagcgttcactcc

SEQ ID NO: 526570 - DNA, 60 bp, Artificial
  Synthetic oligonucleotide
gttgaggcaatacagaattacgtgaaacctttttgtgcagcgtttggcattatcaacctg

SEQ ID NO: 526571 - DNA, 60 bp, Artificial
  Synthetic oligonucleotide
gttgattactgtagcattatttgctttgacaagagctcagaattatggacttaacttacc

SEQ ID NO: 526572 - DNA, 60 bp, Artificial
  Synthetic oligonucleotide
gttgatttctgtagcattatttgccttaactaaagctcagaactatggacttaatatacc

SEQ ID NO: 526573 - DNA, 60 bp, Artificial
  Synthetic oligonucleotide
gttgcacacaatactagaggatccagggatggcgtattttccttatatagcatctgtcct

SEQ ID NO: 526574 - DNA, 60 bp, Artificial
  Synthetic oligonucleotide
gtagagtggcgccccaaggtttacgtcgtgcagggtggttgacctcgcggcgtaaattcc

SEQ ID NO: 526575 - DNA, 60 bp, Artificial
  Synthetic oligonucleotide
gtagcctccgaggcttacgccactcttatcaccatgttagcacagtgtacggatatgcag

SEQ ID NO: 526576 - DNA, 60 bp, Artificial
  Synthetic oligonucleotide
gtagctaagcgtaatggcgggatacgatggaagcaacctgacaccgacgaggctccctcc

SEQ ID NO: 526577 - DNA, 60 bp, Artificial
  Synthetic oligonucleotide
gtagtagtggaagggacggacaattctggtagatggttatctgtaattctaattgagcca

SEQ ID NO: 526578 - DNA, 60 bp, Artificial
  Synthetic oligonucleotide
gtagtcatccagttataactggtggtacagtctcactacatccagctggagttacattgt

SEQ ID NO: 526579 - DNA, 60 bp, Artificial
  Synthetic oligonucleotide
gtagtgctagttaaaatgcctggatatgtattcggtaatgatgaattaatgacgaagcta

SEQ ID NO: 526580 - DNA, 60 bp, Artificial
  Synthetic oligonucleotide
gtagtggtggagggaacaaacaattcagataggtggctggccactatactaattgaacca

SEQ ID NO: 526581 - DNA, 60 bp, Artificial
  Synthetic oligonucleotide
gtataaagtagtgaagtattgcattgtaacgatttttaatacgctgttgaaattggcagg

SEQ ID NO: 526582 - DNA, 60 bp, Artificial
  Synthetic oligonucleotide
gtataaccacttactgatgccaataacattgcaagcattgactataaatcttgaggataa

SEQ ID NO: 526583 - DNA, 60 bp, Artificial
  Synthetic oligonucleotide
gtataacttgttatccattaactacggatgctatcaattatttgattttaactctccaga

SEQ ID NO: 526584 - DNA, 60 bp, Artificial
  Synthetic oligonucleotide
gtatagcggtagcggagaaagcgaaattgaattcatatgcgccagtttatttagaaaagc

SEQ ID NO: 526585 - DNA, 60 bp, Artificial
  Synthetic oligonucleotide
gtatatacgaattcgactagtggagagccatttttaacttcgacgctatgtttatactat

SEQ ID NO: 526586 - DNA, 60 bp, Artificial
  Synthetic oligonucleotide
gtatgaacaaattaaatgtgagggtgcatatccggtgttccctcattatgtaatcgatgc

SEQ ID NO: 526587 - DNA, 60 bp, Artificial
  Synthetic oligonucleotide
gtatgactgtgatgattattcattcctcgcacgtgacccaagattcaaacatcgggtata

SEQ ID NO: 526588 - DNA, 60 bp, Artificial; identical to SEQ ID NO: 122500
  Synthetic oligonucleotide

SEQ ID NO: 526589 - DNA, 60 bp, Artificial
  Synthetic oligonucleotide
gtatggtattgaatataccacaattctgaccattttgatatttatcatattattgaatta

SEQ ID NO: 526590 - DNA, 60 bp, Artificial
  Synthetic oligonucleotide
gtatggtattgaatataccacagttctaacctttctgatatcagtaattctattgaacta

SEQ ID NO: 526591 - DNA, 60 bp, Artificial
  Synthetic oligonucleotide
gtatgtctagcggcgcttgcacggggcgcactggccatacctgagtgtcggttgtgggaa

SEQ ID NO: 526592 - DNA, 60 bp, Artificial
  Synthetic oligonucleotide
gtattactgcattgtgtggaggtcctgtgcctcgcagtgacgattggcctatccatcgca

SEQ ID NO: 526593 - DNA, 60 bp, Artificial
  Synthetic oligonucleotide
gtattatcaaaaggacttgagtcgagggtcacggcgcttgagaaaacgtcccaaatacac

SEQ ID NO: 526594 - DNA, 60 bp, Artificial; identical to SEQ ID NO: 436304
  Synthetic oligonucleotide

SEQ ID NO: 526595 - DNA, 60 bp, Artificial
  Synthetic oligonucleotide
gtattgaacataaatggggcgatggttgatgcagagataaaggtgtcgaaaggaatgggg

SEQ ID NO: 526596 - DNA, 60 bp, Artificial
  Synthetic oligonucleotide
gtattgcgtcatgcacccgagctcattagggagttctcaaccgcagtaggactctctaaa

SEQ ID NO: 526597 - DNA, 60 bp, Artificial
  Synthetic oligonucleotide
gtatttcaccgcaccatagaaatgaatcgttcttcttaggcgtagatttagaaatagagt

SEQ ID NO: 526598 - DNA, 60 bp, Artificial
  Synthetic oligonucleotide
gtatttcgatgaagtcaaatctaacggtcatgaaaaaagtgttactgtaatcaccaataa

SEQ ID NO: 526599 - DNA, 60 bp, Artificial
  Synthetic oligonucleotide
gtatttggtgatcaaagaccgatcgatgtgtatagtttttgtaccgatatctttaagaaa

SEQ ID NO: 526600 - DNA, 60 bp, Artificial
  Synthetic oligonucleotide
gtattttccatacattgcatctgttctaacagttttgttcacattacataaagcttcaat

SEQ ID NO: 526601 - DNA, 60 bp, Artificial
  Synthetic oligonucleotide
gtcaactacttcgaccttaagttacctgttcccccaattagtgtattgtctgacactatt

SEQ ID NO: 526602 - DNA, 60 bp, Artificial
  Synthetic oligonucleotide
gtcaactggaaatgattgataaattgaccactagagaaatagaacaagtggaacttctaa

SEQ ID NO: 526603 - DNA, 60 bp, Artificial
  Synthetic oligonucleotide
gtcacaagagatagccgtgtcacagttaattgacttagctatgttgccactagacatgtt

SEQ ID NO: 526604 - DNA, 60 bp, Artificial
  Synthetic oligonucleotide
gtcacacgattaccgttcctaaatggaagaaaattgtcgttcaattttatttacggcaga

SEQ ID NO: 526605 - DNA, 60 bp, Artificial
  Synthetic oligonucleotide
ggtttcttcctcgagacggaggaggtgtatcaaccgggaagatggttcatgagagcagct

SEQ ID NO: 526606 - DNA, 60 bp, Artificial
  Synthetic oligonucleotide
ggtttgcacgttgtcgagtgatatgagcgtggcatttaagctaaatggtacatcagctga

SEQ ID NO: 526607 - DNA, 60 bp, Artificial
  Synthetic oligonucleotide
gtaaaaaatcctcatttcggacgagcagcatcaggcaagcgagatgtcttctgagaagca

SEQ ID NO: 526608 - DNA, 60 bp, Artificial
  Synthetic oligonucleotide
gtaaaaattccctcgtcagtacggcagagtatacggtacacgcggacgtaagcatcatat

SEQ ID NO: 526609 - DNA, 60 bp, Artificial
  Synthetic oligonucleotide
gtaaaaattctctcgtcagtacggcagagtctacggtacacgcgaaggtaagcactgcat

SEQ ID NO: 526610 - DNA, 60 bp, Artificial
  Synthetic oligonucleotide
gtaaaaatttccacgctacaggtatggcaacgaaacgcatcggagcgagaatgtccggct

SEQ ID NO: 526611 - DNA, 60 bp, Artificial
  Synthetic oligonucleotide
gtaaaacttccgggagagatggcgaatccgcaaccccgagaacagacaccacaacaacag

SEQ ID NO: 526612 - DNA, 60 bp, Artificial
  Synthetic oligonucleotide
gtaaaatatggcgacagctagaatgacctccatttgtgggagatccacagtgttgggtgg

SEQ ID NO: 526613 - DNA, 60 bp, Artificial
  Synthetic oligonucleotide
gtaaaatgttcggatcgcacacgatactgctattacaccagtcactccggaaactcaagc

SEQ ID NO: 526614 - DNA, 60 bp, Artificial
  Synthetic oligonucleotide
gtaaaatgttcggatcgcacacggtgctactgctgcatcactcactacgaaggatacgca

SEQ ID NO: 526615 - DNA, 60 bp, Artificial
  Synthetic oligonucleotide
gtaaaattttcctcatttcgagcgaacgccattcttctttgcaagatgtcttccgataag

SEQ ID NO: 526616 - DNA, 60 bp, Artificial
  Synthetic oligonucleotide
gtaaagttgagagatctaaagaagtatcagcggcgcagaaatccagcatagagaagaagg

SEQ ID NO: 526617 - DNA, 60 bp, Artificial
  Synthetic oligonucleotide
gtaaatgtaagaattgtaaatataagaaaaagtatttcgcactaagaatgaggatgaagc

SEQ ID NO: 526618 - DNA, 60 bp, Artificial
  Synthetic oligonucleotide
gtaagcacctccgggtcaaaatgcacataggctcccacctatgtgacggttagcgggact

SEQ ID NO: 526619 - DNA, 60 bp, Artificial
  Synthetic oligonucleotide
gtaagttcggaaagaaagtgggagatgcgctaacttcgtcaaccgcacagaagatttata

SEQ ID NO: 526620 - DNA, 60 bp, Artificial
  Synthetic oligonucleotide
gtaataagtcagcaaatcgaccatacgaggaaggagataatgaagaaagatgcgtacaac

SEQ ID NO: 526621 - DNA, 60 bp, Artificial
  Synthetic oligonucleotide
gtaataggatagaacaacttattttgcaatgtagactgtaagtaacatctagaggatgtg

SEQ ID NO: 526622 - DNA, 60 bp, Artificial
  Synthetic oligonucleotide
gtaattagtggtcctgatatggttcaagtttctatgaatgcgggggcgcgcgcagatata

SEQ ID NO: 526623 - DNA, 60 bp, Artificial
  Synthetic oligonucleotide
gtacaaatcgagaccctaactgaaggaaacgttacacttaaaccattctccgctgacggt

SEQ ID NO: 526624 - DNA, 60 bp, Artificial
  Synthetic oligonucleotide
gtacaactgagtgatgtgttaatgaacgttgatgttagaataccaaaggatatcgttaaa

SEQ ID NO: 526625 - DNA, 60 bp, Artificial
  Synthetic oligonucleotide
gtacagaaggctcaagacagaatagagctcttgttacaaagtcagttgaaccagaagtac

SEQ ID NO: 526626 - DNA, 60 bp, Artificial
  Synthetic oligonucleotide
gtacagcgaacattcgttccttgaccgtgcgtaccggcatcgacacctaaggtgtggcgc

SEQ ID NO: 526627 - DNA, 60 bp, Artificial
  Synthetic oligonucleotide
gtacagtcttaaaattaggagttaatgatacatggaggccgtcacctccaactaaatata

SEQ ID NO: 526628 - DNA, 60 bp, Artificial
  Synthetic oligonucleotide
gtaccacaaatattaactttggacaatgttatcacaatcatgcaatctatcatatatgaa

SEQ ID NO: 526629 - DNA, 60 bp, Artificial
  Synthetic oligonucleotide
gtaccggactggaataacttgggcagtttcttggacatcatactgaaaggaccagaactc

SEQ ID NO: 526630 - DNA, 60 bp, Artificial
  Synthetic oligonucleotide
gtacgattcaacattaaagttagacatgtctgaactagctgatttgattctaaacgaatg

SEQ ID NO: 526631 - DNA, 60 bp, Artificial
  Synthetic oligonucleotide
gtacgttaacaagtgatttgggcgtaattctgaaacacaacacaacaacggaagcgatac

SEQ ID NO: 526632 - DNA, 60 bp, Artificial
  Synthetic oligonucleotide
gtagaaaatgcacttcaatgagagattatttttgttacgcaattagtatgaataacctgg

SEQ ID NO: 526633 - DNA, 60 bp, Artificial
  Synthetic oligonucleotide
gtagagattgaactggaggtggaaggcgcgacgaagcctgcaggtgttccgtttacagcg

SEQ ID NO: 526634 - DNA, 60 bp, Artificial
  Synthetic oligonucleotide
gtgaatggtgtaaacgatttcagctttaatggaggttcattacctactgattttgtaatt

SEQ ID NO: 526635 - DNA, 60 bp, Artificial
  Synthetic oligonucleotide
gtgacaccaatggcaacacgagtacaacataatggagttatggtagatgcagaaataaag

SEQ ID NO: 526636 - DNA, 60 bp, Artificial
  Synthetic oligonucleotide
gtgaccttgaagcaacgggttcgcgtgtaatggatgccgcggattgtttccgaaactcgg

SEQ ID NO: 526637 - DNA, 60 bp, Artificial
  Synthetic oligonucleotide
gtgacttgggtgtaattctaaaacataatacaacaacggaggcgatacagacgtatatta

SEQ ID NO: 526638 - DNA, 60 bp, Artificial
  Synthetic oligonucleotide
gtgagcgggaatatggcggcgcttactgatctagcgaagcggtcaatacaatataacgct

SEQ ID NO: 526639 - DNA, 60 bp, Artificial
  Synthetic oligonucleotide
gtgatgttggcgcatatcgaattcaggatggaaatgacgtcattagtttgatgatttcgg

SEQ ID NO: 526640 - DNA, 60 bp, Artificial
  Synthetic oligonucleotide
gtgcaaggtgcagaactcattaaacgagtggttgaaaggatatacccaggagcaacattt

SEQ ID NO: 526641 - DNA, 60 bp, Artificial
  Synthetic oligonucleotide
gtgcactacgataagcccactaacggaaatcactatatcttgggtactctgacgcagatg

SEQ ID NO: 526642 - DNA, 60 bp, Artificial
  Synthetic oligonucleotide
gtgcagaaattcgcagatctagtcactgattcacctgtaatatcagctataatagacttt

SEQ ID NO: 526643 - DNA, 60 bp, Artificial
  Synthetic oligonucleotide
gtgcctgcggtatcacgtaacattcatggttggactggcagggcaggtaatcaattacat

SEQ ID NO: 526644 - DNA, 60 bp, Artificial
  Synthetic oligonucleotide
gtgcggttccaccttatacgaagaatggaatggatcgaagagcgatgccttctttaccag

SEQ ID NO: 526645 - DNA, 60 bp, Artificial
  Synthetic oligonucleotide
gtgcgtcgtccaatagagatcgatcggatccatagtgtacagcggctaaacgaggaattc

SEQ ID NO: 526646 - DNA, 60 bp, Artificial
  Synthetic oligonucleotide
gtgcgtcgttcgtctaagcgctgaaggcacgcgagtacagacgtcgggcgacctacgcac

SEQ ID NO: 526647 - DNA, 60 bp, Artificial
  Synthetic oligonucleotide
gtgcaacgcaaacacaaaaagcggagaaggctgcattcgcatcgtacgcggaagcgtttc

SEQ ID NO: 526648 - DNA, 60 bp, Artificial
  Synthetic oligonucleotide
gtgctgtgtggtcttcagttcattatcgacgccgagtgacgacggctagggggaaattca

SEQ ID NO: 526649 - DNA, 60 bp, Artificial
  Synthetic oligonucleotide
gtgcttttcaacccaacgaacgaaatccgaattctcaaccacgaacaagcagacaacact

SEQ ID NO: 526650 - DNA, 60 bp, Artificial
  Synthetic oligonucleotide
gtggaggatgtgatgagccaaaagaaattactatcaatgataggtgggggtgagaagcgt

SEQ ID NO: 526651 - DNA, 60 bp, Artificial
  Synthetic oligonucleotide
gtggataggtcttgtttcatactcaggtagtggattaaattggaggatacaggtcaattc

SEQ ID NO: 526652 - DNA, 60 bp, Artificial
  Synthetic oligonucleotide
gtggatcatatgtcacggatctattgtggtggtttaaaatgatattagagtggtcatcat

SEQ ID NO: 526653 - DNA, 60 bp, Artificial
  Synthetic oligonucleotide
gtggcagaaccatcctatcgttcaagtctcggctgacgttgaaaacaagaaaactgctca

SEQ ID NO: 526654 - DNA, 60 bp, Artificial
  Synthetic oligonucleotide
gtggcgcacatgattttgataattgcagctgtggtggcattgataacatctgccagtacg

SEQ ID NO: 526655 - DNA, 60 bp, Artificial
  Synthetic oligonucleotide
gtggcgctctcgtgtcacccgctggccagaaatttattcagcttgacaagtactctttct

SEQ ID NO: 526656 - DNA, 60 bp, Artificial
  Synthetic oligonucleotide
gtggctgtcttaatttgtgaagcacttaattcaatcaaagtcacacaatctgaaattgca

SEQ ID NO: 526657 - DNA, 60 bp, Artificial
  Synthetic oligonucleotide
gtgggattgaggtaacgcaaaaccgatgggaggagtggagttttgaagcgttaacaccag

SEQ ID NO: 526658 - DNA, 60 bp, Artificial
  Synthetic oligonucleotide
gtggtaaatttgggagctaccttcctgatgatggtttgtgcaaaaagcgagagaagcttg

SEQ ID NO: 526659 - DNA, 60 bp, Artificial
  Synthetic oligonucleotide
gtggtaacgctgtctttctaacccctggttccactgcctcttcttcaattaattacgttc

SEQ ID NO: 526660 - DNA, 60 bp, Artificial
  Synthetic oligonucleotide
gtggtgatcgccacaacggaagatgtcgctaacagcaacgcagaggctatcgtaaaatca

SEQ ID NO: 526661 - DNA, 60 bp, Artificial
  Synthetic oligonucleotide
gtggtttgaccgtggcgctctcgtgtcacccgctggccagaaatttattcagcttgacaa

SEQ ID NO: 526662 - DNA, 60 bp, Artificial
  Synthetic oligonucleotide
gtgtaggttcattggattgcgcgtcgaatcttcagtgttgagggtaaggaatcctacgtt

SEQ ID NO: 526663 - DNA, 60 bp, Artificial
  Synthetic oligonucleotide
gtcacatcacgcggtggttcgggtgctgcgttacgagacgcattaaaagctgctgaagtg

SEQ ID NO: 526664 - DNA, 60 bp, Artificial
  Synthetic oligonucleotide
gtcacgagatggaattgaggtacaacaagaccggtggccgggcatgcgattcgaggcggt

SEQ ID NO: 526665 - DNA, 60 bp, Artificial
  Synthetic oligonucleotide
gtcacttactcttcacagctggtggacggtttactaatttgactcaaaacatggcgcgtc

SEQ ID NO: 526666 - DNA, 60 bp, Artificial
  Synthetic oligonucleotide
gtcagagttagctgatttaatcttgaatgaatggttatgcaatccaatggatataacatt

SEQ ID NO: 526667 - DNA, 60 bp, Artificial
  Synthetic oligonucleotide
gtcagccatatcgcgtgtggttcaagccttaatcccgtttaactaatccggtcagcaccg

SEQ ID NO: 526668 - DNA, 60 bp, Artificial
  Synthetic oligonucleotide
gtcagctggaaatgattgataagctaactactagagaaattgagcaagttgaactactca

SEQ ID NO: 526669 - DNA, 60 bp, Artificial
  Synthetic oligonucleotide
gtcaggttgcatccaaatggtcatccatcagaaggtccaacgcagtacgttccctgacag

SEQ ID NO: 526670 - DNA, 60 bp, Artificial
  Synthetic oligonucleotide
gtcatattacgtaaagatgttgtgatgcgtggcttcataactgcaaacacgattttaaac

SEQ ID NO: 526671 - DNA, 60 bp, Artificial
  Synthetic oligonucleotide
gtcatgtcaacgaacagatcttgcccaagttgaagagtgacttaagtggaatgaagaaaa

SEQ ID NO: 526672 - DNA, 60 bp, Artificial
  Synthetic oligonucleotide
gtccaagcggtcaagatcattagacgcagctgctttttattatagagtttagatatagct

SEQ ID NO: 526673 - DNA, 60 bp, Artificial
  Synthetic oligonucleotide
gtccccgcaactgcagtatcagtatggcgctatactgtgtcggatttatgaaaggaacgg

SEQ ID NO: 526674 - DNA, 60 bp, Artificial
  Synthetic oligonucleotide
gtcctcacagtcgcgcgaacgcttcttcagagtcgatacccacttcgaacgattgactcg

SEQ ID NO: 526675 - DNA, 60 bp, Artificial
  Synthetic oligonucleotide
gtcctgggatgcgaatatgttgtggtgcgtcatggcttgggcacccaaatcgcagggagt

SEQ ID NO: 526676 - DNA, 60 bp, Artificial
  Synthetic oligonucleotide
gtccttaagagtgaaggtaaagatgacttcgtggcgaggatgtgcagcaccttagaatgc

SEQ ID NO: 526677 - DNA, 60 bp, Artificial
  Synthetic oligonucleotide
gtcctttttgggttcgactcatataacggtgtttcagtccaatatcttgatggcagacta

SEQ ID NO: 526678 - DNA, 60 bp, Artificial
  Synthetic oligonucleotide
gtcgaacgtgagagtatgactgaagaggcgatacaagagatagcagggatgacgtccgat

SEQ ID NO: 526679 - DNA, 60 bp, Artificial
  Synthetic oligonucleotide
gtcgccttagcaaccaacgacgcgaaatttgtacgacaagcgcatatactcttcaccgca

SEQ ID NO: 526680 - DNA, 60 bp, Artificial
  Synthetic oligonucleotide
gtcggattatgcaaaggcgttttacagcgacacgtatgaaactctagaccgatttttctg

SEQ ID NO: 526681 - DNA, 60 bp, Artificial
  Synthetic oligonucleotide
gtcggttctaacgcaaaccccgtgtctctgggttcatttgtagtcgattctcctgatgtg

SEQ ID NO: 526682 - DNA, 60 bp, Artificial
  Synthetic oligonucleotide
gtcgtctgtcttcggaagcggcggaacacttcaccgcaagccccattagacctgatgatt

SEQ ID NO: 526683 - DNA, 60 bp, Artificial
  Synthetic oligonucleotide
gtcgttagcaagtattacttttcacgtaaacatgtgagtgggacagtatctatatgttta

SEQ ID NO: 526684 - DNA, 60 bp, Artificial
  Synthetic oligonucleotide
gtcgttagttacaggtgaatcttacggtgaaagcgtcaagcaggctgtcttactcaatat

SEQ ID NO: 526685 - DNA, 60 bp, Artificial
  Synthetic oligonucleotide
gtcgttgaaagcgaatcctcaactaaagaccaaaaagatgacgaatcacagaaacccacc

SEQ ID NO: 526686 - DNA, 60 bp, Artificial
  Synthetic oligonucleotide
gtctagccgcgtttgcacgggacgcgctagccatgcctgagtgttagtcgtggggagtgt

SEQ ID NO: 526687 - DNA, 60 bp, Artificial
  Synthetic oligonucleotide
gtctattcaatcagatgtcagcgtttgtgcctatcgatcgtgagttgatggagctcgctc

SEQ ID NO: 526688 - DNA, 60 bp, Artificial
  Synthetic oligonucleotide
gtctgaaatagagactgtgatacacgctgaattttatataataccaagatcacaagagtc

SEQ ID NO: 526689 - DNA, 60 bp, Artificial
  Synthetic oligonucleotide
gtctggtgatgaaaattggcaaagttggctattaccaatggttctggtacgagaagggct

SEQ ID NO: 526690 - DNA, 60 bp, Artificial
  Synthetic oligonucleotide
gtctgtggacgttaggataccacgtgaagtgacaaagaacatagacgtcaaggcattcga

SEQ ID NO: 526691 - DNA, 60 bp, Artificial
  Synthetic oligonucleotide
gtcttgtaccataaaagtatgtccattgaatacgcagactttaggaataggttgtattac

SEQ ID NO: 526692 - DNA, 60 bp, Artificial
  Synthetic oligonucleotide
gtgaagaagaagatcggagttgaagttcaggtgttttctaaaggaatgagcaacttattt

SEQ ID NO: 526693 - DNA, 60 bp, Artificial
  Synthetic oligonucleotide
gtgaagctggagggcgacgctcgtcagacccaattttccaggacttttgactcgagatcg

SEQ ID NO: 526694 - DNA, 60 bp, Artificial
  Synthetic oligonucleotide
gtgaaggaaagcggtaatacgatatgtatacttaacagtcaagggtttgtgctacctcaa

SEQ ID NO: 526695 - DNA, 60 bp, Artificial
  Synthetic oligonucleotide
tatgaaacatggtggacagctatgggtttataatggagaaactccaaatgccactactac

SEQ ID NO: 526696 - DNA, 60 bp, Artificial
  Synthetic oligonucleotide
tatgaactcaacacgagaggaagtattcctaacttcgactttatgtttatattacccaac

SEQ ID NO: 526697 - DNA, 60 bp, Artificial
  Synthetic oligonucleotide
tatgaaggattagcgacgtgggttggatcgaactgcggtggtgttagagactatattatc

SEQ ID NO: 526698 - DNA, 60 bp, Artificial
  Synthetic oligonucleotide
tatgaccagcagatgcgagcattaattagtctgtggctcctctcgtatattggcgttgtg

SEQ ID NO: 526699 - DNA, 60 bp, Artificial
  Synthetic oligonucleotide
tatgagcttatcgagcgctatgccgcaagcaagtgggggctttgatcgtatgatagttac

SEQ ID NO: 526700 - DNA, 60 bp, Artificial
  Synthetic oligonucleotide
tatgagtggaggtgcggtgtccctacactttgcaggagtcacgttatctactcagtttac

SEQ ID NO: 526701 - DNA, 60 bp, Artificial
  Synthetic oligonucleotide
tatgcaccactgcttaaacggcgcaacgaagatttaagttacagctctacatgtcccatc

SEQ ID NO: 526702 - DNA, 60 bp, Artificial
  Synthetic oligonucleotide
tatgcacgctttcaagtgatatgagcgtggcgtttaagcttaatggtacatcaacggaaa

SEQ ID NO: 526703 - DNA, 60 bp, Artificial
  Synthetic oligonucleotide
tatgcattcttgaactgttgggtatcgagattgcagactactgtattcgccaggaggatg

SEQ ID NO: 526704 - DNA, 60 bp, Artificial
  Synthetic oligonucleotide
tatgccctaactatgtcatgttgaggtcttctgtgaataccaaagtggtgagaaatgtgg

SEQ ID NO: 526705 - DNA, 60 bp, Artificial
  Synthetic oligonucleotide
tatgcctacgttgcctgataatgtccaatatgtcatacagtgcataggatcaagaacata

SEQ ID NO: 526706 - DNA, 60 bp, Artificial
  Synthetic oligonucleotide
tatggagaaagtgtgaagcaagcggtaattttgaacgtcgtgggcgggggagattcgatt

SEQ ID NO: 526707 - DNA, 60 bp, Artificial
  Synthetic oligonucleotide
tatggatattactttgtattattatcaacaaactgatgaggcaaataaatggatttcaat

SEQ ID NO: 526708 - DNA, 60 bp, Artificial
  Synthetic oligonucleotide
tatggtcacatatgggtcggtgacgccttatcgtattacgttgactacaaccgtagccat

SEQ ID NO: 526709 - DNA, 60 bp, Artificial
  Synthetic oligonucleotide
tatggtcgcagggattgagtctctgtttgatgccttagcagcagctgtacgtacagaagg

SEQ ID NO: 526710 - DNA, 60 bp, Artificial
  Synthetic oligonucleotide
tatgtacccatcccgtgtgaacattcccctctttaacaagacagctgatttcgtcaacca

SEQ ID NO: 526711 - DNA, 60 bp, Artificial; identical to SEQ ID NO: 455078
  Synthetic oligonucleotide

SEQ ID NO: 526712 - DNA, 60 bp, Artificial
  Synthetic oligonucleotide
tatgttcgtctcgatcgtgatagagttcccacaatggtcggagtcacacgacagtcccgt

SEQ ID NO: 526713 - DNA, 60 bp, Artificial
  Synthetic oligonucleotide
tatgttgcgtctgcggtggcgcctttaagactgaatagcagtacgaaggtactggacatg

SEQ ID NO: 526714 - DNA, 60 bp, Artificial
  Synthetic oligonucleotide
tattaaagaaagcgttaacatcttatggcgaactaacgaaagcggaatttggtgaattaa

SEQ ID NO: 526715 - DNA, 60 bp, Artificial
  Synthetic oligonucleotide
tattaactgacgaagttaaacttttaatacgttccggaaaattaagaattgacggtggat

SEQ ID NO: 526716 - DNA, 60 bp, Artificial
  Synthetic oligonucleotide
tattaaggatgtggcacgtgcaacagcatacttcacctcgcccacgggagaccctaattg

SEQ ID NO: 526717 - DNA, 60 bp, Artificial
  Synthetic oligonucleotide
tattaatcatgattgcggcatcagatacttacaatagccgtatctggtggacaaacccat

SEQ ID NO: 526718 - DNA, 60 bp, Artificial
  Synthetic oligonucleotide
tattaatgaagtataatgctgattcagagttggatatgtcggaattggcggacctgatac

SEQ ID NO: 526719 - DNA, 60 bp, Artificial
  Synthetic oligonucleotide
tattaatttgggatgtgagtgcagatgggctgaaggggacaattgagtgggagaagcgga

SEQ ID NO: 526720 - DNA, 60 bp, Artificial
  Synthetic oligonucleotide
tattacagcggatccgacaacggcaccacagacagaaagaatgatgaggataaattggaa

SEQ ID NO: 526721 - DNA, 60 bp, Artificial
  Synthetic oligonucleotide
tattacctaagtttagacaaaaccatgactcagtacccatcgttgcaagcacacatattt

SEQ ID NO: 526722 - DNA, 60 bp, Artificial
  Synthetic oligonucleotide
tattagggagtgtgcaggaagcgatggggcgtaccttcagggaagcataccgcgagtttt

SEQ ID NO: 526723 - DNA, 60 bp, Artificial
  Synthetic oligonucleotide
tagttcagagcgttggtaaagtaccacaaatactgactttaaatgatattgtcataatca

SEQ ID NO: 526724 - DNA, 60 bp, Artificial
  Synthetic oligonucleotide
tagttcatggaaggatactttatcgcaattattcctaacgaaaggatggccaactggttc

SEQ ID NO: 526725 - DNA, 60 bp, Artificial
  Synthetic oligonucleotide
tagttccaggtggtcatgacgttttgattcaaacagatgagagtagattatccgattttc

SEQ ID NO: 526726 - DNA, 60 bp, Artificial
  Synthetic oligonucleotide
tagttgactacgtaaatcagataatacaggttatgtctaaaagatcaagatcattagatg

SEQ ID NO: 526727 - DNA, 60 bp, Artificial
  Synthetic oligonucleotide
tagtttggagaaggattgagaattttgcaatgccccaaggtaactcacagcagaccatgg

SEQ ID NO: 526728 - DNA, 60 bp, Artificial
  Synthetic oligonucleotide
tataaagagatttataccgaaaggtgtattctacgctttcataaataacgtaattacaga

SEQ ID NO: 526729 - DNA, 60 bp, Artificial
  Synthetic oligonucleotide
tataaagtgattaaatattgtatagttacgatcattaatactcttttgaaattggctgga

SEQ ID NO: 526730 - DNA, 60 bp, Artificial
  Synthetic oligonucleotide
tataaagtgctatgtaaggcggttaactcgtacgagaaactacttatagctgaaaatgat

SEQ ID NO: 526731 - DNA, 60 bp, Artificial
  Synthetic oligonucleotide
tataattcaagttggcggaccgaacgcattagatatcactgctgatccaacaacagttcc

SEQ ID NO: 526732 - DNA, 60 bp, Artificial
  Synthetic oligonucleotide
tataattggggaggtcggagtgaacgcgcacgataggcaactcgccttaggaggagtgtt

SEQ ID NO: 526733 - DNA, 60 bp, Artificial
  Synthetic oligonucleotide
tataatttggtactaatgaagtataacgttaacctgcaactggacatgtccgaattagcg

SEQ ID NO: 526734 - DNA, 60 bp, Artificial
  Synthetic oligonucleotide
tatacattaaaatctttgactagaataatggacttcattatttacagattcctctttatc

SEQ ID NO: 526735 - DNA, 60 bp, Artificial
  Synthetic oligonucleotide
tataccagacaaaaaacttgctatgagcattctagccaaaaataacgcgataacggcaaa

SEQ ID NO: 526736 - DNA, 60 bp, Artificial
  Synthetic oligonucleotide
tatactagaagctgcatcggaagaagtaccgttctttggcgctggaattgcaacagcaat

SEQ ID NO: 526737 - DNA, 60 bp, Artificial
  Synthetic oligonucleotide
tatactcaagctgataccaacagaccaaatcatgcgaacattttacgaaatttaggacaa

SEQ ID NO: 526738 - DNA, 60 bp, Artificial
  Synthetic oligonucleotide
tatatacggatgtgtcacaatgggattcgtcacagcacaacacgcagccattcagaaaag

SEQ ID NO: 526739 - DNA, 60 bp, Artificial
  Synthetic oligonucleotide
tatattgcgaggagacggcagaagccatctgtgtactcaaaacatgtcttgtgctcaatt

SEQ ID NO: 526740 - DNA, 60 bp, Artificial
  Synthetic oligonucleotide
tatatttcgtatggcgcaggatcggtactttttcaagtgccgcagggaacgcacaggaga

SEQ ID NO: 526741 - DNA, 60 bp, Artificial
  Synthetic oligonucleotide
tatcaaaggaccggatcgctttaaacctcatgtacagcacgaatacgacgaattcgacat

SEQ ID NO: 526742 - DNA, 60 bp, Artificial
  Synthetic oligonucleotide
tatcaaatctagagaactttaaagtctcatactcgacacccctgctatttgaaatgtgtt

SEQ ID NO: 526743 - DNA, 60 bp, Artificial
  Synthetic oligonucleotide
tatcaacgccagttacagggacgcaccctgctggagcattacctagcccgcgcaaatacc

SEQ ID NO: 526744 - DNA, 60 bp, Artificial
  Synthetic oligonucleotide
tatcacatgttggaatttaattcgctttcggttcaaaaatgatgatggcgaagcaagaat

SEQ ID NO: 526745 - DNA, 60 bp, Artificial
  Synthetic oligonucleotide
tatcagcaaacagatgaagcgaataaatggatatcgatgggacaatcttgtaccataaaa

SEQ ID NO: 526746 - DNA, 60 bp, Artificial
  Synthetic oligonucleotide
tatcagggcacttgtgaaatcgaatggaaatgttggacattgttcatcacaggaatcagt

SEQ ID NO: 526747 - DNA, 60 bp, Artificial
  Synthetic oligonucleotide
tatccatcgctcgtggtcctaaccctctccgcgatttactaatgtcttcattcagtcttg

SEQ ID NO: 526748 - DNA, 60 bp, Artificial
  Synthetic oligonucleotide
tatcgtctttcttggtgcgaagagtgaacccgttgctgacatgttatatcgtttatcgca

SEQ ID NO: 526749 - DNA, 60 bp, Artificial
  Synthetic oligonucleotide
tatctaaattggagttggtcaaagaaaataagcaggaagtattacatatacgcgataata

SEQ ID NO: 526750 - DNA, 60 bp, Artificial
  Synthetic oligonucleotide
tatctagcccttacaatgataagaaattcatcgaatggtattctaagacgtttgctaaaa

SEQ ID NO: 526751 - DNA, 60 bp, Artificial
  Synthetic oligonucleotide
tatctgaagaatatgagcttctaatctcggattctgaagatgatgactaatatcaattaa

SEQ ID NO: 526752 - DNA, 60 bp, Artificial
  Synthetic oligonucleotide
tatctggtgggaagaatgatgtaatgaggataccacgtttaaaatgcatagatgtgaaac

SEQ ID NO: 526753 - DNA, 60 bp, Artificial
  Synthetic oligonucleotide
tatctgtcgctaagtgtccctcaacgtgagactttcgtaaacgccctagggttgaaggaa

SEQ ID NO: 526754 - DNA, 60 bp, Artificial
  Synthetic oligonucleotide
tcaccaataaaggtgaaatgtcattggaatcttaccgaaagataggtgaaatattaagtg

SEQ ID NO: 526755 - DNA, 60 bp, Artificial
  Synthetic oligonucleotide
tcaccacagtggacgtgttcgcatttgcggcgcaattgcctatttgatggagtatgtgca

SEQ ID NO: 526756 - DNA, 60 bp, Artificial
  Synthetic oligonucleotide
tcaccgctactaacagcacaaaattacgggattaatctacccattacaggttcaatggat

SEQ ID NO: 526757 - DNA, 60 bp, Artificial
  Synthetic oligonucleotide
tcacgaagctataggaagtgaggaggagacgagaatattaccagtgaccgcgatgcgttt

SEQ ID NO: 526758 - DNA, 60 bp, Artificial
  Synthetic oligonucleotide
tcacgaggggttcacccgatttacctaggggcggtgcattatgaagtttcgtatagggag

SEQ ID NO: 526759 - DNA, 60 bp, Artificial
  Synthetic oligonucleotide
tcacggcgtgggatggacaggcagcgttaaatgttcataatccaacggcggcgaacgcaa

SEQ ID NO: 526760 - DNA, 60 bp, Artificial
  Synthetic oligonucleotide
tcacgtcattgaagatgaagttgacgttcaaaaacgtgtgttgatgacagttgatgattt

SEQ ID NO: 526761 - DNA, 60 bp, Artificial
  Synthetic oligonucleotide
tcacgtctgatctcgttagacgaacatccactttggagacagatgttggaggaatccgtg

SEQ ID NO: 526762 - DNA, 60 bp, Artificial
  Synthetic oligonucleotide
tcactagacgctgtatacacaaattcaactagtggagaatcatttctaacttcaacgcta

SEQ ID NO: 526763 - DNA, 60 bp, Artificial
  Synthetic oligonucleotide
tcacttcgtgggggacgggatgcaggattgggcgaatctacgtccggaacaaatcatatc

SEQ ID NO: 526764 - DNA, 60 bp, Artificial
  Synthetic oligonucleotide
tcagaatgcagatgtggatggacgcatacatactgcagtgggatctggaccaggcgcgca

SEQ ID NO: 526765 - DNA, 60 bp, Artificial
  Synthetic oligonucleotide
tcagaattagacatgtcagagttagctgacttaatacttaatgagtggctttgtaatcca

SEQ ID NO: 526766 - DNA, 60 bp, Artificial
  Synthetic oligonucleotide
tcagagacggctgttgcgatcgaggggcgtacacccgatttacctaggcgctgtgcatta

SEQ ID NO: 526767 - DNA, 60 bp, Artificial
  Synthetic oligonucleotide
tcagcaaatttggaaagagggtaggcgatgctttcacctcgaccaccgcacagaaaatct

SEQ ID NO: 526768 - DNA, 60 bp, Artificial
  Synthetic oligonucleotide
tcagctccctgggattcggacgatgtgtttatgttccactgtatatcacatcaccacttg

SEQ ID NO: 526769 - DNA, 60 bp, Artificial
  Synthetic oligonucleotide
tcagctggatcgcccggggtagcagtggatagaggagcagagggaaatgctgaatgtgcg

SEQ ID NO: 526770 - DNA, 60 bp, Artificial
  Synthetic oligonucleotide
tcagtgatgcccacgggtatgtgccacgtccctttagtatggtgtatgaccaatacctgt

SEQ ID NO: 526771 - DNA, 60 bp, Artificial
  Synthetic oligonucleotide
tcataaaaggaacagctaagttgaaaacagtacgtaaattagtggatgcggtaaaccatg

SEQ ID NO: 526772 - DNA, 60 bp, Artificial
  Synthetic oligonucleotide
tcataaactctgtgaagcagcgtaagtgtaggaatgaatatttgttagaatggtataacc

SEQ ID NO: 526773 - DNA, 60 bp, Artificial
  Synthetic oligonucleotide
tcataaagagataggcgatgaacgtgataagcgtatacttccaaaaactgcaatgagatt

SEQ ID NO: 526774 - DNA, 60 bp, Artificial
  Synthetic oligonucleotide
tcataaataacgtaattacagagaatgtattcatacaacctccattcaaattgaaagtat

SEQ ID NO: 526775 - DNA, 60 bp, Artificial
  Synthetic oligonucleotide
tcatactgctttaaaaacactgacccagtagaatacagaacgagattttcagaatatcca

SEQ ID NO: 526776 - DNA, 60 bp, Artificial
  Synthetic oligonucleotide
tcatcacgtagtctcactcttccaaattgtcttgtgtccccgtctttgcattctcgttcc

SEQ ID NO: 526777 - DNA, 60 bp, Artificial
  Synthetic oligonucleotide
tcatcgtccccacccattagtagaaatttagccctatgggttctacgcgagttaagccgt

SEQ ID NO: 526778 - DNA, 60 bp, Artificial
  Synthetic oligonucleotide
tcatgacttctctttacaacgcgtcttcaaatgtgatcatcaccgactctgaattagaat

SEQ ID NO: 526779 - DNA, 60 bp, Artificial
  Synthetic oligonucleotide
tcatgagagcagctcaagtggtcacgcctgtggtttgcggcccagatatgatccaggttt

SEQ ID NO: 526780 - DNA, 60 bp, Artificial
  Synthetic oligonucleotide
tcatgatttaacaattgccctgcggaaagaagtggacgacagaacacagaatgagagagc

SEQ ID NO: 526781 - DNA, 60 bp, Artificial
  Synthetic oligonucleotide
tcatgctgcgcaaaggtctggccaacgctctgtgcttgatgacctatatgccaacaccca

SEQ ID NO: 526782 - DNA, 60 bp, Artificial
  Synthetic oligonucleotide
tcatggaaagacacattgtcacagttatttttgacaaaaggatggccaactggttcaatt

SEQ ID NO: 526783 - DNA, 60 bp, Artificial
  Synthetic oligonucleotide
tcatggtcgtttcatgtagggttcagaaagcagaaactattagatgctgctttagaccag

SEQ ID NO: 526784 - DNA, 60 bp, Artificial
  Synthetic oligonucleotide
tattaggtgcgttaaaattcggagttaagatattaggcgataagatagatgttcccctct

SEQ ID NO: 526785 - DNA, 60 bp, Artificial
  Synthetic oligonucleotide
tattcaaggatctaaaatagtgggatatagaagattcatcactgaatatgttcgtttgat

SEQ ID NO: 526786 - DNA, 60 bp, Artificial
  Synthetic oligonucleotide
tattcggcacctcgtgcgttgctcatgctagagtgctcgtaccccgatgtgcgcatatta

SEQ ID NO: 526787 - DNA, 60 bp, Artificial
  Synthetic oligonucleotide
tattctctaatcttcagagagatatgatcacctgcgaggctgtgcaaacgttagtgactc

SEQ ID NO: 526788 - DNA, 60 bp, Artificial
  Synthetic oligonucleotide
tattctgtccgacttttcttcgctcgtatcaaatatccaggatatctcgcaattggttgt

SEQ ID NO: 526789 - DNA, 60 bp, Artificial
  Synthetic oligonucleotide
tattgagaatataaaccagtacgaggtattggaaaaagcagtggaatcttgcaacgtaat

SEQ ID NO: 526790 - DNA, 60 bp, Artificial
  Synthetic oligonucleotide
tattgccggtcggcgtttaggcgcttgtgatcgcgtggttagggggggattttacactta

SEQ ID NO: 526791 - DNA, 60 bp, Artificial
  Synthetic oligonucleotide
tattggggtactagcaacaccagaaatacccttcactacagaggcggcgaatgaaatcgc

SEQ ID NO: 526792 - DNA, 60 bp, Artificial
  Synthetic oligonucleotide
tatttaggtagaaaatgcacttcaatgagagattatttttgttacgcaattagtatgaat

SEQ ID NO: 526793 - DNA, 60 bp, Artificial
  Synthetic oligonucleotide
tattttaaatgttgcggggacattggaatcggcgccagacccgttgagcccaggggagca

SEQ ID NO: 526794 - DNA, 60 bp, Artificial
  Synthetic oligonucleotide
tattttattctgtcaagacaaagttagaatagttcctatacgaacggcgacgcatgagag

SEQ ID NO: 526795 - DNA, 60 bp, Artificial
  Synthetic oligonucleotide
tcaaaatgttcatataaagtgatcaaatattgtatagtcacaattattaatactctttta

SEQ ID NO: 526796 - DNA, 60 bp, Artificial
  Synthetic oligonucleotide
tcaaacggtccgtatttagttaaacatactatcaaattaaaacaggagagatggttaggg

SEQ ID NO: 526797 - DNA, 60 bp, Artificial; identical to SEQ ID NO: 105095
  Synthetic oligonucleotide

SEQ ID NO: 526798 - DNA, 60 bp, Artificial
  Synthetic oligonucleotide
tcaaatcaaacaggcgcaacgatggcgcagaaggtagaaaaagtggcatatgcatcgtat

SEQ ID NO: 526799 - DNA, 60 bp, Artificial
  Synthetic oligonucleotide
tcaaatgtttttaaaccgaaatcgaaagaattcatgacttctctttacaacgcgtcttca

SEQ ID NO: 526800 - DNA, 60 bp, Artificial
  Synthetic oligonucleotide
tcaacccttgctttcccaggctgtggaattgttggcatctgaggatcgcctgcgtaattt

SEQ ID NO: 526801 - DNA, 60 bp, Artificial
  Synthetic oligonucleotide
tcaagacgctcaggtacacacaatagtgcagaaagatgtgtgtaaacttgtagactggta

SEQ ID NO: 526802 - DNA, 60 bp, Artificial; identical to SEQ ID NO: 12663
  Synthetic oligonucleotide

SEQ ID NO: 526803 - DNA, 60 bp, Artificial
  Synthetic oligonucleotide
tcaagcccctaatagccgcatcctcaactatatcttcgatcgatcggatgttttctttaa

SEQ ID NO: 526804 - DNA, 60 bp, Artificial
  Synthetic oligonucleotide
tcaagtattgttgatttttctgttgacccacagctgtattgtgactataatttagtactt

SEQ ID NO: 526805 - DNA, 60 bp, Artificial
  Synthetic oligonucleotide
tcaagtcaaaaatctggaatagcagatgaaattgccgcatcacaaacattcaagaattat

SEQ ID NO: 526806 - DNA, 60 bp, Artificial
  Synthetic oligonucleotide
tcaatacggtgcagttgcgtcaggtgaaaaacaaactaaagcagcgaattcaattgctaa

SEQ ID NO: 526807 - DNA, 60 bp, Artificial
  Synthetic oligonucleotide
tcaatcagaaaaatattaagacgctagatgaatgggaaagtggaaaaaatccatatgaac

SEQ ID NO: 526808 - DNA, 60 bp, Artificial
  Synthetic oligonucleotide
tcaatcatatcgcgtgtggctcagccttaatcccgtttaaccaatccagcgagtgttgga

SEQ ID NO: 526809 - DNA, 60 bp, Artificial
  Synthetic oligonucleotide
tcaatggaggtactgtaaattatactttgtttcactaagtttctattttatgtgactctg

SEQ ID NO: 526810 - DNA, 60 bp, Artificial
  Synthetic oligonucleotide
tcacaactgatctggtcaaccatggtgatatgttttcagtagctttcaatgttatcaaat

SEQ ID NO: 526811 - DNA, 60 bp, Artificial
  Synthetic oligonucleotide
tcacaccaccatatgaatgaatcattcttcttaggatttgacctgagcattgatttggtt

SEQ ID NO: 526812 - DNA, 60 bp, Artificial
  Synthetic oligonucleotide
tcacacgcgaaacatactcgagaatatgcggaattttattcgcagtcaaatcaattatta

SEQ ID NO: 526813 - DNA, 60 bp, Artificial
  Synthetic oligonucleotide
tcacagctcagacaattataaagataagaaaatgttttcgcgcttaaaaacattcctaga

SEQ ID NO: 526814 - DNA, 60 bp, Artificial
  Synthetic oligonucleotide
taatacgttcaagacgagtgcatccgatatatatggggaatatgcattacgacattagtt

SEQ ID NO: 526815 - DNA, 60 bp, Artificial; identical to SEQ ID NO: 448162
  Synthetic oligonucleotide

SEQ ID NO: 526816 - DNA, 60 bp, Artificial
  Synthetic oligonucleotide
taatcagataaaacgggaagtagagaggcaaattaatacatgtccttattcaggctataa

SEQ ID NO: 526817 - DNA, 60 bp, Artificial
  Synthetic oligonucleotide
taatccatttaagggactgtcaactgatagaaagatggatgaagtttctcaagtaggaat

SEQ ID NO: 526818 - DNA, 60 bp, Artificial
  Synthetic oligonucleotide
taatctagctataggaaacacttatgcatcgccaatgcacgctcgacgtatgattcgatc

SEQ ID NO: 526819 - DNA, 60 bp, Artificial
  Synthetic oligonucleotide
taatgagtggatgagtacactatcacagttgtttttaacaaagggatggccaactggttc

SEQ ID NO: 526820 - DNA, 60 bp, Artificial
  Synthetic oligonucleotide
taatgatcgtgagaatgttttattgctaatactgctttcggccttagcggatgcatttag

SEQ ID NO: 526821 - DNA, 60 bp, Artificial
  Synthetic oligonucleotide
taatgattcacacttttcaattaatgtgttagagaacttacataatccaagtttcaaaat

SEQ ID NO: 526822 - DNA, 60 bp, Artificial
  Synthetic oligonucleotide
taatgatttgaccgtaactgaacgtgaaaaattaccaacttgggcttccaatttgatcac

SEQ ID NO: 526823 - DNA, 60 bp, Artificial
  Synthetic oligonucleotide
taatgtcggtactagcgccgactacatccagcctatcctgtccgcgttcgcccgtactct

SEQ ID NO: 526824 - DNA, 60 bp, Artificial
  Synthetic oligonucleotide
taattgtaaagaggtagctcacattgaacaacaaattctgccgcagattaagaaagcgat

SEQ ID NO: 526825 - DNA, 60 bp, Artificial
  Synthetic oligonucleotide
taatttactatctaagtctggataaaacaatgacccagtatccctcactacaggcgcaga

SEQ ID NO: 526826 - DNA, 60 bp, Artificial
  Synthetic oligonucleotide
tacaaagacgacactgcaaatggattatgcttcagcgaaattaacgtaggatgcacttcc

SEQ ID NO: 526827 - DNA, 60 bp, Artificial
  Synthetic oligonucleotide
tacaacctatttggacaacaagaacagataacagttgagaatgtttcaacaacgaaatgg

SEQ ID NO: 526828 - DNA, 60 bp, Artificial
  Synthetic oligonucleotide
tacaagaaagtatgccaatcggtacggaggaccgcgcccgagcacctacggaaacagtgc

SEQ ID NO: 526829 - DNA, 60 bp, Artificial
  Synthetic oligonucleotide
tacaagctagcatagtttcaactaaggcgttactttatgagacgtatctatcctcggtgt

SEQ ID NO: 526830 - DNA, 60 bp, Artificial
  Synthetic oligonucleotide
tacaaggagaagattactgccctacgaagataatactaggatacgtatccctaaggaaga

SEQ ID NO: 526831 - DNA, 60 bp, Artificial
  Synthetic oligonucleotide
tacacacagtagtacaaagggacgtgtgtaaattggtcgagtggtatcatgggcgtgaaa

SEQ ID NO: 526832 - DNA, 60 bp, Artificial
  Synthetic oligonucleotide
tacacgccacgatgttggttgcggccgcaattgcgttattgacgtcggtgtgtacactgt

SEQ ID NO: 526833 - DNA, 60 bp, Artificial
  Synthetic oligonucleotide
tacacgctatgccgaatactagatccgactgtcctctacgccccatacgagtcgaacgga

SEQ ID NO: 526834 - DNA, 60 bp, Artificial
  Synthetic oligonucleotide
tacacttcttggacttcttatttacctcctattctaggcggtggttttggtctcattgtt

SEQ ID NO: 526835 - DNA, 60 bp, Artificial
  Synthetic oligonucleotide
tacataccatgtagcatgaatcacgactgggtttagtccatgcttgcataggggcaaata

SEQ ID NO: 526836 - DNA, 60 bp, Artificial
  Synthetic oligonucleotide
tacatacctaataccgcaaccaggagcgcctacagacatgtatgagttacggaatattat

SEQ ID NO: 526837 - DNA, 60 bp, Artificial
  Synthetic oligonucleotide
tacatatgacattgctgatagcagcggttgtcgctctgctgacatcggtttgtacgttgt

SEQ ID NO: 526838 - DNA, 60 bp, Artificial
  Synthetic oligonucleotide
tacatgctgtcaaagtctccagaagatattggaccatctgattctgcttcaaacgatcca

SEQ ID NO: 526839 - DNA, 60 bp, Artificial; identical to SEQ ID NO: 449357
  Synthetic oligonucleotide

SEQ ID NO: 526840 - DNA, 60 bp, Artificial
  Synthetic oligonucleotide
tacattctataattcaagaaccaggaatggcgtattttccttatattgcatctgttttga

SEQ ID NO: 526841 - DNA, 60 bp, Artificial
  Synthetic oligonucleotide
tacatttgagatagttgcgtcgtctgaaaaattagtaattactgacgttgtaaatggtgt

SEQ ID NO: 526842 - DNA, 60 bp, Artificial
  Synthetic oligonucleotide
taccaccggaactcaccagatagagtgaagctccaaggtcactatgtcgtgggattggca

SEQ ID NO: 526843 - DNA, 60 bp, Artificial
  Synthetic oligonucleotide
taccacggatacgaaggcattcgataaggttgcaacttcgatcttcaacaccgtggctaa

SEQ ID NO: 526844 - DNA, 60 bp, Artificial
  Synthetic oligonucleotide
taccactatatctaatagatgaggtgcaaaagaagtatgaactacagagcgttggtagtt

SEQ ID NO: 526845 - DNA, 60 bp, Artificial
  Synthetic oligonucleotide
taaatggggcgatggttgatgcagaaataaaggtatcgaaagggatggggatcgtggcgc

SEQ ID NO: 526846 - DNA, 60 bp, Artificial
  Synthetic oligonucleotide
taaatggtacttttattactaatgaagagttggaactggaatattccaataagtatgtta

SEQ ID NO: 526847 - DNA, 60 bp, Artificial
  Synthetic oligonucleotide
taaattaatagtgcgatcaactgatgagatagatatgacaaaagaaattaatcaaaagaa

SEQ ID NO: 526848 - DNA, 60 bp, Artificial
  Synthetic oligonucleotide
taaattacgatcccagctgggctatgaaatttgcagttacgttaaaggaaccagttcccg

SEQ ID NO: 526849 - DNA, 60 bp, Artificial
  Synthetic oligonucleotide
taaattatgatcccagttgggctatgaaatttgcagttacgttaaaggagccagtcccta

SEQ ID NO: 526850 - DNA, 60 bp, Artificial
  Synthetic oligonucleotide
taaattggaaaaaatggtggcaagtcttttacaccgtcgttgactacgtaaatcaaataa

SEQ ID NO: 526851 - DNA, 60 bp, Artificial
  Synthetic oligonucleotide
taaatttagccgcaacgatgattatgatgttcatggcgaagaacgaaaaagtaataagtc

SEQ ID NO: 526852 - DNA, 60 bp, Artificial
  Synthetic oligonucleotide
taacacaatcacttgtacagtggccggggcaggactacgtcaaaccacgctgacttttag

SEQ ID NO: 526853 - DNA, 60 bp, Artificial
  Synthetic oligonucleotide
taacacgcgtgttcaagttaattacggacctacaggtgaacccttagattttcagattgg

SEQ ID NO: 526854 - DNA, 60 bp, Artificial
  Synthetic oligonucleotide
taacagtaagccccatcggacctgatggttggttgagaagccacaaccaatcatatcgcg

SEQ ID NO: 526855 - DNA, 60 bp, Artificial
  Synthetic oligonucleotide
taacatctttcgcttcttgggcagaatttcaggcctttcaagacgatgacactcagaaat

SEQ ID NO: 526856 - DNA, 60 bp, Artificial
  Synthetic oligonucleotide
taaccgagacagctcctcaaaaaaggaaggtgttggaggggaggtgcaggaggaaaccac

SEQ ID NO: 526857 - DNA, 60 bp, Artificial
  Synthetic oligonucleotide
taacggacgcgtggccggctcagttagactttacgattgcagggactgacgtagatataa

SEQ ID NO: 526858 - DNA, 60 bp, Artificial; identical to SEQ ID NO: 447347
  Synthetic oligonucleotide

SEQ ID NO: 526859 - DNA, 60 bp, Artificial
  Synthetic oligonucleotide
taactgatgagatcgcccgtgcgattgaatctaaatacggtacgaaggttgatgtttaca

SEQ ID NO: 526860 - DNA, 60 bp, Artificial
  Synthetic oligonucleotide
taactgtactatttgcattacataaggcctcagttccaaccatgaagattgctcttaaaa

SEQ ID NO: 526861 - DNA, 60 bp, Artificial; identical to SEQ ID NO: 447468
  Synthetic oligonucleotide

SEQ ID NO: 526862 - DNA, 60 bp, Artificial
  Synthetic oligonucleotide
taagaaaatacagtatggagccgtagcatcaggggagaaacaaacgaaagcagccaattc

SEQ ID NO: 526863 - DNA, 60 bp, Artificial
  Synthetic oligonucleotide
taagagaagagatagagatgatgcgtcaggaattggaagcaatggggccaatagagggag

SEQ ID NO: 526864 - DNA, 60 bp, Artificial
  Synthetic oligonucleotide
taagccgattcggcaaaaaagttgggagtgcgctgacatccaacactgcaaaaaagatct

SEQ ID NO: 526865 - DNA, 60 bp, Artificial
  Synthetic oligonucleotide
taagccgtttcggcaagacggttgggaacgcgttaacgtctaatacagcgaagaaaatct

SEQ ID NO: 526866 - DNA, 60 bp, Artificial
  Synthetic oligonucleotide
taagcgagcaaaggaaatgtgttaatgatttacacttttcaattaatgtgttagagaact

SEQ ID NO: 526867 - DNA, 60 bp, Artificial
  Synthetic oligonucleotide
taagcttacgggcatagatttgagccatttgaaggtggccgacattcatccacacatcat

SEQ ID NO: 526868 - DNA, 60 bp, Artificial
  Synthetic oligonucleotide
taaggagataacggatgcgttcggaaaggagttgaatgaagtctatgaatttatgaatgg

SEQ ID NO: 526869 - DNA, 60 bp, Artificial
  Synthetic oligonucleotide
taaggagcgcaattgagatagaatcagaggggatgcaggaagaagcgatacaggaaatag

SEQ ID NO: 526870 - DNA, 60 bp, Artificial
  Synthetic oligonucleotide
taaggattggtggacgtgaagttggcagtggagtggatgaggtaatcaccaaccagcttg

SEQ ID NO: 526871 - DNA, 60 bp, Artificial
  Synthetic oligonucleotide
taagggcacgaacctgatcgttttaccggtaggcgtctaactcacgctgatgtagccgca

SEQ ID NO: 526872 - DNA, 60 bp, Artificial
  Synthetic oligonucleotide
taagttacataccacggatacgaaagcattcgataaggtcgcaacttcgatcttcaatac

SEQ ID NO: 526873 - DNA, 60 bp, Artificial
  Synthetic oligonucleotide
taataagagttgatggtgatgacaactacgccgtgttgcaatttaatacggaggtgacta

SEQ ID NO: 526874 - DNA, 60 bp, Artificial
  Synthetic oligonucleotide
taatacctctctaccaaacgaactgatcttaacggcaggtgatgtcactgtagcgcgctt

SEQ ID NO: 526875 - DNA, 60 bp, Artificial
  Synthetic oligonucleotide
tagaccgggtaatcgtagtctatttgttatgccaactagcccagactggaacatggacgt

SEQ ID NO: 526876 - DNA, 60 bp, Artificial
  Synthetic oligonucleotide
tagacgacgtgcttcctcgaattcttacattagtgatcttgcatcttctatcggacgtag

SEQ ID NO: 526877 - DNA, 60 bp, Artificial
  Synthetic oligonucleotide
tagacgcttacgtactgcagtgggatctggatcaagcgcaaaaggatctggagaacgcac

SEQ ID NO: 526878 - DNA, 60 bp, Artificial
  Synthetic oligonucleotide
tagactggcggttgaggaaccatctttcacgataactagaacacgtgtgtcaaagctgta

SEQ ID NO: 526879 - DNA, 60 bp, Artificial
  Synthetic oligonucleotide
tagagacgggagtggcaatcgaaatcgagggggtgatgagccagaagaagctactgagta

SEQ ID NO: 526880 - DNA, 60 bp, Artificial
  Synthetic oligonucleotide
tagagcgggttggaagatgatcgatgcttcatcgcgaagtcacactcttcctgattgtct

SEQ ID NO: 526881 - DNA, 60 bp, Artificial
  Synthetic oligonucleotide
tagagtgtttgctacatataagaataatgctaagagtggtaatattactgacttcaattt

SEQ ID NO: 526882 - DNA, 60 bp, Artificial
  Synthetic oligonucleotide
tagattatagtgagtatgacacgcacctcacgagatataactttagaagcggcatgattc

SEQ ID NO: 526883 - DNA, 60 bp, Artificial
  Synthetic oligonucleotide
tagcaaccataggagttttagcgacgccggagataccttacacgatggagtcggctaatg

SEQ ID NO: 526884 - DNA, 60 bp, Artificial
  Synthetic oligonucleotide
tagcagatcttatattaaatgaatggctgtgcaatcctatggatatatcactttactatt

SEQ ID NO: 526885 - DNA, 60 bp, Artificial
  Synthetic oligonucleotide
tagcaggagtgacagtgagtgtagggggtgtggatatgagggcaggacggataatcgcgt

SEQ ID NO: 526886 - DNA, 60 bp, Artificial
  Synthetic oligonucleotide
tagccattatgctttaccctcgaacgcgctgtaggacttcagccaccctacagcgtgggc

SEQ ID NO: 526887 - DNA, 60 bp, Artificial
  Synthetic oligonucleotide
tagcgaactgtcttttgactggaatgaagcatgcaagcttgttaaaaatgtcagtgcgta

SEQ ID NO: 526888 - DNA, 60 bp, Artificial
  Synthetic oligonucleotide
tagcgtaaatcataaattagatgtcacatctacaacatgtacaatacggaattgtaacaa

SEQ ID NO: 526889 - DNA, 60 bp, Artificial
  Synthetic oligonucleotide
taggaatttaattcgttatcggtttgaaggtgggtatggcagagcaagaatagaaagcgc

SEQ ID NO: 526890 - DNA, 60 bp, Artificial
  Synthetic oligonucleotide
taggacgcgagagactacggttgcggcgagcgttcggtgtcatcttgcgagactacgcat

SEQ ID NO: 526891 - DNA, 60 bp, Artificial
  Synthetic oligonucleotide
taggcgcgttcctagacataattctgaatgggacggagttgggagatgatgaagacgaga

SEQ ID NO: 526892 - DNA, 60 bp, Artificial
  Synthetic oligonucleotide
tagggaatatatcacctgattatatacaaaatttggcaacgataggagtactggcgacgc

SEQ ID NO: 526893 - DNA, 60 bp, Artificial
  Synthetic oligonucleotide
tagggagctgcaattacatatcttgagaggacccatacatttccaaaggcgtgcgatatt

SEQ ID NO: 526894 - DNA, 60 bp, Artificial
  Synthetic oligonucleotide
tagggctttagtgaaatcaaatctttacgtgggacattgttcttcagaagaaaagatata

SEQ ID NO: 526895 - DNA, 60 bp, Artificial
  Synthetic oligonucleotide
tagggtgggtcgcactacagagcaactgcttgatcaatatgccattgctttgcatgtcat

SEQ ID NO: 526896 - DNA, 60 bp, Artificial
  Synthetic oligonucleotide
tagtatgaataaccttgaaatgatcaatgactccttaaataattgggaatctaaacaatt

SEQ ID NO: 526897 - DNA, 60 bp, Artificial
  Synthetic oligonucleotide
tagtattgggatgagtcctaattataggtttaggcaaagtatgtggataggacttgtttc

SEQ ID NO: 526898 - DNA, 60 bp, Artificial
  Synthetic oligonucleotide
tagtcacaattattaatactcttttaaaattggctggatataaagaacaggttactacta

SEQ ID NO: 526899 - DNA, 60 bp, Artificial
  Synthetic oligonucleotide
tagtgagagctgataagttggcgctcatgctattggaatcgtttcgtagttacaagaaga

SEQ ID NO: 526900 - DNA, 60 bp, Artificial
  Synthetic oligonucleotide
tagtggaaaaaatgctatcatacgcaaagcataccagagagtatgcagaattctactcgc

SEQ ID NO: 526901 - DNA, 60 bp, Artificial
  Synthetic oligonucleotide
tagtgttaaaagaataccaggtaaatcatcatcaattataaagtgtactagacttatgaa

SEQ ID NO: 526902 - DNA, 60 bp, Artificial
  Synthetic oligonucleotide
tagttaatgattcggatttacaggcacacgttttaagaggcccgaaacattttcaacgaa

SEQ ID NO: 526903 - DNA, 60 bp, Artificial
  Synthetic oligonucleotide
taccaggtgtaatgaggtccagttatgatatacgtgagcttcgacaaaagattaagaatg

SEQ ID NO: 526904 - DNA, 60 bp, Artificial
  Synthetic oligonucleotide
taccagtcaagcgacgtcgatcatttgaagacacagatcaaatccctccaaagtgccgtc

SEQ ID NO: 526905 - DNA, 60 bp, Artificial
  Synthetic oligonucleotide
taccataaaagtgtgcccattaaatacacagactttaggaataggttgtactactacaaa

SEQ ID NO: 526906 - DNA, 60 bp, Artificial
  Synthetic oligonucleotide
taccatacgaatattttattgcacggcacgcggtagtagaaaagatgttatcacacgcga

SEQ ID NO: 526907 - DNA, 60 bp, Artificial
  Synthetic oligonucleotide
taccattgactggaaatcgcgctatgagcaattggagcaaaggtttgaatcattgaaatc

SEQ ID NO: 526908 - DNA, 60 bp, Artificial
  Synthetic oligonucleotide
tacccacgtgcgtgccgtatccgatacggggaaaaggagaacgactcggagattcgattc

SEQ ID NO: 526909 - DNA, 60 bp, Artificial
  Synthetic oligonucleotide
taccgcggtcgcagcagccacagatacacatttacagtgcgccgtgggattcggatgatg

SEQ ID NO: 526910 - DNA, 60 bp, Artificial
  Synthetic oligonucleotide
taccggacatttcattgtgtagatttatcggattacgtgttgaatcttctgtgttaaggg

SEQ ID NO: 526911 - DNA, 60 bp, Artificial
  Synthetic oligonucleotide
taccgtattggatataaatggtgctctaatagatgcgagaataaaatatcaaaggggatg

SEQ ID NO: 526912 - DNA, 60 bp, Artificial
  Synthetic oligonucleotide
tacctcctacacgagcgaatgtgcgaggcgcttgcgatctcagggcacgtcaacgaaagg

SEQ ID NO: 526913 - DNA, 60 bp, Artificial
  Synthetic oligonucleotide
tacctgtcaatgttcaatacataatacaatgcattgggtcaagaacctatcaaatagaag

SEQ ID NO: 526914 - DNA, 60 bp, Artificial
  Synthetic oligonucleotide
tacgaatgggctagtgattctagtgtgtcgcgttttgcggttctggacatcagcggaatt

SEQ ID NO: 526915 - DNA, 60 bp, Artificial
  Synthetic oligonucleotide
tacgatcaccagtaccgtgtcaccgcacgttatctctccgatcccttagcttcggcttta

SEQ ID NO: 526916 - DNA, 60 bp, Artificial
  Synthetic oligonucleotide
tacgattagatgagagcgaacgagataagggaacgttcaagattccaaagggggtgctcc

SEQ ID NO: 526917 - DNA, 60 bp, Artificial
  Synthetic oligonucleotide
tacgcaagaacggtgggaagagtggaaattcgaaacgatctcatgcgtaccaatggccac

SEQ ID NO: 526918 - DNA, 60 bp, Artificial
  Synthetic oligonucleotide
tacgcaatttcgcctagctcgctgcaaattcatctcgacccaatgcaggctttacccctc

SEQ ID NO: 526919 - DNA, 60 bp, Artificial
  Synthetic oligonucleotide
tacgccaaagggggaatcggtcgaggagatgagattagcagaaggagtcatatctaaatt

SEQ ID NO: 526920 - DNA, 60 bp, Artificial
  Synthetic oligonucleotide
tacgcgcatacgcgcacaatgacgcggagatccccgctggtgacgcattaattacgctta

SEQ ID NO: 526921 - DNA, 60 bp, Artificial
  Synthetic oligonucleotide
tacgcttcgtacgcggaggcatttagagatgatttgagattgcgccaaattaagaagcat

SEQ ID NO: 526922 - DNA, 60 bp, Artificial
  Synthetic oligonucleotide
tacggaaatgtatgagttaagaaatttcatgaaactaaagggttattcacatgtagatcg

SEQ ID NO: 526923 - DNA, 60 bp, Artificial
  Synthetic oligonucleotide
tacggtcaacttacgttgatggatgccgtagagtatgtgatagacgacaaacatttatga

SEQ ID NO: 526924 - DNA, 60 bp, Artificial
  Synthetic oligonucleotide
tacgtggggctttgagaagatcagatacgctttaggccctggcgggatgacggggtggta

SEQ ID NO: 526925 - DNA, 60 bp, Artificial
  Synthetic oligonucleotide
tacgtgtataacttgttatctattaactacggatgttatcaactattcgattttaattct

SEQ ID NO: 526926 - DNA, 60 bp, Artificial; identical to SEQ ID NO: 450601
  Synthetic oligonucleotide

SEQ ID NO: 526927 - DNA, 60 bp, Artificial
  Synthetic oligonucleotide
tactcaatattctaggagccggagatgacatcccagatccattaagtccgggtgaaagag

SEQ ID NO: 526928 - DNA, 60 bp, Artificial
  Synthetic oligonucleotide
tactgtatactctaactctactcaagaaggagtatttctaacatccacgttatgtttgta

SEQ ID NO: 526929 - DNA, 60 bp, Artificial
  Synthetic oligonucleotide
tactgttgatatgtgcaacggatgcgtactcacgtcgcatatggagatcaaatccatacc

SEQ ID NO: 526930 - DNA, 60 bp, Artificial
  Synthetic oligonucleotide
tacttcttggtcaatttcattgtatatcaatggttgaagaatttttcttttctacattat

SEQ ID NO: 526931 - DNA, 60 bp, Artificial
  Synthetic oligonucleotide
tagaaccagtagagttggataatattcactacgttttacttaattatgaggtgaactggg

SEQ ID NO: 526932 - DNA, 60 bp, Artificial
  Synthetic oligonucleotide
atagctgcatcaggtcattttattaaattgcaaatcattcgtcatgcttggtcgaaagtg

SEQ ID NO: 526933 - DNA, 60 bp, Artificial
  Synthetic oligonucleotide
atagctgtaacggagaaagcgaaactgaattcgtatgcaccagtttatttagaaaaacgt

SEQ ID NO: 526934 - DNA, 60 bp, Artificial
  Synthetic oligonucleotide
ataggatacaggacggacaagatatcataagcataatgttaacatcgtgcggggtggagg

SEQ ID NO: 526935 - DNA, 60 bp, Artificial
  Synthetic oligonucleotide
ataggcaactgaggggacacggatttatatttgtaagcacgaggaagaccgtacaactga

SEQ ID NO: 526936 - DNA, 60 bp, Artificial
  Synthetic oligonucleotide
ataggggcttgcttgagcgggggggtttatctaaagatgatctgctacatcaatctgata

SEQ ID NO: 526937 - DNA, 60 bp, Artificial; identical to SEQ ID NO: 330097
  Synthetic oligonucleotide

SEQ ID NO: 526938 - DNA, 60 bp, Artificial
  Synthetic oligonucleotide
atagtagataaatttattagtagtacaagacaacataaatgtagaaatgaatgtatgaca

SEQ ID NO: 526939 - DNA, 60 bp, Artificial
  Synthetic oligonucleotide
atagttacgatcattaatactcttttgaaattggctggatataaagagcaggttactaca

SEQ ID NO: 526940 - DNA, 60 bp, Artificial
  Synthetic oligonucleotide
atagtttatgatgatgagttgcagatgcacgtgctacgtgggccgatacactttcagcgc

SEQ ID NO: 526941 - DNA, 60 bp, Artificial
  Synthetic oligonucleotide
atataaaggatgagattttacctcggtttaaaaaagctatggatgaagagaaagaaattt

SEQ ID NO: 526942 - DNA, 60 bp, Artificial
  Synthetic oligonucleotide
atataatggagaaactccgaatgtgaccactaagtactactcaactacaaattatgattc

SEQ ID NO: 526943 - DNA, 60 bp, Artificial
  Synthetic oligonucleotide
atatatacagagagcgtttatgtcactgtctagtcaaaaatcaggaattgctgacgagat

SEQ ID NO: 526944 - DNA, 60 bp, Artificial
  Synthetic oligonucleotide
atatatgataaattattacttgatgatgtgaattttactaggatgtcattcttaccagcg

SEQ ID NO: 526945 - DNA, 60 bp, Artificial
  Synthetic oligonucleotide
atatattagagatctgtttcctcaattatataggtggtgggtgtctccagagctcacata

SEQ ID NO: 526946 - DNA, 60 bp, Artificial
  Synthetic oligonucleotide
atatcaatcatggattacctcccatacaaaatacgaggaatgttgtgccagtatccttgt

SEQ ID NO: 526947 - DNA, 60 bp, Artificial
  Synthetic oligonucleotide
atatcaatgggaacagactgcacggtaaaagtttgtccactcaatacacaaaccttagga

SEQ ID NO: 526948 - DNA, 60 bp, Artificial
  Synthetic oligonucleotide
atatgacaaaagaaattaatcaaaagaacgtaagaacgctaaaagagtgggagagcggaa

SEQ ID NO: 526949 - DNA, 60 bp, Artificial
  Synthetic oligonucleotide
atatgacactgctgatagcggcggtcgttgctctgttgacatcggtttgcacgttgtcga

SEQ ID NO: 526950 - DNA, 60 bp, Artificial
  Synthetic oligonucleotide
atatgcaaaacatacaagagaatatgcagaattctactcacaatcaaatcaattattatc

SEQ ID NO: 526951 - DNA, 60 bp, Artificial
  Synthetic oligonucleotide
atatgcaaatactacaaaggataaaccaattcaaacgtcgacactatgtttatattaccc

SEQ ID NO: 526952 - DNA, 60 bp, Artificial
  Synthetic oligonucleotide
atatgctgaagacagctcatttaccgcccagtccattatcgccactacatcgttggctta

SEQ ID NO: 526953 - DNA, 60 bp, Artificial
  Synthetic oligonucleotide
atattaagtgcgatctggaaacgtggcaaggcattagctgctccctgcatcgattacatc

SEQ ID NO: 526954 - DNA, 60 bp, Artificial
  Synthetic oligonucleotide
atattgttaaatcaccccacatcgcgtcatctcagactacagttaatttatacattcgta

SEQ ID NO: 526955 - DNA, 60 bp, Artificial
  Synthetic oligonucleotide
atcaactcaaattggagacactgaatggaagaacactctgtctcaattattcctgactaa

SEQ ID NO: 526956 - DNA, 60 bp, Artificial
  Synthetic oligonucleotide
atcaagatagagtcgaagagccgagtctagtgcgtgtagatgataccatttctcaaccac

SEQ ID NO: 526957 - DNA, 60 bp, Artificial
  Synthetic oligonucleotide
atcaagatagagttgaagaactgagtttagtgcgcgtggatgataccatttctcaaccgc

SEQ ID NO: 526958 - DNA, 60 bp, Artificial
  Synthetic oligonucleotide
atcaagctttgttttattattacgtaattactaatggtcgtttttctagtggttttagtg

SEQ ID NO: 526959 - DNA, 60 bp, Artificial
  Synthetic oligonucleotide
atcaatggatactgtatattccaactctactcgagaagaagtatttctaacatccacatt

SEQ ID NO: 526960 - DNA, 60 bp, Artificial
  Synthetic oligonucleotide
atcacaaattccgtgttgtctttacgtgctaagctgactttgccaacgtatcgttatccc

SEQ ID NO: 526961 - DNA, 60 bp, Artificial
  Synthetic oligonucleotide
atcaccatgttagatcgtgaaaaggtgtggttacagtgttataaaagtttttctgagcca

SEQ ID NO: 526962 - DNA, 60 bp, Artificial
  Synthetic oligonucleotide
atcacgaccttcaagcaacgttgggtgcgatcaaatggatttctccttaactaaaggtat

SEQ ID NO: 526963 - DNA, 60 bp, Artificial
  Synthetic oligonucleotide
ataaagttagttcactagtttcatctgttgaatggtatcttaaatcaatggaattgccag

SEQ ID NO: 526964 - DNA, 60 bp, Artificial
  Synthetic oligonucleotide
ataaatccgcaattatactgtgactataacattgtactgatgaaatataatgctaattca

SEQ ID NO: 526965 - DNA, 60 bp, Artificial
  Synthetic oligonucleotide
ataaatgagtccttcttcattgcttttgatttagagctggaatttgtacattttgaagac

SEQ ID NO: 526966 - DNA, 60 bp, Artificial
  Synthetic oligonucleotide
ataaatgctttaagtggaattgatctttctcatttacgaacaccgaaaatagaacctacg

SEQ ID NO: 526967 - DNA, 60 bp, Artificial
  Synthetic oligonucleotide
ataaattttgcacttgacatgaaagtaccatgctcaggagtaatgacagccatatacttg

SEQ ID NO: 526968 - DNA, 60 bp, Artificial
  Synthetic oligonucleotide
ataacctcgaatcataaaacattagctactgaggtacgtaattgcaagtggtgttcagtt

SEQ ID NO: 526969 - DNA, 60 bp, Artificial
  Synthetic oligonucleotide
ataacttctacgccgcggtcgacgtcgcattcgctacacttaacatcacgtctacgttcg

SEQ ID NO: 526970 - DNA, 60 bp, Artificial
  Synthetic oligonucleotide
ataatcaaacatcgcatacctcagtttatggatcagtatcatgttgtgtctacataccta

SEQ ID NO: 526971 - DNA, 60 bp, Artificial
  Synthetic oligonucleotide
ataatcgcgtgggatggacaagcggttctgcagatacataatcctacccaacagaatgca

SEQ ID NO: 526972 - DNA, 60 bp, Artificial
  Synthetic oligonucleotide
atacaaatatgacgtgaaagttccgcacttaactttcggagtattgtttatctcagataa

SEQ ID NO: 526973 - DNA, 60 bp, Artificial; identical to SEQ ID NO: 124359
  Synthetic oligonucleotide

SEQ ID NO: 526974 - DNA, 60 bp, Artificial
  Synthetic oligonucleotide
atacaaccgagaaattttacaaaaatttgggaacgatttggacttagtctacaaattcgc

SEQ ID NO: 526975 - DNA, 60 bp, Artificial
  Synthetic oligonucleotide
atacaagtcaaaagaagtgactgcatctttgtaagaggttgagctgccgtcgtctgtcca

SEQ ID NO: 526976 - DNA, 60 bp, Artificial
  Synthetic oligonucleotide
atacactcgagttggacggatccccttcaggtagtggaagaccttgacactaagctggat

SEQ ID NO: 526977 - DNA, 60 bp, Artificial
  Synthetic oligonucleotide
atacagggtccaataaacagagctgttgctcaaaacgcctatgtgtgagggctgttatgg

SEQ ID NO: 526978 - DNA, 60 bp, Artificial
  Synthetic oligonucleotide
atacatacagagagcatttatgtcattatctagtcaaaaatcaggaatagctgacgaaat

SEQ ID NO: 526979 - DNA, 60 bp, Artificial
  Synthetic oligonucleotide
atacatatttacagtgcgccatgggattcggatgacgtgttcttttttcactgcgtgtcg

SEQ ID NO: 526980 - DNA, 60 bp, Artificial
  Synthetic oligonucleotide
ataccttggctcgttattacgatgtacggccaggaataatgggtcgctcgttggctagga

SEQ ID NO: 526981 - DNA, 60 bp, Artificial
  Synthetic oligonucleotide
ataccttttgatgtgcaaaagtttgcagatctagtaactgactctccggtcatctcagcc

SEQ ID NO: 526982 - DNA, 60 bp, Artificial
  Synthetic oligonucleotide
atacgatccaatcgcaaacgatatgaaatacaataacatatatgttcatcgcaccttcgt

SEQ ID NO: 526983 - DNA, 60 bp, Artificial
  Synthetic oligonucleotide
atacgcaaagttagaaataataaactacgctattaaaaatggtgcgtggattagcttatt

SEQ ID NO: 526984 - DNA, 60 bp, Artificial
  Synthetic oligonucleotide
atacgcgagatattatacgcttatgtaaagcgaagggcagatggagcggatatactgaac

SEQ ID NO: 526985 - DNA, 60 bp, Artificial
  Synthetic oligonucleotide
atacgtttatgttgactactgggatgattcacaagcatttaggaatatggtatatgttag

SEQ ID NO: 526986 - DNA, 60 bp, Artificial
  Synthetic oligonucleotide
atactgaatgttgctggagtccatcagaccgttccggaccctctgaacgcggttgaaatc

SEQ ID NO: 526987 - DNA, 60 bp, Artificial
  Synthetic oligonucleotide
atactggtggcattggaacacagcctcagaaagagtggaattttcaactaccacaattgg

SEQ ID NO: 526988 - DNA, 60 bp, Artificial
  Synthetic oligonucleotide
atacttttgaagaaataccatttgacgtaaataaatttgttgatctagtgactgattctc

SEQ ID NO: 526989 - DNA, 60 bp, Artificial
  Synthetic oligonucleotide
atagaccaagcgattatcgatctggagaacgcgagaagggatctagtgacggaggaagag

SEQ ID NO: 526990 - DNA, 60 bp, Artificial
  Synthetic oligonucleotide
atagatgtcccactcttcctaaaaaatgcgtgactgcagtgatctcgggacttatactta

SEQ ID NO: 526991 - DNA, 60 bp, Artificial
  Synthetic oligonucleotide
atagcagacaattcgtggaaggatactttatcgcagttgttcttgacaaaaggatggcca

SEQ ID NO: 526992 - DNA, 60 bp, Artificial
  Synthetic oligonucleotide
atagcgcgttgctgaaggaatcgaaagcgcgttctcttttagcggcggggtacgagttag

SEQ ID NO: 526993 - DNA, 60 bp, Artificial
  Synthetic oligonucleotide
atcgggagagtgtatgcattcaagccaacaaaaaatccagagccaaagggctacgtgttg

SEQ ID NO: 526994 - DNA, 60 bp, Artificial
  Synthetic oligonucleotide
atcgtacgcggaagcgtttcgtgatgatgtgagactcaggcagattaagcgtcatgtcaa

SEQ ID NO: 526995 - DNA, 60 bp, Artificial
  Synthetic oligonucleotide
atcgtactggaactttcaatttcccgctatgtgatagagttaatgtaatgattgagccat

SEQ ID NO: 526996 - DNA, 60 bp, Artificial
  Synthetic oligonucleotide
atcgtggcgccatatacaaggaatgattttgataggcgggagttgccggaactacccggt

SEQ ID NO: 526997 - DNA, 60 bp, Artificial
  Synthetic oligonucleotide
atcgtggtctagcgaccaaccgtgttcaattgtcgtcactactgtcaagttcaaactcgc

SEQ ID NO: 526998 - DNA, 60 bp, Artificial
  Synthetic oligonucleotide
atctaaatacggtacgaaggttgatgtttacagggatgaaacgtcagcacagataattga

SEQ ID NO: 526999 - DNA, 60 bp, Artificial
  Synthetic oligonucleotide
atctaacgcatctacgtacaccaaagattgagccaagcgtagtatccactattttggagt

SEQ ID NO: 527000 - DNA, 60 bp, Artificial
  Synthetic oligonucleotide
atctaagaccggagcagatcgtgtcgctaatgatgatgcaacacgcgatgttggttccag

SEQ ID NO: 527001 - DNA, 60 bp, Artificial
  Synthetic oligonucleotide
atctaagtcatatgaccactccaaagatacagcccaaaacactagaggcgatattggatg

SEQ ID NO: 527002 - DNA, 60 bp, Artificial
  Synthetic oligonucleotide
atctacaacgaggggcgctttatgtttatgcagcataaacctctggctgctgatcaatcg

SEQ ID NO: 527003 - DNA, 60 bp, Artificial
  Synthetic oligonucleotide
atctacgataaattaatagtgcgatcaactgatgagatagatatgacaaaagaaattaat

SEQ ID NO: 527004 - DNA, 60 bp, Artificial
  Synthetic oligonucleotide
atctatcatcattatgtaacgggttatcagaagcagttttgtggtatttaccgattacgc

SEQ ID NO: 527005 - DNA, 60 bp, Artificial
  Synthetic oligonucleotide
atctatgtgagaggttgagttaccgtcgtctgtcttcggaagcggcggaactcttcaccg

SEQ ID NO: 527006 - DNA, 60 bp, Artificial
  Synthetic oligonucleotide
atctcaggttttggttcatgctatgcccgtaaggtagttgaattaccaatgtctgttacg

SEQ ID NO: 527007 - DNA, 60 bp, Artificial
  Synthetic oligonucleotide
atctctaaatcgcctggtcgtttggatgtggaagagtataacgtaatacgttcacgcttc

SEQ ID NO: 527008 - DNA, 60 bp, Artificial
  Synthetic oligonucleotide
atctgtagctattactggatcattaagattatttccatcagaacgagtattaactactaa

SEQ ID NO: 527009 - DNA, 60 bp, Artificial
  Synthetic oligonucleotide
atcttatggaagatagacacagtccaacatcattaatgcaagtggtacgtaactgcatca

SEQ ID NO: 527010 - DNA, 60 bp, Artificial
  Synthetic oligonucleotide
atcttgacactaagctggatcaatactggacggccctgaatctgatgattgattcatccg

SEQ ID NO: 527011 - DNA, 60 bp, Artificial
  Synthetic oligonucleotide
atcttgtacaataaaagtgtgtccattgaatacacagactctaggaataggatgtacaac

SEQ ID NO: 527012 - DNA, 60 bp, Artificial
  Synthetic oligonucleotide
atgaaaggaggggcggtaacgttacacacagcgggagtgacattatctacacaattcacc

SEQ ID NO: 527013 - DNA, 60 bp, Artificial
  Synthetic oligonucleotide
atgaaaggcgaggtggtgcggacaaagcataacgaacaaattattcgccggtttggagcg

SEQ ID NO: 527014 - DNA, 60 bp, Artificial
  Synthetic oligonucleotide
atgaaagtactagctttgagacatagtgtggctcaggtgtatgcagatacacagatttat

SEQ ID NO: 527015 - DNA, 60 bp, Artificial
  Synthetic oligonucleotide
atgaaagtattagctttaagacacagtgtggctcaggtatatgcagatacgcaaacctat

SEQ ID NO: 527016 - DNA, 60 bp, Artificial
  Synthetic oligonucleotide
atgaacagagtgaggacgcaagcgatgatgaacaacccaagactcacatcacgaaagagt

SEQ ID NO: 527017 - DNA, 60 bp, Artificial
  Synthetic oligonucleotide
atgaactattaccttctagcgacttttatagattcagctgctataacaccgacgaacatg

SEQ ID NO: 527018 - DNA, 60 bp, Artificial
  Synthetic oligonucleotide
atgaagaaagatgcgtacaacgaggcagtgaggatgagtataacggagctcagtgaggtg

SEQ ID NO: 527019 - DNA, 60 bp, Artificial
  Synthetic oligonucleotide
atgaatcagatggcagatgattgggcagaggaggttcgaaaacaagatgaggacgctgcg

SEQ ID NO: 527020 - DNA, 60 bp, Artificial
  Synthetic oligonucleotide
atgaatcctcacgcgtactcgcttggtatatacccgagtcacaatggacggaaaatggat

SEQ ID NO: 527021 - DNA, 60 bp, Artificial
  Synthetic oligonucleotide
atgaattgcagagtgtcggtagctgcgagcgcgttgcttttgtttccaaaggcacgaacc

SEQ ID NO: 527022 - DNA, 60 bp, Artificial
  Synthetic oligonucleotide
atgaattggactgacttaattacaaattattcaccatctagagaggataatttacaacga

SEQ ID NO: 527023 - DNA, 60 bp, Artificial
  Synthetic oligonucleotide
atgacattgcgcacggaagatacactccaggtgttatacctccagtgaatgttgacagac

SEQ ID NO: 527024 - DNA, 60 bp, Artificial
  Synthetic oligonucleotide
atcacgtcacttctttggaatttgatcctttagacccagaagtcaatttaattagccaag

SEQ ID NO: 527025 - DNA, 60 bp, Artificial
  Synthetic oligonucleotide
atcactacccgctccatccggtgacggaatttcgacagaatctcgcgatcgcaatccttt

SEQ ID NO: 527026 - DNA, 60 bp, Artificial
  Synthetic oligonucleotide
atcactgcatatcgacttacctgctcccacaaccgggagcggatacggatatgtatgagt

SEQ ID NO: 527027 - DNA, 60 bp, Artificial
  Synthetic oligonucleotide
atcagacttggtgccgaactttatgatgcgtgatccatcgcatgcttttaatggggtgaa

SEQ ID NO: 527028 - DNA, 60 bp, Artificial
  Synthetic oligonucleotide
atcaggtggactgggttataaatggtctgaaatttcatttaaaccagctaattatcaata

SEQ ID NO: 527029 - DNA, 60 bp, Artificial
  Synthetic oligonucleotide
atcagtaggtagagtggcgccccgaggttcgtatcgtgtagagtggttgatctcacgatg

SEQ ID NO: 527030 - DNA, 60 bp, Artificial
  Synthetic oligonucleotide
atcagtaggtagagtggcgccccgaggtttgcaccgcgtggagtggttgatccagcgatg

SEQ ID NO: 527031 - DNA, 60 bp, Artificial
  Synthetic oligonucleotide
atcagttcgatgtattaacaaaagcagtggagtcatgtaacaaaatagcacaagaagagg

SEQ ID NO: 527032 - DNA, 60 bp, Artificial
  Synthetic oligonucleotide
atcataaattggacgtgacaacaaacacttgtacgattagaaattgtaaaaaattaggac

SEQ ID NO: 527033 - DNA, 60 bp, Artificial
  Synthetic oligonucleotide
atcatacgcgaagtgacatagcgtacaatcgtgtactacatggggatctccatataatgg

SEQ ID NO: 527034 - DNA, 60 bp, Artificial
  Synthetic oligonucleotide
atcatatggagaagcggtgaaacaagcggtcgtgttgaatatagtggggggagcggatga

SEQ ID NO: 527035 - DNA, 60 bp, Artificial
  Synthetic oligonucleotide
atcattattttaaatataacgctactacagggatggaggcgttaattcgtactgcaatac

SEQ ID NO: 527036 - DNA, 60 bp, Artificial
  Synthetic oligonucleotide
atccaacgttcgaccgaggaactaaaacaaagacagatccagattcatgtagttgattgg

SEQ ID NO: 527037 - DNA, 60 bp, Artificial
  Synthetic oligonucleotide
atccaatgttcgaccgaggaattaaaacagagacagattcaaatccatttagttgattgg

SEQ ID NO: 527038 - DNA, 60 bp, Artificial
  Synthetic oligonucleotide
atccacagttatattgcgattataacatagtagtggtaaaatatagtacggaactacaac

SEQ ID NO: 527039 - DNA, 60 bp, Artificial
  Synthetic oligonucleotide
atcggcaggagcggcggacggagacgcttgcaagtttgtgcgatgctacattaggcgagt

SEQ ID NO: 527040 - DNA, 60 bp, Artificial
  Synthetic oligonucleotide
atcggattacgcgtcgaatcttctgtgttaagggttcggaaccccacgcttcatgagaca

SEQ ID NO: 527041 - DNA, 60 bp, Artificial
  Synthetic oligonucleotide
atcgcttctttttcaattgatccgcaattatattgtgattataatgtagtgttaatgaag

SEQ ID NO: 527042 - DNA, 60 bp, Artificial
  Synthetic oligonucleotide
atcgctacaatgtgggtgggaggtgatcaattatttgattatgacgattattcggcacct

SEQ ID NO: 527043 - DNA, 60 bp, Artificial
  Synthetic oligonucleotide
atcgcaacgaggtgatacgcctgatactttccctcctcccctaccagtcaagcgacgtcg

SEQ ID NO: 527044 - DNA, 60 bp, Artificial
  Synthetic oligonucleotide
atcgatgccaagagtcgcgctggatatactcgacaaagcaatgtcaaatcaaacgggcgc

SEQ ID NO: 527045 - DNA, 60 bp, Artificial
  Synthetic oligonucleotide
atcgaatgcagttaagacaaatgcagatgctggcgtgtctatggattcatcagcacaatc

SEQ ID NO: 527046 - DNA, 60 bp, Artificial
  Synthetic oligonucleotide
atccttgagtcatggagcaaaagcagcgtaaatttactaaaaacatctttgttttggatg

SEQ ID NO: 527047 - DNA, 60 bp, Artificial
  Synthetic oligonucleotide
atccttctccggtctactttgctttcagccatgcgcgctggaccagtactgtacgttgag

SEQ ID NO: 527048 - DNA, 60 bp, Artificial
  Synthetic oligonucleotide
atccttatgaaccaaaggaagtgactgcagcgatgtgagaggttgagctgccgtcgactg

SEQ ID NO: 527049 - DNA, 60 bp, Artificial
  Synthetic oligonucleotide
atcctgaattgtatgcagtttaagttggagatggacgacttggcacacaatggattcgaa

SEQ ID NO: 527050 - DNA, 60 bp, Artificial
  Synthetic oligonucleotide
atccggatagggggttcatcgttgttattgtcactacagaggacgtagccaacagtaatg

SEQ ID NO: 527051 - DNA, 60 bp, Artificial
  Synthetic oligonucleotide
atcccgtttaaccaatccagcgaatgttggacgttaatggaaggaatggtcttaatgtga

SEQ ID NO: 527052 - DNA, 60 bp, Artificial
  Synthetic oligonucleotide
atccatgtttacgtggcgcgttgatcgcgtctgaatgcaagcttggtgacgtgtaccata

SEQ ID NO: 527053 - DNA, 60 bp, Artificial
  Synthetic oligonucleotide
atccagaacttaaatcagagcgagatcgtgtatactacgactgatagggtaattggagct

SEQ ID NO: 527054 - DNA, 60 bp, Artificial
  Synthetic oligonucleotide
atccacatctatgctgctccctgggattccgacgaggttttcttcttccactgcgtgtca

SEQ ID NO: 527055 - DNA, 60 bp, Artificial
  Synthetic oligonucleotide
agcttaccgacctcaactatacattgagtgtaatcactctgatgaatagtacattgcata

SEQ ID NO: 527056 - DNA, 60 bp, Artificial
  Synthetic oligonucleotide
agcttatgatggacaagctccagtaaatgttaataacccaggtgcgggaccgggtatgat

SEQ ID NO: 527057 - DNA, 60 bp, Artificial
  Synthetic oligonucleotide
agctttgctacttgaagcactcaaagcaaattccaacctgtggtgtgattgatgtacgtg

SEQ ID NO: 527058 - DNA, 60 bp, Artificial
  Synthetic oligonucleotide
aggaacgggttgaagaactgagtttagttcgtgtggatgacgcgatttctcaaccaccaa

SEQ ID NO: 527059 - DNA, 60 bp, Artificial
  Synthetic oligonucleotide
aggaacgggttgaagagttgagtttggtccgtgtggatgacacgatttcccaaccgccaa

SEQ ID NO: 527060 - DNA, 60 bp, Artificial
  Synthetic oligonucleotide
aggaacttggagaattactcacagacccagccaaagtttttaacttacttcaatatgaaa

SEQ ID NO: 527061 - DNA, 60 bp, Artificial
  Synthetic oligonucleotide
aggaaggcgtttggcgacattctacgcagctacgcatataggaaagcgattatattacac

SEQ ID NO: 527062 - DNA, 60 bp, Artificial
  Synthetic oligonucleotide
aggaatcgatgtagttcattttgaggatctggcggcccattggcacgctttaggtgcggc

SEQ ID NO: 527063 - DNA, 60 bp, Artificial
  Synthetic oligonucleotide
aggaatggggatggtggcgccatatacaaggaatgattttgataggcgggagttgccgga

SEQ ID NO: 527064 - DNA, 60 bp, Artificial
  Synthetic oligonucleotide
aggaccaagagaaaatgtggcaattatacaagttggtggctcagaagtgctagatattac

SEQ ID NO: 527065 - DNA, 60 bp, Artificial
  Synthetic oligonucleotide
aggagagagtcgaagagctaagtctggttcgtgtggatgatacaaattcacaaccaccaa

SEQ ID NO: 527066 - DNA, 60 bp, Artificial; identical to SEQ ID NO: 323951
  Synthetic oligonucleotide

SEQ ID NO: 527067 - DNA, 60 bp, Artificial
  Synthetic oligonucleotide
aggagtgagcgtgagcaggcgccgcgctttcaggtgcaaagcgcgacgcaaaaaggagaa

SEQ ID NO: 527068 - DNA, 60 bp, Artificial
  Synthetic oligonucleotide
aggatagagttgaggaattaagtctagtgcgtgtagatgataccatttctcaaccaccaa

SEQ ID NO: 527069 - DNA, 60 bp, Artificial
  Synthetic oligonucleotide
aggatccgccacgtcaggagacctgttcctgatggagttttgtgacctccaagcgtcgct

SEQ ID NO: 527070 - DNA, 60 bp, Artificial
  Synthetic oligonucleotide
aggatcttgctgcccactggcacgctttgggcgctgcacaagaagtgaaaggacgtaccc

SEQ ID NO: 527071 - DNA, 60 bp, Artificial
  Synthetic oligonucleotide
aggatgaagcgagtcgcaatgcaattgatcgaagatttgtaatgttaacctgagagcaca

SEQ ID NO: 527072 - DNA, 60 bp, Artificial
  Synthetic oligonucleotide
aggatgttaccataaatcctggtccattcgcacaaacaggttatgcaccagttaactggg

SEQ ID NO: 527073 - DNA, 60 bp, Artificial
  Synthetic oligonucleotide
aggcagagcaggaactcgctaacgcagacgatcactgttggatggcgtggcgtccgacgg

SEQ ID NO: 527074 - DNA, 60 bp, Artificial
  Synthetic oligonucleotide
aggcagctatactccagagtcactaaatgcctcacttcctaatgacgctgctagatgtat

SEQ ID NO: 527075 - DNA, 60 bp, Artificial
  Synthetic oligonucleotide
aggcagtggtcatatcccgttctagtcccaacagagagaggaccgcggattatcccagcg

SEQ ID NO: 527076 - DNA, 60 bp, Artificial
  Synthetic oligonucleotide
aggcattcgaatcgattgttgggcgcaggagattaaaattgaggaaggcgtttggcgaca

SEQ ID NO: 527077 - DNA, 60 bp, Artificial
  Synthetic oligonucleotide
aggcggctgaacggtttgctgagagtgagatcggatcagcggcgatagacggaatagttc

SEQ ID NO: 527078 - DNA, 60 bp, Artificial
  Synthetic oligonucleotide
aggctgcagtacagtcactcaagtgatgattggagagcatgtggatatttcccttccagt

SEQ ID NO: 527079 - DNA, 60 bp, Artificial
  Synthetic oligonucleotide
aggcttggtcaattatttcaagcgtttctacccctcgcaaaagatctgctagctccaatg

SEQ ID NO: 527080 - DNA, 60 bp, Artificial
  Synthetic oligonucleotide
agggaatcgtgaaccaatggtgcgatattactaaattagatcacttgccgctatgtattg

SEQ ID NO: 527081 - DNA, 60 bp, Artificial
  Synthetic oligonucleotide
agggacatgttatgatttggataaccacatacagattaaaacgatcggagaagtcagttc

SEQ ID NO: 527082 - DNA, 60 bp, Artificial
  Synthetic oligonucleotide
agggatggtggagagattcgtacccgaactcatacgtgtttcaatattatggtgagacaa

SEQ ID NO: 527083 - DNA, 60 bp, Artificial
  Synthetic oligonucleotide
agggcgggacggataatcgcgtgggatgggcaggcggtcctacagatacataaccctact

SEQ ID NO: 527084 - DNA, 60 bp, Artificial
  Synthetic oligonucleotide
aggtacacacaatagtgcagaaagatgtgtgtaaacttgtagaatggtatcatggccgcg

SEQ ID NO: 527085 - DNA, 60 bp, Artificial
  Synthetic oligonucleotide
aggtacacagattatacattgggaatataagcctattacaagtacggtgaaaactacgta

SEQ ID NO: 527086 - DNA, 60 bp, Artificial
  Synthetic oligonucleotide
agcattggcattcgttaggtgcagctcaggaagtaatagggcggaccttccgggaagcgt

SEQ ID NO: 527087 - DNA, 60 bp, Artificial
  Synthetic oligonucleotide
agccaataagtggatttccatgggatcttcatgtacaatcaaagtatgtccacttaatac

SEQ ID NO: 527088 - DNA, 60 bp, Artificial
  Synthetic oligonucleotide
agccatatcgcgtgtggcttaagccttaatcccgtttaaccaatccggtcagcaccggac

SEQ ID NO: 527089 - DNA, 60 bp, Artificial
  Synthetic oligonucleotide
agcccatctcaagaattacgctaatcatgatttaaccgggacagttcggtacgctcggtt

SEQ ID NO: 527090 - DNA, 60 bp, Artificial
  Synthetic oligonucleotide
agccgtttgccaacggagattggacgcctggaatgactgcgcaagcattagctctactag

SEQ ID NO: 527091 - DNA, 60 bp, Artificial
  Synthetic oligonucleotide
agcctcaaagtcgaagttagctcgtccgggtaggctacccggcaagaatcatgactggga

SEQ ID NO: 527092 - DNA, 60 bp, Artificial
  Synthetic oligonucleotide
agcgaagacgctatgtggcgtgatcgcgaaacagagttcaatgccatactgccaaataca

SEQ ID NO: 527093 - DNA, 60 bp, Artificial
  Synthetic oligonucleotide
agcgaagctatgttgcgtctgcggtggcgcctttaagactgaatagcagtacgaaggtac

SEQ ID NO: 527094 - DNA, 60 bp, Artificial
  Synthetic oligonucleotide
agcgaatcaaataaatggatctcaatgggaacggattgcacggtaaaagtttgcccactt

SEQ ID NO: 527095 - DNA, 60 bp, Artificial
  Synthetic oligonucleotide
agcgagggtcgatgaagagataaaggaagctgcttcgagcgtgggcagattggagaggtt

SEQ ID NO: 527096 - DNA, 60 bp, Artificial
  Synthetic oligonucleotide
agcgatgggaagaatggaaatttgagaccgatctcgtgggttccaatggctaccgtattg

SEQ ID NO: 527097 - DNA, 60 bp, Artificial
  Synthetic oligonucleotide
agcgcacgtccggaaaatcgatgcggaagttgcgagaagattagttgaggagtatcatgg

SEQ ID NO: 527098 - DNA, 60 bp, Artificial
  Synthetic oligonucleotide
agcgcgggttaggcttggccgtgatcgttggcagaaattggttgggtacactgaaagatc

SEQ ID NO: 527099 - DNA, 60 bp, Artificial
  Synthetic oligonucleotide
agcgcttagcggtttgctggagatagggaaagatcagtcagaacgcattacaaagctata

SEQ ID NO: 527100 - DNA, 60 bp, Artificial
  Synthetic oligonucleotide
agcggaaataccgcaatggtttaagagtctgaatcccatgcttggagtggtaaatttggg

SEQ ID NO: 527101 - DNA, 60 bp, Artificial
  Synthetic oligonucleotide
agctgtagactcatacgggaagatcttgcgagaggaagacaagaaaatgttggaattagc

SEQ ID NO: 527102 - DNA, 60 bp, Artificial
  Synthetic oligonucleotide
agctgtaaatgagctgtgacgcagtgttgccctaatcccttaagccttcccgacccctat

SEQ ID NO: 527103 - DNA, 60 bp, Artificial
  Synthetic oligonucleotide
agctggacgcctattcgagactcaactggcatgtttgagatgtggttcatggtactcacc

SEQ ID NO: 527104 - DNA, 60 bp, Artificial
  Synthetic oligonucleotide
agctgatcagatagagtggtgcccccaggttgccgtgatgcgggattggcaggtctcgac

SEQ ID NO: 527105 - DNA, 60 bp, Artificial
  Synthetic oligonucleotide
agctcatacaacatgctcagttaatggaattaatgattttagttataatggtggttcatt

SEQ ID NO: 527106 - DNA, 60 bp, Artificial
  Synthetic oligonucleotide
agctataggaaacacttatgcgtcgccaatgcatgctcgacgtatgattcgatctaaaac

SEQ ID NO: 527107 - DNA, 60 bp, Artificial
  Synthetic oligonucleotide
agctacgcgcacatagatttttgtttataagtacgaaaaggaagatcaggctgaaggatt

SEQ ID NO: 527108 - DNA, 60 bp, Artificial
  Synthetic oligonucleotide
agctaaatcgcaggatgttaccataaatcctggtccattcgcacaaacaggttatgcacc

SEQ ID NO: 527109 - DNA, 60 bp, Artificial
  Synthetic oligonucleotide
agcgttattaagtccgacttttcttcacttaaattggacgtctgatactttacttcttgg

SEQ ID NO: 527110 - DNA, 60 bp, Artificial
  Synthetic oligonucleotide
agcgtgcgatggcgcacatgattttaataattgcggcggtagtagccttgataacatcag

SEQ ID NO: 527111 - DNA, 60 bp, Artificial
  Synthetic oligonucleotide
agcgtattaagtcctactcgcgccattgcgaatcagatgttacacagcttctatgaacgc

SEQ ID NO: 527112 - DNA, 60 bp, Artificial
  Synthetic oligonucleotide
agcggaggaggatgggtagtgttaacagatgagatcgctcgcgcgattgaatctaaatac

SEQ ID NO: 527113 - DNA, 60 bp, Artificial
  Synthetic oligonucleotide
agtgaacacgtctactcgaatcggtactgagagaatcgttgatatatcacagctagtcgt

SEQ ID NO: 527114 - DNA, 60 bp, Artificial
  Synthetic oligonucleotide
agtgaatctaggagcgactttcataatgatggtttgtgcgaagagtgagagagggctaaa

SEQ ID NO: 527115 - DNA, 60 bp, Artificial
  Synthetic oligonucleotide
agtgaccagaccaattgacgttatagatatgtcgaaagaatttaatcagaagaacgttag

SEQ ID NO: 527116 - DNA, 60 bp, Artificial
  Synthetic oligonucleotide
agtgagattgggtccgcggcaattgatggactagttcaaggtagcgttcactcaatcatg

SEQ ID NO: 527117 - DNA, 60 bp, Artificial
  Synthetic oligonucleotide
agtgatatgagtgtggcatttaagcttaatggtacatcagcggaaataccacagtggttt

SEQ ID NO: 527118 - DNA, 60 bp, Artificial
  Synthetic oligonucleotide
agtgatgaatctcgttgaagaattaccattgggagagttttcacctggacgaatttcgag

SEQ ID NO: 527119 - DNA, 60 bp, Artificial
  Synthetic oligonucleotide
agtgatttctcagataatcttatggaagatagacatagtccaacatcattaatgcaagtg

SEQ ID NO: 527120 - DNA, 60 bp, Artificial
  Synthetic oligonucleotide
agtggagactatgctaatgccacgagaacttttttggctatatcaccccaatggacatgt

SEQ ID NO: 527121 - DNA, 60 bp, Artificial
  Synthetic oligonucleotide
agtggagagactggaacctggggaccggatcgtcaacctttcggctacttcctagctgct

SEQ ID NO: 527122 - DNA, 60 bp, Artificial
  Synthetic oligonucleotide
agtgggacaacttgagacaggacttgcaggattacgcaatgactacagcagtctcgctac

SEQ ID NO: 527123 - DNA, 60 bp, Artificial
  Synthetic oligonucleotide
agtgtaacaccgatggcaacacgggtgcaacataatggagtgatggttgatgcagagata

SEQ ID NO: 527124 - DNA, 60 bp, Artificial
  Synthetic oligonucleotide
agtgtaactccaatggcaacacgagtgcaacataatggggtgatggtagatgcagaaata

SEQ ID NO: 527125 - DNA, 60 bp, Artificial
  Synthetic oligonucleotide
agtgtacattctgccctgttggcgttggtccgctaccacgtgcatctcatcgcacagcat

SEQ ID NO: 527126 - DNA, 60 bp, Artificial
  Synthetic oligonucleotide
agtgtgtccactgaatacacaaacgttaggaataggttgtcaaacaacaaatgtagactc

SEQ ID NO: 527127 - DNA, 60 bp, Artificial
  Synthetic oligonucleotide
agttactaactcaccagtaatatcagcgataatagactttaagacattaaaaaacctgaa

SEQ ID NO: 527128 - DNA, 60 bp, Artificial
  Synthetic oligonucleotide
agttattgcggcatccgacactaataactcaagagtctggtggtcaaacccatacccatg

SEQ ID NO: 527129 - DNA, 60 bp, Artificial
  Synthetic oligonucleotide
agttcgtgcggatctggatcaatatgatgtgctacgcaaggcagtagattcgtacgaaaa

SEQ ID NO: 527130 - DNA, 60 bp, Artificial
  Synthetic oligonucleotide
agttctcgctccctcaatgaacttgaggatcatgatcagagaggtcgtatgccttggaag

SEQ ID NO: 527131 - DNA, 60 bp, Artificial
  Synthetic oligonucleotide
agttctgttccgagagagcgcgtgcggaaagatggataaacttgccgacctcaactacac

SEQ ID NO: 527132 - DNA, 60 bp, Artificial
  Synthetic oligonucleotide
agttgaagttccgatttatcagaagggaatgagcaacttatttactgtagataggggctt

SEQ ID NO: 527133 - DNA, 60 bp, Artificial
  Synthetic oligonucleotide
agttgacgttatagatatgtcgaaggaattcaatcagaaaaatattaagacgctagatga

SEQ ID NO: 527134 - DNA, 60 bp, Artificial
  Synthetic oligonucleotide
agttgattgggatagaggagatacaaaggaccaagaacaaacagaacaatcagcggataa

SEQ ID NO: 527135 - DNA, 60 bp, Artificial
  Synthetic oligonucleotide
agttgccggaactacccggtgtacagaagtcaaaatacgatgtacgggagctgaggcaga

SEQ ID NO: 527136 - DNA, 60 bp, Artificial
  Synthetic oligonucleotide
agttgtttttaaccaaagggtggcctactggatctgtttattttaaagaatacaccaata

SEQ ID NO: 527137 - DNA, 60 bp, Artificial
  Synthetic oligonucleotide
agtttattttaatgaatattcaaacgttttagaattttccatcgacccaaagctatactg

SEQ ID NO: 527138 - DNA, 60 bp, Artificial
  Synthetic oligonucleotide
agtttcaacaaaacgtgttattgtggatttaattattctcatctcccaaatctagaacgc

SEQ ID NO: 527139 - DNA, 60 bp, Artificial
  Synthetic oligonucleotide
agtttccaatgcatcatatgatgctcagaagatgggaagggaatggcagaccacagacac

SEQ ID NO: 527140 - DNA, 60 bp, Artificial
  Synthetic oligonucleotide
ataaacgccagcgagcgagttaagaggcgagtcgggtgtaaagatcgagagatgagggtc

SEQ ID NO: 527141 - DNA, 60 bp, Artificial
  Synthetic oligonucleotide
ataaaggatggtgtttagattgttgtcaatatacaaatttgacatattgcagagggtgtg

SEQ ID NO: 527142 - DNA, 60 bp, Artificial
  Synthetic oligonucleotide
aggtagagtggcgccccaaggtttgcaccgcatggagtggttgatcctgcgatgcaaatt

SEQ ID NO: 527143 - DNA, 60 bp, Artificial
  Synthetic oligonucleotide
aggtataagggataaaaatcaggtttatggtggtaattatcaattagtgtatcaagcttt

SEQ ID NO: 527144 - DNA, 60 bp, Artificial
  Synthetic oligonucleotide
aggtgataatatggcgtacgaacataggcagtggtcggttccgattatattatatgctga

SEQ ID NO: 527145 - DNA, 60 bp, Artificial
  Synthetic oligonucleotide
aggtgatgaggggtggaaagaggtcgctaaagcagcaactcagcgtcctaacattatggc

SEQ ID NO: 527146 - DNA, 60 bp, Artificial
  Synthetic oligonucleotide
aggtgcgtgtgagcgtgttgcttttgtctctaaggacatgagcttaatcatattgccgat

SEQ ID NO: 527147 - DNA, 60 bp, Artificial
  Synthetic oligonucleotide
aggtggatattgcatttagtgaggtccacccaaagtcgggacagactgagcgttttaaag

SEQ ID NO: 527148 - DNA, 60 bp, Artificial
  Synthetic oligonucleotide
aggttctgatgttctcgatataacggctgatccaactacagcgccacaaactgaacgaat

SEQ ID NO: 527149 - DNA, 60 bp, Artificial
  Synthetic oligonucleotide
aggttgggagtacagagccagaaaattatattactgaggagtatacacgtaggctgaacg

SEQ ID NO: 527150 - DNA, 60 bp, Artificial
  Synthetic oligonucleotide
aggtttctccttattatagttcttttgtcaccttttttaaacgctcaaaactatggaatc

SEQ ID NO: 527151 - DNA, 60 bp, Artificial
  Synthetic oligonucleotide
agtaaagggtagggtgaacggagtagcgcaaagactaagaggtcgcaggcgaattcggtt

SEQ ID NO: 527152 - DNA, 60 bp, Artificial
  Synthetic oligonucleotide
agtaacgccatcagcattgagatgggtcatcaaacatggagtgtccgatggtatagttaa

SEQ ID NO: 527153 - DNA, 60 bp, Artificial
  Synthetic oligonucleotide
agtaagaccgcccctcaggaggctgagagtcagtgcccaaaatttacacacgagtatgat

SEQ ID NO: 527154 - DNA, 60 bp, Artificial
  Synthetic oligonucleotide
agtaagtttagtaccatatcatgagcaaacgaggccaccaagctacgttccgtcggcgcc

SEQ ID NO: 527155 - DNA, 60 bp, Artificial
  Synthetic oligonucleotide
agtaatcaatctcgctgctcgcatgtcacagatgtggatggaatattagttgtcagtttt

SEQ ID NO: 527156 - DNA, 60 bp, Artificial
  Synthetic oligonucleotide
agtacgcaatgggatcaggcagcaatttatactccaactatatcgtaaacagacttagag

SEQ ID NO: 527157 - DNA, 60 bp, Artificial
  Synthetic oligonucleotide
agtacgcgacggatgtctatgcatatggagatgtgtcgaagtggacgataagacagcttc

SEQ ID NO: 527158 - DNA, 60 bp, Artificial
  Synthetic oligonucleotide
agtctttagtcacgggagaatcttatggtgagagcgtcaaacaagcggttttactaaata

SEQ ID NO: 527159 - DNA, 60 bp, Artificial
  Synthetic oligonucleotide
agtctactaccgatttgagtcctcacagtcgcgcgagcgcttcttcagagtcgataccca

SEQ ID NO: 527160 - DNA, 60 bp, Artificial
  Synthetic oligonucleotide
agtcgtcagaaagatcgaaagacgaaagcttaatggttaaagaatatcggcagaaaatcg

SEQ ID NO: 527161 - DNA, 60 bp, Artificial
  Synthetic oligonucleotide
agtcgcaatgcaattgatagaagatttgtaatgtcaacctgagaacacactagggagctc

SEQ ID NO: 527162 - DNA, 60 bp, Artificial
  Synthetic oligonucleotide
agtcgacggtatttcaataccagagtcaacaagaggactttcccgtgctaacgaattatg

SEQ ID NO: 527163 - DNA, 60 bp, Artificial
  Synthetic oligonucleotide
agtccagagtatcgacattagaacgcaccgcagttactagtgcctccgcccctttagcaa

SEQ ID NO: 527164 - DNA, 60 bp, Artificial
  Synthetic oligonucleotide
agtcatttgaaaaggaattgtttatttaatgggatgtgtgccaagcaaaattttgaaaga

SEQ ID NO: 527165 - DNA, 60 bp, Artificial
  Synthetic oligonucleotide
agtcactcctaccgattcagttgatggtactgctgacctaatcgacttctctgttccaac

SEQ ID NO: 527166 - DNA, 60 bp, Artificial
  Synthetic oligonucleotide
agtcacaagctaatgctcacgttacatccttcggatcccgtttatttaatcagatgtcgg

SEQ ID NO: 527167 - DNA, 60 bp, Artificial
  Synthetic oligonucleotide
agtattttatacaatagttgactatgtaaatcaaattgtgcaagcgatgtccaaaagatc

SEQ ID NO: 527168 - DNA, 60 bp, Artificial
  Synthetic oligonucleotide
agtatctagaggaatagctttgaccgaaaaagcgaagctgaattcgtatgcaccaatatc

SEQ ID NO: 527169 - DNA, 60 bp, Artificial
  Synthetic oligonucleotide
agtataacggagcttagtgaagtacctttagatggatttgacataccgcctgaactgatc

SEQ ID NO: 527170 - DNA, 60 bp, Artificial
  Synthetic oligonucleotide
agtagttgactacattaaccaaattatacaagtcatgtccaaacggtcacgatcattaga

SEQ ID NO: 527171 - DNA, 60 bp, Artificial
  Synthetic oligonucleotide
agtagtaattttgtcaccgctactaacagcacaaaattacgggattaatctacccattac

SEQ ID NO: 527172 - DNA, 60 bp, Artificial
  Synthetic oligonucleotide
agtacttattttaatgtactaaaaacgtcacatattgaattttatagtgtgtcaaccaga

SEQ ID NO: 527173 - DNA, 60 bp, Artificial; identical to SEQ ID NO: 339599
  Synthetic oligonucleotide

SEQ ID NO: 527174 - DNA, 60 bp, Artificial
  Synthetic oligonucleotide
caaatgtggatagacgcgtacatactacagtgggatctggatcaagcgcaaaaggatctg

SEQ ID NO: 527175 - DNA, 60 bp, Artificial
  Synthetic oligonucleotide
caaattagtgacaatgaatggaaagatacactatctcagctgtttttaacaaaaggatgg

SEQ ID NO: 527176 - DNA, 60 bp, Artificial
  Synthetic oligonucleotide
caaattcaactagtggagaatcatttctaacttcaacgttatgtttatactatccaacag

SEQ ID NO: 527177 - DNA, 60 bp, Artificial
  Synthetic oligonucleotide
caacagcatatgggtacaatcggagtgttagcaacgcctgaagttccatttaccaccgag

SEQ ID NO: 527178 - DNA, 60 bp, Artificial
  Synthetic oligonucleotide
caacaggaggaatttaagaaaacgtcagaggaaccaaaagaaatgcagagatcggaagaa

SEQ ID NO: 527179 - DNA, 60 bp, Artificial
  Synthetic oligonucleotide
caacagttccacaaattcaaagaatcatgcgaataaattggaaaaaatggtggcaagtct

SEQ ID NO: 527180 - DNA, 60 bp, Artificial
  Synthetic oligonucleotide
caaccaatcaagccatcgtattagagggcactaatagaactgatgtttgggttgctttgc

SEQ ID NO: 527181 - DNA, 60 bp, Artificial
  Synthetic oligonucleotide
caaccaccgagatatgctccgagtgccccaatgccatcatcgatgcctaccgttgccctt

SEQ ID NO: 527182 - DNA, 60 bp, Artificial
  Synthetic oligonucleotide
caaccgccaagatatgctccgagcgcgcccatgccatcgtcgatgcctactgttgcactt

SEQ ID NO: 527183 - DNA, 60 bp, Artificial
  Synthetic oligonucleotide
caacgatgtgagaggttgaactgccgtcgactgtcttcggaagcggcggagttctttaca

SEQ ID NO: 527184 - DNA, 60 bp, Artificial
  Synthetic oligonucleotide
caactgagaagctagttattacggatgtggttgatggtgtaaattacaagattaatatta

SEQ ID NO: 527185 - DNA, 60 bp, Artificial
  Synthetic oligonucleotide
caactggttctgtctatcttaaaagctacacggatattgcaactttttcaataaatccgc

SEQ ID NO: 527186 - DNA, 60 bp, Artificial
  Synthetic oligonucleotide
caactgtgcttcctgaaaaatggctgtgatcgagagacattttatcacattgatgtccga

SEQ ID NO: 527187 - DNA, 60 bp, Artificial
  Synthetic oligonucleotide
caacttattttctgtagataaatcattgcttgagcggggtgggttagggagggaagacat

SEQ ID NO: 527188 - DNA, 60 bp, Artificial
  Synthetic oligonucleotide
caagaacggtagctaaactggatgaagatgtgaataagttaaggatgatgctttcttcca

SEQ ID NO: 527189 - DNA, 60 bp, Artificial
  Synthetic oligonucleotide
caagaagaaatgtttctaacttctacgttatgtctgtattatccaactgaagcaagtact

SEQ ID NO: 527190 - DNA, 60 bp, Artificial
  Synthetic oligonucleotide
caagaagaggagacggaattacaacggctagccacggcgttgagaaaagaacacgcagat

SEQ ID NO: 527191 - DNA, 60 bp, Artificial
  Synthetic oligonucleotide
caagaagttgtaggacgcagtttaaaggaagcatacagcgaatttttccagttagcggca

SEQ ID NO: 527192 - DNA, 60 bp, Artificial
  Synthetic oligonucleotide
caagacaatccaataattaagaataggatagagcaattgatattacaatgtagattatga

SEQ ID NO: 527193 - DNA, 60 bp, Artificial
  Synthetic oligonucleotide
caagagacattcttaacttcaacgctatgcttatattatcctaccgaagcatcaactcaa

SEQ ID NO: 527194 - DNA, 60 bp, Artificial
  Synthetic oligonucleotide
caagagcgccgacacttgatcacgaatcaagttataccagtagggacgccagagatcaca

SEQ ID NO: 527195 - DNA, 60 bp, Artificial
  Synthetic oligonucleotide
caagaggagccttaaaccgatgactaatgatccagttgatctgcagagatataccttggc

SEQ ID NO: 527196 - DNA, 60 bp, Artificial
  Synthetic oligonucleotide
caagaggtgaaaggacgcactctgaacgaagcgtatcgtgaatttcttaacttggcaatt

SEQ ID NO: 527197 - DNA, 60 bp, Artificial; identical to SEQ ID NO: 340887
  Synthetic oligonucleotide

SEQ ID NO: 527198 - DNA, 60 bp, Artificial
  Synthetic oligonucleotide
caagatcacttgcgacatgaaatccgtggttaactttgtcaacgaccagctctctgacac

SEQ ID NO: 527199 - DNA, 60 bp, Artificial
  Synthetic oligonucleotide
caagcaagatggttggggaaaagagtgtctcaattcgacattggacaatataagaacatg

SEQ ID NO: 527200 - DNA, 60 bp, Artificial
  Synthetic oligonucleotide
caagcaatattccgattttatgtttgaaacttgggacccacttgatactccatattcgtc

SEQ ID NO: 527201 - DNA, 60 bp, Artificial; identical to SEQ ID NO: 341041
  Synthetic oligonucleotide

SEQ ID NO: 527202 - DNA, 60 bp, Artificial
  Synthetic oligonucleotide
caagcgataatcgatctggagaacgccagaagggatctagcgacggaggaggaagtgaga

SEQ ID NO: 527203 - DNA, 60 bp, Artificial
  Synthetic oligonucleotide
caagctccgcagacatcgggtacatctcaggaggatccgccacgtcaggagacctgttcc

SEQ ID NO: 527204 - DNA, 60 bp, Artificial
  Synthetic oligonucleotide
attgtgattataacatagtgttgatgaaatataatgccaattcagaactggatatgtcag

SEQ ID NO: 527205 - DNA, 60 bp, Artificial
  Synthetic oligonucleotide
attgtgattataatttggtattaatgaaatatgacgctacaatgcaactagacatgtccg

SEQ ID NO: 527206 - DNA, 60 bp, Artificial
  Synthetic oligonucleotide
attgtgtctcacatcaccatcgtaatgaatctttcttcttgggattcgacctgggaattg

SEQ ID NO: 527207 - DNA, 60 bp, Artificial
  Synthetic oligonucleotide
attgttaacaagttacgaggattcgagactgacagagagttcatactaactaaaattatt

SEQ ID NO: 527208 - DNA, 60 bp, Artificial
  Synthetic oligonucleotide
atttaacgcaatgaatccagtgcaagtgaatgaacaacaggtaattaatttctgctggca

SEQ ID NO: 527209 - DNA, 60 bp, Artificial
  Synthetic oligonucleotide
atttacatggaacagtttgacggggatgaagtcagtggggagttaaaaattatatctttt

SEQ ID NO: 527210 - DNA, 60 bp, Artificial
  Synthetic oligonucleotide
atttaccaattactggctccatggatacagcatatgccaatccgtcacagcaagagacat

SEQ ID NO: 527211 - DNA, 60 bp, Artificial
  Synthetic oligonucleotide
atttagatatactcaaatcgtcacatactgagtcttataatgtatctcctagatgtagag

SEQ ID NO: 527212 - DNA, 60 bp, Artificial
  Synthetic oligonucleotide
atttatacattcgtaagcatttactgactcgacttcatgatagattacaaactgtcgaaa

SEQ ID NO: 527213 - DNA, 60 bp, Artificial
  Synthetic oligonucleotide
atttcatttgaacattacatgtcacaaagttatgtatctaacgttaaagacgttgcggtc

SEQ ID NO: 527214 - DNA, 60 bp, Artificial
  Synthetic oligonucleotide
atttcggctcagccggacatgatggtgtgtggtagtgctgttgtttgcatgcactgttta

SEQ ID NO: 527215 - DNA, 60 bp, Artificial
  Synthetic oligonucleotide
atttgaatatctagaaccagtggacataaatggaacggagtatgtattattagactatga

SEQ ID NO: 527216 - DNA, 60 bp, Artificial
  Synthetic oligonucleotide
atttgtatgaaaaacgcaattacgtacgatcggtatacgaagcgaggtacatcatataca

SEQ ID NO: 527217 - DNA, 60 bp, Artificial
  Synthetic oligonucleotide
attttactagaatgtcattcttaccagcatctttacagcaagaatatgcacttagatatt

SEQ ID NO: 527218 - DNA, 60 bp, Artificial
  Synthetic oligonucleotide
attttggagtatcgtaccaaggagattccagataatgcattagcggtcagcatcctgtcg

SEQ ID NO: 527219 - DNA, 60 bp, Artificial
  Synthetic oligonucleotide
caaatccttgctgtatatcattctttgaccgagatgagcgattctggtttaatcaactcc

SEQ ID NO: 527220 - DNA, 60 bp, Artificial
  Synthetic oligonucleotide
caaatcacgtcatcctgatggtcaatcccgttaacattctttttgacacaactcaattgt

SEQ ID NO: 527221 - DNA, 60 bp, Artificial
  Synthetic oligonucleotide
caaatactgactctaaacgatgttataacagccttgcattccataatttatgattggttt

SEQ ID NO: 527222 - DNA, 60 bp, Artificial
  Synthetic oligonucleotide
caaataagactacgacacaatacaaagataatagagttatttgataaagaccttgaagac

SEQ ID NO: 527223 - DNA, 60 bp, Artificial
  Synthetic oligonucleotide
caaaggtgaattagacgtacctccaatcacagcagacgttgataaattagtatacacatc

SEQ ID NO: 527224 - DNA, 60 bp, Artificial
  Synthetic oligonucleotide
caaagctgtatggtctaccagcagcgaacccaaacggcggaaaagagtactatgaagtgg

SEQ ID NO: 527225 - DNA, 60 bp, Artificial
  Synthetic oligonucleotide
caaagatataccaggcggctcagactgccgatgtgccatttgacaagctctctcgtgccg

SEQ ID NO: 527226 - DNA, 60 bp, Artificial
  Synthetic oligonucleotide
caaagaatcatgcgaataaattggaaaaaatggtggcaagtcttttatacagtagttgac

SEQ ID NO: 527227 - DNA, 60 bp, Artificial
  Synthetic oligonucleotide
caaagaatagtagataaatttattagtagtacaagacaacataaatgtagaaatgaatgt

SEQ ID NO: 527228 - DNA, 60 bp, Artificial
  Synthetic oligonucleotide
caaagaagatactgagtgcaatgatatttgactggtttgacacaagatatatgagagaaa

SEQ ID NO: 527229 - DNA, 60 bp, Artificial
  Synthetic oligonucleotide
caaacgccgtttaattcgatcaagaagagttcaccctatttacatgggtaatatgcacta

SEQ ID NO: 527230 - DNA, 60 bp, Artificial
  Synthetic oligonucleotide
caaaccttggcgatcctggcaagggatgagattccgtatacaccgtcgacgtttaggcgg

SEQ ID NO: 527231 - DNA, 60 bp, Artificial
  Synthetic oligonucleotide
caaaccaacttcgaacactgaacaaaaggaatgagctcatagatgagtacgatttagaac

SEQ ID NO: 527232 - DNA, 60 bp, Artificial
  Synthetic oligonucleotide
caaacattaggaattgggtgcctaacaactgatacaaacacgtttgaagaagttgcaaca

SEQ ID NO: 527233 - DNA, 60 bp, Artificial
  Synthetic oligonucleotide
caaaattatggaatagacttgccaattaccggatctatggatacagcatatgctaactca

SEQ ID NO: 527234 - DNA, 60 bp, Artificial
  Synthetic oligonucleotide
caaaataataaatcgatatgcccaaatggctgtgcagcaatatttacgagtcggttacat

SEQ ID NO: 527235 - DNA, 60 bp, Artificial
  Synthetic oligonucleotide
caattcaatataggaaattcatgcctacattacctgataacgttcaatacgttatacaat

SEQ ID NO: 527236 - DNA, 60 bp, Artificial
  Synthetic oligonucleotide
caattcagaaagggttagattggatgactcgctgtcggcggtgccatacatctatgtacc

SEQ ID NO: 527237 - DNA, 60 bp, Artificial
  Synthetic oligonucleotide
caatttcctattttagggttttgtttcattttgactggtataatggttgatgctattgga

SEQ ID NO: 527238 - DNA, 60 bp, Artificial
  Synthetic oligonucleotide
caattttcgccccccccaagtcagggaagtctacatatgtcaaatttctcggtatctctg

SEQ ID NO: 527239 - DNA, 60 bp, Artificial
  Synthetic oligonucleotide
caattttgaaaaatgctgaattcattaacgaacgtcttccagcttacttaaagctattgt

SEQ ID NO: 527240 - DNA, 60 bp, Artificial
  Synthetic oligonucleotide
cacaaagagattctcacatgccttgtcccgtaccgagcgccacgaaaatgtttcctctgt

SEQ ID NO: 527241 - DNA, 60 bp, Artificial
  Synthetic oligonucleotide
cacaattgattgatctggcgttattaccactagatatgttttcaatgttttcagggatta

SEQ ID NO: 527242 - DNA, 60 bp, Artificial
  Synthetic oligonucleotide
cacacatcattgaaaaggcaatgctacgtgatactgtaacggacaaagatttggcgatgg

SEQ ID NO: 527243 - DNA, 60 bp, Artificial
  Synthetic oligonucleotide
cacacggcaatttggaatcacatggtacgtaatcacttgtttaacgccgtccaagaggcg

SEQ ID NO: 527244 - DNA, 60 bp, Artificial
  Synthetic oligonucleotide
cacacgtagatcgtcatatgcatcctgatgcagcggtgatgaaaatagtgtcccgtgatg

SEQ ID NO: 527245 - DNA, 60 bp, Artificial
  Synthetic oligonucleotide
cacactcgtaatgttaagaaatcctttagctctatatgttccaattgggtggaatggcta

SEQ ID NO: 527246 - DNA, 60 bp, Artificial
  Synthetic oligonucleotide
cacagaaaaatgtacaacgtatatgaatcaaggattggaaccaatacaaaatactaccag

SEQ ID NO: 527247 - DNA, 60 bp, Artificial
  Synthetic oligonucleotide
cacagaaaatctataagactataggaaaagcggcggagagatttgcggaaagcgagatag

SEQ ID NO: 527248 - DNA, 60 bp, Artificial
  Synthetic oligonucleotide
cacagtcaatcatatcgcgtgtggctcagccttaatcccgtttgaccaatccaacgaatg

SEQ ID NO: 527249 - DNA, 60 bp, Artificial
  Synthetic oligonucleotide
cacagtgttgggtggatcaaacacctagatcgttttctagggagccgggataacgactta

SEQ ID NO: 527250 - DNA, 60 bp, Artificial
  Synthetic oligonucleotide
cacataatcaaatcaaacgcgaggtggagcggcagatagtgacatgtccctatactggtt

SEQ ID NO: 527251 - DNA, 60 bp, Artificial
  Synthetic oligonucleotide
cacatcagaggtaatcctacctgattactataacaagtggatcatagcaccaatgtttaa

SEQ ID NO: 527252 - DNA, 60 bp, Artificial
  Synthetic oligonucleotide
cacatgtcagaatgctgcaactgatgatgacttaataatagaatacatttattccgaagc

SEQ ID NO: 527253 - DNA, 60 bp, Artificial
  Synthetic oligonucleotide
cacattattgcctgacttaatcgctggtgctcatcagaacgcggatccagtcgttttaga

SEQ ID NO: 527254 - DNA, 60 bp, Artificial
  Synthetic oligonucleotide
cacattgaaaatggtgactaagacgatagattatataatatacaggtttctactgattgt

SEQ ID NO: 527255 - DNA, 60 bp, Artificial
  Synthetic oligonucleotide
caccaatgactacatatacagttaacaaattaagacagttatgtacaggagtgaagactg

SEQ ID NO: 527256 - DNA, 60 bp, Artificial
  Synthetic oligonucleotide
caccaatggatatcaattggctagaccgattccaaagcagttgacgaatcgctggttgtc

SEQ ID NO: 527257 - DNA, 60 bp, Artificial
  Synthetic oligonucleotide
cacccaatctttttaggatcgatgcactacgacattacatatgaggctttaaaaaataat

SEQ ID NO: 527258 - DNA, 60 bp, Artificial
  Synthetic oligonucleotide
cacccaattttcttaggatcgatgcattacgatgtgacctacgaaacgttgaaaaacaac

SEQ ID NO: 527259 - DNA, 60 bp, Artificial
  Synthetic oligonucleotide
caccccgagcgccgctggcttatcccagcgtggactgcgagctggtgggagatggcccgg

SEQ ID NO: 527260 - DNA, 60 bp, Artificial
  Synthetic oligonucleotide
cacccgagaaggagtggcggaacaaacggaaaagttgagagatctgcgacgcaaagagag

SEQ ID NO: 527261 - DNA, 60 bp, Artificial
  Synthetic oligonucleotide
caccctcccggcgcctctgtgccagacgtctctaaagtggtagctaagcagcaaacgatc

SEQ ID NO: 527262 - DNA, 60 bp, Artificial
  Synthetic oligonucleotide
caccgaacgtgatacgagaggaaatggccgctctagacgcgataagagatacttggatag

SEQ ID NO: 527263 - DNA, 60 bp, Artificial
  Synthetic oligonucleotide
caccgaatgcaactactggttattacaccgtaactaactacgacacagtaaacatgacat

SEQ ID NO: 527264 - DNA, 60 bp, Artificial
  Synthetic oligonucleotide
caccgttgctcactggtgatactgaacctgcatttcatacagatgtggtcacgtatgggg

SEQ ID NO: 527265 - DNA, 60 bp, Artificial
  Synthetic oligonucleotide
cacctcttgaacgcatcgcaattcatttcgtaatgcttgtcgtttcattctgtggaatta

SEQ ID NO: 527266 - DNA, 60 bp, Artificial
  Synthetic oligonucleotide
caaggagaggcccgtaattttttagatcgtgctattggtgacgaatatcgaatcaatttc

SEQ ID NO: 527267 - DNA, 60 bp, Artificial
  Synthetic oligonucleotide
caaggccaaacgtgatatatcatctcttgccgctactcctggaattcgctcacaaccctt

SEQ ID NO: 527268 - DNA, 60 bp, Artificial
  Synthetic oligonucleotide
caaggtcgaaacgacccgatgatgatttatctggtttggagaaggattgaaaatttttct

SEQ ID NO: 527269 - DNA, 60 bp, Artificial
  Synthetic oligonucleotide
caaggttggtgagtggctgggaactgtcacatctggtcaaagtcagtcatctgcaatcat

SEQ ID NO: 527270 - DNA, 60 bp, Artificial
  Synthetic oligonucleotide
caagtcgtttaaagttcactcgtggcgtcttccgtcccaatccccgttccacgttcagtt

SEQ ID NO: 527271 - DNA, 60 bp, Artificial
  Synthetic oligonucleotide
caagttgaaggcttagcttttggttattacagtaccggcacatcttcacccgcagacttt

SEQ ID NO: 527272 - DNA, 60 bp, Artificial
  Synthetic oligonucleotide
caagttgaatcatgcagtcttgaagttaggagttaatgatacatggagaccatcacctcc

SEQ ID NO: 527273 - DNA, 60 bp, Artificial
  Synthetic oligonucleotide
caagttggtggtgctaatatattagacataactgcggatccaacgactaatccacaaatt

SEQ ID NO: 527274 - DNA, 60 bp, Artificial
  Synthetic oligonucleotide
caataaaacgatgtttgacttatcttctacgcttaacaattgtcgtgatatgaaagtttc

SEQ ID NO: 527275 - DNA, 60 bp, Artificial
  Synthetic oligonucleotide
caataaatacatgctgtcgaagtctccagaggatattggaccatctgattctgcttcaaa

SEQ ID NO: 527276 - DNA, 60 bp, Artificial
  Synthetic oligonucleotide
caataatggaagatccgggaatggcgtactttccttacattgcatctgtcctaacagtct

SEQ ID NO: 527277 - DNA, 60 bp, Artificial
  Synthetic oligonucleotide
caataccaaacatcttgcagaatatgctgtggatccagatgtaatcgacttcgttctttc

SEQ ID NO: 527278 - DNA, 60 bp, Artificial
  Synthetic oligonucleotide
caatacgtatacatctccgatgcatgctagacgtatgataagatcaaaaacagtacatcc

SEQ ID NO: 527279 - DNA, 60 bp, Artificial
  Synthetic oligonucleotide
caatacttaactagtggtaagtcgaaagtatgttgtgttaaaatgactgctatggatcta

SEQ ID NO: 527280 - DNA, 60 bp, Artificial
  Synthetic oligonucleotide
caatagctaatgcttcccaaacacaatggaaatttattgatgtcgttaaaactacacaaa

SEQ ID NO: 527281 - DNA, 60 bp, Artificial
  Synthetic oligonucleotide
caattcaataatctacggtattgcgccaccaccacaatttaaaaagcgctataacacaaa

SEQ ID NO: 527282 - DNA, 60 bp, Artificial
  Synthetic oligonucleotide
caattcaagttaggacttacaatgacgaattagaaggtaagatggaacatttggtcgata

SEQ ID NO: 527283 - DNA, 60 bp, Artificial
  Synthetic oligonucleotide
caattaaccctgtcatgagcttaaagaaagacgttaacactgcagcgaatctctacctga

SEQ ID NO: 527284 - DNA, 60 bp, Artificial
  Synthetic oligonucleotide
caattaaaattacaagacaatctcggtactaatcgtttagaaagaagaggctcctatttg

SEQ ID NO: 527285 - DNA, 60 bp, Artificial
  Synthetic oligonucleotide
caatgtgtgggtgcgtgtgagcgtgttgcttttgtctctaaggacatgagcttgatcata

SEQ ID NO: 527286 - DNA, 60 bp, Artificial
  Synthetic oligonucleotide
caatggccacagttctaaatataaacggagcgttggtagatgcggaaatcaaagtgtcaa

SEQ ID NO: 527287 - DNA, 60 bp, Artificial
  Synthetic oligonucleotide
caatggatgtatcatatgcaaatactacaaaggataaaccaattcaaacgtcgacactat

SEQ ID NO: 527288 - DNA, 60 bp, Artificial
  Synthetic oligonucleotide
caatgcttggtgttgttaacttgggagcaacttttttaatgatggtttgcgctaagagtg

SEQ ID NO: 527289 - DNA, 60 bp, Artificial
  Synthetic oligonucleotide
caatgattgcggcgacggatgcggaagagccaataagggcattccgactgattgagttgg

SEQ ID NO: 527290 - DNA, 60 bp, Artificial
  Synthetic oligonucleotide
caatgattgacgcagagattaagatatcaaaagggatggggatggtggcgccatatacaa

SEQ ID NO: 527291 - DNA, 60 bp, Artificial
  Synthetic oligonucleotide
caatcgtataatgatgcggtgaggatgagttttacggaattttcatcagtcccgctagat

SEQ ID NO: 527292 - DNA, 60 bp, Artificial
  Synthetic oligonucleotide
caatcagataaaacgggaagtggaaaggcaaattaatacatgtccctattcaggctacag

SEQ ID NO: 527293 - DNA, 60 bp, Artificial; identical to SEQ ID NO: 341913
  Synthetic oligonucleotide

SEQ ID NO: 527294 - DNA, 60 bp, Artificial
  Synthetic oligonucleotide
caatatgtcacatcacgcggtggttcgggtgccgcattacgagacgcactaaaagcagct

SEQ ID NO: 527295 - DNA, 60 bp, Artificial
  Synthetic oligonucleotide
caatatgaaaagatacagcactactttgttaatacacctcttgaacgcatcgcaattcat

SEQ ID NO: 527296 - DNA, 60 bp, Artificial
  Synthetic oligonucleotide
caatataggaaatttatgcctacattgcccgataatgttcaatatgttatacaatgcata

SEQ ID NO: 527297 - DNA, 60 bp, Artificial
  Synthetic oligonucleotide
caatatagcgtatgaacatagacagtgggcggtgcctttgctcttctacgcagataaaat

SEQ ID NO: 527298 - DNA, 60 bp, Artificial
  Synthetic oligonucleotide
atgctatgtaaggcggttgattcatatgaaaaaatactaaaagctgaggactcaaaaatg

SEQ ID NO: 527299 - DNA, 60 bp, Artificial
  Synthetic oligonucleotide
atgctattggtcggatggatcctcagctacgtgaggaagtgatacgtctgatagttgcat

SEQ ID NO: 527300 - DNA, 60 bp, Artificial
  Synthetic oligonucleotide
atgctcgcgagcattgtcggatgccgtgccgtcaaaggtggtccagactcgtacacggcg

SEQ ID NO: 527301 - DNA, 60 bp, Artificial
  Synthetic oligonucleotide
atggaaaagcttaccgacctcaactacacattgagtgtaatcactctaatgaacaacaca

SEQ ID NO: 527302 - DNA, 60 bp, Artificial
  Synthetic oligonucleotide
atggaaagaaatgcagtacaatagagacataattatcaggtttagatttgagaatgtgat

SEQ ID NO: 527303 - DNA, 60 bp, Artificial
  Synthetic oligonucleotide
atggaaattagtactagttacacctacatgttatctgacaatgtgtatgtggcaaatgtt

SEQ ID NO: 527304 - DNA, 60 bp, Artificial
  Synthetic oligonucleotide
atggaacaatacccgactggaaagatctaggcgcgttcctagagataattctgaatggga

SEQ ID NO: 527305 - DNA, 60 bp, Artificial
  Synthetic oligonucleotide
atggacacaatcgctgcacgagcgctcaccgttatgagatcttgcgtcacgctacaggat

SEQ ID NO: 527306 - DNA, 60 bp, Artificial
  Synthetic oligonucleotide
atggacttgcagtcacctaaaaaggaattgtttatttaacgggatgtgtatcaagcaaaa

SEQ ID NO: 527307 - DNA, 60 bp, Artificial
  Synthetic oligonucleotide
atggagatactggggatagcaataaacagatacaatgggttgaccctgcgaggcgtaaca

SEQ ID NO: 527308 - DNA, 60 bp, Artificial
  Synthetic oligonucleotide
atggagcgctttttgaggaagtacaacatcagtggagatcatgcgaacgcgacgaggact

SEQ ID NO: 527309 - DNA, 60 bp, Artificial
  Synthetic oligonucleotide
atggagtgatggtagacgcggaaataaagtattgcaaagggatgggaatcgtccaaccat

SEQ ID NO: 527310 - DNA, 60 bp, Artificial
  Synthetic oligonucleotide
atggataaccaaaacgaaataaggcacataaagcgagaaatattgcctaggtttaagcgc

SEQ ID NO: 527311 - DNA, 60 bp, Artificial
  Synthetic oligonucleotide
atggataagcttgccgacctcaactacacattaagtgtaatcactttaatgaatgacaca

SEQ ID NO: 527312 - DNA, 60 bp, Artificial
  Synthetic oligonucleotide
atggatatgcgccacgcacagatggaacaataccggactggaacaacttaggtagcttcc

SEQ ID NO: 527313 - DNA, 60 bp, Artificial
  Synthetic oligonucleotide
atggccgcaccagaggttatacagcatggcaggtttagacaacgtggtggacaaaacgtg

SEQ ID NO: 527314 - DNA, 60 bp, Artificial
  Synthetic oligonucleotide
atggcgcgtcaattagatatcgcattgaatgactatctgctgtatatgtataacacgcgt

SEQ ID NO: 527315 - DNA, 60 bp, Artificial
  Synthetic oligonucleotide
atggcggctgggaccaggaaaggttcaaaatgcataagatcctcaagtcacaaggaaatg

SEQ ID NO: 527316 - DNA, 60 bp, Artificial
  Synthetic oligonucleotide
atggcgtatgtgcacgaaggggaaggtgatggattgaaagagcttttacatctgattgat

SEQ ID NO: 527317 - DNA, 60 bp, Artificial
  Synthetic oligonucleotide
atggctacgttcaaagatgctagttattactacaagaggttgaacaaattgaattatgca

SEQ ID NO: 527318 - DNA, 60 bp, Artificial
  Synthetic oligonucleotide
atggctcaaaaagtagaaaaggtcgcgtatgcatcatatgcagaagcatttagagatgat

SEQ ID NO: 527319 - DNA, 60 bp, Artificial
  Synthetic oligonucleotide
atggcttcgctcatttacagacagctactcactaattcttatacagtagaattgtcagat

SEQ ID NO: 527320 - DNA, 60 bp, Artificial
  Synthetic oligonucleotide
atgggaggtatttttggtaatcctaaccaggccattgacaaattgactgagatagataaa

SEQ ID NO: 527321 - DNA, 60 bp, Artificial
  Synthetic oligonucleotide
atgggatcaggcagcaatttatactccaactatatcgtaaacagacttagaggatttgag

SEQ ID NO: 527322 - DNA, 60 bp, Artificial
  Synthetic oligonucleotide
atggggtgaagttggaaggtgaggcacgacagactcagttttctcgtacattcgattcaa

SEQ ID NO: 527323 - DNA, 60 bp, Artificial
  Synthetic oligonucleotide
atggtacatcaacggaaataccgcagtggtttaagagtctaaatcctatgcttggagtag

SEQ ID NO: 527324 - DNA, 60 bp, Artificial
  Synthetic oligonucleotide
atggttatgtaacccaatggatgtaacattatactattatcaacaatcgggagaatcaaa

SEQ ID NO: 527325 - DNA, 60 bp, Artificial
  Synthetic oligonucleotide
atgtaagaggttgggttgccgtcgtctgtcttcggaagcgacggaatccttcaccgcaag

SEQ ID NO: 527326 - DNA, 60 bp, Artificial
  Synthetic oligonucleotide
atgactcatctgcgggtgttctagtgcactatgataagcccactaacgggaatcattacg

SEQ ID NO: 527327 - DNA, 60 bp, Artificial
  Synthetic oligonucleotide
atgagagagcgatggttggcgaatatcgtaataaaatcgacgctctaaggaatgctatag

SEQ ID NO: 527328 - DNA, 60 bp, Artificial
  Synthetic oligonucleotide
atgagagagctgatctgcagctatttcaaggtcgatcatgctgatgggttgaaatatata

SEQ ID NO: 527329 - DNA, 60 bp, Artificial
  Synthetic oligonucleotide
atgaggaagatatcgaaggcaaaataaagcgatgtggtgcgcagctactcgaagattacc

SEQ ID NO: 527330 - DNA, 60 bp, Artificial
  Synthetic oligonucleotide
atgagggagctgcgcagaaagatgcggagtctagactcaggagggagaaggtgcgtcgtc

SEQ ID NO: 527331 - DNA, 60 bp, Artificial
  Synthetic oligonucleotide
atgaggtccaattatgatatacgtgagcttcgacaaaagattaagaatgaacgtgagatg

SEQ ID NO: 527332 - DNA, 60 bp, Artificial
  Synthetic oligonucleotide
atgagtgggaaagcggaaaaaatccatatgaaccgtcagaagtgactgcgtctatgtgag

SEQ ID NO: 527333 - DNA, 60 bp, Artificial
  Synthetic oligonucleotide
atgataacaatgactggaattgaagcgactacggagagatgggaagagtggaagtttgag

SEQ ID NO: 527334 - DNA, 60 bp, Artificial
  Synthetic oligonucleotide
atgatacgaacagtagacgaaatagatatgacgaaggaaattaaccaaaagaacgtgaga

SEQ ID NO: 527335 - DNA, 60 bp, Artificial
  Synthetic oligonucleotide
atgatagcccgatttatagaggcattatgttatatgctactgagaagtttgggagcgtgt

SEQ ID NO: 527336 - DNA, 60 bp, Artificial
  Synthetic oligonucleotide
atgatatcgctgtcacaggtaaagctgttaaatttagcccgatggtagtaaccatgccaa

SEQ ID NO: 527337 - DNA, 60 bp, Artificial
  Synthetic oligonucleotide
atgatgttcgacgcctggatgttacagtgggacatcgaccaagcgataatcgatctggag

SEQ ID NO: 527338 - DNA, 60 bp, Artificial
  Synthetic oligonucleotide
atgattacgcttgatggtgacacggtggtacccgttgccccgacgctttctgcggaacag

SEQ ID NO: 527339 - DNA, 60 bp, Artificial
  Synthetic oligonucleotide
atgcacatagggcttttcagcgagtgctctctcagggatacgcatcattaatgtgctatt

SEQ ID NO: 527340 - DNA, 60 bp, Artificial
  Synthetic oligonucleotide
atgcagacactggcgtgtctatggattcatcaacacaatcacgaccatcaagcaacgttg

SEQ ID NO: 527341 - DNA, 60 bp, Artificial
  Synthetic oligonucleotide
atgctatccaggttagtcccaggtgtggaaactagaattgagatgaaagcaagcgatgaa

SEQ ID NO: 527342 - DNA, 60 bp, Artificial
  Synthetic oligonucleotide
atgctacaatgtttgaaatggttagatgtattatcaccttgtgctacgctgaaaaagttc

SEQ ID NO: 527343 - DNA, 60 bp, Artificial
  Synthetic oligonucleotide
atgctaatgccacgagaacttttttggctatatcacctcaatggacttgcagtcatttga

SEQ ID NO: 527344 - DNA, 60 bp, Artificial; identical to SEQ ID NO: 124355
  Synthetic oligonucleotide

SEQ ID NO: 527345 - DNA, 60 bp, Artificial
  Synthetic oligonucleotide
atgcggaatcgcgactcagaagggagaaggtgcgtaatccagtagaggttgagcgtatcc

SEQ ID NO: 527346 - DNA, 60 bp, Artificial
  Synthetic oligonucleotide
atgcgcgacccatcacatgcttttaatggagtgaagctggagggtgaggcgaggcagact

SEQ ID NO: 527347 - DNA, 60 bp, Artificial
  Synthetic oligonucleotide
atgcgcatgcaaatgctccgacgcttggtggtcaggcgggtgaaatggagtccatgtcgc

SEQ ID NO: 527348 - DNA, 60 bp, Artificial
  Synthetic oligonucleotide
atgcgagtaaattggaaaaaatggtggcaagtgttttatacagtagttgactatattaac

SEQ ID NO: 527349 - DNA, 60 bp, Artificial
  Synthetic oligonucleotide
atgcctggcccgctcacacgtgcaattgcacgcgccgcttacgcatagtccactttgcac

SEQ ID NO: 527350 - DNA, 60 bp, Artificial
  Synthetic oligonucleotide
atgccgagagtcgcgttggatatattggacaaagcgatgtcaaatcaaacgggcgcaact

SEQ ID NO: 527351 - DNA, 60 bp, Artificial
  Synthetic oligonucleotide
atgccaattattccactagcaactgttttatctacagatgaccacgagtctatggtcgca

SEQ ID NO: 527352 - DNA, 60 bp, Artificial
  Synthetic oligonucleotide
atgcatttagtgtactggcgccagatttcaatctattcggcgtcgtaccgatacagggtc

SEQ ID NO: 527353 - DNA, 60 bp, Artificial
  Synthetic oligonucleotide
atgcatatgacgcgctcagtgaaggcaccaactacccagctatccgcttatatgagatga

SEQ ID NO: 527354 - DNA, 60 bp, Artificial
  Synthetic oligonucleotide
atgcagtcttgaagttaggagttaatgatacatggagaccatcacctccgaccaaatata

SEQ ID NO: 527355 - DNA, 60 bp, Artificial
  Synthetic oligonucleotide
attaggggaatcgtacatataagcgtaacgcgggaggggacagcgagggtccgaagtggt

SEQ ID NO: 527356 - DNA, 60 bp, Artificial
  Synthetic oligonucleotide
attatacaagttggaggttctaacattcttgatataacggctgatccgactacggctcca

SEQ ID NO: 527357 - DNA, 60 bp, Artificial
  Synthetic oligonucleotide
attatacactaaaatcattaactagtgcaatggactttataatttatagactccttttgc

SEQ ID NO: 527358 - DNA, 60 bp, Artificial
  Synthetic oligonucleotide
attatacatatgacactgctgatagcggcggtcgttgctctgttgacatcggtttgcacg

SEQ ID NO: 527359 - DNA, 60 bp, Artificial
  Synthetic oligonucleotide
attatagcgccatttgtaaattcacagaactacggcattaatttaccgataacggggtca

SEQ ID NO: 527360 - DNA, 60 bp, Artificial
  Synthetic oligonucleotide
attatatgggtatagctttgaaattactagagtgtcgattacagcttcaaaaacagagga

SEQ ID NO: 527361 - DNA, 60 bp, Artificial
  Synthetic oligonucleotide
attatgagatttcattatgggttcaaagctcgacgaaacgatctcgaagcggatttatta

SEQ ID NO: 527362 - DNA, 60 bp, Artificial
  Synthetic oligonucleotide
attatgctaccgttccacgtgctgatgctacgggctggtgcgcgtcacgacgtaaagggt

SEQ ID NO: 527363 - DNA, 60 bp, Artificial
  Synthetic oligonucleotide
attattaggactagagtgaacagtttatatggactaccagctatgaatccaaacggaaat

SEQ ID NO: 527364 - DNA, 60 bp, Artificial
  Synthetic oligonucleotide
attcaacaagagggcgcatcgttgatacaccagagacgattaatgcgttcacgaggggtt

SEQ ID NO: 527365 - DNA, 60 bp, Artificial
  Synthetic oligonucleotide
attcagtgtatagaccatcaattgaggaactatatagagtaatatcgctacatgaaaatg

SEQ ID NO: 527366 - DNA, 60 bp, Artificial
  Synthetic oligonucleotide
attcatatgtacaaatacctgacggtaatgtagttaaaaagatacaatatggagctgttg

SEQ ID NO: 527367 - DNA, 60 bp, Artificial
  Synthetic oligonucleotide
attccaacaatgaaaattgcactgaagacgtccaaatgttcatataaagtgataaagtat

SEQ ID NO: 527368 - DNA, 60 bp, Artificial
  Synthetic oligonucleotide
attctgtggcacgcgacggcgaaacgcatgggcctgggcgagtttttgtgtcaactccag

SEQ ID NO: 527369 - DNA, 60 bp, Artificial
  Synthetic oligonucleotide
attcttatgtttatgttgattactgggatgattcacaagccttcaggaacatggtttatg

SEQ ID NO: 527370 - DNA, 60 bp, Artificial
  Synthetic oligonucleotide
attgaacaggttgaattacttaagcgtatacatgacaagttggtgactagaccagtcgac

SEQ ID NO: 527371 - DNA, 60 bp, Artificial
  Synthetic oligonucleotide
attgacttagctatgttgccactagacatgttttcgatgttctcgggaattgagggtact

SEQ ID NO: 527372 - DNA, 60 bp, Artificial
  Synthetic oligonucleotide
attgagatcgaacggaatttacagaaggagctggggataacgcgggagggagtagctgaa

SEQ ID NO: 527373 - DNA, 60 bp, Artificial
  Synthetic oligonucleotide
attgaggactcaatggatgttcaacctcttagagtgcagtttaaggaagaccacagcacg

SEQ ID NO: 527374 - DNA, 60 bp, Artificial
  Synthetic oligonucleotide
attgatgcattaaaggccgccatcgaaatcgaacgggacgggatgcaggaggaagcgatt

SEQ ID NO: 527375 - DNA, 60 bp, Artificial
  Synthetic oligonucleotide
attgcggcatcgattcgcgggaattaatcaacccgacaacatacggaattggaatgactt

SEQ ID NO: 527376 - DNA, 60 bp, Artificial
  Synthetic oligonucleotide
attggagttaagtatgatcaggaaaccaagacattgttcatcagtcaccccattctacga

SEQ ID NO: 527377 - DNA, 60 bp, Artificial
  Synthetic oligonucleotide
attggatagtgagaggaagagggaagatcttgaaagaagtcaagaacagttcaggacgca

SEQ ID NO: 527378 - DNA, 60 bp, Artificial
  Synthetic oligonucleotide
attggcatgcgttaggagcggcgcaagaagtgaagggacgtactctgaatgaggcatacc

SEQ ID NO: 527379 - DNA, 60 bp, Artificial
  Synthetic oligonucleotide
attggctggatataaagagcaggttactacaaaagacgaaattgagcaacaaatggacag

SEQ ID NO: 527380 - DNA, 60 bp, Artificial
  Synthetic oligonucleotide
attgggggccattactatacaactaattgttacacaggcgctgaggcattggtcacgacc

SEQ ID NO: 527381 - DNA, 60 bp, Artificial
  Synthetic oligonucleotide
attggtctttgagacagtagcgaaatgtgggcacgaggcgtcgcctagtaaaacgatgat

SEQ ID NO: 527382 - DNA, 60 bp, Artificial
  Synthetic oligonucleotide
attgtacaagttggtggttcagaagtgttagatattacagcggatccaactactgcgcca

SEQ ID NO: 527383 - DNA, 60 bp, Artificial
  Synthetic oligonucleotide
attgtgagaggttgagctgccgtcgtctgtctgcggaagcggcggagttcttaacagcaa

SEQ ID NO: 527384 - DNA, 60 bp, Artificial
  Synthetic oligonucleotide
atgtaccggtcaatatcgcacaaattagatcacagtatcagaatggtttacgtctaaatg

SEQ ID NO: 527385 - DNA, 60 bp, Artificial
  Synthetic oligonucleotide
atgtacgaggaaccaaaagatgaggaagcggtttcgttaaggtttcagtggaacttagat

SEQ ID NO: 527386 - DNA, 60 bp, Artificial
  Synthetic oligonucleotide
atgtacgctattatcaaagattggacgtataaaatggaatgcagaggaagaacccaagga

SEQ ID NO: 527387 - DNA, 60 bp, Artificial
  Synthetic oligonucleotide
atgtagaaatgaatttgaaaaatcatggtataatcagctattacttccaattactttaaa

SEQ ID NO: 527388 - DNA, 60 bp, Artificial
  Synthetic oligonucleotide
atgtagcgattatacaaattggtggctcagatgtgttagatattacagcggatccaacta

SEQ ID NO: 527389 - DNA, 60 bp, Artificial
  Synthetic oligonucleotide
atgtatctttcgtccggaggatggggtcgcggattccggaaagcagcgctgcggggcctg

SEQ ID NO: 527390 - DNA, 60 bp, Artificial
  Synthetic oligonucleotide
atgtatggtattgaatataccacagttctattttatttgatatcgttcgttcttgtgagc

SEQ ID NO: 527391 - DNA, 60 bp, Artificial
  Synthetic oligonucleotide
atgtatggtattgaatataccacagttttaacctttttgatatcatttatattgttgaat

SEQ ID NO: 527392 - DNA, 60 bp, Artificial
  Synthetic oligonucleotide
atgtcattatctagtcagaaatcaggaatagctgacgaaattgcttcttcacaaacgttt

SEQ ID NO: 527393 - DNA, 60 bp, Artificial
  Synthetic oligonucleotide
atgtcgtacattttgaagatctagcggctcattggcatgcgttaggagcggcgcaagaag

SEQ ID NO: 527394 - DNA, 60 bp, Artificial
  Synthetic oligonucleotide
atgtctctcagcattgacgtaacaagtctcccctcaatttcttctagtatctttaaaaat

SEQ ID NO: 527395 - DNA, 60 bp, Artificial
  Synthetic oligonucleotide
atgtctgtcaaggtgacgatggcttaatgattgtcgatggtctctcaacgggtaagttat

SEQ ID NO: 527396 - DNA, 60 bp, Artificial
  Synthetic oligonucleotide
atgtgagaggttgagttgccgtcgtctgtcttcggaagcggcggaactctttaccgcaag

SEQ ID NO: 527397 - DNA, 60 bp, Artificial
  Synthetic oligonucleotide
atgtgggaaatatatctcctgattacatacagaatttagcgacaataggggtgttggcga

SEQ ID NO: 527398 - DNA, 60 bp, Artificial
  Synthetic oligonucleotide
atgtgtgagggtggttacggcacggcgtaacactcacacatacacgtgtcactgtcgtag

SEQ ID NO: 527399 - DNA, 60 bp, Artificial
  Synthetic oligonucleotide
attagctcgtaagattggggaccgatcgttagtgaaagatacagctgtattgaagcacgc

SEQ ID NO: 527400 - DNA, 60 bp, Artificial
  Synthetic oligonucleotide
attagatgctgctttagaccagcttaaaacagaatatacagaggatgcagacaatgaaat

SEQ ID NO: 527401 - DNA, 60 bp, Artificial
  Synthetic oligonucleotide
attacgcttatagacgcgctgtgaccgtatagggtgacagtacgcaggggattaaggata

SEQ ID NO: 527402 - DNA, 60 bp, Artificial
  Synthetic oligonucleotide
attacctcgttacttggcgagcaatatataaggacaacgagctattgcgagagcctttat

SEQ ID NO: 527403 - DNA, 60 bp, Artificial
  Synthetic oligonucleotide
attacccaactgaagcagcaacagaaataaatgataattcatggaaggatacactttctc

SEQ ID NO: 527404 - DNA, 60 bp, Artificial
  Synthetic oligonucleotide
attaccagttggtgcgtggccagtaatgactggtggcgctgtgtcattacgacctgcagg

SEQ ID NO: 527405 - DNA, 60 bp, Artificial
  Synthetic oligonucleotide
attacatggaggggcaataaccgttgagggtagaggatttcgacaggcgtatactgagtt

SEQ ID NO: 527406 - DNA, 60 bp, Artificial
  Synthetic oligonucleotide
attacacggaagtgaagcagagactttaaataatgcaaacccgcggttgcacaaagttta

SEQ ID NO: 527407 - DNA, 60 bp, Artificial
  Synthetic oligonucleotide
attaatgcgttcacgaggagttcatccgatctacctaggagcggtgcattatgaggtctc

SEQ ID NO: 527408 - DNA, 60 bp, Artificial
  Synthetic oligonucleotide
attaatagatataatggactaactctgaggtcagtcactatgcgaccgacatcacaggaa

SEQ ID NO: 527409 - DNA, 60 bp, Artificial
  Synthetic oligonucleotide
attaagaatgagcgtgagatggcaccgcgcccacaggttcagagcacggtatcaagggaa

SEQ ID NO: 527410 - DNA, 60 bp, Artificial
  Synthetic oligonucleotide
attaaccagaagaacattagaacgctggaagagtgggaaaacggaaaaaatccgtatgaa

SEQ ID NO: 527411 - DNA, 60 bp, Artificial
  Synthetic oligonucleotide
atgttgttgatggagtaaatcacaaaataaatctcacaacagctacttgtactatacgaa

SEQ ID NO: 527412 - DNA, 60 bp, Artificial
  Synthetic oligonucleotide
atgttgcggtacgtcgctttacacctgctattatcatgcacgccaggcgtggcattccag

SEQ ID NO: 527413 - DNA, 60 bp, Artificial
  Synthetic oligonucleotide
atgttaacattatgcggggtggaggcaacgactgagagatgggaagagtggaaatttgag

SEQ ID NO: 527414 - DNA, 60 bp, Artificial
  Synthetic oligonucleotide
atgtgttccctgagttccgttcagacgtagcggaaaagtttggtattaaactgactataa

SEQ ID NO: 527415 - DNA, 60 bp, Artificial
  Synthetic oligonucleotide
aagccaaccgctgatcaggccctcgccttaagaaccatcagcgcactgtctgacatatgg

SEQ ID NO: 527416 - DNA, 60 bp, Artificial
  Synthetic oligonucleotide
aagccctggcgaccgttgcgatctggcgctcaagatgctatcacggccgtgcaactgttc

SEQ ID NO: 527417 - DNA, 60 bp, Artificial
  Synthetic oligonucleotide
aagccttaatcccgtttaaccaatccggtcagcaccggacgttaatggaaggaaaggtct

SEQ ID NO: 527418 - DNA, 60 bp, Artificial
  Synthetic oligonucleotide
aagcggaacgtggcatgaacagcccggattccgatgaggatcaaaatccaatgaatcaga

SEQ ID NO: 527419 - DNA, 60 bp, Artificial
  Synthetic oligonucleotide
aagcgtcgcttttagctatggtgaatgcaacccaagcacgtgctcacgcggaattccaaa

SEQ ID NO: 527420 - DNA, 60 bp, Artificial
  Synthetic oligonucleotide
aagctaggtggaaaagtgattgtaggcgatttagaggctacgggatcgcgggtaatggac

SEQ ID NO: 527421 - DNA, 60 bp, Artificial
  Synthetic oligonucleotide
aaggagagcacagatttcagctctattaaccatgctacaaaaacccgttacatttaaatc

SEQ ID NO: 527422 - DNA, 60 bp, Artificial
  Synthetic oligonucleotide
aagggagtataagcgtaagatgggaacgagagagggggcctcgatcgattcatggcttga

SEQ ID NO: 527423 - DNA, 60 bp, Artificial
  Synthetic oligonucleotide
aagggcttatgccttccaacacgtgactgtcctacacggaagtgaggcggaaacgttgag

SEQ ID NO: 527424 - DNA, 60 bp, Artificial
  Synthetic oligonucleotide
aaggtaacgaaattaagtacgtagaaaaagcgcttagcggtttgctggagatagggaaag

SEQ ID NO: 527425 - DNA, 60 bp, Artificial
  Synthetic oligonucleotide
aaggtagtgatgaaaggagatcggaaacatggaaagaatagccgagatggctcttcaaaa

SEQ ID NO: 527426 - DNA, 60 bp, Artificial
  Synthetic oligonucleotide
aaggtccaataaacagagctattgctcaaaacgcctatgtgtgagggcagttatggcacg

SEQ ID NO: 527427 - DNA, 60 bp, Artificial
  Synthetic oligonucleotide
aaggttcgagaggctcagaccgcgctacgcaatgaaggacgggaagcggaccctgcgccc

SEQ ID NO: 527428 - DNA, 60 bp, Artificial
  Synthetic oligonucleotide
aagtaattcatccaacggtaatgatgaaattcaaggtaccaagggcgcaacagccccaga

SEQ ID NO: 527429 - DNA, 60 bp, Artificial
  Synthetic oligonucleotide
aagtaggaatttattcgctatccgtttgaaagtgggtatggcggagtaagaattgaaagc

SEQ ID NO: 527430 - DNA, 60 bp, Artificial
  Synthetic oligonucleotide
aagtgccgtcgactcactcaaagaatcacaagtggtggtgttgagacgcctgactacgat

SEQ ID NO: 527431 - DNA, 60 bp, Artificial
  Synthetic oligonucleotide
aagtggcaccctccagatcccgtttcgtcctaaccatcgatggggagacatcaggttctt

SEQ ID NO: 527432 - DNA, 60 bp, Artificial
  Synthetic oligonucleotide
aagtgggactaacaagtattataaattagatcagtatgcaaatcatatgggtatctctag

SEQ ID NO: 527433 - DNA, 60 bp, Artificial
  Synthetic oligonucleotide
aagtgtcatcaacagcaatatcgtgctgagactccgcttatgaggtatgttagggtgggt

SEQ ID NO: 527434 - DNA, 60 bp, Artificial
  Synthetic oligonucleotide
aagttattggatactattatccccatctaatgcgggagtagtagtggagggaacaaataa

SEQ ID NO: 527435 - DNA, 60 bp, Artificial
  Synthetic oligonucleotide
aagttcatgccaacactgcctaataatgttcaatacgtaattcaatgtattggatcaaga

SEQ ID NO: 527436 - DNA, 60 bp, Artificial
  Synthetic oligonucleotide
aagttggagcgtgacttacagtcaaaaattggatcagttgtttcgtcaatagaatggtat

SEQ ID NO: 527437 - DNA, 60 bp, Artificial
  Synthetic oligonucleotide
aagttgtgtctcgtgatgtacgtagaatggtcgagacgtttcatggcaaggatcgtgggc

SEQ ID NO: 527438 - DNA, 60 bp, Artificial
  Synthetic oligonucleotide
aagttttttaccggacccttggattcacccaaaattaaggacgaaatgaattcggaggag

SEQ ID NO: 527439 - DNA, 60 bp, Artificial
  Synthetic oligonucleotide
aagttttttgagtctgagatactgttatccattgcgaacctgagaacgagtttaacagaa

SEQ ID NO: 527440 - DNA, 60 bp, Artificial
  Synthetic oligonucleotide
aagtttttttcaggatgttgaaagtaaatgtgcaggccctcatttatcctttcagcggac

SEQ ID NO: 527441 - DNA, 60 bp, Artificial
  Synthetic oligonucleotide
aagtttttttcctcatccataatggctgacataagacttgacatagcgcccgatcttatc

SEQ ID NO: 527442 - DNA, 60 bp, Artificial
  Synthetic oligonucleotide
aataaagagtcggatattagaaaaagttgttcttggaacacgattccaactagtacaaat

SEQ ID NO: 527443 - DNA, 60 bp, Artificial
  Synthetic oligonucleotide
aataaagtattgcaaggggatgggaatcgtccaaccatatatgaaaaatgacttcgaccg

SEQ ID NO: 527444 - DNA, 60 bp, Artificial
  Synthetic oligonucleotide
aataaatggatagcgatgggacaatcttgtacaataaaagtgtgtccgttgaatacgcag

SEQ ID NO: 527445 - DNA, 60 bp, Artificial
  Synthetic oligonucleotide
aataaatggatatcgatgggacagtcttgtaccataaaggtatgtccattgaatacgcag

SEQ ID NO: 527446 - DNA, 60 bp, Artificial
  Synthetic oligonucleotide
aactcttctaccagatgcagagagatttagttttccaagagtaatcaattcagctgatgg

SEQ ID NO: 527447 - DNA, 60 bp, Artificial
  Synthetic oligonucleotide
aactgatgttgttgatggtgtgaaccataaacttgatgtaactacaaatacttgtacaat

SEQ ID NO: 527448 - DNA, 60 bp, Artificial; identical to SEQ ID NO: 302490
  Synthetic oligonucleotide

SEQ ID NO: 527449 - DNA, 60 bp, Artificial
  Synthetic oligonucleotide
aactggtacatttataaacattgagaagtcactgcagaaggagttaggcttcacacgcga

SEQ ID NO: 527450 - DNA, 60 bp, Artificial
  Synthetic oligonucleotide
aactggtacgttcataaacattgagaagtcgctgcagaaggagttgggtttcacacgtga

SEQ ID NO: 527451 - DNA, 60 bp, Artificial
  Synthetic oligonucleotide
aactgtcgttgaaagcgaatcctcaactaaagaccaaaaggatgatgaatcacagaaacc

SEQ ID NO: 527452 - DNA, 60 bp, Artificial
  Synthetic oligonucleotide
aacttaacggtacatcagcggagataccaccgtggtttaaaagtctaaatcccatgcttg

SEQ ID NO: 527453 - DNA, 60 bp, Artificial
  Synthetic oligonucleotide
aactttaggaattggatgcaaaactacggacgtggatacatttgagattgttgcctcgtc

SEQ ID NO: 527454 - DNA, 60 bp, Artificial
  Synthetic oligonucleotide
aagaaaacgtgcaatggcacatatgatattgattatcgctgcggttgttgccctaataac

SEQ ID NO: 527455 - DNA, 60 bp, Artificial
  Synthetic oligonucleotide
aagaaaatctatagtaccatagggaaggcggcggaaaggttcgcggagagtgaaattgga

SEQ ID NO: 527456 - DNA, 60 bp, Artificial
  Synthetic oligonucleotide
aagaaaattgaatgcggatgaactgaaaataaagaggtggtttatagattattatatgga

SEQ ID NO: 527457 - DNA, 60 bp, Artificial
  Synthetic oligonucleotide
aagaatgagtggggaaacgggcacatggggaccggatcgacagccattcggttatttttt

SEQ ID NO: 527458 - DNA, 60 bp, Artificial
  Synthetic oligonucleotide
aagaatgatgcgtataaattggaaaaaatggtggcaagtgttttatacaatagttgacta

SEQ ID NO: 527459 - DNA, 60 bp, Artificial
  Synthetic oligonucleotide
aagacaaatgcagacgctggcgtgtctatggattcatcaacacaatcacgaccttcaagc

SEQ ID NO: 527460 - DNA, 60 bp, Artificial
  Synthetic oligonucleotide
aagacggagttccttcatttaattgatcacctctaaagggtccagggtaccttcttgacg

SEQ ID NO: 527461 - DNA, 60 bp, Artificial
  Synthetic oligonucleotide
aagacgtttgctaaaatagagaaaggttcatcgttgcgtaagaccgaaattgaagacaaa

SEQ ID NO: 527462 - DNA, 60 bp, Artificial
  Synthetic oligonucleotide
aagcatcaattccgacgatgaaaattgcgctgaagacatcaaaatgctcgtataaggtgg

SEQ ID NO: 527463 - DNA, 60 bp, Artificial
  Synthetic oligonucleotide
aagattttgggagtggcagatgacatggccctattcatgcgtgacgcgtgaaggcggagc

SEQ ID NO: 527464 - DNA, 60 bp, Artificial
  Synthetic oligonucleotide
aagatttacgaagaacgtattcgttctcgatcaaaagcgaaaaacactatgcggacaaat

SEQ ID NO: 527465 - DNA, 60 bp, Artificial
  Synthetic oligonucleotide
aagatgggaaaaatcatcaaatcactgagccgattcggcaaaaaagtcgggagtgcgctg

SEQ ID NO: 527466 - DNA, 60 bp, Artificial
  Synthetic oligonucleotide
aagatgataaagaagagggcatagaagcggatgagggaatagttgagatcacatcttcaa

SEQ ID NO: 527467 - DNA, 60 bp, Artificial
  Synthetic oligonucleotide
aagatcatctcttagcctacttgaacgagcacgtgtgcgtgaacgccaaggaccatgaga

SEQ ID NO: 527468 - DNA, 60 bp, Artificial
  Synthetic oligonucleotide
aagatcactatgtcgtgggattggcaggtcccggagtagtgattcccaccgctgtataac

SEQ ID NO: 527469 - DNA, 60 bp, Artificial
  Synthetic oligonucleotide
aagataccggctgtaacgtttattctacatttgtacgctaaattagagattattaaccac

SEQ ID NO: 527470 - DNA, 60 bp, Artificial
  Synthetic oligonucleotide
aagagttggtgacgccagctcgagattttggccattttgggctatcccattattcgaggg

SEQ ID NO: 527471 - DNA, 60 bp, Artificial
  Synthetic oligonucleotide
aagagttagttaaacatcaaatatataacgttgttcgtacataccatgctcaattaaaat

SEQ ID NO: 527472 - DNA, 60 bp, Artificial
  Synthetic oligonucleotide
aagagttagcggtgagcatactagcaaagaataacgcgatagctgcgaatacgagggagg

SEQ ID NO: 527473 - DNA, 60 bp, Artificial
  Synthetic oligonucleotide
aagaggtgagaattgtggttgagtcaaatgtattagagattttgggaatcgcaattaata

SEQ ID NO: 527474 - DNA, 60 bp, Artificial
  Synthetic oligonucleotide
aagagcagacgatggctcaaacaagttgcgagaaaagcagaacaataagtctggtcccgc

SEQ ID NO: 527475 - DNA, 60 bp, Artificial
  Synthetic oligonucleotide
aagagatgagacgtcagctggaaatgattgataaacttactactcgtgagattgaacagg

SEQ ID NO: 527476 - DNA, 60 bp, Artificial
  Synthetic oligonucleotide
aagagatgagacgtcaactggagatgattgacaaattgacaactcgtgaaattgagcagg

SEQ ID NO: 527477 - DNA, 60 bp, Artificial
  Synthetic oligonucleotide
aatgcaagtggtacgtaactgcatcagtatacacataaatgattgtgaatggaataaagc

SEQ ID NO: 527478 - DNA, 60 bp, Artificial
  Synthetic oligonucleotide
aatgcactcagcggaattgacttatcacatatgcgaagccccaagatcgaacctactatt

SEQ ID NO: 527479 - DNA, 60 bp, Artificial
  Synthetic oligonucleotide
aatgcgaatagttaatgatagagagttgcagctccatatactgagaggaccactacattt

SEQ ID NO: 527480 - DNA, 60 bp, Artificial
  Synthetic oligonucleotide
aatggaaagactcattatcgcaaatgcttcttacaaaaggttggccaacaggatcagtct

SEQ ID NO: 527481 - DNA, 60 bp, Artificial
  Synthetic oligonucleotide
aatggaaagatacattgtcacaaatgtttctcacaaaaggttggccaacaggatcggtct

SEQ ID NO: 527482 - DNA, 60 bp, Artificial
  Synthetic oligonucleotide
aatggatactgtatactctaactctactcaagaaggagtatttctaacatccacgttatg

SEQ ID NO: 527483 - DNA, 60 bp, Artificial
  Synthetic oligonucleotide
aatgggaagaaggtggaaatccatacaagtcaaaagaagtgactgcatctttgtaagagg

SEQ ID NO: 527484 - DNA, 60 bp, Artificial
  Synthetic oligonucleotide
aatgggcgattcatgtacgataaaagtatgcccgctcaatacacagacccttggaatagg

SEQ ID NO: 527485 - DNA, 60 bp, Artificial
  Synthetic oligonucleotide
aatgtaatgattttggcagtcctgataacatgtttttgctaaatgttttagataaggacg

SEQ ID NO: 527486 - DNA, 60 bp, Artificial
  Synthetic oligonucleotide
aatgttacgaacgtctatcggccaccaaaggattaaaccagagtatggaactcagaacgc

SEQ ID NO: 527487 - DNA, 60 bp, Artificial
  Synthetic oligonucleotide
aatgttatcacagaatagcggtgaatctcaacaacagcgagactatgtattcgatgatgc

SEQ ID NO: 527488 - DNA, 60 bp, Artificial
  Synthetic oligonucleotide
aatgttggaccaatatcgccagattatacccaacatatggctaccatcggtgttttagcg

SEQ ID NO: 527489 - DNA, 60 bp, Artificial
  Synthetic oligonucleotide
aatgttttttatgtgcttagatatgacgttggcagcagcaaacttgaatatagggaatat

SEQ ID NO: 527490 - DNA, 60 bp, Artificial
  Synthetic oligonucleotide
aattaatgaagtcgaatttaacgattcgattattgattcgcagatcgtagaggaacttgg

SEQ ID NO: 527491 - DNA, 60 bp, Artificial
  Synthetic oligonucleotide
aattacacattaagcgtgatcactctaatgaatgacacactacattctattattcaagat

SEQ ID NO: 527492 - DNA, 60 bp, Artificial
  Synthetic oligonucleotide
aattatatgagatttcatcctggggttagattaaggtctaaagtgctcgatgacgcagaa

SEQ ID NO: 527493 - DNA, 60 bp, Artificial
  Synthetic oligonucleotide
aattcatatttacgctgcaccctgggattcagacgacgtattcatattgcattgcgttgc

SEQ ID NO: 527494 - DNA, 60 bp, Artificial
  Synthetic oligonucleotide
aattcttacattagtgatcttgcatcttctatcggacgtagaagaagttattctagttat

SEQ ID NO: 527495 - DNA, 60 bp, Artificial
  Synthetic oligonucleotide
aattgagccaggtgtcgcatcagagactagaacgtatatgatgtttggatcgagcaaaca

SEQ ID NO: 527496 - DNA, 60 bp, Artificial
  Synthetic oligonucleotide
aattgatatggttcgaaatatgggaatagttactgtaagaacttttgattcttatagaat

SEQ ID NO: 527497 - DNA, 60 bp, Artificial
  Synthetic oligonucleotide
aattgatatgtcacaagaatttaatcagaaacatttcaaaacgctaaatgagtgggctga

SEQ ID NO: 527498 - DNA, 60 bp, Artificial
  Synthetic oligonucleotide
aattgattggcgcatcaggaaagaaactctcgtattctgaaagacatgccattggagtta

SEQ ID NO: 527499 - DNA, 60 bp, Artificial
  Synthetic oligonucleotide
aattggagctaggatttctttatatgctcctagaaaatactatgcgtctactctgtcgtt

SEQ ID NO: 527500 - DNA, 60 bp, Artificial
  Synthetic oligonucleotide
aattgtattcccatcgtactataataaatggacgtatgctccgatgtttaatgcgagagt

SEQ ID NO: 527501 - DNA, 60 bp, Artificial
  Synthetic oligonucleotide
aatttagcgacaattggggttttagcgacgccggaaataccctatacaatggaatcagcg

SEQ ID NO: 527502 - DNA, 60 bp, Artificial
  Synthetic oligonucleotide
aatttttaatgtctattcgtataaaaatcctctgtggcatggtttgcgggcagcaatact

SEQ ID NO: 527503 - DNA, 60 bp, Artificial
  Synthetic oligonucleotide
acaacaactcgaacaatggcaacaacaaatgcaagcagcaggcttcacaacagaatactt

SEQ ID NO: 527504 - DNA, 60 bp, Artificial
  Synthetic oligonucleotide
acaacaatatttaagagttggatatttggaagagatcagatatgtgcaacaactattcgg

SEQ ID NO: 527505 - DNA, 60 bp, Artificial
  Synthetic oligonucleotide
acaacaattcacgcgatcagtttgtgttcttgatttaggacaaaaaacttattgcggtaa

SEQ ID NO: 527506 - DNA, 60 bp, Artificial
  Synthetic oligonucleotide
acaacacggacgtttcagattacgggcaggtcagaatataacggcagcgtacgtatcatc

SEQ ID NO: 527507 - DNA, 60 bp, Artificial
  Synthetic oligonucleotide
aataagtgctacgaagatgagtttcttctcaaaaatggcgcggccggcggtacaagtcgc

SEQ ID NO: 527508 - DNA, 60 bp, Artificial
  Synthetic oligonucleotide
aatacaaattagaaatccgcttgccctatacgtacccatcggctggaatggttatggcgc

SEQ ID NO: 527509 - DNA, 60 bp, Artificial
  Synthetic oligonucleotide
aataccctatacaatggaatcagcgaatgagatcgcgagaatgagcggagagacgggaac

SEQ ID NO: 527510 - DNA, 60 bp, Artificial
  Synthetic oligonucleotide
aatacctcaccgagcgtgacgaattggctcaagagttagatgagttgaaacgggagatcg

SEQ ID NO: 527511 - DNA, 60 bp, Artificial
  Synthetic oligonucleotide
aatacttgtcaaattgcagcgttcgattccaccctagctgaaaatgcaccaaacaatacg

SEQ ID NO: 527512 - DNA, 60 bp, Artificial
  Synthetic oligonucleotide
aatataactacaagctacacttacatgttatctgataatatatacgtagcaaatgttagc

SEQ ID NO: 527513 - DNA, 60 bp, Artificial
  Synthetic oligonucleotide
aatatcgatagatggttggccactatactaattgaaccaagtgtgcaagcaactaacaga

SEQ ID NO: 527514 - DNA, 60 bp, Artificial
  Synthetic oligonucleotide
aatatcgtccattattggtttctattgttggctatgaatatctagtcggtactacagttt

SEQ ID NO: 527515 - DNA, 60 bp, Artificial
  Synthetic oligonucleotide
aatatgccgcaccgcgtggcctaattgttcaatcacctgggttcctttatcatatgatct

SEQ ID NO: 527516 - DNA, 60 bp, Artificial
  Synthetic oligonucleotide
aatatgcggaacaactagcagatgagtttgcgaaaactaaacatcctatctttacacctt

SEQ ID NO: 527517 - DNA, 60 bp, Artificial
  Synthetic oligonucleotide
aatatgggatcaagattttgggagtggcagatgacatggccctattcatgcgtgacgcgt

SEQ ID NO: 527518 - DNA, 60 bp, Artificial
  Synthetic oligonucleotide
aatcaaataaatggatatcgatgggaacagactgcacggtaaaagtttgtccactcaata

SEQ ID NO: 527519 - DNA, 60 bp, Artificial
  Synthetic oligonucleotide
aatcaaataattcaagcaatgtccaagagatcacgatcactagattcagcagcgttttac

SEQ ID NO: 527520 - DNA, 60 bp, Artificial
  Synthetic oligonucleotide
aatcaaatctggcggcctagggtataagtggtccgagatttcattcaaaccagcaaacta

SEQ ID NO: 527521 - DNA, 60 bp, Artificial
  Synthetic oligonucleotide
aatcaacgaaaatcctatattgtgtaaaaatgcttttttggaaagttaagactatggtag

SEQ ID NO: 527522 - DNA, 60 bp, Artificial
  Synthetic oligonucleotide
aatgatacatggagaccatcacctccgaccaaatataaaggatggtgtctggactgttgt

SEQ ID NO: 527523 - DNA, 60 bp, Artificial
  Synthetic oligonucleotide
aatgataactctttcttgatcatcaaagtccagtttaaaatgagaattacttccaaacct

SEQ ID NO: 527524 - DNA, 60 bp, Artificial
  Synthetic oligonucleotide
aatgagatcatgtgttacactacaagatgcaagaatagtgttagaagcaaatgttatgga

SEQ ID NO: 527525 - DNA, 60 bp, Artificial
  Synthetic oligonucleotide
aatgaaattgaagagtacatacacagcgtatacagtataacttatgcagatgatcctaat

SEQ ID NO: 527526 - DNA, 60 bp, Artificial
  Synthetic oligonucleotide
aatgaaatatgctgattcagaatcgcttgacatgtcagaattggctgatctgatattgaa

SEQ ID NO: 527527 - DNA, 60 bp, Artificial
  Synthetic oligonucleotide
aatgaaaagatttaaacgatcaaacttagccagctcagtttctacattaactgatgcaat

SEQ ID NO: 527528 - DNA, 60 bp, Artificial
  Synthetic oligonucleotide
aatctggaacgaccaaggatggcgagaaggcgtgttcatgttgggacgtgtcttattaag

SEQ ID NO: 527529 - DNA, 60 bp, Artificial
  Synthetic oligonucleotide
aatctatctgctggcgagagtgctactacgctgggagctatcaacgcaagcacgctctat

SEQ ID NO: 527530 - DNA, 60 bp, Artificial
  Synthetic oligonucleotide
aatctagggccaatatctccagactatcaacaacatatgggtacgatcggtgttttagcg

SEQ ID NO: 527531 - DNA, 60 bp, Artificial
  Synthetic oligonucleotide
aatcctggtcgaattgcatccaaatggtcgtccatcagaaggtccagtgcagtacgttcc

SEQ ID NO: 527532 - DNA, 60 bp, Artificial
  Synthetic oligonucleotide
aatccctgtcaattgaattagatggtgacgtttattacgtatttgggtattatgataaca

SEQ ID NO: 527533 - DNA, 60 bp, Artificial
  Synthetic oligonucleotide
aatccatacccttgtctgcggggcacgttaattgcggcggaatgcgttttaggtgacccg

SEQ ID NO: 527534 - DNA, 60 bp, Artificial
  Synthetic oligonucleotide
aatcactctaatgaacagcacattgcacacaataatggaagatccgggaatggcgtactt

SEQ ID NO: 527535 - DNA, 60 bp, Artificial
  Synthetic oligonucleotide
aatcaactccaccaaaatcgaagaaaaggttaacaacatcattcacgaaggttctttatt

SEQ ID NO: 527536 - DNA, 60 bp, Artificial
  Synthetic oligonucleotide
aaagaacgtattcgttctagatcaaaagcgaaaaacaatatgtggtcaaattgcatcaaa

SEQ ID NO: 527537 - DNA, 60 bp, Artificial
  Synthetic oligonucleotide
aaagagacgttgagtgtggtaacgaatcatgcactatcacaattcgaggaactccagatg

SEQ ID NO: 527538 - DNA, 60 bp, Artificial
  Synthetic oligonucleotide
aaagagtgagaactgacggaggttctttggctgagcttaactggctacaagtggatcctg

SEQ ID NO: 527539 - DNA, 60 bp, Artificial
  Synthetic oligonucleotide
aaagatgaaggagaacagggaggcagaaagggagaagatggaacgagccctaagtggtgg

SEQ ID NO: 527540 - DNA, 60 bp, Artificial
  Synthetic oligonucleotide
aaagatgagcggctatcgatgttagcgagcatgatgcctcagcaatcaggagagtatact

SEQ ID NO: 527541 - DNA, 60 bp, Artificial
  Synthetic oligonucleotide
aaagattgagccaagcgtagtatccactattttggagtatcgtaccaaggagattccaga

SEQ ID NO: 527542 - DNA, 60 bp, Artificial
  Synthetic oligonucleotide
aaagcgcgacgcaaaaaggagaactacgctggatggatgaagatgaagcgaaggtcaacg

SEQ ID NO: 527543 - DNA, 60 bp, Artificial
  Synthetic oligonucleotide
aaagctagtttcgatgctagattatgcgatctatagctgtgaagaggtacactatgtggg

SEQ ID NO: 527544 - DNA, 60 bp, Artificial
  Synthetic oligonucleotide
aaaggagtgccgaggaagcaaagatggttcgagagtataggagtaaaatagatgcactta

SEQ ID NO: 527545 - DNA, 60 bp, Artificial
  Synthetic oligonucleotide
aaaggggatgggcatggtaccaccgtacacacggaatgattttgccagacgggagatccg

SEQ ID NO: 527546 - DNA, 60 bp, Artificial
  Synthetic oligonucleotide
aaaggtcactacagagttgtgaaatactcgtcagttgcgaatcacgcagaccgagtttac

SEQ ID NO: 527547 - DNA, 60 bp, Artificial
  Synthetic oligonucleotide
aaaggtcactatagagttgttaaatattcatcagttgctaaccatgcagatagagtgttt

SEQ ID NO: 527548 - DNA, 60 bp, Artificial
  Synthetic oligonucleotide
aaagtattatgaacatgcaccaatcgaattaatatatgcctgtcgatcagccaaagaatt

SEQ ID NO: 527549 - DNA, 60 bp, Artificial
  Synthetic oligonucleotide
aaagtgtacaggatgtatcgttggtcgaaggtgtaatagcgaaactggagacagtgcaaa

SEQ ID NO: 527550 - DNA, 60 bp, Artificial
  Synthetic oligonucleotide
aaagtgtcaaagggtatggggatagtaccaccgtatacaaggaatgattttgataggaga

SEQ ID NO: 527551 - DNA, 60 bp, Artificial
  Synthetic oligonucleotide
aaagttatcaacgctttaagcggtattgacttaagccacctaagaacgccgaaaatacaa

SEQ ID NO: 527552 - DNA, 60 bp, Artificial
  Synthetic oligonucleotide
aaagttatctaggatggacgaattcggaatacccatttatctttcgagcaacgtaccaca

SEQ ID NO: 527553 - DNA, 60 bp, Artificial
  Synthetic oligonucleotide
aaagttggttaatgattcggatctacaggcgcacgttctaaggggcccgaaacatttcca

SEQ ID NO: 527554 - DNA, 60 bp, Artificial
  Synthetic oligonucleotide
aaagtttcagaggcgcacattaatgaacgcgcttctatttggagtgagaatagcttgaaa

SEQ ID NO: 527555 - DNA, 60 bp, Artificial
  Synthetic oligonucleotide
aaagtttggttgcaaggtgttaggagatcgtttagacgtaccactcttcttacgaaatgc

SEQ ID NO: 527556 - DNA, 60 bp, Artificial
  Synthetic oligonucleotide
aaatacactctgatacaatccttaggatcactcagggactcgatgacgcaaataaacgaa

SEQ ID NO: 527557 - DNA, 60 bp, Artificial
  Synthetic oligonucleotide
aaatagagcctaccgttatctctacggtacttgaacatcgttttaagagtatacccgata

SEQ ID NO: 527558 - DNA, 60 bp, Artificial
  Synthetic oligonucleotide
aaatatttgccgcgacgttaatggtgattacatccgattcaatggagcgtactatatgga

SEQ ID NO: 527559 - DNA, 60 bp, Artificial
  Synthetic oligonucleotide
aaatcatatcactaatgatgatgcaacacgcaatgctggttccggtgaggtaccatccgg

SEQ ID NO: 527560 - DNA, 60 bp, Artificial
  Synthetic oligonucleotide
aaatgaatatcgatcgaagatagatgcgttaaaatctgcaattgaggtcgaatcagatgg

SEQ ID NO: 527561 - DNA, 60 bp, Artificial
  Synthetic oligonucleotide
aaatgatgaatctcgatttgaatttgttaattcccatattaacagtcgtttattaattac

SEQ ID NO: 527562 - DNA, 60 bp, Artificial
  Synthetic oligonucleotide
aaatgcattgagcggcattgatttaagtcatctacgaacgccgaaaatacaaccgaaaac

SEQ ID NO: 527563 - DNA, 60 bp, Artificial
  Synthetic oligonucleotide
aaatggacgtatgctccgatgtttaatgcgagagttaaaccctgtgacgtagaaatagca

SEQ ID NO: 527564 - DNA, 60 bp, Artificial
  Synthetic oligonucleotide
aaatggaggctgacagtctaccgtctcttgctcaatatttgatggctggaaccatggatg

SEQ ID NO: 527565 - DNA, 60 bp, Artificial
  Synthetic oligonucleotide
aaatggatatcaatgggaacagactgcacggtaaaagtttgtccactcaatacacaaacc

SEQ ID NO: 527566 - DNA, 60 bp, Artificial
  Synthetic oligonucleotide
aaaaaataatgcgcagagaatagtttacgatgaggagctgcaaatgcatattttaagggg

SEQ ID NO: 527567 - DNA, 60 bp, Artificial
  Synthetic oligonucleotide
aaaaactatgaactatgaccccagttgggcggagaattatgctgtcattttctatcatgc

SEQ ID NO: 527568 - DNA, 60 bp, Artificial
  Synthetic oligonucleotide
aaaaagatctataatacaattgggaaggcggctgaacggtttgctgagagtgagattgga

SEQ ID NO: 527569 - DNA, 60 bp, Artificial
  Synthetic oligonucleotide
aaaaattgggaccaagagaaaacgtagcagtaattcaagttggaggttctgatgttctcg

SEQ ID NO: 527570 - DNA, 60 bp, Artificial
  Synthetic oligonucleotide
aaaaattgtgattttggaagattcagtttaaactttcattgcatacctaaatattggata

SEQ ID NO: 527571 - DNA, 60 bp, Artificial
  Synthetic oligonucleotide
aaaacagtcgtataatgacgcggtgaggatgagttttacagagttctcgtcaatcccgct

SEQ ID NO: 527572 - DNA, 60 bp, Artificial
  Synthetic oligonucleotide
aaaacgaatggggttagacgtgtcaggacacctgtatgtgacactgttgagtggatcata

SEQ ID NO: 527573 - DNA, 60 bp, Artificial
  Synthetic oligonucleotide
aaaacgcttgaaatattgaataaatcaggaatcgcagccgttgaaattcaatcttttgag

SEQ ID NO: 527574 - DNA, 60 bp, Artificial
  Synthetic oligonucleotide
aaaacgtaaaggatggtgcttagattgttgtcaacacacggacttgacttactgccaagg

SEQ ID NO: 527575 - DNA, 60 bp, Artificial
  Synthetic oligonucleotide
aaaagaatatgcatgtaatggatgatatggctaacggaaaatatacgcctggagtgattc

SEQ ID NO: 527576 - DNA, 60 bp, Artificial
  Synthetic oligonucleotide
aaaagaggaagagaaacttcatgatttaacggttgccttacgaaaggaagtggatgacag

SEQ ID NO: 527577 - DNA, 60 bp, Artificial
  Synthetic oligonucleotide
aaaagatcacggtcattaaattcagcagctttttactatagggtttgatatatcttagat

SEQ ID NO: 527578 - DNA, 60 bp, Artificial
  Synthetic oligonucleotide
aaaagatcgcgatcattaaattctgctgcattctattatagagtttagatataacttagg

SEQ ID NO: 527579 - DNA, 60 bp, Artificial
  Synthetic oligonucleotide
aaaaggagaactacgctggatggatgaagatgaagcgaaggtcaacgatgaggttgatga

SEQ ID NO: 527580 - DNA, 60 bp, Artificial
  Synthetic oligonucleotide
aaaatcaaaatgaccctgtaatgatttattttgtgtggaggcgaattgggactttttcaa

SEQ ID NO: 527581 - DNA, 60 bp, Artificial
  Synthetic oligonucleotide
aaacttttaagcatgataggtggtattgagaggaaggcggcgccgataggggcgcgggag

SEQ ID NO: 527582 - DNA, 60 bp, Artificial
  Synthetic oligonucleotide
aaactggtttacgataccgacttacagatgcactgtttgagggggccgttaaagtttcag

SEQ ID NO: 527583 - DNA, 60 bp, Artificial
  Synthetic oligonucleotide
aaactgaccactcgtgaaattgaacaagttgagttgcttaaacgtatacatgacaacctg

SEQ ID NO: 527584 - DNA, 60 bp, Artificial
  Synthetic oligonucleotide
aaactacgtatgagagaggcaatatgtgtgatttatttcctgatgtagacggcattacga

SEQ ID NO: 527585 - DNA, 60 bp, Artificial
  Synthetic oligonucleotide
aaacgggcgcaactatggcacaaaaagtagaaaaggtcgcgtatgcatcatatgcggaag

SEQ ID NO: 527586 - DNA, 60 bp, Artificial
  Synthetic oligonucleotide
aaacgatgatgacgccgtactctgtcgaaaagacacagacgcatgcgaagcaggggtgtt

SEQ ID NO: 527587 - DNA, 60 bp, Artificial
  Synthetic oligonucleotide
aaacgatccactcaccagcttttcgattagatcgaatgcaattaagacaaatgcagacgc

SEQ ID NO: 527588 - DNA, 60 bp, Artificial
  Synthetic oligonucleotide
aaacatgagagcaggcgttatcgttgcatatgacggtcaggctccagttaatgtgaataa

SEQ ID NO: 527589 - DNA, 60 bp, Artificial
  Synthetic oligonucleotide
aaacagcagttggttatcaacttgcggaaaacagacggagaagtgcgaaacataagagat

SEQ ID NO: 527590 - DNA, 60 bp, Artificial
  Synthetic oligonucleotide
aaacagatgagagtagattatccgattttcgtaaaaacacagctcagaggaaagtattca

SEQ ID NO: 527591 - DNA, 60 bp, Artificial
  Synthetic oligonucleotide
aaacaccggatgcagtgtttgaaagagacggaatggacggaagcaacaggattatcgtta

SEQ ID NO: 527592 - DNA, 60 bp, Artificial
  Synthetic oligonucleotide
aaacaatccatgcgctcacgggtctacatacccaccatatggaggtcccgtctatacatc

SEQ ID NO: 527593 - DNA, 60 bp, Artificial
  Synthetic oligonucleotide
aaacaaagttcacagccgtattgtcaaataaaaattggaagagtaatcgcttttaagcca

SEQ ID NO: 527594 - DNA, 60 bp, Artificial
  Synthetic oligonucleotide
aaaatgttggaagagccagttaaacatgatgaccatttactgcaagattcagaactagct

SEQ ID NO: 527595 - DNA, 60 bp, Artificial
  Synthetic oligonucleotide
aaaatgatttcgaccgaaatgagatgccggacctaccaggcgtgatgaggtccaattatg

SEQ ID NO: 527596 - DNA, 60 bp, Artificial
  Synthetic oligonucleotide
aaaatgatgttcgacgcttggatgctacagtgggacatcgatcaagcgataatcgatctg

SEQ ID NO: 527597 - DNA, 60 bp, Artificial
  Synthetic oligonucleotide
aaccagggagtaatcaaccaggcacagaaccgacctggcttttcgatgaacggtggaacg

SEQ ID NO: 527598 - DNA, 60 bp, Artificial
  Synthetic oligonucleotide
aaccagtcaaattggctcatgattatggtttgattagtaataacttaaaacgtaaattat

SEQ ID NO: 527599 - DNA, 60 bp, Artificial
  Synthetic oligonucleotide
aacccgaataacggacatgagtattatgaaatagctggaagattttctcttatttcctta

SEQ ID NO: 527600 - DNA, 60 bp, Artificial
  Synthetic oligonucleotide
aaccgaaaactttggaggcaattctaaaaacgccgcggggggagaacgtacaagatgcct

SEQ ID NO: 527601 - DNA, 60 bp, Artificial
  Synthetic oligonucleotide
aaccgaaactagaaggagagagtggaaaacaagacaatttaaacgatggtgaggggacac

SEQ ID NO: 527602 - DNA, 60 bp, Artificial
  Synthetic oligonucleotide
aaccgagtgcagattactcagcgtcattttgcttacgtttgtgctcgctctcccgactgg

SEQ ID NO: 527603 - DNA, 60 bp, Artificial
  Synthetic oligonucleotide
aaccgccgaagtgaaatctgataactctgtcaataagaaggtaattgctccaaaatcgga

SEQ ID NO: 527604 - DNA, 60 bp, Artificial
  Synthetic oligonucleotide
aacctcacgaccagtcatcgggacgcccacgacgcgagaggcacgccggaataacttcta

SEQ ID NO: 527605 - DNA, 60 bp, Artificial; identical to SEQ ID NO: 301494
  Synthetic oligonucleotide

SEQ ID NO: 527606 - DNA, 60 bp, Artificial
  Synthetic oligonucleotide
aacctgaggacagtaggtagagtggcgccccgaggtttacgtcgtgcagggtggttgacc

SEQ ID NO: 527607 - DNA, 60 bp, Artificial
  Synthetic oligonucleotide
aaccttggcctggtattcgtagcagatatcacgataatgattcttattcaagcgccattc

SEQ ID NO: 527608 - DNA, 60 bp, Artificial
  Synthetic oligonucleotide
aacgacgattatcaaactccaatcatgaattcagttacagtacgtcaggatctcgaacgc

SEQ ID NO: 527609 - DNA, 60 bp, Artificial
  Synthetic oligonucleotide
aacgagcaaatattacctaaaatgcgtgtggagttgacagcgatgaaacggcgacgagcg

SEQ ID NO: 527610 - DNA, 60 bp, Artificial
  Synthetic oligonucleotide
aacgataccaggaccgggatcgtttaggatgattgatcgtgaccagtcgacgtttctcgt

SEQ ID NO: 527611 - DNA, 60 bp, Artificial
  Synthetic oligonucleotide
aacgatgtgacacccgaagagcttgaaagagtgagaactgacggaggttctttggctgag

SEQ ID NO: 527612 - DNA, 60 bp, Artificial
  Synthetic oligonucleotide
aacgattggttaatgaagactatacatgggctgaatttgttatgtactacagttttgtta

SEQ ID NO: 527613 - DNA, 60 bp, Artificial
  Synthetic oligonucleotide
aacgcaacctagaacgtatcgctgcccgagacgtgctgcaaaccagggatctacactcac

SEQ ID NO: 527614 - DNA, 60 bp, Artificial
  Synthetic oligonucleotide
aacgcatctacgataaattagtggtgcaatcgactgacgagatagacatgacaaaagaga

SEQ ID NO: 527615 - DNA, 60 bp, Artificial
  Synthetic oligonucleotide
aacgctggttcagaaattcaagttgctggatttgactactcctgtgccattaatgcacca

SEQ ID NO: 527616 - DNA, 60 bp, Artificial
  Synthetic oligonucleotide
aacggactcaccggtgatatctgcaataatagattttaaaactatcaagaacttgaatga

SEQ ID NO: 527617 - DNA, 60 bp, Artificial
  Synthetic oligonucleotide
aacggattgcacggtaaaagtttgcccacttaatacacaaacgttaggaattggatgcaa

SEQ ID NO: 527618 - DNA, 60 bp, Artificial
  Synthetic oligonucleotide
aacgggtgcaactatggcgcaaaaagtagagaaggttgcgtatgcgtcatacgcagaggc

SEQ ID NO: 527619 - DNA, 60 bp, Artificial
  Synthetic oligonucleotide
aacgtcgaaaaatgggaattgagaagtggctattggagaaagttgaaaggggagtacaga

SEQ ID NO: 527620 - DNA, 60 bp, Artificial
  Synthetic oligonucleotide
aacgtgagtacagagttcgataaacagttaaagcctaacccgaataatttagtgcaggat

SEQ ID NO: 527621 - DNA, 60 bp, Artificial
  Synthetic oligonucleotide
aacgttaagagctactcctcacggacgaacactacagcatgtgacattgtgagctggata

SEQ ID NO: 527622 - DNA, 60 bp, Artificial
  Synthetic oligonucleotide
aacgttttggaatgcgcacagggagctggactggacagctgcaatatcaacatccgcaac

SEQ ID NO: 527623 - DNA, 60 bp, Artificial
  Synthetic oligonucleotide
aactaataaacttcctaaggatggatgattttgcaagacatttcaataggtatgcttcga

SEQ ID NO: 527624 - DNA, 60 bp, Artificial
  Synthetic oligonucleotide
aactacacattgagtgtaatcactttaatgaatgacacattgcattctataattcaggat

SEQ ID NO: 527625 - DNA, 60 bp, Artificial
  Synthetic oligonucleotide
aactacagagtgttgggtgttgcgatcgtgttgcttttacgtccaaaggcacgaacctga

SEQ ID NO: 527626 - DNA, 60 bp, Artificial
  Synthetic oligonucleotide
aactaccattaacctaagatcagtaggtagagtggcgccccgaggtttgcaccgcatgga

SEQ ID NO: 527627 - DNA, 60 bp, Artificial
  Synthetic oligonucleotide
aactagtggagaaacatttctaacttcaacactatgtctatactatccagcagaagctaa

SEQ ID NO: 527628 - DNA, 60 bp, Artificial
  Synthetic oligonucleotide
aactcatgacgttcatttggcaccaggcgtcggtaatatcgatcctgagatctacaatga

SEQ ID NO: 527629 - DNA, 60 bp, Artificial
  Synthetic oligonucleotide
aaatggcagaccacaaacacttgtgcagatgcgacattcaattgccggcaacaaggaatg

SEQ ID NO: 527630 - DNA, 60 bp, Artificial
  Synthetic oligonucleotide
aaatgggacaacgtacctttatatctcatagacgaaacgcaaaagaaatatgaattacag

SEQ ID NO: 527631 - DNA, 60 bp, Artificial
  Synthetic oligonucleotide
aaatgtaatggcttacacttcaacggaggaggatgttaagaaaagtttcttacacttaat

SEQ ID NO: 527632 - DNA, 60 bp, Artificial
  Synthetic oligonucleotide
aaatgtagaaatgaatgtatgacacaatggtataatcacttattgatgccaataacatta

SEQ ID NO: 527633 - DNA, 60 bp, Artificial
  Synthetic oligonucleotide
aaatgtcattggaatcttaccgaaagataggtgaaatattaagtgcgatctggaaacgtg

SEQ ID NO: 527634 - DNA, 60 bp, Artificial
  Synthetic oligonucleotide
aaatgtgggaggcgtgaatatgagagcaggagtgattgtggcttatgatggtcaagcgcc

SEQ ID NO: 527635 - DNA, 60 bp, Artificial
  Synthetic oligonucleotide
aaattaacatacgtgggatataatggaagtgatactagaggacattacaacttctcattc

SEQ ID NO: 527636 - DNA, 60 bp, Artificial
  Synthetic oligonucleotide
aaattatggtatgtatttaccaataacaggatcactagacgctgtatacacaaattcaac

SEQ ID NO: 527637 - DNA, 60 bp, Artificial
  Synthetic oligonucleotide
aaattctgccgcgttctattatagggtttaggtatagcttagattagaattgtatgatgt

SEQ ID NO: 527638 - DNA, 60 bp, Artificial
  Synthetic oligonucleotide
aaattgataaatcaacgcaaattgcagctaacaacataccagatgtaataacagaagctt

SEQ ID NO: 527639 - DNA, 60 bp, Artificial
  Synthetic oligonucleotide
aaattggtgataacagatgttgtagatggagttaaccacaaactagatgtgacaaccgct

SEQ ID NO: 527640 - DNA, 60 bp, Artificial
  Synthetic oligonucleotide
aaatttaattaacatctttctccttctttttcgatgtgtctagctttttgcggtgtattc

SEQ ID NO: 527641 - DNA, 60 bp, Artificial
  Synthetic oligonucleotide
aaatttttctatgcctcaaggtaactcacagcggacgttagcaggagtgacagtaagtgt

SEQ ID NO: 527642 - DNA, 60 bp, Artificial
  Synthetic oligonucleotide
aaattttttaagaatggatgatttcgcaaaacattttaataggtacgcctcgatggctat

SEQ ID NO: 527643 - DNA, 60 bp, Artificial
  Synthetic oligonucleotide
aacaaatggatatcaatgggagattcatgtacgattaaggtatgtccgctgaatacacag

SEQ ID NO: 527644 - DNA, 60 bp, Artificial
  Synthetic oligonucleotide
aaccagcttgagcagattagactgtccaatctatccgcccaaggagtctcccattacaac

SEQ ID NO: 527645 - DNA, 60 bp, Artificial
  Synthetic oligonucleotide
aaccagagatcccttcttgacgacctttatgctaatacacaagttgtgtcagtaacgcca

SEQ ID NO: 527646 - DNA, 60 bp, Artificial
  Synthetic oligonucleotide
aaccacgtaatcctccccactgctaacggcgcccacgtgtatgtccctggtccagaagac

SEQ ID NO: 527647 - DNA, 60 bp, Artificial
  Synthetic oligonucleotide
aacattttgactcgtgatctgccctttccatccgatctcatcaactacgctcaccacgtg

SEQ ID NO: 527648 - DNA, 60 bp, Artificial
  Synthetic oligonucleotide
aacatttcagatctaacatcaggtataatgtcttttgcatctatggccatgtcatttcca

SEQ ID NO: 527649 - DNA, 60 bp, Artificial
  Synthetic oligonucleotide
aacatcgcatatgccagctgcgatgctacttgcacccagtgacgtgattaaacgctcatc

SEQ ID NO: 527650 - DNA, 60 bp, Artificial
  Synthetic oligonucleotide
aacataaatggggcgatggttgatgcagagataaaggtgtcgaaaggaatggggatggtg

SEQ ID NO: 527651 - DNA, 60 bp, Artificial
  Synthetic oligonucleotide
aacagtaattaaagcttgtaacactttaaaagaggtaagaattgtggtggaatcgaatgt

SEQ ID NO: 527652 - DNA, 60 bp, Artificial
  Synthetic oligonucleotide
aacagccaccaatgtattacgagagattgaatgcggatggaccatttatggatgaatcta

SEQ ID NO: 527653 - DNA, 60 bp, Artificial
  Synthetic oligonucleotide
aacagatgctttcttgataatgatccgcatttactaagaatgcgaacttttaggaatgaa

SEQ ID NO: 527654 - DNA, 60 bp, Artificial
  Synthetic oligonucleotide
aacagatcaacattagctaagttagtatcatcgcctatgtctatactagttgcactagta

SEQ ID NO: 527655 - DNA, 60 bp, Artificial
  Synthetic oligonucleotide
aacacaactggtgctacgcaaacacaaaaagcggagaaggctgcattcgcatcgtacgcg

SEQ ID NO: 527656 - DNA, 60 bp, Artificial
  Synthetic oligonucleotide
aacaatcttttaggtaaagctataactattgatcaggcattaaatggaaagtttggttca

SEQ ID NO: 527657 - DNA, 60 bp, Artificial
  Synthetic oligonucleotide
aacaacataagtgtagaaatgaacttgtgccgcaatggtacaatcacttactgatgccaa

SEQ ID NO: 527658 - DNA, 60 bp, Artificial
  Synthetic oligonucleotide
aacaaattcgacatttaaagtatttgattcagaagatttcattattgaatatggaacaac

SEQ ID NO: 527659 - DNA, 60 bp, Artificial
  Synthetic oligonucleotide
aacaaatggttcaagatgtatcaaatgatgtgagatatatttattctagaatgaatgcta

SEQ ID NO: 527660 - DNA, 60 bp, Artificial
  Synthetic oligonucleotide
acttagtgccaaacttcatgatgagagacccatcccacgcgttcaatggtgtgaagctgg

SEQ ID NO: 527661 - DNA, 60 bp, Artificial
  Synthetic oligonucleotide
acttcagatgcgttaaccgtctctattcgaggacgatggatggctagactagctcgcatg

SEQ ID NO: 527662 - DNA, 60 bp, Artificial
  Synthetic oligonucleotide
acttcgaccgaaatgaaatgccgaacttaccaggtgtaatgaggtccaattatgatatac

SEQ ID NO: 527663 - DNA, 60 bp, Artificial
  Synthetic oligonucleotide
acttctactttatgtttatattacccgaacgaagcggcaactcagatcgcagatgacaag

SEQ ID NO: 527664 - DNA, 60 bp, Artificial
  Synthetic oligonucleotide
acttctcaacccctaggacgcagggccgggctgcttaggagttccccctaagggtagcga

SEQ ID NO: 527665 - DNA, 60 bp, Artificial
  Synthetic oligonucleotide
actttactcagcaaagattggctgccgcatttaataacccgactacttggccgcaatgct

SEQ ID NO: 527666 - DNA, 60 bp, Artificial
  Synthetic oligonucleotide
actttttcaaatgcagcaggtaacgcacaagatacacctcagggtgtgactctgaacgta

SEQ ID NO: 527667 - DNA, 60 bp, Artificial
  Synthetic oligonucleotide
agaaaaacatcaaaacgctagatgaatgggagagtggaaaaaatccatatgaaccgtcag

SEQ ID NO: 527668 - DNA, 60 bp, Artificial
  Synthetic oligonucleotide
agaaaattaaattggatcatttcatcttaaatttatagttcagatgctcatttggctttc

SEQ ID NO: 527669 - DNA, 60 bp, Artificial
  Synthetic oligonucleotide
agaaacttctaagtatgatcggtggtgttgagaggaaggcggcgccgataggggcgcgag

SEQ ID NO: 527670 - DNA, 60 bp, Artificial
  Synthetic oligonucleotide
agaaaggttagagaggcccagaccgcgttacgcaatgagggacgggaagcggatcctgcg

SEQ ID NO: 527671 - DNA, 60 bp, Artificial
  Synthetic oligonucleotide
agaaatgttagatttaagtgcggaggttttagaaacagcggctgaagaagttccgatttt

SEQ ID NO: 527672 - DNA, 60 bp, Artificial
  Synthetic oligonucleotide
agaaattatgcagaaagtgaggcaggtccaggcggattacatgacagccacacgtgaagt

SEQ ID NO: 527673 - DNA, 60 bp, Artificial
  Synthetic oligonucleotide
agaaccgcgaaaggcttttcaattggttgaattggctaaagaggcgatgtatgatcgaga

SEQ ID NO: 527674 - DNA, 60 bp, Artificial
  Synthetic oligonucleotide
agaacctacgatggtagctaccacgttagaacacagatttgaagatataccggacaaaaa

SEQ ID NO: 527675 - DNA, 60 bp, Artificial
  Synthetic oligonucleotide
agaacgaaaaagtaataagtcagcaaattgatcatacaaggaaggagataatgaagaaag

SEQ ID NO: 527676 - DNA, 60 bp, Artificial
  Synthetic oligonucleotide
agaacgctcaagcatttaaagatagagttggcgtcaatgagacgtaggtatgcgatacta

SEQ ID NO: 527677 - DNA, 60 bp, Artificial
  Synthetic oligonucleotide
agaacggcaatactaaatagaacaaccttaccaaatatgcttccaccgattttcccacca

SEQ ID NO: 527678 - DNA, 60 bp, Artificial
  Synthetic oligonucleotide
agaagaatcaacatgtaccgagtacattaataacgggttacctccgattcagaatacacg

SEQ ID NO: 527679 - DNA, 60 bp, Artificial
  Synthetic oligonucleotide
agaagaatggaaaagtgggagaaatccttatgaaccaaaggaagtgactgcagcaatgtg

SEQ ID NO: 527680 - DNA, 60 bp, Artificial
  Synthetic oligonucleotide
agaagatcacaccaaattagattttcagagtccgcaacgtcgtattcaggatacatattt

SEQ ID NO: 527681 - DNA, 60 bp, Artificial
  Synthetic oligonucleotide
agaagcatgtaaacgagcaggtattacccaagatgcgtgtagagttgacagcgatgaaac

SEQ ID NO: 527682 - DNA, 60 bp, Artificial
  Synthetic oligonucleotide
agaagccatagtcagccatatcgcgtgtggcttaagccttaatcccgtttaactaatccg

SEQ ID NO: 527683 - DNA, 60 bp, Artificial
  Synthetic oligonucleotide
agaagcttatacgaattcctttcaaaggtaaaataccagctgtgacgttcatattgcatc

SEQ ID NO: 527684 - DNA, 60 bp, Artificial
  Synthetic oligonucleotide
agaagcttttaagtatgattggtggtgtcgagagaaaggcggcaccgataggggcgcggg

SEQ ID NO: 527685 - DNA, 60 bp, Artificial
  Synthetic oligonucleotide
agaagggtgcggttgaacagcctcataaaccggcgttcaaaactgaacgttggcatgaac

SEQ ID NO: 527686 - DNA, 60 bp, Artificial
  Synthetic oligonucleotide
agaagtgactgcatctatgtgagaggttgagttgccgtcgtctgtcttcggaagcggcgg

SEQ ID NO: 527687 - DNA, 60 bp, Artificial
  Synthetic oligonucleotide
agaatagatatgagcgaaccagggtattcgctttttaaaagcgggatgctacagattacg

SEQ ID NO: 527688 - DNA, 60 bp, Artificial
  Synthetic oligonucleotide
agaatctgtaagaagagcttacttaaacatgtatgtgacattgtcttacttaaatttcat

SEQ ID NO: 527689 - DNA, 60 bp, Artificial
  Synthetic oligonucleotide
agacaacataaatgtagaaacgaatgtatgacacagtggtacaatcatttactaatgcca

SEQ ID NO: 527690 - DNA, 60 bp, Artificial
  Synthetic oligonucleotide
actatatggagcgaagagaaatattcggttttacgtggcatatatctgtattgccgagaa

SEQ ID NO: 527691 - DNA, 60 bp, Artificial
  Synthetic oligonucleotide
actatcaatgataggtgggggtgagaaacgtgatgaaacaatacgtgcaagggaaacatc

SEQ ID NO: 527692 - DNA, 60 bp, Artificial
  Synthetic oligonucleotide
actatgctgatattgcctcgttttcagttgatccacaattgtactgcgattataatttgg

SEQ ID NO: 527693 - DNA, 60 bp, Artificial
  Synthetic oligonucleotide
actcaggtgatgattggagagcacgtagatgcatcccttccagtgcagaagattaaatta

SEQ ID NO: 527694 - DNA, 60 bp, Artificial
  Synthetic oligonucleotide
actcaggtggtcaactcatggaacactaccgatgtgacgcagctaatcgatacggttcgc

SEQ ID NO: 527695 - DNA, 60 bp, Artificial; identical to SEQ ID NO: 316486
  Synthetic oligonucleotide

SEQ ID NO: 527696 - DNA, 60 bp, Artificial
  Synthetic oligonucleotide
actccagatggcctgcgaactggatcgtgactacttagatgcccggggtgtttcaccaga

SEQ ID NO: 527697 - DNA, 60 bp, Artificial
  Synthetic oligonucleotide
actcgtatgcaccggtttatttagaaaagcgacgtgctcaaatttccgcgctgctaacta

SEQ ID NO: 527698 - DNA, 60 bp, Artificial
  Synthetic oligonucleotide
actcgtgaactgccattttcctcggatctaatcaactacgcacaccatgtcaattcatca

SEQ ID NO: 527699 - DNA, 60 bp, Artificial
  Synthetic oligonucleotide
actctatgctatgcagagaaggttcacttcgctgggttcgcagcacctgcgtgtgaaagt

SEQ ID NO: 527700 - DNA, 60 bp, Artificial
  Synthetic oligonucleotide
actctcagatgttgagtaaatatggtcacaactacgccagcacaagaccgtctgcactag

SEQ ID NO: 527701 - DNA, 60 bp, Artificial
  Synthetic oligonucleotide
actctgcttaacttgacagggtttggcccgatttcatacgttcgagtggacgaagatatg

SEQ ID NO: 527702 - DNA, 60 bp, Artificial
  Synthetic oligonucleotide
actctttagagcgtatatgtcgtgctgcatggccaaactgttccattacttgggtgccat

SEQ ID NO: 527703 - DNA, 60 bp, Artificial; identical to SEQ ID NO: 316978
  Synthetic oligonucleotide

SEQ ID NO: 527704 - DNA, 60 bp, Artificial
  Synthetic oligonucleotide
actgacactacgacttttgaagaaattgcaacagctgagaaattggcaataacggacgtt

SEQ ID NO: 527705 - DNA, 60 bp, Artificial
  Synthetic oligonucleotide
acttagattcatcaatatctatatcgactaattcaaagaaggagaaatccaaaagtggca

SEQ ID NO: 527706 - DNA, 60 bp, Artificial
  Synthetic oligonucleotide
acttacaacgatcttcgaacgtgctaaacattagacgcagaattgaagaatctagaaggc

SEQ ID NO: 527707 - DNA, 60 bp, Artificial
  Synthetic oligonucleotide
acttaaacgcatctacgataaattaatagtgcaatcgactgatgagatagatatgacaaa

SEQ ID NO: 527708 - DNA, 60 bp, Artificial
  Synthetic oligonucleotide
actgttaacatcggtgtgtacgctgtcaagtgacatgagtgtggcattcaaacttaacgg

SEQ ID NO: 527709 - DNA, 60 bp, Artificial
  Synthetic oligonucleotide
actgtctaggtgttgttggatctctacaacgcaaactgaagcatttgcctcatcatagat

SEQ ID NO: 527710 - DNA, 60 bp, Artificial
  Synthetic oligonucleotide
actggttccatggatacagcatatgcaaattcgtcacagcaagagacatttttaacttca

SEQ ID NO: 527711 - DNA, 60 bp, Artificial
  Synthetic oligonucleotide
actggtgccacgatggctcaaaaagtggagaaagtcgcgtacgcttcatatgcggaggcg

SEQ ID NO: 527712 - DNA, 60 bp, Artificial
  Synthetic oligonucleotide
actggagtactggaaaagtaatccttcggtgataccggataatgttgatcgccgactgcg

SEQ ID NO: 527713 - DNA, 60 bp, Artificial
  Synthetic oligonucleotide
actggagggaattacgatttcagattgccagttggcgcatggccggtaatgactggtggc

SEQ ID NO: 527714 - DNA, 60 bp, Artificial
  Synthetic oligonucleotide
actggaaacgtggtatgctatcatttgtctctcagatgcatgctatcatgaacgatgtga

SEQ ID NO: 527715 - DNA, 60 bp, Artificial
  Synthetic oligonucleotide
actgcttaatgtgttaggcggtggtgaagaattacctgaccctctaagtccaggagaacg

SEQ ID NO: 527716 - DNA, 60 bp, Artificial
  Synthetic oligonucleotide
actgcgcctatgtgagaggttgagttgccgtcgtctgtcttcggaagcggcggaactctt

SEQ ID NO: 527717 - DNA, 60 bp, Artificial
  Synthetic oligonucleotide
actgccaaggatgtttaatatatcacgtttgtgaatggtgtagtcaatataacagatgct

SEQ ID NO: 527718 - DNA, 60 bp, Artificial
  Synthetic oligonucleotide
actgattctcctgtaatctcagctataattgactttaaaacattgaagaacttaaatgac

SEQ ID NO: 527719 - DNA, 60 bp, Artificial
  Synthetic oligonucleotide
actgatgtcgttgacggagtgaatcataaattagacgttacgactaatacgtgtactatt

SEQ ID NO: 527720 - DNA, 60 bp, Artificial
  Synthetic oligonucleotide
agagtttagcgagatacctctagatggttttgacataccatctgaactaaccagatagag

SEQ ID NO: 527721 - DNA, 60 bp, Artificial
  Synthetic oligonucleotide
agatactgagatgttattacagggaattaagtatggcgagagctagtatgacctccacga

SEQ ID NO: 527722 - DNA, 60 bp, Artificial
  Synthetic oligonucleotide
agatccaattgcaccggaaacatcgtacgctaacgtaaaggttgtaagagaaaaagttgt

SEQ ID NO: 527723 - DNA, 60 bp, Artificial
  Synthetic oligonucleotide
agatgacaagtggaaagatactctctcacaactttttctcactaaagggtggccaacagg

SEQ ID NO: 527724 - DNA, 60 bp, Artificial
  Synthetic oligonucleotide
agatgagacgtcagttggagatgattgataaactgaccactcgtgaaattgaacaagttg

SEQ ID NO: 527725 - DNA, 60 bp, Artificial
  Synthetic oligonucleotide
agatgataggccagcagatagaccatacgagaaaagagataatgaagaaagacgcatata

SEQ ID NO: 527726 - DNA, 60 bp, Artificial
  Synthetic oligonucleotide
agatgcaaagtatgtcgcaacaattacggaactagctttgaactttccctgtgtcaattg

SEQ ID NO: 527727 - DNA, 60 bp, Artificial
  Synthetic oligonucleotide
agatgcaaatgaagatgatgttcgacgcgtggatgctccaatgggacatagaccaagcga

SEQ ID NO: 527728 - DNA, 60 bp, Artificial
  Synthetic oligonucleotide
agatgcaaatgtggatagacgcttacatactacagtgggatctggatcaagcgcaaaagg

SEQ ID NO: 527729 - DNA, 60 bp, Artificial
  Synthetic oligonucleotide
agatgcgtatgcgcgaagaggacatctcagctttggagtatggtgatatgaaagttgacc

SEQ ID NO: 527730 - DNA, 60 bp, Artificial
  Synthetic oligonucleotide
agatggatagaattgttaaagagatgagacgtcagttggagatgattgataaactgacca

SEQ ID NO: 527731 - DNA, 60 bp, Artificial
  Synthetic oligonucleotide
agatggcacttgaattcaatcgtgagtttcttgacaaactgcgcgtactgtcagtgtcac

SEQ ID NO: 527732 - DNA, 60 bp, Artificial
  Synthetic oligonucleotide
agatggtttcgaactgccattaacctaagatcagtaggtagagtggcgccccgaggtttg

SEQ ID NO: 527733 - DNA, 60 bp, Artificial
  Synthetic oligonucleotide
agatggtttggtgcaaggtagcgttcactccataattacaggtgaatcgtatggagaatc

SEQ ID NO: 527734 - DNA, 60 bp, Artificial
  Synthetic oligonucleotide
agattgtacaaatcatgtccaaaagatcaagatcgttaaattcagcagctttttactata

SEQ ID NO: 527735 - DNA, 60 bp, Artificial
  Synthetic oligonucleotide
agattttggtaacttcggcctgtcacattattcccgcgctacgacgccaatccttggcaa

SEQ ID NO: 527736 - DNA, 60 bp, Artificial
  Synthetic oligonucleotide
agcaacgttggatgtgatcaattggatttctccttgaccaaaggtattaatgttagtgct

SEQ ID NO: 527737 - DNA, 60 bp, Artificial
  Synthetic oligonucleotide
agcaagtactcaaatcaatgatggtgactggaaagactcattgtcgcaaatgtttcttac

SEQ ID NO: 527738 - DNA, 60 bp, Artificial
  Synthetic oligonucleotide
agcaataggagcgaggtgcgtgtgcaggtcgcagcgtgcgcgcaacgcaatggacccatg

SEQ ID NO: 527739 - DNA, 60 bp, Artificial
  Synthetic oligonucleotide
agcacagccagatatgatggtatgtggtggtgccgtcgtttgcatgcattgtctaggtgt

SEQ ID NO: 527740 - DNA, 60 bp, Artificial
  Synthetic oligonucleotide
agcactaaacacgcatcaaggcggaaacaaagattggagtaaaataacgtcactagtggg

SEQ ID NO: 527741 - DNA, 60 bp, Artificial
  Synthetic oligonucleotide
agcactcaggtggtcaactcatggaacactaccgatgcgatgcggctaatcgatacggtt

SEQ ID NO: 527742 - DNA, 60 bp, Artificial
  Synthetic oligonucleotide
agcactgcatgacatccagacttatattgttagcaccaggcgacgtgattgaaagcgtcg

SEQ ID NO: 527743 - DNA, 60 bp, Artificial
  Synthetic oligonucleotide
agcagagccaacaatttattgaaggcggatcgcgatcgtttaattaagaaagctaccact

SEQ ID NO: 527744 - DNA, 60 bp, Artificial
  Synthetic oligonucleotide
agcagatggatagaattgtcaaagaaatgagacgtcaattggaaatgattgataaattaa

SEQ ID NO: 527745 - DNA, 60 bp, Artificial
  Synthetic oligonucleotide
agcagtcgttatctttacgaggggtcatatcgttttcacacccacagaactggagaagaa

SEQ ID NO: 527746 - DNA, 60 bp, Artificial
  Synthetic oligonucleotide
agcatcaaaagcggaggtgatagaatggaaggatgagatggcggagagaccgtggcatgt

SEQ ID NO: 527747 - DNA, 60 bp, Artificial
  Synthetic oligonucleotide
agcatcatatgacatccagactcgtacttttggcacccggcgacgtaatcgaaagcgtcg

SEQ ID NO: 527748 - DNA, 60 bp, Artificial
  Synthetic oligonucleotide
agcatctgtgttgacagtattgtttacattgcacaaggcttcaattccaaccatgaaaat

SEQ ID NO: 527749 - DNA, 60 bp, Artificial
  Synthetic oligonucleotide
agcatgcccagattccattttcagtgtccatcaggcgctgactgcgcacgtgacgcataa

SEQ ID NO: 527750 - DNA, 60 bp, Artificial
  Synthetic oligonucleotide
agcattgaaatctaacgcacaaagaattgtatacgatgacgaattgcagatgcacatatt

SEQ ID NO: 527751 - DNA, 60 bp, Artificial
  Synthetic oligonucleotide
agacaatggaaattgatactattgattggaaatctcgttatgatcagttagaaaaaagat

SEQ ID NO: 527752 - DNA, 60 bp, Artificial
  Synthetic oligonucleotide
agacattccacggacgacacagacgcgccctcgagacgtcgtcgagtactactataggtc

SEQ ID NO: 527753 - DNA, 60 bp, Artificial
  Synthetic oligonucleotide
agaccagactcaacagtttaagcgggataaacttgaggagtgggctagggaagatgacca

SEQ ID NO: 527754 - DNA, 60 bp, Artificial
  Synthetic oligonucleotide
agaccatggcgggtgttacagttagtgtcggtggtgtggatatgcgagcgggccggatta

SEQ ID NO: 527755 - DNA, 60 bp, Artificial
  Synthetic oligonucleotide
agacctgacacaacattggcacgcgctaggcgcagcgcagcaggcagtgggacgtagttt

SEQ ID NO: 527756 - DNA, 60 bp, Artificial
  Synthetic oligonucleotide
agacgaaatgggataacgttccgttatatctcatggatgagatgcaaaagaaatatgagc

SEQ ID NO: 527757 - DNA, 60 bp, Artificial
  Synthetic oligonucleotide
agacgggaacgtggggaccggaccgccaaccgttcggttatttcttaacagcagcagagg

SEQ ID NO: 527758 - DNA, 60 bp, Artificial
  Synthetic oligonucleotide
agacggtttgaggaccactgttactgcacttcaggattccgtctccattctgtctacaaa

SEQ ID NO: 527759 - DNA, 60 bp, Artificial
  Synthetic oligonucleotide
agacgttacgactaatacgtgtactattaggaattgcaagaaattaggaccaagagagaa

SEQ ID NO: 527760 - DNA, 60 bp, Artificial
  Synthetic oligonucleotide
agactacgtgttgagggtggcggaatgatcacacattcgaatagtaaatggcctgccatg

SEQ ID NO: 527761 - DNA, 60 bp, Artificial
  Synthetic oligonucleotide
agacttagaggatttgagactgatagagagtttattctaaccaaaataatgcaaatgacg

SEQ ID NO: 527762 - DNA, 60 bp, Artificial
  Synthetic oligonucleotide
agagaaaggtgagccacgaactaaggcggtggcgaaaggagatcggaaacatggaaagaa

SEQ ID NO: 527763 - DNA, 60 bp, Artificial
  Synthetic oligonucleotide
agagaacttctccttggtttcgtcagccctcatcatgagcaactggaaaaccagcaccac

SEQ ID NO: 527764 - DNA, 60 bp, Artificial
  Synthetic oligonucleotide
agagaatcgctaccatggaagccgcacgcctcgtggacccctacaatccagattctaggt

SEQ ID NO: 527765 - DNA, 60 bp, Artificial
  Synthetic oligonucleotide
agagaccacacatggcatggtttaagaacggcaatactgaataggacaaccttaccgaat

SEQ ID NO: 527766 - DNA, 60 bp, Artificial
  Synthetic oligonucleotide
agagttatcgtcagtcccgctagatggtttcgaactaccattaacctaagatcagtaggt

SEQ ID NO: 527767 - DNA, 60 bp, Artificial
  Synthetic oligonucleotide
agagtggtcaaagagatgagacgtcagctagaaatgattgacaagttaactacacgtgaa

SEQ ID NO: 527768 - DNA, 60 bp, Artificial
  Synthetic oligonucleotide
agagtgagattggatcagcggcaattgatgggatagttcaaggaagtgtgcactccatca

SEQ ID NO: 527769 - DNA, 60 bp, Artificial
  Synthetic oligonucleotide
agagtgagatcggatcagcggcgatagacggaatagttcagggaagtgtgcactccatta

SEQ ID NO: 527770 - DNA, 60 bp, Artificial
  Synthetic oligonucleotide
agagtcatgtgatgcatggcggtgcgatctcgatagaggggcggggttttcgacaagctt

SEQ ID NO: 527771 - DNA, 60 bp, Artificial
  Synthetic oligonucleotide
agaggttgcgtgaggcaagagtgaatatgtttaaggaagtagaggctggtgttagctgga

SEQ ID NO: 527772 - DNA, 60 bp, Artificial
  Synthetic oligonucleotide
agagggtgtgctctataccatgtgtgtcagtggtgcagtcaatataacaggtgtttctta

SEQ ID NO: 527773 - DNA, 60 bp, Artificial
  Synthetic oligonucleotide
agagggcgcgtataagctaaaggcggttattaccgctctaacggggatcgatctaagtca

SEQ ID NO: 527774 - DNA, 60 bp, Artificial
  Synthetic oligonucleotide
agagggagcttacaagctgaagaaagtaattaacgctttaagtggaattgatctaacgca

SEQ ID NO: 527775 - DNA, 60 bp, Artificial
  Synthetic oligonucleotide
agagcgcgtgcggaaagatggataaacttgccgacctcaactatacattgagtgtaatca

SEQ ID NO: 527776 - DNA, 60 bp, Artificial
  Synthetic oligonucleotide
agagcgatgggaagagtggaaatttgaaacgatctcatgtgtaccaatggccacggttct

SEQ ID NO: 527777 - DNA, 60 bp, Artificial
  Synthetic oligonucleotide
agagcaatgaaagtcgttcagatgatgtggcacgaagacatgctgagttggtggagatgg

SEQ ID NO: 527778 - DNA, 60 bp, Artificial
  Synthetic oligonucleotide
agagatggacactatcgctgcaagagcactcactgtgatgcgggcatgtgccacattaca

SEQ ID NO: 527779 - DNA, 60 bp, Artificial
  Synthetic oligonucleotide
agagatctgcgacgtaaagagaaaggtgaacctcgggctaaggcagtgatgaaaggagat

SEQ ID NO: 527780 - DNA, 60 bp, Artificial
  Synthetic oligonucleotide
acagatttatactcatgatgatatgaaagacagttatgaaaatgcatttctcatttctaa

SEQ ID NO: 527781 - DNA, 60 bp, Artificial
  Synthetic oligonucleotide
acagctttagagtgccagttggagaatttccaatattaaagggcggggcgattacattag

SEQ ID NO: 527782 - DNA, 60 bp, Artificial
  Synthetic oligonucleotide
acagtaagctccatcagacctgatggctggctaagaagccatagtcagccatatcgcgtg

SEQ ID NO: 527783 - DNA, 60 bp, Artificial
  Synthetic oligonucleotide
acagtcagacaagatttagaacgacagttgggtgaacttagagaagaattcaacgctctc

SEQ ID NO: 527784 - DNA, 60 bp, Artificial
  Synthetic oligonucleotide
acagtcttcagttaatattgatacgtataccttcaactgtccctttgaattagcaaaaat

SEQ ID NO: 527785 - DNA, 60 bp, Artificial
  Synthetic oligonucleotide
acagttgaaccagttctagatggtccataccaaccaactaagtttaatccaccagtgaat

SEQ ID NO: 527786 - DNA, 60 bp, Artificial
  Synthetic oligonucleotide
acatatggctactattggggtactagcaacaccagaaatacccttcactacagaggcggc

SEQ ID NO: 527787 - DNA, 60 bp, Artificial
  Synthetic oligonucleotide
acatcaattatgaattcagttactgtaagacaagatttagaaagacaattaggagagcta

SEQ ID NO: 527788 - DNA, 60 bp, Artificial
  Synthetic oligonucleotide
acatcagtttgcaccctctcaagcgatatgagtgtggcctttaagataaacggaactaag

SEQ ID NO: 527789 - DNA, 60 bp, Artificial
  Synthetic oligonucleotide
acatcagtttgcaccctttcaagtgatatgagtgtggccttcaaaataaatgggaccaaa

SEQ ID NO: 527790 - DNA, 60 bp, Artificial
  Synthetic oligonucleotide
acatctacacatcatacgcaagaacggattgtttcatgagagcgacgagcctcgagcaga

SEQ ID NO: 527791 - DNA, 60 bp, Artificial
  Synthetic oligonucleotide
acatctcggccgagcgagtgatcattactttaaatataacgctactacagggatggaggc

SEQ ID NO: 527792 - DNA, 60 bp, Artificial
  Synthetic oligonucleotide
acatctgatccaacgactactccacaaacagaacggatgatgcgaataaactggaaaaaa

SEQ ID NO: 527793 - DNA, 60 bp, Artificial
  Synthetic oligonucleotide
acatgcactatacgcaactgtaacaaattaggaccacgagaaaatgttgctataattcaa

SEQ ID NO: 527794 - DNA, 60 bp, Artificial
  Synthetic oligonucleotide
acatgccagctctgctatctaaaacactcgaaacagatgcagacatgtagcgtaatagat

SEQ ID NO: 527795 - DNA, 60 bp, Artificial
  Synthetic oligonucleotide
acatgctgatttaacttattgtagcggttgtaccatgtatcatgcttgtcaatggtgcaa

SEQ ID NO: 527796 - DNA, 60 bp, Artificial
  Synthetic oligonucleotide
acatgtacaatatattattccctataaatcaaagaatagtagataaatttattagtagta

SEQ ID NO: 527797 - DNA, 60 bp, Artificial
  Synthetic oligonucleotide
acattaaaacgctagatgagtgggagagtggaaaaaatccatatgaaccgtcagaagtga

SEQ ID NO: 527798 - DNA, 60 bp, Artificial
  Synthetic oligonucleotide
acattacaagtgattagaaattgcagtaatatgtcagttgaatggaataaagcatgtaat

SEQ ID NO: 527799 - DNA, 60 bp, Artificial
  Synthetic oligonucleotide
acattgagaagtcgctgcagaaggagttgggtttcacacgtgagatgatggcggaacaaa

SEQ ID NO: 527800 - DNA, 60 bp, Artificial
  Synthetic oligonucleotide
acattgcatacaatactagaagacccaggaatggcgtattttccttatatagcatctgtg

SEQ ID NO: 527801 - DNA, 60 bp, Artificial
  Synthetic oligonucleotide
acattttcacgccaacgagtccttcttcttagggttcgatttaggaatcgatgtcgtaca

SEQ ID NO: 527802 - DNA, 60 bp, Artificial
  Synthetic oligonucleotide
accaaatataaaggatggtgtctggactgttgccaacacactgacttaacttactgtcga

SEQ ID NO: 527803 - DNA, 60 bp, Artificial
  Synthetic oligonucleotide
accaaggatgatcggctatcaatgttagcaagcatgatgcctcagcagtcgggagagtat

SEQ ID NO: 527804 - DNA, 60 bp, Artificial
  Synthetic oligonucleotide
accacacgcgcacgggagacttcagtcatgttagtttctaactcgaaagacgatgttgaa

SEQ ID NO: 527805 - DNA, 60 bp, Artificial
  Synthetic oligonucleotide
accagaagatctggagcgtgtacgcactgagggaggctctctagtggagttaaattggct

SEQ ID NO: 527806 - DNA, 60 bp, Artificial
  Synthetic oligonucleotide
accagaagtgacggatgatttcttgtatgtgactcgtcctagaaaggggggtatctactt

SEQ ID NO: 527807 - DNA, 60 bp, Artificial
  Synthetic oligonucleotide
accagcgtgctacccaactccaaagtagctgaggtccccattaaaaccaccaacgtccct

SEQ ID NO: 527808 - DNA, 60 bp, Artificial
  Synthetic oligonucleotide
accaggtgcctatagaatacaggatggacaagatgtcataagcgtaatgttaacatcatg

SEQ ID NO: 527809 - DNA, 60 bp, Artificial
  Synthetic oligonucleotide
acaaccgcgactcatatccatcgttggattagagggcgtggcatccggaatgatgaggga

SEQ ID NO: 527810 - DNA, 60 bp, Artificial
  Synthetic oligonucleotide
acaacgccccacttagggttagattggaacgcatactatgttcgctctacttggtttcga

SEQ ID NO: 527811 - DNA, 60 bp, Artificial
  Synthetic oligonucleotide
acaagaatcgaaatgaaagaaagtgatgagatgagtctagtaccgtatcaggagataacc

SEQ ID NO: 527812 - DNA, 60 bp, Artificial
  Synthetic oligonucleotide
acaagaattaacatgaaagaaagcgatgagatgagtttagtaccataccaggagatgact

SEQ ID NO: 527813 - DNA, 60 bp, Artificial
  Synthetic oligonucleotide
acacaacgactatactcaagctgataccaacagaccaaatcatgcgaacattttacgaaa

SEQ ID NO: 527814 - DNA, 60 bp, Artificial
  Synthetic oligonucleotide
acacacctcagacatatgatgacctcatttcagcgctgaaattaactgtcaagccctggc

SEQ ID NO: 527815 - DNA, 60 bp, Artificial; identical to SEQ ID NO: 109106
  Synthetic oligonucleotide

SEQ ID NO: 527816 - DNA, 60 bp, Artificial
  Synthetic oligonucleotide
acacagagaaaacaccaggcgcgcgggtcatacattggactcgagagttaactatggaat

SEQ ID NO: 527817 - DNA, 60 bp, Artificial
  Synthetic oligonucleotide
acacagctgctttttattatagaatttagatatagcttagattagaattgtatgatgtga

SEQ ID NO: 527818 - DNA, 60 bp, Artificial
  Synthetic oligonucleotide
acacatatttaatgtttactcatataaaaatcctttatggcatggactacgagctgcgat

SEQ ID NO: 527819 - DNA, 60 bp, Artificial
  Synthetic oligonucleotide
acacattaccagatatagtcactgaagcttcagagaagttcattcctaatagagcgtaca

SEQ ID NO: 527820 - DNA, 60 bp, Artificial
  Synthetic oligonucleotide
acacattgagtgtaatcactttaatgaataacacattacatacaatactagaggatccag

SEQ ID NO: 527821 - DNA, 60 bp, Artificial
  Synthetic oligonucleotide
acacattgagtgtgatcactcttatgaatgacacattgcatactataatggaggatcctg

SEQ ID NO: 527822 - DNA, 60 bp, Artificial
  Synthetic oligonucleotide
acaccactatgaatattgtaggaaggttgttagattatgaatctgaattagagctagtat

SEQ ID NO: 527823 - DNA, 60 bp, Artificial
  Synthetic oligonucleotide
acaccccatctatctaggttcaatgcattatgacatatctttctcagatctgcgtggaaa

SEQ ID NO: 527824 - DNA, 60 bp, Artificial
  Synthetic oligonucleotide
acacccgagagtaatgatgaggtttaagatcccacgtacgcagcagccccaaattcatat

SEQ ID NO: 527825 - DNA, 60 bp, Artificial; identical to SEQ ID NO: 105008
  Synthetic oligonucleotide

SEQ ID NO: 527826 - DNA, 60 bp, Artificial
  Synthetic oligonucleotide
acagaggcaacgcatacgtactttgcctttcaagtggagcgggcgagacttggcataacc

SEQ ID NO: 527827 - DNA, 60 bp, Artificial
  Synthetic oligonucleotide
acagagacaagttaactgaattgtgcggtttaggacatgtcttcgcttttaattcttatt

SEQ ID NO: 527828 - DNA, 60 bp, Artificial
  Synthetic oligonucleotide
acagagaatttttcaacctcgcctcaaggtcagttatggctagtgaaattcataagaaac

SEQ ID NO: 527829 - DNA, 60 bp, Artificial
  Synthetic oligonucleotide
acagaagcttctgagaaattcataccaaatagagcatatagagtaatcagtaacgataac

SEQ ID NO: 527830 - DNA, 60 bp, Artificial
  Synthetic oligonucleotide
acagaacacgaggaacatagttccagttgcgttatcatctagatcagtgacttatcaacg

SEQ ID NO: 527831 - DNA, 60 bp, Artificial
  Synthetic oligonucleotide
acactttctcagctatttttaatcaaaggatggccaacaggatctatttattttaaagat

SEQ ID NO: 527832 - DNA, 60 bp, Artificial
  Synthetic oligonucleotide
acactgtgtcaagcttcggctaataggccttgggaacatgatggtacatatgctaggatg

SEQ ID NO: 527833 - DNA, 60 bp, Artificial
  Synthetic oligonucleotide
acactgacccagtagaatacagaacgagattttcagaatatccatttgacctagtagaag

SEQ ID NO: 527834 - DNA, 60 bp, Artificial
  Synthetic oligonucleotide
acactctctacgatctcacgccagctgccatcctttgggtatgtcgatgatggatcctct

SEQ ID NO: 527835 - DNA, 60 bp, Artificial
  Synthetic oligonucleotide
acactacacaaagcgtcaattccaacgatgaaaattgcgttgaaaacatcgaaatgctcg

SEQ ID NO: 527836 - DNA, 60 bp, Artificial
  Synthetic oligonucleotide
acacgtatatacggcgccatgggattcagatgaagtagttatctttcattgtatttcacc

SEQ ID NO: 527837 - DNA, 60 bp, Artificial
  Synthetic oligonucleotide
acacggtgatgatatggcacgcgaaggtgaagcgggcggggttgggcgagtttttgttgc

SEQ ID NO: 527838 - DNA, 60 bp, Artificial
  Synthetic oligonucleotide
acacggggtggatagactctacgttcatgcgggtcacagggagcgtcattatagctgctc

SEQ ID NO: 527839 - DNA, 60 bp, Artificial
  Synthetic oligonucleotide
acaccgaagatagaacctacgatggttgcgactacgttggaacatagatttgaagatata

SEQ ID NO: 527840 - DNA, 60 bp, Artificial
  Synthetic oligonucleotide
acgcggtgccggatgtatggctctgcagattcataggcctacgcgcgaattcatccttgc

SEQ ID NO: 527841 - DNA, 60 bp, Artificial
  Synthetic oligonucleotide
acgctatacatccaatatgaatcccactcccgcttttctcctctcatatttctttggttt

SEQ ID NO: 527842 - DNA, 60 bp, Artificial
  Synthetic oligonucleotide
acggactcccgcctgagagcacgctaagggccctgccctatacgtaccagcgcgaaagct

SEQ ID NO: 527843 - DNA, 60 bp, Artificial
  Synthetic oligonucleotide
acggagcgttggtagacgcggaaatcaaagtgtcaaagggtatggggatagtaccaccgt

SEQ ID NO: 527844 - DNA, 60 bp, Artificial
  Synthetic oligonucleotide
acggcgagtccgtcaagcaggcggttctactgaatgtgttgggaagcggtgaagaacttc

SEQ ID NO: 527845 - DNA, 60 bp, Artificial
  Synthetic oligonucleotide
acggcgtaatggttgatgcagagattaaatattgtaaaggaatgggaattgtgacgccat

SEQ ID NO: 527846 - DNA, 60 bp, Artificial
  Synthetic oligonucleotide
acggtcgaggcgatacagaactatgtgaaacctttttgtgcagcgttcggtattatcaac

SEQ ID NO: 527847 - DNA, 60 bp, Artificial
  Synthetic oligonucleotide
acgtacctgttcccccagcccggagcggatgcggacatgtatgaactgaggaacttcatg

SEQ ID NO: 527848 - DNA, 60 bp, Artificial
  Synthetic oligonucleotide
acgtatacgcgtacgggaaaattaataagtggagttatcgccaactacgcggacatggaa

SEQ ID NO: 527849 - DNA, 60 bp, Artificial; identical to SEQ ID NO: 315393
  Synthetic oligonucleotide

SEQ ID NO: 527850 - DNA, 60 bp, Artificial
  Synthetic oligonucleotide
acgtgcattacgaagatttgactcgtcattggcatgcgctgggggcagcacaagaagttg

SEQ ID NO: 527851 - DNA, 60 bp, Artificial
  Synthetic oligonucleotide
acgtgccactctattgcattgatgagtcgtcgaagaagtacgagctccagtgtgttggtg

SEQ ID NO: 527852 - DNA, 60 bp, Artificial
  Synthetic oligonucleotide
acgttcagttctgcgacgcaggattccaatcctacgacgtctattctcgtttcccttctg

SEQ ID NO: 527853 - DNA, 60 bp, Artificial
  Synthetic oligonucleotide
acgtttttgttcttgatcaaaagcggaaaacaatatgcggacaaatagcagcgagacaat

SEQ ID NO: 527854 - DNA, 60 bp, Artificial
  Synthetic oligonucleotide
actaaatataaaggatggtgtttagattgctgtcaacatactgacttaacttattgtagc

SEQ ID NO: 527855 - DNA, 60 bp, Artificial
  Synthetic oligonucleotide
actaagaatgaggatgaaacaagtcgcaatgcaattgatagaagatttgtaatgtcgacc

SEQ ID NO: 527856 - DNA, 60 bp, Artificial
  Synthetic oligonucleotide
actaataagtataagaccaaaaaccgcatagtctttagaaatcttactgaattcacctgg

SEQ ID NO: 527857 - DNA, 60 bp, Artificial
  Synthetic oligonucleotide
actaatgccaataacgttacaatccctatcaattgaattagatggtgacgtttattacgt

SEQ ID NO: 527858 - DNA, 60 bp, Artificial
  Synthetic oligonucleotide
actaccatggatggaaacatagcttggtagtgttcacccttgcgcaacgtaaatataccc

SEQ ID NO: 527859 - DNA, 60 bp, Artificial
  Synthetic oligonucleotide
actacgtggagacgtagttatgcgcgggatcatcatcgcgaacacgataatgacgttact

SEQ ID NO: 527860 - DNA, 60 bp, Artificial
  Synthetic oligonucleotide
actactggctctttccgatcaccttctttctctatcgcttgggtcccggttgcttcagaa

SEQ ID NO: 527861 - DNA, 60 bp, Artificial
  Synthetic oligonucleotide
actagaagacccaggaatggcgtattttccttatatagcatctgtgttgacagtattgtt

SEQ ID NO: 527862 - DNA, 60 bp, Artificial
  Synthetic oligonucleotide
actagaagatccaggaatggcatattttccttatattgcatctgtcctaacagttttgtt

SEQ ID NO: 527863 - DNA, 60 bp, Artificial
  Synthetic oligonucleotide
actagaatagaaatgaaggcgagtgacgaagtaagtttagtaccatatcatgagcaaacg

SEQ ID NO: 527864 - DNA, 60 bp, Artificial; identical to SEQ ID NO: 316095
  Synthetic oligonucleotide

SEQ ID NO: 527865 - DNA, 60 bp, Artificial
  Synthetic oligonucleotide
actagtattgacactttggttgatatgtttgtctgtctcttagctctcccgcttgtcact

SEQ ID NO: 527866 - DNA, 60 bp, Artificial
  Synthetic oligonucleotide
accagtggattggggaccaggtgaaacgcctgattctacgttagtgcagccagtacttga

SEQ ID NO: 527867 - DNA, 60 bp, Artificial
  Synthetic oligonucleotide
accattgaaacttagtgggaaattaactttaagtgaggaattcgatggagctcaaacgag

SEQ ID NO: 527868 - DNA, 60 bp, Artificial
  Synthetic oligonucleotide
acccacgggtaatgatgaggtttaagatcccgagaacgcaacaaccacaaatccacatct

SEQ ID NO: 527869 - DNA, 60 bp, Artificial
  Synthetic oligonucleotide
acccagcctctagtaattgagccatggacgcagggtaagattagtggtgtgcctccgccc

SEQ ID NO: 527870 - DNA, 60 bp, Artificial
  Synthetic oligonucleotide
accgatggataagaggatgtggtatctggaatgatgaaggatggcaggagggagtgttta

SEQ ID NO: 527871 - DNA, 60 bp, Artificial
  Synthetic oligonucleotide
accgcatggagtggttgatcctgcgatgcaaattcctactgctgtataacgggggagggt

SEQ ID NO: 527872 - DNA, 60 bp, Artificial
  Synthetic oligonucleotide
accggagcggatcggcatgttttcgcagaacctaggggcttatgagatcgaccccctgtc

SEQ ID NO: 527873 - DNA, 60 bp, Artificial
  Synthetic oligonucleotide
accggtctgtgagagcggagaagtcattaaccttgccgcacgtatgtcgcagatgtggat

SEQ ID NO: 527874 - DNA, 60 bp, Artificial
  Synthetic oligonucleotide
acctacagctagtagcggtcatgggtaccagtgtcatgtttgctctgcggttctgtttag

SEQ ID NO: 527875 - DNA, 60 bp, Artificial
  Synthetic oligonucleotide
acctatgaagaataacgatgaagggacgcctgacaagaaaggaaacactaaaggtacatt

SEQ ID NO: 527876 - DNA, 60 bp, Artificial
  Synthetic oligonucleotide
acctccacgagcggaaaatccatcgtgttggatggatggaacgcctagatcgttttctag

SEQ ID NO: 527877 - DNA, 60 bp, Artificial
  Synthetic oligonucleotide
acctggacgaatttcgagaaccatgatgcatagcgcgcttctaaaagagtcgagcgcaag

SEQ ID NO: 527878 - DNA, 60 bp, Artificial
  Synthetic oligonucleotide
accttaagatctgtcacaatgcgaccaacttcgcaggaacaacgaaatgaaatgtttttt

SEQ ID NO: 527879 - DNA, 60 bp, Artificial
  Synthetic oligonucleotide
accttcaagcaacgttggatgcgatcaattggatttctccttgaccaaaggtattaatgt

SEQ ID NO: 527880 - DNA, 60 bp, Artificial
  Synthetic oligonucleotide
acgaaagtgctggatatgttaatagacagctctacactcgagatcaactctaatgggcaa

SEQ ID NO: 527881 - DNA, 60 bp, Artificial
  Synthetic oligonucleotide
acgcggaatcaccgtatgcgtttgggcgataacgcgtatagtcagtttatgaagggtctg

SEQ ID NO: 527882 - DNA, 60 bp, Artificial
  Synthetic oligonucleotide
acgccatgtttctaagccgtttgccatgtgaatctggtaaatccgtcggtcctgtttcta

SEQ ID NO: 527883 - DNA, 60 bp, Artificial
  Synthetic oligonucleotide
acgccacaaggaaaccagtgactggcgacactggccttgataggcgggcacctagcgatg

SEQ ID NO: 527884 - DNA, 60 bp, Artificial
  Synthetic oligonucleotide
acgcagagggcgatgtctgctggttaacgatccgccaagcacgagcgcacgggatactat

SEQ ID NO: 527885 - DNA, 60 bp, Artificial
  Synthetic oligonucleotide
acgcactgaatcgcaggctaacgctcacgtcacatccttcggctcgcgtctattcaatca

SEQ ID NO: 527886 - DNA, 60 bp, Artificial
  Synthetic oligonucleotide
acgcaactatctaattcagttagccaaaacactcaagacatatccgccatgggtgacaga

SEQ ID NO: 527887 - DNA, 60 bp, Artificial
  Synthetic oligonucleotide
acgcaaaattatggaattaatttaccgatcactggttccatggatacagcatatgcaaat

SEQ ID NO: 527888 - DNA, 60 bp, Artificial
  Synthetic oligonucleotide
acgattcggataaaatcataacgttgttggaagaaataggacggaaggataagcgtatcg

SEQ ID NO: 527889 - DNA, 60 bp, Artificial
  Synthetic oligonucleotide
acgattacagtatggagcgaacggagatcatgttgcgctgctccagtgactcacacatgg

SEQ ID NO: 527890 - DNA, 60 bp, Artificial
  Synthetic oligonucleotide
acgatcactaatcttgacaatgtccggtccgagccatcctctctctcctcccaagtctcg

SEQ ID NO: 527891 - DNA, 60 bp, Artificial
  Synthetic oligonucleotide
acgataataaactcacgctggacgacgcttggggagcaatcatcgataggacaaaggatc

SEQ ID NO: 527892 - DNA, 60 bp, Artificial
  Synthetic oligonucleotide
acgagtccttcttcttagggtttgatttgggaatcgacgtcgtacatttcgaagatttag

SEQ ID NO: 527893 - DNA, 60 bp, Artificial
  Synthetic oligonucleotide
acgacgttcgtgactaaggttagtcgcggttttagcgaagacctcgctcacaggatcctg

SEQ ID NO: 527894 - DNA, 60 bp, Artificial
  Synthetic oligonucleotide
acgacatgtactattcgaaactgtaagaagttaggtccaagagagaacgtagctgtaata

SEQ ID NO: 527895 - DNA, 60 bp, Artificial
  Synthetic oligonucleotide
acgacagcggtggtgtcatccactctagctcaagtgtcaatgaatgcaggtgcacgcgga

SEQ ID NO: 527896 - DNA, 60 bp, Artificial
  Synthetic oligonucleotide
catccaaccactgagattagatctgaattttacgcaatattggatacatgggatattagt

SEQ ID NO: 527897 - DNA, 60 bp, Artificial
  Synthetic oligonucleotide
catcattagcgcgactagttcagtgctgtgtggtcttcagttcattatcgacgccgagtg

SEQ ID NO: 527898 - DNA, 60 bp, Artificial
  Synthetic oligonucleotide
catcatgcagaatgtgagcggtcgcacagatgaggagaggttttatgctttactgttgat

SEQ ID NO: 527899 - DNA, 60 bp, Artificial
  Synthetic oligonucleotide
catcatcagtttccagaaactcatctattagatcagtaagttcttctgtatctgcgtgga

SEQ ID NO: 527900 - DNA, 60 bp, Artificial
  Synthetic oligonucleotide
catcatagatgtaaccaacagattcgtcagcaagattatgttgacgtgcagtttgcagat

SEQ ID NO: 527901 - DNA, 60 bp, Artificial
  Synthetic oligonucleotide
catcagtgattaaatgaattacaacgatgccaatgactcgtatcaattaaatcacgtcac

SEQ ID NO: 527902 - DNA, 60 bp, Artificial
  Synthetic oligonucleotide
catcagctgagatacctcaatggtttaagagtttgaatccaatgttgggtgtggtaaatt

SEQ ID NO: 527903 - DNA, 60 bp, Artificial
  Synthetic oligonucleotide
catcacctccgaccaaatataaaggatggtgtctagactgttgccaacacactgacttaa

SEQ ID NO: 527904 - DNA, 60 bp, Artificial
  Synthetic oligonucleotide
catcaagggaccggaccgctacaagccccatgttcagcatgaatacaccgaatttgatat

SEQ ID NO: 527905 - DNA, 60 bp, Artificial
  Synthetic oligonucleotide
catcaagaagaatttccttcatttaattgatcatctctaaagggtcagggctgctgcttc

SEQ ID NO: 527906 - DNA, 60 bp, Artificial
  Synthetic oligonucleotide
catatggggcacggaccatttctatagggttgtcggcaggtggaacgcctcaatacataa

SEQ ID NO: 527907 - DNA, 60 bp, Artificial
  Synthetic oligonucleotide
catatgggacgtttcgacagatagaggtgacatgagtgatagagagtgggaaaggcatag

SEQ ID NO: 527908 - DNA, 60 bp, Artificial
  Synthetic oligonucleotide
catatgatctacggtggaccaagttagcattattagagtctacaacgttgagcagcgcgt

SEQ ID NO: 527909 - DNA, 60 bp, Artificial
  Synthetic oligonucleotide
catatatgaatggtttgatataagatacatgaggaatacaccaatagttacatttacaat

SEQ ID NO: 527910 - DNA, 60 bp, Artificial
  Synthetic oligonucleotide
catatacttgcctgcaccgggtgaattacaattatctctagggaatcagcctccaaataa

SEQ ID NO: 527911 - DNA, 60 bp, Artificial
  Synthetic oligonucleotide
catatacagttaacaaattaagacagttatgtacaggagtgaagactgttgattatgatt

SEQ ID NO: 527912 - DNA, 60 bp, Artificial
  Synthetic oligonucleotide
catataatggcgggaacgtgctacgatctagcgcaaaacatacagttgaatataattggg

SEQ ID NO: 527913 - DNA, 60 bp, Artificial
  Synthetic oligonucleotide
catagacaatggtcgatccccttgatactttatgcggacaaacttcgaattgtcccagca

SEQ ID NO: 527914 - DNA, 60 bp, Artificial
  Synthetic oligonucleotide
catacttaaagacataaagccattttttacagtcagtgaagcacatttgccaatgcagta

SEQ ID NO: 527915 - DNA, 60 bp, Artificial
  Synthetic oligonucleotide
catactagggaatatgctgaattttactcacagtccaatcagcttctttcgtacggagac

SEQ ID NO: 527916 - DNA, 60 bp, Artificial
  Synthetic oligonucleotide
cataccagatgtaataacagaagcttctgagaaattcataccaaatagagcatatagagt

SEQ ID NO: 527917 - DNA, 60 bp, Artificial
  Synthetic oligonucleotide
catacatggcacggactaagaacagcgatactgaatagaacaactctaccaaatatgctt

SEQ ID NO: 527918 - DNA, 60 bp, Artificial
  Synthetic oligonucleotide
catacacatgacgttgctagttgccgctgtcgtagcgttgttgacatcggtatgcacgct

SEQ ID NO: 527919 - DNA, 60 bp, Artificial
  Synthetic oligonucleotide
catacaatgaggcagtacgaatgagtgtgacagagttcagtgggatcccgctagatggat

SEQ ID NO: 527920 - DNA, 60 bp, Artificial
  Synthetic oligonucleotide
cataatcaaacatcgcataccccagtttatggatcaatatcacgttgtatctacgtatct

SEQ ID NO: 527921 - DNA, 60 bp, Artificial
  Synthetic oligonucleotide
cataagaaacgtctacagcgttcgcgtgtatctcatccgatttatttgggagtccataat

SEQ ID NO: 527922 - DNA, 60 bp, Artificial
  Synthetic oligonucleotide
cataaaataaatatttcaataagtacgtgtactatacgtaattgtaataaactaggacca

SEQ ID NO: 527923 - DNA, 60 bp, Artificial
  Synthetic oligonucleotide
ccactcaatacacaaaccttagggattggatgcaaaactacggacgtaaacacatttgag

SEQ ID NO: 527924 - DNA, 60 bp, Artificial
  Synthetic oligonucleotide
ccactaacaacgtgcacttagcgcctggcttgggaaacatcgaccctgagatctacaacg

SEQ ID NO: 527925 - DNA, 60 bp, Artificial
  Synthetic oligonucleotide
ccacattatgtttgtattatccaactgaagcaagtactcaaatcaatgacggtgaatgga

SEQ ID NO: 527926 - DNA, 60 bp, Artificial
  Synthetic oligonucleotide
ccacgccaaacgcaacaacgggatactattcgactactaactatgacacagtaaatatga

SEQ ID NO: 527927 - DNA, 60 bp, Artificial
  Synthetic oligonucleotide
ccacattacaagaagcaagaatcgtattagaagcgaatgtgatggaaattttggggatag

SEQ ID NO: 527928 - DNA, 60 bp, Artificial
  Synthetic oligonucleotide
ccacagacacttgtgcaaatgcggcatacaatcgccggcaacaaggaatggcaaacatgg

SEQ ID NO: 527929 - DNA, 60 bp, Artificial
  Synthetic oligonucleotide
ccaattcccaggcaattgaccaatcgatggctctccagttttgtgagtcagatcatgtca

SEQ ID NO: 527930 - DNA, 60 bp, Artificial
  Synthetic oligonucleotide
ccaatataattacttacgcgatggagagcaggttacagcacatactacctgttcggttaa

SEQ ID NO: 527931 - DNA, 60 bp, Artificial
  Synthetic oligonucleotide
ccaagcaatgtctaagagatcacgatcgcttaactctgctgcattttattatagagtcta

SEQ ID NO: 527932 - DNA, 60 bp, Artificial
  Synthetic oligonucleotide
ccaacgaccgaagcaacgatgtcaatcttcgccatgagattcaacagcacaacctcacga

SEQ ID NO: 527933 - DNA, 60 bp, Artificial
  Synthetic oligonucleotide
ccaaagaattcgctatgctgcaagatgatttaacggtgttaaggtatgctaatgaaattg

SEQ ID NO: 527934 - DNA, 60 bp, Artificial
  Synthetic oligonucleotide
ccaaacaactgtcacataaaaagaatttagtaaacagtcttcatcaaatgaatcttaatt

SEQ ID NO: 527935 - DNA, 60 bp, Artificial
  Synthetic oligonucleotide
ccaaaagatcgagatcactaaattctgctgcattttactacagagtgtagatatagctta

SEQ ID NO: 527936 - DNA, 60 bp, Artificial
  Synthetic oligonucleotide
cattttcaactttctacgagctttagtcaaatcaaattctaatattggacattgttcgtc

SEQ ID NO: 527937 - DNA, 60 bp, Artificial
  Synthetic oligonucleotide
catccctctagggagcgtgctttgcatgcatcatacttatacttggaaccacccccatgg

SEQ ID NO: 527938 - DNA, 60 bp, Artificial
  Synthetic oligonucleotide
catcgactacaggctgctctgcgtgccttcaggctgggtcagtaggtggttagctccact

SEQ ID NO: 527939 - DNA, 60 bp, Artificial
  Synthetic oligonucleotide
catgagcttaatcatattgccggtcggcgtttaggcgcttgtgaccgcgtggttaggggg

SEQ ID NO: 527940 - DNA, 60 bp, Artificial
  Synthetic oligonucleotide
catgcggacgaccatgcatccataccgccgacagattctgcagcgaataacgaacgaccg

SEQ ID NO: 527941 - DNA, 60 bp, Artificial
  Synthetic oligonucleotide
catgcttcacagcgctactatccctgggattctaggtaatagagacgcgtggcgcaattt

SEQ ID NO: 527942 - DNA, 60 bp, Artificial
  Synthetic oligonucleotide
catggcttgaattactgcgtcacttatgatgcgtgactgctaggtgaggggggcatgtaa

SEQ ID NO: 527943 - DNA, 60 bp, Artificial
  Synthetic oligonucleotide
catgtaccgtgaaagtgtgtccgctaaatacacaaacgttagggataggttgtcaaacaa

SEQ ID NO: 527944 - DNA, 60 bp, Artificial
  Synthetic oligonucleotide
catgtactgtaaaagtgtgtccactgaatacacaaacgttaggaataggttgtcaaacaa

SEQ ID NO: 527945 - DNA, 60 bp, Artificial
  Synthetic oligonucleotide
catgtggatatttcccttccagtgcagaagatcaaattaactggaaccgaacatctcggc

SEQ ID NO: 527946 - DNA, 60 bp, Artificial
  Synthetic oligonucleotide
catgttcctaggcgatcctcaatccattttgaagcaggcgacgcccgttcttcgagaccc

SEQ ID NO: 527947 - DNA, 60 bp, Artificial
  Synthetic oligonucleotide
cattacgtgatccagaaccgatacgtcaaattaagaaacatgttggattgagaacgctca

SEQ ID NO: 527948 - DNA, 60 bp, Artificial
  Synthetic oligonucleotide
cattcacgataaattgatgatacgaacagtagacgagatagatatgacgaaagaaattaa

SEQ ID NO: 527949 - DNA, 60 bp, Artificial
  Synthetic oligonucleotide
cattctacgagatgcttttgagcgtttgaacaagctttcactattacatgacaaccttct

SEQ ID NO: 527950 - DNA, 60 bp, Artificial
  Synthetic oligonucleotide
cattgactctcagtactatatctccactcaagtgatctggtctctgctgtatcacataga

SEQ ID NO: 527951 - DNA, 60 bp, Artificial
  Synthetic oligonucleotide
catttgccaccataagactccctgcactagagtagcgcctaggcagcataaaatgtgacc

SEQ ID NO: 527952 - DNA, 60 bp, Artificial
  Synthetic oligonucleotide
cattttaccggtaggcgtctaatccacgctgatgtagccgctgatgggggatgggattta

SEQ ID NO: 527953 - DNA, 60 bp, Artificial
  Synthetic oligonucleotide
cagccaagagggatgaatatcactgtatatcgacttacttgctcccacaaccgggagcgg

SEQ ID NO: 527954 - DNA, 60 bp, Artificial
  Synthetic oligonucleotide
cagcatggtcggtttaggcaacgcgcggggcagaatatcacaaccgcggttgtttcgtca

SEQ ID NO: 527955 - DNA, 60 bp, Artificial
  Synthetic oligonucleotide
cagcagatttttcaaggtcgaaacgacccgatgatgatttatctggtttggagaaggatt

SEQ ID NO: 527956 - DNA, 60 bp, Artificial
  Synthetic oligonucleotide
cagcaatacttaacaggaccaccttaccgaataacatcccacccatatatcccccgaatg

SEQ ID NO: 527957 - DNA, 60 bp, Artificial
  Synthetic oligonucleotide
cagcaagctgctttattgggagtttatgttccttatccttcgagaatgtcattattttgt

SEQ ID NO: 527958 - DNA, 60 bp, Artificial
  Synthetic oligonucleotide
cagcaagagggcgcatcattgatacatcagagacgattaatgcgttcacgaggagttcat

SEQ ID NO: 527959 - DNA, 60 bp, Artificial
  Synthetic oligonucleotide
cagcaaattgaccatacgaagaaggagataatgaagaaagatgcgtacaacgaagcagtg

SEQ ID NO: 527960 - DNA, 60 bp, Artificial
  Synthetic oligonucleotide
cagcaaactttgagtatgtgagagggttcatgcaaggtcgacataagtgtcaactgtgct

SEQ ID NO: 527961 - DNA, 60 bp, Artificial
  Synthetic oligonucleotide
cagatttcgaaaaccagcttaggccacggtcagacaacctggtgcaagatgtgtctgatc

SEQ ID NO: 527962 - DNA, 60 bp, Artificial
  Synthetic oligonucleotide
cagattaatttgatggactcatatgttcaaataccagatggtaatgttattaagaaaata

SEQ ID NO: 527963 - DNA, 60 bp, Artificial
  Synthetic oligonucleotide
cagatgctggaaaaagcgttgcgagcgtatggcaaagtggtgaaagttgaaggtgagagc

SEQ ID NO: 527964 - DNA, 60 bp, Artificial
  Synthetic oligonucleotide
cagatgcagacgtgtagcgtaatagatgttcgcgcttcagagttgatcggttgctcaccc

SEQ ID NO: 527965 - DNA, 60 bp, Artificial
  Synthetic oligonucleotide
cagatccagagcgtggcgccaagggaggagtcgcgttggatggatgaagatgaagcgagg

SEQ ID NO: 527966 - DNA, 60 bp, Artificial
  Synthetic oligonucleotide
cagatagatagagtagtgaaagaaatgagacgtcaattggaaatgattgataaactaacg

SEQ ID NO: 527967 - DNA, 60 bp, Artificial
  Synthetic oligonucleotide
cagagttgtaaaggaaatgagacgtcagctggaaatgattgataagctaactactagaga

SEQ ID NO: 527968 - DNA, 60 bp, Artificial
  Synthetic oligonucleotide
cagagtcgtcaaagagatgaggcgtcagttggaaatgattgataggttaaccacacgtga

SEQ ID NO: 527969 - DNA, 60 bp, Artificial
  Synthetic oligonucleotide
cagaggcggcgaatgaaatcgcacgcgttactggtgagacaacaacgtggggaccagcgc

SEQ ID NO: 527970 - DNA, 60 bp, Artificial
  Synthetic oligonucleotide
cagaggaagtacctttagttggttcggggatggcgtccgcgattgcaacaggaagagcga

SEQ ID NO: 527971 - DNA, 60 bp, Artificial
  Synthetic oligonucleotide
cagagctatcagatcccggcgaacccccagctgatctgggaagttccacggagcggcgtg

SEQ ID NO: 527972 - DNA, 60 bp, Artificial
  Synthetic oligonucleotide
cagagcccaaagggtatgtattggaaatcagcgatgcaggggcatatcgcattcaagatg

SEQ ID NO: 527973 - DNA, 60 bp, Artificial
  Synthetic oligonucleotide
cagagatttttaatgtatatagtttcagagaccacacatggcatggattaagaacggcaa

SEQ ID NO: 527974 - DNA, 60 bp, Artificial
  Synthetic oligonucleotide
cagacgtgtcacaatgggattcatcacaacacaatacacaaccatttaggaaaggaataa

SEQ ID NO: 527975 - DNA, 60 bp, Artificial
  Synthetic oligonucleotide
cagacgaagctaacaaatggatttctatgggatcttcctgtacaataaaagtgtgtccac

SEQ ID NO: 527976 - DNA, 60 bp, Artificial
  Synthetic oligonucleotide
cagacaccaataactaattcagttacagtcagacaagatttagaacgacagttgggtgaa

SEQ ID NO: 527977 - DNA, 60 bp, Artificial
  Synthetic oligonucleotide
cagacacaagacgctgttagtgaagttgcgacaatatcatcacaagtgtcacaaataagt

SEQ ID NO: 527978 - DNA, 60 bp, Artificial
  Synthetic oligonucleotide
cagaatccgagagttcatcaggttaatgacgagttaaaacgaatggggttagacgtgtcg

SEQ ID NO: 527979 - DNA, 60 bp, Artificial
  Synthetic oligonucleotide
cagaagaatgtaaaaacgctagatgagtgggagaacggaaaaaatccatatgaaccgata

SEQ ID NO: 527980 - DNA, 60 bp, Artificial
  Synthetic oligonucleotide
cagttttgttcacattacacaaagcgtcaattccaacaatgaaaatagcattgaagacgt

SEQ ID NO: 527981 - DNA, 60 bp, Artificial
  Synthetic oligonucleotide
cagtttaaaacatttttctacttttggagactattcaagtcgtcttgttcgttttgactt

SEQ ID NO: 527982 - DNA, 60 bp, Artificial
  Synthetic oligonucleotide
cagttgatccacaattatactgtgattacaatgtagtactaatgaaatatgacgcgaatc

SEQ ID NO: 527983 - DNA, 60 bp, Artificial
  Synthetic oligonucleotide
cagttgacaaattaagacagttatgtacaggagtgaagactgttgattatgattccggca

SEQ ID NO: 527984 - DNA, 60 bp, Artificial
  Synthetic oligonucleotide
cagttatgtacaggagtgaagactgttgattatgattccggcatatctgacgttgaataa

SEQ ID NO: 527985 - DNA, 60 bp, Artificial
  Synthetic oligonucleotide
cagtgggagaaacatagattcgcagaagatagaatgggggaagagatagcgatgtccatg

SEQ ID NO: 527986 - DNA, 60 bp, Artificial
  Synthetic oligonucleotide
cagtgaggtgcctttagatggatttgacataccacctgagctaatcagatagagtggtgc

SEQ ID NO: 527987 - DNA, 60 bp, Artificial
  Synthetic oligonucleotide
cagtcttacaatttaatactgatgtcactaagcaaatggttcaggaagtgtcaaatgatg

SEQ ID NO: 527988 - DNA, 60 bp, Artificial
  Synthetic oligonucleotide
cagtcgcatattttggcgcgtcagcgggtcattctggtgctgaccaaccgttggtcatag

SEQ ID NO: 527989 - DNA, 60 bp, Artificial
  Synthetic oligonucleotide
cagtattgtttacattgcacaaggcttcaattccaaccatgaaaattgcacttaaaacat

SEQ ID NO: 527990 - DNA, 60 bp, Artificial
  Synthetic oligonucleotide
cagtattggatcattaacgactgagttagcaacgcttacgctacgtgttacctcgatcca

SEQ ID NO: 527991 - DNA, 60 bp, Artificial
  Synthetic oligonucleotide
cagtagggcgcacgtttagagaagcctataaagagttttttcaaatagcgattcaacaag

SEQ ID NO: 527992 - DNA, 60 bp, Artificial
  Synthetic oligonucleotide
cagcgagactatgtattcgatgatgcgtcaattgtacagtactcccgtgactgatgtgtc

SEQ ID NO: 527993 - DNA, 60 bp, Artificial
  Synthetic oligonucleotide
cagcggaattagatttaagagtttagtctctgatttgaattcagagcatggccggtcatc

SEQ ID NO: 527994 - DNA, 60 bp, Artificial
  Synthetic oligonucleotide
cagcgggaaacgcacaagagactccacaaggggtaacattaaatgtgggaggcgtgaata

SEQ ID NO: 527995 - DNA, 60 bp, Artificial
  Synthetic oligonucleotide
cagctgaacaccaacggaagccggcattcaaaccggaacgctggctcgatcaaccagaat

SEQ ID NO: 527996 - DNA, 60 bp, Artificial
  Synthetic oligonucleotide
caggaacatcttgtacagttaaagtatgtccattaaatacacaaactttaggaattgggt

SEQ ID NO: 527997 - DNA, 60 bp, Artificial
  Synthetic oligonucleotide
caggaggagatctcacgtacaaagcgggatatagcgaagagagaatcatatgtttccgcg

SEQ ID NO: 527998 - DNA, 60 bp, Artificial
  Synthetic oligonucleotide
caggatggaaattaacttacgtaggatataatggaagcgatacaagaggacattataatt

SEQ ID NO: 527999 - DNA, 60 bp, Artificial; identical to SEQ ID NO: 348488
  Synthetic oligonucleotide

SEQ ID NO: 528000 - DNA, 60 bp, Artificial
  Synthetic oligonucleotide
caggcgcaacgatggcgcagaaggtagaaaaagtggcatatgcatcgtatgccgaagcat

SEQ ID NO: 528001 - DNA, 60 bp, Artificial
  Synthetic oligonucleotide
caggcgcagatttttaatgtctattcatataaaaatccattatggcacggtttgcgagcg

SEQ ID NO: 528002 - DNA, 60 bp, Artificial
  Synthetic oligonucleotide
caggcgcgcagagatctggaggaagcacaagccagaatgcaaacggaggagatggagaga

SEQ ID NO: 528003 - DNA, 60 bp, Artificial
  Synthetic oligonucleotide
caggctagagaggtaatggccaccgatacgctgttcaatgaacctgagcgccaggaccca

SEQ ID NO: 528004 - DNA, 60 bp, Artificial
  Synthetic oligonucleotide
caggtgcatgtgttacgaggcccaaagcatttccaaagacgtgcaataatgggtgcgatt

SEQ ID NO: 528005 - DNA, 60 bp, Artificial
  Synthetic oligonucleotide
caggtttgaggcccgcttgcgtcaggaaaccaacgctgaatgggagccccgcattgctgc

SEQ ID NO: 528006 - DNA, 60 bp, Artificial
  Synthetic oligonucleotide
cagtaagtgtagggggtgtggatatgagggcaggacggataatcgcatgggatggacaag

SEQ ID NO: 528007 - DNA, 60 bp, Artificial
  Synthetic oligonucleotide
cagtacgatattttagaaaaagcggtgaaatcatatggaaaagtaataggaaaagaggaa

SEQ ID NO: 528008 - DNA, 60 bp, Artificial
  Synthetic oligonucleotide
cctaatgaaaacccatctacctgtaacgtgagtccacgtaagccaagtttgtcgctgatg

SEQ ID NO: 528009 - DNA, 60 bp, Artificial
  Synthetic oligonucleotide
ccgtttgagccttgcggtgtagccatggctgagctagcttgcttttgttatcctcatttg

SEQ ID NO: 528010 - DNA, 60 bp, Artificial
  Synthetic oligonucleotide
ccgttgcaccatatgatgctgatgagacgcgatttcccaacgcgcgatcgcagtatcgtg

SEQ ID NO: 528011 - DNA, 60 bp, Artificial
  Synthetic oligonucleotide
ccgttacacgtttagaccagtgctatcatttaagatggggggcacaatacgtgggggagg

SEQ ID NO: 528012 - DNA, 60 bp, Artificial
  Synthetic oligonucleotide
ccgttaaacaagcagtgctactcaatgtcctaggtgcaggtgacgaaattcctgatccat

SEQ ID NO: 528013 - DNA, 60 bp, Artificial
  Synthetic oligonucleotide
ccgtggagcgaacttgacccggaagaggagttcttacgtaattatagggtgtctagagaa

SEQ ID NO: 528014 - DNA, 60 bp, Artificial
  Synthetic oligonucleotide
ccgtgctttcggtactacctttactgctgcatggagccggccacctagctataatgcact

SEQ ID NO: 528015 - DNA, 60 bp, Artificial
  Synthetic oligonucleotide
ccgtgatgcgggattggcaggtctcgacatggtaactcctactgttgtatagcgggggag

SEQ ID NO: 528016 - DNA, 60 bp, Artificial
  Synthetic oligonucleotide
ccgtgacgatcgaagaacatgtaggtaatgagccgatctttaagactaagctaatccgtg

SEQ ID NO: 528017 - DNA, 60 bp, Artificial
  Synthetic oligonucleotide
ccgtcgactgtcttcggaagcggcggagttctttacagtaagccccatcggacctgatgg

SEQ ID NO: 528018 - DNA, 60 bp, Artificial
  Synthetic oligonucleotide
ccgtcatgttagtgtcaaataacattaaggatgtggcgcgtgcaacagcatacttcacct

SEQ ID NO: 528019 - DNA, 60 bp, Artificial
  Synthetic oligonucleotide
ccgtatattgtcaaatatcacagaatattgcacacggaaatatcgattcttacacttctt

SEQ ID NO: 528020 - DNA, 60 bp, Artificial
  Synthetic oligonucleotide
ccggtcagcgggagatcaaagtatggactcatccagatgcattaatgagctgtataccgc

SEQ ID NO: 528021 - DNA, 60 bp, Artificial
  Synthetic oligonucleotide
ccggcacgagcggattgcgttgatcaacttagacttcatatgtcgcattacgtggacctg

SEQ ID NO: 528022 - DNA, 60 bp, Artificial
  Synthetic oligonucleotide
ccggatacgtattttgatggtgacgagcaatatggacgaagcctgttttcattagctcgt

SEQ ID NO: 528023 - DNA, 60 bp, Artificial
  Synthetic oligonucleotide
ccggataattgagatcgaacggaatttacagaaggagctggggataacgcgggagggagt

SEQ ID NO: 528024 - DNA, 60 bp, Artificial
  Synthetic oligonucleotide
ccggagtgcaaaggtcccactatgatgttcgtgagctgcgtcagaagataaggagtgagc

SEQ ID NO: 528025 - DNA, 60 bp, Artificial
  Synthetic oligonucleotide
ccggaacccaagggttatgtcttaaacgttccgggaccaggtgcctatagaatacaggac

SEQ ID NO: 528026 - DNA, 60 bp, Artificial
  Synthetic oligonucleotide
ccgctcatggtgataattatgtaatattaaatagcatatctaataatgttttcaactatt

SEQ ID NO: 528027 - DNA, 60 bp, Artificial
  Synthetic oligonucleotide
ccgctagatggtttcgaattaccattaacctgagatcagtaggtagagtggcgccccgag

SEQ ID NO: 528028 - DNA, 60 bp, Artificial
  Synthetic oligonucleotide
ccgcgttggcggcggaaatttacaatgtgtacagcttcagagatccaacatggcacgctt

SEQ ID NO: 528029 - DNA, 60 bp, Artificial
  Synthetic oligonucleotide
ccgccttgcctggaaggctacagttccaagcctctgtgagcgcatcttcactgcccgctg

SEQ ID NO: 528030 - DNA, 60 bp, Artificial
  Synthetic oligonucleotide
ccgcagctcacactttatccgctgattacatcaattaccacatgaacctgtccaccacat

SEQ ID NO: 528031 - DNA, 60 bp, Artificial
  Synthetic oligonucleotide
ccgcaaccaggagcgccaatagatatgtatgagttgcgaaatatcatgattttgagaggt

SEQ ID NO: 528032 - DNA, 60 bp, Artificial
  Synthetic oligonucleotide
ccgatttatcagaagggaatgagcaacttatttactgtagataggggcttgcttgagcgg

SEQ ID NO: 528033 - DNA, 60 bp, Artificial
  Synthetic oligonucleotide
ccgattccacgaaggttcacaagacaaggatggagtggagtgtcggcgaagcccccctgc

SEQ ID NO: 528034 - DNA, 60 bp, Artificial
  Synthetic oligonucleotide
ccgaggtttgcaccgcgtggagtggttgatccagcgatgcaaattcccactgctgtataa

SEQ ID NO: 528035 - DNA, 60 bp, Artificial
  Synthetic oligonucleotide
ccgaggaagaattgcgtaccgctgatgagacaaaaattattagcgaatatagagagaagt

SEQ ID NO: 528036 - DNA, 60 bp, Artificial
  Synthetic oligonucleotide
ccgagcacggggagtataatgctgagtatgcacccgtggacccgcgaggcgtcttttccg

SEQ ID NO: 528037 - DNA, 60 bp, Artificial
  Synthetic oligonucleotide
cgaaccaactgatgaaaagttagtttccatgctagattacatgatttatagcgcagagga

SEQ ID NO: 528038 - DNA, 60 bp, Artificial
  Synthetic oligonucleotide
cgaaagagcgtgttaagatcggttgaggagtcaagatacatcatacacatcattcgctcg

SEQ ID NO: 528039 - DNA, 60 bp, Artificial
  Synthetic oligonucleotide
cgaaactcggcggatcgggatatctttactatcgcaatagattacagtgaatatgataca

SEQ ID NO: 528040 - DNA, 60 bp, Artificial
  Synthetic oligonucleotide
cgaaactatttcatgtgtgccaatggcgacagtattaaatataaatggcgcaatgattga

SEQ ID NO: 528041 - DNA, 60 bp, Artificial
  Synthetic oligonucleotide
ccttttataagttccatttacaatcttattgctcctttgggagactatgtaaatctaacg

SEQ ID NO: 528042 - DNA, 60 bp, Artificial; identical to SEQ ID NO: 105092
  Synthetic oligonucleotide

SEQ ID NO: 528043 - DNA, 60 bp, Artificial
  Synthetic oligonucleotide
ccttaatcccgtttaaccaatccagcgagtgttggacgttaatggaaggaatggtcttag

SEQ ID NO: 528044 - DNA, 60 bp, Artificial
  Synthetic oligonucleotide
ccttaagaccactgtttttgatcctatcaattcgagagtgagcacgattgagcgaagcta

SEQ ID NO: 528045 - DNA, 60 bp, Artificial
  Synthetic oligonucleotide
ccttaagaaaagaatcttcgaacatctacacatcatacgcaagaatggattgtttcatga

SEQ ID NO: 528046 - DNA, 60 bp, Artificial
  Synthetic oligonucleotide
cctgttgccttacagcctctattatcacagctgcgggagttgtcaagtgaggtgacgcgc

SEQ ID NO: 528047 - DNA, 60 bp, Artificial
  Synthetic oligonucleotide
cctggtaactagaccagttgacgttatagatatgtcgaaggaattcaatcagaaaaacat

SEQ ID NO: 528048 - DNA, 60 bp, Artificial
  Synthetic oligonucleotide
cctgggactacgggactgaatatccaaaatggtgggctccaattcagattcaataccgat

SEQ ID NO: 528049 - DNA, 60 bp, Artificial
  Synthetic oligonucleotide
cctggacgtagttgggcactctactcatattcatctagtgttaagtgactgcgtcgctac

SEQ ID NO: 528050 - DNA, 60 bp, Artificial
  Synthetic oligonucleotide
cctggaaggtggttcatgagagcgggtcagaacgtaaccgcggtagtatgtggatcagac

SEQ ID NO: 528051 - DNA, 60 bp, Artificial
  Synthetic oligonucleotide
cctgcaccgggtgaattacaattatctctagggaatcagcctccaaataatatacctgtc

SEQ ID NO: 528052 - DNA, 60 bp, Artificial
  Synthetic oligonucleotide
cctgatgattgactgagaagccacagtcaatcatatcgcgtgtggctcagccttaatccc

SEQ ID NO: 528053 - DNA, 60 bp, Artificial
  Synthetic oligonucleotide
cctacgacacgggggcgaagatttggcggggatcagatcccaggacatgcaagacaacga

SEQ ID NO: 528054 - DNA, 60 bp, Artificial
  Synthetic oligonucleotide
cctacgatggtcgctaccacgttagaacacagatttgaagatataccagacaaaaagctc

SEQ ID NO: 528055 - DNA, 60 bp, Artificial
  Synthetic oligonucleotide
cctacttctagagaagctgtaacttattttatgaacgtgcttgcaggtggaaacattgaa

SEQ ID NO: 528056 - DNA, 60 bp, Artificial
  Synthetic oligonucleotide
cctatatgcgaatacgcaagtgatttcaattacctccgctgctctgaagtgggtggttaa

SEQ ID NO: 528057 - DNA, 60 bp, Artificial
  Synthetic oligonucleotide
cctattgaatgtgttgggtacaggcgaagaattgcctgatcccctcagccctggtgagcg

SEQ ID NO: 528058 - DNA, 60 bp, Artificial
  Synthetic oligonucleotide
cctcaaaaaaggaaggtattggagagggagcacaggaggaaactaccaaaattggcgtaa

SEQ ID NO: 528059 - DNA, 60 bp, Artificial
  Synthetic oligonucleotide
cctcaatggacttgtagtcacttaaaaagaaattgcttattcaatgggatgtgtgcgaaa

SEQ ID NO: 528060 - DNA, 60 bp, Artificial
  Synthetic oligonucleotide
cctcaattatacattgagtgtaatcactctaatgaacagcacattgcacacaataatgga

SEQ ID NO: 528061 - DNA, 60 bp, Artificial
  Synthetic oligonucleotide
cctcagagatggtaggctgcggtacagtcactcaagtgatgattggagagcatgtggata

SEQ ID NO: 528062 - DNA, 60 bp, Artificial
  Synthetic oligonucleotide
cctcagtggattcatggctagagttactgcgtcacctgtaatgcgtgactgctaggtgag

SEQ ID NO: 528063 - DNA, 60 bp, Artificial
  Synthetic oligonucleotide
cctcatatattacttcagcatacattgaacgcattagcaaaatacggaagaccaaggatg

SEQ ID NO: 528064 - DNA, 60 bp, Artificial
  Synthetic oligonucleotide
cctccgattacggcgacggtaacaacttatggtgacggtctccccgcgttgaaccattag

SEQ ID NO: 528065 - DNA, 60 bp, Artificial
  Synthetic oligonucleotide
cctcgatccaatcagatttcgagtctagagtatcggcattagagcgtactgcagttacta

SEQ ID NO: 528066 - DNA, 60 bp, Artificial
  Synthetic oligonucleotide
cctcggcccatgggaacgtgacgttcgtgagcttctcacgatactgccgacttccaccac

SEQ ID NO: 528067 - DNA, 60 bp, Artificial
  Synthetic oligonucleotide
cctcgtacggcatcacgctttaaaatacctttaacgcaacagccactgctacacgtatat

SEQ ID NO: 528068 - DNA, 60 bp, Artificial
  Synthetic oligonucleotide
cctgagagttggtcaagccgaggaaaccagatatgtgcagcagctgtttggggtggtacc

SEQ ID NO: 528069 - DNA, 60 bp, Artificial
  Synthetic oligonucleotide
ccattactatacaacaaattgttacacgggggctgaagcattgatcacgaccgctatcca

SEQ ID NO: 528070 - DNA, 60 bp, Artificial
  Synthetic oligonucleotide
ccatgtctataccttatcagcatgtgaatgtaccgaaagttgatcgtaaagttgtcagtt

SEQ ID NO: 528071 - DNA, 60 bp, Artificial
  Synthetic oligonucleotide
ccatggtccatacgtatacatcgccctgggatagcgacacagtcgtgatactacacatcg

SEQ ID NO: 528072 - DNA, 60 bp, Artificial
  Synthetic oligonucleotide
ccatgcttggagtagtaaatctaggagcgactttcgtaatgatggtttgtgcgaagagtg

SEQ ID NO: 528073 - DNA, 60 bp, Artificial
  Synthetic oligonucleotide
ccatgctcaacaacttgaaaaggtgtacacaggcttctgagatgaacgttgcgaaacagt

SEQ ID NO: 528074 - DNA, 60 bp, Artificial
  Synthetic oligonucleotide
ccatgccgctaaatgcttattctacatgttctccatgaatatgtacttagaagatcattt

SEQ ID NO: 528075 - DNA, 60 bp, Artificial
  Synthetic oligonucleotide
ccatctctcactaacgtccaacatgtggaaggaacttatgcgaagagacgaggagggcgc

SEQ ID NO: 528076 - DNA, 60 bp, Artificial
  Synthetic oligonucleotide
ccatcataactggcgagtcttatggggagtccgttaaacaggcggtgttactcaatgttc

SEQ ID NO: 528077 - DNA, 60 bp, Artificial
  Synthetic oligonucleotide
ccatcataacaggggaatcttatggcgaatctgtgaaacaagctgtattactcaatgttt

SEQ ID NO: 528078 - DNA, 60 bp, Artificial
  Synthetic oligonucleotide
ccatcacgtacaccaaggaaactttctgttcagagcaatgaaagtcgttcagatgatgtg

SEQ ID NO: 528079 - DNA, 60 bp, Artificial
  Synthetic oligonucleotide
ccatatgaatcgtcagaagtgactgcatctatgtgagaggttgagttaccgtcgtctgtc

SEQ ID NO: 528080 - DNA, 60 bp, Artificial
  Synthetic oligonucleotide
ccatatcgcgtgtggctcagccttaatcccgtttaaccaatccagcgaatgttggacgtt

SEQ ID NO: 528081 - DNA, 60 bp, Artificial
  Synthetic oligonucleotide
ccatatacaaggaatgattttgatagacgggaattaccagagttgcccggcgtacaaaga

SEQ ID NO: 528082 - DNA, 60 bp, Artificial
  Synthetic oligonucleotide
ccatagtacgggacggggggctgcgtataatgcgagactagctttccgatctaactcggc

SEQ ID NO: 528083 - DNA, 60 bp, Artificial
  Synthetic oligonucleotide
ccatacattgcatctgttctaacagttttgttcacattacataaagcttcaattccaacc

SEQ ID NO: 528084 - DNA, 60 bp, Artificial
  Synthetic oligonucleotide
ccactgctgaaggaggagaaatcgtttttcaaaacgctgcgtttacgatgtggaaattga

SEQ ID NO: 528085 - DNA, 60 bp, Artificial
  Synthetic oligonucleotide
ccactggaaagatggctgtcataactgcagttcaaggtagacctggaggaataaattttg

SEQ ID NO: 528086 - DNA, 60 bp, Artificial
  Synthetic oligonucleotide
ccactgtttttgatcctatcaattcgagagtgagcacgattgagcgaagctatgttgcgt

SEQ ID NO: 528087 - DNA, 60 bp, Artificial
  Synthetic oligonucleotide
ccacttaatacacaaacgttaggaattggatgcaaaactacggacgtgagtacatttgag

SEQ ID NO: 528088 - DNA, 60 bp, Artificial
  Synthetic oligonucleotide
ccactttacaacctctggccggtccatctgctctgctgtcgaagatctctgaattgcaac

SEQ ID NO: 528089 - DNA, 60 bp, Artificial
  Synthetic oligonucleotide
ccactttactgttttgatgaatctactaaaaggtatgaactgcagtgtgtaggtgcgtgt

SEQ ID NO: 528090 - DNA, 60 bp, Artificial
  Synthetic oligonucleotide
ccactttccattcctttcacgtgctgtgcgatgcctatcgcctcttgccgctcactgtgc

SEQ ID NO: 528091 - DNA, 60 bp, Artificial
  Synthetic oligonucleotide
ccagaagtactaaggttagtactagacattgggattaagtcgcaggtatcaaagaatcca

SEQ ID NO: 528092 - DNA, 60 bp, Artificial
  Synthetic oligonucleotide
ccagatagagtggcgctccaaggtcaccatgatacgagattggcaggtctcgatgtggtg

SEQ ID NO: 528093 - DNA, 60 bp, Artificial
  Synthetic oligonucleotide
ccagcaccacagtagacggaaggaccgtgtctcggttacatctgccggcattaggataca

SEQ ID NO: 528094 - DNA, 60 bp, Artificial
  Synthetic oligonucleotide
ccagcgcagaaagaagagtctaaagcgtgacctcgtaaagaagcagatgtatgtatcttt

SEQ ID NO: 528095 - DNA, 60 bp, Artificial
  Synthetic oligonucleotide
ccagctgatgacccatttgcaaatttgagagttaatttacttgcaccaggtggagcaaca

SEQ ID NO: 528096 - DNA, 60 bp, Artificial
  Synthetic oligonucleotide
ccaggtcatcatgacgcgggattggcagatcctggcatgatgattcccatcgctgtctaa

SEQ ID NO: 528097 - DNA, 60 bp, Artificial
  Synthetic oligonucleotide
ccagtaattacgcagcaattcgacaaaaaactgatcggacggtatgattacgttgtcgag

SEQ ID NO: 528098 - DNA, 60 bp, Artificial
  Synthetic oligonucleotide
ccagtgatggcgagcacgactgcaatagctctcgatattcctttcgatcggtactataac

SEQ ID NO: 528099 - DNA, 60 bp, Artificial
  Synthetic oligonucleotide
ccagttcccgacccgccagttcctgatatatcactgtgccgattcatcgggctgcgagtt

SEQ ID NO: 528100 - DNA, 60 bp, Artificial
  Synthetic oligonucleotide
ccataagatgggttgtttagatgttgttagatccttacggaagatgtcctctgccattac

SEQ ID NO: 528101 - DNA, 60 bp, Artificial
  Synthetic oligonucleotide
ccgacgcatgatccgatcgaaaacggtacatccaatctatttaggatcaatgcattacga

SEQ ID NO: 528102 - DNA, 60 bp, Artificial
  Synthetic oligonucleotide
ccgacgaggcgaacaaatggatttcaatgggatcgtcttgtactataaaagtatgtccac

SEQ ID NO: 528103 - DNA, 60 bp, Artificial
  Synthetic oligonucleotide
ccgacattcatctcaaggtatcgtcaggttgcatattacttttataacccagatgcagct

SEQ ID NO: 528104 - DNA, 60 bp, Artificial
  Synthetic oligonucleotide
ccgacaggaaaaggctgtcctgcatgttctttaaacactcctcaactgggagcctcaaag

SEQ ID NO: 528105 - DNA, 60 bp, Artificial
  Synthetic oligonucleotide
ccgaagtggtggaggagtcaagagccgagtattagataaagtggtactaggaatgcgctt

SEQ ID NO: 528106 - DNA, 60 bp, Artificial
  Synthetic oligonucleotide
ccgaaatgagatgccggatctaccaggtgtaatgaggtccaattatgatattcgtgagct

SEQ ID NO: 528107 - DNA, 60 bp, Artificial
  Synthetic oligonucleotide
ccgaaagaaccaatattccaaaatttcgacatcagtctaaaagttcatactcacaaatca

SEQ ID NO: 528108 - DNA, 60 bp, Artificial
  Synthetic oligonucleotide
ccctttcatcagggtaatagagacttgtcaaacctggaggactttcgagttgcatatact

SEQ ID NO: 528109 - DNA, 60 bp, Artificial
  Synthetic oligonucleotide
cccttgagttatgtaaattgctctccacaataggtaggagaatgtataacatgtacgagg

SEQ ID NO: 528110 - DNA, 60 bp, Artificial
  Synthetic oligonucleotide
cccttattgtatgaccttgagaaggatgttaagttgggtagcggatcacaaattgtattc

SEQ ID NO: 528111 - DNA, 60 bp, Artificial
  Synthetic oligonucleotide
ccctgcggtgcatccatttcatcgacgtcaacacgccattctgcggacgttcgggcaggc

SEQ ID NO: 528112 - DNA, 60 bp, Artificial
  Synthetic oligonucleotide
ccctagggtcatgatgagattcaaggtacctcggtcgcaacaaccacaaatgcacatata

SEQ ID NO: 528113 - DNA, 60 bp, Artificial
  Synthetic oligonucleotide
cccggacatcatgctgctcagagatcgggacaacgctctgtgcttgatgacctatatgcg

SEQ ID NO: 528114 - DNA, 60 bp, Artificial
  Synthetic oligonucleotide
cccgctggatggatttgacataccaccggaactcaccagatagagtgaagctccaaggtc

SEQ ID NO: 528115 - DNA, 60 bp, Artificial
  Synthetic oligonucleotide
cccgattttgaaactatgaagtgagcgtggttagtgtccatggcgaaaacagcagacgtc

SEQ ID NO: 528116 - DNA, 60 bp, Artificial
  Synthetic oligonucleotide
ccattcgcattacgaatcccactttgaatttcgacaatgagttgacaatctggcgtaata

SEQ ID NO: 528117 - DNA, 60 bp, Artificial
  Synthetic oligonucleotide
ccattcttctttgcaagatgtcttccgataagcagaacgttccaatgattaagaagccat

SEQ ID NO: 528118 - DNA, 60 bp, Artificial
  Synthetic oligonucleotide
cccaaacgctacggtaaagggtgggggattagagacagtcatgtcgggaggcgttcgaac

SEQ ID NO: 528119 - DNA, 60 bp, Artificial
  Synthetic oligonucleotide
cccaatacccacagctatgccgaaggttgcattggatatattggacaaagctatgtcaaa

SEQ ID NO: 528120 - DNA, 60 bp, Artificial
  Synthetic oligonucleotide
cccagagaaagacgaatgcatcgtcctgtttcggctcctcgcctacgctcagcgattata

SEQ ID NO: 528121 - DNA, 60 bp, Artificial
  Synthetic oligonucleotide
cccaggttaccgtgatgcgggattggcaggtctcgacatggtaattcctactgttgtata

SEQ ID NO: 528122 - DNA, 60 bp, Artificial
  Synthetic oligonucleotide
cccagttgggtggtcgagtgggacaacttgagacaggacttgcaggattacgcaatgacc

SEQ ID NO: 528123 - DNA, 60 bp, Artificial
  Synthetic oligonucleotide
cccatagccgggtctttacctgtgtcctccctgagtgccatcttattagaatcttgcatt

SEQ ID NO: 528124 - DNA, 60 bp, Artificial
  Synthetic oligonucleotide
cccatgcttggagtggtgaatttaggtgcaactttcatcatgatggtttgtgcgaagagc

SEQ ID NO: 528125 - DNA, 60 bp, Artificial
  Synthetic oligonucleotide
cccccagaccatcgtggcgcgggattggcagatcctggcatgatgattcccatcgctgtc

SEQ ID NO: 528126 - DNA, 60 bp, Artificial
  Synthetic oligonucleotide
cccccgaatgaccgtgagagtgtacttttgttaattttactttcagctttagcggatgca

SEQ ID NO: 528127 - DNA, 60 bp, Artificial
  Synthetic oligonucleotide
ccccgaccaaatataaaggatggtgtctggactgttgccaacacactgacttaacttatt

SEQ ID NO: 528128 - DNA, 60 bp, Artificial
  Synthetic oligonucleotide
cccctattctttctcataggtgacaatatgatctataaacacagacagtggtccatccca

SEQ ID NO: 528129 - DNA, 60 bp, Artificial
  Synthetic oligonucleotide
cccctctgggtggacaataccggctaacgcctccattagagtcgtgctaagcgattggat

SEQ ID NO: 528130 - DNA, 60 bp, Artificial
  Synthetic oligonucleotide
cccctttcggttaaacaggttggttgggaggttaccaacggtacaatctgtgatatcgag

SEQ ID NO: 528131 - DNA, 60 bp, Artificial
  Synthetic oligonucleotide
cccgaattttacattacaagtgattagaaattgcagtaatatgtcagttgaatggaataa

SEQ ID NO: 528132 - DNA, 60 bp, Artificial
  Synthetic oligonucleotide
cacgctctatcatgtttagattgttttgcttcgtctgctttggatatgcgccaaggaagg

SEQ ID NO: 528133 - DNA, 60 bp, Artificial
  Synthetic oligonucleotide
cacggctgaacgaaatcaggacgggatggatcaatgcgcaatttgatagtacgaagattc

SEQ ID NO: 528134 - DNA, 60 bp, Artificial
  Synthetic oligonucleotide
cactgcatatgctaattccacacaggaagagactttccttacatcaactctgtgtctgta

SEQ ID NO: 528135 - DNA, 60 bp, Artificial
  Synthetic oligonucleotide
cactgatatcgcttcattctcaattgatccacaactttattgtgattataatattgtact

SEQ ID NO: 528136 - DNA, 60 bp, Artificial
  Synthetic oligonucleotide
cactgagcagcgagagtacgcgaagagtcgggggatcagggaggttccaagtcggcattc

SEQ ID NO: 528137 - DNA, 60 bp, Artificial
  Synthetic oligonucleotide
cacggttacaataattaatactctcttgaagttggctggttataaagaacaggttactac

SEQ ID NO: 528138 - DNA, 60 bp, Artificial
  Synthetic oligonucleotide
cacggttatgagtttacgattgactccagtacgaagatacaaagtgttggtgggcgccat

SEQ ID NO: 528139 - DNA, 60 bp, Artificial
  Synthetic oligonucleotide
cacgtatttgggaacgatgagatgctaactaaattgctaaacgtttagccctagtgacat

SEQ ID NO: 528140 - DNA, 60 bp, Artificial
  Synthetic oligonucleotide
cactgaacaaaaggaatgagctcatagatgagtacgacttagaactttcagatgttgagt

SEQ ID NO: 528141 - DNA, 60 bp, Artificial
  Synthetic oligonucleotide
cacgtcattggcatgcacttggtggtgcgcaggaggcgacaggtaggacatttcgagagg

SEQ ID NO: 528142 - DNA, 60 bp, Artificial
  Synthetic oligonucleotide
cactcgatcatgacgggcgagtcctatggtgaatcggtaaaacaggcggtactgcttaat

SEQ ID NO: 528143 - DNA, 60 bp, Artificial
  Synthetic oligonucleotide
cagaaatttaatccatgattatgatagaacgtttttaatgtttaagggactattacggca

SEQ ID NO: 528144 - DNA, 60 bp, Artificial
  Synthetic oligonucleotide
cacgtgaaattgagcaggtggaattgctaaaacgcattcacgataaattgatgatacgaa

SEQ ID NO: 528145 - DNA, 60 bp, Artificial
  Synthetic oligonucleotide
cactatagatatgtcgaaagaatttaatcagaagaatgttagaacgctagatgaatggga

SEQ ID NO: 528146 - DNA, 60 bp, Artificial
  Synthetic oligonucleotide
cactagatatcactgctgatccaacaacagttccacaggttcaaagaatcatgcgagtaa

SEQ ID NO: 528147 - DNA, 60 bp, Artificial
  Synthetic oligonucleotide
cactacatttccagcgtagagcaatattaatggctctgaaatatgggatcaagattttgg

SEQ ID NO: 528148 - DNA, 60 bp, Artificial
  Synthetic oligonucleotide
cactaacgttataccaaatgttatcacaaattccccaggtattgcaacaataggactcaa

SEQ ID NO: 528149 - DNA, 60 bp, Artificial
  Synthetic oligonucleotide
cacttgacatgaaagtaccatgctcaggagtaatgacagccatatacttgcctgcaccgg

SEQ ID NO: 528150 - DNA, 60 bp, Artificial
  Synthetic oligonucleotide
cacttgcccttatactggatacaaaggaggaattttccaagtgatgtatttaccaattca

SEQ ID NO: 528151 - DNA, 60 bp, Artificial
  Synthetic oligonucleotide
cacttgctgctcactgtgctgatagaactcttcgtcgtgataacgtcaagaacattttga

SEQ ID NO: 528152 - DNA, 60 bp, Artificial
  Synthetic oligonucleotide
cacgcaattgtagtgaattatcttctgattggaacggagcatgtaaacttattaaagata

SEQ ID NO: 528153 - DNA, 60 bp, Artificial
  Synthetic oligonucleotide
cacttacgtacgccaaaaatacaaccagcgaccctagaggcaatcttggatacgccaaag

SEQ ID NO: 528154 - DNA, 60 bp, Artificial
  Synthetic oligonucleotide
cacttaatacacaaactctaggaattggatgtttgaccaccgatgtagcgacatttgaag

SEQ ID NO: 528155 - DNA, 60 bp, Artificial
  Synthetic oligonucleotide
cacgattaactcagtcctgcatgaacatgccagttgagccggatggtaattatgaccagc

SEQ ID NO: 528156 - DNA, 60 bp, Artificial
  Synthetic oligonucleotide
cactttgcacgggtgtgggttatgtggagggtgtgtcagttgcaagaaaaatgtatcttg

SEQ ID NO: 528157 - DNA, 60 bp, Artificial
  Synthetic oligonucleotide
cacgaacctaatcattttaccggtagcgtctaaaccacgctgatgtagccgcggataggg

SEQ ID NO: 528158 - DNA, 60 bp, Artificial
  Synthetic oligonucleotide
caccttagatgaggccggaccatcacgtacaccaaggaaactttctgttcagagcaatga

SEQ ID NO: 528159 - DNA, 59 bp, Artificial
  Synthetic oligonucleotide
atgctgtggatccagatgtaatcgacttcgttctttccaaaatggcaggtggtcatgct

SEQ ID NO: 528160 - DNA, 59 bp, Artificial
  Synthetic oligonucleotide
agcgaattacgaaaagttgagcccggatctgcatgagggtatggaagatcacacttatg

SEQ ID NO: 528161 - DNA, 59 bp, Artificial
  Synthetic oligonucleotide
ctgatgttattcgggctagaccacagagggccacagcagttggatatttctgacgctaa

SEQ ID NO: 528162 - DNA, 59 bp, Artificial
  Synthetic oligonucleotide
gttcactagtttcatctgttgaatggtatcttaaatcaatggaattgccagatgaagtc

SEQ ID NO: 528163 - DNA, 59 bp, Artificial
  Synthetic oligonucleotide
agcaccagtgagattttgtcaactgttcgcgaacggctttctgctttttggactactag

SEQ ID NO: 528164 - DNA, 59 bp, Artificial
  Synthetic oligonucleotide
ggactcatatgttcaaataccagatggtaatgttattaagaaaatacagtatggagccg

SEQ ID NO: 528165 - DNA, 59 bp, Artificial
  Synthetic oligonucleotide
gagaattttcgtttggctagcgattagctccttttaatgtatggtattgaatataccac

SEQ ID NO: 528166 - DNA, 59 bp, Artificial
  Synthetic oligonucleotide
agatacataagcaatagaatggaagatgttcctaaagcgaaggccatgttcacggcgcc

SEQ ID NO: 528167 - DNA, 59 bp, Artificial
  Synthetic oligonucleotide
tactcaagaaggaatatttctaacatctacattatgtttgtattatccaactgaagcaa

SEQ ID NO: 528168 - DNA, 59 bp, Artificial
  Synthetic oligonucleotide
gattcatccgacttggtgcccaacttcatgatgagagacccatcacatgcattcaatgg

SEQ ID NO: 528169 - DNA, 59 bp, Artificial
  Synthetic oligonucleotide
gactatatcaaccaaattatacaagttatgtccaaacggtcaagatcattagacacagc

SEQ ID NO: 528170 - DNA, 59 bp, Artificial
  Synthetic oligonucleotide
agaaattaatcaaaagaacgtaagaacgctagaagagtgggagagcggaaaaaatcctt

SEQ ID NO: 528171 - DNA, 59 bp, Artificial
  Synthetic oligonucleotide
tataagttggcggggaaaacgttacagagagtggtagaaagtgaagttggaagtgcagc

SEQ ID NO: 528172 - DNA, 59 bp, Artificial
  Synthetic oligonucleotide
ctattatcaacaaaatagcgaatcaaataaatggatatcaatgggaacggactgtacgg

SEQ ID NO: 528173 - DNA, 59 bp, Artificial
  Synthetic oligonucleotide
tatcatcacactcatagtgcaagatttggtgtgcttgacagtacaaaaatttctattca

SEQ ID NO: 528174 - DNA, 59 bp, Artificial
  Synthetic oligonucleotide
ggggcaaatatgcatgatatggatgatccccagaaggatgaaatgtgaactatgtggct

SEQ ID NO: 528175 - DNA, 59 bp, Artificial
  Synthetic oligonucleotide
ggtatctatcactcagttactccattccaaaagaaaattaatgacatgttgatggatgg

SEQ ID NO: 528176 - DNA, 59 bp, Artificial
  Synthetic oligonucleotide
caagtcgactctacgatttataaaaccatgcatggacattcattttcagatcaagtacc

SEQ ID NO: 528177 - DNA, 59 bp, Artificial
  Synthetic oligonucleotide
gaatccagaacccaagggttatgtcctgaatgttccggggccaggtgcttatagaatac

SEQ ID NO: 528178 - DNA, 59 bp, Artificial
  Synthetic oligonucleotide
gaaatgtgttgcatggaatcaatcgtagagcacaacatcataatgcgaatgaaagaaga

SEQ ID NO: 528179 - DNA, 59 bp, Artificial
  Synthetic oligonucleotide
gtatgtccactgaatgcgcagacgttaggaatcgggtgtctgactactgatacgagtac

SEQ ID NO: 528180 - DNA, 59 bp, Artificial
  Synthetic oligonucleotide
atgcattaccacatgcgctggtagttgatgattacgtaatcgcaattaagcgtaacccg

SEQ ID NO: 528181 - DNA, 59 bp, Artificial
  Synthetic oligonucleotide
gaattcaactctttatctcaagaaatagcgatgacacaattgattgatttggcattgtt

SEQ ID NO: 528182 - DNA, 59 bp, Artificial
  Synthetic oligonucleotide
gtgactataatatagttttgatgcgctataattcaagcttggaactagacatgtcagag

SEQ ID NO: 528183 - DNA, 59 bp, Artificial
  Synthetic oligonucleotide
caataacaggttctatggataccgcatatgcaaactctacacaacaagagaattttatg

SEQ ID NO: 528184 - DNA, 59 bp, Artificial
  Synthetic oligonucleotide
agtggctttgcaatccaatggacataacgttgtattactatcaacagacggacgaagcg

SEQ ID NO: 528185 - DNA, 59 bp, Artificial
  Synthetic oligonucleotide
catggaagatacactcctggtgtcattcctccagtaaatgtagatagaccaattccatt

SEQ ID NO: 528186 - DNA, 59 bp, Artificial
  Synthetic oligonucleotide
gtgtaaacgatttcagctttaatggaggttcattacctactgattttgtaatttcacgg

SEQ ID NO: 528187 - DNA, 59 bp, Artificial
  Synthetic oligonucleotide
gtgtaatcactttaatgaataacacattacatacaatactagaggatccaggaatggcg

SEQ ID NO: 528188 - DNA, 59 bp, Artificial
  Synthetic oligonucleotide
cattacacaaagcgtcaattccaacaatgaaaatagcattgaagacgtcaaaatgttcg

SEQ ID NO: 528189 - DNA, 59 bp, Artificial
  Synthetic oligonucleotide
gttaatggtcatggtcgaaaattcgttaaattgccaagctttggaaaactaggatttac

SEQ ID NO: 528190 - DNA, 59 bp, Artificial
  Synthetic oligonucleotide
catttacaattgataaattaagacgattatatacaggattaaagactgttgaatatgat

SEQ ID NO: 528191 - DNA, 59 bp, Artificial
  Synthetic oligonucleotide
gttacacctacatgttatctgacaatgtgtatgtggcaaatgttagtggtgtattgtca

SEQ ID NO: 528192 - DNA, 59 bp, Artificial
  Synthetic oligonucleotide
gttacatcatcctacaactgaaataaggtcagaattttacttgcttttggacatttggg

SEQ ID NO: 528193 - DNA, 59 bp, Artificial
  Synthetic oligonucleotide
gaggtgtatcaaccgggaagatggttcatgagagcagctcaagtggtcacgcctgtggt

SEQ ID NO: 528194 - DNA, 59 bp, Artificial
  Synthetic oligonucleotide
ggatagaattgtaaaagagatgagacgtcagctggagatgattgataaattaactactc

SEQ ID NO: 528195 - DNA, 59 bp, Artificial
  Synthetic oligonucleotide
cgttcacgtattcgctacgcagagtaatcattcagatagtatagtgagaggatgtgacc

SEQ ID NO: 528196 - DNA, 59 bp, Artificial
  Synthetic oligonucleotide
tccgattttcgtaaaaacacagctcagaggaaagtattcaaggctttgcagaaacaagt

SEQ ID NO: 528197 - DNA, 59 bp, Artificial
  Synthetic oligonucleotide
cctgagtttagacaagactatgacacaatttccatcactacaagcacacatatttaatg

SEQ ID NO: 528198 - DNA, 59 bp, Artificial
  Synthetic oligonucleotide
caccattgtattacgagagattgaatgcggatggaccatttatggatgaatctactgac

SEQ ID NO: 528199 - DNA, 59 bp, Artificial
  Synthetic oligonucleotide
cccgcacctgataatttaattgcacaagtttcggaaggaacacgtgataattttataca

SEQ ID NO: 528200 - DNA, 59 bp, Artificial
  Synthetic oligonucleotide
tcctcgagcttctgagctatactcggaacacagtgctgagttcaggtcgttgacctacg

SEQ ID NO: 528201 - DNA, 59 bp, Artificial
  Synthetic oligonucleotide
aacaggatcagtttattttaaagagtactcaaatattgttgatttttccgttgacccgc

SEQ ID NO: 528202 - DNA, 59 bp, Artificial
  Synthetic oligonucleotide
ttatccctctcgcgcaatgcctcaacgatccacacagacaggagcggcggacggaaacg

SEQ ID NO: 528203 - DNA, 59 bp, Artificial
  Synthetic oligonucleotide
cctacacccgagcggaccaaatccgggacatcgcccgtaacttttcctgggagtacaat

SEQ ID NO: 528204 - DNA, 59 bp, Artificial
  Synthetic oligonucleotide
acatgtctctatttctgcgtgacgcttgaaggcggaggaccactccagcttacacttac

SEQ ID NO: 528205 - DNA, 59 bp, Artificial
  Synthetic oligonucleotide
acatggcgacgaggagccagtgatgtgggttgcctacttccagtactcactacgtcagg

SEQ ID NO: 528206 - DNA, 59 bp, Artificial
  Synthetic oligonucleotide
cgtgaaattgaacaggttgagttacttaaacgtatacatgataagttagctactagacc

SEQ ID NO: 528207 - DNA, 59 bp, Artificial
  Synthetic oligonucleotide
cccttacttcttcgattgaatggtatttaagatcaatggaattagaccctgaaataaag

SEQ ID NO: 528208 - DNA, 59 bp, Artificial
  Synthetic oligonucleotide
acataaaagaacatggatagacctgctcgagaacatttaaaattcagtaaagcgaacac

SEQ ID NO: 528209 - DNA, 59 bp, Artificial
  Synthetic oligonucleotide
gagttaagaaatttcatgaaactaaagggttattcacatgtagatcgtcacatgcatcc

SEQ ID NO: 528210 - DNA, 59 bp, Artificial
  Synthetic oligonucleotide
gatggaaaatgttgacataagttttgcaaataagcgtcatcctttattgatatcgcacg

SEQ ID NO: 528211 - DNA, 59 bp, Artificial
  Synthetic oligonucleotide
ttaacaccagtaccgatggctgtggcggtgaatgtagggagaggctcgtttgacactga

SEQ ID NO: 528212 - DNA, 59 bp, Artificial
  Synthetic oligonucleotide
ccgttatgctggtgtcaaataacgttaaggatgtggcgcgtgcaacggcgtactttact

SEQ ID NO: 528213 - DNA, 59 bp, Artificial
  Synthetic oligonucleotide
cgtaattagagataattggatacgcgggaacttcaatcgtacgcatattaaatcgctcg

SEQ ID NO: 528214 - DNA, 59 bp, Artificial
  Synthetic oligonucleotide
acaacaatcgaaccagtacttgacggcccataccaacctactacgtttaatccaccggt

SEQ ID NO: 528215 - DNA, 59 bp, Artificial
  Synthetic oligonucleotide
ccgggagcggatacggatatgtatgagttaagaaatttcatgaaactaaagggttattc

SEQ ID NO: 528216 - DNA, 59 bp, Artificial
  Synthetic oligonucleotide
aaggtagtaaaatactgtattgtaacaatctttaatacgctattgaaattagcaggtta

SEQ ID NO: 528217 - DNA, 59 bp, Artificial
  Synthetic oligonucleotide
tggatgatccgagattcgatggatgtgcagcctctaaaagcgagcttagaatttccgtc

SEQ ID NO: 528218 - DNA, 59 bp, Artificial
  Synthetic oligonucleotide
tggatgagaagctatccgtgttgaacagcgcgtgtaagatgacactcaggtccctcctc

SEQ ID NO: 528219 - DNA, 59 bp, Artificial
  Synthetic oligonucleotide
ccttccctagcatggctaagttacgcggtgcaagccaacgcttcggtaacatccgatga

SEQ ID NO: 528220 - DNA, 59 bp, Artificial
  Synthetic oligonucleotide
aaacgataattcatggaaagatacgctttctcagctatttttgactaaagggtggccaa

SEQ ID NO: 528221 - DNA, 59 bp, Artificial
  Synthetic oligonucleotide
acgtagcggaaaagtttggtattaaactgactataaaggacgaatcagaagagttgttc

SEQ ID NO: 528222 - DNA, 59 bp, Artificial
  Synthetic oligonucleotide
tcactgtgtttcacaccatcatcggaacgaatcttttttcctgggatttgatctaggaa

SEQ ID NO: 528223 - DNA, 59 bp, Artificial
  Synthetic oligonucleotide
ctaacatccacattatgtttgtattatccaactgaagcaagtactcaaatcagtgatgg

SEQ ID NO: 528224 - DNA, 59 bp, Artificial
  Synthetic oligonucleotide
tcagcagagcagcgtacatacaggatatatgatgaggacgttgaattacttgtagataa

SEQ ID NO: 528225 - DNA, 59 bp, Artificial
  Synthetic oligonucleotide
cccgaagcgttaagtaccggaataattcgctacgagaataaagccaaaggaacccgaaa

SEQ ID NO: 528226 - DNA, 59 bp, Artificial
  Synthetic oligonucleotide
acgctatcggggaacaatcttgctatccggctgcccgggaatacgggactgaatatcca

SEQ ID NO: 528227 - DNA, 59 bp, Artificial
  Synthetic oligonucleotide
ccatggccgtttagtgaatcctttgctagcgaacgccattgtagctgcgtttttgtcaa

SEQ ID NO: 528228 - DNA, 59 bp, Artificial
  Synthetic oligonucleotide
ttggggatacagaatggaaagatacactgtctcagttattcttaactaaagggtggcca

SEQ ID NO: 528229 - DNA, 58 bp, Artificial
  Synthetic oligonucleotide
gctcaagatgggcgtcaagctagctgcgccaactgtatagatgcgcgacctatctgta

SEQ ID NO: 528230 - DNA, 58 bp, Artificial
  Synthetic oligonucleotide
gacttatgaaagataagattgaacgtggtgaggtagaagttgatgattcattcgttga

SEQ ID NO: 528231 - DNA, 58 bp, Artificial
  Synthetic oligonucleotide
ataggaactaatatggaaaattcagtttcaggtcacgtgtataatgcgcttatttatt

SEQ ID NO: 528232 - DNA, 58 bp, Artificial
  Synthetic oligonucleotide
gaacaggttgaattacttaaacgtatacatgataacctgatagctaaaccagttgacg

SEQ ID NO: 528233 - DNA, 58 bp, Artificial
  Synthetic oligonucleotide
gtacgttgagacctggcccaatatgatttctggtcgactcgctgactggttcatgtca

SEQ ID NO: 528234 - DNA, 58 bp, Artificial
  Synthetic oligonucleotide
atacgttgatgacgggtcgtctgtgacaggtattgagatgatcagtattgagaatccg

SEQ ID NO: 528235 - DNA, 58 bp, Artificial
  Synthetic oligonucleotide
tggttccgtagtgcgcaggaagccgacctacctaccacctcggaaattcaggccatgg

SEQ ID NO: 528236 - DNA, 58 bp, Artificial
  Synthetic oligonucleotide
attagtagtacaagacaacataaatgtagaaatgaatgtatgacacagtggtataatc

SEQ ID NO: 528237 - DNA, 58 bp, Artificial
  Synthetic oligonucleotide
tttctaggcttgggcccaggctgattggattgtcaatatacctttccaaggtagggaa

SEQ ID NO: 528238 - DNA, 58 bp, Artificial
  Synthetic oligonucleotide
cataattatcaggcgctcgcaaagaatgtggaagcggaacggtctgcgctcatagagg

SEQ ID NO: 528239 - DNA, 58 bp, Artificial
  Synthetic oligonucleotide
ccttgaacgacttgaattgtaaaatattcagcgttgacataacctctgaagaaatgac

SEQ ID NO: 528240 - DNA, 58 bp, Artificial
  Synthetic oligonucleotide
ggtcacgaccgctattcatatacatcgatggattagagggtgcggcatctggaatgac

SEQ ID NO: 528241 - DNA, 58 bp, Artificial
  Synthetic oligonucleotide
gcattaaatgtacataattgtagatggtgtcagataaacagccattacaaagtgtggg

SEQ ID NO: 528242 - DNA, 58 bp, Artificial
  Synthetic oligonucleotide
ttgatcacctctaaagggtccagggtaccttcttgacgtagtgcgattttacacttac

SEQ ID NO: 528243 - DNA, 58 bp, Artificial
  Synthetic oligonucleotide
cgagcattcgagactgacagagagttcatactaactaaaattattcaaatgacatctg

SEQ ID NO: 528244 - DNA, 58 bp, Artificial
  Synthetic oligonucleotide
atgatatcagcatggccttccgaggatccccacaaaagcgcgccagagacttgaagag

SEQ ID NO: 528245 - DNA, 58 bp, Artificial
  Synthetic oligonucleotide
ggcggaggtggagcacatgcaaacatcaatcttaccccgtattaagaaggcgatagag

SEQ ID NO: 528246 - DNA, 58 bp, Artificial
  Synthetic oligonucleotide
ggctataaaatggcttcgctcatttacagacagctactgtcaaactcgtatactgtag

SEQ ID NO: 528247 - DNA, 58 bp, Artificial
  Synthetic oligonucleotide
ggctataacaggatcattaagattatttccgtctgaacgagtactaacaacaaattcg

SEQ ID NO: 528248 - DNA, 58 bp, Artificial
  Synthetic oligonucleotide
cctaacagttttgttcatgttgcacaaagcatctattccaacaatgaaaattgcactg

SEQ ID NO: 528249 - DNA, 58 bp, Artificial
  Synthetic oligonucleotide
caagctccgacgattgaagttcccattcctcaaactgattggtctccaccaattggat

SEQ ID NO: 528250 - DNA, 58 bp, Artificial
  Synthetic oligonucleotide
gatcgcgaccaggaagtcagcagatccatggaataagcgcgtcgtattcggatatatt

SEQ ID NO: 528251 - DNA, 58 bp, Artificial
  Synthetic oligonucleotide
cacttatacctatgagtaaatatagcatattaccatcttcacgtaaccctctatgagc

SEQ ID NO: 528252 - DNA, 58 bp, Artificial
  Synthetic oligonucleotide
gatagcgtattcatatttcacgtgatctcacctcaccacctgaatgaatctttctttc

SEQ ID NO: 528253 - DNA, 58 bp, Artificial
  Synthetic oligonucleotide
ggggttacctttattatgctgtatgcacatatttaagtttcatccgggtttacaaatg

SEQ ID NO: 528254 - DNA, 58 bp, Artificial
  Synthetic oligonucleotide
ttaagcgcggaagtaattgagactgcgtcggaggaggtaccaatcttcggcgctgggg

SEQ ID NO: 528255 - DNA, 58 bp, Artificial
  Synthetic oligonucleotide
ctgatgtggtcgccaagacatgtgccggtgtcttggtggtgggtggcgcctaatcatc

SEQ ID NO: 528256 - DNA, 58 bp, Artificial
  Synthetic oligonucleotide
tccgtccgtccatgatagctgaggccactctacttgtcgagcgcgttctgtcacatga

SEQ ID NO: 528257 - DNA, 58 bp, Artificial
  Synthetic oligonucleotide
gattggaaatcaagatatgatcagttggaaagaagattcgagtcattgaaacagagag

SEQ ID NO: 528258 - DNA, 58 bp, Artificial
  Synthetic oligonucleotide
ctcttttatttgacaaatatgcggaacgctgcgtttatgcatgatgtatatcgagtag

SEQ ID NO: 528259 - DNA, 58 bp, Artificial
  Synthetic oligonucleotide
acgcacggacaaggatgctgacggaggagatgcaaagactagaagaggaggtggagat

SEQ ID NO: 528260 - DNA, 58 bp, Artificial
  Synthetic oligonucleotide
tactaaaacgcattcatgatagattgatggtgcggccgattgacgaaatagacatgac

SEQ ID NO: 528261 - DNA, 58 bp, Artificial
  Synthetic oligonucleotide
tagagatttgtcaaacctggaggactttcgagttgcatatactacgcctcttctattc

SEQ ID NO: 528262 - DNA, 58 bp, Artificial
  Synthetic oligonucleotide
tagaggcgatattggatgcaccaaggggggatattactgatttaatgttaactcaagg

SEQ ID NO: 528263 - DNA, 58 bp, Artificial
  Synthetic oligonucleotide
acggagagatgggaagagtggaagtttgagagtgtgagtgtaaccccaatggccacac

SEQ ID NO: 528264 - DNA, 58 bp, Artificial
  Synthetic oligonucleotide
tagctccactccacctaggcacggcttgtcgtgcgttacccggctcttcaagagcgga

SEQ ID NO: 528265 - DNA, 58 bp, Artificial
  Synthetic oligonucleotide
tagttccagatcaaacatttgatgagttacaacaaatgatcgataatatgaaacaagc

SEQ ID NO: 528266 - DNA, 58 bp, Artificial
  Synthetic oligonucleotide
ctcaacaatcaacttatcaacgtcaactcgattttaaagatagttttcgttcttggcc

SEQ ID NO: 528267 - DNA, 58 bp, Artificial
  Synthetic oligonucleotide
acgtgctgtttgaggtagtggatgtggcagatggactgcgtagcgtatctaggaagct

SEQ ID NO: 528268 - DNA, 58 bp, Artificial
  Synthetic oligonucleotide
tcaatggtttaagagtttgaatccaatgttgggtgtggtaaatttgggagctaccttc

SEQ ID NO: 528269 - DNA, 58 bp, Artificial
  Synthetic oligonucleotide
tatcacagcaagagacatttttaacttcaacgttatgtttatattaccctgctgaagc

SEQ ID NO: 528270 - DNA, 58 bp, Artificial
  Synthetic oligonucleotide
ccattcgatcttttaaggtttcaactttcttcactaatttccactccaacttcaatat

SEQ ID NO: 528271 - DNA, 58 bp, Artificial
  Synthetic oligonucleotide
ctaggttggtagacgtagtggttgcagtagagaggactcaaatcctacggagggcgag

SEQ ID NO: 528272 - DNA, 58 bp, Artificial
  Synthetic oligonucleotide
tatgcggaagcatttagagatgatctacgactgcgacagataaagaaacgtgtgaatg

SEQ ID NO: 528273 - DNA, 58 bp, Artificial
  Synthetic oligonucleotide
gatgtcccaattaaagcaacgaggacgatctactcgatcaacctatcagtgctggtac

SEQ ID NO: 528274 - DNA, 58 bp, Artificial
  Synthetic oligonucleotide
tatgttaacgttaagtatattagatgctaccacagaatccgttctatgtgattcccat

SEQ ID NO: 528275 - DNA, 58 bp, Artificial
  Synthetic oligonucleotide
gtcatgcaaaagtcgattcagtcagaccctaccccaatggcgctgcaaccactgttgt

SEQ ID NO: 528276 - DNA, 58 bp, Artificial
  Synthetic oligonucleotide
gcaagggatcagggaagcgatgactccttataggaatttacgttatgaagggtacacc

SEQ ID NO: 528277 - DNA, 58 bp, Artificial
  Synthetic oligonucleotide
gtgactacagaagctagtttgtcaattcaatataggaaatttatgcctacgttacctg

SEQ ID NO: 528278 - DNA, 58 bp, Artificial
  Synthetic oligonucleotide
cggatggaacggtacccgattggaacaatttaggcagtttcttagatatcatcttgaa

SEQ ID NO: 528279 - DNA, 58 bp, Artificial
  Synthetic oligonucleotide
agtggggaacgttctgacgtcaaatacggcaaaaaagatttatagtacaattgggaga

SEQ ID NO: 528280 - DNA, 58 bp, Artificial
  Synthetic oligonucleotide
acaaatggacagagttgttaaagaaatgagacgtcagttagagatgattgataaacta

SEQ ID NO: 528281 - DNA, 58 bp, Artificial
  Synthetic oligonucleotide
gtggaaagatactatatcgcaattgtttgtgacaaagggatggccaacaggttctgta

SEQ ID NO: 528282 - DNA, 58 bp, Artificial
  Synthetic oligonucleotide
acaacgtgttatagatcatggctggagcgagaaagatggcatatcaacgattatatca

SEQ ID NO: 528283 - DNA, 58 bp, Artificial
  Synthetic oligonucleotide
tgactggatcactgtcaagtgctgcttcatcaatttctaggaattcatctattagatc

SEQ ID NO: 528284 - DNA, 58 bp, Artificial
  Synthetic oligonucleotide
gtgtcactgtcgtggataacgcgtcatccattagtacgtcttcccaaattcaacttac

SEQ ID NO: 528285 - DNA, 58 bp, Artificial
  Synthetic oligonucleotide
agtcgtttattaattacgctaaattcaaatcccaacattttgtggactgcagttggtc

SEQ ID NO: 528286 - DNA, 58 bp, Artificial
  Synthetic oligonucleotide
gtgttttacatctcatctctctcaattatttaatcctatgcttactctggagttcgac

SEQ ID NO: 528287 - DNA, 58 bp, Artificial
  Synthetic oligonucleotide
ccgaatgactacatagtagcactatatgctttatccaatgatttcaactcaaggcaag

SEQ ID NO: 528288 - DNA, 58 bp, Artificial
  Synthetic oligonucleotide
aggtatcaaaaggaatggggatggtgcaaccatatactaagaatgactttgatagaag

SEQ ID NO: 528289 - DNA, 58 bp, Artificial
  Synthetic oligonucleotide
acagcgcgcgtttgactgcaaccagctcgcacataactccgcgcgaggaaatggcttc

SEQ ID NO: 528290 - DNA, 58 bp, Artificial
  Synthetic oligonucleotide
tctgggggctacctttctgatgatggtttgcgcaaaaagtgagagaagcttgaatcag

SEQ ID NO: 528291 - DNA, 58 bp, Artificial
  Synthetic oligonucleotide
aggactttcgagttgcatatactacgcctcttctattcgaaatgtgctgcatggaatc

SEQ ID NO: 528292 - DNA, 58 bp, Artificial
  Synthetic oligonucleotide
tcgatgcctactgttgcacttgaaatcttggacaaagcgatgtcaaacacaacgggtg

SEQ ID NO: 528293 - DNA, 58 bp, Artificial
  Synthetic oligonucleotide
ctgcgctgctttcggtataataaatttagccgcaacgatgattatgatgttcatggcg

SEQ ID NO: 528294 - DNA, 58 bp, Artificial
  Synthetic oligonucleotide
agcgtacaatcaatactaacgggccaatcatatggagaagcggtgaaacaagcggtcg

SEQ ID NO: 528295 - DNA, 58 bp, Artificial
  Synthetic oligonucleotide
gtttggacatctgttcaatcaaataagataaaagggtggtgtattgaatgttgtcagc

SEQ ID NO: 528296 - DNA, 58 bp, Artificial
  Synthetic oligonucleotide
taaagaagtagaggctggcgttagctggaatttgagtcatcaaggtgaagagacggcg

SEQ ID NO: 528297 - DNA, 58 bp, Artificial
  Synthetic oligonucleotide
gctactgaggtacacaattgcaagtggtgttcagttaataacagttatactgtatgga

SEQ ID NO: 528298 - DNA, 58 bp, Artificial
  Synthetic oligonucleotide
gcatttcgaagaagtgatgaatcgcataactgaaaggaacgatgcacatgcggcatat

SEQ ID NO: 528299 - DNA, 58 bp, Artificial
  Synthetic oligonucleotide
cactttggaaagagatgcaatgcaatagagacatcacaattcgatttaaattcgcaag

SEQ ID NO: 528300 - DNA, 57 bp, Artificial
  Synthetic oligonucleotide
tgttgcgctggagtctattgctgatcactatgatgaaatcagtcaacgcatggtcgc

SEQ ID NO: 528301 - DNA, 57 bp, Artificial
  Synthetic oligonucleotide
cgtacctttatatctcatagacgaaatgcaaaagaaatatgaactacagagcgttgg

SEQ ID NO: 528302 - DNA, 57 bp, Artificial
  Synthetic oligonucleotide
ggaaaaggagagcctggcgttctgacttttctgtcggagcagtatgttggtgatgac

SEQ ID NO: 528303 - DNA, 57 bp, Artificial
  Synthetic oligonucleotide
accttctcgccgtagtggtgcgaacgggagcagtgggtgccatgaagttaaactttc

SEQ ID NO: 528304 - DNA, 57 bp, Artificial
  Synthetic oligonucleotide
tgtggagtatccttactgggtgaaataaatgttcccgaatttttgcgttacgcgtga

SEQ ID NO: 528305 - DNA, 57 bp, Artificial
  Synthetic oligonucleotide
tgcgcgggcggcggcaaaaagatcaaacatcatggcttatacatcggaagagggtga

SEQ ID NO: 528306 - DNA, 57 bp, Artificial
  Synthetic oligonucleotide
atgcggactctagcacgcgcattacagcgggaaacaacagagagaacggagatagag

SEQ ID NO: 528307 - DNA, 57 bp, Artificial
  Synthetic oligonucleotide
gcgcagagaatagtttacgatgaggagctgcaaatgcatattttaaggggacctttg

SEQ ID NO: 528308 - DNA, 57 bp, Artificial
  Synthetic oligonucleotide
ctgggagttccaccagttgatgcaggtacatatgttggatcaaggatatactcacaa

SEQ ID NO: 528309 - DNA, 57 bp, Artificial
  Synthetic oligonucleotide
ctatagtaagtacagcatcaacttctcactttcaatgtaatgattttggcagtcctg

SEQ ID NO: 528310 - DNA, 57 bp, Artificial
  Synthetic oligonucleotide
aaaggggatcggaaacatggaaggaatagccgagatagctcttcaaaaaaggaggat

SEQ ID NO: 528311 - DNA, 57 bp, Artificial
  Synthetic oligonucleotide
gagtagtgaaagaaatgagacgtcaattggaaatgattgataaactaacgacacgtg

SEQ ID NO: 528312 - DNA, 57 bp, Artificial
  Synthetic oligonucleotide
acacttgtcattaatgcagagaaggttccccgatgttctaattcaagcgagaccatc

SEQ ID NO: 528313 - DNA, 57 bp, Artificial
  Synthetic oligonucleotide
gtcggcattcatggacggaaattagtttggtgcaccggacggtgtcgaagttaagcg

SEQ ID NO: 528314 - DNA, 57 bp, Artificial
  Synthetic oligonucleotide
gcagcattttactatagagtatagacgcaatgaaagttagaactgtatgatgtgacc

SEQ ID NO: 528315 - DNA, 57 bp, Artificial
  Synthetic oligonucleotide
tcacaaggtggtcggtgctcgcttacgcctattcggtccgtctaaattatatacctt

SEQ ID NO: 528316 - DNA, 57 bp, Artificial
  Synthetic oligonucleotide
ggcaataacggacgttgttgatggagtaaactataaaataaacgtcactactacaac

SEQ ID NO: 528317 - DNA, 57 bp, Artificial
  Synthetic oligonucleotide
gaaggaattgcctctttaatggaatgtgtgcaaaacaacatttcgaaagggcgatga

SEQ ID NO: 528318 - DNA, 57 bp, Artificial
  Synthetic oligonucleotide
tcaattattatcgtatggtgatgttacaaggttcctatctagcaattcaatggtatt

SEQ ID NO: 528319 - DNA, 57 bp, Artificial
  Synthetic oligonucleotide
aaagaaatttgcggaatcgaggataaaactatacaccctaaagttatgatgaaattt

SEQ ID NO: 528320 - DNA, 57 bp, Artificial
  Synthetic oligonucleotide
agtgacttgggctaactcggctatagagatgcttatgtcagtattttctcatgaaga

SEQ ID NO: 528321 - DNA, 57 bp, Artificial
  Synthetic oligonucleotide
caacctcagctcttgagaatatgggaatagaatatgattatcaggatatatattcta

SEQ ID NO: 528322 - DNA, 57 bp, Artificial
  Synthetic oligonucleotide
gtagctatactccaggagtaataccaccagtaaatgttgaaaaaccaataccattag

SEQ ID NO: 528323 - DNA, 57 bp, Artificial
  Synthetic oligonucleotide
caatagttgactatgtaaatcaaattgtgcaagcgatgtccaaaagatcgagatcac

SEQ ID NO: 528324 - DNA, 57 bp, Artificial
  Synthetic oligonucleotide
agggtatgagtggggcgcaacaaatcaccgattaggactatgcgaaatagaacacgt

SEQ ID NO: 528325 - DNA, 57 bp, Artificial
  Synthetic oligonucleotide
aggtgacccgtataaaaccttgcgacggaagtttaattggagtgtacgccatgcggc

SEQ ID NO: 528326 - DNA, 57 bp, Artificial
  Synthetic oligonucleotide
gccgatttgatacttaatgaatggctttgtaacccaatggacataacattgtactac

SEQ ID NO: 528327 - DNA, 57 bp, Artificial
  Synthetic oligonucleotide
catcattcaaaatcgtactgatgaattgctcgaccgttacattagcttaagttatcg

SEQ ID NO: 528328 - DNA, 57 bp, Artificial
  Synthetic oligonucleotide
cagatagtgacatgtccctatactggttatagaggcagggttcttcagattatgttc

SEQ ID NO: 528329 - DNA, 57 bp, Artificial
  Synthetic oligonucleotide
cagttattaatacccttttgaagttggctggttataaagaacaggttactactaagg

SEQ ID NO: 528330 - DNA, 57 bp, Artificial
  Synthetic oligonucleotide
ggggtgaagcatatagtcgattcatttcaagcctagtacaagttagaatacaaggac

SEQ ID NO: 528331 - DNA, 57 bp, Artificial
  Synthetic oligonucleotide
aacgaatggaacatgttggtaacggaaatattcaaccaattagatccaataaagtta

SEQ ID NO: 528332 - DNA, 57 bp, Artificial
  Synthetic oligonucleotide
ggagaagaattggaactttttcaaacgcggcgggtaacgcacaagatacgccacagg

SEQ ID NO: 528333 - DNA, 57 bp, Artificial
  Synthetic oligonucleotide
ttcctgtttctgcacttaaaactattcatgtatttgagaaagaactaagcgctttag

SEQ ID NO: 528334 - DNA, 57 bp, Artificial
  Synthetic oligonucleotide
ttaattactgacagtggagttagatctgaagtccctattgttaaagaatctccaggt

SEQ ID NO: 528335 - DNA, 57 bp, Artificial
  Synthetic oligonucleotide
agaagggtcatcagctaccggagattatgaacagactgcgtttattcttcactgacg

SEQ ID NO: 528336 - DNA, 57 bp, Artificial
  Synthetic oligonucleotide
agagaaaggtaggacatgagttggaagccgaacctcataattttcgacgcgcgcgca

SEQ ID NO: 528337 - DNA, 57 bp, Artificial
  Synthetic oligonucleotide
cctccaatacaaaataccagaaacgtagtcccagtgtctatttcatctcgtaatata

SEQ ID NO: 528338 - DNA, 57 bp, Artificial
  Synthetic oligonucleotide
ggtactaatgataacagtgtgcgatgtattaaagcgagctatatgggcaaacgatag

SEQ ID NO: 528339 - DNA, 57 bp, Artificial
  Synthetic oligonucleotide
gatggggctgcgtaatcaggtccagcgtcgtcctcgcaccattatgcctatgaacgt

SEQ ID NO: 528340 - DNA, 57 bp, Artificial
  Synthetic oligonucleotide
catccgcaactgaattggcaggcaaatgtgaccgttaatctgatgaaggtcgatgat

SEQ ID NO: 528341 - DNA, 57 bp, Artificial
  Synthetic oligonucleotide
gacaggatggtacaatagaactatgcaacaagcacccatcgtactgactcctgctgc

SEQ ID NO: 528342 - DNA, 57 bp, Artificial
  Synthetic oligonucleotide
ggggaaaagagtgtctcaattcgacattggacaatataagaacatgatgaacgttat

SEQ ID NO: 528343 - DNA, 57 bp, Artificial
  Synthetic oligonucleotide
cctcttgagtggtgatcctaggatgactcaattagcgattcagtaccaacagtacaa

SEQ ID NO: 528344 - DNA, 57 bp, Artificial; identical to SEQ ID NO: 443838
  Synthetic oligonucleotide

SEQ ID NO: 528345 - DNA, 57 bp, Artificial
  Synthetic oligonucleotide
gagccaaagggctacgtgttgagtattccgggaccaggagcgtatcggatattggat

SEQ ID NO: 528346 - DNA, 57 bp, Artificial
  Synthetic oligonucleotide
ggatatagatcattggtatgatgtttttatgaaaaccttggtttttaagagtatgag

SEQ ID NO: 528347 - DNA, 57 bp, Artificial
  Synthetic oligonucleotide
tgtttacagtttcagagatcacacatggcatggattaaggacagcgattctgaatcg

SEQ ID NO: 528348 - DNA, 57 bp, Artificial
  Synthetic oligonucleotide
atgattagatcgcgagcggtacacccaatctttttaggatcgatgcactacgacatt

SEQ ID NO: 528349 - DNA, 57 bp, Artificial
  Synthetic oligonucleotide
tctgttatggatatgctccccgcgcggatggaacggtacctgattggaacaatttag

SEQ ID NO: 528350 - DNA, 57 bp, Artificial
  Synthetic oligonucleotide
caggtcgaactacttaaacgtatacatgataaattaatgactagaccagttgacgtc

SEQ ID NO: 528351 - DNA, 57 bp, Artificial
  Synthetic oligonucleotide
gctctactagccacttttactgtctaggcgtagggtcgtacgctgcctgagtccagc

SEQ ID NO: 528352 - DNA, 57 bp, Artificial
  Synthetic oligonucleotide
ctactgggatgattcacaagcatttaggaatatggtatatgttagatcattagcagc

SEQ ID NO: 528353 - DNA, 57 bp, Artificial
  Synthetic oligonucleotide
caaattcgcacgggtggattcttttcgtgcctggccatgttgagaccgctccagtat

SEQ ID NO: 528354 - DNA, 57 bp, Artificial
  Synthetic oligonucleotide
actacagagttgtcaagtattcgtcagttgcgaatcatgcagatagagtttatgcta

SEQ ID NO: 528355 - DNA, 57 bp, Artificial
  Synthetic oligonucleotide
accactaacactacagttggagtgccactggcattagatgctagggctattactgtg

SEQ ID NO: 528356 - DNA, 57 bp, Artificial
  Synthetic oligonucleotide
gtttaactaatccggtcagcaccggacgttaatggaaggaacggtcttaatgtgacc

SEQ ID NO: 528357 - DNA, 57 bp, Artificial
  Synthetic oligonucleotide
tggctcaatggacacaccatatatgaactcaacacgagaggaagtattcctaacttc

SEQ ID NO: 528358 - DNA, 57 bp, Artificial
  Synthetic oligonucleotide
ctttacataaggcgtcaattccaacaatgaaaatagcattgaggacatcgaaatgtt

SEQ ID NO: 528359 - DNA, 57 bp, Artificial
  Synthetic oligonucleotide
gattgttgacatcagcctaaaggggtatgatatcagaaagtccgttatagaagcctc

SEQ ID NO: 528360 - DNA, 57 bp, Artificial
  Synthetic oligonucleotide
tcaaaatgcacataggctcccacctatgtgacggttagcgggactcgcctattcatc

SEQ ID NO: 528361 - DNA, 57 bp, Artificial
  Synthetic oligonucleotide
cgtgacgcaagagattcaaaatattcgatcggagaacaagggggcaggtccgacctt

SEQ ID NO: 528362 - DNA, 57 bp, Artificial
  Synthetic oligonucleotide
cgctggaatgacagcagacgtgctagaggcggcatcagaagaagtgcctttgatagg

SEQ ID NO: 528363 - DNA, 57 bp, Artificial
  Synthetic oligonucleotide
taaatgatgcgaatccccggttacatagagtgtatgggatgccagaagctcctccgc

SEQ ID NO: 528364 - DNA, 57 bp, Artificial
  Synthetic oligonucleotide
tcaaaaacactagaagttcaagaacagcaacgttcatgggccgacgtagttgaaaga

SEQ ID NO: 528365 - DNA, 57 bp, Artificial
  Synthetic oligonucleotide
acatgttttcaatgttctcagggattaaaagtacgctagaagctacaaaatcgatgg

SEQ ID NO: 528366 - DNA, 57 bp, Artificial
  Synthetic oligonucleotide
ctacatattgtccgcgagaacggactgtacgcagaaagcgaagaaccgcgagcggac

SEQ ID NO: 528367 - DNA, 57 bp, Artificial
  Synthetic oligonucleotide
accattaatccaggtccattcgcacaaacaggatatgctccagttaattggggtccc

SEQ ID NO: 528368 - DNA, 57 bp, Artificial
  Synthetic oligonucleotide
agctttcattagtagtgtggatgattacacgatgaatgtgtttctcctaagcctgtg

SEQ ID NO: 528369 - DNA, 57 bp, Artificial
  Synthetic oligonucleotide
tcaatatggtagatgtttccttgataatgaaccacatttattaaggatgagaacttt

SEQ ID NO: 528370 - DNA, 57 bp, Artificial
  Synthetic oligonucleotide
cgcgtgtgactggagagacctcgacctggggaccagctcgccagccgtatggattct

SEQ ID NO: 528371 - DNA, 57 bp, Artificial; identical to SEQ ID NO: 363173
  Synthetic oligonucleotide

SEQ ID NO: 528372 - DNA, 57 bp, Artificial
  Synthetic oligonucleotide
actgatgcacaggtacacacagtggtacagagggatgtgtgtaaattagtcgagtgg

SEQ ID NO: 528373 - DNA, 57 bp, Artificial
  Synthetic oligonucleotide
cagataaaataagagttatacccgctgaggtgggtgcttattataatcgctttggat

SEQ ID NO: 528374 - DNA, 57 bp, Artificial
  Synthetic oligonucleotide
tcttgcctcctttgacggtgtctgaagtgagtggcgctagaactctgagcttgggtt

SEQ ID NO: 528375 - DNA, 57 bp, Artificial
  Synthetic oligonucleotide
ctggaatggcgtattttccatatattgcttctgtactaactgtattgtttactctac

SEQ ID NO: 528376 - DNA, 56 bp, Artificial; identical to SEQ ID NO: 12666
  Synthetic oligonucleotide

SEQ ID NO: 528377 - DNA, 56 bp, Artificial
  Synthetic oligonucleotide
gcgacgagcgatggctcatatggtcttgatcattgcagctgtggtagcgttgataa

SEQ ID NO: 528378 - DNA, 56 bp, Artificial
  Synthetic oligonucleotide
aatcaaccgcgacctcgtatccgccttctcactgcctgatgaccgcttctttgcat

SEQ ID NO: 528379 - DNA, 56 bp, Artificial
  Synthetic oligonucleotide
gaggtgaacacttacctcttttgcacgtggcaacttgatgacgctcagagtagtag

SEQ ID NO: 528380 - DNA, 56 bp, Artificial
  Synthetic oligonucleotide
atggagaatctgttaaacaagcagttcttcttaatgtgttaggtacaggtgaagag

SEQ ID NO: 528381 - DNA, 56 bp, Artificial
  Synthetic oligonucleotide
aagtggtattacctgactattacggcaaatggataatcgcgccgatgtttaactct

SEQ ID NO: 528382 - DNA, 56 bp, Artificial
  Synthetic oligonucleotide
agttatttcaatcagctgaagaatatactgattcattaatggatcccgcaatacta

SEQ ID NO: 528383 - DNA, 56 bp, Artificial
  Synthetic oligonucleotide
aattaatagatacaatggcttaacactcaggtcagtaacaatgcgacctacttcac

SEQ ID NO: 528384 - DNA, 56 bp, Artificial
  Synthetic oligonucleotide
ggctttaaaaatctcattcacaatggatgtacttttttctatagcgaaaactgtgt

SEQ ID NO: 528385 - DNA, 56 bp, Artificial
  Synthetic oligonucleotide
gtgagaacgtacttcaatttatcgatgctcaaccaaattcacaacttctgatcaac

SEQ ID NO: 528386 - DNA, 56 bp, Artificial
  Synthetic oligonucleotide
tcaattacatggattccaaataagacgaatggtgactgaattctgtgataggttaa

SEQ ID NO: 528387 - DNA, 56 bp, Artificial
  Synthetic oligonucleotide
cgcagcgcggaggtgccagcgttagaggcgcggtacctgcgatgggaataggttac

SEQ ID NO: 528388 - DNA, 56 bp, Artificial
  Synthetic oligonucleotide
gtcagttgccgtcatttgggtatgtggatgatggatcgtccgtgacggggattgag

SEQ ID NO: 528389 - DNA, 56 bp, Artificial
  Synthetic oligonucleotide
cggagagagtcagattagatgattcactttctgctattccctatatctatgtcccc

SEQ ID NO: 528390 - DNA, 56 bp, Artificial
  Synthetic oligonucleotide
gcccatcggagggttttgagtgtagacgtgagaaccgctgaggagacggggtcgca

SEQ ID NO: 528391 - DNA, 56 bp, Artificial
  Synthetic oligonucleotide
gcaagttgaactacttaaacgtattcatgataaactgatggtgagatcaactgacg

SEQ ID NO: 528392 - DNA, 56 bp, Artificial
  Synthetic oligonucleotide
tgtataatcacaattattaatactcttttaaaattggcgggatataaagaacaagt

SEQ ID NO: 528393 - DNA, 56 bp, Artificial
  Synthetic oligonucleotide
tagagaagggaagctggcggcgttaagtgaggtgaaggcggaactcattgagtgga

SEQ ID NO: 528394 - DNA, 56 bp, Artificial; identical to SEQ ID NO: 471369
  Synthetic oligonucleotide

SEQ ID NO: 528395 - DNA, 56 bp, Artificial
  Synthetic oligonucleotide
ctagcatttatgaggtgatgaagaagtcaacaatagccacagtatgggtgggtcgc

SEQ ID NO: 528396 - DNA, 56 bp, Artificial
  Synthetic oligonucleotide
tggcagactaggtcgatgtagattctagtgaagtgtgcgaaaattcagctaatgtc

SEQ ID NO: 528397 - DNA, 56 bp, Artificial; identical to SEQ ID NO: 477854
  Synthetic oligonucleotide

SEQ ID NO: 528398 - DNA, 56 bp, Artificial
  Synthetic oligonucleotide
gtggatgcgtaacgttagctacatcgatggttgggggattgagtatcgttgacgac

SEQ ID NO: 528399 - DNA, 56 bp, Artificial
  Synthetic oligonucleotide
gcgggttgtacattggacgcaagagctaactatggagtcgcagacgacttgggacg

SEQ ID NO: 528400 - DNA, 56 bp, Artificial
  Synthetic oligonucleotide
ttatacgagtatgggacgtctcctgtggagtggctatttgggaatcaccgagtcca

SEQ ID NO: 528401 - DNA, 56 bp, Artificial; identical to SEQ ID NO: 337636
  Synthetic oligonucleotide

SEQ ID NO: 528402 - DNA, 56 bp, Artificial
  Synthetic oligonucleotide
aactatcatcgctacaacactagaacatcggtttaaagagataccggacgaacagt

SEQ ID NO: 528403 - DNA, 56 bp, Artificial
  Synthetic oligonucleotide
tgttcaaaaatttgctgacttagtcacagattcaccagttatatcggcgattatag

SEQ ID NO: 528404 - DNA, 56 bp, Artificial
  Synthetic oligonucleotide
cggccctaacgatgtttccagacatgactaaatttggtgatctccagtacccgatt

SEQ ID NO: 528405 - DNA, 56 bp, Artificial
  Synthetic oligonucleotide
gagtgcatccgatatatatggggaatatgcattacgacattagttatgaacagatg

SEQ ID NO: 528406 - DNA, 56 bp, Artificial
  Synthetic oligonucleotide
gtgtgcccattaaatacacagactttaggaataggttgtactactacaaacaaagc

SEQ ID NO: 528407 - DNA, 56 bp, Artificial
  Synthetic oligonucleotide
tatgttactggagcccttgcttagtggtgatcctcgtatgtctcaactagccatac

SEQ ID NO: 528408 - DNA, 56 bp, Artificial
  Synthetic oligonucleotide
gataaaaccgtttgtgactaataacgtagagttattctttgtagctttcggtgtgc

SEQ ID NO: 528409 - DNA, 56 bp, Artificial
  Synthetic oligonucleotide
tggaagatccagtgaggtgaactgggggtgcaacccaaggggggtttcgatgttgt

SEQ ID NO: 528410 - DNA, 56 bp, Artificial
  Synthetic oligonucleotide
aactgtccctttgaattagcaaaaatccaaattgaatccgtgaaaccaattatgca

SEQ ID NO: 528411 - DNA, 56 bp, Artificial
  Synthetic oligonucleotide
tatggtcttctccgatgcaggaatctataccatgcaagctctagtcgggtctaacg

SEQ ID NO: 528412 - DNA, 56 bp, Artificial
  Synthetic oligonucleotide
ggattgttaaacggcatagtttcagaattattatgtgacttgaactcagagacagc

SEQ ID NO: 528413 - DNA, 56 bp, Artificial
  Synthetic oligonucleotide
acgtatggggcacggactatttctatagggttgtcggcaggtggtacacctcagta

SEQ ID NO: 528414 - DNA, 56 bp, Artificial
  Synthetic oligonucleotide
tatagtatttcaaccagatgtagaatatttacgcagcataaacttaaaatagcatc

SEQ ID NO: 528415 - DNA, 56 bp, Artificial
  Synthetic oligonucleotide
gaatttcatgctaactaaaataaaagaacgcatgactacatccttaccgatagcgc

SEQ ID NO: 528416 - DNA, 56 bp, Artificial
  Synthetic oligonucleotide
atgcaaatgagttgtcgcggtcgggtaacgttgacaacgagggtggtgataatcag

SEQ ID NO: 528417 - DNA, 56 bp, Artificial
  Synthetic oligonucleotide
gtcgtgatgacccggagtctgtccaacgatttgttagggcgctcgaatcgtactta

SEQ ID NO: 528418 - DNA, 56 bp, Artificial
  Synthetic oligonucleotide
gagttcaacttgttagaccaacgaataatatggcagaattggtatgcatttacgtc

SEQ ID NO: 528419 - DNA, 56 bp, Artificial
  Synthetic oligonucleotide
gctaaacttgtctcatcaccaatgtcaattctagttgcactagttgacataaatgg

SEQ ID NO: 528420 - DNA, 56 bp, Artificial
  Synthetic oligonucleotide
aacgtttgagcctagggcgtcaggacgcgggaaggtgtcagtgtcaatacagcgcg

SEQ ID NO: 528421 - DNA, 56 bp, Artificial
  Synthetic oligonucleotide
ctacacatcgtcgggccctaccataccgggcaggcgttcgttatgtgcgtagacct

SEQ ID NO: 528422 - DNA, 56 bp, Artificial
  Synthetic oligonucleotide
gaataaccagagaacaagctttcaatttattaagatcagatcctagggtattacgg

SEQ ID NO: 528423 - DNA, 56 bp, Artificial
  Synthetic oligonucleotide
gagatgggagtggcttctagactatatggatagaaagcacacgtgtcaactatgct

SEQ ID NO: 528424 - DNA, 56 bp, Artificial
  Synthetic oligonucleotide
gatgtacaactacaaatacggcgacatttgaagaagtggcagcgagcgagaaatta

SEQ ID NO: 528425 - DNA, 56 bp, Artificial
  Synthetic oligonucleotide
ctacaagatgcaagaatagtgttagaagcaaatgttatggaaatactggggatagc

SEQ ID NO: 528426 - DNA, 56 bp, Artificial
  Synthetic oligonucleotide
ggcaagtattttacactatagtcgattatgtgaaccaaattgtacaagcgatgtcc

SEQ ID NO: 528427 - DNA, 56 bp, Artificial
  Synthetic oligonucleotide
ggcaaggaaagtaaacgaaaacatgaactctcttcagaatgttatttcacagcaac

SEQ ID NO: 528428 - DNA, 56 bp, Artificial
  Synthetic oligonucleotide
gatgcatatattaagaggcccattacattttcagcggcgtgcgatattgggtgcgc

SEQ ID NO: 528429 - DNA, 56 bp, Artificial
  Synthetic oligonucleotide
cttatcaacgcgctcaagtcaatgaggatattatcatatctaagacatcattatgg

SEQ ID NO: 528430 - DNA, 56 bp, Artificial
  Synthetic oligonucleotide
agttgcgagaagattagttgaggagtatcatggagaggatgttggacgattgttga

SEQ ID NO: 528431 - DNA, 56 bp, Artificial
  Synthetic oligonucleotide
aggagacgaaagcttaaacgatctgtggttggagaatggaaagtacgcgacggacg

SEQ ID NO: 528432 - DNA, 56 bp, Artificial
  Synthetic oligonucleotide
atcagagaactactcgatgatggtttatacgtgcagatcggaaccgcgcttcggcc

SEQ ID NO: 528433 - DNA, 56 bp, Artificial
  Synthetic oligonucleotide
ttgggattcctcaaggattattgaatcattataaaaatttggttaacgcttttgtc

SEQ ID NO: 528434 - DNA, 56 bp, Artificial
  Synthetic oligonucleotide
attaaggaaggtgcagtttatagggatagaaagttcgattcaaacgacgaagatgg

SEQ ID NO: 528435 - DNA, 56 bp, Artificial
  Synthetic oligonucleotide
gctttcacgtaagaagagttacgattacctcaccaggaacggaagatccttgggtg

SEQ ID NO: 528436 - DNA, 56 bp, Artificial
  Synthetic oligonucleotide
aaatcattgcgtattactccctcccttctatcagccactcctatcgattcagtcga

SEQ ID NO: 528437 - DNA, 56 bp, Artificial
  Synthetic oligonucleotide
ggtatcttcatgttgggtcgcgttttattgaggtgggagctaactaaggcgcagcg

SEQ ID NO: 528438 - DNA, 56 bp, Artificial
  Synthetic oligonucleotide
ggtatagcatggtatctctcgccgttgatgtcttcggctatccctcctcttatggc

SEQ ID NO: 528439 - DNA, 56 bp, Artificial
  Synthetic oligonucleotide
cctctgagttatttcaatcagctgaagaatatactgattcattaatggatcctgcc

SEQ ID NO: 528440 - DNA, 56 bp, Artificial
  Synthetic oligonucleotide
ctcgacgtatgattcgatctaaaacggtgcacccaatttacttgggatctatgcac

SEQ ID NO: 528441 - DNA, 56 bp, Artificial
  Synthetic oligonucleotide
gagccaagagaagtgactgcagcaatgtaagaggttgagctgccgtcgactgtctt

SEQ ID NO: 528442 - DNA, 56 bp, Artificial
  Synthetic oligonucleotide
ttctacgagctttagttaaatcaaatgttaatattggacattgttcatcacaggaa

SEQ ID NO: 528443 - DNA, 56 bp, Artificial
  Synthetic oligonucleotide
ggtacaatgatgatagcccgatttatagaggcattatgttatatgctactgagaag

SEQ ID NO: 528444 - DNA, 56 bp, Artificial
  Synthetic oligonucleotide
gaaattgaacaggtagagttactgagacgtatttatgataaactgttagtgcagcc

SEQ ID NO: 528445 - DNA, 56 bp, Artificial
  Synthetic oligonucleotide
tcgtccccattgtaccagcgcaggtcccccaagacgtacttgcatatacgttcttc

SEQ ID NO: 528446 - DNA, 56 bp, Artificial
  Synthetic oligonucleotide
catagaatgaccgctaatcattataagactttgatggctgctaattatcccaacag

SEQ ID NO: 528447 - DNA, 56 bp, Artificial
  Synthetic oligonucleotide
atattggatgcaccaaggggggatattactgatttaatgttaactcaagggctgga

SEQ ID NO: 528448 - DNA, 56 bp, Artificial
  Synthetic oligonucleotide
gcacataatcctagcgtgttcgacttgcatcataactcaggtatcattttagaatt

SEQ ID NO: 528449 - DNA, 56 bp, Artificial
  Synthetic oligonucleotide
ccaagaggcgtgctacgtgtttaagccgacgtatgatttaatagtgattggtgaaa

SEQ ID NO: 528450 - DNA, 56 bp, Artificial
  Synthetic oligonucleotide
cgtcgttccggccctactcgtccactttcaggtgcccgtcttgaaatcaggaatgg

SEQ ID NO: 528451 - DNA, 56 bp, Artificial
  Synthetic oligonucleotide
ggttcaatggatacagcatatgctaattcaacccaagaagaaaatttccttgtgtc

SEQ ID NO: 528452 - DNA, 56 bp, Artificial
  Synthetic oligonucleotide
tttagaaccatcaccgacggtctggtccccgtaatagactggctggagcccaggtc

SEQ ID NO: 528453 - DNA, 56 bp, Artificial; identical to SEQ ID NO: 310191
  Synthetic oligonucleotide

SEQ ID NO: 528454 - DNA, 56 bp, Artificial
  Synthetic oligonucleotide
cgaattcctttcaaaggtaaaataccagctgtgacgttcatattgcatctttatgc

SEQ ID NO: 528455 - DNA, 56 bp, Artificial
  Synthetic oligonucleotide
ctgctgatgtatcttaacgtaggtactagcgctgattatatccagccaatcctatc

SEQ ID NO: 528456 - DNA, 56 bp, Artificial
  Synthetic oligonucleotide
ggtgtttgatatgtctgagtgagctagaaacttaacacactagtcgtgatatgacc

SEQ ID NO: 528457 - DNA, 56 bp, Artificial
  Synthetic oligonucleotide
ccaacggaaatatcgcgagatgatccaacgtataatcgacaacgaatggcaagaga

SEQ ID NO: 528458 - DNA, 56 bp, Artificial
  Synthetic oligonucleotide
gttgcaacaacgttagagcataggtttgatgagataccggataaagagttagcggt

SEQ ID NO: 528459 - DNA, 56 bp, Artificial
  Synthetic oligonucleotide
gctgccagattactacggaaaacaaattaggtcgaaattatatgggtatagctttg

SEQ ID NO: 528460 - DNA, 56 bp, Artificial
  Synthetic oligonucleotide
aaacgttgagttatgcggatccgaagagacacgtcgtgaagggccagcctaaagct

SEQ ID NO: 528461 - DNA, 56 bp, Artificial
  Synthetic oligonucleotide
gatataagatacatgagagacacaccaatgataacgtcaaccacaaatgaattgcg

SEQ ID NO: 528462 - DNA, 56 bp, Artificial
  Synthetic oligonucleotide
gtcaattccggatgataaggagttaaggaaagttgtgaatactttaggattgagcg

SEQ ID NO: 528463 - DNA, 56 bp, Artificial
  Synthetic oligonucleotide
cgcaaaactatggaataaacttgccgataactggttctatggatacaccatatatg

SEQ ID NO: 528464 - DNA, 56 bp, Artificial
  Synthetic oligonucleotide
cgattcccgaaggaggcattattggaatattgttgtatagttgagctaaatccagc

SEQ ID NO: 528465 - DNA, 56 bp, Artificial
  Synthetic oligonucleotide
ggaatttacacaatgcaggccttggttgggtctaacgctaaccccgtatctttggg

SEQ ID NO: 528466 - DNA, 56 bp, Artificial
  Synthetic oligonucleotide
aacaatcttactactgtcgacgctcgcggatgtttattcggtgttgaggcctgagt

SEQ ID NO: 528467 - DNA, 56 bp, Artificial
  Synthetic oligonucleotide
tacgttcatggtatgattggagcgttcgtagtaactacgcgcctcgtgagagagaa

SEQ ID NO: 528468 - DNA, 56 bp, Artificial
  Synthetic oligonucleotide
gatcacgatcgcttaactctgctgcattttattatagagtctagatatagctttgg

SEQ ID NO: 528469 - DNA, 55 bp, Artificial
  Synthetic oligonucleotide
cgtggatatggaaacacagaccaatttgctgcttatttgatcaatttggctacac

SEQ ID NO: 528470 - DNA, 55 bp, Artificial
  Synthetic oligonucleotide
gcgaaaaggttttggtgatgcactaaggagctacgctttcaaggtcgcaatcgag

SEQ ID NO: 528471 - DNA, 55 bp, Artificial
  Synthetic oligonucleotide
tcaaggggcgacagcaggcaccgttaataattgggtggtagaggtgcagaagcag

SEQ ID NO: 528472 - DNA, 55 bp, Artificial
  Synthetic oligonucleotide
cccaacgcaccgagatatggcgaagaagagctcgtgatgtgggtcgcgtacttcc

SEQ ID NO: 528473 - DNA, 55 bp, Artificial
  Synthetic oligonucleotide
cccaacggaagctagaacagaaataaatgataatgagtggatgagtacactatca

SEQ ID NO: 528474 - DNA, 55 bp, Artificial
  Synthetic oligonucleotide
gcgaaatgtgggcacgaggcgtcgcctagtaaaacgatgatgacgccgtactctg

SEQ ID NO: 528475 - DNA, 55 bp, Artificial
  Synthetic oligonucleotide
cccggttttcatcttatcgtgctgtcagggaccgttcgcttctgaaggacactgc

SEQ ID NO: 528476 - DNA, 55 bp, Artificial
  Synthetic oligonucleotide
tccaatctatttaggatcgatgcattatgatataacgtacgatactttgaagtcg

SEQ ID NO: 528477 - DNA, 55 bp, Artificial
  Synthetic oligonucleotide
tcgatgggatcatcatgtaccgtgaaagtgtgtccgctaaatacacaaacgttag

SEQ ID NO: 528478 - DNA, 55 bp, Artificial
  Synthetic oligonucleotide
gagattggcaggtctcgacatgatgattcctactgctgtatagcggaggagggtg

SEQ ID NO: 528479 - DNA, 55 bp, Artificial
  Synthetic oligonucleotide
ccccggatttcggcgataacggtcgcgtcgcgagtcacgacaaccacgtctttcg

SEQ ID NO: 528480 - DNA, 55 bp, Artificial
  Synthetic oligonucleotide
accattaacctaagatcagtaggtagagtggcgccccgaggtccgtatcgtgtag

SEQ ID NO: 528481 - DNA, 55 bp, Artificial
  Synthetic oligonucleotide
cgttgttattgtcactacagaggacgtagccaacagtaatgcggaggcgatcgcg

SEQ ID NO: 528482 - DNA, 55 bp, Artificial
  Synthetic oligonucleotide
cccactcctgatgcgccaatgtcgaatcaccaggcggccaccatgagagaactaa

SEQ ID NO: 528483 - DNA, 55 bp, Artificial
  Synthetic oligonucleotide
cgtttacaactgaggcggcaaatgagattgcgcgtgtgactggagagacctcgac

SEQ ID NO: 528484 - DNA, 55 bp, Artificial
  Synthetic oligonucleotide
acgtttgcagagattgcatacacgctgtgccaagcttcagctaacaggccctggg

SEQ ID NO: 528485 - DNA, 55 bp, Artificial
  Synthetic oligonucleotide
tccacaaggcgggccttatcatttccaggctacatatatgttaacgttaagtata

SEQ ID NO: 528486 - DNA, 55 bp, Artificial
  Synthetic oligonucleotide
tcgagtcctggatacaatatctgcgtaacgcttaaaggtgacacttagcgagggg

SEQ ID NO: 528487 - DNA, 55 bp, Artificial
  Synthetic oligonucleotide
gcgacaataggggtgttggcgacgccagagataccgtatacaatggagtcagcga

SEQ ID NO: 528488 - DNA, 55 bp, Artificial
  Synthetic oligonucleotide
accattgatcctacgaaagttgtaactgaagatgacatgatccattttgcacggt

SEQ ID NO: 528489 - DNA, 55 bp, Artificial
  Synthetic oligonucleotide
tcaatgtattggatcaagaacataccaaattgaagatgacgggtcgaagtcagcg

SEQ ID NO: 528490 - DNA, 55 bp, Artificial
  Synthetic oligonucleotide
acccatcatggaaggggactgcgcggctggcgactcagcggaaggagatcagagc

SEQ ID NO: 528491 - DNA, 55 bp, Artificial
  Synthetic oligonucleotide
tcagttttctctattcgtcaccttgcccggcaagagactcaaatcagctgacgtc

SEQ ID NO: 528492 - DNA, 55 bp, Artificial
  Synthetic oligonucleotide
cccctaatttgtctctcgctatacgttaattccaccctagacctggttgtccatg

SEQ ID NO: 528493 - DNA, 55 bp, Artificial
  Synthetic oligonucleotide
cgtgagtttcttgacaaactgcgcgtactgtcagtgtcaccgaaatattctgacc

SEQ ID NO: 528494 - DNA, 55 bp, Artificial
  Synthetic oligonucleotide
tccaacgatgaaaattgcgttgaaaacatcgaaatgctcgtacaaggtggtgaag

SEQ ID NO: 528495 - DNA, 55 bp, Artificial
  Synthetic oligonucleotide
tcgtaagctatcttcccatttagcagctatttacaatctcgcacctttgcatcca

SEQ ID NO: 528496 - DNA, 55 bp, Artificial
  Synthetic oligonucleotide
cgtgatcgcaacatcgtagaagcacgtgtgaagaggtctggtgatgaaaattggc

SEQ ID NO: 528497 - DNA, 55 bp, Artificial
  Synthetic oligonucleotide
tcgggcgaaacagcggttacattgcagagtatctgtcgcgactgagaacgcggtc

SEQ ID NO: 528498 - DNA, 55 bp, Artificial
  Synthetic oligonucleotide
acattgggagtaccagttgtataagagtgaatggaaggttacccttgagcgagga

SEQ ID NO: 528499 - DNA, 55 bp, Artificial
  Synthetic oligonucleotide
cccgtttcgtcctaaccatcgatggggagacatcaggttcttgcgtctggtgtgg

SEQ ID NO: 528500 - DNA, 55 bp, Artificial
  Synthetic oligonucleotide
gcgacgccggagataccttacacgatggagtcggctaatgagattgcgagaatga

SEQ ID NO: 528501 - DNA, 55 bp, Artificial
  Synthetic oligonucleotide
accaacaacctggttacgctcgtcgcattaagccgtttgccaacggagattggac

SEQ ID NO: 528502 - DNA, 55 bp, Artificial
  Synthetic oligonucleotide
cgttgttagttgccgctgtcgtagcgttgttgacatcggtatgcacgctttcaag

SEQ ID NO: 528503 - DNA, 55 bp, Artificial
  Synthetic oligonucleotide
tcggaatcagcagggctgtcgagatccaaaccactaacaacgtgcacttagcgcc

SEQ ID NO: 528504 - DNA, 55 bp, Artificial
  Synthetic oligonucleotide
tcggaaaagcggcagaacgattcgttgaaagcgaactcgggagcgctaccataga

SEQ ID NO: 528505 - DNA, 55 bp, Artificial
  Synthetic oligonucleotide
cgtgcattcagagagggcatcgacggatgttccattcgaactagtcggtcaacgc

SEQ ID NO: 528506 - DNA, 55 bp, Artificial
  Synthetic oligonucleotide
gcgacgcaattgcttatttgatggagtttgtgcaaagcagcattttgaagaggtg

SEQ ID NO: 528507 - DNA, 55 bp, Artificial
  Synthetic oligonucleotide
acgcagaacgcaacattggatcactaacgactgaattagcgacgctcacgttacg

SEQ ID NO: 528508 - DNA, 55 bp, Artificial
  Synthetic oligonucleotide
accaataggcgcaatatgggcttggagcctagcatttatgaggtgatgaagaagt

SEQ ID NO: 528509 - DNA, 55 bp, Artificial
  Synthetic oligonucleotide
acgctgttcaatgaacctgagcgccaggacccaggagcccctcacagtctttgcg

SEQ ID NO: 528510 - DNA, 55 bp, Artificial
  Synthetic oligonucleotide
tcgctcgcaaaactgaacgccaccagactacaggctttcgtgaacgccaatccgg

SEQ ID NO: 528511 - DNA, 55 bp, Artificial
  Synthetic oligonucleotide
ccattgggagagttttcacctggacgaatttcgagaaccatgatgcatagcgcgc

SEQ ID NO: 528512 - DNA, 55 bp, Artificial
  Synthetic oligonucleotide
tcaaatctacactcaatcgcgacgcgcgagtgctttctcaacgcctcacacctgg

SEQ ID NO: 528513 - DNA, 55 bp, Artificial
  Synthetic oligonucleotide
cccgtgttagtatattcagatggtatcatgatatggcctgcgcaggtaggagcta

SEQ ID NO: 528514 - DNA, 55 bp, Artificial
  Synthetic oligonucleotide
actacatccagcctatcctgtccgcgttcgcccgtactctctcccgcgtctcacc

SEQ ID NO: 528515 - DNA, 55 bp, Artificial
  Synthetic oligonucleotide
cgtgcccataatgcacttggcagcagacctggactgcatgacattagctctaccc

SEQ ID NO: 528516 - DNA, 55 bp, Artificial
  Synthetic oligonucleotide
cgtgcgttgcttatgctagagtgctcgtaccccgatgtgcgcatattagatggga

SEQ ID NO: 528517 - DNA, 55 bp, Artificial
  Synthetic oligonucleotide
cccgtacttatacataccagtgaactatggtcagatggtgcaaccaatcaggata

SEQ ID NO: 528518 - DNA, 55 bp, Artificial
  Synthetic oligonucleotide
cccaaacgttgtcgcaatggaggtgtgcttgcccaacggtcatcagatcgtggac

SEQ ID NO: 528519 - DNA, 55 bp, Artificial
  Synthetic oligonucleotide
acgcttctaataatcgcgtccagatggctgaacgttttggaatgcgcacagggag

SEQ ID NO: 528520 - DNA, 55 bp, Artificial
  Synthetic oligonucleotide
cgttacacatcgattcgaggaaagcggataccacgtcatatcatacgattgctgt

SEQ ID NO: 528521 - DNA, 55 bp, Artificial
  Synthetic oligonucleotide
ccccacatcgcgtcatctcagactacagttaatttatacattcgtaagcatttgc

SEQ ID NO: 528522 - DNA, 55 bp, Artificial
  Synthetic oligonucleotide
cgttactggcgatgaacggtacgctcaaccgattttcagacggtgcagcttaacg

SEQ ID NO: 528523 - DNA, 55 bp, Artificial
  Synthetic oligonucleotide
acgattcgattattgattcgcagatcgtagaggaacttggagaattactcacaga

SEQ ID NO: 528524 - DNA, 55 bp, Artificial
  Synthetic oligonucleotide
tcccttacgagacatctttcggccagatgctggaaaatgcccgcacgttcgcctc

SEQ ID NO: 528525 - DNA, 55 bp, Artificial
  Synthetic oligonucleotide
tcacttcacccacgggagacccaaattggaaggaagtggcgcgcgaggcttcgaa

SEQ ID NO: 528526 - DNA, 55 bp, Artificial
  Synthetic oligonucleotide
cgtttcttctaaccattggcaaccagcttcaaagatatcagtgtgtaaatggtgt

SEQ ID NO: 528527 - DNA, 55 bp, Artificial
  Synthetic oligonucleotide
cccgagcaattgaataagactgaccccgagatgaactattaccttctagcgactt

SEQ ID NO: 528528 - DNA, 55 bp, Artificial
  Synthetic oligonucleotide
tcatatgggtatctctagaagatcacatcaaattaggttttctgaatctgcaaca

SEQ ID NO: 528529 - DNA, 55 bp, Artificial
  Synthetic oligonucleotide
acggtacgaaggttgatgtttacagggaagaggcgtcagcgcagataatcgagat

SEQ ID NO: 528530 - DNA, 55 bp, Artificial
  Synthetic oligonucleotide
cccgactggaaagatctaggcgcgttcctagagataattctgaatgggacggagt

SEQ ID NO: 528531 - DNA, 55 bp, Artificial
  Synthetic oligonucleotide
tccagtagaagcagagacagaaatagcagatagttcatggaaggatactttatcg

SEQ ID NO: 528532 - DNA, 55 bp, Artificial
  Synthetic oligonucleotide
cccgacgcgtgatcgcaacatcgtggaagcacgtgtgaagaggtctggtgatgaa

SEQ ID NO: 528533 - DNA, 55 bp, Artificial
  Synthetic oligonucleotide
gatggcttcttccattatcaactcttcctttgaagctgcagtagttgctgcaact

SEQ ID NO: 528534 - DNA, 55 bp, Artificial
  Synthetic oligonucleotide
acgggcgtggtatgagtggagcgtaagacctgaatataaaccgcgagatttggag

SEQ ID NO: 528535 - DNA, 55 bp, Artificial
  Synthetic oligonucleotide
cacgtgaagtgacaaagaacatagacgtcaaggcattcgaatcgattgttgggcg

SEQ ID NO: 528536 - DNA, 55 bp, Artificial
  Synthetic oligonucleotide
acgagaaaacttttgttcagttaaatcaacccatgagtatcgtctttcttggtgc

SEQ ID NO: 528537 - DNA, 55 bp, Artificial
  Synthetic oligonucleotide
gccttcatggtttaaaagccttaatccaatgcttggcgttgtcaacttgggagca

SEQ ID NO: 528538 - DNA, 55 bp, Artificial
  Synthetic oligonucleotide
acggcagagtatacggtacacgcggacgtaagcatcatatgacatccagactcgt

SEQ ID NO: 528539 - DNA, 55 bp, Artificial
  Synthetic oligonucleotide
tccatatgaatcaaaagaagtgactgcatcattgtgagaggttgagctgccgtcg

SEQ ID NO: 528540 - DNA, 55 bp, Artificial
  Synthetic oligonucleotide
acgagaactagagtaaatgggttatatggactaccagcagccaatccaaacaatc

SEQ ID NO: 528541 - DNA, 55 bp, Artificial
  Synthetic oligonucleotide
acccgagccgcggcctggggatcccttctgcgattccgtccgtcaagaaaaccat

SEQ ID NO: 528542 - DNA, 55 bp, Artificial
  Synthetic oligonucleotide
tcacaaaactaaatagagagttgttgagaattggggcaaactcagtgtggactcc

SEQ ID NO: 528543 - DNA, 55 bp, Artificial
  Synthetic oligonucleotide
accgccaagttatgtaccaacggctccaccgcagacagcaatgccgaaagtagcc

SEQ ID NO: 528544 - DNA, 55 bp, Artificial
  Synthetic oligonucleotide
cccgcggacgttcgattccaggtcaaacttgaagtggggtgttatggtttacgac

SEQ ID NO: 528545 - DNA, 55 bp, Artificial
  Synthetic oligonucleotide
acgccgattgctgaacattcagatttcctctctcaatgcgcatataacgagtctt

SEQ ID NO: 528546 - DNA, 55 bp, Artificial
  Synthetic oligonucleotide
gatgggaatgatgtaattagtatgatgctgtcggctgatagcgtcgaagcaacac

SEQ ID NO: 528547 - DNA, 55 bp, Artificial
  Synthetic oligonucleotide
acgtttagtgtggtccgctcccacgcttgatggactagttgtggccccacctcag

SEQ ID NO: 528548 - DNA, 55 bp, Artificial
  Synthetic oligonucleotide
cgtttatgtcgctatcaagccaaaagtcaggaatagcagacgaaattgcagcgtc

SEQ ID NO: 528549 - DNA, 55 bp, Artificial
  Synthetic oligonucleotide
tccttggactgtccttccctcctcgactggctctggctcaatgtcaattccatca

SEQ ID NO: 528550 - DNA, 55 bp, Artificial
  Synthetic oligonucleotide
cacgtgcgtcgacggatccaatatctaggatacgtgccggaggatgttatcgacg

SEQ ID NO: 528551 - DNA, 55 bp, Artificial
  Synthetic oligonucleotide
acgttgttggaagaaataggacggaaggataagcgtatcgagccagttaattcgg

SEQ ID NO: 528552 - DNA, 55 bp, Artificial
  Synthetic oligonucleotide
gcgaatcctcaactaaagaccaaaaggatgatgaatcacagaaacccacctccac

SEQ ID NO: 528553 - DNA, 55 bp, Artificial
  Synthetic oligonucleotide
tccttaggatcactcagggactcgatgatgctaacaaacgaatcagcgctcttga

SEQ ID NO: 528554 - DNA, 55 bp, Artificial
  Synthetic oligonucleotide
cccgcgctacgacgccaatccttggcaagatgcctgctgtcttctctgggatgct

SEQ ID NO: 528555 - DNA, 55 bp, Artificial; identical to SEQ ID NO: 359884
  Synthetic oligonucleotide

SEQ ID NO: 528556 - DNA, 55 bp, Artificial
  Synthetic oligonucleotide
gatggttcaagatgtatcaaatgatgtgagagaaacgtatgcacggatgaatgct

SEQ ID NO: 528557 - DNA, 55 bp, Artificial
  Synthetic oligonucleotide
cccagtttatggatcaatatcacgttgtatctacgtatctaataccacaaccagg

SEQ ID NO: 528558 - DNA, 55 bp, Artificial; identical to SEQ ID NO: 315361
  Synthetic oligonucleotide

SEQ ID NO: 528559 - DNA, 55 bp, Artificial
  Synthetic oligonucleotide
tcacctcgccaccgcgcgtcgtctatgattcgatggaagcggacatcctcgccgt

SEQ ID NO: 528560 - DNA, 55 bp, Artificial
  Synthetic oligonucleotide
caaagactgatatcgaagaatacttgttgccaggatggaaattaacatacgtggg

SEQ ID NO: 528561 - DNA, 55 bp, Artificial
  Synthetic oligonucleotide
acgtattaggtactggggaggagctaccagacccattgagtccgggagaacgggg

SEQ ID NO: 528562 - DNA, 55 bp, Artificial
  Synthetic oligonucleotide
cccgcctatgccgaccttgcttcacgtggggttatccatatcgcttttccgcccc

SEQ ID NO: 528563 - DNA, 55 bp, Artificial
  Synthetic oligonucleotide
tcacgattggcgatccggctgtccctgggtaaacgcctccatcttctcagcgccg

SEQ ID NO: 528564 - DNA, 55 bp, Artificial
  Synthetic oligonucleotide
gcctcaaggccggagctgcagcaagcgctgctacgtggtcccatcgctatgcaga

SEQ ID NO: 528565 - DNA, 55 bp, Artificial
  Synthetic oligonucleotide
acgcggtgcgcggcaacggaagcgtggccgaacgcgtccacaacgtgctcgcaga

SEQ ID NO: 528566 - DNA, 55 bp, Artificial
  Synthetic oligonucleotide
gcctcaaggtcagttatggctagtgaaattcataagaaacgtctacagcgttcgc

SEQ ID NO: 528567 - DNA, 55 bp, Artificial
  Synthetic oligonucleotide
cacgtctatgacccgattgcaccgcagtgttcagatgcgaatgtcatcgtacata

SEQ ID NO: 528568 - DNA, 55 bp, Artificial
  Synthetic oligonucleotide
tacgataatgagcatgaacgctataacgaaaggggtgtgatactattagaacacg

SEQ ID NO: 528569 - DNA, 55 bp, Artificial
  Synthetic oligonucleotide
ccagaagaacctgggccctcctttactgttaacaatccgcctgcgttgcttcctt

SEQ ID NO: 528570 - DNA, 55 bp, Artificial
  Synthetic oligonucleotide
ccagaaccgaagggatacgtcttggaaataaatgacgcgggtgcgtatcgcattc

SEQ ID NO: 528571 - DNA, 55 bp, Artificial
  Synthetic oligonucleotide
ccagaaatacccttcactacagaggcggcgaatgaaatcgcacgcgttactggtg

SEQ ID NO: 528572 - DNA, 55 bp, Artificial
  Synthetic oligonucleotide
ctcgtattctgaaagacatgccattggaattaagtatgatcaggaaaccaagaca

SEQ ID NO: 528573 - DNA, 55 bp, Artificial
  Synthetic oligonucleotide
caatggaggcagcgaatgacattgctaggatgagtggagagactggaacttgggg

SEQ ID NO: 528574 - DNA, 55 bp, Artificial
  Synthetic oligonucleotide
ctctacataaagcttcactcccaacaatgaagattgctcttaaaacatcaaggtg

SEQ ID NO: 528575 - DNA, 55 bp, Artificial
  Synthetic oligonucleotide
ctctccacaataggtaggagaatgtataacatgtacgaggaaccaaaagatgagg

SEQ ID NO: 528576 - DNA, 55 bp, Artificial
  Synthetic oligonucleotide
gattcgtcagcaagattatgttgacgtgcagtttgcagatcgtgtcacagctcac

SEQ ID NO: 528577 - DNA, 55 bp, Artificial
  Synthetic oligonucleotide
gcgcacagaaacgagcaagggatgcaagcgagatttcgaagaaccttagcgacga

SEQ ID NO: 528578 - DNA, 55 bp, Artificial
  Synthetic oligonucleotide
agatcatataaggcgaataaggatgaagcacggtactaagtatcagcgtcaagcg

SEQ ID NO: 528579 - DNA, 55 bp, Artificial
  Synthetic oligonucleotide
gcattggggttagcgcaagaagcgagtgggcgtacgttaacagaggcgtatcgtg

SEQ ID NO: 528580 - DNA, 55 bp, Artificial
  Synthetic oligonucleotide
ctcttcagattccatttcgaccaaaccatcgatggggagatgttaggtttctacg

SEQ ID NO: 528581 - DNA, 55 bp, Artificial
  Synthetic oligonucleotide
agatgacttcgtggcgaggatgtgcagcaccttagaatgcgagtatgtcgtagtg

SEQ ID NO: 528582 - DNA, 55 bp, Artificial
  Synthetic oligonucleotide
tacataaggcctcggttccaaccatgaagattgctcttaaaacgtcaaagtgttc

SEQ ID NO: 528583 - DNA, 55 bp, Artificial
  Synthetic oligonucleotide
tacagctgatccgacgacagcaccacaaactgagagaatgatgagagtaaattgg

SEQ ID NO: 528584 - DNA, 55 bp, Artificial
  Synthetic oligonucleotide
tacagatgatgataccattcagcgagagagtgtttcggatggcttccgcatttgc

SEQ ID NO: 528585 - DNA, 55 bp, Artificial
  Synthetic oligonucleotide
ctctttgacgtctactgcgcgatgtcacccgaaatcaacgtcccagccgcggccc

SEQ ID NO: 528586 - DNA, 55 bp, Artificial
  Synthetic oligonucleotide
gagtcgagggtcacggcgcttgaagaaacgtcacagatacactctgatacaatcc

SEQ ID NO: 528587 - DNA, 55 bp, Artificial
  Synthetic oligonucleotide
ccactgcgtgtcgcatttccatgcaaacgagtcgttcttcctagggtttgatttg

SEQ ID NO: 528588 - DNA, 55 bp, Artificial
  Synthetic oligonucleotide
agacggagaatggtactggagctgacgtttgccataaggagagtagaagcgacgc

SEQ ID NO: 528589 - DNA, 55 bp, Artificial
  Synthetic oligonucleotide
caatggagtcagcgaatgaaattgctcggatgagtggggagacagggacttgggg

SEQ ID NO: 528590 - DNA, 55 bp, Artificial
  Synthetic oligonucleotide
ctcccttctgcggctgggcgcgtggactgacctcggagttttcttccgtgagatg

SEQ ID NO: 528591 - DNA, 55 bp, Artificial
  Synthetic oligonucleotide
ctccgctgcatgtgggttctgtcccttacgagacatctttcggccagatgctgga

SEQ ID NO: 528592 - DNA, 55 bp, Artificial
  Synthetic oligonucleotide
ccagatagagtgaagctccaagatcactatgtcgtgggattggcaggtcccggag

SEQ ID NO: 528593 - DNA, 55 bp, Artificial
  Synthetic oligonucleotide
tactctgtactattatcaacagacagatgaagccaataagtggatttccatggga

SEQ ID NO: 528594 - DNA, 55 bp, Artificial
  Synthetic oligonucleotide
agactactctctgggttcctactatgagacccgatccggcgtgatgggcaggacg

SEQ ID NO: 528595 - DNA, 55 bp, Artificial
  Synthetic oligonucleotide
gcgcaaccatcggagtaaacgcaactctcgtggaactgggcacctccattcgtgc

SEQ ID NO: 528596 - DNA, 55 bp, Artificial
  Synthetic oligonucleotide
tactagaggatccagggatggcgtattttccttatattgcatctgtcctgacggt

SEQ ID NO: 528597 - DNA, 55 bp, Artificial
  Synthetic oligonucleotide
tactaacggacaccataagttggtccccatcaatacccacctacattgtgccacc

SEQ ID NO: 528598 - DNA, 55 bp, Artificial
  Synthetic oligonucleotide
gcgcaatggcgaacgtttggcgagtgagacttgcagattcactatcatcacccac

SEQ ID NO: 528599 - DNA, 55 bp, Artificial
  Synthetic oligonucleotide
tacgttgctattggtgttcatggtgtttgtaggaacgatacagtaacaacaactg

SEQ ID NO: 528600 - DNA, 55 bp, Artificial
  Synthetic oligonucleotide
ctcgaacacgagtcgtgcccgcgtgcggacctcttttatctgactaacaggagaa

SEQ ID NO: 528601 - DNA, 55 bp, Artificial
  Synthetic oligonucleotide
ccagagataccatttacaactgaggcggcgaatgagattgcgcgtgtaactggag

SEQ ID NO: 528602 - DNA, 55 bp, Artificial
  Synthetic oligonucleotide
tacggcgaatcggtgaaacaagctgtgctactgaacgttctggggacaggggacg

SEQ ID NO: 528603 - DNA, 55 bp, Artificial
  Synthetic oligonucleotide
agagaattcacccaaaatgcgttcagcgatttcgcgtaccacgaatgcagacccc

SEQ ID NO: 528604 - DNA, 55 bp, Artificial
  Synthetic oligonucleotide
tacgcgcaagggaaacatcagtaatgctagtgtcaaattcaatcgatgatgtggc

SEQ ID NO: 528605 - DNA, 55 bp, Artificial
  Synthetic oligonucleotide
agagataaaggaagctgcttcgagcgtgggtagattggagagattgcgtgaggcg

SEQ ID NO: 528606 - DNA, 55 bp, Artificial
  Synthetic oligonucleotide
ctcgagacagaggaggtgtatcaaccaggaagatggttcatgagagcagctcaag

SEQ ID NO: 528607 - DNA, 55 bp, Artificial
  Synthetic oligonucleotide
ctcgaggaatccttctataagatcagtcgggtcatccatatcagcatggacggac

SEQ ID NO: 528608 - DNA, 55 bp, Artificial
  Synthetic oligonucleotide
tacgcaaagcataccagagagtatgcagaattctactcgcagtcaaatcagctac

SEQ ID NO: 528609 - DNA, 55 bp, Artificial
  Synthetic oligonucleotide
taagcgtaacgcgggaggggacagcgagggtccgaagtggtggaggagtcaagag
